United States Patent Application Publication US 2005/0244851 A1 - sequence listing, part 155

SEQ ID NO: 6052509 - DNA, 25 bp, Homo sapien
cttgtacaaaagcttgaacttgttt

SEQ ID NO: 6052510 - DNA, 25 bp, Homo sapien
cggatgccctttcatgtctaaaaga

SEQ ID NO: 6052511 - DNA, 25 bp, Homo sapien
tcaatgtgccgtgaatttcaccttc

SEQ ID NO: 6052512 - DNA, 25 bp, Homo sapien
tatcttcattttgaagggtaacaga

SEQ ID NO: 6052513 - DNA, 25 bp, Homo sapien
tacgtcttcaggactttagggagcc

SEQ ID NO: 6052514 - DNA, 25 bp, Homo sapien
taagtgctgtcacttttaaactgga

SEQ ID NO: 6052515 - DNA, 25 bp, Homo sapien
gttgcctcttataatgccgatatga

SEQ ID NO: 6052516 - DNA, 25 bp, Homo sapien
ccaatgctgaccgattatggaggcg

SEQ ID NO: 6052517 - DNA, 25 bp, Homo sapien
tcactttatcttcattttgaagggt

SEQ ID NO: 6052518 - DNA, 25 bp, Homo sapien
tttcgctgctccacccggttatgag

SEQ ID NO: 6052519 - DNA, 25 bp, Homo sapien
cttgtttcagttcaaaggcaggctc

SEQ ID NO: 6052520 - DNA, 25 bp, Homo sapien
tatcgtctgtttcggcgacgtttta

SEQ ID NO: 6052521 - DNA, 25 bp, Homo sapien
aactggataaacggacgttctgtat

SEQ ID NO: 6052522 - DNA, 25 bp, Homo sapien
aaccaatatcgtctgtttcggcgac

SEQ ID NO: 6052523 - DNA, 25 bp, Homo sapien
ctgaccgattatggaggcgacggca

SEQ ID NO: 6052524 - DNA, 25 bp, Homo sapien
ttcaggactttagggagccaatgct

SEQ ID NO: 6052525 - DNA, 25 bp, Homo sapien
cactaaatacagatgatctgtcatt

SEQ ID NO: 6052526 - DNA, 25 bp, Homo sapien
gcaggaaatttcagtatccactaaa

SEQ ID NO: 6052527 - DNA, 25 bp, Homo sapien
agtatccactaaatacagatgatct

SEQ ID NO: 6052528 - DNA, 25 bp, Homo sapien
gcacgtttcaatctgatcaaccaat

SEQ ID NO: 6052529 - DNA, 25 bp, Homo sapien
agcttttcagcatttcgctgctcca

SEQ ID NO: 6052530 - DNA, 25 bp, Homo sapien
ctgtttgcacgtttcaatctgatca

SEQ ID NO: 6052531 - DNA, 25 bp, Homo sapien
caggctcataacctaataaccatgt

SEQ ID NO: 6052532 - DNA, 25 bp, Homo sapien
ctgtcacttttaaactggataaacg

SEQ ID NO: 6052533 - DNA, 25 bp, Homo sapien
cttgaacttgtttcagttcaaaggc

SEQ ID NO: 6052534 - DNA, 25 bp, Homo sapien
tatcccgaccgatcggatgcccttt

SEQ ID NO: 6052535 - DNA, 25 bp, Homo sapien
ggcattttattcactttatcttcat

SEQ ID NO: 6052536 - DNA, 25 bp, Homo sapien
ttttaaatttttgatgccaccagtg

SEQ ID NO: 6052537 - DNA, 25 bp, Homo sapien
gcataaccgattccgtgcagcgcca

SEQ ID NO: 6052538 - DNA, 25 bp, Homo sapien
acccggttatgagcgagatctttgc

SEQ ID NO: 6052539 - DNA, 25 bp, Homo sapien
gaacctgatcctcatacaagctttt

SEQ ID NO: 6052540 - DNA, 25 bp, Homo sapien
tgaaaataagtgctgtcacttttaa

SEQ ID NO: 6052541 - DNA, 25 bp, Homo sapien
gcgacgttttaaatttttgatgcca

SEQ ID NO: 6052542 - DNA, 25 bp, Homo sapien
ctcagggttgcctcttataatgccg

SEQ ID NO: 6052543 - DNA, 25 bp, Homo sapien
acggcaaaatggcataaccgattcc

SEQ ID NO: 6052544 - DNA, 25 bp, Homo sapien
ccctttcatgtctaaaagaggcatt

SEQ ID NO: 6052545 - DNA, 25 bp, Homo sapien
cgatatgaacctgatcctcatacaa

SEQ ID NO: 6052546 - DNA, 25 bp, Homo sapien
aaaatggcataaccgattccgtgca

SEQ ID NO: 6052547 - DNA, 25 bp, Homo sapien
tacttttccacatacgtcttcagga

SEQ ID NO: 6052548 - DNA, 25 bp, Homo sapien
cataacctaataaccatgtatcccg

SEQ ID NO: 6052549 - DNA, 25 bp, Homo sapien
aaaagaggcattttattcactttat

SEQ ID NO: 6052550 - DNA, 25 bp, Homo sapien
tgatgccaccagtgctgaatttcct

SEQ ID NO: 6052551 - DNA, 25 bp, Homo sapien
gattatggaggcgacggcaagcttc

SEQ ID NO: 6052552 - DNA, 25 bp, Homo sapien
taacagacggcaaaatggcataacc

SEQ ID NO: 6052553 - DNA, 25 bp, Homo sapien
gaccgatcggatgccctttcatgtc

SEQ ID NO: 6052554 - DNA, 25 bp, Homo sapien
tcagttcaaaggcaggctcataacc

SEQ ID NO: 6052555 - DNA, 25 bp, Homo sapien
aatttttgatgccaccagtgctgaa

SEQ ID NO: 6052556 - DNA, 25 bp, Homo sapien
accatgtatcccgaccgatcggatg

SEQ ID NO: 6052557 - DNA, 25 bp, Homo sapien
tgctccacccggttatgagcgagat

SEQ ID NO: 6052558 - DNA, 25 bp, Homo sapien
agggagccaatgctgaccgattatg

SEQ ID NO: 6052559 - DNA, 25 bp, Homo sapien
tttgcgccccttccactcagggttg

SEQ ID NO: 6052560 - DNA, 25 bp, Homo sapien
gatcctcatacaagcttttcagcat

SEQ ID NO: 6052561 - DNA, 25 bp, Homo sapien
caaaagcttgaacttgtttcagttc

SEQ ID NO: 6052562 - DNA, 25 bp, Homo sapien
tatgggcaatatcttcgatgcagga

SEQ ID NO: 6052563 - DNA, 25 bp, Homo sapien
ggataaacggacgttctgtatgggc

SEQ ID NO: 6052564 - DNA, 25 bp, Homo sapien
catacaagcttttcagcatttcgct

SEQ ID NO: 6052565 - DNA, 25 bp, Homo sapien
caaaggcaggctcataacctaataa

SEQ ID NO: 6052566 - DNA, 25 bp, Homo sapien
tgatctgtcattaagtaatctttgc

SEQ ID NO: 6052567 - DNA, 25 bp, Homo sapien
ttcaatctgatcaaccaatatcgtc

SEQ ID NO: 6052568 - DNA, 25 bp, Homo sapien
ttcgatgcaggaaatttcagtatcc

SEQ ID NO: 6052569 - DNA, 25 bp, Homo sapien
tcagcatttcgctgctccacccggt

SEQ ID NO: 6052570 - DNA, 25 bp, Homo sapien
tgccgtgaatttcaccttcaagctc

SEQ ID NO: 6052571 - DNA, 25 bp, Homo sapien
ctgatcaaccaatatcgtctgtttc

SEQ ID NO: 6052572 - DNA, 25 bp, Homo sapien
tgtcattaagtaatctttgcgcccc

SEQ ID NO: 6052573 - DNA, 25 bp, Homo sapien
ctaataaccatgtatcccgaccgat

SEQ ID NO: 6052574 - DNA, 25 bp, Homo sapien
tccacatacgtcttcaggactttag

SEQ ID NO: 6052575 - DNA, 25 bp, Homo sapien
taatgccgatatgaacctgatcctc

SEQ ID NO: 6052576 - DNA, 25 bp, Homo sapien
cgacggcaagcttcaatgtgccgtg

SEQ ID NO: 6052577 - DNA, 25 bp, Homo sapien
cgattccgtgcagcgccatctgttt

SEQ ID NO: 6052578 - DNA, 25 bp, Homo sapien
tggaggcgacggcaagcttcaatgt

SEQ ID NO: 6052579 - DNA, 25 bp, Homo sapien
cttccactcagggttgcctcttata

SEQ ID NO: 6052580 - DNA, 25 bp, Homo sapien
ctttgcattcggatacttttccaca

SEQ ID NO: 6052581 - DNA, 25 bp, Homo sapien
cattttgaagggtaacagacggcaa

SEQ ID NO: 6052582 - DNA, 25 bp, Homo sapien
gaagggtaacagacggcaaaatggc

SEQ ID NO: 6052583 - DNA, 25 bp, Homo sapien
catgtctaaaagaggcattttattc

SEQ ID NO: 6052584 - DNA, 25 bp, Homo sapien
aatttcagtatccactaaatacaga

SEQ ID NO: 6052585 - DNA, 25 bp, Homo sapien
actttagggagccaatgctgaccga

SEQ ID NO: 6052586 - DNA, 25 bp, Homo sapien
cgagatctttgcattcggatacttt

SEQ ID NO: 6052587 - DNA, 25 bp, Homo sapien
acggacgttctgtatgggcaatatc

SEQ ID NO: 6052588 - DNA, 25 bp, Homo sapien
taagtaatctttgcgccccttccac

SEQ ID NO: 6052589 - DNA, 25 bp, Homo sapien
ccttctgacgcagtctgaagcgctt

SEQ ID NO: 6052590 - DNA, 25 bp, Homo sapien
cctccggctgagacatgagcagctt

SEQ ID NO: 6052591 - DNA, 25 bp, Homo sapien
agcgcttccttaatttttcgcagtg

SEQ ID NO: 6052592 - DNA, 25 bp, Homo sapien
ggcatataaatatccagcagaagca

SEQ ID NO: 6052593 - DNA, 25 bp, Homo sapien
gaattaatgccagtcggcaaatcct

SEQ ID NO: 6052594 - DNA, 25 bp, Homo sapien
agaagcaaatcagccttgtgttcct

SEQ ID NO: 6052595 - DNA, 25 bp, Homo sapien
caagctgtttaatcaatctctcatg

SEQ ID NO: 6052596 - DNA, 25 bp, Homo sapien
cttcctgcaaatgacgggtttctgt

SEQ ID NO: 6052597 - DNA, 25 bp, Homo sapien
cgataatcttgaatccatcaagctg

SEQ ID NO: 6052598 - DNA, 25 bp, Homo sapien
cagttgttcgtgacgcccccatttt

SEQ ID NO: 6052599 - DNA, 25 bp, Homo sapien
atttttcgcagtgtaatcgaattaa

SEQ ID NO: 6052600 - DNA, 25 bp, Homo sapien
ccttgtgttccttcaaaagcgccaa

SEQ ID NO: 6052601 - DNA, 25 bp, Homo sapien
cgcagtgtaatcgaattaatgccag

SEQ ID NO: 6052602 - DNA, 25 bp, Homo sapien
cagctgttacgggtttgatcaaata

SEQ ID NO: 6052603 - DNA, 25 bp, Homo sapien
tcacaccgttcccaaaaatatggtc

SEQ ID NO: 6052604 - DNA, 25 bp, Homo sapien
gctgtcttcacaccgttcccaaaaa

SEQ ID NO: 6052605 - DNA, 25 bp, Homo sapien
ccacttcaggaaatcggcttcgtat

SEQ ID NO: 6052606 - DNA, 25 bp, Homo sapien
tctgccggcaaagctgtcttcacac

SEQ ID NO: 6052607 - DNA, 25 bp, Homo sapien
cgcccttagcgcttcctgcaaatga

SEQ ID NO: 6052608 - DNA, 25 bp, Homo sapien
cgttcccaaaaatatggtcgatcat

SEQ ID NO: 6052609 - DNA, 25 bp, Homo sapien
ttcgtatatcaggaatcaacgcggt

SEQ ID NO: 6052610 - DNA, 25 bp, Homo sapien
gaagcagcacctgcctgaacttgtc

SEQ ID NO: 6052611 - DNA, 25 bp, Homo sapien
agttcctccgctgtcaatccttctg

SEQ ID NO: 6052612 - DNA, 25 bp, Homo sapien
ggattggctgacctccggctgagac

SEQ ID NO: 6052613 - DNA, 25 bp, Homo sapien
aattcccgcccttagcgcttcctgc

SEQ ID NO: 6052614 - DNA, 25 bp, Homo sapien
ggcgggcagttgttcgtgacgcccc

SEQ ID NO: 6052615 - DNA, 25 bp, Homo sapien
ggcaaagctgtcttcacaccgttcc

SEQ ID NO: 6052616 - DNA, 25 bp, Homo sapien
gtaatcgaattaatgccagtcggca

SEQ ID NO: 6052617 - DNA, 25 bp, Homo sapien
taaatatccagcagaagcaaatcag

SEQ ID NO: 6052618 - DNA, 25 bp, Homo sapien
taatcataatgtccacttcaggaaa

SEQ ID NO: 6052619 - DNA, 25 bp, Homo sapien
gcacctgcctgaacttgtcagctgt

SEQ ID NO: 6052620 - DNA, 25 bp, Homo sapien
gtctgaagcgcttccttaatttttc

SEQ ID NO: 6052621 - DNA, 25 bp, Homo sapien
ttgccgctgtgataatcataatgtc

SEQ ID NO: 6052622 - DNA, 25 bp, Homo sapien
tgtctcttttgcgttagccgccttg

SEQ ID NO: 6052623 - DNA, 25 bp, Homo sapien
gcaaatgacgggtttctgttgccgc

SEQ ID NO: 6052624 - DNA, 25 bp, Homo sapien
aaatcctctgccggcaaagctgtct

SEQ ID NO: 6052625 - DNA, 25 bp, Homo sapien
ttttgcgttagccgccttgccgata

SEQ ID NO: 6052626 - DNA, 25 bp, Homo sapien
gtcaatccttctgacgcagtctgaa

SEQ ID NO: 6052627 - DNA, 25 bp, Homo sapien
tcccgtattcaagctcggctcttgc

SEQ ID NO: 6052628 - DNA, 25 bp, Homo sapien
aatcagccttgtgttccttcaaaag

SEQ ID NO: 6052629 - DNA, 25 bp, Homo sapien
gttccttcaaaagcgccaatgtctc

SEQ ID NO: 6052630 - DNA, 25 bp, Homo sapien
tccttttttctttatactgaagcag

SEQ ID NO: 6052631 - DNA, 25 bp, Homo sapien
tagtgggcaattcccgcccttagcg

SEQ ID NO: 6052632 - DNA, 25 bp, Homo sapien
cgataatcccgtattcaagctcggc

SEQ ID NO: 6052633 - DNA, 25 bp, Homo sapien
tccccaagttcctccgctgtcaatc

SEQ ID NO: 6052634 - DNA, 25 bp, Homo sapien
caaaaatatggtcgatcatggattg

SEQ ID NO: 6052635 - DNA, 25 bp, Homo sapien
taatgtccacttcaggaaatcggct

SEQ ID NO: 6052636 - DNA, 25 bp, Homo sapien
tttctgttgccgctgtgataatcat

SEQ ID NO: 6052637 - DNA, 25 bp, Homo sapien
tactcggcataacggcgggcagttg

SEQ ID NO: 6052638 - DNA, 25 bp, Homo sapien
tttctttatactgaagcagcacctg

SEQ ID NO: 6052639 - DNA, 25 bp, Homo sapien
atccatcaagctgtttaatcaatct

SEQ ID NO: 6052640 - DNA, 25 bp, Homo sapien
tatggtcgatcatggattggctgac

SEQ ID NO: 6052641 - DNA, 25 bp, Homo sapien
tatcaggaatcaacgcggtcccaag

SEQ ID NO: 6052642 - DNA, 25 bp, Homo sapien
caaaagcgccaatgtctcttttgcg

SEQ ID NO: 6052643 - DNA, 25 bp, Homo sapien
gttagccgccttgccgataatcttg

SEQ ID NO: 6052644 - DNA, 25 bp, Homo sapien
gctgacctccggctgagacatgagc

SEQ ID NO: 6052645 - DNA, 25 bp, Homo sapien
ccaagctcgtccggcatataaatat

SEQ ID NO: 6052646 - DNA, 25 bp, Homo sapien
ttgcttcttcctttgacacaaggta

SEQ ID NO: 6052647 - DNA, 25 bp, Homo sapien
ttagcgcttcctgcaaatgacgggt

SEQ ID NO: 6052648 - DNA, 25 bp, Homo sapien
gcctgaacttgtcagctgttacggg

SEQ ID NO: 6052649 - DNA, 25 bp, Homo sapien
gacgcagtctgaagcgcttccttaa

SEQ ID NO: 6052650 - DNA, 25 bp, Homo sapien
tcaaatagtgggcaattcccgccct

SEQ ID NO: 6052651 - DNA, 25 bp, Homo sapien
cataacggcgggcagttgttcgtga

SEQ ID NO: 6052652 - DNA, 25 bp, Homo sapien
ttgacacaaggtactcggcataacg

SEQ ID NO: 6052653 - DNA, 25 bp, Homo sapien
acatgagcagcttccttttttcttt

SEQ ID NO: 6052654 - DNA, 25 bp, Homo sapien
gtcggcaaatcctctgccggcaaag

SEQ ID NO: 6052655 - DNA, 25 bp, Homo sapien
ctgtgataatcataatgtccacttc

SEQ ID NO: 6052656 - DNA, 25 bp, Homo sapien
tatactgaagcagcacctgcctgaa

SEQ ID NO: 6052657 - DNA, 25 bp, Homo sapien
tccagcagaagcaaatcagccttgt

SEQ ID NO: 6052658 - DNA, 25 bp, Homo sapien
gcggtcccaagctcgtccggcatat

SEQ ID NO: 6052659 - DNA, 25 bp, Homo sapien
tccttaatttttcgcagtgtaatcg

SEQ ID NO: 6052660 - DNA, 25 bp, Homo sapien
caggaaatcggcttcgtatatcagg

SEQ ID NO: 6052661 - DNA, 25 bp, Homo sapien
tcttgaatccatcaagctgtttaat

SEQ ID NO: 6052662 - DNA, 25 bp, Homo sapien
gacgggtttctgttgccgctgtgat

SEQ ID NO: 6052663 - DNA, 25 bp, Homo sapien
ttacgggtttgatcaaatagtgggc

SEQ ID NO: 6052664 - DNA, 25 bp, Homo sapien
gcagcttccttttttctttatactg

SEQ ID NO: 6052665 - DNA, 25 bp, Homo sapien
cctgccgataatcccgtattcaagc

SEQ ID NO: 6052666 - DNA, 25 bp, Homo sapien
gaatcaacgcggtcccaagctcgtc

SEQ ID NO: 6052667 - DNA, 25 bp, Homo sapien
atcggcttcgtatatcaggaatcaa

SEQ ID NO: 6052668 - DNA, 25 bp, Homo sapien
cgatcatggattggctgacctccgg

SEQ ID NO: 6052669 - DNA, 25 bp, Homo sapien
gccttgccgataatcttgaatccat

SEQ ID NO: 6052670 - DNA, 25 bp, Homo sapien
tcgtccggcatataaatatccagca

SEQ ID NO: 6052671 - DNA, 25 bp, Homo sapien
acttgtcagctgttacgggtttgat

SEQ ID NO: 6052672 - DNA, 25 bp, Homo sapien
tccgctgtcaatccttctgacgcag

SEQ ID NO: 6052673 - DNA, 25 bp, Homo sapien
caaggtactcggcataacggcgggc

SEQ ID NO: 6052674 - DNA, 25 bp, Homo sapien
gctgagacatgagcagcttcctttt

SEQ ID NO: 6052675 - DNA, 25 bp, Homo sapien
cttcctttgacacaaggtactcggc

SEQ ID NO: 6052676 - DNA, 25 bp, Homo sapien
gtttgatcaaatagtgggcaattcc

SEQ ID NO: 6052677 - DNA, 25 bp, Homo sapien
atgccagtcggcaaatcctctgccg

SEQ ID NO: 6052678 - DNA, 25 bp, Homo sapien
cgccaatgtctcttttgcgttagcc

SEQ ID NO: 6052679 - DNA, 25 bp, Homo sapien
attcaagctcggctcttgcttcttc

SEQ ID NO: 6052680 - DNA, 25 bp, Homo sapien
agctctgcacacttcccaaaaaaca

SEQ ID NO: 6052681 - DNA, 25 bp, Homo sapien
tgcacgcttatcattcggctctacc

SEQ ID NO: 6052682 - DNA, 25 bp, Homo sapien
ttcccaaaaaacatatctcctgcct

SEQ ID NO: 6052683 - DNA, 25 bp, Homo sapien
ttttaaattaaaatatacacgctga

SEQ ID NO: 6052684 - DNA, 25 bp, Homo sapien
cggctttatgctgtcagggtccttc

SEQ ID NO: 6052685 - DNA, 25 bp, Homo sapien
gtccttcagccaagccttcacattt

SEQ ID NO: 6052686 - DNA, 25 bp, Homo sapien
gccttcacattttctttgttggcct

SEQ ID NO: 6052687 - DNA, 25 bp, Homo sapien
caatcagctcctggcttgtgataat

SEQ ID NO: 6052688 - DNA, 25 bp, Homo sapien
tctctttaaacagttcttcaccctg

SEQ ID NO: 6052689 - DNA, 25 bp, Homo sapien
tgccgttctagcggcttctgcacgc

SEQ ID NO: 6052690 - DNA, 25 bp, Homo sapien
tccagccctgaaattcttttgcaga

SEQ ID NO: 6052691 - DNA, 25 bp, Homo sapien
cgaaggtcgccaagttaggtgccgt

SEQ ID NO: 6052692 - DNA, 25 bp, Homo sapien
tcggtacaatcagctcctggcttgt

SEQ ID NO: 6052693 - DNA, 25 bp, Homo sapien
tcaagttttcctccaactgaaggaa

SEQ ID NO: 6052694 - DNA, 25 bp, Homo sapien
gatctgtcggtacaatcagctcctg

SEQ ID NO: 6052695 - DNA, 25 bp, Homo sapien
gctctaccgcatggcagctcaggca

SEQ ID NO: 6052696 - DNA, 25 bp, Homo sapien
cataaagcgcatttgtttcgctgtc

SEQ ID NO: 6052697 - DNA, 25 bp, Homo sapien
cctgaaattcttttgcagacatcgt

SEQ ID NO: 6052698 - DNA, 25 bp, Homo sapien
tcgctctctgctgtagacttatagt

SEQ ID NO: 6052699 - DNA, 25 bp, Homo sapien
tttgtccagccctgaaattcttttg

SEQ ID NO: 6052700 - DNA, 25 bp, Homo sapien
atatctcctgcctctttgcttcgtt

SEQ ID NO: 6052701 - DNA, 25 bp, Homo sapien
gaaggaatccagaaggaatgtttta

SEQ ID NO: 6052702 - DNA, 25 bp, Homo sapien
tgcttagccaaatcgctctctgctg

SEQ ID NO: 6052703 - DNA, 25 bp, Homo sapien
aatccatcagcgcatgtgaagggcc

SEQ ID NO: 6052704 - DNA, 25 bp, Homo sapien
attaaaatatacacgctgatctgtc

SEQ ID NO: 6052705 - DNA, 25 bp, Homo sapien
tcaaatgtcaggaagaacttatttt

SEQ ID NO: 6052706 - DNA, 25 bp, Homo sapien
tttgtcctttcaccgaaggtcgcca

SEQ ID NO: 6052707 - DNA, 25 bp, Homo sapien
gcacacttcccaaaaaacatatctc

SEQ ID NO: 6052708 - DNA, 25 bp, Homo sapien
agaacttattttcattatccgtatt

SEQ ID NO: 6052709 - DNA, 25 bp, Homo sapien
attcttttgcagacatcgtcttcac

SEQ ID NO: 6052710 - DNA, 25 bp, Homo sapien
tcattatccgtattcgtatcaagtt

SEQ ID NO: 6052711 - DNA, 25 bp, Homo sapien
cacccctgccacttttgtcctttca

SEQ ID NO: 6052712 - DNA, 25 bp, Homo sapien
agccaagccttcacattttctttgt

SEQ ID NO: 6052713 - DNA, 25 bp, Homo sapien
gtcaggaagaacttattttcattat

SEQ ID NO: 6052714 - DNA, 25 bp, Homo sapien
tcttcaccttaaaatccatcagcgc

SEQ ID NO: 6052715 - DNA, 25 bp, Homo sapien
tctagcggcttctgcacgcttatca

SEQ ID NO: 6052716 - DNA, 25 bp, Homo sapien
tatgctgtcagggtccttcagccaa

SEQ ID NO: 6052717 - DNA, 25 bp, Homo sapien
gctcctggcttgtgataatgccgta

SEQ ID NO: 6052718 - DNA, 25 bp, Homo sapien
cctgcctctttgcttcgttttgaat

SEQ ID NO: 6052719 - DNA, 25 bp, Homo sapien
acattttctttgttggcctctttca

SEQ ID NO: 6052720 - DNA, 25 bp, Homo sapien
tgccacttttgtcctttcaccgaag

SEQ ID NO: 6052721 - DNA, 25 bp, Homo sapien
ccttaaaatccatcagcgcatgtga

SEQ ID NO: 6052722 - DNA, 25 bp, Homo sapien
ccgcaaagctctgcacacttcccaa

SEQ ID NO: 6052723 - DNA, 25 bp, Homo sapien
tttcctccaactgaaggaatccaga

SEQ ID NO: 6052724 - DNA, 25 bp, Homo sapien
gttccccggctttatgctgtcaggg

SEQ ID NO: 6052725 - DNA, 25 bp, Homo sapien
agttcttcaccctgcttagccaaat

SEQ ID NO: 6052726 - DNA, 25 bp, Homo sapien
tccgtattcgtatcaagttttcctc

SEQ ID NO: 6052727 - DNA, 25 bp, Homo sapien
atcagcgcatgtgaagggccgcaaa

SEQ ID NO: 6052728 - DNA, 25 bp, Homo sapien
acatcgtcttcaccttaaaatccat

SEQ ID NO: 6052729 - DNA, 25 bp, Homo sapien
tttgaatcaaatgtcaggaagaact

SEQ ID NO: 6052730 - DNA, 25 bp, Homo sapien
cgccaagttaggtgccgttctagcg

SEQ ID NO: 6052731 - DNA, 25 bp, Homo sapien
ttcgtatcaagttttcctccaactg

SEQ ID NO: 6052732 - DNA, 25 bp, Homo sapien
tattttcattatccgtattcgtatc

SEQ ID NO: 6052733 - DNA, 25 bp, Homo sapien
aatatacacgctgatctgtcggtac

SEQ ID NO: 6052734 - DNA, 25 bp, Homo sapien
tgttttacatcagaggcttttaaat

SEQ ID NO: 6052735 - DNA, 25 bp, Homo sapien
ggcttctgcacgcttatcattcggc

SEQ ID NO: 6052736 - DNA, 25 bp, Homo sapien
cttatcattcggctctaccgcatgg

SEQ ID NO: 6052737 - DNA, 25 bp, Homo sapien
gcgcatttgtttcgctgtctgagag

SEQ ID NO: 6052738 - DNA, 25 bp, Homo sapien
cttcgttttgaatcaaatgtcagga

SEQ ID NO: 6052739 - DNA, 25 bp, Homo sapien
ttgcagacatcgtcttcaccttaaa

SEQ ID NO: 6052740 - DNA, 25 bp, Homo sapien
ttcttcatttcttttgtccagccct

SEQ ID NO: 6052741 - DNA, 25 bp, Homo sapien
ttatagttcttcatttcttttgtcc

SEQ ID NO: 6052742 - DNA, 25 bp, Homo sapien
aaaaacatatctcctgcctctttgc

SEQ ID NO: 6052743 - DNA, 25 bp, Homo sapien
tctttgcttcgttttgaatcaaatg

SEQ ID NO: 6052744 - DNA, 25 bp, Homo sapien
atttcttttgtccagccctgaaatt

SEQ ID NO: 6052745 - DNA, 25 bp, Homo sapien
gatatgtgcctgtcattttgttccc

SEQ ID NO: 6052746 - DNA, 25 bp, Homo sapien
gctttggatatgtgcctgtcatttt

SEQ ID NO: 6052747 - DNA, 25 bp, Homo sapien
gttggcctctttcacccctgccact

SEQ ID NO: 6052748 - DNA, 25 bp, Homo sapien
ccaactgaaggaatccagaaggaat

SEQ ID NO: 6052749 - DNA, 25 bp, Homo sapien
catcagaggcttttaaattaaaata

SEQ ID NO: 6052750 - DNA, 25 bp, Homo sapien
gaagggccgcaaagctctgcacact

SEQ ID NO: 6052751 - DNA, 25 bp, Homo sapien
gccaaatcgctctctgctgtagact

SEQ ID NO: 6052752 - DNA, 25 bp, Homo sapien
tctgctgtagacttatagttcttca

SEQ ID NO: 6052753 - DNA, 25 bp, Homo sapien
ttgtttcgctgtctgagagctttgg

SEQ ID NO: 6052754 - DNA, 25 bp, Homo sapien
gttaggtgccgttctagcggcttct

SEQ ID NO: 6052755 - DNA, 25 bp, Homo sapien
gtagacttatagttcttcatttctt

SEQ ID NO: 6052756 - DNA, 25 bp, Homo sapien
ctttcaccgaaggtcgccaagttag

SEQ ID NO: 6052757 - DNA, 25 bp, Homo sapien
aaggaatgttttacatcagaggctt

SEQ ID NO: 6052758 - DNA, 25 bp, Homo sapien
tgcctgtcattttgttccccggctt

SEQ ID NO: 6052759 - DNA, 25 bp, Homo sapien
ggcttgtgataatgccgtaatcagg

SEQ ID NO: 6052760 - DNA, 25 bp, Homo sapien
ctgagagctttggatatgtgcctgt

SEQ ID NO: 6052761 - DNA, 25 bp, Homo sapien
ctctttcacccctgccacttttgtc

SEQ ID NO: 6052762 - DNA, 25 bp, Homo sapien
gtcagggtccttcagccaagccttc

SEQ ID NO: 6052763 - DNA, 25 bp, Homo sapien
tctttgttggcctctttcacccctg

SEQ ID NO: 6052764 - DNA, 25 bp, Homo sapien
gcatgtgaagggccgcaaagctctg

SEQ ID NO: 6052765 - DNA, 25 bp, Homo sapien
cgctgtctgagagctttggatatgt

SEQ ID NO: 6052766 - DNA, 25 bp, Homo sapien
cacgctgatctgtcggtacaatcag

SEQ ID NO: 6052767 - DNA, 25 bp, Homo sapien
cgcatggcagctcaggcagtttttc

SEQ ID NO: 6052768 - DNA, 25 bp, Homo sapien
cattttgttccccggctttatgctg

SEQ ID NO: 6052769 - DNA, 25 bp, Homo sapien
atccagaaggaatgttttacatcag

SEQ ID NO: 6052770 - DNA, 25 bp, Homo sapien
gcagctcaggcagtttttctcttta

SEQ ID NO: 6052771 - DNA, 25 bp, Homo sapien
cattcggctctaccgcatggcagct

SEQ ID NO: 6052772 - DNA, 25 bp, Homo sapien
tcaccctgcttagccaaatcgctct

SEQ ID NO: 6052773 - DNA, 25 bp, Homo sapien
ttaaacagttcttcaccctgcttag

SEQ ID NO: 6052774 - DNA, 25 bp, Homo sapien
caggcagtttttctctttaaacagt

SEQ ID NO: 6052775 - DNA, 25 bp, Homo sapien
tttcgattaagtcttcaatctcttg

SEQ ID NO: 6052776 - DNA, 25 bp, Homo sapien
cggttaaattcgtactgctgttcag

SEQ ID NO: 6052777 - DNA, 25 bp, Homo sapien
aatcatcgtccatctcttcttcgaa

SEQ ID NO: 6052778 - DNA, 25 bp, Homo sapien
tctcttgatcgagaagttcctgctc

SEQ ID NO: 6052779 - DNA, 25 bp, Homo sapien
ggcgcgcttcatttcgcttttcgat

SEQ ID NO: 6052780 - DNA, 25 bp, Homo sapien
cgtccatctcttcttcgaatgcttt

SEQ ID NO: 6052781 - DNA, 25 bp, Homo sapien
tttcaagccattgatcgtcatcttc

SEQ ID NO: 6052782 - DNA, 25 bp, Homo sapien
atctcaaaagctgcggatcatgctg

SEQ ID NO: 6052783 - DNA, 25 bp, Homo sapien
acaagactgaaatggcattcgccgt

SEQ ID NO: 6052784 - DNA, 25 bp, Homo sapien
ctgtacgctgtttttaaacggctga

SEQ ID NO: 6052785 - DNA, 25 bp, Homo sapien
tattaaaatcatcgtccatctcttc

SEQ ID NO: 6052786 - DNA, 25 bp, Homo sapien
gattccggcgcgcttcatttcgctt

SEQ ID NO: 6052787 - DNA, 25 bp, Homo sapien
cgtgtttcgctaagtcaaacaagac

SEQ ID NO: 6052788 - DNA, 25 bp, Homo sapien
gaagctcttctgaatagttaatcgg

SEQ ID NO: 6052789 - DNA, 25 bp, Homo sapien
atgcacaagcacaaagttgcctagt

SEQ ID NO: 6052790 - DNA, 25 bp, Homo sapien
aaaatcgcgattccggcgcgcttca

SEQ ID NO: 6052791 - DNA, 25 bp, Homo sapien
atcagccgtatgatctttctgaaga

SEQ ID NO: 6052792 - DNA, 25 bp, Homo sapien
agtcaaacaagactgaaatggcatt

SEQ ID NO: 6052793 - DNA, 25 bp, Homo sapien
atgctgtttaatgatgtcatgcaca

SEQ ID NO: 6052794 - DNA, 25 bp, Homo sapien
tttaatgatgtcatgcacaagcaca

SEQ ID NO: 6052795 - DNA, 25 bp, Homo sapien
tgaacgcgcttttcgtattctccag

SEQ ID NO: 6052796 - DNA, 25 bp, Homo sapien
cgaaaaaccgaggacagaaacaatg

SEQ ID NO: 6052797 - DNA, 25 bp, Homo sapien
taaacggctgaacgcgcttttcgta

SEQ ID NO: 6052798 - DNA, 25 bp, Homo sapien
gataatgaacagatagcataaagaa

SEQ ID NO: 6052799 - DNA, 25 bp, Homo sapien
gaagttcctgctcacccaacgaaaa

SEQ ID NO: 6052800 - DNA, 25 bp, Homo sapien
aaagttgcctagtgattttgacatt

SEQ ID NO: 6052801 - DNA, 25 bp, Homo sapien
tgctcacccaacgaaaaaccgagga

SEQ ID NO: 6052802 - DNA, 25 bp, Homo sapien
acaatgcggtcaaacatctcaataa

SEQ ID NO: 6052803 - DNA, 25 bp, Homo sapien
ataataattggcgtgtttcgctaag

SEQ ID NO: 6052804 - DNA, 25 bp, Homo sapien
ggatctggtctgacaatgcaaaatc

SEQ ID NO: 6052805 - DNA, 25 bp, Homo sapien
cgtatcttcaagaatgatattcatg

SEQ ID NO: 6052806 - DNA, 25 bp, Homo sapien
gctgaagattgctgtacgctgtttt

SEQ ID NO: 6052807 - DNA, 25 bp, Homo sapien
tgttcagacggtgctgaagattgct

SEQ ID NO: 6052808 - DNA, 25 bp, Homo sapien
aatagttaatcggatggcgataatg

SEQ ID NO: 6052809 - DNA, 25 bp, Homo sapien
caaccttttcaagccattgatcgtc

SEQ ID NO: 6052810 - DNA, 25 bp, Homo sapien
accgaggacagaaacaatgcggtca

SEQ ID NO: 6052811 - DNA, 25 bp, Homo sapien
gttcttcaaccttttcaagccattg

SEQ ID NO: 6052812 - DNA, 25 bp, Homo sapien
gacagaaacaatgcggtcaaacatc

SEQ ID NO: 6052813 - DNA, 25 bp, Homo sapien
atgctttgcggtgttcttcaacctt

SEQ ID NO: 6052814 - DNA, 25 bp, Homo sapien
gccattgatcgtcatcttcggttaa

SEQ ID NO: 6052815 - DNA, 25 bp, Homo sapien
aagcacaaagttgcctagtgatttt

SEQ ID NO: 6052816 - DNA, 25 bp, Homo sapien
ttcgcttttcgattaagtcttcaat

SEQ ID NO: 6052817 - DNA, 25 bp, Homo sapien
gaacagatagcataaagaatctcaa

SEQ ID NO: 6052818 - DNA, 25 bp, Homo sapien
aacatctcaataaacgccgtaatca

SEQ ID NO: 6052819 - DNA, 25 bp, Homo sapien
gattgctgtacgctgtttttaaacg

SEQ ID NO: 6052820 - DNA, 25 bp, Homo sapien
acaatgcaaaatcgcgattccggcg

SEQ ID NO: 6052821 - DNA, 25 bp, Homo sapien
tactgctgttcagacggtgctgaag

SEQ ID NO: 6052822 - DNA, 25 bp, Homo sapien
gatcgagaagttcctgctcacccaa

SEQ ID NO: 6052823 - DNA, 25 bp, Homo sapien
ctgaaatggcattcgccgtattaaa

SEQ ID NO: 6052824 - DNA, 25 bp, Homo sapien
gtaatcacatgatcagccgtatgat

SEQ ID NO: 6052825 - DNA, 25 bp, Homo sapien
tctcttcttcgaatgctttgcggtg

SEQ ID NO: 6052826 - DNA, 25 bp, Homo sapien
gatcgtcatcttcggttaaattcgt

SEQ ID NO: 6052827 - DNA, 25 bp, Homo sapien
cttcatttcgcttttcgattaagtc

SEQ ID NO: 6052828 - DNA, 25 bp, Homo sapien
aatgatattcatgcttttcagctgg

SEQ ID NO: 6052829 - DNA, 25 bp, Homo sapien
tgcggtgttcttcaaccttttcaag

SEQ ID NO: 6052830 - DNA, 25 bp, Homo sapien
taaagaatctcaaaagctgcggatc

SEQ ID NO: 6052831 - DNA, 25 bp, Homo sapien
ttaagtcttcaatctcttgatcgag

SEQ ID NO: 6052832 - DNA, 25 bp, Homo sapien
cagctggtcgcggatctggtctgac

SEQ ID NO: 6052833 - DNA, 25 bp, Homo sapien
acatgatcagccgtatgatctttct

SEQ ID NO: 6052834 - DNA, 25 bp, Homo sapien
gatgtcatgcacaagcacaaagttg

SEQ ID NO: 6052835 - DNA, 25 bp, Homo sapien
tctccagaagctcttctgaatagtt

SEQ ID NO: 6052836 - DNA, 25 bp, Homo sapien
catcttcggttaaattcgtactgct

SEQ ID NO: 6052837 - DNA, 25 bp, Homo sapien
tcgctaagtcaaacaagactgaaat

SEQ ID NO: 6052838 - DNA, 25 bp, Homo sapien
tggcattcgccgtattaaaatcatc

SEQ ID NO: 6052839 - DNA, 25 bp, Homo sapien
tctttctgaagataataattggcgt

SEQ ID NO: 6052840 - DNA, 25 bp, Homo sapien
aattggcgtgtttcgctaagtcaaa

SEQ ID NO: 6052841 - DNA, 25 bp, Homo sapien
atagcataaagaatctcaaaagctg

SEQ ID NO: 6052842 - DNA, 25 bp, Homo sapien
gacggtgctgaagattgctgtacgc

SEQ ID NO: 6052843 - DNA, 25 bp, Homo sapien
attcatgcttttcagctggtcgcgg

SEQ ID NO: 6052844 - DNA, 25 bp, Homo sapien
taatcggatggcgataatgaacaga

SEQ ID NO: 6052845 - DNA, 25 bp, Homo sapien
tcgccgtattaaaatcatcgtccat

SEQ ID NO: 6052846 - DNA, 25 bp, Homo sapien
gcctagtgattttgacattttttca

SEQ ID NO: 6052847 - DNA, 25 bp, Homo sapien
gacattttttcattatcaatattga

SEQ ID NO: 6052848 - DNA, 25 bp, Homo sapien
tcaataaacgccgtaatcacatgat

SEQ ID NO: 6052849 - DNA, 25 bp, Homo sapien
cgcttttcgtattctccagaagctc

SEQ ID NO: 6052850 - DNA, 25 bp, Homo sapien
aattcgtactgctgttcagacggtg

SEQ ID NO: 6052851 - DNA, 25 bp, Homo sapien
cttctgaatagttaatcggatggcg

SEQ ID NO: 6052852 - DNA, 25 bp, Homo sapien
aacgccgtaatcacatgatcagccg

SEQ ID NO: 6052853 - DNA, 25 bp, Homo sapien
ctgaagataataattggcgtgtttc

SEQ ID NO: 6052854 - DNA, 25 bp, Homo sapien
cttcaatctcttgatcgagaagttc

SEQ ID NO: 6052855 - DNA, 25 bp, Homo sapien
ggtcgcggatctggtctgacaatgc

SEQ ID NO: 6052856 - DNA, 25 bp, Homo sapien
ttcaagaatgatattcatgcttttc

SEQ ID NO: 6052857 - DNA, 25 bp, Homo sapien
gcttttcagctggtcgcggatctgg

SEQ ID NO: 6052858 - DNA, 25 bp, Homo sapien
cattatcaatattgatataaccatt

SEQ ID NO: 6052859 - DNA, 25 bp, Homo sapien
gatggcgataatgaacagatagcat

SEQ ID NO: 6052860 - DNA, 25 bp, Homo sapien
gctgtttttaaacggctgaacgcgc

SEQ ID NO: 6052861 - DNA, 25 bp, Homo sapien
ggtctgacaatgcaaaatcgcgatt

SEQ ID NO: 6052862 - DNA, 25 bp, Homo sapien
cggatcatgctgtttaatgatgtca

SEQ ID NO: 6052863 - DNA, 25 bp, Homo sapien
aagctgcggatcatgctgtttaatg

SEQ ID NO: 6052864 - DNA, 25 bp, Homo sapien
cttcgaatgctttgcggtgttcttc

SEQ ID NO: 6052865 - DNA, 25 bp, Homo sapien
cgtatgatctttctgaagataataa

SEQ ID NO: 6052866 - DNA, 25 bp, Homo sapien
cggtcaaacatctcaataaacgccg

SEQ ID NO: 6052867 - DNA, 25 bp, Homo sapien
tcgtattctccagaagctcttctga

SEQ ID NO: 6052868 - DNA, 25 bp, Homo sapien
aagcggtcagcaactggatcgggca

SEQ ID NO: 6052869 - DNA, 25 bp, Homo sapien
ctgtggctatcaatgcgtcatcttt

SEQ ID NO: 6052870 - DNA, 25 bp, Homo sapien
catctttaatcgttgggtgcctttt

SEQ ID NO: 6052871 - DNA, 25 bp, Homo sapien
tgagccttcaccgaccgtaatagaa

SEQ ID NO: 6052872 - DNA, 25 bp, Homo sapien
tgctgttccaaagacttaaagcggt

SEQ ID NO: 6052873 - DNA, 25 bp, Homo sapien
aagttaaaatcacttcaaaatagct

SEQ ID NO: 6052874 - DNA, 25 bp, Homo sapien
cagggataccgacaactgttgaaaa

SEQ ID NO: 6052875 - DNA, 25 bp, Homo sapien
tggtctatgaaaaatcttctcccga

SEQ ID NO: 6052876 - DNA, 25 bp, Homo sapien
acccccatgccgtggtctatgaaaa

SEQ ID NO: 6052877 - DNA, 25 bp, Homo sapien
aatcttctcccgattgtagcgccgg

SEQ ID NO: 6052878 - DNA, 25 bp, Homo sapien
cactactgaaccagcgccaatcttt

SEQ ID NO: 6052879 - DNA, 25 bp, Homo sapien
tgaaccagcgccaatctttgagcct

SEQ ID NO: 6052880 - DNA, 25 bp, Homo sapien
agctctaaaatctgctgttccaaag

SEQ ID NO: 6052881 - DNA, 25 bp, Homo sapien
gtttatataaagcatgtgcaatccg

SEQ ID NO: 6052882 - DNA, 25 bp, Homo sapien
attttcgtttatataaagcatgtgc

SEQ ID NO: 6052883 - DNA, 25 bp, Homo sapien
ttgaaaaatcaggaacatcatgcag

SEQ ID NO: 6052884 - DNA, 25 bp, Homo sapien
atgcgtcatctttaatcgttgggtg

SEQ ID NO: 6052885 - DNA, 25 bp, Homo sapien
gacttaaagcggtcagcaactggat

SEQ ID NO: 6052886 - DNA, 25 bp, Homo sapien
tgatggtttaaatcgcgtcttactt

SEQ ID NO: 6052887 - DNA, 25 bp, Homo sapien
ccattttgtacaacgacccgtccag

SEQ ID NO: 6052888 - DNA, 25 bp, Homo sapien
aaatcctgatggtttaaatcgcgtc

SEQ ID NO: 6052889 - DNA, 25 bp, Homo sapien
gatgcgcccatatagcatgtaaacc

SEQ ID NO: 6052890 - DNA, 25 bp, Homo sapien
cttcaccgaccgtaatagaaccgag

SEQ ID NO: 6052891 - DNA, 25 bp, Homo sapien
ttacttgagatataaggcgtgcaag

SEQ ID NO: 6052892 - DNA, 25 bp, Homo sapien
aaaatctgctgttccaaagacttaa

SEQ ID NO: 6052893 - DNA, 25 bp, Homo sapien
gccttcagctctaaaatctgctgtt

SEQ ID NO: 6052894 - DNA, 25 bp, Homo sapien
ctatcaatgcgtcatctttaatcgt

SEQ ID NO: 6052895 - DNA, 25 bp, Homo sapien
cttcaaaatagcttcttgctgcggg

SEQ ID NO: 6052896 - DNA, 25 bp, Homo sapien
aaccgagcactttagcacctgtggc

SEQ ID NO: 6052897 - DNA, 25 bp, Homo sapien
actggatcgggcaaatcctgatggt

SEQ ID NO: 6052898 - DNA, 25 bp, Homo sapien
aaatcacttcaaaatagcttcttgc

SEQ ID NO: 6052899 - DNA, 25 bp, Homo sapien
aatcaggaacatcatgcagcactac

SEQ ID NO: 6052900 - DNA, 25 bp, Homo sapien
ttcttgccattttgtacaacgaccc

SEQ ID NO: 6052901 - DNA, 25 bp, Homo sapien
agttctgccttcagctctaaaatct

SEQ ID NO: 6052902 - DNA, 25 bp, Homo sapien
atgcagcactactgaaccagcgcca

SEQ ID NO: 6052903 - DNA, 25 bp, Homo sapien
caactgttgaaaaatcaggaacatc

SEQ ID NO: 6052904 - DNA, 25 bp, Homo sapien
cccgtccagggataccgacaactgt

SEQ ID NO: 6052905 - DNA, 25 bp, Homo sapien
cgcgtcttactttcttgccattttg

SEQ ID NO: 6052906 - DNA, 25 bp, Homo sapien
gcactttagcacctgtggctatcaa

SEQ ID NO: 6052907 - DNA, 25 bp, Homo sapien
gatcttgatcgaacacagtatcaat

SEQ ID NO: 6052908 - DNA, 25 bp, Homo sapien
cccatatagcatgtaaaccggaata

SEQ ID NO: 6052909 - DNA, 25 bp, Homo sapien
atgaaaaatcttctcccgattgtag

SEQ ID NO: 6052910 - DNA, 25 bp, Homo sapien
cgaccgtaatagaaccgagcacttt

SEQ ID NO: 6052911 - DNA, 25 bp, Homo sapien
catgtgcaatccgatgcgcccatat

SEQ ID NO: 6052912 - DNA, 25 bp, Homo sapien
atcggcttacttgagatataaggcg

SEQ ID NO: 6052913 - DNA, 25 bp, Homo sapien
ttaaatcgcgtcttactttcttgcc

SEQ ID NO: 6052914 - DNA, 25 bp, Homo sapien
attgtagcgccggggtggatttcta

SEQ ID NO: 6052915 - DNA, 25 bp, Homo sapien
agcgccaatctttgagccttcaccg

SEQ ID NO: 6052916 - DNA, 25 bp, Homo sapien
tcgggcaaatcctgatggtttaaat

SEQ ID NO: 6052917 - DNA, 25 bp, Homo sapien
gagatataaggcgtgcaaggaaata

SEQ ID NO: 6052918 - DNA, 25 bp, Homo sapien
ataaagcatgtgcaatccgatgcgc

SEQ ID NO: 6052919 - DNA, 25 bp, Homo sapien
acgttattgccgatttcacatgtct

SEQ ID NO: 6052920 - DNA, 25 bp, Homo sapien
taccgacaactgttgaaaaatcagg

SEQ ID NO: 6052921 - DNA, 25 bp, Homo sapien
tccaaagacttaaagcggtcagcaa

SEQ ID NO: 6052922 - DNA, 25 bp, Homo sapien
tagcatgtaaaccggaataagttaa

SEQ ID NO: 6052923 - DNA, 25 bp, Homo sapien
cggttacgttattgccgatttcaca

SEQ ID NO: 6052924 - DNA, 25 bp, Homo sapien
aatctttgagccttcaccgaccgta

SEQ ID NO: 6052925 - DNA, 25 bp, Homo sapien
taatagaaccgagcactttagcacc

SEQ ID NO: 6052926 - DNA, 25 bp, Homo sapien
ttcttgctgcgggatcttgatcgaa

SEQ ID NO: 6052927 - DNA, 25 bp, Homo sapien
caatccgatgcgcccatatagcatg

SEQ ID NO: 6052928 - DNA, 25 bp, Homo sapien
taaaaaatcggcttacttgagatat

SEQ ID NO: 6052929 - DNA, 25 bp, Homo sapien
ctgcgggatcttgatcgaacacagt

SEQ ID NO: 6052930 - DNA, 25 bp, Homo sapien
atttcacatgtctccccaatgacaa

SEQ ID NO: 6052931 - DNA, 25 bp, Homo sapien
ttgccgatttcacatgtctccccaa

SEQ ID NO: 6052932 - DNA, 25 bp, Homo sapien
aacatcatgcagcactactgaacca

SEQ ID NO: 6052933 - DNA, 25 bp, Homo sapien
catgtctccccaatgacaaccccca

SEQ ID NO: 6052934 - DNA, 25 bp, Homo sapien
ataaggcgtgcaaggaaataaaatt

SEQ ID NO: 6052935 - DNA, 25 bp, Homo sapien
tccccaatgacaacccccatgccgt

SEQ ID NO: 6052936 - DNA, 25 bp, Homo sapien
gatcgaacacagtatcaatgtcttc

SEQ ID NO: 6052937 - DNA, 25 bp, Homo sapien
tagcacctgtggctatcaatgcgtc

SEQ ID NO: 6052938 - DNA, 25 bp, Homo sapien
aatagcttcttgctgcgggatcttg

SEQ ID NO: 6052939 - DNA, 25 bp, Homo sapien
tcagcaactggatcgggcaaatcct

SEQ ID NO: 6052940 - DNA, 25 bp, Homo sapien
tgtacaacgacccgtccagggatac

SEQ ID NO: 6052941 - DNA, 25 bp, Homo sapien
ttactttcttgccattttgtacaac

SEQ ID NO: 6052942 - DNA, 25 bp, Homo sapien
atgccgtggtctatgaaaaatcttc

SEQ ID NO: 6052943 - DNA, 25 bp, Homo sapien
atgacaacccccatgccgtggtcta

SEQ ID NO: 6052944 - DNA, 25 bp, Homo sapien
agcgccggggtggatttctatcccg

SEQ ID NO: 6052945 - DNA, 25 bp, Homo sapien
ctcccgattgtagcgccggggtgga

SEQ ID NO: 6052946 - DNA, 25 bp, Homo sapien
tccgataatgcaggcgatgttcgtg

SEQ ID NO: 6052947 - DNA, 25 bp, Homo sapien
ttggcagcctcatatccgccacgaa

SEQ ID NO: 6052948 - DNA, 25 bp, Homo sapien
gcaatcggaatttgttcactggcga

SEQ ID NO: 6052949 - DNA, 25 bp, Homo sapien
caatgatagaaagatcatccggcac

SEQ ID NO: 6052950 - DNA, 25 bp, Homo sapien
gaacgtcgtctatcacaacaatatc

SEQ ID NO: 6052951 - DNA, 25 bp, Homo sapien
gccacgaacgtcgtctatcacaaca

SEQ ID NO: 6052952 - DNA, 25 bp, Homo sapien
tgcttctgccagcagttcgatgacg

SEQ ID NO: 6052953 - DNA, 25 bp, Homo sapien
ggaaaaccgcgtctggatgataagt

SEQ ID NO: 6052954 - DNA, 25 bp, Homo sapien
ttcgtgtggccgagtgacagaagat

SEQ ID NO: 6052955 - DNA, 25 bp, Homo sapien
atatccgccacgaacgtcgtctatc

SEQ ID NO: 6052956 - DNA, 25 bp, Homo sapien
tgttcactggcgatttcctccaaag

SEQ ID NO: 6052957 - DNA, 25 bp, Homo sapien
tcatggcaatcggaatttgttcact

SEQ ID NO: 6052958 - DNA, 25 bp, Homo sapien
cgtcgttgaaggcaaaaatagcagt

SEQ ID NO: 6052959 - DNA, 25 bp, Homo sapien
ccaatacgtcgttgaaggcaaaaat

SEQ ID NO: 6052960 - DNA, 25 bp, Homo sapien
tgaaggcaaaaatagcagtcggagc

SEQ ID NO: 6052961 - DNA, 25 bp, Homo sapien
ggaatttgttcactggcgatttcct

SEQ ID NO: 6052962 - DNA, 25 bp, Homo sapien
tcgcctttcgttttccctctattgc

SEQ ID NO: 6052963 - DNA, 25 bp, Homo sapien
tcacaacaatatccatcggaagaag

SEQ ID NO: 6052964 - DNA, 25 bp, Homo sapien
ccatcggaagaagcggcttatcctg

SEQ ID NO: 6052965 - DNA, 25 bp, Homo sapien
tagcagtcggagcatttctgtcgag

SEQ ID NO: 6052966 - DNA, 25 bp, Homo sapien
ttatcggctgggctacggttgtcag

SEQ ID NO: 6052967 - DNA, 25 bp, Homo sapien
ctggatgataagtgattcatcaatg

SEQ ID NO: 6052968 - DNA, 25 bp, Homo sapien
tgccagcagttcgatgacgctccgc

SEQ ID NO: 6052969 - DNA, 25 bp, Homo sapien
atcatccggcacttttatgcctctt

SEQ ID NO: 6052970 - DNA, 25 bp, Homo sapien
gcgatgttcgtgtggccgagtgaca

SEQ ID NO: 6052971 - DNA, 25 bp, Homo sapien
agatgcttggcagcctcatatccgc

SEQ ID NO: 6052972 - DNA, 25 bp, Homo sapien
gctccgccccatctcttttatcggc

SEQ ID NO: 6052973 - DNA, 25 bp, Homo sapien
ggcggcacaagccaatacgtcgttg

SEQ ID NO: 6052974 - DNA, 25 bp, Homo sapien
ctacggttgtcaggggcggagccgc

SEQ ID NO: 6052975 - DNA, 25 bp, Homo sapien
gagccgccatttctgcgagtatcgt

SEQ ID NO: 6052976 - DNA, 25 bp, Homo sapien
tgattcatcaatgggcacgcccgct

SEQ ID NO: 6052977 - DNA, 25 bp, Homo sapien
gcctgtcgttgacccgtctccgata

SEQ ID NO: 6052978 - DNA, 25 bp, Homo sapien
tgtggccgagtgacagaagatgctt

SEQ ID NO: 6052979 - DNA, 25 bp, Homo sapien
gaagaagcggcttatcctgagaaat

SEQ ID NO: 6052980 - DNA, 25 bp, Homo sapien
atgcaggcgatgttcgtgtggccga

SEQ ID NO: 6052981 - DNA, 25 bp, Homo sapien
caattttcccgcttcttccttgccg

SEQ ID NO: 6052982 - DNA, 25 bp, Homo sapien
gacagaagatgcttggcagcctcat

SEQ ID NO: 6052983 - DNA, 25 bp, Homo sapien
tgacggaagcctttgattctatttt

SEQ ID NO: 6052984 - DNA, 25 bp, Homo sapien
atttcctccaaagcagacatactgt

SEQ ID NO: 6052985 - DNA, 25 bp, Homo sapien
tgtcaggggcggagccgccatttct

SEQ ID NO: 6052986 - DNA, 25 bp, Homo sapien
ctttgattctatttttttcgcctgt

SEQ ID NO: 6052987 - DNA, 25 bp, Homo sapien
caaaaatagcagtcggagcatttct

SEQ ID NO: 6052988 - DNA, 25 bp, Homo sapien
ctccatcgcctgacggaagcctttg

SEQ ID NO: 6052989 - DNA, 25 bp, Homo sapien
cgttgacccgtctccgataatgcag

SEQ ID NO: 6052990 - DNA, 25 bp, Homo sapien
ttttcgcctgtcgttgacccgtctc

SEQ ID NO: 6052991 - DNA, 25 bp, Homo sapien
ttccaaggaaaaccgcgtctggatg

SEQ ID NO: 6052992 - DNA, 25 bp, Homo sapien
gcgggagcactattttttgtttcgc

SEQ ID NO: 6052993 - DNA, 25 bp, Homo sapien
gcctcttattctcgcagcttgtatg

SEQ ID NO: 6052994 - DNA, 25 bp, Homo sapien
ccatttctgcgagtatcgtattatc

SEQ ID NO: 6052995 - DNA, 25 bp, Homo sapien
caaaaccaatgatagaaagatcatc

SEQ ID NO: 6052996 - DNA, 25 bp, Homo sapien
agttcgatgacgctccgccccatct

SEQ ID NO: 6052997 - DNA, 25 bp, Homo sapien
gataagtgattcatcaatgggcacg

SEQ ID NO: 6052998 - DNA, 25 bp, Homo sapien
ttgtatggcggcacaagccaatacg

SEQ ID NO: 6052999 - DNA, 25 bp, Homo sapien
ctgcgagtatcgtattatcaaaacc

SEQ ID NO: 6053000 - DNA, 25 bp, Homo sapien
ctcaggcgggagcactattttttgt

SEQ ID NO: 6053001 - DNA, 25 bp, Homo sapien
gcggcttatcctgagaaatcatggc

SEQ ID NO: 6053002 - DNA, 25 bp, Homo sapien
ctctattgcttctgccagcagttcg

SEQ ID NO: 6053003 - DNA, 25 bp, Homo sapien
gatgacgctccgccccatctctttt

SEQ ID NO: 6053004 - DNA, 25 bp, Homo sapien
atcgcctgacggaagcctttgattc

SEQ ID NO: 6053005 - DNA, 25 bp, Homo sapien
tatcctgagaaatcatggcaatcgg

SEQ ID NO: 6053006 - DNA, 25 bp, Homo sapien
tagaaagatcatccggcacttttat

SEQ ID NO: 6053007 - DNA, 25 bp, Homo sapien
ccgagtgacagaagatgcttggcag

SEQ ID NO: 6053008 - DNA, 25 bp, Homo sapien
ctggcgatttcctccaaagcagaca

SEQ ID NO: 6053009 - DNA, 25 bp, Homo sapien
gtatcgtattatcaaaaccaatgat

SEQ ID NO: 6053010 - DNA, 25 bp, Homo sapien
tacaagctcaggcgggagcactatt

SEQ ID NO: 6053011 - DNA, 25 bp, Homo sapien
ttctatttttttcgcctgtcgttga

SEQ ID NO: 6053012 - DNA, 25 bp, Homo sapien
tgggcacgcccgcttcctccatcgc

SEQ ID NO: 6053013 - DNA, 25 bp, Homo sapien
ccccatctcttttatcggctgggct

SEQ ID NO: 6053014 - DNA, 25 bp, Homo sapien
catttctgtcgagcaattttcccgc

SEQ ID NO: 6053015 - DNA, 25 bp, Homo sapien
tcttccttgccgctttccaaggaaa

SEQ ID NO: 6053016 - DNA, 25 bp, Homo sapien
cgctttccaaggaaaaccgcgtctg

SEQ ID NO: 6053017 - DNA, 25 bp, Homo sapien
cgcttcctccatcgcctgacggaag

SEQ ID NO: 6053018 - DNA, 25 bp, Homo sapien
cacgcccgcttcctccatcgcctga

SEQ ID NO: 6053019 - DNA, 25 bp, Homo sapien
ttttatgcctcttattctcgcagct

SEQ ID NO: 6053020 - DNA, 25 bp, Homo sapien
cacaagccaatacgtcgttgaaggc

SEQ ID NO: 6053021 - DNA, 25 bp, Homo sapien
cccgtctccgataatgcaggcgatg

SEQ ID NO: 6053022 - DNA, 25 bp, Homo sapien
cggcacttttatgcctcttattctc

SEQ ID NO: 6053023 - DNA, 25 bp, Homo sapien
cccgcttcttccttgccgctttcca

SEQ ID NO: 6053024 - DNA, 25 bp, Homo sapien
gagaaatcatggcaatcggaatttg

SEQ ID NO: 6053025 - DNA, 25 bp, Homo sapien
ccgcgtctggatgataagtgattca

SEQ ID NO: 6053026 - DNA, 25 bp, Homo sapien
tattctcgcagcttgtatggcggca

SEQ ID NO: 6053027 - DNA, 25 bp, Homo sapien
tcggagcatttctgtcgagcaattt

SEQ ID NO: 6053028 - DNA, 25 bp, Homo sapien
ctcttttatcggctgggctacggtt

SEQ ID NO: 6053029 - DNA, 25 bp, Homo sapien
ggcggagccgccatttctgcgagta

SEQ ID NO: 6053030 - DNA, 25 bp, Homo sapien
tccaaagcagacatactgtcatggc

SEQ ID NO: 6053031 - DNA, 25 bp, Homo sapien
tattatcaaaaccaatgatagaaag

SEQ ID NO: 6053032 - DNA, 25 bp, Homo sapien
cgcagcttgtatggcggcacaagcc

SEQ ID NO: 6053033 - DNA, 25 bp, Homo sapien
agcctcatatccgccacgaacgtcg

SEQ ID NO: 6053034 - DNA, 25 bp, Homo sapien
tgtcgagcaattttcccgcttcttc

SEQ ID NO: 6053035 - DNA, 25 bp, Homo sapien
cgtctatcacaacaatatccatcgg

SEQ ID NO: 6053036 - DNA, 25 bp, Homo sapien
caatatccatcggaagaagcggctt

SEQ ID NO: 6053037 - DNA, 25 bp, Homo sapien
ttttccctctattgcttctgccagc

SEQ ID NO: 6053038 - DNA, 25 bp, Homo sapien
ctttcgttttccctctattgcttct

SEQ ID NO: 6053039 - DNA, 25 bp, Homo sapien
ccacgacaggtatttgtgctgtcat

SEQ ID NO: 6053040 - DNA, 25 bp, Homo sapien
aagcttcggtatgagcggctcgagt

SEQ ID NO: 6053041 - DNA, 25 bp, Homo sapien
ttgttatgactgattccaatcccgc

SEQ ID NO: 6053042 - DNA, 25 bp, Homo sapien
gcagtctccgacttctaaacttaaa

SEQ ID NO: 6053043 - DNA, 25 bp, Homo sapien
aaatttcggcttatctccgaccaat

SEQ ID NO: 6053044 - DNA, 25 bp, Homo sapien
tgtcctaaaaatttcggcttatctc

SEQ ID NO: 6053045 - DNA, 25 bp, Homo sapien
atctaaaatttgcactgcctgtttt

SEQ ID NO: 6053046 - DNA, 25 bp, Homo sapien
atgatttttgtttcaatttctgtca

SEQ ID NO: 6053047 - DNA, 25 bp, Homo sapien
gcccatgactcgatccatcatcgta

SEQ ID NO: 6053048 - DNA, 25 bp, Homo sapien
aatacagtaagaggatccgtgactg

SEQ ID NO: 6053049 - DNA, 25 bp, Homo sapien
gtccaaagttatgcagtctccgact

SEQ ID NO: 6053050 - DNA, 25 bp, Homo sapien
ggatccgtgactgatttgtccaaag

SEQ ID NO: 6053051 - DNA, 25 bp, Homo sapien
tgatttcaccaatttgagtattgag

SEQ ID NO: 6053052 - DNA, 25 bp, Homo sapien
atagtggactgaaagcttcggtatg

SEQ ID NO: 6053053 - DNA, 25 bp, Homo sapien
ctttggctcatttcggtctgattgc

SEQ ID NO: 6053054 - DNA, 25 bp, Homo sapien
agttatgcagtctccgacttctaaa

SEQ ID NO: 6053055 - DNA, 25 bp, Homo sapien
tttccggttcaatatcagcaattga

SEQ ID NO: 6053056 - DNA, 25 bp, Homo sapien
ctgccaagcttctttataattaccc

SEQ ID NO: 6053057 - DNA, 25 bp, Homo sapien
tcaaccttgttatgactgattccaa

SEQ ID NO: 6053058 - DNA, 25 bp, Homo sapien
cactgcctgttttcgattcacccgg

SEQ ID NO: 6053059 - DNA, 25 bp, Homo sapien
tatcgtcagttcagatgtgccgagc

SEQ ID NO: 6053060 - DNA, 25 bp, Homo sapien
gcggattcacttcaaactcagtcat

SEQ ID NO: 6053061 - DNA, 25 bp, Homo sapien
ttcggcttatctccgaccaatacag

SEQ ID NO: 6053062 - DNA, 25 bp, Homo sapien
aacttaaaaactcttctatcgtcag

SEQ ID NO: 6053063 - DNA, 25 bp, Homo sapien
tcaccacgactgtttcattaggaga

SEQ ID NO: 6053064 - DNA, 25 bp, Homo sapien
ctcgagtacaatatgcgggatacag

SEQ ID NO: 6053065 - DNA, 25 bp, Homo sapien
gccgagctcggccacgacaggtatt

SEQ ID NO: 6053066 - DNA, 25 bp, Homo sapien
tcggtctgattgcatccaatagtgg

SEQ ID NO: 6053067 - DNA, 25 bp, Homo sapien
tatcagcaattgactgccaagcttc

SEQ ID NO: 6053068 - DNA, 25 bp, Homo sapien
tgatacgtttttcaagcgactttgt

SEQ ID NO: 6053069 - DNA, 25 bp, Homo sapien
tgactcgatccatcatcgtataagc

SEQ ID NO: 6053070 - DNA, 25 bp, Homo sapien
gcgagatcaccacgactgtttcatt

SEQ ID NO: 6053071 - DNA, 25 bp, Homo sapien
cgtgactgatttgtccaaagttatg

SEQ ID NO: 6053072 - DNA, 25 bp, Homo sapien
tgattgcatccaatagtggactgaa

SEQ ID NO: 6053073 - DNA, 25 bp, Homo sapien
tgagcggctcgagtacaatatgcgg

SEQ ID NO: 6053074 - DNA, 25 bp, Homo sapien
ttatctccgaccaatacagtaagag

SEQ ID NO: 6053075 - DNA, 25 bp, Homo sapien
caaactcagtcatttccggttcaat

SEQ ID NO: 6053076 - DNA, 25 bp, Homo sapien
gctcggccacgacaggtatttgtgc

SEQ ID NO: 6053077 - DNA, 25 bp, Homo sapien
attacccagtgcattttcaaataaa

SEQ ID NO: 6053078 - DNA, 25 bp, Homo sapien
caccgctgatttcaccaatttgagt

SEQ ID NO: 6053079 - DNA, 25 bp, Homo sapien
cagtgcattttcaaataaattagaa

SEQ ID NO: 6053080 - DNA, 25 bp, Homo sapien
tctgtcaaactgtcaaccttgttat

SEQ ID NO: 6053081 - DNA, 25 bp, Homo sapien
aaactgtcaaccttgttatgactga

SEQ ID NO: 6053082 - DNA, 25 bp, Homo sapien
tttgtttcaatttctgtcaaactgt

SEQ ID NO: 6053083 - DNA, 25 bp, Homo sapien
taggagataccatctgaacaaattg

SEQ ID NO: 6053084 - DNA, 25 bp, Homo sapien
taatgacaccgctgatttcaccaat

SEQ ID NO: 6053085 - DNA, 25 bp, Homo sapien
cgactgtttcattaggagataccat

SEQ ID NO: 6053086 - DNA, 25 bp, Homo sapien
agatgtgccgagctcggccacgaca

SEQ ID NO: 6053087 - DNA, 25 bp, Homo sapien
cagttcagatgtgccgagctcggcc

SEQ ID NO: 6053088 - DNA, 25 bp, Homo sapien
ggatacagagattaatgacaccgct

SEQ ID NO: 6053089 - DNA, 25 bp, Homo sapien
caaattgcggattcacttcaaactc

SEQ ID NO: 6053090 - DNA, 25 bp, Homo sapien
gactgaaagcttcggtatgagcggc

SEQ ID NO: 6053091 - DNA, 25 bp, Homo sapien
tacaatatgcgggatacagagatta

SEQ ID NO: 6053092 - DNA, 25 bp, Homo sapien
agcttctttataattacccagtgca

SEQ ID NO: 6053093 - DNA, 25 bp, Homo sapien
ctgtcatgatacgtttttcaagcga

SEQ ID NO: 6053094 - DNA, 25 bp, Homo sapien
ctcttctatcgtcagttcagatgtg

SEQ ID NO: 6053095 - DNA, 25 bp, Homo sapien
cggtatgagcggctcgagtacaata

SEQ ID NO: 6053096 - DNA, 25 bp, Homo sapien
gatccatcatcgtataagctatcgt

SEQ ID NO: 6053097 - DNA, 25 bp, Homo sapien
gtaagaggatccgtgactgatttgt

SEQ ID NO: 6053098 - DNA, 25 bp, Homo sapien
tttgtgctgtcatgatacgtttttc

SEQ ID NO: 6053099 - DNA, 25 bp, Homo sapien
ctcatttcggtctgattgcatccaa

SEQ ID NO: 6053100 - DNA, 25 bp, Homo sapien
caccaatttgagtattgagcgagat

SEQ ID NO: 6053101 - DNA, 25 bp, Homo sapien
tgatttgtccaaagttatgcagtct

SEQ ID NO: 6053102 - DNA, 25 bp, Homo sapien
ctcaggctttggctcatttcggtct

SEQ ID NO: 6053103 - DNA, 25 bp, Homo sapien
tttataattacccagtgcattttca

SEQ ID NO: 6053104 - DNA, 25 bp, Homo sapien
cagtcatttccggttcaatatcagc

SEQ ID NO: 6053105 - DNA, 25 bp, Homo sapien
aatttgcactgcctgttttcgattc

SEQ ID NO: 6053106 - DNA, 25 bp, Homo sapien
tatgcgggatacagagattaatgac

SEQ ID NO: 6053107 - DNA, 25 bp, Homo sapien
tcaatttctgtcaaactgtcaacct

SEQ ID NO: 6053108 - DNA, 25 bp, Homo sapien
tgtttcctcaggctttggctcattt

SEQ ID NO: 6053109 - DNA, 25 bp, Homo sapien
caattgactgccaagcttctttata

SEQ ID NO: 6053110 - DNA, 25 bp, Homo sapien
tttgagtattgagcgagatcaccac

SEQ ID NO: 6053111 - DNA, 25 bp, Homo sapien
tgactgattccaatcccgcccatga

SEQ ID NO: 6053112 - DNA, 25 bp, Homo sapien
ataccatctgaacaaattgcggatt

SEQ ID NO: 6053113 - DNA, 25 bp, Homo sapien
tcacttcaaactcagtcatttccgg

SEQ ID NO: 6053114 - DNA, 25 bp, Homo sapien
tagaaatgatttttgtttcaatttc

SEQ ID NO: 6053115 - DNA, 25 bp, Homo sapien
attccaatcccgcccatgactcgat

SEQ ID NO: 6053116 - DNA, 25 bp, Homo sapien
ccgaccaatacagtaagaggatccg

SEQ ID NO: 6053117 - DNA, 25 bp, Homo sapien
gttcaatatcagcaattgactgcca

SEQ ID NO: 6053118 - DNA, 25 bp, Homo sapien
ttcaagcgactttgtttcctcaggc

SEQ ID NO: 6053119 - DNA, 25 bp, Homo sapien
agagattaatgacaccgctgatttc

SEQ ID NO: 6053120 - DNA, 25 bp, Homo sapien
aatcccgcccatgactcgatccatc

SEQ ID NO: 6053121 - DNA, 25 bp, Homo sapien
ctgttttcgattcacccggccggct

SEQ ID NO: 6053122 - DNA, 25 bp, Homo sapien
caggtatttgtgctgtcatgatacg

SEQ ID NO: 6053123 - DNA, 25 bp, Homo sapien
taaattagaaatgatttttgtttca

SEQ ID NO: 6053124 - DNA, 25 bp, Homo sapien
taaaaactcttctatcgtcagttca

SEQ ID NO: 6053125 - DNA, 25 bp, Homo sapien
tctgaacaaattgcggattcacttc

SEQ ID NO: 6053126 - DNA, 25 bp, Homo sapien
tttcattaggagataccatctgaac

SEQ ID NO: 6053127 - DNA, 25 bp, Homo sapien
cgactttgtttcctcaggctttggc

SEQ ID NO: 6053128 - DNA, 25 bp, Homo sapien
catccaatagtggactgaaagcttc

SEQ ID NO: 6053129 - DNA, 25 bp, Homo sapien
tattgagcgagatcaccacgactgt

SEQ ID NO: 6053130 - DNA, 25 bp, Homo sapien
gattcacccggccggcttgtcctaa

SEQ ID NO: 6053131 - DNA, 25 bp, Homo sapien
tttttcagcaatcttcagtttatcg

SEQ ID NO: 6053132 - DNA, 25 bp, Homo sapien
ttgtgacaacgacaatatctttggt

SEQ ID NO: 6053133 - DNA, 25 bp, Homo sapien
tggatgatttttcaagcatatcggg

SEQ ID NO: 6053134 - DNA, 25 bp, Homo sapien
taagcgtgttttgcctgtttgatcg

SEQ ID NO: 6053135 - DNA, 25 bp, Homo sapien
aaagcttggccgctccaccatgaac

SEQ ID NO: 6053136 - DNA, 25 bp, Homo sapien
tatcgggttcaagtctgatatcgga

SEQ ID NO: 6053137 - DNA, 25 bp, Homo sapien
agtcgtaatgattgttgcgtcgcct

SEQ ID NO: 6053138 - DNA, 25 bp, Homo sapien
ttctaaaagagaagcagctttttca

SEQ ID NO: 6053139 - DNA, 25 bp, Homo sapien
atgaagcgcctccaataatcgcgcc

SEQ ID NO: 6053140 - DNA, 25 bp, Homo sapien
gtttgtccccagaaaactcttgtca

SEQ ID NO: 6053141 - DNA, 25 bp, Homo sapien
tttccttattaatgcatcgatatgc

SEQ ID NO: 6053142 - DNA, 25 bp, Homo sapien
cccttcttctaaaagagaagcagct

SEQ ID NO: 6053143 - DNA, 25 bp, Homo sapien
tccatggcaaccaatgaagcgcctc

SEQ ID NO: 6053144 - DNA, 25 bp, Homo sapien
aacttcgaagggtctgctaagacgt

SEQ ID NO: 6053145 - DNA, 25 bp, Homo sapien
aagagaagcagctttttcagcaatc

SEQ ID NO: 6053146 - DNA, 25 bp, Homo sapien
caacgacaatatctttggttttatc

SEQ ID NO: 6053147 - DNA, 25 bp, Homo sapien
gtgaaggtttttggatgatttttca

SEQ ID NO: 6053148 - DNA, 25 bp, Homo sapien
tatcggaaagcttggccgctccacc

SEQ ID NO: 6053149 - DNA, 25 bp, Homo sapien
tcatgtgcaatgtcgtcgtgcctgc

SEQ ID NO: 6053150 - DNA, 25 bp, Homo sapien
ggcgaatgccgaaaatgaaatttct

SEQ ID NO: 6053151 - DNA, 25 bp, Homo sapien
tattaatgcatcgatatgcattacc

SEQ ID NO: 6053152 - DNA, 25 bp, Homo sapien
tattccggcgaatgccgaaaatgaa

SEQ ID NO: 6053153 - DNA, 25 bp, Homo sapien
catcaaggtaaatgcaatccccttc

SEQ ID NO: 6053154 - DNA, 25 bp, Homo sapien
caagcagataaaaagaaatttcttt

SEQ ID NO: 6053155 - DNA, 25 bp, Homo sapien
ttacgtatcctccaagcagataaaa

SEQ ID NO: 6053156 - DNA, 25 bp, Homo sapien
gaagggtctgctaagacgtaagcgt

SEQ ID NO: 6053157 - DNA, 25 bp, Homo sapien
ccataaaatcaatcatgtgcaatgt

SEQ ID NO: 6053158 - DNA, 25 bp, Homo sapien
tgatcgctttctgttttaaaagggc

SEQ ID NO: 6053159 - DNA, 25 bp, Homo sapien
ctcttcagcgtcagtcgtaatgatt

SEQ ID NO: 6053160 - DNA, 25 bp, Homo sapien
tcgtcgtgcctgcatcaaggtaaat

SEQ ID NO: 6053161 - DNA, 25 bp, Homo sapien
tgccgaaaatgaaatttctccgaac

SEQ ID NO: 6053162 - DNA, 25 bp, Homo sapien
gtaattatcgaatgtaagctcttca

SEQ ID NO: 6053163 - DNA, 25 bp, Homo sapien
tatggacaccgtttgtccccagaaa

SEQ ID NO: 6053164 - DNA, 25 bp, Homo sapien
tgtgctttacgtatcctccaagcag

SEQ ID NO: 6053165 - DNA, 25 bp, Homo sapien
atccagcctctgtatggacaccgtt

SEQ ID NO: 6053166 - DNA, 25 bp, Homo sapien
tttggttttatccataaaatcaatc

SEQ ID NO: 6053167 - DNA, 25 bp, Homo sapien
ctgttttaaaagggcctcatcaggg

SEQ ID NO: 6053168 - DNA, 25 bp, Homo sapien
cttcagtttatcgtgaaggtttttg

SEQ ID NO: 6053169 - DNA, 25 bp, Homo sapien
gcattaccccgtttgtgacaacgac

SEQ ID NO: 6053170 - DNA, 25 bp, Homo sapien
gtactggtccatggcaaccaatgaa

SEQ ID NO: 6053171 - DNA, 25 bp, Homo sapien
atcgaatgtaagctcttcagcgtca

SEQ ID NO: 6053172 - DNA, 25 bp, Homo sapien
atgcatcgatatgcattaccccgtt

SEQ ID NO: 6053173 - DNA, 25 bp, Homo sapien
agcagctttttcagcaatcttcagt

SEQ ID NO: 6053174 - DNA, 25 bp, Homo sapien
aaaactcttgtcaaatctgtactgg

SEQ ID NO: 6053175 - DNA, 25 bp, Homo sapien
ccccgtttgtgacaacgacaatatc

SEQ ID NO: 6053176 - DNA, 25 bp, Homo sapien
caatatctttggttttatccataaa

SEQ ID NO: 6053177 - DNA, 25 bp, Homo sapien
aatgattgttgcgtcgcctattccg

SEQ ID NO: 6053178 - DNA, 25 bp, Homo sapien
tttatcgtgaaggtttttggatgat

SEQ ID NO: 6053179 - DNA, 25 bp, Homo sapien
aatcaatcatgtgcaatgtcgtcgt

SEQ ID NO: 6053180 - DNA, 25 bp, Homo sapien
cctgtttgatcgctttctgttttaa

SEQ ID NO: 6053181 - DNA, 25 bp, Homo sapien
gtcgcctattccggcgaatgccgaa

SEQ ID NO: 6053182 - DNA, 25 bp, Homo sapien
tctgctaagacgtaagcgtgttttg

SEQ ID NO: 6053183 - DNA, 25 bp, Homo sapien
atttttcaagcatatcgggttcaag

SEQ ID NO: 6053184 - DNA, 25 bp, Homo sapien
cgatatgcattaccccgtttgtgac

SEQ ID NO: 6053185 - DNA, 25 bp, Homo sapien
atgaaatttctccgaacttcgaagg

SEQ ID NO: 6053186 - DNA, 25 bp, Homo sapien
tctccgaacttcgaagggtctgcta

SEQ ID NO: 6053187 - DNA, 25 bp, Homo sapien
tttatccataaaatcaatcatgtgc

SEQ ID NO: 6053188 - DNA, 25 bp, Homo sapien
gcaatccccttcttctaaaagagaa

SEQ ID NO: 6053189 - DNA, 25 bp, Homo sapien
tgcctgcatcaaggtaaatgcaatc

SEQ ID NO: 6053190 - DNA, 25 bp, Homo sapien
gcaatgtcgtcgtgcctgcatcaag

SEQ ID NO: 6053191 - DNA, 25 bp, Homo sapien
gcaaccaatgaagcgcctccaataa

SEQ ID NO: 6053192 - DNA, 25 bp, Homo sapien
cctctgtatggacaccgtttgtccc

SEQ ID NO: 6053193 - DNA, 25 bp, Homo sapien
ctccaccatgaacgcgctttaaaaa

SEQ ID NO: 6053194 - DNA, 25 bp, Homo sapien
gttgtaaatccagcctctgtatgga

SEQ ID NO: 6053195 - DNA, 25 bp, Homo sapien
aaagggcctcatcagggtccggcgt

SEQ ID NO: 6053196 - DNA, 25 bp, Homo sapien
gttcaagtctgatatcggaaagctt

SEQ ID NO: 6053197 - DNA, 25 bp, Homo sapien
tgtaagctcttcagcgtcagtcgta

SEQ ID NO: 6053198 - DNA, 25 bp, Homo sapien
cctcatcagggtccggcgttgtaaa

SEQ ID NO: 6053199 - DNA, 25 bp, Homo sapien
tggccgctccaccatgaacgcgctt

SEQ ID NO: 6053200 - DNA, 25 bp, Homo sapien
aagacgtaagcgtgttttgcctgtt

SEQ ID NO: 6053201 - DNA, 25 bp, Homo sapien
tgttgcgtcgcctattccggcgaat

SEQ ID NO: 6053202 - DNA, 25 bp, Homo sapien
agcgtcagtcgtaatgattgttgcg

SEQ ID NO: 6053203 - DNA, 25 bp, Homo sapien
gttttgcctgtttgatcgctttctg

SEQ ID NO: 6053204 - DNA, 25 bp, Homo sapien
cgcctccaataatcgcgcccgttct

SEQ ID NO: 6053205 - DNA, 25 bp, Homo sapien
ggtttttggatgatttttcaagcat

SEQ ID NO: 6053206 - DNA, 25 bp, Homo sapien
gtctgatatcggaaagcttggccgc

SEQ ID NO: 6053207 - DNA, 25 bp, Homo sapien
cttgtcaaatctgtactggtccatg

SEQ ID NO: 6053208 - DNA, 25 bp, Homo sapien
atcctccaagcagataaaaagaaat

SEQ ID NO: 6053209 - DNA, 25 bp, Homo sapien
aaatctgtactggtccatggcaacc

SEQ ID NO: 6053210 - DNA, 25 bp, Homo sapien
agcaatcttcagtttatcgtgaagg

SEQ ID NO: 6053211 - DNA, 25 bp, Homo sapien
caagcatatcgggttcaagtctgat

SEQ ID NO: 6053212 - DNA, 25 bp, Homo sapien
catgaacgcgctttaaaaaaccgcg

SEQ ID NO: 6053213 - DNA, 25 bp, Homo sapien
tcgcgcccgttctgtgctttacgta

SEQ ID NO: 6053214 - DNA, 25 bp, Homo sapien
caataatcgcgcccgttctgtgctt

SEQ ID NO: 6053215 - DNA, 25 bp, Homo sapien
ggtaaatgcaatccccttcttctaa

SEQ ID NO: 6053216 - DNA, 25 bp, Homo sapien
ccccagaaaactcttgtcaaatctg

SEQ ID NO: 6053217 - DNA, 25 bp, Homo sapien
tcagggtccggcgttgtaaatccag

SEQ ID NO: 6053218 - DNA, 25 bp, Homo sapien
tccggcgttgtaaatccagcctctg

SEQ ID NO: 6053219 - DNA, 25 bp, Homo sapien
ccgttctgtgctttacgtatcctcc

SEQ ID NO: 6053220 - DNA, 25 bp, Homo sapien
gtcagggattttccgctgtcaccaa

SEQ ID NO: 6053221 - DNA, 25 bp, Homo sapien
aaactgtcaaccagctggtcaagct

SEQ ID NO: 6053222 - DNA, 25 bp, Homo sapien
aaacttggaatacaaatggattata

SEQ ID NO: 6053223 - DNA, 25 bp, Homo sapien
ttcttttcttcttgcgaaaattgta

SEQ ID NO: 6053224 - DNA, 25 bp, Homo sapien
cgccgacaagcttcatgatttcaat

SEQ ID NO: 6053225 - DNA, 25 bp, Homo sapien
accagtttgtcgcgccgacaagctt

SEQ ID NO: 6053226 - DNA, 25 bp, Homo sapien
ttcaatttcttttcttcttgcgaaa

SEQ ID NO: 6053227 - DNA, 25 bp, Homo sapien
gattataaggaagaagagagacaaa

SEQ ID NO: 6053228 - DNA, 25 bp, Homo sapien
tgaacctttggaacgacccatccga

SEQ ID NO: 6053229 - DNA, 25 bp, Homo sapien
taaacatgatccattttttcgatct

SEQ ID NO: 6053230 - DNA, 25 bp, Homo sapien
cgccgtaaataccaggccgataatt

SEQ ID NO: 6053231 - DNA, 25 bp, Homo sapien
attttccgctgtcaccaaaactgtc

SEQ ID NO: 6053232 - DNA, 25 bp, Homo sapien
gcagcaatccttcaaggaaaaacgg

SEQ ID NO: 6053233 - DNA, 25 bp, Homo sapien
gcaatcggaatcacagaaccgaata

SEQ ID NO: 6053234 - DNA, 25 bp, Homo sapien
gaacatcgccgtaaataccaggccg

SEQ ID NO: 6053235 - DNA, 25 bp, Homo sapien
ttcattgtcagggattttccgctgt

SEQ ID NO: 6053236 - DNA, 25 bp, Homo sapien
ttttcctgatccttcattgtcaggg

SEQ ID NO: 6053237 - DNA, 25 bp, Homo sapien
tcaaccagctggtcaagctcttttt

SEQ ID NO: 6053238 - DNA, 25 bp, Homo sapien
ataagtgactttataaacatgatcc

SEQ ID NO: 6053239 - DNA, 25 bp, Homo sapien
cactttaaacaaacggctgacctct

SEQ ID NO: 6053240 - DNA, 25 bp, Homo sapien
taagtgctcagcaccagtgcaatcg

SEQ ID NO: 6053241 - DNA, 25 bp, Homo sapien
gatgacgtattggtaagtgctcagc

SEQ ID NO: 6053242 - DNA, 25 bp, Homo sapien
gccagcggataaaccagtttgtcgc

SEQ ID NO: 6053243 - DNA, 25 bp, Homo sapien
tcaccaaaactgtcaaccagctggt

SEQ ID NO: 6053244 - DNA, 25 bp, Homo sapien
acttccccatactccaattactgcg

SEQ ID NO: 6053245 - DNA, 25 bp, Homo sapien
aaataccaggccgataattaacgcg

SEQ ID NO: 6053246 - DNA, 25 bp, Homo sapien
caaatggattataaggaagaagaga

SEQ ID NO: 6053247 - DNA, 25 bp, Homo sapien
gccacgttcggcgtatcatgcggat

SEQ ID NO: 6053248 - DNA, 25 bp, Homo sapien
actccaattactgcgccgattgcaa

SEQ ID NO: 6053249 - DNA, 25 bp, Homo sapien
tctttttctttagatgaaaaagtga

SEQ ID NO: 6053250 - DNA, 25 bp, Homo sapien
tgatccttgaacctttggaacgacc

SEQ ID NO: 6053251 - DNA, 25 bp, Homo sapien
catgatttcaatttcttttcttctt

SEQ ID NO: 6053252 - DNA, 25 bp, Homo sapien
agcgggttttcctgatccttcattg

SEQ ID NO: 6053253 - DNA, 25 bp, Homo sapien
ttactgcgccgattgcaatcagcac

SEQ ID NO: 6053254 - DNA, 25 bp, Homo sapien
aacggccagcggataaaccagtttg

SEQ ID NO: 6053255 - DNA, 25 bp, Homo sapien
gactttataaacatgatccattttt

SEQ ID NO: 6053256 - DNA, 25 bp, Homo sapien
tgatccttcattgtcagggattttc

SEQ ID NO: 6053257 - DNA, 25 bp, Homo sapien
tttttcgccacgttcggcgtatcat

SEQ ID NO: 6053258 - DNA, 25 bp, Homo sapien
gctcagcaccagtgcaatcggaatc

SEQ ID NO: 6053259 - DNA, 25 bp, Homo sapien
ttcggcgtatcatgcggatctgtcg

SEQ ID NO: 6053260 - DNA, 25 bp, Homo sapien
tgcgaaaattgtaattttaatggtg

SEQ ID NO: 6053261 - DNA, 25 bp, Homo sapien
gacaaatgatccttgaacctttgga

SEQ ID NO: 6053262 - DNA, 25 bp, Homo sapien
gaaattaagaacatcgccgtaaata

SEQ ID NO: 6053263 - DNA, 25 bp, Homo sapien
tcaaggaaaaacggccagcggataa

SEQ ID NO: 6053264 - DNA, 25 bp, Homo sapien
ggataaaccagtttgtcgcgccgac

SEQ ID NO: 6053265 - DNA, 25 bp, Homo sapien
ttcgatctttttcgccacgttcggc

SEQ ID NO: 6053266 - DNA, 25 bp, Homo sapien
caaacggctgacctcttcttttcca

SEQ ID NO: 6053267 - DNA, 25 bp, Homo sapien
aacgacccatccgatgacgtattgg

SEQ ID NO: 6053268 - DNA, 25 bp, Homo sapien
atccttcaaggaaaaacggccagcg

SEQ ID NO: 6053269 - DNA, 25 bp, Homo sapien
aacgcatcattaagcgggttttcct

SEQ ID NO: 6053270 - DNA, 25 bp, Homo sapien
ctagcgaaacttggaatacaaatgg

SEQ ID NO: 6053271 - DNA, 25 bp, Homo sapien
ttaatggtgttggaaattaagaaca

SEQ ID NO: 6053272 - DNA, 25 bp, Homo sapien
taacgcgattccgatgttgcgggaa

SEQ ID NO: 6053273 - DNA, 25 bp, Homo sapien
cgccgattgcaatcagcactagcga

SEQ ID NO: 6053274 - DNA, 25 bp, Homo sapien
cattttttcgatctttttcgccacg

SEQ ID NO: 6053275 - DNA, 25 bp, Homo sapien
cgaatacgcctagcagcaatccttc

SEQ ID NO: 6053276 - DNA, 25 bp, Homo sapien
ctcttcttttccataagtgacttta

SEQ ID NO: 6053277 - DNA, 25 bp, Homo sapien
atgttgcgggaaacgccgaccactt

SEQ ID NO: 6053278 - DNA, 25 bp, Homo sapien
agctggtcaagctctttttctttag

SEQ ID NO: 6053279 - DNA, 25 bp, Homo sapien
ggaatcacagaaccgaatacgccta

SEQ ID NO: 6053280 - DNA, 25 bp, Homo sapien
aggaagaagagagacaaatgatcct

SEQ ID NO: 6053281 - DNA, 25 bp, Homo sapien
tcattaagcgggttttcctgatcct

SEQ ID NO: 6053282 - DNA, 25 bp, Homo sapien
tttggaacgacccatccgatgacgt

SEQ ID NO: 6053283 - DNA, 25 bp, Homo sapien
caggccgataattaacgcgattccg

SEQ ID NO: 6053284 - DNA, 25 bp, Homo sapien
ttttccataagtgactttataaaca

SEQ ID NO: 6053285 - DNA, 25 bp, Homo sapien
caccagtgcaatcggaatcacagaa

SEQ ID NO: 6053286 - DNA, 25 bp, Homo sapien
gataattaacgcgattccgatgttg

SEQ ID NO: 6053287 - DNA, 25 bp, Homo sapien
tgatccattttttcgatctttttcg

SEQ ID NO: 6053288 - DNA, 25 bp, Homo sapien
ggaatacaaatggattataaggaag

SEQ ID NO: 6053289 - DNA, 25 bp, Homo sapien
tctttagatgaaaaagtgacactct

SEQ ID NO: 6053290 - DNA, 25 bp, Homo sapien
tctgtcgttttgacgacaaacgcat

SEQ ID NO: 6053291 - DNA, 25 bp, Homo sapien
tattggtaagtgctcagcaccagtg

SEQ ID NO: 6053292 - DNA, 25 bp, Homo sapien
gtatcatgcggatctgtcgttttga

SEQ ID NO: 6053293 - DNA, 25 bp, Homo sapien
ttgcaatcagcactagcgaaacttg

SEQ ID NO: 6053294 - DNA, 25 bp, Homo sapien
ccatccgatgacgtattggtaagtg

SEQ ID NO: 6053295 - DNA, 25 bp, Homo sapien
gctgacctcttcttttccataagtg

SEQ ID NO: 6053296 - DNA, 25 bp, Homo sapien
tcttcttgcgaaaattgtaatttta

SEQ ID NO: 6053297 - DNA, 25 bp, Homo sapien
cagaaccgaatacgcctagcagcaa

SEQ ID NO: 6053298 - DNA, 25 bp, Homo sapien
ccccatactccaattactgcgccga

SEQ ID NO: 6053299 - DNA, 25 bp, Homo sapien
tgcggatctgtcgttttgacgacaa

SEQ ID NO: 6053300 - DNA, 25 bp, Homo sapien
ttgtcgcgccgacaagcttcatgat

SEQ ID NO: 6053301 - DNA, 25 bp, Homo sapien
aagagagacaaatgatccttgaacc

SEQ ID NO: 6053302 - DNA, 25 bp, Homo sapien
cgctgtcaccaaaactgtcaaccag

SEQ ID NO: 6053303 - DNA, 25 bp, Homo sapien
gttttgacgacaaacgcatcattaa

SEQ ID NO: 6053304 - DNA, 25 bp, Homo sapien
gtgttggaaattaagaacatcgccg

SEQ ID NO: 6053305 - DNA, 25 bp, Homo sapien
tcaagctctttttctttagatgaaa

SEQ ID NO: 6053306 - DNA, 25 bp, Homo sapien
caagcttcatgatttcaatttcttt

SEQ ID NO: 6053307 - DNA, 25 bp, Homo sapien
acgacaaacgcatcattaagcgggt

SEQ ID NO: 6053308 - DNA, 25 bp, Homo sapien
tcagcactagcgaaacttggaatac

SEQ ID NO: 6053309 - DNA, 25 bp, Homo sapien
cgcctagcagcaatccttcaaggaa

SEQ ID NO: 6053310 - DNA, 25 bp, Homo sapien
gattccgatgttgcgggaaacgccg

SEQ ID NO: 6053311 - DNA, 25 bp, Homo sapien
agcagcagcaatcatcgcagcatta

SEQ ID NO: 6053312 - DNA, 25 bp, Homo sapien
gcgtattgatcaccgcagacttcaa

SEQ ID NO: 6053313 - DNA, 25 bp, Homo sapien
aaaccagttctgtatggcctcctga

SEQ ID NO: 6053314 - DNA, 25 bp, Homo sapien
cattccctttttcagctagcttgtc

SEQ ID NO: 6053315 - DNA, 25 bp, Homo sapien
catcgcagcattatccgtgcataaa

SEQ ID NO: 6053316 - DNA, 25 bp, Homo sapien
gagcaatctcttgccctttttggga

SEQ ID NO: 6053317 - DNA, 25 bp, Homo sapien
tccggctaaaaggacctgtttgaca

SEQ ID NO: 6053318 - DNA, 25 bp, Homo sapien
agctctgaggcctctgtttgcagct

SEQ ID NO: 6053319 - DNA, 25 bp, Homo sapien
acaaatcttccggagcaatctcttg

SEQ ID NO: 6053320 - DNA, 25 bp, Homo sapien
ctgggcaaattccttttctaatgca

SEQ ID NO: 6053321 - DNA, 25 bp, Homo sapien
ctcctgccgcatcatcaagggtttc

SEQ ID NO: 6053322 - DNA, 25 bp, Homo sapien
gttgtaagagccttcttcaagccat

SEQ ID NO: 6053323 - DNA, 25 bp, Homo sapien
gccctttttgggatgcattatgaag

SEQ ID NO: 6053324 - DNA, 25 bp, Homo sapien
agctaatggaggaatgacaagcgta

SEQ ID NO: 6053325 - DNA, 25 bp, Homo sapien
tgtaccagcagcagcaatcatcgca

SEQ ID NO: 6053326 - DNA, 25 bp, Homo sapien
taatcccttcatgctgggcaaattc

SEQ ID NO: 6053327 - DNA, 25 bp, Homo sapien
tggttaccaagacatcgatcacact

SEQ ID NO: 6053328 - DNA, 25 bp, Homo sapien
tggaggaatgacaagcgtaatccct

SEQ ID NO: 6053329 - DNA, 25 bp, Homo sapien
gcttgtcaatttgcggtccacccgg

SEQ ID NO: 6053330 - DNA, 25 bp, Homo sapien
ggatatggcaatcccatcgtccgcg

SEQ ID NO: 6053331 - DNA, 25 bp, Homo sapien
gaggcctctgtttgcagctactcct

SEQ ID NO: 6053332 - DNA, 25 bp, Homo sapien
atgcgcgaggaagcggaatattgtc

SEQ ID NO: 6053333 - DNA, 25 bp, Homo sapien
ctactcctccggctaaaaggacctg

SEQ ID NO: 6053334 - DNA, 25 bp, Homo sapien
gcggtccacccggatatggcaatcc

SEQ ID NO: 6053335 - DNA, 25 bp, Homo sapien
atgcattatgaagcgtattgatcac

SEQ ID NO: 6053336 - DNA, 25 bp, Homo sapien
tcatatcatatgcaccgcgaattcc

SEQ ID NO: 6053337 - DNA, 25 bp, Homo sapien
ccaagacatcgatcacactattttg

SEQ ID NO: 6053338 - DNA, 25 bp, Homo sapien
caaatgatccatgttccttcatata

SEQ ID NO: 6053339 - DNA, 25 bp, Homo sapien
gctgaagttgtaagagccttcttca

SEQ ID NO: 6053340 - DNA, 25 bp, Homo sapien
agcattatccgtgcataaagctaat

SEQ ID NO: 6053341 - DNA, 25 bp, Homo sapien
atccgtgcataaagctaatggagga

SEQ ID NO: 6053342 - DNA, 25 bp, Homo sapien
aggacctgtttgacatcatattcct

SEQ ID NO: 6053343 - DNA, 25 bp, Homo sapien
tgatcaccgcagacttcaatccgct

SEQ ID NO: 6053344 - DNA, 25 bp, Homo sapien
gctaaaaggacctgtttgacatcat

SEQ ID NO: 6053345 - DNA, 25 bp, Homo sapien
ttgcagctactcctccggctaaaag

SEQ ID NO: 6053346 - DNA, 25 bp, Homo sapien
tattcctttgccgcgcgcgccgttt

SEQ ID NO: 6053347 - DNA, 25 bp, Homo sapien
tgtttgacatcatattcctttgccg

SEQ ID NO: 6053348 - DNA, 25 bp, Homo sapien
gaggaagcggaatattgtcattccc

SEQ ID NO: 6053349 - DNA, 25 bp, Homo sapien
tggcagacaaatcttccggagcaat

SEQ ID NO: 6053350 - DNA, 25 bp, Homo sapien
tatgaagcgtattgatcaccgcaga

SEQ ID NO: 6053351 - DNA, 25 bp, Homo sapien
tcaaaagcaattgtaccagcagcag

SEQ ID NO: 6053352 - DNA, 25 bp, Homo sapien
ttcttcaagccatgcgcgaggaagc

SEQ ID NO: 6053353 - DNA, 25 bp, Homo sapien
ggccattcatatcatatgcaccgcg

SEQ ID NO: 6053354 - DNA, 25 bp, Homo sapien
tctgtttgcagctactcctccggct

SEQ ID NO: 6053355 - DNA, 25 bp, Homo sapien
ctttttcagctagcttgtcaatttg

SEQ ID NO: 6053356 - DNA, 25 bp, Homo sapien
cttccggagcaatctcttgcccttt

SEQ ID NO: 6053357 - DNA, 25 bp, Homo sapien
caagccatgcgcgaggaagcggaat

SEQ ID NO: 6053358 - DNA, 25 bp, Homo sapien
cctttttcaaaagcaattgtaccag

SEQ ID NO: 6053359 - DNA, 25 bp, Homo sapien
ccacccggatatggcaatcccatcg

SEQ ID NO: 6053360 - DNA, 25 bp, Homo sapien
taggcttctcctgccgcatcatcaa

SEQ ID NO: 6053361 - DNA, 25 bp, Homo sapien
gttctgtatggcctcctgaaacgac

SEQ ID NO: 6053362 - DNA, 25 bp, Homo sapien
agcaattgtaccagcagcagcaatc

SEQ ID NO: 6053363 - DNA, 25 bp, Homo sapien
aaattccttttctaatgcagctctg

SEQ ID NO: 6053364 - DNA, 25 bp, Homo sapien
tattgtcattccctttttcagctag

SEQ ID NO: 6053365 - DNA, 25 bp, Homo sapien
agagccttcttcaagccatgcgcga

SEQ ID NO: 6053366 - DNA, 25 bp, Homo sapien
tttgccgcgcgcgccgttttggtta

SEQ ID NO: 6053367 - DNA, 25 bp, Homo sapien
catcaagggtttccccaatgacttc

SEQ ID NO: 6053368 - DNA, 25 bp, Homo sapien
tattttggaaactggcagacaaatc

SEQ ID NO: 6053369 - DNA, 25 bp, Homo sapien
ttgtcgtaggcttctcctgccgcat

SEQ ID NO: 6053370 - DNA, 25 bp, Homo sapien
tctcttgccctttttgggatgcatt

SEQ ID NO: 6053371 - DNA, 25 bp, Homo sapien
acttcaatccgctaaagctgaagtt

SEQ ID NO: 6053372 - DNA, 25 bp, Homo sapien
tcacactattttggaaactggcaga

SEQ ID NO: 6053373 - DNA, 25 bp, Homo sapien
ccgcagacttcaatccgctaaagct

SEQ ID NO: 6053374 - DNA, 25 bp, Homo sapien
ccgcatcatcaagggtttccccaat

SEQ ID NO: 6053375 - DNA, 25 bp, Homo sapien
gcgcgcgccgttttggttaccaaga

SEQ ID NO: 6053376 - DNA, 25 bp, Homo sapien
gctaaagctgaagttgtaagagcct

SEQ ID NO: 6053377 - DNA, 25 bp, Homo sapien
cagctagcttgtcaatttgcggtcc

SEQ ID NO: 6053378 - DNA, 25 bp, Homo sapien
cgggctggccattcatatcatatgc

SEQ ID NO: 6053379 - DNA, 25 bp, Homo sapien
caatttgcggtccacccggatatgg

SEQ ID NO: 6053380 - DNA, 25 bp, Homo sapien
aatgacaagcgtaatcccttcatgc

SEQ ID NO: 6053381 - DNA, 25 bp, Homo sapien
cttcatgctgggcaaattccttttc

SEQ ID NO: 6053382 - DNA, 25 bp, Homo sapien
catatgcaccgcgaattcctttttc

SEQ ID NO: 6053383 - DNA, 25 bp, Homo sapien
taatgcagctctgaggcctctgttt

SEQ ID NO: 6053384 - DNA, 25 bp, Homo sapien
aaggccgggctggccattcatatca

SEQ ID NO: 6053385 - DNA, 25 bp, Homo sapien
acatcatattcctttgccgcgcgcg

SEQ ID NO: 6053386 - DNA, 25 bp, Homo sapien
tatggcctcctgaaacgaccaatgc

SEQ ID NO: 6053387 - DNA, 25 bp, Homo sapien
cttttctaatgcagctctgaggcct

SEQ ID NO: 6053388 - DNA, 25 bp, Homo sapien
gtccgcgccactttgtcgtaggctt

SEQ ID NO: 6053389 - DNA, 25 bp, Homo sapien
tgcaccgcgaattcctttttcaaaa

SEQ ID NO: 6053390 - DNA, 25 bp, Homo sapien
atccatgttccttcatataaaccag

SEQ ID NO: 6053391 - DNA, 25 bp, Homo sapien
tcatataaaccagttctgtatggcc

SEQ ID NO: 6053392 - DNA, 25 bp, Homo sapien
cgaattcctttttcaaaagcaattg

SEQ ID NO: 6053393 - DNA, 25 bp, Homo sapien
tgacttcaaatgatccatgttcctt

SEQ ID NO: 6053394 - DNA, 25 bp, Homo sapien
catcgatcacactattttggaaact

SEQ ID NO: 6053395 - DNA, 25 bp, Homo sapien
tttgggatgcattatgaagcgtatt

SEQ ID NO: 6053396 - DNA, 25 bp, Homo sapien
agcaatcatcgcagcattatccgtg

SEQ ID NO: 6053397 - DNA, 25 bp, Homo sapien
gttccttcatataaaccagttctgt

SEQ ID NO: 6053398 - DNA, 25 bp, Homo sapien
ggaaactggcagacaaatcttccgg

SEQ ID NO: 6053399 - DNA, 25 bp, Homo sapien
ccgttttggttaccaagacatcgat

SEQ ID NO: 6053400 - DNA, 25 bp, Homo sapien
gggtttccccaatgacttcaaatga

SEQ ID NO: 6053401 - DNA, 25 bp, Homo sapien
gcggaatattgtcattccctttttc

SEQ ID NO: 6053402 - DNA, 25 bp, Homo sapien
gccactttgtcgtaggcttctcctg

SEQ ID NO: 6053403 - DNA, 25 bp, Homo sapien
catcgtccgcgccactttgtcgtag

SEQ ID NO: 6053404 - DNA, 25 bp, Homo sapien
ccccaatgacttcaaatgatccatg

SEQ ID NO: 6053405 - DNA, 25 bp, Homo sapien
gcataaagctaatggaggaatgaca

SEQ ID NO: 6053406 - DNA, 25 bp, Homo sapien
ttcatatcaaatccctgctgctgcc

SEQ ID NO: 6053407 - DNA, 25 bp, Homo sapien
tgacttctttggcaatttggtactc

SEQ ID NO: 6053408 - DNA, 25 bp, Homo sapien
caaatgcgatatggtctgtcaacgc

SEQ ID NO: 6053409 - DNA, 25 bp, Homo sapien
agaaatggatttttcatatcaaatc

SEQ ID NO: 6053410 - DNA, 25 bp, Homo sapien
cgtcctattgcttatgtgatagatg

SEQ ID NO: 6053411 - DNA, 25 bp, Homo sapien
atctccccttccggaaggcagagtc

SEQ ID NO: 6053412 - DNA, 25 bp, Homo sapien
aatatgttcatttaatgagtgattc

SEQ ID NO: 6053413 - DNA, 25 bp, Homo sapien
tcaatcacctcgacaagctgcgcca

SEQ ID NO: 6053414 - DNA, 25 bp, Homo sapien
gaactggtttcttcaatgtttgctg

SEQ ID NO: 6053415 - DNA, 25 bp, Homo sapien
ccgcaaatagttgacactttcctta

SEQ ID NO: 6053416 - DNA, 25 bp, Homo sapien
cactttccttatttactttcatttg

SEQ ID NO: 6053417 - DNA, 25 bp, Homo sapien
taatgagtgattcgtcctattgctt

SEQ ID NO: 6053418 - DNA, 25 bp, Homo sapien
atagatgacatcgtttgaaatatca

SEQ ID NO: 6053419 - DNA, 25 bp, Homo sapien
tatgtgatagatgacatcgtttgaa

SEQ ID NO: 6053420 - DNA, 25 bp, Homo sapien
gtttcttcaatgtttgctgcaagat

SEQ ID NO: 6053421 - DNA, 25 bp, Homo sapien
acgctgaatggatatgcagagcgat

SEQ ID NO: 6053422 - DNA, 25 bp, Homo sapien
gagcgataaaaccaatctccccttc

SEQ ID NO: 6053423 - DNA, 25 bp, Homo sapien
gacatcgtttgaaatatcaacgagc

SEQ ID NO: 6053424 - DNA, 25 bp, Homo sapien
ttcatttgaaatgagtcttcaatca

SEQ ID NO: 6053425 - DNA, 25 bp, Homo sapien
tttctattgtaaatctgatatgcct

SEQ ID NO: 6053426 - DNA, 25 bp, Homo sapien
gtgactgagtctccattagaaatgg

SEQ ID NO: 6053427 - DNA, 25 bp, Homo sapien
acagcggacggtttgtcaacgctga

SEQ ID NO: 6053428 - DNA, 25 bp, Homo sapien
gatcagccgcaaatagttgacactt

SEQ ID NO: 6053429 - DNA, 25 bp, Homo sapien
catagcggatattcatttttcaata

SEQ ID NO: 6053430 - DNA, 25 bp, Homo sapien
ctgctgccttttgatcgcaaatgcg

SEQ ID NO: 6053431 - DNA, 25 bp, Homo sapien
ccttttgatcgcaaatgcgatatgg

SEQ ID NO: 6053432 - DNA, 25 bp, Homo sapien
tatgcagagcgataaaaccaatctc

SEQ ID NO: 6053433 - DNA, 25 bp, Homo sapien
tccaagctgtattgtagcatagcgg

SEQ ID NO: 6053434 - DNA, 25 bp, Homo sapien
gagtcttcaatcacctcgacaagct

SEQ ID NO: 6053435 - DNA, 25 bp, Homo sapien
gagtctccattagaaatggattttt

SEQ ID NO: 6053436 - DNA, 25 bp, Homo sapien
attgcttatgtgatagatgacatcg

SEQ ID NO: 6053437 - DNA, 25 bp, Homo sapien
ccctgctgctgccttttgatcgcaa

SEQ ID NO: 6053438 - DNA, 25 bp, Homo sapien
taattctttctattgtaaatctgat

SEQ ID NO: 6053439 - DNA, 25 bp, Homo sapien
gtgattcgtcctattgcttatgtga

SEQ ID NO: 6053440 - DNA, 25 bp, Homo sapien
tgatcatatctatgacttctttggc

SEQ ID NO: 6053441 - DNA, 25 bp, Homo sapien
ctgtattgtagcatagcggatattc

SEQ ID NO: 6053442 - DNA, 25 bp, Homo sapien
ttactttcatttgaaatgagtcttc

SEQ ID NO: 6053443 - DNA, 25 bp, Homo sapien
acctcgacaagctgcgccatgagct

SEQ ID NO: 6053444 - DNA, 25 bp, Homo sapien
accaatctccccttccggaaggcag

SEQ ID NO: 6053445 - DNA, 25 bp, Homo sapien
aatggatatgcagagcgataaaacc

SEQ ID NO: 6053446 - DNA, 25 bp, Homo sapien
tttcattgatcatatctatgacttc

SEQ ID NO: 6053447 - DNA, 25 bp, Homo sapien
ggtactcctcaggatatagtgactg

SEQ ID NO: 6053448 - DNA, 25 bp, Homo sapien
caataacaacattaatttttctggt

SEQ ID NO: 6053449 - DNA, 25 bp, Homo sapien
gtctgtcaacgcaatgtgaatatgt

SEQ ID NO: 6053450 - DNA, 25 bp, Homo sapien
gatcgcaaatgcgatatggtctgtc

SEQ ID NO: 6053451 - DNA, 25 bp, Homo sapien
aatgtgaatatgttcatttaatgag

SEQ ID NO: 6053452 - DNA, 25 bp, Homo sapien
gatatggtctgtcaacgcaatgtga

SEQ ID NO: 6053453 - DNA, 25 bp, Homo sapien
atagttgacactttccttatttact

SEQ ID NO: 6053454 - DNA, 25 bp, Homo sapien
ttcatttaatgagtgattcgtccta

SEQ ID NO: 6053455 - DNA, 25 bp, Homo sapien
catttttcaataacaacattaattt

SEQ ID NO: 6053456 - DNA, 25 bp, Homo sapien
ggaaggcagagtcccgctttttcat

SEQ ID NO: 6053457 - DNA, 25 bp, Homo sapien
tatgcctgatcagccgcaaatagtt

SEQ ID NO: 6053458 - DNA, 25 bp, Homo sapien
gcttccgcctcatgaactggtttct

SEQ ID NO: 6053459 - DNA, 25 bp, Homo sapien
gtttgaaatatcaacgagcttttca

SEQ ID NO: 6053460 - DNA, 25 bp, Homo sapien
ttttaatcaatttccaagctgtatt

SEQ ID NO: 6053461 - DNA, 25 bp, Homo sapien
atctgatatgcctgatcagccgcaa

SEQ ID NO: 6053462 - DNA, 25 bp, Homo sapien
gcaagattttaatcaatttccaagc

SEQ ID NO: 6053463 - DNA, 25 bp, Homo sapien
gattgacctcggacagcggacggtt

SEQ ID NO: 6053464 - DNA, 25 bp, Homo sapien
cctcaggatatagtgactgagtctc

SEQ ID NO: 6053465 - DNA, 25 bp, Homo sapien
ggatttttcatatcaaatccctgct

SEQ ID NO: 6053466 - DNA, 25 bp, Homo sapien
ctttggcaatttggtactcctcagg

SEQ ID NO: 6053467 - DNA, 25 bp, Homo sapien
tgtagcatagcggatattcattttt

SEQ ID NO: 6053468 - DNA, 25 bp, Homo sapien
ttgtcaacgctgaatggatatgcag

SEQ ID NO: 6053469 - DNA, 25 bp, Homo sapien
ccattagaaatggatttttcatatc

SEQ ID NO: 6053470 - DNA, 25 bp, Homo sapien
ttgtaaatctgatatgcctgatcag

SEQ ID NO: 6053471 - DNA, 25 bp, Homo sapien
tttgctgcaagattttaatcaattt

SEQ ID NO: 6053472 - DNA, 25 bp, Homo sapien
ccttatttactttcatttgaaatga

SEQ ID NO: 6053473 - DNA, 25 bp, Homo sapien
caacgcaatgtgaatatgttcattt

SEQ ID NO: 6053474 - DNA, 25 bp, Homo sapien
tgaaatgagtcttcaatcacctcga

SEQ ID NO: 6053475 - DNA, 25 bp, Homo sapien
tcaatgtttgctgcaagattttaat

SEQ ID NO: 6053476 - DNA, 25 bp, Homo sapien
agagtcccgctttttcattgatcat

SEQ ID NO: 6053477 - DNA, 25 bp, Homo sapien
ctgcgccatgagctgagagtgctga

SEQ ID NO: 6053478 - DNA, 25 bp, Homo sapien
ccgctttttcattgatcatatctat

SEQ ID NO: 6053479 - DNA, 25 bp, Homo sapien
aatatcaacgagcttttcatcaaca

SEQ ID NO: 6053480 - DNA, 25 bp, Homo sapien
cctcatgaactggtttcttcaatgt

SEQ ID NO: 6053481 - DNA, 25 bp, Homo sapien
ggatattcatttttcaataacaaca

SEQ ID NO: 6053482 - DNA, 25 bp, Homo sapien
taaaccgcttccgcctcatgaactg

SEQ ID NO: 6053483 - DNA, 25 bp, Homo sapien
tcaaatccctgctgctgccttttga

SEQ ID NO: 6053484 - DNA, 25 bp, Homo sapien
agtgctgattgacctcggacagcgg

SEQ ID NO: 6053485 - DNA, 25 bp, Homo sapien
ccatgagctgagagtgctgattgac

SEQ ID NO: 6053486 - DNA, 25 bp, Homo sapien
tcaatttccaagctgtattgtagca

SEQ ID NO: 6053487 - DNA, 25 bp, Homo sapien
gatatagtgactgagtctccattag

SEQ ID NO: 6053488 - DNA, 25 bp, Homo sapien
caatttggtactcctcaggatatag

SEQ ID NO: 6053489 - DNA, 25 bp, Homo sapien
gacggtttgtcaacgctgaatggat

SEQ ID NO: 6053490 - DNA, 25 bp, Homo sapien
cctcggacagcggacggtttgtcaa

SEQ ID NO: 6053491 - DNA, 25 bp, Homo sapien
gctgagagtgctgattgacctcgga

SEQ ID NO: 6053492 - DNA, 25 bp, Homo sapien
gacaagctgcgccatgagctgagag

SEQ ID NO: 6053493 - DNA, 25 bp, Homo sapien
ccttccggaaggcagagtcccgctt

SEQ ID NO: 6053494 - DNA, 25 bp, Homo sapien
aatcgctcggataatcgtttcatgg

SEQ ID NO: 6053495 - DNA, 25 bp, Homo sapien
agactttcatcatttcaagaatttt

SEQ ID NO: 6053496 - DNA, 25 bp, Homo sapien
cgcacatcataaatttccgcgattt

SEQ ID NO: 6053497 - DNA, 25 bp, Homo sapien
tatcctttgttttgatggcttgaat

SEQ ID NO: 6053498 - DNA, 25 bp, Homo sapien
ttgtgagagccataggtcttctacc

SEQ ID NO: 6053499 - DNA, 25 bp, Homo sapien
tagattgttccagatcatctgaatg

SEQ ID NO: 6053500 - DNA, 25 bp, Homo sapien
tcataaatttccgcgattttcttct

SEQ ID NO: 6053501 - DNA, 25 bp, Homo sapien
aattacgaccgctcccattcgttct

SEQ ID NO: 6053502 - DNA, 25 bp, Homo sapien
cgcatcgataaaagaataaagcttt

SEQ ID NO: 6053503 - DNA, 25 bp, Homo sapien
tttttcggatgcgagtatttttagc

SEQ ID NO: 6053504 - DNA, 25 bp, Homo sapien
tcagttaaaccaattacgaccgctc

SEQ ID NO: 6053505 - DNA, 25 bp, Homo sapien
atttccgcgattttcttctcagtta

SEQ ID NO: 6053506 - DNA, 25 bp, Homo sapien
ttctaccttatcctgcacatcatca

SEQ ID NO: 6053507 - DNA, 25 bp, Homo sapien
catcctcatatttgattgagacttt

SEQ ID NO: 6053508 - DNA, 25 bp, Homo sapien
gtattttctgataaaatggtaccgc

SEQ ID NO: 6053509 - DNA, 25 bp, Homo sapien
tttttagcgcttcgcgaaccggcga

SEQ ID NO: 6053510 - DNA, 25 bp, Homo sapien
catatttgattgagactttcatcat

SEQ ID NO: 6053511 - DNA, 25 bp, Homo sapien
tcatcagcgccctatcctttgtttt

SEQ ID NO: 6053512 - DNA, 25 bp, Homo sapien
cgtcagcatcctcatatttgattga

SEQ ID NO: 6053513 - DNA, 25 bp, Homo sapien
ctattttgacaagccgttcaaagac

SEQ ID NO: 6053514 - DNA, 25 bp, Homo sapien
catttgttgtgagagccataggtct

SEQ ID NO: 6053515 - DNA, 25 bp, Homo sapien
taggtcttctaccttatcctgcaca

SEQ ID NO: 6053516 - DNA, 25 bp, Homo sapien
ctaagcggatgattttttcggatgc

SEQ ID NO: 6053517 - DNA, 25 bp, Homo sapien
aacagcacatcttgaaatgaaaatt

SEQ ID NO: 6053518 - DNA, 25 bp, Homo sapien
caaagttttggtgaagagactgaat

SEQ ID NO: 6053519 - DNA, 25 bp, Homo sapien
ctgaatgtatgaatgatcaatcgct

SEQ ID NO: 6053520 - DNA, 25 bp, Homo sapien
gtatgaatgatcaatcgctcggata

SEQ ID NO: 6053521 - DNA, 25 bp, Homo sapien
catgacgggttttagattgttccag

SEQ ID NO: 6053522 - DNA, 25 bp, Homo sapien
tgaaatgaaaattcgtcagcatcct

SEQ ID NO: 6053523 - DNA, 25 bp, Homo sapien
tcccattcgttctaagcggatgatt

SEQ ID NO: 6053524 - DNA, 25 bp, Homo sapien
acatcttgaaatgaaaattcgtcag

SEQ ID NO: 6053525 - DNA, 25 bp, Homo sapien
gcgccctatcctttgttttgatggc

SEQ ID NO: 6053526 - DNA, 25 bp, Homo sapien
caatgtctattttgacaagccgttc

SEQ ID NO: 6053527 - DNA, 25 bp, Homo sapien
gcgcttcgcgaaccggcgaacggct

SEQ ID NO: 6053528 - DNA, 25 bp, Homo sapien
gatcatctgaatgtatgaatgatca

SEQ ID NO: 6053529 - DNA, 25 bp, Homo sapien
gaagagactgaatcatcagcgccct

SEQ ID NO: 6053530 - DNA, 25 bp, Homo sapien
tctaaaatccttgtgaagtcttcat

SEQ ID NO: 6053531 - DNA, 25 bp, Homo sapien
cggatgcgagtatttttagcgcttc

SEQ ID NO: 6053532 - DNA, 25 bp, Homo sapien
taaccgtacccgcatcgataaaaga

SEQ ID NO: 6053533 - DNA, 25 bp, Homo sapien
ttgttttgatggcttgaatataaag

SEQ ID NO: 6053534 - DNA, 25 bp, Homo sapien
catcatcaaagttttggtgaagaga

SEQ ID NO: 6053535 - DNA, 25 bp, Homo sapien
taactaaaggctcaatgtctatttt

SEQ ID NO: 6053536 - DNA, 25 bp, Homo sapien
ccttatcctgcacatcatcaaagtt

SEQ ID NO: 6053537 - DNA, 25 bp, Homo sapien
ttgatggcttgaatataaagctcgt

SEQ ID NO: 6053538 - DNA, 25 bp, Homo sapien
tgacaagccgttcaaagacaaatgt

SEQ ID NO: 6053539 - DNA, 25 bp, Homo sapien
agtaaccgcacatcataaatttccg

SEQ ID NO: 6053540 - DNA, 25 bp, Homo sapien
cgagtatttttagcgcttcgcgaac

SEQ ID NO: 6053541 - DNA, 25 bp, Homo sapien
cgtacccgcatcgataaaagaataa

SEQ ID NO: 6053542 - DNA, 25 bp, Homo sapien
gaccgctcccattcgttctaagcgg

SEQ ID NO: 6053543 - DNA, 25 bp, Homo sapien
ttctaatagtaaccgcacatcataa

SEQ ID NO: 6053544 - DNA, 25 bp, Homo sapien
gcgattttcttctcagttaaaccaa

SEQ ID NO: 6053545 - DNA, 25 bp, Homo sapien
gagccataggtcttctaccttatcc

SEQ ID NO: 6053546 - DNA, 25 bp, Homo sapien
aaaatggtaccgctttcaatcagac

SEQ ID NO: 6053547 - DNA, 25 bp, Homo sapien
agctcgtggttatctaaaatccttg

SEQ ID NO: 6053548 - DNA, 25 bp, Homo sapien
tggttatctaaaatccttgtgaagt

SEQ ID NO: 6053549 - DNA, 25 bp, Homo sapien
gggttttagattgttccagatcatc

SEQ ID NO: 6053550 - DNA, 25 bp, Homo sapien
tgattgagactttcatcatttcaag

SEQ ID NO: 6053551 - DNA, 25 bp, Homo sapien
actgaatcatcagcgccctatcctt

SEQ ID NO: 6053552 - DNA, 25 bp, Homo sapien
tcggataatcgtttcatggaacagc

SEQ ID NO: 6053553 - DNA, 25 bp, Homo sapien
tcggcggcgattgtattttctgata

SEQ ID NO: 6053554 - DNA, 25 bp, Homo sapien
tttcaagaattttgctgagatcctt

SEQ ID NO: 6053555 - DNA, 25 bp, Homo sapien
aaggctcaatgtctattttgacaag

SEQ ID NO: 6053556 - DNA, 25 bp, Homo sapien
agaataaagctttccatgacgggtt

SEQ ID NO: 6053557 - DNA, 25 bp, Homo sapien
gaaaattcgtcagcatcctcatatt

SEQ ID NO: 6053558 - DNA, 25 bp, Homo sapien
tttggtgaagagactgaatcatcag

SEQ ID NO: 6053559 - DNA, 25 bp, Homo sapien
ggatgattttttcggatgcgagtat

SEQ ID NO: 6053560 - DNA, 25 bp, Homo sapien
tccttgtgaagtcttcatacttttc

SEQ ID NO: 6053561 - DNA, 25 bp, Homo sapien
cgaacggcttactgaaaactcggcg

SEQ ID NO: 6053562 - DNA, 25 bp, Homo sapien
gcttgaatataaagctcgtggttat

SEQ ID NO: 6053563 - DNA, 25 bp, Homo sapien
tgaaaactcggcggcgattgtattt

SEQ ID NO: 6053564 - DNA, 25 bp, Homo sapien
gatccttaactaaaggctcaatgtc

SEQ ID NO: 6053565 - DNA, 25 bp, Homo sapien
tcgttctaagcggatgattttttcg

SEQ ID NO: 6053566 - DNA, 25 bp, Homo sapien
gttccagatcatctgaatgtatgaa

SEQ ID NO: 6053567 - DNA, 25 bp, Homo sapien
gataaaagaataaagctttccatga

SEQ ID NO: 6053568 - DNA, 25 bp, Homo sapien
tctgataaaatggtaccgctttcaa

SEQ ID NO: 6053569 - DNA, 25 bp, Homo sapien
gcgattgtattttctgataaaatgg

SEQ ID NO: 6053570 - DNA, 25 bp, Homo sapien
atgatcaatcgctcggataatcgtt

SEQ ID NO: 6053571 - DNA, 25 bp, Homo sapien
aatcgtttcatggaacagcacatct

SEQ ID NO: 6053572 - DNA, 25 bp, Homo sapien
aaatgtttctaatagtaaccgcaca

SEQ ID NO: 6053573 - DNA, 25 bp, Homo sapien
gccgttcaaagacaaatgtttctaa

SEQ ID NO: 6053574 - DNA, 25 bp, Homo sapien
tgctgagatccttaactaaaggctc

SEQ ID NO: 6053575 - DNA, 25 bp, Homo sapien
gaattttgctgagatccttaactaa

SEQ ID NO: 6053576 - DNA, 25 bp, Homo sapien
gcgaaccggcgaacggcttactgaa

SEQ ID NO: 6053577 - DNA, 25 bp, Homo sapien
atataaagctcgtggttatctaaaa

SEQ ID NO: 6053578 - DNA, 25 bp, Homo sapien
gcttactgaaaactcggcggcgatt

SEQ ID NO: 6053579 - DNA, 25 bp, Homo sapien
tcatcatttcaagaattttgctgag

SEQ ID NO: 6053580 - DNA, 25 bp, Homo sapien
ttcttctcagttaaaccaattacga

SEQ ID NO: 6053581 - DNA, 25 bp, Homo sapien
tcatggaacagcacatcttgaaatg

SEQ ID NO: 6053582 - DNA, 25 bp, Homo sapien
cctgcacatcatcaaagttttggtg

SEQ ID NO: 6053583 - DNA, 25 bp, Homo sapien
tgaagtcttcatacttttcctttaa

SEQ ID NO: 6053584 - DNA, 25 bp, Homo sapien
tcctttaaccgtacccgcatcgata

SEQ ID NO: 6053585 - DNA, 25 bp, Homo sapien
agctttccatgacgggttttagatt

SEQ ID NO: 6053586 - DNA, 25 bp, Homo sapien
caaagacaaatgtttctaatagtaa

SEQ ID NO: 6053587 - DNA, 25 bp, Homo sapien
aaccaattacgaccgctcccattcg

SEQ ID NO: 6053588 - DNA, 25 bp, Homo sapien
taaaaacgggatgactgtcgctgcc

SEQ ID NO: 6053589 - DNA, 25 bp, Homo sapien
agattctgtactgataaaggcgaaa

SEQ ID NO: 6053590 - DNA, 25 bp, Homo sapien
aaatggaatgatcgccggcacaacc

SEQ ID NO: 6053591 - DNA, 25 bp, Homo sapien
gcggcaagtcccgtcacaccaaacg

SEQ ID NO: 6053592 - DNA, 25 bp, Homo sapien
cttcccatgtgattcatgagcgcca

SEQ ID NO: 6053593 - DNA, 25 bp, Homo sapien
cataaaaggaccagattctgtactg

SEQ ID NO: 6053594 - DNA, 25 bp, Homo sapien
cacactgttgccagcggggttaaga

SEQ ID NO: 6053595 - DNA, 25 bp, Homo sapien
aatgatcgccggcacaaccttgctg

SEQ ID NO: 6053596 - DNA, 25 bp, Homo sapien
cgggatgactgtcgctgccagcgtt

SEQ ID NO: 6053597 - DNA, 25 bp, Homo sapien
ccgactcagcaactggcgcaaatga

SEQ ID NO: 6053598 - DNA, 25 bp, Homo sapien
gtcacaccaaacgtcaccatggtca

SEQ ID NO: 6053599 - DNA, 25 bp, Homo sapien
actgtcgctgccagcgtttcccatg

SEQ ID NO: 6053600 - DNA, 25 bp, Homo sapien
aggcattcgcttccgctaatgcata

SEQ ID NO: 6053601 - DNA, 25 bp, Homo sapien
gccgagcgaaaaggcgaaaaatgga

SEQ ID NO: 6053602 - DNA, 25 bp, Homo sapien
gctgccagcgtttcccatgggaatg

SEQ ID NO: 6053603 - DNA, 25 bp, Homo sapien
aatgacgacagaaactccgataaaa

SEQ ID NO: 6053604 - DNA, 25 bp, Homo sapien
tttttatctacccacactgttgcca

SEQ ID NO: 6053605 - DNA, 25 bp, Homo sapien
tctgcttgatttttttatctaccca

SEQ ID NO: 6053606 - DNA, 25 bp, Homo sapien
agaagaagcggccactcccgcgaca

SEQ ID NO: 6053607 - DNA, 25 bp, Homo sapien
gaggtgacaataacgcttgtcgcga

SEQ ID NO: 6053608 - DNA, 25 bp, Homo sapien
ttccaaaattcaaggtattgccgag

SEQ ID NO: 6053609 - DNA, 25 bp, Homo sapien
atgcatatggcacggctacagccgc

SEQ ID NO: 6053610 - DNA, 25 bp, Homo sapien
tgtactgataaaggcgaaagcgccc

SEQ ID NO: 6053611 - DNA, 25 bp, Homo sapien
accaaacgtcaccatggtcataaaa

SEQ ID NO: 6053612 - DNA, 25 bp, Homo sapien
ggcgaaagcgcccgcatcctctttt

SEQ ID NO: 6053613 - DNA, 25 bp, Homo sapien
taaaacgatcaagcaaaaacaaaga

SEQ ID NO: 6053614 - DNA, 25 bp, Homo sapien
catggtcataaaaggaccagattct

SEQ ID NO: 6053615 - DNA, 25 bp, Homo sapien
tcgcttccgctaatgcatatggcac

SEQ ID NO: 6053616 - DNA, 25 bp, Homo sapien
actgcccgataaaatgacgacagaa

SEQ ID NO: 6053617 - DNA, 25 bp, Homo sapien
ttcatgagcgccaaatacagtccgc

SEQ ID NO: 6053618 - DNA, 25 bp, Homo sapien
tcagcattccaaaattcaaggtatt

SEQ ID NO: 6053619 - DNA, 25 bp, Homo sapien
tctccgctttttctgcttgattttt

SEQ ID NO: 6053620 - DNA, 25 bp, Homo sapien
agcgtttcccatgggaatgcggcaa

SEQ ID NO: 6053621 - DNA, 25 bp, Homo sapien
aattcaaggtattgccgagcgaaaa

SEQ ID NO: 6053622 - DNA, 25 bp, Homo sapien
acagccgcccctgccgtagaagaag

SEQ ID NO: 6053623 - DNA, 25 bp, Homo sapien
gttgccagcggggttaagagcgagg

SEQ ID NO: 6053624 - DNA, 25 bp, Homo sapien
cgaaaaggcgaaaaatggaatgatc

SEQ ID NO: 6053625 - DNA, 25 bp, Homo sapien
aaatgccgagcagccctgattggat

SEQ ID NO: 6053626 - DNA, 25 bp, Homo sapien
agcgccaaatacagtccgccgttcg

SEQ ID NO: 6053627 - DNA, 25 bp, Homo sapien
tcttttcttcccatgtgattcatga

SEQ ID NO: 6053628 - DNA, 25 bp, Homo sapien
aggtattgccgagcgaaaaggcgaa

SEQ ID NO: 6053629 - DNA, 25 bp, Homo sapien
caaatgaggcattcgcttccgctaa

SEQ ID NO: 6053630 - DNA, 25 bp, Homo sapien
caccatctccccgcgcaataaaacg

SEQ ID NO: 6053631 - DNA, 25 bp, Homo sapien
gataaaaatgccgagcagccctgat

SEQ ID NO: 6053632 - DNA, 25 bp, Homo sapien
acgcttgtcgcgataattgcagttg

SEQ ID NO: 6053633 - DNA, 25 bp, Homo sapien
aactccgataaaaatgccgagcagc

SEQ ID NO: 6053634 - DNA, 25 bp, Homo sapien
gagatcatgatccagatttccaagt

SEQ ID NO: 6053635 - DNA, 25 bp, Homo sapien
gggaatgcggcaagtcccgtcacac

SEQ ID NO: 6053636 - DNA, 25 bp, Homo sapien
atgtgattcatgagcgccaaataca

SEQ ID NO: 6053637 - DNA, 25 bp, Homo sapien
gcaaaaacaaagaactgcccgataa

SEQ ID NO: 6053638 - DNA, 25 bp, Homo sapien
ggcgaaaaatggaatgatcgccggc

SEQ ID NO: 6053639 - DNA, 25 bp, Homo sapien
gacagaaactccgataaaaatgccg

SEQ ID NO: 6053640 - DNA, 25 bp, Homo sapien
tgccgtagaagaagcggccactccc

SEQ ID NO: 6053641 - DNA, 25 bp, Homo sapien
ccgcgacaccatctccccgcgcaat

SEQ ID NO: 6053642 - DNA, 25 bp, Homo sapien
atctacccacactgttgccagcggg

SEQ ID NO: 6053643 - DNA, 25 bp, Homo sapien
gcgcccgcatcctcttttcttccca

SEQ ID NO: 6053644 - DNA, 25 bp, Homo sapien
ctccccgcgcaataaaacgatcaag

SEQ ID NO: 6053645 - DNA, 25 bp, Homo sapien
aggaccagattctgtactgataaag

SEQ ID NO: 6053646 - DNA, 25 bp, Homo sapien
gccctgattggatcagcattccaaa

SEQ ID NO: 6053647 - DNA, 25 bp, Homo sapien
gtcgcgataattgcagttgccgact

SEQ ID NO: 6053648 - DNA, 25 bp, Homo sapien
gggttaagagcgaggtgacaataac

SEQ ID NO: 6053649 - DNA, 25 bp, Homo sapien
cgataaaatgacgacagaaactccg

SEQ ID NO: 6053650 - DNA, 25 bp, Homo sapien
cacaaccttgctgaataagtctctg

SEQ ID NO: 6053651 - DNA, 25 bp, Homo sapien
ccagcggggttaagagcgaggtgac

SEQ ID NO: 6053652 - DNA, 25 bp, Homo sapien
tatacatccaagtaaaaacgggatg

SEQ ID NO: 6053653 - DNA, 25 bp, Homo sapien
cagcaactggcgcaaatgaggcatt

SEQ ID NO: 6053654 - DNA, 25 bp, Homo sapien
atgatccagatttccaagtatacat

SEQ ID NO: 6053655 - DNA, 25 bp, Homo sapien
cagatttccaagtatacatccaagt

SEQ ID NO: 6053656 - DNA, 25 bp, Homo sapien
tgatttttttatctacccacactgt

SEQ ID NO: 6053657 - DNA, 25 bp, Homo sapien
cgagcagccctgattggatcagcat

SEQ ID NO: 6053658 - DNA, 25 bp, Homo sapien
ctggcgcaaatgaggcattcgcttc

SEQ ID NO: 6053659 - DNA, 25 bp, Homo sapien
ccgctaatgcatatggcacggctac

SEQ ID NO: 6053660 - DNA, 25 bp, Homo sapien
gatcaagcaaaaacaaagaactgcc

SEQ ID NO: 6053661 - DNA, 25 bp, Homo sapien
aagagcgaggtgacaataacgcttg

SEQ ID NO: 6053662 - DNA, 25 bp, Homo sapien
attggatcagcattccaaaattcaa

SEQ ID NO: 6053663 - DNA, 25 bp, Homo sapien
cagttgccgactcagcaactggcgc

SEQ ID NO: 6053664 - DNA, 25 bp, Homo sapien
gcgcaataaaacgatcaagcaaaaa

SEQ ID NO: 6053665 - DNA, 25 bp, Homo sapien
ataattgcagttgccgactcagcaa

SEQ ID NO: 6053666 - DNA, 25 bp, Homo sapien
agtcccgtcacaccaaacgtcacca

SEQ ID NO: 6053667 - DNA, 25 bp, Homo sapien
tcccatgggaatgcggcaagtcccg

SEQ ID NO: 6053668 - DNA, 25 bp, Homo sapien
gcatcctcttttcttcccatgtgat

SEQ ID NO: 6053669 - DNA, 25 bp, Homo sapien
gtctctgagatcatgatccagattt

SEQ ID NO: 6053670 - DNA, 25 bp, Homo sapien
tccaagtatacatccaagtaaaaac

SEQ ID NO: 6053671 - DNA, 25 bp, Homo sapien
acaataacgcttgtcgcgataattg

SEQ ID NO: 6053672 - DNA, 25 bp, Homo sapien
tccaagtaaaaacgggatgactgtc

SEQ ID NO: 6053673 - DNA, 25 bp, Homo sapien
aaagaactgcccgataaaatgacga

SEQ ID NO: 6053674 - DNA, 25 bp, Homo sapien
cgtcaccatggtcataaaaggacca

SEQ ID NO: 6053675 - DNA, 25 bp, Homo sapien
gaataagtctctgagatcatgatcc

SEQ ID NO: 6053676 - DNA, 25 bp, Homo sapien
cttgctgaataagtctctgagatca

SEQ ID NO: 6053677 - DNA, 25 bp, Homo sapien
gataaaggcgaaagcgcccgcatcc

SEQ ID NO: 6053678 - DNA, 25 bp, Homo sapien
cgccggcacaaccttgctgaataag

SEQ ID NO: 6053679 - DNA, 25 bp, Homo sapien
gcccctgccgtagaagaagcggcca

SEQ ID NO: 6053680 - DNA, 25 bp, Homo sapien
aatgttttcacgtagcggctgccag

SEQ ID NO: 6053681 - DNA, 25 bp, Homo sapien
ttaactgatacgcaaatgctcccgc

SEQ ID NO: 6053682 - DNA, 25 bp, Homo sapien
tcttcattaactgatacgcaaatgc

SEQ ID NO: 6053683 - DNA, 25 bp, Homo sapien
atcaatactgatgatgtcaccgtcc

SEQ ID NO: 6053684 - DNA, 25 bp, Homo sapien
aacaccatgtccgacatactcccta

SEQ ID NO: 6053685 - DNA, 25 bp, Homo sapien
caccctgctgccaggtatgccgtga

SEQ ID NO: 6053686 - DNA, 25 bp, Homo sapien
tgttcaaaatgagcacactttttcc

SEQ ID NO: 6053687 - DNA, 25 bp, Homo sapien
ttcacgtagcggctgccagcgttca

SEQ ID NO: 6053688 - DNA, 25 bp, Homo sapien
accgtccttcagcaccctgctgcca

SEQ ID NO: 6053689 - DNA, 25 bp, Homo sapien
gcacactttttcccatctaccgtta

SEQ ID NO: 6053690 - DNA, 25 bp, Homo sapien
ggttcaatagcgagaaccatgccag

SEQ ID NO: 6053691 - DNA, 25 bp, Homo sapien
aaatgagcacactttttcccatcta

SEQ ID NO: 6053692 - DNA, 25 bp, Homo sapien
agaaccatgccaggtttaagccgtg

SEQ ID NO: 6053693 - DNA, 25 bp, Homo sapien
atcatcgctgatgtttcctaccgga

SEQ ID NO: 6053694 - DNA, 25 bp, Homo sapien
cgtaatcgcaatcgtatgttcaaaa

SEQ ID NO: 6053695 - DNA, 25 bp, Homo sapien
aatgaggaatttgcgggtcctcatg

SEQ ID NO: 6053696 - DNA, 25 bp, Homo sapien
aaagactcctctgtcacttccagaa

SEQ ID NO: 6053697 - DNA, 25 bp, Homo sapien
tataccccttaaaagatgggattgc

SEQ ID NO: 6053698 - DNA, 25 bp, Homo sapien
gaccgtaatgaggaatttgcgggtc

SEQ ID NO: 6053699 - DNA, 25 bp, Homo sapien
gtgggaaatattcgacaaacgttca

SEQ ID NO: 6053700 - DNA, 25 bp, Homo sapien
aagcctttatataaagactcctctg

SEQ ID NO: 6053701 - DNA, 25 bp, Homo sapien
cttcagcaccctgctgccaggtatg

SEQ ID NO: 6053702 - DNA, 25 bp, Homo sapien
aaaagatgggattgcaccctgcttc

SEQ ID NO: 6053703 - DNA, 25 bp, Homo sapien
actgatgatgtcaccgtccttcagc

SEQ ID NO: 6053704 - DNA, 25 bp, Homo sapien
accataggttcaatagcgagaacca

SEQ ID NO: 6053705 - DNA, 25 bp, Homo sapien
tattgcgtgggaaatattcgacaaa

SEQ ID NO: 6053706 - DNA, 25 bp, Homo sapien
atagcgagaaccatgccaggtttaa

SEQ ID NO: 6053707 - DNA, 25 bp, Homo sapien
agagtcaccatgataaccatttaat

SEQ ID NO: 6053708 - DNA, 25 bp, Homo sapien
gctgccaggtatgccgtgaacgagt

SEQ ID NO: 6053709 - DNA, 25 bp, Homo sapien
gacatactccctaacaactgaaaac

SEQ ID NO: 6053710 - DNA, 25 bp, Homo sapien
aggtatgccgtgaacgagttcttca

SEQ ID NO: 6053711 - DNA, 25 bp, Homo sapien
aaaacgttcggcaatttgatccaat

SEQ ID NO: 6053712 - DNA, 25 bp, Homo sapien
ctcatgcaagtcttgaccaacacca

SEQ ID NO: 6053713 - DNA, 25 bp, Homo sapien
tttgcttcctgcaagcctttatata

SEQ ID NO: 6053714 - DNA, 25 bp, Homo sapien
gccgtgaacgagttcttcattaact

SEQ ID NO: 6053715 - DNA, 25 bp, Homo sapien
ttgaccaacaccatgtccgacatac

SEQ ID NO: 6053716 - DNA, 25 bp, Homo sapien
gacatacgtttgtattgcgtgggaa

SEQ ID NO: 6053717 - DNA, 25 bp, Homo sapien
tgaaaactgctcattttcgacatac

SEQ ID NO: 6053718 - DNA, 25 bp, Homo sapien
tgggcggaccgtaatgaggaatttg

SEQ ID NO: 6053719 - DNA, 25 bp, Homo sapien
attttcgacatacgtttgtattgcg

SEQ ID NO: 6053720 - DNA, 25 bp, Homo sapien
atatgtccatgcagagtcaccatga

SEQ ID NO: 6053721 - DNA, 25 bp, Homo sapien
gttacaaccgtccagttatcagcca

SEQ ID NO: 6053722 - DNA, 25 bp, Homo sapien
gcgttcaccataggttcaatagcga

SEQ ID NO: 6053723 - DNA, 25 bp, Homo sapien
taataaaacgttcggcaatttgatc

SEQ ID NO: 6053724 - DNA, 25 bp, Homo sapien
tagcggctgccagcgttcaccatag

SEQ ID NO: 6053725 - DNA, 25 bp, Homo sapien
tccagaagttttttgtcatcatcgc

SEQ ID NO: 6053726 - DNA, 25 bp, Homo sapien
atgccaggtttaagccgtggtcctt

SEQ ID NO: 6053727 - DNA, 25 bp, Homo sapien
cgggtcctcatgcaagtcttgacca

SEQ ID NO: 6053728 - DNA, 25 bp, Homo sapien
gcaaatgctcccgcgaaacccatta

SEQ ID NO: 6053729 - DNA, 25 bp, Homo sapien
ttgtcatcatcgctgatgtttccta

SEQ ID NO: 6053730 - DNA, 25 bp, Homo sapien
caagtcttgaccaacaccatgtccg

SEQ ID NO: 6053731 - DNA, 25 bp, Homo sapien
atttaatttagcaccgatatcaata

SEQ ID NO: 6053732 - DNA, 25 bp, Homo sapien
accgtccagttatcagccaatgttt

SEQ ID NO: 6053733 - DNA, 25 bp, Homo sapien
gatgtcaccgtccttcagcaccctg

SEQ ID NO: 6053734 - DNA, 25 bp, Homo sapien
tttagcaccgatatcaatactgatg

SEQ ID NO: 6053735 - DNA, 25 bp, Homo sapien
cagttatcagccaatgttttcacgt

SEQ ID NO: 6053736 - DNA, 25 bp, Homo sapien
tcctctgtcacttccagaagttttt

SEQ ID NO: 6053737 - DNA, 25 bp, Homo sapien
gtcacttccagaagttttttgtcat

SEQ ID NO: 6053738 - DNA, 25 bp, Homo sapien
ctttgttgggcggaccgtaatgagg

SEQ ID NO: 6053739 - DNA, 25 bp, Homo sapien
cgacaaacgttcacctggttttgct

SEQ ID NO: 6053740 - DNA, 25 bp, Homo sapien
cgtttgtattgcgtgggaaatattc

SEQ ID NO: 6053741 - DNA, 25 bp, Homo sapien
agttttttgtcatcatcgctgatgt

SEQ ID NO: 6053742 - DNA, 25 bp, Homo sapien
tcagccaatgttttcacgtagcggc

SEQ ID NO: 6053743 - DNA, 25 bp, Homo sapien
atcgtatgttcaaaatgagcacact

SEQ ID NO: 6053744 - DNA, 25 bp, Homo sapien
catctaccgttacaaccgtccagtt

SEQ ID NO: 6053745 - DNA, 25 bp, Homo sapien
aacaactgaaaactgctcattttcg

SEQ ID NO: 6053746 - DNA, 25 bp, Homo sapien
ctgctcattttcgacatacgtttgt

SEQ ID NO: 6053747 - DNA, 25 bp, Homo sapien
atcgcaatcgtatgttcaaaatgag

SEQ ID NO: 6053748 - DNA, 25 bp, Homo sapien
ttatataaagactcctctgtcactt

SEQ ID NO: 6053749 - DNA, 25 bp, Homo sapien
gctgatgtttcctaccggatatgtc

SEQ ID NO: 6053750 - DNA, 25 bp, Homo sapien
taccggatatgtccatgcagagtca

SEQ ID NO: 6053751 - DNA, 25 bp, Homo sapien
tgcaccctgcttcttaataaaacgt

SEQ ID NO: 6053752 - DNA, 25 bp, Homo sapien
cctggttttgcttcctgcaagcctt

SEQ ID NO: 6053753 - DNA, 25 bp, Homo sapien
accatgataaccatttaatttagca

SEQ ID NO: 6053754 - DNA, 25 bp, Homo sapien
tgggattgcaccctgcttcttaata

SEQ ID NO: 6053755 - DNA, 25 bp, Homo sapien
ccatgcagagtcaccatgataacca

SEQ ID NO: 6053756 - DNA, 25 bp, Homo sapien
tgctcccgcgaaacccattataccc

SEQ ID NO: 6053757 - DNA, 25 bp, Homo sapien
accgatatcaatactgatgatgtca

SEQ ID NO: 6053758 - DNA, 25 bp, Homo sapien
ctgccagcgttcaccataggttcaa

SEQ ID NO: 6053759 - DNA, 25 bp, Homo sapien
ctccctaacaactgaaaactgctca

SEQ ID NO: 6053760 - DNA, 25 bp, Homo sapien
tgatacgcaaatgctcccgcgaaac

SEQ ID NO: 6053761 - DNA, 25 bp, Homo sapien
tcctgcaagcctttatataaagact

SEQ ID NO: 6053762 - DNA, 25 bp, Homo sapien
aatattcgacaaacgttcacctggt

SEQ ID NO: 6053763 - DNA, 25 bp, Homo sapien
cccttaaaagatgggattgcaccct

SEQ ID NO: 6053764 - DNA, 25 bp, Homo sapien
tgcttcttaataaaacgttcggcaa

SEQ ID NO: 6053765 - DNA, 25 bp, Homo sapien
atgtccgacatactccctaacaact

SEQ ID NO: 6053766 - DNA, 25 bp, Homo sapien
cgttcacctggttttgcttcctgca

SEQ ID NO: 6053767 - DNA, 25 bp, Homo sapien
gtttcctaccggatatgtccatgca

SEQ ID NO: 6053768 - DNA, 25 bp, Homo sapien
ataaccatttaatttagcaccgata

SEQ ID NO: 6053769 - DNA, 25 bp, Homo sapien
acgagttcttcattaactgatacgc

SEQ ID NO: 6053770 - DNA, 25 bp, Homo sapien
aatttgcgggtcctcatgcaagtct

SEQ ID NO: 6053771 - DNA, 25 bp, Homo sapien
acagtcatgaacattccctggctgc

SEQ ID NO: 6053772 - DNA, 25 bp, Homo sapien
caattctgaaatcctcgtaaaaaat

SEQ ID NO: 6053773 - DNA, 25 bp, Homo sapien
ctgtattgcttctttttggccggtt

SEQ ID NO: 6053774 - DNA, 25 bp, Homo sapien
aatttgctcaaacaaacaagacaga

SEQ ID NO: 6053775 - DNA, 25 bp, Homo sapien
cgcattagcctcgaccttgccgatt

SEQ ID NO: 6053776 - DNA, 25 bp, Homo sapien
aaatgacaattctgaaatcctcgta

SEQ ID NO: 6053777 - DNA, 25 bp, Homo sapien
gctccgcaagatgggcattcctcac

SEQ ID NO: 6053778 - DNA, 25 bp, Homo sapien
ggctgcttacacaggcgccatagac

SEQ ID NO: 6053779 - DNA, 25 bp, Homo sapien
gggcaagatcgtttatcagcatgcg

SEQ ID NO: 6053780 - DNA, 25 bp, Homo sapien
agcaggcggaataatgccggcagta

SEQ ID NO: 6053781 - DNA, 25 bp, Homo sapien
acaaacccccgctgtattgcttctt

SEQ ID NO: 6053782 - DNA, 25 bp, Homo sapien
ttcgggattctttttaatgattctg

SEQ ID NO: 6053783 - DNA, 25 bp, Homo sapien
tctttgttttctgggcaagatcgtt

SEQ ID NO: 6053784 - DNA, 25 bp, Homo sapien
aacgatatgcacagcaggcggaata

SEQ ID NO: 6053785 - DNA, 25 bp, Homo sapien
cagacaaggggtttctccgggaatg

SEQ ID NO: 6053786 - DNA, 25 bp, Homo sapien
gtacagcagcttttggtgtgttcca

SEQ ID NO: 6053787 - DNA, 25 bp, Homo sapien
taatcttcatatgcgaattgttcca

SEQ ID NO: 6053788 - DNA, 25 bp, Homo sapien
gacaggaatttgctcaaacaaacaa

SEQ ID NO: 6053789 - DNA, 25 bp, Homo sapien
ctgtttcgggattctttttaatgat

SEQ ID NO: 6053790 - DNA, 25 bp, Homo sapien
agacatcaaatgtcacaaacccccg

SEQ ID NO: 6053791 - DNA, 25 bp, Homo sapien
gaagataaggatataccgcattagc

SEQ ID NO: 6053792 - DNA, 25 bp, Homo sapien
gcattagctccgcaagatgggcatt

SEQ ID NO: 6053793 - DNA, 25 bp, Homo sapien
gattctttttaatgattctgacctt

SEQ ID NO: 6053794 - DNA, 25 bp, Homo sapien
gtcgccccgccgacaggaatttgct

SEQ ID NO: 6053795 - DNA, 25 bp, Homo sapien
ccatgcaccagtgcccgtccgtcat

SEQ ID NO: 6053796 - DNA, 25 bp, Homo sapien
cctgcactgtatcacggccgcatag

SEQ ID NO: 6053797 - DNA, 25 bp, Homo sapien
cctcacggcgtacatgattaacgtt

SEQ ID NO: 6053798 - DNA, 25 bp, Homo sapien
cccgccgacaggaatttgctcaaac

SEQ ID NO: 6053799 - DNA, 25 bp, Homo sapien
gcgaattgttccagacatcaaatgt

SEQ ID NO: 6053800 - DNA, 25 bp, Homo sapien
cggaataatgccggcagtatcacac

SEQ ID NO: 6053801 - DNA, 25 bp, Homo sapien
tgatatgctgaaacgatatgcacag

SEQ ID NO: 6053802 - DNA, 25 bp, Homo sapien
cgcatagtacagcagcttttggtgt

SEQ ID NO: 6053803 - DNA, 25 bp, Homo sapien
gaaatcctcgtaaaaaatatgcagc

SEQ ID NO: 6053804 - DNA, 25 bp, Homo sapien
ttggtgtgttccaatcctgaagata

SEQ ID NO: 6053805 - DNA, 25 bp, Homo sapien
caaggggtttctccgggaatgacag

SEQ ID NO: 6053806 - DNA, 25 bp, Homo sapien
tataccgcattagctccgcaagatg

SEQ ID NO: 6053807 - DNA, 25 bp, Homo sapien
ctcaaacaaacaagacagacaaggg

SEQ ID NO: 6053808 - DNA, 25 bp, Homo sapien
aaaaatatgcagcaaaaacgcatta

SEQ ID NO: 6053809 - DNA, 25 bp, Homo sapien
gcttaatgagctcctgtttcgggat

SEQ ID NO: 6053810 - DNA, 25 bp, Homo sapien
gcctgctgatatgctgaaacgatat

SEQ ID NO: 6053811 - DNA, 25 bp, Homo sapien
ggcgtacatgattaacgttaatctt

SEQ ID NO: 6053812 - DNA, 25 bp, Homo sapien
cacggccgcatagtacagcagcttt

SEQ ID NO: 6053813 - DNA, 25 bp, Homo sapien
ggaatgacagtcatgaacattccct

SEQ ID NO: 6053814 - DNA, 25 bp, Homo sapien
gaccttgccgattgttttcagccgc

SEQ ID NO: 6053815 - DNA, 25 bp, Homo sapien
catgattaacgttaatcttcatatg

SEQ ID NO: 6053816 - DNA, 25 bp, Homo sapien
ggcttctttcacatcatttgttcca

SEQ ID NO: 6053817 - DNA, 25 bp, Homo sapien
atgcagcaaaaacgcattagcctcg

SEQ ID NO: 6053818 - DNA, 25 bp, Homo sapien
aagatgggcattcctcacggcgtac

SEQ ID NO: 6053819 - DNA, 25 bp, Homo sapien
tgagctcctgtttcgggattctttt

SEQ ID NO: 6053820 - DNA, 25 bp, Homo sapien
gattctgaccttacctgcactgtat

SEQ ID NO: 6053821 - DNA, 25 bp, Homo sapien
tgttccagacatcaaatgtcacaaa

SEQ ID NO: 6053822 - DNA, 25 bp, Homo sapien
atgaacattccctggctgcttacac

SEQ ID NO: 6053823 - DNA, 25 bp, Homo sapien
gctgaaacgatatgcacagcaggcg

SEQ ID NO: 6053824 - DNA, 25 bp, Homo sapien
ttacacaggcgccatagacccaagg

SEQ ID NO: 6053825 - DNA, 25 bp, Homo sapien
ccccgctgtattgcttctttttggc

SEQ ID NO: 6053826 - DNA, 25 bp, Homo sapien
tttgttccatgcaccagtgcccgtc

SEQ ID NO: 6053827 - DNA, 25 bp, Homo sapien
tttaatgcctcagcctgctgatatg

SEQ ID NO: 6053828 - DNA, 25 bp, Homo sapien
acaagacagacaaggggtttctccg

SEQ ID NO: 6053829 - DNA, 25 bp, Homo sapien
tctccgggaatgacagtcatgaaca

SEQ ID NO: 6053830 - DNA, 25 bp, Homo sapien
tctttcacatcatttgttccatgca

SEQ ID NO: 6053831 - DNA, 25 bp, Homo sapien
accagtgcccgtccgtcattgaaaa

SEQ ID NO: 6053832 - DNA, 25 bp, Homo sapien
tttggccggttaacagctttaatgc

SEQ ID NO: 6053833 - DNA, 25 bp, Homo sapien
gcagtatcacacgtcgccccgccga

SEQ ID NO: 6053834 - DNA, 25 bp, Homo sapien
atgcacagcaggcggaataatgccg

SEQ ID NO: 6053835 - DNA, 25 bp, Homo sapien
attccctggctgcttacacaggcgc

SEQ ID NO: 6053836 - DNA, 25 bp, Homo sapien
acatcatttgttccatgcaccagtg

SEQ ID NO: 6053837 - DNA, 25 bp, Homo sapien
gggcattcctcacggcgtacatgat

SEQ ID NO: 6053838 - DNA, 25 bp, Homo sapien
tgcttctttttggccggttaacagc

SEQ ID NO: 6053839 - DNA, 25 bp, Homo sapien
tcagccgcttaatgagctcctgttt

SEQ ID NO: 6053840 - DNA, 25 bp, Homo sapien
agcctcgaccttgccgattgttttc

SEQ ID NO: 6053841 - DNA, 25 bp, Homo sapien
taacgttaatcttcatatgcgaatt

SEQ ID NO: 6053842 - DNA, 25 bp, Homo sapien
aaggatataccgcattagctccgca

SEQ ID NO: 6053843 - DNA, 25 bp, Homo sapien
tcatatgcgaattgttccagacatc

SEQ ID NO: 6053844 - DNA, 25 bp, Homo sapien
aatgccggcagtatcacacgtcgcc

SEQ ID NO: 6053845 - DNA, 25 bp, Homo sapien
cagcttttggtgtgttccaatcctg

SEQ ID NO: 6053846 - DNA, 25 bp, Homo sapien
gggtttctccgggaatgacagtcat

SEQ ID NO: 6053847 - DNA, 25 bp, Homo sapien
ccggttaacagctttaatgcctcag

SEQ ID NO: 6053848 - DNA, 25 bp, Homo sapien
gcccgtccgtcattgaaaatgacaa

SEQ ID NO: 6053849 - DNA, 25 bp, Homo sapien
tgttttcagccgcttaatgagctcc

SEQ ID NO: 6053850 - DNA, 25 bp, Homo sapien
tttaatgattctgaccttacctgca

SEQ ID NO: 6053851 - DNA, 25 bp, Homo sapien
gaccttacctgcactgtatcacggc

SEQ ID NO: 6053852 - DNA, 25 bp, Homo sapien
aatcctgaagataaggatataccgc

SEQ ID NO: 6053853 - DNA, 25 bp, Homo sapien
gcctcagcctgctgatatgctgaaa

SEQ ID NO: 6053854 - DNA, 25 bp, Homo sapien
aggcgccatagacccaaggtgtctt

SEQ ID NO: 6053855 - DNA, 25 bp, Homo sapien
aacagctttaatgcctcagcctgct

SEQ ID NO: 6053856 - DNA, 25 bp, Homo sapien
aaatgtcacaaacccccgctgtatt

SEQ ID NO: 6053857 - DNA, 25 bp, Homo sapien
tcacacgtcgccccgccgacaggaa

SEQ ID NO: 6053858 - DNA, 25 bp, Homo sapien
tttctgggcaagatcgtttatcagc

SEQ ID NO: 6053859 - DNA, 25 bp, Homo sapien
ctcgtaaaaaatatgcagcaaaaac

SEQ ID NO: 6053860 - DNA, 25 bp, Homo sapien
ctgtatcacggccgcatagtacagc

SEQ ID NO: 6053861 - DNA, 25 bp, Homo sapien
caaaaacgcattagcctcgaccttg

SEQ ID NO: 6053862 - DNA, 25 bp, Homo sapien
gccgattgttttcagccgcttaatg

SEQ ID NO: 6053863 - DNA, 25 bp, Homo sapien
catagacccaaggtgtctttgtttt

SEQ ID NO: 6053864 - DNA, 25 bp, Homo sapien
tgttccaatcctgaagataaggata

SEQ ID NO: 6053865 - DNA, 25 bp, Homo sapien
aaaacaccttcaatcatgacctcac

SEQ ID NO: 6053866 - DNA, 25 bp, Homo sapien
ttgcgaaaggatgccataacacata

SEQ ID NO: 6053867 - DNA, 25 bp, Homo sapien
ttttaatttatttgcgaaaggatgc

SEQ ID NO: 6053868 - DNA, 25 bp, Homo sapien
tgactttcggtgcttgtccttctaa

SEQ ID NO: 6053869 - DNA, 25 bp, Homo sapien
agtactccaagtgtcggagcgtacg

SEQ ID NO: 6053870 - DNA, 25 bp, Homo sapien
ctattgtgagctgtttattttcctt

SEQ ID NO: 6053871 - DNA, 25 bp, Homo sapien
cgtgtccaagctcatctgtgttatc

SEQ ID NO: 6053872 - DNA, 25 bp, Homo sapien
ccttaaataacactcgaaacagcgt

SEQ ID NO: 6053873 - DNA, 25 bp, Homo sapien
acggataaaacaccttcaatcatga

SEQ ID NO: 6053874 - DNA, 25 bp, Homo sapien
atacattaaaagcttttgttcgatg

SEQ ID NO: 6053875 - DNA, 25 bp, Homo sapien
tttcaagcggtccttcgcaggaaga

SEQ ID NO: 6053876 - DNA, 25 bp, Homo sapien
aacagccatgctgagcccgtttttc

SEQ ID NO: 6053877 - DNA, 25 bp, Homo sapien
tcgacttcctctgtcataatatctc

SEQ ID NO: 6053878 - DNA, 25 bp, Homo sapien
gctcctgcttggtgcctgtcctcca

SEQ ID NO: 6053879 - DNA, 25 bp, Homo sapien
gcttggtgcctgtcctccattgctt

SEQ ID NO: 6053880 - DNA, 25 bp, Homo sapien
agcccgattacagcgccgagtactc

SEQ ID NO: 6053881 - DNA, 25 bp, Homo sapien
tcggtgcttgtccttctaaaacgga

SEQ ID NO: 6053882 - DNA, 25 bp, Homo sapien
gctttgcccgtcaacagccatgctg

SEQ ID NO: 6053883 - DNA, 25 bp, Homo sapien
ctctccttgttctgcaaatttcaag

SEQ ID NO: 6053884 - DNA, 25 bp, Homo sapien
tgcaaatttcaagcggtccttcgca

SEQ ID NO: 6053885 - DNA, 25 bp, Homo sapien
aattccgcgctttgcccgtcaacag

SEQ ID NO: 6053886 - DNA, 25 bp, Homo sapien
tgatggcgtgtccaagctcatctgt

SEQ ID NO: 6053887 - DNA, 25 bp, Homo sapien
caagctcatctgtgttatccatatg

SEQ ID NO: 6053888 - DNA, 25 bp, Homo sapien
taaaagcttttgttcgatgactttc

SEQ ID NO: 6053889 - DNA, 25 bp, Homo sapien
catctgtgttatccatatgagagag

SEQ ID NO: 6053890 - DNA, 25 bp, Homo sapien
gagagagagcggcaatcagcccgat

SEQ ID NO: 6053891 - DNA, 25 bp, Homo sapien
cgtgcaagctgagcccattcagaga

SEQ ID NO: 6053892 - DNA, 25 bp, Homo sapien
caatgcttgcttctaaagcaagcag

SEQ ID NO: 6053893 - DNA, 25 bp, Homo sapien
atatctcttataaattccgcgcttt

SEQ ID NO: 6053894 - DNA, 25 bp, Homo sapien
cttgtgtaaaaatagcggctcctgc

SEQ ID NO: 6053895 - DNA, 25 bp, Homo sapien
catcctcaatgcttgcttctaaagc

SEQ ID NO: 6053896 - DNA, 25 bp, Homo sapien
atcatgacctcacgcagttttactt

SEQ ID NO: 6053897 - DNA, 25 bp, Homo sapien
cgcagttttacttcctgttttgatt

SEQ ID NO: 6053898 - DNA, 25 bp, Homo sapien
aggatgccataacacataccctgta

SEQ ID NO: 6053899 - DNA, 25 bp, Homo sapien
aaaggcagcactgatggcgtgtcca

SEQ ID NO: 6053900 - DNA, 25 bp, Homo sapien
tcctctgtcataatatctcttataa

SEQ ID NO: 6053901 - DNA, 25 bp, Homo sapien
ggcaacaaaggcagcactgatggcg

SEQ ID NO: 6053902 - DNA, 25 bp, Homo sapien
cagagaacataggaatgagttcctc

SEQ ID NO: 6053903 - DNA, 25 bp, Homo sapien
atttatttgcgaaaggatgccataa

SEQ ID NO: 6053904 - DNA, 25 bp, Homo sapien
ttcctgcttgtgtaaaaatagcggc

SEQ ID NO: 6053905 - DNA, 25 bp, Homo sapien
caagcagaccttcgcggcgtgcaag

SEQ ID NO: 6053906 - DNA, 25 bp, Homo sapien
tcgcggcgtgcaagctgagcccatt

SEQ ID NO: 6053907 - DNA, 25 bp, Homo sapien
gcttttgttcgatgactttcggtgc

SEQ ID NO: 6053908 - DNA, 25 bp, Homo sapien
gcgccgagtactccaagtgtcggag

SEQ ID NO: 6053909 - DNA, 25 bp, Homo sapien
gaatgagttcctctattgtgagctg

SEQ ID NO: 6053910 - DNA, 25 bp, Homo sapien
accgagaagtgtggcaacaaaggca

SEQ ID NO: 6053911 - DNA, 25 bp, Homo sapien
acataggaatgagttcctctattgt

SEQ ID NO: 6053912 - DNA, 25 bp, Homo sapien
gttcctctattgtgagctgtttatt

SEQ ID NO: 6053913 - DNA, 25 bp, Homo sapien
ccataacacataccctgtaaagata

SEQ ID NO: 6053914 - DNA, 25 bp, Homo sapien
attgcttcgacttcctctgtcataa

SEQ ID NO: 6053915 - DNA, 25 bp, Homo sapien
tcggagcgtacgttcctgcttgtgt

SEQ ID NO: 6053916 - DNA, 25 bp, Homo sapien
atagcggctcctgcttggtgcctgt

SEQ ID NO: 6053917 - DNA, 25 bp, Homo sapien
tgcttgtccttctaaaacggataaa

SEQ ID NO: 6053918 - DNA, 25 bp, Homo sapien
agagcggcaatcagcccgattacag

SEQ ID NO: 6053919 - DNA, 25 bp, Homo sapien
gctgagcccattcagagaacatagg

SEQ ID NO: 6053920 - DNA, 25 bp, Homo sapien
tgcctgtcctccattgcttcgactt

SEQ ID NO: 6053921 - DNA, 25 bp, Homo sapien
ttgttctgcaaatttcaagcggtcc

SEQ ID NO: 6053922 - DNA, 25 bp, Homo sapien
ccaagtgtcggagcgtacgttcctg

SEQ ID NO: 6053923 - DNA, 25 bp, Homo sapien
cccattcagagaacataggaatgag

SEQ ID NO: 6053924 - DNA, 25 bp, Homo sapien
aagcatcatctacatcctcaatgct

SEQ ID NO: 6053925 - DNA, 25 bp, Homo sapien
aggaagatacattaaaagcttttgt

SEQ ID NO: 6053926 - DNA, 25 bp, Homo sapien
gaccttcgcggcgtgcaagctgagc

SEQ ID NO: 6053927 - DNA, 25 bp, Homo sapien
tcctccattgcttcgacttcctctg

SEQ ID NO: 6053928 - DNA, 25 bp, Homo sapien
agcactgatggcgtgtccaagctca

SEQ ID NO: 6053929 - DNA, 25 bp, Homo sapien
acctcacgcagttttacttcctgtt

SEQ ID NO: 6053930 - DNA, 25 bp, Homo sapien
gtcataatatctcttataaattccg

SEQ ID NO: 6053931 - DNA, 25 bp, Homo sapien
attacagcgccgagtactccaagtg

SEQ ID NO: 6053932 - DNA, 25 bp, Homo sapien
gcggtccttcgcaggaagatacatt

SEQ ID NO: 6053933 - DNA, 25 bp, Homo sapien
cacataccctgtaaagataccgaga

SEQ ID NO: 6053934 - DNA, 25 bp, Homo sapien
aaagataccgagaagtgtggcaaca

SEQ ID NO: 6053935 - DNA, 25 bp, Homo sapien
catgctgagcccgtttttcaagaaa

SEQ ID NO: 6053936 - DNA, 25 bp, Homo sapien
ccttcaatcatgacctcacgcagtt

SEQ ID NO: 6053937 - DNA, 25 bp, Homo sapien
ctaaagcaagcagaccttcgcggcg

SEQ ID NO: 6053938 - DNA, 25 bp, Homo sapien
cttataaattccgcgctttgcccgt

SEQ ID NO: 6053939 - DNA, 25 bp, Homo sapien
tgagctgtttattttccttaaataa

SEQ ID NO: 6053940 - DNA, 25 bp, Homo sapien
tgttatccatatgagagagagcggc

SEQ ID NO: 6053941 - DNA, 25 bp, Homo sapien
gcaatcagcccgattacagcgccga

SEQ ID NO: 6053942 - DNA, 25 bp, Homo sapien
ttgcttctaaagcaagcagaccttc

SEQ ID NO: 6053943 - DNA, 25 bp, Homo sapien
cttcgcaggaagatacattaaaagc

SEQ ID NO: 6053944 - DNA, 25 bp, Homo sapien
cgtttttcaagaaagcatcatctac

SEQ ID NO: 6053945 - DNA, 25 bp, Homo sapien
tgagcccgtttttcaagaaagcatc

SEQ ID NO: 6053946 - DNA, 25 bp, Homo sapien
tcaagaaagcatcatctacatcctc

SEQ ID NO: 6053947 - DNA, 25 bp, Homo sapien
ccatatgagagagagcggcaatcag

SEQ ID NO: 6053948 - DNA, 25 bp, Homo sapien
ccctgtaaagataccgagaagtgtg

SEQ ID NO: 6053949 - DNA, 25 bp, Homo sapien
gttcgatgactttcggtgcttgtcc

SEQ ID NO: 6053950 - DNA, 25 bp, Homo sapien
taaaaatagcggctcctgcttggtg

SEQ ID NO: 6053951 - DNA, 25 bp, Homo sapien
cccgtcaacagccatgctgagcccg

SEQ ID NO: 6053952 - DNA, 25 bp, Homo sapien
aagtgtggcaacaaaggcagcactg

SEQ ID NO: 6053953 - DNA, 25 bp, Homo sapien
cgtacgttcctgcttgtgtaaaaat

SEQ ID NO: 6053954 - DNA, 25 bp, Homo sapien
catctacatcctcaatgcttgcttc

SEQ ID NO: 6053955 - DNA, 25 bp, Homo sapien
gaatcgaagaagatgctgtctttaa

SEQ ID NO: 6053956 - DNA, 25 bp, Homo sapien
taaagtttaccgctctcatgacgct

SEQ ID NO: 6053957 - DNA, 25 bp, Homo sapien
tcaggaggagtgacactggagtagt

SEQ ID NO: 6053958 - DNA, 25 bp, Homo sapien
caaaatgagaacttcaacccgccgg

SEQ ID NO: 6053959 - DNA, 25 bp, Homo sapien
cacctggctcttcacattttcaagt

SEQ ID NO: 6053960 - DNA, 25 bp, Homo sapien
acatcttccttacggatggtcgctt

SEQ ID NO: 6053961 - DNA, 25 bp, Homo sapien
aatgatatttcttggcgggttaatc

SEQ ID NO: 6053962 - DNA, 25 bp, Homo sapien
ttggcgggttaatcacaagaagatt

SEQ ID NO: 6053963 - DNA, 25 bp, Homo sapien
ttttccacctggctcttcacatttt

SEQ ID NO: 6053964 - DNA, 25 bp, Homo sapien
tctttgatgaacttttccacctggc

SEQ ID NO: 6053965 - DNA, 25 bp, Homo sapien
gctgaacacttttgcatcgagcttg

SEQ ID NO: 6053966 - DNA, 25 bp, Homo sapien
gccccataaagtttaccgctctcat

SEQ ID NO: 6053967 - DNA, 25 bp, Homo sapien
ttggaattcagaatttttaattggc

SEQ ID NO: 6053968 - DNA, 25 bp, Homo sapien
taacccttggcgctgaacacttttg

SEQ ID NO: 6053969 - DNA, 25 bp, Homo sapien
tctgactcgttttcaggaggagtga

SEQ ID NO: 6053970 - DNA, 25 bp, Homo sapien
tccagtacaccggttccgcctgtaa

SEQ ID NO: 6053971 - DNA, 25 bp, Homo sapien
tcactagtcatcttcgtctccagct

SEQ ID NO: 6053972 - DNA, 25 bp, Homo sapien
tttgaaatctcttttgcaagcggca

SEQ ID NO: 6053973 - DNA, 25 bp, Homo sapien
tgcatcgagcttggggttttcaatc

SEQ ID NO: 6053974 - DNA, 25 bp, Homo sapien
tttcaatcaggagccccataaagtt

SEQ ID NO: 6053975 - DNA, 25 bp, Homo sapien
ttatactcgccataacccttggcgc

SEQ ID NO: 6053976 - DNA, 25 bp, Homo sapien
tttttatctttgatgaacttttcca

SEQ ID NO: 6053977 - DNA, 25 bp, Homo sapien
agcttggggttttcaatcaggagcc

SEQ ID NO: 6053978 - DNA, 25 bp, Homo sapien
gctctcatgacgcttaaatgccagt

SEQ ID NO: 6053979 - DNA, 25 bp, Homo sapien
tcctttttcacttcatcgatgccgt

SEQ ID NO: 6053980 - DNA, 25 bp, Homo sapien
ttcgtctccagctgatgttccagct

SEQ ID NO: 6053981 - DNA, 25 bp, Homo sapien
catgacgcttaaatgccagtttgat

SEQ ID NO: 6053982 - DNA, 25 bp, Homo sapien
gggttttcaatcaggagccccataa

SEQ ID NO: 6053983 - DNA, 25 bp, Homo sapien
tccttacggatggtcgcttttccag

SEQ ID NO: 6053984 - DNA, 25 bp, Homo sapien
atgtccgctgataatgatatttctt

SEQ ID NO: 6053985 - DNA, 25 bp, Homo sapien
tcagtatgtccgctgataatgatat

SEQ ID NO: 6053986 - DNA, 25 bp, Homo sapien
ggagtgacactggagtagtccagta

SEQ ID NO: 6053987 - DNA, 25 bp, Homo sapien
gaagatttgaaatctcttttgcaag

SEQ ID NO: 6053988 - DNA, 25 bp, Homo sapien
acactggagtagtccagtacaccgg

SEQ ID NO: 6053989 - DNA, 25 bp, Homo sapien
cttggcgctgaacacttttgcatcg

SEQ ID NO: 6053990 - DNA, 25 bp, Homo sapien
atgccgtctgactcgttttcaggag

SEQ ID NO: 6053991 - DNA, 25 bp, Homo sapien
tctttttcctttttcacttcatcga

SEQ ID NO: 6053992 - DNA, 25 bp, Homo sapien
tcttcttgatcagctgctttttctt

SEQ ID NO: 6053993 - DNA, 25 bp, Homo sapien
agcggcacatcttccttacggatgg

SEQ ID NO: 6053994 - DNA, 25 bp, Homo sapien
tgcttcggccttccgcagttttatt

SEQ ID NO: 6053995 - DNA, 25 bp, Homo sapien
cgcagttttattggaagccaccggt

SEQ ID NO: 6053996 - DNA, 25 bp, Homo sapien
atttttaattggcatattatcagta

SEQ ID NO: 6053997 - DNA, 25 bp, Homo sapien
atgaacttttccacctggctcttca

SEQ ID NO: 6053998 - DNA, 25 bp, Homo sapien
tgatcagctgctttttctttttctt

SEQ ID NO: 6053999 - DNA, 25 bp, Homo sapien
atttcttggcgggttaatcacaaga

SEQ ID NO: 6054000 - DNA, 25 bp, Homo sapien
agccaccggtttatactcgccataa

SEQ ID NO: 6054001 - DNA, 25 bp, Homo sapien
gtcatcttcgtctccagctgatgtt

SEQ ID NO: 6054002 - DNA, 25 bp, Homo sapien
aggccttcactagtcatcttcgtct

SEQ ID NO: 6054003 - DNA, 25 bp, Homo sapien
tccagctttttatctttgatgaact

SEQ ID NO: 6054004 - DNA, 25 bp, Homo sapien
cggtttttgcttcggccttccgcag

SEQ ID NO: 6054005 - DNA, 25 bp, Homo sapien
atgccagtttgattggaattcagaa

SEQ ID NO: 6054006 - DNA, 25 bp, Homo sapien
acattttcaagttcttcttgatcag

SEQ ID NO: 6054007 - DNA, 25 bp, Homo sapien
tcgccataacccttggcgctgaaca

SEQ ID NO: 6054008 - DNA, 25 bp, Homo sapien
gagtagtccagtacaccggttccgc

SEQ ID NO: 6054009 - DNA, 25 bp, Homo sapien
tcaggagccccataaagtttaccgc

SEQ ID NO: 6054010 - DNA, 25 bp, Homo sapien
tattggaagccaccggtttatactc

SEQ ID NO: 6054011 - DNA, 25 bp, Homo sapien
gcttaaatgccagtttgattggaat

SEQ ID NO: 6054012 - DNA, 25 bp, Homo sapien
ttcagaatttttaattggcatatta

SEQ ID NO: 6054013 - DNA, 25 bp, Homo sapien
tttccagaatcgaagaagatgctgt

SEQ ID NO: 6054014 - DNA, 25 bp, Homo sapien
cggatggtcgcttttccagaatcga

SEQ ID NO: 6054015 - DNA, 25 bp, Homo sapien
catattatcagtatgtccgctgata

SEQ ID NO: 6054016 - DNA, 25 bp, Homo sapien
aattggcatattatcagtatgtccg

SEQ ID NO: 6054017 - DNA, 25 bp, Homo sapien
tccagctgatgttccagctttttat

SEQ ID NO: 6054018 - DNA, 25 bp, Homo sapien
gtttgattggaattcagaattttta

SEQ ID NO: 6054019 - DNA, 25 bp, Homo sapien
gctgataatgatatttcttggcggg

SEQ ID NO: 6054020 - DNA, 25 bp, Homo sapien
gccttccgcagttttattggaagcc

SEQ ID NO: 6054021 - DNA, 25 bp, Homo sapien
gctcttcacattttcaagttcttct

SEQ ID NO: 6054022 - DNA, 25 bp, Homo sapien
atctcttttgcaagcggcacatctt

SEQ ID NO: 6054023 - DNA, 25 bp, Homo sapien
atcagaaggccttcactagtcatct

SEQ ID NO: 6054024 - DNA, 25 bp, Homo sapien
ggttaatcacaagaagatttgaaat

SEQ ID NO: 6054025 - DNA, 25 bp, Homo sapien
tcaagttcttcttgatcagctgctt

SEQ ID NO: 6054026 - DNA, 25 bp, Homo sapien
aagaagatgctgtctttaatcgtaa

SEQ ID NO: 6054027 - DNA, 25 bp, Homo sapien
tttaccgctctcatgacgcttaaat

SEQ ID NO: 6054028 - DNA, 25 bp, Homo sapien
gtcgcttttccagaatcgaagaaga

SEQ ID NO: 6054029 - DNA, 25 bp, Homo sapien
tgatgttccagctttttatctttga

SEQ ID NO: 6054030 - DNA, 25 bp, Homo sapien
cacttttgcatcgagcttggggttt

SEQ ID NO: 6054031 - DNA, 25 bp, Homo sapien
tcacaagaagatttgaaatctcttt

SEQ ID NO: 6054032 - DNA, 25 bp, Homo sapien
tttgcaagcggcacatcttccttac

SEQ ID NO: 6054033 - DNA, 25 bp, Homo sapien
tctttaatcgtaatcagaaggcctt

SEQ ID NO: 6054034 - DNA, 25 bp, Homo sapien
tcatcgatgccgtctgactcgtttt

SEQ ID NO: 6054035 - DNA, 25 bp, Homo sapien
atgctgtctttaatcgtaatcagaa

SEQ ID NO: 6054036 - DNA, 25 bp, Homo sapien
tcgttttcaggaggagtgacactgg

SEQ ID NO: 6054037 - DNA, 25 bp, Homo sapien
atcgtaatcagaaggccttcactag

SEQ ID NO: 6054038 - DNA, 25 bp, Homo sapien
ttcacttcatcgatgccgtctgact

SEQ ID NO: 6054039 - DNA, 25 bp, Homo sapien
cggtttatactcgccataacccttg

SEQ ID NO: 6054040 - DNA, 25 bp, Homo sapien
gcaaataaaaatccaattctccaac

SEQ ID NO: 6054041 - DNA, 25 bp, Homo sapien
tattgatgaacctttaaaatgtgct

SEQ ID NO: 6054042 - DNA, 25 bp, Homo sapien
atgctgtgtgattttgacaacccgt

SEQ ID NO: 6054043 - DNA, 25 bp, Homo sapien
catgcaaaagacagccttacatatc

SEQ ID NO: 6054044 - DNA, 25 bp, Homo sapien
caatacgaagacatttctgcctttt

SEQ ID NO: 6054045 - DNA, 25 bp, Homo sapien
ttgcgatggagtaatgcggtctgtc

SEQ ID NO: 6054046 - DNA, 25 bp, Homo sapien
aaataggttgcgatggagtaatgcg

SEQ ID NO: 6054047 - DNA, 25 bp, Homo sapien
ccaattctccaaccggtcatgctgt

SEQ ID NO: 6054048 - DNA, 25 bp, Homo sapien
cgtttgtgacagcttcaagcgcggc

SEQ ID NO: 6054049 - DNA, 25 bp, Homo sapien
cacgacacattgtattgatgaacct

SEQ ID NO: 6054050 - DNA, 25 bp, Homo sapien
tccaaatgatttaatagaagggaag

SEQ ID NO: 6054051 - DNA, 25 bp, Homo sapien
aagtcccatggaaacaagacggtca

SEQ ID NO: 6054052 - DNA, 25 bp, Homo sapien
agaagggaagatataaaacgcaccg

SEQ ID NO: 6054053 - DNA, 25 bp, Homo sapien
gaggcgcacgacacattgtattgat

SEQ ID NO: 6054054 - DNA, 25 bp, Homo sapien
cgccagcgtcttccaaaagagccat

SEQ ID NO: 6054055 - DNA, 25 bp, Homo sapien
cgtcttccaaaagagccatactaaa

SEQ ID NO: 6054056 - DNA, 25 bp, Homo sapien
acatatccttcaccatatgttgaga

SEQ ID NO: 6054057 - DNA, 25 bp, Homo sapien
atggatgaggcgcacgacacattgt

SEQ ID NO: 6054058 - DNA, 25 bp, Homo sapien
tgatttaatagaagggaagatataa

SEQ ID NO: 6054059 - DNA, 25 bp, Homo sapien
ttaatgacaatcgtttgatcccgca

SEQ ID NO: 6054060 - DNA, 25 bp, Homo sapien
acggtcataaacatagtccagacgt

SEQ ID NO: 6054061 - DNA, 25 bp, Homo sapien
aacggtctaggccttctctcagcgt

SEQ ID NO: 6054062 - DNA, 25 bp, Homo sapien
gagccatactaaaatcaaatgaagt

SEQ ID NO: 6054063 - DNA, 25 bp, Homo sapien
ttcggtgcaaataaaaatccaattc

SEQ ID NO: 6054064 - DNA, 25 bp, Homo sapien
gttgagaacgagctgcccggcacga

SEQ ID NO: 6054065 - DNA, 25 bp, Homo sapien
tgaacctttaaaatgtgctttgcaa

SEQ ID NO: 6054066 - DNA, 25 bp, Homo sapien
aacgagctgcccggcacgagtgcca

SEQ ID NO: 6054067 - DNA, 25 bp, Homo sapien
caaagccgtttgtgacagcttcaag

SEQ ID NO: 6054068 - DNA, 25 bp, Homo sapien
tgccacgccagcgtcttccaaaaga

SEQ ID NO: 6054069 - DNA, 25 bp, Homo sapien
tctaggccttctctcagcgtgtcca

SEQ ID NO: 6054070 - DNA, 25 bp, Homo sapien
atagtccagacgttttttgtattgt

SEQ ID NO: 6054071 - DNA, 25 bp, Homo sapien
ccggtcatgctgtgtgattttgaca

SEQ ID NO: 6054072 - DNA, 25 bp, Homo sapien
cagacgttttttgtattgttctctc

SEQ ID NO: 6054073 - DNA, 25 bp, Homo sapien
gtctgtcatatgttaattcactgta

SEQ ID NO: 6054074 - DNA, 25 bp, Homo sapien
ccttcaccatatgttgagaacgagc

SEQ ID NO: 6054075 - DNA, 25 bp, Homo sapien
agcgcggctttttgagaaatggatg

SEQ ID NO: 6054076 - DNA, 25 bp, Homo sapien
aaatcaaatgaagtcattccaaatg

SEQ ID NO: 6054077 - DNA, 25 bp, Homo sapien
ataaacatagtccagacgttttttg

SEQ ID NO: 6054078 - DNA, 25 bp, Homo sapien
tttaactacgtcaagtcccatggaa

SEQ ID NO: 6054079 - DNA, 25 bp, Homo sapien
tactaaaatcaaatgaagtcattcc

SEQ ID NO: 6054080 - DNA, 25 bp, Homo sapien
aacaagacggtcataaacatagtcc

SEQ ID NO: 6054081 - DNA, 25 bp, Homo sapien
atacaaataattctaaacggtctag

SEQ ID NO: 6054082 - DNA, 25 bp, Homo sapien
gaagacatttctgccttttaagaga

SEQ ID NO: 6054083 - DNA, 25 bp, Homo sapien
agccttacatatccttcaccatatg

SEQ ID NO: 6054084 - DNA, 25 bp, Homo sapien
ccaaaagagccatactaaaatcaaa

SEQ ID NO: 6054085 - DNA, 25 bp, Homo sapien
tgagaaatggatgaggcgcacgaca

SEQ ID NO: 6054086 - DNA, 25 bp, Homo sapien
atgtgctttgcaatgtctttcggtg

SEQ ID NO: 6054087 - DNA, 25 bp, Homo sapien
gtttgatcccgcaaataggttgcga

SEQ ID NO: 6054088 - DNA, 25 bp, Homo sapien
gccttttaagagagctgcgatgctt

SEQ ID NO: 6054089 - DNA, 25 bp, Homo sapien
actgtatatttcatcagacaatacg

SEQ ID NO: 6054090 - DNA, 25 bp, Homo sapien
atttctgccttttaagagagctgcg

SEQ ID NO: 6054091 - DNA, 25 bp, Homo sapien
ttttttgtattgttctctcataatc

SEQ ID NO: 6054092 - DNA, 25 bp, Homo sapien
tacgtcaagtcccatggaaacaaga

SEQ ID NO: 6054093 - DNA, 25 bp, Homo sapien
aaaatccaattctccaaccggtcat

SEQ ID NO: 6054094 - DNA, 25 bp, Homo sapien
atgtctttcggtgcaaataaaaatc

SEQ ID NO: 6054095 - DNA, 25 bp, Homo sapien
gtattgttctctcataatcaatgca

SEQ ID NO: 6054096 - DNA, 25 bp, Homo sapien
attctaaacggtctaggccttctct

SEQ ID NO: 6054097 - DNA, 25 bp, Homo sapien
tgacagcttcaagcgcggctttttg

SEQ ID NO: 6054098 - DNA, 25 bp, Homo sapien
tggagtaatgcggtctgtcatatgt

SEQ ID NO: 6054099 - DNA, 25 bp, Homo sapien
tttgcaatgtctttcggtgcaaata

SEQ ID NO: 6054100 - DNA, 25 bp, Homo sapien
ctccaaccggtcatgctgtgtgatt

SEQ ID NO: 6054101 - DNA, 25 bp, Homo sapien
taattcactgtatatttcatcagac

SEQ ID NO: 6054102 - DNA, 25 bp, Homo sapien
attgagcatgcaaaagacagcctta

SEQ ID NO: 6054103 - DNA, 25 bp, Homo sapien
caatgcatcgtcaaagccgtttgtg

SEQ ID NO: 6054104 - DNA, 25 bp, Homo sapien
acaatcgtttgatcccgcaaatagg

SEQ ID NO: 6054105 - DNA, 25 bp, Homo sapien
aaagacagccttacatatccttcac

SEQ ID NO: 6054106 - DNA, 25 bp, Homo sapien
gtgtccattgagcatgcaaaagaca

SEQ ID NO: 6054107 - DNA, 25 bp, Homo sapien
atcagacaatacgaagacatttctg

SEQ ID NO: 6054108 - DNA, 25 bp, Homo sapien
cataatcaatgcatcgtcaaagccg

SEQ ID NO: 6054109 - DNA, 25 bp, Homo sapien
ccttctctcagcgtgtccattgagc

SEQ ID NO: 6054110 - DNA, 25 bp, Homo sapien
tttgacaacccgttaatgacaatcg

SEQ ID NO: 6054111 - DNA, 25 bp, Homo sapien
ggcacgagtgccacgccagcgtctt

SEQ ID NO: 6054112 - DNA, 25 bp, Homo sapien
ttctctcataatcaatgcatcgtca

SEQ ID NO: 6054113 - DNA, 25 bp, Homo sapien
aacccgttaatgacaatcgtttgat

SEQ ID NO: 6054114 - DNA, 25 bp, Homo sapien
ctgcccggcacgagtgccacgccag

SEQ ID NO: 6054115 - DNA, 25 bp, Homo sapien
gtcattccaaatgatttaatagaag

SEQ ID NO: 6054116 - DNA, 25 bp, Homo sapien
tgtgattttgacaacccgttaatga

SEQ ID NO: 6054117 - DNA, 25 bp, Homo sapien
gctttttgagaaatggatgaggcgc

SEQ ID NO: 6054118 - DNA, 25 bp, Homo sapien
tatttcatcagacaatacgaagaca

SEQ ID NO: 6054119 - DNA, 25 bp, Homo sapien
ctcagcgtgtccattgagcatgcaa

SEQ ID NO: 6054120 - DNA, 25 bp, Homo sapien
ccatatgttgagaacgagctgcccg

SEQ ID NO: 6054121 - DNA, 25 bp, Homo sapien
aatgaagtcattccaaatgatttaa

SEQ ID NO: 6054122 - DNA, 25 bp, Homo sapien
tttaaaatgtgctttgcaatgtctt

SEQ ID NO: 6054123 - DNA, 25 bp, Homo sapien
catggaaacaagacggtcataaaca

SEQ ID NO: 6054124 - DNA, 25 bp, Homo sapien
acattgtattgatgaacctttaaaa

SEQ ID NO: 6054125 - DNA, 25 bp, Homo sapien
cttcaagcgcggctttttgagaaat

SEQ ID NO: 6054126 - DNA, 25 bp, Homo sapien
atcgtcaaagccgtttgtgacagct

SEQ ID NO: 6054127 - DNA, 25 bp, Homo sapien
aatgcggtctgtcatatgttaattc

SEQ ID NO: 6054128 - DNA, 25 bp, Homo sapien
catatgttaattcactgtatatttc

SEQ ID NO: 6054129 - DNA, 25 bp, Homo sapien
tcccgcaaataggttgcgatggagt

SEQ ID NO: 6054130 - DNA, 25 bp, Homo sapien
taatagaagggaagatataaaacgc

SEQ ID NO: 6054131 - DNA, 25 bp, Homo sapien
catatttcgtgacaaattcttttgt

SEQ ID NO: 6054132 - DNA, 25 bp, Homo sapien
cctctaacatacaagttctcaaaat

SEQ ID NO: 6054133 - DNA, 25 bp, Homo sapien
cttgcattatagctatgacctgaga

SEQ ID NO: 6054134 - DNA, 25 bp, Homo sapien
ttcataccggaatctaaataaagct

SEQ ID NO: 6054135 - DNA, 25 bp, Homo sapien
ttatagctatgacctgagaatgtga

SEQ ID NO: 6054136 - DNA, 25 bp, Homo sapien
gagttgctgatcgtgatataatctg

SEQ ID NO: 6054137 - DNA, 25 bp, Homo sapien
ccggaatctaaataaagctggatat

SEQ ID NO: 6054138 - DNA, 25 bp, Homo sapien
ctatgacctgagaatgtgacgtgat

SEQ ID NO: 6054139 - DNA, 25 bp, Homo sapien
tctaaataaagctggatatcattat

SEQ ID NO: 6054140 - DNA, 25 bp, Homo sapien
ccggcatatttcgtgacaaattctt

SEQ ID NO: 6054141 - DNA, 25 bp, Homo sapien
gattccaagaagtcagcggagaggt

SEQ ID NO: 6054142 - DNA, 25 bp, Homo sapien
cctaaaatcaaaccgtatttatgat

SEQ ID NO: 6054143 - DNA, 25 bp, Homo sapien
ttgttgagtgatggatagctgccta

SEQ ID NO: 6054144 - DNA, 25 bp, Homo sapien
gctgtaattgtttttaacatgaaag

SEQ ID NO: 6054145 - DNA, 25 bp, Homo sapien
ttttgtagcaattgtaatcgcctgg

SEQ ID NO: 6054146 - DNA, 25 bp, Homo sapien
acgtgatcaatccaatagttcatac

SEQ ID NO: 6054147 - DNA, 25 bp, Homo sapien
cccaaagtaattatattcggaatat

SEQ ID NO: 6054148 - DNA, 25 bp, Homo sapien
gtttgcttgttgagtgatggatagc

SEQ ID NO: 6054149 - DNA, 25 bp, Homo sapien
gtaatcgcctggttaaaattattgc

SEQ ID NO: 6054150 - DNA, 25 bp, Homo sapien
tagccgtcatattgatgctgagaat

SEQ ID NO: 6054151 - DNA, 25 bp, Homo sapien
aagttctcaaaataattattggcga

SEQ ID NO: 6054152 - DNA, 25 bp, Homo sapien
ttcgcaaattttgagttgctgatcg

SEQ ID NO: 6054153 - DNA, 25 bp, Homo sapien
cacgatagctatagtttgacccagg

SEQ ID NO: 6054154 - DNA, 25 bp, Homo sapien
tatatttttgcttttgtagcaattg

SEQ ID NO: 6054155 - DNA, 25 bp, Homo sapien
cggaatatatttttgcttttgtagc

SEQ ID NO: 6054156 - DNA, 25 bp, Homo sapien
agctatagtttgacccaggattcca

SEQ ID NO: 6054157 - DNA, 25 bp, Homo sapien
cctgggcctctaacatacaagttct

SEQ ID NO: 6054158 - DNA, 25 bp, Homo sapien
agcaattgtaatcgcctggttaaaa

SEQ ID NO: 6054159 - DNA, 25 bp, Homo sapien
tatattccggcgtttggacacgata

SEQ ID NO: 6054160 - DNA, 25 bp, Homo sapien
gcctggttaaaattattgctgtaat

SEQ ID NO: 6054161 - DNA, 25 bp, Homo sapien
ggatatcattatttccgttaatctg

SEQ ID NO: 6054162 - DNA, 25 bp, Homo sapien
tcttttgtatattccggcgtttgga

SEQ ID NO: 6054163 - DNA, 25 bp, Homo sapien
tgagaatcatccgggtatcctaaaa

SEQ ID NO: 6054164 - DNA, 25 bp, Homo sapien
gtgatataatctgcggattttccga

SEQ ID NO: 6054165 - DNA, 25 bp, Homo sapien
attattgctgtaattgtttttaaca

SEQ ID NO: 6054166 - DNA, 25 bp, Homo sapien
ttccgttaatctgcggactgtgttc

SEQ ID NO: 6054167 - DNA, 25 bp, Homo sapien
acccaggattccaagaagtcagcgg

SEQ ID NO: 6054168 - DNA, 25 bp, Homo sapien
aaccgtatctcatcagacctgggcc

SEQ ID NO: 6054169 - DNA, 25 bp, Homo sapien
agtttgacccaggattccaagaagt

SEQ ID NO: 6054170 - DNA, 25 bp, Homo sapien
tcatattgatgctgagaatcatccg

SEQ ID NO: 6054171 - DNA, 25 bp, Homo sapien
agtgatggatagctgcctatgtctt

SEQ ID NO: 6054172 - DNA, 25 bp, Homo sapien
ttgtcgtcaaggatgccgccttttt

SEQ ID NO: 6054173 - DNA, 25 bp, Homo sapien
caatagttcataccggaatctaaat

SEQ ID NO: 6054174 - DNA, 25 bp, Homo sapien
ttgtccaaatcgcttccgcttgcat

SEQ ID NO: 6054175 - DNA, 25 bp, Homo sapien
atcaaaccgtatttatgattcgcaa

SEQ ID NO: 6054176 - DNA, 25 bp, Homo sapien
tcagacctgggcctctaacatacaa

SEQ ID NO: 6054177 - DNA, 25 bp, Homo sapien
ggatagctgcctatgtctttgaaat

SEQ ID NO: 6054178 - DNA, 25 bp, Homo sapien
tcaaaataattattggcgattgtca

SEQ ID NO: 6054179 - DNA, 25 bp, Homo sapien
tatattcggaatatatttttgcttt

SEQ ID NO: 6054180 - DNA, 25 bp, Homo sapien
ttatgattcgcaaattttgagttgc

SEQ ID NO: 6054181 - DNA, 25 bp, Homo sapien
tcaaggatgccgcctttttcactgc

SEQ ID NO: 6054182 - DNA, 25 bp, Homo sapien
atgtctttgaaataaccagtgccct

SEQ ID NO: 6054183 - DNA, 25 bp, Homo sapien
taacatgaaagtaaccgtatctcat

SEQ ID NO: 6054184 - DNA, 25 bp, Homo sapien
taattattggcgattgtcatgtggg

SEQ ID NO: 6054185 - DNA, 25 bp, Homo sapien
acgagtttgtccaaatcgcttccgc

SEQ ID NO: 6054186 - DNA, 25 bp, Homo sapien
gtgcccttgtcgtcaaggatgccgc

SEQ ID NO: 6054187 - DNA, 25 bp, Homo sapien
ttcactgcctttcccaaagtaatta

SEQ ID NO: 6054188 - DNA, 25 bp, Homo sapien
gcggattttccgatatacacgagtt

SEQ ID NO: 6054189 - DNA, 25 bp, Homo sapien
ccgtatttatgattcgcaaattttg

SEQ ID NO: 6054190 - DNA, 25 bp, Homo sapien
tgcctttcccaaagtaattatattc

SEQ ID NO: 6054191 - DNA, 25 bp, Homo sapien
tcatccgggtatcctaaaatcaaac

SEQ ID NO: 6054192 - DNA, 25 bp, Homo sapien
tcaatccaatagttcataccggaat

SEQ ID NO: 6054193 - DNA, 25 bp, Homo sapien
tcgtgacaaattcttttgtatattc

SEQ ID NO: 6054194 - DNA, 25 bp, Homo sapien
gtcatgtgggggtagccgtcatatt

SEQ ID NO: 6054195 - DNA, 25 bp, Homo sapien
aatgtgacgtgatcaatccaatagt

SEQ ID NO: 6054196 - DNA, 25 bp, Homo sapien
cattatttccgttaatctgcggact

SEQ ID NO: 6054197 - DNA, 25 bp, Homo sapien
cttccgcttgcattatagctatgac

SEQ ID NO: 6054198 - DNA, 25 bp, Homo sapien
tttccgatatacacgagtttgtcca

SEQ ID NO: 6054199 - DNA, 25 bp, Homo sapien
tgggggtagccgtcatattgatgct

SEQ ID NO: 6054200 - DNA, 25 bp, Homo sapien
atatacacgagtttgtccaaatcgc

SEQ ID NO: 6054201 - DNA, 25 bp, Homo sapien
ctgcctatgtctttgaaataaccag

SEQ ID NO: 6054202 - DNA, 25 bp, Homo sapien
aaatcgcttccgcttgcattatagc

SEQ ID NO: 6054203 - DNA, 25 bp, Homo sapien
taaccagtgcccttgtcgtcaagga

SEQ ID NO: 6054204 - DNA, 25 bp, Homo sapien
gaaagtaaccgtatctcatcagacc

SEQ ID NO: 6054205 - DNA, 25 bp, Homo sapien
taatctgcggattttccgatataca

SEQ ID NO: 6054206 - DNA, 25 bp, Homo sapien
tttgcttttgtagcaattgtaatcg

SEQ ID NO: 6054207 - DNA, 25 bp, Homo sapien
acaaattcttttgtatattccggcg

SEQ ID NO: 6054208 - DNA, 25 bp, Homo sapien
cctgagaatgtgacgtgatcaatcc

SEQ ID NO: 6054209 - DNA, 25 bp, Homo sapien
gatgccgcctttttcactgcctttc

SEQ ID NO: 6054210 - DNA, 25 bp, Homo sapien
ggagaggtttgcttgttgagtgatg

SEQ ID NO: 6054211 - DNA, 25 bp, Homo sapien
tttggacacgatagctatagtttga

SEQ ID NO: 6054212 - DNA, 25 bp, Homo sapien
ttgaaataaccagtgcccttgtcgt

SEQ ID NO: 6054213 - DNA, 25 bp, Homo sapien
ctgatcgtgatataatctgcggatt

SEQ ID NO: 6054214 - DNA, 25 bp, Homo sapien
tgatgctgagaatcatccgggtatc

SEQ ID NO: 6054215 - DNA, 25 bp, Homo sapien
atctcatcagacctgggcctctaac

SEQ ID NO: 6054216 - DNA, 25 bp, Homo sapien
aagaagtcagcggagaggtttgctt

SEQ ID NO: 6054217 - DNA, 25 bp, Homo sapien
acatacaagttctcaaaataattat

SEQ ID NO: 6054218 - DNA, 25 bp, Homo sapien
aaagctggatatcattatttccgtt

SEQ ID NO: 6054219 - DNA, 25 bp, Homo sapien
ccggcgtttggacacgatagctata

SEQ ID NO: 6054220 - DNA, 25 bp, Homo sapien
gcgattgtcatgtgggggtagccgt

SEQ ID NO: 6054221 - DNA, 25 bp, Homo sapien
aattttgagttgctgatcgtgatat

SEQ ID NO: 6054222 - DNA, 25 bp, Homo sapien
gtcagcggagaggtttgcttgttga

SEQ ID NO: 6054223 - DNA, 25 bp, Homo sapien
taagcgtcatataatgcgctttctg

SEQ ID NO: 6054224 - DNA, 25 bp, Homo sapien
cctgatgattcccatttggttttga

SEQ ID NO: 6054225 - DNA, 25 bp, Homo sapien
atgacgccgtctgatcagcaatggc

SEQ ID NO: 6054226 - DNA, 25 bp, Homo sapien
tgaaaatccgctccgaaacaaaaca

SEQ ID NO: 6054227 - DNA, 25 bp, Homo sapien
ggttttgaggatcagaaaacatgtc

SEQ ID NO: 6054228 - DNA, 25 bp, Homo sapien
actttcagcatcaaaagcatctatt

SEQ ID NO: 6054229 - DNA, 25 bp, Homo sapien
ctttctcagcagcacgtcactttca

SEQ ID NO: 6054230 - DNA, 25 bp, Homo sapien
gaaatcgtgacataagggccggtct

SEQ ID NO: 6054231 - DNA, 25 bp, Homo sapien
ccgccggcattcacttttcccctga

SEQ ID NO: 6054232 - DNA, 25 bp, Homo sapien
cctgaacggaaatcggctttgtcat

SEQ ID NO: 6054233 - DNA, 25 bp, Homo sapien
cagcagcacgtcactttcagcatca

SEQ ID NO: 6054234 - DNA, 25 bp, Homo sapien
gatcagcaatggcaatatctgtggc

SEQ ID NO: 6054235 - DNA, 25 bp, Homo sapien
ttttattcagcctccgcaaacgcaa

SEQ ID NO: 6054236 - DNA, 25 bp, Homo sapien
tgattcccatttggttttgaggatc

SEQ ID NO: 6054237 - DNA, 25 bp, Homo sapien
gcagctcagagagactgaatgacgc

SEQ ID NO: 6054238 - DNA, 25 bp, Homo sapien
taatgcgctttctgccggccgatac

SEQ ID NO: 6054239 - DNA, 25 bp, Homo sapien
attcactggcttcctgaacggaaat

SEQ ID NO: 6054240 - DNA, 25 bp, Homo sapien
ccggtctgcaatttcatccacaaat

SEQ ID NO: 6054241 - DNA, 25 bp, Homo sapien
cacgtcactttcagcatcaaaagca

SEQ ID NO: 6054242 - DNA, 25 bp, Homo sapien
gaggatcagaaaacatgtcttgatt

SEQ ID NO: 6054243 - DNA, 25 bp, Homo sapien
ccatttggttttgaggatcagaaaa

SEQ ID NO: 6054244 - DNA, 25 bp, Homo sapien
gcattcacttttcccctgacatgcg

SEQ ID NO: 6054245 - DNA, 25 bp, Homo sapien
ccgtctgatcagcaatggcaatatc

SEQ ID NO: 6054246 - DNA, 25 bp, Homo sapien
tcagaaacggtaaaacacaagcagg

SEQ ID NO: 6054247 - DNA, 25 bp, Homo sapien
acaggccgaatagcagctcagagag

SEQ ID NO: 6054248 - DNA, 25 bp, Homo sapien
ttttctgccccttttcatttcctga

SEQ ID NO: 6054249 - DNA, 25 bp, Homo sapien
tcggctttgtcataagcgtcatata

SEQ ID NO: 6054250 - DNA, 25 bp, Homo sapien
cggaaatcggctttgtcataagcgt

SEQ ID NO: 6054251 - DNA, 25 bp, Homo sapien
cacaaatcatagagaggctcttggg

SEQ ID NO: 6054252 - DNA, 25 bp, Homo sapien
cggtggctttcgcacgactgacttg

SEQ ID NO: 6054253 - DNA, 25 bp, Homo sapien
ataaactgtttataatgtgcgattc

SEQ ID NO: 6054254 - DNA, 25 bp, Homo sapien
tgatgatcaagtgagctcataaact

SEQ ID NO: 6054255 - DNA, 25 bp, Homo sapien
tgcgattccttttttattcagcctc

SEQ ID NO: 6054256 - DNA, 25 bp, Homo sapien
acggtaaaacacaagcagggtacag

SEQ ID NO: 6054257 - DNA, 25 bp, Homo sapien
tccttttttattcagcctccgcaaa

SEQ ID NO: 6054258 - DNA, 25 bp, Homo sapien
acatgcgaaatcgtgacataagggc

SEQ ID NO: 6054259 - DNA, 25 bp, Homo sapien
tttcctgatagatttcttgaaaatc

SEQ ID NO: 6054260 - DNA, 25 bp, Homo sapien
gcagatacaaatccaagaccgccgg

SEQ ID NO: 6054261 - DNA, 25 bp, Homo sapien
ctgacttgatgatcaagtgagctca

SEQ ID NO: 6054262 - DNA, 25 bp, Homo sapien
taagggccggtctgcaatttcatcc

SEQ ID NO: 6054263 - DNA, 25 bp, Homo sapien
caatggcaatatctgtggcagatac

SEQ ID NO: 6054264 - DNA, 25 bp, Homo sapien
gctttcgcacgactgacttgatgat

SEQ ID NO: 6054265 - DNA, 25 bp, Homo sapien
tgtttataatgtgcgattccttttt

SEQ ID NO: 6054266 - DNA, 25 bp, Homo sapien
tgcctgttttctgccccttttcatt

SEQ ID NO: 6054267 - DNA, 25 bp, Homo sapien
agcatcaaaagcatctattaacccc

SEQ ID NO: 6054268 - DNA, 25 bp, Homo sapien
ttgcagttaaagcggtggctttcgc

SEQ ID NO: 6054269 - DNA, 25 bp, Homo sapien
tttcttgaaaatccgctccgaaaca

SEQ ID NO: 6054270 - DNA, 25 bp, Homo sapien
taaaacacaagcagggtacaggccg

SEQ ID NO: 6054271 - DNA, 25 bp, Homo sapien
acgcaataaatgctttctcagcagc

SEQ ID NO: 6054272 - DNA, 25 bp, Homo sapien
tgccccttttcatttcctgatagat

SEQ ID NO: 6054273 - DNA, 25 bp, Homo sapien
cagaaaacatgtcttgatttgcagt

SEQ ID NO: 6054274 - DNA, 25 bp, Homo sapien
cttgatttgcagttaaagcggtggc

SEQ ID NO: 6054275 - DNA, 25 bp, Homo sapien
ttaaagcggtggctttcgcacgact

SEQ ID NO: 6054276 - DNA, 25 bp, Homo sapien
aaagcatctattaacccccattcac

SEQ ID NO: 6054277 - DNA, 25 bp, Homo sapien
ttcatccacaaatcatagagaggct

SEQ ID NO: 6054278 - DNA, 25 bp, Homo sapien
gagctcataaactgtttataatgtg

SEQ ID NO: 6054279 - DNA, 25 bp, Homo sapien
ggcggatcagaaacggtaaaacaca

SEQ ID NO: 6054280 - DNA, 25 bp, Homo sapien
cgaatagcagctcagagagactgaa

SEQ ID NO: 6054281 - DNA, 25 bp, Homo sapien
tcatataatgcgctttctgccggcc

SEQ ID NO: 6054282 - DNA, 25 bp, Homo sapien
tcaagtgagctcataaactgtttat

SEQ ID NO: 6054283 - DNA, 25 bp, Homo sapien
ggagcttgcctgttttctgcccctt

SEQ ID NO: 6054284 - DNA, 25 bp, Homo sapien
gatagatttcttgaaaatccgctcc

SEQ ID NO: 6054285 - DNA, 25 bp, Homo sapien
gactgaatgacgccgtctgatcagc

SEQ ID NO: 6054286 - DNA, 25 bp, Homo sapien
acaagcagggtacaggccgaatagc

SEQ ID NO: 6054287 - DNA, 25 bp, Homo sapien
tctattaacccccattcactggctt

SEQ ID NO: 6054288 - DNA, 25 bp, Homo sapien
caatatctgtggcagatacaaatcc

SEQ ID NO: 6054289 - DNA, 25 bp, Homo sapien
ctcttgggagcttgcctgttttctg

SEQ ID NO: 6054290 - DNA, 25 bp, Homo sapien
tgcaatttcatccacaaatcataga

SEQ ID NO: 6054291 - DNA, 25 bp, Homo sapien
cagagagactgaatgacgccgtctg

SEQ ID NO: 6054292 - DNA, 25 bp, Homo sapien
tcatagagaggctcttgggagcttg

SEQ ID NO: 6054293 - DNA, 25 bp, Homo sapien
acccccattcactggcttcctgaac

SEQ ID NO: 6054294 - DNA, 25 bp, Homo sapien
gcacgactgacttgatgatcaagtg

SEQ ID NO: 6054295 - DNA, 25 bp, Homo sapien
acaaatccaagaccgccggcattca

SEQ ID NO: 6054296 - DNA, 25 bp, Homo sapien
tgccggccgatacggcggatcagaa

SEQ ID NO: 6054297 - DNA, 25 bp, Homo sapien
tcagcctccgcaaacgcaataaatg

SEQ ID NO: 6054298 - DNA, 25 bp, Homo sapien
tctgtggcagatacaaatccaagac

SEQ ID NO: 6054299 - DNA, 25 bp, Homo sapien
tccgcaaacgcaataaatgctttct

SEQ ID NO: 6054300 - DNA, 25 bp, Homo sapien
taaatgctttctcagcagcacgtca

SEQ ID NO: 6054301 - DNA, 25 bp, Homo sapien
ttttcatttcctgatagatttcttg

SEQ ID NO: 6054302 - DNA, 25 bp, Homo sapien
agggtacaggccgaatagcagctca

SEQ ID NO: 6054303 - DNA, 25 bp, Homo sapien
taatgtgcgattccttttttattca

SEQ ID NO: 6054304 - DNA, 25 bp, Homo sapien
ttgtcataagcgtcatataatgcgc

SEQ ID NO: 6054305 - DNA, 25 bp, Homo sapien
tggcttcctgaacggaaatcggctt

SEQ ID NO: 6054306 - DNA, 25 bp, Homo sapien
acatgtcttgatttgcagttaaagc

SEQ ID NO: 6054307 - DNA, 25 bp, Homo sapien
acttttcccctgacatgcgaaatcg

SEQ ID NO: 6054308 - DNA, 25 bp, Homo sapien
caagaccgccggcattcacttttcc

SEQ ID NO: 6054309 - DNA, 25 bp, Homo sapien
agaggctcttgggagcttgcctgtt

SEQ ID NO: 6054310 - DNA, 25 bp, Homo sapien
gtgacataagggccggtctgcaatt

SEQ ID NO: 6054311 - DNA, 25 bp, Homo sapien
cccctgacatgcgaaatcgtgacat

SEQ ID NO: 6054312 - DNA, 25 bp, Homo sapien
cgatacggcggatcagaaacggtaa

SEQ ID NO: 6054313 - DNA, 25 bp, Homo sapien
gctttctgccggccgatacggcgga

SEQ ID NO: 6054314 - DNA, 25 bp, Homo sapien
aacatacctgatgattcccatttgg

SEQ ID NO: 6054315 - DNA, 25 bp, Homo sapien
cctgcattgccgcaataactggaat

SEQ ID NO: 6054316 - DNA, 25 bp, Homo sapien
agaataaagattgtcatcagtgaac

SEQ ID NO: 6054317 - DNA, 25 bp, Homo sapien
tcggcttttccgccagttcttgcgc

SEQ ID NO: 6054318 - DNA, 25 bp, Homo sapien
gccagttcttgcgccagctccactt

SEQ ID NO: 6054319 - DNA, 25 bp, Homo sapien
cccattccaggcgtaaatccgtatt

SEQ ID NO: 6054320 - DNA, 25 bp, Homo sapien
atttcataaaattagccgtatacac

SEQ ID NO: 6054321 - DNA, 25 bp, Homo sapien
aattccatggccctgcattgccgca

SEQ ID NO: 6054322 - DNA, 25 bp, Homo sapien
gcatcatcaattcctgttcaatgac

SEQ ID NO: 6054323 - DNA, 25 bp, Homo sapien
catggccctgcattgccgcaataac

SEQ ID NO: 6054324 - DNA, 25 bp, Homo sapien
cttcatgatgaaatgttttctcatg

SEQ ID NO: 6054325 - DNA, 25 bp, Homo sapien
tgacaaagccgcctccaattccatg

SEQ ID NO: 6054326 - DNA, 25 bp, Homo sapien
tcaattcctgttcaatgacgcgcgg

SEQ ID NO: 6054327 - DNA, 25 bp, Homo sapien
gaacccctcttttttcaagatcagc

SEQ ID NO: 6054328 - DNA, 25 bp, Homo sapien
gggattctgccgtatgtattcaaac

SEQ ID NO: 6054329 - DNA, 25 bp, Homo sapien
aagatcagctccgcggtagctgccc

SEQ ID NO: 6054330 - DNA, 25 bp, Homo sapien
agtgtaaccagtgagtttctcggct

SEQ ID NO: 6054331 - DNA, 25 bp, Homo sapien
ctctgctcagaatgacaatgtcagc

SEQ ID NO: 6054332 - DNA, 25 bp, Homo sapien
tctcgcaatccagcgccagagaata

SEQ ID NO: 6054333 - DNA, 25 bp, Homo sapien
gctgatcgcgaagcggggcaaccaa

SEQ ID NO: 6054334 - DNA, 25 bp, Homo sapien
gtagcgcccattccaggcgtaaatc

SEQ ID NO: 6054335 - DNA, 25 bp, Homo sapien
ataaaggtagcgcccattccaggcg

SEQ ID NO: 6054336 - DNA, 25 bp, Homo sapien
atgttttctcatgcatcatcaattc

SEQ ID NO: 6054337 - DNA, 25 bp, Homo sapien
catatcctgtcaaaatgaccgcttt

SEQ ID NO: 6054338 - DNA, 25 bp, Homo sapien
aaagccgcctccaattccatggccc

SEQ ID NO: 6054339 - DNA, 25 bp, Homo sapien
tttttcaagatcagctccgcggtag

SEQ ID NO: 6054340 - DNA, 25 bp, Homo sapien
ttgccgcaataactggaatctcgca

SEQ ID NO: 6054341 - DNA, 25 bp, Homo sapien
gcacggggcagcaccttaaaaggaa

SEQ ID NO: 6054342 - DNA, 25 bp, Homo sapien
tagccgtatacacgctttctctgct

SEQ ID NO: 6054343 - DNA, 25 bp, Homo sapien
tcttgcgccagctccacttcataat

SEQ ID NO: 6054344 - DNA, 25 bp, Homo sapien
gccccatgacaaagccgcctccaat

SEQ ID NO: 6054345 - DNA, 25 bp, Homo sapien
ctggaatctcgcaatccagcgccag

SEQ ID NO: 6054346 - DNA, 25 bp, Homo sapien
tccacttcataatctaacacttctg

SEQ ID NO: 6054347 - DNA, 25 bp, Homo sapien
tgagtttctcggcttttccgccagt

SEQ ID NO: 6054348 - DNA, 25 bp, Homo sapien
tcaatccctgttgaattcgaagcag

SEQ ID NO: 6054349 - DNA, 25 bp, Homo sapien
tctcatgcatcatcaattcctgttc

SEQ ID NO: 6054350 - DNA, 25 bp, Homo sapien
ctgggccaggctgaaacccagtttt

SEQ ID NO: 6054351 - DNA, 25 bp, Homo sapien
cgcattcaataatatttcctgggcc

SEQ ID NO: 6054352 - DNA, 25 bp, Homo sapien
gcaaccaaatgatctttcagtgtaa

SEQ ID NO: 6054353 - DNA, 25 bp, Homo sapien
cgcgaagcggggcaaccaaatgatc

SEQ ID NO: 6054354 - DNA, 25 bp, Homo sapien
tctaacacttctgcacggggcagca

SEQ ID NO: 6054355 - DNA, 25 bp, Homo sapien
gcggtagctgcccgcattcaataat

SEQ ID NO: 6054356 - DNA, 25 bp, Homo sapien
ccctcttttttcaagatcagctccg

SEQ ID NO: 6054357 - DNA, 25 bp, Homo sapien
gcgcggcagctgatcgcgaagcggg

SEQ ID NO: 6054358 - DNA, 25 bp, Homo sapien
tcagaatgacaatgtcagcaaagag

SEQ ID NO: 6054359 - DNA, 25 bp, Homo sapien
caataatatttcctgggccaggctg

SEQ ID NO: 6054360 - DNA, 25 bp, Homo sapien
gaattcgaagcagtccttcttgcgt

SEQ ID NO: 6054361 - DNA, 25 bp, Homo sapien
cctgttgaattcgaagcagtccttc

SEQ ID NO: 6054362 - DNA, 25 bp, Homo sapien
agcggggcaaccaaatgatctttca

SEQ ID NO: 6054363 - DNA, 25 bp, Homo sapien
cttgcgttcctcctgaagcaaaata

SEQ ID NO: 6054364 - DNA, 25 bp, Homo sapien
aatgacgcgcggcagctgatcgcga

SEQ ID NO: 6054365 - DNA, 25 bp, Homo sapien
gcctccaattccatggccctgcatt

SEQ ID NO: 6054366 - DNA, 25 bp, Homo sapien
gtcatcagtgaacttggtcaatccc

SEQ ID NO: 6054367 - DNA, 25 bp, Homo sapien
tatacacgctttctctgctcagaat

SEQ ID NO: 6054368 - DNA, 25 bp, Homo sapien
gtccttcttgcgttcctcctgaagc

SEQ ID NO: 6054369 - DNA, 25 bp, Homo sapien
tgacaatgtcagcaaagagccccat

SEQ ID NO: 6054370 - DNA, 25 bp, Homo sapien
ttcctcctgaagcaaaataattatc

SEQ ID NO: 6054371 - DNA, 25 bp, Homo sapien
gccagctccacttcataatctaaca

SEQ ID NO: 6054372 - DNA, 25 bp, Homo sapien
ggaacgataaaggtagcgcccattc

SEQ ID NO: 6054373 - DNA, 25 bp, Homo sapien
cttggtcaatccctgttgaattcga

SEQ ID NO: 6054374 - DNA, 25 bp, Homo sapien
gatgaaatgttttctcatgcatcat

SEQ ID NO: 6054375 - DNA, 25 bp, Homo sapien
acttctgcacggggcagcaccttaa

SEQ ID NO: 6054376 - DNA, 25 bp, Homo sapien
accagtgagtttctcggcttttccg

SEQ ID NO: 6054377 - DNA, 25 bp, Homo sapien
aagattgtcatcagtgaacttggtc

SEQ ID NO: 6054378 - DNA, 25 bp, Homo sapien
gtatttgggattctgccgtatgtat

SEQ ID NO: 6054379 - DNA, 25 bp, Homo sapien
cgctttctctgctcagaatgacaat

SEQ ID NO: 6054380 - DNA, 25 bp, Homo sapien
aattatcatatcctgtcaaaatgac

SEQ ID NO: 6054381 - DNA, 25 bp, Homo sapien
ctgaagcaaaataattatcatatcc

SEQ ID NO: 6054382 - DNA, 25 bp, Homo sapien
cgccagagaataaagattgtcatca

SEQ ID NO: 6054383 - DNA, 25 bp, Homo sapien
aaagagccccatgacaaagccgcct

SEQ ID NO: 6054384 - DNA, 25 bp, Homo sapien
tgtcagcaaagagccccatgacaaa

SEQ ID NO: 6054385 - DNA, 25 bp, Homo sapien
gaagcagtccttcttgcgttcctcc

SEQ ID NO: 6054386 - DNA, 25 bp, Homo sapien
ctgtcaaaatgaccgctttgtattt

SEQ ID NO: 6054387 - DNA, 25 bp, Homo sapien
atccagcgccagagaataaagattg

SEQ ID NO: 6054388 - DNA, 25 bp, Homo sapien
gacttcttcatgatgaaatgttttc

SEQ ID NO: 6054389 - DNA, 25 bp, Homo sapien
tatttcctgggccaggctgaaaccc

SEQ ID NO: 6054390 - DNA, 25 bp, Homo sapien
cgctttgtatttgggattctgccgt

SEQ ID NO: 6054391 - DNA, 25 bp, Homo sapien
aatgaccgctttgtatttgggattc

SEQ ID NO: 6054392 - DNA, 25 bp, Homo sapien
taaaattagccgtatacacgctttc

SEQ ID NO: 6054393 - DNA, 25 bp, Homo sapien
atccgtatttcataaaattagccgt

SEQ ID NO: 6054394 - DNA, 25 bp, Homo sapien
ttttccgccagttcttgcgccagct

SEQ ID NO: 6054395 - DNA, 25 bp, Homo sapien
caataactggaatctcgcaatccag

SEQ ID NO: 6054396 - DNA, 25 bp, Homo sapien
cctgttcaatgacgcgcggcagctg

SEQ ID NO: 6054397 - DNA, 25 bp, Homo sapien
agtgaacttggtcaatccctgttga

SEQ ID NO: 6054398 - DNA, 25 bp, Homo sapien
agctccgcggtagctgcccgcattc

SEQ ID NO: 6054399 - DNA, 25 bp, Homo sapien
gctgcccgcattcaataatatttcc

SEQ ID NO: 6054400 - DNA, 25 bp, Homo sapien
tcataatctaacacttctgcacggg

SEQ ID NO: 6054401 - DNA, 25 bp, Homo sapien
aaatgatctttcagtgtaaccagtg

SEQ ID NO: 6054402 - DNA, 25 bp, Homo sapien
ccaggcgtaaatccgtatttcataa

SEQ ID NO: 6054403 - DNA, 25 bp, Homo sapien
tctttcagtgtaaccagtgagtttc

SEQ ID NO: 6054404 - DNA, 25 bp, Homo sapien
caaaataattatcatatcctgtcaa

SEQ ID NO: 6054405 - DNA, 25 bp, Homo sapien
acgatgaacacctttttctgctttg

SEQ ID NO: 6054406 - DNA, 25 bp, Homo sapien
cctccgtacgaatatcaatatcaat

SEQ ID NO: 6054407 - DNA, 25 bp, Homo sapien
ccgatggtcttttaccatggaatac

SEQ ID NO: 6054408 - DNA, 25 bp, Homo sapien
gatccgcacaagacgatgaacacct

SEQ ID NO: 6054409 - DNA, 25 bp, Homo sapien
gtggcggcggcctgatgaatcaaat

SEQ ID NO: 6054410 - DNA, 25 bp, Homo sapien
tcggcaagtgagtaatccgaacggc

SEQ ID NO: 6054411 - DNA, 25 bp, Homo sapien
gctcttcaattctgcgctgatacag

SEQ ID NO: 6054412 - DNA, 25 bp, Homo sapien
caactttaatatcctccgtacgaat

SEQ ID NO: 6054413 - DNA, 25 bp, Homo sapien
ccgcccgcgccgcttgcacggtacg

SEQ ID NO: 6054414 - DNA, 25 bp, Homo sapien
tttgttcaccgcgaatttcatccag

SEQ ID NO: 6054415 - DNA, 25 bp, Homo sapien
ggcatgacttcacatgaaacgaaag

SEQ ID NO: 6054416 - DNA, 25 bp, Homo sapien
cacggtttttaatttgtgagcgctc

SEQ ID NO: 6054417 - DNA, 25 bp, Homo sapien
tgcgctgatacagcttggccttcag

SEQ ID NO: 6054418 - DNA, 25 bp, Homo sapien
gaatacataagaacggatttggctg

SEQ ID NO: 6054419 - DNA, 25 bp, Homo sapien
cgcttgcacggtacgtgtcaacttt

SEQ ID NO: 6054420 - DNA, 25 bp, Homo sapien
tttttctgctttgagatacccgtaa

SEQ ID NO: 6054421 - DNA, 25 bp, Homo sapien
cgcgccgcttgcacggtacgtgtca

SEQ ID NO: 6054422 - DNA, 25 bp, Homo sapien
aacacctttttctgctttgagatac

SEQ ID NO: 6054423 - DNA, 25 bp, Homo sapien
cacctggaaggtaatcgagagtctc

SEQ ID NO: 6054424 - DNA, 25 bp, Homo sapien
gtcttttaccatggaatacggatgg

SEQ ID NO: 6054425 - DNA, 25 bp, Homo sapien
gtgtcctttgatgagcaatgtcact

SEQ ID NO: 6054426 - DNA, 25 bp, Homo sapien
aatcgagagtctctactttaaagcc

SEQ ID NO: 6054427 - DNA, 25 bp, Homo sapien
agcaatgtcactgacttgattcccg

SEQ ID NO: 6054428 - DNA, 25 bp, Homo sapien
agcgttgtgtcctttgatgagcaat

SEQ ID NO: 6054429 - DNA, 25 bp, Homo sapien
cttggccttcagcattttcatggct

SEQ ID NO: 6054430 - DNA, 25 bp, Homo sapien
cccgtaagcgttgtgtcctttgatg

SEQ ID NO: 6054431 - DNA, 25 bp, Homo sapien
acttcacatgaaacgaaagatgtgt

SEQ ID NO: 6054432 - DNA, 25 bp, Homo sapien
gtcactgacttgattcccgcctcgt

SEQ ID NO: 6054433 - DNA, 25 bp, Homo sapien
ccccatttctgtattggtccgatgg

SEQ ID NO: 6054434 - DNA, 25 bp, Homo sapien
tgctttgagatacccgtaagcgttg

SEQ ID NO: 6054435 - DNA, 25 bp, Homo sapien
atcaaatggtgagatccgcacaaga

SEQ ID NO: 6054436 - DNA, 25 bp, Homo sapien
tcgttaaattcaggcatgacttcac

SEQ ID NO: 6054437 - DNA, 25 bp, Homo sapien
gagatacccgtaagcgttgtgtcct

SEQ ID NO: 6054438 - DNA, 25 bp, Homo sapien
cgaacggctgaatccgtcgtattga

SEQ ID NO: 6054439 - DNA, 25 bp, Homo sapien
tgatgaatcaaatggtgagatccgc

SEQ ID NO: 6054440 - DNA, 25 bp, Homo sapien
caactacgttcgtcggcaagtgagt

SEQ ID NO: 6054441 - DNA, 25 bp, Homo sapien
gaaggtaatcgagagtctctacttt

SEQ ID NO: 6054442 - DNA, 25 bp, Homo sapien
cttcagcattttcatggctctttca

SEQ ID NO: 6054443 - DNA, 25 bp, Homo sapien
tatcaatttcatcgttaaattcagg

SEQ ID NO: 6054444 - DNA, 25 bp, Homo sapien
ttcccgcctcgtcacctggaaggta

SEQ ID NO: 6054445 - DNA, 25 bp, Homo sapien
atgtcacaactacgttcgtcggcaa

SEQ ID NO: 6054446 - DNA, 25 bp, Homo sapien
caattctgcgctgatacagcttggc

SEQ ID NO: 6054447 - DNA, 25 bp, Homo sapien
ataagaacggatttggctgccccag

SEQ ID NO: 6054448 - DNA, 25 bp, Homo sapien
cacggtacgtgtcaactttaatatc

SEQ ID NO: 6054449 - DNA, 25 bp, Homo sapien
atttcatcgttaaattcaggcatga

SEQ ID NO: 6054450 - DNA, 25 bp, Homo sapien
taatccgaacggctgaatccgtcgt

SEQ ID NO: 6054451 - DNA, 25 bp, Homo sapien
atgtgtggcggcggcctgatgaatc

SEQ ID NO: 6054452 - DNA, 25 bp, Homo sapien
ttgattcccgcctcgtcacctggaa

SEQ ID NO: 6054453 - DNA, 25 bp, Homo sapien
tccgtcgtattgacgtgctgtccgc

SEQ ID NO: 6054454 - DNA, 25 bp, Homo sapien
tgaacgttccccatttctgtattgg

SEQ ID NO: 6054455 - DNA, 25 bp, Homo sapien
tcaatgtcaccatccattacagctt

SEQ ID NO: 6054456 - DNA, 25 bp, Homo sapien
gtattgacgtgctgtccgcccgcgc

SEQ ID NO: 6054457 - DNA, 25 bp, Homo sapien
gccgatttctttttgttcaccgcga

SEQ ID NO: 6054458 - DNA, 25 bp, Homo sapien
tggtgagatccgcacaagacgatga

SEQ ID NO: 6054459 - DNA, 25 bp, Homo sapien
taccatggaatacggatggaataca

SEQ ID NO: 6054460 - DNA, 25 bp, Homo sapien
tttggcatgtcacaactacgttcgt

SEQ ID NO: 6054461 - DNA, 25 bp, Homo sapien
cgaatttcatccagctctgcctgct

SEQ ID NO: 6054462 - DNA, 25 bp, Homo sapien
cggatggaatacataagaacggatt

SEQ ID NO: 6054463 - DNA, 25 bp, Homo sapien
acagcttgaacgttccccatttctg

SEQ ID NO: 6054464 - DNA, 25 bp, Homo sapien
aacgtatcaatgtcaccatccatta

SEQ ID NO: 6054465 - DNA, 25 bp, Homo sapien
aatttgtgagcgctccgtttggcat

SEQ ID NO: 6054466 - DNA, 25 bp, Homo sapien
tatcaatatcaatttcatcgttaaa

SEQ ID NO: 6054467 - DNA, 25 bp, Homo sapien
tccattacagcttgaacgttcccca

SEQ ID NO: 6054468 - DNA, 25 bp, Homo sapien
attggtccgatggtcttttaccatg

SEQ ID NO: 6054469 - DNA, 25 bp, Homo sapien
ttctgtattggtccgatggtctttt

SEQ ID NO: 6054470 - DNA, 25 bp, Homo sapien
tcaccatccattacagcttgaacgt

SEQ ID NO: 6054471 - DNA, 25 bp, Homo sapien
cctcgtcacctggaaggtaatcgag

SEQ ID NO: 6054472 - DNA, 25 bp, Homo sapien
ttggctgccccagccgatttctttt

SEQ ID NO: 6054473 - DNA, 25 bp, Homo sapien
gtgagcgctccgtttggcatgtcac

SEQ ID NO: 6054474 - DNA, 25 bp, Homo sapien
ggaatacggatggaatacataagaa

SEQ ID NO: 6054475 - DNA, 25 bp, Homo sapien
gagtctctactttaaagccgcggcg

SEQ ID NO: 6054476 - DNA, 25 bp, Homo sapien
tcatccagctctgcctgctgctctt

SEQ ID NO: 6054477 - DNA, 25 bp, Homo sapien
cgaaagatgtgtggcggcggcctga

SEQ ID NO: 6054478 - DNA, 25 bp, Homo sapien
gctccgtttggcatgtcacaactac

SEQ ID NO: 6054479 - DNA, 25 bp, Homo sapien
tttgatgagcaatgtcactgacttg

SEQ ID NO: 6054480 - DNA, 25 bp, Homo sapien
gcggcctgatgaatcaaatggtgag

SEQ ID NO: 6054481 - DNA, 25 bp, Homo sapien
atacagcttggccttcagcattttc

SEQ ID NO: 6054482 - DNA, 25 bp, Homo sapien
agtgagtaatccgaacggctgaatc

SEQ ID NO: 6054483 - DNA, 25 bp, Homo sapien
cacaagacgatgaacacctttttct

SEQ ID NO: 6054484 - DNA, 25 bp, Homo sapien
cctgctgctcttcaattctgcgctg

SEQ ID NO: 6054485 - DNA, 25 bp, Homo sapien
ttctttttgttcaccgcgaatttca

SEQ ID NO: 6054486 - DNA, 25 bp, Homo sapien
catggctctttcacggtttttaatt

SEQ ID NO: 6054487 - DNA, 25 bp, Homo sapien
gctgaatccgtcgtattgacgtgct

SEQ ID NO: 6054488 - DNA, 25 bp, Homo sapien
gctctgcctgctgctcttcaattct

SEQ ID NO: 6054489 - DNA, 25 bp, Homo sapien
tcaccgcgaatttcatccagctctg

SEQ ID NO: 6054490 - DNA, 25 bp, Homo sapien
taatatcctccgtacgaatatcaat

SEQ ID NO: 6054491 - DNA, 25 bp, Homo sapien
tacgaatatcaatatcaatttcatc

SEQ ID NO: 6054492 - DNA, 25 bp, Homo sapien
acggatttggctgccccagccgatt

SEQ ID NO: 6054493 - DNA, 25 bp, Homo sapien
gccccagccgatttctttttgttca

SEQ ID NO: 6054494 - DNA, 25 bp, Homo sapien
aattcaggcatgacttcacatgaaa

SEQ ID NO: 6054495 - DNA, 25 bp, Homo sapien
catgaaacgaaagatgtgtggcggc

SEQ ID NO: 6054496 - DNA, 25 bp, Homo sapien
cgttcgtcggcaagtgagtaatccg

SEQ ID NO: 6054497 - DNA, 25 bp, Homo sapien
cattttcatggctctttcacggttt

SEQ ID NO: 6054498 - DNA, 25 bp, Homo sapien
acgtgtcaactttaatatcctccgt

SEQ ID NO: 6054499 - DNA, 25 bp, Homo sapien
ttttaatttgtgagcgctccgtttg

SEQ ID NO: 6054500 - DNA, 25 bp, Homo sapien
accggactgtaaaagtgagacggag

SEQ ID NO: 6054501 - DNA, 25 bp, Homo sapien
cagtccaatataatggaggttttga

SEQ ID NO: 6054502 - DNA, 25 bp, Homo sapien
aacatgttagtggtttgatcgaaat

SEQ ID NO: 6054503 - DNA, 25 bp, Homo sapien
accttccgcaccgattttcagcccg

SEQ ID NO: 6054504 - DNA, 25 bp, Homo sapien
gtgctgataatgatgggttgccaca

SEQ ID NO: 6054505 - DNA, 25 bp, Homo sapien
agaggcgcgtccggccagttcccaa

SEQ ID NO: 6054506 - DNA, 25 bp, Homo sapien
agaaaataagaagttgatgatcgtt

SEQ ID NO: 6054507 - DNA, 25 bp, Homo sapien
aaaattgaaattcgctaagcatttg

SEQ ID NO: 6054508 - DNA, 25 bp, Homo sapien
atgggttgccacaacagctgcatca

SEQ ID NO: 6054509 - DNA, 25 bp, Homo sapien
tccgtcacgataacagaaaaccctg

SEQ ID NO: 6054510 - DNA, 25 bp, Homo sapien
aatgagacgcggcttcggttcaatt

SEQ ID NO: 6054511 - DNA, 25 bp, Homo sapien
aacagctgcatcatgcggaaaaaat

SEQ ID NO: 6054512 - DNA, 25 bp, Homo sapien
gtacgttgaatatcttgcagaggcg

SEQ ID NO: 6054513 - DNA, 25 bp, Homo sapien
tgcggtaaatgaagcgttgaaacag

SEQ ID NO: 6054514 - DNA, 25 bp, Homo sapien
tgcggaaaaaattgaaattcgctaa

SEQ ID NO: 6054515 - DNA, 25 bp, Homo sapien
gatttctgcaactacacttaccgca

SEQ ID NO: 6054516 - DNA, 25 bp, Homo sapien
gaaacagtacgttgaatatcttgca

SEQ ID NO: 6054517 - DNA, 25 bp, Homo sapien
gcatttgttccggaaaagcggtgat

SEQ ID NO: 6054518 - DNA, 25 bp, Homo sapien
gtcagccgccaaattggccagcggt

SEQ ID NO: 6054519 - DNA, 25 bp, Homo sapien
gcgtccggccagttcccaaaatgtc

SEQ ID NO: 6054520 - DNA, 25 bp, Homo sapien
ttgatcgtgctgataatgatgggtt

SEQ ID NO: 6054521 - DNA, 25 bp, Homo sapien
taagaagttgatgatcgtttgatcg

SEQ ID NO: 6054522 - DNA, 25 bp, Homo sapien
ataatgatgggttgccacaacagct

SEQ ID NO: 6054523 - DNA, 25 bp, Homo sapien
tgaatatcttgcagaggcgcgtccg

SEQ ID NO: 6054524 - DNA, 25 bp, Homo sapien
ttcgtgcggtttgccgaacccaaca

SEQ ID NO: 6054525 - DNA, 25 bp, Homo sapien
tctccgtcagaaataaataatggga

SEQ ID NO: 6054526 - DNA, 25 bp, Homo sapien
gtttgatcgaaatgcggtaaatgaa

SEQ ID NO: 6054527 - DNA, 25 bp, Homo sapien
gatgtacaataagcgggccgccaat

SEQ ID NO: 6054528 - DNA, 25 bp, Homo sapien
cgggaccttccgcaccgattttcag

SEQ ID NO: 6054529 - DNA, 25 bp, Homo sapien
cgccaaattggccagcggtacatta

SEQ ID NO: 6054530 - DNA, 25 bp, Homo sapien
acgataacagaaaaccctgtgtcag

SEQ ID NO: 6054531 - DNA, 25 bp, Homo sapien
gttttgagaaaataagaagttgatg

SEQ ID NO: 6054532 - DNA, 25 bp, Homo sapien
tcgaaatgcggtaaatgaagcgttg

SEQ ID NO: 6054533 - DNA, 25 bp, Homo sapien
tgttccggaaaagcggtgatcagct

SEQ ID NO: 6054534 - DNA, 25 bp, Homo sapien
gattttcagcccgaccggactgtaa

SEQ ID NO: 6054535 - DNA, 25 bp, Homo sapien
cagccgtttcgtgcggtttgccgaa

SEQ ID NO: 6054536 - DNA, 25 bp, Homo sapien
gcttttggaaaaagagaggatgtac

SEQ ID NO: 6054537 - DNA, 25 bp, Homo sapien
gaaaagcggtgatcagctgatccgc

SEQ ID NO: 6054538 - DNA, 25 bp, Homo sapien
caatctttataacggaagtgacagc

SEQ ID NO: 6054539 - DNA, 25 bp, Homo sapien
agcccgaccggactgtaaaagtgag

SEQ ID NO: 6054540 - DNA, 25 bp, Homo sapien
tgccacaacagctgcatcatgcgga

SEQ ID NO: 6054541 - DNA, 25 bp, Homo sapien
ttttccgctcagcagccgtttcgtg

SEQ ID NO: 6054542 - DNA, 25 bp, Homo sapien
acagaaaaccctgtgtcagccgcca

SEQ ID NO: 6054543 - DNA, 25 bp, Homo sapien
aatgggaggattcaatctttataac

SEQ ID NO: 6054544 - DNA, 25 bp, Homo sapien
tcagctgatccgcttttggaaaaag

SEQ ID NO: 6054545 - DNA, 25 bp, Homo sapien
gctcagcagccgtttcgtgcggttt

SEQ ID NO: 6054546 - DNA, 25 bp, Homo sapien
cgccaatccgtcacgataacagaaa

SEQ ID NO: 6054547 - DNA, 25 bp, Homo sapien
aaccctgtgtcagccgccaaattgg

SEQ ID NO: 6054548 - DNA, 25 bp, Homo sapien
ttagtggtttgatcgaaatgcggta

SEQ ID NO: 6054549 - DNA, 25 bp, Homo sapien
gcgggccgccaatccgtcacgataa

SEQ ID NO: 6054550 - DNA, 25 bp, Homo sapien
caaaatgtccgttctccgtcagaaa

SEQ ID NO: 6054551 - DNA, 25 bp, Homo sapien
cggtcccgccccaaacagaatgaga

SEQ ID NO: 6054552 - DNA, 25 bp, Homo sapien
ataaataatgggaggattcaatctt

SEQ ID NO: 6054553 - DNA, 25 bp, Homo sapien
tcttgcagaggcgcgtccggccagt

SEQ ID NO: 6054554 - DNA, 25 bp, Homo sapien
ggttcaattcgctgaataaacatgt

SEQ ID NO: 6054555 - DNA, 25 bp, Homo sapien
aagtgagacggaggatgttttccgc

SEQ ID NO: 6054556 - DNA, 25 bp, Homo sapien
tgaataaacatgttagtggtttgat

SEQ ID NO: 6054557 - DNA, 25 bp, Homo sapien
caataagcgggccgccaatccgtca

SEQ ID NO: 6054558 - DNA, 25 bp, Homo sapien
aggattcaatctttataacggaagt

SEQ ID NO: 6054559 - DNA, 25 bp, Homo sapien
aattggccagcggtacattatccgg

SEQ ID NO: 6054560 - DNA, 25 bp, Homo sapien
tgcatcatgcggaaaaaattgaaat

SEQ ID NO: 6054561 - DNA, 25 bp, Homo sapien
cgccccaaacagaatgagacgcggc

SEQ ID NO: 6054562 - DNA, 25 bp, Homo sapien
tataacggaagtgacagctttgcct

SEQ ID NO: 6054563 - DNA, 25 bp, Homo sapien
atggaggttttgagaaaataagaag

SEQ ID NO: 6054564 - DNA, 25 bp, Homo sapien
aatataatggaggttttgagaaaat

SEQ ID NO: 6054565 - DNA, 25 bp, Homo sapien
acccaacagtccaatataatggagg

SEQ ID NO: 6054566 - DNA, 25 bp, Homo sapien
gttgatgatcgtttgatcgtgctga

SEQ ID NO: 6054567 - DNA, 25 bp, Homo sapien
ctgtaaaagtgagacggaggatgtt

SEQ ID NO: 6054568 - DNA, 25 bp, Homo sapien
ggatgttttccgctcagcagccgtt

SEQ ID NO: 6054569 - DNA, 25 bp, Homo sapien
gccagcggtacattatccggtcccg

SEQ ID NO: 6054570 - DNA, 25 bp, Homo sapien
gacggaggatgttttccgctcagca

SEQ ID NO: 6054571 - DNA, 25 bp, Homo sapien
cgctaagcatttgttccggaaaagc

SEQ ID NO: 6054572 - DNA, 25 bp, Homo sapien
agagaggatgtacaataagcgggcc

SEQ ID NO: 6054573 - DNA, 25 bp, Homo sapien
ggcttcggttcaattcgctgaataa

SEQ ID NO: 6054574 - DNA, 25 bp, Homo sapien
cggtgatcagctgatccgcttttgg

SEQ ID NO: 6054575 - DNA, 25 bp, Homo sapien
attcgctgaataaacatgttagtgg

SEQ ID NO: 6054576 - DNA, 25 bp, Homo sapien
aaacagaatgagacgcggcttcggt

SEQ ID NO: 6054577 - DNA, 25 bp, Homo sapien
tacacttaccgcaatttcctcggga

SEQ ID NO: 6054578 - DNA, 25 bp, Homo sapien
tgatccgcttttggaaaaagagagg

SEQ ID NO: 6054579 - DNA, 25 bp, Homo sapien
cgcaccgattttcagcccgaccgga

SEQ ID NO: 6054580 - DNA, 25 bp, Homo sapien
aaatgaagcgttgaaacagtacgtt

SEQ ID NO: 6054581 - DNA, 25 bp, Homo sapien
gaaattcgctaagcatttgttccgg

SEQ ID NO: 6054582 - DNA, 25 bp, Homo sapien
cagttcccaaaatgtccgttctccg

SEQ ID NO: 6054583 - DNA, 25 bp, Homo sapien
agcgttgaaacagtacgttgaatat

SEQ ID NO: 6054584 - DNA, 25 bp, Homo sapien
gacgcggcttcggttcaattcgctg

SEQ ID NO: 6054585 - DNA, 25 bp, Homo sapien
ggaaaaagagaggatgtacaataag

SEQ ID NO: 6054586 - DNA, 25 bp, Homo sapien
tcagaaataaataatgggaggattc

SEQ ID NO: 6054587 - DNA, 25 bp, Homo sapien
tgcaactacacttaccgcaatttcc

SEQ ID NO: 6054588 - DNA, 25 bp, Homo sapien
tgccgaacccaacagtccaatataa

SEQ ID NO: 6054589 - DNA, 25 bp, Homo sapien
gtccgttctccgtcagaaataaata

SEQ ID NO: 6054590 - DNA, 25 bp, Homo sapien
gcggtttgccgaacccaacagtcca

SEQ ID NO: 6054591 - DNA, 25 bp, Homo sapien
gatcgtttgatcgtgctgataatga

SEQ ID NO: 6054592 - DNA, 25 bp, Homo sapien
agatggtaattgtaatcaaagcagt

SEQ ID NO: 6054593 - DNA, 25 bp, Homo sapien
aaattcctctacttcacgtgtttca

SEQ ID NO: 6054594 - DNA, 25 bp, Homo sapien
cgcgatcaaagcaagtgttgccata

SEQ ID NO: 6054595 - DNA, 25 bp, Homo sapien
tatcataggcttcttcacgagtcag

SEQ ID NO: 6054596 - DNA, 25 bp, Homo sapien
atgttgcgcttcatgttttccggga

SEQ ID NO: 6054597 - DNA, 25 bp, Homo sapien
cttcacgagtcaggcctgtgtcaat

SEQ ID NO: 6054598 - DNA, 25 bp, Homo sapien
ctcgatgcttgtcgcgatcaaagca

SEQ ID NO: 6054599 - DNA, 25 bp, Homo sapien
gtagccgcggatcacgcgcgccatg

SEQ ID NO: 6054600 - DNA, 25 bp, Homo sapien
gaagaataattcgttctgctgaaga

SEQ ID NO: 6054601 - DNA, 25 bp, Homo sapien
caaagcaaggagcacacgctgagaa

SEQ ID NO: 6054602 - DNA, 25 bp, Homo sapien
ctctacttcacgtgtttcactcttt

SEQ ID NO: 6054603 - DNA, 25 bp, Homo sapien
ttcacgatgttggagaagcggttca

SEQ ID NO: 6054604 - DNA, 25 bp, Homo sapien
tgcggcattgcagatgaaccctttt

SEQ ID NO: 6054605 - DNA, 25 bp, Homo sapien
ggttcagcatgtagttcagcgcaat

SEQ ID NO: 6054606 - DNA, 25 bp, Homo sapien
taatggaacattttcgtaagctgtc

SEQ ID NO: 6054607 - DNA, 25 bp, Homo sapien
tccgcggatttccacagcgaatttc

SEQ ID NO: 6054608 - DNA, 25 bp, Homo sapien
gagagtgcggtccatgttgcgcttc

SEQ ID NO: 6054609 - DNA, 25 bp, Homo sapien
gtcaatcaaagcaaggagcacacgc

SEQ ID NO: 6054610 - DNA, 25 bp, Homo sapien
ctgtcatgttttcagagccaatcgg

SEQ ID NO: 6054611 - DNA, 25 bp, Homo sapien
gttctgctgaagaatgagaaatatc

SEQ ID NO: 6054612 - DNA, 25 bp, Homo sapien
tcggctgaactgtatcataggcttc

SEQ ID NO: 6054613 - DNA, 25 bp, Homo sapien
tgccctttcgcgaaaaattcctcta

SEQ ID NO: 6054614 - DNA, 25 bp, Homo sapien
atgttggagaagcggttcagcatgt

SEQ ID NO: 6054615 - DNA, 25 bp, Homo sapien
agctgtcatcatgtagccgcggatc

SEQ ID NO: 6054616 - DNA, 25 bp, Homo sapien
taatcaaagcagtcagcaatttttt

SEQ ID NO: 6054617 - DNA, 25 bp, Homo sapien
aacatttttcagatggtaattgtaa

SEQ ID NO: 6054618 - DNA, 25 bp, Homo sapien
ttgctttcggctgaactgtatcata

SEQ ID NO: 6054619 - DNA, 25 bp, Homo sapien
gcgcaattgtcgcatccggaagaat

SEQ ID NO: 6054620 - DNA, 25 bp, Homo sapien
aatgagaaatatcgcgctcatgcca

SEQ ID NO: 6054621 - DNA, 25 bp, Homo sapien
attgcagatgaacccttttgccctt

SEQ ID NO: 6054622 - DNA, 25 bp, Homo sapien
ctgagaatagataaggccgagagtg

SEQ ID NO: 6054623 - DNA, 25 bp, Homo sapien
aaggagcacacgctgagaatagata

SEQ ID NO: 6054624 - DNA, 25 bp, Homo sapien
ttcacgtgtttcactcttttgcagt

SEQ ID NO: 6054625 - DNA, 25 bp, Homo sapien
aagttcttcacgatgttggagaagc

SEQ ID NO: 6054626 - DNA, 25 bp, Homo sapien
cgcgaaaaattcctctacttcacgt

SEQ ID NO: 6054627 - DNA, 25 bp, Homo sapien
aatatcgcgctcatgccataatgga

SEQ ID NO: 6054628 - DNA, 25 bp, Homo sapien
gaactgtatcataggcttcttcacg

SEQ ID NO: 6054629 - DNA, 25 bp, Homo sapien
gcttgtcgcgatcaaagcaagtgtt

SEQ ID NO: 6054630 - DNA, 25 bp, Homo sapien
cgcttcatgttttccgggaagaccg

SEQ ID NO: 6054631 - DNA, 25 bp, Homo sapien
ccacgcttccattgctttcggctga

SEQ ID NO: 6054632 - DNA, 25 bp, Homo sapien
cttccattgctttcggctgaactgt

SEQ ID NO: 6054633 - DNA, 25 bp, Homo sapien
catcatgtagccgcggatcacgcgc

SEQ ID NO: 6054634 - DNA, 25 bp, Homo sapien
tgttttcagagccaatcggatttcg

SEQ ID NO: 6054635 - DNA, 25 bp, Homo sapien
ttccacaagctcgcggaacggcact

SEQ ID NO: 6054636 - DNA, 25 bp, Homo sapien
aagcagtcagcaattttttctggag

SEQ ID NO: 6054637 - DNA, 25 bp, Homo sapien
cacacgctgagaatagataaggccg

SEQ ID NO: 6054638 - DNA, 25 bp, Homo sapien
acttgtttttcccacgcttccattg

SEQ ID NO: 6054639 - DNA, 25 bp, Homo sapien
cgtgattttctcttccgcttccaca

SEQ ID NO: 6054640 - DNA, 25 bp, Homo sapien
gatgaacccttttgccctttcgcga

SEQ ID NO: 6054641 - DNA, 25 bp, Homo sapien
tttctcttccgcttccacaagctcg

SEQ ID NO: 6054642 - DNA, 25 bp, Homo sapien
taattgtaatcaaagcagtcagcaa

SEQ ID NO: 6054643 - DNA, 25 bp, Homo sapien
gatcacgcgcgccatgcctgtcatg

SEQ ID NO: 6054644 - DNA, 25 bp, Homo sapien
ttctggagaaagacgtgacgtgatt

SEQ ID NO: 6054645 - DNA, 25 bp, Homo sapien
ctgaagaatgagaaatatcgcgctc

SEQ ID NO: 6054646 - DNA, 25 bp, Homo sapien
cgcgcgccatgcctgtcatgttttc

SEQ ID NO: 6054647 - DNA, 25 bp, Homo sapien
acgtgacgtgattttctcttccgct

SEQ ID NO: 6054648 - DNA, 25 bp, Homo sapien
atagataaggccgagagtgcggtcc

SEQ ID NO: 6054649 - DNA, 25 bp, Homo sapien
taattcgttctgctgaagaatgaga

SEQ ID NO: 6054650 - DNA, 25 bp, Homo sapien
cgtttatgcggcattgcagatgaac

SEQ ID NO: 6054651 - DNA, 25 bp, Homo sapien
gaatttctcgatgcttgtcgcgatc

SEQ ID NO: 6054652 - DNA, 25 bp, Homo sapien
aggcttcttcacgagtcaggcctgt

SEQ ID NO: 6054653 - DNA, 25 bp, Homo sapien
ttttcccacgcttccattgctttcg

SEQ ID NO: 6054654 - DNA, 25 bp, Homo sapien
cacagcgaatttctcgatgcttgtc

SEQ ID NO: 6054655 - DNA, 25 bp, Homo sapien
gcatgtagttcagcgcaattgtcgc

SEQ ID NO: 6054656 - DNA, 25 bp, Homo sapien
atgccataatggaacattttcgtaa

SEQ ID NO: 6054657 - DNA, 25 bp, Homo sapien
agtcaggcctgtgtcaatcaaagca

SEQ ID NO: 6054658 - DNA, 25 bp, Homo sapien
ttcgtaagctgtcatcatgtagccg

SEQ ID NO: 6054659 - DNA, 25 bp, Homo sapien
actcttttgcagtccgcggatttcc

SEQ ID NO: 6054660 - DNA, 25 bp, Homo sapien
attttttctggagaaagacgtgacg

SEQ ID NO: 6054661 - DNA, 25 bp, Homo sapien
gaagaccgttaagttcttcacgatg

SEQ ID NO: 6054662 - DNA, 25 bp, Homo sapien
tcagcaattttttctggagaaagac

SEQ ID NO: 6054663 - DNA, 25 bp, Homo sapien
gcggtccatgttgcgcttcatgttt

SEQ ID NO: 6054664 - DNA, 25 bp, Homo sapien
ccatgcctgtcatgttttcagagcc

SEQ ID NO: 6054665 - DNA, 25 bp, Homo sapien
tgtttcactcttttgcagtccgcgg

SEQ ID NO: 6054666 - DNA, 25 bp, Homo sapien
ggatttcgtttatgcggcattgcag

SEQ ID NO: 6054667 - DNA, 25 bp, Homo sapien
gatttccacagcgaatttctcgatg

SEQ ID NO: 6054668 - DNA, 25 bp, Homo sapien
gcctgtgtcaatcaaagcaaggagc

SEQ ID NO: 6054669 - DNA, 25 bp, Homo sapien
cagagccaatcggatttcgtttatg

SEQ ID NO: 6054670 - DNA, 25 bp, Homo sapien
catccggaagaataattcgttctgc

SEQ ID NO: 6054671 - DNA, 25 bp, Homo sapien
agttcagcgcaattgtcgcatccgg

SEQ ID NO: 6054672 - DNA, 25 bp, Homo sapien
accgttaagttcttcacgatgttgg

SEQ ID NO: 6054673 - DNA, 25 bp, Homo sapien
tttttcagatggtaattgtaatcaa

SEQ ID NO: 6054674 - DNA, 25 bp, Homo sapien
ttgcagtccgcggatttccacagcg

SEQ ID NO: 6054675 - DNA, 25 bp, Homo sapien
ttccgcttccacaagctcgcggaac

SEQ ID NO: 6054676 - DNA, 25 bp, Homo sapien
aacattttcgtaagctgtcatcatg

SEQ ID NO: 6054677 - DNA, 25 bp, Homo sapien
aagctcgcggaacggcacttgtttt

SEQ ID NO: 6054678 - DNA, 25 bp, Homo sapien
gcgctcatgccataatggaacattt

SEQ ID NO: 6054679 - DNA, 25 bp, Homo sapien
ttgtcgcatccggaagaataattcg

SEQ ID NO: 6054680 - DNA, 25 bp, Homo sapien
taaggccgagagtgcggtccatgtt

SEQ ID NO: 6054681 - DNA, 25 bp, Homo sapien
ccaatcggatttcgtttatgcggca

SEQ ID NO: 6054682 - DNA, 25 bp, Homo sapien
gagaagcggttcagcatgtagttca

SEQ ID NO: 6054683 - DNA, 25 bp, Homo sapien
agaaagacgtgacgtgattttctct

SEQ ID NO: 6054684 - DNA, 25 bp, Homo sapien
aaaatggcttcaggctttactccat

SEQ ID NO: 6054685 - DNA, 25 bp, Homo sapien
tccatccaattttcttaataaatgt

SEQ ID NO: 6054686 - DNA, 25 bp, Homo sapien
acgtacgcgcatacaaccgtcattg

SEQ ID NO: 6054687 - DNA, 25 bp, Homo sapien
gttttgtaaaggttctgagtgcaga

SEQ ID NO: 6054688 - DNA, 25 bp, Homo sapien
tttgtcgacgtacgcgcatacaacc

SEQ ID NO: 6054689 - DNA, 25 bp, Homo sapien
aagctttcattttcccttggctcat

SEQ ID NO: 6054690 - DNA, 25 bp, Homo sapien
ttgaggatcagcttggcggccgctt

SEQ ID NO: 6054691 - DNA, 25 bp, Homo sapien
tccatttccattaaaaatgaatatc

SEQ ID NO: 6054692 - DNA, 25 bp, Homo sapien
gctttactccatccaattttcttaa

SEQ ID NO: 6054693 - DNA, 25 bp, Homo sapien
tcccttggctcatgcctttttcctg

SEQ ID NO: 6054694 - DNA, 25 bp, Homo sapien
tccttaacaccgagttccttcatta

SEQ ID NO: 6054695 - DNA, 25 bp, Homo sapien
gacagccaggtgaataccttcagct

SEQ ID NO: 6054696 - DNA, 25 bp, Homo sapien
tcttgcaatgattgaagcagcggcg

SEQ ID NO: 6054697 - DNA, 25 bp, Homo sapien
taggtccgctccttcacaatgtctc

SEQ ID NO: 6054698 - DNA, 25 bp, Homo sapien
gcgcatacaaccgtcattgggccaa

SEQ ID NO: 6054699 - DNA, 25 bp, Homo sapien
tctcgatgatttgcggatcttttaa

SEQ ID NO: 6054700 - DNA, 25 bp, Homo sapien
acttttcattctttaacaccagcag

SEQ ID NO: 6054701 - DNA, 25 bp, Homo sapien
cattctttaacaccagcaggctgta

SEQ ID NO: 6054702 - DNA, 25 bp, Homo sapien
gccgcgcgtgatagtttatccattt

SEQ ID NO: 6054703 - DNA, 25 bp, Homo sapien
ttccattaaaaatgaatatcttgca

SEQ ID NO: 6054704 - DNA, 25 bp, Homo sapien
ggtttcgggcaatctcgatgatttg

SEQ ID NO: 6054705 - DNA, 25 bp, Homo sapien
gccccttttggaagcgtcattcctg

SEQ ID NO: 6054706 - DNA, 25 bp, Homo sapien
gcatgctgttatacttttcattctt

SEQ ID NO: 6054707 - DNA, 25 bp, Homo sapien
taaaggttctgagtgcagatgcccc

SEQ ID NO: 6054708 - DNA, 25 bp, Homo sapien
caggtgaataccttcagcttttgtg

SEQ ID NO: 6054709 - DNA, 25 bp, Homo sapien
ttccttcattaaaggaagcatggtt

SEQ ID NO: 6054710 - DNA, 25 bp, Homo sapien
gcggatcttttaaatctttagaatc

SEQ ID NO: 6054711 - DNA, 25 bp, Homo sapien
tcattgggccaaagtaatctccggt

SEQ ID NO: 6054712 - DNA, 25 bp, Homo sapien
ttgcgtattggcgaaatggagtttt

SEQ ID NO: 6054713 - DNA, 25 bp, Homo sapien
attggtcaatcaaaatggcttcagg

SEQ ID NO: 6054714 - DNA, 25 bp, Homo sapien
ttaatcaggtttcgggcaatctcga

SEQ ID NO: 6054715 - DNA, 25 bp, Homo sapien
tcattttcccttggctcatgccttt

SEQ ID NO: 6054716 - DNA, 25 bp, Homo sapien
taaaaatgaatatcttgcaatgatt

SEQ ID NO: 6054717 - DNA, 25 bp, Homo sapien
ctctgccctttaaatgattgaagta

SEQ ID NO: 6054718 - DNA, 25 bp, Homo sapien
catcgacgtgcggaccggccccttt

SEQ ID NO: 6054719 - DNA, 25 bp, Homo sapien
ataaatgtgtgatcgcctgattgtg

SEQ ID NO: 6054720 - DNA, 25 bp, Homo sapien
cgctccttcacaatgtctctgccct

SEQ ID NO: 6054721 - DNA, 25 bp, Homo sapien
aatggagttttgtaaaggttctgag

SEQ ID NO: 6054722 - DNA, 25 bp, Homo sapien
aatgattgaagcagcggcgacagcc

SEQ ID NO: 6054723 - DNA, 25 bp, Homo sapien
cattaaaggaagcatggttttgtcg

SEQ ID NO: 6054724 - DNA, 25 bp, Homo sapien
aataccttcagcttttgtgctaaaa

SEQ ID NO: 6054725 - DNA, 25 bp, Homo sapien
gctaaaataggtccgctccttcaca

SEQ ID NO: 6054726 - DNA, 25 bp, Homo sapien
cagcaggctgtacggaatggtttta

SEQ ID NO: 6054727 - DNA, 25 bp, Homo sapien
ttcctgccgcgcgtgatagtttatc

SEQ ID NO: 6054728 - DNA, 25 bp, Homo sapien
tcgcctgattgtgcagcaaagcttt

SEQ ID NO: 6054729 - DNA, 25 bp, Homo sapien
ccgagttccttcattaaaggaagca

SEQ ID NO: 6054730 - DNA, 25 bp, Homo sapien
caattttcttaataaatgtgtgatc

SEQ ID NO: 6054731 - DNA, 25 bp, Homo sapien
ggctcatgcctttttcctgcatgct

SEQ ID NO: 6054732 - DNA, 25 bp, Homo sapien
gggcaatctcgatgatttgcggatc

SEQ ID NO: 6054733 - DNA, 25 bp, Homo sapien
cttcacaatgtctctgccctttaaa

SEQ ID NO: 6054734 - DNA, 25 bp, Homo sapien
tttcctgcatgctgttatacttttc

SEQ ID NO: 6054735 - DNA, 25 bp, Homo sapien
agcgtcattcctgccgcgcgtgata

SEQ ID NO: 6054736 - DNA, 25 bp, Homo sapien
cctttaaatgattgaagtagacgcc

SEQ ID NO: 6054737 - DNA, 25 bp, Homo sapien
cagcgaattggtcaatcaaaatggc

SEQ ID NO: 6054738 - DNA, 25 bp, Homo sapien
ctggctcagcgaattggtcaatcaa

SEQ ID NO: 6054739 - DNA, 25 bp, Homo sapien
gcagcaaagctttcattttcccttg

SEQ ID NO: 6054740 - DNA, 25 bp, Homo sapien
tttggaagcgtcattcctgccgcgc

SEQ ID NO: 6054741 - DNA, 25 bp, Homo sapien
gatgccccttttttgaggatcagct

SEQ ID NO: 6054742 - DNA, 25 bp, Homo sapien
cgtgatagtttatccatttccatta

SEQ ID NO: 6054743 - DNA, 25 bp, Homo sapien
ttttgtgctaaaataggtccgctcc

SEQ ID NO: 6054744 - DNA, 25 bp, Homo sapien
atctttagaatccttaacaccgagt

SEQ ID NO: 6054745 - DNA, 25 bp, Homo sapien
aggaagcatggttttgtcgacgtac

SEQ ID NO: 6054746 - DNA, 25 bp, Homo sapien
ttaacaccagcaggctgtacggaat

SEQ ID NO: 6054747 - DNA, 25 bp, Homo sapien
agacgcctggctcagcgaattggtc

SEQ ID NO: 6054748 - DNA, 25 bp, Homo sapien
aatgtctctgccctttaaatgattg

SEQ ID NO: 6054749 - DNA, 25 bp, Homo sapien
catggttttgtcgacgtacgcgcat

SEQ ID NO: 6054750 - DNA, 25 bp, Homo sapien
attggcgaaatggagttttgtaaag

SEQ ID NO: 6054751 - DNA, 25 bp, Homo sapien
tgcctttttcctgcatgctgttata

SEQ ID NO: 6054752 - DNA, 25 bp, Homo sapien
gtgtgatcgcctgattgtgcagcaa

SEQ ID NO: 6054753 - DNA, 25 bp, Homo sapien
gtgcagatgccccttttttgaggat

SEQ ID NO: 6054754 - DNA, 25 bp, Homo sapien
caatcaaaatggcttcaggctttac

SEQ ID NO: 6054755 - DNA, 25 bp, Homo sapien
tcttaataaatgtgtgatcgcctga

SEQ ID NO: 6054756 - DNA, 25 bp, Homo sapien
agtttatccatttccattaaaaatg

SEQ ID NO: 6054757 - DNA, 25 bp, Homo sapien
cttcaggctttactccatccaattt

SEQ ID NO: 6054758 - DNA, 25 bp, Homo sapien
aatgattgaagtagacgcctggctc

SEQ ID NO: 6054759 - DNA, 25 bp, Homo sapien
ttctgagtgcagatgcccctttttt

SEQ ID NO: 6054760 - DNA, 25 bp, Homo sapien
tgatttgcggatcttttaaatcttt

SEQ ID NO: 6054761 - DNA, 25 bp, Homo sapien
ttggcggccgcttcatcgacgtgcg

SEQ ID NO: 6054762 - DNA, 25 bp, Homo sapien
ctgtacggaatggttttaatcaggt

SEQ ID NO: 6054763 - DNA, 25 bp, Homo sapien
tgaagtagacgcctggctcagcgaa

SEQ ID NO: 6054764 - DNA, 25 bp, Homo sapien
tgaagcagcggcgacagccaggtga

SEQ ID NO: 6054765 - DNA, 25 bp, Homo sapien
agcggcgacagccaggtgaatacct

SEQ ID NO: 6054766 - DNA, 25 bp, Homo sapien
atcagcttggcggccgcttcatcga

SEQ ID NO: 6054767 - DNA, 25 bp, Homo sapien
tgaatatcttgcaatgattgaagca

SEQ ID NO: 6054768 - DNA, 25 bp, Homo sapien
tgttatacttttcattctttaacac

SEQ ID NO: 6054769 - DNA, 25 bp, Homo sapien
ttcagcttttgtgctaaaataggtc

SEQ ID NO: 6054770 - DNA, 25 bp, Homo sapien
acaaccgtcattgggccaaagtaat

SEQ ID NO: 6054771 - DNA, 25 bp, Homo sapien
gattgtgcagcaaagctttcatttt

SEQ ID NO: 6054772 - DNA, 25 bp, Homo sapien
gccgcttcatcgacgtgcggaccgg

SEQ ID NO: 6054773 - DNA, 25 bp, Homo sapien
ccttttttgaggatcagcttggcgg

SEQ ID NO: 6054774 - DNA, 25 bp, Homo sapien
caacttggcctacacgagtgttctc

SEQ ID NO: 6054775 - DNA, 25 bp, Homo sapien
cagttgtaagaacgaacagaaagat

SEQ ID NO: 6054776 - DNA, 25 bp, Homo sapien
cttcaattgtcatttcaagaacttt

SEQ ID NO: 6054777 - DNA, 25 bp, Homo sapien
ttcatcatatcttcttccgtcttgt

SEQ ID NO: 6054778 - DNA, 25 bp, Homo sapien
gataagatacacgagaaactggcgt

SEQ ID NO: 6054779 - DNA, 25 bp, Homo sapien
ctttttcaaccatgatttcagcatg

SEQ ID NO: 6054780 - DNA, 25 bp, Homo sapien
tctcaccaagagtcgcgatatgaag

SEQ ID NO: 6054781 - DNA, 25 bp, Homo sapien
ctggcgtatagatagaatcgatcgg

SEQ ID NO: 6054782 - DNA, 25 bp, Homo sapien
agtttgcaacttggcctacacgagt

SEQ ID NO: 6054783 - DNA, 25 bp, Homo sapien
ccaattcttcaattgtcatttcaag

SEQ ID NO: 6054784 - DNA, 25 bp, Homo sapien
tatgaagatcaggatttaagatctc

SEQ ID NO: 6054785 - DNA, 25 bp, Homo sapien
ttgtcatttcaagaactttctcttt

SEQ ID NO: 6054786 - DNA, 25 bp, Homo sapien
tctcttgtttgcgtcagcaggcgta

SEQ ID NO: 6054787 - DNA, 25 bp, Homo sapien
tcgcgatatgaagatcaggatttaa

SEQ ID NO: 6054788 - DNA, 25 bp, Homo sapien
ttcgcaagctcttgaaccgtgttaa

SEQ ID NO: 6054789 - DNA, 25 bp, Homo sapien
caattgcttctttcggtccagtgct

SEQ ID NO: 6054790 - DNA, 25 bp, Homo sapien
caacgaatatattaaggtgttcagt

SEQ ID NO: 6054791 - DNA, 25 bp, Homo sapien
gtcttgttcgcaagctcttgaaccg

SEQ ID NO: 6054792 - DNA, 25 bp, Homo sapien
tagaatcgatcggaatcacgccgat

SEQ ID NO: 6054793 - DNA, 25 bp, Homo sapien
tcgcattctcaccaagagtcgcgat

SEQ ID NO: 6054794 - DNA, 25 bp, Homo sapien
cgatcggaatcacgccgattggctg

SEQ ID NO: 6054795 - DNA, 25 bp, Homo sapien
tttaagcagttgtaagaacgaacag

SEQ ID NO: 6054796 - DNA, 25 bp, Homo sapien
tatagatagaatcgatcggaatcac

SEQ ID NO: 6054797 - DNA, 25 bp, Homo sapien
gtttgcgtcagcaggcgtataccca

SEQ ID NO: 6054798 - DNA, 25 bp, Homo sapien
taaggtgttcagttaaaatctttga

SEQ ID NO: 6054799 - DNA, 25 bp, Homo sapien
tcggtccagtgcttccatcagtcca

SEQ ID NO: 6054800 - DNA, 25 bp, Homo sapien
gtttcgctttcacttcttcaagtga

SEQ ID NO: 6054801 - DNA, 25 bp, Homo sapien
ttctagtttcgctttcacttcttca

SEQ ID NO: 6054802 - DNA, 25 bp, Homo sapien
caagcgcaattgcttctttcggtcc

SEQ ID NO: 6054803 - DNA, 25 bp, Homo sapien
gagcagtaaggcgaactcggaaact

SEQ ID NO: 6054804 - DNA, 25 bp, Homo sapien
ctacctgataagatacacgagaaac

SEQ ID NO: 6054805 - DNA, 25 bp, Homo sapien
ttccatcagtccaaacatcaagtgt

SEQ ID NO: 6054806 - DNA, 25 bp, Homo sapien
tcgtgtgtaatatcagctgccgtta

SEQ ID NO: 6054807 - DNA, 25 bp, Homo sapien
cttcttcaagtgatttgcgtcctag

SEQ ID NO: 6054808 - DNA, 25 bp, Homo sapien
atcgtctctcttgtttgcgtcagca

SEQ ID NO: 6054809 - DNA, 25 bp, Homo sapien
cacgagtgttctctacctgataaga

SEQ ID NO: 6054810 - DNA, 25 bp, Homo sapien
cagcatgttgagcttcgtcagttaa

SEQ ID NO: 6054811 - DNA, 25 bp, Homo sapien
gccgattggctgatcgtctctcttg

SEQ ID NO: 6054812 - DNA, 25 bp, Homo sapien
caagtgatttgcgtcctagatttcg

SEQ ID NO: 6054813 - DNA, 25 bp, Homo sapien
tatcatagtttgcaacttggcctac

SEQ ID NO: 6054814 - DNA, 25 bp, Homo sapien
aaacatcaagtgtaagtttatcata

SEQ ID NO: 6054815 - DNA, 25 bp, Homo sapien
atacacgagaaactggcgtatagat

SEQ ID NO: 6054816 - DNA, 25 bp, Homo sapien
tttcaagaactttctctttttgatc

SEQ ID NO: 6054817 - DNA, 25 bp, Homo sapien
atatcttcttccgtcttgttcgcaa

SEQ ID NO: 6054818 - DNA, 25 bp, Homo sapien
cagtgcttccatcagtccaaacatc

SEQ ID NO: 6054819 - DNA, 25 bp, Homo sapien
gtcagcaggcgtatacccacgtcct

SEQ ID NO: 6054820 - DNA, 25 bp, Homo sapien
cagttaaaccaacgaatatattaag

SEQ ID NO: 6054821 - DNA, 25 bp, Homo sapien
ttgaaccaagcgcaattgcttcttt

SEQ ID NO: 6054822 - DNA, 25 bp, Homo sapien
ggcctacacgagtgttctctacctg

SEQ ID NO: 6054823 - DNA, 25 bp, Homo sapien
cttcgtcagttaaaccaacgaatat

SEQ ID NO: 6054824 - DNA, 25 bp, Homo sapien
cgaacagaaagatccaattcttcaa

SEQ ID NO: 6054825 - DNA, 25 bp, Homo sapien
gaaagatccaattcttcaattgtca

SEQ ID NO: 6054826 - DNA, 25 bp, Homo sapien
gtaatatcagctgccgttacagttc

SEQ ID NO: 6054827 - DNA, 25 bp, Homo sapien
ctttcacttcttcaagtgatttgcg

SEQ ID NO: 6054828 - DNA, 25 bp, Homo sapien
cacgtcctctttgagcagtaaggcg

SEQ ID NO: 6054829 - DNA, 25 bp, Homo sapien
gaactcggaaactcgcattctcacc

SEQ ID NO: 6054830 - DNA, 25 bp, Homo sapien
atacccgcacgctttaagcagttgt

SEQ ID NO: 6054831 - DNA, 25 bp, Homo sapien
caggcgtatacccacgtcctctttg

SEQ ID NO: 6054832 - DNA, 25 bp, Homo sapien
agctcttgaaccgtgttaatacccg

SEQ ID NO: 6054833 - DNA, 25 bp, Homo sapien
gaactttctctttttgatcttcttc

SEQ ID NO: 6054834 - DNA, 25 bp, Homo sapien
caaccatgatttcagcatgttgagc

SEQ ID NO: 6054835 - DNA, 25 bp, Homo sapien
caagagtcgcgatatgaagatcagg

SEQ ID NO: 6054836 - DNA, 25 bp, Homo sapien
aaatctttgaaccaagcgcaattgc

SEQ ID NO: 6054837 - DNA, 25 bp, Homo sapien
ggatttaagatctctacatcactat

SEQ ID NO: 6054838 - DNA, 25 bp, Homo sapien
gtcctagatttcgaactttcatcat

SEQ ID NO: 6054839 - DNA, 25 bp, Homo sapien
aatcacgccgattggctgatcgtct

SEQ ID NO: 6054840 - DNA, 25 bp, Homo sapien
caagtgtaagtttatcatagtttgc

SEQ ID NO: 6054841 - DNA, 25 bp, Homo sapien
cttctttcggtccagtgcttccatc

SEQ ID NO: 6054842 - DNA, 25 bp, Homo sapien
gcacgctttaagcagttgtaagaac

SEQ ID NO: 6054843 - DNA, 25 bp, Homo sapien
tggctgatcgtctctcttgtttgcg

SEQ ID NO: 6054844 - DNA, 25 bp, Homo sapien
aagatctctacatcactatcgtgtg

SEQ ID NO: 6054845 - DNA, 25 bp, Homo sapien
agatcaggatttaagatctctacat

SEQ ID NO: 6054846 - DNA, 25 bp, Homo sapien
tatattaaggtgttcagttaaaatc

SEQ ID NO: 6054847 - DNA, 25 bp, Homo sapien
tgttctctacctgataagatacacg

SEQ ID NO: 6054848 - DNA, 25 bp, Homo sapien
gagaaactggcgtatagatagaatc

SEQ ID NO: 6054849 - DNA, 25 bp, Homo sapien
atttgcgtcctagatttcgaacttt

SEQ ID NO: 6054850 - DNA, 25 bp, Homo sapien
ggaaactcgcattctcaccaagagt

SEQ ID NO: 6054851 - DNA, 25 bp, Homo sapien
cgaactttcatcatatcttcttccg

SEQ ID NO: 6054852 - DNA, 25 bp, Homo sapien
tcactatcgtgtgtaatatcagctg

SEQ ID NO: 6054853 - DNA, 25 bp, Homo sapien
taagtttatcatagtttgcaacttg

SEQ ID NO: 6054854 - DNA, 25 bp, Homo sapien
taagaacgaacagaaagatccaatt

SEQ ID NO: 6054855 - DNA, 25 bp, Homo sapien
gtaaggcgaactcggaaactcgcat

SEQ ID NO: 6054856 - DNA, 25 bp, Homo sapien
gttaaaatctttgaaccaagcgcaa

SEQ ID NO: 6054857 - DNA, 25 bp, Homo sapien
tgatttcagcatgttgagcttcgtc

SEQ ID NO: 6054858 - DNA, 25 bp, Homo sapien
gttgagcttcgtcagttaaaccaac

SEQ ID NO: 6054859 - DNA, 25 bp, Homo sapien
tatacccacgtcctctttgagcagt

SEQ ID NO: 6054860 - DNA, 25 bp, Homo sapien
cagtccaaacatcaagtgtaagttt

SEQ ID NO: 6054861 - DNA, 25 bp, Homo sapien
cttcttctttttcaaccatgatttc

SEQ ID NO: 6054862 - DNA, 25 bp, Homo sapien
gatttcgaactttcatcatatcttc

SEQ ID NO: 6054863 - DNA, 25 bp, Homo sapien
tcttccgtcttgttcgcaagctctt

SEQ ID NO: 6054864 - DNA, 25 bp, Homo sapien
ttgatcttcttctttttcaaccatg

SEQ ID NO: 6054865 - DNA, 25 bp, Homo sapien
ctctttgagcagtaaggcgaactcg

SEQ ID NO: 6054866 - DNA, 25 bp, Homo sapien
tgaaccgtgttaatacccgcacgct

SEQ ID NO: 6054867 - DNA, 25 bp, Homo sapien
tctacatcactatcgtgtgtaatat

SEQ ID NO: 6054868 - DNA, 25 bp, Homo sapien
tgttaatacccgcacgctttaagca

SEQ ID NO: 6054869 - DNA, 25 bp, Homo sapien
agcatgcatgagctgactgcgatga

SEQ ID NO: 6054870 - DNA, 25 bp, Homo sapien
taggtcgtcgatccgaacggagtgt

SEQ ID NO: 6054871 - DNA, 25 bp, Homo sapien
tttaatgtcatagtagacatcggtc

SEQ ID NO: 6054872 - DNA, 25 bp, Homo sapien
gcgatgacaatacaggtttttaatc

SEQ ID NO: 6054873 - DNA, 25 bp, Homo sapien
tgacaccggcgccgataaacccgac

SEQ ID NO: 6054874 - DNA, 25 bp, Homo sapien
gagatgatttgtgccggcagacgaa

SEQ ID NO: 6054875 - DNA, 25 bp, Homo sapien
ccgataaacccgacgccggagatga

SEQ ID NO: 6054876 - DNA, 25 bp, Homo sapien
gtcaggccggaaatgacatcattgc

SEQ ID NO: 6054877 - DNA, 25 bp, Homo sapien
ggctcccgtagcaagcccgagcccc

SEQ ID NO: 6054878 - DNA, 25 bp, Homo sapien
atccatcatgatgcggtagtattta

SEQ ID NO: 6054879 - DNA, 25 bp, Homo sapien
atcggtcgtgtatctgtttttatgg

SEQ ID NO: 6054880 - DNA, 25 bp, Homo sapien
acgccggagatgatttgtgccggca

SEQ ID NO: 6054881 - DNA, 25 bp, Homo sapien
ttcctgcaggcggtcggggccgatt

SEQ ID NO: 6054882 - DNA, 25 bp, Homo sapien
atgggagaaattccacactgatcag

SEQ ID NO: 6054883 - DNA, 25 bp, Homo sapien
ttctgatgcggatgtctttttcctg

SEQ ID NO: 6054884 - DNA, 25 bp, Homo sapien
gaaattccacactgatcaggatgaa

SEQ ID NO: 6054885 - DNA, 25 bp, Homo sapien
gtcatagtagacatcggtcgtgtat

SEQ ID NO: 6054886 - DNA, 25 bp, Homo sapien
atccttttcgcctaggtcgtcgatc

SEQ ID NO: 6054887 - DNA, 25 bp, Homo sapien
cgtgtatctgtttttatggacgcgg

SEQ ID NO: 6054888 - DNA, 25 bp, Homo sapien
ccggaaatgacatcattgctttttc

SEQ ID NO: 6054889 - DNA, 25 bp, Homo sapien
gacgcggaccttcacttccataatt

SEQ ID NO: 6054890 - DNA, 25 bp, Homo sapien
catttcttttaaaatctctgtcatt

SEQ ID NO: 6054891 - DNA, 25 bp, Homo sapien
tctgtttttatggacgcggaccttc

SEQ ID NO: 6054892 - DNA, 25 bp, Homo sapien
cagacgaagcggatccatcatgatg

SEQ ID NO: 6054893 - DNA, 25 bp, Homo sapien
caggcggtcggggccgatttttctg

SEQ ID NO: 6054894 - DNA, 25 bp, Homo sapien
tgcggatgtctttttcctgcaggcg

SEQ ID NO: 6054895 - DNA, 25 bp, Homo sapien
aagcggatccatcatgatgcggtag

SEQ ID NO: 6054896 - DNA, 25 bp, Homo sapien
ttaatactgacgatcgtcagcatgc

SEQ ID NO: 6054897 - DNA, 25 bp, Homo sapien
caggtttttaatccgagcggcttat

SEQ ID NO: 6054898 - DNA, 25 bp, Homo sapien
cacttccataattggaaaatccttt

SEQ ID NO: 6054899 - DNA, 25 bp, Homo sapien
tgatcaggatgaacagaagactggc

SEQ ID NO: 6054900 - DNA, 25 bp, Homo sapien
gtgacattctgatgcggatgtcttt

SEQ ID NO: 6054901 - DNA, 25 bp, Homo sapien
tgccggcagacgaagcggatccatc

SEQ ID NO: 6054902 - DNA, 25 bp, Homo sapien
ctttttcgcaggatgacaccggcgc

SEQ ID NO: 6054903 - DNA, 25 bp, Homo sapien
aaccggctcccgtagcaagcccgag

SEQ ID NO: 6054904 - DNA, 25 bp, Homo sapien
cgaacggagtgtgctttgatatctc

SEQ ID NO: 6054905 - DNA, 25 bp, Homo sapien
atcgtcagcatgcatgagctgactg

SEQ ID NO: 6054906 - DNA, 25 bp, Homo sapien
cgcaggatgacaccggcgccgataa

SEQ ID NO: 6054907 - DNA, 25 bp, Homo sapien
cgatttttctgaccacccatgggag

SEQ ID NO: 6054908 - DNA, 25 bp, Homo sapien
cgagcggcttattttttaattcgcg

SEQ ID NO: 6054909 - DNA, 25 bp, Homo sapien
atgacatcattgctttttcgcagga

SEQ ID NO: 6054910 - DNA, 25 bp, Homo sapien
cagatcatggccgatgtcgtcaggc

SEQ ID NO: 6054911 - DNA, 25 bp, Homo sapien
acagaagactggcaaacgcttcttt

SEQ ID NO: 6054912 - DNA, 25 bp, Homo sapien
taattcgcgttcaagcccgatgacc

SEQ ID NO: 6054913 - DNA, 25 bp, Homo sapien
tatctcttcttttcatttcttttaa

SEQ ID NO: 6054914 - DNA, 25 bp, Homo sapien
cataattggaaaatccttttcgcct

SEQ ID NO: 6054915 - DNA, 25 bp, Homo sapien
tcattgctttttcgcaggatgacac

SEQ ID NO: 6054916 - DNA, 25 bp, Homo sapien
ctgactgcgatgacaatacaggttt

SEQ ID NO: 6054917 - DNA, 25 bp, Homo sapien
caagcccgagccccgctgcccccca

SEQ ID NO: 6054918 - DNA, 25 bp, Homo sapien
ttcgcctaggtcgtcgatccgaacg

SEQ ID NO: 6054919 - DNA, 25 bp, Homo sapien
cgtagcaagcccgagccccgctgcc

SEQ ID NO: 6054920 - DNA, 25 bp, Homo sapien
gggaaatgatatgccgcattaatac

SEQ ID NO: 6054921 - DNA, 25 bp, Homo sapien
acaatacaggtttttaatccgagcg

SEQ ID NO: 6054922 - DNA, 25 bp, Homo sapien
gaccttcacttccataattggaaaa

SEQ ID NO: 6054923 - DNA, 25 bp, Homo sapien
ccccccagatcatggccgatgtcgt

SEQ ID NO: 6054924 - DNA, 25 bp, Homo sapien
atttgtgccggcagacgaagcggat

SEQ ID NO: 6054925 - DNA, 25 bp, Homo sapien
gctttgatatctcttcttttcattt

SEQ ID NO: 6054926 - DNA, 25 bp, Homo sapien
catgagctgactgcgatgacaatac

SEQ ID NO: 6054927 - DNA, 25 bp, Homo sapien
aatggctttaatgtcatagtagaca

SEQ ID NO: 6054928 - DNA, 25 bp, Homo sapien
atggccgatgtcgtcaggccggaaa

SEQ ID NO: 6054929 - DNA, 25 bp, Homo sapien
cgagccccgctgccccccagatcat

SEQ ID NO: 6054930 - DNA, 25 bp, Homo sapien
ccgctgccccccagatcatggccga

SEQ ID NO: 6054931 - DNA, 25 bp, Homo sapien
gactggcaaacgcttctttataaaa

SEQ ID NO: 6054932 - DNA, 25 bp, Homo sapien
agaaagtgacattctgatgcggatg

SEQ ID NO: 6054933 - DNA, 25 bp, Homo sapien
catgatgcggtagtatttagggaaa

SEQ ID NO: 6054934 - DNA, 25 bp, Homo sapien
gccgcattaatactgacgatcgtca

SEQ ID NO: 6054935 - DNA, 25 bp, Homo sapien
tcgatccgaacggagtgtgctttga

SEQ ID NO: 6054936 - DNA, 25 bp, Homo sapien
aacccgacgccggagatgatttgtg

SEQ ID NO: 6054937 - DNA, 25 bp, Homo sapien
ttttaaaatctctgtcattttgtct

SEQ ID NO: 6054938 - DNA, 25 bp, Homo sapien
ttctgaccacccatgggagaaattc

SEQ ID NO: 6054939 - DNA, 25 bp, Homo sapien
ctgacgatcgtcagcatgcatgagc

SEQ ID NO: 6054940 - DNA, 25 bp, Homo sapien
tgatatgccgcattaatactgacga

SEQ ID NO: 6054941 - DNA, 25 bp, Homo sapien
tgtcattttgtctttatcagaaagt

SEQ ID NO: 6054942 - DNA, 25 bp, Homo sapien
gtagacatcggtcgtgtatctgttt

SEQ ID NO: 6054943 - DNA, 25 bp, Homo sapien
tttatggacgcggaccttcacttcc

SEQ ID NO: 6054944 - DNA, 25 bp, Homo sapien
tatttagggaaatgatatgccgcat

SEQ ID NO: 6054945 - DNA, 25 bp, Homo sapien
cttttcatttcttttaaaatctctg

SEQ ID NO: 6054946 - DNA, 25 bp, Homo sapien
gggccgatttttctgaccacccatg

SEQ ID NO: 6054947 - DNA, 25 bp, Homo sapien
aatctctgtcattttgtctttatca

SEQ ID NO: 6054948 - DNA, 25 bp, Homo sapien
cggtagtatttagggaaatgatatg

SEQ ID NO: 6054949 - DNA, 25 bp, Homo sapien
tgtctttttcctgcaggcggtcggg

SEQ ID NO: 6054950 - DNA, 25 bp, Homo sapien
ccacactgatcaggatgaacagaag

SEQ ID NO: 6054951 - DNA, 25 bp, Homo sapien
ggatgaacagaagactggcaaacgc

SEQ ID NO: 6054952 - DNA, 25 bp, Homo sapien
ccacccatgggagaaattccacact

SEQ ID NO: 6054953 - DNA, 25 bp, Homo sapien
gatgtcgtcaggccggaaatgacat

SEQ ID NO: 6054954 - DNA, 25 bp, Homo sapien
gagtgtgctttgatatctcttcttt

SEQ ID NO: 6054955 - DNA, 25 bp, Homo sapien
cgagcagagaatttcctttttcagg

SEQ ID NO: 6054956 - DNA, 25 bp, Homo sapien
gatgaaaccgtctttgcgataaatg

SEQ ID NO: 6054957 - DNA, 25 bp, Homo sapien
tttcaagcagttctttaaacgataa

SEQ ID NO: 6054958 - DNA, 25 bp, Homo sapien
gtatacaggatagcggccaattctt

SEQ ID NO: 6054959 - DNA, 25 bp, Homo sapien
ctctcaatcgtttttcggcttacag

SEQ ID NO: 6054960 - DNA, 25 bp, Homo sapien
tagcttcattaaacgcgatcagtcc

SEQ ID NO: 6054961 - DNA, 25 bp, Homo sapien
catcgtctttttcatctatatatcg

SEQ ID NO: 6054962 - DNA, 25 bp, Homo sapien
ttgagctgcttttgaaaatagagga

SEQ ID NO: 6054963 - DNA, 25 bp, Homo sapien
tagaggatttcctcccgcctctgct

SEQ ID NO: 6054964 - DNA, 25 bp, Homo sapien
tatatcgtttacaaacggatgaaac

SEQ ID NO: 6054965 - DNA, 25 bp, Homo sapien
tgtttgaccggaagctgcttctttg

SEQ ID NO: 6054966 - DNA, 25 bp, Homo sapien
ttgccacctttatggcgttttgcct

SEQ ID NO: 6054967 - DNA, 25 bp, Homo sapien
catcaatggaaagctcggcttcaat

SEQ ID NO: 6054968 - DNA, 25 bp, Homo sapien
taatacacatcgcaataatatattt

SEQ ID NO: 6054969 - DNA, 25 bp, Homo sapien
aataaatataatcacccgtaatgat

SEQ ID NO: 6054970 - DNA, 25 bp, Homo sapien
aacgataaaccataatccttgagct

SEQ ID NO: 6054971 - DNA, 25 bp, Homo sapien
caatactgaactcatcgtctttttc

SEQ ID NO: 6054972 - DNA, 25 bp, Homo sapien
tcaagctgtttgaccggaagctgct

SEQ ID NO: 6054973 - DNA, 25 bp, Homo sapien
ataataagctcagcaaatgcgagca

SEQ ID NO: 6054974 - DNA, 25 bp, Homo sapien
gcgtcattgccacctttatggcgtt

SEQ ID NO: 6054975 - DNA, 25 bp, Homo sapien
tattttctgtttctctcaatcgttt

SEQ ID NO: 6054976 - DNA, 25 bp, Homo sapien
ggtattcatcaatggaaagctcggc

SEQ ID NO: 6054977 - DNA, 25 bp, Homo sapien
caatgacttttctttttataataag

SEQ ID NO: 6054978 - DNA, 25 bp, Homo sapien
ttgcatccgtgtgttttggagaatt

SEQ ID NO: 6054979 - DNA, 25 bp, Homo sapien
gcagttctttaaacgataaaccata

SEQ ID NO: 6054980 - DNA, 25 bp, Homo sapien
tcgtctccttcctgtaaatcgatat

SEQ ID NO: 6054981 - DNA, 25 bp, Homo sapien
acttttctttttataataagctcag

SEQ ID NO: 6054982 - DNA, 25 bp, Homo sapien
attcttcatgttcaacaagcgtcat

SEQ ID NO: 6054983 - DNA, 25 bp, Homo sapien
agctgcttctttgtatacaggatag

SEQ ID NO: 6054984 - DNA, 25 bp, Homo sapien
ttctatagcttcattaaacgcgatc

SEQ ID NO: 6054985 - DNA, 25 bp, Homo sapien
ctttgtgatgactcctgatcgtctc

SEQ ID NO: 6054986 - DNA, 25 bp, Homo sapien
ctctgctcctgttcaatctgacggc

SEQ ID NO: 6054987 - DNA, 25 bp, Homo sapien
atcgtttttcggcttacagagacaa

SEQ ID NO: 6054988 - DNA, 25 bp, Homo sapien
gagaatttcctttttcaggtgaata

SEQ ID NO: 6054989 - DNA, 25 bp, Homo sapien
ataatatattttctgtttctctcaa

SEQ ID NO: 6054990 - DNA, 25 bp, Homo sapien
agctgttcaagctgtttgaccggaa

SEQ ID NO: 6054991 - DNA, 25 bp, Homo sapien
tcctgatcgtctccttcctgtaaat

SEQ ID NO: 6054992 - DNA, 25 bp, Homo sapien
gatgactcctgatcgtctccttcct

SEQ ID NO: 6054993 - DNA, 25 bp, Homo sapien
tatttttctatagcttcattaaacg

SEQ ID NO: 6054994 - DNA, 25 bp, Homo sapien
catgttcaacaagcgtcattgccac

SEQ ID NO: 6054995 - DNA, 25 bp, Homo sapien
atttatattttgtgcgcttctggct

SEQ ID NO: 6054996 - DNA, 25 bp, Homo sapien
gtaaatcgatatttatattttgtgc

SEQ ID NO: 6054997 - DNA, 25 bp, Homo sapien
tgacggcggtattcatcaatggaaa

SEQ ID NO: 6054998 - DNA, 25 bp, Homo sapien
tctaatgtaatcaatgacttttctt

SEQ ID NO: 6054999 - DNA, 25 bp, Homo sapien
catctatatatcgtttacaaacgga

SEQ ID NO: 6055000 - DNA, 25 bp, Homo sapien
taatgataatacacatcgcaataat

SEQ ID NO: 6055001 - DNA, 25 bp, Homo sapien
acgcgatcagtccaatactgaactc

SEQ ID NO: 6055002 - DNA, 25 bp, Homo sapien
tataatcacccgtaatgataataca

SEQ ID NO: 6055003 - DNA, 25 bp, Homo sapien
tcaatctgacggcggtattcatcaa

SEQ ID NO: 6055004 - DNA, 25 bp, Homo sapien
caacaagcgtcattgccacctttat

SEQ ID NO: 6055005 - DNA, 25 bp, Homo sapien
caaacggatgaaaccgtctttgcga

SEQ ID NO: 6055006 - DNA, 25 bp, Homo sapien
ggatagcggccaattcttcatgttc

SEQ ID NO: 6055007 - DNA, 25 bp, Homo sapien
accggaagctgcttctttgtataca

SEQ ID NO: 6055008 - DNA, 25 bp, Homo sapien
ctttttcatctatatatcgtttaca

SEQ ID NO: 6055009 - DNA, 25 bp, Homo sapien
cattaaacgcgatcagtccaatact

SEQ ID NO: 6055010 - DNA, 25 bp, Homo sapien
tcagtccaatactgaactcatcgtc

SEQ ID NO: 6055011 - DNA, 25 bp, Homo sapien
ttcttttctaatgtaatcaatgact

SEQ ID NO: 6055012 - DNA, 25 bp, Homo sapien
ccgtgtgttttggagaattttcaag

SEQ ID NO: 6055013 - DNA, 25 bp, Homo sapien
tctggcttcttttctaatgtaatca

SEQ ID NO: 6055014 - DNA, 25 bp, Homo sapien
ctgtttctctcaatcgtttttcggc

SEQ ID NO: 6055015 - DNA, 25 bp, Homo sapien
aaaccataatccttgagctgctttt

SEQ ID NO: 6055016 - DNA, 25 bp, Homo sapien
tttcggcttacagagacaagctgtt

SEQ ID NO: 6055017 - DNA, 25 bp, Homo sapien
tttcaggtgaatatttttctatagc

SEQ ID NO: 6055018 - DNA, 25 bp, Homo sapien
agctcggcttcaatcaggctttgtg

SEQ ID NO: 6055019 - DNA, 25 bp, Homo sapien
attttgtgcgcttctggcttctttt

SEQ ID NO: 6055020 - DNA, 25 bp, Homo sapien
tgcttttgaaaatagaggatttcct

SEQ ID NO: 6055021 - DNA, 25 bp, Homo sapien
tttgccttgcatccgtgtgttttgg

SEQ ID NO: 6055022 - DNA, 25 bp, Homo sapien
tcccgcctctgctcctgttcaatct

SEQ ID NO: 6055023 - DNA, 25 bp, Homo sapien
cacccgtaatgataatacacatcgc

SEQ ID NO: 6055024 - DNA, 25 bp, Homo sapien
ggtgaatatttttctatagcttcat

SEQ ID NO: 6055025 - DNA, 25 bp, Homo sapien
tgaaaatagaggatttcctcccgcc

SEQ ID NO: 6055026 - DNA, 25 bp, Homo sapien
tggaaagctcggcttcaatcaggct

SEQ ID NO: 6055027 - DNA, 25 bp, Homo sapien
tcgatatttatattttgtgcgcttc

SEQ ID NO: 6055028 - DNA, 25 bp, Homo sapien
agctcagcaaatgcgagcagagaat

SEQ ID NO: 6055029 - DNA, 25 bp, Homo sapien
gttttggagaattttcaagcagttc

SEQ ID NO: 6055030 - DNA, 25 bp, Homo sapien
atcaggctttgtgatgactcctgat

SEQ ID NO: 6055031 - DNA, 25 bp, Homo sapien
tggcgttttgccttgcatccgtgtg

SEQ ID NO: 6055032 - DNA, 25 bp, Homo sapien
ctttttataataagctcagcaaatg

SEQ ID NO: 6055033 - DNA, 25 bp, Homo sapien
cctttatggcgttttgccttgcatc

SEQ ID NO: 6055034 - DNA, 25 bp, Homo sapien
ccttcctgtaaatcgatatttatat

SEQ ID NO: 6055035 - DNA, 25 bp, Homo sapien
gcaaatgcgagcagagaatttcctt

SEQ ID NO: 6055036 - DNA, 25 bp, Homo sapien
taatccttgagctgcttttgaaaat

SEQ ID NO: 6055037 - DNA, 25 bp, Homo sapien
tgaactcatcgtctttttcatctat

SEQ ID NO: 6055038 - DNA, 25 bp, Homo sapien
atttcctcccgcctctgctcctgtt

SEQ ID NO: 6055039 - DNA, 25 bp, Homo sapien
gcttcaatcaggctttgtgatgact

SEQ ID NO: 6055040 - DNA, 25 bp, Homo sapien
catcgcaataatatattttctgttt

SEQ ID NO: 6055041 - DNA, 25 bp, Homo sapien
gagacaagctgttcaagctgtttga

SEQ ID NO: 6055042 - DNA, 25 bp, Homo sapien
gagaattttcaagcagttctttaaa

SEQ ID NO: 6055043 - DNA, 25 bp, Homo sapien
cggccaattcttcatgttcaacaag

SEQ ID NO: 6055044 - DNA, 25 bp, Homo sapien
tcctgttcaatctgacggcggtatt

SEQ ID NO: 6055045 - DNA, 25 bp, Homo sapien
ttctttgtatacaggatagcggcca

SEQ ID NO: 6055046 - DNA, 25 bp, Homo sapien
tgcgcttctggcttcttttctaatg

SEQ ID NO: 6055047 - DNA, 25 bp, Homo sapien
cttacagagacaagctgttcaagct

SEQ ID NO: 6055048 - DNA, 25 bp, Homo sapien
acatgatgaaatttcgttacaaatc

SEQ ID NO: 6055049 - DNA, 25 bp, Homo sapien
tcaattcctacaatgtctgacgtac

SEQ ID NO: 6055050 - DNA, 25 bp, Homo sapien
caaagtttttaatcacatagtcggc

SEQ ID NO: 6055051 - DNA, 25 bp, Homo sapien
ggtagcctgcttttgcaacttttac

SEQ ID NO: 6055052 - DNA, 25 bp, Homo sapien
tcaagtgcctctcgaagtgcatgct

SEQ ID NO: 6055053 - DNA, 25 bp, Homo sapien
gttttcccgttatgctttgcgtcta

SEQ ID NO: 6055054 - DNA, 25 bp, Homo sapien
aatctgaatctcgttttcccgttat

SEQ ID NO: 6055055 - DNA, 25 bp, Homo sapien
tgtctgtatccttcttcccagcctt

SEQ ID NO: 6055056 - DNA, 25 bp, Homo sapien
cgttacaaatcggagctttccgaga

SEQ ID NO: 6055057 - DNA, 25 bp, Homo sapien
ctaattcgagcttcgtcttcggata

SEQ ID NO: 6055058 - DNA, 25 bp, Homo sapien
gatcactttggccaaaatgttcaat

SEQ ID NO: 6055059 - DNA, 25 bp, Homo sapien
ttgcaacttttactgccgcttctat

SEQ ID NO: 6055060 - DNA, 25 bp, Homo sapien
gcatgctcttcatctttctgataaa

SEQ ID NO: 6055061 - DNA, 25 bp, Homo sapien
agccttcatgaatataaatcggagc

SEQ ID NO: 6055062 - DNA, 25 bp, Homo sapien
ctaacgtcctgcggcaaagcagcat

SEQ ID NO: 6055063 - DNA, 25 bp, Homo sapien
ttatcaagaggtgaagttcccggct

SEQ ID NO: 6055064 - DNA, 25 bp, Homo sapien
gcctctcgaagtgcatgctcttcat

SEQ ID NO: 6055065 - DNA, 25 bp, Homo sapien
ccgttatgctttgcgtctaataggt

SEQ ID NO: 6055066 - DNA, 25 bp, Homo sapien
ccaaaatgttcaatggcgcgcttca

SEQ ID NO: 6055067 - DNA, 25 bp, Homo sapien
gcgtgtgtgtcagatgatcaattcc

SEQ ID NO: 6055068 - DNA, 25 bp, Homo sapien
ttccgagatcactttggccaaaatg

SEQ ID NO: 6055069 - DNA, 25 bp, Homo sapien
tttctctatcactcgtttggccggt

SEQ ID NO: 6055070 - DNA, 25 bp, Homo sapien
gcttcagcgtgtgtgtcagatgatc

SEQ ID NO: 6055071 - DNA, 25 bp, Homo sapien
cgagcttcgtcttcggataattttt

SEQ ID NO: 6055072 - DNA, 25 bp, Homo sapien
cttcccagccttcatgaatataaat

SEQ ID NO: 6055073 - DNA, 25 bp, Homo sapien
gatgatcaattcctacaatgtctga

SEQ ID NO: 6055074 - DNA, 25 bp, Homo sapien
cttttcttcatctaattcgagcttc

SEQ ID NO: 6055075 - DNA, 25 bp, Homo sapien
tgatcgacatgatgaaatttcgtta

SEQ ID NO: 6055076 - DNA, 25 bp, Homo sapien
ctagcgggtagcctgcttttgcaac

SEQ ID NO: 6055077 - DNA, 25 bp, Homo sapien
ctttggccaaaatgttcaatggcgc

SEQ ID NO: 6055078 - DNA, 25 bp, Homo sapien
ccggctcaaagtttttaatcacata

SEQ ID NO: 6055079 - DNA, 25 bp, Homo sapien
aaggtatcaatataggattcaagtg

SEQ ID NO: 6055080 - DNA, 25 bp, Homo sapien
tatcactcgtttggccggttttgta

SEQ ID NO: 6055081 - DNA, 25 bp, Homo sapien
atggcgcgcttcagcgtgtgtgtca

SEQ ID NO: 6055082 - DNA, 25 bp, Homo sapien
ctgcttttgcaacttttactgccgc

SEQ ID NO: 6055083 - DNA, 25 bp, Homo sapien
tctagcttttcaaacagatgtctgt

SEQ ID NO: 6055084 - DNA, 25 bp, Homo sapien
cgaagtgcatgctcttcatctttct

SEQ ID NO: 6055085 - DNA, 25 bp, Homo sapien
tagtcggcattaatactgaatctga

SEQ ID NO: 6055086 - DNA, 25 bp, Homo sapien
atactgaatctgaatctcgttttcc

SEQ ID NO: 6055087 - DNA, 25 bp, Homo sapien
acggcgcttttcttcatctaattcg

SEQ ID NO: 6055088 - DNA, 25 bp, Homo sapien
caaatcggagctttccgagatcact

SEQ ID NO: 6055089 - DNA, 25 bp, Homo sapien
catgatgcttcgaaccttgtgaact

SEQ ID NO: 6055090 - DNA, 25 bp, Homo sapien
gcttctatccgcttatcaagaggtg

SEQ ID NO: 6055091 - DNA, 25 bp, Homo sapien
gacgtacatgatgcttcgaaccttg

SEQ ID NO: 6055092 - DNA, 25 bp, Homo sapien
aataggtgatcgacatgatgaaatt

SEQ ID NO: 6055093 - DNA, 25 bp, Homo sapien
tcaaacgtaatgtcatgtctaacgt

SEQ ID NO: 6055094 - DNA, 25 bp, Homo sapien
gtaatgtcatgtctaacgtcctgcg

SEQ ID NO: 6055095 - DNA, 25 bp, Homo sapien
gcattaatactgaatctgaatctcg

SEQ ID NO: 6055096 - DNA, 25 bp, Homo sapien
tgttgaattaattcaaacgtaatgt

SEQ ID NO: 6055097 - DNA, 25 bp, Homo sapien
aaagcctagcgggtagcctgctttt

SEQ ID NO: 6055098 - DNA, 25 bp, Homo sapien
cctacaatgtctgacgtacatgatg

SEQ ID NO: 6055099 - DNA, 25 bp, Homo sapien
tcggagcaacaataaagcctagcgg

SEQ ID NO: 6055100 - DNA, 25 bp, Homo sapien
tataaatcggagcaacaataaagcc

SEQ ID NO: 6055101 - DNA, 25 bp, Homo sapien
aacagatgtctgtatccttcttccc

SEQ ID NO: 6055102 - DNA, 25 bp, Homo sapien
attaattcaaacgtaatgtcatgtc

SEQ ID NO: 6055103 - DNA, 25 bp, Homo sapien
tcgtcttcggataatttttctctat

SEQ ID NO: 6055104 - DNA, 25 bp, Homo sapien
ggagctttccgagatcactttggcc

SEQ ID NO: 6055105 - DNA, 25 bp, Homo sapien
atccttcttcccagccttcatgaat

SEQ ID NO: 6055106 - DNA, 25 bp, Homo sapien
tcatgtctaacgtcctgcggcaaag

SEQ ID NO: 6055107 - DNA, 25 bp, Homo sapien
agaggtgaagttcccggctcaaagt

SEQ ID NO: 6055108 - DNA, 25 bp, Homo sapien
tcctgcggcaaagcagcatctagct

SEQ ID NO: 6055109 - DNA, 25 bp, Homo sapien
taatttttctctatcactcgtttgg

SEQ ID NO: 6055110 - DNA, 25 bp, Homo sapien
actgccgcttctatccgcttatcaa

SEQ ID NO: 6055111 - DNA, 25 bp, Homo sapien
atgtctgacgtacatgatgcttcga

SEQ ID NO: 6055112 - DNA, 25 bp, Homo sapien
taggattcaagtgcctctcgaagtg

SEQ ID NO: 6055113 - DNA, 25 bp, Homo sapien
ctttctgataaatatattttccgat

SEQ ID NO: 6055114 - DNA, 25 bp, Homo sapien
ttttaatcacatagtcggcattaat

SEQ ID NO: 6055115 - DNA, 25 bp, Homo sapien
gtgtcagatgatcaattcctacaat

SEQ ID NO: 6055116 - DNA, 25 bp, Homo sapien
tcacatagtcggcattaatactgaa

SEQ ID NO: 6055117 - DNA, 25 bp, Homo sapien
cttcatctaattcgagcttcgtctt

SEQ ID NO: 6055118 - DNA, 25 bp, Homo sapien
catgaatataaatcggagcaacaat

SEQ ID NO: 6055119 - DNA, 25 bp, Homo sapien
aatctcgttttcccgttatgctttg

SEQ ID NO: 6055120 - DNA, 25 bp, Homo sapien
gcgtctaataggtgatcgacatgat

SEQ ID NO: 6055121 - DNA, 25 bp, Homo sapien
tcggataatttttctctatcactcg

SEQ ID NO: 6055122 - DNA, 25 bp, Homo sapien
atccgcttatcaagaggtgaagttc

SEQ ID NO: 6055123 - DNA, 25 bp, Homo sapien
gataaatatattttccgatcccgta

SEQ ID NO: 6055124 - DNA, 25 bp, Homo sapien
tttataacggcgcttttcttcatct

SEQ ID NO: 6055125 - DNA, 25 bp, Homo sapien
ggcaaagcagcatctagcttttcaa

SEQ ID NO: 6055126 - DNA, 25 bp, Homo sapien
gcagcatctagcttttcaaacagat

SEQ ID NO: 6055127 - DNA, 25 bp, Homo sapien
cttttactgccgcttctatccgctt

SEQ ID NO: 6055128 - DNA, 25 bp, Homo sapien
aacaataaagcctagcgggtagcct

SEQ ID NO: 6055129 - DNA, 25 bp, Homo sapien
tgaaatttcgttacaaatcggagct

SEQ ID NO: 6055130 - DNA, 25 bp, Homo sapien
tgctttgcgtctaataggtgatcga

SEQ ID NO: 6055131 - DNA, 25 bp, Homo sapien
tcaatataggattcaagtgcctctc

SEQ ID NO: 6055132 - DNA, 25 bp, Homo sapien
ttttcaaacagatgtctgtatcctt

SEQ ID NO: 6055133 - DNA, 25 bp, Homo sapien
tgtaaaacggtgttgaattaattca

SEQ ID NO: 6055134 - DNA, 25 bp, Homo sapien
tgttcaatggcgcgcttcagcgtgt

SEQ ID NO: 6055135 - DNA, 25 bp, Homo sapien
tcttcatctttctgataaatatatt

SEQ ID NO: 6055136 - DNA, 25 bp, Homo sapien
tgacagcaatcgttgacaggccgat

SEQ ID NO: 6055137 - DNA, 25 bp, Homo sapien
agtgatcccgtatctcccataaaga

SEQ ID NO: 6055138 - DNA, 25 bp, Homo sapien
tactgaacaatgtgacacttttata

SEQ ID NO: 6055139 - DNA, 25 bp, Homo sapien
caaaatgaagataataaacaaagaa

SEQ ID NO: 6055140 - DNA, 25 bp, Homo sapien
aataatcaaaatgaagataataaac

SEQ ID NO: 6055141 - DNA, 25 bp, Homo sapien
ctataccctaaaaacagtgatcccg

SEQ ID NO: 6055142 - DNA, 25 bp, Homo sapien
ccagcgtgctggcaataacgactaa

SEQ ID NO: 6055143 - DNA, 25 bp, Homo sapien
aggcgctgaaatcggctgtttgttt

SEQ ID NO: 6055144 - DNA, 25 bp, Homo sapien
gcgccatgacagcaatcgttgacag

SEQ ID NO: 6055145 - DNA, 25 bp, Homo sapien
ggttaattgcgttcgtgatgccgac

SEQ ID NO: 6055146 - DNA, 25 bp, Homo sapien
atgagagtgacagaatgagcacttt

SEQ ID NO: 6055147 - DNA, 25 bp, Homo sapien
ttttatacaggcctaataatgaaag

SEQ ID NO: 6055148 - DNA, 25 bp, Homo sapien
ttccgccggatagcgccatgacagc

SEQ ID NO: 6055149 - DNA, 25 bp, Homo sapien
aaaaacagtgatcccgtatctccca

SEQ ID NO: 6055150 - DNA, 25 bp, Homo sapien
aaatttttcattcacgagtcctgtc

SEQ ID NO: 6055151 - DNA, 25 bp, Homo sapien
gatttgcataaaaataatcaaaatg

SEQ ID NO: 6055152 - DNA, 25 bp, Homo sapien
ttgtttaatattcttctgatgatag

SEQ ID NO: 6055153 - DNA, 25 bp, Homo sapien
gtacgcctaatataataatcgggat

SEQ ID NO: 6055154 - DNA, 25 bp, Homo sapien
gaatcgagatactataccctaaaaa

SEQ ID NO: 6055155 - DNA, 25 bp, Homo sapien
atgtgaaaggccaaaggccatcagt

SEQ ID NO: 6055156 - DNA, 25 bp, Homo sapien
catcagtctatggtgaatatgcgac

SEQ ID NO: 6055157 - DNA, 25 bp, Homo sapien
cttatcaggcgctgaaatcggctgt

SEQ ID NO: 6055158 - DNA, 25 bp, Homo sapien
gatttttgccggatggaagttgtaa

SEQ ID NO: 6055159 - DNA, 25 bp, Homo sapien
aagccaaattgtggcacttttaagt

SEQ ID NO: 6055160 - DNA, 25 bp, Homo sapien
gaatgagcacttttccgccggatag

SEQ ID NO: 6055161 - DNA, 25 bp, Homo sapien
ctaataatgaaagaatcgagatact

SEQ ID NO: 6055162 - DNA, 25 bp, Homo sapien
cacgagtcctgtcacttctgctatg

SEQ ID NO: 6055163 - DNA, 25 bp, Homo sapien
tttaagtacaatcgcactgatactg

SEQ ID NO: 6055164 - DNA, 25 bp, Homo sapien
gcacttttccgccggatagcgccat

SEQ ID NO: 6055165 - DNA, 25 bp, Homo sapien
cgactaatgagagtgacagaatgag

SEQ ID NO: 6055166 - DNA, 25 bp, Homo sapien
gtgacagaatgagcacttttccgcc

SEQ ID NO: 6055167 - DNA, 25 bp, Homo sapien
cccgtatctcccataaagatttttg

SEQ ID NO: 6055168 - DNA, 25 bp, Homo sapien
ataaataactaagaccgacatccga

SEQ ID NO: 6055169 - DNA, 25 bp, Homo sapien
aagaccggcagcaaggccatccaat

SEQ ID NO: 6055170 - DNA, 25 bp, Homo sapien
tgacaggccgataacagaaagaccg

SEQ ID NO: 6055171 - DNA, 25 bp, Homo sapien
tctatggtgaatatgcgacttatca

SEQ ID NO: 6055172 - DNA, 25 bp, Homo sapien
aataaacaaagaaagccaaattgtg

SEQ ID NO: 6055173 - DNA, 25 bp, Homo sapien
tcgggataacgatactgaacaatgt

SEQ ID NO: 6055174 - DNA, 25 bp, Homo sapien
gtgaatatgcgacttatcaggcgct

SEQ ID NO: 6055175 - DNA, 25 bp, Homo sapien
atgcgacttatcaggcgctgaaatc

SEQ ID NO: 6055176 - DNA, 25 bp, Homo sapien
gccgataacagaaagaccggcagca

SEQ ID NO: 6055177 - DNA, 25 bp, Homo sapien
gatgatagcaaatgttgtatcaaaa

SEQ ID NO: 6055178 - DNA, 25 bp, Homo sapien
ggcacttttaagtacaatcgcactg

SEQ ID NO: 6055179 - DNA, 25 bp, Homo sapien
ccctaaaaacagtgatcccgtatct

SEQ ID NO: 6055180 - DNA, 25 bp, Homo sapien
aactaagaccgacatccgatgtgaa

SEQ ID NO: 6055181 - DNA, 25 bp, Homo sapien
tcttctgatgatagcaaatgttgta

SEQ ID NO: 6055182 - DNA, 25 bp, Homo sapien
aattgtggcacttttaagtacaatc

SEQ ID NO: 6055183 - DNA, 25 bp, Homo sapien
tacaatcgcactgatactgaaaata

SEQ ID NO: 6055184 - DNA, 25 bp, Homo sapien
aaatcggtacgcctaatataataat

SEQ ID NO: 6055185 - DNA, 25 bp, Homo sapien
tgctatgatttgcataaaaataatc

SEQ ID NO: 6055186 - DNA, 25 bp, Homo sapien
aaaaccccagcgtgctggcaataac

SEQ ID NO: 6055187 - DNA, 25 bp, Homo sapien
cggcttaaatttttcattcacgagt

SEQ ID NO: 6055188 - DNA, 25 bp, Homo sapien
acaggcctaataatgaaagaatcga

SEQ ID NO: 6055189 - DNA, 25 bp, Homo sapien
tgctggcaataacgactaatgagag

SEQ ID NO: 6055190 - DNA, 25 bp, Homo sapien
caaagaaagccaaattgtggcactt

SEQ ID NO: 6055191 - DNA, 25 bp, Homo sapien
acaatgtgacacttttatacaggcc

SEQ ID NO: 6055192 - DNA, 25 bp, Homo sapien
cacttctgctatgatttgcataaaa

SEQ ID NO: 6055193 - DNA, 25 bp, Homo sapien
cataaagatttttgccggatggaag

SEQ ID NO: 6055194 - DNA, 25 bp, Homo sapien
aacagaaagaccggcagcaaggcca

SEQ ID NO: 6055195 - DNA, 25 bp, Homo sapien
caatcgttgacaggccgataacaga

SEQ ID NO: 6055196 - DNA, 25 bp, Homo sapien
taatattcttctgatgatagcaaat

SEQ ID NO: 6055197 - DNA, 25 bp, Homo sapien
cggatagcgccatgacagcaatcgt

SEQ ID NO: 6055198 - DNA, 25 bp, Homo sapien
gaccgacatccgatgtgaaaggcca

SEQ ID NO: 6055199 - DNA, 25 bp, Homo sapien
agatactataccctaaaaacagtga

SEQ ID NO: 6055200 - DNA, 25 bp, Homo sapien
tcctgtcacttctgctatgatttgc

SEQ ID NO: 6055201 - DNA, 25 bp, Homo sapien
gaaatcggctgtttgtttaatattc

SEQ ID NO: 6055202 - DNA, 25 bp, Homo sapien
atctcccataaagatttttgccgga

SEQ ID NO: 6055203 - DNA, 25 bp, Homo sapien
gcataaaaataatcaaaatgaagat

SEQ ID NO: 6055204 - DNA, 25 bp, Homo sapien
tgttgtatcaaaaatcggtacgcct

SEQ ID NO: 6055205 - DNA, 25 bp, Homo sapien
agcaaatgttgtatcaaaaatcggt

SEQ ID NO: 6055206 - DNA, 25 bp, Homo sapien
taacgatactgaacaatgtgacact

SEQ ID NO: 6055207 - DNA, 25 bp, Homo sapien
gatactgaaaataaatccaattaaa

SEQ ID NO: 6055208 - DNA, 25 bp, Homo sapien
aaacaaaaaccccagcgtgctggca

SEQ ID NO: 6055209 - DNA, 25 bp, Homo sapien
catccaatccatcaatcaggttaat

SEQ ID NO: 6055210 - DNA, 25 bp, Homo sapien
tatcaaaaatcggtacgcctaatat

SEQ ID NO: 6055211 - DNA, 25 bp, Homo sapien
caataacgactaatgagagtgacag

SEQ ID NO: 6055212 - DNA, 25 bp, Homo sapien
ttcattcacgagtcctgtcacttct

SEQ ID NO: 6055213 - DNA, 25 bp, Homo sapien
taataatcgggataacgatactgaa

SEQ ID NO: 6055214 - DNA, 25 bp, Homo sapien
ctaatataataatcgggataacgat

SEQ ID NO: 6055215 - DNA, 25 bp, Homo sapien
caaggccatccaatccatcaatcag

SEQ ID NO: 6055216 - DNA, 25 bp, Homo sapien
atgaaagaatcgagatactataccc

SEQ ID NO: 6055217 - DNA, 25 bp, Homo sapien
tgacacttttatacaggcctaataa

SEQ ID NO: 6055218 - DNA, 25 bp, Homo sapien
gaagataataaacaaagaaagccaa

SEQ ID NO: 6055219 - DNA, 25 bp, Homo sapien
aaaggccatcagtctatggtgaata

SEQ ID NO: 6055220 - DNA, 25 bp, Homo sapien
catccgatgtgaaaggccaaaggcc

SEQ ID NO: 6055221 - DNA, 25 bp, Homo sapien
cgcactgatactgaaaataaatcca

SEQ ID NO: 6055222 - DNA, 25 bp, Homo sapien
aaggccaaaggccatcagtctatgg

SEQ ID NO: 6055223 - DNA, 25 bp, Homo sapien
ggctgtttgtttaatattcttctga

SEQ ID NO: 6055224 - DNA, 25 bp, Homo sapien
ggcagcaaggccatccaatccatca

SEQ ID NO: 6055225 - DNA, 25 bp, Homo sapien
caatcaggttaattgcgttcgtgat

SEQ ID NO: 6055226 - DNA, 25 bp, Homo sapien
atccatcaatcaggttaattgcgtt

SEQ ID NO: 6055227 - DNA, 25 bp, Homo sapien
tgccggatggaagttgtaaaacaaa

SEQ ID NO: 6055228 - DNA, 25 bp, Homo sapien
taaccgttactttgccgcctgcatg

SEQ ID NO: 6055229 - DNA, 25 bp, Homo sapien
gctgaatatatgtctcaaaagcttc

SEQ ID NO: 6055230 - DNA, 25 bp, Homo sapien
tatttctgatgctattgagcctgct

SEQ ID NO: 6055231 - DNA, 25 bp, Homo sapien
gatggttttctttctcttgttacag

SEQ ID NO: 6055232 - DNA, 25 bp, Homo sapien
gtgcttttggtcgtaataatgatga

SEQ ID NO: 6055233 - DNA, 25 bp, Homo sapien
aaacacttctctgtttgtcatatca

SEQ ID NO: 6055234 - DNA, 25 bp, Homo sapien
aagcttcaaaataattttcattgga

SEQ ID NO: 6055235 - DNA, 25 bp, Homo sapien
tacgctgatccatatatgtacttcc

SEQ ID NO: 6055236 - DNA, 25 bp, Homo sapien
tcataaaaatcgccggtatagtctg

SEQ ID NO: 6055237 - DNA, 25 bp, Homo sapien
gctgtctttatctgatggttttctt

SEQ ID NO: 6055238 - DNA, 25 bp, Homo sapien
taacgatcataaaaatcgccggtat

SEQ ID NO: 6055239 - DNA, 25 bp, Homo sapien
taattttcattggataaatcagatg

SEQ ID NO: 6055240 - DNA, 25 bp, Homo sapien
ccattaaccgttactttgccgcctg

SEQ ID NO: 6055241 - DNA, 25 bp, Homo sapien
gtcgttctaatataagtgtcgtatt

SEQ ID NO: 6055242 - DNA, 25 bp, Homo sapien
gcaatatcttcaccgtttgtgcttt

SEQ ID NO: 6055243 - DNA, 25 bp, Homo sapien
cttcaccgtttgtgcttttggtcgt

SEQ ID NO: 6055244 - DNA, 25 bp, Homo sapien
gctgtactgccttttccgtaacgat

SEQ ID NO: 6055245 - DNA, 25 bp, Homo sapien
ttatctgatggttttctttctcttg

SEQ ID NO: 6055246 - DNA, 25 bp, Homo sapien
gtttgtcatatcaatcgtcagaatg

SEQ ID NO: 6055247 - DNA, 25 bp, Homo sapien
aaatcagtgtccctctttgcaccca

SEQ ID NO: 6055248 - DNA, 25 bp, Homo sapien
gctgccgctgtctttatctgatggt

SEQ ID NO: 6055249 - DNA, 25 bp, Homo sapien
atcagctgaaaccaccatgtaaaga

SEQ ID NO: 6055250 - DNA, 25 bp, Homo sapien
gcacccagctttgccgagagagatt

SEQ ID NO: 6055251 - DNA, 25 bp, Homo sapien
tttctttctcttgttacagtcgttc

SEQ ID NO: 6055252 - DNA, 25 bp, Homo sapien
gcgatggcagcaatcagctgaaacc

SEQ ID NO: 6055253 - DNA, 25 bp, Homo sapien
tcattggataaatcagatgaaatcg

SEQ ID NO: 6055254 - DNA, 25 bp, Homo sapien
ttactcccggttttatgcccatatc

SEQ ID NO: 6055255 - DNA, 25 bp, Homo sapien
ttggtcgtaataatgatgaaatcag

SEQ ID NO: 6055256 - DNA, 25 bp, Homo sapien
tcaagttttccgatctccgcttttg

SEQ ID NO: 6055257 - DNA, 25 bp, Homo sapien
catatcaatcgtcagaatggctgta

SEQ ID NO: 6055258 - DNA, 25 bp, Homo sapien
tatatgtacttccattaaccgttac

SEQ ID NO: 6055259 - DNA, 25 bp, Homo sapien
ctgttcggcttttttaaagcctgcg

SEQ ID NO: 6055260 - DNA, 25 bp, Homo sapien
gcagcaatcagctgaaaccaccatg

SEQ ID NO: 6055261 - DNA, 25 bp, Homo sapien
ccggttttatgcccatatctttata

SEQ ID NO: 6055262 - DNA, 25 bp, Homo sapien
aagtgtcgtattgatcaatcacatc

SEQ ID NO: 6055263 - DNA, 25 bp, Homo sapien
ttgccgcctgcatgataaagcatga

SEQ ID NO: 6055264 - DNA, 25 bp, Homo sapien
gccgagagagattcaagttttccga

SEQ ID NO: 6055265 - DNA, 25 bp, Homo sapien
ttactttgccgcctgcatgataaag

SEQ ID NO: 6055266 - DNA, 25 bp, Homo sapien
ttttaaagcctgcgataaacacttc

SEQ ID NO: 6055267 - DNA, 25 bp, Homo sapien
tgttgtccaaatactgttcggcttt

SEQ ID NO: 6055268 - DNA, 25 bp, Homo sapien
cgactgcgatggcagcaatcagctg

SEQ ID NO: 6055269 - DNA, 25 bp, Homo sapien
aatcgtcagaatggctgtactgcct

SEQ ID NO: 6055270 - DNA, 25 bp, Homo sapien
agctttgccgagagagattcaagtt

SEQ ID NO: 6055271 - DNA, 25 bp, Homo sapien
tctcttgttacagtcgttctaatat

SEQ ID NO: 6055272 - DNA, 25 bp, Homo sapien
tgatgctattgagcctgctgttgtc

SEQ ID NO: 6055273 - DNA, 25 bp, Homo sapien
attgaaaccgcaattcccccgactg

SEQ ID NO: 6055274 - DNA, 25 bp, Homo sapien
ttctctgtttgtcatatcaatcgtc

SEQ ID NO: 6055275 - DNA, 25 bp, Homo sapien
ctgccttttccgtaacgatcataaa

SEQ ID NO: 6055276 - DNA, 25 bp, Homo sapien
tcggcttttttaaagcctgcgataa

SEQ ID NO: 6055277 - DNA, 25 bp, Homo sapien
caaaataattttcattggataaatc

SEQ ID NO: 6055278 - DNA, 25 bp, Homo sapien
tattgagcctgctgttgtccaaata

SEQ ID NO: 6055279 - DNA, 25 bp, Homo sapien
ccatatctttataggaaagctgaat

SEQ ID NO: 6055280 - DNA, 25 bp, Homo sapien
ttatgcccatatctttataggaaag

SEQ ID NO: 6055281 - DNA, 25 bp, Homo sapien
cagatgaaatcgtatttctgatgct

SEQ ID NO: 6055282 - DNA, 25 bp, Homo sapien
gcctgctgttgtccaaatactgttc

SEQ ID NO: 6055283 - DNA, 25 bp, Homo sapien
ttcgtaacaccgccatcgctgccgc

SEQ ID NO: 6055284 - DNA, 25 bp, Homo sapien
aaagcctgcgataaacacttctctg

SEQ ID NO: 6055285 - DNA, 25 bp, Homo sapien
gatcaatcacatcagacgtacgctg

SEQ ID NO: 6055286 - DNA, 25 bp, Homo sapien
agagattcaagttttccgatctccg

SEQ ID NO: 6055287 - DNA, 25 bp, Homo sapien
gtgtccctctttgcacccagctttg

SEQ ID NO: 6055288 - DNA, 25 bp, Homo sapien
cgtttgtgcttttggtcgtaataat

SEQ ID NO: 6055289 - DNA, 25 bp, Homo sapien
tctcaaaagcttcaaaataattttc

SEQ ID NO: 6055290 - DNA, 25 bp, Homo sapien
acaccgccatcgctgccgctgtctt

SEQ ID NO: 6055291 - DNA, 25 bp, Homo sapien
tatatgtctcaaaagcttcaaaata

SEQ ID NO: 6055292 - DNA, 25 bp, Homo sapien
tgataaagcatgattgaaaccgcaa

SEQ ID NO: 6055293 - DNA, 25 bp, Homo sapien
agcatgattgaaaccgcaattcccc

SEQ ID NO: 6055294 - DNA, 25 bp, Homo sapien
tgaaaccaccatgtaaagaatatgt

SEQ ID NO: 6055295 - DNA, 25 bp, Homo sapien
aatatgttgtcagggtttactcccg

SEQ ID NO: 6055296 - DNA, 25 bp, Homo sapien
tttccgtaacgatcataaaaatcgc

SEQ ID NO: 6055297 - DNA, 25 bp, Homo sapien
gatccatatatgtacttccattaac

SEQ ID NO: 6055298 - DNA, 25 bp, Homo sapien
aggaaagctgaatatatgtctcaaa

SEQ ID NO: 6055299 - DNA, 25 bp, Homo sapien
ctttataggaaagctgaatatatgt

SEQ ID NO: 6055300 - DNA, 25 bp, Homo sapien
attcccccgactgcgatggcagcaa

SEQ ID NO: 6055301 - DNA, 25 bp, Homo sapien
aaatcgccggtatagtctgcaatat

SEQ ID NO: 6055302 - DNA, 25 bp, Homo sapien
ctctttgcacccagctttgccgaga

SEQ ID NO: 6055303 - DNA, 25 bp, Homo sapien
gtaataatgatgaaatcagtgtccc

SEQ ID NO: 6055304 - DNA, 25 bp, Homo sapien
ccatcgctgccgctgtctttatctg

SEQ ID NO: 6055305 - DNA, 25 bp, Homo sapien
tgcgataaacacttctctgtttgtc

SEQ ID NO: 6055306 - DNA, 25 bp, Homo sapien
agaatggctgtactgccttttccgt

SEQ ID NO: 6055307 - DNA, 25 bp, Homo sapien
ctaatataagtgtcgtattgatcaa

SEQ ID NO: 6055308 - DNA, 25 bp, Homo sapien
tagtctgcaatatcttcaccgtttg

SEQ ID NO: 6055309 - DNA, 25 bp, Homo sapien
cgtattgatcaatcacatcagacgt

SEQ ID NO: 6055310 - DNA, 25 bp, Homo sapien
cgcaattcccccgactgcgatggca

SEQ ID NO: 6055311 - DNA, 25 bp, Homo sapien
gtaaagaatatgttgtcagggttta

SEQ ID NO: 6055312 - DNA, 25 bp, Homo sapien
caccatgtaaagaatatgttgtcag

SEQ ID NO: 6055313 - DNA, 25 bp, Homo sapien
tcacatcagacgtacgctgatccat

SEQ ID NO: 6055314 - DNA, 25 bp, Homo sapien
cagacgtacgctgatccatatatgt

SEQ ID NO: 6055315 - DNA, 25 bp, Homo sapien
aaatcgtatttctgatgctattgag

SEQ ID NO: 6055316 - DNA, 25 bp, Homo sapien
gttacagtcgttctaatataagtgt

SEQ ID NO: 6055317 - DNA, 25 bp, Homo sapien
cctgcatgataaagcatgattgaaa

SEQ ID NO: 6055318 - DNA, 25 bp, Homo sapien
gataaatcagatgaaatcgtatttc

SEQ ID NO: 6055319 - DNA, 25 bp, Homo sapien
cgcctttcgtaacaccgccatcgct

SEQ ID NO: 6055320 - DNA, 25 bp, Homo sapien
ccggtatagtctgcaatatcttcac

SEQ ID NO: 6055321 - DNA, 25 bp, Homo sapien
atgatgaaatcagtgtccctctttg

SEQ ID NO: 6055322 - DNA, 25 bp, Homo sapien
caacaacttgatcagcttggcgaac

SEQ ID NO: 6055323 - DNA, 25 bp, Homo sapien
tgcagcatatcttccgttaactgtc

SEQ ID NO: 6055324 - DNA, 25 bp, Homo sapien
gcgttcaatcatgacattttcagct

SEQ ID NO: 6055325 - DNA, 25 bp, Homo sapien
gcgagaaggctcaaattccttcgtc

SEQ ID NO: 6055326 - DNA, 25 bp, Homo sapien
ccaatctaacgcagcaaaccggtct

SEQ ID NO: 6055327 - DNA, 25 bp, Homo sapien
cagatttttgctgcgagaaggctca

SEQ ID NO: 6055328 - DNA, 25 bp, Homo sapien
tttcccagctcttcccgtgcatatc

SEQ ID NO: 6055329 - DNA, 25 bp, Homo sapien
gatttggcgtttcatcatgcgttca

SEQ ID NO: 6055330 - DNA, 25 bp, Homo sapien
gcaaaccggtctcccggctgataat

SEQ ID NO: 6055331 - DNA, 25 bp, Homo sapien
ccgccgtgcagatgtcttccaatct

SEQ ID NO: 6055332 - DNA, 25 bp, Homo sapien
gcatcacaatgagcgatggctaaat

SEQ ID NO: 6055333 - DNA, 25 bp, Homo sapien
actgaaacgacctcttcgaatgcgt

SEQ ID NO: 6055334 - DNA, 25 bp, Homo sapien
catcagctggctccgccgtgcagat

SEQ ID NO: 6055335 - DNA, 25 bp, Homo sapien
acttgctgcgactgaggaatggtgc

SEQ ID NO: 6055336 - DNA, 25 bp, Homo sapien
ggctcaaattccttcgtcatcagct

SEQ ID NO: 6055337 - DNA, 25 bp, Homo sapien
aatgagcgatggctaaatgccgaag

SEQ ID NO: 6055338 - DNA, 25 bp, Homo sapien
catgtgcttaaaatgctgatcccct

SEQ ID NO: 6055339 - DNA, 25 bp, Homo sapien
ccgaagcatgtgcttaaaatgctga

SEQ ID NO: 6055340 - DNA, 25 bp, Homo sapien
ctgatgaataggagaagaaccgctt

SEQ ID NO: 6055341 - DNA, 25 bp, Homo sapien
ttgagagagctcagcatctttctct

SEQ ID NO: 6055342 - DNA, 25 bp, Homo sapien
gaatgcgtctgaggaaaaacggtcc

SEQ ID NO: 6055343 - DNA, 25 bp, Homo sapien
cttaaaatgctgatccccttcctga

SEQ ID NO: 6055344 - DNA, 25 bp, Homo sapien
aattccttcgtcatcagctggctcc

SEQ ID NO: 6055345 - DNA, 25 bp, Homo sapien
gaactctgatttggcgtttcatcat

SEQ ID NO: 6055346 - DNA, 25 bp, Homo sapien
ggcttatcgggtctgccgcatcaca

SEQ ID NO: 6055347 - DNA, 25 bp, Homo sapien
ctggctccgccgtgcagatgtcttc

SEQ ID NO: 6055348 - DNA, 25 bp, Homo sapien
atgctgatccccttcctgaataggg

SEQ ID NO: 6055349 - DNA, 25 bp, Homo sapien
gagctcagcatctttctcttttgcc

SEQ ID NO: 6055350 - DNA, 25 bp, Homo sapien
cagaaacagatttttgctgcgagaa

SEQ ID NO: 6055351 - DNA, 25 bp, Homo sapien
catcagcagaaacagatttttgctg

SEQ ID NO: 6055352 - DNA, 25 bp, Homo sapien
gatggctttcccagctcttcccgtg

SEQ ID NO: 6055353 - DNA, 25 bp, Homo sapien
gcgaggtgcagcatatcttccgtta

SEQ ID NO: 6055354 - DNA, 25 bp, Homo sapien
ttaaaacagaatgaagaatcgaagc

SEQ ID NO: 6055355 - DNA, 25 bp, Homo sapien
cttttgccagtatcaccgtaacccg

SEQ ID NO: 6055356 - DNA, 25 bp, Homo sapien
catatcggcttatcgggtctgccgc

SEQ ID NO: 6055357 - DNA, 25 bp, Homo sapien
ggaaaaacggtccatcagcagaaac

SEQ ID NO: 6055358 - DNA, 25 bp, Homo sapien
cggctgataattccgcacacttgct

SEQ ID NO: 6055359 - DNA, 25 bp, Homo sapien
tttgctgcgagaaggctcaaattcc

SEQ ID NO: 6055360 - DNA, 25 bp, Homo sapien
acggtccatcagcagaaacagattt

SEQ ID NO: 6055361 - DNA, 25 bp, Homo sapien
tcttcgaatgcgtctgaggaaaaac

SEQ ID NO: 6055362 - DNA, 25 bp, Homo sapien
tcccgtgcatatcggcttatcgggt

SEQ ID NO: 6055363 - DNA, 25 bp, Homo sapien
ttcagcttgagagagctcagcatct

SEQ ID NO: 6055364 - DNA, 25 bp, Homo sapien
atatcttccgttaactgtcccgtga

SEQ ID NO: 6055365 - DNA, 25 bp, Homo sapien
tcgggtctgccgcatcacaatgagc

SEQ ID NO: 6055366 - DNA, 25 bp, Homo sapien
tttctcttttgccagtatcaccgta

SEQ ID NO: 6055367 - DNA, 25 bp, Homo sapien
ataattccgcacacttgctgcgact

SEQ ID NO: 6055368 - DNA, 25 bp, Homo sapien
tgcgactgaggaatggtgctgatga

SEQ ID NO: 6055369 - DNA, 25 bp, Homo sapien
tgaggaatggtgctgatgaatagga

SEQ ID NO: 6055370 - DNA, 25 bp, Homo sapien
tgtcttccaatctaacgcagcaaac

SEQ ID NO: 6055371 - DNA, 25 bp, Homo sapien
acgacctcttcgaatgcgtctgagg

SEQ ID NO: 6055372 - DNA, 25 bp, Homo sapien
cgatggctaaatgccgaagcatgtg

SEQ ID NO: 6055373 - DNA, 25 bp, Homo sapien
taaatgccgaagcatgtgcttaaaa

SEQ ID NO: 6055374 - DNA, 25 bp, Homo sapien
catcatgcgttcaatcatgacattt

SEQ ID NO: 6055375 - DNA, 25 bp, Homo sapien
cagaatgaagaatcgaagctgtcac

SEQ ID NO: 6055376 - DNA, 25 bp, Homo sapien
agctcttcccgtgcatatcggctta

SEQ ID NO: 6055377 - DNA, 25 bp, Homo sapien
actgtcccgtgacaacaacttgatc

SEQ ID NO: 6055378 - DNA, 25 bp, Homo sapien
aatcatgacattttcagcttgagag

SEQ ID NO: 6055379 - DNA, 25 bp, Homo sapien
cctcctatttctgcgaggtgcagca

SEQ ID NO: 6055380 - DNA, 25 bp, Homo sapien
tgcagatgtcttccaatctaacgca

SEQ ID NO: 6055381 - DNA, 25 bp, Homo sapien
cggccgcctcctatttctgcgaggt

SEQ ID NO: 6055382 - DNA, 25 bp, Homo sapien
gctgtcactgaaacgacctcttcga

SEQ ID NO: 6055383 - DNA, 25 bp, Homo sapien
gatccgaactctgatttggcgtttc

SEQ ID NO: 6055384 - DNA, 25 bp, Homo sapien
ttttccttcccgatggaagccagac

SEQ ID NO: 6055385 - DNA, 25 bp, Homo sapien
agcatctttctcttttgccagtatc

SEQ ID NO: 6055386 - DNA, 25 bp, Homo sapien
gcttggcgaacagatggctttccca

SEQ ID NO: 6055387 - DNA, 25 bp, Homo sapien
tccgttaactgtcccgtgacaacaa

SEQ ID NO: 6055388 - DNA, 25 bp, Homo sapien
tctgccgcatcacaatgagcgatgg

SEQ ID NO: 6055389 - DNA, 25 bp, Homo sapien
aataggagaagaaccgcttacaccg

SEQ ID NO: 6055390 - DNA, 25 bp, Homo sapien
ggaagccagaccagcacccgcgccg

SEQ ID NO: 6055391 - DNA, 25 bp, Homo sapien
cagaccagcacccgcgccgtttttt

SEQ ID NO: 6055392 - DNA, 25 bp, Homo sapien
gtctcccggctgataattccgcaca

SEQ ID NO: 6055393 - DNA, 25 bp, Homo sapien
atcgaagctgtcactgaaacgacct

SEQ ID NO: 6055394 - DNA, 25 bp, Homo sapien
gaagaatcgaagctgtcactgaaac

SEQ ID NO: 6055395 - DNA, 25 bp, Homo sapien
cagtatcaccgtaacccggccgcct

SEQ ID NO: 6055396 - DNA, 25 bp, Homo sapien
ttcccgatggaagccagaccagcac

SEQ ID NO: 6055397 - DNA, 25 bp, Homo sapien
ccgtgacaacaacttgatcagcttg

SEQ ID NO: 6055398 - DNA, 25 bp, Homo sapien
gacattttcagcttgagagagctca

SEQ ID NO: 6055399 - DNA, 25 bp, Homo sapien
ttcgtcatcagctggctccgccgtg

SEQ ID NO: 6055400 - DNA, 25 bp, Homo sapien
taacccggccgcctcctatttctgc

SEQ ID NO: 6055401 - DNA, 25 bp, Homo sapien
cttgatcagcttggcgaacagatgg

SEQ ID NO: 6055402 - DNA, 25 bp, Homo sapien
atccccttcctgaatagggaaaatg

SEQ ID NO: 6055403 - DNA, 25 bp, Homo sapien
ccgcacacttgctgcgactgaggaa

SEQ ID NO: 6055404 - DNA, 25 bp, Homo sapien
taacgcagcaaaccggtctcccggc

SEQ ID NO: 6055405 - DNA, 25 bp, Homo sapien
atttctgcgaggtgcagcatatctt

SEQ ID NO: 6055406 - DNA, 25 bp, Homo sapien
cgaacagatggctttcccagctctt

SEQ ID NO: 6055407 - DNA, 25 bp, Homo sapien
gcgtttcatcatgcgttcaatcatg

SEQ ID NO: 6055408 - DNA, 25 bp, Homo sapien
gtctgaggaaaaacggtccatcagc

SEQ ID NO: 6055409 - DNA, 25 bp, Homo sapien
atggtgctgatgaataggagaagaa

SEQ ID NO: 6055410 - DNA, 25 bp, Homo sapien
cgtgcccatataccagccgttaaat

SEQ ID NO: 6055411 - DNA, 25 bp, Homo sapien
gacgctacttttttgagcttgtcgt

SEQ ID NO: 6055412 - DNA, 25 bp, Homo sapien
atgatggtcaacgatgctgacaccc

SEQ ID NO: 6055413 - DNA, 25 bp, Homo sapien
aaatccgtattgtaatcagcggcga

SEQ ID NO: 6055414 - DNA, 25 bp, Homo sapien
attggaacctcaatcacaagtgaac

SEQ ID NO: 6055415 - DNA, 25 bp, Homo sapien
tgagcggcagcaggtcaaaatccgt

SEQ ID NO: 6055416 - DNA, 25 bp, Homo sapien
ggagcggtggaagatatgagtggca

SEQ ID NO: 6055417 - DNA, 25 bp, Homo sapien
ggtcaaaatccgttcgctctccgcg

SEQ ID NO: 6055418 - DNA, 25 bp, Homo sapien
gctttattcaattcaactagcgctt

SEQ ID NO: 6055419 - DNA, 25 bp, Homo sapien
acctcaagcttcatatcagaaataa

SEQ ID NO: 6055420 - DNA, 25 bp, Homo sapien
gcttgccgctgtatgatggtcaacg

SEQ ID NO: 6055421 - DNA, 25 bp, Homo sapien
tcaactagcgcttgatccttccata

SEQ ID NO: 6055422 - DNA, 25 bp, Homo sapien
gtcaacgatgctgacaccctgcttt

SEQ ID NO: 6055423 - DNA, 25 bp, Homo sapien
agcgcttgatccttccataaatccg

SEQ ID NO: 6055424 - DNA, 25 bp, Homo sapien
acctcaatcacaagtgaacgcggca

SEQ ID NO: 6055425 - DNA, 25 bp, Homo sapien
catgcgaaaaatgagcggcagcagg

SEQ ID NO: 6055426 - DNA, 25 bp, Homo sapien
agtcccccgtcagctttctgcccgc

SEQ ID NO: 6055427 - DNA, 25 bp, Homo sapien
aatgcccccgacctcaagcttcata

SEQ ID NO: 6055428 - DNA, 25 bp, Homo sapien
ctgctttttatacgagtgcagcaca

SEQ ID NO: 6055429 - DNA, 25 bp, Homo sapien
acgtccagtcccccgtcagctttct

SEQ ID NO: 6055430 - DNA, 25 bp, Homo sapien
taccacttcagctccaaatcagaaa

SEQ ID NO: 6055431 - DNA, 25 bp, Homo sapien
gctctccgcgccagccgagctcttc

SEQ ID NO: 6055432 - DNA, 25 bp, Homo sapien
gagtggcagcgggtgaaattggcgg

SEQ ID NO: 6055433 - DNA, 25 bp, Homo sapien
taacgattgagttatcataggagcg

SEQ ID NO: 6055434 - DNA, 25 bp, Homo sapien
cccgacctcaagcttcatatcagaa

SEQ ID NO: 6055435 - DNA, 25 bp, Homo sapien
atcataggagcggtggaagatatga

SEQ ID NO: 6055436 - DNA, 25 bp, Homo sapien
gcggcagctcataccagacaggctg

SEQ ID NO: 6055437 - DNA, 25 bp, Homo sapien
gcagcaggtcaaaatccgttcgctc

SEQ ID NO: 6055438 - DNA, 25 bp, Homo sapien
cgtttaaactggcttgccgctgtat

SEQ ID NO: 6055439 - DNA, 25 bp, Homo sapien
atcacggacgctacttttttgagct

SEQ ID NO: 6055440 - DNA, 25 bp, Homo sapien
ccagacaggctgctcgtcccctttc

SEQ ID NO: 6055441 - DNA, 25 bp, Homo sapien
ttgagttatcataggagcggtggaa

SEQ ID NO: 6055442 - DNA, 25 bp, Homo sapien
tggcgcggcattataatgaatgccc

SEQ ID NO: 6055443 - DNA, 25 bp, Homo sapien
ttggcggaatcagccacgtccagtc

SEQ ID NO: 6055444 - DNA, 25 bp, Homo sapien
ttttcatctgcgaggtttctcgctc

SEQ ID NO: 6055445 - DNA, 25 bp, Homo sapien
gatctccgtgcccatataccagccg

SEQ ID NO: 6055446 - DNA, 25 bp, Homo sapien
atatcagaaataataggcacgccgt

SEQ ID NO: 6055447 - DNA, 25 bp, Homo sapien
ccagccgttaaatggcgcggcatta

SEQ ID NO: 6055448 - DNA, 25 bp, Homo sapien
gtggaagatatgagtggcagcgggt

SEQ ID NO: 6055449 - DNA, 25 bp, Homo sapien
ataggcacgccgtaccacttcagct

SEQ ID NO: 6055450 - DNA, 25 bp, Homo sapien
aacgcctcgatgtccggatgtgtga

SEQ ID NO: 6055451 - DNA, 25 bp, Homo sapien
tgatccttccataaatccgtattgt

SEQ ID NO: 6055452 - DNA, 25 bp, Homo sapien
tcgatgtccggatgtgtgattggaa

SEQ ID NO: 6055453 - DNA, 25 bp, Homo sapien
ccctttcatgcgaaaaatgagcggc

SEQ ID NO: 6055454 - DNA, 25 bp, Homo sapien
agcttcatatcagaaataataggca

SEQ ID NO: 6055455 - DNA, 25 bp, Homo sapien
atcacaagtgaacgcggcagctcat

SEQ ID NO: 6055456 - DNA, 25 bp, Homo sapien
acttttttgagcttgtcgtaccgct

SEQ ID NO: 6055457 - DNA, 25 bp, Homo sapien
ttccataaatccgtattgtaatcag

SEQ ID NO: 6055458 - DNA, 25 bp, Homo sapien
aggctgctcgtcccctttcatgcga

SEQ ID NO: 6055459 - DNA, 25 bp, Homo sapien
agatatgagtggcagcgggtgaaat

SEQ ID NO: 6055460 - DNA, 25 bp, Homo sapien
cggcttaacgattgagttatcatag

SEQ ID NO: 6055461 - DNA, 25 bp, Homo sapien
ttcaattcaactagcgcttgatcct

SEQ ID NO: 6055462 - DNA, 25 bp, Homo sapien
aaactggcttgccgctgtatgatgg

SEQ ID NO: 6055463 - DNA, 25 bp, Homo sapien
gcggcgatgccgatcacggacgcta

SEQ ID NO: 6055464 - DNA, 25 bp, Homo sapien
tccggatgtgtgattggaacctcaa

SEQ ID NO: 6055465 - DNA, 25 bp, Homo sapien
cgctgtatgatggtcaacgatgctg

SEQ ID NO: 6055466 - DNA, 25 bp, Homo sapien
tctgcgaggtttctcgctccgatct

SEQ ID NO: 6055467 - DNA, 25 bp, Homo sapien
ttgtcgtaccgcttttcatctgcga

SEQ ID NO: 6055468 - DNA, 25 bp, Homo sapien
atgccgatcacggacgctacttttt

SEQ ID NO: 6055469 - DNA, 25 bp, Homo sapien
gttaaatggcgcggcattataatga

SEQ ID NO: 6055470 - DNA, 25 bp, Homo sapien
gctttctgcccgcttcttcctcctg

SEQ ID NO: 6055471 - DNA, 25 bp, Homo sapien
cgcgccagccgagctcttcgcaggc

SEQ ID NO: 6055472 - DNA, 25 bp, Homo sapien
gtgaacgcggcagctcataccagac

SEQ ID NO: 6055473 - DNA, 25 bp, Homo sapien
catataccagccgttaaatggcgcg

SEQ ID NO: 6055474 - DNA, 25 bp, Homo sapien
cagcgggtgaaattggcggaatcag

SEQ ID NO: 6055475 - DNA, 25 bp, Homo sapien
gtattgtaatcagcggcgatgccga

SEQ ID NO: 6055476 - DNA, 25 bp, Homo sapien
taatcagcggcgatgccgatcacgg

SEQ ID NO: 6055477 - DNA, 25 bp, Homo sapien
ttcagctccaaatcagaaaacgcct

SEQ ID NO: 6055478 - DNA, 25 bp, Homo sapien
taccgcttttcatctgcgaggtttc

SEQ ID NO: 6055479 - DNA, 25 bp, Homo sapien
aggtttctcgctccgatctccgtgc

SEQ ID NO: 6055480 - DNA, 25 bp, Homo sapien
ctcgtcccctttcatgcgaaaaatg

SEQ ID NO: 6055481 - DNA, 25 bp, Homo sapien
gaaataataggcacgccgtaccact

SEQ ID NO: 6055482 - DNA, 25 bp, Homo sapien
tttatacgagtgcagcacagcttta

SEQ ID NO: 6055483 - DNA, 25 bp, Homo sapien
gagtgcagcacagctttattcaatt

SEQ ID NO: 6055484 - DNA, 25 bp, Homo sapien
tcagaaaacgcctcgatgtccggat

SEQ ID NO: 6055485 - DNA, 25 bp, Homo sapien
gctcataccagacaggctgctcgtc

SEQ ID NO: 6055486 - DNA, 25 bp, Homo sapien
ttgagcttgtcgtaccgcttttcat

SEQ ID NO: 6055487 - DNA, 25 bp, Homo sapien
gatgctgacaccctgctttttatac

SEQ ID NO: 6055488 - DNA, 25 bp, Homo sapien
aaaaatgagcggcagcaggtcaaaa

SEQ ID NO: 6055489 - DNA, 25 bp, Homo sapien
tcgctccgatctccgtgcccatata

SEQ ID NO: 6055490 - DNA, 25 bp, Homo sapien
agcacagctttattcaattcaacta

SEQ ID NO: 6055491 - DNA, 25 bp, Homo sapien
gtgaaattggcggaatcagccacgt

SEQ ID NO: 6055492 - DNA, 25 bp, Homo sapien
cttcttcctcctgttcttcaaaccg

SEQ ID NO: 6055493 - DNA, 25 bp, Homo sapien
tgtgtgattggaacctcaatcacaa

SEQ ID NO: 6055494 - DNA, 25 bp, Homo sapien
tgcccgcttcttcctcctgttcttc

SEQ ID NO: 6055495 - DNA, 25 bp, Homo sapien
acgccgtaccacttcagctccaaat

SEQ ID NO: 6055496 - DNA, 25 bp, Homo sapien
ccgtcagctttctgcccgcttcttc

SEQ ID NO: 6055497 - DNA, 25 bp, Homo sapien
gacaccctgctttttatacgagtgc

SEQ ID NO: 6055498 - DNA, 25 bp, Homo sapien
ataatgaatgcccccgacctcaagc

SEQ ID NO: 6055499 - DNA, 25 bp, Homo sapien
tccaaatcagaaaacgcctcgatgt

SEQ ID NO: 6055500 - DNA, 25 bp, Homo sapien
ggcattataatgaatgcccccgacc

SEQ ID NO: 6055501 - DNA, 25 bp, Homo sapien
agcggcgccgagcataacagcgaac

SEQ ID NO: 6055502 - DNA, 25 bp, Homo sapien
gcatcaatcagagcgcccagcgcca

SEQ ID NO: 6055503 - DNA, 25 bp, Homo sapien
gcaataggaaggcaaggatgccgag

SEQ ID NO: 6055504 - DNA, 25 bp, Homo sapien
gcgagaaccgggccggcaaatggca

SEQ ID NO: 6055505 - DNA, 25 bp, Homo sapien
gacgaccgttacagaaaagctcgac

SEQ ID NO: 6055506 - DNA, 25 bp, Homo sapien
agaaaagctcgacatcagaaccaag

SEQ ID NO: 6055507 - DNA, 25 bp, Homo sapien
atcgccagcggcgccgagcataaca

SEQ ID NO: 6055508 - DNA, 25 bp, Homo sapien
tcgtataccaagaacgagcaaaaat

SEQ ID NO: 6055509 - DNA, 25 bp, Homo sapien
aaccaagccaatcaatgcgagcacg

SEQ ID NO: 6055510 - DNA, 25 bp, Homo sapien
gagcacgccgtaggcgagaaccggg

SEQ ID NO: 6055511 - DNA, 25 bp, Homo sapien
cgttacagaaaagctcgacatcaga

SEQ ID NO: 6055512 - DNA, 25 bp, Homo sapien
tcaatgcgagcacgccgtaggcgag

SEQ ID NO: 6055513 - DNA, 25 bp, Homo sapien
atcatcgtcggggtcagtcccgcgg

SEQ ID NO: 6055514 - DNA, 25 bp, Homo sapien
aaaggcaatggcgatcatcgtcggg

SEQ ID NO: 6055515 - DNA, 25 bp, Homo sapien
accgggccggcaaatggcagcacaa

SEQ ID NO: 6055516 - DNA, 25 bp, Homo sapien
aaaaatatagctttgtgcctgctga

SEQ ID NO: 6055517 - DNA, 25 bp, Homo sapien
ccaggaactagctcctgtgcgtaga

SEQ ID NO: 6055518 - DNA, 25 bp, Homo sapien
taggaaggcaaggatgccgaggaca

SEQ ID NO: 6055519 - DNA, 25 bp, Homo sapien
atagctttgtgcctgctgaatgctt

SEQ ID NO: 6055520 - DNA, 25 bp, Homo sapien
tcagccgttttcttttgcttgcctg

SEQ ID NO: 6055521 - DNA, 25 bp, Homo sapien
cgggccgccgagaaacgtgccgatc

SEQ ID NO: 6055522 - DNA, 25 bp, Homo sapien
tcgcactcgtataccaagaacgagc

SEQ ID NO: 6055523 - DNA, 25 bp, Homo sapien
tgcgcccatcccgaaggcaagcccg

SEQ ID NO: 6055524 - DNA, 25 bp, Homo sapien
aaaagttaccgatcgcactcgtata

SEQ ID NO: 6055525 - DNA, 25 bp, Homo sapien
accaagaacgagcaaaaatgagaaa

SEQ ID NO: 6055526 - DNA, 25 bp, Homo sapien
tcagtcccgcggcatcaatcagagc

SEQ ID NO: 6055527 - DNA, 25 bp, Homo sapien
agcacaatcgccagcggcgccgagc

SEQ ID NO: 6055528 - DNA, 25 bp, Homo sapien
gttttcttttgcttgcctgatttct

SEQ ID NO: 6055529 - DNA, 25 bp, Homo sapien
accggacattgtgccgatttttcca

SEQ ID NO: 6055530 - DNA, 25 bp, Homo sapien
gccaatcaatgcgagcacgccgtag

SEQ ID NO: 6055531 - DNA, 25 bp, Homo sapien
catcagaaccaagccaatcaatgcg

SEQ ID NO: 6055532 - DNA, 25 bp, Homo sapien
acgtgtaaaagttaccgatcgcact

SEQ ID NO: 6055533 - DNA, 25 bp, Homo sapien
caaaaatgagaaatataataataat

SEQ ID NO: 6055534 - DNA, 25 bp, Homo sapien
gatttctgggcaaggctgccgagac

SEQ ID NO: 6055535 - DNA, 25 bp, Homo sapien
gcgcccagcgccacagcgccgattg

SEQ ID NO: 6055536 - DNA, 25 bp, Homo sapien
ctgctgaatgcttacgtgataggta

SEQ ID NO: 6055537 - DNA, 25 bp, Homo sapien
aaacggtctgcaagcgggccgccga

SEQ ID NO: 6055538 - DNA, 25 bp, Homo sapien
atccatcgcgtaaaacgtgtaaaag

SEQ ID NO: 6055539 - DNA, 25 bp, Homo sapien
actagctcctgtgcgtagacgaccg

SEQ ID NO: 6055540 - DNA, 25 bp, Homo sapien
gtgccgatttttccaggaactagct

SEQ ID NO: 6055541 - DNA, 25 bp, Homo sapien
atttttccaggaactagctcctgtg

SEQ ID NO: 6055542 - DNA, 25 bp, Homo sapien
ttttgcttgcctgatttctgggcaa

SEQ ID NO: 6055543 - DNA, 25 bp, Homo sapien
gccgtaggcgagaaccgggccggca

SEQ ID NO: 6055544 - DNA, 25 bp, Homo sapien
aacgagcaaaaatgagaaatataat

SEQ ID NO: 6055545 - DNA, 25 bp, Homo sapien
gatgccgaggacagggagaaaggca

SEQ ID NO: 6055546 - DNA, 25 bp, Homo sapien
ctgcaagcgggccgccgagaaacgt

SEQ ID NO: 6055547 - DNA, 25 bp, Homo sapien
atacaacagatttggtgatggccgt

SEQ ID NO: 6055548 - DNA, 25 bp, Homo sapien
atcagagcgcccagcgccacagcgc

SEQ ID NO: 6055549 - DNA, 25 bp, Homo sapien
ataggtatccatcgcgtaaaacgtg

SEQ ID NO: 6055550 - DNA, 25 bp, Homo sapien
tcctgtgcgtagacgaccgttacag

SEQ ID NO: 6055551 - DNA, 25 bp, Homo sapien
aatggcagcacaatcgccagcggcg

SEQ ID NO: 6055552 - DNA, 25 bp, Homo sapien
gctcgacatcagaaccaagccaatc

SEQ ID NO: 6055553 - DNA, 25 bp, Homo sapien
atggccgtgttttcagccgttttct

SEQ ID NO: 6055554 - DNA, 25 bp, Homo sapien
agcgttttccaaaacggtctgcaag

SEQ ID NO: 6055555 - DNA, 25 bp, Homo sapien
gacattgtgccgatttttccaggaa

SEQ ID NO: 6055556 - DNA, 25 bp, Homo sapien
gagcagatacaacagatttggtgat

SEQ ID NO: 6055557 - DNA, 25 bp, Homo sapien
taccgatcgcactcgtataccaaga

SEQ ID NO: 6055558 - DNA, 25 bp, Homo sapien
agggagaaaggcaatggcgatcatc

SEQ ID NO: 6055559 - DNA, 25 bp, Homo sapien
taataagagcagatacaacagattt

SEQ ID NO: 6055560 - DNA, 25 bp, Homo sapien
tacgtgataggtatccatcgcgtaa

SEQ ID NO: 6055561 - DNA, 25 bp, Homo sapien
gcgccgaacagcaagaagacaaaaa

SEQ ID NO: 6055562 - DNA, 25 bp, Homo sapien
gccgagaaacgtgccgatcgcgccg

SEQ ID NO: 6055563 - DNA, 25 bp, Homo sapien
cataacagcgaaccgaggataacga

SEQ ID NO: 6055564 - DNA, 25 bp, Homo sapien
ccggcaaatggcagcacaatcgcca

SEQ ID NO: 6055565 - DNA, 25 bp, Homo sapien
ccgatcgcgccgaacagcaagaaga

SEQ ID NO: 6055566 - DNA, 25 bp, Homo sapien
cggttaaaccggacattgtgccgat

SEQ ID NO: 6055567 - DNA, 25 bp, Homo sapien
gaagacaaaaatatagctttgtgcc

SEQ ID NO: 6055568 - DNA, 25 bp, Homo sapien
gccgattgcgcccatcccgaaggca

SEQ ID NO: 6055569 - DNA, 25 bp, Homo sapien
taataataataagagcagatacaac

SEQ ID NO: 6055570 - DNA, 25 bp, Homo sapien
gaaatataataataataagagcaga

SEQ ID NO: 6055571 - DNA, 25 bp, Homo sapien
gaggacagggagaaaggcaatggcg

SEQ ID NO: 6055572 - DNA, 25 bp, Homo sapien
agcgaaccgaggataacgaagcgtt

SEQ ID NO: 6055573 - DNA, 25 bp, Homo sapien
ggcaaggatgccgaggacagggaga

SEQ ID NO: 6055574 - DNA, 25 bp, Homo sapien
cacagcgccgattgcgcccatcccg

SEQ ID NO: 6055575 - DNA, 25 bp, Homo sapien
ttggtgatggccgtgttttcagccg

SEQ ID NO: 6055576 - DNA, 25 bp, Homo sapien
gcgtagacgaccgttacagaaaagc

SEQ ID NO: 6055577 - DNA, 25 bp, Homo sapien
aaacgtgccgatcgcgccgaacagc

SEQ ID NO: 6055578 - DNA, 25 bp, Homo sapien
gccgagcataacagcgaaccgagga

SEQ ID NO: 6055579 - DNA, 25 bp, Homo sapien
aatgcttacgtgataggtatccatc

SEQ ID NO: 6055580 - DNA, 25 bp, Homo sapien
atggcgatcatcgtcggggtcagtc

SEQ ID NO: 6055581 - DNA, 25 bp, Homo sapien
agcgccacagcgccgattgcgccca

SEQ ID NO: 6055582 - DNA, 25 bp, Homo sapien
cccgcggcatcaatcagagcgccca

SEQ ID NO: 6055583 - DNA, 25 bp, Homo sapien
catcccgaaggcaagcccgacggtt

SEQ ID NO: 6055584 - DNA, 25 bp, Homo sapien
tttccaaaacggtctgcaagcgggc

SEQ ID NO: 6055585 - DNA, 25 bp, Homo sapien
ttgtgcctgctgaatgcttacgtga

SEQ ID NO: 6055586 - DNA, 25 bp, Homo sapien
gtcggggtcagtcccgcggcatcaa

SEQ ID NO: 6055587 - DNA, 25 bp, Homo sapien
cagatttggtgatggccgtgttttc

SEQ ID NO: 6055588 - DNA, 25 bp, Homo sapien
ttgcctgatttctgggcaaggctgc

SEQ ID NO: 6055589 - DNA, 25 bp, Homo sapien
aaccttgaggcgctctggctcctga

SEQ ID NO: 6055590 - DNA, 25 bp, Homo sapien
ccatcggatgctccggaatatcagc

SEQ ID NO: 6055591 - DNA, 25 bp, Homo sapien
tgccgaaccggattggcgcagctcg

SEQ ID NO: 6055592 - DNA, 25 bp, Homo sapien
cgtaccggtggcaataatgtcgccc

SEQ ID NO: 6055593 - DNA, 25 bp, Homo sapien
ggctctttacgatatcaccatgccc

SEQ ID NO: 6055594 - DNA, 25 bp, Homo sapien
cagctcgccgttgactcttgtttca

SEQ ID NO: 6055595 - DNA, 25 bp, Homo sapien
tgagagggtttcaattaattccgga

SEQ ID NO: 6055596 - DNA, 25 bp, Homo sapien
gtttttgccgatgcagatgatattt

SEQ ID NO: 6055597 - DNA, 25 bp, Homo sapien
aataatgtcgcccgcttcaagcgtc

SEQ ID NO: 6055598 - DNA, 25 bp, Homo sapien
ctccctcataatcaagctgagaggt

SEQ ID NO: 6055599 - DNA, 25 bp, Homo sapien
ggaatatcagcctcgctccccattt

SEQ ID NO: 6055600 - DNA, 25 bp, Homo sapien
atatcaattttgtcacctgaccgca

SEQ ID NO: 6055601 - DNA, 25 bp, Homo sapien
agcctcgctccccatttcaatcgcg

SEQ ID NO: 6055602 - DNA, 25 bp, Homo sapien
tgcttatgccttttttgcagatcac

SEQ ID NO: 6055603 - DNA, 25 bp, Homo sapien
ggtggcaataatgtcgcccgcttca

SEQ ID NO: 6055604 - DNA, 25 bp, Homo sapien
cgtgatatcattcacaatcgtatat

SEQ ID NO: 6055605 - DNA, 25 bp, Homo sapien
aagcgtcatcccctttgagagggtt

SEQ ID NO: 6055606 - DNA, 25 bp, Homo sapien
agatcacgcgccgtgatatcattca

SEQ ID NO: 6055607 - DNA, 25 bp, Homo sapien
ccgctttttccgatcacgacagcaa

SEQ ID NO: 6055608 - DNA, 25 bp, Homo sapien
atcaattgtaatatcaattttgtca

SEQ ID NO: 6055609 - DNA, 25 bp, Homo sapien
gctcctgaatagatgatttatgtac

SEQ ID NO: 6055610 - DNA, 25 bp, Homo sapien
caagctgagaggtaacctcttcatg

SEQ ID NO: 6055611 - DNA, 25 bp, Homo sapien
ttttccgatcacgacagcaagttct

SEQ ID NO: 6055612 - DNA, 25 bp, Homo sapien
gaaaagatcatatcgcttgccgaac

SEQ ID NO: 6055613 - DNA, 25 bp, Homo sapien
gtcgcccgcttcaagcgtcatcccc

SEQ ID NO: 6055614 - DNA, 25 bp, Homo sapien
cgtatatccgaaaacatggtcatat

SEQ ID NO: 6055615 - DNA, 25 bp, Homo sapien
cataatcaagctgagaggtaacctc

SEQ ID NO: 6055616 - DNA, 25 bp, Homo sapien
gctctggctcctgaatagatgattt

SEQ ID NO: 6055617 - DNA, 25 bp, Homo sapien
cacaatcgtatatccgaaaacatgg

SEQ ID NO: 6055618 - DNA, 25 bp, Homo sapien
cgagtcccgctttttccgatcacga

SEQ ID NO: 6055619 - DNA, 25 bp, Homo sapien
tatcaccatgccccgtaaccgttac

SEQ ID NO: 6055620 - DNA, 25 bp, Homo sapien
atgctccggaatatcagcctcgctc

SEQ ID NO: 6055621 - DNA, 25 bp, Homo sapien
caattaattccggaatggaaaagat

SEQ ID NO: 6055622 - DNA, 25 bp, Homo sapien
tggaggcgtaaaccccttgccgaca

SEQ ID NO: 6055623 - DNA, 25 bp, Homo sapien
ttttgcagatcacgcgccgtgatat

SEQ ID NO: 6055624 - DNA, 25 bp, Homo sapien
aaaaactgcttatgccttttttgca

SEQ ID NO: 6055625 - DNA, 25 bp, Homo sapien
gagaggtaacctcttcatggctctt

SEQ ID NO: 6055626 - DNA, 25 bp, Homo sapien
gaatagatgatttatgtacaagcac

SEQ ID NO: 6055627 - DNA, 25 bp, Homo sapien
acgcgccgtgatatcattcacaatc

SEQ ID NO: 6055628 - DNA, 25 bp, Homo sapien
gaggcgctctggctcctgaatagat

SEQ ID NO: 6055629 - DNA, 25 bp, Homo sapien
gacatgtcgtatccaagctttttcc

SEQ ID NO: 6055630 - DNA, 25 bp, Homo sapien
gatcacgacagcaagttctccctca

SEQ ID NO: 6055631 - DNA, 25 bp, Homo sapien
atgatttatgtacaagcacgggccc

SEQ ID NO: 6055632 - DNA, 25 bp, Homo sapien
cttcatggctctttacgatatcacc

SEQ ID NO: 6055633 - DNA, 25 bp, Homo sapien
attggcgcagctcgccgttgactct

SEQ ID NO: 6055634 - DNA, 25 bp, Homo sapien
aaccccttgccgacaccagacggcg

SEQ ID NO: 6055635 - DNA, 25 bp, Homo sapien
attgtaatatcaattttgtcacctg

SEQ ID NO: 6055636 - DNA, 25 bp, Homo sapien
attttgtcacctgaccgcaagaatt

SEQ ID NO: 6055637 - DNA, 25 bp, Homo sapien
cgacagcaagttctccctcataatc

SEQ ID NO: 6055638 - DNA, 25 bp, Homo sapien
ttgccgacaccagacggcgtaccgg

SEQ ID NO: 6055639 - DNA, 25 bp, Homo sapien
gaccgcaagaattttggaggcgtaa

SEQ ID NO: 6055640 - DNA, 25 bp, Homo sapien
cgggccccatcggacatgtcgtatc

SEQ ID NO: 6055641 - DNA, 25 bp, Homo sapien
aacatggtcatatgcatcttctttt

SEQ ID NO: 6055642 - DNA, 25 bp, Homo sapien
tgccttttttgcagatcacgcgccg

SEQ ID NO: 6055643 - DNA, 25 bp, Homo sapien
tgcatcttcttttgaaatgcgagtc

SEQ ID NO: 6055644 - DNA, 25 bp, Homo sapien
gacggcgtaccggtggcaataatgt

SEQ ID NO: 6055645 - DNA, 25 bp, Homo sapien
aagcacgggccccatcggacatgtc

SEQ ID NO: 6055646 - DNA, 25 bp, Homo sapien
ttacgatatcaccatgccccgtaac

SEQ ID NO: 6055647 - DNA, 25 bp, Homo sapien
tcgtatccaagctttttccgataaa

SEQ ID NO: 6055648 - DNA, 25 bp, Homo sapien
caatcgcgtgatcccggtagttttt

SEQ ID NO: 6055649 - DNA, 25 bp, Homo sapien
taaataccatcggatgctccggaat

SEQ ID NO: 6055650 - DNA, 25 bp, Homo sapien
gatcatatcgcttgccgaaccggat

SEQ ID NO: 6055651 - DNA, 25 bp, Homo sapien
gactcttgtttcaaccttgaggcgc

SEQ ID NO: 6055652 - DNA, 25 bp, Homo sapien
gcgtaaaccccttgccgacaccaga

SEQ ID NO: 6055653 - DNA, 25 bp, Homo sapien
tccgaaaacatggtcatatgcatct

SEQ ID NO: 6055654 - DNA, 25 bp, Homo sapien
taacctcttcatggctctttacgat

SEQ ID NO: 6055655 - DNA, 25 bp, Homo sapien
acaccagacggcgtaccggtggcaa

SEQ ID NO: 6055656 - DNA, 25 bp, Homo sapien
catttcaatcgcgtgatcccggtag

SEQ ID NO: 6055657 - DNA, 25 bp, Homo sapien
ccgataaaaaactgcttatgccttt

SEQ ID NO: 6055658 - DNA, 25 bp, Homo sapien
tcacctgaccgcaagaattttggag

SEQ ID NO: 6055659 - DNA, 25 bp, Homo sapien
ggaatggaaaagatcatatcgcttg

SEQ ID NO: 6055660 - DNA, 25 bp, Homo sapien
aattccggaatggaaaagatcatat

SEQ ID NO: 6055661 - DNA, 25 bp, Homo sapien
gtgatcccggtagtttttgccgatg

SEQ ID NO: 6055662 - DNA, 25 bp, Homo sapien
ttcttttgaaatgcgagtcccgctt

SEQ ID NO: 6055663 - DNA, 25 bp, Homo sapien
ccggtagtttttgccgatgcagatg

SEQ ID NO: 6055664 - DNA, 25 bp, Homo sapien
atcattcacaatcgtatatccgaaa

SEQ ID NO: 6055665 - DNA, 25 bp, Homo sapien
caagttctccctcataatcaagctg

SEQ ID NO: 6055666 - DNA, 25 bp, Homo sapien
cgcttcaagcgtcatcccctttgag

SEQ ID NO: 6055667 - DNA, 25 bp, Homo sapien
tgtttcaaccttgaggcgctctggc

SEQ ID NO: 6055668 - DNA, 25 bp, Homo sapien
attttgtaaataccatcggatgctc

SEQ ID NO: 6055669 - DNA, 25 bp, Homo sapien
gtcatatgcatcttcttttgaaatg

SEQ ID NO: 6055670 - DNA, 25 bp, Homo sapien
catcccctttgagagggtttcaatt

SEQ ID NO: 6055671 - DNA, 25 bp, Homo sapien
accggattggcgcagctcgccgttg

SEQ ID NO: 6055672 - DNA, 25 bp, Homo sapien
gctccccatttcaatcgcgtgatcc

SEQ ID NO: 6055673 - DNA, 25 bp, Homo sapien
tgaaatgcgagtcccgctttttccg

SEQ ID NO: 6055674 - DNA, 25 bp, Homo sapien
gccgttgactcttgtttcaaccttg

SEQ ID NO: 6055675 - DNA, 25 bp, Homo sapien
ccggcgattttgtaaataccatcgg

SEQ ID NO: 6055676 - DNA, 25 bp, Homo sapien
ttttccgataaaaaactgcttatgc

SEQ ID NO: 6055677 - DNA, 25 bp, Homo sapien
ccatcggacatgtcgtatccaagct

SEQ ID NO: 6055678 - DNA, 25 bp, Homo sapien
atcgcttgccgaaccggattggcgc

SEQ ID NO: 6055679 - DNA, 25 bp, Homo sapien
tatgtacaagcacgggccccatcgg

SEQ ID NO: 6055680 - DNA, 25 bp, Homo sapien
tgcgtacatgagcagttcatcaagg

SEQ ID NO: 6055681 - DNA, 25 bp, Homo sapien
cgtcattgtgaacgctttatttacg

SEQ ID NO: 6055682 - DNA, 25 bp, Homo sapien
gcccgtccgatatgcgtacatgagc

SEQ ID NO: 6055683 - DNA, 25 bp, Homo sapien
catcaatccggcagcaccgcccgtc

SEQ ID NO: 6055684 - DNA, 25 bp, Homo sapien
gagcggctttcaccgttttttgaga

SEQ ID NO: 6055685 - DNA, 25 bp, Homo sapien
cattacctgacggggaatgcggttt

SEQ ID NO: 6055686 - DNA, 25 bp, Homo sapien
gatattgaaatacatcgtgctgctt

SEQ ID NO: 6055687 - DNA, 25 bp, Homo sapien
tgtaaaggtccgatacgcatgatca

SEQ ID NO: 6055688 - DNA, 25 bp, Homo sapien
ctgcttgtttgagctgatcttgttt

SEQ ID NO: 6055689 - DNA, 25 bp, Homo sapien
ttccaatgtaaaggtccgatacgca

SEQ ID NO: 6055690 - DNA, 25 bp, Homo sapien
ctcccacgtcattgtgaacgcttta

SEQ ID NO: 6055691 - DNA, 25 bp, Homo sapien
cttccatagatgttgtttaccgtta

SEQ ID NO: 6055692 - DNA, 25 bp, Homo sapien
tttttggagatcagcctctgtatag

SEQ ID NO: 6055693 - DNA, 25 bp, Homo sapien
tgtcagtatcggcagcagcatcaat

SEQ ID NO: 6055694 - DNA, 25 bp, Homo sapien
tgtgaacgctttatttacggtgcct

SEQ ID NO: 6055695 - DNA, 25 bp, Homo sapien
atcaaggtcatcatacggcttggcg

SEQ ID NO: 6055696 - DNA, 25 bp, Homo sapien
tgtgcggcaataaactcccgaaaag

SEQ ID NO: 6055697 - DNA, 25 bp, Homo sapien
ggcatcctgacactcttcaaggtag

SEQ ID NO: 6055698 - DNA, 25 bp, Homo sapien
tccggcagcaccgcccgtccgatat

SEQ ID NO: 6055699 - DNA, 25 bp, Homo sapien
catgagcagttcatcaaggtcatca

SEQ ID NO: 6055700 - DNA, 25 bp, Homo sapien
tttctaaaacagcccggtgcaaatg

SEQ ID NO: 6055701 - DNA, 25 bp, Homo sapien
gatcacttaagaagcgaaccagctg

SEQ ID NO: 6055702 - DNA, 25 bp, Homo sapien
aaaagcgatatactcccacgtcatt

SEQ ID NO: 6055703 - DNA, 25 bp, Homo sapien
gtaaacatgatcagctttagcttca

SEQ ID NO: 6055704 - DNA, 25 bp, Homo sapien
atgatcaaaagccttccatagatgt

SEQ ID NO: 6055705 - DNA, 25 bp, Homo sapien
tcaccgttttttgagaatactgcgg

SEQ ID NO: 6055706 - DNA, 25 bp, Homo sapien
ccgatatgcgtacatgagcagttca

SEQ ID NO: 6055707 - DNA, 25 bp, Homo sapien
tgcttcaaaagcgatatactcccac

SEQ ID NO: 6055708 - DNA, 25 bp, Homo sapien
ttgctgcattacctgacggggaatg

SEQ ID NO: 6055709 - DNA, 25 bp, Homo sapien
ctcttcaaggtaggcttctgcttca

SEQ ID NO: 6055710 - DNA, 25 bp, Homo sapien
gatatactcccacgtcattgtgaac

SEQ ID NO: 6055711 - DNA, 25 bp, Homo sapien
atacgcatgatcaaaagccttccat

SEQ ID NO: 6055712 - DNA, 25 bp, Homo sapien
ttgttttcggcgtgtcagtatcggc

SEQ ID NO: 6055713 - DNA, 25 bp, Homo sapien
agacggctgcttgtttgagctgatc

SEQ ID NO: 6055714 - DNA, 25 bp, Homo sapien
tgccaagatcacttaagaagcgaac

SEQ ID NO: 6055715 - DNA, 25 bp, Homo sapien
ggtgcctttttggagatcagcctct

SEQ ID NO: 6055716 - DNA, 25 bp, Homo sapien
tagatgttgtttaccgttatttgtc

SEQ ID NO: 6055717 - DNA, 25 bp, Homo sapien
ctctgtgagagcgaagtgatattga

SEQ ID NO: 6055718 - DNA, 25 bp, Homo sapien
cgagagagacggctgcttgtttgag

SEQ ID NO: 6055719 - DNA, 25 bp, Homo sapien
tatggccaagccgagagagacggct

SEQ ID NO: 6055720 - DNA, 25 bp, Homo sapien
gccgaattgctgcattacctgacgg

SEQ ID NO: 6055721 - DNA, 25 bp, Homo sapien
gaaatacatcgtgctgcttcgcccg

SEQ ID NO: 6055722 - DNA, 25 bp, Homo sapien
ttcgctttccaatgtaaaggtccga

SEQ ID NO: 6055723 - DNA, 25 bp, Homo sapien
ctttttgtgcggcaataaactcccg

SEQ ID NO: 6055724 - DNA, 25 bp, Homo sapien
aatgaagagcggctttcaccgtttt

SEQ ID NO: 6055725 - DNA, 25 bp, Homo sapien
cagctgtatggccaagccgagagag

SEQ ID NO: 6055726 - DNA, 25 bp, Homo sapien
gatctgtgccaagatcacttaagaa

SEQ ID NO: 6055727 - DNA, 25 bp, Homo sapien
aaggtaggcttctgcttcaaaagcg

SEQ ID NO: 6055728 - DNA, 25 bp, Homo sapien
aaaagccttccatagatgttgttta

SEQ ID NO: 6055729 - DNA, 25 bp, Homo sapien
cgtcttctttttgtgcggcaataaa

SEQ ID NO: 6055730 - DNA, 25 bp, Homo sapien
ttttttgagaatactgcggaaatag

SEQ ID NO: 6055731 - DNA, 25 bp, Homo sapien
gaatgcggtttttttgctgatctgt

SEQ ID NO: 6055732 - DNA, 25 bp, Homo sapien
atacggcttggcgtcttctttttgt

SEQ ID NO: 6055733 - DNA, 25 bp, Homo sapien
agcctctgtatagccgaattgctgc

SEQ ID NO: 6055734 - DNA, 25 bp, Homo sapien
gagatcagcctctgtatagccgaat

SEQ ID NO: 6055735 - DNA, 25 bp, Homo sapien
ggtccgatacgcatgatcaaaagcc

SEQ ID NO: 6055736 - DNA, 25 bp, Homo sapien
cagttcatcaaggtcatcatacggc

SEQ ID NO: 6055737 - DNA, 25 bp, Homo sapien
cagcccggtgcaaatgaagagcggc

SEQ ID NO: 6055738 - DNA, 25 bp, Homo sapien
cgaagtgatattgaaatacatcgtg

SEQ ID NO: 6055739 - DNA, 25 bp, Homo sapien
ccaagccgagagagacggctgcttg

SEQ ID NO: 6055740 - DNA, 25 bp, Homo sapien
ctgacactcttcaaggtaggcttct

SEQ ID NO: 6055741 - DNA, 25 bp, Homo sapien
tttgctgatctgtgccaagatcact

SEQ ID NO: 6055742 - DNA, 25 bp, Homo sapien
agcaccgcccgtccgatatgcgtac

SEQ ID NO: 6055743 - DNA, 25 bp, Homo sapien
gagaatactgcggaaatagcggcaa

SEQ ID NO: 6055744 - DNA, 25 bp, Homo sapien
gcttggcgtcttctttttgtgcggc

SEQ ID NO: 6055745 - DNA, 25 bp, Homo sapien
atttacggtgcctttttggagatca

SEQ ID NO: 6055746 - DNA, 25 bp, Homo sapien
tgagagcgaagtgatattgaaatac

SEQ ID NO: 6055747 - DNA, 25 bp, Homo sapien
cagcagcatcaatccggcagcaccg

SEQ ID NO: 6055748 - DNA, 25 bp, Homo sapien
taaaacagcccggtgcaaatgaaga

SEQ ID NO: 6055749 - DNA, 25 bp, Homo sapien
gtcatcatacggcttggcgtcttct

SEQ ID NO: 6055750 - DNA, 25 bp, Homo sapien
tgtatagccgaattgctgcattacc

SEQ ID NO: 6055751 - DNA, 25 bp, Homo sapien
ggcttctgcttcaaaagcgatatac

SEQ ID NO: 6055752 - DNA, 25 bp, Homo sapien
catcgtgctgcttcgcccggatttt

SEQ ID NO: 6055753 - DNA, 25 bp, Homo sapien
ggtgcaaatgaagagcggctttcac

SEQ ID NO: 6055754 - DNA, 25 bp, Homo sapien
gcgaaccagctgtatggccaagccg

SEQ ID NO: 6055755 - DNA, 25 bp, Homo sapien
ggtttttttgctgatctgtgccaag

SEQ ID NO: 6055756 - DNA, 25 bp, Homo sapien
atttgtcctttggtaaacatgatca

SEQ ID NO: 6055757 - DNA, 25 bp, Homo sapien
aaatagcggcaaggcatcctgacac

SEQ ID NO: 6055758 - DNA, 25 bp, Homo sapien
cggcaaggcatcctgacactcttca

SEQ ID NO: 6055759 - DNA, 25 bp, Homo sapien
tcggcgtgtcagtatcggcagcagc

SEQ ID NO: 6055760 - DNA, 25 bp, Homo sapien
cgttatttgtcctttggtaaacatg

SEQ ID NO: 6055761 - DNA, 25 bp, Homo sapien
gctgatcttgttttcggcgtgtcag

SEQ ID NO: 6055762 - DNA, 25 bp, Homo sapien
gtttgagctgatcttgttttcggcg

SEQ ID NO: 6055763 - DNA, 25 bp, Homo sapien
taagaagcgaaccagctgtatggcc

SEQ ID NO: 6055764 - DNA, 25 bp, Homo sapien
tatcggcagcagcatcaatccggca

SEQ ID NO: 6055765 - DNA, 25 bp, Homo sapien
cctttggtaaacatgatcagcttta

SEQ ID NO: 6055766 - DNA, 25 bp, Homo sapien
gctgcttcgcccggattttttctaa

SEQ ID NO: 6055767 - DNA, 25 bp, Homo sapien
actgcggaaatagcggcaaggcatc

SEQ ID NO: 6055768 - DNA, 25 bp, Homo sapien
cggggaatgcggtttttttgctgat

SEQ ID NO: 6055769 - DNA, 25 bp, Homo sapien
atcacaaaggctgctgtttctaggc

SEQ ID NO: 6055770 - DNA, 25 bp, Homo sapien
cgccagcgctactgctgctaagatg

SEQ ID NO: 6055771 - DNA, 25 bp, Homo sapien
ttcctttaataacttcacaaacatg

SEQ ID NO: 6055772 - DNA, 25 bp, Homo sapien
aatggataaagtgctcagaaacaac

SEQ ID NO: 6055773 - DNA, 25 bp, Homo sapien
tccgtcaagtccgccgatcttcggg

SEQ ID NO: 6055774 - DNA, 25 bp, Homo sapien
tttttcccacctgacataaaccagc

SEQ ID NO: 6055775 - DNA, 25 bp, Homo sapien
aaagaaattgcaaataaagagccaa

SEQ ID NO: 6055776 - DNA, 25 bp, Homo sapien
gatatacagcaaatagatcgcgcca

SEQ ID NO: 6055777 - DNA, 25 bp, Homo sapien
taaagcaagcttcactccgacccag

SEQ ID NO: 6055778 - DNA, 25 bp, Homo sapien
tgctgctaagatggaatcaacagca

SEQ ID NO: 6055779 - DNA, 25 bp, Homo sapien
cttcacaaacatggaagccgcaaac

SEQ ID NO: 6055780 - DNA, 25 bp, Homo sapien
aataaagagccaaatcgcagaacaa

SEQ ID NO: 6055781 - DNA, 25 bp, Homo sapien
attgcaaataaagagccaaatcgca

SEQ ID NO: 6055782 - DNA, 25 bp, Homo sapien
cgcgattgctgctaagacaccccag

SEQ ID NO: 6055783 - DNA, 25 bp, Homo sapien
aaggctgctgtttctaggcttggac

SEQ ID NO: 6055784 - DNA, 25 bp, Homo sapien
caaaaaccgctttgcttcgtctctt

SEQ ID NO: 6055785 - DNA, 25 bp, Homo sapien
cccacctgacataaaccagccgcaa

SEQ ID NO: 6055786 - DNA, 25 bp, Homo sapien
cgatgggcaagcgtatataaagcaa

SEQ ID NO: 6055787 - DNA, 25 bp, Homo sapien
aaacatggaagccgcaaaccgcatg

SEQ ID NO: 6055788 - DNA, 25 bp, Homo sapien
ggaatcaacagcaaacgcgatatct

SEQ ID NO: 6055789 - DNA, 25 bp, Homo sapien
aaccagccgcaaaccgcgattgctg

SEQ ID NO: 6055790 - DNA, 25 bp, Homo sapien
tgacataaaccagccgcaaaccgcg

SEQ ID NO: 6055791 - DNA, 25 bp, Homo sapien
cagtcggccaaaaaccgctttgctt

SEQ ID NO: 6055792 - DNA, 25 bp, Homo sapien
tgccatacgttgaccaagaaagaaa

SEQ ID NO: 6055793 - DNA, 25 bp, Homo sapien
tctaggcttggacgttcctttaata

SEQ ID NO: 6055794 - DNA, 25 bp, Homo sapien
caaacgcgatatctgccagttcaac

SEQ ID NO: 6055795 - DNA, 25 bp, Homo sapien
cgctttgcttcgtctctttatgtgt

SEQ ID NO: 6055796 - DNA, 25 bp, Homo sapien
tgctgagatatacagcaaatagatc

SEQ ID NO: 6055797 - DNA, 25 bp, Homo sapien
cactccgacccagccgacaatcaca

SEQ ID NO: 6055798 - DNA, 25 bp, Homo sapien
cgagaaattgtcctccgtcaagtcc

SEQ ID NO: 6055799 - DNA, 25 bp, Homo sapien
ccgctatgtcgcgatgggcaagcgt

SEQ ID NO: 6055800 - DNA, 25 bp, Homo sapien
ggcaagcgtatataaagcaagcttc

SEQ ID NO: 6055801 - DNA, 25 bp, Homo sapien
tagatcgcgccaatcgcttgaacct

SEQ ID NO: 6055802 - DNA, 25 bp, Homo sapien
cttaaatacatatcttttcaataag

SEQ ID NO: 6055803 - DNA, 25 bp, Homo sapien
acccagccgacaatcacaaaggctg

SEQ ID NO: 6055804 - DNA, 25 bp, Homo sapien
taaagtgctcagaaacaaccgctat

SEQ ID NO: 6055805 - DNA, 25 bp, Homo sapien
caggaagtgtaaccgccagcgctac

SEQ ID NO: 6055806 - DNA, 25 bp, Homo sapien
gcttcgtctctttatgtgtgtcttc

SEQ ID NO: 6055807 - DNA, 25 bp, Homo sapien
taagatggaatcaacagcaaacgcg

SEQ ID NO: 6055808 - DNA, 25 bp, Homo sapien
tgaacctgccatacgttgaccaaga

SEQ ID NO: 6055809 - DNA, 25 bp, Homo sapien
ctaagacaccccagaatatcagctt

SEQ ID NO: 6055810 - DNA, 25 bp, Homo sapien
cagcaaatagatcgcgccaatcgct

SEQ ID NO: 6055811 - DNA, 25 bp, Homo sapien
aacagcaaacgcgatatctgccagt

SEQ ID NO: 6055812 - DNA, 25 bp, Homo sapien
atcgcttgaacctgccatacgttga

SEQ ID NO: 6055813 - DNA, 25 bp, Homo sapien
cggctgttttttcccacctgacata

SEQ ID NO: 6055814 - DNA, 25 bp, Homo sapien
tgccagttcaacttttaaaacagtc

SEQ ID NO: 6055815 - DNA, 25 bp, Homo sapien
caataagtggcttgctgagatatac

SEQ ID NO: 6055816 - DNA, 25 bp, Homo sapien
ttgctgctaagacaccccagaatat

SEQ ID NO: 6055817 - DNA, 25 bp, Homo sapien
gctgtttctaggcttggacgttcct

SEQ ID NO: 6055818 - DNA, 25 bp, Homo sapien
tcagcttccatgttccagaatggat

SEQ ID NO: 6055819 - DNA, 25 bp, Homo sapien
cagtccgatgataccgccggccaaa

SEQ ID NO: 6055820 - DNA, 25 bp, Homo sapien
ggagtgatgtcccaggaagtgtaac

SEQ ID NO: 6055821 - DNA, 25 bp, Homo sapien
agaatatcagcttccatgttccaga

SEQ ID NO: 6055822 - DNA, 25 bp, Homo sapien
tatgtgtgtcttctttcttaaatac

SEQ ID NO: 6055823 - DNA, 25 bp, Homo sapien
ccgcatgatcaccagtccgatgata

SEQ ID NO: 6055824 - DNA, 25 bp, Homo sapien
gctcagaaacaaccgctatgtcgcg

SEQ ID NO: 6055825 - DNA, 25 bp, Homo sapien
cgatgataccgccggccaaaatgac

SEQ ID NO: 6055826 - DNA, 25 bp, Homo sapien
aagcttcactccgacccagccgaca

SEQ ID NO: 6055827 - DNA, 25 bp, Homo sapien
taataacttcacaaacatggaagcc

SEQ ID NO: 6055828 - DNA, 25 bp, Homo sapien
acgttgaccaagaaagaaattgcaa

SEQ ID NO: 6055829 - DNA, 25 bp, Homo sapien
caccccagaatatcagcttccatgt

SEQ ID NO: 6055830 - DNA, 25 bp, Homo sapien
tgcaccctccggctgttttttccca

SEQ ID NO: 6055831 - DNA, 25 bp, Homo sapien
gatcaccagtccgatgataccgccg

SEQ ID NO: 6055832 - DNA, 25 bp, Homo sapien
gcaaaccgcatgatcaccagtccga

SEQ ID NO: 6055833 - DNA, 25 bp, Homo sapien
gccgatcttcgggagtgatgtccca

SEQ ID NO: 6055834 - DNA, 25 bp, Homo sapien
taccgccggccaaaatgacgagaaa

SEQ ID NO: 6055835 - DNA, 25 bp, Homo sapien
accaagaaagaaattgcaaataaag

SEQ ID NO: 6055836 - DNA, 25 bp, Homo sapien
gtgtaaccgccagcgctactgctgc

SEQ ID NO: 6055837 - DNA, 25 bp, Homo sapien
gatatctgccagttcaacttttaaa

SEQ ID NO: 6055838 - DNA, 25 bp, Homo sapien
atgtcccaggaagtgtaaccgccag

SEQ ID NO: 6055839 - DNA, 25 bp, Homo sapien
ggaagccgcaaaccgcatgatcacc

SEQ ID NO: 6055840 - DNA, 25 bp, Homo sapien
gtggcttgctgagatatacagcaaa

SEQ ID NO: 6055841 - DNA, 25 bp, Homo sapien
gcaaaccgcgattgctgctaagaca

SEQ ID NO: 6055842 - DNA, 25 bp, Homo sapien
tctttcttaaatacatatcttttca

SEQ ID NO: 6055843 - DNA, 25 bp, Homo sapien
tctctttatgtgtgtcttctttctt

SEQ ID NO: 6055844 - DNA, 25 bp, Homo sapien
attgtcctccgtcaagtccgccgat

SEQ ID NO: 6055845 - DNA, 25 bp, Homo sapien
aaatgacgagaaattgtcctccgtc

SEQ ID NO: 6055846 - DNA, 25 bp, Homo sapien
aaacaaccgctatgtcgcgatgggc

SEQ ID NO: 6055847 - DNA, 25 bp, Homo sapien
gtgtcttctttcttaaatacatatc

SEQ ID NO: 6055848 - DNA, 25 bp, Homo sapien
tggacgttcctttaataacttcaca

SEQ ID NO: 6055849 - DNA, 25 bp, Homo sapien
gcgccaatcgcttgaacctgccata

SEQ ID NO: 6055850 - DNA, 25 bp, Homo sapien
cgctactgctgctaagatggaatca

SEQ ID NO: 6055851 - DNA, 25 bp, Homo sapien
ttccagaatggataaagtgctcaga

SEQ ID NO: 6055852 - DNA, 25 bp, Homo sapien
cgtatataaagcaagcttcactccg

SEQ ID NO: 6055853 - DNA, 25 bp, Homo sapien
tgtcgcgatgggcaagcgtatataa

SEQ ID NO: 6055854 - DNA, 25 bp, Homo sapien
cggccaaaatgacgagaaattgtcc

SEQ ID NO: 6055855 - DNA, 25 bp, Homo sapien
tcttttcaataagtggcttgctgag

SEQ ID NO: 6055856 - DNA, 25 bp, Homo sapien
ccgacaatcacaaaggctgctgttt

SEQ ID NO: 6055857 - DNA, 25 bp, Homo sapien
tcttcgggagtgatgtcccaggaag

SEQ ID NO: 6055858 - DNA, 25 bp, Homo sapien
aagtccgccgatcttcgggagtgat

SEQ ID NO: 6055859 - DNA, 25 bp, Homo sapien
tccatgttccagaatggataaagtg

SEQ ID NO: 6055860 - DNA, 25 bp, Homo sapien
tacatatcttttcaataagtggctt

SEQ ID NO: 6055861 - DNA, 25 bp, Homo sapien
cgcaagcttaagatccttgcattgt

SEQ ID NO: 6055862 - DNA, 25 bp, Homo sapien
ctctaggaccgcatcaataatagct

SEQ ID NO: 6055863 - DNA, 25 bp, Homo sapien
ttaatagcggaaccatgccgggatg

SEQ ID NO: 6055864 - DNA, 25 bp, Homo sapien
agaagacgtaaacgctccgctcact

SEQ ID NO: 6055865 - DNA, 25 bp, Homo sapien
ccaattcggcggcgcgtctcgcttt

SEQ ID NO: 6055866 - DNA, 25 bp, Homo sapien
gaccgcatcaataatagctctgaac

SEQ ID NO: 6055867 - DNA, 25 bp, Homo sapien
cgctcgccccccgccttgggcaccg

SEQ ID NO: 6055868 - DNA, 25 bp, Homo sapien
gggcaccgttcggatgtccatgtac

SEQ ID NO: 6055869 - DNA, 25 bp, Homo sapien
gcggaaccatgccgggatgaatgcc

SEQ ID NO: 6055870 - DNA, 25 bp, Homo sapien
cacgcattaatagcggaaccatgcc

SEQ ID NO: 6055871 - DNA, 25 bp, Homo sapien
acagcaaatgtttggttaaaagcat

SEQ ID NO: 6055872 - DNA, 25 bp, Homo sapien
cataacgtccaagccgtaagcgaag

SEQ ID NO: 6055873 - DNA, 25 bp, Homo sapien
gatcttctgcaaggccttgcataac

SEQ ID NO: 6055874 - DNA, 25 bp, Homo sapien
ctgctcttggaagcgcaaccgaacc

SEQ ID NO: 6055875 - DNA, 25 bp, Homo sapien
gatccttgcattgttcggctttttc

SEQ ID NO: 6055876 - DNA, 25 bp, Homo sapien
ggatgtccatgtacgcctcctccgg

SEQ ID NO: 6055877 - DNA, 25 bp, Homo sapien
aatagctctgaacgctcgccccccg

SEQ ID NO: 6055878 - DNA, 25 bp, Homo sapien
atcaataatagctctgaacgctcgc

SEQ ID NO: 6055879 - DNA, 25 bp, Homo sapien
ttcatcaatcggctgggcctctagg

SEQ ID NO: 6055880 - DNA, 25 bp, Homo sapien
cgggatgaatgcctgctgacggaac

SEQ ID NO: 6055881 - DNA, 25 bp, Homo sapien
cgcaatatcggtttaattttccgag

SEQ ID NO: 6055882 - DNA, 25 bp, Homo sapien
aaagcatcctctctcacacattctt

SEQ ID NO: 6055883 - DNA, 25 bp, Homo sapien
gtaaacgctccgctcactgctggat

SEQ ID NO: 6055884 - DNA, 25 bp, Homo sapien
ccgaaccatatggagacggaaagag

SEQ ID NO: 6055885 - DNA, 25 bp, Homo sapien
tttcaggatcttctgcaaggccttg

SEQ ID NO: 6055886 - DNA, 25 bp, Homo sapien
ccccgccttgggcaccgttcggatg

SEQ ID NO: 6055887 - DNA, 25 bp, Homo sapien
aagaggctgaagtcagcaccgcaat

SEQ ID NO: 6055888 - DNA, 25 bp, Homo sapien
gtccaagccgtaagcgaagacatta

SEQ ID NO: 6055889 - DNA, 25 bp, Homo sapien
tgcaaggccttgcataacgtccaag

SEQ ID NO: 6055890 - DNA, 25 bp, Homo sapien
gatgcgccataatcggaactgggat

SEQ ID NO: 6055891 - DNA, 25 bp, Homo sapien
ttcagatcagccgtacgtccggtca

SEQ ID NO: 6055892 - DNA, 25 bp, Homo sapien
tctgaacgctcgccccccgccttgg

SEQ ID NO: 6055893 - DNA, 25 bp, Homo sapien
ctgggcctctaggaccgcatcaata

SEQ ID NO: 6055894 - DNA, 25 bp, Homo sapien
tcacacattcttcatgaatcgccag

SEQ ID NO: 6055895 - DNA, 25 bp, Homo sapien
gccgtaagcgaagacattaaacaaa

SEQ ID NO: 6055896 - DNA, 25 bp, Homo sapien
gcgcaaccgaaccatatggagacgg

SEQ ID NO: 6055897 - DNA, 25 bp, Homo sapien
agcgcatccgctcccaattcggcgg

SEQ ID NO: 6055898 - DNA, 25 bp, Homo sapien
acggagaagacgtaaacgctccgct

SEQ ID NO: 6055899 - DNA, 25 bp, Homo sapien
tacgcctcctccggcgttaataatg

SEQ ID NO: 6055900 - DNA, 25 bp, Homo sapien
tgctggatgcgccataatcggaact

SEQ ID NO: 6055901 - DNA, 25 bp, Homo sapien
ctgggatttcaggatcttctgcaag

SEQ ID NO: 6055902 - DNA, 25 bp, Homo sapien
acattaaacaaaagcgcatccgctc

SEQ ID NO: 6055903 - DNA, 25 bp, Homo sapien
ccgttcggatgtccatgtacgcctc

SEQ ID NO: 6055904 - DNA, 25 bp, Homo sapien
ctgaagtcagcaccgcaatatcggt

SEQ ID NO: 6055905 - DNA, 25 bp, Homo sapien
tgaatgcctgctgacggaacagcaa

SEQ ID NO: 6055906 - DNA, 25 bp, Homo sapien
gctcactgctggatgcgccataatc

SEQ ID NO: 6055907 - DNA, 25 bp, Homo sapien
tcggaactgggatttcaggatcttc

SEQ ID NO: 6055908 - DNA, 25 bp, Homo sapien
catatggagacggaaagaggctgaa

SEQ ID NO: 6055909 - DNA, 25 bp, Homo sapien
tggttaaaagcatcctctctcacac

SEQ ID NO: 6055910 - DNA, 25 bp, Homo sapien
ggcgttaataatgtggtctatgccg

SEQ ID NO: 6055911 - DNA, 25 bp, Homo sapien
tcctccggcgttaataatgtggtct

SEQ ID NO: 6055912 - DNA, 25 bp, Homo sapien
tccgagtaaaagagcgtgagaaaaa

SEQ ID NO: 6055913 - DNA, 25 bp, Homo sapien
tgttcggctttttcatcaatcggct

SEQ ID NO: 6055914 - DNA, 25 bp, Homo sapien
taattttccgagtaaaagagcgtga

SEQ ID NO: 6055915 - DNA, 25 bp, Homo sapien
atacagcgttttatgtccggtttgt

SEQ ID NO: 6055916 - DNA, 25 bp, Homo sapien
gcttaagatccttgcattgttcggc

SEQ ID NO: 6055917 - DNA, 25 bp, Homo sapien
ccggtcaaattcaccgcatacagcg

SEQ ID NO: 6055918 - DNA, 25 bp, Homo sapien
cctctctcacacattcttcatgaat

SEQ ID NO: 6055919 - DNA, 25 bp, Homo sapien
ttgtctttcagatcagccgtacgtc

SEQ ID NO: 6055920 - DNA, 25 bp, Homo sapien
cgctccgctcactgctggatgcgcc

SEQ ID NO: 6055921 - DNA, 25 bp, Homo sapien
ctatgccgaaatcacgcattaatag

SEQ ID NO: 6055922 - DNA, 25 bp, Homo sapien
tcgccagtgcatctgctcttggaag

SEQ ID NO: 6055923 - DNA, 25 bp, Homo sapien
gccttgggcaccgttcggatgtcca

SEQ ID NO: 6055924 - DNA, 25 bp, Homo sapien
ccatgccgggatgaatgcctgctga

SEQ ID NO: 6055925 - DNA, 25 bp, Homo sapien
cctgctgacggaacagcaaatgttt

SEQ ID NO: 6055926 - DNA, 25 bp, Homo sapien
ctcgctttgtctttcagatcagccg

SEQ ID NO: 6055927 - DNA, 25 bp, Homo sapien
gcgaagacattaaacaaaagcgcat

SEQ ID NO: 6055928 - DNA, 25 bp, Homo sapien
aaattcaccgcatacagcgttttat

SEQ ID NO: 6055929 - DNA, 25 bp, Homo sapien
accgcatacagcgttttatgtccgg

SEQ ID NO: 6055930 - DNA, 25 bp, Homo sapien
aacaaaagcgcatccgctcccaatt

SEQ ID NO: 6055931 - DNA, 25 bp, Homo sapien
gacggaaagaggctgaagtcagcac

SEQ ID NO: 6055932 - DNA, 25 bp, Homo sapien
attcttcatgaatcgccagtgcatc

SEQ ID NO: 6055933 - DNA, 25 bp, Homo sapien
ggctttttcatcaatcggctgggcc

SEQ ID NO: 6055934 - DNA, 25 bp, Homo sapien
gtggtctatgccgaaatcacgcatt

SEQ ID NO: 6055935 - DNA, 25 bp, Homo sapien
gtgcatctgctcttggaagcgcaac

SEQ ID NO: 6055936 - DNA, 25 bp, Homo sapien
tcggcggcgcgtctcgctttgtctt

SEQ ID NO: 6055937 - DNA, 25 bp, Homo sapien
catgaatcgccagtgcatctgctct

SEQ ID NO: 6055938 - DNA, 25 bp, Homo sapien
gccttgcataacgtccaagccgtaa

SEQ ID NO: 6055939 - DNA, 25 bp, Homo sapien
cgaaatcacgcattaatagcggaac

SEQ ID NO: 6055940 - DNA, 25 bp, Homo sapien
gcgcgtctcgctttgtctttcagat

SEQ ID NO: 6055941 - DNA, 25 bp, Homo sapien
aataatgtggtctatgccgaaatca

SEQ ID NO: 6055942 - DNA, 25 bp, Homo sapien
ttggaagcgcaaccgaaccatatgg

SEQ ID NO: 6055943 - DNA, 25 bp, Homo sapien
tgcattgttcggctttttcatcaat

SEQ ID NO: 6055944 - DNA, 25 bp, Homo sapien
ccgctcccaattcggcggcgcgtct

SEQ ID NO: 6055945 - DNA, 25 bp, Homo sapien
aatgtttggttaaaagcatcctctc

SEQ ID NO: 6055946 - DNA, 25 bp, Homo sapien
gacggaacagcaaatgtttggttaa

SEQ ID NO: 6055947 - DNA, 25 bp, Homo sapien
gtacgtccggtcaaattcaccgcat

SEQ ID NO: 6055948 - DNA, 25 bp, Homo sapien
tccatgtacgcctcctccggcgtta

SEQ ID NO: 6055949 - DNA, 25 bp, Homo sapien
tcagccgtacgtccggtcaaattca

SEQ ID NO: 6055950 - DNA, 25 bp, Homo sapien
cagcaccgcaatatcggtttaattt

SEQ ID NO: 6055951 - DNA, 25 bp, Homo sapien
ccataatcggaactgggatttcagg

SEQ ID NO: 6055952 - DNA, 25 bp, Homo sapien
cagctgcgggagcactctgacgaga

SEQ ID NO: 6055953 - DNA, 25 bp, Homo sapien
tcccaagtgaaagcggagtcacacc

SEQ ID NO: 6055954 - DNA, 25 bp, Homo sapien
ggttttggagaaattgtcaggtcat

SEQ ID NO: 6055955 - DNA, 25 bp, Homo sapien
tcaagcgctgcacggatgttatttt

SEQ ID NO: 6055956 - DNA, 25 bp, Homo sapien
gtcacatgagaaaacgcatctcccc

SEQ ID NO: 6055957 - DNA, 25 bp, Homo sapien
gagtttcaagcgctgcacggatgtt

SEQ ID NO: 6055958 - DNA, 25 bp, Homo sapien
caagcttttgaaagttcgttaccat

SEQ ID NO: 6055959 - DNA, 25 bp, Homo sapien
ccaatcctgataaacggtcccttga

SEQ ID NO: 6055960 - DNA, 25 bp, Homo sapien
agcgtaaaccaatcctgataaacgg

SEQ ID NO: 6055961 - DNA, 25 bp, Homo sapien
catcatttccgacttgtaaataaaa

SEQ ID NO: 6055962 - DNA, 25 bp, Homo sapien
acagctaccttatcaacaagcgctt

SEQ ID NO: 6055963 - DNA, 25 bp, Homo sapien
gtgaagttaaaatgtggtcaagctt

SEQ ID NO: 6055964 - DNA, 25 bp, Homo sapien
caaccttcaagctgacagcatgctg

SEQ ID NO: 6055965 - DNA, 25 bp, Homo sapien
tcccttgagtttcaagcgctgcacg

SEQ ID NO: 6055966 - DNA, 25 bp, Homo sapien
gcacgtcatcatttccgacttgtaa

SEQ ID NO: 6055967 - DNA, 25 bp, Homo sapien
tcaagctgacagcatgctgtctatc

SEQ ID NO: 6055968 - DNA, 25 bp, Homo sapien
caatgtccttaagctccgcaaaaat

SEQ ID NO: 6055969 - DNA, 25 bp, Homo sapien
tttccaagcaaatgtgcaatcagtg

SEQ ID NO: 6055970 - DNA, 25 bp, Homo sapien
ggagaaattgtcaggtcatcaatca

SEQ ID NO: 6055971 - DNA, 25 bp, Homo sapien
ccgccgtcatccagcgaatatcttt

SEQ ID NO: 6055972 - DNA, 25 bp, Homo sapien
gctccgcaaaaatctcctccgccgt

SEQ ID NO: 6055973 - DNA, 25 bp, Homo sapien
tcgttaccatttttgagcttggcgg

SEQ ID NO: 6055974 - DNA, 25 bp, Homo sapien
gtctatcattctcttgaagtgaagt

SEQ ID NO: 6055975 - DNA, 25 bp, Homo sapien
tcagtgactgatcatctgtcgtatg

SEQ ID NO: 6055976 - DNA, 25 bp, Homo sapien
gagaaaacgcatctcccccaatgtc

SEQ ID NO: 6055977 - DNA, 25 bp, Homo sapien
tgtgcaatcagtgactgatcatctg

SEQ ID NO: 6055978 - DNA, 25 bp, Homo sapien
catgctgtctatcattctcttgaag

SEQ ID NO: 6055979 - DNA, 25 bp, Homo sapien
gcactctgacgagattcagctccgc

SEQ ID NO: 6055980 - DNA, 25 bp, Homo sapien
tgttttaacagagccgggttgccgc

SEQ ID NO: 6055981 - DNA, 25 bp, Homo sapien
cggatgttattttccttcagcagtt

SEQ ID NO: 6055982 - DNA, 25 bp, Homo sapien
agcgaatatcttttttagcagaccc

SEQ ID NO: 6055983 - DNA, 25 bp, Homo sapien
agcagttcaataaaagcatccagct

SEQ ID NO: 6055984 - DNA, 25 bp, Homo sapien
tcatccagcgaatatcttttttagc

SEQ ID NO: 6055985 - DNA, 25 bp, Homo sapien
tccagctgttttaacagagccgggt

SEQ ID NO: 6055986 - DNA, 25 bp, Homo sapien
cgggattcccggataccgcttgtgc

SEQ ID NO: 6055987 - DNA, 25 bp, Homo sapien
gggttgccgcctgagatcgtcacat

SEQ ID NO: 6055988 - DNA, 25 bp, Homo sapien
aggtcatcaatcagcgtaaaccaat

SEQ ID NO: 6055989 - DNA, 25 bp, Homo sapien
ctcccccaatgtccttaagctccgc

SEQ ID NO: 6055990 - DNA, 25 bp, Homo sapien
ccttaagctccgcaaaaatctcctc

SEQ ID NO: 6055991 - DNA, 25 bp, Homo sapien
cttgaagtgaagttaaaatgtggtc

SEQ ID NO: 6055992 - DNA, 25 bp, Homo sapien
tctcctccgccgtcatccagcgaat

SEQ ID NO: 6055993 - DNA, 25 bp, Homo sapien
ttattttccttcagcagttcaataa

SEQ ID NO: 6055994 - DNA, 25 bp, Homo sapien
tgacgagattcagctccgcatcgac

SEQ ID NO: 6055995 - DNA, 25 bp, Homo sapien
gagatcgtcacatgagaaaacgcat

SEQ ID NO: 6055996 - DNA, 25 bp, Homo sapien
gcgggagcactctgacgagattcag

SEQ ID NO: 6055997 - DNA, 25 bp, Homo sapien
catctgtcgtatgcacgtcatcatt

SEQ ID NO: 6055998 - DNA, 25 bp, Homo sapien
tcaataaaagcatccagctgtttta

SEQ ID NO: 6055999 - DNA, 25 bp, Homo sapien
aaattccagatcttcatcattaaag

SEQ ID NO: 6056000 - DNA, 25 bp, Homo sapien
cacagttttggcaaattccagatct

SEQ ID NO: 6056001 - DNA, 25 bp, Homo sapien
tatcttttttagcagacccgtccca

SEQ ID NO: 6056002 - DNA, 25 bp, Homo sapien
cagagccgggttgccgcctgagatc

SEQ ID NO: 6056003 - DNA, 25 bp, Homo sapien
gcatcgacagctaccttatcaacaa

SEQ ID NO: 6056004 - DNA, 25 bp, Homo sapien
gcggagtcacaccagctgcaggaat

SEQ ID NO: 6056005 - DNA, 25 bp, Homo sapien
tgtggtcaagcttttgaaagttcgt

SEQ ID NO: 6056006 - DNA, 25 bp, Homo sapien
tttagcagacccgtcccaagtgaaa

SEQ ID NO: 6056007 - DNA, 25 bp, Homo sapien
cttgtgcacagttttggcaaattcc

SEQ ID NO: 6056008 - DNA, 25 bp, Homo sapien
ttcatcattaaagatgacaaccttc

SEQ ID NO: 6056009 - DNA, 25 bp, Homo sapien
gtgaaagcggagtcacaccagctgc

SEQ ID NO: 6056010 - DNA, 25 bp, Homo sapien
gctgcacggatgttattttccttca

SEQ ID NO: 6056011 - DNA, 25 bp, Homo sapien
tcccggataccgcttgtgcacagtt

SEQ ID NO: 6056012 - DNA, 25 bp, Homo sapien
ttaaaatgtggtcaagcttttgaaa

SEQ ID NO: 6056013 - DNA, 25 bp, Homo sapien
attgtcaggtcatcaatcagcgtaa

SEQ ID NO: 6056014 - DNA, 25 bp, Homo sapien
ctgataaacggtcccttgagtttca

SEQ ID NO: 6056015 - DNA, 25 bp, Homo sapien
accttatcaacaagcgcttcatatt

SEQ ID NO: 6056016 - DNA, 25 bp, Homo sapien
tttggcaaattccagatcttcatca

SEQ ID NO: 6056017 - DNA, 25 bp, Homo sapien
tcaatcagcgtaaaccaatcctgat

SEQ ID NO: 6056018 - DNA, 25 bp, Homo sapien
actgatcatctgtcgtatgcacgtc

SEQ ID NO: 6056019 - DNA, 25 bp, Homo sapien
ccatttttgagcttggcggttttgg

SEQ ID NO: 6056020 - DNA, 25 bp, Homo sapien
caaaaatctcctccgccgtcatcca

SEQ ID NO: 6056021 - DNA, 25 bp, Homo sapien
tgacagcatgctgtctatcattctc

SEQ ID NO: 6056022 - DNA, 25 bp, Homo sapien
gattcagctccgcatcgacagctac

SEQ ID NO: 6056023 - DNA, 25 bp, Homo sapien
aacggtcccttgagtttcaagcgct

SEQ ID NO: 6056024 - DNA, 25 bp, Homo sapien
cagatcttcatcattaaagatgaca

SEQ ID NO: 6056025 - DNA, 25 bp, Homo sapien
tcgtatgcacgtcatcatttccgac

SEQ ID NO: 6056026 - DNA, 25 bp, Homo sapien
attaaagatgacaaccttcaagctg

SEQ ID NO: 6056027 - DNA, 25 bp, Homo sapien
cattctcttgaagtgaagttaaaat

SEQ ID NO: 6056028 - DNA, 25 bp, Homo sapien
tccttcagcagttcaataaaagcat

SEQ ID NO: 6056029 - DNA, 25 bp, Homo sapien
ccgcctgagatcgtcacatgagaaa

SEQ ID NO: 6056030 - DNA, 25 bp, Homo sapien
acgcatctcccccaatgtccttaag

SEQ ID NO: 6056031 - DNA, 25 bp, Homo sapien
agcgcttcatattttccaagcaaat

SEQ ID NO: 6056032 - DNA, 25 bp, Homo sapien
tcaacaagcgcttcatattttccaa

SEQ ID NO: 6056033 - DNA, 25 bp, Homo sapien
agctccgcatcgacagctaccttat

SEQ ID NO: 6056034 - DNA, 25 bp, Homo sapien
gcttggcggttttggagaaattgtc

SEQ ID NO: 6056035 - DNA, 25 bp, Homo sapien
tcatattttccaagcaaatgtgcaa

SEQ ID NO: 6056036 - DNA, 25 bp, Homo sapien
ttgagcttggcggttttggagaaat

SEQ ID NO: 6056037 - DNA, 25 bp, Homo sapien
agatgacaaccttcaagctgacagc

SEQ ID NO: 6056038 - DNA, 25 bp, Homo sapien
agcaaatgtgcaatcagtgactgat

SEQ ID NO: 6056039 - DNA, 25 bp, Homo sapien
agacccgtcccaagtgaaagcggag

SEQ ID NO: 6056040 - DNA, 25 bp, Homo sapien
ataccgcttgtgcacagttttggca

SEQ ID NO: 6056041 - DNA, 25 bp, Homo sapien
aaagcatccagctgttttaacagag

SEQ ID NO: 6056042 - DNA, 25 bp, Homo sapien
tcacaccagctgcaggaataatcgc

SEQ ID NO: 6056043 - DNA, 25 bp, Homo sapien
tgaaagttcgttaccatttttgagc

SEQ ID NO: 6056044 - DNA, 25 bp, Homo sapien
tgattcctctgctttttagcacctc

SEQ ID NO: 6056045 - DNA, 25 bp, Homo sapien
ataggaatcattctttacagccttt

SEQ ID NO: 6056046 - DNA, 25 bp, Homo sapien
gataatgatttttgctgaactgtaa

SEQ ID NO: 6056047 - DNA, 25 bp, Homo sapien
tggctttcacagttttgcaaaccga

SEQ ID NO: 6056048 - DNA, 25 bp, Homo sapien
tgtatccgatgtcaataaaaacccc

SEQ ID NO: 6056049 - DNA, 25 bp, Homo sapien
tgatctgatttgaaatgattaagct

SEQ ID NO: 6056050 - DNA, 25 bp, Homo sapien
ctaagtttcttatgattcctctgct

SEQ ID NO: 6056051 - DNA, 25 bp, Homo sapien
aggaagaaacgatgagatcgcggcc

SEQ ID NO: 6056052 - DNA, 25 bp, Homo sapien
tatatttgatctgatttgaaatgat

SEQ ID NO: 6056053 - DNA, 25 bp, Homo sapien
tcttttggggaggaagaaacgatga

SEQ ID NO: 6056054 - DNA, 25 bp, Homo sapien
gctgaactgtaaactttatatgctt

SEQ ID NO: 6056055 - DNA, 25 bp, Homo sapien
ccagcatatatttgatctgatttga

SEQ ID NO: 6056056 - DNA, 25 bp, Homo sapien
catggatccaattgcggggaatttc

SEQ ID NO: 6056057 - DNA, 25 bp, Homo sapien
tcagtataatcaaggtatccatgga

SEQ ID NO: 6056058 - DNA, 25 bp, Homo sapien
cataatgaatggtttcccctaagtt

SEQ ID NO: 6056059 - DNA, 25 bp, Homo sapien
ggctctatgccgataggaatcattc

SEQ ID NO: 6056060 - DNA, 25 bp, Homo sapien
gtttgaatttacctcgaactgctgg

SEQ ID NO: 6056061 - DNA, 25 bp, Homo sapien
ctctgctttttagcacctcaagcat

SEQ ID NO: 6056062 - DNA, 25 bp, Homo sapien
ttgataatgtttcaccgggagtaac

SEQ ID NO: 6056063 - DNA, 25 bp, Homo sapien
caattattgataatgtttcaccggg

SEQ ID NO: 6056064 - DNA, 25 bp, Homo sapien
ctcttcctatatatttactcatttt

SEQ ID NO: 6056065 - DNA, 25 bp, Homo sapien
gatttttgctgaactgtaaacttta

SEQ ID NO: 6056066 - DNA, 25 bp, Homo sapien
aggtatccatggatccaattgcggg

SEQ ID NO: 6056067 - DNA, 25 bp, Homo sapien
tgcggggaatttctcttcctatata

SEQ ID NO: 6056068 - DNA, 25 bp, Homo sapien
taatcttaatgatttgtccagcata

SEQ ID NO: 6056069 - DNA, 25 bp, Homo sapien
tgcagggaaacattatacttactgg

SEQ ID NO: 6056070 - DNA, 25 bp, Homo sapien
ctgctggtgtatccgatgtcaataa

SEQ ID NO: 6056071 - DNA, 25 bp, Homo sapien
gtaagttggctttcacagttttgca

SEQ ID NO: 6056072 - DNA, 25 bp, Homo sapien
tctcataggtgcgttgtgtaagttg

SEQ ID NO: 6056073 - DNA, 25 bp, Homo sapien
catgatttaaatagtatttaacctt

SEQ ID NO: 6056074 - DNA, 25 bp, Homo sapien
cgctatcatgatttaaatagtattt

SEQ ID NO: 6056075 - DNA, 25 bp, Homo sapien
tttctttgagaacatctacataatg

SEQ ID NO: 6056076 - DNA, 25 bp, Homo sapien
gaaacattatacttactggcaatta

SEQ ID NO: 6056077 - DNA, 25 bp, Homo sapien
ctcgaactgctggtgtatccgatgt

SEQ ID NO: 6056078 - DNA, 25 bp, Homo sapien
taatgatttgtccagcatatatttg

SEQ ID NO: 6056079 - DNA, 25 bp, Homo sapien
cgtttatctgaatcttttttctctc

SEQ ID NO: 6056080 - DNA, 25 bp, Homo sapien
cagcctttttaccgtttatctgaat

SEQ ID NO: 6056081 - DNA, 25 bp, Homo sapien
atgtttcaccgggagtaacatgatg

SEQ ID NO: 6056082 - DNA, 25 bp, Homo sapien
gaatttctcttcctatatatttact

SEQ ID NO: 6056083 - DNA, 25 bp, Homo sapien
agttgctgcagggaaacattatact

SEQ ID NO: 6056084 - DNA, 25 bp, Homo sapien
ctgtaaactttatatgcttcagtat

SEQ ID NO: 6056085 - DNA, 25 bp, Homo sapien
atttacctcgaactgctggtgtatc

SEQ ID NO: 6056086 - DNA, 25 bp, Homo sapien
gcacctcaagcattctctcggctct

SEQ ID NO: 6056087 - DNA, 25 bp, Homo sapien
ttttgcaaaccgataatgatttttg

SEQ ID NO: 6056088 - DNA, 25 bp, Homo sapien
tctctctaatcttaatgatttgtcc

SEQ ID NO: 6056089 - DNA, 25 bp, Homo sapien
cgttgtgtaagttggctttcacagt

SEQ ID NO: 6056090 - DNA, 25 bp, Homo sapien
cccccggaaccaagaatctcatagg

SEQ ID NO: 6056091 - DNA, 25 bp, Homo sapien
caagcattctctcggctctatgccg

SEQ ID NO: 6056092 - DNA, 25 bp, Homo sapien
tttttagcacctcaagcattctctc

SEQ ID NO: 6056093 - DNA, 25 bp, Homo sapien
tcttttttctctcgctatcatgatt

SEQ ID NO: 6056094 - DNA, 25 bp, Homo sapien
tcccctaagtttcttatgattcctc

SEQ ID NO: 6056095 - DNA, 25 bp, Homo sapien
ttggggaggaagaaacgatgagatc

SEQ ID NO: 6056096 - DNA, 25 bp, Homo sapien
caagaatctcataggtgcgttgtgt

SEQ ID NO: 6056097 - DNA, 25 bp, Homo sapien
gagtaacatgatggatcacgtattt

SEQ ID NO: 6056098 - DNA, 25 bp, Homo sapien
tcacagttttgcaaaccgataatga

SEQ ID NO: 6056099 - DNA, 25 bp, Homo sapien
gcggccaggtttgaatttacctcga

SEQ ID NO: 6056100 - DNA, 25 bp, Homo sapien
tatacttactggcaattattgataa

SEQ ID NO: 6056101 - DNA, 25 bp, Homo sapien
ggatcacgtatttttctttgagaac

SEQ ID NO: 6056102 - DNA, 25 bp, Homo sapien
taatcaaggtatccatggatccaat

SEQ ID NO: 6056103 - DNA, 25 bp, Homo sapien
atgccgataggaatcattctttaca

SEQ ID NO: 6056104 - DNA, 25 bp, Homo sapien
aaacgatgagatcgcggccaggttt

SEQ ID NO: 6056105 - DNA, 25 bp, Homo sapien
cgtatttttctttgagaacatctac

SEQ ID NO: 6056106 - DNA, 25 bp, Homo sapien
taggtgcgttgtgtaagttggcttt

SEQ ID NO: 6056107 - DNA, 25 bp, Homo sapien
cggaaccaagaatctcataggtgcg

SEQ ID NO: 6056108 - DNA, 25 bp, Homo sapien
tccatgagttgctgcagggaaacat

SEQ ID NO: 6056109 - DNA, 25 bp, Homo sapien
tccaattgcggggaatttctcttcc

SEQ ID NO: 6056110 - DNA, 25 bp, Homo sapien
caaaccgataatgatttttgctgaa

SEQ ID NO: 6056111 - DNA, 25 bp, Homo sapien
catctacataatgaatggtttcccc

SEQ ID NO: 6056112 - DNA, 25 bp, Homo sapien
caccgggagtaacatgatggatcac

SEQ ID NO: 6056113 - DNA, 25 bp, Homo sapien
atttgtccagcatatatttgatctg

SEQ ID NO: 6056114 - DNA, 25 bp, Homo sapien
tatgcttcagtataatcaaggtatc

SEQ ID NO: 6056115 - DNA, 25 bp, Homo sapien
ttaagctccatgagttgctgcaggg

SEQ ID NO: 6056116 - DNA, 25 bp, Homo sapien
tctgaatcttttttctctcgctatc

SEQ ID NO: 6056117 - DNA, 25 bp, Homo sapien
aaatgattaagctccatgagttgct

SEQ ID NO: 6056118 - DNA, 25 bp, Homo sapien
ttctctcgctatcatgatttaaata

SEQ ID NO: 6056119 - DNA, 25 bp, Homo sapien
gatttgaaatgattaagctccatga

SEQ ID NO: 6056120 - DNA, 25 bp, Homo sapien
tgagaacatctacataatgaatggt

SEQ ID NO: 6056121 - DNA, 25 bp, Homo sapien
tctctcggctctatgccgataggaa

SEQ ID NO: 6056122 - DNA, 25 bp, Homo sapien
gagatcgcggccaggtttgaattta

SEQ ID NO: 6056123 - DNA, 25 bp, Homo sapien
catgatggatcacgtatttttcttt

SEQ ID NO: 6056124 - DNA, 25 bp, Homo sapien
atcattctttacagcctttttaccg

SEQ ID NO: 6056125 - DNA, 25 bp, Homo sapien
actttatatgcttcagtataatcaa

SEQ ID NO: 6056126 - DNA, 25 bp, Homo sapien
tactggcaattattgataatgtttc

SEQ ID NO: 6056127 - DNA, 25 bp, Homo sapien
ttcttatgattcctctgctttttag

SEQ ID NO: 6056128 - DNA, 25 bp, Homo sapien
tatatatttactcattttttcccag

SEQ ID NO: 6056129 - DNA, 25 bp, Homo sapien
tttcttctttcacggtatcggcttc

SEQ ID NO: 6056130 - DNA, 25 bp, Homo sapien
gaatgcagcaatcaatgtcgtcgga

SEQ ID NO: 6056131 - DNA, 25 bp, Homo sapien
gcagaattaaatccgcttcttttac

SEQ ID NO: 6056132 - DNA, 25 bp, Homo sapien
acaagcgcaatttgaagcacaccgt

SEQ ID NO: 6056133 - DNA, 25 bp, Homo sapien
gaaacctgtgtgttgatttcatgaa

SEQ ID NO: 6056134 - DNA, 25 bp, Homo sapien
agccgacaagcgcaatttgaagcac

SEQ ID NO: 6056135 - DNA, 25 bp, Homo sapien
cgtcgtcctcaaatttcgcactgac

SEQ ID NO: 6056136 - DNA, 25 bp, Homo sapien
acaggaggtcttcttcatagctgtc

SEQ ID NO: 6056137 - DNA, 25 bp, Homo sapien
tcgtcaggcggttgaaccatgttga

SEQ ID NO: 6056138 - DNA, 25 bp, Homo sapien
tttcatgtcccgcataatcctcatt

SEQ ID NO: 6056139 - DNA, 25 bp, Homo sapien
cagcatcgggatatcatctgcttca

SEQ ID NO: 6056140 - DNA, 25 bp, Homo sapien
attgtaagccgtcagcatcgggata

SEQ ID NO: 6056141 - DNA, 25 bp, Homo sapien
agaagaacactgtagccgcttggca

SEQ ID NO: 6056142 - DNA, 25 bp, Homo sapien
accataatgtgatcccttccggcgg

SEQ ID NO: 6056143 - DNA, 25 bp, Homo sapien
tactgtatctgaaagaagaacactg

SEQ ID NO: 6056144 - DNA, 25 bp, Homo sapien
gcagccgaagcactgttttttcatg

SEQ ID NO: 6056145 - DNA, 25 bp, Homo sapien
tgtgtgttgatttcatgaatgcgat

SEQ ID NO: 6056146 - DNA, 25 bp, Homo sapien
atgttgatttccctgcgtttgtata

SEQ ID NO: 6056147 - DNA, 25 bp, Homo sapien
tagccgcttggcaggaccatttttc

SEQ ID NO: 6056148 - DNA, 25 bp, Homo sapien
cggcggtcggtaaaaatcaggcagt

SEQ ID NO: 6056149 - DNA, 25 bp, Homo sapien
atgcgatttctgatatggcggcggt

SEQ ID NO: 6056150 - DNA, 25 bp, Homo sapien
cagtttttgatcacgtttattgtaa

SEQ ID NO: 6056151 - DNA, 25 bp, Homo sapien
tcatgaatgcgatttctgatatggc

SEQ ID NO: 6056152 - DNA, 25 bp, Homo sapien
cctcaagcagccgaagcactgtttt

SEQ ID NO: 6056153 - DNA, 25 bp, Homo sapien
tgaaccatgttgatttccctgcgtt

SEQ ID NO: 6056154 - DNA, 25 bp, Homo sapien
cttcatagctgtcagcactcgtcag

SEQ ID NO: 6056155 - DNA, 25 bp, Homo sapien
ggcggttgaaccatgttgatttccc

SEQ ID NO: 6056156 - DNA, 25 bp, Homo sapien
agctgtcagcactcgtcaggcggtt

SEQ ID NO: 6056157 - DNA, 25 bp, Homo sapien
acagtggaaacctgtgtgttgattt

SEQ ID NO: 6056158 - DNA, 25 bp, Homo sapien
tgagcggaatgcagcaatcaatgtc

SEQ ID NO: 6056159 - DNA, 25 bp, Homo sapien
aatcaattaaatgcagaattaaatc

SEQ ID NO: 6056160 - DNA, 25 bp, Homo sapien
cgaatgacagtggaaacctgtgtgt

SEQ ID NO: 6056161 - DNA, 25 bp, Homo sapien
aatttcgcactgaccataatgtgat

SEQ ID NO: 6056162 - DNA, 25 bp, Homo sapien
ttaaatgcagaattaaatccgcttc

SEQ ID NO: 6056163 - DNA, 25 bp, Homo sapien
aggaccatttttctggtcatcgggt

SEQ ID NO: 6056164 - DNA, 25 bp, Homo sapien
ctggtcatcgggtccagcgtggcaa

SEQ ID NO: 6056165 - DNA, 25 bp, Homo sapien
cttctttaaaggctgcagcgtcgtc

SEQ ID NO: 6056166 - DNA, 25 bp, Homo sapien
cgggatatcatctgcttcaagctcc

SEQ ID NO: 6056167 - DNA, 25 bp, Homo sapien
gcttcttttacttcctcaagcgttg

SEQ ID NO: 6056168 - DNA, 25 bp, Homo sapien
ttgatttcatgaatgcgatttctga

SEQ ID NO: 6056169 - DNA, 25 bp, Homo sapien
aagcgttgagcggaatgcagcaatc

SEQ ID NO: 6056170 - DNA, 25 bp, Homo sapien
atttttctggtcatcgggtccagcg

SEQ ID NO: 6056171 - DNA, 25 bp, Homo sapien
ttttacttcctcaagcgttgagcgg

SEQ ID NO: 6056172 - DNA, 25 bp, Homo sapien
ctttcacggtatcggcttctatggc

SEQ ID NO: 6056173 - DNA, 25 bp, Homo sapien
ttaaaggctgcagcgtcgtcctcaa

SEQ ID NO: 6056174 - DNA, 25 bp, Homo sapien
gcaatttgaagcacaccgtttttct

SEQ ID NO: 6056175 - DNA, 25 bp, Homo sapien
ttcctcaagcgttgagcggaatgca

SEQ ID NO: 6056176 - DNA, 25 bp, Homo sapien
tggcaaacaggaggtcttcttcata

SEQ ID NO: 6056177 - DNA, 25 bp, Homo sapien
aatccgcttcttttacttcctcaag

SEQ ID NO: 6056178 - DNA, 25 bp, Homo sapien
ctgcgtttgtatagccgacaagcgc

SEQ ID NO: 6056179 - DNA, 25 bp, Homo sapien
atcatctgcttcaagctcctcaagc

SEQ ID NO: 6056180 - DNA, 25 bp, Homo sapien
ttgatcacgtttattgtaagccgtc

SEQ ID NO: 6056181 - DNA, 25 bp, Homo sapien
aagatcctgaataaatcctactgta

SEQ ID NO: 6056182 - DNA, 25 bp, Homo sapien
tgaagcacaccgtttttctttcttc

SEQ ID NO: 6056183 - DNA, 25 bp, Homo sapien
ttgaagaatcaattaaatgcagaat

SEQ ID NO: 6056184 - DNA, 25 bp, Homo sapien
tctgaaagaagaacactgtagccgc

SEQ ID NO: 6056185 - DNA, 25 bp, Homo sapien
gaagcactgttttttcatgtcccgc

SEQ ID NO: 6056186 - DNA, 25 bp, Homo sapien
ggcttctatggcgaatgacagtgga

SEQ ID NO: 6056187 - DNA, 25 bp, Homo sapien
gtaaaaatcaggcagtttttgatca

SEQ ID NO: 6056188 - DNA, 25 bp, Homo sapien
gtcccgcataatcctcatttgaaga

SEQ ID NO: 6056189 - DNA, 25 bp, Homo sapien
ccagcgtggcaaacaggaggtcttc

SEQ ID NO: 6056190 - DNA, 25 bp, Homo sapien
atcgggtccagcgtggcaaacagga

SEQ ID NO: 6056191 - DNA, 25 bp, Homo sapien
gcactgaccataatgtgatcccttc

SEQ ID NO: 6056192 - DNA, 25 bp, Homo sapien
cagcactcgtcaggcggttgaacca

SEQ ID NO: 6056193 - DNA, 25 bp, Homo sapien
atgtgatcccttccggcggtcggta

SEQ ID NO: 6056194 - DNA, 25 bp, Homo sapien
ggtcttcttcatagctgtcagcact

SEQ ID NO: 6056195 - DNA, 25 bp, Homo sapien
ctgaataaatcctactgtatctgaa

SEQ ID NO: 6056196 - DNA, 25 bp, Homo sapien
ggtatcggcttctatggcgaatgac

SEQ ID NO: 6056197 - DNA, 25 bp, Homo sapien
atttccctgcgtttgtatagccgac

SEQ ID NO: 6056198 - DNA, 25 bp, Homo sapien
cataatcctcatttgaagaatcaat

SEQ ID NO: 6056199 - DNA, 25 bp, Homo sapien
aaatcctactgtatctgaaagaaga

SEQ ID NO: 6056200 - DNA, 25 bp, Homo sapien
cctcaaatttcgcactgaccataat

SEQ ID NO: 6056201 - DNA, 25 bp, Homo sapien
ttgtatagccgacaagcgcaatttg

SEQ ID NO: 6056202 - DNA, 25 bp, Homo sapien
atatggcggcggtcggtttccagtt

SEQ ID NO: 6056203 - DNA, 25 bp, Homo sapien
ctgcagcgtcgtcctcaaatttcgc

SEQ ID NO: 6056204 - DNA, 25 bp, Homo sapien
cgtcggaagatcctgaataaatcct

SEQ ID NO: 6056205 - DNA, 25 bp, Homo sapien
acgtttattgtaagccgtcagcatc

SEQ ID NO: 6056206 - DNA, 25 bp, Homo sapien
ctatggcgaatgacagtggaaacct

SEQ ID NO: 6056207 - DNA, 25 bp, Homo sapien
agccgtcagcatcgggatatcatct

SEQ ID NO: 6056208 - DNA, 25 bp, Homo sapien
atcaggcagtttttgatcacgttta

SEQ ID NO: 6056209 - DNA, 25 bp, Homo sapien
tgcttcaagctcctcaagcagccga

SEQ ID NO: 6056210 - DNA, 25 bp, Homo sapien
cctcatttgaagaatcaattaaatg

SEQ ID NO: 6056211 - DNA, 25 bp, Homo sapien
ctgttttttcatgtcccgcataatc

SEQ ID NO: 6056212 - DNA, 25 bp, Homo sapien
aagctcctcaagcagccgaagcact

SEQ ID NO: 6056213 - DNA, 25 bp, Homo sapien
agcaatcaatgtcgtcggaagatcc

SEQ ID NO: 6056214 - DNA, 25 bp, Homo sapien
cttggcaggaccatttttctggtca

SEQ ID NO: 6056215 - DNA, 25 bp, Homo sapien
caatgtcgtcggaagatcctgaata

SEQ ID NO: 6056216 - DNA, 25 bp, Homo sapien
acactgtagccgcttggcaggacca

SEQ ID NO: 6056217 - DNA, 25 bp, Homo sapien
tttctgatatggcggcggtcggttt

SEQ ID NO: 6056218 - DNA, 25 bp, Homo sapien
ttccgccgccggcaatggcatcaaa

SEQ ID NO: 6056219 - DNA, 25 bp, Homo sapien
gtgtctcctgctatccctacatcaa

SEQ ID NO: 6056220 - DNA, 25 bp, Homo sapien
acgatgcagcatggccgcgtgcgta

SEQ ID NO: 6056221 - DNA, 25 bp, Homo sapien
tgccgtcaaatggatggcacccgaa

SEQ ID NO: 6056222 - DNA, 25 bp, Homo sapien
gtttcttaacacatcaatagcaatc

SEQ ID NO: 6056223 - DNA, 25 bp, Homo sapien
ctttgtgagagaccatggatgcatc

SEQ ID NO: 6056224 - DNA, 25 bp, Homo sapien
agcaatcgcacagccgatgcggttg

SEQ ID NO: 6056225 - DNA, 25 bp, Homo sapien
catacactatatttggatgatctgt

SEQ ID NO: 6056226 - DNA, 25 bp, Homo sapien
tgtaagtttcttaacacatcaatag

SEQ ID NO: 6056227 - DNA, 25 bp, Homo sapien
ctatccctacatcaacaccaaacgc

SEQ ID NO: 6056228 - DNA, 25 bp, Homo sapien
cgcgttttcataatcatcacgatgc

SEQ ID NO: 6056229 - DNA, 25 bp, Homo sapien
tagcgggttgcaatggtaatggaca

SEQ ID NO: 6056230 - DNA, 25 bp, Homo sapien
tcttaatgacttctgtaattaactt

SEQ ID NO: 6056231 - DNA, 25 bp, Homo sapien
ctttaccgcgttttcataatcatca

SEQ ID NO: 6056232 - DNA, 25 bp, Homo sapien
atgcatcgtaaacgataatctgcgg

SEQ ID NO: 6056233 - DNA, 25 bp, Homo sapien
tcaaaatgcggaacgatcatatctc

SEQ ID NO: 6056234 - DNA, 25 bp, Homo sapien
caatggtaatggacagcgcaggaac

SEQ ID NO: 6056235 - DNA, 25 bp, Homo sapien
tcccctcagcccgacttcctcctgc

SEQ ID NO: 6056236 - DNA, 25 bp, Homo sapien
tgacttctgtaattaactttaccgc

SEQ ID NO: 6056237 - DNA, 25 bp, Homo sapien
gaatggtgtgtgcagccgttttcgc

SEQ ID NO: 6056238 - DNA, 25 bp, Homo sapien
acggaatgccggcttcctccgcagt

SEQ ID NO: 6056239 - DNA, 25 bp, Homo sapien
ttgttcatgaccgtaaattcaaaat

SEQ ID NO: 6056240 - DNA, 25 bp, Homo sapien
caggctgaatggtgtgtgcagccgt

SEQ ID NO: 6056241 - DNA, 25 bp, Homo sapien
ctacatcaacaccaaacgcaatatc

SEQ ID NO: 6056242 - DNA, 25 bp, Homo sapien
tcctcctgcacggttccgacgccat

SEQ ID NO: 6056243 - DNA, 25 bp, Homo sapien
catcgcgcaaacctttgtgagagac

SEQ ID NO: 6056244 - DNA, 25 bp, Homo sapien
gagagaccatggatgcatcgtaaac

SEQ ID NO: 6056245 - DNA, 25 bp, Homo sapien
tgcacggttccgacgccatacacta

SEQ ID NO: 6056246 - DNA, 25 bp, Homo sapien
acagcgcaggaacgccatttgccgt

SEQ ID NO: 6056247 - DNA, 25 bp, Homo sapien
tcctgctatccctacatcaacacca

SEQ ID NO: 6056248 - DNA, 25 bp, Homo sapien
taatggacagcgcaggaacgccatt

SEQ ID NO: 6056249 - DNA, 25 bp, Homo sapien
taacacatcaatagcaatcgcacag

SEQ ID NO: 6056250 - DNA, 25 bp, Homo sapien
tgttttgtaagtttcttaacacatc

SEQ ID NO: 6056251 - DNA, 25 bp, Homo sapien
gccgcgtgcgtatgaatgtagcggg

SEQ ID NO: 6056252 - DNA, 25 bp, Homo sapien
ccatggatgcatcgtaaacgataat

SEQ ID NO: 6056253 - DNA, 25 bp, Homo sapien
tttcgctcccctcagcccgacttcc

SEQ ID NO: 6056254 - DNA, 25 bp, Homo sapien
ccaggcgtgtctcctgctatcccta

SEQ ID NO: 6056255 - DNA, 25 bp, Homo sapien
tttcattgttcatgaccgtaaattc

SEQ ID NO: 6056256 - DNA, 25 bp, Homo sapien
cctttgcgagtaggaatttttcatt

SEQ ID NO: 6056257 - DNA, 25 bp, Homo sapien
caacaccaaacgcaatatcaggctg

SEQ ID NO: 6056258 - DNA, 25 bp, Homo sapien
gcaaacctttgtgagagaccatgga

SEQ ID NO: 6056259 - DNA, 25 bp, Homo sapien
acccgaatcagttccgccgccggca

SEQ ID NO: 6056260 - DNA, 25 bp, Homo sapien
ccgacttcctcctgcacggttccga

SEQ ID NO: 6056261 - DNA, 25 bp, Homo sapien
caaatggatggcacccgaatcagtt

SEQ ID NO: 6056262 - DNA, 25 bp, Homo sapien
caaacgcaatatcaggctgaatggt

SEQ ID NO: 6056263 - DNA, 25 bp, Homo sapien
ggttgcaatggtaatggacagcgca

SEQ ID NO: 6056264 - DNA, 25 bp, Homo sapien
ctatatttggatgatctgtgttttg

SEQ ID NO: 6056265 - DNA, 25 bp, Homo sapien
gcttccttctcggaaatgccaggcg

SEQ ID NO: 6056266 - DNA, 25 bp, Homo sapien
attggtacggaatgccggcttcctc

SEQ ID NO: 6056267 - DNA, 25 bp, Homo sapien
caatatcaggctgaatggtgtgtgc

SEQ ID NO: 6056268 - DNA, 25 bp, Homo sapien
cggttccgacgccatacactatatt

SEQ ID NO: 6056269 - DNA, 25 bp, Homo sapien
ttcataatcatcacgatgcagcatg

SEQ ID NO: 6056270 - DNA, 25 bp, Homo sapien
atgaccgtaaattcaaaatgcggaa

SEQ ID NO: 6056271 - DNA, 25 bp, Homo sapien
cgacgccatacactatatttggatg

SEQ ID NO: 6056272 - DNA, 25 bp, Homo sapien
atcatcacgatgcagcatggccgcg

SEQ ID NO: 6056273 - DNA, 25 bp, Homo sapien
ggcctttgcccattttgctctgcgc

SEQ ID NO: 6056274 - DNA, 25 bp, Homo sapien
aggaacgccatttgccgtcaaatgg

SEQ ID NO: 6056275 - DNA, 25 bp, Homo sapien
tgaatgtagcgggttgcaatggtaa

SEQ ID NO: 6056276 - DNA, 25 bp, Homo sapien
cgagtaggaatttttcattgttcat

SEQ ID NO: 6056277 - DNA, 25 bp, Homo sapien
gatctgtgttttgtaagtttcttaa

SEQ ID NO: 6056278 - DNA, 25 bp, Homo sapien
ttttgctctgcgcttccttctcgga

SEQ ID NO: 6056279 - DNA, 25 bp, Homo sapien
aactgcatcgcgcaaacctttgtga

SEQ ID NO: 6056280 - DNA, 25 bp, Homo sapien
catcaaattggtacggaatgccggc

SEQ ID NO: 6056281 - DNA, 25 bp, Homo sapien
tcccaggcctttgcgagtaggaatt

SEQ ID NO: 6056282 - DNA, 25 bp, Homo sapien
aatcagttccgccgccggcaatggc

SEQ ID NO: 6056283 - DNA, 25 bp, Homo sapien
acgatcatatctcccggaagtacac

SEQ ID NO: 6056284 - DNA, 25 bp, Homo sapien
ttggatgatctgtgttttgtaagtt

SEQ ID NO: 6056285 - DNA, 25 bp, Homo sapien
ctcagcccgacttcctcctgcacgg

SEQ ID NO: 6056286 - DNA, 25 bp, Homo sapien
ggaatttttcattgttcatgaccgt

SEQ ID NO: 6056287 - DNA, 25 bp, Homo sapien
agcatggccgcgtgcgtatgaatgt

SEQ ID NO: 6056288 - DNA, 25 bp, Homo sapien
caatggcatcaaattggtacggaat

SEQ ID NO: 6056289 - DNA, 25 bp, Homo sapien
gatggcacccgaatcagttccgccg

SEQ ID NO: 6056290 - DNA, 25 bp, Homo sapien
tctgcgggcctttgcccattttgct

SEQ ID NO: 6056291 - DNA, 25 bp, Homo sapien
gaaatgccaggcgtgtctcctgcta

SEQ ID NO: 6056292 - DNA, 25 bp, Homo sapien
cgataatctgcgggcctttgcccat

SEQ ID NO: 6056293 - DNA, 25 bp, Homo sapien
cgtaaacgataatctgcgggccttt

SEQ ID NO: 6056294 - DNA, 25 bp, Homo sapien
tgtgtgcagccgttttcgctcccct

SEQ ID NO: 6056295 - DNA, 25 bp, Homo sapien
tgcggaacgatcatatctcccggaa

SEQ ID NO: 6056296 - DNA, 25 bp, Homo sapien
cgcagtggctacaactgcatcgcgc

SEQ ID NO: 6056297 - DNA, 25 bp, Homo sapien
cgccggcaatggcatcaaattggta

SEQ ID NO: 6056298 - DNA, 25 bp, Homo sapien
gccatttgccgtcaaatggatggca

SEQ ID NO: 6056299 - DNA, 25 bp, Homo sapien
atatctcccggaagtacaccccact

SEQ ID NO: 6056300 - DNA, 25 bp, Homo sapien
atgccggcttcctccgcagtggcta

SEQ ID NO: 6056301 - DNA, 25 bp, Homo sapien
cttctcggaaatgccaggcgtgtct

SEQ ID NO: 6056302 - DNA, 25 bp, Homo sapien
ctaacttcttaatgacttctgtaat

SEQ ID NO: 6056303 - DNA, 25 bp, Homo sapien
tgcccattttgctctgcgcttcctt

SEQ ID NO: 6056304 - DNA, 25 bp, Homo sapien
ggctacaactgcatcgcgcaaacct

SEQ ID NO: 6056305 - DNA, 25 bp, Homo sapien
gtaaattcaaaatgcggaacgatca

SEQ ID NO: 6056306 - DNA, 25 bp, Homo sapien
tgcgtatgaatgtagcgggttgcaa

SEQ ID NO: 6056307 - DNA, 25 bp, Homo sapien
cgcacagccgatgcggttgtcccag

SEQ ID NO: 6056308 - DNA, 25 bp, Homo sapien
ttcctccgcagtggctacaactgca

SEQ ID NO: 6056309 - DNA, 25 bp, Homo sapien
atcaatagcaatcgcacagccgatg

SEQ ID NO: 6056310 - DNA, 25 bp, Homo sapien
gccgatgcggttgtcccaggccttt

SEQ ID NO: 6056311 - DNA, 25 bp, Homo sapien
gcggttgtcccaggcctttgcgagt

SEQ ID NO: 6056312 - DNA, 25 bp, Homo sapien
ctctgcgcttccttctcggaaatgc

SEQ ID NO: 6056313 - DNA, 25 bp, Homo sapien
caaaaagccaagcaccgtttcaaat

SEQ ID NO: 6056314 - DNA, 25 bp, Homo sapien
cgctgatgatggctcccatcgcaat

SEQ ID NO: 6056315 - DNA, 25 bp, Homo sapien
tgatggctcccatcgcaatgatgct

SEQ ID NO: 6056316 - DNA, 25 bp, Homo sapien
gcccagggccactttcggcattgcg

SEQ ID NO: 6056317 - DNA, 25 bp, Homo sapien
cctcttggaaggcggtgtagacaac

SEQ ID NO: 6056318 - DNA, 25 bp, Homo sapien
tcgcaatgatgctgataaaactggg

SEQ ID NO: 6056319 - DNA, 25 bp, Homo sapien
accgagcgcgacaatcaggatcggg

SEQ ID NO: 6056320 - DNA, 25 bp, Homo sapien
ataacccacttttttgcgccgaatg

SEQ ID NO: 6056321 - DNA, 25 bp, Homo sapien
ggaaggcggtgtagacaacgatggt

SEQ ID NO: 6056322 - DNA, 25 bp, Homo sapien
tctggcaagtcggttagaccaccat

SEQ ID NO: 6056323 - DNA, 25 bp, Homo sapien
aactgggaccgagcgcgacaatcag

SEQ ID NO: 6056324 - DNA, 25 bp, Homo sapien
ctcccatcgcaatgatgctgataaa

SEQ ID NO: 6056325 - DNA, 25 bp, Homo sapien
cggatctaaaattctggcaagtcgg

SEQ ID NO: 6056326 - DNA, 25 bp, Homo sapien
cgtgcccataaacgtcccgagcaaa

SEQ ID NO: 6056327 - DNA, 25 bp, Homo sapien
gttagaccaccataacaaagcggct

SEQ ID NO: 6056328 - DNA, 25 bp, Homo sapien
agtttctccagcaataatcgccaca

SEQ ID NO: 6056329 - DNA, 25 bp, Homo sapien
aaataatcgcgggggaggatgcagg

SEQ ID NO: 6056330 - DNA, 25 bp, Homo sapien
ctacaataacgccaacccatgataa

SEQ ID NO: 6056331 - DNA, 25 bp, Homo sapien
atacatcagagtggcgaagatggcg

SEQ ID NO: 6056332 - DNA, 25 bp, Homo sapien
tttcggcattgcgttcaaaatcaca

SEQ ID NO: 6056333 - DNA, 25 bp, Homo sapien
cagcaggcttaagaagacgagtgta

SEQ ID NO: 6056334 - DNA, 25 bp, Homo sapien
cttttttgcgccgaatgttttcatg

SEQ ID NO: 6056335 - DNA, 25 bp, Homo sapien
cttttagtgttgaaataatcgcggg

SEQ ID NO: 6056336 - DNA, 25 bp, Homo sapien
ccaccataacaaagcggctaggcac

SEQ ID NO: 6056337 - DNA, 25 bp, Homo sapien
tgacagtaaagaaccgtcaccaagt

SEQ ID NO: 6056338 - DNA, 25 bp, Homo sapien
ttgtgataatgacgctgatgatggc

SEQ ID NO: 6056339 - DNA, 25 bp, Homo sapien
taacaaagcggctaggcacgtgccc

SEQ ID NO: 6056340 - DNA, 25 bp, Homo sapien
gaggaattcccctacaataacgcca

SEQ ID NO: 6056341 - DNA, 25 bp, Homo sapien
taatgacgctgatgatggctcccat

SEQ ID NO: 6056342 - DNA, 25 bp, Homo sapien
cgcgacaatcaggatcgggcccagg

SEQ ID NO: 6056343 - DNA, 25 bp, Homo sapien
gatggcgatgatcagcaggcttaag

SEQ ID NO: 6056344 - DNA, 25 bp, Homo sapien
agaagacgagtgtaaaattgaagac

SEQ ID NO: 6056345 - DNA, 25 bp, Homo sapien
atagttttcgtcgacctcttggaag

SEQ ID NO: 6056346 - DNA, 25 bp, Homo sapien
taaagtgacgccgatgtgtgacagt

SEQ ID NO: 6056347 - DNA, 25 bp, Homo sapien
aatcacaagatacggatctaaaatt

SEQ ID NO: 6056348 - DNA, 25 bp, Homo sapien
ctcgacgccctgatacatcagagtg

SEQ ID NO: 6056349 - DNA, 25 bp, Homo sapien
atcctaatccgaccttcgaaacgag

SEQ ID NO: 6056350 - DNA, 25 bp, Homo sapien
tcatatatcctaatccgaccttcga

SEQ ID NO: 6056351 - DNA, 25 bp, Homo sapien
ttcaaataaagtgacgccgatgtgt

SEQ ID NO: 6056352 - DNA, 25 bp, Homo sapien
ggcgaagatggcgatgatcagcagg

SEQ ID NO: 6056353 - DNA, 25 bp, Homo sapien
tcaccaagtttctccagcaataatc

SEQ ID NO: 6056354 - DNA, 25 bp, Homo sapien
cgttcacttttagtgttgaaataat

SEQ ID NO: 6056355 - DNA, 25 bp, Homo sapien
gatcgggcccagggccactttcggc

SEQ ID NO: 6056356 - DNA, 25 bp, Homo sapien
gcagtatgacttctttaaaaataac

SEQ ID NO: 6056357 - DNA, 25 bp, Homo sapien
ttggaatccgtaaataatcatatat

SEQ ID NO: 6056358 - DNA, 25 bp, Homo sapien
aacgtcccgagcaaaaagccaagca

SEQ ID NO: 6056359 - DNA, 25 bp, Homo sapien
gaagacttggaatccgtaaataatc

SEQ ID NO: 6056360 - DNA, 25 bp, Homo sapien
agcggctaggcacgtgcccataaac

SEQ ID NO: 6056361 - DNA, 25 bp, Homo sapien
gatgtgtgacagtaaagaaccgtca

SEQ ID NO: 6056362 - DNA, 25 bp, Homo sapien
cagagtggcgaagatggcgatgatc

SEQ ID NO: 6056363 - DNA, 25 bp, Homo sapien
cataaacgtcccgagcaaaaagcca

SEQ ID NO: 6056364 - DNA, 25 bp, Homo sapien
gtgttgaaataatcgcgggggagga

SEQ ID NO: 6056365 - DNA, 25 bp, Homo sapien
ttgcgccgaatgttttcatgacttt

SEQ ID NO: 6056366 - DNA, 25 bp, Homo sapien
cgatggttgtgataatgacgctgat

SEQ ID NO: 6056367 - DNA, 25 bp, Homo sapien
gaaccgtcaccaagtttctccagca

SEQ ID NO: 6056368 - DNA, 25 bp, Homo sapien
tcgtatagttttcgtcgacctcttg

SEQ ID NO: 6056369 - DNA, 25 bp, Homo sapien
gttcaaaatcacaagatacggatct

SEQ ID NO: 6056370 - DNA, 25 bp, Homo sapien
tgactttcgtatagttttcgtcgac

SEQ ID NO: 6056371 - DNA, 25 bp, Homo sapien
caccgtttcaaataaagtgacgccg

SEQ ID NO: 6056372 - DNA, 25 bp, Homo sapien
atgataaaccgacgttcacttttag

SEQ ID NO: 6056373 - DNA, 25 bp, Homo sapien
caacccatgataaaccgacgttcac

SEQ ID NO: 6056374 - DNA, 25 bp, Homo sapien
aataatcatatatcctaatccgacc

SEQ ID NO: 6056375 - DNA, 25 bp, Homo sapien
cgagtgtaaaattgaagacttggaa

SEQ ID NO: 6056376 - DNA, 25 bp, Homo sapien
taacgccaacccatgataaaccgac

SEQ ID NO: 6056377 - DNA, 25 bp, Homo sapien
taaaattgaagacttggaatccgta

SEQ ID NO: 6056378 - DNA, 25 bp, Homo sapien
tcgcgggggaggatgcaggcagtat

SEQ ID NO: 6056379 - DNA, 25 bp, Homo sapien
aagatacggatctaaaattctggca

SEQ ID NO: 6056380 - DNA, 25 bp, Homo sapien
agacaacgatggttgtgataatgac

SEQ ID NO: 6056381 - DNA, 25 bp, Homo sapien
cccgagcaaaaagccaagcaccgtt

SEQ ID NO: 6056382 - DNA, 25 bp, Homo sapien
taggcacgtgcccataaacgtcccg

SEQ ID NO: 6056383 - DNA, 25 bp, Homo sapien
ggccactttcggcattgcgttcaaa

SEQ ID NO: 6056384 - DNA, 25 bp, Homo sapien
cggtgtagacaacgatggttgtgat

SEQ ID NO: 6056385 - DNA, 25 bp, Homo sapien
atgcaggcagtatgacttctttaaa

SEQ ID NO: 6056386 - DNA, 25 bp, Homo sapien
tccgtaaataatcatatatcctaat

SEQ ID NO: 6056387 - DNA, 25 bp, Homo sapien
tgataaaactgggaccgagcgcgac

SEQ ID NO: 6056388 - DNA, 25 bp, Homo sapien
taaaattctggcaagtcggttagac

SEQ ID NO: 6056389 - DNA, 25 bp, Homo sapien
cgaatgttttcatgactttcgtata

SEQ ID NO: 6056390 - DNA, 25 bp, Homo sapien
ggaggatgcaggcagtatgacttct

SEQ ID NO: 6056391 - DNA, 25 bp, Homo sapien
cgatgatcagcaggcttaagaagac

SEQ ID NO: 6056392 - DNA, 25 bp, Homo sapien
tcccctacaataacgccaacccatg

SEQ ID NO: 6056393 - DNA, 25 bp, Homo sapien
gccctgatacatcagagtggcgaag

SEQ ID NO: 6056394 - DNA, 25 bp, Homo sapien
gacgccgatgtgtgacagtaaagaa

SEQ ID NO: 6056395 - DNA, 25 bp, Homo sapien
caagtcggttagaccaccataacaa

SEQ ID NO: 6056396 - DNA, 25 bp, Homo sapien
gcttaagaagacgagtgtaaaattg

SEQ ID NO: 6056397 - DNA, 25 bp, Homo sapien
aatcaggatcgggcccagggccact

SEQ ID NO: 6056398 - DNA, 25 bp, Homo sapien
tgatgctgataaaactgggaccgag

SEQ ID NO: 6056399 - DNA, 25 bp, Homo sapien
cattgcgttcaaaatcacaagatac

SEQ ID NO: 6056400 - DNA, 25 bp, Homo sapien
ttttcatgactttcgtatagttttc

SEQ ID NO: 6056401 - DNA, 25 bp, Homo sapien
cgtcgacctcttggaaggcggtgta

SEQ ID NO: 6056402 - DNA, 25 bp, Homo sapien
gccaagcaccgtttcaaataaagtg

SEQ ID NO: 6056403 - DNA, 25 bp, Homo sapien
cgcggttgatcaaaagtgcagtccg

SEQ ID NO: 6056404 - DNA, 25 bp, Homo sapien
ctgcacataatcatcttgagaaaga

SEQ ID NO: 6056405 - DNA, 25 bp, Homo sapien
tcgattttctagctctttattaatg

SEQ ID NO: 6056406 - DNA, 25 bp, Homo sapien
caagcacttcccatttgttgacgct

SEQ ID NO: 6056407 - DNA, 25 bp, Homo sapien
tgccgtgttttcttaatttattgac

SEQ ID NO: 6056408 - DNA, 25 bp, Homo sapien
gacagtccgggcgtgtggcgatcga

SEQ ID NO: 6056409 - DNA, 25 bp, Homo sapien
tattaatggcgccaagcacttccca

SEQ ID NO: 6056410 - DNA, 25 bp, Homo sapien
aaattccagcttgcccttttcatat

SEQ ID NO: 6056411 - DNA, 25 bp, Homo sapien
catcaggcagacagtccgggcgtgt

SEQ ID NO: 6056412 - DNA, 25 bp, Homo sapien
ttcatattgtttgaccatcggcgtg

SEQ ID NO: 6056413 - DNA, 25 bp, Homo sapien
ttctagctctttattaatggcgcca

SEQ ID NO: 6056414 - DNA, 25 bp, Homo sapien
ttattgacgccttccacatagcagt

SEQ ID NO: 6056415 - DNA, 25 bp, Homo sapien
gctctttattaatggcgccaagcac

SEQ ID NO: 6056416 - DNA, 25 bp, Homo sapien
attcagctctgccaagtaatcaacg

SEQ ID NO: 6056417 - DNA, 25 bp, Homo sapien
acggcctttgccgtttccatcatca

SEQ ID NO: 6056418 - DNA, 25 bp, Homo sapien
tgatcaaaagtgcagtccgttcatg

SEQ ID NO: 6056419 - DNA, 25 bp, Homo sapien
atttgttgacgctccacattggccc

SEQ ID NO: 6056420 - DNA, 25 bp, Homo sapien
gacatcatcaggcagacagtccggg

SEQ ID NO: 6056421 - DNA, 25 bp, Homo sapien
tagcagttaaaatcatgtgcgcggt

SEQ ID NO: 6056422 - DNA, 25 bp, Homo sapien
gtttccatcatcatgtcccggtctt

SEQ ID NO: 6056423 - DNA, 25 bp, Homo sapien
gacgagctgcacataatcatcttga

SEQ ID NO: 6056424 - DNA, 25 bp, Homo sapien
tggcgccaagcacttcccatttgtt

SEQ ID NO: 6056425 - DNA, 25 bp, Homo sapien
atcaacgacatcatcaggcagacag

SEQ ID NO: 6056426 - DNA, 25 bp, Homo sapien
ccacaaatacgtacgttcattcagc

SEQ ID NO: 6056427 - DNA, 25 bp, Homo sapien
tccacatagcagttaaaatcatgtg

SEQ ID NO: 6056428 - DNA, 25 bp, Homo sapien
acgttcattcagctctgccaagtaa

SEQ ID NO: 6056429 - DNA, 25 bp, Homo sapien
agatggattttaatgccctggacat

SEQ ID NO: 6056430 - DNA, 25 bp, Homo sapien
tctaaggcgaggacggattcgaatt

SEQ ID NO: 6056431 - DNA, 25 bp, Homo sapien
ggcgtgcctttcagtaggtgaagca

SEQ ID NO: 6056432 - DNA, 25 bp, Homo sapien
gtcacctgtaatgcggtggacgatc

SEQ ID NO: 6056433 - DNA, 25 bp, Homo sapien
acgatcatttcaggcggaatgatct

SEQ ID NO: 6056434 - DNA, 25 bp, Homo sapien
ataatcatcttgagaaagaaattcc

SEQ ID NO: 6056435 - DNA, 25 bp, Homo sapien
catgtgcgcggttgatcaaaagtgc

SEQ ID NO: 6056436 - DNA, 25 bp, Homo sapien
tccaaatctgcgacggcctttgccg

SEQ ID NO: 6056437 - DNA, 25 bp, Homo sapien
gaactgtttgaagcccaagctccac

SEQ ID NO: 6056438 - DNA, 25 bp, Homo sapien
cttccaaaggcagcccgttgataat

SEQ ID NO: 6056439 - DNA, 25 bp, Homo sapien
agaaagaaattccagcttgcccttt

SEQ ID NO: 6056440 - DNA, 25 bp, Homo sapien
ctcaatcggtccgtcacctgtaatg

SEQ ID NO: 6056441 - DNA, 25 bp, Homo sapien
cagtccgttcatgaactgtttgaag

SEQ ID NO: 6056442 - DNA, 25 bp, Homo sapien
gcgtgtggcgatcgaaatgccgacc

SEQ ID NO: 6056443 - DNA, 25 bp, Homo sapien
catcaactcaatcggtccgtcacct

SEQ ID NO: 6056444 - DNA, 25 bp, Homo sapien
ctttccttgatagctgcctcgattt

SEQ ID NO: 6056445 - DNA, 25 bp, Homo sapien
attttaatgccctggacatccaaat

SEQ ID NO: 6056446 - DNA, 25 bp, Homo sapien
tgatctcaagctgatcgcagacgag

SEQ ID NO: 6056447 - DNA, 25 bp, Homo sapien
aaagtgcagtccgttcatgaactgt

SEQ ID NO: 6056448 - DNA, 25 bp, Homo sapien
gccgaccacatcatctaaggcgagg

SEQ ID NO: 6056449 - DNA, 25 bp, Homo sapien
ttgatagctgcctcgattttctagc

SEQ ID NO: 6056450 - DNA, 25 bp, Homo sapien
gatcgcagacgagctgcacataatc

SEQ ID NO: 6056451 - DNA, 25 bp, Homo sapien
caagctgatcgcagacgagctgcac

SEQ ID NO: 6056452 - DNA, 25 bp, Homo sapien
gcccgttgataatatgcgagcagac

SEQ ID NO: 6056453 - DNA, 25 bp, Homo sapien
agtaggtgaagcagatggattttaa

SEQ ID NO: 6056454 - DNA, 25 bp, Homo sapien
cggtggacgatcatttcaggcggaa

SEQ ID NO: 6056455 - DNA, 25 bp, Homo sapien
ccggtcttccaaaggcagcccgttg

SEQ ID NO: 6056456 - DNA, 25 bp, Homo sapien
gttcatgaactgtttgaagcccaag

SEQ ID NO: 6056457 - DNA, 25 bp, Homo sapien
caagtaatcaacgacatcatcaggc

SEQ ID NO: 6056458 - DNA, 25 bp, Homo sapien
aaggcagcccgttgataatatgcga

SEQ ID NO: 6056459 - DNA, 25 bp, Homo sapien
tgaagcagatggattttaatgccct

SEQ ID NO: 6056460 - DNA, 25 bp, Homo sapien
cctttcagtaggtgaagcagatgga

SEQ ID NO: 6056461 - DNA, 25 bp, Homo sapien
tgataatatgcgagcagacacgtat

SEQ ID NO: 6056462 - DNA, 25 bp, Homo sapien
atacgtacgttcattcagctctgcc

SEQ ID NO: 6056463 - DNA, 25 bp, Homo sapien
cttcccatttgttgacgctccacat

SEQ ID NO: 6056464 - DNA, 25 bp, Homo sapien
ggcgatcgaaatgccgaccacatca

SEQ ID NO: 6056465 - DNA, 25 bp, Homo sapien
ccacattggcccgatcatcaactca

SEQ ID NO: 6056466 - DNA, 25 bp, Homo sapien
atgccctggacatccaaatctgcga

SEQ ID NO: 6056467 - DNA, 25 bp, Homo sapien
tgaagcccaagctccacccacaaat

SEQ ID NO: 6056468 - DNA, 25 bp, Homo sapien
cggtccgtcacctgtaatgcggtgg

SEQ ID NO: 6056469 - DNA, 25 bp, Homo sapien
tttcaggcggaatgatctcaagctg

SEQ ID NO: 6056470 - DNA, 25 bp, Homo sapien
tctgcgacggcctttgccgtttcca

SEQ ID NO: 6056471 - DNA, 25 bp, Homo sapien
gcggaatgatctcaagctgatcgca

SEQ ID NO: 6056472 - DNA, 25 bp, Homo sapien
catgtcccggtcttccaaaggcagc

SEQ ID NO: 6056473 - DNA, 25 bp, Homo sapien
tgacgctccacattggcccgatcat

SEQ ID NO: 6056474 - DNA, 25 bp, Homo sapien
cacgtatgccgtgttttcttaattt

SEQ ID NO: 6056475 - DNA, 25 bp, Homo sapien
ccaagctccacccacaaatacgtac

SEQ ID NO: 6056476 - DNA, 25 bp, Homo sapien
tggacatccaaatctgcgacggcct

SEQ ID NO: 6056477 - DNA, 25 bp, Homo sapien
cacatcatctaaggcgaggacggat

SEQ ID NO: 6056478 - DNA, 25 bp, Homo sapien
ccgatcatcaactcaatcggtccgt

SEQ ID NO: 6056479 - DNA, 25 bp, Homo sapien
cttaatttattgacgccttccacat

SEQ ID NO: 6056480 - DNA, 25 bp, Homo sapien
atcttgagaaagaaattccagcttg

SEQ ID NO: 6056481 - DNA, 25 bp, Homo sapien
ttgtttgaccatcggcgtgcctttc

SEQ ID NO: 6056482 - DNA, 25 bp, Homo sapien
gtaatgcggtggacgatcatttcag

SEQ ID NO: 6056483 - DNA, 25 bp, Homo sapien
acgccttccacatagcagttaaaat

SEQ ID NO: 6056484 - DNA, 25 bp, Homo sapien
gaccatcggcgtgcctttcagtagg

SEQ ID NO: 6056485 - DNA, 25 bp, Homo sapien
gtccgggcgtgtggcgatcgaaatg

SEQ ID NO: 6056486 - DNA, 25 bp, Homo sapien
cagcttgcccttttcatattgtttg

SEQ ID NO: 6056487 - DNA, 25 bp, Homo sapien
cgaaatgccgaccacatcatctaag

SEQ ID NO: 6056488 - DNA, 25 bp, Homo sapien
agcagacacgtatgccgtgttttct

SEQ ID NO: 6056489 - DNA, 25 bp, Homo sapien
tatgcgagcagacacgtatgccgtg

SEQ ID NO: 6056490 - DNA, 25 bp, Homo sapien
tttgccgtttccatcatcatgtccc

SEQ ID NO: 6056491 - DNA, 25 bp, Homo sapien
gctgcctcgattttctagctcttta

SEQ ID NO: 6056492 - DNA, 25 bp, Homo sapien
attggcccgatcatcaactcaatcg

SEQ ID NO: 6056493 - DNA, 25 bp, Homo sapien
ctctgccaagtaatcaacgacatca

SEQ ID NO: 6056494 - DNA, 25 bp, Homo sapien
gcccttttcatattgtttgaccatc

SEQ ID NO: 6056495 - DNA, 25 bp, Homo sapien
tccacccacaaatacgtacgttcat

SEQ ID NO: 6056496 - DNA, 25 bp, Homo sapien
ttaaaatcatgtgcgcggttgatca

SEQ ID NO: 6056497 - DNA, 25 bp, Homo sapien
aaatactgcacccatttaggtactg

SEQ ID NO: 6056498 - DNA, 25 bp, Homo sapien
atagtcatgatagccggaatgacta

SEQ ID NO: 6056499 - DNA, 25 bp, Homo sapien
ctaacaataatcattcccaagctgt

SEQ ID NO: 6056500 - DNA, 25 bp, Homo sapien
ctgcaccgggcggttaagcggcttc

SEQ ID NO: 6056501 - DNA, 25 bp, Homo sapien
cggcttccataagaagaaatatccg

SEQ ID NO: 6056502 - DNA, 25 bp, Homo sapien
aagctgtaattgtgaaaataaacgg

SEQ ID NO: 6056503 - DNA, 25 bp, Homo sapien
tctggcttcaaaagcatgatcagca

SEQ ID NO: 6056504 - DNA, 25 bp, Homo sapien
taattgtgaaaataaacggcctgat

SEQ ID NO: 6056505 - DNA, 25 bp, Homo sapien
gttaagcggcttccataagaagaaa

SEQ ID NO: 6056506 - DNA, 25 bp, Homo sapien
agcccatgattcctatgataataac

SEQ ID NO: 6056507 - DNA, 25 bp, Homo sapien
gctgtgcgaaactattgcctgtcaa

SEQ ID NO: 6056508 - DNA, 25 bp, Homo sapien
taagccagcatgctaacaataatca

SEQ ID NO: 6056509 - DNA, 25 bp, Homo sapien
tacccatgccaatgagataaccggc

SEQ ID NO: 6056510 - DNA, 25 bp, Homo sapien
caaagctctcgcttgcagtaaatcc

SEQ ID NO: 6056511 - DNA, 25 bp, Homo sapien
gttgatcacaggcaggctgatgagt

SEQ ID NO: 6056512 - DNA, 25 bp, Homo sapien
gctcctccggccataaccaaagaat

SEQ ID NO: 6056513 - DNA, 25 bp, Homo sapien
tgccaatgagataaccggcaaagct

SEQ ID NO: 6056514 - DNA, 25 bp, Homo sapien
gatgagtaaaaacggcgaaatggcc

SEQ ID NO: 6056515 - DNA, 25 bp, Homo sapien
caggctgatgagtaaaaacggcgaa

SEQ ID NO: 6056516 - DNA, 25 bp, Homo sapien
gcgaaatggccacggtaaatgagac

SEQ ID NO: 6056517 - DNA, 25 bp, Homo sapien
tattgcctgtcaaagctcctccggc

SEQ ID NO: 6056518 - DNA, 25 bp, Homo sapien
cacctgtacccatgccaatgagata

SEQ ID NO: 6056519 - DNA, 25 bp, Homo sapien
agcatgatcagcaaaacagacaaaa

SEQ ID NO: 6056520 - DNA, 25 bp, Homo sapien
cattttaacaaagctaatatagccg

SEQ ID NO: 6056521 - DNA, 25 bp, Homo sapien
tgcacccatttaggtactggaccat

SEQ ID NO: 6056522 - DNA, 25 bp, Homo sapien
ggtactggaccatggataaaatcta

SEQ ID NO: 6056523 - DNA, 25 bp, Homo sapien
ttaccgcacctgtacccatgccaat

SEQ ID NO: 6056524 - DNA, 25 bp, Homo sapien
aaagaataagccagcatgctaacaa

SEQ ID NO: 6056525 - DNA, 25 bp, Homo sapien
ggccacggtaaatgagactagaagc

SEQ ID NO: 6056526 - DNA, 25 bp, Homo sapien
cgatgatctgcaccgggcggttaag

SEQ ID NO: 6056527 - DNA, 25 bp, Homo sapien
tgactaaataatatggtgaattctc

SEQ ID NO: 6056528 - DNA, 25 bp, Homo sapien
agtctacataaattatcggaatgaa

SEQ ID NO: 6056529 - DNA, 25 bp, Homo sapien
aaccggcaaagctctcgcttgcagt

SEQ ID NO: 6056530 - DNA, 25 bp, Homo sapien
tcattagacattttaacaaagctaa

SEQ ID NO: 6056531 - DNA, 25 bp, Homo sapien
gcctgatctggcttcaaaagcatga

SEQ ID NO: 6056532 - DNA, 25 bp, Homo sapien
acataacctatgagctgcggcacca

SEQ ID NO: 6056533 - DNA, 25 bp, Homo sapien
tgaaaataaacggcctgatctggct

SEQ ID NO: 6056534 - DNA, 25 bp, Homo sapien
aacaaagctaatatagccgatgatg

SEQ ID NO: 6056535 - DNA, 25 bp, Homo sapien
cagcccatttcgagtctacataaat

SEQ ID NO: 6056536 - DNA, 25 bp, Homo sapien
actaatcaagaaaccgattaccgca

SEQ ID NO: 6056537 - DNA, 25 bp, Homo sapien
aaatctattgatccgccaaaaagga

SEQ ID NO: 6056538 - DNA, 25 bp, Homo sapien
cacaggcaggctgatgagtaaaaac

SEQ ID NO: 6056539 - DNA, 25 bp, Homo sapien
gtttctttcattagacattttaaca

SEQ ID NO: 6056540 - DNA, 25 bp, Homo sapien
aatatccgtttctttcattagacat

SEQ ID NO: 6056541 - DNA, 25 bp, Homo sapien
aaaggatctcgaggttgatcacagg

SEQ ID NO: 6056542 - DNA, 25 bp, Homo sapien
ggaatgaaatactgcacccatttag

SEQ ID NO: 6056543 - DNA, 25 bp, Homo sapien
ctatgataataacgatgatctgcac

SEQ ID NO: 6056544 - DNA, 25 bp, Homo sapien
gaagaaatatccgtttctttcatta

SEQ ID NO: 6056545 - DNA, 25 bp, Homo sapien
ggaccatggataaaatctattgatc

SEQ ID NO: 6056546 - DNA, 25 bp, Homo sapien
tgagataaccggcaaagctctcgct

SEQ ID NO: 6056547 - DNA, 25 bp, Homo sapien
tctcgaggttgatcacaggcaggct

SEQ ID NO: 6056548 - DNA, 25 bp, Homo sapien
attatcggaatgaaatactgcaccc

SEQ ID NO: 6056549 - DNA, 25 bp, Homo sapien
caaaatagccgaagcccatgattcc

SEQ ID NO: 6056550 - DNA, 25 bp, Homo sapien
cgatgatgtaaaaaatgatagtcat

SEQ ID NO: 6056551 - DNA, 25 bp, Homo sapien
ttgcagtaaatccaaaatagccgaa

SEQ ID NO: 6056552 - DNA, 25 bp, Homo sapien
ttcaaaagcatgatcagcaaaacag

SEQ ID NO: 6056553 - DNA, 25 bp, Homo sapien
ccggccataaccaaagaataagcca

SEQ ID NO: 6056554 - DNA, 25 bp, Homo sapien
ccggaatgactaaataatatggtga

SEQ ID NO: 6056555 - DNA, 25 bp, Homo sapien
aaccgattaccgcacctgtacccat

SEQ ID NO: 6056556 - DNA, 25 bp, Homo sapien
ttgatccgccaaaaaggatctcgag

SEQ ID NO: 6056557 - DNA, 25 bp, Homo sapien
gctaatatagccgatgatgtaaaaa

SEQ ID NO: 6056558 - DNA, 25 bp, Homo sapien
tgatagccggaatgactaaataata

SEQ ID NO: 6056559 - DNA, 25 bp, Homo sapien
tagaagctgtgcgaaactattgcct

SEQ ID NO: 6056560 - DNA, 25 bp, Homo sapien
tctcgcttgcagtaaatccaaaata

SEQ ID NO: 6056561 - DNA, 25 bp, Homo sapien
ataaccaaagaataagccagcatgc

SEQ ID NO: 6056562 - DNA, 25 bp, Homo sapien
aacggcgaaatggccacggtaaatg

SEQ ID NO: 6056563 - DNA, 25 bp, Homo sapien
agcatgctaacaataatcattccca

SEQ ID NO: 6056564 - DNA, 25 bp, Homo sapien
ataatcattcccaagctgtaattgt

SEQ ID NO: 6056565 - DNA, 25 bp, Homo sapien
taaacggcctgatctggcttcaaaa

SEQ ID NO: 6056566 - DNA, 25 bp, Homo sapien
cgccaaaaaggatctcgaggttgat

SEQ ID NO: 6056567 - DNA, 25 bp, Homo sapien
agccgaagcccatgattcctatgat

SEQ ID NO: 6056568 - DNA, 25 bp, Homo sapien
cataaattatcggaatgaaatactg

SEQ ID NO: 6056569 - DNA, 25 bp, Homo sapien
aattctcagcccatttcgagtctac

SEQ ID NO: 6056570 - DNA, 25 bp, Homo sapien
cgaaactattgcctgtcaaagctcc

SEQ ID NO: 6056571 - DNA, 25 bp, Homo sapien
ggtaaatgagactagaagctgtgcg

SEQ ID NO: 6056572 - DNA, 25 bp, Homo sapien
attcccaagctgtaattgtgaaaat

SEQ ID NO: 6056573 - DNA, 25 bp, Homo sapien
tgagactagaagctgtgcgaaacta

SEQ ID NO: 6056574 - DNA, 25 bp, Homo sapien
aaaatgatagtcatgatagccggaa

SEQ ID NO: 6056575 - DNA, 25 bp, Homo sapien
taaatccaaaatagccgaagcccat

SEQ ID NO: 6056576 - DNA, 25 bp, Homo sapien
atggtgaattctcagcccatttcga

SEQ ID NO: 6056577 - DNA, 25 bp, Homo sapien
tatagccgatgatgtaaaaaatgat

SEQ ID NO: 6056578 - DNA, 25 bp, Homo sapien
cgggcggttaagcggcttccataag

SEQ ID NO: 6056579 - DNA, 25 bp, Homo sapien
aataatatggtgaattctcagccca

SEQ ID NO: 6056580 - DNA, 25 bp, Homo sapien
atcagcaaaacagacaaaacataac

SEQ ID NO: 6056581 - DNA, 25 bp, Homo sapien
tgtaaaaaatgatagtcatgatagc

SEQ ID NO: 6056582 - DNA, 25 bp, Homo sapien
ccataagaagaaatatccgtttctt

SEQ ID NO: 6056583 - DNA, 25 bp, Homo sapien
tgattcctatgataataacgatgat

SEQ ID NO: 6056584 - DNA, 25 bp, Homo sapien
taataacgatgatctgcaccgggcg

SEQ ID NO: 6056585 - DNA, 25 bp, Homo sapien
aaaacagacaaaacataacctatga

SEQ ID NO: 6056586 - DNA, 25 bp, Homo sapien
atttcgagtctacataaattatcgg

SEQ ID NO: 6056587 - DNA, 25 bp, Homo sapien
tggataaaatctattgatccgccaa

SEQ ID NO: 6056588 - DNA, 25 bp, Homo sapien
catttaggtactggaccatggataa

SEQ ID NO: 6056589 - DNA, 25 bp, Homo sapien
gacaaaacataacctatgagctgcg

SEQ ID NO: 6056590 - DNA, 25 bp, Homo sapien
tcaagaaaccgattaccgcacctgt

SEQ ID NO: 6056591 - DNA, 25 bp, Homo sapien
cacagtgagctttttgccatacttt

SEQ ID NO: 6056592 - DNA, 25 bp, Homo sapien
aaaggatgatttctctcctctgcca

SEQ ID NO: 6056593 - DNA, 25 bp, Homo sapien
ttgcttgctcaaatttcgtattgtt

SEQ ID NO: 6056594 - DNA, 25 bp, Homo sapien
atgagaatgcagatgctgtaggagt

SEQ ID NO: 6056595 - DNA, 25 bp, Homo sapien
tgcagtgaagtcgtaagatgcagca

SEQ ID NO: 6056596 - DNA, 25 bp, Homo sapien
tttcgtattgttttctaatacttgc

SEQ ID NO: 6056597 - DNA, 25 bp, Homo sapien
acgattgagaacgagcggagcaaga

SEQ ID NO: 6056598 - DNA, 25 bp, Homo sapien
atgctgtaggagtaagcgacaccgt

SEQ ID NO: 6056599 - DNA, 25 bp, Homo sapien
tttcatgggcttttgcaaattgctt

SEQ ID NO: 6056600 - DNA, 25 bp, Homo sapien
aatattctccggcatgaatggcgtg

SEQ ID NO: 6056601 - DNA, 25 bp, Homo sapien
gcttctcagcacacgattgagaacg

SEQ ID NO: 6056602 - DNA, 25 bp, Homo sapien
atggcgtgggaatgaatccattgca

SEQ ID NO: 6056603 - DNA, 25 bp, Homo sapien
ttcaagaggtcttgtttcatctaaa

SEQ ID NO: 6056604 - DNA, 25 bp, Homo sapien
ctaagccttcaattgcttgctcaaa

SEQ ID NO: 6056605 - DNA, 25 bp, Homo sapien
tgcaccgcttgccatggtataaata

SEQ ID NO: 6056606 - DNA, 25 bp, Homo sapien
tgggaatgaatccattgcatttcca

SEQ ID NO: 6056607 - DNA, 25 bp, Homo sapien
gtcaattgcagtgaagtcgtaagat

SEQ ID NO: 6056608 - DNA, 25 bp, Homo sapien
taaataatgctttctttttcatggg

SEQ ID NO: 6056609 - DNA, 25 bp, Homo sapien
cctgcaattgatctaagccttcaat

SEQ ID NO: 6056610 - DNA, 25 bp, Homo sapien
ctcgtctgcatagcttctcagcaca

SEQ ID NO: 6056611 - DNA, 25 bp, Homo sapien
atagcctttaactgaatcgtcaatt

SEQ ID NO: 6056612 - DNA, 25 bp, Homo sapien
cagcacacgattgagaacgagcgga

SEQ ID NO: 6056613 - DNA, 25 bp, Homo sapien
aagcgcccgctcttcaagaggtctt

SEQ ID NO: 6056614 - DNA, 25 bp, Homo sapien
tggcgttgtcagcttcctgcttaag

SEQ ID NO: 6056615 - DNA, 25 bp, Homo sapien
atttccatgagaatgcagatgctgt

SEQ ID NO: 6056616 - DNA, 25 bp, Homo sapien
tacaaaacgccatagtttgtattga

SEQ ID NO: 6056617 - DNA, 25 bp, Homo sapien
tttcgagaaggtaagcgcccgctct

SEQ ID NO: 6056618 - DNA, 25 bp, Homo sapien
tgccagctcgtctgcatagcttctc

SEQ ID NO: 6056619 - DNA, 25 bp, Homo sapien
ggctttttcatatacagcctgcaat

SEQ ID NO: 6056620 - DNA, 25 bp, Homo sapien
gagaacgagcggagcaagatagcct

SEQ ID NO: 6056621 - DNA, 25 bp, Homo sapien
atttgatacaaaacgccatagtttg

SEQ ID NO: 6056622 - DNA, 25 bp, Homo sapien
taggagtaagcgacaccgtagtttg

SEQ ID NO: 6056623 - DNA, 25 bp, Homo sapien
gagcggagcaagatagcctttaact

SEQ ID NO: 6056624 - DNA, 25 bp, Homo sapien
tgaatccattgcatttccatgagaa

SEQ ID NO: 6056625 - DNA, 25 bp, Homo sapien
gcagggttccaaaaacgatttgata

SEQ ID NO: 6056626 - DNA, 25 bp, Homo sapien
cattgcatttccatgagaatgcaga

SEQ ID NO: 6056627 - DNA, 25 bp, Homo sapien
ttgcaaattgcttggcgttgtcagc

SEQ ID NO: 6056628 - DNA, 25 bp, Homo sapien
tgtcagcttcctgcttaagggcttt

SEQ ID NO: 6056629 - DNA, 25 bp, Homo sapien
attgcttggcgttgtcagcttcctg

SEQ ID NO: 6056630 - DNA, 25 bp, Homo sapien
gaaggtaagcgcccgctcttcaaga

SEQ ID NO: 6056631 - DNA, 25 bp, Homo sapien
ccccaatcgtactgggcaacatatt

SEQ ID NO: 6056632 - DNA, 25 bp, Homo sapien
tgcatagcttctcagcacacgattg

SEQ ID NO: 6056633 - DNA, 25 bp, Homo sapien
atctaaaccgagcaggatgataaac

SEQ ID NO: 6056634 - DNA, 25 bp, Homo sapien
tttgccatactttttcgagaaggta

SEQ ID NO: 6056635 - DNA, 25 bp, Homo sapien
ttcatatacagcctgcaattgatct

SEQ ID NO: 6056636 - DNA, 25 bp, Homo sapien
tgtttcatctaaaccgagcaggatg

SEQ ID NO: 6056637 - DNA, 25 bp, Homo sapien
gggcttttgcaaattgcttggcgtt

SEQ ID NO: 6056638 - DNA, 25 bp, Homo sapien
tagtttgcaccgcttgccatggtat

SEQ ID NO: 6056639 - DNA, 25 bp, Homo sapien
accgagcaggatgataaacggcacg

SEQ ID NO: 6056640 - DNA, 25 bp, Homo sapien
tctccggcatgaatggcgtgggaat

SEQ ID NO: 6056641 - DNA, 25 bp, Homo sapien
cggtccgtgaaaatattctccggca

SEQ ID NO: 6056642 - DNA, 25 bp, Homo sapien
aggtcttgtttcatctaaaccgagc

SEQ ID NO: 6056643 - DNA, 25 bp, Homo sapien
tcatcaccccaatcgtactgggcaa

SEQ ID NO: 6056644 - DNA, 25 bp, Homo sapien
tgatttctctcctctgccagctcgt

SEQ ID NO: 6056645 - DNA, 25 bp, Homo sapien
gagctttttgccatactttttcgag

SEQ ID NO: 6056646 - DNA, 25 bp, Homo sapien
atcgcaagcgcctcatcaccccaat

SEQ ID NO: 6056647 - DNA, 25 bp, Homo sapien
cttaagggctttttcatatacagcc

SEQ ID NO: 6056648 - DNA, 25 bp, Homo sapien
tgcagcatcaagcacagtgagcttt

SEQ ID NO: 6056649 - DNA, 25 bp, Homo sapien
catactttttcgagaaggtaagcgc

SEQ ID NO: 6056650 - DNA, 25 bp, Homo sapien
acgccatagtttgtattgatcgcaa

SEQ ID NO: 6056651 - DNA, 25 bp, Homo sapien
tcaataatttcaaacggtccgtgaa

SEQ ID NO: 6056652 - DNA, 25 bp, Homo sapien
aaaacgatttgatacaaaacgccat

SEQ ID NO: 6056653 - DNA, 25 bp, Homo sapien
catggtataaataatgctttctttt

SEQ ID NO: 6056654 - DNA, 25 bp, Homo sapien
cttcctgcttaagggctttttcata

SEQ ID NO: 6056655 - DNA, 25 bp, Homo sapien
gaagtcgtaagatgcagcatcaagc

SEQ ID NO: 6056656 - DNA, 25 bp, Homo sapien
gcatgaatggcgtgggaatgaatcc

SEQ ID NO: 6056657 - DNA, 25 bp, Homo sapien
tttaactgaatcgtcaattgcagtg

SEQ ID NO: 6056658 - DNA, 25 bp, Homo sapien
cgtgaaaatattctccggcatgaat

SEQ ID NO: 6056659 - DNA, 25 bp, Homo sapien
ataaacggcacggattcatcaataa

SEQ ID NO: 6056660 - DNA, 25 bp, Homo sapien
tgaatcgtcaattgcagtgaagtcg

SEQ ID NO: 6056661 - DNA, 25 bp, Homo sapien
atgcagatgctgtaggagtaagcga

SEQ ID NO: 6056662 - DNA, 25 bp, Homo sapien
atcaagcacagtgagctttttgcca

SEQ ID NO: 6056663 - DNA, 25 bp, Homo sapien
agcgcctcatcaccccaatcgtact

SEQ ID NO: 6056664 - DNA, 25 bp, Homo sapien
cttcaattgcttgctcaaatttcgt

SEQ ID NO: 6056665 - DNA, 25 bp, Homo sapien
attgatctaagccttcaattgcttg

SEQ ID NO: 6056666 - DNA, 25 bp, Homo sapien
gtattgatcgcaagcgcctcatcac

SEQ ID NO: 6056667 - DNA, 25 bp, Homo sapien
caggatgataaacggcacggattca

SEQ ID NO: 6056668 - DNA, 25 bp, Homo sapien
tattgttttctaatacttgcagggt

SEQ ID NO: 6056669 - DNA, 25 bp, Homo sapien
gattcatcaataatttcaaacggtc

SEQ ID NO: 6056670 - DNA, 25 bp, Homo sapien
agataaaggatgatttctctcctct

SEQ ID NO: 6056671 - DNA, 25 bp, Homo sapien
taagcgacaccgtagtttgcaccgc

SEQ ID NO: 6056672 - DNA, 25 bp, Homo sapien
atacttgcagggttccaaaaacgat

SEQ ID NO: 6056673 - DNA, 25 bp, Homo sapien
ctcctctgccagctcgtctgcatag

SEQ ID NO: 6056674 - DNA, 25 bp, Homo sapien
ggcacggattcatcaataatttcaa

SEQ ID NO: 6056675 - DNA, 25 bp, Homo sapien
acaccgtagtttgcaccgcttgcca

SEQ ID NO: 6056676 - DNA, 25 bp, Homo sapien
gctcaaatttcgtattgttttctaa

SEQ ID NO: 6056677 - DNA, 25 bp, Homo sapien
ccgctcttcaagaggtcttgtttca

SEQ ID NO: 6056678 - DNA, 25 bp, Homo sapien
gcttgccatggtataaataatgctt

SEQ ID NO: 6056679 - DNA, 25 bp, Homo sapien
tctttttcatgggcttttgcaaatt

SEQ ID NO: 6056680 - DNA, 25 bp, Homo sapien
tcaaacggtccgtgaaaatattctc

SEQ ID NO: 6056681 - DNA, 25 bp, Homo sapien
tttctaatacttgcagggttccaaa

SEQ ID NO: 6056682 - DNA, 25 bp, Homo sapien
gtaagatgcagcatcaagcacagtg

SEQ ID NO: 6056683 - DNA, 25 bp, Homo sapien
agcaagatagcctttaactgaatcg

SEQ ID NO: 6056684 - DNA, 25 bp, Homo sapien
atacagcctgcaattgatctaagcc

SEQ ID NO: 6056685 - DNA, 25 bp, Homo sapien
tagtttgtattgatcgcaagcgcct

SEQ ID NO: 6056686 - DNA, 25 bp, Homo sapien
acttgatatgtattgatatcttcaa

SEQ ID NO: 6056687 - DNA, 25 bp, Homo sapien
tttggtctatgatgtgggagccgag

SEQ ID NO: 6056688 - DNA, 25 bp, Homo sapien
cagtcacggctttaggcatcccaaa

SEQ ID NO: 6056689 - DNA, 25 bp, Homo sapien
tgccttctttttcccgccaccgcgc

SEQ ID NO: 6056690 - DNA, 25 bp, Homo sapien
tccagggttaaatgaaaatagtcaa

SEQ ID NO: 6056691 - DNA, 25 bp, Homo sapien
ttcaatgatgcggatgacattaata

SEQ ID NO: 6056692 - DNA, 25 bp, Homo sapien
tccatatttgataaagctagaatct

SEQ ID NO: 6056693 - DNA, 25 bp, Homo sapien
ttcaggtctgtagcggttataggaa

SEQ ID NO: 6056694 - DNA, 25 bp, Homo sapien
ctgtttttttgtcggagccacgaat

SEQ ID NO: 6056695 - DNA, 25 bp, Homo sapien
cggagccacgaatggttgtaagctt

SEQ ID NO: 6056696 - DNA, 25 bp, Homo sapien
ggcattttcccgctgggccatcacg

SEQ ID NO: 6056697 - DNA, 25 bp, Homo sapien
tgctttccgctattttacggtaata

SEQ ID NO: 6056698 - DNA, 25 bp, Homo sapien
gcagggtttggtctatgatgtggga

SEQ ID NO: 6056699 - DNA, 25 bp, Homo sapien
cggaacatccgcaccccagctgtca

SEQ ID NO: 6056700 - DNA, 25 bp, Homo sapien
ggatgacattaataccttcctcagc

SEQ ID NO: 6056701 - DNA, 25 bp, Homo sapien
ctggttttcttcccgctctgagtgc

SEQ ID NO: 6056702 - DNA, 25 bp, Homo sapien
cacgaatggttgtaagctttccgta

SEQ ID NO: 6056703 - DNA, 25 bp, Homo sapien
gcgcagcaccttctcgtatgctttc

SEQ ID NO: 6056704 - DNA, 25 bp, Homo sapien
tttccatggatttgataacgaggtc

SEQ ID NO: 6056705 - DNA, 25 bp, Homo sapien
tctttttcccgccaccgcgcttgaa

SEQ ID NO: 6056706 - DNA, 25 bp, Homo sapien
cattaataccttcctcagcagtgac

SEQ ID NO: 6056707 - DNA, 25 bp, Homo sapien
tgtgggagccgagatcatacagcgt

SEQ ID NO: 6056708 - DNA, 25 bp, Homo sapien
taccagtggcagtgccttctttttc

SEQ ID NO: 6056709 - DNA, 25 bp, Homo sapien
taaggtaggagccatttactgatgg

SEQ ID NO: 6056710 - DNA, 25 bp, Homo sapien
gtttcggcattttcccgctgggcca

SEQ ID NO: 6056711 - DNA, 25 bp, Homo sapien
cgctctgagtgcgtcttcctgtccg

SEQ ID NO: 6056712 - DNA, 25 bp, Homo sapien
gattgatcctccgtatagaatggct

SEQ ID NO: 6056713 - DNA, 25 bp, Homo sapien
ttcccgctgggccatcacgtttgca

SEQ ID NO: 6056714 - DNA, 25 bp, Homo sapien
aggagccatttactgatggaatcgt

SEQ ID NO: 6056715 - DNA, 25 bp, Homo sapien
tccgtaaaactccggaacatccgca

SEQ ID NO: 6056716 - DNA, 25 bp, Homo sapien
ttccatcgcggcttcaatgatgcgg

SEQ ID NO: 6056717 - DNA, 25 bp, Homo sapien
tggcagtgccttctttttcccgcca

SEQ ID NO: 6056718 - DNA, 25 bp, Homo sapien
tggatttgataacgaggtccgtttg

SEQ ID NO: 6056719 - DNA, 25 bp, Homo sapien
actgctttccatcgcggcttcaatg

SEQ ID NO: 6056720 - DNA, 25 bp, Homo sapien
aggtccgtttgccggaacgattgat

SEQ ID NO: 6056721 - DNA, 25 bp, Homo sapien
acagcgtaccagtggcagtgccttc

SEQ ID NO: 6056722 - DNA, 25 bp, Homo sapien
aaactccggaacatccgcaccccag

SEQ ID NO: 6056723 - DNA, 25 bp, Homo sapien
agccgagatcatacagcgtaccagt

SEQ ID NO: 6056724 - DNA, 25 bp, Homo sapien
accccagctgtcatcctctggtttt

SEQ ID NO: 6056725 - DNA, 25 bp, Homo sapien
gtcttcctgtccgtcaattccatat

SEQ ID NO: 6056726 - DNA, 25 bp, Homo sapien
ccatcacgtttgcagtcacggcttt

SEQ ID NO: 6056727 - DNA, 25 bp, Homo sapien
cttgaagcttgccataatccagggt

SEQ ID NO: 6056728 - DNA, 25 bp, Homo sapien
taataagtaaggtaggagccattta

SEQ ID NO: 6056729 - DNA, 25 bp, Homo sapien
atcctccgtatagaatggcttgaag

SEQ ID NO: 6056730 - DNA, 25 bp, Homo sapien
gctgtcatcctctggttttcttccc

SEQ ID NO: 6056731 - DNA, 25 bp, Homo sapien
ccgcgcttgaacttcaggtctgtag

SEQ ID NO: 6056732 - DNA, 25 bp, Homo sapien
taggcatcccaaacaaatgcagggt

SEQ ID NO: 6056733 - DNA, 25 bp, Homo sapien
tatgtattgatatcttcaagggatc

SEQ ID NO: 6056734 - DNA, 25 bp, Homo sapien
atccgcaccccagctgtcatcctct

SEQ ID NO: 6056735 - DNA, 25 bp, Homo sapien
tggcagcgcagcaccttctcgtatg

SEQ ID NO: 6056736 - DNA, 25 bp, Homo sapien
tttgataaagctagaatcttttcca

SEQ ID NO: 6056737 - DNA, 25 bp, Homo sapien
taccttcctcagcagtgactggcag

SEQ ID NO: 6056738 - DNA, 25 bp, Homo sapien
cggaacgattgatcctccgtataga

SEQ ID NO: 6056739 - DNA, 25 bp, Homo sapien
ctgtccgtcaattccatatttgata

SEQ ID NO: 6056740 - DNA, 25 bp, Homo sapien
ctcgtatgctttccgctattttacg

SEQ ID NO: 6056741 - DNA, 25 bp, Homo sapien
tgatgcggatgacattaataccttc

SEQ ID NO: 6056742 - DNA, 25 bp, Homo sapien
cgtttgcagtcacggctttaggcat

SEQ ID NO: 6056743 - DNA, 25 bp, Homo sapien
gaatggcttgaagcttgccataatc

SEQ ID NO: 6056744 - DNA, 25 bp, Homo sapien
agcttgccataatccagggttaaat

SEQ ID NO: 6056745 - DNA, 25 bp, Homo sapien
gtcaattccatatttgataaagcta

SEQ ID NO: 6056746 - DNA, 25 bp, Homo sapien
cggctttaggcatcccaaacaaatg

SEQ ID NO: 6056747 - DNA, 25 bp, Homo sapien
aaagctagaatcttttccatggatt

SEQ ID NO: 6056748 - DNA, 25 bp, Homo sapien
ttttgtcggagccacgaatggttgt

SEQ ID NO: 6056749 - DNA, 25 bp, Homo sapien
ttcttcccgctctgagtgcgtcttc

SEQ ID NO: 6056750 - DNA, 25 bp, Homo sapien
cggttataggaaacttgatatgtat

SEQ ID NO: 6056751 - DNA, 25 bp, Homo sapien
gctgggccatcacgtttgcagtcac

SEQ ID NO: 6056752 - DNA, 25 bp, Homo sapien
gtttgccggaacgattgatcctccg

SEQ ID NO: 6056753 - DNA, 25 bp, Homo sapien
ttgaacttcaggtctgtagcggtta

SEQ ID NO: 6056754 - DNA, 25 bp, Homo sapien
cagtgactggcagcgcagcaccttc

SEQ ID NO: 6056755 - DNA, 25 bp, Homo sapien
ctgtagcggttataggaaacttgat

SEQ ID NO: 6056756 - DNA, 25 bp, Homo sapien
gaatcttttccatggatttgataac

SEQ ID NO: 6056757 - DNA, 25 bp, Homo sapien
tgaaaatagtcaaccgtttcggcat

SEQ ID NO: 6056758 - DNA, 25 bp, Homo sapien
acaaatgcagggtttggtctatgat

SEQ ID NO: 6056759 - DNA, 25 bp, Homo sapien
ccgccaccgcgcttgaacttcaggt

SEQ ID NO: 6056760 - DNA, 25 bp, Homo sapien
ccataatccagggttaaatgaaaat

SEQ ID NO: 6056761 - DNA, 25 bp, Homo sapien
cctcagcagtgactggcagcgcagc

SEQ ID NO: 6056762 - DNA, 25 bp, Homo sapien
cgcggcttcaatgatgcggatgaca

SEQ ID NO: 6056763 - DNA, 25 bp, Homo sapien
caccttctcgtatgctttccgctat

SEQ ID NO: 6056764 - DNA, 25 bp, Homo sapien
cgtatagaatggcttgaagcttgcc

SEQ ID NO: 6056765 - DNA, 25 bp, Homo sapien
catttactgatggaatcgtttctgt

SEQ ID NO: 6056766 - DNA, 25 bp, Homo sapien
tcccaaacaaatgcagggtttggtc

SEQ ID NO: 6056767 - DNA, 25 bp, Homo sapien
atcctctggttttcttcccgctctg

SEQ ID NO: 6056768 - DNA, 25 bp, Homo sapien
ctatgatgtgggagccgagatcata

SEQ ID NO: 6056769 - DNA, 25 bp, Homo sapien
taggaaacttgatatgtattgatat

SEQ ID NO: 6056770 - DNA, 25 bp, Homo sapien
tgatggaatcgtttctgtttttttg

SEQ ID NO: 6056771 - DNA, 25 bp, Homo sapien
gagtgcgtcttcctgtccgtcaatt

SEQ ID NO: 6056772 - DNA, 25 bp, Homo sapien
caaccgtttcggcattttcccgctg

SEQ ID NO: 6056773 - DNA, 25 bp, Homo sapien
tgataacgaggtccgtttgccggaa

SEQ ID NO: 6056774 - DNA, 25 bp, Homo sapien
gatcatacagcgtaccagtggcagt

SEQ ID NO: 6056775 - DNA, 25 bp, Homo sapien
gaagaggatgcccaattcatgatgt

SEQ ID NO: 6056776 - DNA, 25 bp, Homo sapien
agccggcgtattggggataatccca

SEQ ID NO: 6056777 - DNA, 25 bp, Homo sapien
gcaagcggcgtccacagtaagctcg

SEQ ID NO: 6056778 - DNA, 25 bp, Homo sapien
gtcatcctttacgaagaggatgccc

SEQ ID NO: 6056779 - DNA, 25 bp, Homo sapien
taagctcgctgcaccgagaactgcg

SEQ ID NO: 6056780 - DNA, 25 bp, Homo sapien
acgagaaggaacagcggcaaaagcc

SEQ ID NO: 6056781 - DNA, 25 bp, Homo sapien
gtattggggataatcccaagcacca

SEQ ID NO: 6056782 - DNA, 25 bp, Homo sapien
ctttacgaagaggatgcccaattca

SEQ ID NO: 6056783 - DNA, 25 bp, Homo sapien
tctaaaccattaccgggcacgagaa

SEQ ID NO: 6056784 - DNA, 25 bp, Homo sapien
gtttcaggcagcgatccctgtaccc

SEQ ID NO: 6056785 - DNA, 25 bp, Homo sapien
aactgcgacggcaagaccgagaata

SEQ ID NO: 6056786 - DNA, 25 bp, Homo sapien
aagaagctcgctggtcaaaacgaat

SEQ ID NO: 6056787 - DNA, 25 bp, Homo sapien
cgagaatacaaacgcgtttcgctgt

SEQ ID NO: 6056788 - DNA, 25 bp, Homo sapien
gacggcaagaccgagaatacaaacg

SEQ ID NO: 6056789 - DNA, 25 bp, Homo sapien
tgtccaaatccgacaaagtaaggaa

SEQ ID NO: 6056790 - DNA, 25 bp, Homo sapien
ccattaccgggcacgagaaggaaca

SEQ ID NO: 6056791 - DNA, 25 bp, Homo sapien
tacagaccgctgcacccgcaagcgg

SEQ ID NO: 6056792 - DNA, 25 bp, Homo sapien
atactcgtttcaggcagcgatccct

SEQ ID NO: 6056793 - DNA, 25 bp, Homo sapien
ctcgctggtcaaaacgaatttctcc

SEQ ID NO: 6056794 - DNA, 25 bp, Homo sapien
ggatgcccaattcatgatgttctcc

SEQ ID NO: 6056795 - DNA, 25 bp, Homo sapien
aatcccaagcaccattaagccctga

SEQ ID NO: 6056796 - DNA, 25 bp, Homo sapien
aatccgacaaagtaaggaatccata

SEQ ID NO: 6056797 - DNA, 25 bp, Homo sapien
atccttatactcgtttcaggcagcg

SEQ ID NO: 6056798 - DNA, 25 bp, Homo sapien
ggcagcgatccctgtaccctttgtc

SEQ ID NO: 6056799 - DNA, 25 bp, Homo sapien
ttctccattcaaaccgataatttca

SEQ ID NO: 6056800 - DNA, 25 bp, Homo sapien
aatacgccctaacaaagcggtacag

SEQ ID NO: 6056801 - DNA, 25 bp, Homo sapien
gcacccgcaagcggcgtccacagta

SEQ ID NO: 6056802 - DNA, 25 bp, Homo sapien
atcagaaacgttcttaaccggtatg

SEQ ID NO: 6056803 - DNA, 25 bp, Homo sapien
ccgattttcaattccagatcctcag

SEQ ID NO: 6056804 - DNA, 25 bp, Homo sapien
accgagaactgcgacggcaagaccg

SEQ ID NO: 6056805 - DNA, 25 bp, Homo sapien
gctgtgatccttatactcgtttcag

SEQ ID NO: 6056806 - DNA, 25 bp, Homo sapien
aaagcggtacagaccgctgcacccg

SEQ ID NO: 6056807 - DNA, 25 bp, Homo sapien
catgatgttctccttcataagaagc

SEQ ID NO: 6056808 - DNA, 25 bp, Homo sapien
atccatagaaaatggaatgagccgc

SEQ ID NO: 6056809 - DNA, 25 bp, Homo sapien
tgccattgactttcgttatgatttc

SEQ ID NO: 6056810 - DNA, 25 bp, Homo sapien
aacgttcttaaccggtatgccattg

SEQ ID NO: 6056811 - DNA, 25 bp, Homo sapien
ttcaattccagatcctcagccggcg

SEQ ID NO: 6056812 - DNA, 25 bp, Homo sapien
cagaaaaatacgccctaacaaagcg

SEQ ID NO: 6056813 - DNA, 25 bp, Homo sapien
ataaaacggagccgcgttatcattc

SEQ ID NO: 6056814 - DNA, 25 bp, Homo sapien
ggcgtccacagtaagctcgctgcac

SEQ ID NO: 6056815 - DNA, 25 bp, Homo sapien
gggataatcccaagcaccattaagc

SEQ ID NO: 6056816 - DNA, 25 bp, Homo sapien
cattaagccctgatcccttttcgag

SEQ ID NO: 6056817 - DNA, 25 bp, Homo sapien
gatccctgtaccctttgtccaaatc

SEQ ID NO: 6056818 - DNA, 25 bp, Homo sapien
aagctttacatatgcacggttatgc

SEQ ID NO: 6056819 - DNA, 25 bp, Homo sapien
tacatatgcacggttatgctgaagc

SEQ ID NO: 6056820 - DNA, 25 bp, Homo sapien
agaaaatggaatgagccgccgggaa

SEQ ID NO: 6056821 - DNA, 25 bp, Homo sapien
ccaattcatgatgttctccttcata

SEQ ID NO: 6056822 - DNA, 25 bp, Homo sapien
catagaaatcagaaacgttcttaac

SEQ ID NO: 6056823 - DNA, 25 bp, Homo sapien
tatggacagaaaaatacgccctaac

SEQ ID NO: 6056824 - DNA, 25 bp, Homo sapien
atcattcactctttgctttatggac

SEQ ID NO: 6056825 - DNA, 25 bp, Homo sapien
attcaaaccgataatttcaagcttt

SEQ ID NO: 6056826 - DNA, 25 bp, Homo sapien
aatttcaagctttacatatgcacgg

SEQ ID NO: 6056827 - DNA, 25 bp, Homo sapien
ggtcaaaacgaatttctccattcaa

SEQ ID NO: 6056828 - DNA, 25 bp, Homo sapien
cctaacaaagcggtacagaccgctg

SEQ ID NO: 6056829 - DNA, 25 bp, Homo sapien
tgtaccctttgtccaaatccgacaa

SEQ ID NO: 6056830 - DNA, 25 bp, Homo sapien
tcttaaccggtatgccattgacttt

SEQ ID NO: 6056831 - DNA, 25 bp, Homo sapien
gctgaagcgcttcatagaaatcaga

SEQ ID NO: 6056832 - DNA, 25 bp, Homo sapien
tccagatcctcagccggcgtattgg

SEQ ID NO: 6056833 - DNA, 25 bp, Homo sapien
tgcgattctaaaccattaccgggca

SEQ ID NO: 6056834 - DNA, 25 bp, Homo sapien
ccacagtaagctcgctgcaccgaga

SEQ ID NO: 6056835 - DNA, 25 bp, Homo sapien
atttccccgattttcaattccagat

SEQ ID NO: 6056836 - DNA, 25 bp, Homo sapien
cggagccgcgttatcattcactctt

SEQ ID NO: 6056837 - DNA, 25 bp, Homo sapien
acaaagtaaggaatccatagaaaat

SEQ ID NO: 6056838 - DNA, 25 bp, Homo sapien
ctaaggtgcgattctaaaccattac

SEQ ID NO: 6056839 - DNA, 25 bp, Homo sapien
tggaatgagccgccgggaaccgtaa

SEQ ID NO: 6056840 - DNA, 25 bp, Homo sapien
atgcacggttatgctgaagcgcttc

SEQ ID NO: 6056841 - DNA, 25 bp, Homo sapien
acgggccaccagctaaggtgcgatt

SEQ ID NO: 6056842 - DNA, 25 bp, Homo sapien
taaggaatccatagaaaatggaatg

SEQ ID NO: 6056843 - DNA, 25 bp, Homo sapien
gcgcttcatagaaatcagaaacgtt

SEQ ID NO: 6056844 - DNA, 25 bp, Homo sapien
ggttatgctgaagcgcttcatagaa

SEQ ID NO: 6056845 - DNA, 25 bp, Homo sapien
tcgttatgatttccccgattttcaa

SEQ ID NO: 6056846 - DNA, 25 bp, Homo sapien
cttcataagaagctcgctggtcaaa

SEQ ID NO: 6056847 - DNA, 25 bp, Homo sapien
caccagctaaggtgcgattctaaac

SEQ ID NO: 6056848 - DNA, 25 bp, Homo sapien
tgactttcgttatgatttccccgat

SEQ ID NO: 6056849 - DNA, 25 bp, Homo sapien
cgctgcaccgagaactgcgacggca

SEQ ID NO: 6056850 - DNA, 25 bp, Homo sapien
cactctttgctttatggacagaaaa

SEQ ID NO: 6056851 - DNA, 25 bp, Homo sapien
taaacacgggccaccagctaaggtg

SEQ ID NO: 6056852 - DNA, 25 bp, Homo sapien
ccggtatgccattgactttcgttat

SEQ ID NO: 6056853 - DNA, 25 bp, Homo sapien
accgataatttcaagctttacatat

SEQ ID NO: 6056854 - DNA, 25 bp, Homo sapien
gccctgatcccttttcgagaaataa

SEQ ID NO: 6056855 - DNA, 25 bp, Homo sapien
aagcaccattaagccctgatccctt

SEQ ID NO: 6056856 - DNA, 25 bp, Homo sapien
tcctcagccggcgtattggggataa

SEQ ID NO: 6056857 - DNA, 25 bp, Homo sapien
cgtttcgctgtgatccttatactcg

SEQ ID NO: 6056858 - DNA, 25 bp, Homo sapien
cgcgttatcattcactctttgcttt

SEQ ID NO: 6056859 - DNA, 25 bp, Homo sapien
acgaatttctccattcaaaccgata

SEQ ID NO: 6056860 - DNA, 25 bp, Homo sapien
gttctccttcataagaagctcgctg

SEQ ID NO: 6056861 - DNA, 25 bp, Homo sapien
ccgggcacgagaaggaacagcggca

SEQ ID NO: 6056862 - DNA, 25 bp, Homo sapien
acaaacgcgtttcgctgtgatcctt

SEQ ID NO: 6056863 - DNA, 25 bp, Homo sapien
ccgctgcacccgcaagcggcgtcca

SEQ ID NO: 6056864 - DNA, 25 bp, Homo sapien
caagaccgagaatacaaacgcgttt

SEQ ID NO: 6056865 - DNA, 25 bp, Homo sapien
gtaagcccaaaggggaaaggcatca

SEQ ID NO: 6056866 - DNA, 25 bp, Homo sapien
ctaaaatagcagtcaagcctttagg

SEQ ID NO: 6056867 - DNA, 25 bp, Homo sapien
gcagtagacaactcaagatgaatca

SEQ ID NO: 6056868 - DNA, 25 bp, Homo sapien
cttgttaaaggccttgattctctcc

SEQ ID NO: 6056869 - DNA, 25 bp, Homo sapien
gaaaggttagcttaaggaaggatgc

SEQ ID NO: 6056870 - DNA, 25 bp, Homo sapien
ctccatagaatgaatagagagacat

SEQ ID NO: 6056871 - DNA, 25 bp, Homo sapien
tcagtatccttggagacaatgggct

SEQ ID NO: 6056872 - DNA, 25 bp, Homo sapien
atcctgtggaaagtaagcccaaagg

SEQ ID NO: 6056873 - DNA, 25 bp, Homo sapien
agaactgggccagtgcctgatccac

SEQ ID NO: 6056874 - DNA, 25 bp, Homo sapien
caatgggcttgaaggtgttaaggac

SEQ ID NO: 6056875 - DNA, 25 bp, Homo sapien
caaattttccataatagaaacttgt

SEQ ID NO: 6056876 - DNA, 25 bp, Homo sapien
gttttatctactctaaaatagcagt

SEQ ID NO: 6056877 - DNA, 25 bp, Homo sapien
cagttactacacacaattacccaaa

SEQ ID NO: 6056878 - DNA, 25 bp, Homo sapien
gagggtccagtcacatcaaatgtta

SEQ ID NO: 6056879 - DNA, 25 bp, Homo sapien
ccagtcacatcaaatgttataactg

SEQ ID NO: 6056880 - DNA, 25 bp, Homo sapien
aagaggaaaaagacaatctcagtta

SEQ ID NO: 6056881 - DNA, 25 bp, Homo sapien
ataactgtggagttcctgagagatg

SEQ ID NO: 6056882 - DNA, 25 bp, Homo sapien
caattacccaaaatgataacatttt

SEQ ID NO: 6056883 - DNA, 25 bp, Homo sapien
aagggctgaacagagaactgggcca

SEQ ID NO: 6056884 - DNA, 25 bp, Homo sapien
taatatgcagtagacaactcaagat

SEQ ID NO: 6056885 - DNA, 25 bp, Homo sapien
ttcctgagagatgtcttaatatctc

SEQ ID NO: 6056886 - DNA, 25 bp, Homo sapien
ggaaaggcatcatactggaagattt

SEQ ID NO: 6056887 - DNA, 25 bp, Homo sapien
cttaaggaaggatgctatgctatct

SEQ ID NO: 6056888 - DNA, 25 bp, Homo sapien
gcttgaaggtgttaaggacagcttt

SEQ ID NO: 6056889 - DNA, 25 bp, Homo sapien
aatagagagacatgaggtggatgga

SEQ ID NO: 6056890 - DNA, 25 bp, Homo sapien
gagacaatgggcttgaaggtgttaa

SEQ ID NO: 6056891 - DNA, 25 bp, Homo sapien
agagatgtcttaatatctcaccaca

SEQ ID NO: 6056892 - DNA, 25 bp, Homo sapien
gacaactcaagatgaatcattggcc

SEQ ID NO: 6056893 - DNA, 25 bp, Homo sapien
ggttagcttaaggaaggatgctatg

SEQ ID NO: 6056894 - DNA, 25 bp, Homo sapien
agaaaaaagaatctgtctaggaaag

SEQ ID NO: 6056895 - DNA, 25 bp, Homo sapien
gggccagtgcctgatccactacact

SEQ ID NO: 6056896 - DNA, 25 bp, Homo sapien
aatgttataactgtggagttcctga

SEQ ID NO: 6056897 - DNA, 25 bp, Homo sapien
ctgcatatcctgtggaaagtaagcc

SEQ ID NO: 6056898 - DNA, 25 bp, Homo sapien
taaggacagctttgggagtaaggta

SEQ ID NO: 6056899 - DNA, 25 bp, Homo sapien
aagatttgtgggaagggctgaacag

SEQ ID NO: 6056900 - DNA, 25 bp, Homo sapien
gttttttcagtatccttggagacaa

SEQ ID NO: 6056901 - DNA, 25 bp, Homo sapien
acattggttttttcagtatccttgg

SEQ ID NO: 6056902 - DNA, 25 bp, Homo sapien
gcatcatactggaagatttgtggga

SEQ ID NO: 6056903 - DNA, 25 bp, Homo sapien
tagcagtcaagcctttaggtaaaac

SEQ ID NO: 6056904 - DNA, 25 bp, Homo sapien
tccataatagaaacttgttaaaggc

SEQ ID NO: 6056905 - DNA, 25 bp, Homo sapien
ccttgattctctccgctcagatgat

SEQ ID NO: 6056906 - DNA, 25 bp, Homo sapien
tgaatcattggcctctatatggtgt

SEQ ID NO: 6056907 - DNA, 25 bp, Homo sapien
cagaggctccatagaatgaatagag

SEQ ID NO: 6056908 - DNA, 25 bp, Homo sapien
caccacacattggttttttcagtat

SEQ ID NO: 6056909 - DNA, 25 bp, Homo sapien
gaacagagaactgggccagtgcctg

SEQ ID NO: 6056910 - DNA, 25 bp, Homo sapien
agaatgaatagagagacatgaggtg

SEQ ID NO: 6056911 - DNA, 25 bp, Homo sapien
tctactctaaaatagcagtcaagcc

SEQ ID NO: 6056912 - DNA, 25 bp, Homo sapien
attgaaaagaggaaaaagacaatct

SEQ ID NO: 6056913 - DNA, 25 bp, Homo sapien
ttctctccgctcagatgatgcaact

SEQ ID NO: 6056914 - DNA, 25 bp, Homo sapien
tgaggtggatggagaatggagggtc

SEQ ID NO: 6056915 - DNA, 25 bp, Homo sapien
aagacaatctcagttactacacaca

SEQ ID NO: 6056916 - DNA, 25 bp, Homo sapien
tgataacattttcagaagaatccat

SEQ ID NO: 6056917 - DNA, 25 bp, Homo sapien
ccaaaggggaaaggcatcatactgg

SEQ ID NO: 6056918 - DNA, 25 bp, Homo sapien
gtggagttcctgagagatgtcttaa

SEQ ID NO: 6056919 - DNA, 25 bp, Homo sapien
gagacatgaggtggatggagaatgg

SEQ ID NO: 6056920 - DNA, 25 bp, Homo sapien
tgtctaggaaaggttagcttaagga

SEQ ID NO: 6056921 - DNA, 25 bp, Homo sapien
ctttaggtaaaacagaggctccata

SEQ ID NO: 6056922 - DNA, 25 bp, Homo sapien
agatgatgcaactggaatttagaaa

SEQ ID NO: 6056923 - DNA, 25 bp, Homo sapien
cattggcctctatatggtgttttat

SEQ ID NO: 6056924 - DNA, 25 bp, Homo sapien
aaggtactgcatatcctgtggaaag

SEQ ID NO: 6056925 - DNA, 25 bp, Homo sapien
cctctatatggtgttttatctactc

SEQ ID NO: 6056926 - DNA, 25 bp, Homo sapien
tacacacaattacccaaaatgataa

SEQ ID NO: 6056927 - DNA, 25 bp, Homo sapien
tgtgggaagggctgaacagagaact

SEQ ID NO: 6056928 - DNA, 25 bp, Homo sapien
ggatggagaatggagggtccagtca

SEQ ID NO: 6056929 - DNA, 25 bp, Homo sapien
tactggaagatttgtgggaagggct

SEQ ID NO: 6056930 - DNA, 25 bp, Homo sapien
atagaaacttgttaaaggccttgat

SEQ ID NO: 6056931 - DNA, 25 bp, Homo sapien
tcaagcctttaggtaaaacagaggc

SEQ ID NO: 6056932 - DNA, 25 bp, Homo sapien
agaatggagggtccagtcacatcaa

SEQ ID NO: 6056933 - DNA, 25 bp, Homo sapien
ccgctcagatgatgcaactggaatt

SEQ ID NO: 6056934 - DNA, 25 bp, Homo sapien
gaaggatgctatgctatctaatatg

SEQ ID NO: 6056935 - DNA, 25 bp, Homo sapien
agaatctgtctaggaaaggttagct

SEQ ID NO: 6056936 - DNA, 25 bp, Homo sapien
acatcaaatgttataactgtggagt

SEQ ID NO: 6056937 - DNA, 25 bp, Homo sapien
agctttgggagtaaggtactgcata

SEQ ID NO: 6056938 - DNA, 25 bp, Homo sapien
atatctcaccacacattggtttttt

SEQ ID NO: 6056939 - DNA, 25 bp, Homo sapien
gaatttagaaaaaagaatctgtcta

SEQ ID NO: 6056940 - DNA, 25 bp, Homo sapien
gtaaaacagaggctccatagaatga

SEQ ID NO: 6056941 - DNA, 25 bp, Homo sapien
tcaagatgaatcattggcctctata

SEQ ID NO: 6056942 - DNA, 25 bp, Homo sapien
tgcaactggaatttagaaaaaagaa

SEQ ID NO: 6056943 - DNA, 25 bp, Homo sapien
gtcttaatatctcaccacacattgg

SEQ ID NO: 6056944 - DNA, 25 bp, Homo sapien
gctatctaatatgcagtagacaact

SEQ ID NO: 6056945 - DNA, 25 bp, Homo sapien
gggagtaaggtactgcatatcctgt

SEQ ID NO: 6056946 - DNA, 25 bp, Homo sapien
cattttcagaagaatccatttaaag

SEQ ID NO: 6056947 - DNA, 25 bp, Homo sapien
taaaggccttgattctctccgctca

SEQ ID NO: 6056948 - DNA, 25 bp, Homo sapien
caatctcagttactacacacaatta

SEQ ID NO: 6056949 - DNA, 25 bp, Homo sapien
tccttggagacaatgggcttgaagg

SEQ ID NO: 6056950 - DNA, 25 bp, Homo sapien
tgctatgctatctaatatgcagtag

SEQ ID NO: 6056951 - DNA, 25 bp, Homo sapien
tatggtgttttatctactctaaaat

SEQ ID NO: 6056952 - DNA, 25 bp, Homo sapien
cagaagaatccatttaaagactttt

SEQ ID NO: 6056953 - DNA, 25 bp, Homo sapien
ccaaaatgataacattttcagaaga

SEQ ID NO: 6056954 - DNA, 25 bp, Homo sapien
aggtgttaaggacagctttgggagt

SEQ ID NO: 6056955 - DNA, 25 bp, Homo sapien
gcagtagacaactcaagatgaatca

SEQ ID NO: 6056956 - DNA, 25 bp, Homo sapien
ctccatagaatgaatagagagacat

SEQ ID NO: 6056957 - DNA, 25 bp, Homo sapien
tcagtatccttggagacaatgggct

SEQ ID NO: 6056958 - DNA, 25 bp, Homo sapien
cagttactacacacaattacccaaa

SEQ ID NO: 6056959 - DNA, 25 bp, Homo sapien
caaattttccataatagaaacttgt

SEQ ID NO: 6056960 - DNA, 25 bp, Homo sapien
caatgggcttgaaggtgttaaggac

SEQ ID NO: 6056961 - DNA, 25 bp, Homo sapien
gttttatctactctaaaatagcagt

SEQ ID NO: 6056962 - DNA, 25 bp, Homo sapien
caattacccaaaatgataacatttt

SEQ ID NO: 6056963 - DNA, 25 bp, Homo sapien
ccagtcacatcaaatgttataactg

SEQ ID NO: 6056964 - DNA, 25 bp, Homo sapien
gagggtccagtcacatcaaatgtta

SEQ ID NO: 6056965 - DNA, 25 bp, Homo sapien
ataactgtggagttcctgagagatg

SEQ ID NO: 6056966 - DNA, 25 bp, Homo sapien
aagggctgaacagagaactgggcca

SEQ ID NO: 6056967 - DNA, 25 bp, Homo sapien
ttcctgagagatgtcttaatatctc

SEQ ID NO: 6056968 - DNA, 25 bp, Homo sapien
aagaggaaaaagacaatctcagtta

SEQ ID NO: 6056969 - DNA, 25 bp, Homo sapien
cttaaggaaggatgctatgctatct

SEQ ID NO: 6056970 - DNA, 25 bp, Homo sapien
gagacaatgggcttgaaggtgttaa

SEQ ID NO: 6056971 - DNA, 25 bp, Homo sapien
atcctgtggaaagtaagcccaaagg

SEQ ID NO: 6056972 - DNA, 25 bp, Homo sapien
ggaaaggcatcatactggaagattt

SEQ ID NO: 6056973 - DNA, 25 bp, Homo sapien
taatatgcagtagacaactcaagat

SEQ ID NO: 6056974 - DNA, 25 bp, Homo sapien
gcttgaaggtgttaaggacagcttt

SEQ ID NO: 6056975 - DNA, 25 bp, Homo sapien
aatagagagacatgaggtggatgga

SEQ ID NO: 6056976 - DNA, 25 bp, Homo sapien
aagacaatctcagttactacacaca

SEQ ID NO: 6056977 - DNA, 25 bp, Homo sapien
cagtgcctgatccactacactcata

SEQ ID NO: 6056978 - DNA, 25 bp, Homo sapien
agaaaaaagaatctgtctaggaaag

SEQ ID NO: 6056979 - DNA, 25 bp, Homo sapien
gacaactcaagatgaatcattggcc

SEQ ID NO: 6056980 - DNA, 25 bp, Homo sapien
agagatgtcttaatatctcaccaca

SEQ ID NO: 6056981 - DNA, 25 bp, Homo sapien
ggttagcttaaggaaggatgctatg

SEQ ID NO: 6056982 - DNA, 25 bp, Homo sapien
aatgttataactgtggagttcctga

SEQ ID NO: 6056983 - DNA, 25 bp, Homo sapien
taaggacagctttgggagtaaggta

SEQ ID NO: 6056984 - DNA, 25 bp, Homo sapien
aagatttgtgggaagggctgaacag

SEQ ID NO: 6056985 - DNA, 25 bp, Homo sapien
gttttttcagtatccttggagacaa

SEQ ID NO: 6056986 - DNA, 25 bp, Homo sapien
gcatcatactggaagatttgtggga

SEQ ID NO: 6056987 - DNA, 25 bp, Homo sapien
tagcagtcaagcctttaggtaaaac

SEQ ID NO: 6056988 - DNA, 25 bp, Homo sapien
tccataatagaaacttgttaaaggc

SEQ ID NO: 6056989 - DNA, 25 bp, Homo sapien
acattggttttttcagtatccttgg

SEQ ID NO: 6056990 - DNA, 25 bp, Homo sapien
gagacatgaggtggatggagaatgg

SEQ ID NO: 6056991 - DNA, 25 bp, Homo sapien
tgaatcattggcctctatatggtgt

SEQ ID NO: 6056992 - DNA, 25 bp, Homo sapien
ctgggccagtgcctgatccactaca

SEQ ID NO: 6056993 - DNA, 25 bp, Homo sapien
caccacacattggttttttcagtat

SEQ ID NO: 6056994 - DNA, 25 bp, Homo sapien
ccttgattctctccgctcagatgat

SEQ ID NO: 6056995 - DNA, 25 bp, Homo sapien
ttctctccgctcagatgatgcaact

SEQ ID NO: 6056996 - DNA, 25 bp, Homo sapien
cagaggctccatagaatgaatagag

SEQ ID NO: 6056997 - DNA, 25 bp, Homo sapien
tgaggtggatggagaatggagggtc

SEQ ID NO: 6056998 - DNA, 25 bp, Homo sapien
tctactctaaaatagcagtcaagcc

SEQ ID NO: 6056999 - DNA, 25 bp, Homo sapien
ccaaaggggaaaggcatcatactgg

SEQ ID NO: 6057000 - DNA, 25 bp, Homo sapien
tgataacattttcagaagaatccat

SEQ ID NO: 6057001 - DNA, 25 bp, Homo sapien
agatgatgcaactggaatttagaaa

SEQ ID NO: 6057002 - DNA, 25 bp, Homo sapien
cattggcctctatatggtgttttat

SEQ ID NO: 6057003 - DNA, 25 bp, Homo sapien
tgtctaggaaaggttagcttaagga

SEQ ID NO: 6057004 - DNA, 25 bp, Homo sapien
attgaaaagaggaaaaagacaatct

SEQ ID NO: 6057005 - DNA, 25 bp, Homo sapien
agaatgaatagagagacatgaggtg

SEQ ID NO: 6057006 - DNA, 25 bp, Homo sapien
gtggagttcctgagagatgtcttaa

SEQ ID NO: 6057007 - DNA, 25 bp, Homo sapien
aaggtactgcatatcctgtggaaag

SEQ ID NO: 6057008 - DNA, 25 bp, Homo sapien
cctctatatggtgttttatctactc

SEQ ID NO: 6057009 - DNA, 25 bp, Homo sapien
atagaaacttgttaaaggccttgat

SEQ ID NO: 6057010 - DNA, 25 bp, Homo sapien
tgtgggaagggctgaacagagaact

SEQ ID NO: 6057011 - DNA, 25 bp, Homo sapien
agaatctgtctaggaaaggttagct

SEQ ID NO: 6057012 - DNA, 25 bp, Homo sapien
agaatggagggtccagtcacatcaa

SEQ ID NO: 6057013 - DNA, 25 bp, Homo sapien
ggatggagaatggagggtccagtca

SEQ ID NO: 6057014 - DNA, 25 bp, Homo sapien
tacacacaattacccaaaatgataa

SEQ ID NO: 6057015 - DNA, 25 bp, Homo sapien
ctttaggtaaaacagaggctccata

SEQ ID NO: 6057016 - DNA, 25 bp, Homo sapien
acatcaaatgttataactgtggagt

SEQ ID NO: 6057017 - DNA, 25 bp, Homo sapien
ccgctcagatgatgcaactggaatt

SEQ ID NO: 6057018 - DNA, 25 bp, Homo sapien
tactggaagatttgtgggaagggct

SEQ ID NO: 6057019 - DNA, 25 bp, Homo sapien
tcaagcctttaggtaaaacagaggc

SEQ ID NO: 6057020 - DNA, 25 bp, Homo sapien
gtcttaatatctcaccacacattgg

SEQ ID NO: 6057021 - DNA, 25 bp, Homo sapien
agctttgggagtaaggtactgcata

SEQ ID NO: 6057022 - DNA, 25 bp, Homo sapien
atatctcaccacacattggtttttt

SEQ ID NO: 6057023 - DNA, 25 bp, Homo sapien
gaaggatgctatgctatctaatatg

SEQ ID NO: 6057024 - DNA, 25 bp, Homo sapien
ctaaaatagcagtcaagcctttagg

SEQ ID NO: 6057025 - DNA, 25 bp, Homo sapien
gaatttagaaaaaagaatctgtcta

SEQ ID NO: 6057026 - DNA, 25 bp, Homo sapien
gtaaaacagaggctccatagaatga

SEQ ID NO: 6057027 - DNA, 25 bp, Homo sapien
tgcaactggaatttagaaaaaagaa

SEQ ID NO: 6057028 - DNA, 25 bp, Homo sapien
tcaagatgaatcattggcctctata

SEQ ID NO: 6057029 - DNA, 25 bp, Homo sapien
cattttcagaagaatccatttaaag

SEQ ID NO: 6057030 - DNA, 25 bp, Homo sapien
gggagtaaggtactgcatatcctgt

SEQ ID NO: 6057031 - DNA, 25 bp, Homo sapien
cagaagaatccatttaaagactttt

SEQ ID NO: 6057032 - DNA, 25 bp, Homo sapien
gctatctaatatgcagtagacaact

SEQ ID NO: 6057033 - DNA, 25 bp, Homo sapien
ctgaacagagaactgggccagtgcc

SEQ ID NO: 6057034 - DNA, 25 bp, Homo sapien
tgctatgctatctaatatgcagtag

SEQ ID NO: 6057035 - DNA, 25 bp, Homo sapien
tccttggagacaatgggcttgaagg

SEQ ID NO: 6057036 - DNA, 25 bp, Homo sapien
ctgcatatcctgtggaaagtaagcc

SEQ ID NO: 6057037 - DNA, 25 bp, Homo sapien
gtaagcccaaaggggaaaggcatca

SEQ ID NO: 6057038 - DNA, 25 bp, Homo sapien
tatggtgttttatctactctaaaat

SEQ ID NO: 6057039 - DNA, 25 bp, Homo sapien
taaaggccttgattctctccgctca

SEQ ID NO: 6057040 - DNA, 25 bp, Homo sapien
caatctcagttactacacacaatta

SEQ ID NO: 6057041 - DNA, 25 bp, Homo sapien
agagaactgggccagtgcctgatcc

SEQ ID NO: 6057042 - DNA, 25 bp, Homo sapien
ccaaaatgataacattttcagaaga

SEQ ID NO: 6057043 - DNA, 25 bp, Homo sapien
aggtgttaaggacagctttgggagt

SEQ ID NO: 6057044 - DNA, 25 bp, Homo sapien
cttgttaaaggccttgattctctcc

SEQ ID NO: 6057045 - DNA, 25 bp, Homo sapien
gaaaggttagcttaaggaaggatgc

SEQ ID NO: 6057046 - DNA, 25 bp, Homo sapien
ctgcatatcctgtggaaagtaagcc

SEQ ID NO: 6057047 - DNA, 25 bp, Homo sapien
agaatggagggtccagtcacatcaa

SEQ ID NO: 6057048 - DNA, 25 bp, Homo sapien
cttgttaaaggccttgattctctcc

SEQ ID NO: 6057049 - DNA, 25 bp, Homo sapien
gaaaggttagcttaaggaaggatgc

SEQ ID NO: 6057050 - DNA, 25 bp, Homo sapien
tcagtatccttggagacaatgggct

SEQ ID NO: 6057051 - DNA, 25 bp, Homo sapien
atcctgtggaaagtaagcccaaagg

SEQ ID NO: 6057052 - DNA, 25 bp, Homo sapien
ctccatagaatgaatagagagacat

SEQ ID NO: 6057053 - DNA, 25 bp, Homo sapien
gcagtagacaactcaagatgaatca

SEQ ID NO: 6057054 - DNA, 25 bp, Homo sapien
caatgggcttgaaggtgttaaggac

SEQ ID NO: 6057055 - DNA, 25 bp, Homo sapien
caaattttccataatagaaacttgt

SEQ ID NO: 6057056 - DNA, 25 bp, Homo sapien
gttttatctactctaaaatagcagt

SEQ ID NO: 6057057 - DNA, 25 bp, Homo sapien
aagaggaaaaagacaatctcagtta

SEQ ID NO: 6057058 - DNA, 25 bp, Homo sapien
caattacccaaaatgataacatttt

SEQ ID NO: 6057059 - DNA, 25 bp, Homo sapien
cagttactacacacaattacccaaa

SEQ ID NO: 6057060 - DNA, 25 bp, Homo sapien
gagggtccagtcacatcaaatgtta

SEQ ID NO: 6057061 - DNA, 25 bp, Homo sapien
taatatgcagtagacaactcaagat

SEQ ID NO: 6057062 - DNA, 25 bp, Homo sapien
ataactgtggagttcctgagagatg

SEQ ID NO: 6057063 - DNA, 25 bp, Homo sapien
ttcctgagagatgtcttaatatctc

SEQ ID NO: 6057064 - DNA, 25 bp, Homo sapien
gctgaacagagaactgggccagtgc

SEQ ID NO: 6057065 - DNA, 25 bp, Homo sapien
ccagtcacatcaaatgttataactg

SEQ ID NO: 6057066 - DNA, 25 bp, Homo sapien
cttaaggaaggatgctatgctatct

SEQ ID NO: 6057067 - DNA, 25 bp, Homo sapien
gagacaatgggcttgaaggtgttaa

SEQ ID NO: 6057068 - DNA, 25 bp, Homo sapien
gcttgaaggtgttaaggacagcttt

SEQ ID NO: 6057069 - DNA, 25 bp, Homo sapien
aatagagagacatgaggtggatgga

SEQ ID NO: 6057070 - DNA, 25 bp, Homo sapien
ggttagcttaaggaaggatgctatg

SEQ ID NO: 6057071 - DNA, 25 bp, Homo sapien
agaaaaaagaatctgtctaggaaag

SEQ ID NO: 6057072 - DNA, 25 bp, Homo sapien
gacaactcaagatgaatcattggcc

SEQ ID NO: 6057073 - DNA, 25 bp, Homo sapien
aatgttataactgtggagttcctga

SEQ ID NO: 6057074 - DNA, 25 bp, Homo sapien
taaggacagctttgggagtaaggta

SEQ ID NO: 6057075 - DNA, 25 bp, Homo sapien
agagatgtcttaatatctcaccaca

SEQ ID NO: 6057076 - DNA, 25 bp, Homo sapien
gttttttcagtatccttggagacaa

SEQ ID NO: 6057077 - DNA, 25 bp, Homo sapien
tagcagtcaagcctttaggtaaaac

SEQ ID NO: 6057078 - DNA, 25 bp, Homo sapien
acattggttttttcagtatccttgg

SEQ ID NO: 6057079 - DNA, 25 bp, Homo sapien
atactggaagatttgtgggaagggc

SEQ ID NO: 6057080 - DNA, 25 bp, Homo sapien
tccataatagaaacttgttaaaggc

SEQ ID NO: 6057081 - DNA, 25 bp, Homo sapien
caccacacattggttttttcagtat

SEQ ID NO: 6057082 - DNA, 25 bp, Homo sapien
ttctctccgctcagatgatgcaact

SEQ ID NO: 6057083 - DNA, 25 bp, Homo sapien
aagacaatctcagttactacacaca

SEQ ID NO: 6057084 - DNA, 25 bp, Homo sapien
tgaatcattggcctctatatggtgt

SEQ ID NO: 6057085 - DNA, 25 bp, Homo sapien
cagaggctccatagaatgaatagag

SEQ ID NO: 6057086 - DNA, 25 bp, Homo sapien
gggaaaggcatcatactggaagatt

SEQ ID NO: 6057087 - DNA, 25 bp, Homo sapien
ccttgattctctccgctcagatgat

SEQ ID NO: 6057088 - DNA, 25 bp, Homo sapien
tgaggtggatggagaatggagggtc

SEQ ID NO: 6057089 - DNA, 25 bp, Homo sapien
tctactctaaaatagcagtcaagcc

SEQ ID NO: 6057090 - DNA, 25 bp, Homo sapien
tacacacaattacccaaaatgataa

SEQ ID NO: 6057091 - DNA, 25 bp, Homo sapien
gaagatttgtgggaagggctgaaca

SEQ ID NO: 6057092 - DNA, 25 bp, Homo sapien
cattggcctctatatggtgttttat

SEQ ID NO: 6057093 - DNA, 25 bp, Homo sapien
ccaaaggggaaaggcatcatactgg

SEQ ID NO: 6057094 - DNA, 25 bp, Homo sapien
tgataacattttcagaagaatccat

SEQ ID NO: 6057095 - DNA, 25 bp, Homo sapien
attgaaaagaggaaaaagacaatct

SEQ ID NO: 6057096 - DNA, 25 bp, Homo sapien
agatgatgcaactggaatttagaaa

SEQ ID NO: 6057097 - DNA, 25 bp, Homo sapien
ttgtgggaagggctgaacagagaac

SEQ ID NO: 6057098 - DNA, 25 bp, Homo sapien
tgtctaggaaaggttagcttaagga

SEQ ID NO: 6057099 - DNA, 25 bp, Homo sapien
gtggagttcctgagagatgtcttaa

SEQ ID NO: 6057100 - DNA, 25 bp, Homo sapien
aaggtactgcatatcctgtggaaag

SEQ ID NO: 6057101 - DNA, 25 bp, Homo sapien
cctctatatggtgttttatctactc

SEQ ID NO: 6057102 - DNA, 25 bp, Homo sapien
gagacatgaggtggatggagaatgg

SEQ ID NO: 6057103 - DNA, 25 bp, Homo sapien
ggatggagaatggagggtccagtca

SEQ ID NO: 6057104 - DNA, 25 bp, Homo sapien
acatcaaatgttataactgtggagt

SEQ ID NO: 6057105 - DNA, 25 bp, Homo sapien
gtcttaatatctcaccacacattgg

SEQ ID NO: 6057106 - DNA, 25 bp, Homo sapien
agaatctgtctaggaaaggttagct

SEQ ID NO: 6057107 - DNA, 25 bp, Homo sapien
ctttaggtaaaacagaggctccata

SEQ ID NO: 6057108 - DNA, 25 bp, Homo sapien
agaatgaatagagagacatgaggtg

SEQ ID NO: 6057109 - DNA, 25 bp, Homo sapien
atagaaacttgttaaaggccttgat

SEQ ID NO: 6057110 - DNA, 25 bp, Homo sapien
tcaagcctttaggtaaaacagaggc

SEQ ID NO: 6057111 - DNA, 25 bp, Homo sapien
ctaaaatagcagtcaagcctttagg

SEQ ID NO: 6057112 - DNA, 25 bp, Homo sapien
atatctcaccacacattggtttttt

SEQ ID NO: 6057113 - DNA, 25 bp, Homo sapien
agctttgggagtaaggtactgcata

SEQ ID NO: 6057114 - DNA, 25 bp, Homo sapien
ccgctcagatgatgcaactggaatt

SEQ ID NO: 6057115 - DNA, 25 bp, Homo sapien
gaatttagaaaaaagaatctgtcta

SEQ ID NO: 6057116 - DNA, 25 bp, Homo sapien
acagagaactgggccagtgcctgat

SEQ ID NO: 6057117 - DNA, 25 bp, Homo sapien
gaaggatgctatgctatctaatatg

SEQ ID NO: 6057118 - DNA, 25 bp, Homo sapien
gtaagcccaaaggggaaaggcatca

SEQ ID NO: 6057119 - DNA, 25 bp, Homo sapien
tcaagatgaatcattggcctctata

SEQ ID NO: 6057120 - DNA, 25 bp, Homo sapien
gtaaaacagaggctccatagaatga

SEQ ID NO: 6057121 - DNA, 25 bp, Homo sapien
tgcaactggaatttagaaaaaagaa

SEQ ID NO: 6057122 - DNA, 25 bp, Homo sapien
gctatctaatatgcagtagacaact

SEQ ID NO: 6057123 - DNA, 25 bp, Homo sapien
cattttcagaagaatccatttaaag

SEQ ID NO: 6057124 - DNA, 25 bp, Homo sapien
tgctatgctatctaatatgcagtag

SEQ ID NO: 6057125 - DNA, 25 bp, Homo sapien
gggagtaaggtactgcatatcctgt

SEQ ID NO: 6057126 - DNA, 25 bp, Homo sapien
ggaagggctgaacagagaactgggc

SEQ ID NO: 6057127 - DNA, 25 bp, Homo sapien
tccttggagacaatgggcttgaagg

SEQ ID NO: 6057128 - DNA, 25 bp, Homo sapien
cagaagaatccatttaaagactttt

SEQ ID NO: 6057129 - DNA, 25 bp, Homo sapien
tatggtgttttatctactctaaaat

SEQ ID NO: 6057130 - DNA, 25 bp, Homo sapien
caatctcagttactacacacaatta

SEQ ID NO: 6057131 - DNA, 25 bp, Homo sapien
taaaggccttgattctctccgctca

SEQ ID NO: 6057132 - DNA, 25 bp, Homo sapien
ggcatcatactggaagatttgtggg

SEQ ID NO: 6057133 - DNA, 25 bp, Homo sapien
aactgggccagtgcctgatccacta

SEQ ID NO: 6057134 - DNA, 25 bp, Homo sapien
ccaaaatgataacattttcagaaga

SEQ ID NO: 6057135 - DNA, 25 bp, Homo sapien
aggtgttaaggacagctttgggagt

SEQ ID NO: 6057136 - DNA, 25 bp, Homo sapien
caaattcttggacctcagtgtatgg

SEQ ID NO: 6057137 - DNA, 25 bp, Homo sapien
agatggggcttgtccgaaggcgaat

SEQ ID NO: 6057138 - DNA, 25 bp, Homo sapien
tcctccaggccccacttttgccaga

SEQ ID NO: 6057139 - DNA, 25 bp, Homo sapien
ggcgaatggaggaccactgggagga

SEQ ID NO: 6057140 - DNA, 25 bp, Homo sapien
gctgtagtaccaaatagagttgaag

SEQ ID NO: 6057141 - DNA, 25 bp, Homo sapien
cagcaaccacaatcctgtcataagc

SEQ ID NO: 6057142 - DNA, 25 bp, Homo sapien
cgtagagggcgtcgatctcactcac

SEQ ID NO: 6057143 - DNA, 25 bp, Homo sapien
gcactgtcagggatcagccactgga

SEQ ID NO: 6057144 - DNA, 25 bp, Homo sapien
ctgaactgctcaatgacatcagatt

SEQ ID NO: 6057145 - DNA, 25 bp, Homo sapien
tcaattaaacagtatttcttagtcc

SEQ ID NO: 6057146 - DNA, 25 bp, Homo sapien
cgatcgcaaattcttggacctcagt

SEQ ID NO: 6057147 - DNA, 25 bp, Homo sapien
tgttgatgtgactgtggtgtccgca

SEQ ID NO: 6057148 - DNA, 25 bp, Homo sapien
tggcttcagccagctggttggaaag

SEQ ID NO: 6057149 - DNA, 25 bp, Homo sapien
ggtaatggtcactgatggcttcagc

SEQ ID NO: 6057150 - DNA, 25 bp, Homo sapien
agatggtggaatgctgtagtaccaa

SEQ ID NO: 6057151 - DNA, 25 bp, Homo sapien
gcttgagctcaactttatttacttc

SEQ ID NO: 6057152 - DNA, 25 bp, Homo sapien
aaacatcgtagagggcgtcgatctc

SEQ ID NO: 6057153 - DNA, 25 bp, Homo sapien
ggctgcatgcaagggcacgatcgca

SEQ ID NO: 6057154 - DNA, 25 bp, Homo sapien
ctgtattctgcttggaaatcaaaag

SEQ ID NO: 6057155 - DNA, 25 bp, Homo sapien
gggaggaagtgacgtagctgcagcc

SEQ ID NO: 6057156 - DNA, 25 bp, Homo sapien
tggaaatcaaaaggaacagccgagt

SEQ ID NO: 6057157 - DNA, 25 bp, Homo sapien
ggaacagccgagttgggaacaacag

SEQ ID NO: 6057158 - DNA, 25 bp, Homo sapien
cccacttttgccagacatctaggta

SEQ ID NO: 6057159 - DNA, 25 bp, Homo sapien
tgaagtctcccatgaacatgatgtc

SEQ ID NO: 6057160 - DNA, 25 bp, Homo sapien
ggcttgtccgaaggcgaatggagga

SEQ ID NO: 6057161 - DNA, 25 bp, Homo sapien
tctgcttggaaatcaaaaggaacag

SEQ ID NO: 6057162 - DNA, 25 bp, Homo sapien
ccaggccccacttttgccagacatc

SEQ ID NO: 6057163 - DNA, 25 bp, Homo sapien
gaagcagtatggctgaactgctcaa

SEQ ID NO: 6057164 - DNA, 25 bp, Homo sapien
ccactggaagatggggcttgtccga

SEQ ID NO: 6057165 - DNA, 25 bp, Homo sapien
catgcaagggcacgatcgcaaattc

SEQ ID NO: 6057166 - DNA, 25 bp, Homo sapien
ttgggaacaacagcagcctggagca

SEQ ID NO: 6057167 - DNA, 25 bp, Homo sapien
cacagtgtgttgatgtgactgtggt

SEQ ID NO: 6057168 - DNA, 25 bp, Homo sapien
gtggattcttcctcaccagaagcag

SEQ ID NO: 6057169 - DNA, 25 bp, Homo sapien
tttgccagacatctaggtaaacatc

SEQ ID NO: 6057170 - DNA, 25 bp, Homo sapien
tggagcagagctccagcaaccacaa

SEQ ID NO: 6057171 - DNA, 25 bp, Homo sapien
gtgtccgcactgtcagggatcagcc

SEQ ID NO: 6057172 - DNA, 25 bp, Homo sapien
cgtggcagacgttttctctgttctg

SEQ ID NO: 6057173 - DNA, 25 bp, Homo sapien
gtatttcttagtccccgtggcagac

SEQ ID NO: 6057174 - DNA, 25 bp, Homo sapien
ctgtggtgtccgcactgtcagggat

SEQ ID NO: 6057175 - DNA, 25 bp, Homo sapien
tcaccagaagcagtatggctgaact

SEQ ID NO: 6057176 - DNA, 25 bp, Homo sapien
tacttcaattaaacagtatttctta

SEQ ID NO: 6057177 - DNA, 25 bp, Homo sapien
cataagcacagtgtgttgatgtgac

SEQ ID NO: 6057178 - DNA, 25 bp, Homo sapien
tcaaaaggaacagccgagttgggaa

SEQ ID NO: 6057179 - DNA, 25 bp, Homo sapien
tgaacatgatgtcctccaggcccca

SEQ ID NO: 6057180 - DNA, 25 bp, Homo sapien
gccgagttgggaacaacagcagcct

SEQ ID NO: 6057181 - DNA, 25 bp, Homo sapien
gctggttggaaagtctgtattctgc

SEQ ID NO: 6057182 - DNA, 25 bp, Homo sapien
tgttctgagatggtggaatgctgta

SEQ ID NO: 6057183 - DNA, 25 bp, Homo sapien
accactgggaggaagtgacgtagct

SEQ ID NO: 6057184 - DNA, 25 bp, Homo sapien
agtccccgtggcagacgttttctct

SEQ ID NO: 6057185 - DNA, 25 bp, Homo sapien
tgttggggctgcatgcaagggcacg

SEQ ID NO: 6057186 - DNA, 25 bp, Homo sapien
atgtgactgtggtgtccgcactgtc

SEQ ID NO: 6057187 - DNA, 25 bp, Homo sapien
agggcacgatcgcaaattcttggac

SEQ ID NO: 6057188 - DNA, 25 bp, Homo sapien
cacctccactgggtaatggtcactg

SEQ ID NO: 6057189 - DNA, 25 bp, Homo sapien
ccactgggtaatggtcactgatggc

SEQ ID NO: 6057190 - DNA, 25 bp, Homo sapien
gatcagccactggaagatggggctt

SEQ ID NO: 6057191 - DNA, 25 bp, Homo sapien
tggaggaccactgggaggaagtgac

SEQ ID NO: 6057192 - DNA, 25 bp, Homo sapien
gtaccaaatagagttgaagtggatt

SEQ ID NO: 6057193 - DNA, 25 bp, Homo sapien
gttgaagtggattcttcctcaccag

SEQ ID NO: 6057194 - DNA, 25 bp, Homo sapien
ctcccatgaacatgatgtcctccag

SEQ ID NO: 6057195 - DNA, 25 bp, Homo sapien
tttctctgttctgagatggtggaat

SEQ ID NO: 6057196 - DNA, 25 bp, Homo sapien
gggcgtcgatctcactcacagcttc

SEQ ID NO: 6057197 - DNA, 25 bp, Homo sapien
gcagcctggagcagagctccagcaa

SEQ ID NO: 6057198 - DNA, 25 bp, Homo sapien
ttttctgagtgtcacctccactggg

SEQ ID NO: 6057199 - DNA, 25 bp, Homo sapien
agacatctaggtaaacatcgtagag

SEQ ID NO: 6057200 - DNA, 25 bp, Homo sapien
tcagatttttctgagtgtcacctcc

SEQ ID NO: 6057201 - DNA, 25 bp, Homo sapien
ctaggtaaacatcgtagagggcgtc

SEQ ID NO: 6057202 - DNA, 25 bp, Homo sapien
cagcattgaagtctcccatgaacat

SEQ ID NO: 6057203 - DNA, 25 bp, Homo sapien
tcttcctcaccagaagcagtatggc

SEQ ID NO: 6057204 - DNA, 25 bp, Homo sapien
ccacaatcctgtcataagcacagtg

SEQ ID NO: 6057205 - DNA, 25 bp, Homo sapien
ggtcactgatggcttcagccagctg

SEQ ID NO: 6057206 - DNA, 25 bp, Homo sapien
gagtgtcacctccactgggtaatgg

SEQ ID NO: 6057207 - DNA, 25 bp, Homo sapien
cagccagctggttggaaagtctgta

SEQ ID NO: 6057208 - DNA, 25 bp, Homo sapien
tcagggatcagccactggaagatgg

SEQ ID NO: 6057209 - DNA, 25 bp, Homo sapien
aagtgacgtagctgcagccagcatt

SEQ ID NO: 6057210 - DNA, 25 bp, Homo sapien
acagcttctgttggggctgcatgca

SEQ ID NO: 6057211 - DNA, 25 bp, Homo sapien
ttttttgcttgagctcaactttatt

SEQ ID NO: 6057212 - DNA, 25 bp, Homo sapien
agagctccagcaaccacaatcctgt

SEQ ID NO: 6057213 - DNA, 25 bp, Homo sapien
cgatctcactcacagcttctgttgg

SEQ ID NO: 6057214 - DNA, 25 bp, Homo sapien
gctcaactttatttacttcaattaa

SEQ ID NO: 6057215 - DNA, 25 bp, Homo sapien
tgcagccagcattgaagtctcccat

SEQ ID NO: 6057216 - DNA, 25 bp, Homo sapien
aatagagttgaagtggattcttcct

SEQ ID NO: 6057217 - DNA, 25 bp, Homo sapien
tgctcaatgacatcagatttttctg

SEQ ID NO: 6057218 - DNA, 25 bp, Homo sapien
atgacatcagatttttctgagtgtc

SEQ ID NO: 6057219 - DNA, 25 bp, Homo sapien
acaacagcagcctggagcagagctc

SEQ ID NO: 6057220 - DNA, 25 bp, Homo sapien
cactcacagcttctgttggggctgc

SEQ ID NO: 6057221 - DNA, 25 bp, Homo sapien
atgatgtcctccaggccccactttt

SEQ ID NO: 6057222 - DNA, 25 bp, Homo sapien
tcctgtcataagcacagtgtgttga

SEQ ID NO: 6057223 - DNA, 25 bp, Homo sapien
agacgttttctctgttctgagatgg

SEQ ID NO: 6057224 - DNA, 25 bp, Homo sapien
tccgaaggcgaatggaggaccactg

SEQ ID NO: 6057225 - DNA, 25 bp, Homo sapien
cgtagctgcagccagcattgaagtc

SEQ ID NO: 6057226 - DNA, 25 bp, Homo sapien
tggaatgctgtagtaccaaatagag

SEQ ID NO: 6057227 - DNA, 25 bp, Homo sapien
tggaaagtctgtattctgcttggaa

SEQ ID NO: 6057228 - DNA, 25 bp, Homo sapien
ctgatggcttcagccagctggttgg

SEQ ID NO: 6057229 - DNA, 25 bp, Homo sapien
gtatggctgaactgctcaatgacat

SEQ ID NO: 6057230 - DNA, 25 bp, Homo sapien
acatcaaatgttataactgtggagt

SEQ ID NO: 6057231 - DNA, 25 bp, Homo sapien
ctgcatatcctgtggaaagtaagcc

SEQ ID NO: 6057232 - DNA, 25 bp, Homo sapien
tcagtatccttggagacaatgggct

SEQ ID NO: 6057233 - DNA, 25 bp, Homo sapien
gcagtagacaactcaagatgaatca

SEQ ID NO: 6057234 - DNA, 25 bp, Homo sapien
cttgttaaaggccttgattctctcc

SEQ ID NO: 6057235 - DNA, 25 bp, Homo sapien
ctccatagaatgaatagagagacat

SEQ ID NO: 6057236 - DNA, 25 bp, Homo sapien
gaaaggttagcttaaggaaggatgc

SEQ ID NO: 6057237 - DNA, 25 bp, Homo sapien
caatgggcttgaaggtgttaaggac

SEQ ID NO: 6057238 - DNA, 25 bp, Homo sapien
atcctgtggaaagtaagcccaaagg

SEQ ID NO: 6057239 - DNA, 25 bp, Homo sapien
caaattttccataatagaaacttgt

SEQ ID NO: 6057240 - DNA, 25 bp, Homo sapien
gttttatctactctaaaatagcagt

SEQ ID NO: 6057241 - DNA, 25 bp, Homo sapien
cagttactacacacaattacccaaa

SEQ ID NO: 6057242 - DNA, 25 bp, Homo sapien
caattacccaaaatgataacatttt

SEQ ID NO: 6057243 - DNA, 25 bp, Homo sapien
aagaggaaaaagacaatctcagtta

SEQ ID NO: 6057244 - DNA, 25 bp, Homo sapien
ataactgtggagttcctgagagatg

SEQ ID NO: 6057245 - DNA, 25 bp, Homo sapien
gagggtccagtcacatcaaatgtta

SEQ ID NO: 6057246 - DNA, 25 bp, Homo sapien
ccagtcacatcaaatgttataactg

SEQ ID NO: 6057247 - DNA, 25 bp, Homo sapien
cttaaggaaggatgctatgctatct

SEQ ID NO: 6057248 - DNA, 25 bp, Homo sapien
gtaagcccaaaggggaaaggcatca

SEQ ID NO: 6057249 - DNA, 25 bp, Homo sapien
ttcctgagagatgtcttaatatctc

SEQ ID NO: 6057250 - DNA, 25 bp, Homo sapien
gagacaatgggcttgaaggtgttaa

SEQ ID NO: 6057251 - DNA, 25 bp, Homo sapien
taatatgcagtagacaactcaagat

SEQ ID NO: 6057252 - DNA, 25 bp, Homo sapien
ggcatcatactggaagatttgtggg

SEQ ID NO: 6057253 - DNA, 25 bp, Homo sapien
aatagagagacatgaggtggatgga

SEQ ID NO: 6057254 - DNA, 25 bp, Homo sapien
agagatgtcttaatatctcaccaca

SEQ ID NO: 6057255 - DNA, 25 bp, Homo sapien
agaaaaaagaatctgtctaggaaag

SEQ ID NO: 6057256 - DNA, 25 bp, Homo sapien
cagcttcgggagtaaggtactgcat

SEQ ID NO: 6057257 - DNA, 25 bp, Homo sapien
ggttagcttaaggaaggatgctatg

SEQ ID NO: 6057258 - DNA, 25 bp, Homo sapien
gacaactcaagatgaatcattggcc

SEQ ID NO: 6057259 - DNA, 25 bp, Homo sapien
aatgttataactgtggagttcctga

SEQ ID NO: 6057260 - DNA, 25 bp, Homo sapien
taaggacagcttcgggagtaaggta

SEQ ID NO: 6057261 - DNA, 25 bp, Homo sapien
aagacaatctcagttactacacaca

SEQ ID NO: 6057262 - DNA, 25 bp, Homo sapien
acattggttttttcagtatccttgg

SEQ ID NO: 6057263 - DNA, 25 bp, Homo sapien
gttttttcagtatccttggagacaa

SEQ ID NO: 6057264 - DNA, 25 bp, Homo sapien
tgaatcattggcctctatatggtgt

SEQ ID NO: 6057265 - DNA, 25 bp, Homo sapien
tccataatagaaacttgttaaaggc

SEQ ID NO: 6057266 - DNA, 25 bp, Homo sapien
tagcagtcaagcctttaggtaaaac

SEQ ID NO: 6057267 - DNA, 25 bp, Homo sapien
gcttgaaggtgttaaggacagcttc

SEQ ID NO: 6057268 - DNA, 25 bp, Homo sapien
ccttgattctctccgctcagatgat

SEQ ID NO: 6057269 - DNA, 25 bp, Homo sapien
agaatctgtctaggaaaggttagct

SEQ ID NO: 6057270 - DNA, 25 bp, Homo sapien
caccacacattggttttttcagtat

SEQ ID NO: 6057271 - DNA, 25 bp, Homo sapien
cagaggctccatagaatgaatagag

SEQ ID NO: 6057272 - DNA, 25 bp, Homo sapien
tacacacaattacccaaaatgataa

SEQ ID NO: 6057273 - DNA, 25 bp, Homo sapien
gggaaaggcatcatactggaagatt

SEQ ID NO: 6057274 - DNA, 25 bp, Homo sapien
tgaggtggatggagaatggagggtc

SEQ ID NO: 6057275 - DNA, 25 bp, Homo sapien
ttctctccgctcagatgatgcaact

SEQ ID NO: 6057276 - DNA, 25 bp, Homo sapien
tctactctaaaatagcagtcaagcc

SEQ ID NO: 6057277 - DNA, 25 bp, Homo sapien
ccaaaggggaaaggcatcatactgg

SEQ ID NO: 6057278 - DNA, 25 bp, Homo sapien
gagacatgaggtggatggagaatgg

SEQ ID NO: 6057279 - DNA, 25 bp, Homo sapien
cgggagtaaggtactgcatatcctg

SEQ ID NO: 6057280 - DNA, 25 bp, Homo sapien
gaagatttgtgggaagggctgaaca

SEQ ID NO: 6057281 - DNA, 25 bp, Homo sapien
tgataacattttcagaagaatccat

SEQ ID NO: 6057282 - DNA, 25 bp, Homo sapien
agatgatgcaactggaatttagaaa

SEQ ID NO: 6057283 - DNA, 25 bp, Homo sapien
ttgtgggaagggctgaacagagaac

SEQ ID NO: 6057284 - DNA, 25 bp, Homo sapien
tgtctaggaaaggttagcttaagga

SEQ ID NO: 6057285 - DNA, 25 bp, Homo sapien
attgaaaagaggaaaaagacaatct

SEQ ID NO: 6057286 - DNA, 25 bp, Homo sapien
cattggcctctatatggtgttttat

SEQ ID NO: 6057287 - DNA, 25 bp, Homo sapien
aaggtactgcatatcctgtggaaag

SEQ ID NO: 6057288 - DNA, 25 bp, Homo sapien
gtggagttcctgagagatgtcttaa

SEQ ID NO: 6057289 - DNA, 25 bp, Homo sapien
ctttaggtaaaacagaggctccata

SEQ ID NO: 6057290 - DNA, 25 bp, Homo sapien
cctctatatggtgttttatctactc

SEQ ID NO: 6057291 - DNA, 25 bp, Homo sapien
agaatggagggtccagtcacatcaa

SEQ ID NO: 6057292 - DNA, 25 bp, Homo sapien
ggatggagaatggagggtccagtca

SEQ ID NO: 6057293 - DNA, 25 bp, Homo sapien
agaatgaatagagagacatgaggtg

SEQ ID NO: 6057294 - DNA, 25 bp, Homo sapien
atagaaacttgttaaaggccttgat

SEQ ID NO: 6057295 - DNA, 25 bp, Homo sapien
atactggaagatttgtgggaagggc

SEQ ID NO: 6057296 - DNA, 25 bp, Homo sapien
gtcttaatatctcaccacacattgg

SEQ ID NO: 6057297 - DNA, 25 bp, Homo sapien
ctaaaatagcagtcaagcctttagg

SEQ ID NO: 6057298 - DNA, 25 bp, Homo sapien
ccgctcagatgatgcaactggaatt

SEQ ID NO: 6057299 - DNA, 25 bp, Homo sapien
tcaagcctttaggtaaaacagaggc

SEQ ID NO: 6057300 - DNA, 25 bp, Homo sapien
cattttcagaagaatccatttaaag

SEQ ID NO: 6057301 - DNA, 25 bp, Homo sapien
gaaggatgctatgctatctaatatg

SEQ ID NO: 6057302 - DNA, 25 bp, Homo sapien
atatctcaccacacattggtttttt

SEQ ID NO: 6057303 - DNA, 25 bp, Homo sapien
gaatttagaaaaaagaatctgtcta

SEQ ID NO: 6057304 - DNA, 25 bp, Homo sapien
gtaaaacagaggctccatagaatga

SEQ ID NO: 6057305 - DNA, 25 bp, Homo sapien
tcaagatgaatcattggcctctata

SEQ ID NO: 6057306 - DNA, 25 bp, Homo sapien
tgcaactggaatttagaaaaaagaa

SEQ ID NO: 6057307 - DNA, 25 bp, Homo sapien
cagaagaatccatttaaagactttt

SEQ ID NO: 6057308 - DNA, 25 bp, Homo sapien
gctatctaatatgcagtagacaact

SEQ ID NO: 6057309 - DNA, 25 bp, Homo sapien
tgctatgctatctaatatgcagtag

SEQ ID NO: 6057310 - DNA, 25 bp, Homo sapien
tccttggagacaatgggcttgaagg

SEQ ID NO: 6057311 - DNA, 25 bp, Homo sapien
tatggtgttttatctactctaaaat

SEQ ID NO: 6057312 - DNA, 25 bp, Homo sapien
taaaggccttgattctctccgctca

SEQ ID NO: 6057313 - DNA, 25 bp, Homo sapien
caatctcagttactacacacaatta

SEQ ID NO: 6057314 - DNA, 25 bp, Homo sapien
aggtgttaaggacagcttcgggagt

SEQ ID NO: 6057315 - DNA, 25 bp, Homo sapien
ccaaaatgataacattttcagaaga

SEQ ID NO: 6057316 - DNA, 25 bp, Homo sapien
cgtagctgcagccagcattgaagtc

SEQ ID NO: 6057317 - DNA, 25 bp, Homo sapien
gcactgtcagggatcagccactgga

SEQ ID NO: 6057318 - DNA, 25 bp, Homo sapien
agatggggcttgtccgaaggcgaat

SEQ ID NO: 6057319 - DNA, 25 bp, Homo sapien
ggcgaatggaggaccactgggagga

SEQ ID NO: 6057320 - DNA, 25 bp, Homo sapien
gctgtagtaccaaatagagttgaag

SEQ ID NO: 6057321 - DNA, 25 bp, Homo sapien
cagcaaccacaatcctgtcataagc

SEQ ID NO: 6057322 - DNA, 25 bp, Homo sapien
ctgaactgctcaatgacatcagatt

SEQ ID NO: 6057323 - DNA, 25 bp, Homo sapien
gatcgcaaattcttggacctcagtg

SEQ ID NO: 6057324 - DNA, 25 bp, Homo sapien
tcaattaaacagtatttcttagtcc

SEQ ID NO: 6057325 - DNA, 25 bp, Homo sapien
taaacatcgtagagggcgtcgatct

SEQ ID NO: 6057326 - DNA, 25 bp, Homo sapien
tgttgatgtgactgtggtgtccgca

SEQ ID NO: 6057327 - DNA, 25 bp, Homo sapien
ggtaatggtcactgatggcttcagc

SEQ ID NO: 6057328 - DNA, 25 bp, Homo sapien
tggcttcagccagctggttggaaag

SEQ ID NO: 6057329 - DNA, 25 bp, Homo sapien
agatggtggaatgctgtagtaccaa

SEQ ID NO: 6057330 - DNA, 25 bp, Homo sapien
ggctgcatgcaagggcacgatcgca

SEQ ID NO: 6057331 - DNA, 25 bp, Homo sapien
ctgtattctgcttggaaatcaaaag

SEQ ID NO: 6057332 - DNA, 25 bp, Homo sapien
tccaggccccacttttgccagacat

SEQ ID NO: 6057333 - DNA, 25 bp, Homo sapien
tggaaatcaaaaggaacagccgagt

SEQ ID NO: 6057334 - DNA, 25 bp, Homo sapien
ggaacagccgagttgggaacaacag

SEQ ID NO: 6057335 - DNA, 25 bp, Homo sapien
tcagtgtatggggaaaagaacttaa

SEQ ID NO: 6057336 - DNA, 25 bp, Homo sapien
atgcaagggcacgatcgcaaattct

SEQ ID NO: 6057337 - DNA, 25 bp, Homo sapien
gggaggaagtgacgtagctgcagcc

SEQ ID NO: 6057338 - DNA, 25 bp, Homo sapien
tgaagtctcccatgaacatgatgtc

SEQ ID NO: 6057339 - DNA, 25 bp, Homo sapien
tggacctcagtgtatggggaaaaga

SEQ ID NO: 6057340 - DNA, 25 bp, Homo sapien
tctgcttggaaatcaaaaggaacag

SEQ ID NO: 6057341 - DNA, 25 bp, Homo sapien
cgtggcagacgttttctctgttctg

SEQ ID NO: 6057342 - DNA, 25 bp, Homo sapien
gaagcagtatggctgaactgctcaa

SEQ ID NO: 6057343 - DNA, 25 bp, Homo sapien
ccactggaagatggggcttgtccga

SEQ ID NO: 6057344 - DNA, 25 bp, Homo sapien
ggcttgtccgaaggcgaatggagga

SEQ ID NO: 6057345 - DNA, 25 bp, Homo sapien
ttgggaacaacagcagcctggagca

SEQ ID NO: 6057346 - DNA, 25 bp, Homo sapien
agggcgtcgatctcactcacagctt

SEQ ID NO: 6057347 - DNA, 25 bp, Homo sapien
aaattcttggacctcagtgtatggg

SEQ ID NO: 6057348 - DNA, 25 bp, Homo sapien
tggagcagagctccagcaaccacaa

SEQ ID NO: 6057349 - DNA, 25 bp, Homo sapien
cacagtgtgttgatgtgactgtggt

SEQ ID NO: 6057350 - DNA, 25 bp, Homo sapien
gtatttcttagtccccgtggcagac

SEQ ID NO: 6057351 - DNA, 25 bp, Homo sapien
gtggattcttcctcaccagaagcag

SEQ ID NO: 6057352 - DNA, 25 bp, Homo sapien
tcaccagaagcagtatggctgaact

SEQ ID NO: 6057353 - DNA, 25 bp, Homo sapien
gtgtccgcactgtcagggatcagcc

SEQ ID NO: 6057354 - DNA, 25 bp, Homo sapien
tcgtagagggcgtcgatctcactca

SEQ ID NO: 6057355 - DNA, 25 bp, Homo sapien
cagacatctaggtaaacatcgtaga

SEQ ID NO: 6057356 - DNA, 25 bp, Homo sapien
tgatgtcctccaggccccacttttg

SEQ ID NO: 6057357 - DNA, 25 bp, Homo sapien
cataagcacagtgtgttgatgtgac

SEQ ID NO: 6057358 - DNA, 25 bp, Homo sapien
ctgtggtgtccgcactgtcagggat

SEQ ID NO: 6057359 - DNA, 25 bp, Homo sapien
gccgagttgggaacaacagcagcct

SEQ ID NO: 6057360 - DNA, 25 bp, Homo sapien
tacttcaattaaacagtatttctta

SEQ ID NO: 6057361 - DNA, 25 bp, Homo sapien
tcgatctcactcacagcttctgttg

SEQ ID NO: 6057362 - DNA, 25 bp, Homo sapien
gaaaagaacttaacaatggctggct

SEQ ID NO: 6057363 - DNA, 25 bp, Homo sapien
tcaaaaggaacagccgagttgggaa

SEQ ID NO: 6057364 - DNA, 25 bp, Homo sapien
tgaacatgatgtcctccaggcccca

SEQ ID NO: 6057365 - DNA, 25 bp, Homo sapien
gctggttggaaagtctgtattctgc

SEQ ID NO: 6057366 - DNA, 25 bp, Homo sapien
ccactgggtaatggtcactgatggc

SEQ ID NO: 6057367 - DNA, 25 bp, Homo sapien
tgttctgagatggtggaatgctgta

SEQ ID NO: 6057368 - DNA, 25 bp, Homo sapien
accactgggaggaagtgacgtagct

SEQ ID NO: 6057369 - DNA, 25 bp, Homo sapien
agtccccgtggcagacgttttctct

SEQ ID NO: 6057370 - DNA, 25 bp, Homo sapien
tgttggggctgcatgcaagggcacg

SEQ ID NO: 6057371 - DNA, 25 bp, Homo sapien
atgtgactgtggtgtccgcactgtc

SEQ ID NO: 6057372 - DNA, 25 bp, Homo sapien
tcactcacagcttctgttggggctg

SEQ ID NO: 6057373 - DNA, 25 bp, Homo sapien
cacctccactgggtaatggtcactg

SEQ ID NO: 6057374 - DNA, 25 bp, Homo sapien
gggcacgatcgcaaattcttggacc

SEQ ID NO: 6057375 - DNA, 25 bp, Homo sapien
gatcagccactggaagatggggctt

SEQ ID NO: 6057376 - DNA, 25 bp, Homo sapien
gtaccaaatagagttgaagtggatt

SEQ ID NO: 6057377 - DNA, 25 bp, Homo sapien
gttgaagtggattcttcctcaccag

SEQ ID NO: 6057378 - DNA, 25 bp, Homo sapien
tttctctgttctgagatggtggaat

SEQ ID NO: 6057379 - DNA, 25 bp, Homo sapien
ctcccatgaacatgatgtcctccag

SEQ ID NO: 6057380 - DNA, 25 bp, Homo sapien
tggaggaccactgggaggaagtgac

SEQ ID NO: 6057381 - DNA, 25 bp, Homo sapien
ttttctgagtgtcacctccactggg

SEQ ID NO: 6057382 - DNA, 25 bp, Homo sapien
gcagcctggagcagagctccagcaa

SEQ ID NO: 6057383 - DNA, 25 bp, Homo sapien
tcagatttttctgagtgtcacctcc

SEQ ID NO: 6057384 - DNA, 25 bp, Homo sapien
tcttcctcaccagaagcagtatggc

SEQ ID NO: 6057385 - DNA, 25 bp, Homo sapien
ccacaatcctgtcataagcacagtg

SEQ ID NO: 6057386 - DNA, 25 bp, Homo sapien
ccccacttttgccagacatctaggt

SEQ ID NO: 6057387 - DNA, 25 bp, Homo sapien
gagtgtcacctccactgggtaatgg

SEQ ID NO: 6057388 - DNA, 25 bp, Homo sapien
cagccagctggttggaaagtctgta

SEQ ID NO: 6057389 - DNA, 25 bp, Homo sapien
tcagggatcagccactggaagatgg

SEQ ID NO: 6057390 - DNA, 25 bp, Homo sapien
acagcttctgttggggctgcatgca

SEQ ID NO: 6057391 - DNA, 25 bp, Homo sapien
cagcattgaagtctcccatgaacat

SEQ ID NO: 6057392 - DNA, 25 bp, Homo sapien
ggtcactgatggcttcagccagctg

SEQ ID NO: 6057393 - DNA, 25 bp, Homo sapien
agagctccagcaaccacaatcctgt

SEQ ID NO: 6057394 - DNA, 25 bp, Homo sapien
tctaggtaaacatcgtagagggcgt

SEQ ID NO: 6057395 - DNA, 25 bp, Homo sapien
tgctcaatgacatcagatttttctg

SEQ ID NO: 6057396 - DNA, 25 bp, Homo sapien
aagtgacgtagctgcagccagcatt

SEQ ID NO: 6057397 - DNA, 25 bp, Homo sapien
tgcagccagcattgaagtctcccat

SEQ ID NO: 6057398 - DNA, 25 bp, Homo sapien
aatagagttgaagtggattcttcct

SEQ ID NO: 6057399 - DNA, 25 bp, Homo sapien
atgacatcagatttttctgagtgtc

SEQ ID NO: 6057400 - DNA, 25 bp, Homo sapien
ttttgccagacatctaggtaaacat

SEQ ID NO: 6057401 - DNA, 25 bp, Homo sapien
acaacagcagcctggagcagagctc

SEQ ID NO: 6057402 - DNA, 25 bp, Homo sapien
tccgaaggcgaatggaggaccactg

SEQ ID NO: 6057403 - DNA, 25 bp, Homo sapien
ctgatggcttcagccagctggttgg

SEQ ID NO: 6057404 - DNA, 25 bp, Homo sapien
tcctgtcataagcacagtgtgttga

SEQ ID NO: 6057405 - DNA, 25 bp, Homo sapien
agacgttttctctgttctgagatgg

SEQ ID NO: 6057406 - DNA, 25 bp, Homo sapien
tggaatgctgtagtaccaaatagag

SEQ ID NO: 6057407 - DNA, 25 bp, Homo sapien
tggaaagtctgtattctgcttggaa

SEQ ID NO: 6057408 - DNA, 25 bp, Homo sapien
gtatggctgaactgctcaatgacat

SEQ ID NO: 6057409 - DNA, 25 bp, Homo sapien
gtcttaatatctcaccacacattgg

SEQ ID NO: 6057410 - DNA, 25 bp, Homo sapien
agaatctgtctaggaaaggttagct

SEQ ID NO: 6057411 - DNA, 25 bp, Homo sapien
ctccatagaatgaatagagagacat

SEQ ID NO: 6057412 - DNA, 25 bp, Homo sapien
cttgttaaaggccttgattctctcc

SEQ ID NO: 6057413 - DNA, 25 bp, Homo sapien
tcagtatccttggagacaatgggct

SEQ ID NO: 6057414 - DNA, 25 bp, Homo sapien
ctggaagatttgtgggaagggctga

SEQ ID NO: 6057415 - DNA, 25 bp, Homo sapien
gcagtagacaactcaagatgaatca

SEQ ID NO: 6057416 - DNA, 25 bp, Homo sapien
gaaaggttagcttaaggaaggatgc

SEQ ID NO: 6057417 - DNA, 25 bp, Homo sapien
agcccaaaggggaaaggcatcatac

SEQ ID NO: 6057418 - DNA, 25 bp, Homo sapien
caaattttccataatagaaacttgt

SEQ ID NO: 6057419 - DNA, 25 bp, Homo sapien
caatgggcttgaaggtgttaaggac

SEQ ID NO: 6057420 - DNA, 25 bp, Homo sapien
gagggtccagtcacatcaaatgtta

SEQ ID NO: 6057421 - DNA, 25 bp, Homo sapien
gttttatctactctaaaatagcagt

SEQ ID NO: 6057422 - DNA, 25 bp, Homo sapien
cagttactacacacaattacccaaa

SEQ ID NO: 6057423 - DNA, 25 bp, Homo sapien
caattacccaaaatgataacatttt

SEQ ID NO: 6057424 - DNA, 25 bp, Homo sapien
ccagtcacatcaaatgttataactg

SEQ ID NO: 6057425 - DNA, 25 bp, Homo sapien
aagaggaaaaagacaatctcagtta

SEQ ID NO: 6057426 - DNA, 25 bp, Homo sapien
ataactgtggagttcctgagagatg

SEQ ID NO: 6057427 - DNA, 25 bp, Homo sapien
gagacaatgggcttgaaggtgttaa

SEQ ID NO: 6057428 - DNA, 25 bp, Homo sapien
ttcctgagagatgtcttaatatctc

SEQ ID NO: 6057429 - DNA, 25 bp, Homo sapien
aatagagagacatgaggtggatgga

SEQ ID NO: 6057430 - DNA, 25 bp, Homo sapien
taatatgcagtagacaactcaagat

SEQ ID NO: 6057431 - DNA, 25 bp, Homo sapien
cttaaggaaggatgctatgctatct

SEQ ID NO: 6057432 - DNA, 25 bp, Homo sapien
gcttgaaggtgttaaggacagcttt

SEQ ID NO: 6057433 - DNA, 25 bp, Homo sapien
atcatactggaagatttgtgggaag

SEQ ID NO: 6057434 - DNA, 25 bp, Homo sapien
agaaaaaagaatctgtctaggaaag

SEQ ID NO: 6057435 - DNA, 25 bp, Homo sapien
ggttagcttaaggaaggatgctatg

SEQ ID NO: 6057436 - DNA, 25 bp, Homo sapien
agagatgtcttaatatctcaccaca

SEQ ID NO: 6057437 - DNA, 25 bp, Homo sapien
aatgttataactgtggagttcctga

SEQ ID NO: 6057438 - DNA, 25 bp, Homo sapien
taaggacagctttgggagtaaggta

SEQ ID NO: 6057439 - DNA, 25 bp, Homo sapien
gacaactcaagatgaatcattggcc

SEQ ID NO: 6057440 - DNA, 25 bp, Homo sapien
aaggggaaaggcatcatactggaag

SEQ ID NO: 6057441 - DNA, 25 bp, Homo sapien
acattggttttttcagtatccttgg

SEQ ID NO: 6057442 - DNA, 25 bp, Homo sapien
tagcagtcaagcctttaggtaaaac

SEQ ID NO: 6057443 - DNA, 25 bp, Homo sapien
gttttttcagtatccttggagacaa

SEQ ID NO: 6057444 - DNA, 25 bp, Homo sapien
ctgcatatcctgtggaaagtaagcc

SEQ ID NO: 6057445 - DNA, 25 bp, Homo sapien
aagacaatctcagttactacacaca

SEQ ID NO: 6057446 - DNA, 25 bp, Homo sapien
tccataatagaaacttgttaaaggc

SEQ ID NO: 6057447 - DNA, 25 bp, Homo sapien
tgaatcattggcctctatatggtgt

SEQ ID NO: 6057448 - DNA, 25 bp, Homo sapien
ccttgattctctccgctcagatgat

SEQ ID NO: 6057449 - DNA, 25 bp, Homo sapien
caccacacattggttttttcagtat

SEQ ID NO: 6057450 - DNA, 25 bp, Homo sapien
cagaggctccatagaatgaatagag

SEQ ID NO: 6057451 - DNA, 25 bp, Homo sapien
ttctctccgctcagatgatgcaact

SEQ ID NO: 6057452 - DNA, 25 bp, Homo sapien
tgaggtggatggagaatggagggtc

SEQ ID NO: 6057453 - DNA, 25 bp, Homo sapien
tctactctaaaatagcagtcaagcc

SEQ ID NO: 6057454 - DNA, 25 bp, Homo sapien
tgataacattttcagaagaatccat

SEQ ID NO: 6057455 - DNA, 25 bp, Homo sapien
attgaaaagaggaaaaagacaatct

SEQ ID NO: 6057456 - DNA, 25 bp, Homo sapien
tgtctaggaaaggttagcttaagga

SEQ ID NO: 6057457 - DNA, 25 bp, Homo sapien
cattggcctctatatggtgttttat

SEQ ID NO: 6057458 - DNA, 25 bp, Homo sapien
gtggagttcctgagagatgtcttaa

SEQ ID NO: 6057459 - DNA, 25 bp, Homo sapien
agatgatgcaactggaatttagaaa

SEQ ID NO: 6057460 - DNA, 25 bp, Homo sapien
gagacatgaggtggatggagaatgg

SEQ ID NO: 6057461 - DNA, 25 bp, Homo sapien
aaggtactgcatatcctgtggaaag

SEQ ID NO: 6057462 - DNA, 25 bp, Homo sapien
cctctatatggtgttttatctactc

SEQ ID NO: 6057463 - DNA, 25 bp, Homo sapien
agaatgaatagagagacatgaggtg

SEQ ID NO: 6057464 - DNA, 25 bp, Homo sapien
agaatggagggtccagtcacatcaa

SEQ ID NO: 6057465 - DNA, 25 bp, Homo sapien
ggatggagaatggagggtccagtca

SEQ ID NO: 6057466 - DNA, 25 bp, Homo sapien
aaaggcatcatactggaagatttgt

SEQ ID NO: 6057467 - DNA, 25 bp, Homo sapien
acatcaaatgttataactgtggagt

SEQ ID NO: 6057468 - DNA, 25 bp, Homo sapien
tacacacaattacccaaaatgataa

SEQ ID NO: 6057469 - DNA, 25 bp, Homo sapien
ctttaggtaaaacagaggctccata

SEQ ID NO: 6057470 - DNA, 25 bp, Homo sapien
atagaaacttgttaaaggccttgat

SEQ ID NO: 6057471 - DNA, 25 bp, Homo sapien
tcaagcctttaggtaaaacagaggc

SEQ ID NO: 6057472 - DNA, 25 bp, Homo sapien
ccgctcagatgatgcaactggaatt

SEQ ID NO: 6057473 - DNA, 25 bp, Homo sapien
agctttgggagtaaggtactgcata

SEQ ID NO: 6057474 - DNA, 25 bp, Homo sapien
gaatttagaaaaaagaatctgtcta

SEQ ID NO: 6057475 - DNA, 25 bp, Homo sapien
atatctcaccacacattggtttttt

SEQ ID NO: 6057476 - DNA, 25 bp, Homo sapien
gaaggatgctatgctatctaatatg

SEQ ID NO: 6057477 - DNA, 25 bp, Homo sapien
gtaaaacagaggctccatagaatga

SEQ ID NO: 6057478 - DNA, 25 bp, Homo sapien
tcaagatgaatcattggcctctata

SEQ ID NO: 6057479 - DNA, 25 bp, Homo sapien
tgcaactggaatttagaaaaaagaa

SEQ ID NO: 6057480 - DNA, 25 bp, Homo sapien
gggagtaaggtactgcatatcctgt

SEQ ID NO: 6057481 - DNA, 25 bp, Homo sapien
taaaggccttgattctctccgctca

SEQ ID NO: 6057482 - DNA, 25 bp, Homo sapien
gctatctaatatgcagtagacaact

SEQ ID NO: 6057483 - DNA, 25 bp, Homo sapien
cattttcagaagaatccatttaaag

SEQ ID NO: 6057484 - DNA, 25 bp, Homo sapien
tgctatgctatctaatatgcagtag

SEQ ID NO: 6057485 - DNA, 25 bp, Homo sapien
cagaagaatccatttaaagactttt

SEQ ID NO: 6057486 - DNA, 25 bp, Homo sapien
tatggtgttttatctactctaaaat

SEQ ID NO: 6057487 - DNA, 25 bp, Homo sapien
tccttggagacaatgggcttgaagg

SEQ ID NO: 6057488 - DNA, 25 bp, Homo sapien
ccaaaatgataacattttcagaaga

SEQ ID NO: 6057489 - DNA, 25 bp, Homo sapien
caatctcagttactacacacaatta

SEQ ID NO: 6057490 - DNA, 25 bp, Homo sapien
ctaaaatagcagtcaagcctttagg

SEQ ID NO: 6057491 - DNA, 25 bp, Homo sapien
aggtgttaaggacagctttgggagt

SEQ ID NO: 6057492 - DNA, 25 bp, Homo sapien
atcctgtggaaagtaagcccaaagg

SEQ ID NO: 6057493 - DNA, 25 bp, Homo sapien
ctgcatatcctgtggaaagtaagcc

SEQ ID NO: 6057494 - DNA, 25 bp, Homo sapien
gcagtagacaactcaagatgaatca

SEQ ID NO: 6057495 - DNA, 25 bp, Homo sapien
ctccatagaatgaatagagagacat

SEQ ID NO: 6057496 - DNA, 25 bp, Homo sapien
tcagtatccttggagacaatgggct

SEQ ID NO: 6057497 - DNA, 25 bp, Homo sapien
gaaaggttagcttaaggaaggatgc

SEQ ID NO: 6057498 - DNA, 25 bp, Homo sapien
gtaagcccaaaggggaaaggcatca

SEQ ID NO: 6057499 - DNA, 25 bp, Homo sapien
tgaacagagaactgggccagtgcct

SEQ ID NO: 6057500 - DNA, 25 bp, Homo sapien
caatgggcttgaaggtgttaaggac

SEQ ID NO: 6057501 - DNA, 25 bp, Homo sapien
caaattttccataatagaaacttgt

SEQ ID NO: 6057502 - DNA, 25 bp, Homo sapien
cagttactacacacaattacccaaa

SEQ ID NO: 6057503 - DNA, 25 bp, Homo sapien
gagggtccagtcacatcaaatgtta

SEQ ID NO: 6057504 - DNA, 25 bp, Homo sapien
aagaggaaaaagacaatctcagtta

SEQ ID NO: 6057505 - DNA, 25 bp, Homo sapien
gttttatctactctaaaatagcagt

SEQ ID NO: 6057506 - DNA, 25 bp, Homo sapien
caattacccaaaatgataacatttt

SEQ ID NO: 6057507 - DNA, 25 bp, Homo sapien
aagggctgaacagagaactgggcca

SEQ ID NO: 6057508 - DNA, 25 bp, Homo sapien
ttcctgagagatgtcttaatatctc

SEQ ID NO: 6057509 - DNA, 25 bp, Homo sapien
ccagtcacatcaaatgttataactg

SEQ ID NO: 6057510 - DNA, 25 bp, Homo sapien
ataactgtggagttcctgagagatg

SEQ ID NO: 6057511 - DNA, 25 bp, Homo sapien
gagacaatgggcttgaaggtgttaa

SEQ ID NO: 6057512 - DNA, 25 bp, Homo sapien
taatatgcagtagacaactcaagat

SEQ ID NO: 6057513 - DNA, 25 bp, Homo sapien
ggaaaggcatcatactggaagattt

SEQ ID NO: 6057514 - DNA, 25 bp, Homo sapien
cttaaggaaggatgctatgctatct

SEQ ID NO: 6057515 - DNA, 25 bp, Homo sapien
aatagagagacatgaggtggatgga

SEQ ID NO: 6057516 - DNA, 25 bp, Homo sapien
gcttgaaggtgttaaggacagcttt

SEQ ID NO: 6057517 - DNA, 25 bp, Homo sapien
taaggacagctttgggagtaaggta

SEQ ID NO: 6057518 - DNA, 25 bp, Homo sapien
ggttagcttaaggaaggatgctatg

SEQ ID NO: 6057519 - DNA, 25 bp, Homo sapien
agaaaaaagaatctgtctaggaaag

SEQ ID NO: 6057520 - DNA, 25 bp, Homo sapien
aatgttataactgtggagttcctga

SEQ ID NO: 6057521 - DNA, 25 bp, Homo sapien
gacaactcaagatgaatcattggcc

SEQ ID NO: 6057522 - DNA, 25 bp, Homo sapien
agagatgtcttaatatctcaccaca

SEQ ID NO: 6057523 - DNA, 25 bp, Homo sapien
aagatttgtgggaagggctgaacag

SEQ ID NO: 6057524 - DNA, 25 bp, Homo sapien
gcatcatactggaagatttgtggga

SEQ ID NO: 6057525 - DNA, 25 bp, Homo sapien
gttttttcagtatccttggagacaa

SEQ ID NO: 6057526 - DNA, 25 bp, Homo sapien
acattggttttttcagtatccttgg

SEQ ID NO: 6057527 - DNA, 25 bp, Homo sapien
tagcagtcaagcctttaggtaaaac

SEQ ID NO: 6057528 - DNA, 25 bp, Homo sapien
tccataatagaaacttgttaaaggc

SEQ ID NO: 6057529 - DNA, 25 bp, Homo sapien
tgaatcattggcctctatatggtgt

SEQ ID NO: 6057530 - DNA, 25 bp, Homo sapien
ccttgattctctccgctcagatgat

SEQ ID NO: 6057531 - DNA, 25 bp, Homo sapien
ttctctccgctcagatgatgcaact

SEQ ID NO: 6057532 - DNA, 25 bp, Homo sapien
caccacacattggttttttcagtat

SEQ ID NO: 6057533 - DNA, 25 bp, Homo sapien
cagaggctccatagaatgaatagag

SEQ ID NO: 6057534 - DNA, 25 bp, Homo sapien
gagaactgggccagtgcctgatcca

SEQ ID NO: 6057535 - DNA, 25 bp, Homo sapien
gagacatgaggtggatggagaatgg

SEQ ID NO: 6057536 - DNA, 25 bp, Homo sapien
aagacaatctcagttactacacaca

SEQ ID NO: 6057537 - DNA, 25 bp, Homo sapien
tctactctaaaatagcagtcaagcc

SEQ ID NO: 6057538 - DNA, 25 bp, Homo sapien
tgaggtggatggagaatggagggtc

SEQ ID NO: 6057539 - DNA, 25 bp, Homo sapien
cattggcctctatatggtgttttat

SEQ ID NO: 6057540 - DNA, 25 bp, Homo sapien
tgataacattttcagaagaatccat

SEQ ID NO: 6057541 - DNA, 25 bp, Homo sapien
agaatgaatagagagacatgaggtg

SEQ ID NO: 6057542 - DNA, 25 bp, Homo sapien
ccaaaggggaaaggcatcatactgg

SEQ ID NO: 6057543 - DNA, 25 bp, Homo sapien
ctttaggtaaaacagaggctccata

SEQ ID NO: 6057544 - DNA, 25 bp, Homo sapien
attgaaaagaggaaaaagacaatct

SEQ ID NO: 6057545 - DNA, 25 bp, Homo sapien
tgtctaggaaaggttagcttaagga

SEQ ID NO: 6057546 - DNA, 25 bp, Homo sapien
gtggagttcctgagagatgtcttaa

SEQ ID NO: 6057547 - DNA, 25 bp, Homo sapien
agatgatgcaactggaatttagaaa

SEQ ID NO: 6057548 - DNA, 25 bp, Homo sapien
tacacacaattacccaaaatgataa

SEQ ID NO: 6057549 - DNA, 25 bp, Homo sapien
aaggtactgcatatcctgtggaaag

SEQ ID NO: 6057550 - DNA, 25 bp, Homo sapien
tgtgggaagggctgaacagagaact

SEQ ID NO: 6057551 - DNA, 25 bp, Homo sapien
cctctatatggtgttttatctactc

SEQ ID NO: 6057552 - DNA, 25 bp, Homo sapien
ggatggagaatggagggtccagtca

SEQ ID NO: 6057553 - DNA, 25 bp, Homo sapien
agaatggagggtccagtcacatcaa

SEQ ID NO: 6057554 - DNA, 25 bp, Homo sapien
atagaaacttgttaaaggccttgat

SEQ ID NO: 6057555 - DNA, 25 bp, Homo sapien
tactggaagatttgtgggaagggct

SEQ ID NO: 6057556 - DNA, 25 bp, Homo sapien
tgggccagtgcctgatccactacac

SEQ ID NO: 6057557 - DNA, 25 bp, Homo sapien
tcaagcctttaggtaaaacagaggc

SEQ ID NO: 6057558 - DNA, 25 bp, Homo sapien
ccgctcagatgatgcaactggaatt

SEQ ID NO: 6057559 - DNA, 25 bp, Homo sapien
agctttgggagtaaggtactgcata

SEQ ID NO: 6057560 - DNA, 25 bp, Homo sapien
atatctcaccacacattggtttttt

SEQ ID NO: 6057561 - DNA, 25 bp, Homo sapien
gaatttagaaaaaagaatctgtcta

SEQ ID NO: 6057562 - DNA, 25 bp, Homo sapien
gaaggatgctatgctatctaatatg

SEQ ID NO: 6057563 - DNA, 25 bp, Homo sapien
gtcttaatatctcaccacacattgg

SEQ ID NO: 6057564 - DNA, 25 bp, Homo sapien
agaatctgtctaggaaaggttagct

SEQ ID NO: 6057565 - DNA, 25 bp, Homo sapien
acatcaaatgttataactgtggagt

SEQ ID NO: 6057566 - DNA, 25 bp, Homo sapien
tgcaactggaatttagaaaaaagaa

SEQ ID NO: 6057567 - DNA, 25 bp, Homo sapien
tcaagatgaatcattggcctctata

SEQ ID NO: 6057568 - DNA, 25 bp, Homo sapien
gtaaaacagaggctccatagaatga

SEQ ID NO: 6057569 - DNA, 25 bp, Homo sapien
gctatctaatatgcagtagacaact

SEQ ID NO: 6057570 - DNA, 25 bp, Homo sapien
cattttcagaagaatccatttaaag

SEQ ID NO: 6057571 - DNA, 25 bp, Homo sapien
gggagtaaggtactgcatatcctgt

SEQ ID NO: 6057572 - DNA, 25 bp, Homo sapien
tgctatgctatctaatatgcagtag

SEQ ID NO: 6057573 - DNA, 25 bp, Homo sapien
taaaggccttgattctctccgctca

SEQ ID NO: 6057574 - DNA, 25 bp, Homo sapien
cagaagaatccatttaaagactttt

SEQ ID NO: 6057575 - DNA, 25 bp, Homo sapien
ctaaaatagcagtcaagcctttagg

SEQ ID NO: 6057576 - DNA, 25 bp, Homo sapien
tccttggagacaatgggcttgaagg

SEQ ID NO: 6057577 - DNA, 25 bp, Homo sapien
tatggtgttttatctactctaaaat

SEQ ID NO: 6057578 - DNA, 25 bp, Homo sapien
caatctcagttactacacacaatta

SEQ ID NO: 6057579 - DNA, 25 bp, Homo sapien
atcctgtggaaagtaagcccaaagg

SEQ ID NO: 6057580 - DNA, 25 bp, Homo sapien
aggtgttaaggacagctttgggagt

SEQ ID NO: 6057581 - DNA, 25 bp, Homo sapien
ccaaaatgataacattttcagaaga

SEQ ID NO: 6057582 - DNA, 25 bp, Homo sapien
cttgttaaaggccttgattctctcc

SEQ ID NO: 6057583 - DNA, 25 bp, Homo sapien
gtatggtttctctcctgtatggatt

SEQ ID NO: 6057584 - DNA, 25 bp, Homo sapien
taaggcttgaacattgggtaaaggc

SEQ ID NO: 6057585 - DNA, 25 bp, Homo sapien
attctctggtgttgactaagtgttg

SEQ ID NO: 6057586 - DNA, 25 bp, Homo sapien
tgactaagtgttgaattttgggtaa

SEQ ID NO: 6057587 - DNA, 25 bp, Homo sapien
ccacattctgcacatctgtagggct

SEQ ID NO: 6057588 - DNA, 25 bp, Homo sapien
atgaattctctggtgttgactaagt

SEQ ID NO: 6057589 - DNA, 25 bp, Homo sapien
aggtttgaacattgactaaaggatt

SEQ ID NO: 6057590 - DNA, 25 bp, Homo sapien
cttctctccagtgtggattacttgg

SEQ ID NO: 6057591 - DNA, 25 bp, Homo sapien
ggtgctgaccaagaattgagtagtg

SEQ ID NO: 6057592 - DNA, 25 bp, Homo sapien
ctccagtgtgaattctctgatgttt

SEQ ID NO: 6057593 - DNA, 25 bp, Homo sapien
ggctctgccacatacttcacatttg

SEQ ID NO: 6057594 - DNA, 25 bp, Homo sapien
agttaaaggctctgccacatacttc

SEQ ID NO: 6057595 - DNA, 25 bp, Homo sapien
tgtgtttagtaaaagatgagcggca

SEQ ID NO: 6057596 - DNA, 25 bp, Homo sapien
tggattacttggtgtttctgaaggc

SEQ ID NO: 6057597 - DNA, 25 bp, Homo sapien
cagtctttacatttgtaaggtttct

SEQ ID NO: 6057598 - DNA, 25 bp, Homo sapien
tagtaaaagatgagcggcagttaaa

SEQ ID NO: 6057599 - DNA, 25 bp, Homo sapien
gcttgaacactgagtaaaggacttg

SEQ ID NO: 6057600 - DNA, 25 bp, Homo sapien
gaattgagtagtggttaaagcttct

SEQ ID NO: 6057601 - DNA, 25 bp, Homo sapien
aacattgactaaaggatttcccaca

SEQ ID NO: 6057602 - DNA, 25 bp, Homo sapien
ccacactcttcacatttgtaaggtt

SEQ ID NO: 6057603 - DNA, 25 bp, Homo sapien
agcggcagttaaaggctctgccaca

SEQ ID NO: 6057604 - DNA, 25 bp, Homo sapien
gactaaaggatttcccacattcatt

SEQ ID NO: 6057605 - DNA, 25 bp, Homo sapien
tctccagtatgaattctctggtgtt

SEQ ID NO: 6057606 - DNA, 25 bp, Homo sapien
cagtatgaattctctggtgttgact

SEQ ID NO: 6057607 - DNA, 25 bp, Homo sapien
tagggtttctctcctgtgtgaatcc

SEQ ID NO: 6057608 - DNA, 25 bp, Homo sapien
tgtgcagtggataaaagctttgtca

SEQ ID NO: 6057609 - DNA, 25 bp, Homo sapien
ctggtgttgaataagatttgtgcag

SEQ ID NO: 6057610 - DNA, 25 bp, Homo sapien
tgtttctgaaggcttgaacactgag

SEQ ID NO: 6057611 - DNA, 25 bp, Homo sapien
ctgatgttttctaaggcttgaacat

SEQ ID NO: 6057612 - DNA, 25 bp, Homo sapien
ttctctcctgtgtgaattctcttgt

SEQ ID NO: 6057613 - DNA, 25 bp, Homo sapien
ttttctaaggcttgaacattgggta

SEQ ID NO: 6057614 - DNA, 25 bp, Homo sapien
tctgtagggcttctctccagtgtgg

SEQ ID NO: 6057615 - DNA, 25 bp, Homo sapien
tctgcacatctgtagggcttctctc

SEQ ID NO: 6057616 - DNA, 25 bp, Homo sapien
ttgaataagatttgtgcagtggata

SEQ ID NO: 6057617 - DNA, 25 bp, Homo sapien
ttgtcacagtctttacatttgtaag

SEQ ID NO: 6057618 - DNA, 25 bp, Homo sapien
acatttgtaaggtttctctcctgtg

SEQ ID NO: 6057619 - DNA, 25 bp, Homo sapien
tctccagtgtggattacttggtgtt

SEQ ID NO: 6057620 - DNA, 25 bp, Homo sapien
aagatgagcggcagttaaaggctct

SEQ ID NO: 6057621 - DNA, 25 bp, Homo sapien
gtaaggtttctctcctgtgtgaatt

SEQ ID NO: 6057622 - DNA, 25 bp, Homo sapien
cccacattcattacatttgtatggt

SEQ ID NO: 6057623 - DNA, 25 bp, Homo sapien
ttcacatttgtaaggtttctctcca

SEQ ID NO: 6057624 - DNA, 25 bp, Homo sapien
agtagtggttaaagcttctgccaca

SEQ ID NO: 6057625 - DNA, 25 bp, Homo sapien
tgtgaatcctctggtgctgaccaag

SEQ ID NO: 6057626 - DNA, 25 bp, Homo sapien
ggcctttccacactcttcacatttg

SEQ ID NO: 6057627 - DNA, 25 bp, Homo sapien
ttctcttgtgtttagtaaaagatga

SEQ ID NO: 6057628 - DNA, 25 bp, Homo sapien
ctcctgtatggattctctggtgttg

SEQ ID NO: 6057629 - DNA, 25 bp, Homo sapien
acacttgtagggtttctctcctgtg

SEQ ID NO: 6057630 - DNA, 25 bp, Homo sapien
agtaaaggacttgccacactgttta

SEQ ID NO: 6057631 - DNA, 25 bp, Homo sapien
gctagtttttttcatgtatgaattc

SEQ ID NO: 6057632 - DNA, 25 bp, Homo sapien
agatttactagattcttgacatttg

SEQ ID NO: 6057633 - DNA, 25 bp, Homo sapien
gtggataaaagctttgtcacagtct

SEQ ID NO: 6057634 - DNA, 25 bp, Homo sapien
ggatttcccacattcattacatttg

SEQ ID NO: 6057635 - DNA, 25 bp, Homo sapien
ggtaaaggcctttccacactcttca

SEQ ID NO: 6057636 - DNA, 25 bp, Homo sapien
ttttttcatgtatgaattctctcat

SEQ ID NO: 6057637 - DNA, 25 bp, Homo sapien
ctgtttacacttgtagggtttctct

SEQ ID NO: 6057638 - DNA, 25 bp, Homo sapien
aaaagctttgtcacagtctttacat

SEQ ID NO: 6057639 - DNA, 25 bp, Homo sapien
tcatgtatgaattctctcatgcttt

SEQ ID NO: 6057640 - DNA, 25 bp, Homo sapien
tgaacattgggtaaaggcctttcca

SEQ ID NO: 6057641 - DNA, 25 bp, Homo sapien
aagatttgtgcagtggataaaagct

SEQ ID NO: 6057642 - DNA, 25 bp, Homo sapien
gattctctggtgttgaataagattt

SEQ ID NO: 6057643 - DNA, 25 bp, Homo sapien
tgtaaggtttctctccagtatgaat

SEQ ID NO: 6057644 - DNA, 25 bp, Homo sapien
ggtaaaagatttgccacattctgca

SEQ ID NO: 6057645 - DNA, 25 bp, Homo sapien
tggtgttgactaagtgttgaatttt

SEQ ID NO: 6057646 - DNA, 25 bp, Homo sapien
ggacttgccacactgtttacacttg

SEQ ID NO: 6057647 - DNA, 25 bp, Homo sapien
attttgggtaaaagatttgccacat

SEQ ID NO: 6057648 - DNA, 25 bp, Homo sapien
tgtagggtttctctccagtgtgaat

SEQ ID NO: 6057649 - DNA, 25 bp, Homo sapien
tcctgtgtgaatcctctggtgctga

SEQ ID NO: 6057650 - DNA, 25 bp, Homo sapien
cagtgtggattacttggtgtttctg

SEQ ID NO: 6057651 - DNA, 25 bp, Homo sapien
aattctctgatgttttctaaggctt

SEQ ID NO: 6057652 - DNA, 25 bp, Homo sapien
ctgaaggcttgaacactgagtaaag

SEQ ID NO: 6057653 - DNA, 25 bp, Homo sapien
atgaattctctcatgctttctaagg

SEQ ID NO: 6057654 - DNA, 25 bp, Homo sapien
gattcttgacatttgctagtttttt

SEQ ID NO: 6057655 - DNA, 25 bp, Homo sapien
tacatttgtatggtttctctcctgt

SEQ ID NO: 6057656 - DNA, 25 bp, Homo sapien
gaccaagaattgagtagtggttaaa

SEQ ID NO: 6057657 - DNA, 25 bp, Homo sapien
tgtgaattctcttgtgtttagtaaa

SEQ ID NO: 6057658 - DNA, 25 bp, Homo sapien
tttctaaggtttgaacattgactaa

SEQ ID NO: 6057659 - DNA, 25 bp, Homo sapien
tttctctccagtgtgaattctctga

SEQ ID NO: 6057660 - DNA, 25 bp, Homo sapien
acactgagtaaaggacttgccacac

SEQ ID NO: 6057661 - DNA, 25 bp, Homo sapien
tttctctcctgtatggattctctgg

SEQ ID NO: 6057662 - DNA, 25 bp, Homo sapien
tttctctccagtatgaattctctgg

SEQ ID NO: 6057663 - DNA, 25 bp, Homo sapien
tcctctggtgctgaccaagaattga

SEQ ID NO: 6057664 - DNA, 25 bp, Homo sapien
agtgtgaattctctgatgttttcta

SEQ ID NO: 6057665 - DNA, 25 bp, Homo sapien
ttactagattcttgacatttgctag

SEQ ID NO: 6057666 - DNA, 25 bp, Homo sapien
ttctctcctgtgtgaatcctctggt

SEQ ID NO: 6057667 - DNA, 25 bp, Homo sapien
agggcttctctccagtgtggattac

SEQ ID NO: 6057668 - DNA, 25 bp, Homo sapien
attctctcatgctttctaaggtttg

SEQ ID NO: 6057669 - DNA, 25 bp, Homo sapien
gccacactgtttacacttgtagggt

SEQ ID NO: 6057670 - DNA, 25 bp, Homo sapien
gccacatacttcacatttgtagggt

SEQ ID NO: 6057671 - DNA, 25 bp, Homo sapien
tgtatggattctctggtgttgaata

SEQ ID NO: 6057672 - DNA, 25 bp, Homo sapien
agatttgccacattctgcacatctg

SEQ ID NO: 6057673 - DNA, 25 bp, Homo sapien
tcatgctttctaaggtttgaacatt

SEQ ID NO: 6057674 - DNA, 25 bp, Homo sapien
acttggtgtttctgaaggcttgaac

SEQ ID NO: 6057675 - DNA, 25 bp, Homo sapien
ttcattacatttgtatggtttctct

SEQ ID NO: 6057676 - DNA, 25 bp, Homo sapien
acatttgtagggtttctctccagtg

SEQ ID NO: 6057677 - DNA, 25 bp, Homo sapien
tacttcacatttgtagggtttctct

SEQ ID NO: 6057678 - DNA, 25 bp, Homo sapien
ctcctgtgtgaattctcttgtgttt

SEQ ID NO: 6057679 - DNA, 25 bp, Homo sapien
acatcaaatgttataactgtggagt

SEQ ID NO: 6057680 - DNA, 25 bp, Homo sapien
cttgttaaaggccttgattctctcc

SEQ ID NO: 6057681 - DNA, 25 bp, Homo sapien
ctccatagaatgaatagagagacat

SEQ ID NO: 6057682 - DNA, 25 bp, Homo sapien
gcagtagacaactcaagatgaatca

SEQ ID NO: 6057683 - DNA, 25 bp, Homo sapien
gaaaggttagcttaaggaaggatgc

SEQ ID NO: 6057684 - DNA, 25 bp, Homo sapien
tcagtatccttggagacaatgggct

SEQ ID NO: 6057685 - DNA, 25 bp, Homo sapien
aatgggcttgaaggtgttaaggaca

SEQ ID NO: 6057686 - DNA, 25 bp, Homo sapien
cagttactacacacaattacccaaa

SEQ ID NO: 6057687 - DNA, 25 bp, Homo sapien
caaattttccataatagaaacttgt

SEQ ID NO: 6057688 - DNA, 25 bp, Homo sapien
aagaggaaaaagacaatctcagtta

SEQ ID NO: 6057689 - DNA, 25 bp, Homo sapien
gttttatctactctaaaatagcagt

SEQ ID NO: 6057690 - DNA, 25 bp, Homo sapien
caattacccaaaatgataacatttt

SEQ ID NO: 6057691 - DNA, 25 bp, Homo sapien
gagggtccagtcacatcaaatgtta

SEQ ID NO: 6057692 - DNA, 25 bp, Homo sapien
ttcctgagagatgtcttaatatctc

SEQ ID NO: 6057693 - DNA, 25 bp, Homo sapien
ccagtcacatcaaatgttataactg

SEQ ID NO: 6057694 - DNA, 25 bp, Homo sapien
cttaaggaaggatgctatgctatct

SEQ ID NO: 6057695 - DNA, 25 bp, Homo sapien
ataactgtggagttcctgagagatg

SEQ ID NO: 6057696 - DNA, 25 bp, Homo sapien
taatatgcagtagacaactcaagat

SEQ ID NO: 6057697 - DNA, 25 bp, Homo sapien
ttgaaggtgttaaggacagctttgg

SEQ ID NO: 6057698 - DNA, 25 bp, Homo sapien
aatagagagacatgaggtggatgga

SEQ ID NO: 6057699 - DNA, 25 bp, Homo sapien
gagacaatgggcttgaaggtgttaa

SEQ ID NO: 6057700 - DNA, 25 bp, Homo sapien
agaaaaaagaatctgtctaggaaag

SEQ ID NO: 6057701 - DNA, 25 bp, Homo sapien
agagatgtcttaatatctcaccaca

SEQ ID NO: 6057702 - DNA, 25 bp, Homo sapien
aatgttataactgtggagttcctga

SEQ ID NO: 6057703 - DNA, 25 bp, Homo sapien
gacaactcaagatgaatcattggcc

SEQ ID NO: 6057704 - DNA, 25 bp, Homo sapien
ggttagcttaaggaaggatgctatg

SEQ ID NO: 6057705 - DNA, 25 bp, Homo sapien
aagacaatctcagttactacacaca

SEQ ID NO: 6057706 - DNA, 25 bp, Homo sapien
tccataatagaaacttgttaaaggc

SEQ ID NO: 6057707 - DNA, 25 bp, Homo sapien
agtgcctgatccactacactcatag

SEQ ID NO: 6057708 - DNA, 25 bp, Homo sapien
acattggttttttcagtatccttgg

SEQ ID NO: 6057709 - DNA, 25 bp, Homo sapien
tagcagtcaagcctttaggtaaaac

SEQ ID NO: 6057710 - DNA, 25 bp, Homo sapien
gttttttcagtatccttggagacaa

SEQ ID NO: 6057711 - DNA, 25 bp, Homo sapien
ccttgattctctccgctcagatgat

SEQ ID NO: 6057712 - DNA, 25 bp, Homo sapien
tgaatcattggcctctatatggtgt

SEQ ID NO: 6057713 - DNA, 25 bp, Homo sapien
caccacacattggttttttcagtat

SEQ ID NO: 6057714 - DNA, 25 bp, Homo sapien
gtcttaatatctcaccacacattgg

SEQ ID NO: 6057715 - DNA, 25 bp, Homo sapien
agaatggagggtccagtcacatcaa

SEQ ID NO: 6057716 - DNA, 25 bp, Homo sapien
gagacatgaggtggatggagaatgg

SEQ ID NO: 6057717 - DNA, 25 bp, Homo sapien
cagaggctccatagaatgaatagag

SEQ ID NO: 6057718 - DNA, 25 bp, Homo sapien
gagaactgggccagtgcctgatcca

SEQ ID NO: 6057719 - DNA, 25 bp, Homo sapien
tgaggtggatggagaatggagggtc

SEQ ID NO: 6057720 - DNA, 25 bp, Homo sapien
tctactctaaaatagcagtcaagcc

SEQ ID NO: 6057721 - DNA, 25 bp, Homo sapien
tttgggagtaaggtactgcatatcc

SEQ ID NO: 6057722 - DNA, 25 bp, Homo sapien
ttctctccgctcagatgatgcaact

SEQ ID NO: 6057723 - DNA, 25 bp, Homo sapien
tgataacattttcagaagaatccat

SEQ ID NO: 6057724 - DNA, 25 bp, Homo sapien
agatgatgcaactggaatttagaaa

SEQ ID NO: 6057725 - DNA, 25 bp, Homo sapien
attgaaaagaggaaaaagacaatct

SEQ ID NO: 6057726 - DNA, 25 bp, Homo sapien
agtaaggtactgcatatcctgaaca

SEQ ID NO: 6057727 - DNA, 25 bp, Homo sapien
gtggagttcctgagagatgtcttaa

SEQ ID NO: 6057728 - DNA, 25 bp, Homo sapien
cattggcctctatatggtgttttat

SEQ ID NO: 6057729 - DNA, 25 bp, Homo sapien
tacacacaattacccaaaatgataa

SEQ ID NO: 6057730 - DNA, 25 bp, Homo sapien
cctgaacagagaactgggccagtgc

SEQ ID NO: 6057731 - DNA, 25 bp, Homo sapien
tgtctaggaaaggttagcttaagga

SEQ ID NO: 6057732 - DNA, 25 bp, Homo sapien
ggatggagaatggagggtccagtca

SEQ ID NO: 6057733 - DNA, 25 bp, Homo sapien
gcatatcctgaacagagaactgggc

SEQ ID NO: 6057734 - DNA, 25 bp, Homo sapien
tgatccactacactcataggatgtc

SEQ ID NO: 6057735 - DNA, 25 bp, Homo sapien
ctttaggtaaaacagaggctccata

SEQ ID NO: 6057736 - DNA, 25 bp, Homo sapien
agaatctgtctaggaaaggttagct

SEQ ID NO: 6057737 - DNA, 25 bp, Homo sapien
cctctatatggtgttttatctactc

SEQ ID NO: 6057738 - DNA, 25 bp, Homo sapien
agaatgaatagagagacatgaggtg

SEQ ID NO: 6057739 - DNA, 25 bp, Homo sapien
tcaagcctttaggtaaaacagaggc

SEQ ID NO: 6057740 - DNA, 25 bp, Homo sapien
ggatgtctcatttgaacttggctgt

SEQ ID NO: 6057741 - DNA, 25 bp, Homo sapien
ccgctcagatgatgcaactggaatt

SEQ ID NO: 6057742 - DNA, 25 bp, Homo sapien
atagaaacttgttaaaggccttgat

SEQ ID NO: 6057743 - DNA, 25 bp, Homo sapien
tgggccagtgcctgatccactacac

SEQ ID NO: 6057744 - DNA, 25 bp, Homo sapien
gacagctttgggagtaaggtactgc

SEQ ID NO: 6057745 - DNA, 25 bp, Homo sapien
atatctcaccacacattggtttttt

SEQ ID NO: 6057746 - DNA, 25 bp, Homo sapien
gaaggatgctatgctatctaatatg

SEQ ID NO: 6057747 - DNA, 25 bp, Homo sapien
gaatttagaaaaaagaatctgtcta

SEQ ID NO: 6057748 - DNA, 25 bp, Homo sapien
tcaagatgaatcattggcctctata

SEQ ID NO: 6057749 - DNA, 25 bp, Homo sapien
gtaaaacagaggctccatagaatga

SEQ ID NO: 6057750 - DNA, 25 bp, Homo sapien
tgcaactggaatttagaaaaaagaa

SEQ ID NO: 6057751 - DNA, 25 bp, Homo sapien
cagaagaatccatttaaagactttt

SEQ ID NO: 6057752 - DNA, 25 bp, Homo sapien
taaaggccttgattctctccgctca

SEQ ID NO: 6057753 - DNA, 25 bp, Homo sapien
cattttcagaagaatccatttaaag

SEQ ID NO: 6057754 - DNA, 25 bp, Homo sapien
caatctcagttactacacacaatta

SEQ ID NO: 6057755 - DNA, 25 bp, Homo sapien
tgctatgctatctaatatgcagtag

SEQ ID NO: 6057756 - DNA, 25 bp, Homo sapien
gctatctaatatgcagtagacaact

SEQ ID NO: 6057757 - DNA, 25 bp, Homo sapien
tgttaaggacagctttgggagtaag

SEQ ID NO: 6057758 - DNA, 25 bp, Homo sapien
actacactcataggatgtctcattt

SEQ ID NO: 6057759 - DNA, 25 bp, Homo sapien
ctcataggatgtctcatttgaactt

SEQ ID NO: 6057760 - DNA, 25 bp, Homo sapien
tccttggagacaatgggcttgaagg

SEQ ID NO: 6057761 - DNA, 25 bp, Homo sapien
tatggtgttttatctactctaaaat

SEQ ID NO: 6057762 - DNA, 25 bp, Homo sapien
ctaaaatagcagtcaagcctttagg

SEQ ID NO: 6057763 - DNA, 25 bp, Homo sapien
ctcatttgaacttggctgtatgcat

SEQ ID NO: 6057764 - DNA, 25 bp, Homo sapien
gtactgcatatcctgaacagagaac

SEQ ID NO: 6057765 - DNA, 25 bp, Homo sapien
ccaaaatgataacattttcagaaga

SEQ ID NO: 6057766 - DNA, 25 bp, Homo sapien
tgtcctaccagcagacatgcagctt

SEQ ID NO: 6057767 - DNA, 25 bp, Homo sapien
gcactgtcagggatcagccactgga

SEQ ID NO: 6057768 - DNA, 25 bp, Homo sapien
cttaacaatggctggctctctgctg

SEQ ID NO: 6057769 - DNA, 25 bp, Homo sapien
tgtagcttttgcggcccagcggctc

SEQ ID NO: 6057770 - DNA, 25 bp, Homo sapien
gaaggtgtcatttccacagggttca

SEQ ID NO: 6057771 - DNA, 25 bp, Homo sapien
gctgtagtaccaaatagagttgaag

SEQ ID NO: 6057772 - DNA, 25 bp, Homo sapien
ctgaactgctcaatgacatcagatt

SEQ ID NO: 6057773 - DNA, 25 bp, Homo sapien
tcaattaaacagtatttcttagtcc

SEQ ID NO: 6057774 - DNA, 25 bp, Homo sapien
actgggaggaagtgacgtagctgca

SEQ ID NO: 6057775 - DNA, 25 bp, Homo sapien
ttttgcggcccagcggctcactgac

SEQ ID NO: 6057776 - DNA, 25 bp, Homo sapien
ggctgcatgcaagggcacgatcgca

SEQ ID NO: 6057777 - DNA, 25 bp, Homo sapien
ggtaatggtcactgatggcttcagc

SEQ ID NO: 6057778 - DNA, 25 bp, Homo sapien
tgttgatgtgactgtggtgtccgca

SEQ ID NO: 6057779 - DNA, 25 bp, Homo sapien
agatggtggaatgctgtagtaccaa

SEQ ID NO: 6057780 - DNA, 25 bp, Homo sapien
gctcagctttatttacttcaattaa

SEQ ID NO: 6057781 - DNA, 25 bp, Homo sapien
acctggtcaggcctgtacacaaaaa

SEQ ID NO: 6057782 - DNA, 25 bp, Homo sapien
tcagtgtatggggaaaagaacttaa

SEQ ID NO: 6057783 - DNA, 25 bp, Homo sapien
ggtcactgatggcttcagcctgtca

SEQ ID NO: 6057784 - DNA, 25 bp, Homo sapien
atgcaagggcacgatcgcaaattct

SEQ ID NO: 6057785 - DNA, 25 bp, Homo sapien
tggacctcagtgtatggggaaaaga

SEQ ID NO: 6057786 - DNA, 25 bp, Homo sapien
ccacagggttcacagccatcatcat

SEQ ID NO: 6057787 - DNA, 25 bp, Homo sapien
gaagcagtatggctgaactgctcaa

SEQ ID NO: 6057788 - DNA, 25 bp, Homo sapien
cagccatcatcatattgatagctgt

SEQ ID NO: 6057789 - DNA, 25 bp, Homo sapien
agctttatttacttcaattaaacag

SEQ ID NO: 6057790 - DNA, 25 bp, Homo sapien
ccactggaagatggggcttgtccga

SEQ ID NO: 6057791 - DNA, 25 bp, Homo sapien
gtgacgtagctgcagccagcattga

SEQ ID NO: 6057792 - DNA, 25 bp, Homo sapien
tagctgcagccagcattgaagtctc

SEQ ID NO: 6057793 - DNA, 25 bp, Homo sapien
cacagtgtgttgatgtgactgtggt

SEQ ID NO: 6057794 - DNA, 25 bp, Homo sapien
ctgatggcttcagcctgtcataagc

SEQ ID NO: 6057795 - DNA, 25 bp, Homo sapien
tagctgtccagaatagacacctggt

SEQ ID NO: 6057796 - DNA, 25 bp, Homo sapien
gatcgcaaattcttggacctcagtg

SEQ ID NO: 6057797 - DNA, 25 bp, Homo sapien
cgtggcagacgttttctctgttctg

SEQ ID NO: 6057798 - DNA, 25 bp, Homo sapien
aaattcttggacctcagtgtatggg

SEQ ID NO: 6057799 - DNA, 25 bp, Homo sapien
gtggattcttcctcaccagaagcag

SEQ ID NO: 6057800 - DNA, 25 bp, Homo sapien
gtgtccgcactgtcagggatcagcc

SEQ ID NO: 6057801 - DNA, 25 bp, Homo sapien
tcaccagaagcagtatggctgaact

SEQ ID NO: 6057802 - DNA, 25 bp, Homo sapien
gtatttcttagtccccgtggcagac

SEQ ID NO: 6057803 - DNA, 25 bp, Homo sapien
ctgtggtgtccgcactgtcagggat

SEQ ID NO: 6057804 - DNA, 25 bp, Homo sapien
gcattgaagtctcccatgaacatga

SEQ ID NO: 6057805 - DNA, 25 bp, Homo sapien
cataagcacagtgtgttgatgtgac

SEQ ID NO: 6057806 - DNA, 25 bp, Homo sapien
tacttcaattaaacagtatttctta

SEQ ID NO: 6057807 - DNA, 25 bp, Homo sapien
acatgatgtcctaccagcagacatg

SEQ ID NO: 6057808 - DNA, 25 bp, Homo sapien
aaagaacttaacaatggctggctct

SEQ ID NO: 6057809 - DNA, 25 bp, Homo sapien
ctgtacacaaaaaggtactgttcct

SEQ ID NO: 6057810 - DNA, 25 bp, Homo sapien
tattgatagctgtccagaatagaca

SEQ ID NO: 6057811 - DNA, 25 bp, Homo sapien
accagcagacatgcagcttctgttg

SEQ ID NO: 6057812 - DNA, 25 bp, Homo sapien
cagccagcattgaagtctcccatga

SEQ ID NO: 6057813 - DNA, 25 bp, Homo sapien
tgttctgagatggtggaatgctgta

SEQ ID NO: 6057814 - DNA, 25 bp, Homo sapien
tgttggggctgcatgcaagggcacg

SEQ ID NO: 6057815 - DNA, 25 bp, Homo sapien
ggtactgttccttgtagcttttgcg

SEQ ID NO: 6057816 - DNA, 25 bp, Homo sapien
atgtgactgtggtgtccgcactgtc

SEQ ID NO: 6057817 - DNA, 25 bp, Homo sapien
aggaagtgacgtagctgcagccagc

SEQ ID NO: 6057818 - DNA, 25 bp, Homo sapien
agtccccgtggcagacgttttctct

SEQ ID NO: 6057819 - DNA, 25 bp, Homo sapien
tggggcttgtccgaaggcgaatgga

SEQ ID NO: 6057820 - DNA, 25 bp, Homo sapien
tctgctgaaggtgtcatttccacag

SEQ ID NO: 6057821 - DNA, 25 bp, Homo sapien
ccactgggtaatggtcactgatggc

SEQ ID NO: 6057822 - DNA, 25 bp, Homo sapien
atagacacctggtcaggcctgtaca

SEQ ID NO: 6057823 - DNA, 25 bp, Homo sapien
agacatgcagcttctgttggggctg

SEQ ID NO: 6057824 - DNA, 25 bp, Homo sapien
cacctccactgggtaatggtcactg

SEQ ID NO: 6057825 - DNA, 25 bp, Homo sapien
gatcagccactggaagatggggctt

SEQ ID NO: 6057826 - DNA, 25 bp, Homo sapien
gttgaagtggattcttcctcaccag

SEQ ID NO: 6057827 - DNA, 25 bp, Homo sapien
gttccttgtagcttttgcggcccag

SEQ ID NO: 6057828 - DNA, 25 bp, Homo sapien
agtctcccatgaacatgatgtccta

SEQ ID NO: 6057829 - DNA, 25 bp, Homo sapien
gggcacgatcgcaaattcttggacc

SEQ ID NO: 6057830 - DNA, 25 bp, Homo sapien
ggaagatggggcttgtccgaaggcg

SEQ ID NO: 6057831 - DNA, 25 bp, Homo sapien
gtaccaaatagagttgaagtggatt

SEQ ID NO: 6057832 - DNA, 25 bp, Homo sapien
tccagaatagacacctggtcaggcc

SEQ ID NO: 6057833 - DNA, 25 bp, Homo sapien
tcatcatattgatagctgtccagaa

SEQ ID NO: 6057834 - DNA, 25 bp, Homo sapien
gaatggaggaccactgggaggaagt

SEQ ID NO: 6057835 - DNA, 25 bp, Homo sapien
tttctctgttctgagatggtggaat

SEQ ID NO: 6057836 - DNA, 25 bp, Homo sapien
ttttctgagtgtcacctccactggg

SEQ ID NO: 6057837 - DNA, 25 bp, Homo sapien
tcagatttttctgagtgtcacctcc

SEQ ID NO: 6057838 - DNA, 25 bp, Homo sapien
tcttcctcaccagaagcagtatggc

SEQ ID NO: 6057839 - DNA, 25 bp, Homo sapien
gagtgtcacctccactgggtaatgg

SEQ ID NO: 6057840 - DNA, 25 bp, Homo sapien
aatggctggctctctgctgaaggtg

SEQ ID NO: 6057841 - DNA, 25 bp, Homo sapien
gcttcagcctgtcataagcacagtg

SEQ ID NO: 6057842 - DNA, 25 bp, Homo sapien
tcaggcctgtacacaaaaaggtact

SEQ ID NO: 6057843 - DNA, 25 bp, Homo sapien
caaaaaggtactgttccttgtagct

SEQ ID NO: 6057844 - DNA, 25 bp, Homo sapien
tcagggatcagccactggaagatgg

SEQ ID NO: 6057845 - DNA, 25 bp, Homo sapien
gaaggcgaatggaggaccactggga

SEQ ID NO: 6057846 - DNA, 25 bp, Homo sapien
ccatgaacatgatgtcctaccagca

SEQ ID NO: 6057847 - DNA, 25 bp, Homo sapien
tggctctctgctgaaggtgtcattt

SEQ ID NO: 6057848 - DNA, 25 bp, Homo sapien
aatagagttgaagtggattcttcct

SEQ ID NO: 6057849 - DNA, 25 bp, Homo sapien
atgacatcagatttttctgagtgtc

SEQ ID NO: 6057850 - DNA, 25 bp, Homo sapien
gtcatttccacagggttcacagcca

SEQ ID NO: 6057851 - DNA, 25 bp, Homo sapien
gcagcttctgttggggctgcatgca

SEQ ID NO: 6057852 - DNA, 25 bp, Homo sapien
ggttcacagccatcatcatattgat

SEQ ID NO: 6057853 - DNA, 25 bp, Homo sapien
aggaccactgggaggaagtgacgta

SEQ ID NO: 6057854 - DNA, 25 bp, Homo sapien
agacgttttctctgttctgagatgg

SEQ ID NO: 6057855 - DNA, 25 bp, Homo sapien
gcctgtcataagcacagtgtgttga

SEQ ID NO: 6057856 - DNA, 25 bp, Homo sapien
tggaatgctgtagtaccaaatagag

SEQ ID NO: 6057857 - DNA, 25 bp, Homo sapien
tgctcaatgacatcagatttttctg

SEQ ID NO: 6057858 - DNA, 25 bp, Homo sapien
ttgtccgaaggcgaatggaggacca

SEQ ID NO: 6057859 - DNA, 25 bp, Homo sapien
gtatggctgaactgctcaatgacat

SEQ ID NO: 6057860 - DNA, 25 bp, Homo sapien
ctcctgtgtgaattctcttgtgttt

SEQ ID NO: 6057861 - DNA, 25 bp, Homo sapien
attctctggtgttgactaagtgttg

SEQ ID NO: 6057862 - DNA, 25 bp, Homo sapien
tgactaagtgttgagttttgggtaa

SEQ ID NO: 6057863 - DNA, 25 bp, Homo sapien
tggtgctgaccaagaattgagtagt

SEQ ID NO: 6057864 - DNA, 25 bp, Homo sapien
aggtttgaacattgactaaaggatt

SEQ ID NO: 6057865 - DNA, 25 bp, Homo sapien
ccacattctgcacatctgtagggct

SEQ ID NO: 6057866 - DNA, 25 bp, Homo sapien
atgaattctctggtgttgactaagt

SEQ ID NO: 6057867 - DNA, 25 bp, Homo sapien
tacttcacatttgtagggtttctct

SEQ ID NO: 6057868 - DNA, 25 bp, Homo sapien
cttctctccagtgtggattacttgg

SEQ ID NO: 6057869 - DNA, 25 bp, Homo sapien
ggctctgccacatacttcacatttg

SEQ ID NO: 6057870 - DNA, 25 bp, Homo sapien
ctcctgtgtgaatcctctggtgctg

SEQ ID NO: 6057871 - DNA, 25 bp, Homo sapien
gtagggtttctctcctgtgtgaatc

SEQ ID NO: 6057872 - DNA, 25 bp, Homo sapien
ctccagtgtgaattctctgatgttt

SEQ ID NO: 6057873 - DNA, 25 bp, Homo sapien
cagtctttacatttgtaaggtttct

SEQ ID NO: 6057874 - DNA, 25 bp, Homo sapien
tggattacttggtgtttctgaaggc

SEQ ID NO: 6057875 - DNA, 25 bp, Homo sapien
tgtgtttagtaaaagatgagcggca

SEQ ID NO: 6057876 - DNA, 25 bp, Homo sapien
aaagatttactagattcttgacatt

SEQ ID NO: 6057877 - DNA, 25 bp, Homo sapien
tagtaaaagatgagcggcagttaaa

SEQ ID NO: 6057878 - DNA, 25 bp, Homo sapien
tggtgttgactaagtgttgagtttt

SEQ ID NO: 6057879 - DNA, 25 bp, Homo sapien
gagtagtggttaaagcttctgccac

SEQ ID NO: 6057880 - DNA, 25 bp, Homo sapien
gcttgaacactgagtaaaggacttg

SEQ ID NO: 6057881 - DNA, 25 bp, Homo sapien
ccacactcttcacatttgtaaggtt

SEQ ID NO: 6057882 - DNA, 25 bp, Homo sapien
agcggcagttaaaggctctgccaca

SEQ ID NO: 6057883 - DNA, 25 bp, Homo sapien
gactaaaggatttcccacattcatt

SEQ ID NO: 6057884 - DNA, 25 bp, Homo sapien
aacattgactaaaggatttcccaca

SEQ ID NO: 6057885 - DNA, 25 bp, Homo sapien
tctccagtatgaattctctggtgtt

SEQ ID NO: 6057886 - DNA, 25 bp, Homo sapien
atcctctggtgctgaccaagaattg

SEQ ID NO: 6057887 - DNA, 25 bp, Homo sapien
cagtatgaattctctggtgttgact

SEQ ID NO: 6057888 - DNA, 25 bp, Homo sapien
agttaaaggctctgccacatacttc

SEQ ID NO: 6057889 - DNA, 25 bp, Homo sapien
tctgtagggcttctctccagtgtgg

SEQ ID NO: 6057890 - DNA, 25 bp, Homo sapien
ctggtgttgaataagatttgtgcag

SEQ ID NO: 6057891 - DNA, 25 bp, Homo sapien
ctgatgttttctaaggcttgaacat

SEQ ID NO: 6057892 - DNA, 25 bp, Homo sapien
ttctctcctgtgtgaattctcttgt

SEQ ID NO: 6057893 - DNA, 25 bp, Homo sapien
tctgcacatctgtagggcttctctc

SEQ ID NO: 6057894 - DNA, 25 bp, Homo sapien
ttttctaaggcttgaacattgggta

SEQ ID NO: 6057895 - DNA, 25 bp, Homo sapien
ttgaataagatttgtgcagtggata

SEQ ID NO: 6057896 - DNA, 25 bp, Homo sapien
tgtttctgaaggcttgaacactgag

SEQ ID NO: 6057897 - DNA, 25 bp, Homo sapien
ttgtcacagtctttacatttgtaag

SEQ ID NO: 6057898 - DNA, 25 bp, Homo sapien
acatttgtaaggtttctctcctgtg

SEQ ID NO: 6057899 - DNA, 25 bp, Homo sapien
tgtgcagtggataaaagctttgtca

SEQ ID NO: 6057900 - DNA, 25 bp, Homo sapien
gtatggtttctctcctgtatggatt

SEQ ID NO: 6057901 - DNA, 25 bp, Homo sapien
ggacttgccacactgtttacacttg

SEQ ID NO: 6057902 - DNA, 25 bp, Homo sapien
aagatgagcggcagttaaaggctct

SEQ ID NO: 6057903 - DNA, 25 bp, Homo sapien
ttcacatttgtaaggtttctctcca

SEQ ID NO: 6057904 - DNA, 25 bp, Homo sapien
gtaaggtttctctcctgtgtgaatt

SEQ ID NO: 6057905 - DNA, 25 bp, Homo sapien
ttctcttgtgtttagtaaaagatga

SEQ ID NO: 6057906 - DNA, 25 bp, Homo sapien
ggcctttccacactcttcacatttg

SEQ ID NO: 6057907 - DNA, 25 bp, Homo sapien
gtggataaaagctttgtcacagtct

SEQ ID NO: 6057908 - DNA, 25 bp, Homo sapien
ctcctgtatggattctctggtgttg

SEQ ID NO: 6057909 - DNA, 25 bp, Homo sapien
cccacattcattacatttgtatggt

SEQ ID NO: 6057910 - DNA, 25 bp, Homo sapien
agtaaaggacttgccacactgttta

SEQ ID NO: 6057911 - DNA, 25 bp, Homo sapien
tctccagtgtggattacttggtgtt

SEQ ID NO: 6057912 - DNA, 25 bp, Homo sapien
acacttgtagggtttctctcctgtg

SEQ ID NO: 6057913 - DNA, 25 bp, Homo sapien
gctagtttttttcatgtatgaattc

SEQ ID NO: 6057914 - DNA, 25 bp, Homo sapien
aaaagctttgtcacagtctttacat

SEQ ID NO: 6057915 - DNA, 25 bp, Homo sapien
ggtaaaggcctttccacactcttca

SEQ ID NO: 6057916 - DNA, 25 bp, Homo sapien
ggatttcccacattcattacatttg

SEQ ID NO: 6057917 - DNA, 25 bp, Homo sapien
ttttttcatgtatgaattctctcat

SEQ ID NO: 6057918 - DNA, 25 bp, Homo sapien
ctgtttacacttgtagggtttctct

SEQ ID NO: 6057919 - DNA, 25 bp, Homo sapien
aagatttgtgcagtggataaaagct

SEQ ID NO: 6057920 - DNA, 25 bp, Homo sapien
tcatgtatgaattctctcatgcttt

SEQ ID NO: 6057921 - DNA, 25 bp, Homo sapien
gattctctggtgttgaataagattt

SEQ ID NO: 6057922 - DNA, 25 bp, Homo sapien
ggtaaaagatttgccacattctgca

SEQ ID NO: 6057923 - DNA, 25 bp, Homo sapien
tgaacattgggtaaaggcctttcca

SEQ ID NO: 6057924 - DNA, 25 bp, Homo sapien
tgtaaggtttctctccagtatgaat

SEQ ID NO: 6057925 - DNA, 25 bp, Homo sapien
gtgtgaatcctctggtgctgaccaa

SEQ ID NO: 6057926 - DNA, 25 bp, Homo sapien
atgaattctctcatgctttctaagg

SEQ ID NO: 6057927 - DNA, 25 bp, Homo sapien
tgtagggtttctctccagtgtgaat

SEQ ID NO: 6057928 - DNA, 25 bp, Homo sapien
cagtgtggattacttggtgtttctg

SEQ ID NO: 6057929 - DNA, 25 bp, Homo sapien
aattctctgatgttttctaaggctt

SEQ ID NO: 6057930 - DNA, 25 bp, Homo sapien
gattcttgacatttgctagtttttt

SEQ ID NO: 6057931 - DNA, 25 bp, Homo sapien
tacatttgtatggtttctctcctgt

SEQ ID NO: 6057932 - DNA, 25 bp, Homo sapien
ctgaaggcttgaacactgagtaaag

SEQ ID NO: 6057933 - DNA, 25 bp, Homo sapien
tgtgaattctcttgtgtttagtaaa

SEQ ID NO: 6057934 - DNA, 25 bp, Homo sapien
tttctctcctgtatggattctctgg

SEQ ID NO: 6057935 - DNA, 25 bp, Homo sapien
tttctctccagtgtgaattctctga

SEQ ID NO: 6057936 - DNA, 25 bp, Homo sapien
acactgagtaaaggacttgccacac

SEQ ID NO: 6057937 - DNA, 25 bp, Homo sapien
tttctctccagtatgaattctctgg

SEQ ID NO: 6057938 - DNA, 25 bp, Homo sapien
tttctaaggtttgaacattgactaa

SEQ ID NO: 6057939 - DNA, 25 bp, Homo sapien
agtgtgaattctctgatgttttcta

SEQ ID NO: 6057940 - DNA, 25 bp, Homo sapien
tgagttttgggtaaaagatttgcca

SEQ ID NO: 6057941 - DNA, 25 bp, Homo sapien
agaattgagtagtggttaaagcttc

SEQ ID NO: 6057942 - DNA, 25 bp, Homo sapien
ttactagattcttgacatttgctag

SEQ ID NO: 6057943 - DNA, 25 bp, Homo sapien
ttctctcctgtgtgaatcctctggt

SEQ ID NO: 6057944 - DNA, 25 bp, Homo sapien
attctctcatgctttctaaggtttg

SEQ ID NO: 6057945 - DNA, 25 bp, Homo sapien
agggcttctctccagtgtggattac

SEQ ID NO: 6057946 - DNA, 25 bp, Homo sapien
gccacactgtttacacttgtagggt

SEQ ID NO: 6057947 - DNA, 25 bp, Homo sapien
tgtatggattctctggtgttgaata

SEQ ID NO: 6057948 - DNA, 25 bp, Homo sapien
gccacatacttcacatttgtagggt

SEQ ID NO: 6057949 - DNA, 25 bp, Homo sapien
agatttgccacattctgcacatctg

SEQ ID NO: 6057950 - DNA, 25 bp, Homo sapien
tcatgctttctaaggtttgaacatt

SEQ ID NO: 6057951 - DNA, 25 bp, Homo sapien
tgaccaagaattgagtagtggttaa

SEQ ID NO: 6057952 - DNA, 25 bp, Homo sapien
acttggtgtttctgaaggcttgaac

SEQ ID NO: 6057953 - DNA, 25 bp, Homo sapien
ttcattacatttgtatggtttctct

SEQ ID NO: 6057954 - DNA, 25 bp, Homo sapien
acatttgtagggtttctctccagtg

SEQ ID NO: 6057955 - DNA, 25 bp, Homo sapien
tttgggtaaaagatttgccacattc

SEQ ID NO: 6057956 - DNA, 25 bp, Homo sapien
taaggcttgaacattgggtaaaggc

SEQ ID NO: 6057957 - DNA, 25 bp, Homo sapien
gatcgcaaattcttggacctcagtg

SEQ ID NO: 6057958 - DNA, 25 bp, Homo sapien
agatggggcttgtccgaaggcgaat

SEQ ID NO: 6057959 - DNA, 25 bp, Homo sapien
gcactgtcagggatcagccactgga

SEQ ID NO: 6057960 - DNA, 25 bp, Homo sapien
ggcgaatggaggaccactgggagga

SEQ ID NO: 6057961 - DNA, 25 bp, Homo sapien
cagcaaccacaatcctgtcataagc

SEQ ID NO: 6057962 - DNA, 25 bp, Homo sapien
cgtagctgcagccagcattgaagtc

SEQ ID NO: 6057963 - DNA, 25 bp, Homo sapien
gctgtagtaccaaatagagttgaag

SEQ ID NO: 6057964 - DNA, 25 bp, Homo sapien
ctgaactgctcaatgacatcagatt

SEQ ID NO: 6057965 - DNA, 25 bp, Homo sapien
tcaattaaacagtatttcttagtcc

SEQ ID NO: 6057966 - DNA, 25 bp, Homo sapien
taaacatcgtagagggcgtcgatct

SEQ ID NO: 6057967 - DNA, 25 bp, Homo sapien
ggctgcatgcaagggcacgatcgca

SEQ ID NO: 6057968 - DNA, 25 bp, Homo sapien
tgttgatgtgactgtggtgtccgca

SEQ ID NO: 6057969 - DNA, 25 bp, Homo sapien
tccaggccccacttttgccagacat

SEQ ID NO: 6057970 - DNA, 25 bp, Homo sapien
agatggtggaatgctgtagtaccaa

SEQ ID NO: 6057971 - DNA, 25 bp, Homo sapien
ggtaatggtcactgatggcttcagc

SEQ ID NO: 6057972 - DNA, 25 bp, Homo sapien
ggtcactgatggcttcagcccgtat

SEQ ID NO: 6057973 - DNA, 25 bp, Homo sapien
ggaacagccgagttgggaacaacag

SEQ ID NO: 6057974 - DNA, 25 bp, Homo sapien
tcagtgtatggggaaaagaacttaa

SEQ ID NO: 6057975 - DNA, 25 bp, Homo sapien
gggaggaagtgacgtagctgcagcc

SEQ ID NO: 6057976 - DNA, 25 bp, Homo sapien
tgaagtctcccatgaacatgatgtc

SEQ ID NO: 6057977 - DNA, 25 bp, Homo sapien
tggaaatcaaaaggaacagccgagt

SEQ ID NO: 6057978 - DNA, 25 bp, Homo sapien
atgcaagggcacgatcgcaaattct

SEQ ID NO: 6057979 - DNA, 25 bp, Homo sapien
tctgcttggaaatcaaaaggaacag

SEQ ID NO: 6057980 - DNA, 25 bp, Homo sapien
tggacctcagtgtatggggaaaaga

SEQ ID NO: 6057981 - DNA, 25 bp, Homo sapien
ggcttgtccgaaggcgaatggagga

SEQ ID NO: 6057982 - DNA, 25 bp, Homo sapien
gaacttaacaatggctggctctctg

SEQ ID NO: 6057983 - DNA, 25 bp, Homo sapien
gaagcagtatggctgaactgctcaa

SEQ ID NO: 6057984 - DNA, 25 bp, Homo sapien
agctttatttacttcaattaaacag

SEQ ID NO: 6057985 - DNA, 25 bp, Homo sapien
cgtggcagacgttttctctgttctg

SEQ ID NO: 6057986 - DNA, 25 bp, Homo sapien
ttgggaacaacagcagcctggagca

SEQ ID NO: 6057987 - DNA, 25 bp, Homo sapien
ccactggaagatggggcttgtccga

SEQ ID NO: 6057988 - DNA, 25 bp, Homo sapien
tcgtagagggcgtcgatctcactca

SEQ ID NO: 6057989 - DNA, 25 bp, Homo sapien
agggcgtcgatctcactcacagctt

SEQ ID NO: 6057990 - DNA, 25 bp, Homo sapien
aaattcttggacctcagtgtatggg

SEQ ID NO: 6057991 - DNA, 25 bp, Homo sapien
tggagcagagctccagcaaccacaa

SEQ ID NO: 6057992 - DNA, 25 bp, Homo sapien
gtggattcttcctcaccagaagcag

SEQ ID NO: 6057993 - DNA, 25 bp, Homo sapien
cacagtgtgttgatgtgactgtggt

SEQ ID NO: 6057994 - DNA, 25 bp, Homo sapien
gtatttcttagtccccgtggcagac

SEQ ID NO: 6057995 - DNA, 25 bp, Homo sapien
cagacatctaggtaaacatcgtaga

SEQ ID NO: 6057996 - DNA, 25 bp, Homo sapien
ctgtggtgtccgcactgtcagggat

SEQ ID NO: 6057997 - DNA, 25 bp, Homo sapien
tgatgtcctccaggccccacttttg

SEQ ID NO: 6057998 - DNA, 25 bp, Homo sapien
tcaccagaagcagtatggctgaact

SEQ ID NO: 6057999 - DNA, 25 bp, Homo sapien
cataagcacagtgtgttgatgtgac

SEQ ID NO: 6058000 - DNA, 25 bp, Homo sapien
gtgtccgcactgtcagggatcagcc

SEQ ID NO: 6058001 - DNA, 25 bp, Homo sapien
tacttcaattaaacagtatttctta

SEQ ID NO: 6058002 - DNA, 25 bp, Homo sapien
aagtgacgtagctgcagccagcatt

SEQ ID NO: 6058003 - DNA, 25 bp, Homo sapien
tcaaaaggaacagccgagttgggaa

SEQ ID NO: 6058004 - DNA, 25 bp, Homo sapien
tgaacatgatgtcctccaggcccca

SEQ ID NO: 6058005 - DNA, 25 bp, Homo sapien
tcgatctcactcacagcttctgttg

SEQ ID NO: 6058006 - DNA, 25 bp, Homo sapien
ggaaaagaacttaacaatggctggc

SEQ ID NO: 6058007 - DNA, 25 bp, Homo sapien
gccgagttgggaacaacagcagcct

SEQ ID NO: 6058008 - DNA, 25 bp, Homo sapien
gagctcagctttatttacttcaatt

SEQ ID NO: 6058009 - DNA, 25 bp, Homo sapien
ctgatggcttcagcccgtattctgc

SEQ ID NO: 6058010 - DNA, 25 bp, Homo sapien
tgttctgagatggtggaatgctgta

SEQ ID NO: 6058011 - DNA, 25 bp, Homo sapien
atgtgactgtggtgtccgcactgtc

SEQ ID NO: 6058012 - DNA, 25 bp, Homo sapien
accactgggaggaagtgacgtagct

SEQ ID NO: 6058013 - DNA, 25 bp, Homo sapien
agtccccgtggcagacgttttctct

SEQ ID NO: 6058014 - DNA, 25 bp, Homo sapien
tgttggggctgcatgcaagggcacg

SEQ ID NO: 6058015 - DNA, 25 bp, Homo sapien
tcactcacagcttctgttggggctg

SEQ ID NO: 6058016 - DNA, 25 bp, Homo sapien
cacctccactgggtaatggtcactg

SEQ ID NO: 6058017 - DNA, 25 bp, Homo sapien
gatcagccactggaagatggggctt

SEQ ID NO: 6058018 - DNA, 25 bp, Homo sapien
gttgaagtggattcttcctcaccag

SEQ ID NO: 6058019 - DNA, 25 bp, Homo sapien
gggcacgatcgcaaattcttggacc

SEQ ID NO: 6058020 - DNA, 25 bp, Homo sapien
gtaccaaatagagttgaagtggatt

SEQ ID NO: 6058021 - DNA, 25 bp, Homo sapien
tggaggaccactgggaggaagtgac

SEQ ID NO: 6058022 - DNA, 25 bp, Homo sapien
ccactgggtaatggtcactgatggc

SEQ ID NO: 6058023 - DNA, 25 bp, Homo sapien
tttctctgttctgagatggtggaat

SEQ ID NO: 6058024 - DNA, 25 bp, Homo sapien
ctcccatgaacatgatgtcctccag

SEQ ID NO: 6058025 - DNA, 25 bp, Homo sapien
ttttctgagtgtcacctccactggg

SEQ ID NO: 6058026 - DNA, 25 bp, Homo sapien
tcagatttttctgagtgtcacctcc

SEQ ID NO: 6058027 - DNA, 25 bp, Homo sapien
gcagcctggagcagagctccagcaa

SEQ ID NO: 6058028 - DNA, 25 bp, Homo sapien
ccacaatcctgtcataagcacagtg

SEQ ID NO: 6058029 - DNA, 25 bp, Homo sapien
tcttcctcaccagaagcagtatggc

SEQ ID NO: 6058030 - DNA, 25 bp, Homo sapien
acagcttctgttggggctgcatgca

SEQ ID NO: 6058031 - DNA, 25 bp, Homo sapien
gagtgtcacctccactgggtaatgg

SEQ ID NO: 6058032 - DNA, 25 bp, Homo sapien
ccccacttttgccagacatctaggt

SEQ ID NO: 6058033 - DNA, 25 bp, Homo sapien
tcagggatcagccactggaagatgg

SEQ ID NO: 6058034 - DNA, 25 bp, Homo sapien
agagctccagcaaccacaatcctgt

SEQ ID NO: 6058035 - DNA, 25 bp, Homo sapien
cagcattgaagtctcccatgaacat

SEQ ID NO: 6058036 - DNA, 25 bp, Homo sapien
tgcagccagcattgaagtctcccat

SEQ ID NO: 6058037 - DNA, 25 bp, Homo sapien
ttttgccagacatctaggtaaacat

SEQ ID NO: 6058038 - DNA, 25 bp, Homo sapien
aatagagttgaagtggattcttcct

SEQ ID NO: 6058039 - DNA, 25 bp, Homo sapien
tctaggtaaacatcgtagagggcgt

SEQ ID NO: 6058040 - DNA, 25 bp, Homo sapien
atgacatcagatttttctgagtgtc

SEQ ID NO: 6058041 - DNA, 25 bp, Homo sapien
tccgaaggcgaatggaggaccactg

SEQ ID NO: 6058042 - DNA, 25 bp, Homo sapien
acaacagcagcctggagcagagctc

SEQ ID NO: 6058043 - DNA, 25 bp, Homo sapien
tgctcaatgacatcagatttttctg

SEQ ID NO: 6058044 - DNA, 25 bp, Homo sapien
tcctgtcataagcacagtgtgttga

SEQ ID NO: 6058045 - DNA, 25 bp, Homo sapien
tggaatgctgtagtaccaaatagag

SEQ ID NO: 6058046 - DNA, 25 bp, Homo sapien
agacgttttctctgttctgagatgg

SEQ ID NO: 6058047 - DNA, 25 bp, Homo sapien
ccgtattctgcttggaaatcaaaag

SEQ ID NO: 6058048 - DNA, 25 bp, Homo sapien
gcttcagcccgtattctgcttggaa

SEQ ID NO: 6058049 - DNA, 25 bp, Homo sapien
gtatggctgaactgctcaatgacat

SEQ ID NO: 6058050 - DNA, 25 bp, Homo sapien
ttttctgtaacttgagcaatattta

SEQ ID NO: 6058051 - DNA, 25 bp, Homo sapien
gtatggtttctctcctgtatggatt

SEQ ID NO: 6058052 - DNA, 25 bp, Homo sapien
ctcctgtgtgaattctcttgtgttt

SEQ ID NO: 6058053 - DNA, 25 bp, Homo sapien
tacttcacatttgtagggtttctct

SEQ ID NO: 6058054 - DNA, 25 bp, Homo sapien
tttgtagggtttctctcctgtgtga

SEQ ID NO: 6058055 - DNA, 25 bp, Homo sapien
gtaacttgagcaatatttaaaggct

SEQ ID NO: 6058056 - DNA, 25 bp, Homo sapien
tctcctgtgtgaatcctctggtgct

SEQ ID NO: 6058057 - DNA, 25 bp, Homo sapien
ggattttccacataatttacatttg

SEQ ID NO: 6058058 - DNA, 25 bp, Homo sapien
ggctctgccacatacttcacatttg

SEQ ID NO: 6058059 - DNA, 25 bp, Homo sapien
tctcctgtgtgaattatgctgtgtt

SEQ ID NO: 6058060 - DNA, 25 bp, Homo sapien
gtagggtttctctcctgtgtgaatc

SEQ ID NO: 6058061 - DNA, 25 bp, Homo sapien
tggatcaaagatttactagattctt

SEQ ID NO: 6058062 - DNA, 25 bp, Homo sapien
tgactatggatcaaagatttactag

SEQ ID NO: 6058063 - DNA, 25 bp, Homo sapien
ggctttgccacattcattacatttg

SEQ ID NO: 6058064 - DNA, 25 bp, Homo sapien
gtggttaaagcttctgccacattct

SEQ ID NO: 6058065 - DNA, 25 bp, Homo sapien
tgtgtttagtaaaagatgagcggca

SEQ ID NO: 6058066 - DNA, 25 bp, Homo sapien
aaagatttactagattcttgacatt

SEQ ID NO: 6058067 - DNA, 25 bp, Homo sapien
cagtctttacatttgtaaggtttct

SEQ ID NO: 6058068 - DNA, 25 bp, Homo sapien
agttaaaggctctgccacatacttc

SEQ ID NO: 6058069 - DNA, 25 bp, Homo sapien
tagtaaaagatgagcggcagttaaa

SEQ ID NO: 6058070 - DNA, 25 bp, Homo sapien
ttttttgactatggatcaaagattt

SEQ ID NO: 6058071 - DNA, 25 bp, Homo sapien
agcggcagttaaaggctctgccaca

SEQ ID NO: 6058072 - DNA, 25 bp, Homo sapien
cactgggtaaaggattttccacata

SEQ ID NO: 6058073 - DNA, 25 bp, Homo sapien
atttaaaggctttgccacattcatt

SEQ ID NO: 6058074 - DNA, 25 bp, Homo sapien
gactaaaggatttcccacattcatt

SEQ ID NO: 6058075 - DNA, 25 bp, Homo sapien
tttttttcatgtatgaattctctca

SEQ ID NO: 6058076 - DNA, 25 bp, Homo sapien
tctggtgctgaccaagaattgagta

SEQ ID NO: 6058077 - DNA, 25 bp, Homo sapien
caagaattgagtagtggttaaagct

SEQ ID NO: 6058078 - DNA, 25 bp, Homo sapien
cattacatttgtaggatttcttgga

SEQ ID NO: 6058079 - DNA, 25 bp, Homo sapien
aacattgactaaaggatttcccaca

SEQ ID NO: 6058080 - DNA, 25 bp, Homo sapien
gaatcctctggtgctgaccaagaat

SEQ ID NO: 6058081 - DNA, 25 bp, Homo sapien
tttctctcctgtgtgaatcctctgg

SEQ ID NO: 6058082 - DNA, 25 bp, Homo sapien
tagggtttctctcctgtgtgaatta

SEQ ID NO: 6058083 - DNA, 25 bp, Homo sapien
tgtgcagtggataaaagctttgtca

SEQ ID NO: 6058084 - DNA, 25 bp, Homo sapien
ctggtgttgaataagatttgtgcag

SEQ ID NO: 6058085 - DNA, 25 bp, Homo sapien
ttctctcctgtgtgaattctcttgt

SEQ ID NO: 6058086 - DNA, 25 bp, Homo sapien
ttgtcacagtctttacatttgtaag

SEQ ID NO: 6058087 - DNA, 25 bp, Homo sapien
acatttgtaaggtttctctcctgtg

SEQ ID NO: 6058088 - DNA, 25 bp, Homo sapien
ttgaataagatttgtgcagtggata

SEQ ID NO: 6058089 - DNA, 25 bp, Homo sapien
aagatgagcggcagttaaaggctct

SEQ ID NO: 6058090 - DNA, 25 bp, Homo sapien
tgtgtgaattatgctgtgttttctg

SEQ ID NO: 6058091 - DNA, 25 bp, Homo sapien
ttcacacctgtagggtttctctcca

SEQ ID NO: 6058092 - DNA, 25 bp, Homo sapien
ctgccacattcttcacacctgtagg

SEQ ID NO: 6058093 - DNA, 25 bp, Homo sapien
gtaaggtttctctcctgtgtgaatt

SEQ ID NO: 6058094 - DNA, 25 bp, Homo sapien
aaagcttctgccacattcttcacac

SEQ ID NO: 6058095 - DNA, 25 bp, Homo sapien
cccacattcattacatttgtatggt

SEQ ID NO: 6058096 - DNA, 25 bp, Homo sapien
ctctgatgttttttaaggcttgcac

SEQ ID NO: 6058097 - DNA, 25 bp, Homo sapien
ctgtagggtttctctccagtgtgga

SEQ ID NO: 6058098 - DNA, 25 bp, Homo sapien
ttctcttgtgtttagtaaaagatga

SEQ ID NO: 6058099 - DNA, 25 bp, Homo sapien
acatttgtagggtttctctcctgtg

SEQ ID NO: 6058100 - DNA, 25 bp, Homo sapien
ctcctgtatggattctctggtgttg

SEQ ID NO: 6058101 - DNA, 25 bp, Homo sapien
gctagtttttttcatgtatgaattc

SEQ ID NO: 6058102 - DNA, 25 bp, Homo sapien
ggatttcccacattcattacatttg

SEQ ID NO: 6058103 - DNA, 25 bp, Homo sapien
aaaagctttgtcacagtctttacat

SEQ ID NO: 6058104 - DNA, 25 bp, Homo sapien
tctccagtgtggattctctgatgtt

SEQ ID NO: 6058105 - DNA, 25 bp, Homo sapien
tgccacattcattacatttgtagga

SEQ ID NO: 6058106 - DNA, 25 bp, Homo sapien
tcatgtatgaattctctcatgcttt

SEQ ID NO: 6058107 - DNA, 25 bp, Homo sapien
aagatttgtgcagtggataaaagct

SEQ ID NO: 6058108 - DNA, 25 bp, Homo sapien
gattctctggtgttgaataagattt

SEQ ID NO: 6058109 - DNA, 25 bp, Homo sapien
ggattctctgatgttttttaaggct

SEQ ID NO: 6058110 - DNA, 25 bp, Homo sapien
taaaggattttccacataatttaca

SEQ ID NO: 6058111 - DNA, 25 bp, Homo sapien
tgagtagtggttaaagcttctgcca

SEQ ID NO: 6058112 - DNA, 25 bp, Homo sapien
gtggataaaagctttgtcacagtct

SEQ ID NO: 6058113 - DNA, 25 bp, Homo sapien
gctgaccaagaattgagtagtggtt

SEQ ID NO: 6058114 - DNA, 25 bp, Homo sapien
tgagcaatatttaaaggctttgcca

SEQ ID NO: 6058115 - DNA, 25 bp, Homo sapien
aattatgctgtgttttctgtaactt

SEQ ID NO: 6058116 - DNA, 25 bp, Homo sapien
ctgtgtgaatcctctggtgctgacc

SEQ ID NO: 6058117 - DNA, 25 bp, Homo sapien
atgaattctctcatgctttctaagg

SEQ ID NO: 6058118 - DNA, 25 bp, Homo sapien
tttctaaggtttgaacattgactaa

SEQ ID NO: 6058119 - DNA, 25 bp, Homo sapien
acattcattacatttgtaggatttc

SEQ ID NO: 6058120 - DNA, 25 bp, Homo sapien
tgtgaattctcttgtgtttagtaaa

SEQ ID NO: 6058121 - DNA, 25 bp, Homo sapien
tttctctcctgtgtgaattatgctg

SEQ ID NO: 6058122 - DNA, 25 bp, Homo sapien
tttctctccagtgtggattctctga

SEQ ID NO: 6058123 - DNA, 25 bp, Homo sapien
tttctctcctgtatggattctctgg

SEQ ID NO: 6058124 - DNA, 25 bp, Homo sapien
tacatttgtatggtttctctcctgt

SEQ ID NO: 6058125 - DNA, 25 bp, Homo sapien
ttacatttgtagggtttctctcctg

SEQ ID NO: 6058126 - DNA, 25 bp, Homo sapien
cagtgtggattctctgatgtttttt

SEQ ID NO: 6058127 - DNA, 25 bp, Homo sapien
gattcttgacatttgctagtttttt

SEQ ID NO: 6058128 - DNA, 25 bp, Homo sapien
cttgcacactgggtaaaggattttc

SEQ ID NO: 6058129 - DNA, 25 bp, Homo sapien
tgttttttaaggcttgcacactggg

SEQ ID NO: 6058130 - DNA, 25 bp, Homo sapien
gacatttgctagtttttttcatgta

SEQ ID NO: 6058131 - DNA, 25 bp, Homo sapien
ttaaggcttgcacactgggtaaagg

SEQ ID NO: 6058132 - DNA, 25 bp, Homo sapien
ttactagattcttgacatttgctag

SEQ ID NO: 6058133 - DNA, 25 bp, Homo sapien
cattcttcacacctgtagggtttct

SEQ ID NO: 6058134 - DNA, 25 bp, Homo sapien
attctctcatgctttctaaggtttg

SEQ ID NO: 6058135 - DNA, 25 bp, Homo sapien
gctgtgttttctgtaacttgagcaa

SEQ ID NO: 6058136 - DNA, 25 bp, Homo sapien
tgtatggattctctggtgttgaata

SEQ ID NO: 6058137 - DNA, 25 bp, Homo sapien
gccacatacttcacatttgtagggt

SEQ ID NO: 6058138 - DNA, 25 bp, Homo sapien
tcatgctttctaaggtttgaacatt

SEQ ID NO: 6058139 - DNA, 25 bp, Homo sapien
ttcattacatttgtatggtttctct

SEQ ID NO: 6058140 - DNA, 25 bp, Homo sapien
cacataatttacatttgtagggttt

SEQ ID NO: 6058141 - DNA, 25 bp, Homo sapien
aggtttgaacattgactaaaggatt

SEQ ID NO: 6058142 - DNA, 25 bp, Homo sapien
gtcttaatatctcaccacacattgg

SEQ ID NO: 6058143 - DNA, 25 bp, Homo sapien
ctccatagaatgaatagagagacat

SEQ ID NO: 6058144 - DNA, 25 bp, Homo sapien
cttgttaaaggccttgattctctcc

SEQ ID NO: 6058145 - DNA, 25 bp, Homo sapien
gaaaggttagcttaaggaaggatgc

SEQ ID NO: 6058146 - DNA, 25 bp, Homo sapien
tcagtatccttggagacaatgggct

SEQ ID NO: 6058147 - DNA, 25 bp, Homo sapien
agaactgggccagtgcctgatccac

SEQ ID NO: 6058148 - DNA, 25 bp, Homo sapien
gcagtagacaactcaagatgaatca

SEQ ID NO: 6058149 - DNA, 25 bp, Homo sapien
cagttactacacacaattacccaaa

SEQ ID NO: 6058150 - DNA, 25 bp, Homo sapien
caatgggcttgaaggtgttaaggac

SEQ ID NO: 6058151 - DNA, 25 bp, Homo sapien
caaattttccataatagaaacttgt

SEQ ID NO: 6058152 - DNA, 25 bp, Homo sapien
gttttatctactctaaaatagcagt

SEQ ID NO: 6058153 - DNA, 25 bp, Homo sapien
gagggtccagtcacatcaaatgtta

SEQ ID NO: 6058154 - DNA, 25 bp, Homo sapien
atcctgtggaaagtaagcccaaagg

SEQ ID NO: 6058155 - DNA, 25 bp, Homo sapien
aagggctgaacagagaactgggcca

SEQ ID NO: 6058156 - DNA, 25 bp, Homo sapien
aagaggaaaaagacaatctcagtta

SEQ ID NO: 6058157 - DNA, 25 bp, Homo sapien
ataactgtggagttcctgagagatg

SEQ ID NO: 6058158 - DNA, 25 bp, Homo sapien
ccagtcacatcaaatgttataactg

SEQ ID NO: 6058159 - DNA, 25 bp, Homo sapien
aatagagagacatgaggtggatgga

SEQ ID NO: 6058160 - DNA, 25 bp, Homo sapien
cttaaggaaggatgctatgctatct

SEQ ID NO: 6058161 - DNA, 25 bp, Homo sapien
taatatgcagtagacaactcaagat

SEQ ID NO: 6058162 - DNA, 25 bp, Homo sapien
ttcctgagagatgtcttaatatctc

SEQ ID NO: 6058163 - DNA, 25 bp, Homo sapien
gcttgaaggtgttaaggacagcttt

SEQ ID NO: 6058164 - DNA, 25 bp, Homo sapien
gagacaatgggcttgaaggtgttaa

SEQ ID NO: 6058165 - DNA, 25 bp, Homo sapien
ggaaaggcatcatactggaagattt

SEQ ID NO: 6058166 - DNA, 25 bp, Homo sapien
caattacccaaaatgataacatttt

SEQ ID NO: 6058167 - DNA, 25 bp, Homo sapien
agagatgtcttaatatctcaccaca

SEQ ID NO: 6058168 - DNA, 25 bp, Homo sapien
taaggacagctttgggagtaaggta

SEQ ID NO: 6058169 - DNA, 25 bp, Homo sapien
aagacaatctcagttactacacaca

SEQ ID NO: 6058170 - DNA, 25 bp, Homo sapien
agaaaaaagaatctgtctaggaaag

SEQ ID NO: 6058171 - DNA, 25 bp, Homo sapien
aatgttataactgtggagttcctga

SEQ ID NO: 6058172 - DNA, 25 bp, Homo sapien
ggttagcttaaggaaggatgctatg

SEQ ID NO: 6058173 - DNA, 25 bp, Homo sapien
gacaactcaagatgaatcattggcc

SEQ ID NO: 6058174 - DNA, 25 bp, Homo sapien
gagacatgaggtggatggagaatgg

SEQ ID NO: 6058175 - DNA, 25 bp, Homo sapien
aagatttgtgggaagggctgaacag

SEQ ID NO: 6058176 - DNA, 25 bp, Homo sapien
tccataatagaaacttgttaaaggc

SEQ ID NO: 6058177 - DNA, 25 bp, Homo sapien
gttttttcagtatccttggagacaa

SEQ ID NO: 6058178 - DNA, 25 bp, Homo sapien
tagcagtcaagcctttaggtaaaac

SEQ ID NO: 6058179 - DNA, 25 bp, Homo sapien
acattggttttttcagtatccttgg

SEQ ID NO: 6058180 - DNA, 25 bp, Homo sapien
ctgcatatcctgtggaaagtaagcc

SEQ ID NO: 6058181 - DNA, 25 bp, Homo sapien
tgaatcattggcctctatatggtgt

SEQ ID NO: 6058182 - DNA, 25 bp, Homo sapien
gcatcatactggaagatttgtggga

SEQ ID NO: 6058183 - DNA, 25 bp, Homo sapien
ccttgattctctccgctcagatgat

SEQ ID NO: 6058184 - DNA, 25 bp, Homo sapien
acatcaaatgttataactgtggagt

SEQ ID NO: 6058185 - DNA, 25 bp, Homo sapien
caccacacattggttttttcagtat

SEQ ID NO: 6058186 - DNA, 25 bp, Homo sapien
cagaggctccatagaatgaatagag

SEQ ID NO: 6058187 - DNA, 25 bp, Homo sapien
gaacagagaactgggccagtgcctg

SEQ ID NO: 6058188 - DNA, 25 bp, Homo sapien
ttctctccgctcagatgatgcaact

SEQ ID NO: 6058189 - DNA, 25 bp, Homo sapien
tctactctaaaatagcagtcaagcc

SEQ ID NO: 6058190 - DNA, 25 bp, Homo sapien
tgataacattttcagaagaatccat

SEQ ID NO: 6058191 - DNA, 25 bp, Homo sapien
tgaggtggatggagaatggagggtc

SEQ ID NO: 6058192 - DNA, 25 bp, Homo sapien
ccaaaggggaaaggcatcatactgg

SEQ ID NO: 6058193 - DNA, 25 bp, Homo sapien
cattggcctctatatggtgttttat

SEQ ID NO: 6058194 - DNA, 25 bp, Homo sapien
agaatgaatagagagacatgaggtg

SEQ ID NO: 6058195 - DNA, 25 bp, Homo sapien
tgtctaggaaaggttagcttaagga

SEQ ID NO: 6058196 - DNA, 25 bp, Homo sapien
attgaaaagaggaaaaagacaatct

SEQ ID NO: 6058197 - DNA, 25 bp, Homo sapien
agatgatgcaactggaatttagaaa

SEQ ID NO: 6058198 - DNA, 25 bp, Homo sapien
gtggagttcctgagagatgtcttaa

SEQ ID NO: 6058199 - DNA, 25 bp, Homo sapien
aaggtactgcatatcctgtggaaag

SEQ ID NO: 6058200 - DNA, 25 bp, Homo sapien
cctctatatggtgttttatctactc

SEQ ID NO: 6058201 - DNA, 25 bp, Homo sapien
tcaagcctttaggtaaaacagaggc

SEQ ID NO: 6058202 - DNA, 25 bp, Homo sapien
tgtgggaagggctgaacagagaact

SEQ ID NO: 6058203 - DNA, 25 bp, Homo sapien
ggatggagaatggagggtccagtca

SEQ ID NO: 6058204 - DNA, 25 bp, Homo sapien
agaatggagggtccagtcacatcaa

SEQ ID NO: 6058205 - DNA, 25 bp, Homo sapien
tacacacaattacccaaaatgataa

SEQ ID NO: 6058206 - DNA, 25 bp, Homo sapien
ctttaggtaaaacagaggctccata

SEQ ID NO: 6058207 - DNA, 25 bp, Homo sapien
agaatctgtctaggaaaggttagct

SEQ ID NO: 6058208 - DNA, 25 bp, Homo sapien
ccgctcagatgatgcaactggaatt

SEQ ID NO: 6058209 - DNA, 25 bp, Homo sapien
atagaaacttgttaaaggccttgat

SEQ ID NO: 6058210 - DNA, 25 bp, Homo sapien
tactggaagatttgtgggaagggct

SEQ ID NO: 6058211 - DNA, 25 bp, Homo sapien
agctttgggagtaaggtactgcata

SEQ ID NO: 6058212 - DNA, 25 bp, Homo sapien
atatctcaccacacattggtttttt

SEQ ID NO: 6058213 - DNA, 25 bp, Homo sapien
gtaagcccaaaggggaaaggcatca

SEQ ID NO: 6058214 - DNA, 25 bp, Homo sapien
gaatttagaaaaaagaatctgtcta

SEQ ID NO: 6058215 - DNA, 25 bp, Homo sapien
tgcaactggaatttagaaaaaagaa

SEQ ID NO: 6058216 - DNA, 25 bp, Homo sapien
gtaaaacagaggctccatagaatga

SEQ ID NO: 6058217 - DNA, 25 bp, Homo sapien
tcaagatgaatcattggcctctata

SEQ ID NO: 6058218 - DNA, 25 bp, Homo sapien
gaaggatgctatgctatctaatatg

SEQ ID NO: 6058219 - DNA, 25 bp, Homo sapien
ctaaaatagcagtcaagcctttagg

SEQ ID NO: 6058220 - DNA, 25 bp, Homo sapien
gctatctaatatgcagtagacaact

SEQ ID NO: 6058221 - DNA, 25 bp, Homo sapien
cattttcagaagaatccatttaaag

SEQ ID NO: 6058222 - DNA, 25 bp, Homo sapien
gggagtaaggtactgcatatcctgt

SEQ ID NO: 6058223 - DNA, 25 bp, Homo sapien
tccttggagacaatgggcttgaagg

SEQ ID NO: 6058224 - DNA, 25 bp, Homo sapien
tgctatgctatctaatatgcagtag

SEQ ID NO: 6058225 - DNA, 25 bp, Homo sapien
cagaagaatccatttaaagactttt

SEQ ID NO: 6058226 - DNA, 25 bp, Homo sapien
taaaggccttgattctctccgctca

SEQ ID NO: 6058227 - DNA, 25 bp, Homo sapien
tatggtgttttatctactctaaaat

SEQ ID NO: 6058228 - DNA, 25 bp, Homo sapien
caatctcagttactacacacaatta

SEQ ID NO: 6058229 - DNA, 25 bp, Homo sapien
ccaaaatgataacattttcagaaga

SEQ ID NO: 6058230 - DNA, 25 bp, Homo sapien
aggtgttaaggacagctttgggagt

SEQ ID NO: 6058231 - DNA, 25 bp, Homo sapien
ttccaccagtgcagccgcattgccg

SEQ ID NO: 6058232 - DNA, 25 bp, Homo sapien
ttttcctgtttgacaaacttcgcta

SEQ ID NO: 6058233 - DNA, 25 bp, Homo sapien
aattcttttatctgcgcctaatatg

SEQ ID NO: 6058234 - DNA, 25 bp, Homo sapien
aatatgcgggctgcttcagctgctt

SEQ ID NO: 6058235 - DNA, 25 bp, Homo sapien
cgcttcttccaccagtgcagccgca

SEQ ID NO: 6058236 - DNA, 25 bp, Homo sapien
caatatacccattcgtcagaggagt

SEQ ID NO: 6058237 - DNA, 25 bp, Homo sapien
gcataaaaaccgcttttggccgaca

SEQ ID NO: 6058238 - DNA, 25 bp, Homo sapien
aaactggcttttgtaggcgttgagg

SEQ ID NO: 6058239 - DNA, 25 bp, Homo sapien
gcttttgtaggcgttgaggctttgt

SEQ ID NO: 6058240 - DNA, 25 bp, Homo sapien
cttcaacgatttcaatatacccatt

SEQ ID NO: 6058241 - DNA, 25 bp, Homo sapien
cttctgtcaaatcgcatatcattac

SEQ ID NO: 6058242 - DNA, 25 bp, Homo sapien
gtttctttgcctctattgtatccga

SEQ ID NO: 6058243 - DNA, 25 bp, Homo sapien
acagtgacaattgaccgaattgcct

SEQ ID NO: 6058244 - DNA, 25 bp, Homo sapien
ttgcctctattgtatccgagatatc

SEQ ID NO: 6058245 - DNA, 25 bp, Homo sapien
gtctggaagcgttagctgaattctt

SEQ ID NO: 6058246 - DNA, 25 bp, Homo sapien
ctattgtatccgagatatcaataac

SEQ ID NO: 6058247 - DNA, 25 bp, Homo sapien
tgtttgacaaacttcgctattgtgc

SEQ ID NO: 6058248 - DNA, 25 bp, Homo sapien
attgcctgatcactcattattaggc

SEQ ID NO: 6058249 - DNA, 25 bp, Homo sapien
tttatctgcgcctaatatgcgggct

SEQ ID NO: 6058250 - DNA, 25 bp, Homo sapien
tgatcactcattattaggccgcggt

SEQ ID NO: 6058251 - DNA, 25 bp, Homo sapien
agatatcaataacaaaatccggctg

SEQ ID NO: 6058252 - DNA, 25 bp, Homo sapien
cggatggcgatcctttttatacggc

SEQ ID NO: 6058253 - DNA, 25 bp, Homo sapien
cggaatcctttgacgggataaactg

SEQ ID NO: 6058254 - DNA, 25 bp, Homo sapien
cattgccgtgatccggatggcgatc

SEQ ID NO: 6058255 - DNA, 25 bp, Homo sapien
ttatcatataatagtaaaccttgct

SEQ ID NO: 6058256 - DNA, 25 bp, Homo sapien
aaccatttatcatataatagtaaac

SEQ ID NO: 6058257 - DNA, 25 bp, Homo sapien
ctttgacgggataaactggcttttg

SEQ ID NO: 6058258 - DNA, 25 bp, Homo sapien
agtaaaccttgctgactttatgcgc

SEQ ID NO: 6058259 - DNA, 25 bp, Homo sapien
attgtgccgcccattccgatctcga

SEQ ID NO: 6058260 - DNA, 25 bp, Homo sapien
gcttcagctgcttcttctttacgca

SEQ ID NO: 6058261 - DNA, 25 bp, Homo sapien
cgtaaagcttttctctcgcttcaac

SEQ ID NO: 6058262 - DNA, 25 bp, Homo sapien
atgcgccggaaggcttttttcgtct

SEQ ID NO: 6058263 - DNA, 25 bp, Homo sapien
cagattctgatgacagtgacaattg

SEQ ID NO: 6058264 - DNA, 25 bp, Homo sapien
gaggagtagaaacggaatcctttga

SEQ ID NO: 6058265 - DNA, 25 bp, Homo sapien
acaattgaccgaattgcctgatcac

SEQ ID NO: 6058266 - DNA, 25 bp, Homo sapien
atactccacgcccgcttctttaccg

SEQ ID NO: 6058267 - DNA, 25 bp, Homo sapien
cgggctgcttcagctgcttcttctt

SEQ ID NO: 6058268 - DNA, 25 bp, Homo sapien
ggccgacagattctgatgacagtga

SEQ ID NO: 6058269 - DNA, 25 bp, Homo sapien
cgcaaactgaccgtaccgttagaag

SEQ ID NO: 6058270 - DNA, 25 bp, Homo sapien
tttatggattccggcggaaaagatc

SEQ ID NO: 6058271 - DNA, 25 bp, Homo sapien
actgaccgtaccgttagaagagagt

SEQ ID NO: 6058272 - DNA, 25 bp, Homo sapien
tgtaggcgttgaggctttgtttctt

SEQ ID NO: 6058273 - DNA, 25 bp, Homo sapien
aaaccgcttttggccgacagattct

SEQ ID NO: 6058274 - DNA, 25 bp, Homo sapien
tatccgagatatcaataacaaaatc

SEQ ID NO: 6058275 - DNA, 25 bp, Homo sapien
agccgcattgccgtgatccggatgg

SEQ ID NO: 6058276 - DNA, 25 bp, Homo sapien
cgtaccgttagaagagagttccgct

SEQ ID NO: 6058277 - DNA, 25 bp, Homo sapien
ccgcggtctggaagcgttagctgaa

SEQ ID NO: 6058278 - DNA, 25 bp, Homo sapien
tgactttatgcgccggaaggctttt

SEQ ID NO: 6058279 - DNA, 25 bp, Homo sapien
ctctcgcttcaacgatttcaatata

SEQ ID NO: 6058280 - DNA, 25 bp, Homo sapien
aaagatcgcttcttccaccagtgca

SEQ ID NO: 6058281 - DNA, 25 bp, Homo sapien
gttccgcttctgtcaaatcgcatat

SEQ ID NO: 6058282 - DNA, 25 bp, Homo sapien
gaccgaattgcctgatcactcatta

SEQ ID NO: 6058283 - DNA, 25 bp, Homo sapien
acccattcgtcagaggagtagaaac

SEQ ID NO: 6058284 - DNA, 25 bp, Homo sapien
tttatatttatggattccggcggaa

SEQ ID NO: 6058285 - DNA, 25 bp, Homo sapien
ctcattattaggccgcggtctggaa

SEQ ID NO: 6058286 - DNA, 25 bp, Homo sapien
gcttttctctcgcttcaacgatttc

SEQ ID NO: 6058287 - DNA, 25 bp, Homo sapien
gctgcttcttctttacgcaaactga

SEQ ID NO: 6058288 - DNA, 25 bp, Homo sapien
cgttgaggctttgtttctttgcctc

SEQ ID NO: 6058289 - DNA, 25 bp, Homo sapien
aagagagttccgcttctgtcaaatc

SEQ ID NO: 6058290 - DNA, 25 bp, Homo sapien
cgtgatccggatggcgatccttttt

SEQ ID NO: 6058291 - DNA, 25 bp, Homo sapien
catatcattacttttttttcctgtt

SEQ ID NO: 6058292 - DNA, 25 bp, Homo sapien
ggcggaaaagatcgcttcttccacc

SEQ ID NO: 6058293 - DNA, 25 bp, Homo sapien
cgatttcaatatacccattcgtcag

SEQ ID NO: 6058294 - DNA, 25 bp, Homo sapien
ttcgctattgtgccgcccattccga

SEQ ID NO: 6058295 - DNA, 25 bp, Homo sapien
acaaacttcgctattgtgccgccca

SEQ ID NO: 6058296 - DNA, 25 bp, Homo sapien
tgcgcctaatatgcgggctgcttca

SEQ ID NO: 6058297 - DNA, 25 bp, Homo sapien
gatgaaaaccatttatcatataata

SEQ ID NO: 6058298 - DNA, 25 bp, Homo sapien
ttcgtctttatatttatggattccg

SEQ ID NO: 6058299 - DNA, 25 bp, Homo sapien
tcttctttacgcaaactgaccgtac

SEQ ID NO: 6058300 - DNA, 25 bp, Homo sapien
tataatagtaaaccttgctgacttt

SEQ ID NO: 6058301 - DNA, 25 bp, Homo sapien
cgggataaactggcttttgtaggcg

SEQ ID NO: 6058302 - DNA, 25 bp, Homo sapien
ccttgctgactttatgcgccggaag

SEQ ID NO: 6058303 - DNA, 25 bp, Homo sapien
ctgatgacagtgacaattgaccgaa

SEQ ID NO: 6058304 - DNA, 25 bp, Homo sapien
aagcgttagctgaattcttttatct

SEQ ID NO: 6058305 - DNA, 25 bp, Homo sapien
gcgatcctttttatacggcataaaa

SEQ ID NO: 6058306 - DNA, 25 bp, Homo sapien
tagctgaattcttttatctgcgcct

SEQ ID NO: 6058307 - DNA, 25 bp, Homo sapien
tcaaatcgcatatcattactttttt

SEQ ID NO: 6058308 - DNA, 25 bp, Homo sapien
gattccggcggaaaagatcgcttct

SEQ ID NO: 6058309 - DNA, 25 bp, Homo sapien
ggctttgtttctttgcctctattgt

SEQ ID NO: 6058310 - DNA, 25 bp, Homo sapien
cgttagaagagagttccgcttctgt

SEQ ID NO: 6058311 - DNA, 25 bp, Homo sapien
caataacaaaatccggctgatgaaa

SEQ ID NO: 6058312 - DNA, 25 bp, Homo sapien
ccggctgatgaaaaccatttatcat

SEQ ID NO: 6058313 - DNA, 25 bp, Homo sapien
attaggccgcggtctggaagcgtta

SEQ ID NO: 6058314 - DNA, 25 bp, Homo sapien
cagtgcagccgcattgccgtgatcc

SEQ ID NO: 6058315 - DNA, 25 bp, Homo sapien
caaaatccggctgatgaaaaccatt

SEQ ID NO: 6058316 - DNA, 25 bp, Homo sapien
tcgtcagaggagtagaaacggaatc

SEQ ID NO: 6058317 - DNA, 25 bp, Homo sapien
gcttttggccgacagattctgatga

SEQ ID NO: 6058318 - DNA, 25 bp, Homo sapien
ttgtggcgagcggaatggaatacac

SEQ ID NO: 6058319 - DNA, 25 bp, Homo sapien
catatttgtggcgagcggaatggaa

SEQ ID NO: 6058320 - DNA, 25 bp, Homo sapien
gaatacacatcacataaacggatta

SEQ ID NO: 6058321 - DNA, 25 bp, Homo sapien
ttctaaaccatacacaagctgatca

SEQ ID NO: 6058322 - DNA, 25 bp, Homo sapien
gcgatcagtgcaccgatttgctggt

SEQ ID NO: 6058323 - DNA, 25 bp, Homo sapien
aagaatttccgcagtacccatattt

SEQ ID NO: 6058324 - DNA, 25 bp, Homo sapien
tccggttgcgtatagatcatgattc

SEQ ID NO: 6058325 - DNA, 25 bp, Homo sapien
cggtcagcgggtcgcgcaaaaaaat

SEQ ID NO: 6058326 - DNA, 25 bp, Homo sapien
gatattttctaaaccatacacaagc

SEQ ID NO: 6058327 - DNA, 25 bp, Homo sapien
tgaagcctgtgcaagcgaataccgt

SEQ ID NO: 6058328 - DNA, 25 bp, Homo sapien
cgcgatcaaagcaattttcattgtt

SEQ ID NO: 6058329 - DNA, 25 bp, Homo sapien
gcgagcggaatggaatacacatcac

SEQ ID NO: 6058330 - DNA, 25 bp, Homo sapien
cgtaaattgaaccatatcctgtttt

SEQ ID NO: 6058331 - DNA, 25 bp, Homo sapien
ttccgcagtacccatatttgtggcg

SEQ ID NO: 6058332 - DNA, 25 bp, Homo sapien
tgacatgaaagaagcacggttataa

SEQ ID NO: 6058333 - DNA, 25 bp, Homo sapien
cgcctcatgaattttcaaccctgtg

SEQ ID NO: 6058334 - DNA, 25 bp, Homo sapien
tgtggttccggttgcgtatagatca

SEQ ID NO: 6058335 - DNA, 25 bp, Homo sapien
gccggattgaaaacgttcaatttga

SEQ ID NO: 6058336 - DNA, 25 bp, Homo sapien
acatcacataaacggattaatgccg

SEQ ID NO: 6058337 - DNA, 25 bp, Homo sapien
ttttgctccgctcctcttgctcctg

SEQ ID NO: 6058338 - DNA, 25 bp, Homo sapien
cataaacggattaatgccgagacat

SEQ ID NO: 6058339 - DNA, 25 bp, Homo sapien
cgtctaatcaatgatattttctaaa

SEQ ID NO: 6058340 - DNA, 25 bp, Homo sapien
aagcgaataccgttttgctccgctc

SEQ ID NO: 6058341 - DNA, 25 bp, Homo sapien
cctgttttttcttgtcatgcgcgat

SEQ ID NO: 6058342 - DNA, 25 bp, Homo sapien
aagaatcatggcgtatctgaagcct

SEQ ID NO: 6058343 - DNA, 25 bp, Homo sapien
ggttataagaatcatggcgtatctg

SEQ ID NO: 6058344 - DNA, 25 bp, Homo sapien
ttttctttacggacttctgaaatca

SEQ ID NO: 6058345 - DNA, 25 bp, Homo sapien
cgatttgctggtctccccctaaagg

SEQ ID NO: 6058346 - DNA, 25 bp, Homo sapien
aaacgttcaatttgaagacctgtcg

SEQ ID NO: 6058347 - DNA, 25 bp, Homo sapien
catgattctttaaaatatcccgata

SEQ ID NO: 6058348 - DNA, 25 bp, Homo sapien
gattgaaaacgttcaatttgaagac

SEQ ID NO: 6058349 - DNA, 25 bp, Homo sapien
gaaagaagcacggttataagaatca

SEQ ID NO: 6058350 - DNA, 25 bp, Homo sapien
cacaagctgatcaatcttcatgact

SEQ ID NO: 6058351 - DNA, 25 bp, Homo sapien
ttcaatttgaagacctgtcgcctca

SEQ ID NO: 6058352 - DNA, 25 bp, Homo sapien
agtgcaccgatttgctggtctcccc

SEQ ID NO: 6058353 - DNA, 25 bp, Homo sapien
aaaaaatgacaagatcgagtgcatt

SEQ ID NO: 6058354 - DNA, 25 bp, Homo sapien
tgtccttgctgcttttctttacgga

SEQ ID NO: 6058355 - DNA, 25 bp, Homo sapien
atgaattttcaaccctgtggttccg

SEQ ID NO: 6058356 - DNA, 25 bp, Homo sapien
tgctgcttttctttacggacttctg

SEQ ID NO: 6058357 - DNA, 25 bp, Homo sapien
tagatcatgattctttaaaatatcc

SEQ ID NO: 6058358 - DNA, 25 bp, Homo sapien
tcatggcgtatctgaagcctgtgca

SEQ ID NO: 6058359 - DNA, 25 bp, Homo sapien
atttctttttcatccggatgtcctt

SEQ ID NO: 6058360 - DNA, 25 bp, Homo sapien
tgcgtatagatcatgattctttaaa

SEQ ID NO: 6058361 - DNA, 25 bp, Homo sapien
gctgcgcggtcagcgggtcgcgcaa

SEQ ID NO: 6058362 - DNA, 25 bp, Homo sapien
aatgccgagacatccggttcatgcg

SEQ ID NO: 6058363 - DNA, 25 bp, Homo sapien
gactgacagtttaacgcctgacatg

SEQ ID NO: 6058364 - DNA, 25 bp, Homo sapien
tccggatgtccttgctgcttttctt

SEQ ID NO: 6058365 - DNA, 25 bp, Homo sapien
atcaatgatattttctaaaccatac

SEQ ID NO: 6058366 - DNA, 25 bp, Homo sapien
acctgtcgcctcatgaattttcaac

SEQ ID NO: 6058367 - DNA, 25 bp, Homo sapien
agatcgagtgcattggcagcgatca

SEQ ID NO: 6058368 - DNA, 25 bp, Homo sapien
aatcttcatgacttgttcgactgac

SEQ ID NO: 6058369 - DNA, 25 bp, Homo sapien
tccccccgtctaatcaatgatattt

SEQ ID NO: 6058370 - DNA, 25 bp, Homo sapien
caaagcaattttcattgtttatccc

SEQ ID NO: 6058371 - DNA, 25 bp, Homo sapien
ggcagtcgtaaattgaaccatatcc

SEQ ID NO: 6058372 - DNA, 25 bp, Homo sapien
agtgcattggcagcgatcagtgcac

SEQ ID NO: 6058373 - DNA, 25 bp, Homo sapien
tctttaaaatatcccgataggcagt

SEQ ID NO: 6058374 - DNA, 25 bp, Homo sapien
ttacggacttctgaaatcatttccg

SEQ ID NO: 6058375 - DNA, 25 bp, Homo sapien
aatatcccgataggcagtcgtaaat

SEQ ID NO: 6058376 - DNA, 25 bp, Homo sapien
tccggttcatgcggctgcgcggtca

SEQ ID NO: 6058377 - DNA, 25 bp, Homo sapien
ggaatggaatacacatcacataaac

SEQ ID NO: 6058378 - DNA, 25 bp, Homo sapien
ctgatcaatcttcatgacttgttcg

SEQ ID NO: 6058379 - DNA, 25 bp, Homo sapien
atgacaagatcgagtgcattggcag

SEQ ID NO: 6058380 - DNA, 25 bp, Homo sapien
ggagaatttctttttcatccggatg

SEQ ID NO: 6058381 - DNA, 25 bp, Homo sapien
ttttcatccggatgtccttgctgct

SEQ ID NO: 6058382 - DNA, 25 bp, Homo sapien
aacgcctgacatgaaagaagcacgg

SEQ ID NO: 6058383 - DNA, 25 bp, Homo sapien
ttgttcgactgacagtttaacgcct

SEQ ID NO: 6058384 - DNA, 25 bp, Homo sapien
gcgggtcgcgcaaaaaaatgacaag

SEQ ID NO: 6058385 - DNA, 25 bp, Homo sapien
ttggcagcgatcagtgcaccgattt

SEQ ID NO: 6058386 - DNA, 25 bp, Homo sapien
ctcctgggagaatttctttttcatc

SEQ ID NO: 6058387 - DNA, 25 bp, Homo sapien
gtcatgcgcgatcaaagcaattttc

SEQ ID NO: 6058388 - DNA, 25 bp, Homo sapien
cgcgcaaaaaaatgacaagatcgag

SEQ ID NO: 6058389 - DNA, 25 bp, Homo sapien
cggattaatgccgagacatccggtt

SEQ ID NO: 6058390 - DNA, 25 bp, Homo sapien
cctcttgctcctgggagaatttctt

SEQ ID NO: 6058391 - DNA, 25 bp, Homo sapien
catgacttgttcgactgacagttta

SEQ ID NO: 6058392 - DNA, 25 bp, Homo sapien
tccgctcctcttgctcctgggagaa

SEQ ID NO: 6058393 - DNA, 25 bp, Homo sapien
ccatatcctgttttttcttgtcatg

SEQ ID NO: 6058394 - DNA, 25 bp, Homo sapien
agtacccatatttgtggcgagcgga

SEQ ID NO: 6058395 - DNA, 25 bp, Homo sapien
ttttcttgtcatgcgcgatcaaagc

SEQ ID NO: 6058396 - DNA, 25 bp, Homo sapien
ctgtgcaagcgaataccgttttgct

SEQ ID NO: 6058397 - DNA, 25 bp, Homo sapien
ttgaagacctgtcgcctcatgaatt

SEQ ID NO: 6058398 - DNA, 25 bp, Homo sapien
aagcacggttataagaatcatggcg

SEQ ID NO: 6058399 - DNA, 25 bp, Homo sapien
caaccctgtggttccggttgcgtat

SEQ ID NO: 6058400 - DNA, 25 bp, Homo sapien
ttgaaccatatcctgttttttcttg

SEQ ID NO: 6058401 - DNA, 25 bp, Homo sapien
acttctgaaatcatttccgctgttt

SEQ ID NO: 6058402 - DNA, 25 bp, Homo sapien
cgtatctgaagcctgtgcaagcgaa

SEQ ID NO: 6058403 - DNA, 25 bp, Homo sapien
ccgataggcagtcgtaaattgaacc

SEQ ID NO: 6058404 - DNA, 25 bp, Homo sapien
gagacatccggttcatgcggctgcg

SEQ ID NO: 6058405 - DNA, 25 bp, Homo sapien
accatacacaagctgatcaatcttc

SEQ ID NO: 6058406 - DNA, 25 bp, Homo sapien
catgcggctgcgcggtcagcgggtc

SEQ ID NO: 6058407 - DNA, 25 bp, Homo sapien
tcattgtttatccccccgtctaatc

SEQ ID NO: 6058408 - DNA, 25 bp, Homo sapien
gtttatccccccgtctaatcaatga

SEQ ID NO: 6058409 - DNA, 25 bp, Homo sapien
cagtttaacgcctgacatgaaagaa

SEQ ID NO: 6058410 - DNA, 25 bp, Homo sapien
ataccgttttgctccgctcctcttg

SEQ ID NO: 6058411 - DNA, 25 bp, Homo sapien
gggcaatggtcgggcgacgtttgcc

SEQ ID NO: 6058412 - DNA, 25 bp, Homo sapien
gtggatttctgcactggcggcccca

SEQ ID NO: 6058413 - DNA, 25 bp, Homo sapien
tacggacagaactaccgcggctggg

SEQ ID NO: 6058414 - DNA, 25 bp, Homo sapien
cctttaaagctggaagccattctgg

SEQ ID NO: 6058415 - DNA, 25 bp, Homo sapien
tccgatgatagttttcgactgacca

SEQ ID NO: 6058416 - DNA, 25 bp, Homo sapien
tcgggcctgacctggctggcctttt

SEQ ID NO: 6058417 - DNA, 25 bp, Homo sapien
gtatggccgacagatgtgtccacgc

SEQ ID NO: 6058418 - DNA, 25 bp, Homo sapien
agagggatatgtccgccgtagcccc

SEQ ID NO: 6058419 - DNA, 25 bp, Homo sapien
caggaagagggatatgtccgccgta

SEQ ID NO: 6058420 - DNA, 25 bp, Homo sapien
cttatcctttcaccgggcaatggtc

SEQ ID NO: 6058421 - DNA, 25 bp, Homo sapien
cccgcggtctaatgttattaaatat

SEQ ID NO: 6058422 - DNA, 25 bp, Homo sapien
ccactgtgcggcgactgctggagac

SEQ ID NO: 6058423 - DNA, 25 bp, Homo sapien
tacgcgaaaccactcaccgtttcag

SEQ ID NO: 6058424 - DNA, 25 bp, Homo sapien
cggccccactgctgggcgatctgtt

SEQ ID NO: 6058425 - DNA, 25 bp, Homo sapien
tccacgctggatgttgatgcaatgg

SEQ ID NO: 6058426 - DNA, 25 bp, Homo sapien
agcccctccgatgatagttttcgac

SEQ ID NO: 6058427 - DNA, 25 bp, Homo sapien
gcctgcatcgcaccactgtgcggcg

SEQ ID NO: 6058428 - DNA, 25 bp, Homo sapien
cgtgcgcggtaacccgcggtctaat

SEQ ID NO: 6058429 - DNA, 25 bp, Homo sapien
gcgcgcgcaaagagggttacggaca

SEQ ID NO: 6058430 - DNA, 25 bp, Homo sapien
ttctgcactggcggccccactgctg

SEQ ID NO: 6058431 - DNA, 25 bp, Homo sapien
gatgactatcaactggcacgggaac

SEQ ID NO: 6058432 - DNA, 25 bp, Homo sapien
aagcgaaggatttcgtgacgaacag

SEQ ID NO: 6058433 - DNA, 25 bp, Homo sapien
taatcgaaatgttagcctcccgccc

SEQ ID NO: 6058434 - DNA, 25 bp, Homo sapien
atcaaagtgcggcaattaagcgaag

SEQ ID NO: 6058435 - DNA, 25 bp, Homo sapien
tcccgccccggtgatgactatcaac

SEQ ID NO: 6058436 - DNA, 25 bp, Homo sapien
ggcgacgtttgccgcttctgaaaac

SEQ ID NO: 6058437 - DNA, 25 bp, Homo sapien
atgttgatgcaatggtggtacgcga

SEQ ID NO: 6058438 - DNA, 25 bp, Homo sapien
ggcggtgccagcgtcgggctgctgg

SEQ ID NO: 6058439 - DNA, 25 bp, Homo sapien
ggcgcgcgcgcgcaaagagggttac

SEQ ID NO: 6058440 - DNA, 25 bp, Homo sapien
cgccgtagcccctccgatgatagtt

SEQ ID NO: 6058441 - DNA, 25 bp, Homo sapien
tgggcgatctgttgcgcgaagtggt

SEQ ID NO: 6058442 - DNA, 25 bp, Homo sapien
gccttttgcccggaacaagaccgca

SEQ ID NO: 6058443 - DNA, 25 bp, Homo sapien
ctggagacgctgcaggaagagggat

SEQ ID NO: 6058444 - DNA, 25 bp, Homo sapien
tttcgactgaccatcaaagtgcggc

SEQ ID NO: 6058445 - DNA, 25 bp, Homo sapien
gtttcagccgcttatcctttcaccg

SEQ ID NO: 6058446 - DNA, 25 bp, Homo sapien
actggcggccccactgctgggcgat

SEQ ID NO: 6058447 - DNA, 25 bp, Homo sapien
gatgtgtccacgctggatgttgatg

SEQ ID NO: 6058448 - DNA, 25 bp, Homo sapien
gtgcggcgactgctggagacgctgc

SEQ ID NO: 6058449 - DNA, 25 bp, Homo sapien
ctcaccgtttcagccgcttatcctt

SEQ ID NO: 6058450 - DNA, 25 bp, Homo sapien
gatagttttcgactgaccatcaaag

SEQ ID NO: 6058451 - DNA, 25 bp, Homo sapien
atcgcaccactgtgcggcgactgct

SEQ ID NO: 6058452 - DNA, 25 bp, Homo sapien
ctgctggcggaactcagcggcctgc

SEQ ID NO: 6058453 - DNA, 25 bp, Homo sapien
gcaaagagggttacggacagaacta

SEQ ID NO: 6058454 - DNA, 25 bp, Homo sapien
cgaacagtggatttctgcactggcg

SEQ ID NO: 6058455 - DNA, 25 bp, Homo sapien
tgaaaaccgcctcgggcctgacctg

SEQ ID NO: 6058456 - DNA, 25 bp, Homo sapien
acgctgcaggaagagggatatgtcc

SEQ ID NO: 6058457 - DNA, 25 bp, Homo sapien
aacaagaccgcaaggaattaatcga

SEQ ID NO: 6058458 - DNA, 25 bp, Homo sapien
cactgctgggcgatctgttgcgcga

SEQ ID NO: 6058459 - DNA, 25 bp, Homo sapien
cttgatggcggtgccagcgtcgggc

SEQ ID NO: 6058460 - DNA, 25 bp, Homo sapien
taaatatgttaaataaacttgatgg

SEQ ID NO: 6058461 - DNA, 25 bp, Homo sapien
agtgcggcaattaagcgaaggattt

SEQ ID NO: 6058462 - DNA, 25 bp, Homo sapien
ccgacagatgtgtccacgctggatg

SEQ ID NO: 6058463 - DNA, 25 bp, Homo sapien
ttagcctcccgccccggtgatgact

SEQ ID NO: 6058464 - DNA, 25 bp, Homo sapien
cgcttctgaaaaccgcctcgggcct

SEQ ID NO: 6058465 - DNA, 25 bp, Homo sapien
aataaacttgatggcggtgccagcg

SEQ ID NO: 6058466 - DNA, 25 bp, Homo sapien
aggatttcgtgacgaacagtggatt

SEQ ID NO: 6058467 - DNA, 25 bp, Homo sapien
atgttaaataaacttgatggcggtg

SEQ ID NO: 6058468 - DNA, 25 bp, Homo sapien
gtttgccgcttctgaaaaccgcctc

SEQ ID NO: 6058469 - DNA, 25 bp, Homo sapien
accgcctcgggcctgacctggctgg

SEQ ID NO: 6058470 - DNA, 25 bp, Homo sapien
tgcgcgaagtggtatggccgacaga

SEQ ID NO: 6058471 - DNA, 25 bp, Homo sapien
taccgcggctgggatcaggaggaga

SEQ ID NO: 6058472 - DNA, 25 bp, Homo sapien
ctgaccatcaaagtgcggcaattaa

SEQ ID NO: 6058473 - DNA, 25 bp, Homo sapien
gcggaactcagcggcctgcatcgca

SEQ ID NO: 6058474 - DNA, 25 bp, Homo sapien
tggtggtacgcgaaaccactcaccg

SEQ ID NO: 6058475 - DNA, 25 bp, Homo sapien
tggcacgggaacctttaaagctgga

SEQ ID NO: 6058476 - DNA, 25 bp, Homo sapien
gcaattaagcgaaggatttcgtgac

SEQ ID NO: 6058477 - DNA, 25 bp, Homo sapien
aggaattaatcgaaatgttagcctc

SEQ ID NO: 6058478 - DNA, 25 bp, Homo sapien
tgcccggaacaagaccgcaaggaat

SEQ ID NO: 6058479 - DNA, 25 bp, Homo sapien
cggtctaatgttattaaatatgtta

SEQ ID NO: 6058480 - DNA, 25 bp, Homo sapien
cgactgctggagacgctgcaggaag

SEQ ID NO: 6058481 - DNA, 25 bp, Homo sapien
gaagccattctggcgcgcgcgcgca

SEQ ID NO: 6058482 - DNA, 25 bp, Homo sapien
accgcaaggaattaatcgaaatgtt

SEQ ID NO: 6058483 - DNA, 25 bp, Homo sapien
tatgtccgccgtagcccctccgatg

SEQ ID NO: 6058484 - DNA, 25 bp, Homo sapien
atctgttgcgcgaagtggtatggcc

SEQ ID NO: 6058485 - DNA, 25 bp, Homo sapien
ctggatgttgatgcaatggtggtac

SEQ ID NO: 6058486 - DNA, 25 bp, Homo sapien
tcgtgacgaacagtggatttctgca

SEQ ID NO: 6058487 - DNA, 25 bp, Homo sapien
cccggtgatgactatcaactggcac

SEQ ID NO: 6058488 - DNA, 25 bp, Homo sapien
cattctggcgcgcgcgcgcaaagag

SEQ ID NO: 6058489 - DNA, 25 bp, Homo sapien
aaaccactcaccgtttcagccgctt

SEQ ID NO: 6058490 - DNA, 25 bp, Homo sapien
cgtcgggctgctggcggaactcagc

SEQ ID NO: 6058491 - DNA, 25 bp, Homo sapien
cagaactaccgcggctgggatcagg

SEQ ID NO: 6058492 - DNA, 25 bp, Homo sapien
tggctggccttttgcccggaacaag

SEQ ID NO: 6058493 - DNA, 25 bp, Homo sapien
atgcaatggtggtacgcgaaaccac

SEQ ID NO: 6058494 - DNA, 25 bp, Homo sapien
tggtcgggcgacgtttgccgcttct

SEQ ID NO: 6058495 - DNA, 25 bp, Homo sapien
tttcaccgggcaatggtcgggcgac

SEQ ID NO: 6058496 - DNA, 25 bp, Homo sapien
tcagcggcctgcatcgcaccactgt

SEQ ID NO: 6058497 - DNA, 25 bp, Homo sapien
gccagcgtcgggctgctggcggaac

SEQ ID NO: 6058498 - DNA, 25 bp, Homo sapien
aagctggaagccattctggcgcgcg

SEQ ID NO: 6058499 - DNA, 25 bp, Homo sapien
tatcaactggcacgggaacctttaa

SEQ ID NO: 6058500 - DNA, 25 bp, Homo sapien
aagtggtatggccgacagatgtgtc

SEQ ID NO: 6058501 - DNA, 25 bp, Homo sapien
aatgttagcctcccgccccggtgat

SEQ ID NO: 6058502 - DNA, 25 bp, Homo sapien
agccgcttatcctttcaccgggcaa

SEQ ID NO: 6058503 - DNA, 25 bp, Homo sapien
ctgacctggctggccttttgcccgg

SEQ ID NO: 6058504 - DNA, 25 bp, Homo sapien
gctgagaacgcatttatcagaaaga

SEQ ID NO: 6058505 - DNA, 25 bp, Homo sapien
tactgcaacttacctgcggcccact

SEQ ID NO: 6058506 - DNA, 25 bp, Homo sapien
gcctaacgttgactggataccggaa

SEQ ID NO: 6058507 - DNA, 25 bp, Homo sapien
agaaagaccagtgccgatttcgctc

SEQ ID NO: 6058508 - DNA, 25 bp, Homo sapien
gctgaatgttggtatcgctgccttt

SEQ ID NO: 6058509 - DNA, 25 bp, Homo sapien
tttatcagaaagaccagtgccgatt

SEQ ID NO: 6058510 - DNA, 25 bp, Homo sapien
ggcaatatccgggaatgcgccgtag

SEQ ID NO: 6058511 - DNA, 25 bp, Homo sapien
gcagcacattgttgaagtcgccgtt

SEQ ID NO: 6058512 - DNA, 25 bp, Homo sapien
gtggcgctttgatccacgagtagcg

SEQ ID NO: 6058513 - DNA, 25 bp, Homo sapien
aacttacctgcggcccactgcgctt

SEQ ID NO: 6058514 - DNA, 25 bp, Homo sapien
tcgtgcgcgcggcacaaaatgcggc

SEQ ID NO: 6058515 - DNA, 25 bp, Homo sapien
tggataccggaaagcggcaggttca

SEQ ID NO: 6058516 - DNA, 25 bp, Homo sapien
ccactggcagcacattgttgaagtc

SEQ ID NO: 6058517 - DNA, 25 bp, Homo sapien
gtgataagcgattaacgtgcgcgcc

SEQ ID NO: 6058518 - DNA, 25 bp, Homo sapien
ctttgatccacgagtagcgttcctg

SEQ ID NO: 6058519 - DNA, 25 bp, Homo sapien
gcgccgccaggcatcagcagacttt

SEQ ID NO: 6058520 - DNA, 25 bp, Homo sapien
ccacggtttgttgaactgaccgatg

SEQ ID NO: 6058521 - DNA, 25 bp, Homo sapien
atcaaccaaatccactggcagcaca

SEQ ID NO: 6058522 - DNA, 25 bp, Homo sapien
tatcgctgcctttgacatcgccggg

SEQ ID NO: 6058523 - DNA, 25 bp, Homo sapien
gccaaagtcgttggcaatatccggg

SEQ ID NO: 6058524 - DNA, 25 bp, Homo sapien
gtcgttggcaatatccgggaatgcg

SEQ ID NO: 6058525 - DNA, 25 bp, Homo sapien
gcagacttttctcgccaaagtcgtt

SEQ ID NO: 6058526 - DNA, 25 bp, Homo sapien
taccaggcgtggtcgacaaactcct

SEQ ID NO: 6058527 - DNA, 25 bp, Homo sapien
gcacctgctgcggatcaaccaaatc

SEQ ID NO: 6058528 - DNA, 25 bp, Homo sapien
actcaacggtcgcagcatcgccttt

SEQ ID NO: 6058529 - DNA, 25 bp, Homo sapien
tcaccgcgccgccaggcatcagcag

SEQ ID NO: 6058530 - DNA, 25 bp, Homo sapien
gttcattcagctgctgaatgttggt

SEQ ID NO: 6058531 - DNA, 25 bp, Homo sapien
ccacgggtcggtgatgccatcgaac

SEQ ID NO: 6058532 - DNA, 25 bp, Homo sapien
aacggatgacgcccgacctgatcgt

SEQ ID NO: 6058533 - DNA, 25 bp, Homo sapien
agtagcgttcctgttcattcagctg

SEQ ID NO: 6058534 - DNA, 25 bp, Homo sapien
gtcggtgatgccatcgaacggatga

SEQ ID NO: 6058535 - DNA, 25 bp, Homo sapien
tttctcgccaaagtcgttggcaata

SEQ ID NO: 6058536 - DNA, 25 bp, Homo sapien
tcgaccgactcaacggtcgcagcat

SEQ ID NO: 6058537 - DNA, 25 bp, Homo sapien
gcacaaaatgcggcctaacgttgac

SEQ ID NO: 6058538 - DNA, 25 bp, Homo sapien
cctgcggcccactgcgcttcgtgcg

SEQ ID NO: 6058539 - DNA, 25 bp, Homo sapien
gacatcatgcgatcgaccgactcaa

SEQ ID NO: 6058540 - DNA, 25 bp, Homo sapien
taccgcgccagcgtggcgctttgat

SEQ ID NO: 6058541 - DNA, 25 bp, Homo sapien
tcagctgctgaatgttggtatcgct

SEQ ID NO: 6058542 - DNA, 25 bp, Homo sapien
gccgtagctgagaacgcatttatca

SEQ ID NO: 6058543 - DNA, 25 bp, Homo sapien
ctgcggatcaaccaaatccactggc

SEQ ID NO: 6058544 - DNA, 25 bp, Homo sapien
taaggcgtcggggatcatcacgttg

SEQ ID NO: 6058545 - DNA, 25 bp, Homo sapien
agaaatactgcaacttacctgcggc

SEQ ID NO: 6058546 - DNA, 25 bp, Homo sapien
ttgggatatcgataccaggcgtggt

SEQ ID NO: 6058547 - DNA, 25 bp, Homo sapien
accagtgccgatttcgctccacggt

SEQ ID NO: 6058548 - DNA, 25 bp, Homo sapien
tccacgagtagcgttcctgttcatt

SEQ ID NO: 6058549 - DNA, 25 bp, Homo sapien
gcatcagcagacttttctcgccaaa

SEQ ID NO: 6058550 - DNA, 25 bp, Homo sapien
gcctttgtgataagcgattaacgtg

SEQ ID NO: 6058551 - DNA, 25 bp, Homo sapien
tgacgcccgacctgatcgttgggat

SEQ ID NO: 6058552 - DNA, 25 bp, Homo sapien
aacgccgacatcatgcgatcgaccg

SEQ ID NO: 6058553 - DNA, 25 bp, Homo sapien
tgttggtatcgctgcctttgacatc

SEQ ID NO: 6058554 - DNA, 25 bp, Homo sapien
atggctaaggcgtcggggatcatca

SEQ ID NO: 6058555 - DNA, 25 bp, Homo sapien
gcgtggtcgacaaactcctgcacct

SEQ ID NO: 6058556 - DNA, 25 bp, Homo sapien
gccagcgtggcgctttgatccacga

SEQ ID NO: 6058557 - DNA, 25 bp, Homo sapien
tgacatcgccggggttgtaccacgg

SEQ ID NO: 6058558 - DNA, 25 bp, Homo sapien
catcgaacggatgacgcccgacctg

SEQ ID NO: 6058559 - DNA, 25 bp, Homo sapien
aggttcaacgccgacatcatgcgat

SEQ ID NO: 6058560 - DNA, 25 bp, Homo sapien
atatcgataccaggcgtggtcgaca

SEQ ID NO: 6058561 - DNA, 25 bp, Homo sapien
gccgatttcgctccacggtttgttg

SEQ ID NO: 6058562 - DNA, 25 bp, Homo sapien
agcgattaacgtgcgcgccagcggc

SEQ ID NO: 6058563 - DNA, 25 bp, Homo sapien
gaatgcgccgtagctgagaacgcat

SEQ ID NO: 6058564 - DNA, 25 bp, Homo sapien
tgatgccatcgaacggatgacgccc

SEQ ID NO: 6058565 - DNA, 25 bp, Homo sapien
atccgggaatgcgccgtagctgaga

SEQ ID NO: 6058566 - DNA, 25 bp, Homo sapien
agcggcaggttcaacgccgacatca

SEQ ID NO: 6058567 - DNA, 25 bp, Homo sapien
caaatccactggcagcacattgttg

SEQ ID NO: 6058568 - DNA, 25 bp, Homo sapien
ggccccacttccatcgcgttaccgc

SEQ ID NO: 6058569 - DNA, 25 bp, Homo sapien
tttgttgaactgaccgatggctaag

SEQ ID NO: 6058570 - DNA, 25 bp, Homo sapien
tgcgcttcgtgcgcgcggcacaaaa

SEQ ID NO: 6058571 - DNA, 25 bp, Homo sapien
ttcgctccacggtttgttgaactga

SEQ ID NO: 6058572 - DNA, 25 bp, Homo sapien
ccggaaagcggcaggttcaacgccg

SEQ ID NO: 6058573 - DNA, 25 bp, Homo sapien
aactcctgcacctgctgcggatcaa

SEQ ID NO: 6058574 - DNA, 25 bp, Homo sapien
atgcgatcgaccgactcaacggtcg

SEQ ID NO: 6058575 - DNA, 25 bp, Homo sapien
gaagtcgccgttaatcaccgcgccg

SEQ ID NO: 6058576 - DNA, 25 bp, Homo sapien
cggtcgcagcatcgcctttgtgata

SEQ ID NO: 6058577 - DNA, 25 bp, Homo sapien
atcgcgttaccgcgccagcgtggcg

SEQ ID NO: 6058578 - DNA, 25 bp, Homo sapien
gaactgaccgatggctaaggcgtcg

SEQ ID NO: 6058579 - DNA, 25 bp, Homo sapien
cgcgcggcacaaaatgcggcctaac

SEQ ID NO: 6058580 - DNA, 25 bp, Homo sapien
acttccatcgcgttaccgcgccagc

SEQ ID NO: 6058581 - DNA, 25 bp, Homo sapien
gttgtaccacgggtcggtgatgcca

SEQ ID NO: 6058582 - DNA, 25 bp, Homo sapien
gttcctgttcattcagctgctgaat

SEQ ID NO: 6058583 - DNA, 25 bp, Homo sapien
ccgacctgatcgttgggatatcgat

SEQ ID NO: 6058584 - DNA, 25 bp, Homo sapien
cgccaggcatcagcagacttttctc

SEQ ID NO: 6058585 - DNA, 25 bp, Homo sapien
gcccactgcgcttcgtgcgcgcggc

SEQ ID NO: 6058586 - DNA, 25 bp, Homo sapien
tgcctttgacatcgccggggttgta

SEQ ID NO: 6058587 - DNA, 25 bp, Homo sapien
agcatcgcctttgtgataagcgatt

SEQ ID NO: 6058588 - DNA, 25 bp, Homo sapien
aacgcatttatcagaaagaccagtg

SEQ ID NO: 6058589 - DNA, 25 bp, Homo sapien
tgatcgttgggatatcgataccagg

SEQ ID NO: 6058590 - DNA, 25 bp, Homo sapien
gttgactggataccggaaagcggca

SEQ ID NO: 6058591 - DNA, 25 bp, Homo sapien
cgtcggggatcatcacgttgttaat

SEQ ID NO: 6058592 - DNA, 25 bp, Homo sapien
aatgcggcctaacgttgactggata

SEQ ID NO: 6058593 - DNA, 25 bp, Homo sapien
tcgacaaactcctgcacctgctgcg

SEQ ID NO: 6058594 - DNA, 25 bp, Homo sapien
gccagcggccccacttccatcgcgt

SEQ ID NO: 6058595 - DNA, 25 bp, Homo sapien
cattgttgaagtcgccgttaatcac

SEQ ID NO: 6058596 - DNA, 25 bp, Homo sapien
gtaattcagcgcctcacggaccttc

SEQ ID NO: 6058597 - DNA, 25 bp, Homo sapien
gtaaggaatggggaaagcaaactgc

SEQ ID NO: 6058598 - DNA, 25 bp, Homo sapien
atagcgtttaagatgattcgccgga

SEQ ID NO: 6058599 - DNA, 25 bp, Homo sapien
aaaaaccaatctccttgccatattt

SEQ ID NO: 6058600 - DNA, 25 bp, Homo sapien
cggtgaaatcatcgcggtcgccgga

SEQ ID NO: 6058601 - DNA, 25 bp, Homo sapien
aacggcttttgcgtcacgttcatac

SEQ ID NO: 6058602 - DNA, 25 bp, Homo sapien
tgccgcgcgggtgttgttatccgcc

SEQ ID NO: 6058603 - DNA, 25 bp, Homo sapien
ttatcgaacggcttttgcgtcacgt

SEQ ID NO: 6058604 - DNA, 25 bp, Homo sapien
aatattcttatacaggttatagcgt

SEQ ID NO: 6058605 - DNA, 25 bp, Homo sapien
gttcatactgatataacgctgcata

SEQ ID NO: 6058606 - DNA, 25 bp, Homo sapien
tcaactcgatatttttgtttttctc

SEQ ID NO: 6058607 - DNA, 25 bp, Homo sapien
cgccggatcgctggcccggtccaga

SEQ ID NO: 6058608 - DNA, 25 bp, Homo sapien
cgtcacgttcatactgatataacgc

SEQ ID NO: 6058609 - DNA, 25 bp, Homo sapien
ctttaccgttgtcggatcgatcgct

SEQ ID NO: 6058610 - DNA, 25 bp, Homo sapien
tggccatcaactcgatatttttgtt

SEQ ID NO: 6058611 - DNA, 25 bp, Homo sapien
attaataaacgctgagaacggctgt

SEQ ID NO: 6058612 - DNA, 25 bp, Homo sapien
gatcgcttccgttttagcaatattc

SEQ ID NO: 6058613 - DNA, 25 bp, Homo sapien
gcaaactgcgcttcaccggtttgca

SEQ ID NO: 6058614 - DNA, 25 bp, Homo sapien
aatcggtgccatcctggaatttaat

SEQ ID NO: 6058615 - DNA, 25 bp, Homo sapien
atccgccaccggacgccaggttatg

SEQ ID NO: 6058616 - DNA, 25 bp, Homo sapien
cctggctgccagtaacccgcgaatt

SEQ ID NO: 6058617 - DNA, 25 bp, Homo sapien
tataacgctgcataattgacggact

SEQ ID NO: 6058618 - DNA, 25 bp, Homo sapien
acgccaggttatgctgtccagtttg

SEQ ID NO: 6058619 - DNA, 25 bp, Homo sapien
aaacgctgagaacggctgtttgagg

SEQ ID NO: 6058620 - DNA, 25 bp, Homo sapien
tgattccaggtatccagttcatacg

SEQ ID NO: 6058621 - DNA, 25 bp, Homo sapien
gggaaagcaaactgcgcttcaccgg

SEQ ID NO: 6058622 - DNA, 25 bp, Homo sapien
cagcattgccgcgcgggtgttgtta

SEQ ID NO: 6058623 - DNA, 25 bp, Homo sapien
ggtttgcagcattgccgcgcgggtg

SEQ ID NO: 6058624 - DNA, 25 bp, Homo sapien
gtaatctttaccgttgtcggatcga

SEQ ID NO: 6058625 - DNA, 25 bp, Homo sapien
catatttttccagcgctgccggtga

SEQ ID NO: 6058626 - DNA, 25 bp, Homo sapien
caccggacgccaggttatgctgtcc

SEQ ID NO: 6058627 - DNA, 25 bp, Homo sapien
cgttgaaatcggtgccatcctggaa

SEQ ID NO: 6058628 - DNA, 25 bp, Homo sapien
acggactggccatcaactcgatatt

SEQ ID NO: 6058629 - DNA, 25 bp, Homo sapien
gcctcacggaccttcgggttatcga

SEQ ID NO: 6058630 - DNA, 25 bp, Homo sapien
gatatttttgtttttctccagcagt

SEQ ID NO: 6058631 - DNA, 25 bp, Homo sapien
atcatcgcggtcgccggatgggcaa

SEQ ID NO: 6058632 - DNA, 25 bp, Homo sapien
gctgtccagtttgggcaatcctggc

SEQ ID NO: 6058633 - DNA, 25 bp, Homo sapien
cagcagtgtggcctgctcgtaagga

SEQ ID NO: 6058634 - DNA, 25 bp, Homo sapien
caatctccttgccatatttttccag

SEQ ID NO: 6058635 - DNA, 25 bp, Homo sapien
tttgtttttctccagcagtgtggcc

SEQ ID NO: 6058636 - DNA, 25 bp, Homo sapien
cttttgcgtcacgttcatactgata

SEQ ID NO: 6058637 - DNA, 25 bp, Homo sapien
tccagttcatacggtccggttccca

SEQ ID NO: 6058638 - DNA, 25 bp, Homo sapien
ctgctcgtaaggaatggggaaagca

SEQ ID NO: 6058639 - DNA, 25 bp, Homo sapien
tgccatcctggaatttaatgccttc

SEQ ID NO: 6058640 - DNA, 25 bp, Homo sapien
tgcgcttcaccggtttgcagcattg

SEQ ID NO: 6058641 - DNA, 25 bp, Homo sapien
ggttatgctgtccagtttgggcaat

SEQ ID NO: 6058642 - DNA, 25 bp, Homo sapien
agaatattaataaacgctgagaacg

SEQ ID NO: 6058643 - DNA, 25 bp, Homo sapien
ttcagcgcctcacggaccttcgggt

SEQ ID NO: 6058644 - DNA, 25 bp, Homo sapien
accttcacaaaatcggtctgattcc

SEQ ID NO: 6058645 - DNA, 25 bp, Homo sapien
tcggtctgattccaggtatccagtt

SEQ ID NO: 6058646 - DNA, 25 bp, Homo sapien
agaacggctgtttgagggtaatctt

SEQ ID NO: 6058647 - DNA, 25 bp, Homo sapien
taattgacggactggccatcaactc

SEQ ID NO: 6058648 - DNA, 25 bp, Homo sapien
ggcaatcctggctgccagtaacccg

SEQ ID NO: 6058649 - DNA, 25 bp, Homo sapien
ttcaccggtttgcagcattgccgcg

SEQ ID NO: 6058650 - DNA, 25 bp, Homo sapien
ttccagcgctgccggtgaaatcatc

SEQ ID NO: 6058651 - DNA, 25 bp, Homo sapien
agtttgggcaatcctggctgccagt

SEQ ID NO: 6058652 - DNA, 25 bp, Homo sapien
atcgctggcccggtccagattcgct

SEQ ID NO: 6058653 - DNA, 25 bp, Homo sapien
cttatacaggttatagcgtttaaga

SEQ ID NO: 6058654 - DNA, 25 bp, Homo sapien
ttccgttttagcaatattcttatac

SEQ ID NO: 6058655 - DNA, 25 bp, Homo sapien
cggtcgccggatgggcaagaatatt

SEQ ID NO: 6058656 - DNA, 25 bp, Homo sapien
gttgttatccgccaccggacgccag

SEQ ID NO: 6058657 - DNA, 25 bp, Homo sapien
caccgccgcggcgttgaaatcggtg

SEQ ID NO: 6058658 - DNA, 25 bp, Homo sapien
cgctttcaccgccgcggcgttgaaa

SEQ ID NO: 6058659 - DNA, 25 bp, Homo sapien
cggatcgatcgcttccgttttagca

SEQ ID NO: 6058660 - DNA, 25 bp, Homo sapien
ggtccagattcgctttcaccgccgc

SEQ ID NO: 6058661 - DNA, 25 bp, Homo sapien
caggtatccagttcatacggtccgg

SEQ ID NO: 6058662 - DNA, 25 bp, Homo sapien
gctgcataattgacggactggccat

SEQ ID NO: 6058663 - DNA, 25 bp, Homo sapien
caggttatagcgtttaagatgattc

SEQ ID NO: 6058664 - DNA, 25 bp, Homo sapien
ccgcggcgttgaaatcggtgccatc

SEQ ID NO: 6058665 - DNA, 25 bp, Homo sapien
cgttgtcggatcgatcgcttccgtt

SEQ ID NO: 6058666 - DNA, 25 bp, Homo sapien
acaaaatcggtctgattccaggtat

SEQ ID NO: 6058667 - DNA, 25 bp, Homo sapien
agattcgctttcaccgccgcggcgt

SEQ ID NO: 6058668 - DNA, 25 bp, Homo sapien
ggaatggggaaagcaaactgcgctt

SEQ ID NO: 6058669 - DNA, 25 bp, Homo sapien
gccggatgggcaagaatattaataa

SEQ ID NO: 6058670 - DNA, 25 bp, Homo sapien
actgatataacgctgcataattgac

SEQ ID NO: 6058671 - DNA, 25 bp, Homo sapien
ttttcaccttcacaaaatcggtctg

SEQ ID NO: 6058672 - DNA, 25 bp, Homo sapien
tttagcaatattcttatacaggtta

SEQ ID NO: 6058673 - DNA, 25 bp, Homo sapien
ccttgccatatttttccagcgctgc

SEQ ID NO: 6058674 - DNA, 25 bp, Homo sapien
gcgggtgttgttatccgccaccgga

SEQ ID NO: 6058675 - DNA, 25 bp, Homo sapien
atgattcgccggatcgctggcccgg

SEQ ID NO: 6058676 - DNA, 25 bp, Homo sapien
cctggaatttaatgccttcccgcaa

SEQ ID NO: 6058677 - DNA, 25 bp, Homo sapien
cgctgccggtgaaatcatcgcggtc

SEQ ID NO: 6058678 - DNA, 25 bp, Homo sapien
gtgtggcctgctcgtaaggaatggg

SEQ ID NO: 6058679 - DNA, 25 bp, Homo sapien
tggcccggtccagattcgctttcac

SEQ ID NO: 6058680 - DNA, 25 bp, Homo sapien
tgggcaagaatattaataaacgctg

SEQ ID NO: 6058681 - DNA, 25 bp, Homo sapien
cggataaaaaccaatctccttgcca

SEQ ID NO: 6058682 - DNA, 25 bp, Homo sapien
tgccagtaacccgcgaattttttca

SEQ ID NO: 6058683 - DNA, 25 bp, Homo sapien
tttaagatgattcgccggatcgctg

SEQ ID NO: 6058684 - DNA, 25 bp, Homo sapien
tttctccagcagtgtggcctgctcg

SEQ ID NO: 6058685 - DNA, 25 bp, Homo sapien
gactgagcacggcgctcggacagac

SEQ ID NO: 6058686 - DNA, 25 bp, Homo sapien
cgtctttgatacctttaacttcgat

SEQ ID NO: 6058687 - DNA, 25 bp, Homo sapien
gcacggcgctcggacagaccctggt

SEQ ID NO: 6058688 - DNA, 25 bp, Homo sapien
agttgaacagaacgtcagacttcag

SEQ ID NO: 6058689 - DNA, 25 bp, Homo sapien
cgttgtcacaggtgttgccagtaac

SEQ ID NO: 6058690 - DNA, 25 bp, Homo sapien
ggcagtcgatcagtgcagcacgctg

SEQ ID NO: 6058691 - DNA, 25 bp, Homo sapien
ctaccagacgagaacttaagcctgc

SEQ ID NO: 6058692 - DNA, 25 bp, Homo sapien
agcagcctgaccttccggtttcagg

SEQ ID NO: 6058693 - DNA, 25 bp, Homo sapien
acttcagagtgaagtgcttggtctg

SEQ ID NO: 6058694 - DNA, 25 bp, Homo sapien
atcaggtaatcaacaacagactgag

SEQ ID NO: 6058695 - DNA, 25 bp, Homo sapien
cttcgatctctacgcgacgatccgg

SEQ ID NO: 6058696 - DNA, 25 bp, Homo sapien
tggtctgtacttccggtgccggagc

SEQ ID NO: 6058697 - DNA, 25 bp, Homo sapien
tctctacgcgacgatccggagccag

SEQ ID NO: 6058698 - DNA, 25 bp, Homo sapien
tgcggtcggtgtaacccagaacaac

SEQ ID NO: 6058699 - DNA, 25 bp, Homo sapien
ccggtgccggagctggagccggagc

SEQ ID NO: 6058700 - DNA, 25 bp, Homo sapien
atacctttggagatcaggtaatcaa

SEQ ID NO: 6058701 - DNA, 25 bp, Homo sapien
ccaggctcagcatgccgttgtccgg

SEQ ID NO: 6058702 - DNA, 25 bp, Homo sapien
agaacttaagcctgcggctgagtta

SEQ ID NO: 6058703 - DNA, 25 bp, Homo sapien
gatccaggttgctcagctggctgta

SEQ ID NO: 6058704 - DNA, 25 bp, Homo sapien
aacggtaggaaacacccaggctcag

SEQ ID NO: 6058705 - DNA, 25 bp, Homo sapien
tgcttcgccctgaccgaaacggtag

SEQ ID NO: 6058706 - DNA, 25 bp, Homo sapien
acagaacgtcagacttcagagtgaa

SEQ ID NO: 6058707 - DNA, 25 bp, Homo sapien
ctttaacttcgatctctacgcgacg

SEQ ID NO: 6058708 - DNA, 25 bp, Homo sapien
ctttcggatccaggttgctcagctg

SEQ ID NO: 6058709 - DNA, 25 bp, Homo sapien
cagctgatccagagcagcctgacct

SEQ ID NO: 6058710 - DNA, 25 bp, Homo sapien
ccctggttgtaagcgtcagaaccga

SEQ ID NO: 6058711 - DNA, 25 bp, Homo sapien
ttgctttgttgaagttgaacagaac

SEQ ID NO: 6058712 - DNA, 25 bp, Homo sapien
taatcaacaacagactgagcacggc

SEQ ID NO: 6058713 - DNA, 25 bp, Homo sapien
agtgcttggtctgtacttccggtgc

SEQ ID NO: 6058714 - DNA, 25 bp, Homo sapien
ttggagatcaggtaatcaacaacag

SEQ ID NO: 6058715 - DNA, 25 bp, Homo sapien
gtccactggtattccagacgggtag

SEQ ID NO: 6058716 - DNA, 25 bp, Homo sapien
tgttgccagtaaccgggttggattc

SEQ ID NO: 6058717 - DNA, 25 bp, Homo sapien
ttgttggtccactggtattccagac

SEQ ID NO: 6058718 - DNA, 25 bp, Homo sapien
ggttgctcagctggctgtacagctg

SEQ ID NO: 6058719 - DNA, 25 bp, Homo sapien
taagcctgcggctgagttacaacgt

SEQ ID NO: 6058720 - DNA, 25 bp, Homo sapien
tccagacgggtagcgatttcaggag

SEQ ID NO: 6058721 - DNA, 25 bp, Homo sapien
gtaggaaacacccaggctcagcatg

SEQ ID NO: 6058722 - DNA, 25 bp, Homo sapien
tcgcccataccacgtgcggagatct

SEQ ID NO: 6058723 - DNA, 25 bp, Homo sapien
ctacggaaccgtctttcggatccag

SEQ ID NO: 6058724 - DNA, 25 bp, Homo sapien
tggtattccagacgggtagcgattt

SEQ ID NO: 6058725 - DNA, 25 bp, Homo sapien
ccggagcaactactggagctgcttc

SEQ ID NO: 6058726 - DNA, 25 bp, Homo sapien
tacttccggtgccggagctggagcc

SEQ ID NO: 6058727 - DNA, 25 bp, Homo sapien
tcagcatgccgttgtccggacgagt

SEQ ID NO: 6058728 - DNA, 25 bp, Homo sapien
cagacgagaacttaagcctgcggct

SEQ ID NO: 6058729 - DNA, 25 bp, Homo sapien
cgtgcggagatcttgtctgccggga

SEQ ID NO: 6058730 - DNA, 25 bp, Homo sapien
cacaggtgttgccagtaaccgggtt

SEQ ID NO: 6058731 - DNA, 25 bp, Homo sapien
tgccgttgtccggacgagtgccgat

SEQ ID NO: 6058732 - DNA, 25 bp, Homo sapien
gtttcacgttgtcacaggtgttgcc

SEQ ID NO: 6058733 - DNA, 25 bp, Homo sapien
acaacagactgagcacggcgctcgg

SEQ ID NO: 6058734 - DNA, 25 bp, Homo sapien
gtccggacgagtgccgatggtgtgt

SEQ ID NO: 6058735 - DNA, 25 bp, Homo sapien
tcagggttgctttgttgaagttgaa

SEQ ID NO: 6058736 - DNA, 25 bp, Homo sapien
tccggtttcagggttgctttgttga

SEQ ID NO: 6058737 - DNA, 25 bp, Homo sapien
ttgtctgccgggatacctttggaga

SEQ ID NO: 6058738 - DNA, 25 bp, Homo sapien
aaccgtctttcggatccaggttgct

SEQ ID NO: 6058739 - DNA, 25 bp, Homo sapien
ccgggttggattcgcccataccacg

SEQ ID NO: 6058740 - DNA, 25 bp, Homo sapien
gacagaccctggttgtaagcgtcag

SEQ ID NO: 6058741 - DNA, 25 bp, Homo sapien
cacgctgtttcacgttgtcacaggt

SEQ ID NO: 6058742 - DNA, 25 bp, Homo sapien
ctgaccttccggtttcagggttgct

SEQ ID NO: 6058743 - DNA, 25 bp, Homo sapien
gagccaggcagtcgatcagtgcagc

SEQ ID NO: 6058744 - DNA, 25 bp, Homo sapien
cgcgacgatccggagccaggcagtc

SEQ ID NO: 6058745 - DNA, 25 bp, Homo sapien
ttggattcgcccataccacgtgcgg

SEQ ID NO: 6058746 - DNA, 25 bp, Homo sapien
aaacacccaggctcagcatgccgtt

SEQ ID NO: 6058747 - DNA, 25 bp, Homo sapien
aaccgatgcggtcggtgtaacccag

SEQ ID NO: 6058748 - DNA, 25 bp, Homo sapien
cgtcagaaccgatgcggtcggtgta

SEQ ID NO: 6058749 - DNA, 25 bp, Homo sapien
cgagtgccgatggtgtgtgcgtcac

SEQ ID NO: 6058750 - DNA, 25 bp, Homo sapien
cagtaaccgggttggattcgcccat

SEQ ID NO: 6058751 - DNA, 25 bp, Homo sapien
ataccacgtgcggagatcttgtctg

SEQ ID NO: 6058752 - DNA, 25 bp, Homo sapien
gtgcagcacgctgtttcacgttgtc

SEQ ID NO: 6058753 - DNA, 25 bp, Homo sapien
ccggagctggagccggagcaactac

SEQ ID NO: 6058754 - DNA, 25 bp, Homo sapien
gatccggagccaggcagtcgatcag

SEQ ID NO: 6058755 - DNA, 25 bp, Homo sapien
atccagagcagcctgaccttccggt

SEQ ID NO: 6058756 - DNA, 25 bp, Homo sapien
gagatcttgtctgccgggatacctt

SEQ ID NO: 6058757 - DNA, 25 bp, Homo sapien
tgcggctgagttacaacgtctttga

SEQ ID NO: 6058758 - DNA, 25 bp, Homo sapien
gtgtgtgcgtcaccgatgttgttgg

SEQ ID NO: 6058759 - DNA, 25 bp, Homo sapien
tgagttacaacgtctttgatacctt

SEQ ID NO: 6058760 - DNA, 25 bp, Homo sapien
gctgtacagctgatccagagcagcc

SEQ ID NO: 6058761 - DNA, 25 bp, Homo sapien
gccgggatacctttggagatcaggt

SEQ ID NO: 6058762 - DNA, 25 bp, Homo sapien
tgttgaagttgaacagaacgtcaga

SEQ ID NO: 6058763 - DNA, 25 bp, Homo sapien
gcgtcaccgatgttgttggtccact

SEQ ID NO: 6058764 - DNA, 25 bp, Homo sapien
gagtgaagtgcttggtctgtacttc

SEQ ID NO: 6058765 - DNA, 25 bp, Homo sapien
ccgatggtgtgtgcgtcaccgatgt

SEQ ID NO: 6058766 - DNA, 25 bp, Homo sapien
tgatacctttaacttcgatctctac

SEQ ID NO: 6058767 - DNA, 25 bp, Homo sapien
ctggagccggagcaactactggagc

SEQ ID NO: 6058768 - DNA, 25 bp, Homo sapien
cgatcagtgcagcacgctgtttcac

SEQ ID NO: 6058769 - DNA, 25 bp, Homo sapien
caactactggagctgcttcgccctg

SEQ ID NO: 6058770 - DNA, 25 bp, Homo sapien
cgtcagacttcagagtgaagtgctt

SEQ ID NO: 6058771 - DNA, 25 bp, Homo sapien
cgctcggacagaccctggttgtaag

SEQ ID NO: 6058772 - DNA, 25 bp, Homo sapien
ccgatgttgttggtccactggtatt

SEQ ID NO: 6058773 - DNA, 25 bp, Homo sapien
tgtaagcgtcagaaccgatgcggtc

SEQ ID NO: 6058774 - DNA, 25 bp, Homo sapien
ctggagctgcttcgccctgaccgaa

SEQ ID NO: 6058775 - DNA, 25 bp, Homo sapien
cagctggctgtacagctgatccaga

SEQ ID NO: 6058776 - DNA, 25 bp, Homo sapien
ggcaggatcgtccttaccaccaata

SEQ ID NO: 6058777 - DNA, 25 bp, Homo sapien
tacacttcgttccagcgcagcgcgt

SEQ ID NO: 6058778 - DNA, 25 bp, Homo sapien
aagcagttggcagatccggttgcgc

SEQ ID NO: 6058779 - DNA, 25 bp, Homo sapien
tgcggcgatcgacgggcagacttcc

SEQ ID NO: 6058780 - DNA, 25 bp, Homo sapien
caccagcgaggatccacgcttcgga

SEQ ID NO: 6058781 - DNA, 25 bp, Homo sapien
cgttatcaatcaccgtgatttcaat

SEQ ID NO: 6058782 - DNA, 25 bp, Homo sapien
gatccggttgcgctttccacagcgc

SEQ ID NO: 6058783 - DNA, 25 bp, Homo sapien
cataaaggaggtgccgccctgcaga

SEQ ID NO: 6058784 - DNA, 25 bp, Homo sapien
ggcagtttcggcagggagtgcggtg

SEQ ID NO: 6058785 - DNA, 25 bp, Homo sapien
aacgtcgaggatcggtttctcttct

SEQ ID NO: 6058786 - DNA, 25 bp, Homo sapien
gcgcagcgcgtctttaaacgctggc

SEQ ID NO: 6058787 - DNA, 25 bp, Homo sapien
cttcggaagcagttggcagatccgg

SEQ ID NO: 6058788 - DNA, 25 bp, Homo sapien
caatcaccgtgatttcaatgtcgtg

SEQ ID NO: 6058789 - DNA, 25 bp, Homo sapien
ggctgaagacggtatggtgcgcgcc

SEQ ID NO: 6058790 - DNA, 25 bp, Homo sapien
gcggcagttttccagtcgccttcgc

SEQ ID NO: 6058791 - DNA, 25 bp, Homo sapien
atgctgaacgtcgaggatcggtttc

SEQ ID NO: 6058792 - DNA, 25 bp, Homo sapien
tcgaagtgataggtgtagtcctcca

SEQ ID NO: 6058793 - DNA, 25 bp, Homo sapien
ttggcagatccggttgcgctttcca

SEQ ID NO: 6058794 - DNA, 25 bp, Homo sapien
ttttccagtcgccttcgcccgcaaa

SEQ ID NO: 6058795 - DNA, 25 bp, Homo sapien
cggcgaattggcgcatatcgttgag

SEQ ID NO: 6058796 - DNA, 25 bp, Homo sapien
tattgaagatcaggcgggcaggatc

SEQ ID NO: 6058797 - DNA, 25 bp, Homo sapien
cgcgtctttaaacgctggcaggcgt

SEQ ID NO: 6058798 - DNA, 25 bp, Homo sapien
cctttctcgaagtgataggtgtagt

SEQ ID NO: 6058799 - DNA, 25 bp, Homo sapien
cttaccaccaataccgagatgctga

SEQ ID NO: 6058800 - DNA, 25 bp, Homo sapien
gtgcatggctgaagacggtatggtg

SEQ ID NO: 6058801 - DNA, 25 bp, Homo sapien
ccagtagacggtaacgatcgccgag

SEQ ID NO: 6058802 - DNA, 25 bp, Homo sapien
gcattcgccaccggcagtttcggca

SEQ ID NO: 6058803 - DNA, 25 bp, Homo sapien
ccgtaatacacttcgttccagcgca

SEQ ID NO: 6058804 - DNA, 25 bp, Homo sapien
gcaggcgtgtgtcgttatcaatcac

SEQ ID NO: 6058805 - DNA, 25 bp, Homo sapien
gacttccagcatatgggagccgagc

SEQ ID NO: 6058806 - DNA, 25 bp, Homo sapien
agacggtatggtgcgcgccaccagc

SEQ ID NO: 6058807 - DNA, 25 bp, Homo sapien
gttttcaccgtgtcgatgcagttaa

SEQ ID NO: 6058808 - DNA, 25 bp, Homo sapien
tttgggtattgaagatcaggcgggc

SEQ ID NO: 6058809 - DNA, 25 bp, Homo sapien
ctttccacagcgcattcgccaccgg

SEQ ID NO: 6058810 - DNA, 25 bp, Homo sapien
cagcatatgggagccgagcaccagg

SEQ ID NO: 6058811 - DNA, 25 bp, Homo sapien
tttcaatgtcgtgcatctcggcgaa

SEQ ID NO: 6058812 - DNA, 25 bp, Homo sapien
agcagggcggcagttttccagtcgc

SEQ ID NO: 6058813 - DNA, 25 bp, Homo sapien
gcgacaatcgctgggccggtttggg

SEQ ID NO: 6058814 - DNA, 25 bp, Homo sapien
atcaatcaagctggcgacaatcgct

SEQ ID NO: 6058815 - DNA, 25 bp, Homo sapien
cgaggatccacgcttcggaagcagt

SEQ ID NO: 6058816 - DNA, 25 bp, Homo sapien
atgcgaagcagggcggcagttttcc

SEQ ID NO: 6058817 - DNA, 25 bp, Homo sapien
cgttgaggttcagtgcatggctgaa

SEQ ID NO: 6058818 - DNA, 25 bp, Homo sapien
gtgtagtcctccataaaggaggtgc

SEQ ID NO: 6058819 - DNA, 25 bp, Homo sapien
caggcgggcaggatcgtccttacca

SEQ ID NO: 6058820 - DNA, 25 bp, Homo sapien
agggagtgcggtgttttcaccgtgt

SEQ ID NO: 6058821 - DNA, 25 bp, Homo sapien
gccgagatcaatcaagctggcgaca

SEQ ID NO: 6058822 - DNA, 25 bp, Homo sapien
ccgagcaccaggtcattacctttct

SEQ ID NO: 6058823 - DNA, 25 bp, Homo sapien
tcattacctttctcgaagtgatagg

SEQ ID NO: 6058824 - DNA, 25 bp, Homo sapien
accgagatgctgaacgtcgaggatc

SEQ ID NO: 6058825 - DNA, 25 bp, Homo sapien
gcatctcggcgaattggcgcatatc

SEQ ID NO: 6058826 - DNA, 25 bp, Homo sapien
atggtgcgcgccaccagcgaggatc

SEQ ID NO: 6058827 - DNA, 25 bp, Homo sapien
ggttcagtgcatggctgaagacggt

SEQ ID NO: 6058828 - DNA, 25 bp, Homo sapien
cctgcagaccggttgacatcacctt

SEQ ID NO: 6058829 - DNA, 25 bp, Homo sapien
cgttccagcgcagcgcgtctttaaa

SEQ ID NO: 6058830 - DNA, 25 bp, Homo sapien
caagctggcgacaatcgctgggccg

SEQ ID NO: 6058831 - DNA, 25 bp, Homo sapien
tccacgcttcggaagcagttggcag

SEQ ID NO: 6058832 - DNA, 25 bp, Homo sapien
cggtttctcttctgcggcgatcgac

SEQ ID NO: 6058833 - DNA, 25 bp, Homo sapien
accaggtcattacctttctcgaagt

SEQ ID NO: 6058834 - DNA, 25 bp, Homo sapien
cgggcagacttccagcatatgggag

SEQ ID NO: 6058835 - DNA, 25 bp, Homo sapien
gatcgacgggcagacttccagcata

SEQ ID NO: 6058836 - DNA, 25 bp, Homo sapien
cgcgccaccagcgaggatccacgct

SEQ ID NO: 6058837 - DNA, 25 bp, Homo sapien
tttaaacgctggcaggcgtgtgtcg

SEQ ID NO: 6058838 - DNA, 25 bp, Homo sapien
accgtgtcgatgcagttaaccagta

SEQ ID NO: 6058839 - DNA, 25 bp, Homo sapien
acgctggcaggcgtgtgtcgttatc

SEQ ID NO: 6058840 - DNA, 25 bp, Homo sapien
tcctccataaaggaggtgccgccct

SEQ ID NO: 6058841 - DNA, 25 bp, Homo sapien
tgataggtgtagtcctccataaagg

SEQ ID NO: 6058842 - DNA, 25 bp, Homo sapien
acagcgcattcgccaccggcagttt

SEQ ID NO: 6058843 - DNA, 25 bp, Homo sapien
acgatcgccgagatcaatcaagctg

SEQ ID NO: 6058844 - DNA, 25 bp, Homo sapien
tgtcgtgcatctcggcgaattggcg

SEQ ID NO: 6058845 - DNA, 25 bp, Homo sapien
attggcgcatatcgttgaggttcag

SEQ ID NO: 6058846 - DNA, 25 bp, Homo sapien
ggttgacatcaccttcatgatgcga

SEQ ID NO: 6058847 - DNA, 25 bp, Homo sapien
ttcggcagggagtgcggtgttttca

SEQ ID NO: 6058848 - DNA, 25 bp, Homo sapien
aagatcaggcgggcaggatcgtcct

SEQ ID NO: 6058849 - DNA, 25 bp, Homo sapien
ggaggtgccgccctgcagaccggtt

SEQ ID NO: 6058850 - DNA, 25 bp, Homo sapien
gcatatcgttgaggttcagtgcatg

SEQ ID NO: 6058851 - DNA, 25 bp, Homo sapien
gttgcgctttccacagcgcattcgc

SEQ ID NO: 6058852 - DNA, 25 bp, Homo sapien
ctcttctgcggcgatcgacgggcag

SEQ ID NO: 6058853 - DNA, 25 bp, Homo sapien
gaggatcggtttctcttctgcggcg

SEQ ID NO: 6058854 - DNA, 25 bp, Homo sapien
atcgtccttaccaccaataccgaga

SEQ ID NO: 6058855 - DNA, 25 bp, Homo sapien
gacggtaacgatcgccgagatcaat

SEQ ID NO: 6058856 - DNA, 25 bp, Homo sapien
tgcggtgttttcaccgtgtcgatgc

SEQ ID NO: 6058857 - DNA, 25 bp, Homo sapien
tgggagccgagcaccaggtcattac

SEQ ID NO: 6058858 - DNA, 25 bp, Homo sapien
cttcatgatgcgaagcagggcggca

SEQ ID NO: 6058859 - DNA, 25 bp, Homo sapien
gccaccggcagtttcggcagggagt

SEQ ID NO: 6058860 - DNA, 25 bp, Homo sapien
tgccgccctgcagaccggttgacat

SEQ ID NO: 6058861 - DNA, 25 bp, Homo sapien
tcgatgcagttaaccagtagacggt

SEQ ID NO: 6058862 - DNA, 25 bp, Homo sapien
cagttaaccagtagacggtaacgat

SEQ ID NO: 6058863 - DNA, 25 bp, Homo sapien
cagaccggttgacatcaccttcatg

SEQ ID NO: 6058864 - DNA, 25 bp, Homo sapien
tcgctgggccggtttgggtattgaa

SEQ ID NO: 6058865 - DNA, 25 bp, Homo sapien
gtgtgtcgttatcaatcaccgtgat

SEQ ID NO: 6058866 - DNA, 25 bp, Homo sapien
ccgtgatttcaatgtcgtgcatctc

SEQ ID NO: 6058867 - DNA, 25 bp, Homo sapien
accaataccgagatgctgaacgtcg

SEQ ID NO: 6058868 - DNA, 25 bp, Homo sapien
catcaccttcatgatgcgaagcagg

SEQ ID NO: 6058869 - DNA, 25 bp, Homo sapien
ggccggtttgggtattgaagatcag

SEQ ID NO: 6058870 - DNA, 25 bp, Homo sapien
caccgtcaatgcagcgcctttattg

SEQ ID NO: 6058871 - DNA, 25 bp, Homo sapien
gcgccccgagaatatgctgcatctc

SEQ ID NO: 6058872 - DNA, 25 bp, Homo sapien
tggcatttttttgacatcgattatc

SEQ ID NO: 6058873 - DNA, 25 bp, Homo sapien
caccttccagagaatgcacgcgcgt

SEQ ID NO: 6058874 - DNA, 25 bp, Homo sapien
ataataaatccgctaccgacgctga

SEQ ID NO: 6058875 - DNA, 25 bp, Homo sapien
catttcgcgatcgttcatcgcatca

SEQ ID NO: 6058876 - DNA, 25 bp, Homo sapien
accggtaaatgcgggagctccgcgc

SEQ ID NO: 6058877 - DNA, 25 bp, Homo sapien
gagctccgcgcgcagttgcggcatc

SEQ ID NO: 6058878 - DNA, 25 bp, Homo sapien
aatgtgcacgctcgcctaatgcttc

SEQ ID NO: 6058879 - DNA, 25 bp, Homo sapien
tgatacagcaccagctccgcgacat

SEQ ID NO: 6058880 - DNA, 25 bp, Homo sapien
catccagcgatagcgccccgagaat

SEQ ID NO: 6058881 - DNA, 25 bp, Homo sapien
ttccgttgccggtaatcaaatacgc

SEQ ID NO: 6058882 - DNA, 25 bp, Homo sapien
ccagagaatgcacgcgcgttccgtt

SEQ ID NO: 6058883 - DNA, 25 bp, Homo sapien
ccaccggcagcacttcgaggcaatc

SEQ ID NO: 6058884 - DNA, 25 bp, Homo sapien
gatgtaaaagttcaccttccagaga

SEQ ID NO: 6058885 - DNA, 25 bp, Homo sapien
cgcaacgataaacctaaatgttggg

SEQ ID NO: 6058886 - DNA, 25 bp, Homo sapien
catcacgatgtaaaagttcaccttc

SEQ ID NO: 6058887 - DNA, 25 bp, Homo sapien
cgcgcgttccgttgccggtaatcaa

SEQ ID NO: 6058888 - DNA, 25 bp, Homo sapien
ccgtggcggaaaaacacaaatgtgc

SEQ ID NO: 6058889 - DNA, 25 bp, Homo sapien
gcctaatgcttcgtatagctggatc

SEQ ID NO: 6058890 - DNA, 25 bp, Homo sapien
aaagttcaccttccagagaatgcac

SEQ ID NO: 6058891 - DNA, 25 bp, Homo sapien
ttttttgacatcgattatctgataa

SEQ ID NO: 6058892 - DNA, 25 bp, Homo sapien
gataaacctaaatgttgggtcagca

SEQ ID NO: 6058893 - DNA, 25 bp, Homo sapien
gagaatatgctgcatctccagcgca

SEQ ID NO: 6058894 - DNA, 25 bp, Homo sapien
gtatcccattgctgatacagcacca

SEQ ID NO: 6058895 - DNA, 25 bp, Homo sapien
cgtcattgaagatatgcatgctggc

SEQ ID NO: 6058896 - DNA, 25 bp, Homo sapien
aagatcgtcgtgatcgccacagaag

SEQ ID NO: 6058897 - DNA, 25 bp, Homo sapien
gattatctgataacgaaaaccgcta

SEQ ID NO: 6058898 - DNA, 25 bp, Homo sapien
cgcatcaccaaaggccatgcaatcg

SEQ ID NO: 6058899 - DNA, 25 bp, Homo sapien
gtatagctggatctgcaagcgtgta

SEQ ID NO: 6058900 - DNA, 25 bp, Homo sapien
atcgccacagaagcagatcttggtg

SEQ ID NO: 6058901 - DNA, 25 bp, Homo sapien
caccagctccgcgacatccgcaggt

SEQ ID NO: 6058902 - DNA, 25 bp, Homo sapien
gccatgcaatcgcgcaacgataaac

SEQ ID NO: 6058903 - DNA, 25 bp, Homo sapien
aatgcacgcgcgttccgttgccggt

SEQ ID NO: 6058904 - DNA, 25 bp, Homo sapien
ctggatctgcaagcgtgtaagatcg

SEQ ID NO: 6058905 - DNA, 25 bp, Homo sapien
aaatgcctgcaacaacgcagggatc

SEQ ID NO: 6058906 - DNA, 25 bp, Homo sapien
aaatacgcatccagcgatagcgccc

SEQ ID NO: 6058907 - DNA, 25 bp, Homo sapien
ctgcaagcgtgtaagatcgtcgtga

SEQ ID NO: 6058908 - DNA, 25 bp, Homo sapien
cgacatccgcaggtaaatcatcacg

SEQ ID NO: 6058909 - DNA, 25 bp, Homo sapien
cttggtgacgctgccgagtggcatt

SEQ ID NO: 6058910 - DNA, 25 bp, Homo sapien
tgaagatatgcatgctggctcgggt

SEQ ID NO: 6058911 - DNA, 25 bp, Homo sapien
aaatgcgggagctccgcgcgcagtt

SEQ ID NO: 6058912 - DNA, 25 bp, Homo sapien
atagacaaatgcctgcaacaacgca

SEQ ID NO: 6058913 - DNA, 25 bp, Homo sapien
tccgcgcgcagttgcggcatcgcat

SEQ ID NO: 6058914 - DNA, 25 bp, Homo sapien
tttattgcagcccaccggcagcact

SEQ ID NO: 6058915 - DNA, 25 bp, Homo sapien
atgctggctcgggtatcccattgct

SEQ ID NO: 6058916 - DNA, 25 bp, Homo sapien
gttgccggtaatcaaatacgcatcc

SEQ ID NO: 6058917 - DNA, 25 bp, Homo sapien
cggaaaaacacaaatgtgcacgctc

SEQ ID NO: 6058918 - DNA, 25 bp, Homo sapien
ccgcaggtaaatcatcacgatgtaa

SEQ ID NO: 6058919 - DNA, 25 bp, Homo sapien
caatcgcgcaacgataaacctaaat

SEQ ID NO: 6058920 - DNA, 25 bp, Homo sapien
cgatagcgccccgagaatatgctgc

SEQ ID NO: 6058921 - DNA, 25 bp, Homo sapien
gtcgtgatcgccacagaagcagatc

SEQ ID NO: 6058922 - DNA, 25 bp, Homo sapien
atgttgggtcagcaccgtcaatgca

SEQ ID NO: 6058923 - DNA, 25 bp, Homo sapien
ggcaatccgtggcggaaaaacacaa

SEQ ID NO: 6058924 - DNA, 25 bp, Homo sapien
cttcgaggcaatccgtggcggaaaa

SEQ ID NO: 6058925 - DNA, 25 bp, Homo sapien
cgctaccgacgctgactaacatttc

SEQ ID NO: 6058926 - DNA, 25 bp, Homo sapien
gccgagtggcatttttttgacatcg

SEQ ID NO: 6058927 - DNA, 25 bp, Homo sapien
ctgcaacaacgcagggatctctttc

SEQ ID NO: 6058928 - DNA, 25 bp, Homo sapien
caacgcagggatctctttcccggta

SEQ ID NO: 6058929 - DNA, 25 bp, Homo sapien
aacacaaatgtgcacgctcgcctaa

SEQ ID NO: 6058930 - DNA, 25 bp, Homo sapien
gctcgggtatcccattgctgataca

SEQ ID NO: 6058931 - DNA, 25 bp, Homo sapien
gctccgcgacatccgcaggtaaatc

SEQ ID NO: 6058932 - DNA, 25 bp, Homo sapien
tgactaacatttcgcgatcgttcat

SEQ ID NO: 6058933 - DNA, 25 bp, Homo sapien
aaatccgctaccgacgctgactaac

SEQ ID NO: 6058934 - DNA, 25 bp, Homo sapien
ggtaatcaaatacgcatccagcgat

SEQ ID NO: 6058935 - DNA, 25 bp, Homo sapien
gcgtgtaagatcgtcgtgatcgcca

SEQ ID NO: 6058936 - DNA, 25 bp, Homo sapien
gcagatcttggtgacgctgccgagt

SEQ ID NO: 6058937 - DNA, 25 bp, Homo sapien
gcagcccaccggcagcacttcgagg

SEQ ID NO: 6058938 - DNA, 25 bp, Homo sapien
gcagcacttcgaggcaatccgtggc

SEQ ID NO: 6058939 - DNA, 25 bp, Homo sapien
caatgcagcgcctttattgcagccc

SEQ ID NO: 6058940 - DNA, 25 bp, Homo sapien
tatgcatgctggctcgggtatccca

SEQ ID NO: 6058941 - DNA, 25 bp, Homo sapien
cgacgctgactaacatttcgcgatc

SEQ ID NO: 6058942 - DNA, 25 bp, Homo sapien
cctaaatgttgggtcagcaccgtca

SEQ ID NO: 6058943 - DNA, 25 bp, Homo sapien
cattgctgatacagcaccagctccg

SEQ ID NO: 6058944 - DNA, 25 bp, Homo sapien
tgcttcgtatagctggatctgcaag

SEQ ID NO: 6058945 - DNA, 25 bp, Homo sapien
cgcagttgcggcatcgcattgccca

SEQ ID NO: 6058946 - DNA, 25 bp, Homo sapien
gtaaatcatcacgatgtaaaagttc

SEQ ID NO: 6058947 - DNA, 25 bp, Homo sapien
ctgataacgaaaaccgctatagaca

SEQ ID NO: 6058948 - DNA, 25 bp, Homo sapien
ccaaaggccatgcaatcgcgcaacg

SEQ ID NO: 6058949 - DNA, 25 bp, Homo sapien
taaaccaaccgtcgtcattgaagat

SEQ ID NO: 6058950 - DNA, 25 bp, Homo sapien
ggtcagcaccgtcaatgcagcgcct

SEQ ID NO: 6058951 - DNA, 25 bp, Homo sapien
agcgcctttattgcagcccaccggc

SEQ ID NO: 6058952 - DNA, 25 bp, Homo sapien
gcgatcgttcatcgcatcaccaaag

SEQ ID NO: 6058953 - DNA, 25 bp, Homo sapien
gacatcgattatctgataacgaaaa

SEQ ID NO: 6058954 - DNA, 25 bp, Homo sapien
acgctcgcctaatgcttcgtatagc

SEQ ID NO: 6058955 - DNA, 25 bp, Homo sapien
acgaaaaccgctatagacaaatgcc

SEQ ID NO: 6058956 - DNA, 25 bp, Homo sapien
gttcatcgcatcaccaaaggccatg

SEQ ID NO: 6058957 - DNA, 25 bp, Homo sapien
aaccgtcgtcattgaagatatgcat

SEQ ID NO: 6058958 - DNA, 25 bp, Homo sapien
ttgcccataataaatccgctaccga

SEQ ID NO: 6058959 - DNA, 25 bp, Homo sapien
gacgctgccgagtggcatttttttg

SEQ ID NO: 6058960 - DNA, 25 bp, Homo sapien
accgctatagacaaatgcctgcaac

SEQ ID NO: 6058961 - DNA, 25 bp, Homo sapien
acagaagcagatcttggtgacgctg

SEQ ID NO: 6058962 - DNA, 25 bp, Homo sapien
atcgcattgcccataataaatccgc

SEQ ID NO: 6058963 - DNA, 25 bp, Homo sapien
tgcggcatcgcattgcccataataa

SEQ ID NO: 6058964 - DNA, 25 bp, Homo sapien
agaccggcaatcgcgccagaacacg

SEQ ID NO: 6058965 - DNA, 25 bp, Homo sapien
cgtcagatccgccaatttgtagccg

SEQ ID NO: 6058966 - DNA, 25 bp, Homo sapien
gacaatgccacaaacgccgtgcaca

SEQ ID NO: 6058967 - DNA, 25 bp, Homo sapien
ccccaatgtagccgcaggctggcgt

SEQ ID NO: 6058968 - DNA, 25 bp, Homo sapien
ctggcggcaaaaatcccggtcatga

SEQ ID NO: 6058969 - DNA, 25 bp, Homo sapien
acacgcccccagcagtgaaggctta

SEQ ID NO: 6058970 - DNA, 25 bp, Homo sapien
attcgccgtgcccgctgacccggcg

SEQ ID NO: 6058971 - DNA, 25 bp, Homo sapien
cacaccttcagcgaagcccacgccg

SEQ ID NO: 6058972 - DNA, 25 bp, Homo sapien
gcagcaagcgtttgagcatggtaac

SEQ ID NO: 6058973 - DNA, 25 bp, Homo sapien
cgccaaccccaatgtagccgcaggc

SEQ ID NO: 6058974 - DNA, 25 bp, Homo sapien
gccacaaacgccgtgcacaccgaag

SEQ ID NO: 6058975 - DNA, 25 bp, Homo sapien
tgacatccagcccttctcgctcctg

SEQ ID NO: 6058976 - DNA, 25 bp, Homo sapien
tgccagtgccgcgatttcattcgcc

SEQ ID NO: 6058977 - DNA, 25 bp, Homo sapien
gcaggctggcgtcacgccgaccaga

SEQ ID NO: 6058978 - DNA, 25 bp, Homo sapien
agcgcccattcaccgaagatccagc

SEQ ID NO: 6058979 - DNA, 25 bp, Homo sapien
gctcctgctcttccggtacacgcag

SEQ ID NO: 6058980 - DNA, 25 bp, Homo sapien
tgagcatggtaacgccccacaagcc

SEQ ID NO: 6058981 - DNA, 25 bp, Homo sapien
cacgccgaccagaccggcaatcgcg

SEQ ID NO: 6058982 - DNA, 25 bp, Homo sapien
cgaagcccacgccgcccagcgagct

SEQ ID NO: 6058983 - DNA, 25 bp, Homo sapien
agcgtttgagcatggtaacgcccca

SEQ ID NO: 6058984 - DNA, 25 bp, Homo sapien
caatttgtagccgataaatgccaca

SEQ ID NO: 6058985 - DNA, 25 bp, Homo sapien
gtgccgcgatttcattcgccgtgcc

SEQ ID NO: 6058986 - DNA, 25 bp, Homo sapien
cgcccagcgagctggcggcaaaaat

SEQ ID NO: 6058987 - DNA, 25 bp, Homo sapien
cccagcagtgaaggcttaccacgca

SEQ ID NO: 6058988 - DNA, 25 bp, Homo sapien
tgtagccgataaatgccacaacacc

SEQ ID NO: 6058989 - DNA, 25 bp, Homo sapien
gatttcattcgccgtgcccgctgac

SEQ ID NO: 6058990 - DNA, 25 bp, Homo sapien
gtaatggcgatgctttccagctgta

SEQ ID NO: 6058991 - DNA, 25 bp, Homo sapien
agtgaaggcttaccacgcagcgccc

SEQ ID NO: 6058992 - DNA, 25 bp, Homo sapien
gccagaacacgcccccagcagtgaa

SEQ ID NO: 6058993 - DNA, 25 bp, Homo sapien
ttataggcattctcgccgtggctgt

SEQ ID NO: 6058994 - DNA, 25 bp, Homo sapien
catcgtcacaccttcagcgaagccc

SEQ ID NO: 6058995 - DNA, 25 bp, Homo sapien
cacgcagaccaaccgtcagatccgc

SEQ ID NO: 6058996 - DNA, 25 bp, Homo sapien
atacagccgacaatgccacaaacgc

SEQ ID NO: 6058997 - DNA, 25 bp, Homo sapien
atccgccaatttgtagccgataaat

SEQ ID NO: 6058998 - DNA, 25 bp, Homo sapien
tggcgtcacgccgaccagaccggca

SEQ ID NO: 6058999 - DNA, 25 bp, Homo sapien
acaagcccgccagaccagctaccac

SEQ ID NO: 6059000 - DNA, 25 bp, Homo sapien
cgccgataatcaacgcgccgccaac

SEQ ID NO: 6059001 - DNA, 25 bp, Homo sapien
aatcgcgccagaacacgcccccagc

SEQ ID NO: 6059002 - DNA, 25 bp, Homo sapien
cacccgcagcaagcgtttgagcatg

SEQ ID NO: 6059003 - DNA, 25 bp, Homo sapien
cggtacacgcagaccaaccgtcaga

SEQ ID NO: 6059004 - DNA, 25 bp, Homo sapien
ttcagcgaagcccacgccgcccagc

SEQ ID NO: 6059005 - DNA, 25 bp, Homo sapien
accaaccgtcagatccgccaatttg

SEQ ID NO: 6059006 - DNA, 25 bp, Homo sapien
cgataaatgccacaacaccggacca

SEQ ID NO: 6059007 - DNA, 25 bp, Homo sapien
atggcccatcgtcacaccttcagcg

SEQ ID NO: 6059008 - DNA, 25 bp, Homo sapien
tcgccgtggctgttgacatccagcc

SEQ ID NO: 6059009 - DNA, 25 bp, Homo sapien
aaacgccgtgcacaccgaagacatc

SEQ ID NO: 6059010 - DNA, 25 bp, Homo sapien
cttctcgctcctgctcttccggtac

SEQ ID NO: 6059011 - DNA, 25 bp, Homo sapien
gcagggatcatccacccgcagcaag

SEQ ID NO: 6059012 - DNA, 25 bp, Homo sapien
cgaagatccagccaagaattgccgc

SEQ ID NO: 6059013 - DNA, 25 bp, Homo sapien
accagcaactgatggcccatcgtca

SEQ ID NO: 6059014 - DNA, 25 bp, Homo sapien
aatcccggtcatgatacagccgaca

SEQ ID NO: 6059015 - DNA, 25 bp, Homo sapien
gcgagctggcggcaaaaatcccggt

SEQ ID NO: 6059016 - DNA, 25 bp, Homo sapien
agtattcacaaatgccagtgccgcg

SEQ ID NO: 6059017 - DNA, 25 bp, Homo sapien
ctcttccggtacacgcagaccaacc

SEQ ID NO: 6059018 - DNA, 25 bp, Homo sapien
attcaccgaagatccagccaagaat

SEQ ID NO: 6059019 - DNA, 25 bp, Homo sapien
ttaaagccaaaccaaccgatataga

SEQ ID NO: 6059020 - DNA, 25 bp, Homo sapien
gaccacagtattcacaaatgccagt

SEQ ID NO: 6059021 - DNA, 25 bp, Homo sapien
ccaagaattgccgccgccgttgcga

SEQ ID NO: 6059022 - DNA, 25 bp, Homo sapien
cgttgcgaccacagtattcacaaat

SEQ ID NO: 6059023 - DNA, 25 bp, Homo sapien
taatcaacgcgccgccaaccccaat

SEQ ID NO: 6059024 - DNA, 25 bp, Homo sapien
tccagcccttctcgctcctgctctt

SEQ ID NO: 6059025 - DNA, 25 bp, Homo sapien
attgccgccgccgttgcgaccacag

SEQ ID NO: 6059026 - DNA, 25 bp, Homo sapien
caccgaagacatcgcagggatcatc

SEQ ID NO: 6059027 - DNA, 25 bp, Homo sapien
cacaaatgccagtgccgcgatttca

SEQ ID NO: 6059028 - DNA, 25 bp, Homo sapien
ggcttaccacgcagcgcccattcac

SEQ ID NO: 6059029 - DNA, 25 bp, Homo sapien
gccaaaccaaccgatatagagaatg

SEQ ID NO: 6059030 - DNA, 25 bp, Homo sapien
gacgatcgtaatggcgatgctttcc

SEQ ID NO: 6059031 - DNA, 25 bp, Homo sapien
cgtgcacaccgaagacatcgcaggg

SEQ ID NO: 6059032 - DNA, 25 bp, Homo sapien
atgccacaacaccggaccagacgat

SEQ ID NO: 6059033 - DNA, 25 bp, Homo sapien
tgtagccgcaggctggcgtcacgcc

SEQ ID NO: 6059034 - DNA, 25 bp, Homo sapien
atccagccaagaattgccgccgccg

SEQ ID NO: 6059035 - DNA, 25 bp, Homo sapien
ctttccagctgtaccagcaactgat

SEQ ID NO: 6059036 - DNA, 25 bp, Homo sapien
agacatcgcagggatcatccacccg

SEQ ID NO: 6059037 - DNA, 25 bp, Homo sapien
ccgccagaccagctaccacgccgat

SEQ ID NO: 6059038 - DNA, 25 bp, Homo sapien
ggtcatgatacagccgacaatgcca

SEQ ID NO: 6059039 - DNA, 25 bp, Homo sapien
ggaccagacgatcgtaatggcgatg

SEQ ID NO: 6059040 - DNA, 25 bp, Homo sapien
aactgatggcccatcgtcacacctt

SEQ ID NO: 6059041 - DNA, 25 bp, Homo sapien
gcaaaaatcccggtcatgatacagc

SEQ ID NO: 6059042 - DNA, 25 bp, Homo sapien
gccgccgttgcgaccacagtattca

SEQ ID NO: 6059043 - DNA, 25 bp, Homo sapien
gcgatgctttccagctgtaccagca

SEQ ID NO: 6059044 - DNA, 25 bp, Homo sapien
atcatccacccgcagcaagcgtttg

SEQ ID NO: 6059045 - DNA, 25 bp, Homo sapien
cgtgcccgctgacccggcgttaaag

SEQ ID NO: 6059046 - DNA, 25 bp, Homo sapien
gaccagaccggcaatcgcgccagaa

SEQ ID NO: 6059047 - DNA, 25 bp, Homo sapien
ccacgcagcgcccattcaccgaaga

SEQ ID NO: 6059048 - DNA, 25 bp, Homo sapien
ccacgccgcccagcgagctggcggc

SEQ ID NO: 6059049 - DNA, 25 bp, Homo sapien
gcattctcgccgtggctgttgacat

SEQ ID NO: 6059050 - DNA, 25 bp, Homo sapien
ctaccacgccgataatcaacgcgcc

SEQ ID NO: 6059051 - DNA, 25 bp, Homo sapien
aacaccggaccagacgatcgtaatg

SEQ ID NO: 6059052 - DNA, 25 bp, Homo sapien
agctgtaccagcaactgatggccca

SEQ ID NO: 6059053 - DNA, 25 bp, Homo sapien
ggctgttgacatccagcccttctcg

SEQ ID NO: 6059054 - DNA, 25 bp, Homo sapien
acgcgccgccaaccccaatgtagcc

SEQ ID NO: 6059055 - DNA, 25 bp, Homo sapien
gaccagctaccacgccgataatcaa

SEQ ID NO: 6059056 - DNA, 25 bp, Homo sapien
gaaacgatgttgtactgaatatgcc

SEQ ID NO: 6059057 - DNA, 25 bp, Homo sapien
cgttgccgtacttcggcgcaccgtt

SEQ ID NO: 6059058 - DNA, 25 bp, Homo sapien
ccgtaggcagtttacccactgagcc

SEQ ID NO: 6059059 - DNA, 25 bp, Homo sapien
acgccgccgagaatcgctgccgtag

SEQ ID NO: 6059060 - DNA, 25 bp, Homo sapien
atatgccagcctttatgcacttcaa

SEQ ID NO: 6059061 - DNA, 25 bp, Homo sapien
gttagcggagattgatgacgtaccc

SEQ ID NO: 6059062 - DNA, 25 bp, Homo sapien
acgggcgatgatatcgtcctgagcg

SEQ ID NO: 6059063 - DNA, 25 bp, Homo sapien
ctgataagcgcgagccagcagcgta

SEQ ID NO: 6059064 - DNA, 25 bp, Homo sapien
tagggccaagatggtcagtaccgga

SEQ ID NO: 6059065 - DNA, 25 bp, Homo sapien
tagcccgcgacacgcactaccagat

SEQ ID NO: 6059066 - DNA, 25 bp, Homo sapien
agtatcatcgtcgttgccgtacttc

SEQ ID NO: 6059067 - DNA, 25 bp, Homo sapien
cgtacttcggcgcaccgttaatcag

SEQ ID NO: 6059068 - DNA, 25 bp, Homo sapien
ctgtttcagttcgtcgatataggtc

SEQ ID NO: 6059069 - DNA, 25 bp, Homo sapien
atcatcagtttctgcttgtcagatt

SEQ ID NO: 6059070 - DNA, 25 bp, Homo sapien
gcgacacgcactaccagatcgcgat

SEQ ID NO: 6059071 - DNA, 25 bp, Homo sapien
tacccactgagccaatgaccgcagt

SEQ ID NO: 6059072 - DNA, 25 bp, Homo sapien
gtcgatataggtctgataagcgcga

SEQ ID NO: 6059073 - DNA, 25 bp, Homo sapien
ctgagccaatgaccgcagtagggcc

SEQ ID NO: 6059074 - DNA, 25 bp, Homo sapien
gatgatatcgtcctgagcgtctgga

SEQ ID NO: 6059075 - DNA, 25 bp, Homo sapien
tctgcgcgccaaacggtacgttagc

SEQ ID NO: 6059076 - DNA, 25 bp, Homo sapien
atcgctgccgtaggcagtttaccca

SEQ ID NO: 6059077 - DNA, 25 bp, Homo sapien
ttatgcacttcaaagaaggtacgca

SEQ ID NO: 6059078 - DNA, 25 bp, Homo sapien
agccagcagcgtatcgacagtatca

SEQ ID NO: 6059079 - DNA, 25 bp, Homo sapien
ccgcagtagggccaagatggtcagt

SEQ ID NO: 6059080 - DNA, 25 bp, Homo sapien
cagcgtatcgacagtatcatcgtcg

SEQ ID NO: 6059081 - DNA, 25 bp, Homo sapien
aagaacgcggaatagcccgcgacac

SEQ ID NO: 6059082 - DNA, 25 bp, Homo sapien
ccgagaatcgctgccgtaggcagtt

SEQ ID NO: 6059083 - DNA, 25 bp, Homo sapien
cggaccacgaccgtagcgcggatta

SEQ ID NO: 6059084 - DNA, 25 bp, Homo sapien
atcgtcctgagcgtctggagagagc

SEQ ID NO: 6059085 - DNA, 25 bp, Homo sapien
atcgtcgttgccgtacttcggcgca

SEQ ID NO: 6059086 - DNA, 25 bp, Homo sapien
tgcttgtcagattcgttctccagcg

SEQ ID NO: 6059087 - DNA, 25 bp, Homo sapien
cgtacccgcgtaatagttgccgcca

SEQ ID NO: 6059088 - DNA, 25 bp, Homo sapien
gtgttgccatagtctgcgcgccaaa

SEQ ID NO: 6059089 - DNA, 25 bp, Homo sapien
atcgacagtatcatcgtcgttgccg

SEQ ID NO: 6059090 - DNA, 25 bp, Homo sapien
cggtacgttagcggagattgatgac

SEQ ID NO: 6059091 - DNA, 25 bp, Homo sapien
tcagattcgttctccagcgttgccg

SEQ ID NO: 6059092 - DNA, 25 bp, Homo sapien
gtacgcagcaggatcatcagtttct

SEQ ID NO: 6059093 - DNA, 25 bp, Homo sapien
accagatcgcgatactgatcgggat

SEQ ID NO: 6059094 - DNA, 25 bp, Homo sapien
atagttgccgccaaccggaccacga

SEQ ID NO: 6059095 - DNA, 25 bp, Homo sapien
acttcaaagaaggtacgcagcagga

SEQ ID NO: 6059096 - DNA, 25 bp, Homo sapien
caatgaccgcagtagggccaagatg

SEQ ID NO: 6059097 - DNA, 25 bp, Homo sapien
agtttctgcttgtcagattcgttct

SEQ ID NO: 6059098 - DNA, 25 bp, Homo sapien
gtagcgcggattatggtactgtttc

SEQ ID NO: 6059099 - DNA, 25 bp, Homo sapien
aagaaggtacgcagcaggatcatca

SEQ ID NO: 6059100 - DNA, 25 bp, Homo sapien
agcgcgagccagcagcgtatcgaca

SEQ ID NO: 6059101 - DNA, 25 bp, Homo sapien
ccatagtctgcgcgccaaacggtac

SEQ ID NO: 6059102 - DNA, 25 bp, Homo sapien
ttcgcatccagcagcgtttcgcggg

SEQ ID NO: 6059103 - DNA, 25 bp, Homo sapien
gcggaatagcccgcgacacgcacta

SEQ ID NO: 6059104 - DNA, 25 bp, Homo sapien
gtcagtaccggaggccgggcttgcg

SEQ ID NO: 6059105 - DNA, 25 bp, Homo sapien
cagcctttatgcacttcaaagaagg

SEQ ID NO: 6059106 - DNA, 25 bp, Homo sapien
tacgcccgtccggtgttgccatagt

SEQ ID NO: 6059107 - DNA, 25 bp, Homo sapien
ataggtctgataagcgcgagccagc

SEQ ID NO: 6059108 - DNA, 25 bp, Homo sapien
agagagcgcggtgaagaacgcggaa

SEQ ID NO: 6059109 - DNA, 25 bp, Homo sapien
gccaaccggaccacgaccgtagcgc

SEQ ID NO: 6059110 - DNA, 25 bp, Homo sapien
catatgttcagtacgggcgatgata

SEQ ID NO: 6059111 - DNA, 25 bp, Homo sapien
cttgcgccttctgccagcggggtgt

SEQ ID NO: 6059112 - DNA, 25 bp, Homo sapien
cggaggccgggcttgcgccttctgc

SEQ ID NO: 6059113 - DNA, 25 bp, Homo sapien
cctgagcgtctggagagagcgcggt

SEQ ID NO: 6059114 - DNA, 25 bp, Homo sapien
tgatgacgtacccgcgtaatagttg

SEQ ID NO: 6059115 - DNA, 25 bp, Homo sapien
acgaccgtagcgcggattatggtac

SEQ ID NO: 6059116 - DNA, 25 bp, Homo sapien
cgtctggagagagcgcggtgaagaa

SEQ ID NO: 6059117 - DNA, 25 bp, Homo sapien
ggagattgatgacgtacccgcgtaa

SEQ ID NO: 6059118 - DNA, 25 bp, Homo sapien
cgcactaccagatcgcgatactgat

SEQ ID NO: 6059119 - DNA, 25 bp, Homo sapien
atgttgtactgaatatgccagcctt

SEQ ID NO: 6059120 - DNA, 25 bp, Homo sapien
tcgcgatactgatcgggatgttttt

SEQ ID NO: 6059121 - DNA, 25 bp, Homo sapien
aagatggtcagtaccggaggccggg

SEQ ID NO: 6059122 - DNA, 25 bp, Homo sapien
tggttgagcaacacgccgccgagaa

SEQ ID NO: 6059123 - DNA, 25 bp, Homo sapien
cgcggtgaagaacgcggaatagccc

SEQ ID NO: 6059124 - DNA, 25 bp, Homo sapien
tcgttctccagcgttgccggattca

SEQ ID NO: 6059125 - DNA, 25 bp, Homo sapien
tccagcagcgtttcgcgggaaacga

SEQ ID NO: 6059126 - DNA, 25 bp, Homo sapien
agcgtttcgcgggaaacgatgttgt

SEQ ID NO: 6059127 - DNA, 25 bp, Homo sapien
agtttctggttgagcaacacgccgc

SEQ ID NO: 6059128 - DNA, 25 bp, Homo sapien
gttgccggattcagtttctggttga

SEQ ID NO: 6059129 - DNA, 25 bp, Homo sapien
ggattcagtttctggttgagcaaca

SEQ ID NO: 6059130 - DNA, 25 bp, Homo sapien
gcagtttacccactgagccaatgac

SEQ ID NO: 6059131 - DNA, 25 bp, Homo sapien
cgcgtaatagttgccgccaaccgga

SEQ ID NO: 6059132 - DNA, 25 bp, Homo sapien
ccgtccggtgttgccatagtctgcg

SEQ ID NO: 6059133 - DNA, 25 bp, Homo sapien
gccagcggggtgtgggctttacgcc

SEQ ID NO: 6059134 - DNA, 25 bp, Homo sapien
tactgatcgggatgttttttcgcat

SEQ ID NO: 6059135 - DNA, 25 bp, Homo sapien
tcgcgggaaacgatgttgtactgaa

SEQ ID NO: 6059136 - DNA, 25 bp, Homo sapien
tccagcgttgccggattcagtttct

SEQ ID NO: 6059137 - DNA, 25 bp, Homo sapien
ccgggcttgcgccttctgccagcgg

SEQ ID NO: 6059138 - DNA, 25 bp, Homo sapien
tgttttttcgcatccagcagcgttt

SEQ ID NO: 6059139 - DNA, 25 bp, Homo sapien
cggattatggtactgtttcagttcg

SEQ ID NO: 6059140 - DNA, 25 bp, Homo sapien
gctttacgcccgtccggtgttgcca

SEQ ID NO: 6059141 - DNA, 25 bp, Homo sapien
tactgaatatgccagcctttatgca

SEQ ID NO: 6059142 - DNA, 25 bp, Homo sapien
tcgggatgttttttcgcatccagca

SEQ ID NO: 6059143 - DNA, 25 bp, Homo sapien
agcaggatcatcagtttctgcttgt

SEQ ID NO: 6059144 - DNA, 25 bp, Homo sapien
agcaacacgccgccgagaatcgctg

SEQ ID NO: 6059145 - DNA, 25 bp, Homo sapien
atggtactgtttcagttcgtcgata

SEQ ID NO: 6059146 - DNA, 25 bp, Homo sapien
cgccaaacggtacgttagcggagat

SEQ ID NO: 6059147 - DNA, 25 bp, Homo sapien
cagttcgtcgatataggtctgataa

SEQ ID NO: 6059148 - DNA, 25 bp, Homo sapien
ttcagtacgggcgatgatatcgtcc

SEQ ID NO: 6059149 - DNA, 25 bp, Homo sapien
cagaaaactgtcaaaattcattgcg

SEQ ID NO: 6059150 - DNA, 25 bp, Homo sapien
atcgcacagaaaactgtcaaaattc

SEQ ID NO: 6059151 - DNA, 25 bp, Homo sapien
aagaatatcgcacagaaaactgtca

SEQ ID NO: 6059152 - DNA, 25 bp, Homo sapien
ctagacaaatactgactttgcgaat

SEQ ID NO: 6059153 - DNA, 25 bp, Homo sapien
tattgagtgtttttgatagggggat

SEQ ID NO: 6059154 - DNA, 25 bp, Homo sapien
ttactatgcaaacaggatgattatt

SEQ ID NO: 6059155 - DNA, 25 bp, Homo sapien
tgtaccaaaagttgcctgttcttta

SEQ ID NO: 6059156 - DNA, 25 bp, Homo sapien
gcatgagctacagagatatccataa

SEQ ID NO: 6059157 - DNA, 25 bp, Homo sapien
gagaaataagcagcatgagctacag

SEQ ID NO: 6059158 - DNA, 25 bp, Homo sapien
aatacccctttgagtattggacact

SEQ ID NO: 6059159 - DNA, 25 bp, Homo sapien
ttcactatgaaatggtcaagaatgt

SEQ ID NO: 6059160 - DNA, 25 bp, Homo sapien
atcataatgtctctcagccagaaaa

SEQ ID NO: 6059161 - DNA, 25 bp, Homo sapien
tgtttttgatagggggatgtatgaa

SEQ ID NO: 6059162 - DNA, 25 bp, Homo sapien
acaatgaataacatcataatgtctc

SEQ ID NO: 6059163 - DNA, 25 bp, Homo sapien
atgaaatggtcaagaatgtattcga

SEQ ID NO: 6059164 - DNA, 25 bp, Homo sapien
tcattgcgttgtgtgactctaactg

SEQ ID NO: 6059165 - DNA, 25 bp, Homo sapien
ttaaataagtacaagaatttcacta

SEQ ID NO: 6059166 - DNA, 25 bp, Homo sapien
tggaacacggataagggaagatgct

SEQ ID NO: 6059167 - DNA, 25 bp, Homo sapien
agaatgtattcgagagaaaaaactt

SEQ ID NO: 6059168 - DNA, 25 bp, Homo sapien
gggggatgtatgaatacttccattt

SEQ ID NO: 6059169 - DNA, 25 bp, Homo sapien
aagaatttcactatgaaatggtcaa

SEQ ID NO: 6059170 - DNA, 25 bp, Homo sapien
gaaccatatgggctagaatccattg

SEQ ID NO: 6059171 - DNA, 25 bp, Homo sapien
ttaccaaagaatatcgcacagaaaa

SEQ ID NO: 6059172 - DNA, 25 bp, Homo sapien
tgatagggggatgtatgaatacttc

SEQ ID NO: 6059173 - DNA, 25 bp, Homo sapien
gaacgaataattcgaaacttattga

SEQ ID NO: 6059174 - DNA, 25 bp, Homo sapien
tttattcgtaattgcacccaggtct

SEQ ID NO: 6059175 - DNA, 25 bp, Homo sapien
gtgactctaactggaagtttactat

SEQ ID NO: 6059176 - DNA, 25 bp, Homo sapien
cgtaattgcacccaggtcttttttg

SEQ ID NO: 6059177 - DNA, 25 bp, Homo sapien
ctcagccagaaaacacagctagaca

SEQ ID NO: 6059178 - DNA, 25 bp, Homo sapien
agaaatgaaccatatgggctagaat

SEQ ID NO: 6059179 - DNA, 25 bp, Homo sapien
aataacatcataatgtctctcagcc

SEQ ID NO: 6059180 - DNA, 25 bp, Homo sapien
aaatactgactttgcgaatgcacca

SEQ ID NO: 6059181 - DNA, 25 bp, Homo sapien
cagaaaacacagctagacaaatact

SEQ ID NO: 6059182 - DNA, 25 bp, Homo sapien
gattttgtgccgtcttgaatacccc

SEQ ID NO: 6059183 - DNA, 25 bp, Homo sapien
tgcacccaggtcttttttgccttta

SEQ ID NO: 6059184 - DNA, 25 bp, Homo sapien
ggacactgtttagacgaacgaataa

SEQ ID NO: 6059185 - DNA, 25 bp, Homo sapien
tatttctggaacacggataagggaa

SEQ ID NO: 6059186 - DNA, 25 bp, Homo sapien
tgcaccagaaatgaaccatatgggc

SEQ ID NO: 6059187 - DNA, 25 bp, Homo sapien
taagcagcatgagctacagagatat

SEQ ID NO: 6059188 - DNA, 25 bp, Homo sapien
tccataacaatgaataacatcataa

SEQ ID NO: 6059189 - DNA, 25 bp, Homo sapien
tgtatgaatacttccatttttggtt

SEQ ID NO: 6059190 - DNA, 25 bp, Homo sapien
cttttttagggagaaataagcagca

SEQ ID NO: 6059191 - DNA, 25 bp, Homo sapien
tcttgaatacccctttgagtattgg

SEQ ID NO: 6059192 - DNA, 25 bp, Homo sapien
tgtacatttattcgtaattgcaccc

SEQ ID NO: 6059193 - DNA, 25 bp, Homo sapien
ggaagtttactatgcaaacaggatg

SEQ ID NO: 6059194 - DNA, 25 bp, Homo sapien
actgtcaaaattcattgcgttgtgt

SEQ ID NO: 6059195 - DNA, 25 bp, Homo sapien
gagatatccataacaatgaataaca

SEQ ID NO: 6059196 - DNA, 25 bp, Homo sapien
acacagctagacaaatactgacttt

SEQ ID NO: 6059197 - DNA, 25 bp, Homo sapien
caggatgattattgtacatttattc

SEQ ID NO: 6059198 - DNA, 25 bp, Homo sapien
tttagggagaaataagcagcatgag

SEQ ID NO: 6059199 - DNA, 25 bp, Homo sapien
agtattggacactgtttagacgaac

SEQ ID NO: 6059200 - DNA, 25 bp, Homo sapien
tgactttgcgaatgcaccagaaatg

SEQ ID NO: 6059201 - DNA, 25 bp, Homo sapien
atccattgtaccaaaagttgcctgt

SEQ ID NO: 6059202 - DNA, 25 bp, Homo sapien
gattattgtacatttattcgtaatt

SEQ ID NO: 6059203 - DNA, 25 bp, Homo sapien
accttagcgtggtatttctggaaca

SEQ ID NO: 6059204 - DNA, 25 bp, Homo sapien
gctagaatccattgtaccaaaagtt

SEQ ID NO: 6059205 - DNA, 25 bp, Homo sapien
cctttgagtattggacactgtttag

SEQ ID NO: 6059206 - DNA, 25 bp, Homo sapien
gcgtggtatttctggaacacggata

SEQ ID NO: 6059207 - DNA, 25 bp, Homo sapien
atgtctctcagccagaaaacacagc

SEQ ID NO: 6059208 - DNA, 25 bp, Homo sapien
tgtttagacgaacgaataattcgaa

SEQ ID NO: 6059209 - DNA, 25 bp, Homo sapien
cggataagggaagatgctgattttg

SEQ ID NO: 6059210 - DNA, 25 bp, Homo sapien
ctaactggaagtttactatgcaaac

SEQ ID NO: 6059211 - DNA, 25 bp, Homo sapien
gaaacttattgagtgtttttgatag

SEQ ID NO: 6059212 - DNA, 25 bp, Homo sapien
agggaagatgctgattttgtgccgt

SEQ ID NO: 6059213 - DNA, 25 bp, Homo sapien
tgcaaacaggatgattattgtacat

SEQ ID NO: 6059214 - DNA, 25 bp, Homo sapien
gtgccgtcttgaatacccctttgag

SEQ ID NO: 6059215 - DNA, 25 bp, Homo sapien
taagtacaagaatttcactatgaaa

SEQ ID NO: 6059216 - DNA, 25 bp, Homo sapien
tgcgaatgcaccagaaatgaaccat

SEQ ID NO: 6059217 - DNA, 25 bp, Homo sapien
atatgggctagaatccattgtacca

SEQ ID NO: 6059218 - DNA, 25 bp, Homo sapien
gatgctgattttgtgccgtcttgaa

SEQ ID NO: 6059219 - DNA, 25 bp, Homo sapien
ataattcgaaacttattgagtgttt

SEQ ID NO: 6059220 - DNA, 25 bp, Homo sapien
aaaattcattgcgttgtgtgactct

SEQ ID NO: 6059221 - DNA, 25 bp, Homo sapien
gctacagagatatccataacaatga

SEQ ID NO: 6059222 - DNA, 25 bp, Homo sapien
tggtcaagaatgtattcgagagaaa

SEQ ID NO: 6059223 - DNA, 25 bp, Homo sapien
ttacgtttaccaaagaatatcgcac

SEQ ID NO: 6059224 - DNA, 25 bp, Homo sapien
cgttgtgtgactctaactggaagtt

SEQ ID NO: 6059225 - DNA, 25 bp, Homo sapien
catttaacagtaaatgtggaaaaca

SEQ ID NO: 6059226 - DNA, 25 bp, Homo sapien
agaaagctagagacattgcaaatat

SEQ ID NO: 6059227 - DNA, 25 bp, Homo sapien
gtgtatctataaaagtttcactgtg

SEQ ID NO: 6059228 - DNA, 25 bp, Homo sapien
acattgcaaatattttgctcattca

SEQ ID NO: 6059229 - DNA, 25 bp, Homo sapien
ccacgccatgtgattaaccttgctt

SEQ ID NO: 6059230 - DNA, 25 bp, Homo sapien
caagaagggtaattgtgaaagagtc

SEQ ID NO: 6059231 - DNA, 25 bp, Homo sapien
aatggacgtcgcagtgcaggaacta

SEQ ID NO: 6059232 - DNA, 25 bp, Homo sapien
ctataaaagtttcactgtgggaatg

SEQ ID NO: 6059233 - DNA, 25 bp, Homo sapien
tggaaaacaagaagggtaattgtga

SEQ ID NO: 6059234 - DNA, 25 bp, Homo sapien
tgcggtatgcgttttctactgatgt

SEQ ID NO: 6059235 - DNA, 25 bp, Homo sapien
accaatatttcaagaaagctagaga

SEQ ID NO: 6059236 - DNA, 25 bp, Homo sapien
aacatatagctaaggcaaagggata

SEQ ID NO: 6059237 - DNA, 25 bp, Homo sapien
tttctactgatgtgtggagcaagcc

SEQ ID NO: 6059238 - DNA, 25 bp, Homo sapien
cctcaatataaaccaatatttcaag

SEQ ID NO: 6059239 - DNA, 25 bp, Homo sapien
gatgaacagtaaaatcacttattat

SEQ ID NO: 6059240 - DNA, 25 bp, Homo sapien
atgaaagttcgaaaataactgacag

SEQ ID NO: 6059241 - DNA, 25 bp, Homo sapien
cgtcgcagtgcaggaactacttgat

SEQ ID NO: 6059242 - DNA, 25 bp, Homo sapien
cagtaaaatcacttattatttaagg

SEQ ID NO: 6059243 - DNA, 25 bp, Homo sapien
gtttagtcaccaaattatcaaaaga

SEQ ID NO: 6059244 - DNA, 25 bp, Homo sapien
aattatcaaaagagcatgatttttc

SEQ ID NO: 6059245 - DNA, 25 bp, Homo sapien
catgtgattaaccttgcttgataaa

SEQ ID NO: 6059246 - DNA, 25 bp, Homo sapien
gatttttctcctgagtatttcaaag

SEQ ID NO: 6059247 - DNA, 25 bp, Homo sapien
tataaaccaatatttcaagaaagct

SEQ ID NO: 6059248 - DNA, 25 bp, Homo sapien
agcaagccacgccatgtgattaacc

SEQ ID NO: 6059249 - DNA, 25 bp, Homo sapien
caaatattttgctcattcaaacata

SEQ ID NO: 6059250 - DNA, 25 bp, Homo sapien
tgaaatttgaaatcttaccaagccc

SEQ ID NO: 6059251 - DNA, 25 bp, Homo sapien
ccaaaattaaactgttttatgtatg

SEQ ID NO: 6059252 - DNA, 25 bp, Homo sapien
taaggattccgctgcggtatgcgtt

SEQ ID NO: 6059253 - DNA, 25 bp, Homo sapien
actaaaactcagcaacttgatgaaa

SEQ ID NO: 6059254 - DNA, 25 bp, Homo sapien
tagctaaggcaaagggatactaaaa

SEQ ID NO: 6059255 - DNA, 25 bp, Homo sapien
tcccttcatttaacagtaaatgtgg

SEQ ID NO: 6059256 - DNA, 25 bp, Homo sapien
atgcgttttctactgatgtgtggag

SEQ ID NO: 6059257 - DNA, 25 bp, Homo sapien
tcagcacaggttttcctaagccttc

SEQ ID NO: 6059258 - DNA, 25 bp, Homo sapien
agtgcaggaactacttgattttttt

SEQ ID NO: 6059259 - DNA, 25 bp, Homo sapien
tgttttatgtatgtttagtcaccaa

SEQ ID NO: 6059260 - DNA, 25 bp, Homo sapien
gcagtgtccatccagtattcagcac

SEQ ID NO: 6059261 - DNA, 25 bp, Homo sapien
tctttctatagctagtcacacagcc

SEQ ID NO: 6059262 - DNA, 25 bp, Homo sapien
cactgtgggaatgcagtgtccatcc

SEQ ID NO: 6059263 - DNA, 25 bp, Homo sapien
cagtaaatgtggaaaacaagaaggg

SEQ ID NO: 6059264 - DNA, 25 bp, Homo sapien
tcacttattatttaaggattccgct

SEQ ID NO: 6059265 - DNA, 25 bp, Homo sapien
tcaccaaattatcaaaagagcatga

SEQ ID NO: 6059266 - DNA, 25 bp, Homo sapien
cattcaaacatatagctaaggcaaa

SEQ ID NO: 6059267 - DNA, 25 bp, Homo sapien
gttcgaaaataactgacagtgtatc

SEQ ID NO: 6059268 - DNA, 25 bp, Homo sapien
tttgctcattcaaacatatagctaa

SEQ ID NO: 6059269 - DNA, 25 bp, Homo sapien
tagtcacacagccattaccacccaa

SEQ ID NO: 6059270 - DNA, 25 bp, Homo sapien
gggtaattgtgaaagagtccgattg

SEQ ID NO: 6059271 - DNA, 25 bp, Homo sapien
aaataactgacagtgtatctataaa

SEQ ID NO: 6059272 - DNA, 25 bp, Homo sapien
agggatactaaaactcagcaacttg

SEQ ID NO: 6059273 - DNA, 25 bp, Homo sapien
tctcctgagtatttcaaagtgaaat

SEQ ID NO: 6059274 - DNA, 25 bp, Homo sapien
ctgatgtgtggagcaagccacgcca

SEQ ID NO: 6059275 - DNA, 25 bp, Homo sapien
ctgacagtgtatctataaaagtttc

SEQ ID NO: 6059276 - DNA, 25 bp, Homo sapien
tccatccagtattcagcacaggttt

SEQ ID NO: 6059277 - DNA, 25 bp, Homo sapien
ccaagccctcaatataaaccaatat

SEQ ID NO: 6059278 - DNA, 25 bp, Homo sapien
ttgaaatcttaccaagccctcaata

SEQ ID NO: 6059279 - DNA, 25 bp, Homo sapien
attatttaaggattccgctgcggta

SEQ ID NO: 6059280 - DNA, 25 bp, Homo sapien
taaactgttttatgtatgtttagtc

SEQ ID NO: 6059281 - DNA, 25 bp, Homo sapien
ttgtgaaagagtccgattgtagttg

SEQ ID NO: 6059282 - DNA, 25 bp, Homo sapien
atttcaagaaagctagagacattgc

SEQ ID NO: 6059283 - DNA, 25 bp, Homo sapien
tcttaccaagccctcaatataaacc

SEQ ID NO: 6059284 - DNA, 25 bp, Homo sapien
aggcaaagggatactaaaactcagc

SEQ ID NO: 6059285 - DNA, 25 bp, Homo sapien
tcaaagtgaaatttgaaatcttacc

SEQ ID NO: 6059286 - DNA, 25 bp, Homo sapien
caggttttcctaagccttctgtaca

SEQ ID NO: 6059287 - DNA, 25 bp, Homo sapien
caacttgatgaaagttcgaaaataa

SEQ ID NO: 6059288 - DNA, 25 bp, Homo sapien
tgtacatcccttcatttaacagtaa

SEQ ID NO: 6059289 - DNA, 25 bp, Homo sapien
gcatgcgtaaatcagggaccaattc

SEQ ID NO: 6059290 - DNA, 25 bp, Homo sapien
ttttttctttctatagctagtcaca

SEQ ID NO: 6059291 - DNA, 25 bp, Homo sapien
tcataatgctataatggacgtcgca

SEQ ID NO: 6059292 - DNA, 25 bp, Homo sapien
cacagccattaccacccaaaattaa

SEQ ID NO: 6059293 - DNA, 25 bp, Homo sapien
tcagggaccaattcataatgctata

SEQ ID NO: 6059294 - DNA, 25 bp, Homo sapien
ctagagacattgcaaatattttgct

SEQ ID NO: 6059295 - DNA, 25 bp, Homo sapien
accaattcataatgctataatggac

SEQ ID NO: 6059296 - DNA, 25 bp, Homo sapien
ccgattgtagttgatgaacagtaaa

SEQ ID NO: 6059297 - DNA, 25 bp, Homo sapien
actcagcaacttgatgaaagttcga

SEQ ID NO: 6059298 - DNA, 25 bp, Homo sapien
tgtggagcaagccacgccatgtgat

SEQ ID NO: 6059299 - DNA, 25 bp, Homo sapien
tatagctagtcacacagccattacc

SEQ ID NO: 6059300 - DNA, 25 bp, Homo sapien
gagcatgatttttctcctgagtatt

SEQ ID NO: 6059301 - DNA, 25 bp, Homo sapien
gggaatgcagtgtccatccagtatt

SEQ ID NO: 6059302 - DNA, 25 bp, Homo sapien
gtagttgatgaacagtaaaatcact

SEQ ID NO: 6059303 - DNA, 25 bp, Homo sapien
gccttctgtacatcccttcatttaa

SEQ ID NO: 6059304 - DNA, 25 bp, Homo sapien
ttcctaagccttctgtacatccctt

SEQ ID NO: 6059305 - DNA, 25 bp, Homo sapien
aagtttcactgtgggaatgcagtgt

SEQ ID NO: 6059306 - DNA, 25 bp, Homo sapien
ttccgctgcggtatgcgttttctac

SEQ ID NO: 6059307 - DNA, 25 bp, Homo sapien
tcaaaagagcatgatttttctcctg

SEQ ID NO: 6059308 - DNA, 25 bp, Homo sapien
tgctataatggacgtcgcagtgcag

SEQ ID NO: 6059309 - DNA, 25 bp, Homo sapien
gagtatttcaaagtgaaatttgaaa

SEQ ID NO: 6059310 - DNA, 25 bp, Homo sapien
cgtaaatcagggaccaattcataat

SEQ ID NO: 6059311 - DNA, 25 bp, Homo sapien
atgtatgtttagtcaccaaattatc

SEQ ID NO: 6059312 - DNA, 25 bp, Homo sapien
cagtattcagcacaggttttcctaa

SEQ ID NO: 6059313 - DNA, 25 bp, Homo sapien
aagagtccgattgtagttgatgaac

SEQ ID NO: 6059314 - DNA, 25 bp, Homo sapien
aaatatcaatcgtagaaacagtaac

SEQ ID NO: 6059315 - DNA, 25 bp, Homo sapien
tgccaaatagtacccatattactag

SEQ ID NO: 6059316 - DNA, 25 bp, Homo sapien
ttaaacaagtctcgttttatgctac

SEQ ID NO: 6059317 - DNA, 25 bp, Homo sapien
ttgaagtatgtcatatcctgtttta

SEQ ID NO: 6059318 - DNA, 25 bp, Homo sapien
gggaaagctgaattgaagtatgtca

SEQ ID NO: 6059319 - DNA, 25 bp, Homo sapien
cctgagcagttctcaattcgcgaac

SEQ ID NO: 6059320 - DNA, 25 bp, Homo sapien
cgcctagccactgttggcctccgcc

SEQ ID NO: 6059321 - DNA, 25 bp, Homo sapien
acagaggcctcccccctgccgccaa

SEQ ID NO: 6059322 - DNA, 25 bp, Homo sapien
ctgctcgagcggctgatagggaaag

SEQ ID NO: 6059323 - DNA, 25 bp, Homo sapien
caatcgtagaaacagtaaccgtctt

SEQ ID NO: 6059324 - DNA, 25 bp, Homo sapien
aagtctcgttttatgctactcttct

SEQ ID NO: 6059325 - DNA, 25 bp, Homo sapien
tcacttgttacccaaccccagctaa

SEQ ID NO: 6059326 - DNA, 25 bp, Homo sapien
attatatgtggcacaagaagttaac

SEQ ID NO: 6059327 - DNA, 25 bp, Homo sapien
agtactcttcaattcaggcgcggcc

SEQ ID NO: 6059328 - DNA, 25 bp, Homo sapien
gcctcccccctgccgccaaggccgc

SEQ ID NO: 6059329 - DNA, 25 bp, Homo sapien
caaattactccggcaacacacctat

SEQ ID NO: 6059330 - DNA, 25 bp, Homo sapien
tcaaatatcatctgccaaatagtac

SEQ ID NO: 6059331 - DNA, 25 bp, Homo sapien
taacttcacagaggcctcccccctg

SEQ ID NO: 6059332 - DNA, 25 bp, Homo sapien
cattccatctcttgctattttattg

SEQ ID NO: 6059333 - DNA, 25 bp, Homo sapien
gatgatatccaggaatgaaaatatc

SEQ ID NO: 6059334 - DNA, 25 bp, Homo sapien
cgttttatgctactcttctcgagag

SEQ ID NO: 6059335 - DNA, 25 bp, Homo sapien
tgttccaggcgttgccgcctagcca

SEQ ID NO: 6059336 - DNA, 25 bp, Homo sapien
ttcactttttcccttgctcacttgt

SEQ ID NO: 6059337 - DNA, 25 bp, Homo sapien
ccatattactagtacatcattatat

SEQ ID NO: 6059338 - DNA, 25 bp, Homo sapien
gaatgaaaatatcaatcgtagaaac

SEQ ID NO: 6059339 - DNA, 25 bp, Homo sapien
gctgaattgaagtatgtcatatcct

SEQ ID NO: 6059340 - DNA, 25 bp, Homo sapien
cagttctcaattcgcgaaccttcca

SEQ ID NO: 6059341 - DNA, 25 bp, Homo sapien
cagtaaccgtcttgaataaaaatca

SEQ ID NO: 6059342 - DNA, 25 bp, Homo sapien
ctccgccaaattactccggcaacac

SEQ ID NO: 6059343 - DNA, 25 bp, Homo sapien
gtttggacagtacactacgtattga

SEQ ID NO: 6059344 - DNA, 25 bp, Homo sapien
gtgatctggcaagatgatatccagg

SEQ ID NO: 6059345 - DNA, 25 bp, Homo sapien
atcatctgccaaatagtacccatat

SEQ ID NO: 6059346 - DNA, 25 bp, Homo sapien
atccaggaatgaaaatatcaatcgt

SEQ ID NO: 6059347 - DNA, 25 bp, Homo sapien
ttttcccttgctcacttgttaccca

SEQ ID NO: 6059348 - DNA, 25 bp, Homo sapien
cttgaataaaaatcaaatatcatct

SEQ ID NO: 6059349 - DNA, 25 bp, Homo sapien
gcgcggcctaaattgtaagtgatct

SEQ ID NO: 6059350 - DNA, 25 bp, Homo sapien
tgttggcctccgccaaattactccg

SEQ ID NO: 6059351 - DNA, 25 bp, Homo sapien
cattaccattccatctcttgctatt

SEQ ID NO: 6059352 - DNA, 25 bp, Homo sapien
cttgctcacttgttacccaacccca

SEQ ID NO: 6059353 - DNA, 25 bp, Homo sapien
tgccgccaaggccgcccctgtattc

SEQ ID NO: 6059354 - DNA, 25 bp, Homo sapien
ggcaacacacctatataactgctcg

SEQ ID NO: 6059355 - DNA, 25 bp, Homo sapien
ccagaacttttaagcgcgtgttcca

SEQ ID NO: 6059356 - DNA, 25 bp, Homo sapien
ttcaggcgcggcctaaattgtaagt

SEQ ID NO: 6059357 - DNA, 25 bp, Homo sapien
acagtacactacgtattgaagtact

SEQ ID NO: 6059358 - DNA, 25 bp, Homo sapien
tagtacccatattactagtacatca

SEQ ID NO: 6059359 - DNA, 25 bp, Homo sapien
attgttcttcttaaaatgttcactt

SEQ ID NO: 6059360 - DNA, 25 bp, Homo sapien
gccactgttggcctccgccaaatta

SEQ ID NO: 6059361 - DNA, 25 bp, Homo sapien
tactagtacatcattatatgtggca

SEQ ID NO: 6059362 - DNA, 25 bp, Homo sapien
cacaagaagttaacgtgaagaaaca

SEQ ID NO: 6059363 - DNA, 25 bp, Homo sapien
cctaaattgtaagtgatctggcaag

SEQ ID NO: 6059364 - DNA, 25 bp, Homo sapien
ttgtaagtgatctggcaagatgata

SEQ ID NO: 6059365 - DNA, 25 bp, Homo sapien
atatcctgttttaaacaagtctcgt

SEQ ID NO: 6059366 - DNA, 25 bp, Homo sapien
cgatgacagcaagtcttatataact

SEQ ID NO: 6059367 - DNA, 25 bp, Homo sapien
ctgatagggaaagctgaattgaagt

SEQ ID NO: 6059368 - DNA, 25 bp, Homo sapien
gcgttgccgcctagccactgttggc

SEQ ID NO: 6059369 - DNA, 25 bp, Homo sapien
cactacgtattgaagtactcttcaa

SEQ ID NO: 6059370 - DNA, 25 bp, Homo sapien
tagaaacagtaaccgtcttgaataa

SEQ ID NO: 6059371 - DNA, 25 bp, Homo sapien
tataactaacttcacagaggcctcc

SEQ ID NO: 6059372 - DNA, 25 bp, Homo sapien
cccctgccgccaaggccgcccctgt

SEQ ID NO: 6059373 - DNA, 25 bp, Homo sapien
acacctatataactgctcgagcggc

SEQ ID NO: 6059374 - DNA, 25 bp, Homo sapien
atgctactcttctcgagagccaagc

SEQ ID NO: 6059375 - DNA, 25 bp, Homo sapien
ctcttctcgagagccaagcattacc

SEQ ID NO: 6059376 - DNA, 25 bp, Homo sapien
accgtcttgaataaaaatcaaatat

SEQ ID NO: 6059377 - DNA, 25 bp, Homo sapien
gtcttatataactaacttcacagag

SEQ ID NO: 6059378 - DNA, 25 bp, Homo sapien
atataactgctcgagcggctgatag

SEQ ID NO: 6059379 - DNA, 25 bp, Homo sapien
taaaaatcaaatatcatctgccaaa

SEQ ID NO: 6059380 - DNA, 25 bp, Homo sapien
ctgtattcgcccctgagcagttctc

SEQ ID NO: 6059381 - DNA, 25 bp, Homo sapien
cttttaagcgcgtgttccaggcgtt

SEQ ID NO: 6059382 - DNA, 25 bp, Homo sapien
tattgaagtactcttcaattcaggc

SEQ ID NO: 6059383 - DNA, 25 bp, Homo sapien
ttcgcccctgagcagttctcaattc

SEQ ID NO: 6059384 - DNA, 25 bp, Homo sapien
cagcaagtcttatataactaacttc

SEQ ID NO: 6059385 - DNA, 25 bp, Homo sapien
tactccggcaacacacctatataac

SEQ ID NO: 6059386 - DNA, 25 bp, Homo sapien
caattcgcgaaccttccagaacttt

SEQ ID NO: 6059387 - DNA, 25 bp, Homo sapien
aaatgttcactttttcccttgctca

SEQ ID NO: 6059388 - DNA, 25 bp, Homo sapien
gccaagcattaccattccatctctt

SEQ ID NO: 6059389 - DNA, 25 bp, Homo sapien
tatgtcatatcctgttttaaacaag

SEQ ID NO: 6059390 - DNA, 25 bp, Homo sapien
atttggaagagagtttggacagtac

SEQ ID NO: 6059391 - DNA, 25 bp, Homo sapien
cagctaaatattaaaaatttggaag

SEQ ID NO: 6059392 - DNA, 25 bp, Homo sapien
gagcggctgatagggaaagctgaat

SEQ ID NO: 6059393 - DNA, 25 bp, Homo sapien
cttcaattcaggcgcggcctaaatt

SEQ ID NO: 6059394 - DNA, 25 bp, Homo sapien
aagagagtttggacagtacactacg

SEQ ID NO: 6059395 - DNA, 25 bp, Homo sapien
tgtggcacaagaagttaacgtgaag

SEQ ID NO: 6059396 - DNA, 25 bp, Homo sapien
caaggccgcccctgtattcgcccct

SEQ ID NO: 6059397 - DNA, 25 bp, Homo sapien
tggcaagatgatatccaggaatgaa

SEQ ID NO: 6059398 - DNA, 25 bp, Homo sapien
tacatcattatatgtggcacaagaa

SEQ ID NO: 6059399 - DNA, 25 bp, Homo sapien
atctcttgctattttattgttcttc

SEQ ID NO: 6059400 - DNA, 25 bp, Homo sapien
tcgagagccaagcattaccattcca

SEQ ID NO: 6059401 - DNA, 25 bp, Homo sapien
agcgcgtgttccaggcgttgccgcc

SEQ ID NO: 6059402 - DNA, 25 bp, Homo sapien
accttccagaacttttaagcgcgtg

SEQ ID NO: 6059403 - DNA, 25 bp, Homo sapien
ccgcccctgtattcgcccctgagca

SEQ ID NO: 6059404 - DNA, 25 bp, Homo sapien
tgctattttattgttcttcttaaaa

SEQ ID NO: 6059405 - DNA, 25 bp, Homo sapien
cggtttagagtacccttcttgcgca

SEQ ID NO: 6059406 - DNA, 25 bp, Homo sapien
tcgaattaacttaccccagacttga

SEQ ID NO: 6059407 - DNA, 25 bp, Homo sapien
cacaagcaagccttgtgcataagaa

SEQ ID NO: 6059408 - DNA, 25 bp, Homo sapien
ctgcagaagagaacttcaacacttg

SEQ ID NO: 6059409 - DNA, 25 bp, Homo sapien
tgatgatagtgcgccctattataac

SEQ ID NO: 6059410 - DNA, 25 bp, Homo sapien
ttaatacatcaaaaacgatatcgtt

SEQ ID NO: 6059411 - DNA, 25 bp, Homo sapien
gccctattataacccatttttgtca

SEQ ID NO: 6059412 - DNA, 25 bp, Homo sapien
tagtgcgccctattataacccattt

SEQ ID NO: 6059413 - DNA, 25 bp, Homo sapien
gaacttgatacacctccaattattg

SEQ ID NO: 6059414 - DNA, 25 bp, Homo sapien
aaagaatacatctccgtctggtaat

SEQ ID NO: 6059415 - DNA, 25 bp, Homo sapien
atcgtcatcacgcttcatcacctga

SEQ ID NO: 6059416 - DNA, 25 bp, Homo sapien
ttgcgcaaggtacttgtgtgataag

SEQ ID NO: 6059417 - DNA, 25 bp, Homo sapien
cttgtgtgataagtagcgcattttt

SEQ ID NO: 6059418 - DNA, 25 bp, Homo sapien
cttcataaagaatacatctccgtct

SEQ ID NO: 6059419 - DNA, 25 bp, Homo sapien
catatgcattagaataacgtgccgt

SEQ ID NO: 6059420 - DNA, 25 bp, Homo sapien
ctttgtaaaagaatatatgaacaac

SEQ ID NO: 6059421 - DNA, 25 bp, Homo sapien
attctaacatcggtgacatcattcc

SEQ ID NO: 6059422 - DNA, 25 bp, Homo sapien
ataacgtgccgttaattttgctcga

SEQ ID NO: 6059423 - DNA, 25 bp, Homo sapien
ttgtgcataagaaagatgtaaatcc

SEQ ID NO: 6059424 - DNA, 25 bp, Homo sapien
aaggtacttgtgtgataagtagcgc

SEQ ID NO: 6059425 - DNA, 25 bp, Homo sapien
actcaacgcctactaagattaatac

SEQ ID NO: 6059426 - DNA, 25 bp, Homo sapien
atatatgaacaacatatgcattaga

SEQ ID NO: 6059427 - DNA, 25 bp, Homo sapien
catagcatcagcagtttcgaacttg

SEQ ID NO: 6059428 - DNA, 25 bp, Homo sapien
gagaaaagtaacatacaaactcaac

SEQ ID NO: 6059429 - DNA, 25 bp, Homo sapien
aaattcacatgaaattctcctaaca

SEQ ID NO: 6059430 - DNA, 25 bp, Homo sapien
acatgaaattctcctaacattctaa

SEQ ID NO: 6059431 - DNA, 25 bp, Homo sapien
ggagttgatgtactcaagacattgg

SEQ ID NO: 6059432 - DNA, 25 bp, Homo sapien
acatcggtgacatcattccaaacct

SEQ ID NO: 6059433 - DNA, 25 bp, Homo sapien
tacttttgtattcttcactagcagg

SEQ ID NO: 6059434 - DNA, 25 bp, Homo sapien
atcagcagtttcgaacttgatacac

SEQ ID NO: 6059435 - DNA, 25 bp, Homo sapien
agtaacatacaaactcaacgcctac

SEQ ID NO: 6059436 - DNA, 25 bp, Homo sapien
agagtacccttcttgcgcaaggtac

SEQ ID NO: 6059437 - DNA, 25 bp, Homo sapien
tcaagacattggttaaatatcaatc

SEQ ID NO: 6059438 - DNA, 25 bp, Homo sapien
ttaccccagacttgacaaaaatcta

SEQ ID NO: 6059439 - DNA, 25 bp, Homo sapien
agtagcgcattttttgcacatcacg

SEQ ID NO: 6059440 - DNA, 25 bp, Homo sapien
cagaaacacaagcaagccttgtgca

SEQ ID NO: 6059441 - DNA, 25 bp, Homo sapien
actactcagaaacacaagcaagcct

SEQ ID NO: 6059442 - DNA, 25 bp, Homo sapien
gcttcatcacctgagaaaagtaaca

SEQ ID NO: 6059443 - DNA, 25 bp, Homo sapien
atcaatcacgcatgatgatagtgcg

SEQ ID NO: 6059444 - DNA, 25 bp, Homo sapien
cgcctactaagattaatacatcaaa

SEQ ID NO: 6059445 - DNA, 25 bp, Homo sapien
cccatttttgtcatcgtcatcacgc

SEQ ID NO: 6059446 - DNA, 25 bp, Homo sapien
tcacctgagaaaagtaacatacaaa

SEQ ID NO: 6059447 - DNA, 25 bp, Homo sapien
aagagaacttcaacacttggactaa

SEQ ID NO: 6059448 - DNA, 25 bp, Homo sapien
aaaagaatatatgaacaacatatgc

SEQ ID NO: 6059449 - DNA, 25 bp, Homo sapien
gatacacctccaattattgcttcat

SEQ ID NO: 6059450 - DNA, 25 bp, Homo sapien
tgccgttaattttgctcgaattaac

SEQ ID NO: 6059451 - DNA, 25 bp, Homo sapien
tgataagtagcgcattttttgcaca

SEQ ID NO: 6059452 - DNA, 25 bp, Homo sapien
gatgtactcaagacattggttaaat

SEQ ID NO: 6059453 - DNA, 25 bp, Homo sapien
ctccaattattgcttcataaagaat

SEQ ID NO: 6059454 - DNA, 25 bp, Homo sapien
ttaaatatcaatcacgcatgatgat

SEQ ID NO: 6059455 - DNA, 25 bp, Homo sapien
gtgacatcattccaaacctctttgt

SEQ ID NO: 6059456 - DNA, 25 bp, Homo sapien
aagatgtaaatccatagcatcagca

SEQ ID NO: 6059457 - DNA, 25 bp, Homo sapien
tcattccaaacctctttgtaaaaga

SEQ ID NO: 6059458 - DNA, 25 bp, Homo sapien
ttataacccatttttgtcatcgtca

SEQ ID NO: 6059459 - DNA, 25 bp, Homo sapien
tctaaaaactaactactcagaaaca

SEQ ID NO: 6059460 - DNA, 25 bp, Homo sapien
gccctaactgcagaagagaacttca

SEQ ID NO: 6059461 - DNA, 25 bp, Homo sapien
cacgcatgatgatagtgcgccctat

SEQ ID NO: 6059462 - DNA, 25 bp, Homo sapien
taaatccatagcatcagcagtttcg

SEQ ID NO: 6059463 - DNA, 25 bp, Homo sapien
gtacgtgccctaactgcagaagaga

SEQ ID NO: 6059464 - DNA, 25 bp, Homo sapien
cagacttgacaaaaatctaaaaact

SEQ ID NO: 6059465 - DNA, 25 bp, Homo sapien
aaacctctttgtaaaagaatatatg

SEQ ID NO: 6059466 - DNA, 25 bp, Homo sapien
aaacgatatcgttgccatgtacgtg

SEQ ID NO: 6059467 - DNA, 25 bp, Homo sapien
tggtaatgcgatggccccggtttag

SEQ ID NO: 6059468 - DNA, 25 bp, Homo sapien
catcacgtatgctacttttgtattc

SEQ ID NO: 6059469 - DNA, 25 bp, Homo sapien
agtttcgaacttgatacacctccaa

SEQ ID NO: 6059470 - DNA, 25 bp, Homo sapien
tatcgttgccatgtacgtgccctaa

SEQ ID NO: 6059471 - DNA, 25 bp, Homo sapien
gaacaacatatgcattagaataacg

SEQ ID NO: 6059472 - DNA, 25 bp, Homo sapien
ggactaaaattcacatgaaattctc

SEQ ID NO: 6059473 - DNA, 25 bp, Homo sapien
cattagaataacgtgccgttaattt

SEQ ID NO: 6059474 - DNA, 25 bp, Homo sapien
cccttcttgcgcaaggtacttgtgt

SEQ ID NO: 6059475 - DNA, 25 bp, Homo sapien
tttgtcatcgtcatcacgcttcatc

SEQ ID NO: 6059476 - DNA, 25 bp, Homo sapien
catcaaaaacgatatcgttgccatg

SEQ ID NO: 6059477 - DNA, 25 bp, Homo sapien
gcattttttgcacatcacgtatgct

SEQ ID NO: 6059478 - DNA, 25 bp, Homo sapien
tgcgatggccccggtttagagtacc

SEQ ID NO: 6059479 - DNA, 25 bp, Homo sapien
tttgctcgaattaacttaccccaga

SEQ ID NO: 6059480 - DNA, 25 bp, Homo sapien
caagccttgtgcataagaaagatgt

SEQ ID NO: 6059481 - DNA, 25 bp, Homo sapien
gtatgctacttttgtattcttcact

SEQ ID NO: 6059482 - DNA, 25 bp, Homo sapien
ttattgcttcataaagaatacatct

SEQ ID NO: 6059483 - DNA, 25 bp, Homo sapien
tacatctccgtctggtaatgcgatg

SEQ ID NO: 6059484 - DNA, 25 bp, Homo sapien
ataagaaagatgtaaatccatagca

SEQ ID NO: 6059485 - DNA, 25 bp, Homo sapien
tgtattcttcactagcaggcactac

SEQ ID NO: 6059486 - DNA, 25 bp, Homo sapien
atacaaactcaacgcctactaagat

SEQ ID NO: 6059487 - DNA, 25 bp, Homo sapien
cattggttaaatatcaatcacgcat

SEQ ID NO: 6059488 - DNA, 25 bp, Homo sapien
acacttggactaaaattcacatgaa

SEQ ID NO: 6059489 - DNA, 25 bp, Homo sapien
ctaagattaatacatcaaaaacgat

SEQ ID NO: 6059490 - DNA, 25 bp, Homo sapien
aaactaactactcagaaacacaagc

SEQ ID NO: 6059491 - DNA, 25 bp, Homo sapien
tccgtctggtaatgcgatggccccg

SEQ ID NO: 6059492 - DNA, 25 bp, Homo sapien
tttgcacatcacgtatgctactttt

SEQ ID NO: 6059493 - DNA, 25 bp, Homo sapien
cctaacattctaacatcggtgacat

SEQ ID NO: 6059494 - DNA, 25 bp, Homo sapien
tgccatgtacgtgccctaactgcag

SEQ ID NO: 6059495 - DNA, 25 bp, Homo sapien
aattctcctaacattctaacatcgg

SEQ ID NO: 6059496 - DNA, 25 bp, Homo sapien
acttcaacacttggactaaaattca

SEQ ID NO: 6059497 - DNA, 25 bp, Homo sapien
catcacgcttcatcacctgagaaaa

SEQ ID NO: 6059498 - DNA, 25 bp, Homo sapien
tcgtaagctgttcgtaatacgcggc

SEQ ID NO: 6059499 - DNA, 25 bp, Homo sapien
gatgttcacgtcaagctcgagaaat

SEQ ID NO: 6059500 - DNA, 25 bp, Homo sapien
tcgtcagaactaagtgcgaagaata

SEQ ID NO: 6059501 - DNA, 25 bp, Homo sapien
atcgagtttgtcatgaaatataagg

SEQ ID NO: 6059502 - DNA, 25 bp, Homo sapien
gagatgtctacatcgtcagaactaa

SEQ ID NO: 6059503 - DNA, 25 bp, Homo sapien
agtctggaggctctctttgaggata

SEQ ID NO: 6059504 - DNA, 25 bp, Homo sapien
tgctctcgtcattgtaattgttcaa

SEQ ID NO: 6059505 - DNA, 25 bp, Homo sapien
cacaataagggaatattttacaata

SEQ ID NO: 6059506 - DNA, 25 bp, Homo sapien
tataatgagatgtctacatcgtcag

SEQ ID NO: 6059507 - DNA, 25 bp, Homo sapien
acaatatcgtaagctgttcgtaata

SEQ ID NO: 6059508 - DNA, 25 bp, Homo sapien
catgtatggctaaaaatagttaaaa

SEQ ID NO: 6059509 - DNA, 25 bp, Homo sapien
ttaaaataattgagacgacattgca

SEQ ID NO: 6059510 - DNA, 25 bp, Homo sapien
aaagagattgaaatttgatactagc

SEQ ID NO: 6059511 - DNA, 25 bp, Homo sapien
acttctcttttgaaataggagcggg

SEQ ID NO: 6059512 - DNA, 25 bp, Homo sapien
catacaaactgtgaaatctacttat

SEQ ID NO: 6059513 - DNA, 25 bp, Homo sapien
ccgcgaaataactcaaaaagctggg

SEQ ID NO: 6059514 - DNA, 25 bp, Homo sapien
cattgcacttgctataatcagactt

SEQ ID NO: 6059515 - DNA, 25 bp, Homo sapien
cttcccagtctggaggctctctttg

SEQ ID NO: 6059516 - DNA, 25 bp, Homo sapien
caagaaacttctcttttgaaatagg

SEQ ID NO: 6059517 - DNA, 25 bp, Homo sapien
atttctctggcatgtatccattggg

SEQ ID NO: 6059518 - DNA, 25 bp, Homo sapien
attgaaatttgatactagctctaaa

SEQ ID NO: 6059519 - DNA, 25 bp, Homo sapien
ttcaataacatatgcatacaagaaa

SEQ ID NO: 6059520 - DNA, 25 bp, Homo sapien
tttgaaataggagcggggctccatc

SEQ ID NO: 6059521 - DNA, 25 bp, Homo sapien
ggcatgtatccattggggcaccaca

SEQ ID NO: 6059522 - DNA, 25 bp, Homo sapien
aagtgcgaagaatacggcctacatt

SEQ ID NO: 6059523 - DNA, 25 bp, Homo sapien
tattttacaatatcgtaagctgttc

SEQ ID NO: 6059524 - DNA, 25 bp, Homo sapien
gtcacgaagaaatgattctagaaac

SEQ ID NO: 6059525 - DNA, 25 bp, Homo sapien
cttatgctcttatataatgagatgt

SEQ ID NO: 6059526 - DNA, 25 bp, Homo sapien
caaagcccaatgaatcctggcttcg

SEQ ID NO: 6059527 - DNA, 25 bp, Homo sapien
tacggcctacattagagattcttca

SEQ ID NO: 6059528 - DNA, 25 bp, Homo sapien
ggcttcgaaaatcatacaaactgtg

SEQ ID NO: 6059529 - DNA, 25 bp, Homo sapien
agaactaagtgcgaagaatacggcc

SEQ ID NO: 6059530 - DNA, 25 bp, Homo sapien
aataactcaaaaagctgggtcacga

SEQ ID NO: 6059531 - DNA, 25 bp, Homo sapien
tgattctagaaacaggcgcttatgc

SEQ ID NO: 6059532 - DNA, 25 bp, Homo sapien
ttctctttactcaaagcccaatgaa

SEQ ID NO: 6059533 - DNA, 25 bp, Homo sapien
agctgggtcacgaagaaatgattct

SEQ ID NO: 6059534 - DNA, 25 bp, Homo sapien
tcaaaataccgcgaaataactcaaa

SEQ ID NO: 6059535 - DNA, 25 bp, Homo sapien
ccaatgaatcctggcttcgaaaatc

SEQ ID NO: 6059536 - DNA, 25 bp, Homo sapien
taattgagacgacattgcacttgct

SEQ ID NO: 6059537 - DNA, 25 bp, Homo sapien
aatcgaggcagggatgttccaatga

SEQ ID NO: 6059538 - DNA, 25 bp, Homo sapien
gatgttccaatgatcgagtttgtca

SEQ ID NO: 6059539 - DNA, 25 bp, Homo sapien
gaggctctctttgaggataactaac

SEQ ID NO: 6059540 - DNA, 25 bp, Homo sapien
tataatcagacttcaataacatatg

SEQ ID NO: 6059541 - DNA, 25 bp, Homo sapien
ggagcggggctccatcacaaagaga

SEQ ID NO: 6059542 - DNA, 25 bp, Homo sapien
ggcagggatgttccaatgatcgagt

SEQ ID NO: 6059543 - DNA, 25 bp, Homo sapien
atgaaatataaggatgttcacgtca

SEQ ID NO: 6059544 - DNA, 25 bp, Homo sapien
ttactcaaagcccaatgaatcctgg

SEQ ID NO: 6059545 - DNA, 25 bp, Homo sapien
tcgtcattgtaattgttcaatttca

SEQ ID NO: 6059546 - DNA, 25 bp, Homo sapien
tataaggatgttcacgtcaagctcg

SEQ ID NO: 6059547 - DNA, 25 bp, Homo sapien
aacatatgcatacaagaaacttctc

SEQ ID NO: 6059548 - DNA, 25 bp, Homo sapien
aatttcacagacatttctctggcat

SEQ ID NO: 6059549 - DNA, 25 bp, Homo sapien
aactaacatgtatggctaaaaatag

SEQ ID NO: 6059550 - DNA, 25 bp, Homo sapien
aatagttaaaataattgagacgaca

SEQ ID NO: 6059551 - DNA, 25 bp, Homo sapien
gggctccatcacaaagagattgaaa

SEQ ID NO: 6059552 - DNA, 25 bp, Homo sapien
gaggataactaacatgtatggctaa

SEQ ID NO: 6059553 - DNA, 25 bp, Homo sapien
aatcctggcttcgaaaatcatacaa

SEQ ID NO: 6059554 - DNA, 25 bp, Homo sapien
acttatttgaaatgacaaacactgc

SEQ ID NO: 6059555 - DNA, 25 bp, Homo sapien
agacgacattgcacttgctataatc

SEQ ID NO: 6059556 - DNA, 25 bp, Homo sapien
ttgtaattgttcaatttcacagaca

SEQ ID NO: 6059557 - DNA, 25 bp, Homo sapien
tctacatcgtcagaactaagtgcga

SEQ ID NO: 6059558 - DNA, 25 bp, Homo sapien
cgtaatacgcggcttctctttactc

SEQ ID NO: 6059559 - DNA, 25 bp, Homo sapien
aactgtgaaatctacttatttgaaa

SEQ ID NO: 6059560 - DNA, 25 bp, Homo sapien
ccaatgatcgagtttgtcatgaaat

SEQ ID NO: 6059561 - DNA, 25 bp, Homo sapien
atttgatactagctctaaaatcgag

SEQ ID NO: 6059562 - DNA, 25 bp, Homo sapien
cacgtcaagctcgagaaatgtttca

SEQ ID NO: 6059563 - DNA, 25 bp, Homo sapien
acgcggcttctctttactcaaagcc

SEQ ID NO: 6059564 - DNA, 25 bp, Homo sapien
tcagacttcaataacatatgcatac

SEQ ID NO: 6059565 - DNA, 25 bp, Homo sapien
catcacaaagagattgaaatttgat

SEQ ID NO: 6059566 - DNA, 25 bp, Homo sapien
gctgttcgtaatacgcggcttctct

SEQ ID NO: 6059567 - DNA, 25 bp, Homo sapien
tcaaaaagctgggtcacgaagaaat

SEQ ID NO: 6059568 - DNA, 25 bp, Homo sapien
ctcttatataatgagatgtctacat

SEQ ID NO: 6059569 - DNA, 25 bp, Homo sapien
aagaaatgattctagaaacaggcgc

SEQ ID NO: 6059570 - DNA, 25 bp, Homo sapien
acagacatttctctggcatgtatcc

SEQ ID NO: 6059571 - DNA, 25 bp, Homo sapien
acttgctataatcagacttcaataa

SEQ ID NO: 6059572 - DNA, 25 bp, Homo sapien
ttgttcaatttcacagacatttctc

SEQ ID NO: 6059573 - DNA, 25 bp, Homo sapien
gaaatctacttatttgaaatgacaa

SEQ ID NO: 6059574 - DNA, 25 bp, Homo sapien
agggaatattttacaatatcgtaag

SEQ ID NO: 6059575 - DNA, 25 bp, Homo sapien
tagaaacaggcgcttatgctcttat

SEQ ID NO: 6059576 - DNA, 25 bp, Homo sapien
gaagaatacggcctacattagagat

SEQ ID NO: 6059577 - DNA, 25 bp, Homo sapien
caggcgcttatgctcttatataatg

SEQ ID NO: 6059578 - DNA, 25 bp, Homo sapien
gagaaatgtttcaaaataccgcgaa

SEQ ID NO: 6059579 - DNA, 25 bp, Homo sapien
ttgaaatgacaaacactgcttccca

SEQ ID NO: 6059580 - DNA, 25 bp, Homo sapien
aagctcgagaaatgtttcaaaatac

SEQ ID NO: 6059581 - DNA, 25 bp, Homo sapien
tgacaaacactgcttcccagtctgg

SEQ ID NO: 6059582 - DNA, 25 bp, Homo sapien
ggcaccacaataagggaatatttta

SEQ ID NO: 6059583 - DNA, 25 bp, Homo sapien
tgcatacaagaaacttctcttttga

SEQ ID NO: 6059584 - DNA, 25 bp, Homo sapien
tactagctctaaaatcgaggcaggg

SEQ ID NO: 6059585 - DNA, 25 bp, Homo sapien
acactgcttcccagtctggaggctc

SEQ ID NO: 6059586 - DNA, 25 bp, Homo sapien
cattggggcaccacaataagggaat

SEQ ID NO: 6059587 - DNA, 25 bp, Homo sapien
ctctaaaatcgaggcagggatgttc

SEQ ID NO: 6059588 - DNA, 25 bp, Homo sapien
tttgtcatgaaatataaggatgttc

SEQ ID NO: 6059589 - DNA, 25 bp, Homo sapien
gaaaatcatacaaactgtgaaatct

SEQ ID NO: 6059590 - DNA, 25 bp, Homo sapien
tatccattggggcaccacaataagg

SEQ ID NO: 6059591 - DNA, 25 bp, Homo sapien
ctctttgaggataactaacatgtat

SEQ ID NO: 6059592 - DNA, 25 bp, Homo sapien
tcgcttattaaaaaacggcatataa

SEQ ID NO: 6059593 - DNA, 25 bp, Homo sapien
acggcatataaatagagcagctttg

SEQ ID NO: 6059594 - DNA, 25 bp, Homo sapien
ttcaacaatttatctgttcgtccgt

SEQ ID NO: 6059595 - DNA, 25 bp, Homo sapien
gattaactctttccgacaatttggc

SEQ ID NO: 6059596 - DNA, 25 bp, Homo sapien
attaggtgtctacgtctcagatatc

SEQ ID NO: 6059597 - DNA, 25 bp, Homo sapien
tcaatcgaaaaaaatggtcaaacta

SEQ ID NO: 6059598 - DNA, 25 bp, Homo sapien
attgttgctggtgtcgctgctattg

SEQ ID NO: 6059599 - DNA, 25 bp, Homo sapien
aattgctgaagctgttttcaactac

SEQ ID NO: 6059600 - DNA, 25 bp, Homo sapien
tgacgaaagagttaacctggtcgaa

SEQ ID NO: 6059601 - DNA, 25 bp, Homo sapien
tccaactgaaacttacccagttgaa

SEQ ID NO: 6059602 - DNA, 25 bp, Homo sapien
tgctgctggtgtcgctgctgcccca

SEQ ID NO: 6059603 - DNA, 25 bp, Homo sapien
agccaccactactttatctccctct

SEQ ID NO: 6059604 - DNA, 25 bp, Homo sapien
attcgagtgagctcacatcttcact

SEQ ID NO: 6059605 - DNA, 25 bp, Homo sapien
cgctgctgccccagccaccactact

SEQ ID NO: 6059606 - DNA, 25 bp, Homo sapien
gctattgctgctggtgtcgctgctg

SEQ ID NO: 6059607 - DNA, 25 bp, Homo sapien
tgaagctgttttcaactacggtgat

SEQ ID NO: 6059608 - DNA, 25 bp, Homo sapien
gagatctataaaaaaagcattgttg

SEQ ID NO: 6059609 - DNA, 25 bp, Homo sapien
agggcaactgcatatttgtagtggt

SEQ ID NO: 6059610 - DNA, 25 bp, Homo sapien
ggatccgtatacgagatctataaaa

SEQ ID NO: 6059611 - DNA, 25 bp, Homo sapien
attgttgaagaaagggcaactgcat

SEQ ID NO: 6059612 - DNA, 25 bp, Homo sapien
cttcactaaaaagatctacaaaagt

SEQ ID NO: 6059613 - DNA, 25 bp, Homo sapien
tgccccagccaccactactttatct

SEQ ID NO: 6059614 - DNA, 25 bp, Homo sapien
tataaatagagcagctttgattaac

SEQ ID NO: 6059615 - DNA, 25 bp, Homo sapien
tggtgtcgctgctgccccagccacc

SEQ ID NO: 6059616 - DNA, 25 bp, Homo sapien
gtgaaatagctattcaacaatttat

SEQ ID NO: 6059617 - DNA, 25 bp, Homo sapien
cggtgatttcaccactatgttgact

SEQ ID NO: 6059618 - DNA, 25 bp, Homo sapien
ggctgaatactatatgttccaagct

SEQ ID NO: 6059619 - DNA, 25 bp, Homo sapien
gctcctgtatatatcataataagat

SEQ ID NO: 6059620 - DNA, 25 bp, Homo sapien
tgctcatccaactgaaacttaccca

SEQ ID NO: 6059621 - DNA, 25 bp, Homo sapien
agatatcagagctcatttggctgaa

SEQ ID NO: 6059622 - DNA, 25 bp, Homo sapien
tagtggtgaagagtatgggataggg

SEQ ID NO: 6059623 - DNA, 25 bp, Homo sapien
tatttgtagtggtgaagagtatggg

SEQ ID NO: 6059624 - DNA, 25 bp, Homo sapien
agagtatgggataggggagcccaag

SEQ ID NO: 6059625 - DNA, 25 bp, Homo sapien
gatctacaaaagttcaatcgaaaaa

SEQ ID NO: 6059626 - DNA, 25 bp, Homo sapien
gtgagctcacatcttcactaaaaag

SEQ ID NO: 6059627 - DNA, 25 bp, Homo sapien
tataaaaaaagcattgttgaagaaa

SEQ ID NO: 6059628 - DNA, 25 bp, Homo sapien
tcatttggctgaatactatatgttc

SEQ ID NO: 6059629 - DNA, 25 bp, Homo sapien
attgttatttacattcgagtgagct

SEQ ID NO: 6059630 - DNA, 25 bp, Homo sapien
caactacggtgatttcaccactatg

SEQ ID NO: 6059631 - DNA, 25 bp, Homo sapien
gtatacgagatctataaaaaaagca

SEQ ID NO: 6059632 - DNA, 25 bp, Homo sapien
atttacattcgagtgagctcacatc

SEQ ID NO: 6059633 - DNA, 25 bp, Homo sapien
tctttccgacaatttggcattgtta

SEQ ID NO: 6059634 - DNA, 25 bp, Homo sapien
tagagcagctttgattaactctttc

SEQ ID NO: 6059635 - DNA, 25 bp, Homo sapien
atactatatgttccaagctgctcat

SEQ ID NO: 6059636 - DNA, 25 bp, Homo sapien
ttacccagttgaaattgctgaagct

SEQ ID NO: 6059637 - DNA, 25 bp, Homo sapien
ggtcgaattaggtgtctacgtctca

SEQ ID NO: 6059638 - DNA, 25 bp, Homo sapien
ccaagctgctcatccaactgaaact

SEQ ID NO: 6059639 - DNA, 25 bp, Homo sapien
tcacatcttcactaaaaagatctac

SEQ ID NO: 6059640 - DNA, 25 bp, Homo sapien
aggcgcggatccgtatacgagatct

SEQ ID NO: 6059641 - DNA, 25 bp, Homo sapien
gtaagagaaatatcagcagtgaaat

SEQ ID NO: 6059642 - DNA, 25 bp, Homo sapien
cactactttatctccctctgacgaa

SEQ ID NO: 6059643 - DNA, 25 bp, Homo sapien
cgacaatttggcattgttatttaca

SEQ ID NO: 6059644 - DNA, 25 bp, Homo sapien
tagctattcaacaatttatctgttc

SEQ ID NO: 6059645 - DNA, 25 bp, Homo sapien
tgaaacttacccagttgaaattgct

SEQ ID NO: 6059646 - DNA, 25 bp, Homo sapien
cagagctcatttggctgaatactat

SEQ ID NO: 6059647 - DNA, 25 bp, Homo sapien
tgggataggggagcccaagtaagag

SEQ ID NO: 6059648 - DNA, 25 bp, Homo sapien
agctttgattaactctttccgacaa

SEQ ID NO: 6059649 - DNA, 25 bp, Homo sapien
atggtcaaactaacttcaattgttg

SEQ ID NO: 6059650 - DNA, 25 bp, Homo sapien
tttatctccctctgacgaaagagtt

SEQ ID NO: 6059651 - DNA, 25 bp, Homo sapien
tccctctgacgaaagagttaacctg

SEQ ID NO: 6059652 - DNA, 25 bp, Homo sapien
gaagaaagggcaactgcatatttgt

SEQ ID NO: 6059653 - DNA, 25 bp, Homo sapien
tggtattcccgctgatcaagtcact

SEQ ID NO: 6059654 - DNA, 25 bp, Homo sapien
aaactaacttcaattgttgctggtg

SEQ ID NO: 6059655 - DNA, 25 bp, Homo sapien
taataagatataggtagtacaaagg

SEQ ID NO: 6059656 - DNA, 25 bp, Homo sapien
gctggtgtcgctgctattgctgctg

SEQ ID NO: 6059657 - DNA, 25 bp, Homo sapien
aggggagcccaagtaagagaaatat

SEQ ID NO: 6059658 - DNA, 25 bp, Homo sapien
tctgttcgtccgtcgcttattaaaa

SEQ ID NO: 6059659 - DNA, 25 bp, Homo sapien
taaaaagatctacaaaagttcaatc

SEQ ID NO: 6059660 - DNA, 25 bp, Homo sapien
agagttaacctggtcgaattaggtg

SEQ ID NO: 6059661 - DNA, 25 bp, Homo sapien
gtcgctgctattgctgctggtgtcg

SEQ ID NO: 6059662 - DNA, 25 bp, Homo sapien
gaaatatcagcagtgaaatagctat

SEQ ID NO: 6059663 - DNA, 25 bp, Homo sapien
gcccaagtaagagaaatatcagcag

SEQ ID NO: 6059664 - DNA, 25 bp, Homo sapien
actgcatatttgtagtggtgaagag

SEQ ID NO: 6059665 - DNA, 25 bp, Homo sapien
gttgactggtattcccgctgatcaa

SEQ ID NO: 6059666 - DNA, 25 bp, Homo sapien
tacaaaggcgcggatccgtatacga

SEQ ID NO: 6059667 - DNA, 25 bp, Homo sapien
taacctggtcgaattaggtgtctac

SEQ ID NO: 6059668 - DNA, 25 bp, Homo sapien
tgtctacgtctcagatatcagagct

SEQ ID NO: 6059669 - DNA, 25 bp, Homo sapien
tcagcagtgaaatagctattcaaca

SEQ ID NO: 6059670 - DNA, 25 bp, Homo sapien
agatataggtagtacaaaggcgcgg

SEQ ID NO: 6059671 - DNA, 25 bp, Homo sapien
aaaagcattgttgaagaaagggcaa

SEQ ID NO: 6059672 - DNA, 25 bp, Homo sapien
acttcaattgttgctggtgtcgctg

SEQ ID NO: 6059673 - DNA, 25 bp, Homo sapien
tatcataataagatataggtagtac

SEQ ID NO: 6059674 - DNA, 25 bp, Homo sapien
cactatgttgactggtattcccgct

SEQ ID NO: 6059675 - DNA, 25 bp, Homo sapien
tatgttccaagctgctcatccaact

SEQ ID NO: 6059676 - DNA, 25 bp, Homo sapien
cgtctcagatatcagagctcatttg

SEQ ID NO: 6059677 - DNA, 25 bp, Homo sapien
tttggcattgttatttacattcgag

SEQ ID NO: 6059678 - DNA, 25 bp, Homo sapien
aggtagtacaaaggcgcggatccgt

SEQ ID NO: 6059679 - DNA, 25 bp, Homo sapien
tgttttcaactacggtgatttcacc

SEQ ID NO: 6059680 - DNA, 25 bp, Homo sapien
taaaaaacggcatataaatagagca

SEQ ID NO: 6059681 - DNA, 25 bp, Homo sapien
tttcaccactatgttgactggtatt

SEQ ID NO: 6059682 - DNA, 25 bp, Homo sapien
aatttatctgttcgtccgtcgctta

SEQ ID NO: 6059683 - DNA, 25 bp, Homo sapien
agttgaaattgctgaagctgttttc

SEQ ID NO: 6059684 - DNA, 25 bp, Homo sapien
tttttccttaaattgttgatgtcaa

SEQ ID NO: 6059685 - DNA, 25 bp, Homo sapien
ctgctgttgccaaaaaagttttgtt

SEQ ID NO: 6059686 - DNA, 25 bp, Homo sapien
gacttctttccgcttgcgcacattt

SEQ ID NO: 6059687 - DNA, 25 bp, Homo sapien
caaatatccagaagaaaactgctgt

SEQ ID NO: 6059688 - DNA, 25 bp, Homo sapien
taaagtacaaatatccagaagaaaa

SEQ ID NO: 6059689 - DNA, 25 bp, Homo sapien
ggatgataaagtacaaatatccaga

SEQ ID NO: 6059690 - DNA, 25 bp, Homo sapien
gttttgttaaacgtgtctgtgaatg

SEQ ID NO: 6059691 - DNA, 25 bp, Homo sapien
aataacaccacaattttgcttcttc

SEQ ID NO: 6059692 - DNA, 25 bp, Homo sapien
agcttccaatttgattatatggtag

SEQ ID NO: 6059693 - DNA, 25 bp, Homo sapien
cgatggcaaactgatcagaatcaag

SEQ ID NO: 6059694 - DNA, 25 bp, Homo sapien
atggtaggacttaaacttcccatat

SEQ ID NO: 6059695 - DNA, 25 bp, Homo sapien
atcagaatcaagagacaaagctgct

SEQ ID NO: 6059696 - DNA, 25 bp, Homo sapien
ttaaacgtgtctgtgaatgacttct

SEQ ID NO: 6059697 - DNA, 25 bp, Homo sapien
tggtgttttgttaaacgtgtctgtg

SEQ ID NO: 6059698 - DNA, 25 bp, Homo sapien
ttcaaagcaacatatatttgaaaag

SEQ ID NO: 6059699 - DNA, 25 bp, Homo sapien
gtgtctgtgaatgacttctttccgc

SEQ ID NO: 6059700 - DNA, 25 bp, Homo sapien
agaagaaacgagacggtagatacaa

SEQ ID NO: 6059701 - DNA, 25 bp, Homo sapien
atctagcggttttgaagaagtacgg

SEQ ID NO: 6059702 - DNA, 25 bp, Homo sapien
gatacaattcaaagcaacatatatt

SEQ ID NO: 6059703 - DNA, 25 bp, Homo sapien
taaagcagaagaaacgagacggtag

SEQ ID NO: 6059704 - DNA, 25 bp, Homo sapien
ttaatttgcttatctagcggttttg

SEQ ID NO: 6059705 - DNA, 25 bp, Homo sapien
atttcacttcccctctgattaatag

SEQ ID NO: 6059706 - DNA, 25 bp, Homo sapien
cgtataatacgtctcggtcatttca

SEQ ID NO: 6059707 - DNA, 25 bp, Homo sapien
cttaaattgttgatgtcaacatgac

SEQ ID NO: 6059708 - DNA, 25 bp, Homo sapien
gccaaggggaatttaggacgctcaa

SEQ ID NO: 6059709 - DNA, 25 bp, Homo sapien
atcaagagacaaagctgctgtggtg

SEQ ID NO: 6059710 - DNA, 25 bp, Homo sapien
gttgggttaatttgcttatctagcg

SEQ ID NO: 6059711 - DNA, 25 bp, Homo sapien
aaatgtaggttgacaggaaaccagc

SEQ ID NO: 6059712 - DNA, 25 bp, Homo sapien
ttgttgatgtcaacatgacgtataa

SEQ ID NO: 6059713 - DNA, 25 bp, Homo sapien
atatatttgaaaagggtcttcaact

SEQ ID NO: 6059714 - DNA, 25 bp, Homo sapien
cgctcaaaagttgggttaatttgct

SEQ ID NO: 6059715 - DNA, 25 bp, Homo sapien
tagcccagcggttagaatagccatt

SEQ ID NO: 6059716 - DNA, 25 bp, Homo sapien
tcggttggatgataaagtacaaata

SEQ ID NO: 6059717 - DNA, 25 bp, Homo sapien
tcggtcatttcacttcccctctgat

SEQ ID NO: 6059718 - DNA, 25 bp, Homo sapien
agcggttagaatagccattcgaaca

SEQ ID NO: 6059719 - DNA, 25 bp, Homo sapien
ctttcatcggttggatgataaagta

SEQ ID NO: 6059720 - DNA, 25 bp, Homo sapien
gattaatagcccagcggttagaata

SEQ ID NO: 6059721 - DNA, 25 bp, Homo sapien
aaccagctttcatcggttggatgat

SEQ ID NO: 6059722 - DNA, 25 bp, Homo sapien
atgtcaacatgacgtataatacgtc

SEQ ID NO: 6059723 - DNA, 25 bp, Homo sapien
agaagtacgggccatttaaatgtag

SEQ ID NO: 6059724 - DNA, 25 bp, Homo sapien
acaggaaaccagctttcatcggttg

SEQ ID NO: 6059725 - DNA, 25 bp, Homo sapien
atacgtctcggtcatttcacttccc

SEQ ID NO: 6059726 - DNA, 25 bp, Homo sapien
cttcttcgatggcaaactgatcaga

SEQ ID NO: 6059727 - DNA, 25 bp, Homo sapien
agccattcgaacacagaaagcttcc

SEQ ID NO: 6059728 - DNA, 25 bp, Homo sapien
tttgcttatctagcggttttgaaga

SEQ ID NO: 6059729 - DNA, 25 bp, Homo sapien
acttcccctctgattaatagcccag

SEQ ID NO: 6059730 - DNA, 25 bp, Homo sapien
acggtaaagcagaagaaacgagacg

SEQ ID NO: 6059731 - DNA, 25 bp, Homo sapien
attttgcttcttcgatggcaaactg

SEQ ID NO: 6059732 - DNA, 25 bp, Homo sapien
ccatttaaatgtaggttgacaggaa

SEQ ID NO: 6059733 - DNA, 25 bp, Homo sapien
aaactgatcagaatcaagagacaaa

SEQ ID NO: 6059734 - DNA, 25 bp, Homo sapien
gattatatggtaggacttaaacttc

SEQ ID NO: 6059735 - DNA, 25 bp, Homo sapien
ctgtggtggtgttttgttaaacgtg

SEQ ID NO: 6059736 - DNA, 25 bp, Homo sapien
aagctgctgtggtggtgttttgtta

SEQ ID NO: 6059737 - DNA, 25 bp, Homo sapien
gtgaatgacttctttccgcttgcgc

SEQ ID NO: 6059738 - DNA, 25 bp, Homo sapien
aacgagacggtagatacaattcaaa

SEQ ID NO: 6059739 - DNA, 25 bp, Homo sapien
acatgacgtataatacgtctcggtc

SEQ ID NO: 6059740 - DNA, 25 bp, Homo sapien
tacgggccatttaaatgtaggttga

SEQ ID NO: 6059741 - DNA, 25 bp, Homo sapien
atattaacgagtcttctgagccaag

SEQ ID NO: 6059742 - DNA, 25 bp, Homo sapien
accacaattttgcttcttcgatggc

SEQ ID NO: 6059743 - DNA, 25 bp, Homo sapien
cttgcgcacatttttctactggctc

SEQ ID NO: 6059744 - DNA, 25 bp, Homo sapien
cacatttttctactggctctcctca

SEQ ID NO: 6059745 - DNA, 25 bp, Homo sapien
acggtagatacaattcaaagcaaca

SEQ ID NO: 6059746 - DNA, 25 bp, Homo sapien
aggttgacaggaaaccagctttcat

SEQ ID NO: 6059747 - DNA, 25 bp, Homo sapien
acgagtcttctgagccaaggggaat

SEQ ID NO: 6059748 - DNA, 25 bp, Homo sapien
ccctctgattaatagcccagcggtt

SEQ ID NO: 6059749 - DNA, 25 bp, Homo sapien
acagaaagcttccaatttgattata

SEQ ID NO: 6059750 - DNA, 25 bp, Homo sapien
tcgaacacagaaagcttccaatttg

SEQ ID NO: 6059751 - DNA, 25 bp, Homo sapien
caatttgattatatggtaggactta

SEQ ID NO: 6059752 - DNA, 25 bp, Homo sapien
agcaacatatatttgaaaagggtct

SEQ ID NO: 6059753 - DNA, 25 bp, Homo sapien
tagaatagccattcgaacacagaaa

SEQ ID NO: 6059754 - DNA, 25 bp, Homo sapien
tttccgcttgcgcacatttttctac

SEQ ID NO: 6059755 - DNA, 25 bp, Homo sapien
agaaaactgctgttgccaaaaaagt

SEQ ID NO: 6059756 - DNA, 25 bp, Homo sapien
cttctgagccaaggggaatttagga

SEQ ID NO: 6059757 - DNA, 25 bp, Homo sapien
tccagaagaaaactgctgttgccaa

SEQ ID NO: 6059758 - DNA, 25 bp, Homo sapien
cttcccatattaacgagtcttctga

SEQ ID NO: 6059759 - DNA, 25 bp, Homo sapien
agacaaagctgctgtggtggtgttt

SEQ ID NO: 6059760 - DNA, 25 bp, Homo sapien
ttgctcagtgatcattgctagccgg

SEQ ID NO: 6059761 - DNA, 25 bp, Homo sapien
tagttattccgctttgtctcaataa

SEQ ID NO: 6059762 - DNA, 25 bp, Homo sapien
atatcgtagttattccgctttgtct

SEQ ID NO: 6059763 - DNA, 25 bp, Homo sapien
aagagaggaggagaaacgcataagc

SEQ ID NO: 6059764 - DNA, 25 bp, Homo sapien
gatgaaaacatttaaaacacgggca

SEQ ID NO: 6059765 - DNA, 25 bp, Homo sapien
gctgtggatgaaaacatttaaaaca

SEQ ID NO: 6059766 - DNA, 25 bp, Homo sapien
tctttatataggcaagcataaccga

SEQ ID NO: 6059767 - DNA, 25 bp, Homo sapien
tttgtctcaataagcttttgcttac

SEQ ID NO: 6059768 - DNA, 25 bp, Homo sapien
gtgagttaacgctttaatttgctca

SEQ ID NO: 6059769 - DNA, 25 bp, Homo sapien
cctcatgttatttttgccagcttta

SEQ ID NO: 6059770 - DNA, 25 bp, Homo sapien
agtaatattacgttattggatcttc

SEQ ID NO: 6059771 - DNA, 25 bp, Homo sapien
catacctaatcatctcagtatatta

SEQ ID NO: 6059772 - DNA, 25 bp, Homo sapien
aataacaacatcagtaatattacgt

SEQ ID NO: 6059773 - DNA, 25 bp, Homo sapien
agcttttgcttacttgagaaaaaga

SEQ ID NO: 6059774 - DNA, 25 bp, Homo sapien
atataggcaagcataaccgacgcta

SEQ ID NO: 6059775 - DNA, 25 bp, Homo sapien
ttttgtagaacccagccatacctaa

SEQ ID NO: 6059776 - DNA, 25 bp, Homo sapien
tcttgttgtactaatgcacttgctt

SEQ ID NO: 6059777 - DNA, 25 bp, Homo sapien
aatatatctttatataggcaagcat

SEQ ID NO: 6059778 - DNA, 25 bp, Homo sapien
ttctcgaacgtctcacttccaatca

SEQ ID NO: 6059779 - DNA, 25 bp, Homo sapien
caacgaaaatgtaaggcaaatatat

SEQ ID NO: 6059780 - DNA, 25 bp, Homo sapien
taaaagcaaaaatcattctacgttc

SEQ ID NO: 6059781 - DNA, 25 bp, Homo sapien
tagccggatatttgtgtttttgtag

SEQ ID NO: 6059782 - DNA, 25 bp, Homo sapien
tgagtatagtatagttgtggccagt

SEQ ID NO: 6059783 - DNA, 25 bp, Homo sapien
gcaagcataaccgacgctaactttg

SEQ ID NO: 6059784 - DNA, 25 bp, Homo sapien
tgactcaaaatatggattttctcga

SEQ ID NO: 6059785 - DNA, 25 bp, Homo sapien
tagtatagttgtggccagttcttgt

SEQ ID NO: 6059786 - DNA, 25 bp, Homo sapien
aaatgtaaggcaaatatatctttat

SEQ ID NO: 6059787 - DNA, 25 bp, Homo sapien
tcattctacgttcaacgaaaatgta

SEQ ID NO: 6059788 - DNA, 25 bp, Homo sapien
tgtactaatgcacttgctttcgtat

SEQ ID NO: 6059789 - DNA, 25 bp, Homo sapien
gcttcatcaacgttattaatatcgt

SEQ ID NO: 6059790 - DNA, 25 bp, Homo sapien
atcccatcaaatgctgtggatgaaa

SEQ ID NO: 6059791 - DNA, 25 bp, Homo sapien
aaaatatggattttctcgaacgtct

SEQ ID NO: 6059792 - DNA, 25 bp, Homo sapien
ctacaataatgagtgagttaacgct

SEQ ID NO: 6059793 - DNA, 25 bp, Homo sapien
tttaatttgctcagtgatcattgct

SEQ ID NO: 6059794 - DNA, 25 bp, Homo sapien
taatcatctcagtatattatctgaa

SEQ ID NO: 6059795 - DNA, 25 bp, Homo sapien
tgcttacttgagaaaaagaacgaag

SEQ ID NO: 6059796 - DNA, 25 bp, Homo sapien
attacgttattggatcttccactcc

SEQ ID NO: 6059797 - DNA, 25 bp, Homo sapien
cttgagaaaaagaacgaagtttctg

SEQ ID NO: 6059798 - DNA, 25 bp, Homo sapien
ttattaatatcgtagttattccgct

SEQ ID NO: 6059799 - DNA, 25 bp, Homo sapien
taacgctttaatttgctcagtgatc

SEQ ID NO: 6059800 - DNA, 25 bp, Homo sapien
aacatcagtaatattacgttattgg

SEQ ID NO: 6059801 - DNA, 25 bp, Homo sapien
gttgtggccagttcttgttgtacta

SEQ ID NO: 6059802 - DNA, 25 bp, Homo sapien
aaaaaagagaggaggagaaacgcat

SEQ ID NO: 6059803 - DNA, 25 bp, Homo sapien
tttattaaaagcaaaaatcattcta

SEQ ID NO: 6059804 - DNA, 25 bp, Homo sapien
tcgaggaaaaaaagagaggaggaga

SEQ ID NO: 6059805 - DNA, 25 bp, Homo sapien
tcacttccaatcatcccatcaaatg

SEQ ID NO: 6059806 - DNA, 25 bp, Homo sapien
aaggcaaatatatctttatataggc

SEQ ID NO: 6059807 - DNA, 25 bp, Homo sapien
tttgccagctttaataacaacatca

SEQ ID NO: 6059808 - DNA, 25 bp, Homo sapien
tagaacccagccatacctaatcatc

SEQ ID NO: 6059809 - DNA, 25 bp, Homo sapien
cgaagtttctgtttgagattttcct

SEQ ID NO: 6059810 - DNA, 25 bp, Homo sapien
ataaccgacgctaactttgttcgag

SEQ ID NO: 6059811 - DNA, 25 bp, Homo sapien
cataagctacaataatgagtgagtt

SEQ ID NO: 6059812 - DNA, 25 bp, Homo sapien
ttccgctttgtctcaataagctttt

SEQ ID NO: 6059813 - DNA, 25 bp, Homo sapien
gtatattatctgaattcttgactca

SEQ ID NO: 6059814 - DNA, 25 bp, Homo sapien
agtgatcattgctagccggatattt

SEQ ID NO: 6059815 - DNA, 25 bp, Homo sapien
ccaatcatcccatcaaatgctgtgg

SEQ ID NO: 6059816 - DNA, 25 bp, Homo sapien
aaaaatgagtatagtatagttgtgg

SEQ ID NO: 6059817 - DNA, 25 bp, Homo sapien
gacgctaactttgttcgagcttcat

SEQ ID NO: 6059818 - DNA, 25 bp, Homo sapien
aattcttgactcaaaatatggattt

SEQ ID NO: 6059819 - DNA, 25 bp, Homo sapien
aaagaacgaagtttctgtttgagat

SEQ ID NO: 6059820 - DNA, 25 bp, Homo sapien
caaaaatcattctacgttcaacgaa

SEQ ID NO: 6059821 - DNA, 25 bp, Homo sapien
tctcagtatattatctgaattcttg

SEQ ID NO: 6059822 - DNA, 25 bp, Homo sapien
gttcgagcttcatcaacgttattaa

SEQ ID NO: 6059823 - DNA, 25 bp, Homo sapien
gcaagaaaaaatgagtatagtatag

SEQ ID NO: 6059824 - DNA, 25 bp, Homo sapien
agctttaataacaacatcagtaata

SEQ ID NO: 6059825 - DNA, 25 bp, Homo sapien
tcaacgttattaatatcgtagttat

SEQ ID NO: 6059826 - DNA, 25 bp, Homo sapien
gatcttccactccggttcgaggaaa

SEQ ID NO: 6059827 - DNA, 25 bp, Homo sapien
aactttgttcgagcttcatcaacgt

SEQ ID NO: 6059828 - DNA, 25 bp, Homo sapien
gccagttcttgttgtactaatgcac

SEQ ID NO: 6059829 - DNA, 25 bp, Homo sapien
acacgggcaagaaaaaatgagtata

SEQ ID NO: 6059830 - DNA, 25 bp, Homo sapien
aatgcacttgctttcgtatcaaagt

SEQ ID NO: 6059831 - DNA, 25 bp, Homo sapien
ggaggagaaacgcataagctacaat

SEQ ID NO: 6059832 - DNA, 25 bp, Homo sapien
gaaacgcataagctacaataatgag

SEQ ID NO: 6059833 - DNA, 25 bp, Homo sapien
tacgttcaacgaaaatgtaaggcaa

SEQ ID NO: 6059834 - DNA, 25 bp, Homo sapien
ccagccatacctaatcatctcagta

SEQ ID NO: 6059835 - DNA, 25 bp, Homo sapien
ttgctttcgtatcaaagttgaagaa

SEQ ID NO: 6059836 - DNA, 25 bp, Homo sapien
taatgagtgagttaacgctttaatt

SEQ ID NO: 6059837 - DNA, 25 bp, Homo sapien
aacgtctcacttccaatcatcccat

SEQ ID NO: 6059838 - DNA, 25 bp, Homo sapien
caaagttgaagaagcactgaaagaa

SEQ ID NO: 6059839 - DNA, 25 bp, Homo sapien
tggattttctcgaacgtctcacttc

SEQ ID NO: 6059840 - DNA, 25 bp, Homo sapien
tcaataagcttttgcttacttgaga

SEQ ID NO: 6059841 - DNA, 25 bp, Homo sapien
ttgtgtttttgtagaacccagccat

SEQ ID NO: 6059842 - DNA, 25 bp, Homo sapien
agcactgaaagaacaacaaaaaatt

SEQ ID NO: 6059843 - DNA, 25 bp, Homo sapien
gttatttttgccagctttaataaca

SEQ ID NO: 6059844 - DNA, 25 bp, Homo sapien
tcgtatcaaagttgaagaagcactg

SEQ ID NO: 6059845 - DNA, 25 bp, Homo sapien
tcaaatgctgtggatgaaaacattt

SEQ ID NO: 6059846 - DNA, 25 bp, Homo sapien
ttattggatcttccactccggttcg

SEQ ID NO: 6059847 - DNA, 25 bp, Homo sapien
gatatttgtgtttttgtagaaccca

SEQ ID NO: 6059848 - DNA, 25 bp, Homo sapien
tgaagaagcactgaaagaacaacaa

SEQ ID NO: 6059849 - DNA, 25 bp, Homo sapien
cattgctagccggatatttgtgttt

SEQ ID NO: 6059850 - DNA, 25 bp, Homo sapien
tatctgaattcttgactcaaaatat

SEQ ID NO: 6059851 - DNA, 25 bp, Homo sapien
tggatttttcatttccgcttttgcc

SEQ ID NO: 6059852 - DNA, 25 bp, Homo sapien
tcaactgatcggaacaaattgctat

SEQ ID NO: 6059853 - DNA, 25 bp, Homo sapien
tcaaatttagactacgtcatcaacc

SEQ ID NO: 6059854 - DNA, 25 bp, Homo sapien
tcccgaaattgacctcttatatgta

SEQ ID NO: 6059855 - DNA, 25 bp, Homo sapien
ttatcatacagaatttttcatggat

SEQ ID NO: 6059856 - DNA, 25 bp, Homo sapien
atcacctagaaaagcttggaaattg

SEQ ID NO: 6059857 - DNA, 25 bp, Homo sapien
aacaaattgctattacatgtaaaaa

SEQ ID NO: 6059858 - DNA, 25 bp, Homo sapien
ctcttatatgtacctcaattgcaga

SEQ ID NO: 6059859 - DNA, 25 bp, Homo sapien
tcgtaccaccaatacaaaaggatat

SEQ ID NO: 6059860 - DNA, 25 bp, Homo sapien
cgttgatgaccttcaactgatcgga

SEQ ID NO: 6059861 - DNA, 25 bp, Homo sapien
tgctattacatgtaaaaatctcatg

SEQ ID NO: 6059862 - DNA, 25 bp, Homo sapien
gtatgagcgaatctttttgtgttat

SEQ ID NO: 6059863 - DNA, 25 bp, Homo sapien
ttcatggattttgcatgtttcggta

SEQ ID NO: 6059864 - DNA, 25 bp, Homo sapien
agtgcatttttttagtatgaaaggt

SEQ ID NO: 6059865 - DNA, 25 bp, Homo sapien
catcaaccaaattacaccctatgaa

SEQ ID NO: 6059866 - DNA, 25 bp, Homo sapien
agcttggaaattggtcctgagtttt

SEQ ID NO: 6059867 - DNA, 25 bp, Homo sapien
tggtaagtgcatttttttagtatga

SEQ ID NO: 6059868 - DNA, 25 bp, Homo sapien
tcctgagttttttgttgatggtaag

SEQ ID NO: 6059869 - DNA, 25 bp, Homo sapien
aacggtttggtaaactgctgaagca

SEQ ID NO: 6059870 - DNA, 25 bp, Homo sapien
taggcaatcacctagaaaagcttgg

SEQ ID NO: 6059871 - DNA, 25 bp, Homo sapien
cctatgaaaaacataagattataag

SEQ ID NO: 6059872 - DNA, 25 bp, Homo sapien
taactttacgtaggtgaattattga

SEQ ID NO: 6059873 - DNA, 25 bp, Homo sapien
tgattgctgggaaacggtttggtaa

SEQ ID NO: 6059874 - DNA, 25 bp, Homo sapien
gatattagctgctaagttctccctt

SEQ ID NO: 6059875 - DNA, 25 bp, Homo sapien
ctcccttgccctagtgaattacgtt

SEQ ID NO: 6059876 - DNA, 25 bp, Homo sapien
ttattgaagggctttgtgataggtg

SEQ ID NO: 6059877 - DNA, 25 bp, Homo sapien
ttggtaaactgctgaagcaattgtt

SEQ ID NO: 6059878 - DNA, 25 bp, Homo sapien
caccaatacaaaaggatatgatcgt

SEQ ID NO: 6059879 - DNA, 25 bp, Homo sapien
agctgctaagttctcccttgcccta

SEQ ID NO: 6059880 - DNA, 25 bp, Homo sapien
cctcaattgcagatagcatcaaatt

SEQ ID NO: 6059881 - DNA, 25 bp, Homo sapien
ccaaattacaccctatgaaaaacat

SEQ ID NO: 6059882 - DNA, 25 bp, Homo sapien
ctttttgtgttataggcaatcacct

SEQ ID NO: 6059883 - DNA, 25 bp, Homo sapien
tctcatgtatgagcgaatctttttg

SEQ ID NO: 6059884 - DNA, 25 bp, Homo sapien
tttggccccatctggatttttcatt

SEQ ID NO: 6059885 - DNA, 25 bp, Homo sapien
tgaccttcaactgatcggaacaaat

SEQ ID NO: 6059886 - DNA, 25 bp, Homo sapien
gccgtgcgttgatgaccttcaactg

SEQ ID NO: 6059887 - DNA, 25 bp, Homo sapien
ttggtcccgaaattgacctcttata

SEQ ID NO: 6059888 - DNA, 25 bp, Homo sapien
tatgtacctcaattgcagatagcat

SEQ ID NO: 6059889 - DNA, 25 bp, Homo sapien
aagggctttgtgataggtgtggatg

SEQ ID NO: 6059890 - DNA, 25 bp, Homo sapien
atagcatcaaatttagactacgtca

SEQ ID NO: 6059891 - DNA, 25 bp, Homo sapien
aaaaacataagattataagcatgcg

SEQ ID NO: 6059892 - DNA, 25 bp, Homo sapien
aggatatgatcgttatcatacagaa

SEQ ID NO: 6059893 - DNA, 25 bp, Homo sapien
aattgacctcttatatgtacctcaa

SEQ ID NO: 6059894 - DNA, 25 bp, Homo sapien
gttttttgttgatggtaagtgcatt

SEQ ID NO: 6059895 - DNA, 25 bp, Homo sapien
aatacttctgcttttggccccatct

SEQ ID NO: 6059896 - DNA, 25 bp, Homo sapien
gtacacaatacttctgcttttggcc

SEQ ID NO: 6059897 - DNA, 25 bp, Homo sapien
tacatgtaaaaatctcatgtatgag

SEQ ID NO: 6059898 - DNA, 25 bp, Homo sapien
tatctttgagcatcgtaccaccaat

SEQ ID NO: 6059899 - DNA, 25 bp, Homo sapien
tgagcatcgtaccaccaatacaaaa

SEQ ID NO: 6059900 - DNA, 25 bp, Homo sapien
tgaagcaattgttgtacacaatact

SEQ ID NO: 6059901 - DNA, 25 bp, Homo sapien
catgtttcggtataactttacgtag

SEQ ID NO: 6059902 - DNA, 25 bp, Homo sapien
tgaaaggtttacgatattagctgct

SEQ ID NO: 6059903 - DNA, 25 bp, Homo sapien
tacctgccgtgcgttgatgaccttc

SEQ ID NO: 6059904 - DNA, 25 bp, Homo sapien
tttgtgataggtgtggatgtacctg

SEQ ID NO: 6059905 - DNA, 25 bp, Homo sapien
ggtgaattattgaagggctttgtga

SEQ ID NO: 6059906 - DNA, 25 bp, Homo sapien
gtggatgtacctgccgtgcgttgat

SEQ ID NO: 6059907 - DNA, 25 bp, Homo sapien
ctcaggtgcaacaataactatcttt

SEQ ID NO: 6059908 - DNA, 25 bp, Homo sapien
taagttctcccttgccctagtgaat

SEQ ID NO: 6059909 - DNA, 25 bp, Homo sapien
gatcggaacaaattgctattacatg

SEQ ID NO: 6059910 - DNA, 25 bp, Homo sapien
tgttgatggtaagtgcattttttta

SEQ ID NO: 6059911 - DNA, 25 bp, Homo sapien
cccatctggatttttcatttccgct

SEQ ID NO: 6059912 - DNA, 25 bp, Homo sapien
gtgttataggcaatcacctagaaaa

SEQ ID NO: 6059913 - DNA, 25 bp, Homo sapien
tacgtaggtgaattattgaagggct

SEQ ID NO: 6059914 - DNA, 25 bp, Homo sapien
ttgcagatagcatcaaatttagact

SEQ ID NO: 6059915 - DNA, 25 bp, Homo sapien
gattttgcatgtttcggtataactt

SEQ ID NO: 6059916 - DNA, 25 bp, Homo sapien
ttagactacgtcatcaaccaaatta

SEQ ID NO: 6059917 - DNA, 25 bp, Homo sapien
tgatcgttatcatacagaatttttc

SEQ ID NO: 6059918 - DNA, 25 bp, Homo sapien
ataggtgtggatgtacctgccgtgc

SEQ ID NO: 6059919 - DNA, 25 bp, Homo sapien
gtttacgatattagctgctaagttc

SEQ ID NO: 6059920 - DNA, 25 bp, Homo sapien
aattggtcctgagttttttgttgat

SEQ ID NO: 6059921 - DNA, 25 bp, Homo sapien
attgttgtacacaatacttctgctt

SEQ ID NO: 6059922 - DNA, 25 bp, Homo sapien
tacgtcatcaaccaaattacaccct

SEQ ID NO: 6059923 - DNA, 25 bp, Homo sapien
aactgctgaagcaattgttgtacac

SEQ ID NO: 6059924 - DNA, 25 bp, Homo sapien
tgcaacaataactatctttgagcat

SEQ ID NO: 6059925 - DNA, 25 bp, Homo sapien
tagaaaagcttggaaattggtcctg

SEQ ID NO: 6059926 - DNA, 25 bp, Homo sapien
ttagtatgaaaggtttacgatatta

SEQ ID NO: 6059927 - DNA, 25 bp, Homo sapien
ttacaccctatgaaaaacataagat

SEQ ID NO: 6059928 - DNA, 25 bp, Homo sapien
gcgaatctttttgtgttataggcaa

SEQ ID NO: 6059929 - DNA, 25 bp, Homo sapien
tttcatttccgcttttgcctcaggt

SEQ ID NO: 6059930 - DNA, 25 bp, Homo sapien
tacaaaaggatatgatcgttatcat

SEQ ID NO: 6059931 - DNA, 25 bp, Homo sapien
ttccgcttttgcctcaggtgcaaca

SEQ ID NO: 6059932 - DNA, 25 bp, Homo sapien
aataactatctttgagcatcgtacc

SEQ ID NO: 6059933 - DNA, 25 bp, Homo sapien
taaaaatctcatgtatgagcgaatc

SEQ ID NO: 6059934 - DNA, 25 bp, Homo sapien
tctgcttttggccccatctggattt

SEQ ID NO: 6059935 - DNA, 25 bp, Homo sapien
tttgatgattgctgggaaacggttt

SEQ ID NO: 6059936 - DNA, 25 bp, Homo sapien
ttttgcctcaggtgcaacaataact

SEQ ID NO: 6059937 - DNA, 25 bp, Homo sapien
gatttttcagccttcctggcttacc

SEQ ID NO: 6059938 - DNA, 25 bp, Homo sapien
ttgtttggagttgttgaggccgata

SEQ ID NO: 6059939 - DNA, 25 bp, Homo sapien
gtatgctattccatacggcggctct

SEQ ID NO: 6059940 - DNA, 25 bp, Homo sapien
gaaaaaaaccatgcctgcaagcgga

SEQ ID NO: 6059941 - DNA, 25 bp, Homo sapien
caacaacaatttcttattactgtgt

SEQ ID NO: 6059942 - DNA, 25 bp, Homo sapien
tgtttcgtagtcttatcttcatcgg

SEQ ID NO: 6059943 - DNA, 25 bp, Homo sapien
tctaaggatgagtagctggattaca

SEQ ID NO: 6059944 - DNA, 25 bp, Homo sapien
tactacgctgaaaaagaacctgaac

SEQ ID NO: 6059945 - DNA, 25 bp, Homo sapien
gattgcggtgggtcattgctataac

SEQ ID NO: 6059946 - DNA, 25 bp, Homo sapien
tcgtcttttgagttctaaatgcatc

SEQ ID NO: 6059947 - DNA, 25 bp, Homo sapien
taaagggctactacgctgaaaaaga

SEQ ID NO: 6059948 - DNA, 25 bp, Homo sapien
agcagaaaaaatttaccgcaaattg

SEQ ID NO: 6059949 - DNA, 25 bp, Homo sapien
gttgaggccgatacccgtctagatg

SEQ ID NO: 6059950 - DNA, 25 bp, Homo sapien
ttatcttcatcggacactcaagggt

SEQ ID NO: 6059951 - DNA, 25 bp, Homo sapien
ataggttgacgattttatgacttgg

SEQ ID NO: 6059952 - DNA, 25 bp, Homo sapien
cagttcgaggttttattacgagaat

SEQ ID NO: 6059953 - DNA, 25 bp, Homo sapien
tgacgattttatgacttggtatgct

SEQ ID NO: 6059954 - DNA, 25 bp, Homo sapien
cagccttcctggcttacccaaaata

SEQ ID NO: 6059955 - DNA, 25 bp, Homo sapien
tcctgaattttctctgagtgtcaac

SEQ ID NO: 6059956 - DNA, 25 bp, Homo sapien
gtagtcttatcttcatcggacactc

SEQ ID NO: 6059957 - DNA, 25 bp, Homo sapien
gattacaataaatcctgaattttct

SEQ ID NO: 6059958 - DNA, 25 bp, Homo sapien
actttgtcagcgcttgttaaagggc

SEQ ID NO: 6059959 - DNA, 25 bp, Homo sapien
ttctaaatgcatcatacaacaacaa

SEQ ID NO: 6059960 - DNA, 25 bp, Homo sapien
gtcaatagcagaaaaaatttaccgc

SEQ ID NO: 6059961 - DNA, 25 bp, Homo sapien
gtaaatatgaaataacagttcgagg

SEQ ID NO: 6059962 - DNA, 25 bp, Homo sapien
gcaaattgtttcgtagtcttatctt

SEQ ID NO: 6059963 - DNA, 25 bp, Homo sapien
ttacgagaatggaaagggtaatgga

SEQ ID NO: 6059964 - DNA, 25 bp, Homo sapien
ctataacagtaaaatcaaggaagat

SEQ ID NO: 6059965 - DNA, 25 bp, Homo sapien
attttctctgagtgtcaactttgtc

SEQ ID NO: 6059966 - DNA, 25 bp, Homo sapien
catacaacaacaacaatttcttatt

SEQ ID NO: 6059967 - DNA, 25 bp, Homo sapien
tcgaggttttattacgagaatggaa

SEQ ID NO: 6059968 - DNA, 25 bp, Homo sapien
gtaaatgtcaatagcagaaaaaatt

SEQ ID NO: 6059969 - DNA, 25 bp, Homo sapien
attggagcatgtgtaaatgtcaata

SEQ ID NO: 6059970 - DNA, 25 bp, Homo sapien
ctcctgattgcggtgggtcattgct

SEQ ID NO: 6059971 - DNA, 25 bp, Homo sapien
ccgttaataggttgacgattttatg

SEQ ID NO: 6059972 - DNA, 25 bp, Homo sapien
tcctggcttacccaaaatagcctct

SEQ ID NO: 6059973 - DNA, 25 bp, Homo sapien
taccgcaaattgtttcgtagtctta

SEQ ID NO: 6059974 - DNA, 25 bp, Homo sapien
gaatggaaagggtaatggattggag

SEQ ID NO: 6059975 - DNA, 25 bp, Homo sapien
atgcatcatacaacaacaacaattt

SEQ ID NO: 6059976 - DNA, 25 bp, Homo sapien
tcaagggttgcataatttttaccca

SEQ ID NO: 6059977 - DNA, 25 bp, Homo sapien
gagtattgtaagcattttcagaaac

SEQ ID NO: 6059978 - DNA, 25 bp, Homo sapien
gcctgcaagcggatctaaggatgag

SEQ ID NO: 6059979 - DNA, 25 bp, Homo sapien
gacttggtatgctattccatacggc

SEQ ID NO: 6059980 - DNA, 25 bp, Homo sapien
tttgagttctaaatgcatcatacaa

SEQ ID NO: 6059981 - DNA, 25 bp, Homo sapien
cggctctcctgattgcggtgggtca

SEQ ID NO: 6059982 - DNA, 25 bp, Homo sapien
tggagttgttgaggccgatacccgt

SEQ ID NO: 6059983 - DNA, 25 bp, Homo sapien
atgttacctatggagtattgtaagc

SEQ ID NO: 6059984 - DNA, 25 bp, Homo sapien
cctatggagtattgtaagcattttc

SEQ ID NO: 6059985 - DNA, 25 bp, Homo sapien
ttcatcggacactcaagggttgcat

SEQ ID NO: 6059986 - DNA, 25 bp, Homo sapien
tgtgtccttttgggatttttcagcc

SEQ ID NO: 6059987 - DNA, 25 bp, Homo sapien
aaagggtaatggattggagcatgtg

SEQ ID NO: 6059988 - DNA, 25 bp, Homo sapien
aagcggatctaaggatgagtagctg

SEQ ID NO: 6059989 - DNA, 25 bp, Homo sapien
ctctgagtgtcaactttgtcagcgc

SEQ ID NO: 6059990 - DNA, 25 bp, Homo sapien
gatgagtagctggattacaataaat

SEQ ID NO: 6059991 - DNA, 25 bp, Homo sapien
tattccatacggcggctctcctgat

SEQ ID NO: 6059992 - DNA, 25 bp, Homo sapien
ggacactcaagggttgcataatttt

SEQ ID NO: 6059993 - DNA, 25 bp, Homo sapien
aataaaaaaatcatgttacctatgg

SEQ ID NO: 6059994 - DNA, 25 bp, Homo sapien
gccgatacccgtctagatgtaaata

SEQ ID NO: 6059995 - DNA, 25 bp, Homo sapien
caaaatagcctctcaaggtgaaaaa

SEQ ID NO: 6059996 - DNA, 25 bp, Homo sapien
gtgtcaactttgtcagcgcttgtta

SEQ ID NO: 6059997 - DNA, 25 bp, Homo sapien
aataaatcctgaattttctctgagt

SEQ ID NO: 6059998 - DNA, 25 bp, Homo sapien
gcatgtgtaaatgtcaatagcagaa

SEQ ID NO: 6059999 - DNA, 25 bp, Homo sapien
tcagcgcttgttaaagggctactac

SEQ ID NO: 6060000 - DNA, 25 bp, Homo sapien
cttattactgtgtccttttgggatt

SEQ ID NO: 6060001 - DNA, 25 bp, Homo sapien
tgcataatttttacccaaaggaaca

SEQ ID NO: 6060002 - DNA, 25 bp, Homo sapien
taatggattggagcatgtgtaaatg

SEQ ID NO: 6060003 - DNA, 25 bp, Homo sapien
aaaatcatgttacctatggagtatt

SEQ ID NO: 6060004 - DNA, 25 bp, Homo sapien
acccgtctagatgtaaatatgaaat

SEQ ID NO: 6060005 - DNA, 25 bp, Homo sapien
tttgggatttttcagccttcctggc

SEQ ID NO: 6060006 - DNA, 25 bp, Homo sapien
gcctctcaaggtgaaaaaaaccatg

SEQ ID NO: 6060007 - DNA, 25 bp, Homo sapien
cttgttaaagggctactacgctgaa

SEQ ID NO: 6060008 - DNA, 25 bp, Homo sapien
cattttcagaaactcgtcttttgag

SEQ ID NO: 6060009 - DNA, 25 bp, Homo sapien
atgaaataacagttcgaggttttat

SEQ ID NO: 6060010 - DNA, 25 bp, Homo sapien
ggtgggtcattgctataacagtaaa

SEQ ID NO: 6060011 - DNA, 25 bp, Homo sapien
atacggcggctctcctgattgcggt

SEQ ID NO: 6060012 - DNA, 25 bp, Homo sapien
ttttatgacttggtatgctattcca

SEQ ID NO: 6060013 - DNA, 25 bp, Homo sapien
cttacccaaaatagcctctcaaggt

SEQ ID NO: 6060014 - DNA, 25 bp, Homo sapien
aaccatgcctgcaagcggatctaag

SEQ ID NO: 6060015 - DNA, 25 bp, Homo sapien
tcattgctataacagtaaaatcaag

SEQ ID NO: 6060016 - DNA, 25 bp, Homo sapien
tagctggattacaataaatcctgaa

SEQ ID NO: 6060017 - DNA, 25 bp, Homo sapien
cagaaactcgtcttttgagttctaa

SEQ ID NO: 6060018 - DNA, 25 bp, Homo sapien
caaggtgaaaaaaaccatgcctgca

SEQ ID NO: 6060019 - DNA, 25 bp, Homo sapien
ctagatgtaaatatgaaataacagt

SEQ ID NO: 6060020 - DNA, 25 bp, Homo sapien
tgtaagcattttcagaaactcgtct

SEQ ID NO: 6060021 - DNA, 25 bp, Homo sapien
caatttcttattactgtgtcctttt

SEQ ID NO: 6060022 - DNA, 25 bp, Homo sapien
attatctgcaacttctggaagctcg

SEQ ID NO: 6060023 - DNA, 25 bp, Homo sapien
taaaacaatgattttgattatctgc

SEQ ID NO: 6060024 - DNA, 25 bp, Homo sapien
ttgcgactacggataaaaattcata

SEQ ID NO: 6060025 - DNA, 25 bp, Homo sapien
tctactcttctaagctgtaatctaa

SEQ ID NO: 6060026 - DNA, 25 bp, Homo sapien
tgcttactcgtgctgccggggacac

SEQ ID NO: 6060027 - DNA, 25 bp, Homo sapien
ctttaggaagtgaagcaatataaaa

SEQ ID NO: 6060028 - DNA, 25 bp, Homo sapien
catgacaccctaggaagtttaacgg

SEQ ID NO: 6060029 - DNA, 25 bp, Homo sapien
aataggaccagattttgtgggccaa

SEQ ID NO: 6060030 - DNA, 25 bp, Homo sapien
cttagcagttgggaggccgtttctc

SEQ ID NO: 6060031 - DNA, 25 bp, Homo sapien
agttgggaggccgtttctcccatat

SEQ ID NO: 6060032 - DNA, 25 bp, Homo sapien
agtagctgttttgtttgcgactacg

SEQ ID NO: 6060033 - DNA, 25 bp, Homo sapien
atttccagtagctgttttgtttgcg

SEQ ID NO: 6060034 - DNA, 25 bp, Homo sapien
ataattttctgtccttcttagagga

SEQ ID NO: 6060035 - DNA, 25 bp, Homo sapien
ctgccggggacacttagcagttggg

SEQ ID NO: 6060036 - DNA, 25 bp, Homo sapien
ttaacggtatacaactcaaggacga

SEQ ID NO: 6060037 - DNA, 25 bp, Homo sapien
cggtatacaactcaaggacgaggag

SEQ ID NO: 6060038 - DNA, 25 bp, Homo sapien
accagattttgtgggccaattgggc

SEQ ID NO: 6060039 - DNA, 25 bp, Homo sapien
tattacataattttctgtccttctt

SEQ ID NO: 6060040 - DNA, 25 bp, Homo sapien
taggaatattattgtaaacaaggaa

SEQ ID NO: 6060041 - DNA, 25 bp, Homo sapien
gaattttgcttactcgtgctgccgg

SEQ ID NO: 6060042 - DNA, 25 bp, Homo sapien
ttcatactttaggaagtgaagcaat

SEQ ID NO: 6060043 - DNA, 25 bp, Homo sapien
aagggataaaacaatgattttgatt

SEQ ID NO: 6060044 - DNA, 25 bp, Homo sapien
aatttgcaattaacaaaatttcatc

SEQ ID NO: 6060045 - DNA, 25 bp, Homo sapien
gttcaataattacttgcataaacac

SEQ ID NO: 6060046 - DNA, 25 bp, Homo sapien
acaactcaaggacgaggagtattcg

SEQ ID NO: 6060047 - DNA, 25 bp, Homo sapien
acaaaatttcatcatatcacgctga

SEQ ID NO: 6060048 - DNA, 25 bp, Homo sapien
caaggacgaggagtattcggaaact

SEQ ID NO: 6060049 - DNA, 25 bp, Homo sapien
gaaccgtttcagtaaacttgctctc

SEQ ID NO: 6060050 - DNA, 25 bp, Homo sapien
ctaccggtttttaacaagctgcaga

SEQ ID NO: 6060051 - DNA, 25 bp, Homo sapien
ttctgtccttcttagaggaagatgc

SEQ ID NO: 6060052 - DNA, 25 bp, Homo sapien
gaggccgtttctcccatatattaca

SEQ ID NO: 6060053 - DNA, 25 bp, Homo sapien
gcttcttaatgcaatagtttgcctg

SEQ ID NO: 6060054 - DNA, 25 bp, Homo sapien
tccttcttagaggaagatgctgaaa

SEQ ID NO: 6060055 - DNA, 25 bp, Homo sapien
tgcaacttctggaagctcgagatac

SEQ ID NO: 6060056 - DNA, 25 bp, Homo sapien
ttgcctgaattttgcttactcgtgc

SEQ ID NO: 6060057 - DNA, 25 bp, Homo sapien
tttcatcatatcacgctgaattatg

SEQ ID NO: 6060058 - DNA, 25 bp, Homo sapien
aattatgtacggcttcttaatgcaa

SEQ ID NO: 6060059 - DNA, 25 bp, Homo sapien
accgtcaataggaccagattttgtg

SEQ ID NO: 6060060 - DNA, 25 bp, Homo sapien
catatcacgctgaattatgtacggc

SEQ ID NO: 6060061 - DNA, 25 bp, Homo sapien
cttgcataaacacacactaacaacc

SEQ ID NO: 6060062 - DNA, 25 bp, Homo sapien
cacactaacaaccaaatcgtactaa

SEQ ID NO: 6060063 - DNA, 25 bp, Homo sapien
gtttctcccatatattacataattt

SEQ ID NO: 6060064 - DNA, 25 bp, Homo sapien
cagacacatgacaccctaggaagtt

SEQ ID NO: 6060065 - DNA, 25 bp, Homo sapien
acgctgaattatgtacggcttctta

SEQ ID NO: 6060066 - DNA, 25 bp, Homo sapien
ctgcagatttccagtagctgttttg

SEQ ID NO: 6060067 - DNA, 25 bp, Homo sapien
cttctaagctgtaatctaaaaaaag

SEQ ID NO: 6060068 - DNA, 25 bp, Homo sapien
gggacacttagcagttgggaggccg

SEQ ID NO: 6060069 - DNA, 25 bp, Homo sapien
tgttttgtttgcgactacggataaa

SEQ ID NO: 6060070 - DNA, 25 bp, Homo sapien
tgtacggcttcttaatgcaatagtt

SEQ ID NO: 6060071 - DNA, 25 bp, Homo sapien
gaagtgaagcaatataaaaaatcat

SEQ ID NO: 6060072 - DNA, 25 bp, Homo sapien
aagaaaaccgtcaataggaccagat

SEQ ID NO: 6060073 - DNA, 25 bp, Homo sapien
aatagtttgcctgaattttgcttac

SEQ ID NO: 6060074 - DNA, 25 bp, Homo sapien
gctgaaaatcaaaagaaaaccgtca

SEQ ID NO: 6060075 - DNA, 25 bp, Homo sapien
ctacggataaaaattcatactttag

SEQ ID NO: 6060076 - DNA, 25 bp, Homo sapien
ttagaggaagatgctgaaaatcaaa

SEQ ID NO: 6060077 - DNA, 25 bp, Homo sapien
tgctgcatcctaattcgtaaagttt

SEQ ID NO: 6060078 - DNA, 25 bp, Homo sapien
ttgctctctactcttctaagctgta

SEQ ID NO: 6060079 - DNA, 25 bp, Homo sapien
gtttttaacaagctgcagatttcca

SEQ ID NO: 6060080 - DNA, 25 bp, Homo sapien
gaagatgctgaaaatcaaaagaaaa

SEQ ID NO: 6060081 - DNA, 25 bp, Homo sapien
ttttgattatctgcaacttctggaa

SEQ ID NO: 6060082 - DNA, 25 bp, Homo sapien
caattaacaaaatttcatcatatca

SEQ ID NO: 6060083 - DNA, 25 bp, Homo sapien
tttgttaggaatattattgtaaaca

SEQ ID NO: 6060084 - DNA, 25 bp, Homo sapien
aagcaatataaaaaatcatgctgca

SEQ ID NO: 6060085 - DNA, 25 bp, Homo sapien
cccatatattacataattttctgtc

SEQ ID NO: 6060086 - DNA, 25 bp, Homo sapien
aacaagctgcagatttccagtagct

SEQ ID NO: 6060087 - DNA, 25 bp, Homo sapien
catcctaattcgtaaagtttgttag

SEQ ID NO: 6060088 - DNA, 25 bp, Homo sapien
aaatcatgctgcatcctaattcgta

SEQ ID NO: 6060089 - DNA, 25 bp, Homo sapien
tataaaaaatcatgctgcatcctaa

SEQ ID NO: 6060090 - DNA, 25 bp, Homo sapien
ggccaattgggccagacacatgaca

SEQ ID NO: 6060091 - DNA, 25 bp, Homo sapien
gtttcagtaaacttgctctctactc

SEQ ID NO: 6060092 - DNA, 25 bp, Homo sapien
tcgtactaaaatttgcaattaacaa

SEQ ID NO: 6060093 - DNA, 25 bp, Homo sapien
ttgggccagacacatgacaccctag

SEQ ID NO: 6060094 - DNA, 25 bp, Homo sapien
cttagggttcaataattacttgcat

SEQ ID NO: 6060095 - DNA, 25 bp, Homo sapien
taattacttgcataaacacacacta

SEQ ID NO: 6060096 - DNA, 25 bp, Homo sapien
accaaatcgtactaaaatttgcaat

SEQ ID NO: 6060097 - DNA, 25 bp, Homo sapien
taaacacacactaacaaccaaatcg

SEQ ID NO: 6060098 - DNA, 25 bp, Homo sapien
taatgcaatagtttgcctgaatttt

SEQ ID NO: 6060099 - DNA, 25 bp, Homo sapien
caatgattttgattatctgcaactt

SEQ ID NO: 6060100 - DNA, 25 bp, Homo sapien
gtaaacttgctctctactcttctaa

SEQ ID NO: 6060101 - DNA, 25 bp, Homo sapien
taaaaattcatactttaggaagtga

SEQ ID NO: 6060102 - DNA, 25 bp, Homo sapien
ctcgtgctgccggggacacttagca

SEQ ID NO: 6060103 - DNA, 25 bp, Homo sapien
tttgtgggccaattgggccagacac

SEQ ID NO: 6060104 - DNA, 25 bp, Homo sapien
gcaacacgtactgatgttttatttc

SEQ ID NO: 6060105 - DNA, 25 bp, Homo sapien
atttcccacagaaaacaatcatgtt

SEQ ID NO: 6060106 - DNA, 25 bp, Homo sapien
caaacttaactgagatagttatctc

SEQ ID NO: 6060107 - DNA, 25 bp, Homo sapien
agcgcatttatgtgccctatatttc

SEQ ID NO: 6060108 - DNA, 25 bp, Homo sapien
aagaatgaccgtcgcaaaaaatgac

SEQ ID NO: 6060109 - DNA, 25 bp, Homo sapien
ttcagccgaagacattcaagtcctg

SEQ ID NO: 6060110 - DNA, 25 bp, Homo sapien
aattatgcactgtgctaatttttca

SEQ ID NO: 6060111 - DNA, 25 bp, Homo sapien
taactgagatagttatctctattat

SEQ ID NO: 6060112 - DNA, 25 bp, Homo sapien
cgaagacattcaagtcctgagagat

SEQ ID NO: 6060113 - DNA, 25 bp, Homo sapien
ttaccagtggcacacacgtgaacta

SEQ ID NO: 6060114 - DNA, 25 bp, Homo sapien
gcactgtgctaatttttcaattaag

SEQ ID NO: 6060115 - DNA, 25 bp, Homo sapien
tagtctaaagaacgtgcatcagaga

SEQ ID NO: 6060116 - DNA, 25 bp, Homo sapien
tcttaggattaaacttcagagaaaa

SEQ ID NO: 6060117 - DNA, 25 bp, Homo sapien
gtggcacacacgtgaactacatcac

SEQ ID NO: 6060118 - DNA, 25 bp, Homo sapien
tcatgttaataaattatgcactgtg

SEQ ID NO: 6060119 - DNA, 25 bp, Homo sapien
attccgtaagaatggtgtttatagg

SEQ ID NO: 6060120 - DNA, 25 bp, Homo sapien
agtcctgagagataatgtagacact

SEQ ID NO: 6060121 - DNA, 25 bp, Homo sapien
ttttactggtgctgaaatttcttat

SEQ ID NO: 6060122 - DNA, 25 bp, Homo sapien
atcacgcactgcgttttgctttgtt

SEQ ID NO: 6060123 - DNA, 25 bp, Homo sapien
cacacgtgaactacatcactcacca

SEQ ID NO: 6060124 - DNA, 25 bp, Homo sapien
cgtactgatgttttatttccattat

SEQ ID NO: 6060125 - DNA, 25 bp, Homo sapien
ttaataaattatgcactgtgctaat

SEQ ID NO: 6060126 - DNA, 25 bp, Homo sapien
cactgcgttttgctttgtttacccg

SEQ ID NO: 6060127 - DNA, 25 bp, Homo sapien
tctggtgttaaagcatattgccctt

SEQ ID NO: 6060128 - DNA, 25 bp, Homo sapien
tcatcctggaacatacgagtaagag

SEQ ID NO: 6060129 - DNA, 25 bp, Homo sapien
tatttccattataattccgtaagaa

SEQ ID NO: 6060130 - DNA, 25 bp, Homo sapien
cattataattccgtaagaatggtgt

SEQ ID NO: 6060131 - DNA, 25 bp, Homo sapien
catcactcaccactattgtcttagg

SEQ ID NO: 6060132 - DNA, 25 bp, Homo sapien
agagattttagaaacattatcacgc

SEQ ID NO: 6060133 - DNA, 25 bp, Homo sapien
tgctaatttttcaattaaggttctg

SEQ ID NO: 6060134 - DNA, 25 bp, Homo sapien
agtaagagcgcatttatgtgcccta

SEQ ID NO: 6060135 - DNA, 25 bp, Homo sapien
atgttttatttccattataattccg

SEQ ID NO: 6060136 - DNA, 25 bp, Homo sapien
tataggtagtctaaagaacgtgcat

SEQ ID NO: 6060137 - DNA, 25 bp, Homo sapien
ggattttctggtgttaaagcatatt

SEQ ID NO: 6060138 - DNA, 25 bp, Homo sapien
cgcaaaaaatgactacttaaactat

SEQ ID NO: 6060139 - DNA, 25 bp, Homo sapien
tgaaatttcttatttcccacagaaa

SEQ ID NO: 6060140 - DNA, 25 bp, Homo sapien
atattgccctttcggcaatacttga

SEQ ID NO: 6060141 - DNA, 25 bp, Homo sapien
ttaaggttctgttacccctctatca

SEQ ID NO: 6060142 - DNA, 25 bp, Homo sapien
cattcaagtcctgagagataatgta

SEQ ID NO: 6060143 - DNA, 25 bp, Homo sapien
ccgtaacgagtatacagtggatttt

SEQ ID NO: 6060144 - DNA, 25 bp, Homo sapien
tcaccactattgtcttaggattaaa

SEQ ID NO: 6060145 - DNA, 25 bp, Homo sapien
taagaatggtgtttataggtagtct

SEQ ID NO: 6060146 - DNA, 25 bp, Homo sapien
tgccctatatttctcgtcttttact

SEQ ID NO: 6060147 - DNA, 25 bp, Homo sapien
ttgatgccctaaacattttcatcct

SEQ ID NO: 6060148 - DNA, 25 bp, Homo sapien
atatttctcgtcttttactggtgct

SEQ ID NO: 6060149 - DNA, 25 bp, Homo sapien
gaactacatcactcaccactattgt

SEQ ID NO: 6060150 - DNA, 25 bp, Homo sapien
aaacaatcatgttaataaattatgc

SEQ ID NO: 6060151 - DNA, 25 bp, Homo sapien
ccttttcaaacttaactgagatagt

SEQ ID NO: 6060152 - DNA, 25 bp, Homo sapien
tagtaattcagccgaagacattcaa

SEQ ID NO: 6060153 - DNA, 25 bp, Homo sapien
ttctgttacccctctatcaccgaca

SEQ ID NO: 6060154 - DNA, 25 bp, Homo sapien
aaagaacgtgcatcagagaagaatg

SEQ ID NO: 6060155 - DNA, 25 bp, Homo sapien
tggtgctgaaatttcttatttccca

SEQ ID NO: 6060156 - DNA, 25 bp, Homo sapien
cttcagagaaaactcaagattttat

SEQ ID NO: 6060157 - DNA, 25 bp, Homo sapien
tttagaaacattatcacgcactgcg

SEQ ID NO: 6060158 - DNA, 25 bp, Homo sapien
agatagttatctctattattaccag

SEQ ID NO: 6060159 - DNA, 25 bp, Homo sapien
cgagtatacagtggattttctggtg

SEQ ID NO: 6060160 - DNA, 25 bp, Homo sapien
ctcgtcttttactggtgctgaaatt

SEQ ID NO: 6060161 - DNA, 25 bp, Homo sapien
tctatcaccgacagcaacacgtact

SEQ ID NO: 6060162 - DNA, 25 bp, Homo sapien
cgtgcatcagagaagaatgaccgtc

SEQ ID NO: 6060163 - DNA, 25 bp, Homo sapien
ctggaacatacgagtaagagcgcat

SEQ ID NO: 6060164 - DNA, 25 bp, Homo sapien
attaaacttcagagaaaactcaaga

SEQ ID NO: 6060165 - DNA, 25 bp, Homo sapien
ccctaaacattttcatcctggaaca

SEQ ID NO: 6060166 - DNA, 25 bp, Homo sapien
ctattgtcttaggattaaacttcag

SEQ ID NO: 6060167 - DNA, 25 bp, Homo sapien
agaaaactcaagattttatagtaat

SEQ ID NO: 6060168 - DNA, 25 bp, Homo sapien
tacccctctatcaccgacagcaaca

SEQ ID NO: 6060169 - DNA, 25 bp, Homo sapien
gagagataatgtagacactttaagg

SEQ ID NO: 6060170 - DNA, 25 bp, Homo sapien
ttcttatttcccacagaaaacaatc

SEQ ID NO: 6060171 - DNA, 25 bp, Homo sapien
aacattatcacgcactgcgttttgc

SEQ ID NO: 6060172 - DNA, 25 bp, Homo sapien
ccgacagcaacacgtactgatgttt

SEQ ID NO: 6060173 - DNA, 25 bp, Homo sapien
taatgtagacactttaaggaaagta

SEQ ID NO: 6060174 - DNA, 25 bp, Homo sapien
tcaagattttatagtaattcagccg

SEQ ID NO: 6060175 - DNA, 25 bp, Homo sapien
ttatctctattattaccagtggcac

SEQ ID NO: 6060176 - DNA, 25 bp, Homo sapien
ctattattaccagtggcacacacgt

SEQ ID NO: 6060177 - DNA, 25 bp, Homo sapien
tacagtggattttctggtgttaaag

SEQ ID NO: 6060178 - DNA, 25 bp, Homo sapien
catacgagtaagagcgcatttatgt

SEQ ID NO: 6060179 - DNA, 25 bp, Homo sapien
tggtgtttataggtagtctaaagaa

SEQ ID NO: 6060180 - DNA, 25 bp, Homo sapien
ttttatagtaattcagccgaagaca

SEQ ID NO: 6060181 - DNA, 25 bp, Homo sapien
gcaatacttgatgccctaaacattt

SEQ ID NO: 6060182 - DNA, 25 bp, Homo sapien
ttacccgtaacgagtatacagtgga

SEQ ID NO: 6060183 - DNA, 25 bp, Homo sapien
ttaaagcatattgccctttcggcaa

SEQ ID NO: 6060184 - DNA, 25 bp, Homo sapien
tgtgcagagattttagaaacattat

SEQ ID NO: 6060185 - DNA, 25 bp, Homo sapien
cacagaaaacaatcatgttaataaa

SEQ ID NO: 6060186 - DNA, 25 bp, Homo sapien
tttatgtgccctatatttctcgtct

SEQ ID NO: 6060187 - DNA, 25 bp, Homo sapien
cctttcggcaatacttgatgcccta

SEQ ID NO: 6060188 - DNA, 25 bp, Homo sapien
tcagagaagaatgaccgtcgcaaaa

SEQ ID NO: 6060189 - DNA, 25 bp, Homo sapien
gaccgtcgcaaaaaatgactactta

SEQ ID NO: 6060190 - DNA, 25 bp, Homo sapien
tcaatttgtttaatatcaacacata

SEQ ID NO: 6060191 - DNA, 25 bp, Homo sapien
tagattaccgcacctcctttccaaa

SEQ ID NO: 6060192 - DNA, 25 bp, Homo sapien
tgcagtgtaaactgttgaatatctt

SEQ ID NO: 6060193 - DNA, 25 bp, Homo sapien
caaactaccagtcgacgaggatgct

SEQ ID NO: 6060194 - DNA, 25 bp, Homo sapien
gttctgaggtaagttcaatgaaatt

SEQ ID NO: 6060195 - DNA, 25 bp, Homo sapien
tctgcttgctatcgcaaaaaaaaaa

SEQ ID NO: 6060196 - DNA, 25 bp, Homo sapien
gattcaactcaagatgctgtaatct

SEQ ID NO: 6060197 - DNA, 25 bp, Homo sapien
ggatgcttttccgaaagtcatgaca

SEQ ID NO: 6060198 - DNA, 25 bp, Homo sapien
tccaagtccttgtctctttcattat

SEQ ID NO: 6060199 - DNA, 25 bp, Homo sapien
ataagcgagatctttacttggagat

SEQ ID NO: 6060200 - DNA, 25 bp, Homo sapien
tttacttggagatctcgcttagtcc

SEQ ID NO: 6060201 - DNA, 25 bp, Homo sapien
ggaaggactgtaagatcgatatcgg

SEQ ID NO: 6060202 - DNA, 25 bp, Homo sapien
catgagtttccattaaggaagagca

SEQ ID NO: 6060203 - DNA, 25 bp, Homo sapien
aacgtcaataataccaccttttgca

SEQ ID NO: 6060204 - DNA, 25 bp, Homo sapien
gaaagtcatgacacaagggaaggac

SEQ ID NO: 6060205 - DNA, 25 bp, Homo sapien
aaaaatgtatcagacccttcagcac

SEQ ID NO: 6060206 - DNA, 25 bp, Homo sapien
tgtttaatatcaacacataatgtac

SEQ ID NO: 6060207 - DNA, 25 bp, Homo sapien
ttttccgaaagtcatgacacaaggg

SEQ ID NO: 6060208 - DNA, 25 bp, Homo sapien
tttcccttctgaccctagatcacct

SEQ ID NO: 6060209 - DNA, 25 bp, Homo sapien
aaaaggacgttccacacttggctgc

SEQ ID NO: 6060210 - DNA, 25 bp, Homo sapien
tgttgaatatctttttgaaaccaaa

SEQ ID NO: 6060211 - DNA, 25 bp, Homo sapien
gtaaactgttgaatatctttttgaa

SEQ ID NO: 6060212 - DNA, 25 bp, Homo sapien
ctttccaaaccccatgagtttccat

SEQ ID NO: 6060213 - DNA, 25 bp, Homo sapien
tgaaattggacagtttcttttcaag

SEQ ID NO: 6060214 - DNA, 25 bp, Homo sapien
tcagcacgtgacagacagcaaacta

SEQ ID NO: 6060215 - DNA, 25 bp, Homo sapien
ttaaaaaaatgtatcagacccttca

SEQ ID NO: 6060216 - DNA, 25 bp, Homo sapien
tgctatcgcaaaaaaaaaaaaatca

SEQ ID NO: 6060217 - DNA, 25 bp, Homo sapien
cgttccacacttggctgctttcttg

SEQ ID NO: 6060218 - DNA, 25 bp, Homo sapien
ttcttgataagcgagatctttactt

SEQ ID NO: 6060219 - DNA, 25 bp, Homo sapien
caaaccccatgagtttccattaagg

SEQ ID NO: 6060220 - DNA, 25 bp, Homo sapien
ttttgcagatgtgattcaactcaag

SEQ ID NO: 6060221 - DNA, 25 bp, Homo sapien
atatccttttgaggcaattaaagct

SEQ ID NO: 6060222 - DNA, 25 bp, Homo sapien
cttatcggatgttccaagtccttgt

SEQ ID NO: 6060223 - DNA, 25 bp, Homo sapien
actcaagatgctgtaatctttccct

SEQ ID NO: 6060224 - DNA, 25 bp, Homo sapien
agacagcaaactaccagtcgacgag

SEQ ID NO: 6060225 - DNA, 25 bp, Homo sapien
cacttggctgctttcttgataagcg

SEQ ID NO: 6060226 - DNA, 25 bp, Homo sapien
gatgctgtaatctttcccttctgac

SEQ ID NO: 6060227 - DNA, 25 bp, Homo sapien
cgtgacagacagcaaactaccagtc

SEQ ID NO: 6060228 - DNA, 25 bp, Homo sapien
atatcggcgcagtcttatcggatgt

SEQ ID NO: 6060229 - DNA, 25 bp, Homo sapien
caagaacaaatcatgacatacaaaa

SEQ ID NO: 6060230 - DNA, 25 bp, Homo sapien
tgttcgaaaaaaatagattaccgca

SEQ ID NO: 6060231 - DNA, 25 bp, Homo sapien
tcatgatatccttttgaggcaatta

SEQ ID NO: 6060232 - DNA, 25 bp, Homo sapien
aataataccaccttttgcagatgtg

SEQ ID NO: 6060233 - DNA, 25 bp, Homo sapien
gagatctttacttggagatctcgct

SEQ ID NO: 6060234 - DNA, 25 bp, Homo sapien
gctgctttcttgataagcgagatct

SEQ ID NO: 6060235 - DNA, 25 bp, Homo sapien
accaccttttgcagatgtgattcaa

SEQ ID NO: 6060236 - DNA, 25 bp, Homo sapien
aagagcaacgtcaataataccacct

SEQ ID NO: 6060237 - DNA, 25 bp, Homo sapien
catgacacaagggaaggactgtaag

SEQ ID NO: 6060238 - DNA, 25 bp, Homo sapien
ggatgttccaagtccttgtctcttt

SEQ ID NO: 6060239 - DNA, 25 bp, Homo sapien
gtaatctttcccttctgaccctaga

SEQ ID NO: 6060240 - DNA, 25 bp, Homo sapien
atatcaacacataatgtacaagaac

SEQ ID NO: 6060241 - DNA, 25 bp, Homo sapien
tttccattaaggaagagcaacgtca

SEQ ID NO: 6060242 - DNA, 25 bp, Homo sapien
tctcgcttagtcctccgaagggtaa

SEQ ID NO: 6060243 - DNA, 25 bp, Homo sapien
aggtaagttcaatgaaattggacag

SEQ ID NO: 6060244 - DNA, 25 bp, Homo sapien
cacaagggaaggactgtaagatcga

SEQ ID NO: 6060245 - DNA, 25 bp, Homo sapien
ttttgaggcaattaaagctgcagtg

SEQ ID NO: 6060246 - DNA, 25 bp, Homo sapien
agatgtgattcaactcaagatgctg

SEQ ID NO: 6060247 - DNA, 25 bp, Homo sapien
ttaaggaagagcaacgtcaataata

SEQ ID NO: 6060248 - DNA, 25 bp, Homo sapien
acacataatgtacaagaacaaatca

SEQ ID NO: 6060249 - DNA, 25 bp, Homo sapien
ccctagatcacctcatgatatcctt

SEQ ID NO: 6060250 - DNA, 25 bp, Homo sapien
cgacgaggatgcttttccgaaagtc

SEQ ID NO: 6060251 - DNA, 25 bp, Homo sapien
taaagctgcagtgtaaactgttgaa

SEQ ID NO: 6060252 - DNA, 25 bp, Homo sapien
gttcaatgaaattggacagtttctt

SEQ ID NO: 6060253 - DNA, 25 bp, Homo sapien
gcgcagtcttatcggatgttccaag

SEQ ID NO: 6060254 - DNA, 25 bp, Homo sapien
ggcaattaaagctgcagtgtaaact

SEQ ID NO: 6060255 - DNA, 25 bp, Homo sapien
actgtaagatcgatatcggcgcagt

SEQ ID NO: 6060256 - DNA, 25 bp, Homo sapien
cacctcctttccaaaccccatgagt

SEQ ID NO: 6060257 - DNA, 25 bp, Homo sapien
tatctttaaaaaaatgtatcagacc

SEQ ID NO: 6060258 - DNA, 25 bp, Homo sapien
ttctgaccctagatcacctcatgat

SEQ ID NO: 6060259 - DNA, 25 bp, Homo sapien
agatcgatatcggcgcagtcttatc

SEQ ID NO: 6060260 - DNA, 25 bp, Homo sapien
tctcttatctttaaaaaaatgtatc

SEQ ID NO: 6060261 - DNA, 25 bp, Homo sapien
aaaatcaatttgtttaatatcaaca

SEQ ID NO: 6060262 - DNA, 25 bp, Homo sapien
gacccttcagcacgtgacagacagc

SEQ ID NO: 6060263 - DNA, 25 bp, Homo sapien
accagtcgacgaggatgcttttccg

SEQ ID NO: 6060264 - DNA, 25 bp, Homo sapien
atcacctcatgatatccttttgagg

SEQ ID NO: 6060265 - DNA, 25 bp, Homo sapien
gtatcagacccttcagcacgtgaca

SEQ ID NO: 6060266 - DNA, 25 bp, Homo sapien
tggagatctcgcttagtcctccgaa

SEQ ID NO: 6060267 - DNA, 25 bp, Homo sapien
tctctttcattatctgcttgctatc

SEQ ID NO: 6060268 - DNA, 25 bp, Homo sapien
aatgtacaagaacaaatcatgacat

SEQ ID NO: 6060269 - DNA, 25 bp, Homo sapien
tccttgtctctttcattatctgctt

SEQ ID NO: 6060270 - DNA, 25 bp, Homo sapien
tcattatctgcttgctatcgcaaaa

SEQ ID NO: 6060271 - DNA, 25 bp, Homo sapien
aacgattgctggtgtaataaaaaag

SEQ ID NO: 6060272 - DNA, 25 bp, Homo sapien
agagttatcgcgcagattaaggaca

SEQ ID NO: 6060273 - DNA, 25 bp, Homo sapien
taatcgttggaacaagaaccgatta

SEQ ID NO: 6060274 - DNA, 25 bp, Homo sapien
tacagtccaagaaaatggcataagt

SEQ ID NO: 6060275 - DNA, 25 bp, Homo sapien
cgcggctcatattcatcaccgtagt

SEQ ID NO: 6060276 - DNA, 25 bp, Homo sapien
aaatggcataagtttaggataccct

SEQ ID NO: 6060277 - DNA, 25 bp, Homo sapien
agattgttatgtagtgactatggat

SEQ ID NO: 6060278 - DNA, 25 bp, Homo sapien
tgactaagattgttatgtagtgact

SEQ ID NO: 6060279 - DNA, 25 bp, Homo sapien
caaaattcaggggtaggagagttat

SEQ ID NO: 6060280 - DNA, 25 bp, Homo sapien
aaaggaccgccgcatgatttaccat

SEQ ID NO: 6060281 - DNA, 25 bp, Homo sapien
tatcagaagataatttgcaacgatt

SEQ ID NO: 6060282 - DNA, 25 bp, Homo sapien
gatacctttaattgtgccagcttta

SEQ ID NO: 6060283 - DNA, 25 bp, Homo sapien
catttcttttcatttattggtgtta

SEQ ID NO: 6060284 - DNA, 25 bp, Homo sapien
caagaaccgattattgactaatgca

SEQ ID NO: 6060285 - DNA, 25 bp, Homo sapien
atcgcgcagattaaggacatagcgg

SEQ ID NO: 6060286 - DNA, 25 bp, Homo sapien
gctatggcgctctcaaaattcaggg

SEQ ID NO: 6060287 - DNA, 25 bp, Homo sapien
caagcgataaaaatcattcggatat

SEQ ID NO: 6060288 - DNA, 25 bp, Homo sapien
gctttatcggtttgctatggcgctc

SEQ ID NO: 6060289 - DNA, 25 bp, Homo sapien
aagcaggaggcacctaattctgaca

SEQ ID NO: 6060290 - DNA, 25 bp, Homo sapien
caacatccaagtatgatttacagtc

SEQ ID NO: 6060291 - DNA, 25 bp, Homo sapien
gcataagtttaggataccctcagaa

SEQ ID NO: 6060292 - DNA, 25 bp, Homo sapien
cgtagtcatttcttttcatttattg

SEQ ID NO: 6060293 - DNA, 25 bp, Homo sapien
catgatttaccataattatttctcc

SEQ ID NO: 6060294 - DNA, 25 bp, Homo sapien
ttcatttacatgtaatcgttggaac

SEQ ID NO: 6060295 - DNA, 25 bp, Homo sapien
cctcagaaattctatcagaagataa

SEQ ID NO: 6060296 - DNA, 25 bp, Homo sapien
agtgactatggatactgcatcacca

SEQ ID NO: 6060297 - DNA, 25 bp, Homo sapien
cctaattctgacaacaccgatacct

SEQ ID NO: 6060298 - DNA, 25 bp, Homo sapien
ccgccgcatgatttaccataattat

SEQ ID NO: 6060299 - DNA, 25 bp, Homo sapien
atatatatatcgggaaagtattttt

SEQ ID NO: 6060300 - DNA, 25 bp, Homo sapien
gtgccagctttatcggtttgctatg

SEQ ID NO: 6060301 - DNA, 25 bp, Homo sapien
cggatataacggatataagagcagg

SEQ ID NO: 6060302 - DNA, 25 bp, Homo sapien
aaattctatcagaagataatttgca

SEQ ID NO: 6060303 - DNA, 25 bp, Homo sapien
aatttaaagggagactatatatata

SEQ ID NO: 6060304 - DNA, 25 bp, Homo sapien
ctgattcaatgcgcggctcatattc

SEQ ID NO: 6060305 - DNA, 25 bp, Homo sapien
tctcccttcatttacatgtaatcgt

SEQ ID NO: 6060306 - DNA, 25 bp, Homo sapien
tgcaggattatgtggtgaatcaata

SEQ ID NO: 6060307 - DNA, 25 bp, Homo sapien
ccaagtatgatttacagtccaagaa

SEQ ID NO: 6060308 - DNA, 25 bp, Homo sapien
gtttaggataccctcagaaattcta

SEQ ID NO: 6060309 - DNA, 25 bp, Homo sapien
tcggtttgctatggcgctctcaaaa

SEQ ID NO: 6060310 - DNA, 25 bp, Homo sapien
ttaccataattatttctcccttcat

SEQ ID NO: 6060311 - DNA, 25 bp, Homo sapien
ccaagaaaatggcataagtttagga

SEQ ID NO: 6060312 - DNA, 25 bp, Homo sapien
tcaccaaaaggaccgccgcatgatt

SEQ ID NO: 6060313 - DNA, 25 bp, Homo sapien
tactgcatcaccaaaaggaccgccg

SEQ ID NO: 6060314 - DNA, 25 bp, Homo sapien
ataaaaatcattcggatataacgga

SEQ ID NO: 6060315 - DNA, 25 bp, Homo sapien
cagattaaggacatagcgggctctg

SEQ ID NO: 6060316 - DNA, 25 bp, Homo sapien
taatgcacaacatccaagtatgatt

SEQ ID NO: 6060317 - DNA, 25 bp, Homo sapien
aaaaaagcaggaggcacctaattct

SEQ ID NO: 6060318 - DNA, 25 bp, Homo sapien
ggataccctcagaaattctatcaga

SEQ ID NO: 6060319 - DNA, 25 bp, Homo sapien
ccgattattgactaatgcacaacat

SEQ ID NO: 6060320 - DNA, 25 bp, Homo sapien
atgatttacagtccaagaaaatggc

SEQ ID NO: 6060321 - DNA, 25 bp, Homo sapien
atcaatacaaggtgactaagattgt

SEQ ID NO: 6060322 - DNA, 25 bp, Homo sapien
attatgtggtgaatcaatacaaggt

SEQ ID NO: 6060323 - DNA, 25 bp, Homo sapien
catcaccgtagtcatttcttttcat

SEQ ID NO: 6060324 - DNA, 25 bp, Homo sapien
gaggcacctaattctgacaacaccg

SEQ ID NO: 6060325 - DNA, 25 bp, Homo sapien
cgctctcaaaattcaggggtaggag

SEQ ID NO: 6060326 - DNA, 25 bp, Homo sapien
atcattcggatataacggatataag

SEQ ID NO: 6060327 - DNA, 25 bp, Homo sapien
attgactaatgcacaacatccaagt

SEQ ID NO: 6060328 - DNA, 25 bp, Homo sapien
atagcgggctctgcaggattatgtg

SEQ ID NO: 6060329 - DNA, 25 bp, Homo sapien
taacggatataagagcaggaaaaaa

SEQ ID NO: 6060330 - DNA, 25 bp, Homo sapien
tcatattcatcaccgtagtcatttc

SEQ ID NO: 6060331 - DNA, 25 bp, Homo sapien
tacatgtaatcgttggaacaagaac

SEQ ID NO: 6060332 - DNA, 25 bp, Homo sapien
aagataatttgcaacgattgctggt

SEQ ID NO: 6060333 - DNA, 25 bp, Homo sapien
aaggacatagcgggctctgcaggat

SEQ ID NO: 6060334 - DNA, 25 bp, Homo sapien
tcaatgcgcggctcatattcatcac

SEQ ID NO: 6060335 - DNA, 25 bp, Homo sapien
tgctggtgtaataaaaaagaaataa

SEQ ID NO: 6060336 - DNA, 25 bp, Homo sapien
aacaccgatacctttaattgtgcca

SEQ ID NO: 6060337 - DNA, 25 bp, Homo sapien
ggctctgcaggattatgtggtgaat

SEQ ID NO: 6060338 - DNA, 25 bp, Homo sapien
tctgacaacaccgatacctttaatt

SEQ ID NO: 6060339 - DNA, 25 bp, Homo sapien
ttcaggggtaggagagttatcgcgc

SEQ ID NO: 6060340 - DNA, 25 bp, Homo sapien
atttgcaacgattgctggtgtaata

SEQ ID NO: 6060341 - DNA, 25 bp, Homo sapien
ttatgtagtgactatggatactgca

SEQ ID NO: 6060342 - DNA, 25 bp, Homo sapien
aagggagactatatatatatatcgg

SEQ ID NO: 6060343 - DNA, 25 bp, Homo sapien
ggtaggagagttatcgcgcagatta

SEQ ID NO: 6060344 - DNA, 25 bp, Homo sapien
acaaggtgactaagattgttatgta

SEQ ID NO: 6060345 - DNA, 25 bp, Homo sapien
gactatatatatatatcgggaaagt

SEQ ID NO: 6060346 - DNA, 25 bp, Homo sapien
tatggatactgcatcaccaaaagga

SEQ ID NO: 6060347 - DNA, 25 bp, Homo sapien
tggtgaatcaatacaaggtgactaa

SEQ ID NO: 6060348 - DNA, 25 bp, Homo sapien
tttaaacaagcgataaaaatcattc

SEQ ID NO: 6060349 - DNA, 25 bp, Homo sapien
ttggaacaagaaccgattattgact

SEQ ID NO: 6060350 - DNA, 25 bp, Homo sapien
ttaattgtgccagctttatcggttt

SEQ ID NO: 6060351 - DNA, 25 bp, Homo sapien
gttacagcaaggtcaagaaaatatt

SEQ ID NO: 6060352 - DNA, 25 bp, Homo sapien
ctgtacttgaagctattgttcataa

SEQ ID NO: 6060353 - DNA, 25 bp, Homo sapien
ccggttgttaagaggcaccagttca

SEQ ID NO: 6060354 - DNA, 25 bp, Homo sapien
cgtagtgactcatctgactatatta

SEQ ID NO: 6060355 - DNA, 25 bp, Homo sapien
tatttttctcatatcagctttgttt

SEQ ID NO: 6060356 - DNA, 25 bp, Homo sapien
ctattgttcataaaatccttaagtt

SEQ ID NO: 6060357 - DNA, 25 bp, Homo sapien
actacacacactcgtagtgactcat

SEQ ID NO: 6060358 - DNA, 25 bp, Homo sapien
atgatatagaccagaccaactgtac

SEQ ID NO: 6060359 - DNA, 25 bp, Homo sapien
gctcctttgaccatgatatagacca

SEQ ID NO: 6060360 - DNA, 25 bp, Homo sapien
ttgaagctattgttcataaaatcct

SEQ ID NO: 6060361 - DNA, 25 bp, Homo sapien
gtatcaagtattctacctttatgtc

SEQ ID NO: 6060362 - DNA, 25 bp, Homo sapien
cttgctactacacacactcgtagtg

SEQ ID NO: 6060363 - DNA, 25 bp, Homo sapien
ctcatatcagctttgtttttactca

SEQ ID NO: 6060364 - DNA, 25 bp, Homo sapien
gttctatgaatgctgtacttgaagc

SEQ ID NO: 6060365 - DNA, 25 bp, Homo sapien
gcattaggaataagcaccactatta

SEQ ID NO: 6060366 - DNA, 25 bp, Homo sapien
ccttagtagttggttctatgaatgc

SEQ ID NO: 6060367 - DNA, 25 bp, Homo sapien
tcagctttgtttttactcaacttta

SEQ ID NO: 6060368 - DNA, 25 bp, Homo sapien
acacaaccatagagctactcttact

SEQ ID NO: 6060369 - DNA, 25 bp, Homo sapien
agctactcttactgccacgtaggta

SEQ ID NO: 6060370 - DNA, 25 bp, Homo sapien
agtattctacctttatgtctgaccc

SEQ ID NO: 6060371 - DNA, 25 bp, Homo sapien
ttcagagcattaggaataagcacca

SEQ ID NO: 6060372 - DNA, 25 bp, Homo sapien
actcaactttaatatcttagagaaa

SEQ ID NO: 6060373 - DNA, 25 bp, Homo sapien
cggtcacttcagaagatatgtttgc

SEQ ID NO: 6060374 - DNA, 25 bp, Homo sapien
tgcgaaaagaaggaaaacaggcaaa

SEQ ID NO: 6060375 - DNA, 25 bp, Homo sapien
gcaattacttttgcgaaaagaagga

SEQ ID NO: 6060376 - DNA, 25 bp, Homo sapien
ttaagttatattgccaaccacatca

SEQ ID NO: 6060377 - DNA, 25 bp, Homo sapien
cagaccaactgtaccgcttcagact

SEQ ID NO: 6060378 - DNA, 25 bp, Homo sapien
gtataatatcctgctattaaatctg

SEQ ID NO: 6060379 - DNA, 25 bp, Homo sapien
gcaaggtcaagaaaatattttgaca

SEQ ID NO: 6060380 - DNA, 25 bp, Homo sapien
ttttaccaacggtataatatcctgc

SEQ ID NO: 6060381 - DNA, 25 bp, Homo sapien
aagatatgtttgctcctttgaccat

SEQ ID NO: 6060382 - DNA, 25 bp, Homo sapien
aaatctgcaattacttttgcgaaaa

SEQ ID NO: 6060383 - DNA, 25 bp, Homo sapien
tatcctgctattaaatctgcaatta

SEQ ID NO: 6060384 - DNA, 25 bp, Homo sapien
tatattaccggttgttaagaggcac

SEQ ID NO: 6060385 - DNA, 25 bp, Homo sapien
ttatgtggagcaattacgtattttt

SEQ ID NO: 6060386 - DNA, 25 bp, Homo sapien
cttcagaagatatgtttgctccttt

SEQ ID NO: 6060387 - DNA, 25 bp, Homo sapien
tatttgcggtcacttcagaagatat

SEQ ID NO: 6060388 - DNA, 25 bp, Homo sapien
caagagtaccgaataatctcttctg

SEQ ID NO: 6060389 - DNA, 25 bp, Homo sapien
tatcttagagaaacagatcttgatg

SEQ ID NO: 6060390 - DNA, 25 bp, Homo sapien
ataatctcttctgtatcaagtattc

SEQ ID NO: 6060391 - DNA, 25 bp, Homo sapien
tagaccagaccaactgtaccgcttc

SEQ ID NO: 6060392 - DNA, 25 bp, Homo sapien
cttgatgttacagcaaggtcaagaa

SEQ ID NO: 6060393 - DNA, 25 bp, Homo sapien
aatattttgacaaaaacatactagt

SEQ ID NO: 6060394 - DNA, 25 bp, Homo sapien
ctttaatatcttagagaaacagatc

SEQ ID NO: 6060395 - DNA, 25 bp, Homo sapien
gactcatctgactatattaccggtt

SEQ ID NO: 6060396 - DNA, 25 bp, Homo sapien
agcaccactattacacaaccataga

SEQ ID NO: 6060397 - DNA, 25 bp, Homo sapien
aactgtaccgcttcagacttcagag

SEQ ID NO: 6060398 - DNA, 25 bp, Homo sapien
agagaaacagatcttgatgttacag

SEQ ID NO: 6060399 - DNA, 25 bp, Homo sapien
ccatagagctactcttactgccacg

SEQ ID NO: 6060400 - DNA, 25 bp, Homo sapien
ggagcaattacgtatttttctcata

SEQ ID NO: 6060401 - DNA, 25 bp, Homo sapien
tcttactgccacgtaggtaaaacac

SEQ ID NO: 6060402 - DNA, 25 bp, Homo sapien
cacgtattatgtggagcaattacgt

SEQ ID NO: 6060403 - DNA, 25 bp, Homo sapien
tttcatccttagtagttggttctat

SEQ ID NO: 6060404 - DNA, 25 bp, Homo sapien
aaaacacttgctactacacacactc

SEQ ID NO: 6060405 - DNA, 25 bp, Homo sapien
tcttctgtatcaagtattctacctt

SEQ ID NO: 6060406 - DNA, 25 bp, Homo sapien
ttgaccatgatatagaccagaccaa

SEQ ID NO: 6060407 - DNA, 25 bp, Homo sapien
attacgtatttttctcatatcagct

SEQ ID NO: 6060408 - DNA, 25 bp, Homo sapien
tagttggttctatgaatgctgtact

SEQ ID NO: 6060409 - DNA, 25 bp, Homo sapien
caagcacgccatcaagagtaccgaa

SEQ ID NO: 6060410 - DNA, 25 bp, Homo sapien
gtaggtaaaacacttgctactacac

SEQ ID NO: 6060411 - DNA, 25 bp, Homo sapien
tcagacttcagagcattaggaataa

SEQ ID NO: 6060412 - DNA, 25 bp, Homo sapien
acagatcttgatgttacagcaaggt

SEQ ID NO: 6060413 - DNA, 25 bp, Homo sapien
tactagtttcatccttagtagttgg

SEQ ID NO: 6060414 - DNA, 25 bp, Homo sapien
gccaaccacatcatagtactatttg

SEQ ID NO: 6060415 - DNA, 25 bp, Homo sapien
ccagttcaagcacgccatcaagagt

SEQ ID NO: 6060416 - DNA, 25 bp, Homo sapien
ttatgtctgacccacgtattatgtg

SEQ ID NO: 6060417 - DNA, 25 bp, Homo sapien
ttgacaaaaacatactagtttcatc

SEQ ID NO: 6060418 - DNA, 25 bp, Homo sapien
cacatcatagtactatttgcggtca

SEQ ID NO: 6060419 - DNA, 25 bp, Homo sapien
gctattaaatctgcaattacttttg

SEQ ID NO: 6060420 - DNA, 25 bp, Homo sapien
taccgaataatctcttctgtatcaa

SEQ ID NO: 6060421 - DNA, 25 bp, Homo sapien
tgttaagaggcaccagttcaagcac

SEQ ID NO: 6060422 - DNA, 25 bp, Homo sapien
tcaagaaaatattttgacaaaaaca

SEQ ID NO: 6060423 - DNA, 25 bp, Homo sapien
tctgactatattaccggttgttaag

SEQ ID NO: 6060424 - DNA, 25 bp, Homo sapien
atagtactatttgcggtcacttcag

SEQ ID NO: 6060425 - DNA, 25 bp, Homo sapien
ttttactcaactttaatatcttaga

SEQ ID NO: 6060426 - DNA, 25 bp, Homo sapien
tgaatgctgtacttgaagctattgt

SEQ ID NO: 6060427 - DNA, 25 bp, Homo sapien
tgccacgtaggtaaaacacttgcta

SEQ ID NO: 6060428 - DNA, 25 bp, Homo sapien
ggaataagcaccactattacacaac

SEQ ID NO: 6060429 - DNA, 25 bp, Homo sapien
tatattgccaaccacatcatagtac

SEQ ID NO: 6060430 - DNA, 25 bp, Homo sapien
ctgacccacgtattatgtggagcaa

SEQ ID NO: 6060431 - DNA, 25 bp, Homo sapien
cgccatcaagagtaccgaataatct

SEQ ID NO: 6060432 - DNA, 25 bp, Homo sapien
actattacacaaccatagagctact

SEQ ID NO: 6060433 - DNA, 25 bp, Homo sapien
ctacctttatgtctgacccacgtat

SEQ ID NO: 6060434 - DNA, 25 bp, Homo sapien
accgcttcagacttcagagcattag

SEQ ID NO: 6060435 - DNA, 25 bp, Homo sapien
tgtttgctcctttgaccatgatata

SEQ ID NO: 6060436 - DNA, 25 bp, Homo sapien
ccaacggtataatatcctgctatta

SEQ ID NO: 6060437 - DNA, 25 bp, Homo sapien
aaaacatactagtttcatccttagt

SEQ ID NO: 6060438 - DNA, 25 bp, Homo sapien
cacactcgtagtgactcatctgact

SEQ ID NO: 6060439 - DNA, 25 bp, Homo sapien
gaggcaccagttcaagcacgccatc

SEQ ID NO: 6060440 - DNA, 25 bp, Homo sapien
tatgacttaccaaaaaaggatacta

SEQ ID NO: 6060441 - DNA, 25 bp, Homo sapien
taactatgcactaccgcttttcgaa

SEQ ID NO: 6060442 - DNA, 25 bp, Homo sapien
gataataaagtcaataacttgaatt

SEQ ID NO: 6060443 - DNA, 25 bp, Homo sapien
agctgccctcactacttccaaaaaa

SEQ ID NO: 6060444 - DNA, 25 bp, Homo sapien
gaatatgcaagggtgggaaacggca

SEQ ID NO: 6060445 - DNA, 25 bp, Homo sapien
tatgcctttattttcaacaatcatt

SEQ ID NO: 6060446 - DNA, 25 bp, Homo sapien
gagacctagttcattgaatatgact

SEQ ID NO: 6060447 - DNA, 25 bp, Homo sapien
taagtgaatatgcaagggtgggaaa

SEQ ID NO: 6060448 - DNA, 25 bp, Homo sapien
gaaggggggagtaagtgaatatgca

SEQ ID NO: 6060449 - DNA, 25 bp, Homo sapien
caataaaaaggcccagaaatggcgg

SEQ ID NO: 6060450 - DNA, 25 bp, Homo sapien
caaaaagtttgcgagacctagttca

SEQ ID NO: 6060451 - DNA, 25 bp, Homo sapien
ccgttcttctagtcgagcacatggt

SEQ ID NO: 6060452 - DNA, 25 bp, Homo sapien
acactaattgagagacttagcggcc

SEQ ID NO: 6060453 - DNA, 25 bp, Homo sapien
tagttcattgaatatgacttaccaa

SEQ ID NO: 6060454 - DNA, 25 bp, Homo sapien
tagcggccaaagcttaatcatcatt

SEQ ID NO: 6060455 - DNA, 25 bp, Homo sapien
ctacttccaaaaaaatgggctagtg

SEQ ID NO: 6060456 - DNA, 25 bp, Homo sapien
tatagactaactctaccagcagatt

SEQ ID NO: 6060457 - DNA, 25 bp, Homo sapien
atcattacatagagtatatgaaggg

SEQ ID NO: 6060458 - DNA, 25 bp, Homo sapien
tcgagcacatggtcaaaatagtcaa

SEQ ID NO: 6060459 - DNA, 25 bp, Homo sapien
tacagtctagctgccctcactactt

SEQ ID NO: 6060460 - DNA, 25 bp, Homo sapien
ttgaattttaggtggaatatctctt

SEQ ID NO: 6060461 - DNA, 25 bp, Homo sapien
atgatgccgttcttctagtcgagca

SEQ ID NO: 6060462 - DNA, 25 bp, Homo sapien
accaaaaaaggatactaagatcctg

SEQ ID NO: 6060463 - DNA, 25 bp, Homo sapien
ccagagttagcataactatgcacta

SEQ ID NO: 6060464 - DNA, 25 bp, Homo sapien
gaagaatcatatgaataaaaccaaa

SEQ ID NO: 6060465 - DNA, 25 bp, Homo sapien
atggggttttcaaaaagctgactca

SEQ ID NO: 6060466 - DNA, 25 bp, Homo sapien
tgcactaccgcttttcgaacaaaaa

SEQ ID NO: 6060467 - DNA, 25 bp, Homo sapien
ccagaaatggcggtaaattagtggt

SEQ ID NO: 6060468 - DNA, 25 bp, Homo sapien
aggcccagaaatggcggtaaattag

SEQ ID NO: 6060469 - DNA, 25 bp, Homo sapien
catatatccagagttagcataacta

SEQ ID NO: 6060470 - DNA, 25 bp, Homo sapien
gggagtaagtgaatatgcaagggtg

SEQ ID NO: 6060471 - DNA, 25 bp, Homo sapien
ttagcataactatgcactaccgctt

SEQ ID NO: 6060472 - DNA, 25 bp, Homo sapien
catagagtatatgaaggggggagta

SEQ ID NO: 6060473 - DNA, 25 bp, Homo sapien
tgaataaaaccaaaatcaacactaa

SEQ ID NO: 6060474 - DNA, 25 bp, Homo sapien
ctaccagcagattatgatgccgttc

SEQ ID NO: 6060475 - DNA, 25 bp, Homo sapien
atggcggtaaattagtggtcgtagt

SEQ ID NO: 6060476 - DNA, 25 bp, Homo sapien
tagtggtcgtagtaagcaaaataat

SEQ ID NO: 6060477 - DNA, 25 bp, Homo sapien
tggaatatctcttatgcctttattt

SEQ ID NO: 6060478 - DNA, 25 bp, Homo sapien
ttcaaaaagctgactcacgtaattg

SEQ ID NO: 6060479 - DNA, 25 bp, Homo sapien
tttaggtggaatatctcttatgcct

SEQ ID NO: 6060480 - DNA, 25 bp, Homo sapien
gtttgcgagacctagttcattgaat

SEQ ID NO: 6060481 - DNA, 25 bp, Homo sapien
gtaaattagtggtcgtagtaagcaa

SEQ ID NO: 6060482 - DNA, 25 bp, Homo sapien
agacttagcggccaaagcttaatca

SEQ ID NO: 6060483 - DNA, 25 bp, Homo sapien
gggctagtgttgtacggtttatgcc

SEQ ID NO: 6060484 - DNA, 25 bp, Homo sapien
gtaattgatcaatacttcactaaag

SEQ ID NO: 6060485 - DNA, 25 bp, Homo sapien
tcgaacaaaaagtttgcgagaccta

SEQ ID NO: 6060486 - DNA, 25 bp, Homo sapien
aaatcccgtaaactcatgatgtaaa

SEQ ID NO: 6060487 - DNA, 25 bp, Homo sapien
gaaacggcaaagtatttttatgcaa

SEQ ID NO: 6060488 - DNA, 25 bp, Homo sapien
tttacaaatcccgtaaactcatgat

SEQ ID NO: 6060489 - DNA, 25 bp, Homo sapien
ctaactctaccagcagattatgatg

SEQ ID NO: 6060490 - DNA, 25 bp, Homo sapien
ttcaacaatcattatagactaactc

SEQ ID NO: 6060491 - DNA, 25 bp, Homo sapien
gtatatgaaggggggagtaagtgaa

SEQ ID NO: 6060492 - DNA, 25 bp, Homo sapien
tgcaaaaagcgtatttacaaatccc

SEQ ID NO: 6060493 - DNA, 25 bp, Homo sapien
cttaatcatcattacatagagtata

SEQ ID NO: 6060494 - DNA, 25 bp, Homo sapien
actcacgtaattgatcaatacttca

SEQ ID NO: 6060495 - DNA, 25 bp, Homo sapien
tacttcactaaagaagaatcatatg

SEQ ID NO: 6060496 - DNA, 25 bp, Homo sapien
gatcaatacttcactaaagaagaat

SEQ ID NO: 6060497 - DNA, 25 bp, Homo sapien
tttttatgcaaaaagcgtatttaca

SEQ ID NO: 6060498 - DNA, 25 bp, Homo sapien
aaatcaacactaattgagagactta

SEQ ID NO: 6060499 - DNA, 25 bp, Homo sapien
ataatttcctaattccttccaaatg

SEQ ID NO: 6060500 - DNA, 25 bp, Homo sapien
ccaaagcttaatcatcattacatag

SEQ ID NO: 6060501 - DNA, 25 bp, Homo sapien
aaaccaaaatcaacactaattgaga

SEQ ID NO: 6060502 - DNA, 25 bp, Homo sapien
attgagagacttagcggccaaagct

SEQ ID NO: 6060503 - DNA, 25 bp, Homo sapien
caataacttgaattttaggtggaat

SEQ ID NO: 6060504 - DNA, 25 bp, Homo sapien
gtgttgtacggtttatgccatatat

SEQ ID NO: 6060505 - DNA, 25 bp, Homo sapien
aagtcaataacttgaattttaggtg

SEQ ID NO: 6060506 - DNA, 25 bp, Homo sapien
cactaaagaagaatcatatgaataa

SEQ ID NO: 6060507 - DNA, 25 bp, Homo sapien
aatcattatagactaactctaccag

SEQ ID NO: 6060508 - DNA, 25 bp, Homo sapien
tactaagatcctgataataaagtca

SEQ ID NO: 6060509 - DNA, 25 bp, Homo sapien
ctcactacttccaaaaaaatgggct

SEQ ID NO: 6060510 - DNA, 25 bp, Homo sapien
tacggtttatgccatatatccagag

SEQ ID NO: 6060511 - DNA, 25 bp, Homo sapien
gatcctgataataaagtcaataact

SEQ ID NO: 6060512 - DNA, 25 bp, Homo sapien
gcagattatgatgccgttcttctag

SEQ ID NO: 6060513 - DNA, 25 bp, Homo sapien
tgcaagggtgggaaacggcaaagta

SEQ ID NO: 6060514 - DNA, 25 bp, Homo sapien
aagctgactcacgtaattgatcaat

SEQ ID NO: 6060515 - DNA, 25 bp, Homo sapien
atctcttatgcctttattttcaaca

SEQ ID NO: 6060516 - DNA, 25 bp, Homo sapien
tcgtagtaagcaaaataatttccta

SEQ ID NO: 6060517 - DNA, 25 bp, Homo sapien
ttctagtcgagcacatggtcaaaat

SEQ ID NO: 6060518 - DNA, 25 bp, Homo sapien
tcaaaatagtcaataaaaaggccca

SEQ ID NO: 6060519 - DNA, 25 bp, Homo sapien
caaaaaaatgggctagtgttgtacg

SEQ ID NO: 6060520 - DNA, 25 bp, Homo sapien
tttattttcaacaatcattatagac

SEQ ID NO: 6060521 - DNA, 25 bp, Homo sapien
tcatatgaataaaaccaaaatcaac

SEQ ID NO: 6060522 - DNA, 25 bp, Homo sapien
ttatgccatatatccagagttagca

SEQ ID NO: 6060523 - DNA, 25 bp, Homo sapien
ggttttcaaaaagctgactcacgta

SEQ ID NO: 6060524 - DNA, 25 bp, Homo sapien
caaagtatttttatgcaaaaagcgt

SEQ ID NO: 6060525 - DNA, 25 bp, Homo sapien
attgaatatgacttaccaaaaaagg

SEQ ID NO: 6060526 - DNA, 25 bp, Homo sapien
aaaggatactaagatcctgataata

SEQ ID NO: 6060527 - DNA, 25 bp, Homo sapien
atagtcaataaaaaggcccagaaat

SEQ ID NO: 6060528 - DNA, 25 bp, Homo sapien
acatggtcaaaatagtcaataaaaa

SEQ ID NO: 6060529 - DNA, 25 bp, Homo sapien
tgtcacagataaccaagactgtctc

SEQ ID NO: 6060530 - DNA, 25 bp, Homo sapien
aattttgaaatcgaacaagaagatg

SEQ ID NO: 6060531 - DNA, 25 bp, Homo sapien
acattccagacgcattgcgagctcg

SEQ ID NO: 6060532 - DNA, 25 bp, Homo sapien
catgaatataatcgccattgtagtt

SEQ ID NO: 6060533 - DNA, 25 bp, Homo sapien
tttattaagagaagtaagcataagg

SEQ ID NO: 6060534 - DNA, 25 bp, Homo sapien
ctgtctctagcaacattccagacgc

SEQ ID NO: 6060535 - DNA, 25 bp, Homo sapien
agcgggctcatttttcaaaaatccg

SEQ ID NO: 6060536 - DNA, 25 bp, Homo sapien
gattttctcaatattgtccattatc

SEQ ID NO: 6060537 - DNA, 25 bp, Homo sapien
gtgccgcctttcttttcttctatcc

SEQ ID NO: 6060538 - DNA, 25 bp, Homo sapien
agataaccaagactgtctctagcaa

SEQ ID NO: 6060539 - DNA, 25 bp, Homo sapien
gaagatgctcacacgcctgaacgaa

SEQ ID NO: 6060540 - DNA, 25 bp, Homo sapien
tggggatatttgctgtatgctaagt

SEQ ID NO: 6060541 - DNA, 25 bp, Homo sapien
aacgtttacataaatgcttggtaat

SEQ ID NO: 6060542 - DNA, 25 bp, Homo sapien
tcatttttcaaaaatccgtcaaatg

SEQ ID NO: 6060543 - DNA, 25 bp, Homo sapien
gaattatccagtttcacgagtcaag

SEQ ID NO: 6060544 - DNA, 25 bp, Homo sapien
aaccttaaatccagaacataatagt

SEQ ID NO: 6060545 - DNA, 25 bp, Homo sapien
tatttgctgtatgctaagtaaagga

SEQ ID NO: 6060546 - DNA, 25 bp, Homo sapien
ctgtatgctaagtaaaggaaaagtt

SEQ ID NO: 6060547 - DNA, 25 bp, Homo sapien
gccatcagacgacttatatgaaaac

SEQ ID NO: 6060548 - DNA, 25 bp, Homo sapien
tcaaatggggatatttgctgtatgc

SEQ ID NO: 6060549 - DNA, 25 bp, Homo sapien
aatccgtcaaatggggatatttgct

SEQ ID NO: 6060550 - DNA, 25 bp, Homo sapien
aaattgtgaatcaaccttaaatcca

SEQ ID NO: 6060551 - DNA, 25 bp, Homo sapien
aatgcttggtaatgcagttcattct

SEQ ID NO: 6060552 - DNA, 25 bp, Homo sapien
tggcggaacgtttacataaatgctt

SEQ ID NO: 6060553 - DNA, 25 bp, Homo sapien
gccaacgaattatccagtttcacga

SEQ ID NO: 6060554 - DNA, 25 bp, Homo sapien
cctttcttttcttctatcctcttat

SEQ ID NO: 6060555 - DNA, 25 bp, Homo sapien
tgaatcaaccttaaatccagaacat

SEQ ID NO: 6060556 - DNA, 25 bp, Homo sapien
gaatataatcgccatgaatataatc

SEQ ID NO: 6060557 - DNA, 25 bp, Homo sapien
tggtaatgcagttcattctgggtta

SEQ ID NO: 6060558 - DNA, 25 bp, Homo sapien
atgccaccagattttggtgatgaaa

SEQ ID NO: 6060559 - DNA, 25 bp, Homo sapien
cataaggattttctcaatattgtcc

SEQ ID NO: 6060560 - DNA, 25 bp, Homo sapien
aatcgccatgaatataatcgccatt

SEQ ID NO: 6060561 - DNA, 25 bp, Homo sapien
gaagttccgctcaaaaggttgattg

SEQ ID NO: 6060562 - DNA, 25 bp, Homo sapien
cagacgcattgcgagctcgaagttc

SEQ ID NO: 6060563 - DNA, 25 bp, Homo sapien
ccgctcaaaaggttgattggcagca

SEQ ID NO: 6060564 - DNA, 25 bp, Homo sapien
tccgaggcctccattacctttgtat

SEQ ID NO: 6060565 - DNA, 25 bp, Homo sapien
ccaagactgtctctagcaacattcc

SEQ ID NO: 6060566 - DNA, 25 bp, Homo sapien
tccagtttcacgagtcaaggcggta

SEQ ID NO: 6060567 - DNA, 25 bp, Homo sapien
gaaatcgaacaagaagatgctcaca

SEQ ID NO: 6060568 - DNA, 25 bp, Homo sapien
tgaaaacgccaacgaattatccagt

SEQ ID NO: 6060569 - DNA, 25 bp, Homo sapien
cataataaatggctgtgtctatttt

SEQ ID NO: 6060570 - DNA, 25 bp, Homo sapien
ccagattttggtgatgaaaaattgt

SEQ ID NO: 6060571 - DNA, 25 bp, Homo sapien
gcggtaattttgaaatcgaacaaga

SEQ ID NO: 6060572 - DNA, 25 bp, Homo sapien
gcctccattacctttgtatgaatat

SEQ ID NO: 6060573 - DNA, 25 bp, Homo sapien
cattgcgagctcgaagttccgctca

SEQ ID NO: 6060574 - DNA, 25 bp, Homo sapien
gcagcagcacgcatcgaagacaagt

SEQ ID NO: 6060575 - DNA, 25 bp, Homo sapien
tagttcgccaagtgccgcctttctt

SEQ ID NO: 6060576 - DNA, 25 bp, Homo sapien
caagtgggtaatcttttttacgcat

SEQ ID NO: 6060577 - DNA, 25 bp, Homo sapien
tgcagttcattctgggttagcgggc

SEQ ID NO: 6060578 - DNA, 25 bp, Homo sapien
atcgaagacaagtgggtaatctttt

SEQ ID NO: 6060579 - DNA, 25 bp, Homo sapien
agtaagcataaggattttctcaata

SEQ ID NO: 6060580 - DNA, 25 bp, Homo sapien
tttggtgatgaaaaattgtgaatca

SEQ ID NO: 6060581 - DNA, 25 bp, Homo sapien
gtcaaggcggtaattttgaaatcga

SEQ ID NO: 6060582 - DNA, 25 bp, Homo sapien
agaacataatagtataccttaccaa

SEQ ID NO: 6060583 - DNA, 25 bp, Homo sapien
cttatatgaaaacgccaacgaatta

SEQ ID NO: 6060584 - DNA, 25 bp, Homo sapien
gttttcgccatcagacgacttatat

SEQ ID NO: 6060585 - DNA, 25 bp, Homo sapien
gccattgtagttcgccaagtgccgc

SEQ ID NO: 6060586 - DNA, 25 bp, Homo sapien
acgcctgaacgaaacacatgtcaca

SEQ ID NO: 6060587 - DNA, 25 bp, Homo sapien
gcacgcatcgaagacaagtgggtaa

SEQ ID NO: 6060588 - DNA, 25 bp, Homo sapien
gctcacacgcctgaacgaaacacat

SEQ ID NO: 6060589 - DNA, 25 bp, Homo sapien
tgattggcagcagcacgcatcgaag

SEQ ID NO: 6060590 - DNA, 25 bp, Homo sapien
tgggttagcgggctcatttttcaaa

SEQ ID NO: 6060591 - DNA, 25 bp, Homo sapien
ttcacgagtcaaggcggtaattttg

SEQ ID NO: 6060592 - DNA, 25 bp, Homo sapien
gagctcgaagttccgctcaaaaggt

SEQ ID NO: 6060593 - DNA, 25 bp, Homo sapien
ctcaatattgtccattatccgaggc

SEQ ID NO: 6060594 - DNA, 25 bp, Homo sapien
ttacctttgtatgaatataatcgcc

SEQ ID NO: 6060595 - DNA, 25 bp, Homo sapien
attgtccattatccgaggcctccat

SEQ ID NO: 6060596 - DNA, 25 bp, Homo sapien
aacacatgtcacagataaccaagac

SEQ ID NO: 6060597 - DNA, 25 bp, Homo sapien
aatggctgtgtctattttttattaa

SEQ ID NO: 6060598 - DNA, 25 bp, Homo sapien
gccaagtgccgcctttcttttcttc

SEQ ID NO: 6060599 - DNA, 25 bp, Homo sapien
tgtgtctattttttattaagagaag

SEQ ID NO: 6060600 - DNA, 25 bp, Homo sapien
gatgaaaaattgtgaatcaacctta

SEQ ID NO: 6060601 - DNA, 25 bp, Homo sapien
gtataccttaccaaagatggtggcg

SEQ ID NO: 6060602 - DNA, 25 bp, Homo sapien
ataatcgccattgtagttcgccaag

SEQ ID NO: 6060603 - DNA, 25 bp, Homo sapien
cattatccgaggcctccattacctt

SEQ ID NO: 6060604 - DNA, 25 bp, Homo sapien
agatggtggcggaacgtttacataa

SEQ ID NO: 6060605 - DNA, 25 bp, Homo sapien
agacgacttatatgaaaacgccaac

SEQ ID NO: 6060606 - DNA, 25 bp, Homo sapien
cttaccaaagatggtggcggaacgt

SEQ ID NO: 6060607 - DNA, 25 bp, Homo sapien
aaatccagaacataatagtatacct

SEQ ID NO: 6060608 - DNA, 25 bp, Homo sapien
aagagaagtaagcataaggattttc

SEQ ID NO: 6060609 - DNA, 25 bp, Homo sapien
tacataaatgcttggtaatgcagtt

SEQ ID NO: 6060610 - DNA, 25 bp, Homo sapien
ctagcaacattccagacgcattgcg

SEQ ID NO: 6060611 - DNA, 25 bp, Homo sapien
ttcaaaaatccgtcaaatggggata

SEQ ID NO: 6060612 - DNA, 25 bp, Homo sapien
tcattctgggttagcgggctcattt

SEQ ID NO: 6060613 - DNA, 25 bp, Homo sapien
ttgtatgaatataatcgccatgaat

SEQ ID NO: 6060614 - DNA, 25 bp, Homo sapien
atcttttttacgcataataaatggc

SEQ ID NO: 6060615 - DNA, 25 bp, Homo sapien
gaacaagaagatgctcacacgcctg

SEQ ID NO: 6060616 - DNA, 25 bp, Homo sapien
tttacgcataataaatggctgtgtc

SEQ ID NO: 6060617 - DNA, 25 bp, Homo sapien
taatagtataccttaccaaagatgg

SEQ ID NO: 6060618 - DNA, 25 bp, Homo sapien
tattttttattaagagaagtaagca

SEQ ID NO: 6060619 - DNA, 25 bp, Homo sapien
gaacgaaacacatgtcacagataac

SEQ ID NO: 6060620 - DNA, 25 bp, Homo sapien
aggaaaagttttcgccatcagacga

SEQ ID NO: 6060621 - DNA, 25 bp, Homo sapien
tgggtaatcttttttacgcataata

SEQ ID NO: 6060622 - DNA, 25 bp, Homo sapien
aaaaggttgattggcagcagcacgc

SEQ ID NO: 6060623 - DNA, 25 bp, Homo sapien
agactgactattgcttcgtctcaag

SEQ ID NO: 6060624 - DNA, 25 bp, Homo sapien
caccagagttaaaaccaacctcttg

SEQ ID NO: 6060625 - DNA, 25 bp, Homo sapien
atccgacatgcctcaagagttactg

SEQ ID NO: 6060626 - DNA, 25 bp, Homo sapien
taaatggtctacatcattctaaatg

SEQ ID NO: 6060627 - DNA, 25 bp, Homo sapien
tggaataaatggtctacatcattct

SEQ ID NO: 6060628 - DNA, 25 bp, Homo sapien
gtttatatgtttagatttatgtatg

SEQ ID NO: 6060629 - DNA, 25 bp, Homo sapien
agactgttttgaaagtacaggccat

SEQ ID NO: 6060630 - DNA, 25 bp, Homo sapien
gttaaatgtaaactcttgtgcagta

SEQ ID NO: 6060631 - DNA, 25 bp, Homo sapien
actgcggtttattcaaggcaaacca

SEQ ID NO: 6060632 - DNA, 25 bp, Homo sapien
caaaccatccgacatgcctcaagag

SEQ ID NO: 6060633 - DNA, 25 bp, Homo sapien
tcaagagttactggaaaatgaggtg

SEQ ID NO: 6060634 - DNA, 25 bp, Homo sapien
gaggttgaagtctctcaaaatgtaa

SEQ ID NO: 6060635 - DNA, 25 bp, Homo sapien
ttaacgagttacacaggtgtttata

SEQ ID NO: 6060636 - DNA, 25 bp, Homo sapien
aatgtaacatttaactataacatca

SEQ ID NO: 6060637 - DNA, 25 bp, Homo sapien
agatactggtatcactgctctttgc

SEQ ID NO: 6060638 - DNA, 25 bp, Homo sapien
gtctacatcattctaaatggtagaa

SEQ ID NO: 6060639 - DNA, 25 bp, Homo sapien
cctaacagttaaaccactctaacag

SEQ ID NO: 6060640 - DNA, 25 bp, Homo sapien
cagttaaaccactctaacagttact

SEQ ID NO: 6060641 - DNA, 25 bp, Homo sapien
cactgctctttgcttcgcatgctgt

SEQ ID NO: 6060642 - DNA, 25 bp, Homo sapien
aatggaatgaacagatcacctaaca

SEQ ID NO: 6060643 - DNA, 25 bp, Homo sapien
aggccattcattataatgactgcgg

SEQ ID NO: 6060644 - DNA, 25 bp, Homo sapien
ctctaacagttactattagagtggt

SEQ ID NO: 6060645 - DNA, 25 bp, Homo sapien
caatggatttctgtttccagactgt

SEQ ID NO: 6060646 - DNA, 25 bp, Homo sapien
ataatgactgcggtttattcaaggc

SEQ ID NO: 6060647 - DNA, 25 bp, Homo sapien
aagtgctactaaaaggtacctcagc

SEQ ID NO: 6060648 - DNA, 25 bp, Homo sapien
cactaacgaaagtgctactaaaagg

SEQ ID NO: 6060649 - DNA, 25 bp, Homo sapien
ttgagatacaacacgaaaaatggaa

SEQ ID NO: 6060650 - DNA, 25 bp, Homo sapien
gttactggaaaatgaggtggtctcc

SEQ ID NO: 6060651 - DNA, 25 bp, Homo sapien
atacagagactgactattgcttcgt

SEQ ID NO: 6060652 - DNA, 25 bp, Homo sapien
atgttattactggatgaaagatact

SEQ ID NO: 6060653 - DNA, 25 bp, Homo sapien
gaagcccagacgttaacgagttaca

SEQ ID NO: 6060654 - DNA, 25 bp, Homo sapien
ggtctccttgttatacagagactga

SEQ ID NO: 6060655 - DNA, 25 bp, Homo sapien
tttcgagaggttgaagtctctcaaa

SEQ ID NO: 6060656 - DNA, 25 bp, Homo sapien
agatttatgtatgtagcaacgctaa

SEQ ID NO: 6060657 - DNA, 25 bp, Homo sapien
acatttaactataacatcagtcgta

SEQ ID NO: 6060658 - DNA, 25 bp, Homo sapien
tggtatcactgctctttgcttcgca

SEQ ID NO: 6060659 - DNA, 25 bp, Homo sapien
gagtggttaaatgtaaactcttgtg

SEQ ID NO: 6060660 - DNA, 25 bp, Homo sapien
aacatcagtcgtatgttattactgg

SEQ ID NO: 6060661 - DNA, 25 bp, Homo sapien
ttttgaaagtacaggccattcatta

SEQ ID NO: 6060662 - DNA, 25 bp, Homo sapien
gaagtctctcaaaatgtaacattta

SEQ ID NO: 6060663 - DNA, 25 bp, Homo sapien
gatgaaagatactggtatcactgct

SEQ ID NO: 6060664 - DNA, 25 bp, Homo sapien
ctattagagtggttaaatgtaaact

SEQ ID NO: 6060665 - DNA, 25 bp, Homo sapien
ccaacctcttggtttcgagaggttg

SEQ ID NO: 6060666 - DNA, 25 bp, Homo sapien
aactataacatcagtcgtatgttat

SEQ ID NO: 6060667 - DNA, 25 bp, Homo sapien
acgctaagctatctcatcttgagat

SEQ ID NO: 6060668 - DNA, 25 bp, Homo sapien
tacaacacgaaaaatggaatgaaca

SEQ ID NO: 6060669 - DNA, 25 bp, Homo sapien
aaaccactctaacagttactattag

SEQ ID NO: 6060670 - DNA, 25 bp, Homo sapien
cacaggtgtttatatgtttagattt

SEQ ID NO: 6060671 - DNA, 25 bp, Homo sapien
cctcagcaatggatttctgtttcca

SEQ ID NO: 6060672 - DNA, 25 bp, Homo sapien
tctcaaaatgtaacatttaactata

SEQ ID NO: 6060673 - DNA, 25 bp, Homo sapien
cttgttatacagagactgactattg

SEQ ID NO: 6060674 - DNA, 25 bp, Homo sapien
atgaacagatcacctaacagttaaa

SEQ ID NO: 6060675 - DNA, 25 bp, Homo sapien
tgcagtaaataagaactaaccttaa

SEQ ID NO: 6060676 - DNA, 25 bp, Homo sapien
aaggtacctcagcaatggatttctg

SEQ ID NO: 6060677 - DNA, 25 bp, Homo sapien
tactaaaaggtacctcagcaatgga

SEQ ID NO: 6060678 - DNA, 25 bp, Homo sapien
agcatggaagcccagacgttaacga

SEQ ID NO: 6060679 - DNA, 25 bp, Homo sapien
aagtacaggccattcattataatga

SEQ ID NO: 6060680 - DNA, 25 bp, Homo sapien
tgaggtggtctccttgttatacaga

SEQ ID NO: 6060681 - DNA, 25 bp, Homo sapien
ggtagaagcatggaagcccagacgt

SEQ ID NO: 6060682 - DNA, 25 bp, Homo sapien
cagttactattagagtggttaaatg

SEQ ID NO: 6060683 - DNA, 25 bp, Homo sapien
gtttattcaaggcaaaccatccgac

SEQ ID NO: 6060684 - DNA, 25 bp, Homo sapien
actattgcttcgtctcaagctttgt

SEQ ID NO: 6060685 - DNA, 25 bp, Homo sapien
tgtaaactcttgtgcagtaaataag

SEQ ID NO: 6060686 - DNA, 25 bp, Homo sapien
acccacccttcttgaagtcaccaga

SEQ ID NO: 6060687 - DNA, 25 bp, Homo sapien
atttctgtttccagactgttttgaa

SEQ ID NO: 6060688 - DNA, 25 bp, Homo sapien
gagttacacaggtgtttatatgttt

SEQ ID NO: 6060689 - DNA, 25 bp, Homo sapien
ccttcttgaagtcaccagagttaaa

SEQ ID NO: 6060690 - DNA, 25 bp, Homo sapien
ttactggatgaaagatactggtatc

SEQ ID NO: 6060691 - DNA, 25 bp, Homo sapien
gtttccagactgttttgaaagtaca

SEQ ID NO: 6060692 - DNA, 25 bp, Homo sapien
acgaaaaatggaatgaacagatcac

SEQ ID NO: 6060693 - DNA, 25 bp, Homo sapien
ggaaaatgaggtggtctccttgtta

SEQ ID NO: 6060694 - DNA, 25 bp, Homo sapien
agatcacctaacagttaaaccactc

SEQ ID NO: 6060695 - DNA, 25 bp, Homo sapien
tctcaagctttgtaaaaggtaccca

SEQ ID NO: 6060696 - DNA, 25 bp, Homo sapien
atcattctaaatggtagaagcatgg

SEQ ID NO: 6060697 - DNA, 25 bp, Homo sapien
agctatctcatcttgagatacaaca

SEQ ID NO: 6060698 - DNA, 25 bp, Homo sapien
atgtttagatttatgtatgtagcaa

SEQ ID NO: 6060699 - DNA, 25 bp, Homo sapien
ctcatcttgagatacaacacgaaaa

SEQ ID NO: 6060700 - DNA, 25 bp, Homo sapien
tcaaggcaaaccatccgacatgcct

SEQ ID NO: 6060701 - DNA, 25 bp, Homo sapien
gtagcaacgctaagctatctcatct

SEQ ID NO: 6060702 - DNA, 25 bp, Homo sapien
ctcttgtgcagtaaataagaactaa

SEQ ID NO: 6060703 - DNA, 25 bp, Homo sapien
aaccttcactaacgaaagtgctact

SEQ ID NO: 6060704 - DNA, 25 bp, Homo sapien
tgaagtcaccagagttaaaaccaac

SEQ ID NO: 6060705 - DNA, 25 bp, Homo sapien
cagacgttaacgagttacacaggtg

SEQ ID NO: 6060706 - DNA, 25 bp, Homo sapien
gcttcgtctcaagctttgtaaaagg

SEQ ID NO: 6060707 - DNA, 25 bp, Homo sapien
catgcctcaagagttactggaaaat

SEQ ID NO: 6060708 - DNA, 25 bp, Homo sapien
agtcgtatgttattactggatgaaa

SEQ ID NO: 6060709 - DNA, 25 bp, Homo sapien
ttcattataatgactgcggtttatt

SEQ ID NO: 6060710 - DNA, 25 bp, Homo sapien
tcttggtttcgagaggttgaagtct

SEQ ID NO: 6060711 - DNA, 25 bp, Homo sapien
atgtatgtagcaacgctaagctatc

SEQ ID NO: 6060712 - DNA, 25 bp, Homo sapien
ctaaatggtagaagcatggaagccc

SEQ ID NO: 6060713 - DNA, 25 bp, Homo sapien
atgcattgagaaagcactaaaaagg

SEQ ID NO: 6060714 - DNA, 25 bp, Homo sapien
tcagagcgcattaatgcatgtaaag

SEQ ID NO: 6060715 - DNA, 25 bp, Homo sapien
taaccttaattttagtcggctgaca

SEQ ID NO: 6060716 - DNA, 25 bp, Homo sapien
tatattctctgtaaggatatcgtac

SEQ ID NO: 6060717 - DNA, 25 bp, Homo sapien
atcaattttcggatctgtcgctaaa

SEQ ID NO: 6060718 - DNA, 25 bp, Homo sapien
acagcacctgcctgctcctttttca

SEQ ID NO: 6060719 - DNA, 25 bp, Homo sapien
ttcaatgtctctatcaattttcgga

SEQ ID NO: 6060720 - DNA, 25 bp, Homo sapien
aagggtagtcagctcactttagtat

SEQ ID NO: 6060721 - DNA, 25 bp, Homo sapien
tgcaccaaaattatgcattgagaaa

SEQ ID NO: 6060722 - DNA, 25 bp, Homo sapien
ctttcctatggctatttctgtgttt

SEQ ID NO: 6060723 - DNA, 25 bp, Homo sapien
tgacaaaattcactttcctatggct

SEQ ID NO: 6060724 - DNA, 25 bp, Homo sapien
tcaaattttttgctgctttgtaagc

SEQ ID NO: 6060725 - DNA, 25 bp, Homo sapien
tttttgctgctttgtaagctaacct

SEQ ID NO: 6060726 - DNA, 25 bp, Homo sapien
tgagaaagcactaaaaaggacggag

SEQ ID NO: 6060727 - DNA, 25 bp, Homo sapien
gcgatgtcaaattttttgctgcttt

SEQ ID NO: 6060728 - DNA, 25 bp, Homo sapien
cattaaagttacatgcgtttttctt

SEQ ID NO: 6060729 - DNA, 25 bp, Homo sapien
tagggcactcaaaagggtagtcagc

SEQ ID NO: 6060730 - DNA, 25 bp, Homo sapien
atgggtactttccttcataggttat

SEQ ID NO: 6060731 - DNA, 25 bp, Homo sapien
ttaagtttctggcgaccctcctgga

SEQ ID NO: 6060732 - DNA, 25 bp, Homo sapien
aaaattatgcattgagaaagcacta

SEQ ID NO: 6060733 - DNA, 25 bp, Homo sapien
ggacggagtagtgattttttcaatg

SEQ ID NO: 6060734 - DNA, 25 bp, Homo sapien
atcgtaccacatttcagagcgcatt

SEQ ID NO: 6060735 - DNA, 25 bp, Homo sapien
caggaaccgaaaaaaatatacagca

SEQ ID NO: 6060736 - DNA, 25 bp, Homo sapien
gtcggctgacaaaattcactttcct

SEQ ID NO: 6060737 - DNA, 25 bp, Homo sapien
ccaaaaaatgcaactatagtgttct

SEQ ID NO: 6060738 - DNA, 25 bp, Homo sapien
tcaacattgcacgatatacagaaaa

SEQ ID NO: 6060739 - DNA, 25 bp, Homo sapien
ggaaaggtacatcacacacgaccac

SEQ ID NO: 6060740 - DNA, 25 bp, Homo sapien
aattcactttcctatggctatttct

SEQ ID NO: 6060741 - DNA, 25 bp, Homo sapien
cactaaaaaggacggagtagtgatt

SEQ ID NO: 6060742 - DNA, 25 bp, Homo sapien
gaaaaaaatatacagcacctgcctg

SEQ ID NO: 6060743 - DNA, 25 bp, Homo sapien
tttttcagggaataccgtgcgatgt

SEQ ID NO: 6060744 - DNA, 25 bp, Homo sapien
tttttagtcgtgcaccaaaattatg

SEQ ID NO: 6060745 - DNA, 25 bp, Homo sapien
atctgtcgctaaaactagtttaagt

SEQ ID NO: 6060746 - DNA, 25 bp, Homo sapien
tttctggcgaccctcctggaatgct

SEQ ID NO: 6060747 - DNA, 25 bp, Homo sapien
gatatacagaaaatatattctctgt

SEQ ID NO: 6060748 - DNA, 25 bp, Homo sapien
actatagtgttctagaattttttag

SEQ ID NO: 6060749 - DNA, 25 bp, Homo sapien
tagaattttttagtcgtgcaccaaa

SEQ ID NO: 6060750 - DNA, 25 bp, Homo sapien
atttgacattaaagttacatgcgtt

SEQ ID NO: 6060751 - DNA, 25 bp, Homo sapien
tagtatttaagatacaccgacgcca

SEQ ID NO: 6060752 - DNA, 25 bp, Homo sapien
tcataggttattcaacattgcacga

SEQ ID NO: 6060753 - DNA, 25 bp, Homo sapien
agttacatgcgtttttcttcttccg

SEQ ID NO: 6060754 - DNA, 25 bp, Homo sapien
aatgcatgtaaaggaaaggtacatc

SEQ ID NO: 6060755 - DNA, 25 bp, Homo sapien
tttcggatctgtcgctaaaactagt

SEQ ID NO: 6060756 - DNA, 25 bp, Homo sapien
tatggctatttctgtgttttttttg

SEQ ID NO: 6060757 - DNA, 25 bp, Homo sapien
gtctctatcaattttcggatctgtc

SEQ ID NO: 6060758 - DNA, 25 bp, Homo sapien
agtagtgattttttcaatgtctcta

SEQ ID NO: 6060759 - DNA, 25 bp, Homo sapien
ttaagatacaccgacgccatgtaag

SEQ ID NO: 6060760 - DNA, 25 bp, Homo sapien
tcttcttccggcccaaaaaatgcaa

SEQ ID NO: 6060761 - DNA, 25 bp, Homo sapien
ctcctggaatgcttaccttgagcga

SEQ ID NO: 6060762 - DNA, 25 bp, Homo sapien
ctctgtaaggatatcgtaccacatt

SEQ ID NO: 6060763 - DNA, 25 bp, Homo sapien
agtcagctcactttagtatttaaga

SEQ ID NO: 6060764 - DNA, 25 bp, Homo sapien
ccacatttcagagcgcattaatgca

SEQ ID NO: 6060765 - DNA, 25 bp, Homo sapien
tgtaaaggaaaggtacatcacacac

SEQ ID NO: 6060766 - DNA, 25 bp, Homo sapien
catgtaagaggcaggaaccgaaaaa

SEQ ID NO: 6060767 - DNA, 25 bp, Homo sapien
attttagtcggctgacaaaattcac

SEQ ID NO: 6060768 - DNA, 25 bp, Homo sapien
tagtcgtgcaccaaaattatgcatt

SEQ ID NO: 6060769 - DNA, 25 bp, Homo sapien
tgagcgatgggtactttccttcata

SEQ ID NO: 6060770 - DNA, 25 bp, Homo sapien
taggtgaaaactttatttgacatta

SEQ ID NO: 6060771 - DNA, 25 bp, Homo sapien
aaggatatcgtaccacatttcagag

SEQ ID NO: 6060772 - DNA, 25 bp, Homo sapien
tgtgttttttttgtatcgcgcttac

SEQ ID NO: 6060773 - DNA, 25 bp, Homo sapien
gattttttcaatgtctctatcaatt

SEQ ID NO: 6060774 - DNA, 25 bp, Homo sapien
tgctcctttttcagggaataccgtg

SEQ ID NO: 6060775 - DNA, 25 bp, Homo sapien
cgcgcttactaggtgaaaactttat

SEQ ID NO: 6060776 - DNA, 25 bp, Homo sapien
atacaccgacgccatgtaagaggca

SEQ ID NO: 6060777 - DNA, 25 bp, Homo sapien
ctttccttcataggttattcaacat

SEQ ID NO: 6060778 - DNA, 25 bp, Homo sapien
ctgctttgtaagctaaccttaattt

SEQ ID NO: 6060779 - DNA, 25 bp, Homo sapien
gtacatcacacacgaccacagattt

SEQ ID NO: 6060780 - DNA, 25 bp, Homo sapien
ttaccttgagcgatgggtactttcc

SEQ ID NO: 6060781 - DNA, 25 bp, Homo sapien
cgcattaatgcatgtaaaggaaagg

SEQ ID NO: 6060782 - DNA, 25 bp, Homo sapien
gtgttctagaattttttagtcgtgc

SEQ ID NO: 6060783 - DNA, 25 bp, Homo sapien
gcgaccctcctggaatgcttacctt

SEQ ID NO: 6060784 - DNA, 25 bp, Homo sapien
agaaaatatattctctgtaaggata

SEQ ID NO: 6060785 - DNA, 25 bp, Homo sapien
tcactttagtatttaagatacaccg

SEQ ID NO: 6060786 - DNA, 25 bp, Homo sapien
gaatgcttaccttgagcgatgggta

SEQ ID NO: 6060787 - DNA, 25 bp, Homo sapien
cacacacgaccacagattttttaaa

SEQ ID NO: 6060788 - DNA, 25 bp, Homo sapien
ggttattcaacattgcacgatatac

SEQ ID NO: 6060789 - DNA, 25 bp, Homo sapien
ttttttgtatcgcgcttactaggtg

SEQ ID NO: 6060790 - DNA, 25 bp, Homo sapien
taccgtgcgatgtcaaattttttgc

SEQ ID NO: 6060791 - DNA, 25 bp, Homo sapien
ttgtatcgcgcttactaggtgaaaa

SEQ ID NO: 6060792 - DNA, 25 bp, Homo sapien
aatgcaactatagtgttctagaatt

SEQ ID NO: 6060793 - DNA, 25 bp, Homo sapien
catgcgtttttcttcttccggccca

SEQ ID NO: 6060794 - DNA, 25 bp, Homo sapien
cgacgccatgtaagaggcaggaacc

SEQ ID NO: 6060795 - DNA, 25 bp, Homo sapien
agggaataccgtgcgatgtcaaatt

SEQ ID NO: 6060796 - DNA, 25 bp, Homo sapien
tccggcccaaaaaatgcaactatag

SEQ ID NO: 6060797 - DNA, 25 bp, Homo sapien
actcaaaagggtagtcagctcactt

SEQ ID NO: 6060798 - DNA, 25 bp, Homo sapien
tatttctgtgttttttttgtatcgc

SEQ ID NO: 6060799 - DNA, 25 bp, Homo sapien
cctgcctgctcctttttcagggaat

SEQ ID NO: 6060800 - DNA, 25 bp, Homo sapien
ctttatttgacattaaagttacatg

SEQ ID NO: 6060801 - DNA, 25 bp, Homo sapien
ttgcacgatatacagaaaatatatt

SEQ ID NO: 6060802 - DNA, 25 bp, Homo sapien
aaatatacagcacctgcctgctcct

SEQ ID NO: 6060803 - DNA, 25 bp, Homo sapien
catgggcatgagcagtactcattac

SEQ ID NO: 6060804 - DNA, 25 bp, Homo sapien
aatggattcagaaggggccttatcg

SEQ ID NO: 6060805 - DNA, 25 bp, Homo sapien
tgttgccattatgtagctttgcaca

SEQ ID NO: 6060806 - DNA, 25 bp, Homo sapien
actatatagaagaaaattttacact

SEQ ID NO: 6060807 - DNA, 25 bp, Homo sapien
caaatatactattggaaatagaaaa

SEQ ID NO: 6060808 - DNA, 25 bp, Homo sapien
caggacaatggattcagaaggggcc

SEQ ID NO: 6060809 - DNA, 25 bp, Homo sapien
ttagtaaaatttatgatccacttgc

SEQ ID NO: 6060810 - DNA, 25 bp, Homo sapien
tgagttccttataaaggcttggcgc

SEQ ID NO: 6060811 - DNA, 25 bp, Homo sapien
gatcaattttaagtggtaaatagaa

SEQ ID NO: 6060812 - DNA, 25 bp, Homo sapien
tatttcataactatgcatgattttt

SEQ ID NO: 6060813 - DNA, 25 bp, Homo sapien
taaagacaaggctgttcataacgct

SEQ ID NO: 6060814 - DNA, 25 bp, Homo sapien
ctaatacggcttttctgtggtcgta

SEQ ID NO: 6060815 - DNA, 25 bp, Homo sapien
gccttctgaaactgtccatatgggt

SEQ ID NO: 6060816 - DNA, 25 bp, Homo sapien
aaatagaatgaacaagcccaggaca

SEQ ID NO: 6060817 - DNA, 25 bp, Homo sapien
atgatccacttgcatcggcatgggc

SEQ ID NO: 6060818 - DNA, 25 bp, Homo sapien
tagtttttgtacaaatatactattg

SEQ ID NO: 6060819 - DNA, 25 bp, Homo sapien
tttgtacaaatatactattggaaat

SEQ ID NO: 6060820 - DNA, 25 bp, Homo sapien
cgtttcatcaggtatttcataacta

SEQ ID NO: 6060821 - DNA, 25 bp, Homo sapien
cagtgatatttacagtagtcacaaa

SEQ ID NO: 6060822 - DNA, 25 bp, Homo sapien
ccaaatcagtgatatttacagtagt

SEQ ID NO: 6060823 - DNA, 25 bp, Homo sapien
tatcgtttagtaaaatttatgatcc

SEQ ID NO: 6060824 - DNA, 25 bp, Homo sapien
tttctgtggtcgtaaagacaaggct

SEQ ID NO: 6060825 - DNA, 25 bp, Homo sapien
catcggcatgggcatgagcagtact

SEQ ID NO: 6060826 - DNA, 25 bp, Homo sapien
ttgatggctttgcatcatattagaa

SEQ ID NO: 6060827 - DNA, 25 bp, Homo sapien
catcatattagaagaaaattttgca

SEQ ID NO: 6060828 - DNA, 25 bp, Homo sapien
aacctttcagtaatttcttgagcac

SEQ ID NO: 6060829 - DNA, 25 bp, Homo sapien
catagatatttttcttctcggtaac

SEQ ID NO: 6060830 - DNA, 25 bp, Homo sapien
cacttgcatcggcatgggcatgagc

SEQ ID NO: 6060831 - DNA, 25 bp, Homo sapien
tgtccttgatcgttatttggccttc

SEQ ID NO: 6060832 - DNA, 25 bp, Homo sapien
tgaaaggatcaattttaagtggtaa

SEQ ID NO: 6060833 - DNA, 25 bp, Homo sapien
ttttgcagctgaagagctctaatac

SEQ ID NO: 6060834 - DNA, 25 bp, Homo sapien
tcgaagcgtttcatcaggtatttca

SEQ ID NO: 6060835 - DNA, 25 bp, Homo sapien
tgtccatatgggttattttgagttc

SEQ ID NO: 6060836 - DNA, 25 bp, Homo sapien
cgaactcgaagcgtttcatcaggta

SEQ ID NO: 6060837 - DNA, 25 bp, Homo sapien
atcaggtatttcataactatgcatg

SEQ ID NO: 6060838 - DNA, 25 bp, Homo sapien
atgcatgatttttgatggctttgca

SEQ ID NO: 6060839 - DNA, 25 bp, Homo sapien
attttgagttccttataaaggcttg

SEQ ID NO: 6060840 - DNA, 25 bp, Homo sapien
cgaatatcgtttagtaaaatttatg

SEQ ID NO: 6060841 - DNA, 25 bp, Homo sapien
agctgaagagctctaatacggcttt

SEQ ID NO: 6060842 - DNA, 25 bp, Homo sapien
tagaagaaaattttacactcttcgc

SEQ ID NO: 6060843 - DNA, 25 bp, Homo sapien
tcagtaatttcttgagcacgaactc

SEQ ID NO: 6060844 - DNA, 25 bp, Homo sapien
actcttcgcctttgaaaaacatgag

SEQ ID NO: 6060845 - DNA, 25 bp, Homo sapien
tgaaactgtccatatgggttatttt

SEQ ID NO: 6060846 - DNA, 25 bp, Homo sapien
tatgggttattttgagttccttata

SEQ ID NO: 6060847 - DNA, 25 bp, Homo sapien
agtagtcacaaattactgttatttt

SEQ ID NO: 6060848 - DNA, 25 bp, Homo sapien
attagaagaaaattttgcagctgaa

SEQ ID NO: 6060849 - DNA, 25 bp, Homo sapien
ccttatcgtgtctcatagatatttt

SEQ ID NO: 6060850 - DNA, 25 bp, Homo sapien
aaatttatgatccacttgcatcggc

SEQ ID NO: 6060851 - DNA, 25 bp, Homo sapien
tcattacaaaatccaaatcagtgat

SEQ ID NO: 6060852 - DNA, 25 bp, Homo sapien
cagtactcattacaaaatccaaatc

SEQ ID NO: 6060853 - DNA, 25 bp, Homo sapien
catgagcagtactcattacaaaatc

SEQ ID NO: 6060854 - DNA, 25 bp, Homo sapien
caagcccaggacaatggattcagaa

SEQ ID NO: 6060855 - DNA, 25 bp, Homo sapien
cgcctttgaaaaacatgagtgaatg

SEQ ID NO: 6060856 - DNA, 25 bp, Homo sapien
gtgtctcatagatatttttcttctc

SEQ ID NO: 6060857 - DNA, 25 bp, Homo sapien
tgagcacgaactcgaagcgtttcat

SEQ ID NO: 6060858 - DNA, 25 bp, Homo sapien
aacgcttgttgccattatgtagctt

SEQ ID NO: 6060859 - DNA, 25 bp, Homo sapien
aaggggccttatcgtgtctcataga

SEQ ID NO: 6060860 - DNA, 25 bp, Homo sapien
tatccatttttgtagtttttgtaca

SEQ ID NO: 6060861 - DNA, 25 bp, Homo sapien
tggtcgtaaagacaaggctgttcat

SEQ ID NO: 6060862 - DNA, 25 bp, Homo sapien
caaaatccaaatcagtgatatttac

SEQ ID NO: 6060863 - DNA, 25 bp, Homo sapien
cctttgaaaggatcaattttaagtg

SEQ ID NO: 6060864 - DNA, 25 bp, Homo sapien
ttttaagtggtaaatagaatgaaca

SEQ ID NO: 6060865 - DNA, 25 bp, Homo sapien
gatttttgatggctttgcatcatat

SEQ ID NO: 6060866 - DNA, 25 bp, Homo sapien
caaattactgttattttttatccat

SEQ ID NO: 6060867 - DNA, 25 bp, Homo sapien
ataactatgcatgatttttgatggc

SEQ ID NO: 6060868 - DNA, 25 bp, Homo sapien
agaaaattttgcagctgaagagctc

SEQ ID NO: 6060869 - DNA, 25 bp, Homo sapien
tatttggccttctgaaactgtccat

SEQ ID NO: 6060870 - DNA, 25 bp, Homo sapien
tgatcgttatttggccttctgaaac

SEQ ID NO: 6060871 - DNA, 25 bp, Homo sapien
ttggcgcattatcgaatatcgttta

SEQ ID NO: 6060872 - DNA, 25 bp, Homo sapien
agagctctaatacggcttttctgtg

SEQ ID NO: 6060873 - DNA, 25 bp, Homo sapien
aaaggcttggcgcattatcgaatat

SEQ ID NO: 6060874 - DNA, 25 bp, Homo sapien
atttacagtagtcacaaattactgt

SEQ ID NO: 6060875 - DNA, 25 bp, Homo sapien
cggcttttctgtggtcgtaaagaca

SEQ ID NO: 6060876 - DNA, 25 bp, Homo sapien
ttacactcttcgcctttgaaaaaca

SEQ ID NO: 6060877 - DNA, 25 bp, Homo sapien
agtggtaaatagaatgaacaagccc

SEQ ID NO: 6060878 - DNA, 25 bp, Homo sapien
tgaaaaacatgagtgaatgtccttg

SEQ ID NO: 6060879 - DNA, 25 bp, Homo sapien
acatgagtgaatgtccttgatcgtt

SEQ ID NO: 6060880 - DNA, 25 bp, Homo sapien
atttcttgagcacgaactcgaagcg

SEQ ID NO: 6060881 - DNA, 25 bp, Homo sapien
gtgaatgtccttgatcgttatttgg

SEQ ID NO: 6060882 - DNA, 25 bp, Homo sapien
tgttcataacgcttgttgccattat

SEQ ID NO: 6060883 - DNA, 25 bp, Homo sapien
caaggctgttcataacgcttgttgc

SEQ ID NO: 6060884 - DNA, 25 bp, Homo sapien
ttcagaaggggccttatcgtgtctc

SEQ ID NO: 6060885 - DNA, 25 bp, Homo sapien
cattatcgaatatcgtttagtaaaa

SEQ ID NO: 6060886 - DNA, 25 bp, Homo sapien
aatgaacaagcccaggacaatggat

SEQ ID NO: 6060887 - DNA, 25 bp, Homo sapien
attcgaactatatagaagaaaattt

SEQ ID NO: 6060888 - DNA, 25 bp, Homo sapien
gctttgcatcatattagaagaaaat

SEQ ID NO: 6060889 - DNA, 25 bp, Homo sapien
ccttataaaggcttggcgcattatc

SEQ ID NO: 6060890 - DNA, 25 bp, Homo sapien
tatatagtttaattaaaaaatgcga

SEQ ID NO: 6060891 - DNA, 25 bp, Homo sapien
tggaaaaaataatataaccagatat

SEQ ID NO: 6060892 - DNA, 25 bp, Homo sapien
tgataaattggacgagtggtgtttt

SEQ ID NO: 6060893 - DNA, 25 bp, Homo sapien
atatacagtttaaataacagggaag

SEQ ID NO: 6060894 - DNA, 25 bp, Homo sapien
ttcggacaactgagtaagttgtttc

SEQ ID NO: 6060895 - DNA, 25 bp, Homo sapien
tgcccaaagccaataaatctatgat

SEQ ID NO: 6060896 - DNA, 25 bp, Homo sapien
caagatccaatttgacaggattcta

SEQ ID NO: 6060897 - DNA, 25 bp, Homo sapien
tgacaggattctagtacgtgaatac

SEQ ID NO: 6060898 - DNA, 25 bp, Homo sapien
gggaaggacattagacctgcaaact

SEQ ID NO: 6060899 - DNA, 25 bp, Homo sapien
agcactgtgttgctgatagatggcc

SEQ ID NO: 6060900 - DNA, 25 bp, Homo sapien
ttagtatgcaaagttcgttgctata

SEQ ID NO: 6060901 - DNA, 25 bp, Homo sapien
gtgttgctgatagatggccttgttt

SEQ ID NO: 6060902 - DNA, 25 bp, Homo sapien
tcatagctgaggcagacaaatctac

SEQ ID NO: 6060903 - DNA, 25 bp, Homo sapien
tgttttcggacaactgagtaagttg

SEQ ID NO: 6060904 - DNA, 25 bp, Homo sapien
aatgattgggtagtaattcaacaaa

SEQ ID NO: 6060905 - DNA, 25 bp, Homo sapien
ccaatttgacaggattctagtacgt

SEQ ID NO: 6060906 - DNA, 25 bp, Homo sapien
ctgaatgagtattatcagtaaatga

SEQ ID NO: 6060907 - DNA, 25 bp, Homo sapien
tgctataaaagcttaaatcaagatc

SEQ ID NO: 6060908 - DNA, 25 bp, Homo sapien
tggacgagtggtgtttttttcaaca

SEQ ID NO: 6060909 - DNA, 25 bp, Homo sapien
ttaaatcaagatccaatttgacagg

SEQ ID NO: 6060910 - DNA, 25 bp, Homo sapien
tgttggttaaaatgacctcttggga

SEQ ID NO: 6060911 - DNA, 25 bp, Homo sapien
aaaacttagtatgcaaagttcgttg

SEQ ID NO: 6060912 - DNA, 25 bp, Homo sapien
aaataatataaccagatatgagatg

SEQ ID NO: 6060913 - DNA, 25 bp, Homo sapien
aatgttgttggttaaaatgacctct

SEQ ID NO: 6060914 - DNA, 25 bp, Homo sapien
cgataagacatgcttacaatataca

SEQ ID NO: 6060915 - DNA, 25 bp, Homo sapien
gaatttgcagttttgttttcggaca

SEQ ID NO: 6060916 - DNA, 25 bp, Homo sapien
cgcatctcatagctgaggcagacaa

SEQ ID NO: 6060917 - DNA, 25 bp, Homo sapien
cgcaaccacaaatagttggttttat

SEQ ID NO: 6060918 - DNA, 25 bp, Homo sapien
gacatgcttacaatatacagtttaa

SEQ ID NO: 6060919 - DNA, 25 bp, Homo sapien
gacatgcgcatctcatagctgaggc

SEQ ID NO: 6060920 - DNA, 25 bp, Homo sapien
aagccaataaatctatgatctcaca

SEQ ID NO: 6060921 - DNA, 25 bp, Homo sapien
cacaaatagttggttttatatagtt

SEQ ID NO: 6060922 - DNA, 25 bp, Homo sapien
tgggtagtaattcaacaaaaagtga

SEQ ID NO: 6060923 - DNA, 25 bp, Homo sapien
ctatgatctcacatcttcaatatta

SEQ ID NO: 6060924 - DNA, 25 bp, Homo sapien
aaaatgacctcttgggatttgagat

SEQ ID NO: 6060925 - DNA, 25 bp, Homo sapien
gatgtattttactgaatgcttcttg

SEQ ID NO: 6060926 - DNA, 25 bp, Homo sapien
gacattagacctgcaaactgataaa

SEQ ID NO: 6060927 - DNA, 25 bp, Homo sapien
agtacgtgaatacacacagaatttg

SEQ ID NO: 6060928 - DNA, 25 bp, Homo sapien
aaaaagtgaagtcgcaaccacaaat

SEQ ID NO: 6060929 - DNA, 25 bp, Homo sapien
gtttaattaaaaaatgcgagcactg

SEQ ID NO: 6060930 - DNA, 25 bp, Homo sapien
ataacagggaaggacattagacctg

SEQ ID NO: 6060931 - DNA, 25 bp, Homo sapien
ttcaacaaaaagtgaagtcgcaacc

SEQ ID NO: 6060932 - DNA, 25 bp, Homo sapien
tagtaattcaacaaaaagtgaagtc

SEQ ID NO: 6060933 - DNA, 25 bp, Homo sapien
ctgatagatggccttgtttacctta

SEQ ID NO: 6060934 - DNA, 25 bp, Homo sapien
gattctagtacgtgaatacacacag

SEQ ID NO: 6060935 - DNA, 25 bp, Homo sapien
ttgagatgcccaaagccaataaatc

SEQ ID NO: 6060936 - DNA, 25 bp, Homo sapien
tataaccagatatgagatgctaggg

SEQ ID NO: 6060937 - DNA, 25 bp, Homo sapien
aatattaatgattgggtagtaattc

SEQ ID NO: 6060938 - DNA, 25 bp, Homo sapien
gcaaactgataaattggacgagtgg

SEQ ID NO: 6060939 - DNA, 25 bp, Homo sapien
tgcaaagttcgttgctataaaagct

SEQ ID NO: 6060940 - DNA, 25 bp, Homo sapien
tggtgtttttttcaacattcaccaa

SEQ ID NO: 6060941 - DNA, 25 bp, Homo sapien
gatgaagatgtattttactgaatgc

SEQ ID NO: 6060942 - DNA, 25 bp, Homo sapien
attttactgaatgcttcttggcagt

SEQ ID NO: 6060943 - DNA, 25 bp, Homo sapien
agacctgcaaactgataaattggac

SEQ ID NO: 6060944 - DNA, 25 bp, Homo sapien
cagtttaaataacagggaaggacat

SEQ ID NO: 6060945 - DNA, 25 bp, Homo sapien
tgaatacacacagaatttgcagttt

SEQ ID NO: 6060946 - DNA, 25 bp, Homo sapien
aaaagcttaaatcaagatccaattt

SEQ ID NO: 6060947 - DNA, 25 bp, Homo sapien
ttttttcaacattcaccaagtggaa

SEQ ID NO: 6060948 - DNA, 25 bp, Homo sapien
caactgagtaagttgtttcgataag

SEQ ID NO: 6060949 - DNA, 25 bp, Homo sapien
caacattcaccaagtggaaaaaata

SEQ ID NO: 6060950 - DNA, 25 bp, Homo sapien
tgctagggacatgcgcatctcatag

SEQ ID NO: 6060951 - DNA, 25 bp, Homo sapien
gagtattatcagtaaatgatgaaga

SEQ ID NO: 6060952 - DNA, 25 bp, Homo sapien
ttgtttcgataagacatgcttacaa

SEQ ID NO: 6060953 - DNA, 25 bp, Homo sapien
aatgcgagcactgtgttgctgatag

SEQ ID NO: 6060954 - DNA, 25 bp, Homo sapien
gttcgttgctataaaagcttaaatc

SEQ ID NO: 6060955 - DNA, 25 bp, Homo sapien
ttaaataacagggaaggacattaga

SEQ ID NO: 6060956 - DNA, 25 bp, Homo sapien
ctgaggcagacaaatctacttttta

SEQ ID NO: 6060957 - DNA, 25 bp, Homo sapien
cagatatgagatgctagggacatgc

SEQ ID NO: 6060958 - DNA, 25 bp, Homo sapien
ctgaatgcttcttggcagttccggt

SEQ ID NO: 6060959 - DNA, 25 bp, Homo sapien
tctcacatcttcaatattaatgatt

SEQ ID NO: 6060960 - DNA, 25 bp, Homo sapien
tatcagtaaatgatgaagatgtatt

SEQ ID NO: 6060961 - DNA, 25 bp, Homo sapien
cagttttgttttcggacaactgagt

SEQ ID NO: 6060962 - DNA, 25 bp, Homo sapien
agtaagttgtttcgataagacatgc

SEQ ID NO: 6060963 - DNA, 25 bp, Homo sapien
atcttcaatattaatgattgggtag

SEQ ID NO: 6060964 - DNA, 25 bp, Homo sapien
tatgagtctgaatgagtattatcag

SEQ ID NO: 6060965 - DNA, 25 bp, Homo sapien
tgagatgctagggacatgcgcatct

SEQ ID NO: 6060966 - DNA, 25 bp, Homo sapien
ataaatctatgatctcacatcttca

SEQ ID NO: 6060967 - DNA, 25 bp, Homo sapien
gcttcttggcagttccggttaacaa

SEQ ID NO: 6060968 - DNA, 25 bp, Homo sapien
gatggccttgtttaccttataattg

SEQ ID NO: 6060969 - DNA, 25 bp, Homo sapien
tgggatttgagatgcccaaagccaa

SEQ ID NO: 6060970 - DNA, 25 bp, Homo sapien
cttacaatatacagtttaaataaca

SEQ ID NO: 6060971 - DNA, 25 bp, Homo sapien
ttaaaaaatgcgagcactgtgttgc

SEQ ID NO: 6060972 - DNA, 25 bp, Homo sapien
acctcttgggatttgagatgcccaa

SEQ ID NO: 6060973 - DNA, 25 bp, Homo sapien
tgaagtcgcaaccacaaatagttgg

SEQ ID NO: 6060974 - DNA, 25 bp, Homo sapien
tatgatatgagtctgaatgagtatt

SEQ ID NO: 6060975 - DNA, 25 bp, Homo sapien
cacacagaatttgcagttttgtttt

SEQ ID NO: 6060976 - DNA, 25 bp, Homo sapien
tcaccaagtggaaaaaataatataa

SEQ ID NO: 6060977 - DNA, 25 bp, Homo sapien
cagacaaatctactttttaaaatgt

SEQ ID NO: 6060978 - DNA, 25 bp, Homo sapien
taaatgatgaagatgtattttactg

SEQ ID NO: 6060979 - DNA, 25 bp, Homo sapien
aattaagtaggattgaattgtcgcg

SEQ ID NO: 6060980 - DNA, 25 bp, Homo sapien
gcgcagtactggcattgagcgatca

SEQ ID NO: 6060981 - DNA, 25 bp, Homo sapien
cattgagcgatcaatattgtttaat

SEQ ID NO: 6060982 - DNA, 25 bp, Homo sapien
tttcgatttgttttctctgtctacc

SEQ ID NO: 6060983 - DNA, 25 bp, Homo sapien
agtacaatgaattgagcattcaagg

SEQ ID NO: 6060984 - DNA, 25 bp, Homo sapien
tgcgtagtgacgatcttctccactt

SEQ ID NO: 6060985 - DNA, 25 bp, Homo sapien
tttttatcatgaactaaacaataaa

SEQ ID NO: 6060986 - DNA, 25 bp, Homo sapien
gacaagaatataattaatacatttt

SEQ ID NO: 6060987 - DNA, 25 bp, Homo sapien
ccgctagtatgttattgctaattaa

SEQ ID NO: 6060988 - DNA, 25 bp, Homo sapien
taacatacttactgcagggcgaaat

SEQ ID NO: 6060989 - DNA, 25 bp, Homo sapien
tgagcattcaaggttcaacatgtga

SEQ ID NO: 6060990 - DNA, 25 bp, Homo sapien
cgactttactgctgtattatcgaat

SEQ ID NO: 6060991 - DNA, 25 bp, Homo sapien
gcgaaatttttctcaaattgtgcct

SEQ ID NO: 6060992 - DNA, 25 bp, Homo sapien
ttactaggactgaagaacattttcc

SEQ ID NO: 6060993 - DNA, 25 bp, Homo sapien
ttttacgcgcagtactggcattgag

SEQ ID NO: 6060994 - DNA, 25 bp, Homo sapien
atagtagctctaccgctagtatgtt

SEQ ID NO: 6060995 - DNA, 25 bp, Homo sapien
tgaagttttttatcatgaactaaac

SEQ ID NO: 6060996 - DNA, 25 bp, Homo sapien
agttctctattttcgtttcgatttg

SEQ ID NO: 6060997 - DNA, 25 bp, Homo sapien
agaacattttcctcttatagtgtaa

SEQ ID NO: 6060998 - DNA, 25 bp, Homo sapien
ttcaaggttcaacatgtgatagtag

SEQ ID NO: 6060999 - DNA, 25 bp, Homo sapien
ttttttcttttgatagcagtattga

SEQ ID NO: 6061000 - DNA, 25 bp, Homo sapien
gctctaccgctagtatgttattgct

SEQ ID NO: 6061001 - DNA, 25 bp, Homo sapien
tttgttttctctgtctaccagatta

SEQ ID NO: 6061002 - DNA, 25 bp, Homo sapien
gtaggattgaattgtcgcgattttg

SEQ ID NO: 6061003 - DNA, 25 bp, Homo sapien
tactggcattgagcgatcaatattg

SEQ ID NO: 6061004 - DNA, 25 bp, Homo sapien
cagattaaaagtgatttgaagtttt

SEQ ID NO: 6061005 - DNA, 25 bp, Homo sapien
ttttcctcttatagtgtaaaattga

SEQ ID NO: 6061006 - DNA, 25 bp, Homo sapien
cttttgatagcagtattgagtacaa

SEQ ID NO: 6061007 - DNA, 25 bp, Homo sapien
aatatacgactttactgctgtatta

SEQ ID NO: 6061008 - DNA, 25 bp, Homo sapien
tattgctaattaagtaggattgaat

SEQ ID NO: 6061009 - DNA, 25 bp, Homo sapien
gatattatgtaaagtctctagcaaa

SEQ ID NO: 6061010 - DNA, 25 bp, Homo sapien
gtatgttattgctaattaagtagga

SEQ ID NO: 6061011 - DNA, 25 bp, Homo sapien
aaaaagtcagcgtcaccaaggattg

SEQ ID NO: 6061012 - DNA, 25 bp, Homo sapien
tagtgtaaaattgattttgacaaga

SEQ ID NO: 6061013 - DNA, 25 bp, Homo sapien
acttactgcagggcgaaatttttct

SEQ ID NO: 6061014 - DNA, 25 bp, Homo sapien
tcgtagttctctattttcgtttcga

SEQ ID NO: 6061015 - DNA, 25 bp, Homo sapien
tttaccttctaggatattatgtaaa

SEQ ID NO: 6061016 - DNA, 25 bp, Homo sapien
tgtgcctaaatcgttaagttactaa

SEQ ID NO: 6061017 - DNA, 25 bp, Homo sapien
gtgacgatcttctccacttatattt

SEQ ID NO: 6061018 - DNA, 25 bp, Homo sapien
catgaactaaacaataaaattacaa

SEQ ID NO: 6061019 - DNA, 25 bp, Homo sapien
tcaaattgtgcctaaatcgttaagt

SEQ ID NO: 6061020 - DNA, 25 bp, Homo sapien
atgtaaagtctctagcaaagggaga

SEQ ID NO: 6061021 - DNA, 25 bp, Homo sapien
tagcaaagggagaaaactaatgtta

SEQ ID NO: 6061022 - DNA, 25 bp, Homo sapien
agtctctagcaaagggagaaaacta

SEQ ID NO: 6061023 - DNA, 25 bp, Homo sapien
tgtcgcgattttgtcattttgggtt

SEQ ID NO: 6061024 - DNA, 25 bp, Homo sapien
gtctaccagattaaaagtgatttga

SEQ ID NO: 6061025 - DNA, 25 bp, Homo sapien
ctaatgttactaggactgaagaaca

SEQ ID NO: 6061026 - DNA, 25 bp, Homo sapien
aaaattgattttgacaagaatataa

SEQ ID NO: 6061027 - DNA, 25 bp, Homo sapien
gttcaacatgtgatagtagctctac

SEQ ID NO: 6061028 - DNA, 25 bp, Homo sapien
agaaaactaatgttactaggactga

SEQ ID NO: 6061029 - DNA, 25 bp, Homo sapien
tacattttttttcttttgatagcag

SEQ ID NO: 6061030 - DNA, 25 bp, Homo sapien
ctcttatagtgtaaaattgattttg

SEQ ID NO: 6061031 - DNA, 25 bp, Homo sapien
atagcagtattgagtacaatgaatt

SEQ ID NO: 6061032 - DNA, 25 bp, Homo sapien
tcaccaaggattgctaccaatatac

SEQ ID NO: 6061033 - DNA, 25 bp, Homo sapien
gctaccaatatacgactttactgct

SEQ ID NO: 6061034 - DNA, 25 bp, Homo sapien
atcttctccacttatatttttttat

SEQ ID NO: 6061035 - DNA, 25 bp, Homo sapien
gtttaatgcgtagtgacgatcttct

SEQ ID NO: 6061036 - DNA, 25 bp, Homo sapien
ttgaattgtcgcgattttgtcattt

SEQ ID NO: 6061037 - DNA, 25 bp, Homo sapien
aggattgctaccaatatacgacttt

SEQ ID NO: 6061038 - DNA, 25 bp, Homo sapien
actaaacttttacgcgcagtactgg

SEQ ID NO: 6061039 - DNA, 25 bp, Homo sapien
ttcgtttcgatttgttttctctgtc

SEQ ID NO: 6061040 - DNA, 25 bp, Homo sapien
gtattgagtacaatgaattgagcat

SEQ ID NO: 6061041 - DNA, 25 bp, Homo sapien
gattttgacaagaatataattaata

SEQ ID NO: 6061042 - DNA, 25 bp, Homo sapien
tcgaattttaccttctaggatatta

SEQ ID NO: 6061043 - DNA, 25 bp, Homo sapien
ttctaggatattatgtaaagtctct

SEQ ID NO: 6061044 - DNA, 25 bp, Homo sapien
atgaattgagcattcaaggttcaac

SEQ ID NO: 6061045 - DNA, 25 bp, Homo sapien
ttctctgtctaccagattaaaagtg

SEQ ID NO: 6061046 - DNA, 25 bp, Homo sapien
gcgatcaatattgtttaatgcgtag

SEQ ID NO: 6061047 - DNA, 25 bp, Homo sapien
tgtattatcgaattttaccttctag

SEQ ID NO: 6061048 - DNA, 25 bp, Homo sapien
tgcagggcgaaatttttctcaaatt

SEQ ID NO: 6061049 - DNA, 25 bp, Homo sapien
aatattgtttaatgcgtagtgacga

SEQ ID NO: 6061050 - DNA, 25 bp, Homo sapien
tttttctcaaattgtgcctaaatcg

SEQ ID NO: 6061051 - DNA, 25 bp, Homo sapien
tactgctgtattatcgaattttacc

SEQ ID NO: 6061052 - DNA, 25 bp, Homo sapien
gactgaagaacattttcctcttata

SEQ ID NO: 6061053 - DNA, 25 bp, Homo sapien
catgtgatagtagctctaccgctag

SEQ ID NO: 6061054 - DNA, 25 bp, Homo sapien
gtgatttgaagttttttatcatgaa

SEQ ID NO: 6061055 - DNA, 25 bp, Homo sapien
tcagcgtcaccaaggattgctacca

SEQ ID NO: 6061056 - DNA, 25 bp, Homo sapien
tcgtattataagcgatgggtttcca

SEQ ID NO: 6061057 - DNA, 25 bp, Homo sapien
gcgatgggtttccaagaatgtgtaa

SEQ ID NO: 6061058 - DNA, 25 bp, Homo sapien
tatctcttcattttagggatgtctc

SEQ ID NO: 6061059 - DNA, 25 bp, Homo sapien
ttcattttagggatgtctcaaatat

SEQ ID NO: 6061060 - DNA, 25 bp, Homo sapien
ttttcctttctgtaagcttatacgc

SEQ ID NO: 6061061 - DNA, 25 bp, Homo sapien
aataggttaaggtccacaccgtcat

SEQ ID NO: 6061062 - DNA, 25 bp, Homo sapien
tcaaaattagctgtatatatctctt

SEQ ID NO: 6061063 - DNA, 25 bp, Homo sapien
cactggggtaatcacatgtgatatc

SEQ ID NO: 6061064 - DNA, 25 bp, Homo sapien
aatactttctgattttatggagtga

SEQ ID NO: 6061065 - DNA, 25 bp, Homo sapien
tcaaattgggtggaaaatgaactta

SEQ ID NO: 6061066 - DNA, 25 bp, Homo sapien
ggtttccaagaatgtgtaaatacac

SEQ ID NO: 6061067 - DNA, 25 bp, Homo sapien
agcctttgttcataaataaattagt

SEQ ID NO: 6061068 - DNA, 25 bp, Homo sapien
tgttcataaataaattagttcgtat

SEQ ID NO: 6061069 - DNA, 25 bp, Homo sapien
cctttctgtaagcttatacgcgttc

SEQ ID NO: 6061070 - DNA, 25 bp, Homo sapien
atacactggatttccgttgaacaac

SEQ ID NO: 6061071 - DNA, 25 bp, Homo sapien
tgatatctaagagataacctaaatt

SEQ ID NO: 6061072 - DNA, 25 bp, Homo sapien
gataacctaaatttcaagacaatag

SEQ ID NO: 6061073 - DNA, 25 bp, Homo sapien
ttatacgcgttcactggggtaatca

SEQ ID NO: 6061074 - DNA, 25 bp, Homo sapien
gaacaaataatttgaaaggacttca

SEQ ID NO: 6061075 - DNA, 25 bp, Homo sapien
atgatttagcgtcgtaaaaagtagg

SEQ ID NO: 6061076 - DNA, 25 bp, Homo sapien
attagttcgtattataagcgatggg

SEQ ID NO: 6061077 - DNA, 25 bp, Homo sapien
cacatgtgatatctaagagataacc

SEQ ID NO: 6061078 - DNA, 25 bp, Homo sapien
gggagcccaaatctgcaacagtttt

SEQ ID NO: 6061079 - DNA, 25 bp, Homo sapien
ctttagaacaaggttacaaatcctg

SEQ ID NO: 6061080 - DNA, 25 bp, Homo sapien
ctttctgattttatggagtgactgt

SEQ ID NO: 6061081 - DNA, 25 bp, Homo sapien
tccacaccgtcatcaaattgggtgg

SEQ ID NO: 6061082 - DNA, 25 bp, Homo sapien
tgtatatatctcttcattttaggga

SEQ ID NO: 6061083 - DNA, 25 bp, Homo sapien
agtactgttcattgcgaattttaaa

SEQ ID NO: 6061084 - DNA, 25 bp, Homo sapien
gattttatggagtgactgttaatct

SEQ ID NO: 6061085 - DNA, 25 bp, Homo sapien
taaactatacgatgcctctttagaa

SEQ ID NO: 6061086 - DNA, 25 bp, Homo sapien
ctaagagataacctaaatttcaaga

SEQ ID NO: 6061087 - DNA, 25 bp, Homo sapien
tttcattcaaaattagctgtatata

SEQ ID NO: 6061088 - DNA, 25 bp, Homo sapien
ttagggatgtctcaaatattcaggg

SEQ ID NO: 6061089 - DNA, 25 bp, Homo sapien
ctggtatataaaataaaaaatatca

SEQ ID NO: 6061090 - DNA, 25 bp, Homo sapien
aagctcatctctagtactgttcatt

SEQ ID NO: 6061091 - DNA, 25 bp, Homo sapien
atacgatgcctctttagaacaaggt

SEQ ID NO: 6061092 - DNA, 25 bp, Homo sapien
tgtaagcttatacgcgttcactggg

SEQ ID NO: 6061093 - DNA, 25 bp, Homo sapien
acaacctcaaaaaggtaaatgtatg

SEQ ID NO: 6061094 - DNA, 25 bp, Homo sapien
aaatattcaggggagcccaaatctg

SEQ ID NO: 6061095 - DNA, 25 bp, Homo sapien
aataaattagttcgtattataagcg

SEQ ID NO: 6061096 - DNA, 25 bp, Homo sapien
gcgttcactggggtaatcacatgtg

SEQ ID NO: 6061097 - DNA, 25 bp, Homo sapien
ccaaatctgcaacagttttgactga

SEQ ID NO: 6061098 - DNA, 25 bp, Homo sapien
cgtatcatgatttagcgtcgtaaaa

SEQ ID NO: 6061099 - DNA, 25 bp, Homo sapien
ggttacaaatcctgataaatgcaat

SEQ ID NO: 6061100 - DNA, 25 bp, Homo sapien
ctgcaacagttttgactgagccaac

SEQ ID NO: 6061101 - DNA, 25 bp, Homo sapien
atggcaagattatatttggtactgg

SEQ ID NO: 6061102 - DNA, 25 bp, Homo sapien
ttaatcttcctaaagtttcgtatca

SEQ ID NO: 6061103 - DNA, 25 bp, Homo sapien
tggatttccgttgaacaacctcaaa

SEQ ID NO: 6061104 - DNA, 25 bp, Homo sapien
aatttgaaaggacttcaaaagctca

SEQ ID NO: 6061105 - DNA, 25 bp, Homo sapien
aaaggtaaatgtatggcaagattat

SEQ ID NO: 6061106 - DNA, 25 bp, Homo sapien
aaatgtatggcaagattatatttgg

SEQ ID NO: 6061107 - DNA, 25 bp, Homo sapien
tgataaatgcaattcaaatggccct

SEQ ID NO: 6061108 - DNA, 25 bp, Homo sapien
tgactgttaatcttcctaaagtttc

SEQ ID NO: 6061109 - DNA, 25 bp, Homo sapien
atggagtgactgttaatcttcctaa

SEQ ID NO: 6061110 - DNA, 25 bp, Homo sapien
tgaacttaaactatacgatgcctct

SEQ ID NO: 6061111 - DNA, 25 bp, Homo sapien
aaaggacttcaaaagctcatctcta

SEQ ID NO: 6061112 - DNA, 25 bp, Homo sapien
caagacaataggttaaggtccacac

SEQ ID NO: 6061113 - DNA, 25 bp, Homo sapien
cttcctaaagtttcgtatcatgatt

SEQ ID NO: 6061114 - DNA, 25 bp, Homo sapien
tataagcgatgggtttccaagaatg

SEQ ID NO: 6061115 - DNA, 25 bp, Homo sapien
ctaaatttcaagacaataggttaag

SEQ ID NO: 6061116 - DNA, 25 bp, Homo sapien
gtgtaaatacactggatttccgttg

SEQ ID NO: 6061117 - DNA, 25 bp, Homo sapien
gaacaaggttacaaatcctgataaa

SEQ ID NO: 6061118 - DNA, 25 bp, Homo sapien
aagtttcgtatcatgatttagcgtc

SEQ ID NO: 6061119 - DNA, 25 bp, Homo sapien
tgcctctttagaacaaggttacaaa

SEQ ID NO: 6061120 - DNA, 25 bp, Homo sapien
ctgagccaaccggttttcctttctg

SEQ ID NO: 6061121 - DNA, 25 bp, Homo sapien
caagaatgtgtaaatacactggatt

SEQ ID NO: 6061122 - DNA, 25 bp, Homo sapien
tatttggtactggtatataaaataa

SEQ ID NO: 6061123 - DNA, 25 bp, Homo sapien
tatcaactggaagaacaaataattt

SEQ ID NO: 6061124 - DNA, 25 bp, Homo sapien
gaaaatgaacttaaactatacgatg

SEQ ID NO: 6061125 - DNA, 25 bp, Homo sapien
attagctgtatatatctcttcattt

SEQ ID NO: 6061126 - DNA, 25 bp, Homo sapien
ttaaattttcattcaaaattagctg

SEQ ID NO: 6061127 - DNA, 25 bp, Homo sapien
ttccaaagcctttgttcataaataa

SEQ ID NO: 6061128 - DNA, 25 bp, Homo sapien
atctctagtactgttcattgcgaat

SEQ ID NO: 6061129 - DNA, 25 bp, Homo sapien
agattatatttggtactggtatata

SEQ ID NO: 6061130 - DNA, 25 bp, Homo sapien
cctcaaaaaggtaaatgtatggcaa

SEQ ID NO: 6061131 - DNA, 25 bp, Homo sapien
ggtaatcacatgtgatatctaagag

SEQ ID NO: 6061132 - DNA, 25 bp, Homo sapien
tataaaataaaaaatatcaactgga

SEQ ID NO: 6061133 - DNA, 25 bp, Homo sapien
taaaaaatatcaactggaagaacaa

SEQ ID NO: 6061134 - DNA, 25 bp, Homo sapien
ctggaagaacaaataatttgaaagg

SEQ ID NO: 6061135 - DNA, 25 bp, Homo sapien
ccgtcatcaaattgggtggaaaatg

SEQ ID NO: 6061136 - DNA, 25 bp, Homo sapien
ttaaggtccacaccgtcatcaaatt

SEQ ID NO: 6061137 - DNA, 25 bp, Homo sapien
tgcgaattttaaattttcattcaaa

SEQ ID NO: 6061138 - DNA, 25 bp, Homo sapien
gttcattgcgaattttaaattttca

SEQ ID NO: 6061139 - DNA, 25 bp, Homo sapien
tgtctcaaatattcaggggagccca

SEQ ID NO: 6061140 - DNA, 25 bp, Homo sapien
ttcaggggagcccaaatctgcaaca

SEQ ID NO: 6061141 - DNA, 25 bp, Homo sapien
aaatcctgataaatgcaattcaaat

SEQ ID NO: 6061142 - DNA, 25 bp, Homo sapien
cttcaaaagctcatctctagtactg

SEQ ID NO: 6061143 - DNA, 25 bp, Homo sapien
cagttttgactgagccaaccggttt

SEQ ID NO: 6061144 - DNA, 25 bp, Homo sapien
gatacttttccaaagcctttgttca

SEQ ID NO: 6061145 - DNA, 25 bp, Homo sapien
cccgcagaagaaacaaagcaataaa

SEQ ID NO: 6061146 - DNA, 25 bp, Homo sapien
ctttgttaaggtgcctgcaggtgca

SEQ ID NO: 6061147 - DNA, 25 bp, Homo sapien
tccacatcccagcattacagaagtc

SEQ ID NO: 6061148 - DNA, 25 bp, Homo sapien
gcaataaagtgaaagaattcacata

SEQ ID NO: 6061149 - DNA, 25 bp, Homo sapien
gaaaccttctcaacacatccaccat

SEQ ID NO: 6061150 - DNA, 25 bp, Homo sapien
ggcgtttagatggtcgcatatattg

SEQ ID NO: 6061151 - DNA, 25 bp, Homo sapien
taatctacggggatgtagaaggaga

SEQ ID NO: 6061152 - DNA, 25 bp, Homo sapien
tgaaagaattcacatattatagtgt

SEQ ID NO: 6061153 - DNA, 25 bp, Homo sapien
tcaccattggtcctgatgctacgta

SEQ ID NO: 6061154 - DNA, 25 bp, Homo sapien
gatcaggggtctctccacatcccag

SEQ ID NO: 6061155 - DNA, 25 bp, Homo sapien
tcccagcattacagaagtctttgtt

SEQ ID NO: 6061156 - DNA, 25 bp, Homo sapien
ctgatgctacgtatctgaatcccat

SEQ ID NO: 6061157 - DNA, 25 bp, Homo sapien
gctaagacatcaagccctgacttgg

SEQ ID NO: 6061158 - DNA, 25 bp, Homo sapien
tcgatcggcttctatcatcgacttt

SEQ ID NO: 6061159 - DNA, 25 bp, Homo sapien
cacatccaccatctccgcggaaatc

SEQ ID NO: 6061160 - DNA, 25 bp, Homo sapien
tgccaagaaggcgatacctctcgaa

SEQ ID NO: 6061161 - DNA, 25 bp, Homo sapien
aaggtgcctgcaggtgcatactcct

SEQ ID NO: 6061162 - DNA, 25 bp, Homo sapien
gacttggaaaccttctcaacacatc

SEQ ID NO: 6061163 - DNA, 25 bp, Homo sapien
ccttctccattgtcttaaccacttg

SEQ ID NO: 6061164 - DNA, 25 bp, Homo sapien
gtactctcccgctttgtacgacgac

SEQ ID NO: 6061165 - DNA, 25 bp, Homo sapien
cctgcaggtgcatactccttagcca

SEQ ID NO: 6061166 - DNA, 25 bp, Homo sapien
caatgttgtgagctaagacatcaag

SEQ ID NO: 6061167 - DNA, 25 bp, Homo sapien
gccaaatgtcataacgtcaacccct

SEQ ID NO: 6061168 - DNA, 25 bp, Homo sapien
cttaaagttagcacgatggtcccgc

SEQ ID NO: 6061169 - DNA, 25 bp, Homo sapien
aaggcatctggtgtcacgtactcag

SEQ ID NO: 6061170 - DNA, 25 bp, Homo sapien
tgtcataacgtcaacccctgctgct

SEQ ID NO: 6061171 - DNA, 25 bp, Homo sapien
gcacaaaactctgaagctcttcaac

SEQ ID NO: 6061172 - DNA, 25 bp, Homo sapien
aagcacatccaatgactgcttaaag

SEQ ID NO: 6061173 - DNA, 25 bp, Homo sapien
tattcagaatgtggcggataagtgt

SEQ ID NO: 6061174 - DNA, 25 bp, Homo sapien
agccctgacttggaaaccttctcaa

SEQ ID NO: 6061175 - DNA, 25 bp, Homo sapien
tttccatgccaagaaggcgatacct

SEQ ID NO: 6061176 - DNA, 25 bp, Homo sapien
gcatgtggcgtttagatggtcgcat

SEQ ID NO: 6061177 - DNA, 25 bp, Homo sapien
gtcgcatatattggccaaatgtcat

SEQ ID NO: 6061178 - DNA, 25 bp, Homo sapien
ttagccatcctaagcacatccaatg

SEQ ID NO: 6061179 - DNA, 25 bp, Homo sapien
tacggggatgtagaaggagaagcca

SEQ ID NO: 6061180 - DNA, 25 bp, Homo sapien
tactccttagccatcctaagcacat

SEQ ID NO: 6061181 - DNA, 25 bp, Homo sapien
tctcaacacatccaccatctccgcg

SEQ ID NO: 6061182 - DNA, 25 bp, Homo sapien
aattcacatattatagtgtgtaatc

SEQ ID NO: 6061183 - DNA, 25 bp, Homo sapien
gtcacgtactcagctactggcatgt

SEQ ID NO: 6061184 - DNA, 25 bp, Homo sapien
tatcatcgactttatgtagtactct

SEQ ID NO: 6061185 - DNA, 25 bp, Homo sapien
aagccactcgatcggcttctatcat

SEQ ID NO: 6061186 - DNA, 25 bp, Homo sapien
cggataagtgttgtgaatggcttac

SEQ ID NO: 6061187 - DNA, 25 bp, Homo sapien
gttagcacgatggtcccgcacaaaa

SEQ ID NO: 6061188 - DNA, 25 bp, Homo sapien
acaaagcaataaagtgaaagaattc

SEQ ID NO: 6061189 - DNA, 25 bp, Homo sapien
tatgtagtactctcccgctttgtac

SEQ ID NO: 6061190 - DNA, 25 bp, Homo sapien
gacgacctcaccattggtcctgatg

SEQ ID NO: 6061191 - DNA, 25 bp, Homo sapien
ttacattattcagaatgtggcggat

SEQ ID NO: 6061192 - DNA, 25 bp, Homo sapien
tagatggtcgcatatattggccaaa

SEQ ID NO: 6061193 - DNA, 25 bp, Homo sapien
tactcagctactggcatgtggcgtt

SEQ ID NO: 6061194 - DNA, 25 bp, Homo sapien
tctggtgtcacgtactcagctactg

SEQ ID NO: 6061195 - DNA, 25 bp, Homo sapien
gctctcaccttctccattgtcttaa

SEQ ID NO: 6061196 - DNA, 25 bp, Homo sapien
ggtctctccacatcccagcattaca

SEQ ID NO: 6061197 - DNA, 25 bp, Homo sapien
ggcttctatcatcgactttatgtag

SEQ ID NO: 6061198 - DNA, 25 bp, Homo sapien
atattggccaaatgtcataacgtca

SEQ ID NO: 6061199 - DNA, 25 bp, Homo sapien
ctactggcatgtggcgtttagatgg

SEQ ID NO: 6061200 - DNA, 25 bp, Homo sapien
agaaggcgatacctctcgaaggcat

SEQ ID NO: 6061201 - DNA, 25 bp, Homo sapien
gaagctcttcaactgtctcaatgtt

SEQ ID NO: 6061202 - DNA, 25 bp, Homo sapien
atcccatttccatgccaagaaggcg

SEQ ID NO: 6061203 - DNA, 25 bp, Homo sapien
gaagaaacaaagcaataaagtgaaa

SEQ ID NO: 6061204 - DNA, 25 bp, Homo sapien
aaggagaagccactcgatcggcttc

SEQ ID NO: 6061205 - DNA, 25 bp, Homo sapien
agtgttgtgaatggcttacccgcag

SEQ ID NO: 6061206 - DNA, 25 bp, Homo sapien
atgtagaaggagaagccactcgatc

SEQ ID NO: 6061207 - DNA, 25 bp, Homo sapien
catattatagtgtgtaatctacggg

SEQ ID NO: 6061208 - DNA, 25 bp, Homo sapien
tcttaaccacttgatcaggggtctc

SEQ ID NO: 6061209 - DNA, 25 bp, Homo sapien
aatgtggcggataagtgttgtgaat

SEQ ID NO: 6061210 - DNA, 25 bp, Homo sapien
ggcttacccgcagaagaaacaaagc

SEQ ID NO: 6061211 - DNA, 25 bp, Homo sapien
cctgctgctctcaccttctccattg

SEQ ID NO: 6061212 - DNA, 25 bp, Homo sapien
atctgaatcccatttccatgccaag

SEQ ID NO: 6061213 - DNA, 25 bp, Homo sapien
ctctcgaaggcatctggtgtcacgt

SEQ ID NO: 6061214 - DNA, 25 bp, Homo sapien
ttgtacgacgacctcaccattggtc

SEQ ID NO: 6061215 - DNA, 25 bp, Homo sapien
gtgaatggcttacccgcagaagaaa

SEQ ID NO: 6061216 - DNA, 25 bp, Homo sapien
acatcaagccctgacttggaaacct

SEQ ID NO: 6061217 - DNA, 25 bp, Homo sapien
atccaatgactgcttaaagttagca

SEQ ID NO: 6061218 - DNA, 25 bp, Homo sapien
catcctaagcacatccaatgactgc

SEQ ID NO: 6061219 - DNA, 25 bp, Homo sapien
ttggtcctgatgctacgtatctgaa

SEQ ID NO: 6061220 - DNA, 25 bp, Homo sapien
acgatggtcccgcacaaaactctga

SEQ ID NO: 6061221 - DNA, 25 bp, Homo sapien
ggtgcatactccttagccatcctaa

SEQ ID NO: 6061222 - DNA, 25 bp, Homo sapien
ggtcccgcacaaaactctgaagctc

SEQ ID NO: 6061223 - DNA, 25 bp, Homo sapien
cattacagaagtctttgttaaggtg

SEQ ID NO: 6061224 - DNA, 25 bp, Homo sapien
caccatctccgcggaaatcaggaac

SEQ ID NO: 6061225 - DNA, 25 bp, Homo sapien
ctacgtatctgaatcccatttccat

SEQ ID NO: 6061226 - DNA, 25 bp, Homo sapien
cccgctttgtacgacgacctcacca

SEQ ID NO: 6061227 - DNA, 25 bp, Homo sapien
ctgtctcaatgttgtgagctaagac

SEQ ID NO: 6061228 - DNA, 25 bp, Homo sapien
accacttgatcaggggtctctccac

SEQ ID NO: 6061229 - DNA, 25 bp, Homo sapien
ccattgtcttaaccacttgatcagg

SEQ ID NO: 6061230 - DNA, 25 bp, Homo sapien
cgactttatgtagtactctcccgct

SEQ ID NO: 6061231 - DNA, 25 bp, Homo sapien
ttgtgagctaagacatcaagccctg

SEQ ID NO: 6061232 - DNA, 25 bp, Homo sapien
tgactgcttaaagttagcacgatgg

SEQ ID NO: 6061233 - DNA, 25 bp, Homo sapien
agaagtctttgttaaggtgcctgca

SEQ ID NO: 6061234 - DNA, 25 bp, Homo sapien
aactctgaagctcttcaactgtctc

SEQ ID NO: 6061235 - DNA, 25 bp, Homo sapien
cttcaactgtctcaatgttgtgagc

SEQ ID NO: 6061236 - DNA, 25 bp, Homo sapien
cgatacctctcgaaggcatctggtg

SEQ ID NO: 6061237 - DNA, 25 bp, Homo sapien
tcatttataagtggaccctgggttg

SEQ ID NO: 6061238 - DNA, 25 bp, Homo sapien
tgtgaatatataagcagcaagtcct

SEQ ID NO: 6061239 - DNA, 25 bp, Homo sapien
acagcatcttgtacaaatgtctcta

SEQ ID NO: 6061240 - DNA, 25 bp, Homo sapien
gtctctaccttttgcactgctgcat

SEQ ID NO: 6061241 - DNA, 25 bp, Homo sapien
ttgatatgagtccttcgttcacccc

SEQ ID NO: 6061242 - DNA, 25 bp, Homo sapien
catccctaaacccatctcctacttc

SEQ ID NO: 6061243 - DNA, 25 bp, Homo sapien
caaatacacgccaagatctttggac

SEQ ID NO: 6061244 - DNA, 25 bp, Homo sapien
cgaaacatcgcggataacagtaggc

SEQ ID NO: 6061245 - DNA, 25 bp, Homo sapien
ttcgtccataccatacttggatcct

SEQ ID NO: 6061246 - DNA, 25 bp, Homo sapien
ctacaagtccatattcaagtgcttc

SEQ ID NO: 6061247 - DNA, 25 bp, Homo sapien
gttatccgaaacatcgcggataaca

SEQ ID NO: 6061248 - DNA, 25 bp, Homo sapien
accaaatcagtgtctattcatatct

SEQ ID NO: 6061249 - DNA, 25 bp, Homo sapien
ccttccaagaccagactgcttcact

SEQ ID NO: 6061250 - DNA, 25 bp, Homo sapien
agaaagtcatccctagactgtgcct

SEQ ID NO: 6061251 - DNA, 25 bp, Homo sapien
gataacagtaggctcatagaaagtc

SEQ ID NO: 6061252 - DNA, 25 bp, Homo sapien
tcacccctacaagtccatattcaag

SEQ ID NO: 6061253 - DNA, 25 bp, Homo sapien
ccaccaatgatgatttttgctccct

SEQ ID NO: 6061254 - DNA, 25 bp, Homo sapien
ctaaacccatctcctacttctaatt

SEQ ID NO: 6061255 - DNA, 25 bp, Homo sapien
tatataagcagcaagtcctgcaatt

SEQ ID NO: 6061256 - DNA, 25 bp, Homo sapien
cctctgttgatatgagtccttcgtt

SEQ ID NO: 6061257 - DNA, 25 bp, Homo sapien
cgaatggagccacctctgttgatat

SEQ ID NO: 6061258 - DNA, 25 bp, Homo sapien
attcaagtgcttcaaatacacgcca

SEQ ID NO: 6061259 - DNA, 25 bp, Homo sapien
catatctcccaagcatacgtatttg

SEQ ID NO: 6061260 - DNA, 25 bp, Homo sapien
agactgcttcactcccccgaatgga

SEQ ID NO: 6061261 - DNA, 25 bp, Homo sapien
gctcccttagaaacagcatcttgta

SEQ ID NO: 6061262 - DNA, 25 bp, Homo sapien
aagaccagactgcttcactcccccg

SEQ ID NO: 6061263 - DNA, 25 bp, Homo sapien
ttggatccttcccttccaagaccag

SEQ ID NO: 6061264 - DNA, 25 bp, Homo sapien
tacttctaatttttgaaccgcttca

SEQ ID NO: 6061265 - DNA, 25 bp, Homo sapien
cataccatacttggatccttccctt

SEQ ID NO: 6061266 - DNA, 25 bp, Homo sapien
tataagtggaccctgggttgtccca

SEQ ID NO: 6061267 - DNA, 25 bp, Homo sapien
gatagcgtcctcctcggttttgaac

SEQ ID NO: 6061268 - DNA, 25 bp, Homo sapien
aaggtattcgtccataccatacttg

SEQ ID NO: 6061269 - DNA, 25 bp, Homo sapien
tggaccctgggttgtcccatcccta

SEQ ID NO: 6061270 - DNA, 25 bp, Homo sapien
cagtaggctcatagaaagtcatccc

SEQ ID NO: 6061271 - DNA, 25 bp, Homo sapien
aaatctcctccttagacatgatcat

SEQ ID NO: 6061272 - DNA, 25 bp, Homo sapien
agcagcaagtcctgcaattgtgtca

SEQ ID NO: 6061273 - DNA, 25 bp, Homo sapien
tacaatttctaaagcttttcaaaca

SEQ ID NO: 6061274 - DNA, 25 bp, Homo sapien
tgtgccttttgccaccaatgatgat

SEQ ID NO: 6061275 - DNA, 25 bp, Homo sapien
tagacatgatcatgttatccgaaac

SEQ ID NO: 6061276 - DNA, 25 bp, Homo sapien
gtccaaaaatctcctccttagacat

SEQ ID NO: 6061277 - DNA, 25 bp, Homo sapien
atcgcggataacagtaggctcatag

SEQ ID NO: 6061278 - DNA, 25 bp, Homo sapien
acaaatgtctctaccttttgcactg

SEQ ID NO: 6061279 - DNA, 25 bp, Homo sapien
tgatcatgttatccgaaacatcgcg

SEQ ID NO: 6061280 - DNA, 25 bp, Homo sapien
gcatacgtatttgatctcaaggtat

SEQ ID NO: 6061281 - DNA, 25 bp, Homo sapien
ctacaggtccaaaaatctcctcctt

SEQ ID NO: 6061282 - DNA, 25 bp, Homo sapien
gtgcttcaaatacacgccaagatct

SEQ ID NO: 6061283 - DNA, 25 bp, Homo sapien
actgtttgtgaatatataagcagca

SEQ ID NO: 6061284 - DNA, 25 bp, Homo sapien
atgatgatttttgctcccttagaaa

SEQ ID NO: 6061285 - DNA, 25 bp, Homo sapien
tgtgtcattagcaattctgatagcg

SEQ ID NO: 6061286 - DNA, 25 bp, Homo sapien
ggcctcagcaaatttatcatagata

SEQ ID NO: 6061287 - DNA, 25 bp, Homo sapien
tctaatttttgaaccgcttcagaaa

SEQ ID NO: 6061288 - DNA, 25 bp, Homo sapien
ctagactgtgccttttgccaccaat

SEQ ID NO: 6061289 - DNA, 25 bp, Homo sapien
agaaaaggcctcagcaaatttatca

SEQ ID NO: 6061290 - DNA, 25 bp, Homo sapien
tgcaattgtgtcattagcaattctg

SEQ ID NO: 6061291 - DNA, 25 bp, Homo sapien
tgaaccgaataaggggagctacagg

SEQ ID NO: 6061292 - DNA, 25 bp, Homo sapien
attagcaattctgatagcgtcctcc

SEQ ID NO: 6061293 - DNA, 25 bp, Homo sapien
ttagaaacagcatcttgtacaaatg

SEQ ID NO: 6061294 - DNA, 25 bp, Homo sapien
cttcactcccccgaatggagccacc

SEQ ID NO: 6061295 - DNA, 25 bp, Homo sapien
cctccttagacatgatcatgttatc

SEQ ID NO: 6061296 - DNA, 25 bp, Homo sapien
ctcccccgaatggagccacctctgt

SEQ ID NO: 6061297 - DNA, 25 bp, Homo sapien
cttttgccaccaatgatgatttttg

SEQ ID NO: 6061298 - DNA, 25 bp, Homo sapien
aattctgatagcgtcctcctcggtt

SEQ ID NO: 6061299 - DNA, 25 bp, Homo sapien
tccttcccttccaagaccagactgc

SEQ ID NO: 6061300 - DNA, 25 bp, Homo sapien
gtccatattcaagtgcttcaaatac

SEQ ID NO: 6061301 - DNA, 25 bp, Homo sapien
tcccaagcatacgtatttgatctca

SEQ ID NO: 6061302 - DNA, 25 bp, Homo sapien
gggagctacaggtccaaaaatctcc

SEQ ID NO: 6061303 - DNA, 25 bp, Homo sapien
agatctttggacactgtttgtgaat

SEQ ID NO: 6061304 - DNA, 25 bp, Homo sapien
ttgaaccgcttcagaaaaggcctca

SEQ ID NO: 6061305 - DNA, 25 bp, Homo sapien
aaacaaaccaaatcagtgtctattc

SEQ ID NO: 6061306 - DNA, 25 bp, Homo sapien
acgccaagatctttggacactgttt

SEQ ID NO: 6061307 - DNA, 25 bp, Homo sapien
gctcatagaaagtcatccctagact

SEQ ID NO: 6061308 - DNA, 25 bp, Homo sapien
tgcactgctgcatcatttataagtg

SEQ ID NO: 6061309 - DNA, 25 bp, Homo sapien
ttgtcccatccctaaacccatctcc

SEQ ID NO: 6061310 - DNA, 25 bp, Homo sapien
cttttcaaacaaaccaaatcagtgt

SEQ ID NO: 6061311 - DNA, 25 bp, Homo sapien
gtatttgatctcaaggtattcgtcc

SEQ ID NO: 6061312 - DNA, 25 bp, Homo sapien
tgagtccttcgttcacccctacaag

SEQ ID NO: 6061313 - DNA, 25 bp, Homo sapien
tcagtgtctattcatatctcccaag

SEQ ID NO: 6061314 - DNA, 25 bp, Homo sapien
ttggacactgtttgtgaatatataa

SEQ ID NO: 6061315 - DNA, 25 bp, Homo sapien
gatctcaaggtattcgtccatacca

SEQ ID NO: 6061316 - DNA, 25 bp, Homo sapien
cgcttcagaaaaggcctcagcaaat

SEQ ID NO: 6061317 - DNA, 25 bp, Homo sapien
catacttggatccttcccttccaag

SEQ ID NO: 6061318 - DNA, 25 bp, Homo sapien
gagccacctctgttgatatgagtcc

SEQ ID NO: 6061319 - DNA, 25 bp, Homo sapien
aagtcctgcaattgtgtcattagca

SEQ ID NO: 6061320 - DNA, 25 bp, Homo sapien
catctcctacttctaatttttgaac

SEQ ID NO: 6061321 - DNA, 25 bp, Homo sapien
ttcgttcacccctacaagtccatat

SEQ ID NO: 6061322 - DNA, 25 bp, Homo sapien
tctattcatatctcccaagcatacg

SEQ ID NO: 6061323 - DNA, 25 bp, Homo sapien
tcttgtacaaatgtctctacctttt

SEQ ID NO: 6061324 - DNA, 25 bp, Homo sapien
tcatccctagactgtgccttttgcc

SEQ ID NO: 6061325 - DNA, 25 bp, Homo sapien
gctgcatcatttataagtggaccct

SEQ ID NO: 6061326 - DNA, 25 bp, Homo sapien
accttttgcactgctgcatcattta

SEQ ID NO: 6061327 - DNA, 25 bp, Homo sapien
atttttgctcccttagaaacagcat

SEQ ID NO: 6061328 - DNA, 25 bp, Homo sapien
gaataaggggagctacaggtccaaa

SEQ ID NO: 6061329 - DNA, 25 bp, Homo sapien
agtctgaggatggtggctcggggaa

SEQ ID NO: 6061330 - DNA, 25 bp, Homo sapien
ctcatcctcagtggcaccgcccaat

SEQ ID NO: 6061331 - DNA, 25 bp, Homo sapien
accagtggagccgacagtgcgggca

SEQ ID NO: 6061332 - DNA, 25 bp, Homo sapien
ggcaccgcccaataggccaccgcac

SEQ ID NO: 6061333 - DNA, 25 bp, Homo sapien
gacctccttcaaggtcgacgtactg

SEQ ID NO: 6061334 - DNA, 25 bp, Homo sapien
aaatgtcgatgagcagcgtagtcaa

SEQ ID NO: 6061335 - DNA, 25 bp, Homo sapien
tgggagacaatgtgctggaaggcga

SEQ ID NO: 6061336 - DNA, 25 bp, Homo sapien
cttcttcttgtcctcggtgatgtca

SEQ ID NO: 6061337 - DNA, 25 bp, Homo sapien
gcccaataggccaccgcacacggca

SEQ ID NO: 6061338 - DNA, 25 bp, Homo sapien
cccgtaccttcggagactctggagc

SEQ ID NO: 6061339 - DNA, 25 bp, Homo sapien
gggaagaagaaaatgtcgatgagca

SEQ ID NO: 6061340 - DNA, 25 bp, Homo sapien
tgctggaaggcgagtgggaagaggg

SEQ ID NO: 6061341 - DNA, 25 bp, Homo sapien
acagtgcgggcaatctcagtgatga

SEQ ID NO: 6061342 - DNA, 25 bp, Homo sapien
ctccttgagctcttccgccatttcc

SEQ ID NO: 6061343 - DNA, 25 bp, Homo sapien
ctcggtgatgtcatcgaccacctga

SEQ ID NO: 6061344 - DNA, 25 bp, Homo sapien
tagtcaacgaaggtgtagagaggaa

SEQ ID NO: 6061345 - DNA, 25 bp, Homo sapien
gaagaaaatgtcgatgagcagcgta

SEQ ID NO: 6061346 - DNA, 25 bp, Homo sapien
atagcgaaggaaggcccaaatgtaa

SEQ ID NO: 6061347 - DNA, 25 bp, Homo sapien
gagctcttccgccatttccatcatt

SEQ ID NO: 6061348 - DNA, 25 bp, Homo sapien
tctggagctcatcctcagtggcacc

SEQ ID NO: 6061349 - DNA, 25 bp, Homo sapien
gtccattacagggcctaatttcgta

SEQ ID NO: 6061350 - DNA, 25 bp, Homo sapien
ctcctgaacaaaggaaagaggaaag

SEQ ID NO: 6061351 - DNA, 25 bp, Homo sapien
acaagtgtgtctcctcctccatact

SEQ ID NO: 6061352 - DNA, 25 bp, Homo sapien
agtgggaagagggcgtcaccggcga

SEQ ID NO: 6061353 - DNA, 25 bp, Homo sapien
gcagcgtagtcaacgaaggtgtaga

SEQ ID NO: 6061354 - DNA, 25 bp, Homo sapien
cgggcaatctcagtgatgagtctga

SEQ ID NO: 6061355 - DNA, 25 bp, Homo sapien
agaggaacaagtgtgtctcctcctc

SEQ ID NO: 6061356 - DNA, 25 bp, Homo sapien
ggagccgacagtgcgggcaatctca

SEQ ID NO: 6061357 - DNA, 25 bp, Homo sapien
aacgaaggtgtagagaggaacaagt

SEQ ID NO: 6061358 - DNA, 25 bp, Homo sapien
gctctcccgtaccttcggagactct

SEQ ID NO: 6061359 - DNA, 25 bp, Homo sapien
ccatacttgttgtcaaacacttgaa

SEQ ID NO: 6061360 - DNA, 25 bp, Homo sapien
gtgatgagtctgaggatggtggctc

SEQ ID NO: 6061361 - DNA, 25 bp, Homo sapien
tccgaatttcttctcctgaacaaag

SEQ ID NO: 6061362 - DNA, 25 bp, Homo sapien
aaggcgagtgggaagagggcgtcac

SEQ ID NO: 6061363 - DNA, 25 bp, Homo sapien
gtggctcggggaacaaggtcaggag

SEQ ID NO: 6061364 - DNA, 25 bp, Homo sapien
gaacgatacacagtccattacaggg

SEQ ID NO: 6061365 - DNA, 25 bp, Homo sapien
aagagggcgtcaccggcgagaatgg

SEQ ID NO: 6061366 - DNA, 25 bp, Homo sapien
ttccatcattcccttctctgctcca

SEQ ID NO: 6061367 - DNA, 25 bp, Homo sapien
tacacagtccattacagggcctaat

SEQ ID NO: 6061368 - DNA, 25 bp, Homo sapien
ggtcgacgtactggcctgcagccat

SEQ ID NO: 6061369 - DNA, 25 bp, Homo sapien
ttcttcgccttctccttgagctctt

SEQ ID NO: 6061370 - DNA, 25 bp, Homo sapien
acttgaagctccttcttcgccttct

SEQ ID NO: 6061371 - DNA, 25 bp, Homo sapien
gcctgcagccataccagtggagccg

SEQ ID NO: 6061372 - DNA, 25 bp, Homo sapien
tacagggcctaatttcgtatagcga

SEQ ID NO: 6061373 - DNA, 25 bp, Homo sapien
agagcattcacccatggctccgaat

SEQ ID NO: 6061374 - DNA, 25 bp, Homo sapien
ttcacccatggctccgaatttcttc

SEQ ID NO: 6061375 - DNA, 25 bp, Homo sapien
acaaggtcaggaggcgtgtgggaga

SEQ ID NO: 6061376 - DNA, 25 bp, Homo sapien
gatgtcatcgaccacctgatacagc

SEQ ID NO: 6061377 - DNA, 25 bp, Homo sapien
cacctgatacagcatcccgacggct

SEQ ID NO: 6061378 - DNA, 25 bp, Homo sapien
accttcggagactctggagctcatc

SEQ ID NO: 6061379 - DNA, 25 bp, Homo sapien
accgcacacggcagagcattcaccc

SEQ ID NO: 6061380 - DNA, 25 bp, Homo sapien
cattcccttctctgctccaccatca

SEQ ID NO: 6061381 - DNA, 25 bp, Homo sapien
tcaaacacttgaagctccttcttcg

SEQ ID NO: 6061382 - DNA, 25 bp, Homo sapien
atagctcttcttcttgtcctcggtg

SEQ ID NO: 6061383 - DNA, 25 bp, Homo sapien
cggggaacaaggtcaggaggcgtgt

SEQ ID NO: 6061384 - DNA, 25 bp, Homo sapien
cctcctccatacttgttgtcaaaca

SEQ ID NO: 6061385 - DNA, 25 bp, Homo sapien
gcctaatttcgtatagcgaaggaag

SEQ ID NO: 6061386 - DNA, 25 bp, Homo sapien
taggccaccgcacacggcagagcat

SEQ ID NO: 6061387 - DNA, 25 bp, Homo sapien
ctcagtggcaccgcccaataggcca

SEQ ID NO: 6061388 - DNA, 25 bp, Homo sapien
agccataccagtggagccgacagtg

SEQ ID NO: 6061389 - DNA, 25 bp, Homo sapien
cacggcagagcattcacccatggct

SEQ ID NO: 6061390 - DNA, 25 bp, Homo sapien
gacggctctcccgtaccttcggaga

SEQ ID NO: 6061391 - DNA, 25 bp, Homo sapien
tcaggaggcgtgtgggagacaatgt

SEQ ID NO: 6061392 - DNA, 25 bp, Homo sapien
ggagactctggagctcatcctcagt

SEQ ID NO: 6061393 - DNA, 25 bp, Homo sapien
gtactggcctgcagccataccagtg

SEQ ID NO: 6061394 - DNA, 25 bp, Homo sapien
aggatggtggctcggggaacaaggt

SEQ ID NO: 6061395 - DNA, 25 bp, Homo sapien
tttcttctcctgaacaaaggaaaga

SEQ ID NO: 6061396 - DNA, 25 bp, Homo sapien
gcatcccgacggctctcccgtacct

SEQ ID NO: 6061397 - DNA, 25 bp, Homo sapien
ttgttgtcaaacacttgaagctcct

SEQ ID NO: 6061398 - DNA, 25 bp, Homo sapien
atcgaccacctgatacagcatcccg

SEQ ID NO: 6061399 - DNA, 25 bp, Homo sapien
aagctccttcttcgccttctccttg

SEQ ID NO: 6061400 - DNA, 25 bp, Homo sapien
ggcgtgtgggagacaatgtgctgga

SEQ ID NO: 6061401 - DNA, 25 bp, Homo sapien
atctcagtgatgagtctgaggatgg

SEQ ID NO: 6061402 - DNA, 25 bp, Homo sapien
accatcatagctcttcttcttgtcc

SEQ ID NO: 6061403 - DNA, 25 bp, Homo sapien
cttgtcctcggtgatgtcatcgacc

SEQ ID NO: 6061404 - DNA, 25 bp, Homo sapien
tgtaaaagagggcccaaaatcagag

SEQ ID NO: 6061405 - DNA, 25 bp, Homo sapien
cgatgagcagcgtagtcaacgaagg

SEQ ID NO: 6061406 - DNA, 25 bp, Homo sapien
gtgtctcctcctccatacttgttgt

SEQ ID NO: 6061407 - DNA, 25 bp, Homo sapien
acaatgtgctggaaggcgagtggga

SEQ ID NO: 6061408 - DNA, 25 bp, Homo sapien
tttcgtatagcgaaggaaggcccaa

SEQ ID NO: 6061409 - DNA, 25 bp, Homo sapien
catggctccgaatttcttctcctga

SEQ ID NO: 6061410 - DNA, 25 bp, Homo sapien
cttctctgctccaccatcatagctc

SEQ ID NO: 6061411 - DNA, 25 bp, Homo sapien
gcccaaaatcagaggggaagaagaa

SEQ ID NO: 6061412 - DNA, 25 bp, Homo sapien
tgctccaccatcatagctcttcttc

SEQ ID NO: 6061413 - DNA, 25 bp, Homo sapien
cgccttctccttgagctcttccgcc

SEQ ID NO: 6061414 - DNA, 25 bp, Homo sapien
cttcaaggtcgacgtactggcctgc

SEQ ID NO: 6061415 - DNA, 25 bp, Homo sapien
agagggcccaaaatcagaggggaag

SEQ ID NO: 6061416 - DNA, 25 bp, Homo sapien
atacagcatcccgacggctctcccg

SEQ ID NO: 6061417 - DNA, 25 bp, Homo sapien
tcagaggggaagaagaaaatgtcga

SEQ ID NO: 6061418 - DNA, 25 bp, Homo sapien
gtgtagagaggaacaagtgtgtctc

SEQ ID NO: 6061419 - DNA, 25 bp, Homo sapien
tccggatgaaattggactccctgta

SEQ ID NO: 6061420 - DNA, 25 bp, Homo sapien
cttctcctttctcatcatagtgaac

SEQ ID NO: 6061421 - DNA, 25 bp, Homo sapien
atatgcttgtactttctgtgacggg

SEQ ID NO: 6061422 - DNA, 25 bp, Homo sapien
cgcacaatctttcctccaaatgctt

SEQ ID NO: 6061423 - DNA, 25 bp, Homo sapien
ttattacagggaggcactattcgaa

SEQ ID NO: 6061424 - DNA, 25 bp, Homo sapien
aggaacattttgcattggcaaatat

SEQ ID NO: 6061425 - DNA, 25 bp, Homo sapien
atactctccggatgaaattggactc

SEQ ID NO: 6061426 - DNA, 25 bp, Homo sapien
gaccatcttctgtccatgctgtaac

SEQ ID NO: 6061427 - DNA, 25 bp, Homo sapien
caaatattattacagggaggcacta

SEQ ID NO: 6061428 - DNA, 25 bp, Homo sapien
agaacaagccttcttctcctttctc

SEQ ID NO: 6061429 - DNA, 25 bp, Homo sapien
accaaatggtgaccgcacaatcttt

SEQ ID NO: 6061430 - DNA, 25 bp, Homo sapien
ttctcattcaggctagtctatgtca

SEQ ID NO: 6061431 - DNA, 25 bp, Homo sapien
tttcgatcacgagactgtgatatct

SEQ ID NO: 6061432 - DNA, 25 bp, Homo sapien
tttgatgaaattgcggacaattgtc

SEQ ID NO: 6061433 - DNA, 25 bp, Homo sapien
ttctctactattttgatgaaattgc

SEQ ID NO: 6061434 - DNA, 25 bp, Homo sapien
cattggcaaatattattacagggag

SEQ ID NO: 6061435 - DNA, 25 bp, Homo sapien
tactattttgatgaaattgcggaca

SEQ ID NO: 6061436 - DNA, 25 bp, Homo sapien
ctttctcatcatagtgaaccattga

SEQ ID NO: 6061437 - DNA, 25 bp, Homo sapien
atccagagaacaagccttcttctcc

SEQ ID NO: 6061438 - DNA, 25 bp, Homo sapien
caatgaaagggtttgataatccaga

SEQ ID NO: 6061439 - DNA, 25 bp, Homo sapien
ctgtaacctcgagttcatcactagg

SEQ ID NO: 6061440 - DNA, 25 bp, Homo sapien
taggcatgcttaaataaccatagct

SEQ ID NO: 6061441 - DNA, 25 bp, Homo sapien
ctcggactcctttttctctactatt

SEQ ID NO: 6061442 - DNA, 25 bp, Homo sapien
cactaggaaatgtatctttttcgat

SEQ ID NO: 6061443 - DNA, 25 bp, Homo sapien
attgtcttgccctcagttgttataa

SEQ ID NO: 6061444 - DNA, 25 bp, Homo sapien
cctcgagttcatcactaggaaatgt

SEQ ID NO: 6061445 - DNA, 25 bp, Homo sapien
gctttctgctttccacttttcacaa

SEQ ID NO: 6061446 - DNA, 25 bp, Homo sapien
agccttcttctcctttctcatcata

SEQ ID NO: 6061447 - DNA, 25 bp, Homo sapien
atactccaaataaaggaacaagtgg

SEQ ID NO: 6061448 - DNA, 25 bp, Homo sapien
tgacgggcagccattaccagaccat

SEQ ID NO: 6061449 - DNA, 25 bp, Homo sapien
aaatgcttctcctatacactgcaaa

SEQ ID NO: 6061450 - DNA, 25 bp, Homo sapien
gctagtctatgtcagcttctcggac

SEQ ID NO: 6061451 - DNA, 25 bp, Homo sapien
tcctttttctctactattttgatga

SEQ ID NO: 6061452 - DNA, 25 bp, Homo sapien
tggaggaacaagtcgaatttttatg

SEQ ID NO: 6061453 - DNA, 25 bp, Homo sapien
tcacgagactgtgatatctacctac

SEQ ID NO: 6061454 - DNA, 25 bp, Homo sapien
ttgataatccagagaacaagccttc

SEQ ID NO: 6061455 - DNA, 25 bp, Homo sapien
gaaatgtatctttttcgatcacgag

SEQ ID NO: 6061456 - DNA, 25 bp, Homo sapien
ggtgaccgcacaatctttcctccaa

SEQ ID NO: 6061457 - DNA, 25 bp, Homo sapien
tacctacaatgaaagggtttgataa

SEQ ID NO: 6061458 - DNA, 25 bp, Homo sapien
acacagctgattttctcattcaggc

SEQ ID NO: 6061459 - DNA, 25 bp, Homo sapien
attcgaacacagctgattttctcat

SEQ ID NO: 6061460 - DNA, 25 bp, Homo sapien
cggacaattgtcttgccctcagttg

SEQ ID NO: 6061461 - DNA, 25 bp, Homo sapien
accatagctttctgctttccacttt

SEQ ID NO: 6061462 - DNA, 25 bp, Homo sapien
aaattgcggacaattgtcttgccct

SEQ ID NO: 6061463 - DNA, 25 bp, Homo sapien
ttgccctcagttgttataatactct

SEQ ID NO: 6061464 - DNA, 25 bp, Homo sapien
ctatgtcagcttctcggactccttt

SEQ ID NO: 6061465 - DNA, 25 bp, Homo sapien
tcacaaattaagtaaaagtggagga

SEQ ID NO: 6061466 - DNA, 25 bp, Homo sapien
gatagaaacaatgggaagatggcaa

SEQ ID NO: 6061467 - DNA, 25 bp, Homo sapien
ttgtactttctgtgacgggcagcca

SEQ ID NO: 6061468 - DNA, 25 bp, Homo sapien
ttcctccaaatgcttctcctataca

SEQ ID NO: 6061469 - DNA, 25 bp, Homo sapien
attcaggctagtctatgtcagcttc

SEQ ID NO: 6061470 - DNA, 25 bp, Homo sapien
atacactgcaaacccatacatactc

SEQ ID NO: 6061471 - DNA, 25 bp, Homo sapien
cagggaggcactattcgaacacagc

SEQ ID NO: 6061472 - DNA, 25 bp, Homo sapien
tcgaatttttatgatagaaacaatg

SEQ ID NO: 6061473 - DNA, 25 bp, Homo sapien
cttctgtccatgctgtaacctcgag

SEQ ID NO: 6061474 - DNA, 25 bp, Homo sapien
tgctttccacttttcacaaattaag

SEQ ID NO: 6061475 - DNA, 25 bp, Homo sapien
tggactccctgtatatgcttgtact

SEQ ID NO: 6061476 - DNA, 25 bp, Homo sapien
cattgagcttttcccatgcataaca

SEQ ID NO: 6061477 - DNA, 25 bp, Homo sapien
gaacaagtcgaatttttatgataga

SEQ ID NO: 6061478 - DNA, 25 bp, Homo sapien
tcagttgttataatactctccggat

SEQ ID NO: 6061479 - DNA, 25 bp, Homo sapien
gcttttcccatgcataacaccaaat

SEQ ID NO: 6061480 - DNA, 25 bp, Homo sapien
gcagccattaccagaccatcttctg

SEQ ID NO: 6061481 - DNA, 25 bp, Homo sapien
gttcatcactaggaaatgtatcttt

SEQ ID NO: 6061482 - DNA, 25 bp, Homo sapien
gttataatactctccggatgaaatt

SEQ ID NO: 6061483 - DNA, 25 bp, Homo sapien
tccatgctgtaacctcgagttcatc

SEQ ID NO: 6061484 - DNA, 25 bp, Homo sapien
cataacaccaaatggtgaccgcaca

SEQ ID NO: 6061485 - DNA, 25 bp, Homo sapien
aacaatgggaagatggcaaggaaca

SEQ ID NO: 6061486 - DNA, 25 bp, Homo sapien
catgcttaaataaccatagctttct

SEQ ID NO: 6061487 - DNA, 25 bp, Homo sapien
ggcactattcgaacacagctgattt

SEQ ID NO: 6061488 - DNA, 25 bp, Homo sapien
attttgcattggcaaatattattac

SEQ ID NO: 6061489 - DNA, 25 bp, Homo sapien
aagggtttgataatccagagaacaa

SEQ ID NO: 6061490 - DNA, 25 bp, Homo sapien
ctgattttctcattcaggctagtct

SEQ ID NO: 6061491 - DNA, 25 bp, Homo sapien
cccatgcataacaccaaatggtgac

SEQ ID NO: 6061492 - DNA, 25 bp, Homo sapien
tgaaattggactccctgtatatgct

SEQ ID NO: 6061493 - DNA, 25 bp, Homo sapien
gggaagatggcaaggaacattttgc

SEQ ID NO: 6061494 - DNA, 25 bp, Homo sapien
ccctgtatatgcttgtactttctgt

SEQ ID NO: 6061495 - DNA, 25 bp, Homo sapien
ccatacatactccaaataaaggaac

SEQ ID NO: 6061496 - DNA, 25 bp, Homo sapien
atggcaaggaacattttgcattggc

SEQ ID NO: 6061497 - DNA, 25 bp, Homo sapien
catcatagtgaaccattgagctttt

SEQ ID NO: 6061498 - DNA, 25 bp, Homo sapien
gtgaaccattgagcttttcccatgc

SEQ ID NO: 6061499 - DNA, 25 bp, Homo sapien
caaataaaggaacaagtggtccgag

SEQ ID NO: 6061500 - DNA, 25 bp, Homo sapien
gcaaacccatacatactccaaataa

SEQ ID NO: 6061501 - DNA, 25 bp, Homo sapien
gactgtgatatctacctacaatgaa

SEQ ID NO: 6061502 - DNA, 25 bp, Homo sapien
gatatctacctacaatgaaagggtt

SEQ ID NO: 6061503 - DNA, 25 bp, Homo sapien
aatctttcctccaaatgcttctcct

SEQ ID NO: 6061504 - DNA, 25 bp, Homo sapien
ttaccagaccatcttctgtccatgc

SEQ ID NO: 6061505 - DNA, 25 bp, Homo sapien
ttttatgatagaaacaatgggaaga

SEQ ID NO: 6061506 - DNA, 25 bp, Homo sapien
tttctgtgacgggcagccattacca

SEQ ID NO: 6061507 - DNA, 25 bp, Homo sapien
ttctcctatacactgcaaacccata

SEQ ID NO: 6061508 - DNA, 25 bp, Homo sapien
cagcttctcggactcctttttctct

SEQ ID NO: 6061509 - DNA, 25 bp, Homo sapien
taaataaccatagctttctgctttc

SEQ ID NO: 6061510 - DNA, 25 bp, Homo sapien
tatctttttcgatcacgagactgtg

SEQ ID NO: 6061511 - DNA, 25 bp, Homo sapien
cccgactgctccctctgtgggccaa

SEQ ID NO: 6061512 - DNA, 25 bp, Homo sapien
tctcatcgaacatagcgaatatata

SEQ ID NO: 6061513 - DNA, 25 bp, Homo sapien
ttaacttcatacttagactgtcgat

SEQ ID NO: 6061514 - DNA, 25 bp, Homo sapien
caaaacttctcatacgttggttcct

SEQ ID NO: 6061515 - DNA, 25 bp, Homo sapien
acagagcgtagtctagatggatgtt

SEQ ID NO: 6061516 - DNA, 25 bp, Homo sapien
cctgatttctccaatgctgcataaa

SEQ ID NO: 6061517 - DNA, 25 bp, Homo sapien
tattccttattactacaacaagttc

SEQ ID NO: 6061518 - DNA, 25 bp, Homo sapien
gctgaagtaagggtagagattcacg

SEQ ID NO: 6061519 - DNA, 25 bp, Homo sapien
tagatggatgttggccgtgtctccc

SEQ ID NO: 6061520 - DNA, 25 bp, Homo sapien
cataaaaagcccacaagtctctaag

SEQ ID NO: 6061521 - DNA, 25 bp, Homo sapien
tgaaacagtccccaaaacttctcat

SEQ ID NO: 6061522 - DNA, 25 bp, Homo sapien
tcatacttagactgtcgatctggat

SEQ ID NO: 6061523 - DNA, 25 bp, Homo sapien
cattcttcacatgttgtatcaaatt

SEQ ID NO: 6061524 - DNA, 25 bp, Homo sapien
ctccgacaccacgatttccaacgat

SEQ ID NO: 6061525 - DNA, 25 bp, Homo sapien
attgttaacataagtctttgcgttt

SEQ ID NO: 6061526 - DNA, 25 bp, Homo sapien
tctggatgaaacagtccccaaaact

SEQ ID NO: 6061527 - DNA, 25 bp, Homo sapien
gattagttgaaattaacttcatact

SEQ ID NO: 6061528 - DNA, 25 bp, Homo sapien
ggtatgagtaccctggatcgttatc

SEQ ID NO: 6061529 - DNA, 25 bp, Homo sapien
cgaacatagcgaatatataagtctc

SEQ ID NO: 6061530 - DNA, 25 bp, Homo sapien
atttccaacgatccgccccctgatt

SEQ ID NO: 6061531 - DNA, 25 bp, Homo sapien
aaagcgcattaattattccttatta

SEQ ID NO: 6061532 - DNA, 25 bp, Homo sapien
accgagtcgagatttgcgtcgaata

SEQ ID NO: 6061533 - DNA, 25 bp, Homo sapien
gagtaccctggatcgttatcaacag

SEQ ID NO: 6061534 - DNA, 25 bp, Homo sapien
tagcgaatatataagtctctatagc

SEQ ID NO: 6061535 - DNA, 25 bp, Homo sapien
aagcccacaagtctctaaggattag

SEQ ID NO: 6061536 - DNA, 25 bp, Homo sapien
atatataagtctctatagctttccc

SEQ ID NO: 6061537 - DNA, 25 bp, Homo sapien
attcacgagcaagggagattgcttg

SEQ ID NO: 6061538 - DNA, 25 bp, Homo sapien
gcataaaccgagtcgagatttgcgt

SEQ ID NO: 6061539 - DNA, 25 bp, Homo sapien
ctggccttctcggtgatccattctt

SEQ ID NO: 6061540 - DNA, 25 bp, Homo sapien
actcgtcccgactgctccctctgtg

SEQ ID NO: 6061541 - DNA, 25 bp, Homo sapien
ccgccccctgatttctccaatgctg

SEQ ID NO: 6061542 - DNA, 25 bp, Homo sapien
cgcttacataaaaagcccacaagtc

SEQ ID NO: 6061543 - DNA, 25 bp, Homo sapien
tgaaattaacttcatacttagactg

SEQ ID NO: 6061544 - DNA, 25 bp, Homo sapien
gttccttcttattctcatcgaacat

SEQ ID NO: 6061545 - DNA, 25 bp, Homo sapien
gactgggcggtgaacagagcgtagt

SEQ ID NO: 6061546 - DNA, 25 bp, Homo sapien
gagcaagggagattgcttgcttgcc

SEQ ID NO: 6061547 - DNA, 25 bp, Homo sapien
ttccacactcgtcccgactgctccc

SEQ ID NO: 6061548 - DNA, 25 bp, Homo sapien
tctcatacgttggttccttcttatt

SEQ ID NO: 6061549 - DNA, 25 bp, Homo sapien
ttctccaatgctgcataaaccgagt

SEQ ID NO: 6061550 - DNA, 25 bp, Homo sapien
cattaattattccttattactacaa

SEQ ID NO: 6061551 - DNA, 25 bp, Homo sapien
caccacgatttccaacgatccgccc

SEQ ID NO: 6061552 - DNA, 25 bp, Homo sapien
ccggtctccgacaccacgatttcca

SEQ ID NO: 6061553 - DNA, 25 bp, Homo sapien
agtccccaaaacttctcatacgttg

SEQ ID NO: 6061554 - DNA, 25 bp, Homo sapien
tcacatgttgtatcaaattgttaac

SEQ ID NO: 6061555 - DNA, 25 bp, Homo sapien
cttattactacaacaagttcccaat

SEQ ID NO: 6061556 - DNA, 25 bp, Homo sapien
tcgagatttgcgtcgaataggtttt

SEQ ID NO: 6061557 - DNA, 25 bp, Homo sapien
agtctttgcgttttccacactcgtc

SEQ ID NO: 6061558 - DNA, 25 bp, Homo sapien
aagtctctatagctttccctggcct

SEQ ID NO: 6061559 - DNA, 25 bp, Homo sapien
aaataacaacatactacacgcatga

SEQ ID NO: 6061560 - DNA, 25 bp, Homo sapien
catgtagctgaagtaagggtagaga

SEQ ID NO: 6061561 - DNA, 25 bp, Homo sapien
ctatagctttccctggccttctcgg

SEQ ID NO: 6061562 - DNA, 25 bp, Homo sapien
tgtcgatctggatgaaacagtcccc

SEQ ID NO: 6061563 - DNA, 25 bp, Homo sapien
gtaagggtagagattcacgagcaag

SEQ ID NO: 6061564 - DNA, 25 bp, Homo sapien
ggccgtgtctcccatgtagctgaag

SEQ ID NO: 6061565 - DNA, 25 bp, Homo sapien
gatgttggccgtgtctcccatgtag

SEQ ID NO: 6061566 - DNA, 25 bp, Homo sapien
tcaacagtggactgggcggtgaaca

SEQ ID NO: 6061567 - DNA, 25 bp, Homo sapien
cgtagtctagatggatgttggccgt

SEQ ID NO: 6061568 - DNA, 25 bp, Homo sapien
tctgtgggccaaccggtctccgaca

SEQ ID NO: 6061569 - DNA, 25 bp, Homo sapien
cctggatcgttatcaacagtggact

SEQ ID NO: 6061570 - DNA, 25 bp, Homo sapien
tatcaaattgttaacataagtcttt

SEQ ID NO: 6061571 - DNA, 25 bp, Homo sapien
tcgttatcaacagtggactgggcgg

SEQ ID NO: 6061572 - DNA, 25 bp, Homo sapien
cgcatgaaagcgcattaattattcc

SEQ ID NO: 6061573 - DNA, 25 bp, Homo sapien
caacatactacacgcatgaaagcgc

SEQ ID NO: 6061574 - DNA, 25 bp, Homo sapien
gcggtgaacagagcgtagtctagat

SEQ ID NO: 6061575 - DNA, 25 bp, Homo sapien
tgcgttttccacactcgtcccgact

SEQ ID NO: 6061576 - DNA, 25 bp, Homo sapien
acaagtctctaaggattagttgaaa

SEQ ID NO: 6061577 - DNA, 25 bp, Homo sapien
gtagagattcacgagcaagggagat

SEQ ID NO: 6061578 - DNA, 25 bp, Homo sapien
acgatccgccccctgatttctccaa

SEQ ID NO: 6061579 - DNA, 25 bp, Homo sapien
aatgctgcataaaccgagtcgagat

SEQ ID NO: 6061580 - DNA, 25 bp, Homo sapien
tgttgtatcaaattgttaacataag

SEQ ID NO: 6061581 - DNA, 25 bp, Homo sapien
acgttggttccttcttattctcatc

SEQ ID NO: 6061582 - DNA, 25 bp, Homo sapien
cttaaaaataacaacatactacacg

SEQ ID NO: 6061583 - DNA, 25 bp, Homo sapien
tcgaataggttttggtatgagtacc

SEQ ID NO: 6061584 - DNA, 25 bp, Homo sapien
gtgatccattcttcacatgttgtat

SEQ ID NO: 6061585 - DNA, 25 bp, Homo sapien
gggagattgcttgcttgccaagaaa

SEQ ID NO: 6061586 - DNA, 25 bp, Homo sapien
ttctcggtgatccattcttcacatg

SEQ ID NO: 6061587 - DNA, 25 bp, Homo sapien
gctttccctggccttctcggtgatc

SEQ ID NO: 6061588 - DNA, 25 bp, Homo sapien
gtctcccatgtagctgaagtaaggg

SEQ ID NO: 6061589 - DNA, 25 bp, Homo sapien
ggttttggtatgagtaccctggatc

SEQ ID NO: 6061590 - DNA, 25 bp, Homo sapien
tgctccctctgtgggccaaccggtc

SEQ ID NO: 6061591 - DNA, 25 bp, Homo sapien
tcttattctcatcgaacatagcgaa

SEQ ID NO: 6061592 - DNA, 25 bp, Homo sapien
ttagactgtcgatctggatgaaaca

SEQ ID NO: 6061593 - DNA, 25 bp, Homo sapien
ggccaaccggtctccgacaccacga

SEQ ID NO: 6061594 - DNA, 25 bp, Homo sapien
caagaaacctatcactggttcgaga

SEQ ID NO: 6061595 - DNA, 25 bp, Homo sapien
ttgcttgcttgccaagaaacctatc

SEQ ID NO: 6061596 - DNA, 25 bp, Homo sapien
tttgcgtcgaataggttttggtatg

SEQ ID NO: 6061597 - DNA, 25 bp, Homo sapien
aacataagtctttgcgttttccaca

SEQ ID NO: 6061598 - DNA, 25 bp, Homo sapien
ctctaaggattagttgaaattaact

SEQ ID NO: 6061599 - DNA, 25 bp, Homo sapien
actacacgcatgaaagcgcattaat

SEQ ID NO: 6061600 - DNA, 25 bp, Homo sapien
gcttgccaagaaacctatcactggt

SEQ ID NO: 6061601 - DNA, 25 bp, Homo sapien
taaatacgcttacataaaaagccca

SEQ ID NO: 6061602 - DNA, 25 bp, Homo sapien
ggtttgcaggttattcttcaaagtg

SEQ ID NO: 6061603 - DNA, 25 bp, Homo sapien
tagtagtgtcgccagattcgaagct

SEQ ID NO: 6061604 - DNA, 25 bp, Homo sapien
gccgctctacaaacagctccggttc

SEQ ID NO: 6061605 - DNA, 25 bp, Homo sapien
tccaacagaagctccggcaacggag

SEQ ID NO: 6061606 - DNA, 25 bp, Homo sapien
gaagcttttgactccagtgatgact

SEQ ID NO: 6061607 - DNA, 25 bp, Homo sapien
cagtttgaccagaagagttcaagat

SEQ ID NO: 6061608 - DNA, 25 bp, Homo sapien
agccacaataccactctcgatccct

SEQ ID NO: 6061609 - DNA, 25 bp, Homo sapien
atccgattaccccaagttcgaccag

SEQ ID NO: 6061610 - DNA, 25 bp, Homo sapien
aaaccaatccaatgataccaatccg

SEQ ID NO: 6061611 - DNA, 25 bp, Homo sapien
aagagcaccagctacagctgcagat

SEQ ID NO: 6061612 - DNA, 25 bp, Homo sapien
ctacaaacagctccggttccaagac

SEQ ID NO: 6061613 - DNA, 25 bp, Homo sapien
tccagtgatgactccaacagaagct

SEQ ID NO: 6061614 - DNA, 25 bp, Homo sapien
caaataaagttttcatttttatgat

SEQ ID NO: 6061615 - DNA, 25 bp, Homo sapien
tttgactccagtgatgactccaaca

SEQ ID NO: 6061616 - DNA, 25 bp, Homo sapien
ctggtccaaacatcatctctatccg

SEQ ID NO: 6061617 - DNA, 25 bp, Homo sapien
gcattatgacttgacatacagactt

SEQ ID NO: 6061618 - DNA, 25 bp, Homo sapien
tgaatataagaaaaaggtttgcagg

SEQ ID NO: 6061619 - DNA, 25 bp, Homo sapien
accaaacctatcaaattctcaccat

SEQ ID NO: 6061620 - DNA, 25 bp, Homo sapien
ttcatttttatgattccaagacata

SEQ ID NO: 6061621 - DNA, 25 bp, Homo sapien
aagttttcatttttatgattccaag

SEQ ID NO: 6061622 - DNA, 25 bp, Homo sapien
caggttattcttcaaagtgaaactg

SEQ ID NO: 6061623 - DNA, 25 bp, Homo sapien
ctgcgtaaaccaatccaatgatacc

SEQ ID NO: 6061624 - DNA, 25 bp, Homo sapien
tcctgttgattttgagcttagtagt

SEQ ID NO: 6061625 - DNA, 25 bp, Homo sapien
tccaccaagagcaccagctacagct

SEQ ID NO: 6061626 - DNA, 25 bp, Homo sapien
gaaactgcattatgacttgacatac

SEQ ID NO: 6061627 - DNA, 25 bp, Homo sapien
tcagtatgaatataagaaaaaggtt

SEQ ID NO: 6061628 - DNA, 25 bp, Homo sapien
ctcttgcagtcttcaaatgggcaca

SEQ ID NO: 6061629 - DNA, 25 bp, Homo sapien
ctacaacagctccagccgcaagtcc

SEQ ID NO: 6061630 - DNA, 25 bp, Homo sapien
caaatgggcacataccgcttcacaa

SEQ ID NO: 6061631 - DNA, 25 bp, Homo sapien
tgataccaatccgattaccccaagt

SEQ ID NO: 6061632 - DNA, 25 bp, Homo sapien
cagtcttcaaatgggcacataccgc

SEQ ID NO: 6061633 - DNA, 25 bp, Homo sapien
tgcagatctcactcctctcgccgct

SEQ ID NO: 6061634 - DNA, 25 bp, Homo sapien
actctcgatccctgcgtaaaccaat

SEQ ID NO: 6061635 - DNA, 25 bp, Homo sapien
tcatctctatccgtggcagccacaa

SEQ ID NO: 6061636 - DNA, 25 bp, Homo sapien
gatgactccaacagaagctccggca

SEQ ID NO: 6061637 - DNA, 25 bp, Homo sapien
aagagttcaagatcctgttgatttt

SEQ ID NO: 6061638 - DNA, 25 bp, Homo sapien
tcccagctacaacagctccagccgc

SEQ ID NO: 6061639 - DNA, 25 bp, Homo sapien
cctatcaaattctcaccatttcccc

SEQ ID NO: 6061640 - DNA, 25 bp, Homo sapien
attcttcaaagtgaaactgcattat

SEQ ID NO: 6061641 - DNA, 25 bp, Homo sapien
ccgaaaaagagtctgccaattagac

SEQ ID NO: 6061642 - DNA, 25 bp, Homo sapien
tttatgattccaagacataccaaac

SEQ ID NO: 6061643 - DNA, 25 bp, Homo sapien
acagctccggttccaagaccagcca

SEQ ID NO: 6061644 - DNA, 25 bp, Homo sapien
cgatccctgcgtaaaccaatccaat

SEQ ID NO: 6061645 - DNA, 25 bp, Homo sapien
tacagctgcagatctcactcctctc

SEQ ID NO: 6061646 - DNA, 25 bp, Homo sapien
tgacttgacatacagacttgttgta

SEQ ID NO: 6061647 - DNA, 25 bp, Homo sapien
cagctccagccgcaagtccaccaag

SEQ ID NO: 6061648 - DNA, 25 bp, Homo sapien
ctgccaattagactcttgcagtctt

SEQ ID NO: 6061649 - DNA, 25 bp, Homo sapien
cagacttgttgtacctctagaaacc

SEQ ID NO: 6061650 - DNA, 25 bp, Homo sapien
ccggttccaagaccagccaccacac

SEQ ID NO: 6061651 - DNA, 25 bp, Homo sapien
caaacatcatctctatccgtggcag

SEQ ID NO: 6061652 - DNA, 25 bp, Homo sapien
aacggagccaccgaggtaagctgtt

SEQ ID NO: 6061653 - DNA, 25 bp, Homo sapien
ccagccgcaagtccaccaagagcac

SEQ ID NO: 6061654 - DNA, 25 bp, Homo sapien
ttcgaccagtttgaccagaagagtt

SEQ ID NO: 6061655 - DNA, 25 bp, Homo sapien
ccagccaccacactggtccaaacat

SEQ ID NO: 6061656 - DNA, 25 bp, Homo sapien
gacatacagacttgttgtacctcta

SEQ ID NO: 6061657 - DNA, 25 bp, Homo sapien
accagctacagctgcagatctcact

SEQ ID NO: 6061658 - DNA, 25 bp, Homo sapien
cctctcgccgctctacaaacagctc

SEQ ID NO: 6061659 - DNA, 25 bp, Homo sapien
gcaagtccaccaagagcaccagcta

SEQ ID NO: 6061660 - DNA, 25 bp, Homo sapien
atttgcttcccagctacaacagctc

SEQ ID NO: 6061661 - DNA, 25 bp, Homo sapien
ttcacaatttgcttcccagctacaa

SEQ ID NO: 6061662 - DNA, 25 bp, Homo sapien
ggcacataccgcttcacaatttgct

SEQ ID NO: 6061663 - DNA, 25 bp, Homo sapien
caaagtgaaactgcattatgacttg

SEQ ID NO: 6061664 - DNA, 25 bp, Homo sapien
atccaatgataccaatccgattacc

SEQ ID NO: 6061665 - DNA, 25 bp, Homo sapien
cccaagttcgaccagtttgaccaga

SEQ ID NO: 6061666 - DNA, 25 bp, Homo sapien
aataccactctcgatccctgcgtaa

SEQ ID NO: 6061667 - DNA, 25 bp, Homo sapien
caacgacccgaaaaagagtctgcca

SEQ ID NO: 6061668 - DNA, 25 bp, Homo sapien
tctcactcctctcgccgctctacaa

SEQ ID NO: 6061669 - DNA, 25 bp, Homo sapien
attagactcttgcagtcttcaaatg

SEQ ID NO: 6061670 - DNA, 25 bp, Homo sapien
agacataccaaacctatcaaattct

SEQ ID NO: 6061671 - DNA, 25 bp, Homo sapien
tgagcttagtagtgtcgccagattc

SEQ ID NO: 6061672 - DNA, 25 bp, Homo sapien
tctatccgtggcagccacaatacca

SEQ ID NO: 6061673 - DNA, 25 bp, Homo sapien
catttaatcagtatgaatataagaa

SEQ ID NO: 6061674 - DNA, 25 bp, Homo sapien
gtggcagccacaataccactctcga

SEQ ID NO: 6061675 - DNA, 25 bp, Homo sapien
tcaagatcctgttgattttgagctt

SEQ ID NO: 6061676 - DNA, 25 bp, Homo sapien
cagattcgaagcttttgactccagt

SEQ ID NO: 6061677 - DNA, 25 bp, Homo sapien
aagagtctgccaattagactcttgc

SEQ ID NO: 6061678 - DNA, 25 bp, Homo sapien
ctcaccatttcccctatcaaaaatt

SEQ ID NO: 6061679 - DNA, 25 bp, Homo sapien
agaagctccggcaacggagccaccg

SEQ ID NO: 6061680 - DNA, 25 bp, Homo sapien
ccaagaccagccaccacactggtcc

SEQ ID NO: 6061681 - DNA, 25 bp, Homo sapien
tgttgtacctctagaaaccaaataa

SEQ ID NO: 6061682 - DNA, 25 bp, Homo sapien
accacactggtccaaacatcatctc

SEQ ID NO: 6061683 - DNA, 25 bp, Homo sapien
tgattttgagcttagtagtgtcgcc

SEQ ID NO: 6061684 - DNA, 25 bp, Homo sapien
gaccagaagagttcaagatcctgtt

SEQ ID NO: 6061685 - DNA, 25 bp, Homo sapien
taccgcttcacaatttgcttcccag

SEQ ID NO: 6061686 - DNA, 25 bp, Homo sapien
tgtcgccagattcgaagcttttgac

SEQ ID NO: 6061687 - DNA, 25 bp, Homo sapien
tccggcaacggagccaccgaggtaa

SEQ ID NO: 6061688 - DNA, 25 bp, Homo sapien
aaattctcaccatttcccctatcaa

SEQ ID NO: 6061689 - DNA, 25 bp, Homo sapien
attccaagacataccaaacctatca

SEQ ID NO: 6061690 - DNA, 25 bp, Homo sapien
cagatttgacataatggttttgaat

SEQ ID NO: 6061691 - DNA, 25 bp, Homo sapien
atcttgtaacccacagaccatattt

SEQ ID NO: 6061692 - DNA, 25 bp, Homo sapien
aaaagacaaacattatatgtaagag

SEQ ID NO: 6061693 - DNA, 25 bp, Homo sapien
ctgcagtgtgtccaggtgtagcacg

SEQ ID NO: 6061694 - DNA, 25 bp, Homo sapien
tcataacaaattccacatgttcaat

SEQ ID NO: 6061695 - DNA, 25 bp, Homo sapien
atgtaacacatcctgcagtgtgtcc

SEQ ID NO: 6061696 - DNA, 25 bp, Homo sapien
acagaccatatttgctggtactgca

SEQ ID NO: 6061697 - DNA, 25 bp, Homo sapien
gttggcttgagaaggcacatcttgt

SEQ ID NO: 6061698 - DNA, 25 bp, Homo sapien
aggcacatcttgtaacccacagacc

SEQ ID NO: 6061699 - DNA, 25 bp, Homo sapien
catccccggtaaaagccattcttgg

SEQ ID NO: 6061700 - DNA, 25 bp, Homo sapien
aaaagccattcttggttggggctga

SEQ ID NO: 6061701 - DNA, 25 bp, Homo sapien
gggctgatcagctccttcaccagtc

SEQ ID NO: 6061702 - DNA, 25 bp, Homo sapien
atacgacagattcagatttgacata

SEQ ID NO: 6061703 - DNA, 25 bp, Homo sapien
ttattgtagaaattactctcaagag

SEQ ID NO: 6061704 - DNA, 25 bp, Homo sapien
tttattggctttggtaaatatagaa

SEQ ID NO: 6061705 - DNA, 25 bp, Homo sapien
agagttgatctgagcttcctccctg

SEQ ID NO: 6061706 - DNA, 25 bp, Homo sapien
tagatcaatgtgtcctttggcaatg

SEQ ID NO: 6061707 - DNA, 25 bp, Homo sapien
cattcttggttggggctgatcagct

SEQ ID NO: 6061708 - DNA, 25 bp, Homo sapien
gatctgagcttcctccctgaaagtc

SEQ ID NO: 6061709 - DNA, 25 bp, Homo sapien
gtgaatgtacagactcgtagagttg

SEQ ID NO: 6061710 - DNA, 25 bp, Homo sapien
catatttgctggtactgcaacatca

SEQ ID NO: 6061711 - DNA, 25 bp, Homo sapien
ttactctcaagagtttttattggct

SEQ ID NO: 6061712 - DNA, 25 bp, Homo sapien
tgtttctttatctttagttagacgc

SEQ ID NO: 6061713 - DNA, 25 bp, Homo sapien
ttagttagacgcgggttgtgttgca

SEQ ID NO: 6061714 - DNA, 25 bp, Homo sapien
caaacattatatgtaagagtttttt

SEQ ID NO: 6061715 - DNA, 25 bp, Homo sapien
aaccacggatgagtacagcatcccc

SEQ ID NO: 6061716 - DNA, 25 bp, Homo sapien
cagattcagatttgacataatggtt

SEQ ID NO: 6061717 - DNA, 25 bp, Homo sapien
tagaaattactctcaagagttttta

SEQ ID NO: 6061718 - DNA, 25 bp, Homo sapien
aatactgtcttcatcttcataacaa

SEQ ID NO: 6061719 - DNA, 25 bp, Homo sapien
ctacaacggaagcaaatcttattgt

SEQ ID NO: 6061720 - DNA, 25 bp, Homo sapien
ttttctaatgaacttatctacaacg

SEQ ID NO: 6061721 - DNA, 25 bp, Homo sapien
ttgagaaggcacatcttgtaaccca

SEQ ID NO: 6061722 - DNA, 25 bp, Homo sapien
cttcggatacgacagattcagattt

SEQ ID NO: 6061723 - DNA, 25 bp, Homo sapien
ggctttggtaaatatagaatgacat

SEQ ID NO: 6061724 - DNA, 25 bp, Homo sapien
acctcgaaacctttgtagtcgtgag

SEQ ID NO: 6061725 - DNA, 25 bp, Homo sapien
caaatcttattgtagaaattactct

SEQ ID NO: 6061726 - DNA, 25 bp, Homo sapien
caccagtcacatatgtaacacatcc

SEQ ID NO: 6061727 - DNA, 25 bp, Homo sapien
ggtaaatatagaatgacatcgataa

SEQ ID NO: 6061728 - DNA, 25 bp, Homo sapien
ctgtcttcatcttcataacaaattc

SEQ ID NO: 6061729 - DNA, 25 bp, Homo sapien
cacatgttcaatctaatttacacaa

SEQ ID NO: 6061730 - DNA, 25 bp, Homo sapien
gtacagactcgtagagttgatctga

SEQ ID NO: 6061731 - DNA, 25 bp, Homo sapien
aaacctttgtagtcgtgagctggat

SEQ ID NO: 6061732 - DNA, 25 bp, Homo sapien
gggttgtgttgcatctcttctccaa

SEQ ID NO: 6061733 - DNA, 25 bp, Homo sapien
tatctttagttagacgcgggttgtg

SEQ ID NO: 6061734 - DNA, 25 bp, Homo sapien
tctccaactgtacttacctcgaaac

SEQ ID NO: 6061735 - DNA, 25 bp, Homo sapien
aatggttttgaatgtttctttatct

SEQ ID NO: 6061736 - DNA, 25 bp, Homo sapien
aacatcaatcatcttcggatacgac

SEQ ID NO: 6061737 - DNA, 25 bp, Homo sapien
taatgaacttatctacaacggaagc

SEQ ID NO: 6061738 - DNA, 25 bp, Homo sapien
aaagtcagtcctcccacaaccacgg

SEQ ID NO: 6061739 - DNA, 25 bp, Homo sapien
tcgtgagctggatagatcaatgtgt

SEQ ID NO: 6061740 - DNA, 25 bp, Homo sapien
ttgtagtcgtgagctggatagatca

SEQ ID NO: 6061741 - DNA, 25 bp, Homo sapien
agtcctcccacaaccacggatgagt

SEQ ID NO: 6061742 - DNA, 25 bp, Homo sapien
atctcttctccaactgtacttacct

SEQ ID NO: 6061743 - DNA, 25 bp, Homo sapien
aatgtgtcctttggcaatgaaaata

SEQ ID NO: 6061744 - DNA, 25 bp, Homo sapien
atgacatcgataaaaagacaaacat

SEQ ID NO: 6061745 - DNA, 25 bp, Homo sapien
acttatctacaacggaagcaaatct

SEQ ID NO: 6061746 - DNA, 25 bp, Homo sapien
tcatcttcataacaaattccacatg

SEQ ID NO: 6061747 - DNA, 25 bp, Homo sapien
caggtgtagcacgaacctcaaggta

SEQ ID NO: 6061748 - DNA, 25 bp, Homo sapien
tactgcaacatcaatcatcttcgga

SEQ ID NO: 6061749 - DNA, 25 bp, Homo sapien
agacgcgggttgtgttgcatctctt

SEQ ID NO: 6061750 - DNA, 25 bp, Homo sapien
atatctgtgaatgtacagactcgta

SEQ ID NO: 6061751 - DNA, 25 bp, Homo sapien
tggttggggctgatcagctccttca

SEQ ID NO: 6061752 - DNA, 25 bp, Homo sapien
gctggatagatcaatgtgtcctttg

SEQ ID NO: 6061753 - DNA, 25 bp, Homo sapien
cccacaaccacggatgagtacagca

SEQ ID NO: 6061754 - DNA, 25 bp, Homo sapien
aatcatcttcggatacgacagattc

SEQ ID NO: 6061755 - DNA, 25 bp, Homo sapien
tcaagagtttttattggctttggta

SEQ ID NO: 6061756 - DNA, 25 bp, Homo sapien
gatcagctccttcaccagtcacata

SEQ ID NO: 6061757 - DNA, 25 bp, Homo sapien
agcttcctccctgaaagtcagtcct

SEQ ID NO: 6061758 - DNA, 25 bp, Homo sapien
tgaaaatatctgtgaatgtacagac

SEQ ID NO: 6061759 - DNA, 25 bp, Homo sapien
tgtgtccaggtgtagcacgaacctc

SEQ ID NO: 6061760 - DNA, 25 bp, Homo sapien
tatagaatgacatcgataaaaagac

SEQ ID NO: 6061761 - DNA, 25 bp, Homo sapien
taacccacagaccatatttgctggt

SEQ ID NO: 6061762 - DNA, 25 bp, Homo sapien
actcgtagagttgatctgagcttcc

SEQ ID NO: 6061763 - DNA, 25 bp, Homo sapien
ctccttcaccagtcacatatgtaac

SEQ ID NO: 6061764 - DNA, 25 bp, Homo sapien
tgaatgtttctttatctttagttag

SEQ ID NO: 6061765 - DNA, 25 bp, Homo sapien
tcaatctaatttacacaattttcta

SEQ ID NO: 6061766 - DNA, 25 bp, Homo sapien
tttttagttggcttgagaaggcaca

SEQ ID NO: 6061767 - DNA, 25 bp, Homo sapien
gtacagcatccccggtaaaagccat

SEQ ID NO: 6061768 - DNA, 25 bp, Homo sapien
acacaattttctaatgaacttatct

SEQ ID NO: 6061769 - DNA, 25 bp, Homo sapien
cacatcctgcagtgtgtccaggtgt

SEQ ID NO: 6061770 - DNA, 25 bp, Homo sapien
ggatgagtacagcatccccggtaaa

SEQ ID NO: 6061771 - DNA, 25 bp, Homo sapien
tgacataatggttttgaatgtttct

SEQ ID NO: 6061772 - DNA, 25 bp, Homo sapien
tcctttggcaatgaaaatatctgtg

SEQ ID NO: 6061773 - DNA, 25 bp, Homo sapien
cggaagcaaatcttattgtagaaat

SEQ ID NO: 6061774 - DNA, 25 bp, Homo sapien
tcgataaaaagacaaacattatatg

SEQ ID NO: 6061775 - DNA, 25 bp, Homo sapien
tccctgaaagtcagtcctcccacaa

SEQ ID NO: 6061776 - DNA, 25 bp, Homo sapien
tcacatatgtaacacatcctgcagt

SEQ ID NO: 6061777 - DNA, 25 bp, Homo sapien
tgttgcatctcttctccaactgtac

SEQ ID NO: 6061778 - DNA, 25 bp, Homo sapien
taatttacacaattttctaatgaac

SEQ ID NO: 6061779 - DNA, 25 bp, Homo sapien
caaattccacatgttcaatctaatt

SEQ ID NO: 6061780 - DNA, 25 bp, Homo sapien
tgctggtactgcaacatcaatcatc

SEQ ID NO: 6061781 - DNA, 25 bp, Homo sapien
aaaaagatctctgttttcttagctt

SEQ ID NO: 6061782 - DNA, 25 bp, Homo sapien
caattaattaaccaaacaagacact

SEQ ID NO: 6061783 - DNA, 25 bp, Homo sapien
gcagctgcttcctcagcatagagat

SEQ ID NO: 6061784 - DNA, 25 bp, Homo sapien
cgaatgttattcttaaatccagacg

SEQ ID NO: 6061785 - DNA, 25 bp, Homo sapien
ttaattttatgagtccaccatctcg

SEQ ID NO: 6061786 - DNA, 25 bp, Homo sapien
tagagatctttgttatcctgagcgg

SEQ ID NO: 6061787 - DNA, 25 bp, Homo sapien
ctatgattccaaaaaatccagccca

SEQ ID NO: 6061788 - DNA, 25 bp, Homo sapien
aaggagccaaccatatgagataact

SEQ ID NO: 6061789 - DNA, 25 bp, Homo sapien
tccttagactgtacaaggaagtcac

SEQ ID NO: 6061790 - DNA, 25 bp, Homo sapien
ccttcttaattttatgagtccacca

SEQ ID NO: 6061791 - DNA, 25 bp, Homo sapien
gtcggggaaattaatctctccttga

SEQ ID NO: 6061792 - DNA, 25 bp, Homo sapien
atatgagataactagagaaggtccc

SEQ ID NO: 6061793 - DNA, 25 bp, Homo sapien
aaaacacgaatcactgagtaataga

SEQ ID NO: 6061794 - DNA, 25 bp, Homo sapien
tttccaatcctcaaaatcgaattga

SEQ ID NO: 6061795 - DNA, 25 bp, Homo sapien
agaagcttcggaatacggtagtaga

SEQ ID NO: 6061796 - DNA, 25 bp, Homo sapien
gaaaactccttagactgtacaagga

SEQ ID NO: 6061797 - DNA, 25 bp, Homo sapien
ttatcctgagcggaaaactccttag

SEQ ID NO: 6061798 - DNA, 25 bp, Homo sapien
gaaattaatctctccttgaactctt

SEQ ID NO: 6061799 - DNA, 25 bp, Homo sapien
aaacctatgattccaaaaaatccag

SEQ ID NO: 6061800 - DNA, 25 bp, Homo sapien
agctcttcttgttgcacccttctta

SEQ ID NO: 6061801 - DNA, 25 bp, Homo sapien
taagcccaggaattgaaagcattct

SEQ ID NO: 6061802 - DNA, 25 bp, Homo sapien
agtccaccatctcgtcttgaatctc

SEQ ID NO: 6061803 - DNA, 25 bp, Homo sapien
gaatctcattaggagcaataagccc

SEQ ID NO: 6061804 - DNA, 25 bp, Homo sapien
gcttcctcagcatagagatctttgt

SEQ ID NO: 6061805 - DNA, 25 bp, Homo sapien
cacaagtcaatcttacaattttaaa

SEQ ID NO: 6061806 - DNA, 25 bp, Homo sapien
ttccaaaaaatccagcccattgaac

SEQ ID NO: 6061807 - DNA, 25 bp, Homo sapien
ctctgtgcagctgcttcctcagcat

SEQ ID NO: 6061808 - DNA, 25 bp, Homo sapien
caaagatagagtctaaaaaaatatc

SEQ ID NO: 6061809 - DNA, 25 bp, Homo sapien
cgtcttgaatctcattaggagcaat

SEQ ID NO: 6061810 - DNA, 25 bp, Homo sapien
cagcccattgaacacggaagctctt

SEQ ID NO: 6061811 - DNA, 25 bp, Homo sapien
caaacaagacactaatttatcccca

SEQ ID NO: 6061812 - DNA, 25 bp, Homo sapien
ttgaaagcattctttgacgttctct

SEQ ID NO: 6061813 - DNA, 25 bp, Homo sapien
atcctcaaaatcgaattgagaagct

SEQ ID NO: 6061814 - DNA, 25 bp, Homo sapien
tcactgagtaatagaaacaaacccc

SEQ ID NO: 6061815 - DNA, 25 bp, Homo sapien
caggaattgaaagcattctttgacg

SEQ ID NO: 6061816 - DNA, 25 bp, Homo sapien
ccatctcgtcttgaatctcattagg

SEQ ID NO: 6061817 - DNA, 25 bp, Homo sapien
tccctaatgtttaaatctacattaa

SEQ ID NO: 6061818 - DNA, 25 bp, Homo sapien
tttatgagtccaccatctcgtcttg

SEQ ID NO: 6061819 - DNA, 25 bp, Homo sapien
ctaatttatccccaaaaagatctct

SEQ ID NO: 6061820 - DNA, 25 bp, Homo sapien
ttgcacccttcttaattttatgagt

SEQ ID NO: 6061821 - DNA, 25 bp, Homo sapien
gtcaaagcaaaaaggagccaaccat

SEQ ID NO: 6061822 - DNA, 25 bp, Homo sapien
tcagcatagagatctttgttatcct

SEQ ID NO: 6061823 - DNA, 25 bp, Homo sapien
cacggaagctcttcttgttgcaccc

SEQ ID NO: 6061824 - DNA, 25 bp, Homo sapien
gataactagagaaggtccctaatgt

SEQ ID NO: 6061825 - DNA, 25 bp, Homo sapien
gaattgagaagcttcggaatacggt

SEQ ID NO: 6061826 - DNA, 25 bp, Homo sapien
aaaatcgaattgagaagcttcggaa

SEQ ID NO: 6061827 - DNA, 25 bp, Homo sapien
cctagggggtgacaaagatagagtc

SEQ ID NO: 6061828 - DNA, 25 bp, Homo sapien
aaaatccagcccattgaacacggaa

SEQ ID NO: 6061829 - DNA, 25 bp, Homo sapien
gcaaaaaggagccaaccatatgaga

SEQ ID NO: 6061830 - DNA, 25 bp, Homo sapien
gggtgacaaagatagagtctaaaaa

SEQ ID NO: 6061831 - DNA, 25 bp, Homo sapien
tctttgttatcctgagcggaaaact

SEQ ID NO: 6061832 - DNA, 25 bp, Homo sapien
acaaggaagtcacgaatgttattct

SEQ ID NO: 6061833 - DNA, 25 bp, Homo sapien
gagcaataagcccaggaattgaaag

SEQ ID NO: 6061834 - DNA, 25 bp, Homo sapien
ccaaccatatgagataactagagaa

SEQ ID NO: 6061835 - DNA, 25 bp, Homo sapien
gcattctttgacgttctctctctct

SEQ ID NO: 6061836 - DNA, 25 bp, Homo sapien
aagtcacgaatgttattcttaaatc

SEQ ID NO: 6061837 - DNA, 25 bp, Homo sapien
agagtctaaaaaaatatcttgcacc

SEQ ID NO: 6061838 - DNA, 25 bp, Homo sapien
atacggtagtagagatacggtcggg

SEQ ID NO: 6061839 - DNA, 25 bp, Homo sapien
aatctctccttgaactctttcctgt

SEQ ID NO: 6061840 - DNA, 25 bp, Homo sapien
taaccaaacaagacactaatttatc

SEQ ID NO: 6061841 - DNA, 25 bp, Homo sapien
tccttgaactctttcctgttttcaa

SEQ ID NO: 6061842 - DNA, 25 bp, Homo sapien
atctctgttttcttagcttttccaa

SEQ ID NO: 6061843 - DNA, 25 bp, Homo sapien
tatccccaaaaagatctctgttttc

SEQ ID NO: 6061844 - DNA, 25 bp, Homo sapien
cacgaatcactgagtaatagaaaca

SEQ ID NO: 6061845 - DNA, 25 bp, Homo sapien
tcttgttgcacccttcttaatttta

SEQ ID NO: 6061846 - DNA, 25 bp, Homo sapien
attgaacacggaagctcttcttgtt

SEQ ID NO: 6061847 - DNA, 25 bp, Homo sapien
ttagcttttccaatcctcaaaatcg

SEQ ID NO: 6061848 - DNA, 25 bp, Homo sapien
cattaggagcaataagcccaggaat

SEQ ID NO: 6061849 - DNA, 25 bp, Homo sapien
tttgacgttctctctctctctgtgc

SEQ ID NO: 6061850 - DNA, 25 bp, Homo sapien
tgagcggaaaactccttagactgta

SEQ ID NO: 6061851 - DNA, 25 bp, Homo sapien
gttttcttagcttttccaatcctca

SEQ ID NO: 6061852 - DNA, 25 bp, Homo sapien
ttcggaatacggtagtagagatacg

SEQ ID NO: 6061853 - DNA, 25 bp, Homo sapien
gactgtacaaggaagtcacgaatgt

SEQ ID NO: 6061854 - DNA, 25 bp, Homo sapien
gatcgtataagcagcaatatcttcc

SEQ ID NO: 6061855 - DNA, 25 bp, Homo sapien
aaccaatgttggcaagtagtaacca

SEQ ID NO: 6061856 - DNA, 25 bp, Homo sapien
tgttggcaagtagtaaccaccaaag

SEQ ID NO: 6061857 - DNA, 25 bp, Homo sapien
tctctaggaggagaagtgagaccag

SEQ ID NO: 6061858 - DNA, 25 bp, Homo sapien
ctctttgttgatcacagctttggca

SEQ ID NO: 6061859 - DNA, 25 bp, Homo sapien
actagcgcgtcatggtggtaaatta

SEQ ID NO: 6061860 - DNA, 25 bp, Homo sapien
tgttcagagtcctaggatcatccac

SEQ ID NO: 6061861 - DNA, 25 bp, Homo sapien
accaccaaagcaaccggtaacagcg

SEQ ID NO: 6061862 - DNA, 25 bp, Homo sapien
ctttttctcccacaaggtgactatt

SEQ ID NO: 6061863 - DNA, 25 bp, Homo sapien
aggctcgaactgaaccaatgttggc

SEQ ID NO: 6061864 - DNA, 25 bp, Homo sapien
taaattacgtttataatgaagttca

SEQ ID NO: 6061865 - DNA, 25 bp, Homo sapien
taagtagttgttcctctgggaggtg

SEQ ID NO: 6061866 - DNA, 25 bp, Homo sapien
ggtatctccattcacaaacaccgcg

SEQ ID NO: 6061867 - DNA, 25 bp, Homo sapien
acagaacaacattgatgggaatcgg

SEQ ID NO: 6061868 - DNA, 25 bp, Homo sapien
catcgataaagtgttgttagaaggc

SEQ ID NO: 6061869 - DNA, 25 bp, Homo sapien
ctcccacaaggtgactatttcgttc

SEQ ID NO: 6061870 - DNA, 25 bp, Homo sapien
tgaagttcatcaagcgaaataactg

SEQ ID NO: 6061871 - DNA, 25 bp, Homo sapien
cgccttgatcgtataagcagcaata

SEQ ID NO: 6061872 - DNA, 25 bp, Homo sapien
ctcaagagacttgccaatctttttc

SEQ ID NO: 6061873 - DNA, 25 bp, Homo sapien
ataagcagcaatatcttcctctttg

SEQ ID NO: 6061874 - DNA, 25 bp, Homo sapien
attcaccattacaagaaccattctt

SEQ ID NO: 6061875 - DNA, 25 bp, Homo sapien
tgatgggaatcggagactcttggat

SEQ ID NO: 6061876 - DNA, 25 bp, Homo sapien
tatactgatattggtatctccattc

SEQ ID NO: 6061877 - DNA, 25 bp, Homo sapien
ccatcgccaagaatggtgactttgt

SEQ ID NO: 6061878 - DNA, 25 bp, Homo sapien
ggaggagaagtgagaccaggctcga

SEQ ID NO: 6061879 - DNA, 25 bp, Homo sapien
aggctctatactgatattggtatct

SEQ ID NO: 6061880 - DNA, 25 bp, Homo sapien
tgtgtacttgacatcagggtaaagc

SEQ ID NO: 6061881 - DNA, 25 bp, Homo sapien
cattacaagaaccattcttttattg

SEQ ID NO: 6061882 - DNA, 25 bp, Homo sapien
tagaaggcttaatgtataggatttt

SEQ ID NO: 6061883 - DNA, 25 bp, Homo sapien
catttccatcgccaagaatggtgac

SEQ ID NO: 6061884 - DNA, 25 bp, Homo sapien
agtcttctcaagagacttgccaatc

SEQ ID NO: 6061885 - DNA, 25 bp, Homo sapien
aacacttgtgtacttgacatcaggg

SEQ ID NO: 6061886 - DNA, 25 bp, Homo sapien
actttgtctctaggaggagaagtga

SEQ ID NO: 6061887 - DNA, 25 bp, Homo sapien
ccattcttttattgatacagaacat

SEQ ID NO: 6061888 - DNA, 25 bp, Homo sapien
ccaagaatggtgactttgtctctag

SEQ ID NO: 6061889 - DNA, 25 bp, Homo sapien
tgcttttaagtagttgttcctctgg

SEQ ID NO: 6061890 - DNA, 25 bp, Homo sapien
ctcagaggcttccacaccaaaggaa

SEQ ID NO: 6061891 - DNA, 25 bp, Homo sapien
gcttaatgtataggattttgttcag

SEQ ID NO: 6061892 - DNA, 25 bp, Homo sapien
ctttggcatttccatcgccaagaat

SEQ ID NO: 6061893 - DNA, 25 bp, Homo sapien
gatattggtatctccattcacaaac

SEQ ID NO: 6061894 - DNA, 25 bp, Homo sapien
cttgacatcagggtaaagctcagag

SEQ ID NO: 6061895 - DNA, 25 bp, Homo sapien
gagatactcgtcaacacttgtgtac

SEQ ID NO: 6061896 - DNA, 25 bp, Homo sapien
ctcgtcaacacttgtgtacttgaca

SEQ ID NO: 6061897 - DNA, 25 bp, Homo sapien
acaccgcgtggtttatcgacagaac

SEQ ID NO: 6061898 - DNA, 25 bp, Homo sapien
gagaccaggctcgaactgaaccaat

SEQ ID NO: 6061899 - DNA, 25 bp, Homo sapien
atccaccgccttgatcgtataagca

SEQ ID NO: 6061900 - DNA, 25 bp, Homo sapien
ctctgggaggtgagtcttctcaaga

SEQ ID NO: 6061901 - DNA, 25 bp, Homo sapien
ggcttccacaccaaaggaaggctct

SEQ ID NO: 6061902 - DNA, 25 bp, Homo sapien
tcatcaagcgaaataactgagatac

SEQ ID NO: 6061903 - DNA, 25 bp, Homo sapien
agcaatatcttcctctttgttgatc

SEQ ID NO: 6061904 - DNA, 25 bp, Homo sapien
cttggatgcttttaagtagttgttc

SEQ ID NO: 6061905 - DNA, 25 bp, Homo sapien
atcttcctctttgttgatcacagct

SEQ ID NO: 6061906 - DNA, 25 bp, Homo sapien
caagaaccattcttttattgataca

SEQ ID NO: 6061907 - DNA, 25 bp, Homo sapien
agcgaaataactgagatactcgtca

SEQ ID NO: 6061908 - DNA, 25 bp, Homo sapien
cacaaacaccgcgtggtttatcgac

SEQ ID NO: 6061909 - DNA, 25 bp, Homo sapien
gtaaagctcagaggcttccacacca

SEQ ID NO: 6061910 - DNA, 25 bp, Homo sapien
gaatcggagactcttggatgctttt

SEQ ID NO: 6061911 - DNA, 25 bp, Homo sapien
aaaggaaggctctatactgatattg

SEQ ID NO: 6061912 - DNA, 25 bp, Homo sapien
tgaaactagcgcgtcatggtggtaa

SEQ ID NO: 6061913 - DNA, 25 bp, Homo sapien
atcagggtaaagctcagaggcttcc

SEQ ID NO: 6061914 - DNA, 25 bp, Homo sapien
atacacacacacattcaccattaca

SEQ ID NO: 6061915 - DNA, 25 bp, Homo sapien
agacttgccaatctttttctcccac

SEQ ID NO: 6061916 - DNA, 25 bp, Homo sapien
gttgttagaaggcttaatgtatagg

SEQ ID NO: 6061917 - DNA, 25 bp, Homo sapien
agaagtgagaccaggctcgaactga

SEQ ID NO: 6061918 - DNA, 25 bp, Homo sapien
tgatacagaacatgaaactagcgcg

SEQ ID NO: 6061919 - DNA, 25 bp, Homo sapien
gaggtgagtcttctcaagagacttg

SEQ ID NO: 6061920 - DNA, 25 bp, Homo sapien
taggatcatccaccgccttgatcgt

SEQ ID NO: 6061921 - DNA, 25 bp, Homo sapien
acacacattcaccattacaagaacc

SEQ ID NO: 6061922 - DNA, 25 bp, Homo sapien
tgtataggattttgttcagagtcct

SEQ ID NO: 6061923 - DNA, 25 bp, Homo sapien
tggtggtaaattacgtttataatga

SEQ ID NO: 6061924 - DNA, 25 bp, Homo sapien
ttttattgatacagaacatgaaact

SEQ ID NO: 6061925 - DNA, 25 bp, Homo sapien
ttcgttcatcgataaagtgttgtta

SEQ ID NO: 6061926 - DNA, 25 bp, Homo sapien
tccattcacaaacaccgcgtggttt

SEQ ID NO: 6061927 - DNA, 25 bp, Homo sapien
tataatgaagttcatcaagcgaaat

SEQ ID NO: 6061928 - DNA, 25 bp, Homo sapien
ttatcgacagaacaacattgatggg

SEQ ID NO: 6061929 - DNA, 25 bp, Homo sapien
ttgttcctctgggaggtgagtcttc

SEQ ID NO: 6061930 - DNA, 25 bp, Homo sapien
caacattgatgggaatcggagactc

SEQ ID NO: 6061931 - DNA, 25 bp, Homo sapien
cacaccaaaggaaggctctatactg

SEQ ID NO: 6061932 - DNA, 25 bp, Homo sapien
gagtcctaggatcatccaccgcctt

SEQ ID NO: 6061933 - DNA, 25 bp, Homo sapien
gcgtcatggtggtaaattacgttta

SEQ ID NO: 6061934 - DNA, 25 bp, Homo sapien
tgttgatcacagctttggcatttcc

SEQ ID NO: 6061935 - DNA, 25 bp, Homo sapien
gccaatctttttctcccacaaggtg

SEQ ID NO: 6061936 - DNA, 25 bp, Homo sapien
caaggtgactatttcgttcatcgat

SEQ ID NO: 6061937 - DNA, 25 bp, Homo sapien
atggtgactttgtctctaggaggag

SEQ ID NO: 6061938 - DNA, 25 bp, Homo sapien
gagactcttggatgcttttaagtag

SEQ ID NO: 6061939 - DNA, 25 bp, Homo sapien
tcacagctttggcatttccatcgcc

SEQ ID NO: 6061940 - DNA, 25 bp, Homo sapien
caagtagtaaccaccaaagcaaccg

SEQ ID NO: 6061941 - DNA, 25 bp, Homo sapien
ataactgagatactcgtcaacactt

SEQ ID NO: 6061942 - DNA, 25 bp, Homo sapien
cgtggtttatcgacagaacaacatt

SEQ ID NO: 6061943 - DNA, 25 bp, Homo sapien
gaactgaaccaatgttggcaagtag

SEQ ID NO: 6061944 - DNA, 25 bp, Homo sapien
agaacatgaaactagcgcgtcatgg

SEQ ID NO: 6061945 - DNA, 25 bp, Homo sapien
ggattttgttcagagtcctaggatc

SEQ ID NO: 6061946 - DNA, 25 bp, Homo sapien
ccaaagcaaccggtaacagcgtaag

SEQ ID NO: 6061947 - DNA, 25 bp, Homo sapien
taaagtgttgttagaaggcttaatg

SEQ ID NO: 6061948 - DNA, 25 bp, Homo sapien
gactatttcgttcatcgataaagtg

SEQ ID NO: 6061949 - DNA, 25 bp, Homo sapien
tacgtttataatgaagttcatcaag

SEQ ID NO: 6061950 - DNA, 25 bp, Homo sapien
aagagcacgtgatagggcgcaaagc

SEQ ID NO: 6061951 - DNA, 25 bp, Homo sapien
ccgatagaggttcatccaggccacc

SEQ ID NO: 6061952 - DNA, 25 bp, Homo sapien
tgatagggcgcaaagcagaccagca

SEQ ID NO: 6061953 - DNA, 25 bp, Homo sapien
cagaccagcacgatggcgatgaggc

SEQ ID NO: 6061954 - DNA, 25 bp, Homo sapien
tctccagggtgagcgaggcattggc

SEQ ID NO: 6061955 - DNA, 25 bp, Homo sapien
tgtggtatgcagaaaagacgcgctc

SEQ ID NO: 6061956 - DNA, 25 bp, Homo sapien
cttctcctggcgctcggtggacacg

SEQ ID NO: 6061957 - DNA, 25 bp, Homo sapien
aagcccacgaacacccgatagaggt

SEQ ID NO: 6061958 - DNA, 25 bp, Homo sapien
atgccccggtacgacagcagcatga

SEQ ID NO: 6061959 - DNA, 25 bp, Homo sapien
gcgccctcgttgaccaggcagtaga

SEQ ID NO: 6061960 - DNA, 25 bp, Homo sapien
aagacgcgctcctcgaagccgcagt

SEQ ID NO: 6061961 - DNA, 25 bp, Homo sapien
tgtgctgttcctcttggaggtgagt

SEQ ID NO: 6061962 - DNA, 25 bp, Homo sapien
cagcagtagcgcttcaggcccaggg

SEQ ID NO: 6061963 - DNA, 25 bp, Homo sapien
gacgatcttgccacaagtgaagcag

SEQ ID NO: 6061964 - DNA, 25 bp, Homo sapien
gcggcagcagtagcgcttcaggccc

SEQ ID NO: 6061965 - DNA, 25 bp, Homo sapien
gccgacgatcttgccacaagtgaag

SEQ ID NO: 6061966 - DNA, 25 bp, Homo sapien
tgaagcagcgtacagggatgatcat

SEQ ID NO: 6061967 - DNA, 25 bp, Homo sapien
aggtaagcctcccacttgttgccga

SEQ ID NO: 6061968 - DNA, 25 bp, Homo sapien
acaagtgaagcagcgtacagggatg

SEQ ID NO: 6061969 - DNA, 25 bp, Homo sapien
gttgccgacgatcttgccacaagtg

SEQ ID NO: 6061970 - DNA, 25 bp, Homo sapien
ttgttgccgacgatcttgccacaag

SEQ ID NO: 6061971 - DNA, 25 bp, Homo sapien
gtaagcctcccacttgttgccgacg

SEQ ID NO: 6061972 - DNA, 25 bp, Homo sapien
agtgaagcagcgtacagggatgatc

SEQ ID NO: 6061973 - DNA, 25 bp, Homo sapien
agccccaggtaagcctcccacttgt

SEQ ID NO: 6061974 - DNA, 25 bp, Homo sapien
tgtctccttactggtgttctctgtg

SEQ ID NO: 6061975 - DNA, 25 bp, Homo sapien
ccaggaacccaatttccagggcatt

SEQ ID NO: 6061976 - DNA, 25 bp, Homo sapien
gttggccgggacacataacattcca

SEQ ID NO: 6061977 - DNA, 25 bp, Homo sapien
tcatacaaccctgggacactaaagc

SEQ ID NO: 6061978 - DNA, 25 bp, Homo sapien
gggtagcggttacactcatacaacc

SEQ ID NO: 6061979 - DNA, 25 bp, Homo sapien
ggcatttcggaacaccacttggata

SEQ ID NO: 6061980 - DNA, 25 bp, Homo sapien
ccacttggataatgtagaagcggga

SEQ ID NO: 6061981 - DNA, 25 bp, Homo sapien
tccttaacctctaaacaatctggct

SEQ ID NO: 6061982 - DNA, 25 bp, Homo sapien
gattttgatgcagtgcgtagacctg

SEQ ID NO: 6061983 - DNA, 25 bp, Homo sapien
cagatgccacttacagcaaacatga

SEQ ID NO: 6061984 - DNA, 25 bp, Homo sapien
tagaagcgggagatgccttcctgcc

SEQ ID NO: 6061985 - DNA, 25 bp, Homo sapien
ggcaggtccttgttacgaatctcat

SEQ ID NO: 6061986 - DNA, 25 bp, Homo sapien
tctgggatctaggtgtctgaagcag

SEQ ID NO: 6061987 - DNA, 25 bp, Homo sapien
atgcatatgcgcctgagttctggga

SEQ ID NO: 6061988 - DNA, 25 bp, Homo sapien
tgctaggtagccgagagttctctgc

SEQ ID NO: 6061989 - DNA, 25 bp, Homo sapien
tctgtacaaagagtcaccttcgtat

SEQ ID NO: 6061990 - DNA, 25 bp, Homo sapien
tgtaaaagaagatatacccagagtg

SEQ ID NO: 6061991 - DNA, 25 bp, Homo sapien
tctaatcagtccctagctgttgctg

SEQ ID NO: 6061992 - DNA, 25 bp, Homo sapien
ccctgcctgtgtgctaggtagccga

SEQ ID NO: 6061993 - DNA, 25 bp, Homo sapien
catcagttggtctagagagtgaccc

SEQ ID NO: 6061994 - DNA, 25 bp, Homo sapien
ctagaatctccatctgattgctggc

SEQ ID NO: 6061995 - DNA, 25 bp, Homo sapien
ccgtcaaaacgtgaagagcaccatt

SEQ ID NO: 6061996 - DNA, 25 bp, Homo sapien
gagcaccattctaatcttgcaggga

SEQ ID NO: 6061997 - DNA, 25 bp, Homo sapien
tcattctgagtgaagtacaggattc

SEQ ID NO: 6061998 - DNA, 25 bp, Homo sapien
tttgccaaaacatgatattgaaact

SEQ ID NO: 6061999 - DNA, 25 bp, Homo sapien
tcaaaactctcgaagcctagaggat

SEQ ID NO: 6062000 - DNA, 25 bp, Homo sapien
gccaaaacatgatattgaaacttga

SEQ ID NO: 6062001 - DNA, 25 bp, Homo sapien
caaaacatgatattgaaacttgaga

SEQ ID NO: 6062002 - DNA, 25 bp, Homo sapien
aaacatgatattgaaacttgagatc

SEQ ID NO: 6062003 - DNA, 25 bp, Homo sapien
ttgccaaaacatgatattgaaactt

SEQ ID NO: 6062004 - DNA, 25 bp, Homo sapien
ggtcaaaactctcgaagcctagagg

SEQ ID NO: 6062005 - DNA, 25 bp, Homo sapien
ccaaaacatgatattgaaacttgag

SEQ ID NO: 6062006 - DNA, 25 bp, Homo sapien
tgccaaaacatgatattgaaacttg

SEQ ID NO: 6062007 - DNA, 25 bp, Homo sapien
aggtcaaaactctcgaagcctagag

SEQ ID NO: 6062008 - DNA, 25 bp, Homo sapien
gtcaaaactctcgaagcctagagga

SEQ ID NO: 6062009 - DNA, 25 bp, Homo sapien
ccacaaggatgcctggttcttcgtt

SEQ ID NO: 6062010 - DNA, 25 bp, Homo sapien
gaggcctaaaatgagcgcactttgc

SEQ ID NO: 6062011 - DNA, 25 bp, Homo sapien
gggcagcagcaagggttgcgtgcgt

SEQ ID NO: 6062012 - DNA, 25 bp, Homo sapien
gaacaagtgcttttgagggccgccg

SEQ ID NO: 6062013 - DNA, 25 bp, Homo sapien
taaaatgagcgcactttgcaatgcc

SEQ ID NO: 6062014 - DNA, 25 bp, Homo sapien
gctccggccgggtagtgctaccatt

SEQ ID NO: 6062015 - DNA, 25 bp, Homo sapien
gaaggaacaagtgcttttgagggcc

SEQ ID NO: 6062016 - DNA, 25 bp, Homo sapien
cagagaggaggcctaaaatgagcgc

SEQ ID NO: 6062017 - DNA, 25 bp, Homo sapien
gagaggaggcctaaaatgagcgcac

SEQ ID NO: 6062018 - DNA, 25 bp, Homo sapien
gttgcgtgcgttggcgcggctcgga

SEQ ID NO: 6062019 - DNA, 25 bp, Homo sapien
aagcagaaggaacaagtgcttttga

SEQ ID NO: 6062020 - DNA, 25 bp, Homo sapien
agtgctaccattctagtattctttg

SEQ ID NO: 6062021 - DNA, 25 bp, Homo sapien
agcgcactttgcaatgcccacttcg

SEQ ID NO: 6062022 - DNA, 25 bp, Homo sapien
cttcaccaacaggaactatgacctc

SEQ ID NO: 6062023 - DNA, 25 bp, Homo sapien
agaatttctatcaccagcaacagca

SEQ ID NO: 6062024 - DNA, 25 bp, Homo sapien
tgtccccgagccgccgctccgggct

SEQ ID NO: 6062025 - DNA, 25 bp, Homo sapien
cgggctctgctctccatcctatgtt

SEQ ID NO: 6062026 - DNA, 25 bp, Homo sapien
ctcggagaagctggcctcctaccag

SEQ ID NO: 6062027 - DNA, 25 bp, Homo sapien
cccgcgcccagtgaggatatctgga

SEQ ID NO: 6062028 - DNA, 25 bp, Homo sapien
acttctccaccgccgatcatcagct

SEQ ID NO: 6062029 - DNA, 25 bp, Homo sapien
aacagcagagcgagctgcagccgcc

SEQ ID NO: 6062030 - DNA, 25 bp, Homo sapien
cagcagacagccacgacgatgcccc

SEQ ID NO: 6062031 - DNA, 25 bp, Homo sapien
gacctcaccgccgccgcgtccgagt

SEQ ID NO: 6062032 - DNA, 25 bp, Homo sapien
ggactgtatgtggagcggtttctca

SEQ ID NO: 6062033 - DNA, 25 bp, Homo sapien
ccgatcatcagctggagatgatgac

SEQ ID NO: 6062034 - DNA, 25 bp, Homo sapien
tgaacaagagcttcatctgcgatcc

SEQ ID NO: 6062035 - DNA, 25 bp, Homo sapien
gaggatatctggaagaaattcgagc

SEQ ID NO: 6062036 - DNA, 25 bp, Homo sapien
ggctgcgcgcaaagacagcaccagc

SEQ ID NO: 6062037 - DNA, 25 bp, Homo sapien
catctgcgatcctgacgacgagacc

SEQ ID NO: 6062038 - DNA, 25 bp, Homo sapien
atctggaagaaattcgagctgcttc

SEQ ID NO: 6062039 - DNA, 25 bp, Homo sapien
caagaacatcatcatccaggactgt

SEQ ID NO: 6062040 - DNA, 25 bp, Homo sapien
tctatcaccagcaacagcagagcga

SEQ ID NO: 6062041 - DNA, 25 bp, Homo sapien
gaactatgacctcgactacgactcc

SEQ ID NO: 6062042 - DNA, 25 bp, Homo sapien
accgccgccgcgtccgagtgcattg

SEQ ID NO: 6062043 - DNA, 25 bp, Homo sapien
gcccctgtccccgagccgccgctcc

SEQ ID NO: 6062044 - DNA, 25 bp, Homo sapien
tcatctgcgacgaggaagagaattt

SEQ ID NO: 6062045 - DNA, 25 bp, Homo sapien
gcgacgaggaagagaatttctatca

SEQ ID NO: 6062046 - DNA, 25 bp, Homo sapien
cgagccgccgctccgggctctgctc

SEQ ID NO: 6062047 - DNA, 25 bp, Homo sapien
gtggcaacttctccaccgccgatca

SEQ ID NO: 6062048 - DNA, 25 bp, Homo sapien
agccgcccgcgcccagtgaggatat

SEQ ID NO: 6062049 - DNA, 25 bp, Homo sapien
tgatgaccgagttacttggaggaga

SEQ ID NO: 6062050 - DNA, 25 bp, Homo sapien
catccaggactgtatgtggagcggt

SEQ ID NO: 6062051 - DNA, 25 bp, Homo sapien
gctggtctcggagaagctggcctcc

SEQ ID NO: 6062052 - DNA, 25 bp, Homo sapien
ccgagttacttggaggagacatggt

SEQ ID NO: 6062053 - DNA, 25 bp, Homo sapien
gatgcccctcaacgtgaacttcacc

SEQ ID NO: 6062054 - DNA, 25 bp, Homo sapien
cccgcccgcgggcacagcgtctgct

SEQ ID NO: 6062055 - DNA, 25 bp, Homo sapien
ctgtacctgcaggacctcaccgccg

SEQ ID NO: 6062056 - DNA, 25 bp, Homo sapien
tctgctctccatcctatgttgcggt

SEQ ID NO: 6062057 - DNA, 25 bp, Homo sapien
tccagcctgtacctgcaggacctca

SEQ ID NO: 6062058 - DNA, 25 bp, Homo sapien
cctcaacgtgaacttcaccaacagg

SEQ ID NO: 6062059 - DNA, 25 bp, Homo sapien
tacagccctatttcatctgcgacga

SEQ ID NO: 6062060 - DNA, 25 bp, Homo sapien
tctccccaagggaagacgatgacgg

SEQ ID NO: 6062061 - DNA, 25 bp, Homo sapien
ccgctccgggctctgctctccatcc

SEQ ID NO: 6062062 - DNA, 25 bp, Homo sapien
gagcggtttctcagccgctgccaag

SEQ ID NO: 6062063 - DNA, 25 bp, Homo sapien
accagcaacagcagagcgagctgca

SEQ ID NO: 6062064 - DNA, 25 bp, Homo sapien
tacttggaggagacatggtgaacaa

SEQ ID NO: 6062065 - DNA, 25 bp, Homo sapien
cgatcctgacgacgagaccttcatc

SEQ ID NO: 6062066 - DNA, 25 bp, Homo sapien
gcgcaaagacagcaccagcctgagc

SEQ ID NO: 6062067 - DNA, 25 bp, Homo sapien
gactacgactccgtacagccctatt

SEQ ID NO: 6062068 - DNA, 25 bp, Homo sapien
ggcctcctaccaggctgcgcgcaaa

SEQ ID NO: 6062069 - DNA, 25 bp, Homo sapien
tccacctccagcctgtacctgcagg

SEQ ID NO: 6062070 - DNA, 25 bp, Homo sapien
catcatcatccaggactgtatgtgg

SEQ ID NO: 6062071 - DNA, 25 bp, Homo sapien
ctgagccccgcccgcgggcacagcg

SEQ ID NO: 6062072 - DNA, 25 bp, Homo sapien
gccgcgtccgagtgcattgacccct

SEQ ID NO: 6062073 - DNA, 25 bp, Homo sapien
tccttctccccaagggaagacgatg

SEQ ID NO: 6062074 - DNA, 25 bp, Homo sapien
atgacggcggcggtggcaacttctc

SEQ ID NO: 6062075 - DNA, 25 bp, Homo sapien
agccgctgccaagctggtctcggag

SEQ ID NO: 6062076 - DNA, 25 bp, Homo sapien
atcagctggagatgatgaccgagtt

SEQ ID NO: 6062077 - DNA, 25 bp, Homo sapien
ttgcggtcgctacgtccttctcccc

SEQ ID NO: 6062078 - DNA, 25 bp, Homo sapien
caacaggaactatgacctcgactac

SEQ ID NO: 6062079 - DNA, 25 bp, Homo sapien
aggaagagaatttctatcaccagca

SEQ ID NO: 6062080 - DNA, 25 bp, Homo sapien
cagcctgagccccgcccgcgggcac

SEQ ID NO: 6062081 - DNA, 25 bp, Homo sapien
acatggtgaacaagagcttcatctg

SEQ ID NO: 6062082 - DNA, 25 bp, Homo sapien
cctatttcatctgcgacgaggaaga

SEQ ID NO: 6062083 - DNA, 25 bp, Homo sapien
aagacgatgacggcggcggtggcaa

SEQ ID NO: 6062084 - DNA, 25 bp, Homo sapien
cccagtgaggatatctggaagaaat

SEQ ID NO: 6062085 - DNA, 25 bp, Homo sapien
cgcgggcacagcgtctgctccacct

SEQ ID NO: 6062086 - DNA, 25 bp, Homo sapien
aagaaattcgagctgcttcccaccc

SEQ ID NO: 6062087 - DNA, 25 bp, Homo sapien
tatgtggagcggtttctcagccgct

SEQ ID NO: 6062088 - DNA, 25 bp, Homo sapien
ggcggcggtggcaacttctccaccg

SEQ ID NO: 6062089 - DNA, 25 bp, Homo sapien
ctccatcctatgttgcggtcgctac

SEQ ID NO: 6062090 - DNA, 25 bp, Homo sapien
cttcatcaagaacatcatcatccag

SEQ ID NO: 6062091 - DNA, 25 bp, Homo sapien
cctatgttgcggtcgctacgtcctt

SEQ ID NO: 6062092 - DNA, 25 bp, Homo sapien
tgacgacgagaccttcatcaagaac

SEQ ID NO: 6062093 - DNA, 25 bp, Homo sapien
acagccacgacgatgcccctcaacg

SEQ ID NO: 6062094 - DNA, 25 bp, Homo sapien
cgagaccttcatcaagaacatcatc

SEQ ID NO: 6062095 - DNA, 25 bp, Homo sapien
acgacgatgcccctcaacgtgaact

SEQ ID NO: 6062096 - DNA, 25 bp, Homo sapien
tttctcagccgctgccaagctggtc

SEQ ID NO: 6062097 - DNA, 25 bp, Homo sapien
cacagcgtctgctccacctccagcc

SEQ ID NO: 6062098 - DNA, 25 bp, Homo sapien
ctgcaggacctcaccgccgccgcgt

SEQ ID NO: 6062099 - DNA, 25 bp, Homo sapien
cgtgaacttcaccaacaggaactat

SEQ ID NO: 6062100 - DNA, 25 bp, Homo sapien
gtctgctccacctccagcctgtacc

SEQ ID NO: 6062101 - DNA, 25 bp, Homo sapien
agagcttcatctgcgatcctgacga

SEQ ID NO: 6062102 - DNA, 25 bp, Homo sapien
gaggagacatggtgaacaagagctt

SEQ ID NO: 6062103 - DNA, 25 bp, Homo sapien
tgccaagctggtctcggagaagctg

SEQ ID NO: 6062104 - DNA, 25 bp, Homo sapien
ccaccgccgatcatcagctggagat

SEQ ID NO: 6062105 - DNA, 25 bp, Homo sapien
gactccgtacagccctatttcatct

SEQ ID NO: 6062106 - DNA, 25 bp, Homo sapien
tggagatgatgaccgagttacttgg

SEQ ID NO: 6062107 - DNA, 25 bp, Homo sapien
gaagctggcctcctaccaggctgcg

SEQ ID NO: 6062108 - DNA, 25 bp, Homo sapien
caagggaagacgatgacggcggcgg

SEQ ID NO: 6062109 - DNA, 25 bp, Homo sapien
ctaccaggctgcgcgcaaagacagc

SEQ ID NO: 6062110 - DNA, 25 bp, Homo sapien
tcgctacgtccttctccccaaggga

SEQ ID NO: 6062111 - DNA, 25 bp, Homo sapien
tgacctcgactacgactccgtacag

SEQ ID NO: 6062112 - DNA, 25 bp, Homo sapien
atcctactgtgcaattcccatctga

SEQ ID NO: 6062113 - DNA, 25 bp, Homo sapien
ataacagacacgtcctcataacatt

SEQ ID NO: 6062114 - DNA, 25 bp, Homo sapien
ggaaataacagacacgtcctcataa

SEQ ID NO: 6062115 - DNA, 25 bp, Homo sapien
taacagacacgtcctcataacatta

SEQ ID NO: 6062116 - DNA, 25 bp, Homo sapien
aacagacacgtcctcataacattaa

SEQ ID NO: 6062117 - DNA, 25 bp, Homo sapien
acagacacgtcctcataacattaaa

SEQ ID NO: 6062118 - DNA, 25 bp, Homo sapien
cagacacgtcctcataacattaaac

SEQ ID NO: 6062119 - DNA, 25 bp, Homo sapien
gaaataacagacacgtcctcataac

SEQ ID NO: 6062120 - DNA, 25 bp, Homo sapien
aaataacagacacgtcctcataaca

SEQ ID NO: 6062121 - DNA, 25 bp, Homo sapien
aataacagacacgtcctcataacat

SEQ ID NO: 6062122 - DNA, 25 bp, Homo sapien
cctactgtgcaattcccatctgagg

SEQ ID NO: 6062123 - DNA, 25 bp, Homo sapien
tcctactgtgcaattcccatctgag

SEQ ID NO: 6062124 - DNA, 25 bp, Homo sapien
agtgaggtggtagaaatatcatccc

SEQ ID NO: 6062125 - DNA, 25 bp, Homo sapien
cataagactattactactaaaggtc

SEQ ID NO: 6062126 - DNA, 25 bp, Homo sapien
taacaaacttactgttcagcatcat

SEQ ID NO: 6062127 - DNA, 25 bp, Homo sapien
tctttaacatggcaccatggatgaa

SEQ ID NO: 6062128 - DNA, 25 bp, Homo sapien
catcatattcaagcctaaaaggaag

SEQ ID NO: 6062129 - DNA, 25 bp, Homo sapien
cttcaaggctcaatggcaagagacc

SEQ ID NO: 6062130 - DNA, 25 bp, Homo sapien
tactgttcagcatcatattcaagcc

SEQ ID NO: 6062131 - DNA, 25 bp, Homo sapien
gggaaccagttctaatagtcctcaa

SEQ ID NO: 6062132 - DNA, 25 bp, Homo sapien
ccattatagttactgcacataagac

SEQ ID NO: 6062133 - DNA, 25 bp, Homo sapien
caagagaccacctataacctcttca

SEQ ID NO: 6062134 - DNA, 25 bp, Homo sapien
tcactcagtgtgtcaccaaaggcag

SEQ ID NO: 6062135 - DNA, 25 bp, Homo sapien
ggcccagtccctttcactcagtgtg

SEQ ID NO: 6062136 - DNA, 25 bp, Homo sapien
gaaatggctaatttgtcttgctgct

SEQ ID NO: 6062137 - DNA, 25 bp, Homo sapien
tgtgcagttaatgcagggaagtgtc

SEQ ID NO: 6062138 - DNA, 25 bp, Homo sapien
tcttgctgcttataacagggagaaa

SEQ ID NO: 6062139 - DNA, 25 bp, Homo sapien
gaagtttgagagtgaaatggctaat

SEQ ID NO: 6062140 - DNA, 25 bp, Homo sapien
gtgtctaaaatatgtggttctgcta

SEQ ID NO: 6062141 - DNA, 25 bp, Homo sapien
atctctagcgttaaggaaaaatcca

SEQ ID NO: 6062142 - DNA, 25 bp, Homo sapien
gatttgtagcaatctctagcgttaa

SEQ ID NO: 6062143 - DNA, 25 bp, Homo sapien
ggttctgctaagtaaatggttctca

SEQ ID NO: 6062144 - DNA, 25 bp, Homo sapien
taaatggttctcaaacagccttccc

SEQ ID NO: 6062145 - DNA, 25 bp, Homo sapien
gaatgtgatcattagtgaagtttga

SEQ ID NO: 6062146 - DNA, 25 bp, Homo sapien
aactcctgaatgtgtcgttgttgga

SEQ ID NO: 6062147 - DNA, 25 bp, Homo sapien
gggcatttggtcttctagagttcct

SEQ ID NO: 6062148 - DNA, 25 bp, Homo sapien
tcctcagcgcaggtccgggattcgg

SEQ ID NO: 6062149 - DNA, 25 bp, Homo sapien
accgctggccacagatgaaccgcct

SEQ ID NO: 6062150 - DNA, 25 bp, Homo sapien
ggcccccgcatatagcagggccagg

SEQ ID NO: 6062151 - DNA, 25 bp, Homo sapien
gatgaaccgcctcctcagcgcaggt

SEQ ID NO: 6062152 - DNA, 25 bp, Homo sapien
ttggcaatcgttttcgtaagagtca

SEQ ID NO: 6062153 - DNA, 25 bp, Homo sapien
tctcgcagcaacaagggaagagccg

SEQ ID NO: 6062154 - DNA, 25 bp, Homo sapien
ctcgctctcgcagcaacaagggaag

SEQ ID NO: 6062155 - DNA, 25 bp, Homo sapien
gcaatcgttttcgtaagagtcagaa

SEQ ID NO: 6062156 - DNA, 25 bp, Homo sapien
tcagaaaaattaggccggtttcaca

SEQ ID NO: 6062157 - DNA, 25 bp, Homo sapien
agcgcgggtcccgaagcaccgctgg

SEQ ID NO: 6062158 - DNA, 25 bp, Homo sapien
aagtagaagtatgtgttggcaatcg

SEQ ID NO: 6062159 - DNA, 25 bp, Homo sapien
taaaagtagaagtatgtgttggcaa

SEQ ID NO: 6062160 - DNA, 25 bp, Homo sapien
gattcgggtttcgcgattggtaatg

SEQ ID NO: 6062161 - DNA, 25 bp, Homo sapien
ttcgggtttcgcgattggtaatggc

SEQ ID NO: 6062162 - DNA, 25 bp, Homo sapien
tcgggtttcgcgattggtaatggcc

SEQ ID NO: 6062163 - DNA, 25 bp, Homo sapien
attcgggtttcgcgattggtaatgg

SEQ ID NO: 6062164 - DNA, 25 bp, Homo sapien
aatcagcgaatactcccggaagatg

SEQ ID NO: 6062165 - DNA, 25 bp, Homo sapien
gacatggttcttcaatttactccaa

SEQ ID NO: 6062166 - DNA, 25 bp, Homo sapien
gagtgaatggcatccaaccgctgct

SEQ ID NO: 6062167 - DNA, 25 bp, Homo sapien
gaagatgagtttgtactccttcagg

SEQ ID NO: 6062168 - DNA, 25 bp, Homo sapien
ccttcgctgatggtagtggtcattt

SEQ ID NO: 6062169 - DNA, 25 bp, Homo sapien
ctgtcaatgtcaacggcaagctgga

SEQ ID NO: 6062170 - DNA, 25 bp, Homo sapien
gaaggccgagaggaaagcctttctg

SEQ ID NO: 6062171 - DNA, 25 bp, Homo sapien
caaatgcgagtgtaggaaaatgata

SEQ ID NO: 6062172 - DNA, 25 bp, Homo sapien
gaaaatgatataatgcccagaggca

SEQ ID NO: 6062173 - DNA, 25 bp, Homo sapien
tgatctcaatcagcgaatactcccg

SEQ ID NO: 6062174 - DNA, 25 bp, Homo sapien
gaatgtcacggacacctcagagtga

SEQ ID NO: 6062175 - DNA, 25 bp, Homo sapien
gacagtgccatagatgctcttctcc

SEQ ID NO: 6062176 - DNA, 25 bp, Homo sapien
tagtttcagttctcatatcaccaaa

SEQ ID NO: 6062177 - DNA, 25 bp, Homo sapien
tctgtcagactgtctagtgtcaatc

SEQ ID NO: 6062178 - DNA, 25 bp, Homo sapien
cgttgcaaacgaagtgaaaagcagt

SEQ ID NO: 6062179 - DNA, 25 bp, Homo sapien
ctcactgtctggcagtggtttggaa

SEQ ID NO: 6062180 - DNA, 25 bp, Homo sapien
caaacggtccacgttgcaaacgaag

SEQ ID NO: 6062181 - DNA, 25 bp, Homo sapien
gaccccttctgtcagactgtctagt

SEQ ID NO: 6062182 - DNA, 25 bp, Homo sapien
gtctttacattgaataggtagaaga

SEQ ID NO: 6062183 - DNA, 25 bp, Homo sapien
tcagaccccttctgtcagactgtct

SEQ ID NO: 6062184 - DNA, 25 bp, Homo sapien
tatcaccaaacggtccacgttgcaa

SEQ ID NO: 6062185 - DNA, 25 bp, Homo sapien
tcctgaatatctccaagatccctat

SEQ ID NO: 6062186 - DNA, 25 bp, Homo sapien
cggtccacgttgcaaacgaagtgaa

SEQ ID NO: 6062187 - DNA, 25 bp, Homo sapien
tcatatcaccaaacggtccacgttg

SEQ ID NO: 6062188 - DNA, 25 bp, Homo sapien
ctctcttcggttgtgcatatttgga

SEQ ID NO: 6062189 - DNA, 25 bp, Homo sapien
catcggtctggacagagaaagtgct

SEQ ID NO: 6062190 - DNA, 25 bp, Homo sapien
aactacagtacagagtcaaggtaag

SEQ ID NO: 6062191 - DNA, 25 bp, Homo sapien
tgagtctgatatgtggtaggtttcc

SEQ ID NO: 6062192 - DNA, 25 bp, Homo sapien
tcaaggtaagagtcacgtaaggctc

SEQ ID NO: 6062193 - DNA, 25 bp, Homo sapien
taagttatggacacgctgagtctga

SEQ ID NO: 6062194 - DNA, 25 bp, Homo sapien
ggttctcaggatataacatcggtct

SEQ ID NO: 6062195 - DNA, 25 bp, Homo sapien
ttcaaaaactcaattaatggctggg

SEQ ID NO: 6062196 - DNA, 25 bp, Homo sapien
catctgggccaagcttgaagactgc

SEQ ID NO: 6062197 - DNA, 25 bp, Homo sapien
tgcagcccgggaacatagattcagg

SEQ ID NO: 6062198 - DNA, 25 bp, Homo sapien
taaggctctgtcgtactctcttcgg

SEQ ID NO: 6062199 - DNA, 25 bp, Homo sapien
gtataaatagagagttcatctgggc

SEQ ID NO: 6062200 - DNA, 25 bp, Homo sapien
cacatatccatacacaagataacag

SEQ ID NO: 6062201 - DNA, 25 bp, Homo sapien
tccccagtgacctggtttcatctgc

SEQ ID NO: 6062202 - DNA, 25 bp, Homo sapien
gttaacaggatagaagtcaacacac

SEQ ID NO: 6062203 - DNA, 25 bp, Homo sapien
ggccccacagggaaccttttgctca

SEQ ID NO: 6062204 - DNA, 25 bp, Homo sapien
tgctctcttagcaatatgctccctt

SEQ ID NO: 6062205 - DNA, 25 bp, Homo sapien
cacagggaaccttttgctcaccggg

SEQ ID NO: 6062206 - DNA, 25 bp, Homo sapien
ttttatcatatgtgagcatcaacaa

SEQ ID NO: 6062207 - DNA, 25 bp, Homo sapien
ttcatcccagtactgcctatttggg

SEQ ID NO: 6062208 - DNA, 25 bp, Homo sapien
tttcattaacagatcttcatcccag

SEQ ID NO: 6062209 - DNA, 25 bp, Homo sapien
tgaggtattccagcactttcattaa

SEQ ID NO: 6062210 - DNA, 25 bp, Homo sapien
tacacaagataacagctcagaggaa

SEQ ID NO: 6062211 - DNA, 25 bp, Homo sapien
gccacagccattagatatactatta

SEQ ID NO: 6062212 - DNA, 25 bp, Homo sapien
ttcctggctaataacttcatcctct

SEQ ID NO: 6062213 - DNA, 25 bp, Homo sapien
gactcgagccttatccatgacagtg

SEQ ID NO: 6062214 - DNA, 25 bp, Homo sapien
tcttctctttttacgcaagagttgg

SEQ ID NO: 6062215 - DNA, 25 bp, Homo sapien
cagcaaggcatttattgtgcctgca

SEQ ID NO: 6062216 - DNA, 25 bp, Homo sapien
atttgcagcaagacttgggtccttt

SEQ ID NO: 6062217 - DNA, 25 bp, Homo sapien
tattgtgcctgcacccactgaatgg

SEQ ID NO: 6062218 - DNA, 25 bp, Homo sapien
gcaagacttgggtccttttccagta

SEQ ID NO: 6062219 - DNA, 25 bp, Homo sapien
gcctgcacccactgaatggataaaa

SEQ ID NO: 6062220 - DNA, 25 bp, Homo sapien
tctaataggcaatccagcaaggcat

SEQ ID NO: 6062221 - DNA, 25 bp, Homo sapien
taataacttcatcctctaataggca

SEQ ID NO: 6062222 - DNA, 25 bp, Homo sapien
ggtcttcttcacagagatgcttgat

SEQ ID NO: 6062223 - DNA, 25 bp, Homo sapien
ggtcaatcaagactcgagccttatc

SEQ ID NO: 6062224 - DNA, 25 bp, Homo sapien
gacggcggcgggtttgtcaatacac

SEQ ID NO: 6062225 - DNA, 25 bp, Homo sapien
ctggaaaggctgttaggtgaacgtc

SEQ ID NO: 6062226 - DNA, 25 bp, Homo sapien
taggtgaacgtcagaacagacccca

SEQ ID NO: 6062227 - DNA, 25 bp, Homo sapien
ccgctgcgggaaaggacagctcagc

SEQ ID NO: 6062228 - DNA, 25 bp, Homo sapien
tgtatggcaggcgagtaatatctca

SEQ ID NO: 6062229 - DNA, 25 bp, Homo sapien
ttcccttgcgggatcatcgttgccg

SEQ ID NO: 6062230 - DNA, 25 bp, Homo sapien
cagaccccaaggtatagattccacc

SEQ ID NO: 6062231 - DNA, 25 bp, Homo sapien
taatatctcaacagaactgttgcca

SEQ ID NO: 6062232 - DNA, 25 bp, Homo sapien
ctggtccatacaatagcacagctga

SEQ ID NO: 6062233 - DNA, 25 bp, Homo sapien
tcccgtgagcttcccttgcgggatc

SEQ ID NO: 6062234 - DNA, 25 bp, Homo sapien
tttgtcaatacacgcaggacccctg

SEQ ID NO: 6062235 - DNA, 25 bp, Homo sapien
atcgttgccgcgcaccgggtgctca

SEQ ID NO: 6062236 - DNA, 25 bp, Homo sapien
cagtgtccttcgtgatcatgatgac

SEQ ID NO: 6062237 - DNA, 25 bp, Homo sapien
agatccctgacccacatgcatcggg

SEQ ID NO: 6062238 - DNA, 25 bp, Homo sapien
gacctttctgacgacagtaaacaca

SEQ ID NO: 6062239 - DNA, 25 bp, Homo sapien
tttctcagtgtccttcgtgatcatg

SEQ ID NO: 6062240 - DNA, 25 bp, Homo sapien
tgctgaaaaccatcggactcccagg

SEQ ID NO: 6062241 - DNA, 25 bp, Homo sapien
tcccacatgttcacagctaatctca

SEQ ID NO: 6062242 - DNA, 25 bp, Homo sapien
aaacacaagacctttctgacgacag

SEQ ID NO: 6062243 - DNA, 25 bp, Homo sapien
tatataacgggagatttggatgaaa

SEQ ID NO: 6062244 - DNA, 25 bp, Homo sapien
ccaaaacacaagacctttctgacga

SEQ ID NO: 6062245 - DNA, 25 bp, Homo sapien
tgtccatttggggttcccgccagct

SEQ ID NO: 6062246 - DNA, 25 bp, Homo sapien
ggcaaatgtacagtttgtgtccatt

SEQ ID NO: 6062247 - DNA, 25 bp, Homo sapien
aaaaaacccattggcaaatgtacag

SEQ ID NO: 6062248 - DNA, 25 bp, Homo sapien
gatgaatcacttgcgtgaacacttt

SEQ ID NO: 6062249 - DNA, 25 bp, Homo sapien
caatggtattggttcaaaagatgag

SEQ ID NO: 6062250 - DNA, 25 bp, Homo sapien
gtcacttgatgaatcacttgcgtga

SEQ ID NO: 6062251 - DNA, 25 bp, Homo sapien
tattggttcaaaagatgagtcactt

SEQ ID NO: 6062252 - DNA, 25 bp, Homo sapien
tgaacactttcaggtgtacgaacaa

SEQ ID NO: 6062253 - DNA, 25 bp, Homo sapien
ttaggtgagtaagggatacactgag

SEQ ID NO: 6062254 - DNA, 25 bp, Homo sapien
gagtaagggatacactgagttttaa

SEQ ID NO: 6062255 - DNA, 25 bp, Homo sapien
tcaggtgtacgaacaaattttcgaa

SEQ ID NO: 6062256 - DNA, 25 bp, Homo sapien
cttcgatttgcaagttccacagcat

SEQ ID NO: 6062257 - DNA, 25 bp, Homo sapien
atggtcaagagaatctattcctgat

SEQ ID NO: 6062258 - DNA, 25 bp, Homo sapien
aagagaatctattcctgatttatcc

SEQ ID NO: 6062259 - DNA, 25 bp, Homo sapien
ggttcaaaagatgagtcacttgatg

SEQ ID NO: 6062260 - DNA, 25 bp, Homo sapien
cgtttgggcatgtagaacttgcccc

SEQ ID NO: 6062261 - DNA, 25 bp, Homo sapien
tggcttaagagctacccaaagactt

SEQ ID NO: 6062262 - DNA, 25 bp, Homo sapien
ggctcagtactttccgtatgcccag

SEQ ID NO: 6062263 - DNA, 25 bp, Homo sapien
catgttggcagtggctattcgctca

SEQ ID NO: 6062264 - DNA, 25 bp, Homo sapien
tactttccgtatgcccagcatgttg

SEQ ID NO: 6062265 - DNA, 25 bp, Homo sapien
tggctattcgctcaaatgtccaggg

SEQ ID NO: 6062266 - DNA, 25 bp, Homo sapien
caaatgctgctccttagttatggct

SEQ ID NO: 6062267 - DNA, 25 bp, Homo sapien
tatatacagttatctcctacactca

SEQ ID NO: 6062268 - DNA, 25 bp, Homo sapien
ctggttgttacgttctctttcctct

SEQ ID NO: 6062269 - DNA, 25 bp, Homo sapien
gcagaatccttctttcagtagccta

SEQ ID NO: 6062270 - DNA, 25 bp, Homo sapien
tccccttgtgggtcaagtcatatgg

SEQ ID NO: 6062271 - DNA, 25 bp, Homo sapien
catgtagaacttgccccagtatttc

SEQ ID NO: 6062272 - DNA, 25 bp, Homo sapien
gagtacttaagtgctagtggttaca

SEQ ID NO: 6062273 - DNA, 25 bp, Homo sapien
aatggttagtaaaaatagcattcag

SEQ ID NO: 6062274 - DNA, 25 bp, Homo sapien
aatgctgtcccttcaagaccttgtt

SEQ ID NO: 6062275 - DNA, 25 bp, Homo sapien
taagaatcaggagtacttaagtgct

SEQ ID NO: 6062276 - DNA, 25 bp, Homo sapien
tgtggtcattaaagacaatgttaag

SEQ ID NO: 6062277 - DNA, 25 bp, Homo sapien
gttgcgtggcatgcaaacagaagcc

SEQ ID NO: 6062278 - DNA, 25 bp, Homo sapien
tagatgatatacatattactgcaga

SEQ ID NO: 6062279 - DNA, 25 bp, Homo sapien
gcatattttgagctactctttatgg

SEQ ID NO: 6062280 - DNA, 25 bp, Homo sapien
tcgtgtttgataagccgccctccct

SEQ ID NO: 6062281 - DNA, 25 bp, Homo sapien
gagttggtttagaaactctcagcta

SEQ ID NO: 6062282 - DNA, 25 bp, Homo sapien
cagctgttggttgtcttgtggtcat

SEQ ID NO: 6062283 - DNA, 25 bp, Homo sapien
atatttaatacttgtaaggcagcag

SEQ ID NO: 6062284 - DNA, 25 bp, Homo sapien
tccagcttctccaatatatacactg

SEQ ID NO: 6062285 - DNA, 25 bp, Homo sapien
ttccagcttctccaatatatacact

SEQ ID NO: 6062286 - DNA, 25 bp, Homo sapien
ttaatcatttatggccattaaagtt

SEQ ID NO: 6062287 - DNA, 25 bp, Homo sapien
ccagcttctccaatatatacactgc

SEQ ID NO: 6062288 - DNA, 25 bp, Homo sapien
taatcatttatggccattaaagttc

SEQ ID NO: 6062289 - DNA, 25 bp, Homo sapien
tgtaccaccccaaatgtatgagccc

SEQ ID NO: 6062290 - DNA, 25 bp, Homo sapien
cagacctctgcaaaaagtatgttcc

SEQ ID NO: 6062291 - DNA, 25 bp, Homo sapien
cttgctcaggaatgtcgtcgttttt

SEQ ID NO: 6062292 - DNA, 25 bp, Homo sapien
gttccaagatggacacctatgaaag

SEQ ID NO: 6062293 - DNA, 25 bp, Homo sapien
aaagtcccagactatcttgctcagg

SEQ ID NO: 6062294 - DNA, 25 bp, Homo sapien
gaaagatatcccagctacaagaagc

SEQ ID NO: 6062295 - DNA, 25 bp, Homo sapien
gctgcttttgattctgtaccacccc

SEQ ID NO: 6062296 - DNA, 25 bp, Homo sapien
ttttacagactgctttgcagacctc

SEQ ID NO: 6062297 - DNA, 25 bp, Homo sapien
gatggacacctatgaaagatatccc

SEQ ID NO: 6062298 - DNA, 25 bp, Homo sapien
tctcttctttcgatatgaagctcag

SEQ ID NO: 6062299 - DNA, 25 bp, Homo sapien
tgtatgagcccaactaaagggacca

SEQ ID NO: 6062300 - DNA, 25 bp, Homo sapien
cagcattgtggctataaaatcaaaa

SEQ ID NO: 6062301 - DNA, 25 bp, Homo sapien
cacctaacttccattctgggagtga

SEQ ID NO: 6062302 - DNA, 25 bp, Homo sapien
cttagttacaaacaagcaatgtcag

SEQ ID NO: 6062303 - DNA, 25 bp, Homo sapien
aagcaatgtcagacacaaggaactg

SEQ ID NO: 6062304 - DNA, 25 bp, Homo sapien
gaaatggatgcctggctcaatataa

SEQ ID NO: 6062305 - DNA, 25 bp, Homo sapien
gagtgagatatgctacccagttgtg

SEQ ID NO: 6062306 - DNA, 25 bp, Homo sapien
caatctcattcaggcctattctggg

SEQ ID NO: 6062307 - DNA, 25 bp, Homo sapien
cctctagaaagagttctgtggatat

SEQ ID NO: 6062308 - DNA, 25 bp, Homo sapien
caaagagatgacaatacctgtttca

SEQ ID NO: 6062309 - DNA, 25 bp, Homo sapien
gaagaaaccactaggcttaccattc

SEQ ID NO: 6062310 - DNA, 25 bp, Homo sapien
gaaaggtggcaaagtagacacaaag

SEQ ID NO: 6062311 - DNA, 25 bp, Homo sapien
tacctgtttcatactgaacctaatg

SEQ ID NO: 6062312 - DNA, 25 bp, Homo sapien
taacgttttcaatctcattcaggcc

SEQ ID NO: 6062313 - DNA, 25 bp, Homo sapien
gagactgcaaacagattgcattccc

SEQ ID NO: 6062314 - DNA, 25 bp, Homo sapien
taaggctgatggagcatcgtatgtt

SEQ ID NO: 6062315 - DNA, 25 bp, Homo sapien
tgcaaacagattgcattcccatggt

SEQ ID NO: 6062316 - DNA, 25 bp, Homo sapien
aagtctagaagattgaagggaaaga

SEQ ID NO: 6062317 - DNA, 25 bp, Homo sapien
ggagactgcaaacagattgcattcc

SEQ ID NO: 6062318 - DNA, 25 bp, Homo sapien
ctgcaaacagattgcattcccatgg

SEQ ID NO: 6062319 - DNA, 25 bp, Homo sapien
aaagtctagaagattgaagggaaag

SEQ ID NO: 6062320 - DNA, 25 bp, Homo sapien
ttaggtaaggctgatggagcatcgt

SEQ ID NO: 6062321 - DNA, 25 bp, Homo sapien
taggtaaggctgatggagcatcgta

SEQ ID NO: 6062322 - DNA, 25 bp, Homo sapien
ctgatggagcatcgtatgttttgcc

SEQ ID NO: 6062323 - DNA, 25 bp, Homo sapien
gctgatggagcatcgtatgttttgc

SEQ ID NO: 6062324 - DNA, 25 bp, Homo sapien
tgatggagcatcgtatgttttgcca

SEQ ID NO: 6062325 - DNA, 25 bp, Homo sapien
gctccttggttttggggatgcatgg

SEQ ID NO: 6062326 - DNA, 25 bp, Homo sapien
gggctccttggttttggggatgcat

SEQ ID NO: 6062327 - DNA, 25 bp, Homo sapien
ggctccttggttttggggatgcatg

SEQ ID NO: 6062328 - DNA, 25 bp, Homo sapien
accgttgaagggcagggctcaggca

SEQ ID NO: 6062329 - DNA, 25 bp, Homo sapien
ggctgcttctgctgctgagaattca

SEQ ID NO: 6062330 - DNA, 25 bp, Homo sapien
gcaaggttgtttcacctgctgctgc

SEQ ID NO: 6062331 - DNA, 25 bp, Homo sapien
ctggcagggctctggaatcttgggc

SEQ ID NO: 6062332 - DNA, 25 bp, Homo sapien
tcacctgctgctgctgaggctgagg

SEQ ID NO: 6062333 - DNA, 25 bp, Homo sapien
gcaccttgggttggcagggctcctt

SEQ ID NO: 6062334 - DNA, 25 bp, Homo sapien
gctggagtgaccgttgaagggcagg

SEQ ID NO: 6062335 - DNA, 25 bp, Homo sapien
ccttgggctggcagggctctggaat

SEQ ID NO: 6062336 - DNA, 25 bp, Homo sapien
tggaggctggcaaggttgtttcacc

SEQ ID NO: 6062337 - DNA, 25 bp, Homo sapien
gggctggcagggctctggaatcttg

SEQ ID NO: 6062338 - DNA, 25 bp, Homo sapien
tggaatcttgggctggcagggctca

SEQ ID NO: 6062339 - DNA, 25 bp, Homo sapien
gtggcagggctcaggcaccttgggt

SEQ ID NO: 6062340 - DNA, 25 bp, Homo sapien
cctcgcccgctgatgacaaggagaa

SEQ ID NO: 6062341 - DNA, 25 bp, Homo sapien
cttcctcgcccgctgatgacaagga

SEQ ID NO: 6062342 - DNA, 25 bp, Homo sapien
aaggagaagttatcctgactcacac

SEQ ID NO: 6062343 - DNA, 25 bp, Homo sapien
gctctggcctgtgttgagcttggca

SEQ ID NO: 6062344 - DNA, 25 bp, Homo sapien
tggcctgtgttgagcttggcacagc

SEQ ID NO: 6062345 - DNA, 25 bp, Homo sapien
atggaggattcgtggccccggccat

SEQ ID NO: 6062346 - DNA, 25 bp, Homo sapien
ttttcatggaggattcgtggccccg

SEQ ID NO: 6062347 - DNA, 25 bp, Homo sapien
tctggcctgtgttgagcttggcaca

SEQ ID NO: 6062348 - DNA, 25 bp, Homo sapien
gaagttatcctgactcacacaggcc

SEQ ID NO: 6062349 - DNA, 25 bp, Homo sapien
ggagaagttatcctgactcacacag

SEQ ID NO: 6062350 - DNA, 25 bp, Homo sapien
ttcctcgcccgctgatgacaaggag

SEQ ID NO: 6062351 - DNA, 25 bp, Homo sapien
gttatcctgactcacacaggccatg

SEQ ID NO: 6062352 - DNA, 25 bp, Homo sapien
cctactgttgtttcggagtcctgac

SEQ ID NO: 6062353 - DNA, 25 bp, Homo sapien
tctttgagtaaagggaggaatctcc

SEQ ID NO: 6062354 - DNA, 25 bp, Homo sapien
tgataccagtgtccgagtctgtgtc

SEQ ID NO: 6062355 - DNA, 25 bp, Homo sapien
tccttggccaggagttcatattctt

SEQ ID NO: 6062356 - DNA, 25 bp, Homo sapien
cattgctactgggaacctcagattc

SEQ ID NO: 6062357 - DNA, 25 bp, Homo sapien
tttctggatgccactcaaatgagag

SEQ ID NO: 6062358 - DNA, 25 bp, Homo sapien
tcctgactgtggttagaactgatac

SEQ ID NO: 6062359 - DNA, 25 bp, Homo sapien
gaggaatctccccattgctactggg

SEQ ID NO: 6062360 - DNA, 25 bp, Homo sapien
accagctttcatgcttttctccaaa

SEQ ID NO: 6062361 - DNA, 25 bp, Homo sapien
gctaatgtgaagtgaattgaattcc

SEQ ID NO: 6062362 - DNA, 25 bp, Homo sapien
gtctgtgtcatttgtgtaattgcta

SEQ ID NO: 6062363 - DNA, 25 bp, Homo sapien
cagagagcttatcaatgagtattcg

SEQ ID NO: 6062364 - DNA, 25 bp, Homo sapien
cacggcacagaggtaggtggctgaa

SEQ ID NO: 6062365 - DNA, 25 bp, Homo sapien
gctgaatcactgggctgggagtctc

SEQ ID NO: 6062366 - DNA, 25 bp, Homo sapien
tccaaagctgagcttgtagtctctc

SEQ ID NO: 6062367 - DNA, 25 bp, Homo sapien
tcactgggctgggagtctctgatga

SEQ ID NO: 6062368 - DNA, 25 bp, Homo sapien
acagaggtaggtggctgaatcactg

SEQ ID NO: 6062369 - DNA, 25 bp, Homo sapien
taggtggctgaatcactgggctggg

SEQ ID NO: 6062370 - DNA, 25 bp, Homo sapien
gctgagcttgtagtctctcacggca

SEQ ID NO: 6062371 - DNA, 25 bp, Homo sapien
tccggctccaaagctgagcttgtag

SEQ ID NO: 6062372 - DNA, 25 bp, Homo sapien
cttgtagtctctcacggcacagagg

SEQ ID NO: 6062373 - DNA, 25 bp, Homo sapien
gtctctcacggcacagaggtaggtg

SEQ ID NO: 6062374 - DNA, 25 bp, Homo sapien
tctgatgagcagagaaacatactgg

SEQ ID NO: 6062375 - DNA, 25 bp, Homo sapien
gggctgggagtctctgatgagcaga

SEQ ID NO: 6062376 - DNA, 25 bp, Homo sapien
ggagtctctgatgagcagagaaaca

SEQ ID NO: 6062377 - DNA, 25 bp, Homo sapien
cctgggatcttcaggggtgggtgag

SEQ ID NO: 6062378 - DNA, 25 bp, Homo sapien
cacctgggatcttcaggggtgggtg

SEQ ID NO: 6062379 - DNA, 25 bp, Homo sapien
acctgggatcttcaggggtgggtga

SEQ ID NO: 6062380 - DNA, 25 bp, Homo sapien
ccgcgggcgttcatggcgggcacag

SEQ ID NO: 6062381 - DNA, 25 bp, Homo sapien
aaggtgcggagcagggcggctcggt

SEQ ID NO: 6062382 - DNA, 25 bp, Homo sapien
acgtacaggcggttggcgctcagca

SEQ ID NO: 6062383 - DNA, 25 bp, Homo sapien
gcagctccacgtacaggcggttggc

SEQ ID NO: 6062384 - DNA, 25 bp, Homo sapien
tatcacaaacacgacacggggccgc

SEQ ID NO: 6062385 - DNA, 25 bp, Homo sapien
cgctagccctgcagcgagtaggcca

SEQ ID NO: 6062386 - DNA, 25 bp, Homo sapien
agcgcacgtgcaggacccgcgtctg

SEQ ID NO: 6062387 - DNA, 25 bp, Homo sapien
tccgagagccgcgagcgcacgtgca

SEQ ID NO: 6062388 - DNA, 25 bp, Homo sapien
gtcacgctcagccgctggtccgagt

SEQ ID NO: 6062389 - DNA, 25 bp, Homo sapien
gccggcagctccacgtacaggcggt

SEQ ID NO: 6062390 - DNA, 25 bp, Homo sapien
agcaccgcgaggctgtccttgcagc

SEQ ID NO: 6062391 - DNA, 25 bp, Homo sapien
gctggtccgagtacagcggcgcggc

SEQ ID NO: 6062392 - DNA, 25 bp, Homo sapien
cttagtcacggctttcttcgagccc

SEQ ID NO: 6062393 - DNA, 25 bp, Homo sapien
gcgccttagtcacggctttcttcga

SEQ ID NO: 6062394 - DNA, 25 bp, Homo sapien
ttagtcacggctttcttcgagccct

SEQ ID NO: 6062395 - DNA, 25 bp, Homo sapien
tagtcacggctttcttcgagccctt

SEQ ID NO: 6062396 - DNA, 25 bp, Homo sapien
ccttagtcacggctttcttcgagcc

SEQ ID NO: 6062397 - DNA, 25 bp, Homo sapien
gccttagtcacggctttcttcgagc

SEQ ID NO: 6062398 - DNA, 25 bp, Homo sapien
agtcacggctttcttcgagcccttc

SEQ ID NO: 6062399 - DNA, 25 bp, Homo sapien
tgcgccttagtcacggctttcttcg

SEQ ID NO: 6062400 - DNA, 25 bp, Homo sapien
ctgcgccttagtcacggctttcttc

SEQ ID NO: 6062401 - DNA, 25 bp, Homo sapien
cgccttagtcacggctttcttcgag

SEQ ID NO: 6062402 - DNA, 25 bp, Homo sapien
tccctcatgattccagcggccatag

SEQ ID NO: 6062403 - DNA, 25 bp, Homo sapien
tctggttaagagtggccccagccat

SEQ ID NO: 6062404 - DNA, 25 bp, Homo sapien
tcttcgatactctcattctcaaagg

SEQ ID NO: 6062405 - DNA, 25 bp, Homo sapien
ctcattctcaaaggaggcctcttcc

SEQ ID NO: 6062406 - DNA, 25 bp, Homo sapien
cagcatctggttaagagtggcccca

SEQ ID NO: 6062407 - DNA, 25 bp, Homo sapien
ctgatccttcagctccctaagccgg

SEQ ID NO: 6062408 - DNA, 25 bp, Homo sapien
tcagtcgtctccctcatgattccag

SEQ ID NO: 6062409 - DNA, 25 bp, Homo sapien
ccttcattagctcaaggaagctggg

SEQ ID NO: 6062410 - DNA, 25 bp, Homo sapien
gatttcagtcccatacattaaagaa

SEQ ID NO: 6062411 - DNA, 25 bp, Homo sapien
taagccggcaccacagcatctggtt

SEQ ID NO: 6062412 - DNA, 25 bp, Homo sapien
ctggtccgcaatacgccgagggatg

SEQ ID NO: 6062413 - DNA, 25 bp, Homo sapien
tgctccaggcggacctggtccgcaa

SEQ ID NO: 6062414 - DNA, 25 bp, Homo sapien
aaatctggtaaggttatgactagcc

SEQ ID NO: 6062415 - DNA, 25 bp, Homo sapien
gatatttgcctcctacctgctaaaa

SEQ ID NO: 6062416 - DNA, 25 bp, Homo sapien
cagtaatgcatgtaagtaggtgctc

SEQ ID NO: 6062417 - DNA, 25 bp, Homo sapien
tgctcagaagagtcggacacgaagt

SEQ ID NO: 6062418 - DNA, 25 bp, Homo sapien
ttatgactagccacgtcccagggtt

SEQ ID NO: 6062419 - DNA, 25 bp, Homo sapien
caggtctggaatactagagtagcat

SEQ ID NO: 6062420 - DNA, 25 bp, Homo sapien
tgaacgggtccagaaaatgcataga

SEQ ID NO: 6062421 - DNA, 25 bp, Homo sapien
gccttcatagctgtgcaactcacat

SEQ ID NO: 6062422 - DNA, 25 bp, Homo sapien
cattatcagaacaaggagagaccag

SEQ ID NO: 6062423 - DNA, 25 bp, Homo sapien
gatgctttttctgggacaggtgcct

SEQ ID NO: 6062424 - DNA, 25 bp, Homo sapien
gagtagcatcccaaatgaaggcacc

SEQ ID NO: 6062425 - DNA, 25 bp, Homo sapien
tgaaggcaccattaaactttgcaaa

SEQ ID NO: 6062426 - DNA, 25 bp, Homo sapien
gacgagcaccctggctccaggagcg

SEQ ID NO: 6062427 - DNA, 25 bp, Homo sapien
tgcccctgcttgaggttccacgcca

SEQ ID NO: 6062428 - DNA, 25 bp, Homo sapien
tcaatccatggctcacgaaagccca

SEQ ID NO: 6062429 - DNA, 25 bp, Homo sapien
ctgtggccccgcttgagagggccca

SEQ ID NO: 6062430 - DNA, 25 bp, Homo sapien
gatgccacctaggagtgtgagtgtg

SEQ ID NO: 6062431 - DNA, 25 bp, Homo sapien
accgcgcaagtgcccggaaggccgt

SEQ ID NO: 6062432 - DNA, 25 bp, Homo sapien
aaggccgtcgcgctgcgcgtcccag

SEQ ID NO: 6062433 - DNA, 25 bp, Homo sapien
tgctccacccccaccacggacttcc

SEQ ID NO: 6062434 - DNA, 25 bp, Homo sapien
gcccctttccccatgcgccagtgtg

SEQ ID NO: 6062435 - DNA, 25 bp, Homo sapien
tgcccctgccgtgtggaggcctctg

SEQ ID NO: 6062436 - DNA, 25 bp, Homo sapien
atgcgccagtgtgggcaaaggcgac

SEQ ID NO: 6062437 - DNA, 25 bp, Homo sapien
cgcggcctggctgggcaggagcaca

SEQ ID NO: 6062438 - DNA, 25 bp, Homo sapien
gggagagcatgtgtggtgcaggaag

SEQ ID NO: 6062439 - DNA, 25 bp, Homo sapien
tccttccggattttgcccttgtgtg

SEQ ID NO: 6062440 - DNA, 25 bp, Homo sapien
ggctccaggagcgcctgggagggtg

SEQ ID NO: 6062441 - DNA, 25 bp, Homo sapien
aggcgacccacgagagagcagggtg

SEQ ID NO: 6062442 - DNA, 25 bp, Homo sapien
gagtgtgagtgtgggagagcgcccc

SEQ ID NO: 6062443 - DNA, 25 bp, Homo sapien
tgcctgcgcggcctggctgggcagg

SEQ ID NO: 6062444 - DNA, 25 bp, Homo sapien
cgcgtcccagtccttccggattttg

SEQ ID NO: 6062445 - DNA, 25 bp, Homo sapien
ctctgggggcgtgggctggtgaggt

SEQ ID NO: 6062446 - DNA, 25 bp, Homo sapien
agtggagtgcagacgagcaccctgg

SEQ ID NO: 6062447 - DNA, 25 bp, Homo sapien
tgtcccaccgcgcaagtgcccggaa

SEQ ID NO: 6062448 - DNA, 25 bp, Homo sapien
aggagcgcctgggagggtgctgaga

SEQ ID NO: 6062449 - DNA, 25 bp, Homo sapien
ccaggctgtcccaccgcgcaagtgc

SEQ ID NO: 6062450 - DNA, 25 bp, Homo sapien
gctgagatgccttgcatctgcccct

SEQ ID NO: 6062451 - DNA, 25 bp, Homo sapien
gagtgtgggagagcgccccttctgg

SEQ ID NO: 6062452 - DNA, 25 bp, Homo sapien
caccggcgacctgggtacccctgct

SEQ ID NO: 6062453 - DNA, 25 bp, Homo sapien
ccatggctcacgaaagcccactgtg

SEQ ID NO: 6062454 - DNA, 25 bp, Homo sapien
accctggctccaggagcgcctggga

SEQ ID NO: 6062455 - DNA, 25 bp, Homo sapien
cccacgagagagcagggtgtcaccc

SEQ ID NO: 6062456 - DNA, 25 bp, Homo sapien
gggcaaaggcgacccacgagagagc

SEQ ID NO: 6062457 - DNA, 25 bp, Homo sapien
gagcacagggacggccctcaatcca

SEQ ID NO: 6062458 - DNA, 25 bp, Homo sapien
gagggcccaggctgtcccaccgcgc

SEQ ID NO: 6062459 - DNA, 25 bp, Homo sapien
ttccccatgcgccagtgtgggcaaa

SEQ ID NO: 6062460 - DNA, 25 bp, Homo sapien
caagtgcccggaaggccgtcgcgct

SEQ ID NO: 6062461 - DNA, 25 bp, Homo sapien
gcgcaagcacaccttggccctgtgg

SEQ ID NO: 6062462 - DNA, 25 bp, Homo sapien
ccttctggaggagcctgggcggtgt

SEQ ID NO: 6062463 - DNA, 25 bp, Homo sapien
gcctgggcggtgtaggcaaaatccc

SEQ ID NO: 6062464 - DNA, 25 bp, Homo sapien
gcatgtgtggtgcaggaagcccctt

SEQ ID NO: 6062465 - DNA, 25 bp, Homo sapien
ggaggagcctgggcggtgtaggcaa

SEQ ID NO: 6062466 - DNA, 25 bp, Homo sapien
cagggtgtcacccaattggggctgc

SEQ ID NO: 6062467 - DNA, 25 bp, Homo sapien
aggaagcccctttccccatgcgcca

SEQ ID NO: 6062468 - DNA, 25 bp, Homo sapien
catgtgctggggcaggttgggagat

SEQ ID NO: 6062469 - DNA, 25 bp, Homo sapien
aggcaaaatccccatgtgctggggc

SEQ ID NO: 6062470 - DNA, 25 bp, Homo sapien
tgcttgaggttccacgccacaccgg

SEQ ID NO: 6062471 - DNA, 25 bp, Homo sapien
cactgtgggagagcatgtgtggtgc

SEQ ID NO: 6062472 - DNA, 25 bp, Homo sapien
agggacggccctcaatccatggctc

SEQ ID NO: 6062473 - DNA, 25 bp, Homo sapien
ctggggcaggttgggagatcccttc

SEQ ID NO: 6062474 - DNA, 25 bp, Homo sapien
agcgccccttctggaggagcctggg

SEQ ID NO: 6062475 - DNA, 25 bp, Homo sapien
agagagcagggtgtcacccaattgg

SEQ ID NO: 6062476 - DNA, 25 bp, Homo sapien
gggagatcccttctgcctgcgcggc

SEQ ID NO: 6062477 - DNA, 25 bp, Homo sapien
gcggtgtaggcaaaatccccatgtg

SEQ ID NO: 6062478 - DNA, 25 bp, Homo sapien
tcccttctgcctgcgcggcctggct

SEQ ID NO: 6062479 - DNA, 25 bp, Homo sapien
gtgtcacccaattggggctgcattg

SEQ ID NO: 6062480 - DNA, 25 bp, Homo sapien
caggttgggagatcccttctgcctg

SEQ ID NO: 6062481 - DNA, 25 bp, Homo sapien
acctaggagtgtgagtgtgggagag

SEQ ID NO: 6062482 - DNA, 25 bp, Homo sapien
cccaattggggctgcattgcaccgg

SEQ ID NO: 6062483 - DNA, 25 bp, Homo sapien
cttgagagggcccaggctgtcccac

SEQ ID NO: 6062484 - DNA, 25 bp, Homo sapien
gggcgtgggctggtgaggtggaatt

SEQ ID NO: 6062485 - DNA, 25 bp, Homo sapien
ctggctgggcaggagcacagggacg

SEQ ID NO: 6062486 - DNA, 25 bp, Homo sapien
aaagcccactgtgggagagcatgtg

SEQ ID NO: 6062487 - DNA, 25 bp, Homo sapien
gcctgggagggtgctgagatgcctt

SEQ ID NO: 6062488 - DNA, 25 bp, Homo sapien
ccagtccttccggattttgcccttg

SEQ ID NO: 6062489 - DNA, 25 bp, Homo sapien
aatccccatgtgctggggcaggttg

SEQ ID NO: 6062490 - DNA, 25 bp, Homo sapien
cggattttgcccttgtgtggatgcc

SEQ ID NO: 6062491 - DNA, 25 bp, Homo sapien
cgtcgcgctgcgcgtcccagtcctt

SEQ ID NO: 6062492 - DNA, 25 bp, Homo sapien
cacaccttggccctgtggccccgct

SEQ ID NO: 6062493 - DNA, 25 bp, Homo sapien
acgcgggtggcgcaagcacaccttg

SEQ ID NO: 6062494 - DNA, 25 bp, Homo sapien
ttgtgtggatgccacctaggagtgt

SEQ ID NO: 6062495 - DNA, 25 bp, Homo sapien
gggctggtgaggtggaattgcccct

SEQ ID NO: 6062496 - DNA, 25 bp, Homo sapien
ttgcccttgtgtggatgccacctag

SEQ ID NO: 6062497 - DNA, 25 bp, Homo sapien
tggaattgcccctgcttgaggttcc

SEQ ID NO: 6062498 - DNA, 25 bp, Homo sapien
caccacggacttccctgggacgcgg

SEQ ID NO: 6062499 - DNA, 25 bp, Homo sapien
gtggtgcaggaagcccctttcccca

SEQ ID NO: 6062500 - DNA, 25 bp, Homo sapien
agtgcagacgagcaccctggctcca

SEQ ID NO: 6062501 - DNA, 25 bp, Homo sapien
ggaggcctctgggggcgtgggctgg

SEQ ID NO: 6062502 - DNA, 25 bp, Homo sapien
gtgaggtggaattgcccctgcttga

SEQ ID NO: 6062503 - DNA, 25 bp, Homo sapien
aggttccacgccacaccggcgacct

SEQ ID NO: 6062504 - DNA, 25 bp, Homo sapien
gcccggaaggccgtcgcgctgcgcg

SEQ ID NO: 6062505 - DNA, 25 bp, Homo sapien
ctcacgaaagcccactgtgggagag

SEQ ID NO: 6062506 - DNA, 25 bp, Homo sapien
gggagagcgccccttctggaggagc

SEQ ID NO: 6062507 - DNA, 25 bp, Homo sapien
cgctgcgcgtcccagtccttccgga

SEQ ID NO: 6062508 - DNA, 25 bp, Homo sapien
cagtgtgggcaaaggcgacccacga

SEQ ID NO: 6062509 - DNA, 25 bp, Homo sapien
gcgacctgggtacccctgctccacc

SEQ ID NO: 6062510 - DNA, 25 bp, Homo sapien
gagggtgctgagatgccttgcatct

SEQ ID NO: 6062511 - DNA, 25 bp, Homo sapien
atgccttgcatctgcccctgccgtg

SEQ ID NO: 6062512 - DNA, 25 bp, Homo sapien
gggcaggagcacagggacggccctc

SEQ ID NO: 6062513 - DNA, 25 bp, Homo sapien
ttggccctgtggccccgcttgagag

SEQ ID NO: 6062514 - DNA, 25 bp, Homo sapien
cctgggacgcgggtggcgcaagcac

SEQ ID NO: 6062515 - DNA, 25 bp, Homo sapien
ccccgcttgagagggcccaggctgt

SEQ ID NO: 6062516 - DNA, 25 bp, Homo sapien
ggccctcaatccatggctcacgaaa

SEQ ID NO: 6062517 - DNA, 25 bp, Homo sapien
cacgccacaccggcgacctgggtac

SEQ ID NO: 6062518 - DNA, 25 bp, Homo sapien
tgcatctgcccctgccgtgtggagg

SEQ ID NO: 6062519 - DNA, 25 bp, Homo sapien
agggtgtcgtccaaagctgtcagga

SEQ ID NO: 6062520 - DNA, 25 bp, Homo sapien
gggagggtgtcgtccaaagctgtca

SEQ ID NO: 6062521 - DNA, 25 bp, Homo sapien
gcgtgggcgccctgccagactgtcc

SEQ ID NO: 6062522 - DNA, 25 bp, Homo sapien
tccggtgatggcagtccgctttcgt

SEQ ID NO: 6062523 - DNA, 25 bp, Homo sapien
gggtcgaaaggagtatcattcgcct

SEQ ID NO: 6062524 - DNA, 25 bp, Homo sapien
tgactcggggtcgaaaggagtatca

SEQ ID NO: 6062525 - DNA, 25 bp, Homo sapien
gaaaggagtatcattcgccttcccg

SEQ ID NO: 6062526 - DNA, 25 bp, Homo sapien
agtccgctttcgtctgcctttttgc

SEQ ID NO: 6062527 - DNA, 25 bp, Homo sapien
ccggtgctgcctcaactggcatgat

SEQ ID NO: 6062528 - DNA, 25 bp, Homo sapien
ggtgatggcagtccgctttcgtctg

SEQ ID NO: 6062529 - DNA, 25 bp, Homo sapien
aggagtatcattcgccttcccggtc

SEQ ID NO: 6062530 - DNA, 25 bp, Homo sapien
gctttcgtctgcctttttgcgggtc

SEQ ID NO: 6062531 - DNA, 25 bp, Homo sapien
gacctgagacatgcaaaactattct

SEQ ID NO: 6062532 - DNA, 25 bp, Homo sapien
ccaagacctgagacatgcaaaacta

SEQ ID NO: 6062533 - DNA, 25 bp, Homo sapien
tggcccaagacctgagacatgcaaa

SEQ ID NO: 6062534 - DNA, 25 bp, Homo sapien
gccataaatcatacttgttaacata

SEQ ID NO: 6062535 - DNA, 25 bp, Homo sapien
ttgccataaatcatacttgttaaca

SEQ ID NO: 6062536 - DNA, 25 bp, Homo sapien
aacataaaccatctgattaaactga

SEQ ID NO: 6062537 - DNA, 25 bp, Homo sapien
cataaaccatctgattaaactgata

SEQ ID NO: 6062538 - DNA, 25 bp, Homo sapien
agaaatggagattagagatctatgt

SEQ ID NO: 6062539 - DNA, 25 bp, Homo sapien
tgagacatgcaaaactattcttagc

SEQ ID NO: 6062540 - DNA, 25 bp, Homo sapien
gattagagatctatgtttgccataa

SEQ ID NO: 6062541 - DNA, 25 bp, Homo sapien
gcccaagacctgagacatgcaaaac

SEQ ID NO: 6062542 - DNA, 25 bp, Homo sapien
tggagattagagatctatgtttgcc

SEQ ID NO: 6062543 - DNA, 25 bp, Homo sapien
tattatctctctacgtatatacaat

SEQ ID NO: 6062544 - DNA, 25 bp, Homo sapien
atattatctctctacgtatatacaa

SEQ ID NO: 6062545 - DNA, 25 bp, Homo sapien
attatctctctacgtatatacaatt

SEQ ID NO: 6062546 - DNA, 25 bp, Homo sapien
ttatctctctacgtatatacaattg

SEQ ID NO: 6062547 - DNA, 25 bp, Homo sapien
tatacttcaagcattgcagggcagg

SEQ ID NO: 6062548 - DNA, 25 bp, Homo sapien
gaagagcctctaatgcctgtgccaa

SEQ ID NO: 6062549 - DNA, 25 bp, Homo sapien
catcctctggcagattaagctctct

SEQ ID NO: 6062550 - DNA, 25 bp, Homo sapien
gatatttgacctgcaactccctagg

SEQ ID NO: 6062551 - DNA, 25 bp, Homo sapien
gagtagtatgaaacatccagcgtcc

SEQ ID NO: 6062552 - DNA, 25 bp, Homo sapien
acctgccacgcctttatcatctgag

SEQ ID NO: 6062553 - DNA, 25 bp, Homo sapien
gctccagccttagtacataagccga

SEQ ID NO: 6062554 - DNA, 25 bp, Homo sapien
gaataacatcaagtgctgggcctcg

SEQ ID NO: 6062555 - DNA, 25 bp, Homo sapien
gcctgcagacattcatcgacagtaa

SEQ ID NO: 6062556 - DNA, 25 bp, Homo sapien
tatcttgaggacacgaataacatca

SEQ ID NO: 6062557 - DNA, 25 bp, Homo sapien
tctgcgaattgttttgtggactgcc

SEQ ID NO: 6062558 - DNA, 25 bp, Homo sapien
gggcctcgaaggctctctagcaatc

SEQ ID NO: 6062559 - DNA, 25 bp, Homo sapien
ggggggcacgtgcagcagaggagcc

SEQ ID NO: 6062560 - DNA, 25 bp, Homo sapien
gtcctccacacacgtggtacactgg

SEQ ID NO: 6062561 - DNA, 25 bp, Homo sapien
ctccacacacgtggtacactgggca

SEQ ID NO: 6062562 - DNA, 25 bp, Homo sapien
gatacgggccttggcaccttcgtcc

SEQ ID NO: 6062563 - DNA, 25 bp, Homo sapien
gtgagcacgatacgggccttggcac

SEQ ID NO: 6062564 - DNA, 25 bp, Homo sapien
acacacgtggtacactgggcacctg

SEQ ID NO: 6062565 - DNA, 25 bp, Homo sapien
atgacccccgcggtgagcacgatac

SEQ ID NO: 6062566 - DNA, 25 bp, Homo sapien
cacacgtggtacactgggcacctgt

SEQ ID NO: 6062567 - DNA, 25 bp, Homo sapien
cacgatacgggccttggcaccttcg

SEQ ID NO: 6062568 - DNA, 25 bp, Homo sapien
cccgcggtgagcacgatacgggcct

SEQ ID NO: 6062569 - DNA, 25 bp, Homo sapien
ccgcggtgagcacgatacgggcctt

SEQ ID NO: 6062570 - DNA, 25 bp, Homo sapien
tccacacacgtggtacactgggcac

SEQ ID NO: 6062571 - DNA, 25 bp, Homo sapien
aagaatggccctgaatattaggtaa

SEQ ID NO: 6062572 - DNA, 25 bp, Homo sapien
tgccaggcacacctcgtactgatag

SEQ ID NO: 6062573 - DNA, 25 bp, Homo sapien
aaaagaatggccctgaatattaggt

SEQ ID NO: 6062574 - DNA, 25 bp, Homo sapien
ggccctgaatattaggtaatactgg

SEQ ID NO: 6062575 - DNA, 25 bp, Homo sapien
cccaaaagaatggccctgaatatta

SEQ ID NO: 6062576 - DNA, 25 bp, Homo sapien
cagcctccggaagcggcaggtaggg

SEQ ID NO: 6062577 - DNA, 25 bp, Homo sapien
ggtaatactggtttcaggaactgga

SEQ ID NO: 6062578 - DNA, 25 bp, Homo sapien
tggaactcattcgtccctgagcctc

SEQ ID NO: 6062579 - DNA, 25 bp, Homo sapien
gaactggaactcattcgtccctgag

SEQ ID NO: 6062580 - DNA, 25 bp, Homo sapien
aatggccctgaatattaggtaatac

SEQ ID NO: 6062581 - DNA, 25 bp, Homo sapien
caggaactggaactcattcgtccct

SEQ ID NO: 6062582 - DNA, 25 bp, Homo sapien
gccaggcacacctcgtactgatagt

SEQ ID NO: 6062583 - DNA, 25 bp, Homo sapien
gccaatggtgctgaaagccacaaaa

SEQ ID NO: 6062584 - DNA, 25 bp, Homo sapien
cagccgttggccatctcagacagtt

SEQ ID NO: 6062585 - DNA, 25 bp, Homo sapien
tggagatcatctcccctgagagccg

SEQ ID NO: 6062586 - DNA, 25 bp, Homo sapien
gcagacacccatgaggatgaagacg

SEQ ID NO: 6062587 - DNA, 25 bp, Homo sapien
tagagtgagtcaaagtagctccagc

SEQ ID NO: 6062588 - DNA, 25 bp, Homo sapien
gccaccccgtctgtctctatggaga

SEQ ID NO: 6062589 - DNA, 25 bp, Homo sapien
tggcaaagcgatagaggccttggct

SEQ ID NO: 6062590 - DNA, 25 bp, Homo sapien
tgcgtgatcgcaagagtcctctctg

SEQ ID NO: 6062591 - DNA, 25 bp, Homo sapien
gccagcaagtccttcatggagatca

SEQ ID NO: 6062592 - DNA, 25 bp, Homo sapien
agcggttccggacgctgcctggcat

SEQ ID NO: 6062593 - DNA, 25 bp, Homo sapien
tgagaattcattgtcccgggccagt

SEQ ID NO: 6062594 - DNA, 25 bp, Homo sapien
catagtgggcgttctggctgctgac

SEQ ID NO: 6062595 - DNA, 25 bp, Homo sapien
atccagtcaagggactgtttgatga

SEQ ID NO: 6062596 - DNA, 25 bp, Homo sapien
tccagtcaagggactgtttgatgag

SEQ ID NO: 6062597 - DNA, 25 bp, Homo sapien
gcacagtcgccctcttttgcgatta

SEQ ID NO: 6062598 - DNA, 25 bp, Homo sapien
tcaggggcacagtcgccctcttttg

SEQ ID NO: 6062599 - DNA, 25 bp, Homo sapien
catcagctcgatgccaaagaccagc

SEQ ID NO: 6062600 - DNA, 25 bp, Homo sapien
ggcacagtcgccctcttttgcgatt

SEQ ID NO: 6062601 - DNA, 25 bp, Homo sapien
actgatctttaccatatggtgcagg

SEQ ID NO: 6062602 - DNA, 25 bp, Homo sapien
gtggccgatggggtccacttccatc

SEQ ID NO: 6062603 - DNA, 25 bp, Homo sapien
gggcacagtcgccctcttttgcgat

SEQ ID NO: 6062604 - DNA, 25 bp, Homo sapien
tccatcagctcgatgccaaagacca

SEQ ID NO: 6062605 - DNA, 25 bp, Homo sapien
ctcaggggcacagtcgccctctttt

SEQ ID NO: 6062606 - DNA, 25 bp, Homo sapien
ctgatctttaccatatggtgcagga

SEQ ID NO: 6062607 - DNA, 25 bp, Homo sapien
ccatcagctcgatgccaaagaccag

SEQ ID NO: 6062608 - DNA, 25 bp, Homo sapien
ccacttccatcagctcgatgccaaa

SEQ ID NO: 6062609 - DNA, 25 bp, Homo sapien
gacaattcttgcataggacccaagg

SEQ ID NO: 6062610 - DNA, 25 bp, Homo sapien
aagtgtgtaacatggcatggaaggt

SEQ ID NO: 6062611 - DNA, 25 bp, Homo sapien
tgagccctcccatgataaatatcac

SEQ ID NO: 6062612 - DNA, 25 bp, Homo sapien
gggatcacattgtctgcacaaaaac

SEQ ID NO: 6062613 - DNA, 25 bp, Homo sapien
cctttagagtagaactattagctga

SEQ ID NO: 6062614 - DNA, 25 bp, Homo sapien
agaagggaccttgaggatggaggag

SEQ ID NO: 6062615 - DNA, 25 bp, Homo sapien
gccttgcagatacccttagaagaag

SEQ ID NO: 6062616 - DNA, 25 bp, Homo sapien
cccattcattaactcgagtgtcaga

SEQ ID NO: 6062617 - DNA, 25 bp, Homo sapien
cctggccatgagtaaagtgtgtaac

SEQ ID NO: 6062618 - DNA, 25 bp, Homo sapien
cacaacctggccatgagtaaagtgt

SEQ ID NO: 6062619 - DNA, 25 bp, Homo sapien
tgacaagaatgagccctcccatgat

SEQ ID NO: 6062620 - DNA, 25 bp, Homo sapien
catgacagtgtcctttagagtagaa

SEQ ID NO: 6062621 - DNA, 25 bp, Homo sapien
cgccgtaggcgctgtagtcgccact

SEQ ID NO: 6062622 - DNA, 25 bp, Homo sapien
gccacgccgcccaagttgtaggcgg

SEQ ID NO: 6062623 - DNA, 25 bp, Homo sapien
gctgcccatggtagtcaactggttg

SEQ ID NO: 6062624 - DNA, 25 bp, Homo sapien
ccgcgtggcacagcggcttcaacgg

SEQ ID NO: 6062625 - DNA, 25 bp, Homo sapien
gcttcaacggcacgccgtaggcgct

SEQ ID NO: 6062626 - DNA, 25 bp, Homo sapien
atcatgccggcggagccatacacgt

SEQ ID NO: 6062627 - DNA, 25 bp, Homo sapien
agccatacacgtgtggccagccggt

SEQ ID NO: 6062628 - DNA, 25 bp, Homo sapien
tgcttgaagcccgagggctgcgcca

SEQ ID NO: 6062629 - DNA, 25 bp, Homo sapien
tattcccgcgcgatgatgttctcga

SEQ ID NO: 6062630 - DNA, 25 bp, Homo sapien
gctgtagtcgccactcgccatggag

SEQ ID NO: 6062631 - DNA, 25 bp, Homo sapien
ccaggcatcttgtattcccgcgcga

SEQ ID NO: 6062632 - DNA, 25 bp, Homo sapien
cgcgatgatgttctcgatggcgaag

SEQ ID NO: 6062633 - DNA, 25 bp, Homo sapien
aatgatgtgggtgttggaacatgcc

SEQ ID NO: 6062634 - DNA, 25 bp, Homo sapien
agggttcatcataggtgtcagcaca

SEQ ID NO: 6062635 - DNA, 25 bp, Homo sapien
ggaggccatagagaacagacagccc

SEQ ID NO: 6062636 - DNA, 25 bp, Homo sapien
gaggccatagagaacagacagcccc

SEQ ID NO: 6062637 - DNA, 25 bp, Homo sapien
gttcatcataggtgtcagcacagca

SEQ ID NO: 6062638 - DNA, 25 bp, Homo sapien
gcgatcatacgccatcacggccagg

SEQ ID NO: 6062639 - DNA, 25 bp, Homo sapien
gttctgacaatacgtacataggatg

SEQ ID NO: 6062640 - DNA, 25 bp, Homo sapien
aaggatggttctgacaatacgtaca

SEQ ID NO: 6062641 - DNA, 25 bp, Homo sapien
ctgacaatacgtacataggatgtgg

SEQ ID NO: 6062642 - DNA, 25 bp, Homo sapien
tggttctgacaatacgtacatagga

SEQ ID NO: 6062643 - DNA, 25 bp, Homo sapien
caatacgtacataggatgtggtcat

SEQ ID NO: 6062644 - DNA, 25 bp, Homo sapien
gatggttctgacaatacgtacatag

SEQ ID NO: 6062645 - DNA, 25 bp, Homo sapien
aacaagctaagtgtggatgtgggca

SEQ ID NO: 6062646 - DNA, 25 bp, Homo sapien
caagctaagtgtggatgtgggcatt

SEQ ID NO: 6062647 - DNA, 25 bp, Homo sapien
aacccaaacaagctaagtgtggatg

SEQ ID NO: 6062648 - DNA, 25 bp, Homo sapien
acaagctaagtgtggatgtgggcat

SEQ ID NO: 6062649 - DNA, 25 bp, Homo sapien
tgttaagcatcctaccatattacaa

SEQ ID NO: 6062650 - DNA, 25 bp, Homo sapien
tctgttaagcatcctaccatattac

SEQ ID NO: 6062651 - DNA, 25 bp, Homo sapien
ttctgttaagcatcctaccatatta

SEQ ID NO: 6062652 - DNA, 25 bp, Homo sapien
gttaagcatcctaccatattacaac

SEQ ID NO: 6062653 - DNA, 25 bp, Homo sapien
ttaagcatcctaccatattacaaca

SEQ ID NO: 6062654 - DNA, 25 bp, Homo sapien
aaacaagctaagtgtggatgtgggc

SEQ ID NO: 6062655 - DNA, 25 bp, Homo sapien
caaacccaaacaagctaagtgtgga

SEQ ID NO: 6062656 - DNA, 25 bp, Homo sapien
ccatattacaacagagaggtgtttg

SEQ ID NO: 6062657 - DNA, 25 bp, Homo sapien
catgacagtgtcctttagagtagaa

SEQ ID NO: 6062658 - DNA, 25 bp, Homo sapien
cccattcattaactcgagtgtcaga

SEQ ID NO: 6062659 - DNA, 25 bp, Homo sapien
gggatcacattgtctgcacaaaaac

SEQ ID NO: 6062660 - DNA, 25 bp, Homo sapien
cctggccatgagtaaagtgtgtaac

SEQ ID NO: 6062661 - DNA, 25 bp, Homo sapien
aagtgtgtaacatggcatggaaggt

SEQ ID NO: 6062662 - DNA, 25 bp, Homo sapien
cacaacctggccatgagtaaagtgt

SEQ ID NO: 6062663 - DNA, 25 bp, Homo sapien
agaagggaccttgaggatggaggag

SEQ ID NO: 6062664 - DNA, 25 bp, Homo sapien
gccttgcagatacccttagaagaag

SEQ ID NO: 6062665 - DNA, 25 bp, Homo sapien
cctttagagtagaactattagctga

SEQ ID NO: 6062666 - DNA, 25 bp, Homo sapien
tgacaagaatgagccctcccatgat

SEQ ID NO: 6062667 - DNA, 25 bp, Homo sapien
gacaattcttgcataggacccaagg

SEQ ID NO: 6062668 - DNA, 25 bp, Homo sapien
tgagccctcccatgataaatatcac

SEQ ID NO: 6062669 - DNA, 25 bp, Homo sapien
tatatgatctatcccacactctgtt

SEQ ID NO: 6062670 - DNA, 25 bp, Homo sapien
ggtaactcatgaggtcgacgctgaa

SEQ ID NO: 6062671 - DNA, 25 bp, Homo sapien
tgcctgtggatgcatatatgatcta

SEQ ID NO: 6062672 - DNA, 25 bp, Homo sapien
caatatacacagataacagaacttc

SEQ ID NO: 6062673 - DNA, 25 bp, Homo sapien
tcatccccaaatggtaatcagtact

SEQ ID NO: 6062674 - DNA, 25 bp, Homo sapien
gatggagtttgaacatcttgctgct

SEQ ID NO: 6062675 - DNA, 25 bp, Homo sapien
gatgcccctcttgttacaaaatgca

SEQ ID NO: 6062676 - DNA, 25 bp, Homo sapien
ggtaatcagtactccagcacattat

SEQ ID NO: 6062677 - DNA, 25 bp, Homo sapien
tgcaggtgagcaattactattcaag

SEQ ID NO: 6062678 - DNA, 25 bp, Homo sapien
tgggaaggcatcacccaaggttgac

SEQ ID NO: 6062679 - DNA, 25 bp, Homo sapien
ggagggtcccacagataattgcaat

SEQ ID NO: 6062680 - DNA, 25 bp, Homo sapien
atggttatatggacacagtgcctgt

SEQ ID NO: 6062681 - DNA, 25 bp, Homo sapien
tgccatcaggcacgttgacatcagc

SEQ ID NO: 6062682 - DNA, 25 bp, Homo sapien
tccaggaatccagtgcgggctgcgt

SEQ ID NO: 6062683 - DNA, 25 bp, Homo sapien
cacagcagtgtgaccctcttgaact

SEQ ID NO: 6062684 - DNA, 25 bp, Homo sapien
gagatcagattcagctgccagaaag

SEQ ID NO: 6062685 - DNA, 25 bp, Homo sapien
cgtcatggactggactggtaccgga

SEQ ID NO: 6062686 - DNA, 25 bp, Homo sapien
aggatgtccacgaggtcctgagccc

SEQ ID NO: 6062687 - DNA, 25 bp, Homo sapien
tccagtgcgggctgcgtcatggact

SEQ ID NO: 6062688 - DNA, 25 bp, Homo sapien
cctggcgtccctgcgatggagatca

SEQ ID NO: 6062689 - DNA, 25 bp, Homo sapien
cgtgctccactaggaccttcagggt

SEQ ID NO: 6062690 - DNA, 25 bp, Homo sapien
tggcggtgctgccaaacatcatgac

SEQ ID NO: 6062691 - DNA, 25 bp, Homo sapien
tggattggaagtgccccggtgccat

SEQ ID NO: 6062692 - DNA, 25 bp, Homo sapien
ggcgatggcggtgctgccaaacatc

SEQ ID NO: 6062693 - DNA, 25 bp, Homo sapien
caaggcttctattagcaggattatc

SEQ ID NO: 6062694 - DNA, 25 bp, Homo sapien
ggtacaaccagtggcctagttctaa

SEQ ID NO: 6062695 - DNA, 25 bp, Homo sapien
caacaagttcagtttggtacaacca

SEQ ID NO: 6062696 - DNA, 25 bp, Homo sapien
caaaggtccatctggtgagattctg

SEQ ID NO: 6062697 - DNA, 25 bp, Homo sapien
gaccaaggaagaacaaggcttctat

SEQ ID NO: 6062698 - DNA, 25 bp, Homo sapien
cagggttaaaaccagctactcgaga

SEQ ID NO: 6062699 - DNA, 25 bp, Homo sapien
gatggcaagctttctcaaaggtcca

SEQ ID NO: 6062700 - DNA, 25 bp, Homo sapien
taatcagctctgttaatacggtcta

SEQ ID NO: 6062701 - DNA, 25 bp, Homo sapien
ctagttctaaactagggaaccactg

SEQ ID NO: 6062702 - DNA, 25 bp, Homo sapien
taacactcaggacaataatcagctc

SEQ ID NO: 6062703 - DNA, 25 bp, Homo sapien
tgttaatacggtctaagaatacctg

SEQ ID NO: 6062704 - DNA, 25 bp, Homo sapien
ggtcaagattaactgtaatgcaggg

SEQ ID NO: 6062705 - DNA, 25 bp, Homo sapien
gattctgcgcgggtgtctccgggtg

SEQ ID NO: 6062706 - DNA, 25 bp, Homo sapien
ggatccggaggcgattctgcgcggg

SEQ ID NO: 6062707 - DNA, 25 bp, Homo sapien
gcgcttgcgcctggctagcgcttgc

SEQ ID NO: 6062708 - DNA, 25 bp, Homo sapien
ggttcttgcagatcatgcccggcat

SEQ ID NO: 6062709 - DNA, 25 bp, Homo sapien
tgcgcgggtgtctccgggtgggccg

SEQ ID NO: 6062710 - DNA, 25 bp, Homo sapien
tcatgcccggcatggtggacgtgga

SEQ ID NO: 6062711 - DNA, 25 bp, Homo sapien
tctgtgcgcgcttgcgcctggctag

SEQ ID NO: 6062712 - DNA, 25 bp, Homo sapien
tggctagcgcttgctcggctccaac

SEQ ID NO: 6062713 - DNA, 25 bp, Homo sapien
gcgcttgctcggctccaacacagtt

SEQ ID NO: 6062714 - DNA, 25 bp, Homo sapien
cggccggcgactgagggcttctttc

SEQ ID NO: 6062715 - DNA, 25 bp, Homo sapien
gtctgtgcgcgcttgcgcctggcta

SEQ ID NO: 6062716 - DNA, 25 bp, Homo sapien
tggtggacgtggagcagctcggcat

SEQ ID NO: 6062717 - DNA, 25 bp, Homo sapien
ttgtgaatcatcgacactaaaagta

SEQ ID NO: 6062718 - DNA, 25 bp, Homo sapien
ggctctttcacatctgcataatata

SEQ ID NO: 6062719 - DNA, 25 bp, Homo sapien
caaaataaggatagtcgccgttgtc

SEQ ID NO: 6062720 - DNA, 25 bp, Homo sapien
tcttcgaaccgcttcctcaaaggct

SEQ ID NO: 6062721 - DNA, 25 bp, Homo sapien
ttcggaatcgctcctgacctgccgt

SEQ ID NO: 6062722 - DNA, 25 bp, Homo sapien
ctgtagacacctgccgttcgcttat

SEQ ID NO: 6062723 - DNA, 25 bp, Homo sapien
cgttcgcttatgtcaatcttgttac

SEQ ID NO: 6062724 - DNA, 25 bp, Homo sapien
atcttgttacccagaatcacaaaag

SEQ ID NO: 6062725 - DNA, 25 bp, Homo sapien
cccaaatctgcatggtaacaaaatg

SEQ ID NO: 6062726 - DNA, 25 bp, Homo sapien
tcggtgaagattgactgtgtctgtc

SEQ ID NO: 6062727 - DNA, 25 bp, Homo sapien
aaatgatctgacctatcctcggtag

SEQ ID NO: 6062728 - DNA, 25 bp, Homo sapien
tatcctcggtagcaagaactcttcg

SEQ ID NO: 6062729 - DNA, 25 bp, Homo sapien
tagccctttgaaaaacctgtgacca

SEQ ID NO: 6062730 - DNA, 25 bp, Homo sapien
gagtcccagtgtctttctcgggatc

SEQ ID NO: 6062731 - DNA, 25 bp, Homo sapien
ttgatcacggcacgctcctccttgt

SEQ ID NO: 6062732 - DNA, 25 bp, Homo sapien
aatatctcatgctggtcaataacca

SEQ ID NO: 6062733 - DNA, 25 bp, Homo sapien
gtgaccaagtccctgaccagccgaa

SEQ ID NO: 6062734 - DNA, 25 bp, Homo sapien
ctctcccagtcattgtcgggccaca

SEQ ID NO: 6062735 - DNA, 25 bp, Homo sapien
tgcctctttccttcttctccctccc

SEQ ID NO: 6062736 - DNA, 25 bp, Homo sapien
ataaccaggccatcagcatctcggt

SEQ ID NO: 6062737 - DNA, 25 bp, Homo sapien
tctctctctcccagtcattgtcggg

SEQ ID NO: 6062738 - DNA, 25 bp, Homo sapien
tcgccgagggatccaccctttgaga

SEQ ID NO: 6062739 - DNA, 25 bp, Homo sapien
gtcccccaaatctcagttgcccaga

SEQ ID NO: 6062740 - DNA, 25 bp, Homo sapien
tccagctcgtagtccacaaatatct

SEQ ID NO: 6062741 - DNA, 25 bp, Homo sapien
taacttcactttggggttctgctgt

SEQ ID NO: 6062742 - DNA, 25 bp, Homo sapien
tcagcatctcggtaagctttgatca

SEQ ID NO: 6062743 - DNA, 25 bp, Homo sapien
tccaagtcgccgagggatccaccct

SEQ ID NO: 6062744 - DNA, 25 bp, Homo sapien
tcagttgcccagactccttttttcc

SEQ ID NO: 6062745 - DNA, 25 bp, Homo sapien
tccccttgatcctgtcatctctgaa

SEQ ID NO: 6062746 - DNA, 25 bp, Homo sapien
ccccaagaccgcctccaagtcgccg

SEQ ID NO: 6062747 - DNA, 25 bp, Homo sapien
ccacaccctggtcggctctctttct

SEQ ID NO: 6062748 - DNA, 25 bp, Homo sapien
tgtcatggtctcgatcccttgtcct

SEQ ID NO: 6062749 - DNA, 25 bp, Homo sapien
cgctgcgttgaaagacaatccccct

SEQ ID NO: 6062750 - DNA, 25 bp, Homo sapien
gggttctgctgttgggcctctactt

SEQ ID NO: 6062751 - DNA, 25 bp, Homo sapien
acggcacgctcctccttgtattcga

SEQ ID NO: 6062752 - DNA, 25 bp, Homo sapien
tgctgttgggcctctacttgcctct

SEQ ID NO: 6062753 - DNA, 25 bp, Homo sapien
cactgtaacttcactttggggttct

SEQ ID NO: 6062754 - DNA, 25 bp, Homo sapien
cagtcattgtcgggccacaccctgg

SEQ ID NO: 6062755 - DNA, 25 bp, Homo sapien
ctgaccagccgaagccgccggatgt

SEQ ID NO: 6062756 - DNA, 25 bp, Homo sapien
tccccctccactcatttccactgta

SEQ ID NO: 6062757 - DNA, 25 bp, Homo sapien
tcatgctggtcaataaccaggccat

SEQ ID NO: 6062758 - DNA, 25 bp, Homo sapien
tagaggtcgtttttaacaactggca

SEQ ID NO: 6062759 - DNA, 25 bp, Homo sapien
gtcccgtcccccaaatctcagttgc

SEQ ID NO: 6062760 - DNA, 25 bp, Homo sapien
tgatcctgtcatctctgaagtccct

SEQ ID NO: 6062761 - DNA, 25 bp, Homo sapien
tgaaaaacctgtgaccaagtccctg

SEQ ID NO: 6062762 - DNA, 25 bp, Homo sapien
tctctatagaggtcgtttttaacaa

SEQ ID NO: 6062763 - DNA, 25 bp, Homo sapien
gaccgcctccaagtcgccgagggat

SEQ ID NO: 6062764 - DNA, 25 bp, Homo sapien
tccctctctatagaggtcgttttta

SEQ ID NO: 6062765 - DNA, 25 bp, Homo sapien
tctacttgcctctttccttcttctc

SEQ ID NO: 6062766 - DNA, 25 bp, Homo sapien
tctccctccccttgatcctgtcatc

SEQ ID NO: 6062767 - DNA, 25 bp, Homo sapien
agtccctctctctctcccagtcatt

SEQ ID NO: 6062768 - DNA, 25 bp, Homo sapien
tccacaaatatctcatgctggtcaa

SEQ ID NO: 6062769 - DNA, 25 bp, Homo sapien
aaacctgtgaccaagtccctgacca

SEQ ID NO: 6062770 - DNA, 25 bp, Homo sapien
aggccatcagcatctcggtaagctt

SEQ ID NO: 6062771 - DNA, 25 bp, Homo sapien
cgagatcgctcccgcctttcccgtt

SEQ ID NO: 6062772 - DNA, 25 bp, Homo sapien
cctggtcggctctctttcttgccat

SEQ ID NO: 6062773 - DNA, 25 bp, Homo sapien
tggtcaataaccaggccatcagcat

SEQ ID NO: 6062774 - DNA, 25 bp, Homo sapien
ttgagagtcctttccagctcgtagt

SEQ ID NO: 6062775 - DNA, 25 bp, Homo sapien
cagtgtctttctcgggatcgagatc

SEQ ID NO: 6062776 - DNA, 25 bp, Homo sapien
ctttctcgggatcgagatcgctccc

SEQ ID NO: 6062777 - DNA, 25 bp, Homo sapien
agggatccaccctttgagagtcctt

SEQ ID NO: 6062778 - DNA, 25 bp, Homo sapien
gttgaaagacaatccccctccactc

SEQ ID NO: 6062779 - DNA, 25 bp, Homo sapien
ccttcttctccctccccttgatcct

SEQ ID NO: 6062780 - DNA, 25 bp, Homo sapien
caaatctcagttgcccagactcctt

SEQ ID NO: 6062781 - DNA, 25 bp, Homo sapien
ctctttcttgccatctcttctcccg

SEQ ID NO: 6062782 - DNA, 25 bp, Homo sapien
caactggcaagttaataggttttcg

SEQ ID NO: 6062783 - DNA, 25 bp, Homo sapien
atctcttctcccggcccctgtcatg

SEQ ID NO: 6062784 - DNA, 25 bp, Homo sapien
atcccttgtcctcgagtcccagtgt

SEQ ID NO: 6062785 - DNA, 25 bp, Homo sapien
tcgtagtccacaaatatctcatgct

SEQ ID NO: 6062786 - DNA, 25 bp, Homo sapien
ctctgaagtccctctctctctccca

SEQ ID NO: 6062787 - DNA, 25 bp, Homo sapien
gtattcgatgaaggcgtagcccttt

SEQ ID NO: 6062788 - DNA, 25 bp, Homo sapien
cgggatcgagatcgctcccgccttt

SEQ ID NO: 6062789 - DNA, 25 bp, Homo sapien
aagtccctgaccagccgaagccgcc

SEQ ID NO: 6062790 - DNA, 25 bp, Homo sapien
attagactcacgctgcgttgaaaga

SEQ ID NO: 6062791 - DNA, 25 bp, Homo sapien
gactcacgctgcgttgaaagacaat

SEQ ID NO: 6062792 - DNA, 25 bp, Homo sapien
tcggctctctttcttgccatctctt

SEQ ID NO: 6062793 - DNA, 25 bp, Homo sapien
agacaatccccctccactcatttcc

SEQ ID NO: 6062794 - DNA, 25 bp, Homo sapien
gtcctttccagctcgtagtccacaa

SEQ ID NO: 6062795 - DNA, 25 bp, Homo sapien
actttggggttctgctgttgggcct

SEQ ID NO: 6062796 - DNA, 25 bp, Homo sapien
tctcggtaagctttgatcacggcac

SEQ ID NO: 6062797 - DNA, 25 bp, Homo sapien
tctcccggcccctgtcatggtctcg

SEQ ID NO: 6062798 - DNA, 25 bp, Homo sapien
acgctcctccttgtattcgatgaag

SEQ ID NO: 6062799 - DNA, 25 bp, Homo sapien
tccactcatttccactgtaacttca

SEQ ID NO: 6062800 - DNA, 25 bp, Homo sapien
catttccactgtaacttcactttgg

SEQ ID NO: 6062801 - DNA, 25 bp, Homo sapien
cttgccatctcttctcccggcccct

SEQ ID NO: 6062802 - DNA, 25 bp, Homo sapien
tgggcctctacttgcctctttcctt

SEQ ID NO: 6062803 - DNA, 25 bp, Homo sapien
taagctttgatcacggcacgctcct

SEQ ID NO: 6062804 - DNA, 25 bp, Homo sapien
ggtctcgatcccttgtcctcgagtc

SEQ ID NO: 6062805 - DNA, 25 bp, Homo sapien
gtcctcgagtcccagtgtctttctc

SEQ ID NO: 6062806 - DNA, 25 bp, Homo sapien
ggcccctgtcatggtctcgatccct

SEQ ID NO: 6062807 - DNA, 25 bp, Homo sapien
ttgtcgggccacaccctggtcggct

SEQ ID NO: 6062808 - DNA, 25 bp, Homo sapien
caccctttgagagtcctttccagct

SEQ ID NO: 6062809 - DNA, 25 bp, Homo sapien
ccgttttccctctctatagaggtcg

SEQ ID NO: 6062810 - DNA, 25 bp, Homo sapien
ctccttgtattcgatgaaggcgtag

SEQ ID NO: 6062811 - DNA, 25 bp, Homo sapien
tgtcatctctgaagtccctctctct

SEQ ID NO: 6062812 - DNA, 25 bp, Homo sapien
gatgaaggcgtagccctttgaaaaa

SEQ ID NO: 6062813 - DNA, 25 bp, Homo sapien
gaacatctccgagcagaggaaccgt

SEQ ID NO: 6062814 - DNA, 25 bp, Homo sapien
gatgttccccatgaggtcccgtttg

SEQ ID NO: 6062815 - DNA, 25 bp, Homo sapien
ggtcccgtttgagggcgatgtcaca

SEQ ID NO: 6062816 - DNA, 25 bp, Homo sapien
cacttgttaaggcaggacacggttt

SEQ ID NO: 6062817 - DNA, 25 bp, Homo sapien
tagcggatcgtatgctcactgagag

SEQ ID NO: 6062818 - DNA, 25 bp, Homo sapien
tctgcagacggttagggaagccact

SEQ ID NO: 6062819 - DNA, 25 bp, Homo sapien
gaagccactgagcatcgtgctgccc

SEQ ID NO: 6062820 - DNA, 25 bp, Homo sapien
tgtgtgtaggagtgcgctcaccctg

SEQ ID NO: 6062821 - DNA, 25 bp, Homo sapien
tcattgggacacatgctgcttagct

SEQ ID NO: 6062822 - DNA, 25 bp, Homo sapien
cttctcctcaatgggatccagggcc

SEQ ID NO: 6062823 - DNA, 25 bp, Homo sapien
ggcactgtctctttcaggcagcacg

SEQ ID NO: 6062824 - DNA, 25 bp, Homo sapien
gtgttcctcgtactcaaagcggtgg

SEQ ID NO: 6062825 - DNA, 25 bp, Homo sapien
gccttgtctgtggaaatgccgaggc

SEQ ID NO: 6062826 - DNA, 25 bp, Homo sapien
gaagccatccagcatagtgcagccg

SEQ ID NO: 6062827 - DNA, 25 bp, Homo sapien
ctcagagcaacggaagcgctcctgg

SEQ ID NO: 6062828 - DNA, 25 bp, Homo sapien
gtcgtccgtgaatgcgtggcccgcc

SEQ ID NO: 6062829 - DNA, 25 bp, Homo sapien
ccgtgaatgcgtggcccgcctcatt

SEQ ID NO: 6062830 - DNA, 25 bp, Homo sapien
tgagtttgccgtccgggagctcgta

SEQ ID NO: 6062831 - DNA, 25 bp, Homo sapien
agagcatctcagagcaacggaagcg

SEQ ID NO: 6062832 - DNA, 25 bp, Homo sapien
gtcttcctctcaggagcggcagcca

SEQ ID NO: 6062833 - DNA, 25 bp, Homo sapien
tctatgatgtgcaggtggtcgtccg

SEQ ID NO: 6062834 - DNA, 25 bp, Homo sapien
gccacacagtagcacgttggcggcc

SEQ ID NO: 6062835 - DNA, 25 bp, Homo sapien
tgctggaggccttgtctgtggaaat

SEQ ID NO: 6062836 - DNA, 25 bp, Homo sapien
ggagctcgtagtccacgcgcagctc

SEQ ID NO: 6062837 - DNA, 25 bp, Homo sapien
tgtagttttaactggagaatcaaaa

SEQ ID NO: 6062838 - DNA, 25 bp, Homo sapien
ttatgtgtggcatcagaatcaagtt

SEQ ID NO: 6062839 - DNA, 25 bp, Homo sapien
tttattatgtgtggcatcagaatca

SEQ ID NO: 6062840 - DNA, 25 bp, Homo sapien
caatccctgcttcaaggattctaga

SEQ ID NO: 6062841 - DNA, 25 bp, Homo sapien
gagaatcaaaaaggacaactatagg

SEQ ID NO: 6062842 - DNA, 25 bp, Homo sapien
caactataggtctgaaaaagtgagg

SEQ ID NO: 6062843 - DNA, 25 bp, Homo sapien
aaggacaactataggtctgaaaaag

SEQ ID NO: 6062844 - DNA, 25 bp, Homo sapien
ttttgtagttttaactggagaatca

SEQ ID NO: 6062845 - DNA, 25 bp, Homo sapien
ctggagaatcaaaaaggacaactat

SEQ ID NO: 6062846 - DNA, 25 bp, Homo sapien
tattatgtgtggcatcagaatcaag

SEQ ID NO: 6062847 - DNA, 25 bp, Homo sapien
ttcccaatccctgcttcaaggattc

SEQ ID NO: 6062848 - DNA, 25 bp, Homo sapien
ggacaactataggtctgaaaaagtg

SEQ ID NO: 6062849 - DNA, 25 bp, Homo sapien
tgtgtagcagatggccataacgagc

SEQ ID NO: 6062850 - DNA, 25 bp, Homo sapien
aaatgaaaaacaccgccatgatgac

SEQ ID NO: 6062851 - DNA, 25 bp, Homo sapien
gatcaccgggttcatgcagcagtgg

SEQ ID NO: 6062852 - DNA, 25 bp, Homo sapien
tcagagtgtggaaatgcctccagct

SEQ ID NO: 6062853 - DNA, 25 bp, Homo sapien
aaaaatgagccggatggccttgtac

SEQ ID NO: 6062854 - DNA, 25 bp, Homo sapien
cacaatagagagttccggctctgct

SEQ ID NO: 6062855 - DNA, 25 bp, Homo sapien
tccaacaaaggcgtagatcaccggg

SEQ ID NO: 6062856 - DNA, 25 bp, Homo sapien
gagtaggcgatcacctctgtcacca

SEQ ID NO: 6062857 - DNA, 25 bp, Homo sapien
tgtatcctctgggtaaagagcactg

SEQ ID NO: 6062858 - DNA, 25 bp, Homo sapien
gatagccacattgtagggtgtccag

SEQ ID NO: 6062859 - DNA, 25 bp, Homo sapien
ccataacgagcagagggagaacgag

SEQ ID NO: 6062860 - DNA, 25 bp, Homo sapien
cccaggtgcatgagcaagtgcctgt

SEQ ID NO: 6062861 - DNA, 25 bp, Homo sapien
cacaaagctgggtcaagtccatgcc

SEQ ID NO: 6062862 - DNA, 25 bp, Homo sapien
caacgtgagacaagcagttcccaag

SEQ ID NO: 6062863 - DNA, 25 bp, Homo sapien
tcccaagttggtgacttagaggctg

SEQ ID NO: 6062864 - DNA, 25 bp, Homo sapien
gacatgatacggcttctgcctcaga

SEQ ID NO: 6062865 - DNA, 25 bp, Homo sapien
ggcaagctgccaacaacactcatat

SEQ ID NO: 6062866 - DNA, 25 bp, Homo sapien
gaatccgcccactgtatatccttag

SEQ ID NO: 6062867 - DNA, 25 bp, Homo sapien
gtccatgccctaacttgtcagagag

SEQ ID NO: 6062868 - DNA, 25 bp, Homo sapien
tcagtgacataaacggcaagagcca

SEQ ID NO: 6062869 - DNA, 25 bp, Homo sapien
gaggaagactcagactattcatgat

SEQ ID NO: 6062870 - DNA, 25 bp, Homo sapien
ggacctcacaggtggtagacatgat

SEQ ID NO: 6062871 - DNA, 25 bp, Homo sapien
gaggtaaatgatacacactgtgtgg

SEQ ID NO: 6062872 - DNA, 25 bp, Homo sapien
caggtacttgtctctctcacaggtg

SEQ ID NO: 6062873 - DNA, 25 bp, Homo sapien
tcagttgtggcaacccgaaacaggg

SEQ ID NO: 6062874 - DNA, 25 bp, Homo sapien
ggttactatcaaacaaggatgccac

SEQ ID NO: 6062875 - DNA, 25 bp, Homo sapien
ttcattccaaagattagtgtttgcc

SEQ ID NO: 6062876 - DNA, 25 bp, Homo sapien
tttttggagacgacagatcaccatt

SEQ ID NO: 6062877 - DNA, 25 bp, Homo sapien
caaagtgtgttggtttcgagtcaaa

SEQ ID NO: 6062878 - DNA, 25 bp, Homo sapien
tcaccatttgatacctatcaggatc

SEQ ID NO: 6062879 - DNA, 25 bp, Homo sapien
ggctccatttcagttgtggcaaccc

SEQ ID NO: 6062880 - DNA, 25 bp, Homo sapien
cagcataaaactgccccaagtcttt

SEQ ID NO: 6062881 - DNA, 25 bp, Homo sapien
ggtgcatattcaggtttaaagttaa

SEQ ID NO: 6062882 - DNA, 25 bp, Homo sapien
aaggtcatcccaaccgggctccatt

SEQ ID NO: 6062883 - DNA, 25 bp, Homo sapien
tacaggcaacccctttgataattgg

SEQ ID NO: 6062884 - DNA, 25 bp, Homo sapien
taatgaacctgaggtccttaaaatg

SEQ ID NO: 6062885 - DNA, 25 bp, Homo sapien
tctcagggaaggctgtcgccgctgc

SEQ ID NO: 6062886 - DNA, 25 bp, Homo sapien
tctgcttttaagtcctctcagggaa

SEQ ID NO: 6062887 - DNA, 25 bp, Homo sapien
tctatgaagtctcacgaggcaagtg

SEQ ID NO: 6062888 - DNA, 25 bp, Homo sapien
ttggcccacgcgtcacctttacttg

SEQ ID NO: 6062889 - DNA, 25 bp, Homo sapien
ccgctgccgctgcattaaatagtta

SEQ ID NO: 6062890 - DNA, 25 bp, Homo sapien
gagttttatcatcgtcaccgcactg

SEQ ID NO: 6062891 - DNA, 25 bp, Homo sapien
tatgtacatcgcagagagtcccagg

SEQ ID NO: 6062892 - DNA, 25 bp, Homo sapien
ggaagcatctcggtttccttctgct

SEQ ID NO: 6062893 - DNA, 25 bp, Homo sapien
tctgcttcttggctactattcccgt

SEQ ID NO: 6062894 - DNA, 25 bp, Homo sapien
gctactattcccgtcttgagggcta

SEQ ID NO: 6062895 - DNA, 25 bp, Homo sapien
cagtaaaccactgttctatgaagtc

SEQ ID NO: 6062896 - DNA, 25 bp, Homo sapien
cgaggcaagtgctcaaggtaaaaaa

SEQ ID NO: 6062897 - DNA, 25 bp, Homo sapien
taacgtgctaccaacaaaactagca

SEQ ID NO: 6062898 - DNA, 25 bp, Homo sapien
caattactagtgtgtccaaatgtta

SEQ ID NO: 6062899 - DNA, 25 bp, Homo sapien
gcacataagagcctgtaaatgatga

SEQ ID NO: 6062900 - DNA, 25 bp, Homo sapien
cagtgttctcgacatcacaggcaga

SEQ ID NO: 6062901 - DNA, 25 bp, Homo sapien
ggagtttctaccactcggcatttat

SEQ ID NO: 6062902 - DNA, 25 bp, Homo sapien
tttccaaaaaatcgaaggctataga

SEQ ID NO: 6062903 - DNA, 25 bp, Homo sapien
catagaaacaaagactaacaatttg

SEQ ID NO: 6062904 - DNA, 25 bp, Homo sapien
gcagctcccacaaaaccaaacgtag

SEQ ID NO: 6062905 - DNA, 25 bp, Homo sapien
aagtcacactaaaagtatctcatag

SEQ ID NO: 6062906 - DNA, 25 bp, Homo sapien
caaaactagcacataagagcctgta

SEQ ID NO: 6062907 - DNA, 25 bp, Homo sapien
acttgtaagaattctgcctttatgc

SEQ ID NO: 6062908 - DNA, 25 bp, Homo sapien
tatgcattaaataacgtgctaccaa

SEQ ID NO: 6062909 - DNA, 25 bp, Homo sapien
cctagcttgagagaacaactgcagc

SEQ ID NO: 6062910 - DNA, 25 bp, Homo sapien
ggcaccagccagcttgacacactgt

SEQ ID NO: 6062911 - DNA, 25 bp, Homo sapien
tggtataaggaaacagatcagctgc

SEQ ID NO: 6062912 - DNA, 25 bp, Homo sapien
gctattgctcgacaccgcaggatgc

SEQ ID NO: 6062913 - DNA, 25 bp, Homo sapien
actgaggatctggtataaggaaaca

SEQ ID NO: 6062914 - DNA, 25 bp, Homo sapien
cctcttctgccctagcttgagagaa

SEQ ID NO: 6062915 - DNA, 25 bp, Homo sapien
gggtgtctcccatatcgctgtcttt

SEQ ID NO: 6062916 - DNA, 25 bp, Homo sapien
gaagccaggctattgctcgacaccg

SEQ ID NO: 6062917 - DNA, 25 bp, Homo sapien
tgtgggacgtcagcaggaatttccc

SEQ ID NO: 6062918 - DNA, 25 bp, Homo sapien
tgaccatcttttgggctggcgggcc

SEQ ID NO: 6062919 - DNA, 25 bp, Homo sapien
agggcgcagtcctttccccgtcaga

SEQ ID NO: 6062920 - DNA, 25 bp, Homo sapien
tagcagcaccggtctagcgggtagt

SEQ ID NO: 6062921 - DNA, 25 bp, Homo sapien
cctcttcagtatggagggtgctgca

SEQ ID NO: 6062922 - DNA, 25 bp, Homo sapien
gccttagagcttcccacctcttgaa

SEQ ID NO: 6062923 - DNA, 25 bp, Homo sapien
agcctgcgcttaccagctggcattc

SEQ ID NO: 6062924 - DNA, 25 bp, Homo sapien
aagttgggtgataggctgccctgcc

SEQ ID NO: 6062925 - DNA, 25 bp, Homo sapien
agttctccctaactgctaaaaggag

SEQ ID NO: 6062926 - DNA, 25 bp, Homo sapien
taaagtgcacttaataccagatggg

SEQ ID NO: 6062927 - DNA, 25 bp, Homo sapien
cttagaagttgggtgataggctgcc

SEQ ID NO: 6062928 - DNA, 25 bp, Homo sapien
ggatttattccacactccactggta

SEQ ID NO: 6062929 - DNA, 25 bp, Homo sapien
ggtcaagccttagagcttcccacct

SEQ ID NO: 6062930 - DNA, 25 bp, Homo sapien
aaaagactggatatcaggacaccag

SEQ ID NO: 6062931 - DNA, 25 bp, Homo sapien
ccctgccgctggagaatcttggtct

SEQ ID NO: 6062932 - DNA, 25 bp, Homo sapien
tcctggtttggaatggctagtgacc

SEQ ID NO: 6062933 - DNA, 25 bp, Homo sapien
catagaaggattcatacgcactgca

SEQ ID NO: 6062934 - DNA, 25 bp, Homo sapien
cacagtaatgcatgccgtaattgta

SEQ ID NO: 6062935 - DNA, 25 bp, Homo sapien
cattgtgagagattggctgcgcaga

SEQ ID NO: 6062936 - DNA, 25 bp, Homo sapien
tggctgcgcagatgtaagtcgtaag

SEQ ID NO: 6062937 - DNA, 25 bp, Homo sapien
gtgccaattactcagcccacaagca

SEQ ID NO: 6062938 - DNA, 25 bp, Homo sapien
gaaactagtaaacaccttagataga

SEQ ID NO: 6062939 - DNA, 25 bp, Homo sapien
ccttagatagagttgtgccaattac

SEQ ID NO: 6062940 - DNA, 25 bp, Homo sapien
ggtttcatggacttggaattatcaa

SEQ ID NO: 6062941 - DNA, 25 bp, Homo sapien
gggaggtgaatgaccactgtttatt

SEQ ID NO: 6062942 - DNA, 25 bp, Homo sapien
gcaataattgtagggtttcatggac

SEQ ID NO: 6062943 - DNA, 25 bp, Homo sapien
ccctgggtggcactgcacagtaatg

SEQ ID NO: 6062944 - DNA, 25 bp, Homo sapien
aattatcaagagtcccatgccctgg

SEQ ID NO: 6062945 - DNA, 25 bp, Homo sapien
tctatattacacctgacttctccat

SEQ ID NO: 6062946 - DNA, 25 bp, Homo sapien
cagatcccgtgttttgaagagggca

SEQ ID NO: 6062947 - DNA, 25 bp, Homo sapien
ccaaaatctgatcagagagagaagt

SEQ ID NO: 6062948 - DNA, 25 bp, Homo sapien
actgggtagagagaccacctccgtc

SEQ ID NO: 6062949 - DNA, 25 bp, Homo sapien
taaatcttgaatggaatgtctgttt

SEQ ID NO: 6062950 - DNA, 25 bp, Homo sapien
tctgggctgttgtcgttttcatcaa

SEQ ID NO: 6062951 - DNA, 25 bp, Homo sapien
cacttccatggtgtacctttctaca

SEQ ID NO: 6062952 - DNA, 25 bp, Homo sapien
tctatgattactttacactgggtag

SEQ ID NO: 6062953 - DNA, 25 bp, Homo sapien
tttcctccgaaatccagatcccgtg

SEQ ID NO: 6062954 - DNA, 25 bp, Homo sapien
ggaatgtctgtttctatattacacc

SEQ ID NO: 6062955 - DNA, 25 bp, Homo sapien
ggcaacaaccattcctggaggtgaa

SEQ ID NO: 6062956 - DNA, 25 bp, Homo sapien
gaagagggcaacaaccattcctgga

SEQ ID NO: 6062957 - DNA, 25 bp, Homo sapien
tgagcagtcgaagtcaggcttgccc

SEQ ID NO: 6062958 - DNA, 25 bp, Homo sapien
ccagcttgcggttcacttcattgtg

SEQ ID NO: 6062959 - DNA, 25 bp, Homo sapien
cggttcacttcattgtgcaggtggc

SEQ ID NO: 6062960 - DNA, 25 bp, Homo sapien
gtcgaagtcaggcttgcccagcttg

SEQ ID NO: 6062961 - DNA, 25 bp, Homo sapien
agttcctcgcgatccggcgggcagt

SEQ ID NO: 6062962 - DNA, 25 bp, Homo sapien
acagcccagctgtggcggcccagtt

SEQ ID NO: 6062963 - DNA, 25 bp, Homo sapien
aaataaatgtatgaactgggccatg

SEQ ID NO: 6062964 - DNA, 25 bp, Homo sapien
cacttttgagcagtcgaagtcaggc

SEQ ID NO: 6062965 - DNA, 25 bp, Homo sapien
aagcatgcccgggtgcgggtgtctg

SEQ ID NO: 6062966 - DNA, 25 bp, Homo sapien
tcatccacttttgagcagtcgaagt

SEQ ID NO: 6062967 - DNA, 25 bp, Homo sapien
gcgccagcgctcatccacttttgag

SEQ ID NO: 6062968 - DNA, 25 bp, Homo sapien
ataaatgtatgaactgggccatgtc

SEQ ID NO: 6062969 - DNA, 25 bp, Homo sapien
gaatctggtatgacggatgacaaca

SEQ ID NO: 6062970 - DNA, 25 bp, Homo sapien
tatttacgagcaaatgaggctcatc

SEQ ID NO: 6062971 - DNA, 25 bp, Homo sapien
ccagtcgtcgtttttccaactctag

SEQ ID NO: 6062972 - DNA, 25 bp, Homo sapien
gaagccgctcatgttccatgtctaa

SEQ ID NO: 6062973 - DNA, 25 bp, Homo sapien
tgttccatgtctaaatgccgcagcc

SEQ ID NO: 6062974 - DNA, 25 bp, Homo sapien
taggcgttccttttctacctgcagc

SEQ ID NO: 6062975 - DNA, 25 bp, Homo sapien
tttcggcctcgatatccagtcgtcg

SEQ ID NO: 6062976 - DNA, 25 bp, Homo sapien
ctctttctcgatttgtaggcgttcc

SEQ ID NO: 6062977 - DNA, 25 bp, Homo sapien
caggactctgcggatccctttcttc

SEQ ID NO: 6062978 - DNA, 25 bp, Homo sapien
tgcatcatttcggaatccaatcttt

SEQ ID NO: 6062979 - DNA, 25 bp, Homo sapien
gaaatcgggaagttcattttctctc

SEQ ID NO: 6062980 - DNA, 25 bp, Homo sapien
accttgacctcagttaaggatccac

SEQ ID NO: 6062981 - DNA, 25 bp, Homo sapien
tcttgttccttacagagggagcgat

SEQ ID NO: 6062982 - DNA, 25 bp, Homo sapien
gagggagcgatccatctctcacaga

SEQ ID NO: 6062983 - DNA, 25 bp, Homo sapien
tcacatggatgttcaggttctgaat

SEQ ID NO: 6062984 - DNA, 25 bp, Homo sapien
gtctgctcagtcctatgcagcgcag

SEQ ID NO: 6062985 - DNA, 25 bp, Homo sapien
ctactgcccgggcaagcagtggtgt

SEQ ID NO: 6062986 - DNA, 25 bp, Homo sapien
cgtgacatcagctgagaacgtcttg

SEQ ID NO: 6062987 - DNA, 25 bp, Homo sapien
gcttatttaattcgtccatgcaaag

SEQ ID NO: 6062988 - DNA, 25 bp, Homo sapien
gaatctaaacctaccgtgacatcag

SEQ ID NO: 6062989 - DNA, 25 bp, Homo sapien
tctcacagactgtaatgtacccatt

SEQ ID NO: 6062990 - DNA, 25 bp, Homo sapien
caatcttcccttaagacctgccagg

SEQ ID NO: 6062991 - DNA, 25 bp, Homo sapien
gtagtttcacatctctcaaaaatgg

SEQ ID NO: 6062992 - DNA, 25 bp, Homo sapien
catgcaaagcttatacgtgtatcac

SEQ ID NO: 6062993 - DNA, 25 bp, Homo sapien
gtctagtttgagaatacttttaagc

SEQ ID NO: 6062994 - DNA, 25 bp, Homo sapien
cgtctagtttgagaatacttttaag

SEQ ID NO: 6062995 - DNA, 25 bp, Homo sapien
tctagtttgagaatacttttaagcc

SEQ ID NO: 6062996 - DNA, 25 bp, Homo sapien
ttttcttttgccttgggttcatcca

SEQ ID NO: 6062997 - DNA, 25 bp, Homo sapien
aacccttggccgcttcactgctttg

SEQ ID NO: 6062998 - DNA, 25 bp, Homo sapien
tgggttcatccaaaatgggtactgt

SEQ ID NO: 6062999 - DNA, 25 bp, Homo sapien
ttgccttgggttcatccaaaatggg

SEQ ID NO: 6063000 - DNA, 25 bp, Homo sapien
aagtctacaggcaaacccttggccg

SEQ ID NO: 6063001 - DNA, 25 bp, Homo sapien
tgaaaaccgcaatcaatcccatggg

SEQ ID NO: 6063002 - DNA, 25 bp, Homo sapien
gggtactgtcccatgcttggtctag

SEQ ID NO: 6063003 - DNA, 25 bp, Homo sapien
tcacgccgaccggcatggacagtac

SEQ ID NO: 6063004 - DNA, 25 bp, Homo sapien
catccaaaatgggtactgtcccatg

SEQ ID NO: 6063005 - DNA, 25 bp, Homo sapien
tcccatgcttggtctagaagagtcc

SEQ ID NO: 6063006 - DNA, 25 bp, Homo sapien
ttgtttctcgttaaagacaagtctc

SEQ ID NO: 6063007 - DNA, 25 bp, Homo sapien
ttggccgcttcactgctttgcttgg

SEQ ID NO: 6063008 - DNA, 25 bp, Homo sapien
tccggaaattccaaagaaaacatca

SEQ ID NO: 6063009 - DNA, 25 bp, Homo sapien
gattcaaattacagttgtcaaagca

SEQ ID NO: 6063010 - DNA, 25 bp, Homo sapien
tgtaattaacatggtccaggacagc

SEQ ID NO: 6063011 - DNA, 25 bp, Homo sapien
ccgtattcaaggattacagagctac

SEQ ID NO: 6063012 - DNA, 25 bp, Homo sapien
caagaaatgtgcctagaaaggataa

SEQ ID NO: 6063013 - DNA, 25 bp, Homo sapien
tacatcagactagatacaacatgca

SEQ ID NO: 6063014 - DNA, 25 bp, Homo sapien
aaaacctgtcatgggctggtttaca

SEQ ID NO: 6063015 - DNA, 25 bp, Homo sapien
ggaaacagtatagctacaatgtcaa

SEQ ID NO: 6063016 - DNA, 25 bp, Homo sapien
tgtgatgtggaactaaaatacgtcg

SEQ ID NO: 6063017 - DNA, 25 bp, Homo sapien
tgatgcagacattttaatccagtgc

SEQ ID NO: 6063018 - DNA, 25 bp, Homo sapien
gcacagaacatctacatcagtcttc

SEQ ID NO: 6063019 - DNA, 25 bp, Homo sapien
aatccagtgctataggtaggctcac

SEQ ID NO: 6063020 - DNA, 25 bp, Homo sapien
tgcttactaggaatgcgcaaaagga

SEQ ID NO: 6063021 - DNA, 25 bp, Homo sapien
aaaggccactgggatatttagtatt

SEQ ID NO: 6063022 - DNA, 25 bp, Homo sapien
ccactgggatatttagtatttgtcc

SEQ ID NO: 6063023 - DNA, 25 bp, Homo sapien
ttgtccttccatggaaaacataatc

SEQ ID NO: 6063024 - DNA, 25 bp, Homo sapien
ccagttcctaaagcataaaagagtg

SEQ ID NO: 6063025 - DNA, 25 bp, Homo sapien
tatgatacacttcatagattctcaa

SEQ ID NO: 6063026 - DNA, 25 bp, Homo sapien
tcagtctgtaattcgaataatgaag

SEQ ID NO: 6063027 - DNA, 25 bp, Homo sapien
cgaataatgaagatggcataacaaa

SEQ ID NO: 6063028 - DNA, 25 bp, Homo sapien
gcctatgaacagtcagacttgtcct

SEQ ID NO: 6063029 - DNA, 25 bp, Homo sapien
gctttaggccacgtatatgatacac

SEQ ID NO: 6063030 - DNA, 25 bp, Homo sapien
gaatgcgcaaaaggatgagatggat

SEQ ID NO: 6063031 - DNA, 25 bp, Homo sapien
gaaaatcagcctatgaacagtcaga

SEQ ID NO: 6063032 - DNA, 25 bp, Homo sapien
tactcaggccctttaacactaataa

SEQ ID NO: 6063033 - DNA, 25 bp, Homo sapien
cacgtatactcaggccctttaacac

SEQ ID NO: 6063034 - DNA, 25 bp, Homo sapien
ctcaggccctttaacactaataatc

SEQ ID NO: 6063035 - DNA, 25 bp, Homo sapien
actcaggccctttaacactaataat

SEQ ID NO: 6063036 - DNA, 25 bp, Homo sapien
ctttaacactaataatccaaagtgg

SEQ ID NO: 6063037 - DNA, 25 bp, Homo sapien
cctttaacactaataatccaaagtg

SEQ ID NO: 6063038 - DNA, 25 bp, Homo sapien
taatccaaagtggagacccaaccca

SEQ ID NO: 6063039 - DNA, 25 bp, Homo sapien
atccaaagtggagacccaacccagt

SEQ ID NO: 6063040 - DNA, 25 bp, Homo sapien
aatccaaagtggagacccaacccag

SEQ ID NO: 6063041 - DNA, 25 bp, Homo sapien
tcaggccctttaacactaataatcc

SEQ ID NO: 6063042 - DNA, 25 bp, Homo sapien
tatactcaggccctttaacactaat

SEQ ID NO: 6063043 - DNA, 25 bp, Homo sapien
caggccctttaacactaataatcca

SEQ ID NO: 6063044 - DNA, 25 bp, Homo sapien
ttcaacttcatagggatgtgataac

SEQ ID NO: 6063045 - DNA, 25 bp, Homo sapien
ggacttggtcttggctcaatagagc

SEQ ID NO: 6063046 - DNA, 25 bp, Homo sapien
tcaatagagcctcactggtgtttgc

SEQ ID NO: 6063047 - DNA, 25 bp, Homo sapien
gaaggatcagcacctattttggagt

SEQ ID NO: 6063048 - DNA, 25 bp, Homo sapien
catgtaagagaccacactgctgtag

SEQ ID NO: 6063049 - DNA, 25 bp, Homo sapien
ccattgtaacattccgagccttttg

SEQ ID NO: 6063050 - DNA, 25 bp, Homo sapien
tggtgtttgctcagattgggcagcc

SEQ ID NO: 6063051 - DNA, 25 bp, Homo sapien
tgagttggaattcatgctgccatga

SEQ ID NO: 6063052 - DNA, 25 bp, Homo sapien
catgatctacttgaccagaggcagc

SEQ ID NO: 6063053 - DNA, 25 bp, Homo sapien
gaagccaatggaggtacaactcctc

SEQ ID NO: 6063054 - DNA, 25 bp, Homo sapien
gcagcctatgcccaaagctacttgg

SEQ ID NO: 6063055 - DNA, 25 bp, Homo sapien
ggctggtgacaccacacccaaaagg

SEQ ID NO: 6063056 - DNA, 25 bp, Homo sapien
aagagttttaatggcaaagttggct

SEQ ID NO: 6063057 - DNA, 25 bp, Homo sapien
caggatggacgtgttgacagccagc

SEQ ID NO: 6063058 - DNA, 25 bp, Homo sapien
atggagcaggcggacagtgggttcc

SEQ ID NO: 6063059 - DNA, 25 bp, Homo sapien
gctcaggatggacgtgttgacagcc

SEQ ID NO: 6063060 - DNA, 25 bp, Homo sapien
acagtactgccggaaggtctggtag

SEQ ID NO: 6063061 - DNA, 25 bp, Homo sapien
ccctgaagaagcagcgagcgaggct

SEQ ID NO: 6063062 - DNA, 25 bp, Homo sapien
caaagttggctgcagcgacaatgcc

SEQ ID NO: 6063063 - DNA, 25 bp, Homo sapien
tactgccggaaggtctggtagcagc

SEQ ID NO: 6063064 - DNA, 25 bp, Homo sapien
tttaatggcaaagttggctgcagcg

SEQ ID NO: 6063065 - DNA, 25 bp, Homo sapien
ccaggccgtagtcggtgaagagcac

SEQ ID NO: 6063066 - DNA, 25 bp, Homo sapien
tggctgcagcgacaatgccactcgg

SEQ ID NO: 6063067 - DNA, 25 bp, Homo sapien
tgggttccgcacgtggcaggtgcac

SEQ ID NO: 6063068 - DNA, 25 bp, Homo sapien
gaagctcgaggtatatcaagaggcc

SEQ ID NO: 6063069 - DNA, 25 bp, Homo sapien
tgtagcaccaacgtgagccactgaa

SEQ ID NO: 6063070 - DNA, 25 bp, Homo sapien
tcccggactcgacgctgcaggtcgt

SEQ ID NO: 6063071 - DNA, 25 bp, Homo sapien
ggccgaggcgtgagcttttccagca

SEQ ID NO: 6063072 - DNA, 25 bp, Homo sapien
cacagtcagcggtgctgcttctgca

SEQ ID NO: 6063073 - DNA, 25 bp, Homo sapien
tcagcaaggccgagccgagatggca

SEQ ID NO: 6063074 - DNA, 25 bp, Homo sapien
tagccgtatatgtacacatctgagg

SEQ ID NO: 6063075 - DNA, 25 bp, Homo sapien
ggtatatcaagaggccaggctccca

SEQ ID NO: 6063076 - DNA, 25 bp, Homo sapien
gaccgtccgagggatcgctcttctt

SEQ ID NO: 6063077 - DNA, 25 bp, Homo sapien
tatctattctagctgtgtagcacca

SEQ ID NO: 6063078 - DNA, 25 bp, Homo sapien
ggttctgcggtgttaaaggacagct

SEQ ID NO: 6063079 - DNA, 25 bp, Homo sapien
tacaagtactaaatctgaagaacag

SEQ ID NO: 6063080 - DNA, 25 bp, Homo sapien
agccaacttccctctgtttaccagg

SEQ ID NO: 6063081 - DNA, 25 bp, Homo sapien
cagtagcacaagtgtgcctggcctt

SEQ ID NO: 6063082 - DNA, 25 bp, Homo sapien
tatccacgtgggacagagtacgcgg

SEQ ID NO: 6063083 - DNA, 25 bp, Homo sapien
gaagcagcaggatactgatcactac

SEQ ID NO: 6063084 - DNA, 25 bp, Homo sapien
gggagaggagctccctgcacaaagc

SEQ ID NO: 6063085 - DNA, 25 bp, Homo sapien
agaggaaaatggtgtagaccttaca

SEQ ID NO: 6063086 - DNA, 25 bp, Homo sapien
attagagactttatccacgtgggac

SEQ ID NO: 6063087 - DNA, 25 bp, Homo sapien
ggtcacggctgtcaggacacaaaga

SEQ ID NO: 6063088 - DNA, 25 bp, Homo sapien
gatcactactggctctgctttgagg

SEQ ID NO: 6063089 - DNA, 25 bp, Homo sapien
tgtagaccttacactgccagaaaaa

SEQ ID NO: 6063090 - DNA, 25 bp, Homo sapien
tctgggtttgacaggcatgcagatg

SEQ ID NO: 6063091 - DNA, 25 bp, Homo sapien
ttgccaactgcagtagcacaagtgt

SEQ ID NO: 6063092 - DNA, 25 bp, Homo sapien
catttatctctgcacgatgtcttta

SEQ ID NO: 6063093 - DNA, 25 bp, Homo sapien
gggagacttctacaaccactcctct

SEQ ID NO: 6063094 - DNA, 25 bp, Homo sapien
taggattcgaatgcttgctaaggat

SEQ ID NO: 6063095 - DNA, 25 bp, Homo sapien
gactttgacacctaccatattggaa

SEQ ID NO: 6063096 - DNA, 25 bp, Homo sapien
cccgagggcaagtgcatcaaagcag

SEQ ID NO: 6063097 - DNA, 25 bp, Homo sapien
gcatcaaagcagttaggattcgaat

SEQ ID NO: 6063098 - DNA, 25 bp, Homo sapien
ggctgattgcttgacatgtctgatt

SEQ ID NO: 6063099 - DNA, 25 bp, Homo sapien
gaaaatgcagaacccagtgaatctc

SEQ ID NO: 6063100 - DNA, 25 bp, Homo sapien
ttgcaagccccagaacctaacagag

SEQ ID NO: 6063101 - DNA, 25 bp, Homo sapien
gaacaattcaaatgattgcaagccc

SEQ ID NO: 6063102 - DNA, 25 bp, Homo sapien
gttctattgaatcctgaaaatgcag

SEQ ID NO: 6063103 - DNA, 25 bp, Homo sapien
gaatgagaaatacaccacgttggct

SEQ ID NO: 6063104 - DNA, 25 bp, Homo sapien
gagttctgcctctgttataaagccc

SEQ ID NO: 6063105 - DNA, 25 bp, Homo sapien
ccttggcattccgtgactgtaggca

SEQ ID NO: 6063106 - DNA, 25 bp, Homo sapien
ccctgtaggtctctgtatgttccca

SEQ ID NO: 6063107 - DNA, 25 bp, Homo sapien
ttttttcaccattcacgaggccaga

SEQ ID NO: 6063108 - DNA, 25 bp, Homo sapien
cattccgtgactgtaggcagcgtaa

SEQ ID NO: 6063109 - DNA, 25 bp, Homo sapien
tggacatgactttctgcgggacact

SEQ ID NO: 6063110 - DNA, 25 bp, Homo sapien
attggctttacagcccaccctaatg

SEQ ID NO: 6063111 - DNA, 25 bp, Homo sapien
ttctgcgggacactattcaacatgg

SEQ ID NO: 6063112 - DNA, 25 bp, Homo sapien
tacagcccaccctaatgcattgtga

SEQ ID NO: 6063113 - DNA, 25 bp, Homo sapien
ggaggtgtgagtatgattgatttct

SEQ ID NO: 6063114 - DNA, 25 bp, Homo sapien
tgactgtaggcagcgtaactccaga

SEQ ID NO: 6063115 - DNA, 25 bp, Homo sapien
caacatgggaaacatgcgtgtattt

SEQ ID NO: 6063116 - DNA, 25 bp, Homo sapien
gtgaccgcagcaaagcgcagcgtgt

SEQ ID NO: 6063117 - DNA, 25 bp, Homo sapien
gactgcacactagctggattatcac

SEQ ID NO: 6063118 - DNA, 25 bp, Homo sapien
ggattatcactcagccgtttaagaa

SEQ ID NO: 6063119 - DNA, 25 bp, Homo sapien
ccccttggagacgtttttatgcagc

SEQ ID NO: 6063120 - DNA, 25 bp, Homo sapien
gcactttacagataccttggaatgt

SEQ ID NO: 6063121 - DNA, 25 bp, Homo sapien
tgcggtgacgcccattgaaaggtat

SEQ ID NO: 6063122 - DNA, 25 bp, Homo sapien
cagcgtgtggatggatcagagcccc

SEQ ID NO: 6063123 - DNA, 25 bp, Homo sapien
ctcagaaggtttgcagtttgtaaaa

SEQ ID NO: 6063124 - DNA, 25 bp, Homo sapien
caaaaccatcacgtgactgagaccg

SEQ ID NO: 6063125 - DNA, 25 bp, Homo sapien
caaatgcatcgtatgtccccttgga

SEQ ID NO: 6063126 - DNA, 25 bp, Homo sapien
aaatatgatgaatctgttccgtgaa

SEQ ID NO: 6063127 - DNA, 25 bp, Homo sapien
cgtgaattgtgtcggccctcagcat

SEQ ID NO: 6063128 - DNA, 25 bp, Homo sapien
tattgtgactaaaggacaggcgttc

SEQ ID NO: 6063129 - DNA, 25 bp, Homo sapien
gattaccttttacatctaagtagga

SEQ ID NO: 6063130 - DNA, 25 bp, Homo sapien
tggtagaagcgtgtttcagtcaaac

SEQ ID NO: 6063131 - DNA, 25 bp, Homo sapien
tttgctcccggacgtcagaaggcag

SEQ ID NO: 6063132 - DNA, 25 bp, Homo sapien
taaaccagctcgcttcagagcccga

SEQ ID NO: 6063133 - DNA, 25 bp, Homo sapien
agagcccgacagtcacccagttcag

SEQ ID NO: 6063134 - DNA, 25 bp, Homo sapien
aggctgttttttccaatcttcagag

SEQ ID NO: 6063135 - DNA, 25 bp, Homo sapien
ggcagagtttcaaacagagcatctt

SEQ ID NO: 6063136 - DNA, 25 bp, Homo sapien
aaaaatacatactccttacgcgatc

SEQ ID NO: 6063137 - DNA, 25 bp, Homo sapien
aatgtcattgtacgataagtccaag

SEQ ID NO: 6063138 - DNA, 25 bp, Homo sapien
ttctgttttcatttgctcccggacg

SEQ ID NO: 6063139 - DNA, 25 bp, Homo sapien
cagttcaggagggaggatttcaaag

SEQ ID NO: 6063140 - DNA, 25 bp, Homo sapien
caatctcattcaggcctattctggg

SEQ ID NO: 6063141 - DNA, 25 bp, Homo sapien
cttagttacaaacaagcaatgtcag

SEQ ID NO: 6063142 - DNA, 25 bp, Homo sapien
cacctaacttccattctgggagtga

SEQ ID NO: 6063143 - DNA, 25 bp, Homo sapien
gaagaaaccactaggcttaccattc

SEQ ID NO: 6063144 - DNA, 25 bp, Homo sapien
gaaatggatgcctggctcaatataa

SEQ ID NO: 6063145 - DNA, 25 bp, Homo sapien
gaaaggtggcaaagtagacacaaag

SEQ ID NO: 6063146 - DNA, 25 bp, Homo sapien
cctctagaaagagttctgtggatat

SEQ ID NO: 6063147 - DNA, 25 bp, Homo sapien
tacctgtttcatactgaacctaatg

SEQ ID NO: 6063148 - DNA, 25 bp, Homo sapien
aagcaatgtcagacacaaggaactg

SEQ ID NO: 6063149 - DNA, 25 bp, Homo sapien
taacgttttcaatctcattcaggcc

SEQ ID NO: 6063150 - DNA, 25 bp, Homo sapien
caaagagatgacaatacctgtttca

SEQ ID NO: 6063151 - DNA, 25 bp, Homo sapien
gagtgagatatgctacccagttgtg

SEQ ID NO: 6063152 - DNA, 25 bp, Homo sapien
gaggccacagtctattggcatacat

SEQ ID NO: 6063153 - DNA, 25 bp, Homo sapien
gtgaggagtcacatatggaacttcc

SEQ ID NO: 6063154 - DNA, 25 bp, Homo sapien
ctggcagatcagcacagggttcccc

SEQ ID NO: 6063155 - DNA, 25 bp, Homo sapien
tgaaaccatggtaccatacagaaag

SEQ ID NO: 6063156 - DNA, 25 bp, Homo sapien
ggtgcactgccattccaagttccat

SEQ ID NO: 6063157 - DNA, 25 bp, Homo sapien
ttgaaatgcaggatggtgcactgcc

SEQ ID NO: 6063158 - DNA, 25 bp, Homo sapien
gcaactgtagatgattatggcacca

SEQ ID NO: 6063159 - DNA, 25 bp, Homo sapien
catacatgttgggatggaacttgac

SEQ ID NO: 6063160 - DNA, 25 bp, Homo sapien
aggtctgcatggcatgaccagccac

SEQ ID NO: 6063161 - DNA, 25 bp, Homo sapien
tgctagtctctgtaaaacgcaaaaa

SEQ ID NO: 6063162 - DNA, 25 bp, Homo sapien
acagcacttcccatgctagtctctg

SEQ ID NO: 6063163 - DNA, 25 bp, Homo sapien
caggtttacagctatactgcacagc

SEQ ID NO: 6063164 - DNA, 25 bp, Homo sapien
caacagcgaatggtggtccatgaag

SEQ ID NO: 6063165 - DNA, 25 bp, Homo sapien
tggtcgtagatagcgtccgcgcctt

SEQ ID NO: 6063166 - DNA, 25 bp, Homo sapien
cccctcgttgatgtggtcgtagata

SEQ ID NO: 6063167 - DNA, 25 bp, Homo sapien
tttcttgccaacagcgaatggtggt

SEQ ID NO: 6063168 - DNA, 25 bp, Homo sapien
tagcgtccgcgccttgatcgaaggc

SEQ ID NO: 6063169 - DNA, 25 bp, Homo sapien
cgaagaacatgacgcccacgatgat

SEQ ID NO: 6063170 - DNA, 25 bp, Homo sapien
ttcgaagtcaacgtcgcggccgcca

SEQ ID NO: 6063171 - DNA, 25 bp, Homo sapien
catgaagagtaccttgagcatcatc

SEQ ID NO: 6063172 - DNA, 25 bp, Homo sapien
catgacgcccacgatgatggtgagg

SEQ ID NO: 6063173 - DNA, 25 bp, Homo sapien
cgaatggtggtccatgaagagtacc

SEQ ID NO: 6063174 - DNA, 25 bp, Homo sapien
cgaaggcgcgctcgaagaacatgac

SEQ ID NO: 6063175 - DNA, 25 bp, Homo sapien
tgatgtggtcgtagatagcgtccgc

SEQ ID NO: 6063176 - DNA, 25 bp, Homo sapien
cttaaaaatttcatcaacatgacgc

SEQ ID NO: 6063177 - DNA, 25 bp, Homo sapien
ttgttcatcccatgaacgtgctgtc

SEQ ID NO: 6063178 - DNA, 25 bp, Homo sapien
cacgttgcacttgtgcttgaatatc

SEQ ID NO: 6063179 - DNA, 25 bp, Homo sapien
catgccaaacctactctcttaaaaa

SEQ ID NO: 6063180 - DNA, 25 bp, Homo sapien
cctttgagttcaaaatagttttgca

SEQ ID NO: 6063181 - DNA, 25 bp, Homo sapien
cggagtaaatctgtggcaaaaatca

SEQ ID NO: 6063182 - DNA, 25 bp, Homo sapien
gcacttgtgcttgaatatctgtttc

SEQ ID NO: 6063183 - DNA, 25 bp, Homo sapien
atttactggtaagttcattcgccac

SEQ ID NO: 6063184 - DNA, 25 bp, Homo sapien
ataacttttgacatcgacaaagtca

SEQ ID NO: 6063185 - DNA, 25 bp, Homo sapien
tgcaataaaaactggccgcttgtca

SEQ ID NO: 6063186 - DNA, 25 bp, Homo sapien
tgtttccgttgctaaaactgtctta

SEQ ID NO: 6063187 - DNA, 25 bp, Homo sapien
cccgagcggcctttttatcagctaa

SEQ ID NO: 6063188 - DNA, 25 bp, Homo sapien
cggcctttttatcagctaaggctac

SEQ ID NO: 6063189 - DNA, 25 bp, Homo sapien
atcaaccaagtcacggaacatcaat

SEQ ID NO: 6063190 - DNA, 25 bp, Homo sapien
caatggcattttccggagtaaatct

SEQ ID NO: 6063191 - DNA, 25 bp, Homo sapien
ttttatcagctaaggctaccgtcgt

SEQ ID NO: 6063192 - DNA, 25 bp, Homo sapien
cagttgaagcagcacctgaataact

SEQ ID NO: 6063193 - DNA, 25 bp, Homo sapien
gttttgcaaccattgcatcgtccga

SEQ ID NO: 6063194 - DNA, 25 bp, Homo sapien
atcaacgtcaaagtcaaccacccga

SEQ ID NO: 6063195 - DNA, 25 bp, Homo sapien
aaaatagttttgcaaccattgcatc

SEQ ID NO: 6063196 - DNA, 25 bp, Homo sapien
tgatgtcatgccaaacctactctct

SEQ ID NO: 6063197 - DNA, 25 bp, Homo sapien
aaatctgtggcaaaaatcaccccac

SEQ ID NO: 6063198 - DNA, 25 bp, Homo sapien
tgttaaatccatgctcacgtcatgg

SEQ ID NO: 6063199 - DNA, 25 bp, Homo sapien
agtgattgttggatccgcatcaacc

SEQ ID NO: 6063200 - DNA, 25 bp, Homo sapien
gcttgtcattatgcgcaaatttact

SEQ ID NO: 6063201 - DNA, 25 bp, Homo sapien
gtcatggaccactttaacttggcca

SEQ ID NO: 6063202 - DNA, 25 bp, Homo sapien
gatcacgacatcacgtcctgttaaa

SEQ ID NO: 6063203 - DNA, 25 bp, Homo sapien
aggctaccgtcgtcacacttgcggc

SEQ ID NO: 6063204 - DNA, 25 bp, Homo sapien
aaactgtcttaattgctggatggtt

SEQ ID NO: 6063205 - DNA, 25 bp, Homo sapien
tgttggatccgcatcaaccaagtca

SEQ ID NO: 6063206 - DNA, 25 bp, Homo sapien
cgtccgaccagaatcaataatttca

SEQ ID NO: 6063207 - DNA, 25 bp, Homo sapien
atcaataatttcatcgacgatcacg

SEQ ID NO: 6063208 - DNA, 25 bp, Homo sapien
gaatatctgtttccgttgctaaaac

SEQ ID NO: 6063209 - DNA, 25 bp, Homo sapien
acgtcaaagtcaaccacccgagcgg

SEQ ID NO: 6063210 - DNA, 25 bp, Homo sapien
ttgctaaaactgtcttaattgctgg

SEQ ID NO: 6063211 - DNA, 25 bp, Homo sapien
ctggccgcttgtcattatgcgcaaa

SEQ ID NO: 6063212 - DNA, 25 bp, Homo sapien
agcagcacctgaataacttttgaca

SEQ ID NO: 6063213 - DNA, 25 bp, Homo sapien
tgctttagtcaaatgggcagtgatt

SEQ ID NO: 6063214 - DNA, 25 bp, Homo sapien
aaaaactggccgcttgtcattatgc

SEQ ID NO: 6063215 - DNA, 25 bp, Homo sapien
atcaacatgacgcaagtgatagtga

SEQ ID NO: 6063216 - DNA, 25 bp, Homo sapien
atgacgcaagtgatagtgataatca

SEQ ID NO: 6063217 - DNA, 25 bp, Homo sapien
tgcggcccctttgagttcaaaatag

SEQ ID NO: 6063218 - DNA, 25 bp, Homo sapien
gagttcaaaatagttttgcaaccat

SEQ ID NO: 6063219 - DNA, 25 bp, Homo sapien
atcgacaaagtcaaagtcaacatcc

SEQ ID NO: 6063220 - DNA, 25 bp, Homo sapien
tcgccacacgttgcacttgtgcttg

SEQ ID NO: 6063221 - DNA, 25 bp, Homo sapien
accagaatcaataatttcatcgacg

SEQ ID NO: 6063222 - DNA, 25 bp, Homo sapien
aacatccaatggcattttccggagt

SEQ ID NO: 6063223 - DNA, 25 bp, Homo sapien
accacccgagcggcctttttatcag

SEQ ID NO: 6063224 - DNA, 25 bp, Homo sapien
tttgacatcgacaaagtcaaagtca

SEQ ID NO: 6063225 - DNA, 25 bp, Homo sapien
ataatcaaacgcgtcatcaatttgt

SEQ ID NO: 6063226 - DNA, 25 bp, Homo sapien
atccatgctcacgtcatggaccact

SEQ ID NO: 6063227 - DNA, 25 bp, Homo sapien
gctcacgtcatggaccactttaact

SEQ ID NO: 6063228 - DNA, 25 bp, Homo sapien
gttcattcgccacacgttgcacttg

SEQ ID NO: 6063229 - DNA, 25 bp, Homo sapien
gtggcaaaaatcaccccacccttga

SEQ ID NO: 6063230 - DNA, 25 bp, Homo sapien
tcttaattgctggatggttaattag

SEQ ID NO: 6063231 - DNA, 25 bp, Homo sapien
acctgaataacttttgacatcgaca

SEQ ID NO: 6063232 - DNA, 25 bp, Homo sapien
aatttcatcaacatgacgcaagtga

SEQ ID NO: 6063233 - DNA, 25 bp, Homo sapien
cattatgcgcaaatttactggtaag

SEQ ID NO: 6063234 - DNA, 25 bp, Homo sapien
atagtgataatcaaacgcgtcatca

SEQ ID NO: 6063235 - DNA, 25 bp, Homo sapien
tactctcttaaaaatttcatcaaca

SEQ ID NO: 6063236 - DNA, 25 bp, Homo sapien
gtcgtcacacttgcggcccctttga

SEQ ID NO: 6063237 - DNA, 25 bp, Homo sapien
acgtcctgttaaatccatgctcacg

SEQ ID NO: 6063238 - DNA, 25 bp, Homo sapien
ttgcatcgtccgaccagaatcaata

SEQ ID NO: 6063239 - DNA, 25 bp, Homo sapien
aaagtcaacatccaatggcattttc

SEQ ID NO: 6063240 - DNA, 25 bp, Homo sapien
gaccactttaacttggccagttgaa

SEQ ID NO: 6063241 - DNA, 25 bp, Homo sapien
tttaacttggccagttgaagcagca

SEQ ID NO: 6063242 - DNA, 25 bp, Homo sapien
cttggccagttgaagcagcacctga

SEQ ID NO: 6063243 - DNA, 25 bp, Homo sapien
atcgacgatcacgacatcacgtcct

SEQ ID NO: 6063244 - DNA, 25 bp, Homo sapien
catcaattgttcatcccatgaacgt

SEQ ID NO: 6063245 - DNA, 25 bp, Homo sapien
gtgcttgaatatctgtttccgttgc

SEQ ID NO: 6063246 - DNA, 25 bp, Homo sapien
aatttgtgctttagtcaaatgggca

SEQ ID NO: 6063247 - DNA, 25 bp, Homo sapien
ttgctggatggttaattagtgatgt

SEQ ID NO: 6063248 - DNA, 25 bp, Homo sapien
atgggcagtgattgttggatccgca

SEQ ID NO: 6063249 - DNA, 25 bp, Homo sapien
atccgcatcaaccaagtcacggaac

SEQ ID NO: 6063250 - DNA, 25 bp, Homo sapien
caagtcacggaacatcaattgttca

SEQ ID NO: 6063251 - DNA, 25 bp, Homo sapien
aaacgcgtcatcaatttgtgcttta

SEQ ID NO: 6063252 - DNA, 25 bp, Homo sapien
gaggactgcaataaaaactggccgc

SEQ ID NO: 6063253 - DNA, 25 bp, Homo sapien
aaaatcaccccacccttgaggactg

SEQ ID NO: 6063254 - DNA, 25 bp, Homo sapien
gcgcaaatttactggtaagttcatt

SEQ ID NO: 6063255 - DNA, 25 bp, Homo sapien
cagctaaggctaccgtcgtcacact

SEQ ID NO: 6063256 - DNA, 25 bp, Homo sapien
agtcaaatgggcagtgattgttgga

SEQ ID NO: 6063257 - DNA, 25 bp, Homo sapien
aatttcatcgacgatcacgacatca

SEQ ID NO: 6063258 - DNA, 25 bp, Homo sapien
acggaacatcaattgttcatcccat

SEQ ID NO: 6063259 - DNA, 25 bp, Homo sapien
accccacccttgaggactgcaataa

SEQ ID NO: 6063260 - DNA, 25 bp, Homo sapien
caaccattgcatcgtccgaccagaa

SEQ ID NO: 6063261 - DNA, 25 bp, Homo sapien
aaagtcaaagtcaacatccaatggc

SEQ ID NO: 6063262 - DNA, 25 bp, Homo sapien
caagtgatagtgataatcaaacgcg

SEQ ID NO: 6063263 - DNA, 25 bp, Homo sapien
taattagtgatgtcatgccaaacct

SEQ ID NO: 6063264 - DNA, 25 bp, Homo sapien
cacacttgcggcccctttgagttca

SEQ ID NO: 6063265 - DNA, 25 bp, Homo sapien
gtcatcaatttgtgctttagtcaaa

SEQ ID NO: 6063266 - DNA, 25 bp, Homo sapien
attttccggagtaaatctgtggcaa

SEQ ID NO: 6063267 - DNA, 25 bp, Homo sapien
gacatcacgtcctgttaaatccatg

SEQ ID NO: 6063268 - DNA, 25 bp, Homo sapien
acccttgaggactgcaataaaaact

SEQ ID NO: 6063269 - DNA, 25 bp, Homo sapien
gatggttaattagtgatgtcatgcc

SEQ ID NO: 6063270 - DNA, 25 bp, Homo sapien
tggtaagttcattcgccacacgttg

SEQ ID NO: 6063271 - DNA, 25 bp, Homo sapien
aggtaactgattcttggggagcgga

SEQ ID NO: 6063272 - DNA, 25 bp, Homo sapien
actgattcttggggagcggagttca

SEQ ID NO: 6063273 - DNA, 25 bp, Homo sapien
gaggtaactgattcttggggagcgg

SEQ ID NO: 6063274 - DNA, 25 bp, Homo sapien
tgattcttggggagcggagttcact

SEQ ID NO: 6063275 - DNA, 25 bp, Homo sapien
gattcttggggagcggagttcactg

SEQ ID NO: 6063276 - DNA, 25 bp, Homo sapien
taactgattcttggggagcggagtt

SEQ ID NO: 6063277 - DNA, 25 bp, Homo sapien
attcttggggagcggagttcactgc

SEQ ID NO: 6063278 - DNA, 25 bp, Homo sapien
gtaactgattcttggggagcggagt

SEQ ID NO: 6063279 - DNA, 25 bp, Homo sapien
ctgattcttggggagcggagttcac

SEQ ID NO: 6063280 - DNA, 25 bp, Homo sapien
ttcttggggagcggagttcactgct

SEQ ID NO: 6063281 - DNA, 25 bp, Homo sapien
aactgattcttggggagcggagttc

SEQ ID NO: 6063282 - DNA, 25 bp, Homo sapien
ggtaactgattcttggggagcggag

SEQ ID NO: 6063283 - DNA, 25 bp, Homo sapien
gatgacacctatttgtccactgtaa

SEQ ID NO: 6063284 - DNA, 25 bp, Homo sapien
caaggctcagagtcccatagtttct

SEQ ID NO: 6063285 - DNA, 25 bp, Homo sapien
tgcggttcacttcctttgggacagg

SEQ ID NO: 6063286 - DNA, 25 bp, Homo sapien
gtctcatcgttcttcttgcggttca

SEQ ID NO: 6063287 - DNA, 25 bp, Homo sapien
cacttgagtcagaatgattaaaaac

SEQ ID NO: 6063288 - DNA, 25 bp, Homo sapien
gaaatggttcttgactgacccagac

SEQ ID NO: 6063289 - DNA, 25 bp, Homo sapien
gagttctgggtaatacaccattttg

SEQ ID NO: 6063290 - DNA, 25 bp, Homo sapien
aattctgagcgttttcacttgagtc

SEQ ID NO: 6063291 - DNA, 25 bp, Homo sapien
ttcacagtgtgaaattctgagcgtt

SEQ ID NO: 6063292 - DNA, 25 bp, Homo sapien
tgggtaatacaccattttgagaatc

SEQ ID NO: 6063293 - DNA, 25 bp, Homo sapien
gattaaaaactggtttgatgacacc

SEQ ID NO: 6063294 - DNA, 25 bp, Homo sapien
gtaaattctctaaagcaaggctcag

SEQ ID NO: 6063295 - DNA, 25 bp, Homo sapien
gtatcttgggctctgggtgattcca

SEQ ID NO: 6063296 - DNA, 25 bp, Homo sapien
tcttgtcgataccagaacatatagc

SEQ ID NO: 6063297 - DNA, 25 bp, Homo sapien
gcagctgctgagtaatagatcagcc

SEQ ID NO: 6063298 - DNA, 25 bp, Homo sapien
gatcttgtatcttgggctctgggtg

SEQ ID NO: 6063299 - DNA, 25 bp, Homo sapien
agtaatagatcagcctcagcccatg

SEQ ID NO: 6063300 - DNA, 25 bp, Homo sapien
gtggctccaagtctggtgacacatc

SEQ ID NO: 6063301 - DNA, 25 bp, Homo sapien
gacaacatagccatcggggacttct

SEQ ID NO: 6063302 - DNA, 25 bp, Homo sapien
cttgggctctgggtgattccagcat

SEQ ID NO: 6063303 - DNA, 25 bp, Homo sapien
acagcagacaaagggccacatagaa

SEQ ID NO: 6063304 - DNA, 25 bp, Homo sapien
cgataccagaacatatagctgtggc

SEQ ID NO: 6063305 - DNA, 25 bp, Homo sapien
gtctctgtgatcttgtatcttgggc

SEQ ID NO: 6063306 - DNA, 25 bp, Homo sapien
cagaacatatagctgtggctccaag

SEQ ID NO: 6063307 - DNA, 25 bp, Homo sapien
ctgctcgcttgccctactaccactg

SEQ ID NO: 6063308 - DNA, 25 bp, Homo sapien
tgccctactaccactgctggcgcag

SEQ ID NO: 6063309 - DNA, 25 bp, Homo sapien
ttgccctactaccactgctggcgca

SEQ ID NO: 6063310 - DNA, 25 bp, Homo sapien
cttgccctactaccactgctggcgc

SEQ ID NO: 6063311 - DNA, 25 bp, Homo sapien
actgctcgcttgccctactaccact

SEQ ID NO: 6063312 - DNA, 25 bp, Homo sapien
tgctcgcttgccctactaccactgc

SEQ ID NO: 6063313 - DNA, 25 bp, Homo sapien
gccctactaccactgctggcgcaga

SEQ ID NO: 6063314 - DNA, 25 bp, Homo sapien
tatgcactgacatctaagttcttta

SEQ ID NO: 6063315 - DNA, 25 bp, Homo sapien
gtttggagtatgtctttatgcactg

SEQ ID NO: 6063316 - DNA, 25 bp, Homo sapien
ttccttggggtccagacagagctct

SEQ ID NO: 6063317 - DNA, 25 bp, Homo sapien
ttagcactccttggcaaaactgcac

SEQ ID NO: 6063318 - DNA, 25 bp, Homo sapien
ctaagttctttagcactccttggca

SEQ ID NO: 6063319 - DNA, 25 bp, Homo sapien
cactgacatctaagttctttagcac

SEQ ID NO: 6063320 - DNA, 25 bp, Homo sapien
tctttagcactccttggcaaaactg

SEQ ID NO: 6063321 - DNA, 25 bp, Homo sapien
gacatctaagttctttagcactcct

SEQ ID NO: 6063322 - DNA, 25 bp, Homo sapien
tctgtgttggcgcagtgtggtccac

SEQ ID NO: 6063323 - DNA, 25 bp, Homo sapien
ccctctgcacccagttttccttggg

SEQ ID NO: 6063324 - DNA, 25 bp, Homo sapien
taatttctgtgttggcgcagtgtgg

SEQ ID NO: 6063325 - DNA, 25 bp, Homo sapien
aggtttggagtatgtctttatgcac

SEQ ID NO: 6063326 - DNA, 25 bp, Homo sapien
gaggagagtttatgaatccatcccc

SEQ ID NO: 6063327 - DNA, 25 bp, Homo sapien
ttggatttgaggagagtttatgaat

SEQ ID NO: 6063328 - DNA, 25 bp, Homo sapien
ttgaggagagtttatgaatccatcc

SEQ ID NO: 6063329 - DNA, 25 bp, Homo sapien
gatttgaggagagtttatgaatcca

SEQ ID NO: 6063330 - DNA, 25 bp, Homo sapien
ggatttgaggagagtttatgaatcc

SEQ ID NO: 6063331 - DNA, 25 bp, Homo sapien
agagtttatgaatccatccccctgt

SEQ ID NO: 6063332 - DNA, 25 bp, Homo sapien
tttgaggagagtttatgaatccatc

SEQ ID NO: 6063333 - DNA, 25 bp, Homo sapien
tggatttgaggagagtttatgaatc

SEQ ID NO: 6063334 - DNA, 25 bp, Homo sapien
gagtttatgaatccatccccctgtt

SEQ ID NO: 6063335 - DNA, 25 bp, Homo sapien
tgaggagagtttatgaatccatccc

SEQ ID NO: 6063336 - DNA, 25 bp, Homo sapien
gagagtttatgaatccatccccctg

SEQ ID NO: 6063337 - DNA, 25 bp, Homo sapien
atttgaggagagtttatgaatccat

SEQ ID NO: 6063338 - DNA, 25 bp, Homo sapien
tccaaatgttgtactgtgctaacca

SEQ ID NO: 6063339 - DNA, 25 bp, Homo sapien
taataaactcctaagaatgctgcag

SEQ ID NO: 6063340 - DNA, 25 bp, Homo sapien
cacgagaagctgcaagaccatagct

SEQ ID NO: 6063341 - DNA, 25 bp, Homo sapien
gtccaaccaaaagtaaacagtgcag

SEQ ID NO: 6063342 - DNA, 25 bp, Homo sapien
taaacagtgcagtccacatgctgat

SEQ ID NO: 6063343 - DNA, 25 bp, Homo sapien
catatagcaatgagataactccagg

SEQ ID NO: 6063344 - DNA, 25 bp, Homo sapien
ttctccttgatggatctgtatacta

SEQ ID NO: 6063345 - DNA, 25 bp, Homo sapien
gaaatatgtgcagcacgagaagctg

SEQ ID NO: 6063346 - DNA, 25 bp, Homo sapien
ctccaaaaacatcatagatgctagg

SEQ ID NO: 6063347 - DNA, 25 bp, Homo sapien
gaccatagctaccacaatctccaaa

SEQ ID NO: 6063348 - DNA, 25 bp, Homo sapien
caggtttctccatctaatgggatga

SEQ ID NO: 6063349 - DNA, 25 bp, Homo sapien
taatgggagagtctagtatttcctg

SEQ ID NO: 6063350 - DNA, 25 bp, Homo sapien
cgggcaagcacttctgtacgcggaa

SEQ ID NO: 6063351 - DNA, 25 bp, Homo sapien
ccccgcactgcggtggtaaggcaga

SEQ ID NO: 6063352 - DNA, 25 bp, Homo sapien
attggcaaaccggagaaacgctggg

SEQ ID NO: 6063353 - DNA, 25 bp, Homo sapien
ttctgtacgcggaaagcacgaggcg

SEQ ID NO: 6063354 - DNA, 25 bp, Homo sapien
tagttgagaaggtcgaagtggccca

SEQ ID NO: 6063355 - DNA, 25 bp, Homo sapien
tacgagtcgcggtgttggttcacca

SEQ ID NO: 6063356 - DNA, 25 bp, Homo sapien
ttctcctcgggcttgtcggctggcg

SEQ ID NO: 6063357 - DNA, 25 bp, Homo sapien
tcaattagccaaaaacgagacgcca

SEQ ID NO: 6063358 - DNA, 25 bp, Homo sapien
tccatcaagttgaagcggactcgcg

SEQ ID NO: 6063359 - DNA, 25 bp, Homo sapien
tgccgatgtacttggactgcaggtg

SEQ ID NO: 6063360 - DNA, 25 bp, Homo sapien
tccgcaatggcgaagtagttgagaa

SEQ ID NO: 6063361 - DNA, 25 bp, Homo sapien
ccatgtaggagcagtacgagtcgcg

SEQ ID NO: 6063362 - DNA, 25 bp, Homo sapien
tttgcagagcccatacgatgagtgt

SEQ ID NO: 6063363 - DNA, 25 bp, Homo sapien
gaagccactcactgagttacagccc

SEQ ID NO: 6063364 - DNA, 25 bp, Homo sapien
gctagtaagtgaatgctgaagttag

SEQ ID NO: 6063365 - DNA, 25 bp, Homo sapien
cctatgcttcctgtcaggaaggaca

SEQ ID NO: 6063366 - DNA, 25 bp, Homo sapien
tgagtgtgtcaggtataatagctat

SEQ ID NO: 6063367 - DNA, 25 bp, Homo sapien
tacttactgcctagggaagctgtag

SEQ ID NO: 6063368 - DNA, 25 bp, Homo sapien
tgctgaagttagaaccctggcattc

SEQ ID NO: 6063369 - DNA, 25 bp, Homo sapien
ggaaaccattttaatgctaggagaa

SEQ ID NO: 6063370 - DNA, 25 bp, Homo sapien
agtgacacataggtattgttgccat

SEQ ID NO: 6063371 - DNA, 25 bp, Homo sapien
gttttaaccaataatccagtgacac

SEQ ID NO: 6063372 - DNA, 25 bp, Homo sapien
tgacactcctgcttgggaagccacc

SEQ ID NO: 6063373 - DNA, 25 bp, Homo sapien
gaagctgtagggcttggcccacatc

SEQ ID NO: 6063374 - DNA, 25 bp, Homo sapien
ccggaaatgcgacacactatactta

SEQ ID NO: 6063375 - DNA, 25 bp, Homo sapien
acacacatgcctggcgggatcgcag

SEQ ID NO: 6063376 - DNA, 25 bp, Homo sapien
cactatacttaaaaggccagatggc

SEQ ID NO: 6063377 - DNA, 25 bp, Homo sapien
cctggttctaatgctcagacccagg

SEQ ID NO: 6063378 - DNA, 25 bp, Homo sapien
cagcccgagggagcttcaaggccga

SEQ ID NO: 6063379 - DNA, 25 bp, Homo sapien
ccatgagagccggaagcatcgttgg

SEQ ID NO: 6063380 - DNA, 25 bp, Homo sapien
tgaaatgctaccttcctacccggaa

SEQ ID NO: 6063381 - DNA, 25 bp, Homo sapien
tcagtaatctattggtaatggtgga

SEQ ID NO: 6063382 - DNA, 25 bp, Homo sapien
gctgtggaatccatgagagccggaa

SEQ ID NO: 6063383 - DNA, 25 bp, Homo sapien
cagagctcatggtgaccagtcctgg

SEQ ID NO: 6063384 - DNA, 25 bp, Homo sapien
aataccaagaacagatcacttgcca

SEQ ID NO: 6063385 - DNA, 25 bp, Homo sapien
ggcctgaccaatgggtgattacatt

SEQ ID NO: 6063386 - DNA, 25 bp, Homo sapien
gtggatgggccgagctcccagccaa

SEQ ID NO: 6063387 - DNA, 25 bp, Homo sapien
actccttataaagagccccatgagc

SEQ ID NO: 6063388 - DNA, 25 bp, Homo sapien
cacggtctatattacatgtgcttca

SEQ ID NO: 6063389 - DNA, 25 bp, Homo sapien
gaaatatacaccactgaacaccgag

SEQ ID NO: 6063390 - DNA, 25 bp, Homo sapien
tagagggcgaggagttgtcccattt

SEQ ID NO: 6063391 - DNA, 25 bp, Homo sapien
gagccccatgagctaagactaagga

SEQ ID NO: 6063392 - DNA, 25 bp, Homo sapien
tataaagagccccatgagctaagac

SEQ ID NO: 6063393 - DNA, 25 bp, Homo sapien
ctatattacatgtgcttcagtctgg

SEQ ID NO: 6063394 - DNA, 25 bp, Homo sapien
taccccaagaggtggatgggccgag

SEQ ID NO: 6063395 - DNA, 25 bp, Homo sapien
tacaccactgaacaccgagcacatg

SEQ ID NO: 6063396 - DNA, 25 bp, Homo sapien
gagctaagactaaggagaggatcat

SEQ ID NO: 6063397 - DNA, 25 bp, Homo sapien
gaaaggacaagtacctttgtataga

SEQ ID NO: 6063398 - DNA, 25 bp, Homo sapien
ttcccatcggccaagtggtcgaacc

SEQ ID NO: 6063399 - DNA, 25 bp, Homo sapien
cattcccatcggccaagtggtcgaa

SEQ ID NO: 6063400 - DNA, 25 bp, Homo sapien
attcccatcggccaagtggtcgaac

SEQ ID NO: 6063401 - DNA, 25 bp, Homo sapien
tcggttacagttacacaaagggtca

SEQ ID NO: 6063402 - DNA, 25 bp, Homo sapien
ttacagttacacaaagggtcacttc

SEQ ID NO: 6063403 - DNA, 25 bp, Homo sapien
acagttacacaaagggtcacttcct

SEQ ID NO: 6063404 - DNA, 25 bp, Homo sapien
cagttacacaaagggtcacttcctc

SEQ ID NO: 6063405 - DNA, 25 bp, Homo sapien
tacagttacacaaagggtcacttcc

SEQ ID NO: 6063406 - DNA, 25 bp, Homo sapien
ggaatcatttctgcggagctttcaa

SEQ ID NO: 6063407 - DNA, 25 bp, Homo sapien
gaggcattgcccatagacgtatcct

SEQ ID NO: 6063408 - DNA, 25 bp, Homo sapien
gtaatcccagcgcacggtggcacgt

SEQ ID NO: 6063409 - DNA, 25 bp, Homo sapien
tcttctggcaagtcggaagcaccac

SEQ ID NO: 6063410 - DNA, 25 bp, Homo sapien
taatgggaattgcatcctcatcggg

SEQ ID NO: 6063411 - DNA, 25 bp, Homo sapien
tttgtagtccttacagatgtcgggc

SEQ ID NO: 6063412 - DNA, 25 bp, Homo sapien
agacgccattggtctgctggtcaca

SEQ ID NO: 6063413 - DNA, 25 bp, Homo sapien
cccatgcttgtaatctgaacggtca

SEQ ID NO: 6063414 - DNA, 25 bp, Homo sapien
aatgctgcagtgcacagctctcgca

SEQ ID NO: 6063415 - DNA, 25 bp, Homo sapien
gctctggcgacagatgaaacacttg

SEQ ID NO: 6063416 - DNA, 25 bp, Homo sapien
cacgtagatgctcgggcgctcggat

SEQ ID NO: 6063417 - DNA, 25 bp, Homo sapien
gaccctcatcaagctcacgttcgat

SEQ ID NO: 6063418 - DNA, 25 bp, Homo sapien
tctttcgctggattgaagacgccat

SEQ ID NO: 6063419 - DNA, 25 bp, Homo sapien
tagaatactgtacatgtaagtctgt

SEQ ID NO: 6063420 - DNA, 25 bp, Homo sapien
taactttatcgtttatgcggcatac

SEQ ID NO: 6063421 - DNA, 25 bp, Homo sapien
gaaacgctgttgagtctattttgaa

SEQ ID NO: 6063422 - DNA, 25 bp, Homo sapien
tacggaagtcagattacatatacac

SEQ ID NO: 6063423 - DNA, 25 bp, Homo sapien
gctttccagataagacttgaaccct

SEQ ID NO: 6063424 - DNA, 25 bp, Homo sapien
gaaccagagccattaatgtgcaggg

SEQ ID NO: 6063425 - DNA, 25 bp, Homo sapien
tagcttgaagtatagaaccagagcc

SEQ ID NO: 6063426 - DNA, 25 bp, Homo sapien
cagggtttattgttctttcagtgca

SEQ ID NO: 6063427 - DNA, 25 bp, Homo sapien
gcggcatacatgtttccacttgtca

SEQ ID NO: 6063428 - DNA, 25 bp, Homo sapien
taacccctgcattgttcgagtcaac

SEQ ID NO: 6063429 - DNA, 25 bp, Homo sapien
ccttcataaatattgggagacccat

SEQ ID NO: 6063430 - DNA, 25 bp, Homo sapien
gacttgaaccctgatctgtccacaa

SEQ ID NO: 6063431 - DNA, 25 bp, Homo sapien
taggtatggttgcattctcgtcttc

SEQ ID NO: 6063432 - DNA, 25 bp, Homo sapien
gaagcttatatactctttctcagag

SEQ ID NO: 6063433 - DNA, 25 bp, Homo sapien
aatgaggtaaccgaaggcaattgtg

SEQ ID NO: 6063434 - DNA, 25 bp, Homo sapien
ttttctgcagtagataatgaggtaa

SEQ ID NO: 6063435 - DNA, 25 bp, Homo sapien
gaggtaaccgaaggcaattgtgctt

SEQ ID NO: 6063436 - DNA, 25 bp, Homo sapien
atggttgcattctcgtcttcttttc

SEQ ID NO: 6063437 - DNA, 25 bp, Homo sapien
cagtagataatgaggtaaccgaagg

SEQ ID NO: 6063438 - DNA, 25 bp, Homo sapien
gataatgaggtaaccgaaggcaatt

SEQ ID NO: 6063439 - DNA, 25 bp, Homo sapien
aaaagtccatctaggtatggttgca

SEQ ID NO: 6063440 - DNA, 25 bp, Homo sapien
ccatctaggtatggttgcattctcg

SEQ ID NO: 6063441 - DNA, 25 bp, Homo sapien
aatttattaaggtacagggctgagg

SEQ ID NO: 6063442 - DNA, 25 bp, Homo sapien
tctgcagtagataatgaggtaaccg

SEQ ID NO: 6063443 - DNA, 25 bp, Homo sapien
tagatcaactttacattgccaatgc

SEQ ID NO: 6063444 - DNA, 25 bp, Homo sapien
tatcaggtgatctttagggacccaa

SEQ ID NO: 6063445 - DNA, 25 bp, Homo sapien
ttgcactagcgtattcacatgttcc

SEQ ID NO: 6063446 - DNA, 25 bp, Homo sapien
caaacttgttatcaggtgatcttta

SEQ ID NO: 6063447 - DNA, 25 bp, Homo sapien
gacgcaagccgtcacacctggttag

SEQ ID NO: 6063448 - DNA, 25 bp, Homo sapien
cgcgcacggcggaaaacgagatttt

SEQ ID NO: 6063449 - DNA, 25 bp, Homo sapien
caggctggaattgcactagcgtatt

SEQ ID NO: 6063450 - DNA, 25 bp, Homo sapien
gccgtcacacctggttagcttcatt

SEQ ID NO: 6063451 - DNA, 25 bp, Homo sapien
ctgcagtctctagcccgagagttta

SEQ ID NO: 6063452 - DNA, 25 bp, Homo sapien
cagcctaccgagtaaatgatagtac

SEQ ID NO: 6063453 - DNA, 25 bp, Homo sapien
taaatgatagtacagacgcaagccg

SEQ ID NO: 6063454 - DNA, 25 bp, Homo sapien
tgttcctgcagtctctagcccgaga

SEQ ID NO: 6063455 - DNA, 25 bp, Homo sapien
gaaaaagagggagtatggcaaacca

SEQ ID NO: 6063456 - DNA, 25 bp, Homo sapien
agcacaaaatatttcgactagaggg

SEQ ID NO: 6063457 - DNA, 25 bp, Homo sapien
caagcaagcaggtttggagagcact

SEQ ID NO: 6063458 - DNA, 25 bp, Homo sapien
ccaactcgcagtgggaagatgctta

SEQ ID NO: 6063459 - DNA, 25 bp, Homo sapien
gagcactgacatgaaagggtgatgc

SEQ ID NO: 6063460 - DNA, 25 bp, Homo sapien
tgacattagtacaagcagtctacga

SEQ ID NO: 6063461 - DNA, 25 bp, Homo sapien
gaatagagttcaatagtcacacaca

SEQ ID NO: 6063462 - DNA, 25 bp, Homo sapien
gatgcaggtcaggttcacaattaat

SEQ ID NO: 6063463 - DNA, 25 bp, Homo sapien
aaaccataggctgggtcatgcccca

SEQ ID NO: 6063464 - DNA, 25 bp, Homo sapien
aaaatgcagaccttggcttggcgcg

SEQ ID NO: 6063465 - DNA, 25 bp, Homo sapien
ggcctaggactattgggtgttctga

SEQ ID NO: 6063466 - DNA, 25 bp, Homo sapien
tatttagcttgctgccatgcgagga

SEQ ID NO: 6063467 - DNA, 25 bp, Homo sapien
tgcgatttggaagtaacctgccttt

SEQ ID NO: 6063468 - DNA, 25 bp, Homo sapien
ttgggtttacagacagtggtatgca

SEQ ID NO: 6063469 - DNA, 25 bp, Homo sapien
gggctgcaatgttaccacagttacc

SEQ ID NO: 6063470 - DNA, 25 bp, Homo sapien
gaatgatttgcccatcaccataaaa

SEQ ID NO: 6063471 - DNA, 25 bp, Homo sapien
aacaaacacactctatccatgtgag

SEQ ID NO: 6063472 - DNA, 25 bp, Homo sapien
tgcaatcaaagtgagtagcatcaca

SEQ ID NO: 6063473 - DNA, 25 bp, Homo sapien
taataggcatgttccatataaccat

SEQ ID NO: 6063474 - DNA, 25 bp, Homo sapien
tacatcaggctaaataaatccaaaa

SEQ ID NO: 6063475 - DNA, 25 bp, Homo sapien
tcacagtaggcacatactagaagca

SEQ ID NO: 6063476 - DNA, 25 bp, Homo sapien
gccttttaatagcttaccttggaca

SEQ ID NO: 6063477 - DNA, 25 bp, Homo sapien
aaccttttccttcagtgcgatttgg

SEQ ID NO: 6063478 - DNA, 25 bp, Homo sapien
taatatacacatgctgcttagggct

SEQ ID NO: 6063479 - DNA, 25 bp, Homo sapien
cattaatcgccccttcagccaacgc

SEQ ID NO: 6063480 - DNA, 25 bp, Homo sapien
gaccacaacaagaccagaaataaag

SEQ ID NO: 6063481 - DNA, 25 bp, Homo sapien
aaattgaacagactattgaggttca

SEQ ID NO: 6063482 - DNA, 25 bp, Homo sapien
ccttcagccaacgcatcaacataag

SEQ ID NO: 6063483 - DNA, 25 bp, Homo sapien
cccaaaaagttttgcgccatttctg

SEQ ID NO: 6063484 - DNA, 25 bp, Homo sapien
gtccaatcgcttcttcgcgatcgac

SEQ ID NO: 6063485 - DNA, 25 bp, Homo sapien
acaggtcgttaatcatccgaatcat

SEQ ID NO: 6063486 - DNA, 25 bp, Homo sapien
ggttcaccacctcaagtttcacatc

SEQ ID NO: 6063487 - DNA, 25 bp, Homo sapien
gtgcgcttaccacgcaagatgtagc

SEQ ID NO: 6063488 - DNA, 25 bp, Homo sapien
tcgtccagattttccaacatatcac

SEQ ID NO: 6063489 - DNA, 25 bp, Homo sapien
tcgaaacgatttaagacaaaattga

SEQ ID NO: 6063490 - DNA, 25 bp, Homo sapien
tcccttgatccaaacgggataactc

SEQ ID NO: 6063491 - DNA, 25 bp, Homo sapien
cgatttaagacaaaattgaacagac

SEQ ID NO: 6063492 - DNA, 25 bp, Homo sapien
aagtttcacatccatccgtcccttg

SEQ ID NO: 6063493 - DNA, 25 bp, Homo sapien
gcatctgacaaatcaacctggaaat

SEQ ID NO: 6063494 - DNA, 25 bp, Homo sapien
atcatatcgaaacgatttaagacaa

SEQ ID NO: 6063495 - DNA, 25 bp, Homo sapien
aaagttttgcgccatttctgggtca

SEQ ID NO: 6063496 - DNA, 25 bp, Homo sapien
ggaatcaatccgttgttgttccgta

SEQ ID NO: 6063497 - DNA, 25 bp, Homo sapien
tcgttttcaataatcatatcgaaac

SEQ ID NO: 6063498 - DNA, 25 bp, Homo sapien
caccacatgttgtccaatcgcttct

SEQ ID NO: 6063499 - DNA, 25 bp, Homo sapien
catcctgaaccacgcccaaaaagtt

SEQ ID NO: 6063500 - DNA, 25 bp, Homo sapien
gccgacaaaatctgccgtgcctggt

SEQ ID NO: 6063501 - DNA, 25 bp, Homo sapien
cattagaaacaaacatgcggcgttc

SEQ ID NO: 6063502 - DNA, 25 bp, Homo sapien
atcgacgccgacaaaatctgccgtg

SEQ ID NO: 6063503 - DNA, 25 bp, Homo sapien
tcaacctggaaatcgtccagatttt

SEQ ID NO: 6063504 - DNA, 25 bp, Homo sapien
aatatcatgtaggaccacaacaaga

SEQ ID NO: 6063505 - DNA, 25 bp, Homo sapien
ggataactccaacaggtcgttaatc

SEQ ID NO: 6063506 - DNA, 25 bp, Homo sapien
ccatttctgggtcattaatcgcccc

SEQ ID NO: 6063507 - DNA, 25 bp, Homo sapien
actccaacaggtcgttaatcatccg

SEQ ID NO: 6063508 - DNA, 25 bp, Homo sapien
ctgggtcattaatcgccccttcagc

SEQ ID NO: 6063509 - DNA, 25 bp, Homo sapien
aacataagaacgcacagaggtcaac

SEQ ID NO: 6063510 - DNA, 25 bp, Homo sapien
atcgccccttcagccaacgcatcaa

SEQ ID NO: 6063511 - DNA, 25 bp, Homo sapien
ccgtaattcatgtgacacattagaa

SEQ ID NO: 6063512 - DNA, 25 bp, Homo sapien
tcaataatcatatcgaaacgattta

SEQ ID NO: 6063513 - DNA, 25 bp, Homo sapien
aacaagaccagaaataaagcccgat

SEQ ID NO: 6063514 - DNA, 25 bp, Homo sapien
ccacgcccaaaaagttttgcgccat

SEQ ID NO: 6063515 - DNA, 25 bp, Homo sapien
tttgcgccatttctgggtcattaat

SEQ ID NO: 6063516 - DNA, 25 bp, Homo sapien
gaatcatacgttgcgtttcatcctg

SEQ ID NO: 6063517 - DNA, 25 bp, Homo sapien
gcttgaacgactacttccttgccag

SEQ ID NO: 6063518 - DNA, 25 bp, Homo sapien
atatcacgcaacgtgcgcttaccac

SEQ ID NO: 6063519 - DNA, 25 bp, Homo sapien
catccgtcccttgatccaaacggga

SEQ ID NO: 6063520 - DNA, 25 bp, Homo sapien
tattgaggttcaccacctcaagttt

SEQ ID NO: 6063521 - DNA, 25 bp, Homo sapien
cgcaagatgtagcaaatccaccaca

SEQ ID NO: 6063522 - DNA, 25 bp, Homo sapien
ttccgtaatatcatgtaggaccaca

SEQ ID NO: 6063523 - DNA, 25 bp, Homo sapien
gcgtttcatcctgaaccacgcccaa

SEQ ID NO: 6063524 - DNA, 25 bp, Homo sapien
caaacgggataactccaacaggtcg

SEQ ID NO: 6063525 - DNA, 25 bp, Homo sapien
ttcatgtgacacattagaaacaaac

SEQ ID NO: 6063526 - DNA, 25 bp, Homo sapien
cgcaacgtgcgcttaccacgcaaga

SEQ ID NO: 6063527 - DNA, 25 bp, Homo sapien
gcgttcggaatcaatccgttgttgt

SEQ ID NO: 6063528 - DNA, 25 bp, Homo sapien
accagaaataaagcccgattgccgt

SEQ ID NO: 6063529 - DNA, 25 bp, Homo sapien
cgcatcaacataagaacgcacagag

SEQ ID NO: 6063530 - DNA, 25 bp, Homo sapien
tcacttcccccgtcggttagctgta

SEQ ID NO: 6063531 - DNA, 25 bp, Homo sapien
tacgttgcgtttcatcctgaaccac

SEQ ID NO: 6063532 - DNA, 25 bp, Homo sapien
taaggaaacataggcttgaacgact

SEQ ID NO: 6063533 - DNA, 25 bp, Homo sapien
caaatccaccacatgttgtccaatc

SEQ ID NO: 6063534 - DNA, 25 bp, Homo sapien
cgttaatcatccgaatcatacgttg

SEQ ID NO: 6063535 - DNA, 25 bp, Homo sapien
acataggcttgaacgactacttcct

SEQ ID NO: 6063536 - DNA, 25 bp, Homo sapien
gacaaatcaacctggaaatcgtcca

SEQ ID NO: 6063537 - DNA, 25 bp, Homo sapien
ttaccacgcaagatgtagcaaatcc

SEQ ID NO: 6063538 - DNA, 25 bp, Homo sapien
tgatccaaacgggataactccaaca

SEQ ID NO: 6063539 - DNA, 25 bp, Homo sapien
agattttccaacatatcacgcaacg

SEQ ID NO: 6063540 - DNA, 25 bp, Homo sapien
gcctggttaataatcgtcacttccc

SEQ ID NO: 6063541 - DNA, 25 bp, Homo sapien
tggaaatcgtccagattttccaaca

SEQ ID NO: 6063542 - DNA, 25 bp, Homo sapien
cacagaggtcaacggtgtccgtaat

SEQ ID NO: 6063543 - DNA, 25 bp, Homo sapien
acgactacttccttgccagcatctg

SEQ ID NO: 6063544 - DNA, 25 bp, Homo sapien
acttccttgccagcatctgacaaat

SEQ ID NO: 6063545 - DNA, 25 bp, Homo sapien
ttgttgttccgtaatatcatgtagg

SEQ ID NO: 6063546 - DNA, 25 bp, Homo sapien
aaacaaacatgcggcgttcggaatc

SEQ ID NO: 6063547 - DNA, 25 bp, Homo sapien
aagacaaaattgaacagactattga

SEQ ID NO: 6063548 - DNA, 25 bp, Homo sapien
acatgcggcgttcggaatcaatccg

SEQ ID NO: 6063549 - DNA, 25 bp, Homo sapien
cacatccatccgtcccttgatccaa

SEQ ID NO: 6063550 - DNA, 25 bp, Homo sapien
tttaattaaggaaacataggcttga

SEQ ID NO: 6063551 - DNA, 25 bp, Homo sapien
tcatccgaatcatacgttgcgtttc

SEQ ID NO: 6063552 - DNA, 25 bp, Homo sapien
cttcgcgatcgacgccgacaaaatc

SEQ ID NO: 6063553 - DNA, 25 bp, Homo sapien
tcgcttcttcgcgatcgacgccgac

SEQ ID NO: 6063554 - DNA, 25 bp, Homo sapien
aacagactattgaggttcaccacct

SEQ ID NO: 6063555 - DNA, 25 bp, Homo sapien
cacctcaagtttcacatccatccgt

SEQ ID NO: 6063556 - DNA, 25 bp, Homo sapien
gtcggttagctgtaaaacaccatcc

SEQ ID NO: 6063557 - DNA, 25 bp, Homo sapien
ggtcaacggtgtccgtaattcatgt

SEQ ID NO: 6063558 - DNA, 25 bp, Homo sapien
atgtagcaaatccaccacatgttgt

SEQ ID NO: 6063559 - DNA, 25 bp, Homo sapien
atgtaggaccacaacaagaccagaa

SEQ ID NO: 6063560 - DNA, 25 bp, Homo sapien
gtgacacattagaaacaaacatgcg

SEQ ID NO: 6063561 - DNA, 25 bp, Homo sapien
ttgccagcatctgacaaatcaacct

SEQ ID NO: 6063562 - DNA, 25 bp, Homo sapien
tgccgtgcctggttaataatcgtca

SEQ ID NO: 6063563 - DNA, 25 bp, Homo sapien
aatccgttgttgttccgtaatatca

SEQ ID NO: 6063564 - DNA, 25 bp, Homo sapien
catgttgtccaatcgcttcttcgcg

SEQ ID NO: 6063565 - DNA, 25 bp, Homo sapien
aaaatctgccgtgcctggttaataa

SEQ ID NO: 6063566 - DNA, 25 bp, Homo sapien
agaacgcacagaggtcaacggtgtc

SEQ ID NO: 6063567 - DNA, 25 bp, Homo sapien
tccaacatatcacgcaacgtgcgct

SEQ ID NO: 6063568 - DNA, 25 bp, Homo sapien
agccaacgcatcaacataagaacgc

SEQ ID NO: 6063569 - DNA, 25 bp, Homo sapien
cggtgtccgtaattcatgtgacaca

SEQ ID NO: 6063570 - DNA, 25 bp, Homo sapien
tggctataacatttgggccctgcgc

SEQ ID NO: 6063571 - DNA, 25 bp, Homo sapien
taccatgatccacaatttgttcttg

SEQ ID NO: 6063572 - DNA, 25 bp, Homo sapien
tgggccctgcgcttggaataatctt

SEQ ID NO: 6063573 - DNA, 25 bp, Homo sapien
tactaaatggtttgcactaactcat

SEQ ID NO: 6063574 - DNA, 25 bp, Homo sapien
gctcagtagcttgcatgtcctaact

SEQ ID NO: 6063575 - DNA, 25 bp, Homo sapien
gctgatagcctgcatataccatgat

SEQ ID NO: 6063576 - DNA, 25 bp, Homo sapien
cagcatgctgttagtggcatgagca

SEQ ID NO: 6063577 - DNA, 25 bp, Homo sapien
tgcatttgcgtagccacaatctctg

SEQ ID NO: 6063578 - DNA, 25 bp, Homo sapien
ccaagggcagaaccaggtacatttc

SEQ ID NO: 6063579 - DNA, 25 bp, Homo sapien
aacttcttggctgaaatttgcctca

SEQ ID NO: 6063580 - DNA, 25 bp, Homo sapien
cttgaatctgaacagtttggcagca

SEQ ID NO: 6063581 - DNA, 25 bp, Homo sapien
ttttaatctggaacaactctgctga

SEQ ID NO: 6063582 - DNA, 25 bp, Homo sapien
ctcaggccgggacacttggaccaac

SEQ ID NO: 6063583 - DNA, 25 bp, Homo sapien
ttccgcttgaggcgccgggagaagg

SEQ ID NO: 6063584 - DNA, 25 bp, Homo sapien
gggagaaggagggatccggccgaca

SEQ ID NO: 6063585 - DNA, 25 bp, Homo sapien
aggccgggacacttggaccaactga

SEQ ID NO: 6063586 - DNA, 25 bp, Homo sapien
caggccgggacacttggaccaactg

SEQ ID NO: 6063587 - DNA, 25 bp, Homo sapien
gccgacacctcaggccgggacactt

SEQ ID NO: 6063588 - DNA, 25 bp, Homo sapien
gccgggacacttggaccaactgacc

SEQ ID NO: 6063589 - DNA, 25 bp, Homo sapien
tcaggccgggacacttggaccaact

SEQ ID NO: 6063590 - DNA, 25 bp, Homo sapien
agaaggagggatccggccgacacct

SEQ ID NO: 6063591 - DNA, 25 bp, Homo sapien
ggccgggacacttggaccaactgac

SEQ ID NO: 6063592 - DNA, 25 bp, Homo sapien
acctcaggccgggacacttggacca

SEQ ID NO: 6063593 - DNA, 25 bp, Homo sapien
gacacctcaggccgggacacttgga

SEQ ID NO: 6063594 - DNA, 25 bp, Homo sapien
ggccccagcaaggtagaccagcaag

SEQ ID NO: 6063595 - DNA, 25 bp, Homo sapien
ttggccccagcaaggtagaccagca

SEQ ID NO: 6063596 - DNA, 25 bp, Homo sapien
aggtggtacacttggccccagcaag

SEQ ID NO: 6063597 - DNA, 25 bp, Homo sapien
cacaggtggtacacttggccccagc

SEQ ID NO: 6063598 - DNA, 25 bp, Homo sapien
cccagcaaggtagaccagcaagccg

SEQ ID NO: 6063599 - DNA, 25 bp, Homo sapien
gaggtgagcaccaggcgggccttgg

SEQ ID NO: 6063600 - DNA, 25 bp, Homo sapien
acaggtggtacacttggccccagca

SEQ ID NO: 6063601 - DNA, 25 bp, Homo sapien
cagcaacaaaaggcctgaggccgcc

SEQ ID NO: 6063602 - DNA, 25 bp, Homo sapien
cagcaaggtagaccagcaagccgaa

SEQ ID NO: 6063603 - DNA, 25 bp, Homo sapien
caaggtagaccagcaagccgaacag

SEQ ID NO: 6063604 - DNA, 25 bp, Homo sapien
agtagcgggccatgtaatggctggg

SEQ ID NO: 6063605 - DNA, 25 bp, Homo sapien
agcaaggtagaccagcaagccgaac

SEQ ID NO: 6063606 - DNA, 25 bp, Homo sapien
cttcatctgatgagtcaaactcact

SEQ ID NO: 6063607 - DNA, 25 bp, Homo sapien
atatatgaattggagtctgttcatc

SEQ ID NO: 6063608 - DNA, 25 bp, Homo sapien
gagtctgttcatcttcaataggctc

SEQ ID NO: 6063609 - DNA, 25 bp, Homo sapien
gttcatcttcaataggctcttcatc

SEQ ID NO: 6063610 - DNA, 25 bp, Homo sapien
gaattggagtctgttcatcttcaat

SEQ ID NO: 6063611 - DNA, 25 bp, Homo sapien
ctcacttgtttgtattgaactgggc

SEQ ID NO: 6063612 - DNA, 25 bp, Homo sapien
taggctcttcatctgatgagtcaaa

SEQ ID NO: 6063613 - DNA, 25 bp, Homo sapien
tttacaaccgtgatatatgaattgg

SEQ ID NO: 6063614 - DNA, 25 bp, Homo sapien
accgtgatatatgaattggagtctg

SEQ ID NO: 6063615 - DNA, 25 bp, Homo sapien
cttcaataggctcttcatctgatga

SEQ ID NO: 6063616 - DNA, 25 bp, Homo sapien
tgtttgtattgaactgggcggcttc

SEQ ID NO: 6063617 - DNA, 25 bp, Homo sapien
ctgatgagtcaaactcacttgtttg

SEQ ID NO: 6063618 - DNA, 25 bp, Homo sapien
gtcaaactcacttgtttgtattgaa

SEQ ID NO: 6063619 - DNA, 25 bp, Homo sapien
cttcatctgatgagtcaaactcact

SEQ ID NO: 6063620 - DNA, 25 bp, Homo sapien
gtcaaactcacttgtttgtattgaa

SEQ ID NO: 6063621 - DNA, 25 bp, Homo sapien
atatatgaattggagtctgttcatc

SEQ ID NO: 6063622 - DNA, 25 bp, Homo sapien
aacaattcactcgtgacaaagatag

SEQ ID NO: 6063623 - DNA, 25 bp, Homo sapien
gagtctgttcatcttcaataggctc

SEQ ID NO: 6063624 - DNA, 25 bp, Homo sapien
gttcatcttcaataggctcttcatc

SEQ ID NO: 6063625 - DNA, 25 bp, Homo sapien
gaattggagtctgttcatcttcaat

SEQ ID NO: 6063626 - DNA, 25 bp, Homo sapien
cttcaataggctcttcatctgatga

SEQ ID NO: 6063627 - DNA, 25 bp, Homo sapien
aaattaacaacgtggaggagcacat

SEQ ID NO: 6063628 - DNA, 25 bp, Homo sapien
cgagaaactgagaacaattcactcg

SEQ ID NO: 6063629 - DNA, 25 bp, Homo sapien
cgtggaggagcacataaaccgagaa

SEQ ID NO: 6063630 - DNA, 25 bp, Homo sapien
taggctcttcatctgatgagtcaaa

SEQ ID NO: 6063631 - DNA, 25 bp, Homo sapien
gtgacaaagatagccatgatatatg

SEQ ID NO: 6063632 - DNA, 25 bp, Homo sapien
aagatagccatgatatatgaattgg

SEQ ID NO: 6063633 - DNA, 25 bp, Homo sapien
gccatgatatatgaattggagtctg

SEQ ID NO: 6063634 - DNA, 25 bp, Homo sapien
ctcacttgtttgtattgaactgggc

SEQ ID NO: 6063635 - DNA, 25 bp, Homo sapien
tcactcgtgacaaagatagccatga

SEQ ID NO: 6063636 - DNA, 25 bp, Homo sapien
actgagaacaattcactcgtgacaa

SEQ ID NO: 6063637 - DNA, 25 bp, Homo sapien
tgtttgtattgaactgggcggcttc

SEQ ID NO: 6063638 - DNA, 25 bp, Homo sapien
ggagcacataaaccgagaaactgag

SEQ ID NO: 6063639 - DNA, 25 bp, Homo sapien
ctgatgagtcaaactcacttgtttg

SEQ ID NO: 6063640 - DNA, 25 bp, Homo sapien
taacaacgtggaggagcacataaac

SEQ ID NO: 6063641 - DNA, 25 bp, Homo sapien
ataaaccgagaaactgagaacaatt

SEQ ID NO: 6063642 - DNA, 25 bp, Homo sapien
gacctgagtaagactcggtgcaaga

SEQ ID NO: 6063643 - DNA, 25 bp, Homo sapien
gatgatgttataacatttctcctac

SEQ ID NO: 6063644 - DNA, 25 bp, Homo sapien
ccaggtgggatgatgttataacatt

SEQ ID NO: 6063645 - DNA, 25 bp, Homo sapien
tgaaggaattgacccccgaggatct

SEQ ID NO: 6063646 - DNA, 25 bp, Homo sapien
gcagagatgagcagatgttaatgga

SEQ ID NO: 6063647 - DNA, 25 bp, Homo sapien
gcagatgttaatggataaagccagg

SEQ ID NO: 6063648 - DNA, 25 bp, Homo sapien
aaatctcccaactcctgcatgtgtg

SEQ ID NO: 6063649 - DNA, 25 bp, Homo sapien
gcatgtgtgacctgagtaagactcg

SEQ ID NO: 6063650 - DNA, 25 bp, Homo sapien
tccatctttggataagtgattaaaa

SEQ ID NO: 6063651 - DNA, 25 bp, Homo sapien
aagactcggtgcaagaagacatcag

SEQ ID NO: 6063652 - DNA, 25 bp, Homo sapien
gagtaagactcggtgcaagaagaca

SEQ ID NO: 6063653 - DNA, 25 bp, Homo sapien
tcccaactcctgcatgtgtgacctg

SEQ ID NO: 6063654 - DNA, 25 bp, Homo sapien
tattgaaaataaaacatggaacaaa

SEQ ID NO: 6063655 - DNA, 25 bp, Homo sapien
acaaattgttcatttcaatactcgt

SEQ ID NO: 6063656 - DNA, 25 bp, Homo sapien
caataaagtgctttataaagataaa

SEQ ID NO: 6063657 - DNA, 25 bp, Homo sapien
tcaaatttgggattattgaaaataa

SEQ ID NO: 6063658 - DNA, 25 bp, Homo sapien
tgttatagaagtataaatatcacta

SEQ ID NO: 6063659 - DNA, 25 bp, Homo sapien
taactaaatcgctagttttagaatc

SEQ ID NO: 6063660 - DNA, 25 bp, Homo sapien
tatttgaaacaatttcaaaattgta

SEQ ID NO: 6063661 - DNA, 25 bp, Homo sapien
gaaatttagctaaaattcattatat

SEQ ID NO: 6063662 - DNA, 25 bp, Homo sapien
taatgttgatacatttatttaaagc

SEQ ID NO: 6063663 - DNA, 25 bp, Homo sapien
aataaaacatggaacaaattgttca

SEQ ID NO: 6063664 - DNA, 25 bp, Homo sapien
gaattctaaaatctttatagtttca

SEQ ID NO: 6063665 - DNA, 25 bp, Homo sapien
taataagattcaaccttaaatgaat

SEQ ID NO: 6063666 - DNA, 25 bp, Homo sapien
gataaatatagaattctaaaatctt

SEQ ID NO: 6063667 - DNA, 25 bp, Homo sapien
gcatcttctttactatatgctaatg

SEQ ID NO: 6063668 - DNA, 25 bp, Homo sapien
taaagtcaataaagtgctttataaa

SEQ ID NO: 6063669 - DNA, 25 bp, Homo sapien
tagtctttaatgttgatacatttat

SEQ ID NO: 6063670 - DNA, 25 bp, Homo sapien
taaatatcactaaataactcaaatt

SEQ ID NO: 6063671 - DNA, 25 bp, Homo sapien
tcactaaataactcaaatttgggat

SEQ ID NO: 6063672 - DNA, 25 bp, Homo sapien
ctagttttagaatcacttatttctt

SEQ ID NO: 6063673 - DNA, 25 bp, Homo sapien
cttgaaaaatcaacaattatttatt

SEQ ID NO: 6063674 - DNA, 25 bp, Homo sapien
tgatacatttatttaaagcatcttc

SEQ ID NO: 6063675 - DNA, 25 bp, Homo sapien
gattcaaccttaaatgaattaacta

SEQ ID NO: 6063676 - DNA, 25 bp, Homo sapien
acttgataaagtcaataaagtgctt

SEQ ID NO: 6063677 - DNA, 25 bp, Homo sapien
ttaaagcatcttctttactatatgc

SEQ ID NO: 6063678 - DNA, 25 bp, Homo sapien
aaatcgctagttttagaatcactta

SEQ ID NO: 6063679 - DNA, 25 bp, Homo sapien
tgaagatccttagcaaaaattttat

SEQ ID NO: 6063680 - DNA, 25 bp, Homo sapien
tgacaatagtctttaatgttgatac

SEQ ID NO: 6063681 - DNA, 25 bp, Homo sapien
gtttcacagtcattacttgaataaa

SEQ ID NO: 6063682 - DNA, 25 bp, Homo sapien
tataaaacttgataaagtcaataaa

SEQ ID NO: 6063683 - DNA, 25 bp, Homo sapien
tttaaataagacaataatgcaatag

SEQ ID NO: 6063684 - DNA, 25 bp, Homo sapien
caataatgcaatagttaaacctaaa

SEQ ID NO: 6063685 - DNA, 25 bp, Homo sapien
taatgatataaaacttgataaagtc

SEQ ID NO: 6063686 - DNA, 25 bp, Homo sapien
atgaattaactaaatcgctagtttt

SEQ ID NO: 6063687 - DNA, 25 bp, Homo sapien
taagacaataatgcaatagttaaac

SEQ ID NO: 6063688 - DNA, 25 bp, Homo sapien
aaaatctttatagtttcacagtcat

SEQ ID NO: 6063689 - DNA, 25 bp, Homo sapien
catttatttaaagcatcttctttac

SEQ ID NO: 6063690 - DNA, 25 bp, Homo sapien
ttacttgaataaaaaagctgaagat

SEQ ID NO: 6063691 - DNA, 25 bp, Homo sapien
tactcgtgacaatagtctttaatgt

SEQ ID NO: 6063692 - DNA, 25 bp, Homo sapien
gtgctttataaagataaatatagaa

SEQ ID NO: 6063693 - DNA, 25 bp, Homo sapien
gaataaaaaagctgaagatccttag

SEQ ID NO: 6063694 - DNA, 25 bp, Homo sapien
ttttaagtatcttgaaaaatcaaca

SEQ ID NO: 6063695 - DNA, 25 bp, Homo sapien
tgcaatagttaaacctaaaacataa

SEQ ID NO: 6063696 - DNA, 25 bp, Homo sapien
gataaggtaatacttttgttataga

SEQ ID NO: 6063697 - DNA, 25 bp, Homo sapien
tatatgctaatgatataaaacttga

SEQ ID NO: 6063698 - DNA, 25 bp, Homo sapien
tacttttgttatagaagtataaata

SEQ ID NO: 6063699 - DNA, 25 bp, Homo sapien
tgttcatttcaatactcgtgacaat

SEQ ID NO: 6063700 - DNA, 25 bp, Homo sapien
gtaatacttttgttatagaagtata

SEQ ID NO: 6063701 - DNA, 25 bp, Homo sapien
aaaagctgaagatccttagcaaaaa

SEQ ID NO: 6063702 - DNA, 25 bp, Homo sapien
ccttaaatgaattaactaaatcgct

SEQ ID NO: 6063703 - DNA, 25 bp, Homo sapien
tttcaatactcgtgacaatagtctt

SEQ ID NO: 6063704 - DNA, 25 bp, Homo sapien
aagtatcttgaaaaatcaacaatta

SEQ ID NO: 6063705 - DNA, 25 bp, Homo sapien
tctttactatatgctaatgatataa

SEQ ID NO: 6063706 - DNA, 25 bp, Homo sapien
agaattttaaataagacaataatgc

SEQ ID NO: 6063707 - DNA, 25 bp, Homo sapien
aataactcaaatttgggattattga

SEQ ID NO: 6063708 - DNA, 25 bp, Homo sapien
taaaacataataagattcaacctta

SEQ ID NO: 6063709 - DNA, 25 bp, Homo sapien
cattatatttttcttttgctaactt

SEQ ID NO: 6063710 - DNA, 25 bp, Homo sapien
taaacctaaaacataataagattca

SEQ ID NO: 6063711 - DNA, 25 bp, Homo sapien
tttatagtttcacagtcattacttg

SEQ ID NO: 6063712 - DNA, 25 bp, Homo sapien
cagtcattacttgaataaaaaagct

SEQ ID NO: 6063713 - DNA, 25 bp, Homo sapien
gaagtataaatatcactaaataact

SEQ ID NO: 6063714 - DNA, 25 bp, Homo sapien
aatcttgaaatttagctaaaattca

SEQ ID NO: 6063715 - DNA, 25 bp, Homo sapien
attaacttgacaaattgttaagaat

SEQ ID NO: 6063716 - DNA, 25 bp, Homo sapien
aattcattatatttttcttttgcta

SEQ ID NO: 6063717 - DNA, 25 bp, Homo sapien
tatagaattctaaaatctttatagt

SEQ ID NO: 6063718 - DNA, 25 bp, Homo sapien
tcaacaattatttatttttggaata

SEQ ID NO: 6063719 - DNA, 25 bp, Homo sapien
tgggattattgaaaataaaacatgg

SEQ ID NO: 6063720 - DNA, 25 bp, Homo sapien
tataaagataaatatagaattctaa

SEQ ID NO: 6063721 - DNA, 25 bp, Homo sapien
catggaacaaattgttcatttcaat

SEQ ID NO: 6063722 - DNA, 25 bp, Homo sapien
cagcacattacgacaattttttggc

SEQ ID NO: 6063723 - DNA, 25 bp, Homo sapien
ttagtgtacactagggcaaatatgt

SEQ ID NO: 6063724 - DNA, 25 bp, Homo sapien
tactgggcacaccattcataatgtt

SEQ ID NO: 6063725 - DNA, 25 bp, Homo sapien
cctggtatacaggtactctgagata

SEQ ID NO: 6063726 - DNA, 25 bp, Homo sapien
tagttcacgccaaggtatcatggac

SEQ ID NO: 6063727 - DNA, 25 bp, Homo sapien
caaatatgtacagttgtgcacaggg

SEQ ID NO: 6063728 - DNA, 25 bp, Homo sapien
tctctggcatatgatagtatcctac

SEQ ID NO: 6063729 - DNA, 25 bp, Homo sapien
gcaaaacagctgtcacaaatccctg

SEQ ID NO: 6063730 - DNA, 25 bp, Homo sapien
gcacagggtgcttacaacataatta

SEQ ID NO: 6063731 - DNA, 25 bp, Homo sapien
gtatcctactctaacaaagtcagca

SEQ ID NO: 6063732 - DNA, 25 bp, Homo sapien
tctggctactctaatagggaaatga

SEQ ID NO: 6063733 - DNA, 25 bp, Homo sapien
tggtaaccctgtatccatggcagat

SEQ ID NO: 6063734 - DNA, 25 bp, Homo sapien
tgggattaatggagtggttctctcc

SEQ ID NO: 6063735 - DNA, 25 bp, Homo sapien
ccaacaccttgatattgagcttcca

SEQ ID NO: 6063736 - DNA, 25 bp, Homo sapien
catatgatggcacagcaaggaggcc

SEQ ID NO: 6063737 - DNA, 25 bp, Homo sapien
gccatatgatggcacagcaaggagg

SEQ ID NO: 6063738 - DNA, 25 bp, Homo sapien
aacaccttgatattgagcttccagc

SEQ ID NO: 6063739 - DNA, 25 bp, Homo sapien
tttctcctgaatgtggttactgcca

SEQ ID NO: 6063740 - DNA, 25 bp, Homo sapien
tgagtcttaattggcattccatcag

SEQ ID NO: 6063741 - DNA, 25 bp, Homo sapien
tctctgtgcgttctgccatatgatg

SEQ ID NO: 6063742 - DNA, 25 bp, Homo sapien
cactaaattagtggatccctcccag

SEQ ID NO: 6063743 - DNA, 25 bp, Homo sapien
tttgtctaactcactaaattagtgg

SEQ ID NO: 6063744 - DNA, 25 bp, Homo sapien
taaattagtggatccctcccaggac

SEQ ID NO: 6063745 - DNA, 25 bp, Homo sapien
tcccaggacctctattttgatttgc

SEQ ID NO: 6063746 - DNA, 25 bp, Homo sapien
aaacttcacatgagtcttaattggc

SEQ ID NO: 6063747 - DNA, 25 bp, Homo sapien
gctgtgtcctacagagttagaaagt

SEQ ID NO: 6063748 - DNA, 25 bp, Homo sapien
tccaaaacttcacatgagtcttaat

SEQ ID NO: 6063749 - DNA, 25 bp, Homo sapien
caaaacttcacatgagtcttaattg

SEQ ID NO: 6063750 - DNA, 25 bp, Homo sapien
aaaacttcacatgagtcttaattgg

SEQ ID NO: 6063751 - DNA, 25 bp, Homo sapien
ggcggcgaggcactgtagtatcagt

SEQ ID NO: 6063752 - DNA, 25 bp, Homo sapien
cccaggcggcgaggcactgtagtat

SEQ ID NO: 6063753 - DNA, 25 bp, Homo sapien
aggcggcgaggcactgtagtatcag

SEQ ID NO: 6063754 - DNA, 25 bp, Homo sapien
ccaggcggcgaggcactgtagtatc

SEQ ID NO: 6063755 - DNA, 25 bp, Homo sapien
caggcggcgaggcactgtagtatca

SEQ ID NO: 6063756 - DNA, 25 bp, Homo sapien
gcggcgaggcactgtagtatcagtc

SEQ ID NO: 6063757 - DNA, 25 bp, Homo sapien
tgcgccgatgagttccccatcagct

SEQ ID NO: 6063758 - DNA, 25 bp, Homo sapien
gcctgccagtatccaacgcgttttg

SEQ ID NO: 6063759 - DNA, 25 bp, Homo sapien
ggtgttcttccttatatctacgcat

SEQ ID NO: 6063760 - DNA, 25 bp, Homo sapien
tcatttaatgcgttagctgcgccga

SEQ ID NO: 6063761 - DNA, 25 bp, Homo sapien
ggaattccgctaacctctacacaac

SEQ ID NO: 6063762 - DNA, 25 bp, Homo sapien
cgctttcgtctctcagtgtcagtat

SEQ ID NO: 6063763 - DNA, 25 bp, Homo sapien
gttagctgccttcgccatcttggtg

SEQ ID NO: 6063764 - DNA, 25 bp, Homo sapien
taatgatcatcgtttagggcgtgga

SEQ ID NO: 6063765 - DNA, 25 bp, Homo sapien
tagggcgtggactaccagggtatct

SEQ ID NO: 6063766 - DNA, 25 bp, Homo sapien
tttcaccgcttcacaaggaattccg

SEQ ID NO: 6063767 - DNA, 25 bp, Homo sapien
caaacaacctacagggctagttgat

SEQ ID NO: 6063768 - DNA, 25 bp, Homo sapien
tgagccccaaaatttaacgccagac

SEQ ID NO: 6063769 - DNA, 25 bp, Homo sapien
tgcgtggtatcccagatcctcagct

SEQ ID NO: 6063770 - DNA, 25 bp, Homo sapien
cagtccaagcaatgtctttgatctt

SEQ ID NO: 6063771 - DNA, 25 bp, Homo sapien
gagagaatcgcacacagttgacaaa

SEQ ID NO: 6063772 - DNA, 25 bp, Homo sapien
tgtaatctcgcccacagaagagcca

SEQ ID NO: 6063773 - DNA, 25 bp, Homo sapien
ctttgatcttcccagcgaaaggctg

SEQ ID NO: 6063774 - DNA, 25 bp, Homo sapien
acagaagagccactatcccagagga

SEQ ID NO: 6063775 - DNA, 25 bp, Homo sapien
cgcgcagttatcatcgcttcccgtg

SEQ ID NO: 6063776 - DNA, 25 bp, Homo sapien
gaaaggctggtactcatacttcaac

SEQ ID NO: 6063777 - DNA, 25 bp, Homo sapien
ggcgatcctcttactgtcttcagtc

SEQ ID NO: 6063778 - DNA, 25 bp, Homo sapien
ttgttgtgtcctgtaatctcgccca

SEQ ID NO: 6063779 - DNA, 25 bp, Homo sapien
gctccttctgcgtggtatcccagat

SEQ ID NO: 6063780 - DNA, 25 bp, Homo sapien
tacttcaacaggtgctccttctgcg

SEQ ID NO: 6063781 - DNA, 25 bp, Homo sapien
tgccagcggtatggcggctctgctt

SEQ ID NO: 6063782 - DNA, 25 bp, Homo sapien
ttgacaaacggctgtggcgccaact

SEQ ID NO: 6063783 - DNA, 25 bp, Homo sapien
tatggcggctctgcttgatgccacg

SEQ ID NO: 6063784 - DNA, 25 bp, Homo sapien
tcaaagtgcaaggaaggattgtctc

SEQ ID NO: 6063785 - DNA, 25 bp, Homo sapien
gctgtggcgccaactgtgaacttga

SEQ ID NO: 6063786 - DNA, 25 bp, Homo sapien
tgtctcagccaacattacaagtgat

SEQ ID NO: 6063787 - DNA, 25 bp, Homo sapien
cattacaagtgattccgaacacgca

SEQ ID NO: 6063788 - DNA, 25 bp, Homo sapien
caggctatctcttaaaggctcaaag

SEQ ID NO: 6063789 - DNA, 25 bp, Homo sapien
tcatcgcttcccgtgccagcggtat

SEQ ID NO: 6063790 - DNA, 25 bp, Homo sapien
tggcgccaactgtgaacttgaactt

SEQ ID NO: 6063791 - DNA, 25 bp, Homo sapien
aagtgcaaggaaggattgtctcagc

SEQ ID NO: 6063792 - DNA, 25 bp, Homo sapien
tgattccgaacacgcaaaacactcc

SEQ ID NO: 6063793 - DNA, 25 bp, Homo sapien
gaaaagctgtcctgatcatatggca

SEQ ID NO: 6063794 - DNA, 25 bp, Homo sapien
taaagtggaaaagctgtcctgatca

SEQ ID NO: 6063795 - DNA, 25 bp, Homo sapien
tacttgcttgtaggaaaccgagtaa

SEQ ID NO: 6063796 - DNA, 25 bp, Homo sapien
gcaaaacactgacaaggtacataaa

SEQ ID NO: 6063797 - DNA, 25 bp, Homo sapien
tggaaaagctgtcctgatcatatgg

SEQ ID NO: 6063798 - DNA, 25 bp, Homo sapien
acagattggacattttagggtaaat

SEQ ID NO: 6063799 - DNA, 25 bp, Homo sapien
tcctacttgcttgtaggaaaccgag

SEQ ID NO: 6063800 - DNA, 25 bp, Homo sapien
cactgacaaggtacataaatacaga

SEQ ID NO: 6063801 - DNA, 25 bp, Homo sapien
ccgagtaaagtggaaaagctgtcct

SEQ ID NO: 6063802 - DNA, 25 bp, Homo sapien
gacattttagggtaaattcactgta

SEQ ID NO: 6063803 - DNA, 25 bp, Homo sapien
tgcttgtaggaaaccgagtaaagtg

SEQ ID NO: 6063804 - DNA, 25 bp, Homo sapien
ctgtatttcctacttgcttgtagga

SEQ ID NO: 6063805 - DNA, 25 bp, Homo sapien
tgtccggtctccttgccgaggaagt

SEQ ID NO: 6063806 - DNA, 25 bp, Homo sapien
cacagatgccgtgcttgttcatgca

SEQ ID NO: 6063807 - DNA, 25 bp, Homo sapien
tcgtcgccgatctgctgtccggtct

SEQ ID NO: 6063808 - DNA, 25 bp, Homo sapien
gctccttgccctcgatccaggtgat

SEQ ID NO: 6063809 - DNA, 25 bp, Homo sapien
gatccaggtgatcttatcgcctcgg

SEQ ID NO: 6063810 - DNA, 25 bp, Homo sapien
tccttgccgggctcggcttcggcag

SEQ ID NO: 6063811 - DNA, 25 bp, Homo sapien
cgtccgtgaacttcccggtgtcgtg

SEQ ID NO: 6063812 - DNA, 25 bp, Homo sapien
acgatgtactcgagcgccagcttca

SEQ ID NO: 6063813 - DNA, 25 bp, Homo sapien
gcttgttcatgcacggcacgatgta

SEQ ID NO: 6063814 - DNA, 25 bp, Homo sapien
tgaacttcccggtgtcgtgcagggc

SEQ ID NO: 6063815 - DNA, 25 bp, Homo sapien
gaggaagtcgtccaccacacagatg

SEQ ID NO: 6063816 - DNA, 25 bp, Homo sapien
gatcttatcgcctcggatgtccttg

SEQ ID NO: 6063817 - DNA, 25 bp, Homo sapien
ggcagccaccgccgaacacctaatt

SEQ ID NO: 6063818 - DNA, 25 bp, Homo sapien
cagccaccgccgaacacctaatttt

SEQ ID NO: 6063819 - DNA, 25 bp, Homo sapien
gcagccaccgccgaacacctaattt

SEQ ID NO: 6063820 - DNA, 25 bp, Homo sapien
tttttggccgttttgcagatggtcc

SEQ ID NO: 6063821 - DNA, 25 bp, Homo sapien
ctattttccttccagggtctgaaat

SEQ ID NO: 6063822 - DNA, 25 bp, Homo sapien
tctgaaatgttactgcctatgaacc

SEQ ID NO: 6063823 - DNA, 25 bp, Homo sapien
caatgataaaaattcagttgccaac

SEQ ID NO: 6063824 - DNA, 25 bp, Homo sapien
tgacaaaattgtcccaggagaacaa

SEQ ID NO: 6063825 - DNA, 25 bp, Homo sapien
tgccaacttagaggattttatacat

SEQ ID NO: 6063826 - DNA, 25 bp, Homo sapien
gcctatgaaccgtgacatgtactct

SEQ ID NO: 6063827 - DNA, 25 bp, Homo sapien
gtgtgacaataaggatacaacagcc

SEQ ID NO: 6063828 - DNA, 25 bp, Homo sapien
cagatggtccatcgaagttagttct

SEQ ID NO: 6063829 - DNA, 25 bp, Homo sapien
tccaaattagagcataagtcttcct

SEQ ID NO: 6063830 - DNA, 25 bp, Homo sapien
actacttgttcatgtcagttctctg

SEQ ID NO: 6063831 - DNA, 25 bp, Homo sapien
gtcttccttaaatgtcctagtgtga

SEQ ID NO: 6063832 - DNA, 25 bp, Homo sapien
aatcagtcatggagttcagttgggt

SEQ ID NO: 6063833 - DNA, 25 bp, Homo sapien
tcagtcatggagttcagttgggtag

SEQ ID NO: 6063834 - DNA, 25 bp, Homo sapien
atcagtcatggagttcagttgggta

SEQ ID NO: 6063835 - DNA, 25 bp, Homo sapien
agttcagttgggtagttggtagtgt

SEQ ID NO: 6063836 - DNA, 25 bp, Homo sapien
gttcagttgggtagttggtagtgtg

SEQ ID NO: 6063837 - DNA, 25 bp, Homo sapien
aggtgatggagactccagttagctt

SEQ ID NO: 6063838 - DNA, 25 bp, Homo sapien
aaatcagtcatggagttcagttggg

SEQ ID NO: 6063839 - DNA, 25 bp, Homo sapien
ggtgatggagactccagttagcttg

SEQ ID NO: 6063840 - DNA, 25 bp, Homo sapien
cagtcatggagttcagttgggtagt

SEQ ID NO: 6063841 - DNA, 25 bp, Homo sapien
gcaggtgatggagactccagttagc

SEQ ID NO: 6063842 - DNA, 25 bp, Homo sapien
caggtgatggagactccagttagct

SEQ ID NO: 6063843 - DNA, 25 bp, Homo sapien
ttcagttgggtagttggtagtgtgt

SEQ ID NO: 6063844 - DNA, 25 bp, Homo sapien
caaggtgattctctaagatagagaa

SEQ ID NO: 6063845 - DNA, 25 bp, Homo sapien
tggaaacatagctgcccgcaatgcg

SEQ ID NO: 6063846 - DNA, 25 bp, Homo sapien
ctgcagaagtagaatcagagattta

SEQ ID NO: 6063847 - DNA, 25 bp, Homo sapien
ctggtcaaggtgattctctaagata

SEQ ID NO: 6063848 - DNA, 25 bp, Homo sapien
ttctggtcaaggtgattctctaaga

SEQ ID NO: 6063849 - DNA, 25 bp, Homo sapien
tctggtcaaggtgattctctaagat

SEQ ID NO: 6063850 - DNA, 25 bp, Homo sapien
ggaaacatagctgcccgcaatgcgc

SEQ ID NO: 6063851 - DNA, 25 bp, Homo sapien
tggtcaaggtgattctctaagatag

SEQ ID NO: 6063852 - DNA, 25 bp, Homo sapien
ggtcaaggtgattctctaagataga

SEQ ID NO: 6063853 - DNA, 25 bp, Homo sapien
gtcaaggtgattctctaagatagag

SEQ ID NO: 6063854 - DNA, 25 bp, Homo sapien
tcaaggtgattctctaagatagaga

SEQ ID NO: 6063855 - DNA, 25 bp, Homo sapien
tatacaaaacacctgcaatgtgggc

SEQ ID NO: 6063856 - DNA, 25 bp, Homo sapien
tcttcaccttgagatttgacagctg

SEQ ID NO: 6063857 - DNA, 25 bp, Homo sapien
tgtgggcagggcaaaatacatactt

SEQ ID NO: 6063858 - DNA, 25 bp, Homo sapien
taatatacctctcaagtatgaacaa

SEQ ID NO: 6063859 - DNA, 25 bp, Homo sapien
cacataatacatggtatacagtatt

SEQ ID NO: 6063860 - DNA, 25 bp, Homo sapien
aaaaatctcagtaccttgtgcaaat

SEQ ID NO: 6063861 - DNA, 25 bp, Homo sapien
catcagctccctgttttggttggaa

SEQ ID NO: 6063862 - DNA, 25 bp, Homo sapien
gaggagcgtttttaagtgtactgcc

SEQ ID NO: 6063863 - DNA, 25 bp, Homo sapien
atgttgcaacaaggcaaatttccat

SEQ ID NO: 6063864 - DNA, 25 bp, Homo sapien
tttctcaagagtccagggatatggg

SEQ ID NO: 6063865 - DNA, 25 bp, Homo sapien
aataaaatcggtcttccatgtgcct

SEQ ID NO: 6063866 - DNA, 25 bp, Homo sapien
cagtagtgcattagtaaactgttca

SEQ ID NO: 6063867 - DNA, 25 bp, Homo sapien
tcaatttagagaaccaaccccaatg

SEQ ID NO: 6063868 - DNA, 25 bp, Homo sapien
atcaatttagagaaccaaccccaat

SEQ ID NO: 6063869 - DNA, 25 bp, Homo sapien
gccacaaatctggtcactgacatga

SEQ ID NO: 6063870 - DNA, 25 bp, Homo sapien
gtaattcacccgctgactgtgctgt

SEQ ID NO: 6063871 - DNA, 25 bp, Homo sapien
gatcagattacccaggtaggcaggc

SEQ ID NO: 6063872 - DNA, 25 bp, Homo sapien
tcaggtaaattagtagactccagaa

SEQ ID NO: 6063873 - DNA, 25 bp, Homo sapien
gacatgagtggcctgcaattcttca

SEQ ID NO: 6063874 - DNA, 25 bp, Homo sapien
ggcaccttttcactggacagtttaa

SEQ ID NO: 6063875 - DNA, 25 bp, Homo sapien
aagcagtcgtcttggtgcacaacat

SEQ ID NO: 6063876 - DNA, 25 bp, Homo sapien
tgtgacatatgcaacgtggagaggc

SEQ ID NO: 6063877 - DNA, 25 bp, Homo sapien
cggcgatacagacaagatcagatta

SEQ ID NO: 6063878 - DNA, 25 bp, Homo sapien
gttatgtgcagacaaaagtgtgaca

SEQ ID NO: 6063879 - DNA, 25 bp, Homo sapien
tcagtgatgagcacacggcgataca

SEQ ID NO: 6063880 - DNA, 25 bp, Homo sapien
gttgtggcagtgacccttcttgtga

SEQ ID NO: 6063881 - DNA, 25 bp, Homo sapien
ctcgtcttccacctcatggttatca

SEQ ID NO: 6063882 - DNA, 25 bp, Homo sapien
aacagccgctgtatcctaaggaacc

SEQ ID NO: 6063883 - DNA, 25 bp, Homo sapien
ctcccagatgatctcgtcttccacc

SEQ ID NO: 6063884 - DNA, 25 bp, Homo sapien
tcccagatgatctcgtcttccacct

SEQ ID NO: 6063885 - DNA, 25 bp, Homo sapien
gggaacagccgctgtatcctaagga

SEQ ID NO: 6063886 - DNA, 25 bp, Homo sapien
ggaacagccgctgtatcctaaggaa

SEQ ID NO: 6063887 - DNA, 25 bp, Homo sapien
gaacagccgctgtatcctaaggaac

SEQ ID NO: 6063888 - DNA, 25 bp, Homo sapien
tcgtcttccacctcatggttatcat

SEQ ID NO: 6063889 - DNA, 25 bp, Homo sapien
cctcccagatgatctcgtcttccac

SEQ ID NO: 6063890 - DNA, 25 bp, Homo sapien
gtcttccacctcatggttatcattc

SEQ ID NO: 6063891 - DNA, 25 bp, Homo sapien
cgtcttccacctcatggttatcatt

SEQ ID NO: 6063892 - DNA, 25 bp, Homo sapien
tcctcccagatgatctcgtcttcca

SEQ ID NO: 6063893 - DNA, 25 bp, Homo sapien
catgggagggaacaaggaaaacatg

SEQ ID NO: 6063894 - DNA, 25 bp, Homo sapien
ctgcaatccagctaggcatgggagg

SEQ ID NO: 6063895 - DNA, 25 bp, Homo sapien
gaaggaatgatctggtggttaagat

SEQ ID NO: 6063896 - DNA, 25 bp, Homo sapien
aaagattctaggatactgcgagcaa

SEQ ID NO: 6063897 - DNA, 25 bp, Homo sapien
attctaggatactgcgagcaaatgg

SEQ ID NO: 6063898 - DNA, 25 bp, Homo sapien
cagaaggaatgatctggtggttaag

SEQ ID NO: 6063899 - DNA, 25 bp, Homo sapien
tccagctaggcatgggagggaacaa

SEQ ID NO: 6063900 - DNA, 25 bp, Homo sapien
tgcagcgagagcacaaagattctag

SEQ ID NO: 6063901 - DNA, 25 bp, Homo sapien
atccagctaggcatgggagggaaca

SEQ ID NO: 6063902 - DNA, 25 bp, Homo sapien
tttcactttgccaaacaccacatgc

SEQ ID NO: 6063903 - DNA, 25 bp, Homo sapien
tcaaacttattcgagttgtccacag

SEQ ID NO: 6063904 - DNA, 25 bp, Homo sapien
ttctaggatactgcgagcaaatggg

SEQ ID NO: 6063905 - DNA, 25 bp, Homo sapien
cgatagtagtcaccgagagaaactc

SEQ ID NO: 6063906 - DNA, 25 bp, Homo sapien
aagagccttttgagttcacaggtgc

SEQ ID NO: 6063907 - DNA, 25 bp, Homo sapien
agtagtcaccgagagaaactcctgc

SEQ ID NO: 6063908 - DNA, 25 bp, Homo sapien
tagtagtcaccgagagaaactcctg

SEQ ID NO: 6063909 - DNA, 25 bp, Homo sapien
acgaccagacatgacagcgatagta

SEQ ID NO: 6063910 - DNA, 25 bp, Homo sapien
catgacagcgatagtagtcaccgag

SEQ ID NO: 6063911 - DNA, 25 bp, Homo sapien
gacatgacagcgatagtagtcaccg

SEQ ID NO: 6063912 - DNA, 25 bp, Homo sapien
gaccagacatgacagcgatagtagt

SEQ ID NO: 6063913 - DNA, 25 bp, Homo sapien
ccagacatgacagcgatagtagtca

SEQ ID NO: 6063914 - DNA, 25 bp, Homo sapien
gacagcgatagtagtcaccgagaga

SEQ ID NO: 6063915 - DNA, 25 bp, Homo sapien
cagcgatagtagtcaccgagagaaa

SEQ ID NO: 6063916 - DNA, 25 bp, Homo sapien
gggcccacttgggccggacgtcagc

SEQ ID NO: 6063917 - DNA, 25 bp, Homo sapien
tcccttgacagcgatctccacaagg

SEQ ID NO: 6063918 - DNA, 25 bp, Homo sapien
tgtggctcttgccatctcgtggcat

SEQ ID NO: 6063919 - DNA, 25 bp, Homo sapien
agcgatctccacaaggcgcggaaca

SEQ ID NO: 6063920 - DNA, 25 bp, Homo sapien
ccatagtaggtggagtctttcttgt

SEQ ID NO: 6063921 - DNA, 25 bp, Homo sapien
ggaacaaatcctgagaccaacccat

SEQ ID NO: 6063922 - DNA, 25 bp, Homo sapien
tgaaaggttttaccagtgctgctgg

SEQ ID NO: 6063923 - DNA, 25 bp, Homo sapien
cgaattggtccgtgcccacgtgctc

SEQ ID NO: 6063924 - DNA, 25 bp, Homo sapien
caaggcgcggaacaaatcctgagac

SEQ ID NO: 6063925 - DNA, 25 bp, Homo sapien
cttgccatctcgtggcatccaggat

SEQ ID NO: 6063926 - DNA, 25 bp, Homo sapien
tatttgttcccgaattggtccgtgc

SEQ ID NO: 6063927 - DNA, 25 bp, Homo sapien
cctcactggtctctttactaaggag

SEQ ID NO: 6063928 - DNA, 25 bp, Homo sapien
gatcctggctgaaaggttttaccag

SEQ ID NO: 6063929 - DNA, 25 bp, Homo sapien
cacggtgcacgctttatcactgaga

SEQ ID NO: 6063930 - DNA, 25 bp, Homo sapien
aaagaatgatgcaggccgttaaaac

SEQ ID NO: 6063931 - DNA, 25 bp, Homo sapien
tgctttcttgcatgaccgtctctgt

SEQ ID NO: 6063932 - DNA, 25 bp, Homo sapien
gcaggccgttaaaacagcctttgga

SEQ ID NO: 6063933 - DNA, 25 bp, Homo sapien
tactaggctgcaagcccttgctgtc

SEQ ID NO: 6063934 - DNA, 25 bp, Homo sapien
tacaacacggctggaaagctcagct

SEQ ID NO: 6063935 - DNA, 25 bp, Homo sapien
gtctacacggccatggcgggctgca

SEQ ID NO: 6063936 - DNA, 25 bp, Homo sapien
aagttactgttaacaagagtccctg

SEQ ID NO: 6063937 - DNA, 25 bp, Homo sapien
ccgggttagggtctacacggccatg

SEQ ID NO: 6063938 - DNA, 25 bp, Homo sapien
tcctaattagctacaacacggctgg

SEQ ID NO: 6063939 - DNA, 25 bp, Homo sapien
cagtcagcttacacacaggcctaat

SEQ ID NO: 6063940 - DNA, 25 bp, Homo sapien
ggaaagctcagctcctactaggctg

SEQ ID NO: 6063941 - DNA, 25 bp, Homo sapien
tctttctctgcccgagtataaccga

SEQ ID NO: 6063942 - DNA, 25 bp, Homo sapien
ttctctgcccgagtataaccgattc

SEQ ID NO: 6063943 - DNA, 25 bp, Homo sapien
tctctgcccgagtataaccgattcc

SEQ ID NO: 6063944 - DNA, 25 bp, Homo sapien
ctttctctgcccgagtataaccgat

SEQ ID NO: 6063945 - DNA, 25 bp, Homo sapien
ctctttctctgcccgagtataaccg

SEQ ID NO: 6063946 - DNA, 25 bp, Homo sapien
tttctctgcccgagtataaccgatt

SEQ ID NO: 6063947 - DNA, 25 bp, Homo sapien
gctcgaactcagaacattgacagga

SEQ ID NO: 6063948 - DNA, 25 bp, Homo sapien
tagtccatgagattacagctttgca

SEQ ID NO: 6063949 - DNA, 25 bp, Homo sapien
tattcaatctacacctccagctcga

SEQ ID NO: 6063950 - DNA, 25 bp, Homo sapien
gccagatctatatgctccatcatca

SEQ ID NO: 6063951 - DNA, 25 bp, Homo sapien
agattctgcatgacttctcctgtcc

SEQ ID NO: 6063952 - DNA, 25 bp, Homo sapien
gattacagctttgcacactgacagg

SEQ ID NO: 6063953 - DNA, 25 bp, Homo sapien
gttaaagtgatatcgccagggttcc

SEQ ID NO: 6063954 - DNA, 25 bp, Homo sapien
agagcctagatgtgttctatctgca

SEQ ID NO: 6063955 - DNA, 25 bp, Homo sapien
cttataggtgaagactctgaggttc

SEQ ID NO: 6063956 - DNA, 25 bp, Homo sapien
aaggatggaagggttcatctcacac

SEQ ID NO: 6063957 - DNA, 25 bp, Homo sapien
gaaacgaacgtcaacattcacacag

SEQ ID NO: 6063958 - DNA, 25 bp, Homo sapien
tacacatacaaccaggtgtcaaagg

SEQ ID NO: 6063959 - DNA, 25 bp, Homo sapien
tgaggaatcagagcgctagaggtca

SEQ ID NO: 6063960 - DNA, 25 bp, Homo sapien
gaaagactgggtagtacacgatgag

SEQ ID NO: 6063961 - DNA, 25 bp, Homo sapien
cgctagaggtcataacaagaaagac

SEQ ID NO: 6063962 - DNA, 25 bp, Homo sapien
gaccttgttgatctttagcttcagc

SEQ ID NO: 6063963 - DNA, 25 bp, Homo sapien
gcttggtgtgtctaactagggagaa

SEQ ID NO: 6063964 - DNA, 25 bp, Homo sapien
cactgcctttatggccctcatgtgg

SEQ ID NO: 6063965 - DNA, 25 bp, Homo sapien
ggagcagaaagatgatcactgcctt

SEQ ID NO: 6063966 - DNA, 25 bp, Homo sapien
aaatgggtgcgatatattggctatc

SEQ ID NO: 6063967 - DNA, 25 bp, Homo sapien
actgactttgaaaaggtgataccac

SEQ ID NO: 6063968 - DNA, 25 bp, Homo sapien
gaccccagaagaatcgcaagcatga

SEQ ID NO: 6063969 - DNA, 25 bp, Homo sapien
cctgtagcatgcagtcgaatctgct

SEQ ID NO: 6063970 - DNA, 25 bp, Homo sapien
aagagataagaaaggaccccagaag

SEQ ID NO: 6063971 - DNA, 25 bp, Homo sapien
tgcttggtatgtctccataaagatc

SEQ ID NO: 6063972 - DNA, 25 bp, Homo sapien
tagttttaatggctctcacatgaac

SEQ ID NO: 6063973 - DNA, 25 bp, Homo sapien
atgagaggaactggctatcttcaga

SEQ ID NO: 6063974 - DNA, 25 bp, Homo sapien
tggcaattgcatgaaacctataatc

SEQ ID NO: 6063975 - DNA, 25 bp, Homo sapien
tgggacaattgcaaacaggttaaag

SEQ ID NO: 6063976 - DNA, 25 bp, Homo sapien
caactcagtactattgctgctataa

SEQ ID NO: 6063977 - DNA, 25 bp, Homo sapien
ctactgccggtagcatagagtttta

SEQ ID NO: 6063978 - DNA, 25 bp, Homo sapien
gctgctataaggctgaccaacaagg

SEQ ID NO: 6063979 - DNA, 25 bp, Homo sapien
ggaaaaatgatatcagtgacacaat

SEQ ID NO: 6063980 - DNA, 25 bp, Homo sapien
ttgtcataagatagctaaaggtcat

SEQ ID NO: 6063981 - DNA, 25 bp, Homo sapien
ggaaatggcaaagcatcccagcagg

SEQ ID NO: 6063982 - DNA, 25 bp, Homo sapien
tccaaactccacagctaacttgtat

SEQ ID NO: 6063983 - DNA, 25 bp, Homo sapien
taagaagaccaaggttcctagcagt

SEQ ID NO: 6063984 - DNA, 25 bp, Homo sapien
gtctcacaaagcatgtagatcactg

SEQ ID NO: 6063985 - DNA, 25 bp, Homo sapien
gaagattgtagcaagccagagattg

SEQ ID NO: 6063986 - DNA, 25 bp, Homo sapien
gtttctttcatatcggtccagccag

SEQ ID NO: 6063987 - DNA, 25 bp, Homo sapien
catagtgaatttgaccgacactgaa

SEQ ID NO: 6063988 - DNA, 25 bp, Homo sapien
caaggttcctagcagtatcatcaga

SEQ ID NO: 6063989 - DNA, 25 bp, Homo sapien
gaaaagcagggctagagaaactcgc

SEQ ID NO: 6063990 - DNA, 25 bp, Homo sapien
cggtccagccagtcttttatatgca

SEQ ID NO: 6063991 - DNA, 25 bp, Homo sapien
gagaaactcgctattttgagcaaat

SEQ ID NO: 6063992 - DNA, 25 bp, Homo sapien
taacttagcgtttcctagaatcaga

SEQ ID NO: 6063993 - DNA, 25 bp, Homo sapien
gagagaagactccaatcgtctcaca

SEQ ID NO: 6063994 - DNA, 25 bp, Homo sapien
aaggcatttgtatggaccttggtcc

SEQ ID NO: 6063995 - DNA, 25 bp, Homo sapien
gcagtaccctcaaagaggcttgctt

SEQ ID NO: 6063996 - DNA, 25 bp, Homo sapien
gaaaatgactcccagatttagcaaa

SEQ ID NO: 6063997 - DNA, 25 bp, Homo sapien
tatggccatgcctataaaatacaag

SEQ ID NO: 6063998 - DNA, 25 bp, Homo sapien
catgtaattagggatagtgtaaaga

SEQ ID NO: 6063999 - DNA, 25 bp, Homo sapien
cacttttatacatgttgagatccca

SEQ ID NO: 6064000 - DNA, 25 bp, Homo sapien
gaggcttgctttagcttgctgtttc

SEQ ID NO: 6064001 - DNA, 25 bp, Homo sapien
taagaatcttcgcaatgtatgcaaa

SEQ ID NO: 6064002 - DNA, 25 bp, Homo sapien
tctgctcttcaaccagagaaatatg

SEQ ID NO: 6064003 - DNA, 25 bp, Homo sapien
gcttctgtgttggagtctctcaatc

SEQ ID NO: 6064004 - DNA, 25 bp, Homo sapien
tcttcaggaaatagaagatgctgag

SEQ ID NO: 6064005 - DNA, 25 bp, Homo sapien
gaatactatcatgaagggaagaacc

SEQ ID NO: 6064006 - DNA, 25 bp, Homo sapien
agcacttcaattgctgcagtaccct

SEQ ID NO: 6064007 - DNA, 25 bp, Homo sapien
ggtgctggcgtctccggatattttg

SEQ ID NO: 6064008 - DNA, 25 bp, Homo sapien
gctggttaatacaataagactggaa

SEQ ID NO: 6064009 - DNA, 25 bp, Homo sapien
tcttcttgcgatgtttccacatgga

SEQ ID NO: 6064010 - DNA, 25 bp, Homo sapien
cattgatactggcatttatatggat

SEQ ID NO: 6064011 - DNA, 25 bp, Homo sapien
ctggaaaatcgtgtaaagttacttg

SEQ ID NO: 6064012 - DNA, 25 bp, Homo sapien
gaaaatgaacacagtgctggttaat

SEQ ID NO: 6064013 - DNA, 25 bp, Homo sapien
catttatatggatgtttatcagtgc

SEQ ID NO: 6064014 - DNA, 25 bp, Homo sapien
aaaatggcatagagtaggaagaaag

SEQ ID NO: 6064015 - DNA, 25 bp, Homo sapien
gaatcagaactgcaagtcttgtttc

SEQ ID NO: 6064016 - DNA, 25 bp, Homo sapien
agttagaaaaattggctatcttgag

SEQ ID NO: 6064017 - DNA, 25 bp, Homo sapien
gaggtccaaactgatatgaaaaaag

SEQ ID NO: 6064018 - DNA, 25 bp, Homo sapien
gcgtctccggatattttgacagtgt

SEQ ID NO: 6064019 - DNA, 25 bp, Homo sapien
tcaaaatgataagcatcatcacacg

SEQ ID NO: 6064020 - DNA, 25 bp, Homo sapien
tatagcaacgcaggacgtttacggc

SEQ ID NO: 6064021 - DNA, 25 bp, Homo sapien
gacgtttacggccacccgccagtga

SEQ ID NO: 6064022 - DNA, 25 bp, Homo sapien
tcactctcagagaacgacgactcca

SEQ ID NO: 6064023 - DNA, 25 bp, Homo sapien
agtttacatgtaagcttgattccag

SEQ ID NO: 6064024 - DNA, 25 bp, Homo sapien
tgcagagatcctaatatagcaacgc

SEQ ID NO: 6064025 - DNA, 25 bp, Homo sapien
tcgcctcgattgtctgcagccctgt

SEQ ID NO: 6064026 - DNA, 25 bp, Homo sapien
cgtcgcccggatacactgaactggt

SEQ ID NO: 6064027 - DNA, 25 bp, Homo sapien
tagacagttttacactgaatgacac

SEQ ID NO: 6064028 - DNA, 25 bp, Homo sapien
aaaccctcgaggagcgaccacatga

SEQ ID NO: 6064029 - DNA, 25 bp, Homo sapien
tctgcagccctgtagtgggccgcga

SEQ ID NO: 6064030 - DNA, 25 bp, Homo sapien
aattcatgtctggtgaaacgggacc

SEQ ID NO: 6064031 - DNA, 25 bp, Homo sapien
taggtaggttatgccagctcacacg

SEQ ID NO: 6064032 - DNA, 25 bp, Homo sapien
tgctctcagtagaggcccataggaa

SEQ ID NO: 6064033 - DNA, 25 bp, Homo sapien
tgaggcctgaggttttacatttcca

SEQ ID NO: 6064034 - DNA, 25 bp, Homo sapien
caggccagctaacgtggtatttaca

SEQ ID NO: 6064035 - DNA, 25 bp, Homo sapien
agcacctcatactcagtgaaggcct

SEQ ID NO: 6064036 - DNA, 25 bp, Homo sapien
tttgcgtatcaaaggtctagatgac

SEQ ID NO: 6064037 - DNA, 25 bp, Homo sapien
gtcactctactagggatgaaacagc

SEQ ID NO: 6064038 - DNA, 25 bp, Homo sapien
tgtattacctccatgctctcagtag

SEQ ID NO: 6064039 - DNA, 25 bp, Homo sapien
ggtaaagccaatacatctgtccagg

SEQ ID NO: 6064040 - DNA, 25 bp, Homo sapien
ggcattctgttccacagcaggccag

SEQ ID NO: 6064041 - DNA, 25 bp, Homo sapien
tgtccaggaatcacactttgcgtat

SEQ ID NO: 6064042 - DNA, 25 bp, Homo sapien
caacaagctgccaggtaaagccaat

SEQ ID NO: 6064043 - DNA, 25 bp, Homo sapien
ttcttcttcttgtcgtccttaggcg

SEQ ID NO: 6064044 - DNA, 25 bp, Homo sapien
tcttcttcttgtcgtccttaggcgg

SEQ ID NO: 6064045 - DNA, 25 bp, Homo sapien
ggggcagtaccagaccccagcgagt

SEQ ID NO: 6064046 - DNA, 25 bp, Homo sapien
aagatgatggtctcagcggtgcctt

SEQ ID NO: 6064047 - DNA, 25 bp, Homo sapien
ccttttggctctgcttcagacaggg

SEQ ID NO: 6064048 - DNA, 25 bp, Homo sapien
agagtcctcctcacggtttttcact

SEQ ID NO: 6064049 - DNA, 25 bp, Homo sapien
gggcagagaacctccactagtcctg

SEQ ID NO: 6064050 - DNA, 25 bp, Homo sapien
caggcagtttgattctccctgactg

SEQ ID NO: 6064051 - DNA, 25 bp, Homo sapien
tgaatatggcaggaccagggagaca

SEQ ID NO: 6064052 - DNA, 25 bp, Homo sapien
agtcccttggtgactcttcaggcct

SEQ ID NO: 6064053 - DNA, 25 bp, Homo sapien
taggctgaggctgaggctgagggtg

SEQ ID NO: 6064054 - DNA, 25 bp, Homo sapien
agtaccagaccccagcgagtctttc

SEQ ID NO: 6064055 - DNA, 25 bp, Homo sapien
ccaaatagagtcctcctcacggttt

SEQ ID NO: 6064056 - DNA, 25 bp, Homo sapien
ttctggccttttggctctgcttcag

SEQ ID NO: 6064057 - DNA, 25 bp, Homo sapien
ctagatctgggacaccatgtgtgca

SEQ ID NO: 6064058 - DNA, 25 bp, Homo sapien
accctatgaatatggcaggaccagg

SEQ ID NO: 6064059 - DNA, 25 bp, Homo sapien
gaccagggagacaggcagtttgatt

SEQ ID NO: 6064060 - DNA, 25 bp, Homo sapien
caaatccaggatccaaatagagtcc

SEQ ID NO: 6064061 - DNA, 25 bp, Homo sapien
gatgtgccagtcaggttagaatgga

SEQ ID NO: 6064062 - DNA, 25 bp, Homo sapien
ctagacagcaccatcctaggcctgc

SEQ ID NO: 6064063 - DNA, 25 bp, Homo sapien
atggtctcagcggtgccttccccat

SEQ ID NO: 6064064 - DNA, 25 bp, Homo sapien
acccattctggccttttggctctgc

SEQ ID NO: 6064065 - DNA, 25 bp, Homo sapien
cctgccacccgtggacccctagaca

SEQ ID NO: 6064066 - DNA, 25 bp, Homo sapien
acccgtggacccctagacagcacca

SEQ ID NO: 6064067 - DNA, 25 bp, Homo sapien
ccagtcaggttagaatggagacagg

SEQ ID NO: 6064068 - DNA, 25 bp, Homo sapien
agctctcatttccagtgcctgaggt

SEQ ID NO: 6064069 - DNA, 25 bp, Homo sapien
gggcacaaggccagcctctgaattc

SEQ ID NO: 6064070 - DNA, 25 bp, Homo sapien
tgactgccagtgtctgagattggga

SEQ ID NO: 6064071 - DNA, 25 bp, Homo sapien
caggcctgggcctcccactgagggt

SEQ ID NO: 6064072 - DNA, 25 bp, Homo sapien
tcctaggcctgcctagatctgggac

SEQ ID NO: 6064073 - DNA, 25 bp, Homo sapien
tgggcctcccactgagggttaggct

SEQ ID NO: 6064074 - DNA, 25 bp, Homo sapien
cagaccccagcgagtctttcctaaa

SEQ ID NO: 6064075 - DNA, 25 bp, Homo sapien
atggacaccctatgaatatggcagg

SEQ ID NO: 6064076 - DNA, 25 bp, Homo sapien
agaacctccactagtcctgggggca

SEQ ID NO: 6064077 - DNA, 25 bp, Homo sapien
taggggcagctgtgacaccagggta

SEQ ID NO: 6064078 - DNA, 25 bp, Homo sapien
ttcacttctcccctctcctggttag

SEQ ID NO: 6064079 - DNA, 25 bp, Homo sapien
ctgaggtgggcagagaacctccact

SEQ ID NO: 6064080 - DNA, 25 bp, Homo sapien
tgacaccagggtaggggacccattc

SEQ ID NO: 6064081 - DNA, 25 bp, Homo sapien
gcctgcctagatctgggacaccatg

SEQ ID NO: 6064082 - DNA, 25 bp, Homo sapien
gctccaagtcccttggtgactcttc

SEQ ID NO: 6064083 - DNA, 25 bp, Homo sapien
cagggtaggggacccattctggcct

SEQ ID NO: 6064084 - DNA, 25 bp, Homo sapien
tagccagggcacaaggccagcctct

SEQ ID NO: 6064085 - DNA, 25 bp, Homo sapien
ggctctgcttcagacagggcctcct

SEQ ID NO: 6064086 - DNA, 25 bp, Homo sapien
tctcccctctcctggttaggctgag

SEQ ID NO: 6064087 - DNA, 25 bp, Homo sapien
agcaccatcctaggcctgcctagat

SEQ ID NO: 6064088 - DNA, 25 bp, Homo sapien
gtcctgggggcagtaccagacccca

SEQ ID NO: 6064089 - DNA, 25 bp, Homo sapien
agcctctgaattcctgccacccgtg

SEQ ID NO: 6064090 - DNA, 25 bp, Homo sapien
ctctcctggttaggctgagatgtgc

SEQ ID NO: 6064091 - DNA, 25 bp, Homo sapien
ccccatctgccagctccaagtccct

SEQ ID NO: 6064092 - DNA, 25 bp, Homo sapien
ccagcgagtctttcctaaaagatga

SEQ ID NO: 6064093 - DNA, 25 bp, Homo sapien
caccatgtgtgcatggacaccctat

SEQ ID NO: 6064094 - DNA, 25 bp, Homo sapien
cagccctcacactaggggcagctgt

SEQ ID NO: 6064095 - DNA, 25 bp, Homo sapien
aatggagacaggtagccagggcaca

SEQ ID NO: 6064096 - DNA, 25 bp, Homo sapien
tgccttccccatctgccagctccaa

SEQ ID NO: 6064097 - DNA, 25 bp, Homo sapien
gacaggtagccagggcacaaggcca

SEQ ID NO: 6064098 - DNA, 25 bp, Homo sapien
ctgggacaccatgtgtgcatggaca

SEQ ID NO: 6064099 - DNA, 25 bp, Homo sapien
ctgccagctccaagtcccttggtga

SEQ ID NO: 6064100 - DNA, 25 bp, Homo sapien
cagtgcctgaggtgggcagagaacc

SEQ ID NO: 6064101 - DNA, 25 bp, Homo sapien
cagctgtgacaccagggtaggggac

SEQ ID NO: 6064102 - DNA, 25 bp, Homo sapien
gggagacaggcagtttgattctccc

SEQ ID NO: 6064103 - DNA, 25 bp, Homo sapien
gaggctgagggtggccgggcagctg

SEQ ID NO: 6064104 - DNA, 25 bp, Homo sapien
cagggcctcctctaactccaaccct

SEQ ID NO: 6064105 - DNA, 25 bp, Homo sapien
catttccagtgcctgaggtgggcag

SEQ ID NO: 6064106 - DNA, 25 bp, Homo sapien
tggttaggctgagatgtgccagtca

SEQ ID NO: 6064107 - DNA, 25 bp, Homo sapien
actcttcaggcctgggcctcccact

SEQ ID NO: 6064108 - DNA, 25 bp, Homo sapien
gcttcagacagggcctcctctaact

SEQ ID NO: 6064109 - DNA, 25 bp, Homo sapien
ggcaggaccagggagacaggcagtt

SEQ ID NO: 6064110 - DNA, 25 bp, Homo sapien
aaggccagcctctgaattcctgcca

SEQ ID NO: 6064111 - DNA, 25 bp, Homo sapien
gattgggagcttatgaggcagccct

SEQ ID NO: 6064112 - DNA, 25 bp, Homo sapien
tcctaaaagatgatggtctcagcgg

SEQ ID NO: 6064113 - DNA, 25 bp, Homo sapien
gtttgattctccctgactgccagtg

SEQ ID NO: 6064114 - DNA, 25 bp, Homo sapien
gaggctgaggctgagggtggccggg

SEQ ID NO: 6064115 - DNA, 25 bp, Homo sapien
cctcccagctctcatttccagtgcc

SEQ ID NO: 6064116 - DNA, 25 bp, Homo sapien
atgaggcagccctcacactaggggc

SEQ ID NO: 6064117 - DNA, 25 bp, Homo sapien
caggatccaaatagagtcctcctca

SEQ ID NO: 6064118 - DNA, 25 bp, Homo sapien
gagcttatgaggcagccctcacact

SEQ ID NO: 6064119 - DNA, 25 bp, Homo sapien
tctgagattgggagcttatgaggca

SEQ ID NO: 6064120 - DNA, 25 bp, Homo sapien
agtctttcctaaaagatgatggtct

SEQ ID NO: 6064121 - DNA, 25 bp, Homo sapien
cagcggtgccttccccatctgccag

SEQ ID NO: 6064122 - DNA, 25 bp, Homo sapien
aggttagaatggagacaggtagcca

SEQ ID NO: 6064123 - DNA, 25 bp, Homo sapien
gctgagatgtgccagtcaggttaga

SEQ ID NO: 6064124 - DNA, 25 bp, Homo sapien
ctccaacccttaccctcccagctct

SEQ ID NO: 6064125 - DNA, 25 bp, Homo sapien
gtgtgcatggacaccctatgaatat

SEQ ID NO: 6064126 - DNA, 25 bp, Homo sapien
tccactagtcctgggggcagtacca

SEQ ID NO: 6064127 - DNA, 25 bp, Homo sapien
ttctccctgactgccagtgtctgag

SEQ ID NO: 6064128 - DNA, 25 bp, Homo sapien
ccttaccctcccagctctcatttcc

SEQ ID NO: 6064129 - DNA, 25 bp, Homo sapien
gagggttaggctgaggctgaggctg

SEQ ID NO: 6064130 - DNA, 25 bp, Homo sapien
tcacactaggggcagctgtgacacc

SEQ ID NO: 6064131 - DNA, 25 bp, Homo sapien
ccagtgtctgagattgggagcttat

SEQ ID NO: 6064132 - DNA, 25 bp, Homo sapien
ttggtgactcttcaggcctgggcct

SEQ ID NO: 6064133 - DNA, 25 bp, Homo sapien
tgaattcctgccacccgtggacccc

SEQ ID NO: 6064134 - DNA, 25 bp, Homo sapien
tcccactgagggttaggctgaggct

SEQ ID NO: 6064135 - DNA, 25 bp, Homo sapien
ggacccctagacagcaccatcctag

SEQ ID NO: 6064136 - DNA, 25 bp, Homo sapien
gcccagttgaaatgggctgagcact

SEQ ID NO: 6064137 - DNA, 25 bp, Homo sapien
gggccactcggaacatgctgcagta

SEQ ID NO: 6064138 - DNA, 25 bp, Homo sapien
tggaaagagaagtagggcaaccaac

SEQ ID NO: 6064139 - DNA, 25 bp, Homo sapien
aactgcaggaagttctcctcaatgg

SEQ ID NO: 6064140 - DNA, 25 bp, Homo sapien
ccagtcccctgaaggaactgcagga

SEQ ID NO: 6064141 - DNA, 25 bp, Homo sapien
tcaatggagccctcccggctaggca

SEQ ID NO: 6064142 - DNA, 25 bp, Homo sapien
gaagcaaaagtagccaatccaggtg

SEQ ID NO: 6064143 - DNA, 25 bp, Homo sapien
tcagggcaacatagaggtggaaaga

SEQ ID NO: 6064144 - DNA, 25 bp, Homo sapien
gacatccatagaagaaagggttgga

SEQ ID NO: 6064145 - DNA, 25 bp, Homo sapien
tggtgaccatcgtggagcggctgct

SEQ ID NO: 6064146 - DNA, 25 bp, Homo sapien
gatctgccggttgagacatccatag

SEQ ID NO: 6064147 - DNA, 25 bp, Homo sapien
aaagtagccaatccaggtgaccaca

SEQ ID NO: 6064148 - DNA, 25 bp, Homo sapien
tcacttgcagcacttggccttccct

SEQ ID NO: 6064149 - DNA, 25 bp, Homo sapien
aatgatcagatctgtggccaaggcc

SEQ ID NO: 6064150 - DNA, 25 bp, Homo sapien
gtaaagatcgggcaggcagaataga

SEQ ID NO: 6064151 - DNA, 25 bp, Homo sapien
cactgctgacgcaattgtaatgatc

SEQ ID NO: 6064152 - DNA, 25 bp, Homo sapien
gaatagagacattgccctccactgc

SEQ ID NO: 6064153 - DNA, 25 bp, Homo sapien
ggccttccctctgtaacaggtgcct

SEQ ID NO: 6064154 - DNA, 25 bp, Homo sapien
taacaggtgccttgaattttggtaa

SEQ ID NO: 6064155 - DNA, 25 bp, Homo sapien
gaggccatctcagacaaaagtaagc

SEQ ID NO: 6064156 - DNA, 25 bp, Homo sapien
aagtaagcagagagtaaacagcaga

SEQ ID NO: 6064157 - DNA, 25 bp, Homo sapien
gccctccactgctgacgcaattgta

SEQ ID NO: 6064158 - DNA, 25 bp, Homo sapien
tgccttgaattttggtaaagatcgg

SEQ ID NO: 6064159 - DNA, 25 bp, Homo sapien
cagagagtaaacagcagaaggtagg

SEQ ID NO: 6064160 - DNA, 25 bp, Homo sapien
ccatcatagatattgcagatgcttc

SEQ ID NO: 6064161 - DNA, 25 bp, Homo sapien
ggtctcagggagatcacagcccaga

SEQ ID NO: 6064162 - DNA, 25 bp, Homo sapien
ctgttatccaggctgtgggtctcag

SEQ ID NO: 6064163 - DNA, 25 bp, Homo sapien
caccagggccatcagtaaagcaaag

SEQ ID NO: 6064164 - DNA, 25 bp, Homo sapien
ttatccaggctgtgggtctcaggga

SEQ ID NO: 6064165 - DNA, 25 bp, Homo sapien
acaggaggaaggagagattctgctc

SEQ ID NO: 6064166 - DNA, 25 bp, Homo sapien
gcagcagatgaatcttttgtggtaa

SEQ ID NO: 6064167 - DNA, 25 bp, Homo sapien
tcttcacagccaagatggagtccgc

SEQ ID NO: 6064168 - DNA, 25 bp, Homo sapien
aaagcaaagggcgaggccatcatag

SEQ ID NO: 6064169 - DNA, 25 bp, Homo sapien
tgtctgtccatcagacaggaggaag

SEQ ID NO: 6064170 - DNA, 25 bp, Homo sapien
gcagatgcttctgggcttgctgaga

SEQ ID NO: 6064171 - DNA, 25 bp, Homo sapien
agggcgaggccatcatagatattgc

SEQ ID NO: 6064172 - DNA, 25 bp, Homo sapien
tagccctatcgaatcaaagtattac

SEQ ID NO: 6064173 - DNA, 25 bp, Homo sapien
tgggaggttatatactttagatgag

SEQ ID NO: 6064174 - DNA, 25 bp, Homo sapien
gttgtagccctatcgaatcaaagta

SEQ ID NO: 6064175 - DNA, 25 bp, Homo sapien
ggagttgtagccctatcgaatcaaa

SEQ ID NO: 6064176 - DNA, 25 bp, Homo sapien
tttaatgcaagatgcaatgtagcca

SEQ ID NO: 6064177 - DNA, 25 bp, Homo sapien
tcggttcttaattgcactaatgcag

SEQ ID NO: 6064178 - DNA, 25 bp, Homo sapien
tatatactttagatgagagacaaag

SEQ ID NO: 6064179 - DNA, 25 bp, Homo sapien
tcttaattgcactaatgcagacagt

SEQ ID NO: 6064180 - DNA, 25 bp, Homo sapien
tgagagacaaagaaactctactggt

SEQ ID NO: 6064181 - DNA, 25 bp, Homo sapien
gctttatatagacgtatttcggttc

SEQ ID NO: 6064182 - DNA, 25 bp, Homo sapien
ggttatatactttagatgagagaca

SEQ ID NO: 6064183 - DNA, 25 bp, Homo sapien
cagctgaaagctttatatagacgta

SEQ ID NO: 6064184 - DNA, 25 bp, Homo sapien
ggttttttgccttcgctgatggtag

SEQ ID NO: 6064185 - DNA, 25 bp, Homo sapien
gaaaatgatataatgcccagaggca

SEQ ID NO: 6064186 - DNA, 25 bp, Homo sapien
gaaggccgagaggaaagcctttctg

SEQ ID NO: 6064187 - DNA, 25 bp, Homo sapien
caaatgcgagtgtaggaaaatgata

SEQ ID NO: 6064188 - DNA, 25 bp, Homo sapien
gacagtgccatagatgctcttctcc

SEQ ID NO: 6064189 - DNA, 25 bp, Homo sapien
cgctgatggtagtggtcatttgcag

SEQ ID NO: 6064190 - DNA, 25 bp, Homo sapien
ctgtcaatgtcaacggcaagctgga

SEQ ID NO: 6064191 - DNA, 25 bp, Homo sapien
gacatggttcttcaatttactccaa

SEQ ID NO: 6064192 - DNA, 25 bp, Homo sapien
gagtgaatggcatccaaccgctgct

SEQ ID NO: 6064193 - DNA, 25 bp, Homo sapien
gaagatgagtttgtactccttcagg

SEQ ID NO: 6064194 - DNA, 25 bp, Homo sapien
gaatgtcacggacacctcagagtga

SEQ ID NO: 6064195 - DNA, 25 bp, Homo sapien
caggttctttttagccttgaatgtc

SEQ ID NO: 6064196 - DNA, 25 bp, Homo sapien
tgaatgttgccctactatagagcag

SEQ ID NO: 6064197 - DNA, 25 bp, Homo sapien
aaatttgatcgatacatagagtaca

SEQ ID NO: 6064198 - DNA, 25 bp, Homo sapien
ttggaaggacactgaattgagcaca

SEQ ID NO: 6064199 - DNA, 25 bp, Homo sapien
caatgggtttctgacacatgttgga

SEQ ID NO: 6064200 - DNA, 25 bp, Homo sapien
gtttttaagcaatgaatgttgccct

SEQ ID NO: 6064201 - DNA, 25 bp, Homo sapien
gatcgatacatagagtacaagtgac

SEQ ID NO: 6064202 - DNA, 25 bp, Homo sapien
cacgcccggcccaatgggtttctga

SEQ ID NO: 6064203 - DNA, 25 bp, Homo sapien
tcatggtgttctgtgactaactttg

SEQ ID NO: 6064204 - DNA, 25 bp, Homo sapien
cggcccaatgggtttctgacacatg

SEQ ID NO: 6064205 - DNA, 25 bp, Homo sapien
gttgccctactatagagcagtatta

SEQ ID NO: 6064206 - DNA, 25 bp, Homo sapien
tgttgaattaaataccttatatgct

SEQ ID NO: 6064207 - DNA, 25 bp, Homo sapien
agtacaagtgacagcacccaaaata

SEQ ID NO: 6064208 - DNA, 25 bp, Homo sapien
ggattgctcaatctcaaccgatcaa

SEQ ID NO: 6064209 - DNA, 25 bp, Homo sapien
ttaatgacctgcatactggtcaggg

SEQ ID NO: 6064210 - DNA, 25 bp, Homo sapien
tgcacacagccctttcaattgaact

SEQ ID NO: 6064211 - DNA, 25 bp, Homo sapien
gaacctggagcggataatcatgggc

SEQ ID NO: 6064212 - DNA, 25 bp, Homo sapien
gactccctggcctgatattccttca

SEQ ID NO: 6064213 - DNA, 25 bp, Homo sapien
cttcgtgaaattatcaataggcagg

SEQ ID NO: 6064214 - DNA, 25 bp, Homo sapien
tagcatgcggtttggtttaatgacc

SEQ ID NO: 6064215 - DNA, 25 bp, Homo sapien
ttcacggtcaacagcacgaactcag

SEQ ID NO: 6064216 - DNA, 25 bp, Homo sapien
tcaagggctgtatagatgcgaggcc

SEQ ID NO: 6064217 - DNA, 25 bp, Homo sapien
caaccgatcaactgcacgttggatt

SEQ ID NO: 6064218 - DNA, 25 bp, Homo sapien
cctttaagctgccagagaacctgga

SEQ ID NO: 6064219 - DNA, 25 bp, Homo sapien
ggccgctgttttcccttgcttcgtg

SEQ ID NO: 6064220 - DNA, 25 bp, Homo sapien
tcatgacgttggagacgcacttgcg

SEQ ID NO: 6064221 - DNA, 25 bp, Homo sapien
ttccagtacacgaagagcaccacac

SEQ ID NO: 6064222 - DNA, 25 bp, Homo sapien
gagacgctattggtcttcctggagc

SEQ ID NO: 6064223 - DNA, 25 bp, Homo sapien
tagaaggcgcctacggtggagaaca

SEQ ID NO: 6064224 - DNA, 25 bp, Homo sapien
ggcagccttgtagatcttccagtac

SEQ ID NO: 6064225 - DNA, 25 bp, Homo sapien
ccacgcggaacttggcagccttgta

SEQ ID NO: 6064226 - DNA, 25 bp, Homo sapien
acgaacacgccaatgaggatgccca

SEQ ID NO: 6064227 - DNA, 25 bp, Homo sapien
acagcttcggatatgggtgagacgc

SEQ ID NO: 6064228 - DNA, 25 bp, Homo sapien
gcgtaggaaggctcgcggcttacct

SEQ ID NO: 6064229 - DNA, 25 bp, Homo sapien
ccaggtgagcgcgatcatgacgttg

SEQ ID NO: 6064230 - DNA, 25 bp, Homo sapien
gactgatgagctcggtgagaaagaa

SEQ ID NO: 6064231 - DNA, 25 bp, Homo sapien
tggcggaccgtgaacaccatctggg

SEQ ID NO: 6064232 - DNA, 25 bp, Homo sapien
gaccggtcgcccttgagattggcgc

SEQ ID NO: 6064233 - DNA, 25 bp, Homo sapien
tcggtccagcttgaggccgaagcag

SEQ ID NO: 6064234 - DNA, 25 bp, Homo sapien
ggagcagtcgcgaccggtcgccctt

SEQ ID NO: 6064235 - DNA, 25 bp, Homo sapien
ccttcttgttggctcctttgtattt

SEQ ID NO: 6064236 - DNA, 25 bp, Homo sapien
acttggtgtccacgcgcaggtcccg

SEQ ID NO: 6064237 - DNA, 25 bp, Homo sapien
cgcgacttggtgtccacgcgcaggt

SEQ ID NO: 6064238 - DNA, 25 bp, Homo sapien
gctcctttgtatttgcgcgcgttgg

SEQ ID NO: 6064239 - DNA, 25 bp, Homo sapien
tgtcgcccttcttctgaccgccgcc

SEQ ID NO: 6064240 - DNA, 25 bp, Homo sapien
tgttggctcctttgtatttgcgcgc

SEQ ID NO: 6064241 - DNA, 25 bp, Homo sapien
agtcgcgaccggtcgcccttgagat

SEQ ID NO: 6064242 - DNA, 25 bp, Homo sapien
acgctgcccgcgacttggtgtccac

SEQ ID NO: 6064243 - DNA, 25 bp, Homo sapien
gcttggcttcggagggccggaggga

SEQ ID NO: 6064244 - DNA, 25 bp, Homo sapien
ttcttcttcttgtcgtccttaggcg

SEQ ID NO: 6064245 - DNA, 25 bp, Homo sapien
tcttcttcttgtcgtccttaggcgg

SEQ ID NO: 6064246 - DNA, 25 bp, Homo sapien
ctaataaagatatatccgagagtgg

SEQ ID NO: 6064247 - DNA, 25 bp, Homo sapien
taatccctctattagtctgctgtca

SEQ ID NO: 6064248 - DNA, 25 bp, Homo sapien
aatccctctattagtctgctgtcac

SEQ ID NO: 6064249 - DNA, 25 bp, Homo sapien
aataaagatatatccgagagtgggt

SEQ ID NO: 6064250 - DNA, 25 bp, Homo sapien
taataaagatatatccgagagtggg

SEQ ID NO: 6064251 - DNA, 25 bp, Homo sapien
ttaatccctctattagtctgctgtc

SEQ ID NO: 6064252 - DNA, 25 bp, Homo sapien
tctacattcaatcagggtttaaccg

SEQ ID NO: 6064253 - DNA, 25 bp, Homo sapien
gtgtggaaggccttataatgaggat

SEQ ID NO: 6064254 - DNA, 25 bp, Homo sapien
caggtgctttgatagctgcaagaat

SEQ ID NO: 6064255 - DNA, 25 bp, Homo sapien
gaaatctttgattagcaggtgcttt

SEQ ID NO: 6064256 - DNA, 25 bp, Homo sapien
ttctctcagaatgattctgtggccc

SEQ ID NO: 6064257 - DNA, 25 bp, Homo sapien
gaaagtagtcggctttacaagatta

SEQ ID NO: 6064258 - DNA, 25 bp, Homo sapien
gaaaatgtgacttcagaatatgtgt

SEQ ID NO: 6064259 - DNA, 25 bp, Homo sapien
ggccttataatgaggattccattgt

SEQ ID NO: 6064260 - DNA, 25 bp, Homo sapien
tcagaatatgtgtggacttgtcagc

SEQ ID NO: 6064261 - DNA, 25 bp, Homo sapien
tgggagaggcaccactattattatc

SEQ ID NO: 6064262 - DNA, 25 bp, Homo sapien
ccagattggaggtctggagaaactc

SEQ ID NO: 6064263 - DNA, 25 bp, Homo sapien
cattcaatcagggtttaaccggtga

SEQ ID NO: 6064264 - DNA, 25 bp, Homo sapien
cgttaaagtgctgaacaaaatgact

SEQ ID NO: 6064265 - DNA, 25 bp, Homo sapien
ttctataagaaagcgttaaagtgct

SEQ ID NO: 6064266 - DNA, 25 bp, Homo sapien
tgagaacatcattcgcatagcaagg

SEQ ID NO: 6064267 - DNA, 25 bp, Homo sapien
gaaaatatcagtatcaaaaacacag

SEQ ID NO: 6064268 - DNA, 25 bp, Homo sapien
tcataagctttccttaggtcaattc

SEQ ID NO: 6064269 - DNA, 25 bp, Homo sapien
tacaaaatgacaaagtaagtgttga

SEQ ID NO: 6064270 - DNA, 25 bp, Homo sapien
gtcaggagactataatcatttgctc

SEQ ID NO: 6064271 - DNA, 25 bp, Homo sapien
tcaaaaacacagcttaggtgtaaaa

SEQ ID NO: 6064272 - DNA, 25 bp, Homo sapien
ttcgcatagcaaggtggcagtgttc

SEQ ID NO: 6064273 - DNA, 25 bp, Homo sapien
gttatctggttggaaaataagtcca

SEQ ID NO: 6064274 - DNA, 25 bp, Homo sapien
tacaagtagaaagcatacagtatgt

SEQ ID NO: 6064275 - DNA, 25 bp, Homo sapien
catgcaatcattctgttcctaatgg

SEQ ID NO: 6064276 - DNA, 25 bp, Homo sapien
ctcatgcgagacaaagggtaggctc

SEQ ID NO: 6064277 - DNA, 25 bp, Homo sapien
tattgcactcatgcgagacaaaggg

SEQ ID NO: 6064278 - DNA, 25 bp, Homo sapien
aaatgcctttacatagagtctgctg

SEQ ID NO: 6064279 - DNA, 25 bp, Homo sapien
tgacatcgttctgatccccgagcct

SEQ ID NO: 6064280 - DNA, 25 bp, Homo sapien
gagcctcaagcaggacctcgtccaa

SEQ ID NO: 6064281 - DNA, 25 bp, Homo sapien
tctggaactccagtggctcagcatg

SEQ ID NO: 6064282 - DNA, 25 bp, Homo sapien
agaggatccaacctccgtggctgca

SEQ ID NO: 6064283 - DNA, 25 bp, Homo sapien
aagcggaacccagcagaagcgggac

SEQ ID NO: 6064284 - DNA, 25 bp, Homo sapien
ccaccgggaatgaaatattgcactc

SEQ ID NO: 6064285 - DNA, 25 bp, Homo sapien
tccccagacaaccaccgggaatgaa

SEQ ID NO: 6064286 - DNA, 25 bp, Homo sapien
gccttcgtcacgttaaccacggtga

SEQ ID NO: 6064287 - DNA, 25 bp, Homo sapien
tttacaggaatcgtgccttcgtcac

SEQ ID NO: 6064288 - DNA, 25 bp, Homo sapien
tgagctcacgggagttcaaccagcc

SEQ ID NO: 6064289 - DNA, 25 bp, Homo sapien
caatcatgaatcaggccaggcactg

SEQ ID NO: 6064290 - DNA, 25 bp, Homo sapien
ccagcttgggcctggttcaggactg

SEQ ID NO: 6064291 - DNA, 25 bp, Homo sapien
acagtgatgtgtgcctgcggtccca

SEQ ID NO: 6064292 - DNA, 25 bp, Homo sapien
gcaacaaagtgagatacccacctcc

SEQ ID NO: 6064293 - DNA, 25 bp, Homo sapien
aggctgacgcaggagaaccgctcga

SEQ ID NO: 6064294 - DNA, 25 bp, Homo sapien
tccacaagggcagggactgagttgc

SEQ ID NO: 6064295 - DNA, 25 bp, Homo sapien
cataaggagcaatgtgctacacccc

SEQ ID NO: 6064296 - DNA, 25 bp, Homo sapien
gcctgggagacagagcaagatcctg

SEQ ID NO: 6064297 - DNA, 25 bp, Homo sapien
tgtttaatgaacatgcccctgccag

SEQ ID NO: 6064298 - DNA, 25 bp, Homo sapien
tgagttgctattccccagcttgggc

SEQ ID NO: 6064299 - DNA, 25 bp, Homo sapien
accgctcgagcccaggaattcaagg

SEQ ID NO: 6064300 - DNA, 25 bp, Homo sapien
cacaggatgtctgagtgccgatcac

SEQ ID NO: 6064301 - DNA, 25 bp, Homo sapien
tccacctgtggtcaacgagttgtag

SEQ ID NO: 6064302 - DNA, 25 bp, Homo sapien
taggctttcagagttgaccatcacc

SEQ ID NO: 6064303 - DNA, 25 bp, Homo sapien
tgtagactggaaagacacctgcttg

SEQ ID NO: 6064304 - DNA, 25 bp, Homo sapien
cccaagcaggacagggaacagagct

SEQ ID NO: 6064305 - DNA, 25 bp, Homo sapien
tctttctctggaggacccaagcagg

SEQ ID NO: 6064306 - DNA, 25 bp, Homo sapien
gaacagagcttatgaattccacctg

SEQ ID NO: 6064307 - DNA, 25 bp, Homo sapien
cccaaagtgccggaattacggagtg

SEQ ID NO: 6064308 - DNA, 25 bp, Homo sapien
gagtgagccacccttttaaatccaa

SEQ ID NO: 6064309 - DNA, 25 bp, Homo sapien
gctttgttgcccagcctagtctgaa

SEQ ID NO: 6064310 - DNA, 25 bp, Homo sapien
tagctggagctataggagcacacca

SEQ ID NO: 6064311 - DNA, 25 bp, Homo sapien
cctgcttgagaagtgaggtggacca

SEQ ID NO: 6064312 - DNA, 25 bp, Homo sapien
caggactgatgctggtgctaatgct

SEQ ID NO: 6064313 - DNA, 25 bp, Homo sapien
gaaccgccgtcattctgcactcaaa

SEQ ID NO: 6064314 - DNA, 25 bp, Homo sapien
caatcatggaggtgtgtctgagacg

SEQ ID NO: 6064315 - DNA, 25 bp, Homo sapien
gatctcaagtgttccacctgcctcg

SEQ ID NO: 6064316 - DNA, 25 bp, Homo sapien
tattatggctctgacaatagggacc

SEQ ID NO: 6064317 - DNA, 25 bp, Homo sapien
tgggcaccaagctcgatgtgaaccg

SEQ ID NO: 6064318 - DNA, 25 bp, Homo sapien
ttctctctcagtgtgaaacttgctg

SEQ ID NO: 6064319 - DNA, 25 bp, Homo sapien
tttgaagaaactgggatgtgaggca

SEQ ID NO: 6064320 - DNA, 25 bp, Homo sapien
tgactctgggactgtgggccaccag

SEQ ID NO: 6064321 - DNA, 25 bp, Homo sapien
cagttggtattacaggtgcccgcca

SEQ ID NO: 6064322 - DNA, 25 bp, Homo sapien
catgagctactgcacctggtctaaa

SEQ ID NO: 6064323 - DNA, 25 bp, Homo sapien
actgatttcacaaccagcctgaggg

SEQ ID NO: 6064324 - DNA, 25 bp, Homo sapien
ctttgaagtctaatagtcgctgccc

SEQ ID NO: 6064325 - DNA, 25 bp, Homo sapien
tctttgaagtctaatagtcgctgcc

SEQ ID NO: 6064326 - DNA, 25 bp, Homo sapien
ttcaaaaggtgctagagttttaatc

SEQ ID NO: 6064327 - DNA, 25 bp, Homo sapien
ggaagcttccaggctacaagtgaat

SEQ ID NO: 6064328 - DNA, 25 bp, Homo sapien
agggaagcttccaggctacaagtga

SEQ ID NO: 6064329 - DNA, 25 bp, Homo sapien
gagggaagcttccaggctacaagtg

SEQ ID NO: 6064330 - DNA, 25 bp, Homo sapien
gggaagcttccaggctacaagtgaa

SEQ ID NO: 6064331 - DNA, 25 bp, Homo sapien
gaagcttccaggctacaagtgaatt

SEQ ID NO: 6064332 - DNA, 25 bp, Homo sapien
cgggacaactcaaaggtcggagcag

SEQ ID NO: 6064333 - DNA, 25 bp, Homo sapien
gggagggaagcttccaggctacaag

SEQ ID NO: 6064334 - DNA, 25 bp, Homo sapien
ggagggaagcttccaggctacaagt

SEQ ID NO: 6064335 - DNA, 25 bp, Homo sapien
ttgtgcctcgtgtgcatttgatgaa

SEQ ID NO: 6064336 - DNA, 25 bp, Homo sapien
aaaaaaggccagacatcgccttcct

SEQ ID NO: 6064337 - DNA, 25 bp, Homo sapien
gttcaattgtaggaggacctgtggc

SEQ ID NO: 6064338 - DNA, 25 bp, Homo sapien
cagggcaggacttctcttcatcaca

SEQ ID NO: 6064339 - DNA, 25 bp, Homo sapien
gtccataacacctccgcagacaaat

SEQ ID NO: 6064340 - DNA, 25 bp, Homo sapien
acagcgccaccttgttcagggcagg

SEQ ID NO: 6064341 - DNA, 25 bp, Homo sapien
agtcacatgggggttaggccttcaa

SEQ ID NO: 6064342 - DNA, 25 bp, Homo sapien
cctattggacaaagtcttattccca

SEQ ID NO: 6064343 - DNA, 25 bp, Homo sapien
cgcagacaaatctgatctctgcctc

SEQ ID NO: 6064344 - DNA, 25 bp, Homo sapien
ttcatcagccccctattggacaaag

SEQ ID NO: 6064345 - DNA, 25 bp, Homo sapien
ccgggtgggtgaattctggttcaat

SEQ ID NO: 6064346 - DNA, 25 bp, Homo sapien
tgattcccatttgtgcctcgtgtgc

SEQ ID NO: 6064347 - DNA, 25 bp, Homo sapien
catctggcccatcacgtgaatggtg

SEQ ID NO: 6064348 - DNA, 25 bp, Homo sapien
cgtctgcctcagaccgtggtgtcca

SEQ ID NO: 6064349 - DNA, 25 bp, Homo sapien
gcctgtttctgttcacacacgcagc

SEQ ID NO: 6064350 - DNA, 25 bp, Homo sapien
tgagattcgcctatgccggtggctg

SEQ ID NO: 6064351 - DNA, 25 bp, Homo sapien
ctcttcagctttgggagacttggtc

SEQ ID NO: 6064352 - DNA, 25 bp, Homo sapien
gataccgtctgatggacacaggtgc

SEQ ID NO: 6064353 - DNA, 25 bp, Homo sapien
aatgcaccagtgataaatatgcagg

SEQ ID NO: 6064354 - DNA, 25 bp, Homo sapien
tgacggatgacagacctgaaccagc

SEQ ID NO: 6064355 - DNA, 25 bp, Homo sapien
ggtggcttcagactccctatcaacg

SEQ ID NO: 6064356 - DNA, 25 bp, Homo sapien
cacaggtgcgtctgtggattgccac

SEQ ID NO: 6064357 - DNA, 25 bp, Homo sapien
tccacggcgtgaacagaccacgtct

SEQ ID NO: 6064358 - DNA, 25 bp, Homo sapien
taaatatgcaggttgacggatgaca

SEQ ID NO: 6064359 - DNA, 25 bp, Homo sapien
gccttaggatctgaaacttgatgac

SEQ ID NO: 6064360 - DNA, 25 bp, Homo sapien
gaatatccataaaagggtgccttgg

SEQ ID NO: 6064361 - DNA, 25 bp, Homo sapien
gccttggcatgtgctcagtcctgaa

SEQ ID NO: 6064362 - DNA, 25 bp, Homo sapien
gaaacttgatgactgtgggatctaa

SEQ ID NO: 6064363 - DNA, 25 bp, Homo sapien
ggctcttctgacaatacttctcaaa

SEQ ID NO: 6064364 - DNA, 25 bp, Homo sapien
taggtacctacgacctgaatataaa

SEQ ID NO: 6064365 - DNA, 25 bp, Homo sapien
tttgaaactgctctaaacactcccc

SEQ ID NO: 6064366 - DNA, 25 bp, Homo sapien
tatgtgtaactagtaattaggtacc

SEQ ID NO: 6064367 - DNA, 25 bp, Homo sapien
cctttggtaacatctctcctgactg

SEQ ID NO: 6064368 - DNA, 25 bp, Homo sapien
actggcagagtacccagacacttaa

SEQ ID NO: 6064369 - DNA, 25 bp, Homo sapien
tctgcttcttttgctacaagctctg

SEQ ID NO: 6064370 - DNA, 25 bp, Homo sapien
tggtgtaagaatgcaagccttagga

SEQ ID NO: 6064371 - DNA, 25 bp, Homo sapien
ttagttgccccgctctgccttgaga

SEQ ID NO: 6064372 - DNA, 25 bp, Homo sapien
tccaggagggtactctgagctagga

SEQ ID NO: 6064373 - DNA, 25 bp, Homo sapien
agacacgtgagcactaacccaggag

SEQ ID NO: 6064374 - DNA, 25 bp, Homo sapien
aaacaaatgttggtccctatctggg

SEQ ID NO: 6064375 - DNA, 25 bp, Homo sapien
tatagacctgtggagcgaagagaag

SEQ ID NO: 6064376 - DNA, 25 bp, Homo sapien
cctatctgggacctctgaagtcact

SEQ ID NO: 6064377 - DNA, 25 bp, Homo sapien
gagagggcgcagagtgggtggttcc

SEQ ID NO: 6064378 - DNA, 25 bp, Homo sapien
tctgagctaggaatgccttcctgag

SEQ ID NO: 6064379 - DNA, 25 bp, Homo sapien
tggttccccccaggtgagcaaggtg

SEQ ID NO: 6064380 - DNA, 25 bp, Homo sapien
tactgtggcccatttatagacctgt

SEQ ID NO: 6064381 - DNA, 25 bp, Homo sapien
gcagagagacacgtgagcactaacc

SEQ ID NO: 6064382 - DNA, 25 bp, Homo sapien
aacccaggagccgggactaggctga

SEQ ID NO: 6064383 - DNA, 25 bp, Homo sapien
tgccaggcgtgccagcgtgacctgt

SEQ ID NO: 6064384 - DNA, 25 bp, Homo sapien
aaggccctctgcgatgtctccacct

SEQ ID NO: 6064385 - DNA, 25 bp, Homo sapien
ctccagtggcctgatcacttcagaa

SEQ ID NO: 6064386 - DNA, 25 bp, Homo sapien
gagtccttacagagttcctcccagc

SEQ ID NO: 6064387 - DNA, 25 bp, Homo sapien
tgcctgccaggcgtgccagcgtgac

SEQ ID NO: 6064388 - DNA, 25 bp, Homo sapien
tgcagagccgggactcctatctctc

SEQ ID NO: 6064389 - DNA, 25 bp, Homo sapien
caggccgcagcagcgtcgcctatgg

SEQ ID NO: 6064390 - DNA, 25 bp, Homo sapien
agcaggtgggtggtcttctcccctg

SEQ ID NO: 6064391 - DNA, 25 bp, Homo sapien
tagtgagtccttacagagttcctcc

SEQ ID NO: 6064392 - DNA, 25 bp, Homo sapien
gagtgcagtgctccacacggccagg

SEQ ID NO: 6064393 - DNA, 25 bp, Homo sapien
tgccctcctgaactcacttttgtga

SEQ ID NO: 6064394 - DNA, 25 bp, Homo sapien
gaaacagcttcccaggtcaaagctg

SEQ ID NO: 6064395 - DNA, 25 bp, Homo sapien
caagccttagctgggaagtcttccc

SEQ ID NO: 6064396 - DNA, 25 bp, Homo sapien
aatgaactcctacctgtgctccaag

SEQ ID NO: 6064397 - DNA, 25 bp, Homo sapien
tgcacctggccacgacttctactat

SEQ ID NO: 6064398 - DNA, 25 bp, Homo sapien
acctggcttccatctgtgattgtgc

SEQ ID NO: 6064399 - DNA, 25 bp, Homo sapien
ttgagcctggcccacatttggcatg

SEQ ID NO: 6064400 - DNA, 25 bp, Homo sapien
tggcctcccaaagcacaagctggga

SEQ ID NO: 6064401 - DNA, 25 bp, Homo sapien
gaatgaggcattagctggatcccct

SEQ ID NO: 6064402 - DNA, 25 bp, Homo sapien
actggcaccacacatggctctgagg

SEQ ID NO: 6064403 - DNA, 25 bp, Homo sapien
tgtagaatgaatgaatccctggatg

SEQ ID NO: 6064404 - DNA, 25 bp, Homo sapien
ggctctcctctctgggtcccttgag

SEQ ID NO: 6064405 - DNA, 25 bp, Homo sapien
gagactgggttttagcatgtaagcc

SEQ ID NO: 6064406 - DNA, 25 bp, Homo sapien
catgtaagccatgctggtcttgaac

SEQ ID NO: 6064407 - DNA, 25 bp, Homo sapien
gctccgtgaggttcgataaatggct

SEQ ID NO: 6064408 - DNA, 25 bp, Homo sapien
gagaagtcccaatggattccctaag

SEQ ID NO: 6064409 - DNA, 25 bp, Homo sapien
ccctggtgataaagaaaacacgatt

SEQ ID NO: 6064410 - DNA, 25 bp, Homo sapien
aatacctcgattctaaagcccacag

SEQ ID NO: 6064411 - DNA, 25 bp, Homo sapien
ggagtttacacttcaacatggactg

SEQ ID NO: 6064412 - DNA, 25 bp, Homo sapien
tcttgacaaccatacaaagtagggc

SEQ ID NO: 6064413 - DNA, 25 bp, Homo sapien
gcaactcgtagaagaagcccctggt

SEQ ID NO: 6064414 - DNA, 25 bp, Homo sapien
tacgtcctggtgagcagagacatga

SEQ ID NO: 6064415 - DNA, 25 bp, Homo sapien
ccacgttcttgaggttggcggagat

SEQ ID NO: 6064416 - DNA, 25 bp, Homo sapien
tctgctacacctagagaaagcttcc

SEQ ID NO: 6064417 - DNA, 25 bp, Homo sapien
aacatggactgaagcctccagggaa

SEQ ID NO: 6064418 - DNA, 25 bp, Homo sapien
tgagcttgggcctatcttcctcctg

SEQ ID NO: 6064419 - DNA, 25 bp, Homo sapien
ttcacgacgatgattccctgcactc

SEQ ID NO: 6064420 - DNA, 25 bp, Homo sapien
tcgatgtcacgcacggtgctccgtg

SEQ ID NO: 6064421 - DNA, 25 bp, Homo sapien
tctgcagtcgcttcagtgtctcctc

SEQ ID NO: 6064422 - DNA, 25 bp, Homo sapien
tgtgttcacgacgatgattccctgc

SEQ ID NO: 6064423 - DNA, 25 bp, Homo sapien
gggtcgatgtcacgcacggtgctcc

SEQ ID NO: 6064424 - DNA, 25 bp, Homo sapien
gctctgcagtcgcttcagtgtctcc

SEQ ID NO: 6064425 - DNA, 25 bp, Homo sapien
atgaagctgtgcatgaggctggcat

SEQ ID NO: 6064426 - DNA, 25 bp, Homo sapien
catttttcttggagcgaattcgaag

SEQ ID NO: 6064427 - DNA, 25 bp, Homo sapien
cttctgtgttcacgacgatgattcc

SEQ ID NO: 6064428 - DNA, 25 bp, Homo sapien
tcgttctgggggtcgatgtcacgca

SEQ ID NO: 6064429 - DNA, 25 bp, Homo sapien
tgtcacgcacggtgctccgtgcctt

SEQ ID NO: 6064430 - DNA, 25 bp, Homo sapien
tctgtgttcacgacgatgattccct

SEQ ID NO: 6064431 - DNA, 25 bp, Homo sapien
caaggatgcaagaatagaacctccc

SEQ ID NO: 6064432 - DNA, 25 bp, Homo sapien
gctgctgaagcatatcttatcaatg

SEQ ID NO: 6064433 - DNA, 25 bp, Homo sapien
ctttctggaggagctataacttgca

SEQ ID NO: 6064434 - DNA, 25 bp, Homo sapien
ggcatcccaataggtgaagtatttt

SEQ ID NO: 6064435 - DNA, 25 bp, Homo sapien
gaaggaattcctcaggcctgtatca

SEQ ID NO: 6064436 - DNA, 25 bp, Homo sapien
caacgtcaagttatagaagaaacac

SEQ ID NO: 6064437 - DNA, 25 bp, Homo sapien
gaaatataagctcaccaacgtcaag

SEQ ID NO: 6064438 - DNA, 25 bp, Homo sapien
tgcagcagtgatccacatgtcctgg

SEQ ID NO: 6064439 - DNA, 25 bp, Homo sapien
tcagaagcatctttggtgtactatg

SEQ ID NO: 6064440 - DNA, 25 bp, Homo sapien
tgctatatccttaactaaccgcttg

SEQ ID NO: 6064441 - DNA, 25 bp, Homo sapien
tataacttgcacagcggtgttggca

SEQ ID NO: 6064442 - DNA, 25 bp, Homo sapien
gaagaaacactatgggaaacattat

SEQ ID NO: 6064443 - DNA, 25 bp, Homo sapien
tcccggtgaaggtcctcaactgtaa

SEQ ID NO: 6064444 - DNA, 25 bp, Homo sapien
ccctgacggtgagcgtgatcgtgca

SEQ ID NO: 6064445 - DNA, 25 bp, Homo sapien
tgtcgcactggactgacgtcacagc

SEQ ID NO: 6064446 - DNA, 25 bp, Homo sapien
tcattgaccaggtgtaccgtgggca

SEQ ID NO: 6064447 - DNA, 25 bp, Homo sapien
caagtccaagagaggcagcgtgaaa

SEQ ID NO: 6064448 - DNA, 25 bp, Homo sapien
tatgcactacaatgtccgggatgga

SEQ ID NO: 6064449 - DNA, 25 bp, Homo sapien
gcggacgaagggcatcaccgagatc

SEQ ID NO: 6064450 - DNA, 25 bp, Homo sapien
gtggaagcgcgtcaacacccttatg

SEQ ID NO: 6064451 - DNA, 25 bp, Homo sapien
accgagatcctcctgcgtacagcag

SEQ ID NO: 6064452 - DNA, 25 bp, Homo sapien
gatgcggtacagaagaaggccaagt

SEQ ID NO: 6064453 - DNA, 25 bp, Homo sapien
ggatgatgtggagtacgcacccctg

SEQ ID NO: 6064454 - DNA, 25 bp, Homo sapien
acagcgcagatccttgtgtcgcact

SEQ ID NO: 6064455 - DNA, 25 bp, Homo sapien
ctctctttctttcaaaaaatagctt

SEQ ID NO: 6064456 - DNA, 25 bp, Homo sapien
actcctttcctaataatataaggag

SEQ ID NO: 6064457 - DNA, 25 bp, Homo sapien
ggctaatttaacatctagtacgtac

SEQ ID NO: 6064458 - DNA, 25 bp, Homo sapien
taagtcattaattatttatggaatg

SEQ ID NO: 6064459 - DNA, 25 bp, Homo sapien
attcagaacataacgaaacaagcta

SEQ ID NO: 6064460 - DNA, 25 bp, Homo sapien
cgcctgcggcgctaaacggcgtgct

SEQ ID NO: 6064461 - DNA, 25 bp, Homo sapien
ataactcaaatgagcagagcgaatg

SEQ ID NO: 6064462 - DNA, 25 bp, Homo sapien
tcaaaataattttaacaatccaata

SEQ ID NO: 6064463 - DNA, 25 bp, Homo sapien
taattatttatggaatgatgcatta

SEQ ID NO: 6064464 - DNA, 25 bp, Homo sapien
gagctggtccgcgggcgtgggttgt

SEQ ID NO: 6064465 - DNA, 25 bp, Homo sapien
acgaaacaagctatctctctttctt

SEQ ID NO: 6064466 - DNA, 25 bp, Homo sapien
gcgttcccagcagagctggtccgcg

SEQ ID NO: 6064467 - DNA, 25 bp, Homo sapien
gtcgagtcactagaagtcccccatc

SEQ ID NO: 6064468 - DNA, 25 bp, Homo sapien
tcatagttacaactcctttcctaat

SEQ ID NO: 6064469 - DNA, 25 bp, Homo sapien
aacataacgaaacaagctatctctc

SEQ ID NO: 6064470 - DNA, 25 bp, Homo sapien
cggcgtgctggcgcacttctagcag

SEQ ID NO: 6064471 - DNA, 25 bp, Homo sapien
ccagcagagctggtccgcgggcgtg

SEQ ID NO: 6064472 - DNA, 25 bp, Homo sapien
gggacaaggtgcctaccctacgctg

SEQ ID NO: 6064473 - DNA, 25 bp, Homo sapien
aataaacaatacattctccacaata

SEQ ID NO: 6064474 - DNA, 25 bp, Homo sapien
cggcaaaattaagtcattaattatt

SEQ ID NO: 6064475 - DNA, 25 bp, Homo sapien
ttgtaagtcaagttaatagcgcctg

SEQ ID NO: 6064476 - DNA, 25 bp, Homo sapien
ttcctaataatataaggagtgtaaa

SEQ ID NO: 6064477 - DNA, 25 bp, Homo sapien
tggtcggtcgagtcactagaagtcc

SEQ ID NO: 6064478 - DNA, 25 bp, Homo sapien
tcttacaattttattgattcagaac

SEQ ID NO: 6064479 - DNA, 25 bp, Homo sapien
ggcacccaagcccactgcgttccca

SEQ ID NO: 6064480 - DNA, 25 bp, Homo sapien
tttgaacggcaaaattaagtcatta

SEQ ID NO: 6064481 - DNA, 25 bp, Homo sapien
tttgataataaacaatacattctcc

SEQ ID NO: 6064482 - DNA, 25 bp, Homo sapien
tttatggaatgatgcattaaatcct

SEQ ID NO: 6064483 - DNA, 25 bp, Homo sapien
ctctagaaattttgaacggcaaaat

SEQ ID NO: 6064484 - DNA, 25 bp, Homo sapien
ttggcctgttttttattgtattgta

SEQ ID NO: 6064485 - DNA, 25 bp, Homo sapien
ctgttttttattgtattgtaagtca

SEQ ID NO: 6064486 - DNA, 25 bp, Homo sapien
ttttattgtattgtaagtcaagtta

SEQ ID NO: 6064487 - DNA, 25 bp, Homo sapien
taaggagtgtaaaattctctagaaa

SEQ ID NO: 6064488 - DNA, 25 bp, Homo sapien
caaatgagcagagcgaatggctaat

SEQ ID NO: 6064489 - DNA, 25 bp, Homo sapien
gtcaagttaatagcgcctgcggcgc

SEQ ID NO: 6064490 - DNA, 25 bp, Homo sapien
gctggcgcacttctagcagggacaa

SEQ ID NO: 6064491 - DNA, 25 bp, Homo sapien
ttacaactcctttcctaataatata

SEQ ID NO: 6064492 - DNA, 25 bp, Homo sapien
aaggtgcctaccctacgctggtcgc

SEQ ID NO: 6064493 - DNA, 25 bp, Homo sapien
agcagagcgaatggctaatttaaca

SEQ ID NO: 6064494 - DNA, 25 bp, Homo sapien
ctagcagggacaaggtgcctaccct

SEQ ID NO: 6064495 - DNA, 25 bp, Homo sapien
ccactgcgttcccagcagagctggt

SEQ ID NO: 6064496 - DNA, 25 bp, Homo sapien
aattctctagaaattttgaacggca

SEQ ID NO: 6064497 - DNA, 25 bp, Homo sapien
tttaacatctagtacgtacaaacaa

SEQ ID NO: 6064498 - DNA, 25 bp, Homo sapien
tgcattaaatccttttggcctgttt

SEQ ID NO: 6064499 - DNA, 25 bp, Homo sapien
tgcggcgctaaacggcgtgctggcg

SEQ ID NO: 6064500 - DNA, 25 bp, Homo sapien
caattttattgattcagaacataac

SEQ ID NO: 6064501 - DNA, 25 bp, Homo sapien
gggttgtctgcctctccctggtcgg

SEQ ID NO: 6064502 - DNA, 25 bp, Homo sapien
ctacgctggtcgcttcgggctaaac

SEQ ID NO: 6064503 - DNA, 25 bp, Homo sapien
cctaccctacgctggtcgcttcggg

SEQ ID NO: 6064504 - DNA, 25 bp, Homo sapien
ttaatagcgcctgcggcgctaaacg

SEQ ID NO: 6064505 - DNA, 25 bp, Homo sapien
ataatataaggagtgtaaaattctc

SEQ ID NO: 6064506 - DNA, 25 bp, Homo sapien
tctgcctctccctggtcggtcgagt

SEQ ID NO: 6064507 - DNA, 25 bp, Homo sapien
gcgaatggctaatttaacatctagt

SEQ ID NO: 6064508 - DNA, 25 bp, Homo sapien
ctggtcgcttcgggctaaacggcac

SEQ ID NO: 6064509 - DNA, 25 bp, Homo sapien
caataaattattttgataataaaca

SEQ ID NO: 6064510 - DNA, 25 bp, Homo sapien
gggcgtgggttgtctgcctctccct

SEQ ID NO: 6064511 - DNA, 25 bp, Homo sapien
tgtgaaataactcaaatgagcagag

SEQ ID NO: 6064512 - DNA, 25 bp, Homo sapien
gaatgatgcattaaatccttttggc

SEQ ID NO: 6064513 - DNA, 25 bp, Homo sapien
caatacattctccacaataacaacg

SEQ ID NO: 6064514 - DNA, 25 bp, Homo sapien
caaaaaatagctttctaactgtgaa

SEQ ID NO: 6064515 - DNA, 25 bp, Homo sapien
caagcccactgcgttcccagcagag

SEQ ID NO: 6064516 - DNA, 25 bp, Homo sapien
gtgtaaaattctctagaaattttga

SEQ ID NO: 6064517 - DNA, 25 bp, Homo sapien
ttattgattcagaacataacgaaac

SEQ ID NO: 6064518 - DNA, 25 bp, Homo sapien
gcttcgggctaaacggcacccaagc

SEQ ID NO: 6064519 - DNA, 25 bp, Homo sapien
gttttcttacaattttattgattca

SEQ ID NO: 6064520 - DNA, 25 bp, Homo sapien
tctccctggtcggtcgagtcactag

SEQ ID NO: 6064521 - DNA, 25 bp, Homo sapien
gtccgcgggcgtgggttgtctgcct

SEQ ID NO: 6064522 - DNA, 25 bp, Homo sapien
ctttcaaaaaatagctttctaactg

SEQ ID NO: 6064523 - DNA, 25 bp, Homo sapien
gctaaacggcgtgctggcgcacttc

SEQ ID NO: 6064524 - DNA, 25 bp, Homo sapien
ttgtattgtaagtcaagttaatagc

SEQ ID NO: 6064525 - DNA, 25 bp, Homo sapien
attctccacaataacaacgttattt

SEQ ID NO: 6064526 - DNA, 25 bp, Homo sapien
tcattaattatttatggaatgatgc

SEQ ID NO: 6064527 - DNA, 25 bp, Homo sapien
tagctttctaactgtgaaataactc

SEQ ID NO: 6064528 - DNA, 25 bp, Homo sapien
tctaactgtgaaataactcaaatga

SEQ ID NO: 6064529 - DNA, 25 bp, Homo sapien
ctaaacggcacccaagcccactgcg

SEQ ID NO: 6064530 - DNA, 25 bp, Homo sapien
cactagaagtcccccatcccaccgt

SEQ ID NO: 6064531 - DNA, 25 bp, Homo sapien
taacaatccaataaattattttgat

SEQ ID NO: 6064532 - DNA, 25 bp, Homo sapien
gcacttctagcagggacaaggtgcc

SEQ ID NO: 6064533 - DNA, 25 bp, Homo sapien
ctttgaaccaattactggttacatt

SEQ ID NO: 6064534 - DNA, 25 bp, Homo sapien
ttattatacggtgcaagaagttggc

SEQ ID NO: 6064535 - DNA, 25 bp, Homo sapien
aatcggcgcgttaacttatgacgaa

SEQ ID NO: 6064536 - DNA, 25 bp, Homo sapien
tttgatgctcgcgttaaaaacaact

SEQ ID NO: 6064537 - DNA, 25 bp, Homo sapien
aaacaaaacgaattgcgtcaagtgg

SEQ ID NO: 6064538 - DNA, 25 bp, Homo sapien
caagtgaaacaaaacgaattgcgtc

SEQ ID NO: 6064539 - DNA, 25 bp, Homo sapien
acattgtctccattgtgtttgatga

SEQ ID NO: 6064540 - DNA, 25 bp, Homo sapien
tgtggatgaacaaatcggcgcgtta

SEQ ID NO: 6064541 - DNA, 25 bp, Homo sapien
attgccgatagttattatacggtgc

SEQ ID NO: 6064542 - DNA, 25 bp, Homo sapien
acaagaagtggcacggcacttagag

SEQ ID NO: 6064543 - DNA, 25 bp, Homo sapien
gttgatgtcaggcgctgaatttgca

SEQ ID NO: 6064544 - DNA, 25 bp, Homo sapien
ttagcagcattggaccacgatgagt

SEQ ID NO: 6064545 - DNA, 25 bp, Homo sapien
tttgatattgaacaattgcaagtga

SEQ ID NO: 6064546 - DNA, 25 bp, Homo sapien
gtcgctgatgtcttgcaatttaaag

SEQ ID NO: 6064547 - DNA, 25 bp, Homo sapien
cttagagcaagctgtcaatcaacaa

SEQ ID NO: 6064548 - DNA, 25 bp, Homo sapien
gatgagtttgatattgaacaattgc

SEQ ID NO: 6064549 - DNA, 25 bp, Homo sapien
tgaattttatgtccaaaccaacgtc

SEQ ID NO: 6064550 - DNA, 25 bp, Homo sapien
ttgcaatttaaagctaaaattgatc

SEQ ID NO: 6064551 - DNA, 25 bp, Homo sapien
aacgaattgcgtcaagtggtccgca

SEQ ID NO: 6064552 - DNA, 25 bp, Homo sapien
gcattggaccacgatgagtttgata

SEQ ID NO: 6064553 - DNA, 25 bp, Homo sapien
tgatgaggcagatacaggggtttct

SEQ ID NO: 6064554 - DNA, 25 bp, Homo sapien
tgctcgcgttaaaaacaacttttgc

SEQ ID NO: 6064555 - DNA, 25 bp, Homo sapien
aaattgcgtgaggtacgacaagaag

SEQ ID NO: 6064556 - DNA, 25 bp, Homo sapien
gctaaaattgatcaagaattagcag

SEQ ID NO: 6064557 - DNA, 25 bp, Homo sapien
agtggcacggcacttagagcaagct

SEQ ID NO: 6064558 - DNA, 25 bp, Homo sapien
ccaattactggttacatttcttcgg

SEQ ID NO: 6064559 - DNA, 25 bp, Homo sapien
acgcattgaagaccgcttgcagctg

SEQ ID NO: 6064560 - DNA, 25 bp, Homo sapien
attgttacgcattgaagaccgcttg

SEQ ID NO: 6064561 - DNA, 25 bp, Homo sapien
attgaacaattgcaagtgaaacaaa

SEQ ID NO: 6064562 - DNA, 25 bp, Homo sapien
tctccattgtgtttgatgaggcaga

SEQ ID NO: 6064563 - DNA, 25 bp, Homo sapien
tttaaagctaaaattgatcaagaat

SEQ ID NO: 6064564 - DNA, 25 bp, Homo sapien
cgctgaatttgcagtgcgctttgaa

SEQ ID NO: 6064565 - DNA, 25 bp, Homo sapien
attgatcaagaattagcagcattgg

SEQ ID NO: 6064566 - DNA, 25 bp, Homo sapien
gtccgcaagcaagcggttaaattgc

SEQ ID NO: 6064567 - DNA, 25 bp, Homo sapien
actggttacatttcttcgggcgcag

SEQ ID NO: 6064568 - DNA, 25 bp, Homo sapien
tgacgaatcggaattgttacgcatt

SEQ ID NO: 6064569 - DNA, 25 bp, Homo sapien
tcaggcggtgaagcggcacgtttga

SEQ ID NO: 6064570 - DNA, 25 bp, Homo sapien
tacggtgcaagaagttggccgtgat

SEQ ID NO: 6064571 - DNA, 25 bp, Homo sapien
gacaaagttgaattttatgtccaaa

SEQ ID NO: 6064572 - DNA, 25 bp, Homo sapien
ccgtgatgtggatgaacaaatcggc

SEQ ID NO: 6064573 - DNA, 25 bp, Homo sapien
caagaattagcagcattggaccacg

SEQ ID NO: 6064574 - DNA, 25 bp, Homo sapien
gatgtcttgcaatttaaagctaaaa

SEQ ID NO: 6064575 - DNA, 25 bp, Homo sapien
agttggccgtgatgtggatgaacaa

SEQ ID NO: 6064576 - DNA, 25 bp, Homo sapien
tacatttcttcgggcgcagacaaag

SEQ ID NO: 6064577 - DNA, 25 bp, Homo sapien
ttgtgtttgatgaggcagatacagg

SEQ ID NO: 6064578 - DNA, 25 bp, Homo sapien
tcttcgggcgcagacaaagttgaat

SEQ ID NO: 6064579 - DNA, 25 bp, Homo sapien
ccaagcaacaacacattgtctccat

SEQ ID NO: 6064580 - DNA, 25 bp, Homo sapien
atttgcagtgcgctttgaaccaatt

SEQ ID NO: 6064581 - DNA, 25 bp, Homo sapien
gcaagaagttggccgtgatgtggat

SEQ ID NO: 6064582 - DNA, 25 bp, Homo sapien
gaccacgatgagtttgatattgaac

SEQ ID NO: 6064583 - DNA, 25 bp, Homo sapien
gaaaatacggcccaacagtcgctga

SEQ ID NO: 6064584 - DNA, 25 bp, Homo sapien
attaagtgaattgttgatgtcaggc

SEQ ID NO: 6064585 - DNA, 25 bp, Homo sapien
taaaaacaacttttgccaagcaaca

SEQ ID NO: 6064586 - DNA, 25 bp, Homo sapien
aaggcctagcaccattagctaaaat

SEQ ID NO: 6064587 - DNA, 25 bp, Homo sapien
ccgcttgcagctgattcacactttg

SEQ ID NO: 6064588 - DNA, 25 bp, Homo sapien
tgaattgttgatgtcaggcgctgaa

SEQ ID NO: 6064589 - DNA, 25 bp, Homo sapien
ccaacagtcgctgatgtcttgcaat

SEQ ID NO: 6064590 - DNA, 25 bp, Homo sapien
cgtgaggtacgacaagaagtggcac

SEQ ID NO: 6064591 - DNA, 25 bp, Homo sapien
ttgcgtcaagtggtccgcaagcaag

SEQ ID NO: 6064592 - DNA, 25 bp, Homo sapien
agtgcgctttgaaccaattactggt

SEQ ID NO: 6064593 - DNA, 25 bp, Homo sapien
cagatacaggggtttctggtcgcgt

SEQ ID NO: 6064594 - DNA, 25 bp, Homo sapien
gtcaggcgctgaatttgcagtgcgc

SEQ ID NO: 6064595 - DNA, 25 bp, Homo sapien
tagcaccattagctaaaattgcgtc

SEQ ID NO: 6064596 - DNA, 25 bp, Homo sapien
gattcacactttggagcgaaaatac

SEQ ID NO: 6064597 - DNA, 25 bp, Homo sapien
ggtacgacaagaagtggcacggcac

SEQ ID NO: 6064598 - DNA, 25 bp, Homo sapien
gcagctgattcacactttggagcga

SEQ ID NO: 6064599 - DNA, 25 bp, Homo sapien
ggcgcagacaaagttgaattttatg

SEQ ID NO: 6064600 - DNA, 25 bp, Homo sapien
cttttgccaagcaacaacacattgt

SEQ ID NO: 6064601 - DNA, 25 bp, Homo sapien
ggcacgtttgatgctcgcgttaaaa

SEQ ID NO: 6064602 - DNA, 25 bp, Homo sapien
tgaagaccgcttgcagctgattcac

SEQ ID NO: 6064603 - DNA, 25 bp, Homo sapien
tgaacaaatcggcgcgttaacttat

SEQ ID NO: 6064604 - DNA, 25 bp, Homo sapien
tacaggggtttctggtcgcgtggcg

SEQ ID NO: 6064605 - DNA, 25 bp, Homo sapien
cactttggagcgaaaatacggccca

SEQ ID NO: 6064606 - DNA, 25 bp, Homo sapien
cggttaaattgcgtgaggtacgaca

SEQ ID NO: 6064607 - DNA, 25 bp, Homo sapien
caattgcaagtgaaacaaaacgaat

SEQ ID NO: 6064608 - DNA, 25 bp, Homo sapien
aacaacacattgtctccattgtgtt

SEQ ID NO: 6064609 - DNA, 25 bp, Homo sapien
ttgcgtcaggcggtgaagcggcacg

SEQ ID NO: 6064610 - DNA, 25 bp, Homo sapien
cgcgttaacttatgacgaatcggaa

SEQ ID NO: 6064611 - DNA, 25 bp, Homo sapien
aacttatgacgaatcggaattgtta

SEQ ID NO: 6064612 - DNA, 25 bp, Homo sapien
aacaacttttgccaagcaacaacac

SEQ ID NO: 6064613 - DNA, 25 bp, Homo sapien
tggagcgaaaatacggcccaacagt

SEQ ID NO: 6064614 - DNA, 25 bp, Homo sapien
caacaattaagtgaattgttgatgt

SEQ ID NO: 6064615 - DNA, 25 bp, Homo sapien
agcaagcggttaaattgcgtgaggt

SEQ ID NO: 6064616 - DNA, 25 bp, Homo sapien
tacggcccaacagtcgctgatgtct

SEQ ID NO: 6064617 - DNA, 25 bp, Homo sapien
cgatagttattatacggtgcaagaa

SEQ ID NO: 6064618 - DNA, 25 bp, Homo sapien
atcggaattgttacgcattgaagac

SEQ ID NO: 6064619 - DNA, 25 bp, Homo sapien
ctaaaattgcgtcaggcggtgaagc

SEQ ID NO: 6064620 - DNA, 25 bp, Homo sapien
tgaagcggcacgtttgatgctcgcg

SEQ ID NO: 6064621 - DNA, 25 bp, Homo sapien
tgtcaatcaacaattaagtgaattg

SEQ ID NO: 6064622 - DNA, 25 bp, Homo sapien
gcaagctgtcaatcaacaattaagt

SEQ ID NO: 6064623 - DNA, 25 bp, Homo sapien
caagtggtccgcaagcaagcggtta

SEQ ID NO: 6064624 - DNA, 25 bp, Homo sapien
tcggggaaggcctagcaccattagc

SEQ ID NO: 6064625 - DNA, 25 bp, Homo sapien
acggcacttagagcaagctgtcaat

SEQ ID NO: 6064626 - DNA, 25 bp, Homo sapien
cattagctaaaattgcgtcaggcgg

SEQ ID NO: 6064627 - DNA, 25 bp, Homo sapien
caacgtcggggaaggcctagcacca

SEQ ID NO: 6064628 - DNA, 25 bp, Homo sapien
cgtttaatccaattttgtgaagctc

SEQ ID NO: 6064629 - DNA, 25 bp, Homo sapien
tttaaaactcaaaggcacgttgtga

SEQ ID NO: 6064630 - DNA, 25 bp, Homo sapien
gcgcctgcctcggttttctaattca

SEQ ID NO: 6064631 - DNA, 25 bp, Homo sapien
attccggtgcgtccccagaccactt

SEQ ID NO: 6064632 - DNA, 25 bp, Homo sapien
gcccgatattcccaatgtgcaacgt

SEQ ID NO: 6064633 - DNA, 25 bp, Homo sapien
aaataccgtgttgccgatgttgctg

SEQ ID NO: 6064634 - DNA, 25 bp, Homo sapien
cttgccaatactcataagctaattt

SEQ ID NO: 6064635 - DNA, 25 bp, Homo sapien
ccaactcttgccaatactcataagc

SEQ ID NO: 6064636 - DNA, 25 bp, Homo sapien
agccgctaccgacttttcaacgtct

SEQ ID NO: 6064637 - DNA, 25 bp, Homo sapien
cgttatgagaccagccgctaccgac

SEQ ID NO: 6064638 - DNA, 25 bp, Homo sapien
taaatgcgtttaatccaattttgtg

SEQ ID NO: 6064639 - DNA, 25 bp, Homo sapien
ctactttgcttcaaagtattccagt

SEQ ID NO: 6064640 - DNA, 25 bp, Homo sapien
ttttctaattcattgataatctctg

SEQ ID NO: 6064641 - DNA, 25 bp, Homo sapien
caaagtattccagtcctccagactt

SEQ ID NO: 6064642 - DNA, 25 bp, Homo sapien
gtcaaatccctcaatgagcgcccga

SEQ ID NO: 6064643 - DNA, 25 bp, Homo sapien
tctctgccgtcactcgcacgccgtt

SEQ ID NO: 6064644 - DNA, 25 bp, Homo sapien
cgtgttgccgatgttgctgatcttg

SEQ ID NO: 6064645 - DNA, 25 bp, Homo sapien
tagcacgtcaaatccctcaatgagc

SEQ ID NO: 6064646 - DNA, 25 bp, Homo sapien
gtgggccaactcaaccggtcttgag

SEQ ID NO: 6064647 - DNA, 25 bp, Homo sapien
gtcacgccccatgccgactgcgtgt

SEQ ID NO: 6064648 - DNA, 25 bp, Homo sapien
taaaccactgcttgacgtattccgg

SEQ ID NO: 6064649 - DNA, 25 bp, Homo sapien
taccgacttttcaacgtctcgcagt

SEQ ID NO: 6064650 - DNA, 25 bp, Homo sapien
gttgtgatcggctacgaagtccaac

SEQ ID NO: 6064651 - DNA, 25 bp, Homo sapien
tcgccgtgggccaactcaaccggtc

SEQ ID NO: 6064652 - DNA, 25 bp, Homo sapien
ctcgcagtgaaattgtgtccaactc

SEQ ID NO: 6064653 - DNA, 25 bp, Homo sapien
ccatgtgatgcgtgtggcttaggct

SEQ ID NO: 6064654 - DNA, 25 bp, Homo sapien
atactaaatccatagttactctcca

SEQ ID NO: 6064655 - DNA, 25 bp, Homo sapien
cccatgccgactgcgtgttcgccgt

SEQ ID NO: 6064656 - DNA, 25 bp, Homo sapien
tagttactctccatttccaccaaag

SEQ ID NO: 6064657 - DNA, 25 bp, Homo sapien
gatgcgtgtggcttaggctaaatac

SEQ ID NO: 6064658 - DNA, 25 bp, Homo sapien
atccaattttgtgaagctccatgtg

SEQ ID NO: 6064659 - DNA, 25 bp, Homo sapien
gtccaacatgaacgttatgagacca

SEQ ID NO: 6064660 - DNA, 25 bp, Homo sapien
attccagtcctccagacttaaaaga

SEQ ID NO: 6064661 - DNA, 25 bp, Homo sapien
atggcgtagataaaccgcctttgct

SEQ ID NO: 6064662 - DNA, 25 bp, Homo sapien
aatactcataagctaatttaaacca

SEQ ID NO: 6064663 - DNA, 25 bp, Homo sapien
ttgcgatgtcgttaaacatggcgta

SEQ ID NO: 6064664 - DNA, 25 bp, Homo sapien
ttaggctaaataccgtgttgccgat

SEQ ID NO: 6064665 - DNA, 25 bp, Homo sapien
tgctttaaatgcgtttaatccaatt

SEQ ID NO: 6064666 - DNA, 25 bp, Homo sapien
tattcccaatgtgcaacgtcttcag

SEQ ID NO: 6064667 - DNA, 25 bp, Homo sapien
ctctccatttccaccaaagcgcctg

SEQ ID NO: 6064668 - DNA, 25 bp, Homo sapien
ggttctaatgcgtctagtggtttaa

SEQ ID NO: 6064669 - DNA, 25 bp, Homo sapien
aattcattgataatctctgccgtca

SEQ ID NO: 6064670 - DNA, 25 bp, Homo sapien
tcttcaggttctaatgcgtctagtg

SEQ ID NO: 6064671 - DNA, 25 bp, Homo sapien
aatccatagttactctccatttcca

SEQ ID NO: 6064672 - DNA, 25 bp, Homo sapien
gccatctagcacgtcaaatccctca

SEQ ID NO: 6064673 - DNA, 25 bp, Homo sapien
gatactttgctttaaatgcgtttaa

SEQ ID NO: 6064674 - DNA, 25 bp, Homo sapien
actcaaaggcacgttgtgatcggct

SEQ ID NO: 6064675 - DNA, 25 bp, Homo sapien
cagacttaaaagatactaaatccat

SEQ ID NO: 6064676 - DNA, 25 bp, Homo sapien
ctaatttaaaccactgcttgacgta

SEQ ID NO: 6064677 - DNA, 25 bp, Homo sapien
ctcgcacgccgttaatgtgatactt

SEQ ID NO: 6064678 - DNA, 25 bp, Homo sapien
actgcttgacgtattccggtgcgtc

SEQ ID NO: 6064679 - DNA, 25 bp, Homo sapien
tgtcgttaaacatggcgtagataaa

SEQ ID NO: 6064680 - DNA, 25 bp, Homo sapien
accaaagcgcctgcctcggttttct

SEQ ID NO: 6064681 - DNA, 25 bp, Homo sapien
ttaaacatggcgtagataaaccgcc

SEQ ID NO: 6064682 - DNA, 25 bp, Homo sapien
atttccaccaaagcgcctgcctcgg

SEQ ID NO: 6064683 - DNA, 25 bp, Homo sapien
catgaacgttatgagaccagccgct

SEQ ID NO: 6064684 - DNA, 25 bp, Homo sapien
tacgaagtccaacatgaacgttatg

SEQ ID NO: 6064685 - DNA, 25 bp, Homo sapien
cccagaccactttgcgatgtcgtta

SEQ ID NO: 6064686 - DNA, 25 bp, Homo sapien
caacgtctcgcagtgaaattgtgtc

SEQ ID NO: 6064687 - DNA, 25 bp, Homo sapien
aaccggtcttgagccatctagcacg

SEQ ID NO: 6064688 - DNA, 25 bp, Homo sapien
ccgtcactcgcacgccgttaatgtg

SEQ ID NO: 6064689 - DNA, 25 bp, Homo sapien
gttgctgatcttgtcacggtcacgc

SEQ ID NO: 6064690 - DNA, 25 bp, Homo sapien
cataagctaatttaaaccactgctt

SEQ ID NO: 6064691 - DNA, 25 bp, Homo sapien
caatgtgcaacgtcttcaggttcta

SEQ ID NO: 6064692 - DNA, 25 bp, Homo sapien
gaagctccatgtgatgcgtgtggct

SEQ ID NO: 6064693 - DNA, 25 bp, Homo sapien
tctagtggtttaaaactcaaaggca

SEQ ID NO: 6064694 - DNA, 25 bp, Homo sapien
tgcgtccccagaccactttgcgatg

SEQ ID NO: 6064695 - DNA, 25 bp, Homo sapien
tgtggcttaggctaaataccgtgtt

SEQ ID NO: 6064696 - DNA, 25 bp, Homo sapien
atccctcaatgagcgcccgatattc

SEQ ID NO: 6064697 - DNA, 25 bp, Homo sapien
gtgaaattgtgtccaactcttgcca

SEQ ID NO: 6064698 - DNA, 25 bp, Homo sapien
gcgtgttcgccgtgggccaactcaa

SEQ ID NO: 6064699 - DNA, 25 bp, Homo sapien
acttttcaacgtctcgcagtgaaat

SEQ ID NO: 6064700 - DNA, 25 bp, Homo sapien
gccgatgttgctgatcttgtcacgg

SEQ ID NO: 6064701 - DNA, 25 bp, Homo sapien
ccgactgcgtgttcgccgtgggcca

SEQ ID NO: 6064702 - DNA, 25 bp, Homo sapien
ttgtgtccaactcttgccaatactc

SEQ ID NO: 6064703 - DNA, 25 bp, Homo sapien
accactttgcgatgtcgttaaacat

SEQ ID NO: 6064704 - DNA, 25 bp, Homo sapien
tagataaaccgcctttgcttagcac

SEQ ID NO: 6064705 - DNA, 25 bp, Homo sapien
ttgcttcaaagtattccagtcctcc

SEQ ID NO: 6064706 - DNA, 25 bp, Homo sapien
cgccgttaatgtgatactttgcttt

SEQ ID NO: 6064707 - DNA, 25 bp, Homo sapien
tcttgagccatctagcacgtcaaat

SEQ ID NO: 6064708 - DNA, 25 bp, Homo sapien
gagaccagccgctaccgacttttca

SEQ ID NO: 6064709 - DNA, 25 bp, Homo sapien
cctcggttttctaattcattgataa

SEQ ID NO: 6064710 - DNA, 25 bp, Homo sapien
aatgcgtctagtggtttaaaactca

SEQ ID NO: 6064711 - DNA, 25 bp, Homo sapien
gatcttgtcacggtcacgccccatg

SEQ ID NO: 6064712 - DNA, 25 bp, Homo sapien
atgagcgcccgatattcccaatgtg

SEQ ID NO: 6064713 - DNA, 25 bp, Homo sapien
gtcctccagacttaaaagatactaa

SEQ ID NO: 6064714 - DNA, 25 bp, Homo sapien
caactcaaccggtcttgagccatct

SEQ ID NO: 6064715 - DNA, 25 bp, Homo sapien
ttgataatctctgccgtcactcgca

SEQ ID NO: 6064716 - DNA, 25 bp, Homo sapien
aggcacgttgtgatcggctacgaag

SEQ ID NO: 6064717 - DNA, 25 bp, Homo sapien
tgacgtattccggtgcgtccccaga

SEQ ID NO: 6064718 - DNA, 25 bp, Homo sapien
atcggctacgaagtccaacatgaac

SEQ ID NO: 6064719 - DNA, 25 bp, Homo sapien
taatgtgatactttgctttaaatgc

SEQ ID NO: 6064720 - DNA, 25 bp, Homo sapien
gcaacgtcttcaggttctaatgcgt

SEQ ID NO: 6064721 - DNA, 25 bp, Homo sapien
taaaagatactaaatccatagttac

SEQ ID NO: 6064722 - DNA, 25 bp, Homo sapien
ttttgtgaagctccatgtgatgcgt

SEQ ID NO: 6064723 - DNA, 25 bp, Homo sapien
gtcctggattcaccctggacgtggg

SEQ ID NO: 6064724 - DNA, 25 bp, Homo sapien
tgggctcctgccacaggtcctttgc

SEQ ID NO: 6064725 - DNA, 25 bp, Homo sapien
ggatcttaataagcccgaaggccat

SEQ ID NO: 6064726 - DNA, 25 bp, Homo sapien
ggtcctttgcacgtgctgtccccat

SEQ ID NO: 6064727 - DNA, 25 bp, Homo sapien
gccttcccaagtagctggcattaca

SEQ ID NO: 6064728 - DNA, 25 bp, Homo sapien
ggaagtgtctctcaccaagtccctg

SEQ ID NO: 6064729 - DNA, 25 bp, Homo sapien
gctctgtctcctgacagctcctggg

SEQ ID NO: 6064730 - DNA, 25 bp, Homo sapien
ggtcccgctgatctcgaattcccaa

SEQ ID NO: 6064731 - DNA, 25 bp, Homo sapien
tctgacagatgagctgcccgagggt

SEQ ID NO: 6064732 - DNA, 25 bp, Homo sapien
gtatgtgccaccacgcccagttaat

SEQ ID NO: 6064733 - DNA, 25 bp, Homo sapien
cacagagtctccatctgacagatga

SEQ ID NO: 6064734 - DNA, 25 bp, Homo sapien
gtgcccggccccattaggatcttaa

SEQ ID NO: 6064735 - DNA, 25 bp, Homo sapien
ggatccacagaaatgccgatggtcc

SEQ ID NO: 6064736 - DNA, 25 bp, Homo sapien
gatccacagaaatgccgatggtccg

SEQ ID NO: 6064737 - DNA, 25 bp, Homo sapien
atccacagaaatgccgatggtccgg

SEQ ID NO: 6064738 - DNA, 25 bp, Homo sapien
cggatccacagaaatgccgatggtc

SEQ ID NO: 6064739 - DNA, 25 bp, Homo sapien
ctcggatccacagaaatgccgatgg

SEQ ID NO: 6064740 - DNA, 25 bp, Homo sapien
acagaaatgccgatggtccgggcca

SEQ ID NO: 6064741 - DNA, 25 bp, Homo sapien
aaatgccgatggtccgggccacctt

SEQ ID NO: 6064742 - DNA, 25 bp, Homo sapien
cacagaaatgccgatggtccgggcc

SEQ ID NO: 6064743 - DNA, 25 bp, Homo sapien
ccggcgcgcaccttcgtgtggtacc

SEQ ID NO: 6064744 - DNA, 25 bp, Homo sapien
cctcggatccacagaaatgccgatg

SEQ ID NO: 6064745 - DNA, 25 bp, Homo sapien
agaaatgccgatggtccgggccacc

SEQ ID NO: 6064746 - DNA, 25 bp, Homo sapien
tcggatccacagaaatgccgatggt

SEQ ID NO: 6064747 - DNA, 25 bp, Homo sapien
tggagagctgctggttaaacttttg

SEQ ID NO: 6064748 - DNA, 25 bp, Homo sapien
taaacttttgttagcacaccactgg

SEQ ID NO: 6064749 - DNA, 25 bp, Homo sapien
cctgcagctaagtgccaaatgccat

SEQ ID NO: 6064750 - DNA, 25 bp, Homo sapien
tctgaaggatcagatctggccccat

SEQ ID NO: 6064751 - DNA, 25 bp, Homo sapien
caaaaaagctgaatggcaagccgac

SEQ ID NO: 6064752 - DNA, 25 bp, Homo sapien
ttgttagcacaccactggccagagg

SEQ ID NO: 6064753 - DNA, 25 bp, Homo sapien
aataagctactagccccaggccaga

SEQ ID NO: 6064754 - DNA, 25 bp, Homo sapien
catagtttgtttgacccacatgata

SEQ ID NO: 6064755 - DNA, 25 bp, Homo sapien
ggagctgagccactgtagagcttca

SEQ ID NO: 6064756 - DNA, 25 bp, Homo sapien
tggccagaggcaataagctactagc

SEQ ID NO: 6064757 - DNA, 25 bp, Homo sapien
catggcaacactcagttggagctga

SEQ ID NO: 6064758 - DNA, 25 bp, Homo sapien
gccccaggccagatggctaccatta

SEQ ID NO: 6064759 - DNA, 25 bp, Homo sapien
ccctgctcagcaatcccaggttggg

SEQ ID NO: 6064760 - DNA, 25 bp, Homo sapien
gtcctacccgtcacaaccaccactg

SEQ ID NO: 6064761 - DNA, 25 bp, Homo sapien
tgtaccttagagcaacatgcaaagc

SEQ ID NO: 6064762 - DNA, 25 bp, Homo sapien
ccctgtcttcctatcgtcctacccg

SEQ ID NO: 6064763 - DNA, 25 bp, Homo sapien
tctttaaaaatgtaccttagagcaa

SEQ ID NO: 6064764 - DNA, 25 bp, Homo sapien
tgtcttcctatcgtcctacccgtca

SEQ ID NO: 6064765 - DNA, 25 bp, Homo sapien
catgcaaagcttccctgctcagcaa

SEQ ID NO: 6064766 - DNA, 25 bp, Homo sapien
tctcataacatttggctgcttgcag

SEQ ID NO: 6064767 - DNA, 25 bp, Homo sapien
caaccaccactgcaggcttctgatg

SEQ ID NO: 6064768 - DNA, 25 bp, Homo sapien
cctctgtctcagttcagttgctctg

SEQ ID NO: 6064769 - DNA, 25 bp, Homo sapien
gatgctctgttttcctcctctgtct

SEQ ID NO: 6064770 - DNA, 25 bp, Homo sapien
cactgcaggcttctgatgctctgtt

SEQ ID NO: 6064771 - DNA, 25 bp, Homo sapien
tcttcttcttgtcgtccttaggcgg

SEQ ID NO: 6064772 - DNA, 25 bp, Homo sapien
ttcttcttcttgtcgtccttaggcg

SEQ ID NO: 6064773 - DNA, 25 bp, Homo sapien
attaggtacatagggccaaccagcc

SEQ ID NO: 6064774 - DNA, 25 bp, Homo sapien
tagacagtggtcttgtactctgctg

SEQ ID NO: 6064775 - DNA, 25 bp, Homo sapien
gctgaaccctgtgatgaactgtagt

SEQ ID NO: 6064776 - DNA, 25 bp, Homo sapien
caccctgtacattccagcaagtgca

SEQ ID NO: 6064777 - DNA, 25 bp, Homo sapien
ggccctgacagaacgatatttagtt

SEQ ID NO: 6064778 - DNA, 25 bp, Homo sapien
tccagcaagtgcaagagcagcaact

SEQ ID NO: 6064779 - DNA, 25 bp, Homo sapien
agtggtcttgtactctgctgaaccc

SEQ ID NO: 6064780 - DNA, 25 bp, Homo sapien
tttttcagattaggtacatagggcc

SEQ ID NO: 6064781 - DNA, 25 bp, Homo sapien
cagcaactttcctatttcaatacaa

SEQ ID NO: 6064782 - DNA, 25 bp, Homo sapien
ctgtacattccagcaagtgcaagag

SEQ ID NO: 6064783 - DNA, 25 bp, Homo sapien
tagaggcccttccataaagttaaga

SEQ ID NO: 6064784 - DNA, 25 bp, Homo sapien
gaagtcaaaattagacagtggtctt

SEQ ID NO: 6064785 - DNA, 25 bp, Homo sapien
agttattatagaaagggcagtagca

SEQ ID NO: 6064786 - DNA, 25 bp, Homo sapien
ttattatagaaagggcagtagcaga

SEQ ID NO: 6064787 - DNA, 25 bp, Homo sapien
ctctaaaaatagtcatgctgagagc

SEQ ID NO: 6064788 - DNA, 25 bp, Homo sapien
gggtctctaaaaatagtcatgctga

SEQ ID NO: 6064789 - DNA, 25 bp, Homo sapien
aaacgtctcggggtcagtgactgcc

SEQ ID NO: 6064790 - DNA, 25 bp, Homo sapien
ccagggcagctaactttagttatta

SEQ ID NO: 6064791 - DNA, 25 bp, Homo sapien
agtccagggcagctaactttagtta

SEQ ID NO: 6064792 - DNA, 25 bp, Homo sapien
tagtccagggcagctaactttagtt

SEQ ID NO: 6064793 - DNA, 25 bp, Homo sapien
tgcaggatgcaaacgtctcggggtc

SEQ ID NO: 6064794 - DNA, 25 bp, Homo sapien
ggtctctaaaaatagtcatgctgag

SEQ ID NO: 6064795 - DNA, 25 bp, Homo sapien
gttattatagaaagggcagtagcag

SEQ ID NO: 6064796 - DNA, 25 bp, Homo sapien
aatagtccagggcagctaactttag

SEQ ID NO: 6064797 - DNA, 25 bp, Homo sapien
caggctgccgggctgctagatatcc

SEQ ID NO: 6064798 - DNA, 25 bp, Homo sapien
catcctaggcatatgcaggtggaca

SEQ ID NO: 6064799 - DNA, 25 bp, Homo sapien
catggagtgcctacatgtcacactc

SEQ ID NO: 6064800 - DNA, 25 bp, Homo sapien
tgcacttttgatagacaccgtccag

SEQ ID NO: 6064801 - DNA, 25 bp, Homo sapien
ccattgtttaagctggccataatgt

SEQ ID NO: 6064802 - DNA, 25 bp, Homo sapien
gtacacaggtacaattcttaggagt

SEQ ID NO: 6064803 - DNA, 25 bp, Homo sapien
gtacacaagtaccttgtacacaggt

SEQ ID NO: 6064804 - DNA, 25 bp, Homo sapien
tgtacattgaaaagtcattcccacc

SEQ ID NO: 6064805 - DNA, 25 bp, Homo sapien
ccaaacattaggataccatgggctt

SEQ ID NO: 6064806 - DNA, 25 bp, Homo sapien
ttcccagaggcaattcaggctgccg

SEQ ID NO: 6064807 - DNA, 25 bp, Homo sapien
ccctgtattggtggcactctccaac

SEQ ID NO: 6064808 - DNA, 25 bp, Homo sapien
cacgtgtatacgtctgtgtgaaaac

SEQ ID NO: 6064809 - DNA, 25 bp, Homo sapien
tcctgcagggcgcactcgcagtgca

SEQ ID NO: 6064810 - DNA, 25 bp, Homo sapien
agtacacgacgtaggcgatcaccat

SEQ ID NO: 6064811 - DNA, 25 bp, Homo sapien
aggcgatctcgtccacagagtcggg

SEQ ID NO: 6064812 - DNA, 25 bp, Homo sapien
gacaggcgtatcttggcgctgagtt

SEQ ID NO: 6064813 - DNA, 25 bp, Homo sapien
ggcgcacatagtacacgacgtaggc

SEQ ID NO: 6064814 - DNA, 25 bp, Homo sapien
tgggagatcttgttggcatcgagct

SEQ ID NO: 6064815 - DNA, 25 bp, Homo sapien
ttgttggcatcgagcttcaggagca

SEQ ID NO: 6064816 - DNA, 25 bp, Homo sapien
gctgagtttgcccagggcgtccttg

SEQ ID NO: 6064817 - DNA, 25 bp, Homo sapien
gatggcgttgtgagacagatccagc

SEQ ID NO: 6064818 - DNA, 25 bp, Homo sapien
cctctggatgcggttgtaagacagg

SEQ ID NO: 6064819 - DNA, 25 bp, Homo sapien
gctgggcagagacttcaggtactcc

SEQ ID NO: 6064820 - DNA, 25 bp, Homo sapien
tcaccatggcgaaccagccgaacat

SEQ ID NO: 6064821 - DNA, 25 bp, Homo sapien
ctcctgtagcgaaccactagtatgg

SEQ ID NO: 6064822 - DNA, 25 bp, Homo sapien
tagcgaaccactagtatggtcgagg

SEQ ID NO: 6064823 - DNA, 25 bp, Homo sapien
aaccactagtatggtcgaggactca

SEQ ID NO: 6064824 - DNA, 25 bp, Homo sapien
tagtatggtcgaggactcagatgtt

SEQ ID NO: 6064825 - DNA, 25 bp, Homo sapien
ccactagtatggtcgaggactcaga

SEQ ID NO: 6064826 - DNA, 25 bp, Homo sapien
gtatggtcgaggactcagatgtttt

SEQ ID NO: 6064827 - DNA, 25 bp, Homo sapien
tgtagcgaaccactagtatggtcga

SEQ ID NO: 6064828 - DNA, 25 bp, Homo sapien
gcgaaccactagtatggtcgaggac

SEQ ID NO: 6064829 - DNA, 25 bp, Homo sapien
cctgtagcgaaccactagtatggtc

SEQ ID NO: 6064830 - DNA, 25 bp, Homo sapien
cactagtatggtcgaggactcagat

SEQ ID NO: 6064831 - DNA, 25 bp, Homo sapien
tcctcctgtagcgaaccactagtat

SEQ ID NO: 6064832 - DNA, 25 bp, Homo sapien
gaaccactagtatggtcgaggactc

SEQ ID NO: 6064833 - DNA, 25 bp, Homo sapien
gtggccacacgatagcccacagtgc

SEQ ID NO: 6064834 - DNA, 25 bp, Homo sapien
gcggcgtcctcgcagtcatgaaaag

SEQ ID NO: 6064835 - DNA, 25 bp, Homo sapien
agcccaggatcgctagtccccaaag

SEQ ID NO: 6064836 - DNA, 25 bp, Homo sapien
agccggcggacaccagcaagtaggc

SEQ ID NO: 6064837 - DNA, 25 bp, Homo sapien
aggtggagcccaggatcgctagtcc

SEQ ID NO: 6064838 - DNA, 25 bp, Homo sapien
tcgcagtcatgaaaagtggccacac

SEQ ID NO: 6064839 - DNA, 25 bp, Homo sapien
gcgtcctcgcagtcatgaaaagtgg

SEQ ID NO: 6064840 - DNA, 25 bp, Homo sapien
gaggaagggctgtccgcacaggaat

SEQ ID NO: 6064841 - DNA, 25 bp, Homo sapien
ctgcgggctaagtcggctcgggcct

SEQ ID NO: 6064842 - DNA, 25 bp, Homo sapien
tctggctctgcagctcgcgtgcggc

SEQ ID NO: 6064843 - DNA, 25 bp, Homo sapien
tgaaaagtggccacacgatagccca

SEQ ID NO: 6064844 - DNA, 25 bp, Homo sapien
cccagggcatagcagccggcggaca

SEQ ID NO: 6064845 - DNA, 25 bp, Homo sapien
tccagctaggcatgggagggaacaa

SEQ ID NO: 6064846 - DNA, 25 bp, Homo sapien
catgggagggaacaaggaaaacatg

SEQ ID NO: 6064847 - DNA, 25 bp, Homo sapien
caagtcaaacttattcgagttgtcc

SEQ ID NO: 6064848 - DNA, 25 bp, Homo sapien
tgcagcgagagcacaaagattctag

SEQ ID NO: 6064849 - DNA, 25 bp, Homo sapien
attctaggatactgcgagcaaatgg

SEQ ID NO: 6064850 - DNA, 25 bp, Homo sapien
cacaaagattctaggatactgcgag

SEQ ID NO: 6064851 - DNA, 25 bp, Homo sapien
cagaaggaatgatctggtggttaag

SEQ ID NO: 6064852 - DNA, 25 bp, Homo sapien
gaaggaatgatctggtggttaagat

SEQ ID NO: 6064853 - DNA, 25 bp, Homo sapien
tttcactttgccaaacaccacatgc

SEQ ID NO: 6064854 - DNA, 25 bp, Homo sapien
ttctaggatactgcgagcaaatggg

SEQ ID NO: 6064855 - DNA, 25 bp, Homo sapien
atccagctaggcatgggagggaaca

SEQ ID NO: 6064856 - DNA, 25 bp, Homo sapien
ctgcaatccagctaggcatgggagg

SEQ ID NO: 6064857 - DNA, 25 bp, Homo sapien
gatttcagtcatgcctggaaaggag

SEQ ID NO: 6064858 - DNA, 25 bp, Homo sapien
taggtgcaccagtaagaggaataca

SEQ ID NO: 6064859 - DNA, 25 bp, Homo sapien
acatcctatggtgtgaggcatggtg

SEQ ID NO: 6064860 - DNA, 25 bp, Homo sapien
cataaatggtatacttaggatgact

SEQ ID NO: 6064861 - DNA, 25 bp, Homo sapien
ggtgggccactctccacatagagcg

SEQ ID NO: 6064862 - DNA, 25 bp, Homo sapien
gccagagaagttccctattcatgta

SEQ ID NO: 6064863 - DNA, 25 bp, Homo sapien
aatacaccatgaagacagcttggct

SEQ ID NO: 6064864 - DNA, 25 bp, Homo sapien
tgtcactattaggtgcaccagtaag

SEQ ID NO: 6064865 - DNA, 25 bp, Homo sapien
tacacgtcaaataagaaactactct

SEQ ID NO: 6064866 - DNA, 25 bp, Homo sapien
tgacatctcgattcctgatttcagt

SEQ ID NO: 6064867 - DNA, 25 bp, Homo sapien
cacttaggacaagtaaagtacacgt

SEQ ID NO: 6064868 - DNA, 25 bp, Homo sapien
gctaggagcacattccttataaagg

SEQ ID NO: 6064869 - DNA, 25 bp, Homo sapien
tttcttgccaacagcgaatggtggt

SEQ ID NO: 6064870 - DNA, 25 bp, Homo sapien
tatttcctgagcatgctgactaaac

SEQ ID NO: 6064871 - DNA, 25 bp, Homo sapien
cccctcgttgatgtggtcgtagata

SEQ ID NO: 6064872 - DNA, 25 bp, Homo sapien
cgaatggtggtccatgaagagtacc

SEQ ID NO: 6064873 - DNA, 25 bp, Homo sapien
tggtcgtagatagcgtccgcgcctt

SEQ ID NO: 6064874 - DNA, 25 bp, Homo sapien
catgaagagtaccttgagcatcatc

SEQ ID NO: 6064875 - DNA, 25 bp, Homo sapien
ttcgaagtcaacgtcgcggccgcca

SEQ ID NO: 6064876 - DNA, 25 bp, Homo sapien
cgaagaacatgacgcccacgatgat

SEQ ID NO: 6064877 - DNA, 25 bp, Homo sapien
tgatgtggtcgtagatagcgtccgc

SEQ ID NO: 6064878 - DNA, 25 bp, Homo sapien
catgacgcccacgatgatggtgagg

SEQ ID NO: 6064879 - DNA, 25 bp, Homo sapien
cgaaggcgcgctcgaagaacatgac

SEQ ID NO: 6064880 - DNA, 25 bp, Homo sapien
tagcgtccgcgccttgatcgaaggc

SEQ ID NO: 6064881 - DNA, 25 bp, Homo sapien
taaacacacttgctctcaggatagg

SEQ ID NO: 6064882 - DNA, 25 bp, Homo sapien
tgtcaacgctcaagccagacagagg

SEQ ID NO: 6064883 - DNA, 25 bp, Homo sapien
taggaaccaccatctacatcacaga

SEQ ID NO: 6064884 - DNA, 25 bp, Homo sapien
catatcggttttcagaactaagcct

SEQ ID NO: 6064885 - DNA, 25 bp, Homo sapien
gccttttctctgtcaacgctcaagc

SEQ ID NO: 6064886 - DNA, 25 bp, Homo sapien
acagaggttagggaagatgcagcct

SEQ ID NO: 6064887 - DNA, 25 bp, Homo sapien
cactggatcttgttgtttcatggtc

SEQ ID NO: 6064888 - DNA, 25 bp, Homo sapien
cacttgctctcaggataggaaccac

SEQ ID NO: 6064889 - DNA, 25 bp, Homo sapien
tggttgcacaggagggcatttatcc

SEQ ID NO: 6064890 - DNA, 25 bp, Homo sapien
aagaataaacacacttgctctcagg

SEQ ID NO: 6064891 - DNA, 25 bp, Homo sapien
tcatcttccaacaacatatcggttt

SEQ ID NO: 6064892 - DNA, 25 bp, Homo sapien
aggttagggaagatgcagcctccca

SEQ ID NO: 6064893 - DNA, 25 bp, Homo sapien
tctcagagaatcagagtcttcaaag

SEQ ID NO: 6064894 - DNA, 25 bp, Homo sapien
agtctcagagaatcagagtcttcaa

SEQ ID NO: 6064895 - DNA, 25 bp, Homo sapien
gatctctgatgatgtgttgttgcca

SEQ ID NO: 6064896 - DNA, 25 bp, Homo sapien
tggtaagacatctctcctcagtctc

SEQ ID NO: 6064897 - DNA, 25 bp, Homo sapien
cctgctcagtacgagaggaaccgca

SEQ ID NO: 6064898 - DNA, 25 bp, Homo sapien
gctcagtacgagaggaaccgcaggt

SEQ ID NO: 6064899 - DNA, 25 bp, Homo sapien
agatctctgatgatgtgttgttgcc

SEQ ID NO: 6064900 - DNA, 25 bp, Homo sapien
tcagtacgagaggaaccgcaggttc

SEQ ID NO: 6064901 - DNA, 25 bp, Homo sapien
tgctcagtacgagaggaaccgcagg

SEQ ID NO: 6064902 - DNA, 25 bp, Homo sapien
tcctgctcagtacgagaggaaccgc

SEQ ID NO: 6064903 - DNA, 25 bp, Homo sapien
gctggtaagacatctctcctcagtc

SEQ ID NO: 6064904 - DNA, 25 bp, Homo sapien
tcttcaaagatctctgatgatgtgt

SEQ ID NO: 6064905 - DNA, 25 bp, Homo sapien
aggaaaacccctagctcagcctgtg

SEQ ID NO: 6064906 - DNA, 25 bp, Homo sapien
atgtgacatcctggacatcagacag

SEQ ID NO: 6064907 - DNA, 25 bp, Homo sapien
gctcagaccttccacaggaaaaccc

SEQ ID NO: 6064908 - DNA, 25 bp, Homo sapien
aagagggtatctgggaactcatgca

SEQ ID NO: 6064909 - DNA, 25 bp, Homo sapien
cagcctgtgaaagccagaagagggt

SEQ ID NO: 6064910 - DNA, 25 bp, Homo sapien
tctgggaactcatgcatcaagatgg

SEQ ID NO: 6064911 - DNA, 25 bp, Homo sapien
gaaaacccctagctcagcctgtgaa

SEQ ID NO: 6064912 - DNA, 25 bp, Homo sapien
aatccttcacaggtacaggggtaag

SEQ ID NO: 6064913 - DNA, 25 bp, Homo sapien
ttccacaggaaaacccctagctcag

SEQ ID NO: 6064914 - DNA, 25 bp, Homo sapien
acaggggtaagggaacatgtgacat

SEQ ID NO: 6064915 - DNA, 25 bp, Homo sapien
tcctggacatcagacaggaagtgcc

SEQ ID NO: 6064916 - DNA, 25 bp, Homo sapien
gggtatctgggaactcatgcatcaa

SEQ ID NO: 6064917 - DNA, 25 bp, Homo sapien
catttatctctgcacgatgtcttta

SEQ ID NO: 6064918 - DNA, 25 bp, Homo sapien
gcatcaaagcagttaggattcgaat

SEQ ID NO: 6064919 - DNA, 25 bp, Homo sapien
gggagacttctacaaccactcctct

SEQ ID NO: 6064920 - DNA, 25 bp, Homo sapien
ttgcaagccccagaacctaacagag

SEQ ID NO: 6064921 - DNA, 25 bp, Homo sapien
cccgagggcaagtgcatcaaagcag

SEQ ID NO: 6064922 - DNA, 25 bp, Homo sapien
taggattcgaatgcttgctaaggat

SEQ ID NO: 6064923 - DNA, 25 bp, Homo sapien
gttctattgaatcctgaaaatgcag

SEQ ID NO: 6064924 - DNA, 25 bp, Homo sapien
gaatgagaaatacaccacgttggct

SEQ ID NO: 6064925 - DNA, 25 bp, Homo sapien
gactttgacacctaccatattggaa

SEQ ID NO: 6064926 - DNA, 25 bp, Homo sapien
gaacaattcaaatgattgcaagccc

SEQ ID NO: 6064927 - DNA, 25 bp, Homo sapien
ggctgattgcttgacatgtctgatt

SEQ ID NO: 6064928 - DNA, 25 bp, Homo sapien
gaaaatgcagaacccagtgaatctc

SEQ ID NO: 6064929 - DNA, 25 bp, Homo sapien
acactgcggccaggcattacgccag

SEQ ID NO: 6064930 - DNA, 25 bp, Homo sapien
ttctgaaagacctttactggatggt

SEQ ID NO: 6064931 - DNA, 25 bp, Homo sapien
tccttccagagtggggtatgggata

SEQ ID NO: 6064932 - DNA, 25 bp, Homo sapien
ttccttccagagtggggtatgggat

SEQ ID NO: 6064933 - DNA, 25 bp, Homo sapien
tggttccttccagagtggggtatgg

SEQ ID NO: 6064934 - DNA, 25 bp, Homo sapien
aggcattacgccagctcccggatgc

SEQ ID NO: 6064935 - DNA, 25 bp, Homo sapien
actgcggccaggcattacgccagct

SEQ ID NO: 6064936 - DNA, 25 bp, Homo sapien
cagagtggggtatgggatacacaca

SEQ ID NO: 6064937 - DNA, 25 bp, Homo sapien
ttccagagtggggtatgggatacac

SEQ ID NO: 6064938 - DNA, 25 bp, Homo sapien
caggcattacgccagctcccggatg

SEQ ID NO: 6064939 - DNA, 25 bp, Homo sapien
tctgaaagacctttactggatggtt

SEQ ID NO: 6064940 - DNA, 25 bp, Homo sapien
ctgaaagacctttactggatggttc

SEQ ID NO: 6064941 - DNA, 25 bp, Homo sapien
cccacttcagcgtctggagtagcat

SEQ ID NO: 6064942 - DNA, 25 bp, Homo sapien
gttgagaaacctccggaaagattca

SEQ ID NO: 6064943 - DNA, 25 bp, Homo sapien
gaagcctcgatctctcggacttaag

SEQ ID NO: 6064944 - DNA, 25 bp, Homo sapien
catatttcccgtggtcagaaaacaa

SEQ ID NO: 6064945 - DNA, 25 bp, Homo sapien
tgcatgccgccttgttcagctaact

SEQ ID NO: 6064946 - DNA, 25 bp, Homo sapien
tgttccgtggaatggttgagaaacc

SEQ ID NO: 6064947 - DNA, 25 bp, Homo sapien
gagaaacctccggaaagattcaaca

SEQ ID NO: 6064948 - DNA, 25 bp, Homo sapien
tgaaccaacacatctggccagtatt

SEQ ID NO: 6064949 - DNA, 25 bp, Homo sapien
tcgatctctcggacttaagtgatct

SEQ ID NO: 6064950 - DNA, 25 bp, Homo sapien
gagtagcatgtgcatgccgccttgt

SEQ ID NO: 6064951 - DNA, 25 bp, Homo sapien
tcagcgtctggagtagcatgtgcat

SEQ ID NO: 6064952 - DNA, 25 bp, Homo sapien
gattcaacatatttcccgtggtcag

SEQ ID NO: 6064953 - DNA, 25 bp, Homo sapien
tcctaaagtgttggtatcacaggcg

SEQ ID NO: 6064954 - DNA, 25 bp, Homo sapien
gtgagccactgtgcccggcgttaac

SEQ ID NO: 6064955 - DNA, 25 bp, Homo sapien
gctgcactgctggatatagccattc

SEQ ID NO: 6064956 - DNA, 25 bp, Homo sapien
cgttaacaatcttctgccccagggt

SEQ ID NO: 6064957 - DNA, 25 bp, Homo sapien
gtcggccacagttggacaggagcac

SEQ ID NO: 6064958 - DNA, 25 bp, Homo sapien
ttgagctccttagcctcctaaagtg

SEQ ID NO: 6064959 - DNA, 25 bp, Homo sapien
gatggagtccagctgtgtcacccag

SEQ ID NO: 6064960 - DNA, 25 bp, Homo sapien
gctagagtgtagtggtgcaatctca

SEQ ID NO: 6064961 - DNA, 25 bp, Homo sapien
ttaactcctggacgacgtacacctg

SEQ ID NO: 6064962 - DNA, 25 bp, Homo sapien
tatacccactacatacatctgccag

SEQ ID NO: 6064963 - DNA, 25 bp, Homo sapien
caatatttttgtggaaacagggatc

SEQ ID NO: 6064964 - DNA, 25 bp, Homo sapien
tgttcctatggtggtcttgagctcc

SEQ ID NO: 6064965 - DNA, 25 bp, Homo sapien
catccagttaaagtatcagtagagc

SEQ ID NO: 6064966 - DNA, 25 bp, Homo sapien
cgttgaggcctgattataactggat

SEQ ID NO: 6064967 - DNA, 25 bp, Homo sapien
taatacctgacagaacgttgaggcc

SEQ ID NO: 6064968 - DNA, 25 bp, Homo sapien
aaccatattaatacctgacagaacg

SEQ ID NO: 6064969 - DNA, 25 bp, Homo sapien
gggtagcatccagttaaagtatcag

SEQ ID NO: 6064970 - DNA, 25 bp, Homo sapien
aattctaaccatattaatacctgac

SEQ ID NO: 6064971 - DNA, 25 bp, Homo sapien
gatattgggtagcatccagttaaag

SEQ ID NO: 6064972 - DNA, 25 bp, Homo sapien
gatatgattatacaacaactttctt

SEQ ID NO: 6064973 - DNA, 25 bp, Homo sapien
tataactggatattgggtagcatcc

SEQ ID NO: 6064974 - DNA, 25 bp, Homo sapien
tatctctattgactataattaccag

SEQ ID NO: 6064975 - DNA, 25 bp, Homo sapien
agtatcagtagagcttggatgtatc

SEQ ID NO: 6064976 - DNA, 25 bp, Homo sapien
cctgacagaacgttgaggcctgatt

SEQ ID NO: 6064977 - DNA, 25 bp, Homo sapien
ttggttaaaggcttcagggactagc

SEQ ID NO: 6064978 - DNA, 25 bp, Homo sapien
caggcagggactgatcaactctgct

SEQ ID NO: 6064979 - DNA, 25 bp, Homo sapien
tagcaataaatactgcgcagggcag

SEQ ID NO: 6064980 - DNA, 25 bp, Homo sapien
aactctgcttggacccacctctcag

SEQ ID NO: 6064981 - DNA, 25 bp, Homo sapien
ccactgccctgcaagaggtcaggcc

SEQ ID NO: 6064982 - DNA, 25 bp, Homo sapien
acagggaggtctcacagtttatcgg

SEQ ID NO: 6064983 - DNA, 25 bp, Homo sapien
ccaggagagcaacagggctggacac

SEQ ID NO: 6064984 - DNA, 25 bp, Homo sapien
agtgtgagcgctcgggcctcacccc

SEQ ID NO: 6064985 - DNA, 25 bp, Homo sapien
aaggcttcagggactagcagattga

SEQ ID NO: 6064986 - DNA, 25 bp, Homo sapien
gcaggcagggactgatcaactctgc

SEQ ID NO: 6064987 - DNA, 25 bp, Homo sapien
cagggaggtctcacagtttatcggg

SEQ ID NO: 6064988 - DNA, 25 bp, Homo sapien
ggttaaaggcttcagggactagcag

SEQ ID NO: 6064989 - DNA, 25 bp, Homo sapien
ctgaaacgtgatgggtaacttttag

SEQ ID NO: 6064990 - DNA, 25 bp, Homo sapien
ccttccataagatacaaccattctc

SEQ ID NO: 6064991 - DNA, 25 bp, Homo sapien
catttacactgaaacgtgatgggta

SEQ ID NO: 6064992 - DNA, 25 bp, Homo sapien
ttcccctgactccttgatgtgataa

SEQ ID NO: 6064993 - DNA, 25 bp, Homo sapien
tttacactgaaacgtgatgggtaac

SEQ ID NO: 6064994 - DNA, 25 bp, Homo sapien
actttcccctgactccttgatgtga

SEQ ID NO: 6064995 - DNA, 25 bp, Homo sapien
tacactgaaacgtgatgggtaactt

SEQ ID NO: 6064996 - DNA, 25 bp, Homo sapien
ccataagatacaaccattctcccaa

SEQ ID NO: 6064997 - DNA, 25 bp, Homo sapien
agtcactttcccctgactccttgat

SEQ ID NO: 6064998 - DNA, 25 bp, Homo sapien
ttccataagatacaaccattctccc

SEQ ID NO: 6064999 - DNA, 25 bp, Homo sapien
tttcccctgactccttgatgtgata

SEQ ID NO: 6065000 - DNA, 25 bp, Homo sapien
tcactttcccctgactccttgatgt

SEQ ID NO: 6065001 - DNA, 25 bp, Homo sapien
gatggcgttgtgagacagatccagc

SEQ ID NO: 6065002 - DNA, 25 bp, Homo sapien
aggcgatctcgtccacagagtcggg

SEQ ID NO: 6065003 - DNA, 25 bp, Homo sapien
tcaccatggcgaaccagccgaacat

SEQ ID NO: 6065004 - DNA, 25 bp, Homo sapien
tcctgcagggcgcactcgcagtgca

SEQ ID NO: 6065005 - DNA, 25 bp, Homo sapien
cctctggatgcggttgtaagacagg

SEQ ID NO: 6065006 - DNA, 25 bp, Homo sapien
gctgggcagagacttcaggtactcc

SEQ ID NO: 6065007 - DNA, 25 bp, Homo sapien
gacaggcgtatcttggcgctgagtt

SEQ ID NO: 6065008 - DNA, 25 bp, Homo sapien
ggcgcacatagtacacgacgtaggc

SEQ ID NO: 6065009 - DNA, 25 bp, Homo sapien
ttgttggcatcgagcttcaggagca

SEQ ID NO: 6065010 - DNA, 25 bp, Homo sapien
gctgagtttgcccagggcgtccttg

SEQ ID NO: 6065011 - DNA, 25 bp, Homo sapien
tgggagatcttgttggcatcgagct

SEQ ID NO: 6065012 - DNA, 25 bp, Homo sapien
agtacacgacgtaggcgatcaccat

SEQ ID NO: 6065013 - DNA, 25 bp, Homo sapien
ggtttggccaactcgccagctgcag

SEQ ID NO: 6065014 - DNA, 25 bp, Homo sapien
tgcagactgcggctccagactcggc

SEQ ID NO: 6065015 - DNA, 25 bp, Homo sapien
tcggcccctgacaggtgtcactctg

SEQ ID NO: 6065016 - DNA, 25 bp, Homo sapien
gagccgcatgacatcctctcgaaga

SEQ ID NO: 6065017 - DNA, 25 bp, Homo sapien
ggtgtcactctgatggtcctggcct

SEQ ID NO: 6065018 - DNA, 25 bp, Homo sapien
tctgagcccagtgctaggcgagaga

SEQ ID NO: 6065019 - DNA, 25 bp, Homo sapien
gaagagtgtcctgtctccgggtcct

SEQ ID NO: 6065020 - DNA, 25 bp, Homo sapien
aagggtcttgcccacctggaggctc

SEQ ID NO: 6065021 - DNA, 25 bp, Homo sapien
gcatgacatcctctcgaagacggtg

SEQ ID NO: 6065022 - DNA, 25 bp, Homo sapien
gaataccctcatagggtcaccctgg

SEQ ID NO: 6065023 - DNA, 25 bp, Homo sapien
tcttgctctggtcctggcagatgac

SEQ ID NO: 6065024 - DNA, 25 bp, Homo sapien
tgtctccgggtcctaactgagaata

SEQ ID NO: 6065025 - DNA, 25 bp, Homo sapien
catagctggcttctccaagaggttc

SEQ ID NO: 6065026 - DNA, 25 bp, Homo sapien
agggctgagttctggcaagcatagc

SEQ ID NO: 6065027 - DNA, 25 bp, Homo sapien
ttgccggctcccgctcagtactggg

SEQ ID NO: 6065028 - DNA, 25 bp, Homo sapien
gggtctcctgcggcaagtccagcac

SEQ ID NO: 6065029 - DNA, 25 bp, Homo sapien
cacggtcagtgctgtgctatagaac

SEQ ID NO: 6065030 - DNA, 25 bp, Homo sapien
gctggtcacggtcagtgctgtgcta

SEQ ID NO: 6065031 - DNA, 25 bp, Homo sapien
ttctccaagaggttcctccacactt

SEQ ID NO: 6065032 - DNA, 25 bp, Homo sapien
agttctggcaagcatagctggcttc

SEQ ID NO: 6065033 - DNA, 25 bp, Homo sapien
atgggccccggacgctggtcacggt

SEQ ID NO: 6065034 - DNA, 25 bp, Homo sapien
tagctggcttctccaagaggttcct

SEQ ID NO: 6065035 - DNA, 25 bp, Homo sapien
ctgagttctggcaagcatagctggc

SEQ ID NO: 6065036 - DNA, 25 bp, Homo sapien
cctgttgccagatgggccccggacg

SEQ ID NO: 6065037 - DNA, 25 bp, Homo sapien
ggagcctggacggaatcctcgttac

SEQ ID NO: 6065038 - DNA, 25 bp, Homo sapien
tcctcgttactgcactggagggaag

SEQ ID NO: 6065039 - DNA, 25 bp, Homo sapien
cacctcatccactgtgggctcatcc

SEQ ID NO: 6065040 - DNA, 25 bp, Homo sapien
cctggacggaatcctcgttactgca

SEQ ID NO: 6065041 - DNA, 25 bp, Homo sapien
tggacggaatcctcgttactgcact

SEQ ID NO: 6065042 - DNA, 25 bp, Homo sapien
gcatccttgccaacgccctctgtct

SEQ ID NO: 6065043 - DNA, 25 bp, Homo sapien
gaatcctcgttactgcactggaggg

SEQ ID NO: 6065044 - DNA, 25 bp, Homo sapien
tcttagccaagcactgcagcccacc

SEQ ID NO: 6065045 - DNA, 25 bp, Homo sapien
cggaatcctcgttactgcactggag

SEQ ID NO: 6065046 - DNA, 25 bp, Homo sapien
gacggaatcctcgttactgcactgg

SEQ ID NO: 6065047 - DNA, 25 bp, Homo sapien
gagcctggacggaatcctcgttact

SEQ ID NO: 6065048 - DNA, 25 bp, Homo sapien
cctcgttactgcactggagggaagc

SEQ ID NO: 6065049 - DNA, 25 bp, Homo sapien
cacactgctgagtctgttcagacac

SEQ ID NO: 6065050 - DNA, 25 bp, Homo sapien
taaaagaagatgtacccagtgcaac

SEQ ID NO: 6065051 - DNA, 25 bp, Homo sapien
ggaattcctgttagacttctgtaga

SEQ ID NO: 6065052 - DNA, 25 bp, Homo sapien
tcctggatacctaacacccgcatat

SEQ ID NO: 6065053 - DNA, 25 bp, Homo sapien
cttgctattaagctgggcattctct

SEQ ID NO: 6065054 - DNA, 25 bp, Homo sapien
tcatcgtaagtgaaccagatctgtt

SEQ ID NO: 6065055 - DNA, 25 bp, Homo sapien
gactttagagtcttcccaagatggc

SEQ ID NO: 6065056 - DNA, 25 bp, Homo sapien
ctcaaagtcataggcatcacagata

SEQ ID NO: 6065057 - DNA, 25 bp, Homo sapien
taatgagccggtaggtatgatctcc

SEQ ID NO: 6065058 - DNA, 25 bp, Homo sapien
gttcacagattctcataccgtcaca

SEQ ID NO: 6065059 - DNA, 25 bp, Homo sapien
tggaaagctttgaggcagtgcctgc

SEQ ID NO: 6065060 - DNA, 25 bp, Homo sapien
caagatggctgacaacactaatgag

SEQ ID NO: 6065061 - DNA, 25 bp, Homo sapien
catactgtacgactgataattttgt

SEQ ID NO: 6065062 - DNA, 25 bp, Homo sapien
actacgtgacgccattcacagtcca

SEQ ID NO: 6065063 - DNA, 25 bp, Homo sapien
ccttctgttgccattgtgatgagct

SEQ ID NO: 6065064 - DNA, 25 bp, Homo sapien
attttgtagccaccttctgttgcca

SEQ ID NO: 6065065 - DNA, 25 bp, Homo sapien
gccattgtgatgagctcaagggttg

SEQ ID NO: 6065066 - DNA, 25 bp, Homo sapien
tcaagggttgggagtattcacttaa

SEQ ID NO: 6065067 - DNA, 25 bp, Homo sapien
cccatatcaagtgctactaatgatg

SEQ ID NO: 6065068 - DNA, 25 bp, Homo sapien
ctactaatgatggtggaagtgctcc

SEQ ID NO: 6065069 - DNA, 25 bp, Homo sapien
taaatgaatccagctgaaggcctat

SEQ ID NO: 6065070 - DNA, 25 bp, Homo sapien
caatttgcacacagactacgtgacg

SEQ ID NO: 6065071 - DNA, 25 bp, Homo sapien
aatgatcccggcatgttggcgtgca

SEQ ID NO: 6065072 - DNA, 25 bp, Homo sapien
tgaataatatcatgggacccatatc

SEQ ID NO: 6065073 - DNA, 25 bp, Homo sapien
tcgtgagcaaagtaggttttccgct

SEQ ID NO: 6065074 - DNA, 25 bp, Homo sapien
gtgagcaaagtaggttttccgctta

SEQ ID NO: 6065075 - DNA, 25 bp, Homo sapien
gcatcgtgagcaaagtaggttttcc

SEQ ID NO: 6065076 - DNA, 25 bp, Homo sapien
ggcatcgtgagcaaagtaggttttc

SEQ ID NO: 6065077 - DNA, 25 bp, Homo sapien
atcgtgagcaaagtaggttttccgc

SEQ ID NO: 6065078 - DNA, 25 bp, Homo sapien
catcgtgagcaaagtaggttttccg

SEQ ID NO: 6065079 - DNA, 25 bp, Homo sapien
tgagcaaagtaggttttccgcttat

SEQ ID NO: 6065080 - DNA, 25 bp, Homo sapien
cgtgagcaaagtaggttttccgctt

SEQ ID NO: 6065081 - DNA, 25 bp, Homo sapien
catgtagggcatgctcagccagtaa

SEQ ID NO: 6065082 - DNA, 25 bp, Homo sapien
agtggcggccgcctttatggcctcg

SEQ ID NO: 6065083 - DNA, 25 bp, Homo sapien
tcagccagtaatggttctccgcctc

SEQ ID NO: 6065084 - DNA, 25 bp, Homo sapien
cctcgatctccaggcggcggatcat

SEQ ID NO: 6065085 - DNA, 25 bp, Homo sapien
cccgggtcatgtagggcatgctcag

SEQ ID NO: 6065086 - DNA, 25 bp, Homo sapien
gccagtaatggttctccgcctcgat

SEQ ID NO: 6065087 - DNA, 25 bp, Homo sapien
ttggcgcgcaacgacacgaaccgcg

SEQ ID NO: 6065088 - DNA, 25 bp, Homo sapien
ctgcttggcgcgcaacgacacgaac

SEQ ID NO: 6065089 - DNA, 25 bp, Homo sapien
ggccgcctttatggcctcgaaggcc

SEQ ID NO: 6065090 - DNA, 25 bp, Homo sapien
tcccgatccactgacggccgggaat

SEQ ID NO: 6065091 - DNA, 25 bp, Homo sapien
gagctggtccgcaatgaatctatgc

SEQ ID NO: 6065092 - DNA, 25 bp, Homo sapien
ggtcgagctggtccgcaatgaatct

SEQ ID NO: 6065093 - DNA, 25 bp, Homo sapien
catgcagaccacttgacttccttag

SEQ ID NO: 6065094 - DNA, 25 bp, Homo sapien
taacagattatgaccacaatgcaga

SEQ ID NO: 6065095 - DNA, 25 bp, Homo sapien
aagcttcagcttccgtttgcatcaa

SEQ ID NO: 6065096 - DNA, 25 bp, Homo sapien
gaacatccatgtagatccttcttgt

SEQ ID NO: 6065097 - DNA, 25 bp, Homo sapien
tcccttaacctagactgtgctggaa

SEQ ID NO: 6065098 - DNA, 25 bp, Homo sapien
ccggttcatccagacagttcagaga

SEQ ID NO: 6065099 - DNA, 25 bp, Homo sapien
aattcctccattaaggtaacagcca

SEQ ID NO: 6065100 - DNA, 25 bp, Homo sapien
tcctgttgtaatcgtgcctcctgag

SEQ ID NO: 6065101 - DNA, 25 bp, Homo sapien
tgatgagtgccgttgaccggttcat

SEQ ID NO: 6065102 - DNA, 25 bp, Homo sapien
gccattcagtcaagaaattcactcc

SEQ ID NO: 6065103 - DNA, 25 bp, Homo sapien
aaaattttgcctcagtaactgccag

SEQ ID NO: 6065104 - DNA, 25 bp, Homo sapien
taaaaactaaggtatgatgagtgcc

SEQ ID NO: 6065105 - DNA, 25 bp, Homo sapien
gctggcctctggcagatactcttag

SEQ ID NO: 6065106 - DNA, 25 bp, Homo sapien
ggtggtgtaactgcagaactgagat

SEQ ID NO: 6065107 - DNA, 25 bp, Homo sapien
cccaggacaatggtcacaaaataca

SEQ ID NO: 6065108 - DNA, 25 bp, Homo sapien
tcttaggacggaggagaaaatctga

SEQ ID NO: 6065109 - DNA, 25 bp, Homo sapien
cagatactcttaggacggaggagaa

SEQ ID NO: 6065110 - DNA, 25 bp, Homo sapien
tggtcacaaaatacatcacgatgtt

SEQ ID NO: 6065111 - DNA, 25 bp, Homo sapien
gcttcaggacttcggaaggatcaca

SEQ ID NO: 6065112 - DNA, 25 bp, Homo sapien
gacaatggtcacaaaatacatcacg

SEQ ID NO: 6065113 - DNA, 25 bp, Homo sapien
agtgcggaatttccatatttgtgca

SEQ ID NO: 6065114 - DNA, 25 bp, Homo sapien
tagaaggtggtgtaactgcagaact

SEQ ID NO: 6065115 - DNA, 25 bp, Homo sapien
ctctggcagatactcttaggacgga

SEQ ID NO: 6065116 - DNA, 25 bp, Homo sapien
ccgtcatggtcaggagcaaattgtc

SEQ ID NO: 6065117 - DNA, 25 bp, Homo sapien
tcagctcatttgcatgggtgtcaac

SEQ ID NO: 6065118 - DNA, 25 bp, Homo sapien
gaagcccagtggttgattgcatgct

SEQ ID NO: 6065119 - DNA, 25 bp, Homo sapien
gactcggtgtgacaacagtataaaa

SEQ ID NO: 6065120 - DNA, 25 bp, Homo sapien
tgtcaacacatgataaacgcagaag

SEQ ID NO: 6065121 - DNA, 25 bp, Homo sapien
attgcatgctcagtacagcccgggc

SEQ ID NO: 6065122 - DNA, 25 bp, Homo sapien
ccaacaagtggcagaaacgagggtg

SEQ ID NO: 6065123 - DNA, 25 bp, Homo sapien
caaaaatggagctcatgaccatgag

SEQ ID NO: 6065124 - DNA, 25 bp, Homo sapien
taggacacactctgcgattcccagt

SEQ ID NO: 6065125 - DNA, 25 bp, Homo sapien
gatgggctccacatgtcctaaacac

SEQ ID NO: 6065126 - DNA, 25 bp, Homo sapien
gagatacaaccataagatgggctcc

SEQ ID NO: 6065127 - DNA, 25 bp, Homo sapien
gatccactaggcgatgtccacaaag

SEQ ID NO: 6065128 - DNA, 25 bp, Homo sapien
tataaaagagggcaatgaacttgcc

SEQ ID NO: 6065129 - DNA, 25 bp, Homo sapien
gaaaacctgtggcaactttgtggtg

SEQ ID NO: 6065130 - DNA, 25 bp, Homo sapien
tcgtacagtgtagagctgtgctgcc

SEQ ID NO: 6065131 - DNA, 25 bp, Homo sapien
cacgtgtgccatcttggacaagtca

SEQ ID NO: 6065132 - DNA, 25 bp, Homo sapien
aaggtgacagtcatccgggttctgg

SEQ ID NO: 6065133 - DNA, 25 bp, Homo sapien
aaccagaaggctagtgaggctcgca

SEQ ID NO: 6065134 - DNA, 25 bp, Homo sapien
ggcctcactcgaggtatgatggcga

SEQ ID NO: 6065135 - DNA, 25 bp, Homo sapien
gcagaaaatggcaacgcaagattca

SEQ ID NO: 6065136 - DNA, 25 bp, Homo sapien
gcaggatgccctagtgaatcgtaca

SEQ ID NO: 6065137 - DNA, 25 bp, Homo sapien
tgcacgcagttacccacagcagaaa

SEQ ID NO: 6065138 - DNA, 25 bp, Homo sapien
taacatgaaaccaagctgtgggaca

SEQ ID NO: 6065139 - DNA, 25 bp, Homo sapien
gagaacaggatgcttcaaggtgaca

SEQ ID NO: 6065140 - DNA, 25 bp, Homo sapien
tgcagatcaactttccacgtgtgcc

SEQ ID NO: 6065141 - DNA, 25 bp, Homo sapien
gcagcccacatttttcttagaagga

SEQ ID NO: 6065142 - DNA, 25 bp, Homo sapien
cagactcctccactgtatacacagg

SEQ ID NO: 6065143 - DNA, 25 bp, Homo sapien
tgtgcttgtaataccagccactcgg

SEQ ID NO: 6065144 - DNA, 25 bp, Homo sapien
cacggagcacaaaaactaaactagg

SEQ ID NO: 6065145 - DNA, 25 bp, Homo sapien
gcaatagagcaagaccctgtttcaa

SEQ ID NO: 6065146 - DNA, 25 bp, Homo sapien
tatataactttcaagagcagcccac

SEQ ID NO: 6065147 - DNA, 25 bp, Homo sapien
tatacacaggagaaaaccaatccct

SEQ ID NO: 6065148 - DNA, 25 bp, Homo sapien
taaactaggaagagccaccactctg

SEQ ID NO: 6065149 - DNA, 25 bp, Homo sapien
tgccactggttggagctgatcaccc

SEQ ID NO: 6065150 - DNA, 25 bp, Homo sapien
tgtgctccagcctaggcaatagagc

SEQ ID NO: 6065151 - DNA, 25 bp, Homo sapien
ttagaaggacacaagaacacggagc

SEQ ID NO: 6065152 - DNA, 25 bp, Homo sapien
tatatggctggatgcagtggctcac

SEQ ID NO: 6065153 - DNA, 25 bp, Homo sapien
ccatgtaggagcagtacgagtcgcg

SEQ ID NO: 6065154 - DNA, 25 bp, Homo sapien
tagttgagaaggtcgaagtggccca

SEQ ID NO: 6065155 - DNA, 25 bp, Homo sapien
attggcaaaccggagaaacgctggg

SEQ ID NO: 6065156 - DNA, 25 bp, Homo sapien
tgccgatgtacttggactgcaggtg

SEQ ID NO: 6065157 - DNA, 25 bp, Homo sapien
tacgagtcgcggtgttggttcacca

SEQ ID NO: 6065158 - DNA, 25 bp, Homo sapien
tccgcaatggcgaagtagttgagaa

SEQ ID NO: 6065159 - DNA, 25 bp, Homo sapien
tcaattagccaaaaacgagacgcca

SEQ ID NO: 6065160 - DNA, 25 bp, Homo sapien
cgggcaagcacttctgtacgcggaa

SEQ ID NO: 6065161 - DNA, 25 bp, Homo sapien
ccccgcactgcggtggtaaggcaga

SEQ ID NO: 6065162 - DNA, 25 bp, Homo sapien
ttctcctcgggcttgtcggctggcg

SEQ ID NO: 6065163 - DNA, 25 bp, Homo sapien
ttctgtacgcggaaagcacgaggcg

SEQ ID NO: 6065164 - DNA, 25 bp, Homo sapien
tccatcaagttgaagcggactcgcg

SEQ ID NO: 6065165 - DNA, 25 bp, Homo sapien
ggtctccccgagaaagctgtagatg

SEQ ID NO: 6065166 - DNA, 25 bp, Homo sapien
cggacatccgcgaaacagaagcagg

SEQ ID NO: 6065167 - DNA, 25 bp, Homo sapien
agccagcagacgaagaagaccagca

SEQ ID NO: 6065168 - DNA, 25 bp, Homo sapien
gttttctgctcaatgtacagcctca

SEQ ID NO: 6065169 - DNA, 25 bp, Homo sapien
tgatgaagacgttctccggcagcca

SEQ ID NO: 6065170 - DNA, 25 bp, Homo sapien
tgctcaatgtacagcctcagcttgt

SEQ ID NO: 6065171 - DNA, 25 bp, Homo sapien
tgaccagcacccggacaatgaggga

SEQ ID NO: 6065172 - DNA, 25 bp, Homo sapien
cagaagcggttcagggccggcaaat

SEQ ID NO: 6065173 - DNA, 25 bp, Homo sapien
ggtgcacgctgatgaagacgttctc

SEQ ID NO: 6065174 - DNA, 25 bp, Homo sapien
aaagactgcttgcagggagcggccc

SEQ ID NO: 6065175 - DNA, 25 bp, Homo sapien
cgaagggcacgatgaagcccagcgt

SEQ ID NO: 6065176 - DNA, 25 bp, Homo sapien
cagaagcaggcctcgtcggtgtgct

SEQ ID NO: 6065177 - DNA, 25 bp, Homo sapien
ggacagtgaagaaagtgtaccctcc

SEQ ID NO: 6065178 - DNA, 25 bp, Homo sapien
ccaggtctaggaatagggacagtga

SEQ ID NO: 6065179 - DNA, 25 bp, Homo sapien
ggcaggcccagcttcaagacagtgg

SEQ ID NO: 6065180 - DNA, 25 bp, Homo sapien
tgggcacatcgtcccatcctcagct

SEQ ID NO: 6065181 - DNA, 25 bp, Homo sapien
gatcacagctctggtacagggaggt

SEQ ID NO: 6065182 - DNA, 25 bp, Homo sapien
agtgaagaaagtgtaccctccaaga

SEQ ID NO: 6065183 - DNA, 25 bp, Homo sapien
agatcacagctctggtacagggagg

SEQ ID NO: 6065184 - DNA, 25 bp, Homo sapien
aattgtgcagatacttctgaagccc

SEQ ID NO: 6065185 - DNA, 25 bp, Homo sapien
ctccgccacacccaggtcagcagag

SEQ ID NO: 6065186 - DNA, 25 bp, Homo sapien
gcttcaagacagtgggacacagaaa

SEQ ID NO: 6065187 - DNA, 25 bp, Homo sapien
ccagcttcaagacagtgggacacag

SEQ ID NO: 6065188 - DNA, 25 bp, Homo sapien
tcaagccccaggtctaggaataggg

SEQ ID NO: 6065189 - DNA, 25 bp, Homo sapien
ttccttacaacagggacaggctggt

SEQ ID NO: 6065190 - DNA, 25 bp, Homo sapien
ctggcttccttacaacagggacagg

SEQ ID NO: 6065191 - DNA, 25 bp, Homo sapien
cgtggcatgatacaaggacctgggc

SEQ ID NO: 6065192 - DNA, 25 bp, Homo sapien
ggctgatctgccgtgtcaggcctca

SEQ ID NO: 6065193 - DNA, 25 bp, Homo sapien
cctcagggcacgatggaaggaatgt

SEQ ID NO: 6065194 - DNA, 25 bp, Homo sapien
gcatgttgggttggagcccagaaaa

SEQ ID NO: 6065195 - DNA, 25 bp, Homo sapien
tcaggtaggaacttatgtcaacatg

SEQ ID NO: 6065196 - DNA, 25 bp, Homo sapien
cctgtagttgggaccgtggcatgat

SEQ ID NO: 6065197 - DNA, 25 bp, Homo sapien
ccccagctaggaccctgtagttggg

SEQ ID NO: 6065198 - DNA, 25 bp, Homo sapien
gaacttatgtcaacatggtggcatg

SEQ ID NO: 6065199 - DNA, 25 bp, Homo sapien
gaagctgcagtacctcgctgtgccc

SEQ ID NO: 6065200 - DNA, 25 bp, Homo sapien
atctgccgtgtcaggcctcagggca

SEQ ID NO: 6065201 - DNA, 25 bp, Homo sapien
catgacgtagcaacctctgacacag

SEQ ID NO: 6065202 - DNA, 25 bp, Homo sapien
accccttctggactggtcattgaag

SEQ ID NO: 6065203 - DNA, 25 bp, Homo sapien
tgaagggatctaacggcaaaaacta

SEQ ID NO: 6065204 - DNA, 25 bp, Homo sapien
tctggactggtcattgaagataggg

SEQ ID NO: 6065205 - DNA, 25 bp, Homo sapien
tagttgaatagtacatcttggctcc

SEQ ID NO: 6065206 - DNA, 25 bp, Homo sapien
gaactgcactgtatccatgacgtag

SEQ ID NO: 6065207 - DNA, 25 bp, Homo sapien
tggcacttggaactgcactgtatcc

SEQ ID NO: 6065208 - DNA, 25 bp, Homo sapien
aactaagaacaaaagcaccatggtt

SEQ ID NO: 6065209 - DNA, 25 bp, Homo sapien
atgccagagcaaatgaatccagctt

SEQ ID NO: 6065210 - DNA, 25 bp, Homo sapien
gagaaagatattgtaaggaacttcc

SEQ ID NO: 6065211 - DNA, 25 bp, Homo sapien
tgtacatacacttatggcacttgga

SEQ ID NO: 6065212 - DNA, 25 bp, Homo sapien
gcaaatgaatccagcttaacccctt

SEQ ID NO: 6065213 - DNA, 25 bp, Homo sapien
tttctctggctggtaaccgctactc

SEQ ID NO: 6065214 - DNA, 25 bp, Homo sapien
tcgcaccagggaacgaacccctgtg

SEQ ID NO: 6065215 - DNA, 25 bp, Homo sapien
gggacctggcccatctcgggtatca

SEQ ID NO: 6065216 - DNA, 25 bp, Homo sapien
tttctagcgaccctcgcaccaggga

SEQ ID NO: 6065217 - DNA, 25 bp, Homo sapien
tctcagaggcgactaaagaccaaac

SEQ ID NO: 6065218 - DNA, 25 bp, Homo sapien
ggaattaaagttctcagaggcgact

SEQ ID NO: 6065219 - DNA, 25 bp, Homo sapien
gctgagttgagttgcaaatgaatca

SEQ ID NO: 6065220 - DNA, 25 bp, Homo sapien
gcagcttccgctaaacgggctcaga

SEQ ID NO: 6065221 - DNA, 25 bp, Homo sapien
tcctttggcgggaaacagcaccctc

SEQ ID NO: 6065222 - DNA, 25 bp, Homo sapien
tgcaaatgaatcaccgaggaccacc

SEQ ID NO: 6065223 - DNA, 25 bp, Homo sapien
gaggaccaccggagctttctagcga

SEQ ID NO: 6065224 - DNA, 25 bp, Homo sapien
cggcacgcccgggaggctttctctg

SEQ ID NO: 6065225 - DNA, 25 bp, Homo sapien
caaaaatgagcacataatgtatgat

SEQ ID NO: 6065226 - DNA, 25 bp, Homo sapien
caatcgatggactatactaaatgaa

SEQ ID NO: 6065227 - DNA, 25 bp, Homo sapien
gacagtacattgaaggacagaagcc

SEQ ID NO: 6065228 - DNA, 25 bp, Homo sapien
gacagaagcccgacaaaaatgagca

SEQ ID NO: 6065229 - DNA, 25 bp, Homo sapien
tcaaaaggacggatatacaatcgat

SEQ ID NO: 6065230 - DNA, 25 bp, Homo sapien
aaaaggacggatatacaatcgatgg

SEQ ID NO: 6065231 - DNA, 25 bp, Homo sapien
tacaatcgatggactatactaaatg

SEQ ID NO: 6065232 - DNA, 25 bp, Homo sapien
cagacagtacattgaaggacagaag

SEQ ID NO: 6065233 - DNA, 25 bp, Homo sapien
aaggacggatatacaatcgatggac

SEQ ID NO: 6065234 - DNA, 25 bp, Homo sapien
cggatatacaatcgatggactatac

SEQ ID NO: 6065235 - DNA, 25 bp, Homo sapien
gtcagacagtacattgaaggacaga

SEQ ID NO: 6065236 - DNA, 25 bp, Homo sapien
ggacggatatacaatcgatggacta

SEQ ID NO: 6065237 - DNA, 25 bp, Homo sapien
cggataatcctctgaaggaagagca

SEQ ID NO: 6065238 - DNA, 25 bp, Homo sapien
ccggataatcctctgaaggaagagc

SEQ ID NO: 6065239 - DNA, 25 bp, Homo sapien
ccccggataatcctctgaaggaaga

SEQ ID NO: 6065240 - DNA, 25 bp, Homo sapien
tagatgccccggataatcctctgaa

SEQ ID NO: 6065241 - DNA, 25 bp, Homo sapien
gccccggataatcctctgaaggaag

SEQ ID NO: 6065242 - DNA, 25 bp, Homo sapien
gtagatgccccggataatcctctga

SEQ ID NO: 6065243 - DNA, 25 bp, Homo sapien
tgccccggataatcctctgaaggaa

SEQ ID NO: 6065244 - DNA, 25 bp, Homo sapien
gagtagatgccccggataatcctct

SEQ ID NO: 6065245 - DNA, 25 bp, Homo sapien
cccggataatcctctgaaggaagag

SEQ ID NO: 6065246 - DNA, 25 bp, Homo sapien
gatgccccggataatcctctgaagg

SEQ ID NO: 6065247 - DNA, 25 bp, Homo sapien
ttgagtagatgccccggataatcct

SEQ ID NO: 6065248 - DNA, 25 bp, Homo sapien
agatgccccggataatcctctgaag

SEQ ID NO: 6065249 - DNA, 25 bp, Homo sapien
tcatttcgaaccacaagaatcatct

SEQ ID NO: 6065250 - DNA, 25 bp, Homo sapien
tgttgttagaatctgacaggcttca

SEQ ID NO: 6065251 - DNA, 25 bp, Homo sapien
tcatctcaagaacatttaagttggg

SEQ ID NO: 6065252 - DNA, 25 bp, Homo sapien
tcttcatcaggagctttgaccacca

SEQ ID NO: 6065253 - DNA, 25 bp, Homo sapien
catgggccaataatgcaatcagggt

SEQ ID NO: 6065254 - DNA, 25 bp, Homo sapien
ctttaagtcatttcgaaccacaaga

SEQ ID NO: 6065255 - DNA, 25 bp, Homo sapien
agcctggtgcaatctgagtacgtcc

SEQ ID NO: 6065256 - DNA, 25 bp, Homo sapien
gagtacgtccagcatcttgaattaa

SEQ ID NO: 6065257 - DNA, 25 bp, Homo sapien
caataatgcaatcagggtttcttca

SEQ ID NO: 6065258 - DNA, 25 bp, Homo sapien
actttgtcaattaggtctgctggtc

SEQ ID NO: 6065259 - DNA, 25 bp, Homo sapien
taggacagtttgagagcctggtgca

SEQ ID NO: 6065260 - DNA, 25 bp, Homo sapien
gcttttgttgttagaatctgacagg

SEQ ID NO: 6065261 - DNA, 25 bp, Homo sapien
ccctgttaaggcaacactgggatcc

SEQ ID NO: 6065262 - DNA, 25 bp, Homo sapien
gctttaaaaaggtcctgatgtctgg

SEQ ID NO: 6065263 - DNA, 25 bp, Homo sapien
gaagcagcagtgctctactgcggca

SEQ ID NO: 6065264 - DNA, 25 bp, Homo sapien
tgatgtctgggacctacttcccagg

SEQ ID NO: 6065265 - DNA, 25 bp, Homo sapien
taccaaatctcagggcgggtagcct

SEQ ID NO: 6065266 - DNA, 25 bp, Homo sapien
aagcctacagtgtggatgttggcca

SEQ ID NO: 6065267 - DNA, 25 bp, Homo sapien
tctgactgcattgatctgaggtgtg

SEQ ID NO: 6065268 - DNA, 25 bp, Homo sapien
gcgggtagcctgcaagcctacagtg

SEQ ID NO: 6065269 - DNA, 25 bp, Homo sapien
tgcggcacgacagacaccctgttaa

SEQ ID NO: 6065270 - DNA, 25 bp, Homo sapien
tctgaggtgtggctcttcaagtaac

SEQ ID NO: 6065271 - DNA, 25 bp, Homo sapien
caagccaatgcacagaaaagtggtc

SEQ ID NO: 6065272 - DNA, 25 bp, Homo sapien
gcttagggacctgacttacttagga

SEQ ID NO: 6065273 - DNA, 25 bp, Homo sapien
gccgagaaaatgtcccactggcagc

SEQ ID NO: 6065274 - DNA, 25 bp, Homo sapien
ggcagcctcttggtgctttataagg

SEQ ID NO: 6065275 - DNA, 25 bp, Homo sapien
gggccgagaaaatgtcccactggca

SEQ ID NO: 6065276 - DNA, 25 bp, Homo sapien
attaatcagaggtacatgagcaggc

SEQ ID NO: 6065277 - DNA, 25 bp, Homo sapien
gcagcctcttggtgctttataaggc

SEQ ID NO: 6065278 - DNA, 25 bp, Homo sapien
tattaatcagaggtacatgagcagg

SEQ ID NO: 6065279 - DNA, 25 bp, Homo sapien
gcaggctcagcctaggggaataatt

SEQ ID NO: 6065280 - DNA, 25 bp, Homo sapien
cacttttgggaagcctgggaccatg

SEQ ID NO: 6065281 - DNA, 25 bp, Homo sapien
ggccgagaaaatgtcccactggcag

SEQ ID NO: 6065282 - DNA, 25 bp, Homo sapien
acacttttgggaagcctgggaccat

SEQ ID NO: 6065283 - DNA, 25 bp, Homo sapien
cagggccgagaaaatgtcccactgg

SEQ ID NO: 6065284 - DNA, 25 bp, Homo sapien
ttaatcagaggtacatgagcaggct

SEQ ID NO: 6065285 - DNA, 25 bp, Homo sapien
tatacatacaaacaacaattacagg

SEQ ID NO: 6065286 - DNA, 25 bp, Homo sapien
catgtaggcctagaaaaaggctctc

SEQ ID NO: 6065287 - DNA, 25 bp, Homo sapien
caactgtggccagtgaaaggaaaca

SEQ ID NO: 6065288 - DNA, 25 bp, Homo sapien
ggcaactggtgaacggtaacactga

SEQ ID NO: 6065289 - DNA, 25 bp, Homo sapien
tttgcagaggccaacagctttgaac

SEQ ID NO: 6065290 - DNA, 25 bp, Homo sapien
aagcagttcttaagactagcagtaa

SEQ ID NO: 6065291 - DNA, 25 bp, Homo sapien
ttacagctacccagatgcaataaag

SEQ ID NO: 6065292 - DNA, 25 bp, Homo sapien
gctttgaacaaatgattcgcctaca

SEQ ID NO: 6065293 - DNA, 25 bp, Homo sapien
gaacggtaacactgattgcccagaa

SEQ ID NO: 6065294 - DNA, 25 bp, Homo sapien
cagttcggtctgtataatatgatga

SEQ ID NO: 6065295 - DNA, 25 bp, Homo sapien
ttacagggacttgttcacaaagcat

SEQ ID NO: 6065296 - DNA, 25 bp, Homo sapien
gtccatttgaatatcagacctagtt

SEQ ID NO: 6065297 - DNA, 25 bp, Homo sapien
tgtcacttagactacaaacaaaagg

SEQ ID NO: 6065298 - DNA, 25 bp, Homo sapien
gagaactaagatatctttaggccca

SEQ ID NO: 6065299 - DNA, 25 bp, Homo sapien
ggcaggtacacctgagcacacacca

SEQ ID NO: 6065300 - DNA, 25 bp, Homo sapien
gaatggcatcagtgtgaggtcacgc

SEQ ID NO: 6065301 - DNA, 25 bp, Homo sapien
taccttcacaatgcactattctctc

SEQ ID NO: 6065302 - DNA, 25 bp, Homo sapien
ttaggcccaaatgtacttgccattg

SEQ ID NO: 6065303 - DNA, 25 bp, Homo sapien
ctctgtacaagttgtcccaactcac

SEQ ID NO: 6065304 - DNA, 25 bp, Homo sapien
tcagcattctggcttattccatggg

SEQ ID NO: 6065305 - DNA, 25 bp, Homo sapien
cttgccattgtgttatattctctgt

SEQ ID NO: 6065306 - DNA, 25 bp, Homo sapien
agctccacaccattgtgacacattg

SEQ ID NO: 6065307 - DNA, 25 bp, Homo sapien
cacattgcaggattgagcgatgcag

SEQ ID NO: 6065308 - DNA, 25 bp, Homo sapien
cattgtgacacattgcaggattgag

SEQ ID NO: 6065309 - DNA, 25 bp, Homo sapien
gctcttccataggtacagggactct

SEQ ID NO: 6065310 - DNA, 25 bp, Homo sapien
gagccacaaacatggaaggtcactg

SEQ ID NO: 6065311 - DNA, 25 bp, Homo sapien
gactgagagtgagatgacaatgtaa

SEQ ID NO: 6065312 - DNA, 25 bp, Homo sapien
actgaggaatgggaaccagggcaca

SEQ ID NO: 6065313 - DNA, 25 bp, Homo sapien
gaaaatgatccccagttgagaagga

SEQ ID NO: 6065314 - DNA, 25 bp, Homo sapien
gcacaagtggacagattgctcttcc

SEQ ID NO: 6065315 - DNA, 25 bp, Homo sapien
cgagagtggttctttctatcaagag

SEQ ID NO: 6065316 - DNA, 25 bp, Homo sapien
gaaacccaggagagtatgaagtcat

SEQ ID NO: 6065317 - DNA, 25 bp, Homo sapien
ggtcactggagttcttaagaagagt

SEQ ID NO: 6065318 - DNA, 25 bp, Homo sapien
catgaaagttcaatcggaagggact

SEQ ID NO: 6065319 - DNA, 25 bp, Homo sapien
gggactctttctgtccatggtaaca

SEQ ID NO: 6065320 - DNA, 25 bp, Homo sapien
gagacactagagcatgttagtatgc

SEQ ID NO: 6065321 - DNA, 25 bp, Homo sapien
ttgcaaatcacgtatctgaaagagg

SEQ ID NO: 6065322 - DNA, 25 bp, Homo sapien
gcaaatcacgtatctgaaagaggat

SEQ ID NO: 6065323 - DNA, 25 bp, Homo sapien
aaaaattggatatcaccaaatgctc

SEQ ID NO: 6065324 - DNA, 25 bp, Homo sapien
ccggaatatgtaaagatcattcaaa

SEQ ID NO: 6065325 - DNA, 25 bp, Homo sapien
agtttcttttaagcttgaacatata

SEQ ID NO: 6065326 - DNA, 25 bp, Homo sapien
tatatccggaatatgtaaagatcat

SEQ ID NO: 6065327 - DNA, 25 bp, Homo sapien
tctgaaagaggatttatatccggaa

SEQ ID NO: 6065328 - DNA, 25 bp, Homo sapien
cgtatctgaaagaggatttatatcc

SEQ ID NO: 6065329 - DNA, 25 bp, Homo sapien
tgaagagggttttaaagttgtgata

SEQ ID NO: 6065330 - DNA, 25 bp, Homo sapien
caaaggcttgaatagatactttaca

SEQ ID NO: 6065331 - DNA, 25 bp, Homo sapien
taaacagtattacatacctattaaa

SEQ ID NO: 6065332 - DNA, 25 bp, Homo sapien
ctggaacttttataccttgttggtg

SEQ ID NO: 6065333 - DNA, 25 bp, Homo sapien
gacatcagatggtattcgagcactt

SEQ ID NO: 6065334 - DNA, 25 bp, Homo sapien
tgttggtaaacctataacagttgct

SEQ ID NO: 6065335 - DNA, 25 bp, Homo sapien
tcccagagatttatcagaggaggat

SEQ ID NO: 6065336 - DNA, 25 bp, Homo sapien
ggataaagctcacctaatgcaaagg

SEQ ID NO: 6065337 - DNA, 25 bp, Homo sapien
gattatataccttgacatcagatgg

SEQ ID NO: 6065338 - DNA, 25 bp, Homo sapien
gagagaggcagctgataagacatat

SEQ ID NO: 6065339 - DNA, 25 bp, Homo sapien
gtaagtaattcctcacatagctgtg

SEQ ID NO: 6065340 - DNA, 25 bp, Homo sapien
ttcgagcactttgcgcagcatgaga

SEQ ID NO: 6065341 - DNA, 25 bp, Homo sapien
cagggtgcaaacctttggtggtgac

SEQ ID NO: 6065342 - DNA, 25 bp, Homo sapien
aaaggctgtccatttaacactagat

SEQ ID NO: 6065343 - DNA, 25 bp, Homo sapien
gaaggcctccaagacaggccataag

SEQ ID NO: 6065344 - DNA, 25 bp, Homo sapien
tactctttttgatcagggtgcaaac

SEQ ID NO: 6065345 - DNA, 25 bp, Homo sapien
ccgttgggtttattaggtgaatgtg

SEQ ID NO: 6065346 - DNA, 25 bp, Homo sapien
ctttatgtctatgaatactttaatt

SEQ ID NO: 6065347 - DNA, 25 bp, Homo sapien
gaatgtgattatcaatttgatgata

SEQ ID NO: 6065348 - DNA, 25 bp, Homo sapien
ctcatccgttgggtttattaggtga

SEQ ID NO: 6065349 - DNA, 25 bp, Homo sapien
acagtgtctcatccgttgggtttat

SEQ ID NO: 6065350 - DNA, 25 bp, Homo sapien
attacaaatttcaattcttccattc

SEQ ID NO: 6065351 - DNA, 25 bp, Homo sapien
cattgctcctgatcccttggtaagg

SEQ ID NO: 6065352 - DNA, 25 bp, Homo sapien
aggcagcatactctgtagcaacagc

SEQ ID NO: 6065353 - DNA, 25 bp, Homo sapien
aggtcagagtgggatccttttccaa

SEQ ID NO: 6065354 - DNA, 25 bp, Homo sapien
tgttagcatggtagtttcagttggg

SEQ ID NO: 6065355 - DNA, 25 bp, Homo sapien
gtttagtttgtggtcttgtggacat

SEQ ID NO: 6065356 - DNA, 25 bp, Homo sapien
gtttcagttgggcaaaacttactgc

SEQ ID NO: 6065357 - DNA, 25 bp, Homo sapien
gattatcaatttgatgataggcagc

SEQ ID NO: 6065358 - DNA, 25 bp, Homo sapien
gtctatgaatactttaatttccaag

SEQ ID NO: 6065359 - DNA, 25 bp, Homo sapien
aagatttttcactaaggaaggtatg

SEQ ID NO: 6065360 - DNA, 25 bp, Homo sapien
ttttgccatatatccactcccaagt

SEQ ID NO: 6065361 - DNA, 25 bp, Homo sapien
ttactgtttagtttgtggtcttgtg

SEQ ID NO: 6065362 - DNA, 25 bp, Homo sapien
acttactgccaataagacttgaatt

SEQ ID NO: 6065363 - DNA, 25 bp, Homo sapien
catggtagtttcagttgggcaaaac

SEQ ID NO: 6065364 - DNA, 25 bp, Homo sapien
tttaatttgtcacgtatttccaatg

SEQ ID NO: 6065365 - DNA, 25 bp, Homo sapien
ttggagttttgccatatatccactc

SEQ ID NO: 6065366 - DNA, 25 bp, Homo sapien
gtgtgactgttcatataacacatga

SEQ ID NO: 6065367 - DNA, 25 bp, Homo sapien
caatgatcaggtgcttcaatattac

SEQ ID NO: 6065368 - DNA, 25 bp, Homo sapien
ggtttattaggtgaatgtgattatc

SEQ ID NO: 6065369 - DNA, 25 bp, Homo sapien
ttccaagtgtgactgttcatataac

SEQ ID NO: 6065370 - DNA, 25 bp, Homo sapien
cttgaatttaatttgtcacgtattt

SEQ ID NO: 6065371 - DNA, 25 bp, Homo sapien
tgccaataagacttgaatttaattt

SEQ ID NO: 6065372 - DNA, 25 bp, Homo sapien
tatgagacattttattttctaattg

SEQ ID NO: 6065373 - DNA, 25 bp, Homo sapien
acattttattttctaattgaaactg

SEQ ID NO: 6065374 - DNA, 25 bp, Homo sapien
cacatgaaaggaagtatttatacta

SEQ ID NO: 6065375 - DNA, 25 bp, Homo sapien
tgctagcagtggcattgctcctgat

SEQ ID NO: 6065376 - DNA, 25 bp, Homo sapien
cttcacaggtcagagtgggatcctt

SEQ ID NO: 6065377 - DNA, 25 bp, Homo sapien
caatttgatgataggcagcatactc

SEQ ID NO: 6065378 - DNA, 25 bp, Homo sapien
tcaggtgcttcaatattacaaattt

SEQ ID NO: 6065379 - DNA, 25 bp, Homo sapien
tccactcccaagtttgcagttcttt

SEQ ID NO: 6065380 - DNA, 25 bp, Homo sapien
tattttctaattgaaactgtattaa

SEQ ID NO: 6065381 - DNA, 25 bp, Homo sapien
cccaagtttgcagttctttggcttt

SEQ ID NO: 6065382 - DNA, 25 bp, Homo sapien
ttaggtgaatgtgattatcaatttg

SEQ ID NO: 6065383 - DNA, 25 bp, Homo sapien
ttttcactaaggaaggtatgctagc

SEQ ID NO: 6065384 - DNA, 25 bp, Homo sapien
gtcttgtggacatgttctaagtaat

SEQ ID NO: 6065385 - DNA, 25 bp, Homo sapien
gcttcaatattacaaatttcaattc

SEQ ID NO: 6065386 - DNA, 25 bp, Homo sapien
taaactttggagttttgccatatat

SEQ ID NO: 6065387 - DNA, 25 bp, Homo sapien
ttagtacttcacaggtcagagtggg

SEQ ID NO: 6065388 - DNA, 25 bp, Homo sapien
aagtaatatatttgttagcatggta

SEQ ID NO: 6065389 - DNA, 25 bp, Homo sapien
tgttctaagtaatatatttgttagc

SEQ ID NO: 6065390 - DNA, 25 bp, Homo sapien
tcacagagaatattccatttactgt

SEQ ID NO: 6065391 - DNA, 25 bp, Homo sapien
aatttcaattcttccattctttatg

SEQ ID NO: 6065392 - DNA, 25 bp, Homo sapien
tggaatcacattattcccttaattt

SEQ ID NO: 6065393 - DNA, 25 bp, Homo sapien
aagacatttacttggaatcacatta

SEQ ID NO: 6065394 - DNA, 25 bp, Homo sapien
tttaatttccaagtgtgactgttca

SEQ ID NO: 6065395 - DNA, 25 bp, Homo sapien
tcctgatcccttggtaagggctctt

SEQ ID NO: 6065396 - DNA, 25 bp, Homo sapien
tttgcagttctttggctttgctatt

SEQ ID NO: 6065397 - DNA, 25 bp, Homo sapien
tgctatttattccaggaaacagtgt

SEQ ID NO: 6065398 - DNA, 25 bp, Homo sapien
gttctttggctttgctatttattcc

SEQ ID NO: 6065399 - DNA, 25 bp, Homo sapien
attttttcacagagaatattccatt

SEQ ID NO: 6065400 - DNA, 25 bp, Homo sapien
tttgtggtcttgtggacatgttcta

SEQ ID NO: 6065401 - DNA, 25 bp, Homo sapien
cattcattagtacttcacaggtcag

SEQ ID NO: 6065402 - DNA, 25 bp, Homo sapien
caggaaacagtgtctcatccgttgg

SEQ ID NO: 6065403 - DNA, 25 bp, Homo sapien
cattattcccttaattttttcacag

SEQ ID NO: 6065404 - DNA, 25 bp, Homo sapien
tatatttgttagcatggtagtttca

SEQ ID NO: 6065405 - DNA, 25 bp, Homo sapien
ctaaggaaggtatgctagcagtggc

SEQ ID NO: 6065406 - DNA, 25 bp, Homo sapien
ggcaaaacttactgccaataagact

SEQ ID NO: 6065407 - DNA, 25 bp, Homo sapien
gatgataggcagcatactctgtagc

SEQ ID NO: 6065408 - DNA, 25 bp, Homo sapien
ctgttcatataacacatgaaaggaa

SEQ ID NO: 6065409 - DNA, 25 bp, Homo sapien
tgtattaagacatttacttggaatc

SEQ ID NO: 6065410 - DNA, 25 bp, Homo sapien
caacagcattcattagtacttcaca

SEQ ID NO: 6065411 - DNA, 25 bp, Homo sapien
catatatccactcccaagtttgcag

SEQ ID NO: 6065412 - DNA, 25 bp, Homo sapien
tggacatgttctaagtaatatattt

SEQ ID NO: 6065413 - DNA, 25 bp, Homo sapien
ctgtagcaacagcattcattagtac

SEQ ID NO: 6065414 - DNA, 25 bp, Homo sapien
cccttaattttttcacagagaatat

SEQ ID NO: 6065415 - DNA, 25 bp, Homo sapien
catactctgtagcaacagcattcat

SEQ ID NO: 6065416 - DNA, 25 bp, Homo sapien
ggcaaccaatgatcaggtgcttcaa

SEQ ID NO: 6065417 - DNA, 25 bp, Homo sapien
tccatttactgtttagtttgtggtc

SEQ ID NO: 6065418 - DNA, 25 bp, Homo sapien
tggctttgctatttattccaggaaa

SEQ ID NO: 6065419 - DNA, 25 bp, Homo sapien
ttattccaggaaacagtgtctcatc

SEQ ID NO: 6065420 - DNA, 25 bp, Homo sapien
tctaattgaaactgtattaagacat

SEQ ID NO: 6065421 - DNA, 25 bp, Homo sapien
cagttgggcaaaacttactgccaat

SEQ ID NO: 6065422 - DNA, 25 bp, Homo sapien
aaggtatgctagcagtggcattgct

SEQ ID NO: 6065423 - DNA, 25 bp, Homo sapien
tccaatggcaaccaatgatcaggtg

SEQ ID NO: 6065424 - DNA, 25 bp, Homo sapien
aattcttccattctttatgtctatg

SEQ ID NO: 6065425 - DNA, 25 bp, Homo sapien
ttgtcacgtatttccaatggcaacc

SEQ ID NO: 6065426 - DNA, 25 bp, Homo sapien
tatactaaactttggagttttgcca

SEQ ID NO: 6065427 - DNA, 25 bp, Homo sapien
tttacttggaatcacattattccct

SEQ ID NO: 6065428 - DNA, 25 bp, Homo sapien
taagacttgaatttaatttgtcacg

SEQ ID NO: 6065429 - DNA, 25 bp, Homo sapien
agagtgggatccttttccaaaagat

SEQ ID NO: 6065430 - DNA, 25 bp, Homo sapien
cagtggcattgctcctgatcccttg

SEQ ID NO: 6065431 - DNA, 25 bp, Homo sapien
agaatattccatttactgtttagtt

SEQ ID NO: 6065432 - DNA, 25 bp, Homo sapien
gaatactttaatttccaagtgtgac

SEQ ID NO: 6065433 - DNA, 25 bp, Homo sapien
tgaaactgtattaagacatttactt

SEQ ID NO: 6065434 - DNA, 25 bp, Homo sapien
atataacacatgaaaggaagtattt

SEQ ID NO: 6065435 - DNA, 25 bp, Homo sapien
tccattctttatgtctatgaatact

SEQ ID NO: 6065436 - DNA, 25 bp, Homo sapien
cgtatttccaatggcaaccaatgat

SEQ ID NO: 6065437 - DNA, 25 bp, Homo sapien
aaagattctaggatactgcgagcaa

SEQ ID NO: 6065438 - DNA, 25 bp, Homo sapien
gaaggaatgatctggtggttaagat

SEQ ID NO: 6065439 - DNA, 25 bp, Homo sapien
ctgcaatccagctaggcatgggagg

SEQ ID NO: 6065440 - DNA, 25 bp, Homo sapien
attctaggatactgcgagcaaatgg

SEQ ID NO: 6065441 - DNA, 25 bp, Homo sapien
cagaaggaatgatctggtggttaag

SEQ ID NO: 6065442 - DNA, 25 bp, Homo sapien
atccagctaggcatgggagggaaca

SEQ ID NO: 6065443 - DNA, 25 bp, Homo sapien
tccagctaggcatgggagggaacaa

SEQ ID NO: 6065444 - DNA, 25 bp, Homo sapien
tgcagcgagagcacaaagattctag

SEQ ID NO: 6065445 - DNA, 25 bp, Homo sapien
tttcactttgccaaacaccacatgc

SEQ ID NO: 6065446 - DNA, 25 bp, Homo sapien
tcaaacttattcgagttgtccacag

SEQ ID NO: 6065447 - DNA, 25 bp, Homo sapien
ttctaggatactgcgagcaaatggg

SEQ ID NO: 6065448 - DNA, 25 bp, Homo sapien
catgggagggaacaaggaaaacatg

SEQ ID NO: 6065449 - DNA, 25 bp, Homo sapien
aaatggatggcgcttccctgaaagc

SEQ ID NO: 6065450 - DNA, 25 bp, Homo sapien
aagttataatcgttccccagaatag

SEQ ID NO: 6065451 - DNA, 25 bp, Homo sapien
tgcagctggttgtcagtctctgggc

SEQ ID NO: 6065452 - DNA, 25 bp, Homo sapien
caagacacagccactcatgaagtgt

SEQ ID NO: 6065453 - DNA, 25 bp, Homo sapien
gccttctatgatctggccctgatag

SEQ ID NO: 6065454 - DNA, 25 bp, Homo sapien
tactggccaaaaggacagcctcacg

SEQ ID NO: 6065455 - DNA, 25 bp, Homo sapien
caggaagaagtgacgtttgacatct

SEQ ID NO: 6065456 - DNA, 25 bp, Homo sapien
gccttgatcaggatgaacgaagcca

SEQ ID NO: 6065457 - DNA, 25 bp, Homo sapien
acatgaataatagggtggacaacac

SEQ ID NO: 6065458 - DNA, 25 bp, Homo sapien
aggactcgggccctacaggaagaag

SEQ ID NO: 6065459 - DNA, 25 bp, Homo sapien
catgaagtgttatgtaatgccacgg

SEQ ID NO: 6065460 - DNA, 25 bp, Homo sapien
gcagtgacctcatgaatggtcccgg

SEQ ID NO: 6065461 - DNA, 25 bp, Homo sapien
taaagacagagatcatccgtgtttc

SEQ ID NO: 6065462 - DNA, 25 bp, Homo sapien
gcgaacctggtggatgctccaaaat

SEQ ID NO: 6065463 - DNA, 25 bp, Homo sapien
tgatggcatacctccttcctgtgaa

SEQ ID NO: 6065464 - DNA, 25 bp, Homo sapien
gctaaaagcaccttctgatccttga

SEQ ID NO: 6065465 - DNA, 25 bp, Homo sapien
tcttcccagcctgagatatctcgtg

SEQ ID NO: 6065466 - DNA, 25 bp, Homo sapien
tcttctcctgtacgcgaacctggtg

SEQ ID NO: 6065467 - DNA, 25 bp, Homo sapien
tatccttggacgcatggctgctgtg

SEQ ID NO: 6065468 - DNA, 25 bp, Homo sapien
tgaccctttaccctttagcagtgga

SEQ ID NO: 6065469 - DNA, 25 bp, Homo sapien
cagactgaccgaagcatctgggagg

SEQ ID NO: 6065470 - DNA, 25 bp, Homo sapien
gatatctcgtggatcagactgaccg

SEQ ID NO: 6065471 - DNA, 25 bp, Homo sapien
tggaacagtcccaagaaggccggat

SEQ ID NO: 6065472 - DNA, 25 bp, Homo sapien
ggtgctggcaccctaagtgggcctt

SEQ ID NO: 6065473 - DNA, 25 bp, Homo sapien
tgtccaccctctccaggctaggccc

SEQ ID NO: 6065474 - DNA, 25 bp, Homo sapien
gaaaggatacttacgggtagacaga

SEQ ID NO: 6065475 - DNA, 25 bp, Homo sapien
ctggaactcaggaaaggatacttac

SEQ ID NO: 6065476 - DNA, 25 bp, Homo sapien
ttatttgttgtgcacctttagaaat

SEQ ID NO: 6065477 - DNA, 25 bp, Homo sapien
tcccaaactcccctgctgacctccc

SEQ ID NO: 6065478 - DNA, 25 bp, Homo sapien
gatacttacgggtagacagaaagat

SEQ ID NO: 6065479 - DNA, 25 bp, Homo sapien
tacgggtagacagaaagattctgca

SEQ ID NO: 6065480 - DNA, 25 bp, Homo sapien
gatagagcttgtgctctaggctgcc

SEQ ID NO: 6065481 - DNA, 25 bp, Homo sapien
gagaggacatcttgtccaccctctc

SEQ ID NO: 6065482 - DNA, 25 bp, Homo sapien
tgctgcatgcacaccgcacgtgaca

SEQ ID NO: 6065483 - DNA, 25 bp, Homo sapien
gctctaggctgcccccctgttcccg

SEQ ID NO: 6065484 - DNA, 25 bp, Homo sapien
ttcccgtgctggctccatgctggtg

SEQ ID NO: 6065485 - DNA, 25 bp, Homo sapien
tcccaggacagcctgtgtgatatgc

SEQ ID NO: 6065486 - DNA, 25 bp, Homo sapien
ttggccattgaagaccctgagagga

SEQ ID NO: 6065487 - DNA, 25 bp, Homo sapien
cgtgacaatccagtctgcctgactc

SEQ ID NO: 6065488 - DNA, 25 bp, Homo sapien
tcatgtttcccaggagctctgaagg

SEQ ID NO: 6065489 - DNA, 25 bp, Homo sapien
acaagctgctgcatgcacaccgcac

SEQ ID NO: 6065490 - DNA, 25 bp, Homo sapien
ccaagtcagatgacagtcataggct

SEQ ID NO: 6065491 - DNA, 25 bp, Homo sapien
ccaggctaggccctgtctgtgctgc

SEQ ID NO: 6065492 - DNA, 25 bp, Homo sapien
cacgtggggggagaagtggctccca

SEQ ID NO: 6065493 - DNA, 25 bp, Homo sapien
gctgcctggagccagaagaaaaagc

SEQ ID NO: 6065494 - DNA, 25 bp, Homo sapien
ggctgcccccctgttcccgtgctgg

SEQ ID NO: 6065495 - DNA, 25 bp, Homo sapien
ggacacatttattatttgttgtgca

SEQ ID NO: 6065496 - DNA, 25 bp, Homo sapien
agtggctcccaaactcccctgctga

SEQ ID NO: 6065497 - DNA, 25 bp, Homo sapien
gagaagtggctcccaaactcccctg

SEQ ID NO: 6065498 - DNA, 25 bp, Homo sapien
atgcacaccgcacgtgacaatccag

SEQ ID NO: 6065499 - DNA, 25 bp, Homo sapien
aatccagtctgcctgactcccagga

SEQ ID NO: 6065500 - DNA, 25 bp, Homo sapien
ctcaggaaaggatacttacgggtag

SEQ ID NO: 6065501 - DNA, 25 bp, Homo sapien
ttggacttggccattgaagaccctg

SEQ ID NO: 6065502 - DNA, 25 bp, Homo sapien
ccccctgttcccgtgctggctccat

SEQ ID NO: 6065503 - DNA, 25 bp, Homo sapien
taccttccaagtcagatgacagtca

SEQ ID NO: 6065504 - DNA, 25 bp, Homo sapien
gctccatgctggtgtccagaatgag

SEQ ID NO: 6065505 - DNA, 25 bp, Homo sapien
ccccagctttgcctggaactcagga

SEQ ID NO: 6065506 - DNA, 25 bp, Homo sapien
gaaagattctgcagtgggcttggac

SEQ ID NO: 6065507 - DNA, 25 bp, Homo sapien
cagatgacagtcataggctaacatc

SEQ ID NO: 6065508 - DNA, 25 bp, Homo sapien
caaaatgccattcccatgagggcgc

SEQ ID NO: 6065509 - DNA, 25 bp, Homo sapien
ccactgcagtgcacaagctgctgca

SEQ ID NO: 6065510 - DNA, 25 bp, Homo sapien
gcccctaggtgtaccttccaagtca

SEQ ID NO: 6065511 - DNA, 25 bp, Homo sapien
gacagcctgtgtgatatgcaaaatg

SEQ ID NO: 6065512 - DNA, 25 bp, Homo sapien
agtctgcctgactcccaggacagcc

SEQ ID NO: 6065513 - DNA, 25 bp, Homo sapien
gatatgcaaaatgccattcccatga

SEQ ID NO: 6065514 - DNA, 25 bp, Homo sapien
ccagtgccacgtggggggagaagtg

SEQ ID NO: 6065515 - DNA, 25 bp, Homo sapien
cagtgcacaagctgctgcatgcaca

SEQ ID NO: 6065516 - DNA, 25 bp, Homo sapien
taacatccccagctttgcctggaac

SEQ ID NO: 6065517 - DNA, 25 bp, Homo sapien
ggagctctgaaggacacagatagag

SEQ ID NO: 6065518 - DNA, 25 bp, Homo sapien
tggtccacaggtccactgcagtgca

SEQ ID NO: 6065519 - DNA, 25 bp, Homo sapien
catttattatttgttgtgcaccttt

SEQ ID NO: 6065520 - DNA, 25 bp, Homo sapien
ggcgcatcatgtttcccaggagctc

SEQ ID NO: 6065521 - DNA, 25 bp, Homo sapien
ccctctccaggctaggccctgtctg

SEQ ID NO: 6065522 - DNA, 25 bp, Homo sapien
gacacagatagagcttgtgctctag

SEQ ID NO: 6065523 - DNA, 25 bp, Homo sapien
gcttgtgctctaggctgcccccctg

SEQ ID NO: 6065524 - DNA, 25 bp, Homo sapien
tagaaatggtccacaggtccactgc

SEQ ID NO: 6065525 - DNA, 25 bp, Homo sapien
tcacactccagtgccacgtgggggg

SEQ ID NO: 6065526 - DNA, 25 bp, Homo sapien
ttcccaggagctctgaaggacacag

SEQ ID NO: 6065527 - DNA, 25 bp, Homo sapien
taggccctgtctgtgctgcctggag

SEQ ID NO: 6065528 - DNA, 25 bp, Homo sapien
ccattcccatgagggcgcatcatgt

SEQ ID NO: 6065529 - DNA, 25 bp, Homo sapien
acatcttgtccaccctctccaggct

SEQ ID NO: 6065530 - DNA, 25 bp, Homo sapien
taggtgtaccttccaagtcagatga

SEQ ID NO: 6065531 - DNA, 25 bp, Homo sapien
tagacagaaagattctgcagtgggc

SEQ ID NO: 6065532 - DNA, 25 bp, Homo sapien
tgctggtgtccagaatgagccagtt

SEQ ID NO: 6065533 - DNA, 25 bp, Homo sapien
ctttgcctggaactcaggaaaggat

SEQ ID NO: 6065534 - DNA, 25 bp, Homo sapien
acagtcataggctaacatccccagc

SEQ ID NO: 6065535 - DNA, 25 bp, Homo sapien
tggagccagaagaaaaagcctcgtg

SEQ ID NO: 6065536 - DNA, 25 bp, Homo sapien
gccagttcacactccagtgccacgt

SEQ ID NO: 6065537 - DNA, 25 bp, Homo sapien
ataggctaacatccccagctttgcc

SEQ ID NO: 6065538 - DNA, 25 bp, Homo sapien
cacctttagaaatggtccacaggtc

SEQ ID NO: 6065539 - DNA, 25 bp, Homo sapien
tgtccagaatgagccagttcacact

SEQ ID NO: 6065540 - DNA, 25 bp, Homo sapien
gtgctggctccatgctggtgtccag

SEQ ID NO: 6065541 - DNA, 25 bp, Homo sapien
ttctgcagtgggcttggacttggcc

SEQ ID NO: 6065542 - DNA, 25 bp, Homo sapien
attgaagaccctgagaggacatctt

SEQ ID NO: 6065543 - DNA, 25 bp, Homo sapien
catgagggcgcatcatgtttcccag

SEQ ID NO: 6065544 - DNA, 25 bp, Homo sapien
gttgtgcacctttagaaatggtcca

SEQ ID NO: 6065545 - DNA, 25 bp, Homo sapien
accgcacgtgacaatccagtctgcc

SEQ ID NO: 6065546 - DNA, 25 bp, Homo sapien
gaatgagccagttcacactccagtg

SEQ ID NO: 6065547 - DNA, 25 bp, Homo sapien
ctgctgacctccccccggcccctag

SEQ ID NO: 6065548 - DNA, 25 bp, Homo sapien
gaccctgagaggacatcttgtccac

SEQ ID NO: 6065549 - DNA, 25 bp, Homo sapien
cctgactcccaggacagcctgtgtg

SEQ ID NO: 6065550 - DNA, 25 bp, Homo sapien
ctgaaggacacagatagagcttgtg

SEQ ID NO: 6065551 - DNA, 25 bp, Homo sapien
ctgtgtgatatgcaaaatgccattc

SEQ ID NO: 6065552 - DNA, 25 bp, Homo sapien
acaggtccactgcagtgcacaagct

SEQ ID NO: 6065553 - DNA, 25 bp, Homo sapien
agtgggcttggacttggccattgaa

SEQ ID NO: 6065554 - DNA, 25 bp, Homo sapien
atgacactgtgtaacagcacaggga

SEQ ID NO: 6065555 - DNA, 25 bp, Homo sapien
gacactgtgtaacagcacagggaag

SEQ ID NO: 6065556 - DNA, 25 bp, Homo sapien
agcaacctagaagcgcctcacctag

SEQ ID NO: 6065557 - DNA, 25 bp, Homo sapien
cagcaacctagaagcgcctcaccta

SEQ ID NO: 6065558 - DNA, 25 bp, Homo sapien
ctagaagcgcctcacctagcctctt

SEQ ID NO: 6065559 - DNA, 25 bp, Homo sapien
aatgacactgtgtaacagcacaggg

SEQ ID NO: 6065560 - DNA, 25 bp, Homo sapien
cccagcaacctagaagcgcctcacc

SEQ ID NO: 6065561 - DNA, 25 bp, Homo sapien
tgacactgtgtaacagcacagggaa

SEQ ID NO: 6065562 - DNA, 25 bp, Homo sapien
acaatgacactgtgtaacagcacag

SEQ ID NO: 6065563 - DNA, 25 bp, Homo sapien
ccagcaacctagaagcgcctcacct

SEQ ID NO: 6065564 - DNA, 25 bp, Homo sapien
caatgacactgtgtaacagcacagg

SEQ ID NO: 6065565 - DNA, 25 bp, Homo sapien
cacgcatggtgaaggcgcctcagct

SEQ ID NO: 6065566 - DNA, 25 bp, Homo sapien
ggaattcctccccagtgcttccttg

SEQ ID NO: 6065567 - DNA, 25 bp, Homo sapien
ccaagctgctgggacgcatagtgca

SEQ ID NO: 6065568 - DNA, 25 bp, Homo sapien
gccttgggcctcagagatggcgtcc

SEQ ID NO: 6065569 - DNA, 25 bp, Homo sapien
cccctggcacgcatggtgaaggcgc

SEQ ID NO: 6065570 - DNA, 25 bp, Homo sapien
gaaatggaattcctccccagtgctt

SEQ ID NO: 6065571 - DNA, 25 bp, Homo sapien
gacgcatagtgcaggaatctctccc

SEQ ID NO: 6065572 - DNA, 25 bp, Homo sapien
gcctcaggctgctggttgggctctg

SEQ ID NO: 6065573 - DNA, 25 bp, Homo sapien
tactcacaccagtaggtctggtctg

SEQ ID NO: 6065574 - DNA, 25 bp, Homo sapien
gtcacctgctgcatatgggcctggg

SEQ ID NO: 6065575 - DNA, 25 bp, Homo sapien
ccctgtactcacaccagtaggtctg

SEQ ID NO: 6065576 - DNA, 25 bp, Homo sapien
tcttccatcgagtcctttcccagct

SEQ ID NO: 6065577 - DNA, 25 bp, Homo sapien
cttgctattaagctgggcattctct

SEQ ID NO: 6065578 - DNA, 25 bp, Homo sapien
tcatcgtaagtgaaccagatctgtt

SEQ ID NO: 6065579 - DNA, 25 bp, Homo sapien
taaaagaagatgtacccagtgcaac

SEQ ID NO: 6065580 - DNA, 25 bp, Homo sapien
caagatggctgacaacactaatgag

SEQ ID NO: 6065581 - DNA, 25 bp, Homo sapien
tggaaagctttgaggcagtgcctgc

SEQ ID NO: 6065582 - DNA, 25 bp, Homo sapien
tcctggatacctaacacccgcatat

SEQ ID NO: 6065583 - DNA, 25 bp, Homo sapien
gactttagagtcttcccaagatggc

SEQ ID NO: 6065584 - DNA, 25 bp, Homo sapien
ctcaaagtcataggcatcacagata

SEQ ID NO: 6065585 - DNA, 25 bp, Homo sapien
taatgagccggtaggtatgatctcc

SEQ ID NO: 6065586 - DNA, 25 bp, Homo sapien
gttcacagattctcataccgtcaca

SEQ ID NO: 6065587 - DNA, 25 bp, Homo sapien
cacactgctgagtctgttcagacac

SEQ ID NO: 6065588 - DNA, 25 bp, Homo sapien
ggaattcctgttagacttctgtaga

SEQ ID NO: 6065589 - DNA, 25 bp, Homo sapien
tttttcagattaggtacatagggcc

SEQ ID NO: 6065590 - DNA, 25 bp, Homo sapien
gctgaaccctgtgatgaactgtagt

SEQ ID NO: 6065591 - DNA, 25 bp, Homo sapien
ggccctgacagaacgatatttagtt

SEQ ID NO: 6065592 - DNA, 25 bp, Homo sapien
tccagcaagtgcaagagcagcaact

SEQ ID NO: 6065593 - DNA, 25 bp, Homo sapien
tagacagtggtcttgtactctgctg

SEQ ID NO: 6065594 - DNA, 25 bp, Homo sapien
caccctgtacattccagcaagtgca

SEQ ID NO: 6065595 - DNA, 25 bp, Homo sapien
agtggtcttgtactctgctgaaccc

SEQ ID NO: 6065596 - DNA, 25 bp, Homo sapien
cagcaactttcctatttcaatacaa

SEQ ID NO: 6065597 - DNA, 25 bp, Homo sapien
gaagtcaaaattagacagtggtctt

SEQ ID NO: 6065598 - DNA, 25 bp, Homo sapien
attaggtacatagggccaaccagcc

SEQ ID NO: 6065599 - DNA, 25 bp, Homo sapien
ctgtacattccagcaagtgcaagag

SEQ ID NO: 6065600 - DNA, 25 bp, Homo sapien
tagaggcccttccataaagttaaga

SEQ ID NO: 6065601 - DNA, 25 bp, Homo sapien
tctctgcagtgactatgaagatctg

SEQ ID NO: 6065602 - DNA, 25 bp, Homo sapien
agaaagctggccttgcgactgcctg

SEQ ID NO: 6065603 - DNA, 25 bp, Homo sapien
gatggacagtttctaggagccgtag

SEQ ID NO: 6065604 - DNA, 25 bp, Homo sapien
aaatccaagcaggagctattccgag

SEQ ID NO: 6065605 - DNA, 25 bp, Homo sapien
gagccgtagttgtacctagccagga

SEQ ID NO: 6065606 - DNA, 25 bp, Homo sapien
tgagacattgtattctgcaggccaa

SEQ ID NO: 6065607 - DNA, 25 bp, Homo sapien
tcctgagtcactgtgcagatgtcgc

SEQ ID NO: 6065608 - DNA, 25 bp, Homo sapien
tagttccatgatcggtagggctgcc

SEQ ID NO: 6065609 - DNA, 25 bp, Homo sapien
catccagaatggaacagctcttgtg

SEQ ID NO: 6065610 - DNA, 25 bp, Homo sapien
gctattccgagaaccagagcttcct

SEQ ID NO: 6065611 - DNA, 25 bp, Homo sapien
agggctgcctgtcttaccattgatg

SEQ ID NO: 6065612 - DNA, 25 bp, Homo sapien
tgctcccaggttcctactgcaaagg

SEQ ID NO: 6065613 - DNA, 25 bp, Homo sapien
gcccgggcttgctccagtaagatct

SEQ ID NO: 6065614 - DNA, 25 bp, Homo sapien
ccgggcttgctccagtaagatctgc

SEQ ID NO: 6065615 - DNA, 25 bp, Homo sapien
gggacatccagcgataggacaatgc

SEQ ID NO: 6065616 - DNA, 25 bp, Homo sapien
aatgcgcgagccagggtggcgggtg

SEQ ID NO: 6065617 - DNA, 25 bp, Homo sapien
gacatccagcgataggacaatgcgc

SEQ ID NO: 6065618 - DNA, 25 bp, Homo sapien
gggcttgctccagtaagatctgcaa

SEQ ID NO: 6065619 - DNA, 25 bp, Homo sapien
catccagcgataggacaatgcgcga

SEQ ID NO: 6065620 - DNA, 25 bp, Homo sapien
acatcaggaccatcagcaacagcag

SEQ ID NO: 6065621 - DNA, 25 bp, Homo sapien
tccagcgataggacaatgcgcgagc

SEQ ID NO: 6065622 - DNA, 25 bp, Homo sapien
tgcaagaggccgatggggacatcca

SEQ ID NO: 6065623 - DNA, 25 bp, Homo sapien
cagcgataggacaatgcgcgagcca

SEQ ID NO: 6065624 - DNA, 25 bp, Homo sapien
atcaggaccatcagcaacagcagag

SEQ ID NO: 6065625 - DNA, 25 bp, Homo sapien
tttgttcagggatctttactcattc

SEQ ID NO: 6065626 - DNA, 25 bp, Homo sapien
gggatctttactcattctgtgatga

SEQ ID NO: 6065627 - DNA, 25 bp, Homo sapien
tgggttcacaatgcatttgttcagg

SEQ ID NO: 6065628 - DNA, 25 bp, Homo sapien
tgcatttgttcagggatctttactc

SEQ ID NO: 6065629 - DNA, 25 bp, Homo sapien
cagggatctttactcattctgtgat

SEQ ID NO: 6065630 - DNA, 25 bp, Homo sapien
gggttcacaatgcatttgttcaggg

SEQ ID NO: 6065631 - DNA, 25 bp, Homo sapien
tcagggatctttactcattctgtga

SEQ ID NO: 6065632 - DNA, 25 bp, Homo sapien
tgttcagggatctttactcattctg

SEQ ID NO: 6065633 - DNA, 25 bp, Homo sapien
catttgttcagggatctttactcat

SEQ ID NO: 6065634 - DNA, 25 bp, Homo sapien
gaatgggttcacaatgcatttgttc

SEQ ID NO: 6065635 - DNA, 25 bp, Homo sapien
aatgggttcacaatgcatttgttca

SEQ ID NO: 6065636 - DNA, 25 bp, Homo sapien
ctgggggtctaggagacttgggctt

SEQ ID NO: 6065637 - DNA, 25 bp, Homo sapien
acactctccaagcctcgtgccgaat

SEQ ID NO: 6065638 - DNA, 25 bp, Homo sapien
cacactctccaagcctcgtgccgaa

SEQ ID NO: 6065639 - DNA, 25 bp, Homo sapien
gcacactctccaagcctcgtgccga

SEQ ID NO: 6065640 - DNA, 25 bp, Homo sapien
cactctccaagcctcgtgccgaatc

SEQ ID NO: 6065641 - DNA, 25 bp, Homo sapien
agcacactctccaagcctcgtgccg

SEQ ID NO: 6065642 - DNA, 25 bp, Homo sapien
aaatggcacaggttaatctggaaac

SEQ ID NO: 6065643 - DNA, 25 bp, Homo sapien
tgtggagacagactgatactgtgaa

SEQ ID NO: 6065644 - DNA, 25 bp, Homo sapien
tactgtgaatatgaaagaccgtctt

SEQ ID NO: 6065645 - DNA, 25 bp, Homo sapien
ggcactttgaaatatcattgcatgg

SEQ ID NO: 6065646 - DNA, 25 bp, Homo sapien
gaaaatagtcaccatgtagaaacta

SEQ ID NO: 6065647 - DNA, 25 bp, Homo sapien
ctagtaatgttctccaggattaggc

SEQ ID NO: 6065648 - DNA, 25 bp, Homo sapien
agaccgtcttttgatgccttaagaa

SEQ ID NO: 6065649 - DNA, 25 bp, Homo sapien
aacaaagcggctcaccagcaagaag

SEQ ID NO: 6065650 - DNA, 25 bp, Homo sapien
gcaatagaaagctgtgtggtaagca

SEQ ID NO: 6065651 - DNA, 25 bp, Homo sapien
gacacacgttagtcccataaaagaa

SEQ ID NO: 6065652 - DNA, 25 bp, Homo sapien
gtagaaactagtccaaatcatgagg

SEQ ID NO: 6065653 - DNA, 25 bp, Homo sapien
gattaggctgttctcatacatggag

SEQ ID NO: 6065654 - DNA, 25 bp, Homo sapien
tggaaacgtctgtcagtgagggact

SEQ ID NO: 6065655 - DNA, 25 bp, Homo sapien
catacaatatctcaaggttggcagg

SEQ ID NO: 6065656 - DNA, 25 bp, Homo sapien
aatgaaatgaggcagctctaattgc

SEQ ID NO: 6065657 - DNA, 25 bp, Homo sapien
gaaaagtctcccaatcctgtaccta

SEQ ID NO: 6065658 - DNA, 25 bp, Homo sapien
gcagttacgaaggtgtagtgccagc

SEQ ID NO: 6065659 - DNA, 25 bp, Homo sapien
gaggcagctctaattgcaagtataa

SEQ ID NO: 6065660 - DNA, 25 bp, Homo sapien
aggaaacaatggaaacgtctgtcag

SEQ ID NO: 6065661 - DNA, 25 bp, Homo sapien
cacaaaccaccattggttctaagaa

SEQ ID NO: 6065662 - DNA, 25 bp, Homo sapien
cagtgggaacagcagttacgaaggt

SEQ ID NO: 6065663 - DNA, 25 bp, Homo sapien
agaacagcatgcatagtatgctatt

SEQ ID NO: 6065664 - DNA, 25 bp, Homo sapien
ggtaagttctccgatggtgaggtat

SEQ ID NO: 6065665 - DNA, 25 bp, Homo sapien
tgaggtgaacagacaaccgcttctc

SEQ ID NO: 6065666 - DNA, 25 bp, Homo sapien
agaaatccggttatccctcctgaga

SEQ ID NO: 6065667 - DNA, 25 bp, Homo sapien
atccgaaggcccctgagttgccaaa

SEQ ID NO: 6065668 - DNA, 25 bp, Homo sapien
caaaggtttaagatcatccgaaggc

SEQ ID NO: 6065669 - DNA, 25 bp, Homo sapien
agtgaaatgtgcacagtctgccctc

SEQ ID NO: 6065670 - DNA, 25 bp, Homo sapien
ctgagggcacccgagagatactaac

SEQ ID NO: 6065671 - DNA, 25 bp, Homo sapien
ccaaatgacactgatgtgttgtggc

SEQ ID NO: 6065672 - DNA, 25 bp, Homo sapien
tgagactggcttttggatcaggttg

SEQ ID NO: 6065673 - DNA, 25 bp, Homo sapien
gaactttattcattggaaactgggc

SEQ ID NO: 6065674 - DNA, 25 bp, Homo sapien
cagagacccctcacgaagctgcaag

SEQ ID NO: 6065675 - DNA, 25 bp, Homo sapien
gagggagcctcatcagacgatcaca

SEQ ID NO: 6065676 - DNA, 25 bp, Homo sapien
gcacgtggccccaaagtcaggtgca

SEQ ID NO: 6065677 - DNA, 25 bp, Homo sapien
gcaggaaaaggacctatagatctcc

SEQ ID NO: 6065678 - DNA, 25 bp, Homo sapien
tggcgctggtgtgcggctctctcca

SEQ ID NO: 6065679 - DNA, 25 bp, Homo sapien
taaggcattgctaaggattgggaac

SEQ ID NO: 6065680 - DNA, 25 bp, Homo sapien
tgggaacggctaaagctgtctgctc

SEQ ID NO: 6065681 - DNA, 25 bp, Homo sapien
tacatgtttacaccacacacctgcg

SEQ ID NO: 6065682 - DNA, 25 bp, Homo sapien
ctcggaaaaccgaaggtcagggctg

SEQ ID NO: 6065683 - DNA, 25 bp, Homo sapien
caccaaaggagggtccttatgtact

SEQ ID NO: 6065684 - DNA, 25 bp, Homo sapien
gctatgcgtcccagctaaggcattg

SEQ ID NO: 6065685 - DNA, 25 bp, Homo sapien
ctgcgtggacgagcaccagatcacg

SEQ ID NO: 6065686 - DNA, 25 bp, Homo sapien
acacaaaacactggtaaccgctccg

SEQ ID NO: 6065687 - DNA, 25 bp, Homo sapien
ccttatgtacttgcttacacgaagc

SEQ ID NO: 6065688 - DNA, 25 bp, Homo sapien
tctctctgtacagcacatacatgtt

SEQ ID NO: 6065689 - DNA, 25 bp, Homo sapien
cattcgaacccggatttcaccaaag

SEQ ID NO: 6065690 - DNA, 25 bp, Homo sapien
cattttcatcattggagtgggaaga

SEQ ID NO: 6065691 - DNA, 25 bp, Homo sapien
ggacagcaatcagaggccaacgcta

SEQ ID NO: 6065692 - DNA, 25 bp, Homo sapien
tagctttgaaatagtctccctttac

SEQ ID NO: 6065693 - DNA, 25 bp, Homo sapien
gaaacttaaagctggactaggaaca

SEQ ID NO: 6065694 - DNA, 25 bp, Homo sapien
tgctggcaatatcaccaggtttctc

SEQ ID NO: 6065695 - DNA, 25 bp, Homo sapien
cttgaaagcatccttacccaggcat

SEQ ID NO: 6065696 - DNA, 25 bp, Homo sapien
tccataattaacgaaatcatgaaac

SEQ ID NO: 6065697 - DNA, 25 bp, Homo sapien
tttggacagatttgcccattcagcc

SEQ ID NO: 6065698 - DNA, 25 bp, Homo sapien
aatcagaggccaacgctaagtgctt

SEQ ID NO: 6065699 - DNA, 25 bp, Homo sapien
tggctgctccaagagccctaaagga

SEQ ID NO: 6065700 - DNA, 25 bp, Homo sapien
tagcaaataacaggacccagagcgt

SEQ ID NO: 6065701 - DNA, 25 bp, Homo sapien
gccggttactagctgtttggacaga

SEQ ID NO: 6065702 - DNA, 25 bp, Homo sapien
aggatgccgttgagccggtcgccca

SEQ ID NO: 6065703 - DNA, 25 bp, Homo sapien
gagaggcacttgtttcggcagccgc

SEQ ID NO: 6065704 - DNA, 25 bp, Homo sapien
gatcccggtgcacttgaacgccgga

SEQ ID NO: 6065705 - DNA, 25 bp, Homo sapien
tctgcttgccggtcagcgagtagca

SEQ ID NO: 6065706 - DNA, 25 bp, Homo sapien
ggtcccgcagagtcttcagcactga

SEQ ID NO: 6065707 - DNA, 25 bp, Homo sapien
tcttcagcactgagaggcacttgtt

SEQ ID NO: 6065708 - DNA, 25 bp, Homo sapien
ctatagtttgtccaggcttttggga

SEQ ID NO: 6065709 - DNA, 25 bp, Homo sapien
gaacgccggagtgatttgcaccaca

SEQ ID NO: 6065710 - DNA, 25 bp, Homo sapien
tccgtttctcgtgggtgtttctcgc

SEQ ID NO: 6065711 - DNA, 25 bp, Homo sapien
cttcatgtggtagttgttgagcggc

SEQ ID NO: 6065712 - DNA, 25 bp, Homo sapien
gtttctcgcactcgtacagcagcag

SEQ ID NO: 6065713 - DNA, 25 bp, Homo sapien
gagtagcactccttcgagagcaagt

SEQ ID NO: 6065714 - DNA, 25 bp, Homo sapien
tcacatggggttccgtctccctgca

SEQ ID NO: 6065715 - DNA, 25 bp, Homo sapien
tggggttccgtctccctgcacatac

SEQ ID NO: 6065716 - DNA, 25 bp, Homo sapien
ggttccgtctccctgcacatactgg

SEQ ID NO: 6065717 - DNA, 25 bp, Homo sapien
gggttccgtctccctgcacatactg

SEQ ID NO: 6065718 - DNA, 25 bp, Homo sapien
ggcctgggaagggtgttgtctctag

SEQ ID NO: 6065719 - DNA, 25 bp, Homo sapien
gttccgtctccctgcacatactggg

SEQ ID NO: 6065720 - DNA, 25 bp, Homo sapien
ttccgtctccctgcacatactgggt

SEQ ID NO: 6065721 - DNA, 25 bp, Homo sapien
ctgtcacatggggttccgtctccct

SEQ ID NO: 6065722 - DNA, 25 bp, Homo sapien
atggggttccgtctccctgcacata

SEQ ID NO: 6065723 - DNA, 25 bp, Homo sapien
tccgtctccctgcacatactgggta

SEQ ID NO: 6065724 - DNA, 25 bp, Homo sapien
atgaatgattatgactgggccaggt

SEQ ID NO: 6065725 - DNA, 25 bp, Homo sapien
tccctgcacatactgggtacccagg

SEQ ID NO: 6065726 - DNA, 25 bp, Homo sapien
gaagctcgaggtatatcaagaggcc

SEQ ID NO: 6065727 - DNA, 25 bp, Homo sapien
tgtagcaccaacgtgagccactgaa

SEQ ID NO: 6065728 - DNA, 25 bp, Homo sapien
ggttctgcggtgttaaaggacagct

SEQ ID NO: 6065729 - DNA, 25 bp, Homo sapien
tcccggactcgacgctgcaggtcgt

SEQ ID NO: 6065730 - DNA, 25 bp, Homo sapien
cacagtcagcggtgctgcttctgca

SEQ ID NO: 6065731 - DNA, 25 bp, Homo sapien
tcagcaaggccgagccgagatggca

SEQ ID NO: 6065732 - DNA, 25 bp, Homo sapien
ggccgaggcgtgagcttttccagca

SEQ ID NO: 6065733 - DNA, 25 bp, Homo sapien
tatctattctagctgtgtagcacca

SEQ ID NO: 6065734 - DNA, 25 bp, Homo sapien
tagccgtatatgtacacatctgagg

SEQ ID NO: 6065735 - DNA, 25 bp, Homo sapien
gaccgtccgagggatcgctcttctt

SEQ ID NO: 6065736 - DNA, 25 bp, Homo sapien
ggtatatcaagaggccaggctccca

SEQ ID NO: 6065737 - DNA, 25 bp, Homo sapien
tacaagtactaaatctgaagaacag

SEQ ID NO: 6065738 - DNA, 25 bp, Homo sapien
ggaggtgtgagtatgattgatttct

SEQ ID NO: 6065739 - DNA, 25 bp, Homo sapien
caacatgggaaacatgcgtgtattt

SEQ ID NO: 6065740 - DNA, 25 bp, Homo sapien
ccttggcattccgtgactgtaggca

SEQ ID NO: 6065741 - DNA, 25 bp, Homo sapien
attggctttacagcccaccctaatg

SEQ ID NO: 6065742 - DNA, 25 bp, Homo sapien
cattccgtgactgtaggcagcgtaa

SEQ ID NO: 6065743 - DNA, 25 bp, Homo sapien
tgactgtaggcagcgtaactccaga

SEQ ID NO: 6065744 - DNA, 25 bp, Homo sapien
ccctgtaggtctctgtatgttccca

SEQ ID NO: 6065745 - DNA, 25 bp, Homo sapien
gagttctgcctctgttataaagccc

SEQ ID NO: 6065746 - DNA, 25 bp, Homo sapien
tggacatgactttctgcgggacact

SEQ ID NO: 6065747 - DNA, 25 bp, Homo sapien
ttttttcaccattcacgaggccaga

SEQ ID NO: 6065748 - DNA, 25 bp, Homo sapien
tacagcccaccctaatgcattgtga

SEQ ID NO: 6065749 - DNA, 25 bp, Homo sapien
ttctgcgggacactattcaacatgg

SEQ ID NO: 6065750 - DNA, 25 bp, Homo sapien
gaaccatgctgatgattctagcttg

SEQ ID NO: 6065751 - DNA, 25 bp, Homo sapien
catttgtgtggttaaaggttgccgc

SEQ ID NO: 6065752 - DNA, 25 bp, Homo sapien
tgaccccttgacctttaatgacgca

SEQ ID NO: 6065753 - DNA, 25 bp, Homo sapien
agcccttaactctttgattgccatg

SEQ ID NO: 6065754 - DNA, 25 bp, Homo sapien
tgagattaatagcatgaccccttga

SEQ ID NO: 6065755 - DNA, 25 bp, Homo sapien
ccgcagcagtcaaagggttatagca

SEQ ID NO: 6065756 - DNA, 25 bp, Homo sapien
taaacactgttcaatgcactgatca

SEQ ID NO: 6065757 - DNA, 25 bp, Homo sapien
ttccctaggttaagacacttacagc

SEQ ID NO: 6065758 - DNA, 25 bp, Homo sapien
taaaggttgccgcagcagtcaaagg

SEQ ID NO: 6065759 - DNA, 25 bp, Homo sapien
tagcttggtgagctgttacatagac

SEQ ID NO: 6065760 - DNA, 25 bp, Homo sapien
gctatgaggccttgatttactaata

SEQ ID NO: 6065761 - DNA, 25 bp, Homo sapien
ttacagcagacaaaaactgccccac

SEQ ID NO: 6065762 - DNA, 25 bp, Homo sapien
tgtcacttagactacaaacaaaagg

SEQ ID NO: 6065763 - DNA, 25 bp, Homo sapien
tcagcattctggcttattccatggg

SEQ ID NO: 6065764 - DNA, 25 bp, Homo sapien
gagaactaagatatctttaggccca

SEQ ID NO: 6065765 - DNA, 25 bp, Homo sapien
gaatggcatcagtgtgaggtcacgc

SEQ ID NO: 6065766 - DNA, 25 bp, Homo sapien
ggcaggtacacctgagcacacacca

SEQ ID NO: 6065767 - DNA, 25 bp, Homo sapien
ctctgtacaagttgtcccaactcac

SEQ ID NO: 6065768 - DNA, 25 bp, Homo sapien
cacattgcaggattgagcgatgcag

SEQ ID NO: 6065769 - DNA, 25 bp, Homo sapien
cttgccattgtgttatattctctgt

SEQ ID NO: 6065770 - DNA, 25 bp, Homo sapien
ttaggcccaaatgtacttgccattg

SEQ ID NO: 6065771 - DNA, 25 bp, Homo sapien
cattgtgacacattgcaggattgag

SEQ ID NO: 6065772 - DNA, 25 bp, Homo sapien
agctccacaccattgtgacacattg

SEQ ID NO: 6065773 - DNA, 25 bp, Homo sapien
taccttcacaatgcactattctctc

SEQ ID NO: 6065774 - DNA, 25 bp, Homo sapien
tgccatcaggcacgttgacatcagc

SEQ ID NO: 6065775 - DNA, 25 bp, Homo sapien
tccaggaatccagtgcgggctgcgt

SEQ ID NO: 6065776 - DNA, 25 bp, Homo sapien
cctggcgtccctgcgatggagatca

SEQ ID NO: 6065777 - DNA, 25 bp, Homo sapien
tggcggtgctgccaaacatcatgac

SEQ ID NO: 6065778 - DNA, 25 bp, Homo sapien
gagatcagattcagctgccagaaag

SEQ ID NO: 6065779 - DNA, 25 bp, Homo sapien
cacagcagtgtgaccctcttgaact

SEQ ID NO: 6065780 - DNA, 25 bp, Homo sapien
tccagtgcgggctgcgtcatggact

SEQ ID NO: 6065781 - DNA, 25 bp, Homo sapien
cgtgctccactaggaccttcagggt

SEQ ID NO: 6065782 - DNA, 25 bp, Homo sapien
ggcgatggcggtgctgccaaacatc

SEQ ID NO: 6065783 - DNA, 25 bp, Homo sapien
tggattggaagtgccccggtgccat

SEQ ID NO: 6065784 - DNA, 25 bp, Homo sapien
cgtcatggactggactggtaccgga

SEQ ID NO: 6065785 - DNA, 25 bp, Homo sapien
gatgtccacgaggtcctgagcccct

SEQ ID NO: 6065786 - DNA, 25 bp, Homo sapien
tattataagattgactcacctgaag

SEQ ID NO: 6065787 - DNA, 25 bp, Homo sapien
tctcagcttgagtgctagcagcacc

SEQ ID NO: 6065788 - DNA, 25 bp, Homo sapien
taagattgactcacctgaagattag

SEQ ID NO: 6065789 - DNA, 25 bp, Homo sapien
gtgctagcagcaccgtgacaaaagc

SEQ ID NO: 6065790 - DNA, 25 bp, Homo sapien
tgacttgtgccagcgtctcagcttg

SEQ ID NO: 6065791 - DNA, 25 bp, Homo sapien
cacagtgagtgtgacggtggccgag

SEQ ID NO: 6065792 - DNA, 25 bp, Homo sapien
accacgagatagagtgtgaggcccg

SEQ ID NO: 6065793 - DNA, 25 bp, Homo sapien
cagtgtggtatgatctattataaga

SEQ ID NO: 6065794 - DNA, 25 bp, Homo sapien
tgtgaggcccgagtcgtctgggtct

SEQ ID NO: 6065795 - DNA, 25 bp, Homo sapien
cccaagtcagccaggacatctggga

SEQ ID NO: 6065796 - DNA, 25 bp, Homo sapien
tctgggatgctgtcggccacagcca

SEQ ID NO: 6065797 - DNA, 25 bp, Homo sapien
tcctggacgaccactacaagcctct

SEQ ID NO: 6065798 - DNA, 25 bp, Homo sapien
taccttatcagacatcagaagaggc

SEQ ID NO: 6065799 - DNA, 25 bp, Homo sapien
gcatctaccttatcagacatcagaa

SEQ ID NO: 6065800 - DNA, 25 bp, Homo sapien
ttgatactgcctaggtcagccagga

SEQ ID NO: 6065801 - DNA, 25 bp, Homo sapien
agcccaaccgcaaagagtcctggct

SEQ ID NO: 6065802 - DNA, 25 bp, Homo sapien
acagctctcttcactaaggagcgtg

SEQ ID NO: 6065803 - DNA, 25 bp, Homo sapien
catggtcttcgacggccaccacgag

SEQ ID NO: 6065804 - DNA, 25 bp, Homo sapien
tctcttcactaaggagcgtgtctgc

SEQ ID NO: 6065805 - DNA, 25 bp, Homo sapien
gtgtgcagcccaaccgcaaagagtc

SEQ ID NO: 6065806 - DNA, 25 bp, Homo sapien
caacggtgaccgtgaaggtggctga

SEQ ID NO: 6065807 - DNA, 25 bp, Homo sapien
ggctggccatggtcttcgacggcca

SEQ ID NO: 6065808 - DNA, 25 bp, Homo sapien
cactaaggagcgtgtctgcgtagtt

SEQ ID NO: 6065809 - DNA, 25 bp, Homo sapien
gggtcttgatactgcctaggtcagc

SEQ ID NO: 6065810 - DNA, 25 bp, Homo sapien
tgtgcaggcccactgagaaaagtcc

SEQ ID NO: 6065811 - DNA, 25 bp, Homo sapien
ccacggccacggtgagcgtgacagt

SEQ ID NO: 6065812 - DNA, 25 bp, Homo sapien
accgccaccaccaggtacagagtga

SEQ ID NO: 6065813 - DNA, 25 bp, Homo sapien
tcatagctctcctggttgataagcg

SEQ ID NO: 6065814 - DNA, 25 bp, Homo sapien
cctggttgataagcgtgtcggcata

SEQ ID NO: 6065815 - DNA, 25 bp, Homo sapien
tgactcttacgcgagtctgcagtga

SEQ ID NO: 6065816 - DNA, 25 bp, Homo sapien
aaatcagatgactcttacgcgagtc

SEQ ID NO: 6065817 - DNA, 25 bp, Homo sapien
ccacaaagtgcgagccgggcatgct

SEQ ID NO: 6065818 - DNA, 25 bp, Homo sapien
cgagccgggcatgctcgctaagcca

SEQ ID NO: 6065819 - DNA, 25 bp, Homo sapien
tacagagtgaggtccgaatcgttgg

SEQ ID NO: 6065820 - DNA, 25 bp, Homo sapien
cgtggtcctggacggccaccactag

SEQ ID NO: 6065821 - DNA, 25 bp, Homo sapien
tgccagcgctgcagtctgagcgcca

SEQ ID NO: 6065822 - DNA, 25 bp, Homo sapien
taagaccaacaacgatcaggctggg

SEQ ID NO: 6065823 - DNA, 25 bp, Homo sapien
gatatccactttgtctgcaccagag

SEQ ID NO: 6065824 - DNA, 25 bp, Homo sapien
ttagttctgactgggcacggtggct

SEQ ID NO: 6065825 - DNA, 25 bp, Homo sapien
tccgcgtgaacatcaaaggtgcagg

SEQ ID NO: 6065826 - DNA, 25 bp, Homo sapien
gatgggttaggacagccaagtaccg

SEQ ID NO: 6065827 - DNA, 25 bp, Homo sapien
cctggaagaaggattgcttgagccc

SEQ ID NO: 6065828 - DNA, 25 bp, Homo sapien
taaaacgggatgagaacagcacctg

SEQ ID NO: 6065829 - DNA, 25 bp, Homo sapien
taaatgacagttatgctgcccaggc

SEQ ID NO: 6065830 - DNA, 25 bp, Homo sapien
tctccggcgatgaccatgtgataaa

SEQ ID NO: 6065831 - DNA, 25 bp, Homo sapien
ccttcctggcaggtagggtgtttca

SEQ ID NO: 6065832 - DNA, 25 bp, Homo sapien
tggcacccaccctgatattttaaag

SEQ ID NO: 6065833 - DNA, 25 bp, Homo sapien
tgcagttgcgtctcaggttcctcgt

SEQ ID NO: 6065834 - DNA, 25 bp, Homo sapien
caacagagacatgttagacatttta

SEQ ID NO: 6065835 - DNA, 25 bp, Homo sapien
aacagctctcaactattaacaccca

SEQ ID NO: 6065836 - DNA, 25 bp, Homo sapien
taattatgagtctatccttcccata

SEQ ID NO: 6065837 - DNA, 25 bp, Homo sapien
aagtataaagtaaacagacctcaag

SEQ ID NO: 6065838 - DNA, 25 bp, Homo sapien
tctcacaggtgccaaattttagtaa

SEQ ID NO: 6065839 - DNA, 25 bp, Homo sapien
ttagtaatggtcttatgccaatcca

SEQ ID NO: 6065840 - DNA, 25 bp, Homo sapien
tcagatgaggaccattaatgcacag

SEQ ID NO: 6065841 - DNA, 25 bp, Homo sapien
gttattcatctattttgaaatccca

SEQ ID NO: 6065842 - DNA, 25 bp, Homo sapien
gggttattactaaacagctctcaac

SEQ ID NO: 6065843 - DNA, 25 bp, Homo sapien
caaagcctatgggaacaccatgaag

SEQ ID NO: 6065844 - DNA, 25 bp, Homo sapien
tataagactagacagcaaagcctat

SEQ ID NO: 6065845 - DNA, 25 bp, Homo sapien
aaataaatttctcaacagagacatg

SEQ ID NO: 6065846 - DNA, 25 bp, Homo sapien
catccgctgttcaaccagttttggc

SEQ ID NO: 6065847 - DNA, 25 bp, Homo sapien
ggtccattagagctttgaattccat

SEQ ID NO: 6065848 - DNA, 25 bp, Homo sapien
cgctgctggagtttcaactgtagca

SEQ ID NO: 6065849 - DNA, 25 bp, Homo sapien
taagccacaacttctcttcaaaaag

SEQ ID NO: 6065850 - DNA, 25 bp, Homo sapien
cctagggtcagctcgggctgcaagg

SEQ ID NO: 6065851 - DNA, 25 bp, Homo sapien
ttagagctttgaattccatatcttc

SEQ ID NO: 6065852 - DNA, 25 bp, Homo sapien
tttggcggcatgatcccttggctca

SEQ ID NO: 6065853 - DNA, 25 bp, Homo sapien
gcaaattgggattcctgccagggtg

SEQ ID NO: 6065854 - DNA, 25 bp, Homo sapien
tggagtttcaactgtagcacattct

SEQ ID NO: 6065855 - DNA, 25 bp, Homo sapien
gtggaggcaaattgggattcctgcc

SEQ ID NO: 6065856 - DNA, 25 bp, Homo sapien
attccatatcttcatccgctgttca

SEQ ID NO: 6065857 - DNA, 25 bp, Homo sapien
tcttccatcagaggcccatgtaaac

SEQ ID NO: 6065858 - DNA, 25 bp, Homo sapien
gtccggcgctgctggagtttcaact

SEQ ID NO: 6065859 - DNA, 25 bp, Homo sapien
acattcttccgctcactaagtggag

SEQ ID NO: 6065860 - DNA, 25 bp, Homo sapien
tggctcaccagttcttcccgggtcc

SEQ ID NO: 6065861 - DNA, 25 bp, Homo sapien
tgggattcctgccagggtggaggcc

SEQ ID NO: 6065862 - DNA, 25 bp, Homo sapien
caaaaaggtccattagagctttgaa

SEQ ID NO: 6065863 - DNA, 25 bp, Homo sapien
gtaaactccacataagccacaactt

SEQ ID NO: 6065864 - DNA, 25 bp, Homo sapien
ttcaactgtagcacattcttccgct

SEQ ID NO: 6065865 - DNA, 25 bp, Homo sapien
tctcttcaaaaaggtccattagagc

SEQ ID NO: 6065866 - DNA, 25 bp, Homo sapien
cagggtggaggcctagggtcagctc

SEQ ID NO: 6065867 - DNA, 25 bp, Homo sapien
tcagaggcccatgtaaactccacat

SEQ ID NO: 6065868 - DNA, 25 bp, Homo sapien
tcactaagtggaggcaaattgggat

SEQ ID NO: 6065869 - DNA, 25 bp, Homo sapien
agttcttcccgggtccggcgctgct

SEQ ID NO: 6065870 - DNA, 25 bp, Homo sapien
tatcttcatccgctgttcaaccagt

SEQ ID NO: 6065871 - DNA, 25 bp, Homo sapien
acaacttctcttcaaaaaggtccat

SEQ ID NO: 6065872 - DNA, 25 bp, Homo sapien
gtcagctcgggctgcaaggagagct

SEQ ID NO: 6065873 - DNA, 25 bp, Homo sapien
tagctttcttccatcagaggcccat

SEQ ID NO: 6065874 - DNA, 25 bp, Homo sapien
tcccgggtccggcgctgctggagtt

SEQ ID NO: 6065875 - DNA, 25 bp, Homo sapien
ttccgctcactaagtggaggcaaat

SEQ ID NO: 6065876 - DNA, 25 bp, Homo sapien
aaccagttttggcggcatgatccct

SEQ ID NO: 6065877 - DNA, 25 bp, Homo sapien
atcccttggctcaccagttcttccc

SEQ ID NO: 6065878 - DNA, 25 bp, Homo sapien
ctgttcaaccagttttggcggcatg

SEQ ID NO: 6065879 - DNA, 25 bp, Homo sapien
ctttgaattccatatcttcatccgc

SEQ ID NO: 6065880 - DNA, 25 bp, Homo sapien
ggcatgatcccttggctcaccagtt

SEQ ID NO: 6065881 - DNA, 25 bp, Homo sapien
acagattagctttcttccatcagag

SEQ ID NO: 6065882 - DNA, 25 bp, Homo sapien
gcccatgtaaactccacataagcca

SEQ ID NO: 6065883 - DNA, 25 bp, Homo sapien
tcctgccagggtggaggcctagggt

SEQ ID NO: 6065884 - DNA, 25 bp, Homo sapien
tggaggcctagggtcagctcgggct

SEQ ID NO: 6065885 - DNA, 25 bp, Homo sapien
tgtagcacattcttccgctcactaa

SEQ ID NO: 6065886 - DNA, 25 bp, Homo sapien
tccacataagccacaacttctcttc

SEQ ID NO: 6065887 - DNA, 25 bp, Homo sapien
ttcttccgctcactaagtggaggca

SEQ ID NO: 6065888 - DNA, 25 bp, Homo sapien
tggaggcaaattgggattcctgcca

SEQ ID NO: 6065889 - DNA, 25 bp, Homo sapien
tggctcaccagttcttcccgggtcc

SEQ ID NO: 6065890 - DNA, 25 bp, Homo sapien
gtggaggcaaattgggattcctgcc

SEQ ID NO: 6065891 - DNA, 25 bp, Homo sapien
ctgccagggtggaggcctagggtca

SEQ ID NO: 6065892 - DNA, 25 bp, Homo sapien
tcttccgctcactaagtggaggcaa

SEQ ID NO: 6065893 - DNA, 25 bp, Homo sapien
cattcttccgctcactaagtggagg

SEQ ID NO: 6065894 - DNA, 25 bp, Homo sapien
agtggaggcaaattgggattcctgc

SEQ ID NO: 6065895 - DNA, 25 bp, Homo sapien
taagtggaggcaaattgggattcct

SEQ ID NO: 6065896 - DNA, 25 bp, Homo sapien
attcttccgctcactaagtggaggc

SEQ ID NO: 6065897 - DNA, 25 bp, Homo sapien
ggtggaggcctagggtcagctcggg

SEQ ID NO: 6065898 - DNA, 25 bp, Homo sapien
ctaagtggaggcaaattgggattcc

SEQ ID NO: 6065899 - DNA, 25 bp, Homo sapien
ctgaaaaccaaaccgcggcatgatc

SEQ ID NO: 6065900 - DNA, 25 bp, Homo sapien
tctgaaaaccaaaccgcggcatgat

SEQ ID NO: 6065901 - DNA, 25 bp, Homo sapien
aaaaccaaaccgcggcatgatccct

SEQ ID NO: 6065902 - DNA, 25 bp, Homo sapien
gaaaaccaaaccgcggcatgatccc

SEQ ID NO: 6065903 - DNA, 25 bp, Homo sapien
tgaaaaccaaaccgcggcatgatcc

SEQ ID NO: 6065904 - DNA, 25 bp, Homo sapien
cagcctgtgaaagccagaagagggt

SEQ ID NO: 6065905 - DNA, 25 bp, Homo sapien
tctgggaactcatgcatcaagatgg

SEQ ID NO: 6065906 - DNA, 25 bp, Homo sapien
gctcagaccttccacaggaaaaccc

SEQ ID NO: 6065907 - DNA, 25 bp, Homo sapien
acaggggtaagggaacatgtgacat

SEQ ID NO: 6065908 - DNA, 25 bp, Homo sapien
atgtgacatcctggacatcagacag

SEQ ID NO: 6065909 - DNA, 25 bp, Homo sapien
aatccttcacaggtacaggggtaag

SEQ ID NO: 6065910 - DNA, 25 bp, Homo sapien
gaaaacccctagctcagcctgtgaa

SEQ ID NO: 6065911 - DNA, 25 bp, Homo sapien
aagagggtatctgggaactcatgca

SEQ ID NO: 6065912 - DNA, 25 bp, Homo sapien
tcctggacatcagacaggaagtgcc

SEQ ID NO: 6065913 - DNA, 25 bp, Homo sapien
aggaaaacccctagctcagcctgtg

SEQ ID NO: 6065914 - DNA, 25 bp, Homo sapien
ttccacaggaaaacccctagctcag

SEQ ID NO: 6065915 - DNA, 25 bp, Homo sapien
gggtatctgggaactcatgcatcaa

SEQ ID NO: 6065916 - DNA, 25 bp, Homo sapien
gatggacagtttctaggagccgtag

SEQ ID NO: 6065917 - DNA, 25 bp, Homo sapien
agaaagctggccttgcgactgcctg

SEQ ID NO: 6065918 - DNA, 25 bp, Homo sapien
tctctgcagtgactatgaagatctg

SEQ ID NO: 6065919 - DNA, 25 bp, Homo sapien
gagccgtagttgtacctagccagga

SEQ ID NO: 6065920 - DNA, 25 bp, Homo sapien
tgagacattgtattctgcaggccaa

SEQ ID NO: 6065921 - DNA, 25 bp, Homo sapien
aaatccaagcaggagctattccgag

SEQ ID NO: 6065922 - DNA, 25 bp, Homo sapien
tgctcccaggttcctactgcaaagg

SEQ ID NO: 6065923 - DNA, 25 bp, Homo sapien
catccagaatggaacagctcttgtg

SEQ ID NO: 6065924 - DNA, 25 bp, Homo sapien
gctattccgagaaccagagcttcct

SEQ ID NO: 6065925 - DNA, 25 bp, Homo sapien
tcctgagtcactgtgcagatgtcgc

SEQ ID NO: 6065926 - DNA, 25 bp, Homo sapien
agggctgcctgtcttaccattgatg

SEQ ID NO: 6065927 - DNA, 25 bp, Homo sapien
tagttccatgatcggtagggctgcc

SEQ ID NO: 6065928 - DNA, 25 bp, Homo sapien
ccaggagagcaacagggctggacac

SEQ ID NO: 6065929 - DNA, 25 bp, Homo sapien
tagcaataaatactgcgcagggcag

SEQ ID NO: 6065930 - DNA, 25 bp, Homo sapien
aactctgcttggacccacctctcag

SEQ ID NO: 6065931 - DNA, 25 bp, Homo sapien
caggcagggactgatcaactctgct

SEQ ID NO: 6065932 - DNA, 25 bp, Homo sapien
acagggaggtctcacagtttatcgg

SEQ ID NO: 6065933 - DNA, 25 bp, Homo sapien
aaggcttcagggactagcagattga

SEQ ID NO: 6065934 - DNA, 25 bp, Homo sapien
gcaggcagggactgatcaactctgc

SEQ ID NO: 6065935 - DNA, 25 bp, Homo sapien
cagggaggtctcacagtttatcggg

SEQ ID NO: 6065936 - DNA, 25 bp, Homo sapien
ggttaaaggcttcagggactagcag

SEQ ID NO: 6065937 - DNA, 25 bp, Homo sapien
ttggttaaaggcttcagggactagc

SEQ ID NO: 6065938 - DNA, 25 bp, Homo sapien
agtgtgagcgctcgggcctcacccc

SEQ ID NO: 6065939 - DNA, 25 bp, Homo sapien
ccactgccctgcaagaggtcaggcc

SEQ ID NO: 6065940 - DNA, 25 bp, Homo sapien
gaattgcccgaaccctggaggcgga

SEQ ID NO: 6065941 - DNA, 25 bp, Homo sapien
gataaatggcacttaactgatggtt

SEQ ID NO: 6065942 - DNA, 25 bp, Homo sapien
cacacccagttgatggctttccata

SEQ ID NO: 6065943 - DNA, 25 bp, Homo sapien
taaggcaggagaattgcccgaaccc

SEQ ID NO: 6065944 - DNA, 25 bp, Homo sapien
aagctttgcccataactcactgtgg

SEQ ID NO: 6065945 - DNA, 25 bp, Homo sapien
tggccaattaagaaagagattctcc

SEQ ID NO: 6065946 - DNA, 25 bp, Homo sapien
taactttgtcactagtcctaaggag

SEQ ID NO: 6065947 - DNA, 25 bp, Homo sapien
cactgtggcctggagttacgacacc

SEQ ID NO: 6065948 - DNA, 25 bp, Homo sapien
cccctattttgtgaggattgagaag

SEQ ID NO: 6065949 - DNA, 25 bp, Homo sapien
ggactttcactaaccctctgaccta

SEQ ID NO: 6065950 - DNA, 25 bp, Homo sapien
cgagcagctaggactacaggaggct

SEQ ID NO: 6065951 - DNA, 25 bp, Homo sapien
gatgcttaaggaaaaaagctttgcc

SEQ ID NO: 6065952 - DNA, 25 bp, Homo sapien
tctcattgtacatggcaaccccaaa

SEQ ID NO: 6065953 - DNA, 25 bp, Homo sapien
taaatagctggaacgcttcctgcgt

SEQ ID NO: 6065954 - DNA, 25 bp, Homo sapien
gtaataatcattgctaacagacaga

SEQ ID NO: 6065955 - DNA, 25 bp, Homo sapien
ctgatacttactggcgcgctccgat

SEQ ID NO: 6065956 - DNA, 25 bp, Homo sapien
taaactccctgctgatcactgagag

SEQ ID NO: 6065957 - DNA, 25 bp, Homo sapien
gatgggttgcttggaatctctcttc

SEQ ID NO: 6065958 - DNA, 25 bp, Homo sapien
cgcgctccgataagtatgtacagaa

SEQ ID NO: 6065959 - DNA, 25 bp, Homo sapien
gatagcaatggctcaacatcttcac

SEQ ID NO: 6065960 - DNA, 25 bp, Homo sapien
tacatactgaagaaagatgggttgc

SEQ ID NO: 6065961 - DNA, 25 bp, Homo sapien
ccatgagacaggaatgcatgatagc

SEQ ID NO: 6065962 - DNA, 25 bp, Homo sapien
gagagctgtattccccaggtactta

SEQ ID NO: 6065963 - DNA, 25 bp, Homo sapien
tcttgcagggagtatagcacatgct

SEQ ID NO: 6065964 - DNA, 25 bp, Homo sapien
tccgagtaggtctcggtcccgtagc

SEQ ID NO: 6065965 - DNA, 25 bp, Homo sapien
tccatgcctgaaacaggcgagccgc

SEQ ID NO: 6065966 - DNA, 25 bp, Homo sapien
gcagccactgaaagacgagattcct

SEQ ID NO: 6065967 - DNA, 25 bp, Homo sapien
ctgaggataagctcccacatgggag

SEQ ID NO: 6065968 - DNA, 25 bp, Homo sapien
aactaatggtgaaaacgatgcagcc

SEQ ID NO: 6065969 - DNA, 25 bp, Homo sapien
gatcgattccctcaactaatggtga

SEQ ID NO: 6065970 - DNA, 25 bp, Homo sapien
gcacacgtacgctcaggatttttat

SEQ ID NO: 6065971 - DNA, 25 bp, Homo sapien
ttctcggcagaagcacaagtcattg

SEQ ID NO: 6065972 - DNA, 25 bp, Homo sapien
gctccatgcgtgtcaggtgcactga

SEQ ID NO: 6065973 - DNA, 25 bp, Homo sapien
agcctgcttcgacagcgctagtccg

SEQ ID NO: 6065974 - DNA, 25 bp, Homo sapien
tagaatgaaggcacagatcgattcc

SEQ ID NO: 6065975 - DNA, 25 bp, Homo sapien
ggctctgccccgaatgcggtggcat

SEQ ID NO: 6065976 - DNA, 25 bp, Homo sapien
ggggaggactagagcacacgtacgc

SEQ ID NO: 6065977 - DNA, 25 bp, Homo sapien
tggggaggactagagcacacgtacg

SEQ ID NO: 6065978 - DNA, 25 bp, Homo sapien
tttggggaggactagagcacacgta

SEQ ID NO: 6065979 - DNA, 25 bp, Homo sapien
ttggggaggactagagcacacgtac

SEQ ID NO: 6065980 - DNA, 25 bp, Homo sapien
caggttgtgcatttgcagttgtctc

SEQ ID NO: 6065981 - DNA, 25 bp, Homo sapien
cccgggcacatttggcacagcccgg

SEQ ID NO: 6065982 - DNA, 25 bp, Homo sapien
ccgggcacatttggcacagcccggg

SEQ ID NO: 6065983 - DNA, 25 bp, Homo sapien
ccccgggcacatttggcacagcccg

SEQ ID NO: 6065984 - DNA, 25 bp, Homo sapien
acagttgcaggttgtgcatttgcag

SEQ ID NO: 6065985 - DNA, 25 bp, Homo sapien
aggttgtgcatttgcagttgtctcc

SEQ ID NO: 6065986 - DNA, 25 bp, Homo sapien
cacaacgaggtagagggtaaggtct

SEQ ID NO: 6065987 - DNA, 25 bp, Homo sapien
cagctatggctactgtgagcgtgac

SEQ ID NO: 6065988 - DNA, 25 bp, Homo sapien
ctgtaggaaagctcgaaccccatct

SEQ ID NO: 6065989 - DNA, 25 bp, Homo sapien
cgagctgtgcgcacttcacctgtgt

SEQ ID NO: 6065990 - DNA, 25 bp, Homo sapien
tacacccacaaagtgtgaggtgggc

SEQ ID NO: 6065991 - DNA, 25 bp, Homo sapien
gccagcagcgtgataacgaaggtga

SEQ ID NO: 6065992 - DNA, 25 bp, Homo sapien
gaatcaacagagacgcacaaaggct

SEQ ID NO: 6065993 - DNA, 25 bp, Homo sapien
ccacaaggctctgtttgagcgcatc

SEQ ID NO: 6065994 - DNA, 25 bp, Homo sapien
gatctgaagactgcccaggtcagcc

SEQ ID NO: 6065995 - DNA, 25 bp, Homo sapien
cagatgcgaggagtgccagtgcctc

SEQ ID NO: 6065996 - DNA, 25 bp, Homo sapien
actggtagcccgcagcagatgcgag

SEQ ID NO: 6065997 - DNA, 25 bp, Homo sapien
gcatctctatctagcagggcccgag

SEQ ID NO: 6065998 - DNA, 25 bp, Homo sapien
gctcgctggcctgcacaatgtggta

SEQ ID NO: 6065999 - DNA, 25 bp, Homo sapien
catagaagatcttgtggtgcagcat

SEQ ID NO: 6066000 - DNA, 25 bp, Homo sapien
tgctgtcctccatcacgcacagtga

SEQ ID NO: 6066001 - DNA, 25 bp, Homo sapien
gaagcagacaccaggctgaaagtag

SEQ ID NO: 6066002 - DNA, 25 bp, Homo sapien
tgcgaagattaggtgcagcatgacg

SEQ ID NO: 6066003 - DNA, 25 bp, Homo sapien
gcggtcgctaaggtcaggttgtatc

SEQ ID NO: 6066004 - DNA, 25 bp, Homo sapien
ggagaactccaggtacagtcttgaa

SEQ ID NO: 6066005 - DNA, 25 bp, Homo sapien
gagattgccagaatcaccgcgagga

SEQ ID NO: 6066006 - DNA, 25 bp, Homo sapien
gaatgtgaggcagcacacggattgt

SEQ ID NO: 6066007 - DNA, 25 bp, Homo sapien
gcaaagtcctttcgctgtaggtggg

SEQ ID NO: 6066008 - DNA, 25 bp, Homo sapien
tgaaagtagccctcagtggcgggtc

SEQ ID NO: 6066009 - DNA, 25 bp, Homo sapien
aaggccaacgccactactaggtgaa

SEQ ID NO: 6066010 - DNA, 25 bp, Homo sapien
tgtcggcgaagaccaggtgcaacgt

SEQ ID NO: 6066011 - DNA, 25 bp, Homo sapien
tgtcgcctaaggcacgcgctgtgcg

SEQ ID NO: 6066012 - DNA, 25 bp, Homo sapien
tcatggccacgaggaagagcactga

SEQ ID NO: 6066013 - DNA, 25 bp, Homo sapien
ggtcagtgatatccggcagcacctc

SEQ ID NO: 6066014 - DNA, 25 bp, Homo sapien
caaagtatgtcttgtcctgaactca

SEQ ID NO: 6066015 - DNA, 25 bp, Homo sapien
cacggattcggatttaacacagaga

SEQ ID NO: 6066016 - DNA, 25 bp, Homo sapien
tatgtgcaacacatagattgtagga

SEQ ID NO: 6066017 - DNA, 25 bp, Homo sapien
tggtggctgtccaccgtcacgcacg

SEQ ID NO: 6066018 - DNA, 25 bp, Homo sapien
acctcctgcaagctgtcggcgaaga

SEQ ID NO: 6066019 - DNA, 25 bp, Homo sapien
cgtcgcaggcgcaaggcaatggcca

SEQ ID NO: 6066020 - DNA, 25 bp, Homo sapien
taaactccgtctttcctgtatgtgc

SEQ ID NO: 6066021 - DNA, 25 bp, Homo sapien
ccagatgaatcaccgcaaagtatgt

SEQ ID NO: 6066022 - DNA, 25 bp, Homo sapien
ccgcctccgcgcgactcggcggcgg

SEQ ID NO: 6066023 - DNA, 25 bp, Homo sapien
cgcgcgactcggcggcggcagggaa

SEQ ID NO: 6066024 - DNA, 25 bp, Homo sapien
tgggttacgggtgaagctgaatctt

SEQ ID NO: 6066025 - DNA, 25 bp, Homo sapien
tgtcaattttacaaaggcctaccca

SEQ ID NO: 6066026 - DNA, 25 bp, Homo sapien
ctccgcgcgactcggcggcggcagg

SEQ ID NO: 6066027 - DNA, 25 bp, Homo sapien
tccgcgcgactcggcggcggcaggg

SEQ ID NO: 6066028 - DNA, 25 bp, Homo sapien
ttgtgagccaaagatttatttcttc

SEQ ID NO: 6066029 - DNA, 25 bp, Homo sapien
gctgaatcttgaacgcacccaagcc

SEQ ID NO: 6066030 - DNA, 25 bp, Homo sapien
gcgcgactcggcggcggcagggaaa

SEQ ID NO: 6066031 - DNA, 25 bp, Homo sapien
caaaggcctacccattctcctagtt

SEQ ID NO: 6066032 - DNA, 25 bp, Homo sapien
ccgcgcgactcggcggcggcaggga

SEQ ID NO: 6066033 - DNA, 25 bp, Homo sapien
cgcgactcggcggcggcagggaaag

SEQ ID NO: 6066034 - DNA, 25 bp, Homo sapien
gcacaccccttctctggtctgagtg

SEQ ID NO: 6066035 - DNA, 25 bp, Homo sapien
tagcaagcgagtaggcgcatgcaca

SEQ ID NO: 6066036 - DNA, 25 bp, Homo sapien
caatgcagatgctacacagttgggc

SEQ ID NO: 6066037 - DNA, 25 bp, Homo sapien
catgtgctaggataagaaagttcag

SEQ ID NO: 6066038 - DNA, 25 bp, Homo sapien
cacacatgaaagactgggcaatgca

SEQ ID NO: 6066039 - DNA, 25 bp, Homo sapien
taaaaggcataggagagtgaaagca

SEQ ID NO: 6066040 - DNA, 25 bp, Homo sapien
aagttcagtaaaagcatcatgtcct

SEQ ID NO: 6066041 - DNA, 25 bp, Homo sapien
gagaacaaatcctgcatcagccttg

SEQ ID NO: 6066042 - DNA, 25 bp, Homo sapien
tacacttagcactcgtaaaaggcat

SEQ ID NO: 6066043 - DNA, 25 bp, Homo sapien
agctcttaaaggagacatggaacag

SEQ ID NO: 6066044 - DNA, 25 bp, Homo sapien
tccttgaactattgaagcatgtgct

SEQ ID NO: 6066045 - DNA, 25 bp, Homo sapien
gggcaactcttcagctctggccgaa

SEQ ID NO: 6066046 - DNA, 25 bp, Homo sapien
tgatgacacttgctggacggttact

SEQ ID NO: 6066047 - DNA, 25 bp, Homo sapien
aagtctgcgatgctacttagctatg

SEQ ID NO: 6066048 - DNA, 25 bp, Homo sapien
gacggttactaaactctatggcact

SEQ ID NO: 6066049 - DNA, 25 bp, Homo sapien
tgtcggccacggaagcacttcttca

SEQ ID NO: 6066050 - DNA, 25 bp, Homo sapien
gaattgtgcatatggtcatccgtta

SEQ ID NO: 6066051 - DNA, 25 bp, Homo sapien
tggattcatttccagactgtcggcc

SEQ ID NO: 6066052 - DNA, 25 bp, Homo sapien
tatggcactaatgtatgatggattc

SEQ ID NO: 6066053 - DNA, 25 bp, Homo sapien
tcactttgtacgcttaagtctgcga

SEQ ID NO: 6066054 - DNA, 25 bp, Homo sapien
gacttgctattactggaccttgttt

SEQ ID NO: 6066055 - DNA, 25 bp, Homo sapien
gaatactgactaacacaggaaacag

SEQ ID NO: 6066056 - DNA, 25 bp, Homo sapien
aaagtgaggatgtactaagacttgc

SEQ ID NO: 6066057 - DNA, 25 bp, Homo sapien
cactgtcaacagattacttgtgaac

SEQ ID NO: 6066058 - DNA, 25 bp, Homo sapien
taatacgatctgaatacagccacac

SEQ ID NO: 6066059 - DNA, 25 bp, Homo sapien
gaagtgctaaggcaacacaataact

SEQ ID NO: 6066060 - DNA, 25 bp, Homo sapien
gccttttgtaaacacgacagtcact

SEQ ID NO: 6066061 - DNA, 25 bp, Homo sapien
tgtaaacacgacagtcactgtaagc

SEQ ID NO: 6066062 - DNA, 25 bp, Homo sapien
tacataaggtgaacaggaactttga

SEQ ID NO: 6066063 - DNA, 25 bp, Homo sapien
gcatgggaaaggtaacaagtagtaa

SEQ ID NO: 6066064 - DNA, 25 bp, Homo sapien
tatcccgatcagataattaatacga

SEQ ID NO: 6066065 - DNA, 25 bp, Homo sapien
atagaagagctatagaaaataatac

SEQ ID NO: 6066066 - DNA, 25 bp, Homo sapien
tgatcccctgtttcttccaaaggca

SEQ ID NO: 6066067 - DNA, 25 bp, Homo sapien
gcatagatcctaattattgcttgtg

SEQ ID NO: 6066068 - DNA, 25 bp, Homo sapien
tatattttaattggcccattactag

SEQ ID NO: 6066069 - DNA, 25 bp, Homo sapien
acttgaagcttggagtatttgcact

SEQ ID NO: 6066070 - DNA, 25 bp, Homo sapien
tccccatgactctcagtccacgtgg

SEQ ID NO: 6066071 - DNA, 25 bp, Homo sapien
aagcaaagagttccgaacacagcct

SEQ ID NO: 6066072 - DNA, 25 bp, Homo sapien
gctggcctttctctcgctccacact

SEQ ID NO: 6066073 - DNA, 25 bp, Homo sapien
aggctctccctgagtaagcgatttc

SEQ ID NO: 6066074 - DNA, 25 bp, Homo sapien
ccttgcttataacctctgacggctt

SEQ ID NO: 6066075 - DNA, 25 bp, Homo sapien
cctctgacggctttccattgctctt

SEQ ID NO: 6066076 - DNA, 25 bp, Homo sapien
tgggtgagatcactagttctaccat

SEQ ID NO: 6066077 - DNA, 25 bp, Homo sapien
atggccctctatcacacacaccagt

SEQ ID NO: 6066078 - DNA, 25 bp, Homo sapien
tatctgattccagcacgctggcctt

SEQ ID NO: 6066079 - DNA, 25 bp, Homo sapien
caaagagttccgaacacagccttga

SEQ ID NO: 6066080 - DNA, 25 bp, Homo sapien
gaggctgggtgagatcactagttct

SEQ ID NO: 6066081 - DNA, 25 bp, Homo sapien
tgagtaagcgatttccctcctgcag

SEQ ID NO: 6066082 - DNA, 25 bp, Homo sapien
tgaggacgtcatgcgctgcaggatc

SEQ ID NO: 6066083 - DNA, 25 bp, Homo sapien
cgtttgcggaacgtctcacagagca

SEQ ID NO: 6066084 - DNA, 25 bp, Homo sapien
cacgtatgcggctgtgatgaccaca

SEQ ID NO: 6066085 - DNA, 25 bp, Homo sapien
gatgagtctggcatacagccacaca

SEQ ID NO: 6066086 - DNA, 25 bp, Homo sapien
ttcaccgacaggaccaagcgtttgc

SEQ ID NO: 6066087 - DNA, 25 bp, Homo sapien
cacagagcacgatgtacacaaaggg

SEQ ID NO: 6066088 - DNA, 25 bp, Homo sapien
cagctgtagcacatagtagggtgcc

SEQ ID NO: 6066089 - DNA, 25 bp, Homo sapien
cgtctgagcgttgctgacagcgcga

SEQ ID NO: 6066090 - DNA, 25 bp, Homo sapien
ccacagagggcttccggaacttcgt

SEQ ID NO: 6066091 - DNA, 25 bp, Homo sapien
tggcatagcccaagctgatggccgc

SEQ ID NO: 6066092 - DNA, 25 bp, Homo sapien
tacagggtgaaccagtagaggtcag

SEQ ID NO: 6066093 - DNA, 25 bp, Homo sapien
tgtgatgaccacaaaaggcagggca

SEQ ID NO: 6066094 - DNA, 25 bp, Homo sapien
aagagcataaagcaaaggttaaggc

SEQ ID NO: 6066095 - DNA, 25 bp, Homo sapien
acgcgttagttaggagtagcctggc

SEQ ID NO: 6066096 - DNA, 25 bp, Homo sapien
tgtcatgtgcttactctcaggtccc

SEQ ID NO: 6066097 - DNA, 25 bp, Homo sapien
gagcactgacacatcagacacggcg

SEQ ID NO: 6066098 - DNA, 25 bp, Homo sapien
agtgtgctttcccacggcgcgagca

SEQ ID NO: 6066099 - DNA, 25 bp, Homo sapien
tacaagcttccagcggggtccgtga

SEQ ID NO: 6066100 - DNA, 25 bp, Homo sapien
caaaggttaaggctttgatgaaagg

SEQ ID NO: 6066101 - DNA, 25 bp, Homo sapien
taaaacagacacaacgcaagcagac

SEQ ID NO: 6066102 - DNA, 25 bp, Homo sapien
ggctgcggacgtggcatgccttggg

SEQ ID NO: 6066103 - DNA, 25 bp, Homo sapien
tccgtgaaaggcaacgcgttagtta

SEQ ID NO: 6066104 - DNA, 25 bp, Homo sapien
aacgcaagcagacgctgtcatgtgc

SEQ ID NO: 6066105 - DNA, 25 bp, Homo sapien
ggccggagcactgacacatcagaca

SEQ ID NO: 6066106 - DNA, 25 bp, Homo sapien
tgggattacagctgagccactgagc

SEQ ID NO: 6066107 - DNA, 25 bp, Homo sapien
tgttcagtagaagtagggtatcgcc

SEQ ID NO: 6066108 - DNA, 25 bp, Homo sapien
gacctccagtgatctgcccatctag

SEQ ID NO: 6066109 - DNA, 25 bp, Homo sapien
tcttgtgtgaactgagtgagaagtc

SEQ ID NO: 6066110 - DNA, 25 bp, Homo sapien
gagaagtcactcatcatcaaggaga

SEQ ID NO: 6066111 - DNA, 25 bp, Homo sapien
tcaaggagatggtgcaaagccattc

SEQ ID NO: 6066112 - DNA, 25 bp, Homo sapien
tatcgccatgctgggcaggctggtc

SEQ ID NO: 6066113 - DNA, 25 bp, Homo sapien
tcacctccaacactggagatggcat

SEQ ID NO: 6066114 - DNA, 25 bp, Homo sapien
gggttcacctccatgatccaatacc

SEQ ID NO: 6066115 - DNA, 25 bp, Homo sapien
gatcttggctcactggaagccccgc

SEQ ID NO: 6066116 - DNA, 25 bp, Homo sapien
ctgagcccagccctaatttttgtgt

SEQ ID NO: 6066117 - DNA, 25 bp, Homo sapien
tggcctaaacaaccagatcttgtgt

SEQ ID NO: 6066118 - DNA, 25 bp, Homo sapien
cttgaccagcgagaaggtcttccgc

SEQ ID NO: 6066119 - DNA, 25 bp, Homo sapien
gatcacgccctttcttagtcggcct

SEQ ID NO: 6066120 - DNA, 25 bp, Homo sapien
ccagcaccatgatgttgtacggtgt

SEQ ID NO: 6066121 - DNA, 25 bp, Homo sapien
agcgtctcttgtcccagcggcaaag

SEQ ID NO: 6066122 - DNA, 25 bp, Homo sapien
tagtcggcctcttgactgtatttgg

SEQ ID NO: 6066123 - DNA, 25 bp, Homo sapien
tggcatcttgatcaccacttcggag

SEQ ID NO: 6066124 - DNA, 25 bp, Homo sapien
gggatcttgcgccagcgtctcttgt

SEQ ID NO: 6066125 - DNA, 25 bp, Homo sapien
agcgagaaggtcttccgcttggcca

SEQ ID NO: 6066126 - DNA, 25 bp, Homo sapien
tcccacagggtctcgggaacacagt

SEQ ID NO: 6066127 - DNA, 25 bp, Homo sapien
atggcactcagggtccgagccgcct

SEQ ID NO: 6066128 - DNA, 25 bp, Homo sapien
gctttgttgcagagtgcgtagcaca

SEQ ID NO: 6066129 - DNA, 25 bp, Homo sapien
ttgatcaccacttcggagccaggct

SEQ ID NO: 6066130 - DNA, 25 bp, Homo sapien
agttttcagtcacaggatccctggg

SEQ ID NO: 6066131 - DNA, 25 bp, Homo sapien
gatgaaagccaacagaatagccaag

SEQ ID NO: 6066132 - DNA, 25 bp, Homo sapien
gagttctcatctttggaatggccca

SEQ ID NO: 6066133 - DNA, 25 bp, Homo sapien
tggcattgcaaagtgcatagcaggc

SEQ ID NO: 6066134 - DNA, 25 bp, Homo sapien
ctctcatattagaggcaacagcact

SEQ ID NO: 6066135 - DNA, 25 bp, Homo sapien
tcttgcgggctacaatattctgctt

SEQ ID NO: 6066136 - DNA, 25 bp, Homo sapien
cactgactgaggtggagtcattgga

SEQ ID NO: 6066137 - DNA, 25 bp, Homo sapien
gggtcttggtgccaattctgatgca

SEQ ID NO: 6066138 - DNA, 25 bp, Homo sapien
gatgcaaggtgcacaaaaggtgtta

SEQ ID NO: 6066139 - DNA, 25 bp, Homo sapien
tcttcacaatcttgcgggctacaat

SEQ ID NO: 6066140 - DNA, 25 bp, Homo sapien
gatgcatgtttgcttagagttctca

SEQ ID NO: 6066141 - DNA, 25 bp, Homo sapien
ctacctccacggtggtattagttgg

SEQ ID NO: 6066142 - DNA, 25 bp, Homo sapien
cagcaggtgccggaaggtcttttta

SEQ ID NO: 6066143 - DNA, 25 bp, Homo sapien
ccatgacgttgtagggcgtccaggt

SEQ ID NO: 6066144 - DNA, 25 bp, Homo sapien
agcagagccagtagccaatggacca

SEQ ID NO: 6066145 - DNA, 25 bp, Homo sapien
caatggaccacaccgtgtcagggat

SEQ ID NO: 6066146 - DNA, 25 bp, Homo sapien
tggaagtgtccttatcagccacggg

SEQ ID NO: 6066147 - DNA, 25 bp, Homo sapien
tctggcagaaggtgttcaccaggac

SEQ ID NO: 6066148 - DNA, 25 bp, Homo sapien
cagaatggcaaagatcgttcgtgtc

SEQ ID NO: 6066149 - DNA, 25 bp, Homo sapien
taaaggtggcgttgcacagagcata

SEQ ID NO: 6066150 - DNA, 25 bp, Homo sapien
tcattgcctgtctgcttcgtcacaa

SEQ ID NO: 6066151 - DNA, 25 bp, Homo sapien
gcaggcacaatctcaatggctgtca

SEQ ID NO: 6066152 - DNA, 25 bp, Homo sapien
gaacttgcgggccacgttggccgca

SEQ ID NO: 6066153 - DNA, 25 bp, Homo sapien
ttgcgagcgatgctggcgaacttgc

SEQ ID NO: 6066154 - DNA, 25 bp, Homo sapien
acaacagtcacctggcatactggca

SEQ ID NO: 6066155 - DNA, 25 bp, Homo sapien
caacaacagtcacctggcatactgg

SEQ ID NO: 6066156 - DNA, 25 bp, Homo sapien
caacagtcacctggcatactggcac

SEQ ID NO: 6066157 - DNA, 25 bp, Homo sapien
aacaacagtcacctggcatactggc

SEQ ID NO: 6066158 - DNA, 25 bp, Homo sapien
aacaacagtcacctggcatactggc

SEQ ID NO: 6066159 - DNA, 25 bp, Homo sapien
caacagtcacctggcatactggcac

SEQ ID NO: 6066160 - DNA, 25 bp, Homo sapien
caccaggaccatgacgttgtagggc

SEQ ID NO: 6066161 - DNA, 25 bp, Homo sapien
cagtcacctggcatactggcacagc

SEQ ID NO: 6066162 - DNA, 25 bp, Homo sapien
caacaacagtcacctggcatactgg

SEQ ID NO: 6066163 - DNA, 25 bp, Homo sapien
tgacgtagcagagccagtagccaat

SEQ ID NO: 6066164 - DNA, 25 bp, Homo sapien
agtcacctggcatactggcacagca

SEQ ID NO: 6066165 - DNA, 25 bp, Homo sapien
cagctctggcagaaggtgttcacca

SEQ ID NO: 6066166 - DNA, 25 bp, Homo sapien
acaacagtcacctggcatactggca

SEQ ID NO: 6066167 - DNA, 25 bp, Homo sapien
gtcacctggcatactggcacagcag

SEQ ID NO: 6066168 - DNA, 25 bp, Homo sapien
tggaagtgtccttatcagccacggg

SEQ ID NO: 6066169 - DNA, 25 bp, Homo sapien
acagtcacctggcatactggcacag

SEQ ID NO: 6066170 - DNA, 25 bp, Homo sapien
aaccaggaccatgatgttatacggg

SEQ ID NO: 6066171 - DNA, 25 bp, Homo sapien
gggttgacagtgctattgacatagc

SEQ ID NO: 6066172 - DNA, 25 bp, Homo sapien
cagggtgactgggacacacttgtca

SEQ ID NO: 6066173 - DNA, 25 bp, Homo sapien
cctgaaggttctgttgcagagggca

SEQ ID NO: 6066174 - DNA, 25 bp, Homo sapien
ttcgttgaaggttccttggccactg

SEQ ID NO: 6066175 - DNA, 25 bp, Homo sapien
cacttgtcacagaaggtagaaacca

SEQ ID NO: 6066176 - DNA, 25 bp, Homo sapien
caatcggaacttataggccacacat

SEQ ID NO: 6066177 - DNA, 25 bp, Homo sapien
tgactcttgtagaccacttggagga

SEQ ID NO: 6066178 - DNA, 25 bp, Homo sapien
tccttaccctgactcttgtagacca

SEQ ID NO: 6066179 - DNA, 25 bp, Homo sapien
caccttgtgacagccattgttggtc

SEQ ID NO: 6066180 - DNA, 25 bp, Homo sapien
cgtcagcttttaccaccaatcggaa

SEQ ID NO: 6066181 - DNA, 25 bp, Homo sapien
gactaggaccactctctttcgtttg

SEQ ID NO: 6066182 - DNA, 25 bp, Homo sapien
cggaggctggtaaattgtacttttg

SEQ ID NO: 6066183 - DNA, 25 bp, Homo sapien
tgctcaccgttcatattcagaggct

SEQ ID NO: 6066184 - DNA, 25 bp, Homo sapien
tcagaatgtctttgacttggcccag

SEQ ID NO: 6066185 - DNA, 25 bp, Homo sapien
tactatgatggttttagccatcccc

SEQ ID NO: 6066186 - DNA, 25 bp, Homo sapien
gacatttcccttcgttgcttcctgc

SEQ ID NO: 6066187 - DNA, 25 bp, Homo sapien
tgttgcactctccacaacttaagag

SEQ ID NO: 6066188 - DNA, 25 bp, Homo sapien
tcattccctgagtagttctcaccac

SEQ ID NO: 6066189 - DNA, 25 bp, Homo sapien
gctgacagccacaatgctcaccgtt

SEQ ID NO: 6066190 - DNA, 25 bp, Homo sapien
caaaacagtctcaagtatgtgcaca

SEQ ID NO: 6066191 - DNA, 25 bp, Homo sapien
ttcagtctgaaatacggaggctggt

SEQ ID NO: 6066192 - DNA, 25 bp, Homo sapien
gggtagggtcctatgctactgttgc

SEQ ID NO: 6066193 - DNA, 25 bp, Homo sapien
gtagcacctcttattattctgacac

SEQ ID NO: 6066194 - DNA, 25 bp, Homo sapien
tgaagcagcgtacagggatgatcat

SEQ ID NO: 6066195 - DNA, 25 bp, Homo sapien
agtgaagcagcgtacagggatgatc

SEQ ID NO: 6066196 - DNA, 25 bp, Homo sapien
gttgccgacgatcttgccacaagtg

SEQ ID NO: 6066197 - DNA, 25 bp, Homo sapien
gacgatcttgccacaagtgaagcag

SEQ ID NO: 6066198 - DNA, 25 bp, Homo sapien
gcggcagcagtagcgcttcaggccc

SEQ ID NO: 6066199 - DNA, 25 bp, Homo sapien
gccgacgatcttgccacaagtgaag

SEQ ID NO: 6066200 - DNA, 25 bp, Homo sapien
aggtaagcctcccacttgttgccga

SEQ ID NO: 6066201 - DNA, 25 bp, Homo sapien
acaagtgaagcagcgtacagggatg

SEQ ID NO: 6066202 - DNA, 25 bp, Homo sapien
ttgttgccgacgatcttgccacaag

SEQ ID NO: 6066203 - DNA, 25 bp, Homo sapien
gtaagcctcccacttgttgccgacg

SEQ ID NO: 6066204 - DNA, 25 bp, Homo sapien
agccccaggtaagcctcccacttgt

SEQ ID NO: 6066205 - DNA, 25 bp, Homo sapien
cagcagtagcgcttcaggcccaggg

SEQ ID NO: 6066206 - DNA, 25 bp, Homo sapien
tcttcttcttgtcgtccttaggcgg

SEQ ID NO: 6066207 - DNA, 25 bp, Homo sapien
ttcttcttcttgtcgtccttaggcg

SEQ ID NO: 6066208 - DNA, 25 bp, Homo sapien
acacgtagcactggagcttgctgat

SEQ ID NO: 6066209 - DNA, 25 bp, Homo sapien
cgtagcactggagcttgctgatgga

SEQ ID NO: 6066210 - DNA, 25 bp, Homo sapien
ggacacgtagcactggagcttgctg

SEQ ID NO: 6066211 - DNA, 25 bp, Homo sapien
cagggacacgtagcactggagcttg

SEQ ID NO: 6066212 - DNA, 25 bp, Homo sapien
cacgtagcactggagcttgctgatg

SEQ ID NO: 6066213 - DNA, 25 bp, Homo sapien
gggacacgtagcactggagcttgct

SEQ ID NO: 6066214 - DNA, 25 bp, Homo sapien
gacacgtagcactggagcttgctga

SEQ ID NO: 6066215 - DNA, 25 bp, Homo sapien
cacctaaaatgccagggacacgtag

SEQ ID NO: 6066216 - DNA, 25 bp, Homo sapien
acgtagcactggagcttgctgatgg

SEQ ID NO: 6066217 - DNA, 25 bp, Homo sapien
agggacacgtagcactggagcttgc

SEQ ID NO: 6066218 - DNA, 25 bp, Homo sapien
acctaaaatgccagggacacgtagc

SEQ ID NO: 6066219 - DNA, 25 bp, Homo sapien
taaggaaggtatgctagcagtggca

SEQ ID NO: 6066220 - DNA, 25 bp, Homo sapien
gctcctgatcccttggtaagggctc

SEQ ID NO: 6066221 - DNA, 25 bp, Homo sapien
ggtcttgtggacatgttctaagtaa

SEQ ID NO: 6066222 - DNA, 25 bp, Homo sapien
tttccaatggcaaccaatgatcagg

SEQ ID NO: 6066223 - DNA, 25 bp, Homo sapien
ctgtttagtttgtggtcttgtggac

SEQ ID NO: 6066224 - DNA, 25 bp, Homo sapien
ggaaacagtgtctcatccgttgggt

SEQ ID NO: 6066225 - DNA, 25 bp, Homo sapien
ttttcactaaggaaggtatgctagc

SEQ ID NO: 6066226 - DNA, 25 bp, Homo sapien
gcagcatactctgtagcaacagcat

SEQ ID NO: 6066227 - DNA, 25 bp, Homo sapien
cacaggtcagagtgggatccttttc

SEQ ID NO: 6066228 - DNA, 25 bp, Homo sapien
tatccactcccaagtttgcagttct

SEQ ID NO: 6066229 - DNA, 25 bp, Homo sapien
catccgttgggtttattaggtgaat

SEQ ID NO: 6066230 - DNA, 25 bp, Homo sapien
aatttgtcacgtatttccaatggca

SEQ ID NO: 6066231 - DNA, 25 bp, Homo sapien
tggaggccctggagcagccagtggg

SEQ ID NO: 6066232 - DNA, 25 bp, Homo sapien
gaccagcggtccatgaatgaggtca

SEQ ID NO: 6066233 - DNA, 25 bp, Homo sapien
agcccagcccagccctctggctgat

SEQ ID NO: 6066234 - DNA, 25 bp, Homo sapien
ctgctgaccggcatgggacgaccag

SEQ ID NO: 6066235 - DNA, 25 bp, Homo sapien
tcccagcagccctctcctacttggg

SEQ ID NO: 6066236 - DNA, 25 bp, Homo sapien
ccagccacctcaggaagtcggccca

SEQ ID NO: 6066237 - DNA, 25 bp, Homo sapien
aggcaggcatcccttctcgggggct

SEQ ID NO: 6066238 - DNA, 25 bp, Homo sapien
gcaggcctggggggcaccaggtacg

SEQ ID NO: 6066239 - DNA, 25 bp, Homo sapien
tccctgcaccgagggctccaggggg

SEQ ID NO: 6066240 - DNA, 25 bp, Homo sapien
tgggggtggaggccctggagcagcc

SEQ ID NO: 6066241 - DNA, 25 bp, Homo sapien
tggcacctattagtcttttcgcttt

SEQ ID NO: 6066242 - DNA, 25 bp, Homo sapien
ggctgatgccctctcgcctcccagc

SEQ ID NO: 6066243 - DNA, 25 bp, Homo sapien
gtgtctgcagcactgctgaccggca

SEQ ID NO: 6066244 - DNA, 25 bp, Homo sapien
agggctcccacagcccagcccagcc

SEQ ID NO: 6066245 - DNA, 25 bp, Homo sapien
caccaggtacgttctgggaggcagg

SEQ ID NO: 6066246 - DNA, 25 bp, Homo sapien
ctattagtcttttcgctttgcaggg

SEQ ID NO: 6066247 - DNA, 25 bp, Homo sapien
acctcaggaagtcggcccaacctgg

SEQ ID NO: 6066248 - DNA, 25 bp, Homo sapien
atccaagcctggtgttcccagcctg

SEQ ID NO: 6066249 - DNA, 25 bp, Homo sapien
gtggcctcgcatggccttgggcctt

SEQ ID NO: 6066250 - DNA, 25 bp, Homo sapien
agataagaaaaagaaactccggcag

SEQ ID NO: 6066251 - DNA, 25 bp, Homo sapien
accggcatgggacgaccagcggtcc

SEQ ID NO: 6066252 - DNA, 25 bp, Homo sapien
tcaagacctttgggagtgggggaca

SEQ ID NO: 6066253 - DNA, 25 bp, Homo sapien
cagcctggtccttagcaggcctggg

SEQ ID NO: 6066254 - DNA, 25 bp, Homo sapien
acttgggtctgaggacagaagccct

SEQ ID NO: 6066255 - DNA, 25 bp, Homo sapien
gaggtgggggtggaggccctggagc

SEQ ID NO: 6066256 - DNA, 25 bp, Homo sapien
ttctgggaggcaggcatcccttctc

SEQ ID NO: 6066257 - DNA, 25 bp, Homo sapien
caccacatccaagcctggtgttccc

SEQ ID NO: 6066258 - DNA, 25 bp, Homo sapien
ggacagaagccctccctgcaccgag

SEQ ID NO: 6066259 - DNA, 25 bp, Homo sapien
gaagtcggcccaacctggcaccacc

SEQ ID NO: 6066260 - DNA, 25 bp, Homo sapien
agctgctccccccaagcctgcccct

SEQ ID NO: 6066261 - DNA, 25 bp, Homo sapien
ccggcagcccagcaccacatccaag

SEQ ID NO: 6066262 - DNA, 25 bp, Homo sapien
tgcccctcacccacctgccagccac

SEQ ID NO: 6066263 - DNA, 25 bp, Homo sapien
accacggtggcctcgcatggccttg

SEQ ID NO: 6066264 - DNA, 25 bp, Homo sapien
cagccagtggggcaacaggcgacca

SEQ ID NO: 6066265 - DNA, 25 bp, Homo sapien
gcccagcaccacatccaagcctggt

SEQ ID NO: 6066266 - DNA, 25 bp, Homo sapien
caagcctgcccctcacccacctgcc

SEQ ID NO: 6066267 - DNA, 25 bp, Homo sapien
gagtgggggacacatgggtggggca

SEQ ID NO: 6066268 - DNA, 25 bp, Homo sapien
atgggacgaccagcggtccatgaat

SEQ ID NO: 6066269 - DNA, 25 bp, Homo sapien
gaaactccggcagcccagcaccaca

SEQ ID NO: 6066270 - DNA, 25 bp, Homo sapien
gggctggcaaactcaagacctttgg

SEQ ID NO: 6066271 - DNA, 25 bp, Homo sapien
ctggggggcaccaggtacgttctgg

SEQ ID NO: 6066272 - DNA, 25 bp, Homo sapien
gcaaactcaagacctttgggagtgg

SEQ ID NO: 6066273 - DNA, 25 bp, Homo sapien
ctttgggagtgggggacacatgggt

SEQ ID NO: 6066274 - DNA, 25 bp, Homo sapien
tgcctgattactgccccaggcacat

SEQ ID NO: 6066275 - DNA, 25 bp, Homo sapien
tgtcctgtgtctgcagcactgctga

SEQ ID NO: 6066276 - DNA, 25 bp, Homo sapien
ccccaggcacatagggctcccacag

SEQ ID NO: 6066277 - DNA, 25 bp, Homo sapien
tgccctctcgcctcccagcagccct

SEQ ID NO: 6066278 - DNA, 25 bp, Homo sapien
gtacgttctgggaggcaggcatccc

SEQ ID NO: 6066279 - DNA, 25 bp, Homo sapien
atgaatgaggtcaccacggtggcct

SEQ ID NO: 6066280 - DNA, 25 bp, Homo sapien
gaaaaagaaactccggcagcccagc

SEQ ID NO: 6066281 - DNA, 25 bp, Homo sapien
tggggcagctgctccccccaagcct

SEQ ID NO: 6066282 - DNA, 25 bp, Homo sapien
ctggagcagccagtggggcaacagg

SEQ ID NO: 6066283 - DNA, 25 bp, Homo sapien
ctggcaccacccccctggcacctat

SEQ ID NO: 6066284 - DNA, 25 bp, Homo sapien
ccacccccctggcacctattagtct

SEQ ID NO: 6066285 - DNA, 25 bp, Homo sapien
tctcctacttgggtctgaggacaga

SEQ ID NO: 6066286 - DNA, 25 bp, Homo sapien
cagccctctcctacttgggtctgag

SEQ ID NO: 6066287 - DNA, 25 bp, Homo sapien
gctttgcaggggacgttctgtcctg

SEQ ID NO: 6066288 - DNA, 25 bp, Homo sapien
cggtccatgaatgaggtcaccacgg

SEQ ID NO: 6066289 - DNA, 25 bp, Homo sapien
caccgagggctccagggggaggtgg

SEQ ID NO: 6066290 - DNA, 25 bp, Homo sapien
gggacacatgggtggggcagctgct

SEQ ID NO: 6066291 - DNA, 25 bp, Homo sapien
gcctggtgttcccagcctggtcctt

SEQ ID NO: 6066292 - DNA, 25 bp, Homo sapien
gcagcactgctgaccggcatgggac

SEQ ID NO: 6066293 - DNA, 25 bp, Homo sapien
gcacatagggctcccacagcccagc

SEQ ID NO: 6066294 - DNA, 25 bp, Homo sapien
ttctcgggggctggcaaactcaaga

SEQ ID NO: 6066295 - DNA, 25 bp, Homo sapien
tccccccaagcctgcccctcaccca

SEQ ID NO: 6066296 - DNA, 25 bp, Homo sapien
tcacccacctgccagccacctcagg

SEQ ID NO: 6066297 - DNA, 25 bp, Homo sapien
ctcgcctcccagcagccctctccta

SEQ ID NO: 6066298 - DNA, 25 bp, Homo sapien
gaggtcaccacggtggcctcgcatg

SEQ ID NO: 6066299 - DNA, 25 bp, Homo sapien
aagccctccctgcaccgagggctcc

SEQ ID NO: 6066300 - DNA, 25 bp, Homo sapien
ggccttgggccttgcctgattactg

SEQ ID NO: 6066301 - DNA, 25 bp, Homo sapien
agtggggcaacaggcgaccacctcc

SEQ ID NO: 6066302 - DNA, 25 bp, Homo sapien
ccctctggctgatgccctctcgcct

SEQ ID NO: 6066303 - DNA, 25 bp, Homo sapien
caggggacgttctgtcctgtgtctg

SEQ ID NO: 6066304 - DNA, 25 bp, Homo sapien
cacctgccagccacctcaggaagtc

SEQ ID NO: 6066305 - DNA, 25 bp, Homo sapien
cttttcgctttgcaggggacgttct

SEQ ID NO: 6066306 - DNA, 25 bp, Homo sapien
ccaacctggcaccacccccctggca

SEQ ID NO: 6066307 - DNA, 25 bp, Homo sapien
cccctggcacctattagtcttttcg

SEQ ID NO: 6066308 - DNA, 25 bp, Homo sapien
gggccttgcctgattactgccccag

SEQ ID NO: 6066309 - DNA, 25 bp, Homo sapien
tcgcatggccttgggccttgcctga

SEQ ID NO: 6066310 - DNA, 25 bp, Homo sapien
tgttcccagcctggtccttagcagg

SEQ ID NO: 6066311 - DNA, 25 bp, Homo sapien
gcccagccctctggctgatgccctc

SEQ ID NO: 6066312 - DNA, 25 bp, Homo sapien
acgttctgtcctgtgtctgcagcac

SEQ ID NO: 6066313 - DNA, 25 bp, Homo sapien
tccttagcaggcctggggggcacca

SEQ ID NO: 6066314 - DNA, 25 bp, Homo sapien
acatgggtggggcagctgctccccc

SEQ ID NO: 6066315 - DNA, 25 bp, Homo sapien
gtctgaggacagaagccctccctgc

SEQ ID NO: 6066316 - DNA, 25 bp, Homo sapien
attactgccccaggcacatagggct

SEQ ID NO: 6066317 - DNA, 25 bp, Homo sapien
catcccttctcgggggctggcaaac

SEQ ID NO: 6066318 - DNA, 25 bp, Homo sapien
ggttgacacacctgaagaagtgagc

SEQ ID NO: 6066319 - DNA, 25 bp, Homo sapien
tctcagggcttcattggataactcc

SEQ ID NO: 6066320 - DNA, 25 bp, Homo sapien
cacatacagttttaaggcgcacaga

SEQ ID NO: 6066321 - DNA, 25 bp, Homo sapien
ccagtcaataagagtgcgggtcact

SEQ ID NO: 6066322 - DNA, 25 bp, Homo sapien
gtcactggaagatcccttcgtagaa

SEQ ID NO: 6066323 - DNA, 25 bp, Homo sapien
caagccttgcaaaacttagagccag

SEQ ID NO: 6066324 - DNA, 25 bp, Homo sapien
tagagccagttgagcttggttaact

SEQ ID NO: 6066325 - DNA, 25 bp, Homo sapien
gagcttgcacaaatattcttcccgt

SEQ ID NO: 6066326 - DNA, 25 bp, Homo sapien
tagatttccaaagtccgttccagca

SEQ ID NO: 6066327 - DNA, 25 bp, Homo sapien
caagtcagagagtatcctgtgccag

SEQ ID NO: 6066328 - DNA, 25 bp, Homo sapien
tcaatgcaagctatcaagtactcct

SEQ ID NO: 6066329 - DNA, 25 bp, Homo sapien
accatgactttggatgtctttcagc

SEQ ID NO: 6066330 - DNA, 25 bp, Homo sapien
cctgtcatggtttattcagccatgt

SEQ ID NO: 6066331 - DNA, 25 bp, Homo sapien
ggtcctgtcatggtttattcagcca

SEQ ID NO: 6066332 - DNA, 25 bp, Homo sapien
tgtcatggtttattcagccatgtgg

SEQ ID NO: 6066333 - DNA, 25 bp, Homo sapien
catggtttattcagccatgtggtgg

SEQ ID NO: 6066334 - DNA, 25 bp, Homo sapien
gtcatggtttattcagccatgtggt

SEQ ID NO: 6066335 - DNA, 25 bp, Homo sapien
ctgtcatggtttattcagccatgtg

SEQ ID NO: 6066336 - DNA, 25 bp, Homo sapien
gtcctgtcatggtttattcagccat

SEQ ID NO: 6066337 - DNA, 25 bp, Homo sapien
tcatggtttattcagccatgtggtg

SEQ ID NO: 6066338 - DNA, 25 bp, Homo sapien
tcctgtcatggtttattcagccatg

SEQ ID NO: 6066339 - DNA, 25 bp, Homo sapien
cagggttgcattcctctgcagccgc

SEQ ID NO: 6066340 - DNA, 25 bp, Homo sapien
gagggaagcctaaggaccctccaca

SEQ ID NO: 6066341 - DNA, 25 bp, Homo sapien
ggtctgtgcccaacagggttgcatt

SEQ ID NO: 6066342 - DNA, 25 bp, Homo sapien
gctccctccgataggcaggaaggag

SEQ ID NO: 6066343 - DNA, 25 bp, Homo sapien
aaggaggaccgcctgaccttgccca

SEQ ID NO: 6066344 - DNA, 25 bp, Homo sapien
tggagctgtgtcaacctcgtttggg

SEQ ID NO: 6066345 - DNA, 25 bp, Homo sapien
gccagccccagattgcatggtctgt

SEQ ID NO: 6066346 - DNA, 25 bp, Homo sapien
gtcaacctcgtttgggaatactgtc

SEQ ID NO: 6066347 - DNA, 25 bp, Homo sapien
gattgcatggtctgtgcccaacagg

SEQ ID NO: 6066348 - DNA, 25 bp, Homo sapien
tgtccaagccaccaagccatgtggt

SEQ ID NO: 6066349 - DNA, 25 bp, Homo sapien
tcctctggttggtggaagcacggtt

SEQ ID NO: 6066350 - DNA, 25 bp, Homo sapien
tcctccctgagcttgtttgtccaag

SEQ ID NO: 6066351 - DNA, 25 bp, Homo sapien
gatatagtcaaataactatggctgc

SEQ ID NO: 6066352 - DNA, 25 bp, Homo sapien
acctgggacgcacagttgagtcagc

SEQ ID NO: 6066353 - DNA, 25 bp, Homo sapien
aacaacttggtcctgaggatgctga

SEQ ID NO: 6066354 - DNA, 25 bp, Homo sapien
gcagggtttgttggcttgtcttcaa

SEQ ID NO: 6066355 - DNA, 25 bp, Homo sapien
taaccatggctgcacgatccacaat

SEQ ID NO: 6066356 - DNA, 25 bp, Homo sapien
ggcctctccatgcagagttggccca

SEQ ID NO: 6066357 - DNA, 25 bp, Homo sapien
caagccctcggtcaagatatagtca

SEQ ID NO: 6066358 - DNA, 25 bp, Homo sapien
taagtaatgcgcaacactggcctgg

SEQ ID NO: 6066359 - DNA, 25 bp, Homo sapien
acagttgagtcagccagcaccgtgc

SEQ ID NO: 6066360 - DNA, 25 bp, Homo sapien
tccacagttccacaataaccatggc

SEQ ID NO: 6066361 - DNA, 25 bp, Homo sapien
ggctgcacgatccacaattcagaca

SEQ ID NO: 6066362 - DNA, 25 bp, Homo sapien
gacacaccccatggaatgatgagaa

SEQ ID NO: 6066363 - DNA, 25 bp, Homo sapien
cgcaaagccgccattgtcatcctgg

SEQ ID NO: 6066364 - DNA, 25 bp, Homo sapien
ccgcaaagccgccattgtcatcctg

SEQ ID NO: 6066365 - DNA, 25 bp, Homo sapien
tccgcaaagccgccattgtcatcct

SEQ ID NO: 6066366 - DNA, 25 bp, Homo sapien
ttccgcaaagccgccattgtcatcc

SEQ ID NO: 6066367 - DNA, 25 bp, Homo sapien
gcaaagccgccattgtcatcctggc

SEQ ID NO: 6066368 - DNA, 25 bp, Homo sapien
aggcaaaactgtggagtcctagagg

SEQ ID NO: 6066369 - DNA, 25 bp, Homo sapien
tctctcactctaatgtaacatatcc

SEQ ID NO: 6066370 - DNA, 25 bp, Homo sapien
ctgggctaggagttaagagtactgt

SEQ ID NO: 6066371 - DNA, 25 bp, Homo sapien
agagaaactactagactctgctgaa

SEQ ID NO: 6066372 - DNA, 25 bp, Homo sapien
ccttacagagaaactactagactct

SEQ ID NO: 6066373 - DNA, 25 bp, Homo sapien
cagggcacgctaggctgggctagga

SEQ ID NO: 6066374 - DNA, 25 bp, Homo sapien
tctcccatttcttccataagaaagg

SEQ ID NO: 6066375 - DNA, 25 bp, Homo sapien
ttccataagaaaggctccttattct

SEQ ID NO: 6066376 - DNA, 25 bp, Homo sapien
agttaagagtactgtctaaccagtc

SEQ ID NO: 6066377 - DNA, 25 bp, Homo sapien
aaggccgtgcacactgcagacagaa

SEQ ID NO: 6066378 - DNA, 25 bp, Homo sapien
gggcaatctcacagcaatataagga

SEQ ID NO: 6066379 - DNA, 25 bp, Homo sapien
gggttagaacaaggccgtgcacact

SEQ ID NO: 6066380 - DNA, 25 bp, Homo sapien
cattacaaagggaggctgaaggctc

SEQ ID NO: 6066381 - DNA, 25 bp, Homo sapien
tgtgtcagccctgaacagagggcag

SEQ ID NO: 6066382 - DNA, 25 bp, Homo sapien
caggtagttcccaagtgacctagga

SEQ ID NO: 6066383 - DNA, 25 bp, Homo sapien
gcagcattacaaagggaggctgaag

SEQ ID NO: 6066384 - DNA, 25 bp, Homo sapien
gggcttgtgtcagccctgaacagag

SEQ ID NO: 6066385 - DNA, 25 bp, Homo sapien
cagggatgggcaagcctcatgtcca

SEQ ID NO: 6066386 - DNA, 25 bp, Homo sapien
aggaagacaggaggatccaacccca

SEQ ID NO: 6066387 - DNA, 25 bp, Homo sapien
ggctgaaggctcatccctcagggaa

SEQ ID NO: 6066388 - DNA, 25 bp, Homo sapien
tacaggctgtgtaagttggcaggga

SEQ ID NO: 6066389 - DNA, 25 bp, Homo sapien
ccctcaaaatggcatgctcaggcca

SEQ ID NO: 6066390 - DNA, 25 bp, Homo sapien
cctacccctggaccatgaaggctcc

SEQ ID NO: 6066391 - DNA, 25 bp, Homo sapien
tgtctgcacccaactcatggtgctg

SEQ ID NO: 6066392 - DNA, 25 bp, Homo sapien
gtgtgccacttgtgcccttagaaaa

SEQ ID NO: 6066393 - DNA, 25 bp, Homo sapien
caaaggccggagagcaagtgtgcca

SEQ ID NO: 6066394 - DNA, 25 bp, Homo sapien
gaattggttccctcttgccgtagcc

SEQ ID NO: 6066395 - DNA, 25 bp, Homo sapien
tacagctgtttgtcccctgacagag

SEQ ID NO: 6066396 - DNA, 25 bp, Homo sapien
ggctcattggctagaaagatgctaa

SEQ ID NO: 6066397 - DNA, 25 bp, Homo sapien
aaatcttcaaagtgacagtagcagt

SEQ ID NO: 6066398 - DNA, 25 bp, Homo sapien
gaactcactgggattcttcagtacc

SEQ ID NO: 6066399 - DNA, 25 bp, Homo sapien
tgtgcataaatagatatacgtgtgt

SEQ ID NO: 6066400 - DNA, 25 bp, Homo sapien
ggaagcaaactctcacctgtttcag

SEQ ID NO: 6066401 - DNA, 25 bp, Homo sapien
tctaaaaagaatgctgctgaaaggg

SEQ ID NO: 6066402 - DNA, 25 bp, Homo sapien
acatgcctctcccaaaggccggaga

SEQ ID NO: 6066403 - DNA, 25 bp, Homo sapien
tattgggtttatacaaacttgcaag

SEQ ID NO: 6066404 - DNA, 25 bp, Homo sapien
agatggcggtaagagaaggacgagg

SEQ ID NO: 6066405 - DNA, 25 bp, Homo sapien
atggcggtaagagaaggacgaggcc

SEQ ID NO: 6066406 - DNA, 25 bp, Homo sapien
tccacaggagccaagatggcggtaa

SEQ ID NO: 6066407 - DNA, 25 bp, Homo sapien
tggcggtaagagaaggacgaggccc

SEQ ID NO: 6066408 - DNA, 25 bp, Homo sapien
ggcctccacaggagccaagatggcg

SEQ ID NO: 6066409 - DNA, 25 bp, Homo sapien
ccacaggagccaagatggcggtaag

SEQ ID NO: 6066410 - DNA, 25 bp, Homo sapien
caagatggcggtaagagaaggacga

SEQ ID NO: 6066411 - DNA, 25 bp, Homo sapien
aagatggcggtaagagaaggacgag

SEQ ID NO: 6066412 - DNA, 25 bp, Homo sapien
gatggcggtaagagaaggacgaggc

SEQ ID NO: 6066413 - DNA, 25 bp, Homo sapien
gccaagatggcggtaagagaaggac

SEQ ID NO: 6066414 - DNA, 25 bp, Homo sapien
ccaagatggcggtaagagaaggacg

SEQ ID NO: 6066415 - DNA, 25 bp, Homo sapien
cacaggagccaagatggcggtaaga

SEQ ID NO: 6066416 - DNA, 25 bp, Homo sapien
gcttggtccaacctgttagagctac

SEQ ID NO: 6066417 - DNA, 25 bp, Homo sapien
aggacaatgttgtagggagcccaga

SEQ ID NO: 6066418 - DNA, 25 bp, Homo sapien
gtgaagataagcctcacagccctgt

SEQ ID NO: 6066419 - DNA, 25 bp, Homo sapien
taaactgagcttgctcgctcgggag

SEQ ID NO: 6066420 - DNA, 25 bp, Homo sapien
cagcccaggctgtgtatgaaaacta

SEQ ID NO: 6066421 - DNA, 25 bp, Homo sapien
tgactgggtcaccagcccacttgag

SEQ ID NO: 6066422 - DNA, 25 bp, Homo sapien
gaaaatagaacagcatttgcagaag

SEQ ID NO: 6066423 - DNA, 25 bp, Homo sapien
tgaaaactaagccatgtgcacaact

SEQ ID NO: 6066424 - DNA, 25 bp, Homo sapien
catgtgcacaactctgactgggtca

SEQ ID NO: 6066425 - DNA, 25 bp, Homo sapien
ggaccagccccaagatgactatctt

SEQ ID NO: 6066426 - DNA, 25 bp, Homo sapien
tccccagtggatcgggtgtaaactg

SEQ ID NO: 6066427 - DNA, 25 bp, Homo sapien
tagagctactgcaattattcaggcc

SEQ ID NO: 6066428 - DNA, 25 bp, Homo sapien
gcaggaagtggaccggcatcagcat

SEQ ID NO: 6066429 - DNA, 25 bp, Homo sapien
ggacagggtgaacttggtgcggtgg

SEQ ID NO: 6066430 - DNA, 25 bp, Homo sapien
atgttgaagaggaggttcatgatgt

SEQ ID NO: 6066431 - DNA, 25 bp, Homo sapien
tctcagcctcagacagggcggtgtt

SEQ ID NO: 6066432 - DNA, 25 bp, Homo sapien
cagcaggaagtggaccggcatcagc

SEQ ID NO: 6066433 - DNA, 25 bp, Homo sapien
gcgcaggtagtggaagctcctcttg

SEQ ID NO: 6066434 - DNA, 25 bp, Homo sapien
cgcctgggcacgcaggttcttggcc

SEQ ID NO: 6066435 - DNA, 25 bp, Homo sapien
ctgcgcaggtagtggaagctcctct

SEQ ID NO: 6066436 - DNA, 25 bp, Homo sapien
ctctcccgaagaggcgtctctgctg

SEQ ID NO: 6066437 - DNA, 25 bp, Homo sapien
gacgtcgagggacagggtgaacttg

SEQ ID NO: 6066438 - DNA, 25 bp, Homo sapien
acgcaggttcttggccttggcgatg

SEQ ID NO: 6066439 - DNA, 25 bp, Homo sapien
tcagcctcagacagggcggtgttga

SEQ ID NO: 6066440 - DNA, 25 bp, Homo sapien
gaagtttccgccttgtcagtctcag

SEQ ID NO: 6066441 - DNA, 25 bp, Homo sapien
ctcgtctcggcgctttggattgtca

SEQ ID NO: 6066442 - DNA, 25 bp, Homo sapien
gagacagtaccatggtgaaggaccc

SEQ ID NO: 6066443 - DNA, 25 bp, Homo sapien
cagtctcagagcaaacgccttttag

SEQ ID NO: 6066444 - DNA, 25 bp, Homo sapien
cctgggatgcaaaccagtgtttggg

SEQ ID NO: 6066445 - DNA, 25 bp, Homo sapien
ggacactgcccacgttctcagtgga

SEQ ID NO: 6066446 - DNA, 25 bp, Homo sapien
gagcgattgaaccaccggagatgag

SEQ ID NO: 6066447 - DNA, 25 bp, Homo sapien
tttggattgtcacgcaccagaccac

SEQ ID NO: 6066448 - DNA, 25 bp, Homo sapien
gccttttagtctttacagtacagga

SEQ ID NO: 6066449 - DNA, 25 bp, Homo sapien
cagagcctggcaggagacacatgga

SEQ ID NO: 6066450 - DNA, 25 bp, Homo sapien
gagttaagacacacgaggtttgcag

SEQ ID NO: 6066451 - DNA, 25 bp, Homo sapien
caccactctgggtttgagggacaca

SEQ ID NO: 6066452 - DNA, 25 bp, Homo sapien
taagctaccattcacaccaagggtg

SEQ ID NO: 6066453 - DNA, 25 bp, Homo sapien
taaaaggaaggcatcaaattagact

SEQ ID NO: 6066454 - DNA, 25 bp, Homo sapien
gcttgagtttcccagatttttgctc

SEQ ID NO: 6066455 - DNA, 25 bp, Homo sapien
tcagcactgaggataggtgattcaa

SEQ ID NO: 6066456 - DNA, 25 bp, Homo sapien
cctttcacgcgggtaattagtatga

SEQ ID NO: 6066457 - DNA, 25 bp, Homo sapien
gaagactgatactttcagaaattcc

SEQ ID NO: 6066458 - DNA, 25 bp, Homo sapien
gagaggctctctcgtccttcttcct

SEQ ID NO: 6066459 - DNA, 25 bp, Homo sapien
caaatccttgagctaggttgctcac

SEQ ID NO: 6066460 - DNA, 25 bp, Homo sapien
gggtgtgacaccatcgttaccatgc

SEQ ID NO: 6066461 - DNA, 25 bp, Homo sapien
gatttttgctcagaaattgctacta

SEQ ID NO: 6066462 - DNA, 25 bp, Homo sapien
cgttaccatgctactctatcaagaa

SEQ ID NO: 6066463 - DNA, 25 bp, Homo sapien
tagtttgaaccaacagtaccctcag

SEQ ID NO: 6066464 - DNA, 25 bp, Homo sapien
aaaggacacgaggttgcagtactgg

SEQ ID NO: 6066465 - DNA, 25 bp, Homo sapien
acagaatggggttgatggcagcact

SEQ ID NO: 6066466 - DNA, 25 bp, Homo sapien
gctgatctgagcaatctccaaggag

SEQ ID NO: 6066467 - DNA, 25 bp, Homo sapien
aggacaaaggacacgaggttgcagt

SEQ ID NO: 6066468 - DNA, 25 bp, Homo sapien
tggaaaataaatatcgccctacgtg

SEQ ID NO: 6066469 - DNA, 25 bp, Homo sapien
cttggacatgatgttgtacagaatg

SEQ ID NO: 6066470 - DNA, 25 bp, Homo sapien
cacccggtacttcttggacatgatg

SEQ ID NO: 6066471 - DNA, 25 bp, Homo sapien
cacgaggttgcagtactggctgatc

SEQ ID NO: 6066472 - DNA, 25 bp, Homo sapien
gcagtactggctgatctgagcaatc

SEQ ID NO: 6066473 - DNA, 25 bp, Homo sapien
ataaatatcgccctacgtggaaggg

SEQ ID NO: 6066474 - DNA, 25 bp, Homo sapien
tgccacccggtacttcttggacatg

SEQ ID NO: 6066475 - DNA, 25 bp, Homo sapien
tctctgggagaagggttcgaatccc

SEQ ID NO: 6066476 - DNA, 25 bp, Homo sapien
aagcagatggcgaagtagcgctcga

SEQ ID NO: 6066477 - DNA, 25 bp, Homo sapien
tgagcagatcggagaaggccatgct

SEQ ID NO: 6066478 - DNA, 25 bp, Homo sapien
ttccagggccggtactgccagaggc

SEQ ID NO: 6066479 - DNA, 25 bp, Homo sapien
cactgacgaattggaagagtttgca

SEQ ID NO: 6066480 - DNA, 25 bp, Homo sapien
gcccagatgacgaagatgaccagct

SEQ ID NO: 6066481 - DNA, 25 bp, Homo sapien
gaagtagcgctcgacgctcagcgct

SEQ ID NO: 6066482 - DNA, 25 bp, Homo sapien
tgtcccaagggtcggtgccgttctc

SEQ ID NO: 6066483 - DNA, 25 bp, Homo sapien
cgccgaagttccagggccggtactg

SEQ ID NO: 6066484 - DNA, 25 bp, Homo sapien
actgccagaggcgaacgaggtccag

SEQ ID NO: 6066485 - DNA, 25 bp, Homo sapien
tttgcagaggaggtcgccgaagttc

SEQ ID NO: 6066486 - DNA, 25 bp, Homo sapien
tagaggaccgtgagacagaagacag

SEQ ID NO: 6066487 - DNA, 25 bp, Homo sapien
gtgcagctctcactgacgaattgga

SEQ ID NO: 6066488 - DNA, 25 bp, Homo sapien
gagaaaatggacatagctcatggta

SEQ ID NO: 6066489 - DNA, 25 bp, Homo sapien
gatacctgattctacaatggccagt

SEQ ID NO: 6066490 - DNA, 25 bp, Homo sapien
gggcacgggaaccacaatatgggta

SEQ ID NO: 6066491 - DNA, 25 bp, Homo sapien
cagtagagtgaaagaattatgggca

SEQ ID NO: 6066492 - DNA, 25 bp, Homo sapien
tacctcagtggtgtgcggatggcaa

SEQ ID NO: 6066493 - DNA, 25 bp, Homo sapien
tactaggacacagctaatatgggag

SEQ ID NO: 6066494 - DNA, 25 bp, Homo sapien
cagcacaggcgagttttatgacatc

SEQ ID NO: 6066495 - DNA, 25 bp, Homo sapien
tcttgatggaggcaaaatgtgtgca

SEQ ID NO: 6066496 - DNA, 25 bp, Homo sapien
cagtcctatgttcatcactcgggaa

SEQ ID NO: 6066497 - DNA, 25 bp, Homo sapien
caagtgttgagagatttagcttcct

SEQ ID NO: 6066498 - DNA, 25 bp, Homo sapien
taggccaaaacaagcaagatacctg

SEQ ID NO: 6066499 - DNA, 25 bp, Homo sapien
tgattaaacgtgatatcagcacagg

SEQ ID NO: 6066500 - DNA, 25 bp, Homo sapien
caggcgatgaccacgttcccatctg

SEQ ID NO: 6066501 - DNA, 25 bp, Homo sapien
ggcgatgaccacgttcccatctggc

SEQ ID NO: 6066502 - DNA, 25 bp, Homo sapien
aggcgatgaccacgttcccatctgg

SEQ ID NO: 6066503 - DNA, 25 bp, Homo sapien
gcgatgaccacgttcccatctggct

SEQ ID NO: 6066504 - DNA, 25 bp, Homo sapien
gacgtccatcccgtagtagtagaat

SEQ ID NO: 6066505 - DNA, 25 bp, Homo sapien
tgtgaataccttgcgctaccaccac

SEQ ID NO: 6066506 - DNA, 25 bp, Homo sapien
ccatctctctcgcacagaaatacac

SEQ ID NO: 6066507 - DNA, 25 bp, Homo sapien
tagaatcctttggagacagctcccc

SEQ ID NO: 6066508 - DNA, 25 bp, Homo sapien
ataccttgcgctaccaccactggga

SEQ ID NO: 6066509 - DNA, 25 bp, Homo sapien
tagtagaatcctttggagacagctc

SEQ ID NO: 6066510 - DNA, 25 bp, Homo sapien
gtagtagaatcctttggagacagct

SEQ ID NO: 6066511 - DNA, 25 bp, Homo sapien
gtagaatcctttggagacagctccc

SEQ ID NO: 6066512 - DNA, 25 bp, Homo sapien
cgtccatcccgtagtagtagaatcc

SEQ ID NO: 6066513 - DNA, 25 bp, Homo sapien
agtagaatcctttggagacagctcc

SEQ ID NO: 6066514 - DNA, 25 bp, Homo sapien
aataccttgcgctaccaccactggg

SEQ ID NO: 6066515 - DNA, 25 bp, Homo sapien
aaacgtaatctccatctctctcgca

SEQ ID NO: 6066516 - DNA, 25 bp, Homo sapien
gggattgattactcccatccactca

SEQ ID NO: 6066517 - DNA, 25 bp, Homo sapien
ggattgattactcccatccactcag

SEQ ID NO: 6066518 - DNA, 25 bp, Homo sapien
cagtccatggtgaagaactttcctc

SEQ ID NO: 6066519 - DNA, 25 bp, Homo sapien
tgcacctgggaatgagcacctggac

SEQ ID NO: 6066520 - DNA, 25 bp, Homo sapien
gggcctgtagcacccagttcatata

SEQ ID NO: 6066521 - DNA, 25 bp, Homo sapien
cttgcaagaaacttttactgaggcc

SEQ ID NO: 6066522 - DNA, 25 bp, Homo sapien
tccagatgccttgcaagaaactttt

SEQ ID NO: 6066523 - DNA, 25 bp, Homo sapien
tggacctacagccagcaagcagaag

SEQ ID NO: 6066524 - DNA, 25 bp, Homo sapien
tgggaatgagcacctggacctacag

SEQ ID NO: 6066525 - DNA, 25 bp, Homo sapien
tcctctcagaggcttctgtagagct

SEQ ID NO: 6066526 - DNA, 25 bp, Homo sapien
agcacccagttcatatagtagttac

SEQ ID NO: 6066527 - DNA, 25 bp, Homo sapien
tgcgcttaccaccactgggattgat

SEQ ID NO: 6066528 - DNA, 25 bp, Homo sapien
ttgattactcccatccactcaggac

SEQ ID NO: 6066529 - DNA, 25 bp, Homo sapien
tagtagttactaaggtgtatccaga

SEQ ID NO: 6066530 - DNA, 25 bp, Homo sapien
ggtactggcgtcaccagcgggtcat

SEQ ID NO: 6066531 - DNA, 25 bp, Homo sapien
ccaggagttccgctgctgcctgcga

SEQ ID NO: 6066532 - DNA, 25 bp, Homo sapien
atgcgtctcgcagaaagccaggagt

SEQ ID NO: 6066533 - DNA, 25 bp, Homo sapien
ctggcgtcaccagcgggtcatcttt

SEQ ID NO: 6066534 - DNA, 25 bp, Homo sapien
cgggcctcggcaatcttggccatgt

SEQ ID NO: 6066535 - DNA, 25 bp, Homo sapien
ttggcatgcgtctcgcagaaagcca

SEQ ID NO: 6066536 - DNA, 25 bp, Homo sapien
agctgttccaccgtcttgcgggcct

SEQ ID NO: 6066537 - DNA, 25 bp, Homo sapien
tgttccaccgtcttgcgggcctcgg

SEQ ID NO: 6066538 - DNA, 25 bp, Homo sapien
cttcatgcggtcgatgttcacctcc

SEQ ID NO: 6066539 - DNA, 25 bp, Homo sapien
aggagttccgctgctgcctgcgaca

SEQ ID NO: 6066540 - DNA, 25 bp, Homo sapien
tcatctttggcatgcgtctcgcaga

SEQ ID NO: 6066541 - DNA, 25 bp, Homo sapien
tctccgcggcgggtactggcgtcac

SEQ ID NO: 6066542 - DNA, 25 bp, Homo sapien
gaaaccaaagagtagctcaagcccc

SEQ ID NO: 6066543 - DNA, 25 bp, Homo sapien
cacagctatgattacacggatggct

SEQ ID NO: 6066544 - DNA, 25 bp, Homo sapien
aagcgtagagcacagggttcaggca

SEQ ID NO: 6066545 - DNA, 25 bp, Homo sapien
ccggcacaggagaagcctgaggact

SEQ ID NO: 6066546 - DNA, 25 bp, Homo sapien
caattagcttttcgctctggcagga

SEQ ID NO: 6066547 - DNA, 25 bp, Homo sapien
gaacttctgcccaataaaagcgtag

SEQ ID NO: 6066548 - DNA, 25 bp, Homo sapien
caagcaggaccatgttatgaggaat

SEQ ID NO: 6066549 - DNA, 25 bp, Homo sapien
ccgagacagtctggtacttgggttc

SEQ ID NO: 6066550 - DNA, 25 bp, Homo sapien
gcattgtcgttatctgcggtctcac

SEQ ID NO: 6066551 - DNA, 25 bp, Homo sapien
tagaattctgagcttgcaccaaggt

SEQ ID NO: 6066552 - DNA, 25 bp, Homo sapien
tacccaaatttgcagccgtcacaag

SEQ ID NO: 6066553 - DNA, 25 bp, Homo sapien
gacagttttcgtatagccaattagc

SEQ ID NO: 6066554 - DNA, 25 bp, Homo sapien
gcgagagcccaagactggtaactgt

SEQ ID NO: 6066555 - DNA, 25 bp, Homo sapien
gagatcttgcgcctcttgtccttgg

SEQ ID NO: 6066556 - DNA, 25 bp, Homo sapien
gatgaacttgttagccgcatactcc

SEQ ID NO: 6066557 - DNA, 25 bp, Homo sapien
agatggtaatctggcgctccgagag

SEQ ID NO: 6066558 - DNA, 25 bp, Homo sapien
tgccccttgctgtacggaatgcgtt

SEQ ID NO: 6066559 - DNA, 25 bp, Homo sapien
tgtccacaggcaacagggagtcatg

SEQ ID NO: 6066560 - DNA, 25 bp, Homo sapien
caacagggagtcatgtcgcggttct

SEQ ID NO: 6066561 - DNA, 25 bp, Homo sapien
gtcatgtcgcggttctccaggagca

SEQ ID NO: 6066562 - DNA, 25 bp, Homo sapien
ggaatgcgtttcttgcggccgcgac

SEQ ID NO: 6066563 - DNA, 25 bp, Homo sapien
taggttcccggatatcccggataga

SEQ ID NO: 6066564 - DNA, 25 bp, Homo sapien
cccaagactggtaactgtccacagg

SEQ ID NO: 6066565 - DNA, 25 bp, Homo sapien
gatatcccggatagaaggcaaactc

SEQ ID NO: 6066566 - DNA, 25 bp, Homo sapien
tgagctggaccttcgcacctggagg

SEQ ID NO: 6066567 - DNA, 25 bp, Homo sapien
gcttctccgtggctttaagatcttg

SEQ ID NO: 6066568 - DNA, 25 bp, Homo sapien
tccattgcaagtcacaatctgggtc

SEQ ID NO: 6066569 - DNA, 25 bp, Homo sapien
aatctgggtctcagggattataccc

SEQ ID NO: 6066570 - DNA, 25 bp, Homo sapien
tagagttgggcaatatacttcatcc

SEQ ID NO: 6066571 - DNA, 25 bp, Homo sapien
acctgactccacaagaaacaagggc

SEQ ID NO: 6066572 - DNA, 25 bp, Homo sapien
gggattatacccgtcttagtctcga

SEQ ID NO: 6066573 - DNA, 25 bp, Homo sapien
cactttcagggtaaggtggatggtc

SEQ ID NO: 6066574 - DNA, 25 bp, Homo sapien
cagaagatgtgttcgttgagtaaga

SEQ ID NO: 6066575 - DNA, 25 bp, Homo sapien
tgccctttctgatgccgtaatctgc

SEQ ID NO: 6066576 - DNA, 25 bp, Homo sapien
aggaggtgcctctttgcctcatcac

SEQ ID NO: 6066577 - DNA, 25 bp, Homo sapien
tcttagtctcgatcattgctttcac

SEQ ID NO: 6066578 - DNA, 25 bp, Homo sapien
tgcttgaagaacaatattgatagac

SEQ ID NO: 6066579 - DNA, 25 bp, Homo sapien
cctcattgtccaggcacaggcaaac

SEQ ID NO: 6066580 - DNA, 25 bp, Homo sapien
aaggtggagatgatagtttaataac

SEQ ID NO: 6066581 - DNA, 25 bp, Homo sapien
ggtaactatttcacacttgctataa

SEQ ID NO: 6066582 - DNA, 25 bp, Homo sapien
caaatagtaaaacaggtgttgctga

SEQ ID NO: 6066583 - DNA, 25 bp, Homo sapien
tagattccttgtgctaaccacacaa

SEQ ID NO: 6066584 - DNA, 25 bp, Homo sapien
gaaaagtagaattatacaccaccaa

SEQ ID NO: 6066585 - DNA, 25 bp, Homo sapien
tccacacagtaatctactagaaaag

SEQ ID NO: 6066586 - DNA, 25 bp, Homo sapien
gctgaatacagcacccggtagcctc

SEQ ID NO: 6066587 - DNA, 25 bp, Homo sapien
tgttgtgagctcaagagcatttcca

SEQ ID NO: 6066588 - DNA, 25 bp, Homo sapien
tacagcacccggtagcctctatttg

SEQ ID NO: 6066589 - DNA, 25 bp, Homo sapien
aaaccgcagtagtgagctttggtac

SEQ ID NO: 6066590 - DNA, 25 bp, Homo sapien
tttctgactattgtggataggtaaa

SEQ ID NO: 6066591 - DNA, 25 bp, Homo sapien
ctattacagagtgggccaggaacac

SEQ ID NO: 6066592 - DNA, 25 bp, Homo sapien
ttctactgaactattacagagtggg

SEQ ID NO: 6066593 - DNA, 25 bp, Homo sapien
aattaaaatctagcagccatcagca

SEQ ID NO: 6066594 - DNA, 25 bp, Homo sapien
aactattacagagtgggccaggaac

SEQ ID NO: 6066595 - DNA, 25 bp, Homo sapien
ttaatgtttattccacctttgtgtc

SEQ ID NO: 6066596 - DNA, 25 bp, Homo sapien
taaattaaaatctagcagccatcag

SEQ ID NO: 6066597 - DNA, 25 bp, Homo sapien
tactgaactattacagagtgggcca

SEQ ID NO: 6066598 - DNA, 25 bp, Homo sapien
gactattgtggataggtaaaatctg

SEQ ID NO: 6066599 - DNA, 25 bp, Homo sapien
tgaactattacagagtgggccagga

SEQ ID NO: 6066600 - DNA, 25 bp, Homo sapien
tcctggatccttcaccaatgttaca

SEQ ID NO: 6066601 - DNA, 25 bp, Homo sapien
ctgcataaaatggaacaacagaatt

SEQ ID NO: 6066602 - DNA, 25 bp, Homo sapien
caggtgggaaaggttctccacttct

SEQ ID NO: 6066603 - DNA, 25 bp, Homo sapien
tcttcaaatcctgcaatgacagttc

SEQ ID NO: 6066604 - DNA, 25 bp, Homo sapien
tctacaggtgggaaaggttctccac

SEQ ID NO: 6066605 - DNA, 25 bp, Homo sapien
ctataggtcactggcattccttggc

SEQ ID NO: 6066606 - DNA, 25 bp, Homo sapien
tcaaatcctgcaatgacagttctgt

SEQ ID NO: 6066607 - DNA, 25 bp, Homo sapien
ccatgtgatcaaattgcgcccacct

SEQ ID NO: 6066608 - DNA, 25 bp, Homo sapien
ctctataggtcactggcattccttg

SEQ ID NO: 6066609 - DNA, 25 bp, Homo sapien
ttctacaggtgggaaaggttctcca

SEQ ID NO: 6066610 - DNA, 25 bp, Homo sapien
tctcttttgccctgtcaggtaaata

SEQ ID NO: 6066611 - DNA, 25 bp, Homo sapien
catcttcaaatcctgcaatgacagt

SEQ ID NO: 6066612 - DNA, 25 bp, Homo sapien
catgtgatcaaattgcgcccaccta

SEQ ID NO: 6066613 - DNA, 25 bp, Homo sapien
tgtgatcaaattgcgcccacctaga

SEQ ID NO: 6066614 - DNA, 25 bp, Homo sapien
tggccacaggttaaattaaggtaga

SEQ ID NO: 6066615 - DNA, 25 bp, Homo sapien
tcattggcaaactggtgtctgcccc

SEQ ID NO: 6066616 - DNA, 25 bp, Homo sapien
aaatgcatcagaaaaatggcagcca

SEQ ID NO: 6066617 - DNA, 25 bp, Homo sapien
cacagtcacaacctcaaaggccttg

SEQ ID NO: 6066618 - DNA, 25 bp, Homo sapien
cagatgtgttgcttcattggcaaac

SEQ ID NO: 6066619 - DNA, 25 bp, Homo sapien
tggactgcataatcctggcagcccg

SEQ ID NO: 6066620 - DNA, 25 bp, Homo sapien
tggcaggtgtaggaaattttgagac

SEQ ID NO: 6066621 - DNA, 25 bp, Homo sapien
catttataaggtatgattgctcact

SEQ ID NO: 6066622 - DNA, 25 bp, Homo sapien
ttaaggtagaccaagtggactgcat

SEQ ID NO: 6066623 - DNA, 25 bp, Homo sapien
gaggaggttccgagaactcaaggaa

SEQ ID NO: 6066624 - DNA, 25 bp, Homo sapien
ggtctggagccagtctttagatcag

SEQ ID NO: 6066625 - DNA, 25 bp, Homo sapien
aaaatggcagccagatataccagcc

SEQ ID NO: 6066626 - DNA, 25 bp, Homo sapien
aaggcctctcagctgttcctcctcc

SEQ ID NO: 6066627 - DNA, 25 bp, Homo sapien
caggaggcccagctgctgcagtctt

SEQ ID NO: 6066628 - DNA, 25 bp, Homo sapien
cagtcttggttccttggagtcactc

SEQ ID NO: 6066629 - DNA, 25 bp, Homo sapien
ctgctgcagtcttggttccttggag

SEQ ID NO: 6066630 - DNA, 25 bp, Homo sapien
gcccagctgctgcagtcttggttcc

SEQ ID NO: 6066631 - DNA, 25 bp, Homo sapien
gaatccaaggcctctcagctgttcc

SEQ ID NO: 6066632 - DNA, 25 bp, Homo sapien
gctgttcctcctccaggaggcccag

SEQ ID NO: 6066633 - DNA, 25 bp, Homo sapien
tctcagctgttcctcctccaggagg

SEQ ID NO: 6066634 - DNA, 25 bp, Homo sapien
cctcctccaggaggcccagctgctg

SEQ ID NO: 6066635 - DNA, 25 bp, Homo sapien
tgcttggagcgtgggaagttgacgc

SEQ ID NO: 6066636 - DNA, 25 bp, Homo sapien
tgtcccctcgggttttgtctcaggc

SEQ ID NO: 6066637 - DNA, 25 bp, Homo sapien
ggctttaagccgtgagctccatctc

SEQ ID NO: 6066638 - DNA, 25 bp, Homo sapien
tcttcttgatgttggagtcgtcgta

SEQ ID NO: 6066639 - DNA, 25 bp, Homo sapien
acagagggagatccccgtgccttgg

SEQ ID NO: 6066640 - DNA, 25 bp, Homo sapien
atctcgtcgatgtggagccgccggt

SEQ ID NO: 6066641 - DNA, 25 bp, Homo sapien
tgggcccgcgtctctggaggctgtt

SEQ ID NO: 6066642 - DNA, 25 bp, Homo sapien
ctccatctcattccctgggccgcaa

SEQ ID NO: 6066643 - DNA, 25 bp, Homo sapien
ttcctctgtctccatagtcgacggc

SEQ ID NO: 6066644 - DNA, 25 bp, Homo sapien
agatccccgtgccttgggctgcatc

SEQ ID NO: 6066645 - DNA, 25 bp, Homo sapien
agagcttgggctttaagccgtgagc

SEQ ID NO: 6066646 - DNA, 25 bp, Homo sapien
tgtctccatagtcgacggcttgctg

SEQ ID NO: 6066647 - DNA, 25 bp, Homo sapien
ttcacgacgatgattccctgcactc

SEQ ID NO: 6066648 - DNA, 25 bp, Homo sapien
tgtgttcacgacgatgattccctgc

SEQ ID NO: 6066649 - DNA, 25 bp, Homo sapien
gggtcgatgtcacgcacggtgctcc

SEQ ID NO: 6066650 - DNA, 25 bp, Homo sapien
tctgtgttcacgacgatgattccct

SEQ ID NO: 6066651 - DNA, 25 bp, Homo sapien
tgtcacgcacggtgctccgtgcctt

SEQ ID NO: 6066652 - DNA, 25 bp, Homo sapien
tcgttctgggggtcgatgtcacgca

SEQ ID NO: 6066653 - DNA, 25 bp, Homo sapien
tcgatgtcacgcacggtgctccgtg

SEQ ID NO: 6066654 - DNA, 25 bp, Homo sapien
cttctgtgttcacgacgatgattcc

SEQ ID NO: 6066655 - DNA, 25 bp, Homo sapien
catttttcttggagcgaattcgaag

SEQ ID NO: 6066656 - DNA, 25 bp, Homo sapien
tctgcagtcgcttcagtgtctcctc

SEQ ID NO: 6066657 - DNA, 25 bp, Homo sapien
gctctgcagtcgcttcagtgtctcc

SEQ ID NO: 6066658 - DNA, 25 bp, Homo sapien
atgaagctgtgcatgaggctggcat

SEQ ID NO: 6066659 - DNA, 25 bp, Homo sapien
gctgactttcgctggtgagttacaa

SEQ ID NO: 6066660 - DNA, 25 bp, Homo sapien
ttacaagaagatccggcactgctgc

SEQ ID NO: 6066661 - DNA, 25 bp, Homo sapien
tgtatgcttcaacacacttattggg

SEQ ID NO: 6066662 - DNA, 25 bp, Homo sapien
ccaggatctgacagctgtgcaacgt

SEQ ID NO: 6066663 - DNA, 25 bp, Homo sapien
gaaacgtctgaaaatattactacac

SEQ ID NO: 6066664 - DNA, 25 bp, Homo sapien
cagtgtttgccccaactagattatt

SEQ ID NO: 6066665 - DNA, 25 bp, Homo sapien
gaataaatggagaagccgcttgggc

SEQ ID NO: 6066666 - DNA, 25 bp, Homo sapien
gctgtgcaacgtcagaagaaagcat

SEQ ID NO: 6066667 - DNA, 25 bp, Homo sapien
tactacactgaattcaagggtatcc

SEQ ID NO: 6066668 - DNA, 25 bp, Homo sapien
tgtatttagacatattagcagcgta

SEQ ID NO: 6066669 - DNA, 25 bp, Homo sapien
ttccatcaagggtatccgaagatac

SEQ ID NO: 6066670 - DNA, 25 bp, Homo sapien
gggtatccaaaggaacctgacatag

SEQ ID NO: 6066671 - DNA, 25 bp, Homo sapien
atcctgttctcgttctcgggcacca

SEQ ID NO: 6066672 - DNA, 25 bp, Homo sapien
caagcttgtggtcgggccggtggtc

SEQ ID NO: 6066673 - DNA, 25 bp, Homo sapien
atctcatcgatgtggagccgctggc

SEQ ID NO: 6066674 - DNA, 25 bp, Homo sapien
agatgtgatggtctttggccctgga

SEQ ID NO: 6066675 - DNA, 25 bp, Homo sapien
agtttgcactcagcgcggtacttgc

SEQ ID NO: 6066676 - DNA, 25 bp, Homo sapien
tggtgtccagtttgcactcagcgcg

SEQ ID NO: 6066677 - DNA, 25 bp, Homo sapien
gttcttggagcgcgggaagtccaca

SEQ ID NO: 6066678 - DNA, 25 bp, Homo sapien
ttcctgatgtcggagtcgtcatagg

SEQ ID NO: 6066679 - DNA, 25 bp, Homo sapien
ccttgcactcgcaggtcaggttctt

SEQ ID NO: 6066680 - DNA, 25 bp, Homo sapien
cctcagctccggagatgtgatggtc

SEQ ID NO: 6066681 - DNA, 25 bp, Homo sapien
ctgatgtcggagtcgtcatagggca

SEQ ID NO: 6066682 - DNA, 25 bp, Homo sapien
cgcgggaagtccacacggtgctcct

SEQ ID NO: 6066683 - DNA, 25 bp, Homo sapien
gaagcagaagacgttggcttgggct

SEQ ID NO: 6066684 - DNA, 25 bp, Homo sapien
agcagaagacgttggcttgggcttg

SEQ ID NO: 6066685 - DNA, 25 bp, Homo sapien
ggaagcagaagacgttggcttgggc

SEQ ID NO: 6066686 - DNA, 25 bp, Homo sapien
ttgaaggaagcagaagacgttggct

SEQ ID NO: 6066687 - DNA, 25 bp, Homo sapien
gaaggaagcagaagacgttggcttg

SEQ ID NO: 6066688 - DNA, 25 bp, Homo sapien
aagcagaagacgttggcttgggctt

SEQ ID NO: 6066689 - DNA, 25 bp, Homo sapien
tgaaggaagcagaagacgttggctt

SEQ ID NO: 6066690 - DNA, 25 bp, Homo sapien
aggaagcagaagacgttggcttggg

SEQ ID NO: 6066691 - DNA, 25 bp, Homo sapien
aaggaagcagaagacgttggcttgg

SEQ ID NO: 6066692 - DNA, 25 bp, Homo sapien
cacaattccattgtctataccttcc

SEQ ID NO: 6066693 - DNA, 25 bp, Homo sapien
tatcacaggtttctgtacatgcatt

SEQ ID NO: 6066694 - DNA, 25 bp, Homo sapien
gaaaatagttgcaggaggaatgaaa

SEQ ID NO: 6066695 - DNA, 25 bp, Homo sapien
tcctacaagggtataaatatcacag

SEQ ID NO: 6066696 - DNA, 25 bp, Homo sapien
gagaaacatagagattaagctactc

SEQ ID NO: 6066697 - DNA, 25 bp, Homo sapien
tctgtacatgcattggaggtttgct

SEQ ID NO: 6066698 - DNA, 25 bp, Homo sapien
acatgcattggaggtttgctatgcg

SEQ ID NO: 6066699 - DNA, 25 bp, Homo sapien
tggagagaaacatagagattaagct

SEQ ID NO: 6066700 - DNA, 25 bp, Homo sapien
gaaacatagagattaagctactcac

SEQ ID NO: 6066701 - DNA, 25 bp, Homo sapien
aaatatcacaggtttctgtacatgc

SEQ ID NO: 6066702 - DNA, 25 bp, Homo sapien
gattaagctactcacaattccattg

SEQ ID NO: 6066703 - DNA, 25 bp, Homo sapien
tagagattaagctactcacaattcc

SEQ ID NO: 6066704 - DNA, 25 bp, Homo sapien
gaattgcccgaaccctggaggcgga

SEQ ID NO: 6066705 - DNA, 25 bp, Homo sapien
gatgcttaaggaaaaaagctttgcc

SEQ ID NO: 6066706 - DNA, 25 bp, Homo sapien
cccctattttgtgaggattgagaag

SEQ ID NO: 6066707 - DNA, 25 bp, Homo sapien
taaggcaggagaattgcccgaaccc

SEQ ID NO: 6066708 - DNA, 25 bp, Homo sapien
aagctttgcccataactcactgtgg

SEQ ID NO: 6066709 - DNA, 25 bp, Homo sapien
gataaatggcacttaactgatggtt

SEQ ID NO: 6066710 - DNA, 25 bp, Homo sapien
tggccaattaagaaagagattctcc

SEQ ID NO: 6066711 - DNA, 25 bp, Homo sapien
cgagcagctaggactacaggaggct

SEQ ID NO: 6066712 - DNA, 25 bp, Homo sapien
cactgtggcctggagttacgacacc

SEQ ID NO: 6066713 - DNA, 25 bp, Homo sapien
ggactttcactaaccctctgaccta

SEQ ID NO: 6066714 - DNA, 25 bp, Homo sapien
taactttgtcactagtcctaaggag

SEQ ID NO: 6066715 - DNA, 25 bp, Homo sapien
cacacccagttgatggctttccata

SEQ ID NO: 6066716 - DNA, 25 bp, Homo sapien
ttctaggatactgcgagcaaatggg

SEQ ID NO: 6066717 - DNA, 25 bp, Homo sapien
tccagctaggcatgggagggaacaa

SEQ ID NO: 6066718 - DNA, 25 bp, Homo sapien
ctgcaatccagctaggcatgggagg

SEQ ID NO: 6066719 - DNA, 25 bp, Homo sapien
gaaggaatgatctggtggttaagat

SEQ ID NO: 6066720 - DNA, 25 bp, Homo sapien
catgggagggaacaaggaaaacatg

SEQ ID NO: 6066721 - DNA, 25 bp, Homo sapien
tcaaacttattcgagttgtccacag

SEQ ID NO: 6066722 - DNA, 25 bp, Homo sapien
aaagattctaggatactgcgagcaa

SEQ ID NO: 6066723 - DNA, 25 bp, Homo sapien
attctaggatactgcgagcaaatgg

SEQ ID NO: 6066724 - DNA, 25 bp, Homo sapien
cagaaggaatgatctggtggttaag

SEQ ID NO: 6066725 - DNA, 25 bp, Homo sapien
tgcagcgagagcacaaagattctag

SEQ ID NO: 6066726 - DNA, 25 bp, Homo sapien
tttcactttgccaaacaccacatgc

SEQ ID NO: 6066727 - DNA, 25 bp, Homo sapien
atccagctaggcatgggagggaaca

SEQ ID NO: 6066728 - DNA, 25 bp, Homo sapien
ctggagtcgtcggagccgctgtcgg

SEQ ID NO: 6066729 - DNA, 25 bp, Homo sapien
ttcacccagtggtcagcggcagaac

SEQ ID NO: 6066730 - DNA, 25 bp, Homo sapien
tctgctgtaactgcgcgcttcgatg

SEQ ID NO: 6066731 - DNA, 25 bp, Homo sapien
tcagcggcagaacgaccaggctggt

SEQ ID NO: 6066732 - DNA, 25 bp, Homo sapien
tcatctagactgagctggtcggacc

SEQ ID NO: 6066733 - DNA, 25 bp, Homo sapien
cttcgatggggttggggtgcgggtg

SEQ ID NO: 6066734 - DNA, 25 bp, Homo sapien
gctgcccacagttcctgcaatggtg

SEQ ID NO: 6066735 - DNA, 25 bp, Homo sapien
actgaaaccgactgcacttctgaca

SEQ ID NO: 6066736 - DNA, 25 bp, Homo sapien
ggcagaacgaccaggctggtcactc

SEQ ID NO: 6066737 - DNA, 25 bp, Homo sapien
gcgggtgggcgagggggccctgcag

SEQ ID NO: 6066738 - DNA, 25 bp, Homo sapien
gagtagttcacaaatatgaagccat

SEQ ID NO: 6066739 - DNA, 25 bp, Homo sapien
cctctcatgctgcaagctatagtaa

SEQ ID NO: 6066740 - DNA, 25 bp, Homo sapien
aataccagctgccgctcccaacggt

SEQ ID NO: 6066741 - DNA, 25 bp, Homo sapien
acggtacccgggtttcaatctgctg

SEQ ID NO: 6066742 - DNA, 25 bp, Homo sapien
acacccactggggacgagattttca

SEQ ID NO: 6066743 - DNA, 25 bp, Homo sapien
agctggtcggaccagcgcctggagt

SEQ ID NO: 6066744 - DNA, 25 bp, Homo sapien
agaagagctgcccacagttcctgca

SEQ ID NO: 6066745 - DNA, 25 bp, Homo sapien
agtttgcttctgaataccagctgcc

SEQ ID NO: 6066746 - DNA, 25 bp, Homo sapien
gcttgatttctgactgaaaccgact

SEQ ID NO: 6066747 - DNA, 25 bp, Homo sapien
cactggggacgagattttcaggcgc

SEQ ID NO: 6066748 - DNA, 25 bp, Homo sapien
agctgccgctcccaacggtacccgg

SEQ ID NO: 6066749 - DNA, 25 bp, Homo sapien
atagtaacagttctgacagacaccc

SEQ ID NO: 6066750 - DNA, 25 bp, Homo sapien
tgacagacacccactggggacgaga

SEQ ID NO: 6066751 - DNA, 25 bp, Homo sapien
agggggccctgcagatgtgctctgg

SEQ ID NO: 6066752 - DNA, 25 bp, Homo sapien
cagtggtcagcggcagaacgaccag

SEQ ID NO: 6066753 - DNA, 25 bp, Homo sapien
acagaccagctgaacactcggcctc

SEQ ID NO: 6066754 - DNA, 25 bp, Homo sapien
ttggatacacccaacgcggtgacct

SEQ ID NO: 6066755 - DNA, 25 bp, Homo sapien
cccgggtttcaatctgctgtaactg

SEQ ID NO: 6066756 - DNA, 25 bp, Homo sapien
tttctgactgaaaccgactgcactt

SEQ ID NO: 6066757 - DNA, 25 bp, Homo sapien
cagcgcctggagtcgtcggagccgc

SEQ ID NO: 6066758 - DNA, 25 bp, Homo sapien
aatatgaagccatctttctcatcta

SEQ ID NO: 6066759 - DNA, 25 bp, Homo sapien
ctgtcgccgccttcatccttcaccc

SEQ ID NO: 6066760 - DNA, 25 bp, Homo sapien
ggacgagattttcaggcgcttgatt

SEQ ID NO: 6066761 - DNA, 25 bp, Homo sapien
gtctggccctcagagtagttcacaa

SEQ ID NO: 6066762 - DNA, 25 bp, Homo sapien
aacgcggtgacctcggctgggtgcg

SEQ ID NO: 6066763 - DNA, 25 bp, Homo sapien
tcctttcgatcaaaggctgtgtgca

SEQ ID NO: 6066764 - DNA, 25 bp, Homo sapien
tcgactgtcacccacgaggatcctg

SEQ ID NO: 6066765 - DNA, 25 bp, Homo sapien
agatgtgctctggtctggccctcag

SEQ ID NO: 6066766 - DNA, 25 bp, Homo sapien
gagaagcgtacggagcatcccgagc

SEQ ID NO: 6066767 - DNA, 25 bp, Homo sapien
cacagttcctgcaatggtgcctcct

SEQ ID NO: 6066768 - DNA, 25 bp, Homo sapien
ccctcagagtagttcacaaatatga

SEQ ID NO: 6066769 - DNA, 25 bp, Homo sapien
tcctgcaatggtgcctcctctctgt

SEQ ID NO: 6066770 - DNA, 25 bp, Homo sapien
agcatcccgagcagctgtcgccgcc

SEQ ID NO: 6066771 - DNA, 25 bp, Homo sapien
gcctcctctctgtgagggagaagcg

SEQ ID NO: 6066772 - DNA, 25 bp, Homo sapien
tgcacttctgacagaagagctgccc

SEQ ID NO: 6066773 - DNA, 25 bp, Homo sapien
tgtcacccacgaggatcctgctgtg

SEQ ID NO: 6066774 - DNA, 25 bp, Homo sapien
gctctggtctggccctcagagtagt

SEQ ID NO: 6066775 - DNA, 25 bp, Homo sapien
ttcacaaatatgaagccatctttct

SEQ ID NO: 6066776 - DNA, 25 bp, Homo sapien
aagccatctttctcatctagactga

SEQ ID NO: 6066777 - DNA, 25 bp, Homo sapien
gattttcaggcgcttgatttctgac

SEQ ID NO: 6066778 - DNA, 25 bp, Homo sapien
tttcaatctgctgtaactgcgcgct

SEQ ID NO: 6066779 - DNA, 25 bp, Homo sapien
accgactgcacttctgacagaagag

SEQ ID NO: 6066780 - DNA, 25 bp, Homo sapien
ccgccttcatccttcacccagtggt

SEQ ID NO: 6066781 - DNA, 25 bp, Homo sapien
tgatccttggatacacccaacgcgg

SEQ ID NO: 6066782 - DNA, 25 bp, Homo sapien
cagctgaacactcggcctcgactgt

SEQ ID NO: 6066783 - DNA, 25 bp, Homo sapien
atgctgcaagctatagtaacagttc

SEQ ID NO: 6066784 - DNA, 25 bp, Homo sapien
gtgtgcatagtcagtttgcttctga

SEQ ID NO: 6066785 - DNA, 25 bp, Homo sapien
tcggctgggtgcgtgttgtcctttc

SEQ ID NO: 6066786 - DNA, 25 bp, Homo sapien
ccacgaggatcctgctgtgatcctt

SEQ ID NO: 6066787 - DNA, 25 bp, Homo sapien
gtgacctcggctgggtgcgtgttgt

SEQ ID NO: 6066788 - DNA, 25 bp, Homo sapien
tctgacagaagagctgcccacagtt

SEQ ID NO: 6066789 - DNA, 25 bp, Homo sapien
acacccaacgcggtgacctcggctg

SEQ ID NO: 6066790 - DNA, 25 bp, Homo sapien
acgaccaggctggtcactcacagac

SEQ ID NO: 6066791 - DNA, 25 bp, Homo sapien
agactgagctggtcggaccagcgcc

SEQ ID NO: 6066792 - DNA, 25 bp, Homo sapien
gtgttgtcctttcgatcaaaggctg

SEQ ID NO: 6066793 - DNA, 25 bp, Homo sapien
tcatccttcacccagtggtcagcgg

SEQ ID NO: 6066794 - DNA, 25 bp, Homo sapien
cgatcaaaggctgtgtgcatagtca

SEQ ID NO: 6066795 - DNA, 25 bp, Homo sapien
atagtcagtttgcttctgaatacca

SEQ ID NO: 6066796 - DNA, 25 bp, Homo sapien
tcaggcgcttgatttctgactgaaa

SEQ ID NO: 6066797 - DNA, 25 bp, Homo sapien
cgtacggagcatcccgagcagctgt

SEQ ID NO: 6066798 - DNA, 25 bp, Homo sapien
aaggctgtgtgcatagtcagtttgc

SEQ ID NO: 6066799 - DNA, 25 bp, Homo sapien
caagctatagtaacagttctgacag

SEQ ID NO: 6066800 - DNA, 25 bp, Homo sapien
tcggcctcgactgtcacccacgagg

SEQ ID NO: 6066801 - DNA, 25 bp, Homo sapien
gggtgcgtgttgtcctttcgatcaa

SEQ ID NO: 6066802 - DNA, 25 bp, Homo sapien
tcggaccagcgcctggagtcgtcgg

SEQ ID NO: 6066803 - DNA, 25 bp, Homo sapien
cttctgaataccagctgccgctccc

SEQ ID NO: 6066804 - DNA, 25 bp, Homo sapien
tcgtcggagccgctgtcggtacacc

SEQ ID NO: 6066805 - DNA, 25 bp, Homo sapien
tgagggagaagcgtacggagcatcc

SEQ ID NO: 6066806 - DNA, 25 bp, Homo sapien
tctctgtgagggagaagcgtacgga

SEQ ID NO: 6066807 - DNA, 25 bp, Homo sapien
gagccgctgtcggtacaccatgtgg

SEQ ID NO: 6066808 - DNA, 25 bp, Homo sapien
ctgctgtgatccttggatacaccca

SEQ ID NO: 6066809 - DNA, 25 bp, Homo sapien
acagttctgacagacacccactggg

SEQ ID NO: 6066810 - DNA, 25 bp, Homo sapien
gtcactcacagaccagctgaacact

SEQ ID NO: 6066811 - DNA, 25 bp, Homo sapien
aatggtgcctcctctctgtgaggga

SEQ ID NO: 6066812 - DNA, 25 bp, Homo sapien
gaacactcggcctcgactgtcaccc

SEQ ID NO: 6066813 - DNA, 25 bp, Homo sapien
aggctggtcactcacagaccagctg

SEQ ID NO: 6066814 - DNA, 25 bp, Homo sapien
ggatcctgctgtgatccttggatac

SEQ ID NO: 6066815 - DNA, 25 bp, Homo sapien
ccctgcagatgtgctctggtctggc

SEQ ID NO: 6066816 - DNA, 25 bp, Homo sapien
ggcgagggggccctgcagatgtgct

SEQ ID NO: 6066817 - DNA, 25 bp, Homo sapien
ccgagcagctgtcgccgccttcatc

SEQ ID NO: 6066818 - DNA, 25 bp, Homo sapien
tctttctcatctagactgagctggt

SEQ ID NO: 6066819 - DNA, 25 bp, Homo sapien
cgatgaggcaatcacctataataaa

SEQ ID NO: 6066820 - DNA, 25 bp, Homo sapien
ggtcatgcgtatttaagaatagtcc

SEQ ID NO: 6066821 - DNA, 25 bp, Homo sapien
taatgacatccctgtcacttgcatt

SEQ ID NO: 6066822 - DNA, 25 bp, Homo sapien
ttgttgcaagaggtgatattcagca

SEQ ID NO: 6066823 - DNA, 25 bp, Homo sapien
aaagaagaattatacataagacctc

SEQ ID NO: 6066824 - DNA, 25 bp, Homo sapien
catccctgtcacttgcattagacaa

SEQ ID NO: 6066825 - DNA, 25 bp, Homo sapien
tatgcagacatcaaagaagaattat

SEQ ID NO: 6066826 - DNA, 25 bp, Homo sapien
atacgtttgaagaaatcactttatg

SEQ ID NO: 6066827 - DNA, 25 bp, Homo sapien
ttgcattagacaataactactatat

SEQ ID NO: 6066828 - DNA, 25 bp, Homo sapien
gaattatacataagacctccaccac

SEQ ID NO: 6066829 - DNA, 25 bp, Homo sapien
ccaccacatttaggaatgaatgata

SEQ ID NO: 6066830 - DNA, 25 bp, Homo sapien
atcctgacacttacgactcaggcat

SEQ ID NO: 6066831 - DNA, 25 bp, Homo sapien
ggattgaaacaaagtggagcgaact

SEQ ID NO: 6066832 - DNA, 25 bp, Homo sapien
actatatacacaattagacatatct

SEQ ID NO: 6066833 - DNA, 25 bp, Homo sapien
cctaaaagagtaataaattcaatgt

SEQ ID NO: 6066834 - DNA, 25 bp, Homo sapien
atgcattaatgacatccctgtcact

SEQ ID NO: 6066835 - DNA, 25 bp, Homo sapien
gtggatggtcatgcgtatttaagaa

SEQ ID NO: 6066836 - DNA, 25 bp, Homo sapien
tacacaattagacatatcttcggca

SEQ ID NO: 6066837 - DNA, 25 bp, Homo sapien
agacctccaccacatttaggaatga

SEQ ID NO: 6066838 - DNA, 25 bp, Homo sapien
gacatcaaagaagaattatacataa

SEQ ID NO: 6066839 - DNA, 25 bp, Homo sapien
gtgatattcagcatcctgacactta

SEQ ID NO: 6066840 - DNA, 25 bp, Homo sapien
catttaggaatgaatgataagttga

SEQ ID NO: 6066841 - DNA, 25 bp, Homo sapien
ctttatggattgaaacaaagtggag

SEQ ID NO: 6066842 - DNA, 25 bp, Homo sapien
cacctataataaagatattaaagaa

SEQ ID NO: 6066843 - DNA, 25 bp, Homo sapien
tatttgtatgcagacatcaaagaag

SEQ ID NO: 6066844 - DNA, 25 bp, Homo sapien
tcaacaggaaacgtgacggtactca

SEQ ID NO: 6066845 - DNA, 25 bp, Homo sapien
ttattatgacagaaaagaaatagac

SEQ ID NO: 6066846 - DNA, 25 bp, Homo sapien
catacctgataaaacagtgtggtat

SEQ ID NO: 6066847 - DNA, 25 bp, Homo sapien
ggaatgaatgataagttgatacgtt

SEQ ID NO: 6066848 - DNA, 25 bp, Homo sapien
gcgaactggtacgaaactatcaaat

SEQ ID NO: 6066849 - DNA, 25 bp, Homo sapien
caatgtttatcttcaacaggaaacg

SEQ ID NO: 6066850 - DNA, 25 bp, Homo sapien
aaacaaagtggagcgaactggtacg

SEQ ID NO: 6066851 - DNA, 25 bp, Homo sapien
tcggcatatttgtatgcagacatca

SEQ ID NO: 6066852 - DNA, 25 bp, Homo sapien
atcactatgcattaatgacatccct

SEQ ID NO: 6066853 - DNA, 25 bp, Homo sapien
aagtcaaccaactattgaaaatgaa

SEQ ID NO: 6066854 - DNA, 25 bp, Homo sapien
caatcaaaccaatacggacaacctt

SEQ ID NO: 6066855 - DNA, 25 bp, Homo sapien
tgacagaaaagaaatagaccctaaa

SEQ ID NO: 6066856 - DNA, 25 bp, Homo sapien
ggacactgacatttattatgacaga

SEQ ID NO: 6066857 - DNA, 25 bp, Homo sapien
aagttcgtggatggtcatgcgtatt

SEQ ID NO: 6066858 - DNA, 25 bp, Homo sapien
tgacatttattatgacagaaaagaa

SEQ ID NO: 6066859 - DNA, 25 bp, Homo sapien
ttgaagaaatcactttatggattga

SEQ ID NO: 6066860 - DNA, 25 bp, Homo sapien
agtggagcgaactggtacgaaacta

SEQ ID NO: 6066861 - DNA, 25 bp, Homo sapien
ggaaacgtgacggtactcataaagc

SEQ ID NO: 6066862 - DNA, 25 bp, Homo sapien
acggacaaccttaagatacgatgag

SEQ ID NO: 6066863 - DNA, 25 bp, Homo sapien
ccaataccgtacatcactatgcatt

SEQ ID NO: 6066864 - DNA, 25 bp, Homo sapien
ggcaatcacctataataaagatatt

SEQ ID NO: 6066865 - DNA, 25 bp, Homo sapien
acaaagaagtcaaccaactattgaa

SEQ ID NO: 6066866 - DNA, 25 bp, Homo sapien
caggcatgcaatccaataccgtaca

SEQ ID NO: 6066867 - DNA, 25 bp, Homo sapien
catatcttcggcatatttgtatgca

SEQ ID NO: 6066868 - DNA, 25 bp, Homo sapien
ccaatacggacaaccttaagatacg

SEQ ID NO: 6066869 - DNA, 25 bp, Homo sapien
ccgtacatcactatgcattaatgac

SEQ ID NO: 6066870 - DNA, 25 bp, Homo sapien
aggaaaaatatatcgaagcatacca

SEQ ID NO: 6066871 - DNA, 25 bp, Homo sapien
tcgaagcataccacaaagaagtcaa

SEQ ID NO: 6066872 - DNA, 25 bp, Homo sapien
acgactcaggcatgcaatccaatac

SEQ ID NO: 6066873 - DNA, 25 bp, Homo sapien
tagacaataactactatatacacaa

SEQ ID NO: 6066874 - DNA, 25 bp, Homo sapien
ttcagcatcctgacacttacgactc

SEQ ID NO: 6066875 - DNA, 25 bp, Homo sapien
gtactcataaagctagatttgttgc

SEQ ID NO: 6066876 - DNA, 25 bp, Homo sapien
aacagtgtggtatggaagaagttcg

SEQ ID NO: 6066877 - DNA, 25 bp, Homo sapien
aatatatcgaagcataccacaaaga

SEQ ID NO: 6066878 - DNA, 25 bp, Homo sapien
aaatgaatacttgggacactgacat

SEQ ID NO: 6066879 - DNA, 25 bp, Homo sapien
ctagatttgttgcaagaggtgatat

SEQ ID NO: 6066880 - DNA, 25 bp, Homo sapien
tgcaatccaataccgtacatcacta

SEQ ID NO: 6066881 - DNA, 25 bp, Homo sapien
tacataagacctccaccacatttag

SEQ ID NO: 6066882 - DNA, 25 bp, Homo sapien
tggtacgaaactatcaaatcatacc

SEQ ID NO: 6066883 - DNA, 25 bp, Homo sapien
gtgacggtactcataaagctagatt

SEQ ID NO: 6066884 - DNA, 25 bp, Homo sapien
gtggtatggaagaagttcgtggatg

SEQ ID NO: 6066885 - DNA, 25 bp, Homo sapien
cataccacaaagaagtcaaccaact

SEQ ID NO: 6066886 - DNA, 25 bp, Homo sapien
tacttgggacactgacatttattat

SEQ ID NO: 6066887 - DNA, 25 bp, Homo sapien
tattgaaaatgaatacttgggacac

SEQ ID NO: 6066888 - DNA, 25 bp, Homo sapien
gcgtatttaagaatagtccagtaac

SEQ ID NO: 6066889 - DNA, 25 bp, Homo sapien
accaactattgaaaatgaatacttg

SEQ ID NO: 6066890 - DNA, 25 bp, Homo sapien
attagacatatcttcggcatatttg

SEQ ID NO: 6066891 - DNA, 25 bp, Homo sapien
tggaagaagttcgtggatggtcatg

SEQ ID NO: 6066892 - DNA, 25 bp, Homo sapien
tgataaaacagtgtggtatggaaga

SEQ ID NO: 6066893 - DNA, 25 bp, Homo sapien
caagaggtgatattcagcatcctga

SEQ ID NO: 6066894 - DNA, 25 bp, Homo sapien
aagatacgatgaggcaatcacctat

SEQ ID NO: 6066895 - DNA, 25 bp, Homo sapien
gaaactatcaaatcatacctgataa

SEQ ID NO: 6066896 - DNA, 25 bp, Homo sapien
taaaatcaatcaaaccaatacggac

SEQ ID NO: 6066897 - DNA, 25 bp, Homo sapien
aaccttaagatacgatgaggcaatc

SEQ ID NO: 6066898 - DNA, 25 bp, Homo sapien
ataaagctagatttgttgcaagagg

SEQ ID NO: 6066899 - DNA, 25 bp, Homo sapien
taaattcaatgtttatcttcaacag

SEQ ID NO: 6066900 - DNA, 25 bp, Homo sapien
tgtcacttgcattagacaataacta

SEQ ID NO: 6066901 - DNA, 25 bp, Homo sapien
aagttgatacgtttgaagaaatcac

SEQ ID NO: 6066902 - DNA, 25 bp, Homo sapien
aaatcactttatggattgaaacaaa

SEQ ID NO: 6066903 - DNA, 25 bp, Homo sapien
acacttacgactcaggcatgcaatc

SEQ ID NO: 6066904 - DNA, 25 bp, Homo sapien
ataactactatatacacaattagac

SEQ ID NO: 6066905 - DNA, 25 bp, Homo sapien
tcaaatcatacctgataaaacagtg

SEQ ID NO: 6066906 - DNA, 25 bp, Homo sapien
ttatcttcaacaggaaacgtgacgg

SEQ ID NO: 6066907 - DNA, 25 bp, Homo sapien
aatgataagttgatacgtttgaaga

SEQ ID NO: 6066908 - DNA, 25 bp, Homo sapien
agaaaaggaaaaatatatcgaagca

SEQ ID NO: 6066909 - DNA, 25 bp, Homo sapien
cttgaggcggttcagctggtcgtgc

SEQ ID NO: 6066910 - DNA, 25 bp, Homo sapien
ttgcgcagttcctgaagccggctca

SEQ ID NO: 6066911 - DNA, 25 bp, Homo sapien
ctgaatctgaccagattacagacag

SEQ ID NO: 6066912 - DNA, 25 bp, Homo sapien
aacattctgaagcttgagttaccga

SEQ ID NO: 6066913 - DNA, 25 bp, Homo sapien
ctcttccgtcacatgactctttgtg

SEQ ID NO: 6066914 - DNA, 25 bp, Homo sapien
tggtcacatagccaacctccgggct

SEQ ID NO: 6066915 - DNA, 25 bp, Homo sapien
gtcacatgactctttgtgctcagct

SEQ ID NO: 6066916 - DNA, 25 bp, Homo sapien
ccttgaggagaagtagcctgagcct

SEQ ID NO: 6066917 - DNA, 25 bp, Homo sapien
tgcagggctgccttcaaccgcagca

SEQ ID NO: 6066918 - DNA, 25 bp, Homo sapien
atttccttgaggagaagtagcctga

SEQ ID NO: 6066919 - DNA, 25 bp, Homo sapien
gcttgagttaccgatggagccattt

SEQ ID NO: 6066920 - DNA, 25 bp, Homo sapien
tcctttcaagcagatcacagggccc

SEQ ID NO: 6066921 - DNA, 25 bp, Homo sapien
tgtgcattcacacccatgtgcagga

SEQ ID NO: 6066922 - DNA, 25 bp, Homo sapien
agcaaacgtgttccaacccacctgg

SEQ ID NO: 6066923 - DNA, 25 bp, Homo sapien
cgtgtgctgaggaatcagtccctgc

SEQ ID NO: 6066924 - DNA, 25 bp, Homo sapien
tgaagagaagtccaacagactgcca

SEQ ID NO: 6066925 - DNA, 25 bp, Homo sapien
gcctggcagtacagcctgtgctttt

SEQ ID NO: 6066926 - DNA, 25 bp, Homo sapien
agcacgcatcgcagcctggcagtac

SEQ ID NO: 6066927 - DNA, 25 bp, Homo sapien
tgcaaggtgggactcctgaacacag

SEQ ID NO: 6066928 - DNA, 25 bp, Homo sapien
gaccaagtcctgtgtgtacgcgtat

SEQ ID NO: 6066929 - DNA, 25 bp, Homo sapien
tattgcgttatatacattctgcagc

SEQ ID NO: 6066930 - DNA, 25 bp, Homo sapien
ggctcaggcagcaaacgtgttccaa

SEQ ID NO: 6066931 - DNA, 25 bp, Homo sapien
ccatctgaggtacagaacctgtgct

SEQ ID NO: 6066932 - DNA, 25 bp, Homo sapien
gctccacctaacatgctcagtggca

SEQ ID NO: 6066933 - DNA, 25 bp, Homo sapien
caaagtcagtgtacgcgctgcgcat

SEQ ID NO: 6066934 - DNA, 25 bp, Homo sapien
tcctctctctaaggttgctggctga

SEQ ID NO: 6066935 - DNA, 25 bp, Homo sapien
tcagtggtgggtgcaaaccacaggc

SEQ ID NO: 6066936 - DNA, 25 bp, Homo sapien
gcagccgcactgtgaaagtgaaacc

SEQ ID NO: 6066937 - DNA, 25 bp, Homo sapien
gcatctccgcggctttttcagtggt

SEQ ID NO: 6066938 - DNA, 25 bp, Homo sapien
taggaattctgatggatgttctccg

SEQ ID NO: 6066939 - DNA, 25 bp, Homo sapien
gaaggacaaagctctaggcaaaata

SEQ ID NO: 6066940 - DNA, 25 bp, Homo sapien
gcaaatcacaactagtctctcagcg

SEQ ID NO: 6066941 - DNA, 25 bp, Homo sapien
tccaaaagaagcttgtaacccactg

SEQ ID NO: 6066942 - DNA, 25 bp, Homo sapien
tgctggttccggctgagcctagtcc

SEQ ID NO: 6066943 - DNA, 25 bp, Homo sapien
taacccactgtgaaggaatgccaca

SEQ ID NO: 6066944 - DNA, 25 bp, Homo sapien
tcagcgtgtcctaagcattcggcag

SEQ ID NO: 6066945 - DNA, 25 bp, Homo sapien
atatatatatattcagaattaggca

SEQ ID NO: 6066946 - DNA, 25 bp, Homo sapien
tatatatatatattcagaattaggc

SEQ ID NO: 6066947 - DNA, 25 bp, Homo sapien
ggtgacgtgcggatcttcttctttt

SEQ ID NO: 6066948 - DNA, 25 bp, Homo sapien
tgacgtgcggatcttcttctttttg

SEQ ID NO: 6066949 - DNA, 25 bp, Homo sapien
atatatatattcagaattaggcagc

SEQ ID NO: 6066950 - DNA, 25 bp, Homo sapien
cttcttcgctttcggcgccatcttg

SEQ ID NO: 6066951 - DNA, 25 bp, Homo sapien
atatattcagaattaggcagctgga

SEQ ID NO: 6066952 - DNA, 25 bp, Homo sapien
tatatattcagaattaggcagctgg

SEQ ID NO: 6066953 - DNA, 25 bp, Homo sapien
atatatatatatattcagaattagg

SEQ ID NO: 6066954 - DNA, 25 bp, Homo sapien
tatatatattcagaattaggcagct

SEQ ID NO: 6066955 - DNA, 25 bp, Homo sapien
tatatatatattcagaattaggcag

SEQ ID NO: 6066956 - DNA, 25 bp, Homo sapien
atatatattcagaattaggcagctg

SEQ ID NO: 6066957 - DNA, 25 bp, Homo sapien
cacaattccattgtctataccttcc

SEQ ID NO: 6066958 - DNA, 25 bp, Homo sapien
tatcacaggtttctgtacatgcatt

SEQ ID NO: 6066959 - DNA, 25 bp, Homo sapien
tggagagaaacatagagattaagct

SEQ ID NO: 6066960 - DNA, 25 bp, Homo sapien
tcctacaagggtataaatatcacag

SEQ ID NO: 6066961 - DNA, 25 bp, Homo sapien
gagaaacatagagattaagctactc

SEQ ID NO: 6066962 - DNA, 25 bp, Homo sapien
tctgtacatgcattggaggtttgct

SEQ ID NO: 6066963 - DNA, 25 bp, Homo sapien
gaaacatagagattaagctactcac

SEQ ID NO: 6066964 - DNA, 25 bp, Homo sapien
aaatatcacaggtttctgtacatgc

SEQ ID NO: 6066965 - DNA, 25 bp, Homo sapien
gaaaatagttgcaggaggaatgaaa

SEQ ID NO: 6066966 - DNA, 25 bp, Homo sapien
gattaagctactcacaattccattg

SEQ ID NO: 6066967 - DNA, 25 bp, Homo sapien
tagagattaagctactcacaattcc

SEQ ID NO: 6066968 - DNA, 25 bp, Homo sapien
acatgcattggaggtttgctatgcg

SEQ ID NO: 6066969 - DNA, 25 bp, Homo sapien
gatggtgaggtccacgtccacgtgt

SEQ ID NO: 6066970 - DNA, 25 bp, Homo sapien
tgaggtccacgtccacgtgtgaggc

SEQ ID NO: 6066971 - DNA, 25 bp, Homo sapien
cttgggcagcggctgtttgcgctta

SEQ ID NO: 6066972 - DNA, 25 bp, Homo sapien
caaagttgcctttgaggggttccag

SEQ ID NO: 6066973 - DNA, 25 bp, Homo sapien
tgtcggcagcctgctccaccgaagg

SEQ ID NO: 6066974 - DNA, 25 bp, Homo sapien
cagcggctgtttgcgcttatgcccc

SEQ ID NO: 6066975 - DNA, 25 bp, Homo sapien
agtgccggcgtcgaagatggcctcc

SEQ ID NO: 6066976 - DNA, 25 bp, Homo sapien
gatgtggcggccgtggatggtgagg

SEQ ID NO: 6066977 - DNA, 25 bp, Homo sapien
tctcatcgaagtccaggctgtcggc

SEQ ID NO: 6066978 - DNA, 25 bp, Homo sapien
tgtttgcgcttatgccccagcctgc

SEQ ID NO: 6066979 - DNA, 25 bp, Homo sapien
tgacttgggcactgtccagaggtgg

SEQ ID NO: 6066980 - DNA, 25 bp, Homo sapien
ccgtggatggtgaggtccacgtcca

SEQ ID NO: 6066981 - DNA, 25 bp, Homo sapien
gagaattcgcccctgtggaagatgg

SEQ ID NO: 6066982 - DNA, 25 bp, Homo sapien
gctgacactgtcacacaccgagaat

SEQ ID NO: 6066983 - DNA, 25 bp, Homo sapien
ttgggtcccggcacttggtctcaaa

SEQ ID NO: 6066984 - DNA, 25 bp, Homo sapien
tatctatccggataaaccgccaggc

SEQ ID NO: 6066985 - DNA, 25 bp, Homo sapien
cagcgccttgacaaaggtgtgagtc

SEQ ID NO: 6066986 - DNA, 25 bp, Homo sapien
tgagtcgtggtacaatatgagttcc

SEQ ID NO: 6066987 - DNA, 25 bp, Homo sapien
cacagtaatgttgcgggtctgcccc

SEQ ID NO: 6066988 - DNA, 25 bp, Homo sapien
gatgggatgatgaccgcttgctcct

SEQ ID NO: 6066989 - DNA, 25 bp, Homo sapien
gaagtccagatcctgagtgtctgca

SEQ ID NO: 6066990 - DNA, 25 bp, Homo sapien
tgtctgtggcggtggtcttatcccc

SEQ ID NO: 6066991 - DNA, 25 bp, Homo sapien
cacccgctgtcaacgggatttgggt

SEQ ID NO: 6066992 - DNA, 25 bp, Homo sapien
cacctccttgcccttgatgtctgtg

SEQ ID NO: 6066993 - DNA, 25 bp, Homo sapien
caggattaaccccagctttctttag

SEQ ID NO: 6066994 - DNA, 25 bp, Homo sapien
tcatactatgaggtaaagacccgaa

SEQ ID NO: 6066995 - DNA, 25 bp, Homo sapien
tgtccctgaagtcactcatccaggt

SEQ ID NO: 6066996 - DNA, 25 bp, Homo sapien
aatatagttatatcaacctctctgc

SEQ ID NO: 6066997 - DNA, 25 bp, Homo sapien
cacaacttggttcagatatatacag

SEQ ID NO: 6066998 - DNA, 25 bp, Homo sapien
cagggcaaaatctatgcagtgtctt

SEQ ID NO: 6066999 - DNA, 25 bp, Homo sapien
tctcgtattgctataactcttaggc

SEQ ID NO: 6067000 - DNA, 25 bp, Homo sapien
tgggcacaccagtattcagggcaaa

SEQ ID NO: 6067001 - DNA, 25 bp, Homo sapien
aaatagattcagtctctcgtattgc

SEQ ID NO: 6067002 - DNA, 25 bp, Homo sapien
tcaacctctctgcacacaacttggt

SEQ ID NO: 6067003 - DNA, 25 bp, Homo sapien
agagcacggcatacctgggcacacc

SEQ ID NO: 6067004 - DNA, 25 bp, Homo sapien
tacatttaaggcgacagggaggcta

SEQ ID NO: 6067005 - DNA, 25 bp, Homo sapien
cagcaccgacccgctccgcatagtt

SEQ ID NO: 6067006 - DNA, 25 bp, Homo sapien
agcaccgacccgctccgcatagttg

SEQ ID NO: 6067007 - DNA, 25 bp, Homo sapien
caggcgatgcactcggcctacggga

SEQ ID NO: 6067008 - DNA, 25 bp, Homo sapien
cgctccagcaccgacccgctccgca

SEQ ID NO: 6067009 - DNA, 25 bp, Homo sapien
tccagcaccgacccgctccgcatag

SEQ ID NO: 6067010 - DNA, 25 bp, Homo sapien
ccagcaccgacccgctccgcatagt

SEQ ID NO: 6067011 - DNA, 25 bp, Homo sapien
ctccagcaccgacccgctccgcata

SEQ ID NO: 6067012 - DNA, 25 bp, Homo sapien
aggcgatgcactcggcctacgggaa

SEQ ID NO: 6067013 - DNA, 25 bp, Homo sapien
gaccgaggtatgagtaatgaactgc

SEQ ID NO: 6067014 - DNA, 25 bp, Homo sapien
accaccctgggcgatggtcacttta

SEQ ID NO: 6067015 - DNA, 25 bp, Homo sapien
tgaagaacgggtcttagccttggcg

SEQ ID NO: 6067016 - DNA, 25 bp, Homo sapien
caccctgggcgatggtcactttacc

SEQ ID NO: 6067017 - DNA, 25 bp, Homo sapien
tggaccgaggtatgagtaatgaact

SEQ ID NO: 6067018 - DNA, 25 bp, Homo sapien
cttgaagaacgggtcttagccttgg

SEQ ID NO: 6067019 - DNA, 25 bp, Homo sapien
accctgggcgatggtcactttacca

SEQ ID NO: 6067020 - DNA, 25 bp, Homo sapien
ggtatgagtaatgaactgctccagc

SEQ ID NO: 6067021 - DNA, 25 bp, Homo sapien
ccgaggtatgagtaatgaactgctc

SEQ ID NO: 6067022 - DNA, 25 bp, Homo sapien
gtatgagtaatgaactgctccagcc

SEQ ID NO: 6067023 - DNA, 25 bp, Homo sapien
gaactgaagacccgcccttgaagaa

SEQ ID NO: 6067024 - DNA, 25 bp, Homo sapien
gaggtatgagtaatgaactgctcca

SEQ ID NO: 6067025 - DNA, 25 bp, Homo sapien
gagaccggcacgagaagagcgggtc

SEQ ID NO: 6067026 - DNA, 25 bp, Homo sapien
cgtcccgacatgacgaagaaacgat

SEQ ID NO: 6067027 - DNA, 25 bp, Homo sapien
ttgccgcgtcccgacatgacgaaga

SEQ ID NO: 6067028 - DNA, 25 bp, Homo sapien
tcccgacatgacgaagaaacgataa

SEQ ID NO: 6067029 - DNA, 25 bp, Homo sapien
cgcgtcccgacatgacgaagaaacg

SEQ ID NO: 6067030 - DNA, 25 bp, Homo sapien
tgccgcgtcccgacatgacgaagaa

SEQ ID NO: 6067031 - DNA, 25 bp, Homo sapien
ccgacatgacgaagaaacgataaat

SEQ ID NO: 6067032 - DNA, 25 bp, Homo sapien
gcgtcccgacatgacgaagaaacga

SEQ ID NO: 6067033 - DNA, 25 bp, Homo sapien
cccgacatgacgaagaaacgataaa

SEQ ID NO: 6067034 - DNA, 25 bp, Homo sapien
gtcccgacatgacgaagaaacgata

SEQ ID NO: 6067035 - DNA, 25 bp, Homo sapien
gccgcgtcccgacatgacgaagaaa

SEQ ID NO: 6067036 - DNA, 25 bp, Homo sapien
ccgcgtcccgacatgacgaagaaac

SEQ ID NO: 6067037 - DNA, 25 bp, Homo sapien
cagctctagaggagcgggttttggc

SEQ ID NO: 6067038 - DNA, 25 bp, Homo sapien
cctgtggcctaagtcagaaagtgag

SEQ ID NO: 6067039 - DNA, 25 bp, Homo sapien
ctgtggcctaagtcagaaagtgagt

SEQ ID NO: 6067040 - DNA, 25 bp, Homo sapien
ggtgcactcgtcctacaggaaattg

SEQ ID NO: 6067041 - DNA, 25 bp, Homo sapien
taaaacgacctgtggcctaagtcag

SEQ ID NO: 6067042 - DNA, 25 bp, Homo sapien
cggtgcactcgtcctacaggaaatt

SEQ ID NO: 6067043 - DNA, 25 bp, Homo sapien
gtaaaacgacctgtggcctaagtca

SEQ ID NO: 6067044 - DNA, 25 bp, Homo sapien
cgacctgtggcctaagtcagaaagt

SEQ ID NO: 6067045 - DNA, 25 bp, Homo sapien
ctctagaggagcgggttttggcctt

SEQ ID NO: 6067046 - DNA, 25 bp, Homo sapien
acgacctgtggcctaagtcagaaag

SEQ ID NO: 6067047 - DNA, 25 bp, Homo sapien
gacctgtggcctaagtcagaaagtg

SEQ ID NO: 6067048 - DNA, 25 bp, Homo sapien
aaaacgacctgtggcctaagtcaga

SEQ ID NO: 6067049 - DNA, 25 bp, Homo sapien
tcgggcataatgaaacaatagtggc

SEQ ID NO: 6067050 - DNA, 25 bp, Homo sapien
tggccagctcgggcataatgaaaca

SEQ ID NO: 6067051 - DNA, 25 bp, Homo sapien
cataatgaaacaatagtggcaaaac

SEQ ID NO: 6067052 - DNA, 25 bp, Homo sapien
ccagctcgggcataatgaaacaata

SEQ ID NO: 6067053 - DNA, 25 bp, Homo sapien
gctcgggcataatgaaacaatagtg

SEQ ID NO: 6067054 - DNA, 25 bp, Homo sapien
taatgaaacaatagtggcaaaacca

SEQ ID NO: 6067055 - DNA, 25 bp, Homo sapien
cgggcataatgaaacaatagtggca

SEQ ID NO: 6067056 - DNA, 25 bp, Homo sapien
aatgaaacaatagtggcaaaaccaa

SEQ ID NO: 6067057 - DNA, 25 bp, Homo sapien
cagctcgggcataatgaaacaatag

SEQ ID NO: 6067058 - DNA, 25 bp, Homo sapien
ggcataatgaaacaatagtggcaaa

SEQ ID NO: 6067059 - DNA, 25 bp, Homo sapien
ggccagctcgggcataatgaaacaa

SEQ ID NO: 6067060 - DNA, 25 bp, Homo sapien
gccagctcgggcataatgaaacaat

SEQ ID NO: 6067061 - DNA, 25 bp, Homo sapien
gagcggactttgagggctcgggcat

SEQ ID NO: 6067062 - DNA, 25 bp, Homo sapien
caggagcggactttgagggctcggg

SEQ ID NO: 6067063 - DNA, 25 bp, Homo sapien
gccgagactgaccgaacgttccgcg

SEQ ID NO: 6067064 - DNA, 25 bp, Homo sapien
ggccgagactgaccgaacgttccgc

SEQ ID NO: 6067065 - DNA, 25 bp, Homo sapien
ggcaggagcggactttgagggctcg

SEQ ID NO: 6067066 - DNA, 25 bp, Homo sapien
ccgagactgaccgaacgttccgcgg

SEQ ID NO: 6067067 - DNA, 25 bp, Homo sapien
gggcaggagcggactttgagggctc

SEQ ID NO: 6067068 - DNA, 25 bp, Homo sapien
gcaggagcggactttgagggctcgg

SEQ ID NO: 6067069 - DNA, 25 bp, Homo sapien
tgggccgagactgaccgaacgttcc

SEQ ID NO: 6067070 - DNA, 25 bp, Homo sapien
aggagcggactttgagggctcgggc

SEQ ID NO: 6067071 - DNA, 25 bp, Homo sapien
ggagcggactttgagggctcgggca

SEQ ID NO: 6067072 - DNA, 25 bp, Homo sapien
ccttttttagggactggagcagatt

SEQ ID NO: 6067073 - DNA, 25 bp, Homo sapien
gtaatgcgccaggcgtgacgcttct

SEQ ID NO: 6067074 - DNA, 25 bp, Homo sapien
tggagccttttttagggactggagc

SEQ ID NO: 6067075 - DNA, 25 bp, Homo sapien
gagccttttttagggactggagcag

SEQ ID NO: 6067076 - DNA, 25 bp, Homo sapien
caattccccgggtagcagtaggcgc

SEQ ID NO: 6067077 - DNA, 25 bp, Homo sapien
ggagccttttttagggactggagca

SEQ ID NO: 6067078 - DNA, 25 bp, Homo sapien
ccaattccccgggtagcagtaggcg

SEQ ID NO: 6067079 - DNA, 25 bp, Homo sapien
ttggccaattccccgggtagcagta

SEQ ID NO: 6067080 - DNA, 25 bp, Homo sapien
taatgcgccaggcgtgacgcttctc

SEQ ID NO: 6067081 - DNA, 25 bp, Homo sapien
aattccccgggtagcagtaggcgca

SEQ ID NO: 6067082 - DNA, 25 bp, Homo sapien
gccttttttagggactggagcagat

SEQ ID NO: 6067083 - DNA, 25 bp, Homo sapien
tttttagggactggagcagatttga

SEQ ID NO: 6067084 - DNA, 25 bp, Homo sapien
tctcccctcggatgcggcgcgcaag

SEQ ID NO: 6067085 - DNA, 25 bp, Homo sapien
agtcctgtgcgatctcccgtaccaa

SEQ ID NO: 6067086 - DNA, 25 bp, Homo sapien
tttgctttgttcgtgccatggctaa

SEQ ID NO: 6067087 - DNA, 25 bp, Homo sapien
gacagacttcttgggctgataggaa

SEQ ID NO: 6067088 - DNA, 25 bp, Homo sapien
tgccctctcccctcggatgcggcgc

SEQ ID NO: 6067089 - DNA, 25 bp, Homo sapien
ggacagacttcttgggctgatagga

SEQ ID NO: 6067090 - DNA, 25 bp, Homo sapien
gctgtttgctttgttcgtgccatgg

SEQ ID NO: 6067091 - DNA, 25 bp, Homo sapien
agacttcttgggctgataggaatat

SEQ ID NO: 6067092 - DNA, 25 bp, Homo sapien
gtcctgtgcgatctcccgtaccaag

SEQ ID NO: 6067093 - DNA, 25 bp, Homo sapien
tgtttgctttgttcgtgccatggct

SEQ ID NO: 6067094 - DNA, 25 bp, Homo sapien
gcgagctgtttgctttgttcgtgcc

SEQ ID NO: 6067095 - DNA, 25 bp, Homo sapien
aggtagcttccggattagcagctcg

SEQ ID NO: 6067096 - DNA, 25 bp, Homo sapien
gaatctcgcggagagccactgtacc

SEQ ID NO: 6067097 - DNA, 25 bp, Homo sapien
tcaagccctctcgccgcggatacga

SEQ ID NO: 6067098 - DNA, 25 bp, Homo sapien
actgtaccaggccgatagcgatggg

SEQ ID NO: 6067099 - DNA, 25 bp, Homo sapien
tcgccgcggatacgacgtgcgagct

SEQ ID NO: 6067100 - DNA, 25 bp, Homo sapien
cgaatctcgcggagagccactgtac

SEQ ID NO: 6067101 - DNA, 25 bp, Homo sapien
ctctcgccgcggatacgacgtgcga

SEQ ID NO: 6067102 - DNA, 25 bp, Homo sapien
accaggccgatagcgatggggcttc

SEQ ID NO: 6067103 - DNA, 25 bp, Homo sapien
cctctcgccgcggatacgacgtgcg

SEQ ID NO: 6067104 - DNA, 25 bp, Homo sapien
ctcgccgcggatacgacgtgcgagc

SEQ ID NO: 6067105 - DNA, 25 bp, Homo sapien
agccctctcgccgcggatacgacgt

SEQ ID NO: 6067106 - DNA, 25 bp, Homo sapien
taccaggccgatagcgatggggctt

SEQ ID NO: 6067107 - DNA, 25 bp, Homo sapien
tctcgccgcggatacgacgtgcgag

SEQ ID NO: 6067108 - DNA, 25 bp, Homo sapien
atattgtcgcgcagtactttacggt

SEQ ID NO: 6067109 - DNA, 25 bp, Homo sapien
attgtcgcgcagtactttacggtgg

SEQ ID NO: 6067110 - DNA, 25 bp, Homo sapien
ggatattgtcgcgcagtactttacg

SEQ ID NO: 6067111 - DNA, 25 bp, Homo sapien
cctggatattgtcgcgcagtacttt

SEQ ID NO: 6067112 - DNA, 25 bp, Homo sapien
gatattgtcgcgcagtactttacgg

SEQ ID NO: 6067113 - DNA, 25 bp, Homo sapien
tattgtcgcgcagtactttacggtg

SEQ ID NO: 6067114 - DNA, 25 bp, Homo sapien
atgccctggatattgtcgcgcagta

SEQ ID NO: 6067115 - DNA, 25 bp, Homo sapien
tggatattgtcgcgcagtactttac

SEQ ID NO: 6067116 - DNA, 25 bp, Homo sapien
gccctggatattgtcgcgcagtact

SEQ ID NO: 6067117 - DNA, 25 bp, Homo sapien
ccctggatattgtcgcgcagtactt

SEQ ID NO: 6067118 - DNA, 25 bp, Homo sapien
tgccctggatattgtcgcgcagtac

SEQ ID NO: 6067119 - DNA, 25 bp, Homo sapien
gatgccctggatattgtcgcgcagt

SEQ ID NO: 6067120 - DNA, 25 bp, Homo sapien
atcgcggattacattctccaaaaac

SEQ ID NO: 6067121 - DNA, 25 bp, Homo sapien
agaactccgcgtgtctcctcgtata

SEQ ID NO: 6067122 - DNA, 25 bp, Homo sapien
tgagatgcgcttaacgcctccacgc

SEQ ID NO: 6067123 - DNA, 25 bp, Homo sapien
tccgcgtgtctcctcgtatataagg

SEQ ID NO: 6067124 - DNA, 25 bp, Homo sapien
gctccgtgtaggtaactgcatcgcg

SEQ ID NO: 6067125 - DNA, 25 bp, Homo sapien
aacactttaagaactccgcgtgtct

SEQ ID NO: 6067126 - DNA, 25 bp, Homo sapien
gtgctccgtgtaggtaactgcatcg

SEQ ID NO: 6067127 - DNA, 25 bp, Homo sapien
taaggcctgagatgcgcttaacgcc

SEQ ID NO: 6067128 - DNA, 25 bp, Homo sapien
tccacgccgtgccaggcgtcggatg

SEQ ID NO: 6067129 - DNA, 25 bp, Homo sapien
gccctgaatgttgtcgcgcagaact

SEQ ID NO: 6067130 - DNA, 25 bp, Homo sapien
aatgttgtcgcgcagaactttgcgg

SEQ ID NO: 6067131 - DNA, 25 bp, Homo sapien
tgtctcctcgtatataaggcctgag

SEQ ID NO: 6067132 - DNA, 25 bp, Homo sapien
gctgcttaatgaaggtagcttaacc

SEQ ID NO: 6067133 - DNA, 25 bp, Homo sapien
cccagggagggtatttatagtccag

SEQ ID NO: 6067134 - DNA, 25 bp, Homo sapien
caaaatagtaatcttcctcaggacc

SEQ ID NO: 6067135 - DNA, 25 bp, Homo sapien
gaagcggtcatgctgcttaatgaag

SEQ ID NO: 6067136 - DNA, 25 bp, Homo sapien
cagcccatgaatagcctagttctgg

SEQ ID NO: 6067137 - DNA, 25 bp, Homo sapien
ttctccagatgcaggtttacacatc

SEQ ID NO: 6067138 - DNA, 25 bp, Homo sapien
ctgggctggttttaatgataaacaa

SEQ ID NO: 6067139 - DNA, 25 bp, Homo sapien
attcatcgcatcttttggaataaca

SEQ ID NO: 6067140 - DNA, 25 bp, Homo sapien
ctcatagaagagtccttctgggaac

SEQ ID NO: 6067141 - DNA, 25 bp, Homo sapien
tgacagggcctaaatgcggcagcag

SEQ ID NO: 6067142 - DNA, 25 bp, Homo sapien
tgcaggtttacacatccctgggctg

SEQ ID NO: 6067143 - DNA, 25 bp, Homo sapien
gggcaacagcccatgaatagcctag

SEQ ID NO: 6067144 - DNA, 25 bp, Homo sapien
attttgtgaaaagcccacgcgtccg

SEQ ID NO: 6067145 - DNA, 25 bp, Homo sapien
cattttgtgaaaagcccacgcgtcc

SEQ ID NO: 6067146 - DNA, 25 bp, Homo sapien
cgctttcggcgccattttgtgaaaa

SEQ ID NO: 6067147 - DNA, 25 bp, Homo sapien
cggcgccattttgtgaaaagcccac

SEQ ID NO: 6067148 - DNA, 25 bp, Homo sapien
gcgccattttgtgaaaagcccacgc

SEQ ID NO: 6067149 - DNA, 25 bp, Homo sapien
ttcggcgccattttgtgaaaagccc

SEQ ID NO: 6067150 - DNA, 25 bp, Homo sapien
cattttgtgaaaagcccacgcgtcc

SEQ ID NO: 6067151 - DNA, 25 bp, Homo sapien
attttgtgaaaagcccacgcgtccg

SEQ ID NO: 6067152 - DNA, 25 bp, Homo sapien
cgccattttgtgaaaagcccacgcg

SEQ ID NO: 6067153 - DNA, 25 bp, Homo sapien
ccattttgtgaaaagcccacgcgtc

SEQ ID NO: 6067154 - DNA, 25 bp, Homo sapien
tcggcgccattttgtgaaaagccca

SEQ ID NO: 6067155 - DNA, 25 bp, Homo sapien
tttcggcgccattttgtgaaaagcc

SEQ ID NO: 6067156 - DNA, 25 bp, Homo sapien
ggcgccattttgtgaaaagcccacg

SEQ ID NO: 6067157 - DNA, 25 bp, Homo sapien
gccattttgtgaaaagcccacgcgt

SEQ ID NO: 6067158 - DNA, 25 bp, Homo sapien
gcagtttggagtccaatggttataa

SEQ ID NO: 6067159 - DNA, 25 bp, Homo sapien
ccattcacctacttctgttcagcag

SEQ ID NO: 6067160 - DNA, 25 bp, Homo sapien
aaggacatgtctcacaaaccaggaa

SEQ ID NO: 6067161 - DNA, 25 bp, Homo sapien
gacacagattgacaacaaataatgg

SEQ ID NO: 6067162 - DNA, 25 bp, Homo sapien
ccaggaaaccctgcctcgtatggct

SEQ ID NO: 6067163 - DNA, 25 bp, Homo sapien
tttaaaagggagtagccaatatcca

SEQ ID NO: 6067164 - DNA, 25 bp, Homo sapien
tacaaacaaaagctagggagatggc

SEQ ID NO: 6067165 - DNA, 25 bp, Homo sapien
tcttcccaatagacaaatccctagc

SEQ ID NO: 6067166 - DNA, 25 bp, Homo sapien
ggcttttatattggcatagaccaag

SEQ ID NO: 6067167 - DNA, 25 bp, Homo sapien
gaagacagccttctacttcgtacaa

SEQ ID NO: 6067168 - DNA, 25 bp, Homo sapien
aaaccaagtgaaagtcgaacaatat

SEQ ID NO: 6067169 - DNA, 25 bp, Homo sapien
taagaaaacacattagaagacagcc

SEQ ID NO: 6067170 - DNA, 25 bp, Homo sapien
cctattaggatatgaaaggattcag

SEQ ID NO: 6067171 - DNA, 25 bp, Homo sapien
tattggaggttaattcctattagga

SEQ ID NO: 6067172 - DNA, 25 bp, Homo sapien
ttcaggtgcagagtgtgtcctcttc

SEQ ID NO: 6067173 - DNA, 25 bp, Homo sapien
acaactgacgccattttggagtcct

SEQ ID NO: 6067174 - DNA, 25 bp, Homo sapien
tcatgttttattggaggttaattcc

SEQ ID NO: 6067175 - DNA, 25 bp, Homo sapien
tgtcctcttcagtggtatttgcgga

SEQ ID NO: 6067176 - DNA, 25 bp, Homo sapien
tatgaaaggattcaggtgcagagtg

SEQ ID NO: 6067177 - DNA, 25 bp, Homo sapien
taggatatgaaaggattcaggtgca

SEQ ID NO: 6067178 - DNA, 25 bp, Homo sapien
cgccattttggagtcctggtgtccg

SEQ ID NO: 6067179 - DNA, 25 bp, Homo sapien
tggtacaactgacgccattttggag

SEQ ID NO: 6067180 - DNA, 25 bp, Homo sapien
aaaggattcaggtgcagagtgtgtc

SEQ ID NO: 6067181 - DNA, 25 bp, Homo sapien
gattcaggtgcagagtgtgtcctct

SEQ ID NO: 6067182 - DNA, 25 bp, Homo sapien
gttagctgtggctccagagaggatc

SEQ ID NO: 6067183 - DNA, 25 bp, Homo sapien
ctgggaagccttgttagctgtggct

SEQ ID NO: 6067184 - DNA, 25 bp, Homo sapien
aggttgcagtgatcctcactcaggt

SEQ ID NO: 6067185 - DNA, 25 bp, Homo sapien
gcctcaggagccatggccacacaag

SEQ ID NO: 6067186 - DNA, 25 bp, Homo sapien
ccccagacccaacctcagggaactg

SEQ ID NO: 6067187 - DNA, 25 bp, Homo sapien
tctggctctcatactcgcccgtgtt

SEQ ID NO: 6067188 - DNA, 25 bp, Homo sapien
gcttggtgaggacgaagaagaggat

SEQ ID NO: 6067189 - DNA, 25 bp, Homo sapien
tgaacctctggctctcatactcgcc

SEQ ID NO: 6067190 - DNA, 25 bp, Homo sapien
tgtccacttcctgcttggtgaggac

SEQ ID NO: 6067191 - DNA, 25 bp, Homo sapien
gacggcagtcaatagtctagcacaa

SEQ ID NO: 6067192 - DNA, 25 bp, Homo sapien
ttggacacccgcatgttctgacgag

SEQ ID NO: 6067193 - DNA, 25 bp, Homo sapien
gctggcagcagcttgggcatcctgc

SEQ ID NO: 6067194 - DNA, 25 bp, Homo sapien
ggtgtggaagagttgggtgctggca

SEQ ID NO: 6067195 - DNA, 25 bp, Homo sapien
ccctctttctgggaatgtattctag

SEQ ID NO: 6067196 - DNA, 25 bp, Homo sapien
tggcccaggctagccccacggcttt

SEQ ID NO: 6067197 - DNA, 25 bp, Homo sapien
ggcccttcagcgccgtagcagctac

SEQ ID NO: 6067198 - DNA, 25 bp, Homo sapien
taccacaggggaagccgatggccca

SEQ ID NO: 6067199 - DNA, 25 bp, Homo sapien
ggaggacgcgggcatttctcgcccc

SEQ ID NO: 6067200 - DNA, 25 bp, Homo sapien
gctgtggctctgcagtgctctggtc

SEQ ID NO: 6067201 - DNA, 25 bp, Homo sapien
atgttctgacgagctttcatctgct

SEQ ID NO: 6067202 - DNA, 25 bp, Homo sapien
gccctctggtgggcctcaggagcca

SEQ ID NO: 6067203 - DNA, 25 bp, Homo sapien
aggggaagccgatggcccaggctag

SEQ ID NO: 6067204 - DNA, 25 bp, Homo sapien
gaggggctcgggctcctccttgcat

SEQ ID NO: 6067205 - DNA, 25 bp, Homo sapien
tctggtcctgttctgggaagccttg

SEQ ID NO: 6067206 - DNA, 25 bp, Homo sapien
tcttgcccctctttctgggaatgta

SEQ ID NO: 6067207 - DNA, 25 bp, Homo sapien
ccgtagcagctaccaccgccgccat

SEQ ID NO: 6067208 - DNA, 25 bp, Homo sapien
cagtgctctggtcctgttctgggaa

SEQ ID NO: 6067209 - DNA, 25 bp, Homo sapien
tcctcactcaggtctgggccccaga

SEQ ID NO: 6067210 - DNA, 25 bp, Homo sapien
ggctcctccttgcattctggtgagc

SEQ ID NO: 6067211 - DNA, 25 bp, Homo sapien
ggagccatggccacacaagacggca

SEQ ID NO: 6067212 - DNA, 25 bp, Homo sapien
atggccacacaagacggcagtcaat

SEQ ID NO: 6067213 - DNA, 25 bp, Homo sapien
ggaatgtattctagctcaggggaga

SEQ ID NO: 6067214 - DNA, 25 bp, Homo sapien
cccgtgttggacacccgcatgttct

SEQ ID NO: 6067215 - DNA, 25 bp, Homo sapien
agcacaaggttgcagtgatcctcac

SEQ ID NO: 6067216 - DNA, 25 bp, Homo sapien
tgaggacgaagaagaggataccaca

SEQ ID NO: 6067217 - DNA, 25 bp, Homo sapien
tcaatcggtccttgtccacttcctg

SEQ ID NO: 6067218 - DNA, 25 bp, Homo sapien
ttccacggtgtggaagagttgggtg

SEQ ID NO: 6067219 - DNA, 25 bp, Homo sapien
ggctcgggctcctccttgcattctg

SEQ ID NO: 6067220 - DNA, 25 bp, Homo sapien
ctcaggtctgggccccagacccaac

SEQ ID NO: 6067221 - DNA, 25 bp, Homo sapien
cctgttctgggaagccttgttagct

SEQ ID NO: 6067222 - DNA, 25 bp, Homo sapien
tggctccttccacggtgtggaagag

SEQ ID NO: 6067223 - DNA, 25 bp, Homo sapien
tggtgggcctcaggagccatggcca

SEQ ID NO: 6067224 - DNA, 25 bp, Homo sapien
tcctgcgccctctggtgggcctcag

SEQ ID NO: 6067225 - DNA, 25 bp, Homo sapien
agaggataccacaggggaagccgat

SEQ ID NO: 6067226 - DNA, 25 bp, Homo sapien
tttctgggaatgtattctagctcag

SEQ ID NO: 6067227 - DNA, 25 bp, Homo sapien
ctctcatactcgcccgtgttggaca

SEQ ID NO: 6067228 - DNA, 25 bp, Homo sapien
cattctggtgagctgtggctctgca

SEQ ID NO: 6067229 - DNA, 25 bp, Homo sapien
catggggttcttgcccctctttctg

SEQ ID NO: 6067230 - DNA, 25 bp, Homo sapien
gtattctagctcaggggagaggggc

SEQ ID NO: 6067231 - DNA, 25 bp, Homo sapien
tctgggccccagacccaacctcagg

SEQ ID NO: 6067232 - DNA, 25 bp, Homo sapien
acccgcatgttctgacgagctttca

SEQ ID NO: 6067233 - DNA, 25 bp, Homo sapien
ctcgccccccggcccttcagcgccg

SEQ ID NO: 6067234 - DNA, 25 bp, Homo sapien
tagctcaggggagaggggctcgggc

SEQ ID NO: 6067235 - DNA, 25 bp, Homo sapien
tagtctagcacaaggttgcagtgat

SEQ ID NO: 6067236 - DNA, 25 bp, Homo sapien
cttcctgcttggtgaggacgaagaa

SEQ ID NO: 6067237 - DNA, 25 bp, Homo sapien
gctctgcagtgctctggtcctgttc

SEQ ID NO: 6067238 - DNA, 25 bp, Homo sapien
ttgggcatcctgcgccctctggtgg

SEQ ID NO: 6067239 - DNA, 25 bp, Homo sapien
aagccctgaacctctggctctcata

SEQ ID NO: 6067240 - DNA, 25 bp, Homo sapien
aggatcccccggaggacgcgggcat

SEQ ID NO: 6067241 - DNA, 25 bp, Homo sapien
cagctaccaccgccgccatgttcgg

SEQ ID NO: 6067242 - DNA, 25 bp, Homo sapien
tccttgcattctggtgagctgtggc

SEQ ID NO: 6067243 - DNA, 25 bp, Homo sapien
tactcgcccgtgttggacacccgca

SEQ ID NO: 6067244 - DNA, 25 bp, Homo sapien
agacccaacctcagggaactgggct

SEQ ID NO: 6067245 - DNA, 25 bp, Homo sapien
tgacgagctttcatctgcttcaatc

SEQ ID NO: 6067246 - DNA, 25 bp, Homo sapien
atctgcttcaatcggtccttgtcca

SEQ ID NO: 6067247 - DNA, 25 bp, Homo sapien
gctttcatctgcttcaatcggtcct

SEQ ID NO: 6067248 - DNA, 25 bp, Homo sapien
aacctcagggaactgggcttgttgg

SEQ ID NO: 6067249 - DNA, 25 bp, Homo sapien
acacaagacggcagtcaatagtcta

SEQ ID NO: 6067250 - DNA, 25 bp, Homo sapien
cgaagaagaggataccacaggggaa

SEQ ID NO: 6067251 - DNA, 25 bp, Homo sapien
ggtgagctgtggctctgcagtgctc

SEQ ID NO: 6067252 - DNA, 25 bp, Homo sapien
ccccacggctttcatggggttcttg

SEQ ID NO: 6067253 - DNA, 25 bp, Homo sapien
tccagagaggatcccccggaggacg

SEQ ID NO: 6067254 - DNA, 25 bp, Homo sapien
actgggcttgttggggtgaagccct

SEQ ID NO: 6067255 - DNA, 25 bp, Homo sapien
gaagagttgggtgctggcagcagct

SEQ ID NO: 6067256 - DNA, 25 bp, Homo sapien
ttgggtgctggcagcagcttgggca

SEQ ID NO: 6067257 - DNA, 25 bp, Homo sapien
ttgttggggtgaagccctgaacctc

SEQ ID NO: 6067258 - DNA, 25 bp, Homo sapien
tcagcgccgtagcagctaccaccgc

SEQ ID NO: 6067259 - DNA, 25 bp, Homo sapien
agtcaatagtctagcacaaggttgc

SEQ ID NO: 6067260 - DNA, 25 bp, Homo sapien
ggtccttgtccacttcctgcttggt

SEQ ID NO: 6067261 - DNA, 25 bp, Homo sapien
agccttgttagctgtggctccagag

SEQ ID NO: 6067262 - DNA, 25 bp, Homo sapien
tgtggctccagagaggatcccccgg

SEQ ID NO: 6067263 - DNA, 25 bp, Homo sapien
gggtgaagccctgaacctctggctc

SEQ ID NO: 6067264 - DNA, 25 bp, Homo sapien
ccccggaggacgcgggcatttctcg

SEQ ID NO: 6067265 - DNA, 25 bp, Homo sapien
agccgatggcccaggctagccccac

SEQ ID NO: 6067266 - DNA, 25 bp, Homo sapien
ggctttcatggggttcttgcccctc

SEQ ID NO: 6067267 - DNA, 25 bp, Homo sapien
caggggagaggggctcgggctcctc

SEQ ID NO: 6067268 - DNA, 25 bp, Homo sapien
cagtgatcctcactcaggtctgggc

SEQ ID NO: 6067269 - DNA, 25 bp, Homo sapien
tgcatttggctccttccacggtgtg

SEQ ID NO: 6067270 - DNA, 25 bp, Homo sapien
aggctagccccacggctttcatggg

SEQ ID NO: 6067271 - DNA, 25 bp, Homo sapien
agcagcttgggcatcctgcgccctc

SEQ ID NO: 6067272 - DNA, 25 bp, Homo sapien
ccccggcccttcagcgccgtagcag

SEQ ID NO: 6067273 - DNA, 25 bp, Homo sapien
ctataatcacacatactaggtggga

SEQ ID NO: 6067274 - DNA, 25 bp, Homo sapien
gaggacatggcagaagccattacat

SEQ ID NO: 6067275 - DNA, 25 bp, Homo sapien
tttatgattgcggaactgcactcta

SEQ ID NO: 6067276 - DNA, 25 bp, Homo sapien
cacacatactaggtgggagattcac

SEQ ID NO: 6067277 - DNA, 25 bp, Homo sapien
caggaattgagagaagaggaccatc

SEQ ID NO: 6067278 - DNA, 25 bp, Homo sapien
ccaggaatgtttaatcattgaacaa

SEQ ID NO: 6067279 - DNA, 25 bp, Homo sapien
tagcgtatgctaagtgtcaatgatg

SEQ ID NO: 6067280 - DNA, 25 bp, Homo sapien
tacaaaaggagtacagtaatgtgtg

SEQ ID NO: 6067281 - DNA, 25 bp, Homo sapien
tcaatgatggtatgtgctacaggaa

SEQ ID NO: 6067282 - DNA, 25 bp, Homo sapien
gccattacatacagatgaatccagg

SEQ ID NO: 6067283 - DNA, 25 bp, Homo sapien
cagctttttcgactgaactgaggaa

SEQ ID NO: 6067284 - DNA, 25 bp, Homo sapien
gcagtgggctttatgattgcggaac

SEQ ID NO: 6067285 - DNA, 25 bp, Homo sapien
tgtcatgctggtctgccgccgtttt

SEQ ID NO: 6067286 - DNA, 25 bp, Homo sapien
tgctggtctgccgccgttttcgacc

SEQ ID NO: 6067287 - DNA, 25 bp, Homo sapien
ggtctgccgccgttttcgaccctga

SEQ ID NO: 6067288 - DNA, 25 bp, Homo sapien
gtcatgctggtctgccgccgttttc

SEQ ID NO: 6067289 - DNA, 25 bp, Homo sapien
tggtctgccgccgttttcgaccctg

SEQ ID NO: 6067290 - DNA, 25 bp, Homo sapien
catgctggtctgccgccgttttcga

SEQ ID NO: 6067291 - DNA, 25 bp, Homo sapien
gtctgccgccgttttcgaccctgag

SEQ ID NO: 6067292 - DNA, 25 bp, Homo sapien
atgctggtctgccgccgttttcgac

SEQ ID NO: 6067293 - DNA, 25 bp, Homo sapien
ctggtctgccgccgttttcgaccct

SEQ ID NO: 6067294 - DNA, 25 bp, Homo sapien
tcatgctggtctgccgccgttttcg

SEQ ID NO: 6067295 - DNA, 25 bp, Homo sapien
gctggtctgccgccgttttcgaccc

SEQ ID NO: 6067296 - DNA, 25 bp, Homo sapien
ggaaaagctacagggcactacacct

SEQ ID NO: 6067297 - DNA, 25 bp, Homo sapien
catgtgaccgtcagctgttcgctcg

SEQ ID NO: 6067298 - DNA, 25 bp, Homo sapien
tgggccttccgttcaaagcagagaa

SEQ ID NO: 6067299 - DNA, 25 bp, Homo sapien
gaaaaaggcctggatcatgtgaccg

SEQ ID NO: 6067300 - DNA, 25 bp, Homo sapien
tagttataggaaatcgtggaccacc

SEQ ID NO: 6067301 - DNA, 25 bp, Homo sapien
tgttctctgcaaaggcgatcctcag

SEQ ID NO: 6067302 - DNA, 25 bp, Homo sapien
gcctagggcgtggactactacgtca

SEQ ID NO: 6067303 - DNA, 25 bp, Homo sapien
gggctctagagaggctagattcccc

SEQ ID NO: 6067304 - DNA, 25 bp, Homo sapien
ggaatcgaactcaggccccttgaag

SEQ ID NO: 6067305 - DNA, 25 bp, Homo sapien
ctgttcgctcggaatggcttggtgc

SEQ ID NO: 6067306 - DNA, 25 bp, Homo sapien
gagaacagatgtcaggccagatgca

SEQ ID NO: 6067307 - DNA, 25 bp, Homo sapien
tgggttccaggccaaatgctctact

SEQ ID NO: 6067308 - DNA, 25 bp, Homo sapien
attttcctaacattatgatttgaca

SEQ ID NO: 6067309 - DNA, 25 bp, Homo sapien
accttgttaacacatataatctgtt

SEQ ID NO: 6067310 - DNA, 25 bp, Homo sapien
gtggttttattgaccgtatcataac

SEQ ID NO: 6067311 - DNA, 25 bp, Homo sapien
ccttgttaacacatataatctgtta

SEQ ID NO: 6067312 - DNA, 25 bp, Homo sapien
aagtggttttattgaccgtatcata

SEQ ID NO: 6067313 - DNA, 25 bp, Homo sapien
acaatgttgaacacagttggtactc

SEQ ID NO: 6067314 - DNA, 25 bp, Homo sapien
tcacggtattcagaactgaatataa

SEQ ID NO: 6067315 - DNA, 25 bp, Homo sapien
acacatataatctgttaatctgata

SEQ ID NO: 6067316 - DNA, 25 bp, Homo sapien
tggttttattgaccgtatcataaca

SEQ ID NO: 6067317 - DNA, 25 bp, Homo sapien
tttcctaacattatgatttgacaaa

SEQ ID NO: 6067318 - DNA, 25 bp, Homo sapien
aacaatgttgaacacagttggtact

SEQ ID NO: 6067319 - DNA, 25 bp, Homo sapien
aaagtggttttattgaccgtatcat

SEQ ID NO: 6067320 - DNA, 25 bp, Homo sapien
catttatgtaacagatgcatttctg

SEQ ID NO: 6067321 - DNA, 25 bp, Homo sapien
cactttaaattgaaacactggtaga

SEQ ID NO: 6067322 - DNA, 25 bp, Homo sapien
aaataagaattgaatgcacaacaga

SEQ ID NO: 6067323 - DNA, 25 bp, Homo sapien
tacagaaggccttatcccttgaaaa

SEQ ID NO: 6067324 - DNA, 25 bp, Homo sapien
tggtagaaacgtagcaatgtcaggt

SEQ ID NO: 6067325 - DNA, 25 bp, Homo sapien
tagaaatgtactccatagaatttac

SEQ ID NO: 6067326 - DNA, 25 bp, Homo sapien
ggtacaatgcctatacttagtctta

SEQ ID NO: 6067327 - DNA, 25 bp, Homo sapien
gcaatgtcaggtacaatgcctatac

SEQ ID NO: 6067328 - DNA, 25 bp, Homo sapien
gaaacactggtagaaacgtagcaat

SEQ ID NO: 6067329 - DNA, 25 bp, Homo sapien
aacactagcactttaaattgaaaca

SEQ ID NO: 6067330 - DNA, 25 bp, Homo sapien
tagaatttacttcactgctcctacc

SEQ ID NO: 6067331 - DNA, 25 bp, Homo sapien
tacttcactgctcctaccactgatt

SEQ ID NO: 6067332 - DNA, 25 bp, Homo sapien
tgtcttcccaaggatctgaactcgg

SEQ ID NO: 6067333 - DNA, 25 bp, Homo sapien
gcttcatttgcccaacggaggccca

SEQ ID NO: 6067334 - DNA, 25 bp, Homo sapien
taagaggaccgagtgccttcactgg

SEQ ID NO: 6067335 - DNA, 25 bp, Homo sapien
tcccagagactgtagagatcacctc

SEQ ID NO: 6067336 - DNA, 25 bp, Homo sapien
gaccgagaaggtgttatctaagacc

SEQ ID NO: 6067337 - DNA, 25 bp, Homo sapien
ggaggcccacgttcttcctgtctga

SEQ ID NO: 6067338 - DNA, 25 bp, Homo sapien
tctcatagatcgctgcagtgaatgc

SEQ ID NO: 6067339 - DNA, 25 bp, Homo sapien
cctgtcacgatttcctaaggcgaag

SEQ ID NO: 6067340 - DNA, 25 bp, Homo sapien
gacataccatgcagcttctaagagg

SEQ ID NO: 6067341 - DNA, 25 bp, Homo sapien
acatggacagggaacggctcgataa

SEQ ID NO: 6067342 - DNA, 25 bp, Homo sapien
taaagcccagattcacaaaattccg

SEQ ID NO: 6067343 - DNA, 25 bp, Homo sapien
tgtagagtgggctctgcaagaccct

SEQ ID NO: 6067344 - DNA, 25 bp, Homo sapien
ttcatatcgccatttccctacttgg

SEQ ID NO: 6067345 - DNA, 25 bp, Homo sapien
tatcctaagtgcagagctacaaacg

SEQ ID NO: 6067346 - DNA, 25 bp, Homo sapien
tccctgtggtgcaacggtatctctg

SEQ ID NO: 6067347 - DNA, 25 bp, Homo sapien
gagctacaaacgtctctcccaagct

SEQ ID NO: 6067348 - DNA, 25 bp, Homo sapien
tgctttaaatgtagtctggcctcaa

SEQ ID NO: 6067349 - DNA, 25 bp, Homo sapien
taggtaggagcttgggctaattatc

SEQ ID NO: 6067350 - DNA, 25 bp, Homo sapien
tactctgttcgttgacacttcaaaa

SEQ ID NO: 6067351 - DNA, 25 bp, Homo sapien
cctatcctgcaatctactctgttcg

SEQ ID NO: 6067352 - DNA, 25 bp, Homo sapien
ccactcggaagtcctcaaattgctt

SEQ ID NO: 6067353 - DNA, 25 bp, Homo sapien
cctcaagttaggttttcccactcag

SEQ ID NO: 6067354 - DNA, 25 bp, Homo sapien
ttcctagttggttcattccctgtgg

SEQ ID NO: 6067355 - DNA, 25 bp, Homo sapien
ctacttggactttcccactcggaag

SEQ ID NO: 6067356 - DNA, 25 bp, Homo sapien
ttacacatgtattgtcaagtatgac

SEQ ID NO: 6067357 - DNA, 25 bp, Homo sapien
aacacgttccatcaaacttctggcg

SEQ ID NO: 6067358 - DNA, 25 bp, Homo sapien
aacttctggcgtactttatgtgtca

SEQ ID NO: 6067359 - DNA, 25 bp, Homo sapien
tttggaaagattgcctaaggcacca

SEQ ID NO: 6067360 - DNA, 25 bp, Homo sapien
tgggcaccgtcactccgatatatat

SEQ ID NO: 6067361 - DNA, 25 bp, Homo sapien
tgacatccataaaagcacaaaacag

SEQ ID NO: 6067362 - DNA, 25 bp, Homo sapien
gaaatattacatctatcctgggcac

SEQ ID NO: 6067363 - DNA, 25 bp, Homo sapien
ctaaccacatatatagagactaggg

SEQ ID NO: 6067364 - DNA, 25 bp, Homo sapien
tacttagtgaagacagctttccagg

SEQ ID NO: 6067365 - DNA, 25 bp, Homo sapien
taaccacaaggttaggtgactagat

SEQ ID NO: 6067366 - DNA, 25 bp, Homo sapien
caaatatggcataagtagcaatggg

SEQ ID NO: 6067367 - DNA, 25 bp, Homo sapien
gtgtcatttccatgactactaacca

SEQ ID NO: 6067368 - DNA, 25 bp, Homo sapien
gaatccactttatgttatcacaatg

SEQ ID NO: 6067369 - DNA, 25 bp, Homo sapien
tcctacggtccagaaatgatcaaag

SEQ ID NO: 6067370 - DNA, 25 bp, Homo sapien
gcaagttcctctagcttgtgggaga

SEQ ID NO: 6067371 - DNA, 25 bp, Homo sapien
gatttataccagataaagccatatg

SEQ ID NO: 6067372 - DNA, 25 bp, Homo sapien
taaaaatagtgttctctggcccaag

SEQ ID NO: 6067373 - DNA, 25 bp, Homo sapien
tgttagagctaacacatttgcagta

SEQ ID NO: 6067374 - DNA, 25 bp, Homo sapien
gccaaataccttctgcctataatga

SEQ ID NO: 6067375 - DNA, 25 bp, Homo sapien
catttgcagtaagggacttagtcct

SEQ ID NO: 6067376 - DNA, 25 bp, Homo sapien
tgttaatatactcgcaagttcctct

SEQ ID NO: 6067377 - DNA, 25 bp, Homo sapien
aagccatatggattgctggtctaaa

SEQ ID NO: 6067378 - DNA, 25 bp, Homo sapien
gggacttagtcctgaatagaaagca

SEQ ID NO: 6067379 - DNA, 25 bp, Homo sapien
tggtctaaaattcaaggcaggttag

SEQ ID NO: 6067380 - DNA, 25 bp, Homo sapien
ggcctccacaggagccaagatggcg

SEQ ID NO: 6067381 - DNA, 25 bp, Homo sapien
ctccacaggagccaagatggcggta

SEQ ID NO: 6067382 - DNA, 25 bp, Homo sapien
cacaggagccaagatggcggtaaga

SEQ ID NO: 6067383 - DNA, 25 bp, Homo sapien
gccaagatggcggtaagagaaggac

SEQ ID NO: 6067384 - DNA, 25 bp, Homo sapien
ccaagatggcggtaagagaaggacg

SEQ ID NO: 6067385 - DNA, 25 bp, Homo sapien
tccacaggagccaagatggcggtaa

SEQ ID NO: 6067386 - DNA, 25 bp, Homo sapien
agatggcggtaagagaaggacgagg

SEQ ID NO: 6067387 - DNA, 25 bp, Homo sapien
atggcggtaagagaaggacgaggcc

SEQ ID NO: 6067388 - DNA, 25 bp, Homo sapien
ccacaggagccaagatggcggtaag

SEQ ID NO: 6067389 - DNA, 25 bp, Homo sapien
caagatggcggtaagagaaggacga

SEQ ID NO: 6067390 - DNA, 25 bp, Homo sapien
aagatggcggtaagagaaggacgag

SEQ ID NO: 6067391 - DNA, 25 bp, Homo sapien
gatggcggtaagagaaggacgaggc

SEQ ID NO: 6067392 - DNA, 25 bp, Homo sapien
ggtaatgccgtgcagctaaaatatg

SEQ ID NO: 6067393 - DNA, 25 bp, Homo sapien
tgacaggtagggttaatatgaagct

SEQ ID NO: 6067394 - DNA, 25 bp, Homo sapien
caagggtaaaatgcccttaatgcca

SEQ ID NO: 6067395 - DNA, 25 bp, Homo sapien
tttggcaataagtctatccgggctt

SEQ ID NO: 6067396 - DNA, 25 bp, Homo sapien
gatttacgcaacaccatgactaagg

SEQ ID NO: 6067397 - DNA, 25 bp, Homo sapien
catgaaatcgttacgttgacaggta

SEQ ID NO: 6067398 - DNA, 25 bp, Homo sapien
tattgaaaaaccagaggtgtcgtcc

SEQ ID NO: 6067399 - DNA, 25 bp, Homo sapien
tacatgtcactgaccgacccagaga

SEQ ID NO: 6067400 - DNA, 25 bp, Homo sapien
tataaagttaagctcccatacagtt

SEQ ID NO: 6067401 - DNA, 25 bp, Homo sapien
tacacgtcagtaacccttcaagttc

SEQ ID NO: 6067402 - DNA, 25 bp, Homo sapien
cccagggagttgcaaagtgctctgg

SEQ ID NO: 6067403 - DNA, 25 bp, Homo sapien
tcgtccctcttacccagggagttgc

SEQ ID NO: 6067404 - DNA, 25 bp, Homo sapien
gaacatcagctaattctggaggaag

SEQ ID NO: 6067405 - DNA, 25 bp, Homo sapien
ttttttataacaaggatggactgat

SEQ ID NO: 6067406 - DNA, 25 bp, Homo sapien
ctgatcaacagtttgttagaaaagc

SEQ ID NO: 6067407 - DNA, 25 bp, Homo sapien
tctgagacagtagaagagtcaaagg

SEQ ID NO: 6067408 - DNA, 25 bp, Homo sapien
agacagtagaagagtcaaaggtgtc

SEQ ID NO: 6067409 - DNA, 25 bp, Homo sapien
tacctaaggtctgagacagtagaag

SEQ ID NO: 6067410 - DNA, 25 bp, Homo sapien
taaggtctgagacagtagaagagtc

SEQ ID NO: 6067411 - DNA, 25 bp, Homo sapien
tataacaaggatggactgattttca

SEQ ID NO: 6067412 - DNA, 25 bp, Homo sapien
caaggatggactgattttcatattt

SEQ ID NO: 6067413 - DNA, 25 bp, Homo sapien
acagaattgtctttgcatgaagccc

SEQ ID NO: 6067414 - DNA, 25 bp, Homo sapien
gaattttctgctgtccacgagccat

SEQ ID NO: 6067415 - DNA, 25 bp, Homo sapien
ctgaattttctgctgtccacgagcc

SEQ ID NO: 6067416 - DNA, 25 bp, Homo sapien
tgattgccacttatgctttcttgcc

SEQ ID NO: 6067417 - DNA, 25 bp, Homo sapien
atgattgccacttatgctttcttgc

SEQ ID NO: 6067418 - DNA, 25 bp, Homo sapien
tatgattgccacttatgctttcttg

SEQ ID NO: 6067419 - DNA, 25 bp, Homo sapien
tctgtctctggtgcatccatgtcaa

SEQ ID NO: 6067420 - DNA, 25 bp, Homo sapien
gttctgtctctggtgcatccatgtc

SEQ ID NO: 6067421 - DNA, 25 bp, Homo sapien
atggccaccgctgcacgttctgtct

SEQ ID NO: 6067422 - DNA, 25 bp, Homo sapien
tgtctctggtgcatccatgtcaatg

SEQ ID NO: 6067423 - DNA, 25 bp, Homo sapien
cacgttctgtctctggtgcatccat

SEQ ID NO: 6067424 - DNA, 25 bp, Homo sapien
ctgtctctggtgcatccatgtcaat

SEQ ID NO: 6067425 - DNA, 25 bp, Homo sapien
gaatggccaccgctgcacgttctgt

SEQ ID NO: 6067426 - DNA, 25 bp, Homo sapien
acgttctgtctctggtgcatccatg

SEQ ID NO: 6067427 - DNA, 25 bp, Homo sapien
cgttctgtctctggtgcatccatgt

SEQ ID NO: 6067428 - DNA, 25 bp, Homo sapien
ttctgtctctggtgcatccatgtca

SEQ ID NO: 6067429 - DNA, 25 bp, Homo sapien
aatggccaccgctgcacgttctgtc

SEQ ID NO: 6067430 - DNA, 25 bp, Homo sapien
tgctgcatcgaactttaaacttcac

SEQ ID NO: 6067431 - DNA, 25 bp, Homo sapien
ctgctgcatcgaactttaaacttca

SEQ ID NO: 6067432 - DNA, 25 bp, Homo sapien
cgtatcaccctagagacactcacag

SEQ ID NO: 6067433 - DNA, 25 bp, Homo sapien
ccctagagacactcacagcaagcag

SEQ ID NO: 6067434 - DNA, 25 bp, Homo sapien
ctagagacactcacagcaagcagca

SEQ ID NO: 6067435 - DNA, 25 bp, Homo sapien
gggcagggactgcttcagtttctct

SEQ ID NO: 6067436 - DNA, 25 bp, Homo sapien
tgatcttgacagatttggcatcctt

SEQ ID NO: 6067437 - DNA, 25 bp, Homo sapien
cctttcgtcgggctgtgagcaggaa

SEQ ID NO: 6067438 - DNA, 25 bp, Homo sapien
tcagttccttcactgccaaaccggg

SEQ ID NO: 6067439 - DNA, 25 bp, Homo sapien
acactcacagcaagcagcaaccggg

SEQ ID NO: 6067440 - DNA, 25 bp, Homo sapien
tatcaccctagagacactcacagca

SEQ ID NO: 6067441 - DNA, 25 bp, Homo sapien
tcaccctagagacactcacagcaag

SEQ ID NO: 6067442 - DNA, 25 bp, Homo sapien
agagacactcacagcaagcagcaac

SEQ ID NO: 6067443 - DNA, 25 bp, Homo sapien
ctctggcgcggaccaggacctttct

SEQ ID NO: 6067444 - DNA, 25 bp, Homo sapien
ggcaggagcagatttagccgggtcg

SEQ ID NO: 6067445 - DNA, 25 bp, Homo sapien
cggaggagagtgaaagagcactcaa

SEQ ID NO: 6067446 - DNA, 25 bp, Homo sapien
gcggaggagagtgaaagagcactca

SEQ ID NO: 6067447 - DNA, 25 bp, Homo sapien
gcatggcggaggagagtgaaagagc

SEQ ID NO: 6067448 - DNA, 25 bp, Homo sapien
catggcggaggagagtgaaagagca

SEQ ID NO: 6067449 - DNA, 25 bp, Homo sapien
ggaggagagtgaaagagcactcaaa

SEQ ID NO: 6067450 - DNA, 25 bp, Homo sapien
gaggagagtgaaagagcactcaaat

SEQ ID NO: 6067451 - DNA, 25 bp, Homo sapien
gcaggagcagatttagccgggtcgg

SEQ ID NO: 6067452 - DNA, 25 bp, Homo sapien
caggagcagatttagccgggtcggg

SEQ ID NO: 6067453 - DNA, 25 bp, Homo sapien
gggcaggagcagatttagccgggtc

SEQ ID NO: 6067454 - DNA, 25 bp, Homo sapien
ggagcagatttagccgggtcgggca

SEQ ID NO: 6067455 - DNA, 25 bp, Homo sapien
tggcggaggagagtgaaagagcact

SEQ ID NO: 6067456 - DNA, 25 bp, Homo sapien
atattgtcgcgcagtactttacggt

SEQ ID NO: 6067457 - DNA, 25 bp, Homo sapien
gatgccctggatattgtcgcgcagt

SEQ ID NO: 6067458 - DNA, 25 bp, Homo sapien
cctggatattgtcgcgcagtacttt

SEQ ID NO: 6067459 - DNA, 25 bp, Homo sapien
tgccctggatattgtcgcgcagtac

SEQ ID NO: 6067460 - DNA, 25 bp, Homo sapien
gatattgtcgcgcagtactttacgg

SEQ ID NO: 6067461 - DNA, 25 bp, Homo sapien
attgtcgcgcagtactttacggtgg

SEQ ID NO: 6067462 - DNA, 25 bp, Homo sapien
atgccctggatattgtcgcgcagta

SEQ ID NO: 6067463 - DNA, 25 bp, Homo sapien
ggatattgtcgcgcagtactttacg

SEQ ID NO: 6067464 - DNA, 25 bp, Homo sapien
tattgtcgcgcagtactttacggtg

SEQ ID NO: 6067465 - DNA, 25 bp, Homo sapien
gccctggatattgtcgcgcagtact

SEQ ID NO: 6067466 - DNA, 25 bp, Homo sapien
ccctggatattgtcgcgcagtactt

SEQ ID NO: 6067467 - DNA, 25 bp, Homo sapien
tggatattgtcgcgcagtactttac

SEQ ID NO: 6067468 - DNA, 25 bp, Homo sapien
tgggaatcaattgaagtagtcaata

SEQ ID NO: 6067469 - DNA, 25 bp, Homo sapien
ggtatgatcctgaatagcaatttgg

SEQ ID NO: 6067470 - DNA, 25 bp, Homo sapien
gattataaattggtatgatcctgaa

SEQ ID NO: 6067471 - DNA, 25 bp, Homo sapien
gaataggagatactaggagttattt

SEQ ID NO: 6067472 - DNA, 25 bp, Homo sapien
ttgaagtagtcaataacaaatacat

SEQ ID NO: 6067473 - DNA, 25 bp, Homo sapien
taaatatatatcatgacacctaaat

SEQ ID NO: 6067474 - DNA, 25 bp, Homo sapien
aagaataggagatactaggagttat

SEQ ID NO: 6067475 - DNA, 25 bp, Homo sapien
tatatcatgacacctaaatttattt

SEQ ID NO: 6067476 - DNA, 25 bp, Homo sapien
taaattggtatgatcctgaatagca

SEQ ID NO: 6067477 - DNA, 25 bp, Homo sapien
tatttccacttcatgaagtctatcc

SEQ ID NO: 6067478 - DNA, 25 bp, Homo sapien
tgcatagaaaaaagagctaattttt

SEQ ID NO: 6067479 - DNA, 25 bp, Homo sapien
ttagtatttccacttcatgaagtct

SEQ ID NO: 6067480 - DNA, 25 bp, Homo sapien
tcccgcacaatctgaagtaagttca

SEQ ID NO: 6067481 - DNA, 25 bp, Homo sapien
gtcccgcacaatctgaagtaagttc

SEQ ID NO: 6067482 - DNA, 25 bp, Homo sapien
gcacaatctgaagtaagttcaccat

SEQ ID NO: 6067483 - DNA, 25 bp, Homo sapien
ccgcacaatctgaagtaagttcacc

SEQ ID NO: 6067484 - DNA, 25 bp, Homo sapien
ccatagggacaagaacatgaaccca

SEQ ID NO: 6067485 - DNA, 25 bp, Homo sapien
cccgcacaatctgaagtaagttcac

SEQ ID NO: 6067486 - DNA, 25 bp, Homo sapien
ggtcccgcacaatctgaagtaagtt

SEQ ID NO: 6067487 - DNA, 25 bp, Homo sapien
cgcacaatctgaagtaagttcacca

SEQ ID NO: 6067488 - DNA, 25 bp, Homo sapien
tggtcccgcacaatctgaagtaagt

SEQ ID NO: 6067489 - DNA, 25 bp, Homo sapien
ggccaaaagcaccacggtcagatgg

SEQ ID NO: 6067490 - DNA, 25 bp, Homo sapien
gatatcacgagtgtacttggtagag

SEQ ID NO: 6067491 - DNA, 25 bp, Homo sapien
ggtgggacacttccagcaacagtaa

SEQ ID NO: 6067492 - DNA, 25 bp, Homo sapien
catgaagagtgaggccactaaggag

SEQ ID NO: 6067493 - DNA, 25 bp, Homo sapien
aggtgggacacttccagcaacagta

SEQ ID NO: 6067494 - DNA, 25 bp, Homo sapien
tcacacgtagatgccaacccagagc

SEQ ID NO: 6067495 - DNA, 25 bp, Homo sapien
aagagtgaggccactaaggagatga

SEQ ID NO: 6067496 - DNA, 25 bp, Homo sapien
tatcacgagtgtacttggtagaggt

SEQ ID NO: 6067497 - DNA, 25 bp, Homo sapien
ggccactaaggagatgaggagctct

SEQ ID NO: 6067498 - DNA, 25 bp, Homo sapien
tatagatatcacgagtgtacttggt

SEQ ID NO: 6067499 - DNA, 25 bp, Homo sapien
tctttatagatatcacgagtgtact

SEQ ID NO: 6067500 - DNA, 25 bp, Homo sapien
gccaaaagcaccacggtcagatggg

SEQ ID NO: 6067501 - DNA, 25 bp, Homo sapien
cgcttgccgtcgatgttgaggctca

SEQ ID NO: 6067502 - DNA, 25 bp, Homo sapien
atgttccggcgcgtctccagcgtca

SEQ ID NO: 6067503 - DNA, 25 bp, Homo sapien
cgaacaccaccacgcggtaatcgtt

SEQ ID NO: 6067504 - DNA, 25 bp, Homo sapien
cacgctgcccttgatctgcacgatg

SEQ ID NO: 6067505 - DNA, 25 bp, Homo sapien
tgcacacgctcttgtcgcagctgat

SEQ ID NO: 6067506 - DNA, 25 bp, Homo sapien
ccttgatctgcacgatgagcttgta

SEQ ID NO: 6067507 - DNA, 25 bp, Homo sapien
tggccgaggtctccatgaaagcgca

SEQ ID NO: 6067508 - DNA, 25 bp, Homo sapien
aacgtgcccttcacgaagcgcagca

SEQ ID NO: 6067509 - DNA, 25 bp, Homo sapien
gctgcgtctcatcgcacttgttgcc

SEQ ID NO: 6067510 - DNA, 25 bp, Homo sapien
atgaaagcgcacttccactcctggg

SEQ ID NO: 6067511 - DNA, 25 bp, Homo sapien
gactgcttgctggtgacggagaaca

SEQ ID NO: 6067512 - DNA, 25 bp, Homo sapien
tgttgaggctcatgttccggcgcgt

SEQ ID NO: 6067513 - DNA, 25 bp, Homo sapien
tcgtgagcaaagtaggttttccgct

SEQ ID NO: 6067514 - DNA, 25 bp, Homo sapien
catcgtgagcaaagtaggttttccg

SEQ ID NO: 6067515 - DNA, 25 bp, Homo sapien
ggcatcgtgagcaaagtaggttttc

SEQ ID NO: 6067516 - DNA, 25 bp, Homo sapien
atcgtgagcaaagtaggttttccgc

SEQ ID NO: 6067517 - DNA, 25 bp, Homo sapien
gcatcgtgagcaaagtaggttttcc

SEQ ID NO: 6067518 - DNA, 25 bp, Homo sapien
gtgagcaaagtaggttttccgctta

SEQ ID NO: 6067519 - DNA, 25 bp, Homo sapien
tgagcaaagtaggttttccgcttat

SEQ ID NO: 6067520 - DNA, 25 bp, Homo sapien
cgtgagcaaagtaggttttccgctt

SEQ ID NO: 6067521 - DNA, 25 bp, Homo sapien
cgaacaccaccacgcggtaatcgtt

SEQ ID NO: 6067522 - DNA, 25 bp, Homo sapien
cgcttgccgtcgatgttgaggctca

SEQ ID NO: 6067523 - DNA, 25 bp, Homo sapien
atgaaagcgcacttccactcctggg

SEQ ID NO: 6067524 - DNA, 25 bp, Homo sapien
aacgtgcccttcacgaagcgcagca

SEQ ID NO: 6067525 - DNA, 25 bp, Homo sapien
tgcacacgctcttgtcgcagctgat

SEQ ID NO: 6067526 - DNA, 25 bp, Homo sapien
gctgcgtctcatcgcacttgttgcc

SEQ ID NO: 6067527 - DNA, 25 bp, Homo sapien
tggccgaggtctccatgaaagcgca

SEQ ID NO: 6067528 - DNA, 25 bp, Homo sapien
ccttgatctgcacgatgagcttgta

SEQ ID NO: 6067529 - DNA, 25 bp, Homo sapien
gactgcttgctggtgacggagaaca

SEQ ID NO: 6067530 - DNA, 25 bp, Homo sapien
tgttgaggctcatgttccggcgcgt

SEQ ID NO: 6067531 - DNA, 25 bp, Homo sapien
cacgctgcccttgatctgcacgatg

SEQ ID NO: 6067532 - DNA, 25 bp, Homo sapien
atgttccggcgcgtctccagcgtca

SEQ ID NO: 6067533 - DNA, 25 bp, Homo sapien
aagaatgttgtccagaggtaaaggt

SEQ ID NO: 6067534 - DNA, 25 bp, Homo sapien
cagaggtaaaggtgccaacttgtca

SEQ ID NO: 6067535 - DNA, 25 bp, Homo sapien
gagtaactacaaaggctgatggtca

SEQ ID NO: 6067536 - DNA, 25 bp, Homo sapien
tttcagaagaagctttaatggatcc

SEQ ID NO: 6067537 - DNA, 25 bp, Homo sapien
aatgttgtccagaggtaaaggtgcc

SEQ ID NO: 6067538 - DNA, 25 bp, Homo sapien
cccctccacaaggtgctcaacagaa

SEQ ID NO: 6067539 - DNA, 25 bp, Homo sapien
cagagtaactacaaaggctgatggt

SEQ ID NO: 6067540 - DNA, 25 bp, Homo sapien
tgtccagaggtaaaggtgccaactt

SEQ ID NO: 6067541 - DNA, 25 bp, Homo sapien
ttccttagcccctccacaaggtgct

SEQ ID NO: 6067542 - DNA, 25 bp, Homo sapien
taaaggtgccaacttgtcaacagga

SEQ ID NO: 6067543 - DNA, 25 bp, Homo sapien
gctttaatggatccataaagggaag

SEQ ID NO: 6067544 - DNA, 25 bp, Homo sapien
ggtgccaacttgtcaacaggaaggg

SEQ ID NO: 6067545 - DNA, 25 bp, Homo sapien
gtgggcttctccacccaggcgccca

SEQ ID NO: 6067546 - DNA, 25 bp, Homo sapien
cgtggtacaggctgcccaggatgat

SEQ ID NO: 6067547 - DNA, 25 bp, Homo sapien
ccccctgcagcaccccgttccaggt

SEQ ID NO: 6067548 - DNA, 25 bp, Homo sapien
cgtccagttgacactgaagttgcgt

SEQ ID NO: 6067549 - DNA, 25 bp, Homo sapien
aacagacgggccttggcagcctggt

SEQ ID NO: 6067550 - DNA, 25 bp, Homo sapien
ttggactcgtggtatgtggtaggct

SEQ ID NO: 6067551 - DNA, 25 bp, Homo sapien
agcctggtactccttcgctgccagc

SEQ ID NO: 6067552 - DNA, 25 bp, Homo sapien
ggcacctttccgtgtacccgcatcc

SEQ ID NO: 6067553 - DNA, 25 bp, Homo sapien
ttcccaccacgttccagcgtgctat

SEQ ID NO: 6067554 - DNA, 25 bp, Homo sapien
gatgacctcaatggccgtgtcgccc

SEQ ID NO: 6067555 - DNA, 25 bp, Homo sapien
tttccgtgtacccgcatccagcgac

SEQ ID NO: 6067556 - DNA, 25 bp, Homo sapien
ggaggggcggcctagttcatccttc

SEQ ID NO: 6067557 - DNA, 25 bp, Homo sapien
ccttgatgaaggcagtgaacagacg

SEQ ID NO: 6067558 - DNA, 25 bp, Homo sapien
ctggagaggtggtccccgtggtaca

SEQ ID NO: 6067559 - DNA, 25 bp, Homo sapien
tcgctgccagcttggactcgtggta

SEQ ID NO: 6067560 - DNA, 25 bp, Homo sapien
tacctctgcattgctgataccgctg

SEQ ID NO: 6067561 - DNA, 25 bp, Homo sapien
tgttgtggaattgatgacctcaatg

SEQ ID NO: 6067562 - DNA, 25 bp, Homo sapien
gccccgccttgatgaaggcagtgaa

SEQ ID NO: 6067563 - DNA, 25 bp, Homo sapien
aggacatggtgagcagccgctcccc

SEQ ID NO: 6067564 - DNA, 25 bp, Homo sapien
gtaggcttagtgatcttggtgcgca

SEQ ID NO: 6067565 - DNA, 25 bp, Homo sapien
tgtacccgcatccagcgacagtaca

SEQ ID NO: 6067566 - DNA, 25 bp, Homo sapien
cttccctgttgtggaattgatgacc

SEQ ID NO: 6067567 - DNA, 25 bp, Homo sapien
ggaattgatgacctcaatggccgtg

SEQ ID NO: 6067568 - DNA, 25 bp, Homo sapien
ttctccacccaggcgcccagccccg

SEQ ID NO: 6067569 - DNA, 25 bp, Homo sapien
gggcggcctagttcatccttccctg

SEQ ID NO: 6067570 - DNA, 25 bp, Homo sapien
tgccttccctggctgccgtacctct

SEQ ID NO: 6067571 - DNA, 25 bp, Homo sapien
ctatgttggagatccgctggtacgc

SEQ ID NO: 6067572 - DNA, 25 bp, Homo sapien
tgctggagaagtagatgggctccac

SEQ ID NO: 6067573 - DNA, 25 bp, Homo sapien
agagcggtggcaggtcctctatgtt

SEQ ID NO: 6067574 - DNA, 25 bp, Homo sapien
ttacacaggcgggaggggcggccta

SEQ ID NO: 6067575 - DNA, 25 bp, Homo sapien
ccctggctgccgtacctctgcattg

SEQ ID NO: 6067576 - DNA, 25 bp, Homo sapien
cggccctggagaggtggtccccgtg

SEQ ID NO: 6067577 - DNA, 25 bp, Homo sapien
acagtacagcgcgtgcttacacagg

SEQ ID NO: 6067578 - DNA, 25 bp, Homo sapien
tgcattgctgataccgctgtgcagc

SEQ ID NO: 6067579 - DNA, 25 bp, Homo sapien
cagggccccctggattcccaccacg

SEQ ID NO: 6067580 - DNA, 25 bp, Homo sapien
cccctggattcccaccacgttccag

SEQ ID NO: 6067581 - DNA, 25 bp, Homo sapien
gctccacgaaaatgctgagcagggc

SEQ ID NO: 6067582 - DNA, 25 bp, Homo sapien
tgctgagcagggccccctggattcc

SEQ ID NO: 6067583 - DNA, 25 bp, Homo sapien
ggtccccgtggtacaggctgcccag

SEQ ID NO: 6067584 - DNA, 25 bp, Homo sapien
acaggctgcccaggatgatgctgga

SEQ ID NO: 6067585 - DNA, 25 bp, Homo sapien
cgaaaatgctgagcagggccccctg

SEQ ID NO: 6067586 - DNA, 25 bp, Homo sapien
tcgtggtatgtggtaggcttagtga

SEQ ID NO: 6067587 - DNA, 25 bp, Homo sapien
gaagtagatgggctccacgaaaatg

SEQ ID NO: 6067588 - DNA, 25 bp, Homo sapien
gcccagccccgccttgatgaaggca

SEQ ID NO: 6067589 - DNA, 25 bp, Homo sapien
tactccttcgctgccagcttggact

SEQ ID NO: 6067590 - DNA, 25 bp, Homo sapien
acagcgcgtgcttacacaggcggga

SEQ ID NO: 6067591 - DNA, 25 bp, Homo sapien
tccgctggtacgcggccctggagag

SEQ ID NO: 6067592 - DNA, 25 bp, Homo sapien
tttggatgctggcatttgagtgcac

SEQ ID NO: 6067593 - DNA, 25 bp, Homo sapien
gtgctatcttgtcactgcaggacat

SEQ ID NO: 6067594 - DNA, 25 bp, Homo sapien
ggtcctctatgttggagatccgctg

SEQ ID NO: 6067595 - DNA, 25 bp, Homo sapien
caggcgggaggggcggcctagttca

SEQ ID NO: 6067596 - DNA, 25 bp, Homo sapien
ccccgttccaggtttggatgctggc

SEQ ID NO: 6067597 - DNA, 25 bp, Homo sapien
ccagcgacagtacagcgcgtgctta

SEQ ID NO: 6067598 - DNA, 25 bp, Homo sapien
ctgccgtacctctgcattgctgata

SEQ ID NO: 6067599 - DNA, 25 bp, Homo sapien
tccagcgtgctatcttgtcactgca

SEQ ID NO: 6067600 - DNA, 25 bp, Homo sapien
agatgggctccacgaaaatgctgag

SEQ ID NO: 6067601 - DNA, 25 bp, Homo sapien
tgctgataccgctgtgcagcagctt

SEQ ID NO: 6067602 - DNA, 25 bp, Homo sapien
gttgcgtgccttccctggctgccgt

SEQ ID NO: 6067603 - DNA, 25 bp, Homo sapien
caatggccgtgtcgcccaccgtcca

SEQ ID NO: 6067604 - DNA, 25 bp, Homo sapien
cactgcaggacatggtgagcagccg

SEQ ID NO: 6067605 - DNA, 25 bp, Homo sapien
actgaagttgcgtgccttccctggc

SEQ ID NO: 6067606 - DNA, 25 bp, Homo sapien
ccacgttccagcgtgctatcttgtc

SEQ ID NO: 6067607 - DNA, 25 bp, Homo sapien
cagcaggtgggggggcacctttccg

SEQ ID NO: 6067608 - DNA, 25 bp, Homo sapien
tgcccaggatgatgctggagaagta

SEQ ID NO: 6067609 - DNA, 25 bp, Homo sapien
tatgtggtaggcttagtgatcttgg

SEQ ID NO: 6067610 - DNA, 25 bp, Homo sapien
gggtgtagagcggtggcaggtcctc

SEQ ID NO: 6067611 - DNA, 25 bp, Homo sapien
gcagcttgttgagggtgtagagcgg

SEQ ID NO: 6067612 - DNA, 25 bp, Homo sapien
gttgacactgaagttgcgtgccttc

SEQ ID NO: 6067613 - DNA, 25 bp, Homo sapien
gcccaccgtccagttgacactgaag

SEQ ID NO: 6067614 - DNA, 25 bp, Homo sapien
ccgtgtcgcccaccgtccagttgac

SEQ ID NO: 6067615 - DNA, 25 bp, Homo sapien
tcatccttccctgttgtggaattga

SEQ ID NO: 6067616 - DNA, 25 bp, Homo sapien
tggagatccgctggtacgcggccct

SEQ ID NO: 6067617 - DNA, 25 bp, Homo sapien
taccgctgtgcagcagcttgttgag

SEQ ID NO: 6067618 - DNA, 25 bp, Homo sapien
cgcatccagcgacagtacagcgcgt

SEQ ID NO: 6067619 - DNA, 25 bp, Homo sapien
gcagtgaacagacgggccttggcag

SEQ ID NO: 6067620 - DNA, 25 bp, Homo sapien
cccaggcgcccagccccgccttgat

SEQ ID NO: 6067621 - DNA, 25 bp, Homo sapien
cttggcagcctggtactccttcgct

SEQ ID NO: 6067622 - DNA, 25 bp, Homo sapien
tgtgcagcagcttgttgagggtgta

SEQ ID NO: 6067623 - DNA, 25 bp, Homo sapien
ttagtgatcttggtgcgcagcaggt

SEQ ID NO: 6067624 - DNA, 25 bp, Homo sapien
tgttgagggtgtagagcggtggcag

SEQ ID NO: 6067625 - DNA, 25 bp, Homo sapien
ccagcttggactcgtggtatgtggt

SEQ ID NO: 6067626 - DNA, 25 bp, Homo sapien
ggatgatgctggagaagtagatggg

SEQ ID NO: 6067627 - DNA, 25 bp, Homo sapien
gccgctccccctgcagcaccccgtt

SEQ ID NO: 6067628 - DNA, 25 bp, Homo sapien
atgaaggcagtgaacagacgggcct

SEQ ID NO: 6067629 - DNA, 25 bp, Homo sapien
gcagcaccccgttccaggtttggat

SEQ ID NO: 6067630 - DNA, 25 bp, Homo sapien
ggtacgcggccctggagaggtggtc

SEQ ID NO: 6067631 - DNA, 25 bp, Homo sapien
gtggcaggtcctctatgttggagat

SEQ ID NO: 6067632 - DNA, 25 bp, Homo sapien
tccaggtttggatgctggcatttga

SEQ ID NO: 6067633 - DNA, 25 bp, Homo sapien
gaggtggtccccgtggtacaggctg

SEQ ID NO: 6067634 - DNA, 25 bp, Homo sapien
acgggccttggcagcctggtactcc

SEQ ID NO: 6067635 - DNA, 25 bp, Homo sapien
tcttgtcactgcaggacatggtgag

SEQ ID NO: 6067636 - DNA, 25 bp, Homo sapien
cctagttcatccttccctgttgtgg

SEQ ID NO: 6067637 - DNA, 25 bp, Homo sapien
tggattcccaccacgttccagcgtg

SEQ ID NO: 6067638 - DNA, 25 bp, Homo sapien
tgaccaggtctacctcaatgcctag

SEQ ID NO: 6067639 - DNA, 25 bp, Homo sapien
ccttaactctgggagggcaatgacc

SEQ ID NO: 6067640 - DNA, 25 bp, Homo sapien
attagcccttaactctgggagggca

SEQ ID NO: 6067641 - DNA, 25 bp, Homo sapien
cttgaattaacctcagcaggaagct

SEQ ID NO: 6067642 - DNA, 25 bp, Homo sapien
gcattactgtgaaggtgcccaatgg

SEQ ID NO: 6067643 - DNA, 25 bp, Homo sapien
tgccatcttataagaagctctttca

SEQ ID NO: 6067644 - DNA, 25 bp, Homo sapien
tcaggtactattttactgcctcaga

SEQ ID NO: 6067645 - DNA, 25 bp, Homo sapien
gtagacttgaattaacctcagcagg

SEQ ID NO: 6067646 - DNA, 25 bp, Homo sapien
gagggcaatgaccaggtctacctca

SEQ ID NO: 6067647 - DNA, 25 bp, Homo sapien
cagatagttgaataactctcagcac

SEQ ID NO: 6067648 - DNA, 25 bp, Homo sapien
aatacaaatgctcttgccaggcaca

SEQ ID NO: 6067649 - DNA, 25 bp, Homo sapien
ggtgcccaatggaaattatatctga

SEQ ID NO: 6067650 - DNA, 25 bp, Homo sapien
tatccaggaagagccatcggactca

SEQ ID NO: 6067651 - DNA, 25 bp, Homo sapien
caggaagagccatcggactcataga

SEQ ID NO: 6067652 - DNA, 25 bp, Homo sapien
catcggactcatagaccagagcaag

SEQ ID NO: 6067653 - DNA, 25 bp, Homo sapien
gagccatcggactcatagaccagag

SEQ ID NO: 6067654 - DNA, 25 bp, Homo sapien
tacgagaatcattagcccttaactc

SEQ ID NO: 6067655 - DNA, 25 bp, Homo sapien
catatccaggaagagccatcggact

SEQ ID NO: 6067656 - DNA, 25 bp, Homo sapien
gtatatatacgagaatcattagccc

SEQ ID NO: 6067657 - DNA, 25 bp, Homo sapien
atgccaggatatggaaaccctgcag

SEQ ID NO: 6067658 - DNA, 25 bp, Homo sapien
ctgtttagtatatatacgagaatca

SEQ ID NO: 6067659 - DNA, 25 bp, Homo sapien
gactcatagaccagagcaaggtatc

SEQ ID NO: 6067660 - DNA, 25 bp, Homo sapien
tcggactcatagaccagagcaaggt

SEQ ID NO: 6067661 - DNA, 25 bp, Homo sapien
gaagagccatcggactcatagacca

SEQ ID NO: 6067662 - DNA, 25 bp, Homo sapien
ctctcccgaagaggcgtctctgctg

SEQ ID NO: 6067663 - DNA, 25 bp, Homo sapien
ggacagggtgaacttggtgcggtgg

SEQ ID NO: 6067664 - DNA, 25 bp, Homo sapien
atgttgaagaggaggttcatgatgt

SEQ ID NO: 6067665 - DNA, 25 bp, Homo sapien
cagcaggaagtggaccggcatcagc

SEQ ID NO: 6067666 - DNA, 25 bp, Homo sapien
gacgtcgagggacagggtgaacttg

SEQ ID NO: 6067667 - DNA, 25 bp, Homo sapien
tctcagcctcagacagggcggtgtt

SEQ ID NO: 6067668 - DNA, 25 bp, Homo sapien
ctgcgcaggtagtggaagctcctct

SEQ ID NO: 6067669 - DNA, 25 bp, Homo sapien
cgcctgggcacgcaggttcttggcc

SEQ ID NO: 6067670 - DNA, 25 bp, Homo sapien
acgcaggttcttggccttggcgatg

SEQ ID NO: 6067671 - DNA, 25 bp, Homo sapien
gcgcaggtagtggaagctcctcttg

SEQ ID NO: 6067672 - DNA, 25 bp, Homo sapien
gcaggaagtggaccggcatcagcat

SEQ ID NO: 6067673 - DNA, 25 bp, Homo sapien
tcagcctcagacagggcggtgttga

SEQ ID NO: 6067674 - DNA, 25 bp, Homo sapien
cagccaccacgaagttttcctggag

SEQ ID NO: 6067675 - DNA, 25 bp, Homo sapien
ttctacagtagtaaaagcatggtct

SEQ ID NO: 6067676 - DNA, 25 bp, Homo sapien
cagagggaagttaattatctagccc

SEQ ID NO: 6067677 - DNA, 25 bp, Homo sapien
taagactgccctactgttctacagt

SEQ ID NO: 6067678 - DNA, 25 bp, Homo sapien
cacttgaataagtggtgtggtcacc

SEQ ID NO: 6067679 - DNA, 25 bp, Homo sapien
tagtggagcccatcaaactcattat

SEQ ID NO: 6067680 - DNA, 25 bp, Homo sapien
ttcaacacggatatatttcaagagc

SEQ ID NO: 6067681 - DNA, 25 bp, Homo sapien
tctgtgcccgccaagtcctcttaaa

SEQ ID NO: 6067682 - DNA, 25 bp, Homo sapien
gaggttctagcatttagtggagccc

SEQ ID NO: 6067683 - DNA, 25 bp, Homo sapien
tctcctgagacgtatttgaaggtcc

SEQ ID NO: 6067684 - DNA, 25 bp, Homo sapien
atttggaccgcagaccccttggctt

SEQ ID NO: 6067685 - DNA, 25 bp, Homo sapien
gtgtggtcaccagcgcattttgtat

SEQ ID NO: 6067686 - DNA, 25 bp, Homo sapien
gcgattgtaatgaaatctgacgttt

SEQ ID NO: 6067687 - DNA, 25 bp, Homo sapien
ccagccacgcgattgtaatgaaatc

SEQ ID NO: 6067688 - DNA, 25 bp, Homo sapien
ttgtaatgaaatctgacgtttcaca

SEQ ID NO: 6067689 - DNA, 25 bp, Homo sapien
ccacgcgattgtaatgaaatctgac

SEQ ID NO: 6067690 - DNA, 25 bp, Homo sapien
aaaaccagccacgcgattgtaatga

SEQ ID NO: 6067691 - DNA, 25 bp, Homo sapien
cgcgattgtaatgaaatctgacgtt

SEQ ID NO: 6067692 - DNA, 25 bp, Homo sapien
gattgtaatgaaatctgacgtttca

SEQ ID NO: 6067693 - DNA, 25 bp, Homo sapien
cgattgtaatgaaatctgacgtttc

SEQ ID NO: 6067694 - DNA, 25 bp, Homo sapien
accagccacgcgattgtaatgaaat

SEQ ID NO: 6067695 - DNA, 25 bp, Homo sapien
aaaccagccacgcgattgtaatgaa

SEQ ID NO: 6067696 - DNA, 25 bp, Homo sapien
cacgcgattgtaatgaaatctgacg

SEQ ID NO: 6067697 - DNA, 25 bp, Homo sapien
aaccagccacgcgattgtaatgaaa

SEQ ID NO: 6067698 - DNA, 25 bp, Homo sapien
aagagttttaatggcaaagttggct

SEQ ID NO: 6067699 - DNA, 25 bp, Homo sapien
caggatggacgtgttgacagccagc

SEQ ID NO: 6067700 - DNA, 25 bp, Homo sapien
ccaggccgtagtcggtgaagagcac

SEQ ID NO: 6067701 - DNA, 25 bp, Homo sapien
tggctgcagcgacaatgccactcgg

SEQ ID NO: 6067702 - DNA, 25 bp, Homo sapien
gctcaggatggacgtgttgacagcc

SEQ ID NO: 6067703 - DNA, 25 bp, Homo sapien
ccctgaagaagcagcgagcgaggct

SEQ ID NO: 6067704 - DNA, 25 bp, Homo sapien
caaagttggctgcagcgacaatgcc

SEQ ID NO: 6067705 - DNA, 25 bp, Homo sapien
tactgccggaaggtctggtagcagc

SEQ ID NO: 6067706 - DNA, 25 bp, Homo sapien
atggagcaggcggacagtgggttcc

SEQ ID NO: 6067707 - DNA, 25 bp, Homo sapien
tttaatggcaaagttggctgcagcg

SEQ ID NO: 6067708 - DNA, 25 bp, Homo sapien
acagtactgccggaaggtctggtag

SEQ ID NO: 6067709 - DNA, 25 bp, Homo sapien
tgggttccgcacgtggcaggtgcac

SEQ ID NO: 6067710 - DNA, 25 bp, Homo sapien
gtgggagcgggtgaggaaggtctgt

SEQ ID NO: 6067711 - DNA, 25 bp, Homo sapien
cattgtccaaagctttgcttgtggc

SEQ ID NO: 6067712 - DNA, 25 bp, Homo sapien
ggaccagggtttggctctgacattc

SEQ ID NO: 6067713 - DNA, 25 bp, Homo sapien
gccatggtcccttgtggcttctcct

SEQ ID NO: 6067714 - DNA, 25 bp, Homo sapien
gggctgccctctgactctgggccca

SEQ ID NO: 6067715 - DNA, 25 bp, Homo sapien
ggagcagagggggtctcaggcacga

SEQ ID NO: 6067716 - DNA, 25 bp, Homo sapien
cagcctgagccaggggctgccctct

SEQ ID NO: 6067717 - DNA, 25 bp, Homo sapien
cgttgaaggaggctgagctgtgcca

SEQ ID NO: 6067718 - DNA, 25 bp, Homo sapien
accacactgtgatacagggggcaag

SEQ ID NO: 6067719 - DNA, 25 bp, Homo sapien
aaggaggaatgagccatggtccctt

SEQ ID NO: 6067720 - DNA, 25 bp, Homo sapien
tcttctaccctggagggagcagagg

SEQ ID NO: 6067721 - DNA, 25 bp, Homo sapien
tccacaggaggatgtaaccagactc

SEQ ID NO: 6067722 - DNA, 25 bp, Homo sapien
actgcggaaactgtgacttctgcag

SEQ ID NO: 6067723 - DNA, 25 bp, Homo sapien
tggctgaggggtgtgaggtgggagc

SEQ ID NO: 6067724 - DNA, 25 bp, Homo sapien
gagccaggggctgccctctgactct

SEQ ID NO: 6067725 - DNA, 25 bp, Homo sapien
ggaggatgtaaccagactccaatca

SEQ ID NO: 6067726 - DNA, 25 bp, Homo sapien
acagataaacaaattgagactcaga

SEQ ID NO: 6067727 - DNA, 25 bp, Homo sapien
gtgacttctgcaggaccagggtttg

SEQ ID NO: 6067728 - DNA, 25 bp, Homo sapien
tgtggcttctcctgtgctccctcag

SEQ ID NO: 6067729 - DNA, 25 bp, Homo sapien
tcaggcacgacagcttctgccagga

SEQ ID NO: 6067730 - DNA, 25 bp, Homo sapien
cctcagtcttctaccctggagggag

SEQ ID NO: 6067731 - DNA, 25 bp, Homo sapien
tgtaaccagactccaatcagtggcc

SEQ ID NO: 6067732 - DNA, 25 bp, Homo sapien
ggtctgtccacaggaggatgtaacc

SEQ ID NO: 6067733 - DNA, 25 bp, Homo sapien
caaggcacatctcacccccacagga

SEQ ID NO: 6067734 - DNA, 25 bp, Homo sapien
ctggtcctcaaaaccacactgtgat

SEQ ID NO: 6067735 - DNA, 25 bp, Homo sapien
cacccccacaggacagataaacaaa

SEQ ID NO: 6067736 - DNA, 25 bp, Homo sapien
cagagggggtctcaggcacgacagc

SEQ ID NO: 6067737 - DNA, 25 bp, Homo sapien
acatctcacccccacaggacagata

SEQ ID NO: 6067738 - DNA, 25 bp, Homo sapien
ttctcctgtgctccctcagtcttct

SEQ ID NO: 6067739 - DNA, 25 bp, Homo sapien
gaaactgtgacttctgcaggaccag

SEQ ID NO: 6067740 - DNA, 25 bp, Homo sapien
gttgcctgagcacccagcaaggagg

SEQ ID NO: 6067741 - DNA, 25 bp, Homo sapien
gaggggtgtgaggtgggagcgggtg

SEQ ID NO: 6067742 - DNA, 25 bp, Homo sapien
gcggagatgtgtgttctggagcggg

SEQ ID NO: 6067743 - DNA, 25 bp, Homo sapien
ccgggcttcatccagacgctctcac

SEQ ID NO: 6067744 - DNA, 25 bp, Homo sapien
gggtggatgggtggggaaagctgga

SEQ ID NO: 6067745 - DNA, 25 bp, Homo sapien
gcttctgccaggagctgaggcgggc

SEQ ID NO: 6067746 - DNA, 25 bp, Homo sapien
tctgcaggaccagggtttggctctg

SEQ ID NO: 6067747 - DNA, 25 bp, Homo sapien
ttcatccagacgctctcactatact

SEQ ID NO: 6067748 - DNA, 25 bp, Homo sapien
tctcactatactcagcctgagccag

SEQ ID NO: 6067749 - DNA, 25 bp, Homo sapien
atgtgagttgcctgagcacccagca

SEQ ID NO: 6067750 - DNA, 25 bp, Homo sapien
aaacaaattgagactcagagattta

SEQ ID NO: 6067751 - DNA, 25 bp, Homo sapien
gaggaaggtctgtccacaggaggat

SEQ ID NO: 6067752 - DNA, 25 bp, Homo sapien
ggctctgacattccgggcttcatcc

SEQ ID NO: 6067753 - DNA, 25 bp, Homo sapien
tgagcacccagcaaggaggaatgag

SEQ ID NO: 6067754 - DNA, 25 bp, Homo sapien
tgaggggtggatgggtggggaaagc

SEQ ID NO: 6067755 - DNA, 25 bp, Homo sapien
ggagccactgcggaaactgtgactt

SEQ ID NO: 6067756 - DNA, 25 bp, Homo sapien
acagcttctggtcctcaaaaccaca

SEQ ID NO: 6067757 - DNA, 25 bp, Homo sapien
agtggccggtctgcggagatgtgtg

SEQ ID NO: 6067758 - DNA, 25 bp, Homo sapien
agctgaggcgggcccagcatgtggg

SEQ ID NO: 6067759 - DNA, 25 bp, Homo sapien
tatactcagcctgagccaggggctg

SEQ ID NO: 6067760 - DNA, 25 bp, Homo sapien
gggtctcaggcacgacagcttctgc

SEQ ID NO: 6067761 - DNA, 25 bp, Homo sapien
gtcccttgtggcttctcctgtgctc

SEQ ID NO: 6067762 - DNA, 25 bp, Homo sapien
tctgctcgttgaaggaggctgagct

SEQ ID NO: 6067763 - DNA, 25 bp, Homo sapien
tgtgaggtgggagcgggtgaggaag

SEQ ID NO: 6067764 - DNA, 25 bp, Homo sapien
ccaatcagtggccggtctgcggaga

SEQ ID NO: 6067765 - DNA, 25 bp, Homo sapien
cagactccaatcagtggccggtctg

SEQ ID NO: 6067766 - DNA, 25 bp, Homo sapien
gaatgagccatggtcccttgtggct

SEQ ID NO: 6067767 - DNA, 25 bp, Homo sapien
ccagcatgtggggtccagaccttta

SEQ ID NO: 6067768 - DNA, 25 bp, Homo sapien
tacagggggcaaggcacatctcacc

SEQ ID NO: 6067769 - DNA, 25 bp, Homo sapien
gggtttggctctgacattccgggct

SEQ ID NO: 6067770 - DNA, 25 bp, Homo sapien
ggatgggtggggaaagctggagcca

SEQ ID NO: 6067771 - DNA, 25 bp, Homo sapien
gtgctccctcagtcttctaccctgg

SEQ ID NO: 6067772 - DNA, 25 bp, Homo sapien
actcagagatttatgtgagttgcct

SEQ ID NO: 6067773 - DNA, 25 bp, Homo sapien
atgtggggtccagacctttactcct

SEQ ID NO: 6067774 - DNA, 25 bp, Homo sapien
gccctctgactctgggcccagcacc

SEQ ID NO: 6067775 - DNA, 25 bp, Homo sapien
gcgggtgaggaaggtctgtccacag

SEQ ID NO: 6067776 - DNA, 25 bp, Homo sapien
gccaggagctgaggcgggcccagca

SEQ ID NO: 6067777 - DNA, 25 bp, Homo sapien
agacgctctcactatactcagcctg

SEQ ID NO: 6067778 - DNA, 25 bp, Homo sapien
ctcaaaaccacactgtgatacaggg

SEQ ID NO: 6067779 - DNA, 25 bp, Homo sapien
cggtctgcggagatgtgtgttctgg

SEQ ID NO: 6067780 - DNA, 25 bp, Homo sapien
gcgggcccagcatgtggggtccaga

SEQ ID NO: 6067781 - DNA, 25 bp, Homo sapien
gttctggagcgggagtgtttgaggg

SEQ ID NO: 6067782 - DNA, 25 bp, Homo sapien
aaagctggagccactgcggaaactg

SEQ ID NO: 6067783 - DNA, 25 bp, Homo sapien
gacattccgggcttcatccagacgc

SEQ ID NO: 6067784 - DNA, 25 bp, Homo sapien
cccagcaaggaggaatgagccatgg

SEQ ID NO: 6067785 - DNA, 25 bp, Homo sapien
acgacagcttctgccaggagctgag

SEQ ID NO: 6067786 - DNA, 25 bp, Homo sapien
ttaagcacagcttctggtcctcaaa

SEQ ID NO: 6067787 - DNA, 25 bp, Homo sapien
gctgagctgtgccattgtccaaagc

SEQ ID NO: 6067788 - DNA, 25 bp, Homo sapien
gtggggaaagctggagccactgcgg

SEQ ID NO: 6067789 - DNA, 25 bp, Homo sapien
agatttatgtgagttgcctgagcac

SEQ ID NO: 6067790 - DNA, 25 bp, Homo sapien
atgtgtgttctggagcgggagtgtt

SEQ ID NO: 6067791 - DNA, 25 bp, Homo sapien
ccttagtctgctcgttgaaggaggc

SEQ ID NO: 6067792 - DNA, 25 bp, Homo sapien
tgactctgggcccagcaccagggtc

SEQ ID NO: 6067793 - DNA, 25 bp, Homo sapien
attgagactcagagatttatgtgag

SEQ ID NO: 6067794 - DNA, 25 bp, Homo sapien
ccaaagctttgcttgtggctgaggg

SEQ ID NO: 6067795 - DNA, 25 bp, Homo sapien
aaggaggctgagctgtgccattgtc

SEQ ID NO: 6067796 - DNA, 25 bp, Homo sapien
tttactccttagtctgctcgttgaa

SEQ ID NO: 6067797 - DNA, 25 bp, Homo sapien
ctgtgccattgtccaaagctttgct

SEQ ID NO: 6067798 - DNA, 25 bp, Homo sapien
cacaggacagataaacaaattgaga

SEQ ID NO: 6067799 - DNA, 25 bp, Homo sapien
cagacctttactccttagtctgctc

SEQ ID NO: 6067800 - DNA, 25 bp, Homo sapien
ctgtgatacagggggcaaggcacat

SEQ ID NO: 6067801 - DNA, 25 bp, Homo sapien
agataagaaaaagaaactccggcag

SEQ ID NO: 6067802 - DNA, 25 bp, Homo sapien
tgttcccagcctggtccttagcagg

SEQ ID NO: 6067803 - DNA, 25 bp, Homo sapien
cggtccatgaatgaggtcaccacgg

SEQ ID NO: 6067804 - DNA, 25 bp, Homo sapien
cccctggcacctattagtcttttcg

SEQ ID NO: 6067805 - DNA, 25 bp, Homo sapien
ctcgcctcccagcagccctctccta

SEQ ID NO: 6067806 - DNA, 25 bp, Homo sapien
ccagccacctcaggaagtcggccca

SEQ ID NO: 6067807 - DNA, 25 bp, Homo sapien
tggcacctattagtcttttcgcttt

SEQ ID NO: 6067808 - DNA, 25 bp, Homo sapien
catcccttctcgggggctggcaaac

SEQ ID NO: 6067809 - DNA, 25 bp, Homo sapien
gcaaactcaagacctttgggagtgg

SEQ ID NO: 6067810 - DNA, 25 bp, Homo sapien
ccacccccctggcacctattagtct

SEQ ID NO: 6067811 - DNA, 25 bp, Homo sapien
gtctgaggacagaagccctccctgc

SEQ ID NO: 6067812 - DNA, 25 bp, Homo sapien
tccctgcaccgagggctccaggggg

SEQ ID NO: 6067813 - DNA, 25 bp, Homo sapien
tcgcatggccttgggccttgcctga

SEQ ID NO: 6067814 - DNA, 25 bp, Homo sapien
acctcaggaagtcggcccaacctgg

SEQ ID NO: 6067815 - DNA, 25 bp, Homo sapien
atccaagcctggtgttcccagcctg

SEQ ID NO: 6067816 - DNA, 25 bp, Homo sapien
caccacatccaagcctggtgttccc

SEQ ID NO: 6067817 - DNA, 25 bp, Homo sapien
gtgtctgcagcactgctgaccggca

SEQ ID NO: 6067818 - DNA, 25 bp, Homo sapien
ggctgatgccctctcgcctcccagc

SEQ ID NO: 6067819 - DNA, 25 bp, Homo sapien
gaggtgggggtggaggccctggagc

SEQ ID NO: 6067820 - DNA, 25 bp, Homo sapien
tgggggtggaggccctggagcagcc

SEQ ID NO: 6067821 - DNA, 25 bp, Homo sapien
caccgagggctccagggggaggtgg

SEQ ID NO: 6067822 - DNA, 25 bp, Homo sapien
gggctggcaaactcaagacctttgg

SEQ ID NO: 6067823 - DNA, 25 bp, Homo sapien
ctgctgaccggcatgggacgaccag

SEQ ID NO: 6067824 - DNA, 25 bp, Homo sapien
tccttagcaggcctggggggcacca

SEQ ID NO: 6067825 - DNA, 25 bp, Homo sapien
cttttcgctttgcaggggacgttct

SEQ ID NO: 6067826 - DNA, 25 bp, Homo sapien
accggcatgggacgaccagcggtcc

SEQ ID NO: 6067827 - DNA, 25 bp, Homo sapien
gaggtcaccacggtggcctcgcatg

SEQ ID NO: 6067828 - DNA, 25 bp, Homo sapien
caagcctgcccctcacccacctgcc

SEQ ID NO: 6067829 - DNA, 25 bp, Homo sapien
acttgggtctgaggacagaagccct

SEQ ID NO: 6067830 - DNA, 25 bp, Homo sapien
tccccccaagcctgcccctcaccca

SEQ ID NO: 6067831 - DNA, 25 bp, Homo sapien
accacggtggcctcgcatggccttg

SEQ ID NO: 6067832 - DNA, 25 bp, Homo sapien
aagccctccctgcaccgagggctcc

SEQ ID NO: 6067833 - DNA, 25 bp, Homo sapien
tggaggccctggagcagccagtggg

SEQ ID NO: 6067834 - DNA, 25 bp, Homo sapien
cagcctggtccttagcaggcctggg

SEQ ID NO: 6067835 - DNA, 25 bp, Homo sapien
ctggcaccacccccctggcacctat

SEQ ID NO: 6067836 - DNA, 25 bp, Homo sapien
agcccagcccagccctctggctgat

SEQ ID NO: 6067837 - DNA, 25 bp, Homo sapien
tggggcagctgctccccccaagcct

SEQ ID NO: 6067838 - DNA, 25 bp, Homo sapien
ggacagaagccctccctgcaccgag

SEQ ID NO: 6067839 - DNA, 25 bp, Homo sapien
gggacacatgggtggggcagctgct

SEQ ID NO: 6067840 - DNA, 25 bp, Homo sapien
gtacgttctgggaggcaggcatccc

SEQ ID NO: 6067841 - DNA, 25 bp, Homo sapien
gaaaaagaaactccggcagcccagc

SEQ ID NO: 6067842 - DNA, 25 bp, Homo sapien
ccggcagcccagcaccacatccaag

SEQ ID NO: 6067843 - DNA, 25 bp, Homo sapien
gaccagcggtccatgaatgaggtca

SEQ ID NO: 6067844 - DNA, 25 bp, Homo sapien
tcaagacctttgggagtgggggaca

SEQ ID NO: 6067845 - DNA, 25 bp, Homo sapien
tgccctctcgcctcccagcagccct

SEQ ID NO: 6067846 - DNA, 25 bp, Homo sapien
ctttgggagtgggggacacatgggt

SEQ ID NO: 6067847 - DNA, 25 bp, Homo sapien
atgaatgaggtcaccacggtggcct

SEQ ID NO: 6067848 - DNA, 25 bp, Homo sapien
caccaggtacgttctgggaggcagg

SEQ ID NO: 6067849 - DNA, 25 bp, Homo sapien
gaaactccggcagcccagcaccaca

SEQ ID NO: 6067850 - DNA, 25 bp, Homo sapien
gcccagcaccacatccaagcctggt

SEQ ID NO: 6067851 - DNA, 25 bp, Homo sapien
atgggacgaccagcggtccatgaat

SEQ ID NO: 6067852 - DNA, 25 bp, Homo sapien
agggctcccacagcccagcccagcc

SEQ ID NO: 6067853 - DNA, 25 bp, Homo sapien
ccccaggcacatagggctcccacag

SEQ ID NO: 6067854 - DNA, 25 bp, Homo sapien
gaagtcggcccaacctggcaccacc

SEQ ID NO: 6067855 - DNA, 25 bp, Homo sapien
cagccagtggggcaacaggcgacca

SEQ ID NO: 6067856 - DNA, 25 bp, Homo sapien
ctggagcagccagtggggcaacagg

SEQ ID NO: 6067857 - DNA, 25 bp, Homo sapien
tgcctgattactgccccaggcacat

SEQ ID NO: 6067858 - DNA, 25 bp, Homo sapien
ctattagtcttttcgctttgcaggg

SEQ ID NO: 6067859 - DNA, 25 bp, Homo sapien
gggccttgcctgattactgccccag

SEQ ID NO: 6067860 - DNA, 25 bp, Homo sapien
tctcctacttgggtctgaggacaga

SEQ ID NO: 6067861 - DNA, 25 bp, Homo sapien
gctttgcaggggacgttctgtcctg

SEQ ID NO: 6067862 - DNA, 25 bp, Homo sapien
gcacatagggctcccacagcccagc

SEQ ID NO: 6067863 - DNA, 25 bp, Homo sapien
tgtcctgtgtctgcagcactgctga

SEQ ID NO: 6067864 - DNA, 25 bp, Homo sapien
ctggggggcaccaggtacgttctgg

SEQ ID NO: 6067865 - DNA, 25 bp, Homo sapien
gcctggtgttcccagcctggtcctt

SEQ ID NO: 6067866 - DNA, 25 bp, Homo sapien
ttctcgggggctggcaaactcaaga

SEQ ID NO: 6067867 - DNA, 25 bp, Homo sapien
gcagcactgctgaccggcatgggac

SEQ ID NO: 6067868 - DNA, 25 bp, Homo sapien
gagtgggggacacatgggtggggca

SEQ ID NO: 6067869 - DNA, 25 bp, Homo sapien
aggcaggcatcccttctcgggggct

SEQ ID NO: 6067870 - DNA, 25 bp, Homo sapien
cagccctctcctacttgggtctgag

SEQ ID NO: 6067871 - DNA, 25 bp, Homo sapien
acgttctgtcctgtgtctgcagcac

SEQ ID NO: 6067872 - DNA, 25 bp, Homo sapien
ccctctggctgatgccctctcgcct

SEQ ID NO: 6067873 - DNA, 25 bp, Homo sapien
gtggcctcgcatggccttgggcctt

SEQ ID NO: 6067874 - DNA, 25 bp, Homo sapien
gcaggcctggggggcaccaggtacg

SEQ ID NO: 6067875 - DNA, 25 bp, Homo sapien
ggccttgggccttgcctgattactg

SEQ ID NO: 6067876 - DNA, 25 bp, Homo sapien
ttctgggaggcaggcatcccttctc

SEQ ID NO: 6067877 - DNA, 25 bp, Homo sapien
ccaacctggcaccacccccctggca

SEQ ID NO: 6067878 - DNA, 25 bp, Homo sapien
tcacccacctgccagccacctcagg

SEQ ID NO: 6067879 - DNA, 25 bp, Homo sapien
agctgctccccccaagcctgcccct

SEQ ID NO: 6067880 - DNA, 25 bp, Homo sapien
agtggggcaacaggcgaccacctcc

SEQ ID NO: 6067881 - DNA, 25 bp, Homo sapien
tgcccctcacccacctgccagccac

SEQ ID NO: 6067882 - DNA, 25 bp, Homo sapien
caggggacgttctgtcctgtgtctg

SEQ ID NO: 6067883 - DNA, 25 bp, Homo sapien
cacctgccagccacctcaggaagtc

SEQ ID NO: 6067884 - DNA, 25 bp, Homo sapien
gcccagccctctggctgatgccctc

SEQ ID NO: 6067885 - DNA, 25 bp, Homo sapien
attactgccccaggcacatagggct

SEQ ID NO: 6067886 - DNA, 25 bp, Homo sapien
tcccagcagccctctcctacttggg

SEQ ID NO: 6067887 - DNA, 25 bp, Homo sapien
acatgggtggggcagctgctccccc

SEQ ID NO: 6067888 - DNA, 25 bp, Homo sapien
agaagcgcgtctgcgtgcagcgcat

SEQ ID NO: 6067889 - DNA, 25 bp, Homo sapien
ttggccgtcttgatcatccagcggt

SEQ ID NO: 6067890 - DNA, 25 bp, Homo sapien
cacgaagccgcacttgcggcagtgg

SEQ ID NO: 6067891 - DNA, 25 bp, Homo sapien
tgcagcgcatgcagatgtccgtggc

SEQ ID NO: 6067892 - DNA, 25 bp, Homo sapien
tcgatgtggctaatccattcctggc

SEQ ID NO: 6067893 - DNA, 25 bp, Homo sapien
atgatgtgctggctgcggtacttgc

SEQ ID NO: 6067894 - DNA, 25 bp, Homo sapien
tccactggacgctccgcagatgggc

SEQ ID NO: 6067895 - DNA, 25 bp, Homo sapien
gaggcgtagaactccacgctgctgg

SEQ ID NO: 6067896 - DNA, 25 bp, Homo sapien
gagtcatcgtcatctccactggacg

SEQ ID NO: 6067897 - DNA, 25 bp, Homo sapien
cattcctggcgctccgtagcggagg

SEQ ID NO: 6067898 - DNA, 25 bp, Homo sapien
gatcatccagcggttcttggcctgc

SEQ ID NO: 6067899 - DNA, 25 bp, Homo sapien
tccttgtcctcgtcggagtcatcgt

SEQ ID NO: 6067900 - DNA, 25 bp, Homo sapien
tgcctcagagtcaggaacccagaca

SEQ ID NO: 6067901 - DNA, 25 bp, Homo sapien
tcacaaatccgcacaggcttagagg

SEQ ID NO: 6067902 - DNA, 25 bp, Homo sapien
gaattttgctttctgacaacgcata

SEQ ID NO: 6067903 - DNA, 25 bp, Homo sapien
agcaggtcatagcagaagtcacaaa

SEQ ID NO: 6067904 - DNA, 25 bp, Homo sapien
ggatgacaatattgccatatacaag

SEQ ID NO: 6067905 - DNA, 25 bp, Homo sapien
tgatggaatcaatagtgacattttc

SEQ ID NO: 6067906 - DNA, 25 bp, Homo sapien
tgacaacgcatacatacagttgcct

SEQ ID NO: 6067907 - DNA, 25 bp, Homo sapien
caatggtggcgacgattaacaggtg

SEQ ID NO: 6067908 - DNA, 25 bp, Homo sapien
gagacttcaatgactggctgtaaga

SEQ ID NO: 6067909 - DNA, 25 bp, Homo sapien
tgatttctccgtagcagtggcagca

SEQ ID NO: 6067910 - DNA, 25 bp, Homo sapien
gattagccatccattccttaagtct

SEQ ID NO: 6067911 - DNA, 25 bp, Homo sapien
cacatttgcggcaatggtggcgacg

SEQ ID NO: 6067912 - DNA, 25 bp, Homo sapien
atttaaagtgatagtgcttgtgcac

SEQ ID NO: 6067913 - DNA, 25 bp, Homo sapien
tattaaaacatcttagtcagttcct

SEQ ID NO: 6067914 - DNA, 25 bp, Homo sapien
ttttagtgcaaatccctagggtcca

SEQ ID NO: 6067915 - DNA, 25 bp, Homo sapien
ggaaatatatagttgctgtggtagc

SEQ ID NO: 6067916 - DNA, 25 bp, Homo sapien
tttcttttgagagtgtagcatgatc

SEQ ID NO: 6067917 - DNA, 25 bp, Homo sapien
taaatatgaaaccagcaaagcaatt

SEQ ID NO: 6067918 - DNA, 25 bp, Homo sapien
cacagacaaatacacaagacttcaa

SEQ ID NO: 6067919 - DNA, 25 bp, Homo sapien
agaataaataaaccgcaactgacag

SEQ ID NO: 6067920 - DNA, 25 bp, Homo sapien
ccccagccaaaagctatggaaatat

SEQ ID NO: 6067921 - DNA, 25 bp, Homo sapien
taaatagcaaatcacacacagatac

SEQ ID NO: 6067922 - DNA, 25 bp, Homo sapien
tgtgcactaagctcatctgagacct

SEQ ID NO: 6067923 - DNA, 25 bp, Homo sapien
gggtccaatgcaagcgcaaccctgt

SEQ ID NO: 6067924 - DNA, 25 bp, Homo sapien
agccggctgatgcacaacacgtttg

SEQ ID NO: 6067925 - DNA, 25 bp, Homo sapien
ggtttccacatggtgatttcccagc

SEQ ID NO: 6067926 - DNA, 25 bp, Homo sapien
gcatttgcttacttcttagttggca

SEQ ID NO: 6067927 - DNA, 25 bp, Homo sapien
gatattgaacaaactcaagccggct

SEQ ID NO: 6067928 - DNA, 25 bp, Homo sapien
tattttgtaagaatcaatgcctaaa

SEQ ID NO: 6067929 - DNA, 25 bp, Homo sapien
tcaataagcagtacagcagacctcg

SEQ ID NO: 6067930 - DNA, 25 bp, Homo sapien
gcaaatatggtaatattacagcccg

SEQ ID NO: 6067931 - DNA, 25 bp, Homo sapien
caacacgtttgcttggtttccacat

SEQ ID NO: 6067932 - DNA, 25 bp, Homo sapien
tgatattctaactgtatattggcac

SEQ ID NO: 6067933 - DNA, 25 bp, Homo sapien
gcagtacagcagacctcgctagttt

SEQ ID NO: 6067934 - DNA, 25 bp, Homo sapien
tattacagcccgacacactgcgttt

SEQ ID NO: 6067935 - DNA, 25 bp, Homo sapien
gatgggagaacatgacagcaaatat

SEQ ID NO: 6067936 - DNA, 25 bp, Homo sapien
tcagcacagaccagtgcaataacag

SEQ ID NO: 6067937 - DNA, 25 bp, Homo sapien
gataagccgcttcagtgcagccttc

SEQ ID NO: 6067938 - DNA, 25 bp, Homo sapien
gacggcatcctgaagatagtggaga

SEQ ID NO: 6067939 - DNA, 25 bp, Homo sapien
gatgtttcccctcagctgacggcat

SEQ ID NO: 6067940 - DNA, 25 bp, Homo sapien
cagttcaaacacagaggtgtcagca

SEQ ID NO: 6067941 - DNA, 25 bp, Homo sapien
cacaggatatgtggcccatgatgac

SEQ ID NO: 6067942 - DNA, 25 bp, Homo sapien
cggaaatacgtgaggatggcagtgc

SEQ ID NO: 6067943 - DNA, 25 bp, Homo sapien
gatcccaggatcagcaagaaaggaa

SEQ ID NO: 6067944 - DNA, 25 bp, Homo sapien
cagaccagtgcaataacaggagggc

SEQ ID NO: 6067945 - DNA, 25 bp, Homo sapien
agtgcagccttcacttctttattcc

SEQ ID NO: 6067946 - DNA, 25 bp, Homo sapien
ggagaatgcctgatgtttcccctca

SEQ ID NO: 6067947 - DNA, 25 bp, Homo sapien
gagaggatgcggacataggatccca

SEQ ID NO: 6067948 - DNA, 25 bp, Homo sapien
gtgaatctcactgctatcctgtcca

SEQ ID NO: 6067949 - DNA, 25 bp, Homo sapien
acctgagtgaattcattggaacacc

SEQ ID NO: 6067950 - DNA, 25 bp, Homo sapien
ccattcccagttcttttggagtatg

SEQ ID NO: 6067951 - DNA, 25 bp, Homo sapien
aaacctgagtgaattcattggaaca

SEQ ID NO: 6067952 - DNA, 25 bp, Homo sapien
tgagtgaattcattggaacaccctg

SEQ ID NO: 6067953 - DNA, 25 bp, Homo sapien
gctatcctgtccaatgactttgagt

SEQ ID NO: 6067954 - DNA, 25 bp, Homo sapien
gttgaaggttttgcctcctggtcag

SEQ ID NO: 6067955 - DNA, 25 bp, Homo sapien
ctcaaagagaaacctgagtgaattc

SEQ ID NO: 6067956 - DNA, 25 bp, Homo sapien
gaacaccctgtctttgacagtatga

SEQ ID NO: 6067957 - DNA, 25 bp, Homo sapien
tctgaccctcaaagagaaacctgag

SEQ ID NO: 6067958 - DNA, 25 bp, Homo sapien
gagtttaatatattcaccttccttc

SEQ ID NO: 6067959 - DNA, 25 bp, Homo sapien
aacctgagtgaattcattggaacac

SEQ ID NO: 6067960 - DNA, 25 bp, Homo sapien
tgaattcactcctgatcaacacaag

SEQ ID NO: 6067961 - DNA, 25 bp, Homo sapien
ccccaacagacaagtacatgagagg

SEQ ID NO: 6067962 - DNA, 25 bp, Homo sapien
gaattcactcctgatcaacacaagc

SEQ ID NO: 6067963 - DNA, 25 bp, Homo sapien
aattcactcctgatcaacacaagcc

SEQ ID NO: 6067964 - DNA, 25 bp, Homo sapien
ttctttgatacattttcaccccagc

SEQ ID NO: 6067965 - DNA, 25 bp, Homo sapien
gtgaattcactcctgatcaacacaa

SEQ ID NO: 6067966 - DNA, 25 bp, Homo sapien
cccaacagacaagtacatgagaggc

SEQ ID NO: 6067967 - DNA, 25 bp, Homo sapien
caagcaagcaggtttggagagcact

SEQ ID NO: 6067968 - DNA, 25 bp, Homo sapien
gaccatcccggccaacgtggtgaaa

SEQ ID NO: 6067969 - DNA, 25 bp, Homo sapien
tctccgctaaaaacacaaaaatcag

SEQ ID NO: 6067970 - DNA, 25 bp, Homo sapien
ccaactcgcagtgggaagatgctta

SEQ ID NO: 6067971 - DNA, 25 bp, Homo sapien
aaaatgcagaccttggcttggcgcg

SEQ ID NO: 6067972 - DNA, 25 bp, Homo sapien
gggcgcggcggcacgtgcctgcagt

SEQ ID NO: 6067973 - DNA, 25 bp, Homo sapien
aaaaacacaaaaatcagctgggcgc

SEQ ID NO: 6067974 - DNA, 25 bp, Homo sapien
gatgcaggtcaggttcacaattaat

SEQ ID NO: 6067975 - DNA, 25 bp, Homo sapien
tgaaaccccatctccgctaaaaaca

SEQ ID NO: 6067976 - DNA, 25 bp, Homo sapien
aacacaaaaatcagctgggcgcggc

SEQ ID NO: 6067977 - DNA, 25 bp, Homo sapien
aaaccataggctgggtcatgcccca

SEQ ID NO: 6067978 - DNA, 25 bp, Homo sapien
tatttagcttgctgccatgcgagga

SEQ ID NO: 6067979 - DNA, 25 bp, Homo sapien
tcgccgcagcaagtattgttgacct

SEQ ID NO: 6067980 - DNA, 25 bp, Homo sapien
gaccttggtagttgggacgctcata

SEQ ID NO: 6067981 - DNA, 25 bp, Homo sapien
gaacggatctcgctgaggtggaagc

SEQ ID NO: 6067982 - DNA, 25 bp, Homo sapien
ttggtagttgggacgctcatagagc

SEQ ID NO: 6067983 - DNA, 25 bp, Homo sapien
aatgggaaattggtagtgttaagct

SEQ ID NO: 6067984 - DNA, 25 bp, Homo sapien
gtggtcttccctctcgtacagccgc

SEQ ID NO: 6067985 - DNA, 25 bp, Homo sapien
actctccgcaaagagcctgccttag

SEQ ID NO: 6067986 - DNA, 25 bp, Homo sapien
tcccctcgccgcagcaagtattgtt

SEQ ID NO: 6067987 - DNA, 25 bp, Homo sapien
ttaatacaaatccaccactctccgc

SEQ ID NO: 6067988 - DNA, 25 bp, Homo sapien
ttgttgaccttggtagttgggacgc

SEQ ID NO: 6067989 - DNA, 25 bp, Homo sapien
ttggggcctcagcaggtattgccgc

SEQ ID NO: 6067990 - DNA, 25 bp, Homo sapien
tcctggcaccgcctgtactcttggg

SEQ ID NO: 6067991 - DNA, 25 bp, Homo sapien
ggctgcaattgtctaccttctcggt

SEQ ID NO: 6067992 - DNA, 25 bp, Homo sapien
tgcaattgtctaccttctcggtcac

SEQ ID NO: 6067993 - DNA, 25 bp, Homo sapien
cattcgtgggtggtcttcggctgct

SEQ ID NO: 6067994 - DNA, 25 bp, Homo sapien
taagataaccattcgtgggtggtct

SEQ ID NO: 6067995 - DNA, 25 bp, Homo sapien
cttacatcagaaggttgctttgcca

SEQ ID NO: 6067996 - DNA, 25 bp, Homo sapien
ctctccgcaggctgcaattgtctac

SEQ ID NO: 6067997 - DNA, 25 bp, Homo sapien
tccgcaggctgcaattgtctacctt

SEQ ID NO: 6067998 - DNA, 25 bp, Homo sapien
gtcacactcagaacttacatcagaa

SEQ ID NO: 6067999 - DNA, 25 bp, Homo sapien
cttgtggctctgtctgtagggaggt

SEQ ID NO: 6068000 - DNA, 25 bp, Homo sapien
aaccattcgtgggtggtcttcggct

SEQ ID NO: 6068001 - DNA, 25 bp, Homo sapien
tcgtaagataaccattcgtgggtgg

SEQ ID NO: 6068002 - DNA, 25 bp, Homo sapien
gaacttacatcagaaggttgctttg

SEQ ID NO: 6068003 - DNA, 25 bp, Homo sapien
ctcgtcatctctcaagtagctggga

SEQ ID NO: 6068004 - DNA, 25 bp, Homo sapien
gggactacaggcacgcaacaccatg

SEQ ID NO: 6068005 - DNA, 25 bp, Homo sapien
cagtagtgagccactgcacgtggcc

SEQ ID NO: 6068006 - DNA, 25 bp, Homo sapien
tttttgtagagacgagggtctcacc

SEQ ID NO: 6068007 - DNA, 25 bp, Homo sapien
gatcatcggtcactgcagcctctta

SEQ ID NO: 6068008 - DNA, 25 bp, Homo sapien
gcagtggcatgatcatcggtcactg

SEQ ID NO: 6068009 - DNA, 25 bp, Homo sapien
ggctcaagtgatcttccctcgtcat

SEQ ID NO: 6068010 - DNA, 25 bp, Homo sapien
agacgagtctcgctctgtcaccagg

SEQ ID NO: 6068011 - DNA, 25 bp, Homo sapien
tagctgggattatacgtgtgcacca

SEQ ID NO: 6068012 - DNA, 25 bp, Homo sapien
tggaattacagtagtgagccactgc

SEQ ID NO: 6068013 - DNA, 25 bp, Homo sapien
gtgtgcaccaccacagtcacttttt

SEQ ID NO: 6068014 - DNA, 25 bp, Homo sapien
tctgagttcaagcaatcttcctgcc

SEQ ID NO: 6068015 - DNA, 25 bp, Homo sapien
gaaagggaggatacccagaactcaa

SEQ ID NO: 6068016 - DNA, 25 bp, Homo sapien
gccaaagcatggaattgaagtttca

SEQ ID NO: 6068017 - DNA, 25 bp, Homo sapien
aataatataacatggaaggtacacc

SEQ ID NO: 6068018 - DNA, 25 bp, Homo sapien
gcaatactgacaaacagtccctgtt

SEQ ID NO: 6068019 - DNA, 25 bp, Homo sapien
gaaggtacacctttatttgaggctg

SEQ ID NO: 6068020 - DNA, 25 bp, Homo sapien
agtgcataaaaacctttgaaatcgg

SEQ ID NO: 6068021 - DNA, 25 bp, Homo sapien
gctggtataataactaaatggcaag

SEQ ID NO: 6068022 - DNA, 25 bp, Homo sapien
ccttaggagcctgatacaattacac

SEQ ID NO: 6068023 - DNA, 25 bp, Homo sapien
taggcctctgacattctctatgctg

SEQ ID NO: 6068024 - DNA, 25 bp, Homo sapien
tgaaatcggatctatatcccagtaa

SEQ ID NO: 6068025 - DNA, 25 bp, Homo sapien
caagtaacatgggtgtgagatccct

SEQ ID NO: 6068026 - DNA, 25 bp, Homo sapien
tagttaccagggacaaagccaaagc

SEQ ID NO: 6068027 - DNA, 25 bp, Homo sapien
taaacaataacattcagtgatctac

SEQ ID NO: 6068028 - DNA, 25 bp, Homo sapien
caaatgcttaccctgccatcagctt

SEQ ID NO: 6068029 - DNA, 25 bp, Homo sapien
tccacaatgaacaagtacttacaaa

SEQ ID NO: 6068030 - DNA, 25 bp, Homo sapien
catggtttccatagccacgtatggt

SEQ ID NO: 6068031 - DNA, 25 bp, Homo sapien
ttattcctgtatcagtagattaaga

SEQ ID NO: 6068032 - DNA, 25 bp, Homo sapien
caacacagcattattcatgtgaaac

SEQ ID NO: 6068033 - DNA, 25 bp, Homo sapien
gtgcgatctcggctagatatcagaa

SEQ ID NO: 6068034 - DNA, 25 bp, Homo sapien
tagtcaaggacacatttccacaatg

SEQ ID NO: 6068035 - DNA, 25 bp, Homo sapien
tctgctctgggaaaacgggttctcc

SEQ ID NO: 6068036 - DNA, 25 bp, Homo sapien
tattcagaactacaaacatggtttc

SEQ ID NO: 6068037 - DNA, 25 bp, Homo sapien
tttagaagcttgaatctgctctggg

SEQ ID NO: 6068038 - DNA, 25 bp, Homo sapien
ccacgtatggttttagtcaaggaca

SEQ ID NO: 6068039 - DNA, 25 bp, Homo sapien
tagcgaaccattttcacagatcacc

SEQ ID NO: 6068040 - DNA, 25 bp, Homo sapien
gaccttgtgtccagccccattgctt

SEQ ID NO: 6068041 - DNA, 25 bp, Homo sapien
gaaccattttcacagatcacctcag

SEQ ID NO: 6068042 - DNA, 25 bp, Homo sapien
agttacatttattttaatgctgaat

SEQ ID NO: 6068043 - DNA, 25 bp, Homo sapien
aaccattttcacagatcacctcagg

SEQ ID NO: 6068044 - DNA, 25 bp, Homo sapien
gaatagcgaaccattttcacagatc

SEQ ID NO: 6068045 - DNA, 25 bp, Homo sapien
atgctgaatttactcccgtgccata

SEQ ID NO: 6068046 - DNA, 25 bp, Homo sapien
accattttcacagatcacctcaggc

SEQ ID NO: 6068047 - DNA, 25 bp, Homo sapien
cgaaccattttcacagatcacctca

SEQ ID NO: 6068048 - DNA, 25 bp, Homo sapien
gcgaaccattttcacagatcacctc

SEQ ID NO: 6068049 - DNA, 25 bp, Homo sapien
gttacatttattttaatgctgaatt

SEQ ID NO: 6068050 - DNA, 25 bp, Homo sapien
ccattgcttggcctgcgcacacctg

SEQ ID NO: 6068051 - DNA, 25 bp, Homo sapien
gcccgtccagctgcgcgtagaggta

SEQ ID NO: 6068052 - DNA, 25 bp, Homo sapien
ctgggcccagcgcatgcggaggaag

SEQ ID NO: 6068053 - DNA, 25 bp, Homo sapien
cttctgctggcggtacatgcggcag

SEQ ID NO: 6068054 - DNA, 25 bp, Homo sapien
ggctgagggtgaccgagccgttgca

SEQ ID NO: 6068055 - DNA, 25 bp, Homo sapien
tgaccactgtcatgagggccagcag

SEQ ID NO: 6068056 - DNA, 25 bp, Homo sapien
agcgcatgcggaggaagcaccagct

SEQ ID NO: 6068057 - DNA, 25 bp, Homo sapien
gggcagtactgctggtgttggccca

SEQ ID NO: 6068058 - DNA, 25 bp, Homo sapien
cagaagaggacgcagaaggcgtaga

SEQ ID NO: 6068059 - DNA, 25 bp, Homo sapien
gcagaaggcgtagatggctggcagc

SEQ ID NO: 6068060 - DNA, 25 bp, Homo sapien
cagagagccctggtggcgcttctgc

SEQ ID NO: 6068061 - DNA, 25 bp, Homo sapien
tggcgcttctgctggcggtacatgc

SEQ ID NO: 6068062 - DNA, 25 bp, Homo sapien
caggccggcgtaggccagcgagaag

SEQ ID NO: 6068063 - DNA, 25 bp, Homo sapien
tgcacttcagtcctttatcaaattc

SEQ ID NO: 6068064 - DNA, 25 bp, Homo sapien
ggctgctgtgcaatcctgcaagtat

SEQ ID NO: 6068065 - DNA, 25 bp, Homo sapien
ccggctgctgtgcaatcctgcaagt

SEQ ID NO: 6068066 - DNA, 25 bp, Homo sapien
gctgctgtgcaatcctgcaagtatg

SEQ ID NO: 6068067 - DNA, 25 bp, Homo sapien
ggagcgcttgcctggccgcccaact

SEQ ID NO: 6068068 - DNA, 25 bp, Homo sapien
tgctgtgcaatcctgcaagtatgaa

SEQ ID NO: 6068069 - DNA, 25 bp, Homo sapien
cccggctgctgtgcaatcctgcaag

SEQ ID NO: 6068070 - DNA, 25 bp, Homo sapien
ctgctgtgcaatcctgcaagtatga

SEQ ID NO: 6068071 - DNA, 25 bp, Homo sapien
aaactaatttcagcttattattact

SEQ ID NO: 6068072 - DNA, 25 bp, Homo sapien
gcacttcagtcctttatcaaattca

SEQ ID NO: 6068073 - DNA, 25 bp, Homo sapien
gagcgcttgcctggccgcccaactg

SEQ ID NO: 6068074 - DNA, 25 bp, Homo sapien
cggctgctgtgcaatcctgcaagta

SEQ ID NO: 6068075 - DNA, 25 bp, Homo sapien
cactgcagtcacttagcttgtaaaa

SEQ ID NO: 6068076 - DNA, 25 bp, Homo sapien
cgtgaaagtaagaattccaggctga

SEQ ID NO: 6068077 - DNA, 25 bp, Homo sapien
aatagcggcgtgaaagtaagaattc

SEQ ID NO: 6068078 - DNA, 25 bp, Homo sapien
tggctagccaagcaatcacggagaa

SEQ ID NO: 6068079 - DNA, 25 bp, Homo sapien
aaatggctagccaagcaatcacgga

SEQ ID NO: 6068080 - DNA, 25 bp, Homo sapien
aaggaaaagaatagcggcgtgaaag

SEQ ID NO: 6068081 - DNA, 25 bp, Homo sapien
tagcggcgtgaaagtaagaattcca

SEQ ID NO: 6068082 - DNA, 25 bp, Homo sapien
aagaatagcggcgtgaaagtaagaa

SEQ ID NO: 6068083 - DNA, 25 bp, Homo sapien
tgaaagtaagaattccaggctgact

SEQ ID NO: 6068084 - DNA, 25 bp, Homo sapien
ctagccaagcaatcacggagaaagg

SEQ ID NO: 6068085 - DNA, 25 bp, Homo sapien
catatacactgaacagagaatattt

SEQ ID NO: 6068086 - DNA, 25 bp, Homo sapien
cggcgtgaaagtaagaattccaggc

SEQ ID NO: 6068087 - DNA, 25 bp, Homo sapien
cagagttagaaatgttaagactggc

SEQ ID NO: 6068088 - DNA, 25 bp, Homo sapien
tgtacatcagggaggagtgctttca

SEQ ID NO: 6068089 - DNA, 25 bp, Homo sapien
gagaaattatttggcatgccactag

SEQ ID NO: 6068090 - DNA, 25 bp, Homo sapien
ccactagtgatacttagggtcatgg

SEQ ID NO: 6068091 - DNA, 25 bp, Homo sapien
ccacagaaggtaatggagtctttac

SEQ ID NO: 6068092 - DNA, 25 bp, Homo sapien
gagcatagaccttttattttccaga

SEQ ID NO: 6068093 - DNA, 25 bp, Homo sapien
cttaaatatagctcgaatcactggt

SEQ ID NO: 6068094 - DNA, 25 bp, Homo sapien
gaatcactggttagatatggacata

SEQ ID NO: 6068095 - DNA, 25 bp, Homo sapien
gcagcaagtaccaagacattgtgca

SEQ ID NO: 6068096 - DNA, 25 bp, Homo sapien
gaggagtgctttcattagtttcaga

SEQ ID NO: 6068097 - DNA, 25 bp, Homo sapien
cctccataagttaagggttgtgctt

SEQ ID NO: 6068098 - DNA, 25 bp, Homo sapien
catattttcccaactgtacatcagg

SEQ ID NO: 6068099 - DNA, 25 bp, Homo sapien
aagatcaaaccaagtcaccctattt

SEQ ID NO: 6068100 - DNA, 25 bp, Homo sapien
gccattttcataagagggaaagcag

SEQ ID NO: 6068101 - DNA, 25 bp, Homo sapien
ccaaatgaccagagtcaggcagcca

SEQ ID NO: 6068102 - DNA, 25 bp, Homo sapien
ggcacttcaaaagcgggcctttgtc

SEQ ID NO: 6068103 - DNA, 25 bp, Homo sapien
gccttatcaggcacttcaaaagcgg

SEQ ID NO: 6068104 - DNA, 25 bp, Homo sapien
aatttcaggaaaatcgaagctctct

SEQ ID NO: 6068105 - DNA, 25 bp, Homo sapien
caggcagccataataggtatagaaa

SEQ ID NO: 6068106 - DNA, 25 bp, Homo sapien
tctggcattgcttccctacgtactg

SEQ ID NO: 6068107 - DNA, 25 bp, Homo sapien
gtgaagcaaaaccaagtggcttagg

SEQ ID NO: 6068108 - DNA, 25 bp, Homo sapien
gaagctctctaatagggagtctcaa

SEQ ID NO: 6068109 - DNA, 25 bp, Homo sapien
tgttctaataaaccccaatatgtga

SEQ ID NO: 6068110 - DNA, 25 bp, Homo sapien
aaaagggacgggtgcctctggcatt

SEQ ID NO: 6068111 - DNA, 25 bp, Homo sapien
cagaataatctcattagagctgctg

SEQ ID NO: 6068112 - DNA, 25 bp, Homo sapien
catatggtgggtctatagtcaggac

SEQ ID NO: 6068113 - DNA, 25 bp, Homo sapien
catagtttcaacagtctgcacagca

SEQ ID NO: 6068114 - DNA, 25 bp, Homo sapien
acagcatgtcccataattccggtca

SEQ ID NO: 6068115 - DNA, 25 bp, Homo sapien
gggtctatagtcaggaccccagcca

SEQ ID NO: 6068116 - DNA, 25 bp, Homo sapien
tatgctttgcagtctccagacgtga

SEQ ID NO: 6068117 - DNA, 25 bp, Homo sapien
cataattccggtcacagacatgctg

SEQ ID NO: 6068118 - DNA, 25 bp, Homo sapien
tggagcgtctccctgttcagtgatg

SEQ ID NO: 6068119 - DNA, 25 bp, Homo sapien
taagatcctgaacacgcgacagaat

SEQ ID NO: 6068120 - DNA, 25 bp, Homo sapien
ggtccccttcattcatagtttcaac

SEQ ID NO: 6068121 - DNA, 25 bp, Homo sapien
tcactggctgtcactcggacctctt

SEQ ID NO: 6068122 - DNA, 25 bp, Homo sapien
cactcggacctctttgtaaatgtaa

SEQ ID NO: 6068123 - DNA, 25 bp, Homo sapien
tcttgtcatctaggcaatgccagcc

SEQ ID NO: 6068124 - DNA, 25 bp, Homo sapien
tcctggaggagatcgccgtcaggat

SEQ ID NO: 6068125 - DNA, 25 bp, Homo sapien
gagatcgccgtcaggattgctgccg

SEQ ID NO: 6068126 - DNA, 25 bp, Homo sapien
cgttccaaggccacatagaaactgt

SEQ ID NO: 6068127 - DNA, 25 bp, Homo sapien
ggattgctgccgtcagacagagctg

SEQ ID NO: 6068128 - DNA, 25 bp, Homo sapien
tccaaggccacatagaaactgttct

SEQ ID NO: 6068129 - DNA, 25 bp, Homo sapien
actgttcttgtcatctaggcaatgc

SEQ ID NO: 6068130 - DNA, 25 bp, Homo sapien
ggtttcggccctcggctgacactaa

SEQ ID NO: 6068131 - DNA, 25 bp, Homo sapien
aattggtccaatttcacagtctgcg

SEQ ID NO: 6068132 - DNA, 25 bp, Homo sapien
aatttcacagtctgcgcagaccaga

SEQ ID NO: 6068133 - DNA, 25 bp, Homo sapien
gctgacactaactcgctcggctgct

SEQ ID NO: 6068134 - DNA, 25 bp, Homo sapien
tgcgcagaccagaaacttgatgttg

SEQ ID NO: 6068135 - DNA, 25 bp, Homo sapien
ttctcaggacaagagcaaaaatcac

SEQ ID NO: 6068136 - DNA, 25 bp, Homo sapien
ctcaggacaagagcaaaaatcaccc

SEQ ID NO: 6068137 - DNA, 25 bp, Homo sapien
gaatagaggcaatactttagcttaa

SEQ ID NO: 6068138 - DNA, 25 bp, Homo sapien
cagaatagaggcaatactttagctt

SEQ ID NO: 6068139 - DNA, 25 bp, Homo sapien
tctcaggacaagagcaaaaatcacc

SEQ ID NO: 6068140 - DNA, 25 bp, Homo sapien
tcaggacaagagcaaaaatcacccc

SEQ ID NO: 6068141 - DNA, 25 bp, Homo sapien
ttacagaatagaggcaatactttag

SEQ ID NO: 6068142 - DNA, 25 bp, Homo sapien
actttacagaatagaggcaatactt

SEQ ID NO: 6068143 - DNA, 25 bp, Homo sapien
acagaatagaggcaatactttagct

SEQ ID NO: 6068144 - DNA, 25 bp, Homo sapien
tttaaaacagcactgttatttctca

SEQ ID NO: 6068145 - DNA, 25 bp, Homo sapien
tttctcaggacaagagcaaaaatca

SEQ ID NO: 6068146 - DNA, 25 bp, Homo sapien
ctttacagaatagaggcaatacttt

SEQ ID NO: 6068147 - DNA, 25 bp, Homo sapien
aacacacctgtaaaattacccacat

SEQ ID NO: 6068148 - DNA, 25 bp, Homo sapien
catttttggaaagcacagactgtgt

SEQ ID NO: 6068149 - DNA, 25 bp, Homo sapien
gactcatgcttaatgtaagatatca

SEQ ID NO: 6068150 - DNA, 25 bp, Homo sapien
aatctgtagcatactacaaaaagat

SEQ ID NO: 6068151 - DNA, 25 bp, Homo sapien
aagcacagactgtgttattctaaaa

SEQ ID NO: 6068152 - DNA, 25 bp, Homo sapien
cttagagatagccttttacaaacag

SEQ ID NO: 6068153 - DNA, 25 bp, Homo sapien
aaatgaaaatttagtccatcccaat

SEQ ID NO: 6068154 - DNA, 25 bp, Homo sapien
tcatggtcaatgtcttaaaaaagag

SEQ ID NO: 6068155 - DNA, 25 bp, Homo sapien
aaatgagtcaacttacaaagaagaa

SEQ ID NO: 6068156 - DNA, 25 bp, Homo sapien
aaaattacccacatactaggcttag

SEQ ID NO: 6068157 - DNA, 25 bp, Homo sapien
gtccatcccaattaatacaaattag

SEQ ID NO: 6068158 - DNA, 25 bp, Homo sapien
tatactgcaaaccacaataacaatg

SEQ ID NO: 6068159 - DNA, 25 bp, Homo sapien
gaatttgaactgtctcgttaaggag

SEQ ID NO: 6068160 - DNA, 25 bp, Homo sapien
ggaaaattataagtaagctgtgcat

SEQ ID NO: 6068161 - DNA, 25 bp, Homo sapien
taggaagtccattctttaagttgat

SEQ ID NO: 6068162 - DNA, 25 bp, Homo sapien
ccgagttgagacattaaccattagg

SEQ ID NO: 6068163 - DNA, 25 bp, Homo sapien
cacatacatgcaggcagaattattt

SEQ ID NO: 6068164 - DNA, 25 bp, Homo sapien
aaaatccttatgctatactgcatgg

SEQ ID NO: 6068165 - DNA, 25 bp, Homo sapien
tgtctcgttaaggaggagttctttg

SEQ ID NO: 6068166 - DNA, 25 bp, Homo sapien
agtgcaacattgtactaggaagtcc

SEQ ID NO: 6068167 - DNA, 25 bp, Homo sapien
gaaaaaccatctgatagtaaacagt

SEQ ID NO: 6068168 - DNA, 25 bp, Homo sapien
tccattctttaagttgatagtcaag

SEQ ID NO: 6068169 - DNA, 25 bp, Homo sapien
tagtaaacagtaaccgagttgagac

SEQ ID NO: 6068170 - DNA, 25 bp, Homo sapien
tctttacaatagaactcctagaaaa

SEQ ID NO: 6068171 - DNA, 25 bp, Homo sapien
ccctggctgaatgtaaatatttacc

SEQ ID NO: 6068172 - DNA, 25 bp, Homo sapien
agaaagactgcctttacatttccca

SEQ ID NO: 6068173 - DNA, 25 bp, Homo sapien
cggcacgaaatggaacatgataagc

SEQ ID NO: 6068174 - DNA, 25 bp, Homo sapien
tggacttacctttctcatatacttg

SEQ ID NO: 6068175 - DNA, 25 bp, Homo sapien
gggaaagcggcacgaaatggaacat

SEQ ID NO: 6068176 - DNA, 25 bp, Homo sapien
tagaatagcatccatttcccagaga

SEQ ID NO: 6068177 - DNA, 25 bp, Homo sapien
gggacagcagtggttaagtaatcca

SEQ ID NO: 6068178 - DNA, 25 bp, Homo sapien
aatcccatagcccagtcacagtggg

SEQ ID NO: 6068179 - DNA, 25 bp, Homo sapien
gggtccgctccatgggcaggcccta

SEQ ID NO: 6068180 - DNA, 25 bp, Homo sapien
tctcatatacttggcctggctagga

SEQ ID NO: 6068181 - DNA, 25 bp, Homo sapien
tcttccctggctgaatgtaaatatt

SEQ ID NO: 6068182 - DNA, 25 bp, Homo sapien
tggctaggacactgggtgccagaca

SEQ ID NO: 6068183 - DNA, 25 bp, Homo sapien
tttgtccctgttgctacaataggaa

SEQ ID NO: 6068184 - DNA, 25 bp, Homo sapien
cctgttgctacaataggaagttaac

SEQ ID NO: 6068185 - DNA, 25 bp, Homo sapien
gtccctgttgctacaataggaagtt

SEQ ID NO: 6068186 - DNA, 25 bp, Homo sapien
gttgctacaataggaagttaacaat

SEQ ID NO: 6068187 - DNA, 25 bp, Homo sapien
atgaaaacagttcacctaacaccca

SEQ ID NO: 6068188 - DNA, 25 bp, Homo sapien
tgaaaacagttcacctaacacccat

SEQ ID NO: 6068189 - DNA, 25 bp, Homo sapien
gaaaacagttcacctaacacccatg

SEQ ID NO: 6068190 - DNA, 25 bp, Homo sapien
ttgtccctgttgctacaataggaag

SEQ ID NO: 6068191 - DNA, 25 bp, Homo sapien
tatttgtccctgttgctacaatagg

SEQ ID NO: 6068192 - DNA, 25 bp, Homo sapien
ataaatttcctcccatatacaaaat

SEQ ID NO: 6068193 - DNA, 25 bp, Homo sapien
ccctgttgctacaataggaagttaa

SEQ ID NO: 6068194 - DNA, 25 bp, Homo sapien
tgtccctgttgctacaataggaagt

SEQ ID NO: 6068195 - DNA, 25 bp, Homo sapien
tcacttgcagcacttggccttccct

SEQ ID NO: 6068196 - DNA, 25 bp, Homo sapien
aagtaagcagagagtaaacagcaga

SEQ ID NO: 6068197 - DNA, 25 bp, Homo sapien
gaatagagacattgccctccactgc

SEQ ID NO: 6068198 - DNA, 25 bp, Homo sapien
gccctccactgctgacgcaattgta

SEQ ID NO: 6068199 - DNA, 25 bp, Homo sapien
tgccttgaattttggtaaagatcgg

SEQ ID NO: 6068200 - DNA, 25 bp, Homo sapien
taacaggtgccttgaattttggtaa

SEQ ID NO: 6068201 - DNA, 25 bp, Homo sapien
ggccttccctctgtaacaggtgcct

SEQ ID NO: 6068202 - DNA, 25 bp, Homo sapien
gaggccatctcagacaaaagtaagc

SEQ ID NO: 6068203 - DNA, 25 bp, Homo sapien
gtaaagatcgggcaggcagaataga

SEQ ID NO: 6068204 - DNA, 25 bp, Homo sapien
cactgctgacgcaattgtaatgatc

SEQ ID NO: 6068205 - DNA, 25 bp, Homo sapien
aatgatcagatctgtggccaaggcc

SEQ ID NO: 6068206 - DNA, 25 bp, Homo sapien
cagagagtaaacagcagaaggtagg

SEQ ID NO: 6068207 - DNA, 25 bp, Homo sapien
tggggttccgtctccctgcacatac

SEQ ID NO: 6068208 - DNA, 25 bp, Homo sapien
tcacatggggttccgtctccctgca

SEQ ID NO: 6068209 - DNA, 25 bp, Homo sapien
ggttccgtctccctgcacatactgg

SEQ ID NO: 6068210 - DNA, 25 bp, Homo sapien
tccctgcacatactgggtacccagg

SEQ ID NO: 6068211 - DNA, 25 bp, Homo sapien
atgaatgattatgactgggccaggt

SEQ ID NO: 6068212 - DNA, 25 bp, Homo sapien
gggttccgtctccctgcacatactg

SEQ ID NO: 6068213 - DNA, 25 bp, Homo sapien
tccgtctccctgcacatactgggta

SEQ ID NO: 6068214 - DNA, 25 bp, Homo sapien
atggggttccgtctccctgcacata

SEQ ID NO: 6068215 - DNA, 25 bp, Homo sapien
ctgtcacatggggttccgtctccct

SEQ ID NO: 6068216 - DNA, 25 bp, Homo sapien
gttccgtctccctgcacatactggg

SEQ ID NO: 6068217 - DNA, 25 bp, Homo sapien
ttccgtctccctgcacatactgggt

SEQ ID NO: 6068218 - DNA, 25 bp, Homo sapien
ggcctgggaagggtgttgtctctag

SEQ ID NO: 6068219 - DNA, 25 bp, Homo sapien
gagttagagaggagctctctgggac

SEQ ID NO: 6068220 - DNA, 25 bp, Homo sapien
aaggggcatcccttagcaggcggcc

SEQ ID NO: 6068221 - DNA, 25 bp, Homo sapien
ggcatcccttagcaggcggcccagt

SEQ ID NO: 6068222 - DNA, 25 bp, Homo sapien
ctcaagctcagatgctgacaggaaa

SEQ ID NO: 6068223 - DNA, 25 bp, Homo sapien
tcaagctcagatgctgacaggaaaa

SEQ ID NO: 6068224 - DNA, 25 bp, Homo sapien
ccttgaagataccaataatttggtg

SEQ ID NO: 6068225 - DNA, 25 bp, Homo sapien
cctcaagctcagatgctgacaggaa

SEQ ID NO: 6068226 - DNA, 25 bp, Homo sapien
gctgacaggaaaatactgcctatgc

SEQ ID NO: 6068227 - DNA, 25 bp, Homo sapien
gggcatcccttagcaggcggcccag

SEQ ID NO: 6068228 - DNA, 25 bp, Homo sapien
cttgaagataccaataatttggtgc

SEQ ID NO: 6068229 - DNA, 25 bp, Homo sapien
gcatcccttagcaggcggcccagtt

SEQ ID NO: 6068230 - DNA, 25 bp, Homo sapien
tgcctatgcctgaaggggcatccct

SEQ ID NO: 6068231 - DNA, 25 bp, Homo sapien
tcctgaacacgcgacagaataatct

SEQ ID NO: 6068232 - DNA, 25 bp, Homo sapien
catagtttcaacagtctgcacagca

SEQ ID NO: 6068233 - DNA, 25 bp, Homo sapien
cactcggacctctttgtaaatgtaa

SEQ ID NO: 6068234 - DNA, 25 bp, Homo sapien
cataattccggtcacagacatgctg

SEQ ID NO: 6068235 - DNA, 25 bp, Homo sapien
acagcatgtcccataattccggtca

SEQ ID NO: 6068236 - DNA, 25 bp, Homo sapien
ggtccccttcattcatagtttcaac

SEQ ID NO: 6068237 - DNA, 25 bp, Homo sapien
gggtctatagtcaggaccccagcca

SEQ ID NO: 6068238 - DNA, 25 bp, Homo sapien
tggagcgtctccctgttcagtgatg

SEQ ID NO: 6068239 - DNA, 25 bp, Homo sapien
catatggtgggtctatagtcaggac

SEQ ID NO: 6068240 - DNA, 25 bp, Homo sapien
cagaataatctcattagagctgctg

SEQ ID NO: 6068241 - DNA, 25 bp, Homo sapien
tatgctttgcagtctccagacgtga

SEQ ID NO: 6068242 - DNA, 25 bp, Homo sapien
tcactggctgtcactcggacctctt

SEQ ID NO: 6068243 - DNA, 25 bp, Homo sapien
ttacatcgcccgtgtccgggccagt

SEQ ID NO: 6068244 - DNA, 25 bp, Homo sapien
ggactggagcagtccatccatcatg

SEQ ID NO: 6068245 - DNA, 25 bp, Homo sapien
aggccacaagggctattacatcgcc

SEQ ID NO: 6068246 - DNA, 25 bp, Homo sapien
cttgttaatacgttgatctgtgagg

SEQ ID NO: 6068247 - DNA, 25 bp, Homo sapien
cacaagggctattacatcgcccgtg

SEQ ID NO: 6068248 - DNA, 25 bp, Homo sapien
tagtcttgttaatacgttgatctgt

SEQ ID NO: 6068249 - DNA, 25 bp, Homo sapien
gactggagcagtccatccatcatgg

SEQ ID NO: 6068250 - DNA, 25 bp, Homo sapien
ttgggggggcccgatatccatggct

SEQ ID NO: 6068251 - DNA, 25 bp, Homo sapien
taatacgttgatctgtgaggtcagc

SEQ ID NO: 6068252 - DNA, 25 bp, Homo sapien
gggctattacatcgcccgtgtccgg

SEQ ID NO: 6068253 - DNA, 25 bp, Homo sapien
tacgttgatctgtgaggtcagcagg

SEQ ID NO: 6068254 - DNA, 25 bp, Homo sapien
ggagcagtccatccatcatggttag

SEQ ID NO: 6068255 - DNA, 25 bp, Homo sapien
cagcgatagtagtcaccgagagaaa

SEQ ID NO: 6068256 - DNA, 25 bp, Homo sapien
acgaccagacatgacagcgatagta

SEQ ID NO: 6068257 - DNA, 25 bp, Homo sapien
tagtagtcaccgagagaaactcctg

SEQ ID NO: 6068258 - DNA, 25 bp, Homo sapien
gacatgacagcgatagtagtcaccg

SEQ ID NO: 6068259 - DNA, 25 bp, Homo sapien
ccagacatgacagcgatagtagtca

SEQ ID NO: 6068260 - DNA, 25 bp, Homo sapien
catgacagcgatagtagtcaccgag

SEQ ID NO: 6068261 - DNA, 25 bp, Homo sapien
cgatagtagtcaccgagagaaactc

SEQ ID NO: 6068262 - DNA, 25 bp, Homo sapien
aagagccttttgagttcacaggtgc

SEQ ID NO: 6068263 - DNA, 25 bp, Homo sapien
agtagtcaccgagagaaactcctgc

SEQ ID NO: 6068264 - DNA, 25 bp, Homo sapien
gacagcgatagtagtcaccgagaga

SEQ ID NO: 6068265 - DNA, 25 bp, Homo sapien
gggcccacttgggccggacgtcagc

SEQ ID NO: 6068266 - DNA, 25 bp, Homo sapien
gaccagacatgacagcgatagtagt

SEQ ID NO: 6068267 - DNA, 25 bp, Homo sapien
aaagatgttgaccacggcgcggatg

SEQ ID NO: 6068268 - DNA, 25 bp, Homo sapien
cctcgacagcggcaaagaatggcag

SEQ ID NO: 6068269 - DNA, 25 bp, Homo sapien
acataaatggccatgagcagcgtga

SEQ ID NO: 6068270 - DNA, 25 bp, Homo sapien
cgacgtcgaagaagacttggtgcca

SEQ ID NO: 6068271 - DNA, 25 bp, Homo sapien
ccgatgacgaagatggcgacgtcga

SEQ ID NO: 6068272 - DNA, 25 bp, Homo sapien
gaggataggacaacagcgccttggc

SEQ ID NO: 6068273 - DNA, 25 bp, Homo sapien
gctgcgatgtgcgtccagttcatca

SEQ ID NO: 6068274 - DNA, 25 bp, Homo sapien
gcagcgcgaagtgcggcacataaat

SEQ ID NO: 6068275 - DNA, 25 bp, Homo sapien
tccttggtctcgtcggcccaggtga

SEQ ID NO: 6068276 - DNA, 25 bp, Homo sapien
catcatgcagtggaactcgctgggc

SEQ ID NO: 6068277 - DNA, 25 bp, Homo sapien
gcatattgccctccagcgaaggcag

SEQ ID NO: 6068278 - DNA, 25 bp, Homo sapien
ggttatccgtgatgacctccttggt

SEQ ID NO: 6068279 - DNA, 25 bp, Homo sapien
acataacacgctgagacaaagaggg

SEQ ID NO: 6068280 - DNA, 25 bp, Homo sapien
tcatgtctaatgagcaccggccaaa

SEQ ID NO: 6068281 - DNA, 25 bp, Homo sapien
tctggtggagttctcagggataacc

SEQ ID NO: 6068282 - DNA, 25 bp, Homo sapien
gacacagagtgaggactcatgtcta

SEQ ID NO: 6068283 - DNA, 25 bp, Homo sapien
tcccaagtctggtggagttctcagg

SEQ ID NO: 6068284 - DNA, 25 bp, Homo sapien
aaataggtcattgcacataacacgc

SEQ ID NO: 6068285 - DNA, 25 bp, Homo sapien
ccaagccttccctctcaagttgagt

SEQ ID NO: 6068286 - DNA, 25 bp, Homo sapien
ttggatcagccctgaactgctgtag

SEQ ID NO: 6068287 - DNA, 25 bp, Homo sapien
gaggcagtgcttggatcagccctga

SEQ ID NO: 6068288 - DNA, 25 bp, Homo sapien
tgggacctccagaccacatggtgtt

SEQ ID NO: 6068289 - DNA, 25 bp, Homo sapien
cagtgagtacaaaccaattgcagga

SEQ ID NO: 6068290 - DNA, 25 bp, Homo sapien
ctgctgtagttggaatgggtttacc

SEQ ID NO: 6068291 - DNA, 25 bp, Homo sapien
taggaattctgatggatgttctccg

SEQ ID NO: 6068292 - DNA, 25 bp, Homo sapien
tgctggttccggctgagcctagtcc

SEQ ID NO: 6068293 - DNA, 25 bp, Homo sapien
caaagtcagtgtacgcgctgcgcat

SEQ ID NO: 6068294 - DNA, 25 bp, Homo sapien
gcagccgcactgtgaaagtgaaacc

SEQ ID NO: 6068295 - DNA, 25 bp, Homo sapien
gaaggacaaagctctaggcaaaata

SEQ ID NO: 6068296 - DNA, 25 bp, Homo sapien
tcagtggtgggtgcaaaccacaggc

SEQ ID NO: 6068297 - DNA, 25 bp, Homo sapien
gcatctccgcggctttttcagtggt

SEQ ID NO: 6068298 - DNA, 25 bp, Homo sapien
gcaaatcacaactagtctctcagcg

SEQ ID NO: 6068299 - DNA, 25 bp, Homo sapien
tcagcgtgtcctaagcattcggcag

SEQ ID NO: 6068300 - DNA, 25 bp, Homo sapien
tcctctctctaaggttgctggctga

SEQ ID NO: 6068301 - DNA, 25 bp, Homo sapien
tccaaaagaagcttgtaacccactg

SEQ ID NO: 6068302 - DNA, 25 bp, Homo sapien
taacccactgtgaaggaatgccaca

SEQ ID NO: 6068303 - DNA, 25 bp, Homo sapien
ggcgcgtccgagtcggtgtaggtga

SEQ ID NO: 6068304 - DNA, 25 bp, Homo sapien
ccgggtccagctctcgtagtagcgg

SEQ ID NO: 6068305 - DNA, 25 bp, Homo sapien
cgtccgagtcggtgtaggtgagcca

SEQ ID NO: 6068306 - DNA, 25 bp, Homo sapien
ggctcgatggcatccgcccggctcc

SEQ ID NO: 6068307 - DNA, 25 bp, Homo sapien
gtccgagtcggtgtaggtgagccag

SEQ ID NO: 6068308 - DNA, 25 bp, Homo sapien
gcgcgtccgagtcggtgtaggtgag

SEQ ID NO: 6068309 - DNA, 25 bp, Homo sapien
gccaggtggattctgtctcccgggt

SEQ ID NO: 6068310 - DNA, 25 bp, Homo sapien
gcgtccgagtcggtgtaggtgagcc

SEQ ID NO: 6068311 - DNA, 25 bp, Homo sapien
ccaggtggattctgtctcccgggtc

SEQ ID NO: 6068312 - DNA, 25 bp, Homo sapien
agctctcgtagtagcggggctcgat

SEQ ID NO: 6068313 - DNA, 25 bp, Homo sapien
cggcgcgtccgagtcggtgtaggtg

SEQ ID NO: 6068314 - DNA, 25 bp, Homo sapien
cagctctcgtagtagcggggctcga

SEQ ID NO: 6068315 - DNA, 25 bp, Homo sapien
cgtgaaagtaagaattccaggctga

SEQ ID NO: 6068316 - DNA, 25 bp, Homo sapien
cactgcagtcacttagcttgtaaaa

SEQ ID NO: 6068317 - DNA, 25 bp, Homo sapien
catatacactgaacagagaatattt

SEQ ID NO: 6068318 - DNA, 25 bp, Homo sapien
tggctagccaagcaatcacggagaa

SEQ ID NO: 6068319 - DNA, 25 bp, Homo sapien
tagcggcgtgaaagtaagaattcca

SEQ ID NO: 6068320 - DNA, 25 bp, Homo sapien
aagaatagcggcgtgaaagtaagaa

SEQ ID NO: 6068321 - DNA, 25 bp, Homo sapien
tgaaagtaagaattccaggctgact

SEQ ID NO: 6068322 - DNA, 25 bp, Homo sapien
ctagccaagcaatcacggagaaagg

SEQ ID NO: 6068323 - DNA, 25 bp, Homo sapien
aatagcggcgtgaaagtaagaattc

SEQ ID NO: 6068324 - DNA, 25 bp, Homo sapien
aaatggctagccaagcaatcacgga

SEQ ID NO: 6068325 - DNA, 25 bp, Homo sapien
aaggaaaagaatagcggcgtgaaag

SEQ ID NO: 6068326 - DNA, 25 bp, Homo sapien
cggcgtgaaagtaagaattccaggc

SEQ ID NO: 6068327 - DNA, 25 bp, Homo sapien
tgacgtacctgtcgacggcgatggc

SEQ ID NO: 6068328 - DNA, 25 bp, Homo sapien
tgaggagcatcatggcgaagaacat

SEQ ID NO: 6068329 - DNA, 25 bp, Homo sapien
caggctccggaaagcgtagatgagt

SEQ ID NO: 6068330 - DNA, 25 bp, Homo sapien
gagaatctccctaaaggtgttgcgc

SEQ ID NO: 6068331 - DNA, 25 bp, Homo sapien
tggtgatgaggcacacaatgaccat

SEQ ID NO: 6068332 - DNA, 25 bp, Homo sapien
gagggccttcctcacggtcatgatg

SEQ ID NO: 6068333 - DNA, 25 bp, Homo sapien
accattttgctctccgagtagacga

SEQ ID NO: 6068334 - DNA, 25 bp, Homo sapien
gccacgatcaaggtgagggccttcc

SEQ ID NO: 6068335 - DNA, 25 bp, Homo sapien
cacatgatgaggaccaggtaggtgt

SEQ ID NO: 6068336 - DNA, 25 bp, Homo sapien
gatcatggagtcgaagatgttgtcc

SEQ ID NO: 6068337 - DNA, 25 bp, Homo sapien
cagtgctgctatgcgcttgacgtgc

SEQ ID NO: 6068338 - DNA, 25 bp, Homo sapien
gtgttgcgcaattccaggctccgga

SEQ ID NO: 6068339 - DNA, 25 bp, Homo sapien
accaacgaaggcgtagatcactggg

SEQ ID NO: 6068340 - DNA, 25 bp, Homo sapien
caagagtcagaacctggctgggaga

SEQ ID NO: 6068341 - DNA, 25 bp, Homo sapien
gaacaactgccgcaggtacttccgg

SEQ ID NO: 6068342 - DNA, 25 bp, Homo sapien
tctgaaatcttgcttgagtccaagc

SEQ ID NO: 6068343 - DNA, 25 bp, Homo sapien
tgctaatggtcacaaatctgaaatc

SEQ ID NO: 6068344 - DNA, 25 bp, Homo sapien
ggagccatttaaccaggtgcacagc

SEQ ID NO: 6068345 - DNA, 25 bp, Homo sapien
gagctcactttgaatggagcccaca

SEQ ID NO: 6068346 - DNA, 25 bp, Homo sapien
acgcctgtggaacaactgccgcagg

SEQ ID NO: 6068347 - DNA, 25 bp, Homo sapien
ggagcccacagtcaccactactggg

SEQ ID NO: 6068348 - DNA, 25 bp, Homo sapien
gtgtgcctggcaggtcacgcctgct

SEQ ID NO: 6068349 - DNA, 25 bp, Homo sapien
tccatgctgtgccaagagtcagaac

SEQ ID NO: 6068350 - DNA, 25 bp, Homo sapien
actgggttgacacagcagtgcgtgt

SEQ ID NO: 6068351 - DNA, 25 bp, Homo sapien
tctctatccaagaggcggactccat

SEQ ID NO: 6068352 - DNA, 25 bp, Homo sapien
ctatccaagaggcggactccatgct

SEQ ID NO: 6068353 - DNA, 25 bp, Homo sapien
ctctatccaagaggcggactccatg

SEQ ID NO: 6068354 - DNA, 25 bp, Homo sapien
tccaagaggcggactccatgctgtg

SEQ ID NO: 6068355 - DNA, 25 bp, Homo sapien
atccaagaggcggactccatgctgt

SEQ ID NO: 6068356 - DNA, 25 bp, Homo sapien
ccaagaggcggactccatgctgtgc

SEQ ID NO: 6068357 - DNA, 25 bp, Homo sapien
ctctctatccaagaggcggactcca

SEQ ID NO: 6068358 - DNA, 25 bp, Homo sapien
tctatccaagaggcggactccatgc

SEQ ID NO: 6068359 - DNA, 25 bp, Homo sapien
tatccaagaggcggactccatgctg

SEQ ID NO: 6068360 - DNA, 25 bp, Homo sapien
tgtcacgcttgcacttgagcagccg

SEQ ID NO: 6068361 - DNA, 25 bp, Homo sapien
gaagctgtcacgcttgcacttgagc

SEQ ID NO: 6068362 - DNA, 25 bp, Homo sapien
aagctgtcacgcttgcacttgagca

SEQ ID NO: 6068363 - DNA, 25 bp, Homo sapien
ctgtcacgcttgcacttgagcagcc

SEQ ID NO: 6068364 - DNA, 25 bp, Homo sapien
aagccgtagtctggcgggaaggttg

SEQ ID NO: 6068365 - DNA, 25 bp, Homo sapien
aaactccttcatgcgcatcacatag

SEQ ID NO: 6068366 - DNA, 25 bp, Homo sapien
gggaagctgtcacgcttgcacttga

SEQ ID NO: 6068367 - DNA, 25 bp, Homo sapien
gctccttgcgttcggggaagccgta

SEQ ID NO: 6068368 - DNA, 25 bp, Homo sapien
agctgtcacgcttgcacttgagcag

SEQ ID NO: 6068369 - DNA, 25 bp, Homo sapien
atcgcccaggtagcgccggaccagg

SEQ ID NO: 6068370 - DNA, 25 bp, Homo sapien
gtggtgggcgcagtagtcccgcagc

SEQ ID NO: 6068371 - DNA, 25 bp, Homo sapien
caaactccttcatgcgcatcacata

SEQ ID NO: 6068372 - DNA, 25 bp, Homo sapien
gcctttgcagatttgccgccttctt

SEQ ID NO: 6068373 - DNA, 25 bp, Homo sapien
tggcctttgcagatttgccgccttc

SEQ ID NO: 6068374 - DNA, 25 bp, Homo sapien
cgcatcacatagcttgcggtgcgca

SEQ ID NO: 6068375 - DNA, 25 bp, Homo sapien
cctggcctttgcagatttgccgcct

SEQ ID NO: 6068376 - DNA, 25 bp, Homo sapien
gcatcacatagcttgcggtgcgcag

SEQ ID NO: 6068377 - DNA, 25 bp, Homo sapien
ttgcggtgcgcagtagtcccgagtc

SEQ ID NO: 6068378 - DNA, 25 bp, Homo sapien
catcacatagcttgcggtgcgcagt

SEQ ID NO: 6068379 - DNA, 25 bp, Homo sapien
catagcttgcggtgcgcagtagtcc

SEQ ID NO: 6068380 - DNA, 25 bp, Homo sapien
gcgcatcacatagcttgcggtgcgc

SEQ ID NO: 6068381 - DNA, 25 bp, Homo sapien
cttgcggtgcgcagtagtcccgagt

SEQ ID NO: 6068382 - DNA, 25 bp, Homo sapien
agcagccctcgtcccgctcaaactc

SEQ ID NO: 6068383 - DNA, 25 bp, Homo sapien
agctgagcctcactcgcgtccatca

SEQ ID NO: 6068384 - DNA, 25 bp, Homo sapien
gccaataggccctggtcagtgcagt

SEQ ID NO: 6068385 - DNA, 25 bp, Homo sapien
tctgcggacgactaaacggacctgt

SEQ ID NO: 6068386 - DNA, 25 bp, Homo sapien
ttgtagatgctaccaccaggagagg

SEQ ID NO: 6068387 - DNA, 25 bp, Homo sapien
ttagctttgacgttggcctctgcac

SEQ ID NO: 6068388 - DNA, 25 bp, Homo sapien
taacagctggatatactctggctca

SEQ ID NO: 6068389 - DNA, 25 bp, Homo sapien
cagttgtagtcagggtctgccccgt

SEQ ID NO: 6068390 - DNA, 25 bp, Homo sapien
gacctgtgatagaagtgaccgtgga

SEQ ID NO: 6068391 - DNA, 25 bp, Homo sapien
tcgggcctgtagcagcaatgcaatg

SEQ ID NO: 6068392 - DNA, 25 bp, Homo sapien
ggtcttgggacacgagccaataggc

SEQ ID NO: 6068393 - DNA, 25 bp, Homo sapien
gaagctatgtttgatgcccagactg

SEQ ID NO: 6068394 - DNA, 25 bp, Homo sapien
tctgccccgtggagcaaaagcaggc

SEQ ID NO: 6068395 - DNA, 25 bp, Homo sapien
aagcacacgtacacagtccagatgg

SEQ ID NO: 6068396 - DNA, 25 bp, Homo sapien
aagccacccggcgatgccggctgga

SEQ ID NO: 6068397 - DNA, 25 bp, Homo sapien
gaggcccgaatggacagaaagttga

SEQ ID NO: 6068398 - DNA, 25 bp, Homo sapien
gaagaggaacatagagacagccaga

SEQ ID NO: 6068399 - DNA, 25 bp, Homo sapien
atgccggctggaacaggacccgata

SEQ ID NO: 6068400 - DNA, 25 bp, Homo sapien
gcggctttgcactggactgcagtga

SEQ ID NO: 6068401 - DNA, 25 bp, Homo sapien
caaacgagttcaggagcctaaggaa

SEQ ID NO: 6068402 - DNA, 25 bp, Homo sapien
tggcatatcgaaaaggagaccaagg

SEQ ID NO: 6068403 - DNA, 25 bp, Homo sapien
gttctcgttaaatgcactcgaccca

SEQ ID NO: 6068404 - DNA, 25 bp, Homo sapien
aagagaagaggaacatagagacagc

SEQ ID NO: 6068405 - DNA, 25 bp, Homo sapien
taaatgcactcgacccaaaattggt

SEQ ID NO: 6068406 - DNA, 25 bp, Homo sapien
tttaggagcaaacgagttcaggagc

SEQ ID NO: 6068407 - DNA, 25 bp, Homo sapien
tggtttggcatatcgaaaaggagac

SEQ ID NO: 6068408 - DNA, 25 bp, Homo sapien
ccatgttcatagatggaatacccag

SEQ ID NO: 6068409 - DNA, 25 bp, Homo sapien
catagatggaatacccagtatcatg

SEQ ID NO: 6068410 - DNA, 25 bp, Homo sapien
gaacaaatctaacaagcaatatgaa

SEQ ID NO: 6068411 - DNA, 25 bp, Homo sapien
gagaatccctaatatgtataccatg

SEQ ID NO: 6068412 - DNA, 25 bp, Homo sapien
ggatataagagaatccctaatatgt

SEQ ID NO: 6068413 - DNA, 25 bp, Homo sapien
taaaaagaatcccagtcaccacagc

SEQ ID NO: 6068414 - DNA, 25 bp, Homo sapien
tgacaagctgaccttaaaagtaata

SEQ ID NO: 6068415 - DNA, 25 bp, Homo sapien
tgtgggatggctcaccataccaggt

SEQ ID NO: 6068416 - DNA, 25 bp, Homo sapien
ggatggctcaccataccaggtatca

SEQ ID NO: 6068417 - DNA, 25 bp, Homo sapien
taaagacaaggcaatgcacagtaag

SEQ ID NO: 6068418 - DNA, 25 bp, Homo sapien
aattctcctcaaatagatctataca

SEQ ID NO: 6068419 - DNA, 25 bp, Homo sapien
aaaattaagcaagggtgctggatac

SEQ ID NO: 6068420 - DNA, 25 bp, Homo sapien
taaggatcctaaacaagacacaatg

SEQ ID NO: 6068421 - DNA, 25 bp, Homo sapien
ggaggaatccagtcgggtcagattc

SEQ ID NO: 6068422 - DNA, 25 bp, Homo sapien
ggcactgactgaggttgatacacac

SEQ ID NO: 6068423 - DNA, 25 bp, Homo sapien
caaggcgtacctttctgccaaaggg

SEQ ID NO: 6068424 - DNA, 25 bp, Homo sapien
tcccatgtaaagaggcaaggcgtac

SEQ ID NO: 6068425 - DNA, 25 bp, Homo sapien
gttgtttctcccagcaggctcgaac

SEQ ID NO: 6068426 - DNA, 25 bp, Homo sapien
ctgtgacccagcctactgcaggttg

SEQ ID NO: 6068427 - DNA, 25 bp, Homo sapien
ttcaacacgcccaggcactgactga

SEQ ID NO: 6068428 - DNA, 25 bp, Homo sapien
taccccttgaataggtggctctggt

SEQ ID NO: 6068429 - DNA, 25 bp, Homo sapien
ggtatatgaagtccatcccatgtaa

SEQ ID NO: 6068430 - DNA, 25 bp, Homo sapien
caaaagccacttccagtctggtctg

SEQ ID NO: 6068431 - DNA, 25 bp, Homo sapien
aaaacaattgctctgttcttacctg

SEQ ID NO: 6068432 - DNA, 25 bp, Homo sapien
gattgtaatatatgctctggaaaac

SEQ ID NO: 6068433 - DNA, 25 bp, Homo sapien
tcccaccctctcatggtccacaact

SEQ ID NO: 6068434 - DNA, 25 bp, Homo sapien
tgaaagattgtaatatatgctctgg

SEQ ID NO: 6068435 - DNA, 25 bp, Homo sapien
ctcatggtccacaactggtagaaag

SEQ ID NO: 6068436 - DNA, 25 bp, Homo sapien
tctcatggtccacaactggtagaaa

SEQ ID NO: 6068437 - DNA, 25 bp, Homo sapien
accctctcatggtccacaactggta

SEQ ID NO: 6068438 - DNA, 25 bp, Homo sapien
ctctcatggtccacaactggtagaa

SEQ ID NO: 6068439 - DNA, 25 bp, Homo sapien
tgtaatatatgctctggaaaacatt

SEQ ID NO: 6068440 - DNA, 25 bp, Homo sapien
ttgaaagattgtaatatatgctctg

SEQ ID NO: 6068441 - DNA, 25 bp, Homo sapien
gaaagattgtaatatatgctctgga

SEQ ID NO: 6068442 - DNA, 25 bp, Homo sapien
ccctctcatggtccacaactggtag

SEQ ID NO: 6068443 - DNA, 25 bp, Homo sapien
cctctcatggtccacaactggtaga

SEQ ID NO: 6068444 - DNA, 25 bp, Homo sapien
ttatgattgccacttatgctttctt

SEQ ID NO: 6068445 - DNA, 25 bp, Homo sapien
tatgattgccacttatgctttcttg

SEQ ID NO: 6068446 - DNA, 25 bp, Homo sapien
atgattgccacttatgctttcttgc

SEQ ID NO: 6068447 - DNA, 25 bp, Homo sapien
tttatgattgccacttatgctttct

SEQ ID NO: 6068448 - DNA, 25 bp, Homo sapien
tgattgccacttatgctttcttgcc

SEQ ID NO: 6068449 - DNA, 25 bp, Homo sapien
ctgccctttaggcaaccttagttcg

SEQ ID NO: 6068450 - DNA, 25 bp, Homo sapien
ggcactgacagagtttgaggtgtct

SEQ ID NO: 6068451 - DNA, 25 bp, Homo sapien
caggtgtcattcgagtgagtggccc

SEQ ID NO: 6068452 - DNA, 25 bp, Homo sapien
attttaagacgaccctgtttgccag

SEQ ID NO: 6068453 - DNA, 25 bp, Homo sapien
ttatctgcaaccaggaaaggagtgc

SEQ ID NO: 6068454 - DNA, 25 bp, Homo sapien
tgtttgccaggacgaagacatggag

SEQ ID NO: 6068455 - DNA, 25 bp, Homo sapien
tcccatacagaattagcgcataatt

SEQ ID NO: 6068456 - DNA, 25 bp, Homo sapien
ggcaaccttagttcgttatctgcaa

SEQ ID NO: 6068457 - DNA, 25 bp, Homo sapien
ttggtgagaactggtgaggattctc

SEQ ID NO: 6068458 - DNA, 25 bp, Homo sapien
tggcagagcaccatgctggcagctg

SEQ ID NO: 6068459 - DNA, 25 bp, Homo sapien
gagcttgatggtttttccctagctg

SEQ ID NO: 6068460 - DNA, 25 bp, Homo sapien
gattctctgccagaatgccagggca

SEQ ID NO: 6068461 - DNA, 25 bp, Homo sapien
cacaggcgttgcattactccttttg

SEQ ID NO: 6068462 - DNA, 25 bp, Homo sapien
tgtcggtgaggtccacgatatctag

SEQ ID NO: 6068463 - DNA, 25 bp, Homo sapien
tccaacatgcgcatgtcgcgcagca

SEQ ID NO: 6068464 - DNA, 25 bp, Homo sapien
gctcggctgcgtagtcctcgtagta

SEQ ID NO: 6068465 - DNA, 25 bp, Homo sapien
gccacgacgagctcggctgcgtagt

SEQ ID NO: 6068466 - DNA, 25 bp, Homo sapien
tcctcgtagtaggaggcgaccagct

SEQ ID NO: 6068467 - DNA, 25 bp, Homo sapien
acgatatctagctgcccgagcgcgc

SEQ ID NO: 6068468 - DNA, 25 bp, Homo sapien
ggcttcacaggcgttgcattactcc

SEQ ID NO: 6068469 - DNA, 25 bp, Homo sapien
cactgctgttgtcttacgcgactgg

SEQ ID NO: 6068470 - DNA, 25 bp, Homo sapien
gaggtccacgatatctagctgcccg

SEQ ID NO: 6068471 - DNA, 25 bp, Homo sapien
tgtcttacgcgactggtgcgcgcgt

SEQ ID NO: 6068472 - DNA, 25 bp, Homo sapien
tggaggcacggaggcgtccttggtc

SEQ ID NO: 6068473 - DNA, 25 bp, Homo sapien
taacccactgtgaaggaatgccaca

SEQ ID NO: 6068474 - DNA, 25 bp, Homo sapien
tgctggttccggctgagcctagtcc

SEQ ID NO: 6068475 - DNA, 25 bp, Homo sapien
tcagcgtgtcctaagcattcggcag

SEQ ID NO: 6068476 - DNA, 25 bp, Homo sapien
caaagtcagtgtacgcgctgcgcat

SEQ ID NO: 6068477 - DNA, 25 bp, Homo sapien
taggaattctgatggatgttctccg

SEQ ID NO: 6068478 - DNA, 25 bp, Homo sapien
tcagtggtgggtgcaaaccacaggc

SEQ ID NO: 6068479 - DNA, 25 bp, Homo sapien
tcctctctctaaggttgctggctga

SEQ ID NO: 6068480 - DNA, 25 bp, Homo sapien
gcagccgcactgtgaaagtgaaacc

SEQ ID NO: 6068481 - DNA, 25 bp, Homo sapien
gcatctccgcggctttttcagtggt

SEQ ID NO: 6068482 - DNA, 25 bp, Homo sapien
gaaggacaaagctctaggcaaaata

SEQ ID NO: 6068483 - DNA, 25 bp, Homo sapien
gcaaatcacaactagtctctcagcg

SEQ ID NO: 6068484 - DNA, 25 bp, Homo sapien
tccaaaagaagcttgtaacccactg

SEQ ID NO: 6068485 - DNA, 25 bp, Homo sapien
atgtggagagggctcgaggcttcac

SEQ ID NO: 6068486 - DNA, 25 bp, Homo sapien
ccaggtaacagtccttgcagcgctt

SEQ ID NO: 6068487 - DNA, 25 bp, Homo sapien
gcttgtgcctcggatgggttttaca

SEQ ID NO: 6068488 - DNA, 25 bp, Homo sapien
tccttgcagcgcttcttaaggacag

SEQ ID NO: 6068489 - DNA, 25 bp, Homo sapien
tgtgcctcggatgggttttacagta

SEQ ID NO: 6068490 - DNA, 25 bp, Homo sapien
tgacgagtatgtgcgtgactctgga

SEQ ID NO: 6068491 - DNA, 25 bp, Homo sapien
atgacgagtatgtgcgtgactctgg

SEQ ID NO: 6068492 - DNA, 25 bp, Homo sapien
cctcggatgggttttacagtagacg

SEQ ID NO: 6068493 - DNA, 25 bp, Homo sapien
gaccccgcctcttcaccaggtaaca

SEQ ID NO: 6068494 - DNA, 25 bp, Homo sapien
gatgggttttacagtagacgtacca

SEQ ID NO: 6068495 - DNA, 25 bp, Homo sapien
ctctgcttgtgcctcggatgggttt

SEQ ID NO: 6068496 - DNA, 25 bp, Homo sapien
tcttaaggacagtcttgtttttgaa

SEQ ID NO: 6068497 - DNA, 25 bp, Homo sapien
ccgggtggttttgcttcgctccctg

SEQ ID NO: 6068498 - DNA, 25 bp, Homo sapien
tgggctctggatggtacagttaaac

SEQ ID NO: 6068499 - DNA, 25 bp, Homo sapien
atcagcattccactgcccagtcgga

SEQ ID NO: 6068500 - DNA, 25 bp, Homo sapien
cctcacagagtgtggcgatctgaat

SEQ ID NO: 6068501 - DNA, 25 bp, Homo sapien
ttttgcttcgctccctgttctactg

SEQ ID NO: 6068502 - DNA, 25 bp, Homo sapien
ttagtgtaatgagctgaaaaaccct

SEQ ID NO: 6068503 - DNA, 25 bp, Homo sapien
tctgttgtctcttgtgggccgggtg

SEQ ID NO: 6068504 - DNA, 25 bp, Homo sapien
aaatactaagccaaacacctgccca

SEQ ID NO: 6068505 - DNA, 25 bp, Homo sapien
ccctcttgggttatggaaatccaca

SEQ ID NO: 6068506 - DNA, 25 bp, Homo sapien
tggcgatctgaatactctgttgtct

SEQ ID NO: 6068507 - DNA, 25 bp, Homo sapien
aaaccctgggtacacccgtgatctg

SEQ ID NO: 6068508 - DNA, 25 bp, Homo sapien
gaaatccacatcttagtgtaatgag

SEQ ID NO: 6068509 - DNA, 25 bp, Homo sapien
gaggcattgcccatagacgtatcct

SEQ ID NO: 6068510 - DNA, 25 bp, Homo sapien
aatgctgcagtgcacagctctcgca

SEQ ID NO: 6068511 - DNA, 25 bp, Homo sapien
cacgtagatgctcgggcgctcggat

SEQ ID NO: 6068512 - DNA, 25 bp, Homo sapien
gctctggcgacagatgaaacacttg

SEQ ID NO: 6068513 - DNA, 25 bp, Homo sapien
agacgccattggtctgctggtcaca

SEQ ID NO: 6068514 - DNA, 25 bp, Homo sapien
cccatgcttgtaatctgaacggtca

SEQ ID NO: 6068515 - DNA, 25 bp, Homo sapien
gaccctcatcaagctcacgttcgat

SEQ ID NO: 6068516 - DNA, 25 bp, Homo sapien
tcttctggcaagtcggaagcaccac

SEQ ID NO: 6068517 - DNA, 25 bp, Homo sapien
tttgtagtccttacagatgtcgggc

SEQ ID NO: 6068518 - DNA, 25 bp, Homo sapien
gtaatcccagcgcacggtggcacgt

SEQ ID NO: 6068519 - DNA, 25 bp, Homo sapien
taatgggaattgcatcctcatcggg

SEQ ID NO: 6068520 - DNA, 25 bp, Homo sapien
tctttcgctggattgaagacgccat

SEQ ID NO: 6068521 - DNA, 25 bp, Homo sapien
tcgggcacctcaagccctgaatggg

SEQ ID NO: 6068522 - DNA, 25 bp, Homo sapien
gctgaatgataagaccccaggatgg

SEQ ID NO: 6068523 - DNA, 25 bp, Homo sapien
caaaggcgtgattagggactccagt

SEQ ID NO: 6068524 - DNA, 25 bp, Homo sapien
cactggaccccggaaatctgtctgt

SEQ ID NO: 6068525 - DNA, 25 bp, Homo sapien
gatttactcttcagccatctggtag

SEQ ID NO: 6068526 - DNA, 25 bp, Homo sapien
ggtagaaaggatttactcttcagcc

SEQ ID NO: 6068527 - DNA, 25 bp, Homo sapien
ccaacactgaattgtgggagctaga

SEQ ID NO: 6068528 - DNA, 25 bp, Homo sapien
aatctgtctgtagcgtgtgaaccac

SEQ ID NO: 6068529 - DNA, 25 bp, Homo sapien
catgatattgcacagaggacccaac

SEQ ID NO: 6068530 - DNA, 25 bp, Homo sapien
caggtcaaggaagatacacccatgg

SEQ ID NO: 6068531 - DNA, 25 bp, Homo sapien
cccatggtagcctaggaaattggca

SEQ ID NO: 6068532 - DNA, 25 bp, Homo sapien
tgtatgcctagctttcacaaggtag

SEQ ID NO: 6068533 - DNA, 25 bp, Homo sapien
agccacgtgggcaagcccgaaacca

SEQ ID NO: 6068534 - DNA, 25 bp, Homo sapien
gtggaagcgcacagggaccgcggaa

SEQ ID NO: 6068535 - DNA, 25 bp, Homo sapien
ccacgtgggcaagcccgaaaccagg

SEQ ID NO: 6068536 - DNA, 25 bp, Homo sapien
gtgaaggtggaagcgcacagggacc

SEQ ID NO: 6068537 - DNA, 25 bp, Homo sapien
tggaagcgcacagggaccgcggaac

SEQ ID NO: 6068538 - DNA, 25 bp, Homo sapien
gccacgtgggcaagcccgaaaccag

SEQ ID NO: 6068539 - DNA, 25 bp, Homo sapien
aaggtggaagcgcacagggaccgcg

SEQ ID NO: 6068540 - DNA, 25 bp, Homo sapien
gatccttttgggccgtggctgaaga

SEQ ID NO: 6068541 - DNA, 25 bp, Homo sapien
gggtgaaggtggaagcgcacaggga

SEQ ID NO: 6068542 - DNA, 25 bp, Homo sapien
aagcgcacagggaccgcggaaccgc

SEQ ID NO: 6068543 - DNA, 25 bp, Homo sapien
ggtgaaggtggaagcgcacagggac

SEQ ID NO: 6068544 - DNA, 25 bp, Homo sapien
atccttttgggccgtggctgaagaa

SEQ ID NO: 6068545 - DNA, 25 bp, Homo sapien
cgctcggcataattacccttgcgga

SEQ ID NO: 6068546 - DNA, 25 bp, Homo sapien
caacccgctcggcataattaccctt

SEQ ID NO: 6068547 - DNA, 25 bp, Homo sapien
tcggcataattacccttgcggagca

SEQ ID NO: 6068548 - DNA, 25 bp, Homo sapien
aacccgctcggcataattacccttg

SEQ ID NO: 6068549 - DNA, 25 bp, Homo sapien
gctcggcataattacccttgcggag

SEQ ID NO: 6068550 - DNA, 25 bp, Homo sapien
gccggctccaacccgctcggcataa

SEQ ID NO: 6068551 - DNA, 25 bp, Homo sapien
gcccacggggaactgaagcccagcc

SEQ ID NO: 6068552 - DNA, 25 bp, Homo sapien
cggctccaacccgctcggcataatt

SEQ ID NO: 6068553 - DNA, 25 bp, Homo sapien
ggctccaacccgctcggcataatta

SEQ ID NO: 6068554 - DNA, 25 bp, Homo sapien
ccgctcggcataattacccttgcgg

SEQ ID NO: 6068555 - DNA, 25 bp, Homo sapien
ctcggcataattacccttgcggagc

SEQ ID NO: 6068556 - DNA, 25 bp, Homo sapien
ggcataattacccttgcggagcagg

SEQ ID NO: 6068557 - DNA, 25 bp, Homo sapien
atggttgcattctcgtcttcttttc

SEQ ID NO: 6068558 - DNA, 25 bp, Homo sapien
cagtagataatgaggtaaccgaagg

SEQ ID NO: 6068559 - DNA, 25 bp, Homo sapien
gaagcttatatactctttctcagag

SEQ ID NO: 6068560 - DNA, 25 bp, Homo sapien
gataatgaggtaaccgaaggcaatt

SEQ ID NO: 6068561 - DNA, 25 bp, Homo sapien
cagaagcttatatactctttctcag

SEQ ID NO: 6068562 - DNA, 25 bp, Homo sapien
tctgcagtagataatgaggtaaccg

SEQ ID NO: 6068563 - DNA, 25 bp, Homo sapien
gaggtaaccgaaggcaattgtgctt

SEQ ID NO: 6068564 - DNA, 25 bp, Homo sapien
aaaagtccatctaggtatggttgca

SEQ ID NO: 6068565 - DNA, 25 bp, Homo sapien
ttttctgcagtagataatgaggtaa

SEQ ID NO: 6068566 - DNA, 25 bp, Homo sapien
taggtatggttgcattctcgtcttc

SEQ ID NO: 6068567 - DNA, 25 bp, Homo sapien
aatgaggtaaccgaaggcaattgtg

SEQ ID NO: 6068568 - DNA, 25 bp, Homo sapien
ccatctaggtatggttgcattctcg

SEQ ID NO: 6068569 - DNA, 25 bp, Homo sapien
gataccctggatgttgtcgcgcagc

SEQ ID NO: 6068570 - DNA, 25 bp, Homo sapien
accctggatgttgtcgcgcagcacc

SEQ ID NO: 6068571 - DNA, 25 bp, Homo sapien
ccaggcccttacctcctttgccgcg

SEQ ID NO: 6068572 - DNA, 25 bp, Homo sapien
taccctggatgttgtcgcgcagcac

SEQ ID NO: 6068573 - DNA, 25 bp, Homo sapien
cttcaacactccgcgggtctcctca

SEQ ID NO: 6068574 - DNA, 25 bp, Homo sapien
ataccctggatgttgtcgcgcagca

SEQ ID NO: 6068575 - DNA, 25 bp, Homo sapien
catatgtttggagattttcataatc

SEQ ID NO: 6068576 - DNA, 25 bp, Homo sapien
ctaggaagtatttttgccacaaaat

SEQ ID NO: 6068577 - DNA, 25 bp, Homo sapien
gatgcttgaattccgattgtatatt

SEQ ID NO: 6068578 - DNA, 25 bp, Homo sapien
cagggctgagtggagttgcaaaggg

SEQ ID NO: 6068579 - DNA, 25 bp, Homo sapien
ctcctgacaggatgcaacaagaagt

SEQ ID NO: 6068580 - DNA, 25 bp, Homo sapien
tgagtggagttgcaaagggatttat

SEQ ID NO: 6068581 - DNA, 25 bp, Homo sapien
ggatttattataccatgatctctgc

SEQ ID NO: 6068582 - DNA, 25 bp, Homo sapien
gaatgatccaggtacagcatgtgga

SEQ ID NO: 6068583 - DNA, 25 bp, Homo sapien
cgattgtatatttaaggatgttaga

SEQ ID NO: 6068584 - DNA, 25 bp, Homo sapien
attataccatgatctctgcttgtgc

SEQ ID NO: 6068585 - DNA, 25 bp, Homo sapien
aaactctgtagatggaaagagactt

SEQ ID NO: 6068586 - DNA, 25 bp, Homo sapien
gcaacgttcaaatgtgctaaactct

SEQ ID NO: 6068587 - DNA, 25 bp, Homo sapien
aaacagccaaacatttgtgggacaa

SEQ ID NO: 6068588 - DNA, 25 bp, Homo sapien
atgacacctcgggatttcaaccagc

SEQ ID NO: 6068589 - DNA, 25 bp, Homo sapien
tctctgcttgtgcatatgtttggag

SEQ ID NO: 6068590 - DNA, 25 bp, Homo sapien
tgggccttgcttgaatcctaataca

SEQ ID NO: 6068591 - DNA, 25 bp, Homo sapien
gaatcctaatacaaacaatccaact

SEQ ID NO: 6068592 - DNA, 25 bp, Homo sapien
gcctggccgtgtgtggatgggttgt

SEQ ID NO: 6068593 - DNA, 25 bp, Homo sapien
gtgtagataaacaggcctggccgtg

SEQ ID NO: 6068594 - DNA, 25 bp, Homo sapien
aaatgcaatatatgggccttgcttg

SEQ ID NO: 6068595 - DNA, 25 bp, Homo sapien
gcttcagaatgatccaggtacagca

SEQ ID NO: 6068596 - DNA, 25 bp, Homo sapien
tgcaacaagaagtacccagcaccac

SEQ ID NO: 6068597 - DNA, 25 bp, Homo sapien
agaagtacccagcaccacctaggaa

SEQ ID NO: 6068598 - DNA, 25 bp, Homo sapien
gctggagagaggagtgggcagcagt

SEQ ID NO: 6068599 - DNA, 25 bp, Homo sapien
caccacctaggaagtatttttgcca

SEQ ID NO: 6068600 - DNA, 25 bp, Homo sapien
cagtcttaacattaccaatagagag

SEQ ID NO: 6068601 - DNA, 25 bp, Homo sapien
tgtcaaatgacacctcgggatttca

SEQ ID NO: 6068602 - DNA, 25 bp, Homo sapien
atctgcctcctgacaggatgcaaca

SEQ ID NO: 6068603 - DNA, 25 bp, Homo sapien
ttgcttgaatcctaatacaaacaat

SEQ ID NO: 6068604 - DNA, 25 bp, Homo sapien
tgtgctaaactctgtagatggaaag

SEQ ID NO: 6068605 - DNA, 25 bp, Homo sapien
ggatgttagaaatatttatggacaa

SEQ ID NO: 6068606 - DNA, 25 bp, Homo sapien
gagaggagtgggcagcagtgtagat

SEQ ID NO: 6068607 - DNA, 25 bp, Homo sapien
agcattatctgcctcctgacaggat

SEQ ID NO: 6068608 - DNA, 25 bp, Homo sapien
tatttatggacaaaatgatgtaatg

SEQ ID NO: 6068609 - DNA, 25 bp, Homo sapien
gaatttgcttcagaatgatccaggt

SEQ ID NO: 6068610 - DNA, 25 bp, Homo sapien
acccagcaccacctaggaagtattt

SEQ ID NO: 6068611 - DNA, 25 bp, Homo sapien
aactccaaacccacccagcagtctt

SEQ ID NO: 6068612 - DNA, 25 bp, Homo sapien
tggatgggttgtcagggctgagtgg

SEQ ID NO: 6068613 - DNA, 25 bp, Homo sapien
agtatttttgccacaaaatcagacc

SEQ ID NO: 6068614 - DNA, 25 bp, Homo sapien
ggatttcaaccagcaacgttcaaat

SEQ ID NO: 6068615 - DNA, 25 bp, Homo sapien
aggaaagataagttcagagaaccat

SEQ ID NO: 6068616 - DNA, 25 bp, Homo sapien
taatacaaacaatccaactacaaaa

SEQ ID NO: 6068617 - DNA, 25 bp, Homo sapien
atctaactaccattttataggaaag

SEQ ID NO: 6068618 - DNA, 25 bp, Homo sapien
acccagcagtcttaacattaccaat

SEQ ID NO: 6068619 - DNA, 25 bp, Homo sapien
tgtagatggaaagagacttacagac

SEQ ID NO: 6068620 - DNA, 25 bp, Homo sapien
atttgtgggacaatgggagatgctt

SEQ ID NO: 6068621 - DNA, 25 bp, Homo sapien
acaaaatcagacctccagatctaac

SEQ ID NO: 6068622 - DNA, 25 bp, Homo sapien
tggaaagagacttacagacatttca

SEQ ID NO: 6068623 - DNA, 25 bp, Homo sapien
taacattaccaatagagaggcacca

SEQ ID NO: 6068624 - DNA, 25 bp, Homo sapien
catttcaaataaatgcaatatatgg

SEQ ID NO: 6068625 - DNA, 25 bp, Homo sapien
gaaccatgtcaaatgacacctcggg

SEQ ID NO: 6068626 - DNA, 25 bp, Homo sapien
tttgccacaaaatcagacctccaga

SEQ ID NO: 6068627 - DNA, 25 bp, Homo sapien
tacagacatttcaaataaatgcaat

SEQ ID NO: 6068628 - DNA, 25 bp, Homo sapien
gagttgcaaagggatttattatacc

SEQ ID NO: 6068629 - DNA, 25 bp, Homo sapien
ttcagagaaccatgtcaaatgacac

SEQ ID NO: 6068630 - DNA, 25 bp, Homo sapien
aacaatccaactacaaaaacagcca

SEQ ID NO: 6068631 - DNA, 25 bp, Homo sapien
ttcaaatgtgctaaactctgtagat

SEQ ID NO: 6068632 - DNA, 25 bp, Homo sapien
caaccagcaacgttcaaatgtgcta

SEQ ID NO: 6068633 - DNA, 25 bp, Homo sapien
gggacaatgggagatgcttgaattc

SEQ ID NO: 6068634 - DNA, 25 bp, Homo sapien
ggttgtcagggctgagtggagttgc

SEQ ID NO: 6068635 - DNA, 25 bp, Homo sapien
ccaaacatttgtgggacaatgggag

SEQ ID NO: 6068636 - DNA, 25 bp, Homo sapien
gcaaagggatttattataccatgat

SEQ ID NO: 6068637 - DNA, 25 bp, Homo sapien
tagagaggcaccagcattatctgcc

SEQ ID NO: 6068638 - DNA, 25 bp, Homo sapien
tgtggagctggagagaggagtgggc

SEQ ID NO: 6068639 - DNA, 25 bp, Homo sapien
ctccagatctaactaccattttata

SEQ ID NO: 6068640 - DNA, 25 bp, Homo sapien
ccatgatctctgcttgtgcatatgt

SEQ ID NO: 6068641 - DNA, 25 bp, Homo sapien
atggacaaaatgatgtaatgctcgg

SEQ ID NO: 6068642 - DNA, 25 bp, Homo sapien
tgctcggaatttgcttcagaatgat

SEQ ID NO: 6068643 - DNA, 25 bp, Homo sapien
tcagacctccagatctaactaccat

SEQ ID NO: 6068644 - DNA, 25 bp, Homo sapien
cttgtgcatatgtttggagattttc

SEQ ID NO: 6068645 - DNA, 25 bp, Homo sapien
tagaaatatttatggacaaaatgat

SEQ ID NO: 6068646 - DNA, 25 bp, Homo sapien
gataagttcagagaaccatgtcaaa

SEQ ID NO: 6068647 - DNA, 25 bp, Homo sapien
gaattccgattgtatatttaaggat

SEQ ID NO: 6068648 - DNA, 25 bp, Homo sapien
ggcaccagcattatctgcctcctga

SEQ ID NO: 6068649 - DNA, 25 bp, Homo sapien
gagacttacagacatttcaaataaa

SEQ ID NO: 6068650 - DNA, 25 bp, Homo sapien
gcagcagtgtagataaacaggcctg

SEQ ID NO: 6068651 - DNA, 25 bp, Homo sapien
aaaatgatgtaatgctcggaatttg

SEQ ID NO: 6068652 - DNA, 25 bp, Homo sapien
aaacccacccagcagtcttaacatt

SEQ ID NO: 6068653 - DNA, 25 bp, Homo sapien
tacaaaaacagccaaacatttgtgg

SEQ ID NO: 6068654 - DNA, 25 bp, Homo sapien
taccaatagagaggcaccagcatta

SEQ ID NO: 6068655 - DNA, 25 bp, Homo sapien
aatatatgggccttgcttgaatcct

SEQ ID NO: 6068656 - DNA, 25 bp, Homo sapien
tcaaataaatgcaatatatgggcct

SEQ ID NO: 6068657 - DNA, 25 bp, Homo sapien
atgtaatgctcggaatttgcttcag

SEQ ID NO: 6068658 - DNA, 25 bp, Homo sapien
ttttataggaaagataagttcagag

SEQ ID NO: 6068659 - DNA, 25 bp, Homo sapien
acctcgggatttcaaccagcaacgt

SEQ ID NO: 6068660 - DNA, 25 bp, Homo sapien
agccaagaactccaaacccacccag

SEQ ID NO: 6068661 - DNA, 25 bp, Homo sapien
tccaactacaaaaacagccaaacat

SEQ ID NO: 6068662 - DNA, 25 bp, Homo sapien
ctaccattttataggaaagataagt

SEQ ID NO: 6068663 - DNA, 25 bp, Homo sapien
acagcatgtggagctggagagagga

SEQ ID NO: 6068664 - DNA, 25 bp, Homo sapien
gagtgggcagcagtgtagataaaca

SEQ ID NO: 6068665 - DNA, 25 bp, Homo sapien
atgggagatgcttgaattccgattg

SEQ ID NO: 6068666 - DNA, 25 bp, Homo sapien
ataaacaggcctggccgtgtgtgga

SEQ ID NO: 6068667 - DNA, 25 bp, Homo sapien
ttaaggatgttagaaatatttatgg

SEQ ID NO: 6068668 - DNA, 25 bp, Homo sapien
acaggatgcaacaagaagtacccag

SEQ ID NO: 6068669 - DNA, 25 bp, Homo sapien
tccaggtacagcatgtggagctgga

SEQ ID NO: 6068670 - DNA, 25 bp, Homo sapien
ccgtgtgtggatgggttgtcagggc

SEQ ID NO: 6068671 - DNA, 25 bp, Homo sapien
gatgtgggcagggatctcttttgca

SEQ ID NO: 6068672 - DNA, 25 bp, Homo sapien
agcatatttttgagacccacagtct

SEQ ID NO: 6068673 - DNA, 25 bp, Homo sapien
gccccattcgattttgttctgcact

SEQ ID NO: 6068674 - DNA, 25 bp, Homo sapien
gcactcaagctgaatccatagatgt

SEQ ID NO: 6068675 - DNA, 25 bp, Homo sapien
gcctgccccattcgattttgttctg

SEQ ID NO: 6068676 - DNA, 25 bp, Homo sapien
gagttagagatggtgcttcccgcct

SEQ ID NO: 6068677 - DNA, 25 bp, Homo sapien
cgcatggtaagggtcgctctttccc

SEQ ID NO: 6068678 - DNA, 25 bp, Homo sapien
tctgcactgtaattagcccagtttt

SEQ ID NO: 6068679 - DNA, 25 bp, Homo sapien
tggtcgcatggtaagggtcgctctt

SEQ ID NO: 6068680 - DNA, 25 bp, Homo sapien
aacagcactcaagctgaatccatag

SEQ ID NO: 6068681 - DNA, 25 bp, Homo sapien
aatgatattcaaggccagggacacc

SEQ ID NO: 6068682 - DNA, 25 bp, Homo sapien
aattagcccagttttgctcacttgc

SEQ ID NO: 6068683 - DNA, 25 bp, Homo sapien
caggatgacgaggagcaccagcccc

SEQ ID NO: 6068684 - DNA, 25 bp, Homo sapien
ccctccagggccctccagagccctc

SEQ ID NO: 6068685 - DNA, 25 bp, Homo sapien
agagaatggagccagacggggagcc

SEQ ID NO: 6068686 - DNA, 25 bp, Homo sapien
ttgcaggggcagcagcgggtcacca

SEQ ID NO: 6068687 - DNA, 25 bp, Homo sapien
ctggccagcgggatgggcagccgca

SEQ ID NO: 6068688 - DNA, 25 bp, Homo sapien
tcccagggctccagagaatggagcc

SEQ ID NO: 6068689 - DNA, 25 bp, Homo sapien
gtagaccccagccacccagcggtaa

SEQ ID NO: 6068690 - DNA, 25 bp, Homo sapien
ttcggggggctgcagacgttgcagg

SEQ ID NO: 6068691 - DNA, 25 bp, Homo sapien
tgcacagaaggggaagcaggtgacc

SEQ ID NO: 6068692 - DNA, 25 bp, Homo sapien
cagccggggagggtggggcggtctg

SEQ ID NO: 6068693 - DNA, 25 bp, Homo sapien
accccgaagtgcctggccagcggga

SEQ ID NO: 6068694 - DNA, 25 bp, Homo sapien
ctgggaggccaagatctcagggttc

SEQ ID NO: 6068695 - DNA, 25 bp, Homo sapien
gagggtggggcggtctgctcagcaa

SEQ ID NO: 6068696 - DNA, 25 bp, Homo sapien
agcagcgggtcaccaggcggtccca

SEQ ID NO: 6068697 - DNA, 25 bp, Homo sapien
ggtctgctcagcaactgcccgtcac

SEQ ID NO: 6068698 - DNA, 25 bp, Homo sapien
aagtgcctggccagcgggatgggca

SEQ ID NO: 6068699 - DNA, 25 bp, Homo sapien
caggacagtaaccaggatgacgagg

SEQ ID NO: 6068700 - DNA, 25 bp, Homo sapien
ggacccccgacagcggccagcacca

SEQ ID NO: 6068701 - DNA, 25 bp, Homo sapien
ctggtttatttgcacagaaggggaa

SEQ ID NO: 6068702 - DNA, 25 bp, Homo sapien
ccgaaggccgccaggggcagcagca

SEQ ID NO: 6068703 - DNA, 25 bp, Homo sapien
aggcctctttggtggtggccttcgg

SEQ ID NO: 6068704 - DNA, 25 bp, Homo sapien
ccgtcacaactgctgggaggccaag

SEQ ID NO: 6068705 - DNA, 25 bp, Homo sapien
ggcggtcaccaccccgaagtgcctg

SEQ ID NO: 6068706 - DNA, 25 bp, Homo sapien
aggcaccaggtaccacagcaggatg

SEQ ID NO: 6068707 - DNA, 25 bp, Homo sapien
tttatttgcacagaaggggaagcag

SEQ ID NO: 6068708 - DNA, 25 bp, Homo sapien
gccaggcccaggagcgcaggcggac

SEQ ID NO: 6068709 - DNA, 25 bp, Homo sapien
ggtgaccggaggtcagctgccgcgg

SEQ ID NO: 6068710 - DNA, 25 bp, Homo sapien
cggaggtcagctgccgcggggaccc

SEQ ID NO: 6068711 - DNA, 25 bp, Homo sapien
gagcaccagccccaccaggggaccc

SEQ ID NO: 6068712 - DNA, 25 bp, Homo sapien
aggccaagatctcagggttctcgta

SEQ ID NO: 6068713 - DNA, 25 bp, Homo sapien
tctcgtagcagtaggcctctttggt

SEQ ID NO: 6068714 - DNA, 25 bp, Homo sapien
cggccagcaccatgccccctgccag

SEQ ID NO: 6068715 - DNA, 25 bp, Homo sapien
gcagcagcaggaatccgagcagcag

SEQ ID NO: 6068716 - DNA, 25 bp, Homo sapien
tgccccctgccagggagagcccgaa

SEQ ID NO: 6068717 - DNA, 25 bp, Homo sapien
agcagtaggcctctttggtggtggc

SEQ ID NO: 6068718 - DNA, 25 bp, Homo sapien
cccaggagcgcaggcggacaggcag

SEQ ID NO: 6068719 - DNA, 25 bp, Homo sapien
aggcagccaggccggccggcgccgc

SEQ ID NO: 6068720 - DNA, 25 bp, Homo sapien
caggggacccccgacagcggccagc

SEQ ID NO: 6068721 - DNA, 25 bp, Homo sapien
caactgctgggaggccaagatctca

SEQ ID NO: 6068722 - DNA, 25 bp, Homo sapien
gtggccttcggggggctgcagacgt

SEQ ID NO: 6068723 - DNA, 25 bp, Homo sapien
cagccgcagtgcaggcaccaggtac

SEQ ID NO: 6068724 - DNA, 25 bp, Homo sapien
aagaagaagtggatgagggcgacct

SEQ ID NO: 6068725 - DNA, 25 bp, Homo sapien
agtaaccaggatgacgaggagcacc

SEQ ID NO: 6068726 - DNA, 25 bp, Homo sapien
gacgaggagcaccagccccaccagg

SEQ ID NO: 6068727 - DNA, 25 bp, Homo sapien
ccctccagagccctcccagccgggg

SEQ ID NO: 6068728 - DNA, 25 bp, Homo sapien
gtcaccaccccgaagtgcctggcca

SEQ ID NO: 6068729 - DNA, 25 bp, Homo sapien
ttggtggtggccttcggggggctgc

SEQ ID NO: 6068730 - DNA, 25 bp, Homo sapien
caggtaccacagcaggatgccggcc

SEQ ID NO: 6068731 - DNA, 25 bp, Homo sapien
cggggagggtggggcggtctgctca

SEQ ID NO: 6068732 - DNA, 25 bp, Homo sapien
ggcggacaggcagccaggccggccg

SEQ ID NO: 6068733 - DNA, 25 bp, Homo sapien
gggctgcagacgttgcaggggcagc

SEQ ID NO: 6068734 - DNA, 25 bp, Homo sapien
ccacagcaggatgccggccaggttg

SEQ ID NO: 6068735 - DNA, 25 bp, Homo sapien
cccagccacccagcggtaacgggcg

SEQ ID NO: 6068736 - DNA, 25 bp, Homo sapien
aagtggatgagggcgacctgcaggg

SEQ ID NO: 6068737 - DNA, 25 bp, Homo sapien
caggcggtcccagggctccagagaa

SEQ ID NO: 6068738 - DNA, 25 bp, Homo sapien
agagccctcccagccggggagggtg

SEQ ID NO: 6068739 - DNA, 25 bp, Homo sapien
cggccggcgccgctgcaggacagta

SEQ ID NO: 6068740 - DNA, 25 bp, Homo sapien
ccaggggcagcagcaggaatccgag

SEQ ID NO: 6068741 - DNA, 25 bp, Homo sapien
agatctcagggttctcgtagcagta

SEQ ID NO: 6068742 - DNA, 25 bp, Homo sapien
tcagctgccgcggggaccccccctc

SEQ ID NO: 6068743 - DNA, 25 bp, Homo sapien
ggctccagagaatggagccagacgg

SEQ ID NO: 6068744 - DNA, 25 bp, Homo sapien
gcaccatgccccctgccagggagag

SEQ ID NO: 6068745 - DNA, 25 bp, Homo sapien
ccaggccggccggcgccgctgcagg

SEQ ID NO: 6068746 - DNA, 25 bp, Homo sapien
agaaggggaagcaggtgaccggagg

SEQ ID NO: 6068747 - DNA, 25 bp, Homo sapien
gggcagcagcgggtcaccaggcggt

SEQ ID NO: 6068748 - DNA, 25 bp, Homo sapien
ggaagcaggtgaccggaggtcagct

SEQ ID NO: 6068749 - DNA, 25 bp, Homo sapien
ggagagcccgaaggccgccaggggc

SEQ ID NO: 6068750 - DNA, 25 bp, Homo sapien
aggatgccggccaggttgaagaaga

SEQ ID NO: 6068751 - DNA, 25 bp, Homo sapien
ctcagcaactgcccgtcacaactgc

SEQ ID NO: 6068752 - DNA, 25 bp, Homo sapien
cagggttctcgtagcagtaggcctc

SEQ ID NO: 6068753 - DNA, 25 bp, Homo sapien
gccacccagcggtaacgggcggtca

SEQ ID NO: 6068754 - DNA, 25 bp, Homo sapien
ggccgccaggggcagcagcaggaat

SEQ ID NO: 6068755 - DNA, 25 bp, Homo sapien
aactgcccgtcacaactgctgggag

SEQ ID NO: 6068756 - DNA, 25 bp, Homo sapien
tggagccagacggggagccaggccc

SEQ ID NO: 6068757 - DNA, 25 bp, Homo sapien
cagacggggagccaggcccaggagc

SEQ ID NO: 6068758 - DNA, 25 bp, Homo sapien
atccgagcagcaggtagaccccagc

SEQ ID NO: 6068759 - DNA, 25 bp, Homo sapien
aggttgaagaagaagtggatgaggg

SEQ ID NO: 6068760 - DNA, 25 bp, Homo sapien
ccgacagcggccagcaccatgcccc

SEQ ID NO: 6068761 - DNA, 25 bp, Homo sapien
ggtcaccaggcggtcccagggctcc

SEQ ID NO: 6068762 - DNA, 25 bp, Homo sapien
gcaggaatccgagcagcaggtagac

SEQ ID NO: 6068763 - DNA, 25 bp, Homo sapien
ccgctgcaggacagtaaccaggatg

SEQ ID NO: 6068764 - DNA, 25 bp, Homo sapien
gcagcaggtagaccccagccaccca

SEQ ID NO: 6068765 - DNA, 25 bp, Homo sapien
cggcgccgctgcaggacagtaacca

SEQ ID NO: 6068766 - DNA, 25 bp, Homo sapien
tggggcggtctgctcagcaactgcc

SEQ ID NO: 6068767 - DNA, 25 bp, Homo sapien
agcgcaggcggacaggcagccaggc

SEQ ID NO: 6068768 - DNA, 25 bp, Homo sapien
ccggccaggttgaagaagaagtgga

SEQ ID NO: 6068769 - DNA, 25 bp, Homo sapien
ccagggccctccagagccctcccag

SEQ ID NO: 6068770 - DNA, 25 bp, Homo sapien
atgggcagccgcagtgcaggcacca

SEQ ID NO: 6068771 - DNA, 25 bp, Homo sapien
agcgggatgggcagccgcagtgcag

SEQ ID NO: 6068772 - DNA, 25 bp, Homo sapien
ctgccagggagagcccgaaggccgc

SEQ ID NO: 6068773 - DNA, 25 bp, Homo sapien
gcagacgttgcaggggcagcagcgg

SEQ ID NO: 6068774 - DNA, 25 bp, Homo sapien
gggagccaggcccaggagcgcaggc

SEQ ID NO: 6068775 - DNA, 25 bp, Homo sapien
cagtgcaggcaccaggtaccacagc

SEQ ID NO: 6068776 - DNA, 25 bp, Homo sapien
gtctagatagctaaaactgtactcc

SEQ ID NO: 6068777 - DNA, 25 bp, Homo sapien
cctacccgaaatcttatattgttct

SEQ ID NO: 6068778 - DNA, 25 bp, Homo sapien
aataatgctacttaaccaccttttg

SEQ ID NO: 6068779 - DNA, 25 bp, Homo sapien
cctgagttcaagcttacagataaat

SEQ ID NO: 6068780 - DNA, 25 bp, Homo sapien
taaggaagtacattgttaatagtga

SEQ ID NO: 6068781 - DNA, 25 bp, Homo sapien
tttttaacaacaattcgtctcatca

SEQ ID NO: 6068782 - DNA, 25 bp, Homo sapien
gaccctcggaggaaatggatttctc

SEQ ID NO: 6068783 - DNA, 25 bp, Homo sapien
tcgtctcatcataacttaatgcaat

SEQ ID NO: 6068784 - DNA, 25 bp, Homo sapien
tgtctcaagaattatcaccaaagtt

SEQ ID NO: 6068785 - DNA, 25 bp, Homo sapien
aaacaatacaaagagtgaaaggatt

SEQ ID NO: 6068786 - DNA, 25 bp, Homo sapien
atgcagcacccattacaatcattaa

SEQ ID NO: 6068787 - DNA, 25 bp, Homo sapien
ttgttaatagtgaccctcggaggaa

SEQ ID NO: 6068788 - DNA, 25 bp, Homo sapien
gctcttctcggaggtcatgaaaccg

SEQ ID NO: 6068789 - DNA, 25 bp, Homo sapien
gaggtcatgaaaccgccgtagcgct

SEQ ID NO: 6068790 - DNA, 25 bp, Homo sapien
ttctcggaggtcatgaaaccgccgt

SEQ ID NO: 6068791 - DNA, 25 bp, Homo sapien
ttgcaacttcgagtttaagtgggtg

SEQ ID NO: 6068792 - DNA, 25 bp, Homo sapien
tctttgcaacttcgagtttaagtgg

SEQ ID NO: 6068793 - DNA, 25 bp, Homo sapien
cttcgagtttaagtgggtgtcgcat

SEQ ID NO: 6068794 - DNA, 25 bp, Homo sapien
acttcgagtttaagtgggtgtcgca

SEQ ID NO: 6068795 - DNA, 25 bp, Homo sapien
ttcgagtttaagtgggtgtcgcatc

SEQ ID NO: 6068796 - DNA, 25 bp, Homo sapien
tgcaacttcgagtttaagtgggtgt

SEQ ID NO: 6068797 - DNA, 25 bp, Homo sapien
gcaacttcgagtttaagtgggtgtc

SEQ ID NO: 6068798 - DNA, 25 bp, Homo sapien
caacttcgagtttaagtgggtgtcg

SEQ ID NO: 6068799 - DNA, 25 bp, Homo sapien
ctttgcaacttcgagtttaagtggg

SEQ ID NO: 6068800 - DNA, 25 bp, Homo sapien
aaagaattcataacacccaacaagt

SEQ ID NO: 6068801 - DNA, 25 bp, Homo sapien
tctgtctcaaccatgaaacagaagt

SEQ ID NO: 6068802 - DNA, 25 bp, Homo sapien
ctctgattctgtctcaaccatgaaa

SEQ ID NO: 6068803 - DNA, 25 bp, Homo sapien
tgttcaacatatacctgctaaaaag

SEQ ID NO: 6068804 - DNA, 25 bp, Homo sapien
tgtctcaaccatgaaacagaagtgt

SEQ ID NO: 6068805 - DNA, 25 bp, Homo sapien
tcaaagaattcataacacccaacaa

SEQ ID NO: 6068806 - DNA, 25 bp, Homo sapien
acatatacctgctaaaaagcttagg

SEQ ID NO: 6068807 - DNA, 25 bp, Homo sapien
gattctgtctcaaccatgaaacaga

SEQ ID NO: 6068808 - DNA, 25 bp, Homo sapien
tcaacatatacctgctaaaaagctt

SEQ ID NO: 6068809 - DNA, 25 bp, Homo sapien
tctgattctgtctcaaccatgaaac

SEQ ID NO: 6068810 - DNA, 25 bp, Homo sapien
agaattcataacacccaacaagtag

SEQ ID NO: 6068811 - DNA, 25 bp, Homo sapien
agtgttcaacatatacctgctaaaa

SEQ ID NO: 6068812 - DNA, 25 bp, Homo sapien
aaattcaatggcttcactccaggag

SEQ ID NO: 6068813 - DNA, 25 bp, Homo sapien
cgacccgggagaaggcccaggagtg

SEQ ID NO: 6068814 - DNA, 25 bp, Homo sapien
agaggaagccgaggacgatgccaca

SEQ ID NO: 6068815 - DNA, 25 bp, Homo sapien
tcttctcctccttttcttgaccacc

SEQ ID NO: 6068816 - DNA, 25 bp, Homo sapien
tggttatcattcagtttgtctttga

SEQ ID NO: 6068817 - DNA, 25 bp, Homo sapien
cctccttttcttgaccaccaccctg

SEQ ID NO: 6068818 - DNA, 25 bp, Homo sapien
aatgtacacagagccgaggttcccg

SEQ ID NO: 6068819 - DNA, 25 bp, Homo sapien
tctgggctcagagcttggaaagttg

SEQ ID NO: 6068820 - DNA, 25 bp, Homo sapien
agaaccaaattcaatggcttcactc

SEQ ID NO: 6068821 - DNA, 25 bp, Homo sapien
ccaccctgcctcagtttctcctgat

SEQ ID NO: 6068822 - DNA, 25 bp, Homo sapien
ccaggagctccaattcaagatgcgg

SEQ ID NO: 6068823 - DNA, 25 bp, Homo sapien
gcttggaaagttgtatctattttcc

SEQ ID NO: 6068824 - DNA, 25 bp, Homo sapien
caggagtgggatacagattccagcc

SEQ ID NO: 6068825 - DNA, 25 bp, Homo sapien
gggaacagccgctgtatcctaagga

SEQ ID NO: 6068826 - DNA, 25 bp, Homo sapien
ggacgatgccacagacaagggttcc

SEQ ID NO: 6068827 - DNA, 25 bp, Homo sapien
taggagcacataaatgtacacagag

SEQ ID NO: 6068828 - DNA, 25 bp, Homo sapien
ccaggctgggtattctttctgtgga

SEQ ID NO: 6068829 - DNA, 25 bp, Homo sapien
agtttctcctgatggagctcacaga

SEQ ID NO: 6068830 - DNA, 25 bp, Homo sapien
atctgtggaactggcgggaacagcc

SEQ ID NO: 6068831 - DNA, 25 bp, Homo sapien
agtttgtctttgatctgtggaactg

SEQ ID NO: 6068832 - DNA, 25 bp, Homo sapien
ggttcccacgattaggagcacataa

SEQ ID NO: 6068833 - DNA, 25 bp, Homo sapien
taggtcctgggctgtttccaccgta

SEQ ID NO: 6068834 - DNA, 25 bp, Homo sapien
aacattaatcagtaggttttccgtg

SEQ ID NO: 6068835 - DNA, 25 bp, Homo sapien
gacaagggttcccacgattaggagc

SEQ ID NO: 6068836 - DNA, 25 bp, Homo sapien
tggaactggcgggaacagccgctgt

SEQ ID NO: 6068837 - DNA, 25 bp, Homo sapien
catctcgtcttccacctcatggtta

SEQ ID NO: 6068838 - DNA, 25 bp, Homo sapien
caaatcaccagaaacattaatcagt

SEQ ID NO: 6068839 - DNA, 25 bp, Homo sapien
tcttccacctcatggttatcattca

SEQ ID NO: 6068840 - DNA, 25 bp, Homo sapien
tttaaagaggaagccgaggacgatg

SEQ ID NO: 6068841 - DNA, 25 bp, Homo sapien
agatgactctgaccccaaccttgga

SEQ ID NO: 6068842 - DNA, 25 bp, Homo sapien
tgcctcagtttctcctgatggagct

SEQ ID NO: 6068843 - DNA, 25 bp, Homo sapien
tctgatcttcacactgtgttttgct

SEQ ID NO: 6068844 - DNA, 25 bp, Homo sapien
ttcactccaggagctccaattcaag

SEQ ID NO: 6068845 - DNA, 25 bp, Homo sapien
aaagttgtatctattttccaaatca

SEQ ID NO: 6068846 - DNA, 25 bp, Homo sapien
cacaccggtggtgacgctgcggtcc

SEQ ID NO: 6068847 - DNA, 25 bp, Homo sapien
aggtacgacagcttctgataggtcc

SEQ ID NO: 6068848 - DNA, 25 bp, Homo sapien
gtttccaccgtacgaggcagtgcgt

SEQ ID NO: 6068849 - DNA, 25 bp, Homo sapien
acagattccagccacaccggtggtg

SEQ ID NO: 6068850 - DNA, 25 bp, Homo sapien
tggagctcacagagatgactctgac

SEQ ID NO: 6068851 - DNA, 25 bp, Homo sapien
gacagcttctgataggtcctgggct

SEQ ID NO: 6068852 - DNA, 25 bp, Homo sapien
gtcgtcagaaccaaattcaatggct

SEQ ID NO: 6068853 - DNA, 25 bp, Homo sapien
attttccaaatcaccagaaacatta

SEQ ID NO: 6068854 - DNA, 25 bp, Homo sapien
cacataaatgtacacagagccgagg

SEQ ID NO: 6068855 - DNA, 25 bp, Homo sapien
tctgaccccaaccttggagaagacc

SEQ ID NO: 6068856 - DNA, 25 bp, Homo sapien
cacgattaggagcacataaatgtac

SEQ ID NO: 6068857 - DNA, 25 bp, Homo sapien
tcctgatggagctcacagagatgac

SEQ ID NO: 6068858 - DNA, 25 bp, Homo sapien
gacgtctgcagctctgatcttcaca

SEQ ID NO: 6068859 - DNA, 25 bp, Homo sapien
aagtccaggtacgacagcttctgat

SEQ ID NO: 6068860 - DNA, 25 bp, Homo sapien
ctcagagcttggaaagttgtatcta

SEQ ID NO: 6068861 - DNA, 25 bp, Homo sapien
ttctttctgtggacgtccagctggt

SEQ ID NO: 6068862 - DNA, 25 bp, Homo sapien
tgggatacagattccagccacaccg

SEQ ID NO: 6068863 - DNA, 25 bp, Homo sapien
gctccaattcaagatgcggacgtct

SEQ ID NO: 6068864 - DNA, 25 bp, Homo sapien
acgctgcggtcccatctcgtcttcc

SEQ ID NO: 6068865 - DNA, 25 bp, Homo sapien
aggcccaggagtgggatacagattc

SEQ ID NO: 6068866 - DNA, 25 bp, Homo sapien
agctggtactgaaagtccaggtacg

SEQ ID NO: 6068867 - DNA, 25 bp, Homo sapien
tcattcagtttgtctttgatctgtg

SEQ ID NO: 6068868 - DNA, 25 bp, Homo sapien
tgggctgtttccaccgtacgaggca

SEQ ID NO: 6068869 - DNA, 25 bp, Homo sapien
acgtccagctggtactgaaagtcca

SEQ ID NO: 6068870 - DNA, 25 bp, Homo sapien
tccagccacaccggtggtgacgctg

SEQ ID NO: 6068871 - DNA, 25 bp, Homo sapien
tgaccaccaccctgcctcagtttct

SEQ ID NO: 6068872 - DNA, 25 bp, Homo sapien
accagaaacattaatcagtaggttt

SEQ ID NO: 6068873 - DNA, 25 bp, Homo sapien
tgggtattctttctgtggacgtcca

SEQ ID NO: 6068874 - DNA, 25 bp, Homo sapien
gatgcggacgtctgcagctctgatc

SEQ ID NO: 6068875 - DNA, 25 bp, Homo sapien
tgccacagacaagggttcccacgat

SEQ ID NO: 6068876 - DNA, 25 bp, Homo sapien
ttttgctctgggctcagagcttgga

SEQ ID NO: 6068877 - DNA, 25 bp, Homo sapien
gccgaggttcccgtcgtcagaacca

SEQ ID NO: 6068878 - DNA, 25 bp, Homo sapien
tctttgatctgtggaactggcggga

SEQ ID NO: 6068879 - DNA, 25 bp, Homo sapien
actggcgggaacagccgctgtatcc

SEQ ID NO: 6068880 - DNA, 25 bp, Homo sapien
tcacagagatgactctgaccccaac

SEQ ID NO: 6068881 - DNA, 25 bp, Homo sapien
ttttcttgaccaccaccctgcctca

SEQ ID NO: 6068882 - DNA, 25 bp, Homo sapien
agccgaggacgatgccacagacaag

SEQ ID NO: 6068883 - DNA, 25 bp, Homo sapien
ctgtggacgtccagctggtactgaa

SEQ ID NO: 6068884 - DNA, 25 bp, Homo sapien
gttcccgtcgtcagaaccaaattca

SEQ ID NO: 6068885 - DNA, 25 bp, Homo sapien
agccgctgtatcctaaggaaccttt

SEQ ID NO: 6068886 - DNA, 25 bp, Homo sapien
ggtggtgacgctgcggtcccatctc

SEQ ID NO: 6068887 - DNA, 25 bp, Homo sapien
cacagagccgaggttcccgtcgtca

SEQ ID NO: 6068888 - DNA, 25 bp, Homo sapien
cttcacactgtgttttgctctgggc

SEQ ID NO: 6068889 - DNA, 25 bp, Homo sapien
gtatctattttccaaatcaccagaa

SEQ ID NO: 6068890 - DNA, 25 bp, Homo sapien
attcaagatgcggacgtctgcagct

SEQ ID NO: 6068891 - DNA, 25 bp, Homo sapien
tactgaaagtccaggtacgacagct

SEQ ID NO: 6068892 - DNA, 25 bp, Homo sapien
acctcatggttatcattcagtttgt

SEQ ID NO: 6068893 - DNA, 25 bp, Homo sapien
tgcagctctgatcttcacactgtgt

SEQ ID NO: 6068894 - DNA, 25 bp, Homo sapien
taggttttccgtgccaggctgggta

SEQ ID NO: 6068895 - DNA, 25 bp, Homo sapien
gggagaaggcccaggagtgggatac

SEQ ID NO: 6068896 - DNA, 25 bp, Homo sapien
aatggcttcactccaggagctccaa

SEQ ID NO: 6068897 - DNA, 25 bp, Homo sapien
tccgtgccaggctgggtattctttc

SEQ ID NO: 6068898 - DNA, 25 bp, Homo sapien
cggtcccatctcgtcttccacctca

SEQ ID NO: 6068899 - DNA, 25 bp, Homo sapien
aatcagtaggttttccgtgccaggc

SEQ ID NO: 6068900 - DNA, 25 bp, Homo sapien
ttctgataggtcctgggctgtttcc

SEQ ID NO: 6068901 - DNA, 25 bp, Homo sapien
actgtgttttgctctgggctcagag

SEQ ID NO: 6068902 - DNA, 25 bp, Homo sapien
tatgtatatacaagcttgtgcaagt

SEQ ID NO: 6068903 - DNA, 25 bp, Homo sapien
tggaaacatcaatagcttcagattc

SEQ ID NO: 6068904 - DNA, 25 bp, Homo sapien
ttacagtacagatcgattccagtgg

SEQ ID NO: 6068905 - DNA, 25 bp, Homo sapien
tgtgcattacaccataatatacagg

SEQ ID NO: 6068906 - DNA, 25 bp, Homo sapien
gctactgtactaattgactactata

SEQ ID NO: 6068907 - DNA, 25 bp, Homo sapien
tacagatcgattccagtggtaccag

SEQ ID NO: 6068908 - DNA, 25 bp, Homo sapien
cagcatcacatctcaaacagcactt

SEQ ID NO: 6068909 - DNA, 25 bp, Homo sapien
tctcaaacagcacttattctggact

SEQ ID NO: 6068910 - DNA, 25 bp, Homo sapien
atcatggaatgcaaaggagtaaaag

SEQ ID NO: 6068911 - DNA, 25 bp, Homo sapien
cagtgcaaattgtatgtgatagtca

SEQ ID NO: 6068912 - DNA, 25 bp, Homo sapien
aaattgtatgtgatagtcaagcagc

SEQ ID NO: 6068913 - DNA, 25 bp, Homo sapien
cattaacaacctgattagatttagg

SEQ ID NO: 6068914 - DNA, 25 bp, Homo sapien
tcaaatcagtctcagtccgtgtggt

SEQ ID NO: 6068915 - DNA, 25 bp, Homo sapien
tttaatcaaatcagtctcagtccgt

SEQ ID NO: 6068916 - DNA, 25 bp, Homo sapien
ctcaggagggtcatcagggtgtgga

SEQ ID NO: 6068917 - DNA, 25 bp, Homo sapien
cacaatatgtgattgttgagtccct

SEQ ID NO: 6068918 - DNA, 25 bp, Homo sapien
ttaatcaaatcagtctcagtccgtg

SEQ ID NO: 6068919 - DNA, 25 bp, Homo sapien
ctcctgcgggctcaggagggtcatc

SEQ ID NO: 6068920 - DNA, 25 bp, Homo sapien
caatatgtgattgttgagtccctga

SEQ ID NO: 6068921 - DNA, 25 bp, Homo sapien
tcctgcgggctcaggagggtcatca

SEQ ID NO: 6068922 - DNA, 25 bp, Homo sapien
aatcaaatcagtctcagtccgtgtg

SEQ ID NO: 6068923 - DNA, 25 bp, Homo sapien
aatatgtgattgttgagtccctgag

SEQ ID NO: 6068924 - DNA, 25 bp, Homo sapien
catccacaatatgtgattgttgagt

SEQ ID NO: 6068925 - DNA, 25 bp, Homo sapien
aaatcagtctcagtccgtgtggtga

SEQ ID NO: 6068926 - DNA, 25 bp, Homo sapien
cttggcagcgatgcggccggggcag

SEQ ID NO: 6068927 - DNA, 25 bp, Homo sapien
tcgcgctggctgtactggaagtcgg

SEQ ID NO: 6068928 - DNA, 25 bp, Homo sapien
gcgagcttggcagcgatgcggccgg

SEQ ID NO: 6068929 - DNA, 25 bp, Homo sapien
gcttggcagcgatgcggccggggca

SEQ ID NO: 6068930 - DNA, 25 bp, Homo sapien
cgcagcgaacatacatgcaggagac

SEQ ID NO: 6068931 - DNA, 25 bp, Homo sapien
cgagcttggcagcgatgcggccggg

SEQ ID NO: 6068932 - DNA, 25 bp, Homo sapien
tggtgtccagctcgcgctggctgta

SEQ ID NO: 6068933 - DNA, 25 bp, Homo sapien
gagcttggcagcgatgcggccgggg

SEQ ID NO: 6068934 - DNA, 25 bp, Homo sapien
atggtgtccagctcgcgctggctgt

SEQ ID NO: 6068935 - DNA, 25 bp, Homo sapien
cacgcagcgaacatacatgcaggag

SEQ ID NO: 6068936 - DNA, 25 bp, Homo sapien
agcttggcagcgatgcggccggggc

SEQ ID NO: 6068937 - DNA, 25 bp, Homo sapien
acgcagcgaacatacatgcaggaga

SEQ ID NO: 6068938 - DNA, 25 bp, Homo sapien
caggctcatcgggtcgtccacaggg

SEQ ID NO: 6068939 - DNA, 25 bp, Homo sapien
gtagcagtcgttcatgttgtatagc

SEQ ID NO: 6068940 - DNA, 25 bp, Homo sapien
tgtatagcaggctcatcgggtcgtc

SEQ ID NO: 6068941 - DNA, 25 bp, Homo sapien
ttgtatagcaggctcatcgggtcgt

SEQ ID NO: 6068942 - DNA, 25 bp, Homo sapien
catgttgtatagcaggctcatcggg

SEQ ID NO: 6068943 - DNA, 25 bp, Homo sapien
gagtagcagtcgttcatgttgtata

SEQ ID NO: 6068944 - DNA, 25 bp, Homo sapien
tgttgtatagcaggctcatcgggtc

SEQ ID NO: 6068945 - DNA, 25 bp, Homo sapien
atagcaggctcatcgggtcgtccac

SEQ ID NO: 6068946 - DNA, 25 bp, Homo sapien
gtatagcaggctcatcgggtcgtcc

SEQ ID NO: 6068947 - DNA, 25 bp, Homo sapien
gcacttaaaagattccgtgaatttg

SEQ ID NO: 6068948 - DNA, 25 bp, Homo sapien
tatagcaggctcatcgggtcgtcca

SEQ ID NO: 6068949 - DNA, 25 bp, Homo sapien
tagcaggctcatcgggtcgtccaca

SEQ ID NO: 6068950 - DNA, 25 bp, Homo sapien
ggactagtgcctgcacaggtaaaca

SEQ ID NO: 6068951 - DNA, 25 bp, Homo sapien
attttgattcaacttgtggtggtta

SEQ ID NO: 6068952 - DNA, 25 bp, Homo sapien
tgcacaggtaaacacgatgcttctt

SEQ ID NO: 6068953 - DNA, 25 bp, Homo sapien
ggtaaacacgatgcttctttacact

SEQ ID NO: 6068954 - DNA, 25 bp, Homo sapien
tgcctgcacaggtaaacacgatgct

SEQ ID NO: 6068955 - DNA, 25 bp, Homo sapien
tattaatcaatgaggatcatttcca

SEQ ID NO: 6068956 - DNA, 25 bp, Homo sapien
agttgctggaaaagttcaatgtaga

SEQ ID NO: 6068957 - DNA, 25 bp, Homo sapien
gaacatatattgttacattaagcaa

SEQ ID NO: 6068958 - DNA, 25 bp, Homo sapien
tgattcaacttgtggtggttataga

SEQ ID NO: 6068959 - DNA, 25 bp, Homo sapien
ggaaaagttcaatgtagaatttgtc

SEQ ID NO: 6068960 - DNA, 25 bp, Homo sapien
cttgtggtggttatagaagtgagtc

SEQ ID NO: 6068961 - DNA, 25 bp, Homo sapien
ggtggttatagaagtgagtctttga

SEQ ID NO: 6068962 - DNA, 25 bp, Homo sapien
acttctggcgaaatccactactccg

SEQ ID NO: 6068963 - DNA, 25 bp, Homo sapien
cttctggcgaaatccactactccgc

SEQ ID NO: 6068964 - DNA, 25 bp, Homo sapien
ttctggcgaaatccactactccgca

SEQ ID NO: 6068965 - DNA, 25 bp, Homo sapien
cgtaaatttgcacggcagataggca

SEQ ID NO: 6068966 - DNA, 25 bp, Homo sapien
gcacgaagcacagcaggagcgccat

SEQ ID NO: 6068967 - DNA, 25 bp, Homo sapien
ttctggcgaaatccactactccgca

SEQ ID NO: 6068968 - DNA, 25 bp, Homo sapien
gtacggctctttggaggtggcacat

SEQ ID NO: 6068969 - DNA, 25 bp, Homo sapien
tcgggactaagcgtaaatttgcacg

SEQ ID NO: 6068970 - DNA, 25 bp, Homo sapien
acttctggcgaaatccactactccg

SEQ ID NO: 6068971 - DNA, 25 bp, Homo sapien
agtagtgatactcaaacttctggcg

SEQ ID NO: 6068972 - DNA, 25 bp, Homo sapien
tggaggtggcacatcttcccacttg

SEQ ID NO: 6068973 - DNA, 25 bp, Homo sapien
gtggcacatcttcccacttgatcca

SEQ ID NO: 6068974 - DNA, 25 bp, Homo sapien
actcaaacttctggcgaaatccact

SEQ ID NO: 6068975 - DNA, 25 bp, Homo sapien
cgaaatccactactccgcacaggag

SEQ ID NO: 6068976 - DNA, 25 bp, Homo sapien
caaacttctggcgaaatccactact

SEQ ID NO: 6068977 - DNA, 25 bp, Homo sapien
cagaatagaggcaatactttagctt

SEQ ID NO: 6068978 - DNA, 25 bp, Homo sapien
ttacagaatagaggcaatactttag

SEQ ID NO: 6068979 - DNA, 25 bp, Homo sapien
ttctcaggacaagagcaaaaatcac

SEQ ID NO: 6068980 - DNA, 25 bp, Homo sapien
ctcaggacaagagcaaaaatcaccc

SEQ ID NO: 6068981 - DNA, 25 bp, Homo sapien
gaatagaggcaatactttagcttaa

SEQ ID NO: 6068982 - DNA, 25 bp, Homo sapien
actttacagaatagaggcaatactt

SEQ ID NO: 6068983 - DNA, 25 bp, Homo sapien
tctcaggacaagagcaaaaatcacc

SEQ ID NO: 6068984 - DNA, 25 bp, Homo sapien
acagaatagaggcaatactttagct

SEQ ID NO: 6068985 - DNA, 25 bp, Homo sapien
tcaggacaagagcaaaaatcacccc

SEQ ID NO: 6068986 - DNA, 25 bp, Homo sapien
tttctcaggacaagagcaaaaatca

SEQ ID NO: 6068987 - DNA, 25 bp, Homo sapien
tttaaaacagcactgttatttctca

SEQ ID NO: 6068988 - DNA, 25 bp, Homo sapien
ctttacagaatagaggcaatacttt

SEQ ID NO: 6068989 - DNA, 25 bp, Homo sapien
agatgctacggcaattcaataggga

SEQ ID NO: 6068990 - DNA, 25 bp, Homo sapien
aaacgcttcaaaagatactactgag

SEQ ID NO: 6068991 - DNA, 25 bp, Homo sapien
tagagggcttataattccaaatttc

SEQ ID NO: 6068992 - DNA, 25 bp, Homo sapien
tataaagctacagtcagtaagacag

SEQ ID NO: 6068993 - DNA, 25 bp, Homo sapien
gcatgaaggatacacctacagaaca

SEQ ID NO: 6068994 - DNA, 25 bp, Homo sapien
gctggaataatcacacacccacatg

SEQ ID NO: 6068995 - DNA, 25 bp, Homo sapien
gagaactcagaatccggaaataaac

SEQ ID NO: 6068996 - DNA, 25 bp, Homo sapien
gacagtgcagtattagcatgaagga

SEQ ID NO: 6068997 - DNA, 25 bp, Homo sapien
tgattttcataagatgctacggcaa

SEQ ID NO: 6068998 - DNA, 25 bp, Homo sapien
cccggcatagtcaaaacattcctga

SEQ ID NO: 6068999 - DNA, 25 bp, Homo sapien
tatggaactgtacaggacccggcat

SEQ ID NO: 6069000 - DNA, 25 bp, Homo sapien
cctaaatgtaggagccaaaattata

SEQ ID NO: 6069001 - DNA, 25 bp, Homo sapien
gagcggtggtatgtgattgcctaaa

SEQ ID NO: 6069002 - DNA, 25 bp, Homo sapien
gtttattcttatgtctcttcccttc

SEQ ID NO: 6069003 - DNA, 25 bp, Homo sapien
gaaactggacatctacctttgccca

SEQ ID NO: 6069004 - DNA, 25 bp, Homo sapien
cctttgcccaaaagtgtacctctga

SEQ ID NO: 6069005 - DNA, 25 bp, Homo sapien
gctcagaatcactggcaggcaatag

SEQ ID NO: 6069006 - DNA, 25 bp, Homo sapien
caaaagtgtacctctgagagcctac

SEQ ID NO: 6069007 - DNA, 25 bp, Homo sapien
caagcaagcaggcattaagctcaga

SEQ ID NO: 6069008 - DNA, 25 bp, Homo sapien
gcaggcaatagaagctaagtcagat

SEQ ID NO: 6069009 - DNA, 25 bp, Homo sapien
tatgtgattgcctaaaagttggaaa

SEQ ID NO: 6069010 - DNA, 25 bp, Homo sapien
tcacttatggagtaatataaggctg

SEQ ID NO: 6069011 - DNA, 25 bp, Homo sapien
ttaaaaaatagagagcggtggtatg

SEQ ID NO: 6069012 - DNA, 25 bp, Homo sapien
tgagagcctacttgtaactcaagtg

SEQ ID NO: 6069013 - DNA, 25 bp, Homo sapien
taattttctatcagatgagagggcc

SEQ ID NO: 6069014 - DNA, 25 bp, Homo sapien
taaattggccctcaggaaatggctc

SEQ ID NO: 6069015 - DNA, 25 bp, Homo sapien
tataatcctaggactttaggaggct

SEQ ID NO: 6069016 - DNA, 25 bp, Homo sapien
gagtcacacgagtattaaattggcc

SEQ ID NO: 6069017 - DNA, 25 bp, Homo sapien
ctatcagatgagagggccaggcaca

SEQ ID NO: 6069018 - DNA, 25 bp, Homo sapien
cagaggaaatttaaggcagatggta

SEQ ID NO: 6069019 - DNA, 25 bp, Homo sapien
aaattctccggttccaagacgatgc

SEQ ID NO: 6069020 - DNA, 25 bp, Homo sapien
tggtgccatggcactccaacctggg

SEQ ID NO: 6069021 - DNA, 25 bp, Homo sapien
aagacgatgccttgctatgtagcca

SEQ ID NO: 6069022 - DNA, 25 bp, Homo sapien
tattaagctcctggtaaaccctgaa

SEQ ID NO: 6069023 - DNA, 25 bp, Homo sapien
tgtagtcacacacacccttgggagg

SEQ ID NO: 6069024 - DNA, 25 bp, Homo sapien
gatcacttgaatccaggaattcgag

SEQ ID NO: 6069025 - DNA, 25 bp, Homo sapien
tataatttacatcactctgaaatcc

SEQ ID NO: 6069026 - DNA, 25 bp, Homo sapien
ataaaacaggttgctcagtatcttt

SEQ ID NO: 6069027 - DNA, 25 bp, Homo sapien
cactctgaaatccttgacccctaga

SEQ ID NO: 6069028 - DNA, 25 bp, Homo sapien
aataaagaaatctgtcgcaaaccag

SEQ ID NO: 6069029 - DNA, 25 bp, Homo sapien
ccaagctggataagatccaactggg

SEQ ID NO: 6069030 - DNA, 25 bp, Homo sapien
agcaaccctgttttagcatgagaac

SEQ ID NO: 6069031 - DNA, 25 bp, Homo sapien
gatgctcagttagatatggatttca

SEQ ID NO: 6069032 - DNA, 25 bp, Homo sapien
tagcatgagaaccagactgtaataa

SEQ ID NO: 6069033 - DNA, 25 bp, Homo sapien
aaatctgtcgcaaaccagaaacacc

SEQ ID NO: 6069034 - DNA, 25 bp, Homo sapien
tgacccctagaatagtcaaccaaag

SEQ ID NO: 6069035 - DNA, 25 bp, Homo sapien
tcaaccaaaggttacatatttcaaa

SEQ ID NO: 6069036 - DNA, 25 bp, Homo sapien
tgaaatccttgacccctagaatagt

SEQ ID NO: 6069037 - DNA, 25 bp, Homo sapien
ggacgtcgccccgttagcatgctgc

SEQ ID NO: 6069038 - DNA, 25 bp, Homo sapien
cctagtcactagtttggagcaggtc

SEQ ID NO: 6069039 - DNA, 25 bp, Homo sapien
gcaggtgctctagaagagattagaa

SEQ ID NO: 6069040 - DNA, 25 bp, Homo sapien
agcagacaacagatgcatagttggg

SEQ ID NO: 6069041 - DNA, 25 bp, Homo sapien
cactagtttggagcaggtctagaag

SEQ ID NO: 6069042 - DNA, 25 bp, Homo sapien
ttctcccagttggattaggacgtcg

SEQ ID NO: 6069043 - DNA, 25 bp, Homo sapien
ccgcagacagtgagttaggggatca

SEQ ID NO: 6069044 - DNA, 25 bp, Homo sapien
ggatagcaggtgctctagaagagat

SEQ ID NO: 6069045 - DNA, 25 bp, Homo sapien
aattctatcctagtcactagtttgg

SEQ ID NO: 6069046 - DNA, 25 bp, Homo sapien
tcccagttggattaggacgtcgccc

SEQ ID NO: 6069047 - DNA, 25 bp, Homo sapien
caggatagaggttgcaggctgaggg

SEQ ID NO: 6069048 - DNA, 25 bp, Homo sapien
tggatccccacatttcagtctcaga

SEQ ID NO: 6069049 - DNA, 25 bp, Homo sapien
tccaaatgttgtactgtgctaacca

SEQ ID NO: 6069050 - DNA, 25 bp, Homo sapien
ctccaaaaacatcatagatgctagg

SEQ ID NO: 6069051 - DNA, 25 bp, Homo sapien
catatagcaatgagataactccagg

SEQ ID NO: 6069052 - DNA, 25 bp, Homo sapien
taataaactcctaagaatgctgcag

SEQ ID NO: 6069053 - DNA, 25 bp, Homo sapien
attcctccagtaaagtttatagcca

SEQ ID NO: 6069054 - DNA, 25 bp, Homo sapien
taatgggatgatgggttcttgaaga

SEQ ID NO: 6069055 - DNA, 25 bp, Homo sapien
caggtttctccatctaatgggatga

SEQ ID NO: 6069056 - DNA, 25 bp, Homo sapien
gaaatatgtgcagcacgagaagctg

SEQ ID NO: 6069057 - DNA, 25 bp, Homo sapien
aatcataatgattacccctccaaaa

SEQ ID NO: 6069058 - DNA, 25 bp, Homo sapien
cacgagaagctgcaagaccatagct

SEQ ID NO: 6069059 - DNA, 25 bp, Homo sapien
taatgggagagtctagtatttcctg

SEQ ID NO: 6069060 - DNA, 25 bp, Homo sapien
gaccatagctaccacaatctccaaa

SEQ ID NO: 6069061 - DNA, 25 bp, Homo sapien
tcagggacatggacgcttggaacag

SEQ ID NO: 6069062 - DNA, 25 bp, Homo sapien
tagtcagatcagtgtagtcttccac

SEQ ID NO: 6069063 - DNA, 25 bp, Homo sapien
tgggtaactaggcacctcagggaca

SEQ ID NO: 6069064 - DNA, 25 bp, Homo sapien
ttggcgaagatattccctgggagct

SEQ ID NO: 6069065 - DNA, 25 bp, Homo sapien
ccatgaggccattgacgttggcgaa

SEQ ID NO: 6069066 - DNA, 25 bp, Homo sapien
taacctaggctggttgagcaggagc

SEQ ID NO: 6069067 - DNA, 25 bp, Homo sapien
ggccagggcgacaatgccaattaca

SEQ ID NO: 6069068 - DNA, 25 bp, Homo sapien
caaacgctgcggtcatcagtgacct

SEQ ID NO: 6069069 - DNA, 25 bp, Homo sapien
agcggaaggatgtctgagtcacacc

SEQ ID NO: 6069070 - DNA, 25 bp, Homo sapien
cacaggtacagtgtccgtccctaac

SEQ ID NO: 6069071 - DNA, 25 bp, Homo sapien
cagggattgtcatacagccgcagct

SEQ ID NO: 6069072 - DNA, 25 bp, Homo sapien
gataatgagggactggcctcggaca

SEQ ID NO: 6069073 - DNA, 25 bp, Homo sapien
tactacagccccagtatctcagcgg

SEQ ID NO: 6069074 - DNA, 25 bp, Homo sapien
gcaactcatgcactcttttcagcac

SEQ ID NO: 6069075 - DNA, 25 bp, Homo sapien
taatataagcagtgaggccagccgg

SEQ ID NO: 6069076 - DNA, 25 bp, Homo sapien
ccttaatataagcagtgaggccagc

SEQ ID NO: 6069077 - DNA, 25 bp, Homo sapien
aaatcagccttatccctcctcatgc

SEQ ID NO: 6069078 - DNA, 25 bp, Homo sapien
aagaactaggtgtcttgacacctaa

SEQ ID NO: 6069079 - DNA, 25 bp, Homo sapien
ttgggaggagccttaatataagcag

SEQ ID NO: 6069080 - DNA, 25 bp, Homo sapien
tcttgacacctaatccacacagcag

SEQ ID NO: 6069081 - DNA, 25 bp, Homo sapien
tttatactactacagccccagtatc

SEQ ID NO: 6069082 - DNA, 25 bp, Homo sapien
cccagtatctcagcggtaaccatgg

SEQ ID NO: 6069083 - DNA, 25 bp, Homo sapien
cagtcagcccaatgctgtctccgtt

SEQ ID NO: 6069084 - DNA, 25 bp, Homo sapien
gccacttaaataatctgcagacaca

SEQ ID NO: 6069085 - DNA, 25 bp, Homo sapien
acaggcaggcgccattcggaacgag

SEQ ID NO: 6069086 - DNA, 25 bp, Homo sapien
cattcggaacgagggctgctgaccg

SEQ ID NO: 6069087 - DNA, 25 bp, Homo sapien
ggcaggcgccattcggaacgagggc

SEQ ID NO: 6069088 - DNA, 25 bp, Homo sapien
ccattcggaacgagggctgctgacc

SEQ ID NO: 6069089 - DNA, 25 bp, Homo sapien
gccattcggaacgagggctgctgac

SEQ ID NO: 6069090 - DNA, 25 bp, Homo sapien
gcaggcgccattcggaacgagggct

SEQ ID NO: 6069091 - DNA, 25 bp, Homo sapien
gcgccattcggaacgagggctgctg

SEQ ID NO: 6069092 - DNA, 25 bp, Homo sapien
aggcgccattcggaacgagggctgc

SEQ ID NO: 6069093 - DNA, 25 bp, Homo sapien
ggcgccattcggaacgagggctgct

SEQ ID NO: 6069094 - DNA, 25 bp, Homo sapien
aggcaggcgccattcggaacgaggg

SEQ ID NO: 6069095 - DNA, 25 bp, Homo sapien
cacaggcaggcgccattcggaacga

SEQ ID NO: 6069096 - DNA, 25 bp, Homo sapien
cgccattcggaacgagggctgctga

SEQ ID NO: 6069097 - DNA, 25 bp, Homo sapien
cttgatgggaccccactttgcaaac

SEQ ID NO: 6069098 - DNA, 25 bp, Homo sapien
gggtaactattatgctgtagacagt

SEQ ID NO: 6069099 - DNA, 25 bp, Homo sapien
agggtaactattatgctgtagacag

SEQ ID NO: 6069100 - DNA, 25 bp, Homo sapien
tttggaaactaggtcaccctacatg

SEQ ID NO: 6069101 - DNA, 25 bp, Homo sapien
tggttccttgatttatatgcataga

SEQ ID NO: 6069102 - DNA, 25 bp, Homo sapien
tcaaaggcatcatgagtactctgct

SEQ ID NO: 6069103 - DNA, 25 bp, Homo sapien
tggagactctgaacaggcacatgca

SEQ ID NO: 6069104 - DNA, 25 bp, Homo sapien
catggaggagtctgccaaagcacaa

SEQ ID NO: 6069105 - DNA, 25 bp, Homo sapien
tctggtagacagtacacttgggaat

SEQ ID NO: 6069106 - DNA, 25 bp, Homo sapien
tagccttctagttgagttagggacc

SEQ ID NO: 6069107 - DNA, 25 bp, Homo sapien
tatgcatagaaagaaacagttgtca

SEQ ID NO: 6069108 - DNA, 25 bp, Homo sapien
ctaggtcaccctacatgatgttttg

SEQ ID NO: 6069109 - DNA, 25 bp, Homo sapien
tgcaccaggcataaagagtaagttt

SEQ ID NO: 6069110 - DNA, 25 bp, Homo sapien
taccacagggacattttgtattcag

SEQ ID NO: 6069111 - DNA, 25 bp, Homo sapien
ggaacaaaacatggaggagtctgcc

SEQ ID NO: 6069112 - DNA, 25 bp, Homo sapien
cttggggcggccgcacagtaataga

SEQ ID NO: 6069113 - DNA, 25 bp, Homo sapien
gactccccgcatgtcttggggcggc

SEQ ID NO: 6069114 - DNA, 25 bp, Homo sapien
catgtcttggggcggccgcacagta

SEQ ID NO: 6069115 - DNA, 25 bp, Homo sapien
ccgcatgtcttggggcggccgcaca

SEQ ID NO: 6069116 - DNA, 25 bp, Homo sapien
tcttggggcggccgcacagtaatag

SEQ ID NO: 6069117 - DNA, 25 bp, Homo sapien
tagtcataggggggactccccgcat

SEQ ID NO: 6069118 - DNA, 25 bp, Homo sapien
cagtagtcataggggggactccccg

SEQ ID NO: 6069119 - DNA, 25 bp, Homo sapien
ataggggggactccccgcatgtctt

SEQ ID NO: 6069120 - DNA, 25 bp, Homo sapien
tgtcttggggcggccgcacagtaat

SEQ ID NO: 6069121 - DNA, 25 bp, Homo sapien
cataggggggactccccgcatgtct

SEQ ID NO: 6069122 - DNA, 25 bp, Homo sapien
tcataggggggactccccgcatgtc

SEQ ID NO: 6069123 - DNA, 25 bp, Homo sapien
agtcataggggggactccccgcatg

SEQ ID NO: 6069124 - DNA, 25 bp, Homo sapien
cagtagtcataggggggactccccg

SEQ ID NO: 6069125 - DNA, 25 bp, Homo sapien
cataggtgctaaaggtgaatccaga

SEQ ID NO: 6069126 - DNA, 25 bp, Homo sapien
ggcggccgcacagtaatagacggcc

SEQ ID NO: 6069127 - DNA, 25 bp, Homo sapien
gactccccgcatgtcttggggcggc

SEQ ID NO: 6069128 - DNA, 25 bp, Homo sapien
agtcataggggggactccccgcatg

SEQ ID NO: 6069129 - DNA, 25 bp, Homo sapien
tcttggggcggccgcacagtaatag

SEQ ID NO: 6069130 - DNA, 25 bp, Homo sapien
cataggggggactccccgcatgtct

SEQ ID NO: 6069131 - DNA, 25 bp, Homo sapien
catgtcttggggcggccgcacagta

SEQ ID NO: 6069132 - DNA, 25 bp, Homo sapien
ggacccagctcatgccataggtgct

SEQ ID NO: 6069133 - DNA, 25 bp, Homo sapien
gcgtaatatgtgctaccaccactac

SEQ ID NO: 6069134 - DNA, 25 bp, Homo sapien
gctcatgccataggtgctaaaggtg

SEQ ID NO: 6069135 - DNA, 25 bp, Homo sapien
taccactaatagctgagacccactc

SEQ ID NO: 6069136 - DNA, 25 bp, Homo sapien
ggtggggcacgctccgctcggtcat

SEQ ID NO: 6069137 - DNA, 25 bp, Homo sapien
cagcgctttctggtagtcgccctta

SEQ ID NO: 6069138 - DNA, 25 bp, Homo sapien
gcgctttctggtagtcgcccttagt

SEQ ID NO: 6069139 - DNA, 25 bp, Homo sapien
cgctttctggtagtcgcccttagtg

SEQ ID NO: 6069140 - DNA, 25 bp, Homo sapien
agcgctttctggtagtcgcccttag

SEQ ID NO: 6069141 - DNA, 25 bp, Homo sapien
aggtggggcacgctccgctcggtca

SEQ ID NO: 6069142 - DNA, 25 bp, Homo sapien
aggaccttatctcgcgtccccttgc

SEQ ID NO: 6069143 - DNA, 25 bp, Homo sapien
ctttctggtagtcgcccttagtgtc

SEQ ID NO: 6069144 - DNA, 25 bp, Homo sapien
agcagcgctttctggtagtcgccct

SEQ ID NO: 6069145 - DNA, 25 bp, Homo sapien
gcagcgctttctggtagtcgccctt

SEQ ID NO: 6069146 - DNA, 25 bp, Homo sapien
caggaccttatctcgcgtccccttg

SEQ ID NO: 6069147 - DNA, 25 bp, Homo sapien
gctttctggtagtcgcccttagtgt

SEQ ID NO: 6069148 - DNA, 25 bp, Homo sapien
gaaggatttgcaaacctcgggtagc

SEQ ID NO: 6069149 - DNA, 25 bp, Homo sapien
aaacagcagaactagatgcagccgg

SEQ ID NO: 6069150 - DNA, 25 bp, Homo sapien
cagcagaactagatgcagccggaga

SEQ ID NO: 6069151 - DNA, 25 bp, Homo sapien
taggttaagacatgaaggatttgca

SEQ ID NO: 6069152 - DNA, 25 bp, Homo sapien
tagcatcatgagagctctaagccca

SEQ ID NO: 6069153 - DNA, 25 bp, Homo sapien
gatttgcaaacctcgggtagcatca

SEQ ID NO: 6069154 - DNA, 25 bp, Homo sapien
cctcgggtagcatcatgagagctct

SEQ ID NO: 6069155 - DNA, 25 bp, Homo sapien
aaaccaaagaggctaaacagcagaa

SEQ ID NO: 6069156 - DNA, 25 bp, Homo sapien
tggcttcttccaggtaggttaagac

SEQ ID NO: 6069157 - DNA, 25 bp, Homo sapien
taagcccatcggtgcccctggaaaa

SEQ ID NO: 6069158 - DNA, 25 bp, Homo sapien
caaacctcgggtagcatcatgagag

SEQ ID NO: 6069159 - DNA, 25 bp, Homo sapien
ccaggtaggttaagacatgaaggat

SEQ ID NO: 6069160 - DNA, 25 bp, Homo sapien
gatcgagcgccgaggcatggaggag

SEQ ID NO: 6069161 - DNA, 25 bp, Homo sapien
gaggagatcgagcgccgaggcatgg

SEQ ID NO: 6069162 - DNA, 25 bp, Homo sapien
gagatcgagcgccgaggcatggagg

SEQ ID NO: 6069163 - DNA, 25 bp, Homo sapien
tgcgcaggacgggatggaggtgtgg

SEQ ID NO: 6069164 - DNA, 25 bp, Homo sapien
atcgagcgccgaggcatggaggagg

SEQ ID NO: 6069165 - DNA, 25 bp, Homo sapien
aggagatcgagcgccgaggcatgga

SEQ ID NO: 6069166 - DNA, 25 bp, Homo sapien
ctgcgcaggacgggatggaggtgtg

SEQ ID NO: 6069167 - DNA, 25 bp, Homo sapien
ggcctgcgcaggacgggatggaggt

SEQ ID NO: 6069168 - DNA, 25 bp, Homo sapien
cctgcgcaggacgggatggaggtgt

SEQ ID NO: 6069169 - DNA, 25 bp, Homo sapien
gcctgcgcaggacgggatggaggtg

SEQ ID NO: 6069170 - DNA, 25 bp, Homo sapien
ggagatcgagcgccgaggcatggag

SEQ ID NO: 6069171 - DNA, 25 bp, Homo sapien
agatcgagcgccgaggcatggagga

SEQ ID NO: 6069172 - DNA, 25 bp, Homo sapien
gcttggttcgcttgtctccttaagg

SEQ ID NO: 6069173 - DNA, 25 bp, Homo sapien
tctaagatggtaccaggagttccaa

SEQ ID NO: 6069174 - DNA, 25 bp, Homo sapien
catgacataacttagtacctgggct

SEQ ID NO: 6069175 - DNA, 25 bp, Homo sapien
tacctgggctctgtttaactctaag

SEQ ID NO: 6069176 - DNA, 25 bp, Homo sapien
gaaacatcttgggtatccgtcacat

SEQ ID NO: 6069177 - DNA, 25 bp, Homo sapien
caagatgggtatgtagcacgttatt

SEQ ID NO: 6069178 - DNA, 25 bp, Homo sapien
taaactaggaagtgtaatggcttca

SEQ ID NO: 6069179 - DNA, 25 bp, Homo sapien
tctttggccataatttgggacaatt

SEQ ID NO: 6069180 - DNA, 25 bp, Homo sapien
tcagaaatgtgtaattcacccaagc

SEQ ID NO: 6069181 - DNA, 25 bp, Homo sapien
catggaaagcttattggcttggttc

SEQ ID NO: 6069182 - DNA, 25 bp, Homo sapien
gtcaaaaggacatagcaaccagttt

SEQ ID NO: 6069183 - DNA, 25 bp, Homo sapien
gaggaaatgtaccaccctacataga

SEQ ID NO: 6069184 - DNA, 25 bp, Homo sapien
tgtagtgtcgcagcgccgagtagta

SEQ ID NO: 6069185 - DNA, 25 bp, Homo sapien
ttgatgtagtgtcgcagcgccgagt

SEQ ID NO: 6069186 - DNA, 25 bp, Homo sapien
tccggacagccccagtcgcttgtta

SEQ ID NO: 6069187 - DNA, 25 bp, Homo sapien
ttttacacgatgaaatatgggctga

SEQ ID NO: 6069188 - DNA, 25 bp, Homo sapien
agcgcacccaggcacacgagcaggg

SEQ ID NO: 6069189 - DNA, 25 bp, Homo sapien
tgaggttgatgtagtgtcgcagcgc

SEQ ID NO: 6069190 - DNA, 25 bp, Homo sapien
acccaggcacacgagcagggacagg

SEQ ID NO: 6069191 - DNA, 25 bp, Homo sapien
ggtggattctcgttttacacgatga

SEQ ID NO: 6069192 - DNA, 25 bp, Homo sapien
gccgagtagtatctggccatgtcct

SEQ ID NO: 6069193 - DNA, 25 bp, Homo sapien
tgtcgcagcgccgagtagtatctgg

SEQ ID NO: 6069194 - DNA, 25 bp, Homo sapien
ctggtgcgtcctcgcccgggttgtc

SEQ ID NO: 6069195 - DNA, 25 bp, Homo sapien
aggatgggtggattctcgttttaca

SEQ ID NO: 6069196 - DNA, 25 bp, Homo sapien
tgtatattaaatcacacaataaatg

SEQ ID NO: 6069197 - DNA, 25 bp, Homo sapien
tcacacaataaatgactttgtacag

SEQ ID NO: 6069198 - DNA, 25 bp, Homo sapien
tgtacagctccattaaatgtgattc

SEQ ID NO: 6069199 - DNA, 25 bp, Homo sapien
gttacaatttttttcttcatggcca

SEQ ID NO: 6069200 - DNA, 25 bp, Homo sapien
tttgtatgtaatggagcaatttaac

SEQ ID NO: 6069201 - DNA, 25 bp, Homo sapien
ggagcaatttaacagacactgatta

SEQ ID NO: 6069202 - DNA, 25 bp, Homo sapien
tctttttgcaagagattttcagatt

SEQ ID NO: 6069203 - DNA, 25 bp, Homo sapien
ttgaagttggccagatttctttttg

SEQ ID NO: 6069204 - DNA, 25 bp, Homo sapien
cacaccatcaaaggaaaatggaact

SEQ ID NO: 6069205 - DNA, 25 bp, Homo sapien
gatttccttaacttctggcacacca

SEQ ID NO: 6069206 - DNA, 25 bp, Homo sapien
aataaatgactttgtacagctccat

SEQ ID NO: 6069207 - DNA, 25 bp, Homo sapien
agtactaagcttcttggtgctttgt

SEQ ID NO: 6069208 - DNA, 25 bp, Homo sapien
gaatttttagcatactcagtataat

SEQ ID NO: 6069209 - DNA, 25 bp, Homo sapien
ctccattcctgtttggcctccagtg

SEQ ID NO: 6069210 - DNA, 25 bp, Homo sapien
tatatatgaaattcttgctcgcagg

SEQ ID NO: 6069211 - DNA, 25 bp, Homo sapien
ccaaaatactggcacatatacagaa

SEQ ID NO: 6069212 - DNA, 25 bp, Homo sapien
cctgtctttgtatgtaatggagcaa

SEQ ID NO: 6069213 - DNA, 25 bp, Homo sapien
gttggccagatttctttttgcaaga

SEQ ID NO: 6069214 - DNA, 25 bp, Homo sapien
tccagtgagattgttacaatttttt

SEQ ID NO: 6069215 - DNA, 25 bp, Homo sapien
ttcttgctcgcaggatttcagtaat

SEQ ID NO: 6069216 - DNA, 25 bp, Homo sapien
gaaattctgcattaacaaaatccaa

SEQ ID NO: 6069217 - DNA, 25 bp, Homo sapien
ttggcctccagtgagattgttacaa

SEQ ID NO: 6069218 - DNA, 25 bp, Homo sapien
aagcttcttggtgctttgtgtgcct

SEQ ID NO: 6069219 - DNA, 25 bp, Homo sapien
actttatgcactgcctacaaatttt

SEQ ID NO: 6069220 - DNA, 25 bp, Homo sapien
gctccattaaatgtgattctccatt

SEQ ID NO: 6069221 - DNA, 25 bp, Homo sapien
atttaacagacactgattacaggtt

SEQ ID NO: 6069222 - DNA, 25 bp, Homo sapien
tgttactgttagttgaattgtttta

SEQ ID NO: 6069223 - DNA, 25 bp, Homo sapien
ttctggcacaccatcaaaggaaaat

SEQ ID NO: 6069224 - DNA, 25 bp, Homo sapien
tcctgtttggcctccagtgagattg

SEQ ID NO: 6069225 - DNA, 25 bp, Homo sapien
ctcgcaggatttcagtaatgtatat

SEQ ID NO: 6069226 - DNA, 25 bp, Homo sapien
ttttatatatatgaaattcttgctc

SEQ ID NO: 6069227 - DNA, 25 bp, Homo sapien
gtgattctccattcctgtttggcct

SEQ ID NO: 6069228 - DNA, 25 bp, Homo sapien
caggtttctggggaaattctgcatt

SEQ ID NO: 6069229 - DNA, 25 bp, Homo sapien
ggatttcagtaatgtatattaaatc

SEQ ID NO: 6069230 - DNA, 25 bp, Homo sapien
tgcaagagattttcagatttacgtc

SEQ ID NO: 6069231 - DNA, 25 bp, Homo sapien
tagcatactcagtataatttccaca

SEQ ID NO: 6069232 - DNA, 25 bp, Homo sapien
tggaactcagattgttactgttagt

SEQ ID NO: 6069233 - DNA, 25 bp, Homo sapien
taacaaaatccaatccaaattctga

SEQ ID NO: 6069234 - DNA, 25 bp, Homo sapien
cagacactgattacaggtttctggg

SEQ ID NO: 6069235 - DNA, 25 bp, Homo sapien
ttaaatcacacaataaatgactttg

SEQ ID NO: 6069236 - DNA, 25 bp, Homo sapien
gagattgttacaatttttttcttca

SEQ ID NO: 6069237 - DNA, 25 bp, Homo sapien
atacagaagatggaatttttagcat

SEQ ID NO: 6069238 - DNA, 25 bp, Homo sapien
atgaaattcttgctcgcaggatttc

SEQ ID NO: 6069239 - DNA, 25 bp, Homo sapien
ttgaattgttttaatcctcctgtct

SEQ ID NO: 6069240 - DNA, 25 bp, Homo sapien
atccaaattctgaggtaactagtgt

SEQ ID NO: 6069241 - DNA, 25 bp, Homo sapien
actcagtataatttccacaacttga

SEQ ID NO: 6069242 - DNA, 25 bp, Homo sapien
ttaaatgtgattctccattcctgtt

SEQ ID NO: 6069243 - DNA, 25 bp, Homo sapien
attctgaggtaactagtgttggttt

SEQ ID NO: 6069244 - DNA, 25 bp, Homo sapien
tctggggaaattctgcattaacaaa

SEQ ID NO: 6069245 - DNA, 25 bp, Homo sapien
tcagattgttactgttagttgaatt

SEQ ID NO: 6069246 - DNA, 25 bp, Homo sapien
aatcctcctgtctttgtatgtaatg

SEQ ID NO: 6069247 - DNA, 25 bp, Homo sapien
tgttttaatcctcctgtctttgtat

SEQ ID NO: 6069248 - DNA, 25 bp, Homo sapien
atggccaatgttatgcttgatttcc

SEQ ID NO: 6069249 - DNA, 25 bp, Homo sapien
tataatttccacaacttgaaaaata

SEQ ID NO: 6069250 - DNA, 25 bp, Homo sapien
ctgcattaacaaaatccaatccaaa

SEQ ID NO: 6069251 - DNA, 25 bp, Homo sapien
atgcttgatttccttaacttctggc

SEQ ID NO: 6069252 - DNA, 25 bp, Homo sapien
ggaactttgaagttggccagatttc

SEQ ID NO: 6069253 - DNA, 25 bp, Homo sapien
cttaacttctggcacaccatcaaag

SEQ ID NO: 6069254 - DNA, 25 bp, Homo sapien
ggaaaatggaactcagattgttact

SEQ ID NO: 6069255 - DNA, 25 bp, Homo sapien
atttttttcttcatggccaatgtta

SEQ ID NO: 6069256 - DNA, 25 bp, Homo sapien
aatgttatgcttgatttccttaact

SEQ ID NO: 6069257 - DNA, 25 bp, Homo sapien
aaaaatactttatgcactgcctaca

SEQ ID NO: 6069258 - DNA, 25 bp, Homo sapien
tcagatttacgtcctgaaaacgtaa

SEQ ID NO: 6069259 - DNA, 25 bp, Homo sapien
gcacatatacagaagatggaatttt

SEQ ID NO: 6069260 - DNA, 25 bp, Homo sapien
ttcttcatggccaatgttatgcttg

SEQ ID NO: 6069261 - DNA, 25 bp, Homo sapien
cttggtgctttgtgtgccttctaag

SEQ ID NO: 6069262 - DNA, 25 bp, Homo sapien
agattttcagatttacgtcctgaaa

SEQ ID NO: 6069263 - DNA, 25 bp, Homo sapien
aatccaatccaaattctgaggtaac

SEQ ID NO: 6069264 - DNA, 25 bp, Homo sapien
tccacaacttgaaaaatactttatg

SEQ ID NO: 6069265 - DNA, 25 bp, Homo sapien
atactggcacatatacagaagatgg

SEQ ID NO: 6069266 - DNA, 25 bp, Homo sapien
cagtaatgtatattaaatcacacaa

SEQ ID NO: 6069267 - DNA, 25 bp, Homo sapien
aagatggaatttttagcatactcag

SEQ ID NO: 6069268 - DNA, 25 bp, Homo sapien
gcactgcctacaaattttatatata

SEQ ID NO: 6069269 - DNA, 25 bp, Homo sapien
gctttgtgtgccttctaagggcggc

SEQ ID NO: 6069270 - DNA, 25 bp, Homo sapien
tgattacaggtttctggggaaattc

SEQ ID NO: 6069271 - DNA, 25 bp, Homo sapien
cagatttctttttgcaagagatttt

SEQ ID NO: 6069272 - DNA, 25 bp, Homo sapien
tgtgccttctaagggcggcggaact

SEQ ID NO: 6069273 - DNA, 25 bp, Homo sapien
aacttgaaaaatactttatgcactg

SEQ ID NO: 6069274 - DNA, 25 bp, Homo sapien
aggtttagtactaagcttcttggtg

SEQ ID NO: 6069275 - DNA, 25 bp, Homo sapien
tgactttgtacagctccattaaatg

SEQ ID NO: 6069276 - DNA, 25 bp, Homo sapien
atcaaaggaaaatggaactcagatt

SEQ ID NO: 6069277 - DNA, 25 bp, Homo sapien
tgtaatggagcaatttaacagacac

SEQ ID NO: 6069278 - DNA, 25 bp, Homo sapien
tgttagttgaattgttttaatcctc

SEQ ID NO: 6069279 - DNA, 25 bp, Homo sapien
ggcggcggaactttgaagttggcca

SEQ ID NO: 6069280 - DNA, 25 bp, Homo sapien
cctacaaattttatatatatgaaat

SEQ ID NO: 6069281 - DNA, 25 bp, Homo sapien
aactttccaaaatactggcacatat

SEQ ID NO: 6069282 - DNA, 25 bp, Homo sapien
aggagaagacttcaggcctggaagc

SEQ ID NO: 6069283 - DNA, 25 bp, Homo sapien
tgaggtagcctccaaatctaatggc

SEQ ID NO: 6069284 - DNA, 25 bp, Homo sapien
tgcccaggtgaggtagcctccaaat

SEQ ID NO: 6069285 - DNA, 25 bp, Homo sapien
ggtagcctccaaatctaatggccca

SEQ ID NO: 6069286 - DNA, 25 bp, Homo sapien
ggagaagacttcaggcctggaagca

SEQ ID NO: 6069287 - DNA, 25 bp, Homo sapien
tcatggaggagaagacttcaggcct

SEQ ID NO: 6069288 - DNA, 25 bp, Homo sapien
ggtgaggtagcctccaaatctaatg

SEQ ID NO: 6069289 - DNA, 25 bp, Homo sapien
ctgcccaggtgaggtagcctccaaa

SEQ ID NO: 6069290 - DNA, 25 bp, Homo sapien
cccaggtgaggtagcctccaaatct

SEQ ID NO: 6069291 - DNA, 25 bp, Homo sapien
gggctcatttgagttctggattttc

SEQ ID NO: 6069292 - DNA, 25 bp, Homo sapien
gctcatttgagttctggattttcca

SEQ ID NO: 6069293 - DNA, 25 bp, Homo sapien
gaggtagcctccaaatctaatggcc

SEQ ID NO: 6069294 - DNA, 25 bp, Homo sapien
gcagagggtgacctgatgtgcatca

SEQ ID NO: 6069295 - DNA, 25 bp, Homo sapien
gcagcgagtgacgttgcctgagcca

SEQ ID NO: 6069296 - DNA, 25 bp, Homo sapien
acacagttggtgctaaggaggcaga

SEQ ID NO: 6069297 - DNA, 25 bp, Homo sapien
aatggccacccagatgaccaaggac

SEQ ID NO: 6069298 - DNA, 25 bp, Homo sapien
tgtgcatcattaatggcctggtgga

SEQ ID NO: 6069299 - DNA, 25 bp, Homo sapien
tcgtaatgctcaaagcagcgagtga

SEQ ID NO: 6069300 - DNA, 25 bp, Homo sapien
tgaacacgatgaagatgtggatgat

SEQ ID NO: 6069301 - DNA, 25 bp, Homo sapien
tcagtgaccgtatccgtggtggccc

SEQ ID NO: 6069302 - DNA, 25 bp, Homo sapien
ggcacgctgcccttctcgtaatgct

SEQ ID NO: 6069303 - DNA, 25 bp, Homo sapien
gctgcaccggctgcatgagcaaggt

SEQ ID NO: 6069304 - DNA, 25 bp, Homo sapien
catgagcaaggtacggatgatgacc

SEQ ID NO: 6069305 - DNA, 25 bp, Homo sapien
agatgatgaacaccgccaagaccgt

SEQ ID NO: 6069306 - DNA, 25 bp, Homo sapien
acagcgcccgcgtcgtgacttcagc

SEQ ID NO: 6069307 - DNA, 25 bp, Homo sapien
cagcgcccgcgtcgtgacttcagcg

SEQ ID NO: 6069308 - DNA, 25 bp, Homo sapien
cgcccgcgtcgtgacttcagcgttg

SEQ ID NO: 6069309 - DNA, 25 bp, Homo sapien
cacagcgcccgcgtcgtgacttcag

SEQ ID NO: 6069310 - DNA, 25 bp, Homo sapien
gcgcccgcgtcgtgacttcagcgtt

SEQ ID NO: 6069311 - DNA, 25 bp, Homo sapien
atccacagcgcccgcgtcgtgactt

SEQ ID NO: 6069312 - DNA, 25 bp, Homo sapien
gcccgcgtcgtgacttcagcgttgc

SEQ ID NO: 6069313 - DNA, 25 bp, Homo sapien
acagcgcccgcgtcgtgacttcagc

SEQ ID NO: 6069314 - DNA, 25 bp, Homo sapien
cagcgcccgcgtcgtgacttcagcg

SEQ ID NO: 6069315 - DNA, 25 bp, Homo sapien
gcgcccgcgtcgtgacttcagcgtt

SEQ ID NO: 6069316 - DNA, 25 bp, Homo sapien
atccacagcgcccgcgtcgtgactt

SEQ ID NO: 6069317 - DNA, 25 bp, Homo sapien
tgggcgacgaagcagatgatgaaca

SEQ ID NO: 6069318 - DNA, 25 bp, Homo sapien
gatgaggaagtaggatgcagctccc

SEQ ID NO: 6069319 - DNA, 25 bp, Homo sapien
cacagcgcccgcgtcgtgacttcag

SEQ ID NO: 6069320 - DNA, 25 bp, Homo sapien
cgcccgcgtcgtgacttcagcgttg

SEQ ID NO: 6069321 - DNA, 25 bp, Homo sapien
gccacccagatgaccaaggacaaag

SEQ ID NO: 6069322 - DNA, 25 bp, Homo sapien
gcccgcgtcgtgacttcagcgttgc

SEQ ID NO: 6069323 - DNA, 25 bp, Homo sapien
gctgcaccacgtggtgggcgacgaa

SEQ ID NO: 6069324 - DNA, 25 bp, Homo sapien
gacgaagcagatgatgaacaccgcc

SEQ ID NO: 6069325 - DNA, 25 bp, Homo sapien
taagtggtcgagagaaagataaaaa

SEQ ID NO: 6069326 - DNA, 25 bp, Homo sapien
caagctgcagatctagaggttgtag

SEQ ID NO: 6069327 - DNA, 25 bp, Homo sapien
ctgtagcttttgacgtgcttgttga

SEQ ID NO: 6069328 - DNA, 25 bp, Homo sapien
ctgaagttttaagtggtcgagagaa

SEQ ID NO: 6069329 - DNA, 25 bp, Homo sapien
gagacatattaagatgagacagaaa

SEQ ID NO: 6069330 - DNA, 25 bp, Homo sapien
gaagcatcacgatgatacagatcag

SEQ ID NO: 6069331 - DNA, 25 bp, Homo sapien
cagatctagaggttgtagcagaact

SEQ ID NO: 6069332 - DNA, 25 bp, Homo sapien
tgatgtggcaagctgcagatctaga

SEQ ID NO: 6069333 - DNA, 25 bp, Homo sapien
tcagagaagcatcacgatgatacag

SEQ ID NO: 6069334 - DNA, 25 bp, Homo sapien
ctgagcgagtgaggtattggacttt

SEQ ID NO: 6069335 - DNA, 25 bp, Homo sapien
gaggctcttcttatagctgagcgag

SEQ ID NO: 6069336 - DNA, 25 bp, Homo sapien
cgagtgaggtattggactttctcca

SEQ ID NO: 6069337 - DNA, 25 bp, Homo sapien
acagacacagcagggtcctgagtca

SEQ ID NO: 6069338 - DNA, 25 bp, Homo sapien
ttctgctggtaccagcttgcataat

SEQ ID NO: 6069339 - DNA, 25 bp, Homo sapien
tgtctgtcccaaggccacagacaca

SEQ ID NO: 6069340 - DNA, 25 bp, Homo sapien
ccttggcatgtgatcctgactgtct

SEQ ID NO: 6069341 - DNA, 25 bp, Homo sapien
cacagcagggtcctgagtcagctca

SEQ ID NO: 6069342 - DNA, 25 bp, Homo sapien
gctgtcccgggagttacagtaatag

SEQ ID NO: 6069343 - DNA, 25 bp, Homo sapien
tgtcccgggagttacagtaatagtc

SEQ ID NO: 6069344 - DNA, 25 bp, Homo sapien
ccagagaatcggtctgggatccctg

SEQ ID NO: 6069345 - DNA, 25 bp, Homo sapien
tgctggtaccagcttgcataatagc

SEQ ID NO: 6069346 - DNA, 25 bp, Homo sapien
ggccggttgtttttaccatagatga

SEQ ID NO: 6069347 - DNA, 25 bp, Homo sapien
gtgatcctgactgtctgtcccaagg

SEQ ID NO: 6069348 - DNA, 25 bp, Homo sapien
tttaccatagatgacaagtacaggg

SEQ ID NO: 6069349 - DNA, 25 bp, Homo sapien
tacggagatcagctgcatactgggc

SEQ ID NO: 6069350 - DNA, 25 bp, Homo sapien
tatctacggagatcagctgcatact

SEQ ID NO: 6069351 - DNA, 25 bp, Homo sapien
ccctgggtacactggctccagtggg

SEQ ID NO: 6069352 - DNA, 25 bp, Homo sapien
gatgtatctacggagatcagctgca

SEQ ID NO: 6069353 - DNA, 25 bp, Homo sapien
tgtatctacggagatcagctgcata

SEQ ID NO: 6069354 - DNA, 25 bp, Homo sapien
gctgtagtaacagagccacgcaggt

SEQ ID NO: 6069355 - DNA, 25 bp, Homo sapien
tggctgtagtaacagagccacgcag

SEQ ID NO: 6069356 - DNA, 25 bp, Homo sapien
ggctgtagtaacagagccacgcagg

SEQ ID NO: 6069357 - DNA, 25 bp, Homo sapien
ctacggagatcagctgcatactggg

SEQ ID NO: 6069358 - DNA, 25 bp, Homo sapien
tctacggagatcagctgcatactgg

SEQ ID NO: 6069359 - DNA, 25 bp, Homo sapien
cagtggctgtagtaacagagccacg

SEQ ID NO: 6069360 - DNA, 25 bp, Homo sapien
cagcagtggctgtagtaacagagcc

SEQ ID NO: 6069361 - DNA, 25 bp, Homo sapien
tgtcgatcatgcctattatggacct

SEQ ID NO: 6069362 - DNA, 25 bp, Homo sapien
aagttctccttcatcatcgtcagca

SEQ ID NO: 6069363 - DNA, 25 bp, Homo sapien
ggacctctcagcttgagtgttgctc

SEQ ID NO: 6069364 - DNA, 25 bp, Homo sapien
gatcatgcctattatggacctctca

SEQ ID NO: 6069365 - DNA, 25 bp, Homo sapien
tcgatcatgcctattatggacctct

SEQ ID NO: 6069366 - DNA, 25 bp, Homo sapien
tgtgaaacatgtcgatcatgcctat

SEQ ID NO: 6069367 - DNA, 25 bp, Homo sapien
tttgtgaaacatgtcgatcatgcct

SEQ ID NO: 6069368 - DNA, 25 bp, Homo sapien
aacatgtcgatcatgcctattatgg

SEQ ID NO: 6069369 - DNA, 25 bp, Homo sapien
gtatttgtgaaacatgtcgatcatg

SEQ ID NO: 6069370 - DNA, 25 bp, Homo sapien
ggaagttctccttcatcatcgtcag

SEQ ID NO: 6069371 - DNA, 25 bp, Homo sapien
tcatgcctattatggacctctcagc

SEQ ID NO: 6069372 - DNA, 25 bp, Homo sapien
catgtcgatcatgcctattatggac

SEQ ID NO: 6069373 - DNA, 25 bp, Homo sapien
cagtctgttgtaccgaaattatgcc

SEQ ID NO: 6069374 - DNA, 25 bp, Homo sapien
gcagtagttccgttagtgtatccat

SEQ ID NO: 6069375 - DNA, 25 bp, Homo sapien
cctggcctgccacgtatggatgctc

SEQ ID NO: 6069376 - DNA, 25 bp, Homo sapien
tatggatgctcatgatagtttcttc

SEQ ID NO: 6069377 - DNA, 25 bp, Homo sapien
atacatggtatagccacacgaagga

SEQ ID NO: 6069378 - DNA, 25 bp, Homo sapien
taaagtggtgcagtctgttgtaccg

SEQ ID NO: 6069379 - DNA, 25 bp, Homo sapien
taaaaatgcaaacggacctgaagtg

SEQ ID NO: 6069380 - DNA, 25 bp, Homo sapien
aattgaaccactcagtcggtactga

SEQ ID NO: 6069381 - DNA, 25 bp, Homo sapien
tatagccacacgaaggaatactact

SEQ ID NO: 6069382 - DNA, 25 bp, Homo sapien
gacctgaagtgacagtggctccttg

SEQ ID NO: 6069383 - DNA, 25 bp, Homo sapien
taatttctccatactagcaattagc

SEQ ID NO: 6069384 - DNA, 25 bp, Homo sapien
cagtatttacaagacattacagatg

SEQ ID NO: 6069385 - DNA, 25 bp, Homo sapien
gcgggccaagaggagcagcccttcc

SEQ ID NO: 6069386 - DNA, 25 bp, Homo sapien
cctaacatgtccaagaacagggctt

SEQ ID NO: 6069387 - DNA, 25 bp, Homo sapien
tgttcctcctaaatacttctcacta

SEQ ID NO: 6069388 - DNA, 25 bp, Homo sapien
gccccgaagactgagaagagctcat

SEQ ID NO: 6069389 - DNA, 25 bp, Homo sapien
agcttggatgatactggaactcata

SEQ ID NO: 6069390 - DNA, 25 bp, Homo sapien
tgcttttcagcttctgggctggctg

SEQ ID NO: 6069391 - DNA, 25 bp, Homo sapien
ctgagtcttatctcctcttctgagg

SEQ ID NO: 6069392 - DNA, 25 bp, Homo sapien
ggctttctttttgacagggtcatct

SEQ ID NO: 6069393 - DNA, 25 bp, Homo sapien
cccaaccacggtctggggtttcatg

SEQ ID NO: 6069394 - DNA, 25 bp, Homo sapien
aatggggccccgaagactgagaaga

SEQ ID NO: 6069395 - DNA, 25 bp, Homo sapien
ctgggctggctgagtggggattcca

SEQ ID NO: 6069396 - DNA, 25 bp, Homo sapien
ttctgctgcccgcttggctaggagc

SEQ ID NO: 6069397 - DNA, 25 bp, Homo sapien
ggcatctctgtggtgacgggctaca

SEQ ID NO: 6069398 - DNA, 25 bp, Homo sapien
tccagaaagccatttccttgctttt

SEQ ID NO: 6069399 - DNA, 25 bp, Homo sapien
ctgtgggactcagcttttctgctgc

SEQ ID NO: 6069400 - DNA, 25 bp, Homo sapien
ctttttgacagggtcatctgttcct

SEQ ID NO: 6069401 - DNA, 25 bp, Homo sapien
gcttggctaggagctcagtccagaa

SEQ ID NO: 6069402 - DNA, 25 bp, Homo sapien
cacaagagtgacgaagccgtcttct

SEQ ID NO: 6069403 - DNA, 25 bp, Homo sapien
tggctgagtggggattccaatctgc

SEQ ID NO: 6069404 - DNA, 25 bp, Homo sapien
actggaactcatacatgtaggtggg

SEQ ID NO: 6069405 - DNA, 25 bp, Homo sapien
ccttctggtcgtaggcgggccaaga

SEQ ID NO: 6069406 - DNA, 25 bp, Homo sapien
tctggggtttcatgtccgatgagaa

SEQ ID NO: 6069407 - DNA, 25 bp, Homo sapien
ccgagcgaagttggcccatagtttc

SEQ ID NO: 6069408 - DNA, 25 bp, Homo sapien
cgaagccgtcttctggtccagcttg

SEQ ID NO: 6069409 - DNA, 25 bp, Homo sapien
tgacgggctacagtcacggatggga

SEQ ID NO: 6069410 - DNA, 25 bp, Homo sapien
ccgctccgagcgaagttggcccata

SEQ ID NO: 6069411 - DNA, 25 bp, Homo sapien
catgtaggtgggggctccggcatct

SEQ ID NO: 6069412 - DNA, 25 bp, Homo sapien
agtggggattccaatctgcaggtac

SEQ ID NO: 6069413 - DNA, 25 bp, Homo sapien
agaacagggctttctttttgacagg

SEQ ID NO: 6069414 - DNA, 25 bp, Homo sapien
tcctaaatacttctcactagccagt

SEQ ID NO: 6069415 - DNA, 25 bp, Homo sapien
ctgcccgcttggctaggagctcagt

SEQ ID NO: 6069416 - DNA, 25 bp, Homo sapien
gacagggtcatctgttcctcctaaa

SEQ ID NO: 6069417 - DNA, 25 bp, Homo sapien
ccccattgggttcccgctccgagcg

SEQ ID NO: 6069418 - DNA, 25 bp, Homo sapien
aagactgagaagagctcatccccgt

SEQ ID NO: 6069419 - DNA, 25 bp, Homo sapien
ccacggtctggggtttcatgtccga

SEQ ID NO: 6069420 - DNA, 25 bp, Homo sapien
gggtaggacttccacaagagtgacg

SEQ ID NO: 6069421 - DNA, 25 bp, Homo sapien
tgggttcccgctccgagcgaagttg

SEQ ID NO: 6069422 - DNA, 25 bp, Homo sapien
tctgtggtgacgggctacagtcacg

SEQ ID NO: 6069423 - DNA, 25 bp, Homo sapien
tcctcttctgaggcaccccctttta

SEQ ID NO: 6069424 - DNA, 25 bp, Homo sapien
ctcatccccgtggtccccaaccacg

SEQ ID NO: 6069425 - DNA, 25 bp, Homo sapien
gctacagtcacggatgggacaccaa

SEQ ID NO: 6069426 - DNA, 25 bp, Homo sapien
atacttctcactagccagtggagtc

SEQ ID NO: 6069427 - DNA, 25 bp, Homo sapien
gtcacggatgggacaccaaacacca

SEQ ID NO: 6069428 - DNA, 25 bp, Homo sapien
gagaagagctcatccccgtggtccc

SEQ ID NO: 6069429 - DNA, 25 bp, Homo sapien
atcatcatcttgctgagtcttatct

SEQ ID NO: 6069430 - DNA, 25 bp, Homo sapien
aacaccacatctcctaacatgtcca

SEQ ID NO: 6069431 - DNA, 25 bp, Homo sapien
aatctgcaggtacccttccttctgg

SEQ ID NO: 6069432 - DNA, 25 bp, Homo sapien
cagcttttctgctgcccgcttggct

SEQ ID NO: 6069433 - DNA, 25 bp, Homo sapien
tttccttgcttttcagcttctgggc

SEQ ID NO: 6069434 - DNA, 25 bp, Homo sapien
gatgggacaccaaacaccacatctc

SEQ ID NO: 6069435 - DNA, 25 bp, Homo sapien
gtcttcagagagtgggtaacccatc

SEQ ID NO: 6069436 - DNA, 25 bp, Homo sapien
cagcttgtcttcagagagtgggtaa

SEQ ID NO: 6069437 - DNA, 25 bp, Homo sapien
gcccatagtttcatcatcatcttgc

SEQ ID NO: 6069438 - DNA, 25 bp, Homo sapien
agtttcatcatcatcttgctgagtc

SEQ ID NO: 6069439 - DNA, 25 bp, Homo sapien
cttatctcctcttctgaggcacccc

SEQ ID NO: 6069440 - DNA, 25 bp, Homo sapien
ctcactagccagtggagtcagttcc

SEQ ID NO: 6069441 - DNA, 25 bp, Homo sapien
cgtcttctggtccagcttgtcttca

SEQ ID NO: 6069442 - DNA, 25 bp, Homo sapien
gatgttagcaatggggtaggacttc

SEQ ID NO: 6069443 - DNA, 25 bp, Homo sapien
atgagaagcttggatgatactggaa

SEQ ID NO: 6069444 - DNA, 25 bp, Homo sapien
tcagcttctgggctggctgagtggg

SEQ ID NO: 6069445 - DNA, 25 bp, Homo sapien
cagttcctcagggatgttagcaatg

SEQ ID NO: 6069446 - DNA, 25 bp, Homo sapien
ggctccggcatctctgtggtgacgg

SEQ ID NO: 6069447 - DNA, 25 bp, Homo sapien
agtgacgaagccgtcttctggtcca

SEQ ID NO: 6069448 - DNA, 25 bp, Homo sapien
acatctcctaacatgtccaagaaca

SEQ ID NO: 6069449 - DNA, 25 bp, Homo sapien
tcgtaggcgggccaagaggagcagc

SEQ ID NO: 6069450 - DNA, 25 bp, Homo sapien
tgtccgatgagaagcttggatgata

SEQ ID NO: 6069451 - DNA, 25 bp, Homo sapien
gtttcatgtccgatgagaagcttgg

SEQ ID NO: 6069452 - DNA, 25 bp, Homo sapien
ctaggagctcagtccagaaagccat

SEQ ID NO: 6069453 - DNA, 25 bp, Homo sapien
aagccatttccttgcttttcagctt

SEQ ID NO: 6069454 - DNA, 25 bp, Homo sapien
ccaagaggagcagcccttccccatt

SEQ ID NO: 6069455 - DNA, 25 bp, Homo sapien
ctcatacatgtaggtgggggctccg

SEQ ID NO: 6069456 - DNA, 25 bp, Homo sapien
gacttccacaagagtgacgaagccg

SEQ ID NO: 6069457 - DNA, 25 bp, Homo sapien
ctggtccagcttgtcttcagagagt

SEQ ID NO: 6069458 - DNA, 25 bp, Homo sapien
gatgatactggaactcatacatgta

SEQ ID NO: 6069459 - DNA, 25 bp, Homo sapien
ggtgggggctccggcatctctgtgg

SEQ ID NO: 6069460 - DNA, 25 bp, Homo sapien
ggagcagcccttccccattgggttc

SEQ ID NO: 6069461 - DNA, 25 bp, Homo sapien
gattccaatctgcaggtacccttcc

SEQ ID NO: 6069462 - DNA, 25 bp, Homo sapien
acaccaaacaccacatctcctaaca

SEQ ID NO: 6069463 - DNA, 25 bp, Homo sapien
gcaatggggtaggacttccacaaga

SEQ ID NO: 6069464 - DNA, 25 bp, Homo sapien
agccagtggagtcagttcctcaggg

SEQ ID NO: 6069465 - DNA, 25 bp, Homo sapien
atgtccaagaacagggctttctttt

SEQ ID NO: 6069466 - DNA, 25 bp, Homo sapien
aagttggcccatagtttcatcatca

SEQ ID NO: 6069467 - DNA, 25 bp, Homo sapien
caggtacccttccttctggtcgtag

SEQ ID NO: 6069468 - DNA, 25 bp, Homo sapien
tggagtcagttcctcagggatgtta

SEQ ID NO: 6069469 - DNA, 25 bp, Homo sapien
gggactcagcttttctgctgcccgc

SEQ ID NO: 6069470 - DNA, 25 bp, Homo sapien
atcttgctgagtcttatctcctctt

SEQ ID NO: 6069471 - DNA, 25 bp, Homo sapien
cctcagggatgttagcaatggggta

SEQ ID NO: 6069472 - DNA, 25 bp, Homo sapien
gctcagtccagaaagccatttcctt

SEQ ID NO: 6069473 - DNA, 25 bp, Homo sapien
gtcatctgttcctcctaaatacttc

SEQ ID NO: 6069474 - DNA, 25 bp, Homo sapien
cttcgcagacacagccgtgggcaca

SEQ ID NO: 6069475 - DNA, 25 bp, Homo sapien
ggagccggtgcaggcgcaggagaca

SEQ ID NO: 6069476 - DNA, 25 bp, Homo sapien
cccttcgcagacacagccgtgggca

SEQ ID NO: 6069477 - DNA, 25 bp, Homo sapien
aggagccggtgcaggcgcaggagac

SEQ ID NO: 6069478 - DNA, 25 bp, Homo sapien
ccggtgcaggcgcaggagacaccag

SEQ ID NO: 6069479 - DNA, 25 bp, Homo sapien
ggtgcaggcgcaggagacaccagtg

SEQ ID NO: 6069480 - DNA, 25 bp, Homo sapien
ttcgcagacacagccgtgggcacac

SEQ ID NO: 6069481 - DNA, 25 bp, Homo sapien
gtgcaggcgcaggagacaccagtgg

SEQ ID NO: 6069482 - DNA, 25 bp, Homo sapien
acttgcaggagccggtgcaggcgca

SEQ ID NO: 6069483 - DNA, 25 bp, Homo sapien
cggtgcaggcgcaggagacaccagt

SEQ ID NO: 6069484 - DNA, 25 bp, Homo sapien
caggagccggtgcaggcgcaggaga

SEQ ID NO: 6069485 - DNA, 25 bp, Homo sapien
tgcaggcgcaggagacaccagtggc

SEQ ID NO: 6069486 - DNA, 25 bp, Homo sapien
ccaggactcgggcaggagtgatccc

SEQ ID NO: 6069487 - DNA, 25 bp, Homo sapien
aaaagctgaatttaagtagtctggg

SEQ ID NO: 6069488 - DNA, 25 bp, Homo sapien
ccgctattggaactgggcagaggca

SEQ ID NO: 6069489 - DNA, 25 bp, Homo sapien
gctgagtccccttcacaggagcttc

SEQ ID NO: 6069490 - DNA, 25 bp, Homo sapien
tcgtctgcccgctattggaactggg

SEQ ID NO: 6069491 - DNA, 25 bp, Homo sapien
ttcccgcgttctgcgtcagcaaagg

SEQ ID NO: 6069492 - DNA, 25 bp, Homo sapien
ctgttagtacggaggaaagagaatg

SEQ ID NO: 6069493 - DNA, 25 bp, Homo sapien
tcgggcaggagtgatccccactaaa

SEQ ID NO: 6069494 - DNA, 25 bp, Homo sapien
gagtgatccccactaaaaggcaaag

SEQ ID NO: 6069495 - DNA, 25 bp, Homo sapien
tgaccctttcctcacgctctcagga

SEQ ID NO: 6069496 - DNA, 25 bp, Homo sapien
tggctctcgtctgcccgctattgga

SEQ ID NO: 6069497 - DNA, 25 bp, Homo sapien
gagaatggacgctgggttagcaact

SEQ ID NO: 6069498 - DNA, 25 bp, Homo sapien
gccatgtgcttgctatgtgtgaaag

SEQ ID NO: 6069499 - DNA, 25 bp, Homo sapien
gatatacagcaaagttatacaacac

SEQ ID NO: 6069500 - DNA, 25 bp, Homo sapien
taacaaaggcatcctgacatcaggg

SEQ ID NO: 6069501 - DNA, 25 bp, Homo sapien
cacttgacaattgcaaacctttcca

SEQ ID NO: 6069502 - DNA, 25 bp, Homo sapien
ggatactaagctacaacaaaacact

SEQ ID NO: 6069503 - DNA, 25 bp, Homo sapien
tgtgaactgcccatagtgaaaaagg

SEQ ID NO: 6069504 - DNA, 25 bp, Homo sapien
taggtcataaataaacaggcaaatt

SEQ ID NO: 6069505 - DNA, 25 bp, Homo sapien
gggcaaatacagatcctaacaaagg

SEQ ID NO: 6069506 - DNA, 25 bp, Homo sapien
tatacaacacactaaaaccaactgt

SEQ ID NO: 6069507 - DNA, 25 bp, Homo sapien
taagtttcccttatggatactaagc

SEQ ID NO: 6069508 - DNA, 25 bp, Homo sapien
caacttggctctttaaagaatgcac

SEQ ID NO: 6069509 - DNA, 25 bp, Homo sapien
ggctgtttccccgaagcaacttggc

SEQ ID NO: 6069510 - DNA, 25 bp, Homo sapien
aacagccgctgtatcctaaggaacc

SEQ ID NO: 6069511 - DNA, 25 bp, Homo sapien
gggaacagccgctgtatcctaagga

SEQ ID NO: 6069512 - DNA, 25 bp, Homo sapien
cctcccagatgatctcgtcttccac

SEQ ID NO: 6069513 - DNA, 25 bp, Homo sapien
tcccagatgatctcgtcttccacct

SEQ ID NO: 6069514 - DNA, 25 bp, Homo sapien
ctcgtcttccacctcatggttatca

SEQ ID NO: 6069515 - DNA, 25 bp, Homo sapien
ctcccagatgatctcgtcttccacc

SEQ ID NO: 6069516 - DNA, 25 bp, Homo sapien
gaacagccgctgtatcctaaggaac

SEQ ID NO: 6069517 - DNA, 25 bp, Homo sapien
ggaacagccgctgtatcctaaggaa

SEQ ID NO: 6069518 - DNA, 25 bp, Homo sapien
tcgtcttccacctcatggttatcat

SEQ ID NO: 6069519 - DNA, 25 bp, Homo sapien
tcctcccagatgatctcgtcttcca

SEQ ID NO: 6069520 - DNA, 25 bp, Homo sapien
gtcttccacctcatggttatcattc

SEQ ID NO: 6069521 - DNA, 25 bp, Homo sapien
cgtcttccacctcatggttatcatt

SEQ ID NO: 6069522 - DNA, 25 bp, Homo sapien
gggacccacatcagtgacgccgtta

SEQ ID NO: 6069523 - DNA, 25 bp, Homo sapien
gcactcactgtgagacgcgtccgaa

SEQ ID NO: 6069524 - DNA, 25 bp, Homo sapien
acaaaggcaagaccccaggttccag

SEQ ID NO: 6069525 - DNA, 25 bp, Homo sapien
ggttccagggaattgccacttgctc

SEQ ID NO: 6069526 - DNA, 25 bp, Homo sapien
tccagcacgtgcaagttctgaaggc

SEQ ID NO: 6069527 - DNA, 25 bp, Homo sapien
cggaacaaaaccttttcactgctga

SEQ ID NO: 6069528 - DNA, 25 bp, Homo sapien
aaggctcagcatgccccgaattcac

SEQ ID NO: 6069529 - DNA, 25 bp, Homo sapien
ggtccaataggcacaaccctggaca

SEQ ID NO: 6069530 - DNA, 25 bp, Homo sapien
gagtctctcggtctccaaacaaagg

SEQ ID NO: 6069531 - DNA, 25 bp, Homo sapien
tgctgatgacatgtcctgtgaccct

SEQ ID NO: 6069532 - DNA, 25 bp, Homo sapien
tgggctgctgactgcagacctcagg

SEQ ID NO: 6069533 - DNA, 25 bp, Homo sapien
cacgccaggacttgacacgaagctg

SEQ ID NO: 6069534 - DNA, 25 bp, Homo sapien
gcctcagacaagtaactcagctttg

SEQ ID NO: 6069535 - DNA, 25 bp, Homo sapien
ttgggcaggcccattacgccatgag

SEQ ID NO: 6069536 - DNA, 25 bp, Homo sapien
ctctggagtcagacggcttccgagg

SEQ ID NO: 6069537 - DNA, 25 bp, Homo sapien
tacagggcaattgcttttcagagta

SEQ ID NO: 6069538 - DNA, 25 bp, Homo sapien
taaatggaattgaaaggaactagcc

SEQ ID NO: 6069539 - DNA, 25 bp, Homo sapien
ggatcccataagctgatggagaaac

SEQ ID NO: 6069540 - DNA, 25 bp, Homo sapien
agaaactaaacgctgggaatggcac

SEQ ID NO: 6069541 - DNA, 25 bp, Homo sapien
gcttccgagggatgaggcctcagac

SEQ ID NO: 6069542 - DNA, 25 bp, Homo sapien
tccgggaactgactgagggctaact

SEQ ID NO: 6069543 - DNA, 25 bp, Homo sapien
tctttctagataagttacagggcaa

SEQ ID NO: 6069544 - DNA, 25 bp, Homo sapien
gactgagggctaactattatgggcc

SEQ ID NO: 6069545 - DNA, 25 bp, Homo sapien
cccctctctatagggtactagccgg

SEQ ID NO: 6069546 - DNA, 25 bp, Homo sapien
aactggagtccggcccgcgaagagc

SEQ ID NO: 6069547 - DNA, 25 bp, Homo sapien
acccagcaacttgtttagctcctcg

SEQ ID NO: 6069548 - DNA, 25 bp, Homo sapien
tgagcaattgtgactttacccagca

SEQ ID NO: 6069549 - DNA, 25 bp, Homo sapien
cgcgaagagcgggtcttagccttag

SEQ ID NO: 6069550 - DNA, 25 bp, Homo sapien
gagcaagcggtgtacgcggcccaca

SEQ ID NO: 6069551 - DNA, 25 bp, Homo sapien
cgaagagcgggtcttagccttagct

SEQ ID NO: 6069552 - DNA, 25 bp, Homo sapien
agcaagcggtgtacgcggcccacag

SEQ ID NO: 6069553 - DNA, 25 bp, Homo sapien
tcttagccttagctcgggcctttcc

SEQ ID NO: 6069554 - DNA, 25 bp, Homo sapien
cagggaactggagtccggcccgcga

SEQ ID NO: 6069555 - DNA, 25 bp, Homo sapien
agagcgggtcttagccttagctcgg

SEQ ID NO: 6069556 - DNA, 25 bp, Homo sapien
cgggtcttagccttagctcgggcct

SEQ ID NO: 6069557 - DNA, 25 bp, Homo sapien
ttagccttagctcgggcctttccgc

SEQ ID NO: 6069558 - DNA, 25 bp, Homo sapien
gcaagaattacgcaattatgcaggg

SEQ ID NO: 6069559 - DNA, 25 bp, Homo sapien
tcctttaataaccaccctgcgtgag

SEQ ID NO: 6069560 - DNA, 25 bp, Homo sapien
cccctacaagggctgctctgggtca

SEQ ID NO: 6069561 - DNA, 25 bp, Homo sapien
gaaagaatgggcctgaattgctccc

SEQ ID NO: 6069562 - DNA, 25 bp, Homo sapien
cacctcgatccacttgagggtggaa

SEQ ID NO: 6069563 - DNA, 25 bp, Homo sapien
gggtggtgatgaatcacacagctgc

SEQ ID NO: 6069564 - DNA, 25 bp, Homo sapien
ttgtcactggagacagcgcccctgg

SEQ ID NO: 6069565 - DNA, 25 bp, Homo sapien
gaggctcacagaaccagggaacgat

SEQ ID NO: 6069566 - DNA, 25 bp, Homo sapien
atgaacacggcgcttcgcaaaacca

SEQ ID NO: 6069567 - DNA, 25 bp, Homo sapien
ccctgcgtgagtggctgacgcagca

SEQ ID NO: 6069568 - DNA, 25 bp, Homo sapien
gctctgggtcagagaacgtccaccg

SEQ ID NO: 6069569 - DNA, 25 bp, Homo sapien
gcgcttcgcaaaaccaggaaaaggc

SEQ ID NO: 6069570 - DNA, 25 bp, Homo sapien
gccaccagtagacttccgagcagtt

SEQ ID NO: 6069571 - DNA, 25 bp, Homo sapien
gccttgccaccagtagacttccgag

SEQ ID NO: 6069572 - DNA, 25 bp, Homo sapien
tggcgccttgccaccagtagacttc

SEQ ID NO: 6069573 - DNA, 25 bp, Homo sapien
accagtagacttccgagcagtttgc

SEQ ID NO: 6069574 - DNA, 25 bp, Homo sapien
caggttagtgtcctcaaatagccct

SEQ ID NO: 6069575 - DNA, 25 bp, Homo sapien
gtcctgcgcaatctcgcgcaccagg

SEQ ID NO: 6069576 - DNA, 25 bp, Homo sapien
caccaggcgctggaaaggtagttta

SEQ ID NO: 6069577 - DNA, 25 bp, Homo sapien
ggtagtttacgaataagcagttcag

SEQ ID NO: 6069578 - DNA, 25 bp, Homo sapien
cttagtggccaactgtttgcgtggc

SEQ ID NO: 6069579 - DNA, 25 bp, Homo sapien
tagtggccaactgtttgcgtggcgc

SEQ ID NO: 6069580 - DNA, 25 bp, Homo sapien
caactgtttgcgtggcgccttgcca

SEQ ID NO: 6069581 - DNA, 25 bp, Homo sapien
caggcgctggaaaggtagtttacga

SEQ ID NO: 6069582 - DNA, 25 bp, Homo sapien
tcttcacgccgccagtggcaggtgc

SEQ ID NO: 6069583 - DNA, 25 bp, Homo sapien
cgccgccagtggcaggtgcgctctt

SEQ ID NO: 6069584 - DNA, 25 bp, Homo sapien
aggtgcgctcttgcgagccaccttg

SEQ ID NO: 6069585 - DNA, 25 bp, Homo sapien
tccccgcggatacggcgtgccagct

SEQ ID NO: 6069586 - DNA, 25 bp, Homo sapien
aaagtcctgagcgatctcgcgcatc

SEQ ID NO: 6069587 - DNA, 25 bp, Homo sapien
agcgatctcgcgcatcagccgctgg

SEQ ID NO: 6069588 - DNA, 25 bp, Homo sapien
atggtgacccgtttggcatggatga

SEQ ID NO: 6069589 - DNA, 25 bp, Homo sapien
gcaggtgcgctcttgcgagccacct

SEQ ID NO: 6069590 - DNA, 25 bp, Homo sapien
ttgccacccgttgacttgcgcgcag

SEQ ID NO: 6069591 - DNA, 25 bp, Homo sapien
gcggcgccttgccacccgttgactt

SEQ ID NO: 6069592 - DNA, 25 bp, Homo sapien
agtcctgagcgatctcgcgcatcag

SEQ ID NO: 6069593 - DNA, 25 bp, Homo sapien
ggtgacccgtttggcatggatgaca

SEQ ID NO: 6069594 - DNA, 25 bp, Homo sapien
gtcttgattgccctctttgcctcgg

SEQ ID NO: 6069595 - DNA, 25 bp, Homo sapien
gacatggaagtcctgcgtttttggg

SEQ ID NO: 6069596 - DNA, 25 bp, Homo sapien
tagcagctaacatatctttcaagag

SEQ ID NO: 6069597 - DNA, 25 bp, Homo sapien
ggtccctgtgcacaatatggttttt

SEQ ID NO: 6069598 - DNA, 25 bp, Homo sapien
gggttttctagcagcgcctcaccaa

SEQ ID NO: 6069599 - DNA, 25 bp, Homo sapien
tgtttaatgtaggtccccaggagct

SEQ ID NO: 6069600 - DNA, 25 bp, Homo sapien
tagtgtccctcccagacttcaggag

SEQ ID NO: 6069601 - DNA, 25 bp, Homo sapien
agccatgtagaagtccgaaccgcag

SEQ ID NO: 6069602 - DNA, 25 bp, Homo sapien
aaagatgtccgccttggctgtgtag

SEQ ID NO: 6069603 - DNA, 25 bp, Homo sapien
caagttcaaaggcatcaggccggtc

SEQ ID NO: 6069604 - DNA, 25 bp, Homo sapien
tgaggacagccagtacttattcaca

SEQ ID NO: 6069605 - DNA, 25 bp, Homo sapien
gcaatggcgctcgtcagctgtagca

SEQ ID NO: 6069606 - DNA, 25 bp, Homo sapien
gaaatagatttcacgccgcagagta

SEQ ID NO: 6069607 - DNA, 25 bp, Homo sapien
ttgcctgtggaaaggcgcaaacgaa

SEQ ID NO: 6069608 - DNA, 25 bp, Homo sapien
tcagaactaaatccattcataggga

SEQ ID NO: 6069609 - DNA, 25 bp, Homo sapien
ggcgcaaacgaagctgacattcata

SEQ ID NO: 6069610 - DNA, 25 bp, Homo sapien
gtcgctcttttcctctatcatgttg

SEQ ID NO: 6069611 - DNA, 25 bp, Homo sapien
gggatcttcagctcttcgaacttca

SEQ ID NO: 6069612 - DNA, 25 bp, Homo sapien
ctatcatgttgattggcggtgccaa

SEQ ID NO: 6069613 - DNA, 25 bp, Homo sapien
catgcaaccgtctcttcatgtggaa

SEQ ID NO: 6069614 - DNA, 25 bp, Homo sapien
tgtgtctgtgctgcgaaccacaagc

SEQ ID NO: 6069615 - DNA, 25 bp, Homo sapien
aatatccagagtctctatgtcgctc

SEQ ID NO: 6069616 - DNA, 25 bp, Homo sapien
gctgcgaaccacaagcttgaggtct

SEQ ID NO: 6069617 - DNA, 25 bp, Homo sapien
tgttggtctccatcacagatggaat

SEQ ID NO: 6069618 - DNA, 25 bp, Homo sapien
ctactagttcttgtccttctatgtt

SEQ ID NO: 6069619 - DNA, 25 bp, Homo sapien
ataggacctgcaccaattatcacta

SEQ ID NO: 6069620 - DNA, 25 bp, Homo sapien
aattctaatgaaataggacctgcac

SEQ ID NO: 6069621 - DNA, 25 bp, Homo sapien
catcaccaattgcataaacattttc

SEQ ID NO: 6069622 - DNA, 25 bp, Homo sapien
tctttgttgtaaatattctttaaca

SEQ ID NO: 6069623 - DNA, 25 bp, Homo sapien
ctaaaaattctcttgattcaacaat

SEQ ID NO: 6069624 - DNA, 25 bp, Homo sapien
gcaactatatcaccttgtttatatg

SEQ ID NO: 6069625 - DNA, 25 bp, Homo sapien
ctgttgaatataataatcttccttc

SEQ ID NO: 6069626 - DNA, 25 bp, Homo sapien
cattttctactagttcttgtccttc

SEQ ID NO: 6069627 - DNA, 25 bp, Homo sapien
agcagagaaaagataagcaaattct

SEQ ID NO: 6069628 - DNA, 25 bp, Homo sapien
gttcttgtccttctatgttgatttt

SEQ ID NO: 6069629 - DNA, 25 bp, Homo sapien
aatgaagttttatttctgtgatcaa

SEQ ID NO: 6069630 - DNA, 25 bp, Homo sapien
gtcatttgttcttcattttctatta

SEQ ID NO: 6069631 - DNA, 25 bp, Homo sapien
tctgtattagcaactcttccaactg

SEQ ID NO: 6069632 - DNA, 25 bp, Homo sapien
caaaatcctaaagtcatttgttctt

SEQ ID NO: 6069633 - DNA, 25 bp, Homo sapien
tttcgaattctaaaatgtcttttgc

SEQ ID NO: 6069634 - DNA, 25 bp, Homo sapien
attctcttgattcaacaattgaaac

SEQ ID NO: 6069635 - DNA, 25 bp, Homo sapien
actgattgatttggatttaattcta

SEQ ID NO: 6069636 - DNA, 25 bp, Homo sapien
aatgaaataggacctgcaccaatta

SEQ ID NO: 6069637 - DNA, 25 bp, Homo sapien
gttacctaaaaattctcttgattca

SEQ ID NO: 6069638 - DNA, 25 bp, Homo sapien
tctttaacatttgattgtaattttg

SEQ ID NO: 6069639 - DNA, 25 bp, Homo sapien
tttttaaaggattctgtattagcaa

SEQ ID NO: 6069640 - DNA, 25 bp, Homo sapien
gttgtaaatattctttaacatttga

SEQ ID NO: 6069641 - DNA, 25 bp, Homo sapien
tgttcttcattttctattaaaactg

SEQ ID NO: 6069642 - DNA, 25 bp, Homo sapien
tttctattaaaactgtgtttgcatc

SEQ ID NO: 6069643 - DNA, 25 bp, Homo sapien
cagttacatcaccaattgcataaac

SEQ ID NO: 6069644 - DNA, 25 bp, Homo sapien
atatcaccttgtttatatgcaattg

SEQ ID NO: 6069645 - DNA, 25 bp, Homo sapien
ttcagaccctaaagcagagaaaaga

SEQ ID NO: 6069646 - DNA, 25 bp, Homo sapien
gttttatttctgtgatcaactttaa

SEQ ID NO: 6069647 - DNA, 25 bp, Homo sapien
tgatcaactttaactgattgatttg

SEQ ID NO: 6069648 - DNA, 25 bp, Homo sapien
tttctaatgaagttttatttctgtg

SEQ ID NO: 6069649 - DNA, 25 bp, Homo sapien
aaccactagatagaacaagtttgtc

SEQ ID NO: 6069650 - DNA, 25 bp, Homo sapien
tttctgtgatcaactttaactgatt

SEQ ID NO: 6069651 - DNA, 25 bp, Homo sapien
tagatttttaaaggattctgtatta

SEQ ID NO: 6069652 - DNA, 25 bp, Homo sapien
ccttgtttatatgcaattgaagaaa

SEQ ID NO: 6069653 - DNA, 25 bp, Homo sapien
tgattgtaattttgtatcaaagtta

SEQ ID NO: 6069654 - DNA, 25 bp, Homo sapien
cctgcaccaattatcactagttttt

SEQ ID NO: 6069655 - DNA, 25 bp, Homo sapien
tattaatatttaaaagatctgttga

SEQ ID NO: 6069656 - DNA, 25 bp, Homo sapien
tgaaacttcagaccctaaagcagag

SEQ ID NO: 6069657 - DNA, 25 bp, Homo sapien
cttcattttctattaaaactgtgtt

SEQ ID NO: 6069658 - DNA, 25 bp, Homo sapien
aatataataatcttccttcattttc

SEQ ID NO: 6069659 - DNA, 25 bp, Homo sapien
aatattctttaacatttgattgtaa

SEQ ID NO: 6069660 - DNA, 25 bp, Homo sapien
gcatcattgaaccagttacatcacc

SEQ ID NO: 6069661 - DNA, 25 bp, Homo sapien
tatttaaaagatctgttgaatataa

SEQ ID NO: 6069662 - DNA, 25 bp, Homo sapien
aacatttgattgtaattttgtatca

SEQ ID NO: 6069663 - DNA, 25 bp, Homo sapien
actttaactgattgatttggattta

SEQ ID NO: 6069664 - DNA, 25 bp, Homo sapien
aaagatctgttgaatataataatct

SEQ ID NO: 6069665 - DNA, 25 bp, Homo sapien
ctatgttgatttttcttgaagaaga

SEQ ID NO: 6069666 - DNA, 25 bp, Homo sapien
atcactagttttttaggagctttat

SEQ ID NO: 6069667 - DNA, 25 bp, Homo sapien
ctgtgtttgcatctgtgaatttaac

SEQ ID NO: 6069668 - DNA, 25 bp, Homo sapien
gaaaagataagcaaattctaatgaa

SEQ ID NO: 6069669 - DNA, 25 bp, Homo sapien
taagcaaattctaatgaaataggac

SEQ ID NO: 6069670 - DNA, 25 bp, Homo sapien
aattctaaaatgtcttttgcaacta

SEQ ID NO: 6069671 - DNA, 25 bp, Homo sapien
actcttccaactgcaattaaaactc

SEQ ID NO: 6069672 - DNA, 25 bp, Homo sapien
gagctttattaatatttaaaagatc

SEQ ID NO: 6069673 - DNA, 25 bp, Homo sapien
ttaaaactgtgtttgcatctgtgaa

SEQ ID NO: 6069674 - DNA, 25 bp, Homo sapien
ttcttgaagaagaaccactagatag

SEQ ID NO: 6069675 - DNA, 25 bp, Homo sapien
actctacaaaatcctaaagtcattt

SEQ ID NO: 6069676 - DNA, 25 bp, Homo sapien
tcttttgcaactatatcaccttgtt

SEQ ID NO: 6069677 - DNA, 25 bp, Homo sapien
aagaaagcatcattgaaccagttac

SEQ ID NO: 6069678 - DNA, 25 bp, Homo sapien
ttcattttcgaattctaaaatgtct

SEQ ID NO: 6069679 - DNA, 25 bp, Homo sapien
cctaaagtcatttgttcttcatttt

SEQ ID NO: 6069680 - DNA, 25 bp, Homo sapien
aagaagaaccactagatagaacaag

SEQ ID NO: 6069681 - DNA, 25 bp, Homo sapien
aaggattctgtattagcaactcttc

SEQ ID NO: 6069682 - DNA, 25 bp, Homo sapien
ttatatgcaattgaagaaagcatca

SEQ ID NO: 6069683 - DNA, 25 bp, Homo sapien
caattgcataaacattttctaatga

SEQ ID NO: 6069684 - DNA, 25 bp, Homo sapien
cataaacattttctaatgaagtttt

SEQ ID NO: 6069685 - DNA, 25 bp, Homo sapien
ttgcatctgtgaatttaacaacttt

SEQ ID NO: 6069686 - DNA, 25 bp, Homo sapien
caacaattgaaacttcagaccctaa

SEQ ID NO: 6069687 - DNA, 25 bp, Homo sapien
ccaattatcactagttttttaggag

SEQ ID NO: 6069688 - DNA, 25 bp, Homo sapien
tgatttggatttaattctaagttta

SEQ ID NO: 6069689 - DNA, 25 bp, Homo sapien
ccctaaagcagagaaaagataagca

SEQ ID NO: 6069690 - DNA, 25 bp, Homo sapien
ccaactgcaattaaaactctacaaa

SEQ ID NO: 6069691 - DNA, 25 bp, Homo sapien
tgatttttcttgaagaagaaccact

SEQ ID NO: 6069692 - DNA, 25 bp, Homo sapien
ttgattcaacaattgaaacttcaga

SEQ ID NO: 6069693 - DNA, 25 bp, Homo sapien
gtccttctatgttgatttttcttga

SEQ ID NO: 6069694 - DNA, 25 bp, Homo sapien
ataatcttccttcattttctactag

SEQ ID NO: 6069695 - DNA, 25 bp, Homo sapien
ttgaaccagttacatcaccaattgc

SEQ ID NO: 6069696 - DNA, 25 bp, Homo sapien
aaaatgtcttttgcaactatatcac

SEQ ID NO: 6069697 - DNA, 25 bp, Homo sapien
ttccttcattttctactagttcttg

SEQ ID NO: 6069698 - DNA, 25 bp, Homo sapien
gcaattaaaactctacaaaatccta

SEQ ID NO: 6069699 - DNA, 25 bp, Homo sapien
ctgtgaatttaacaacttttgaatt

SEQ ID NO: 6069700 - DNA, 25 bp, Homo sapien
ttagcaactcttccaactgcaatta

SEQ ID NO: 6069701 - DNA, 25 bp, Homo sapien
tgtaattttgtatcaaagttaccta

SEQ ID NO: 6069702 - DNA, 25 bp, Homo sapien
tccatcttacgaaaccaggccaaga

SEQ ID NO: 6069703 - DNA, 25 bp, Homo sapien
tgcacccacggctccaaagtgccgg

SEQ ID NO: 6069704 - DNA, 25 bp, Homo sapien
cacagtgcaggcttactggggagaa

SEQ ID NO: 6069705 - DNA, 25 bp, Homo sapien
gctggtcaggccatcccgctggaat

SEQ ID NO: 6069706 - DNA, 25 bp, Homo sapien
gcagtgctccatcttacgaaaccag

SEQ ID NO: 6069707 - DNA, 25 bp, Homo sapien
cctgccctgcgtttgctttctgagc

SEQ ID NO: 6069708 - DNA, 25 bp, Homo sapien
aagagcagggcggtcacaagtaaga

SEQ ID NO: 6069709 - DNA, 25 bp, Homo sapien
gccatcccgctggaatcttcattgg

SEQ ID NO: 6069710 - DNA, 25 bp, Homo sapien
tggagggcatggaacccacacacaa

SEQ ID NO: 6069711 - DNA, 25 bp, Homo sapien
gacccaacacgctctgaggactgtg

SEQ ID NO: 6069712 - DNA, 25 bp, Homo sapien
tgcacggggtacctggctgcaccca

SEQ ID NO: 6069713 - DNA, 25 bp, Homo sapien
acatgggacccaacacgctctgagg

SEQ ID NO: 6069714 - DNA, 25 bp, Homo sapien
ggcctgcattccagatagcgctgtc

SEQ ID NO: 6069715 - DNA, 25 bp, Homo sapien
ctctattgaggatatttgggaacac

SEQ ID NO: 6069716 - DNA, 25 bp, Homo sapien
tctttgccagtgtgagccaatagct

SEQ ID NO: 6069717 - DNA, 25 bp, Homo sapien
taaatcttcgaagcaagttccagac

SEQ ID NO: 6069718 - DNA, 25 bp, Homo sapien
tttcatggtgagctcgaggacccca

SEQ ID NO: 6069719 - DNA, 25 bp, Homo sapien
catattcttgagtgggtctccccag

SEQ ID NO: 6069720 - DNA, 25 bp, Homo sapien
caggaagatcaaacctaggattggc

SEQ ID NO: 6069721 - DNA, 25 bp, Homo sapien
tagcgctgtctcataagcttacggg

SEQ ID NO: 6069722 - DNA, 25 bp, Homo sapien
ttctgtggtcgctttctgtagagcc

SEQ ID NO: 6069723 - DNA, 25 bp, Homo sapien
gacattggcctctttgacacggttg

SEQ ID NO: 6069724 - DNA, 25 bp, Homo sapien
tcgaggaccccatagaagctcatat

SEQ ID NO: 6069725 - DNA, 25 bp, Homo sapien
tattcaactggattagagtaggaca

SEQ ID NO: 6069726 - DNA, 25 bp, Homo sapien
ggtccaataggcacaaccctggaca

SEQ ID NO: 6069727 - DNA, 25 bp, Homo sapien
gcactcactgtgagacgcgtccgaa

SEQ ID NO: 6069728 - DNA, 25 bp, Homo sapien
cacgccaggacttgacacgaagctg

SEQ ID NO: 6069729 - DNA, 25 bp, Homo sapien
aaggctcagcatgccccgaattcac

SEQ ID NO: 6069730 - DNA, 25 bp, Homo sapien
cggaacaaaaccttttcactgctga

SEQ ID NO: 6069731 - DNA, 25 bp, Homo sapien
gagtctctcggtctccaaacaaagg

SEQ ID NO: 6069732 - DNA, 25 bp, Homo sapien
tgctgatgacatgtcctgtgaccct

SEQ ID NO: 6069733 - DNA, 25 bp, Homo sapien
tgggctgctgactgcagacctcagg

SEQ ID NO: 6069734 - DNA, 25 bp, Homo sapien
gggacccacatcagtgacgccgtta

SEQ ID NO: 6069735 - DNA, 25 bp, Homo sapien
acaaaggcaagaccccaggttccag

SEQ ID NO: 6069736 - DNA, 25 bp, Homo sapien
ggttccagggaattgccacttgctc

SEQ ID NO: 6069737 - DNA, 25 bp, Homo sapien
tccagcacgtgcaagttctgaaggc

SEQ ID NO: 6069738 - DNA, 25 bp, Homo sapien
tgtatgcttcaacacacttattggg

SEQ ID NO: 6069739 - DNA, 25 bp, Homo sapien
gaataaatggagaagccgcttgggc

SEQ ID NO: 6069740 - DNA, 25 bp, Homo sapien
gaaacgtctgaaaatattactacac

SEQ ID NO: 6069741 - DNA, 25 bp, Homo sapien
cagtgtttgccccaactagattatt

SEQ ID NO: 6069742 - DNA, 25 bp, Homo sapien
tactacactgaattcaagggtatcc

SEQ ID NO: 6069743 - DNA, 25 bp, Homo sapien
tgtatttagacatattagcagcgta

SEQ ID NO: 6069744 - DNA, 25 bp, Homo sapien
ccaggatctgacagctgtgcaacgt

SEQ ID NO: 6069745 - DNA, 25 bp, Homo sapien
gctgtgcaacgtcagaagaaagcat

SEQ ID NO: 6069746 - DNA, 25 bp, Homo sapien
gggtatccaaaggaacctgacatag

SEQ ID NO: 6069747 - DNA, 25 bp, Homo sapien
gctgactttcgctggtgagttacaa

SEQ ID NO: 6069748 - DNA, 25 bp, Homo sapien
ttccatcaagggtatccgaagatac

SEQ ID NO: 6069749 - DNA, 25 bp, Homo sapien
ttacaagaagatccggcactgctgc

SEQ ID NO: 6069750 - DNA, 25 bp, Homo sapien
aaccctgtggtgactgcggcacacc

SEQ ID NO: 6069751 - DNA, 25 bp, Homo sapien
tactggctctaagctttcatcactt

SEQ ID NO: 6069752 - DNA, 25 bp, Homo sapien
tgaggagagcgcgtcactgctattg

SEQ ID NO: 6069753 - DNA, 25 bp, Homo sapien
cgcgtctcaggcacttctgtgaaat

SEQ ID NO: 6069754 - DNA, 25 bp, Homo sapien
tggctgttgccattctttcgtaggg

SEQ ID NO: 6069755 - DNA, 25 bp, Homo sapien
gagcgcgtcactgctattgaatagc

SEQ ID NO: 6069756 - DNA, 25 bp, Homo sapien
gccttggcccaagagtggcatttgt

SEQ ID NO: 6069757 - DNA, 25 bp, Homo sapien
gaatagctccatttaacaccagcca

SEQ ID NO: 6069758 - DNA, 25 bp, Homo sapien
atgtctccgcgtctcaggcacttct

SEQ ID NO: 6069759 - DNA, 25 bp, Homo sapien
ggaccttgagctgcgtgtttgggag

SEQ ID NO: 6069760 - DNA, 25 bp, Homo sapien
taaccacaaagtataaatactggct

SEQ ID NO: 6069761 - DNA, 25 bp, Homo sapien
aaacctcagctgatgttatctgtgg

SEQ ID NO: 6069762 - DNA, 25 bp, Homo sapien
cagcagtcttggcagtcataagggc

SEQ ID NO: 6069763 - DNA, 25 bp, Homo sapien
agtcataagggccacccagacgtca

SEQ ID NO: 6069764 - DNA, 25 bp, Homo sapien
cagtcttggcagtcataagggccac

SEQ ID NO: 6069765 - DNA, 25 bp, Homo sapien
tcttggcagtcataagggccaccca

SEQ ID NO: 6069766 - DNA, 25 bp, Homo sapien
tgcgccctctcccaacaggagggat

SEQ ID NO: 6069767 - DNA, 25 bp, Homo sapien
ataagggccacccagacgtcacggc

SEQ ID NO: 6069768 - DNA, 25 bp, Homo sapien
tggcaggccggtctcccacacggag

SEQ ID NO: 6069769 - DNA, 25 bp, Homo sapien
tggcagtcataagggccacccagac

SEQ ID NO: 6069770 - DNA, 25 bp, Homo sapien
attttctgagctcaaaggcctgacc

SEQ ID NO: 6069771 - DNA, 25 bp, Homo sapien
gggaccaccacgcacactccagtgg

SEQ ID NO: 6069772 - DNA, 25 bp, Homo sapien
tctgagctcaaaggcctgacccttg

SEQ ID NO: 6069773 - DNA, 25 bp, Homo sapien
gccacagcagtcttggcagtcataa

SEQ ID NO: 6069774 - DNA, 25 bp, Homo sapien
tgcgccttagtgatagccttcttag

SEQ ID NO: 6069775 - DNA, 25 bp, Homo sapien
ccttagtgatagccttcttagaacc

SEQ ID NO: 6069776 - DNA, 25 bp, Homo sapien
gccttagtgatagccttcttagaac

SEQ ID NO: 6069777 - DNA, 25 bp, Homo sapien
gcgccttagtgatagccttcttaga

SEQ ID NO: 6069778 - DNA, 25 bp, Homo sapien
ttagtgatagccttcttagaaccct

SEQ ID NO: 6069779 - DNA, 25 bp, Homo sapien
cttagtgatagccttcttagaaccc

SEQ ID NO: 6069780 - DNA, 25 bp, Homo sapien
cgccttagtgatagccttcttagaa

SEQ ID NO: 6069781 - DNA, 25 bp, Homo sapien
tagtgatagccttcttagaaccctt

SEQ ID NO: 6069782 - DNA, 25 bp, Homo sapien
agtgatagccttcttagaacccttt

SEQ ID NO: 6069783 - DNA, 25 bp, Homo sapien
tcaagacataacaggccattacatc

SEQ ID NO: 6069784 - DNA, 25 bp, Homo sapien
tacacttgtaaatctacactcttgg

SEQ ID NO: 6069785 - DNA, 25 bp, Homo sapien
tatacaccgtgaaaacatactagtt

SEQ ID NO: 6069786 - DNA, 25 bp, Homo sapien
tagttccagcatctatgaaaagatg

SEQ ID NO: 6069787 - DNA, 25 bp, Homo sapien
cataatgcagatcgtaggaaaagct

SEQ ID NO: 6069788 - DNA, 25 bp, Homo sapien
ggtgtgactgttcattacctacaga

SEQ ID NO: 6069789 - DNA, 25 bp, Homo sapien
cactgtccaaataaggtggagaagc

SEQ ID NO: 6069790 - DNA, 25 bp, Homo sapien
tggttcaatttatcactgtccaaat

SEQ ID NO: 6069791 - DNA, 25 bp, Homo sapien
cctttagcatctaacaagtgcactc

SEQ ID NO: 6069792 - DNA, 25 bp, Homo sapien
taacaagtgcactctagttccagca

SEQ ID NO: 6069793 - DNA, 25 bp, Homo sapien
gacattttgtgtaaagctcaaacct

SEQ ID NO: 6069794 - DNA, 25 bp, Homo sapien
tcctcttttgaaggttacacttgta

SEQ ID NO: 6069795 - DNA, 25 bp, Homo sapien
cagactattaaatggttacatctta

SEQ ID NO: 6069796 - DNA, 25 bp, Homo sapien
gaatgtaatattgtagtgacagtac

SEQ ID NO: 6069797 - DNA, 25 bp, Homo sapien
tatctgatacaacagaataacattt

SEQ ID NO: 6069798 - DNA, 25 bp, Homo sapien
tcattcaatgttcggagataaaaga

SEQ ID NO: 6069799 - DNA, 25 bp, Homo sapien
tctcattcaatgttcggagataaaa

SEQ ID NO: 6069800 - DNA, 25 bp, Homo sapien
taatattgtagtgacagtactgagg

SEQ ID NO: 6069801 - DNA, 25 bp, Homo sapien
gcagaatgtaatattgtagtgacag

SEQ ID NO: 6069802 - DNA, 25 bp, Homo sapien
agaacagcatctggaaatttatctc

SEQ ID NO: 6069803 - DNA, 25 bp, Homo sapien
cagcatctggaaatttatctcattc

SEQ ID NO: 6069804 - DNA, 25 bp, Homo sapien
aagagttaaacatcctttccattat

SEQ ID NO: 6069805 - DNA, 25 bp, Homo sapien
tcaatgttcggagataaaagagtta

SEQ ID NO: 6069806 - DNA, 25 bp, Homo sapien
gaacagcatctggaaatttatctca

SEQ ID NO: 6069807 - DNA, 25 bp, Homo sapien
gctggtcactccaaaagactgctaa

SEQ ID NO: 6069808 - DNA, 25 bp, Homo sapien
gtgtcatactcagcattttcaccaa

SEQ ID NO: 6069809 - DNA, 25 bp, Homo sapien
tttctaagtctctcacattaatgac

SEQ ID NO: 6069810 - DNA, 25 bp, Homo sapien
ttcatttaggcacatttaatagtcc

SEQ ID NO: 6069811 - DNA, 25 bp, Homo sapien
ggagaaactggtagatgtcttcaac

SEQ ID NO: 6069812 - DNA, 25 bp, Homo sapien
taaaattctatcattcaagcatcaa

SEQ ID NO: 6069813 - DNA, 25 bp, Homo sapien
tcttagtgcaaacatcaaagttgct

SEQ ID NO: 6069814 - DNA, 25 bp, Homo sapien
caagaagaaaagtgtcatactcagc

SEQ ID NO: 6069815 - DNA, 25 bp, Homo sapien
gaatcctctttcaacctctcttgca

SEQ ID NO: 6069816 - DNA, 25 bp, Homo sapien
gactgctaaactcataatagaatac

SEQ ID NO: 6069817 - DNA, 25 bp, Homo sapien
tatgtagctgacatgcatgcaagaa

SEQ ID NO: 6069818 - DNA, 25 bp, Homo sapien
gactaaagcctgtttacagtactaa

SEQ ID NO: 6069819 - DNA, 25 bp, Homo sapien
aacttccatgggttggcaggcatgc

SEQ ID NO: 6069820 - DNA, 25 bp, Homo sapien
ttgaaaaacaggcaactgggatagc

SEQ ID NO: 6069821 - DNA, 25 bp, Homo sapien
gcatatcagtgtgactgtgcaacca

SEQ ID NO: 6069822 - DNA, 25 bp, Homo sapien
tttactatagcactgatgacaaagc

SEQ ID NO: 6069823 - DNA, 25 bp, Homo sapien
catagacatacaatgagaaagagca

SEQ ID NO: 6069824 - DNA, 25 bp, Homo sapien
gcaactgggatagcttttggagccc

SEQ ID NO: 6069825 - DNA, 25 bp, Homo sapien
tgtgcaaccactacaaagcttggcc

SEQ ID NO: 6069826 - DNA, 25 bp, Homo sapien
tacattggtaacctaaatcataggc

SEQ ID NO: 6069827 - DNA, 25 bp, Homo sapien
tgtgggtatgttcatacaatctacc

SEQ ID NO: 6069828 - DNA, 25 bp, Homo sapien
gcaggcatgcaaagcagcaccttga

SEQ ID NO: 6069829 - DNA, 25 bp, Homo sapien
aaaacaactctcagaccatggttaa

SEQ ID NO: 6069830 - DNA, 25 bp, Homo sapien
ggagctatgcactattatctttggg

SEQ ID NO: 6069831 - DNA, 25 bp, Homo sapien
gaaggtatcactatctgtgccacca

SEQ ID NO: 6069832 - DNA, 25 bp, Homo sapien
cagtgtagtttttccaagaatcgaa

SEQ ID NO: 6069833 - DNA, 25 bp, Homo sapien
caattttctgctcagttggaatgac

SEQ ID NO: 6069834 - DNA, 25 bp, Homo sapien
ttgcaacgagcagttctccagacag

SEQ ID NO: 6069835 - DNA, 25 bp, Homo sapien
tcgaaagtgatacggatctgaactt

SEQ ID NO: 6069836 - DNA, 25 bp, Homo sapien
tctgaaagtggctccggaaacttaa

SEQ ID NO: 6069837 - DNA, 25 bp, Homo sapien
ttaagtaatcggttgaaggctgagg

SEQ ID NO: 6069838 - DNA, 25 bp, Homo sapien
gagcagttctccagacagacaaagt

SEQ ID NO: 6069839 - DNA, 25 bp, Homo sapien
tagacacagtctacgtcagtgtagt

SEQ ID NO: 6069840 - DNA, 25 bp, Homo sapien
tgtcactgttcgctcttgcaacgag

SEQ ID NO: 6069841 - DNA, 25 bp, Homo sapien
agaaatgcagaactcaattttctgc

SEQ ID NO: 6069842 - DNA, 25 bp, Homo sapien
ccaagaatcgaaagtgatacggatc

SEQ ID NO: 6069843 - DNA, 25 bp, Homo sapien
gttgaccctatctctgtcttagaag

SEQ ID NO: 6069844 - DNA, 25 bp, Homo sapien
tggggagagcccgtaagcaagcctt

SEQ ID NO: 6069845 - DNA, 25 bp, Homo sapien
tatgggggaatttccaatcaattca

SEQ ID NO: 6069846 - DNA, 25 bp, Homo sapien
gagcccgtaagcaagccttggcctg

SEQ ID NO: 6069847 - DNA, 25 bp, Homo sapien
gaccctatctctgtcttagaaggcg

SEQ ID NO: 6069848 - DNA, 25 bp, Homo sapien
cctatctctgtcttagaaggcgtct

SEQ ID NO: 6069849 - DNA, 25 bp, Homo sapien
tatctctgtcttagaaggcgtctgg

SEQ ID NO: 6069850 - DNA, 25 bp, Homo sapien
ttgttgaccctatctctgtcttaga

SEQ ID NO: 6069851 - DNA, 25 bp, Homo sapien
ggagagcccgtaagcaagccttggc

SEQ ID NO: 6069852 - DNA, 25 bp, Homo sapien
tccccgaaagacttcccattagcat

SEQ ID NO: 6069853 - DNA, 25 bp, Homo sapien
tgtccccgaaagacttcccattagc

SEQ ID NO: 6069854 - DNA, 25 bp, Homo sapien
taattcacgaaaagggccagttctc

SEQ ID NO: 6069855 - DNA, 25 bp, Homo sapien
ttctccagatctcaagacggtgtct

SEQ ID NO: 6069856 - DNA, 25 bp, Homo sapien
caagacggtgtctggcacataccat

SEQ ID NO: 6069857 - DNA, 25 bp, Homo sapien
tgaggacttgcactctctaacggag

SEQ ID NO: 6069858 - DNA, 25 bp, Homo sapien
ggatctgctccatcatagcccgtct

SEQ ID NO: 6069859 - DNA, 25 bp, Homo sapien
gagaaggtcgagcaaccggatctgc

SEQ ID NO: 6069860 - DNA, 25 bp, Homo sapien
tgcgctctgtgactcgcctccaatt

SEQ ID NO: 6069861 - DNA, 25 bp, Homo sapien
gcccgtctcagtcgcttcattcaag

SEQ ID NO: 6069862 - DNA, 25 bp, Homo sapien
tcaatacaagtttggtacctggaac

SEQ ID NO: 6069863 - DNA, 25 bp, Homo sapien
cctggaacccactgaatatgcatgt

SEQ ID NO: 6069864 - DNA, 25 bp, Homo sapien
tccaacttcacaagggcagatttct

SEQ ID NO: 6069865 - DNA, 25 bp, Homo sapien
tgacactaccgaaggacgggagttc

SEQ ID NO: 6069866 - DNA, 25 bp, Homo sapien
cacagctgcctctaagtagtgacac

SEQ ID NO: 6069867 - DNA, 25 bp, Homo sapien
gattaaggcgacagcgatttctagg

SEQ ID NO: 6069868 - DNA, 25 bp, Homo sapien
gatagtcagtagaattagaattgtg

SEQ ID NO: 6069869 - DNA, 25 bp, Homo sapien
ctgttagtagtatagtgatgccagc

SEQ ID NO: 6069870 - DNA, 25 bp, Homo sapien
ccgaaaaatcagaataggtgttggt

SEQ ID NO: 6069871 - DNA, 25 bp, Homo sapien
ggtctgttagtagtatagtgatgcc

SEQ ID NO: 6069872 - DNA, 25 bp, Homo sapien
cagcgatttctaggatagtcagtag

SEQ ID NO: 6069873 - DNA, 25 bp, Homo sapien
gcgacagcgatttctaggatagtca

SEQ ID NO: 6069874 - DNA, 25 bp, Homo sapien
taaggcgacagcgatttctaggata

SEQ ID NO: 6069875 - DNA, 25 bp, Homo sapien
aacttcagggtgaccgaaaaatcag

SEQ ID NO: 6069876 - DNA, 25 bp, Homo sapien
ggtgaccgaaaaatcagaataggtg

SEQ ID NO: 6069877 - DNA, 25 bp, Homo sapien
gaattgtgaagatgataagtgtaga

SEQ ID NO: 6069878 - DNA, 25 bp, Homo sapien
tggcgcttccaattaggtgcatgag

SEQ ID NO: 6069879 - DNA, 25 bp, Homo sapien
gcgacagcgatttccggagtagtaa

SEQ ID NO: 6069880 - DNA, 25 bp, Homo sapien
gttagcggttaggcgacagcgattt

SEQ ID NO: 6069881 - DNA, 25 bp, Homo sapien
ggcgacagcgatttccggagtagta

SEQ ID NO: 6069882 - DNA, 25 bp, Homo sapien
caagataggaaccaggaacactgcc

SEQ ID NO: 6069883 - DNA, 25 bp, Homo sapien
tattcagtgtatcttcgtccagact

SEQ ID NO: 6069884 - DNA, 25 bp, Homo sapien
tatcttcgtccagactactgttaag

SEQ ID NO: 6069885 - DNA, 25 bp, Homo sapien
cgtccagactactgttaagatcctg

SEQ ID NO: 6069886 - DNA, 25 bp, Homo sapien
gactactgttaagatcctgcagagg

SEQ ID NO: 6069887 - DNA, 25 bp, Homo sapien
tactgttaagatcctgcagagggcg

SEQ ID NO: 6069888 - DNA, 25 bp, Homo sapien
tgcaattttattcagtgtatcttcg

SEQ ID NO: 6069889 - DNA, 25 bp, Homo sapien
cagactactgttaagatcctgcaga

SEQ ID NO: 6069890 - DNA, 25 bp, Homo sapien
ttatattcagcccaacatctcaatt

SEQ ID NO: 6069891 - DNA, 25 bp, Homo sapien
cagcccaacatctcaatttattcag

SEQ ID NO: 6069892 - DNA, 25 bp, Homo sapien
tcagtgtatcttcgtccagactact

SEQ ID NO: 6069893 - DNA, 25 bp, Homo sapien
ttttattcagtgtatcttcgtccag

SEQ ID NO: 6069894 - DNA, 25 bp, Homo sapien
tgttaagatcctgcagagggcgttt

SEQ ID NO: 6069895 - DNA, 25 bp, Homo sapien
tcttgagctggtcaacttccatctt

SEQ ID NO: 6069896 - DNA, 25 bp, Homo sapien
cttctttcttgagctggtcaacttc

SEQ ID NO: 6069897 - DNA, 25 bp, Homo sapien
tcgccagatcgttcttcaacgtaat

SEQ ID NO: 6069898 - DNA, 25 bp, Homo sapien
gatgccctttaccagtggatcctcg

SEQ ID NO: 6069899 - DNA, 25 bp, Homo sapien
cctttaccagtggatcctcgccaga

SEQ ID NO: 6069900 - DNA, 25 bp, Homo sapien
taccagtggatcctcgccagatcgt

SEQ ID NO: 6069901 - DNA, 25 bp, Homo sapien
ggtcctcaatattgattactggcat

SEQ ID NO: 6069902 - DNA, 25 bp, Homo sapien
ctgggatgccctttaccagtggatc

SEQ ID NO: 6069903 - DNA, 25 bp, Homo sapien
tctttcttgagctggtcaacttcca

SEQ ID NO: 6069904 - DNA, 25 bp, Homo sapien
tctgtcaggtcctcaatattgatta

SEQ ID NO: 6069905 - DNA, 25 bp, Homo sapien
tggatcctcgccagatcgttcttca

SEQ ID NO: 6069906 - DNA, 25 bp, Homo sapien
tcttcaacgtaatctcttacttctt

SEQ ID NO: 6069907 - DNA, 25 bp, Homo sapien
atcttaagctgctctaccagcttcc

SEQ ID NO: 6069908 - DNA, 25 bp, Homo sapien
tatcctgtcgatattggcttccatc

SEQ ID NO: 6069909 - DNA, 25 bp, Homo sapien
tgctggcggtgttgttgctggccat

SEQ ID NO: 6069910 - DNA, 25 bp, Homo sapien
ctttatcctgtcgatattggcttcc

SEQ ID NO: 6069911 - DNA, 25 bp, Homo sapien
tcttaagctgctctaccagcttcct

SEQ ID NO: 6069912 - DNA, 25 bp, Homo sapien
cctggcttgtgctatgctggcggtg

SEQ ID NO: 6069913 - DNA, 25 bp, Homo sapien
tttatcctgtcgatattggcttcca

SEQ ID NO: 6069914 - DNA, 25 bp, Homo sapien
cttgtgctatgctggcggtgttgtt

SEQ ID NO: 6069915 - DNA, 25 bp, Homo sapien
tttctgaagccggaacaggggtcag

SEQ ID NO: 6069916 - DNA, 25 bp, Homo sapien
ttatcctgtcgatattggcttccat

SEQ ID NO: 6069917 - DNA, 25 bp, Homo sapien
tatgctggcggtgttgttgctggcc

SEQ ID NO: 6069918 - DNA, 25 bp, Homo sapien
ttaagctgctctaccagcttcctgg

SEQ ID NO: 6069919 - DNA, 25 bp, Homo sapien
gcgtgcttgcccaatactcatagtg

SEQ ID NO: 6069920 - DNA, 25 bp, Homo sapien
agtcatcaggtctgctgctgccttg

SEQ ID NO: 6069921 - DNA, 25 bp, Homo sapien
ggcttcaatcttaagctgttccacc

SEQ ID NO: 6069922 - DNA, 25 bp, Homo sapien
tcttgcgtgcttgcccaatactcat

SEQ ID NO: 6069923 - DNA, 25 bp, Homo sapien
ctttatccgacacaagctggcttca

SEQ ID NO: 6069924 - DNA, 25 bp, Homo sapien
ttcaatcttaagctgttccaccatc

SEQ ID NO: 6069925 - DNA, 25 bp, Homo sapien
tgggcatcacagtaagtcatcaggt

SEQ ID NO: 6069926 - DNA, 25 bp, Homo sapien
caggcgtgggcatcacagtaagtca

SEQ ID NO: 6069927 - DNA, 25 bp, Homo sapien
cctcacaggcgtgggcatcacagta

SEQ ID NO: 6069928 - DNA, 25 bp, Homo sapien
caccatcttgcgtgcttgcccaata

SEQ ID NO: 6069929 - DNA, 25 bp, Homo sapien
aatactcatagtgctgttcaccggg

SEQ ID NO: 6069930 - DNA, 25 bp, Homo sapien
cacagtaagtcatcaggtctgctgc

SEQ ID NO: 6069931 - DNA, 25 bp, Homo sapien
atgagaggatcttcccgcacgtgag

SEQ ID NO: 6069932 - DNA, 25 bp, Homo sapien
ggagatgctagtggtgctgttatta

SEQ ID NO: 6069933 - DNA, 25 bp, Homo sapien
ttcccgcacgtgagcttcacagtag

SEQ ID NO: 6069934 - DNA, 25 bp, Homo sapien
tccatacaggcttccatctttagct

SEQ ID NO: 6069935 - DNA, 25 bp, Homo sapien
aggatcttcccgcacgtgagcttca

SEQ ID NO: 6069936 - DNA, 25 bp, Homo sapien
ggcttgggagatgctagtggtgctg

SEQ ID NO: 6069937 - DNA, 25 bp, Homo sapien
ctagtggtgctgttattagacatgc

SEQ ID NO: 6069938 - DNA, 25 bp, Homo sapien
gatgctagtggtgctgttattagac

SEQ ID NO: 6069939 - DNA, 25 bp, Homo sapien
caggcactggaatgatgagaggatc

SEQ ID NO: 6069940 - DNA, 25 bp, Homo sapien
tgatgcaggcactggaatgatgaga

SEQ ID NO: 6069941 - DNA, 25 bp, Homo sapien
tcttcccgcacgtgagcttcacagt

SEQ ID NO: 6069942 - DNA, 25 bp, Homo sapien
ccgcacgtgagcttcacagtaggcc

SEQ ID NO: 6069943 - DNA, 25 bp, Homo sapien
gcggttgagtccggcctccagccgg

SEQ ID NO: 6069944 - DNA, 25 bp, Homo sapien
cggttgagtccggcctccagccgga

SEQ ID NO: 6069945 - DNA, 25 bp, Homo sapien
ctatgcgtagctgttccaccagctt

SEQ ID NO: 6069946 - DNA, 25 bp, Homo sapien
ggagaccttgatgcgctcaatcccg

SEQ ID NO: 6069947 - DNA, 25 bp, Homo sapien
caatcccggcttctatgcgtagctg

SEQ ID NO: 6069948 - DNA, 25 bp, Homo sapien
tccgaggcagggactccgaccagca

SEQ ID NO: 6069949 - DNA, 25 bp, Homo sapien
gttccgggcatgttgctcacagtag

SEQ ID NO: 6069950 - DNA, 25 bp, Homo sapien
tgcgctcaatcccggcttctatgcg

SEQ ID NO: 6069951 - DNA, 25 bp, Homo sapien
ggttctccgaggcagggactccgac

SEQ ID NO: 6069952 - DNA, 25 bp, Homo sapien
ttccaccagcttccgggcctgggct

SEQ ID NO: 6069953 - DNA, 25 bp, Homo sapien
cgggcctgggctatgttgttagtgg

SEQ ID NO: 6069954 - DNA, 25 bp, Homo sapien
ggcatgttgctcacagtagctcatg

SEQ ID NO: 6069955 - DNA, 25 bp, Homo sapien
gaccagcagggggtcgttccgggca

SEQ ID NO: 6069956 - DNA, 25 bp, Homo sapien
gactccgaccagcagggggtcgttc

SEQ ID NO: 6069957 - DNA, 25 bp, Homo sapien
ggcagggactccgaccagcaggggg

SEQ ID NO: 6069958 - DNA, 25 bp, Homo sapien
gctcatgaggtcagacgccgctttg

SEQ ID NO: 6069959 - DNA, 25 bp, Homo sapien
agacgccgctttggagaccttgatg

SEQ ID NO: 6069960 - DNA, 25 bp, Homo sapien
ggtcgttccgggcatgttgctcaca

SEQ ID NO: 6069961 - DNA, 25 bp, Homo sapien
agcttccgggcctgggctatgttgt

SEQ ID NO: 6069962 - DNA, 25 bp, Homo sapien
cgctttggagaccttgatgcgctca

SEQ ID NO: 6069963 - DNA, 25 bp, Homo sapien
ttgctcacagtagctcatgaggtca

SEQ ID NO: 6069964 - DNA, 25 bp, Homo sapien
gtagctgttccaccagcttccgggc

SEQ ID NO: 6069965 - DNA, 25 bp, Homo sapien
tgggctatgttgttagtggctgaca

SEQ ID NO: 6069966 - DNA, 25 bp, Homo sapien
cggcttctatgcgtagctgttccac

SEQ ID NO: 6069967 - DNA, 25 bp, Homo sapien
acagtagctcatgaggtcagacgcc

SEQ ID NO: 6069968 - DNA, 25 bp, Homo sapien
gaggtcagacgccgctttggagacc

SEQ ID NO: 6069969 - DNA, 25 bp, Homo sapien
gcagggggtcgttccgggcatgttg

SEQ ID NO: 6069970 - DNA, 25 bp, Homo sapien
cttgatgcgctcaatcccggcttct

SEQ ID NO: 6069971 - DNA, 25 bp, Homo sapien
tcatctttggcatgcgtctcgcaga

SEQ ID NO: 6069972 - DNA, 25 bp, Homo sapien
atgcgtctcgcagaaagccaggagt

SEQ ID NO: 6069973 - DNA, 25 bp, Homo sapien
ggtactggcgtcaccagcgggtcat

SEQ ID NO: 6069974 - DNA, 25 bp, Homo sapien
tgttccaccgtcttgcgggcctcgg

SEQ ID NO: 6069975 - DNA, 25 bp, Homo sapien
ccaggagttccgctgctgcctgcga

SEQ ID NO: 6069976 - DNA, 25 bp, Homo sapien
ctggcgtcaccagcgggtcatcttt

SEQ ID NO: 6069977 - DNA, 25 bp, Homo sapien
cgggcctcggcaatcttggccatgt

SEQ ID NO: 6069978 - DNA, 25 bp, Homo sapien
tctccgcggcgggtactggcgtcac

SEQ ID NO: 6069979 - DNA, 25 bp, Homo sapien
ttggcatgcgtctcgcagaaagcca

SEQ ID NO: 6069980 - DNA, 25 bp, Homo sapien
agctgttccaccgtcttgcgggcct

SEQ ID NO: 6069981 - DNA, 25 bp, Homo sapien
cttcatgcggtcgatgttcacctcc

SEQ ID NO: 6069982 - DNA, 25 bp, Homo sapien
aggagttccgctgctgcctgcgaca

SEQ ID NO: 6069983 - DNA, 25 bp, Homo sapien
tttgagaaaaggatcgtttcctgct

SEQ ID NO: 6069984 - DNA, 25 bp, Homo sapien
cctttgagaaaaggatcgtttcctg

SEQ ID NO: 6069985 - DNA, 25 bp, Homo sapien
ttgagaaaaggatcgtttcctgctt

SEQ ID NO: 6069986 - DNA, 25 bp, Homo sapien
gagaaaaggatcgtttcctgcttgg

SEQ ID NO: 6069987 - DNA, 25 bp, Homo sapien
tgagaaaaggatcgtttcctgcttg

SEQ ID NO: 6069988 - DNA, 25 bp, Homo sapien
ctgcttgggcctccacgtactcctt

SEQ ID NO: 6069989 - DNA, 25 bp, Homo sapien
ctttgagaaaaggatcgtttcctgc

SEQ ID NO: 6069990 - DNA, 25 bp, Homo sapien
tgttgaagctctgcagctgcctgag

SEQ ID NO: 6069991 - DNA, 25 bp, Homo sapien
caacttgagctgctctaccaagcgc

SEQ ID NO: 6069992 - DNA, 25 bp, Homo sapien
gcaggcattctgcatacagtactgt

SEQ ID NO: 6069993 - DNA, 25 bp, Homo sapien
tacagtactgttgaagctctgcagc

SEQ ID NO: 6069994 - DNA, 25 bp, Homo sapien
gagctgctctaccaagcgctgcagg

SEQ ID NO: 6069995 - DNA, 25 bp, Homo sapien
tctaccaagcgctgcagggcgctcg

SEQ ID NO: 6069996 - DNA, 25 bp, Homo sapien
gctggaacacccaccagcagggcat

SEQ ID NO: 6069997 - DNA, 25 bp, Homo sapien
acttgagctgctctaccaagcgctg

SEQ ID NO: 6069998 - DNA, 25 bp, Homo sapien
gctgcctgagagaccttgatcctct

SEQ ID NO: 6069999 - DNA, 25 bp, Homo sapien
gggttacttccagctggaacaccca

SEQ ID NO: 6070000 - DNA, 25 bp, Homo sapien
ctgctctaccaagcgctgcagggcg

SEQ ID NO: 6070001 - DNA, 25 bp, Homo sapien
cagcagggcatccttgcaggcattc

SEQ ID NO: 6070002 - DNA, 25 bp, Homo sapien
cacttctttgcgaagctgctcaact

SEQ ID NO: 6070003 - DNA, 25 bp, Homo sapien
tcacttctttgcgaagctgctcaac

SEQ ID NO: 6070004 - DNA, 25 bp, Homo sapien
aacttcacttctttgcgaagctgct

SEQ ID NO: 6070005 - DNA, 25 bp, Homo sapien
tccctttactagaggatcctctcca

SEQ ID NO: 6070006 - DNA, 25 bp, Homo sapien
tttgcgaagctgctcaacttccatt

SEQ ID NO: 6070007 - DNA, 25 bp, Homo sapien
ttccctttactagaggatcctctcc

SEQ ID NO: 6070008 - DNA, 25 bp, Homo sapien
cttcacttctttgcgaagctgctca

SEQ ID NO: 6070009 - DNA, 25 bp, Homo sapien
gaattccctttactagaggatcctc

SEQ ID NO: 6070010 - DNA, 25 bp, Homo sapien
tctttgcgaagctgctcaacttcca

SEQ ID NO: 6070011 - DNA, 25 bp, Homo sapien
ttctttgcgaagctgctcaacttcc

SEQ ID NO: 6070012 - DNA, 25 bp, Homo sapien
tgcgaagctgctcaacttccatttt

SEQ ID NO: 6070013 - DNA, 25 bp, Homo sapien
cgaagctgctcaacttccattttca

SEQ ID NO: 6070014 - DNA, 25 bp, Homo sapien
catgaggtccgctgatgccttcgaa

SEQ ID NO: 6070015 - DNA, 25 bp, Homo sapien
cctgggctatattgttggtgcttgc

SEQ ID NO: 6070016 - DNA, 25 bp, Homo sapien
tgaggtccgctgatgccttcgaaac

SEQ ID NO: 6070017 - DNA, 25 bp, Homo sapien
tctttcaatggaggcttctaatctt

SEQ ID NO: 6070018 - DNA, 25 bp, Homo sapien
tgaagttggtattcctatcagcaaa

SEQ ID NO: 6070019 - DNA, 25 bp, Homo sapien
atgttcctcacagtaggacatgagg

SEQ ID NO: 6070020 - DNA, 25 bp, Homo sapien
tctgaagttggtattcctatcagca

SEQ ID NO: 6070021 - DNA, 25 bp, Homo sapien
ccttgcctgggctatattgttggtg

SEQ ID NO: 6070022 - DNA, 25 bp, Homo sapien
ttctttcaatggaggcttctaatct

SEQ ID NO: 6070023 - DNA, 25 bp, Homo sapien
agtaggacatgaggtccgctgatgc

SEQ ID NO: 6070024 - DNA, 25 bp, Homo sapien
acatgaggtccgctgatgccttcga

SEQ ID NO: 6070025 - DNA, 25 bp, Homo sapien
taggacatgaggtccgctgatgcct

SEQ ID NO: 6070026 - DNA, 25 bp, Homo sapien
ttggacgccatctcccgctggaagg

SEQ ID NO: 6070027 - DNA, 25 bp, Homo sapien
cttggacgccatctcccgctggaag

SEQ ID NO: 6070028 - DNA, 25 bp, Homo sapien
tggggatcccgtcctcgatccactt

SEQ ID NO: 6070029 - DNA, 25 bp, Homo sapien
gtcttggacgccatctcccgctgga

SEQ ID NO: 6070030 - DNA, 25 bp, Homo sapien
ttggggatcccgtcctcgatccact

SEQ ID NO: 6070031 - DNA, 25 bp, Homo sapien
gtccttggggatcccgtcctcgatc

SEQ ID NO: 6070032 - DNA, 25 bp, Homo sapien
cttggggatcccgtcctcgatccac

SEQ ID NO: 6070033 - DNA, 25 bp, Homo sapien
tggacgccatctcccgctggaaggc

SEQ ID NO: 6070034 - DNA, 25 bp, Homo sapien
tcttggacgccatctcccgctggaa

SEQ ID NO: 6070035 - DNA, 25 bp, Homo sapien
aatgccgccagagcggccggatctt

SEQ ID NO: 6070036 - DNA, 25 bp, Homo sapien
taatgccgccagagcggccggatct

SEQ ID NO: 6070037 - DNA, 25 bp, Homo sapien
cgagcctcatcgatgcggtcgcggt

SEQ ID NO: 6070038 - DNA, 25 bp, Homo sapien
cgcggtcggcgcagtccactacgaa

SEQ ID NO: 6070039 - DNA, 25 bp, Homo sapien
gagcctcatcgatgcggtcgcggtc

SEQ ID NO: 6070040 - DNA, 25 bp, Homo sapien
tcgcggtcggcgcagtccactacga

SEQ ID NO: 6070041 - DNA, 25 bp, Homo sapien
tggcgagcctcatcgatgcggtcgc

SEQ ID NO: 6070042 - DNA, 25 bp, Homo sapien
tagtaatgccgccagagcggccgga

SEQ ID NO: 6070043 - DNA, 25 bp, Homo sapien
ctggcgagcctcatcgatgcggtcg

SEQ ID NO: 6070044 - DNA, 25 bp, Homo sapien
cagtgtagtaatgccgccagagcgg

SEQ ID NO: 6070045 - DNA, 25 bp, Homo sapien
agcctcatcgatgcggtcgcggtcg

SEQ ID NO: 6070046 - DNA, 25 bp, Homo sapien
agtaatgccgccagagcggccggat

SEQ ID NO: 6070047 - DNA, 25 bp, Homo sapien
tccaaactcaatataagaatccgca

SEQ ID NO: 6070048 - DNA, 25 bp, Homo sapien
ttatacaagatggtggtttttccag

SEQ ID NO: 6070049 - DNA, 25 bp, Homo sapien
ccaaactcaatataagaatccgcat

SEQ ID NO: 6070050 - DNA, 25 bp, Homo sapien
tttatacaagatggtggtttttcca

SEQ ID NO: 6070051 - DNA, 25 bp, Homo sapien
cagttgtctttccagcacagtccaa

SEQ ID NO: 6070052 - DNA, 25 bp, Homo sapien
tggacaggatagaagtctggtctga

SEQ ID NO: 6070053 - DNA, 25 bp, Homo sapien
gacagttgtctttccagcacagtcc

SEQ ID NO: 6070054 - DNA, 25 bp, Homo sapien
tgaactgcagcctgtataagacagt

SEQ ID NO: 6070055 - DNA, 25 bp, Homo sapien
acagttgtctttccagcacagtcca

SEQ ID NO: 6070056 - DNA, 25 bp, Homo sapien
tgcagcctgtataagacagttgtct

SEQ ID NO: 6070057 - DNA, 25 bp, Homo sapien
cttcctttaggccatctcctatgat

SEQ ID NO: 6070058 - DNA, 25 bp, Homo sapien
cctttaggccatctcctatgattgc

SEQ ID NO: 6070059 - DNA, 25 bp, Homo sapien
ttgaactgcagcctgtataagacag

SEQ ID NO: 6070060 - DNA, 25 bp, Homo sapien
actgcagcctgtataagacagttgt

SEQ ID NO: 6070061 - DNA, 25 bp, Homo sapien
aagacagttgtctttccagcacagt

SEQ ID NO: 6070062 - DNA, 25 bp, Homo sapien
tcctttaggccatctcctatgattg

SEQ ID NO: 6070063 - DNA, 25 bp, Homo sapien
caacatgacgatatgcagggactgg

SEQ ID NO: 6070064 - DNA, 25 bp, Homo sapien
tgcagcggctgtaggacttccacag

SEQ ID NO: 6070065 - DNA, 25 bp, Homo sapien
tcgttgaacttgagccggtagagca

SEQ ID NO: 6070066 - DNA, 25 bp, Homo sapien
tggccgtgccgttgctcagcttgat

SEQ ID NO: 6070067 - DNA, 25 bp, Homo sapien
gagcttgtccatgccctcggtgagg

SEQ ID NO: 6070068 - DNA, 25 bp, Homo sapien
tggttctcggcgaacttggtcacct

SEQ ID NO: 6070069 - DNA, 25 bp, Homo sapien
accggcagcgacttgggcaggtcct

SEQ ID NO: 6070070 - DNA, 25 bp, Homo sapien
gccgggataagctcgtgcagcgcca

SEQ ID NO: 6070071 - DNA, 25 bp, Homo sapien
tgggcaccgtgttcacgaactcgtt

SEQ ID NO: 6070072 - DNA, 25 bp, Homo sapien
tgcttgttggcgatgaccagcagcg

SEQ ID NO: 6070073 - DNA, 25 bp, Homo sapien
tagatgatgccgtccgtgcagcggc

SEQ ID NO: 6070074 - DNA, 25 bp, Homo sapien
cctgcgtttcaggatcatctcatag

SEQ ID NO: 6070075 - DNA, 25 bp, Homo sapien
cactttgttcccaaccaagatgact

SEQ ID NO: 6070076 - DNA, 25 bp, Homo sapien
ctcactttccaggtccactttgttc

SEQ ID NO: 6070077 - DNA, 25 bp, Homo sapien
gcagcatagttcatctgcctcacaa

SEQ ID NO: 6070078 - DNA, 25 bp, Homo sapien
ctcgatctccttgcggtagaagtcc

SEQ ID NO: 6070079 - DNA, 25 bp, Homo sapien
gtcagggcggatttgcctaccccgc

SEQ ID NO: 6070080 - DNA, 25 bp, Homo sapien
tactcttagcggaagtttccataaa

SEQ ID NO: 6070081 - DNA, 25 bp, Homo sapien
tgcctcacaatttctgcaaagagtt

SEQ ID NO: 6070082 - DNA, 25 bp, Homo sapien
tctgccttcgctggacgatacttct

SEQ ID NO: 6070083 - DNA, 25 bp, Homo sapien
cacggtcagggcggatttgcctacc

SEQ ID NO: 6070084 - DNA, 25 bp, Homo sapien
aggctgagcagcatagttcatctgc

SEQ ID NO: 6070085 - DNA, 25 bp, Homo sapien
cattgttttactcttagcggaagtt

SEQ ID NO: 6070086 - DNA, 25 bp, Homo sapien
gcggaagtttccataaaggggcagc

SEQ ID NO: 6070087 - DNA, 25 bp, Homo sapien
ttttggccgacgtctccatgaaggg

SEQ ID NO: 6070088 - DNA, 25 bp, Homo sapien
actgcacggtgagcgcggacttgcc

SEQ ID NO: 6070089 - DNA, 25 bp, Homo sapien
ctcgtctaccgaggctttgtttttg

SEQ ID NO: 6070090 - DNA, 25 bp, Homo sapien
ggctgcgccgcgtagttcatctgcc

SEQ ID NO: 6070091 - DNA, 25 bp, Homo sapien
gatctcggcaaatagctcgtctacc

SEQ ID NO: 6070092 - DNA, 25 bp, Homo sapien
ctcaatctccttgcggtaaaagtct

SEQ ID NO: 6070093 - DNA, 25 bp, Homo sapien
tgccgcacgatctcggcaaatagct

SEQ ID NO: 6070094 - DNA, 25 bp, Homo sapien
acgaactgcacggtgagcgcggact

SEQ ID NO: 6070095 - DNA, 25 bp, Homo sapien
ttcgatggtcgggtcgtacttctcg

SEQ ID NO: 6070096 - DNA, 25 bp, Homo sapien
gccgcgtagttcatctgccgcacga

SEQ ID NO: 6070097 - DNA, 25 bp, Homo sapien
ttgtttttggccgacgtctccatga

SEQ ID NO: 6070098 - DNA, 25 bp, Homo sapien
tgcggtaaaagtcttcgatggtcgg

SEQ ID NO: 6070099 - DNA, 25 bp, Homo sapien
gctcgaagacttgggtttatatccc

SEQ ID NO: 6070100 - DNA, 25 bp, Homo sapien
cgttgccggctcgaagacttgggtt

SEQ ID NO: 6070101 - DNA, 25 bp, Homo sapien
tgtaggccgctgcaaaggcctccaa

SEQ ID NO: 6070102 - DNA, 25 bp, Homo sapien
gcgtgcctttgtaggccgctgcaaa

SEQ ID NO: 6070103 - DNA, 25 bp, Homo sapien
ggaagccgatgacagtgagagccat

SEQ ID NO: 6070104 - DNA, 25 bp, Homo sapien
ccatagggcatatagtgggtggcca

SEQ ID NO: 6070105 - DNA, 25 bp, Homo sapien
ttctgtaggagctcatgtggtcgcc

SEQ ID NO: 6070106 - DNA, 25 bp, Homo sapien
aggcactgggttgtcacggccagcc

SEQ ID NO: 6070107 - DNA, 25 bp, Homo sapien
cgtcgagcgcactgccaggtaggct

SEQ ID NO: 6070108 - DNA, 25 bp, Homo sapien
tggtcgccggcggaacttcttctgg

SEQ ID NO: 6070109 - DNA, 25 bp, Homo sapien
cagacagtgcggttacgctggatgc

SEQ ID NO: 6070110 - DNA, 25 bp, Homo sapien
gcaaacggccgcgtgcctttgtagg

SEQ ID NO: 6070111 - DNA, 25 bp, Homo sapien
acagtgagagccatgccatagggca

SEQ ID NO: 6070112 - DNA, 25 bp, Homo sapien
catagcagacagtgcggttacgctg

SEQ ID NO: 6070113 - DNA, 25 bp, Homo sapien
ggctatacgctctgtaggccgccag

SEQ ID NO: 6070114 - DNA, 25 bp, Homo sapien
agtgctcttggcgtcctctgggttc

SEQ ID NO: 6070115 - DNA, 25 bp, Homo sapien
tgtggcctgggctatgtctgcaaag

SEQ ID NO: 6070116 - DNA, 25 bp, Homo sapien
tatgtctgcaaagctcgggcagcgg

SEQ ID NO: 6070117 - DNA, 25 bp, Homo sapien
tggccagtgctcttggcgtcctctg

SEQ ID NO: 6070118 - DNA, 25 bp, Homo sapien
ccagcaccaggctatacgctctgta

SEQ ID NO: 6070119 - DNA, 25 bp, Homo sapien
gcatcacctggtagcccacgtaggg

SEQ ID NO: 6070120 - DNA, 25 bp, Homo sapien
atccacgttgagcacccgcatgatg

SEQ ID NO: 6070121 - DNA, 25 bp, Homo sapien
agctggcgtagagggccacaccact

SEQ ID NO: 6070122 - DNA, 25 bp, Homo sapien
ctcgggcctggccacgctgcagttg

SEQ ID NO: 6070123 - DNA, 25 bp, Homo sapien
tgcggcctcttcaggtgggagaagc

SEQ ID NO: 6070124 - DNA, 25 bp, Homo sapien
cccgcatgatgtggtagggcacata

SEQ ID NO: 6070125 - DNA, 25 bp, Homo sapien
catgatggctggaaaacatcgcggc

SEQ ID NO: 6070126 - DNA, 25 bp, Homo sapien
gttcaaggatgaattagcccaccca

SEQ ID NO: 6070127 - DNA, 25 bp, Homo sapien
gaactttccggttgagaacattcga

SEQ ID NO: 6070128 - DNA, 25 bp, Homo sapien
caaagtctgtagcatcctaagaggg

SEQ ID NO: 6070129 - DNA, 25 bp, Homo sapien
tatggcattattcgtcgcagggcaa

SEQ ID NO: 6070130 - DNA, 25 bp, Homo sapien
gagagacgtcagtgtcatagtccaa

SEQ ID NO: 6070131 - DNA, 25 bp, Homo sapien
taagagggttgaaaatgccttccga

SEQ ID NO: 6070132 - DNA, 25 bp, Homo sapien
taaaccagattgcactccttggaga

SEQ ID NO: 6070133 - DNA, 25 bp, Homo sapien
gatactcaccgtctctatggcatta

SEQ ID NO: 6070134 - DNA, 25 bp, Homo sapien
cacagcatgtgggatcaggtaaacc

SEQ ID NO: 6070135 - DNA, 25 bp, Homo sapien
gacagcttctccaagggtctggcga

SEQ ID NO: 6070136 - DNA, 25 bp, Homo sapien
catgatcaccgacagagtcttcagg

SEQ ID NO: 6070137 - DNA, 25 bp, Homo sapien
tcggttacagttacacaaagggtca

SEQ ID NO: 6070138 - DNA, 25 bp, Homo sapien
acagttacacaaagggtcacttcct

SEQ ID NO: 6070139 - DNA, 25 bp, Homo sapien
tacagttacacaaagggtcacttcc

SEQ ID NO: 6070140 - DNA, 25 bp, Homo sapien
ggaatcatttctgcggagctttcaa

SEQ ID NO: 6070141 - DNA, 25 bp, Homo sapien
ttacagttacacaaagggtcacttc

SEQ ID NO: 6070142 - DNA, 25 bp, Homo sapien
cagttacacaaagggtcacttcctc

SEQ ID NO: 6070143 - DNA, 25 bp, Homo sapien
ccagcacaaacagcgtcttgcggct

SEQ ID NO: 6070144 - DNA, 25 bp, Homo sapien
tgcgctctgcgttttgtcgaagacc

SEQ ID NO: 6070145 - DNA, 25 bp, Homo sapien
cagaagttccggttatagaagtggt

SEQ ID NO: 6070146 - DNA, 25 bp, Homo sapien
tgtccctggtcagggccatgcccag

SEQ ID NO: 6070147 - DNA, 25 bp, Homo sapien
cagtctgccactgcgctctgcgttt

SEQ ID NO: 6070148 - DNA, 25 bp, Homo sapien
aagagaccactgacccggtccgtgt

SEQ ID NO: 6070149 - DNA, 25 bp, Homo sapien
aagctggcgcgcaagagaccactga

SEQ ID NO: 6070150 - DNA, 25 bp, Homo sapien
gaagctcgttgtacacccagtctgc

SEQ ID NO: 6070151 - DNA, 25 bp, Homo sapien
ggtggcaccgtgcaggattccggct

SEQ ID NO: 6070152 - DNA, 25 bp, Homo sapien
gcgttttgtcgaagaccacgaaggc

SEQ ID NO: 6070153 - DNA, 25 bp, Homo sapien
tcttgcggctgccatagaccgaggc

SEQ ID NO: 6070154 - DNA, 25 bp, Homo sapien
cccggtccgtgtgggccagcacaaa

SEQ ID NO: 6070155 - DNA, 25 bp, Homo sapien
tggcatcttgatcaccacttcggag

SEQ ID NO: 6070156 - DNA, 25 bp, Homo sapien
gggatcttgcgccagcgtctcttgt

SEQ ID NO: 6070157 - DNA, 25 bp, Homo sapien
ccagcaccatgatgttgtacggtgt

SEQ ID NO: 6070158 - DNA, 25 bp, Homo sapien
gatcacgccctttcttagtcggcct

SEQ ID NO: 6070159 - DNA, 25 bp, Homo sapien
atggcactcagggtccgagccgcct

SEQ ID NO: 6070160 - DNA, 25 bp, Homo sapien
gctttgttgcagagtgcgtagcaca

SEQ ID NO: 6070161 - DNA, 25 bp, Homo sapien
cttgaccagcgagaaggtcttccgc

SEQ ID NO: 6070162 - DNA, 25 bp, Homo sapien
tcccacagggtctcgggaacacagt

SEQ ID NO: 6070163 - DNA, 25 bp, Homo sapien
agcgtctcttgtcccagcggcaaag

SEQ ID NO: 6070164 - DNA, 25 bp, Homo sapien
agcgagaaggtcttccgcttggcca

SEQ ID NO: 6070165 - DNA, 25 bp, Homo sapien
tagtcggcctcttgactgtatttgg

SEQ ID NO: 6070166 - DNA, 25 bp, Homo sapien
ttgatcaccacttcggagccaggct

SEQ ID NO: 6070167 - DNA, 25 bp, Homo sapien
gggtcttggtgccaattctgatgca

SEQ ID NO: 6070168 - DNA, 25 bp, Homo sapien
gatgcatgtttgcttagagttctca

SEQ ID NO: 6070169 - DNA, 25 bp, Homo sapien
gatgaaagccaacagaatagccaag

SEQ ID NO: 6070170 - DNA, 25 bp, Homo sapien
ctctcatattagaggcaacagcact

SEQ ID NO: 6070171 - DNA, 25 bp, Homo sapien
ctacctccacggtggtattagttgg

SEQ ID NO: 6070172 - DNA, 25 bp, Homo sapien
tcttgcgggctacaatattctgctt

SEQ ID NO: 6070173 - DNA, 25 bp, Homo sapien
gagttctcatctttggaatggccca

SEQ ID NO: 6070174 - DNA, 25 bp, Homo sapien
agttttcagtcacaggatccctggg

SEQ ID NO: 6070175 - DNA, 25 bp, Homo sapien
gatgcaaggtgcacaaaaggtgtta

SEQ ID NO: 6070176 - DNA, 25 bp, Homo sapien
tcttcacaatcttgcgggctacaat

SEQ ID NO: 6070177 - DNA, 25 bp, Homo sapien
tggcattgcaaagtgcatagcaggc

SEQ ID NO: 6070178 - DNA, 25 bp, Homo sapien
cactgactgaggtggagtcattgga

SEQ ID NO: 6070179 - DNA, 25 bp, Homo sapien
tgatgaaggcaagcaagatcgcact

SEQ ID NO: 6070180 - DNA, 25 bp, Homo sapien
aaggttttgggtatgcagctgtcac

SEQ ID NO: 6070181 - DNA, 25 bp, Homo sapien
tagctgtgtccacggctgactctag

SEQ ID NO: 6070182 - DNA, 25 bp, Homo sapien
tcttacccactgaggagttgacgtc

SEQ ID NO: 6070183 - DNA, 25 bp, Homo sapien
tgcaggttgtccgatgagggtaact

SEQ ID NO: 6070184 - DNA, 25 bp, Homo sapien
aaaaatgaccgactgtctctgctgg

SEQ ID NO: 6070185 - DNA, 25 bp, Homo sapien
tgactctagctggatgggaagcttg

SEQ ID NO: 6070186 - DNA, 25 bp, Homo sapien
ggtagagtggccgtgctcttaccca

SEQ ID NO: 6070187 - DNA, 25 bp, Homo sapien
agggacatccttttccgcttagtga

SEQ ID NO: 6070188 - DNA, 25 bp, Homo sapien
gccagtagcccagattccaaaaggt

SEQ ID NO: 6070189 - DNA, 25 bp, Homo sapien
caagatcgcactgagggtctgggcc

SEQ ID NO: 6070190 - DNA, 25 bp, Homo sapien
gcttccttgaaggacagaggtagag

SEQ ID NO: 6070191 - DNA, 25 bp, Homo sapien
caatggaccacaccgtgtcagggat

SEQ ID NO: 6070192 - DNA, 25 bp, Homo sapien
taaaggtggcgttgcacagagcata

SEQ ID NO: 6070193 - DNA, 25 bp, Homo sapien
gaacttgcgggccacgttggccgca

SEQ ID NO: 6070194 - DNA, 25 bp, Homo sapien
agcagagccagtagccaatggacca

SEQ ID NO: 6070195 - DNA, 25 bp, Homo sapien
ttgcgagcgatgctggcgaacttgc

SEQ ID NO: 6070196 - DNA, 25 bp, Homo sapien
cagcaggtgccggaaggtcttttta

SEQ ID NO: 6070197 - DNA, 25 bp, Homo sapien
tggaagtgtccttatcagccacggg

SEQ ID NO: 6070198 - DNA, 25 bp, Homo sapien
ccatgacgttgtagggcgtccaggt

SEQ ID NO: 6070199 - DNA, 25 bp, Homo sapien
tctggcagaaggtgttcaccaggac

SEQ ID NO: 6070200 - DNA, 25 bp, Homo sapien
tcattgcctgtctgcttcgtcacaa

SEQ ID NO: 6070201 - DNA, 25 bp, Homo sapien
gcaggcacaatctcaatggctgtca

SEQ ID NO: 6070202 - DNA, 25 bp, Homo sapien
cagaatggcaaagatcgttcgtgtc

SEQ ID NO: 6070203 - DNA, 25 bp, Homo sapien
ttcgtttggtcatttgatggctggg

SEQ ID NO: 6070204 - DNA, 25 bp, Homo sapien
cagggtgactgggacacacttgtca

SEQ ID NO: 6070205 - DNA, 25 bp, Homo sapien
cctgaaggttctgttgcagagggca

SEQ ID NO: 6070206 - DNA, 25 bp, Homo sapien
gactaggaccactctctttcgtttg

SEQ ID NO: 6070207 - DNA, 25 bp, Homo sapien
caatcggaacttataggccacacat

SEQ ID NO: 6070208 - DNA, 25 bp, Homo sapien
cacttgtcacagaaggtagaaacca

SEQ ID NO: 6070209 - DNA, 25 bp, Homo sapien
gggttgacagtgctattgacatagc

SEQ ID NO: 6070210 - DNA, 25 bp, Homo sapien
tattgacatagcacaaccaatagcc

SEQ ID NO: 6070211 - DNA, 25 bp, Homo sapien
cgtcagcttttaccaccaatcggaa

SEQ ID NO: 6070212 - DNA, 25 bp, Homo sapien
caccttgtgacagccattgttggtc

SEQ ID NO: 6070213 - DNA, 25 bp, Homo sapien
ttcgttgaaggttccttggccactg

SEQ ID NO: 6070214 - DNA, 25 bp, Homo sapien
aaccaggaccatgatgttatacggg

SEQ ID NO: 6070215 - DNA, 25 bp, Homo sapien
tgcaattgtctaccttctcggtcac

SEQ ID NO: 6070216 - DNA, 25 bp, Homo sapien
cattcgtgggtggtcttcggctgct

SEQ ID NO: 6070217 - DNA, 25 bp, Homo sapien
gtcacactcagaacttacatcagaa

SEQ ID NO: 6070218 - DNA, 25 bp, Homo sapien
tccgcaggctgcaattgtctacctt

SEQ ID NO: 6070219 - DNA, 25 bp, Homo sapien
ctctccgcaggctgcaattgtctac

SEQ ID NO: 6070220 - DNA, 25 bp, Homo sapien
ggctgcaattgtctaccttctcggt

SEQ ID NO: 6070221 - DNA, 25 bp, Homo sapien
tcgtaagataaccattcgtgggtgg

SEQ ID NO: 6070222 - DNA, 25 bp, Homo sapien
cttgtggctctgtctgtagggaggt

SEQ ID NO: 6070223 - DNA, 25 bp, Homo sapien
cttacatcagaaggttgctttgcca

SEQ ID NO: 6070224 - DNA, 25 bp, Homo sapien
taagataaccattcgtgggtggtct

SEQ ID NO: 6070225 - DNA, 25 bp, Homo sapien
aaccattcgtgggtggtcttcggct

SEQ ID NO: 6070226 - DNA, 25 bp, Homo sapien
gaacttacatcagaaggttgctttg

SEQ ID NO: 6070227 - DNA, 25 bp, Homo sapien
agaacactgttgcaaacacctgaga

SEQ ID NO: 6070228 - DNA, 25 bp, Homo sapien
gttagaacactgttgcaaacacctg

SEQ ID NO: 6070229 - DNA, 25 bp, Homo sapien
aacactgttgcaaacacctgagaaa

SEQ ID NO: 6070230 - DNA, 25 bp, Homo sapien
ttagaacactgttgcaaacacctga

SEQ ID NO: 6070231 - DNA, 25 bp, Homo sapien
tagaacactgttgcaaacacctgag

SEQ ID NO: 6070232 - DNA, 25 bp, Homo sapien
gaacactgttgcaaacacctgagaa

SEQ ID NO: 6070233 - DNA, 25 bp, Homo sapien
ttttttcagacgtcctgccatcttc

SEQ ID NO: 6070234 - DNA, 25 bp, Homo sapien
tcttagcaaaggtagtccatggcaa

SEQ ID NO: 6070235 - DNA, 25 bp, Homo sapien
tgatgaaccagtgtgcagcaaacca

SEQ ID NO: 6070236 - DNA, 25 bp, Homo sapien
aaactcaaaaagtaacatgaagtgc

SEQ ID NO: 6070237 - DNA, 25 bp, Homo sapien
gagacttcctaagttctatgtatag

SEQ ID NO: 6070238 - DNA, 25 bp, Homo sapien
gcaaaggtagtccatggcaagtaat

SEQ ID NO: 6070239 - DNA, 25 bp, Homo sapien
ttttcttagcaaaggtagtccatgg

SEQ ID NO: 6070240 - DNA, 25 bp, Homo sapien
aaagtaacatgaagtgcaaacacct

SEQ ID NO: 6070241 - DNA, 25 bp, Homo sapien
ccagtaactaggtctgtaacagaag

SEQ ID NO: 6070242 - DNA, 25 bp, Homo sapien
ggcagatgagacttcctaagttcta

SEQ ID NO: 6070243 - DNA, 25 bp, Homo sapien
tagtccatggcaagtaatgaattcc

SEQ ID NO: 6070244 - DNA, 25 bp, Homo sapien
tcttttgatgaaccagtgtgcagca

SEQ ID NO: 6070245 - DNA, 25 bp, Homo sapien
ggctctttcacatctgcataatata

SEQ ID NO: 6070246 - DNA, 25 bp, Homo sapien
ttcggaatcgctcctgacctgccgt

SEQ ID NO: 6070247 - DNA, 25 bp, Homo sapien
tcttcgaaccgcttcctcaaaggct

SEQ ID NO: 6070248 - DNA, 25 bp, Homo sapien
ctgtagacacctgccgttcgcttat

SEQ ID NO: 6070249 - DNA, 25 bp, Homo sapien
tcggtgaagattgactgtgtctgtc

SEQ ID NO: 6070250 - DNA, 25 bp, Homo sapien
atcttgttacccagaatcacaaaag

SEQ ID NO: 6070251 - DNA, 25 bp, Homo sapien
cccaaatctgcatggtaacaaaatg

SEQ ID NO: 6070252 - DNA, 25 bp, Homo sapien
cgttcgcttatgtcaatcttgttac

SEQ ID NO: 6070253 - DNA, 25 bp, Homo sapien
tatcctcggtagcaagaactcttcg

SEQ ID NO: 6070254 - DNA, 25 bp, Homo sapien
ttgtgaatcatcgacactaaaagta

SEQ ID NO: 6070255 - DNA, 25 bp, Homo sapien
aaatgatctgacctatcctcggtag

SEQ ID NO: 6070256 - DNA, 25 bp, Homo sapien
caaaataaggatagtcgccgttgtc

SEQ ID NO: 6070257 - DNA, 25 bp, Homo sapien
gaaagatgtcatcttggtgacgtca

SEQ ID NO: 6070258 - DNA, 25 bp, Homo sapien
aagaccacggcatgtacgttgcggt

SEQ ID NO: 6070259 - DNA, 25 bp, Homo sapien
tacgttgcggtagtaatgctcgacc

SEQ ID NO: 6070260 - DNA, 25 bp, Homo sapien
tcagcatcacgatacagcagggatt

SEQ ID NO: 6070261 - DNA, 25 bp, Homo sapien
tttcagggctaagttggagggcacc

SEQ ID NO: 6070262 - DNA, 25 bp, Homo sapien
gggtccttggccgatgtctcaaaca

SEQ ID NO: 6070263 - DNA, 25 bp, Homo sapien
tgaaaatcgactccacgttctggct

SEQ ID NO: 6070264 - DNA, 25 bp, Homo sapien
cgttggagtccccaatcacgattat

SEQ ID NO: 6070265 - DNA, 25 bp, Homo sapien
tttctgggccttcaatcggcaagcc

SEQ ID NO: 6070266 - DNA, 25 bp, Homo sapien
tccacgccgatggtggcttcagtct

SEQ ID NO: 6070267 - DNA, 25 bp, Homo sapien
tgctcgaccatgcttttgcggaaac

SEQ ID NO: 6070268 - DNA, 25 bp, Homo sapien
gacgtcatagacgaagaccacggca

SEQ ID NO: 6070269 - DNA, 25 bp, Homo sapien
cagctctgtgcggacatgctcgtcg

SEQ ID NO: 6070270 - DNA, 25 bp, Homo sapien
tgtccaccgagaagcacatgagaat

SEQ ID NO: 6070271 - DNA, 25 bp, Homo sapien
gggaactcgtccttactgaacacga

SEQ ID NO: 6070272 - DNA, 25 bp, Homo sapien
tcgtaggcttggatgcgcacggcca

SEQ ID NO: 6070273 - DNA, 25 bp, Homo sapien
acatgagaatgacgtcggtgtccgg

SEQ ID NO: 6070274 - DNA, 25 bp, Homo sapien
gtccacctcaatgtcggccacatag

SEQ ID NO: 6070275 - DNA, 25 bp, Homo sapien
ctgggagccgtagcgcttctgcagc

SEQ ID NO: 6070276 - DNA, 25 bp, Homo sapien
gccacatagttctcgaagacggtgg

SEQ ID NO: 6070277 - DNA, 25 bp, Homo sapien
catgctcgtcgctgcgcaggtcttt

SEQ ID NO: 6070278 - DNA, 25 bp, Homo sapien
tcttggcagagcactcgaggtagtc

SEQ ID NO: 6070279 - DNA, 25 bp, Homo sapien
tcgcgcacgccttccttggtcttgg

SEQ ID NO: 6070280 - DNA, 25 bp, Homo sapien
acgggttcctgcttcatgcgggcca

SEQ ID NO: 6070281 - DNA, 25 bp, Homo sapien
caggttcaggttcactgtgcgcccg

SEQ ID NO: 6070282 - DNA, 25 bp, Homo sapien
gcgctgtaattgtcgaacacggtgg

SEQ ID NO: 6070283 - DNA, 25 bp, Homo sapien
tacggaggcggtcatactcctcctg

SEQ ID NO: 6070284 - DNA, 25 bp, Homo sapien
gttctcataggacggcggactggca

SEQ ID NO: 6070285 - DNA, 25 bp, Homo sapien
cgctctgcgcgctgtaattgtcgaa

SEQ ID NO: 6070286 - DNA, 25 bp, Homo sapien
gtagcgcacagcgtggatctgcttg

SEQ ID NO: 6070287 - DNA, 25 bp, Homo sapien
ggctgagcattcgaggtagcgcaca

SEQ ID NO: 6070288 - DNA, 25 bp, Homo sapien
acttgtgccgcacgttctcatagga

SEQ ID NO: 6070289 - DNA, 25 bp, Homo sapien
gacaccatcctgttgcagggctgag

SEQ ID NO: 6070290 - DNA, 25 bp, Homo sapien
acacctctggatgccacttgtgccg

SEQ ID NO: 6070291 - DNA, 25 bp, Homo sapien
tgacgaaaacgttggtctgagggta

SEQ ID NO: 6070292 - DNA, 25 bp, Homo sapien
tggagaaacagatgacgaaaacgtt

SEQ ID NO: 6070293 - DNA, 25 bp, Homo sapien
ccaattgattatggcgcccaacagg

SEQ ID NO: 6070294 - DNA, 25 bp, Homo sapien
ttttgaccgtcttgcggatgcggaa

SEQ ID NO: 6070295 - DNA, 25 bp, Homo sapien
ttaagcagagagttggagtagccca

SEQ ID NO: 6070296 - DNA, 25 bp, Homo sapien
gagtagcccagccaattgattatgg

SEQ ID NO: 6070297 - DNA, 25 bp, Homo sapien
gagttgcccactcggtgcacctcga

SEQ ID NO: 6070298 - DNA, 25 bp, Homo sapien
ccttgttgaagtatgcgtaaatgac

SEQ ID NO: 6070299 - DNA, 25 bp, Homo sapien
gcagctcggaatatgcgcccataga

SEQ ID NO: 6070300 - DNA, 25 bp, Homo sapien
catcttgcgcttcgcctcggcgttg

SEQ ID NO: 6070301 - DNA, 25 bp, Homo sapien
gcaagtgctctttggagttgcccac

SEQ ID NO: 6070302 - DNA, 25 bp, Homo sapien
catggcgggtgtccgctccggtctt

SEQ ID NO: 6070303 - DNA, 25 bp, Homo sapien
tgcggaagcgcgcagctcggaatat

SEQ ID NO: 6070304 - DNA, 25 bp, Homo sapien
gggcagaacaagagccacgatgaag

SEQ ID NO: 6070305 - DNA, 25 bp, Homo sapien
tcccatagagtgagggtggattcag

SEQ ID NO: 6070306 - DNA, 25 bp, Homo sapien
gggccgtggtgaagcgcttcccata

SEQ ID NO: 6070307 - DNA, 25 bp, Homo sapien
caccgagggaatgtagaaggcccca

SEQ ID NO: 6070308 - DNA, 25 bp, Homo sapien
gaaaagcttgccgaaactcttcatt

SEQ ID NO: 6070309 - DNA, 25 bp, Homo sapien
aatgatgcccaggattttagtggct

SEQ ID NO: 6070310 - DNA, 25 bp, Homo sapien
ggcagcccggtagatccggccatat

SEQ ID NO: 6070311 - DNA, 25 bp, Homo sapien
tcctttctcgagcagcagaaatcct

SEQ ID NO: 6070312 - DNA, 25 bp, Homo sapien
gcaagcttgattttcacgtggttga

SEQ ID NO: 6070313 - DNA, 25 bp, Homo sapien
tataggatgatgagcaacaccgagg

SEQ ID NO: 6070314 - DNA, 25 bp, Homo sapien
ggagtttaaatagcctagccaggtg

SEQ ID NO: 6070315 - DNA, 25 bp, Homo sapien
tgttcaccagacagtccgacatctc

SEQ ID NO: 6070316 - DNA, 25 bp, Homo sapien
cagaaatcctcttgcgttccagggc

SEQ ID NO: 6070317 - DNA, 25 bp, Homo sapien
ggcagccttgtagatcttccagtac

SEQ ID NO: 6070318 - DNA, 25 bp, Homo sapien
gagacgctattggtcttcctggagc

SEQ ID NO: 6070319 - DNA, 25 bp, Homo sapien
gcgtaggaaggctcgcggcttacct

SEQ ID NO: 6070320 - DNA, 25 bp, Homo sapien
tagaaggcgcctacggtggagaaca

SEQ ID NO: 6070321 - DNA, 25 bp, Homo sapien
acagcttcggatatgggtgagacgc

SEQ ID NO: 6070322 - DNA, 25 bp, Homo sapien
acgaacacgccaatgaggatgccca

SEQ ID NO: 6070323 - DNA, 25 bp, Homo sapien
ttccagtacacgaagagcaccacac

SEQ ID NO: 6070324 - DNA, 25 bp, Homo sapien
ccaggtgagcgcgatcatgacgttg

SEQ ID NO: 6070325 - DNA, 25 bp, Homo sapien
tggcggaccgtgaacaccatctggg

SEQ ID NO: 6070326 - DNA, 25 bp, Homo sapien
gactgatgagctcggtgagaaagaa

SEQ ID NO: 6070327 - DNA, 25 bp, Homo sapien
ccacgcggaacttggcagccttgta

SEQ ID NO: 6070328 - DNA, 25 bp, Homo sapien
tcatgacgttggagacgcacttgcg

SEQ ID NO: 6070329 - DNA, 25 bp, Homo sapien
ttttcattctagcacccagtaagac

SEQ ID NO: 6070330 - DNA, 25 bp, Homo sapien
tcatcatctgacaataaatacctac

SEQ ID NO: 6070331 - DNA, 25 bp, Homo sapien
tggtccttgaatgacatattttacg

SEQ ID NO: 6070332 - DNA, 25 bp, Homo sapien
gacatgttacctttgccactgcaac

SEQ ID NO: 6070333 - DNA, 25 bp, Homo sapien
ggattattggtatgcaaccctctga

SEQ ID NO: 6070334 - DNA, 25 bp, Homo sapien
ctttcccaataagtcagagtaaggg

SEQ ID NO: 6070335 - DNA, 25 bp, Homo sapien
cctgggtcacaaagcatcccttact

SEQ ID NO: 6070336 - DNA, 25 bp, Homo sapien
ttctagcacccagtaagacatccag

SEQ ID NO: 6070337 - DNA, 25 bp, Homo sapien
aaaggagcaagagcattcagctcag

SEQ ID NO: 6070338 - DNA, 25 bp, Homo sapien
gcatcccttacttgagctactttta

SEQ ID NO: 6070339 - DNA, 25 bp, Homo sapien
cataagtgaacacattggacagtga

SEQ ID NO: 6070340 - DNA, 25 bp, Homo sapien
taaagttttggtggtccttgaatga

SEQ ID NO: 6070341 - DNA, 25 bp, Homo sapien
gagctatatagccacttcttaaaac

SEQ ID NO: 6070342 - DNA, 25 bp, Homo sapien
ccttaatcatgagacagccgctgtg

SEQ ID NO: 6070343 - DNA, 25 bp, Homo sapien
ataaatctgtgaacccacatgttga

SEQ ID NO: 6070344 - DNA, 25 bp, Homo sapien
caagggaacacagccttaatcatga

SEQ ID NO: 6070345 - DNA, 25 bp, Homo sapien
tcaccatctaccttaagatactgtt

SEQ ID NO: 6070346 - DNA, 25 bp, Homo sapien
cagccgctgtgatgtcttattataa

SEQ ID NO: 6070347 - DNA, 25 bp, Homo sapien
aaaatttttatgactgccatactgc

SEQ ID NO: 6070348 - DNA, 25 bp, Homo sapien
ctagtggaacaactttacttggaag

SEQ ID NO: 6070349 - DNA, 25 bp, Homo sapien
aagtcttgtatatattccccgcagg

SEQ ID NO: 6070350 - DNA, 25 bp, Homo sapien
taaagtcttgtatatattccccgca

SEQ ID NO: 6070351 - DNA, 25 bp, Homo sapien
ttttatccagagctatatagccact

SEQ ID NO: 6070352 - DNA, 25 bp, Homo sapien
tattccccgcaggaattctaattct

SEQ ID NO: 6070353 - DNA, 25 bp, Homo sapien
ggccaaatccggcacaagctctgtc

SEQ ID NO: 6070354 - DNA, 25 bp, Homo sapien
cagaagcttgaacagtagaactagg

SEQ ID NO: 6070355 - DNA, 25 bp, Homo sapien
caaggcaccagtccccttgacaggg

SEQ ID NO: 6070356 - DNA, 25 bp, Homo sapien
gaaggagtgatgaaaacaaggcacc

SEQ ID NO: 6070357 - DNA, 25 bp, Homo sapien
agagggtttgaggacaacctgcgca

SEQ ID NO: 6070358 - DNA, 25 bp, Homo sapien
tgaacagtagaactaggaaggagtg

SEQ ID NO: 6070359 - DNA, 25 bp, Homo sapien
gaactaggaaggagtgatgaaaaca

SEQ ID NO: 6070360 - DNA, 25 bp, Homo sapien
ttgacagggccaaatccggcacaag

SEQ ID NO: 6070361 - DNA, 25 bp, Homo sapien
tatttcagaagcttgaacagtagaa

SEQ ID NO: 6070362 - DNA, 25 bp, Homo sapien
agtccccttgacagggccaaatccg

SEQ ID NO: 6070363 - DNA, 25 bp, Homo sapien
gtttgaggacaacctgcgcacaggt

SEQ ID NO: 6070364 - DNA, 25 bp, Homo sapien
aaatccggcacaagctctgtctgtg

SEQ ID NO: 6070365 - DNA, 25 bp, Homo sapien
ttgaaataggaatgatagagcctaa

SEQ ID NO: 6070366 - DNA, 25 bp, Homo sapien
ctcatttgcatgatccagatgctcc

SEQ ID NO: 6070367 - DNA, 25 bp, Homo sapien
gacattgactatcttaggattaacc

SEQ ID NO: 6070368 - DNA, 25 bp, Homo sapien
caagtgttatgtataatccatcaag

SEQ ID NO: 6070369 - DNA, 25 bp, Homo sapien
agctggattgtaccgtaaagggtca

SEQ ID NO: 6070370 - DNA, 25 bp, Homo sapien
aagtagctcatttgcatgatccaga

SEQ ID NO: 6070371 - DNA, 25 bp, Homo sapien
ctccgacctattgattgcactattg

SEQ ID NO: 6070372 - DNA, 25 bp, Homo sapien
ttatgctataaagcggatcttggca

SEQ ID NO: 6070373 - DNA, 25 bp, Homo sapien
cctattgattgcactattgattgaa

SEQ ID NO: 6070374 - DNA, 25 bp, Homo sapien
gatacatctctttacaggcatcaac

SEQ ID NO: 6070375 - DNA, 25 bp, Homo sapien
agtgaattaactgtcggtgcccgac

SEQ ID NO: 6070376 - DNA, 25 bp, Homo sapien
cataaccccgaaggtcttgacattg

SEQ ID NO: 6070377 - DNA, 25 bp, Homo sapien
taggaatgatagagcctaagctgga

SEQ ID NO: 6070378 - DNA, 25 bp, Homo sapien
tacaggcatcaacatcgaccattac

SEQ ID NO: 6070379 - DNA, 25 bp, Homo sapien
atacaacaggtgcacaattagcaaa

SEQ ID NO: 6070380 - DNA, 25 bp, Homo sapien
catttgtcactttgggttcttgatt

SEQ ID NO: 6070381 - DNA, 25 bp, Homo sapien
atccagatgctcctccgacctattg

SEQ ID NO: 6070382 - DNA, 25 bp, Homo sapien
cggcatacatagcacggggtaactg

SEQ ID NO: 6070383 - DNA, 25 bp, Homo sapien
cttaggattaacctgatcaagtagc

SEQ ID NO: 6070384 - DNA, 25 bp, Homo sapien
cccaggtctatgagatccacgctta

SEQ ID NO: 6070385 - DNA, 25 bp, Homo sapien
ataatccatcaagatacatctcttt

SEQ ID NO: 6070386 - DNA, 25 bp, Homo sapien
tcattgcccaggtctatgagatcca

SEQ ID NO: 6070387 - DNA, 25 bp, Homo sapien
ttatgtataatccatcaagatacat

SEQ ID NO: 6070388 - DNA, 25 bp, Homo sapien
attggacctcccaaagacacatcct

SEQ ID NO: 6070389 - DNA, 25 bp, Homo sapien
gagcagcaataatcccaacataacc

SEQ ID NO: 6070390 - DNA, 25 bp, Homo sapien
ccattacatttgtcactttgggttc

SEQ ID NO: 6070391 - DNA, 25 bp, Homo sapien
ggtcaacacaaatactaatcatgta

SEQ ID NO: 6070392 - DNA, 25 bp, Homo sapien
tgtcggtgcccgactacccatgctt

SEQ ID NO: 6070393 - DNA, 25 bp, Homo sapien
aatactaatcatgtatattataacc

SEQ ID NO: 6070394 - DNA, 25 bp, Homo sapien
cttgttttgtaaggcaaatgagcca

SEQ ID NO: 6070395 - DNA, 25 bp, Homo sapien
caccaaagtcacaacacaccatagt

SEQ ID NO: 6070396 - DNA, 25 bp, Homo sapien
ccatagtatcaggagcagcaataat

SEQ ID NO: 6070397 - DNA, 25 bp, Homo sapien
catgcttcctccaaaagacactcta

SEQ ID NO: 6070398 - DNA, 25 bp, Homo sapien
acgaatccggagagtgaattaactg

SEQ ID NO: 6070399 - DNA, 25 bp, Homo sapien
attgatctcattgcccaggtctatg

SEQ ID NO: 6070400 - DNA, 25 bp, Homo sapien
acgcttattggacctcccaaagaca

SEQ ID NO: 6070401 - DNA, 25 bp, Homo sapien
ttcctccaaaagacactctactcac

SEQ ID NO: 6070402 - DNA, 25 bp, Homo sapien
attaacctgatcaagtagctcattt

SEQ ID NO: 6070403 - DNA, 25 bp, Homo sapien
tgagccacaccaaagtcacaacaca

SEQ ID NO: 6070404 - DNA, 25 bp, Homo sapien
ccggagagtgaattaactgtcggtg

SEQ ID NO: 6070405 - DNA, 25 bp, Homo sapien
taaagggtcaacacaaatactaatc

SEQ ID NO: 6070406 - DNA, 25 bp, Homo sapien
aacacaccatagtatcaggagcagc

SEQ ID NO: 6070407 - DNA, 25 bp, Homo sapien
ttgtaaggcaaatgagccacaccaa

SEQ ID NO: 6070408 - DNA, 25 bp, Homo sapien
tgcatgatccagatgctcctccgac

SEQ ID NO: 6070409 - DNA, 25 bp, Homo sapien
agtcacaacacaccatagtatcagg

SEQ ID NO: 6070410 - DNA, 25 bp, Homo sapien
catcaagatacatctctttacaggc

SEQ ID NO: 6070411 - DNA, 25 bp, Homo sapien
aatcatgtatattataaccagagta

SEQ ID NO: 6070412 - DNA, 25 bp, Homo sapien
catcgaccattacatttgtcacttt

SEQ ID NO: 6070413 - DNA, 25 bp, Homo sapien
gactacccatgcttcctccaaaaga

SEQ ID NO: 6070414 - DNA, 25 bp, Homo sapien
actattgattgaattgatctcattg

SEQ ID NO: 6070415 - DNA, 25 bp, Homo sapien
cttgatttatgctataaagcggatc

SEQ ID NO: 6070416 - DNA, 25 bp, Homo sapien
tctctttacaggcatcaacatcgac

SEQ ID NO: 6070417 - DNA, 25 bp, Homo sapien
gattgtaccgtaaagggtcaacaca

SEQ ID NO: 6070418 - DNA, 25 bp, Homo sapien
ggtaactgtgacttaccaagtgtta

SEQ ID NO: 6070419 - DNA, 25 bp, Homo sapien
ctgatcaagtagctcatttgcatga

SEQ ID NO: 6070420 - DNA, 25 bp, Homo sapien
gcggatcttggcatttacatacaac

SEQ ID NO: 6070421 - DNA, 25 bp, Homo sapien
tataaagcggatcttggcatttaca

SEQ ID NO: 6070422 - DNA, 25 bp, Homo sapien
cagagtaccattttctttatgttaa

SEQ ID NO: 6070423 - DNA, 25 bp, Homo sapien
atgctcctccgacctattgattgca

SEQ ID NO: 6070424 - DNA, 25 bp, Homo sapien
gattgcactattgattgaattgatc

SEQ ID NO: 6070425 - DNA, 25 bp, Homo sapien
atttacatacaacaggtgcacaatt

SEQ ID NO: 6070426 - DNA, 25 bp, Homo sapien
gcacggggtaactgtgacttaccaa

SEQ ID NO: 6070427 - DNA, 25 bp, Homo sapien
taacccacgaatccggagagtgaat

SEQ ID NO: 6070428 - DNA, 25 bp, Homo sapien
caataatcccaacataaccccgaag

SEQ ID NO: 6070429 - DNA, 25 bp, Homo sapien
tgggttcttgatttatgctataaag

SEQ ID NO: 6070430 - DNA, 25 bp, Homo sapien
acactctactcacttgttttgtaag

SEQ ID NO: 6070431 - DNA, 25 bp, Homo sapien
ggtgcccgactacccatgcttcctc

SEQ ID NO: 6070432 - DNA, 25 bp, Homo sapien
gattgaattgatctcattgcccagg

SEQ ID NO: 6070433 - DNA, 25 bp, Homo sapien
cttggcatttacatacaacaggtgc

SEQ ID NO: 6070434 - DNA, 25 bp, Homo sapien
caaaagacactctactcacttgttt

SEQ ID NO: 6070435 - DNA, 25 bp, Homo sapien
gactatcttaggattaacctgatca

SEQ ID NO: 6070436 - DNA, 25 bp, Homo sapien
tataaccagagtaccattttcttta

SEQ ID NO: 6070437 - DNA, 25 bp, Homo sapien
ggtcttgacattgactatcttagga

SEQ ID NO: 6070438 - DNA, 25 bp, Homo sapien
ggcaaatgagccacaccaaagtcac

SEQ ID NO: 6070439 - DNA, 25 bp, Homo sapien
ttaactgtcggtgcccgactaccca

SEQ ID NO: 6070440 - DNA, 25 bp, Homo sapien
acttaccaagtgttatgtataatcc

SEQ ID NO: 6070441 - DNA, 25 bp, Homo sapien
actgtgacttaccaagtgttatgta

SEQ ID NO: 6070442 - DNA, 25 bp, Homo sapien
tgatagagcctaagctggattgtac

SEQ ID NO: 6070443 - DNA, 25 bp, Homo sapien
caggtgcacaattagcaaatataac

SEQ ID NO: 6070444 - DNA, 25 bp, Homo sapien
catcaacatcgaccattacatttgt

SEQ ID NO: 6070445 - DNA, 25 bp, Homo sapien
cccgaaggtcttgacattgactatc

SEQ ID NO: 6070446 - DNA, 25 bp, Homo sapien
acatcctcggcatacatagcacggg

SEQ ID NO: 6070447 - DNA, 25 bp, Homo sapien
tcactttgggttcttgatttatgct

SEQ ID NO: 6070448 - DNA, 25 bp, Homo sapien
gtatattataaccagagtaccattt

SEQ ID NO: 6070449 - DNA, 25 bp, Homo sapien
agcctaagctggattgtaccgtaaa

SEQ ID NO: 6070450 - DNA, 25 bp, Homo sapien
tctatgagatccacgcttattggac

SEQ ID NO: 6070451 - DNA, 25 bp, Homo sapien
tatcaggagcagcaataatcccaac

SEQ ID NO: 6070452 - DNA, 25 bp, Homo sapien
cctcccaaagacacatcctcggcat

SEQ ID NO: 6070453 - DNA, 25 bp, Homo sapien
acatagcacggggtaactgtgactt

SEQ ID NO: 6070454 - DNA, 25 bp, Homo sapien
agatccacgcttattggacctccca

SEQ ID NO: 6070455 - DNA, 25 bp, Homo sapien
ttatgttaacccacgaatccggaga

SEQ ID NO: 6070456 - DNA, 25 bp, Homo sapien
tactcacttgttttgtaaggcaaat

SEQ ID NO: 6070457 - DNA, 25 bp, Homo sapien
aaagacacatcctcggcatacatag

SEQ ID NO: 6070458 - DNA, 25 bp, Homo sapien
gccacgtttatgatgcttccgcggc

SEQ ID NO: 6070459 - DNA, 25 bp, Homo sapien
ttggtaagctgtcccacaccacctt

SEQ ID NO: 6070460 - DNA, 25 bp, Homo sapien
ctccccacctccctgccggaatacg

SEQ ID NO: 6070461 - DNA, 25 bp, Homo sapien
ttctcgtccttgatcaacgcctcgt

SEQ ID NO: 6070462 - DNA, 25 bp, Homo sapien
ctgacccccttactcgcccactcgt

SEQ ID NO: 6070463 - DNA, 25 bp, Homo sapien
gcatgtgtgcgcctacgtcgcggca

SEQ ID NO: 6070464 - DNA, 25 bp, Homo sapien
gcgtcccagtcctcgtctgggaatt

SEQ ID NO: 6070465 - DNA, 25 bp, Homo sapien
atacgctggtacagtaatgccaccc

SEQ ID NO: 6070466 - DNA, 25 bp, Homo sapien
tatcattaaacattgcctcctctgt

SEQ ID NO: 6070467 - DNA, 25 bp, Homo sapien
ggggcaatcgcattcacactgaccc

SEQ ID NO: 6070468 - DNA, 25 bp, Homo sapien
atcaacgcctcgttcatgtccgtag

SEQ ID NO: 6070469 - DNA, 25 bp, Homo sapien
cgcagttgagcaggatgtgtattct

SEQ ID NO: 6070470 - DNA, 25 bp, Homo sapien
tttactcgcggcatacgctggtaca

SEQ ID NO: 6070471 - DNA, 25 bp, Homo sapien
ggtgcgcgggatgccgcttttggat

SEQ ID NO: 6070472 - DNA, 25 bp, Homo sapien
ggaatacgactgaggatactctccg

SEQ ID NO: 6070473 - DNA, 25 bp, Homo sapien
ggctgagcatgtgtgcgcctacgtc

SEQ ID NO: 6070474 - DNA, 25 bp, Homo sapien
cgggttggctgagcatgtgtgcgcc

SEQ ID NO: 6070475 - DNA, 25 bp, Homo sapien
cactcgttgctcagcgccttggtaa

SEQ ID NO: 6070476 - DNA, 25 bp, Homo sapien
ctacgtcgcggcagagttgaaagac

SEQ ID NO: 6070477 - DNA, 25 bp, Homo sapien
gtgagcaacgaagccacgtttatga

SEQ ID NO: 6070478 - DNA, 25 bp, Homo sapien
agcacggcgtcccagtcctcgtctg

SEQ ID NO: 6070479 - DNA, 25 bp, Homo sapien
accacctttactcgcggcatacgct

SEQ ID NO: 6070480 - DNA, 25 bp, Homo sapien
cccttactcgcccactcgttgctca

SEQ ID NO: 6070481 - DNA, 25 bp, Homo sapien
tggtacagtaatgccaccctggaac

SEQ ID NO: 6070482 - DNA, 25 bp, Homo sapien
acctacccatccacccaccatcaac

SEQ ID NO: 6070483 - DNA, 25 bp, Homo sapien
ctctgtcgtgcaactctagcgatca

SEQ ID NO: 6070484 - DNA, 25 bp, Homo sapien
gtaatgccaccctggaacgtgagca

SEQ ID NO: 6070485 - DNA, 25 bp, Homo sapien
gctctcttctcgtccttgatcaacg

SEQ ID NO: 6070486 - DNA, 25 bp, Homo sapien
ccggcgctccccacctccctgccgg

SEQ ID NO: 6070487 - DNA, 25 bp, Homo sapien
ttttggatgccgccgcagttgagca

SEQ ID NO: 6070488 - DNA, 25 bp, Homo sapien
ctcgcccactcgttgctcagcgcct

SEQ ID NO: 6070489 - DNA, 25 bp, Homo sapien
ttaggtttacttggagcacggcgtc

SEQ ID NO: 6070490 - DNA, 25 bp, Homo sapien
gcaatatatccaggggcaatcgcat

SEQ ID NO: 6070491 - DNA, 25 bp, Homo sapien
ttacttggagcacggcgtcccagtc

SEQ ID NO: 6070492 - DNA, 25 bp, Homo sapien
aacgaagccacgtttatgatgcttc

SEQ ID NO: 6070493 - DNA, 25 bp, Homo sapien
cagtcctcgtctgggaattggtgcg

SEQ ID NO: 6070494 - DNA, 25 bp, Homo sapien
cgcggcagagttgaaagacagaagt

SEQ ID NO: 6070495 - DNA, 25 bp, Homo sapien
tgagcaggatgtgtattctgtggcc

SEQ ID NO: 6070496 - DNA, 25 bp, Homo sapien
ccgcacccttgaaatcctccggcgc

SEQ ID NO: 6070497 - DNA, 25 bp, Homo sapien
ctcgccgcacttcccaagaaaacta

SEQ ID NO: 6070498 - DNA, 25 bp, Homo sapien
cgcggcatacgctggtacagtaatg

SEQ ID NO: 6070499 - DNA, 25 bp, Homo sapien
gcacttcccaagaaaactaccgcac

SEQ ID NO: 6070500 - DNA, 25 bp, Homo sapien
tttatgatgcttccgcggcgaccta

SEQ ID NO: 6070501 - DNA, 25 bp, Homo sapien
ctctagcgatcagtcaatcaatcta

SEQ ID NO: 6070502 - DNA, 25 bp, Homo sapien
gggaaggtccgcgggttggctgagc

SEQ ID NO: 6070503 - DNA, 25 bp, Homo sapien
agcgccttggtaagctgtcccacac

SEQ ID NO: 6070504 - DNA, 25 bp, Homo sapien
ccatccacccaccatcaacagtaag

SEQ ID NO: 6070505 - DNA, 25 bp, Homo sapien
cgtctgggaattggtgcgcgggatg

SEQ ID NO: 6070506 - DNA, 25 bp, Homo sapien
cctgccggaatacgactgaggatac

SEQ ID NO: 6070507 - DNA, 25 bp, Homo sapien
ttcacactgacccccttactcgccc

SEQ ID NO: 6070508 - DNA, 25 bp, Homo sapien
acctccctgccggaatacgactgag

SEQ ID NO: 6070509 - DNA, 25 bp, Homo sapien
gcacctccccactcacgtacgcact

SEQ ID NO: 6070510 - DNA, 25 bp, Homo sapien
ctctccgctctcttctcgtccttga

SEQ ID NO: 6070511 - DNA, 25 bp, Homo sapien
agagttgaaagacagaagttaggtt

SEQ ID NO: 6070512 - DNA, 25 bp, Homo sapien
acccaccatcaacagtaagcacctc

SEQ ID NO: 6070513 - DNA, 25 bp, Homo sapien
ggaattggtgcgcgggatgccgctt

SEQ ID NO: 6070514 - DNA, 25 bp, Homo sapien
cgactgaggatactctccgctctct

SEQ ID NO: 6070515 - DNA, 25 bp, Homo sapien
atgccgccgcagttgagcaggatgt

SEQ ID NO: 6070516 - DNA, 25 bp, Homo sapien
tgccgcttttggatgccgccgcagt

SEQ ID NO: 6070517 - DNA, 25 bp, Homo sapien
cgtgcaactctagcgatcagtcaat

SEQ ID NO: 6070518 - DNA, 25 bp, Homo sapien
aggatactctccgctctcttctcgt

SEQ ID NO: 6070519 - DNA, 25 bp, Homo sapien
aaacattgcctcctctgtcgtgcaa

SEQ ID NO: 6070520 - DNA, 25 bp, Homo sapien
gatgtgtattctgtggccgtcggaa

SEQ ID NO: 6070521 - DNA, 25 bp, Homo sapien
tgtgcgcctacgtcgcggcagagtt

SEQ ID NO: 6070522 - DNA, 25 bp, Homo sapien
ccaccctggaacgtgagcaacgaag

SEQ ID NO: 6070523 - DNA, 25 bp, Homo sapien
actaccgcacccttgaaatcctccg

SEQ ID NO: 6070524 - DNA, 25 bp, Homo sapien
cgggatgccgcttttggatgccgcc

SEQ ID NO: 6070525 - DNA, 25 bp, Homo sapien
ccccactcacgtacgcactcgccgc

SEQ ID NO: 6070526 - DNA, 25 bp, Homo sapien
tggaacgtgagcaacgaagccacgt

SEQ ID NO: 6070527 - DNA, 25 bp, Homo sapien
gtcaatcaatctacctacccatcca

SEQ ID NO: 6070528 - DNA, 25 bp, Homo sapien
aagctgtcccacaccacctttactc

SEQ ID NO: 6070529 - DNA, 25 bp, Homo sapien
tcaatctacctacccatccacccac

SEQ ID NO: 6070530 - DNA, 25 bp, Homo sapien
tatccaggggcaatcgcattcacac

SEQ ID NO: 6070531 - DNA, 25 bp, Homo sapien
tcccacaccacctttactcgcggca

SEQ ID NO: 6070532 - DNA, 25 bp, Homo sapien
acgcactcgccgcacttcccaagaa

SEQ ID NO: 6070533 - DNA, 25 bp, Homo sapien
catcaacagtaagcacctccccact

SEQ ID NO: 6070534 - DNA, 25 bp, Homo sapien
cgatcagtcaatcaatctacctacc

SEQ ID NO: 6070535 - DNA, 25 bp, Homo sapien
atcctccggcgctccccacctccct

SEQ ID NO: 6070536 - DNA, 25 bp, Homo sapien
tcacgtacgcactcgccgcacttcc

SEQ ID NO: 6070537 - DNA, 25 bp, Homo sapien
ttcatgtccgtagcaatatatccag

SEQ ID NO: 6070538 - DNA, 25 bp, Homo sapien
cagaagttaggtttacttggagcac

SEQ ID NO: 6070539 - DNA, 25 bp, Homo sapien
aagtctatcattaaacattgcctcc

SEQ ID NO: 6070540 - DNA, 25 bp, Homo sapien
gtccttgatcaacgcctcgttcatg

SEQ ID NO: 6070541 - DNA, 25 bp, Homo sapien
ccttgaaatcctccggcgctcccca

SEQ ID NO: 6070542 - DNA, 25 bp, Homo sapien
atcgcattcacactgacccccttac

SEQ ID NO: 6070543 - DNA, 25 bp, Homo sapien
gcctcgttcatgtccgtagcaatat

SEQ ID NO: 6070544 - DNA, 25 bp, Homo sapien
cagtaagcacctccccactcacgta

SEQ ID NO: 6070545 - DNA, 25 bp, Homo sapien
ttgctcagcgccttggtaagctgtc

SEQ ID NO: 6070546 - DNA, 25 bp, Homo sapien
tccgtagcaatatatccaggggcaa

SEQ ID NO: 6070547 - DNA, 25 bp, Homo sapien
ggtccgcgggttggctgagcatgtg

SEQ ID NO: 6070548 - DNA, 25 bp, Homo sapien
tgcctcctctgtcgtgcaactctag

SEQ ID NO: 6070549 - DNA, 25 bp, Homo sapien
ggtcctaagacacctgctgctccag

SEQ ID NO: 6070550 - DNA, 25 bp, Homo sapien
ggagctgttcacttctagcaggcgc

SEQ ID NO: 6070551 - DNA, 25 bp, Homo sapien
cagtggtcagcctgcatgaggctca

SEQ ID NO: 6070552 - DNA, 25 bp, Homo sapien
tgtggatcttctctagggcagttgg

SEQ ID NO: 6070553 - DNA, 25 bp, Homo sapien
ccaaagtcggctgtatccaagtcca

SEQ ID NO: 6070554 - DNA, 25 bp, Homo sapien
gagttgggccacaattgtaggttcc

SEQ ID NO: 6070555 - DNA, 25 bp, Homo sapien
tcttgaggccggaaacgctgtagat

SEQ ID NO: 6070556 - DNA, 25 bp, Homo sapien
tagggcagttggtacttcagcctcc

SEQ ID NO: 6070557 - DNA, 25 bp, Homo sapien
caggcactccgcttagtcacaaaac

SEQ ID NO: 6070558 - DNA, 25 bp, Homo sapien
tgtaggttccgctgtgagttcctta

SEQ ID NO: 6070559 - DNA, 25 bp, Homo sapien
tctagcaggcgctgatagtcttgag

SEQ ID NO: 6070560 - DNA, 25 bp, Homo sapien
tgtagatacacaatcagcttggctg

SEQ ID NO: 6070561 - DNA, 25 bp, Homo sapien
tgtggcgagccattgtgcagataat

SEQ ID NO: 6070562 - DNA, 25 bp, Homo sapien
tgtttcctggcacgcatgagaatgc

SEQ ID NO: 6070563 - DNA, 25 bp, Homo sapien
tgtccatcatttccctgtagatgtg

SEQ ID NO: 6070564 - DNA, 25 bp, Homo sapien
tgccatctcgtctgtggcgagccat

SEQ ID NO: 6070565 - DNA, 25 bp, Homo sapien
aaagtctaccagtccatgtttcctg

SEQ ID NO: 6070566 - DNA, 25 bp, Homo sapien
tagatgtgctcctcagcacgcttgg

SEQ ID NO: 6070567 - DNA, 25 bp, Homo sapien
gcagataatgaagcacatgtccatc

SEQ ID NO: 6070568 - DNA, 25 bp, Homo sapien
catggccagctcgtaatcaaactct

SEQ ID NO: 6070569 - DNA, 25 bp, Homo sapien
tctacgctgtcactcctccatgtgg

SEQ ID NO: 6070570 - DNA, 25 bp, Homo sapien
aaagtaacctggatcttgccatctc

SEQ ID NO: 6070571 - DNA, 25 bp, Homo sapien
gcacgcttggccctttcagcagttt

SEQ ID NO: 6070572 - DNA, 25 bp, Homo sapien
gaatgcccactactttatctgaaat

SEQ ID NO: 6070573 - DNA, 25 bp, Homo sapien
attgagactcagagatttatgtgag

SEQ ID NO: 6070574 - DNA, 25 bp, Homo sapien
gtgggagcgggtgaggaaggtctgt

SEQ ID NO: 6070575 - DNA, 25 bp, Homo sapien
gaaactgtgacttctgcaggaccag

SEQ ID NO: 6070576 - DNA, 25 bp, Homo sapien
cctcagtcttctaccctggagggag

SEQ ID NO: 6070577 - DNA, 25 bp, Homo sapien
ccgggcttcatccagacgctctcac

SEQ ID NO: 6070578 - DNA, 25 bp, Homo sapien
ccttagtctgctcgttgaaggaggc

SEQ ID NO: 6070579 - DNA, 25 bp, Homo sapien
ctgtgatacagggggcaaggcacat

SEQ ID NO: 6070580 - DNA, 25 bp, Homo sapien
gaggaaggtctgtccacaggaggat

SEQ ID NO: 6070581 - DNA, 25 bp, Homo sapien
gaggggtgtgaggtgggagcgggtg

SEQ ID NO: 6070582 - DNA, 25 bp, Homo sapien
cagctactggatttaagcacagctt

SEQ ID NO: 6070583 - DNA, 25 bp, Homo sapien
cggtctgcggagatgtgtgttctgg

SEQ ID NO: 6070584 - DNA, 25 bp, Homo sapien
cacccccacaggacagataaacaaa

SEQ ID NO: 6070585 - DNA, 25 bp, Homo sapien
tgtggcttctcctgtgctccctcag

SEQ ID NO: 6070586 - DNA, 25 bp, Homo sapien
acatctcacccccacaggacagata

SEQ ID NO: 6070587 - DNA, 25 bp, Homo sapien
tgtgaggtgggagcgggtgaggaag

SEQ ID NO: 6070588 - DNA, 25 bp, Homo sapien
tcaggcacgacagcttctgccagga

SEQ ID NO: 6070589 - DNA, 25 bp, Homo sapien
tttactccttagtctgctcgttgaa

SEQ ID NO: 6070590 - DNA, 25 bp, Homo sapien
aaggaggaatgagccatggtccctt

SEQ ID NO: 6070591 - DNA, 25 bp, Homo sapien
gagccaggggctgccctctgactct

SEQ ID NO: 6070592 - DNA, 25 bp, Homo sapien
tacagggggcaaggcacatctcacc

SEQ ID NO: 6070593 - DNA, 25 bp, Homo sapien
cagagggggtctcaggcacgacagc

SEQ ID NO: 6070594 - DNA, 25 bp, Homo sapien
ttcatccagacgctctcactatact

SEQ ID NO: 6070595 - DNA, 25 bp, Homo sapien
gggtttggctctgacattccgggct

SEQ ID NO: 6070596 - DNA, 25 bp, Homo sapien
aaggaggctgagctgtgccattgtc

SEQ ID NO: 6070597 - DNA, 25 bp, Homo sapien
ggatgggtggggaaagctggagcca

SEQ ID NO: 6070598 - DNA, 25 bp, Homo sapien
ggaccagggtttggctctgacattc

SEQ ID NO: 6070599 - DNA, 25 bp, Homo sapien
tatactcagcctgagccaggggctg

SEQ ID NO: 6070600 - DNA, 25 bp, Homo sapien
acagataaacaaattgagactcaga

SEQ ID NO: 6070601 - DNA, 25 bp, Homo sapien
acagcttctggtcctcaaaaccaca

SEQ ID NO: 6070602 - DNA, 25 bp, Homo sapien
tccacaggaggatgtaaccagactc

SEQ ID NO: 6070603 - DNA, 25 bp, Homo sapien
atgtgagttgcctgagcacccagca

SEQ ID NO: 6070604 - DNA, 25 bp, Homo sapien
agctgaggcgggcccagcatgtggg

SEQ ID NO: 6070605 - DNA, 25 bp, Homo sapien
aaacaaattgagactcagagattta

SEQ ID NO: 6070606 - DNA, 25 bp, Homo sapien
tctcactatactcagcctgagccag

SEQ ID NO: 6070607 - DNA, 25 bp, Homo sapien
gacattccgggcttcatccagacgc

SEQ ID NO: 6070608 - DNA, 25 bp, Homo sapien
gctgagctgtgccattgtccaaagc

SEQ ID NO: 6070609 - DNA, 25 bp, Homo sapien
gccaggagctgaggcgggcccagca

SEQ ID NO: 6070610 - DNA, 25 bp, Homo sapien
aaagctggagccactgcggaaactg

SEQ ID NO: 6070611 - DNA, 25 bp, Homo sapien
cattgtccaaagctttgcttgtggc

SEQ ID NO: 6070612 - DNA, 25 bp, Homo sapien
gttgcctgagcacccagcaaggagg

SEQ ID NO: 6070613 - DNA, 25 bp, Homo sapien
ttctcctgtgctccctcagtcttct

SEQ ID NO: 6070614 - DNA, 25 bp, Homo sapien
gtgacttctgcaggaccagggtttg

SEQ ID NO: 6070615 - DNA, 25 bp, Homo sapien
caaggcacatctcacccccacagga

SEQ ID NO: 6070616 - DNA, 25 bp, Homo sapien
gcttctgccaggagctgaggcgggc

SEQ ID NO: 6070617 - DNA, 25 bp, Homo sapien
ggagccactgcggaaactgtgactt

SEQ ID NO: 6070618 - DNA, 25 bp, Homo sapien
tcttctaccctggagggagcagagg

SEQ ID NO: 6070619 - DNA, 25 bp, Homo sapien
gtcccttgtggcttctcctgtgctc

SEQ ID NO: 6070620 - DNA, 25 bp, Homo sapien
cccagcaaggaggaatgagccatgg

SEQ ID NO: 6070621 - DNA, 25 bp, Homo sapien
ggaggatgtaaccagactccaatca

SEQ ID NO: 6070622 - DNA, 25 bp, Homo sapien
cacaggacagataaacaaattgaga

SEQ ID NO: 6070623 - DNA, 25 bp, Homo sapien
cgttgaaggaggctgagctgtgcca

SEQ ID NO: 6070624 - DNA, 25 bp, Homo sapien
cagactccaatcagtggccggtctg

SEQ ID NO: 6070625 - DNA, 25 bp, Homo sapien
ggtctgtccacaggaggatgtaacc

SEQ ID NO: 6070626 - DNA, 25 bp, Homo sapien
ggctctgacattccgggcttcatcc

SEQ ID NO: 6070627 - DNA, 25 bp, Homo sapien
accacactgtgatacagggggcaag

SEQ ID NO: 6070628 - DNA, 25 bp, Homo sapien
ccagcatgtggggtccagaccttta

SEQ ID NO: 6070629 - DNA, 25 bp, Homo sapien
tggctgaggggtgtgaggtgggagc

SEQ ID NO: 6070630 - DNA, 25 bp, Homo sapien
gtgctccctcagtcttctaccctgg

SEQ ID NO: 6070631 - DNA, 25 bp, Homo sapien
ctgtgccattgtccaaagctttgct

SEQ ID NO: 6070632 - DNA, 25 bp, Homo sapien
ctggatttaagcacagcttctggtc

SEQ ID NO: 6070633 - DNA, 25 bp, Homo sapien
gcgggtgaggaaggtctgtccacag

SEQ ID NO: 6070634 - DNA, 25 bp, Homo sapien
gggtggatgggtggggaaagctgga

SEQ ID NO: 6070635 - DNA, 25 bp, Homo sapien
gcggagatgtgtgttctggagcggg

SEQ ID NO: 6070636 - DNA, 25 bp, Homo sapien
gttctggagcgggagtgtttgaggg

SEQ ID NO: 6070637 - DNA, 25 bp, Homo sapien
tctgctcgttgaaggaggctgagct

SEQ ID NO: 6070638 - DNA, 25 bp, Homo sapien
gggtctcaggcacgacagcttctgc

SEQ ID NO: 6070639 - DNA, 25 bp, Homo sapien
ctggtcctcaaaaccacactgtgat

SEQ ID NO: 6070640 - DNA, 25 bp, Homo sapien
acgacagcttctgccaggagctgag

SEQ ID NO: 6070641 - DNA, 25 bp, Homo sapien
tgagcacccagcaaggaggaatgag

SEQ ID NO: 6070642 - DNA, 25 bp, Homo sapien
atgtggggtccagacctttactcct

SEQ ID NO: 6070643 - DNA, 25 bp, Homo sapien
ttaagcacagcttctggtcctcaaa

SEQ ID NO: 6070644 - DNA, 25 bp, Homo sapien
actgcggaaactgtgacttctgcag

SEQ ID NO: 6070645 - DNA, 25 bp, Homo sapien
ggagcagagggggtctcaggcacga

SEQ ID NO: 6070646 - DNA, 25 bp, Homo sapien
gccatggtcccttgtggcttctcct

SEQ ID NO: 6070647 - DNA, 25 bp, Homo sapien
tgtaaccagactccaatcagtggcc

SEQ ID NO: 6070648 - DNA, 25 bp, Homo sapien
cagcctgagccaggggctgccctct

SEQ ID NO: 6070649 - DNA, 25 bp, Homo sapien
gaatgagccatggtcccttgtggct

SEQ ID NO: 6070650 - DNA, 25 bp, Homo sapien
tctgcaggaccagggtttggctctg

SEQ ID NO: 6070651 - DNA, 25 bp, Homo sapien
agtggccggtctgcggagatgtgtg

SEQ ID NO: 6070652 - DNA, 25 bp, Homo sapien
gcgggcccagcatgtggggtccaga

SEQ ID NO: 6070653 - DNA, 25 bp, Homo sapien
ccaaagctttgcttgtggctgaggg

SEQ ID NO: 6070654 - DNA, 25 bp, Homo sapien
agatttatgtgagttgcctgagcac

SEQ ID NO: 6070655 - DNA, 25 bp, Homo sapien
tgacaacagctactggatttaagca

SEQ ID NO: 6070656 - DNA, 25 bp, Homo sapien
tgaggggtggatgggtggggaaagc

SEQ ID NO: 6070657 - DNA, 25 bp, Homo sapien
agacgctctcactatactcagcctg

SEQ ID NO: 6070658 - DNA, 25 bp, Homo sapien
actcagagatttatgtgagttgcct

SEQ ID NO: 6070659 - DNA, 25 bp, Homo sapien
ccaatcagtggccggtctgcggaga

SEQ ID NO: 6070660 - DNA, 25 bp, Homo sapien
gtggggaaagctggagccactgcgg

SEQ ID NO: 6070661 - DNA, 25 bp, Homo sapien
cagacctttactccttagtctgctc

SEQ ID NO: 6070662 - DNA, 25 bp, Homo sapien
ctcaaaaccacactgtgatacaggg

SEQ ID NO: 6070663 - DNA, 25 bp, Homo sapien
atgtgtgttctggagcgggagtgtt

SEQ ID NO: 6070664 - DNA, 25 bp, Homo sapien
ggaatgggtctggtggtgaaaataa

SEQ ID NO: 6070665 - DNA, 25 bp, Homo sapien
cgacggtgatgtcaaaaaagacgac

SEQ ID NO: 6070666 - DNA, 25 bp, Homo sapien
gaatgggtctggtggtgaaaataaa

SEQ ID NO: 6070667 - DNA, 25 bp, Homo sapien
gacggtgatgtcaaaaaagacgacg

SEQ ID NO: 6070668 - DNA, 25 bp, Homo sapien
gggtctatagtcaggaccccagcca

SEQ ID NO: 6070669 - DNA, 25 bp, Homo sapien
ggtccccttcattcatagtttcaac

SEQ ID NO: 6070670 - DNA, 25 bp, Homo sapien
tatgctttgcagtctccagacgtga

SEQ ID NO: 6070671 - DNA, 25 bp, Homo sapien
catatggtgggtctatagtcaggac

SEQ ID NO: 6070672 - DNA, 25 bp, Homo sapien
catagtttcaacagtctgcacagca

SEQ ID NO: 6070673 - DNA, 25 bp, Homo sapien
acagcatgtcccataattccggtca

SEQ ID NO: 6070674 - DNA, 25 bp, Homo sapien
taagatcctgaacacgcgacagaat

SEQ ID NO: 6070675 - DNA, 25 bp, Homo sapien
cagaataatctcattagagctgctg

SEQ ID NO: 6070676 - DNA, 25 bp, Homo sapien
cataattccggtcacagacatgctg

SEQ ID NO: 6070677 - DNA, 25 bp, Homo sapien
tcactggctgtcactcggacctctt

SEQ ID NO: 6070678 - DNA, 25 bp, Homo sapien
cactcggacctctttgtaaatgtaa

SEQ ID NO: 6070679 - DNA, 25 bp, Homo sapien
tggagcgtctccctgttcagtgatg

SEQ ID NO: 6070680 - DNA, 25 bp, Homo sapien
ctatgtttcttatctcaggaggtgg

SEQ ID NO: 6070681 - DNA, 25 bp, Homo sapien
gatgcccgatacttatcaatgtttt

SEQ ID NO: 6070682 - DNA, 25 bp, Homo sapien
atgttccattgttatgtgacgttcc

SEQ ID NO: 6070683 - DNA, 25 bp, Homo sapien
tcaatgttacgcttctgaggtcttc

SEQ ID NO: 6070684 - DNA, 25 bp, Homo sapien
ccacggattgatgcccgatacttat

SEQ ID NO: 6070685 - DNA, 25 bp, Homo sapien
cactgctacactgtacataatgtat

SEQ ID NO: 6070686 - DNA, 25 bp, Homo sapien
ggatgaccatgggtctccagataat

SEQ ID NO: 6070687 - DNA, 25 bp, Homo sapien
tatgtgacgttccaaaattggaaca

SEQ ID NO: 6070688 - DNA, 25 bp, Homo sapien
caaaagagggcttgaataccatttc

SEQ ID NO: 6070689 - DNA, 25 bp, Homo sapien
accatttctttccacggattgatgc

SEQ ID NO: 6070690 - DNA, 25 bp, Homo sapien
tgacgttccaaaattggaacactag

SEQ ID NO: 6070691 - DNA, 25 bp, Homo sapien
tttctttccacggattgatgcccga

SEQ ID NO: 6070692 - DNA, 25 bp, Homo sapien
gacaaatcacattcataccttacaa

SEQ ID NO: 6070693 - DNA, 25 bp, Homo sapien
gcctattacatcattagattttcat

SEQ ID NO: 6070694 - DNA, 25 bp, Homo sapien
agtagaatcccaggcttatcatatt

SEQ ID NO: 6070695 - DNA, 25 bp, Homo sapien
aatatactatcttcaactctcggct

SEQ ID NO: 6070696 - DNA, 25 bp, Homo sapien
gaatcccaggcttatcatattataa

SEQ ID NO: 6070697 - DNA, 25 bp, Homo sapien
tgtaccttaatattgtcactttata

SEQ ID NO: 6070698 - DNA, 25 bp, Homo sapien
tatcttcaactctcggcttttttcc

SEQ ID NO: 6070699 - DNA, 25 bp, Homo sapien
gaaatatactatcttcaactctcgg

SEQ ID NO: 6070700 - DNA, 25 bp, Homo sapien
tagaatcccaggcttatcatattat

SEQ ID NO: 6070701 - DNA, 25 bp, Homo sapien
tgaaatgagtttaagaactaaatta

SEQ ID NO: 6070702 - DNA, 25 bp, Homo sapien
cattcataccttacaatttaaattc

SEQ ID NO: 6070703 - DNA, 25 bp, Homo sapien
actaccagaaatatactatcttcaa

SEQ ID NO: 6070704 - DNA, 25 bp, Homo sapien
gctttgagactgacaggaagagcag

SEQ ID NO: 6070705 - DNA, 25 bp, Homo sapien
tggcacaggtgagcatccacacact

SEQ ID NO: 6070706 - DNA, 25 bp, Homo sapien
agctcactcttttggccatctccag

SEQ ID NO: 6070707 - DNA, 25 bp, Homo sapien
ggctgaacctccttgtgctttgaga

SEQ ID NO: 6070708 - DNA, 25 bp, Homo sapien
agggccctaggttccctctgttcag

SEQ ID NO: 6070709 - DNA, 25 bp, Homo sapien
ggaacctgaggtcacatcagtctgt

SEQ ID NO: 6070710 - DNA, 25 bp, Homo sapien
ccactgatgtgggaacctgaggtca

SEQ ID NO: 6070711 - DNA, 25 bp, Homo sapien
catcaaagcttccaggtcgggatac

SEQ ID NO: 6070712 - DNA, 25 bp, Homo sapien
catgggatccagtagtcctgagctc

SEQ ID NO: 6070713 - DNA, 25 bp, Homo sapien
tatccagaacacttctaccaggtgg

SEQ ID NO: 6070714 - DNA, 25 bp, Homo sapien
gaggaggacgtgtctccacattgca

SEQ ID NO: 6070715 - DNA, 25 bp, Homo sapien
gcagctttaatcacattggccaagg

SEQ ID NO: 6070716 - DNA, 25 bp, Homo sapien
catacctgatgttcgagattcttag

SEQ ID NO: 6070717 - DNA, 25 bp, Homo sapien
tatttccttgccagaattatgaggt

SEQ ID NO: 6070718 - DNA, 25 bp, Homo sapien
tatggtttggtgtgagtctccttgg

SEQ ID NO: 6070719 - DNA, 25 bp, Homo sapien
catgatttccaatggcctatctaca

SEQ ID NO: 6070720 - DNA, 25 bp, Homo sapien
ctgccttctggcgtgaaagttttct

SEQ ID NO: 6070721 - DNA, 25 bp, Homo sapien
tatcacgactgccttctggcgtgaa

SEQ ID NO: 6070722 - DNA, 25 bp, Homo sapien
agttttctggtgaagtctgctgaca

SEQ ID NO: 6070723 - DNA, 25 bp, Homo sapien
gcttcatcgattcttctgttggaca

SEQ ID NO: 6070724 - DNA, 25 bp, Homo sapien
ggattcatcatacctgatgttcgag

SEQ ID NO: 6070725 - DNA, 25 bp, Homo sapien
tgaggatgtctcaaaagtctcttaa

SEQ ID NO: 6070726 - DNA, 25 bp, Homo sapien
taatttcctgtcaggttaatcacat

SEQ ID NO: 6070727 - DNA, 25 bp, Homo sapien
gctgacagtcttccgtggatcattt

SEQ ID NO: 6070728 - DNA, 25 bp, Homo sapien
ttcaaggcttctttacaaggtgtcc

SEQ ID NO: 6070729 - DNA, 25 bp, Homo sapien
taacgccaatggcaagctgcttcct

SEQ ID NO: 6070730 - DNA, 25 bp, Homo sapien
tgatttacacaccagaactaacagc

SEQ ID NO: 6070731 - DNA, 25 bp, Homo sapien
caggcagggacacttctgcttaggc

SEQ ID NO: 6070732 - DNA, 25 bp, Homo sapien
cttggctttccagaggttcagtctc

SEQ ID NO: 6070733 - DNA, 25 bp, Homo sapien
gatgatggctcttacttcgtccaca

SEQ ID NO: 6070734 - DNA, 25 bp, Homo sapien
gttctttttgaacgccaaggctaga

SEQ ID NO: 6070735 - DNA, 25 bp, Homo sapien
tcgtccacaaagtcagtggtgttct

SEQ ID NO: 6070736 - DNA, 25 bp, Homo sapien
tccagggctctggtaacttcgttaa

SEQ ID NO: 6070737 - DNA, 25 bp, Homo sapien
taatgttacagaagcctgccgaccg

SEQ ID NO: 6070738 - DNA, 25 bp, Homo sapien
catggcaggcttgactgatttacac

SEQ ID NO: 6070739 - DNA, 25 bp, Homo sapien
gaacacattttaagccaatgacggg

SEQ ID NO: 6070740 - DNA, 25 bp, Homo sapien
cctagataaacccatggtggacaat

SEQ ID NO: 6070741 - DNA, 25 bp, Homo sapien
gaacgaagaatcatttgcaggtata

SEQ ID NO: 6070742 - DNA, 25 bp, Homo sapien
gcccaggtatacatactagccctag

SEQ ID NO: 6070743 - DNA, 25 bp, Homo sapien
tactagccctagataaacccatggt

SEQ ID NO: 6070744 - DNA, 25 bp, Homo sapien
caggtatacatactagccctagata

SEQ ID NO: 6070745 - DNA, 25 bp, Homo sapien
tgtagcccaggtatacatactagcc

SEQ ID NO: 6070746 - DNA, 25 bp, Homo sapien
taaacccatggtggacaatttacac

SEQ ID NO: 6070747 - DNA, 25 bp, Homo sapien
caatttacacatgaacgaagaatca

SEQ ID NO: 6070748 - DNA, 25 bp, Homo sapien
catgaacgaagaatcatttgcaggt

SEQ ID NO: 6070749 - DNA, 25 bp, Homo sapien
tacatactagccctagataaaccca

SEQ ID NO: 6070750 - DNA, 25 bp, Homo sapien
gccctagataaacccatggtggaca

SEQ ID NO: 6070751 - DNA, 25 bp, Homo sapien
tacacatgaacgaagaatcatttgc

SEQ ID NO: 6070752 - DNA, 25 bp, Homo sapien
tgcaaagcgcaacatgcttttgtca

SEQ ID NO: 6070753 - DNA, 25 bp, Homo sapien
tcccagtggttactcagtattttgc

SEQ ID NO: 6070754 - DNA, 25 bp, Homo sapien
aattctcagtagtctatagtatccc

SEQ ID NO: 6070755 - DNA, 25 bp, Homo sapien
cagtagtctatagtatcccattttc

SEQ ID NO: 6070756 - DNA, 25 bp, Homo sapien
tattccaaagccatacccaaaacat

SEQ ID NO: 6070757 - DNA, 25 bp, Homo sapien
ggttactcagtattttgcacacaaa

SEQ ID NO: 6070758 - DNA, 25 bp, Homo sapien
acaatgaaatacatccctgttaaag

SEQ ID NO: 6070759 - DNA, 25 bp, Homo sapien
aatgaggtaagaagacaaacggtga

SEQ ID NO: 6070760 - DNA, 25 bp, Homo sapien
aatattcctcaattctagaagactg

SEQ ID NO: 6070761 - DNA, 25 bp, Homo sapien
aaaaacagttacaatacctgccact

SEQ ID NO: 6070762 - DNA, 25 bp, Homo sapien
aagccattgctacagtgattcacta

SEQ ID NO: 6070763 - DNA, 25 bp, Homo sapien
tcaatgccttgctgatgcaaagcgc

SEQ ID NO: 6070764 - DNA, 25 bp, Homo sapien
gatctcaagtcagtatcacctccct

SEQ ID NO: 6070765 - DNA, 25 bp, Homo sapien
aatttcacggagatctgggtcagcc

SEQ ID NO: 6070766 - DNA, 25 bp, Homo sapien
gtcacagccaaaacccgacaaagtg

SEQ ID NO: 6070767 - DNA, 25 bp, Homo sapien
gactgtcctatccatccagagtgtg

SEQ ID NO: 6070768 - DNA, 25 bp, Homo sapien
ccgacaaagtgaggcacaaactcgt

SEQ ID NO: 6070769 - DNA, 25 bp, Homo sapien
catcagtgggtatgctccaaagagg

SEQ ID NO: 6070770 - DNA, 25 bp, Homo sapien
ccagagagtccaagacgacgatggt

SEQ ID NO: 6070771 - DNA, 25 bp, Homo sapien
gctcagtattgaggacgactgtcct

SEQ ID NO: 6070772 - DNA, 25 bp, Homo sapien
caaaacacccataagatctcaagtc

SEQ ID NO: 6070773 - DNA, 25 bp, Homo sapien
ttcattatccacatgacattggctc

SEQ ID NO: 6070774 - DNA, 25 bp, Homo sapien
ccaaagaggctcagtattgaggacg

SEQ ID NO: 6070775 - DNA, 25 bp, Homo sapien
cacaaactcgtttgggacacagagg

SEQ ID NO: 6070776 - DNA, 25 bp, Homo sapien
cgtttgcctcagaacctatttggtg

SEQ ID NO: 6070777 - DNA, 25 bp, Homo sapien
taactaaagagccttgtgcgaagca

SEQ ID NO: 6070778 - DNA, 25 bp, Homo sapien
catgcaagccagatatggacaggaa

SEQ ID NO: 6070779 - DNA, 25 bp, Homo sapien
tgcaagtcagaaaataccttcctgc

SEQ ID NO: 6070780 - DNA, 25 bp, Homo sapien
tgcgaagcaagtgttcgatacgtgc

SEQ ID NO: 6070781 - DNA, 25 bp, Homo sapien
gaggtttaatagcagttgagccagc

SEQ ID NO: 6070782 - DNA, 25 bp, Homo sapien
tagtcattgctctcgtttgcctcag

SEQ ID NO: 6070783 - DNA, 25 bp, Homo sapien
ggattacgttcataggtctgagcac

SEQ ID NO: 6070784 - DNA, 25 bp, Homo sapien
caagatgcaccaaacttcatgtcca

SEQ ID NO: 6070785 - DNA, 25 bp, Homo sapien
tacatctagctgcattgcaagtcag

SEQ ID NO: 6070786 - DNA, 25 bp, Homo sapien
taccccttgggtttcgatgcttgga

SEQ ID NO: 6070787 - DNA, 25 bp, Homo sapien
tcagtttcaaccaagctgagctgct

SEQ ID NO: 6070788 - DNA, 25 bp, Homo sapien
cacaactggcatttgatccacattc

SEQ ID NO: 6070789 - DNA, 25 bp, Homo sapien
gatctaacatcaggtctccttggca

SEQ ID NO: 6070790 - DNA, 25 bp, Homo sapien
ccacattccataggctcctctctgg

SEQ ID NO: 6070791 - DNA, 25 bp, Homo sapien
catcgccccgtttcctacttttcag

SEQ ID NO: 6070792 - DNA, 25 bp, Homo sapien
actctttaatttgcggctggtcgac

SEQ ID NO: 6070793 - DNA, 25 bp, Homo sapien
ctgcttggtgctgtgtgaagcgcac

SEQ ID NO: 6070794 - DNA, 25 bp, Homo sapien
acattcctcatttcgtcacaactgg

SEQ ID NO: 6070795 - DNA, 25 bp, Homo sapien
ccttgtgaggagatcggctcttgct

SEQ ID NO: 6070796 - DNA, 25 bp, Homo sapien
ctcttgactcccttgtgaggagatc

SEQ ID NO: 6070797 - DNA, 25 bp, Homo sapien
catgactctttaatttgcggctggt

SEQ ID NO: 6070798 - DNA, 25 bp, Homo sapien
tcctctctggctttgatctaacatc

SEQ ID NO: 6070799 - DNA, 25 bp, Homo sapien
catttcgtcacaactggcatttgat

SEQ ID NO: 6070800 - DNA, 25 bp, Homo sapien
tttaccatagatgacaagtacaggg

SEQ ID NO: 6070801 - DNA, 25 bp, Homo sapien
acagacacagcagggtcctgagtca

SEQ ID NO: 6070802 - DNA, 25 bp, Homo sapien
tgtcccgggagttacagtaatagtc

SEQ ID NO: 6070803 - DNA, 25 bp, Homo sapien
tgtctgtcccaaggccacagacaca

SEQ ID NO: 6070804 - DNA, 25 bp, Homo sapien
ttctgctggtaccagcttgcataat

SEQ ID NO: 6070805 - DNA, 25 bp, Homo sapien
gctgtcccgggagttacagtaatag

SEQ ID NO: 6070806 - DNA, 25 bp, Homo sapien
ccttggcatgtgatcctgactgtct

SEQ ID NO: 6070807 - DNA, 25 bp, Homo sapien
ccagagaatcggtctgggatccctg

SEQ ID NO: 6070808 - DNA, 25 bp, Homo sapien
tgctggtaccagcttgcataatagc

SEQ ID NO: 6070809 - DNA, 25 bp, Homo sapien
gtgatcctgactgtctgtcccaagg

SEQ ID NO: 6070810 - DNA, 25 bp, Homo sapien
ggccggttgtttttaccatagatga

SEQ ID NO: 6070811 - DNA, 25 bp, Homo sapien
cacagcagggtcctgagtcagctca

SEQ ID NO: 6070812 - DNA, 25 bp, Homo sapien
tgccagtaaggcgtctgtgttctgt

SEQ ID NO: 6070813 - DNA, 25 bp, Homo sapien
tacctcctctcttaacagtgttaca

SEQ ID NO: 6070814 - DNA, 25 bp, Homo sapien
tatgtgcctatccatcccttaacta

SEQ ID NO: 6070815 - DNA, 25 bp, Homo sapien
tctgagcaacatcctagcttaaggg

SEQ ID NO: 6070816 - DNA, 25 bp, Homo sapien
gcagtataggcactgtcttgccgtt

SEQ ID NO: 6070817 - DNA, 25 bp, Homo sapien
ctaagttttgccaaagggactccat

SEQ ID NO: 6070818 - DNA, 25 bp, Homo sapien
ttgtgcccgcaccaaagttgggatg

SEQ ID NO: 6070819 - DNA, 25 bp, Homo sapien
taggctgatttattgtgcccgcacc

SEQ ID NO: 6070820 - DNA, 25 bp, Homo sapien
ggtactacagctgtgcatgcctaag

SEQ ID NO: 6070821 - DNA, 25 bp, Homo sapien
tgagaccttccctctctatgtgcct

SEQ ID NO: 6070822 - DNA, 25 bp, Homo sapien
aagttgggatggtcacttctgagca

SEQ ID NO: 6070823 - DNA, 25 bp, Homo sapien
ttctggtcatatcatcgatctagcc

SEQ ID NO: 6070824 - DNA, 25 bp, Homo sapien
tgttcccggctcttgggatcactgc

SEQ ID NO: 6070825 - DNA, 25 bp, Homo sapien
ccaggtcctttcgaatgttctcaaa

SEQ ID NO: 6070826 - DNA, 25 bp, Homo sapien
tctaggcgtgttggtttccgtctca

SEQ ID NO: 6070827 - DNA, 25 bp, Homo sapien
tgtcatcaagctttagctctaggcg

SEQ ID NO: 6070828 - DNA, 25 bp, Homo sapien
caagctttagctctaggcgtgttgg

SEQ ID NO: 6070829 - DNA, 25 bp, Homo sapien
ggcgtgttggtttccgtctcagcat

SEQ ID NO: 6070830 - DNA, 25 bp, Homo sapien
ttagctctaggcgtgttggtttccg

SEQ ID NO: 6070831 - DNA, 25 bp, Homo sapien
ttcaatgtcatcaagctttagctct

SEQ ID NO: 6070832 - DNA, 25 bp, Homo sapien
gctcttgggatcactgctaagccca

SEQ ID NO: 6070833 - DNA, 25 bp, Homo sapien
gggtttataaccaatccgatcattg

SEQ ID NO: 6070834 - DNA, 25 bp, Homo sapien
cccggctcttgggatcactgctaag

SEQ ID NO: 6070835 - DNA, 25 bp, Homo sapien
tgatcatttgttcccggctcttggg

SEQ ID NO: 6070836 - DNA, 25 bp, Homo sapien
ttagcgtgaatagcgcacagattgg

SEQ ID NO: 6070837 - DNA, 25 bp, Homo sapien
tggtgacgcgtttagcgtgaatagc

SEQ ID NO: 6070838 - DNA, 25 bp, Homo sapien
acgcaggtcggttttgaagtcctgg

SEQ ID NO: 6070839 - DNA, 25 bp, Homo sapien
cacagattggtgtcttcgaagagtc

SEQ ID NO: 6070840 - DNA, 25 bp, Homo sapien
cggatgcgacgtgccagctggatat

SEQ ID NO: 6070841 - DNA, 25 bp, Homo sapien
acgtgccagctggatatctttgggc

SEQ ID NO: 6070842 - DNA, 25 bp, Homo sapien
tttccccacggatgcgacgtgccag

SEQ ID NO: 6070843 - DNA, 25 bp, Homo sapien
tagcgacggatttcgcgcaaggcca

SEQ ID NO: 6070844 - DNA, 25 bp, Homo sapien
tttagtagcaagctgcttgcgcgga

SEQ ID NO: 6070845 - DNA, 25 bp, Homo sapien
gctcttacgggctgctttagtagca

SEQ ID NO: 6070846 - DNA, 25 bp, Homo sapien
gccggagcgctcttacgggctgctt

SEQ ID NO: 6070847 - DNA, 25 bp, Homo sapien
ggtgtcttcgaagagtcccaccagg

SEQ ID NO: 6070848 - DNA, 25 bp, Homo sapien
cgtgttccgtgtaggtgacagcatc

SEQ ID NO: 6070849 - DNA, 25 bp, Homo sapien
ccttggatattgtcacgcaatacct

SEQ ID NO: 6070850 - DNA, 25 bp, Homo sapien
ttacggtgacgcttggcgccaccct

SEQ ID NO: 6070851 - DNA, 25 bp, Homo sapien
aatgaggccagaaatacgcttgacg

SEQ ID NO: 6070852 - DNA, 25 bp, Homo sapien
caggaaaactttcagcactccgcga

SEQ ID NO: 6070853 - DNA, 25 bp, Homo sapien
tattgtcacgcaataccttacggtg

SEQ ID NO: 6070854 - DNA, 25 bp, Homo sapien
gcggtagtgtactgtagaggtaagc

SEQ ID NO: 6070855 - DNA, 25 bp, Homo sapien
agccaggcggcggatagcgggcttg

SEQ ID NO: 6070856 - DNA, 25 bp, Homo sapien
taaatgaggccagaaatacgcttga

SEQ ID NO: 6070857 - DNA, 25 bp, Homo sapien
ggaaaactttcagcactccgcgagt

SEQ ID NO: 6070858 - DNA, 25 bp, Homo sapien
tccgcgagtttcctcataaatgagg

SEQ ID NO: 6070859 - DNA, 25 bp, Homo sapien
gcactccgcgagtttcctcataaat

SEQ ID NO: 6070860 - DNA, 25 bp, Homo sapien
aatttgccttcatttgactgactgt

SEQ ID NO: 6070861 - DNA, 25 bp, Homo sapien
atttgccttcatttgactgactgtt

SEQ ID NO: 6070862 - DNA, 25 bp, Homo sapien
tctaggcccactgaggctctgttac

SEQ ID NO: 6070863 - DNA, 25 bp, Homo sapien
aaatttagatgtatgaggtttggac

SEQ ID NO: 6070864 - DNA, 25 bp, Homo sapien
tttctgtagccaggtaactcttaga

SEQ ID NO: 6070865 - DNA, 25 bp, Homo sapien
caagaaggctgagttctacattgat

SEQ ID NO: 6070866 - DNA, 25 bp, Homo sapien
ggtcttaagtgtcatctggcatctt

SEQ ID NO: 6070867 - DNA, 25 bp, Homo sapien
tcacaagtaggtcttaagtgtcatc

SEQ ID NO: 6070868 - DNA, 25 bp, Homo sapien
tcttctttctgtagccaggtaactc

SEQ ID NO: 6070869 - DNA, 25 bp, Homo sapien
ctttctgtagccaggtaactcttag

SEQ ID NO: 6070870 - DNA, 25 bp, Homo sapien
tgtagccaggtaactcttagatctt

SEQ ID NO: 6070871 - DNA, 25 bp, Homo sapien
agtaggtcttaagtgtcatctggca

SEQ ID NO: 6070872 - DNA, 25 bp, Homo sapien
caagtaggtcttaagtgtcatctgg

SEQ ID NO: 6070873 - DNA, 25 bp, Homo sapien
taggtcttaagtgtcatctggcatc

SEQ ID NO: 6070874 - DNA, 25 bp, Homo sapien
aatatcacaagtaggtcttaagtgt

SEQ ID NO: 6070875 - DNA, 25 bp, Homo sapien
gtaggtcttaagtgtcatctggcat

SEQ ID NO: 6070876 - DNA, 25 bp, Homo sapien
tacatatacacaagaggtaaaaagt

SEQ ID NO: 6070877 - DNA, 25 bp, Homo sapien
tacaaaagcataaatggttagcccc

SEQ ID NO: 6070878 - DNA, 25 bp, Homo sapien
gccgcgcacggttgatgtacaaaag

SEQ ID NO: 6070879 - DNA, 25 bp, Homo sapien
tcagctcagcaaatatataatcagt

SEQ ID NO: 6070880 - DNA, 25 bp, Homo sapien
tggaacgtctgtgcggcctgagacc

SEQ ID NO: 6070881 - DNA, 25 bp, Homo sapien
tccggccgcgcacggttgatgtaca

SEQ ID NO: 6070882 - DNA, 25 bp, Homo sapien
agtcaaatcagaaaacggcttcgga

SEQ ID NO: 6070883 - DNA, 25 bp, Homo sapien
tgcttttttaaagatcaccctggag

SEQ ID NO: 6070884 - DNA, 25 bp, Homo sapien
tagaaatttgattggaacgcccctc

SEQ ID NO: 6070885 - DNA, 25 bp, Homo sapien
atcagaaaacggcttcggacgaaag

SEQ ID NO: 6070886 - DNA, 25 bp, Homo sapien
tcctcctctggaacgtctgtgcggc

SEQ ID NO: 6070887 - DNA, 25 bp, Homo sapien
tgacaacagaaaccgcagtaaaaag

SEQ ID NO: 6070888 - DNA, 25 bp, Homo sapien
aggaaaaaacggctgagcggctgga

SEQ ID NO: 6070889 - DNA, 25 bp, Homo sapien
gaaaaaacggctgagcggctggaaa

SEQ ID NO: 6070890 - DNA, 25 bp, Homo sapien
aaggaaaaaacggctgagcggctgg

SEQ ID NO: 6070891 - DNA, 25 bp, Homo sapien
aaaaacggctgagcggctggaaaag

SEQ ID NO: 6070892 - DNA, 25 bp, Homo sapien
aaaacggctgagcggctggaaaagt

SEQ ID NO: 6070893 - DNA, 25 bp, Homo sapien
ggaaaaaacggctgagcggctggaa

SEQ ID NO: 6070894 - DNA, 25 bp, Homo sapien
tgaatcaagtgatccttttgctggg

SEQ ID NO: 6070895 - DNA, 25 bp, Homo sapien
gagtgcagtagagcaaatcacagct

SEQ ID NO: 6070896 - DNA, 25 bp, Homo sapien
acagctcactgcaagggcacacatc

SEQ ID NO: 6070897 - DNA, 25 bp, Homo sapien
taactgctgccaaattttatggagc

SEQ ID NO: 6070898 - DNA, 25 bp, Homo sapien
cagatagagtcttgccatgttgccc

SEQ ID NO: 6070899 - DNA, 25 bp, Homo sapien
ggcacacatcactattcccagctaa

SEQ ID NO: 6070900 - DNA, 25 bp, Homo sapien
tgctgtcaatagcataactgctgcc

SEQ ID NO: 6070901 - DNA, 25 bp, Homo sapien
gacatttcatgccttaaggtctctg

SEQ ID NO: 6070902 - DNA, 25 bp, Homo sapien
gactaaacgtctaactgaatacaga

SEQ ID NO: 6070903 - DNA, 25 bp, Homo sapien
tcagaaagtcttccatgatgggcca

SEQ ID NO: 6070904 - DNA, 25 bp, Homo sapien
tctgctactcaaggtggagtgcagt

SEQ ID NO: 6070905 - DNA, 25 bp, Homo sapien
gagccactgcacctagctcgattga

SEQ ID NO: 6070906 - DNA, 25 bp, Homo sapien
tcctttggcttaggtttgctaaagc

SEQ ID NO: 6070907 - DNA, 25 bp, Homo sapien
tagcttattgtagacttgtgcctac

SEQ ID NO: 6070908 - DNA, 25 bp, Homo sapien
gggagtcaatgctacctgggacact

SEQ ID NO: 6070909 - DNA, 25 bp, Homo sapien
cagaacatgctagtcagcttgcagt

SEQ ID NO: 6070910 - DNA, 25 bp, Homo sapien
gcaatgttaccttaccataggcctt

SEQ ID NO: 6070911 - DNA, 25 bp, Homo sapien
catttcactccaatgacgggagtca

SEQ ID NO: 6070912 - DNA, 25 bp, Homo sapien
caatatatgtttattggagcgatcc

SEQ ID NO: 6070913 - DNA, 25 bp, Homo sapien
ttttacctcgtaaagataacagaga

SEQ ID NO: 6070914 - DNA, 25 bp, Homo sapien
tgtaatagtgatcaggaggagctct

SEQ ID NO: 6070915 - DNA, 25 bp, Homo sapien
gcctactttgtcatgagggtttgac

SEQ ID NO: 6070916 - DNA, 25 bp, Homo sapien
ccataggccttaattcaaactttga

SEQ ID NO: 6070917 - DNA, 25 bp, Homo sapien
ggtttgctaaagctagaagattcaa

SEQ ID NO: 6070918 - DNA, 25 bp, Homo sapien
ccagcctggtctcgtctcgagttcc

SEQ ID NO: 6070919 - DNA, 25 bp, Homo sapien
tgtgtcacattggtgtgatcgtggc

SEQ ID NO: 6070920 - DNA, 25 bp, Homo sapien
cactgtgtcacattggtgtgatcgt

SEQ ID NO: 6070921 - DNA, 25 bp, Homo sapien
ctcaacctcccctgcccaagctatc

SEQ ID NO: 6070922 - DNA, 25 bp, Homo sapien
cccagcctggtctcgtctcgagttc

SEQ ID NO: 6070923 - DNA, 25 bp, Homo sapien
tcaacctcccctgcccaagctatcc

SEQ ID NO: 6070924 - DNA, 25 bp, Homo sapien
ctgtgtcacattggtgtgatcgtgg

SEQ ID NO: 6070925 - DNA, 25 bp, Homo sapien
caacctcccctgcccaagctatcct

SEQ ID NO: 6070926 - DNA, 25 bp, Homo sapien
actgtgtcacattggtgtgatcgtg

SEQ ID NO: 6070927 - DNA, 25 bp, Homo sapien
tatccgtgtgaacctggattttctt

SEQ ID NO: 6070928 - DNA, 25 bp, Homo sapien
aaaaatatgtatccgtgtgaacctg

SEQ ID NO: 6070929 - DNA, 25 bp, Homo sapien
tgtaaaacggatcagtggattttta

SEQ ID NO: 6070930 - DNA, 25 bp, Homo sapien
taagcaatcgccattcagacttgaa

SEQ ID NO: 6070931 - DNA, 25 bp, Homo sapien
aaagaatgactggtaagcaatcgcc

SEQ ID NO: 6070932 - DNA, 25 bp, Homo sapien
gaaatttgcatttaccatgggactt

SEQ ID NO: 6070933 - DNA, 25 bp, Homo sapien
gattccacactgcagctatctttga

SEQ ID NO: 6070934 - DNA, 25 bp, Homo sapien
catgggtaaaagttaccactcttca

SEQ ID NO: 6070935 - DNA, 25 bp, Homo sapien
tggatttttagtttaacagagtaca

SEQ ID NO: 6070936 - DNA, 25 bp, Homo sapien
tccaaatgaccaatacaggatatta

SEQ ID NO: 6070937 - DNA, 25 bp, Homo sapien
tctttatatacttcaacataccaca

SEQ ID NO: 6070938 - DNA, 25 bp, Homo sapien
accatgggacttttctgatatcagt

SEQ ID NO: 6070939 - DNA, 25 bp, Homo sapien
ttcatattaagggtggcaaagagga

SEQ ID NO: 6070940 - DNA, 25 bp, Homo sapien
caaaacatagaaataaggttgtggg

SEQ ID NO: 6070941 - DNA, 25 bp, Homo sapien
gcagtgctaacagaaccagcacatt

SEQ ID NO: 6070942 - DNA, 25 bp, Homo sapien
gagatctgtgaaggctgattactga

SEQ ID NO: 6070943 - DNA, 25 bp, Homo sapien
gatgagggaatagcttaattagcaa

SEQ ID NO: 6070944 - DNA, 25 bp, Homo sapien
gagatctgtgaatctgttaagtgag

SEQ ID NO: 6070945 - DNA, 25 bp, Homo sapien
gatgtaaaagcgtagataaacccag

SEQ ID NO: 6070946 - DNA, 25 bp, Homo sapien
caagggatgactcatattaagttgg

SEQ ID NO: 6070947 - DNA, 25 bp, Homo sapien
ggatatactggtgttgaagcggcca

SEQ ID NO: 6070948 - DNA, 25 bp, Homo sapien
caaaaagattggcttaaatggaaat

SEQ ID NO: 6070949 - DNA, 25 bp, Homo sapien
ccatgtggagatggattgggattaa

SEQ ID NO: 6070950 - DNA, 25 bp, Homo sapien
ttcaaccacacagccatgactgaac

SEQ ID NO: 6070951 - DNA, 25 bp, Homo sapien
ctcaaaagttaggtggctgagaggt

SEQ ID NO: 6070952 - DNA, 25 bp, Homo sapien
ttccatgagattctaagtgagtagg

SEQ ID NO: 6070953 - DNA, 25 bp, Homo sapien
gagatactcccttacctgatgctga

SEQ ID NO: 6070954 - DNA, 25 bp, Homo sapien
cagcagaagataacaggtaagatag

SEQ ID NO: 6070955 - DNA, 25 bp, Homo sapien
tccgcttgcatcagagatactccct

SEQ ID NO: 6070956 - DNA, 25 bp, Homo sapien
cccattttataaagtgagactctca

SEQ ID NO: 6070957 - DNA, 25 bp, Homo sapien
gcagaactggcatttcaacttggac

SEQ ID NO: 6070958 - DNA, 25 bp, Homo sapien
aagcaggccaggtgaattccatgag

SEQ ID NO: 6070959 - DNA, 25 bp, Homo sapien
gccattgggctgaacaacttctaca

SEQ ID NO: 6070960 - DNA, 25 bp, Homo sapien
gaatatttttactccggaaacagca

SEQ ID NO: 6070961 - DNA, 25 bp, Homo sapien
taatccctgaatttctccgcttgca

SEQ ID NO: 6070962 - DNA, 25 bp, Homo sapien
gacaaccaccctttaaggcaatcat

SEQ ID NO: 6070963 - DNA, 25 bp, Homo sapien
gaacatgcgtccatttatttggagc

SEQ ID NO: 6070964 - DNA, 25 bp, Homo sapien
catgcgtccatttatttggagctgg

SEQ ID NO: 6070965 - DNA, 25 bp, Homo sapien
tccccatggctttggaggagatgcc

SEQ ID NO: 6070966 - DNA, 25 bp, Homo sapien
cgggagcggacttagctggatcagg

SEQ ID NO: 6070967 - DNA, 25 bp, Homo sapien
aacatgcgtccatttatttggagct

SEQ ID NO: 6070968 - DNA, 25 bp, Homo sapien
ggcgtgcttggccagttccccaggc

SEQ ID NO: 6070969 - DNA, 25 bp, Homo sapien
gggcgggagcggacttagctggatc

SEQ ID NO: 6070970 - DNA, 25 bp, Homo sapien
gggagcggacttagctggatcaggc

SEQ ID NO: 6070971 - DNA, 25 bp, Homo sapien
ttcatgatccccatggctttggagg

SEQ ID NO: 6070972 - DNA, 25 bp, Homo sapien
ggcgggagcggacttagctggatca

SEQ ID NO: 6070973 - DNA, 25 bp, Homo sapien
atgcgtccatttatttggagctggt

SEQ ID NO: 6070974 - DNA, 25 bp, Homo sapien
acatgcgtccatttatttggagctg

SEQ ID NO: 6070975 - DNA, 25 bp, Homo sapien
ccaggtaactagtttacttggagct

SEQ ID NO: 6070976 - DNA, 25 bp, Homo sapien
gttcataatccccatagccttggac

SEQ ID NO: 6070977 - DNA, 25 bp, Homo sapien
ataatccccatagccttggacgaga

SEQ ID NO: 6070978 - DNA, 25 bp, Homo sapien
cacagccgtttggatctccctggaa

SEQ ID NO: 6070979 - DNA, 25 bp, Homo sapien
ccaggtaactagtttacttggagct

SEQ ID NO: 6070980 - DNA, 25 bp, Homo sapien
cagccgtttggatctccctggaagt

SEQ ID NO: 6070981 - DNA, 25 bp, Homo sapien
agccgtttggatctccctggaagtg

SEQ ID NO: 6070982 - DNA, 25 bp, Homo sapien
cataatccccatagccttggacgag

SEQ ID NO: 6070983 - DNA, 25 bp, Homo sapien
ttcataatccccatagccttggacg

SEQ ID NO: 6070984 - DNA, 25 bp, Homo sapien
tagcagcaggcgcacagccgtttgg

SEQ ID NO: 6070985 - DNA, 25 bp, Homo sapien
tcataatccccatagccttggacga

SEQ ID NO: 6070986 - DNA, 25 bp, Homo sapien
aatccccatagccttggacgagatg

SEQ ID NO: 6070987 - DNA, 25 bp, Homo sapien
acagccgtttggatctccctggaag

SEQ ID NO: 6070988 - DNA, 25 bp, Homo sapien
tcaaatatgtcgttaacgaaagaat

SEQ ID NO: 6070989 - DNA, 25 bp, Homo sapien
ctttcttctgcgctttggtcactgc

SEQ ID NO: 6070990 - DNA, 25 bp, Homo sapien
tctttcttctgcgctttggtcactg

SEQ ID NO: 6070991 - DNA, 25 bp, Homo sapien
tttcttctgcgctttggtcactgcc

SEQ ID NO: 6070992 - DNA, 25 bp, Homo sapien
caaatatgtcgttaacgaaagaatt

SEQ ID NO: 6070993 - DNA, 25 bp, Homo sapien
atctttcttctgcgctttggtcact

SEQ ID NO: 6070994 - DNA, 25 bp, Homo sapien
gccctggatgttgtcacgcaacacc

SEQ ID NO: 6070995 - DNA, 25 bp, Homo sapien
cgtataggtgacagcgtcacggatc

SEQ ID NO: 6070996 - DNA, 25 bp, Homo sapien
ataggtgacagcgtcacggatcacg

SEQ ID NO: 6070997 - DNA, 25 bp, Homo sapien
gcaagctgtggagaaatcagcaacc

SEQ ID NO: 6070998 - DNA, 25 bp, Homo sapien
ccaaaaacaccttgagcaccccgcg

SEQ ID NO: 6070999 - DNA, 25 bp, Homo sapien
tcctcgtagatcagaccagagatcc

SEQ ID NO: 6071000 - DNA, 25 bp, Homo sapien
taaccgccaaagccataaagggtgc

SEQ ID NO: 6071001 - DNA, 25 bp, Homo sapien
ctccgtataggtgacagcgtcacgg

SEQ ID NO: 6071002 - DNA, 25 bp, Homo sapien
aatgcaagctgtggagaaatcagca

SEQ ID NO: 6071003 - DNA, 25 bp, Homo sapien
gaaatgcaagctgtggagaaatcag

SEQ ID NO: 6071004 - DNA, 25 bp, Homo sapien
gatcagaccagagatccgcttcaca

SEQ ID NO: 6071005 - DNA, 25 bp, Homo sapien
ctcgtagatcagaccagagatccgc

SEQ ID NO: 6071006 - DNA, 25 bp, Homo sapien
ggccagctgtttgcgcggtgcttta

SEQ ID NO: 6071007 - DNA, 25 bp, Homo sapien
tacgagccgtctgcttagtacgcgc

SEQ ID NO: 6071008 - DNA, 25 bp, Homo sapien
gtgctttaccgcctgtggatttacg

SEQ ID NO: 6071009 - DNA, 25 bp, Homo sapien
tgcgcggtgctttaccgcctgtgga

SEQ ID NO: 6071010 - DNA, 25 bp, Homo sapien
tggtcacgcgtttggcatgaatagc

SEQ ID NO: 6071011 - DNA, 25 bp, Homo sapien
tttaccgcctgtggatttacgagcc

SEQ ID NO: 6071012 - DNA, 25 bp, Homo sapien
gcctgtggatttacgagccgtctgc

SEQ ID NO: 6071013 - DNA, 25 bp, Homo sapien
tggtgtcctcgaaaagccccaccaa

SEQ ID NO: 6071014 - DNA, 25 bp, Homo sapien
tgtttgcgcggtgctttaccgcctg

SEQ ID NO: 6071015 - DNA, 25 bp, Homo sapien
tcacgcgtttggcatgaatagcgca

SEQ ID NO: 6071016 - DNA, 25 bp, Homo sapien
gatttacgagccgtctgcttagtac

SEQ ID NO: 6071017 - DNA, 25 bp, Homo sapien
taccgcctgtggatttacgagccgt

SEQ ID NO: 6071018 - DNA, 25 bp, Homo sapien
gcgttggaaaggcaacttgcggatc

SEQ ID NO: 6071019 - DNA, 25 bp, Homo sapien
ctcgcaccaggcgttggaaaggcaa

SEQ ID NO: 6071020 - DNA, 25 bp, Homo sapien
tcgcaccaggcgttggaaaggcaac

SEQ ID NO: 6071021 - DNA, 25 bp, Homo sapien
cgttggaaaggcaacttgcggatca

SEQ ID NO: 6071022 - DNA, 25 bp, Homo sapien
tggatagaattactgcccggaaacc

SEQ ID NO: 6071023 - DNA, 25 bp, Homo sapien
accaggcgttggaaaggcaacttgc

SEQ ID NO: 6071024 - DNA, 25 bp, Homo sapien
tttgccaccggtggacttgcgtgca

SEQ ID NO: 6071025 - DNA, 25 bp, Homo sapien
ttggaaaggcaacttgcggatcagc

SEQ ID NO: 6071026 - DNA, 25 bp, Homo sapien
ccaggcgttggaaaggcaacttgcg

SEQ ID NO: 6071027 - DNA, 25 bp, Homo sapien
gcaccaggcgttggaaaggcaactt

SEQ ID NO: 6071028 - DNA, 25 bp, Homo sapien
caccaggcgttggaaaggcaacttg

SEQ ID NO: 6071029 - DNA, 25 bp, Homo sapien
cgcaccaggcgttggaaaggcaact

SEQ ID NO: 6071030 - DNA, 25 bp, Homo sapien
gaaaataagagtgcagcaagcagga

SEQ ID NO: 6071031 - DNA, 25 bp, Homo sapien
tgaaaataagagtgcagcaagcagg

SEQ ID NO: 6071032 - DNA, 25 bp, Homo sapien
aataagagtgcagcaagcaggagcc

SEQ ID NO: 6071033 - DNA, 25 bp, Homo sapien
atgaaaataagagtgcagcaagcag

SEQ ID NO: 6071034 - DNA, 25 bp, Homo sapien
aaataagagtgcagcaagcaggagc

SEQ ID NO: 6071035 - DNA, 25 bp, Homo sapien
aaaataagagtgcagcaagcaggag

SEQ ID NO: 6071036 - DNA, 25 bp, Homo sapien
aatgaaaataagagtgcagcaagca

SEQ ID NO: 6071037 - DNA, 25 bp, Homo sapien
gtcgagatgctgagtcgtttaagcg

SEQ ID NO: 6071038 - DNA, 25 bp, Homo sapien
gatgctgagtcgtttaagcggtagc

SEQ ID NO: 6071039 - DNA, 25 bp, Homo sapien
gaagtcgagatgctgagtcgtttaa

SEQ ID NO: 6071040 - DNA, 25 bp, Homo sapien
atgctgagtcgtttaagcggtagca

SEQ ID NO: 6071041 - DNA, 25 bp, Homo sapien
gagatgctgagtcgtttaagcggta

SEQ ID NO: 6071042 - DNA, 25 bp, Homo sapien
cgagatgctgagtcgtttaagcggt

SEQ ID NO: 6071043 - DNA, 25 bp, Homo sapien
aagtcgagatgctgagtcgtttaag

SEQ ID NO: 6071044 - DNA, 25 bp, Homo sapien
agtcgagatgctgagtcgtttaagc

SEQ ID NO: 6071045 - DNA, 25 bp, Homo sapien
ggaagtcgagatgctgagtcgttta

SEQ ID NO: 6071046 - DNA, 25 bp, Homo sapien
agatgctgagtcgtttaagcggtag

SEQ ID NO: 6071047 - DNA, 25 bp, Homo sapien
tcgagatgctgagtcgtttaagcgg

SEQ ID NO: 6071048 - DNA, 25 bp, Homo sapien
tacactgaaacgtgatgggtaactt

SEQ ID NO: 6071049 - DNA, 25 bp, Homo sapien
ctgaaacgtgatgggtaacttttag

SEQ ID NO: 6071050 - DNA, 25 bp, Homo sapien
ccataagatacaaccattctcccaa

SEQ ID NO: 6071051 - DNA, 25 bp, Homo sapien
actttcccctgactccttgatgtga

SEQ ID NO: 6071052 - DNA, 25 bp, Homo sapien
ccttccataagatacaaccattctc

SEQ ID NO: 6071053 - DNA, 25 bp, Homo sapien
ttcccctgactccttgatgtgataa

SEQ ID NO: 6071054 - DNA, 25 bp, Homo sapien
tttacactgaaacgtgatgggtaac

SEQ ID NO: 6071055 - DNA, 25 bp, Homo sapien
tttcccctgactccttgatgtgata

SEQ ID NO: 6071056 - DNA, 25 bp, Homo sapien
tcactttcccctgactccttgatgt

SEQ ID NO: 6071057 - DNA, 25 bp, Homo sapien
ttccataagatacaaccattctccc

SEQ ID NO: 6071058 - DNA, 25 bp, Homo sapien
catttacactgaaacgtgatgggta

SEQ ID NO: 6071059 - DNA, 25 bp, Homo sapien
agtcactttcccctgactccttgat

SEQ ID NO: 6071060 - DNA, 25 bp, Homo sapien
tacagcagttactgaaaatggcact

SEQ ID NO: 6071061 - DNA, 25 bp, Homo sapien
cattggtacagtctacagaacatac

SEQ ID NO: 6071062 - DNA, 25 bp, Homo sapien
taaatggaatcctgctacatgtatg

SEQ ID NO: 6071063 - DNA, 25 bp, Homo sapien
gaaaatggcactatatcacatacag

SEQ ID NO: 6071064 - DNA, 25 bp, Homo sapien
cagtctatgccagataataatgtaa

SEQ ID NO: 6071065 - DNA, 25 bp, Homo sapien
aacaccacaggactccctcgtatga

SEQ ID NO: 6071066 - DNA, 25 bp, Homo sapien
tatgctatatataacagtctatgcc

SEQ ID NO: 6071067 - DNA, 25 bp, Homo sapien
catctgtactcctttgtgtacctaa

SEQ ID NO: 6071068 - DNA, 25 bp, Homo sapien
taacttcatgtatagccctgtgtaa

SEQ ID NO: 6071069 - DNA, 25 bp, Homo sapien
tcacatacagtacggatacatattg

SEQ ID NO: 6071070 - DNA, 25 bp, Homo sapien
gcacagcatcaggacgcagaaattg

SEQ ID NO: 6071071 - DNA, 25 bp, Homo sapien
tgtgtaaccaccagtcaggctgaca

SEQ ID NO: 6071072 - DNA, 25 bp, Homo sapien
catcagatcgtgggctagcaggccg

SEQ ID NO: 6071073 - DNA, 25 bp, Homo sapien
cacataggccgtgagaatgcacatg

SEQ ID NO: 6071074 - DNA, 25 bp, Homo sapien
cacgaacgatggtgaaaccgtagaa

SEQ ID NO: 6071075 - DNA, 25 bp, Homo sapien
tggtgttgttcttgaccgtcacgaa

SEQ ID NO: 6071076 - DNA, 25 bp, Homo sapien
gcttgcgaatctgctccgtctggaa

SEQ ID NO: 6071077 - DNA, 25 bp, Homo sapien
cagcacagcacataggccgtgagaa

SEQ ID NO: 6071078 - DNA, 25 bp, Homo sapien
tcttgaccgtcacgaagcacacggt

SEQ ID NO: 6071079 - DNA, 25 bp, Homo sapien
tgttgcaaagtaagccgatgggatg

SEQ ID NO: 6071080 - DNA, 25 bp, Homo sapien
taagccgatgggatggcaatgagaa

SEQ ID NO: 6071081 - DNA, 25 bp, Homo sapien
cacgaactcgacaccaaagatgaag

SEQ ID NO: 6071082 - DNA, 25 bp, Homo sapien
ggcaccccgttggttctgaggtcaa

SEQ ID NO: 6071083 - DNA, 25 bp, Homo sapien
cgtctggaacccagggactgccttg

SEQ ID NO: 6071084 - DNA, 25 bp, Homo sapien
gaagaagtcacgaacgatggtgaaa

SEQ ID NO: 6071085 - DNA, 25 bp, Homo sapien
aactcctgcctggcgatcgggaaag

SEQ ID NO: 6071086 - DNA, 25 bp, Homo sapien
tcctgcctggcgatcgggaaagtcg

SEQ ID NO: 6071087 - DNA, 25 bp, Homo sapien
aaactcctgcctggcgatcgggaaa

SEQ ID NO: 6071088 - DNA, 25 bp, Homo sapien
ctcctgcctggcgatcgggaaagtc

SEQ ID NO: 6071089 - DNA, 25 bp, Homo sapien
actcctgcctggcgatcgggaaagt

SEQ ID NO: 6071090 - DNA, 25 bp, Homo sapien
gaaactcctgcctggcgatcgggaa

SEQ ID NO: 6071091 - DNA, 25 bp, Homo sapien
ggcactgacagagtttgaggtgtct

SEQ ID NO: 6071092 - DNA, 25 bp, Homo sapien
ctgccctttaggcaaccttagttcg

SEQ ID NO: 6071093 - DNA, 25 bp, Homo sapien
caggtgtcattcgagtgagtggccc

SEQ ID NO: 6071094 - DNA, 25 bp, Homo sapien
ttatctgcaaccaggaaaggagtgc

SEQ ID NO: 6071095 - DNA, 25 bp, Homo sapien
ggcaaccttagttcgttatctgcaa

SEQ ID NO: 6071096 - DNA, 25 bp, Homo sapien
tgtttgccaggacgaagacatggag

SEQ ID NO: 6071097 - DNA, 25 bp, Homo sapien
tcccatacagaattagcgcataatt

SEQ ID NO: 6071098 - DNA, 25 bp, Homo sapien
ttggtgagaactggtgaggattctc

SEQ ID NO: 6071099 - DNA, 25 bp, Homo sapien
gagcttgatggtttttccctagctg

SEQ ID NO: 6071100 - DNA, 25 bp, Homo sapien
tggcagagcaccatgctggcagctg

SEQ ID NO: 6071101 - DNA, 25 bp, Homo sapien
gattctctgccagaatgccagggca

SEQ ID NO: 6071102 - DNA, 25 bp, Homo sapien
attttaagacgaccctgtttgccag

SEQ ID NO: 6071103 - DNA, 25 bp, Homo sapien
ctccggctccggctcgggctcgggc

SEQ ID NO: 6071104 - DNA, 25 bp, Homo sapien
tcaggcatggattccagctcaggcc

SEQ ID NO: 6071105 - DNA, 25 bp, Homo sapien
tccggctccagctccggctcctgct

SEQ ID NO: 6071106 - DNA, 25 bp, Homo sapien
cagctcaggcatggattccagctca

SEQ ID NO: 6071107 - DNA, 25 bp, Homo sapien
tcacactctttctcaggcctcggtt

SEQ ID NO: 6071108 - DNA, 25 bp, Homo sapien
ctcgggctcgggctccggctccggc

SEQ ID NO: 6071109 - DNA, 25 bp, Homo sapien
atggattccagctcaggcctggatt

SEQ ID NO: 6071110 - DNA, 25 bp, Homo sapien
ggctctggctcctctcctggccctg

SEQ ID NO: 6071111 - DNA, 25 bp, Homo sapien
gcctctgcctcgcgctctccagccg

SEQ ID NO: 6071112 - DNA, 25 bp, Homo sapien
tccggctcctccactacagccatga

SEQ ID NO: 6071113 - DNA, 25 bp, Homo sapien
tctcctggccctggctcctcggcac

SEQ ID NO: 6071114 - DNA, 25 bp, Homo sapien
tgttcatcctccgcgctcctcttca

SEQ ID NO: 6071115 - DNA, 25 bp, Homo sapien
gcttgctgatctcctggctcggcct

SEQ ID NO: 6071116 - DNA, 25 bp, Homo sapien
gcctccagctcaggcatggattcca

SEQ ID NO: 6071117 - DNA, 25 bp, Homo sapien
ctccggctccggctccggctccggc

SEQ ID NO: 6071118 - DNA, 25 bp, Homo sapien
tgcctcgcgctctccagccggctcc

SEQ ID NO: 6071119 - DNA, 25 bp, Homo sapien
gctctcgcacttgctcggcttgctg

SEQ ID NO: 6071120 - DNA, 25 bp, Homo sapien
gctctccagccggctccatctccag

SEQ ID NO: 6071121 - DNA, 25 bp, Homo sapien
tcctccgcgctcctcttcagactct

SEQ ID NO: 6071122 - DNA, 25 bp, Homo sapien
ctccggctcgggctcgggctccggc

SEQ ID NO: 6071123 - DNA, 25 bp, Homo sapien
aggactgtgaggctgttcatcctcc

SEQ ID NO: 6071124 - DNA, 25 bp, Homo sapien
tccggctccggctccggctccggct

SEQ ID NO: 6071125 - DNA, 25 bp, Homo sapien
ggttctgcctccagctcaggcatgg

SEQ ID NO: 6071126 - DNA, 25 bp, Homo sapien
tcggcacaaagctgctcctcatctg

SEQ ID NO: 6071127 - DNA, 25 bp, Homo sapien
cctggctcggcctcaatgaggccag

SEQ ID NO: 6071128 - DNA, 25 bp, Homo sapien
ggctccagctcctgccccggctctg

SEQ ID NO: 6071129 - DNA, 25 bp, Homo sapien
tgatctcctggctcggcctcaatga

SEQ ID NO: 6071130 - DNA, 25 bp, Homo sapien
ctcctccacgaaggggcaggcctct

SEQ ID NO: 6071131 - DNA, 25 bp, Homo sapien
tcctgctccggctcctgctccggct

SEQ ID NO: 6071132 - DNA, 25 bp, Homo sapien
ctcgggctccggctccggctccggc

SEQ ID NO: 6071133 - DNA, 25 bp, Homo sapien
gtggcctcttcttccaacggagtct

SEQ ID NO: 6071134 - DNA, 25 bp, Homo sapien
gggcaggcctctgcctcgcgctctc

SEQ ID NO: 6071135 - DNA, 25 bp, Homo sapien
agccatgacctcagcttcagcgtgc

SEQ ID NO: 6071136 - DNA, 25 bp, Homo sapien
tccggctccggctccagctccggct

SEQ ID NO: 6071137 - DNA, 25 bp, Homo sapien
tggggctccggctccggctcgggct

SEQ ID NO: 6071138 - DNA, 25 bp, Homo sapien
tccggctcctgctccagctcctgct

SEQ ID NO: 6071139 - DNA, 25 bp, Homo sapien
ccggctccggctccggctccggctc

SEQ ID NO: 6071140 - DNA, 25 bp, Homo sapien
tccggctcctgctcacactctttct

SEQ ID NO: 6071141 - DNA, 25 bp, Homo sapien
tcaggcctggattccggctccagct

SEQ ID NO: 6071142 - DNA, 25 bp, Homo sapien
cttggcatccagtaggtcataggca

SEQ ID NO: 6071143 - DNA, 25 bp, Homo sapien
tcctccactacagccatgacctcag

SEQ ID NO: 6071144 - DNA, 25 bp, Homo sapien
gccaggctcctccttggcatccagt

SEQ ID NO: 6071145 - DNA, 25 bp, Homo sapien
cacgaaggggcaggcctctgcctcg

SEQ ID NO: 6071146 - DNA, 25 bp, Homo sapien
actgcctcctctgtggcctcttctt

SEQ ID NO: 6071147 - DNA, 25 bp, Homo sapien
gcttcagcgtgctgctctcgcactt

SEQ ID NO: 6071148 - DNA, 25 bp, Homo sapien
gcgctcctcttcagactctccggct

SEQ ID NO: 6071149 - DNA, 25 bp, Homo sapien
actacagccatgacctcagcttcag

SEQ ID NO: 6071150 - DNA, 25 bp, Homo sapien
acggagtctgctgttcctgggcttg

SEQ ID NO: 6071151 - DNA, 25 bp, Homo sapien
tccagctccggctcctgctccagct

SEQ ID NO: 6071152 - DNA, 25 bp, Homo sapien
ccctggactgcctcctctgtggcct

SEQ ID NO: 6071153 - DNA, 25 bp, Homo sapien
tgccccggctctggctcctctcctg

SEQ ID NO: 6071154 - DNA, 25 bp, Homo sapien
gcgtgctgctctcgcacttgctcgg

SEQ ID NO: 6071155 - DNA, 25 bp, Homo sapien
caaagctgctcctcatctgggcaca

SEQ ID NO: 6071156 - DNA, 25 bp, Homo sapien
agctcctgccccggctctggctcct

SEQ ID NO: 6071157 - DNA, 25 bp, Homo sapien
tcctctgtggcctcttcttccaacg

SEQ ID NO: 6071158 - DNA, 25 bp, Homo sapien
gggccgtttgggaggactgtgaggc

SEQ ID NO: 6071159 - DNA, 25 bp, Homo sapien
gcacttgctcggcttgctgatctcc

SEQ ID NO: 6071160 - DNA, 25 bp, Homo sapien
ctttctcaggcctcggttctgcctc

SEQ ID NO: 6071161 - DNA, 25 bp, Homo sapien
ggctccatctccagcgcgccaggcg

SEQ ID NO: 6071162 - DNA, 25 bp, Homo sapien
cctcttcttccaacggagtctgctg

SEQ ID NO: 6071163 - DNA, 25 bp, Homo sapien
ctcctccttggcatccagtaggtca

SEQ ID NO: 6071164 - DNA, 25 bp, Homo sapien
ctcttcagactctccggctcctcca

SEQ ID NO: 6071165 - DNA, 25 bp, Homo sapien
gattccggctccagctcctgccccg

SEQ ID NO: 6071166 - DNA, 25 bp, Homo sapien
ggcttggtcaggctcctccacgaag

SEQ ID NO: 6071167 - DNA, 25 bp, Homo sapien
atccagtaggtcataggcaggctgg

SEQ ID NO: 6071168 - DNA, 25 bp, Homo sapien
ggcaggctggggctccggctccggc

SEQ ID NO: 6071169 - DNA, 25 bp, Homo sapien
ggctcctctcctggccctggctcct

SEQ ID NO: 6071170 - DNA, 25 bp, Homo sapien
tttgggaggactgtgaggctgttca

SEQ ID NO: 6071171 - DNA, 25 bp, Homo sapien
cttccaacggagtctgctgttcctg

SEQ ID NO: 6071172 - DNA, 25 bp, Homo sapien
tcctgctcacactctttctcaggcc

SEQ ID NO: 6071173 - DNA, 25 bp, Homo sapien
ggcctcggttctgcctccagctcag

SEQ ID NO: 6071174 - DNA, 25 bp, Homo sapien
tcctgctccggctcctgctcacact

SEQ ID NO: 6071175 - DNA, 25 bp, Homo sapien
agcgcgccaggcgccgcctccctgg

SEQ ID NO: 6071176 - DNA, 25 bp, Homo sapien
ccagccggctccatctccagcgcgc

SEQ ID NO: 6071177 - DNA, 25 bp, Homo sapien
ggctcctcggcacaaagctgctcct

SEQ ID NO: 6071178 - DNA, 25 bp, Homo sapien
tccggctcctgctccggctcctgct

SEQ ID NO: 6071179 - DNA, 25 bp, Homo sapien
tccagctcctgctccggctcctgct

SEQ ID NO: 6071180 - DNA, 25 bp, Homo sapien
gacctcagcttcagcgtgctgctct

SEQ ID NO: 6071181 - DNA, 25 bp, Homo sapien
ctccctgggccgtttgggaggactg

SEQ ID NO: 6071182 - DNA, 25 bp, Homo sapien
caggcgccgcctccctgggccgttt

SEQ ID NO: 6071183 - DNA, 25 bp, Homo sapien
ggccctggctcctcggcacaaagct

SEQ ID NO: 6071184 - DNA, 25 bp, Homo sapien
tcctgctccagctcctgctccggct

SEQ ID NO: 6071185 - DNA, 25 bp, Homo sapien
atctccagcgcgccaggcgccgcct

SEQ ID NO: 6071186 - DNA, 25 bp, Homo sapien
agactctccggctcctccactacag

SEQ ID NO: 6071187 - DNA, 25 bp, Homo sapien
tctgctgttcctgggcttggtcagg

SEQ ID NO: 6071188 - DNA, 25 bp, Homo sapien
tgtgaggctgttcatcctccgcgct

SEQ ID NO: 6071189 - DNA, 25 bp, Homo sapien
ttcctgggcttggtcaggctcctcc

SEQ ID NO: 6071190 - DNA, 25 bp, Homo sapien
tccggctccggctccggctccagct

SEQ ID NO: 6071191 - DNA, 25 bp, Homo sapien
tcggcctcaatgaggccaggctcct

SEQ ID NO: 6071192 - DNA, 25 bp, Homo sapien
tccagctcaggcctggattccggct

SEQ ID NO: 6071193 - DNA, 25 bp, Homo sapien
cctggattccggctccagctcctgc

SEQ ID NO: 6071194 - DNA, 25 bp, Homo sapien
tgctcggcttgctgatctcctggct

SEQ ID NO: 6071195 - DNA, 25 bp, Homo sapien
gtcaggctcctccacgaaggggcag

SEQ ID NO: 6071196 - DNA, 25 bp, Homo sapien
gatggcgttgtgagacagatccagc

SEQ ID NO: 6071197 - DNA, 25 bp, Homo sapien
tcctgcagggcgcactcgcagtgca

SEQ ID NO: 6071198 - DNA, 25 bp, Homo sapien
gacaggcgtatcttggcgctgagtt

SEQ ID NO: 6071199 - DNA, 25 bp, Homo sapien
tcaccatggcgaaccagccgaacat

SEQ ID NO: 6071200 - DNA, 25 bp, Homo sapien
aggcgatctcgtccacagagtcggg

SEQ ID NO: 6071201 - DNA, 25 bp, Homo sapien
ggcgcacatagtacacgacgtaggc

SEQ ID NO: 6071202 - DNA, 25 bp, Homo sapien
gctgggcagagacttcaggtactcc

SEQ ID NO: 6071203 - DNA, 25 bp, Homo sapien
agtacacgacgtaggcgatcaccat

SEQ ID NO: 6071204 - DNA, 25 bp, Homo sapien
tgggagatcttgttggcatcgagct

SEQ ID NO: 6071205 - DNA, 25 bp, Homo sapien
gctgagtttgcccagggcgtccttg

SEQ ID NO: 6071206 - DNA, 25 bp, Homo sapien
ttgttggcatcgagcttcaggagca

SEQ ID NO: 6071207 - DNA, 25 bp, Homo sapien
cctctggatgcggttgtaagacagg

SEQ ID NO: 6071208 - DNA, 25 bp, Homo sapien
cccttttttggagcaggagcggact

SEQ ID NO: 6071209 - DNA, 25 bp, Homo sapien
ttttttggagcaggagcggacttag

SEQ ID NO: 6071210 - DNA, 25 bp, Homo sapien
ttttggagcaggagcggacttagca

SEQ ID NO: 6071211 - DNA, 25 bp, Homo sapien
gcccttttttggagcaggagcggac

SEQ ID NO: 6071212 - DNA, 25 bp, Homo sapien
cttttttggagcaggagcggactta

SEQ ID NO: 6071213 - DNA, 25 bp, Homo sapien
ccttttttggagcaggagcggactt

SEQ ID NO: 6071214 - DNA, 25 bp, Homo sapien
tttttggagcaggagcggacttagc

SEQ ID NO: 6071215 - DNA, 25 bp, Homo sapien
gttgcagggacaagtttacttggag

SEQ ID NO: 6071216 - DNA, 25 bp, Homo sapien
ctaaggcagttgcagggacaagttt

SEQ ID NO: 6071217 - DNA, 25 bp, Homo sapien
agttgcagggacaagtttacttgga

SEQ ID NO: 6071218 - DNA, 25 bp, Homo sapien
ggcgggagcggatttcgctggctca

SEQ ID NO: 6071219 - DNA, 25 bp, Homo sapien
tgcagggacaagtttacttggagct

SEQ ID NO: 6071220 - DNA, 25 bp, Homo sapien
gttgcagggacaagtttacttggag

SEQ ID NO: 6071221 - DNA, 25 bp, Homo sapien
actaaggcagttgcagggacaagtt

SEQ ID NO: 6071222 - DNA, 25 bp, Homo sapien
cagttgcagggacaagtttacttgg

SEQ ID NO: 6071223 - DNA, 25 bp, Homo sapien
gcagttgcagggacaagtttacttg

SEQ ID NO: 6071224 - DNA, 25 bp, Homo sapien
aaggcagttgcagggacaagtttac

SEQ ID NO: 6071225 - DNA, 25 bp, Homo sapien
taaggcagttgcagggacaagttta

SEQ ID NO: 6071226 - DNA, 25 bp, Homo sapien
ggcagttgcagggacaagtttactt

SEQ ID NO: 6071227 - DNA, 25 bp, Homo sapien
ttgcagggacaagtttacttggagc

SEQ ID NO: 6071228 - DNA, 25 bp, Homo sapien
ggctttgccgccagtggacttacga

SEQ ID NO: 6071229 - DNA, 25 bp, Homo sapien
ctcgcttggcgtggatagcacacag

SEQ ID NO: 6071230 - DNA, 25 bp, Homo sapien
gatagcggcggatttcacggagggc

SEQ ID NO: 6071231 - DNA, 25 bp, Homo sapien
gcggcggatttcacggagggcgaca

SEQ ID NO: 6071232 - DNA, 25 bp, Homo sapien
gaatggtagcttgcgaatcagtagc

SEQ ID NO: 6071233 - DNA, 25 bp, Homo sapien
ctggaatggtagcttgcgaatcagt

SEQ ID NO: 6071234 - DNA, 25 bp, Homo sapien
aatcagtagctcagtcgatttctga

SEQ ID NO: 6071235 - DNA, 25 bp, Homo sapien
tggtagcttgcgaatcagtagctca

SEQ ID NO: 6071236 - DNA, 25 bp, Homo sapien
ccaccggtggctggcgcgcttttgc

SEQ ID NO: 6071237 - DNA, 25 bp, Homo sapien
cactcgcttggcgtggatagcacac

SEQ ID NO: 6071238 - DNA, 25 bp, Homo sapien
gggctttgccgccagtggacttacg

SEQ ID NO: 6071239 - DNA, 25 bp, Homo sapien
atttctgatagcggcggatttcacg

SEQ ID NO: 6071240 - DNA, 25 bp, Homo sapien
ttccgagctgtctgtttagtacgag

SEQ ID NO: 6071241 - DNA, 25 bp, Homo sapien
cgtggcgctttaccgccggtggatt

SEQ ID NO: 6071242 - DNA, 25 bp, Homo sapien
ggtggatttccgagctgtctgttta

SEQ ID NO: 6071243 - DNA, 25 bp, Homo sapien
gcttccgaatcagcaactcggtcga

SEQ ID NO: 6071244 - DNA, 25 bp, Homo sapien
aagcgaagatcggtcttgaagtctt

SEQ ID NO: 6071245 - DNA, 25 bp, Homo sapien
ttaccgccggtggatttccgagctg

SEQ ID NO: 6071246 - DNA, 25 bp, Homo sapien
ttacgctctttctccgcgaatgcgg

SEQ ID NO: 6071247 - DNA, 25 bp, Homo sapien
cttagcatggatggcgcaaaggttt

SEQ ID NO: 6071248 - DNA, 25 bp, Homo sapien
atggatggcgcaaaggtttgtgtcc

SEQ ID NO: 6071249 - DNA, 25 bp, Homo sapien
gagctgtctgtttagtacgagccat

SEQ ID NO: 6071250 - DNA, 25 bp, Homo sapien
cagcttccgaatcagcaactcggtc

SEQ ID NO: 6071251 - DNA, 25 bp, Homo sapien
agatcggtcttgaagtcttgggcga

SEQ ID NO: 6071252 - DNA, 25 bp, Homo sapien
gatgaagtgcctctcggagtcgtac

SEQ ID NO: 6071253 - DNA, 25 bp, Homo sapien
gggacaaagcctcagcgcacagccg

SEQ ID NO: 6071254 - DNA, 25 bp, Homo sapien
gagtcgtacttgaccaaggaggtgt

SEQ ID NO: 6071255 - DNA, 25 bp, Homo sapien
cgagctccacgctggacagaaacct

SEQ ID NO: 6071256 - DNA, 25 bp, Homo sapien
ctgtggcgtggctcgaagcgcacct

SEQ ID NO: 6071257 - DNA, 25 bp, Homo sapien
cgcgcttggaggtatctctaggtta

SEQ ID NO: 6071258 - DNA, 25 bp, Homo sapien
tcgaagcgcacctcggccttgtagt

SEQ ID NO: 6071259 - DNA, 25 bp, Homo sapien
atgacgtgaagggtaaggtcgccca

SEQ ID NO: 6071260 - DNA, 25 bp, Homo sapien
ggacagaaacctcctcagcgtcttg

SEQ ID NO: 6071261 - DNA, 25 bp, Homo sapien
cctcggccttgtagttgcgccacgt

SEQ ID NO: 6071262 - DNA, 25 bp, Homo sapien
ggcagctgcacgtcgtcgatgaagt

SEQ ID NO: 6071263 - DNA, 25 bp, Homo sapien
cctcctcagcgtcttgcggcagttg

SEQ ID NO: 6071264 - DNA, 25 bp, Homo sapien
gctgtgtaaaccttgcctatcagga

SEQ ID NO: 6071265 - DNA, 25 bp, Homo sapien
ggatcatggaattccacgggaggca

SEQ ID NO: 6071266 - DNA, 25 bp, Homo sapien
tcaggatcatggaattccacgggag

SEQ ID NO: 6071267 - DNA, 25 bp, Homo sapien
cacccgactcggtgaggctgtgcgt

SEQ ID NO: 6071268 - DNA, 25 bp, Homo sapien
atcatggaattccacgggaggcagg

SEQ ID NO: 6071269 - DNA, 25 bp, Homo sapien
gcgtgccacggtaggctgacccatt

SEQ ID NO: 6071270 - DNA, 25 bp, Homo sapien
aggaggcacccgactcggtgaggct

SEQ ID NO: 6071271 - DNA, 25 bp, Homo sapien
ctgtgcgtgccacggtaggctgacc

SEQ ID NO: 6071272 - DNA, 25 bp, Homo sapien
gcctatcaggatcatggaattccac

SEQ ID NO: 6071273 - DNA, 25 bp, Homo sapien
tatcaggatcatggaattccacggg

SEQ ID NO: 6071274 - DNA, 25 bp, Homo sapien
tgtgtaaaccttgcctatcaggatc

SEQ ID NO: 6071275 - DNA, 25 bp, Homo sapien
gtgctgtgtaaaccttgcctatcag

SEQ ID NO: 6071276 - DNA, 25 bp, Homo sapien
cctgtttggtctcgttgtaggtaca

SEQ ID NO: 6071277 - DNA, 25 bp, Homo sapien
accgaggacacagccatagccagcc

SEQ ID NO: 6071278 - DNA, 25 bp, Homo sapien
ctcgatgatgggcttcaatataggg

SEQ ID NO: 6071279 - DNA, 25 bp, Homo sapien
ggtacagactcgatgatgggcttca

SEQ ID NO: 6071280 - DNA, 25 bp, Homo sapien
gcccacaaaggtgcgcaggttccca

SEQ ID NO: 6071281 - DNA, 25 bp, Homo sapien
tgtaggtacagactcgatgatgggc

SEQ ID NO: 6071282 - DNA, 25 bp, Homo sapien
aagtaaactccctcacggcacagcc

SEQ ID NO: 6071283 - DNA, 25 bp, Homo sapien
cagactcgatgatgggcttcaatat

SEQ ID NO: 6071284 - DNA, 25 bp, Homo sapien
tcacctgtttggtctcgttgtaggt

SEQ ID NO: 6071285 - DNA, 25 bp, Homo sapien
taggtacagactcgatgatgggctt

SEQ ID NO: 6071286 - DNA, 25 bp, Homo sapien
ctcccggggcacagttgggcagctt

SEQ ID NO: 6071287 - DNA, 25 bp, Homo sapien
cacagcccacaaaggtgcgcaggtt

SEQ ID NO: 6071288 - DNA, 25 bp, Homo sapien
tacataaaatgcagcgcttcgccga

SEQ ID NO: 6071289 - DNA, 25 bp, Homo sapien
tcatgtgcagttagaatcctcttgg

SEQ ID NO: 6071290 - DNA, 25 bp, Homo sapien
tccaagcatggacaggaaaacggga

SEQ ID NO: 6071291 - DNA, 25 bp, Homo sapien
gagaggtggacgacgaccagaaaat

SEQ ID NO: 6071292 - DNA, 25 bp, Homo sapien
tttaaagtgaggattggctcgccgc

SEQ ID NO: 6071293 - DNA, 25 bp, Homo sapien
gcagcccggcagaaaattacataaa

SEQ ID NO: 6071294 - DNA, 25 bp, Homo sapien
gaagccggaaactagggagtcatgt

SEQ ID NO: 6071295 - DNA, 25 bp, Homo sapien
tcatttcacggaccggtcgtctggg

SEQ ID NO: 6071296 - DNA, 25 bp, Homo sapien
tcctcttggaagactagtaggatgt

SEQ ID NO: 6071297 - DNA, 25 bp, Homo sapien
cgggtcgctcggaagggtcatttca

SEQ ID NO: 6071298 - DNA, 25 bp, Homo sapien
gaagacccctcgcttcgaggacagg

SEQ ID NO: 6071299 - DNA, 25 bp, Homo sapien
gctggatccatccaagcatggacag

SEQ ID NO: 6071300 - DNA, 25 bp, Homo sapien
ggtcactgcgctccagtagaagccg

SEQ ID NO: 6071301 - DNA, 25 bp, Homo sapien
gccgttgacggtcttccgacagaga

SEQ ID NO: 6071302 - DNA, 25 bp, Homo sapien
cctcacactggatgcgcaggttctt

SEQ ID NO: 6071303 - DNA, 25 bp, Homo sapien
gggcatcgtactggtccaggaactc

SEQ ID NO: 6071304 - DNA, 25 bp, Homo sapien
ccagcttgagcacgcagtcgaagcg

SEQ ID NO: 6071305 - DNA, 25 bp, Homo sapien
ccggcagctgggtgactttctcata

SEQ ID NO: 6071306 - DNA, 25 bp, Homo sapien
cttccgacagagatgctgaagagtg

SEQ ID NO: 6071307 - DNA, 25 bp, Homo sapien
gatgcgcaggttcttggtcccagac

SEQ ID NO: 6071308 - DNA, 25 bp, Homo sapien
gtagaagccgctctcctgcagcttg

SEQ ID NO: 6071309 - DNA, 25 bp, Homo sapien
tggtcccagactgggtcttgacgct

SEQ ID NO: 6071310 - DNA, 25 bp, Homo sapien
ccccggagtagatgtaataggctct

SEQ ID NO: 6071311 - DNA, 25 bp, Homo sapien
tccaggtggccgttgacggtcttcc

SEQ ID NO: 6071312 - DNA, 25 bp, Homo sapien
ccttggtaccttcggacactgcgtg

SEQ ID NO: 6071313 - DNA, 25 bp, Homo sapien
acagccttggtaccttcggacactg

SEQ ID NO: 6071314 - DNA, 25 bp, Homo sapien
ggtaccttcggacactgcgtgcttg

SEQ ID NO: 6071315 - DNA, 25 bp, Homo sapien
gtgggccagacgggaagcctcgcct

SEQ ID NO: 6071316 - DNA, 25 bp, Homo sapien
cagccttggtaccttcggacactgc

SEQ ID NO: 6071317 - DNA, 25 bp, Homo sapien
gccttggtaccttcggacactgcgt

SEQ ID NO: 6071318 - DNA, 25 bp, Homo sapien
tatcggggtgaacctgttttagcac

SEQ ID NO: 6071319 - DNA, 25 bp, Homo sapien
ggaacccttcttcggagcaggagct

SEQ ID NO: 6071320 - DNA, 25 bp, Homo sapien
tggtaccttcggacactgcgtgctt

SEQ ID NO: 6071321 - DNA, 25 bp, Homo sapien
agccttggtaccttcggacactgcg

SEQ ID NO: 6071322 - DNA, 25 bp, Homo sapien
ttggtaccttcggacactgcgtgct

SEQ ID NO: 6071323 - DNA, 25 bp, Homo sapien
tgagatgccagtatcggggtgaacc

SEQ ID NO: 6071324 - DNA, 25 bp, Homo sapien
caggtgctttgatagctgcaagaat

SEQ ID NO: 6071325 - DNA, 25 bp, Homo sapien
gaaatctttgattagcaggtgcttt

SEQ ID NO: 6071326 - DNA, 25 bp, Homo sapien
tctacattcaatcagggtttaaccg

SEQ ID NO: 6071327 - DNA, 25 bp, Homo sapien
ttctctcagaatgattctgtggccc

SEQ ID NO: 6071328 - DNA, 25 bp, Homo sapien
tcagaatatgtgtggacttgtcagc

SEQ ID NO: 6071329 - DNA, 25 bp, Homo sapien
gaaaatgtgacttcagaatatgtgt

SEQ ID NO: 6071330 - DNA, 25 bp, Homo sapien
gaaagtagtcggctttacaagatta

SEQ ID NO: 6071331 - DNA, 25 bp, Homo sapien
gtgtggaaggccttataatgaggat

SEQ ID NO: 6071332 - DNA, 25 bp, Homo sapien
ccagattggaggtctggagaaactc

SEQ ID NO: 6071333 - DNA, 25 bp, Homo sapien
tgggagaggcaccactattattatc

SEQ ID NO: 6071334 - DNA, 25 bp, Homo sapien
cattcaatcagggtttaaccggtga

SEQ ID NO: 6071335 - DNA, 25 bp, Homo sapien
ggccttataatgaggattccattgt

SEQ ID NO: 6071336 - DNA, 25 bp, Homo sapien
cgagcacttgccgatctgttcctcc

SEQ ID NO: 6071337 - DNA, 25 bp, Homo sapien
acgcgtcgagcacttgccgatctgt

SEQ ID NO: 6071338 - DNA, 25 bp, Homo sapien
cgtcgagcacttgccgatctgttcc

SEQ ID NO: 6071339 - DNA, 25 bp, Homo sapien
cacaccggccgcctctgactctgca

SEQ ID NO: 6071340 - DNA, 25 bp, Homo sapien
gagcacttgccgatctgttcctcct

SEQ ID NO: 6071341 - DNA, 25 bp, Homo sapien
accggccgcctctgactctgcaata

SEQ ID NO: 6071342 - DNA, 25 bp, Homo sapien
gcgtcgagcacttgccgatctgttc

SEQ ID NO: 6071343 - DNA, 25 bp, Homo sapien
ttctgtaatgtgtttatgattcctc

SEQ ID NO: 6071344 - DNA, 25 bp, Homo sapien
tcgagcacttgccgatctgttcctc

SEQ ID NO: 6071345 - DNA, 25 bp, Homo sapien
caccggccgcctctgactctgcaat

SEQ ID NO: 6071346 - DNA, 25 bp, Homo sapien
acaccggccgcctctgactctgcaa

SEQ ID NO: 6071347 - DNA, 25 bp, Homo sapien
cgcgtcgagcacttgccgatctgtt

SEQ ID NO: 6071348 - DNA, 25 bp, Homo sapien
ttgaactccatcctggaattgcagc

SEQ ID NO: 6071349 - DNA, 25 bp, Homo sapien
caggctcgtagggtatacacagtac

SEQ ID NO: 6071350 - DNA, 25 bp, Homo sapien
ggataataagccaaccaatggtcat

SEQ ID NO: 6071351 - DNA, 25 bp, Homo sapien
taagagtgagcctctataccaagga

SEQ ID NO: 6071352 - DNA, 25 bp, Homo sapien
atcagggcaaccttccccatctggg

SEQ ID NO: 6071353 - DNA, 25 bp, Homo sapien
caagtgactaccaatttgttggagc

SEQ ID NO: 6071354 - DNA, 25 bp, Homo sapien
aatctagcagtcatgtaagaagcac

SEQ ID NO: 6071355 - DNA, 25 bp, Homo sapien
gattctaaggtacaggcatgccagg

SEQ ID NO: 6071356 - DNA, 25 bp, Homo sapien
gaagtctaaagtcaagacgtcagag

SEQ ID NO: 6071357 - DNA, 25 bp, Homo sapien
tataccaaggatgtaccctttggct

SEQ ID NO: 6071358 - DNA, 25 bp, Homo sapien
tggtcatcagtctcacacataagga

SEQ ID NO: 6071359 - DNA, 25 bp, Homo sapien
cacacataaggagtgcaggctcgta

SEQ ID NO: 6071360 - DNA, 25 bp, Homo sapien
taagacaggctttgaggacctgaga

SEQ ID NO: 6071361 - DNA, 25 bp, Homo sapien
tacgattgtacaggtggaaaggctc

SEQ ID NO: 6071362 - DNA, 25 bp, Homo sapien
ttcagtggaagcctcccctaccagg

SEQ ID NO: 6071363 - DNA, 25 bp, Homo sapien
cacagcggtgggtcttcccaccaat

SEQ ID NO: 6071364 - DNA, 25 bp, Homo sapien
tgacagaaagaaaatacgattgtac

SEQ ID NO: 6071365 - DNA, 25 bp, Homo sapien
tctagcttccttgggagctcttcca

SEQ ID NO: 6071366 - DNA, 25 bp, Homo sapien
agccatacctcagggaatctgaagg

SEQ ID NO: 6071367 - DNA, 25 bp, Homo sapien
ctttattggtgtttgcagcaattga

SEQ ID NO: 6071368 - DNA, 25 bp, Homo sapien
ggacctgagagtgaccaagccatac

SEQ ID NO: 6071369 - DNA, 25 bp, Homo sapien
gacaagcatttctagcttccttggg

SEQ ID NO: 6071370 - DNA, 25 bp, Homo sapien
ggacccagcccaactaagacaggct

SEQ ID NO: 6071371 - DNA, 25 bp, Homo sapien
caattgaattattggcataaggcac

SEQ ID NO: 6071372 - DNA, 25 bp, Homo sapien
ttgcgtggctgacactcaataccca

SEQ ID NO: 6071373 - DNA, 25 bp, Homo sapien
tgtgtgtaccgaagagtattgttaa

SEQ ID NO: 6071374 - DNA, 25 bp, Homo sapien
tcacatactttgtgtgtaccgaaga

SEQ ID NO: 6071375 - DNA, 25 bp, Homo sapien
tctgagtttgacgttagatacccca

SEQ ID NO: 6071376 - DNA, 25 bp, Homo sapien
tattacgccctgagctaaagataag

SEQ ID NO: 6071377 - DNA, 25 bp, Homo sapien
aataccgcagtactttgttcttctg

SEQ ID NO: 6071378 - DNA, 25 bp, Homo sapien
tccatcttgcgtggctgacactcaa

SEQ ID NO: 6071379 - DNA, 25 bp, Homo sapien
ccagcttgtggcaaataccgcagta

SEQ ID NO: 6071380 - DNA, 25 bp, Homo sapien
cctgagctaaagataagaactgtga

SEQ ID NO: 6071381 - DNA, 25 bp, Homo sapien
tagtgcttttatattacgccctgag

SEQ ID NO: 6071382 - DNA, 25 bp, Homo sapien
tgacgttagataccccatataagtg

SEQ ID NO: 6071383 - DNA, 25 bp, Homo sapien
ccccatataagtggaaatgggtgta

SEQ ID NO: 6071384 - DNA, 25 bp, Homo sapien
gtcaataccaatcaagactggaaca

SEQ ID NO: 6071385 - DNA, 25 bp, Homo sapien
caagactggaacacaaattggtaat

SEQ ID NO: 6071386 - DNA, 25 bp, Homo sapien
aatgaaattatgcacactttggatc

SEQ ID NO: 6071387 - DNA, 25 bp, Homo sapien
tataaaataggacaacgaggtggcc

SEQ ID NO: 6071388 - DNA, 25 bp, Homo sapien
taaaatacttcagatgactggatcc

SEQ ID NO: 6071389 - DNA, 25 bp, Homo sapien
gaatagcccaaaccttatattgagg

SEQ ID NO: 6071390 - DNA, 25 bp, Homo sapien
caaattggtaattggttcagattca

SEQ ID NO: 6071391 - DNA, 25 bp, Homo sapien
caatattgtgaaatctctaactcta

SEQ ID NO: 6071392 - DNA, 25 bp, Homo sapien
aagcaagtcctgttattcatcacca

SEQ ID NO: 6071393 - DNA, 25 bp, Homo sapien
catcaccatagttaaaggtctcgag

SEQ ID NO: 6071394 - DNA, 25 bp, Homo sapien
tgttaagctagttaactccccagct

SEQ ID NO: 6071395 - DNA, 25 bp, Homo sapien
taaaggtctcgagaaaatcaagtaa

SEQ ID NO: 6071396 - DNA, 25 bp, Homo sapien
cagcatccgcttagctagcttcatt

SEQ ID NO: 6071397 - DNA, 25 bp, Homo sapien
ttcacagcatacttgtcactgaggg

SEQ ID NO: 6071398 - DNA, 25 bp, Homo sapien
gactgaatctgctacaaggagagcc

SEQ ID NO: 6071399 - DNA, 25 bp, Homo sapien
gagagagatggttttcacattagga

SEQ ID NO: 6071400 - DNA, 25 bp, Homo sapien
ggtcattctcaaacaaaccaggtaa

SEQ ID NO: 6071401 - DNA, 25 bp, Homo sapien
agggcagcaaccaaaggcttgggca

SEQ ID NO: 6071402 - DNA, 25 bp, Homo sapien
tgtgaggttaccagtttatattgca

SEQ ID NO: 6071403 - DNA, 25 bp, Homo sapien
tatattgcaagataatgacactgtg

SEQ ID NO: 6071404 - DNA, 25 bp, Homo sapien
agttactagttgatacagcatccgc

SEQ ID NO: 6071405 - DNA, 25 bp, Homo sapien
tcttacaatagtcagggcagcaacc

SEQ ID NO: 6071406 - DNA, 25 bp, Homo sapien
tccaaaggttgaattcacagcatac

SEQ ID NO: 6071407 - DNA, 25 bp, Homo sapien
ggcttgggcagcaagtccaaaggtt

SEQ ID NO: 6071408 - DNA, 25 bp, Homo sapien
tctttgagtaaagggaggaatctcc

SEQ ID NO: 6071409 - DNA, 25 bp, Homo sapien
cactctctaaattagagctttccag

SEQ ID NO: 6071410 - DNA, 25 bp, Homo sapien
tgataccagtgtccgagtctgtgtc

SEQ ID NO: 6071411 - DNA, 25 bp, Homo sapien
tccttggccaggagttcatattctt

SEQ ID NO: 6071412 - DNA, 25 bp, Homo sapien
cctactgttgtttcggagtcctgac

SEQ ID NO: 6071413 - DNA, 25 bp, Homo sapien
cattgctactgggaacctcagattc

SEQ ID NO: 6071414 - DNA, 25 bp, Homo sapien
tttctggatgccactcaaatgagag

SEQ ID NO: 6071415 - DNA, 25 bp, Homo sapien
tcctgactgtggttagaactgatac

SEQ ID NO: 6071416 - DNA, 25 bp, Homo sapien
gtctgtgtcatttgtgtaattgcta

SEQ ID NO: 6071417 - DNA, 25 bp, Homo sapien
accagctttcatgcttttctccaaa

SEQ ID NO: 6071418 - DNA, 25 bp, Homo sapien
gctaatgtgaagtgaattgaattcc

SEQ ID NO: 6071419 - DNA, 25 bp, Homo sapien
gaggaatctccccattgctactggg

SEQ ID NO: 6071420 - DNA, 25 bp, Homo sapien
gaccgtccgagggatcgctcttctt

SEQ ID NO: 6071421 - DNA, 25 bp, Homo sapien
tgtagcaccaacgtgagccactgaa

SEQ ID NO: 6071422 - DNA, 25 bp, Homo sapien
gaagctcgaggtatatcaagaggcc

SEQ ID NO: 6071423 - DNA, 25 bp, Homo sapien
aggtatatcaagaggccaggctccc

SEQ ID NO: 6071424 - DNA, 25 bp, Homo sapien
tcagcaaggccgagccgagatggca

SEQ ID NO: 6071425 - DNA, 25 bp, Homo sapien
tcccggactcgacgctgcaggtcgt

SEQ ID NO: 6071426 - DNA, 25 bp, Homo sapien
tagccgtatatgtacacatctgagg

SEQ ID NO: 6071427 - DNA, 25 bp, Homo sapien
cacagtcagcggtgctgcttctgca

SEQ ID NO: 6071428 - DNA, 25 bp, Homo sapien
ggttctgcggtgttaaaggacagct

SEQ ID NO: 6071429 - DNA, 25 bp, Homo sapien
tatctattctagctgtgtagcacca

SEQ ID NO: 6071430 - DNA, 25 bp, Homo sapien
tacaagtactaaatctgaagaacag

SEQ ID NO: 6071431 - DNA, 25 bp, Homo sapien
taaaggacagctaattgtgggcttt

SEQ ID NO: 6071432 - DNA, 25 bp, Homo sapien
tgagtcgagggctgaatctttctcc

SEQ ID NO: 6071433 - DNA, 25 bp, Homo sapien
cccagcatgttgcagatgtgtattt

SEQ ID NO: 6071434 - DNA, 25 bp, Homo sapien
tgctgtgaagtcttcctcgccctct

SEQ ID NO: 6071435 - DNA, 25 bp, Homo sapien
caccggaagacctttatgccatcat

SEQ ID NO: 6071436 - DNA, 25 bp, Homo sapien
tatgcgcaatggtatgcatatctct

SEQ ID NO: 6071437 - DNA, 25 bp, Homo sapien
tcattccacaggatcgagtccaggg

SEQ ID NO: 6071438 - DNA, 25 bp, Homo sapien
tttctcctctaagcagtctggtcag

SEQ ID NO: 6071439 - DNA, 25 bp, Homo sapien
tgagacctctcggtgcacctggtga

SEQ ID NO: 6071440 - DNA, 25 bp, Homo sapien
tttctgtaggctgagacctctcggt

SEQ ID NO: 6071441 - DNA, 25 bp, Homo sapien
ttggcatggtgacctgtctgggccc

SEQ ID NO: 6071442 - DNA, 25 bp, Homo sapien
caggaaccttggtttcttgagaggc

SEQ ID NO: 6071443 - DNA, 25 bp, Homo sapien
catcattagtggttaagaagcaacg

SEQ ID NO: 6071444 - DNA, 25 bp, Homo sapien
tgccccggataatcctctgaaggaa

SEQ ID NO: 6071445 - DNA, 25 bp, Homo sapien
cccggataatcctctgaaggaagag

SEQ ID NO: 6071446 - DNA, 25 bp, Homo sapien
gagtagatgccccggataatcctct

SEQ ID NO: 6071447 - DNA, 25 bp, Homo sapien
tagatgccccggataatcctctgaa

SEQ ID NO: 6071448 - DNA, 25 bp, Homo sapien
gatgccccggataatcctctgaagg

SEQ ID NO: 6071449 - DNA, 25 bp, Homo sapien
gccccggataatcctctgaaggaag

SEQ ID NO: 6071450 - DNA, 25 bp, Homo sapien
agatgccccggataatcctctgaag

SEQ ID NO: 6071451 - DNA, 25 bp, Homo sapien
cggataatcctctgaaggaagagca

SEQ ID NO: 6071452 - DNA, 25 bp, Homo sapien
ccggataatcctctgaaggaagagc

SEQ ID NO: 6071453 - DNA, 25 bp, Homo sapien
gtagatgccccggataatcctctga

SEQ ID NO: 6071454 - DNA, 25 bp, Homo sapien
ttgagtagatgccccggataatcct

SEQ ID NO: 6071455 - DNA, 25 bp, Homo sapien
ccccggataatcctctgaaggaaga

SEQ ID NO: 6071456 - DNA, 25 bp, Homo sapien
gtaacattgctaaactgcttgtcca

SEQ ID NO: 6071457 - DNA, 25 bp, Homo sapien
tatttaagacagattgctatcagca

SEQ ID NO: 6071458 - DNA, 25 bp, Homo sapien
agtactgaattgtatcaactgctgc

SEQ ID NO: 6071459 - DNA, 25 bp, Homo sapien
ctatcaagcaattcatggttgttct

SEQ ID NO: 6071460 - DNA, 25 bp, Homo sapien
ttttttcagcataaactatcaagca

SEQ ID NO: 6071461 - DNA, 25 bp, Homo sapien
tcccacattgtgctgggcgcagtgg

SEQ ID NO: 6071462 - DNA, 25 bp, Homo sapien
taaaggcataaagtcttcagattgc

SEQ ID NO: 6071463 - DNA, 25 bp, Homo sapien
gcttgtccattagcttcccacattg

SEQ ID NO: 6071464 - DNA, 25 bp, Homo sapien
gagtttattaacctatacgtactgc

SEQ ID NO: 6071465 - DNA, 25 bp, Homo sapien
tgtccccatgtggatttataatcag

SEQ ID NO: 6071466 - DNA, 25 bp, Homo sapien
taatcagatatttcgttaaaggcat

SEQ ID NO: 6071467 - DNA, 25 bp, Homo sapien
gttgttcttgtttcatctgtcccca

SEQ ID NO: 6071468 - DNA, 25 bp, Homo sapien
tcatggctggaagatcgacctccag

SEQ ID NO: 6071469 - DNA, 25 bp, Homo sapien
tctaggcactttcattgaggcaact

SEQ ID NO: 6071470 - DNA, 25 bp, Homo sapien
ggcactttcattgaggcaacttcaa

SEQ ID NO: 6071471 - DNA, 25 bp, Homo sapien
cagaagaccattgactgccacaaca

SEQ ID NO: 6071472 - DNA, 25 bp, Homo sapien
cattgaggcaacttcaacccacttt

SEQ ID NO: 6071473 - DNA, 25 bp, Homo sapien
gcctgctctaggcactttcattgag

SEQ ID NO: 6071474 - DNA, 25 bp, Homo sapien
gatcgacctccagaaacatacagaa

SEQ ID NO: 6071475 - DNA, 25 bp, Homo sapien
gaagatcgacctccagaaacataca

SEQ ID NO: 6071476 - DNA, 25 bp, Homo sapien
aaatcatggctggaagatcgacctc

SEQ ID NO: 6071477 - DNA, 25 bp, Homo sapien
accattgactgccacaacacacatg

SEQ ID NO: 6071478 - DNA, 25 bp, Homo sapien
aaaaaatcatggctggaagatcgac

SEQ ID NO: 6071479 - DNA, 25 bp, Homo sapien
gaaacatacagaagaccattgactg

SEQ ID NO: 6071480 - DNA, 25 bp, Homo sapien
gagcatcttgggtctcattccatcc

SEQ ID NO: 6071481 - DNA, 25 bp, Homo sapien
agtggagaccaacgcttagaaagtg

SEQ ID NO: 6071482 - DNA, 25 bp, Homo sapien
tcctccaacagaatagatgcagtca

SEQ ID NO: 6071483 - DNA, 25 bp, Homo sapien
agtgcagccacaccaagatatgctc

SEQ ID NO: 6071484 - DNA, 25 bp, Homo sapien
gttagagtcttgtgatcattgaaaa

SEQ ID NO: 6071485 - DNA, 25 bp, Homo sapien
tctacagtatgaagagcatcttggg

SEQ ID NO: 6071486 - DNA, 25 bp, Homo sapien
caagcggaaaacctcgtatctgtga

SEQ ID NO: 6071487 - DNA, 25 bp, Homo sapien
ccacttcaagcggaaaacctcgtat

SEQ ID NO: 6071488 - DNA, 25 bp, Homo sapien
tgacacagccatgttaccaactact

SEQ ID NO: 6071489 - DNA, 25 bp, Homo sapien
ttcacagcacccaaagtagtagcgt

SEQ ID NO: 6071490 - DNA, 25 bp, Homo sapien
cccaaagtagtagcgtgacacagcc

SEQ ID NO: 6071491 - DNA, 25 bp, Homo sapien
gcttagaaagtggatcatagacttc

SEQ ID NO: 6071492 - DNA, 25 bp, Homo sapien
cagcgccaggccatgctgggtgcgg

SEQ ID NO: 6071493 - DNA, 25 bp, Homo sapien
ctctgccacggacagggtcaggctc

SEQ ID NO: 6071494 - DNA, 25 bp, Homo sapien
tgttcagacgagaactctccatcgg

SEQ ID NO: 6071495 - DNA, 25 bp, Homo sapien
acagctggcatggaccagacagggc

SEQ ID NO: 6071496 - DNA, 25 bp, Homo sapien
gcctttgccacctgttcagacgaga

SEQ ID NO: 6071497 - DNA, 25 bp, Homo sapien
cagccgctgccagcggtggcggtca

SEQ ID NO: 6071498 - DNA, 25 bp, Homo sapien
ggaaggccacgtcggtgtagcgagt

SEQ ID NO: 6071499 - DNA, 25 bp, Homo sapien
tcggtgtagcgagtgggccggcagc

SEQ ID NO: 6071500 - DNA, 25 bp, Homo sapien
catggaccagacagggctcggcgca

SEQ ID NO: 6071501 - DNA, 25 bp, Homo sapien
cggtggcggtcatcgaggaaggcca

SEQ ID NO: 6071502 - DNA, 25 bp, Homo sapien
cgcagtagcggaagatgaccttctc

SEQ ID NO: 6071503 - DNA, 25 bp, Homo sapien
cagcctttgccacctgttcagacga

SEQ ID NO: 6071504 - DNA, 25 bp, Homo sapien
atcccatttcctagtctgcagcctt

SEQ ID NO: 6071505 - DNA, 25 bp, Homo sapien
actaggtgactaggtgaaggactga

SEQ ID NO: 6071506 - DNA, 25 bp, Homo sapien
aatcccatttcctagtctgcagcct

SEQ ID NO: 6071507 - DNA, 25 bp, Homo sapien
gaatcccatttcctagtctgcagcc

SEQ ID NO: 6071508 - DNA, 25 bp, Homo sapien
ggagctatcttaaacctggaatccc

SEQ ID NO: 6071509 - DNA, 25 bp, Homo sapien
aggagctatcttaaacctggaatcc

SEQ ID NO: 6071510 - DNA, 25 bp, Homo sapien
gagctatcttaaacctggaatccca

SEQ ID NO: 6071511 - DNA, 25 bp, Homo sapien
accctgtgactaggtgactaggtga

SEQ ID NO: 6071512 - DNA, 25 bp, Homo sapien
ccctgtgactaggtgactaggtgaa

SEQ ID NO: 6071513 - DNA, 25 bp, Homo sapien
agctatcttaaacctggaatcccat

SEQ ID NO: 6071514 - DNA, 25 bp, Homo sapien
tgactaggtgactaggtgaaggact

SEQ ID NO: 6071515 - DNA, 25 bp, Homo sapien
ggaatcccatttcctagtctgcagc

SEQ ID NO: 6071516 - DNA, 25 bp, Homo sapien
gcagatttggttatccctagtatga

SEQ ID NO: 6071517 - DNA, 25 bp, Homo sapien
taataatattccaggccaatcttgg

SEQ ID NO: 6071518 - DNA, 25 bp, Homo sapien
gtcctttcatgttcagcatacttac

SEQ ID NO: 6071519 - DNA, 25 bp, Homo sapien
ttctctcaagtagggataatttggt

SEQ ID NO: 6071520 - DNA, 25 bp, Homo sapien
tatgatttcaaagatgtgtagtctg

SEQ ID NO: 6071521 - DNA, 25 bp, Homo sapien
tacgttcaatcaaactgcaaaggcg

SEQ ID NO: 6071522 - DNA, 25 bp, Homo sapien
caatcaaactgcaaaggcgtggaca

SEQ ID NO: 6071523 - DNA, 25 bp, Homo sapien
caaatgttgtctggtagttattctg

SEQ ID NO: 6071524 - DNA, 25 bp, Homo sapien
tagggataatttggtaaaggctgaa

SEQ ID NO: 6071525 - DNA, 25 bp, Homo sapien
ggcgtggacattggttttgtctcac

SEQ ID NO: 6071526 - DNA, 25 bp, Homo sapien
ctcctttatacgttcaatcaaactg

SEQ ID NO: 6071527 - DNA, 25 bp, Homo sapien
catgttcagcatacttacaggattt

SEQ ID NO: 6071528 - DNA, 25 bp, Homo sapien
tgagcggttcaagcaattttcctgc

SEQ ID NO: 6071529 - DNA, 25 bp, Homo sapien
tacactgagtaactcacacattcct

SEQ ID NO: 6071530 - DNA, 25 bp, Homo sapien
tagtgctcaagttatgaaatggagg

SEQ ID NO: 6071531 - DNA, 25 bp, Homo sapien
caatgagggaaaaaacatacttgtc

SEQ ID NO: 6071532 - DNA, 25 bp, Homo sapien
ctgggattacaggtacacgttgcca

SEQ ID NO: 6071533 - DNA, 25 bp, Homo sapien
cacacattccttctcaatgagggaa

SEQ ID NO: 6071534 - DNA, 25 bp, Homo sapien
ggtctttagaattctagtgctcaag

SEQ ID NO: 6071535 - DNA, 25 bp, Homo sapien
ggtacacgttgccatgcctggctaa

SEQ ID NO: 6071536 - DNA, 25 bp, Homo sapien
ggagaatgtctatttttacactgag

SEQ ID NO: 6071537 - DNA, 25 bp, Homo sapien
cacccagccaggaattctttttgag

SEQ ID NO: 6071538 - DNA, 25 bp, Homo sapien
gagtcttgctctgtctgagcggttc

SEQ ID NO: 6071539 - DNA, 25 bp, Homo sapien
tttcgccgtgttgtccaggctggtc

SEQ ID NO: 6071540 - DNA, 25 bp, Homo sapien
gactgctgcgtagatggaagtccac

SEQ ID NO: 6071541 - DNA, 25 bp, Homo sapien
gacaactgggcactttggaatcaca

SEQ ID NO: 6071542 - DNA, 25 bp, Homo sapien
tcatctcacaactcttagaccacag

SEQ ID NO: 6071543 - DNA, 25 bp, Homo sapien
tcttcacagacccacaagctattgg

SEQ ID NO: 6071544 - DNA, 25 bp, Homo sapien
tcatcgggggtcttgaaaagcaacc

SEQ ID NO: 6071545 - DNA, 25 bp, Homo sapien
tatttatggcacctgtgacaactgg

SEQ ID NO: 6071546 - DNA, 25 bp, Homo sapien
cacaaagtttatggttgaagaccac

SEQ ID NO: 6071547 - DNA, 25 bp, Homo sapien
ggtcacatcaaggaccccagtcatc

SEQ ID NO: 6071548 - DNA, 25 bp, Homo sapien
ggatatcacagggtcacatcaagga

SEQ ID NO: 6071549 - DNA, 25 bp, Homo sapien
tatcctgagacaggatatcacaggg

SEQ ID NO: 6071550 - DNA, 25 bp, Homo sapien
tgtgagaaactcaaacaccgcagtc

SEQ ID NO: 6071551 - DNA, 25 bp, Homo sapien
tggaagtccacgctccttcatcggg

SEQ ID NO: 6071552 - DNA, 25 bp, Homo sapien
gagctcaggtcaaggtgcactatat

SEQ ID NO: 6071553 - DNA, 25 bp, Homo sapien
gtaatgtacgctttattctggacag

SEQ ID NO: 6071554 - DNA, 25 bp, Homo sapien
tagttagtcacctgacattcccttg

SEQ ID NO: 6071555 - DNA, 25 bp, Homo sapien
aactaggttgtagtccataggagga

SEQ ID NO: 6071556 - DNA, 25 bp, Homo sapien
ttctggacagctacctatgaagtca

SEQ ID NO: 6071557 - DNA, 25 bp, Homo sapien
ctaaaggtcgtcaggaacccaggct

SEQ ID NO: 6071558 - DNA, 25 bp, Homo sapien
taatatacctgcaattctgagctca

SEQ ID NO: 6071559 - DNA, 25 bp, Homo sapien
gctggaatagtggtttggacctaaa

SEQ ID NO: 6071560 - DNA, 25 bp, Homo sapien
tcttccataggaaatacagttgcct

SEQ ID NO: 6071561 - DNA, 25 bp, Homo sapien
tcttaagaaagaggtctgaagctgg

SEQ ID NO: 6071562 - DNA, 25 bp, Homo sapien
tgcatagggagaaaacgagtagtct

SEQ ID NO: 6071563 - DNA, 25 bp, Homo sapien
ccaatgtgtactgggtaatgtacgc

SEQ ID NO: 6071564 - DNA, 25 bp, Homo sapien
agctcctcttcgcagcgtgcacggt

SEQ ID NO: 6071565 - DNA, 25 bp, Homo sapien
tcttcgcagcgtgcacggtaggagc

SEQ ID NO: 6071566 - DNA, 25 bp, Homo sapien
gaagtgctgaccacgtcatcctgcg

SEQ ID NO: 6071567 - DNA, 25 bp, Homo sapien
agggctgaagtgagtcgcctccacg

SEQ ID NO: 6071568 - DNA, 25 bp, Homo sapien
agcgtgcatagaaggcggcctcctg

SEQ ID NO: 6071569 - DNA, 25 bp, Homo sapien
aggcggcccgaagtgctgaccacgt

SEQ ID NO: 6071570 - DNA, 25 bp, Homo sapien
cccgggtagcagcacagctgctcgg

SEQ ID NO: 6071571 - DNA, 25 bp, Homo sapien
tcgtccacgcggtagcgtgcataga

SEQ ID NO: 6071572 - DNA, 25 bp, Homo sapien
acgttcttgaggtgcttccgagcca

SEQ ID NO: 6071573 - DNA, 25 bp, Homo sapien
ggttgccctccacgtcaccaggtga

SEQ ID NO: 6071574 - DNA, 25 bp, Homo sapien
agctgctcggccacgttgaggttga

SEQ ID NO: 6071575 - DNA, 25 bp, Homo sapien
catcctgcgtgcgtcggagcagcag

SEQ ID NO: 6071576 - DNA, 25 bp, Homo sapien
gtggcgcggcgctagtgggaggcgg

SEQ ID NO: 6071577 - DNA, 25 bp, Homo sapien
ctgtcctgggttgttacaaatgatt

SEQ ID NO: 6071578 - DNA, 25 bp, Homo sapien
cttgtggcatctctgtcctgggttg

SEQ ID NO: 6071579 - DNA, 25 bp, Homo sapien
ctggcgcgccggtccggaggtgggt

SEQ ID NO: 6071580 - DNA, 25 bp, Homo sapien
tggtggggtggaagagaggaaatga

SEQ ID NO: 6071581 - DNA, 25 bp, Homo sapien
actcccgccaacgtttcgtgggctg

SEQ ID NO: 6071582 - DNA, 25 bp, Homo sapien
gtagctgaggcgctcgtgggccacg

SEQ ID NO: 6071583 - DNA, 25 bp, Homo sapien
ctttccccaaagtcctcttgtggca

SEQ ID NO: 6071584 - DNA, 25 bp, Homo sapien
ctgcttcatgttccaagaccttggt

SEQ ID NO: 6071585 - DNA, 25 bp, Homo sapien
cccaaagtcctcttgtggcatctct

SEQ ID NO: 6071586 - DNA, 25 bp, Homo sapien
tgatgtggtggggtggaagagagga

SEQ ID NO: 6071587 - DNA, 25 bp, Homo sapien
ttctgaacttgaaaaaacaactcca

SEQ ID NO: 6071588 - DNA, 25 bp, Homo sapien
gctcactcccgccaacgtttcgtgg

SEQ ID NO: 6071589 - DNA, 25 bp, Homo sapien
atgttcttagccattgctaatgtgc

SEQ ID NO: 6071590 - DNA, 25 bp, Homo sapien
tatgagtggattcgcctttccccaa

SEQ ID NO: 6071591 - DNA, 25 bp, Homo sapien
cggcgctagtgggaggcggacatgg

SEQ ID NO: 6071592 - DNA, 25 bp, Homo sapien
gcccctctgtgtcctcttcctcctc

SEQ ID NO: 6071593 - DNA, 25 bp, Homo sapien
ttagccattgctaatgtgctcactc

SEQ ID NO: 6071594 - DNA, 25 bp, Homo sapien
ctcctcctggcgcgccggtccggag

SEQ ID NO: 6071595 - DNA, 25 bp, Homo sapien
tgaccaaacactgccccctcttcct

SEQ ID NO: 6071596 - DNA, 25 bp, Homo sapien
cggtgttgctggtgtgcatgctcca

SEQ ID NO: 6071597 - DNA, 25 bp, Homo sapien
aactccaagatgtatgagtggattc

SEQ ID NO: 6071598 - DNA, 25 bp, Homo sapien
acttgaaaaaacaactccaagatgt

SEQ ID NO: 6071599 - DNA, 25 bp, Homo sapien
ctcgtgggccacgtagctgcagctg

SEQ ID NO: 6071600 - DNA, 25 bp, Homo sapien
agcagaaggtctggcaatggcagca

SEQ ID NO: 6071601 - DNA, 25 bp, Homo sapien
gagtcagcaccagagtctctgcttc

SEQ ID NO: 6071602 - DNA, 25 bp, Homo sapien
agagaggaaatgagggttattaccg

SEQ ID NO: 6071603 - DNA, 25 bp, Homo sapien
cactgggcatgagtacccttaggag

SEQ ID NO: 6071604 - DNA, 25 bp, Homo sapien
cacggagaaggcgtagctgaggcgc

SEQ ID NO: 6071605 - DNA, 25 bp, Homo sapien
gtcctcttgtggcatctctgtcctg

SEQ ID NO: 6071606 - DNA, 25 bp, Homo sapien
ctcctctaaggggtgggacaccgag

SEQ ID NO: 6071607 - DNA, 25 bp, Homo sapien
tgcgccacacggagaaggcgtagct

SEQ ID NO: 6071608 - DNA, 25 bp, Homo sapien
gcatgagtacccttaggagctcaaa

SEQ ID NO: 6071609 - DNA, 25 bp, Homo sapien
gagtctctgcttcatgttccaagac

SEQ ID NO: 6071610 - DNA, 25 bp, Homo sapien
cgcgccctccatgcgccacacggag

SEQ ID NO: 6071611 - DNA, 25 bp, Homo sapien
acaccgagatggtgttggcggtgtt

SEQ ID NO: 6071612 - DNA, 25 bp, Homo sapien
tgctggtgtgcatgctccactgggc

SEQ ID NO: 6071613 - DNA, 25 bp, Homo sapien
atgatagagtcagcaccagagtctc

SEQ ID NO: 6071614 - DNA, 25 bp, Homo sapien
tcaagcatgttcttagccattgcta

SEQ ID NO: 6071615 - DNA, 25 bp, Homo sapien
tgggctgtcttgaccaaacactgcc

SEQ ID NO: 6071616 - DNA, 25 bp, Homo sapien
gtcttgaccaaacactgccccctct

SEQ ID NO: 6071617 - DNA, 25 bp, Homo sapien
gtttcgtgggctgtcttgaccaaac

SEQ ID NO: 6071618 - DNA, 25 bp, Homo sapien
ggcaatggcagcatcattcagaatc

SEQ ID NO: 6071619 - DNA, 25 bp, Homo sapien
gcatctctgtcctgggttgttacaa

SEQ ID NO: 6071620 - DNA, 25 bp, Homo sapien
ttattaccgggcgcccctctgtgtc

SEQ ID NO: 6071621 - DNA, 25 bp, Homo sapien
gccaacgtttcgtgggctgtcttga

SEQ ID NO: 6071622 - DNA, 25 bp, Homo sapien
gaggcggacatggaccacgcgccct

SEQ ID NO: 6071623 - DNA, 25 bp, Homo sapien
cgccggtccggaggtgggtggcgcg

SEQ ID NO: 6071624 - DNA, 25 bp, Homo sapien
gctcaaatgatagagtcagcaccag

SEQ ID NO: 6071625 - DNA, 25 bp, Homo sapien
tagtgggaggcggacatggaccacg

SEQ ID NO: 6071626 - DNA, 25 bp, Homo sapien
taatgtgctcactcccgccaacgtt

SEQ ID NO: 6071627 - DNA, 25 bp, Homo sapien
gtccggaggtgggtggcgcggcgct

SEQ ID NO: 6071628 - DNA, 25 bp, Homo sapien
tgggttgttacaaatgattcaagca

SEQ ID NO: 6071629 - DNA, 25 bp, Homo sapien
tgttggcggtgttgctggtgtgcat

SEQ ID NO: 6071630 - DNA, 25 bp, Homo sapien
aaaaacaactccaagatgtatgagt

SEQ ID NO: 6071631 - DNA, 25 bp, Homo sapien
gcaccagagtctctgcttcatgttc

SEQ ID NO: 6071632 - DNA, 25 bp, Homo sapien
tgaaggttcattttctgaacttgaa

SEQ ID NO: 6071633 - DNA, 25 bp, Homo sapien
gtacccttaggagctcaaatgatag

SEQ ID NO: 6071634 - DNA, 25 bp, Homo sapien
ctcttcgctctgtttggtagcagaa

SEQ ID NO: 6071635 - DNA, 25 bp, Homo sapien
ccaagaccttggtgaaggttcattt

SEQ ID NO: 6071636 - DNA, 25 bp, Homo sapien
gctctgtttggtagcagaaggtctg

SEQ ID NO: 6071637 - DNA, 25 bp, Homo sapien
aatgattcaagcatgttcttagcca

SEQ ID NO: 6071638 - DNA, 25 bp, Homo sapien
ccttggtgaaggttcattttctgaa

SEQ ID NO: 6071639 - DNA, 25 bp, Homo sapien
tcttcctcctctaaggggtgggaca

SEQ ID NO: 6071640 - DNA, 25 bp, Homo sapien
tttggtagcagaaggtctggcaatg

SEQ ID NO: 6071641 - DNA, 25 bp, Homo sapien
ttaggagctcaaatgatagagtcag

SEQ ID NO: 6071642 - DNA, 25 bp, Homo sapien
tcttcctcttcgctctgtttggtag

SEQ ID NO: 6071643 - DNA, 25 bp, Homo sapien
catgttccaagaccttggtgaaggt

SEQ ID NO: 6071644 - DNA, 25 bp, Homo sapien
tctaaggggtgggacaccgagatgg

SEQ ID NO: 6071645 - DNA, 25 bp, Homo sapien
atcattcagaatctcctcctggcgc

SEQ ID NO: 6071646 - DNA, 25 bp, Homo sapien
ggtggaagagaggaaatgagggtta

SEQ ID NO: 6071647 - DNA, 25 bp, Homo sapien
gttacaaatgattcaagcatgttct

SEQ ID NO: 6071648 - DNA, 25 bp, Homo sapien
ttcattttctgaacttgaaaaaaca

SEQ ID NO: 6071649 - DNA, 25 bp, Homo sapien
tgaggcgctcgtgggccacgtagct

SEQ ID NO: 6071650 - DNA, 25 bp, Homo sapien
ccgggcgcccctctgtgtcctcttc

SEQ ID NO: 6071651 - DNA, 25 bp, Homo sapien
tgtgcatgctccactgggcatgagt

SEQ ID NO: 6071652 - DNA, 25 bp, Homo sapien
agatggtgttggcggtgttgctggt

SEQ ID NO: 6071653 - DNA, 25 bp, Homo sapien
aagatgtatgagtggattcgccttt

SEQ ID NO: 6071654 - DNA, 25 bp, Homo sapien
ggacatggaccacgcgccctccatg

SEQ ID NO: 6071655 - DNA, 25 bp, Homo sapien
ggcagcatcattcagaatctcctcc

SEQ ID NO: 6071656 - DNA, 25 bp, Homo sapien
aacactgccccctcttcctcttcgc

SEQ ID NO: 6071657 - DNA, 25 bp, Homo sapien
taagatgatgtggtggggtggaaga

SEQ ID NO: 6071658 - DNA, 25 bp, Homo sapien
ctgtgtcctcttcctcctctaaggg

SEQ ID NO: 6071659 - DNA, 25 bp, Homo sapien
ggaccacgcgccctccatgcgccac

SEQ ID NO: 6071660 - DNA, 25 bp, Homo sapien
ctccatgcgccacacggagaaggcg

SEQ ID NO: 6071661 - DNA, 25 bp, Homo sapien
ggccacgtagctgcagctggtcatc

SEQ ID NO: 6071662 - DNA, 25 bp, Homo sapien
cagaatctcctcctggcgcgccggt

SEQ ID NO: 6071663 - DNA, 25 bp, Homo sapien
tgctccactgggcatgagtaccctt

SEQ ID NO: 6071664 - DNA, 25 bp, Homo sapien
gaaggcgtagctgaggcgctcgtgg

SEQ ID NO: 6071665 - DNA, 25 bp, Homo sapien
attgctaatgtgctcactcccgcca

SEQ ID NO: 6071666 - DNA, 25 bp, Homo sapien
aggtctggcaatggcagcatcattc

SEQ ID NO: 6071667 - DNA, 25 bp, Homo sapien
aggtgggtggcgcggcgctagtggg

SEQ ID NO: 6071668 - DNA, 25 bp, Homo sapien
gccccctcttcctcttcgctctgtt

SEQ ID NO: 6071669 - DNA, 25 bp, Homo sapien
ggtgggacaccgagatggtgttggc

SEQ ID NO: 6071670 - DNA, 25 bp, Homo sapien
tgcacacgctcttgtcgcagctgat

SEQ ID NO: 6071671 - DNA, 25 bp, Homo sapien
ggtgcatttgcccttgacgcggtct

SEQ ID NO: 6071672 - DNA, 25 bp, Homo sapien
ccttgatctgcacgatgagcttgta

SEQ ID NO: 6071673 - DNA, 25 bp, Homo sapien
cacgctgcccttgatctgcacgatg

SEQ ID NO: 6071674 - DNA, 25 bp, Homo sapien
aacgtgcccttcacgaagcgcagca

SEQ ID NO: 6071675 - DNA, 25 bp, Homo sapien
atgttccggcgcgtctccagcgtca

SEQ ID NO: 6071676 - DNA, 25 bp, Homo sapien
atgaaagcgcacttccactcctggg

SEQ ID NO: 6071677 - DNA, 25 bp, Homo sapien
gactgcttgctggtgacggagaaca

SEQ ID NO: 6071678 - DNA, 25 bp, Homo sapien
gctgcgtctcatcgcacttgttgcc

SEQ ID NO: 6071679 - DNA, 25 bp, Homo sapien
tgttgaggctcatgttccggcgcgt

SEQ ID NO: 6071680 - DNA, 25 bp, Homo sapien
tggccgaggtctccatgaaagcgca

SEQ ID NO: 6071681 - DNA, 25 bp, Homo sapien
cgcttgccgtcgatgttgaggctca

SEQ ID NO: 6071682 - DNA, 25 bp, Homo sapien
gcaccagggaccattgatgtcacca

SEQ ID NO: 6071683 - DNA, 25 bp, Homo sapien
tagcaccagggaccattgatgtcac

SEQ ID NO: 6071684 - DNA, 25 bp, Homo sapien
cagaaggaggccctaggcttggaac

SEQ ID NO: 6071685 - DNA, 25 bp, Homo sapien
caccagggaccattgatgtcaccat

SEQ ID NO: 6071686 - DNA, 25 bp, Homo sapien
cttgttcagaaggaggccctaggct

SEQ ID NO: 6071687 - DNA, 25 bp, Homo sapien
agtggttgccttcttgccccggtat

SEQ ID NO: 6071688 - DNA, 25 bp, Homo sapien
tggttgccttcttgccccggtatcc

SEQ ID NO: 6071689 - DNA, 25 bp, Homo sapien
cctgcccatttatttgtccctggaa

SEQ ID NO: 6071690 - DNA, 25 bp, Homo sapien
tttgtccctggaatgaacgtgctgt

SEQ ID NO: 6071691 - DNA, 25 bp, Homo sapien
gacctgcccatttatttgtccctgg

SEQ ID NO: 6071692 - DNA, 25 bp, Homo sapien
tgttcagaaggaggccctaggcttg

SEQ ID NO: 6071693 - DNA, 25 bp, Homo sapien
acagtggttgccttcttgccccggt

SEQ ID NO: 6071694 - DNA, 25 bp, Homo sapien
ggcctgggccagccgttctctggtg

SEQ ID NO: 6071695 - DNA, 25 bp, Homo sapien
tggctcggggtccaaacgagtctcc

SEQ ID NO: 6071696 - DNA, 25 bp, Homo sapien
gcctgggccagccgttctctggtgg

SEQ ID NO: 6071697 - DNA, 25 bp, Homo sapien
ttggctcggggtccaaacgagtctc

SEQ ID NO: 6071698 - DNA, 25 bp, Homo sapien
tgtagggccttgctttggctcgggg

SEQ ID NO: 6071699 - DNA, 25 bp, Homo sapien
tgccgtctgaaggtttcgggagggc

SEQ ID NO: 6071700 - DNA, 25 bp, Homo sapien
cgtctgaaggtttcgggagggccat

SEQ ID NO: 6071701 - DNA, 25 bp, Homo sapien
cgtctgaaggtttcgggagggccat

SEQ ID NO: 6071702 - DNA, 25 bp, Homo sapien
tgccgtctgaaggtttcgggagggc

SEQ ID NO: 6071703 - DNA, 25 bp, Homo sapien
caaagcaggcttgtagggccttgct

SEQ ID NO: 6071704 - DNA, 25 bp, Homo sapien
ctcaaagcaggcttgtagggccttg

SEQ ID NO: 6071705 - DNA, 25 bp, Homo sapien
tcaaagcaggcttgtagggccttgc

SEQ ID NO: 6071706 - DNA, 25 bp, Homo sapien
cttgtagggccttgctttggctcgg

SEQ ID NO: 6071707 - DNA, 25 bp, Homo sapien
aaacgagtctccttcgctgtccccg

SEQ ID NO: 6071708 - DNA, 25 bp, Homo sapien
gcttgtagggccttgctttggctcg

SEQ ID NO: 6071709 - DNA, 25 bp, Homo sapien
gctcaaagcaggcttgtagggcctt

SEQ ID NO: 6071710 - DNA, 25 bp, Homo sapien
agcaggcttgtagggccttgctttg

SEQ ID NO: 6071711 - DNA, 25 bp, Homo sapien
ttcgctgtccccgtccctggacttc

SEQ ID NO: 6071712 - DNA, 25 bp, Homo sapien
ggcttgtagggccttgctttggctc

SEQ ID NO: 6071713 - DNA, 25 bp, Homo sapien
tcagaatatgtgtggacttgtcagc

SEQ ID NO: 6071714 - DNA, 25 bp, Homo sapien
cattcaatcagggtttaaccggtga

SEQ ID NO: 6071715 - DNA, 25 bp, Homo sapien
gaaaatgtgacttcagaatatgtgt

SEQ ID NO: 6071716 - DNA, 25 bp, Homo sapien
tgggagaggcaccactattattatc

SEQ ID NO: 6071717 - DNA, 25 bp, Homo sapien
gtgtggaaggccttataatgaggat

SEQ ID NO: 6071718 - DNA, 25 bp, Homo sapien
caggtgctttgatagctgcaagaat

SEQ ID NO: 6071719 - DNA, 25 bp, Homo sapien
gaaatctttgattagcaggtgcttt

SEQ ID NO: 6071720 - DNA, 25 bp, Homo sapien
ccagattggaggtctggagaaactc

SEQ ID NO: 6071721 - DNA, 25 bp, Homo sapien
gaaagtagtcggctttacaagatta

SEQ ID NO: 6071722 - DNA, 25 bp, Homo sapien
tctacattcaatcagggtttaaccg

SEQ ID NO: 6071723 - DNA, 25 bp, Homo sapien
ggccttataatgaggattccattgt

SEQ ID NO: 6071724 - DNA, 25 bp, Homo sapien
ttctctcagaatgattctgtggccc

SEQ ID NO: 6071725 - DNA, 25 bp, Homo sapien
gtctttgcaccgttctgtgtactta

SEQ ID NO: 6071726 - DNA, 25 bp, Homo sapien
caccgttctgtgtacttattgatga

SEQ ID NO: 6071727 - DNA, 25 bp, Homo sapien
gtttttacagctattcttgcaggct

SEQ ID NO: 6071728 - DNA, 25 bp, Homo sapien
gtaccctgggtcaccctgttgtgga

SEQ ID NO: 6071729 - DNA, 25 bp, Homo sapien
taccctgggtcaccctgttgtggag

SEQ ID NO: 6071730 - DNA, 25 bp, Homo sapien
gtaaggtgtgttcaggtgcttctct

SEQ ID NO: 6071731 - DNA, 25 bp, Homo sapien
tacagctattcttgcaggctatgtt

SEQ ID NO: 6071732 - DNA, 25 bp, Homo sapien
tgtacttattgatgatgctcatggc

SEQ ID NO: 6071733 - DNA, 25 bp, Homo sapien
tctgtgtacttattgatgatgctca

SEQ ID NO: 6071734 - DNA, 25 bp, Homo sapien
agctattcttgcaggctatgttggg

SEQ ID NO: 6071735 - DNA, 25 bp, Homo sapien
tacttattgatgatgctcatggctg

SEQ ID NO: 6071736 - DNA, 25 bp, Homo sapien
tattgatgatgctcatggctgagtt

SEQ ID NO: 6071737 - DNA, 25 bp, Homo sapien
tgccccgccgccaagcccgccaccg

SEQ ID NO: 6071738 - DNA, 25 bp, Homo sapien
gggctcccgctaaggacgcagctga

SEQ ID NO: 6071739 - DNA, 25 bp, Homo sapien
ggaagaggagatgcgggtgggaccc

SEQ ID NO: 6071740 - DNA, 25 bp, Homo sapien
gccagagctacttctccagggctgg

SEQ ID NO: 6071741 - DNA, 25 bp, Homo sapien
aggagatgcgggtgggacccacctc

SEQ ID NO: 6071742 - DNA, 25 bp, Homo sapien
gaggagatgcgggtgggacccacct

SEQ ID NO: 6071743 - DNA, 25 bp, Homo sapien
ggctcccgctaaggacgcagctgac

SEQ ID NO: 6071744 - DNA, 25 bp, Homo sapien
actcgggctcccgctaaggacgcag

SEQ ID NO: 6071745 - DNA, 25 bp, Homo sapien
aaaagaagacaagccagagctactt

SEQ ID NO: 6071746 - DNA, 25 bp, Homo sapien
cgcactcgggctcccgctaaggacg

SEQ ID NO: 6071747 - DNA, 25 bp, Homo sapien
tcgggctcccgctaaggacgcagct

SEQ ID NO: 6071748 - DNA, 25 bp, Homo sapien
cgggctcccgctaaggacgcagctg

SEQ ID NO: 6071749 - DNA, 25 bp, Homo sapien
gaagccatccagcatagtgcagccg

SEQ ID NO: 6071750 - DNA, 25 bp, Homo sapien
gccacacagtagcacgttggcggcc

SEQ ID NO: 6071751 - DNA, 25 bp, Homo sapien
tgagtttgccgtccgggagctcgta

SEQ ID NO: 6071752 - DNA, 25 bp, Homo sapien
gtcttcctctcaggagcggcagcca

SEQ ID NO: 6071753 - DNA, 25 bp, Homo sapien
ggagctcgtagtccacgcgcagctc

SEQ ID NO: 6071754 - DNA, 25 bp, Homo sapien
cctctggaagcgctcggggaagcca

SEQ ID NO: 6071755 - DNA, 25 bp, Homo sapien
tgctggaggccttgtctgtggaaat

SEQ ID NO: 6071756 - DNA, 25 bp, Homo sapien
ctcagagcaacggaagcgctcctgg

SEQ ID NO: 6071757 - DNA, 25 bp, Homo sapien
agagcatctcagagcaacggaagcg

SEQ ID NO: 6071758 - DNA, 25 bp, Homo sapien
ctgtaaatgtgtatagagaggcctg

SEQ ID NO: 6071759 - DNA, 25 bp, Homo sapien
gccttgtctgtggaaatgccgaggc

SEQ ID NO: 6071760 - DNA, 25 bp, Homo sapien
agccgccacacagtagcacgttggc

SEQ ID NO: 6071761 - DNA, 25 bp, Homo sapien
ggacttggacggcttgcacaccatg

SEQ ID NO: 6071762 - DNA, 25 bp, Homo sapien
gttcattgaaaaccctcgctagagg

SEQ ID NO: 6071763 - DNA, 25 bp, Homo sapien
cacagttaaacagtgcattacagga

SEQ ID NO: 6071764 - DNA, 25 bp, Homo sapien
cacggagcacgagcgcttactgaag

SEQ ID NO: 6071765 - DNA, 25 bp, Homo sapien
caccgtgaggtgcacggacttggac

SEQ ID NO: 6071766 - DNA, 25 bp, Homo sapien
gccaaaagcggctgcccaggtcgtt

SEQ ID NO: 6071767 - DNA, 25 bp, Homo sapien
caccttcacgtagcgcggccaaaag

SEQ ID NO: 6071768 - DNA, 25 bp, Homo sapien
agcacttgcactcggaaatgatggg

SEQ ID NO: 6071769 - DNA, 25 bp, Homo sapien
aaactgggaccgtatatacacacac

SEQ ID NO: 6071770 - DNA, 25 bp, Homo sapien
ggcagaatgtctgcgaccacagcca

SEQ ID NO: 6071771 - DNA, 25 bp, Homo sapien
gaaagctaggtctctgtagcccaga

SEQ ID NO: 6071772 - DNA, 25 bp, Homo sapien
caggtcgttccacgcgtacagcacg

SEQ ID NO: 6071773 - DNA, 25 bp, Homo sapien
tgcctcgccttgagcggcctgggct

SEQ ID NO: 6071774 - DNA, 25 bp, Homo sapien
ggagaccacatctaatggataaaag

SEQ ID NO: 6071775 - DNA, 25 bp, Homo sapien
tcgaagcccagcttggcactctcat

SEQ ID NO: 6071776 - DNA, 25 bp, Homo sapien
tgctgcaatgactggtcaacgtccc

SEQ ID NO: 6071777 - DNA, 25 bp, Homo sapien
ggctatattgactgctggtgaggct

SEQ ID NO: 6071778 - DNA, 25 bp, Homo sapien
gaagctgccaatagagacactgtcc

SEQ ID NO: 6071779 - DNA, 25 bp, Homo sapien
aaggtcacatcatcctggcactgct

SEQ ID NO: 6071780 - DNA, 25 bp, Homo sapien
agtccatctcggaacgtggagcccc

SEQ ID NO: 6071781 - DNA, 25 bp, Homo sapien
ccgcctgtcaggctatattgactgc

SEQ ID NO: 6071782 - DNA, 25 bp, Homo sapien
agacactgtccagccggtcggtggt

SEQ ID NO: 6071783 - DNA, 25 bp, Homo sapien
ccaggaagctgccaatagagacact

SEQ ID NO: 6071784 - DNA, 25 bp, Homo sapien
atctcggaacgtggagccccaggtg

SEQ ID NO: 6071785 - DNA, 25 bp, Homo sapien
aaaaagaatagtacctcactcatgg

SEQ ID NO: 6071786 - DNA, 25 bp, Homo sapien
cactcatggtttttagaataaaccg

SEQ ID NO: 6071787 - DNA, 25 bp, Homo sapien
catagcaataaataccggccccgct

SEQ ID NO: 6071788 - DNA, 25 bp, Homo sapien
gagtcataatgacagcttagtcgcc

SEQ ID NO: 6071789 - DNA, 25 bp, Homo sapien
tttttggaatatgtagaatcagccg

SEQ ID NO: 6071790 - DNA, 25 bp, Homo sapien
gcaggcaaatcacgaagtcaggaga

SEQ ID NO: 6071791 - DNA, 25 bp, Homo sapien
gcttagtcgcccttttctgctgata

SEQ ID NO: 6071792 - DNA, 25 bp, Homo sapien
ttttctgctgatataactggtcccc

SEQ ID NO: 6071793 - DNA, 25 bp, Homo sapien
gaaaacacatagcaataaataccgg

SEQ ID NO: 6071794 - DNA, 25 bp, Homo sapien
gaatatgtagaatcagccgggcgca

SEQ ID NO: 6071795 - DNA, 25 bp, Homo sapien
tgtggtggtggccacctgtagttcc

SEQ ID NO: 6071796 - DNA, 25 bp, Homo sapien
ctttgttgtcttttcaggaggagga

SEQ ID NO: 6071797 - DNA, 25 bp, Homo sapien
tgtggctcttgccatctcgtggcat

SEQ ID NO: 6071798 - DNA, 25 bp, Homo sapien
tgaaaggttttaccagtgctgctgg

SEQ ID NO: 6071799 - DNA, 25 bp, Homo sapien
cttgccatctcgtggcatccaggat

SEQ ID NO: 6071800 - DNA, 25 bp, Homo sapien
caaggcgcggaacaaatcctgagac

SEQ ID NO: 6071801 - DNA, 25 bp, Homo sapien
tatttgttcccgaattggtccgtgc

SEQ ID NO: 6071802 - DNA, 25 bp, Homo sapien
ccatagtaggtggagtctttcttgt

SEQ ID NO: 6071803 - DNA, 25 bp, Homo sapien
gatcctggctgaaaggttttaccag

SEQ ID NO: 6071804 - DNA, 25 bp, Homo sapien
ggaacaaatcctgagaccaacccat

SEQ ID NO: 6071805 - DNA, 25 bp, Homo sapien
tcccttgacagcgatctccacaagg

SEQ ID NO: 6071806 - DNA, 25 bp, Homo sapien
agcgatctccacaaggcgcggaaca

SEQ ID NO: 6071807 - DNA, 25 bp, Homo sapien
cgaattggtccgtgcccacgtgctc

SEQ ID NO: 6071808 - DNA, 25 bp, Homo sapien
cctcactggtctctttactaaggag

SEQ ID NO: 6071809 - DNA, 25 bp, Homo sapien
ggctttgactattagggtgtcccac

SEQ ID NO: 6071810 - DNA, 25 bp, Homo sapien
ccttgggctttgactattagggtgt

SEQ ID NO: 6071811 - DNA, 25 bp, Homo sapien
acttttcttggccactacgatttca

SEQ ID NO: 6071812 - DNA, 25 bp, Homo sapien
cacccattaggaggttcccaccttg

SEQ ID NO: 6071813 - DNA, 25 bp, Homo sapien
acagctaagcctgcattctctgcca

SEQ ID NO: 6071814 - DNA, 25 bp, Homo sapien
acgatttcatctacagtcacgagct

SEQ ID NO: 6071815 - DNA, 25 bp, Homo sapien
ccattaggaggttcccaccttggtg

SEQ ID NO: 6071816 - DNA, 25 bp, Homo sapien
tacagtcacgagctgtagcaccacc

SEQ ID NO: 6071817 - DNA, 25 bp, Homo sapien
gtggtagacggcctgctctgcactc

SEQ ID NO: 6071818 - DNA, 25 bp, Homo sapien
gtcacgagctgtagcaccacctcag

SEQ ID NO: 6071819 - DNA, 25 bp, Homo sapien
tgactattagggtgtcccacacccc

SEQ ID NO: 6071820 - DNA, 25 bp, Homo sapien
ctgagacagctaagcctgcattctc

SEQ ID NO: 6071821 - DNA, 25 bp, Homo sapien
tttccaatggcaaccaatgatcagg

SEQ ID NO: 6071822 - DNA, 25 bp, Homo sapien
ggtcttgtggacatgttctaagtaa

SEQ ID NO: 6071823 - DNA, 25 bp, Homo sapien
taaggaaggtatgctagcagtggca

SEQ ID NO: 6071824 - DNA, 25 bp, Homo sapien
ttttcactaaggaaggtatgctagc

SEQ ID NO: 6071825 - DNA, 25 bp, Homo sapien
ggaaacagtgtctcatccgttgggt

SEQ ID NO: 6071826 - DNA, 25 bp, Homo sapien
gcagcatactctgtagcaacagcat

SEQ ID NO: 6071827 - DNA, 25 bp, Homo sapien
tatccactcccaagtttgcagttct

SEQ ID NO: 6071828 - DNA, 25 bp, Homo sapien
cacaggtcagagtgggatccttttc

SEQ ID NO: 6071829 - DNA, 25 bp, Homo sapien
tcctgatcccttggtaagggctctt

SEQ ID NO: 6071830 - DNA, 25 bp, Homo sapien
ccttggtaagggctctttagcaaag

SEQ ID NO: 6071831 - DNA, 25 bp, Homo sapien
catccgttgggtttattaggtgaat

SEQ ID NO: 6071832 - DNA, 25 bp, Homo sapien
aatttgtcacgtatttccaatggca

SEQ ID NO: 6071833 - DNA, 25 bp, Homo sapien
taaggaaggtatgctagcagtggca

SEQ ID NO: 6071834 - DNA, 25 bp, Homo sapien
tcctgatcccttggtaagggctctt

SEQ ID NO: 6071835 - DNA, 25 bp, Homo sapien
ttttcactaaggaaggtatgctagc

SEQ ID NO: 6071836 - DNA, 25 bp, Homo sapien
ggaaacagtgtctcatccgttgggt

SEQ ID NO: 6071837 - DNA, 25 bp, Homo sapien
gcagcatactctgtagcaacagcat

SEQ ID NO: 6071838 - DNA, 25 bp, Homo sapien
cacaggtcagagtgggatccttttc

SEQ ID NO: 6071839 - DNA, 25 bp, Homo sapien
tatccactcccaagtttgcagttct

SEQ ID NO: 6071840 - DNA, 25 bp, Homo sapien
tttccaatggcaaccaatgatcagg

SEQ ID NO: 6071841 - DNA, 25 bp, Homo sapien
ccttggtaagggctctttagcaaag

SEQ ID NO: 6071842 - DNA, 25 bp, Homo sapien
aatttgtcacgtatttccaatggca

SEQ ID NO: 6071843 - DNA, 25 bp, Homo sapien
catccgttgggtttattaggtgaat

SEQ ID NO: 6071844 - DNA, 25 bp, Homo sapien
ggtcttgtggacatgttctaagtaa

SEQ ID NO: 6071845 - DNA, 25 bp, Homo sapien
caccaacaacacagtactctgcaag

SEQ ID NO: 6071846 - DNA, 25 bp, Homo sapien
tgtatataaacatgatttgctgaaa

SEQ ID NO: 6071847 - DNA, 25 bp, Homo sapien
gctgctattgtgtcattgtatataa

SEQ ID NO: 6071848 - DNA, 25 bp, Homo sapien
tttgctgaaaatggcggaacattgc

SEQ ID NO: 6071849 - DNA, 25 bp, Homo sapien
tcaagctgacgtaaaataaatgtct

SEQ ID NO: 6071850 - DNA, 25 bp, Homo sapien
ttattttgagctacagcatggacag

SEQ ID NO: 6071851 - DNA, 25 bp, Homo sapien
gttcctctactaaaagagatatctg

SEQ ID NO: 6071852 - DNA, 25 bp, Homo sapien
tcaatctctgaaagttgtgctttag

SEQ ID NO: 6071853 - DNA, 25 bp, Homo sapien
ttttacagctagtccaaatttctct

SEQ ID NO: 6071854 - DNA, 25 bp, Homo sapien
cagcaacttcaagctgacgtaaaat

SEQ ID NO: 6071855 - DNA, 25 bp, Homo sapien
tggcggaacattgcagcatgctgag

SEQ ID NO: 6071856 - DNA, 25 bp, Homo sapien
gagatatctgaatgaaaagatccct

SEQ ID NO: 6071857 - DNA, 25 bp, Homo sapien
gcgacctggaagctcatcacagcag

SEQ ID NO: 6071858 - DNA, 25 bp, Homo sapien
tccagactctcgacaactggtaagg

SEQ ID NO: 6071859 - DNA, 25 bp, Homo sapien
ggccatgtacatagacacccaacgg

SEQ ID NO: 6071860 - DNA, 25 bp, Homo sapien
gcgttctcctatttgactcaggtca

SEQ ID NO: 6071861 - DNA, 25 bp, Homo sapien
catgagtgtttatctgtgtaaggca

SEQ ID NO: 6071862 - DNA, 25 bp, Homo sapien
aactggtaaggccagcgacctggaa

SEQ ID NO: 6071863 - DNA, 25 bp, Homo sapien
tccccatggactagctatgagcagg

SEQ ID NO: 6071864 - DNA, 25 bp, Homo sapien
cataatccagggtgccacatccaga

SEQ ID NO: 6071865 - DNA, 25 bp, Homo sapien
cacagcaggctatgtgtgaaggtag

SEQ ID NO: 6071866 - DNA, 25 bp, Homo sapien
tgaaggtaggacagtagacatgagt

SEQ ID NO: 6071867 - DNA, 25 bp, Homo sapien
catctgcgaatctgcatgcgttctc

SEQ ID NO: 6071868 - DNA, 25 bp, Homo sapien
gcaggagacacaacctcttctcttg

SEQ ID NO: 6071869 - DNA, 25 bp, Homo sapien
tgttattcatatggcccgtgcttag

SEQ ID NO: 6071870 - DNA, 25 bp, Homo sapien
tcgttaggtctcaactcttccgtca

SEQ ID NO: 6071871 - DNA, 25 bp, Homo sapien
caagatggcagtcggaactctgacc

SEQ ID NO: 6071872 - DNA, 25 bp, Homo sapien
aactctgacccataaaaccagaagg

SEQ ID NO: 6071873 - DNA, 25 bp, Homo sapien
tttgctgacaagtccaagatggcag

SEQ ID NO: 6071874 - DNA, 25 bp, Homo sapien
tgtcagcttacacagcaggccttat

SEQ ID NO: 6071875 - DNA, 25 bp, Homo sapien
ccagaaggcttagatgaagaacaaa

SEQ ID NO: 6071876 - DNA, 25 bp, Homo sapien
ccctttatggctattttaagaagca

SEQ ID NO: 6071877 - DNA, 25 bp, Homo sapien
tgcttagcccactccctgaattgtt

SEQ ID NO: 6071878 - DNA, 25 bp, Homo sapien
ccgtcatgagttctatgttccccag

SEQ ID NO: 6071879 - DNA, 25 bp, Homo sapien
gcaataaagccattagaatctacca

SEQ ID NO: 6071880 - DNA, 25 bp, Homo sapien
ggaaatgatgagtccctccccttta

SEQ ID NO: 6071881 - DNA, 25 bp, Homo sapien
cagctcagtcatgatgtttcatgga

SEQ ID NO: 6071882 - DNA, 25 bp, Homo sapien
agctcagtcatgatgtttcatggag

SEQ ID NO: 6071883 - DNA, 25 bp, Homo sapien
ccagctcagtcatgatgtttcatgg

SEQ ID NO: 6071884 - DNA, 25 bp, Homo sapien
cagctcagtcatgatgtttcatgga

SEQ ID NO: 6071885 - DNA, 25 bp, Homo sapien
gactcaggataaagtcatcagtcac

SEQ ID NO: 6071886 - DNA, 25 bp, Homo sapien
aagctttagaccgatgccccagtgg

SEQ ID NO: 6071887 - DNA, 25 bp, Homo sapien
tttcatggaggagaagacttcaggc

SEQ ID NO: 6071888 - DNA, 25 bp, Homo sapien
ggtggtgcccagacccacagtagat

SEQ ID NO: 6071889 - DNA, 25 bp, Homo sapien
aaggtctgcacctggccctgacatt

SEQ ID NO: 6071890 - DNA, 25 bp, Homo sapien
gccccataagattaagggactcagg

SEQ ID NO: 6071891 - DNA, 25 bp, Homo sapien
gatctcttgacccatgatctgccca

SEQ ID NO: 6071892 - DNA, 25 bp, Homo sapien
gactacaggcgtgtgcaccatgccc

SEQ ID NO: 6071893 - DNA, 25 bp, Homo sapien
cgatgccccagtgggagaactaggt

SEQ ID NO: 6071894 - DNA, 25 bp, Homo sapien
caatggtgcaatctaggttcactgc

SEQ ID NO: 6071895 - DNA, 25 bp, Homo sapien
tacaatgttggccaggatgtctcga

SEQ ID NO: 6071896 - DNA, 25 bp, Homo sapien
attaaaagctcctctcctttaagag

SEQ ID NO: 6071897 - DNA, 25 bp, Homo sapien
ggattcatcaaacccctgccatcag

SEQ ID NO: 6071898 - DNA, 25 bp, Homo sapien
tgtagtcccgcctatattgcatggc

SEQ ID NO: 6071899 - DNA, 25 bp, Homo sapien
gagctgcatgactgtgaaccaatga

SEQ ID NO: 6071900 - DNA, 25 bp, Homo sapien
taagaggttatgctaaactgagaag

SEQ ID NO: 6071901 - DNA, 25 bp, Homo sapien
cagttaagatctattcagtctgtga

SEQ ID NO: 6071902 - DNA, 25 bp, Homo sapien
tacacatttgaaaacacacatgtag

SEQ ID NO: 6071903 - DNA, 25 bp, Homo sapien
gcatctgagaatacaagggtggaca

SEQ ID NO: 6071904 - DNA, 25 bp, Homo sapien
tgtgaaccaatgaggcttctcttgg

SEQ ID NO: 6071905 - DNA, 25 bp, Homo sapien
tccagtgaccaacacgctgaatttg

SEQ ID NO: 6071906 - DNA, 25 bp, Homo sapien
gcctatattgcatggcctccagaaa

SEQ ID NO: 6071907 - DNA, 25 bp, Homo sapien
tcaagggttggacagaaagagtaaa

SEQ ID NO: 6071908 - DNA, 25 bp, Homo sapien
cggtgaagcttttcgcatgagttga

SEQ ID NO: 6071909 - DNA, 25 bp, Homo sapien
cctaaaataagacatcggtgaagct

SEQ ID NO: 6071910 - DNA, 25 bp, Homo sapien
taagacatcggtgaagcttttcgca

SEQ ID NO: 6071911 - DNA, 25 bp, Homo sapien
gcttttcgcatgagttgactcttcc

SEQ ID NO: 6071912 - DNA, 25 bp, Homo sapien
gaagcttttcgcatgagttgactct

SEQ ID NO: 6071913 - DNA, 25 bp, Homo sapien
gacatcggtgaagcttttcgcatga

SEQ ID NO: 6071914 - DNA, 25 bp, Homo sapien
tcggtgagtcgtactctttttgctg

SEQ ID NO: 6071915 - DNA, 25 bp, Homo sapien
tcctaaaataagacatcggtgaagc

SEQ ID NO: 6071916 - DNA, 25 bp, Homo sapien
tgagccttcggtgagtcgtactctt

SEQ ID NO: 6071917 - DNA, 25 bp, Homo sapien
catcggtgaagcttttcgcatgagt

SEQ ID NO: 6071918 - DNA, 25 bp, Homo sapien
tgaagcttttcgcatgagttgactc

SEQ ID NO: 6071919 - DNA, 25 bp, Homo sapien
aataagacatcggtgaagcttttcg

SEQ ID NO: 6071920 - DNA, 25 bp, Homo sapien
cgcaattgttcttgcatgtcccttt

SEQ ID NO: 6071921 - DNA, 25 bp, Homo sapien
ctggatggtccgacagcatttcaga

SEQ ID NO: 6071922 - DNA, 25 bp, Homo sapien
ttaatctataatgctcccacatggc

SEQ ID NO: 6071923 - DNA, 25 bp, Homo sapien
tctggcagagagcaataagttcttc

SEQ ID NO: 6071924 - DNA, 25 bp, Homo sapien
atctataatgctcccacatggctgg

SEQ ID NO: 6071925 - DNA, 25 bp, Homo sapien
tttcccgcaattgttcttgcatgtc

SEQ ID NO: 6071926 - DNA, 25 bp, Homo sapien
cccacatggctggatggtccgacag

SEQ ID NO: 6071927 - DNA, 25 bp, Homo sapien
cacatggctggatggtccgacagca

SEQ ID NO: 6071928 - DNA, 25 bp, Homo sapien
tggctggatggtccgacagcatttc

SEQ ID NO: 6071929 - DNA, 25 bp, Homo sapien
ggtcagaaagaagagcacggcaaag

SEQ ID NO: 6071930 - DNA, 25 bp, Homo sapien
tcccgcaattgttcttgcatgtccc

SEQ ID NO: 6071931 - DNA, 25 bp, Homo sapien
tcccacatggctggatggtccgaca

SEQ ID NO: 6071932 - DNA, 25 bp, Homo sapien
cctcatgactgcctcgtgccgaatc

SEQ ID NO: 6071933 - DNA, 25 bp, Homo sapien
gtcctcatgactgcctcgtgccgaa

SEQ ID NO: 6071934 - DNA, 25 bp, Homo sapien
gaggaaagtcctcatgactgcctcg

SEQ ID NO: 6071935 - DNA, 25 bp, Homo sapien
gctaggttatgtatgcttctctgga

SEQ ID NO: 6071936 - DNA, 25 bp, Homo sapien
cctcatgactgcctcgtgccgaatc

SEQ ID NO: 6071937 - DNA, 25 bp, Homo sapien
gcagaggcaagagtaaaaagaagct

SEQ ID NO: 6071938 - DNA, 25 bp, Homo sapien
agtcctcatgactgcctcgtgccga

SEQ ID NO: 6071939 - DNA, 25 bp, Homo sapien
tctctggaaacctaaatcttctgca

SEQ ID NO: 6071940 - DNA, 25 bp, Homo sapien
ctcatgactgcctcgtgccgaatct

SEQ ID NO: 6071941 - DNA, 25 bp, Homo sapien
tcatgactgcctcgtgccgaatctg

SEQ ID NO: 6071942 - DNA, 25 bp, Homo sapien
taaagtgtctgcctacagcagaggc

SEQ ID NO: 6071943 - DNA, 25 bp, Homo sapien
ggaaagtcctcatgactgcctcgtg

SEQ ID NO: 6071944 - DNA, 25 bp, Homo sapien
aagtcctcatgactgcctcgtgccg

SEQ ID NO: 6071945 - DNA, 25 bp, Homo sapien
tttgccataaagattccagcatctt

SEQ ID NO: 6071946 - DNA, 25 bp, Homo sapien
gctaaggcagcccaaaatgaagctg

SEQ ID NO: 6071947 - DNA, 25 bp, Homo sapien
gtgggaatccactgggagcttcatc

SEQ ID NO: 6071948 - DNA, 25 bp, Homo sapien
gagcatctgtaacggcatttgccat

SEQ ID NO: 6071949 - DNA, 25 bp, Homo sapien
tcttggagcatctgtaacggcattt

SEQ ID NO: 6071950 - DNA, 25 bp, Homo sapien
gtacttgggcttcacgcagcacatt

SEQ ID NO: 6071951 - DNA, 25 bp, Homo sapien
tggagcatctgtaacggcatttgcc

SEQ ID NO: 6071952 - DNA, 25 bp, Homo sapien
tacttgggcttcacgcagcacattt

SEQ ID NO: 6071953 - DNA, 25 bp, Homo sapien
catctgtaacggcatttgccataaa

SEQ ID NO: 6071954 - DNA, 25 bp, Homo sapien
ccttcttggagcatctgtaacggca

SEQ ID NO: 6071955 - DNA, 25 bp, Homo sapien
gggcttcacgcagcacattttatta

SEQ ID NO: 6071956 - DNA, 25 bp, Homo sapien
tccttcttggagcatctgtaacggc

SEQ ID NO: 6071957 - DNA, 25 bp, Homo sapien
ggtctcaggtgtcatggtttctcca

SEQ ID NO: 6071958 - DNA, 25 bp, Homo sapien
tcagatggtggcatagtagtctcgg

SEQ ID NO: 6071959 - DNA, 25 bp, Homo sapien
tagtctcgggagtagtggcctcaga

SEQ ID NO: 6071960 - DNA, 25 bp, Homo sapien
tagcaacccacagataatgaaggtc

SEQ ID NO: 6071961 - DNA, 25 bp, Homo sapien
caggaaatgctggtcgtcgagtata

SEQ ID NO: 6071962 - DNA, 25 bp, Homo sapien
gcagcatgatagcttgttcctacaa

SEQ ID NO: 6071963 - DNA, 25 bp, Homo sapien
tatatcctctaggtgaatcacagga

SEQ ID NO: 6071964 - DNA, 25 bp, Homo sapien
catagtctcggaagtagcagtctca

SEQ ID NO: 6071965 - DNA, 25 bp, Homo sapien
taaacatcgtcttctgcaatgtcct

SEQ ID NO: 6071966 - DNA, 25 bp, Homo sapien
cagatcattcaacatagatactggg

SEQ ID NO: 6071967 - DNA, 25 bp, Homo sapien
tagtctcaggagtattggtctcagg

SEQ ID NO: 6071968 - DNA, 25 bp, Homo sapien
tttggtcacccgagttagcaaccca

SEQ ID NO: 6071969 - DNA, 25 bp, Homo sapien
cggataatcctctgaaggaagagca

SEQ ID NO: 6071970 - DNA, 25 bp, Homo sapien
gagtagatgccccggataatcctct

SEQ ID NO: 6071971 - DNA, 25 bp, Homo sapien
gccccggataatcctctgaaggaag

SEQ ID NO: 6071972 - DNA, 25 bp, Homo sapien
ccccggataatcctctgaaggaaga

SEQ ID NO: 6071973 - DNA, 25 bp, Homo sapien
cccggataatcctctgaaggaagag

SEQ ID NO: 6071974 - DNA, 25 bp, Homo sapien
ccggataatcctctgaaggaagagc

SEQ ID NO: 6071975 - DNA, 25 bp, Homo sapien
tagatgccccggataatcctctgaa

SEQ ID NO: 6071976 - DNA, 25 bp, Homo sapien
gatgccccggataatcctctgaagg

SEQ ID NO: 6071977 - DNA, 25 bp, Homo sapien
gtagatgccccggataatcctctga

SEQ ID NO: 6071978 - DNA, 25 bp, Homo sapien
ttgagtagatgccccggataatcct

SEQ ID NO: 6071979 - DNA, 25 bp, Homo sapien
agatgccccggataatcctctgaag

SEQ ID NO: 6071980 - DNA, 25 bp, Homo sapien
tgccccggataatcctctgaaggaa

SEQ ID NO: 6071981 - DNA, 25 bp, Homo sapien
tgaccaactaagagatccacttttg

SEQ ID NO: 6071982 - DNA, 25 bp, Homo sapien
tccacttttgcaccaatgaaacaca

SEQ ID NO: 6071983 - DNA, 25 bp, Homo sapien
ctcttataattcttgagaaccattc

SEQ ID NO: 6071984 - DNA, 25 bp, Homo sapien
ccttgaacttatttactacaatggt

SEQ ID NO: 6071985 - DNA, 25 bp, Homo sapien
tttgcaccaatgaaacacatggagg

SEQ ID NO: 6071986 - DNA, 25 bp, Homo sapien
aaaggctaaccattcatgggtccca

SEQ ID NO: 6071987 - DNA, 25 bp, Homo sapien
aagagtgaccaaatataccagtgaa

SEQ ID NO: 6071988 - DNA, 25 bp, Homo sapien
gagaaccattctaagcaatctattt

SEQ ID NO: 6071989 - DNA, 25 bp, Homo sapien
cggagcttaagctcaatgacagtat

SEQ ID NO: 6071990 - DNA, 25 bp, Homo sapien
gaattaagtgaccaactaagagatc

SEQ ID NO: 6071991 - DNA, 25 bp, Homo sapien
ttcatgggtcccataaaaaacaatg

SEQ ID NO: 6071992 - DNA, 25 bp, Homo sapien
aaacctcagaacaagcggagcttaa

SEQ ID NO: 6071993 - DNA, 25 bp, Homo sapien
tcatacctcttcttacgcttcagtg

SEQ ID NO: 6071994 - DNA, 25 bp, Homo sapien
atggtagggctatagagggaacatt

SEQ ID NO: 6071995 - DNA, 25 bp, Homo sapien
taactcatcaactttatcgatgtcc

SEQ ID NO: 6071996 - DNA, 25 bp, Homo sapien
acaggtttcgaaattgctgttgaaa

SEQ ID NO: 6071997 - DNA, 25 bp, Homo sapien
aaccctacaggtttcgaaattgctg

SEQ ID NO: 6071998 - DNA, 25 bp, Homo sapien
ttcttacgcttcagtgcctggaggg

SEQ ID NO: 6071999 - DNA, 25 bp, Homo sapien
caagttcttgctggtcagcaatgtc

SEQ ID NO: 6072000 - DNA, 25 bp, Homo sapien
tcttcttacgcttcagtgcctggag

SEQ ID NO: 6072001 - DNA, 25 bp, Homo sapien
gctggaactcgatggttgataatgt

SEQ ID NO: 6072002 - DNA, 25 bp, Homo sapien
gttcttctaattccgccatgagctc

SEQ ID NO: 6072003 - DNA, 25 bp, Homo sapien
ctagttcttctaattccgccatgag

SEQ ID NO: 6072004 - DNA, 25 bp, Homo sapien
gctgcttctcatacctcttcttacg

SEQ ID NO: 6072005 - DNA, 25 bp, Homo sapien
ctctaaattgaaattctaaacgcca

SEQ ID NO: 6072006 - DNA, 25 bp, Homo sapien
tctgtttgtgcaccgatattatatt

SEQ ID NO: 6072007 - DNA, 25 bp, Homo sapien
aattctgcaacggtcgtatcaaaac

SEQ ID NO: 6072008 - DNA, 25 bp, Homo sapien
actgcattttgtccattacttcttc

SEQ ID NO: 6072009 - DNA, 25 bp, Homo sapien
ggaacgactgcattttgtccattac

SEQ ID NO: 6072010 - DNA, 25 bp, Homo sapien
tgccatgttttttcatctcgcgcat

SEQ ID NO: 6072011 - DNA, 25 bp, Homo sapien
ctatttcacttaaatcatcattatc

SEQ ID NO: 6072012 - DNA, 25 bp, Homo sapien
cattatcatcaacagcaagaacatg

SEQ ID NO: 6072013 - DNA, 25 bp, Homo sapien
cagtaataccgtctggaatatcatc

SEQ ID NO: 6072014 - DNA, 25 bp, Homo sapien
cctgtttgtttaagctcttcctcaa

SEQ ID NO: 6072015 - DNA, 25 bp, Homo sapien
gttcgttgaatgttttgagagataa

SEQ ID NO: 6072016 - DNA, 25 bp, Homo sapien
acgaatttggcgctcactttttcgg

SEQ ID NO: 6072017 - DNA, 25 bp, Homo sapien
actcatctttttgttcgttgaatgt

SEQ ID NO: 6072018 - DNA, 25 bp, Homo sapien
attgaaattctaaacgccaccaatc

SEQ ID NO: 6072019 - DNA, 25 bp, Homo sapien
cacttaaatcatcattatcatcaac

SEQ ID NO: 6072020 - DNA, 25 bp, Homo sapien
tacgctctaacgcagattcactctc

SEQ ID NO: 6072021 - DNA, 25 bp, Homo sapien
ctattttcttcacgccaacttttag

SEQ ID NO: 6072022 - DNA, 25 bp, Homo sapien
ttcgtatcacattacgctctaacgc

SEQ ID NO: 6072023 - DNA, 25 bp, Homo sapien
cagaaaaatcaagattacctgtttg

SEQ ID NO: 6072024 - DNA, 25 bp, Homo sapien
catctcgcgcattttgtcataaaga

SEQ ID NO: 6072025 - DNA, 25 bp, Homo sapien
atgactcaaccttgccacctctaaa

SEQ ID NO: 6072026 - DNA, 25 bp, Homo sapien
tcacattacgctctaacgcagattc

SEQ ID NO: 6072027 - DNA, 25 bp, Homo sapien
tgtttaagctcttcctcaaaatatg

SEQ ID NO: 6072028 - DNA, 25 bp, Homo sapien
tatctagttgtctctgcaactcatc

SEQ ID NO: 6072029 - DNA, 25 bp, Homo sapien
caatatttcgtatcacattacgctc

SEQ ID NO: 6072030 - DNA, 25 bp, Homo sapien
gttttgagagataattctgcaacgg

SEQ ID NO: 6072031 - DNA, 25 bp, Homo sapien
gctttatctatttcacttaaatcat

SEQ ID NO: 6072032 - DNA, 25 bp, Homo sapien
cagcaagaacatggaacgactgcat

SEQ ID NO: 6072033 - DNA, 25 bp, Homo sapien
tttttgcagcataacgtttaccgac

SEQ ID NO: 6072034 - DNA, 25 bp, Homo sapien
tgccacctctaaattgaaattctaa

SEQ ID NO: 6072035 - DNA, 25 bp, Homo sapien
tttagcaatatttcgtatcacatta

SEQ ID NO: 6072036 - DNA, 25 bp, Homo sapien
ccaacttttagcaatatttcgtatc

SEQ ID NO: 6072037 - DNA, 25 bp, Homo sapien
aatcaagattacctgtttgtttaag

SEQ ID NO: 6072038 - DNA, 25 bp, Homo sapien
cttgccatgactcaaccttgccacc

SEQ ID NO: 6072039 - DNA, 25 bp, Homo sapien
ctgctttgccatgttttttcatctc

SEQ ID NO: 6072040 - DNA, 25 bp, Homo sapien
tcctcaaaatatgctgtcatttctt

SEQ ID NO: 6072041 - DNA, 25 bp, Homo sapien
tttggcgctcactttttcggcgtcc

SEQ ID NO: 6072042 - DNA, 25 bp, Homo sapien
caaccttgccacctctaaattgaaa

SEQ ID NO: 6072043 - DNA, 25 bp, Homo sapien
gtgcaccgatattatattttgcaag

SEQ ID NO: 6072044 - DNA, 25 bp, Homo sapien
aaatttatcggcattaacacgtgct

SEQ ID NO: 6072045 - DNA, 25 bp, Homo sapien
cttcttcttgccatgactcaacctt

SEQ ID NO: 6072046 - DNA, 25 bp, Homo sapien
tgcaacggtcgtatcaaaaccaacg

SEQ ID NO: 6072047 - DNA, 25 bp, Homo sapien
agattacctgtttgtttaagctctt

SEQ ID NO: 6072048 - DNA, 25 bp, Homo sapien
tccgaatttttgcagcataacgttt

SEQ ID NO: 6072049 - DNA, 25 bp, Homo sapien
tatcatctgctttgccatgtttttt

SEQ ID NO: 6072050 - DNA, 25 bp, Homo sapien
atcggcattaacacgtgctaaaatg

SEQ ID NO: 6072051 - DNA, 25 bp, Homo sapien
gcgttaaactattttcttcacgcca

SEQ ID NO: 6072052 - DNA, 25 bp, Homo sapien
ttttgtccattacttcttcttgcca

SEQ ID NO: 6072053 - DNA, 25 bp, Homo sapien
cactctcaacaacagaaaaatcaag

SEQ ID NO: 6072054 - DNA, 25 bp, Homo sapien
tcttttaaaatcaaatttatcggca

SEQ ID NO: 6072055 - DNA, 25 bp, Homo sapien
ttgcaagcatgctatctagttgtct

SEQ ID NO: 6072056 - DNA, 25 bp, Homo sapien
agagataattctgcaacggtcgtat

SEQ ID NO: 6072057 - DNA, 25 bp, Homo sapien
tttgtcataaagacgaatttggcgc

SEQ ID NO: 6072058 - DNA, 25 bp, Homo sapien
ccattacttcttcttgccatgactc

SEQ ID NO: 6072059 - DNA, 25 bp, Homo sapien
gttgtctctgcaactcatctttttg

SEQ ID NO: 6072060 - DNA, 25 bp, Homo sapien
tctaacgcagattcactctcaacaa

SEQ ID NO: 6072061 - DNA, 25 bp, Homo sapien
atttcttctgtttgtgcaccgatat

SEQ ID NO: 6072062 - DNA, 25 bp, Homo sapien
attctaaacgccaccaatcagtaat

SEQ ID NO: 6072063 - DNA, 25 bp, Homo sapien
gcatgctatctagttgtctctgcaa

SEQ ID NO: 6072064 - DNA, 25 bp, Homo sapien
tgaatgttttgagagataattctgc

SEQ ID NO: 6072065 - DNA, 25 bp, Homo sapien
cttcacgccaacttttagcaatatt

SEQ ID NO: 6072066 - DNA, 25 bp, Homo sapien
gttttttcatctcgcgcattttgtc

SEQ ID NO: 6072067 - DNA, 25 bp, Homo sapien
aaatatgctgtcatttcttctgttt

SEQ ID NO: 6072068 - DNA, 25 bp, Homo sapien
tatattttgcaagcatgctatctag

SEQ ID NO: 6072069 - DNA, 25 bp, Homo sapien
agctcttcctcaaaatatgctgtca

SEQ ID NO: 6072070 - DNA, 25 bp, Homo sapien
gaacatggaacgactgcattttgtc

SEQ ID NO: 6072071 - DNA, 25 bp, Homo sapien
cgatattatattttgcaagcatgct

SEQ ID NO: 6072072 - DNA, 25 bp, Homo sapien
attaacacgtgctaaaatggcttta

SEQ ID NO: 6072073 - DNA, 25 bp, Homo sapien
tattagtattagttctgtgcgttaa

SEQ ID NO: 6072074 - DNA, 25 bp, Homo sapien
aaaatcaaatttatcggcattaaca

SEQ ID NO: 6072075 - DNA, 25 bp, Homo sapien
taccgtctggaatatcatctgcttt

SEQ ID NO: 6072076 - DNA, 25 bp, Homo sapien
accaatcagtaataccgtctggaat

SEQ ID NO: 6072077 - DNA, 25 bp, Homo sapien
ttctgtgcgttaaactattttcttc

SEQ ID NO: 6072078 - DNA, 25 bp, Homo sapien
aaaatggctttatctatttcactta

SEQ ID NO: 6072079 - DNA, 25 bp, Homo sapien
tctgcaactcatctttttgttcgtt

SEQ ID NO: 6072080 - DNA, 25 bp, Homo sapien
ataaagacgaatttggcgctcactt

SEQ ID NO: 6072081 - DNA, 25 bp, Homo sapien
ctttttgttcgttgaatgttttgag

SEQ ID NO: 6072082 - DNA, 25 bp, Homo sapien
acgtgctaaaatggctttatctatt

SEQ ID NO: 6072083 - DNA, 25 bp, Homo sapien
catcaacagcaagaacatggaacga

SEQ ID NO: 6072084 - DNA, 25 bp, Homo sapien
tattagttctgtgcgttaaactatt

SEQ ID NO: 6072085 - DNA, 25 bp, Homo sapien
cagcataacgtttaccgactctttt

SEQ ID NO: 6072086 - DNA, 25 bp, Homo sapien
gctgtcatttcttctgtttgtgcac

SEQ ID NO: 6072087 - DNA, 25 bp, Homo sapien
caacaacagaaaaatcaagattacc

SEQ ID NO: 6072088 - DNA, 25 bp, Homo sapien
ccattttccgaatttttgcagcata

SEQ ID NO: 6072089 - DNA, 25 bp, Homo sapien
gcagattcactctcaacaacagaaa

SEQ ID NO: 6072090 - DNA, 25 bp, Homo sapien
aacgccaccaatcagtaataccgtc

SEQ ID NO: 6072091 - DNA, 25 bp, Homo sapien
ctggaatatcatctgctttgccatg

SEQ ID NO: 6072092 - DNA, 25 bp, Homo sapien
aatcatcattatcatcaacagcaag

SEQ ID NO: 6072093 - DNA, 25 bp, Homo sapien
gcgcattttgtcataaagacgaatt

SEQ ID NO: 6072094 - DNA, 25 bp, Homo sapien
cgtaccattttccgaatttttgcag

SEQ ID NO: 6072095 - DNA, 25 bp, Homo sapien
gggaaaaatcaagtcctgcctggca

SEQ ID NO: 6072096 - DNA, 25 bp, Homo sapien
cgaccaagcttgcacgactcacaga

SEQ ID NO: 6072097 - DNA, 25 bp, Homo sapien
ttttccccgaccaagcttgcacgac

SEQ ID NO: 6072098 - DNA, 25 bp, Homo sapien
ttgcacgactcacagacagcaaact

SEQ ID NO: 6072099 - DNA, 25 bp, Homo sapien
cctgcaatttccatcgggcttctca

SEQ ID NO: 6072100 - DNA, 25 bp, Homo sapien
ctgatggcagttgaaccaaaatgaa

SEQ ID NO: 6072101 - DNA, 25 bp, Homo sapien
cagcctgcaatttccatcgggcttc

SEQ ID NO: 6072102 - DNA, 25 bp, Homo sapien
gcttgcacgactcacagacagcaaa

SEQ ID NO: 6072103 - DNA, 25 bp, Homo sapien
caagcttgcacgactcacagacagc

SEQ ID NO: 6072104 - DNA, 25 bp, Homo sapien
gaaaaatcaagtcctgcctggcacc

SEQ ID NO: 6072105 - DNA, 25 bp, Homo sapien
ggcagttgaaccaaaatgaagaaca

SEQ ID NO: 6072106 - DNA, 25 bp, Homo sapien
tgcaatttccatcgggcttctcatt

SEQ ID NO: 6072107 - DNA, 25 bp, Homo sapien
ttcccgcaattgttcttgcatgtcc

SEQ ID NO: 6072108 - DNA, 25 bp, Homo sapien
ggtcagaaagaagagcacggcaaag

SEQ ID NO: 6072109 - DNA, 25 bp, Homo sapien
cgcaattgttcttgcatgtcccttt

SEQ ID NO: 6072110 - DNA, 25 bp, Homo sapien
tctggcagagagcaataagttcttc

SEQ ID NO: 6072111 - DNA, 25 bp, Homo sapien
cccgcaattgttcttgcatgtccct

SEQ ID NO: 6072112 - DNA, 25 bp, Homo sapien
tttcccgcaattgttcttgcatgtc

SEQ ID NO: 6072113 - DNA, 25 bp, Homo sapien
tcccgcaattgttcttgcatgtccc

SEQ ID NO: 6072114 - DNA, 25 bp, Homo sapien
ccgcaattgttcttgcatgtccctt

SEQ ID NO: 6072115 - DNA, 25 bp, Homo sapien
gaaaaagtcttggaattgtcctcag

SEQ ID NO: 6072116 - DNA, 25 bp, Homo sapien
gaaattgcctcgtcatggtaaccac

SEQ ID NO: 6072117 - DNA, 25 bp, Homo sapien
tgagaccccaaggtaagggaggcaa

SEQ ID NO: 6072118 - DNA, 25 bp, Homo sapien
gggatatcacccagatgagcaagct

SEQ ID NO: 6072119 - DNA, 25 bp, Homo sapien
gatttccattgatgtgagaccccaa

SEQ ID NO: 6072120 - DNA, 25 bp, Homo sapien
tcaggtatgcgatggcctctgtcac

SEQ ID NO: 6072121 - DNA, 25 bp, Homo sapien
catgatggtgtagtgaaagctggtc

SEQ ID NO: 6072122 - DNA, 25 bp, Homo sapien
tagtattcccagtgtgtgctgcgga

SEQ ID NO: 6072123 - DNA, 25 bp, Homo sapien
agcacagggttaaggcaggccctca

SEQ ID NO: 6072124 - DNA, 25 bp, Homo sapien
gaatagcagacaatcatggtgagca

SEQ ID NO: 6072125 - DNA, 25 bp, Homo sapien
ggtaaccacatatgagcttgtcgag

SEQ ID NO: 6072126 - DNA, 25 bp, Homo sapien
gttctttcgaaacttcaggctgaca

SEQ ID NO: 6072127 - DNA, 25 bp, Homo sapien
gctcggctgcgtagtcctcgtagta

SEQ ID NO: 6072128 - DNA, 25 bp, Homo sapien
tgtcggtgaggtccacgatatctag

SEQ ID NO: 6072129 - DNA, 25 bp, Homo sapien
tggaggcacggaggcgtccttggtc

SEQ ID NO: 6072130 - DNA, 25 bp, Homo sapien
gccacgacgagctcggctgcgtagt

SEQ ID NO: 6072131 - DNA, 25 bp, Homo sapien
tccaacatgcgcatgtcgcgcagca

SEQ ID NO: 6072132 - DNA, 25 bp, Homo sapien
cacaggcgttgcattactccttttg

SEQ ID NO: 6072133 - DNA, 25 bp, Homo sapien
tcctcgtagtaggaggcgaccagct

SEQ ID NO: 6072134 - DNA, 25 bp, Homo sapien
ggcttcacaggcgttgcattactcc

SEQ ID NO: 6072135 - DNA, 25 bp, Homo sapien
gaggtccacgatatctagctgcccg

SEQ ID NO: 6072136 - DNA, 25 bp, Homo sapien
acgatatctagctgcccgagcgcgc

SEQ ID NO: 6072137 - DNA, 25 bp, Homo sapien
tgtcttacgcgactggtgcgcgcgt

SEQ ID NO: 6072138 - DNA, 25 bp, Homo sapien
cactgctgttgtcttacgcgactgg

SEQ ID NO: 6072139 - DNA, 25 bp, Homo sapien
aagggctggatctgggggggagtct

SEQ ID NO: 6072140 - DNA, 25 bp, Homo sapien
cctgtagagacccagccagtcgccc

SEQ ID NO: 6072141 - DNA, 25 bp, Homo sapien
tgcagcgtagcctccttcacaggga

SEQ ID NO: 6072142 - DNA, 25 bp, Homo sapien
tgcagggcctccagcttcagggcca

SEQ ID NO: 6072143 - DNA, 25 bp, Homo sapien
tccagggcgtgatgctcttctgcag

SEQ ID NO: 6072144 - DNA, 25 bp, Homo sapien
agcctgcaggtctttgggcagggag

SEQ ID NO: 6072145 - DNA, 25 bp, Homo sapien
tgagacaatggtggtgcaggaaggg

SEQ ID NO: 6072146 - DNA, 25 bp, Homo sapien
gagacccagccagtcgcccttgagg

SEQ ID NO: 6072147 - DNA, 25 bp, Homo sapien
tgagcccgcaccagcttctcacgaa

SEQ ID NO: 6072148 - DNA, 25 bp, Homo sapien
gcccgctgcagcgtagcctccttca

SEQ ID NO: 6072149 - DNA, 25 bp, Homo sapien
gcctccagcttcagggccatctcct

SEQ ID NO: 6072150 - DNA, 25 bp, Homo sapien
ggacttgaaaaaccgcctgtagaga

SEQ ID NO: 6072151 - DNA, 25 bp, Homo sapien
tcacgaagtttcaggaccaggtcca

SEQ ID NO: 6072152 - DNA, 25 bp, Homo sapien
tgcaggaaggggagcctgcagtctg

SEQ ID NO: 6072153 - DNA, 25 bp, Homo sapien
agggccatctccttgtgccgctgcc

SEQ ID NO: 6072154 - DNA, 25 bp, Homo sapien
aggaagtcatcctggctgaagggct

SEQ ID NO: 6072155 - DNA, 25 bp, Homo sapien
ttcgcctcacagatagcctccaggt

SEQ ID NO: 6072156 - DNA, 25 bp, Homo sapien
aaggggagcctgcagtctgggcggg

SEQ ID NO: 6072157 - DNA, 25 bp, Homo sapien
agcttctcacgaagtttcaggacca

SEQ ID NO: 6072158 - DNA, 25 bp, Homo sapien
aggaaggggagtgtgtgcttggccc

SEQ ID NO: 6072159 - DNA, 25 bp, Homo sapien
tccacctcggacttgtctttcatcc

SEQ ID NO: 6072160 - DNA, 25 bp, Homo sapien
caggtctcgatgttcgcctcacaga

SEQ ID NO: 6072161 - DNA, 25 bp, Homo sapien
ggcccagcatgctccaggctacgca

SEQ ID NO: 6072162 - DNA, 25 bp, Homo sapien
gctgaagggctggatctggggggga

SEQ ID NO: 6072163 - DNA, 25 bp, Homo sapien
agctggtggccctgagcccgcacca

SEQ ID NO: 6072164 - DNA, 25 bp, Homo sapien
tggatctgggggggagtcttccagg

SEQ ID NO: 6072165 - DNA, 25 bp, Homo sapien
agcctgcagtctgggcggggggcca

SEQ ID NO: 6072166 - DNA, 25 bp, Homo sapien
gtgtgcttggcccagtgccgccacc

SEQ ID NO: 6072167 - DNA, 25 bp, Homo sapien
acgacctccacctcggacttgtctt

SEQ ID NO: 6072168 - DNA, 25 bp, Homo sapien
aggtccacgacctccacctcggact

SEQ ID NO: 6072169 - DNA, 25 bp, Homo sapien
ggtaccagccatcaaaatgggggga

SEQ ID NO: 6072170 - DNA, 25 bp, Homo sapien
aaaccgcctgtagagacccagccag

SEQ ID NO: 6072171 - DNA, 25 bp, Homo sapien
caagacagcctgcaggtctttgggc

SEQ ID NO: 6072172 - DNA, 25 bp, Homo sapien
gctgccggtaccagccatcaaaatg

SEQ ID NO: 6072173 - DNA, 25 bp, Homo sapien
cttggctttgttctagggagggcac

SEQ ID NO: 6072174 - DNA, 25 bp, Homo sapien
gagccgatgaccgtctcgatgtaca

SEQ ID NO: 6072175 - DNA, 25 bp, Homo sapien
gtggcccttggctttgttctaggga

SEQ ID NO: 6072176 - DNA, 25 bp, Homo sapien
aggatgcaggtgagctggggcccag

SEQ ID NO: 6072177 - DNA, 25 bp, Homo sapien
tcacagatagcctccaggtgcaggg

SEQ ID NO: 6072178 - DNA, 25 bp, Homo sapien
agcttcagggccatctccttgtgcc

SEQ ID NO: 6072179 - DNA, 25 bp, Homo sapien
acagggagctggtggccctgagccc

SEQ ID NO: 6072180 - DNA, 25 bp, Homo sapien
cagtcgcccttgaggatgcaggtga

SEQ ID NO: 6072181 - DNA, 25 bp, Homo sapien
cctgggaccgtggcccttggctttg

SEQ ID NO: 6072182 - DNA, 25 bp, Homo sapien
tccaggctacgcaggaagtcatcct

SEQ ID NO: 6072183 - DNA, 25 bp, Homo sapien
cagccagtcgcccttgaggatgcag

SEQ ID NO: 6072184 - DNA, 25 bp, Homo sapien
agccatcaaaatggggggacttgaa

SEQ ID NO: 6072185 - DNA, 25 bp, Homo sapien
ttggcccagtgccgccaccactggg

SEQ ID NO: 6072186 - DNA, 25 bp, Homo sapien
ttgtctttcatccaggtctcgatgt

SEQ ID NO: 6072187 - DNA, 25 bp, Homo sapien
tccaggtgcagggcctccagcttca

SEQ ID NO: 6072188 - DNA, 25 bp, Homo sapien
gaggctcaggcagacctagggccct

SEQ ID NO: 6072189 - DNA, 25 bp, Homo sapien
gagtcttccagggcgtgatgctctt

SEQ ID NO: 6072190 - DNA, 25 bp, Homo sapien
tggccctgagcccgcaccagcttct

SEQ ID NO: 6072191 - DNA, 25 bp, Homo sapien
ctagggagggcacaagacagcctgc

SEQ ID NO: 6072192 - DNA, 25 bp, Homo sapien
gtagcctccttcacagggagctggt

SEQ ID NO: 6072193 - DNA, 25 bp, Homo sapien
cagtctgggcggggggccaaggaag

SEQ ID NO: 6072194 - DNA, 25 bp, Homo sapien
agctggggcccagcatgctccaggc

SEQ ID NO: 6072195 - DNA, 25 bp, Homo sapien
cccttgaggatgcaggtgagctggg

SEQ ID NO: 6072196 - DNA, 25 bp, Homo sapien
tgggggggagtcttccagggcgtga

SEQ ID NO: 6072197 - DNA, 25 bp, Homo sapien
gtctcgatgtacagctgtgcccgct

SEQ ID NO: 6072198 - DNA, 25 bp, Homo sapien
gcagggagccgatgaccgtctcgat

SEQ ID NO: 6072199 - DNA, 25 bp, Homo sapien
atagcctccaggtgcagggcctcca

SEQ ID NO: 6072200 - DNA, 25 bp, Homo sapien
ctttgggcagggagccgatgaccgt

SEQ ID NO: 6072201 - DNA, 25 bp, Homo sapien
tcgatgttcgcctcacagatagcct

SEQ ID NO: 6072202 - DNA, 25 bp, Homo sapien
gcctttactgctgagacaatggtgg

SEQ ID NO: 6072203 - DNA, 25 bp, Homo sapien
gtgccgccaccactggggagtggga

SEQ ID NO: 6072204 - DNA, 25 bp, Homo sapien
catcctggctgaagggctggatctg

SEQ ID NO: 6072205 - DNA, 25 bp, Homo sapien
ttgaaaaaccgcctgtagagaccca

SEQ ID NO: 6072206 - DNA, 25 bp, Homo sapien
ttcatccaggtctcgatgttcgcct

SEQ ID NO: 6072207 - DNA, 25 bp, Homo sapien
agctgtgcccgctgcagcgtagcct

SEQ ID NO: 6072208 - DNA, 25 bp, Homo sapien
gggagtgtgtgcttggcccagtgcc

SEQ ID NO: 6072209 - DNA, 25 bp, Homo sapien
agggcacaagacagcctgcaggtct

SEQ ID NO: 6072210 - DNA, 25 bp, Homo sapien
caggcagacctagggccctgggacc

SEQ ID NO: 6072211 - DNA, 25 bp, Homo sapien
atctccttgtgccgctgccggtacc

SEQ ID NO: 6072212 - DNA, 25 bp, Homo sapien
gcatgctccaggctacgcaggaagt

SEQ ID NO: 6072213 - DNA, 25 bp, Homo sapien
ctacgcaggaagtcatcctggctga

SEQ ID NO: 6072214 - DNA, 25 bp, Homo sapien
caggtctttgggcagggagccgatg

SEQ ID NO: 6072215 - DNA, 25 bp, Homo sapien
cgcaccagcttctcacgaagtttca

SEQ ID NO: 6072216 - DNA, 25 bp, Homo sapien
aggaccaggtccacgacctccacct

SEQ ID NO: 6072217 - DNA, 25 bp, Homo sapien
tttgttctagggagggcacaagaca

SEQ ID NO: 6072218 - DNA, 25 bp, Homo sapien
atgtacagctgtgcccgctgcagcg

SEQ ID NO: 6072219 - DNA, 25 bp, Homo sapien
gaccgtggcccttggctttgttcta

SEQ ID NO: 6072220 - DNA, 25 bp, Homo sapien
agtttcaggaccaggtccacgacct

SEQ ID NO: 6072221 - DNA, 25 bp, Homo sapien
gggccaaggaaggggagtgtgtgct

SEQ ID NO: 6072222 - DNA, 25 bp, Homo sapien
tccttcacagggagctggtggccct

SEQ ID NO: 6072223 - DNA, 25 bp, Homo sapien
ccaccactggggagtgggaggctca

SEQ ID NO: 6072224 - DNA, 25 bp, Homo sapien
tactgctgagacaatggtggtgcag

SEQ ID NO: 6072225 - DNA, 25 bp, Homo sapien
tcggacttgtctttcatccaggtct

SEQ ID NO: 6072226 - DNA, 25 bp, Homo sapien
tggtggtgcaggaaggggagcctgc

SEQ ID NO: 6072227 - DNA, 25 bp, Homo sapien
ttgtgccgctgccggtaccagccat

SEQ ID NO: 6072228 - DNA, 25 bp, Homo sapien
caggtgagctggggcccagcatgct

SEQ ID NO: 6072229 - DNA, 25 bp, Homo sapien
atgaccgtctcgatgtacagctgtg

SEQ ID NO: 6072230 - DNA, 25 bp, Homo sapien
gaagacctgcgcaggcacagaagct

SEQ ID NO: 6072231 - DNA, 25 bp, Homo sapien
gaatcaatgttatcgctaggcacag

SEQ ID NO: 6072232 - DNA, 25 bp, Homo sapien
cctggctaaggttctggacatggaa

SEQ ID NO: 6072233 - DNA, 25 bp, Homo sapien
gaagcggccctcagatttgtcaatc

SEQ ID NO: 6072234 - DNA, 25 bp, Homo sapien
tgatgatgcctaacgtcttgagggc

SEQ ID NO: 6072235 - DNA, 25 bp, Homo sapien
cacaatgttaacgatgaagaagggc

SEQ ID NO: 6072236 - DNA, 25 bp, Homo sapien
gttatcctggatcacatgcacaatg

SEQ ID NO: 6072237 - DNA, 25 bp, Homo sapien
ttgccgttgctggagtagccattcc

SEQ ID NO: 6072238 - DNA, 25 bp, Homo sapien
caatcctgaaatctgggctccggca

SEQ ID NO: 6072239 - DNA, 25 bp, Homo sapien
caaagtcttccgtgcctgggaggtc

SEQ ID NO: 6072240 - DNA, 25 bp, Homo sapien
cctgaaagaccctggagtagacgaa

SEQ ID NO: 6072241 - DNA, 25 bp, Homo sapien
agaacttggaagatctgcggagtcc

SEQ ID NO: 6072242 - DNA, 25 bp, Homo sapien
gatggcttctaacacctcattgatg

SEQ ID NO: 6072243 - DNA, 25 bp, Homo sapien
tgttcagcgcagcatacaggatggg

SEQ ID NO: 6072244 - DNA, 25 bp, Homo sapien
tcccgggcgaccttgaagatgcggt

SEQ ID NO: 6072245 - DNA, 25 bp, Homo sapien
ggtggtatgattgcccttgctggtc

SEQ ID NO: 6072246 - DNA, 25 bp, Homo sapien
agcccgtacacttcattgacctgga

SEQ ID NO: 6072247 - DNA, 25 bp, Homo sapien
tacccggtgcggaagtctctgttca

SEQ ID NO: 6072248 - DNA, 25 bp, Homo sapien
cctggactttgcacttagaggtggt

SEQ ID NO: 6072249 - DNA, 25 bp, Homo sapien
cagctgagaggcgttggacctcaga

SEQ ID NO: 6072250 - DNA, 25 bp, Homo sapien
cacatgatcagtagcgggaggtaga

SEQ ID NO: 6072251 - DNA, 25 bp, Homo sapien
cagaagagctgttggtacccggtgc

SEQ ID NO: 6072252 - DNA, 25 bp, Homo sapien
acgcggtgaagtagggaaaccagca

SEQ ID NO: 6072253 - DNA, 25 bp, Homo sapien
taatgtgattgatcctcttggcctg

SEQ ID NO: 6072254 - DNA, 25 bp, Homo sapien
tgatcaccgacagggtcttgagaac

SEQ ID NO: 6072255 - DNA, 25 bp, Homo sapien
tctcactgacgcaggggaagccggc

SEQ ID NO: 6072256 - DNA, 25 bp, Homo sapien
catgcagttaaggatgaagaagggc

SEQ ID NO: 6072257 - DNA, 25 bp, Homo sapien
gtaggagatgagctcattgctgatg

SEQ ID NO: 6072258 - DNA, 25 bp, Homo sapien
catgatcaccgacagggtcttgaga

SEQ ID NO: 6072259 - DNA, 25 bp, Homo sapien
ttgtaggagatgagctcattgctga

SEQ ID NO: 6072260 - DNA, 25 bp, Homo sapien
accatgcagttaaggatgaagaagg

SEQ ID NO: 6072261 - DNA, 25 bp, Homo sapien
agcaacacacgaagacccccatgat

SEQ ID NO: 6072262 - DNA, 25 bp, Homo sapien
tggatgtaggcagctgcgatttcct

SEQ ID NO: 6072263 - DNA, 25 bp, Homo sapien
gtctaaagaaatctccccctcgcag

SEQ ID NO: 6072264 - DNA, 25 bp, Homo sapien
atcaccgacagggtcttgagaacct

SEQ ID NO: 6072265 - DNA, 25 bp, Homo sapien
tgtggatgtaggcagctgcgatttc

SEQ ID NO: 6072266 - DNA, 25 bp, Homo sapien
tgcggaccccggtacctgagtagaa

SEQ ID NO: 6072267 - DNA, 25 bp, Homo sapien
cgctgatacagatcgcattcttctt

SEQ ID NO: 6072268 - DNA, 25 bp, Homo sapien
taatccgtaacagcccagaatcagc

SEQ ID NO: 6072269 - DNA, 25 bp, Homo sapien
taacttcgcaggtactcgtctgagg

SEQ ID NO: 6072270 - DNA, 25 bp, Homo sapien
ggacacagaacatggccacggtcgt

SEQ ID NO: 6072271 - DNA, 25 bp, Homo sapien
actcgtctgaggtggtgtcgtaaca

SEQ ID NO: 6072272 - DNA, 25 bp, Homo sapien
ttccttgtggctcgggagagtctcc

SEQ ID NO: 6072273 - DNA, 25 bp, Homo sapien
catgctgtagatgaaataacttcgc

SEQ ID NO: 6072274 - DNA, 25 bp, Homo sapien
tctcccgccaagaaatagagaatgg

SEQ ID NO: 6072275 - DNA, 25 bp, Homo sapien
gccacggtcgtgcacatgctgtaga

SEQ ID NO: 6072276 - DNA, 25 bp, Homo sapien
tgagccacaccagcacgctgataca

SEQ ID NO: 6072277 - DNA, 25 bp, Homo sapien
ggtaaatcgattttctcctcagagg

SEQ ID NO: 6072278 - DNA, 25 bp, Homo sapien
gagccatgagcacgtaacagacaag

SEQ ID NO: 6072279 - DNA, 25 bp, Homo sapien
ggcgtggactctgtccgcctagagt

SEQ ID NO: 6072280 - DNA, 25 bp, Homo sapien
aaggcaactgttagcactggccagc

SEQ ID NO: 6072281 - DNA, 25 bp, Homo sapien
acatcttctatcctctgcatgtcag

SEQ ID NO: 6072282 - DNA, 25 bp, Homo sapien
catctcgggcaaagcgtacgagcct

SEQ ID NO: 6072283 - DNA, 25 bp, Homo sapien
agacaaggatgacggcaaagggcac

SEQ ID NO: 6072284 - DNA, 25 bp, Homo sapien
cggccgggtaaccttgtaggccatg

SEQ ID NO: 6072285 - DNA, 25 bp, Homo sapien
tcagttctgtcggatctgcgcaggc

SEQ ID NO: 6072286 - DNA, 25 bp, Homo sapien
ccccgcgcgcgctggtggtgacaaa

SEQ ID NO: 6072287 - DNA, 25 bp, Homo sapien
cgaggtcccgtaggctggctttagc

SEQ ID NO: 6072288 - DNA, 25 bp, Homo sapien
ggctttagcagtcgccgagccatga

SEQ ID NO: 6072289 - DNA, 25 bp, Homo sapien
cgatggtgcgcacggacttgcgctt

SEQ ID NO: 6072290 - DNA, 25 bp, Homo sapien
tcctggtgacaattgtcttgatgag

SEQ ID NO: 6072291 - DNA, 25 bp, Homo sapien
tggtccatcttggataaggtcagga

SEQ ID NO: 6072292 - DNA, 25 bp, Homo sapien
cttagagaaggccagcacgtgaaga

SEQ ID NO: 6072293 - DNA, 25 bp, Homo sapien
gaaatgtcattgatcctggtgacaa

SEQ ID NO: 6072294 - DNA, 25 bp, Homo sapien
cacctctgtggagtagcctgaagct

SEQ ID NO: 6072295 - DNA, 25 bp, Homo sapien
gactttttggatgggcacagcttgg

SEQ ID NO: 6072296 - DNA, 25 bp, Homo sapien
ctggaaggcatactggtgaggatct

SEQ ID NO: 6072297 - DNA, 25 bp, Homo sapien
aaagccacaagaatccgcacagggt

SEQ ID NO: 6072298 - DNA, 25 bp, Homo sapien
ggatcacgtttctggaaggcatact

SEQ ID NO: 6072299 - DNA, 25 bp, Homo sapien
gacatagaaaagatagggccaaagc

SEQ ID NO: 6072300 - DNA, 25 bp, Homo sapien
ccagcacgtgaagaagatcccggag

SEQ ID NO: 6072301 - DNA, 25 bp, Homo sapien
aagatcccggaggttctccaggtcg

SEQ ID NO: 6072302 - DNA, 25 bp, Homo sapien
gggaaaaatcaagtcctgcctggca

SEQ ID NO: 6072303 - DNA, 25 bp, Homo sapien
cctgcaatttccatcgggcttctca

SEQ ID NO: 6072304 - DNA, 25 bp, Homo sapien
ggcagttgaaccaaaatgaagaaca

SEQ ID NO: 6072305 - DNA, 25 bp, Homo sapien
gaaaaatcaagtcctgcctggcacc

SEQ ID NO: 6072306 - DNA, 25 bp, Homo sapien
cgaccaagcttgcacgactcacaga

SEQ ID NO: 6072307 - DNA, 25 bp, Homo sapien
ttttccccgaccaagcttgcacgac

SEQ ID NO: 6072308 - DNA, 25 bp, Homo sapien
ttgcacgactcacagacagcaaact

SEQ ID NO: 6072309 - DNA, 25 bp, Homo sapien
gcttgcacgactcacagacagcaaa

SEQ ID NO: 6072310 - DNA, 25 bp, Homo sapien
caagcttgcacgactcacagacagc

SEQ ID NO: 6072311 - DNA, 25 bp, Homo sapien
ctgatggcagttgaaccaaaatgaa

SEQ ID NO: 6072312 - DNA, 25 bp, Homo sapien
tgcaatttccatcgggcttctcatt

SEQ ID NO: 6072313 - DNA, 25 bp, Homo sapien
cagcctgcaatttccatcgggcttc

SEQ ID NO: 6072314 - DNA, 25 bp, Homo sapien
cagtagtgagccactgcacgtggcc

SEQ ID NO: 6072315 - DNA, 25 bp, Homo sapien
gatcatcggtcactgcagcctctta

SEQ ID NO: 6072316 - DNA, 25 bp, Homo sapien
ctcgtcatctctcaagtagctggga

SEQ ID NO: 6072317 - DNA, 25 bp, Homo sapien
gcagtggcatgatcatcggtcactg

SEQ ID NO: 6072318 - DNA, 25 bp, Homo sapien
ggctcaagtgatcttccctcgtcat

SEQ ID NO: 6072319 - DNA, 25 bp, Homo sapien
tctgagttcaagcaatcttcctgcc

SEQ ID NO: 6072320 - DNA, 25 bp, Homo sapien
agacgagtctcgctctgtcaccagg

SEQ ID NO: 6072321 - DNA, 25 bp, Homo sapien
gggactacaggcacgcaacaccatg

SEQ ID NO: 6072322 - DNA, 25 bp, Homo sapien
tggaattacagtagtgagccactgc

SEQ ID NO: 6072323 - DNA, 25 bp, Homo sapien
gtgtgcaccaccacagtcacttttt

SEQ ID NO: 6072324 - DNA, 25 bp, Homo sapien
tagctgggattatacgtgtgcacca

SEQ ID NO: 6072325 - DNA, 25 bp, Homo sapien
tttttgtagagacgagggtctcacc

SEQ ID NO: 6072326 - DNA, 25 bp, Homo sapien
tcctttaataaccaccctgcgtgag

SEQ ID NO: 6072327 - DNA, 25 bp, Homo sapien
gcaagaattacgcaattatgcaggg

SEQ ID NO: 6072328 - DNA, 25 bp, Homo sapien
gcgcttcgcaaaaccaggaaaaggc

SEQ ID NO: 6072329 - DNA, 25 bp, Homo sapien
gaggctcacagaaccagggaacgat

SEQ ID NO: 6072330 - DNA, 25 bp, Homo sapien
ttgtcactggagacagcgcccctgg

SEQ ID NO: 6072331 - DNA, 25 bp, Homo sapien
gggtggtgatgaatcacacagctgc

SEQ ID NO: 6072332 - DNA, 25 bp, Homo sapien
gaaagaatgggcctgaattgctccc

SEQ ID NO: 6072333 - DNA, 25 bp, Homo sapien
cccctacaagggctgctctgggtca

SEQ ID NO: 6072334 - DNA, 25 bp, Homo sapien
cacctcgatccacttgagggtggaa

SEQ ID NO: 6072335 - DNA, 25 bp, Homo sapien
gctctgggtcagagaacgtccaccg

SEQ ID NO: 6072336 - DNA, 25 bp, Homo sapien
ccctgcgtgagtggctgacgcagca

SEQ ID NO: 6072337 - DNA, 25 bp, Homo sapien
atgaacacggcgcttcgcaaaacca

SEQ ID NO: 6072338 - DNA, 25 bp, Homo sapien
tgaccaaggctgtggtgacgcaaag

SEQ ID NO: 6072339 - DNA, 25 bp, Homo sapien
cagagacttggagaatggagaaacc

SEQ ID NO: 6072340 - DNA, 25 bp, Homo sapien
gaggcaccaaggtcacgctgtgacc

SEQ ID NO: 6072341 - DNA, 25 bp, Homo sapien
cataatgtggtacagcagtggtcac

SEQ ID NO: 6072342 - DNA, 25 bp, Homo sapien
tgacgcaaaggcagcgggtttcctg

SEQ ID NO: 6072343 - DNA, 25 bp, Homo sapien
catgtagtttacactcagagcccag

SEQ ID NO: 6072344 - DNA, 25 bp, Homo sapien
gaaacgtttaggtgctcatcttgct

SEQ ID NO: 6072345 - DNA, 25 bp, Homo sapien
caaagccccaccaggaatagtgatg

SEQ ID NO: 6072346 - DNA, 25 bp, Homo sapien
gctggctcgcagtcagtcacctgat

SEQ ID NO: 6072347 - DNA, 25 bp, Homo sapien
gacacttgtgtccagcctccaggtg

SEQ ID NO: 6072348 - DNA, 25 bp, Homo sapien
gcatccttcacaacctaccatgtag

SEQ ID NO: 6072349 - DNA, 25 bp, Homo sapien
catggctaatgggaggagctgaccc

SEQ ID NO: 6072350 - DNA, 25 bp, Homo sapien
ttattctttgtcacctatttataat

SEQ ID NO: 6072351 - DNA, 25 bp, Homo sapien
tacgttagtactccagtttcattta

SEQ ID NO: 6072352 - DNA, 25 bp, Homo sapien
tgtacgttagtactccagtttcatt

SEQ ID NO: 6072353 - DNA, 25 bp, Homo sapien
cgttagtactccagtttcatttatt

SEQ ID NO: 6072354 - DNA, 25 bp, Homo sapien
acgttagtactccagtttcatttat

SEQ ID NO: 6072355 - DNA, 25 bp, Homo sapien
cagcccccttgtgcaccctgagctc

SEQ ID NO: 6072356 - DNA, 25 bp, Homo sapien
ctgtacgttagtactccagtttcat

SEQ ID NO: 6072357 - DNA, 25 bp, Homo sapien
gcagcccccttgtgcaccctgagct

SEQ ID NO: 6072358 - DNA, 25 bp, Homo sapien
actgtacgttagtactccagtttca

SEQ ID NO: 6072359 - DNA, 25 bp, Homo sapien
tattctttgtcacctatttataata

SEQ ID NO: 6072360 - DNA, 25 bp, Homo sapien
tgccttcagggaggcgcagacaact

SEQ ID NO: 6072361 - DNA, 25 bp, Homo sapien
cccctgatgggttgagctgcagaaa

SEQ ID NO: 6072362 - DNA, 25 bp, Homo sapien
taaaagcactgactcggaatgtctg

SEQ ID NO: 6072363 - DNA, 25 bp, Homo sapien
cccttgaaatgtagacaggctactg

SEQ ID NO: 6072364 - DNA, 25 bp, Homo sapien
tgatcctcagtctatatttgtaaac

SEQ ID NO: 6072365 - DNA, 25 bp, Homo sapien
aatatccgtgccagcaagtctcggc

SEQ ID NO: 6072366 - DNA, 25 bp, Homo sapien
caggcacgcatgcagcctctctgat

SEQ ID NO: 6072367 - DNA, 25 bp, Homo sapien
cactgactcggaatgtctgagctgc

SEQ ID NO: 6072368 - DNA, 25 bp, Homo sapien
acagctagcccctgaagtctgcctt

SEQ ID NO: 6072369 - DNA, 25 bp, Homo sapien
gtgacctcaggcacgcatgcagcct

SEQ ID NO: 6072370 - DNA, 25 bp, Homo sapien
agtcatcacctagacccctgatggg

SEQ ID NO: 6072371 - DNA, 25 bp, Homo sapien
tagacaggctactgaggatggaagc

SEQ ID NO: 6072372 - DNA, 25 bp, Homo sapien
ctgggaggtaaaggcccccagctgg

SEQ ID NO: 6072373 - DNA, 25 bp, Homo sapien
aacgccacgaactgggaaacctgag

SEQ ID NO: 6072374 - DNA, 25 bp, Homo sapien
tctggggctcctgcaggaagctccc

SEQ ID NO: 6072375 - DNA, 25 bp, Homo sapien
ccccccagaagctgaaaatattgga

SEQ ID NO: 6072376 - DNA, 25 bp, Homo sapien
tctccacatcgccccgggatcgccg

SEQ ID NO: 6072377 - DNA, 25 bp, Homo sapien
ggagctctggggctcctgcaggaag

SEQ ID NO: 6072378 - DNA, 25 bp, Homo sapien
aggcccccagctggccgggcaggga

SEQ ID NO: 6072379 - DNA, 25 bp, Homo sapien
gaggcgtcgagtggggccatcttgg

SEQ ID NO: 6072380 - DNA, 25 bp, Homo sapien
tggagtgcgtccagcctgctctcca

SEQ ID NO: 6072381 - DNA, 25 bp, Homo sapien
cagggagaggcgtcgagtggggcca

SEQ ID NO: 6072382 - DNA, 25 bp, Homo sapien
cttgggggagctctggggctcctgc

SEQ ID NO: 6072383 - DNA, 25 bp, Homo sapien
aggacagtggccatgtctgcactta

SEQ ID NO: 6072384 - DNA, 25 bp, Homo sapien
tggatctgagccatgtctgtgcagg

SEQ ID NO: 6072385 - DNA, 25 bp, Homo sapien
gtccacagtgggcagcatcactaac

SEQ ID NO: 6072386 - DNA, 25 bp, Homo sapien
gccgggcagggagaggcgtcgagtg

SEQ ID NO: 6072387 - DNA, 25 bp, Homo sapien
actgcctggatctgagccatgtctg

SEQ ID NO: 6072388 - DNA, 25 bp, Homo sapien
tgaaaatattggacaccccagagaa

SEQ ID NO: 6072389 - DNA, 25 bp, Homo sapien
gccctgaacccagggtgagccacat

SEQ ID NO: 6072390 - DNA, 25 bp, Homo sapien
ggagggaccagggtcatttgcctct

SEQ ID NO: 6072391 - DNA, 25 bp, Homo sapien
gatcgccgaccagggctagacaagg

SEQ ID NO: 6072392 - DNA, 25 bp, Homo sapien
ccgacaggcaacaaaggggatgcgg

SEQ ID NO: 6072393 - DNA, 25 bp, Homo sapien
gtcatttgcctctgtagcagctgta

SEQ ID NO: 6072394 - DNA, 25 bp, Homo sapien
taggcaggagggaccagggtcattt

SEQ ID NO: 6072395 - DNA, 25 bp, Homo sapien
atgtctgcacttagccgggttccag

SEQ ID NO: 6072396 - DNA, 25 bp, Homo sapien
catcgccccgggatcgccgaccagg

SEQ ID NO: 6072397 - DNA, 25 bp, Homo sapien
acgaactgggaaacctgagaaagcg

SEQ ID NO: 6072398 - DNA, 25 bp, Homo sapien
agaagctgaaaatattggacacccc

SEQ ID NO: 6072399 - DNA, 25 bp, Homo sapien
tgcctctgtagcagctgtaggacag

SEQ ID NO: 6072400 - DNA, 25 bp, Homo sapien
aaggcgcccgacaagggattacagg

SEQ ID NO: 6072401 - DNA, 25 bp, Homo sapien
gacaccccagagaaggcgcccgaca

SEQ ID NO: 6072402 - DNA, 25 bp, Homo sapien
ccgacaagggattacaggtgtcact

SEQ ID NO: 6072403 - DNA, 25 bp, Homo sapien
gactgtccccccagaagctgaaaat

SEQ ID NO: 6072404 - DNA, 25 bp, Homo sapien
gccatcttgggggagctctggggct

SEQ ID NO: 6072405 - DNA, 25 bp, Homo sapien
gacagggccgacaggcaacaaaggg

SEQ ID NO: 6072406 - DNA, 25 bp, Homo sapien
tacaggtgtcacttttctccccatc

SEQ ID NO: 6072407 - DNA, 25 bp, Homo sapien
ccagagaaggcgcccgacaagggat

SEQ ID NO: 6072408 - DNA, 25 bp, Homo sapien
ggtgagagtggggacagggccgaca

SEQ ID NO: 6072409 - DNA, 25 bp, Homo sapien
acaaggggatgttgaggaggctggg

SEQ ID NO: 6072410 - DNA, 25 bp, Homo sapien
ccacatgtccacagtgggcagcatc

SEQ ID NO: 6072411 - DNA, 25 bp, Homo sapien
agctgtaggacagtggccatgtctg

SEQ ID NO: 6072412 - DNA, 25 bp, Homo sapien
tattggacaccccagagaaggcgcc

SEQ ID NO: 6072413 - DNA, 25 bp, Homo sapien
accagggtcatttgcctctgtagca

SEQ ID NO: 6072414 - DNA, 25 bp, Homo sapien
ggatgcggaagtggggccgggccca

SEQ ID NO: 6072415 - DNA, 25 bp, Homo sapien
aggctgggggcaggggcagggcatc

SEQ ID NO: 6072416 - DNA, 25 bp, Homo sapien
agcctgttcagctgtctctggagtg

SEQ ID NO: 6072417 - DNA, 25 bp, Homo sapien
caaaggggatgcggaagtggggccg

SEQ ID NO: 6072418 - DNA, 25 bp, Homo sapien
gcacagtaggcaggagggaccaggg

SEQ ID NO: 6072419 - DNA, 25 bp, Homo sapien
gggcagggcatcgaggcaactcctg

SEQ ID NO: 6072420 - DNA, 25 bp, Homo sapien
tgtagcagctgtaggacagtggcca

SEQ ID NO: 6072421 - DNA, 25 bp, Homo sapien
gcagcatcactaactgcctggatct

SEQ ID NO: 6072422 - DNA, 25 bp, Homo sapien
ggtgagccacatgtccacagtgggc

SEQ ID NO: 6072423 - DNA, 25 bp, Homo sapien
tgaggaggctgggggcaggggcagg

SEQ ID NO: 6072424 - DNA, 25 bp, Homo sapien
ggggcaggggcagggcatcgaggca

SEQ ID NO: 6072425 - DNA, 25 bp, Homo sapien
gagccatgtctgtgcaggggctggg

SEQ ID NO: 6072426 - DNA, 25 bp, Homo sapien
tgcacttagccgggttccagcctgt

SEQ ID NO: 6072427 - DNA, 25 bp, Homo sapien
agggattacaggtgtcacttttctc

SEQ ID NO: 6072428 - DNA, 25 bp, Homo sapien
tagccgggttccagcctgttcagct

SEQ ID NO: 6072429 - DNA, 25 bp, Homo sapien
gagtggggccatcttgggggagctc

SEQ ID NO: 6072430 - DNA, 25 bp, Homo sapien
ctcctgcaggaagctccccgaacgc

SEQ ID NO: 6072431 - DNA, 25 bp, Homo sapien
gtaaaggcccccagctggccgggca

SEQ ID NO: 6072432 - DNA, 25 bp, Homo sapien
gctagacaaggggatgttgaggagg

SEQ ID NO: 6072433 - DNA, 25 bp, Homo sapien
gcctgctctccacatcgccccggga

SEQ ID NO: 6072434 - DNA, 25 bp, Homo sapien
ggatgttgaggaggctgggggcagg

SEQ ID NO: 6072435 - DNA, 25 bp, Homo sapien
cagctggccgggcagggagaggcgt

SEQ ID NO: 6072436 - DNA, 25 bp, Homo sapien
gcccaggggtggtcacagcacagta

SEQ ID NO: 6072437 - DNA, 25 bp, Homo sapien
gctccccgaacgccacgaactggga

SEQ ID NO: 6072438 - DNA, 25 bp, Homo sapien
gtggccatgtctgcacttagccggg

SEQ ID NO: 6072439 - DNA, 25 bp, Homo sapien
ggcatcgaggcaactcctggtactg

SEQ ID NO: 6072440 - DNA, 25 bp, Homo sapien
tgggaaacctgagaaagcgagtcca

SEQ ID NO: 6072441 - DNA, 25 bp, Homo sapien
tgcaggggctgggaggtaaaggccc

SEQ ID NO: 6072442 - DNA, 25 bp, Homo sapien
ggccgggcccaggggtggtcacagc

SEQ ID NO: 6072443 - DNA, 25 bp, Homo sapien
cgtccagcctgctctccacatcgcc

SEQ ID NO: 6072444 - DNA, 25 bp, Homo sapien
ggcaacaaaggggatgcggaagtgg

SEQ ID NO: 6072445 - DNA, 25 bp, Homo sapien
acctgagaaagcgagtccagggtga

SEQ ID NO: 6072446 - DNA, 25 bp, Homo sapien
ttcagctgtctctggagtgcgtcca

SEQ ID NO: 6072447 - DNA, 25 bp, Homo sapien
caggaagctccccgaacgccacgaa

SEQ ID NO: 6072448 - DNA, 25 bp, Homo sapien
accagggctagacaaggggatgttg

SEQ ID NO: 6072449 - DNA, 25 bp, Homo sapien
tcactaactgcctggatctgagcca

SEQ ID NO: 6072450 - DNA, 25 bp, Homo sapien
ggttccagcctgttcagctgtctct

SEQ ID NO: 6072451 - DNA, 25 bp, Homo sapien
agtggggacagggccgacaggcaac

SEQ ID NO: 6072452 - DNA, 25 bp, Homo sapien
cccccgactgtccccccagaagctg

SEQ ID NO: 6072453 - DNA, 25 bp, Homo sapien
tgtctgtgcaggggctgggaggtaa

SEQ ID NO: 6072454 - DNA, 25 bp, Homo sapien
aaagcgagtccagggtgagagtggg

SEQ ID NO: 6072455 - DNA, 25 bp, Homo sapien
aacccagggtgagccacatgtccac

SEQ ID NO: 6072456 - DNA, 25 bp, Homo sapien
tgtctctggagtgcgtccagcctgc

SEQ ID NO: 6072457 - DNA, 25 bp, Homo sapien
tccagggtgagagtggggacagggc

SEQ ID NO: 6072458 - DNA, 25 bp, Homo sapien
tcacagcacagtaggcaggagggac

SEQ ID NO: 6072459 - DNA, 25 bp, Homo sapien
ctggcgcccccgactgtccccccag

SEQ ID NO: 6072460 - DNA, 25 bp, Homo sapien
gggtggtcacagcacagtaggcagg

SEQ ID NO: 6072461 - DNA, 25 bp, Homo sapien
cccgggatcgccgaccagggctaga

SEQ ID NO: 6072462 - DNA, 25 bp, Homo sapien
cagtgggcagcatcactaactgcct

SEQ ID NO: 6072463 - DNA, 25 bp, Homo sapien
gaggcaactcctggtactggcgccc

SEQ ID NO: 6072464 - DNA, 25 bp, Homo sapien
cagaaatatacgatcgattccactg

SEQ ID NO: 6072465 - DNA, 25 bp, Homo sapien
gcgtgtccgtactagtgctttctgg

SEQ ID NO: 6072466 - DNA, 25 bp, Homo sapien
gagggatatactccccttcagaagt

SEQ ID NO: 6072467 - DNA, 25 bp, Homo sapien
tacacttgcctggttgtgaaggtct

SEQ ID NO: 6072468 - DNA, 25 bp, Homo sapien
gattccactgtcaaacccaacattg

SEQ ID NO: 6072469 - DNA, 25 bp, Homo sapien
gatgtctatttgatccagagggata

SEQ ID NO: 6072470 - DNA, 25 bp, Homo sapien
caaagtctgcgttgtcaatgtcctg

SEQ ID NO: 6072471 - DNA, 25 bp, Homo sapien
taagagctacggcactgtgtcgtca

SEQ ID NO: 6072472 - DNA, 25 bp, Homo sapien
gcctgggctctagaggtacacttgc

SEQ ID NO: 6072473 - DNA, 25 bp, Homo sapien
tcatttgctagataagagctacggc

SEQ ID NO: 6072474 - DNA, 25 bp, Homo sapien
tgctaagtctctggcactacaaagg

SEQ ID NO: 6072475 - DNA, 25 bp, Homo sapien
tatgaccacgatttcaaagtctgcg

SEQ ID NO: 6072476 - DNA, 25 bp, Homo sapien
gccacgacgagctcggctgcgtagt

SEQ ID NO: 6072477 - DNA, 25 bp, Homo sapien
tggaggcacggaggcgtccttggtc

SEQ ID NO: 6072478 - DNA, 25 bp, Homo sapien
ggcttcacaggcgttgcattactcc

SEQ ID NO: 6072479 - DNA, 25 bp, Homo sapien
gctcggctgcgtagtcctcgtagta

SEQ ID NO: 6072480 - DNA, 25 bp, Homo sapien
tgtcggtgaggtccacgatatctag

SEQ ID NO: 6072481 - DNA, 25 bp, Homo sapien
tgtcttacgcgactggtgcgcgcgt

SEQ ID NO: 6072482 - DNA, 25 bp, Homo sapien
tccaacatgcgcatgtcgcgcagca

SEQ ID NO: 6072483 - DNA, 25 bp, Homo sapien
cactgctgttgtcttacgcgactgg

SEQ ID NO: 6072484 - DNA, 25 bp, Homo sapien
cacaggcgttgcattactccttttg

SEQ ID NO: 6072485 - DNA, 25 bp, Homo sapien
gaggtccacgatatctagctgcccg

SEQ ID NO: 6072486 - DNA, 25 bp, Homo sapien
tcctcgtagtaggaggcgaccagct

SEQ ID NO: 6072487 - DNA, 25 bp, Homo sapien
acgatatctagctgcccgagcgcgc

SEQ ID NO: 6072488 - DNA, 25 bp, Homo sapien
agtatttttgccacaaaatcagacc

SEQ ID NO: 6072489 - DNA, 25 bp, Homo sapien
ctaggaagtatttttgccacaaaat

SEQ ID NO: 6072490 - DNA, 25 bp, Homo sapien
cttgtgcatatgtttggagattttc

SEQ ID NO: 6072491 - DNA, 25 bp, Homo sapien
cagtcttaacattaccaatagagag

SEQ ID NO: 6072492 - DNA, 25 bp, Homo sapien
taacattaccaatagagaggcacca

SEQ ID NO: 6072493 - DNA, 25 bp, Homo sapien
agccaagaactccaaacccacccag

SEQ ID NO: 6072494 - DNA, 25 bp, Homo sapien
tttgccacaaaatcagacctccaga

SEQ ID NO: 6072495 - DNA, 25 bp, Homo sapien
tgatgtaatgctcggaatttgcttc

SEQ ID NO: 6072496 - DNA, 25 bp, Homo sapien
ggcaccagcattatctgcctcctga

SEQ ID NO: 6072497 - DNA, 25 bp, Homo sapien
ggatttattataccatgatctctgc

SEQ ID NO: 6072498 - DNA, 25 bp, Homo sapien
ctggccgtgtgtggatgggttgtca

SEQ ID NO: 6072499 - DNA, 25 bp, Homo sapien
ccaaacatttgtgggacaatgggag

SEQ ID NO: 6072500 - DNA, 25 bp, Homo sapien
acaggcctggccgtgtgtggatggg

SEQ ID NO: 6072501 - DNA, 25 bp, Homo sapien
attataccatgatctctgcttgtgc

SEQ ID NO: 6072502 - DNA, 25 bp, Homo sapien
gagttgcaaagggatttattatacc

SEQ ID NO: 6072503 - DNA, 25 bp, Homo sapien
aggagtgggcagcagtgtagataaa

SEQ ID NO: 6072504 - DNA, 25 bp, Homo sapien
aactccaaacccacccagcagtctt

SEQ ID NO: 6072505 - DNA, 25 bp, Homo sapien
ctaccattttataggaaagataagt

SEQ ID NO: 6072506 - DNA, 25 bp, Homo sapien
gtgtgtggatgggttgtcagggctg

SEQ ID NO: 6072507 - DNA, 25 bp, Homo sapien
tctctgcttgtgcatatgtttggag

SEQ ID NO: 6072508 - DNA, 25 bp, Homo sapien
taccaatagagaggcaccagcatta

SEQ ID NO: 6072509 - DNA, 25 bp, Homo sapien
cgattgtatatttaaggatgttaga

SEQ ID NO: 6072510 - DNA, 25 bp, Homo sapien
gaaccatgtcaaatgacacctcggg

SEQ ID NO: 6072511 - DNA, 25 bp, Homo sapien
agataaacaggcctggccgtgtgtg

SEQ ID NO: 6072512 - DNA, 25 bp, Homo sapien
gaaatatttatggacaaaatgatgt

SEQ ID NO: 6072513 - DNA, 25 bp, Homo sapien
ttaaggatgttagaaatatttatgg

SEQ ID NO: 6072514 - DNA, 25 bp, Homo sapien
acctcgggatttcaaccagcaacgt

SEQ ID NO: 6072515 - DNA, 25 bp, Homo sapien
aaactctgtagatggaaagagactt

SEQ ID NO: 6072516 - DNA, 25 bp, Homo sapien
tagagaggcaccagcattatctgcc

SEQ ID NO: 6072517 - DNA, 25 bp, Homo sapien
tacaaaaacagccaaacatttgtgg

SEQ ID NO: 6072518 - DNA, 25 bp, Homo sapien
tacagacatttcaaataaatgcaat

SEQ ID NO: 6072519 - DNA, 25 bp, Homo sapien
aaacccacccagcagtcttaacatt

SEQ ID NO: 6072520 - DNA, 25 bp, Homo sapien
atgacacctcgggatttcaaccagc

SEQ ID NO: 6072521 - DNA, 25 bp, Homo sapien
tgtcaaatgacacctcgggatttca

SEQ ID NO: 6072522 - DNA, 25 bp, Homo sapien
acaggatgcaacaagaagtacccag

SEQ ID NO: 6072523 - DNA, 25 bp, Homo sapien
atttgtgggacaatgggagatgctt

SEQ ID NO: 6072524 - DNA, 25 bp, Homo sapien
ggatttcaaccagcaacgttcaaat

SEQ ID NO: 6072525 - DNA, 25 bp, Homo sapien
ctccagatctaactaccattttata

SEQ ID NO: 6072526 - DNA, 25 bp, Homo sapien
tggaaagagacttacagacatttca

SEQ ID NO: 6072527 - DNA, 25 bp, Homo sapien
gaatcctaatacaaacaatccaact

SEQ ID NO: 6072528 - DNA, 25 bp, Homo sapien
atgggagatgcttgaattccgattg

SEQ ID NO: 6072529 - DNA, 25 bp, Homo sapien
tgcttcagaatgatccaggtacagc

SEQ ID NO: 6072530 - DNA, 25 bp, Homo sapien
tgggccttgcttgaatcctaataca

SEQ ID NO: 6072531 - DNA, 25 bp, Homo sapien
acaaaatcagacctccagatctaac

SEQ ID NO: 6072532 - DNA, 25 bp, Homo sapien
catttcaaataaatgcaatatatgg

SEQ ID NO: 6072533 - DNA, 25 bp, Homo sapien
ggaatttgcttcagaatgatccagg

SEQ ID NO: 6072534 - DNA, 25 bp, Homo sapien
caccacctaggaagtatttttgcca

SEQ ID NO: 6072535 - DNA, 25 bp, Homo sapien
ttcaaatgtgctaaactctgtagat

SEQ ID NO: 6072536 - DNA, 25 bp, Homo sapien
catatgtttggagattttcataatc

SEQ ID NO: 6072537 - DNA, 25 bp, Homo sapien
aaatgcaatatatgggccttgcttg

SEQ ID NO: 6072538 - DNA, 25 bp, Homo sapien
acccagcaccacctaggaagtattt

SEQ ID NO: 6072539 - DNA, 25 bp, Homo sapien
cagggctgagtggagttgcaaaggg

SEQ ID NO: 6072540 - DNA, 25 bp, Homo sapien
gagacttacagacatttcaaataaa

SEQ ID NO: 6072541 - DNA, 25 bp, Homo sapien
catgtggagctggagagaggagtgg

SEQ ID NO: 6072542 - DNA, 25 bp, Homo sapien
tcaaataaatgcaatatatgggcct

SEQ ID NO: 6072543 - DNA, 25 bp, Homo sapien
tcagacctccagatctaactaccat

SEQ ID NO: 6072544 - DNA, 25 bp, Homo sapien
aacaatccaactacaaaaacagcca

SEQ ID NO: 6072545 - DNA, 25 bp, Homo sapien
ttcagagaaccatgtcaaatgacac

SEQ ID NO: 6072546 - DNA, 25 bp, Homo sapien
aggaaagataagttcagagaaccat

SEQ ID NO: 6072547 - DNA, 25 bp, Homo sapien
ggagagaggagtgggcagcagtgta

SEQ ID NO: 6072548 - DNA, 25 bp, Homo sapien
ggatgggttgtcagggctgagtgga

SEQ ID NO: 6072549 - DNA, 25 bp, Homo sapien
gtacagcatgtggagctggagagag

SEQ ID NO: 6072550 - DNA, 25 bp, Homo sapien
gggcagcagtgtagataaacaggcc

SEQ ID NO: 6072551 - DNA, 25 bp, Homo sapien
gataagttcagagaaccatgtcaaa

SEQ ID NO: 6072552 - DNA, 25 bp, Homo sapien
taatacaaacaatccaactacaaaa

SEQ ID NO: 6072553 - DNA, 25 bp, Homo sapien
acccagcagtcttaacattaccaat

SEQ ID NO: 6072554 - DNA, 25 bp, Homo sapien
atgctcggaatttgcttcagaatga

SEQ ID NO: 6072555 - DNA, 25 bp, Homo sapien
gatgcttgaattccgattgtatatt

SEQ ID NO: 6072556 - DNA, 25 bp, Homo sapien
gagctggagagaggagtgggcagca

SEQ ID NO: 6072557 - DNA, 25 bp, Homo sapien
ggttgtcagggctgagtggagttgc

SEQ ID NO: 6072558 - DNA, 25 bp, Homo sapien
gcaaagggatttattataccatgat

SEQ ID NO: 6072559 - DNA, 25 bp, Homo sapien
tgcaacaagaagtacccagcaccac

SEQ ID NO: 6072560 - DNA, 25 bp, Homo sapien
ttttataggaaagataagttcagag

SEQ ID NO: 6072561 - DNA, 25 bp, Homo sapien
ccatgatctctgcttgtgcatatgt

SEQ ID NO: 6072562 - DNA, 25 bp, Homo sapien
tgtgctaaactctgtagatggaaag

SEQ ID NO: 6072563 - DNA, 25 bp, Homo sapien
aaacagccaaacatttgtgggacaa

SEQ ID NO: 6072564 - DNA, 25 bp, Homo sapien
gcaacgttcaaatgtgctaaactct

SEQ ID NO: 6072565 - DNA, 25 bp, Homo sapien
gaattccgattgtatatttaaggat

SEQ ID NO: 6072566 - DNA, 25 bp, Homo sapien
ctcctgacaggatgcaacaagaagt

SEQ ID NO: 6072567 - DNA, 25 bp, Homo sapien
ttgcttgaatcctaatacaaacaat

SEQ ID NO: 6072568 - DNA, 25 bp, Homo sapien
agaatgatccaggtacagcatgtgg

SEQ ID NO: 6072569 - DNA, 25 bp, Homo sapien
cagtgtagataaacaggcctggccg

SEQ ID NO: 6072570 - DNA, 25 bp, Homo sapien
tgtagatggaaagagacttacagac

SEQ ID NO: 6072571 - DNA, 25 bp, Homo sapien
agcattatctgcctcctgacaggat

SEQ ID NO: 6072572 - DNA, 25 bp, Homo sapien
atccaggtacagcatgtggagctgg

SEQ ID NO: 6072573 - DNA, 25 bp, Homo sapien
gggacaatgggagatgcttgaattc

SEQ ID NO: 6072574 - DNA, 25 bp, Homo sapien
aatatatgggccttgcttgaatcct

SEQ ID NO: 6072575 - DNA, 25 bp, Homo sapien
agaagtacccagcaccacctaggaa

SEQ ID NO: 6072576 - DNA, 25 bp, Homo sapien
caaccagcaacgttcaaatgtgcta

SEQ ID NO: 6072577 - DNA, 25 bp, Homo sapien
tgagtggagttgcaaagggatttat

SEQ ID NO: 6072578 - DNA, 25 bp, Homo sapien
tccaactacaaaaacagccaaacat

SEQ ID NO: 6072579 - DNA, 25 bp, Homo sapien
atctgcctcctgacaggatgcaaca

SEQ ID NO: 6072580 - DNA, 25 bp, Homo sapien
gatgttagaaatatttatggacaaa

SEQ ID NO: 6072581 - DNA, 25 bp, Homo sapien
atctaactaccattttataggaaag

SEQ ID NO: 6072582 - DNA, 25 bp, Homo sapien
ttatggacaaaatgatgtaatgctc

SEQ ID NO: 6072583 - DNA, 25 bp, Homo sapien
acaaaatgatgtaatgctcggaatt

SEQ ID NO: 6072584 - DNA, 25 bp, Homo sapien
agtatttttgccacaaaatcagacc

SEQ ID NO: 6072585 - DNA, 25 bp, Homo sapien
catatgtttggagattttcataatc

SEQ ID NO: 6072586 - DNA, 25 bp, Homo sapien
aatatatgggccttgcttgaatcct

SEQ ID NO: 6072587 - DNA, 25 bp, Homo sapien
ctcctgacaggatgcaacaagaagt

SEQ ID NO: 6072588 - DNA, 25 bp, Homo sapien
gatgcttgaattccgattgtatatt

SEQ ID NO: 6072589 - DNA, 25 bp, Homo sapien
gaaccatgtcaaatgacacctcggg

SEQ ID NO: 6072590 - DNA, 25 bp, Homo sapien
tttgccacaaaatcagacctccaga

SEQ ID NO: 6072591 - DNA, 25 bp, Homo sapien
cgattgtatatttaaggatgttaga

SEQ ID NO: 6072592 - DNA, 25 bp, Homo sapien
ttcaaatgtgctaaactctgtagat

SEQ ID NO: 6072593 - DNA, 25 bp, Homo sapien
ctggccgtgtgtggatgggttgtca

SEQ ID NO: 6072594 - DNA, 25 bp, Homo sapien
acccagcagtcttaacattaccaat

SEQ ID NO: 6072595 - DNA, 25 bp, Homo sapien
ggatttattataccatgatctctgc

SEQ ID NO: 6072596 - DNA, 25 bp, Homo sapien
atctgcctcctgacaggatgcaaca

SEQ ID NO: 6072597 - DNA, 25 bp, Homo sapien
gagttgcaaagggatttattatacc

SEQ ID NO: 6072598 - DNA, 25 bp, Homo sapien
tggaaagagacttacagacatttca

SEQ ID NO: 6072599 - DNA, 25 bp, Homo sapien
taatacaaacaatccaactacaaaa

SEQ ID NO: 6072600 - DNA, 25 bp, Homo sapien
taccaatagagaggcaccagcatta

SEQ ID NO: 6072601 - DNA, 25 bp, Homo sapien
gaaatatttatggacaaaatgatgt

SEQ ID NO: 6072602 - DNA, 25 bp, Homo sapien
cagtcttaacattaccaatagagag

SEQ ID NO: 6072603 - DNA, 25 bp, Homo sapien
atgacacctcgggatttcaaccagc

SEQ ID NO: 6072604 - DNA, 25 bp, Homo sapien
tctctgcttgtgcatatgtttggag

SEQ ID NO: 6072605 - DNA, 25 bp, Homo sapien
tgtagatggaaagagacttacagac

SEQ ID NO: 6072606 - DNA, 25 bp, Homo sapien
gtgtgtggatgggttgtcagggctg

SEQ ID NO: 6072607 - DNA, 25 bp, Homo sapien
caaccagcaacgttcaaatgtgcta

SEQ ID NO: 6072608 - DNA, 25 bp, Homo sapien
tagagaggcaccagcattatctgcc

SEQ ID NO: 6072609 - DNA, 25 bp, Homo sapien
tacagacatttcaaataaatgcaat

SEQ ID NO: 6072610 - DNA, 25 bp, Homo sapien
ttaaggatgttagaaatatttatgg

SEQ ID NO: 6072611 - DNA, 25 bp, Homo sapien
aaatgcaatatatgggccttgcttg

SEQ ID NO: 6072612 - DNA, 25 bp, Homo sapien
tgcaacaagaagtacccagcaccac

SEQ ID NO: 6072613 - DNA, 25 bp, Homo sapien
agaagtacccagcaccacctaggaa

SEQ ID NO: 6072614 - DNA, 25 bp, Homo sapien
gatgttagaaatatttatggacaaa

SEQ ID NO: 6072615 - DNA, 25 bp, Homo sapien
agaatgatccaggtacagcatgtgg

SEQ ID NO: 6072616 - DNA, 25 bp, Homo sapien
tacaaaaacagccaaacatttgtgg

SEQ ID NO: 6072617 - DNA, 25 bp, Homo sapien
ctccagatctaactaccattttata

SEQ ID NO: 6072618 - DNA, 25 bp, Homo sapien
ccatgatctctgcttgtgcatatgt

SEQ ID NO: 6072619 - DNA, 25 bp, Homo sapien
acaggcctggccgtgtgtggatggg

SEQ ID NO: 6072620 - DNA, 25 bp, Homo sapien
gcaacgttcaaatgtgctaaactct

SEQ ID NO: 6072621 - DNA, 25 bp, Homo sapien
acaggatgcaacaagaagtacccag

SEQ ID NO: 6072622 - DNA, 25 bp, Homo sapien
acctcgggatttcaaccagcaacgt

SEQ ID NO: 6072623 - DNA, 25 bp, Homo sapien
ggatttcaaccagcaacgttcaaat

SEQ ID NO: 6072624 - DNA, 25 bp, Homo sapien
ctaggaagtatttttgccacaaaat

SEQ ID NO: 6072625 - DNA, 25 bp, Homo sapien
acccagcaccacctaggaagtattt

SEQ ID NO: 6072626 - DNA, 25 bp, Homo sapien
ttgcttgaatcctaatacaaacaat

SEQ ID NO: 6072627 - DNA, 25 bp, Homo sapien
ttcagagaaccatgtcaaatgacac

SEQ ID NO: 6072628 - DNA, 25 bp, Homo sapien
aggaaagataagttcagagaaccat

SEQ ID NO: 6072629 - DNA, 25 bp, Homo sapien
ggatgggttgtcagggctgagtgga

SEQ ID NO: 6072630 - DNA, 25 bp, Homo sapien
gagacttacagacatttcaaataaa

SEQ ID NO: 6072631 - DNA, 25 bp, Homo sapien
acaaaatgatgtaatgctcggaatt

SEQ ID NO: 6072632 - DNA, 25 bp, Homo sapien
tcaaataaatgcaatatatgggcct

SEQ ID NO: 6072633 - DNA, 25 bp, Homo sapien
gaatcctaatacaaacaatccaact

SEQ ID NO: 6072634 - DNA, 25 bp, Homo sapien
aaactctgtagatggaaagagactt

SEQ ID NO: 6072635 - DNA, 25 bp, Homo sapien
aaacagccaaacatttgtgggacaa

SEQ ID NO: 6072636 - DNA, 25 bp, Homo sapien
atgggagatgcttgaattccgattg

SEQ ID NO: 6072637 - DNA, 25 bp, Homo sapien
ggaatttgcttcagaatgatccagg

SEQ ID NO: 6072638 - DNA, 25 bp, Homo sapien
catttcaaataaatgcaatatatgg

SEQ ID NO: 6072639 - DNA, 25 bp, Homo sapien
taacattaccaatagagaggcacca

SEQ ID NO: 6072640 - DNA, 25 bp, Homo sapien
tcagacctccagatctaactaccat

SEQ ID NO: 6072641 - DNA, 25 bp, Homo sapien
gcaaagggatttattataccatgat

SEQ ID NO: 6072642 - DNA, 25 bp, Homo sapien
gataagttcagagaaccatgtcaaa

SEQ ID NO: 6072643 - DNA, 25 bp, Homo sapien
aacaatccaactacaaaaacagcca

SEQ ID NO: 6072644 - DNA, 25 bp, Homo sapien
cagggctgagtggagttgcaaaggg

SEQ ID NO: 6072645 - DNA, 25 bp, Homo sapien
ccaaacatttgtgggacaatgggag

SEQ ID NO: 6072646 - DNA, 25 bp, Homo sapien
gtacagcatgtggagctggagagag

SEQ ID NO: 6072647 - DNA, 25 bp, Homo sapien
catgtggagctggagagaggagtgg

SEQ ID NO: 6072648 - DNA, 25 bp, Homo sapien
gggcagcagtgtagataaacaggcc

SEQ ID NO: 6072649 - DNA, 25 bp, Homo sapien
ggcaccagcattatctgcctcctga

SEQ ID NO: 6072650 - DNA, 25 bp, Homo sapien
gggacaatgggagatgcttgaattc

SEQ ID NO: 6072651 - DNA, 25 bp, Homo sapien
agataaacaggcctggccgtgtgtg

SEQ ID NO: 6072652 - DNA, 25 bp, Homo sapien
ggttgtcagggctgagtggagttgc

SEQ ID NO: 6072653 - DNA, 25 bp, Homo sapien
tgatgtaatgctcggaatttgcttc

SEQ ID NO: 6072654 - DNA, 25 bp, Homo sapien
agcattatctgcctcctgacaggat

SEQ ID NO: 6072655 - DNA, 25 bp, Homo sapien
aaacccacccagcagtcttaacatt

SEQ ID NO: 6072656 - DNA, 25 bp, Homo sapien
gagctggagagaggagtgggcagca

SEQ ID NO: 6072657 - DNA, 25 bp, Homo sapien
cttgtgcatatgtttggagattttc

SEQ ID NO: 6072658 - DNA, 25 bp, Homo sapien
ctaccattttataggaaagataagt

SEQ ID NO: 6072659 - DNA, 25 bp, Homo sapien
atctaactaccattttataggaaag

SEQ ID NO: 6072660 - DNA, 25 bp, Homo sapien
tgggccttgcttgaatcctaataca

SEQ ID NO: 6072661 - DNA, 25 bp, Homo sapien
cagtgtagataaacaggcctggccg

SEQ ID NO: 6072662 - DNA, 25 bp, Homo sapien
ggagagaggagtgggcagcagtgta

SEQ ID NO: 6072663 - DNA, 25 bp, Homo sapien
aactccaaacccacccagcagtctt

SEQ ID NO: 6072664 - DNA, 25 bp, Homo sapien
tgtgctaaactctgtagatggaaag

SEQ ID NO: 6072665 - DNA, 25 bp, Homo sapien
gaattccgattgtatatttaaggat

SEQ ID NO: 6072666 - DNA, 25 bp, Homo sapien
tgagtggagttgcaaagggatttat

SEQ ID NO: 6072667 - DNA, 25 bp, Homo sapien
tgtcaaatgacacctcgggatttca

SEQ ID NO: 6072668 - DNA, 25 bp, Homo sapien
acaaaatcagacctccagatctaac

SEQ ID NO: 6072669 - DNA, 25 bp, Homo sapien
aggagtgggcagcagtgtagataaa

SEQ ID NO: 6072670 - DNA, 25 bp, Homo sapien
atgctcggaatttgcttcagaatga

SEQ ID NO: 6072671 - DNA, 25 bp, Homo sapien
attataccatgatctctgcttgtgc

SEQ ID NO: 6072672 - DNA, 25 bp, Homo sapien
atttgtgggacaatgggagatgctt

SEQ ID NO: 6072673 - DNA, 25 bp, Homo sapien
agccaagaactccaaacccacccag

SEQ ID NO: 6072674 - DNA, 25 bp, Homo sapien
ttttataggaaagataagttcagag

SEQ ID NO: 6072675 - DNA, 25 bp, Homo sapien
tccaactacaaaaacagccaaacat

SEQ ID NO: 6072676 - DNA, 25 bp, Homo sapien
tgcttcagaatgatccaggtacagc

SEQ ID NO: 6072677 - DNA, 25 bp, Homo sapien
caccacctaggaagtatttttgcca

SEQ ID NO: 6072678 - DNA, 25 bp, Homo sapien
atccaggtacagcatgtggagctgg

SEQ ID NO: 6072679 - DNA, 25 bp, Homo sapien
ttatggacaaaatgatgtaatgctc

SEQ ID NO: 6072680 - DNA, 25 bp, Homo sapien
taccatgatccacaatttgttcttg

SEQ ID NO: 6072681 - DNA, 25 bp, Homo sapien
tgggccctgcgcttggaataatctt

SEQ ID NO: 6072682 - DNA, 25 bp, Homo sapien
cttgaatctgaacagtttggcagca

SEQ ID NO: 6072683 - DNA, 25 bp, Homo sapien
tactaaatggtttgcactaactcat

SEQ ID NO: 6072684 - DNA, 25 bp, Homo sapien
ccaagggcagaaccaggtacatttc

SEQ ID NO: 6072685 - DNA, 25 bp, Homo sapien
gctgatagcctgcatataccatgat

SEQ ID NO: 6072686 - DNA, 25 bp, Homo sapien
gctcagtagcttgcatgtcctaact

SEQ ID NO: 6072687 - DNA, 25 bp, Homo sapien
aacttcttggctgaaatttgcctca

SEQ ID NO: 6072688 - DNA, 25 bp, Homo sapien
tgcatttgcgtagccacaatctctg

SEQ ID NO: 6072689 - DNA, 25 bp, Homo sapien
cagcatgctgttagtggcatgagca

SEQ ID NO: 6072690 - DNA, 25 bp, Homo sapien
tggctataacatttgggccctgcgc

SEQ ID NO: 6072691 - DNA, 25 bp, Homo sapien
ttttaatctggaacaactctgctga

SEQ ID NO: 6072692 - DNA, 25 bp, Homo sapien
gtttaacacacgcttaccaccactg

SEQ ID NO: 6072693 - DNA, 25 bp, Homo sapien
tgataaaaagctgtcccgtggccag

SEQ ID NO: 6072694 - DNA, 25 bp, Homo sapien
gggagtttctctggcaacgaggcat

SEQ ID NO: 6072695 - DNA, 25 bp, Homo sapien
aaacagagcagaacctaagggctct

SEQ ID NO: 6072696 - DNA, 25 bp, Homo sapien
aatagtttcgttccgagatgcctgg

SEQ ID NO: 6072697 - DNA, 25 bp, Homo sapien
gaaaagtttattgagtcagccacag

SEQ ID NO: 6072698 - DNA, 25 bp, Homo sapien
tcagcaagcgcgattacagtgctcc

SEQ ID NO: 6072699 - DNA, 25 bp, Homo sapien
gagtcatgagcgacacgacacttcc

SEQ ID NO: 6072700 - DNA, 25 bp, Homo sapien
cagacacaaacatgaggccactgtt

SEQ ID NO: 6072701 - DNA, 25 bp, Homo sapien
cactgttacccaactaatagaagag

SEQ ID NO: 6072702 - DNA, 25 bp, Homo sapien
atggtctcagtccacggcacagagc

SEQ ID NO: 6072703 - DNA, 25 bp, Homo sapien
acagctgaaccctgcgcaggacaga

SEQ ID NO: 6072704 - DNA, 25 bp, Homo sapien
gaacaagggtggtctaaatatccta

SEQ ID NO: 6072705 - DNA, 25 bp, Homo sapien
tacttgatcttgtttcacgaagcgg

SEQ ID NO: 6072706 - DNA, 25 bp, Homo sapien
agtggtacagaggaaggaaacttga

SEQ ID NO: 6072707 - DNA, 25 bp, Homo sapien
cttgagggtaaattcatcagtgaca

SEQ ID NO: 6072708 - DNA, 25 bp, Homo sapien
cacacaaacactgacacactctggt

SEQ ID NO: 6072709 - DNA, 25 bp, Homo sapien
aattctcctcacagtatcttgcaga

SEQ ID NO: 6072710 - DNA, 25 bp, Homo sapien
tattactgatattgtccaaggaagc

SEQ ID NO: 6072711 - DNA, 25 bp, Homo sapien
ggtggtgaacttttgctgtcaattc

SEQ ID NO: 6072712 - DNA, 25 bp, Homo sapien
gaaaagtcaatcaatgggcagtaaa

SEQ ID NO: 6072713 - DNA, 25 bp, Homo sapien
gaaaatctttgaacgtctcgaggca

SEQ ID NO: 6072714 - DNA, 25 bp, Homo sapien
tgaacgtctcgaggcagatggttcc

SEQ ID NO: 6072715 - DNA, 25 bp, Homo sapien
cagtaaataagagtaggtggtgaac

SEQ ID NO: 6072716 - DNA, 25 bp, Homo sapien
tctgacagcgtgtccctgaacacag

SEQ ID NO: 6072717 - DNA, 25 bp, Homo sapien
cattgataacgtggattctgacagc

SEQ ID NO: 6072718 - DNA, 25 bp, Homo sapien
tctggaatccgcatgtaagtgtgtg

SEQ ID NO: 6072719 - DNA, 25 bp, Homo sapien
ccttttcggctgaatgacgctggaa

SEQ ID NO: 6072720 - DNA, 25 bp, Homo sapien
ggagccatggccaataccgaataag

SEQ ID NO: 6072721 - DNA, 25 bp, Homo sapien
gaataagcgccccacattgataacg

SEQ ID NO: 6072722 - DNA, 25 bp, Homo sapien
gagcatcctcatcataggcttgcgg

SEQ ID NO: 6072723 - DNA, 25 bp, Homo sapien
tcgagggcacgcatgcattccagtt

SEQ ID NO: 6072724 - DNA, 25 bp, Homo sapien
cagtagcgaactgtagggagcatcc

SEQ ID NO: 6072725 - DNA, 25 bp, Homo sapien
gttctgggatcatggtaggagccat

SEQ ID NO: 6072726 - DNA, 25 bp, Homo sapien
ggcttgcgggcaaagatgatcttgt

SEQ ID NO: 6072727 - DNA, 25 bp, Homo sapien
aggtataggtgacataggccggcca

SEQ ID NO: 6072728 - DNA, 25 bp, Homo sapien
ccaaaatataacctggtgaaagata

SEQ ID NO: 6072729 - DNA, 25 bp, Homo sapien
gaggaattgcatagcgtagaccgga

SEQ ID NO: 6072730 - DNA, 25 bp, Homo sapien
gagtgcttgttcgatattcagtgct

SEQ ID NO: 6072731 - DNA, 25 bp, Homo sapien
tgcccaattgacttcctccttgagt

SEQ ID NO: 6072732 - DNA, 25 bp, Homo sapien
gaagttaaaccaattgatcattatg

SEQ ID NO: 6072733 - DNA, 25 bp, Homo sapien
cgtagaccggatgaagaatcggaaa

SEQ ID NO: 6072734 - DNA, 25 bp, Homo sapien
ggaaatgagcagaaataagatctat

SEQ ID NO: 6072735 - DNA, 25 bp, Homo sapien
aggcaggcctcagacattcacccta

SEQ ID NO: 6072736 - DNA, 25 bp, Homo sapien
tagcagatgcccaattgacttcctc

SEQ ID NO: 6072737 - DNA, 25 bp, Homo sapien
gagttcattctattagcagatgccc

SEQ ID NO: 6072738 - DNA, 25 bp, Homo sapien
caaggccaatttcgctcaaaatgga

SEQ ID NO: 6072739 - DNA, 25 bp, Homo sapien
tttatcagcgaaaaatacacaaaac

SEQ ID NO: 6072740 - DNA, 25 bp, Homo sapien
tccggcccctagtctcatgggatag

SEQ ID NO: 6072741 - DNA, 25 bp, Homo sapien
cagtttgcttattgggtggaggccc

SEQ ID NO: 6072742 - DNA, 25 bp, Homo sapien
tgcccttacacacgcaagaatatct

SEQ ID NO: 6072743 - DNA, 25 bp, Homo sapien
ttcatatttacaataggtacacaat

SEQ ID NO: 6072744 - DNA, 25 bp, Homo sapien
tgaggaatctccagtttgcttattg

SEQ ID NO: 6072745 - DNA, 25 bp, Homo sapien
gggctccggcccctagtctcatggg

SEQ ID NO: 6072746 - DNA, 25 bp, Homo sapien
catgggatagagagcttgtcccttc

SEQ ID NO: 6072747 - DNA, 25 bp, Homo sapien
tataatacagattccagtgtgtcaa

SEQ ID NO: 6072748 - DNA, 25 bp, Homo sapien
cctcagcttgcaaaataggagtgtt

SEQ ID NO: 6072749 - DNA, 25 bp, Homo sapien
agaagaatgagatgtgggtgtccac

SEQ ID NO: 6072750 - DNA, 25 bp, Homo sapien
cagattccagtgtgtcaagaggagt

SEQ ID NO: 6072751 - DNA, 25 bp, Homo sapien
tgtgtcctcagcttgcaaaatagga

SEQ ID NO: 6072752 - DNA, 25 bp, Homo sapien
gaattatgcgaagtatcattggcct

SEQ ID NO: 6072753 - DNA, 25 bp, Homo sapien
cactcgtagatctggctattaaatg

SEQ ID NO: 6072754 - DNA, 25 bp, Homo sapien
ttccttcaatgacgagtgcagacaa

SEQ ID NO: 6072755 - DNA, 25 bp, Homo sapien
tactagcagtaactttgtcaacaga

SEQ ID NO: 6072756 - DNA, 25 bp, Homo sapien
tcacagacctctaagggattcacgg

SEQ ID NO: 6072757 - DNA, 25 bp, Homo sapien
ttcgtttcccttgtaaccccatgca

SEQ ID NO: 6072758 - DNA, 25 bp, Homo sapien
taaatgcacacctataactaccaca

SEQ ID NO: 6072759 - DNA, 25 bp, Homo sapien
ggattcacggatagaattcagaaga

SEQ ID NO: 6072760 - DNA, 25 bp, Homo sapien
tcagaagatacatgaacttggatgg

SEQ ID NO: 6072761 - DNA, 25 bp, Homo sapien
gagtgcagacaacaatccacagttg

SEQ ID NO: 6072762 - DNA, 25 bp, Homo sapien
gaaacattggtggatctgattagct

SEQ ID NO: 6072763 - DNA, 25 bp, Homo sapien
catcacagttgttgcagatatctaa

SEQ ID NO: 6072764 - DNA, 25 bp, Homo sapien
tgtagtcacacacacccttgggagg

SEQ ID NO: 6072765 - DNA, 25 bp, Homo sapien
taattttctatcagatgagagggcc

SEQ ID NO: 6072766 - DNA, 25 bp, Homo sapien
taaattggccctcaggaaatggctc

SEQ ID NO: 6072767 - DNA, 25 bp, Homo sapien
tattaagctcctggtaaaccctgaa

SEQ ID NO: 6072768 - DNA, 25 bp, Homo sapien
aaattctccggttccaagacgatgc

SEQ ID NO: 6072769 - DNA, 25 bp, Homo sapien
gagtcacacgagtattaaattggcc

SEQ ID NO: 6072770 - DNA, 25 bp, Homo sapien
tggtgccatggcactccaacctggg

SEQ ID NO: 6072771 - DNA, 25 bp, Homo sapien
cagaggaaatttaaggcagatggta

SEQ ID NO: 6072772 - DNA, 25 bp, Homo sapien
tataatcctaggactttaggaggct

SEQ ID NO: 6072773 - DNA, 25 bp, Homo sapien
aagacgatgccttgctatgtagcca

SEQ ID NO: 6072774 - DNA, 25 bp, Homo sapien
ctatcagatgagagggccaggcaca

SEQ ID NO: 6072775 - DNA, 25 bp, Homo sapien
gatcacttgaatccaggaattcgag

SEQ ID NO: 6072776 - DNA, 25 bp, Homo sapien
gtgcaagggtgagaggtgaggagag

SEQ ID NO: 6072777 - DNA, 25 bp, Homo sapien
tggacgccggctgtgcaagggtgag

SEQ ID NO: 6072778 - DNA, 25 bp, Homo sapien
actcttggaagatggcctggccgct

SEQ ID NO: 6072779 - DNA, 25 bp, Homo sapien
cttgtgtataaggactcttggaaga

SEQ ID NO: 6072780 - DNA, 25 bp, Homo sapien
gtggagtctgggtcatcacaatatc

SEQ ID NO: 6072781 - DNA, 25 bp, Homo sapien
cagggtgtacgacgctctgactaga

SEQ ID NO: 6072782 - DNA, 25 bp, Homo sapien
tttcagtgtgaaatctgtccctggg

SEQ ID NO: 6072783 - DNA, 25 bp, Homo sapien
acaactaggtgtttccatcagggtg

SEQ ID NO: 6072784 - DNA, 25 bp, Homo sapien
gactagacctgcaggagatggacgc

SEQ ID NO: 6072785 - DNA, 25 bp, Homo sapien
tccatcacaactaggtgtttccatc

SEQ ID NO: 6072786 - DNA, 25 bp, Homo sapien
gctgattttcagtgtgaaatctgtc

SEQ ID NO: 6072787 - DNA, 25 bp, Homo sapien
ataaggactcttggaagatggcctg

SEQ ID NO: 6072788 - DNA, 25 bp, Homo sapien
cgctctgactagacctgcaggagat

SEQ ID NO: 6072789 - DNA, 25 bp, Homo sapien
cccgacatcccccgcttccagcctg

SEQ ID NO: 6072790 - DNA, 25 bp, Homo sapien
gtacgacgctctgactagacctgca

SEQ ID NO: 6072791 - DNA, 25 bp, Homo sapien
aggtgtttccatcagggtgtacgac

SEQ ID NO: 6072792 - DNA, 25 bp, Homo sapien
tgtattaatgaaccccgacatcccc

SEQ ID NO: 6072793 - DNA, 25 bp, Homo sapien
ccggctgtgcaagggtgagaggtga

SEQ ID NO: 6072794 - DNA, 25 bp, Homo sapien
ctcgcatgtattaatgaaccccgac

SEQ ID NO: 6072795 - DNA, 25 bp, Homo sapien
gctgagtccatcacaactaggtgtt

SEQ ID NO: 6072796 - DNA, 25 bp, Homo sapien
aggagatggacgccggctgtgcaag

SEQ ID NO: 6072797 - DNA, 25 bp, Homo sapien
cgcttccagcctgctgattttcagt

SEQ ID NO: 6072798 - DNA, 25 bp, Homo sapien
gaggtgaggagagtggagtctgggt

SEQ ID NO: 6072799 - DNA, 25 bp, Homo sapien
acggttacaaatcttgtgtataagg

SEQ ID NO: 6072800 - DNA, 25 bp, Homo sapien
acctgcaggagatggacgccggctg

SEQ ID NO: 6072801 - DNA, 25 bp, Homo sapien
tccaaggaaattgtgtatctcgcat

SEQ ID NO: 6072802 - DNA, 25 bp, Homo sapien
cagcctgctgattttcagtgtgaaa

SEQ ID NO: 6072803 - DNA, 25 bp, Homo sapien
ttccatcagggtgtacgacgctctg

SEQ ID NO: 6072804 - DNA, 25 bp, Homo sapien
ggcctggccgctgctgagtccatca

SEQ ID NO: 6072805 - DNA, 25 bp, Homo sapien
aggagagtggagtctgggtcatcac

SEQ ID NO: 6072806 - DNA, 25 bp, Homo sapien
aaagcaacggttacaaatcttgtgt

SEQ ID NO: 6072807 - DNA, 25 bp, Homo sapien
atcccccgcttccagcctgctgatt

SEQ ID NO: 6072808 - DNA, 25 bp, Homo sapien
ggaagatggcctggccgctgctgag

SEQ ID NO: 6072809 - DNA, 25 bp, Homo sapien
tgaaccccgacatcccccgcttcca

SEQ ID NO: 6072810 - DNA, 25 bp, Homo sapien
tgtgaaatctgtccctgggcccccg

SEQ ID NO: 6072811 - DNA, 25 bp, Homo sapien
acaaatcttgtgtataaggactctt

SEQ ID NO: 6072812 - DNA, 25 bp, Homo sapien
gccgctgctgagtccatcacaacta

SEQ ID NO: 6072813 - DNA, 25 bp, Homo sapien
tctgtccctgggcccccgccgctaa

SEQ ID NO: 6072814 - DNA, 25 bp, Homo sapien
gaaattgtgtatctcgcatgtatta

SEQ ID NO: 6072815 - DNA, 25 bp, Homo sapien
gtgtatctcgcatgtattaatgaac

SEQ ID NO: 6072816 - DNA, 25 bp, Homo sapien
gggtgagaggtgaggagagtggagt

SEQ ID NO: 6072817 - DNA, 25 bp, Homo sapien
tattacaggcggtctttattttggc

SEQ ID NO: 6072818 - DNA, 25 bp, Homo sapien
taagaacaaacacaaggcttatggt

SEQ ID NO: 6072819 - DNA, 25 bp, Homo sapien
gcttctttatgcaacctaacaaaat

SEQ ID NO: 6072820 - DNA, 25 bp, Homo sapien
tactttccattgatagcagtgctag

SEQ ID NO: 6072821 - DNA, 25 bp, Homo sapien
tagcagtgctagtccctagaacaaa

SEQ ID NO: 6072822 - DNA, 25 bp, Homo sapien
tacaaataagaacaaacacaaggct

SEQ ID NO: 6072823 - DNA, 25 bp, Homo sapien
cacaaccaaactaaactgtacttca

SEQ ID NO: 6072824 - DNA, 25 bp, Homo sapien
gaaaaatatgaacctttctgaatct

SEQ ID NO: 6072825 - DNA, 25 bp, Homo sapien
tgttctgtgtacatgtcaatgtagg

SEQ ID NO: 6072826 - DNA, 25 bp, Homo sapien
taaacgggcatagactcatttgcag

SEQ ID NO: 6072827 - DNA, 25 bp, Homo sapien
gcttatggtacttgttaggtaaaca

SEQ ID NO: 6072828 - DNA, 25 bp, Homo sapien
ttctaacagattattacaggcggtc

SEQ ID NO: 6072829 - DNA, 25 bp, Homo sapien
caggcagtgactactgtgattttgt

SEQ ID NO: 6072830 - DNA, 25 bp, Homo sapien
aaacagcttttcattaggatgcatg

SEQ ID NO: 6072831 - DNA, 25 bp, Homo sapien
cttgcacttgcaggcagtgactact

SEQ ID NO: 6072832 - DNA, 25 bp, Homo sapien
gcttggcaggtgacatgctctcaaa

SEQ ID NO: 6072833 - DNA, 25 bp, Homo sapien
gatccagtccagtgttactgaaatg

SEQ ID NO: 6072834 - DNA, 25 bp, Homo sapien
tgggtacgggttttgtcattgacac

SEQ ID NO: 6072835 - DNA, 25 bp, Homo sapien
gattctctgggtacgggttttgtca

SEQ ID NO: 6072836 - DNA, 25 bp, Homo sapien
ggttttgtcattgacacaccgccac

SEQ ID NO: 6072837 - DNA, 25 bp, Homo sapien
tgctctcaaagttgtgactggactc

SEQ ID NO: 6072838 - DNA, 25 bp, Homo sapien
gttccgatccagtccagtgttactg

SEQ ID NO: 6072839 - DNA, 25 bp, Homo sapien
tctgtgatgctggactggcttggca

SEQ ID NO: 6072840 - DNA, 25 bp, Homo sapien
cttttcattaggatgcatgcaaggg

SEQ ID NO: 6072841 - DNA, 25 bp, Homo sapien
tactatgatggttttagccatcccc

SEQ ID NO: 6072842 - DNA, 25 bp, Homo sapien
tgctcaccgttcatattcagaggct

SEQ ID NO: 6072843 - DNA, 25 bp, Homo sapien
gggtagggtcctatgctactgttgc

SEQ ID NO: 6072844 - DNA, 25 bp, Homo sapien
tcagaatgtctttgacttggcccag

SEQ ID NO: 6072845 - DNA, 25 bp, Homo sapien
ccttcattccctgagtagttctcac

SEQ ID NO: 6072846 - DNA, 25 bp, Homo sapien
gctgacagccacaatgctcaccgtt

SEQ ID NO: 6072847 - DNA, 25 bp, Homo sapien
ttcagtctgaaatacggaggctggt

SEQ ID NO: 6072848 - DNA, 25 bp, Homo sapien
tgttgcactctccacaacttaagag

SEQ ID NO: 6072849 - DNA, 25 bp, Homo sapien
caaaacagtctcaagtatgtgcaca

SEQ ID NO: 6072850 - DNA, 25 bp, Homo sapien
gacatttcccttcgttgcttcctgc

SEQ ID NO: 6072851 - DNA, 25 bp, Homo sapien
gagtagttctcaccacttactattc

SEQ ID NO: 6072852 - DNA, 25 bp, Homo sapien
gtagcacctcttattattctgacac

SEQ ID NO: 6072853 - DNA, 25 bp, Homo sapien
tcatgtgcagttagaatcctcttgg

SEQ ID NO: 6072854 - DNA, 25 bp, Homo sapien
gctggatccatccaagcatggacag

SEQ ID NO: 6072855 - DNA, 25 bp, Homo sapien
gagaggtggacgacgaccagaaaat

SEQ ID NO: 6072856 - DNA, 25 bp, Homo sapien
gaagacccctcgcttcgaggacagg

SEQ ID NO: 6072857 - DNA, 25 bp, Homo sapien
tcctcttggaagactagtaggatgt

SEQ ID NO: 6072858 - DNA, 25 bp, Homo sapien
tacataaaatgcagcgcttcgccga

SEQ ID NO: 6072859 - DNA, 25 bp, Homo sapien
gcagcccggcagaaaattacataaa

SEQ ID NO: 6072860 - DNA, 25 bp, Homo sapien
tcatttcacggaccggtcgtctggg

SEQ ID NO: 6072861 - DNA, 25 bp, Homo sapien
gaagccggaaactagggagtcatgt

SEQ ID NO: 6072862 - DNA, 25 bp, Homo sapien
cgggtcgctcggaagggtcatttca

SEQ ID NO: 6072863 - DNA, 25 bp, Homo sapien
tttaaagtgaggattggctcgccgc

SEQ ID NO: 6072864 - DNA, 25 bp, Homo sapien
tccaagcatggacaggaaaacggga

SEQ ID NO: 6072865 - DNA, 25 bp, Homo sapien
tgcggtgacgcccattgaaaggtat

SEQ ID NO: 6072866 - DNA, 25 bp, Homo sapien
gactgcacactagctggattatcac

SEQ ID NO: 6072867 - DNA, 25 bp, Homo sapien
cagcgtgtggatggatcagagcccc

SEQ ID NO: 6072868 - DNA, 25 bp, Homo sapien
gtgaccgcagcaaagcgcagcgtgt

SEQ ID NO: 6072869 - DNA, 25 bp, Homo sapien
ggattatcactcagccgtttaagaa

SEQ ID NO: 6072870 - DNA, 25 bp, Homo sapien
gcactttacagataccttggaatgt

SEQ ID NO: 6072871 - DNA, 25 bp, Homo sapien
cgtgaattgtgtcggccctcagcat

SEQ ID NO: 6072872 - DNA, 25 bp, Homo sapien
caaatgcatcgtatgtccccttgga

SEQ ID NO: 6072873 - DNA, 25 bp, Homo sapien
caaaaccatcacgtgactgagaccg

SEQ ID NO: 6072874 - DNA, 25 bp, Homo sapien
ctcagaaggtttgcagtttgtaaaa

SEQ ID NO: 6072875 - DNA, 25 bp, Homo sapien
aaatatgatgaatctgttccgtgaa

SEQ ID NO: 6072876 - DNA, 25 bp, Homo sapien
ccccttggagacgtttttatgcagc

SEQ ID NO: 6072877 - DNA, 25 bp, Homo sapien
gcagcagcaactgcgagtaaattaa

SEQ ID NO: 6072878 - DNA, 25 bp, Homo sapien
cactgtgatgttgaacaaaactctc

SEQ ID NO: 6072879 - DNA, 25 bp, Homo sapien
aatggcaacactaggcagctgaatc

SEQ ID NO: 6072880 - DNA, 25 bp, Homo sapien
tagacaggataaacaactcatggag

SEQ ID NO: 6072881 - DNA, 25 bp, Homo sapien
ggagagttgtgagatcttgttttca

SEQ ID NO: 6072882 - DNA, 25 bp, Homo sapien
taggcagctgaatcctttcagagca

SEQ ID NO: 6072883 - DNA, 25 bp, Homo sapien
tagcgaggcaccaatttagcattaa

SEQ ID NO: 6072884 - DNA, 25 bp, Homo sapien
catctcccactggattagcaactgt

SEQ ID NO: 6072885 - DNA, 25 bp, Homo sapien
tgtatctgatgttagcgaggcacca

SEQ ID NO: 6072886 - DNA, 25 bp, Homo sapien
tggtgattcttctatgccttgattc

SEQ ID NO: 6072887 - DNA, 25 bp, Homo sapien
gatatattttcaactaacagggaga

SEQ ID NO: 6072888 - DNA, 25 bp, Homo sapien
tctgatttccctaggcactctcact

SEQ ID NO: 6072889 - DNA, 25 bp, Homo sapien
taaacatcgtcttctgcaatgtcct

SEQ ID NO: 6072890 - DNA, 25 bp, Homo sapien
tatatcctctaggtgaatcacagga

SEQ ID NO: 6072891 - DNA, 25 bp, Homo sapien
tcagatggtggcatagtagtctcgg

SEQ ID NO: 6072892 - DNA, 25 bp, Homo sapien
tagtctcgggagtagtggcctcaga

SEQ ID NO: 6072893 - DNA, 25 bp, Homo sapien
caggaaatgctggtcgtcgagtata

SEQ ID NO: 6072894 - DNA, 25 bp, Homo sapien
tagcaacccacagataatgaaggtc

SEQ ID NO: 6072895 - DNA, 25 bp, Homo sapien
catagtctcggaagtagcagtctca

SEQ ID NO: 6072896 - DNA, 25 bp, Homo sapien
cagatcattcaacatagatactggg

SEQ ID NO: 6072897 - DNA, 25 bp, Homo sapien
gcagcatgatagcttgttcctacaa

SEQ ID NO: 6072898 - DNA, 25 bp, Homo sapien
ggtctcaggtgtcatggtttctcca

SEQ ID NO: 6072899 - DNA, 25 bp, Homo sapien
tagtctcaggagtattggtctcagg

SEQ ID NO: 6072900 - DNA, 25 bp, Homo sapien
tttggtcacccgagttagcaaccca

SEQ ID NO: 6072901 - DNA, 25 bp, Homo sapien
attttactaccaggtttcatctgaa

SEQ ID NO: 6072902 - DNA, 25 bp, Homo sapien
gccaggaatcgcttaatggtgaaag

SEQ ID NO: 6072903 - DNA, 25 bp, Homo sapien
ttggccaggaatcgcttaatggtga

SEQ ID NO: 6072904 - DNA, 25 bp, Homo sapien
tgattttactaccaggtttcatctg

SEQ ID NO: 6072905 - DNA, 25 bp, Homo sapien
tactaccaggtttcatctgaatcca

SEQ ID NO: 6072906 - DNA, 25 bp, Homo sapien
tacctgattttactaccaggtttca

SEQ ID NO: 6072907 - DNA, 25 bp, Homo sapien
ctgattttactaccaggtttcatct

SEQ ID NO: 6072908 - DNA, 25 bp, Homo sapien
gattttactaccaggtttcatctga

SEQ ID NO: 6072909 - DNA, 25 bp, Homo sapien
ccaggaatcgcttaatggtgaaagt

SEQ ID NO: 6072910 - DNA, 25 bp, Homo sapien
gaatcgcttaatggtgaaagtcttg

SEQ ID NO: 6072911 - DNA, 25 bp, Homo sapien
tcgcttaatggtgaaagtcttgtga

SEQ ID NO: 6072912 - DNA, 25 bp, Homo sapien
cgcttaatggtgaaagtcttgtgag

SEQ ID NO: 6072913 - DNA, 25 bp, Homo sapien
gtggccacacgatagcccacagtgc

SEQ ID NO: 6072914 - DNA, 25 bp, Homo sapien
tcgcagtcatgaaaagtggccacac

SEQ ID NO: 6072915 - DNA, 25 bp, Homo sapien
agcccaggatcgctagtccccaaag

SEQ ID NO: 6072916 - DNA, 25 bp, Homo sapien
gaggaagggctgtccgcacaggaat

SEQ ID NO: 6072917 - DNA, 25 bp, Homo sapien
ctgcgggctaagtcggctcgggcct

SEQ ID NO: 6072918 - DNA, 25 bp, Homo sapien
gcggcgtcctcgcagtcatgaaaag

SEQ ID NO: 6072919 - DNA, 25 bp, Homo sapien
agccggcggacaccagcaagtaggc

SEQ ID NO: 6072920 - DNA, 25 bp, Homo sapien
tgaaaagtggccacacgatagccca

SEQ ID NO: 6072921 - DNA, 25 bp, Homo sapien
aggtggagcccaggatcgctagtcc

SEQ ID NO: 6072922 - DNA, 25 bp, Homo sapien
gcgtcctcgcagtcatgaaaagtgg

SEQ ID NO: 6072923 - DNA, 25 bp, Homo sapien
tctggctctgcagctcgcgtgcggc

SEQ ID NO: 6072924 - DNA, 25 bp, Homo sapien
cccagggcatagcagccggcggaca

SEQ ID NO: 6072925 - DNA, 25 bp, Homo sapien
gggcatcgtactggtccaggaactc

SEQ ID NO: 6072926 - DNA, 25 bp, Homo sapien
cttccgacagagatgctgaagagtg

SEQ ID NO: 6072927 - DNA, 25 bp, Homo sapien
gccgttgacggtcttccgacagaga

SEQ ID NO: 6072928 - DNA, 25 bp, Homo sapien
cctcacactggatgcgcaggttctt

SEQ ID NO: 6072929 - DNA, 25 bp, Homo sapien
ccggcagctgggtgactttctcata

SEQ ID NO: 6072930 - DNA, 25 bp, Homo sapien
tggtcccagactgggtcttgacgct

SEQ ID NO: 6072931 - DNA, 25 bp, Homo sapien
ccagcttgagcacgcagtcgaagcg

SEQ ID NO: 6072932 - DNA, 25 bp, Homo sapien
ggtcactgcgctccagtagaagccg

SEQ ID NO: 6072933 - DNA, 25 bp, Homo sapien
ccccggagtagatgtaataggctct

SEQ ID NO: 6072934 - DNA, 25 bp, Homo sapien
gtagaagccgctctcctgcagcttg

SEQ ID NO: 6072935 - DNA, 25 bp, Homo sapien
gatgcgcaggttcttggtcccagac

SEQ ID NO: 6072936 - DNA, 25 bp, Homo sapien
tccaggtggccgttgacggtcttcc

SEQ ID NO: 6072937 - DNA, 25 bp, Homo sapien
tggagcatctgtaacggcatttgcc

SEQ ID NO: 6072938 - DNA, 25 bp, Homo sapien
tttgccataaagattccagcatctt

SEQ ID NO: 6072939 - DNA, 25 bp, Homo sapien
tcttggagcatctgtaacggcattt

SEQ ID NO: 6072940 - DNA, 25 bp, Homo sapien
gtgggaatccactgggagcttcatc

SEQ ID NO: 6072941 - DNA, 25 bp, Homo sapien
gggcttcacgcagcacattttatta

SEQ ID NO: 6072942 - DNA, 25 bp, Homo sapien
gtacttgggcttcacgcagcacatt

SEQ ID NO: 6072943 - DNA, 25 bp, Homo sapien
tccttcttggagcatctgtaacggc

SEQ ID NO: 6072944 - DNA, 25 bp, Homo sapien
catctgtaacggcatttgccataaa

SEQ ID NO: 6072945 - DNA, 25 bp, Homo sapien
tacttgggcttcacgcagcacattt

SEQ ID NO: 6072946 - DNA, 25 bp, Homo sapien
gctaaggcagcccaaaatgaagctg

SEQ ID NO: 6072947 - DNA, 25 bp, Homo sapien
ccttcttggagcatctgtaacggca

SEQ ID NO: 6072948 - DNA, 25 bp, Homo sapien
gagcatctgtaacggcatttgccat

SEQ ID NO: 6072949 - DNA, 25 bp, Homo sapien
gagctaagactaaggagaggatcat

SEQ ID NO: 6072950 - DNA, 25 bp, Homo sapien
gtggatgggccgagctcccagccaa

SEQ ID NO: 6072951 - DNA, 25 bp, Homo sapien
tagagggcgaggagttgtcccattt

SEQ ID NO: 6072952 - DNA, 25 bp, Homo sapien
gagggcgaggagttgtcccatttat

SEQ ID NO: 6072953 - DNA, 25 bp, Homo sapien
gagccccatgagctaagactaagga

SEQ ID NO: 6072954 - DNA, 25 bp, Homo sapien
gaaaggacaagtacctttgtataga

SEQ ID NO: 6072955 - DNA, 25 bp, Homo sapien
tataaagagccccatgagctaagac

SEQ ID NO: 6072956 - DNA, 25 bp, Homo sapien
gaaatatacaccactgaacaccgag

SEQ ID NO: 6072957 - DNA, 25 bp, Homo sapien
taccccaagaggtggatgggccgag

SEQ ID NO: 6072958 - DNA, 25 bp, Homo sapien
tacaccactgaacaccgagcacatg

SEQ ID NO: 6072959 - DNA, 25 bp, Homo sapien
actccttataaagagccccatgagc

SEQ ID NO: 6072960 - DNA, 25 bp, Homo sapien
cacggtctatattacatgtgcttca

SEQ ID NO: 6072961 - DNA, 25 bp, Homo sapien
tggggagtcggtggtccttcttcca

SEQ ID NO: 6072962 - DNA, 25 bp, Homo sapien
tggtaatgtcctctgcccgttgctg

SEQ ID NO: 6072963 - DNA, 25 bp, Homo sapien
tcacatgcttaaaagggtccttaac

SEQ ID NO: 6072964 - DNA, 25 bp, Homo sapien
cagcaggtaccatgctaagacaaca

SEQ ID NO: 6072965 - DNA, 25 bp, Homo sapien
aataagagtcaatttgtgtgtgagg

SEQ ID NO: 6072966 - DNA, 25 bp, Homo sapien
gggcgatctcgatccttctccttcg

SEQ ID NO: 6072967 - DNA, 25 bp, Homo sapien
tagctgccgaaagggtgctgggcgc

SEQ ID NO: 6072968 - DNA, 25 bp, Homo sapien
cagcgagtgggcgatctcgatcctt

SEQ ID NO: 6072969 - DNA, 25 bp, Homo sapien
caacatcacatgcttaaaagggtcc

SEQ ID NO: 6072970 - DNA, 25 bp, Homo sapien
tataacctggtaatgtcctctgccc

SEQ ID NO: 6072971 - DNA, 25 bp, Homo sapien
ggtaccatgctaagacaacatcaca

SEQ ID NO: 6072972 - DNA, 25 bp, Homo sapien
ctccggcggcgtggcgctctgggag

SEQ ID NO: 6072973 - DNA, 25 bp, Homo sapien
gcgtgtccgtactagtgctttctgg

SEQ ID NO: 6072974 - DNA, 25 bp, Homo sapien
tcatttgctagataagagctacggc

SEQ ID NO: 6072975 - DNA, 25 bp, Homo sapien
ggctctagaggtacacttgcctggt

SEQ ID NO: 6072976 - DNA, 25 bp, Homo sapien
gattccactgtcaaacccaacattg

SEQ ID NO: 6072977 - DNA, 25 bp, Homo sapien
tatgaccacgatttcaaagtctgcg

SEQ ID NO: 6072978 - DNA, 25 bp, Homo sapien
gagggatatactccccttcagaagt

SEQ ID NO: 6072979 - DNA, 25 bp, Homo sapien
tgctaagtctctggcactacaaagg

SEQ ID NO: 6072980 - DNA, 25 bp, Homo sapien
caaagtctgcgttgtcaatgtcctg

SEQ ID NO: 6072981 - DNA, 25 bp, Homo sapien
gatgtctatttgatccagagggata

SEQ ID NO: 6072982 - DNA, 25 bp, Homo sapien
taagagctacggcactgtgtcgtca

SEQ ID NO: 6072983 - DNA, 25 bp, Homo sapien
cagaaatatacgatcgattccactg

SEQ ID NO: 6072984 - DNA, 25 bp, Homo sapien
tctttgcttgtgagggcaacttcat

SEQ ID NO: 6072985 - DNA, 25 bp, Homo sapien
tccaggtggccgttgacggtcttcc

SEQ ID NO: 6072986 - DNA, 25 bp, Homo sapien
gagctgaaggtcttgaggcgcaggc

SEQ ID NO: 6072987 - DNA, 25 bp, Homo sapien
tggtcccagactgggtcttgacgct

SEQ ID NO: 6072988 - DNA, 25 bp, Homo sapien
tgcagcttgcgcactgcgttcacca

SEQ ID NO: 6072989 - DNA, 25 bp, Homo sapien
cctcacactggatgcgcaggttctt

SEQ ID NO: 6072990 - DNA, 25 bp, Homo sapien
ccccggagtagatgtaataggctct

SEQ ID NO: 6072991 - DNA, 25 bp, Homo sapien
ggtcactgcgctccagtagaagccg

SEQ ID NO: 6072992 - DNA, 25 bp, Homo sapien
ccagcttgagcacgcagtcgaagcg

SEQ ID NO: 6072993 - DNA, 25 bp, Homo sapien
ccggcagctgggtgactttctcata

SEQ ID NO: 6072994 - DNA, 25 bp, Homo sapien
gtagaagccgctctcctgcagcttg

SEQ ID NO: 6072995 - DNA, 25 bp, Homo sapien
gatgcgcaggttcttggtcccagac

SEQ ID NO: 6072996 - DNA, 25 bp, Homo sapien
gacggtcttccgacagagatgctga

SEQ ID NO: 6072997 - DNA, 25 bp, Homo sapien
caaggacaaactatccaaacatctt

SEQ ID NO: 6072998 - DNA, 25 bp, Homo sapien
aggatttccaaccttgttatgtata

SEQ ID NO: 6072999 - DNA, 25 bp, Homo sapien
cagccataggtttattagtatttgt

SEQ ID NO: 6073000 - DNA, 25 bp, Homo sapien
caaccttgttatgtatatcgtcatc

SEQ ID NO: 6073001 - DNA, 25 bp, Homo sapien
aatattttctacagccataggttta

SEQ ID NO: 6073002 - DNA, 25 bp, Homo sapien
tacattgttaaaggcatatttattg

SEQ ID NO: 6073003 - DNA, 25 bp, Homo sapien
tagggtggaactatccagaaattag

SEQ ID NO: 6073004 - DNA, 25 bp, Homo sapien
ttaggttacctagaacaaggactgc

SEQ ID NO: 6073005 - DNA, 25 bp, Homo sapien
tgctgtattttaagttagggtggaa

SEQ ID NO: 6073006 - DNA, 25 bp, Homo sapien
taagttagggtggaactatccagaa

SEQ ID NO: 6073007 - DNA, 25 bp, Homo sapien
caaggactgctggtaaaggaagaac

SEQ ID NO: 6073008 - DNA, 25 bp, Homo sapien
actgataccaactgatttgctgtat

SEQ ID NO: 6073009 - DNA, 25 bp, Homo sapien
cgtctggaacccagggactgccttg

SEQ ID NO: 6073010 - DNA, 25 bp, Homo sapien
cacataggccgtgagaatgcacatg

SEQ ID NO: 6073011 - DNA, 25 bp, Homo sapien
gaagaagtcacgaacgatggtgaaa

SEQ ID NO: 6073012 - DNA, 25 bp, Homo sapien
cacgaacgatggtgaaaccgtagaa

SEQ ID NO: 6073013 - DNA, 25 bp, Homo sapien
gcttgcgaatctgctccgtctggaa

SEQ ID NO: 6073014 - DNA, 25 bp, Homo sapien
tggtgttgttcttgaccgtcacgaa

SEQ ID NO: 6073015 - DNA, 25 bp, Homo sapien
tcttgaccgtcacgaagcacacggt

SEQ ID NO: 6073016 - DNA, 25 bp, Homo sapien
tgttgcaaagtaagccgatgggatg

SEQ ID NO: 6073017 - DNA, 25 bp, Homo sapien
cacgaactcgacaccaaagatgaag

SEQ ID NO: 6073018 - DNA, 25 bp, Homo sapien
cagcacagcacataggccgtgagaa

SEQ ID NO: 6073019 - DNA, 25 bp, Homo sapien
taagccgatgggatggcaatgagaa

SEQ ID NO: 6073020 - DNA, 25 bp, Homo sapien
ggcaccccgttggttctgaggtcaa

SEQ ID NO: 6073021 - DNA, 25 bp, Homo sapien
ttgcaggggcagcagcgggtcacca

SEQ ID NO: 6073022 - DNA, 25 bp, Homo sapien
atgagggcgacctgcagggcgctga

SEQ ID NO: 6073023 - DNA, 25 bp, Homo sapien
cggccagcaccatgccccctgccag

SEQ ID NO: 6073024 - DNA, 25 bp, Homo sapien
tcccagggctccagagaatggagcc

SEQ ID NO: 6073025 - DNA, 25 bp, Homo sapien
ggaagcaggtgaccggaggtcagct

SEQ ID NO: 6073026 - DNA, 25 bp, Homo sapien
ggtcaccaggcggtcccagggctcc

SEQ ID NO: 6073027 - DNA, 25 bp, Homo sapien
tgccccctgccagggagagcccgaa

SEQ ID NO: 6073028 - DNA, 25 bp, Homo sapien
caggacagtaaccaggatgacgagg

SEQ ID NO: 6073029 - DNA, 25 bp, Homo sapien
gggctgcagacgttgcaggggcagc

SEQ ID NO: 6073030 - DNA, 25 bp, Homo sapien
cggaggtcagctgccgcggggaccc

SEQ ID NO: 6073031 - DNA, 25 bp, Homo sapien
caggatgacgaggagcaccagcccc

SEQ ID NO: 6073032 - DNA, 25 bp, Homo sapien
ggcggtcaccaccccgaagtgcctg

SEQ ID NO: 6073033 - DNA, 25 bp, Homo sapien
aagtgcctggccagcgggatgggca

SEQ ID NO: 6073034 - DNA, 25 bp, Homo sapien
gcaactgcccgtcacaactgctggg

SEQ ID NO: 6073035 - DNA, 25 bp, Homo sapien
tgctgggaggccaagatctcagggt

SEQ ID NO: 6073036 - DNA, 25 bp, Homo sapien
ggtgaccggaggtcagctgccgcgg

SEQ ID NO: 6073037 - DNA, 25 bp, Homo sapien
agcgggatgggcagccgcagtgcag

SEQ ID NO: 6073038 - DNA, 25 bp, Homo sapien
ctgccagggagagcccgaaggccgc

SEQ ID NO: 6073039 - DNA, 25 bp, Homo sapien
gagcaccagccccaccaggggaccc

SEQ ID NO: 6073040 - DNA, 25 bp, Homo sapien
gaggccaagatctcagggttctcgt

SEQ ID NO: 6073041 - DNA, 25 bp, Homo sapien
gcagcagcaggaatccgagcagcag

SEQ ID NO: 6073042 - DNA, 25 bp, Homo sapien
ttggtggtggccttcggggggctgc

SEQ ID NO: 6073043 - DNA, 25 bp, Homo sapien
ggacccccgacagcggccagcacca

SEQ ID NO: 6073044 - DNA, 25 bp, Homo sapien
aagtggatgagggcgacctgcaggg

SEQ ID NO: 6073045 - DNA, 25 bp, Homo sapien
gcagcaggtagaccccagccaccca

SEQ ID NO: 6073046 - DNA, 25 bp, Homo sapien
gggtggggcggtctgcgcagcaact

SEQ ID NO: 6073047 - DNA, 25 bp, Homo sapien
tgcagggcgctgagcatcctgtctg

SEQ ID NO: 6073048 - DNA, 25 bp, Homo sapien
tagcagtaggcctctttggtggtgg

SEQ ID NO: 6073049 - DNA, 25 bp, Homo sapien
gtggccttcggggggctgcagacgt

SEQ ID NO: 6073050 - DNA, 25 bp, Homo sapien
aagaagaagtggatgagggcgacct

SEQ ID NO: 6073051 - DNA, 25 bp, Homo sapien
cagccgcagtgcaggcaccaggtac

SEQ ID NO: 6073052 - DNA, 25 bp, Homo sapien
caggggacccccgacagcggccagc

SEQ ID NO: 6073053 - DNA, 25 bp, Homo sapien
ccaggccggccggcgccgctgcagg

SEQ ID NO: 6073054 - DNA, 25 bp, Homo sapien
tcagggttctcgtagcagtaggcct

SEQ ID NO: 6073055 - DNA, 25 bp, Homo sapien
cggcgccgctgcaggacagtaacca

SEQ ID NO: 6073056 - DNA, 25 bp, Homo sapien
cccaggagcgcaggcggacaggcag

SEQ ID NO: 6073057 - DNA, 25 bp, Homo sapien
tggagccagacggggagccaggccc

SEQ ID NO: 6073058 - DNA, 25 bp, Homo sapien
agcgcaggcggacaggcagccaggc

SEQ ID NO: 6073059 - DNA, 25 bp, Homo sapien
aggcaccaggtaccacagcaggatg

SEQ ID NO: 6073060 - DNA, 25 bp, Homo sapien
gcccgtcacaactgctgggaggcca

SEQ ID NO: 6073061 - DNA, 25 bp, Homo sapien
cggccggcgccgctgcaggacagta

SEQ ID NO: 6073062 - DNA, 25 bp, Homo sapien
agtaaccaggatgacgaggagcacc

SEQ ID NO: 6073063 - DNA, 25 bp, Homo sapien
cacaactgctgggaggccaagatct

SEQ ID NO: 6073064 - DNA, 25 bp, Homo sapien
cagccggggagggtggggcggtctg

SEQ ID NO: 6073065 - DNA, 25 bp, Homo sapien
gccaggcccaggagcgcaggcggac

SEQ ID NO: 6073066 - DNA, 25 bp, Homo sapien
ccaggggcagcagcaggaatccgag

SEQ ID NO: 6073067 - DNA, 25 bp, Homo sapien
gggcagcagcgggtcaccaggcggt

SEQ ID NO: 6073068 - DNA, 25 bp, Homo sapien
agcagcgggtcaccaggcggtccca

SEQ ID NO: 6073069 - DNA, 25 bp, Homo sapien
ccctccagggccctccagagccctc

SEQ ID NO: 6073070 - DNA, 25 bp, Homo sapien
cccagccacccagcggtaacgggcg

SEQ ID NO: 6073071 - DNA, 25 bp, Homo sapien
gacgaggagcaccagccccaccagg

SEQ ID NO: 6073072 - DNA, 25 bp, Homo sapien
agagccctcccagccggggagggtg

SEQ ID NO: 6073073 - DNA, 25 bp, Homo sapien
gtagaccccagccacccagcggtaa

SEQ ID NO: 6073074 - DNA, 25 bp, Homo sapien
ccagggccctccagagccctcccag

SEQ ID NO: 6073075 - DNA, 25 bp, Homo sapien
caggcggtcccagggctccagagaa

SEQ ID NO: 6073076 - DNA, 25 bp, Homo sapien
gtcaccaccccgaagtgcctggcca

SEQ ID NO: 6073077 - DNA, 25 bp, Homo sapien
tcagctgccgcggggaccccccctc

SEQ ID NO: 6073078 - DNA, 25 bp, Homo sapien
ccgaaggccgccaggggcagcagca

SEQ ID NO: 6073079 - DNA, 25 bp, Homo sapien
gcaccatgccccctgccagggagag

SEQ ID NO: 6073080 - DNA, 25 bp, Homo sapien
ggccgccaggggcagcagcaggaat

SEQ ID NO: 6073081 - DNA, 25 bp, Homo sapien
gggagccaggcccaggagcgcaggc

SEQ ID NO: 6073082 - DNA, 25 bp, Homo sapien
atgggcagccgcagtgcaggcacca

SEQ ID NO: 6073083 - DNA, 25 bp, Homo sapien
tgcgcagcaactgcccgtcacaact

SEQ ID NO: 6073084 - DNA, 25 bp, Homo sapien
taggcctctttggtggtggccttcg

SEQ ID NO: 6073085 - DNA, 25 bp, Homo sapien
aggttgaagaagaagtggatgaggg

SEQ ID NO: 6073086 - DNA, 25 bp, Homo sapien
ggagagcccgaaggccgccaggggc

SEQ ID NO: 6073087 - DNA, 25 bp, Homo sapien
aggatgccggccaggttgaagaaga

SEQ ID NO: 6073088 - DNA, 25 bp, Homo sapien
aggcagccaggccggccggcgccgc

SEQ ID NO: 6073089 - DNA, 25 bp, Homo sapien
agagaatggagccagacggggagcc

SEQ ID NO: 6073090 - DNA, 25 bp, Homo sapien
ccgctgcaggacagtaaccaggatg

SEQ ID NO: 6073091 - DNA, 25 bp, Homo sapien
cagtgcaggcaccaggtaccacagc

SEQ ID NO: 6073092 - DNA, 25 bp, Homo sapien
atccgagcagcaggtagaccccagc

SEQ ID NO: 6073093 - DNA, 25 bp, Homo sapien
ggctccagagaatggagccagacgg

SEQ ID NO: 6073094 - DNA, 25 bp, Homo sapien
caggtaccacagcaggatgccggcc

SEQ ID NO: 6073095 - DNA, 25 bp, Homo sapien
accccgaagtgcctggccagcggga

SEQ ID NO: 6073096 - DNA, 25 bp, Homo sapien
ggcggtctgcgcagcaactgcccgt

SEQ ID NO: 6073097 - DNA, 25 bp, Homo sapien
ccggccaggttgaagaagaagtgga

SEQ ID NO: 6073098 - DNA, 25 bp, Homo sapien
gcaggaatccgagcagcaggtagac

SEQ ID NO: 6073099 - DNA, 25 bp, Homo sapien
aagatctcagggttctcgtagcagt

SEQ ID NO: 6073100 - DNA, 25 bp, Homo sapien
ccctccagagccctcccagccgggg

SEQ ID NO: 6073101 - DNA, 25 bp, Homo sapien
cagacggggagccaggcccaggagc

SEQ ID NO: 6073102 - DNA, 25 bp, Homo sapien
ttcggggggctgcagacgttgcagg

SEQ ID NO: 6073103 - DNA, 25 bp, Homo sapien
ccacagcaggatgccggccaggttg

SEQ ID NO: 6073104 - DNA, 25 bp, Homo sapien
ggcggacaggcagccaggccggccg

SEQ ID NO: 6073105 - DNA, 25 bp, Homo sapien
ccgacagcggccagcaccatgcccc

SEQ ID NO: 6073106 - DNA, 25 bp, Homo sapien
ctggccagcgggatgggcagccgca

SEQ ID NO: 6073107 - DNA, 25 bp, Homo sapien
gcagacgttgcaggggcagcagcgg

SEQ ID NO: 6073108 - DNA, 25 bp, Homo sapien
cggggagggtggggcggtctgcgca

SEQ ID NO: 6073109 - DNA, 25 bp, Homo sapien
gccacccagcggtaacgggcggtca

SEQ ID NO: 6073110 - DNA, 25 bp, Homo sapien
ttctcgtagcagtaggcctctttgg

SEQ ID NO: 6073111 - DNA, 25 bp, Homo sapien
gcgacctgcagggcgctgagcatcc

SEQ ID NO: 6073112 - DNA, 25 bp, Homo sapien
ggacgtcgccccgttagcatgctgc

SEQ ID NO: 6073113 - DNA, 25 bp, Homo sapien
agcagacaacagatgcatagttggg

SEQ ID NO: 6073114 - DNA, 25 bp, Homo sapien
ttctcccagttggattaggacgtcg

SEQ ID NO: 6073115 - DNA, 25 bp, Homo sapien
cctagtcactagtttggagcaggtc

SEQ ID NO: 6073116 - DNA, 25 bp, Homo sapien
gcaggtgctctagaagagattagaa

SEQ ID NO: 6073117 - DNA, 25 bp, Homo sapien
aattctatcctagtcactagtttgg

SEQ ID NO: 6073118 - DNA, 25 bp, Homo sapien
cactagtttggagcaggtctagaag

SEQ ID NO: 6073119 - DNA, 25 bp, Homo sapien
ggatagcaggtgctctagaagagat

SEQ ID NO: 6073120 - DNA, 25 bp, Homo sapien
tcccagttggattaggacgtcgccc

SEQ ID NO: 6073121 - DNA, 25 bp, Homo sapien
ccgcagacagtgagttaggggatca

SEQ ID NO: 6073122 - DNA, 25 bp, Homo sapien
caggatagaggttgcaggctgaggg

SEQ ID NO: 6073123 - DNA, 25 bp, Homo sapien
tggatccccacatttcagtctcaga

SEQ ID NO: 6073124 - DNA, 25 bp, Homo sapien
tcacattcggcacaaaaatagcgcg

SEQ ID NO: 6073125 - DNA, 25 bp, Homo sapien
catccttgtcgtattgggagcagca

SEQ ID NO: 6073126 - DNA, 25 bp, Homo sapien
taatccacaatgacacgtggccttt

SEQ ID NO: 6073127 - DNA, 25 bp, Homo sapien
tgtcttttgcgctcagatggataag

SEQ ID NO: 6073128 - DNA, 25 bp, Homo sapien
aaatagcgcgtttctttccggatct

SEQ ID NO: 6073129 - DNA, 25 bp, Homo sapien
ggacgacctcgaagatgttgctgcc

SEQ ID NO: 6073130 - DNA, 25 bp, Homo sapien
ggtgtgacatcatcggagcaaggac

SEQ ID NO: 6073131 - DNA, 25 bp, Homo sapien
gcacggaacaacacaaagcggaaca

SEQ ID NO: 6073132 - DNA, 25 bp, Homo sapien
tttcccggacgttgctggtatgctc

SEQ ID NO: 6073133 - DNA, 25 bp, Homo sapien
taagcatttgatcagccgagtccac

SEQ ID NO: 6073134 - DNA, 25 bp, Homo sapien
tccttgccgtcacaccatttcagtg

SEQ ID NO: 6073135 - DNA, 25 bp, Homo sapien
tccagacagacgaagaggtgtgaca

SEQ ID NO: 6073136 - DNA, 25 bp, Homo sapien
gagtaggcgatcacctctgtcacca

SEQ ID NO: 6073137 - DNA, 25 bp, Homo sapien
ggaagagctgctagcactgccaggc

SEQ ID NO: 6073138 - DNA, 25 bp, Homo sapien
ccataacgagcagagggagaacgag

SEQ ID NO: 6073139 - DNA, 25 bp, Homo sapien
gatagccacattgtagggtgtccag

SEQ ID NO: 6073140 - DNA, 25 bp, Homo sapien
tcagagtgtggaaatgcctccagct

SEQ ID NO: 6073141 - DNA, 25 bp, Homo sapien
gatcaccgggttcatgcagcagtgg

SEQ ID NO: 6073142 - DNA, 25 bp, Homo sapien
tgtatcctctgggtaaagagcactg

SEQ ID NO: 6073143 - DNA, 25 bp, Homo sapien
aaaaatgagccggatggccttgtac

SEQ ID NO: 6073144 - DNA, 25 bp, Homo sapien
aaatgaaaaacaccgccatgatgac

SEQ ID NO: 6073145 - DNA, 25 bp, Homo sapien
tgtgtagcagatggccataacgagc

SEQ ID NO: 6073146 - DNA, 25 bp, Homo sapien
cccaggtgcatgagcaagtgcctgt

SEQ ID NO: 6073147 - DNA, 25 bp, Homo sapien
tccaacaaaggcgtagatcaccggg

SEQ ID NO: 6073148 - DNA, 25 bp, Homo sapien
tcccacaacttgtaccagcatcccc

SEQ ID NO: 6073149 - DNA, 25 bp, Homo sapien
gagcaaggtgggtctcagaggtgat

SEQ ID NO: 6073150 - DNA, 25 bp, Homo sapien
gcagtcccacaacttgtaccagcat

SEQ ID NO: 6073151 - DNA, 25 bp, Homo sapien
catgcagtcccacaacttgtaccag

SEQ ID NO: 6073152 - DNA, 25 bp, Homo sapien
cccacaacttgtaccagcatcccca

SEQ ID NO: 6073153 - DNA, 25 bp, Homo sapien
gcatgcagtcccacaacttgtacca

SEQ ID NO: 6073154 - DNA, 25 bp, Homo sapien
tgagcaaggtgggtctcagaggtga

SEQ ID NO: 6073155 - DNA, 25 bp, Homo sapien
ccacaacttgtaccagcatccccag

SEQ ID NO: 6073156 - DNA, 25 bp, Homo sapien
cacaacttgtaccagcatccccagc

SEQ ID NO: 6073157 - DNA, 25 bp, Homo sapien
tgcagtcccacaacttgtaccagca

SEQ ID NO: 6073158 - DNA, 25 bp, Homo sapien
agcaaggtgggtctcagaggtgatc

SEQ ID NO: 6073159 - DNA, 25 bp, Homo sapien
atgcagtcccacaacttgtaccagc

SEQ ID NO: 6073160 - DNA, 25 bp, Homo sapien
aaaatctcgtgccgattcggcacga

SEQ ID NO: 6073161 - DNA, 25 bp, Homo sapien
caaaaaaatctcgtgccgattcggc

SEQ ID NO: 6073162 - DNA, 25 bp, Homo sapien
aaaaaatctcgtgccgattcggcac

SEQ ID NO: 6073163 - DNA, 25 bp, Homo sapien
ccaaaaaaatctcgtgccgattcgg

SEQ ID NO: 6073164 - DNA, 25 bp, Homo sapien
aaaaaaatctcgtgccgattcggca

SEQ ID NO: 6073165 - DNA, 25 bp, Homo sapien
ttccaaaaaaatctcgtgccgattc

SEQ ID NO: 6073166 - DNA, 25 bp, Homo sapien
aaaaatctcgtgccgattcggcacg

SEQ ID NO: 6073167 - DNA, 25 bp, Homo sapien
tccaaaaaaatctcgtgccgattcg

SEQ ID NO: 6073168 - DNA, 25 bp, Homo sapien
aaagaactggcttgccttgcccgtc

SEQ ID NO: 6073169 - DNA, 25 bp, Homo sapien
ctccaaggccacaattacccaggtc

SEQ ID NO: 6073170 - DNA, 25 bp, Homo sapien
tgccttgcccgtcttcacctcctgc

SEQ ID NO: 6073171 - DNA, 25 bp, Homo sapien
caaggccacaattacccaggtctct

SEQ ID NO: 6073172 - DNA, 25 bp, Homo sapien
ccaaagaactggcttgccttgcccg

SEQ ID NO: 6073173 - DNA, 25 bp, Homo sapien
ttgccttgcccgtcttcacctcctg

SEQ ID NO: 6073174 - DNA, 25 bp, Homo sapien
aagaactggcttgccttgcccgtct

SEQ ID NO: 6073175 - DNA, 25 bp, Homo sapien
caaagaactggcttgccttgcccgt

SEQ ID NO: 6073176 - DNA, 25 bp, Homo sapien
cttgccttgcccgtcttcacctcct

SEQ ID NO: 6073177 - DNA, 25 bp, Homo sapien
aggccacaattacccaggtctctgc

SEQ ID NO: 6073178 - DNA, 25 bp, Homo sapien
aaggccacaattacccaggtctctg

SEQ ID NO: 6073179 - DNA, 25 bp, Homo sapien
gaactggtgctccttgaaccaaaga

SEQ ID NO: 6073180 - DNA, 25 bp, Homo sapien
gtgttagttatgggtgccgagcccc

SEQ ID NO: 6073181 - DNA, 25 bp, Homo sapien
cagtcagtctatgagctcttctttg

SEQ ID NO: 6073182 - DNA, 25 bp, Homo sapien
caagaatgaagagggaactggtgct

SEQ ID NO: 6073183 - DNA, 25 bp, Homo sapien
caggagcaccaagtgcagacaaacc

SEQ ID NO: 6073184 - DNA, 25 bp, Homo sapien
ccatgacactgtcactgtgatgcca

SEQ ID NO: 6073185 - DNA, 25 bp, Homo sapien
tgggcgacaaggcaaaggtcaattt

SEQ ID NO: 6073186 - DNA, 25 bp, Homo sapien
tgaaacagtcttagacccagaatgg

SEQ ID NO: 6073187 - DNA, 25 bp, Homo sapien
ctgtcactgtgatgccactgttgta

SEQ ID NO: 6073188 - DNA, 25 bp, Homo sapien
gctccttgaaccaaagattcttgga

SEQ ID NO: 6073189 - DNA, 25 bp, Homo sapien
tagacccagaatggtcatctcaccc

SEQ ID NO: 6073190 - DNA, 25 bp, Homo sapien
ctgtgatgccactgttgtaccctct

SEQ ID NO: 6073191 - DNA, 25 bp, Homo sapien
tgcccatagcctgccctaagtctga

SEQ ID NO: 6073192 - DNA, 25 bp, Homo sapien
catagcctgccctaagtctgaagtt

SEQ ID NO: 6073193 - DNA, 25 bp, Homo sapien
gcccatagcctgccctaagtctgaa

SEQ ID NO: 6073194 - DNA, 25 bp, Homo sapien
cccatagcctgccctaagtctgaag

SEQ ID NO: 6073195 - DNA, 25 bp, Homo sapien
atagcctgccctaagtctgaagttt

SEQ ID NO: 6073196 - DNA, 25 bp, Homo sapien
agtgcccatagcctgccctaagtct

SEQ ID NO: 6073197 - DNA, 25 bp, Homo sapien
gtgcccatagcctgccctaagtctg

SEQ ID NO: 6073198 - DNA, 25 bp, Homo sapien
ccatagcctgccctaagtctgaagt

SEQ ID NO: 6073199 - DNA, 25 bp, Homo sapien
tagcctgccctaagtctgaagtttc

SEQ ID NO: 6073200 - DNA, 25 bp, Homo sapien
tagggcagccattccatgtttacca

SEQ ID NO: 6073201 - DNA, 25 bp, Homo sapien
cagtagctgctgcatcccagaatga

SEQ ID NO: 6073202 - DNA, 25 bp, Homo sapien
tcttaaaagggagtatcaaggccac

SEQ ID NO: 6073203 - DNA, 25 bp, Homo sapien
tctgggccagacagaactcagttgt

SEQ ID NO: 6073204 - DNA, 25 bp, Homo sapien
acactgcagagctggttctgggcca

SEQ ID NO: 6073205 - DNA, 25 bp, Homo sapien
gctcctgtgtgacagaggtccagag

SEQ ID NO: 6073206 - DNA, 25 bp, Homo sapien
gactactcctgttatcactaggtga

SEQ ID NO: 6073207 - DNA, 25 bp, Homo sapien
cactaggtgaacagtaaagcaatct

SEQ ID NO: 6073208 - DNA, 25 bp, Homo sapien
cactgtgtgacttggctaaacctca

SEQ ID NO: 6073209 - DNA, 25 bp, Homo sapien
taccattccacgtagcatagggcag

SEQ ID NO: 6073210 - DNA, 25 bp, Homo sapien
gaatgatccttgtctgctcctgtgt

SEQ ID NO: 6073211 - DNA, 25 bp, Homo sapien
tgagccattgcacccggccagttta

SEQ ID NO: 6073212 - DNA, 25 bp, Homo sapien
ggaatcaatcctgaagggaactcgc

SEQ ID NO: 6073213 - DNA, 25 bp, Homo sapien
cctgaaggttctgttgcagagggca

SEQ ID NO: 6073214 - DNA, 25 bp, Homo sapien
aaccaggaccatgatgttatacggg

SEQ ID NO: 6073215 - DNA, 25 bp, Homo sapien
ttcgtttggtcatttgatggctggg

SEQ ID NO: 6073216 - DNA, 25 bp, Homo sapien
gactaggaccactctctttcgtttg

SEQ ID NO: 6073217 - DNA, 25 bp, Homo sapien
cagggtgactgggacacacttgtca

SEQ ID NO: 6073218 - DNA, 25 bp, Homo sapien
ttcgttgaaggttccttggccactg

SEQ ID NO: 6073219 - DNA, 25 bp, Homo sapien
caatcggaacttataggccacacat

SEQ ID NO: 6073220 - DNA, 25 bp, Homo sapien
tattgacatagcacaaccaatagcc

SEQ ID NO: 6073221 - DNA, 25 bp, Homo sapien
caccttgtgacagccattgttggtc

SEQ ID NO: 6073222 - DNA, 25 bp, Homo sapien
gggttgacagtgctattgacatagc

SEQ ID NO: 6073223 - DNA, 25 bp, Homo sapien
cgtcagcttttaccaccaatcggaa

SEQ ID NO: 6073224 - DNA, 25 bp, Homo sapien
cacttgtcacagaaggtagaaacca

SEQ ID NO: 6073225 - DNA, 25 bp, Homo sapien
tagagcaacatgcaaagcttccctg

SEQ ID NO: 6073226 - DNA, 25 bp, Homo sapien
gggctgcaggaattccgagtcttgc

SEQ ID NO: 6073227 - DNA, 25 bp, Homo sapien
ctgcaggaattccgagtcttgctct

SEQ ID NO: 6073228 - DNA, 25 bp, Homo sapien
tccctgctcagcaatcccaggttgg

SEQ ID NO: 6073229 - DNA, 25 bp, Homo sapien
ggctgcaggaattccgagtcttgct

SEQ ID NO: 6073230 - DNA, 25 bp, Homo sapien
gcaggaattccgagtcttgctctgt

SEQ ID NO: 6073231 - DNA, 25 bp, Homo sapien
caaccaccactgcaggcttctgatg

SEQ ID NO: 6073232 - DNA, 25 bp, Homo sapien
gctgcaggaattccgagtcttgctc

SEQ ID NO: 6073233 - DNA, 25 bp, Homo sapien
tgcaggaattccgagtcttgctctg

SEQ ID NO: 6073234 - DNA, 25 bp, Homo sapien
gatgctctgttttcctcctctgtct

SEQ ID NO: 6073235 - DNA, 25 bp, Homo sapien
cgggctgcaggaattccgagtcttg

SEQ ID NO: 6073236 - DNA, 25 bp, Homo sapien
caggaattccgagtcttgctctgtt

SEQ ID NO: 6073237 - DNA, 25 bp, Homo sapien
ggctggggacccccacagcaggcaa

SEQ ID NO: 6073238 - DNA, 25 bp, Homo sapien
tgcagcagctgttgaggttgcccaa

SEQ ID NO: 6073239 - DNA, 25 bp, Homo sapien
ccgggcagctggagcgggtcagcag

SEQ ID NO: 6073240 - DNA, 25 bp, Homo sapien
ccccagcgagtctttcctaaaagat

SEQ ID NO: 6073241 - DNA, 25 bp, Homo sapien
gcctgggcctcccactgagggttag

SEQ ID NO: 6073242 - DNA, 25 bp, Homo sapien
ggctcgagaggctgccgtcggagag

SEQ ID NO: 6073243 - DNA, 25 bp, Homo sapien
tcactgttcggatcttggcccgtga

SEQ ID NO: 6073244 - DNA, 25 bp, Homo sapien
tgttgatgctgctgacccgagatgg

SEQ ID NO: 6073245 - DNA, 25 bp, Homo sapien
gcgagtctttcctaaaagatgatgg

SEQ ID NO: 6073246 - DNA, 25 bp, Homo sapien
ttcaggcctgggcctcccactgagg

SEQ ID NO: 6073247 - DNA, 25 bp, Homo sapien
ggtgactcttcaggcctgggcctcc

SEQ ID NO: 6073248 - DNA, 25 bp, Homo sapien
ggccgcggtaacaggtggctgttga

SEQ ID NO: 6073249 - DNA, 25 bp, Homo sapien
cgatgacaaaggtcatcttcactgt

SEQ ID NO: 6073250 - DNA, 25 bp, Homo sapien
tccagccccctcctcccacccgcca

SEQ ID NO: 6073251 - DNA, 25 bp, Homo sapien
gcagcccccgagtggtggcagctaa

SEQ ID NO: 6073252 - DNA, 25 bp, Homo sapien
gctgttgaagcccatgtagatccag

SEQ ID NO: 6073253 - DNA, 25 bp, Homo sapien
ctttcctaaaagatgatggtctcag

SEQ ID NO: 6073254 - DNA, 25 bp, Homo sapien
cccacagcaggcaaggtgacgcagg

SEQ ID NO: 6073255 - DNA, 25 bp, Homo sapien
tcggagagccgccggcgcatcctgg

SEQ ID NO: 6073256 - DNA, 25 bp, Homo sapien
catgtagatccaggggttgcagcag

SEQ ID NO: 6073257 - DNA, 25 bp, Homo sapien
cactgagggttaggctgaggctgag

SEQ ID NO: 6073258 - DNA, 25 bp, Homo sapien
tccaagtcccttggtgactcttcag

SEQ ID NO: 6073259 - DNA, 25 bp, Homo sapien
ggcagctaaggtggaaggtgagggc

SEQ ID NO: 6073260 - DNA, 25 bp, Homo sapien
gcattcttgtcccacacggaccaca

SEQ ID NO: 6073261 - DNA, 25 bp, Homo sapien
ccttccccatctgccagctccaagt

SEQ ID NO: 6073262 - DNA, 25 bp, Homo sapien
agcgatgtaggccagcacgatgaca

SEQ ID NO: 6073263 - DNA, 25 bp, Homo sapien
gcaggggccgcggtaacaggtggct

SEQ ID NO: 6073264 - DNA, 25 bp, Homo sapien
ggcaaggtgacgcaggggccgcggt

SEQ ID NO: 6073265 - DNA, 25 bp, Homo sapien
ggctgaggctgagggtggccgggca

SEQ ID NO: 6073266 - DNA, 25 bp, Homo sapien
agaggctgccgtcggagagccgccg

SEQ ID NO: 6073267 - DNA, 25 bp, Homo sapien
aaagcatagagatggtgaaagccac

SEQ ID NO: 6073268 - DNA, 25 bp, Homo sapien
ccatctgccagctccaagtcccttg

SEQ ID NO: 6073269 - DNA, 25 bp, Homo sapien
tcagcagcgtggtgtggcggctcga

SEQ ID NO: 6073270 - DNA, 25 bp, Homo sapien
ccagcacgatgacaaaggtcatctt

SEQ ID NO: 6073271 - DNA, 25 bp, Homo sapien
tcctgggctggggacccccacagca

SEQ ID NO: 6073272 - DNA, 25 bp, Homo sapien
ggtaacaggtggctgttgaagccca

SEQ ID NO: 6073273 - DNA, 25 bp, Homo sapien
cacacggaccacatctggacactga

SEQ ID NO: 6073274 - DNA, 25 bp, Homo sapien
cagaccccagcgagtctttcctaaa

SEQ ID NO: 6073275 - DNA, 25 bp, Homo sapien
taaaagatgatggtctcagcggtgc

SEQ ID NO: 6073276 - DNA, 25 bp, Homo sapien
gtgagggcctgtcccaagtcctcca

SEQ ID NO: 6073277 - DNA, 25 bp, Homo sapien
gggttaggctgaggctgaggctgag

SEQ ID NO: 6073278 - DNA, 25 bp, Homo sapien
atgatggtctcagcggtgccttccc

SEQ ID NO: 6073279 - DNA, 25 bp, Homo sapien
gcgtggtgtggcggctcgagaggct

SEQ ID NO: 6073280 - DNA, 25 bp, Homo sapien
tggaatcttcatcaggggcattctt

SEQ ID NO: 6073281 - DNA, 25 bp, Homo sapien
gcctcccactgagggttaggctgag

SEQ ID NO: 6073282 - DNA, 25 bp, Homo sapien
ttcggatcttggcccgtgagatggt

SEQ ID NO: 6073283 - DNA, 25 bp, Homo sapien
gggttgcagcagctgttgaggttgc

SEQ ID NO: 6073284 - DNA, 25 bp, Homo sapien
agatggtgttgatgctgctgacccg

SEQ ID NO: 6073285 - DNA, 25 bp, Homo sapien
cccgtgagatggtgttgatgctgct

SEQ ID NO: 6073286 - DNA, 25 bp, Homo sapien
cccgagatggcagcccccgagtggt

SEQ ID NO: 6073287 - DNA, 25 bp, Homo sapien
caaaggtcatcttcactgttcggat

SEQ ID NO: 6073288 - DNA, 25 bp, Homo sapien
gggtggccgggcagctggagcgggt

SEQ ID NO: 6073289 - DNA, 25 bp, Homo sapien
ggtgacgcaggggccgcggtaacag

SEQ ID NO: 6073290 - DNA, 25 bp, Homo sapien
tagagatggtgaaagccacattggt

SEQ ID NO: 6073291 - DNA, 25 bp, Homo sapien
cggtgccttccccatctgccagctc

SEQ ID NO: 6073292 - DNA, 25 bp, Homo sapien
tcatcttcactgttcggatcttggc

SEQ ID NO: 6073293 - DNA, 25 bp, Homo sapien
agccgccggcgcatcctgggctggg

SEQ ID NO: 6073294 - DNA, 25 bp, Homo sapien
aagccacattggtggaatcttcatc

SEQ ID NO: 6073295 - DNA, 25 bp, Homo sapien
tgccgtcggagagccgccggcgcat

SEQ ID NO: 6073296 - DNA, 25 bp, Homo sapien
agctgttgaggttgcccaaaagcat

SEQ ID NO: 6073297 - DNA, 25 bp, Homo sapien
tctcagcggtgccttccccatctgc

SEQ ID NO: 6073298 - DNA, 25 bp, Homo sapien
agtggtggcagctaaggtggaaggt

SEQ ID NO: 6073299 - DNA, 25 bp, Homo sapien
ttgtcccacacggaccacatctgga

SEQ ID NO: 6073300 - DNA, 25 bp, Homo sapien
tgcccaaaagcatagagatggtgaa

SEQ ID NO: 6073301 - DNA, 25 bp, Homo sapien
agcgggtcagcagcgtggtgtggcg

SEQ ID NO: 6073302 - DNA, 25 bp, Homo sapien
tcaggggcattcttgtcccacacgg

SEQ ID NO: 6073303 - DNA, 25 bp, Homo sapien
gggacccccacagcaggcaaggtga

SEQ ID NO: 6073304 - DNA, 25 bp, Homo sapien
tgaggttgcccaaaagcatagagat

SEQ ID NO: 6073305 - DNA, 25 bp, Homo sapien
tggtgaaagccacattggtggaatc

SEQ ID NO: 6073306 - DNA, 25 bp, Homo sapien
ggctgagggtggccgggcagctgga

SEQ ID NO: 6073307 - DNA, 25 bp, Homo sapien
cattggtggaatcttcatcaggggc

SEQ ID NO: 6073308 - DNA, 25 bp, Homo sapien
tgtggcggctcgagaggctgccgtc

SEQ ID NO: 6073309 - DNA, 25 bp, Homo sapien
caggtggctgttgaagcccatgtag

SEQ ID NO: 6073310 - DNA, 25 bp, Homo sapien
gccagctccaagtcccttggtgact

SEQ ID NO: 6073311 - DNA, 25 bp, Homo sapien
ggagcccagcaagcgatgtaggcca

SEQ ID NO: 6073312 - DNA, 25 bp, Homo sapien
ggctgaggctgaggctgagggtggc

SEQ ID NO: 6073313 - DNA, 25 bp, Homo sapien
gaagcccatgtagatccaggggttg

SEQ ID NO: 6073314 - DNA, 25 bp, Homo sapien
tgctgctgacccgagatggcagccc

SEQ ID NO: 6073315 - DNA, 25 bp, Homo sapien
cccccgagtggtggcagctaaggtg

SEQ ID NO: 6073316 - DNA, 25 bp, Homo sapien
cctcccacccgccaggcctgtgtct

SEQ ID NO: 6073317 - DNA, 25 bp, Homo sapien
ggaccacatctggacactgaagaag

SEQ ID NO: 6073318 - DNA, 25 bp, Homo sapien
gaaggtgagggcctgtcccaagtcc

SEQ ID NO: 6073319 - DNA, 25 bp, Homo sapien
ccagcaagcgatgtaggccagcacg

SEQ ID NO: 6073320 - DNA, 25 bp, Homo sapien
cttcatcaggggcattcttgtccca

SEQ ID NO: 6073321 - DNA, 25 bp, Homo sapien
gacactgaagaagggagcccagcaa

SEQ ID NO: 6073322 - DNA, 25 bp, Homo sapien
aagaagggagcccagcaagcgatgt

SEQ ID NO: 6073323 - DNA, 25 bp, Homo sapien
catctggacactgaagaagggagcc

SEQ ID NO: 6073324 - DNA, 25 bp, Homo sapien
taaggtggaaggtgagggcctgtcc

SEQ ID NO: 6073325 - DNA, 25 bp, Homo sapien
atccaggggttgcagcagctgttga

SEQ ID NO: 6073326 - DNA, 25 bp, Homo sapien
agctggagcgggtcagcagcgtggt

SEQ ID NO: 6073327 - DNA, 25 bp, Homo sapien
tcccttggtgactcttcaggcctgg

SEQ ID NO: 6073328 - DNA, 25 bp, Homo sapien
tcttggcccgtgagatggtgttgat

SEQ ID NO: 6073329 - DNA, 25 bp, Homo sapien
tgtaggccagcacgatgacaaaggt

SEQ ID NO: 6073330 - DNA, 25 bp, Homo sapien
cccctcctcccacccgccaggcctg

SEQ ID NO: 6073331 - DNA, 25 bp, Homo sapien
gtcttcatatttgtatgatttctcc

SEQ ID NO: 6073332 - DNA, 25 bp, Homo sapien
tttcacacatgtagggtttctctct

SEQ ID NO: 6073333 - DNA, 25 bp, Homo sapien
tttctccagtatgaatttctagatg

SEQ ID NO: 6073334 - DNA, 25 bp, Homo sapien
aatgtctatggaatggatttgatgt

SEQ ID NO: 6073335 - DNA, 25 bp, Homo sapien
tagtatgaactgctttgtgtctcct

SEQ ID NO: 6073336 - DNA, 25 bp, Homo sapien
ctctctgtgaactgcctcaagtctc

SEQ ID NO: 6073337 - DNA, 25 bp, Homo sapien
gaaaatttcactccagtatgactta

SEQ ID NO: 6073338 - DNA, 25 bp, Homo sapien
atggatttgatgtcttttcagggat

SEQ ID NO: 6073339 - DNA, 25 bp, Homo sapien
gtgacagtcttcatatttgtatgat

SEQ ID NO: 6073340 - DNA, 25 bp, Homo sapien
aagaaaggctttgtgacagtcttca

SEQ ID NO: 6073341 - DNA, 25 bp, Homo sapien
cacacttgtagagactgacttcata

SEQ ID NO: 6073342 - DNA, 25 bp, Homo sapien
tgaatttctagatgttcctgtaggt

SEQ ID NO: 6073343 - DNA, 25 bp, Homo sapien
atgataaagaaaggctttgtgacag

SEQ ID NO: 6073344 - DNA, 25 bp, Homo sapien
aactaggaaaatttcactccagtat

SEQ ID NO: 6073345 - DNA, 25 bp, Homo sapien
tagcttgtgctcaaatagagaagta

SEQ ID NO: 6073346 - DNA, 25 bp, Homo sapien
gagtggacagcatacaaggagcttt

SEQ ID NO: 6073347 - DNA, 25 bp, Homo sapien
ctccaaaatgaacaaatttgtgttt

SEQ ID NO: 6073348 - DNA, 25 bp, Homo sapien
agaagtattacaaaagacaaggctt

SEQ ID NO: 6073349 - DNA, 25 bp, Homo sapien
tattttggtatattcttcaaactag

SEQ ID NO: 6073350 - DNA, 25 bp, Homo sapien
gtgctcaaatagagaagtattacaa

SEQ ID NO: 6073351 - DNA, 25 bp, Homo sapien
tgtagagactgacttcataatgaat

SEQ ID NO: 6073352 - DNA, 25 bp, Homo sapien
tgtatgttcctctccaaaatgaaca

SEQ ID NO: 6073353 - DNA, 25 bp, Homo sapien
aatgaacaaatttgtgtttcttaag

SEQ ID NO: 6073354 - DNA, 25 bp, Homo sapien
tatggaatggatttgatgtcttttc

SEQ ID NO: 6073355 - DNA, 25 bp, Homo sapien
tcttcaaactaggaaaatttcactc

SEQ ID NO: 6073356 - DNA, 25 bp, Homo sapien
tcttttgccacattatacacactca

SEQ ID NO: 6073357 - DNA, 25 bp, Homo sapien
acagcatacaaggagctttaaacat

SEQ ID NO: 6073358 - DNA, 25 bp, Homo sapien
ttacaaaagacaaggctttctgaca

SEQ ID NO: 6073359 - DNA, 25 bp, Homo sapien
tggtatattcttcaaactaggaaaa

SEQ ID NO: 6073360 - DNA, 25 bp, Homo sapien
ttatacacactcatgggaaatgtct

SEQ ID NO: 6073361 - DNA, 25 bp, Homo sapien
ttaaacattccccacacttgtagag

SEQ ID NO: 6073362 - DNA, 25 bp, Homo sapien
acagacatttcccatactcttcaca

SEQ ID NO: 6073363 - DNA, 25 bp, Homo sapien
aggctttctgacattggtcacactt

SEQ ID NO: 6073364 - DNA, 25 bp, Homo sapien
gccacattatacacactcatgggaa

SEQ ID NO: 6073365 - DNA, 25 bp, Homo sapien
cacacttgtatgttcctctccaaaa

SEQ ID NO: 6073366 - DNA, 25 bp, Homo sapien
aagtctcctaagaaatgaatgataa

SEQ ID NO: 6073367 - DNA, 25 bp, Homo sapien
tacacttttcacacatgtagggttt

SEQ ID NO: 6073368 - DNA, 25 bp, Homo sapien
atgacttagcttgtgctcaaataga

SEQ ID NO: 6073369 - DNA, 25 bp, Homo sapien
gtgaactgcctcaagtctcctaaga

SEQ ID NO: 6073370 - DNA, 25 bp, Homo sapien
ggctttgtgacagtcttcatatttg

SEQ ID NO: 6073371 - DNA, 25 bp, Homo sapien
atttcctacacttttcacacatgta

SEQ ID NO: 6073372 - DNA, 25 bp, Homo sapien
tgggaagaactagaaaatcttttgc

SEQ ID NO: 6073373 - DNA, 25 bp, Homo sapien
attccccacacttgtagagactgac

SEQ ID NO: 6073374 - DNA, 25 bp, Homo sapien
gtaaaatattttggtatattcttca

SEQ ID NO: 6073375 - DNA, 25 bp, Homo sapien
tcttttcagggatgtaaaggaagaa

SEQ ID NO: 6073376 - DNA, 25 bp, Homo sapien
gggtttctctctagtatgaactgct

SEQ ID NO: 6073377 - DNA, 25 bp, Homo sapien
aaacatttcctacacttttcacaca

SEQ ID NO: 6073378 - DNA, 25 bp, Homo sapien
tgttcctgtaggtgggaagaactag

SEQ ID NO: 6073379 - DNA, 25 bp, Homo sapien
cctaagaaatgaatgataaagaaag

SEQ ID NO: 6073380 - DNA, 25 bp, Homo sapien
atgggaaatgtctatggaatggatt

SEQ ID NO: 6073381 - DNA, 25 bp, Homo sapien
tgtgtttcttaagagtggacagcat

SEQ ID NO: 6073382 - DNA, 25 bp, Homo sapien
caaatttgtgtttcttaagagtgga

SEQ ID NO: 6073383 - DNA, 25 bp, Homo sapien
tccagtatgacttagcttgtgctca

SEQ ID NO: 6073384 - DNA, 25 bp, Homo sapien
taagggttgaagaaaagaacagaca

SEQ ID NO: 6073385 - DNA, 25 bp, Homo sapien
tgtctcctaagaaacgagtgataaa

SEQ ID NO: 6073386 - DNA, 25 bp, Homo sapien
aaatgaatgataaagaaaggctttg

SEQ ID NO: 6073387 - DNA, 25 bp, Homo sapien
ttcactccagtatgacttagcttgt

SEQ ID NO: 6073388 - DNA, 25 bp, Homo sapien
cttgtatggtttctctctgtgaact

SEQ ID NO: 6073389 - DNA, 25 bp, Homo sapien
cgagtgataaagaaaggctttgtca

SEQ ID NO: 6073390 - DNA, 25 bp, Homo sapien
catgtagggtttctctctagtatga

SEQ ID NO: 6073391 - DNA, 25 bp, Homo sapien
gctttgtgtctcctaagaaacgagt

SEQ ID NO: 6073392 - DNA, 25 bp, Homo sapien
ttcacacttgtatggtttctctctg

SEQ ID NO: 6073393 - DNA, 25 bp, Homo sapien
atatttgtatgatttctccagtatg

SEQ ID NO: 6073394 - DNA, 25 bp, Homo sapien
acactcatgggaaatgtctatggaa

SEQ ID NO: 6073395 - DNA, 25 bp, Homo sapien
agaactagaaaatcttttgccacat

SEQ ID NO: 6073396 - DNA, 25 bp, Homo sapien
tgtaggtgggaagaactagaaaatc

SEQ ID NO: 6073397 - DNA, 25 bp, Homo sapien
aaaagaacagacatttcccatactc

SEQ ID NO: 6073398 - DNA, 25 bp, Homo sapien
cttcataatgaattatttgatgtct

SEQ ID NO: 6073399 - DNA, 25 bp, Homo sapien
attatttgatgtcttttaagggttg

SEQ ID NO: 6073400 - DNA, 25 bp, Homo sapien
tgcctcaagtctcctaagaaatgaa

SEQ ID NO: 6073401 - DNA, 25 bp, Homo sapien
aatgaattatttgatgtcttttaag

SEQ ID NO: 6073402 - DNA, 25 bp, Homo sapien
gactgacttcataatgaattatttg

SEQ ID NO: 6073403 - DNA, 25 bp, Homo sapien
gagctttaaacattccccacacttg

SEQ ID NO: 6073404 - DNA, 25 bp, Homo sapien
atactcttcacacttgtatggtttc

SEQ ID NO: 6073405 - DNA, 25 bp, Homo sapien
tctagatgttcctgtaggtgggaag

SEQ ID NO: 6073406 - DNA, 25 bp, Homo sapien
ttgaagaaaagaacagacatttccc

SEQ ID NO: 6073407 - DNA, 25 bp, Homo sapien
aaatagagaagtattacaaaagaca

SEQ ID NO: 6073408 - DNA, 25 bp, Homo sapien
tttcccatactcttcacacttgtat

SEQ ID NO: 6073409 - DNA, 25 bp, Homo sapien
tggtttctctctgtgaactgcctca

SEQ ID NO: 6073410 - DNA, 25 bp, Homo sapien
gaactgctttgtgtctcctaagaaa

SEQ ID NO: 6073411 - DNA, 25 bp, Homo sapien
cagtatgaatttctagatgttcctg

SEQ ID NO: 6073412 - DNA, 25 bp, Homo sapien
tgatgtcttttaagggttgaagaaa

SEQ ID NO: 6073413 - DNA, 25 bp, Homo sapien
tacaaggagctttaaacattcccca

SEQ ID NO: 6073414 - DNA, 25 bp, Homo sapien
aagaaacgagtgataaagaaaggct

SEQ ID NO: 6073415 - DNA, 25 bp, Homo sapien
tctctctagtatgaactgctttgtg

SEQ ID NO: 6073416 - DNA, 25 bp, Homo sapien
tctgacattggtcacacttgtatgt

SEQ ID NO: 6073417 - DNA, 25 bp, Homo sapien
ttcctctccaaaatgaacaaatttg

SEQ ID NO: 6073418 - DNA, 25 bp, Homo sapien
attggtcacacttgtatgttcctct

SEQ ID NO: 6073419 - DNA, 25 bp, Homo sapien
gtatgatttctccagtatgaatttc

SEQ ID NO: 6073420 - DNA, 25 bp, Homo sapien
ttgatgtcttttcagggatgtaaag

SEQ ID NO: 6073421 - DNA, 25 bp, Homo sapien
tcttaagagtggacagcatacaagg

SEQ ID NO: 6073422 - DNA, 25 bp, Homo sapien
agaaaatcttttgccacattataca

SEQ ID NO: 6073423 - DNA, 25 bp, Homo sapien
aagacaaggctttctgacattggtc

SEQ ID NO: 6073424 - DNA, 25 bp, Homo sapien
cagggatgtaaaggaagaaaaacat

SEQ ID NO: 6073425 - DNA, 25 bp, Homo sapien
taaacacaatcacaggcttgatgtt

SEQ ID NO: 6073426 - DNA, 25 bp, Homo sapien
cacaatcacaggcttgatgttgtgc

SEQ ID NO: 6073427 - DNA, 25 bp, Homo sapien
aacacaatcacaggcttgatgttgt

SEQ ID NO: 6073428 - DNA, 25 bp, Homo sapien
aacctttcacacccacacctttgct

SEQ ID NO: 6073429 - DNA, 25 bp, Homo sapien
aaacacaatcacaggcttgatgttg

SEQ ID NO: 6073430 - DNA, 25 bp, Homo sapien
acctttcacacccacacctttgctc

SEQ ID NO: 6073431 - DNA, 25 bp, Homo sapien
acacaatcacaggcttgatgttgtg

SEQ ID NO: 6073432 - DNA, 25 bp, Homo sapien
atcacaggcttgatgttgtgccagg

SEQ ID NO: 6073433 - DNA, 25 bp, Homo sapien
cacaggcttgatgttgtgccaggca

SEQ ID NO: 6073434 - DNA, 25 bp, Homo sapien
tcacaggcttgatgttgtgccaggc

SEQ ID NO: 6073435 - DNA, 25 bp, Homo sapien
acaggcttgatgttgtgccaggcat

SEQ ID NO: 6073436 - DNA, 25 bp, Homo sapien
tggcaacaacacacacggcatcctt

SEQ ID NO: 6073437 - DNA, 25 bp, Homo sapien
aatccctcaaagccaccacttgttc

SEQ ID NO: 6073438 - DNA, 25 bp, Homo sapien
tggcatacagaatccctcaaagcca

SEQ ID NO: 6073439 - DNA, 25 bp, Homo sapien
gaatccctcaaagccaccacttgtt

SEQ ID NO: 6073440 - DNA, 25 bp, Homo sapien
gcatacagaatccctcaaagccacc

SEQ ID NO: 6073441 - DNA, 25 bp, Homo sapien
agaatccctcaaagccaccacttgt

SEQ ID NO: 6073442 - DNA, 25 bp, Homo sapien
ggcaacaacacacacggcatccttc

SEQ ID NO: 6073443 - DNA, 25 bp, Homo sapien
ggcatacagaatccctcaaagccac

SEQ ID NO: 6073444 - DNA, 25 bp, Homo sapien
gcaacaacacacacggcatccttca

SEQ ID NO: 6073445 - DNA, 25 bp, Homo sapien
aacaacacacacggcatccttcatg

SEQ ID NO: 6073446 - DNA, 25 bp, Homo sapien
atccctcaaagccaccacttgttca

SEQ ID NO: 6073447 - DNA, 25 bp, Homo sapien
ccaaagaactggcttgccttgcccg

SEQ ID NO: 6073448 - DNA, 25 bp, Homo sapien
aggccacaattacccaggtctctgc

SEQ ID NO: 6073449 - DNA, 25 bp, Homo sapien
aagaactggcttgccttgcccgtct

SEQ ID NO: 6073450 - DNA, 25 bp, Homo sapien
tgccttgcccgtcttcacctcctgc

SEQ ID NO: 6073451 - DNA, 25 bp, Homo sapien
caaggccacaattacccaggtctct

SEQ ID NO: 6073452 - DNA, 25 bp, Homo sapien
cttgccttgcccgtcttcacctcct

SEQ ID NO: 6073453 - DNA, 25 bp, Homo sapien
ttgccttgcccgtcttcacctcctg

SEQ ID NO: 6073454 - DNA, 25 bp, Homo sapien
aaagaactggcttgccttgcccgtc

SEQ ID NO: 6073455 - DNA, 25 bp, Homo sapien
caaagaactggcttgccttgcccgt

SEQ ID NO: 6073456 - DNA, 25 bp, Homo sapien
aaggccacaattacccaggtctctg

SEQ ID NO: 6073457 - DNA, 25 bp, Homo sapien
ctccaaggccacaattacccaggtc

SEQ ID NO: 6073458 - DNA, 25 bp, Homo sapien
ctttctctgcccgagtataaccgat

SEQ ID NO: 6073459 - DNA, 25 bp, Homo sapien
tctctgcccgagtataaccgattcc

SEQ ID NO: 6073460 - DNA, 25 bp, Homo sapien
tctttctctgcccgagtataaccga

SEQ ID NO: 6073461 - DNA, 25 bp, Homo sapien
tttctctgcccgagtataaccgatt

SEQ ID NO: 6073462 - DNA, 25 bp, Homo sapien
ttctctgcccgagtataaccgattc

SEQ ID NO: 6073463 - DNA, 25 bp, Homo sapien
ctctttctctgcccgagtataaccg

SEQ ID NO: 6073464 - DNA, 25 bp, Homo sapien
ctggccgccgctcccacttcagatt

SEQ ID NO: 6073465 - DNA, 25 bp, Homo sapien
caagaaaggcatggctacccgatgc

SEQ ID NO: 6073466 - DNA, 25 bp, Homo sapien
gcccttgactcttctctggccgccg

SEQ ID NO: 6073467 - DNA, 25 bp, Homo sapien
aaaggcatggctacccgatgctcgt

SEQ ID NO: 6073468 - DNA, 25 bp, Homo sapien
gccgccgctcccacttcagattggt

SEQ ID NO: 6073469 - DNA, 25 bp, Homo sapien
tgacaaggaggtttgtcgtaaacaa

SEQ ID NO: 6073470 - DNA, 25 bp, Homo sapien
tgtcgtaaacaacctttccagtgga

SEQ ID NO: 6073471 - DNA, 25 bp, Homo sapien
ggccgccgctcccacttcagattgg

SEQ ID NO: 6073472 - DNA, 25 bp, Homo sapien
cttgactcttctctggccgccgctc

SEQ ID NO: 6073473 - DNA, 25 bp, Homo sapien
acctttccagtggagaacagagaac

SEQ ID NO: 6073474 - DNA, 25 bp, Homo sapien
gatgctcgtgcccttgactcttctc

SEQ ID NO: 6073475 - DNA, 25 bp, Homo sapien
tctggccgccgctcccacttcagat

SEQ ID NO: 6073476 - DNA, 25 bp, Homo sapien
ggctatacgctctgtaggccgccag

SEQ ID NO: 6073477 - DNA, 25 bp, Homo sapien
gcatcacctggtagcccacgtaggg

SEQ ID NO: 6073478 - DNA, 25 bp, Homo sapien
agtgctcttggcgtcctctgggttc

SEQ ID NO: 6073479 - DNA, 25 bp, Homo sapien
tgtggcctgggctatgtctgcaaag

SEQ ID NO: 6073480 - DNA, 25 bp, Homo sapien
tggccagtgctcttggcgtcctctg

SEQ ID NO: 6073481 - DNA, 25 bp, Homo sapien
agctggcgtagagggccacaccact

SEQ ID NO: 6073482 - DNA, 25 bp, Homo sapien
cccgcatgatgtggtagggcacata

SEQ ID NO: 6073483 - DNA, 25 bp, Homo sapien
atccacgttgagcacccgcatgatg

SEQ ID NO: 6073484 - DNA, 25 bp, Homo sapien
ccagcaccaggctatacgctctgta

SEQ ID NO: 6073485 - DNA, 25 bp, Homo sapien
tgcggcctcttcaggtgggagaagc

SEQ ID NO: 6073486 - DNA, 25 bp, Homo sapien
tatgtctgcaaagctcgggcagcgg

SEQ ID NO: 6073487 - DNA, 25 bp, Homo sapien
ctcgggcctggccacgctgcagttg

SEQ ID NO: 6073488 - DNA, 25 bp, Homo sapien
acaccccaccttgttcaagggtcag

SEQ ID NO: 6073489 - DNA, 25 bp, Homo sapien
caccttgttcaagggtcagctgtgt

SEQ ID NO: 6073490 - DNA, 25 bp, Homo sapien
gaaagtgatattaaaccttcacttg

SEQ ID NO: 6073491 - DNA, 25 bp, Homo sapien
tcctccttgcctcttgatgttcctg

SEQ ID NO: 6073492 - DNA, 25 bp, Homo sapien
tgaggatttgaaaagagaagtacct

SEQ ID NO: 6073493 - DNA, 25 bp, Homo sapien
atggccagccaagaaacggaagcga

SEQ ID NO: 6073494 - DNA, 25 bp, Homo sapien
aaactggaaggtagagtttctctat

SEQ ID NO: 6073495 - DNA, 25 bp, Homo sapien
ttaagtagatgtgtgcatttaaata

SEQ ID NO: 6073496 - DNA, 25 bp, Homo sapien
gatattaaaccttcacttgagaccc

SEQ ID NO: 6073497 - DNA, 25 bp, Homo sapien
tccaaactggaaaagtggcattctg

SEQ ID NO: 6073498 - DNA, 25 bp, Homo sapien
taggccttcagttgaggatttgaaa

SEQ ID NO: 6073499 - DNA, 25 bp, Homo sapien
ttaagatcaggtgcctcagtgatag

SEQ ID NO: 6073500 - DNA, 25 bp, Homo sapien
ttcagttgaggatttgaaaagagaa

SEQ ID NO: 6073501 - DNA, 25 bp, Homo sapien
cctgctcacttttaacatatgatga

SEQ ID NO: 6073502 - DNA, 25 bp, Homo sapien
cgccacaatgagagttcaggagagt

SEQ ID NO: 6073503 - DNA, 25 bp, Homo sapien
taagagaggaagcactgcttcatct

SEQ ID NO: 6073504 - DNA, 25 bp, Homo sapien
agttcaggagagtactgagtgcatt

SEQ ID NO: 6073505 - DNA, 25 bp, Homo sapien
gctggagagcaataggccttcagtt

SEQ ID NO: 6073506 - DNA, 25 bp, Homo sapien
tgtgtgaaaaatgaaaagcatggcc

SEQ ID NO: 6073507 - DNA, 25 bp, Homo sapien
aaccatgaaaacagttctcgccaca

SEQ ID NO: 6073508 - DNA, 25 bp, Homo sapien
accccctcctccttgcctcttgatg

SEQ ID NO: 6073509 - DNA, 25 bp, Homo sapien
aaaatgaaaagcatggccagccaag

SEQ ID NO: 6073510 - DNA, 25 bp, Homo sapien
tatgtgtgtgtgaaaaatgaaaagc

SEQ ID NO: 6073511 - DNA, 25 bp, Homo sapien
tatttctccaaactggaaaagtggc

SEQ ID NO: 6073512 - DNA, 25 bp, Homo sapien
aagcgataaggacttcaaagccaca

SEQ ID NO: 6073513 - DNA, 25 bp, Homo sapien
agtggtcaagaaagatctggctgga

SEQ ID NO: 6073514 - DNA, 25 bp, Homo sapien
gagcaataggccttcagttgaggat

SEQ ID NO: 6073515 - DNA, 25 bp, Homo sapien
ttcatctcacctttcccactcacac

SEQ ID NO: 6073516 - DNA, 25 bp, Homo sapien
gtgatagaaagtgatattaaacctt

SEQ ID NO: 6073517 - DNA, 25 bp, Homo sapien
tataaatgaatatatttctccaaac

SEQ ID NO: 6073518 - DNA, 25 bp, Homo sapien
tgagaccctgctcacttttaacata

SEQ ID NO: 6073519 - DNA, 25 bp, Homo sapien
tttatataaatgaatatatttctcc

SEQ ID NO: 6073520 - DNA, 25 bp, Homo sapien
aggaagcactgcttcatctcacctt

SEQ ID NO: 6073521 - DNA, 25 bp, Homo sapien
gaaggtagagtttctctatcttagg

SEQ ID NO: 6073522 - DNA, 25 bp, Homo sapien
ccactcacaccaccccctcctcctt

SEQ ID NO: 6073523 - DNA, 25 bp, Homo sapien
gggtcagctgtgtgtgtatgtgtgt

SEQ ID NO: 6073524 - DNA, 25 bp, Homo sapien
gaccctgtttatataaatgaatata

SEQ ID NO: 6073525 - DNA, 25 bp, Homo sapien
gatccctgatcttaagatcaggtgc

SEQ ID NO: 6073526 - DNA, 25 bp, Homo sapien
tcaggtgcctcagtgatagaaagtg

SEQ ID NO: 6073527 - DNA, 25 bp, Homo sapien
gatctggctggagagcaataggcct

SEQ ID NO: 6073528 - DNA, 25 bp, Homo sapien
aaagtggcattctgtaattgttcat

SEQ ID NO: 6073529 - DNA, 25 bp, Homo sapien
aaaagcatggccagccaagaaacgg

SEQ ID NO: 6073530 - DNA, 25 bp, Homo sapien
accttttaagagaggaagcactgct

SEQ ID NO: 6073531 - DNA, 25 bp, Homo sapien
gaaacggaagcgataaggacttcaa

SEQ ID NO: 6073532 - DNA, 25 bp, Homo sapien
gttcataaccatgaaaacagttctc

SEQ ID NO: 6073533 - DNA, 25 bp, Homo sapien
tgtgtatgtgtgtgtgaaaaatgaa

SEQ ID NO: 6073534 - DNA, 25 bp, Homo sapien
tgaatatatttctccaaactggaaa

SEQ ID NO: 6073535 - DNA, 25 bp, Homo sapien
acaccaccccctcctccttgcctct

SEQ ID NO: 6073536 - DNA, 25 bp, Homo sapien
gttcaagggtcagctgtgtgtgtat

SEQ ID NO: 6073537 - DNA, 25 bp, Homo sapien
tagatgtgtgcatttaaataaaaaa

SEQ ID NO: 6073538 - DNA, 25 bp, Homo sapien
agttctcgccacaatgagagttcag

SEQ ID NO: 6073539 - DNA, 25 bp, Homo sapien
ttgcctcttgatgttcctgaccctg

SEQ ID NO: 6073540 - DNA, 25 bp, Homo sapien
tcttaggatccctgatcttaagatc

SEQ ID NO: 6073541 - DNA, 25 bp, Homo sapien
cactgcttcatctcacctttcccac

SEQ ID NO: 6073542 - DNA, 25 bp, Homo sapien
cttcaaagccacagtggtcaagaaa

SEQ ID NO: 6073543 - DNA, 25 bp, Homo sapien
agccacagtggtcaagaaagatctg

SEQ ID NO: 6073544 - DNA, 25 bp, Homo sapien
agccaagaaacggaagcgataagga

SEQ ID NO: 6073545 - DNA, 25 bp, Homo sapien
tcacctttcccactcacaccacccc

SEQ ID NO: 6073546 - DNA, 25 bp, Homo sapien
ctggaaaagtggcattctgtaattg

SEQ ID NO: 6073547 - DNA, 25 bp, Homo sapien
taaggacttcaaagccacagtggtc

SEQ ID NO: 6073548 - DNA, 25 bp, Homo sapien
tgatcttaagatcaggtgcctcagt

SEQ ID NO: 6073549 - DNA, 25 bp, Homo sapien
aaaccttcacttgagaccctgctca

SEQ ID NO: 6073550 - DNA, 25 bp, Homo sapien
gtgcatttaagtagatgtgtgcatt

SEQ ID NO: 6073551 - DNA, 25 bp, Homo sapien
tctctatcttaggatccctgatctt

SEQ ID NO: 6073552 - DNA, 25 bp, Homo sapien
gcctcagtgatagaaagtgatatta

SEQ ID NO: 6073553 - DNA, 25 bp, Homo sapien
aatgagagttcaggagagtactgag

SEQ ID NO: 6073554 - DNA, 25 bp, Homo sapien
gaaaacagttctcgccacaatgaga

SEQ ID NO: 6073555 - DNA, 25 bp, Homo sapien
tgtaattgttcataaccatgaaaac

SEQ ID NO: 6073556 - DNA, 25 bp, Homo sapien
tgtgcatttaaataaaaaactggaa

SEQ ID NO: 6073557 - DNA, 25 bp, Homo sapien
gcattctgtaattgttcataaccat

SEQ ID NO: 6073558 - DNA, 25 bp, Homo sapien
cttgatgttcctgaccctgtttata

SEQ ID NO: 6073559 - DNA, 25 bp, Homo sapien
gaagtaccttttaagagaggaagca

SEQ ID NO: 6073560 - DNA, 25 bp, Homo sapien
tcacttgagaccctgctcactttta

SEQ ID NO: 6073561 - DNA, 25 bp, Homo sapien
agagtttctctatcttaggatccct

SEQ ID NO: 6073562 - DNA, 25 bp, Homo sapien
caagaaagatctggctggagagcaa

SEQ ID NO: 6073563 - DNA, 25 bp, Homo sapien
ggagagtactgagtgcatttaagta

SEQ ID NO: 6073564 - DNA, 25 bp, Homo sapien
tactgagtgcatttaagtagatgtg

SEQ ID NO: 6073565 - DNA, 25 bp, Homo sapien
ctgtgtgtgtatgtgtgtgtgaaaa

SEQ ID NO: 6073566 - DNA, 25 bp, Homo sapien
gttcctgaccctgtttatataaatg

SEQ ID NO: 6073567 - DNA, 25 bp, Homo sapien
tcgacctcgaggtggcgccacgccg

SEQ ID NO: 6073568 - DNA, 25 bp, Homo sapien
tcttgtaggtagagtctttagagag

SEQ ID NO: 6073569 - DNA, 25 bp, Homo sapien
caggtactgtggacttttgtagtaa

SEQ ID NO: 6073570 - DNA, 25 bp, Homo sapien
tcaagacaatctttgtccttaacta

SEQ ID NO: 6073571 - DNA, 25 bp, Homo sapien
tcgaggtggcgccacgccggcgaga

SEQ ID NO: 6073572 - DNA, 25 bp, Homo sapien
cgttgtcaggtactgtggacttttg

SEQ ID NO: 6073573 - DNA, 25 bp, Homo sapien
ggtggcgccacgccggcgagatctt

SEQ ID NO: 6073574 - DNA, 25 bp, Homo sapien
cacactacctatagacgtcttaagc

SEQ ID NO: 6073575 - DNA, 25 bp, Homo sapien
cacgtgaagtacttcgtcgaaacaa

SEQ ID NO: 6073576 - DNA, 25 bp, Homo sapien
aggtagagtctttagagaggtctaa

SEQ ID NO: 6073577 - DNA, 25 bp, Homo sapien
tgtggacttttgtagtaaacacctc

SEQ ID NO: 6073578 - DNA, 25 bp, Homo sapien
ccggcgagatcttgatcacctaggg

SEQ ID NO: 6073579 - DNA, 25 bp, Homo sapien
agatgcctgccgaatctcaccattt

SEQ ID NO: 6073580 - DNA, 25 bp, Homo sapien
agacctacttatgtaccaccgttgt

SEQ ID NO: 6073581 - DNA, 25 bp, Homo sapien
ggggcccgacgtccttagcttgaga

SEQ ID NO: 6073582 - DNA, 25 bp, Homo sapien
taactacggttgtatttcctatcga

SEQ ID NO: 6073583 - DNA, 25 bp, Homo sapien
agatcttgatcacctagggggcccg

SEQ ID NO: 6073584 - DNA, 25 bp, Homo sapien
acttatgtaccaccgttgtcaggta

SEQ ID NO: 6073585 - DNA, 25 bp, Homo sapien
taccaccgttgtcaggtactgtgga

SEQ ID NO: 6073586 - DNA, 25 bp, Homo sapien
acctatagacgtcttaagccgaagt

SEQ ID NO: 6073587 - DNA, 25 bp, Homo sapien
agtagtcacgtgtaggattgaatta

SEQ ID NO: 6073588 - DNA, 25 bp, Homo sapien
gtgtttcgtcagcacgtccacgacg

SEQ ID NO: 6073589 - DNA, 25 bp, Homo sapien
ctgccgaatctcaccatttttacta

SEQ ID NO: 6073590 - DNA, 25 bp, Homo sapien
agactttcttgtaggtagagtcttt

SEQ ID NO: 6073591 - DNA, 25 bp, Homo sapien
cctgtaagactttcttgtaggtaga

SEQ ID NO: 6073592 - DNA, 25 bp, Homo sapien
actcgacgttgtgagcgttcgtgtg

SEQ ID NO: 6073593 - DNA, 25 bp, Homo sapien
cgtcagcacgtccacgacgacctcc

SEQ ID NO: 6073594 - DNA, 25 bp, Homo sapien
tttccacctacaacatgctcaagac

SEQ ID NO: 6073595 - DNA, 25 bp, Homo sapien
gtagtaaacacctcaccgcatctca

SEQ ID NO: 6073596 - DNA, 25 bp, Homo sapien
tgatcacctagggggcccgacgtcc

SEQ ID NO: 6073597 - DNA, 25 bp, Homo sapien
aatctcaccatttttactagtagtc

SEQ ID NO: 6073598 - DNA, 25 bp, Homo sapien
tcaccgcatctcaagtcacaagcgt

SEQ ID NO: 6073599 - DNA, 25 bp, Homo sapien
tacgagctcgccggcggtcacacta

SEQ ID NO: 6073600 - DNA, 25 bp, Homo sapien
cactcgacagtttgtcttttcccct

SEQ ID NO: 6073601 - DNA, 25 bp, Homo sapien
ggcggtcacactacctatagacgtc

SEQ ID NO: 6073602 - DNA, 25 bp, Homo sapien
acagtttgtcttttcccctcacgtg

SEQ ID NO: 6073603 - DNA, 25 bp, Homo sapien
cctacaacatgctcaagacaatctt

SEQ ID NO: 6073604 - DNA, 25 bp, Homo sapien
tgttggtataaaggccgtgagatgc

SEQ ID NO: 6073605 - DNA, 25 bp, Homo sapien
tcgccggcggtcacactacctatag

SEQ ID NO: 6073606 - DNA, 25 bp, Homo sapien
acagaacctgtaagactttcttgta

SEQ ID NO: 6073607 - DNA, 25 bp, Homo sapien
aacacctcaccgcatctcaagtcac

SEQ ID NO: 6073608 - DNA, 25 bp, Homo sapien
gccacgccggcgagatcttgatcac

SEQ ID NO: 6073609 - DNA, 25 bp, Homo sapien
cacgtccacgacgacctccgtcctt

SEQ ID NO: 6073610 - DNA, 25 bp, Homo sapien
tgtatttcctatcgaatccatcttg

SEQ ID NO: 6073611 - DNA, 25 bp, Homo sapien
tctacgtacgagctcgccggcggtc

SEQ ID NO: 6073612 - DNA, 25 bp, Homo sapien
ttaccggtgtttcgtcagcacgtcc

SEQ ID NO: 6073613 - DNA, 25 bp, Homo sapien
agtctttagagaggtctaacgttgt

SEQ ID NO: 6073614 - DNA, 25 bp, Homo sapien
gccgtgagatgcctgccgaatctca

SEQ ID NO: 6073615 - DNA, 25 bp, Homo sapien
tcccctcacgtgaagtacttcgtcg

SEQ ID NO: 6073616 - DNA, 25 bp, Homo sapien
gtccttagcttgagacctacttatg

SEQ ID NO: 6073617 - DNA, 25 bp, Homo sapien
cacgtgtaggattgaattactcgac

SEQ ID NO: 6073618 - DNA, 25 bp, Homo sapien
agttaattgggagtgatttcccttg

SEQ ID NO: 6073619 - DNA, 25 bp, Homo sapien
tttactagtagtcacgtgtaggatt

SEQ ID NO: 6073620 - DNA, 25 bp, Homo sapien
tgaattactcgacgttgtgagcgtt

SEQ ID NO: 6073621 - DNA, 25 bp, Homo sapien
tacggttgtatttcctatcgaatcc

SEQ ID NO: 6073622 - DNA, 25 bp, Homo sapien
gtgaagtggaacgacgcgcgttacc

SEQ ID NO: 6073623 - DNA, 25 bp, Homo sapien
taggattgaattactcgacgttgtg

SEQ ID NO: 6073624 - DNA, 25 bp, Homo sapien
ggtctaacgttgtgagaatgttctc

SEQ ID NO: 6073625 - DNA, 25 bp, Homo sapien
caatctttgtccttaactacggttg

SEQ ID NO: 6073626 - DNA, 25 bp, Homo sapien
tagagaggtctaacgttgtgagaat

SEQ ID NO: 6073627 - DNA, 25 bp, Homo sapien
cttaagccgaagttaattgggagtg

SEQ ID NO: 6073628 - DNA, 25 bp, Homo sapien
gacctccgtccttacctacactcga

SEQ ID NO: 6073629 - DNA, 25 bp, Homo sapien
tgatttcccttgttttcgacctcga

SEQ ID NO: 6073630 - DNA, 25 bp, Homo sapien
accatttttactagtagtcacgtgt

SEQ ID NO: 6073631 - DNA, 25 bp, Homo sapien
gcgtcgcgtatatgttggtataaag

SEQ ID NO: 6073632 - DNA, 25 bp, Homo sapien
cccgacgtccttagcttgagaccta

SEQ ID NO: 6073633 - DNA, 25 bp, Homo sapien
cgaatccatcttgacagaacctgta

SEQ ID NO: 6073634 - DNA, 25 bp, Homo sapien
cgcgcgttaccggtgtttcgtcagc

SEQ ID NO: 6073635 - DNA, 25 bp, Homo sapien
tgggagtgatttcccttgttttcga

SEQ ID NO: 6073636 - DNA, 25 bp, Homo sapien
ataaaggccgtgagatgcctgccga

SEQ ID NO: 6073637 - DNA, 25 bp, Homo sapien
cgtccttacctacactcgacagttt

SEQ ID NO: 6073638 - DNA, 25 bp, Homo sapien
caaacctttccacctacaacatgct

SEQ ID NO: 6073639 - DNA, 25 bp, Homo sapien
acatgctcaagacaatctttgtcct

SEQ ID NO: 6073640 - DNA, 25 bp, Homo sapien
caagtcacaagcgtcgcgtatatgt

SEQ ID NO: 6073641 - DNA, 25 bp, Homo sapien
agccgaagttaattgggagtgattt

SEQ ID NO: 6073642 - DNA, 25 bp, Homo sapien
agtggaacgacgcgcgttaccggtg

SEQ ID NO: 6073643 - DNA, 25 bp, Homo sapien
gcatctcaagtcacaagcgtcgcgt

SEQ ID NO: 6073644 - DNA, 25 bp, Homo sapien
cttttgtagtaaacacctcaccgca

SEQ ID NO: 6073645 - DNA, 25 bp, Homo sapien
ttgttttcgacctcgaggtggcgcc

SEQ ID NO: 6073646 - DNA, 25 bp, Homo sapien
cgtatatgttggtataaaggccgtg

SEQ ID NO: 6073647 - DNA, 25 bp, Homo sapien
tcctatcgaatccatcttgacagaa

SEQ ID NO: 6073648 - DNA, 25 bp, Homo sapien
agcttgagacctacttatgtaccac

SEQ ID NO: 6073649 - DNA, 25 bp, Homo sapien
tacctacactcgacagtttgtcttt

SEQ ID NO: 6073650 - DNA, 25 bp, Homo sapien
catcttgacagaacctgtaagactt

SEQ ID NO: 6073651 - DNA, 25 bp, Homo sapien
tgtcttttcccctcacgtgaagtac

SEQ ID NO: 6073652 - DNA, 25 bp, Homo sapien
agacgtcttaagccgaagttaattg

SEQ ID NO: 6073653 - DNA, 25 bp, Homo sapien
cacaagcgtcgcgtatatgttggta

SEQ ID NO: 6073654 - DNA, 25 bp, Homo sapien
gttggcagacagccgtttgttctac

SEQ ID NO: 6073655 - DNA, 25 bp, Homo sapien
ttggcagacagccgtttgttctaca

SEQ ID NO: 6073656 - DNA, 25 bp, Homo sapien
ccagttggcagacagccgtttgttc

SEQ ID NO: 6073657 - DNA, 25 bp, Homo sapien
gcagacagccgtttgttctacatgg

SEQ ID NO: 6073658 - DNA, 25 bp, Homo sapien
cagttggcagacagccgtttgttct

SEQ ID NO: 6073659 - DNA, 25 bp, Homo sapien
agttggcagacagccgtttgttcta

SEQ ID NO: 6073660 - DNA, 25 bp, Homo sapien
ggcagacagccgtttgttctacatg

SEQ ID NO: 6073661 - DNA, 25 bp, Homo sapien
tggcagacagccgtttgttctacat

SEQ ID NO: 6073662 - DNA, 25 bp, Homo sapien
actagtaaaacatctggttgcaggc

SEQ ID NO: 6073663 - DNA, 25 bp, Homo sapien
tcttttccccataaataatgcggtc

SEQ ID NO: 6073664 - DNA, 25 bp, Homo sapien
cccataaataatgcggtctcaagta

SEQ ID NO: 6073665 - DNA, 25 bp, Homo sapien
tgtttgtggaattcactagtaaaac

SEQ ID NO: 6073666 - DNA, 25 bp, Homo sapien
tccccataaataatgcggtctcaag

SEQ ID NO: 6073667 - DNA, 25 bp, Homo sapien
aaacatctggttgcaggcttttctt

SEQ ID NO: 6073668 - DNA, 25 bp, Homo sapien
tagtaaaacatctggttgcaggctt

SEQ ID NO: 6073669 - DNA, 25 bp, Homo sapien
gtggatttctcccttgctatcttgt

SEQ ID NO: 6073670 - DNA, 25 bp, Homo sapien
taaataatgcggtctcaagtatgtc

SEQ ID NO: 6073671 - DNA, 25 bp, Homo sapien
cattttgttgatcggaattccagat

SEQ ID NO: 6073672 - DNA, 25 bp, Homo sapien
ggatttctcccttgctatcttgtga

SEQ ID NO: 6073673 - DNA, 25 bp, Homo sapien
tagtatgagaacaaataccattttg

SEQ ID NO: 6073674 - DNA, 25 bp, Homo sapien
aatcatttcaattactcgttccagg

SEQ ID NO: 6073675 - DNA, 25 bp, Homo sapien
tccaaagggcggatgataagatcat

SEQ ID NO: 6073676 - DNA, 25 bp, Homo sapien
tcaattaggacacacaaggcagcat

SEQ ID NO: 6073677 - DNA, 25 bp, Homo sapien
caattactcgttccaggtgcttttg

SEQ ID NO: 6073678 - DNA, 25 bp, Homo sapien
tctcgttttatactcccagggctcc

SEQ ID NO: 6073679 - DNA, 25 bp, Homo sapien
gatcaaactgcataggatgaagccg

SEQ ID NO: 6073680 - DNA, 25 bp, Homo sapien
gtttcaagccgttgacgtttctgga

SEQ ID NO: 6073681 - DNA, 25 bp, Homo sapien
cagtacaattgttgctatcatcagc

SEQ ID NO: 6073682 - DNA, 25 bp, Homo sapien
tttataagatgatgcacgtgtacaa

SEQ ID NO: 6073683 - DNA, 25 bp, Homo sapien
gatgaagccgttcgatgccctgact

SEQ ID NO: 6073684 - DNA, 25 bp, Homo sapien
tctcagctgtttcaagccgttgacg

SEQ ID NO: 6073685 - DNA, 25 bp, Homo sapien
ctgatctctcctatgacctgaattt

SEQ ID NO: 6073686 - DNA, 25 bp, Homo sapien
tgctggaaggcgtgcacgccgatct

SEQ ID NO: 6073687 - DNA, 25 bp, Homo sapien
ggtgatctgcgccttcagctctgac

SEQ ID NO: 6073688 - DNA, 25 bp, Homo sapien
gcttcccctcgaaggtcagccagaa

SEQ ID NO: 6073689 - DNA, 25 bp, Homo sapien
tcagctctgacaccgacatggagct

SEQ ID NO: 6073690 - DNA, 25 bp, Homo sapien
cgtaggtgctgctgcggcccttgtt

SEQ ID NO: 6073691 - DNA, 25 bp, Homo sapien
gcgtgcacgccgatcttctgggtga

SEQ ID NO: 6073692 - DNA, 25 bp, Homo sapien
tgcagcgccacaccgctcgggtgga

SEQ ID NO: 6073693 - DNA, 25 bp, Homo sapien
ctcgggtggacagccagacgctgct

SEQ ID NO: 6073694 - DNA, 25 bp, Homo sapien
tcagaggttcgtcgcatttgtccac

SEQ ID NO: 6073695 - DNA, 25 bp, Homo sapien
gcaggcgcagattcatgaacacggt

SEQ ID NO: 6073696 - DNA, 25 bp, Homo sapien
cagccagaacaggtcgtcctgcaca

SEQ ID NO: 6073697 - DNA, 25 bp, Homo sapien
gatcttctgggtgatctgcgccttc

SEQ ID NO: 6073698 - DNA, 25 bp, Homo sapien
gcacagtcttgtgggggctgcaaaa

SEQ ID NO: 6073699 - DNA, 25 bp, Homo sapien
acctgaatcatccactcacacagag

SEQ ID NO: 6073700 - DNA, 25 bp, Homo sapien
cgcattcaatgagggccggccacct

SEQ ID NO: 6073701 - DNA, 25 bp, Homo sapien
tgtctctggcaacctgaatcatcca

SEQ ID NO: 6073702 - DNA, 25 bp, Homo sapien
caagccaacctcagatgaactcagg

SEQ ID NO: 6073703 - DNA, 25 bp, Homo sapien
aaattaaccccgcattcaatgaggg

SEQ ID NO: 6073704 - DNA, 25 bp, Homo sapien
tgagttaaattaaccccgcattcaa

SEQ ID NO: 6073705 - DNA, 25 bp, Homo sapien
accttccaagccaacctcagatgaa

SEQ ID NO: 6073706 - DNA, 25 bp, Homo sapien
tcagatgaactcagggtcaacaggg

SEQ ID NO: 6073707 - DNA, 25 bp, Homo sapien
gaagctacttcccatgctaagctga

SEQ ID NO: 6073708 - DNA, 25 bp, Homo sapien
ctcagggtcaacagggaagctactt

SEQ ID NO: 6073709 - DNA, 25 bp, Homo sapien
gaactgggccaaatggtgcccacac

SEQ ID NO: 6073710 - DNA, 25 bp, Homo sapien
cacacaagaagctgatggccgcgtt

SEQ ID NO: 6073711 - DNA, 25 bp, Homo sapien
caggacgcgctgcttgttgtagtac

SEQ ID NO: 6073712 - DNA, 25 bp, Homo sapien
gctccagctcgtgcttggccgcggt

SEQ ID NO: 6073713 - DNA, 25 bp, Homo sapien
gatgcgcatgatccgcagcgcctgc

SEQ ID NO: 6073714 - DNA, 25 bp, Homo sapien
cagttccttgaagctgcgcttgagg

SEQ ID NO: 6073715 - DNA, 25 bp, Homo sapien
gaagatgcgcgcgatgcgcatgatc

SEQ ID NO: 6073716 - DNA, 25 bp, Homo sapien
tgacaccacacaagaagctgatggc

SEQ ID NO: 6073717 - DNA, 25 bp, Homo sapien
cagagaagacgaagatacccactgc

SEQ ID NO: 6073718 - DNA, 25 bp, Homo sapien
ttggccgcggtctccaggacgcgct

SEQ ID NO: 6073719 - DNA, 25 bp, Homo sapien
ccagggcagagaagacgaagatacc

SEQ ID NO: 6073720 - DNA, 25 bp, Homo sapien
cttgttgtagtacctgacaaagttg

SEQ ID NO: 6073721 - DNA, 25 bp, Homo sapien
gttgtccaggtcactgcgggagccc

SEQ ID NO: 6073722 - DNA, 25 bp, Homo sapien
accaatcgactttccttagacaacg

SEQ ID NO: 6073723 - DNA, 25 bp, Homo sapien
gccctgggcaacaaccaatcgactt

SEQ ID NO: 6073724 - DNA, 25 bp, Homo sapien
gcatttctgcccttgttacagatga

SEQ ID NO: 6073725 - DNA, 25 bp, Homo sapien
ttgcatccatcctttcgtcggtact

SEQ ID NO: 6073726 - DNA, 25 bp, Homo sapien
aatggaaaatccagtttgggacgtg

SEQ ID NO: 6073727 - DNA, 25 bp, Homo sapien
tcagcatgaccagcttcaggacatt

SEQ ID NO: 6073728 - DNA, 25 bp, Homo sapien
catgatctatccatccgaattccaa

SEQ ID NO: 6073729 - DNA, 25 bp, Homo sapien
gcacatacattatcaggccaacatg

SEQ ID NO: 6073730 - DNA, 25 bp, Homo sapien
cccttattgggaggaattatagtcg

SEQ ID NO: 6073731 - DNA, 25 bp, Homo sapien
tgctacacaattcacatgtctaaag

SEQ ID NO: 6073732 - DNA, 25 bp, Homo sapien
cgtcggtactctgctgcacacggat

SEQ ID NO: 6073733 - DNA, 25 bp, Homo sapien
ggacgtggtgtaaactggaattgct

SEQ ID NO: 6073734 - DNA, 25 bp, Homo sapien
gggaacagccgctgtatcctaagga

SEQ ID NO: 6073735 - DNA, 25 bp, Homo sapien
tcgtcttccacctcatggttatcat

SEQ ID NO: 6073736 - DNA, 25 bp, Homo sapien
cctcccagatgatctcgtcttccac

SEQ ID NO: 6073737 - DNA, 25 bp, Homo sapien
aacagccgctgtatcctaaggaacc

SEQ ID NO: 6073738 - DNA, 25 bp, Homo sapien
ctcccagatgatctcgtcttccacc

SEQ ID NO: 6073739 - DNA, 25 bp, Homo sapien
tcctcccagatgatctcgtcttcca

SEQ ID NO: 6073740 - DNA, 25 bp, Homo sapien
tcccagatgatctcgtcttccacct

SEQ ID NO: 6073741 - DNA, 25 bp, Homo sapien
gaacagccgctgtatcctaaggaac

SEQ ID NO: 6073742 - DNA, 25 bp, Homo sapien
ggaacagccgctgtatcctaaggaa

SEQ ID NO: 6073743 - DNA, 25 bp, Homo sapien
cgtcttccacctcatggttatcatt

SEQ ID NO: 6073744 - DNA, 25 bp, Homo sapien
ctcgtcttccacctcatggttatca

SEQ ID NO: 6073745 - DNA, 25 bp, Homo sapien
gtcttccacctcatggttatcattc

SEQ ID NO: 6073746 - DNA, 25 bp, Homo sapien
gggaacagccgctgtatcctaagga

SEQ ID NO: 6073747 - DNA, 25 bp, Homo sapien
ctcgtcttccacctcatggttatca

SEQ ID NO: 6073748 - DNA, 25 bp, Homo sapien
aacagccgctgtatcctaaggaacc

SEQ ID NO: 6073749 - DNA, 25 bp, Homo sapien
ctcccagatgatctcgtcttccacc

SEQ ID NO: 6073750 - DNA, 25 bp, Homo sapien
gaacagccgctgtatcctaaggaac

SEQ ID NO: 6073751 - DNA, 25 bp, Homo sapien
tcccagatgatctcgtcttccacct

SEQ ID NO: 6073752 - DNA, 25 bp, Homo sapien
tcgtcttccacctcatggttatcat

SEQ ID NO: 6073753 - DNA, 25 bp, Homo sapien
cctcccagatgatctcgtcttccac

SEQ ID NO: 6073754 - DNA, 25 bp, Homo sapien
ggaacagccgctgtatcctaaggaa

SEQ ID NO: 6073755 - DNA, 25 bp, Homo sapien
gtcttccacctcatggttatcattc

SEQ ID NO: 6073756 - DNA, 25 bp, Homo sapien
tcctcccagatgatctcgtcttcca

SEQ ID NO: 6073757 - DNA, 25 bp, Homo sapien
cgtcttccacctcatggttatcatt

SEQ ID NO: 6073758 - DNA, 25 bp, Homo sapien
cagctctgatcttcacactgtgttt

SEQ ID NO: 6073759 - DNA, 25 bp, Homo sapien
ggagctccaattcaagatgcggacg

SEQ ID NO: 6073760 - DNA, 25 bp, Homo sapien
ccaattcaagatgcggacgtctgca

SEQ ID NO: 6073761 - DNA, 25 bp, Homo sapien
tccaattcaagatgcggacgtctgc

SEQ ID NO: 6073762 - DNA, 25 bp, Homo sapien
gctccaattcaagatgcggacgtct

SEQ ID NO: 6073763 - DNA, 25 bp, Homo sapien
tgatcttcacactgtgttttgctct

SEQ ID NO: 6073764 - DNA, 25 bp, Homo sapien
gctctgatcttcacactgtgttttg

SEQ ID NO: 6073765 - DNA, 25 bp, Homo sapien
caagatgcggacgtctgcagctctg

SEQ ID NO: 6073766 - DNA, 25 bp, Homo sapien
ttcaatggcttcactccaggagctc

SEQ ID NO: 6073767 - DNA, 25 bp, Homo sapien
ttcaagatgcggacgtctgcagctc

SEQ ID NO: 6073768 - DNA, 25 bp, Homo sapien
aggagctccaattcaagatgcggac

SEQ ID NO: 6073769 - DNA, 25 bp, Homo sapien
attcaagatgcggacgtctgcagct

SEQ ID NO: 6073770 - DNA, 25 bp, Homo sapien
gggaacagccgctgtatcctaagga

SEQ ID NO: 6073771 - DNA, 25 bp, Homo sapien
aacagccgctgtatcctaaggaacc

SEQ ID NO: 6073772 - DNA, 25 bp, Homo sapien
ctcccagatgatctcgtcttccacc

SEQ ID NO: 6073773 - DNA, 25 bp, Homo sapien
ctcgtcttccacctcatggttatca

SEQ ID NO: 6073774 - DNA, 25 bp, Homo sapien
tcgtcttccacctcatggttatcat

SEQ ID NO: 6073775 - DNA, 25 bp, Homo sapien
cgtcttccacctcatggttatcatt

SEQ ID NO: 6073776 - DNA, 25 bp, Homo sapien
gtcttccacctcatggttatcattc

SEQ ID NO: 6073777 - DNA, 25 bp, Homo sapien
tcctcccagatgatctcgtcttcca

SEQ ID NO: 6073778 - DNA, 25 bp, Homo sapien
ggaacagccgctgtatcctaaggaa

SEQ ID NO: 6073779 - DNA, 25 bp, Homo sapien
cctcccagatgatctcgtcttccac

SEQ ID NO: 6073780 - DNA, 25 bp, Homo sapien
gaacagccgctgtatcctaaggaac

SEQ ID NO: 6073781 - DNA, 25 bp, Homo sapien
tcccagatgatctcgtcttccacct

SEQ ID NO: 6073782 - DNA, 25 bp, Homo sapien
gtatcctaaggaaccaaattcaatg

SEQ ID NO: 6073783 - DNA, 25 bp, Homo sapien
acagccgctgtatcctaaggaacca

SEQ ID NO: 6073784 - DNA, 25 bp, Homo sapien
gatgatctcgtcttccacctcatgg

SEQ ID NO: 6073785 - DNA, 25 bp, Homo sapien
gaactggcgggaacagccgctgtat

SEQ ID NO: 6073786 - DNA, 25 bp, Homo sapien
gctgtatcctaaggaaccaaattca

SEQ ID NO: 6073787 - DNA, 25 bp, Homo sapien
cagccgctgtatcctaaggaaccaa

SEQ ID NO: 6073788 - DNA, 25 bp, Homo sapien
gtatcctaaggaaccaaattcaatg

SEQ ID NO: 6073789 - DNA, 25 bp, Homo sapien
agccgctgtatcctaaggaaccaaa

SEQ ID NO: 6073790 - DNA, 25 bp, Homo sapien
tgtatcctaaggaaccaaattcaat

SEQ ID NO: 6073791 - DNA, 25 bp, Homo sapien
gccgctgtatcctaaggaaccaaat

SEQ ID NO: 6073792 - DNA, 25 bp, Homo sapien
ccgctgtatcctaaggaaccaaatt

SEQ ID NO: 6073793 - DNA, 25 bp, Homo sapien
cgctgtatcctaaggaaccaaattc

SEQ ID NO: 6073794 - DNA, 25 bp, Homo sapien
tctttgatctgtggaactggcggga

SEQ ID NO: 6073795 - DNA, 25 bp, Homo sapien
cgtcttccacctcatggttatcatt

SEQ ID NO: 6073796 - DNA, 25 bp, Homo sapien
ggaacagccgctgtatcctaaggaa

SEQ ID NO: 6073797 - DNA, 25 bp, Homo sapien
cctcccagatgatctcgtcttccac

SEQ ID NO: 6073798 - DNA, 25 bp, Homo sapien
ctcccagatgatctcgtcttccacc

SEQ ID NO: 6073799 - DNA, 25 bp, Homo sapien
aacagccgctgtatcctaaggaacc

SEQ ID NO: 6073800 - DNA, 25 bp, Homo sapien
tcctcccagatgatctcgtcttcca

SEQ ID NO: 6073801 - DNA, 25 bp, Homo sapien
gaacagccgctgtatcctaaggaac

SEQ ID NO: 6073802 - DNA, 25 bp, Homo sapien
tcccagatgatctcgtcttccacct

SEQ ID NO: 6073803 - DNA, 25 bp, Homo sapien
ctcgtcttccacctcatggttatca

SEQ ID NO: 6073804 - DNA, 25 bp, Homo sapien
tcgtcttccacctcatggttatcat

SEQ ID NO: 6073805 - DNA, 25 bp, Homo sapien
gggaacagccgctgtatcctaagga

SEQ ID NO: 6073806 - DNA, 25 bp, Homo sapien
gtcttccacctcatggttatcattc

SEQ ID NO: 6073807 - DNA, 25 bp, Homo sapien
cgtcttccacctcatggttatcatt

SEQ ID NO: 6073808 - DNA, 25 bp, Homo sapien
ctcgtcttccacctcatggttatca

SEQ ID NO: 6073809 - DNA, 25 bp, Homo sapien
aacagccgctgtatcctaaggaacc

SEQ ID NO: 6073810 - DNA, 25 bp, Homo sapien
gtcttccacctcatggttatcattc

SEQ ID NO: 6073811 - DNA, 25 bp, Homo sapien
tcccagatgatctcgtcttccacct

SEQ ID NO: 6073812 - DNA, 25 bp, Homo sapien
gaacagccgctgtatcctaaggaac

SEQ ID NO: 6073813 - DNA, 25 bp, Homo sapien
tcgtcttccacctcatggttatcat

SEQ ID NO: 6073814 - DNA, 25 bp, Homo sapien
cctcccagatgatctcgtcttccac

SEQ ID NO: 6073815 - DNA, 25 bp, Homo sapien
ggaacagccgctgtatcctaaggaa

SEQ ID NO: 6073816 - DNA, 25 bp, Homo sapien
ctcccagatgatctcgtcttccacc

SEQ ID NO: 6073817 - DNA, 25 bp, Homo sapien
tcctcccagatgatctcgtcttcca

SEQ ID NO: 6073818 - DNA, 25 bp, Homo sapien
gggaacagccgctgtatcctaagga

SEQ ID NO: 6073819 - DNA, 25 bp, Homo sapien
tatccagggctcgttggcaaagcag

SEQ ID NO: 6073820 - DNA, 25 bp, Homo sapien
gactgcgactgctatacagaacaaa

SEQ ID NO: 6073821 - DNA, 25 bp, Homo sapien
caatagttggttaccgatcctcgaa

SEQ ID NO: 6073822 - DNA, 25 bp, Homo sapien
tacagacatgtacagcagatgccag

SEQ ID NO: 6073823 - DNA, 25 bp, Homo sapien
tatcaggcctataacggtacaaaca

SEQ ID NO: 6073824 - DNA, 25 bp, Homo sapien
ttgaaaatacaatcaggagtcctgg

SEQ ID NO: 6073825 - DNA, 25 bp, Homo sapien
cctatttcatggctctagaccgtga

SEQ ID NO: 6073826 - DNA, 25 bp, Homo sapien
tagaccgtgatctatcggctgaccg

SEQ ID NO: 6073827 - DNA, 25 bp, Homo sapien
ctgagtcagtgggagcatcgcctat

SEQ ID NO: 6073828 - DNA, 25 bp, Homo sapien
tgtcagtaaactcaccgataagcct

SEQ ID NO: 6073829 - DNA, 25 bp, Homo sapien
tctaggctcactacaccagattgaa

SEQ ID NO: 6073830 - DNA, 25 bp, Homo sapien
tacaaagctggaatcgaaacccctg

SEQ ID NO: 6073831 - DNA, 25 bp, Homo sapien
aggcagtggaaggtgttctcggtgg

SEQ ID NO: 6073832 - DNA, 25 bp, Homo sapien
gtccacgtgtccctcctctggaaaa

SEQ ID NO: 6073833 - DNA, 25 bp, Homo sapien
gtctggtttcacgtccacgtgtccc

SEQ ID NO: 6073834 - DNA, 25 bp, Homo sapien
gtgttctcggtggatgccccggcca

SEQ ID NO: 6073835 - DNA, 25 bp, Homo sapien
atagggtgcagcgtggctgggcccg

SEQ ID NO: 6073836 - DNA, 25 bp, Homo sapien
ctcggtggatgccccggccacccga

SEQ ID NO: 6073837 - DNA, 25 bp, Homo sapien
tctgcccctccgaccgacggcgtct

SEQ ID NO: 6073838 - DNA, 25 bp, Homo sapien
tgtccctcctctggaaaaccttgga

SEQ ID NO: 6073839 - DNA, 25 bp, Homo sapien
tctgctgttgctcccagctggggcc

SEQ ID NO: 6073840 - DNA, 25 bp, Homo sapien
atatgagctccccgcagaggggctg

SEQ ID NO: 6073841 - DNA, 25 bp, Homo sapien
cccgtagggccaagctcgagtgcta

SEQ ID NO: 6073842 - DNA, 25 bp, Homo sapien
ccttaccgcagctccggggggtgca

SEQ ID NO: 6073843 - DNA, 25 bp, Homo sapien
cagtcccagggagccccagataggg

SEQ ID NO: 6073844 - DNA, 25 bp, Homo sapien
cctggcttcactccctggtcagccg

SEQ ID NO: 6073845 - DNA, 25 bp, Homo sapien
agggagccccagatagggtgcagcg

SEQ ID NO: 6073846 - DNA, 25 bp, Homo sapien
tggctgggcccgcatatgagctccc

SEQ ID NO: 6073847 - DNA, 25 bp, Homo sapien
ggacgggggacccaagccatcacag

SEQ ID NO: 6073848 - DNA, 25 bp, Homo sapien
tcacactctgctgttgctcccagct

SEQ ID NO: 6073849 - DNA, 25 bp, Homo sapien
gggctgagggcctggaagggggcca

SEQ ID NO: 6073850 - DNA, 25 bp, Homo sapien
tgagggcctggaagggggccacgcc

SEQ ID NO: 6073851 - DNA, 25 bp, Homo sapien
gaccgacggcgtctcctccagtccc

SEQ ID NO: 6073852 - DNA, 25 bp, Homo sapien
cctccgaccgacggcgtctcctcca

SEQ ID NO: 6073853 - DNA, 25 bp, Homo sapien
ccttttgtctggtttcacgtccacg

SEQ ID NO: 6073854 - DNA, 25 bp, Homo sapien
ttgctcccagctggggccccacgac

SEQ ID NO: 6073855 - DNA, 25 bp, Homo sapien
tgcagcgtggctgggcccgcatatg

SEQ ID NO: 6073856 - DNA, 25 bp, Homo sapien
agcctgagacacacctcggggcttg

SEQ ID NO: 6073857 - DNA, 25 bp, Homo sapien
gcgtggatgctctccacgtggaaaa

SEQ ID NO: 6073858 - DNA, 25 bp, Homo sapien
gcccgcatatgagctccccgcagag

SEQ ID NO: 6073859 - DNA, 25 bp, Homo sapien
ctctaccccgtagggccaagctcga

SEQ ID NO: 6073860 - DNA, 25 bp, Homo sapien
cagctccggggggtgcagggcgcca

SEQ ID NO: 6073861 - DNA, 25 bp, Homo sapien
tggaaggtgttctcggtggatgccc

SEQ ID NO: 6073862 - DNA, 25 bp, Homo sapien
cccaagccatcacagcaggagagga

SEQ ID NO: 6073863 - DNA, 25 bp, Homo sapien
cagaatctgcccctccgaccgacgg

SEQ ID NO: 6073864 - DNA, 25 bp, Homo sapien
agctcgagtgctaggcagtggaagg

SEQ ID NO: 6073865 - DNA, 25 bp, Homo sapien
atgctctccacgtggaaaaggattt

SEQ ID NO: 6073866 - DNA, 25 bp, Homo sapien
tttcacgtccacgtgtccctcctct

SEQ ID NO: 6073867 - DNA, 25 bp, Homo sapien
cccggccacccgaccagccagccca

SEQ ID NO: 6073868 - DNA, 25 bp, Homo sapien
gagaggagcctgagacacacctcgg

SEQ ID NO: 6073869 - DNA, 25 bp, Homo sapien
cggcgtctcctccagtcccagggag

SEQ ID NO: 6073870 - DNA, 25 bp, Homo sapien
ttcactccctggtcagccgggagca

SEQ ID NO: 6073871 - DNA, 25 bp, Homo sapien
ctttaataacgaggcgtggatgctc

SEQ ID NO: 6073872 - DNA, 25 bp, Homo sapien
gtgcagggcgccacagaatctgccc

SEQ ID NO: 6073873 - DNA, 25 bp, Homo sapien
ctcctctggaaaaccttggagaaga

SEQ ID NO: 6073874 - DNA, 25 bp, Homo sapien
cgcctctctgcagccttttgtctgg

SEQ ID NO: 6073875 - DNA, 25 bp, Homo sapien
gcgccacagaatctgcccctccgac

SEQ ID NO: 6073876 - DNA, 25 bp, Homo sapien
tccacgtggaaaaggatttctctac

SEQ ID NO: 6073877 - DNA, 25 bp, Homo sapien
agacacacctcggggcttgctctcg

SEQ ID NO: 6073878 - DNA, 25 bp, Homo sapien
tggaagggggccacgcctctctgca

SEQ ID NO: 6073879 - DNA, 25 bp, Homo sapien
cacccgaccagccagcccagggcct

SEQ ID NO: 6073880 - DNA, 25 bp, Homo sapien
accagccagcccagggcctgtccgc

SEQ ID NO: 6073881 - DNA, 25 bp, Homo sapien
ccggggggtgcagggcgccacagaa

SEQ ID NO: 6073882 - DNA, 25 bp, Homo sapien
ccctggtcagccgggagcacgggac

SEQ ID NO: 6073883 - DNA, 25 bp, Homo sapien
ggcttgctctcgcagtgggccctcg

SEQ ID NO: 6073884 - DNA, 25 bp, Homo sapien
gagaagagggcacctggcttcactc

SEQ ID NO: 6073885 - DNA, 25 bp, Homo sapien
cgcagtgggccctcgggctcacact

SEQ ID NO: 6073886 - DNA, 25 bp, Homo sapien
ctgcagccttttgtctggtttcacg

SEQ ID NO: 6073887 - DNA, 25 bp, Homo sapien
tgctctcgcagtgggccctcgggct

SEQ ID NO: 6073888 - DNA, 25 bp, Homo sapien
tcagccgggagcacgggacggggga

SEQ ID NO: 6073889 - DNA, 25 bp, Homo sapien
aacgaggcgtggatgctctccacgt

SEQ ID NO: 6073890 - DNA, 25 bp, Homo sapien
ggatgccccggccacccgaccagcc

SEQ ID NO: 6073891 - DNA, 25 bp, Homo sapien
ccatcacagcaggagaggagcctga

SEQ ID NO: 6073892 - DNA, 25 bp, Homo sapien
cagcccagggcctgtccgcagggtc

SEQ ID NO: 6073893 - DNA, 25 bp, Homo sapien
gggccacgcctctctgcagcctttt

SEQ ID NO: 6073894 - DNA, 25 bp, Homo sapien
agggtcgcccttaccgcagctccgg

SEQ ID NO: 6073895 - DNA, 25 bp, Homo sapien
accttggagaagagggcacctggct

SEQ ID NO: 6073896 - DNA, 25 bp, Homo sapien
tcgggctcacactctgctgttgctc

SEQ ID NO: 6073897 - DNA, 25 bp, Homo sapien
gcagaggggctgagggcctggaagg

SEQ ID NO: 6073898 - DNA, 25 bp, Homo sapien
agtgctaggcagtggaaggtgttct

SEQ ID NO: 6073899 - DNA, 25 bp, Homo sapien
gggccctcgggctcacactctgctg

SEQ ID NO: 6073900 - DNA, 25 bp, Homo sapien
agggcctgtccgcagggtcgccctt

SEQ ID NO: 6073901 - DNA, 25 bp, Homo sapien
ccccagatagggtgcagcgtggctg

SEQ ID NO: 6073902 - DNA, 25 bp, Homo sapien
tggaaaaccttggagaagagggcac

SEQ ID NO: 6073903 - DNA, 25 bp, Homo sapien
acctcggggcttgctctcgcagtgg

SEQ ID NO: 6073904 - DNA, 25 bp, Homo sapien
ctcctccagtcccagggagccccag

SEQ ID NO: 6073905 - DNA, 25 bp, Homo sapien
agggcacctggcttcactccctggt

SEQ ID NO: 6073906 - DNA, 25 bp, Homo sapien
gggccaagctcgagtgctaggcagt

SEQ ID NO: 6073907 - DNA, 25 bp, Homo sapien
tgtccgcagggtcgcccttaccgca

SEQ ID NO: 6073908 - DNA, 25 bp, Homo sapien
gggacccaagccatcacagcaggag

SEQ ID NO: 6073909 - DNA, 25 bp, Homo sapien
gctccccgcagaggggctgagggcc

SEQ ID NO: 6073910 - DNA, 25 bp, Homo sapien
cagcaggagaggagcctgagacaca

SEQ ID NO: 6073911 - DNA, 25 bp, Homo sapien
cgtcggtactctgctgcacacggat

SEQ ID NO: 6073912 - DNA, 25 bp, Homo sapien
tgctacacaattcacatgtctaaag

SEQ ID NO: 6073913 - DNA, 25 bp, Homo sapien
gcacatacattatcaggccaacatg

SEQ ID NO: 6073914 - DNA, 25 bp, Homo sapien
catgatctatccatccgaattccaa

SEQ ID NO: 6073915 - DNA, 25 bp, Homo sapien
gccctgggcaacaaccaatcgactt

SEQ ID NO: 6073916 - DNA, 25 bp, Homo sapien
accaatcgactttccttagacaacg

SEQ ID NO: 6073917 - DNA, 25 bp, Homo sapien
gcatttctgcccttgttacagatga

SEQ ID NO: 6073918 - DNA, 25 bp, Homo sapien
aatggaaaatccagtttgggacgtg

SEQ ID NO: 6073919 - DNA, 25 bp, Homo sapien
ttgcatccatcctttcgtcggtact

SEQ ID NO: 6073920 - DNA, 25 bp, Homo sapien
ggacgtggtgtaaactggaattgct

SEQ ID NO: 6073921 - DNA, 25 bp, Homo sapien
tcagcatgaccagcttcaggacatt

SEQ ID NO: 6073922 - DNA, 25 bp, Homo sapien
cccttattgggaggaattatagtcg

SEQ ID NO: 6073923 - DNA, 25 bp, Homo sapien
cagacatttcaaataaatgcaatat

SEQ ID NO: 6073924 - DNA, 25 bp, Homo sapien
agtatttttgccacaaaatcagacc

SEQ ID NO: 6073925 - DNA, 25 bp, Homo sapien
acccagcagtcttaacattaccaat

SEQ ID NO: 6073926 - DNA, 25 bp, Homo sapien
tgatgtaatgctcggaatttgcttc

SEQ ID NO: 6073927 - DNA, 25 bp, Homo sapien
gccttgcttgaatcctaatacaaac

SEQ ID NO: 6073928 - DNA, 25 bp, Homo sapien
cagtgtagataaacaggcctggccg

SEQ ID NO: 6073929 - DNA, 25 bp, Homo sapien
taccaatagagaggcaccagcatta

SEQ ID NO: 6073930 - DNA, 25 bp, Homo sapien
tttgccacaaaatcagacctccaga

SEQ ID NO: 6073931 - DNA, 25 bp, Homo sapien
acaaaatgatgtaatgctcggaatt

SEQ ID NO: 6073932 - DNA, 25 bp, Homo sapien
accagcaacgttcaaatgtgctaaa

SEQ ID NO: 6073933 - DNA, 25 bp, Homo sapien
tgtatatttaaggatgttagaaata

SEQ ID NO: 6073934 - DNA, 25 bp, Homo sapien
aataaatgcaatatatgggccttgc

SEQ ID NO: 6073935 - DNA, 25 bp, Homo sapien
ctcctgacaggatgcaacaagaagt

SEQ ID NO: 6073936 - DNA, 25 bp, Homo sapien
gccaaacatttgtgggacaatggga

SEQ ID NO: 6073937 - DNA, 25 bp, Homo sapien
tgacacctcgggatttcaaccagca

SEQ ID NO: 6073938 - DNA, 25 bp, Homo sapien
ggtacagcatgtggagctggagaga

SEQ ID NO: 6073939 - DNA, 25 bp, Homo sapien
ggagctggagagaggagtgggcagc

SEQ ID NO: 6073940 - DNA, 25 bp, Homo sapien
caatccaactacaaaaacagccaaa

SEQ ID NO: 6073941 - DNA, 25 bp, Homo sapien
aatgctcggaatttgcttcagaatg

SEQ ID NO: 6073942 - DNA, 25 bp, Homo sapien
cagaatgatccaggtacagcatgtg

SEQ ID NO: 6073943 - DNA, 25 bp, Homo sapien
atttcaaccagcaacgttcaaatgt

SEQ ID NO: 6073944 - DNA, 25 bp, Homo sapien
taacattaccaatagagaggcacca

SEQ ID NO: 6073945 - DNA, 25 bp, Homo sapien
ttgcttcagaatgatccaggtacag

SEQ ID NO: 6073946 - DNA, 25 bp, Homo sapien
agaagtacccagcaccacctaggaa

SEQ ID NO: 6073947 - DNA, 25 bp, Homo sapien
tgcaacaagaagtacccagcaccac

SEQ ID NO: 6073948 - DNA, 25 bp, Homo sapien
tagagaggcaccagcattatctgcc

SEQ ID NO: 6073949 - DNA, 25 bp, Homo sapien
taaggatgttagaaatatttatgga

SEQ ID NO: 6073950 - DNA, 25 bp, Homo sapien
tgattaaagccaagaactccaaacc

SEQ ID NO: 6073951 - DNA, 25 bp, Homo sapien
aaaacagccaaacatttgtgggaca

SEQ ID NO: 6073952 - DNA, 25 bp, Homo sapien
tgcaatatatgggccttgcttgaat

SEQ ID NO: 6073953 - DNA, 25 bp, Homo sapien
aatgggagatgcttgaattccgatt

SEQ ID NO: 6073954 - DNA, 25 bp, Homo sapien
acaggatgcaacaagaagtacccag

SEQ ID NO: 6073955 - DNA, 25 bp, Homo sapien
agcattatctgcctcctgacaggat

SEQ ID NO: 6073956 - DNA, 25 bp, Homo sapien
ctaggaagtatttttgccacaaaat

SEQ ID NO: 6073957 - DNA, 25 bp, Homo sapien
actacaaaaacagccaaacatttgt

SEQ ID NO: 6073958 - DNA, 25 bp, Homo sapien
cttgaatcctaatacaaacaatcca

SEQ ID NO: 6073959 - DNA, 25 bp, Homo sapien
agatgcttgaattccgattgtatat

SEQ ID NO: 6073960 - DNA, 25 bp, Homo sapien
aatgaatgattaaagccaagaactc

SEQ ID NO: 6073961 - DNA, 25 bp, Homo sapien
gtcaaatgacacctcgggatttcaa

SEQ ID NO: 6073962 - DNA, 25 bp, Homo sapien
aaacccacccagcagtcttaacatt

SEQ ID NO: 6073963 - DNA, 25 bp, Homo sapien
acccagcaccacctaggaagtattt

SEQ ID NO: 6073964 - DNA, 25 bp, Homo sapien
aaatatttatggacaaaatgatgta

SEQ ID NO: 6073965 - DNA, 25 bp, Homo sapien
ctttgtaatgaatgattaaagccaa

SEQ ID NO: 6073966 - DNA, 25 bp, Homo sapien
tcagagaaccatgtcaaatgacacc

SEQ ID NO: 6073967 - DNA, 25 bp, Homo sapien
ataagttcagagaaccatgtcaaat

SEQ ID NO: 6073968 - DNA, 25 bp, Homo sapien
acaaaatcagacctccagatctaac

SEQ ID NO: 6073969 - DNA, 25 bp, Homo sapien
gatccaggtacagcatgtggagctg

SEQ ID NO: 6073970 - DNA, 25 bp, Homo sapien
gcatgtggagctggagagaggagtg

SEQ ID NO: 6073971 - DNA, 25 bp, Homo sapien
ctaccattttataggaaagataagt

SEQ ID NO: 6073972 - DNA, 25 bp, Homo sapien
gctgaactttgtaatgaatgattaa

SEQ ID NO: 6073973 - DNA, 25 bp, Homo sapien
gacttacagacatttcaaataaatg

SEQ ID NO: 6073974 - DNA, 25 bp, Homo sapien
tgggacaatgggagatgcttgaatt

SEQ ID NO: 6073975 - DNA, 25 bp, Homo sapien
gccaagaactccaaacccacccagc

SEQ ID NO: 6073976 - DNA, 25 bp, Homo sapien
cagtcttaacattaccaatagagag

SEQ ID NO: 6073977 - DNA, 25 bp, Homo sapien
aacgttcaaatgtgctaaactctgt

SEQ ID NO: 6073978 - DNA, 25 bp, Homo sapien
gggcagcagtgtagataaacaggcc

SEQ ID NO: 6073979 - DNA, 25 bp, Homo sapien
ctcgggatttcaaccagcaacgttc

SEQ ID NO: 6073980 - DNA, 25 bp, Homo sapien
cggaatttgcttcagaatgatccag

SEQ ID NO: 6073981 - DNA, 25 bp, Homo sapien
ggaaagataagttcagagaaccatg

SEQ ID NO: 6073982 - DNA, 25 bp, Homo sapien
ggagagaggagtgggcagcagtgta

SEQ ID NO: 6073983 - DNA, 25 bp, Homo sapien
tacaaacaatccaactacaaaaaca

SEQ ID NO: 6073984 - DNA, 25 bp, Homo sapien
aaccatgtcaaatgacacctcggga

SEQ ID NO: 6073985 - DNA, 25 bp, Homo sapien
tgttagaaatatttatggacaaaat

SEQ ID NO: 6073986 - DNA, 25 bp, Homo sapien
tttcaaataaatgcaatatatgggc

SEQ ID NO: 6073987 - DNA, 25 bp, Homo sapien
gaaagagacttacagacatttcaaa

SEQ ID NO: 6073988 - DNA, 25 bp, Homo sapien
tcctaatacaaacaatccaactaca

SEQ ID NO: 6073989 - DNA, 25 bp, Homo sapien
aggagtgggcagcagtgtagataaa

SEQ ID NO: 6073990 - DNA, 25 bp, Homo sapien
tgctaaactctgtagatggaaagag

SEQ ID NO: 6073991 - DNA, 25 bp, Homo sapien
actctgtagatggaaagagacttac

SEQ ID NO: 6073992 - DNA, 25 bp, Homo sapien
catttgtgggacaatgggagatgct

SEQ ID NO: 6073993 - DNA, 25 bp, Homo sapien
atctgcctcctgacaggatgcaaca

SEQ ID NO: 6073994 - DNA, 25 bp, Homo sapien
atctaactaccattttataggaaag

SEQ ID NO: 6073995 - DNA, 25 bp, Homo sapien
tagatggaaagagacttacagacat

SEQ ID NO: 6073996 - DNA, 25 bp, Homo sapien
ggcaccagcattatctgcctcctga

SEQ ID NO: 6073997 - DNA, 25 bp, Homo sapien
tccgattgtatatttaaggatgtta

SEQ ID NO: 6073998 - DNA, 25 bp, Homo sapien
atatgggccttgcttgaatcctaat

SEQ ID NO: 6073999 - DNA, 25 bp, Homo sapien
ttgaattccgattgtatatttaagg

SEQ ID NO: 6074000 - DNA, 25 bp, Homo sapien
tttataggaaagataagttcagaga

SEQ ID NO: 6074001 - DNA, 25 bp, Homo sapien
caccacctaggaagtatttttgcca

SEQ ID NO: 6074002 - DNA, 25 bp, Homo sapien
ttaaaatgctgaactttgtaatgaa

SEQ ID NO: 6074003 - DNA, 25 bp, Homo sapien
ctccagatctaactaccattttata

SEQ ID NO: 6074004 - DNA, 25 bp, Homo sapien
caaatgtgctaaactctgtagatgg

SEQ ID NO: 6074005 - DNA, 25 bp, Homo sapien
tcagacctccagatctaactaccat

SEQ ID NO: 6074006 - DNA, 25 bp, Homo sapien
aactccaaacccacccagcagtctt

SEQ ID NO: 6074007 - DNA, 25 bp, Homo sapien
ttatggacaaaatgatgtaatgctc

SEQ ID NO: 6074008 - DNA, 25 bp, Homo sapien
taataatcagtataacatccaacaa

SEQ ID NO: 6074009 - DNA, 25 bp, Homo sapien
tacagctaaaagtaattgtaaaggc

SEQ ID NO: 6074010 - DNA, 25 bp, Homo sapien
cctcataacctgaaaagaaccaaga

SEQ ID NO: 6074011 - DNA, 25 bp, Homo sapien
acaataacaatcacttaccataggg

SEQ ID NO: 6074012 - DNA, 25 bp, Homo sapien
tatacagaatcggatgttacagcta

SEQ ID NO: 6074013 - DNA, 25 bp, Homo sapien
tcagtatccacaaggaggcaaaatc

SEQ ID NO: 6074014 - DNA, 25 bp, Homo sapien
gcaaccaatcaaccaaattatgaaa

SEQ ID NO: 6074015 - DNA, 25 bp, Homo sapien
agcttccacacttaatatatgtcag

SEQ ID NO: 6074016 - DNA, 25 bp, Homo sapien
gcttctgatagttcaaatgattgtg

SEQ ID NO: 6074017 - DNA, 25 bp, Homo sapien
cttttttctatgtggcttatacaga

SEQ ID NO: 6074018 - DNA, 25 bp, Homo sapien
ttatatatttcctagctgatttgct

SEQ ID NO: 6074019 - DNA, 25 bp, Homo sapien
gtcactgaccaaacctcataacctg

SEQ ID NO: 6074020 - DNA, 25 bp, Homo sapien
ataactaattagaaaatttgaacat

SEQ ID NO: 6074021 - DNA, 25 bp, Homo sapien
atcacggtactgaagccacaatctg

SEQ ID NO: 6074022 - DNA, 25 bp, Homo sapien
gaaaatttgaacatagaatttaaga

SEQ ID NO: 6074023 - DNA, 25 bp, Homo sapien
aagaacccacagtacccagaagtcg

SEQ ID NO: 6074024 - DNA, 25 bp, Homo sapien
aacattcaaagtgcagatttaggtt

SEQ ID NO: 6074025 - DNA, 25 bp, Homo sapien
taattagaaaatttgaacatagaat

SEQ ID NO: 6074026 - DNA, 25 bp, Homo sapien
acacttgacgtagctgacagtacac

SEQ ID NO: 6074027 - DNA, 25 bp, Homo sapien
catagaatttaagaaaacgtgtaat

SEQ ID NO: 6074028 - DNA, 25 bp, Homo sapien
cataactaatattgcataatcacgg

SEQ ID NO: 6074029 - DNA, 25 bp, Homo sapien
accaccttcacctggagacttctgt

SEQ ID NO: 6074030 - DNA, 25 bp, Homo sapien
ttacgactttgtctatttgtgtcag

SEQ ID NO: 6074031 - DNA, 25 bp, Homo sapien
tccaaaagaacccacagtacccaga

SEQ ID NO: 6074032 - DNA, 25 bp, Homo sapien
tgaacatagaatttaagaaaacgtg

SEQ ID NO: 6074033 - DNA, 25 bp, Homo sapien
gttgattcctcacattcaccaaaag

SEQ ID NO: 6074034 - DNA, 25 bp, Homo sapien
acccggctgctcacacttgacgtag

SEQ ID NO: 6074035 - DNA, 25 bp, Homo sapien
ctttgtctatttgtgtcagttgatt

SEQ ID NO: 6074036 - DNA, 25 bp, Homo sapien
gaagtcgtgcatacgctaaataaaa

SEQ ID NO: 6074037 - DNA, 25 bp, Homo sapien
tttaacacccggctgctcacacttg

SEQ ID NO: 6074038 - DNA, 25 bp, Homo sapien
cagtacactacacgcggaattatat

SEQ ID NO: 6074039 - DNA, 25 bp, Homo sapien
tattttacgactttgtctatttgtg

SEQ ID NO: 6074040 - DNA, 25 bp, Homo sapien
gaaggtgagacatcacagacattac

SEQ ID NO: 6074041 - DNA, 25 bp, Homo sapien
gattttaaccaccttcacctggaga

SEQ ID NO: 6074042 - DNA, 25 bp, Homo sapien
cactaatattacataataactaata

SEQ ID NO: 6074043 - DNA, 25 bp, Homo sapien
gacgtagctgacagtacactacacg

SEQ ID NO: 6074044 - DNA, 25 bp, Homo sapien
agaaaacgtgtaatacaacaaatga

SEQ ID NO: 6074045 - DNA, 25 bp, Homo sapien
atacaacaaatgattgtctcctggt

SEQ ID NO: 6074046 - DNA, 25 bp, Homo sapien
tggagacttctgtttaacacccggc

SEQ ID NO: 6074047 - DNA, 25 bp, Homo sapien
tcctggtgagaatcagttggtgatt

SEQ ID NO: 6074048 - DNA, 25 bp, Homo sapien
tattttgtccaaaacattcaaagtg

SEQ ID NO: 6074049 - DNA, 25 bp, Homo sapien
tagattttagaatattttgtccaaa

SEQ ID NO: 6074050 - DNA, 25 bp, Homo sapien
tacccagaagtcgtgcatacgctaa

SEQ ID NO: 6074051 - DNA, 25 bp, Homo sapien
gtccaaaacattcaaagtgcagatt

SEQ ID NO: 6074052 - DNA, 25 bp, Homo sapien
tcatcacactaatattacataataa

SEQ ID NO: 6074053 - DNA, 25 bp, Homo sapien
ctgctcacacttgacgtagctgaca

SEQ ID NO: 6074054 - DNA, 25 bp, Homo sapien
catcgtttctcttgcactgatcaac

SEQ ID NO: 6074055 - DNA, 25 bp, Homo sapien
gataataactaattagaaaatttga

SEQ ID NO: 6074056 - DNA, 25 bp, Homo sapien
caaagtgcagatttaggtttttatt

SEQ ID NO: 6074057 - DNA, 25 bp, Homo sapien
ttacataataactaatatacataca

SEQ ID NO: 6074058 - DNA, 25 bp, Homo sapien
ataataactaatatacatacataca

SEQ ID NO: 6074059 - DNA, 25 bp, Homo sapien
ctatttgtgtcagttgattcctcac

SEQ ID NO: 6074060 - DNA, 25 bp, Homo sapien
tgagaatcagttggtgattttaacc

SEQ ID NO: 6074061 - DNA, 25 bp, Homo sapien
cattcaccaaaagtaacctttggat

SEQ ID NO: 6074062 - DNA, 25 bp, Homo sapien
agctgacagtacactacacgcggaa

SEQ ID NO: 6074063 - DNA, 25 bp, Homo sapien
atatattccaaaagaacccacagta

SEQ ID NO: 6074064 - DNA, 25 bp, Homo sapien
aagccacaatctgaaggtgagacat

SEQ ID NO: 6074065 - DNA, 25 bp, Homo sapien
tgcataatcacggtactgaagccac

SEQ ID NO: 6074066 - DNA, 25 bp, Homo sapien
ttttgctcatcacactaatattaca

SEQ ID NO: 6074067 - DNA, 25 bp, Homo sapien
cgtgtaatacaacaaatgattgtct

SEQ ID NO: 6074068 - DNA, 25 bp, Homo sapien
gagacatcacagacattacatcgtt

SEQ ID NO: 6074069 - DNA, 25 bp, Homo sapien
ttatatatatattccaaaagaaccc

SEQ ID NO: 6074070 - DNA, 25 bp, Homo sapien
gcggaattatatatatattccaaaa

SEQ ID NO: 6074071 - DNA, 25 bp, Homo sapien
ttagaatattttgtccaaaacattc

SEQ ID NO: 6074072 - DNA, 25 bp, Homo sapien
ccacagtacccagaagtcgtgcata

SEQ ID NO: 6074073 - DNA, 25 bp, Homo sapien
atacatacatacataactaatattg

SEQ ID NO: 6074074 - DNA, 25 bp, Homo sapien
caaatgattgtctcctggtgagaat

SEQ ID NO: 6074075 - DNA, 25 bp, Homo sapien
tcacagacattacatcgtttctctt

SEQ ID NO: 6074076 - DNA, 25 bp, Homo sapien
tggtgattttaaccaccttcacctg

SEQ ID NO: 6074077 - DNA, 25 bp, Homo sapien
tacatacataactaatattgcataa

SEQ ID NO: 6074078 - DNA, 25 bp, Homo sapien
atcagttggtgattttaaccacctt

SEQ ID NO: 6074079 - DNA, 25 bp, Homo sapien
acattacatcgtttctcttgcactg

SEQ ID NO: 6074080 - DNA, 25 bp, Homo sapien
gtgtcagttgattcctcacattcac

SEQ ID NO: 6074081 - DNA, 25 bp, Homo sapien
gtactgaagccacaatctgaaggtg

SEQ ID NO: 6074082 - DNA, 25 bp, Homo sapien
tttttcttttgctcatcacactaat

SEQ ID NO: 6074083 - DNA, 25 bp, Homo sapien
gatcaacttttagattttagaatat

SEQ ID NO: 6074084 - DNA, 25 bp, Homo sapien
tcctcacattcaccaaaagtaacct

SEQ ID NO: 6074085 - DNA, 25 bp, Homo sapien
caatctgaaggtgagacatcacaga

SEQ ID NO: 6074086 - DNA, 25 bp, Homo sapien
taatattgcataatcacggtactga

SEQ ID NO: 6074087 - DNA, 25 bp, Homo sapien
tgcactgatcaacttttagatttta

SEQ ID NO: 6074088 - DNA, 25 bp, Homo sapien
ttcacctggagacttctgtttaaca

SEQ ID NO: 6074089 - DNA, 25 bp, Homo sapien
cttctgtttaacacccggctgctca

SEQ ID NO: 6074090 - DNA, 25 bp, Homo sapien
ttctcttgcactgatcaacttttag

SEQ ID NO: 6074091 - DNA, 25 bp, Homo sapien
attgtctcctggtgagaatcagttg

SEQ ID NO: 6074092 - DNA, 25 bp, Homo sapien
ctacacgcggaattatatatatatt

SEQ ID NO: 6074093 - DNA, 25 bp, Homo sapien
gccttactcagtagataaaccccaa

SEQ ID NO: 6074094 - DNA, 25 bp, Homo sapien
tgtcctctgacaaataacagctgga

SEQ ID NO: 6074095 - DNA, 25 bp, Homo sapien
caagggtgaaccaatcctagctgtc

SEQ ID NO: 6074096 - DNA, 25 bp, Homo sapien
tcctctacatctctgtgagggatga

SEQ ID NO: 6074097 - DNA, 25 bp, Homo sapien
gccaacagttgggaaccaataacag

SEQ ID NO: 6074098 - DNA, 25 bp, Homo sapien
tgcaaacgtttacacaagacccttg

SEQ ID NO: 6074099 - DNA, 25 bp, Homo sapien
gtctataaacgttccatggacacaa

SEQ ID NO: 6074100 - DNA, 25 bp, Homo sapien
gcagctgtcccaacataaaagcaca

SEQ ID NO: 6074101 - DNA, 25 bp, Homo sapien
cagaaactcaggtaaggtcagcctt

SEQ ID NO: 6074102 - DNA, 25 bp, Homo sapien
ccaataacaggtctagagctcctaa

SEQ ID NO: 6074103 - DNA, 25 bp, Homo sapien
gctcctaatttaggcagctgtccca

SEQ ID NO: 6074104 - DNA, 25 bp, Homo sapien
gacccttgaatggagaacatgcctt

SEQ ID NO: 6074105 - DNA, 25 bp, Homo sapien
cgacctcgtggctttacttggagaa

SEQ ID NO: 6074106 - DNA, 25 bp, Homo sapien
tagtcctgctcaacatggcaaactc

SEQ ID NO: 6074107 - DNA, 25 bp, Homo sapien
aggcatgattgtgggcttaggaccc

SEQ ID NO: 6074108 - DNA, 25 bp, Homo sapien
agaaatcatgggacttgcaagtgcc

SEQ ID NO: 6074109 - DNA, 25 bp, Homo sapien
aaagagggcagcaggccaaagcaac

SEQ ID NO: 6074110 - DNA, 25 bp, Homo sapien
ggcttaggacccctgaaagagggca

SEQ ID NO: 6074111 - DNA, 25 bp, Homo sapien
ggagggaatgaactagccagctgcc

SEQ ID NO: 6074112 - DNA, 25 bp, Homo sapien
tctgtagatgggacacgcaggtgat

SEQ ID NO: 6074113 - DNA, 25 bp, Homo sapien
ccaacggcttagagggaaggatgcc

SEQ ID NO: 6074114 - DNA, 25 bp, Homo sapien
tgccaaggtcttagggaggcatgat

SEQ ID NO: 6074115 - DNA, 25 bp, Homo sapien
caccctcagaattaccgaagaaatc

SEQ ID NO: 6074116 - DNA, 25 bp, Homo sapien
tgcaagtgccagaaatagtcctgct

SEQ ID NO: 6074117 - DNA, 25 bp, Homo sapien
ggatttttctatgtagccgttgagt

SEQ ID NO: 6074118 - DNA, 25 bp, Homo sapien
gacttagggctaggatgatgattaa

SEQ ID NO: 6074119 - DNA, 25 bp, Homo sapien
gagggatgacataactattagtggc

SEQ ID NO: 6074120 - DNA, 25 bp, Homo sapien
taaaaggagggcaatttctagatca

SEQ ID NO: 6074121 - DNA, 25 bp, Homo sapien
atatagggtcgaagccgcactcgta

SEQ ID NO: 6074122 - DNA, 25 bp, Homo sapien
caaataataagaaggtaatagctac

SEQ ID NO: 6074123 - DNA, 25 bp, Homo sapien
gctaggagggtgttgattattaaaa

SEQ ID NO: 6074124 - DNA, 25 bp, Homo sapien
tgattaataagagggatgacataac

SEQ ID NO: 6074125 - DNA, 25 bp, Homo sapien
actcataggccagacttagggctag

SEQ ID NO: 6074126 - DNA, 25 bp, Homo sapien
tctatgtagccgttgagttgtggta

SEQ ID NO: 6074127 - DNA, 25 bp, Homo sapien
gttagttgtttgtagggctcatggt

SEQ ID NO: 6074128 - DNA, 25 bp, Homo sapien
ctattagtggcaggttagttgtttg

SEQ ID NO: 6074129 - DNA, 25 bp, Homo sapien
gagattgttcctacagatgtgttgt

SEQ ID NO: 6074130 - DNA, 25 bp, Homo sapien
caatgattagtgcagcagtgttcac

SEQ ID NO: 6074131 - DNA, 25 bp, Homo sapien
ggtgctcaccaatgcaaggatgctt

SEQ ID NO: 6074132 - DNA, 25 bp, Homo sapien
tgttgttgctccatttgccagttgt

SEQ ID NO: 6074133 - DNA, 25 bp, Homo sapien
ggaaagggcgtaacataatgcaaag

SEQ ID NO: 6074134 - DNA, 25 bp, Homo sapien
accaaaacgatggagctgctggccc

SEQ ID NO: 6074135 - DNA, 25 bp, Homo sapien
tgtgcctgtacaagaccaaaacgat

SEQ ID NO: 6074136 - DNA, 25 bp, Homo sapien
gatgtgttgtacctgctgtttgtgc

SEQ ID NO: 6074137 - DNA, 25 bp, Homo sapien
gttcctagggttgatggtgatcacc

SEQ ID NO: 6074138 - DNA, 25 bp, Homo sapien
gccaccaactggaattatcgaagag

SEQ ID NO: 6074139 - DNA, 25 bp, Homo sapien
gggtcacggcacatgagaacaaaag

SEQ ID NO: 6074140 - DNA, 25 bp, Homo sapien
catggaaggatgtcaatgctgcata

SEQ ID NO: 6074141 - DNA, 25 bp, Homo sapien
gactgcttgctggtgacggagaaca

SEQ ID NO: 6074142 - DNA, 25 bp, Homo sapien
cgcttgccgtcgatgttgaggctca

SEQ ID NO: 6074143 - DNA, 25 bp, Homo sapien
atgaaagcgcacttccactcctggg

SEQ ID NO: 6074144 - DNA, 25 bp, Homo sapien
cgaacaccaccacgcggtaatcgtt

SEQ ID NO: 6074145 - DNA, 25 bp, Homo sapien
atgttccggcgcgtctccagcgtca

SEQ ID NO: 6074146 - DNA, 25 bp, Homo sapien
tgcacacgctcttgtcgcagctgat

SEQ ID NO: 6074147 - DNA, 25 bp, Homo sapien
ccttgatctgcacgatgagcttgta

SEQ ID NO: 6074148 - DNA, 25 bp, Homo sapien
tggccgaggtctccatgaaagcgca

SEQ ID NO: 6074149 - DNA, 25 bp, Homo sapien
aacgtgcccttcacgaagcgcagca

SEQ ID NO: 6074150 - DNA, 25 bp, Homo sapien
tgttgaggctcatgttccggcgcgt

SEQ ID NO: 6074151 - DNA, 25 bp, Homo sapien
cacgctgcccttgatctgcacgatg

SEQ ID NO: 6074152 - DNA, 25 bp, Homo sapien
gctgcgtctcatcgcacttgttgcc

SEQ ID NO: 6074153 - DNA, 25 bp, Homo sapien
gctgggaagatagcctgggagctgc

SEQ ID NO: 6074154 - DNA, 25 bp, Homo sapien
ggagcagggccagccgaatgctccc

SEQ ID NO: 6074155 - DNA, 25 bp, Homo sapien
gagggacaacagtgtcccaggcccc

SEQ ID NO: 6074156 - DNA, 25 bp, Homo sapien
gcaggcacctttgggcggctgccct

SEQ ID NO: 6074157 - DNA, 25 bp, Homo sapien
gccagcacgcggacagagaggaagg

SEQ ID NO: 6074158 - DNA, 25 bp, Homo sapien
catagacttcgaggtacaggtaggg

SEQ ID NO: 6074159 - DNA, 25 bp, Homo sapien
ggctgtgtagcgctgatcgcccagc

SEQ ID NO: 6074160 - DNA, 25 bp, Homo sapien
gcagcaggagcccatagacttcgag

SEQ ID NO: 6074161 - DNA, 25 bp, Homo sapien
cggagggctcatcgcggcacactgc

SEQ ID NO: 6074162 - DNA, 25 bp, Homo sapien
gctgcttgggtggtaggcaatgctg

SEQ ID NO: 6074163 - DNA, 25 bp, Homo sapien
tgccgctgcactggcacttcctagg

SEQ ID NO: 6074164 - DNA, 25 bp, Homo sapien
cactggcacttcctagggagaggag

SEQ ID NO: 6074165 - DNA, 25 bp, Homo sapien
gagttataataagcacaccaacagc

SEQ ID NO: 6074166 - DNA, 25 bp, Homo sapien
taactctctgaggatgattctgtct

SEQ ID NO: 6074167 - DNA, 25 bp, Homo sapien
gaatcaatgctatatggtaaccatg

SEQ ID NO: 6074168 - DNA, 25 bp, Homo sapien
gcctgtcgtctagccacaagaaata

SEQ ID NO: 6074169 - DNA, 25 bp, Homo sapien
tcagataattcctccagcccatcgt

SEQ ID NO: 6074170 - DNA, 25 bp, Homo sapien
gatttacaacggtctgacaacctcc

SEQ ID NO: 6074171 - DNA, 25 bp, Homo sapien
gatagaaaatctgtcaacacccagt

SEQ ID NO: 6074172 - DNA, 25 bp, Homo sapien
ggttataaagcccataaaggcatca

SEQ ID NO: 6074173 - DNA, 25 bp, Homo sapien
ccatcgtcatagacacctgtgtaga

SEQ ID NO: 6074174 - DNA, 25 bp, Homo sapien
tattgctttcctaaaccatgggtaa

SEQ ID NO: 6074175 - DNA, 25 bp, Homo sapien
tgtgtagaacacagcaccgctgtac

SEQ ID NO: 6074176 - DNA, 25 bp, Homo sapien
cagatacggtgaacttggtaggata

SEQ ID NO: 6074177 - DNA, 25 bp, Homo sapien
ctgtcttttgttactagagccccag

SEQ ID NO: 6074178 - DNA, 25 bp, Homo sapien
caaaggctcctaattatatcaagtt

SEQ ID NO: 6074179 - DNA, 25 bp, Homo sapien
ttggatcactcgaatctgggagttc

SEQ ID NO: 6074180 - DNA, 25 bp, Homo sapien
tcactcgaatctgggagttcaagct

SEQ ID NO: 6074181 - DNA, 25 bp, Homo sapien
cttttgttactagagccccagccaa

SEQ ID NO: 6074182 - DNA, 25 bp, Homo sapien
tatatcaagttacttccagaaaagt

SEQ ID NO: 6074183 - DNA, 25 bp, Homo sapien
tgggttggatcactcgaatctggga

SEQ ID NO: 6074184 - DNA, 25 bp, Homo sapien
tcgaatctgggagttcaagctttca

SEQ ID NO: 6074185 - DNA, 25 bp, Homo sapien
gaatctgggagttcaagctttcagt

SEQ ID NO: 6074186 - DNA, 25 bp, Homo sapien
ctgggagttcaagctttcagtgaac

SEQ ID NO: 6074187 - DNA, 25 bp, Homo sapien
tccttacaaaggctcctaattatat

SEQ ID NO: 6074188 - DNA, 25 bp, Homo sapien
gatacctagataagtaaaattcata

SEQ ID NO: 6074189 - DNA, 25 bp, Homo sapien
ggtttgataaaactagacctatcac

SEQ ID NO: 6074190 - DNA, 25 bp, Homo sapien
taaaactagacctatcacacattgc

SEQ ID NO: 6074191 - DNA, 25 bp, Homo sapien
tcacacattgctaatgacattacaa

SEQ ID NO: 6074192 - DNA, 25 bp, Homo sapien
tcaagtaagcaaaaacttagaacta

SEQ ID NO: 6074193 - DNA, 25 bp, Homo sapien
tgacaaaggtttgataaaactagac

SEQ ID NO: 6074194 - DNA, 25 bp, Homo sapien
tgatgcagcctttttagggagtggc

SEQ ID NO: 6074195 - DNA, 25 bp, Homo sapien
tcaaaatattcgttagtcctactaa

SEQ ID NO: 6074196 - DNA, 25 bp, Homo sapien
tacatgacaaaggtttgataaaact

SEQ ID NO: 6074197 - DNA, 25 bp, Homo sapien
caaattgatgcagcctttttaggga

SEQ ID NO: 6074198 - DNA, 25 bp, Homo sapien
gacattacaaattgatgcagccttt

SEQ ID NO: 6074199 - DNA, 25 bp, Homo sapien
gttagtcctactaatcaagtaagca

SEQ ID NO: 6074200 - DNA, 25 bp, Homo sapien
tagacctatcacacattgctaatga

SEQ ID NO: 6074201 - DNA, 25 bp, Homo sapien
gagttataataagcacaccaacagc

SEQ ID NO: 6074202 - DNA, 25 bp, Homo sapien
cagatacggtgaacttggtaggata

SEQ ID NO: 6074203 - DNA, 25 bp, Homo sapien
ggttataaagcccataaaggcatca

SEQ ID NO: 6074204 - DNA, 25 bp, Homo sapien
taactctctgaggatgattctgtct

SEQ ID NO: 6074205 - DNA, 25 bp, Homo sapien
tgtgtagaacacagcaccgctgtac

SEQ ID NO: 6074206 - DNA, 25 bp, Homo sapien
tcagataattcctccagcccatcgt

SEQ ID NO: 6074207 - DNA, 25 bp, Homo sapien
ccatcgtcatagacacctgtgtaga

SEQ ID NO: 6074208 - DNA, 25 bp, Homo sapien
gcctgtcgtctagccacaagaaata

SEQ ID NO: 6074209 - DNA, 25 bp, Homo sapien
gaatcaatgctatatggtaaccatg

SEQ ID NO: 6074210 - DNA, 25 bp, Homo sapien
tattgctttcctaaaccatgggtaa

SEQ ID NO: 6074211 - DNA, 25 bp, Homo sapien
gatttacaacggtctgacaacctcc

SEQ ID NO: 6074212 - DNA, 25 bp, Homo sapien
gatagaaaatctgtcaacacccagt

SEQ ID NO: 6074213 - DNA, 25 bp, Homo sapien
gagctactagtattccatcgatcag

SEQ ID NO: 6074214 - DNA, 25 bp, Homo sapien
tctcgcactgcacgaggctggtgga

SEQ ID NO: 6074215 - DNA, 25 bp, Homo sapien
tggtggagcacatactgataacgtc

SEQ ID NO: 6074216 - DNA, 25 bp, Homo sapien
tattccatcgatcagatgggcaaga

SEQ ID NO: 6074217 - DNA, 25 bp, Homo sapien
tgcacgaggctggtggagcacatac

SEQ ID NO: 6074218 - DNA, 25 bp, Homo sapien
tataatccccaagggcttcatgaaa

SEQ ID NO: 6074219 - DNA, 25 bp, Homo sapien
catgaaaatagcaaggagctactag

SEQ ID NO: 6074220 - DNA, 25 bp, Homo sapien
atgggcaagatttaaagccctgata

SEQ ID NO: 6074221 - DNA, 25 bp, Homo sapien
tgaacaggcatctctcgcactgcac

SEQ ID NO: 6074222 - DNA, 25 bp, Homo sapien
catactgataacgtctttctggaga

SEQ ID NO: 6074223 - DNA, 25 bp, Homo sapien
gatttaaagccctgataatagccat

SEQ ID NO: 6074224 - DNA, 25 bp, Homo sapien
aaagttgcccaactaacacttcatt

SEQ ID NO: 6074225 - DNA, 25 bp, Homo sapien
atcttggccttgtcggtcgaccgat

SEQ ID NO: 6074226 - DNA, 25 bp, Homo sapien
tggccttgtcggtcgaccgatcgat

SEQ ID NO: 6074227 - DNA, 25 bp, Homo sapien
ttggccttgtcggtcgaccgatcga

SEQ ID NO: 6074228 - DNA, 25 bp, Homo sapien
cttggccttgtcggtcgaccgatcg

SEQ ID NO: 6074229 - DNA, 25 bp, Homo sapien
tcttggccttgtcggtcgaccgatc

SEQ ID NO: 6074230 - DNA, 25 bp, Homo sapien
gttgccccttcaagccgaaaatgcc

SEQ ID NO: 6074231 - DNA, 25 bp, Homo sapien
agaacagagcgggagtttcaaccga

SEQ ID NO: 6074232 - DNA, 25 bp, Homo sapien
gatgcgcaacgtcttcaagttctgt

SEQ ID NO: 6074233 - DNA, 25 bp, Homo sapien
caccggagcaatggtgtcgagccgc

SEQ ID NO: 6074234 - DNA, 25 bp, Homo sapien
accggaaagatgttgccccttcaag

SEQ ID NO: 6074235 - DNA, 25 bp, Homo sapien
ggagtttcaaccgatatctttgcga

SEQ ID NO: 6074236 - DNA, 25 bp, Homo sapien
cagatgcggcgccttggcagaacag

SEQ ID NO: 6074237 - DNA, 25 bp, Homo sapien
ctttgaaggcaattctttccgcaag

SEQ ID NO: 6074238 - DNA, 25 bp, Homo sapien
gatgcctgcgcgtgccgccactgtg

SEQ ID NO: 6074239 - DNA, 25 bp, Homo sapien
gacagggttaatggtgggcaccgga

SEQ ID NO: 6074240 - DNA, 25 bp, Homo sapien
aacgagcgaacgctgatgcctgcgc

SEQ ID NO: 6074241 - DNA, 25 bp, Homo sapien
attcgcatctgcaatttcagtagct

SEQ ID NO: 6074242 - DNA, 25 bp, Homo sapien
gttaatggtgggcaccggagcaatg

SEQ ID NO: 6074243 - DNA, 25 bp, Homo sapien
gccatcgccgctctcgaggttccgc

SEQ ID NO: 6074244 - DNA, 25 bp, Homo sapien
cgaagactataagcagttcctcgta

SEQ ID NO: 6074245 - DNA, 25 bp, Homo sapien
catcatcagcgtcgaagactataag

SEQ ID NO: 6074246 - DNA, 25 bp, Homo sapien
gcatctgcaactaccggaaagatgt

SEQ ID NO: 6074247 - DNA, 25 bp, Homo sapien
catcatgacagggttaatggtgggc

SEQ ID NO: 6074248 - DNA, 25 bp, Homo sapien
gaaattagcgtgtgcagcgacgagc

SEQ ID NO: 6074249 - DNA, 25 bp, Homo sapien
ttacatcggcaagcatctgcaacta

SEQ ID NO: 6074250 - DNA, 25 bp, Homo sapien
ttcaaccgatatctttgcgacgtgg

SEQ ID NO: 6074251 - DNA, 25 bp, Homo sapien
cgtggcaagaggcagatagcgcgca

SEQ ID NO: 6074252 - DNA, 25 bp, Homo sapien
tccgagttcagccgctatcgcggcg

SEQ ID NO: 6074253 - DNA, 25 bp, Homo sapien
gcaactaccggaaagatgttgcccc

SEQ ID NO: 6074254 - DNA, 25 bp, Homo sapien
tccaacatcccgcccgggttacatc

SEQ ID NO: 6074255 - DNA, 25 bp, Homo sapien
cttcaagttctgtccgagttcagcc

SEQ ID NO: 6074256 - DNA, 25 bp, Homo sapien
cgatatctttgcgacgtggcctggt

SEQ ID NO: 6074257 - DNA, 25 bp, Homo sapien
atggtgtcgagccgcgcttcccggc

SEQ ID NO: 6074258 - DNA, 25 bp, Homo sapien
agtagctccaacatcccgcccgggt

SEQ ID NO: 6074259 - DNA, 25 bp, Homo sapien
aatttcagtagctccaacatcccgc

SEQ ID NO: 6074260 - DNA, 25 bp, Homo sapien
ggtgggcaccggagcaatggtgtcg

SEQ ID NO: 6074261 - DNA, 25 bp, Homo sapien
tattgacctgtcagggaagtacagg

SEQ ID NO: 6074262 - DNA, 25 bp, Homo sapien
gttccgcaacgagcgaacgctgatg

SEQ ID NO: 6074263 - DNA, 25 bp, Homo sapien
atcccgcccgggttacatcggcaag

SEQ ID NO: 6074264 - DNA, 25 bp, Homo sapien
cggcgccttggcagaacagagcggg

SEQ ID NO: 6074265 - DNA, 25 bp, Homo sapien
cagcgtcgaagactataagcagttc

SEQ ID NO: 6074266 - DNA, 25 bp, Homo sapien
gacgagccatcgccgctctcgaggt

SEQ ID NO: 6074267 - DNA, 25 bp, Homo sapien
cctgtcagggaagtacaggcgaaac

SEQ ID NO: 6074268 - DNA, 25 bp, Homo sapien
agaaccgaaattagcgtgtgcagcg

SEQ ID NO: 6074269 - DNA, 25 bp, Homo sapien
gaggttcttgtggatgcgcaacgtc

SEQ ID NO: 6074270 - DNA, 25 bp, Homo sapien
cgagccgcgcttcccggcccagtac

SEQ ID NO: 6074271 - DNA, 25 bp, Homo sapien
gagcaatggtgtcgagccgcgcttc

SEQ ID NO: 6074272 - DNA, 25 bp, Homo sapien
tgtggcctggtcgaggttcttgtgg

SEQ ID NO: 6074273 - DNA, 25 bp, Homo sapien
gccgctctcgaggttccgcaacgag

SEQ ID NO: 6074274 - DNA, 25 bp, Homo sapien
ttctttccgcaagtcaagtattgac

SEQ ID NO: 6074275 - DNA, 25 bp, Homo sapien
cccgggttacatcggcaagcatctg

SEQ ID NO: 6074276 - DNA, 25 bp, Homo sapien
gcgcgcatctcgaagacgtccttat

SEQ ID NO: 6074277 - DNA, 25 bp, Homo sapien
atttgcccagatgcggcgccttggc

SEQ ID NO: 6074278 - DNA, 25 bp, Homo sapien
gtcaagtattgacctgtcagggaag

SEQ ID NO: 6074279 - DNA, 25 bp, Homo sapien
gttctgtccgagttcagccgctatc

SEQ ID NO: 6074280 - DNA, 25 bp, Homo sapien
cgtgccgccactgtggcctggtcga

SEQ ID NO: 6074281 - DNA, 25 bp, Homo sapien
atctcgaagacgtccttatttgccc

SEQ ID NO: 6074282 - DNA, 25 bp, Homo sapien
aagaggcagatagcgcgcatctcga

SEQ ID NO: 6074283 - DNA, 25 bp, Homo sapien
tgcgcgtgccgccactgtggcctgg

SEQ ID NO: 6074284 - DNA, 25 bp, Homo sapien
ctcgaggttccgcaacgagcgaacg

SEQ ID NO: 6074285 - DNA, 25 bp, Homo sapien
cagatagcgcgcatctcgaagacgt

SEQ ID NO: 6074286 - DNA, 25 bp, Homo sapien
gcttcccggcccagtacgcggagaa

SEQ ID NO: 6074287 - DNA, 25 bp, Homo sapien
cttggcagaacagagcgggagtttc

SEQ ID NO: 6074288 - DNA, 25 bp, Homo sapien
cttgtggatgcgcaacgtcttcaag

SEQ ID NO: 6074289 - DNA, 25 bp, Homo sapien
gtggctcgctgacgcggctctgcct

SEQ ID NO: 6074290 - DNA, 25 bp, Homo sapien
ccgcaagtcaagtattgacctgtca

SEQ ID NO: 6074291 - DNA, 25 bp, Homo sapien
ttcagccgctatcgcggcgggcgtt

SEQ ID NO: 6074292 - DNA, 25 bp, Homo sapien
agcgtgtgcagcgacgagccatcgc

SEQ ID NO: 6074293 - DNA, 25 bp, Homo sapien
ccttcaagccgaaaatgccggcaaa

SEQ ID NO: 6074294 - DNA, 25 bp, Homo sapien
cctcgtagaccacgtggcaagaggc

SEQ ID NO: 6074295 - DNA, 25 bp, Homo sapien
gcagttcctcgtagaccacgtggca

SEQ ID NO: 6074296 - DNA, 25 bp, Homo sapien
acgcggagaaccgaaattagcgtgt

SEQ ID NO: 6074297 - DNA, 25 bp, Homo sapien
agggaagtacaggcgaaacatcatc

SEQ ID NO: 6074298 - DNA, 25 bp, Homo sapien
gctgacgcggctctgccttccgcgt

SEQ ID NO: 6074299 - DNA, 25 bp, Homo sapien
ctggtcgaggttcttgtggatgcgc

SEQ ID NO: 6074300 - DNA, 25 bp, Homo sapien
atctgcaatttcagtagctccaaca

SEQ ID NO: 6074301 - DNA, 25 bp, Homo sapien
aggcaattctttccgcaagtcaagt

SEQ ID NO: 6074302 - DNA, 25 bp, Homo sapien
agagcgggagtttcaaccgatatct

SEQ ID NO: 6074303 - DNA, 25 bp, Homo sapien
tccttatttgcccagatgcggcgcc

SEQ ID NO: 6074304 - DNA, 25 bp, Homo sapien
agaccacgtggcaagaggcagatag

SEQ ID NO: 6074305 - DNA, 25 bp, Homo sapien
gtacaggcgaaacatcatcagcgtc

SEQ ID NO: 6074306 - DNA, 25 bp, Homo sapien
ccgctatcgcggcgggcgttcgcat

SEQ ID NO: 6074307 - DNA, 25 bp, Homo sapien
ggcctggtggctcgctgacgcggct

SEQ ID NO: 6074308 - DNA, 25 bp, Homo sapien
cggcaagcatctgcaactaccggaa

SEQ ID NO: 6074309 - DNA, 25 bp, Homo sapien
atcgcggcgggcgttcgcattcgca

SEQ ID NO: 6074310 - DNA, 25 bp, Homo sapien
gaacgctgatgcctgcgcgtgccgc

SEQ ID NO: 6074311 - DNA, 25 bp, Homo sapien
ccagtacgcggagaaccgaaattag

SEQ ID NO: 6074312 - DNA, 25 bp, Homo sapien
cgacgtggcctggtggctcgctgac

SEQ ID NO: 6074313 - DNA, 25 bp, Homo sapien
gcagcgacgagccatcgccgctctc

SEQ ID NO: 6074314 - DNA, 25 bp, Homo sapien
ccgcgtcatcatgacagggttaatg

SEQ ID NO: 6074315 - DNA, 25 bp, Homo sapien
cgatggctttgaaggcaattctttc

SEQ ID NO: 6074316 - DNA, 25 bp, Homo sapien
gcgggcgttcgcattcgcatctgca

SEQ ID NO: 6074317 - DNA, 25 bp, Homo sapien
aagacgtccttatttgcccagatgc

SEQ ID NO: 6074318 - DNA, 25 bp, Homo sapien
tctttgcgacgtggcctggtggctc

SEQ ID NO: 6074319 - DNA, 25 bp, Homo sapien
gttcgcattcgcatctgcaatttca

SEQ ID NO: 6074320 - DNA, 25 bp, Homo sapien
cggctctgccttccgcgtcatcatg

SEQ ID NO: 6074321 - DNA, 25 bp, Homo sapien
cgccactgtggcctggtcgaggttc

SEQ ID NO: 6074322 - DNA, 25 bp, Homo sapien
caacgtcttcaagttctgtccgagt

SEQ ID NO: 6074323 - DNA, 25 bp, Homo sapien
ctataagcagttcctcgtagaccac

SEQ ID NO: 6074324 - DNA, 25 bp, Homo sapien
aagatgttgccccttcaagccgaaa

SEQ ID NO: 6074325 - DNA, 25 bp, Homo sapien
gcgaaacatcatcagcgtcgaagac

SEQ ID NO: 6074326 - DNA, 25 bp, Homo sapien
tgccttccgcgtcatcatgacaggg

SEQ ID NO: 6074327 - DNA, 25 bp, Homo sapien
gcggagtttgccattgagttctctc

SEQ ID NO: 6074328 - DNA, 25 bp, Homo sapien
aaggcttcagactgcagcctgagtt

SEQ ID NO: 6074329 - DNA, 25 bp, Homo sapien
tgaattctgaattgcaggccagagg

SEQ ID NO: 6074330 - DNA, 25 bp, Homo sapien
aagctccctgactctcaagttgctg

SEQ ID NO: 6074331 - DNA, 25 bp, Homo sapien
tttgttctgaagcactttgcccctt

SEQ ID NO: 6074332 - DNA, 25 bp, Homo sapien
tctactttgcgctgaagctccctga

SEQ ID NO: 6074333 - DNA, 25 bp, Homo sapien
tctctagtgacggtctgcagcctgg

SEQ ID NO: 6074334 - DNA, 25 bp, Homo sapien
tctggatcccatctactttgcgctg

SEQ ID NO: 6074335 - DNA, 25 bp, Homo sapien
cttgcttaaaagatccaagctgtgc

SEQ ID NO: 6074336 - DNA, 25 bp, Homo sapien
ctgagttcatcgtaggccttctgga

SEQ ID NO: 6074337 - DNA, 25 bp, Homo sapien
agcactttgcccctttcaatggaca

SEQ ID NO: 6074338 - DNA, 25 bp, Homo sapien
tactcttgccataatgctaagacgc

SEQ ID NO: 6074339 - DNA, 25 bp, Homo sapien
tcattcaatgttcggagataaaaga

SEQ ID NO: 6074340 - DNA, 25 bp, Homo sapien
taatattgtagtgacagtactgagg

SEQ ID NO: 6074341 - DNA, 25 bp, Homo sapien
tatctgatacaacagaataacattt

SEQ ID NO: 6074342 - DNA, 25 bp, Homo sapien
tctcattcaatgttcggagataaaa

SEQ ID NO: 6074343 - DNA, 25 bp, Homo sapien
gcagaatgtaatattgtagtgacag

SEQ ID NO: 6074344 - DNA, 25 bp, Homo sapien
cagactattaaatggttacatctta

SEQ ID NO: 6074345 - DNA, 25 bp, Homo sapien
gaacagcatctggaaatttatctca

SEQ ID NO: 6074346 - DNA, 25 bp, Homo sapien
gaatgtaatattgtagtgacagtac

SEQ ID NO: 6074347 - DNA, 25 bp, Homo sapien
agaacagcatctggaaatttatctc

SEQ ID NO: 6074348 - DNA, 25 bp, Homo sapien
aagagttaaacatcctttccattat

SEQ ID NO: 6074349 - DNA, 25 bp, Homo sapien
tcaatgttcggagataaaagagtta

SEQ ID NO: 6074350 - DNA, 25 bp, Homo sapien
cagcatctggaaatttatctcattc

SEQ ID NO: 6074351 - DNA, 25 bp, Homo sapien
tcagcagaaaatcgggctgcccact

SEQ ID NO: 6074352 - DNA, 25 bp, Homo sapien
cgaaaccataaagggtgcgaccctg

SEQ ID NO: 6074353 - DNA, 25 bp, Homo sapien
tgcgaccctggcgtttcagcgcgta

SEQ ID NO: 6074354 - DNA, 25 bp, Homo sapien
gcgaatcgccggctttgtaatgcct

SEQ ID NO: 6074355 - DNA, 25 bp, Homo sapien
cagcgcctactcagcagaaaatcgg

SEQ ID NO: 6074356 - DNA, 25 bp, Homo sapien
gtaagtcaccgcgtcacggatcacg

SEQ ID NO: 6074357 - DNA, 25 bp, Homo sapien
gactccccgggtctcctcgtagatg

SEQ ID NO: 6074358 - DNA, 25 bp, Homo sapien
tctgaaatcacagcgcctactcagc

SEQ ID NO: 6074359 - DNA, 25 bp, Homo sapien
tgtaatgccttggatattgtcccgc

SEQ ID NO: 6074360 - DNA, 25 bp, Homo sapien
ctccgtgtaagtcaccgcgtcacgg

SEQ ID NO: 6074361 - DNA, 25 bp, Homo sapien
cttggatattgtcccgcagcacctt

SEQ ID NO: 6074362 - DNA, 25 bp, Homo sapien
cccacgtcgggcgagacggcgaatc

SEQ ID NO: 6074363 - DNA, 25 bp, Homo sapien
tcacccaagctaaggtcaagaaagc

SEQ ID NO: 6074364 - DNA, 25 bp, Homo sapien
ttaaaaaccagcaaggagcaccgca

SEQ ID NO: 6074365 - DNA, 25 bp, Homo sapien
aggtcaagaaagctgaaacccggtg

SEQ ID NO: 6074366 - DNA, 25 bp, Homo sapien
tgggcccaccatcgagctgagctgc

SEQ ID NO: 6074367 - DNA, 25 bp, Homo sapien
aacagtctcacccaagctaaggtca

SEQ ID NO: 6074368 - DNA, 25 bp, Homo sapien
cagtctcacccaagctaaggtcaag

SEQ ID NO: 6074369 - DNA, 25 bp, Homo sapien
agttaaaaaccagcaaggagcaccg

SEQ ID NO: 6074370 - DNA, 25 bp, Homo sapien
cccaagctaaggtcaagaaagctga

SEQ ID NO: 6074371 - DNA, 25 bp, Homo sapien
ggcccaccatcgagctgagctgctt

SEQ ID NO: 6074372 - DNA, 25 bp, Homo sapien
tttgccctgagcctgtgatagcctc

SEQ ID NO: 6074373 - DNA, 25 bp, Homo sapien
gctaaggtcaagaaagctgaaaccc

SEQ ID NO: 6074374 - DNA, 25 bp, Homo sapien
aaggagcaccgcagctagccagcct

SEQ ID NO: 6074375 - DNA, 25 bp, Homo sapien
tagcacctttagatgacacctccgg

SEQ ID NO: 6074376 - DNA, 25 bp, Homo sapien
tatacgctcaaagatatcagtgacg

SEQ ID NO: 6074377 - DNA, 25 bp, Homo sapien
cagtagcaagcgcactgctgtctga

SEQ ID NO: 6074378 - DNA, 25 bp, Homo sapien
tctctggaagaaatggtggagcgct

SEQ ID NO: 6074379 - DNA, 25 bp, Homo sapien
agacacagcatgtttagccagctct

SEQ ID NO: 6074380 - DNA, 25 bp, Homo sapien
tgcctcgctcgctatacgctcaaag

SEQ ID NO: 6074381 - DNA, 25 bp, Homo sapien
cgcttgctgtagtgagccaaacgtg

SEQ ID NO: 6074382 - DNA, 25 bp, Homo sapien
cataatgctcatagctttcgaagag

SEQ ID NO: 6074383 - DNA, 25 bp, Homo sapien
atgtttagccagctctcccggcagt

SEQ ID NO: 6074384 - DNA, 25 bp, Homo sapien
ccttcttggaaatggtagcaccttt

SEQ ID NO: 6074385 - DNA, 25 bp, Homo sapien
taactctccttacgggtcctcttgc

SEQ ID NO: 6074386 - DNA, 25 bp, Homo sapien
tacgggtcctcttgcgctttttgcc

SEQ ID NO: 6074387 - DNA, 25 bp, Homo sapien
gactaatgtccagtgcgtaggccag

SEQ ID NO: 6074388 - DNA, 25 bp, Homo sapien
agccagcgtgcacagcaccaagaag

SEQ ID NO: 6074389 - DNA, 25 bp, Homo sapien
tgctgctgcccaccgtgagcaggaa

SEQ ID NO: 6074390 - DNA, 25 bp, Homo sapien
cctggcacttgtggtagagaagagc

SEQ ID NO: 6074391 - DNA, 25 bp, Homo sapien
ccagtgcgtgtgcagaggctcatag

SEQ ID NO: 6074392 - DNA, 25 bp, Homo sapien
ggccgtcgggcctcatagtccagtg

SEQ ID NO: 6074393 - DNA, 25 bp, Homo sapien
tacttgttatagcaggagccaatgc

SEQ ID NO: 6074394 - DNA, 25 bp, Homo sapien
gttggtggccctgcccgaagacatg

SEQ ID NO: 6074395 - DNA, 25 bp, Homo sapien
gaagatacgatgcaccacaggacta

SEQ ID NO: 6074396 - DNA, 25 bp, Homo sapien
aagatgtggaaaagttggtggccct

SEQ ID NO: 6074397 - DNA, 25 bp, Homo sapien
tcaagtttgcgctgtaccagctggc

SEQ ID NO: 6074398 - DNA, 25 bp, Homo sapien
tgcagaggctcatagatgggccgtc

SEQ ID NO: 6074399 - DNA, 25 bp, Homo sapien
tgggtggctgccagatggaattcct

SEQ ID NO: 6074400 - DNA, 25 bp, Homo sapien
ctctctgggagtcatgagtctcgat

SEQ ID NO: 6074401 - DNA, 25 bp, Homo sapien
gccagatggaattccttggatatca

SEQ ID NO: 6074402 - DNA, 25 bp, Homo sapien
agacgagtacaatagagttggagcc

SEQ ID NO: 6074403 - DNA, 25 bp, Homo sapien
tctgaaaggctaacagacttccagg

SEQ ID NO: 6074404 - DNA, 25 bp, Homo sapien
ggcagaaaggtccttgagggaaaca

SEQ ID NO: 6074405 - DNA, 25 bp, Homo sapien
aggtccttgagggaaacattctagg

SEQ ID NO: 6074406 - DNA, 25 bp, Homo sapien
tcctagaggcggataggtggattcc

SEQ ID NO: 6074407 - DNA, 25 bp, Homo sapien
cattggcaggactgatgcaaacagc

SEQ ID NO: 6074408 - DNA, 25 bp, Homo sapien
agggaaccaggatatcctcctgtgt

SEQ ID NO: 6074409 - DNA, 25 bp, Homo sapien
catgttacttctgaaaggctaacag

SEQ ID NO: 6074410 - DNA, 25 bp, Homo sapien
tagagttggagccaaggtcctagag

SEQ ID NO: 6074411 - DNA, 25 bp, Homo sapien
ggcatgaccttcagcgccagcggca

SEQ ID NO: 6074412 - DNA, 25 bp, Homo sapien
gaagtgctgaccacgtcatcctgcg

SEQ ID NO: 6074413 - DNA, 25 bp, Homo sapien
agctgctcggccacgttgaggttga

SEQ ID NO: 6074414 - DNA, 25 bp, Homo sapien
cccgggtagcagcacagctgctcgg

SEQ ID NO: 6074415 - DNA, 25 bp, Homo sapien
agcgtgcatagaaggcggcctcctg

SEQ ID NO: 6074416 - DNA, 25 bp, Homo sapien
agggctgaagtgagtcgcctccacg

SEQ ID NO: 6074417 - DNA, 25 bp, Homo sapien
ccagcggcacaaggtcgtcgaaggt

SEQ ID NO: 6074418 - DNA, 25 bp, Homo sapien
ggttgccctccacgtcaccaggtga

SEQ ID NO: 6074419 - DNA, 25 bp, Homo sapien
catcctgcgtgcgtcggagcagcag

SEQ ID NO: 6074420 - DNA, 25 bp, Homo sapien
acgttcttgaggtgcttccgagcca

SEQ ID NO: 6074421 - DNA, 25 bp, Homo sapien
tcgtccacgcggtagcgtgcataga

SEQ ID NO: 6074422 - DNA, 25 bp, Homo sapien
tcttcgcagcgtgcacggtaggagc

SEQ ID NO: 6074423 - DNA, 25 bp, Homo sapien
catatttcatggactctaaagtgct

SEQ ID NO: 6074424 - DNA, 25 bp, Homo sapien
tgtagctgacgggttcctcaaggcc

SEQ ID NO: 6074425 - DNA, 25 bp, Homo sapien
tgcgtcttagaaccagtggaacaga

SEQ ID NO: 6074426 - DNA, 25 bp, Homo sapien
gatgtgagaagctctgcgtcttaga

SEQ ID NO: 6074427 - DNA, 25 bp, Homo sapien
aagccagggccgcaagaggttgtcc

SEQ ID NO: 6074428 - DNA, 25 bp, Homo sapien
gagtaatacaatcaaacccacgggc

SEQ ID NO: 6074429 - DNA, 25 bp, Homo sapien
gagaagcatcctgattgagatgtga

SEQ ID NO: 6074430 - DNA, 25 bp, Homo sapien
taaagtgctaccaatggagagaagc

SEQ ID NO: 6074431 - DNA, 25 bp, Homo sapien
aggaagcagcatacccagccccagt

SEQ ID NO: 6074432 - DNA, 25 bp, Homo sapien
ggctgtaggtgacgcccctgtagct

SEQ ID NO: 6074433 - DNA, 25 bp, Homo sapien
ctctgttacacaggcggccggtgca

SEQ ID NO: 6074434 - DNA, 25 bp, Homo sapien
tcctggtggacagccttagaaggga

SEQ ID NO: 6074435 - DNA, 25 bp, Homo sapien
tgccttgaattttggtaaagatcgg

SEQ ID NO: 6074436 - DNA, 25 bp, Homo sapien
aagtaagcagagagtaaacagcaga

SEQ ID NO: 6074437 - DNA, 25 bp, Homo sapien
gccctccactgctgacgcaattgta

SEQ ID NO: 6074438 - DNA, 25 bp, Homo sapien
gtaaagatcgggcaggcagaataga

SEQ ID NO: 6074439 - DNA, 25 bp, Homo sapien
gaggccatctcagacaaaagtaagc

SEQ ID NO: 6074440 - DNA, 25 bp, Homo sapien
ggccttccctctgtaacaggtgcct

SEQ ID NO: 6074441 - DNA, 25 bp, Homo sapien
taacaggtgccttgaattttggtaa

SEQ ID NO: 6074442 - DNA, 25 bp, Homo sapien
gaatagagacattgccctccactgc

SEQ ID NO: 6074443 - DNA, 25 bp, Homo sapien
cagagagtaaacagcagaaggtagg

SEQ ID NO: 6074444 - DNA, 25 bp, Homo sapien
tcacttgcagcacttggccttccct

SEQ ID NO: 6074445 - DNA, 25 bp, Homo sapien
cactgctgacgcaattgtaatgatc

SEQ ID NO: 6074446 - DNA, 25 bp, Homo sapien
aatgatcagatctgtggccaaggcc

SEQ ID NO: 6074447 - DNA, 25 bp, Homo sapien
cacgcgctccgaatagttgcccttg

SEQ ID NO: 6074448 - DNA, 25 bp, Homo sapien
ggcgcccacgcgctccgaatagttg

SEQ ID NO: 6074449 - DNA, 25 bp, Homo sapien
ggcgcgcgccttgccaccctgctta

SEQ ID NO: 6074450 - DNA, 25 bp, Homo sapien
gaccggacatttccgagtcaaggaa

SEQ ID NO: 6074451 - DNA, 25 bp, Homo sapien
agtactcgagcaccgcggccagata

SEQ ID NO: 6074452 - DNA, 25 bp, Homo sapien
cgcgctccgaatagttgcccttgcg

SEQ ID NO: 6074453 - DNA, 25 bp, Homo sapien
tgcttaccacgaccggacatttccg

SEQ ID NO: 6074454 - DNA, 25 bp, Homo sapien
gagcaaccggtgcacgcggcccacg

SEQ ID NO: 6074455 - DNA, 25 bp, Homo sapien
ggcagtcaagtactcgagcaccgcg

SEQ ID NO: 6074456 - DNA, 25 bp, Homo sapien
taccacgaccggacatttccgagtc

SEQ ID NO: 6074457 - DNA, 25 bp, Homo sapien
cacgaccggacatttccgagtcaag

SEQ ID NO: 6074458 - DNA, 25 bp, Homo sapien
accctgcttaccacgaccggacatt

SEQ ID NO: 6074459 - DNA, 25 bp, Homo sapien
ggagccgatttggacgggtctggca

SEQ ID NO: 6074460 - DNA, 25 bp, Homo sapien
tttagaacccttcttgggcgcagga

SEQ ID NO: 6074461 - DNA, 25 bp, Homo sapien
gatttggacgggtctggcatgatgg

SEQ ID NO: 6074462 - DNA, 25 bp, Homo sapien
ttagaacccttcttgggcgcaggag

SEQ ID NO: 6074463 - DNA, 25 bp, Homo sapien
agccgatttggacgggtctggcatg

SEQ ID NO: 6074464 - DNA, 25 bp, Homo sapien
cgatttggacgggtctggcatgatg

SEQ ID NO: 6074465 - DNA, 25 bp, Homo sapien
agaacccttcttgggcgcaggagcc

SEQ ID NO: 6074466 - DNA, 25 bp, Homo sapien
aggagccgatttggacgggtctggc

SEQ ID NO: 6074467 - DNA, 25 bp, Homo sapien
cttcttgggcgcaggagccgatttg

SEQ ID NO: 6074468 - DNA, 25 bp, Homo sapien
ccgatttggacgggtctggcatgat

SEQ ID NO: 6074469 - DNA, 25 bp, Homo sapien
tagaacccttcttgggcgcaggagc

SEQ ID NO: 6074470 - DNA, 25 bp, Homo sapien
gagccgatttggacgggtctggcat

SEQ ID NO: 6074471 - DNA, 25 bp, Homo sapien
aatcagtagaattgagtggctggca

SEQ ID NO: 6074472 - DNA, 25 bp, Homo sapien
ccacagaagccagggtatcaatcca

SEQ ID NO: 6074473 - DNA, 25 bp, Homo sapien
tgttgatgcagaacatgctgtgact

SEQ ID NO: 6074474 - DNA, 25 bp, Homo sapien
gcacaaattattccacagactgttg

SEQ ID NO: 6074475 - DNA, 25 bp, Homo sapien
gaggagtcacaatccccaggttaaa

SEQ ID NO: 6074476 - DNA, 25 bp, Homo sapien
tgaaggaaataaacacggacagcca

SEQ ID NO: 6074477 - DNA, 25 bp, Homo sapien
gggtatcaatccagtaattctccac

SEQ ID NO: 6074478 - DNA, 25 bp, Homo sapien
gatgatctggcacaaattattccac

SEQ ID NO: 6074479 - DNA, 25 bp, Homo sapien
gaattgttacaatacacagtgcaga

SEQ ID NO: 6074480 - DNA, 25 bp, Homo sapien
acatgatcagaggagtcacaatccc

SEQ ID NO: 6074481 - DNA, 25 bp, Homo sapien
tacacagtgcagatgttgatgcaga

SEQ ID NO: 6074482 - DNA, 25 bp, Homo sapien
aaagccagaccgaccacattgatct

SEQ ID NO: 6074483 - DNA, 25 bp, Homo sapien
cagtaaaagtcgttctgcatggaga

SEQ ID NO: 6074484 - DNA, 25 bp, Homo sapien
tcaatgatcagggacagaaaggaca

SEQ ID NO: 6074485 - DNA, 25 bp, Homo sapien
gaattgaccagatgaccagtttcag

SEQ ID NO: 6074486 - DNA, 25 bp, Homo sapien
cagcataattgagaccagaaaaaca

SEQ ID NO: 6074487 - DNA, 25 bp, Homo sapien
aattttgcggcatcaatgatcaggg

SEQ ID NO: 6074488 - DNA, 25 bp, Homo sapien
cacagaacaggacactgagccagct

SEQ ID NO: 6074489 - DNA, 25 bp, Homo sapien
tagactgcaatttgccatggccagt

SEQ ID NO: 6074490 - DNA, 25 bp, Homo sapien
gatatacagggtagttcacccaaaa

SEQ ID NO: 6074491 - DNA, 25 bp, Homo sapien
gatggacagatatgcacaggtagac

SEQ ID NO: 6074492 - DNA, 25 bp, Homo sapien
cacttgtaggtcatgttcccagaaa

SEQ ID NO: 6074493 - DNA, 25 bp, Homo sapien
gcattctctgagtatgcctcctcag

SEQ ID NO: 6074494 - DNA, 25 bp, Homo sapien
aggctgtgcccgttgtgctgcattc

SEQ ID NO: 6074495 - DNA, 25 bp, Homo sapien
ttcctagcgtggttacagtcgcatc

SEQ ID NO: 6074496 - DNA, 25 bp, Homo sapien
aaaaaacatagcagggtcagagtga

SEQ ID NO: 6074497 - DNA, 25 bp, Homo sapien
agtgaagggcactaagtttcctagc

SEQ ID NO: 6074498 - DNA, 25 bp, Homo sapien
gtttcctagcgtggttacagtcgca

SEQ ID NO: 6074499 - DNA, 25 bp, Homo sapien
agtttcctagcgtggttacagtcgc

SEQ ID NO: 6074500 - DNA, 25 bp, Homo sapien
ggcactaagtttcctagcgtggtta

SEQ ID NO: 6074501 - DNA, 25 bp, Homo sapien
tgaagggcactaagtttcctagcgt

SEQ ID NO: 6074502 - DNA, 25 bp, Homo sapien
agggcactaagtttcctagcgtggt

SEQ ID NO: 6074503 - DNA, 25 bp, Homo sapien
cactaagtttcctagcgtggttaca

SEQ ID NO: 6074504 - DNA, 25 bp, Homo sapien
cctagcgtggttacagtcgcatctg

SEQ ID NO: 6074505 - DNA, 25 bp, Homo sapien
gaagggcactaagtttcctagcgtg

SEQ ID NO: 6074506 - DNA, 25 bp, Homo sapien
aaaaacatagcagggtcagagtgaa

SEQ ID NO: 6074507 - DNA, 25 bp, Homo sapien
aaaataccaggttgaccatattggt

SEQ ID NO: 6074508 - DNA, 25 bp, Homo sapien
cagggttgcccaagatcagttgtac

SEQ ID NO: 6074509 - DNA, 25 bp, Homo sapien
aagtacttcttctccgtggagttgg

SEQ ID NO: 6074510 - DNA, 25 bp, Homo sapien
ttctaagacaatagaagactttgag

SEQ ID NO: 6074511 - DNA, 25 bp, Homo sapien
caaagatgttggacgtggaaagaaa

SEQ ID NO: 6074512 - DNA, 25 bp, Homo sapien
gaccatattggtctcagagaagtac

SEQ ID NO: 6074513 - DNA, 25 bp, Homo sapien
ccaaggcatcagcactatgattttc

SEQ ID NO: 6074514 - DNA, 25 bp, Homo sapien
tcagaggaacgaagatccccatgtt

SEQ ID NO: 6074515 - DNA, 25 bp, Homo sapien
catgatcagaggaacgaagatcccc

SEQ ID NO: 6074516 - DNA, 25 bp, Homo sapien
taggaatggagctattcacatacac

SEQ ID NO: 6074517 - DNA, 25 bp, Homo sapien
cctgagaagccaaggcatcagcact

SEQ ID NO: 6074518 - DNA, 25 bp, Homo sapien
gacatctctcgagagaggaaagctg

SEQ ID NO: 6074519 - DNA, 25 bp, Homo sapien
agaaaacatattaggctcagagtaa

SEQ ID NO: 6074520 - DNA, 25 bp, Homo sapien
tgtgtcctaagattccaagttgatg

SEQ ID NO: 6074521 - DNA, 25 bp, Homo sapien
tttgctagagtagttacagtcaagc

SEQ ID NO: 6074522 - DNA, 25 bp, Homo sapien
gattccaagttgatgtgattataca

SEQ ID NO: 6074523 - DNA, 25 bp, Homo sapien
tgctagagtagttacagtcaagctt

SEQ ID NO: 6074524 - DNA, 25 bp, Homo sapien
gctgtgtcctaagattccaagttga

SEQ ID NO: 6074525 - DNA, 25 bp, Homo sapien
tatgaggtttgctagagtagttaca

SEQ ID NO: 6074526 - DNA, 25 bp, Homo sapien
ctagagtagttacagtcaagcttga

SEQ ID NO: 6074527 - DNA, 25 bp, Homo sapien
cctaagattccaagttgatgtgatt

SEQ ID NO: 6074528 - DNA, 25 bp, Homo sapien
tgctgtgtcctaagattccaagttg

SEQ ID NO: 6074529 - DNA, 25 bp, Homo sapien
tccaagttgatgtgattatacacag

SEQ ID NO: 6074530 - DNA, 25 bp, Homo sapien
tgtcctaagattccaagttgatgtg

SEQ ID NO: 6074531 - DNA, 25 bp, Homo sapien
tgctaccatggttacagtcatattt

SEQ ID NO: 6074532 - DNA, 25 bp, Homo sapien
aagtacattgcactcttcaatttga

SEQ ID NO: 6074533 - DNA, 25 bp, Homo sapien
ctaccatggttacagtcatatttga

SEQ ID NO: 6074534 - DNA, 25 bp, Homo sapien
gcataaaagatagtagggtcagagt

SEQ ID NO: 6074535 - DNA, 25 bp, Homo sapien
accatggttacagtcatatttgaaa

SEQ ID NO: 6074536 - DNA, 25 bp, Homo sapien
gctaccatggttacagtcatatttg

SEQ ID NO: 6074537 - DNA, 25 bp, Homo sapien
gaaaagtacattgcactcttcaatt

SEQ ID NO: 6074538 - DNA, 25 bp, Homo sapien
cagcataaaagatagtagggtcaga

SEQ ID NO: 6074539 - DNA, 25 bp, Homo sapien
taccatggttacagtcatatttgaa

SEQ ID NO: 6074540 - DNA, 25 bp, Homo sapien
acagcataaaagatagtagggtcag

SEQ ID NO: 6074541 - DNA, 25 bp, Homo sapien
aaagtacattgcactcttcaatttg

SEQ ID NO: 6074542 - DNA, 25 bp, Homo sapien
ttgctaccatggttacagtcatatt

SEQ ID NO: 6074543 - DNA, 25 bp, Homo sapien
gatatcagggacagagtaaagggta

SEQ ID NO: 6074544 - DNA, 25 bp, Homo sapien
atatgaaagatgtactgtattcctc

SEQ ID NO: 6074545 - DNA, 25 bp, Homo sapien
tgaagctccatagggtagttacagt

SEQ ID NO: 6074546 - DNA, 25 bp, Homo sapien
tagttacagtcaaatatgaaagatg

SEQ ID NO: 6074547 - DNA, 25 bp, Homo sapien
gatcttgcgatccttctccatggag

SEQ ID NO: 6074548 - DNA, 25 bp, Homo sapien
taggatgaatgagtcgaatgcaaga

SEQ ID NO: 6074549 - DNA, 25 bp, Homo sapien
ggtgctgagatcttgcgatccttct

SEQ ID NO: 6074550 - DNA, 25 bp, Homo sapien
gtcgaatgcaagatatatgtttcca

SEQ ID NO: 6074551 - DNA, 25 bp, Homo sapien
ggtatgaagctccatagggtagtta

SEQ ID NO: 6074552 - DNA, 25 bp, Homo sapien
tccaacagccttgctaaccatgaca

SEQ ID NO: 6074553 - DNA, 25 bp, Homo sapien
gctccatagggtagttacagtcaaa

SEQ ID NO: 6074554 - DNA, 25 bp, Homo sapien
tgcaagatatatgtttccaacagcc

SEQ ID NO: 6074555 - DNA, 25 bp, Homo sapien
tagcaaaggccccaatagtatcacc

SEQ ID NO: 6074556 - DNA, 25 bp, Homo sapien
atagctgaatgcaatagcttcgcag

SEQ ID NO: 6074557 - DNA, 25 bp, Homo sapien
tgaagggaactaagtttgctaggat

SEQ ID NO: 6074558 - DNA, 25 bp, Homo sapien
agcaaaggccccaatagtatcacca

SEQ ID NO: 6074559 - DNA, 25 bp, Homo sapien
gaagggaactaagtttgctaggatg

SEQ ID NO: 6074560 - DNA, 25 bp, Homo sapien
gatagctgaatgcaatagcttcgca

SEQ ID NO: 6074561 - DNA, 25 bp, Homo sapien
tagctgaatgcaatagcttcgcaga

SEQ ID NO: 6074562 - DNA, 25 bp, Homo sapien
cagggtcagagtgaatggtatcaag

SEQ ID NO: 6074563 - DNA, 25 bp, Homo sapien
tctgtccacacatttatatacgtgt

SEQ ID NO: 6074564 - DNA, 25 bp, Homo sapien
gcttggcaaagcattaagacaattt

SEQ ID NO: 6074565 - DNA, 25 bp, Homo sapien
tcttttggtcgcatcttaaaattcc

SEQ ID NO: 6074566 - DNA, 25 bp, Homo sapien
gatggatatatgattccaaaagctt

SEQ ID NO: 6074567 - DNA, 25 bp, Homo sapien
taagacaatttcttttggtcgcatc

SEQ ID NO: 6074568 - DNA, 25 bp, Homo sapien
ttcatcacaaggtgacaaaccaaaa

SEQ ID NO: 6074569 - DNA, 25 bp, Homo sapien
tcaccagaactacactcttagcctt

SEQ ID NO: 6074570 - DNA, 25 bp, Homo sapien
tagcgtcttgttcccccaaatcaga

SEQ ID NO: 6074571 - DNA, 25 bp, Homo sapien
gctagcatggctacagtcaagttgg

SEQ ID NO: 6074572 - DNA, 25 bp, Homo sapien
tctggagaaattgacgatcttgagc

SEQ ID NO: 6074573 - DNA, 25 bp, Homo sapien
ttccaaaacgatatgattagacaca

SEQ ID NO: 6074574 - DNA, 25 bp, Homo sapien
tcagagtttcatccgtttggttaag

SEQ ID NO: 6074575 - DNA, 25 bp, Homo sapien
tgtattcagtcttagacacttgtgg

SEQ ID NO: 6074576 - DNA, 25 bp, Homo sapien
gtcgtctatgaactcttgaagaagt

SEQ ID NO: 6074577 - DNA, 25 bp, Homo sapien
cacttgtggattgattgtcttggaa

SEQ ID NO: 6074578 - DNA, 25 bp, Homo sapien
tagtggcattgtcgtctatgaactc

SEQ ID NO: 6074579 - DNA, 25 bp, Homo sapien
gctcagagtttcatccgtttggtta

SEQ ID NO: 6074580 - DNA, 25 bp, Homo sapien
tcacattctccaataaggggcagcc

SEQ ID NO: 6074581 - DNA, 25 bp, Homo sapien
ggcattgtcgtctatgaactcttga

SEQ ID NO: 6074582 - DNA, 25 bp, Homo sapien
tttgtagtggcattgtcgtctatga

SEQ ID NO: 6074583 - DNA, 25 bp, Homo sapien
gggccgccagcatgaggaccatcag

SEQ ID NO: 6074584 - DNA, 25 bp, Homo sapien
tcagtcttagacacttgtggattga

SEQ ID NO: 6074585 - DNA, 25 bp, Homo sapien
ccgccagcatgaggaccatcagcaa

SEQ ID NO: 6074586 - DNA, 25 bp, Homo sapien
cactggcacttcctagggagaggag

SEQ ID NO: 6074587 - DNA, 25 bp, Homo sapien
ggctgtgtagcgctgatcgcccagc

SEQ ID NO: 6074588 - DNA, 25 bp, Homo sapien
cggagggctcatcgcggcacactgc

SEQ ID NO: 6074589 - DNA, 25 bp, Homo sapien
gagggacaacagtgtcccaggcccc

SEQ ID NO: 6074590 - DNA, 25 bp, Homo sapien
gccagcacgcggacagagaggaagg

SEQ ID NO: 6074591 - DNA, 25 bp, Homo sapien
gcaggcacctttgggcggctgccct

SEQ ID NO: 6074592 - DNA, 25 bp, Homo sapien
gcagcaggagcccatagacttcgag

SEQ ID NO: 6074593 - DNA, 25 bp, Homo sapien
gctgcttgggtggtaggcaatgctg

SEQ ID NO: 6074594 - DNA, 25 bp, Homo sapien
gctgggaagatagcctgggagctgc

SEQ ID NO: 6074595 - DNA, 25 bp, Homo sapien
catagacttcgaggtacaggtaggg

SEQ ID NO: 6074596 - DNA, 25 bp, Homo sapien
ggagcagggccagccgaatgctccc

SEQ ID NO: 6074597 - DNA, 25 bp, Homo sapien
tgccgctgcactggcacttcctagg

SEQ ID NO: 6074598 - DNA, 25 bp, Homo sapien
ccaccagccataggatcatggttgg

SEQ ID NO: 6074599 - DNA, 25 bp, Homo sapien
catctagcacccgttcattacttgg

SEQ ID NO: 6074600 - DNA, 25 bp, Homo sapien
ttgagcttgccgttttgaccctgcc

SEQ ID NO: 6074601 - DNA, 25 bp, Homo sapien
tacagcccactagggtggtataggc

SEQ ID NO: 6074602 - DNA, 25 bp, Homo sapien
tgccattggtcacctcatctagcac

SEQ ID NO: 6074603 - DNA, 25 bp, Homo sapien
gaccaggaccacactaaggatacag

SEQ ID NO: 6074604 - DNA, 25 bp, Homo sapien
ttacttggtgtcacccacaccttgg

SEQ ID NO: 6074605 - DNA, 25 bp, Homo sapien
tgtgcactttcaattccacagacag

SEQ ID NO: 6074606 - DNA, 25 bp, Homo sapien
tggtactaagcatggaagagctgag

SEQ ID NO: 6074607 - DNA, 25 bp, Homo sapien
tcatggttgggtgtggtactaagca

SEQ ID NO: 6074608 - DNA, 25 bp, Homo sapien
tctggatccgacatcctccgttggc

SEQ ID NO: 6074609 - DNA, 25 bp, Homo sapien
cgagctgactgattctggatccgac

SEQ ID NO: 6074610 - DNA, 25 bp, Homo sapien
ttacaggacattgcgagcaggatgg

SEQ ID NO: 6074611 - DNA, 25 bp, Homo sapien
tggtttgatgggtaaaatgcccgca

SEQ ID NO: 6074612 - DNA, 25 bp, Homo sapien
cagaaggaatggtttgatgggtaaa

SEQ ID NO: 6074613 - DNA, 25 bp, Homo sapien
gaatggtttgatgggtaaaatgccc

SEQ ID NO: 6074614 - DNA, 25 bp, Homo sapien
tttctctccgtagatggacctgccg

SEQ ID NO: 6074615 - DNA, 25 bp, Homo sapien
cagagattacaggacattgcgagca

SEQ ID NO: 6074616 - DNA, 25 bp, Homo sapien
tccgtagatggacctgccgccagtg

SEQ ID NO: 6074617 - DNA, 25 bp, Homo sapien
gggtagggacgctctcctgagctac

SEQ ID NO: 6074618 - DNA, 25 bp, Homo sapien
taaaatgcccgcaagtcaaaagaaa

SEQ ID NO: 6074619 - DNA, 25 bp, Homo sapien
ttgatgggtaaaatgcccgcaagtc

SEQ ID NO: 6074620 - DNA, 25 bp, Homo sapien
gatgggtaaaatgcccgcaagtcaa

SEQ ID NO: 6074621 - DNA, 25 bp, Homo sapien
gagattacaggacattgcgagcagg

SEQ ID NO: 6074622 - DNA, 25 bp, Homo sapien
ataaactccaggattccgaagcggc

SEQ ID NO: 6074623 - DNA, 25 bp, Homo sapien
ttggggaagatctccaggtggaagc

SEQ ID NO: 6074624 - DNA, 25 bp, Homo sapien
tgtaccagttttcttcaaactgttc

SEQ ID NO: 6074625 - DNA, 25 bp, Homo sapien
cttcccctcgatttggcccaggcgc

SEQ ID NO: 6074626 - DNA, 25 bp, Homo sapien
aagatctccaggtggaagccggtgc

SEQ ID NO: 6074627 - DNA, 25 bp, Homo sapien
cccaggcgctcgttcaggaaacctg

SEQ ID NO: 6074628 - DNA, 25 bp, Homo sapien
ggatgctgatcagccccacagccag

SEQ ID NO: 6074629 - DNA, 25 bp, Homo sapien
gtggaagccggtgcggcagtagagc

SEQ ID NO: 6074630 - DNA, 25 bp, Homo sapien
catagagttctcctcgctcattcat

SEQ ID NO: 6074631 - DNA, 25 bp, Homo sapien
ggcgccgcaggatccccttcaggtg

SEQ ID NO: 6074632 - DNA, 25 bp, Homo sapien
gggagtcagctaagggcacgttccc

SEQ ID NO: 6074633 - DNA, 25 bp, Homo sapien
ctccaggtggaagccggtgcggcag

SEQ ID NO: 6074634 - DNA, 25 bp, Homo sapien
agccccacagccaggctgataaact

SEQ ID NO: 6074635 - DNA, 25 bp, Homo sapien
ggccagagtccactccccggatgct

SEQ ID NO: 6074636 - DNA, 25 bp, Homo sapien
gttctcctcgctcattcattcctag

SEQ ID NO: 6074637 - DNA, 25 bp, Homo sapien
tgtcgtttagtcctgtatccctccc

SEQ ID NO: 6074638 - DNA, 25 bp, Homo sapien
caggtgggcgaagtctgtgggtgag

SEQ ID NO: 6074639 - DNA, 25 bp, Homo sapien
ccatctttgttcagggccacgtaat

SEQ ID NO: 6074640 - DNA, 25 bp, Homo sapien
agggccacgtaatactgtctctctg

SEQ ID NO: 6074641 - DNA, 25 bp, Homo sapien
acgtaatactgtctctctgagtccg

SEQ ID NO: 6074642 - DNA, 25 bp, Homo sapien
ttgtacaaggttgaggcataggtgt

SEQ ID NO: 6074643 - DNA, 25 bp, Homo sapien
ttcgacccatagagttctcctcgct

SEQ ID NO: 6074644 - DNA, 25 bp, Homo sapien
ttcccggaaaacacattcacgtgtg

SEQ ID NO: 6074645 - DNA, 25 bp, Homo sapien
ccgtgtagatcccagtccaaggagg

SEQ ID NO: 6074646 - DNA, 25 bp, Homo sapien
ctcgatttggcccaggcgctcgttc

SEQ ID NO: 6074647 - DNA, 25 bp, Homo sapien
ggtacaggccagagtccactccccg

SEQ ID NO: 6074648 - DNA, 25 bp, Homo sapien
gtcctgtatccctcccggggtgagc

SEQ ID NO: 6074649 - DNA, 25 bp, Homo sapien
tactgtctctctgagtccgaatgtt

SEQ ID NO: 6074650 - DNA, 25 bp, Homo sapien
ttgttcagggccacgtaatactgtc

SEQ ID NO: 6074651 - DNA, 25 bp, Homo sapien
gtcgtggcgggtcccgtgcaccgtg

SEQ ID NO: 6074652 - DNA, 25 bp, Homo sapien
gcaggatccccttcaggtgggcgaa

SEQ ID NO: 6074653 - DNA, 25 bp, Homo sapien
aggctgataaactccaggattccga

SEQ ID NO: 6074654 - DNA, 25 bp, Homo sapien
tccaggattccgaagcggctgtggt

SEQ ID NO: 6074655 - DNA, 25 bp, Homo sapien
tagatcccagtccaaggaggcgaag

SEQ ID NO: 6074656 - DNA, 25 bp, Homo sapien
taggtgttgtaccagttttcttcaa

SEQ ID NO: 6074657 - DNA, 25 bp, Homo sapien
cgctcgttcaggaaacctggggagt

SEQ ID NO: 6074658 - DNA, 25 bp, Homo sapien
tcccgtgcaccgtgccgttggggaa

SEQ ID NO: 6074659 - DNA, 25 bp, Homo sapien
gagtccgaatgtttgtacaaggttg

SEQ ID NO: 6074660 - DNA, 25 bp, Homo sapien
actgttcccggaaaacacattcacg

SEQ ID NO: 6074661 - DNA, 25 bp, Homo sapien
gagaagccgtgtagatcccagtcca

SEQ ID NO: 6074662 - DNA, 25 bp, Homo sapien
ctgcagcttcccctcgatttggccc

SEQ ID NO: 6074663 - DNA, 25 bp, Homo sapien
ttcctaggtacaggccagagtccac

SEQ ID NO: 6074664 - DNA, 25 bp, Homo sapien
cgaagcggctgtggtcgtggcgggt

SEQ ID NO: 6074665 - DNA, 25 bp, Homo sapien
cccggggtgagccatctttgttcag

SEQ ID NO: 6074666 - DNA, 25 bp, Homo sapien
gtgaatttctggtgtcgtttagtcc

SEQ ID NO: 6074667 - DNA, 25 bp, Homo sapien
ctggcggcgccgcaggatccccttc

SEQ ID NO: 6074668 - DNA, 25 bp, Homo sapien
gccggtgcggcagtagagctggcgg

SEQ ID NO: 6074669 - DNA, 25 bp, Homo sapien
acgtgtgagtttcttcgacccatag

SEQ ID NO: 6074670 - DNA, 25 bp, Homo sapien
caacttagaaggatctacaggcctg

SEQ ID NO: 6074671 - DNA, 25 bp, Homo sapien
tgcaccgtgccgttggggaagatct

SEQ ID NO: 6074672 - DNA, 25 bp, Homo sapien
aagtgagtgaatttctggtgtcgtt

SEQ ID NO: 6074673 - DNA, 25 bp, Homo sapien
ccccagagacgaggagaagccgtgt

SEQ ID NO: 6074674 - DNA, 25 bp, Homo sapien
acattcacgtgtgagtttcttcgac

SEQ ID NO: 6074675 - DNA, 25 bp, Homo sapien
ctcgctcattcattcctaggtacag

SEQ ID NO: 6074676 - DNA, 25 bp, Homo sapien
atttggcccaggcgctcgttcagga

SEQ ID NO: 6074677 - DNA, 25 bp, Homo sapien
ggcgaagtctgtgggtgagccacgc

SEQ ID NO: 6074678 - DNA, 25 bp, Homo sapien
gaaaacacattcacgtgtgagtttc

SEQ ID NO: 6074679 - DNA, 25 bp, Homo sapien
cattcattcctaggtacaggccaga

SEQ ID NO: 6074680 - DNA, 25 bp, Homo sapien
tgatcagccccacagccaggctgat

SEQ ID NO: 6074681 - DNA, 25 bp, Homo sapien
agtccactccccggatgctgatcag

SEQ ID NO: 6074682 - DNA, 25 bp, Homo sapien
gtagagctggcggcgccgcaggatc

SEQ ID NO: 6074683 - DNA, 25 bp, Homo sapien
gaggcataggtgttgtaccagtttt

SEQ ID NO: 6074684 - DNA, 25 bp, Homo sapien
ctctctgagtccgaatgtttgtaca

SEQ ID NO: 6074685 - DNA, 25 bp, Homo sapien
gtgccgttggggaagatctccaggt

SEQ ID NO: 6074686 - DNA, 25 bp, Homo sapien
taagggcacgttccccagagacgag

SEQ ID NO: 6074687 - DNA, 25 bp, Homo sapien
ccagtccaaggaggcgaagacgccc

SEQ ID NO: 6074688 - DNA, 25 bp, Homo sapien
ggtgagccatctttgttcagggcca

SEQ ID NO: 6074689 - DNA, 25 bp, Homo sapien
agaaggatctacaggcctgggtaaa

SEQ ID NO: 6074690 - DNA, 25 bp, Homo sapien
gagtttcttcgacccatagagttct

SEQ ID NO: 6074691 - DNA, 25 bp, Homo sapien
tccccttcaggtgggcgaagtctgt

SEQ ID NO: 6074692 - DNA, 25 bp, Homo sapien
ggagggcaacttagaaggatctaca

SEQ ID NO: 6074693 - DNA, 25 bp, Homo sapien
gccacgctgcagcttcccctcgatt

SEQ ID NO: 6074694 - DNA, 25 bp, Homo sapien
ggctgtggtcgtggcgggtcccgtg

SEQ ID NO: 6074695 - DNA, 25 bp, Homo sapien
gcgggtcccgtgcaccgtgccgttg

SEQ ID NO: 6074696 - DNA, 25 bp, Homo sapien
ttctggtgtcgtttagtcctgtatc

SEQ ID NO: 6074697 - DNA, 25 bp, Homo sapien
gtctgtgggtgagccacgctgcagc

SEQ ID NO: 6074698 - DNA, 25 bp, Homo sapien
aaggttgaggcataggtgttgtacc

SEQ ID NO: 6074699 - DNA, 25 bp, Homo sapien
gtcagctaagggcacgttccccaga

SEQ ID NO: 6074700 - DNA, 25 bp, Homo sapien
atctacaggcctgggtaaaaagtga

SEQ ID NO: 6074701 - DNA, 25 bp, Homo sapien
attccgaagcggctgtggtcgtggc

SEQ ID NO: 6074702 - DNA, 25 bp, Homo sapien
gggtgagccacgctgcagcttcccc

SEQ ID NO: 6074703 - DNA, 25 bp, Homo sapien
ctccccggatgctgatcagccccac

SEQ ID NO: 6074704 - DNA, 25 bp, Homo sapien
atccctcccggggtgagccatcttt

SEQ ID NO: 6074705 - DNA, 25 bp, Homo sapien
gcggcagtagagctggcggcgccgc

SEQ ID NO: 6074706 - DNA, 25 bp, Homo sapien
ttcaggaaacctggggagtcagcta

SEQ ID NO: 6074707 - DNA, 25 bp, Homo sapien
aggcctgggtaaaaagtgagtgaat

SEQ ID NO: 6074708 - DNA, 25 bp, Homo sapien
cacgttccccagagacgaggagaag

SEQ ID NO: 6074709 - DNA, 25 bp, Homo sapien
acagccaggctgataaactccagga

SEQ ID NO: 6074710 - DNA, 25 bp, Homo sapien
gaatgtttgtacaaggttgaggcat

SEQ ID NO: 6074711 - DNA, 25 bp, Homo sapien
aacctggggagtcagctaagggcac

SEQ ID NO: 6074712 - DNA, 25 bp, Homo sapien
agacgaggagaagccgtgtagatcc

SEQ ID NO: 6074713 - DNA, 25 bp, Homo sapien
gtaaaaagtgagtgaatttctggtg

SEQ ID NO: 6074714 - DNA, 25 bp, Homo sapien
cgaagacgccccccacctctgccat

SEQ ID NO: 6074715 - DNA, 25 bp, Homo sapien
ctccaaactgatattattacagaca

SEQ ID NO: 6074716 - DNA, 25 bp, Homo sapien
actccaaactgatattattacagac

SEQ ID NO: 6074717 - DNA, 25 bp, Homo sapien
agatatcagggttacagtaaagggt

SEQ ID NO: 6074718 - DNA, 25 bp, Homo sapien
gaacagctgaatccaatagcttggc

SEQ ID NO: 6074719 - DNA, 25 bp, Homo sapien
ttgctagcatggttacagtcgtatc

SEQ ID NO: 6074720 - DNA, 25 bp, Homo sapien
gatatcagggttacagtaaagggta

SEQ ID NO: 6074721 - DNA, 25 bp, Homo sapien
gctagcatggttacagtcgtatctg

SEQ ID NO: 6074722 - DNA, 25 bp, Homo sapien
aggatgaacgggtgggctgaagaac

SEQ ID NO: 6074723 - DNA, 25 bp, Homo sapien
tgctagcatggttacagtcgtatct

SEQ ID NO: 6074724 - DNA, 25 bp, Homo sapien
caggatgaacgggtgggctgaagaa

SEQ ID NO: 6074725 - DNA, 25 bp, Homo sapien
ggatgaacgggtgggctgaagaaca

SEQ ID NO: 6074726 - DNA, 25 bp, Homo sapien
tccaaactgatattattacagacac

SEQ ID NO: 6074727 - DNA, 25 bp, Homo sapien
tgcaaacccgctctagaagagcgag

SEQ ID NO: 6074728 - DNA, 25 bp, Homo sapien
ttacgaagcagacgatggatccggc

SEQ ID NO: 6074729 - DNA, 25 bp, Homo sapien
tgggcaatggtcacgccgcccaaaa

SEQ ID NO: 6074730 - DNA, 25 bp, Homo sapien
tgttatcgcgagacgcattgcctgc

SEQ ID NO: 6074731 - DNA, 25 bp, Homo sapien
tgtgagatactctaacactgccgcc

SEQ ID NO: 6074732 - DNA, 25 bp, Homo sapien
tgcctgaatgttaggcaggactccg

SEQ ID NO: 6074733 - DNA, 25 bp, Homo sapien
gaagagcgagacttagacttggcgc

SEQ ID NO: 6074734 - DNA, 25 bp, Homo sapien
tattgagttcctcatcattgcggat

SEQ ID NO: 6074735 - DNA, 25 bp, Homo sapien
gctttgggctttatggtggtgactc

SEQ ID NO: 6074736 - DNA, 25 bp, Homo sapien
tgcctgccagctcaaggatttctgc

SEQ ID NO: 6074737 - DNA, 25 bp, Homo sapien
cactgccgccaaatacactggtgcg

SEQ ID NO: 6074738 - DNA, 25 bp, Homo sapien
gctctgcatagtttcccttacgaag

SEQ ID NO: 6074739 - DNA, 25 bp, Homo sapien
tatacaacaattattttttctacat

SEQ ID NO: 6074740 - DNA, 25 bp, Homo sapien
ccatttcacatatacataatttgtg

SEQ ID NO: 6074741 - DNA, 25 bp, Homo sapien
tgtcaataaattcttaaaagtaaca

SEQ ID NO: 6074742 - DNA, 25 bp, Homo sapien
aactatacagtcagtaactgtattc

SEQ ID NO: 6074743 - DNA, 25 bp, Homo sapien
aaatgctttaaacattacaatacaa

SEQ ID NO: 6074744 - DNA, 25 bp, Homo sapien
tgactgtatttctacacagttatgt

SEQ ID NO: 6074745 - DNA, 25 bp, Homo sapien
actgctattttaggtttacatacat

SEQ ID NO: 6074746 - DNA, 25 bp, Homo sapien
acagtcagtaactgtattctaaagc

SEQ ID NO: 6074747 - DNA, 25 bp, Homo sapien
cacaactacagttgtttaaattaat

SEQ ID NO: 6074748 - DNA, 25 bp, Homo sapien
caacacctgtacaactatacagtca

SEQ ID NO: 6074749 - DNA, 25 bp, Homo sapien
tacattcaccattttaaatgcaact

SEQ ID NO: 6074750 - DNA, 25 bp, Homo sapien
taaatactgagttacaatgtgaggt

SEQ ID NO: 6074751 - DNA, 25 bp, Homo sapien
ccttaaatgctttaaacattacaat

SEQ ID NO: 6074752 - DNA, 25 bp, Homo sapien
ctttcaatatacaacaattattttt

SEQ ID NO: 6074753 - DNA, 25 bp, Homo sapien
tgctaatgaacatgaagttgactgt

SEQ ID NO: 6074754 - DNA, 25 bp, Homo sapien
tacaatgtgaggttcgaccagtctc

SEQ ID NO: 6074755 - DNA, 25 bp, Homo sapien
ctacacagttatgttatatgaggaa

SEQ ID NO: 6074756 - DNA, 25 bp, Homo sapien
ggtttacatacatctccattaagca

SEQ ID NO: 6074757 - DNA, 25 bp, Homo sapien
caatcagcaaattagaaaccatctc

SEQ ID NO: 6074758 - DNA, 25 bp, Homo sapien
cttgtactttcaatatacaacaatt

SEQ ID NO: 6074759 - DNA, 25 bp, Homo sapien
ttaaatgcaactttgtcacttgtac

SEQ ID NO: 6074760 - DNA, 25 bp, Homo sapien
tcttaaaagtaacaacacctgtaca

SEQ ID NO: 6074761 - DNA, 25 bp, Homo sapien
tacatccaccaattttataggaaaa

SEQ ID NO: 6074762 - DNA, 25 bp, Homo sapien
actacagttgtttaaattaatactg

SEQ ID NO: 6074763 - DNA, 25 bp, Homo sapien
caaaagaaatataaaatacattcac

SEQ ID NO: 6074764 - DNA, 25 bp, Homo sapien
tgaacatgaagttgactgtatttct

SEQ ID NO: 6074765 - DNA, 25 bp, Homo sapien
ctttacagttactgggatcactatt

SEQ ID NO: 6074766 - DNA, 25 bp, Homo sapien
catacaatcaaaatctccgacacat

SEQ ID NO: 6074767 - DNA, 25 bp, Homo sapien
tatacacagaagtaggatttttaaa

SEQ ID NO: 6074768 - DNA, 25 bp, Homo sapien
tgtctacaaaagaaatataaaatac

SEQ ID NO: 6074769 - DNA, 25 bp, Homo sapien
cactattttacacatacaatcaaaa

SEQ ID NO: 6074770 - DNA, 25 bp, Homo sapien
gcaactttgtcacttgtactttcaa

SEQ ID NO: 6074771 - DNA, 25 bp, Homo sapien
aatactggcaatcaatcagcaaatt

SEQ ID NO: 6074772 - DNA, 25 bp, Homo sapien
accattttaaatgcaactttgtcac

SEQ ID NO: 6074773 - DNA, 25 bp, Homo sapien
tttaaacattacaatacaataatag

SEQ ID NO: 6074774 - DNA, 25 bp, Homo sapien
aaaaatcttcccactacatcccaca

SEQ ID NO: 6074775 - DNA, 25 bp, Homo sapien
ctacatttctgtagcaagtaaacgt

SEQ ID NO: 6074776 - DNA, 25 bp, Homo sapien
ttcccactacatcccacaactacag

SEQ ID NO: 6074777 - DNA, 25 bp, Homo sapien
aagtaacaacacctgtacaactata

SEQ ID NO: 6074778 - DNA, 25 bp, Homo sapien
ttttttctacatttctgtagcaagt

SEQ ID NO: 6074779 - DNA, 25 bp, Homo sapien
ctcttgtgtctacaaaagaaatata

SEQ ID NO: 6074780 - DNA, 25 bp, Homo sapien
ctgtacaactatacagtcagtaact

SEQ ID NO: 6074781 - DNA, 25 bp, Homo sapien
tctccattaagcaaaatgcattaac

SEQ ID NO: 6074782 - DNA, 25 bp, Homo sapien
atgaggaatggtaacatttatacac

SEQ ID NO: 6074783 - DNA, 25 bp, Homo sapien
agcaagtaaacgtgtgtgtaaatac

SEQ ID NO: 6074784 - DNA, 25 bp, Homo sapien
catacatctccattaagcaaaatgc

SEQ ID NO: 6074785 - DNA, 25 bp, Homo sapien
cattaactcttgtgtctacaaaaga

SEQ ID NO: 6074786 - DNA, 25 bp, Homo sapien
taaattaatactggcaatcaatcag

SEQ ID NO: 6074787 - DNA, 25 bp, Homo sapien
tgttatatgaggaatggtaacattt

SEQ ID NO: 6074788 - DNA, 25 bp, Homo sapien
atcaaaatctccgacacatacatcc

SEQ ID NO: 6074789 - DNA, 25 bp, Homo sapien
taaaatacattcaccattttaaatg

SEQ ID NO: 6074790 - DNA, 25 bp, Homo sapien
tacatcccacaactacagttgttta

SEQ ID NO: 6074791 - DNA, 25 bp, Homo sapien
ccatctccatttcacatatacataa

SEQ ID NO: 6074792 - DNA, 25 bp, Homo sapien
ttaagcaaaatgcattaactcttgt

SEQ ID NO: 6074793 - DNA, 25 bp, Homo sapien
ggcaatcaatcagcaaattagaaac

SEQ ID NO: 6074794 - DNA, 25 bp, Homo sapien
ttgtcacttgtactttcaatataca

SEQ ID NO: 6074795 - DNA, 25 bp, Homo sapien
taaacgtgtgtgtaaatactgagtt

SEQ ID NO: 6074796 - DNA, 25 bp, Homo sapien
ttctgtagcaagtaaacgtgtgtgt

SEQ ID NO: 6074797 - DNA, 25 bp, Homo sapien
attttaggtttacatacatctccat

SEQ ID NO: 6074798 - DNA, 25 bp, Homo sapien
gcaaattagaaaccatctccatttc

SEQ ID NO: 6074799 - DNA, 25 bp, Homo sapien
aatggtaacatttatacacagaagt

SEQ ID NO: 6074800 - DNA, 25 bp, Homo sapien
tgtattctaaagctttacagttact

SEQ ID NO: 6074801 - DNA, 25 bp, Homo sapien
gcacaaactgctattttaggtttac

SEQ ID NO: 6074802 - DNA, 25 bp, Homo sapien
gttgtttaaattaatactggcaatc

SEQ ID NO: 6074803 - DNA, 25 bp, Homo sapien
atttgtgcacaaactgctattttag

SEQ ID NO: 6074804 - DNA, 25 bp, Homo sapien
aacatttatacacagaagtaggatt

SEQ ID NO: 6074805 - DNA, 25 bp, Homo sapien
gactttcacctttgtgtcaataaat

SEQ ID NO: 6074806 - DNA, 25 bp, Homo sapien
agttactgggatcactattttacac

SEQ ID NO: 6074807 - DNA, 25 bp, Homo sapien
cagttatgttatatgaggaatggta

SEQ ID NO: 6074808 - DNA, 25 bp, Homo sapien
caattattttttctacatttctgta

SEQ ID NO: 6074809 - DNA, 25 bp, Homo sapien
ataatagactttcacctttgtgtca

SEQ ID NO: 6074810 - DNA, 25 bp, Homo sapien
tagaaaccatctccatttcacatat

SEQ ID NO: 6074811 - DNA, 25 bp, Homo sapien
aatacaataatagactttcaccttt

SEQ ID NO: 6074812 - DNA, 25 bp, Homo sapien
tgaagttgactgtatttctacacag

SEQ ID NO: 6074813 - DNA, 25 bp, Homo sapien
atctccgacacatacatccaccaat

SEQ ID NO: 6074814 - DNA, 25 bp, Homo sapien
cacatatacataatttgtgcacaaa

SEQ ID NO: 6074815 - DNA, 25 bp, Homo sapien
ctgagttacaatgtgaggttcgacc

SEQ ID NO: 6074816 - DNA, 25 bp, Homo sapien
agtaactgtattctaaagctttaca

SEQ ID NO: 6074817 - DNA, 25 bp, Homo sapien
ctaaagctttacagttactgggatc

SEQ ID NO: 6074818 - DNA, 25 bp, Homo sapien
gacacatacatccaccaattttata

SEQ ID NO: 6074819 - DNA, 25 bp, Homo sapien
tttacacatacaatcaaaatctccg

SEQ ID NO: 6074820 - DNA, 25 bp, Homo sapien
tgggatcactattttacacatacaa

SEQ ID NO: 6074821 - DNA, 25 bp, Homo sapien
gaaatataaaatacattcaccattt

SEQ ID NO: 6074822 - DNA, 25 bp, Homo sapien
tacataatttgtgcacaaactgcta

SEQ ID NO: 6074823 - DNA, 25 bp, Homo sapien
aaaatgcattaactcttgtgtctac

SEQ ID NO: 6074824 - DNA, 25 bp, Homo sapien
cacctttgtgtcaataaattcttaa

SEQ ID NO: 6074825 - DNA, 25 bp, Homo sapien
cattacaatacaataatagactttc

SEQ ID NO: 6074826 - DNA, 25 bp, Homo sapien
tgtgtgtaaatactgagttacaatg

SEQ ID NO: 6074827 - DNA, 25 bp, Homo sapien
tatcatgatcaatgatgaaacactg

SEQ ID NO: 6074828 - DNA, 25 bp, Homo sapien
taaaaggcatctaaattagaaataa

SEQ ID NO: 6074829 - DNA, 25 bp, Homo sapien
caaaaacccaacagttaatatcatg

SEQ ID NO: 6074830 - DNA, 25 bp, Homo sapien
tacaaaaacccaacagttaatatca

SEQ ID NO: 6074831 - DNA, 25 bp, Homo sapien
caaacataggcaaatgagctatatt

SEQ ID NO: 6074832 - DNA, 25 bp, Homo sapien
aacataggcaaatgagctatatttc

SEQ ID NO: 6074833 - DNA, 25 bp, Homo sapien
atatcatgatcaatgatgaaacact

SEQ ID NO: 6074834 - DNA, 25 bp, Homo sapien
acaaaaacccaacagttaatatcat

SEQ ID NO: 6074835 - DNA, 25 bp, Homo sapien
gaagggatcttctgcaacatgacaa

SEQ ID NO: 6074836 - DNA, 25 bp, Homo sapien
catttgccacttgtattcaacgtag

SEQ ID NO: 6074837 - DNA, 25 bp, Homo sapien
aaaaatactctataaactaggcata

SEQ ID NO: 6074838 - DNA, 25 bp, Homo sapien
caacgtagcactggcagttctagcc

SEQ ID NO: 6074839 - DNA, 25 bp, Homo sapien
tcttataggtataaagctccaaaca

SEQ ID NO: 6074840 - DNA, 25 bp, Homo sapien
gatgaaatacaacacccttctataa

SEQ ID NO: 6074841 - DNA, 25 bp, Homo sapien
tgtattcaacgtagcactggcagtt

SEQ ID NO: 6074842 - DNA, 25 bp, Homo sapien
gcaatactgtataatcaaaggattg

SEQ ID NO: 6074843 - DNA, 25 bp, Homo sapien
gccacttgtattcaacgtagcactg

SEQ ID NO: 6074844 - DNA, 25 bp, Homo sapien
tagaagggatcttctgcaacatgac

SEQ ID NO: 6074845 - DNA, 25 bp, Homo sapien
acttgtattcaacgtagcactggca

SEQ ID NO: 6074846 - DNA, 25 bp, Homo sapien
ggattgtaaactatcaccctttgag

SEQ ID NO: 6074847 - DNA, 25 bp, Homo sapien
gcacatcgccacaaacatagatgtg

SEQ ID NO: 6074848 - DNA, 25 bp, Homo sapien
tcaggttattgatccaagtgctgca

SEQ ID NO: 6074849 - DNA, 25 bp, Homo sapien
gacactccgcacaaagcagggcact

SEQ ID NO: 6074850 - DNA, 25 bp, Homo sapien
gtcatggagccgctgctgccagaaa

SEQ ID NO: 6074851 - DNA, 25 bp, Homo sapien
tcactccataggaaaagaccgcacc

SEQ ID NO: 6074852 - DNA, 25 bp, Homo sapien
gccaccagcttcttcaaagtggtag

SEQ ID NO: 6074853 - DNA, 25 bp, Homo sapien
ggaggggtcctcagggagctggaag

SEQ ID NO: 6074854 - DNA, 25 bp, Homo sapien
gcggcctcctttgagccctctgcgc

SEQ ID NO: 6074855 - DNA, 25 bp, Homo sapien
cccaaacaccaaggtcatgcggcct

SEQ ID NO: 6074856 - DNA, 25 bp, Homo sapien
atgcagggctgggaggggtcctcag

SEQ ID NO: 6074857 - DNA, 25 bp, Homo sapien
tattgatccaagtgctgcagacgcc

SEQ ID NO: 6074858 - DNA, 25 bp, Homo sapien
gctgctgccagaaacttcggaaggg

SEQ ID NO: 6074859 - DNA, 25 bp, Homo sapien
gtcctcagggagctggaagccactg

SEQ ID NO: 6074860 - DNA, 25 bp, Homo sapien
aaacatagatgtggccctgctcccc

SEQ ID NO: 6074861 - DNA, 25 bp, Homo sapien
ttggcggccaccagcttcttcaaag

SEQ ID NO: 6074862 - DNA, 25 bp, Homo sapien
aacaacactcccttgcggaccatct

SEQ ID NO: 6074863 - DNA, 25 bp, Homo sapien
cgggcccaatgaggatgcagggctg

SEQ ID NO: 6074864 - DNA, 25 bp, Homo sapien
tggaagccactgacactccgcacaa

SEQ ID NO: 6074865 - DNA, 25 bp, Homo sapien
tcctctgggtgtctgcacccaaaca

SEQ ID NO: 6074866 - DNA, 25 bp, Homo sapien
tctgcgctgagagtcatggagccgc

SEQ ID NO: 6074867 - DNA, 25 bp, Homo sapien
ccgagccatgcgcacatcgccacaa

SEQ ID NO: 6074868 - DNA, 25 bp, Homo sapien
tggtagccacatcccgagccatgcg

SEQ ID NO: 6074869 - DNA, 25 bp, Homo sapien
ggcagccgggagtagcctgtgtgca

SEQ ID NO: 6074870 - DNA, 25 bp, Homo sapien
atgtcttgaacgtagaccttgggtt

SEQ ID NO: 6074871 - DNA, 25 bp, Homo sapien
tcctgcatttcttcctgatagaggt

SEQ ID NO: 6074872 - DNA, 25 bp, Homo sapien
gaagatatcctcatgataacgtttc

SEQ ID NO: 6074873 - DNA, 25 bp, Homo sapien
ttgcggaccatctcctgcatttctt

SEQ ID NO: 6074874 - DNA, 25 bp, Homo sapien
tgccctttttcactccataggaaaa

SEQ ID NO: 6074875 - DNA, 25 bp, Homo sapien
gaagtaatcctcaacctgctcctca

SEQ ID NO: 6074876 - DNA, 25 bp, Homo sapien
accatctcctgcatttcttcctgat

SEQ ID NO: 6074877 - DNA, 25 bp, Homo sapien
tcctcaacctgctcctcactcaagt

SEQ ID NO: 6074878 - DNA, 25 bp, Homo sapien
ccatgcgcacatcgccacaaacata

SEQ ID NO: 6074879 - DNA, 25 bp, Homo sapien
ctgagagtcatggagccgctgctgc

SEQ ID NO: 6074880 - DNA, 25 bp, Homo sapien
cgggagtagcctgtgtgcacctgga

SEQ ID NO: 6074881 - DNA, 25 bp, Homo sapien
acgtttctggctcttgagctggaag

SEQ ID NO: 6074882 - DNA, 25 bp, Homo sapien
cgccacaaacatagatgtggccctg

SEQ ID NO: 6074883 - DNA, 25 bp, Homo sapien
ggcgttgccctttttcactccatag

SEQ ID NO: 6074884 - DNA, 25 bp, Homo sapien
gccactgacactccgcacaaagcag

SEQ ID NO: 6074885 - DNA, 25 bp, Homo sapien
tttccgggcagccgggagtagcctg

SEQ ID NO: 6074886 - DNA, 25 bp, Homo sapien
tgaacacctcgtcggccagctcttt

SEQ ID NO: 6074887 - DNA, 25 bp, Homo sapien
cgtggagcacgctgaacacctcgtc

SEQ ID NO: 6074888 - DNA, 25 bp, Homo sapien
ccgcacaaagcagggcactgggtct

SEQ ID NO: 6074889 - DNA, 25 bp, Homo sapien
gcactgggtcttcgggcttcaggtt

SEQ ID NO: 6074890 - DNA, 25 bp, Homo sapien
ctggaagaagtaatcctcaacctgc

SEQ ID NO: 6074891 - DNA, 25 bp, Homo sapien
ttcagcttggcggccaccagcttct

SEQ ID NO: 6074892 - DNA, 25 bp, Homo sapien
actcccttgcggaccatctcctgca

SEQ ID NO: 6074893 - DNA, 25 bp, Homo sapien
cataggaaaagaccgcaccgaagat

SEQ ID NO: 6074894 - DNA, 25 bp, Homo sapien
tctttctgcaggatgtcttgaacgt

SEQ ID NO: 6074895 - DNA, 25 bp, Homo sapien
tcctcactcaagttcagcttggcgg

SEQ ID NO: 6074896 - DNA, 25 bp, Homo sapien
ctggctcttgagctggaagaagtaa

SEQ ID NO: 6074897 - DNA, 25 bp, Homo sapien
caccaaggtcatgcggcctcctttg

SEQ ID NO: 6074898 - DNA, 25 bp, Homo sapien
gccagctctttctgcaggatgtctt

SEQ ID NO: 6074899 - DNA, 25 bp, Homo sapien
gcaatgcctgtaccgggcccaatga

SEQ ID NO: 6074900 - DNA, 25 bp, Homo sapien
gccctgctccccgtggagcacgctg

SEQ ID NO: 6074901 - DNA, 25 bp, Homo sapien
cgggcttcaggttattgatccaagt

SEQ ID NO: 6074902 - DNA, 25 bp, Homo sapien
cttgagctggaagaagtaatcctca

SEQ ID NO: 6074903 - DNA, 25 bp, Homo sapien
agcttcttcaaagtggtagccacat

SEQ ID NO: 6074904 - DNA, 25 bp, Homo sapien
tggtcctcctctgggtgtctgcacc

SEQ ID NO: 6074905 - DNA, 25 bp, Homo sapien
tgctccccgtggagcacgctgaaca

SEQ ID NO: 6074906 - DNA, 25 bp, Homo sapien
tgggtgtctgcacccaaacaccaag

SEQ ID NO: 6074907 - DNA, 25 bp, Homo sapien
atcctcatgataacgtttctggctc

SEQ ID NO: 6074908 - DNA, 25 bp, Homo sapien
aaagaccgcaccgaagatatcctca

SEQ ID NO: 6074909 - DNA, 25 bp, Homo sapien
caatgaggatgcagggctgggaggg

SEQ ID NO: 6074910 - DNA, 25 bp, Homo sapien
tcctttgagccctctgcgctgagag

SEQ ID NO: 6074911 - DNA, 25 bp, Homo sapien
gaagggggcaatgcctgtaccgggc

SEQ ID NO: 6074912 - DNA, 25 bp, Homo sapien
ctcaagttcagcttggcggccacca

SEQ ID NO: 6074913 - DNA, 25 bp, Homo sapien
ggagccgctgctgccagaaacttcg

SEQ ID NO: 6074914 - DNA, 25 bp, Homo sapien
ggtcatgcggcctcctttgagccct

SEQ ID NO: 6074915 - DNA, 25 bp, Homo sapien
atttcttcctgatagaggtggtcct

SEQ ID NO: 6074916 - DNA, 25 bp, Homo sapien
atgataacgtttctggctcttgagc

SEQ ID NO: 6074917 - DNA, 25 bp, Homo sapien
aagcagggcactgggtcttcgggct

SEQ ID NO: 6074918 - DNA, 25 bp, Homo sapien
tcgtcggccagctctttctgcagga

SEQ ID NO: 6074919 - DNA, 25 bp, Homo sapien
ggctgggaggggtcctcagggagct

SEQ ID NO: 6074920 - DNA, 25 bp, Homo sapien
acttcggaagggggcaatgcctgta

SEQ ID NO: 6074921 - DNA, 25 bp, Homo sapien
tctgcacccaaacaccaaggtcatg

SEQ ID NO: 6074922 - DNA, 25 bp, Homo sapien
gcacgctgaacacctcgtcggccag

SEQ ID NO: 6074923 - DNA, 25 bp, Homo sapien
tcctgatagaggtggtcctcctctg

SEQ ID NO: 6074924 - DNA, 25 bp, Homo sapien
cacatcccgagccatgcgcacatcg

SEQ ID NO: 6074925 - DNA, 25 bp, Homo sapien
ggtcttcgggcttcaggttattgat

SEQ ID NO: 6074926 - DNA, 25 bp, Homo sapien
agggagctggaagccactgacactc

SEQ ID NO: 6074927 - DNA, 25 bp, Homo sapien
gagccctctgcgctgagagtcatgg

SEQ ID NO: 6074928 - DNA, 25 bp, Homo sapien
ctgtaccgggcccaatgaggatgca

SEQ ID NO: 6074929 - DNA, 25 bp, Homo sapien
ttcaaagtggtagccacatcccgag

SEQ ID NO: 6074930 - DNA, 25 bp, Homo sapien
acctggaacaacactcccttgcgga

SEQ ID NO: 6074931 - DNA, 25 bp, Homo sapien
acctgctcctcactcaagttcagct

SEQ ID NO: 6074932 - DNA, 25 bp, Homo sapien
tgcaggatgtcttgaacgtagacct

SEQ ID NO: 6074933 - DNA, 25 bp, Homo sapien
tagaggtggtcctcctctgggtgtc

SEQ ID NO: 6074934 - DNA, 25 bp, Homo sapien
tagcctgtgtgcacctggaacaaca

SEQ ID NO: 6074935 - DNA, 25 bp, Homo sapien
gtgtgcacctggaacaacactccct

SEQ ID NO: 6074936 - DNA, 25 bp, Homo sapien
cgcaccgaagatatcctcatgataa

SEQ ID NO: 6074937 - DNA, 25 bp, Homo sapien
gatgtggccctgctccccgtggagc

SEQ ID NO: 6074938 - DNA, 25 bp, Homo sapien
gcgagctgagctgggaggtggtggt

SEQ ID NO: 6074939 - DNA, 25 bp, Homo sapien
gaactccttctccagctccagcagc

SEQ ID NO: 6074940 - DNA, 25 bp, Homo sapien
gtccggccggtggatgggggagcgc

SEQ ID NO: 6074941 - DNA, 25 bp, Homo sapien
agttgagcatcactgccagctccac

SEQ ID NO: 6074942 - DNA, 25 bp, Homo sapien
gctttggtggatttcatccacggga

SEQ ID NO: 6074943 - DNA, 25 bp, Homo sapien
tcttccacttcatgcgcctgttctg

SEQ ID NO: 6074944 - DNA, 25 bp, Homo sapien
ttgttaaataagaactccttctcca

SEQ ID NO: 6074945 - DNA, 25 bp, Homo sapien
atgtacttgttaaataagaactcct

SEQ ID NO: 6074946 - DNA, 25 bp, Homo sapien
ttgggctcttccaggaccccaggct

SEQ ID NO: 6074947 - DNA, 25 bp, Homo sapien
caatcctgctccggctctgcgaccc

SEQ ID NO: 6074948 - DNA, 25 bp, Homo sapien
caccgcccccgactgctgtcccgct

SEQ ID NO: 6074949 - DNA, 25 bp, Homo sapien
ctccacccgccggggccgggagatg

SEQ ID NO: 6074950 - DNA, 25 bp, Homo sapien
ccgagcagcgacaggggcggctggg

SEQ ID NO: 6074951 - DNA, 25 bp, Homo sapien
taagctgtacgggtcctcttattct

SEQ ID NO: 6074952 - DNA, 25 bp, Homo sapien
gccggtggatgggggagcgcgagct

SEQ ID NO: 6074953 - DNA, 25 bp, Homo sapien
gtttcttatcttcctctttcttcca

SEQ ID NO: 6074954 - DNA, 25 bp, Homo sapien
tgttctgaaaccagatcttgatgtg

SEQ ID NO: 6074955 - DNA, 25 bp, Homo sapien
gggaggtggtggtggaggtgcgcaa

SEQ ID NO: 6074956 - DNA, 25 bp, Homo sapien
gggaggtggcgggggtggcaatgcc

SEQ ID NO: 6074957 - DNA, 25 bp, Homo sapien
actgctgtcccgctactacgtttct

SEQ ID NO: 6074958 - DNA, 25 bp, Homo sapien
gcagtcggccctcccgagcagcgac

SEQ ID NO: 6074959 - DNA, 25 bp, Homo sapien
gtcctcttattctcctccggttctg

SEQ ID NO: 6074960 - DNA, 25 bp, Homo sapien
tggcgggggtggcaatgccagcagc

SEQ ID NO: 6074961 - DNA, 25 bp, Homo sapien
cgaccccaccgcccccgactgctgt

SEQ ID NO: 6074962 - DNA, 25 bp, Homo sapien
gctctgcgaccccaccgcccccgac

SEQ ID NO: 6074963 - DNA, 25 bp, Homo sapien
tgtggggacgcactaaggccgggag

SEQ ID NO: 6074964 - DNA, 25 bp, Homo sapien
cagctccagcagctgggcccgagta

SEQ ID NO: 6074965 - DNA, 25 bp, Homo sapien
tatcttcctctttcttccacttcat

SEQ ID NO: 6074966 - DNA, 25 bp, Homo sapien
tggtggtggaggtgcgcaacagccg

SEQ ID NO: 6074967 - DNA, 25 bp, Homo sapien
ctgccagctccacccgccggggccg

SEQ ID NO: 6074968 - DNA, 25 bp, Homo sapien
gagggctgtggggacgcactaaggc

SEQ ID NO: 6074969 - DNA, 25 bp, Homo sapien
gtggatttcatccacgggaaaggga

SEQ ID NO: 6074970 - DNA, 25 bp, Homo sapien
gggtggcaatgccagcagctcctcg

SEQ ID NO: 6074971 - DNA, 25 bp, Homo sapien
gggaggcagtcggccctcccgagca

SEQ ID NO: 6074972 - DNA, 25 bp, Homo sapien
gaaaccagatcttgatgtgtctctc

SEQ ID NO: 6074973 - DNA, 25 bp, Homo sapien
ctcctccggttctgctgcgtatgca

SEQ ID NO: 6074974 - DNA, 25 bp, Homo sapien
aaataagaactccttctccagctcc

SEQ ID NO: 6074975 - DNA, 25 bp, Homo sapien
gcgtgagctttggtggatttcatcc

SEQ ID NO: 6074976 - DNA, 25 bp, Homo sapien
tcgcccgaggttacggcacaatcct

SEQ ID NO: 6074977 - DNA, 25 bp, Homo sapien
tgctgcgtatgcacctcctgcccac

SEQ ID NO: 6074978 - DNA, 25 bp, Homo sapien
cagcagctgggcccgagtataagct

SEQ ID NO: 6074979 - DNA, 25 bp, Homo sapien
gaggttacggcacaatcctgctccg

SEQ ID NO: 6074980 - DNA, 25 bp, Homo sapien
aggggcggctgggggcacagcacct

SEQ ID NO: 6074981 - DNA, 25 bp, Homo sapien
cagcacctccgggaggtggcggggg

SEQ ID NO: 6074982 - DNA, 25 bp, Homo sapien
tgtacgggtcctcttattctcctcc

SEQ ID NO: 6074983 - DNA, 25 bp, Homo sapien
tttcatccacgggaaagggagatga

SEQ ID NO: 6074984 - DNA, 25 bp, Homo sapien
ggctgggggcacagcacctccggga

SEQ ID NO: 6074985 - DNA, 25 bp, Homo sapien
tgagctgggaggtggtggtggaggt

SEQ ID NO: 6074986 - DNA, 25 bp, Homo sapien
ccgtcaagttgagcatcactgccag

SEQ ID NO: 6074987 - DNA, 25 bp, Homo sapien
tgatgtgtctctccgtcaagttgag

SEQ ID NO: 6074988 - DNA, 25 bp, Homo sapien
cttctccagctccagcagctgggcc

SEQ ID NO: 6074989 - DNA, 25 bp, Homo sapien
acggcacaatcctgctccggctctg

SEQ ID NO: 6074990 - DNA, 25 bp, Homo sapien
ctactacgtttcttatcttcctctt

SEQ ID NO: 6074991 - DNA, 25 bp, Homo sapien
gggcacagcacctccgggaggtggc

SEQ ID NO: 6074992 - DNA, 25 bp, Homo sapien
tcttattctcctccggttctgctgc

SEQ ID NO: 6074993 - DNA, 25 bp, Homo sapien
agctcctcgcccgaggttacggcac

SEQ ID NO: 6074994 - DNA, 25 bp, Homo sapien
ggagatgaaccctgttgggctcttc

SEQ ID NO: 6074995 - DNA, 25 bp, Homo sapien
acgctggagggctgtggggacgcac

SEQ ID NO: 6074996 - DNA, 25 bp, Homo sapien
caggctcggctccttccgggaaagg

SEQ ID NO: 6074997 - DNA, 25 bp, Homo sapien
tggaggtgcgcaacagccgggtcat

SEQ ID NO: 6074998 - DNA, 25 bp, Homo sapien
gacgcactaaggccgggaggcagtc

SEQ ID NO: 6074999 - DNA, 25 bp, Homo sapien
tgcgcctgttctgaaaccagatctt

SEQ ID NO: 6075000 - DNA, 25 bp, Homo sapien
ggcaatgccagcagctcctcgcccg

SEQ ID NO: 6075001 - DNA, 25 bp, Homo sapien
tgctccggctctgcgaccccaccgc

SEQ ID NO: 6075002 - DNA, 25 bp, Homo sapien
agcgacaggggcggctgggggcaca

SEQ ID NO: 6075003 - DNA, 25 bp, Homo sapien
cgagtataagctgtacgggtcctct

SEQ ID NO: 6075004 - DNA, 25 bp, Homo sapien
agatcttgatgtgtctctccgtcaa

SEQ ID NO: 6075005 - DNA, 25 bp, Homo sapien
cgggagatgtacttgttaaataaga

SEQ ID NO: 6075006 - DNA, 25 bp, Homo sapien
acctcctgcccactggcctttccac

SEQ ID NO: 6075007 - DNA, 25 bp, Homo sapien
cacgggaaagggagatgaaccctgt

SEQ ID NO: 6075008 - DNA, 25 bp, Homo sapien
aaagggagatgaaccctgttgggct

SEQ ID NO: 6075009 - DNA, 25 bp, Homo sapien
ctggcctttccacgcgtgagctttg

SEQ ID NO: 6075010 - DNA, 25 bp, Homo sapien
cttccaggaccccaggctcggctcc

SEQ ID NO: 6075011 - DNA, 25 bp, Homo sapien
ggatgggggagcgcgagctgagctg

SEQ ID NO: 6075012 - DNA, 25 bp, Homo sapien
gtctctccgtcaagttgagcatcac

SEQ ID NO: 6075013 - DNA, 25 bp, Homo sapien
tgtcccgctactacgtttcttatct

SEQ ID NO: 6075014 - DNA, 25 bp, Homo sapien
gccagcagctcctcgcccgaggtta

SEQ ID NO: 6075015 - DNA, 25 bp, Homo sapien
gtatgcacctcctgcccactggcct

SEQ ID NO: 6075016 - DNA, 25 bp, Homo sapien
ctaaggccgggaggcagtcggccct

SEQ ID NO: 6075017 - DNA, 25 bp, Homo sapien
gggagcgcgagctgagctgggaggt

SEQ ID NO: 6075018 - DNA, 25 bp, Homo sapien
gcatcactgccagctccacccgccg

SEQ ID NO: 6075019 - DNA, 25 bp, Homo sapien
acttcatgcgcctgttctgaaacca

SEQ ID NO: 6075020 - DNA, 25 bp, Homo sapien
cggttctgctgcgtatgcacctcct

SEQ ID NO: 6075021 - DNA, 25 bp, Homo sapien
ttccacgcgtgagctttggtggatt

SEQ ID NO: 6075022 - DNA, 25 bp, Homo sapien
gaaccctgttgggctcttccaggac

SEQ ID NO: 6075023 - DNA, 25 bp, Homo sapien
tgcccactggcctttccacgcgtga

SEQ ID NO: 6075024 - DNA, 25 bp, Homo sapien
cctctttcttccacttcatgcgcct

SEQ ID NO: 6075025 - DNA, 25 bp, Homo sapien
aggaccccaggctcggctccttccg

SEQ ID NO: 6075026 - DNA, 25 bp, Homo sapien
ctgggcccgagtataagctgtacgg

SEQ ID NO: 6075027 - DNA, 25 bp, Homo sapien
gccctcccgagcagcgacaggggcg

SEQ ID NO: 6075028 - DNA, 25 bp, Homo sapien
ccccgactgctgtcccgctactacg

SEQ ID NO: 6075029 - DNA, 25 bp, Homo sapien
cgccggggccgggagatgtacttgt

SEQ ID NO: 6075030 - DNA, 25 bp, Homo sapien
cgcagtagcggaagatgaccttctc

SEQ ID NO: 6075031 - DNA, 25 bp, Homo sapien
tgttcagacgagaactctccatcgg

SEQ ID NO: 6075032 - DNA, 25 bp, Homo sapien
ctctgccacggacagggtcaggctc

SEQ ID NO: 6075033 - DNA, 25 bp, Homo sapien
acagctggcatggaccagacagggc

SEQ ID NO: 6075034 - DNA, 25 bp, Homo sapien
cagccgctgccagcggtggcggtca

SEQ ID NO: 6075035 - DNA, 25 bp, Homo sapien
gcctttgccacctgttcagacgaga

SEQ ID NO: 6075036 - DNA, 25 bp, Homo sapien
cagcctttgccacctgttcagacga

SEQ ID NO: 6075037 - DNA, 25 bp, Homo sapien
ggaaggccacgtcggtgtagcgagt

SEQ ID NO: 6075038 - DNA, 25 bp, Homo sapien
catggaccagacagggctcggcgca

SEQ ID NO: 6075039 - DNA, 25 bp, Homo sapien
cggtggcggtcatcgaggaaggcca

SEQ ID NO: 6075040 - DNA, 25 bp, Homo sapien
tcggtgtagcgagtgggccggcagc

SEQ ID NO: 6075041 - DNA, 25 bp, Homo sapien
cagcgccaggccatgctgggtgcgg

SEQ ID NO: 6075042 - DNA, 25 bp, Homo sapien
tgacgtacctgtcgacggcgatggc

SEQ ID NO: 6075043 - DNA, 25 bp, Homo sapien
gccacgatcaaggtgagggccttcc

SEQ ID NO: 6075044 - DNA, 25 bp, Homo sapien
gagaatctccctaaaggtgttgcgc

SEQ ID NO: 6075045 - DNA, 25 bp, Homo sapien
tgaggagcatcatggcgaagaacat

SEQ ID NO: 6075046 - DNA, 25 bp, Homo sapien
gagggccttcctcacggtcatgatg

SEQ ID NO: 6075047 - DNA, 25 bp, Homo sapien
accattttgctctccgagtagacga

SEQ ID NO: 6075048 - DNA, 25 bp, Homo sapien
cagtgctgctatgcgcttgacgtgc

SEQ ID NO: 6075049 - DNA, 25 bp, Homo sapien
cacatgatgaggaccaggtaggtgt

SEQ ID NO: 6075050 - DNA, 25 bp, Homo sapien
tggtgatgaggcacacaatgaccat

SEQ ID NO: 6075051 - DNA, 25 bp, Homo sapien
gtgttgcgcaattccaggctccgga

SEQ ID NO: 6075052 - DNA, 25 bp, Homo sapien
gatcatggagtcgaagatgttgtcc

SEQ ID NO: 6075053 - DNA, 25 bp, Homo sapien
caggctccggaaagcgtagatgagt

SEQ ID NO: 6075054 - DNA, 25 bp, Homo sapien
ccgtattcaaggattacagagctac

SEQ ID NO: 6075055 - DNA, 25 bp, Homo sapien
tgtaattaacatggtccaggacagc

SEQ ID NO: 6075056 - DNA, 25 bp, Homo sapien
gggacaaatcattgtgatgtggaac

SEQ ID NO: 6075057 - DNA, 25 bp, Homo sapien
aatccagtgctataggtaggctcac

SEQ ID NO: 6075058 - DNA, 25 bp, Homo sapien
caagaaatgtgcctagaaaggataa

SEQ ID NO: 6075059 - DNA, 25 bp, Homo sapien
gcacagaacatctacatcagtcttc

SEQ ID NO: 6075060 - DNA, 25 bp, Homo sapien
gattcaaattacagttgtcaaagca

SEQ ID NO: 6075061 - DNA, 25 bp, Homo sapien
ggaaacagtatagctacaatgtcaa

SEQ ID NO: 6075062 - DNA, 25 bp, Homo sapien
tacatcagactagatacaacatgca

SEQ ID NO: 6075063 - DNA, 25 bp, Homo sapien
aaaacctgtcatgggctggtttaca

SEQ ID NO: 6075064 - DNA, 25 bp, Homo sapien
tgatgcagacattttaatccagtgc

SEQ ID NO: 6075065 - DNA, 25 bp, Homo sapien
tgtgatgtggaactaaaatacgtcg

SEQ ID NO: 6075066 - DNA, 25 bp, Homo sapien
tgtcctgtagtttcttatagtctgg

SEQ ID NO: 6075067 - DNA, 25 bp, Homo sapien
tacagttcggtcaaatcacaattca

SEQ ID NO: 6075068 - DNA, 25 bp, Homo sapien
tatttccaatgcacttaacatccag

SEQ ID NO: 6075069 - DNA, 25 bp, Homo sapien
tatcaaggccaatttcgtttcatca

SEQ ID NO: 6075070 - DNA, 25 bp, Homo sapien
tctttaaatctataggttcatcctc

SEQ ID NO: 6075071 - DNA, 25 bp, Homo sapien
gatgaggacccttctttctaacata

SEQ ID NO: 6075072 - DNA, 25 bp, Homo sapien
caaattaccccgattgtctcataaa

SEQ ID NO: 6075073 - DNA, 25 bp, Homo sapien
taccaaataccccaccaatgttcaa

SEQ ID NO: 6075074 - DNA, 25 bp, Homo sapien
tcatatcagccacagatgtttgaga

SEQ ID NO: 6075075 - DNA, 25 bp, Homo sapien
ttcatccttgcaagttatttacaga

SEQ ID NO: 6075076 - DNA, 25 bp, Homo sapien
gaagaaactaggtcatgtgtcctgt

SEQ ID NO: 6075077 - DNA, 25 bp, Homo sapien
tctgccctattttctaaagattagg

SEQ ID NO: 6075078 - DNA, 25 bp, Homo sapien
aagtggtagccacatcccgagccat

SEQ ID NO: 6075079 - DNA, 25 bp, Homo sapien
cactcaagttcagcttggcggccac

SEQ ID NO: 6075080 - DNA, 25 bp, Homo sapien
agggagctgaaagccactgacactc

SEQ ID NO: 6075081 - DNA, 25 bp, Homo sapien
ccgcacaaaacagggcactgggtct

SEQ ID NO: 6075082 - DNA, 25 bp, Homo sapien
gctggaagaagtaatcctcaacctg

SEQ ID NO: 6075083 - DNA, 25 bp, Homo sapien
tgccctttttcactccataggaaac

SEQ ID NO: 6075084 - DNA, 25 bp, Homo sapien
tagcctgtgtgcacctggaacaaca

SEQ ID NO: 6075085 - DNA, 25 bp, Homo sapien
agttcagcttggcggccaccagctt

SEQ ID NO: 6075086 - DNA, 25 bp, Homo sapien
ccagcttcttcaaagtggtagccac

SEQ ID NO: 6075087 - DNA, 25 bp, Homo sapien
gctgctgccagaaacttcggaaggg

SEQ ID NO: 6075088 - DNA, 25 bp, Homo sapien
tctggctcttgagctggaagaagta

SEQ ID NO: 6075089 - DNA, 25 bp, Homo sapien
catcccgagccatgcgcacatcgcc

SEQ ID NO: 6075090 - DNA, 25 bp, Homo sapien
cgggcccaatgaggatgcagggctg

SEQ ID NO: 6075091 - DNA, 25 bp, Homo sapien
cacgaagttcatgcggcctccttta

SEQ ID NO: 6075092 - DNA, 25 bp, Homo sapien
tgaaagccactgacactccgcacaa

SEQ ID NO: 6075093 - DNA, 25 bp, Homo sapien
cactcccttgcggaccatctcctgc

SEQ ID NO: 6075094 - DNA, 25 bp, Homo sapien
gcggcctcctttaagccctctgcgc

SEQ ID NO: 6075095 - DNA, 25 bp, Homo sapien
tattgatccaagtgctgcagacccc

SEQ ID NO: 6075096 - DNA, 25 bp, Homo sapien
cgtggagcacgctgaacacctcgtc

SEQ ID NO: 6075097 - DNA, 25 bp, Homo sapien
gagccatgcgcacatcgccacaaac

SEQ ID NO: 6075098 - DNA, 25 bp, Homo sapien
cccaaacacgaagttcatgcggcct

SEQ ID NO: 6075099 - DNA, 25 bp, Homo sapien
tcctgcatttctttctgatagaggt

SEQ ID NO: 6075100 - DNA, 25 bp, Homo sapien
gccactgacactccgcacaaaacag

SEQ ID NO: 6075101 - DNA, 25 bp, Homo sapien
gttcatgcggcctcctttaagccct

SEQ ID NO: 6075102 - DNA, 25 bp, Homo sapien
atgtcttgaacgtagaccttgggtt

SEQ ID NO: 6075103 - DNA, 25 bp, Homo sapien
acctggaacaacactcccttgcgga

SEQ ID NO: 6075104 - DNA, 25 bp, Homo sapien
gcacgctgaacacctcgtcggccag

SEQ ID NO: 6075105 - DNA, 25 bp, Homo sapien
gtgtgcacctggaacaacactccct

SEQ ID NO: 6075106 - DNA, 25 bp, Homo sapien
cgggagtagcctgtgtgcacctgga

SEQ ID NO: 6075107 - DNA, 25 bp, Homo sapien
gcttggcggccaccagcttcttcaa

SEQ ID NO: 6075108 - DNA, 25 bp, Homo sapien
tctgcgctgagagtcatggagccgc

SEQ ID NO: 6075109 - DNA, 25 bp, Homo sapien
ctgagagtcatggagccgctgctgc

SEQ ID NO: 6075110 - DNA, 25 bp, Homo sapien
acatcgccacaaacatagaggtggc

SEQ ID NO: 6075111 - DNA, 25 bp, Homo sapien
aacgtttctggctcttgagctggaa

SEQ ID NO: 6075112 - DNA, 25 bp, Homo sapien
atgcagggctgggaggggtcctcag

SEQ ID NO: 6075113 - DNA, 25 bp, Homo sapien
ggaggggtcctcagggagctgaaag

SEQ ID NO: 6075114 - DNA, 25 bp, Homo sapien
gtcatggagccgctgctgccagaaa

SEQ ID NO: 6075115 - DNA, 25 bp, Homo sapien
tcaggttattgatccaagtgctgca

SEQ ID NO: 6075116 - DNA, 25 bp, Homo sapien
caacctgctcctcactcaagttcag

SEQ ID NO: 6075117 - DNA, 25 bp, Homo sapien
gccctgctccccgtggagcacgctg

SEQ ID NO: 6075118 - DNA, 25 bp, Homo sapien
tagccacatcccgagccatgcgcac

SEQ ID NO: 6075119 - DNA, 25 bp, Homo sapien
ggagccgctgctgccagaaacttcg

SEQ ID NO: 6075120 - DNA, 25 bp, Homo sapien
gaccatctcctgcatttctttctga

SEQ ID NO: 6075121 - DNA, 25 bp, Homo sapien
tgcgcacatcgccacaaacatagag

SEQ ID NO: 6075122 - DNA, 25 bp, Homo sapien
tggtcctcctctgggtgtctgcacc

SEQ ID NO: 6075123 - DNA, 25 bp, Homo sapien
gaagggggcaatgcctgtaccgggc

SEQ ID NO: 6075124 - DNA, 25 bp, Homo sapien
ccgcaccgaagatatcctcatgata

SEQ ID NO: 6075125 - DNA, 25 bp, Homo sapien
gcaatgcctgtaccgggcccaatga

SEQ ID NO: 6075126 - DNA, 25 bp, Homo sapien
catgataacgtttctggctcttgag

SEQ ID NO: 6075127 - DNA, 25 bp, Homo sapien
gcactgggtcttcgggcttcaggtt

SEQ ID NO: 6075128 - DNA, 25 bp, Homo sapien
tcctttaagccctctgcgctgagag

SEQ ID NO: 6075129 - DNA, 25 bp, Homo sapien
gccagctctttctgcaggatgtctt

SEQ ID NO: 6075130 - DNA, 25 bp, Homo sapien
aggtggccctgctccccgtggagca

SEQ ID NO: 6075131 - DNA, 25 bp, Homo sapien
tctttctgcaggatgtcttgaacgt

SEQ ID NO: 6075132 - DNA, 25 bp, Homo sapien
tgctccccgtggagcacgctgaaca

SEQ ID NO: 6075133 - DNA, 25 bp, Homo sapien
ctgtaccgggcccaatgaggatgca

SEQ ID NO: 6075134 - DNA, 25 bp, Homo sapien
aagccctctgcgctgagagtcatgg

SEQ ID NO: 6075135 - DNA, 25 bp, Homo sapien
tcttgagctggaagaagtaatcctc

SEQ ID NO: 6075136 - DNA, 25 bp, Homo sapien
gctcctcactcaagttcagcttggc

SEQ ID NO: 6075137 - DNA, 25 bp, Homo sapien
gaacaacactcccttgcggaccatc

SEQ ID NO: 6075138 - DNA, 25 bp, Homo sapien
gaaacgaccgcaccgaagatatcct

SEQ ID NO: 6075139 - DNA, 25 bp, Homo sapien
ttctgatagaggtggtcctcctctg

SEQ ID NO: 6075140 - DNA, 25 bp, Homo sapien
tatcctcatgataacgtttctggct

SEQ ID NO: 6075141 - DNA, 25 bp, Homo sapien
aatcctcaacctgctcctcactcaa

SEQ ID NO: 6075142 - DNA, 25 bp, Homo sapien
gacactccgcacaaaacagggcact

SEQ ID NO: 6075143 - DNA, 25 bp, Homo sapien
tcctctgggtgtctgcacccaaaca

SEQ ID NO: 6075144 - DNA, 25 bp, Homo sapien
tcttcaaagtggtagccacatcccg

SEQ ID NO: 6075145 - DNA, 25 bp, Homo sapien
ccataggaaacgaccgcaccgaaga

SEQ ID NO: 6075146 - DNA, 25 bp, Homo sapien
tcgtcggccagctctttctgcagga

SEQ ID NO: 6075147 - DNA, 25 bp, Homo sapien
tagaggtggtcctcctctgggtgtc

SEQ ID NO: 6075148 - DNA, 25 bp, Homo sapien
aaacagggcactgggtcttcgggct

SEQ ID NO: 6075149 - DNA, 25 bp, Homo sapien
caatgaggatgcagggctgggaggg

SEQ ID NO: 6075150 - DNA, 25 bp, Homo sapien
tgaacacctcgtcggccagctcttt

SEQ ID NO: 6075151 - DNA, 25 bp, Homo sapien
ggctgggaggggtcctcagggagct

SEQ ID NO: 6075152 - DNA, 25 bp, Homo sapien
acatagaggtggccctgctccccgt

SEQ ID NO: 6075153 - DNA, 25 bp, Homo sapien
acttcggaagggggcaatgcctgta

SEQ ID NO: 6075154 - DNA, 25 bp, Homo sapien
tctgcacccaaacacgaagttcatg

SEQ ID NO: 6075155 - DNA, 25 bp, Homo sapien
ggtcttcgggcttcaggttattgat

SEQ ID NO: 6075156 - DNA, 25 bp, Homo sapien
ggcagccgggagtagcctgtgtgca

SEQ ID NO: 6075157 - DNA, 25 bp, Homo sapien
atttctttctgatagaggtggtcct

SEQ ID NO: 6075158 - DNA, 25 bp, Homo sapien
tgcaggatgtcttgaacgtagacct

SEQ ID NO: 6075159 - DNA, 25 bp, Homo sapien
cttgcggaccatctcctgcatttct

SEQ ID NO: 6075160 - DNA, 25 bp, Homo sapien
agaagtaatcctcaacctgctcctc

SEQ ID NO: 6075161 - DNA, 25 bp, Homo sapien
cgggcttcaggttattgatccaagt

SEQ ID NO: 6075162 - DNA, 25 bp, Homo sapien
ccacaaacatagaggtggccctgct

SEQ ID NO: 6075163 - DNA, 25 bp, Homo sapien
ggcgttgccctttttcactccatag

SEQ ID NO: 6075164 - DNA, 25 bp, Homo sapien
cgaagatatcctcatgataacgttt

SEQ ID NO: 6075165 - DNA, 25 bp, Homo sapien
tttccgggcagccgggagtagcctg

SEQ ID NO: 6075166 - DNA, 25 bp, Homo sapien
tgggtgtctgcacccaaacacgaag

SEQ ID NO: 6075167 - DNA, 25 bp, Homo sapien
gtcctcagggagctgaaagccactg

SEQ ID NO: 6075168 - DNA, 25 bp, Homo sapien
cggccaccagcttcttcaaagtggt

SEQ ID NO: 6075169 - DNA, 25 bp, Homo sapien
ttcactccataggaaacgaccgcac

SEQ ID NO: 6075170 - DNA, 25 bp, Homo sapien
taagtgcgataacccctgtaaagcg

SEQ ID NO: 6075171 - DNA, 25 bp, Homo sapien
tgcattgtgactcaattcctgaagg

SEQ ID NO: 6075172 - DNA, 25 bp, Homo sapien
tctacaagccggcagggcggtttta

SEQ ID NO: 6075173 - DNA, 25 bp, Homo sapien
gataacccctgtaaagcgctggaga

SEQ ID NO: 6075174 - DNA, 25 bp, Homo sapien
tccgaggcttaagtgcgataacccc

SEQ ID NO: 6075175 - DNA, 25 bp, Homo sapien
caatctcccatttgatatttgtctg

SEQ ID NO: 6075176 - DNA, 25 bp, Homo sapien
cgtgtatccatatacaaggtctcat

SEQ ID NO: 6075177 - DNA, 25 bp, Homo sapien
ccctgtaaagcgctggagaacggca

SEQ ID NO: 6075178 - DNA, 25 bp, Homo sapien
gcaaaagctctacaagccggcaggg

SEQ ID NO: 6075179 - DNA, 25 bp, Homo sapien
gcggttttaaatgcacgtgtatcca

SEQ ID NO: 6075180 - DNA, 25 bp, Homo sapien
aagcgctggagaacggcaaaagctc

SEQ ID NO: 6075181 - DNA, 25 bp, Homo sapien
cagggcggttttaaatgcacgtgta

SEQ ID NO: 6075182 - DNA, 25 bp, Homo sapien
tatttggcacagtcgatcactccct

SEQ ID NO: 6075183 - DNA, 25 bp, Homo sapien
attactctaccaaaattaccagtgg

SEQ ID NO: 6075184 - DNA, 25 bp, Homo sapien
ccatggctttaaacaacatctctaa

SEQ ID NO: 6075185 - DNA, 25 bp, Homo sapien
catctctaatttgatgactgccaga

SEQ ID NO: 6075186 - DNA, 25 bp, Homo sapien
ttcttctcagtgcatactcacagca

SEQ ID NO: 6075187 - DNA, 25 bp, Homo sapien
gccttacagttcagtctttggtcca

SEQ ID NO: 6075188 - DNA, 25 bp, Homo sapien
ccatctgtctttacatgaatctcag

SEQ ID NO: 6075189 - DNA, 25 bp, Homo sapien
catactcacagcataggtgttccat

SEQ ID NO: 6075190 - DNA, 25 bp, Homo sapien
gagtcatttctcaggcctcgtctca

SEQ ID NO: 6075191 - DNA, 25 bp, Homo sapien
gaggctactctatcctttcacttgc

SEQ ID NO: 6075192 - DNA, 25 bp, Homo sapien
tctcttgagtccagctaatcaagct

SEQ ID NO: 6075193 - DNA, 25 bp, Homo sapien
ggtttccagtgttgctaaactcaag

SEQ ID NO: 6075194 - DNA, 25 bp, Homo sapien
actgaggctccacgcgaagggaaga

SEQ ID NO: 6075195 - DNA, 25 bp, Homo sapien
tcaagaagacagctagggtagaagg

SEQ ID NO: 6075196 - DNA, 25 bp, Homo sapien
ccaggagctagtgatggaagtcttg

SEQ ID NO: 6075197 - DNA, 25 bp, Homo sapien
ggaagatgcaaagtccagtccctcc

SEQ ID NO: 6075198 - DNA, 25 bp, Homo sapien
acgcattggctagggcctctcacac

SEQ ID NO: 6075199 - DNA, 25 bp, Homo sapien
tgacggtaccggcattttcatcccc

SEQ ID NO: 6075200 - DNA, 25 bp, Homo sapien
ctcacactgaggctccacgcgaagg

SEQ ID NO: 6075201 - DNA, 25 bp, Homo sapien
gacatgcacgcattggctagggcct

SEQ ID NO: 6075202 - DNA, 25 bp, Homo sapien
ctgacatgcacgcattggctagggc

SEQ ID NO: 6075203 - DNA, 25 bp, Homo sapien
ctccaggagctagtgatggaagtct

SEQ ID NO: 6075204 - DNA, 25 bp, Homo sapien
ggctgtgcactgacggtaccggcat

SEQ ID NO: 6075205 - DNA, 25 bp, Homo sapien
tgtgcactgacggtaccggcatttt

SEQ ID NO: 6075206 - DNA, 25 bp, Homo sapien
gatggtaggtctagggataatcaga

SEQ ID NO: 6075207 - DNA, 25 bp, Homo sapien
taaaggacaaatgctccgactgcat

SEQ ID NO: 6075208 - DNA, 25 bp, Homo sapien
tgcagggcccagatccattaaccga

SEQ ID NO: 6075209 - DNA, 25 bp, Homo sapien
gagagccacactcccggcaataatt

SEQ ID NO: 6075210 - DNA, 25 bp, Homo sapien
tccatggtctcagagtttgtaggct

SEQ ID NO: 6075211 - DNA, 25 bp, Homo sapien
gcttgtagtccacataatactcctg

SEQ ID NO: 6075212 - DNA, 25 bp, Homo sapien
ttaggtcccgcacatatcatggtgc

SEQ ID NO: 6075213 - DNA, 25 bp, Homo sapien
tctgcgccaggaatctgaaaccctg

SEQ ID NO: 6075214 - DNA, 25 bp, Homo sapien
tcaccctggatgtgcttaggtcccg

SEQ ID NO: 6075215 - DNA, 25 bp, Homo sapien
gggcaccaggtgtgatctttctgtg

SEQ ID NO: 6075216 - DNA, 25 bp, Homo sapien
tttcaaaggtggattgggtgacgtc

SEQ ID NO: 6075217 - DNA, 25 bp, Homo sapien
ggctgggtagcgtttccaagacaca

SEQ ID NO: 6075218 - DNA, 25 bp, Homo sapien
tgttgtctctcaagaccttgcggtg

SEQ ID NO: 6075219 - DNA, 25 bp, Homo sapien
gtgtaggtgactgcgtcccgaatca

SEQ ID NO: 6075220 - DNA, 25 bp, Homo sapien
tgctcggtgtaggtgactgcgtccc

SEQ ID NO: 6075221 - DNA, 25 bp, Homo sapien
acgccgagctagacgccgaatggca

SEQ ID NO: 6075222 - DNA, 25 bp, Homo sapien
gtctctcaagaccttgcggtggcgc

SEQ ID NO: 6075223 - DNA, 25 bp, Homo sapien
gaggccagagatccgcttaacgccg

SEQ ID NO: 6075224 - DNA, 25 bp, Homo sapien
taaatgaggccagagatccgcttaa

SEQ ID NO: 6075225 - DNA, 25 bp, Homo sapien
ctagacgccgaatggcaggcttggt

SEQ ID NO: 6075226 - DNA, 25 bp, Homo sapien
gccacgccgagctagacgccgaatg

SEQ ID NO: 6075227 - DNA, 25 bp, Homo sapien
tgaatgttgtctctcaagaccttgc

SEQ ID NO: 6075228 - DNA, 25 bp, Homo sapien
gagctagacgccgaatggcaggctt

SEQ ID NO: 6075229 - DNA, 25 bp, Homo sapien
tgactgcgtcccgaatcacattctc

SEQ ID NO: 6075230 - DNA, 25 bp, Homo sapien
tattatgcaagataactggagaacg

SEQ ID NO: 6075231 - DNA, 25 bp, Homo sapien
ctagtgtatccatctgtagttttgc

SEQ ID NO: 6075232 - DNA, 25 bp, Homo sapien
gtactgcctctcataaatcttccaa

SEQ ID NO: 6075233 - DNA, 25 bp, Homo sapien
aaccttgacagtaattttgaacctg

SEQ ID NO: 6075234 - DNA, 25 bp, Homo sapien
cctgctatgcctaatgaacttgaag

SEQ ID NO: 6075235 - DNA, 25 bp, Homo sapien
tcatttgttttggaacgcagagttc

SEQ ID NO: 6075236 - DNA, 25 bp, Homo sapien
gccacttaatatttgacacctgcta

SEQ ID NO: 6075237 - DNA, 25 bp, Homo sapien
gggccagccattcatattatgcaag

SEQ ID NO: 6075238 - DNA, 25 bp, Homo sapien
aactgggcccagttgaataaagcca

SEQ ID NO: 6075239 - DNA, 25 bp, Homo sapien
tccaaagggacaatggaaactgggc

SEQ ID NO: 6075240 - DNA, 25 bp, Homo sapien
tccaacagataatgggtactgcctc

SEQ ID NO: 6075241 - DNA, 25 bp, Homo sapien
ctctgcatgtagattgcatttagca

SEQ ID NO: 6075242 - DNA, 25 bp, Homo sapien
tctaactgccttatacatttgtaac

SEQ ID NO: 6075243 - DNA, 25 bp, Homo sapien
tagtcttgactatcttccagtgaat

SEQ ID NO: 6075244 - DNA, 25 bp, Homo sapien
tgaaaagtcatcctgccagtggaac

SEQ ID NO: 6075245 - DNA, 25 bp, Homo sapien
cataccacttacatgacggtggtcc

SEQ ID NO: 6075246 - DNA, 25 bp, Homo sapien
aaggcactgaaattgatttgagcta

SEQ ID NO: 6075247 - DNA, 25 bp, Homo sapien
gatttgagctattgaaaagtcatcc

SEQ ID NO: 6075248 - DNA, 25 bp, Homo sapien
cagtcatgaaccacgtaaccatgtt

SEQ ID NO: 6075249 - DNA, 25 bp, Homo sapien
catactcgaagttgcattattctaa

SEQ ID NO: 6075250 - DNA, 25 bp, Homo sapien
accatgtttctgtcaaagacatacc

SEQ ID NO: 6075251 - DNA, 25 bp, Homo sapien
gggtcaatttgctctaatgtgtctt

SEQ ID NO: 6075252 - DNA, 25 bp, Homo sapien
tgaaatattaaagcatactcgaagt

SEQ ID NO: 6075253 - DNA, 25 bp, Homo sapien
cggtggtcccataacattgtaatac

SEQ ID NO: 6075254 - DNA, 25 bp, Homo sapien
ttgttcatggagtcagacacccact

SEQ ID NO: 6075255 - DNA, 25 bp, Homo sapien
taatcactatctgagcttgaggagc

SEQ ID NO: 6075256 - DNA, 25 bp, Homo sapien
gcattagacttagtgaaatccaggt

SEQ ID NO: 6075257 - DNA, 25 bp, Homo sapien
cctaggctaagattggttattttct

SEQ ID NO: 6075258 - DNA, 25 bp, Homo sapien
cacccttgatcatagccacaatggt

SEQ ID NO: 6075259 - DNA, 25 bp, Homo sapien
agatctggattcacctcagccgtgt

SEQ ID NO: 6075260 - DNA, 25 bp, Homo sapien
ttggcggcattagacttagtgaaat

SEQ ID NO: 6075261 - DNA, 25 bp, Homo sapien
tcctgagctagggataatgatcatc

SEQ ID NO: 6075262 - DNA, 25 bp, Homo sapien
gtgttacaataacaacaataattgt

SEQ ID NO: 6075263 - DNA, 25 bp, Homo sapien
ttttcttattaatattcctgatctc

SEQ ID NO: 6075264 - DNA, 25 bp, Homo sapien
attactgccttcagatctggattca

SEQ ID NO: 6075265 - DNA, 25 bp, Homo sapien
cacatcaggctttcctgagctaggg

SEQ ID NO: 6075266 - DNA, 25 bp, Homo sapien
ttatctctcccaattactgccttca

SEQ ID NO: 6075267 - DNA, 25 bp, Homo sapien
caaaattggcggcattagacttagt

SEQ ID NO: 6075268 - DNA, 25 bp, Homo sapien
cacgacacggtagatctgtcccatg

SEQ ID NO: 6075269 - DNA, 25 bp, Homo sapien
aagccagtgttacaataacaacaat

SEQ ID NO: 6075270 - DNA, 25 bp, Homo sapien
ggtctaaactttctagatcactcct

SEQ ID NO: 6075271 - DNA, 25 bp, Homo sapien
atttagtagattaattcaaagccag

SEQ ID NO: 6075272 - DNA, 25 bp, Homo sapien
atttctgatgttgctgggcttagga

SEQ ID NO: 6075273 - DNA, 25 bp, Homo sapien
tggcatcattgcctgggacaaaatt

SEQ ID NO: 6075274 - DNA, 25 bp, Homo sapien
caacaataattgtataatgtgtaag

SEQ ID NO: 6075275 - DNA, 25 bp, Homo sapien
tgccttagcatctaatcactatctg

SEQ ID NO: 6075276 - DNA, 25 bp, Homo sapien
ttacttcacccttgatcatagccac

SEQ ID NO: 6075277 - DNA, 25 bp, Homo sapien
gaggagctgtcactttcagcatcca

SEQ ID NO: 6075278 - DNA, 25 bp, Homo sapien
cccatggggtgtttgttcatggagt

SEQ ID NO: 6075279 - DNA, 25 bp, Homo sapien
gggtgtttgttcatggagtcagaca

SEQ ID NO: 6075280 - DNA, 25 bp, Homo sapien
agcatctaatcactatctgagcttg

SEQ ID NO: 6075281 - DNA, 25 bp, Homo sapien
acctcagccgtgtcattcacatcag

SEQ ID NO: 6075282 - DNA, 25 bp, Homo sapien
gccttcagatctggattcacctcag

SEQ ID NO: 6075283 - DNA, 25 bp, Homo sapien
taattgtataatgtgtaagctggtt

SEQ ID NO: 6075284 - DNA, 25 bp, Homo sapien
ctgggacaaaattggcggcattaga

SEQ ID NO: 6075285 - DNA, 25 bp, Homo sapien
agagcctccctcacgacacggtaga

SEQ ID NO: 6075286 - DNA, 25 bp, Homo sapien
tgctgggcttaggaggtctaaactt

SEQ ID NO: 6075287 - DNA, 25 bp, Homo sapien
acccacttgatcaactcttgctgac

SEQ ID NO: 6075288 - DNA, 25 bp, Homo sapien
ctttcagcatccagagcctccctca

SEQ ID NO: 6075289 - DNA, 25 bp, Homo sapien
gtcattcacatcaggctttcctgag

SEQ ID NO: 6075290 - DNA, 25 bp, Homo sapien
tataatgtgtaagctggttgcctta

SEQ ID NO: 6075291 - DNA, 25 bp, Homo sapien
ctccctcacgacacggtagatctgt

SEQ ID NO: 6075292 - DNA, 25 bp, Homo sapien
cattgcctgggacaaaattggcggc

SEQ ID NO: 6075293 - DNA, 25 bp, Homo sapien
ggattcacctcagccgtgtcattca

SEQ ID NO: 6075294 - DNA, 25 bp, Homo sapien
ataagttttcaactgtagaggagtc

SEQ ID NO: 6075295 - DNA, 25 bp, Homo sapien
gataatgatcatcatggatttgata

SEQ ID NO: 6075296 - DNA, 25 bp, Homo sapien
gtcaggtatttagggtctatttctg

SEQ ID NO: 6075297 - DNA, 25 bp, Homo sapien
gtgaaatccaggtcttgagtcaggt

SEQ ID NO: 6075298 - DNA, 25 bp, Homo sapien
gatctgtcccatggggtgtttgttc

SEQ ID NO: 6075299 - DNA, 25 bp, Homo sapien
tgtgtgttgtaacttccttcaaccc

SEQ ID NO: 6075300 - DNA, 25 bp, Homo sapien
aactcttgctgacgtttgacatcag

SEQ ID NO: 6075301 - DNA, 25 bp, Homo sapien
gagcttgaggagctgtcactttcag

SEQ ID NO: 6075302 - DNA, 25 bp, Homo sapien
aattcaaagccagtgttacaataac

SEQ ID NO: 6075303 - DNA, 25 bp, Homo sapien
ctatctgagcttgaggagctgtcac

SEQ ID NO: 6075304 - DNA, 25 bp, Homo sapien
tattaatattcctgatctcctcttt

SEQ ID NO: 6075305 - DNA, 25 bp, Homo sapien
tagattaattcaaagccagtgttac

SEQ ID NO: 6075306 - DNA, 25 bp, Homo sapien
aactttctagatcactcctgtgtgt

SEQ ID NO: 6075307 - DNA, 25 bp, Homo sapien
caatggtataaaatgagctggcatc

SEQ ID NO: 6075308 - DNA, 25 bp, Homo sapien
aggctttcctgagctagggataatg

SEQ ID NO: 6075309 - DNA, 25 bp, Homo sapien
tcttgagtcaggtatttagggtcta

SEQ ID NO: 6075310 - DNA, 25 bp, Homo sapien
tgctgacgtttgacatcagttactt

SEQ ID NO: 6075311 - DNA, 25 bp, Homo sapien
catcagttacttcacccttgatcat

SEQ ID NO: 6075312 - DNA, 25 bp, Homo sapien
ctgtcactttcagcatccagagcct

SEQ ID NO: 6075313 - DNA, 25 bp, Homo sapien
atgagctggcatcattgcctgggac

SEQ ID NO: 6075314 - DNA, 25 bp, Homo sapien
gacttagtgaaatccaggtcttgag

SEQ ID NO: 6075315 - DNA, 25 bp, Homo sapien
tccaggtcttgagtcaggtatttag

SEQ ID NO: 6075316 - DNA, 25 bp, Homo sapien
ttaggaggtctaaactttctagatc

SEQ ID NO: 6075317 - DNA, 25 bp, Homo sapien
ttgatcaactcttgctgacgtttga

SEQ ID NO: 6075318 - DNA, 25 bp, Homo sapien
ctagttttatctctcccaattactg

SEQ ID NO: 6075319 - DNA, 25 bp, Homo sapien
ctgtagaggagtcctaggctaagat

SEQ ID NO: 6075320 - DNA, 25 bp, Homo sapien
atggagtcagacacccacttgatca

SEQ ID NO: 6075321 - DNA, 25 bp, Homo sapien
agccgtgtcattcacatcaggcttt

SEQ ID NO: 6075322 - DNA, 25 bp, Homo sapien
acggtagatctgtcccatggggtgt

SEQ ID NO: 6075323 - DNA, 25 bp, Homo sapien
aggagtcctaggctaagattggtta

SEQ ID NO: 6075324 - DNA, 25 bp, Homo sapien
cgtttgacatcagttacttcaccct

SEQ ID NO: 6075325 - DNA, 25 bp, Homo sapien
gctggttgccttagcatctaatcac

SEQ ID NO: 6075326 - DNA, 25 bp, Homo sapien
ctcccaattactgccttcagatctg

SEQ ID NO: 6075327 - DNA, 25 bp, Homo sapien
tcagacacccacttgatcaactctt

SEQ ID NO: 6075328 - DNA, 25 bp, Homo sapien
gatgttgctgggcttaggaggtcta

SEQ ID NO: 6075329 - DNA, 25 bp, Homo sapien
gcatccagagcctccctcacgacac

SEQ ID NO: 6075330 - DNA, 25 bp, Homo sapien
gggtctatttctgatgttgctgggc

SEQ ID NO: 6075331 - DNA, 25 bp, Homo sapien
tttgatataagttttcaactgtaga

SEQ ID NO: 6075332 - DNA, 25 bp, Homo sapien
gtgtaagctggttgccttagcatct

SEQ ID NO: 6075333 - DNA, 25 bp, Homo sapien
tgatcatagccacaatggtataaaa

SEQ ID NO: 6075334 - DNA, 25 bp, Homo sapien
tataaaatgagctggcatcattgcc

SEQ ID NO: 6075335 - DNA, 25 bp, Homo sapien
tagccacaatggtataaaatgagct

SEQ ID NO: 6075336 - DNA, 25 bp, Homo sapien
tattcctgatctcctctttgatctc

SEQ ID NO: 6075337 - DNA, 25 bp, Homo sapien
tatttagggtctatttctgatgttg

SEQ ID NO: 6075338 - DNA, 25 bp, Homo sapien
gctagggataatgatcatcatggat

SEQ ID NO: 6075339 - DNA, 25 bp, Homo sapien
gatcatcatggatttgatataagtt

SEQ ID NO: 6075340 - DNA, 25 bp, Homo sapien
ctagatcactcctgtgtgttgtaac

SEQ ID NO: 6075341 - DNA, 25 bp, Homo sapien
catggatttgatataagttttcaac

SEQ ID NO: 6075342 - DNA, 25 bp, Homo sapien
gttattttcttattaatattcctga

SEQ ID NO: 6075343 - DNA, 25 bp, Homo sapien
tttcaactgtagaggagtcctaggc

SEQ ID NO: 6075344 - DNA, 25 bp, Homo sapien
cactcctgtgtgttgtaacttcctt

SEQ ID NO: 6075345 - DNA, 25 bp, Homo sapien
tgtggacaacagtatgtgcggaatg

SEQ ID NO: 6075346 - DNA, 25 bp, Homo sapien
caacagtatgtgcggaatgaggact

SEQ ID NO: 6075347 - DNA, 25 bp, Homo sapien
gacaacagtatgtgcggaatgagga

SEQ ID NO: 6075348 - DNA, 25 bp, Homo sapien
acaacagtatgtgcggaatgaggac

SEQ ID NO: 6075349 - DNA, 25 bp, Homo sapien
ggacaacagtatgtgcggaatgagg

SEQ ID NO: 6075350 - DNA, 25 bp, Homo sapien
gtggacaacagtatgtgcggaatga

SEQ ID NO: 6075351 - DNA, 25 bp, Homo sapien
tggacaacagtatgtgcggaatgag

SEQ ID NO: 6075352 - DNA, 25 bp, Homo sapien
gctgcaacatgaactaaggtgtacc

SEQ ID NO: 6075353 - DNA, 25 bp, Homo sapien
gacagcaccaaagaagctgcaacat

SEQ ID NO: 6075354 - DNA, 25 bp, Homo sapien
ctttctaagtagactatgaggcact

SEQ ID NO: 6075355 - DNA, 25 bp, Homo sapien
aagcgctatggtgtgtgtggacaac

SEQ ID NO: 6075356 - DNA, 25 bp, Homo sapien
ggaatgaggacttcttccccaccca

SEQ ID NO: 6075357 - DNA, 25 bp, Homo sapien
caagacgctgtcaacatagtatgtc

SEQ ID NO: 6075358 - DNA, 25 bp, Homo sapien
taccaactatgatctgacagcacca

SEQ ID NO: 6075359 - DNA, 25 bp, Homo sapien
acaacagtatgtgcggaatgaggac

SEQ ID NO: 6075360 - DNA, 25 bp, Homo sapien
tgtggacaacagtatgtgcggaatg

SEQ ID NO: 6075361 - DNA, 25 bp, Homo sapien
agctgcaggcccagcaagacgctgt

SEQ ID NO: 6075362 - DNA, 25 bp, Homo sapien
taaggtgtacctagcttcagagaag

SEQ ID NO: 6075363 - DNA, 25 bp, Homo sapien
cattcaaaacccacaacaggccggg

SEQ ID NO: 6075364 - DNA, 25 bp, Homo sapien
acgtattcatcctgagtggactggg

SEQ ID NO: 6075365 - DNA, 25 bp, Homo sapien
taagttcagctgacgtattcatcct

SEQ ID NO: 6075366 - DNA, 25 bp, Homo sapien
tagtagggtttcatggggacccaga

SEQ ID NO: 6075367 - DNA, 25 bp, Homo sapien
acacagcttgcttaagttcagctga

SEQ ID NO: 6075368 - DNA, 25 bp, Homo sapien
catgcgcgggactgcagcctttcag

SEQ ID NO: 6075369 - DNA, 25 bp, Homo sapien
ctttcagagctttacttcttttatc

SEQ ID NO: 6075370 - DNA, 25 bp, Homo sapien
taaacgatgagggacatcaacccca

SEQ ID NO: 6075371 - DNA, 25 bp, Homo sapien
atgagggacatcaaccccactccta

SEQ ID NO: 6075372 - DNA, 25 bp, Homo sapien
acagtgatgttccatgttcccatct

SEQ ID NO: 6075373 - DNA, 25 bp, Homo sapien
gaaaggtcacagagcacgcccccgc

SEQ ID NO: 6075374 - DNA, 25 bp, Homo sapien
tacttcttttatcagcactcctgat

SEQ ID NO: 6075375 - DNA, 25 bp, Homo sapien
ccagaccttcttaataaagctttga

SEQ ID NO: 6075376 - DNA, 25 bp, Homo sapien
cagcactcctgattttataaacgat

SEQ ID NO: 6075377 - DNA, 25 bp, Homo sapien
actgggggagcagttagtgatggcc

SEQ ID NO: 6075378 - DNA, 25 bp, Homo sapien
catcctgagtggactgggggagcag

SEQ ID NO: 6075379 - DNA, 25 bp, Homo sapien
gattccgcgacagaatgggaaaggt

SEQ ID NO: 6075380 - DNA, 25 bp, Homo sapien
gaatgggaaaggtcacagagcacgc

SEQ ID NO: 6075381 - DNA, 25 bp, Homo sapien
cttcttaataaagctttgaagcatc

SEQ ID NO: 6075382 - DNA, 25 bp, Homo sapien
cctgggtatagtagggtttcatggg

SEQ ID NO: 6075383 - DNA, 25 bp, Homo sapien
gttagtgatggccatgggcatgcgc

SEQ ID NO: 6075384 - DNA, 25 bp, Homo sapien
ccatctacacagcttgcttaagttc

SEQ ID NO: 6075385 - DNA, 25 bp, Homo sapien
ggagcagttagtgatggccatgggc

SEQ ID NO: 6075386 - DNA, 25 bp, Homo sapien
cttgcttaagttcagctgacgtatt

SEQ ID NO: 6075387 - DNA, 25 bp, Homo sapien
cgggactgcagcctttcagagcttt

SEQ ID NO: 6075388 - DNA, 25 bp, Homo sapien
aagcatctcagcgggatcaaggcca

SEQ ID NO: 6075389 - DNA, 25 bp, Homo sapien
catggggacccagaccttcttaata

SEQ ID NO: 6075390 - DNA, 25 bp, Homo sapien
cagctgacgtattcatcctgagtgg

SEQ ID NO: 6075391 - DNA, 25 bp, Homo sapien
gggatcaaggccacactagattccg

SEQ ID NO: 6075392 - DNA, 25 bp, Homo sapien
gagctttacttcttttatcagcact

SEQ ID NO: 6075393 - DNA, 25 bp, Homo sapien
ctcagcgggatcaaggccacactag

SEQ ID NO: 6075394 - DNA, 25 bp, Homo sapien
tgcagcctttcagagctttacttct

SEQ ID NO: 6075395 - DNA, 25 bp, Homo sapien
catcaaccccactcctacccaaatt

SEQ ID NO: 6075396 - DNA, 25 bp, Homo sapien
aactgtacagtgatgttccatgttc

SEQ ID NO: 6075397 - DNA, 25 bp, Homo sapien
aataaagctttgaagcatctcagcg

SEQ ID NO: 6075398 - DNA, 25 bp, Homo sapien
tgccacattgtaaacggtacttagg

SEQ ID NO: 6075399 - DNA, 25 bp, Homo sapien
atgttcccatctacacagcttgctt

SEQ ID NO: 6075400 - DNA, 25 bp, Homo sapien
cggtacttaggtaactgtacagtga

SEQ ID NO: 6075401 - DNA, 25 bp, Homo sapien
gatggccatgggcatgcgcgggact

SEQ ID NO: 6075402 - DNA, 25 bp, Homo sapien
atgttccatgttcccatctacacag

SEQ ID NO: 6075403 - DNA, 25 bp, Homo sapien
tcctgattttataaacgatgaggga

SEQ ID NO: 6075404 - DNA, 25 bp, Homo sapien
ttttataaacgatgagggacatcaa

SEQ ID NO: 6075405 - DNA, 25 bp, Homo sapien
acactagattccgcgacagaatggg

SEQ ID NO: 6075406 - DNA, 25 bp, Homo sapien
ttttatcagcactcctgattttata

SEQ ID NO: 6075407 - DNA, 25 bp, Homo sapien
gcgacagaatgggaaaggtcacaga

SEQ ID NO: 6075408 - DNA, 25 bp, Homo sapien
cacatttattaatgccacattgtaa

SEQ ID NO: 6075409 - DNA, 25 bp, Homo sapien
aaggccacactagattccgcgacag

SEQ ID NO: 6075410 - DNA, 25 bp, Homo sapien
catgggcatgcgcgggactgcagcc

SEQ ID NO: 6075411 - DNA, 25 bp, Homo sapien
gctttgaagcatctcagcgggatca

SEQ ID NO: 6075412 - DNA, 25 bp, Homo sapien
ttaggtaactgtacagtgatgttcc

SEQ ID NO: 6075413 - DNA, 25 bp, Homo sapien
ctcagacacatttattaatgccaca

SEQ ID NO: 6075414 - DNA, 25 bp, Homo sapien
tattaatgccacattgtaaacggta

SEQ ID NO: 6075415 - DNA, 25 bp, Homo sapien
agtggactgggggagcagttagtga

SEQ ID NO: 6075416 - DNA, 25 bp, Homo sapien
caataatcccaacataaccccgaag

SEQ ID NO: 6075417 - DNA, 25 bp, Homo sapien
cccaggtctatgagatccacgctta

SEQ ID NO: 6075418 - DNA, 25 bp, Homo sapien
tcactttgggttcttgatttatgct

SEQ ID NO: 6075419 - DNA, 25 bp, Homo sapien
cttgatttatgctataaagcggatc

SEQ ID NO: 6075420 - DNA, 25 bp, Homo sapien
cttaggattaacctgatcaagtagc

SEQ ID NO: 6075421 - DNA, 25 bp, Homo sapien
tactcacttgttttgtaaggcaaat

SEQ ID NO: 6075422 - DNA, 25 bp, Homo sapien
caagtgttatgtataatccatcaag

SEQ ID NO: 6075423 - DNA, 25 bp, Homo sapien
agctggattgtaccgtaaagggtca

SEQ ID NO: 6075424 - DNA, 25 bp, Homo sapien
cctattgattgcactattgattgaa

SEQ ID NO: 6075425 - DNA, 25 bp, Homo sapien
aatcatgtatattataaccagagta

SEQ ID NO: 6075426 - DNA, 25 bp, Homo sapien
aagtagctcatttgcatgatccaga

SEQ ID NO: 6075427 - DNA, 25 bp, Homo sapien
ctccgacctattgattgcactattg

SEQ ID NO: 6075428 - DNA, 25 bp, Homo sapien
gatacatctctttacaggcatcaac

SEQ ID NO: 6075429 - DNA, 25 bp, Homo sapien
caccaaagtcacaacacaccatagt

SEQ ID NO: 6075430 - DNA, 25 bp, Homo sapien
ctcatttgcatgatccagatgctcc

SEQ ID NO: 6075431 - DNA, 25 bp, Homo sapien
taggaatgatagagcctaagctgga

SEQ ID NO: 6075432 - DNA, 25 bp, Homo sapien
ggcaaatgagccacaccaaagtcac

SEQ ID NO: 6075433 - DNA, 25 bp, Homo sapien
tacaggcatcaacatcgaccattac

SEQ ID NO: 6075434 - DNA, 25 bp, Homo sapien
cttgttttgtaaggcaaatgagcca

SEQ ID NO: 6075435 - DNA, 25 bp, Homo sapien
tgtcggtgcccgactacccatgctt

SEQ ID NO: 6075436 - DNA, 25 bp, Homo sapien
atacaacaggtgcacaattagcaaa

SEQ ID NO: 6075437 - DNA, 25 bp, Homo sapien
ttatgttaacccacgaatccggaga

SEQ ID NO: 6075438 - DNA, 25 bp, Homo sapien
gacattgactatcttaggattaacc

SEQ ID NO: 6075439 - DNA, 25 bp, Homo sapien
ttcctccaaaagacactctactcac

SEQ ID NO: 6075440 - DNA, 25 bp, Homo sapien
cccgaaggtcttgacattgactatc

SEQ ID NO: 6075441 - DNA, 25 bp, Homo sapien
ccattacatttgtcactttgggttc

SEQ ID NO: 6075442 - DNA, 25 bp, Homo sapien
catcaacatcgaccattacatttgt

SEQ ID NO: 6075443 - DNA, 25 bp, Homo sapien
gattgcactattgattgaattgatc

SEQ ID NO: 6075444 - DNA, 25 bp, Homo sapien
cctcccaaagacacatcctcggcat

SEQ ID NO: 6075445 - DNA, 25 bp, Homo sapien
acactctactcacttgttttgtaag

SEQ ID NO: 6075446 - DNA, 25 bp, Homo sapien
catcgaccattacatttgtcacttt

SEQ ID NO: 6075447 - DNA, 25 bp, Homo sapien
gactatcttaggattaacctgatca

SEQ ID NO: 6075448 - DNA, 25 bp, Homo sapien
ataatccatcaagatacatctcttt

SEQ ID NO: 6075449 - DNA, 25 bp, Homo sapien
tctatgagatccacgcttattggac

SEQ ID NO: 6075450 - DNA, 25 bp, Homo sapien
agtgaattaactgtcggtgcccgac

SEQ ID NO: 6075451 - DNA, 25 bp, Homo sapien
aatactaatcatgtatattataacc

SEQ ID NO: 6075452 - DNA, 25 bp, Homo sapien
ggtcaacacaaatactaatcatgta

SEQ ID NO: 6075453 - DNA, 25 bp, Homo sapien
acatagcacggggtaactgtgactt

SEQ ID NO: 6075454 - DNA, 25 bp, Homo sapien
agtcacaacacaccatagtatcagg

SEQ ID NO: 6075455 - DNA, 25 bp, Homo sapien
acgaatccggagagtgaattaactg

SEQ ID NO: 6075456 - DNA, 25 bp, Homo sapien
gcggatcttggcatttacatacaac

SEQ ID NO: 6075457 - DNA, 25 bp, Homo sapien
attaacctgatcaagtagctcattt

SEQ ID NO: 6075458 - DNA, 25 bp, Homo sapien
actgtgacttaccaagtgttatgta

SEQ ID NO: 6075459 - DNA, 25 bp, Homo sapien
aacacaccatagtatcaggagcagc

SEQ ID NO: 6075460 - DNA, 25 bp, Homo sapien
gattgaattgatctcattgcccagg

SEQ ID NO: 6075461 - DNA, 25 bp, Homo sapien
attgatctcattgcccaggtctatg

SEQ ID NO: 6075462 - DNA, 25 bp, Homo sapien
catttgtcactttgggttcttgatt

SEQ ID NO: 6075463 - DNA, 25 bp, Homo sapien
aaagacacatcctcggcatacatag

SEQ ID NO: 6075464 - DNA, 25 bp, Homo sapien
ttatgtataatccatcaagatacat

SEQ ID NO: 6075465 - DNA, 25 bp, Homo sapien
gactacccatgcttcctccaaaaga

SEQ ID NO: 6075466 - DNA, 25 bp, Homo sapien
ccatagtatcaggagcagcaataat

SEQ ID NO: 6075467 - DNA, 25 bp, Homo sapien
tgagccacaccaaagtcacaacaca

SEQ ID NO: 6075468 - DNA, 25 bp, Homo sapien
acatcctcggcatacatagcacggg

SEQ ID NO: 6075469 - DNA, 25 bp, Homo sapien
tgcatgatccagatgctcctccgac

SEQ ID NO: 6075470 - DNA, 25 bp, Homo sapien
ttaactgtcggtgcccgactaccca

SEQ ID NO: 6075471 - DNA, 25 bp, Homo sapien
tataaagcggatcttggcatttaca

SEQ ID NO: 6075472 - DNA, 25 bp, Homo sapien
gagcagcaataatcccaacataacc

SEQ ID NO: 6075473 - DNA, 25 bp, Homo sapien
cagagtaccattttctttatgttaa

SEQ ID NO: 6075474 - DNA, 25 bp, Homo sapien
ggtaactgtgacttaccaagtgtta

SEQ ID NO: 6075475 - DNA, 25 bp, Homo sapien
actattgattgaattgatctcattg

SEQ ID NO: 6075476 - DNA, 25 bp, Homo sapien
atgctcctccgacctattgattgca

SEQ ID NO: 6075477 - DNA, 25 bp, Homo sapien
cggcatacatagcacggggtaactg

SEQ ID NO: 6075478 - DNA, 25 bp, Homo sapien
tgggttcttgatttatgctataaag

SEQ ID NO: 6075479 - DNA, 25 bp, Homo sapien
ctgatcaagtagctcatttgcatga

SEQ ID NO: 6075480 - DNA, 25 bp, Homo sapien
gcacggggtaactgtgacttaccaa

SEQ ID NO: 6075481 - DNA, 25 bp, Homo sapien
catgcttcctccaaaagacactcta

SEQ ID NO: 6075482 - DNA, 25 bp, Homo sapien
cttggcatttacatacaacaggtgc

SEQ ID NO: 6075483 - DNA, 25 bp, Homo sapien
caaaagacactctactcacttgttt

SEQ ID NO: 6075484 - DNA, 25 bp, Homo sapien
tataaccagagtaccattttcttta

SEQ ID NO: 6075485 - DNA, 25 bp, Homo sapien
attggacctcccaaagacacatcct

SEQ ID NO: 6075486 - DNA, 25 bp, Homo sapien
taaagggtcaacacaaatactaatc

SEQ ID NO: 6075487 - DNA, 25 bp, Homo sapien
tcattgcccaggtctatgagatcca

SEQ ID NO: 6075488 - DNA, 25 bp, Homo sapien
ttatgctataaagcggatcttggca

SEQ ID NO: 6075489 - DNA, 25 bp, Homo sapien
cataaccccgaaggtcttgacattg

SEQ ID NO: 6075490 - DNA, 25 bp, Homo sapien
acttaccaagtgttatgtataatcc

SEQ ID NO: 6075491 - DNA, 25 bp, Homo sapien
atccagatgctcctccgacctattg

SEQ ID NO: 6075492 - DNA, 25 bp, Homo sapien
gattgtaccgtaaagggtcaacaca

SEQ ID NO: 6075493 - DNA, 25 bp, Homo sapien
ggtgcccgactacccatgcttcctc

SEQ ID NO: 6075494 - DNA, 25 bp, Homo sapien
ggtcttgacattgactatcttagga

SEQ ID NO: 6075495 - DNA, 25 bp, Homo sapien
ttgaaataggaatgatagagcctaa

SEQ ID NO: 6075496 - DNA, 25 bp, Homo sapien
tctctttacaggcatcaacatcgac

SEQ ID NO: 6075497 - DNA, 25 bp, Homo sapien
ccggagagtgaattaactgtcggtg

SEQ ID NO: 6075498 - DNA, 25 bp, Homo sapien
gtatattataaccagagtaccattt

SEQ ID NO: 6075499 - DNA, 25 bp, Homo sapien
ttgtaaggcaaatgagccacaccaa

SEQ ID NO: 6075500 - DNA, 25 bp, Homo sapien
agcctaagctggattgtaccgtaaa

SEQ ID NO: 6075501 - DNA, 25 bp, Homo sapien
atttacatacaacaggtgcacaatt

SEQ ID NO: 6075502 - DNA, 25 bp, Homo sapien
taacccacgaatccggagagtgaat

SEQ ID NO: 6075503 - DNA, 25 bp, Homo sapien
tatcaggagcagcaataatcccaac

SEQ ID NO: 6075504 - DNA, 25 bp, Homo sapien
tgatagagcctaagctggattgtac

SEQ ID NO: 6075505 - DNA, 25 bp, Homo sapien
catcaagatacatctctttacaggc

SEQ ID NO: 6075506 - DNA, 25 bp, Homo sapien
agatccacgcttattggacctccca

SEQ ID NO: 6075507 - DNA, 25 bp, Homo sapien
acgcttattggacctcccaaagaca

SEQ ID NO: 6075508 - DNA, 25 bp, Homo sapien
caggtgcacaattagcaaatataac

SEQ ID NO: 6075509 - DNA, 25 bp, Homo sapien
tgtcctgtagtttcttatagtctgg

SEQ ID NO: 6075510 - DNA, 25 bp, Homo sapien
tatcaaggccaatttcgtttcatca

SEQ ID NO: 6075511 - DNA, 25 bp, Homo sapien
tatttccaatgcacttaacatccag

SEQ ID NO: 6075512 - DNA, 25 bp, Homo sapien
tctttaaatctataggttcatcctc

SEQ ID NO: 6075513 - DNA, 25 bp, Homo sapien
tcatatcagccacagatgtttgaga

SEQ ID NO: 6075514 - DNA, 25 bp, Homo sapien
gatgaggacccttctttctaacata

SEQ ID NO: 6075515 - DNA, 25 bp, Homo sapien
caaattaccccgattgtctcataaa

SEQ ID NO: 6075516 - DNA, 25 bp, Homo sapien
taccaaataccccaccaatgttcaa

SEQ ID NO: 6075517 - DNA, 25 bp, Homo sapien
ttcatccttgcaagttatttacaga

SEQ ID NO: 6075518 - DNA, 25 bp, Homo sapien
tctgccctattttctaaagattagg

SEQ ID NO: 6075519 - DNA, 25 bp, Homo sapien
gaagaaactaggtcatgtgtcctgt

SEQ ID NO: 6075520 - DNA, 25 bp, Homo sapien
tacagttcggtcaaatcacaattca

SEQ ID NO: 6075521 - DNA, 25 bp, Homo sapien
ggacgttccagacggctttatggga

SEQ ID NO: 6075522 - DNA, 25 bp, Homo sapien
gaatattctgcgcaagcctcacagc

SEQ ID NO: 6075523 - DNA, 25 bp, Homo sapien
gacaagtttccaaggacgttccaga

SEQ ID NO: 6075524 - DNA, 25 bp, Homo sapien
tgtttcctggcagccttacacttct

SEQ ID NO: 6075525 - DNA, 25 bp, Homo sapien
caatgaactgaaagctctctataca

SEQ ID NO: 6075526 - DNA, 25 bp, Homo sapien
caacagcatccagggctagcagctg

SEQ ID NO: 6075527 - DNA, 25 bp, Homo sapien
caggtcgagatagctgagaatattc

SEQ ID NO: 6075528 - DNA, 25 bp, Homo sapien
tatgtgatcagagtttgcacctcga

SEQ ID NO: 6075529 - DNA, 25 bp, Homo sapien
agggcctccttcaagtcaatatatg

SEQ ID NO: 6075530 - DNA, 25 bp, Homo sapien
cacatatgaagtgcaaaacagtatc

SEQ ID NO: 6075531 - DNA, 25 bp, Homo sapien
tgcaacatcaaaagcagcagatact

SEQ ID NO: 6075532 - DNA, 25 bp, Homo sapien
ttccagccggatgtagttcttatcg

SEQ ID NO: 6075533 - DNA, 25 bp, Homo sapien
aaatgatctacgtgcagagaggagc

SEQ ID NO: 6075534 - DNA, 25 bp, Homo sapien
tttaagctggtctgattcacagagc

SEQ ID NO: 6075535 - DNA, 25 bp, Homo sapien
tctgataggaaaagcccacctacga

SEQ ID NO: 6075536 - DNA, 25 bp, Homo sapien
tagctgcaactccactacagtcttg

SEQ ID NO: 6075537 - DNA, 25 bp, Homo sapien
catgatctggatcctcctaacacaa

SEQ ID NO: 6075538 - DNA, 25 bp, Homo sapien
gagcatctccctgtagccaacatga

SEQ ID NO: 6075539 - DNA, 25 bp, Homo sapien
ggtctctcctcctttactcaatgaa

SEQ ID NO: 6075540 - DNA, 25 bp, Homo sapien
cagtaggcctacatatgaaacgcaa

SEQ ID NO: 6075541 - DNA, 25 bp, Homo sapien
tgaaatggaatcaatgcccaggagc

SEQ ID NO: 6075542 - DNA, 25 bp, Homo sapien
cagctacacaaagccagtaggccta

SEQ ID NO: 6075543 - DNA, 25 bp, Homo sapien
cagagcttgtacattcatgactcaa

SEQ ID NO: 6075544 - DNA, 25 bp, Homo sapien
ttaaatagcgtatgagggtctctcc

SEQ ID NO: 6075545 - DNA, 25 bp, Homo sapien
aagcgtagagcacagggttcaggca

SEQ ID NO: 6075546 - DNA, 25 bp, Homo sapien
tacccaaatttgcagccgtcacaag

SEQ ID NO: 6075547 - DNA, 25 bp, Homo sapien
cacagctatgattacacggatggct

SEQ ID NO: 6075548 - DNA, 25 bp, Homo sapien
ccgagacagtctggtacttgggttc

SEQ ID NO: 6075549 - DNA, 25 bp, Homo sapien
gaacttctgcccaataaaagcgtag

SEQ ID NO: 6075550 - DNA, 25 bp, Homo sapien
ccggcacaggagaagcctgaggact

SEQ ID NO: 6075551 - DNA, 25 bp, Homo sapien
caattagcttttcgctctggcagga

SEQ ID NO: 6075552 - DNA, 25 bp, Homo sapien
caagcaggaccatgttatgaggaat

SEQ ID NO: 6075553 - DNA, 25 bp, Homo sapien
gaaaccaaagagtagctcaagcccc

SEQ ID NO: 6075554 - DNA, 25 bp, Homo sapien
tagaattctgagcttgcaccaaggt

SEQ ID NO: 6075555 - DNA, 25 bp, Homo sapien
gacagttttcgtatagccaattagc

SEQ ID NO: 6075556 - DNA, 25 bp, Homo sapien
cagaaacacaagcaccacagctatg

SEQ ID NO: 6075557 - DNA, 25 bp, Homo sapien
gccttgcggaaaaggatgaagaccc

SEQ ID NO: 6075558 - DNA, 25 bp, Homo sapien
cgctggaagacagccttgcggaaaa

SEQ ID NO: 6075559 - DNA, 25 bp, Homo sapien
acggcgctgccgctggactgctgtg

SEQ ID NO: 6075560 - DNA, 25 bp, Homo sapien
cagacccagagcttgagtcgctgga

SEQ ID NO: 6075561 - DNA, 25 bp, Homo sapien
gacagccttgcggaaaaggatgaag

SEQ ID NO: 6075562 - DNA, 25 bp, Homo sapien
ttgcggaaaaggatgaagacccagg

SEQ ID NO: 6075563 - DNA, 25 bp, Homo sapien
tgctttggacgacgttcccacggcg

SEQ ID NO: 6075564 - DNA, 25 bp, Homo sapien
gggtgtctgcgagtctccgtgggca

SEQ ID NO: 6075565 - DNA, 25 bp, Homo sapien
cccaagccgacaaaggcacgcagct

SEQ ID NO: 6075566 - DNA, 25 bp, Homo sapien
cagagcttgagtcgctggaagacag

SEQ ID NO: 6075567 - DNA, 25 bp, Homo sapien
tgagtcgctggaagacagccttgcg

SEQ ID NO: 6075568 - DNA, 25 bp, Homo sapien
ggttgaaggcgtagaagcggaaggc

SEQ ID NO: 6075569 - DNA, 25 bp, Homo sapien
gataaggacaatcatcttcacgttc

SEQ ID NO: 6075570 - DNA, 25 bp, Homo sapien
gagccaccttctgcgatgtcgtctt

SEQ ID NO: 6075571 - DNA, 25 bp, Homo sapien
ccacctcactttgcaggttccgcac

SEQ ID NO: 6075572 - DNA, 25 bp, Homo sapien
gccaccttctgcgatgtcgtcttga

SEQ ID NO: 6075573 - DNA, 25 bp, Homo sapien
gcgatgtcgtcttgaagtgctcaga

SEQ ID NO: 6075574 - DNA, 25 bp, Homo sapien
caccttctgcgatgtcgtcttgaag

SEQ ID NO: 6075575 - DNA, 25 bp, Homo sapien
cctctgtcttgttgcggagatgttc

SEQ ID NO: 6075576 - DNA, 25 bp, Homo sapien
tctgcgatgtcgtcttgaagtgctc

SEQ ID NO: 6075577 - DNA, 25 bp, Homo sapien
taagagaaggcaccagtggcaaaga

SEQ ID NO: 6075578 - DNA, 25 bp, Homo sapien
tcttgttgcggagatgttccaagtt

SEQ ID NO: 6075579 - DNA, 25 bp, Homo sapien
cgagccaccttctgcgatgtcgtct

SEQ ID NO: 6075580 - DNA, 25 bp, Homo sapien
tgtcttgttgcggagatgttccaag

SEQ ID NO: 6075581 - DNA, 25 bp, Homo sapien
actgaggctccacgcgaagggaaga

SEQ ID NO: 6075582 - DNA, 25 bp, Homo sapien
tcaagaagacagctagggtagaagg

SEQ ID NO: 6075583 - DNA, 25 bp, Homo sapien
ctgacatgcacgcattggctagggc

SEQ ID NO: 6075584 - DNA, 25 bp, Homo sapien
ggctgtgcactgacggtaccggcat

SEQ ID NO: 6075585 - DNA, 25 bp, Homo sapien
ggaagatgcaaagtccagtccctcc

SEQ ID NO: 6075586 - DNA, 25 bp, Homo sapien
ctcacactgaggctccacgcgaagg

SEQ ID NO: 6075587 - DNA, 25 bp, Homo sapien
ccaggagctagtgatggaagtcttg

SEQ ID NO: 6075588 - DNA, 25 bp, Homo sapien
gacatgcacgcattggctagggcct

SEQ ID NO: 6075589 - DNA, 25 bp, Homo sapien
tgtgcactgacggtaccggcatttt

SEQ ID NO: 6075590 - DNA, 25 bp, Homo sapien
acgcattggctagggcctctcacac

SEQ ID NO: 6075591 - DNA, 25 bp, Homo sapien
ctccaggagctagtgatggaagtct

SEQ ID NO: 6075592 - DNA, 25 bp, Homo sapien
tgacggtaccggcattttcatcccc

SEQ ID NO: 6075593 - DNA, 25 bp, Homo sapien
gaactctgttactactgaatttgca

SEQ ID NO: 6075594 - DNA, 25 bp, Homo sapien
aggtgcccgtaatcccagctgcttg

SEQ ID NO: 6075595 - DNA, 25 bp, Homo sapien
tgtttaaaaaatgtgactggctggg

SEQ ID NO: 6075596 - DNA, 25 bp, Homo sapien
ggcaggcagatcacaaggtccagag

SEQ ID NO: 6075597 - DNA, 25 bp, Homo sapien
actggctgggtgttgtggctcattt

SEQ ID NO: 6075598 - DNA, 25 bp, Homo sapien
cacaaggtccagagatcaagatcaa

SEQ ID NO: 6075599 - DNA, 25 bp, Homo sapien
gaatttgcaggtttgacatgtttat

SEQ ID NO: 6075600 - DNA, 25 bp, Homo sapien
gggtaacagagtgagattccatttc

SEQ ID NO: 6075601 - DNA, 25 bp, Homo sapien
catttggaaggattgcatgaagcca

SEQ ID NO: 6075602 - DNA, 25 bp, Homo sapien
ttatctaaattagccggctgggtga

SEQ ID NO: 6075603 - DNA, 25 bp, Homo sapien
ttgcatgaagccagaagtttgagac

SEQ ID NO: 6075604 - DNA, 25 bp, Homo sapien
tgacaaatatggtgaaaccccgcct

SEQ ID NO: 6075605 - DNA, 25 bp, Homo sapien
tatgaattggagtctgttcatcttc

SEQ ID NO: 6075606 - DNA, 25 bp, Homo sapien
gagtctgttcatcttcaataggctc

SEQ ID NO: 6075607 - DNA, 25 bp, Homo sapien
ttcaataggctcttcatctgatgag

SEQ ID NO: 6075608 - DNA, 25 bp, Homo sapien
tatatgaattggagtctgttcatct

SEQ ID NO: 6075609 - DNA, 25 bp, Homo sapien
cttcatctgatgagtcaaactcact

SEQ ID NO: 6075610 - DNA, 25 bp, Homo sapien
catgatatatgaattggagtctgtt

SEQ ID NO: 6075611 - DNA, 25 bp, Homo sapien
ttggagtctgttcatcttcaatagg

SEQ ID NO: 6075612 - DNA, 25 bp, Homo sapien
tggagtctgttcatcttcaataggc

SEQ ID NO: 6075613 - DNA, 25 bp, Homo sapien
ggagtctgttcatcttcaataggct

SEQ ID NO: 6075614 - DNA, 25 bp, Homo sapien
agtctgttcatcttcaataggctct

SEQ ID NO: 6075615 - DNA, 25 bp, Homo sapien
tgaattggagtctgttcatcttcaa

SEQ ID NO: 6075616 - DNA, 25 bp, Homo sapien
cttcaataggctcttcatctgatga

SEQ ID NO: 6075617 - DNA, 25 bp, Homo sapien
cttcatctgatgagtcaaactcact

SEQ ID NO: 6075618 - DNA, 25 bp, Homo sapien
agagcacataaaccgagaaactgag

SEQ ID NO: 6075619 - DNA, 25 bp, Homo sapien
atatatgaattggagtctgttcatc

SEQ ID NO: 6075620 - DNA, 25 bp, Homo sapien
gagtctgttcatcttcaataggctc

SEQ ID NO: 6075621 - DNA, 25 bp, Homo sapien
cttcaataggctcttcatctgatga

SEQ ID NO: 6075622 - DNA, 25 bp, Homo sapien
ctcacttgtttgtattgaactgggc

SEQ ID NO: 6075623 - DNA, 25 bp, Homo sapien
taggctcttcatctgatgagtcaaa

SEQ ID NO: 6075624 - DNA, 25 bp, Homo sapien
aacaattcactcgtgacaaagatag

SEQ ID NO: 6075625 - DNA, 25 bp, Homo sapien
ctggaagagcacataaaccgagaaa

SEQ ID NO: 6075626 - DNA, 25 bp, Homo sapien
gttcatcttcaataggctcttcatc

SEQ ID NO: 6075627 - DNA, 25 bp, Homo sapien
gtgacaaagatagccatgatatatg

SEQ ID NO: 6075628 - DNA, 25 bp, Homo sapien
tcactcgtgacaaagatagccatga

SEQ ID NO: 6075629 - DNA, 25 bp, Homo sapien
aagatagccatgatatatgaattgg

SEQ ID NO: 6075630 - DNA, 25 bp, Homo sapien
cgagaaactgagaacaattcactcg

SEQ ID NO: 6075631 - DNA, 25 bp, Homo sapien
actgagaacaattcactcgtgacaa

SEQ ID NO: 6075632 - DNA, 25 bp, Homo sapien
gaattggagtctgttcatcttcaat

SEQ ID NO: 6075633 - DNA, 25 bp, Homo sapien
gccatgatatatgaattggagtctg

SEQ ID NO: 6075634 - DNA, 25 bp, Homo sapien
ctgatgagtcaaactcacttgtttg

SEQ ID NO: 6075635 - DNA, 25 bp, Homo sapien
ataaaccgagaaactgagaacaatt

SEQ ID NO: 6075636 - DNA, 25 bp, Homo sapien
gtcaaactcacttgtttgtattgaa

SEQ ID NO: 6075637 - DNA, 25 bp, Homo sapien
tgtttgtattgaactgggcggcttc

SEQ ID NO: 6075638 - DNA, 25 bp, Homo sapien
aattcctttatcttgatacagatct

SEQ ID NO: 6075639 - DNA, 25 bp, Homo sapien
ctcacttgtttgtattgaactgggc

SEQ ID NO: 6075640 - DNA, 25 bp, Homo sapien
cagctaatttgtcccgaaactcact

SEQ ID NO: 6075641 - DNA, 25 bp, Homo sapien
atttgtcccgaaactcacttgtttg

SEQ ID NO: 6075642 - DNA, 25 bp, Homo sapien
atgatagatgtgcagctaatttgtc

SEQ ID NO: 6075643 - DNA, 25 bp, Homo sapien
tttatcttgatacagatcttgattg

SEQ ID NO: 6075644 - DNA, 25 bp, Homo sapien
ttgattgtgaatctcttgatgatag

SEQ ID NO: 6075645 - DNA, 25 bp, Homo sapien
ccgaaactcacttgtttgtattgaa

SEQ ID NO: 6075646 - DNA, 25 bp, Homo sapien
tgtttgtattgaactgggcggcttc

SEQ ID NO: 6075647 - DNA, 25 bp, Homo sapien
gtgaatctcttgatgatagatgtgc

SEQ ID NO: 6075648 - DNA, 25 bp, Homo sapien
ttgatacagatcttgattgtgaatc

SEQ ID NO: 6075649 - DNA, 25 bp, Homo sapien
cagatcttgattgtgaatctcttga

SEQ ID NO: 6075650 - DNA, 25 bp, Homo sapien
ctcttgatgatagatgtgcagctaa

SEQ ID NO: 6075651 - DNA, 25 bp, Homo sapien
gatgtgcagctaatttgtcccgaaa

SEQ ID NO: 6075652 - DNA, 25 bp, Homo sapien
tgtgtcttcaggcttgggaaatttt

SEQ ID NO: 6075653 - DNA, 25 bp, Homo sapien
agaattgcaatgatcatgaagagcc

SEQ ID NO: 6075654 - DNA, 25 bp, Homo sapien
tgtccttgtacatagttattccagc

SEQ ID NO: 6075655 - DNA, 25 bp, Homo sapien
ttcctgcaatgtccttgtacatagt

SEQ ID NO: 6075656 - DNA, 25 bp, Homo sapien
tcccattttcacatagtgcctcagg

SEQ ID NO: 6075657 - DNA, 25 bp, Homo sapien
tgtacatagttattccagcacttct

SEQ ID NO: 6075658 - DNA, 25 bp, Homo sapien
cattttcacatagtgcctcaggcac

SEQ ID NO: 6075659 - DNA, 25 bp, Homo sapien
agtcagtgcaagtgttgctggcttt

SEQ ID NO: 6075660 - DNA, 25 bp, Homo sapien
aattgcaatgatcatgaagagcccc

SEQ ID NO: 6075661 - DNA, 25 bp, Homo sapien
tagactgtgtcttcaggcttgggaa

SEQ ID NO: 6075662 - DNA, 25 bp, Homo sapien
agtatctcccattttcacatagtgc

SEQ ID NO: 6075663 - DNA, 25 bp, Homo sapien
agttattccagcacttcttaagttg

SEQ ID NO: 6075664 - DNA, 25 bp, Homo sapien
gaagtagcagtgtatgtgatctgtc

SEQ ID NO: 6075665 - DNA, 25 bp, Homo sapien
ttaaacagcgtctcaagccaataaa

SEQ ID NO: 6075666 - DNA, 25 bp, Homo sapien
tcacagcactagaattcttggcagg

SEQ ID NO: 6075667 - DNA, 25 bp, Homo sapien
caaacccattaaacagcgtctcaag

SEQ ID NO: 6075668 - DNA, 25 bp, Homo sapien
tcttggacgtcttcattaagtacat

SEQ ID NO: 6075669 - DNA, 25 bp, Homo sapien
ttttagcatttcttggacgtcttca

SEQ ID NO: 6075670 - DNA, 25 bp, Homo sapien
ctccagtgatggtgttggcagtatg

SEQ ID NO: 6075671 - DNA, 25 bp, Homo sapien
gaatgatgacaaagttggtattagc

SEQ ID NO: 6075672 - DNA, 25 bp, Homo sapien
ttcttggcaggttttagcatttctt

SEQ ID NO: 6075673 - DNA, 25 bp, Homo sapien
tcatccacattgcagtgatccctgc

SEQ ID NO: 6075674 - DNA, 25 bp, Homo sapien
tggtattagcaaaaaagctagtgct

SEQ ID NO: 6075675 - DNA, 25 bp, Homo sapien
ggtgttactcttggtagaagtagca

SEQ ID NO: 6075676 - DNA, 25 bp, Homo sapien
ggaatgggtctggtggtgaaaataa

SEQ ID NO: 6075677 - DNA, 25 bp, Homo sapien
gaatgggtctggtggtgaaaataaa

SEQ ID NO: 6075678 - DNA, 25 bp, Homo sapien
cgacggtgatgtcaaaaaagacgac

SEQ ID NO: 6075679 - DNA, 25 bp, Homo sapien
gacggtgatgtcaaaaaagacgacg

SEQ ID NO: 6075680 - DNA, 25 bp, Homo sapien
agcgtgtgtgacttgatctggtgcg

SEQ ID NO: 6075681 - DNA, 25 bp, Homo sapien
attcccacagggagcgcgcgcgaca

SEQ ID NO: 6075682 - DNA, 25 bp, Homo sapien
cggcgcccgccttagagatctgatt

SEQ ID NO: 6075683 - DNA, 25 bp, Homo sapien
ccgggccgtaggcatgatgtcaaaa

SEQ ID NO: 6075684 - DNA, 25 bp, Homo sapien
agttccggaagtcctcggccctcag

SEQ ID NO: 6075685 - DNA, 25 bp, Homo sapien
tcccgtgcagttccggaagtcctcg

SEQ ID NO: 6075686 - DNA, 25 bp, Homo sapien
cgggcggccctgtcggtggtggtga

SEQ ID NO: 6075687 - DNA, 25 bp, Homo sapien
ccttagagatctgattgcggttcct

SEQ ID NO: 6075688 - DNA, 25 bp, Homo sapien
gggtcctgcgggcacacttgccctt

SEQ ID NO: 6075689 - DNA, 25 bp, Homo sapien
actgaacttgtgctggtagtctggg

SEQ ID NO: 6075690 - DNA, 25 bp, Homo sapien
acgctggtcccgtgcagttccggaa

SEQ ID NO: 6075691 - DNA, 25 bp, Homo sapien
gggagcgcgcgcgacaaccacagtc

SEQ ID NO: 6075692 - DNA, 25 bp, Homo sapien
cagccttttggaactggttgccaaa

SEQ ID NO: 6075693 - DNA, 25 bp, Homo sapien
aggctgtgggtttgtggtaggtcac

SEQ ID NO: 6075694 - DNA, 25 bp, Homo sapien
gctgtgggtttgtggtaggtcacac

SEQ ID NO: 6075695 - DNA, 25 bp, Homo sapien
cagccttttggaactggttgccaaa

SEQ ID NO: 6075696 - DNA, 25 bp, Homo sapien
aggctgtgggtttgtggtaggtcac

SEQ ID NO: 6075697 - DNA, 25 bp, Homo sapien
ctgctacccaggctgtgggtttgtg

SEQ ID NO: 6075698 - DNA, 25 bp, Homo sapien
tgtgggtttgtggtaggtcacacat

SEQ ID NO: 6075699 - DNA, 25 bp, Homo sapien
ggctgtgggtttgtggtaggtcaca

SEQ ID NO: 6075700 - DNA, 25 bp, Homo sapien
caggctgtgggtttgtggtaggtca

SEQ ID NO: 6075701 - DNA, 25 bp, Homo sapien
agagattctcctcatctgcgccagg

SEQ ID NO: 6075702 - DNA, 25 bp, Homo sapien
tctcatggaggacagggatggtttc

SEQ ID NO: 6075703 - DNA, 25 bp, Homo sapien
tgttgacaaagaaaaagatctcatg

SEQ ID NO: 6075704 - DNA, 25 bp, Homo sapien
cctcatctgcgccaggagcatcaag

SEQ ID NO: 6075705 - DNA, 25 bp, Homo sapien
ctgtgggtttgtggtaggtcacaca

SEQ ID NO: 6075706 - DNA, 25 bp, Homo sapien
gcactcaaatcgactgcactgagtt

SEQ ID NO: 6075707 - DNA, 25 bp, Homo sapien
tagaagcatgccaagacagagcatt

SEQ ID NO: 6075708 - DNA, 25 bp, Homo sapien
agtctgccttgcccgggagtcactt

SEQ ID NO: 6075709 - DNA, 25 bp, Homo sapien
agggaaatataagatgcatgtaaac

SEQ ID NO: 6075710 - DNA, 25 bp, Homo sapien
aagagtcccgtcaaagtgataaagg

SEQ ID NO: 6075711 - DNA, 25 bp, Homo sapien
ttacagtctagaagcatgccaagac

SEQ ID NO: 6075712 - DNA, 25 bp, Homo sapien
tatttcagcactcaaatcgactgca

SEQ ID NO: 6075713 - DNA, 25 bp, Homo sapien
ccaactccactattaaaaatgctag

SEQ ID NO: 6075714 - DNA, 25 bp, Homo sapien
tggagctccagagacatccaccagt

SEQ ID NO: 6075715 - DNA, 25 bp, Homo sapien
tctgcagaccaaagagtcccgtcaa

SEQ ID NO: 6075716 - DNA, 25 bp, Homo sapien
gcagtccacatgctcacgcttcagg

SEQ ID NO: 6075717 - DNA, 25 bp, Homo sapien
tcctgcagacctctgagtacctggt

SEQ ID NO: 6075718 - DNA, 25 bp, Homo sapien
gggcaccgtagttagcctcctggca

SEQ ID NO: 6075719 - DNA, 25 bp, Homo sapien
accgtagttagcctcctggcaggca

SEQ ID NO: 6075720 - DNA, 25 bp, Homo sapien
gggcagctcctgaagtagcggccat

SEQ ID NO: 6075721 - DNA, 25 bp, Homo sapien
cagaccaccagtgccgtcaccagca

SEQ ID NO: 6075722 - DNA, 25 bp, Homo sapien
gaggagggcaccgtagttagcctcc

SEQ ID NO: 6075723 - DNA, 25 bp, Homo sapien
gcagtggtcatgaagaggtgatggg

SEQ ID NO: 6075724 - DNA, 25 bp, Homo sapien
agtcacaccacagcgtctccccgac

SEQ ID NO: 6075725 - DNA, 25 bp, Homo sapien
gagggcaccgtagttagcctcctgg

SEQ ID NO: 6075726 - DNA, 25 bp, Homo sapien
gcaccgtagttagcctcctggcagg

SEQ ID NO: 6075727 - DNA, 25 bp, Homo sapien
agagctcccggaggagggcaccgta

SEQ ID NO: 6075728 - DNA, 25 bp, Homo sapien
ccctgcctgagatggggcagctcct

SEQ ID NO: 6075729 - DNA, 25 bp, Homo sapien
agctcctgaagtagcggccatgcac

SEQ ID NO: 6075730 - DNA, 25 bp, Homo sapien
aacatgcctgtctcgttgcagccgc

SEQ ID NO: 6075731 - DNA, 25 bp, Homo sapien
aactgcctgtggatgccggtgatga

SEQ ID NO: 6075732 - DNA, 25 bp, Homo sapien
gatcagcgggatgagaacctcgtct

SEQ ID NO: 6075733 - DNA, 25 bp, Homo sapien
atcatgtctgcgaaagccttcccac

SEQ ID NO: 6075734 - DNA, 25 bp, Homo sapien
tccatctcggtgcagttggtgaaac

SEQ ID NO: 6075735 - DNA, 25 bp, Homo sapien
gcagttggtgaaactctcatagtac

SEQ ID NO: 6075736 - DNA, 25 bp, Homo sapien
tggaccctgtccacggtgcagttgg

SEQ ID NO: 6075737 - DNA, 25 bp, Homo sapien
aggttgcaccacttccagacgtcca

SEQ ID NO: 6075738 - DNA, 25 bp, Homo sapien
catggcgacagtcagaacgacgggt

SEQ ID NO: 6075739 - DNA, 25 bp, Homo sapien
accttgcccatcatgtctgcgaaag

SEQ ID NO: 6075740 - DNA, 25 bp, Homo sapien
gggccagtagcagcccacgacattg

SEQ ID NO: 6075741 - DNA, 25 bp, Homo sapien
aacgacgggtataacgatcagcggg

SEQ ID NO: 6075742 - DNA, 25 bp, Homo sapien
tgtggcggtgggacctacgccgtct

SEQ ID NO: 6075743 - DNA, 25 bp, Homo sapien
gcggtgggacctacgccgtctgtgg

SEQ ID NO: 6075744 - DNA, 25 bp, Homo sapien
cggtgggacctacgccgtctgtggt

SEQ ID NO: 6075745 - DNA, 25 bp, Homo sapien
tggcggtgggacctacgccgtctgt

SEQ ID NO: 6075746 - DNA, 25 bp, Homo sapien
ggcggtgggacctacgccgtctgtg

SEQ ID NO: 6075747 - DNA, 25 bp, Homo sapien
ctgtggcggtgggacctacgccgtc

SEQ ID NO: 6075748 - DNA, 25 bp, Homo sapien
gtggcggtgggacctacgccgtctg

SEQ ID NO: 6075749 - DNA, 25 bp, Homo sapien
catttaggggcggggcacttgggag

SEQ ID NO: 6075750 - DNA, 25 bp, Homo sapien
tacataggtgaaaggaaccagaatt

SEQ ID NO: 6075751 - DNA, 25 bp, Homo sapien
atcaagcaggctggtagcaagttgg

SEQ ID NO: 6075752 - DNA, 25 bp, Homo sapien
ctgagggatgcggttacataggtga

SEQ ID NO: 6075753 - DNA, 25 bp, Homo sapien
aagtaggtgtgtgctttggagttcc

SEQ ID NO: 6075754 - DNA, 25 bp, Homo sapien
aatgcagattcatctcatctatgtg

SEQ ID NO: 6075755 - DNA, 25 bp, Homo sapien
gagtccagggagattgttagtggaa

SEQ ID NO: 6075756 - DNA, 25 bp, Homo sapien
aacaggaaaatcaagcaggctggta

SEQ ID NO: 6075757 - DNA, 25 bp, Homo sapien
tgtgtgaatgcatgcacatacagta

SEQ ID NO: 6075758 - DNA, 25 bp, Homo sapien
gcacatacagtatggaggaggagtc

SEQ ID NO: 6075759 - DNA, 25 bp, Homo sapien
gttacataggtgaaaggaaccagaa

SEQ ID NO: 6075760 - DNA, 25 bp, Homo sapien
agtggggaacgaggaacacaagaat

SEQ ID NO: 6075761 - DNA, 25 bp, Homo sapien
gaaaatcaagcaggctggtagcaag

SEQ ID NO: 6075762 - DNA, 25 bp, Homo sapien
ccagagctctggagtctgtgacggt

SEQ ID NO: 6075763 - DNA, 25 bp, Homo sapien
agccagagctctggagtctgtgacg

SEQ ID NO: 6075764 - DNA, 25 bp, Homo sapien
cactttggggggcacttaggagtgg

SEQ ID NO: 6075765 - DNA, 25 bp, Homo sapien
gtcccctccacagcagctggagcct

SEQ ID NO: 6075766 - DNA, 25 bp, Homo sapien
ctgtgacggtgggacctgtggcgcc

SEQ ID NO: 6075767 - DNA, 25 bp, Homo sapien
ctccacagcagctggagcctcccga

SEQ ID NO: 6075768 - DNA, 25 bp, Homo sapien
cagcagccagagctctggagtctgt

SEQ ID NO: 6075769 - DNA, 25 bp, Homo sapien
gcacttaggagtggggcacttggga

SEQ ID NO: 6075770 - DNA, 25 bp, Homo sapien
gcagccagagctctggagtctgtga

SEQ ID NO: 6075771 - DNA, 25 bp, Homo sapien
cagccagagctctggagtctgtgac

SEQ ID NO: 6075772 - DNA, 25 bp, Homo sapien
tccacagcagctggagcctcccgag

SEQ ID NO: 6075773 - DNA, 25 bp, Homo sapien
tgacggtgggacctgtggcgcctgt

SEQ ID NO: 6075774 - DNA, 25 bp, Homo sapien
aagcagccgccctcggagctagggc

SEQ ID NO: 6075775 - DNA, 25 bp, Homo sapien
ccggcatcggtggtggcgcctgtgg

SEQ ID NO: 6075776 - DNA, 25 bp, Homo sapien
agccgccctcggagctagggccaca

SEQ ID NO: 6075777 - DNA, 25 bp, Homo sapien
gccggcatcggtggtggcgcctgtg

SEQ ID NO: 6075778 - DNA, 25 bp, Homo sapien
cgccggcatcggtggtggcgcctgt

SEQ ID NO: 6075779 - DNA, 25 bp, Homo sapien
gccgccctcggagctagggccacag

SEQ ID NO: 6075780 - DNA, 25 bp, Homo sapien
aggtcggcgtcggagggactggcgg

SEQ ID NO: 6075781 - DNA, 25 bp, Homo sapien
gaactctgaggtcggcgtcggaggg

SEQ ID NO: 6075782 - DNA, 25 bp, Homo sapien
tggaactctgaggtcggcgtcggag

SEQ ID NO: 6075783 - DNA, 25 bp, Homo sapien
ctggaactctgaggtcggcgtcgga

SEQ ID NO: 6075784 - DNA, 25 bp, Homo sapien
tgaggtcggcgtcggagggactggc

SEQ ID NO: 6075785 - DNA, 25 bp, Homo sapien
ggaactctgaggtcggcgtcggagg

SEQ ID NO: 6075786 - DNA, 25 bp, Homo sapien
gcatttaggggtacatttgggagga

SEQ ID NO: 6075787 - DNA, 25 bp, Homo sapien
catttaggggtacatttgggaggag

SEQ ID NO: 6075788 - DNA, 25 bp, Homo sapien
gctggaactctgaggtcggcgtcgg

SEQ ID NO: 6075789 - DNA, 25 bp, Homo sapien
agctggaactctgaggtcggcgtcg

SEQ ID NO: 6075790 - DNA, 25 bp, Homo sapien
ctgaggtcggcgtcggagggactgg

SEQ ID NO: 6075791 - DNA, 25 bp, Homo sapien
tctgaggtcggcgtcggagggactg

SEQ ID NO: 6075792 - DNA, 25 bp, Homo sapien
tctggcgccggcattgatgggacct

SEQ ID NO: 6075793 - DNA, 25 bp, Homo sapien
cccggagcttagagcacagtcagaa

SEQ ID NO: 6075794 - DNA, 25 bp, Homo sapien
cggagcttagagcacagtcagaaga

SEQ ID NO: 6075795 - DNA, 25 bp, Homo sapien
cttagagcacagtcagaagagggtg

SEQ ID NO: 6075796 - DNA, 25 bp, Homo sapien
gcttagagcacagtcagaagagggt

SEQ ID NO: 6075797 - DNA, 25 bp, Homo sapien
ggagcttagagcacagtcagaagag

SEQ ID NO: 6075798 - DNA, 25 bp, Homo sapien
gagcttagagcacagtcagaagagg

SEQ ID NO: 6075799 - DNA, 25 bp, Homo sapien
cgccggcattgatgggacctgaagt

SEQ ID NO: 6075800 - DNA, 25 bp, Homo sapien
cggcattgatgggacctgaagtgcc

SEQ ID NO: 6075801 - DNA, 25 bp, Homo sapien
ccccggagcttagagcacagtcaga

SEQ ID NO: 6075802 - DNA, 25 bp, Homo sapien
agcccccggagcttagagcacagtc

SEQ ID NO: 6075803 - DNA, 25 bp, Homo sapien
ctctggcgccggcattgatgggacc

SEQ ID NO: 6075804 - DNA, 25 bp, Homo sapien
tgagacctgcggcatctgtggtgac

SEQ ID NO: 6075805 - DNA, 25 bp, Homo sapien
ttggagctctggcaacggcaacggt

SEQ ID NO: 6075806 - DNA, 25 bp, Homo sapien
aacggtgagacctgcggcatctgtg

SEQ ID NO: 6075807 - DNA, 25 bp, Homo sapien
gacctgcggcatctgtggtgactca

SEQ ID NO: 6075808 - DNA, 25 bp, Homo sapien
acggcaacggtgagacctgcggcat

SEQ ID NO: 6075809 - DNA, 25 bp, Homo sapien
caacggtgagacctgcggcatctgt

SEQ ID NO: 6075810 - DNA, 25 bp, Homo sapien
tggcaacggcaacggtgagacctgc

SEQ ID NO: 6075811 - DNA, 25 bp, Homo sapien
ggcaacggtgagacctgcggcatct

SEQ ID NO: 6075812 - DNA, 25 bp, Homo sapien
ctctggcaacggcaacggtgagacc

SEQ ID NO: 6075813 - DNA, 25 bp, Homo sapien
tgggctctttgcagggcacttgggc

SEQ ID NO: 6075814 - DNA, 25 bp, Homo sapien
caacggcaacggtgagacctgcggc

SEQ ID NO: 6075815 - DNA, 25 bp, Homo sapien
agacctgcggcatctgtggtgactc

SEQ ID NO: 6075816 - DNA, 25 bp, Homo sapien
gcactgtggtgggcatttgggggga

SEQ ID NO: 6075817 - DNA, 25 bp, Homo sapien
ctggtgccggcgccggtggaagaga

SEQ ID NO: 6075818 - DNA, 25 bp, Homo sapien
tggacattttggggtacacttggga

SEQ ID NO: 6075819 - DNA, 25 bp, Homo sapien
cactgtggtgggcatttggggggac

SEQ ID NO: 6075820 - DNA, 25 bp, Homo sapien
tggtgccggcgccggtggaagagac

SEQ ID NO: 6075821 - DNA, 25 bp, Homo sapien
gtgccggcgccggtggaagagacgg

SEQ ID NO: 6075822 - DNA, 25 bp, Homo sapien
ggccccagaaggttcactctcacag

SEQ ID NO: 6075823 - DNA, 25 bp, Homo sapien
ccagaaggttcactctcacagcaat

SEQ ID NO: 6075824 - DNA, 25 bp, Homo sapien
gctgggaccacagcagctcccagag

SEQ ID NO: 6075825 - DNA, 25 bp, Homo sapien
gctgggaccacagcaggaagagact

SEQ ID NO: 6075826 - DNA, 25 bp, Homo sapien
gaggccccagaaggttcactctcac

SEQ ID NO: 6075827 - DNA, 25 bp, Homo sapien
gaaggttcactctcacagcaatcgg

SEQ ID NO: 6075828 - DNA, 25 bp, Homo sapien
ggaccacagcagctcccagagctgg

SEQ ID NO: 6075829 - DNA, 25 bp, Homo sapien
gccagaggccccagaaggttcactc

SEQ ID NO: 6075830 - DNA, 25 bp, Homo sapien
gggaacatggagctgggcactgtgg

SEQ ID NO: 6075831 - DNA, 25 bp, Homo sapien
tacacttgggaggacatttgggagg

SEQ ID NO: 6075832 - DNA, 25 bp, Homo sapien
aaggttcactctcacagcaatcggg

SEQ ID NO: 6075833 - DNA, 25 bp, Homo sapien
gcactgtggtgggcatttgggggga

SEQ ID NO: 6075834 - DNA, 25 bp, Homo sapien
tggacattttggggtacacttggga

SEQ ID NO: 6075835 - DNA, 25 bp, Homo sapien
ctggtgccggcgccggtggaagaga

SEQ ID NO: 6075836 - DNA, 25 bp, Homo sapien
tggtgccggcgccggtggaagagac

SEQ ID NO: 6075837 - DNA, 25 bp, Homo sapien
cactgtggtgggcatttggggggac

SEQ ID NO: 6075838 - DNA, 25 bp, Homo sapien
aaacatggagctgggcactgtggtg

SEQ ID NO: 6075839 - DNA, 25 bp, Homo sapien
tgggaccacagcagctcccagagct

SEQ ID NO: 6075840 - DNA, 25 bp, Homo sapien
tcccagagctgggaccacagcaaga

SEQ ID NO: 6075841 - DNA, 25 bp, Homo sapien
tgggaccacagcaagaagagactgc

SEQ ID NO: 6075842 - DNA, 25 bp, Homo sapien
agagactgcagggaaacatggagct

SEQ ID NO: 6075843 - DNA, 25 bp, Homo sapien
agaaggttcactctcacagcagtcg

SEQ ID NO: 6075844 - DNA, 25 bp, Homo sapien
aaggttcactctcacagcagtcggg

SEQ ID NO: 6075845 - DNA, 25 bp, Homo sapien
agagcccccagaaggttcactctca

SEQ ID NO: 6075846 - DNA, 25 bp, Homo sapien
caagaagagactgcagggaaacatg

SEQ ID NO: 6075847 - DNA, 25 bp, Homo sapien
cacagcaagaagagactgcagggaa

SEQ ID NO: 6075848 - DNA, 25 bp, Homo sapien
gtgccggcgccggtggaagagacgg

SEQ ID NO: 6075849 - DNA, 25 bp, Homo sapien
cccagaaggttcactctcacagcag

SEQ ID NO: 6075850 - DNA, 25 bp, Homo sapien
caattcctggccgagagaaagagga

SEQ ID NO: 6075851 - DNA, 25 bp, Homo sapien
tcttgagcatgtcgcagtagaagaa

SEQ ID NO: 6075852 - DNA, 25 bp, Homo sapien
gggatcgataacctccagccatggc

SEQ ID NO: 6075853 - DNA, 25 bp, Homo sapien
acagtacggagagctttgaagtcgc

SEQ ID NO: 6075854 - DNA, 25 bp, Homo sapien
gggtccaggatagagcaaagctccc

SEQ ID NO: 6075855 - DNA, 25 bp, Homo sapien
gaggtaagacactaaccacagcccg

SEQ ID NO: 6075856 - DNA, 25 bp, Homo sapien
aagaagccaacgcaggagagggtca

SEQ ID NO: 6075857 - DNA, 25 bp, Homo sapien
tctgccaataggcatagatgagtgg

SEQ ID NO: 6075858 - DNA, 25 bp, Homo sapien
caatgagaacagacacagtacggag

SEQ ID NO: 6075859 - DNA, 25 bp, Homo sapien
tgttccatctttcgaatctgctggc

SEQ ID NO: 6075860 - DNA, 25 bp, Homo sapien
cacgaagtgagggtgaaatacagca

SEQ ID NO: 6075861 - DNA, 25 bp, Homo sapien
ggtaccgttccagcactaggtagag

SEQ ID NO: 6075862 - DNA, 25 bp, Homo sapien
agcgtgtgtgacttgatctggtgcg

SEQ ID NO: 6075863 - DNA, 25 bp, Homo sapien
attcccacagggagcgcgcgcgaca

SEQ ID NO: 6075864 - DNA, 25 bp, Homo sapien
cggcgcccgccttagagatctgatt

SEQ ID NO: 6075865 - DNA, 25 bp, Homo sapien
ccgggccgtaggcatgatgtcaaaa

SEQ ID NO: 6075866 - DNA, 25 bp, Homo sapien
tcccgtgcagttccggaagtcctcg

SEQ ID NO: 6075867 - DNA, 25 bp, Homo sapien
agttccggaagtcctcggccctcag

SEQ ID NO: 6075868 - DNA, 25 bp, Homo sapien
actgaacttgtgctggtagtctggg

SEQ ID NO: 6075869 - DNA, 25 bp, Homo sapien
gggtcctgcgggcacacttgccctt

SEQ ID NO: 6075870 - DNA, 25 bp, Homo sapien
acgctggtcccgtgcagttccggaa

SEQ ID NO: 6075871 - DNA, 25 bp, Homo sapien
gggagcgcgcgcgacaaccacagtc

SEQ ID NO: 6075872 - DNA, 25 bp, Homo sapien
ccttagagatctgattgcggttcct

SEQ ID NO: 6075873 - DNA, 25 bp, Homo sapien
cgggcggccctgtcggtggtggtga

SEQ ID NO: 6075874 - DNA, 25 bp, Homo sapien
tgcatctcgttgttccgcagcacct

SEQ ID NO: 6075875 - DNA, 25 bp, Homo sapien
atcgctgtactccttcatggtccgg

SEQ ID NO: 6075876 - DNA, 25 bp, Homo sapien
tcatggtccggaacaccagcatggg

SEQ ID NO: 6075877 - DNA, 25 bp, Homo sapien
agcacaaccaggactagcaccgtgg

SEQ ID NO: 6075878 - DNA, 25 bp, Homo sapien
atgccgaggcgatgcagcgtatcca

SEQ ID NO: 6075879 - DNA, 25 bp, Homo sapien
cgcagtgtgcccatggagttctcca

SEQ ID NO: 6075880 - DNA, 25 bp, Homo sapien
gaatctggcgttccacggagatgga

SEQ ID NO: 6075881 - DNA, 25 bp, Homo sapien
catgaaggaggcgatctgtgtgatt

SEQ ID NO: 6075882 - DNA, 25 bp, Homo sapien
acaagcggtgacgttgtggccctca

SEQ ID NO: 6075883 - DNA, 25 bp, Homo sapien
tacatcgatgatgcgctcgtcctgg

SEQ ID NO: 6075884 - DNA, 25 bp, Homo sapien
cacgatcacgtacaccagtgggttg

SEQ ID NO: 6075885 - DNA, 25 bp, Homo sapien
agacttctttcggaagcgcttgccc

SEQ ID NO: 6075886 - DNA, 25 bp, Homo sapien
ggcacgctgcccttctcgtaatgct

SEQ ID NO: 6075887 - DNA, 25 bp, Homo sapien
gcagagggtgacctgatgtgcatca

SEQ ID NO: 6075888 - DNA, 25 bp, Homo sapien
acacagttggtgctaaggaggcaga

SEQ ID NO: 6075889 - DNA, 25 bp, Homo sapien
gctgcaccggctgcatgagcaaggt

SEQ ID NO: 6075890 - DNA, 25 bp, Homo sapien
tgaacacgatgaagatgtggatgat

SEQ ID NO: 6075891 - DNA, 25 bp, Homo sapien
gcagcgagtgacgttgcctgagcca

SEQ ID NO: 6075892 - DNA, 25 bp, Homo sapien
aatggccacccagatgaccaaggac

SEQ ID NO: 6075893 - DNA, 25 bp, Homo sapien
tgtgcatcattaatggcctggtgga

SEQ ID NO: 6075894 - DNA, 25 bp, Homo sapien
catgagcaaggtacggatgatgacc

SEQ ID NO: 6075895 - DNA, 25 bp, Homo sapien
agatgatgaacaccgccaagaccgt

SEQ ID NO: 6075896 - DNA, 25 bp, Homo sapien
tcagtgaccgtatccgtggtggccc

SEQ ID NO: 6075897 - DNA, 25 bp, Homo sapien
tcgtaatgctcaaagcagcgagtga

SEQ ID NO: 6075898 - DNA, 25 bp, Homo sapien
caagaggcgaagcagttggcgcagc

SEQ ID NO: 6075899 - DNA, 25 bp, Homo sapien
acaccaccatgataccgacaagctg

SEQ ID NO: 6075900 - DNA, 25 bp, Homo sapien
accatgataccgacaagctggccca

SEQ ID NO: 6075901 - DNA, 25 bp, Homo sapien
cagtaggatgtacacccaagggtcc

SEQ ID NO: 6075902 - DNA, 25 bp, Homo sapien
agcagatgcacgacaccaccatgat

SEQ ID NO: 6075903 - DNA, 25 bp, Homo sapien
cacggcctggcgcagtaggatgtac

SEQ ID NO: 6075904 - DNA, 25 bp, Homo sapien
tctccacgtcgtgggcgcgagctct

SEQ ID NO: 6075905 - DNA, 25 bp, Homo sapien
caggcgctcggtgttaggcccagcc

SEQ ID NO: 6075906 - DNA, 25 bp, Homo sapien
tccgagagccgccaaagaaggtgga

SEQ ID NO: 6075907 - DNA, 25 bp, Homo sapien
ggccgctgagcgtgttgcacaccag

SEQ ID NO: 6075908 - DNA, 25 bp, Homo sapien
aggccgaagcgatggacgaggcgga

SEQ ID NO: 6075909 - DNA, 25 bp, Homo sapien
ccgaggctggcgaagaggccagcaa

SEQ ID NO: 6075910 - DNA, 25 bp, Homo sapien
cagcacagcacataggccgtgagaa

SEQ ID NO: 6075911 - DNA, 25 bp, Homo sapien
gaagaagtcacgaacgatggtgaaa

SEQ ID NO: 6075912 - DNA, 25 bp, Homo sapien
cacgaacgatggtgaaaccgtagaa

SEQ ID NO: 6075913 - DNA, 25 bp, Homo sapien
gcttgcgaatctgctccgtctggaa

SEQ ID NO: 6075914 - DNA, 25 bp, Homo sapien
tggtgttgttcttgaccgtcacgaa

SEQ ID NO: 6075915 - DNA, 25 bp, Homo sapien
taagccgatgggatggcaatgagaa

SEQ ID NO: 6075916 - DNA, 25 bp, Homo sapien
tcttgaccgtcacgaagcacacggt

SEQ ID NO: 6075917 - DNA, 25 bp, Homo sapien
tgttgcaaagtaagccgatgggatg

SEQ ID NO: 6075918 - DNA, 25 bp, Homo sapien
cacgaactcgacaccaaagatgaag

SEQ ID NO: 6075919 - DNA, 25 bp, Homo sapien
cgtctggaacccagggactgccttg

SEQ ID NO: 6075920 - DNA, 25 bp, Homo sapien
ggcaccccgttggttctgaggtcaa

SEQ ID NO: 6075921 - DNA, 25 bp, Homo sapien
cacataggccgtgagaatgcacatg

SEQ ID NO: 6075922 - DNA, 25 bp, Homo sapien
ggtccacgctcatcacggctaggaa

SEQ ID NO: 6075923 - DNA, 25 bp, Homo sapien
aggcacacggccagcacgacgagga

SEQ ID NO: 6075924 - DNA, 25 bp, Homo sapien
gtgtagacacggctggccttgaacc

SEQ ID NO: 6075925 - DNA, 25 bp, Homo sapien
tagacgccagcgaaagagaagaagg

SEQ ID NO: 6075926 - DNA, 25 bp, Homo sapien
aggctggtgatgacgtaggacatac

SEQ ID NO: 6075927 - DNA, 25 bp, Homo sapien
ttgggacctgcagctcgttgctgta

SEQ ID NO: 6075928 - DNA, 25 bp, Homo sapien
tgacgtaggacatactgatgaccag

SEQ ID NO: 6075929 - DNA, 25 bp, Homo sapien
gctcgttgctgtagacgccagcgaa

SEQ ID NO: 6075930 - DNA, 25 bp, Homo sapien
ccggaagttgtcatctagaaaggcg

SEQ ID NO: 6075931 - DNA, 25 bp, Homo sapien
gccttggctccagagcggagccgca

SEQ ID NO: 6075932 - DNA, 25 bp, Homo sapien
cgctcatcacggctaggaagtagat

SEQ ID NO: 6075933 - DNA, 25 bp, Homo sapien
ggcagaaccaggaccgtgacgccca

SEQ ID NO: 6075934 - DNA, 25 bp, Homo sapien
aagttctctgggtaacataacatgc

SEQ ID NO: 6075935 - DNA, 25 bp, Homo sapien
gttcgtcgaagtacttgtccgagta

SEQ ID NO: 6075936 - DNA, 25 bp, Homo sapien
atcagatgagttttaggtacttgtt

SEQ ID NO: 6075937 - DNA, 25 bp, Homo sapien
gactctgttggacaccaagtctcct

SEQ ID NO: 6075938 - DNA, 25 bp, Homo sapien
ccgagtagtagatctgcttgtgggc

SEQ ID NO: 6075939 - DNA, 25 bp, Homo sapien
aaagttctctgggtaacataacatg

SEQ ID NO: 6075940 - DNA, 25 bp, Homo sapien
gatgagttttaggtacttgtttgga

SEQ ID NO: 6075941 - DNA, 25 bp, Homo sapien
cgaagtacttgtccgagtagtagat

SEQ ID NO: 6075942 - DNA, 25 bp, Homo sapien
tgtccgagtagtagatctgcttgtg

SEQ ID NO: 6075943 - DNA, 25 bp, Homo sapien
tacttgtccgagtagtagatctgct

SEQ ID NO: 6075944 - DNA, 25 bp, Homo sapien
ggtactcgtagtgttcgtcgaagta

SEQ ID NO: 6075945 - DNA, 25 bp, Homo sapien
cgtcgaagtacttgtccgagtagta

SEQ ID NO: 6075946 - DNA, 25 bp, Homo sapien
gctatcctgtccaatgactttgagt

SEQ ID NO: 6075947 - DNA, 25 bp, Homo sapien
gaacaccctgtctttgacagtatga

SEQ ID NO: 6075948 - DNA, 25 bp, Homo sapien
tgagtgaattcattggaacaccctg

SEQ ID NO: 6075949 - DNA, 25 bp, Homo sapien
aacctgagtgaattcattggaacac

SEQ ID NO: 6075950 - DNA, 25 bp, Homo sapien
aaacctgagtgaattcattggaaca

SEQ ID NO: 6075951 - DNA, 25 bp, Homo sapien
tctgaccctcaaagagaaacctgag

SEQ ID NO: 6075952 - DNA, 25 bp, Homo sapien
gtgaatctcactgctatcctgtcca

SEQ ID NO: 6075953 - DNA, 25 bp, Homo sapien
gttgaaggttttgcctcctggtcag

SEQ ID NO: 6075954 - DNA, 25 bp, Homo sapien
ctcaaagagaaacctgagtgaattc

SEQ ID NO: 6075955 - DNA, 25 bp, Homo sapien
ccattcccagttcttttggagtatg

SEQ ID NO: 6075956 - DNA, 25 bp, Homo sapien
gagtttaatatattcaccttccttc

SEQ ID NO: 6075957 - DNA, 25 bp, Homo sapien
acctgagtgaattcattggaacacc

SEQ ID NO: 6075958 - DNA, 25 bp, Homo sapien
ctctagtaagtggttgctgccgccc

SEQ ID NO: 6075959 - DNA, 25 bp, Homo sapien
ccaactgctgggactcctagagggc

SEQ ID NO: 6075960 - DNA, 25 bp, Homo sapien
taagccaactgctgggactcctaga

SEQ ID NO: 6075961 - DNA, 25 bp, Homo sapien
tgggcgaggtcagctgccccgatgt

SEQ ID NO: 6075962 - DNA, 25 bp, Homo sapien
ggctgaaccgttactttttgtctca

SEQ ID NO: 6075963 - DNA, 25 bp, Homo sapien
ctggatggctgaaccgttacttttt

SEQ ID NO: 6075964 - DNA, 25 bp, Homo sapien
ttagtctcttaagccaactgctggg

SEQ ID NO: 6075965 - DNA, 25 bp, Homo sapien
aggacttccaactcccaagggcttg

SEQ ID NO: 6075966 - DNA, 25 bp, Homo sapien
ggtccactcatcttcgtctcagcaa

SEQ ID NO: 6075967 - DNA, 25 bp, Homo sapien
ctgcaggacttccaactcccaaggg

SEQ ID NO: 6075968 - DNA, 25 bp, Homo sapien
ccaagggcttgaaattagtctctta

SEQ ID NO: 6075969 - DNA, 25 bp, Homo sapien
aagaccgccgcactctagtaagtgg

SEQ ID NO: 6075970 - DNA, 25 bp, Homo sapien
gatgaccgtgctgtcaacatcaaaa

SEQ ID NO: 6075971 - DNA, 25 bp, Homo sapien
atgaccgtgctgtcaacatcaaaac

SEQ ID NO: 6075972 - DNA, 25 bp, Homo sapien
tgatgaccgtgctgtcaacatcaaa

SEQ ID NO: 6075973 - DNA, 25 bp, Homo sapien
ctgatgaccgtgctgtcaacatcaa

SEQ ID NO: 6075974 - DNA, 25 bp, Homo sapien
tcaacatcaaaacacacagcatctg

SEQ ID NO: 6075975 - DNA, 25 bp, Homo sapien
cagcatctgctgagtagaaaagctt

SEQ ID NO: 6075976 - DNA, 25 bp, Homo sapien
cctcagctctgagtgggagatcatc

SEQ ID NO: 6075977 - DNA, 25 bp, Homo sapien
gctctgagtgggagatcatccttgg

SEQ ID NO: 6075978 - DNA, 25 bp, Homo sapien
ctcaggtgaggcgagtgcgccgccg

SEQ ID NO: 6075979 - DNA, 25 bp, Homo sapien
tcactgatgaccgtgctgtcaacat

SEQ ID NO: 6075980 - DNA, 25 bp, Homo sapien
gagtgggagatcatccttggaagaa

SEQ ID NO: 6075981 - DNA, 25 bp, Homo sapien
gagactccgtccgattccttcttca

SEQ ID NO: 6075982 - DNA, 25 bp, Homo sapien
gaagaattttcctcccaggctcagg

SEQ ID NO: 6075983 - DNA, 25 bp, Homo sapien
agcgagactccgtccgattccttct

SEQ ID NO: 6075984 - DNA, 25 bp, Homo sapien
gagatcatccttggaagaattttcc

SEQ ID NO: 6075985 - DNA, 25 bp, Homo sapien
cgtccgattccttcttcactgatga

SEQ ID NO: 6075986 - DNA, 25 bp, Homo sapien
aatctcgttagtgtggttggtggct

SEQ ID NO: 6075987 - DNA, 25 bp, Homo sapien
ccagaagcccttgtttgatgggcaa

SEQ ID NO: 6075988 - DNA, 25 bp, Homo sapien
cgaggcaccgttcttgctcccgtga

SEQ ID NO: 6075989 - DNA, 25 bp, Homo sapien
tgttgcaaagagactagatcactgc

SEQ ID NO: 6075990 - DNA, 25 bp, Homo sapien
ggttggtggctgtgatatcgacaaa

SEQ ID NO: 6075991 - DNA, 25 bp, Homo sapien
tatcgacaaattccagaagcccttg

SEQ ID NO: 6075992 - DNA, 25 bp, Homo sapien
ttaccaataaagactcgaggcaccg

SEQ ID NO: 6075993 - DNA, 25 bp, Homo sapien
tgctcccgtgagctgttgcaaataa

SEQ ID NO: 6075994 - DNA, 25 bp, Homo sapien
tttgcagttcacaaactcttgagcc

SEQ ID NO: 6075995 - DNA, 25 bp, Homo sapien
tcttgggccctcctgcagtacgggc

SEQ ID NO: 6075996 - DNA, 25 bp, Homo sapien
aagactcgaggcaccgttcttgctc

SEQ ID NO: 6075997 - DNA, 25 bp, Homo sapien
gcagttccccactctgttgcaaaga

SEQ ID NO: 6075998 - DNA, 25 bp, Homo sapien
ccacctcactttgcaggttccgcac

SEQ ID NO: 6075999 - DNA, 25 bp, Homo sapien
gataaggacaatcatcttcacgttc

SEQ ID NO: 6076000 - DNA, 25 bp, Homo sapien
caccttctgcgatgtcgtcttgaag

SEQ ID NO: 6076001 - DNA, 25 bp, Homo sapien
cgagccaccttctgcgatgtcgtct

SEQ ID NO: 6076002 - DNA, 25 bp, Homo sapien
cttctgcgatgtcgtcttgaagtgc

SEQ ID NO: 6076003 - DNA, 25 bp, Homo sapien
tgtcttgttgcggagatgttccaag

SEQ ID NO: 6076004 - DNA, 25 bp, Homo sapien
tctgcgatgtcgtcttgaagtgctc

SEQ ID NO: 6076005 - DNA, 25 bp, Homo sapien
gccaccttctgcgatgtcgtcttga

SEQ ID NO: 6076006 - DNA, 25 bp, Homo sapien
gagccaccttctgcgatgtcgtctt

SEQ ID NO: 6076007 - DNA, 25 bp, Homo sapien
tcttgttgcggagatgttccaagtt

SEQ ID NO: 6076008 - DNA, 25 bp, Homo sapien
gcgatgtcgtcttgaagtgctcaga

SEQ ID NO: 6076009 - DNA, 25 bp, Homo sapien
cctctgtcttgttgcggagatgttc

SEQ ID NO: 6076010 - DNA, 25 bp, Homo sapien
tctcggtgacaaagtcgaagttcca

SEQ ID NO: 6076011 - DNA, 25 bp, Homo sapien
gcatgggttctgacggacatcccca

SEQ ID NO: 6076012 - DNA, 25 bp, Homo sapien
gatgcagcccgccattagcgcatca

SEQ ID NO: 6076013 - DNA, 25 bp, Homo sapien
tcgctgtccactgggccgaagaggc

SEQ ID NO: 6076014 - DNA, 25 bp, Homo sapien
aagtcgaagttccatcgctcacggg

SEQ ID NO: 6076015 - DNA, 25 bp, Homo sapien
tgacaggtccacatggtcttcctct

SEQ ID NO: 6076016 - DNA, 25 bp, Homo sapien
gcaggccttgctgccgcatgggttc

SEQ ID NO: 6076017 - DNA, 25 bp, Homo sapien
ttagcgcatcacagtcgcggctcag

SEQ ID NO: 6076018 - DNA, 25 bp, Homo sapien
tgccgccgttttcgaccctgagagt

SEQ ID NO: 6076019 - DNA, 25 bp, Homo sapien
ctgctcccctgagcgaggcacaagg

SEQ ID NO: 6076020 - DNA, 25 bp, Homo sapien
cacaagggtacaagacagtgacagg

SEQ ID NO: 6076021 - DNA, 25 bp, Homo sapien
accctccagtggtgtctcggtgaca

SEQ ID NO: 6076022 - DNA, 25 bp, Homo sapien
atgaaggccagtccagcgaagatca

SEQ ID NO: 6076023 - DNA, 25 bp, Homo sapien
agatcaggcccccattgcgaacggt

SEQ ID NO: 6076024 - DNA, 25 bp, Homo sapien
attgcccccacagcggaatcttctg

SEQ ID NO: 6076025 - DNA, 25 bp, Homo sapien
ttattgcccccacagcggaatcttc

SEQ ID NO: 6076026 - DNA, 25 bp, Homo sapien
cttcttattgcccccacagcggaat

SEQ ID NO: 6076027 - DNA, 25 bp, Homo sapien
tgaaggccagtccagcgaagatcag

SEQ ID NO: 6076028 - DNA, 25 bp, Homo sapien
tcttattgcccccacagcggaatct

SEQ ID NO: 6076029 - DNA, 25 bp, Homo sapien
cttattgcccccacagcggaatctt

SEQ ID NO: 6076030 - DNA, 25 bp, Homo sapien
aaggccagtccagcgaagatcaggc

SEQ ID NO: 6076031 - DNA, 25 bp, Homo sapien
ggccagtccagcgaagatcaggccc

SEQ ID NO: 6076032 - DNA, 25 bp, Homo sapien
atcaggcccccattgcgaacggtct

SEQ ID NO: 6076033 - DNA, 25 bp, Homo sapien
gaaggccagtccagcgaagatcagg

SEQ ID NO: 6076034 - DNA, 25 bp, Homo sapien
tctttgaactcgttgacgctgaggc

SEQ ID NO: 6076035 - DNA, 25 bp, Homo sapien
actcgttgacgctgaggctatcctt

SEQ ID NO: 6076036 - DNA, 25 bp, Homo sapien
ggtaaccagctctttgaactcgttg

SEQ ID NO: 6076037 - DNA, 25 bp, Homo sapien
aaccagctctttgaactcgttgacg

SEQ ID NO: 6076038 - DNA, 25 bp, Homo sapien
tttgaactcgttgacgctgaggcta

SEQ ID NO: 6076039 - DNA, 25 bp, Homo sapien
gctctttgaactcgttgacgctgag

SEQ ID NO: 6076040 - DNA, 25 bp, Homo sapien
agctctttgaactcgttgacgctga

SEQ ID NO: 6076041 - DNA, 25 bp, Homo sapien
ccagctctttgaactcgttgacgct

SEQ ID NO: 6076042 - DNA, 25 bp, Homo sapien
tgaactcgttgacgctgaggctatc

SEQ ID NO: 6076043 - DNA, 25 bp, Homo sapien
tggtgaccacggtctcaatggactc

SEQ ID NO: 6076044 - DNA, 25 bp, Homo sapien
aactcgttgacgctgaggctatcct

SEQ ID NO: 6076045 - DNA, 25 bp, Homo sapien
ggcaactgctgggtaaccagctctt

SEQ ID NO: 6076046 - DNA, 25 bp, Homo sapien
ttcaccgacaggaccaagcgtttgc

SEQ ID NO: 6076047 - DNA, 25 bp, Homo sapien
cacagagcacgatgtacacaaaggg

SEQ ID NO: 6076048 - DNA, 25 bp, Homo sapien
cgtttgcggaacgtctcacagagca

SEQ ID NO: 6076049 - DNA, 25 bp, Homo sapien
cgtctgagcgttgctgacagcgcga

SEQ ID NO: 6076050 - DNA, 25 bp, Homo sapien
tggcatagcccaagctgatggccgc

SEQ ID NO: 6076051 - DNA, 25 bp, Homo sapien
cacgtatgcggctgtgatgaccaca

SEQ ID NO: 6076052 - DNA, 25 bp, Homo sapien
cagctgtagcacatagtagggtgcc

SEQ ID NO: 6076053 - DNA, 25 bp, Homo sapien
tacagggtgaaccagtagaggtcag

SEQ ID NO: 6076054 - DNA, 25 bp, Homo sapien
gatgagtctggcatacagccacaca

SEQ ID NO: 6076055 - DNA, 25 bp, Homo sapien
tgaggacgtcatgcgctgcaggatc

SEQ ID NO: 6076056 - DNA, 25 bp, Homo sapien
ccacagagggcttccggaacttcgt

SEQ ID NO: 6076057 - DNA, 25 bp, Homo sapien
tgtgatgaccacaaaaggcagggca

SEQ ID NO: 6076058 - DNA, 25 bp, Homo sapien
aagagtacggctcccacagcactaa

SEQ ID NO: 6076059 - DNA, 25 bp, Homo sapien
gaagactagggcactcttcaggtca

SEQ ID NO: 6076060 - DNA, 25 bp, Homo sapien
gcatgaagactgacatggcatagat

SEQ ID NO: 6076061 - DNA, 25 bp, Homo sapien
aacatacccaatcagtgaagaagcc

SEQ ID NO: 6076062 - DNA, 25 bp, Homo sapien
gactagggcactcttcaggtcagcc

SEQ ID NO: 6076063 - DNA, 25 bp, Homo sapien
ccatgttcaaggatagtgtgctgga

SEQ ID NO: 6076064 - DNA, 25 bp, Homo sapien
cagaagggcaaagagtacggctccc

SEQ ID NO: 6076065 - DNA, 25 bp, Homo sapien
acatacccaatcagtgaagaagcca

SEQ ID NO: 6076066 - DNA, 25 bp, Homo sapien
aagtaatgaagactagggcactctt

SEQ ID NO: 6076067 - DNA, 25 bp, Homo sapien
taatgaagactagggcactcttcag

SEQ ID NO: 6076068 - DNA, 25 bp, Homo sapien
tagggcactcttcaggtcagcccac

SEQ ID NO: 6076069 - DNA, 25 bp, Homo sapien
gaagggcaaagagtacggctcccac

SEQ ID NO: 6076070 - DNA, 25 bp, Homo sapien
tccggctctggctgcgacagcatct

SEQ ID NO: 6076071 - DNA, 25 bp, Homo sapien
ctctcctccgtgtctggcagctccg

SEQ ID NO: 6076072 - DNA, 25 bp, Homo sapien
agctccgcctccttcgtctgcgact

SEQ ID NO: 6076073 - DNA, 25 bp, Homo sapien
gcctccttcgtctgcgacttctttg

SEQ ID NO: 6076074 - DNA, 25 bp, Homo sapien
tgcgacagcatctgtacctggccat

SEQ ID NO: 6076075 - DNA, 25 bp, Homo sapien
ggctctggctgcgacagcatctgta

SEQ ID NO: 6076076 - DNA, 25 bp, Homo sapien
gcggtaatatctgctccggctctgg

SEQ ID NO: 6076077 - DNA, 25 bp, Homo sapien
tccttcgtctgcgacttctttgtct

SEQ ID NO: 6076078 - DNA, 25 bp, Homo sapien
tgtctctggcggtaatatctgctcc

SEQ ID NO: 6076079 - DNA, 25 bp, Homo sapien
tggctgcgacagcatctgtacctgg

SEQ ID NO: 6076080 - DNA, 25 bp, Homo sapien
tctggcggtaatatctgctccggct

SEQ ID NO: 6076081 - DNA, 25 bp, Homo sapien
cttctttgtctctggcggtaatatc

SEQ ID NO: 6076082 - DNA, 25 bp, Homo sapien
tggatgacagcctgacactttgatt

SEQ ID NO: 6076083 - DNA, 25 bp, Homo sapien
tacgcagttcttggatgacagcctg

SEQ ID NO: 6076084 - DNA, 25 bp, Homo sapien
gaacagacgacagatcttcccttgg

SEQ ID NO: 6076085 - DNA, 25 bp, Homo sapien
tcaaatcctgaacagacgacagatc

SEQ ID NO: 6076086 - DNA, 25 bp, Homo sapien
ttcccttgggatactgagcacaaca

SEQ ID NO: 6076087 - DNA, 25 bp, Homo sapien
agatcttcccttgggatactgagca

SEQ ID NO: 6076088 - DNA, 25 bp, Homo sapien
cagttcttggatgacagcctgacac

SEQ ID NO: 6076089 - DNA, 25 bp, Homo sapien
tactgagcacaacacttacgcagtt

SEQ ID NO: 6076090 - DNA, 25 bp, Homo sapien
tctggcacggatccttctgcggcat

SEQ ID NO: 6076091 - DNA, 25 bp, Homo sapien
cacttacgcagttcttggatgacag

SEQ ID NO: 6076092 - DNA, 25 bp, Homo sapien
gcacaacacttacgcagttcttgga

SEQ ID NO: 6076093 - DNA, 25 bp, Homo sapien
gcttctggcacggatccttctgcgg

SEQ ID NO: 6076094 - DNA, 25 bp, Homo sapien
aatgtacttgtactgggcttccagg

SEQ ID NO: 6076095 - DNA, 25 bp, Homo sapien
cgagtgggctcaatcacaatgtact

SEQ ID NO: 6076096 - DNA, 25 bp, Homo sapien
tctcgtcgccaatgcgagtgggctc

SEQ ID NO: 6076097 - DNA, 25 bp, Homo sapien
agctcgtactcaaactggtcttggg

SEQ ID NO: 6076098 - DNA, 25 bp, Homo sapien
ggaataatctaagggcagcgccaac

SEQ ID NO: 6076099 - DNA, 25 bp, Homo sapien
tataggcgtcgtactccacttggta

SEQ ID NO: 6076100 - DNA, 25 bp, Homo sapien
aggcagttgcccacggtgatccagc

SEQ ID NO: 6076101 - DNA, 25 bp, Homo sapien
tgatccagcgggctgtctcgtcgcc

SEQ ID NO: 6076102 - DNA, 25 bp, Homo sapien
tagatctcatgcacaatgtagcagt

SEQ ID NO: 6076103 - DNA, 25 bp, Homo sapien
cacttggtacttgcagcaagggtca

SEQ ID NO: 6076104 - DNA, 25 bp, Homo sapien
caagggtcaaactgccaggagatcc

SEQ ID NO: 6076105 - DNA, 25 bp, Homo sapien
cacggccgtcttgtgcaggcagttg

SEQ ID NO: 6076106 - DNA, 25 bp, Homo sapien
gcgtgcctttgtaggccgctgcaaa

SEQ ID NO: 6076107 - DNA, 25 bp, Homo sapien
ggaagccgatgacagtgagagccat

SEQ ID NO: 6076108 - DNA, 25 bp, Homo sapien
ccatagggcatatagtgggtggcca

SEQ ID NO: 6076109 - DNA, 25 bp, Homo sapien
catagcagacagtgcggttacgctg

SEQ ID NO: 6076110 - DNA, 25 bp, Homo sapien
cagacagtgcggttacgctggatgc

SEQ ID NO: 6076111 - DNA, 25 bp, Homo sapien
acagtgagagccatgccatagggca

SEQ ID NO: 6076112 - DNA, 25 bp, Homo sapien
aggcactgggttgtcacggccagcc

SEQ ID NO: 6076113 - DNA, 25 bp, Homo sapien
gcaaacggccgcgtgcctttgtagg

SEQ ID NO: 6076114 - DNA, 25 bp, Homo sapien
cgtcgagcgcactgccaggtaggct

SEQ ID NO: 6076115 - DNA, 25 bp, Homo sapien
tggtcgccggcggaacttcttctgg

SEQ ID NO: 6076116 - DNA, 25 bp, Homo sapien
ttctgtaggagctcatgtggtcgcc

SEQ ID NO: 6076117 - DNA, 25 bp, Homo sapien
tgtaggccgctgcaaaggcctccaa

SEQ ID NO: 6076118 - DNA, 25 bp, Homo sapien
gctgctcgtctcaaagtagtcagct

SEQ ID NO: 6076119 - DNA, 25 bp, Homo sapien
ctggctgctcgtctcaaagtagtca

SEQ ID NO: 6076120 - DNA, 25 bp, Homo sapien
cgtctcaaagtagtcagctatgaaa

SEQ ID NO: 6076121 - DNA, 25 bp, Homo sapien
agcactggctgctcgtctcaaagta

SEQ ID NO: 6076122 - DNA, 25 bp, Homo sapien
cactggctgctcgtctcaaagtagt

SEQ ID NO: 6076123 - DNA, 25 bp, Homo sapien
gcactggctgctcgtctcaaagtag

SEQ ID NO: 6076124 - DNA, 25 bp, Homo sapien
gctcgtctcaaagtagtcagctatg

SEQ ID NO: 6076125 - DNA, 25 bp, Homo sapien
ctgctcgtctcaaagtagtcagcta

SEQ ID NO: 6076126 - DNA, 25 bp, Homo sapien
tgctcgtctcaaagtagtcagctat

SEQ ID NO: 6076127 - DNA, 25 bp, Homo sapien
tggctgctcgtctcaaagtagtcag

SEQ ID NO: 6076128 - DNA, 25 bp, Homo sapien
actggctgctcgtctcaaagtagtc

SEQ ID NO: 6076129 - DNA, 25 bp, Homo sapien
ctcgtctcaaagtagtcagctatga

SEQ ID NO: 6076130 - DNA, 25 bp, Homo sapien
tccacctggctaagctgagtgcctc

SEQ ID NO: 6076131 - DNA, 25 bp, Homo sapien
gccaggactacctgcaggtcgagaa

SEQ ID NO: 6076132 - DNA, 25 bp, Homo sapien
agactgcgttccgacaggcagcaca

SEQ ID NO: 6076133 - DNA, 25 bp, Homo sapien
tacctgcaggtcgagaatgtagtcg

SEQ ID NO: 6076134 - DNA, 25 bp, Homo sapien
ctgagtgcctctcgggactccgggt

SEQ ID NO: 6076135 - DNA, 25 bp, Homo sapien
cgctgtaggatttccacctggctaa

SEQ ID NO: 6076136 - DNA, 25 bp, Homo sapien
ggctggctcggccaggactacctgc

SEQ ID NO: 6076137 - DNA, 25 bp, Homo sapien
tggccagactgcgttccgacaggca

SEQ ID NO: 6076138 - DNA, 25 bp, Homo sapien
gagtagcagtggttcatgtcgtcca

SEQ ID NO: 6076139 - DNA, 25 bp, Homo sapien
cgagaatgtagtcgatgacgcgctg

SEQ ID NO: 6076140 - DNA, 25 bp, Homo sapien
gatgacgcgctgtaggatttccacc

SEQ ID NO: 6076141 - DNA, 25 bp, Homo sapien
atgtcgtccagcaagctcagcggct

SEQ ID NO: 6076142 - DNA, 25 bp, Homo sapien
tgctggcggccggtggcgtggtgcc

SEQ ID NO: 6076143 - DNA, 25 bp, Homo sapien
tcgccacccctcgagctgctggcgg

SEQ ID NO: 6076144 - DNA, 25 bp, Homo sapien
ggtgcgggtagagcacgtcttcagt

SEQ ID NO: 6076145 - DNA, 25 bp, Homo sapien
atgctgaatggtgtgccaggctctg

SEQ ID NO: 6076146 - DNA, 25 bp, Homo sapien
agctgggtgcgggagactgttggag

SEQ ID NO: 6076147 - DNA, 25 bp, Homo sapien
cctgcagtgtgagcgtggcgaagcg

SEQ ID NO: 6076148 - DNA, 25 bp, Homo sapien
cccaggctgtggtagcgcttgtgct

SEQ ID NO: 6076149 - DNA, 25 bp, Homo sapien
tcttgcacacaaggggctccagcag

SEQ ID NO: 6076150 - DNA, 25 bp, Homo sapien
tgtggtagcgcttgtgctccttctc

SEQ ID NO: 6076151 - DNA, 25 bp, Homo sapien
cgaagcggccaatgctgaatggtgt

SEQ ID NO: 6076152 - DNA, 25 bp, Homo sapien
atgcgcgggcacagcgcagtgccca

SEQ ID NO: 6076153 - DNA, 25 bp, Homo sapien
cacctcgtggatgcgcgggcacagc

SEQ ID NO: 6076154 - DNA, 25 bp, Homo sapien
tggcgatgggccctggctgcgtcag

SEQ ID NO: 6076155 - DNA, 25 bp, Homo sapien
tatggcgaacacttgcagattactg

SEQ ID NO: 6076156 - DNA, 25 bp, Homo sapien
tgggcctatggcgaacacttgcaga

SEQ ID NO: 6076157 - DNA, 25 bp, Homo sapien
agcactgtgggcctatggcgaacac

SEQ ID NO: 6076158 - DNA, 25 bp, Homo sapien
tccttgcgtggtctgtaaacaaacg

SEQ ID NO: 6076159 - DNA, 25 bp, Homo sapien
tactgatcattttgggatgaactcc

SEQ ID NO: 6076160 - DNA, 25 bp, Homo sapien
gatgaactccttgcgtggtctgtaa

SEQ ID NO: 6076161 - DNA, 25 bp, Homo sapien
ggtctgtaaacaaacgcaacgcagc

SEQ ID NO: 6076162 - DNA, 25 bp, Homo sapien
tgggatgaactccttgcgtggtctg

SEQ ID NO: 6076163 - DNA, 25 bp, Homo sapien
aaaaggggcttctggatcaagacaa

SEQ ID NO: 6076164 - DNA, 25 bp, Homo sapien
gcgaacacttgcagattactgatca

SEQ ID NO: 6076165 - DNA, 25 bp, Homo sapien
taaacaaacgcaacgcagctctctc

SEQ ID NO: 6076166 - DNA, 25 bp, Homo sapien
gcggttgagtccggcctccagccgg

SEQ ID NO: 6076167 - DNA, 25 bp, Homo sapien
cggttgagtccggcctccagccgga

SEQ ID NO: 6076168 - DNA, 25 bp, Homo sapien
ctctctggtgttgaaggagcgtaga

SEQ ID NO: 6076169 - DNA, 25 bp, Homo sapien
catgacattcatgagatcttactcc

SEQ ID NO: 6076170 - DNA, 25 bp, Homo sapien
taacgaggctagagtggttactaaa

SEQ ID NO: 6076171 - DNA, 25 bp, Homo sapien
actcttcggtgtttaacgaggctag

SEQ ID NO: 6076172 - DNA, 25 bp, Homo sapien
ttgaaggagcgtagagctatgagta

SEQ ID NO: 6076173 - DNA, 25 bp, Homo sapien
ctttctccggtatgaactcttcggt

SEQ ID NO: 6076174 - DNA, 25 bp, Homo sapien
gttactaaaggatttccaacactca

SEQ ID NO: 6076175 - DNA, 25 bp, Homo sapien
tgagatcttactccagtatgaactc

SEQ ID NO: 6076176 - DNA, 25 bp, Homo sapien
tccggtgtgacttctcctatgtcta

SEQ ID NO: 6076177 - DNA, 25 bp, Homo sapien
tagagtggttactaaaggatttcca

SEQ ID NO: 6076178 - DNA, 25 bp, Homo sapien
ctggtgattagtgaggttagagctc

SEQ ID NO: 6076179 - DNA, 25 bp, Homo sapien
cttctcctatgtctaatgaggctgg

SEQ ID NO: 6076180 - DNA, 25 bp, Homo sapien
tctcttggtgcgacctttccggcct

SEQ ID NO: 6076181 - DNA, 25 bp, Homo sapien
ggtcaccagtttcctctcgtgcccg

SEQ ID NO: 6076182 - DNA, 25 bp, Homo sapien
gcttctctcttggtgcgacctttcc

SEQ ID NO: 6076183 - DNA, 25 bp, Homo sapien
taggaatgggccaggctatagaggt

SEQ ID NO: 6076184 - DNA, 25 bp, Homo sapien
aatgggccaggctatagaggtcaga

SEQ ID NO: 6076185 - DNA, 25 bp, Homo sapien
gtttcctctcgtgcccgccagggct

SEQ ID NO: 6076186 - DNA, 25 bp, Homo sapien
gctggggcggttggtgttggcagca

SEQ ID NO: 6076187 - DNA, 25 bp, Homo sapien
cttctctcttggtgcgacctttccg

SEQ ID NO: 6076188 - DNA, 25 bp, Homo sapien
gctggggggcgctggttgctggtgg

SEQ ID NO: 6076189 - DNA, 25 bp, Homo sapien
ttctctcttggtgcgacctttccgg

SEQ ID NO: 6076190 - DNA, 25 bp, Homo sapien
tatagaggtcagattcatccaggct

SEQ ID NO: 6076191 - DNA, 25 bp, Homo sapien
cgaggtaggaatgggccaggctata

SEQ ID NO: 6076192 - DNA, 25 bp, Homo sapien
gtggaacacgttgatgagggtctcc

SEQ ID NO: 6076193 - DNA, 25 bp, Homo sapien
atgagggtctccatcgccgtctcca

SEQ ID NO: 6076194 - DNA, 25 bp, Homo sapien
gccacaagcaccacatactcctgga

SEQ ID NO: 6076195 - DNA, 25 bp, Homo sapien
acctccccgtctccattctcgtcta

SEQ ID NO: 6076196 - DNA, 25 bp, Homo sapien
tggaacacgttgatgagggtctcca

SEQ ID NO: 6076197 - DNA, 25 bp, Homo sapien
ggaacacgttgatgagggtctccat

SEQ ID NO: 6076198 - DNA, 25 bp, Homo sapien
tccccgtctccattctcgtctagct

SEQ ID NO: 6076199 - DNA, 25 bp, Homo sapien
cgtggaacacgttgatgagggtctc

SEQ ID NO: 6076200 - DNA, 25 bp, Homo sapien
gcgtggaacacgttgatgagggtct

SEQ ID NO: 6076201 - DNA, 25 bp, Homo sapien
cgtctccattctcgtctagctcctt

SEQ ID NO: 6076202 - DNA, 25 bp, Homo sapien
tccatcgccgtctccagctcagagc

SEQ ID NO: 6076203 - DNA, 25 bp, Homo sapien
gcagccacaagcaccacatactcct

SEQ ID NO: 6076204 - DNA, 25 bp, Homo sapien
gtttagctcccgcacagacatcgag

SEQ ID NO: 6076205 - DNA, 25 bp, Homo sapien
cactgagctgtaaggtgtggagccc

SEQ ID NO: 6076206 - DNA, 25 bp, Homo sapien
ctgctgcagccgcttggagcgacag

SEQ ID NO: 6076207 - DNA, 25 bp, Homo sapien
agacatcgagaccagcgccgcgtcg

SEQ ID NO: 6076208 - DNA, 25 bp, Homo sapien
tgcagccgcttggagcgacaggcct

SEQ ID NO: 6076209 - DNA, 25 bp, Homo sapien
ggttcttcagcgtgcggcgcctctg

SEQ ID NO: 6076210 - DNA, 25 bp, Homo sapien
gagccttgtagagatcgcgctcccg

SEQ ID NO: 6076211 - DNA, 25 bp, Homo sapien
ttagccggtcacagcgagccttgta

SEQ ID NO: 6076212 - DNA, 25 bp, Homo sapien
tcttcaggactcagccccaatgcct

SEQ ID NO: 6076213 - DNA, 25 bp, Homo sapien
tcacagcgagccttgtagagatcgc

SEQ ID NO: 6076214 - DNA, 25 bp, Homo sapien
ggccgctcgaggttagccggtcaca

SEQ ID NO: 6076215 - DNA, 25 bp, Homo sapien
tgggtagtagccatggggcccatca

SEQ ID NO: 6076216 - DNA, 25 bp, Homo sapien
atatcgcctcctttagcggtcattg

SEQ ID NO: 6076217 - DNA, 25 bp, Homo sapien
gatatcgcctcctttagcggtcatt

SEQ ID NO: 6076218 - DNA, 25 bp, Homo sapien
tcgcctcctttagcggtcattgcct

SEQ ID NO: 6076219 - DNA, 25 bp, Homo sapien
atcgcctcctttagcggtcattgcc

SEQ ID NO: 6076220 - DNA, 25 bp, Homo sapien
tatcgcctcctttagcggtcattgc

SEQ ID NO: 6076221 - DNA, 25 bp, Homo sapien
agatatcgcctcctttagcggtcat

SEQ ID NO: 6076222 - DNA, 25 bp, Homo sapien
ttccttcttcttaatgccgacaaag

SEQ ID NO: 6076223 - DNA, 25 bp, Homo sapien
tattggcggctgtgtaagagtatcc

SEQ ID NO: 6076224 - DNA, 25 bp, Homo sapien
tttcaacggtgtggcactgggaaca

SEQ ID NO: 6076225 - DNA, 25 bp, Homo sapien
ctgtcttccgcccaaagagaccatg

SEQ ID NO: 6076226 - DNA, 25 bp, Homo sapien
tcttccgcccaaagagaccatggag

SEQ ID NO: 6076227 - DNA, 25 bp, Homo sapien
cggtgtggcactgggaacacttcat

SEQ ID NO: 6076228 - DNA, 25 bp, Homo sapien
tcttattggcggctgtgtaagagta

SEQ ID NO: 6076229 - DNA, 25 bp, Homo sapien
ttcttattggcggctgtgtaagagt

SEQ ID NO: 6076230 - DNA, 25 bp, Homo sapien
ttattggcggctgtgtaagagtatc

SEQ ID NO: 6076231 - DNA, 25 bp, Homo sapien
acttcataataaaaatcttcttgcc

SEQ ID NO: 6076232 - DNA, 25 bp, Homo sapien
acacttcataataaaaatcttcttg

SEQ ID NO: 6076233 - DNA, 25 bp, Homo sapien
cttattggcggctgtgtaagagtat

SEQ ID NO: 6076234 - DNA, 25 bp, Homo sapien
tctgtggcagttggcatgggcagcc

SEQ ID NO: 6076235 - DNA, 25 bp, Homo sapien
ccatccgaggtggtgcggacatgta

SEQ ID NO: 6076236 - DNA, 25 bp, Homo sapien
ggagttgagcgtcgggctctctccc

SEQ ID NO: 6076237 - DNA, 25 bp, Homo sapien
gaaggagatgttcagtgctactctg

SEQ ID NO: 6076238 - DNA, 25 bp, Homo sapien
tgggagggtacacgatccaccgttc

SEQ ID NO: 6076239 - DNA, 25 bp, Homo sapien
ctgtctcatacttgaaagagtaacc

SEQ ID NO: 6076240 - DNA, 25 bp, Homo sapien
gaaagagtaacctccatccgaggtg

SEQ ID NO: 6076241 - DNA, 25 bp, Homo sapien
ccctggcagcaaggagtagggctgg

SEQ ID NO: 6076242 - DNA, 25 bp, Homo sapien
gatgaaactgggagggtacacgatc

SEQ ID NO: 6076243 - DNA, 25 bp, Homo sapien
gagcatggcccaaagacatgggcac

SEQ ID NO: 6076244 - DNA, 25 bp, Homo sapien
agatgttcagtgctactctgtggca

SEQ ID NO: 6076245 - DNA, 25 bp, Homo sapien
caaccaccatgacagtagtggaaga

SEQ ID NO: 6076246 - DNA, 25 bp, Homo sapien
caccgcattgataaggattatttcc

SEQ ID NO: 6076247 - DNA, 25 bp, Homo sapien
cagatgtgcagtgagctgttccttc

SEQ ID NO: 6076248 - DNA, 25 bp, Homo sapien
ttttccacaaaaggctctctcacac

SEQ ID NO: 6076249 - DNA, 25 bp, Homo sapien
acattcaccgcattgataaggatta

SEQ ID NO: 6076250 - DNA, 25 bp, Homo sapien
tccggtgtgtgttctcctatgtata

SEQ ID NO: 6076251 - DNA, 25 bp, Homo sapien
tgtgcagtgagctgttccttcctac

SEQ ID NO: 6076252 - DNA, 25 bp, Homo sapien
gtgagctgttccttcctaccaaagg

SEQ ID NO: 6076253 - DNA, 25 bp, Homo sapien
tgtgttctcctatgtataacaaggt

SEQ ID NO: 6076254 - DNA, 25 bp, Homo sapien
gagctgttccttcctaccaaaggct

SEQ ID NO: 6076255 - DNA, 25 bp, Homo sapien
aaaaggctctctcacacaaactaca

SEQ ID NO: 6076256 - DNA, 25 bp, Homo sapien
ttctggtgtatctgaagtgatgcct

SEQ ID NO: 6076257 - DNA, 25 bp, Homo sapien
ttttctggtgtatctgaagtgatgc

SEQ ID NO: 6076258 - DNA, 25 bp, Homo sapien
agtacttgtggaagatggccacgag

SEQ ID NO: 6076259 - DNA, 25 bp, Homo sapien
ccttcttgctcagggtgtgcttgtc

SEQ ID NO: 6076260 - DNA, 25 bp, Homo sapien
gagtacttgtggaagatggccacga

SEQ ID NO: 6076261 - DNA, 25 bp, Homo sapien
ccttgttccggtccaagtcttccat

SEQ ID NO: 6076262 - DNA, 25 bp, Homo sapien
gatggccacgaggaggccaatggcc

SEQ ID NO: 6076263 - DNA, 25 bp, Homo sapien
tccttcttgctcagggtgtgcttgt

SEQ ID NO: 6076264 - DNA, 25 bp, Homo sapien
caatggcctgatccagggggcatgc

SEQ ID NO: 6076265 - DNA, 25 bp, Homo sapien
tgttccggtccaagtcttccatcag

SEQ ID NO: 6076266 - DNA, 25 bp, Homo sapien
agggtgtgcttgtcaccctccctgc

SEQ ID NO: 6076267 - DNA, 25 bp, Homo sapien
ttgttccggtccaagtcttccatca

SEQ ID NO: 6076268 - DNA, 25 bp, Homo sapien
cttgttccggtccaagtcttccatc

SEQ ID NO: 6076269 - DNA, 25 bp, Homo sapien
tggcctgatccagggggcatgccat

SEQ ID NO: 6076270 - DNA, 25 bp, Homo sapien
gcccagccgacgtagagcgaggcac

SEQ ID NO: 6076271 - DNA, 25 bp, Homo sapien
aatacttggcggagtaaggcttgtc

SEQ ID NO: 6076272 - DNA, 25 bp, Homo sapien
aggacaccggcactatcaccataag

SEQ ID NO: 6076273 - DNA, 25 bp, Homo sapien
tggtctgcgaggtgacaatgttgct

SEQ ID NO: 6076274 - DNA, 25 bp, Homo sapien
tccaggcagttggtacacttgcccc

SEQ ID NO: 6076275 - DNA, 25 bp, Homo sapien
agcgcgatgcccattacctgtagcc

SEQ ID NO: 6076276 - DNA, 25 bp, Homo sapien
ctatcaccataaggccggccaacag

SEQ ID NO: 6076277 - DNA, 25 bp, Homo sapien
ctcccagatggtctgcgaggtgaca

SEQ ID NO: 6076278 - DNA, 25 bp, Homo sapien
gcgcgcagcacagcatgacggccag

SEQ ID NO: 6076279 - DNA, 25 bp, Homo sapien
cagcagaatacttggcggagtaagg

SEQ ID NO: 6076280 - DNA, 25 bp, Homo sapien
ccaccagcggattgtagaagtcttg

SEQ ID NO: 6076281 - DNA, 25 bp, Homo sapien
acggacagcagcacgcccagagcag

SEQ ID NO: 6076282 - DNA, 25 bp, Homo sapien
tgtagtcccggtcacttatcctgtg

SEQ ID NO: 6076283 - DNA, 25 bp, Homo sapien
gtgcgctcgggactcgccatccgtt

SEQ ID NO: 6076284 - DNA, 25 bp, Homo sapien
cccggtcacttatcctgtggctggg

SEQ ID NO: 6076285 - DNA, 25 bp, Homo sapien
gggcctgctggatgtatcttgccag

SEQ ID NO: 6076286 - DNA, 25 bp, Homo sapien
gggactcgccatccgttctctgcga

SEQ ID NO: 6076287 - DNA, 25 bp, Homo sapien
gcaggttcttaacgatggacattcg

SEQ ID NO: 6076288 - DNA, 25 bp, Homo sapien
atccatccagcccatgtagtcccgg

SEQ ID NO: 6076289 - DNA, 25 bp, Homo sapien
gttctgcaggttcttaacgatggac

SEQ ID NO: 6076290 - DNA, 25 bp, Homo sapien
tgctggatgtatcttgccagcaggg

SEQ ID NO: 6076291 - DNA, 25 bp, Homo sapien
agggcgcccaggtgcgctcgggact

SEQ ID NO: 6076292 - DNA, 25 bp, Homo sapien
tgcgataccctcagctgcctacggg

SEQ ID NO: 6076293 - DNA, 25 bp, Homo sapien
tcttaacgatggacattcgtccaga

SEQ ID NO: 6076294 - DNA, 25 bp, Homo sapien
cagtgagtcccggatcaccgaacat

SEQ ID NO: 6076295 - DNA, 25 bp, Homo sapien
gatcaaaccaccgtggacaccttct

SEQ ID NO: 6076296 - DNA, 25 bp, Homo sapien
tgttgatcaaaccaccgtggacacc

SEQ ID NO: 6076297 - DNA, 25 bp, Homo sapien
caaaccaccgtggacaccttctttg

SEQ ID NO: 6076298 - DNA, 25 bp, Homo sapien
agtcccggatcaccgaacatttctg

SEQ ID NO: 6076299 - DNA, 25 bp, Homo sapien
tgcagcagtgagtcccggatcaccg

SEQ ID NO: 6076300 - DNA, 25 bp, Homo sapien
tttcttgttgatcaaaccaccgtgg

SEQ ID NO: 6076301 - DNA, 25 bp, Homo sapien
ttgatcaaaccaccgtggacacctt

SEQ ID NO: 6076302 - DNA, 25 bp, Homo sapien
cttgttgatcaaaccaccgtggaca

SEQ ID NO: 6076303 - DNA, 25 bp, Homo sapien
acatttcttgttgatcaaaccaccg

SEQ ID NO: 6076304 - DNA, 25 bp, Homo sapien
tcttgttgatcaaaccaccgtggac

SEQ ID NO: 6076305 - DNA, 25 bp, Homo sapien
gtgagtcccggatcaccgaacattt

SEQ ID NO: 6076306 - DNA, 25 bp, Homo sapien
ccccagggatagcacgaatgctaca

SEQ ID NO: 6076307 - DNA, 25 bp, Homo sapien
atgatttcgcagacgcctggccaga

SEQ ID NO: 6076308 - DNA, 25 bp, Homo sapien
cacgcatccgaggttttggcaaaac

SEQ ID NO: 6076309 - DNA, 25 bp, Homo sapien
acagccatatgatttcgcagacgcc

SEQ ID NO: 6076310 - DNA, 25 bp, Homo sapien
ccttctttctttgatcagccacacg

SEQ ID NO: 6076311 - DNA, 25 bp, Homo sapien
tcatgacatcgtagtttctgtagaa

SEQ ID NO: 6076312 - DNA, 25 bp, Homo sapien
tcaaaatctttcatgacatcgtagt

SEQ ID NO: 6076313 - DNA, 25 bp, Homo sapien
gccatatgatttcgcagacgcctgg

SEQ ID NO: 6076314 - DNA, 25 bp, Homo sapien
gcacgaatgctacagccatatgatt

SEQ ID NO: 6076315 - DNA, 25 bp, Homo sapien
ggatagcacgaatgctacagccata

SEQ ID NO: 6076316 - DNA, 25 bp, Homo sapien
catatgatttcgcagacgcctggcc

SEQ ID NO: 6076317 - DNA, 25 bp, Homo sapien
tctttctttgatcagccacacgaaa

SEQ ID NO: 6076318 - DNA, 25 bp, Homo sapien
gcagcgtcgtgcacgggtcgggtga

SEQ ID NO: 6076319 - DNA, 25 bp, Homo sapien
gccgaatccggagggtcaccaagaa

SEQ ID NO: 6076320 - DNA, 25 bp, Homo sapien
aatccggagggtcaccaagaacctg

SEQ ID NO: 6076321 - DNA, 25 bp, Homo sapien
gcgccgaatccggagggtcaccaag

SEQ ID NO: 6076322 - DNA, 25 bp, Homo sapien
gccctagacgctggctcctcagtag

SEQ ID NO: 6076323 - DNA, 25 bp, Homo sapien
cctagacgctggctcctcagtagca

SEQ ID NO: 6076324 - DNA, 25 bp, Homo sapien
acgcgcgccgaatccggagggtcac

SEQ ID NO: 6076325 - DNA, 25 bp, Homo sapien
tgccctagacgctggctcctcagta

SEQ ID NO: 6076326 - DNA, 25 bp, Homo sapien
atccggagggtcaccaagaacctgc

SEQ ID NO: 6076327 - DNA, 25 bp, Homo sapien
cgtcgtgcacgggtcgggtgagagt

SEQ ID NO: 6076328 - DNA, 25 bp, Homo sapien
tcccgggcagcgtcgtgcacgggtc

SEQ ID NO: 6076329 - DNA, 25 bp, Homo sapien
cacgcgcgccgaatccggagggtca

SEQ ID NO: 6076330 - DNA, 25 bp, Homo sapien
tgaaccacgagatgtgaaccacgaa

SEQ ID NO: 6076331 - DNA, 25 bp, Homo sapien
cccccgtgaaccacgagatgtgaac

SEQ ID NO: 6076332 - DNA, 25 bp, Homo sapien
gtgaaccacgagatgtgaaccacga

SEQ ID NO: 6076333 - DNA, 25 bp, Homo sapien
cccactcccccgtgaaccacgagat

SEQ ID NO: 6076334 - DNA, 25 bp, Homo sapien
actcccccgtgaaccacgagatgtg

SEQ ID NO: 6076335 - DNA, 25 bp, Homo sapien
cccgtgaaccacgagatgtgaacca

SEQ ID NO: 6076336 - DNA, 25 bp, Homo sapien
cgtgaaccacgagatgtgaaccacg

SEQ ID NO: 6076337 - DNA, 25 bp, Homo sapien
ccgtgaaccacgagatgtgaaccac

SEQ ID NO: 6076338 - DNA, 25 bp, Homo sapien
cactcccccgtgaaccacgagatgt

SEQ ID NO: 6076339 - DNA, 25 bp, Homo sapien
tcccccgtgaaccacgagatgtgaa

SEQ ID NO: 6076340 - DNA, 25 bp, Homo sapien
ctcccccgtgaaccacgagatgtga

SEQ ID NO: 6076341 - DNA, 25 bp, Homo sapien
ccccgtgaaccacgagatgtgaacc

SEQ ID NO: 6076342 - DNA, 25 bp, Homo sapien
aatgatgcccaggattttagtggct

SEQ ID NO: 6076343 - DNA, 25 bp, Homo sapien
tataggatgatgagcaacaccgagg

SEQ ID NO: 6076344 - DNA, 25 bp, Homo sapien
tcctttctcgagcagcagaaatcct

SEQ ID NO: 6076345 - DNA, 25 bp, Homo sapien
gaaaagcttgccgaaactcttcatt

SEQ ID NO: 6076346 - DNA, 25 bp, Homo sapien
ggagtttaaatagcctagccaggtg

SEQ ID NO: 6076347 - DNA, 25 bp, Homo sapien
cagaaatcctcttgcgttccagggc

SEQ ID NO: 6076348 - DNA, 25 bp, Homo sapien
gggccgtggtgaagcgcttcccata

SEQ ID NO: 6076349 - DNA, 25 bp, Homo sapien
tcccatagagtgagggtggattcag

SEQ ID NO: 6076350 - DNA, 25 bp, Homo sapien
gcaagcttgattttcacgtggttga

SEQ ID NO: 6076351 - DNA, 25 bp, Homo sapien
tgttcaccagacagtccgacatctc

SEQ ID NO: 6076352 - DNA, 25 bp, Homo sapien
caccgagggaatgtagaaggcccca

SEQ ID NO: 6076353 - DNA, 25 bp, Homo sapien
ggcagcccggtagatccggccatat

SEQ ID NO: 6076354 - DNA, 25 bp, Homo sapien
ctcctagagcctgcttcatcacaaa

SEQ ID NO: 6076355 - DNA, 25 bp, Homo sapien
cctagagcctgcttcatcacaaact

SEQ ID NO: 6076356 - DNA, 25 bp, Homo sapien
cgcgtcaagctcccctcggagttgg

SEQ ID NO: 6076357 - DNA, 25 bp, Homo sapien
gggcaggtacttgatgacggtgtcc

SEQ ID NO: 6076358 - DNA, 25 bp, Homo sapien
gccgcgtcaagctcccctcggagtt

SEQ ID NO: 6076359 - DNA, 25 bp, Homo sapien
gtcaagctcccctcggagttggcct

SEQ ID NO: 6076360 - DNA, 25 bp, Homo sapien
cttggcggcgtctgggtccttctcc

SEQ ID NO: 6076361 - DNA, 25 bp, Homo sapien
tcttggcggcgtctgggtccttctc

SEQ ID NO: 6076362 - DNA, 25 bp, Homo sapien
ttgggccgcgtcaagctcccctcgg

SEQ ID NO: 6076363 - DNA, 25 bp, Homo sapien
ttggcggcgtctgggtccttctcct

SEQ ID NO: 6076364 - DNA, 25 bp, Homo sapien
cctccatcttggcgtacttggcctt

SEQ ID NO: 6076365 - DNA, 25 bp, Homo sapien
tcctagagcctgcttcatcacaaac

SEQ ID NO: 6076366 - DNA, 25 bp, Homo sapien
tcagcatcacgatacagcagggatt

SEQ ID NO: 6076367 - DNA, 25 bp, Homo sapien
gaaagatgtcatcttggtgacgtca

SEQ ID NO: 6076368 - DNA, 25 bp, Homo sapien
tttcagggctaagttggagggcacc

SEQ ID NO: 6076369 - DNA, 25 bp, Homo sapien
gggtccttggccgatgtctcaaaca

SEQ ID NO: 6076370 - DNA, 25 bp, Homo sapien
tccacgccgatggtggcttcagtct

SEQ ID NO: 6076371 - DNA, 25 bp, Homo sapien
tgaaaatcgactccacgttctggct

SEQ ID NO: 6076372 - DNA, 25 bp, Homo sapien
tgctcgaccatgcttttgcggaaac

SEQ ID NO: 6076373 - DNA, 25 bp, Homo sapien
cgttggagtccccaatcacgattat

SEQ ID NO: 6076374 - DNA, 25 bp, Homo sapien
tacgttgcggtagtaatgctcgacc

SEQ ID NO: 6076375 - DNA, 25 bp, Homo sapien
tttctgggccttcaatcggcaagcc

SEQ ID NO: 6076376 - DNA, 25 bp, Homo sapien
aagaccacggcatgtacgttgcggt

SEQ ID NO: 6076377 - DNA, 25 bp, Homo sapien
gacgtcatagacgaagaccacggca

SEQ ID NO: 6076378 - DNA, 25 bp, Homo sapien
aacacattgcttctagccgtccatt

SEQ ID NO: 6076379 - DNA, 25 bp, Homo sapien
cacattgcttctagccgtccatttc

SEQ ID NO: 6076380 - DNA, 25 bp, Homo sapien
aaacacattgcttctagccgtccat

SEQ ID NO: 6076381 - DNA, 25 bp, Homo sapien
tgcttctagccgtccatttcccaac

SEQ ID NO: 6076382 - DNA, 25 bp, Homo sapien
ccaaaataatgtccgaggtatttat

SEQ ID NO: 6076383 - DNA, 25 bp, Homo sapien
acacattgcttctagccgtccattt

SEQ ID NO: 6076384 - DNA, 25 bp, Homo sapien
attgcttctagccgtccatttccca

SEQ ID NO: 6076385 - DNA, 25 bp, Homo sapien
caattttcctctgatgtgacataac

SEQ ID NO: 6076386 - DNA, 25 bp, Homo sapien
acattgcttctagccgtccatttcc

SEQ ID NO: 6076387 - DNA, 25 bp, Homo sapien
aaataatgtccgaggtatttatcca

SEQ ID NO: 6076388 - DNA, 25 bp, Homo sapien
caaaataatgtccgaggtatttatc

SEQ ID NO: 6076389 - DNA, 25 bp, Homo sapien
aggatctccggattcggtaagcatc

SEQ ID NO: 6076390 - DNA, 25 bp, Homo sapien
gattcggtaagcatcttttgctcgt

SEQ ID NO: 6076391 - DNA, 25 bp, Homo sapien
ctccggattcggtaagcatcttttg

SEQ ID NO: 6076392 - DNA, 25 bp, Homo sapien
tccggattcggtaagcatcttttgc

SEQ ID NO: 6076393 - DNA, 25 bp, Homo sapien
agctctagccgctcccgggccttta

SEQ ID NO: 6076394 - DNA, 25 bp, Homo sapien
ccggattcggtaagcatcttttgct

SEQ ID NO: 6076395 - DNA, 25 bp, Homo sapien
ggatctccggattcggtaagcatct

SEQ ID NO: 6076396 - DNA, 25 bp, Homo sapien
tctccggattcggtaagcatctttt

SEQ ID NO: 6076397 - DNA, 25 bp, Homo sapien
ggattcggtaagcatcttttgctcg

SEQ ID NO: 6076398 - DNA, 25 bp, Homo sapien
ttcggtaagcatcttttgctcgtcc

SEQ ID NO: 6076399 - DNA, 25 bp, Homo sapien
cggattcggtaagcatcttttgctc

SEQ ID NO: 6076400 - DNA, 25 bp, Homo sapien
gatctccggattcggtaagcatctt

SEQ ID NO: 6076401 - DNA, 25 bp, Homo sapien
gagctggacatgagcggcttgcccc

SEQ ID NO: 6076402 - DNA, 25 bp, Homo sapien
tcccgcttctcacgcggcgatgggt

SEQ ID NO: 6076403 - DNA, 25 bp, Homo sapien
tctcggcctccacgtaatgcgcctt

SEQ ID NO: 6076404 - DNA, 25 bp, Homo sapien
tggcgtggcccatattgccctgcag

SEQ ID NO: 6076405 - DNA, 25 bp, Homo sapien
aatagtttgagctcctggcgtggcc

SEQ ID NO: 6076406 - DNA, 25 bp, Homo sapien
ggctgcgaggctgttaagcccggga

SEQ ID NO: 6076407 - DNA, 25 bp, Homo sapien
atggtgcgcggcagtggaaattttc

SEQ ID NO: 6076408 - DNA, 25 bp, Homo sapien
ggaggtgagaattcctcttctgagc

SEQ ID NO: 6076409 - DNA, 25 bp, Homo sapien
gcagcagaaggaccgagttctggtc

SEQ ID NO: 6076410 - DNA, 25 bp, Homo sapien
ttaagcccgggagagaatagtttga

SEQ ID NO: 6076411 - DNA, 25 bp, Homo sapien
aattttcggcgcacccgatatttgc

SEQ ID NO: 6076412 - DNA, 25 bp, Homo sapien
accgagttctggtctggactttggg

SEQ ID NO: 6076413 - DNA, 25 bp, Homo sapien
cagtttcgacttatcgaatttctcg

SEQ ID NO: 6076414 - DNA, 25 bp, Homo sapien
tatcgaatttctcgatctcagccat

SEQ ID NO: 6076415 - DNA, 25 bp, Homo sapien
cagccatatcgggtttgtcagacat

SEQ ID NO: 6076416 - DNA, 25 bp, Homo sapien
cgatctcagccatatcgggtttgtc

SEQ ID NO: 6076417 - DNA, 25 bp, Homo sapien
ctctgtcttcttcagtttcgactta

SEQ ID NO: 6076418 - DNA, 25 bp, Homo sapien
tttctcttgcgtctctgtcttcttc

SEQ ID NO: 6076419 - DNA, 25 bp, Homo sapien
gtggatttttctcttgcgtctctgt

SEQ ID NO: 6076420 - DNA, 25 bp, Homo sapien
ttgcgtctctgtcttcttcagtttc

SEQ ID NO: 6076421 - DNA, 25 bp, Homo sapien
tcgtttctttggaaggcagtggatt

SEQ ID NO: 6076422 - DNA, 25 bp, Homo sapien
aaggcagtggatttttctcttgcgt

SEQ ID NO: 6076423 - DNA, 25 bp, Homo sapien
cttcttcagtttcgacttatcgaat

SEQ ID NO: 6076424 - DNA, 25 bp, Homo sapien
ctttggaaggcagtggatttttctc

SEQ ID NO: 6076425 - DNA, 25 bp, Homo sapien
atttctcgatctcagccatatcggg

SEQ ID NO: 6076426 - DNA, 25 bp, Homo sapien
tcgacttatcgaatttctcgatctc

SEQ ID NO: 6076427 - DNA, 25 bp, Homo sapien
cacggcagtggcagactggaggggg

SEQ ID NO: 6076428 - DNA, 25 bp, Homo sapien
gcacggcagtggcagactggagggg

SEQ ID NO: 6076429 - DNA, 25 bp, Homo sapien
acggcagtggcagactggagggggc

SEQ ID NO: 6076430 - DNA, 25 bp, Homo sapien
aggatgtcccccgggcacggcagtg

SEQ ID NO: 6076431 - DNA, 25 bp, Homo sapien
ggatgtcccccgggcacggcagtgg

SEQ ID NO: 6076432 - DNA, 25 bp, Homo sapien
ggcacggcagtggcagactggaggg

SEQ ID NO: 6076433 - DNA, 25 bp, Homo sapien
cagcctgcagaaagggccgggaaac

SEQ ID NO: 6076434 - DNA, 25 bp, Homo sapien
ggcctccagcctgggcggaggatgt

SEQ ID NO: 6076435 - DNA, 25 bp, Homo sapien
acagcctgcagaaagggccgggaaa

SEQ ID NO: 6076436 - DNA, 25 bp, Homo sapien
ggtgaggctggcaagcagcgaggca

SEQ ID NO: 6076437 - DNA, 25 bp, Homo sapien
atgtcccccgggcacggcagtggca

SEQ ID NO: 6076438 - DNA, 25 bp, Homo sapien
tccagcctgggcggaggatgtcccc

SEQ ID NO: 6076439 - DNA, 25 bp, Homo sapien
aggctggcaagcagcgaggcagggc

SEQ ID NO: 6076440 - DNA, 25 bp, Homo sapien
gctggcacagcctgcagaaagggcc

SEQ ID NO: 6076441 - DNA, 25 bp, Homo sapien
gggcacggcagtggcagactggagg

SEQ ID NO: 6076442 - DNA, 25 bp, Homo sapien
caagcagcgaggcagggcctccagc

SEQ ID NO: 6076443 - DNA, 25 bp, Homo sapien
ctggcacagcctgcagaaagggccg

SEQ ID NO: 6076444 - DNA, 25 bp, Homo sapien
cacagcctgcagaaagggccgggaa

SEQ ID NO: 6076445 - DNA, 25 bp, Homo sapien
aacacatcttagctagtaacgacca

SEQ ID NO: 6076446 - DNA, 25 bp, Homo sapien
acacatcttagctagtaacgaccac

SEQ ID NO: 6076447 - DNA, 25 bp, Homo sapien
cttagctagtaacgaccacttgttt

SEQ ID NO: 6076448 - DNA, 25 bp, Homo sapien
catcttagctagtaacgaccacttg

SEQ ID NO: 6076449 - DNA, 25 bp, Homo sapien
tcttagctagtaacgaccacttgtt

SEQ ID NO: 6076450 - DNA, 25 bp, Homo sapien
cacatcttagctagtaacgaccact

SEQ ID NO: 6076451 - DNA, 25 bp, Homo sapien
gctagtaacgaccacttgttttcca

SEQ ID NO: 6076452 - DNA, 25 bp, Homo sapien
caaacacatcttagctagtaacgac

SEQ ID NO: 6076453 - DNA, 25 bp, Homo sapien
aaacacatcttagctagtaacgacc

SEQ ID NO: 6076454 - DNA, 25 bp, Homo sapien
tagctagtaacgaccacttgttttc

SEQ ID NO: 6076455 - DNA, 25 bp, Homo sapien
cagatccaaagtacaaacacatctt

SEQ ID NO: 6076456 - DNA, 25 bp, Homo sapien
gatccaaagtacaaacacatcttag

SEQ ID NO: 6076457 - DNA, 25 bp, Homo sapien
tattatcttcaccttgacgccggaa

SEQ ID NO: 6076458 - DNA, 25 bp, Homo sapien
ccaaatccagatttatccccggtgt

SEQ ID NO: 6076459 - DNA, 25 bp, Homo sapien
tatccccggtgtttgactgatgcag

SEQ ID NO: 6076460 - DNA, 25 bp, Homo sapien
aatccagatttatccccggtgtttg

SEQ ID NO: 6076461 - DNA, 25 bp, Homo sapien
tgtttgactgatgcagctcttgcag

SEQ ID NO: 6076462 - DNA, 25 bp, Homo sapien
gcagctcttgcagatcaccttccat

SEQ ID NO: 6076463 - DNA, 25 bp, Homo sapien
gatttatccccggtgtttgactgat

SEQ ID NO: 6076464 - DNA, 25 bp, Homo sapien
ctcttgcagatcaccttccatgtcg

SEQ ID NO: 6076465 - DNA, 25 bp, Homo sapien
tccccggtgtttgactgatgcagct

SEQ ID NO: 6076466 - DNA, 25 bp, Homo sapien
gggatctcagctgtatcctgatctt

SEQ ID NO: 6076467 - DNA, 25 bp, Homo sapien
ttgacgccggaacccaaatccagat

SEQ ID NO: 6076468 - DNA, 25 bp, Homo sapien
ggtattatcttcaccttgacgccgg

SEQ ID NO: 6076469 - DNA, 25 bp, Homo sapien
tcctggtcccgcagacgtctggcgg

SEQ ID NO: 6076470 - DNA, 25 bp, Homo sapien
agtctccatcaggccgagcaccacg

SEQ ID NO: 6076471 - DNA, 25 bp, Homo sapien
acgccgaagagggccagcacgctgc

SEQ ID NO: 6076472 - DNA, 25 bp, Homo sapien
gtcccgcagacgtctggcggccgtg

SEQ ID NO: 6076473 - DNA, 25 bp, Homo sapien
ctccatcaggccgagcaccacgccg

SEQ ID NO: 6076474 - DNA, 25 bp, Homo sapien
agggcttgcttctggagagcctgtc

SEQ ID NO: 6076475 - DNA, 25 bp, Homo sapien
cccgcagacgtctggcggccgtgaa

SEQ ID NO: 6076476 - DNA, 25 bp, Homo sapien
ggcttgcttctggagagcctgtcgc

SEQ ID NO: 6076477 - DNA, 25 bp, Homo sapien
gcttgcttctggagagcctgtcgct

SEQ ID NO: 6076478 - DNA, 25 bp, Homo sapien
ccatcaggccgagcaccacgccgaa

SEQ ID NO: 6076479 - DNA, 25 bp, Homo sapien
ctcctggtcccgcagacgtctggcg

SEQ ID NO: 6076480 - DNA, 25 bp, Homo sapien
agcaccacgccgaagagggccagca

SEQ ID NO: 6076481 - DNA, 25 bp, Homo sapien
cattctcctgtgttattcattatga

SEQ ID NO: 6076482 - DNA, 25 bp, Homo sapien
tctccttataggtatccacatccgg

SEQ ID NO: 6076483 - DNA, 25 bp, Homo sapien
tatgaactccgcaacaaaatatgaa

SEQ ID NO: 6076484 - DNA, 25 bp, Homo sapien
tgtagcactctggacgttttgcttg

SEQ ID NO: 6076485 - DNA, 25 bp, Homo sapien
gacgttttgcttggacctgatccag

SEQ ID NO: 6076486 - DNA, 25 bp, Homo sapien
actgcagatagtcctgagccagcct

SEQ ID NO: 6076487 - DNA, 25 bp, Homo sapien
tcttgatgagaataccttcaaatgc

SEQ ID NO: 6076488 - DNA, 25 bp, Homo sapien
tctggcagtgtctacggacacaaca

SEQ ID NO: 6076489 - DNA, 25 bp, Homo sapien
gcaaatatggttacaattcttcccc

SEQ ID NO: 6076490 - DNA, 25 bp, Homo sapien
tccaggttgtggtatctgtaggacg

SEQ ID NO: 6076491 - DNA, 25 bp, Homo sapien
tccaagcatgacttcagattctttt

SEQ ID NO: 6076492 - DNA, 25 bp, Homo sapien
gggcaatttgctgtcgtagaagttt

SEQ ID NO: 6076493 - DNA, 25 bp, Homo sapien
ctgtaccataaccaggaggctgatg

SEQ ID NO: 6076494 - DNA, 25 bp, Homo sapien
tgtaccataaccaggaggctgatgg

SEQ ID NO: 6076495 - DNA, 25 bp, Homo sapien
tggctggtgtcgttttgtcctgaga

SEQ ID NO: 6076496 - DNA, 25 bp, Homo sapien
tcttgtcatctaggcaatgccagcc

SEQ ID NO: 6076497 - DNA, 25 bp, Homo sapien
gagatcgccgtcaggattgctgccg

SEQ ID NO: 6076498 - DNA, 25 bp, Homo sapien
actgttcttgtcatctaggcaatgc

SEQ ID NO: 6076499 - DNA, 25 bp, Homo sapien
tcctggaggagatcgccgtcaggat

SEQ ID NO: 6076500 - DNA, 25 bp, Homo sapien
ggattgctgccgtcagacagagctg

SEQ ID NO: 6076501 - DNA, 25 bp, Homo sapien
ccgtcaggattgctgccgtcagaca

SEQ ID NO: 6076502 - DNA, 25 bp, Homo sapien
gcacagcaccgccttccggtttcgg

SEQ ID NO: 6076503 - DNA, 25 bp, Homo sapien
aatttcacagtctgcgcagaccaga

SEQ ID NO: 6076504 - DNA, 25 bp, Homo sapien
ggtttcggccctcggctgacactaa

SEQ ID NO: 6076505 - DNA, 25 bp, Homo sapien
gctgacactaactcgctcggctgct

SEQ ID NO: 6076506 - DNA, 25 bp, Homo sapien
aattggtccaatttcacagtctgcg

SEQ ID NO: 6076507 - DNA, 25 bp, Homo sapien
tgcgcagaccagaaacttgatgttg

SEQ ID NO: 6076508 - DNA, 25 bp, Homo sapien
gaattccctttactagaggatcctc

SEQ ID NO: 6076509 - DNA, 25 bp, Homo sapien
ttctttgcgaagctgctcaacttcc

SEQ ID NO: 6076510 - DNA, 25 bp, Homo sapien
cacttctttgcgaagctgctcaact

SEQ ID NO: 6076511 - DNA, 25 bp, Homo sapien
tcacttctttgcgaagctgctcaac

SEQ ID NO: 6076512 - DNA, 25 bp, Homo sapien
ttccctttactagaggatcctctcc

SEQ ID NO: 6076513 - DNA, 25 bp, Homo sapien
aacttcacttctttgcgaagctgct

SEQ ID NO: 6076514 - DNA, 25 bp, Homo sapien
tccctttactagaggatcctctcca

SEQ ID NO: 6076515 - DNA, 25 bp, Homo sapien
cttcacttctttgcgaagctgctca

SEQ ID NO: 6076516 - DNA, 25 bp, Homo sapien
tctttgcgaagctgctcaacttcca

SEQ ID NO: 6076517 - DNA, 25 bp, Homo sapien
cgaagctgctcaacttccattttca

SEQ ID NO: 6076518 - DNA, 25 bp, Homo sapien
tttgcgaagctgctcaacttccatt

SEQ ID NO: 6076519 - DNA, 25 bp, Homo sapien
tgcgaagctgctcaacttccatttt

SEQ ID NO: 6076520 - DNA, 25 bp, Homo sapien
agacgatcgacagaaccaccaccag

SEQ ID NO: 6076521 - DNA, 25 bp, Homo sapien
gacgatcgacagaaccaccaccagg

SEQ ID NO: 6076522 - DNA, 25 bp, Homo sapien
cttccaagacgatcgacagaaccac

SEQ ID NO: 6076523 - DNA, 25 bp, Homo sapien
cgacagaaccaccaccaggaccggg

SEQ ID NO: 6076524 - DNA, 25 bp, Homo sapien
ttccaagacgatcgacagaaccacc

SEQ ID NO: 6076525 - DNA, 25 bp, Homo sapien
cactggagacgtctggggtcccctg

SEQ ID NO: 6076526 - DNA, 25 bp, Homo sapien
aagacgatcgacagaaccaccacca

SEQ ID NO: 6076527 - DNA, 25 bp, Homo sapien
aggcactggagacgtctggggtccc

SEQ ID NO: 6076528 - DNA, 25 bp, Homo sapien
ccaggaccgggagcgacaggaagag

SEQ ID NO: 6076529 - DNA, 25 bp, Homo sapien
acgatcgacagaaccaccaccagga

SEQ ID NO: 6076530 - DNA, 25 bp, Homo sapien
gacagaaccaccaccaggaccggga

SEQ ID NO: 6076531 - DNA, 25 bp, Homo sapien
acagaaccaccaccaggaccgggag

SEQ ID NO: 6076532 - DNA, 25 bp, Homo sapien
aggaatttccggtcatagatgatcc

SEQ ID NO: 6076533 - DNA, 25 bp, Homo sapien
tcgtgctgtagtccccgggcgggag

SEQ ID NO: 6076534 - DNA, 25 bp, Homo sapien
catcaggaatttccggtcatagatg

SEQ ID NO: 6076535 - DNA, 25 bp, Homo sapien
caggaatttccggtcatagatgatc

SEQ ID NO: 6076536 - DNA, 25 bp, Homo sapien
ccgcccgcttatcttctgggctatt

SEQ ID NO: 6076537 - DNA, 25 bp, Homo sapien
ggaatttccggtcatagatgatcct

SEQ ID NO: 6076538 - DNA, 25 bp, Homo sapien
ccatcaggaatttccggtcatagat

SEQ ID NO: 6076539 - DNA, 25 bp, Homo sapien
tttccggtcatagatgatcctggta

SEQ ID NO: 6076540 - DNA, 25 bp, Homo sapien
cgcccgcttatcttctgggctattg

SEQ ID NO: 6076541 - DNA, 25 bp, Homo sapien
aatttccggtcatagatgatcctgg

SEQ ID NO: 6076542 - DNA, 25 bp, Homo sapien
gagctgcacgccgtcgccgagcacc

SEQ ID NO: 6076543 - DNA, 25 bp, Homo sapien
tcgccgagcaccacccggcgagtgg

SEQ ID NO: 6076544 - DNA, 25 bp, Homo sapien
tggcatcttgatcaccacttcggag

SEQ ID NO: 6076545 - DNA, 25 bp, Homo sapien
gatcacgccctttcttagtcggcct

SEQ ID NO: 6076546 - DNA, 25 bp, Homo sapien
agcgagaaggtcttccgcttggcca

SEQ ID NO: 6076547 - DNA, 25 bp, Homo sapien
gggatcttgcgccagcgtctcttgt

SEQ ID NO: 6076548 - DNA, 25 bp, Homo sapien
tagtcggcctcttgactgtatttgg

SEQ ID NO: 6076549 - DNA, 25 bp, Homo sapien
tcccacagggtctcgggaacacagt

SEQ ID NO: 6076550 - DNA, 25 bp, Homo sapien
ttgatcaccacttcggagccaggct

SEQ ID NO: 6076551 - DNA, 25 bp, Homo sapien
atggcactcagggtccgagccgcct

SEQ ID NO: 6076552 - DNA, 25 bp, Homo sapien
agcgtctcttgtcccagcggcaaag

SEQ ID NO: 6076553 - DNA, 25 bp, Homo sapien
ccagcaccatgatgttgtacggtgt

SEQ ID NO: 6076554 - DNA, 25 bp, Homo sapien
cttgaccagcgagaaggtcttccgc

SEQ ID NO: 6076555 - DNA, 25 bp, Homo sapien
gctttgttgcagagtgcgtagcaca

SEQ ID NO: 6076556 - DNA, 25 bp, Homo sapien
caggttcactgggtgcacgtagccg

SEQ ID NO: 6076557 - DNA, 25 bp, Homo sapien
gcgactgcttgcactctgcggctga

SEQ ID NO: 6076558 - DNA, 25 bp, Homo sapien
aggctttgctcagcacgcgcatccg

SEQ ID NO: 6076559 - DNA, 25 bp, Homo sapien
caggtgagcgatgtaactggaagcc

SEQ ID NO: 6076560 - DNA, 25 bp, Homo sapien
ttcccgagaccacgaatggccatgt

SEQ ID NO: 6076561 - DNA, 25 bp, Homo sapien
cctgcaacagctgccgcaggtgagc

SEQ ID NO: 6076562 - DNA, 25 bp, Homo sapien
cacgtagccgttctcatagcggtcc

SEQ ID NO: 6076563 - DNA, 25 bp, Homo sapien
ctggtcttgagcctggagaaggctt

SEQ ID NO: 6076564 - DNA, 25 bp, Homo sapien
gttggccgcgttccgctgcgactgc

SEQ ID NO: 6076565 - DNA, 25 bp, Homo sapien
catccgggcacgctcacgggcgttg

SEQ ID NO: 6076566 - DNA, 25 bp, Homo sapien
tcctctgccgacgagttgtcactgg

SEQ ID NO: 6076567 - DNA, 25 bp, Homo sapien
tgtcagagtccggtcttcccgagac

SEQ ID NO: 6076568 - DNA, 25 bp, Homo sapien
tttgtagtccttacagatgtcgggc

SEQ ID NO: 6076569 - DNA, 25 bp, Homo sapien
tctttcgctggattgaagacgccat

SEQ ID NO: 6076570 - DNA, 25 bp, Homo sapien
tcttctggcaagtcggaagcaccac

SEQ ID NO: 6076571 - DNA, 25 bp, Homo sapien
gctctggcgacagatgaaacacttg

SEQ ID NO: 6076572 - DNA, 25 bp, Homo sapien
tgttgattccccgatagatcttgtc

SEQ ID NO: 6076573 - DNA, 25 bp, Homo sapien
agacgccattggtctgctggtcaca

SEQ ID NO: 6076574 - DNA, 25 bp, Homo sapien
aatgctgcagtgcacagctctcgca

SEQ ID NO: 6076575 - DNA, 25 bp, Homo sapien
gaggcattgcccatagacgtatcct

SEQ ID NO: 6076576 - DNA, 25 bp, Homo sapien
cccatgcttgtaatctgaacggtca

SEQ ID NO: 6076577 - DNA, 25 bp, Homo sapien
gaccctcatcaagctcacgttcgat

SEQ ID NO: 6076578 - DNA, 25 bp, Homo sapien
gtaatcccagcgcacggtggcacgt

SEQ ID NO: 6076579 - DNA, 25 bp, Homo sapien
cacgtagatgctcgggcgctcggat

SEQ ID NO: 6076580 - DNA, 25 bp, Homo sapien
aagtcgttgtaaaatagcacaatgc

SEQ ID NO: 6076581 - DNA, 25 bp, Homo sapien
aatagcacaatgcttcctgaagcca

SEQ ID NO: 6076582 - DNA, 25 bp, Homo sapien
gttaaagtcgttgtaaaatagcaca

SEQ ID NO: 6076583 - DNA, 25 bp, Homo sapien
ttgtaaaatagcacaatgcttcctg

SEQ ID NO: 6076584 - DNA, 25 bp, Homo sapien
gtcactggtgacaataagggcaaca

SEQ ID NO: 6076585 - DNA, 25 bp, Homo sapien
cttgggatcctccaatggtcgggag

SEQ ID NO: 6076586 - DNA, 25 bp, Homo sapien
tcaaacatgtcctcggctggccagt

SEQ ID NO: 6076587 - DNA, 25 bp, Homo sapien
ggtgggatggtcaaacatgtcctcg

SEQ ID NO: 6076588 - DNA, 25 bp, Homo sapien
aatgtcactggtgacaataagggca

SEQ ID NO: 6076589 - DNA, 25 bp, Homo sapien
ttggctggactgagatgcagaaccg

SEQ ID NO: 6076590 - DNA, 25 bp, Homo sapien
tctccaaagacatcgtgctggccct

SEQ ID NO: 6076591 - DNA, 25 bp, Homo sapien
gagcttgggatcctccaatggtcgg

SEQ ID NO: 6076592 - DNA, 25 bp, Homo sapien
ccggaagaactcattatgcccaggg

SEQ ID NO: 6076593 - DNA, 25 bp, Homo sapien
gcagctttgctggcccgaaggactc

SEQ ID NO: 6076594 - DNA, 25 bp, Homo sapien
gaagaactcattatgcccagggaac

SEQ ID NO: 6076595 - DNA, 25 bp, Homo sapien
tatctccaaagacatcgtgctggcc

SEQ ID NO: 6076596 - DNA, 25 bp, Homo sapien
gccgaagaccgaggtgcatgctcat

SEQ ID NO: 6076597 - DNA, 25 bp, Homo sapien
tcacatgccggtggaaactgtccct

SEQ ID NO: 6076598 - DNA, 25 bp, Homo sapien
tgtctgtgcccaattagattcccat

SEQ ID NO: 6076599 - DNA, 25 bp, Homo sapien
ttctccccgatgtggaagtcctcct

SEQ ID NO: 6076600 - DNA, 25 bp, Homo sapien
tttgaatttcttaccgcagacccca

SEQ ID NO: 6076601 - DNA, 25 bp, Homo sapien
tagtacaagaagtcacatgccggtg

SEQ ID NO: 6076602 - DNA, 25 bp, Homo sapien
tgctcgtcgtaggtcgcgtgcacat

SEQ ID NO: 6076603 - DNA, 25 bp, Homo sapien
tgtgccgatctctctgactcttgtg

SEQ ID NO: 6076604 - DNA, 25 bp, Homo sapien
tctgtctgcacggtgttgatggact

SEQ ID NO: 6076605 - DNA, 25 bp, Homo sapien
tggaagagccatagaaatccacctg

SEQ ID NO: 6076606 - DNA, 25 bp, Homo sapien
gcagcttcgtaggacttagtacaag

SEQ ID NO: 6076607 - DNA, 25 bp, Homo sapien
ctgagaatcctaagtgggaagcttc

SEQ ID NO: 6076608 - DNA, 25 bp, Homo sapien
tcggtcaggcacaacgtaaccagga

SEQ ID NO: 6076609 - DNA, 25 bp, Homo sapien
tatcattcagtagctgcaagttgtg

SEQ ID NO: 6076610 - DNA, 25 bp, Homo sapien
cagttcctcggtcaggcacaacgta

SEQ ID NO: 6076611 - DNA, 25 bp, Homo sapien
catggctttccataagacttctctc

SEQ ID NO: 6076612 - DNA, 25 bp, Homo sapien
gctgccagttcctcggtcaggcaca

SEQ ID NO: 6076613 - DNA, 25 bp, Homo sapien
gttcctcggtcaggcacaacgtaac

SEQ ID NO: 6076614 - DNA, 25 bp, Homo sapien
aaacactgacagctcccactgcagt

SEQ ID NO: 6076615 - DNA, 25 bp, Homo sapien
gccggccagccatatcattcagtag

SEQ ID NO: 6076616 - DNA, 25 bp, Homo sapien
cgctgctgccagttcctcggtcagg

SEQ ID NO: 6076617 - DNA, 25 bp, Homo sapien
tagagccggccagccatatcattca

SEQ ID NO: 6076618 - DNA, 25 bp, Homo sapien
gccatatcattcagtagctgcaagt

SEQ ID NO: 6076619 - DNA, 25 bp, Homo sapien
gagccggccagccatatcattcagt

SEQ ID NO: 6076620 - DNA, 25 bp, Homo sapien
ttggcgctgaactccagtgcactgc

SEQ ID NO: 6076621 - DNA, 25 bp, Homo sapien
agggtgagctccgtccgctcgtagc

SEQ ID NO: 6076622 - DNA, 25 bp, Homo sapien
tcagggcctcgaaggcctcattcac

SEQ ID NO: 6076623 - DNA, 25 bp, Homo sapien
acggacaccgacttcctcttacaca

SEQ ID NO: 6076624 - DNA, 25 bp, Homo sapien
ggctcagggtgagctccgtccgctc

SEQ ID NO: 6076625 - DNA, 25 bp, Homo sapien
gagtgcaggttgtgggcatctgtag

SEQ ID NO: 6076626 - DNA, 25 bp, Homo sapien
cctggaggcgctcgatgtactggat

SEQ ID NO: 6076627 - DNA, 25 bp, Homo sapien
ccccggtagcggaggtcacgctcct

SEQ ID NO: 6076628 - DNA, 25 bp, Homo sapien
tcgtagcctggtggttcgaagccct

SEQ ID NO: 6076629 - DNA, 25 bp, Homo sapien
tccgtccgctcgtagcctggtggtt

SEQ ID NO: 6076630 - DNA, 25 bp, Homo sapien
ggcgctcgatgtactggatggcact

SEQ ID NO: 6076631 - DNA, 25 bp, Homo sapien
tagcctggtggttcgaagccctgga

SEQ ID NO: 6076632 - DNA, 25 bp, Homo sapien
gccaattgaagtccacaccacgagt

SEQ ID NO: 6076633 - DNA, 25 bp, Homo sapien
tctccgccgactgtgttgatgggag

SEQ ID NO: 6076634 - DNA, 25 bp, Homo sapien
ttcggatctcctttagccaaccttg

SEQ ID NO: 6076635 - DNA, 25 bp, Homo sapien
ggcctgggcttgccaattgaagtcc

SEQ ID NO: 6076636 - DNA, 25 bp, Homo sapien
taaggtgaggagataggcgtcctca

SEQ ID NO: 6076637 - DNA, 25 bp, Homo sapien
tgtgctcttctgaagctttcggatc

SEQ ID NO: 6076638 - DNA, 25 bp, Homo sapien
gagtaactcggcctgcatgtaaggt

SEQ ID NO: 6076639 - DNA, 25 bp, Homo sapien
agagatgaactagaaatgcttctgc

SEQ ID NO: 6076640 - DNA, 25 bp, Homo sapien
aggagataggcgtcctcaaagagat

SEQ ID NO: 6076641 - DNA, 25 bp, Homo sapien
cttgtctccgccgactgtgttgatg

SEQ ID NO: 6076642 - DNA, 25 bp, Homo sapien
gaagctttcggatctcctttagcca

SEQ ID NO: 6076643 - DNA, 25 bp, Homo sapien
agcttccttatcaagaggtgtgtgc

SEQ ID NO: 6076644 - DNA, 25 bp, Homo sapien
ggtggccgcccagccgatgtacagc

SEQ ID NO: 6076645 - DNA, 25 bp, Homo sapien
agcagcccgcaaaacaggtagagca

SEQ ID NO: 6076646 - DNA, 25 bp, Homo sapien
cgacacgggcacagacgggtcgtaa

SEQ ID NO: 6076647 - DNA, 25 bp, Homo sapien
gcacagacgggtcgtaaaactcgcg

SEQ ID NO: 6076648 - DNA, 25 bp, Homo sapien
agggtcacgaagagcgcaacgaacg

SEQ ID NO: 6076649 - DNA, 25 bp, Homo sapien
agaggcagccgcctaccatgagcag

SEQ ID NO: 6076650 - DNA, 25 bp, Homo sapien
cgccgcggcgctgagtacttcacgg

SEQ ID NO: 6076651 - DNA, 25 bp, Homo sapien
ttggcgaaccagcagagtggcacga

SEQ ID NO: 6076652 - DNA, 25 bp, Homo sapien
tggtctgcgccgtcacgatgttgtg

SEQ ID NO: 6076653 - DNA, 25 bp, Homo sapien
ggacgacaatgttggcgaaccagca

SEQ ID NO: 6076654 - DNA, 25 bp, Homo sapien
aaaacaggtagagcacgcctcccgt

SEQ ID NO: 6076655 - DNA, 25 bp, Homo sapien
taaaactcgcggacgacaatgttgg

SEQ ID NO: 6076656 - DNA, 25 bp, Homo sapien
gatggcaaagccaacggtgaacctg

SEQ ID NO: 6076657 - DNA, 25 bp, Homo sapien
cgttcaccgtggacaggcacagaaa

SEQ ID NO: 6076658 - DNA, 25 bp, Homo sapien
ggtgagcctggtgacgtctgtcttc

SEQ ID NO: 6076659 - DNA, 25 bp, Homo sapien
ctaggaagatgacaaccaccgcgat

SEQ ID NO: 6076660 - DNA, 25 bp, Homo sapien
tagtacccggcaatcctgctgtcca

SEQ ID NO: 6076661 - DNA, 25 bp, Homo sapien
gcgatggccgagtgcttcaccttgg

SEQ ID NO: 6076662 - DNA, 25 bp, Homo sapien
gcagcggctttgacgaggagaacca

SEQ ID NO: 6076663 - DNA, 25 bp, Homo sapien
caagccgcacatggcgttcctgtct

SEQ ID NO: 6076664 - DNA, 25 bp, Homo sapien
tgaacctggcgtagtagtacccggc

SEQ ID NO: 6076665 - DNA, 25 bp, Homo sapien
tgctcctgaaaatccggtggttggt

SEQ ID NO: 6076666 - DNA, 25 bp, Homo sapien
tctggacacttcttggcgggaatgg

SEQ ID NO: 6076667 - DNA, 25 bp, Homo sapien
tctgggcagcgcttaagcccatgct

SEQ ID NO: 6076668 - DNA, 25 bp, Homo sapien
gtctgataacattccgtctccagga

SEQ ID NO: 6076669 - DNA, 25 bp, Homo sapien
tctaaaccatgttgcacagcagtgt

SEQ ID NO: 6076670 - DNA, 25 bp, Homo sapien
ttacttttgccttgtagcagcaccc

SEQ ID NO: 6076671 - DNA, 25 bp, Homo sapien
ctcaagagctttattcgaatagtcc

SEQ ID NO: 6076672 - DNA, 25 bp, Homo sapien
cgagatcggagtatgcattcagagg

SEQ ID NO: 6076673 - DNA, 25 bp, Homo sapien
tctcctgtattctgcatttgtctta

SEQ ID NO: 6076674 - DNA, 25 bp, Homo sapien
tattgctttagtgcttcaatcatct

SEQ ID NO: 6076675 - DNA, 25 bp, Homo sapien
gcttttcagcatcagggacttcctt

SEQ ID NO: 6076676 - DNA, 25 bp, Homo sapien
tccaggaactcagcgagatcggagt

SEQ ID NO: 6076677 - DNA, 25 bp, Homo sapien
cattcagaggattcagtcccttctc

SEQ ID NO: 6076678 - DNA, 25 bp, Homo sapien
gacttccttattgaatggtgtctga

SEQ ID NO: 6076679 - DNA, 25 bp, Homo sapien
tattcgaatagtccatagcatattg

SEQ ID NO: 6076680 - DNA, 25 bp, Homo sapien
ttgagctcccccttggtcagggtct

SEQ ID NO: 6076681 - DNA, 25 bp, Homo sapien
aaagacgtctatgatcatgcccatg

SEQ ID NO: 6076682 - DNA, 25 bp, Homo sapien
tcagggtctgcgtgctgccctcgct

SEQ ID NO: 6076683 - DNA, 25 bp, Homo sapien
ccctcgctgcccgaatatcgggaaa

SEQ ID NO: 6076684 - DNA, 25 bp, Homo sapien
cgggaaaagacgtctatgatcatgc

SEQ ID NO: 6076685 - DNA, 25 bp, Homo sapien
cagacgtgattgcagccacgaacac

SEQ ID NO: 6076686 - DNA, 25 bp, Homo sapien
cttgagcaatttatccacggcatcc

SEQ ID NO: 6076687 - DNA, 25 bp, Homo sapien
ctgcaggaagcctggtagctccttc

SEQ ID NO: 6076688 - DNA, 25 bp, Homo sapien
ccgaatatcgggaaaagacgtctat

SEQ ID NO: 6076689 - DNA, 25 bp, Homo sapien
gacaggcagacgtgattgcagccac

SEQ ID NO: 6076690 - DNA, 25 bp, Homo sapien
gtgacaggcagacgtgattgcagcc

SEQ ID NO: 6076691 - DNA, 25 bp, Homo sapien
gagcaatttatccacggcatccttg

SEQ ID NO: 6076692 - DNA, 25 bp, Homo sapien
acagatctgggagtatcggatgtag

SEQ ID NO: 6076693 - DNA, 25 bp, Homo sapien
ttgcacagatctgggagtatcggat

SEQ ID NO: 6076694 - DNA, 25 bp, Homo sapien
cttttgcacagatctgggagtatcg

SEQ ID NO: 6076695 - DNA, 25 bp, Homo sapien
tttgcacagatctgggagtatcgga

SEQ ID NO: 6076696 - DNA, 25 bp, Homo sapien
tgcacagatctgggagtatcggatg

SEQ ID NO: 6076697 - DNA, 25 bp, Homo sapien
gcacagatctgggagtatcggatgt

SEQ ID NO: 6076698 - DNA, 25 bp, Homo sapien
cacagatctgggagtatcggatgta

SEQ ID NO: 6076699 - DNA, 25 bp, Homo sapien
ttttgcacagatctgggagtatcgg

SEQ ID NO: 6076700 - DNA, 25 bp, Homo sapien
ctcgggtggacagccagacgctgct

SEQ ID NO: 6076701 - DNA, 25 bp, Homo sapien
gcttcccctcgaaggtcagccagaa

SEQ ID NO: 6076702 - DNA, 25 bp, Homo sapien
ggtgatctgcgccttcagctctgac

SEQ ID NO: 6076703 - DNA, 25 bp, Homo sapien
cagccagaacaggtcgtcctgcaca

SEQ ID NO: 6076704 - DNA, 25 bp, Homo sapien
gatcttctgggtgatctgcgccttc

SEQ ID NO: 6076705 - DNA, 25 bp, Homo sapien
cgtaggtgctgctgcggcccttgtt

SEQ ID NO: 6076706 - DNA, 25 bp, Homo sapien
tgcagcgccacaccgctcgggtgga

SEQ ID NO: 6076707 - DNA, 25 bp, Homo sapien
tgctggaaggcgtgcacgccgatct

SEQ ID NO: 6076708 - DNA, 25 bp, Homo sapien
tcagctctgacaccgacatggagct

SEQ ID NO: 6076709 - DNA, 25 bp, Homo sapien
gcgtgcacgccgatcttctgggtga

SEQ ID NO: 6076710 - DNA, 25 bp, Homo sapien
tcagaggttcgtcgcatttgtccac

SEQ ID NO: 6076711 - DNA, 25 bp, Homo sapien
gcaggcgcagattcatgaacacggt

SEQ ID NO: 6076712 - DNA, 25 bp, Homo sapien
gagccggcgcaggtgcaggagtcac

SEQ ID NO: 6076713 - DNA, 25 bp, Homo sapien
gcaggtgcaggagtcaccggcggcg

SEQ ID NO: 6076714 - DNA, 25 bp, Homo sapien
gtgcaggagtcaccggcggcgcagg

SEQ ID NO: 6076715 - DNA, 25 bp, Homo sapien
ccggcgcaggtgcaggagtcaccgg

SEQ ID NO: 6076716 - DNA, 25 bp, Homo sapien
gcatttgcaggagccggcgcaggtg

SEQ ID NO: 6076717 - DNA, 25 bp, Homo sapien
cggcgcaggtgcaggagtcaccggc

SEQ ID NO: 6076718 - DNA, 25 bp, Homo sapien
ggcggcgcaggagcagttgggatcc

SEQ ID NO: 6076719 - DNA, 25 bp, Homo sapien
ggtgcaggagtcaccggcggcgcag

SEQ ID NO: 6076720 - DNA, 25 bp, Homo sapien
gccggcgcaggtgcaggagtcaccg

SEQ ID NO: 6076721 - DNA, 25 bp, Homo sapien
ggcgcaggtgcaggagtcaccggcg

SEQ ID NO: 6076722 - DNA, 25 bp, Homo sapien
caggtgcaggagtcaccggcggcgc

SEQ ID NO: 6076723 - DNA, 25 bp, Homo sapien
cgcaggtgcaggagtcaccggcggc

SEQ ID NO: 6076724 - DNA, 25 bp, Homo sapien
gggagaattgcgacgatccaacaga

SEQ ID NO: 6076725 - DNA, 25 bp, Homo sapien
ggagaattgcgacgatccaacagaa

SEQ ID NO: 6076726 - DNA, 25 bp, Homo sapien
catgggagaattgcgacgatccaac

SEQ ID NO: 6076727 - DNA, 25 bp, Homo sapien
gccatgggagaattgcgacgatcca

SEQ ID NO: 6076728 - DNA, 25 bp, Homo sapien
agccatgggagaattgcgacgatcc

SEQ ID NO: 6076729 - DNA, 25 bp, Homo sapien
ccatgggagaattgcgacgatccaa

SEQ ID NO: 6076730 - DNA, 25 bp, Homo sapien
atgtggccccgaaaactcgcctgga

SEQ ID NO: 6076731 - DNA, 25 bp, Homo sapien
gatgtctagaatgtcgtcgtccggc

SEQ ID NO: 6076732 - DNA, 25 bp, Homo sapien
gcggccgcgttggcgccgggatcgt

SEQ ID NO: 6076733 - DNA, 25 bp, Homo sapien
catgtggccccgaaaactcgcctgg

SEQ ID NO: 6076734 - DNA, 25 bp, Homo sapien
cagcgggatgtctagaatgtcgtcg

SEQ ID NO: 6076735 - DNA, 25 bp, Homo sapien
gggatgtctagaatgtcgtcgtccg

SEQ ID NO: 6076736 - DNA, 25 bp, Homo sapien
tccagcgggatgtctagaatgtcgt

SEQ ID NO: 6076737 - DNA, 25 bp, Homo sapien
cgcctggattttggcggcggccgcg

SEQ ID NO: 6076738 - DNA, 25 bp, Homo sapien
ttcttccgcgccatgtggccccgaa

SEQ ID NO: 6076739 - DNA, 25 bp, Homo sapien
gcgggatgtctagaatgtcgtcgtc

SEQ ID NO: 6076740 - DNA, 25 bp, Homo sapien
tcgtccagcgggatgtctagaatgt

SEQ ID NO: 6076741 - DNA, 25 bp, Homo sapien
cgtccagcgggatgtctagaatgtc

SEQ ID NO: 6076742 - DNA, 25 bp, Homo sapien
gggaatgaaggtggctgctatgagc

SEQ ID NO: 6076743 - DNA, 25 bp, Homo sapien
gctcgcgagcctctgcactgagatc

SEQ ID NO: 6076744 - DNA, 25 bp, Homo sapien
gatcttcctattggtgaagttataa

SEQ ID NO: 6076745 - DNA, 25 bp, Homo sapien
gctgagcgagcccttggggaatgaa

SEQ ID NO: 6076746 - DNA, 25 bp, Homo sapien
acagaagggcggcagagactttcat

SEQ ID NO: 6076747 - DNA, 25 bp, Homo sapien
tcttctatagctcgcgagcctctgc

SEQ ID NO: 6076748 - DNA, 25 bp, Homo sapien
tatagctcgcgagcctctgcactga

SEQ ID NO: 6076749 - DNA, 25 bp, Homo sapien
tctgcactgagatcttcctattggt

SEQ ID NO: 6076750 - DNA, 25 bp, Homo sapien
gattcttctatagctcgcgagcctc

SEQ ID NO: 6076751 - DNA, 25 bp, Homo sapien
tgattcttctatagctcgcgagcct

SEQ ID NO: 6076752 - DNA, 25 bp, Homo sapien
gcactgagatcttcctattggtgaa

SEQ ID NO: 6076753 - DNA, 25 bp, Homo sapien
tctatagctcgcgagcctctgcact

SEQ ID NO: 6076754 - DNA, 25 bp, Homo sapien
gtggctcacgaaccacagctgattt

SEQ ID NO: 6076755 - DNA, 25 bp, Homo sapien
tggctcacgaaccacagctgatttc

SEQ ID NO: 6076756 - DNA, 25 bp, Homo sapien
tgtggctcacgaaccacagctgatt

SEQ ID NO: 6076757 - DNA, 25 bp, Homo sapien
gggatcccctgctccccctcactca

SEQ ID NO: 6076758 - DNA, 25 bp, Homo sapien
tcactcaacagtcgggccattacaa

SEQ ID NO: 6076759 - DNA, 25 bp, Homo sapien
caaaggcagcgcaagccgttgggat

SEQ ID NO: 6076760 - DNA, 25 bp, Homo sapien
gctgcgcaaaggcagcgcaagccgt

SEQ ID NO: 6076761 - DNA, 25 bp, Homo sapien
tccccctcactcaacagtcgggcca

SEQ ID NO: 6076762 - DNA, 25 bp, Homo sapien
cgttgggatcccctgctccccctca

SEQ ID NO: 6076763 - DNA, 25 bp, Homo sapien
ccggctgctgcgcaaaggcagcgca

SEQ ID NO: 6076764 - DNA, 25 bp, Homo sapien
ccctgctccccctcactcaacagtc

SEQ ID NO: 6076765 - DNA, 25 bp, Homo sapien
gcagcgcaagccgttgggatcccct

SEQ ID NO: 6076766 - DNA, 25 bp, Homo sapien
aacagtcgggccattacaactctca

SEQ ID NO: 6076767 - DNA, 25 bp, Homo sapien
gcaagccgttgggatcccctgctcc

SEQ ID NO: 6076768 - DNA, 25 bp, Homo sapien
tgggtatgctcctgctcaagaagtt

SEQ ID NO: 6076769 - DNA, 25 bp, Homo sapien
taagctcggagggtttcacctctag

SEQ ID NO: 6076770 - DNA, 25 bp, Homo sapien
tggagacagcgggaaactcaccaaa

SEQ ID NO: 6076771 - DNA, 25 bp, Homo sapien
ttcaaagcggaacgtcttcccgcgc

SEQ ID NO: 6076772 - DNA, 25 bp, Homo sapien
tcagcagtctggaaccccgcagaca

SEQ ID NO: 6076773 - DNA, 25 bp, Homo sapien
caaatcccgctgcatttcaaagcgg

SEQ ID NO: 6076774 - DNA, 25 bp, Homo sapien
ccccaagaatatcatctagtgctga

SEQ ID NO: 6076775 - DNA, 25 bp, Homo sapien
gcttctgctttagatatcccaactt

SEQ ID NO: 6076776 - DNA, 25 bp, Homo sapien
gattatgaagccctgggtatgctcc

SEQ ID NO: 6076777 - DNA, 25 bp, Homo sapien
cacctctaggagttcctcagcagtc

SEQ ID NO: 6076778 - DNA, 25 bp, Homo sapien
gggaaactcaccaaatcccgctgca

SEQ ID NO: 6076779 - DNA, 25 bp, Homo sapien
tagtgctgaacagaaggtgattatg

SEQ ID NO: 6076780 - DNA, 25 bp, Homo sapien
cctgcatgcactcagaggctttgct

SEQ ID NO: 6076781 - DNA, 25 bp, Homo sapien
gccctccattaagatcatgcccagg

SEQ ID NO: 6076782 - DNA, 25 bp, Homo sapien
tcttgggcgtactctgatcatcacc

SEQ ID NO: 6076783 - DNA, 25 bp, Homo sapien
tttgcggagcaggaaacgaactaac

SEQ ID NO: 6076784 - DNA, 25 bp, Homo sapien
tgtgaccggctccttaatttgatat

SEQ ID NO: 6076785 - DNA, 25 bp, Homo sapien
ttaatttgatatttgcggagcagga

SEQ ID NO: 6076786 - DNA, 25 bp, Homo sapien
agattgcctcctccggggcgcggct

SEQ ID NO: 6076787 - DNA, 25 bp, Homo sapien
caggaaacgaactaactcagccact

SEQ ID NO: 6076788 - DNA, 25 bp, Homo sapien
cattaagatcatgcccaggacgatt

SEQ ID NO: 6076789 - DNA, 25 bp, Homo sapien
ccggtcttgggcgtactctgatcat

SEQ ID NO: 6076790 - DNA, 25 bp, Homo sapien
tatcaggaaagtggttcttgtaatt

SEQ ID NO: 6076791 - DNA, 25 bp, Homo sapien
gcgcggctgccctccattaagatca

SEQ ID NO: 6076792 - DNA, 25 bp, Homo sapien
gtttcaagccgttgacgtttctgga

SEQ ID NO: 6076793 - DNA, 25 bp, Homo sapien
aatcatttcaattactcgttccagg

SEQ ID NO: 6076794 - DNA, 25 bp, Homo sapien
tccaaagggcggatgataagatcat

SEQ ID NO: 6076795 - DNA, 25 bp, Homo sapien
tctcagctgtttcaagccgttgacg

SEQ ID NO: 6076796 - DNA, 25 bp, Homo sapien
caattactcgttccaggtgcttttg

SEQ ID NO: 6076797 - DNA, 25 bp, Homo sapien
gatcaaactgcataggatgaagccg

SEQ ID NO: 6076798 - DNA, 25 bp, Homo sapien
ggcttgggagctaagccttcttgaa

SEQ ID NO: 6076799 - DNA, 25 bp, Homo sapien
tctcgttttatactcccagggctcc

SEQ ID NO: 6076800 - DNA, 25 bp, Homo sapien
cagtacaattgttgctatcatcagc

SEQ ID NO: 6076801 - DNA, 25 bp, Homo sapien
ctgatctctcctatgacctgaattt

SEQ ID NO: 6076802 - DNA, 25 bp, Homo sapien
tttataagatgatgcacgtgtacaa

SEQ ID NO: 6076803 - DNA, 25 bp, Homo sapien
gatgaagccgttcgatgccctgact

SEQ ID NO: 6076804 - DNA, 25 bp, Homo sapien
gccaacttctgcgtgaagccactaa

SEQ ID NO: 6076805 - DNA, 25 bp, Homo sapien
gtcagcgccatggtggtccggtaaa

SEQ ID NO: 6076806 - DNA, 25 bp, Homo sapien
catgctcctgccaacttctgcgtga

SEQ ID NO: 6076807 - DNA, 25 bp, Homo sapien
gtccggtaaagcatttggtcaggca

SEQ ID NO: 6076808 - DNA, 25 bp, Homo sapien
taatcatacactgtggaatcggagg

SEQ ID NO: 6076809 - DNA, 25 bp, Homo sapien
aggcctcgtttcaggtagacgggca

SEQ ID NO: 6076810 - DNA, 25 bp, Homo sapien
tggtggtccggtaaagcatttggtc

SEQ ID NO: 6076811 - DNA, 25 bp, Homo sapien
cttctgcgtgaagccactaaacttg

SEQ ID NO: 6076812 - DNA, 25 bp, Homo sapien
ctgcgggctataggcctccgaagcc

SEQ ID NO: 6076813 - DNA, 25 bp, Homo sapien
gcgccatggtggtccggtaaagcat

SEQ ID NO: 6076814 - DNA, 25 bp, Homo sapien
cctcgtttcaggtagacgggcacac

SEQ ID NO: 6076815 - DNA, 25 bp, Homo sapien
cgtttcaggtagacgggcacaccat

SEQ ID NO: 6076816 - DNA, 25 bp, Homo sapien
agcctctgcaaggagatcttcttac

SEQ ID NO: 6076817 - DNA, 25 bp, Homo sapien
gacacctgctggtggtgatcacata

SEQ ID NO: 6076818 - DNA, 25 bp, Homo sapien
caagtagatgggacgttgagtgcat

SEQ ID NO: 6076819 - DNA, 25 bp, Homo sapien
gctggtggtgatcacatagctcttc

SEQ ID NO: 6076820 - DNA, 25 bp, Homo sapien
tgctggtggtgatcacatagctctt

SEQ ID NO: 6076821 - DNA, 25 bp, Homo sapien
cctgctggtggtgatcacatagctc

SEQ ID NO: 6076822 - DNA, 25 bp, Homo sapien
tctgcaaggagatcttcttactgct

SEQ ID NO: 6076823 - DNA, 25 bp, Homo sapien
agcagcaagtagatgggacgttgag

SEQ ID NO: 6076824 - DNA, 25 bp, Homo sapien
acagaagcactgcagagactttcat

SEQ ID NO: 6076825 - DNA, 25 bp, Homo sapien
ggacacctgctggtggtgatcacat

SEQ ID NO: 6076826 - DNA, 25 bp, Homo sapien
cctctgcaaggagatcttcttactg

SEQ ID NO: 6076827 - DNA, 25 bp, Homo sapien
cacctgctggtggtgatcacatagc

SEQ ID NO: 6076828 - DNA, 25 bp, Homo sapien
aggtggtacacttggccccagcaag

SEQ ID NO: 6076829 - DNA, 25 bp, Homo sapien
ttggccccagcaaggtagaccagca

SEQ ID NO: 6076830 - DNA, 25 bp, Homo sapien
ggccccagcaaggtagaccagcaag

SEQ ID NO: 6076831 - DNA, 25 bp, Homo sapien
cacaggtggtacacttggccccagc

SEQ ID NO: 6076832 - DNA, 25 bp, Homo sapien
cccagcaaggtagaccagcaagccg

SEQ ID NO: 6076833 - DNA, 25 bp, Homo sapien
agtagcgggccatgtaatggctggg

SEQ ID NO: 6076834 - DNA, 25 bp, Homo sapien
gaggtgagcaccaggcgggccttgg

SEQ ID NO: 6076835 - DNA, 25 bp, Homo sapien
cagcaacaaaaggcctgaggccgcc

SEQ ID NO: 6076836 - DNA, 25 bp, Homo sapien
cagcaaggtagaccagcaagccgaa

SEQ ID NO: 6076837 - DNA, 25 bp, Homo sapien
acaggtggtacacttggccccagca

SEQ ID NO: 6076838 - DNA, 25 bp, Homo sapien
caaggtagaccagcaagccgaacag

SEQ ID NO: 6076839 - DNA, 25 bp, Homo sapien
agcaaggtagaccagcaagccgaac

SEQ ID NO: 6076840 - DNA, 25 bp, Homo sapien
actggaataaatctgcgtgggtagg

SEQ ID NO: 6076841 - DNA, 25 bp, Homo sapien
aataaatctgcgtgggtaggagcag

SEQ ID NO: 6076842 - DNA, 25 bp, Homo sapien
gcgtgggtaggagcagtgccagcag

SEQ ID NO: 6076843 - DNA, 25 bp, Homo sapien
tcactggaataaatctgcgtgggta

SEQ ID NO: 6076844 - DNA, 25 bp, Homo sapien
gaataaatctgcgtgggtaggagca

SEQ ID NO: 6076845 - DNA, 25 bp, Homo sapien
tctgcgtgggtaggagcagtgccag

SEQ ID NO: 6076846 - DNA, 25 bp, Homo sapien
ctggaataaatctgcgtgggtagga

SEQ ID NO: 6076847 - DNA, 25 bp, Homo sapien
gaggagttacttgaagttccagttg

SEQ ID NO: 6076848 - DNA, 25 bp, Homo sapien
ataaatctgcgtgggtaggagcagt

SEQ ID NO: 6076849 - DNA, 25 bp, Homo sapien
gaccacgaagagactggctgttgac

SEQ ID NO: 6076850 - DNA, 25 bp, Homo sapien
cactggaataaatctgcgtgggtag

SEQ ID NO: 6076851 - DNA, 25 bp, Homo sapien
tggtggtggcattagttggatttgg

SEQ ID NO: 6076852 - DNA, 25 bp, Homo sapien
cagggtttcagcgagctccgggaca

SEQ ID NO: 6076853 - DNA, 25 bp, Homo sapien
ctccgggacactcggcaggagtagt

SEQ ID NO: 6076854 - DNA, 25 bp, Homo sapien
gcaggagtagtacccgcctccaaag

SEQ ID NO: 6076855 - DNA, 25 bp, Homo sapien
taggttcccggatatcccggataga

SEQ ID NO: 6076856 - DNA, 25 bp, Homo sapien
caaagtaaccataaggcacgggagc

SEQ ID NO: 6076857 - DNA, 25 bp, Homo sapien
gatatcccggatagaaggcaaactc

SEQ ID NO: 6076858 - DNA, 25 bp, Homo sapien
agatggtaatctggcgctccgagag

SEQ ID NO: 6076859 - DNA, 25 bp, Homo sapien
gtcatgtcgcggttctccaggagca

SEQ ID NO: 6076860 - DNA, 25 bp, Homo sapien
ggaatgcgtttcttgcggccgcgac

SEQ ID NO: 6076861 - DNA, 25 bp, Homo sapien
gagcccaagactggtaactgtccac

SEQ ID NO: 6076862 - DNA, 25 bp, Homo sapien
tccacaggcaacagggagtcatgtc

SEQ ID NO: 6076863 - DNA, 25 bp, Homo sapien
tgccccttgctgtacggaatgcgtt

SEQ ID NO: 6076864 - DNA, 25 bp, Homo sapien
aggtcttgaaagacctgcgtgaaga

SEQ ID NO: 6076865 - DNA, 25 bp, Homo sapien
tcgccctcgttcttgaggtcttgaa

SEQ ID NO: 6076866 - DNA, 25 bp, Homo sapien
cctcgttcttgaggtcttgaaagac

SEQ ID NO: 6076867 - DNA, 25 bp, Homo sapien
gctccacgaggaagggcttgagtgg

SEQ ID NO: 6076868 - DNA, 25 bp, Homo sapien
ggcagcgctgccagaagcgctcctt

SEQ ID NO: 6076869 - DNA, 25 bp, Homo sapien
gccctcgttcttgaggtcttgaaag

SEQ ID NO: 6076870 - DNA, 25 bp, Homo sapien
cagcgctgccagaagcgctccttgt

SEQ ID NO: 6076871 - DNA, 25 bp, Homo sapien
gttccggccgcgcagctgtccctgg

SEQ ID NO: 6076872 - DNA, 25 bp, Homo sapien
gggtcggcgttgagccgcagcatct

SEQ ID NO: 6076873 - DNA, 25 bp, Homo sapien
ggcctcgccctcgttcttgaggtct

SEQ ID NO: 6076874 - DNA, 25 bp, Homo sapien
ggtcttgaaagacctgcgtgaagaa

SEQ ID NO: 6076875 - DNA, 25 bp, Homo sapien
agcgctccttgtcgggctccacgag

SEQ ID NO: 6076876 - DNA, 25 bp, Homo sapien
cactcctagctccttcatgtattca

SEQ ID NO: 6076877 - DNA, 25 bp, Homo sapien
cccatttttcgcaaagctattccca

SEQ ID NO: 6076878 - DNA, 25 bp, Homo sapien
ggccattgcgcccatttttcgcaaa

SEQ ID NO: 6076879 - DNA, 25 bp, Homo sapien
tctgtaaagttgcagacagtctgag

SEQ ID NO: 6076880 - DNA, 25 bp, Homo sapien
ttcgcaaagctattcccactcctag

SEQ ID NO: 6076881 - DNA, 25 bp, Homo sapien
tatggtgaggtttttaccatcacaa

SEQ ID NO: 6076882 - DNA, 25 bp, Homo sapien
catgtattcatcaaagcctttgctg

SEQ ID NO: 6076883 - DNA, 25 bp, Homo sapien
tgacattgttcatgacacactccac

SEQ ID NO: 6076884 - DNA, 25 bp, Homo sapien
ggtgacattgttcatgacacactcc

SEQ ID NO: 6076885 - DNA, 25 bp, Homo sapien
ggtttttaccatcacaagtgatgat

SEQ ID NO: 6076886 - DNA, 25 bp, Homo sapien
gacagtctgagtttttctgccatca

SEQ ID NO: 6076887 - DNA, 25 bp, Homo sapien
tttgctgtccaccaggcgccatctt

SEQ ID NO: 6076888 - DNA, 25 bp, Homo sapien
agcaacacgcggaaaaagttggcgg

SEQ ID NO: 6076889 - DNA, 25 bp, Homo sapien
tcccatgcggagcaggaccggccga

SEQ ID NO: 6076890 - DNA, 25 bp, Homo sapien
gccgggctcttgttgaggttcccca

SEQ ID NO: 6076891 - DNA, 25 bp, Homo sapien
tccccaggcggaggaagtactcctc

SEQ ID NO: 6076892 - DNA, 25 bp, Homo sapien
ggactcccgcggacacaagcagcgg

SEQ ID NO: 6076893 - DNA, 25 bp, Homo sapien
tcttgttgaggttccccaggcggag

SEQ ID NO: 6076894 - DNA, 25 bp, Homo sapien
tgtgagcttgctgtgctaactgctc

SEQ ID NO: 6076895 - DNA, 25 bp, Homo sapien
atgggaggctcctcggaccgccttt

SEQ ID NO: 6076896 - DNA, 25 bp, Homo sapien
tggtggccgccgagggcattcctag

SEQ ID NO: 6076897 - DNA, 25 bp, Homo sapien
gcggaggaagtactcctctcccatg

SEQ ID NO: 6076898 - DNA, 25 bp, Homo sapien
tgctgcagcaacacgcggaaaaagt

SEQ ID NO: 6076899 - DNA, 25 bp, Homo sapien
ttgctgtgctaactgctcggccctg

SEQ ID NO: 6076900 - DNA, 25 bp, Homo sapien
cagctgcacatactaacatggaagt

SEQ ID NO: 6076901 - DNA, 25 bp, Homo sapien
aagataaaagacatatttacagaca

SEQ ID NO: 6076902 - DNA, 25 bp, Homo sapien
gcattgtttactggatgtacttcca

SEQ ID NO: 6076903 - DNA, 25 bp, Homo sapien
ttacagacatgttaagtacataaaa

SEQ ID NO: 6076904 - DNA, 25 bp, Homo sapien
tgtttactggatgtacttccatact

SEQ ID NO: 6076905 - DNA, 25 bp, Homo sapien
tggaacatccatacattgaaacact

SEQ ID NO: 6076906 - DNA, 25 bp, Homo sapien
catggcattgtttactggatgtact

SEQ ID NO: 6076907 - DNA, 25 bp, Homo sapien
tgttacagctgcacatactaacatg

SEQ ID NO: 6076908 - DNA, 25 bp, Homo sapien
cattgaaacactatgtggctactaa

SEQ ID NO: 6076909 - DNA, 25 bp, Homo sapien
cactatgtggctactaaaaaaagaa

SEQ ID NO: 6076910 - DNA, 25 bp, Homo sapien
tgtacatggcattgtttactggatg

SEQ ID NO: 6076911 - DNA, 25 bp, Homo sapien
ttacagctgcacatactaacatgga

SEQ ID NO: 6076912 - DNA, 25 bp, Homo sapien
cccaggcttgtcacttaatctttct

SEQ ID NO: 6076913 - DNA, 25 bp, Homo sapien
agcatcagtggcacacagagttctg

SEQ ID NO: 6076914 - DNA, 25 bp, Homo sapien
gagcatcagtggcacacagagttct

SEQ ID NO: 6076915 - DNA, 25 bp, Homo sapien
tgcctgttctccgtgggcacagagc

SEQ ID NO: 6076916 - DNA, 25 bp, Homo sapien
cagtaatggtaataatcactagaca

SEQ ID NO: 6076917 - DNA, 25 bp, Homo sapien
gcacaatgctatttgaaagttattt

SEQ ID NO: 6076918 - DNA, 25 bp, Homo sapien
gcctgttctccgtgggcacagagca

SEQ ID NO: 6076919 - DNA, 25 bp, Homo sapien
gacatgagagcctcatttggacaat

SEQ ID NO: 6076920 - DNA, 25 bp, Homo sapien
cctgttctccgtgggcacagagcat

SEQ ID NO: 6076921 - DNA, 25 bp, Homo sapien
gcagtaatggtaataatcactagac

SEQ ID NO: 6076922 - DNA, 25 bp, Homo sapien
cacacagagttctgcagtaatggta

SEQ ID NO: 6076923 - DNA, 25 bp, Homo sapien
ttctggctctgcaccgttccacagt

SEQ ID NO: 6076924 - DNA, 25 bp, Homo sapien
tggcagcctaccgagcaagacagga

SEQ ID NO: 6076925 - DNA, 25 bp, Homo sapien
aggagacgtgccggtccccaacaca

SEQ ID NO: 6076926 - DNA, 25 bp, Homo sapien
tgcctagacgtgtggactctccatg

SEQ ID NO: 6076927 - DNA, 25 bp, Homo sapien
tgcgggaatggcagcctaccgagca

SEQ ID NO: 6076928 - DNA, 25 bp, Homo sapien
ggactctccatgaaggctacgcttc

SEQ ID NO: 6076929 - DNA, 25 bp, Homo sapien
cagcctaccgagcaagacaggagac

SEQ ID NO: 6076930 - DNA, 25 bp, Homo sapien
agacaggagaccaagcaggagacgt

SEQ ID NO: 6076931 - DNA, 25 bp, Homo sapien
tgttggctgttaatgcgggaatggc

SEQ ID NO: 6076932 - DNA, 25 bp, Homo sapien
cctagacgtgtggactctccatgaa

SEQ ID NO: 6076933 - DNA, 25 bp, Homo sapien
gcctgcctagacgtgtggactctcc

SEQ ID NO: 6076934 - DNA, 25 bp, Homo sapien
actctccatgaaggctacgcttcag

SEQ ID NO: 6076935 - DNA, 25 bp, Homo sapien
gggaatggcagcctaccgagcaaga

SEQ ID NO: 6076936 - DNA, 25 bp, Homo sapien
gatctcgtcttccacctcatggtta

SEQ ID NO: 6076937 - DNA, 25 bp, Homo sapien
agtgcgtcgtgttgcaacgtacggt

SEQ ID NO: 6076938 - DNA, 25 bp, Homo sapien
attttccaaatcaccagaaacatta

SEQ ID NO: 6076939 - DNA, 25 bp, Homo sapien
tttccttcacggtcaagacctcttc

SEQ ID NO: 6076940 - DNA, 25 bp, Homo sapien
caaatcaccagaaacattaatcagt

SEQ ID NO: 6076941 - DNA, 25 bp, Homo sapien
gacgtctgcagctctgatcttcaca

SEQ ID NO: 6076942 - DNA, 25 bp, Homo sapien
aacattaatcagtaggttttccgtg

SEQ ID NO: 6076943 - DNA, 25 bp, Homo sapien
caccctctgggtctcaggtaatttc

SEQ ID NO: 6076944 - DNA, 25 bp, Homo sapien
tgcaacgtacggtgacattgctggg

SEQ ID NO: 6076945 - DNA, 25 bp, Homo sapien
tgctgggagggttgaatcgttctat

SEQ ID NO: 6076946 - DNA, 25 bp, Homo sapien
agtttgtctttgatctgtggaactg

SEQ ID NO: 6076947 - DNA, 25 bp, Homo sapien
gctccaattcaagatgcggacgtct

SEQ ID NO: 6076948 - DNA, 25 bp, Homo sapien
acagccgctgtatcctaaggaacca

SEQ ID NO: 6076949 - DNA, 25 bp, Homo sapien
tctgggctcagagcttggaaagttg

SEQ ID NO: 6076950 - DNA, 25 bp, Homo sapien
cgggaacagccgctgtatcctaagg

SEQ ID NO: 6076951 - DNA, 25 bp, Homo sapien
gcttggaaagttgtatctattttcc

SEQ ID NO: 6076952 - DNA, 25 bp, Homo sapien
gatgcggacgtctgcagctctgatc

SEQ ID NO: 6076953 - DNA, 25 bp, Homo sapien
ccccgtgtcgcggaggcggagatgt

SEQ ID NO: 6076954 - DNA, 25 bp, Homo sapien
cttcctctggggtgaattcctccca

SEQ ID NO: 6076955 - DNA, 25 bp, Homo sapien
agctggtactgaaagtccaggtacg

SEQ ID NO: 6076956 - DNA, 25 bp, Homo sapien
ccaggctgggtattctttctgtgga

SEQ ID NO: 6076957 - DNA, 25 bp, Homo sapien
ttctttctgtggacgtccagctggt

SEQ ID NO: 6076958 - DNA, 25 bp, Homo sapien
tctttgatctgtggaactggcggga

SEQ ID NO: 6076959 - DNA, 25 bp, Homo sapien
tcaagacctcttcgcggtagccttt

SEQ ID NO: 6076960 - DNA, 25 bp, Homo sapien
aaagttgtatctattttccaaatca

SEQ ID NO: 6076961 - DNA, 25 bp, Homo sapien
tgtcgcggaggcggagatgtccatg

SEQ ID NO: 6076962 - DNA, 25 bp, Homo sapien
aaattcaatggcttcactccaggag

SEQ ID NO: 6076963 - DNA, 25 bp, Homo sapien
acagttcccccgtgtcgcggaggcg

SEQ ID NO: 6076964 - DNA, 25 bp, Homo sapien
tagcctttcccttcctctggggtga

SEQ ID NO: 6076965 - DNA, 25 bp, Homo sapien
accagaaacattaatcagtaggttt

SEQ ID NO: 6076966 - DNA, 25 bp, Homo sapien
tcattcagtttgtctttgatctgtg

SEQ ID NO: 6076967 - DNA, 25 bp, Homo sapien
cagatgatctcgtcttccacctcat

SEQ ID NO: 6076968 - DNA, 25 bp, Homo sapien
ggttcacagcatcatcaagaaaaca

SEQ ID NO: 6076969 - DNA, 25 bp, Homo sapien
tgggtctcaggtaatttccttcacg

SEQ ID NO: 6076970 - DNA, 25 bp, Homo sapien
ttcactccaggagctccaattcaag

SEQ ID NO: 6076971 - DNA, 25 bp, Homo sapien
atctgtggaactggcgggaacagcc

SEQ ID NO: 6076972 - DNA, 25 bp, Homo sapien
caggtaatttccttcacggtcaaga

SEQ ID NO: 6076973 - DNA, 25 bp, Homo sapien
tctgatcttcacactgtgttttgct

SEQ ID NO: 6076974 - DNA, 25 bp, Homo sapien
aggtacgacagcttctgataggtcc

SEQ ID NO: 6076975 - DNA, 25 bp, Homo sapien
aactggcgggaacagccgctgtatc

SEQ ID NO: 6076976 - DNA, 25 bp, Homo sapien
tgccattcctacaccctctgggtct

SEQ ID NO: 6076977 - DNA, 25 bp, Homo sapien
ttcctacaccctctgggtctcaggt

SEQ ID NO: 6076978 - DNA, 25 bp, Homo sapien
gacagcttctgataggtcctgggct

SEQ ID NO: 6076979 - DNA, 25 bp, Homo sapien
ctgtggacgtccagctggtactgaa

SEQ ID NO: 6076980 - DNA, 25 bp, Homo sapien
acgaggcagtgcgtcgtgttgcaac

SEQ ID NO: 6076981 - DNA, 25 bp, Homo sapien
acctcatggttatcattcagtttgt

SEQ ID NO: 6076982 - DNA, 25 bp, Homo sapien
tggttatcattcagtttgtctttga

SEQ ID NO: 6076983 - DNA, 25 bp, Homo sapien
tgacattgctgggagggttgaatcg

SEQ ID NO: 6076984 - DNA, 25 bp, Homo sapien
ttttgctctgggctcagagcttgga

SEQ ID NO: 6076985 - DNA, 25 bp, Homo sapien
catagaaaatgatataaaggttcac

SEQ ID NO: 6076986 - DNA, 25 bp, Homo sapien
aatggcttcactccaggagctccaa

SEQ ID NO: 6076987 - DNA, 25 bp, Homo sapien
tcctcccagatgatctcgtcttcca

SEQ ID NO: 6076988 - DNA, 25 bp, Homo sapien
tactgaaagtccaggtacgacagct

SEQ ID NO: 6076989 - DNA, 25 bp, Homo sapien
ctcagagcttggaaagttgtatcta

SEQ ID NO: 6076990 - DNA, 25 bp, Homo sapien
taggtcctgggctgtttccaccgta

SEQ ID NO: 6076991 - DNA, 25 bp, Homo sapien
taaaaacatagaaaatgatataaag

SEQ ID NO: 6076992 - DNA, 25 bp, Homo sapien
tctggggtgaattcctcccagatga

SEQ ID NO: 6076993 - DNA, 25 bp, Homo sapien
ttctgataggtcctgggctgtttcc

SEQ ID NO: 6076994 - DNA, 25 bp, Homo sapien
tcttccacctcatggttatcattca

SEQ ID NO: 6076995 - DNA, 25 bp, Homo sapien
acgtccagctggtactgaaagtcca

SEQ ID NO: 6076996 - DNA, 25 bp, Homo sapien
tgtttccaccgtacgaggcagtgcg

SEQ ID NO: 6076997 - DNA, 25 bp, Homo sapien
ctgggctgtttccaccgtacgaggc

SEQ ID NO: 6076998 - DNA, 25 bp, Homo sapien
tgggtattctttctgtggacgtcca

SEQ ID NO: 6076999 - DNA, 25 bp, Homo sapien
tcctaaggaaccaaattcaatggct

SEQ ID NO: 6077000 - DNA, 25 bp, Homo sapien
gtatctattttccaaatcaccagaa

SEQ ID NO: 6077001 - DNA, 25 bp, Homo sapien
cagcatcatcaagaaaacagttccc

SEQ ID NO: 6077002 - DNA, 25 bp, Homo sapien
cggagatgtccatgccattcctaca

SEQ ID NO: 6077003 - DNA, 25 bp, Homo sapien
gtgaattcctcccagatgatctcgt

SEQ ID NO: 6077004 - DNA, 25 bp, Homo sapien
aaatgatataaaggttcacagcatc

SEQ ID NO: 6077005 - DNA, 25 bp, Homo sapien
gtacggtgacattgctgggagggtt

SEQ ID NO: 6077006 - DNA, 25 bp, Homo sapien
tgtccatgccattcctacaccctct

SEQ ID NO: 6077007 - DNA, 25 bp, Homo sapien
catcaagaaaacagttcccccgtgt

SEQ ID NO: 6077008 - DNA, 25 bp, Homo sapien
tcacggtcaagacctcttcgcggta

SEQ ID NO: 6077009 - DNA, 25 bp, Homo sapien
cggaggcggagatgtccatgccatt

SEQ ID NO: 6077010 - DNA, 25 bp, Homo sapien
caccgtacgaggcagtgcgtcgtgt

SEQ ID NO: 6077011 - DNA, 25 bp, Homo sapien
tccgtgccaggctgggtattctttc

SEQ ID NO: 6077012 - DNA, 25 bp, Homo sapien
taggttttccgtgccaggctgggta

SEQ ID NO: 6077013 - DNA, 25 bp, Homo sapien
cttcacactgtgttttgctctgggc

SEQ ID NO: 6077014 - DNA, 25 bp, Homo sapien
ccaggagctccaattcaagatgcgg

SEQ ID NO: 6077015 - DNA, 25 bp, Homo sapien
actgtgttttgctctgggctcagag

SEQ ID NO: 6077016 - DNA, 25 bp, Homo sapien
tataaaggttcacagcatcatcaag

SEQ ID NO: 6077017 - DNA, 25 bp, Homo sapien
aatcagtaggttttccgtgccaggc

SEQ ID NO: 6077018 - DNA, 25 bp, Homo sapien
ggaaccaaattcaatggcttcactc

SEQ ID NO: 6077019 - DNA, 25 bp, Homo sapien
attcaagatgcggacgtctgcagct

SEQ ID NO: 6077020 - DNA, 25 bp, Homo sapien
taaataaaaacatagaaaatgatat

SEQ ID NO: 6077021 - DNA, 25 bp, Homo sapien
tgcagctctgatcttcacactgtgt

SEQ ID NO: 6077022 - DNA, 25 bp, Homo sapien
tcgtgttgcaacgtacggtgacatt

SEQ ID NO: 6077023 - DNA, 25 bp, Homo sapien
aagtccaggtacgacagcttctgat

SEQ ID NO: 6077024 - DNA, 25 bp, Homo sapien
gctgtatcctaaggaaccaaattca

SEQ ID NO: 6077025 - DNA, 25 bp, Homo sapien
gccccaaatgtcatgtttttaaata

SEQ ID NO: 6077026 - DNA, 25 bp, Homo sapien
actcctgcctggcgatcgggaaagt

SEQ ID NO: 6077027 - DNA, 25 bp, Homo sapien
tcctgcctggcgatcgggaaagtcg

SEQ ID NO: 6077028 - DNA, 25 bp, Homo sapien
aaactcctgcctggcgatcgggaaa

SEQ ID NO: 6077029 - DNA, 25 bp, Homo sapien
aactcctgcctggcgatcgggaaag

SEQ ID NO: 6077030 - DNA, 25 bp, Homo sapien
ctcctgcctggcgatcgggaaagtc

SEQ ID NO: 6077031 - DNA, 25 bp, Homo sapien
gaaactcctgcctggcgatcgggaa

SEQ ID NO: 6077032 - DNA, 25 bp, Homo sapien
gggaagcatcatgagtacctcactg

SEQ ID NO: 6077033 - DNA, 25 bp, Homo sapien
gaggtgtaggtaacaatgaccagga

SEQ ID NO: 6077034 - DNA, 25 bp, Homo sapien
atgcccaacagctgccggtagcgga

SEQ ID NO: 6077035 - DNA, 25 bp, Homo sapien
cacgtacaatgtgatcagcactgag

SEQ ID NO: 6077036 - DNA, 25 bp, Homo sapien
agctgtgcagaggaacagaacgcac

SEQ ID NO: 6077037 - DNA, 25 bp, Homo sapien
tgatcagcactgagtggatcagcag

SEQ ID NO: 6077038 - DNA, 25 bp, Homo sapien
tggcctctgcatagatcctccagaa

SEQ ID NO: 6077039 - DNA, 25 bp, Homo sapien
gccacttgctgagccaaataaggaa

SEQ ID NO: 6077040 - DNA, 25 bp, Homo sapien
ccagagtcaatgtggtggtacctgg

SEQ ID NO: 6077041 - DNA, 25 bp, Homo sapien
tcatgagtacctcactgttagctgc

SEQ ID NO: 6077042 - DNA, 25 bp, Homo sapien
cagaacgcacagaatggaggtgtag

SEQ ID NO: 6077043 - DNA, 25 bp, Homo sapien
cacccctgtgctcacgtacaatgtg

SEQ ID NO: 6077044 - DNA, 25 bp, Homo sapien
acagagtctcattttgttgcccaag

SEQ ID NO: 6077045 - DNA, 25 bp, Homo sapien
ttagacagagtctcattttgttgcc

SEQ ID NO: 6077046 - DNA, 25 bp, Homo sapien
cattttgttgcccaagctggagtgc

SEQ ID NO: 6077047 - DNA, 25 bp, Homo sapien
accctcaacctgtcaggctcaagtg

SEQ ID NO: 6077048 - DNA, 25 bp, Homo sapien
ctccaccttccaggatcaagcgatt

SEQ ID NO: 6077049 - DNA, 25 bp, Homo sapien
tgtcaggctcaagtgagcctcccac

SEQ ID NO: 6077050 - DNA, 25 bp, Homo sapien
aagctggagtgcactggcacaatca

SEQ ID NO: 6077051 - DNA, 25 bp, Homo sapien
aggtgcacaccaccacggccagcta

SEQ ID NO: 6077052 - DNA, 25 bp, Homo sapien
accttccaggatcaagcgattctcc

SEQ ID NO: 6077053 - DNA, 25 bp, Homo sapien
caacctgtcaggctcaagtgagcct

SEQ ID NO: 6077054 - DNA, 25 bp, Homo sapien
cagtagttgggactacaggggcaca

SEQ ID NO: 6077055 - DNA, 25 bp, Homo sapien
gggcacaccactatgcctaattttt

SEQ ID NO: 6077056 - DNA, 25 bp, Homo sapien
tgtccggccacgttactgtatttta

SEQ ID NO: 6077057 - DNA, 25 bp, Homo sapien
cgtgtccggccacgttactgtattt

SEQ ID NO: 6077058 - DNA, 25 bp, Homo sapien
caatacctgcaacaactgtctctgg

SEQ ID NO: 6077059 - DNA, 25 bp, Homo sapien
accgtgtccggccacgttactgtat

SEQ ID NO: 6077060 - DNA, 25 bp, Homo sapien
ccgtgtccggccacgttactgtatt

SEQ ID NO: 6077061 - DNA, 25 bp, Homo sapien
gcaatacctgcaacaactgtctctg

SEQ ID NO: 6077062 - DNA, 25 bp, Homo sapien
aatacctgcaacaactgtctctggt

SEQ ID NO: 6077063 - DNA, 25 bp, Homo sapien
cagccttgcagaaggatcccctgct

SEQ ID NO: 6077064 - DNA, 25 bp, Homo sapien
gggcataaagggacctccgcaagtc

SEQ ID NO: 6077065 - DNA, 25 bp, Homo sapien
tcgtgatccgtttcccggtggtaga

SEQ ID NO: 6077066 - DNA, 25 bp, Homo sapien
tgccccttcgggcactgtctgcatt

SEQ ID NO: 6077067 - DNA, 25 bp, Homo sapien
tggccttgacgttacacttctctag

SEQ ID NO: 6077068 - DNA, 25 bp, Homo sapien
cacaaatctgtttcccggctggtgt

SEQ ID NO: 6077069 - DNA, 25 bp, Homo sapien
ccaggcagagggcataaagggacct

SEQ ID NO: 6077070 - DNA, 25 bp, Homo sapien
tgctcttccttaaggactgccggct

SEQ ID NO: 6077071 - DNA, 25 bp, Homo sapien
gaaatgggttccctggttgtcagcc

SEQ ID NO: 6077072 - DNA, 25 bp, Homo sapien
ttgctcttggccttgacgttacact

SEQ ID NO: 6077073 - DNA, 25 bp, Homo sapien
gactgccggctcctcgtgatccgtt

SEQ ID NO: 6077074 - DNA, 25 bp, Homo sapien
gggacctccgcaagtccacgttgct

SEQ ID NO: 6077075 - DNA, 25 bp, Homo sapien
caaggtgaccagtcgtgaggtttcc

SEQ ID NO: 6077076 - DNA, 25 bp, Homo sapien
aggctggtcaccgctggcctttgga

SEQ ID NO: 6077077 - DNA, 25 bp, Homo sapien
gggtgaccaggcaagcgtgaccctc

SEQ ID NO: 6077078 - DNA, 25 bp, Homo sapien
gtgaggtttcctaagcagccccagg

SEQ ID NO: 6077079 - DNA, 25 bp, Homo sapien
gaccagtcgtgaggtttcctaagca

SEQ ID NO: 6077080 - DNA, 25 bp, Homo sapien
tgcaaggtgaccagtcgtgaggttt

SEQ ID NO: 6077081 - DNA, 25 bp, Homo sapien
aggcaagcgtgaccctcgcgaggcc

SEQ ID NO: 6077082 - DNA, 25 bp, Homo sapien
cagtcgtgaggtttcctaagcagcc

SEQ ID NO: 6077083 - DNA, 25 bp, Homo sapien
gaagccacatctgaccgcagtttag

SEQ ID NO: 6077084 - DNA, 25 bp, Homo sapien
ttgggattgtagcaattctgtgtga

SEQ ID NO: 6077085 - DNA, 25 bp, Homo sapien
cacatctgaccgcagtttagagaca

SEQ ID NO: 6077086 - DNA, 25 bp, Homo sapien
cccagggtgaccaggcaagcgtgac

SEQ ID NO: 6077087 - DNA, 25 bp, Homo sapien
cccagtgtctttctcgggatcgaga

SEQ ID NO: 6077088 - DNA, 25 bp, Homo sapien
catctcggtaagctttgatcacggc

SEQ ID NO: 6077089 - DNA, 25 bp, Homo sapien
gatcacggcacgctcctccttgtat

SEQ ID NO: 6077090 - DNA, 25 bp, Homo sapien
caggccatcagcatctcggtaagct

SEQ ID NO: 6077091 - DNA, 25 bp, Homo sapien
tccacaaatatctcatgctggtcaa

SEQ ID NO: 6077092 - DNA, 25 bp, Homo sapien
tcacgctgcgttgaaagacaatccc

SEQ ID NO: 6077093 - DNA, 25 bp, Homo sapien
tgctggtcaataaccaggccatcag

SEQ ID NO: 6077094 - DNA, 25 bp, Homo sapien
gagtcctttccagctcgtagtccac

SEQ ID NO: 6077095 - DNA, 25 bp, Homo sapien
cttgtattcgatgaaggcgtagccc

SEQ ID NO: 6077096 - DNA, 25 bp, Homo sapien
ctatagaggtcgtttttaacaactg

SEQ ID NO: 6077097 - DNA, 25 bp, Homo sapien
gcgtagccctttgaaaaacctgtga

SEQ ID NO: 6077098 - DNA, 25 bp, Homo sapien
aagtcgccgagggatccaccctttg

SEQ ID NO: 6077099 - DNA, 25 bp, Homo sapien
attttcatggccctcctatgggcct

SEQ ID NO: 6077100 - DNA, 25 bp, Homo sapien
tgtgctggagtctctagagcccaag

SEQ ID NO: 6077101 - DNA, 25 bp, Homo sapien
tcacagctgtctgtcgcagcttgct

SEQ ID NO: 6077102 - DNA, 25 bp, Homo sapien
aaatttctagtatgtctcaccaagg

SEQ ID NO: 6077103 - DNA, 25 bp, Homo sapien
taagaagcataacaatcattccgtt

SEQ ID NO: 6077104 - DNA, 25 bp, Homo sapien
gcttcaaatttctagtatgtctcac

SEQ ID NO: 6077105 - DNA, 25 bp, Homo sapien
cctatgggcctctgtgctggagtct

SEQ ID NO: 6077106 - DNA, 25 bp, Homo sapien
tctagcactaaactgtcaaaaatca

SEQ ID NO: 6077107 - DNA, 25 bp, Homo sapien
aaaatgaactatgaagaggaaaagg

SEQ ID NO: 6077108 - DNA, 25 bp, Homo sapien
agtggcacgagggaaaggcatttaa

SEQ ID NO: 6077109 - DNA, 25 bp, Homo sapien
aactttatgtacttgttgttccaca

SEQ ID NO: 6077110 - DNA, 25 bp, Homo sapien
ggctaacatgacaaactttatgtac

SEQ ID NO: 6077111 - DNA, 25 bp, Homo sapien
ggctgctccccaatgggcaagactg

SEQ ID NO: 6077112 - DNA, 25 bp, Homo sapien
gctgctccccaatgggcaagactgc

SEQ ID NO: 6077113 - DNA, 25 bp, Homo sapien
ctgctccccaatgggcaagactgct

SEQ ID NO: 6077114 - DNA, 25 bp, Homo sapien
ggggctgctccccaatgggcaagac

SEQ ID NO: 6077115 - DNA, 25 bp, Homo sapien
gggggctgctccccaatgggcaaga

SEQ ID NO: 6077116 - DNA, 25 bp, Homo sapien
gggctgctccccaatgggcaagact

SEQ ID NO: 6077117 - DNA, 25 bp, Homo sapien
tgctccccaatgggcaagactgctg

SEQ ID NO: 6077118 - DNA, 25 bp, Homo sapien
cggggggctgctccccaatgggcaa

SEQ ID NO: 6077119 - DNA, 25 bp, Homo sapien
gagaggaagccgatagccagcattg

SEQ ID NO: 6077120 - DNA, 25 bp, Homo sapien
ggggggctgctccccaatgggcaag

SEQ ID NO: 6077121 - DNA, 25 bp, Homo sapien
agaggaagccgatagccagcattgc

SEQ ID NO: 6077122 - DNA, 25 bp, Homo sapien
gctccccaatgggcaagactgctgg

SEQ ID NO: 6077123 - DNA, 25 bp, Homo sapien
cccacaaggcagcatgacaccttgg

SEQ ID NO: 6077124 - DNA, 25 bp, Homo sapien
caaggcagcatgacaccttggctgg

SEQ ID NO: 6077125 - DNA, 25 bp, Homo sapien
acaaggcagcatgacaccttggctg

SEQ ID NO: 6077126 - DNA, 25 bp, Homo sapien
aaggcagcatgacaccttggctggg

SEQ ID NO: 6077127 - DNA, 25 bp, Homo sapien
gagtcgctggggttcctcagtcacc

SEQ ID NO: 6077128 - DNA, 25 bp, Homo sapien
cacaaggcagcatgacaccttggct

SEQ ID NO: 6077129 - DNA, 25 bp, Homo sapien
gtcaccccacaaggcagcatgacac

SEQ ID NO: 6077130 - DNA, 25 bp, Homo sapien
tcaccggctccccatcctctggttg

SEQ ID NO: 6077131 - DNA, 25 bp, Homo sapien
ccatcctctggttggaacacatcat

SEQ ID NO: 6077132 - DNA, 25 bp, Homo sapien
tcctctggttggaacacatcatcct

SEQ ID NO: 6077133 - DNA, 25 bp, Homo sapien
caccacacacgattttggttctgct

SEQ ID NO: 6077134 - DNA, 25 bp, Homo sapien
taaaagagtcgctggggttcctcag

SEQ ID NO: 6077135 - DNA, 25 bp, Homo sapien
caggaaatgctggtcgtcgagtata

SEQ ID NO: 6077136 - DNA, 25 bp, Homo sapien
tagtctcaggagtattggtctcagg

SEQ ID NO: 6077137 - DNA, 25 bp, Homo sapien
tttggtcacccgagttagcaaccca

SEQ ID NO: 6077138 - DNA, 25 bp, Homo sapien
tatatcctctaggtgaatcacagga

SEQ ID NO: 6077139 - DNA, 25 bp, Homo sapien
tcagatggtggcatagtagtctcgg

SEQ ID NO: 6077140 - DNA, 25 bp, Homo sapien
cagatcattcaacatagatactggg

SEQ ID NO: 6077141 - DNA, 25 bp, Homo sapien
catagtctcggaagtagcagtctca

SEQ ID NO: 6077142 - DNA, 25 bp, Homo sapien
tagcaacccacagataatgaaggtc

SEQ ID NO: 6077143 - DNA, 25 bp, Homo sapien
taaacatcgtcttctgcaatgtcct

SEQ ID NO: 6077144 - DNA, 25 bp, Homo sapien
gcagcatgatagcttgttcctacaa

SEQ ID NO: 6077145 - DNA, 25 bp, Homo sapien
tagtctcgggagtagtggcctcaga

SEQ ID NO: 6077146 - DNA, 25 bp, Homo sapien
ggtctcaggtgtcatggtttctcca

SEQ ID NO: 6077147 - DNA, 25 bp, Homo sapien
cctgcaatgtccttgtacatagtta

SEQ ID NO: 6077148 - DNA, 25 bp, Homo sapien
aattgcaatgatcatgaagagcccc

SEQ ID NO: 6077149 - DNA, 25 bp, Homo sapien
tgtccttgtacatagttattccagc

SEQ ID NO: 6077150 - DNA, 25 bp, Homo sapien
agtatctcccattttcacatagtgc

SEQ ID NO: 6077151 - DNA, 25 bp, Homo sapien
catagttattccagcacttcttaag

SEQ ID NO: 6077152 - DNA, 25 bp, Homo sapien
tgtacatagttattccagcacttct

SEQ ID NO: 6077153 - DNA, 25 bp, Homo sapien
ttcctgcaatgtccttgtacatagt

SEQ ID NO: 6077154 - DNA, 25 bp, Homo sapien
cattttcacatagtgcctcaggcac

SEQ ID NO: 6077155 - DNA, 25 bp, Homo sapien
agaattgcaatgatcatgaagagcc

SEQ ID NO: 6077156 - DNA, 25 bp, Homo sapien
tcccattttcacatagtgcctcagg

SEQ ID NO: 6077157 - DNA, 25 bp, Homo sapien
agtcagtgcaagtgttgctggcttt

SEQ ID NO: 6077158 - DNA, 25 bp, Homo sapien
agttattccagcacttcttaagttg

SEQ ID NO: 6077159 - DNA, 25 bp, Homo sapien
cataatttcccacttagacatccta

SEQ ID NO: 6077160 - DNA, 25 bp, Homo sapien
tctcaccagaatgttgatgtggctt

SEQ ID NO: 6077161 - DNA, 25 bp, Homo sapien
gatgatgtaatcctgcagcacactc

SEQ ID NO: 6077162 - DNA, 25 bp, Homo sapien
tcctgcaatagcctgttactttatt

SEQ ID NO: 6077163 - DNA, 25 bp, Homo sapien
tttcccacttagacatcctatttca

SEQ ID NO: 6077164 - DNA, 25 bp, Homo sapien
accagaatgttgatgtggcttctta

SEQ ID NO: 6077165 - DNA, 25 bp, Homo sapien
tcaccagaatgttgatgtggcttct

SEQ ID NO: 6077166 - DNA, 25 bp, Homo sapien
caaacagcagaataatgagaaccag

SEQ ID NO: 6077167 - DNA, 25 bp, Homo sapien
ctgtgagtacctcaaacagcagaat

SEQ ID NO: 6077168 - DNA, 25 bp, Homo sapien
tcatcattagcacaacataatttcc

SEQ ID NO: 6077169 - DNA, 25 bp, Homo sapien
cttcatcattagcacaacataattt

SEQ ID NO: 6077170 - DNA, 25 bp, Homo sapien
cagcagaataatgagaaccagaaac

SEQ ID NO: 6077171 - DNA, 25 bp, Homo sapien
ttttagcatttcttggacgtcttca

SEQ ID NO: 6077172 - DNA, 25 bp, Homo sapien
ggtgttactcttggtagaagtagca

SEQ ID NO: 6077173 - DNA, 25 bp, Homo sapien
tcatccacattgcagtgatccctgc

SEQ ID NO: 6077174 - DNA, 25 bp, Homo sapien
tgttcacctggtactgtagcatgag

SEQ ID NO: 6077175 - DNA, 25 bp, Homo sapien
cctggtactgtagcatgaggctggc

SEQ ID NO: 6077176 - DNA, 25 bp, Homo sapien
tcacagcactagaattcttggcagg

SEQ ID NO: 6077177 - DNA, 25 bp, Homo sapien
tcttggacgtcttcattaagtacat

SEQ ID NO: 6077178 - DNA, 25 bp, Homo sapien
tgaggctggcaaagataggaaaaag

SEQ ID NO: 6077179 - DNA, 25 bp, Homo sapien
gaagtagcagtgtatgtgatctgtc

SEQ ID NO: 6077180 - DNA, 25 bp, Homo sapien
gaatgatgacaaagttggtattagc

SEQ ID NO: 6077181 - DNA, 25 bp, Homo sapien
tggtattagcaaaaaagctagtgct

SEQ ID NO: 6077182 - DNA, 25 bp, Homo sapien
ccattaaacagcgtctcaagccaat

SEQ ID NO: 6077183 - DNA, 25 bp, Homo sapien
gaagcgttgcacatgaacaatgctg

SEQ ID NO: 6077184 - DNA, 25 bp, Homo sapien
tgcacatgaacaatgctgtctcccc

SEQ ID NO: 6077185 - DNA, 25 bp, Homo sapien
ccagtggttaccgatgagctgtggt

SEQ ID NO: 6077186 - DNA, 25 bp, Homo sapien
gtcaggaatccgagggctgccaaga

SEQ ID NO: 6077187 - DNA, 25 bp, Homo sapien
ggaatccgagggctgccaagaccag

SEQ ID NO: 6077188 - DNA, 25 bp, Homo sapien
tctggaagcgttgcacatgaacaat

SEQ ID NO: 6077189 - DNA, 25 bp, Homo sapien
cagtatcctggggtgttactcacac

SEQ ID NO: 6077190 - DNA, 25 bp, Homo sapien
ggcaacatgtcctgcagtatcctgg

SEQ ID NO: 6077191 - DNA, 25 bp, Homo sapien
cattttctggaagcgttgcacatga

SEQ ID NO: 6077192 - DNA, 25 bp, Homo sapien
ttactcacacattttgacccacctg

SEQ ID NO: 6077193 - DNA, 25 bp, Homo sapien
ttaccgatgagctgtggtaggtcag

SEQ ID NO: 6077194 - DNA, 25 bp, Homo sapien
tagctgatgcagcattttctggaag

SEQ ID NO: 6077195 - DNA, 25 bp, Homo sapien
taacttcatgtatagccctgtgtaa

SEQ ID NO: 6077196 - DNA, 25 bp, Homo sapien
gaaaatggcactatatcacatacag

SEQ ID NO: 6077197 - DNA, 25 bp, Homo sapien
taaatggaatcctgctacatgtatg

SEQ ID NO: 6077198 - DNA, 25 bp, Homo sapien
tatgctatatataacagtctatgcc

SEQ ID NO: 6077199 - DNA, 25 bp, Homo sapien
aacaccacaggactccctcgtatga

SEQ ID NO: 6077200 - DNA, 25 bp, Homo sapien
tcacatacagtacggatacatattg

SEQ ID NO: 6077201 - DNA, 25 bp, Homo sapien
cattggtacagtctacagaacatac

SEQ ID NO: 6077202 - DNA, 25 bp, Homo sapien
cagtctatgccagataataatgtaa

SEQ ID NO: 6077203 - DNA, 25 bp, Homo sapien
tacagcagttactgaaaatggcact

SEQ ID NO: 6077204 - DNA, 25 bp, Homo sapien
catctgtactcctttgtgtacctaa

SEQ ID NO: 6077205 - DNA, 25 bp, Homo sapien
gcacagcatcaggacgcagaaattg

SEQ ID NO: 6077206 - DNA, 25 bp, Homo sapien
tgtgtaaccaccagtcaggctgaca

SEQ ID NO: 6077207 - DNA, 25 bp, Homo sapien
agcgatctccacaaggcgcggaaca

SEQ ID NO: 6077208 - DNA, 25 bp, Homo sapien
tgtggctcttgccatctcgtggcat

SEQ ID NO: 6077209 - DNA, 25 bp, Homo sapien
gatcctggctgaaaggttttaccag

SEQ ID NO: 6077210 - DNA, 25 bp, Homo sapien
tatttgttcccgaattggtccgtgc

SEQ ID NO: 6077211 - DNA, 25 bp, Homo sapien
cttgccatctcgtggcatccaggat

SEQ ID NO: 6077212 - DNA, 25 bp, Homo sapien
tgaaaggttttaccagtgctgctgg

SEQ ID NO: 6077213 - DNA, 25 bp, Homo sapien
tcccttgacagcgatctccacaagg

SEQ ID NO: 6077214 - DNA, 25 bp, Homo sapien
caaggcgcggaacaaatcctgagac

SEQ ID NO: 6077215 - DNA, 25 bp, Homo sapien
cgaattggtccgtgcccacgtgctc

SEQ ID NO: 6077216 - DNA, 25 bp, Homo sapien
ggaacaaatcctgagaccaacccat

SEQ ID NO: 6077217 - DNA, 25 bp, Homo sapien
ccatagtaggtggagtctttcttgt

SEQ ID NO: 6077218 - DNA, 25 bp, Homo sapien
cctcactggtctctttactaaggag

SEQ ID NO: 6077219 - DNA, 25 bp, Homo sapien
atcccatttcctagtctgcagcctt

SEQ ID NO: 6077220 - DNA, 25 bp, Homo sapien
agctatcttaaacctggaatcccat

SEQ ID NO: 6077221 - DNA, 25 bp, Homo sapien
aggagctatcttaaacctggaatcc

SEQ ID NO: 6077222 - DNA, 25 bp, Homo sapien
tgactaggtgactaggtgaaggact

SEQ ID NO: 6077223 - DNA, 25 bp, Homo sapien
gaatcccatttcctagtctgcagcc

SEQ ID NO: 6077224 - DNA, 25 bp, Homo sapien
aatcccatttcctagtctgcagcct

SEQ ID NO: 6077225 - DNA, 25 bp, Homo sapien
ggaatcccatttcctagtctgcagc

SEQ ID NO: 6077226 - DNA, 25 bp, Homo sapien
ccctgtgactaggtgactaggtgaa

SEQ ID NO: 6077227 - DNA, 25 bp, Homo sapien
actaggtgactaggtgaaggactga

SEQ ID NO: 6077228 - DNA, 25 bp, Homo sapien
accctgtgactaggtgactaggtga

SEQ ID NO: 6077229 - DNA, 25 bp, Homo sapien
ggagctatcttaaacctggaatccc

SEQ ID NO: 6077230 - DNA, 25 bp, Homo sapien
gagctatcttaaacctggaatccca

SEQ ID NO: 6077231 - DNA, 25 bp, Homo sapien
cccttatggccaattgtttaatcaa

SEQ ID NO: 6077232 - DNA, 25 bp, Homo sapien
gctaaggtatagcaactggttgcct

SEQ ID NO: 6077233 - DNA, 25 bp, Homo sapien
tgcatggtccatagacagctaaggt

SEQ ID NO: 6077234 - DNA, 25 bp, Homo sapien
accagccttgtgattagagggtcag

SEQ ID NO: 6077235 - DNA, 25 bp, Homo sapien
ccatagagaattggagaatccattt

SEQ ID NO: 6077236 - DNA, 25 bp, Homo sapien
caaattagcaaggagttagcatcag

SEQ ID NO: 6077237 - DNA, 25 bp, Homo sapien
ttggtgaacacatccgcttactggg

SEQ ID NO: 6077238 - DNA, 25 bp, Homo sapien
atccatttgtatgtgggaaaactcc

SEQ ID NO: 6077239 - DNA, 25 bp, Homo sapien
catgactatgtaatgggatctccac

SEQ ID NO: 6077240 - DNA, 25 bp, Homo sapien
tcatgctcaggaccctttaaaacct

SEQ ID NO: 6077241 - DNA, 25 bp, Homo sapien
cctaaacaacaaggctcagagtgct

SEQ ID NO: 6077242 - DNA, 25 bp, Homo sapien
ttgcctgaggaaccagccttgtgat

SEQ ID NO: 6077243 - DNA, 25 bp, Homo sapien
taataatattccaggccaatcttgg

SEQ ID NO: 6077244 - DNA, 25 bp, Homo sapien
tacgttcaatcaaactgcaaaggcg

SEQ ID NO: 6077245 - DNA, 25 bp, Homo sapien
caatcaaactgcaaaggcgtggaca

SEQ ID NO: 6077246 - DNA, 25 bp, Homo sapien
gtcctttcatgttcagcatacttac

SEQ ID NO: 6077247 - DNA, 25 bp, Homo sapien
ggcgtggacattggttttgtctcac

SEQ ID NO: 6077248 - DNA, 25 bp, Homo sapien
gcagatttggttatccctagtatga

SEQ ID NO: 6077249 - DNA, 25 bp, Homo sapien
ttctctcaagtagggataatttggt

SEQ ID NO: 6077250 - DNA, 25 bp, Homo sapien
tatgatttcaaagatgtgtagtctg

SEQ ID NO: 6077251 - DNA, 25 bp, Homo sapien
catgttcagcatacttacaggattt

SEQ ID NO: 6077252 - DNA, 25 bp, Homo sapien
ctcctttatacgttcaatcaaactg

SEQ ID NO: 6077253 - DNA, 25 bp, Homo sapien
tagggataatttggtaaaggctgaa

SEQ ID NO: 6077254 - DNA, 25 bp, Homo sapien
caaatgttgtctggtagttattctg

SEQ ID NO: 6077255 - DNA, 25 bp, Homo sapien
agtccaggctgtatgtgtggcccga

SEQ ID NO: 6077256 - DNA, 25 bp, Homo sapien
agctgggccccacaagtcagtctct

SEQ ID NO: 6077257 - DNA, 25 bp, Homo sapien
gatgcccgatgtagcaaataaaatg

SEQ ID NO: 6077258 - DNA, 25 bp, Homo sapien
tggccaccgaatcagaaccagctgg

SEQ ID NO: 6077259 - DNA, 25 bp, Homo sapien
tagtgtggctgactccagtgaaaca

SEQ ID NO: 6077260 - DNA, 25 bp, Homo sapien
cattgcaaacaagtccttgggtagc

SEQ ID NO: 6077261 - DNA, 25 bp, Homo sapien
cagaaagttcaggtgttcccatgtc

SEQ ID NO: 6077262 - DNA, 25 bp, Homo sapien
tccttgggtagctctcagggttcac

SEQ ID NO: 6077263 - DNA, 25 bp, Homo sapien
gatgggcctgacataagccagtcca

SEQ ID NO: 6077264 - DNA, 25 bp, Homo sapien
tattgtcctcatggtgacaaccagg

SEQ ID NO: 6077265 - DNA, 25 bp, Homo sapien
ttggccacttctcatactaaaagag

SEQ ID NO: 6077266 - DNA, 25 bp, Homo sapien
gccacataatttgttcccttgaggt

SEQ ID NO: 6077267 - DNA, 25 bp, Homo sapien
caaggtcttataatagtagctgaaa

SEQ ID NO: 6077268 - DNA, 25 bp, Homo sapien
taataagggctaactagatgtgttc

SEQ ID NO: 6077269 - DNA, 25 bp, Homo sapien
cactttatcagcagcacattgccaa

SEQ ID NO: 6077270 - DNA, 25 bp, Homo sapien
ggagatactctaatacactttatca

SEQ ID NO: 6077271 - DNA, 25 bp, Homo sapien
aaatcaatctttgctcacaagggag

SEQ ID NO: 6077272 - DNA, 25 bp, Homo sapien
tgttttctacaagaacgatgtatgc

SEQ ID NO: 6077273 - DNA, 25 bp, Homo sapien
ttggatgaagatttaggagatactc

SEQ ID NO: 6077274 - DNA, 25 bp, Homo sapien
cattgccaaagcatctcctagagta

SEQ ID NO: 6077275 - DNA, 25 bp, Homo sapien
tgctattgctaacttcaatgtcaga

SEQ ID NO: 6077276 - DNA, 25 bp, Homo sapien
gggatagttagcagcagataaaaat

SEQ ID NO: 6077277 - DNA, 25 bp, Homo sapien
tggtgcttatggcacacggagctga

SEQ ID NO: 6077278 - DNA, 25 bp, Homo sapien
gacaaggccacaggaatcaattcac

SEQ ID NO: 6077279 - DNA, 25 bp, Homo sapien
tgaaaaatcgccagcatagccaggg

SEQ ID NO: 6077280 - DNA, 25 bp, Homo sapien
tgcctcttgcgcctatccgaagttt

SEQ ID NO: 6077281 - DNA, 25 bp, Homo sapien
tttcctcggattaagaagaaacagc

SEQ ID NO: 6077282 - DNA, 25 bp, Homo sapien
caattatctgtagccgacgtacccc

SEQ ID NO: 6077283 - DNA, 25 bp, Homo sapien
tctacatgagtgaaaaatcgccagc

SEQ ID NO: 6077284 - DNA, 25 bp, Homo sapien
aaattatgtaggcatggttaaagcc

SEQ ID NO: 6077285 - DNA, 25 bp, Homo sapien
taaaccggtatttgcgacaccaaca

SEQ ID NO: 6077286 - DNA, 25 bp, Homo sapien
cgctgccagaacaagatacaccaaa

SEQ ID NO: 6077287 - DNA, 25 bp, Homo sapien
taaaccgcacgcatggctataatgg

SEQ ID NO: 6077288 - DNA, 25 bp, Homo sapien
taatacaggagttataaaccgcacg

SEQ ID NO: 6077289 - DNA, 25 bp, Homo sapien
tagccagggcgagactattgcgaat

SEQ ID NO: 6077290 - DNA, 25 bp, Homo sapien
caaacagggtcgaatggtgagatcc

SEQ ID NO: 6077291 - DNA, 25 bp, Homo sapien
cctggcacttgtggtagagaagagc

SEQ ID NO: 6077292 - DNA, 25 bp, Homo sapien
tcaagtttgcgctgtaccagctggc

SEQ ID NO: 6077293 - DNA, 25 bp, Homo sapien
tacttgttatagcaggagccaatgc

SEQ ID NO: 6077294 - DNA, 25 bp, Homo sapien
agccagcgtgcacagcaccaagaag

SEQ ID NO: 6077295 - DNA, 25 bp, Homo sapien
tgctgctgcccaccgtgagcaggaa

SEQ ID NO: 6077296 - DNA, 25 bp, Homo sapien
gaagatacgatgcaccacaggacta

SEQ ID NO: 6077297 - DNA, 25 bp, Homo sapien
ggccgtcgggcctcatagtccagtg

SEQ ID NO: 6077298 - DNA, 25 bp, Homo sapien
tgcagaggctcatagatgggccgtc

SEQ ID NO: 6077299 - DNA, 25 bp, Homo sapien
gttggtggccctgcccgaagacatg

SEQ ID NO: 6077300 - DNA, 25 bp, Homo sapien
gactaatgtccagtgcgtaggccag

SEQ ID NO: 6077301 - DNA, 25 bp, Homo sapien
aagatgtggaaaagttggtggccct

SEQ ID NO: 6077302 - DNA, 25 bp, Homo sapien
ccagtgcgtgtgcagaggctcatag

SEQ ID NO: 6077303 - DNA, 25 bp, Homo sapien
gcttaaagaagcttgtgttactgaa

SEQ ID NO: 6077304 - DNA, 25 bp, Homo sapien
tgagcctgtgacttcagaccccttg

SEQ ID NO: 6077305 - DNA, 25 bp, Homo sapien
tatcctacgggatcagagtcatcta

SEQ ID NO: 6077306 - DNA, 25 bp, Homo sapien
tactgaagttaacgcagaagtctgg

SEQ ID NO: 6077307 - DNA, 25 bp, Homo sapien
aggcattatcaggaacgcagccagg

SEQ ID NO: 6077308 - DNA, 25 bp, Homo sapien
catcctcaaatcagacagtctgttt

SEQ ID NO: 6077309 - DNA, 25 bp, Homo sapien
taatgaagatctagcccttccatgc

SEQ ID NO: 6077310 - DNA, 25 bp, Homo sapien
tgggtaagaggaccatcatccatat

SEQ ID NO: 6077311 - DNA, 25 bp, Homo sapien
tgtcacctgtgataataaaacctct

SEQ ID NO: 6077312 - DNA, 25 bp, Homo sapien
catttctttagagtttggcgtcagt

SEQ ID NO: 6077313 - DNA, 25 bp, Homo sapien
ggcacctgccttgaacattgctaca

SEQ ID NO: 6077314 - DNA, 25 bp, Homo sapien
tattagaaacagtgatagccctggg

SEQ ID NO: 6077315 - DNA, 25 bp, Homo sapien
tacagagaagcagttactagagcac

SEQ ID NO: 6077316 - DNA, 25 bp, Homo sapien
tacatatgagtaacgaagaaactgc

SEQ ID NO: 6077317 - DNA, 25 bp, Homo sapien
ctagagcactgcttaccatgaggct

SEQ ID NO: 6077318 - DNA, 25 bp, Homo sapien
tctctgactgatggaaggttaatgt

SEQ ID NO: 6077319 - DNA, 25 bp, Homo sapien
cgatgagatttgtacagagaagcag

SEQ ID NO: 6077320 - DNA, 25 bp, Homo sapien
gacaggtaagtagaacgatgagatt

SEQ ID NO: 6077321 - DNA, 25 bp, Homo sapien
gtgtttgctgatttacaagatgggt

SEQ ID NO: 6077322 - DNA, 25 bp, Homo sapien
tttgccactacaaagccaatgaatg

SEQ ID NO: 6077323 - DNA, 25 bp, Homo sapien
taaattgggctaatgcataaaaatg

SEQ ID NO: 6077324 - DNA, 25 bp, Homo sapien
tacaagatgggtttgaatatcacaa

SEQ ID NO: 6077325 - DNA, 25 bp, Homo sapien
tgtagaatgtgctttgacaggtaag

SEQ ID NO: 6077326 - DNA, 25 bp, Homo sapien
ctaaagtgtatctgtttacagtaca

SEQ ID NO: 6077327 - DNA, 25 bp, Homo sapien
tagctcacacaggttccactgagtg

SEQ ID NO: 6077328 - DNA, 25 bp, Homo sapien
tgccaaaggatgacagttgcaatcc

SEQ ID NO: 6077329 - DNA, 25 bp, Homo sapien
tacagtcccctagtaactgagttca

SEQ ID NO: 6077330 - DNA, 25 bp, Homo sapien
gacacctgtccatctgcgttctcaa

SEQ ID NO: 6077331 - DNA, 25 bp, Homo sapien
cataatgcagcagaacatgtagctc

SEQ ID NO: 6077332 - DNA, 25 bp, Homo sapien
ccatctgcgttctcaatctggagta

SEQ ID NO: 6077333 - DNA, 25 bp, Homo sapien
ttttctggcaagatgtcaatctggc

SEQ ID NO: 6077334 - DNA, 25 bp, Homo sapien
caggctcaagagacacctgtccatc

SEQ ID NO: 6077335 - DNA, 25 bp, Homo sapien
tggaagacacatgtgacaattactg

SEQ ID NO: 6077336 - DNA, 25 bp, Homo sapien
taggtccccacataaagatccagat

SEQ ID NO: 6077337 - DNA, 25 bp, Homo sapien
gcaagatgtcaatctggccctttga

SEQ ID NO: 6077338 - DNA, 25 bp, Homo sapien
ctgagtgtgccaaaggatgacagtt

SEQ ID NO: 6077339 - DNA, 25 bp, Homo sapien
taatgacaggaattaggatcttgtc

SEQ ID NO: 6077340 - DNA, 25 bp, Homo sapien
tcaaaggcaagggtctagcagacag

SEQ ID NO: 6077341 - DNA, 25 bp, Homo sapien
tgtatctaattagaaagctatggga

SEQ ID NO: 6077342 - DNA, 25 bp, Homo sapien
ggtacttaggtcactaatgacagga

SEQ ID NO: 6077343 - DNA, 25 bp, Homo sapien
cattagaaaataggatacctgtaca

SEQ ID NO: 6077344 - DNA, 25 bp, Homo sapien
tatttgtggcttaatgtttcacctg

SEQ ID NO: 6077345 - DNA, 25 bp, Homo sapien
cctttaaggcttacatccatgacag

SEQ ID NO: 6077346 - DNA, 25 bp, Homo sapien
gctatgggaatcaatgctaccttcc

SEQ ID NO: 6077347 - DNA, 25 bp, Homo sapien
tggcacacgaaatttgccccaaaga

SEQ ID NO: 6077348 - DNA, 25 bp, Homo sapien
tatgtacaagattagtattaactcc

SEQ ID NO: 6077349 - DNA, 25 bp, Homo sapien
tgtccctagatctgttttgcaaagt

SEQ ID NO: 6077350 - DNA, 25 bp, Homo sapien
tagcataatctcatcccattgcact

SEQ ID NO: 6077351 - DNA, 25 bp, Homo sapien
aaggcgttatttagcttgtgcatcc

SEQ ID NO: 6077352 - DNA, 25 bp, Homo sapien
agttcttggccagcgtgagcgtctc

SEQ ID NO: 6077353 - DNA, 25 bp, Homo sapien
gtagttcttggccagcgtgagcgtc

SEQ ID NO: 6077354 - DNA, 25 bp, Homo sapien
cgttatttagcttgtgcatccgctg

SEQ ID NO: 6077355 - DNA, 25 bp, Homo sapien
ccgtcagcgatttgatgtagttctt

SEQ ID NO: 6077356 - DNA, 25 bp, Homo sapien
gctccctctcgttgctctccagccg

SEQ ID NO: 6077357 - DNA, 25 bp, Homo sapien
tatttagcttgtgcatccgctgccg

SEQ ID NO: 6077358 - DNA, 25 bp, Homo sapien
tggccagcgtgagcgtctcgatctt

SEQ ID NO: 6077359 - DNA, 25 bp, Homo sapien
atgctgctgtcacgacggccaccgg

SEQ ID NO: 6077360 - DNA, 25 bp, Homo sapien
ctccgcagacccttggccggctctg

SEQ ID NO: 6077361 - DNA, 25 bp, Homo sapien
ctggaaggcgttatttagcttgtgc

SEQ ID NO: 6077362 - DNA, 25 bp, Homo sapien
tggtggccgtcagcgatttgatgta

SEQ ID NO: 6077363 - DNA, 25 bp, Homo sapien
ggcaatattaagaggctcagtgagt

SEQ ID NO: 6077364 - DNA, 25 bp, Homo sapien
cctgggatgcggaaacaatgttgat

SEQ ID NO: 6077365 - DNA, 25 bp, Homo sapien
gtaacagtcacagggttattaatgt

SEQ ID NO: 6077366 - DNA, 25 bp, Homo sapien
tatcaagcacctacatcatggcaat

SEQ ID NO: 6077367 - DNA, 25 bp, Homo sapien
gacactatagtcttagtaacagtca

SEQ ID NO: 6077368 - DNA, 25 bp, Homo sapien
cctactgtgcaagtgtatcctggat

SEQ ID NO: 6077369 - DNA, 25 bp, Homo sapien
tagcttaaatgcctgggatgcggaa

SEQ ID NO: 6077370 - DNA, 25 bp, Homo sapien
gctcagtgagttagcttaaatgcct

SEQ ID NO: 6077371 - DNA, 25 bp, Homo sapien
taattaaacgtatagcaagcaaaac

SEQ ID NO: 6077372 - DNA, 25 bp, Homo sapien
ttagagatgacatttggctagggac

SEQ ID NO: 6077373 - DNA, 25 bp, Homo sapien
gcaaaacagtaggagagagataacc

SEQ ID NO: 6077374 - DNA, 25 bp, Homo sapien
tgttagcacaatggaattaatcacc

SEQ ID NO: 6077375 - DNA, 25 bp, Homo sapien
tgtgtgccagcgcaagtgggccttc

SEQ ID NO: 6077376 - DNA, 25 bp, Homo sapien
cgggtaaagcgcttggagcagagca

SEQ ID NO: 6077377 - DNA, 25 bp, Homo sapien
ctgccttgggtttatagacatcttg

SEQ ID NO: 6077378 - DNA, 25 bp, Homo sapien
ggtgtgagtgcgcacatgacgctcc

SEQ ID NO: 6077379 - DNA, 25 bp, Homo sapien
gctcctggcaattagggcagtcgca

SEQ ID NO: 6077380 - DNA, 25 bp, Homo sapien
gtgcgcacatgacgctccagctcat

SEQ ID NO: 6077381 - DNA, 25 bp, Homo sapien
gccttgggtttatagacatcttggg

SEQ ID NO: 6077382 - DNA, 25 bp, Homo sapien
gttgcagacgaagggcctctcgcct

SEQ ID NO: 6077383 - DNA, 25 bp, Homo sapien
tctagctcctggcaattagggcagt

SEQ ID NO: 6077384 - DNA, 25 bp, Homo sapien
tgtgagtgcgcacatgacgctccag

SEQ ID NO: 6077385 - DNA, 25 bp, Homo sapien
gctcatccgaacgagtgaacctctt

SEQ ID NO: 6077386 - DNA, 25 bp, Homo sapien
cactcccttctagctgcccactatt

SEQ ID NO: 6077387 - DNA, 25 bp, Homo sapien
tgctggtaccagcttgcataatagc

SEQ ID NO: 6077388 - DNA, 25 bp, Homo sapien
acagacacagcagggtcctgagtca

SEQ ID NO: 6077389 - DNA, 25 bp, Homo sapien
ttctgctggtaccagcttgcataat

SEQ ID NO: 6077390 - DNA, 25 bp, Homo sapien
gctgtcccgggagttacagtaatag

SEQ ID NO: 6077391 - DNA, 25 bp, Homo sapien
cacagcagggtcctgagtcagctca

SEQ ID NO: 6077392 - DNA, 25 bp, Homo sapien
ccttggcatgtgatcctgactgtct

SEQ ID NO: 6077393 - DNA, 25 bp, Homo sapien
ccagagaatcggtctgggatccctg

SEQ ID NO: 6077394 - DNA, 25 bp, Homo sapien
ggccggttgtttttaccatagatga

SEQ ID NO: 6077395 - DNA, 25 bp, Homo sapien
tgtcccgggagttacagtaatagtc

SEQ ID NO: 6077396 - DNA, 25 bp, Homo sapien
tttaccatagatgacaagtacaggg

SEQ ID NO: 6077397 - DNA, 25 bp, Homo sapien
gtgatcctgactgtctgtcccaagg

SEQ ID NO: 6077398 - DNA, 25 bp, Homo sapien
tgtctgtcccaaggccacagacaca

SEQ ID NO: 6077399 - DNA, 25 bp, Homo sapien
aacttattacgcgtcaaccttgcac

SEQ ID NO: 6077400 - DNA, 25 bp, Homo sapien
ccacgcgacttaaacttattacgcg

SEQ ID NO: 6077401 - DNA, 25 bp, Homo sapien
cgcgacttaaacttattacgcgtca

SEQ ID NO: 6077402 - DNA, 25 bp, Homo sapien
cttattacgcgtcaaccttgcacag

SEQ ID NO: 6077403 - DNA, 25 bp, Homo sapien
caatgaccacgcgacttaaacttat

SEQ ID NO: 6077404 - DNA, 25 bp, Homo sapien
atgaccacgcgacttaaacttatta

SEQ ID NO: 6077405 - DNA, 25 bp, Homo sapien
gcgacttaaacttattacgcgtcaa

SEQ ID NO: 6077406 - DNA, 25 bp, Homo sapien
ggccccaatgaccacgcgacttaaa

SEQ ID NO: 6077407 - DNA, 25 bp, Homo sapien
acttattacgcgtcaaccttgcaca

SEQ ID NO: 6077408 - DNA, 25 bp, Homo sapien
tgaccacgcgacttaaacttattac

SEQ ID NO: 6077409 - DNA, 25 bp, Homo sapien
taaacttattacgcgtcaaccttgc

SEQ ID NO: 6077410 - DNA, 25 bp, Homo sapien
aatgaccacgcgacttaaacttatt

SEQ ID NO: 6077411 - DNA, 25 bp, Homo sapien
gatgccacagaatctgagatccagc

SEQ ID NO: 6077412 - DNA, 25 bp, Homo sapien
gaaaacccctaatgtcccatgaaga

SEQ ID NO: 6077413 - DNA, 25 bp, Homo sapien
gcttcctttgagactgggcctaggg

SEQ ID NO: 6077414 - DNA, 25 bp, Homo sapien
cctgctaggccttagatgccacaga

SEQ ID NO: 6077415 - DNA, 25 bp, Homo sapien
aaagaacacctctcttcgcaaaata

SEQ ID NO: 6077416 - DNA, 25 bp, Homo sapien
gaacagagtcttggtatgggcctcg

SEQ ID NO: 6077417 - DNA, 25 bp, Homo sapien
acaaggcccgggagtccataggcag

SEQ ID NO: 6077418 - DNA, 25 bp, Homo sapien
gaagaaccgtctggatatatatttg

SEQ ID NO: 6077419 - DNA, 25 bp, Homo sapien
gagatccagcaatggttcactttaa

SEQ ID NO: 6077420 - DNA, 25 bp, Homo sapien
tctcagcaagttaaaaagcaatagt

SEQ ID NO: 6077421 - DNA, 25 bp, Homo sapien
gtgtgcttaccatagaaaaccccta

SEQ ID NO: 6077422 - DNA, 25 bp, Homo sapien
gagtccataggcagccacaatgaga

SEQ ID NO: 6077423 - DNA, 25 bp, Homo sapien
ccctgctcagcaatcccaggttggg

SEQ ID NO: 6077424 - DNA, 25 bp, Homo sapien
tgtaccttagagcaacatgcaaagc

SEQ ID NO: 6077425 - DNA, 25 bp, Homo sapien
tctttaaaaatgtaccttagagcaa

SEQ ID NO: 6077426 - DNA, 25 bp, Homo sapien
tgcagggggcgcaatcttggctcac

SEQ ID NO: 6077427 - DNA, 25 bp, Homo sapien
agggggcgcaatcttggctcactgc

SEQ ID NO: 6077428 - DNA, 25 bp, Homo sapien
tgtcttcctatcctcctacccgtca

SEQ ID NO: 6077429 - DNA, 25 bp, Homo sapien
cataacatttggctgcttgcagcag

SEQ ID NO: 6077430 - DNA, 25 bp, Homo sapien
caaccaccactgcaggcttctgatg

SEQ ID NO: 6077431 - DNA, 25 bp, Homo sapien
cctctgtctcagttcagttgctctg

SEQ ID NO: 6077432 - DNA, 25 bp, Homo sapien
catgcaaagcttccctgctcagcaa

SEQ ID NO: 6077433 - DNA, 25 bp, Homo sapien
gatgctctgttttcctcctctgtct

SEQ ID NO: 6077434 - DNA, 25 bp, Homo sapien
tgcttgcagcagatctccattctgc

SEQ ID NO: 6077435 - DNA, 25 bp, Homo sapien
tacagtcacgagctgtagcaccacc

SEQ ID NO: 6077436 - DNA, 25 bp, Homo sapien
cacccattaggaggttcccaccttg

SEQ ID NO: 6077437 - DNA, 25 bp, Homo sapien
acagctaagcctgcattctctgcca

SEQ ID NO: 6077438 - DNA, 25 bp, Homo sapien
gtcacgagctgtagcaccacctcag

SEQ ID NO: 6077439 - DNA, 25 bp, Homo sapien
ccattaggaggttcccaccttggtg

SEQ ID NO: 6077440 - DNA, 25 bp, Homo sapien
acttttcttggccactacgatttca

SEQ ID NO: 6077441 - DNA, 25 bp, Homo sapien
acgatttcatctacagtcacgagct

SEQ ID NO: 6077442 - DNA, 25 bp, Homo sapien
gtggtagacggcctgctctgcactc

SEQ ID NO: 6077443 - DNA, 25 bp, Homo sapien
ctgagacagctaagcctgcattctc

SEQ ID NO: 6077444 - DNA, 25 bp, Homo sapien
ccttgggctttgactattagggtgt

SEQ ID NO: 6077445 - DNA, 25 bp, Homo sapien
tgactattagggtgtcccacacccc

SEQ ID NO: 6077446 - DNA, 25 bp, Homo sapien
ggctttgactattagggtgtcccac

SEQ ID NO: 6077447 - DNA, 25 bp, Homo sapien
gccttgagcgggtccgtgtcgccca

SEQ ID NO: 6077448 - DNA, 25 bp, Homo sapien
tctggatggcgctcgagctaaactg

SEQ ID NO: 6077449 - DNA, 25 bp, Homo sapien
cgaaggcgccgttctggtagcccag

SEQ ID NO: 6077450 - DNA, 25 bp, Homo sapien
gcttcatcgatgtatggccgcttct

SEQ ID NO: 6077451 - DNA, 25 bp, Homo sapien
gggcacttcgcccatcttctggatg

SEQ ID NO: 6077452 - DNA, 25 bp, Homo sapien
cgtgggctgacgaataagggtctat

SEQ ID NO: 6077453 - DNA, 25 bp, Homo sapien
ccagtcttggtcatgcctgggaaga

SEQ ID NO: 6077454 - DNA, 25 bp, Homo sapien
gaataagggtctatgccagtcttgg

SEQ ID NO: 6077455 - DNA, 25 bp, Homo sapien
ttacagggcaccacgtagccagggt

SEQ ID NO: 6077456 - DNA, 25 bp, Homo sapien
gaccaggcggtacagttacagggca

SEQ ID NO: 6077457 - DNA, 25 bp, Homo sapien
aagacatacctgtccttcttgagca

SEQ ID NO: 6077458 - DNA, 25 bp, Homo sapien
gcgcgtagccgcttggcttcatcga

SEQ ID NO: 6077459 - DNA, 25 bp, Homo sapien
acattgaccacgcagtgttttccaa

SEQ ID NO: 6077460 - DNA, 25 bp, Homo sapien
aacaccagcaacagcgaacagccga

SEQ ID NO: 6077461 - DNA, 25 bp, Homo sapien
gcttccaaaactcacggatttgagg

SEQ ID NO: 6077462 - DNA, 25 bp, Homo sapien
gggacagcacgggaacaccatcagg

SEQ ID NO: 6077463 - DNA, 25 bp, Homo sapien
ttaattgtggcaaatccatttactt

SEQ ID NO: 6077464 - DNA, 25 bp, Homo sapien
tcaggctgggcggtattttcagtgc

SEQ ID NO: 6077465 - DNA, 25 bp, Homo sapien
gcggtattttcagtgcaaccaagaa

SEQ ID NO: 6077466 - DNA, 25 bp, Homo sapien
tatgatagaacgcactagaaaaggt

SEQ ID NO: 6077467 - DNA, 25 bp, Homo sapien
agcgaacagccgagcgtctcctcgg

SEQ ID NO: 6077468 - DNA, 25 bp, Homo sapien
tgtgcaaccgttaactatgatagaa

SEQ ID NO: 6077469 - DNA, 25 bp, Homo sapien
ccataaccacattgaccacgcagtg

SEQ ID NO: 6077470 - DNA, 25 bp, Homo sapien
ataaatagtttagaacaccagcaac

SEQ ID NO: 6077471 - DNA, 25 bp, Homo sapien
aaaatggtaaacacggtcttctctg

SEQ ID NO: 6077472 - DNA, 25 bp, Homo sapien
gcaggtggtacccattgtaaaggaa

SEQ ID NO: 6077473 - DNA, 25 bp, Homo sapien
tgaacttgcgagtggtttcgtgcct

SEQ ID NO: 6077474 - DNA, 25 bp, Homo sapien
agatgctgctggtgtacgtccacca

SEQ ID NO: 6077475 - DNA, 25 bp, Homo sapien
agacgaagatcagctggagggccca

SEQ ID NO: 6077476 - DNA, 25 bp, Homo sapien
gccacgttaagcagcatgcaaatca

SEQ ID NO: 6077477 - DNA, 25 bp, Homo sapien
acacatttttgcatcccggttgcag

SEQ ID NO: 6077478 - DNA, 25 bp, Homo sapien
ggtttcgtgcctgtagtaggccaca

SEQ ID NO: 6077479 - DNA, 25 bp, Homo sapien
tgatctcctaaaacacactttcagc

SEQ ID NO: 6077480 - DNA, 25 bp, Homo sapien
taggccacatgcatggccaccagca

SEQ ID NO: 6077481 - DNA, 25 bp, Homo sapien
tagcacaactctgccacgttaagca

SEQ ID NO: 6077482 - DNA, 25 bp, Homo sapien
caccgggaaaaagtggtcatagcac

SEQ ID NO: 6077483 - DNA, 25 bp, Homo sapien
tgctgaacgcaaacctcaacttctg

SEQ ID NO: 6077484 - DNA, 25 bp, Homo sapien
ttgacgctgaactgggaggtcccca

SEQ ID NO: 6077485 - DNA, 25 bp, Homo sapien
tatccatgtcgtaaatgctgaacgc

SEQ ID NO: 6077486 - DNA, 25 bp, Homo sapien
cacctggaagagctccccgttggaa

SEQ ID NO: 6077487 - DNA, 25 bp, Homo sapien
gatatcttcccatcgccatccttgt

SEQ ID NO: 6077488 - DNA, 25 bp, Homo sapien
gctcctgttaggacatatggcttca

SEQ ID NO: 6077489 - DNA, 25 bp, Homo sapien
gctccccgttggaaatgtagccatc

SEQ ID NO: 6077490 - DNA, 25 bp, Homo sapien
tggttttgtcgaccagctgctggag

SEQ ID NO: 6077491 - DNA, 25 bp, Homo sapien
tagggtaccctgagtcattcagaga

SEQ ID NO: 6077492 - DNA, 25 bp, Homo sapien
gagaaggagaattaatagcactgag

SEQ ID NO: 6077493 - DNA, 25 bp, Homo sapien
tcgtcgcccttgacgctgaactggg

SEQ ID NO: 6077494 - DNA, 25 bp, Homo sapien
gacagttggacgtcttgagcaaatc

SEQ ID NO: 6077495 - DNA, 25 bp, Homo sapien
aacagtagcaatttataagagacac

SEQ ID NO: 6077496 - DNA, 25 bp, Homo sapien
taaacgatgtgatatgtgtgcaaca

SEQ ID NO: 6077497 - DNA, 25 bp, Homo sapien
caaagcaagtcaaaccatagtatgc

SEQ ID NO: 6077498 - DNA, 25 bp, Homo sapien
gaaaattccaaagcaagtcaaacca

SEQ ID NO: 6077499 - DNA, 25 bp, Homo sapien
gcaaagggttgggactttgacttga

SEQ ID NO: 6077500 - DNA, 25 bp, Homo sapien
tgggactttgacttgaaaattccaa

SEQ ID NO: 6077501 - DNA, 25 bp, Homo sapien
caatttataagagacactgacagac

SEQ ID NO: 6077502 - DNA, 25 bp, Homo sapien
ctttaagaaaacagtagcaatttat

SEQ ID NO: 6077503 - DNA, 25 bp, Homo sapien
caacataaggtggaccctgaagtta

SEQ ID NO: 6077504 - DNA, 25 bp, Homo sapien
catagtatgcaatttaaacgatgtg

SEQ ID NO: 6077505 - DNA, 25 bp, Homo sapien
tgtgtgcaacataaggtggaccctg

SEQ ID NO: 6077506 - DNA, 25 bp, Homo sapien
gagacactgacagactacaaaggtg

SEQ ID NO: 6077507 - DNA, 25 bp, Homo sapien
aatgtctctgagtagtgtgccccac

SEQ ID NO: 6077508 - DNA, 25 bp, Homo sapien
caaaagtccggttgcagagcttaca

SEQ ID NO: 6077509 - DNA, 25 bp, Homo sapien
cgacgtttagtgcaatgttccgcgg

SEQ ID NO: 6077510 - DNA, 25 bp, Homo sapien
gcctagtgcagctcgacgacgttta

SEQ ID NO: 6077511 - DNA, 25 bp, Homo sapien
gtcatggcaacttcaccattttagg

SEQ ID NO: 6077512 - DNA, 25 bp, Homo sapien
gagacttgccgtgggtcttactaag

SEQ ID NO: 6077513 - DNA, 25 bp, Homo sapien
gaaaaataacatgcacagatcggac

SEQ ID NO: 6077514 - DNA, 25 bp, Homo sapien
gttccgcggtctcttgcatacctgg

SEQ ID NO: 6077515 - DNA, 25 bp, Homo sapien
taaaggtcagactttgactcacgga

SEQ ID NO: 6077516 - DNA, 25 bp, Homo sapien
gacactaccaggttctatgaccttt

SEQ ID NO: 6077517 - DNA, 25 bp, Homo sapien
cagagcttacattggaatgtggagc

SEQ ID NO: 6077518 - DNA, 25 bp, Homo sapien
tcttactaaggtgcagtttgactgc

SEQ ID NO: 6077519 - DNA, 25 bp, Homo sapien
ttaagcccgctctccacggatgcgg

SEQ ID NO: 6077520 - DNA, 25 bp, Homo sapien
cagtctgcttagtacgggccatagc

SEQ ID NO: 6077521 - DNA, 25 bp, Homo sapien
gatgtccttgggcataatggtcacg

SEQ ID NO: 6077522 - DNA, 25 bp, Homo sapien
cacaggttcgtgtcttcgaacagcc

SEQ ID NO: 6077523 - DNA, 25 bp, Homo sapien
aaacacaggcttaccagcgcagcgg

SEQ ID NO: 6077524 - DNA, 25 bp, Homo sapien
cttgggcataatggtcacgcgcttg

SEQ ID NO: 6077525 - DNA, 25 bp, Homo sapien
acgggccatagcgaaccaaaacaca

SEQ ID NO: 6077526 - DNA, 25 bp, Homo sapien
gatggcgcacaggttcgtgtcttcg

SEQ ID NO: 6077527 - DNA, 25 bp, Homo sapien
gtctgcttagtacgggccatagcga

SEQ ID NO: 6077528 - DNA, 25 bp, Homo sapien
cttagtacgggccatagcgaaccaa

SEQ ID NO: 6077529 - DNA, 25 bp, Homo sapien
tagtacgggccatagcgaaccaaaa

SEQ ID NO: 6077530 - DNA, 25 bp, Homo sapien
tgtccttgggcataatggtcacgcg

SEQ ID NO: 6077531 - DNA, 25 bp, Homo sapien
gtgtttttcagagggaggtctctgc

SEQ ID NO: 6077532 - DNA, 25 bp, Homo sapien
aaagaaagcaagtcctcatcccagg

SEQ ID NO: 6077533 - DNA, 25 bp, Homo sapien
gcattagaactatgtacaacgcaca

SEQ ID NO: 6077534 - DNA, 25 bp, Homo sapien
gctaccacattaggaacgtcaatgg

SEQ ID NO: 6077535 - DNA, 25 bp, Homo sapien
caactaagacatggaaagaaccgga

SEQ ID NO: 6077536 - DNA, 25 bp, Homo sapien
gacatcaaacactaagcacttaaga

SEQ ID NO: 6077537 - DNA, 25 bp, Homo sapien
tcagggacatccaactaagacatgg

SEQ ID NO: 6077538 - DNA, 25 bp, Homo sapien
caacgcacagtttagtatcaaaatc

SEQ ID NO: 6077539 - DNA, 25 bp, Homo sapien
atggacagtccatttcaacttgcag

SEQ ID NO: 6077540 - DNA, 25 bp, Homo sapien
gataacacaatgtttctggcacaat

SEQ ID NO: 6077541 - DNA, 25 bp, Homo sapien
tagcagcaaaggcactgtacatcag

SEQ ID NO: 6077542 - DNA, 25 bp, Homo sapien
gaagtactggtggtcaatacaatgc

SEQ ID NO: 6077543 - DNA, 25 bp, Homo sapien
cccagttggcaggtatttggagaat

SEQ ID NO: 6077544 - DNA, 25 bp, Homo sapien
ggctcacagtaggtctcctgacagc

SEQ ID NO: 6077545 - DNA, 25 bp, Homo sapien
ccacagtccagagattggaagccag

SEQ ID NO: 6077546 - DNA, 25 bp, Homo sapien
gccaaagtgcaggatgtctggcagc

SEQ ID NO: 6077547 - DNA, 25 bp, Homo sapien
taagtggaaactggatacctcaggt

SEQ ID NO: 6077548 - DNA, 25 bp, Homo sapien
caaccaagagatccaaggccagtgt

SEQ ID NO: 6077549 - DNA, 25 bp, Homo sapien
cagtaacaggatgtctgataggatc

SEQ ID NO: 6077550 - DNA, 25 bp, Homo sapien
ttccacatccaagggatcttatgta

SEQ ID NO: 6077551 - DNA, 25 bp, Homo sapien
tacctcaggtaacttccaaaacagc

SEQ ID NO: 6077552 - DNA, 25 bp, Homo sapien
gctggtgggctcacagtaggtctcc

SEQ ID NO: 6077553 - DNA, 25 bp, Homo sapien
ggatcttatgtagttagtctggcgg

SEQ ID NO: 6077554 - DNA, 25 bp, Homo sapien
ataggatctggccaaagtgcaggat

SEQ ID NO: 6077555 - DNA, 25 bp, Homo sapien
gcacaggtagccctcacaggaatgg

SEQ ID NO: 6077556 - DNA, 25 bp, Homo sapien
acaggtagccctcacaggaatggga

SEQ ID NO: 6077557 - DNA, 25 bp, Homo sapien
agcacaggtagccctcacaggaatg

SEQ ID NO: 6077558 - DNA, 25 bp, Homo sapien
cacaggtagccctcacaggaatggg

SEQ ID NO: 6077559 - DNA, 25 bp, Homo sapien
cacaggtagccctcacaggaatggg

SEQ ID NO: 6077560 - DNA, 25 bp, Homo sapien
caggtgctgggagatcaaaggttca

SEQ ID NO: 6077561 - DNA, 25 bp, Homo sapien
ttgctggggtacgaggagccaccac

SEQ ID NO: 6077562 - DNA, 25 bp, Homo sapien
tagcctgagtagcacaggtagccct

SEQ ID NO: 6077563 - DNA, 25 bp, Homo sapien
tcacaggaatgggaggagaagtttc

SEQ ID NO: 6077564 - DNA, 25 bp, Homo sapien
cacgggagtagcctgagtagcacag

SEQ ID NO: 6077565 - DNA, 25 bp, Homo sapien
gatcaaaggttcagtgctgtagacc

SEQ ID NO: 6077566 - DNA, 25 bp, Homo sapien
aagcccttgcagagagaggaaccca

SEQ ID NO: 6077567 - DNA, 25 bp, Homo sapien
caccacgggagtagcctgagtagca

SEQ ID NO: 6077568 - DNA, 25 bp, Homo sapien
agtagcacaggtagccctcacagga

SEQ ID NO: 6077569 - DNA, 25 bp, Homo sapien
tacgaggagccaccacgggagtagc

SEQ ID NO: 6077570 - DNA, 25 bp, Homo sapien
tcctgaaagcccttgcagagagagg

SEQ ID NO: 6077571 - DNA, 25 bp, Homo sapien
catgcatagtcaggcaagaattgca

SEQ ID NO: 6077572 - DNA, 25 bp, Homo sapien
aaccccgagacccaacatgcatagt

SEQ ID NO: 6077573 - DNA, 25 bp, Homo sapien
gagacccaacatgcatagtcaggca

SEQ ID NO: 6077574 - DNA, 25 bp, Homo sapien
gagcctgggtagtgcaagtaacccc

SEQ ID NO: 6077575 - DNA, 25 bp, Homo sapien
caccttctaggtggaaaatagattg

SEQ ID NO: 6077576 - DNA, 25 bp, Homo sapien
gataacaagatgaatggaaccacct

SEQ ID NO: 6077577 - DNA, 25 bp, Homo sapien
gcaggggctggactcaacacacaat

SEQ ID NO: 6077578 - DNA, 25 bp, Homo sapien
ggaggtatggattctataattcaga

SEQ ID NO: 6077579 - DNA, 25 bp, Homo sapien
agcagctattggatccaaaaccccg

SEQ ID NO: 6077580 - DNA, 25 bp, Homo sapien
gctattggatccaaaaccccgagac

SEQ ID NO: 6077581 - DNA, 25 bp, Homo sapien
caatgtctgacagctgttgggcctc

SEQ ID NO: 6077582 - DNA, 25 bp, Homo sapien
caagtaacccccgtgggagcaggag

SEQ ID NO: 6077583 - DNA, 25 bp, Homo sapien
gaatccaacgccatagcccagggaa

SEQ ID NO: 6077584 - DNA, 25 bp, Homo sapien
gacccagagtaagttgtctggcagg

SEQ ID NO: 6077585 - DNA, 25 bp, Homo sapien
gagaagattctgagtttgcatgcca

SEQ ID NO: 6077586 - DNA, 25 bp, Homo sapien
agttcagctgagttacactgagaag

SEQ ID NO: 6077587 - DNA, 25 bp, Homo sapien
agacccagagtaagttgtctggcag

SEQ ID NO: 6077588 - DNA, 25 bp, Homo sapien
agaagattctgagtttgcatgccac

SEQ ID NO: 6077589 - DNA, 25 bp, Homo sapien
gggcggcagaatccaacgccatagc

SEQ ID NO: 6077590 - DNA, 25 bp, Homo sapien
ggcagaatccaacgccatagcccag

SEQ ID NO: 6077591 - DNA, 25 bp, Homo sapien
aagattctgagtttgcatgccacat

SEQ ID NO: 6077592 - DNA, 25 bp, Homo sapien
gaagattctgagtttgcatgccaca

SEQ ID NO: 6077593 - DNA, 25 bp, Homo sapien
tagccacaggagttgccgtagtagt

SEQ ID NO: 6077594 - DNA, 25 bp, Homo sapien
atagccacaggagttgccgtagtag

SEQ ID NO: 6077595 - DNA, 25 bp, Homo sapien
ccatagccacaggagttgccgtagt

SEQ ID NO: 6077596 - DNA, 25 bp, Homo sapien
catagccacaggagttgccgtagta

SEQ ID NO: 6077597 - DNA, 25 bp, Homo sapien
tgcagcccaggcctcctttggcata

SEQ ID NO: 6077598 - DNA, 25 bp, Homo sapien
ccatggtagttgttatcaaagctca

SEQ ID NO: 6077599 - DNA, 25 bp, Homo sapien
catgggcagtagcaggcatagccat

SEQ ID NO: 6077600 - DNA, 25 bp, Homo sapien
cctcctttggcatagccctggccac

SEQ ID NO: 6077601 - DNA, 25 bp, Homo sapien
atagctgcagcccaggcctcctttg

SEQ ID NO: 6077602 - DNA, 25 bp, Homo sapien
tagccctggccaccatggtagttgt

SEQ ID NO: 6077603 - DNA, 25 bp, Homo sapien
acagccatagctgcagcccaggcct

SEQ ID NO: 6077604 - DNA, 25 bp, Homo sapien
agccgctaagaccacagccatagct

SEQ ID NO: 6077605 - DNA, 25 bp, Homo sapien
ttggcatagccctggccaccatggt

SEQ ID NO: 6077606 - DNA, 25 bp, Homo sapien
cccaggcctcctttggcatagccct

SEQ ID NO: 6077607 - DNA, 25 bp, Homo sapien
caggcatagccatagccgctaagac

SEQ ID NO: 6077608 - DNA, 25 bp, Homo sapien
tagccatagccgctaagaccacagc

SEQ ID NO: 6077609 - DNA, 25 bp, Homo sapien
cagtagcaggcatagccatagccgc

SEQ ID NO: 6077610 - DNA, 25 bp, Homo sapien
taacaccatgggcagtagcaggcat

SEQ ID NO: 6077611 - DNA, 25 bp, Homo sapien
taagaccacagccatagctgcagcc

SEQ ID NO: 6077612 - DNA, 25 bp, Homo sapien
tggccaccatggtagttgttatcaa

SEQ ID NO: 6077613 - DNA, 25 bp, Homo sapien
ccatagtagttgctgtagtagcaca

SEQ ID NO: 6077614 - DNA, 25 bp, Homo sapien
agccataacgcagaccaccatagta

SEQ ID NO: 6077615 - DNA, 25 bp, Homo sapien
gccataacgcagaccaccatagtag

SEQ ID NO: 6077616 - DNA, 25 bp, Homo sapien
ataacgcagaccaccatagtagttg

SEQ ID NO: 6077617 - DNA, 25 bp, Homo sapien
ggactccatagccataacgcagacc

SEQ ID NO: 6077618 - DNA, 25 bp, Homo sapien
gactccatagccataacgcagacca

SEQ ID NO: 6077619 - DNA, 25 bp, Homo sapien
acagccatagccaccgcccaggact

SEQ ID NO: 6077620 - DNA, 25 bp, Homo sapien
atagccataacgcagaccaccatag

SEQ ID NO: 6077621 - DNA, 25 bp, Homo sapien
ccataacgcagaccaccatagtagt

SEQ ID NO: 6077622 - DNA, 25 bp, Homo sapien
tagccataacgcagaccaccatagt

SEQ ID NO: 6077623 - DNA, 25 bp, Homo sapien
tatccatagccaccatagccacggc

SEQ ID NO: 6077624 - DNA, 25 bp, Homo sapien
cataacgcagaccaccatagtagtt

SEQ ID NO: 6077625 - DNA, 25 bp, Homo sapien
gccacaaccatatccacagccggaa

SEQ ID NO: 6077626 - DNA, 25 bp, Homo sapien
aaccatatccacagccggaactcca

SEQ ID NO: 6077627 - DNA, 25 bp, Homo sapien
gcaaagtggtcggtagccacagcag

SEQ ID NO: 6077628 - DNA, 25 bp, Homo sapien
aagtggtcggtagccacagcagcta

SEQ ID NO: 6077629 - DNA, 25 bp, Homo sapien
aaagtggtcggtagccacagcagct

SEQ ID NO: 6077630 - DNA, 25 bp, Homo sapien
agccacaaccatatccacagccgga

SEQ ID NO: 6077631 - DNA, 25 bp, Homo sapien
cacaaccatatccacagccggaact

SEQ ID NO: 6077632 - DNA, 25 bp, Homo sapien
atagccacaaccatatccacagccg

SEQ ID NO: 6077633 - DNA, 25 bp, Homo sapien
acaaccatatccacagccggaactc

SEQ ID NO: 6077634 - DNA, 25 bp, Homo sapien
caaagtggtcggtagccacagcagc

SEQ ID NO: 6077635 - DNA, 25 bp, Homo sapien
cacagcagctagagctgtatccaca

SEQ ID NO: 6077636 - DNA, 25 bp, Homo sapien
ccatagccacaaccatatccacagc

SEQ ID NO: 6077637 - DNA, 25 bp, Homo sapien
cgaatcctccacagccgtagcctag

SEQ ID NO: 6077638 - DNA, 25 bp, Homo sapien
accgaatcctccacagccgtagcct

SEQ ID NO: 6077639 - DNA, 25 bp, Homo sapien
ccgaatcctccacagccgtagccta

SEQ ID NO: 6077640 - DNA, 25 bp, Homo sapien
gaatcctccacagccgtagcctagg

SEQ ID NO: 6077641 - DNA, 25 bp, Homo sapien
cccatagccaccataatagttgctg

SEQ ID NO: 6077642 - DNA, 25 bp, Homo sapien
catagccaccataatagttgctgta

SEQ ID NO: 6077643 - DNA, 25 bp, Homo sapien
ggcagtagtagccatttccatagcc

SEQ ID NO: 6077644 - DNA, 25 bp, Homo sapien
accatacccatagccaccataatag

SEQ ID NO: 6077645 - DNA, 25 bp, Homo sapien
tacccatagccaccataatagttgc

SEQ ID NO: 6077646 - DNA, 25 bp, Homo sapien
catacccatagccaccataatagtt

SEQ ID NO: 6077647 - DNA, 25 bp, Homo sapien
caccataatagttgctgtagtaaat

SEQ ID NO: 6077648 - DNA, 25 bp, Homo sapien
catccatagccacgataaccacagc

SEQ ID NO: 6077649 - DNA, 25 bp, Homo sapien
gcaagatgggcagtagtagccattt

SEQ ID NO: 6077650 - DNA, 25 bp, Homo sapien
ccataatagttgctgtagtaaatca

SEQ ID NO: 6077651 - DNA, 25 bp, Homo sapien
agccaagcccaccatacccatagcc

SEQ ID NO: 6077652 - DNA, 25 bp, Homo sapien
tagcaagatgggcagtagtagccat

SEQ ID NO: 6077653 - DNA, 25 bp, Homo sapien
gctgcggtatccatagcctccgaag

SEQ ID NO: 6077654 - DNA, 25 bp, Homo sapien
ctgcggtatccatagcctccgaagc

SEQ ID NO: 6077655 - DNA, 25 bp, Homo sapien
tcatcgaagcctccgtagccgtagc

SEQ ID NO: 6077656 - DNA, 25 bp, Homo sapien
gcagctgcggtatccatagcctccg

SEQ ID NO: 6077657 - DNA, 25 bp, Homo sapien
tgcggtatccatagcctccgaagcc

SEQ ID NO: 6077658 - DNA, 25 bp, Homo sapien
cagctgcggtatccatagcctccga

SEQ ID NO: 6077659 - DNA, 25 bp, Homo sapien
agctgcggtatccatagcctccgaa

SEQ ID NO: 6077660 - DNA, 25 bp, Homo sapien
gcggtatccatagcctccgaagcca

SEQ ID NO: 6077661 - DNA, 25 bp, Homo sapien
tgtagtagctgccatagtatctcat

SEQ ID NO: 6077662 - DNA, 25 bp, Homo sapien
atatcccaggcctctgtagtagctg

SEQ ID NO: 6077663 - DNA, 25 bp, Homo sapien
cagccatatcccaggcctctgtagt

SEQ ID NO: 6077664 - DNA, 25 bp, Homo sapien
tctgtagtagctgccatagtatctc

SEQ ID NO: 6077665 - DNA, 25 bp, Homo sapien
tgggcggcagcagccatatctatag

SEQ ID NO: 6077666 - DNA, 25 bp, Homo sapien
gcctctgtagtagctgccatagtat

SEQ ID NO: 6077667 - DNA, 25 bp, Homo sapien
acagccatatcccaggcctctgtag

SEQ ID NO: 6077668 - DNA, 25 bp, Homo sapien
ctgtagtagctgccatagtatctca

SEQ ID NO: 6077669 - DNA, 25 bp, Homo sapien
ccacagccatatcccaggcctctgt

SEQ ID NO: 6077670 - DNA, 25 bp, Homo sapien
agccatatcccaggcctctgtagta

SEQ ID NO: 6077671 - DNA, 25 bp, Homo sapien
cctctgtagtagctgccatagtatc

SEQ ID NO: 6077672 - DNA, 25 bp, Homo sapien
catatcccaggcctctgtagtagct

SEQ ID NO: 6077673 - DNA, 25 bp, Homo sapien
agtatgatgggcggtagcagccata

SEQ ID NO: 6077674 - DNA, 25 bp, Homo sapien
atagtatgatgggcggtagcagcca

SEQ ID NO: 6077675 - DNA, 25 bp, Homo sapien
tagtatgatgggcggtagcagccat

SEQ ID NO: 6077676 - DNA, 25 bp, Homo sapien
ccatagtatgatgggcggtagcagc

SEQ ID NO: 6077677 - DNA, 25 bp, Homo sapien
catagtatgatgggcggtagcagcc

SEQ ID NO: 6077678 - DNA, 25 bp, Homo sapien
ccacagctgtagcccaggcctccgt

SEQ ID NO: 6077679 - DNA, 25 bp, Homo sapien
ccgaagcctccacagctgtagccca

SEQ ID NO: 6077680 - DNA, 25 bp, Homo sapien
accgaagcctccacagctgtagccc

SEQ ID NO: 6077681 - DNA, 25 bp, Homo sapien
caccgaagcctccacagctgtagcc

SEQ ID NO: 6077682 - DNA, 25 bp, Homo sapien
acagctgtagcccaggcctccgtag

SEQ ID NO: 6077683 - DNA, 25 bp, Homo sapien
attgtacgatgggcggcagcagcca

SEQ ID NO: 6077684 - DNA, 25 bp, Homo sapien
gccaccgaagcctccacagctgtag

SEQ ID NO: 6077685 - DNA, 25 bp, Homo sapien
cagctgtagcccaggcctccgtagt

SEQ ID NO: 6077686 - DNA, 25 bp, Homo sapien
tatccgtagcttccaaagccagagc

SEQ ID NO: 6077687 - DNA, 25 bp, Homo sapien
ggccaccgaagcctccacagctgta

SEQ ID NO: 6077688 - DNA, 25 bp, Homo sapien
gccagaaccccgtctgcagaagctg

SEQ ID NO: 6077689 - DNA, 25 bp, Homo sapien
ccgtagtagctgccgtagtgactca

SEQ ID NO: 6077690 - DNA, 25 bp, Homo sapien
cctctgtggccacaaccatatctgc

SEQ ID NO: 6077691 - DNA, 25 bp, Homo sapien
atccacagccgtagccatagcacat

SEQ ID NO: 6077692 - DNA, 25 bp, Homo sapien
tctgtggccacaaccatatctgcat

SEQ ID NO: 6077693 - DNA, 25 bp, Homo sapien
gcctctgtggccacaaccatatctg

SEQ ID NO: 6077694 - DNA, 25 bp, Homo sapien
ctctgtggccacaaccatatctgca

SEQ ID NO: 6077695 - DNA, 25 bp, Homo sapien
aaggagtgggagacatagccatagc

SEQ ID NO: 6077696 - DNA, 25 bp, Homo sapien
aggagtgggagacatagccatagcc

SEQ ID NO: 6077697 - DNA, 25 bp, Homo sapien
tagccatggccaccattgtagtttc

SEQ ID NO: 6077698 - DNA, 25 bp, Homo sapien
gtccaggcctctgtagccacagcca

SEQ ID NO: 6077699 - DNA, 25 bp, Homo sapien
gccgccataaccacagcccaggcct

SEQ ID NO: 6077700 - DNA, 25 bp, Homo sapien
ccacagccacagaaggagtgggaga

SEQ ID NO: 6077701 - DNA, 25 bp, Homo sapien
cacagaaggagtgggagacatagcc

SEQ ID NO: 6077702 - DNA, 25 bp, Homo sapien
aggagtgggagacatagccatagcc

SEQ ID NO: 6077703 - DNA, 25 bp, Homo sapien
gcacccatagccacagccgccataa

SEQ ID NO: 6077704 - DNA, 25 bp, Homo sapien
catggccaccattgtagtttctgta

SEQ ID NO: 6077705 - DNA, 25 bp, Homo sapien
tgtagccacagccacagaaggagcc

SEQ ID NO: 6077706 - DNA, 25 bp, Homo sapien
acccatagccatggccaccattgta

SEQ ID NO: 6077707 - DNA, 25 bp, Homo sapien
caccattgtagtttctgtagtagct

SEQ ID NO: 6077708 - DNA, 25 bp, Homo sapien
cagccacagaaggagtgggagacat

SEQ ID NO: 6077709 - DNA, 25 bp, Homo sapien
gagggagcgggagccatagccatag

SEQ ID NO: 6077710 - DNA, 25 bp, Homo sapien
catagccaggggtgccatagtagtt

SEQ ID NO: 6077711 - DNA, 25 bp, Homo sapien
catagccacagaacccatagccagg

SEQ ID NO: 6077712 - DNA, 25 bp, Homo sapien
cccatagccaggggtgccatagtag

SEQ ID NO: 6077713 - DNA, 25 bp, Homo sapien
agaacccatagccaggggtgccata

SEQ ID NO: 6077714 - DNA, 25 bp, Homo sapien
aacccatagccaggggtgccatagt

SEQ ID NO: 6077715 - DNA, 25 bp, Homo sapien
atagccacagaacccatagccaggg

SEQ ID NO: 6077716 - DNA, 25 bp, Homo sapien
ccatagccaggggtgccatagtagt

SEQ ID NO: 6077717 - DNA, 25 bp, Homo sapien
acccatagccaggggtgccatagta

SEQ ID NO: 6077718 - DNA, 25 bp, Homo sapien
gaacccatagccaggggtgccatag

SEQ ID NO: 6077719 - DNA, 25 bp, Homo sapien
agagggagcgggagccatagccata

SEQ ID NO: 6077720 - DNA, 25 bp, Homo sapien
agcctaggccttcgtatccacagca

SEQ ID NO: 6077721 - DNA, 25 bp, Homo sapien
gccatggtcgccgtagtagtttccg

SEQ ID NO: 6077722 - DNA, 25 bp, Homo sapien
agcgggagccgtagccatgaccata

SEQ ID NO: 6077723 - DNA, 25 bp, Homo sapien
catagcctaggccttcgtatccaca

SEQ ID NO: 6077724 - DNA, 25 bp, Homo sapien
cacccatagccatggtcgccgtagt

SEQ ID NO: 6077725 - DNA, 25 bp, Homo sapien
agccacagaagaagcgggagccgta

SEQ ID NO: 6077726 - DNA, 25 bp, Homo sapien
ccatagccatggtcgccgtagtagt

SEQ ID NO: 6077727 - DNA, 25 bp, Homo sapien
catggtcgccgtagtagtttccgta

SEQ ID NO: 6077728 - DNA, 25 bp, Homo sapien
cagaagaagcgggagccgtagccat

SEQ ID NO: 6077729 - DNA, 25 bp, Homo sapien
agccgtagccatgaccatagccaca

SEQ ID NO: 6077730 - DNA, 25 bp, Homo sapien
gcgcaggcttccatagccatagcct

SEQ ID NO: 6077731 - DNA, 25 bp, Homo sapien
agccatgaccatagccacagcagga

SEQ ID NO: 6077732 - DNA, 25 bp, Homo sapien
ttggtggcatcaaagccacgtgggc

SEQ ID NO: 6077733 - DNA, 25 bp, Homo sapien
gaatgaggatcatgcttgagtctgg

SEQ ID NO: 6077734 - DNA, 25 bp, Homo sapien
gtgtgctccacttgaccctatggga

SEQ ID NO: 6077735 - DNA, 25 bp, Homo sapien
ccgaggcaggtagaatgaggatcat

SEQ ID NO: 6077736 - DNA, 25 bp, Homo sapien
tgccttccgtgtgtgctccacttga

SEQ ID NO: 6077737 - DNA, 25 bp, Homo sapien
gcttgccagaaaagccaatctcaga

SEQ ID NO: 6077738 - DNA, 25 bp, Homo sapien
gacttgcaatccaggtgattccgag

SEQ ID NO: 6077739 - DNA, 25 bp, Homo sapien
atgttctgacttgcaatccaggtga

SEQ ID NO: 6077740 - DNA, 25 bp, Homo sapien
aaggaggactgccttccgtgtgtgc

SEQ ID NO: 6077741 - DNA, 25 bp, Homo sapien
gttccgggagggtgatcagcagctg

SEQ ID NO: 6077742 - DNA, 25 bp, Homo sapien
ccaggtgattccgaggcaggtagaa

SEQ ID NO: 6077743 - DNA, 25 bp, Homo sapien
cacttgaccctatgggaccatccat

SEQ ID NO: 6077744 - DNA, 25 bp, Homo sapien
tccaaagacgacatataaacggcca

SEQ ID NO: 6077745 - DNA, 25 bp, Homo sapien
tctccaaagacgacatataaacggc

SEQ ID NO: 6077746 - DNA, 25 bp, Homo sapien
caaagacgacatataaacggccaac

SEQ ID NO: 6077747 - DNA, 25 bp, Homo sapien
tctgaaaagggtgaatacccagaac

SEQ ID NO: 6077748 - DNA, 25 bp, Homo sapien
aaacggccaacaaacagatactcag

SEQ ID NO: 6077749 - DNA, 25 bp, Homo sapien
gacgacatataaacggccaacaaac

SEQ ID NO: 6077750 - DNA, 25 bp, Homo sapien
gaaaaatggacaaagagcccaaata

SEQ ID NO: 6077751 - DNA, 25 bp, Homo sapien
tataaacggccaacaaacagatact

SEQ ID NO: 6077752 - DNA, 25 bp, Homo sapien
gacaaagagcccaaatagacatttc

SEQ ID NO: 6077753 - DNA, 25 bp, Homo sapien
tatctgaaaagggtgaatacccaga

SEQ ID NO: 6077754 - DNA, 25 bp, Homo sapien
acggccaacaaacagatactcagca

SEQ ID NO: 6077755 - DNA, 25 bp, Homo sapien
tttctccaaagacgacatataaacg

SEQ ID NO: 6077756 - DNA, 25 bp, Homo sapien
gggactgtgcaaacttccgggcgat

SEQ ID NO: 6077757 - DNA, 25 bp, Homo sapien
tagcctcagctctcgtttgcgtgtt

SEQ ID NO: 6077758 - DNA, 25 bp, Homo sapien
ttggttttcaagcacagccacacga

SEQ ID NO: 6077759 - DNA, 25 bp, Homo sapien
tttcttcttcctgcgacactcccgg

SEQ ID NO: 6077760 - DNA, 25 bp, Homo sapien
gacttggggcaagttcagtttcctc

SEQ ID NO: 6077761 - DNA, 25 bp, Homo sapien
cctcaatgagagtcttgttttggtt

SEQ ID NO: 6077762 - DNA, 25 bp, Homo sapien
gcacagccacacgattttcaagaca

SEQ ID NO: 6077763 - DNA, 25 bp, Homo sapien
cagcagtaggagctcggatctggta

SEQ ID NO: 6077764 - DNA, 25 bp, Homo sapien
gagctcggatctggtaagttggcat

SEQ ID NO: 6077765 - DNA, 25 bp, Homo sapien
aaacttccgggcgatgcagccatca

SEQ ID NO: 6077766 - DNA, 25 bp, Homo sapien
tctcgtttgcgtgttgcttcttctg

SEQ ID NO: 6077767 - DNA, 25 bp, Homo sapien
tcattagcctcagctctcgtttgcg

SEQ ID NO: 6077768 - DNA, 25 bp, Homo sapien
gagggttcactgagcatgcttttca

SEQ ID NO: 6077769 - DNA, 25 bp, Homo sapien
tacaggtgtggcctcatctgcactg

SEQ ID NO: 6077770 - DNA, 25 bp, Homo sapien
ttcagagggttcactgagcatgctt

SEQ ID NO: 6077771 - DNA, 25 bp, Homo sapien
agggagccgcatacacgacgggcct

SEQ ID NO: 6077772 - DNA, 25 bp, Homo sapien
agggctccagatcattctattatat

SEQ ID NO: 6077773 - DNA, 25 bp, Homo sapien
cccacggggatgtaacaggatgcct

SEQ ID NO: 6077774 - DNA, 25 bp, Homo sapien
gctggcttgaagctcacgggcacgc

SEQ ID NO: 6077775 - DNA, 25 bp, Homo sapien
gagtgtacaggtgtggcctcatctg

SEQ ID NO: 6077776 - DNA, 25 bp, Homo sapien
tctattatattctcgatccagaatt

SEQ ID NO: 6077777 - DNA, 25 bp, Homo sapien
tatattctcgatccagaattcagag

SEQ ID NO: 6077778 - DNA, 25 bp, Homo sapien
tcatccagggagtgtacaggtgtgg

SEQ ID NO: 6077779 - DNA, 25 bp, Homo sapien
agccgcatacacgacgggcctgcag

SEQ ID NO: 6077780 - DNA, 25 bp, Homo sapien
aggattagacactctacttccgccc

SEQ ID NO: 6077781 - DNA, 25 bp, Homo sapien
agatggcacttgagtgaagatgaga

SEQ ID NO: 6077782 - DNA, 25 bp, Homo sapien
gatggcacttgagtgaagatgagaa

SEQ ID NO: 6077783 - DNA, 25 bp, Homo sapien
agaatttggcatagacagcctcccc

SEQ ID NO: 6077784 - DNA, 25 bp, Homo sapien
gaatttggcatagacagcctcccca

SEQ ID NO: 6077785 - DNA, 25 bp, Homo sapien
cagaatttggcatagacagcctccc

SEQ ID NO: 6077786 - DNA, 25 bp, Homo sapien
ttatgtccccatcagatggagataa

SEQ ID NO: 6077787 - DNA, 25 bp, Homo sapien
ggcacttgagtgaagatgagaatag

SEQ ID NO: 6077788 - DNA, 25 bp, Homo sapien
gaagatgagaatagatcctatgtgg

SEQ ID NO: 6077789 - DNA, 25 bp, Homo sapien
gactgcaggattagacactctactt

SEQ ID NO: 6077790 - DNA, 25 bp, Homo sapien
tgcaggattagacactctacttccg

SEQ ID NO: 6077791 - DNA, 25 bp, Homo sapien
cattgacttggaagctgaacaacat

SEQ ID NO: 6077792 - DNA, 25 bp, Homo sapien
cacgaagtgagggtgaaatacagca

SEQ ID NO: 6077793 - DNA, 25 bp, Homo sapien
gaggtaagacactaaccacagcccg

SEQ ID NO: 6077794 - DNA, 25 bp, Homo sapien
tctgccaataggcatagatgagtgg

SEQ ID NO: 6077795 - DNA, 25 bp, Homo sapien
aagaagccaacgcaggagagggtca

SEQ ID NO: 6077796 - DNA, 25 bp, Homo sapien
tgttccatctttcgaatctgctggc

SEQ ID NO: 6077797 - DNA, 25 bp, Homo sapien
caatgagaacagacacagtacggag

SEQ ID NO: 6077798 - DNA, 25 bp, Homo sapien
gggtccaggatagagcaaagctccc

SEQ ID NO: 6077799 - DNA, 25 bp, Homo sapien
acagtacggagagctttgaagtcgc

SEQ ID NO: 6077800 - DNA, 25 bp, Homo sapien
caattcctggccgagagaaagagga

SEQ ID NO: 6077801 - DNA, 25 bp, Homo sapien
ggtaccgttccagcactaggtagag

SEQ ID NO: 6077802 - DNA, 25 bp, Homo sapien
gggatcgataacctccagccatggc

SEQ ID NO: 6077803 - DNA, 25 bp, Homo sapien
tcttgagcatgtcgcagtagaagaa

SEQ ID NO: 6077804 - DNA, 25 bp, Homo sapien
ctagcaagcatgttctgggcggtct

SEQ ID NO: 6077805 - DNA, 25 bp, Homo sapien
caacacctgcctgagcttacacagg

SEQ ID NO: 6077806 - DNA, 25 bp, Homo sapien
agcttattcagtgcagcctttgaca

SEQ ID NO: 6077807 - DNA, 25 bp, Homo sapien
gacatccctcagaggagaagttttc

SEQ ID NO: 6077808 - DNA, 25 bp, Homo sapien
aactccctattggagatagctttgc

SEQ ID NO: 6077809 - DNA, 25 bp, Homo sapien
catcaccagtcgctatgtcccgagg

SEQ ID NO: 6077810 - DNA, 25 bp, Homo sapien
tctgtacagggtaaactccctattg

SEQ ID NO: 6077811 - DNA, 25 bp, Homo sapien
caggtggaaatgcacgtgttctgta

SEQ ID NO: 6077812 - DNA, 25 bp, Homo sapien
ggatgagacagcattgatcactgct

SEQ ID NO: 6077813 - DNA, 25 bp, Homo sapien
taagtgcaaaataaactgtacaccc

SEQ ID NO: 6077814 - DNA, 25 bp, Homo sapien
aataaactgtacaccctgagaggat

SEQ ID NO: 6077815 - DNA, 25 bp, Homo sapien
gtgcagcctttgacatccctcagag

SEQ ID NO: 6077816 - DNA, 25 bp, Homo sapien
ggaagaggtcttcatctttctttag

SEQ ID NO: 6077817 - DNA, 25 bp, Homo sapien
gcattggcgccacaagtgtctttca

SEQ ID NO: 6077818 - DNA, 25 bp, Homo sapien
gtctttcagccattcccggaagagg

SEQ ID NO: 6077819 - DNA, 25 bp, Homo sapien
ctgcttggcattggcgccacaagtg

SEQ ID NO: 6077820 - DNA, 25 bp, Homo sapien
attggcgccacaagtgtctttcagc

SEQ ID NO: 6077821 - DNA, 25 bp, Homo sapien
cccgggactgcttggcattggcgcc

SEQ ID NO: 6077822 - DNA, 25 bp, Homo sapien
tgggctctgccacgaagtctcggtg

SEQ ID NO: 6077823 - DNA, 25 bp, Homo sapien
cagtcccgggactgcttggcattgg

SEQ ID NO: 6077824 - DNA, 25 bp, Homo sapien
tggcattggcgccacaagtgtcttt

SEQ ID NO: 6077825 - DNA, 25 bp, Homo sapien
gcatccgaagcagtcccgggactgc

SEQ ID NO: 6077826 - DNA, 25 bp, Homo sapien
ggactgcttggcattggcgccacaa

SEQ ID NO: 6077827 - DNA, 25 bp, Homo sapien
ccgggactgcttggcattggcgcca

SEQ ID NO: 6077828 - DNA, 25 bp, Homo sapien
cgcgactggcgtaccaggcaggatt

SEQ ID NO: 6077829 - DNA, 25 bp, Homo sapien
catggagtgccgatgggtacgactt

SEQ ID NO: 6077830 - DNA, 25 bp, Homo sapien
cgatgggtacgacttgcagctcccc

SEQ ID NO: 6077831 - DNA, 25 bp, Homo sapien
ccatggagtgccgatgggtacgact

SEQ ID NO: 6077832 - DNA, 25 bp, Homo sapien
acaggcctgatcccgcgactggcgt

SEQ ID NO: 6077833 - DNA, 25 bp, Homo sapien
ctgatcccgcgactggcgtaccagg

SEQ ID NO: 6077834 - DNA, 25 bp, Homo sapien
actggcgtaccaggcaggattgatg

SEQ ID NO: 6077835 - DNA, 25 bp, Homo sapien
agtgccgatgggtacgacttgcagc

SEQ ID NO: 6077836 - DNA, 25 bp, Homo sapien
gggtacgacttgcagctccccgcag

SEQ ID NO: 6077837 - DNA, 25 bp, Homo sapien
tgccgatgggtacgacttgcagctc

SEQ ID NO: 6077838 - DNA, 25 bp, Homo sapien
ttgccctcctccgaccgaagcggcc

SEQ ID NO: 6077839 - DNA, 25 bp, Homo sapien
atctccatggagtgccgatgggtac

SEQ ID NO: 6077840 - DNA, 25 bp, Homo sapien
gatgcggatcttgcagttgtcgcgc

SEQ ID NO: 6077841 - DNA, 25 bp, Homo sapien
gaccgtcttttgtacgttgagctcg

SEQ ID NO: 6077842 - DNA, 25 bp, Homo sapien
atctggtcgcccgagacttccttgc

SEQ ID NO: 6077843 - DNA, 25 bp, Homo sapien
gcgcgttgtactgcgcccgcgaaat

SEQ ID NO: 6077844 - DNA, 25 bp, Homo sapien
caagaagagctcgtgtacgtcgcgg

SEQ ID NO: 6077845 - DNA, 25 bp, Homo sapien
gcaagttctcggaaaacacgtccca

SEQ ID NO: 6077846 - DNA, 25 bp, Homo sapien
ttcacgtcggccagcaagttctcgg

SEQ ID NO: 6077847 - DNA, 25 bp, Homo sapien
tgagctcgatgacgttcagggtgtc

SEQ ID NO: 6077848 - DNA, 25 bp, Homo sapien
cgcggtggcggctctcgatctcgtt

SEQ ID NO: 6077849 - DNA, 25 bp, Homo sapien
atgtcctcgatctggtcgcccgaga

SEQ ID NO: 6077850 - DNA, 25 bp, Homo sapien
ttaccctgctcgaacatgtcctcga

SEQ ID NO: 6077851 - DNA, 25 bp, Homo sapien
agttgtcgcgctgcttcatctcggc

SEQ ID NO: 6077852 - DNA, 25 bp, Homo sapien
attcccacagggagcgcgcgcgaca

SEQ ID NO: 6077853 - DNA, 25 bp, Homo sapien
agcgtgtgtgacttgatctggtgcg

SEQ ID NO: 6077854 - DNA, 25 bp, Homo sapien
gggtcctgcgggcacacttgccctt

SEQ ID NO: 6077855 - DNA, 25 bp, Homo sapien
actgaacttgtgctggtagtctggg

SEQ ID NO: 6077856 - DNA, 25 bp, Homo sapien
agttccggaagtcctcggccctcag

SEQ ID NO: 6077857 - DNA, 25 bp, Homo sapien
cggcgcccgccttagagatctgatt

SEQ ID NO: 6077858 - DNA, 25 bp, Homo sapien
ccttagagatctgattgcggttcct

SEQ ID NO: 6077859 - DNA, 25 bp, Homo sapien
gggagcgcgcgcgacaaccacagtc

SEQ ID NO: 6077860 - DNA, 25 bp, Homo sapien
cgggcggccctgtcggtggtggtga

SEQ ID NO: 6077861 - DNA, 25 bp, Homo sapien
tcccgtgcagttccggaagtcctcg

SEQ ID NO: 6077862 - DNA, 25 bp, Homo sapien
ccgggccgtaggcatgatgtcaaaa

SEQ ID NO: 6077863 - DNA, 25 bp, Homo sapien
acgctggtcccgtgcagttccggaa

SEQ ID NO: 6077864 - DNA, 25 bp, Homo sapien
cccagacggccaaataggagcggct

SEQ ID NO: 6077865 - DNA, 25 bp, Homo sapien
gaagcatgatgcgagtgctggcacc

SEQ ID NO: 6077866 - DNA, 25 bp, Homo sapien
ctggtgtccagcagaccacgaacgc

SEQ ID NO: 6077867 - DNA, 25 bp, Homo sapien
tacagccaggacattgcaggactca

SEQ ID NO: 6077868 - DNA, 25 bp, Homo sapien
gaaggtgcggcgcatctcagcatct

SEQ ID NO: 6077869 - DNA, 25 bp, Homo sapien
ggactcacagcctaaaccatccagg

SEQ ID NO: 6077870 - DNA, 25 bp, Homo sapien
gcatctcggcaagagtacacagcag

SEQ ID NO: 6077871 - DNA, 25 bp, Homo sapien
tcgccgccgcacgtagaagaaaatg

SEQ ID NO: 6077872 - DNA, 25 bp, Homo sapien
taggaagtacttttctacagccagg

SEQ ID NO: 6077873 - DNA, 25 bp, Homo sapien
atgtatagtggacagactcgcgggt

SEQ ID NO: 6077874 - DNA, 25 bp, Homo sapien
gatgatgacaacagtcttgaccagg

SEQ ID NO: 6077875 - DNA, 25 bp, Homo sapien
ggaagacaagcaggctcgacagagc

SEQ ID NO: 6077876 - DNA, 25 bp, Homo sapien
tccaagcacaggctggtttgcaatt

SEQ ID NO: 6077877 - DNA, 25 bp, Homo sapien
gcaattcttgaacctggcgtttctt

SEQ ID NO: 6077878 - DNA, 25 bp, Homo sapien
ctttccaagcacaggctggtttgca

SEQ ID NO: 6077879 - DNA, 25 bp, Homo sapien
caagcacaggctggtttgcaattct

SEQ ID NO: 6077880 - DNA, 25 bp, Homo sapien
gcacaggctggtttgcaattcttga

SEQ ID NO: 6077881 - DNA, 25 bp, Homo sapien
aatcatcggacggtatcaactaacc

SEQ ID NO: 6077882 - DNA, 25 bp, Homo sapien
tttgcaattcttgaacctggcgttt

SEQ ID NO: 6077883 - DNA, 25 bp, Homo sapien
ggttggggcaactccctgcagggca

SEQ ID NO: 6077884 - DNA, 25 bp, Homo sapien
tcatcggacggtatcaactaaccat

SEQ ID NO: 6077885 - DNA, 25 bp, Homo sapien
tcggacggtatcaactaaccatctt

SEQ ID NO: 6077886 - DNA, 25 bp, Homo sapien
ggacggtatcaactaaccatctttc

SEQ ID NO: 6077887 - DNA, 25 bp, Homo sapien
gaagaatcatcggacggtatcaact

SEQ ID NO: 6077888 - DNA, 25 bp, Homo sapien
aaaaccagctgtaataaagcctcag

SEQ ID NO: 6077889 - DNA, 25 bp, Homo sapien
ggaaccacatcgtacttttgacaat

SEQ ID NO: 6077890 - DNA, 25 bp, Homo sapien
tttaatatctccatcacagtgcacc

SEQ ID NO: 6077891 - DNA, 25 bp, Homo sapien
tgaggctacaattgagagaaactgc

SEQ ID NO: 6077892 - DNA, 25 bp, Homo sapien
gctcaatgttctagctggtaagcac

SEQ ID NO: 6077893 - DNA, 25 bp, Homo sapien
ctggcttctcgagcagaacagactg

SEQ ID NO: 6077894 - DNA, 25 bp, Homo sapien
cgccagagcatcaaaggccatgtat

SEQ ID NO: 6077895 - DNA, 25 bp, Homo sapien
gggaaatgcagtagacgccagagca

SEQ ID NO: 6077896 - DNA, 25 bp, Homo sapien
gacaatcatagaacgaaagctcaca

SEQ ID NO: 6077897 - DNA, 25 bp, Homo sapien
aacagggtctgcatccatcatattg

SEQ ID NO: 6077898 - DNA, 25 bp, Homo sapien
ccttcacttgccattggctgatgca

SEQ ID NO: 6077899 - DNA, 25 bp, Homo sapien
tcacctcacgtgctcaatgttctag

SEQ ID NO: 6077900 - DNA, 25 bp, Homo sapien
cgaggtccagtactcagcatgcgaa

SEQ ID NO: 6077901 - DNA, 25 bp, Homo sapien
tatatggcaatagttacagaccgca

SEQ ID NO: 6077902 - DNA, 25 bp, Homo sapien
tgtagatctcagagcacgcgttctg

SEQ ID NO: 6077903 - DNA, 25 bp, Homo sapien
catgcgaagagccatatcacggagg

SEQ ID NO: 6077904 - DNA, 25 bp, Homo sapien
ccacggtggaggtattggcagccac

SEQ ID NO: 6077905 - DNA, 25 bp, Homo sapien
ttacatggctctggtccgaggtcca

SEQ ID NO: 6077906 - DNA, 25 bp, Homo sapien
tcaatgcagagtcctttgggcttcc

SEQ ID NO: 6077907 - DNA, 25 bp, Homo sapien
gctgggccttaaagtccgtcttcat

SEQ ID NO: 6077908 - DNA, 25 bp, Homo sapien
ggaacaggccttttcttacatggct

SEQ ID NO: 6077909 - DNA, 25 bp, Homo sapien
tcagtggctcccgtgtgtcggtctc

SEQ ID NO: 6077910 - DNA, 25 bp, Homo sapien
tgtgaccctgaagactcggatgtgg

SEQ ID NO: 6077911 - DNA, 25 bp, Homo sapien
tgttgcggatccgagtcagtggctc

SEQ ID NO: 6077912 - DNA, 25 bp, Homo sapien
tgattgttggtttattaccaggtac

SEQ ID NO: 6077913 - DNA, 25 bp, Homo sapien
caaacgtattttggaagtagcaagc

SEQ ID NO: 6077914 - DNA, 25 bp, Homo sapien
taaacgttctataatgattgttggt

SEQ ID NO: 6077915 - DNA, 25 bp, Homo sapien
gctcgatatgcacaaagacactctg

SEQ ID NO: 6077916 - DNA, 25 bp, Homo sapien
atatatcatcttactgttctcggta

SEQ ID NO: 6077917 - DNA, 25 bp, Homo sapien
taacttaccagtcagctattcctgc

SEQ ID NO: 6077918 - DNA, 25 bp, Homo sapien
atttagaaaacgaacttgaaatctg

SEQ ID NO: 6077919 - DNA, 25 bp, Homo sapien
ttttattgctacactgtagggaaaa

SEQ ID NO: 6077920 - DNA, 25 bp, Homo sapien
ctgttctcggtataacaatgttagg

SEQ ID NO: 6077921 - DNA, 25 bp, Homo sapien
taacaatgttaggtgctcgatatgc

SEQ ID NO: 6077922 - DNA, 25 bp, Homo sapien
aaatattattgactttcttcctgtc

SEQ ID NO: 6077923 - DNA, 25 bp, Homo sapien
taaatcaaggtcttcagatgaacac

SEQ ID NO: 6077924 - DNA, 25 bp, Homo sapien
gaccaacagtttgcgcagctcctcg

SEQ ID NO: 6077925 - DNA, 25 bp, Homo sapien
tgcggcttgagctccacgtgatagg

SEQ ID NO: 6077926 - DNA, 25 bp, Homo sapien
ggcagccagcagacggcgaacacca

SEQ ID NO: 6077927 - DNA, 25 bp, Homo sapien
ctgtcgtgcagccaggcgtagatga

SEQ ID NO: 6077928 - DNA, 25 bp, Homo sapien
cacccggacgtaagacaggaggatg

SEQ ID NO: 6077929 - DNA, 25 bp, Homo sapien
ggcaccacgcggttgcggagcttca

SEQ ID NO: 6077930 - DNA, 25 bp, Homo sapien
ttgtagcaggccgaactcatggcga

SEQ ID NO: 6077931 - DNA, 25 bp, Homo sapien
agatgcgccgcctcagcgggtgcac

SEQ ID NO: 6077932 - DNA, 25 bp, Homo sapien
gggccaagcgaccaacagtttgcgc

SEQ ID NO: 6077933 - DNA, 25 bp, Homo sapien
gttgcggagcttcactgacacccgg

SEQ ID NO: 6077934 - DNA, 25 bp, Homo sapien
aactcatggcgagccagtggcagag

SEQ ID NO: 6077935 - DNA, 25 bp, Homo sapien
ctccacgtgataggtgtgcacggcg

SEQ ID NO: 6077936 - DNA, 25 bp, Homo sapien
tttcgttctttacttaactgatgga

SEQ ID NO: 6077937 - DNA, 25 bp, Homo sapien
tcgtactgtctaatctagcaaagcc

SEQ ID NO: 6077938 - DNA, 25 bp, Homo sapien
taactgatggaaaggagtgcttggc

SEQ ID NO: 6077939 - DNA, 25 bp, Homo sapien
agagaccgcgccactggactcagag

SEQ ID NO: 6077940 - DNA, 25 bp, Homo sapien
ttatctgccatcaagggttcctgaa

SEQ ID NO: 6077941 - DNA, 25 bp, Homo sapien
aattgtttcggttcttactgtctca

SEQ ID NO: 6077942 - DNA, 25 bp, Homo sapien
gcttggctgtcaattctatgattac

SEQ ID NO: 6077943 - DNA, 25 bp, Homo sapien
caacgtgctctaatgattaccaaga

SEQ ID NO: 6077944 - DNA, 25 bp, Homo sapien
tctcagatgataaaacaacgtgctc

SEQ ID NO: 6077945 - DNA, 25 bp, Homo sapien
tatgttactgtcaaagagtttacag

SEQ ID NO: 6077946 - DNA, 25 bp, Homo sapien
caacattgcatggtctttcttgtac

SEQ ID NO: 6077947 - DNA, 25 bp, Homo sapien
ctttcttgtacatgatagtttccac

SEQ ID NO: 6077948 - DNA, 25 bp, Homo sapien
gaaagccaaacgctgggcatgagga

SEQ ID NO: 6077949 - DNA, 25 bp, Homo sapien
tcagtggttgctgggcacatactgg

SEQ ID NO: 6077950 - DNA, 25 bp, Homo sapien
ggaagccacctgcaacccagggttc

SEQ ID NO: 6077951 - DNA, 25 bp, Homo sapien
caaagcttaggcccttgggatctgg

SEQ ID NO: 6077952 - DNA, 25 bp, Homo sapien
aaattcagtgcctgcagccgacact

SEQ ID NO: 6077953 - DNA, 25 bp, Homo sapien
caggcttgggcgtggaaatctcttt

SEQ ID NO: 6077954 - DNA, 25 bp, Homo sapien
gggccttattaaaactctcagcctc

SEQ ID NO: 6077955 - DNA, 25 bp, Homo sapien
cagggttccttgtggtcagttggca

SEQ ID NO: 6077956 - DNA, 25 bp, Homo sapien
gccgacactggtagctgctcccgat

SEQ ID NO: 6077957 - DNA, 25 bp, Homo sapien
ccgaggcctgccatcagtggttgct

SEQ ID NO: 6077958 - DNA, 25 bp, Homo sapien
ccaagaggtgctcaaggcctgggtc

SEQ ID NO: 6077959 - DNA, 25 bp, Homo sapien
gtcagccccaatgggtagccggagc

SEQ ID NO: 6077960 - DNA, 25 bp, Homo sapien
gcagaccttcttgttgggcaggtca

SEQ ID NO: 6077961 - DNA, 25 bp, Homo sapien
ctccaagcttattgaggacccgaga

SEQ ID NO: 6077962 - DNA, 25 bp, Homo sapien
cctgttttcttcagggttgcaagca

SEQ ID NO: 6077963 - DNA, 25 bp, Homo sapien
gcttattgaggacccgagagacagc

SEQ ID NO: 6077964 - DNA, 25 bp, Homo sapien
gaccttcttgttgggcaggtcaatg

SEQ ID NO: 6077965 - DNA, 25 bp, Homo sapien
tattgaggacccgagagacagcttc

SEQ ID NO: 6077966 - DNA, 25 bp, Homo sapien
gttttcttcagggttgcaagcagag

SEQ ID NO: 6077967 - DNA, 25 bp, Homo sapien
gggttgcaagcagagtgtccatgct

SEQ ID NO: 6077968 - DNA, 25 bp, Homo sapien
atgcagaccttcttgttgggcaggt

SEQ ID NO: 6077969 - DNA, 25 bp, Homo sapien
tcagggttgcaagcagagtgtccat

SEQ ID NO: 6077970 - DNA, 25 bp, Homo sapien
tcttcagggttgcaagcagagtgtc

SEQ ID NO: 6077971 - DNA, 25 bp, Homo sapien
ccaagcttattgaggacccgagaga

SEQ ID NO: 6077972 - DNA, 25 bp, Homo sapien
gcagcgagtgacgttgcctgagcca

SEQ ID NO: 6077973 - DNA, 25 bp, Homo sapien
acacagttggtgctaaggaggcaga

SEQ ID NO: 6077974 - DNA, 25 bp, Homo sapien
tgtgcatcattaatggcctggtgga

SEQ ID NO: 6077975 - DNA, 25 bp, Homo sapien
aatggccacccagatgaccaaggac

SEQ ID NO: 6077976 - DNA, 25 bp, Homo sapien
tcgtaatgctcaaagcagcgagtga

SEQ ID NO: 6077977 - DNA, 25 bp, Homo sapien
agatgatgaacaccgccaagaccgt

SEQ ID NO: 6077978 - DNA, 25 bp, Homo sapien
gcagagggtgacctgatgtgcatca

SEQ ID NO: 6077979 - DNA, 25 bp, Homo sapien
ggcacgctgcccttctcgtaatgct

SEQ ID NO: 6077980 - DNA, 25 bp, Homo sapien
tgaacacgatgaagatgtggatgat

SEQ ID NO: 6077981 - DNA, 25 bp, Homo sapien
tcagtgaccgtatccgtggtggccc

SEQ ID NO: 6077982 - DNA, 25 bp, Homo sapien
gctgcaccggctgcatgagcaaggt

SEQ ID NO: 6077983 - DNA, 25 bp, Homo sapien
catgagcaaggtacggatgatgacc

SEQ ID NO: 6077984 - DNA, 25 bp, Homo sapien
tccggcggcaacgaatggatcttgg

SEQ ID NO: 6077985 - DNA, 25 bp, Homo sapien
ccctccggcggcaacgaatggatct

SEQ ID NO: 6077986 - DNA, 25 bp, Homo sapien
gaaggtcacgaagcaggaggtaagc

SEQ ID NO: 6077987 - DNA, 25 bp, Homo sapien
cctccggcggcaacgaatggatctt

SEQ ID NO: 6077988 - DNA, 25 bp, Homo sapien
ttcccctccggcggcaacgaatgga

SEQ ID NO: 6077989 - DNA, 25 bp, Homo sapien
ctccggcggcaacgaatggatcttg

SEQ ID NO: 6077990 - DNA, 25 bp, Homo sapien
agccgccgggccgagcctgtcaagc

SEQ ID NO: 6077991 - DNA, 25 bp, Homo sapien
cggcaacgaatggatcttggcgcgc

SEQ ID NO: 6077992 - DNA, 25 bp, Homo sapien
aggaaggtcacgaagcaggaggtaa

SEQ ID NO: 6077993 - DNA, 25 bp, Homo sapien
aacgaatggatcttggcgcgcggca

SEQ ID NO: 6077994 - DNA, 25 bp, Homo sapien
caacgaatggatcttggcgcgcggc

SEQ ID NO: 6077995 - DNA, 25 bp, Homo sapien
cgaatggatcttggcgcgcggcact

SEQ ID NO: 6077996 - DNA, 25 bp, Homo sapien
aatcagcacatttatgggatttctt

SEQ ID NO: 6077997 - DNA, 25 bp, Homo sapien
ctggtgttgaaaaagagttgaactc

SEQ ID NO: 6077998 - DNA, 25 bp, Homo sapien
tcaaatcgaatagtcatgccccact

SEQ ID NO: 6077999 - DNA, 25 bp, Homo sapien
cttcaccctgatatttttgccccgg

SEQ ID NO: 6078000 - DNA, 25 bp, Homo sapien
ccgtcgatgctgaatgagattagaa

SEQ ID NO: 6078001 - DNA, 25 bp, Homo sapien
gcttgagtcaaatcgaatagtcatg

SEQ ID NO: 6078002 - DNA, 25 bp, Homo sapien
tgccggcctgttttgcgcttgttct

SEQ ID NO: 6078003 - DNA, 25 bp, Homo sapien
tctgagtctactgaagcttgagtca

SEQ ID NO: 6078004 - DNA, 25 bp, Homo sapien
caagagggtaagtgagtcttcaccc

SEQ ID NO: 6078005 - DNA, 25 bp, Homo sapien
ccccgtatggatccgtcgatgctga

SEQ ID NO: 6078006 - DNA, 25 bp, Homo sapien
ctttccaagagggtaagtgagtctt

SEQ ID NO: 6078007 - DNA, 25 bp, Homo sapien
tgttttgcgcttgttctcataggcc

SEQ ID NO: 6078008 - DNA, 25 bp, Homo sapien
ttggcggcggcgaatatcggccggg

SEQ ID NO: 6078009 - DNA, 25 bp, Homo sapien
cagagagctggagaactctgcacgc

SEQ ID NO: 6078010 - DNA, 25 bp, Homo sapien
agctgggatgtggtaaagggcgtgc

SEQ ID NO: 6078011 - DNA, 25 bp, Homo sapien
tcttctgaattttccgacttgaccg

SEQ ID NO: 6078012 - DNA, 25 bp, Homo sapien
gagagctggagaactctgcacgctc

SEQ ID NO: 6078013 - DNA, 25 bp, Homo sapien
tctgaattttccgacttgaccgagg

SEQ ID NO: 6078014 - DNA, 25 bp, Homo sapien
gaggtactgtttctgacggaacttg

SEQ ID NO: 6078015 - DNA, 25 bp, Homo sapien
taaagggcgtgcgcggcttccgatt

SEQ ID NO: 6078016 - DNA, 25 bp, Homo sapien
ctgaattttccgacttgaccgaggc

SEQ ID NO: 6078017 - DNA, 25 bp, Homo sapien
tgaattttccgacttgaccgaggcg

SEQ ID NO: 6078018 - DNA, 25 bp, Homo sapien
ggccgaggcgctttcggccggcagc

SEQ ID NO: 6078019 - DNA, 25 bp, Homo sapien
ggatgtggtaaagggcgtgcgcggc

SEQ ID NO: 6078020 - DNA, 25 bp, Homo sapien
acaaccgagctgatctcctctgtgg

SEQ ID NO: 6078021 - DNA, 25 bp, Homo sapien
caaccgagctgatctcctctgtggc

SEQ ID NO: 6078022 - DNA, 25 bp, Homo sapien
gaggcatctcggttttttgcagggt

SEQ ID NO: 6078023 - DNA, 25 bp, Homo sapien
ttatcacctttagcatctccttttg

SEQ ID NO: 6078024 - DNA, 25 bp, Homo sapien
tgtagaggcatctcggttttttgca

SEQ ID NO: 6078025 - DNA, 25 bp, Homo sapien
tgatctcctctgtggctcatccttc

SEQ ID NO: 6078026 - DNA, 25 bp, Homo sapien
gggttgtttccatcctttccagcat

SEQ ID NO: 6078027 - DNA, 25 bp, Homo sapien
gcagggttgtttccatcctttccag

SEQ ID NO: 6078028 - DNA, 25 bp, Homo sapien
tttgcagggttgtttccatcctttc

SEQ ID NO: 6078029 - DNA, 25 bp, Homo sapien
gacaaccgagctgatctcctctgtg

SEQ ID NO: 6078030 - DNA, 25 bp, Homo sapien
actggagtgtagaggcatctcggtt

SEQ ID NO: 6078031 - DNA, 25 bp, Homo sapien
gcatctccttttgcctttctcttgg

SEQ ID NO: 6078032 - DNA, 25 bp, Homo sapien
ttctccctttgggaagcttctctcc

SEQ ID NO: 6078033 - DNA, 25 bp, Homo sapien
tttagcagacaaccgagctgatctc

SEQ ID NO: 6078034 - DNA, 25 bp, Homo sapien
gcaggagcattgttttccggaggcc

SEQ ID NO: 6078035 - DNA, 25 bp, Homo sapien
caccacctgcgactgcacgttgtgg

SEQ ID NO: 6078036 - DNA, 25 bp, Homo sapien
ctccaggcgaagtgagcggagtact

SEQ ID NO: 6078037 - DNA, 25 bp, Homo sapien
aagcgctgccgccaacggatgaagg

SEQ ID NO: 6078038 - DNA, 25 bp, Homo sapien
tctgggccagctggttaatctgccg

SEQ ID NO: 6078039 - DNA, 25 bp, Homo sapien
gaatatggttttccgtcaagattcc

SEQ ID NO: 6078040 - DNA, 25 bp, Homo sapien
acagcggtagatatccgtctgggac

SEQ ID NO: 6078041 - DNA, 25 bp, Homo sapien
tgccgccaacggatgaaggcctcca

SEQ ID NO: 6078042 - DNA, 25 bp, Homo sapien
tagatatccgtctgggacagtccca

SEQ ID NO: 6078043 - DNA, 25 bp, Homo sapien
tgagcggagtacttgtttgtctctg

SEQ ID NO: 6078044 - DNA, 25 bp, Homo sapien
gctggttaatctgccggtctgatgg

SEQ ID NO: 6078045 - DNA, 25 bp, Homo sapien
ccctggaaggtaggatatccagcag

SEQ ID NO: 6078046 - DNA, 25 bp, Homo sapien
aatgcaccacaagcagaaggttact

SEQ ID NO: 6078047 - DNA, 25 bp, Homo sapien
tcgtgatgttcagggcaggaatgaa

SEQ ID NO: 6078048 - DNA, 25 bp, Homo sapien
catctgctttacagtgcggacactt

SEQ ID NO: 6078049 - DNA, 25 bp, Homo sapien
gaatcagcagccatattgccaggga

SEQ ID NO: 6078050 - DNA, 25 bp, Homo sapien
cagccatattgccagggagatgcca

SEQ ID NO: 6078051 - DNA, 25 bp, Homo sapien
catgacaggtcgtgatgttcagggc

SEQ ID NO: 6078052 - DNA, 25 bp, Homo sapien
cggacacttcggcaaaggagagcgt

SEQ ID NO: 6078053 - DNA, 25 bp, Homo sapien
caatgtacagggcatagacatggct

SEQ ID NO: 6078054 - DNA, 25 bp, Homo sapien
gaagtaattgaacatgtctcccacc

SEQ ID NO: 6078055 - DNA, 25 bp, Homo sapien
gatcgcagcattctgatcatcagca

SEQ ID NO: 6078056 - DNA, 25 bp, Homo sapien
acagtgacaatgagtttgatggccc

SEQ ID NO: 6078057 - DNA, 25 bp, Homo sapien
tttgaggtgagggatacttgcatct

SEQ ID NO: 6078058 - DNA, 25 bp, Homo sapien
gaaactttttctgcgcatgcttcga

SEQ ID NO: 6078059 - DNA, 25 bp, Homo sapien
cgtagactaccagatcggaaacttt

SEQ ID NO: 6078060 - DNA, 25 bp, Homo sapien
gacacgtgctgaggttcatgaggaa

SEQ ID NO: 6078061 - DNA, 25 bp, Homo sapien
aaatgtcagtcgagtgaggttcagc

SEQ ID NO: 6078062 - DNA, 25 bp, Homo sapien
tgtcagaaatcttgaggcaggtggc

SEQ ID NO: 6078063 - DNA, 25 bp, Homo sapien
tgacactaatgactcgagcctgaaa

SEQ ID NO: 6078064 - DNA, 25 bp, Homo sapien
gtcagggtcattatccagactccca

SEQ ID NO: 6078065 - DNA, 25 bp, Homo sapien
agttctttggcgtacttcggctgta

SEQ ID NO: 6078066 - DNA, 25 bp, Homo sapien
tagagaatcacatccagacacgtgc

SEQ ID NO: 6078067 - DNA, 25 bp, Homo sapien
tatgaataatgaccaagtagcaccc

SEQ ID NO: 6078068 - DNA, 25 bp, Homo sapien
cagcgtgatgatgatccttatggac

SEQ ID NO: 6078069 - DNA, 25 bp, Homo sapien
tcagcttagacgtcctgccgtgaag

SEQ ID NO: 6078070 - DNA, 25 bp, Homo sapien
tcatcacatggcgaagttctgcagc

SEQ ID NO: 6078071 - DNA, 25 bp, Homo sapien
caagagatctcattacagttcccaa

SEQ ID NO: 6078072 - DNA, 25 bp, Homo sapien
tgtcaaatagtgaaaaagcttcttt

SEQ ID NO: 6078073 - DNA, 25 bp, Homo sapien
gattctgcccaagagatctcattac

SEQ ID NO: 6078074 - DNA, 25 bp, Homo sapien
tctttgaattctgcaatctgctctt

SEQ ID NO: 6078075 - DNA, 25 bp, Homo sapien
ggaagtcaattgtgccattaccatc

SEQ ID NO: 6078076 - DNA, 25 bp, Homo sapien
acatggcgaagttctgcagcactaa

SEQ ID NO: 6078077 - DNA, 25 bp, Homo sapien
ctgtgggattctgcccaagagatct

SEQ ID NO: 6078078 - DNA, 25 bp, Homo sapien
cacatggcgaagttctgcagcacta

SEQ ID NO: 6078079 - DNA, 25 bp, Homo sapien
ttcatagtttacttgaccatcacca

SEQ ID NO: 6078080 - DNA, 25 bp, Homo sapien
caatctgctcttcagtcagttggtc

SEQ ID NO: 6078081 - DNA, 25 bp, Homo sapien
attacagttcccaattcctttgttg

SEQ ID NO: 6078082 - DNA, 25 bp, Homo sapien
gatcgcagcattctgatcatcagca

SEQ ID NO: 6078083 - DNA, 25 bp, Homo sapien
aatgcaccacaagcagaaggttact

SEQ ID NO: 6078084 - DNA, 25 bp, Homo sapien
cagccatattgccagggagatgcca

SEQ ID NO: 6078085 - DNA, 25 bp, Homo sapien
catgacaggtcgtgatgttcagggc

SEQ ID NO: 6078086 - DNA, 25 bp, Homo sapien
gaatcagcagccatattgccaggga

SEQ ID NO: 6078087 - DNA, 25 bp, Homo sapien
cggacacttcggcaaaggagagcgt

SEQ ID NO: 6078088 - DNA, 25 bp, Homo sapien
caatgtacagggcatagacatggct

SEQ ID NO: 6078089 - DNA, 25 bp, Homo sapien
gaagtaattgaacatgtctcccacc

SEQ ID NO: 6078090 - DNA, 25 bp, Homo sapien
tcgtgatgttcagggcaggaatgaa

SEQ ID NO: 6078091 - DNA, 25 bp, Homo sapien
acagtgacaatgagtttgatggccc

SEQ ID NO: 6078092 - DNA, 25 bp, Homo sapien
tttgaggtgagggatacttgcatct

SEQ ID NO: 6078093 - DNA, 25 bp, Homo sapien
catctgctttacagtgcggacactt

SEQ ID NO: 6078094 - DNA, 25 bp, Homo sapien
gtccttccttctttgcttgggaagc

SEQ ID NO: 6078095 - DNA, 25 bp, Homo sapien
catgatctgctcagagtcagtgctt

SEQ ID NO: 6078096 - DNA, 25 bp, Homo sapien
tctgtatgatcccagttggtcaaag

SEQ ID NO: 6078097 - DNA, 25 bp, Homo sapien
ccttctttgcttgggaagccatctt

SEQ ID NO: 6078098 - DNA, 25 bp, Homo sapien
caatgattgaattctgtagttcttt

SEQ ID NO: 6078099 - DNA, 25 bp, Homo sapien
ggattcccagctaatggaattttca

SEQ ID NO: 6078100 - DNA, 25 bp, Homo sapien
ttattgattgaaactaattctgaca

SEQ ID NO: 6078101 - DNA, 25 bp, Homo sapien
gaagtccatgatctgctcagagtca

SEQ ID NO: 6078102 - DNA, 25 bp, Homo sapien
gtttagtaggtcaatgattgaattc

SEQ ID NO: 6078103 - DNA, 25 bp, Homo sapien
tctgacagggggaaagccacagtca

SEQ ID NO: 6078104 - DNA, 25 bp, Homo sapien
tgcttgggaagccatcttaggatta

SEQ ID NO: 6078105 - DNA, 25 bp, Homo sapien
attttcactgtgatgtctgtgttct

SEQ ID NO: 6078106 - DNA, 25 bp, Homo sapien
tggcgtgaagtccatgatctgctca

SEQ ID NO: 6078107 - DNA, 25 bp, Homo sapien
catccctgaatcacttccctcggtc

SEQ ID NO: 6078108 - DNA, 25 bp, Homo sapien
agaccacagaagacagtgatcacca

SEQ ID NO: 6078109 - DNA, 25 bp, Homo sapien
aagtcgcaggtttatttcaaagttg

SEQ ID NO: 6078110 - DNA, 25 bp, Homo sapien
ccctggaatggcaagtcgcaggttt

SEQ ID NO: 6078111 - DNA, 25 bp, Homo sapien
cagaagacagtgatcaccaggacct

SEQ ID NO: 6078112 - DNA, 25 bp, Homo sapien
atcagtagagaactcagaattctgt

SEQ ID NO: 6078113 - DNA, 25 bp, Homo sapien
tccagaaagccggaggagactgtct

SEQ ID NO: 6078114 - DNA, 25 bp, Homo sapien
cacagagtaaggtcagagcttagaa

SEQ ID NO: 6078115 - DNA, 25 bp, Homo sapien
aatggaattttcactgtgatgtctg

SEQ ID NO: 6078116 - DNA, 25 bp, Homo sapien
catcttaggattaatacccattttt

SEQ ID NO: 6078117 - DNA, 25 bp, Homo sapien
attgaaactaattctgacaggggga

SEQ ID NO: 6078118 - DNA, 25 bp, Homo sapien
tctgtagttctttattgattgaaac

SEQ ID NO: 6078119 - DNA, 25 bp, Homo sapien
ttgaattctgtagttctttattgat

SEQ ID NO: 6078120 - DNA, 25 bp, Homo sapien
gtaaggtcagagcttagaagatgcc

SEQ ID NO: 6078121 - DNA, 25 bp, Homo sapien
aggaccttgaaaagcatcatgcttt

SEQ ID NO: 6078122 - DNA, 25 bp, Homo sapien
cacagcatttctcatccctgaatca

SEQ ID NO: 6078123 - DNA, 25 bp, Homo sapien
agagtcagtgcttaaatcatcatct

SEQ ID NO: 6078124 - DNA, 25 bp, Homo sapien
ctcaacatcagtagagaactcagaa

SEQ ID NO: 6078125 - DNA, 25 bp, Homo sapien
aatggcaagtcgcaggtttatttca

SEQ ID NO: 6078126 - DNA, 25 bp, Homo sapien
ttgaaaagcatcatgctttacgtag

SEQ ID NO: 6078127 - DNA, 25 bp, Homo sapien
atcatctgtataatcctctagagga

SEQ ID NO: 6078128 - DNA, 25 bp, Homo sapien
ccagctaatggaattttcactgtga

SEQ ID NO: 6078129 - DNA, 25 bp, Homo sapien
cagttggtcaaagactgagtttagt

SEQ ID NO: 6078130 - DNA, 25 bp, Homo sapien
gactgtctcaacatcagtagagaac

SEQ ID NO: 6078131 - DNA, 25 bp, Homo sapien
ctcagaattctgtttgtttgcggct

SEQ ID NO: 6078132 - DNA, 25 bp, Homo sapien
attctgtttgtttgcggctggcgtg

SEQ ID NO: 6078133 - DNA, 25 bp, Homo sapien
agatgccttggcacagcatttctca

SEQ ID NO: 6078134 - DNA, 25 bp, Homo sapien
caggaagtaggggagactggattcc

SEQ ID NO: 6078135 - DNA, 25 bp, Homo sapien
gtaggtcaatgattgaattctgtag

SEQ ID NO: 6078136 - DNA, 25 bp, Homo sapien
tgcggctggcgtgaagtccatgatc

SEQ ID NO: 6078137 - DNA, 25 bp, Homo sapien
taaatcatcatctgtataatcctct

SEQ ID NO: 6078138 - DNA, 25 bp, Homo sapien
tcagtgaattcttccagaaagccgg

SEQ ID NO: 6078139 - DNA, 25 bp, Homo sapien
atttctcatccctgaatcacttccc

SEQ ID NO: 6078140 - DNA, 25 bp, Homo sapien
tgaatcacttccctcggtccttcct

SEQ ID NO: 6078141 - DNA, 25 bp, Homo sapien
gtgttctcagtgaattcttccagaa

SEQ ID NO: 6078142 - DNA, 25 bp, Homo sapien
agggggaaagccacagtcagaccac

SEQ ID NO: 6078143 - DNA, 25 bp, Homo sapien
ggaggagactgtctcaacatcagta

SEQ ID NO: 6078144 - DNA, 25 bp, Homo sapien
agtgcttaaatcatcatctgtataa

SEQ ID NO: 6078145 - DNA, 25 bp, Homo sapien
tgtccctctgtatgatcccagttgg

SEQ ID NO: 6078146 - DNA, 25 bp, Homo sapien
aaagccggaggagactgtctcaaca

SEQ ID NO: 6078147 - DNA, 25 bp, Homo sapien
gactgagtttagtaggtcaatgatt

SEQ ID NO: 6078148 - DNA, 25 bp, Homo sapien
acagtgatcaccaggaccttgaaaa

SEQ ID NO: 6078149 - DNA, 25 bp, Homo sapien
cttagaagatgccttggcacagcat

SEQ ID NO: 6078150 - DNA, 25 bp, Homo sapien
atcaccaggaccttgaaaagcatca

SEQ ID NO: 6078151 - DNA, 25 bp, Homo sapien
agagaactcagaattctgtttgttt

SEQ ID NO: 6078152 - DNA, 25 bp, Homo sapien
acagtcagaccacagaagacagtga

SEQ ID NO: 6078153 - DNA, 25 bp, Homo sapien
caggtttatttcaaagttggagtct

SEQ ID NO: 6078154 - DNA, 25 bp, Homo sapien
tttcaaagttggagtcttctcagga

SEQ ID NO: 6078155 - DNA, 25 bp, Homo sapien
actaattctgacagggggaaagcca

SEQ ID NO: 6078156 - DNA, 25 bp, Homo sapien
agcatcatgctttacgtagggttaa

SEQ ID NO: 6078157 - DNA, 25 bp, Homo sapien
cttggcacagcatttctcatccctg

SEQ ID NO: 6078158 - DNA, 25 bp, Homo sapien
gtcaaagactgagtttagtaggtca

SEQ ID NO: 6078159 - DNA, 25 bp, Homo sapien
aataatccctggaatggcaagtcgc

SEQ ID NO: 6078160 - DNA, 25 bp, Homo sapien
tgatcccagttggtcaaagactgag

SEQ ID NO: 6078161 - DNA, 25 bp, Homo sapien
tttgtttgcggctggcgtgaagtcc

SEQ ID NO: 6078162 - DNA, 25 bp, Homo sapien
ggaagccatcttaggattaataccc

SEQ ID NO: 6078163 - DNA, 25 bp, Homo sapien
cctcggtccttccttctttgcttgg

SEQ ID NO: 6078164 - DNA, 25 bp, Homo sapien
ctgctcagagtcagtgcttaaatca

SEQ ID NO: 6078165 - DNA, 25 bp, Homo sapien
tcagagcttagaagatgccttggca

SEQ ID NO: 6078166 - DNA, 25 bp, Homo sapien
agtaggggagactggattcccagct

SEQ ID NO: 6078167 - DNA, 25 bp, Homo sapien
atcctctagaggagcttttgtccct

SEQ ID NO: 6078168 - DNA, 25 bp, Homo sapien
ctaccaaagaccaataatccctgga

SEQ ID NO: 6078169 - DNA, 25 bp, Homo sapien
tagaggagcttttgtccctctgtat

SEQ ID NO: 6078170 - DNA, 25 bp, Homo sapien
ggagactggattcccagctaatgga

SEQ ID NO: 6078171 - DNA, 25 bp, Homo sapien
aaagccacagtcagaccacagaaga

SEQ ID NO: 6078172 - DNA, 25 bp, Homo sapien
aattcttccagaaagccggaggaga

SEQ ID NO: 6078173 - DNA, 25 bp, Homo sapien
atgtctgtgttctcagtgaattctt

SEQ ID NO: 6078174 - DNA, 25 bp, Homo sapien
gttctttattgattgaaactaattc

SEQ ID NO: 6078175 - DNA, 25 bp, Homo sapien
agttggagtcttctcaggaagtagg

SEQ ID NO: 6078176 - DNA, 25 bp, Homo sapien
agcttttgtccctctgtatgatccc

SEQ ID NO: 6078177 - DNA, 25 bp, Homo sapien
aagaccaataatccctggaatggca

SEQ ID NO: 6078178 - DNA, 25 bp, Homo sapien
tgtataatcctctagaggagctttt

SEQ ID NO: 6078179 - DNA, 25 bp, Homo sapien
actgtgatgtctgtgttctcagtga

SEQ ID NO: 6078180 - DNA, 25 bp, Homo sapien
tcttctcaggaagtaggggagactg

SEQ ID NO: 6078181 - DNA, 25 bp, Homo sapien
tattccttgtgacgcacatagatgc

SEQ ID NO: 6078182 - DNA, 25 bp, Homo sapien
caacaatgaggagtctgatcatctc

SEQ ID NO: 6078183 - DNA, 25 bp, Homo sapien
gcacatagatgcacagctcaaatgg

SEQ ID NO: 6078184 - DNA, 25 bp, Homo sapien
attggaaagcaatatctgagtcctc

SEQ ID NO: 6078185 - DNA, 25 bp, Homo sapien
tctgttagtaggctctgggaatccc

SEQ ID NO: 6078186 - DNA, 25 bp, Homo sapien
gaatcccatggtcaggtagaaagag

SEQ ID NO: 6078187 - DNA, 25 bp, Homo sapien
tccctgtgattatcacgcacgaacc

SEQ ID NO: 6078188 - DNA, 25 bp, Homo sapien
gcaaagttgtaaatgcgttggccat

SEQ ID NO: 6078189 - DNA, 25 bp, Homo sapien
gctcaaatggtttgccatcttcaaa

SEQ ID NO: 6078190 - DNA, 25 bp, Homo sapien
caatcgctgataagcactctggtca

SEQ ID NO: 6078191 - DNA, 25 bp, Homo sapien
caaagggtaaatagtagcatttctc

SEQ ID NO: 6078192 - DNA, 25 bp, Homo sapien
caggatgaccaaagtgcagtcggaa

SEQ ID NO: 6078193 - DNA, 25 bp, Homo sapien
tgtgtatggtccgggagtgatggac

SEQ ID NO: 6078194 - DNA, 25 bp, Homo sapien
cagtgtgtatggtccgggagtgatg

SEQ ID NO: 6078195 - DNA, 25 bp, Homo sapien
tgtatggtccgggagtgatggacat

SEQ ID NO: 6078196 - DNA, 25 bp, Homo sapien
gcagtgtgtatggtccgggagtgat

SEQ ID NO: 6078197 - DNA, 25 bp, Homo sapien
gtgtatggtccgggagtgatggaca

SEQ ID NO: 6078198 - DNA, 25 bp, Homo sapien
tatcacgcacgaacccacagggcaa

SEQ ID NO: 6078199 - DNA, 25 bp, Homo sapien
gtgtgtatggtccgggagtgatgga

SEQ ID NO: 6078200 - DNA, 25 bp, Homo sapien
agtgtgtatggtccgggagtgatgg

SEQ ID NO: 6078201 - DNA, 25 bp, Homo sapien
ataaagaaaggtgcggcaaacccag

SEQ ID NO: 6078202 - DNA, 25 bp, Homo sapien
cttactataaagaaaggtgcggcaa

SEQ ID NO: 6078203 - DNA, 25 bp, Homo sapien
cgctgctggaagttctgcgagggcc

SEQ ID NO: 6078204 - DNA, 25 bp, Homo sapien
ggtcatcatagccagcaaccgccac

SEQ ID NO: 6078205 - DNA, 25 bp, Homo sapien
tgaaaatggcaaattcttccccgga

SEQ ID NO: 6078206 - DNA, 25 bp, Homo sapien
tccggatactctggcccaacatgtc

SEQ ID NO: 6078207 - DNA, 25 bp, Homo sapien
ccgcagacacggaaggcggaagaaa

SEQ ID NO: 6078208 - DNA, 25 bp, Homo sapien
tcttaaactttcttcattctgttaa

SEQ ID NO: 6078209 - DNA, 25 bp, Homo sapien
agtagctggtgtcttactataaaga

SEQ ID NO: 6078210 - DNA, 25 bp, Homo sapien
attcttccccggaccctcctcatag

SEQ ID NO: 6078211 - DNA, 25 bp, Homo sapien
cacggaggtcgtgaacctccggata

SEQ ID NO: 6078212 - DNA, 25 bp, Homo sapien
acatgtcgctgctggaagttctgcg

SEQ ID NO: 6078213 - DNA, 25 bp, Homo sapien
agtataagagttcaagagtttaatc

SEQ ID NO: 6078214 - DNA, 25 bp, Homo sapien
ttgcatcggcactcgtggcaaattt

SEQ ID NO: 6078215 - DNA, 25 bp, Homo sapien
aaggtgcggcaaacccagatccaaa

SEQ ID NO: 6078216 - DNA, 25 bp, Homo sapien
ttctacacgaccttgcatcggcact

SEQ ID NO: 6078217 - DNA, 25 bp, Homo sapien
ggcccaacatgtcgctgctggaagt

SEQ ID NO: 6078218 - DNA, 25 bp, Homo sapien
aatatccttattttttaagtagctg

SEQ ID NO: 6078219 - DNA, 25 bp, Homo sapien
ccccggaccctcctcatagtggctg

SEQ ID NO: 6078220 - DNA, 25 bp, Homo sapien
gtggctgcgacggaccacggaggtc

SEQ ID NO: 6078221 - DNA, 25 bp, Homo sapien
tcgtggcaaatttcctggaagcccg

SEQ ID NO: 6078222 - DNA, 25 bp, Homo sapien
ccgccacttgttttccactgaaaat

SEQ ID NO: 6078223 - DNA, 25 bp, Homo sapien
acgaccttgcatcggcactcgtggc

SEQ ID NO: 6078224 - DNA, 25 bp, Homo sapien
tcccctttctacacgaccttgcatc

SEQ ID NO: 6078225 - DNA, 25 bp, Homo sapien
ctttcttcattctgttaaagggatg

SEQ ID NO: 6078226 - DNA, 25 bp, Homo sapien
tggaagttctgcgagggccgcagac

SEQ ID NO: 6078227 - DNA, 25 bp, Homo sapien
acacggaaggcggaagaaatggccg

SEQ ID NO: 6078228 - DNA, 25 bp, Homo sapien
ttctgcgagggccgcagacacggaa

SEQ ID NO: 6078229 - DNA, 25 bp, Homo sapien
tttttaagtagctggtgtcttacta

SEQ ID NO: 6078230 - DNA, 25 bp, Homo sapien
tttcagatcatctcttaaactttct

SEQ ID NO: 6078231 - DNA, 25 bp, Homo sapien
acccagatccaaagtacacggtcat

SEQ ID NO: 6078232 - DNA, 25 bp, Homo sapien
agcaaccgccacttgttttccactg

SEQ ID NO: 6078233 - DNA, 25 bp, Homo sapien
accctcctcatagtggctgcgacgg

SEQ ID NO: 6078234 - DNA, 25 bp, Homo sapien
tactctggcccaacatgtcgctgct

SEQ ID NO: 6078235 - DNA, 25 bp, Homo sapien
tggtgtcttactataaagaaaggtg

SEQ ID NO: 6078236 - DNA, 25 bp, Homo sapien
ctcatagtggctgcgacggaccacg

SEQ ID NO: 6078237 - DNA, 25 bp, Homo sapien
tccaattttcagatcatctcttaaa

SEQ ID NO: 6078238 - DNA, 25 bp, Homo sapien
cttgttttccactgaaaatggcaaa

SEQ ID NO: 6078239 - DNA, 25 bp, Homo sapien
gtttaatccaattttcagatcatct

SEQ ID NO: 6078240 - DNA, 25 bp, Homo sapien
tgaacctccggatactctggcccaa

SEQ ID NO: 6078241 - DNA, 25 bp, Homo sapien
ttccactgaaaatggcaaattcttc

SEQ ID NO: 6078242 - DNA, 25 bp, Homo sapien
agggatgaattaaatatccttattt

SEQ ID NO: 6078243 - DNA, 25 bp, Homo sapien
tgttaaagggatgaattaaatatcc

SEQ ID NO: 6078244 - DNA, 25 bp, Homo sapien
catagccagcaaccgccacttgttt

SEQ ID NO: 6078245 - DNA, 25 bp, Homo sapien
agtacacggtcatcatagccagcaa

SEQ ID NO: 6078246 - DNA, 25 bp, Homo sapien
aggtcgtgaacctccggatactctg

SEQ ID NO: 6078247 - DNA, 25 bp, Homo sapien
cgagggccgcagacacggaaggcgg

SEQ ID NO: 6078248 - DNA, 25 bp, Homo sapien
cggcaaacccagatccaaagtacac

SEQ ID NO: 6078249 - DNA, 25 bp, Homo sapien
atccaaagtacacggtcatcatagc

SEQ ID NO: 6078250 - DNA, 25 bp, Homo sapien
gaaggcggaagaaatggccgtacca

SEQ ID NO: 6078251 - DNA, 25 bp, Homo sapien
cttattttttaagtagctggtgtct

SEQ ID NO: 6078252 - DNA, 25 bp, Homo sapien
aagagttcaagagtttaatccaatt

SEQ ID NO: 6078253 - DNA, 25 bp, Homo sapien
tcattctgttaaagggatgaattaa

SEQ ID NO: 6078254 - DNA, 25 bp, Homo sapien
gcgacggaccacggaggtcgtgaac

SEQ ID NO: 6078255 - DNA, 25 bp, Homo sapien
gcggaagaaatggccgtaccaccta

SEQ ID NO: 6078256 - DNA, 25 bp, Homo sapien
cggcactcgtggcaaatttcctgga

SEQ ID NO: 6078257 - DNA, 25 bp, Homo sapien
tcaagagtttaatccaattttcaga

SEQ ID NO: 6078258 - DNA, 25 bp, Homo sapien
tagagatgtgggtatacagagaaaa

SEQ ID NO: 6078259 - DNA, 25 bp, Homo sapien
cagctctgggaaagtcctcttataa

SEQ ID NO: 6078260 - DNA, 25 bp, Homo sapien
gagaatactaggattattatagaga

SEQ ID NO: 6078261 - DNA, 25 bp, Homo sapien
gctccagcatgatctttgttgtcca

SEQ ID NO: 6078262 - DNA, 25 bp, Homo sapien
tctgagatgttaaattcttttgtgc

SEQ ID NO: 6078263 - DNA, 25 bp, Homo sapien
aattctgagatgttaaattcttttg

SEQ ID NO: 6078264 - DNA, 25 bp, Homo sapien
tagagaatactaggattattataga

SEQ ID NO: 6078265 - DNA, 25 bp, Homo sapien
caaatagctccagcatgatctttgt

SEQ ID NO: 6078266 - DNA, 25 bp, Homo sapien
tctgggaaagtcctcttataatttc

SEQ ID NO: 6078267 - DNA, 25 bp, Homo sapien
atagctccagcatgatctttgttgt

SEQ ID NO: 6078268 - DNA, 25 bp, Homo sapien
tactaggattattatagagatgtgg

SEQ ID NO: 6078269 - DNA, 25 bp, Homo sapien
tagctccagcatgatctttgttgtc

SEQ ID NO: 6078270 - DNA, 25 bp, Homo sapien
gcttgtttgaagtgactgtagatga

SEQ ID NO: 6078271 - DNA, 25 bp, Homo sapien
tcagcggctttgtcaaattcagcct

SEQ ID NO: 6078272 - DNA, 25 bp, Homo sapien
tacagagggaggaggagcagaggtt

SEQ ID NO: 6078273 - DNA, 25 bp, Homo sapien
ttgaggtccaagagccccggccgat

SEQ ID NO: 6078274 - DNA, 25 bp, Homo sapien
accaaggcattatgtcctcacaggt

SEQ ID NO: 6078275 - DNA, 25 bp, Homo sapien
gcattatgtcctcacaggtcacacg

SEQ ID NO: 6078276 - DNA, 25 bp, Homo sapien
atctcttcatcagttggctgagtct

SEQ ID NO: 6078277 - DNA, 25 bp, Homo sapien
tggaagtccctttcagcttgttcca

SEQ ID NO: 6078278 - DNA, 25 bp, Homo sapien
ctggccctaatgtatcacagccata

SEQ ID NO: 6078279 - DNA, 25 bp, Homo sapien
tattccgtatttcttctttagctcg

SEQ ID NO: 6078280 - DNA, 25 bp, Homo sapien
ggctggccaccaaatctggtgattt

SEQ ID NO: 6078281 - DNA, 25 bp, Homo sapien
cagaggttaacgctggccctaatgt

SEQ ID NO: 6078282 - DNA, 25 bp, Homo sapien
ccacataggtcttcatggcactttc

SEQ ID NO: 6078283 - DNA, 25 bp, Homo sapien
tgtcctcacaggtcacacgtgtggc

SEQ ID NO: 6078284 - DNA, 25 bp, Homo sapien
tgagacatactggtgaggtgatacg

SEQ ID NO: 6078285 - DNA, 25 bp, Homo sapien
gggaggaggagcagaggttaacgct

SEQ ID NO: 6078286 - DNA, 25 bp, Homo sapien
acagtagcttgtttgaagtgactgt

SEQ ID NO: 6078287 - DNA, 25 bp, Homo sapien
aacagcatctcttcatcagttggct

SEQ ID NO: 6078288 - DNA, 25 bp, Homo sapien
gcttcacctcctcagcggctttgtc

SEQ ID NO: 6078289 - DNA, 25 bp, Homo sapien
ttccttggaagtccctttcagcttg

SEQ ID NO: 6078290 - DNA, 25 bp, Homo sapien
atcatctacattagaaaaaaccaag

SEQ ID NO: 6078291 - DNA, 25 bp, Homo sapien
tgttccacgagtcccacttggcttt

SEQ ID NO: 6078292 - DNA, 25 bp, Homo sapien
gctttgtcaaattcagcctgagaca

SEQ ID NO: 6078293 - DNA, 25 bp, Homo sapien
tgactgtagatgaacagcatctctt

SEQ ID NO: 6078294 - DNA, 25 bp, Homo sapien
tgaggtgatacggatgccgaaagcg

SEQ ID NO: 6078295 - DNA, 25 bp, Homo sapien
cacaggtcacacgtgtggctggcca

SEQ ID NO: 6078296 - DNA, 25 bp, Homo sapien
tctgtatttacatcgcccacagtag

SEQ ID NO: 6078297 - DNA, 25 bp, Homo sapien
acgagtcccacttggctttgccctt

SEQ ID NO: 6078298 - DNA, 25 bp, Homo sapien
tcagcctgagacatactggtgaggt

SEQ ID NO: 6078299 - DNA, 25 bp, Homo sapien
ttcatggcactttccttggaagtcc

SEQ ID NO: 6078300 - DNA, 25 bp, Homo sapien
atactggtgaggtgatacggatgcc

SEQ ID NO: 6078301 - DNA, 25 bp, Homo sapien
aggtcttcatggcactttccttgga

SEQ ID NO: 6078302 - DNA, 25 bp, Homo sapien
cgtctaccttttccacataggtctt

SEQ ID NO: 6078303 - DNA, 25 bp, Homo sapien
agaaaaaaccaaggcattatgtcct

SEQ ID NO: 6078304 - DNA, 25 bp, Homo sapien
gcactttccttggaagtccctttca

SEQ ID NO: 6078305 - DNA, 25 bp, Homo sapien
ccttttccacataggtcttcatggc

SEQ ID NO: 6078306 - DNA, 25 bp, Homo sapien
tcatcagttggctgagtcttgaggc

SEQ ID NO: 6078307 - DNA, 25 bp, Homo sapien
tttacatcgcccacagtagcttgtt

SEQ ID NO: 6078308 - DNA, 25 bp, Homo sapien
ttagctcgtctaccttttccacata

SEQ ID NO: 6078309 - DNA, 25 bp, Homo sapien
tcgcccacagtagcttgtttgaagt

SEQ ID NO: 6078310 - DNA, 25 bp, Homo sapien
cgtatttcttctttagctcgtctac

SEQ ID NO: 6078311 - DNA, 25 bp, Homo sapien
tacattagaaaaaaccaaggcatta

SEQ ID NO: 6078312 - DNA, 25 bp, Homo sapien
ttgcccttgaggtccaagagccccg

SEQ ID NO: 6078313 - DNA, 25 bp, Homo sapien
tcttctttagctcgtctaccttttc

SEQ ID NO: 6078314 - DNA, 25 bp, Homo sapien
tcagcttgttccacgagtcccactt

SEQ ID NO: 6078315 - DNA, 25 bp, Homo sapien
aaaaactacagagggaggaggagca

SEQ ID NO: 6078316 - DNA, 25 bp, Homo sapien
ggccgatctgtatttacatcgccca

SEQ ID NO: 6078317 - DNA, 25 bp, Homo sapien
ttgaggcgcttcacctcctcagcgg

SEQ ID NO: 6078318 - DNA, 25 bp, Homo sapien
tagatgaacagcatctcttcatcag

SEQ ID NO: 6078319 - DNA, 25 bp, Homo sapien
aggagcagaggttaacgctggccct

SEQ ID NO: 6078320 - DNA, 25 bp, Homo sapien
ttaacgctggccctaatgtatcaca

SEQ ID NO: 6078321 - DNA, 25 bp, Homo sapien
agccccggccgatctgtatttacat

SEQ ID NO: 6078322 - DNA, 25 bp, Homo sapien
tccaagagccccggccgatctgtat

SEQ ID NO: 6078323 - DNA, 25 bp, Homo sapien
ctaatgtatcacagccatatcatct

SEQ ID NO: 6078324 - DNA, 25 bp, Homo sapien
tcacacgtgtggctggccaccaaat

SEQ ID NO: 6078325 - DNA, 25 bp, Homo sapien
aatctggtgatttatattccgtatt

SEQ ID NO: 6078326 - DNA, 25 bp, Homo sapien
agccatatcatctacattagaaaaa

SEQ ID NO: 6078327 - DNA, 25 bp, Homo sapien
tccctttcagcttgttccacgagtc

SEQ ID NO: 6078328 - DNA, 25 bp, Homo sapien
ccaccaaatctggtgatttatattc

SEQ ID NO: 6078329 - DNA, 25 bp, Homo sapien
gtgatttatattccgtatttcttct

SEQ ID NO: 6078330 - DNA, 25 bp, Homo sapien
ttgaagtgactgtagatgaacagca

SEQ ID NO: 6078331 - DNA, 25 bp, Homo sapien
gttggctgagtcttgaggcgcttca

SEQ ID NO: 6078332 - DNA, 25 bp, Homo sapien
tgagtcttgaggcgcttcacctcct

SEQ ID NO: 6078333 - DNA, 25 bp, Homo sapien
tcccacttggctttgcccttgaggt

SEQ ID NO: 6078334 - DNA, 25 bp, Homo sapien
tatcacagccatatcatctacatta

SEQ ID NO: 6078335 - DNA, 25 bp, Homo sapien
cctcctcagcggctttgtcaaattc

SEQ ID NO: 6078336 - DNA, 25 bp, Homo sapien
cgtgtggctggccaccaaatctggt

SEQ ID NO: 6078337 - DNA, 25 bp, Homo sapien
ttggctttgcccttgaggtccaaga

SEQ ID NO: 6078338 - DNA, 25 bp, Homo sapien
agcagtgagtgttgcttccgccgaa

SEQ ID NO: 6078339 - DNA, 25 bp, Homo sapien
gaagaccacggttcaggcgcctcct

SEQ ID NO: 6078340 - DNA, 25 bp, Homo sapien
cataggacatgtcgagcagttggtc

SEQ ID NO: 6078341 - DNA, 25 bp, Homo sapien
tgagtgttgcttccgccgaagacca

SEQ ID NO: 6078342 - DNA, 25 bp, Homo sapien
tctggcgggcgctgtacagctgcat

SEQ ID NO: 6078343 - DNA, 25 bp, Homo sapien
ttggtcgaggtctacgccacggtag

SEQ ID NO: 6078344 - DNA, 25 bp, Homo sapien
tttttggcctttctcaagcgcttga

SEQ ID NO: 6078345 - DNA, 25 bp, Homo sapien
tttctcaagcgcttgagcagtgagt

SEQ ID NO: 6078346 - DNA, 25 bp, Homo sapien
gccatcttctgaagtgggagcggcc

SEQ ID NO: 6078347 - DNA, 25 bp, Homo sapien
tacagctgcatcagttgctcatagg

SEQ ID NO: 6078348 - DNA, 25 bp, Homo sapien
tcagttgctcataggacatgtcgag

SEQ ID NO: 6078349 - DNA, 25 bp, Homo sapien
gagcagttggtcgaggtctacgcca

SEQ ID NO: 6078350 - DNA, 25 bp, Homo sapien
gatatcttcccatcgccatccttgt

SEQ ID NO: 6078351 - DNA, 25 bp, Homo sapien
tggttttgtcgaccagctgctggag

SEQ ID NO: 6078352 - DNA, 25 bp, Homo sapien
tgctgaacgcaaacctcaacttctg

SEQ ID NO: 6078353 - DNA, 25 bp, Homo sapien
tatccatgtcgtaaatgctgaacgc

SEQ ID NO: 6078354 - DNA, 25 bp, Homo sapien
tagggtaccctgagtcattcagaga

SEQ ID NO: 6078355 - DNA, 25 bp, Homo sapien
tcgtcgcccttgacgctgaactggg

SEQ ID NO: 6078356 - DNA, 25 bp, Homo sapien
gctcctgttaggacatatggcttca

SEQ ID NO: 6078357 - DNA, 25 bp, Homo sapien
gacagttggacgtcttgagcaaatc

SEQ ID NO: 6078358 - DNA, 25 bp, Homo sapien
gagaaggagaattaatagcactgag

SEQ ID NO: 6078359 - DNA, 25 bp, Homo sapien
cacctggaagagctccccgttggaa

SEQ ID NO: 6078360 - DNA, 25 bp, Homo sapien
gctccccgttggaaatgtagccatc

SEQ ID NO: 6078361 - DNA, 25 bp, Homo sapien
ttgacgctgaactgggaggtcccca

SEQ ID NO: 6078362 - DNA, 25 bp, Homo sapien
gatgaagtgcctctcggagtcgtac

SEQ ID NO: 6078363 - DNA, 25 bp, Homo sapien
cgcgcttggaggtatctctaggtta

SEQ ID NO: 6078364 - DNA, 25 bp, Homo sapien
cgagctccacgctggacagaaacct

SEQ ID NO: 6078365 - DNA, 25 bp, Homo sapien
tcgaagcgcacctcggccttgtagt

SEQ ID NO: 6078366 - DNA, 25 bp, Homo sapien
gagtcgtacttgaccaaggaggtgt

SEQ ID NO: 6078367 - DNA, 25 bp, Homo sapien
cctcggccttgtagttgcgccacgt

SEQ ID NO: 6078368 - DNA, 25 bp, Homo sapien
ctgtggcgtggctcgaagcgcacct

SEQ ID NO: 6078369 - DNA, 25 bp, Homo sapien
gggacaaagcctcagcgcacagccg

SEQ ID NO: 6078370 - DNA, 25 bp, Homo sapien
atgacgtgaagggtaaggtcgccca

SEQ ID NO: 6078371 - DNA, 25 bp, Homo sapien
ggacagaaacctcctcagcgtcttg

SEQ ID NO: 6078372 - DNA, 25 bp, Homo sapien
ggcagctgcacgtcgtcgatgaagt

SEQ ID NO: 6078373 - DNA, 25 bp, Homo sapien
cctcctcagcgtcttgcggcagttg

SEQ ID NO: 6078374 - DNA, 25 bp, Homo sapien
ctcgcgctcttcagcaggctccatc

SEQ ID NO: 6078375 - DNA, 25 bp, Homo sapien
cgtttgagaggacaatgaggctctt

SEQ ID NO: 6078376 - DNA, 25 bp, Homo sapien
ctagaggaggcctcaaccatagggt

SEQ ID NO: 6078377 - DNA, 25 bp, Homo sapien
gctagcccaggatcctctgtgtagc

SEQ ID NO: 6078378 - DNA, 25 bp, Homo sapien
ctccatctccaacgcaccaggagcc

SEQ ID NO: 6078379 - DNA, 25 bp, Homo sapien
cctgggccgtttgagaggacaatga

SEQ ID NO: 6078380 - DNA, 25 bp, Homo sapien
gcccggctcctccacggcgtccagc

SEQ ID NO: 6078381 - DNA, 25 bp, Homo sapien
agcctctgcctccacctcagggtgc

SEQ ID NO: 6078382 - DNA, 25 bp, Homo sapien
gtgtagctctgatcctcttctgagc

SEQ ID NO: 6078383 - DNA, 25 bp, Homo sapien
tgggcttggtcaggctcctccacga

SEQ ID NO: 6078384 - DNA, 25 bp, Homo sapien
cttgcacatgctcggcttgctgatc

SEQ ID NO: 6078385 - DNA, 25 bp, Homo sapien
ggctcgggctcctgttcacactcgg

SEQ ID NO: 6078386 - DNA, 25 bp, Homo sapien
cctgtcctagttccggctcctctgc

SEQ ID NO: 6078387 - DNA, 25 bp, Homo sapien
ctctgctagcccaggatcctctgtg

SEQ ID NO: 6078388 - DNA, 25 bp, Homo sapien
accgccttttctgtggcctcttcct

SEQ ID NO: 6078389 - DNA, 25 bp, Homo sapien
gctcctccacctcagccttggcctc

SEQ ID NO: 6078390 - DNA, 25 bp, Homo sapien
cggctcctctgctagcccaggatcc

SEQ ID NO: 6078391 - DNA, 25 bp, Homo sapien
ccacctcagccttggcctccgcctc

SEQ ID NO: 6078392 - DNA, 25 bp, Homo sapien
ccgcctccgcctctgcctcggcctc

SEQ ID NO: 6078393 - DNA, 25 bp, Homo sapien
tggcctccgcctccgcctctgcctc

SEQ ID NO: 6078394 - DNA, 25 bp, Homo sapien
tcctggctcggccttggtgaggccc

SEQ ID NO: 6078395 - DNA, 25 bp, Homo sapien
cgggctccagctcctgcaccagctc

SEQ ID NO: 6078396 - DNA, 25 bp, Homo sapien
ccgcctctgcctcggcctcagcctc

SEQ ID NO: 6078397 - DNA, 25 bp, Homo sapien
tgcctcggcctcagcctcagcctca

SEQ ID NO: 6078398 - DNA, 25 bp, Homo sapien
aggcagctgctcctgggcttggtca

SEQ ID NO: 6078399 - DNA, 25 bp, Homo sapien
ccagctcctgtcctagttccggctc

SEQ ID NO: 6078400 - DNA, 25 bp, Homo sapien
ttcctccaacggaggcagctgctcc

SEQ ID NO: 6078401 - DNA, 25 bp, Homo sapien
ccagctcaggcatgaattcgggctc

SEQ ID NO: 6078402 - DNA, 25 bp, Homo sapien
ggtctcaggcatctcaggttctgcc

SEQ ID NO: 6078403 - DNA, 25 bp, Homo sapien
caacggaggcagctgctcctgggct

SEQ ID NO: 6078404 - DNA, 25 bp, Homo sapien
tcctcttctgagcacaggctagagg

SEQ ID NO: 6078405 - DNA, 25 bp, Homo sapien
atgctcggcttgctgatctcctggc

SEQ ID NO: 6078406 - DNA, 25 bp, Homo sapien
ggcaggctggggctcgggctcctgt

SEQ ID NO: 6078407 - DNA, 25 bp, Homo sapien
cctgcaccagctcctgtcctagttc

SEQ ID NO: 6078408 - DNA, 25 bp, Homo sapien
ccaggatcctctgtgtagctctgat

SEQ ID NO: 6078409 - DNA, 25 bp, Homo sapien
atcaggccctggaccgccttttctg

SEQ ID NO: 6078410 - DNA, 25 bp, Homo sapien
ctcctccacggcgtccagcaggtca

SEQ ID NO: 6078411 - DNA, 25 bp, Homo sapien
ccacggcgtccagcaggtcataggc

SEQ ID NO: 6078412 - DNA, 25 bp, Homo sapien
agcctcagcctctgcctccacctca

SEQ ID NO: 6078413 - DNA, 25 bp, Homo sapien
agcaggctccatctccaacgcacca

SEQ ID NO: 6078414 - DNA, 25 bp, Homo sapien
tccacgaaggggcaggcctcagcct

SEQ ID NO: 6078415 - DNA, 25 bp, Homo sapien
tcaaccatagggtcgtgctcgatct

SEQ ID NO: 6078416 - DNA, 25 bp, Homo sapien
agaggacaatgaggctcttcatcct

SEQ ID NO: 6078417 - DNA, 25 bp, Homo sapien
cctcttcagactccccggctcctcc

SEQ ID NO: 6078418 - DNA, 25 bp, Homo sapien
ccctggaccgccttttctgtggcct

SEQ ID NO: 6078419 - DNA, 25 bp, Homo sapien
ggctcctccacgaaggggcaggcct

SEQ ID NO: 6078420 - DNA, 25 bp, Homo sapien
tggcctcttcctccaacggaggcag

SEQ ID NO: 6078421 - DNA, 25 bp, Homo sapien
ggcttgctgatctcctggctcggcc

SEQ ID NO: 6078422 - DNA, 25 bp, Homo sapien
tggtcaggctcctccacgaaggggc

SEQ ID NO: 6078423 - DNA, 25 bp, Homo sapien
tagttccggctcctctgctagccca

SEQ ID NO: 6078424 - DNA, 25 bp, Homo sapien
gcaccaggagccgcctccctgggcc

SEQ ID NO: 6078425 - DNA, 25 bp, Homo sapien
ctgcctccagctcaggcatgaattc

SEQ ID NO: 6078426 - DNA, 25 bp, Homo sapien
caggcatgaattcgggctccagctc

SEQ ID NO: 6078427 - DNA, 25 bp, Homo sapien
aggcctcagcctcgcgctcttcagc

SEQ ID NO: 6078428 - DNA, 25 bp, Homo sapien
ctgatctcctggctcggccttggtg

SEQ ID NO: 6078429 - DNA, 25 bp, Homo sapien
gtgaggcccggctcctccacggcgt

SEQ ID NO: 6078430 - DNA, 25 bp, Homo sapien
gcttctcttgcacatgctcggcttg

SEQ ID NO: 6078431 - DNA, 25 bp, Homo sapien
tgcctccacctcagggtgcttctct

SEQ ID NO: 6078432 - DNA, 25 bp, Homo sapien
tgttcacactcggtctcaggcatct

SEQ ID NO: 6078433 - DNA, 25 bp, Homo sapien
aatgaggctcttcatcctccgcgct

SEQ ID NO: 6078434 - DNA, 25 bp, Homo sapien
ttttctgtggcctcttcctccaacg

SEQ ID NO: 6078435 - DNA, 25 bp, Homo sapien
ctcttcagcaggctccatctccaac

SEQ ID NO: 6078436 - DNA, 25 bp, Homo sapien
atagggtcgtgctcgatctcccaca

SEQ ID NO: 6078437 - DNA, 25 bp, Homo sapien
tcctctgtgtagctctgatcctctt

SEQ ID NO: 6078438 - DNA, 25 bp, Homo sapien
ggagccgcctccctgggccgtttga

SEQ ID NO: 6078439 - DNA, 25 bp, Homo sapien
cgcgctcctcttcagactccccggc

SEQ ID NO: 6078440 - DNA, 25 bp, Homo sapien
cacaggctagaggaggcctcaacca

SEQ ID NO: 6078441 - DNA, 25 bp, Homo sapien
cgtccagcaggtcataggcaggctg

SEQ ID NO: 6078442 - DNA, 25 bp, Homo sapien
ccagctcctgcaccagctcctgtcc

SEQ ID NO: 6078443 - DNA, 25 bp, Homo sapien
cagggtgcttctcttgcacatgctc

SEQ ID NO: 6078444 - DNA, 25 bp, Homo sapien
ctctgatcctcttctgagcacaggc

SEQ ID NO: 6078445 - DNA, 25 bp, Homo sapien
gaggcctcaaccatagggtcgtgct

SEQ ID NO: 6078446 - DNA, 25 bp, Homo sapien
cacctcagggtgcttctcttgcaca

SEQ ID NO: 6078447 - DNA, 25 bp, Homo sapien
tgaattcgggctccagctcctgcac

SEQ ID NO: 6078448 - DNA, 25 bp, Homo sapien
aggcatctcaggttctgcctccagc

SEQ ID NO: 6078449 - DNA, 25 bp, Homo sapien
ggcctcagcctcagcctcagcctct

SEQ ID NO: 6078450 - DNA, 25 bp, Homo sapien
tgctcctgggcttggtcaggctcct

SEQ ID NO: 6078451 - DNA, 25 bp, Homo sapien
cagccttggcctccgcctccgcctc

SEQ ID NO: 6078452 - DNA, 25 bp, Homo sapien
aaggggcaggcctcagcctcgcgct

SEQ ID NO: 6078453 - DNA, 25 bp, Homo sapien
tccccggctcctccacctcagcctt

SEQ ID NO: 6078454 - DNA, 25 bp, Homo sapien
caggttctgcctccagctcaggcat

SEQ ID NO: 6078455 - DNA, 25 bp, Homo sapien
agcctcagcctcagcctctgcctcc

SEQ ID NO: 6078456 - DNA, 25 bp, Homo sapien
tcggccttggtgaggcccggctcct

SEQ ID NO: 6078457 - DNA, 25 bp, Homo sapien
atcctccgcgctcctcttcagactc

SEQ ID NO: 6078458 - DNA, 25 bp, Homo sapien
acactcggtctcaggcatctcaggt

SEQ ID NO: 6078459 - DNA, 25 bp, Homo sapien
tctgagcacaggctagaggaggcct

SEQ ID NO: 6078460 - DNA, 25 bp, Homo sapien
cagcctcgcgctcttcagcaggctc

SEQ ID NO: 6078461 - DNA, 25 bp, Homo sapien
tccaacgcaccaggagccgcctccc

SEQ ID NO: 6078462 - DNA, 25 bp, Homo sapien
ggctcctgttcacactcggtctcag

SEQ ID NO: 6078463 - DNA, 25 bp, Homo sapien
cgcctccctgggccgtttgagagga

SEQ ID NO: 6078464 - DNA, 25 bp, Homo sapien
gctggggctcgggctcctgttcaca

SEQ ID NO: 6078465 - DNA, 25 bp, Homo sapien
cagactccccggctcctccacctca

SEQ ID NO: 6078466 - DNA, 25 bp, Homo sapien
ttggactcctcataagggaacaggt

SEQ ID NO: 6078467 - DNA, 25 bp, Homo sapien
agccctttaacttggcaaacaccag

SEQ ID NO: 6078468 - DNA, 25 bp, Homo sapien
caggtgcctgggacccagcagggcg

SEQ ID NO: 6078469 - DNA, 25 bp, Homo sapien
ctctgatcctcttctgagcactggc

SEQ ID NO: 6078470 - DNA, 25 bp, Homo sapien
cttagagcggctgaagcaagacata

SEQ ID NO: 6078471 - DNA, 25 bp, Homo sapien
ttctctttggactcctcataaggga

SEQ ID NO: 6078472 - DNA, 25 bp, Homo sapien
acctggtagcggttggcttcagcga

SEQ ID NO: 6078473 - DNA, 25 bp, Homo sapien
gctcttcagcaggctccatctccaa

SEQ ID NO: 6078474 - DNA, 25 bp, Homo sapien
acatgttcgatcctcgctggccagt

SEQ ID NO: 6078475 - DNA, 25 bp, Homo sapien
tcgctggccagtgggcatagccctt

SEQ ID NO: 6078476 - DNA, 25 bp, Homo sapien
ggaggcctcaaccatagggtcgtgc

SEQ ID NO: 6078477 - DNA, 25 bp, Homo sapien
gtcgtgctcgatctcccacagcccc

SEQ ID NO: 6078478 - DNA, 25 bp, Homo sapien
ctcctccacgaaggggcaggcctca

SEQ ID NO: 6078479 - DNA, 25 bp, Homo sapien
accgccttttctgtggcctcttcct

SEQ ID NO: 6078480 - DNA, 25 bp, Homo sapien
gcggctgaagcaagacatagcgtgt

SEQ ID NO: 6078481 - DNA, 25 bp, Homo sapien
gctcctgggcttggtcaggctcctc

SEQ ID NO: 6078482 - DNA, 25 bp, Homo sapien
catagggtcgtgctcgatctcccac

SEQ ID NO: 6078483 - DNA, 25 bp, Homo sapien
ctgggacccagcagggcggtctcat

SEQ ID NO: 6078484 - DNA, 25 bp, Homo sapien
cacgaaggggcaggcctcagcctcg

SEQ ID NO: 6078485 - DNA, 25 bp, Homo sapien
gtgtagctctgatcctcttctgagc

SEQ ID NO: 6078486 - DNA, 25 bp, Homo sapien
cccagcagggcggtctcatgggtcc

SEQ ID NO: 6078487 - DNA, 25 bp, Homo sapien
cccggtcttgtacttagagcggctg

SEQ ID NO: 6078488 - DNA, 25 bp, Homo sapien
gggcaggcctcagcctcgcgctctt

SEQ ID NO: 6078489 - DNA, 25 bp, Homo sapien
ccgaagaagaacacctggtagcggt

SEQ ID NO: 6078490 - DNA, 25 bp, Homo sapien
caacggaggcagctgctcctgggct

SEQ ID NO: 6078491 - DNA, 25 bp, Homo sapien
ttcctccaacggaggcagctgctcc

SEQ ID NO: 6078492 - DNA, 25 bp, Homo sapien
cagggcggtctcatgggtcccgaag

SEQ ID NO: 6078493 - DNA, 25 bp, Homo sapien
cagcccctcgctgaagccgcgcctc

SEQ ID NO: 6078494 - DNA, 25 bp, Homo sapien
atcaggccctggaccgccttttctg

SEQ ID NO: 6078495 - DNA, 25 bp, Homo sapien
caggtccccggtcttgtacttagag

SEQ ID NO: 6078496 - DNA, 25 bp, Homo sapien
cttgtacttagagcggctgaagcaa

SEQ ID NO: 6078497 - DNA, 25 bp, Homo sapien
atgggtcccgaagaagaacacctgg

SEQ ID NO: 6078498 - DNA, 25 bp, Homo sapien
tcctcttctgagcactggctagagg

SEQ ID NO: 6078499 - DNA, 25 bp, Homo sapien
gggcttgccgaacttctctttggac

SEQ ID NO: 6078500 - DNA, 25 bp, Homo sapien
gctagaggaggcctcaaccataggg

SEQ ID NO: 6078501 - DNA, 25 bp, Homo sapien
ctcccacagcccctcgctgaagccg

SEQ ID NO: 6078502 - DNA, 25 bp, Homo sapien
ccctggaccgccttttctgtggcct

SEQ ID NO: 6078503 - DNA, 25 bp, Homo sapien
gtcaggctcctccacgaaggggcag

SEQ ID NO: 6078504 - DNA, 25 bp, Homo sapien
gaagcaagacatagcgtgtgctctg

SEQ ID NO: 6078505 - DNA, 25 bp, Homo sapien
tcagcgacatgttcgatcctcgctg

SEQ ID NO: 6078506 - DNA, 25 bp, Homo sapien
atctccaacgcaccaggatcctctg

SEQ ID NO: 6078507 - DNA, 25 bp, Homo sapien
ctcgatctcccacagcccctcgctg

SEQ ID NO: 6078508 - DNA, 25 bp, Homo sapien
tctgagcactggctagaggaggcct

SEQ ID NO: 6078509 - DNA, 25 bp, Homo sapien
tcgatcctcgctggccagtgggcat

SEQ ID NO: 6078510 - DNA, 25 bp, Homo sapien
ccgaacttctctttggactcctcat

SEQ ID NO: 6078511 - DNA, 25 bp, Homo sapien
tcagcaggctccatctccaacgcac

SEQ ID NO: 6078512 - DNA, 25 bp, Homo sapien
ttggcttcagcgacatgttcgatcc

SEQ ID NO: 6078513 - DNA, 25 bp, Homo sapien
gccagtgggcatagccctttaactt

SEQ ID NO: 6078514 - DNA, 25 bp, Homo sapien
ctcgctgaagccgcgcctcttgttg

SEQ ID NO: 6078515 - DNA, 25 bp, Homo sapien
gcgcctcttgttgggcttgccgaac

SEQ ID NO: 6078516 - DNA, 25 bp, Homo sapien
ttttctgtggcctcttcctccaacg

SEQ ID NO: 6078517 - DNA, 25 bp, Homo sapien
taagggaacaggtgcctgggaccca

SEQ ID NO: 6078518 - DNA, 25 bp, Homo sapien
ccaggatcctctgtgtagctctgat

SEQ ID NO: 6078519 - DNA, 25 bp, Homo sapien
tcctctgtgtagctctgatcctctt

SEQ ID NO: 6078520 - DNA, 25 bp, Homo sapien
aagaacacctggtagcggttggctt

SEQ ID NO: 6078521 - DNA, 25 bp, Homo sapien
aggcagctgctcctgggcttggtca

SEQ ID NO: 6078522 - DNA, 25 bp, Homo sapien
ggtctcatgggtcccgaagaagaac

SEQ ID NO: 6078523 - DNA, 25 bp, Homo sapien
ggctccatctccaacgcaccaggat

SEQ ID NO: 6078524 - DNA, 25 bp, Homo sapien
gcactggctagaggaggcctcaacc

SEQ ID NO: 6078525 - DNA, 25 bp, Homo sapien
tagcggttggcttcagcgacatgtt

SEQ ID NO: 6078526 - DNA, 25 bp, Homo sapien
cttgttgggcttgccgaacttctct

SEQ ID NO: 6078527 - DNA, 25 bp, Homo sapien
ctcaaccatagggtcgtgctcgatc

SEQ ID NO: 6078528 - DNA, 25 bp, Homo sapien
cctcgcgctcttcagcaggctccat

SEQ ID NO: 6078529 - DNA, 25 bp, Homo sapien
aacgcaccaggatcctctgtgtagc

SEQ ID NO: 6078530 - DNA, 25 bp, Homo sapien
gggcatagccctttaacttggcaaa

SEQ ID NO: 6078531 - DNA, 25 bp, Homo sapien
gaagccgcgcctcttgttgggcttg

SEQ ID NO: 6078532 - DNA, 25 bp, Homo sapien
tggcctcttcctccaacggaggcag

SEQ ID NO: 6078533 - DNA, 25 bp, Homo sapien
ggcttggtcaggctcctccacgaag

SEQ ID NO: 6078534 - DNA, 25 bp, Homo sapien
tcctcataagggaacaggtgcctgg

SEQ ID NO: 6078535 - DNA, 25 bp, Homo sapien
ggcctcagcctcgcgctcttcagca

SEQ ID NO: 6078536 - DNA, 25 bp, Homo sapien
cccatctgtatgagaggacccatcc

SEQ ID NO: 6078537 - DNA, 25 bp, Homo sapien
taattaaagagagcagttctccgtt

SEQ ID NO: 6078538 - DNA, 25 bp, Homo sapien
cagttctccgttttggccttcagga

SEQ ID NO: 6078539 - DNA, 25 bp, Homo sapien
tcgattcccatataaacctggagga

SEQ ID NO: 6078540 - DNA, 25 bp, Homo sapien
tgtgatgctgagcaaacttttggtc

SEQ ID NO: 6078541 - DNA, 25 bp, Homo sapien
ggtattaggtttacttctcgaagca

SEQ ID NO: 6078542 - DNA, 25 bp, Homo sapien
taaagtcatgttcaggcaaggtgct

SEQ ID NO: 6078543 - DNA, 25 bp, Homo sapien
ttttcacatacgctcctgtctcagg

SEQ ID NO: 6078544 - DNA, 25 bp, Homo sapien
ggtaattttgacgttgaatgcagct

SEQ ID NO: 6078545 - DNA, 25 bp, Homo sapien
gaaatctgcccatggaactctccca

SEQ ID NO: 6078546 - DNA, 25 bp, Homo sapien
ggacacaggaaacgccagatggaaa

SEQ ID NO: 6078547 - DNA, 25 bp, Homo sapien
gattaacaaactgtttcgattccca

SEQ ID NO: 6078548 - DNA, 25 bp, Homo sapien
agcaaaagagagcccccgaaccttg

SEQ ID NO: 6078549 - DNA, 25 bp, Homo sapien
tgtttcaacctttaatctgacttgc

SEQ ID NO: 6078550 - DNA, 25 bp, Homo sapien
tcttccaacagatgcttgagccaaa

SEQ ID NO: 6078551 - DNA, 25 bp, Homo sapien
ggtatcacctcatcctatagaatcc

SEQ ID NO: 6078552 - DNA, 25 bp, Homo sapien
tgacttgccttttactatcctttcc

SEQ ID NO: 6078553 - DNA, 25 bp, Homo sapien
cccagttaaacatattaggaataag

SEQ ID NO: 6078554 - DNA, 25 bp, Homo sapien
gccccaaacaatactaacccattga

SEQ ID NO: 6078555 - DNA, 25 bp, Homo sapien
gccctagagtgacagacatcccagt

SEQ ID NO: 6078556 - DNA, 25 bp, Homo sapien
tattatgaaccaagtcacattttgt

SEQ ID NO: 6078557 - DNA, 25 bp, Homo sapien
aatcaagtaacagttaccgtgagtt

SEQ ID NO: 6078558 - DNA, 25 bp, Homo sapien
catgttatagattgagaccatagaa

SEQ ID NO: 6078559 - DNA, 25 bp, Homo sapien
gaattttagcacttgaaggaacttc

SEQ ID NO: 6078560 - DNA, 25 bp, Homo sapien
aaatgtctgtcttgccgccctagag

SEQ ID NO: 6078561 - DNA, 25 bp, Homo sapien
tacgctgtaaatctgataccccaag

SEQ ID NO: 6078562 - DNA, 25 bp, Homo sapien
caaagagcaatgctgcctgggacgc

SEQ ID NO: 6078563 - DNA, 25 bp, Homo sapien
tctccactcggtcccaatattagag

SEQ ID NO: 6078564 - DNA, 25 bp, Homo sapien
tcagcgaggctgtattttgtaggaa

SEQ ID NO: 6078565 - DNA, 25 bp, Homo sapien
catttttccacgatgcgcctctcag

SEQ ID NO: 6078566 - DNA, 25 bp, Homo sapien
caatttgaagtacacatgttacgct

SEQ ID NO: 6078567 - DNA, 25 bp, Homo sapien
gatgtaacaggtggagaatcccaga

SEQ ID NO: 6078568 - DNA, 25 bp, Homo sapien
tcccagatccgaaaacagagattgg

SEQ ID NO: 6078569 - DNA, 25 bp, Homo sapien
tctggttaccagtctaatgcataaa

SEQ ID NO: 6078570 - DNA, 25 bp, Homo sapien
gagattggaaacacgcaaagggacc

SEQ ID NO: 6078571 - DNA, 25 bp, Homo sapien
ggtatcctgtctcatgtacaaagag

SEQ ID NO: 6078572 - DNA, 25 bp, Homo sapien
catttctaatcagataatcgggtgc

SEQ ID NO: 6078573 - DNA, 25 bp, Homo sapien
gcagcaatgccgacagttgttggaa

SEQ ID NO: 6078574 - DNA, 25 bp, Homo sapien
taagcaaagcaaaaccgatgtgagc

SEQ ID NO: 6078575 - DNA, 25 bp, Homo sapien
tatcttgagaaacacccagttgtgc

SEQ ID NO: 6078576 - DNA, 25 bp, Homo sapien
gaatggtgtaagcttgatctgcaac

SEQ ID NO: 6078577 - DNA, 25 bp, Homo sapien
cagtggtcaactgagcacatcgggt

SEQ ID NO: 6078578 - DNA, 25 bp, Homo sapien
gttgcacgacgagcacgaacgtact

SEQ ID NO: 6078579 - DNA, 25 bp, Homo sapien
gaaggccttgatctaccaacttttg

SEQ ID NO: 6078580 - DNA, 25 bp, Homo sapien
caaagcatcgtgcacttttgcagta

SEQ ID NO: 6078581 - DNA, 25 bp, Homo sapien
cacatcgggttatatagtgcaacga

SEQ ID NO: 6078582 - DNA, 25 bp, Homo sapien
tggatatggtctacatggcactggc

SEQ ID NO: 6078583 - DNA, 25 bp, Homo sapien
ggttcttagaccagtaccgctccaa

SEQ ID NO: 6078584 - DNA, 25 bp, Homo sapien
tggtactcagacttccgttgcacga

SEQ ID NO: 6078585 - DNA, 25 bp, Homo sapien
tacactccttctacaagacctttgc

SEQ ID NO: 6078586 - DNA, 25 bp, Homo sapien
caagtgataaggacgtagcccttcc

SEQ ID NO: 6078587 - DNA, 25 bp, Homo sapien
attcttacatggcacaaatctgttg

SEQ ID NO: 6078588 - DNA, 25 bp, Homo sapien
gtagcccttcctataaagtgattcg

SEQ ID NO: 6078589 - DNA, 25 bp, Homo sapien
tgatttagtggcattccaggttcaa

SEQ ID NO: 6078590 - DNA, 25 bp, Homo sapien
ccaggttcaataaggacacgtcttt

SEQ ID NO: 6078591 - DNA, 25 bp, Homo sapien
gtaacagattttttggagctcgtca

SEQ ID NO: 6078592 - DNA, 25 bp, Homo sapien
tgccacccaacggtgtttgtagtaa

SEQ ID NO: 6078593 - DNA, 25 bp, Homo sapien
gaagtaatgttctgccacccaacgg

SEQ ID NO: 6078594 - DNA, 25 bp, Homo sapien
aaagtgattcgtatttacacgctgg

SEQ ID NO: 6078595 - DNA, 25 bp, Homo sapien
catgatttcatggttacagtactct

SEQ ID NO: 6078596 - DNA, 25 bp, Homo sapien
gagctcgtcatattgcataagaagg

SEQ ID NO: 6078597 - DNA, 25 bp, Homo sapien
tacttttaattttttctcaatcgca

SEQ ID NO: 6078598 - DNA, 25 bp, Homo sapien
ttttcacctgtggtcttaatttcga

SEQ ID NO: 6078599 - DNA, 25 bp, Homo sapien
tcattcattgtttttcattttcaca

SEQ ID NO: 6078600 - DNA, 25 bp, Homo sapien
cttctttaaaataatcatagttata

SEQ ID NO: 6078601 - DNA, 25 bp, Homo sapien
caatcgcagctactactaaaggctc

SEQ ID NO: 6078602 - DNA, 25 bp, Homo sapien
catcttcaacttcttctttatttac

SEQ ID NO: 6078603 - DNA, 25 bp, Homo sapien
tgaataaatccatcgggaatacccc

SEQ ID NO: 6078604 - DNA, 25 bp, Homo sapien
ctatatcatcttcaacttcttcttt

SEQ ID NO: 6078605 - DNA, 25 bp, Homo sapien
cagcatcaatgtatttagtatctaa

SEQ ID NO: 6078606 - DNA, 25 bp, Homo sapien
tacaatagcaaatctatctaccttt

SEQ ID NO: 6078607 - DNA, 25 bp, Homo sapien
ctaaatatcaagctttaatttgcac

SEQ ID NO: 6078608 - DNA, 25 bp, Homo sapien
atacccccaattatcggatcttctt

SEQ ID NO: 6078609 - DNA, 25 bp, Homo sapien
tatgttctaaatatcaagctttaat

SEQ ID NO: 6078610 - DNA, 25 bp, Homo sapien
ctactaaaggctcaatagctacccc

SEQ ID NO: 6078611 - DNA, 25 bp, Homo sapien
aaaataggcatatctaattttgcta

SEQ ID NO: 6078612 - DNA, 25 bp, Homo sapien
aagttgtatgttctaaatatcaagc

SEQ ID NO: 6078613 - DNA, 25 bp, Homo sapien
tttcacagagtaaatattctaaaat

SEQ ID NO: 6078614 - DNA, 25 bp, Homo sapien
caataggaaagtttttaggatctat

SEQ ID NO: 6078615 - DNA, 25 bp, Homo sapien
aatattctaaaatttcagcatcttt

SEQ ID NO: 6078616 - DNA, 25 bp, Homo sapien
tacattaaaagcatatgtttgtatt

SEQ ID NO: 6078617 - DNA, 25 bp, Homo sapien
catcgggaatacccccaattatcgg

SEQ ID NO: 6078618 - DNA, 25 bp, Homo sapien
gtatctaaaataggcatatctaatt

SEQ ID NO: 6078619 - DNA, 25 bp, Homo sapien
tcttttaaaaatgttgctacaatag

SEQ ID NO: 6078620 - DNA, 25 bp, Homo sapien
ctttatttacattaaaagcatatgt

SEQ ID NO: 6078621 - DNA, 25 bp, Homo sapien
catcttttatagaattaaatttcgg

SEQ ID NO: 6078622 - DNA, 25 bp, Homo sapien
tttcagcatcttttatagaattaaa

SEQ ID NO: 6078623 - DNA, 25 bp, Homo sapien
aaagcatatgtttgtatttttcttt

SEQ ID NO: 6078624 - DNA, 25 bp, Homo sapien
taaaaatgttgctacaatagcaaat

SEQ ID NO: 6078625 - DNA, 25 bp, Homo sapien
tttgctagcctaataaaagctttaa

SEQ ID NO: 6078626 - DNA, 25 bp, Homo sapien
cagctactactaaaggctcaatagc

SEQ ID NO: 6078627 - DNA, 25 bp, Homo sapien
caatagctaccccagcatcaatgta

SEQ ID NO: 6078628 - DNA, 25 bp, Homo sapien
taaaataatcatagttatacttttg

SEQ ID NO: 6078629 - DNA, 25 bp, Homo sapien
atataatcttgttcttttaaaaatg

SEQ ID NO: 6078630 - DNA, 25 bp, Homo sapien
ctaccccagcatcaatgtatttagt

SEQ ID NO: 6078631 - DNA, 25 bp, Homo sapien
tagttatacttttgcggaggaaaca

SEQ ID NO: 6078632 - DNA, 25 bp, Homo sapien
tgttgctacaatagcaaatctatct

SEQ ID NO: 6078633 - DNA, 25 bp, Homo sapien
caatgtatttagtatctaaaatagg

SEQ ID NO: 6078634 - DNA, 25 bp, Homo sapien
tcttgttcttttaaaaatgttgcta

SEQ ID NO: 6078635 - DNA, 25 bp, Homo sapien
taattttttctcaatcgcagctact

SEQ ID NO: 6078636 - DNA, 25 bp, Homo sapien
tatttagtatctaaaataggcatat

SEQ ID NO: 6078637 - DNA, 25 bp, Homo sapien
ggatctatataatcttgttctttta

SEQ ID NO: 6078638 - DNA, 25 bp, Homo sapien
taatcatagttatacttttgcggag

SEQ ID NO: 6078639 - DNA, 25 bp, Homo sapien
ttcttctttatttacattaaaagca

SEQ ID NO: 6078640 - DNA, 25 bp, Homo sapien
gaaagtttttaggatctatataatc

SEQ ID NO: 6078641 - DNA, 25 bp, Homo sapien
tttcattttcacagagtaaatattc

SEQ ID NO: 6078642 - DNA, 25 bp, Homo sapien
tatagaattaaatttcggagaaaca

SEQ ID NO: 6078643 - DNA, 25 bp, Homo sapien
tacttttgcggaggaaacacttcga

SEQ ID NO: 6078644 - DNA, 25 bp, Homo sapien
ttttcttgaataaatccatcgggaa

SEQ ID NO: 6078645 - DNA, 25 bp, Homo sapien
taagcgtacaactgagcttgtttta

SEQ ID NO: 6078646 - DNA, 25 bp, Homo sapien
cacctgtggtcttaatttcgattat

SEQ ID NO: 6078647 - DNA, 25 bp, Homo sapien
tcggatcttctttaaaataatcata

SEQ ID NO: 6078648 - DNA, 25 bp, Homo sapien
tcaacttcttctttatttacattaa

SEQ ID NO: 6078649 - DNA, 25 bp, Homo sapien
agtggtttttcttgaataaatccat

SEQ ID NO: 6078650 - DNA, 25 bp, Homo sapien
ggcatatctaattttgctagcctaa

SEQ ID NO: 6078651 - DNA, 25 bp, Homo sapien
ctttaatttgcactatatcatcttc

SEQ ID NO: 6078652 - DNA, 25 bp, Homo sapien
attgtttttcattttcacagagtaa

SEQ ID NO: 6078653 - DNA, 25 bp, Homo sapien
aaggctcaatagctaccccagcatc

SEQ ID NO: 6078654 - DNA, 25 bp, Homo sapien
tctaattttgctagcctaataaaag

SEQ ID NO: 6078655 - DNA, 25 bp, Homo sapien
gagaaacaccagaagttgtatgttc

SEQ ID NO: 6078656 - DNA, 25 bp, Homo sapien
atcaagctttaatttgcactatatc

SEQ ID NO: 6078657 - DNA, 25 bp, Homo sapien
tttgcactatatcatcttcaacttc

SEQ ID NO: 6078658 - DNA, 25 bp, Homo sapien
ctaaaatttcagcatcttttataga

SEQ ID NO: 6078659 - DNA, 25 bp, Homo sapien
tacaactgagcttgttttaagtatt

SEQ ID NO: 6078660 - DNA, 25 bp, Homo sapien
atttcggagaaacaccagaagttgt

SEQ ID NO: 6078661 - DNA, 25 bp, Homo sapien
tggtcttaatttcgattataagtgg

SEQ ID NO: 6078662 - DNA, 25 bp, Homo sapien
tgcggaggaaacacttcgactttta

SEQ ID NO: 6078663 - DNA, 25 bp, Homo sapien
caattatcggatcttctttaaaata

SEQ ID NO: 6078664 - DNA, 25 bp, Homo sapien
ttttaggatctatataatcttgttc

SEQ ID NO: 6078665 - DNA, 25 bp, Homo sapien
tgagcttgttttaagtattttggag

SEQ ID NO: 6078666 - DNA, 25 bp, Homo sapien
gattataagtggtttttcttgaata

SEQ ID NO: 6078667 - DNA, 25 bp, Homo sapien
agcaaatctatctaccttttttaag

SEQ ID NO: 6078668 - DNA, 25 bp, Homo sapien
tttaagtaagcgtacaactgagctt

SEQ ID NO: 6078669 - DNA, 25 bp, Homo sapien
ttttctcaatcgcagctactactaa

SEQ ID NO: 6078670 - DNA, 25 bp, Homo sapien
agagtaaatattctaaaatttcagc

SEQ ID NO: 6078671 - DNA, 25 bp, Homo sapien
caccagaagttgtatgttctaaata

SEQ ID NO: 6078672 - DNA, 25 bp, Homo sapien
gtgtcagaaagcgcacataagatgg

SEQ ID NO: 6078673 - DNA, 25 bp, Homo sapien
ggggtgtcagaaagcgcacataaga

SEQ ID NO: 6078674 - DNA, 25 bp, Homo sapien
tgataagtgaaacggccttactgct

SEQ ID NO: 6078675 - DNA, 25 bp, Homo sapien
ttgaaactgttttggggtgtcagaa

SEQ ID NO: 6078676 - DNA, 25 bp, Homo sapien
caaacataatcgataaatgtggtac

SEQ ID NO: 6078677 - DNA, 25 bp, Homo sapien
gggtgtcagaaagcgcacataagat

SEQ ID NO: 6078678 - DNA, 25 bp, Homo sapien
gtgcccagccgatcagtgatctttg

SEQ ID NO: 6078679 - DNA, 25 bp, Homo sapien
tgaaactgttttggggtgtcagaaa

SEQ ID NO: 6078680 - DNA, 25 bp, Homo sapien
tgtcagaaagcgcacataagatggc

SEQ ID NO: 6078681 - DNA, 25 bp, Homo sapien
tgtgcccagccgatcagtgatcttt

SEQ ID NO: 6078682 - DNA, 25 bp, Homo sapien
tattgaaactgttttggggtgtcag

SEQ ID NO: 6078683 - DNA, 25 bp, Homo sapien
attgaaactgttttggggtgtcaga

SEQ ID NO: 6078684 - DNA, 25 bp, Homo sapien
agactggctttccgctatctcaact

SEQ ID NO: 6078685 - DNA, 25 bp, Homo sapien
cagtcaggtctttctaatcctgtga

SEQ ID NO: 6078686 - DNA, 25 bp, Homo sapien
actggctttccgctatctcaactgc

SEQ ID NO: 6078687 - DNA, 25 bp, Homo sapien
gaaaggtcaacaacaaacgtgagca

SEQ ID NO: 6078688 - DNA, 25 bp, Homo sapien
ggagactggctttccgctatctcaa

SEQ ID NO: 6078689 - DNA, 25 bp, Homo sapien
ctggctttccgctatctcaactgca

SEQ ID NO: 6078690 - DNA, 25 bp, Homo sapien
gactggctttccgctatctcaactg

SEQ ID NO: 6078691 - DNA, 25 bp, Homo sapien
aggagactggctttccgctatctca

SEQ ID NO: 6078692 - DNA, 25 bp, Homo sapien
ggaaaggtcaacaacaaacgtgagc

SEQ ID NO: 6078693 - DNA, 25 bp, Homo sapien
gagactggctttccgctatctcaac

SEQ ID NO: 6078694 - DNA, 25 bp, Homo sapien
tcactaagtagggtcagcatcactg

SEQ ID NO: 6078695 - DNA, 25 bp, Homo sapien
cttgctcacctccaaaactttagga

SEQ ID NO: 6078696 - DNA, 25 bp, Homo sapien
tccaaaatgccaagtcactaagtag

SEQ ID NO: 6078697 - DNA, 25 bp, Homo sapien
caagtctggattcttggcaaggatg

SEQ ID NO: 6078698 - DNA, 25 bp, Homo sapien
aagcgttggttacaagataggccct

SEQ ID NO: 6078699 - DNA, 25 bp, Homo sapien
tagaaggactaagagaaaatgcccc

SEQ ID NO: 6078700 - DNA, 25 bp, Homo sapien
ttctcacactgtaccagtagagagg

SEQ ID NO: 6078701 - DNA, 25 bp, Homo sapien
ccagtagagaggaacagaaagcgtt

SEQ ID NO: 6078702 - DNA, 25 bp, Homo sapien
tttattcagaagcaaaagccgtatt

SEQ ID NO: 6078703 - DNA, 25 bp, Homo sapien
gctaccaagtaggatgaacaaattc

SEQ ID NO: 6078704 - DNA, 25 bp, Homo sapien
ctacaaatggtgatgcggtgaaact

SEQ ID NO: 6078705 - DNA, 25 bp, Homo sapien
gaatcaccttatagaagactgagct

SEQ ID NO: 6078706 - DNA, 25 bp, Homo sapien
gcttcacgaaatcctagacttcagg

SEQ ID NO: 6078707 - DNA, 25 bp, Homo sapien
aatattctctcgatattccaagggc

SEQ ID NO: 6078708 - DNA, 25 bp, Homo sapien
caagcatctttcagcgtggcaactc

SEQ ID NO: 6078709 - DNA, 25 bp, Homo sapien
cctggatgcttctcatgccaatggg

SEQ ID NO: 6078710 - DNA, 25 bp, Homo sapien
caactgccggtactataggcaccgc

SEQ ID NO: 6078711 - DNA, 25 bp, Homo sapien
tgggttcacctgtagcttcacgaaa

SEQ ID NO: 6078712 - DNA, 25 bp, Homo sapien
tccttcggtccactctgtgcgtgat

SEQ ID NO: 6078713 - DNA, 25 bp, Homo sapien
ggtccactctgtgcgtgattcccca

SEQ ID NO: 6078714 - DNA, 25 bp, Homo sapien
agttgatggcccagggcaacgtccc

SEQ ID NO: 6078715 - DNA, 25 bp, Homo sapien
tgcgtgattccccatctcatgctct

SEQ ID NO: 6078716 - DNA, 25 bp, Homo sapien
ttcttgttcaatccctccttcggtc

SEQ ID NO: 6078717 - DNA, 25 bp, Homo sapien
tcagcgtggcaactctggagagcca

SEQ ID NO: 6078718 - DNA, 25 bp, Homo sapien
aatcccaggcccctgaggttgcgga

SEQ ID NO: 6078719 - DNA, 25 bp, Homo sapien
tcatctgtgccaacctggaattcag

SEQ ID NO: 6078720 - DNA, 25 bp, Homo sapien
tctctgcttcgggtggttgtacaaa

SEQ ID NO: 6078721 - DNA, 25 bp, Homo sapien
tcgtttcaccgcgtaggatgccgcc

SEQ ID NO: 6078722 - DNA, 25 bp, Homo sapien
cagatgtgtctatggtattgcctag

SEQ ID NO: 6078723 - DNA, 25 bp, Homo sapien
tgaatggccctggacgagctgcctg

SEQ ID NO: 6078724 - DNA, 25 bp, Homo sapien
ctgatgcttgggatctgaatggccc

SEQ ID NO: 6078725 - DNA, 25 bp, Homo sapien
gggtcagtccatgagctcgtttcac

SEQ ID NO: 6078726 - DNA, 25 bp, Homo sapien
ctggaattcaggaagcgccacagga

SEQ ID NO: 6078727 - DNA, 25 bp, Homo sapien
tcttgcactcaaagagagagacaca

SEQ ID NO: 6078728 - DNA, 25 bp, Homo sapien
tcttaactactgagaaaggatgcgg

SEQ ID NO: 6078729 - DNA, 25 bp, Homo sapien
cacctgggttatggcaggagcccct

SEQ ID NO: 6078730 - DNA, 25 bp, Homo sapien
ggtgttactcttggtagaagtagca

SEQ ID NO: 6078731 - DNA, 25 bp, Homo sapien
gaagtagcagtgtatgtgatctgtc

SEQ ID NO: 6078732 - DNA, 25 bp, Homo sapien
tcatccacattgcagtgatccctgc

SEQ ID NO: 6078733 - DNA, 25 bp, Homo sapien
cctggtactgtagcatgaggctggc

SEQ ID NO: 6078734 - DNA, 25 bp, Homo sapien
tgttcacctggtactgtagcatgag

SEQ ID NO: 6078735 - DNA, 25 bp, Homo sapien
ttttagcatttcttggacgtcttca

SEQ ID NO: 6078736 - DNA, 25 bp, Homo sapien
tcttggacgtcttcattaagtacat

SEQ ID NO: 6078737 - DNA, 25 bp, Homo sapien
tgaggctggcaaagataggaaaaag

SEQ ID NO: 6078738 - DNA, 25 bp, Homo sapien
gaatgatgacaaagttggtattagc

SEQ ID NO: 6078739 - DNA, 25 bp, Homo sapien
tggtattagcaaaaaagctagtgct

SEQ ID NO: 6078740 - DNA, 25 bp, Homo sapien
ccattaaacagcgtctcaagccaat

SEQ ID NO: 6078741 - DNA, 25 bp, Homo sapien
tcacagcactagaattcttggcagg

SEQ ID NO: 6078742 - DNA, 25 bp, Homo sapien
atgttcatcagcattgcacttcagt

SEQ ID NO: 6078743 - DNA, 25 bp, Homo sapien
cttcagtctgcaatgataatattct

SEQ ID NO: 6078744 - DNA, 25 bp, Homo sapien
ttctgaaggacattcatcattagaa

SEQ ID NO: 6078745 - DNA, 25 bp, Homo sapien
tgcacttcagtctgcaatgataata

SEQ ID NO: 6078746 - DNA, 25 bp, Homo sapien
tgttcatcagcattgcacttcagtc

SEQ ID NO: 6078747 - DNA, 25 bp, Homo sapien
acttcagtctgcaatgataatattc

SEQ ID NO: 6078748 - DNA, 25 bp, Homo sapien
gcacttcagtctgcaatgataatat

SEQ ID NO: 6078749 - DNA, 25 bp, Homo sapien
catgttcatcagcattgcacttcag

SEQ ID NO: 6078750 - DNA, 25 bp, Homo sapien
ttgcacttcagtctgcaatgataat

SEQ ID NO: 6078751 - DNA, 25 bp, Homo sapien
ttcagtctgcaatgataatattctg

SEQ ID NO: 6078752 - DNA, 25 bp, Homo sapien
tattctgaaggacattcatcattag

SEQ ID NO: 6078753 - DNA, 25 bp, Homo sapien
cacttcagtctgcaatgataatatt

SEQ ID NO: 6078754 - DNA, 25 bp, Homo sapien
ggagccatttggacgttcacagatc

SEQ ID NO: 6078755 - DNA, 25 bp, Homo sapien
acaggagccatttggacgttcacag

SEQ ID NO: 6078756 - DNA, 25 bp, Homo sapien
tttggacgttcacagatctccttga

SEQ ID NO: 6078757 - DNA, 25 bp, Homo sapien
catttggacgttcacagatctcctt

SEQ ID NO: 6078758 - DNA, 25 bp, Homo sapien
tggacgttcacagatctccttgaat

SEQ ID NO: 6078759 - DNA, 25 bp, Homo sapien
gccatttggacgttcacagatctcc

SEQ ID NO: 6078760 - DNA, 25 bp, Homo sapien
cgacaggagccatttggacgttcac

SEQ ID NO: 6078761 - DNA, 25 bp, Homo sapien
agccatttggacgttcacagatctc

SEQ ID NO: 6078762 - DNA, 25 bp, Homo sapien
gacaggagccatttggacgttcaca

SEQ ID NO: 6078763 - DNA, 25 bp, Homo sapien
gagccatttggacgttcacagatct

SEQ ID NO: 6078764 - DNA, 25 bp, Homo sapien
atttggacgttcacagatctccttg

SEQ ID NO: 6078765 - DNA, 25 bp, Homo sapien
caggagccatttggacgttcacaga

SEQ ID NO: 6078766 - DNA, 25 bp, Homo sapien
cgcaattgttcttgcatgtcccttt

SEQ ID NO: 6078767 - DNA, 25 bp, Homo sapien
ttcccgcaattgttcttgcatgtcc

SEQ ID NO: 6078768 - DNA, 25 bp, Homo sapien
tcccgcaattgttcttgcatgtccc

SEQ ID NO: 6078769 - DNA, 25 bp, Homo sapien
cccgcaattgttcttgcatgtccct

SEQ ID NO: 6078770 - DNA, 25 bp, Homo sapien
tttcccgcaattgttcttgcatgtc

SEQ ID NO: 6078771 - DNA, 25 bp, Homo sapien
ggtcagaaagaagagcacggcaaag

SEQ ID NO: 6078772 - DNA, 25 bp, Homo sapien
ccgcaattgttcttgcatgtccctt

SEQ ID NO: 6078773 - DNA, 25 bp, Homo sapien
tctggcagagagcaataagttcttc

SEQ ID NO: 6078774 - DNA, 25 bp, Homo sapien
gatactttcctatgatctggagaga

SEQ ID NO: 6078775 - DNA, 25 bp, Homo sapien
cctagatccgaagctggtaagaggt

SEQ ID NO: 6078776 - DNA, 25 bp, Homo sapien
tgtggccttccccatctggtgccgg

SEQ ID NO: 6078777 - DNA, 25 bp, Homo sapien
tgggacaactcctcttgcttgtggg

SEQ ID NO: 6078778 - DNA, 25 bp, Homo sapien
ccaagggctgctcccggaatgacat

SEQ ID NO: 6078779 - DNA, 25 bp, Homo sapien
ccggaatgacatcccttgatacttt

SEQ ID NO: 6078780 - DNA, 25 bp, Homo sapien
tctgccctgtgacggaattgagaag

SEQ ID NO: 6078781 - DNA, 25 bp, Homo sapien
gcaggtctcagaccttggcttcgcc

SEQ ID NO: 6078782 - DNA, 25 bp, Homo sapien
gacttataacagtgtcagagctctg

SEQ ID NO: 6078783 - DNA, 25 bp, Homo sapien
tctggaagtttcctagatccgaagc

SEQ ID NO: 6078784 - DNA, 25 bp, Homo sapien
tgtgtctccctagaagtctggaagt

SEQ ID NO: 6078785 - DNA, 25 bp, Homo sapien
gggtggagataccatcctgctgacc

SEQ ID NO: 6078786 - DNA, 25 bp, Homo sapien
tgtgcaacagtactttcccaggatc

SEQ ID NO: 6078787 - DNA, 25 bp, Homo sapien
gtactttcccaggatccacaggaaa

SEQ ID NO: 6078788 - DNA, 25 bp, Homo sapien
ctaacaaaggcatctaccgaagtct

SEQ ID NO: 6078789 - DNA, 25 bp, Homo sapien
gacaggactctaatcgtgctcttat

SEQ ID NO: 6078790 - DNA, 25 bp, Homo sapien
ggaaggagatacaagctcgtttaca

SEQ ID NO: 6078791 - DNA, 25 bp, Homo sapien
tacatgtgatagatctaacaaaggc

SEQ ID NO: 6078792 - DNA, 25 bp, Homo sapien
cagctttgcagcctttgtgcaacag

SEQ ID NO: 6078793 - DNA, 25 bp, Homo sapien
aatctctctcgtggcacagggaagg

SEQ ID NO: 6078794 - DNA, 25 bp, Homo sapien
gaataaaaagccaatctctctcgtg

SEQ ID NO: 6078795 - DNA, 25 bp, Homo sapien
gaagtctggtctggatagacggcac

SEQ ID NO: 6078796 - DNA, 25 bp, Homo sapien
tgtctctgcctagactggaataaaa

SEQ ID NO: 6078797 - DNA, 25 bp, Homo sapien
gagctcttaggtcagcgctgctggt

SEQ ID NO: 6078798 - DNA, 25 bp, Homo sapien
tgcccgatctgaaatactgcaaggg

SEQ ID NO: 6078799 - DNA, 25 bp, Homo sapien
tgtgcatccgatattttttgcccga

SEQ ID NO: 6078800 - DNA, 25 bp, Homo sapien
cagttacaatacagacatggccaga

SEQ ID NO: 6078801 - DNA, 25 bp, Homo sapien
tgcaagggcttaaccattcaaacac

SEQ ID NO: 6078802 - DNA, 25 bp, Homo sapien
caatggttctgctatgtgcatccga

SEQ ID NO: 6078803 - DNA, 25 bp, Homo sapien
ttcaaacaccgcatgacaacgaacc

SEQ ID NO: 6078804 - DNA, 25 bp, Homo sapien
atgaacggtgggtcacggctatgac

SEQ ID NO: 6078805 - DNA, 25 bp, Homo sapien
gacttgaagccttttaccagttaca

SEQ ID NO: 6078806 - DNA, 25 bp, Homo sapien
ggactgtgaaactcaggctgcagga

SEQ ID NO: 6078807 - DNA, 25 bp, Homo sapien
gcagcgctttcagtccacaacagat

SEQ ID NO: 6078808 - DNA, 25 bp, Homo sapien
tggctttggactccatcggtcatct

SEQ ID NO: 6078809 - DNA, 25 bp, Homo sapien
tgtcagctggtgaagccacttggct

SEQ ID NO: 6078810 - DNA, 25 bp, Homo sapien
ttaacatattggcttcgtgggatcc

SEQ ID NO: 6078811 - DNA, 25 bp, Homo sapien
aagaggaagacatagcgctactgct

SEQ ID NO: 6078812 - DNA, 25 bp, Homo sapien
tgactttgccatccgggtagatctg

SEQ ID NO: 6078813 - DNA, 25 bp, Homo sapien
cagatggaaaccgatgcccactctg

SEQ ID NO: 6078814 - DNA, 25 bp, Homo sapien
gggcgagacgcttctccccgtgagc

SEQ ID NO: 6078815 - DNA, 25 bp, Homo sapien
atctgcagatggaaaccgatgccca

SEQ ID NO: 6078816 - DNA, 25 bp, Homo sapien
tgccatccgggtagatctgcagatg

SEQ ID NO: 6078817 - DNA, 25 bp, Homo sapien
tattggcttcgtgggatccattgac

SEQ ID NO: 6078818 - DNA, 25 bp, Homo sapien
aagacatagcgctactgctgctctg

SEQ ID NO: 6078819 - DNA, 25 bp, Homo sapien
gatccattgactttgccatccgggt

SEQ ID NO: 6078820 - DNA, 25 bp, Homo sapien
gctgctggagcctctagggttccta

SEQ ID NO: 6078821 - DNA, 25 bp, Homo sapien
cctctagggttcctatcagtggcag

SEQ ID NO: 6078822 - DNA, 25 bp, Homo sapien
taccacaaagcaatgcatgagccag

SEQ ID NO: 6078823 - DNA, 25 bp, Homo sapien
ggcaaacatgatggaagactcaagt

SEQ ID NO: 6078824 - DNA, 25 bp, Homo sapien
aacaggaggctttagtaggccaagt

SEQ ID NO: 6078825 - DNA, 25 bp, Homo sapien
tctctactgcaaacggacagggcat

SEQ ID NO: 6078826 - DNA, 25 bp, Homo sapien
gattcccaggcgctgttctaaagac

SEQ ID NO: 6078827 - DNA, 25 bp, Homo sapien
agttatcatagagtccacgtgcagg

SEQ ID NO: 6078828 - DNA, 25 bp, Homo sapien
gaatccatctggtaaggactgagct

SEQ ID NO: 6078829 - DNA, 25 bp, Homo sapien
tgcaggccttgtggtagtatcgcca

SEQ ID NO: 6078830 - DNA, 25 bp, Homo sapien
tctcatgacctagaaacacggcagc

SEQ ID NO: 6078831 - DNA, 25 bp, Homo sapien
gctggtgaccatcctaggatgatgg

SEQ ID NO: 6078832 - DNA, 25 bp, Homo sapien
gactgagctgctatgaactgggcaa

SEQ ID NO: 6078833 - DNA, 25 bp, Homo sapien
tgcagctatagaaaccaaggttgga

SEQ ID NO: 6078834 - DNA, 25 bp, Homo sapien
caccagggcacttgctgcctcttga

SEQ ID NO: 6078835 - DNA, 25 bp, Homo sapien
ccatggtgccaggcaggagcaagct

SEQ ID NO: 6078836 - DNA, 25 bp, Homo sapien
accaaagctgagtcactcaagggct

SEQ ID NO: 6078837 - DNA, 25 bp, Homo sapien
tccgtgagtgagcacctccaaggag

SEQ ID NO: 6078838 - DNA, 25 bp, Homo sapien
tccactttcccttgctcacccttgt

SEQ ID NO: 6078839 - DNA, 25 bp, Homo sapien
cagagaggaggactaggagcagcgc

SEQ ID NO: 6078840 - DNA, 25 bp, Homo sapien
gaccgagacacatagctcctgccct

SEQ ID NO: 6078841 - DNA, 25 bp, Homo sapien
gctcacccttgtccaccctctctct

SEQ ID NO: 6078842 - DNA, 25 bp, Homo sapien
aatcagcagagaggaggactaggag

SEQ ID NO: 6078843 - DNA, 25 bp, Homo sapien
tgactgcaataaaagccaactaaga

SEQ ID NO: 6078844 - DNA, 25 bp, Homo sapien
ttcccttgctcacccttgtccaccc

SEQ ID NO: 6078845 - DNA, 25 bp, Homo sapien
agtgtctaccccacaaaagccatgg

SEQ ID NO: 6078846 - DNA, 25 bp, Homo sapien
aagccaactaagaagatgtgtgtgt

SEQ ID NO: 6078847 - DNA, 25 bp, Homo sapien
gctgagtcactcaagggctgggacc

SEQ ID NO: 6078848 - DNA, 25 bp, Homo sapien
ggcgggaatcagcagagaggaggac

SEQ ID NO: 6078849 - DNA, 25 bp, Homo sapien
ggaggactaggagcagcgctcaggg

SEQ ID NO: 6078850 - DNA, 25 bp, Homo sapien
ccgaccgaccagaccaaagctgagt

SEQ ID NO: 6078851 - DNA, 25 bp, Homo sapien
aggagcagcgctcaggggtggcact

SEQ ID NO: 6078852 - DNA, 25 bp, Homo sapien
gaccagaccaaagctgagtcactca

SEQ ID NO: 6078853 - DNA, 25 bp, Homo sapien
gaattatcaaatacttaatcaaatg

SEQ ID NO: 6078854 - DNA, 25 bp, Homo sapien
tgctgtttccactttcccttgctca

SEQ ID NO: 6078855 - DNA, 25 bp, Homo sapien
ccttgtccaccctctctctccgtct

SEQ ID NO: 6078856 - DNA, 25 bp, Homo sapien
tcaaatacttaatcaaatggataca

SEQ ID NO: 6078857 - DNA, 25 bp, Homo sapien
ccataaacagccagtgtcacgggag

SEQ ID NO: 6078858 - DNA, 25 bp, Homo sapien
tgctgcctcttgattctgtgactgc

SEQ ID NO: 6078859 - DNA, 25 bp, Homo sapien
aaggaggaattatcaaatacttaat

SEQ ID NO: 6078860 - DNA, 25 bp, Homo sapien
gaggcgaagctagcccaatccataa

SEQ ID NO: 6078861 - DNA, 25 bp, Homo sapien
ttcttgctgtttccactttcccttg

SEQ ID NO: 6078862 - DNA, 25 bp, Homo sapien
agtgagcacctccaaggagggataa

SEQ ID NO: 6078863 - DNA, 25 bp, Homo sapien
taccccacaaaagccatggtgccag

SEQ ID NO: 6078864 - DNA, 25 bp, Homo sapien
tgccaggcaggagcaagctggaggc

SEQ ID NO: 6078865 - DNA, 25 bp, Homo sapien
cccaatccataaacagccagtgtca

SEQ ID NO: 6078866 - DNA, 25 bp, Homo sapien
ttagcctatgcaaggccctagcttc

SEQ ID NO: 6078867 - DNA, 25 bp, Homo sapien
atatatttattgagtgtctacccca

SEQ ID NO: 6078868 - DNA, 25 bp, Homo sapien
aatgtcagatttgagcctctgtcac

SEQ ID NO: 6078869 - DNA, 25 bp, Homo sapien
catccacaacacaaggaaaacaaac

SEQ ID NO: 6078870 - DNA, 25 bp, Homo sapien
ggcaggagaagtgaccgagacacat

SEQ ID NO: 6078871 - DNA, 25 bp, Homo sapien
aaaaatatatatttattgagtgtct

SEQ ID NO: 6078872 - DNA, 25 bp, Homo sapien
caacacaaggaaaacaaacaagcca

SEQ ID NO: 6078873 - DNA, 25 bp, Homo sapien
gacacatagctcctgccctccgtga

SEQ ID NO: 6078874 - DNA, 25 bp, Homo sapien
ctcttgattctgtgactgcaataaa

SEQ ID NO: 6078875 - DNA, 25 bp, Homo sapien
tagctcctgccctccgtgagtgagc

SEQ ID NO: 6078876 - DNA, 25 bp, Homo sapien
tctctctccgtctcaccagggcact

SEQ ID NO: 6078877 - DNA, 25 bp, Homo sapien
aagggctgggaccaggctgggcggg

SEQ ID NO: 6078878 - DNA, 25 bp, Homo sapien
gaaatggaggcgaagctagcccaat

SEQ ID NO: 6078879 - DNA, 25 bp, Homo sapien
acttaatcaaatggatacaatgtta

SEQ ID NO: 6078880 - DNA, 25 bp, Homo sapien
agcttccatccacaacacaaggaaa

SEQ ID NO: 6078881 - DNA, 25 bp, Homo sapien
tgagctccagcactgggaccgaccg

SEQ ID NO: 6078882 - DNA, 25 bp, Homo sapien
caataaaagccaactaagaagatgt

SEQ ID NO: 6078883 - DNA, 25 bp, Homo sapien
gcaggagcaagctggaggcaggaga

SEQ ID NO: 6078884 - DNA, 25 bp, Homo sapien
attctgtgactgcaataaaagccaa

SEQ ID NO: 6078885 - DNA, 25 bp, Homo sapien
gttaatctagttttcttgctgtttc

SEQ ID NO: 6078886 - DNA, 25 bp, Homo sapien
agatgttgagctccagcactgggac

SEQ ID NO: 6078887 - DNA, 25 bp, Homo sapien
tgggaccaggctgggcgggaatcag

SEQ ID NO: 6078888 - DNA, 25 bp, Homo sapien
caggggtggcacttagcctatgcaa

SEQ ID NO: 6078889 - DNA, 25 bp, Homo sapien
aggctgggcgggaatcagcagagag

SEQ ID NO: 6078890 - DNA, 25 bp, Homo sapien
gggataaggaggaattatcaaatac

SEQ ID NO: 6078891 - DNA, 25 bp, Homo sapien
agctagcccaatccataaacagcca

SEQ ID NO: 6078892 - DNA, 25 bp, Homo sapien
acagccagtgtcacgggaggttaat

SEQ ID NO: 6078893 - DNA, 25 bp, Homo sapien
ttattgagtgtctaccccacaaaag

SEQ ID NO: 6078894 - DNA, 25 bp, Homo sapien
ggcacttgctgcctcttgattctgt

SEQ ID NO: 6078895 - DNA, 25 bp, Homo sapien
agcgctcaggggtggcacttagcct

SEQ ID NO: 6078896 - DNA, 25 bp, Homo sapien
tccgtctcaccagggcacttgctgc

SEQ ID NO: 6078897 - DNA, 25 bp, Homo sapien
ccagcactgggaccgaccgaccaga

SEQ ID NO: 6078898 - DNA, 25 bp, Homo sapien
aagatgtgtgtgtccccacctatct

SEQ ID NO: 6078899 - DNA, 25 bp, Homo sapien
acttagggaaatggaggcgaagcta

SEQ ID NO: 6078900 - DNA, 25 bp, Homo sapien
ggccctagcttccatccacaacaca

SEQ ID NO: 6078901 - DNA, 25 bp, Homo sapien
aatgttagatgttgagctccagcac

SEQ ID NO: 6078902 - DNA, 25 bp, Homo sapien
caaaagccatggtgccaggcaggag

SEQ ID NO: 6078903 - DNA, 25 bp, Homo sapien
ccaccctctctctccgtctcaccag

SEQ ID NO: 6078904 - DNA, 25 bp, Homo sapien
gagcctctgtcacttagggaaatgg

SEQ ID NO: 6078905 - DNA, 25 bp, Homo sapien
caagccaatgtcagatttgagcctc

SEQ ID NO: 6078906 - DNA, 25 bp, Homo sapien
ggatacaatgttagatgttgagctc

SEQ ID NO: 6078907 - DNA, 25 bp, Homo sapien
cacctccaaggagggataaggagga

SEQ ID NO: 6078908 - DNA, 25 bp, Homo sapien
tggcacttagcctatgcaaggccct

SEQ ID NO: 6078909 - DNA, 25 bp, Homo sapien
agatttgagcctctgtcacttaggg

SEQ ID NO: 6078910 - DNA, 25 bp, Homo sapien
caaggagggataaggaggaattatc

SEQ ID NO: 6078911 - DNA, 25 bp, Homo sapien
agtgtcacgggaggttaatctagtt

SEQ ID NO: 6078912 - DNA, 25 bp, Homo sapien
ctgccctccgtgagtgagcacctcc

SEQ ID NO: 6078913 - DNA, 25 bp, Homo sapien
ctgtcacttagggaaatggaggcga

SEQ ID NO: 6078914 - DNA, 25 bp, Homo sapien
tcactcaagggctgggaccaggctg

SEQ ID NO: 6078915 - DNA, 25 bp, Homo sapien
ctagttttcttgctgtttccacttt

SEQ ID NO: 6078916 - DNA, 25 bp, Homo sapien
gctggaggcaggagaagtgaccgag

SEQ ID NO: 6078917 - DNA, 25 bp, Homo sapien
aacaaacaagccaatgtcagatttg

SEQ ID NO: 6078918 - DNA, 25 bp, Homo sapien
actaagaagatgtgtgtgtccccac

SEQ ID NO: 6078919 - DNA, 25 bp, Homo sapien
tatgcaaggccctagcttccatcca

SEQ ID NO: 6078920 - DNA, 25 bp, Homo sapien
tcaaatggatacaatgttagatgtt

SEQ ID NO: 6078921 - DNA, 25 bp, Homo sapien
aaggaaaacaaacaagccaatgtca

SEQ ID NO: 6078922 - DNA, 25 bp, Homo sapien
ctgggaccgaccgaccagaccaaag

SEQ ID NO: 6078923 - DNA, 25 bp, Homo sapien
agaagtgaccgagacacatagctcc

SEQ ID NO: 6078924 - DNA, 25 bp, Homo sapien
ggaggttaatctagttttcttgctg

SEQ ID NO: 6078925 - DNA, 25 bp, Homo sapien
tttttacaggagtgcaagaatggcc

SEQ ID NO: 6078926 - DNA, 25 bp, Homo sapien
ttttgtgcctcagcctctcgagtag

SEQ ID NO: 6078927 - DNA, 25 bp, Homo sapien
tctgaaaatgtggaagcaactttgc

SEQ ID NO: 6078928 - DNA, 25 bp, Homo sapien
tcagtctcctacagtgcagtggcgc

SEQ ID NO: 6078929 - DNA, 25 bp, Homo sapien
gctaattttgtgttttcggtagaca

SEQ ID NO: 6078930 - DNA, 25 bp, Homo sapien
tacagaaacttggtaccagggagaa

SEQ ID NO: 6078931 - DNA, 25 bp, Homo sapien
ggctgtgaccaaaatgctaatagtg

SEQ ID NO: 6078932 - DNA, 25 bp, Homo sapien
tgatatggacagtgaaggacaggct

SEQ ID NO: 6078933 - DNA, 25 bp, Homo sapien
tagctgggaccacagtcatgcacca

SEQ ID NO: 6078934 - DNA, 25 bp, Homo sapien
gctgggattatagccaccatgcctg

SEQ ID NO: 6078935 - DNA, 25 bp, Homo sapien
caactttgcaactgggttacaggca

SEQ ID NO: 6078936 - DNA, 25 bp, Homo sapien
tagagactggttaaatggctgtgac

SEQ ID NO: 6078937 - DNA, 25 bp, Homo sapien
tgtccaggaggtggctagtatagat

SEQ ID NO: 6078938 - DNA, 25 bp, Homo sapien
ccaagaaaatccctaactgtagatg

SEQ ID NO: 6078939 - DNA, 25 bp, Homo sapien
caggaacctgtagatagaggaggca

SEQ ID NO: 6078940 - DNA, 25 bp, Homo sapien
cctatatgttcctgaaactgtcctt

SEQ ID NO: 6078941 - DNA, 25 bp, Homo sapien
cagttactgaccaagattacccaag

SEQ ID NO: 6078942 - DNA, 25 bp, Homo sapien
ggaggtgtccaaagtcaccgagtga

SEQ ID NO: 6078943 - DNA, 25 bp, Homo sapien
gattacccaagtgcccctatatgtt

SEQ ID NO: 6078944 - DNA, 25 bp, Homo sapien
actgtagatgttcacatggatgata

SEQ ID NO: 6078945 - DNA, 25 bp, Homo sapien
ccaaagtcaccgagtgagtgaatga

SEQ ID NO: 6078946 - DNA, 25 bp, Homo sapien
taagaatcaccctgattcagggtag

SEQ ID NO: 6078947 - DNA, 25 bp, Homo sapien
gcctcagtaacaggtcattgcaccc

SEQ ID NO: 6078948 - DNA, 25 bp, Homo sapien
tgatggatgccatcctccatccagc

SEQ ID NO: 6078949 - DNA, 25 bp, Homo sapien
caagacgatcctggccaacacggtg

SEQ ID NO: 6078950 - DNA, 25 bp, Homo sapien
actgctgaactctcacacctgtcat

SEQ ID NO: 6078951 - DNA, 25 bp, Homo sapien
ccagctggattccacttatatgagg

SEQ ID NO: 6078952 - DNA, 25 bp, Homo sapien
gggacagagtgttctggaaatgaat

SEQ ID NO: 6078953 - DNA, 25 bp, Homo sapien
tgtcatcccagcactttgggaggcc

SEQ ID NO: 6078954 - DNA, 25 bp, Homo sapien
ctgtactaaaaatgcaaaacatgag

SEQ ID NO: 6078955 - DNA, 25 bp, Homo sapien
tggtgatggtcgcatcattaacatg

SEQ ID NO: 6078956 - DNA, 25 bp, Homo sapien
catcattaacatgaatgtagttaat

SEQ ID NO: 6078957 - DNA, 25 bp, Homo sapien
ctcccaaagtgccgggatgacaggt

SEQ ID NO: 6078958 - DNA, 25 bp, Homo sapien
caccttggcttcccaaagtgctggg

SEQ ID NO: 6078959 - DNA, 25 bp, Homo sapien
caaggcgggcggttcacgaggtcac

SEQ ID NO: 6078960 - DNA, 25 bp, Homo sapien
cgatatcaagacgatcctggccaac

SEQ ID NO: 6078961 - DNA, 25 bp, Homo sapien
gtcaagtttatacaaacagaaagta

SEQ ID NO: 6078962 - DNA, 25 bp, Homo sapien
atttttagtacagatgggctctcac

SEQ ID NO: 6078963 - DNA, 25 bp, Homo sapien
ctacaggcgcctgccaccaggctca

SEQ ID NO: 6078964 - DNA, 25 bp, Homo sapien
cacttatatgaggaccctagagttg

SEQ ID NO: 6078965 - DNA, 25 bp, Homo sapien
ggtgtgagccactgggcccagctgg

SEQ ID NO: 6078966 - DNA, 25 bp, Homo sapien
gccgggtgtggttgcatgtgcctgt

SEQ ID NO: 6078967 - DNA, 25 bp, Homo sapien
aggctcagcaaatttttgtattttt

SEQ ID NO: 6078968 - DNA, 25 bp, Homo sapien
gtaggtaccagtggctgggaggaac

SEQ ID NO: 6078969 - DNA, 25 bp, Homo sapien
tgtggttgcatgtgcctgtagtccc

SEQ ID NO: 6078970 - DNA, 25 bp, Homo sapien
gccaccaggctcagcaaatttttgt

SEQ ID NO: 6078971 - DNA, 25 bp, Homo sapien
agccactcgggaggctgagactaca

SEQ ID NO: 6078972 - DNA, 25 bp, Homo sapien
agtacagatgggctctcaccacgtt

SEQ ID NO: 6078973 - DNA, 25 bp, Homo sapien
caaacagaaagtagaatggtaggta

SEQ ID NO: 6078974 - DNA, 25 bp, Homo sapien
aggtcacgatatcaagacgatcctg

SEQ ID NO: 6078975 - DNA, 25 bp, Homo sapien
agaatggtaggtaccagtggctggg

SEQ ID NO: 6078976 - DNA, 25 bp, Homo sapien
tgacctcaagtgatctgcccacctt

SEQ ID NO: 6078977 - DNA, 25 bp, Homo sapien
ctgggcccagctggattccacttat

SEQ ID NO: 6078978 - DNA, 25 bp, Homo sapien
ttactggggacagagtgttctggaa

SEQ ID NO: 6078979 - DNA, 25 bp, Homo sapien
agccactgggcccagctggattcca

SEQ ID NO: 6078980 - DNA, 25 bp, Homo sapien
gttctggaaatgaatgttggtgatg

SEQ ID NO: 6078981 - DNA, 25 bp, Homo sapien
tttatacaaacagaaagtagaatgg

SEQ ID NO: 6078982 - DNA, 25 bp, Homo sapien
taaaaatgcaaaacatgagccgggt

SEQ ID NO: 6078983 - DNA, 25 bp, Homo sapien
gaaatgaatgttggtgatggtcgca

SEQ ID NO: 6078984 - DNA, 25 bp, Homo sapien
gttaatactgctgaactctcacacc

SEQ ID NO: 6078985 - DNA, 25 bp, Homo sapien
acatgagccgggtgtggttgcatgt

SEQ ID NO: 6078986 - DNA, 25 bp, Homo sapien
ggggacatgttgtttactggggaca

SEQ ID NO: 6078987 - DNA, 25 bp, Homo sapien
ggctgggaggaacggggacatgttg

SEQ ID NO: 6078988 - DNA, 25 bp, Homo sapien
tgcaaaacatgagccgggtgtggtt

SEQ ID NO: 6078989 - DNA, 25 bp, Homo sapien
ccagtggctgggaggaacggggaca

SEQ ID NO: 6078990 - DNA, 25 bp, Homo sapien
tttgtatttttagtacagatgggct

SEQ ID NO: 6078991 - DNA, 25 bp, Homo sapien
tatgaggaccctagagttgtcaagt

SEQ ID NO: 6078992 - DNA, 25 bp, Homo sapien
tcaagtgatctgcccaccttggctt

SEQ ID NO: 6078993 - DNA, 25 bp, Homo sapien
gaaagtagaatggtaggtaccagtg

SEQ ID NO: 6078994 - DNA, 25 bp, Homo sapien
gccgggatgacaggtgtgagccact

SEQ ID NO: 6078995 - DNA, 25 bp, Homo sapien
ggattccacttatatgaggacccta

SEQ ID NO: 6078996 - DNA, 25 bp, Homo sapien
tgcctgtagtcccagccactcggga

SEQ ID NO: 6078997 - DNA, 25 bp, Homo sapien
gtcccagccactcgggaggctgaga

SEQ ID NO: 6078998 - DNA, 25 bp, Homo sapien
gatgggctctcaccacgttggccag

SEQ ID NO: 6078999 - DNA, 25 bp, Homo sapien
ctctcaccacgttggccaggctggt

SEQ ID NO: 6079000 - DNA, 25 bp, Homo sapien
agagttgtcaagtttatacaaacag

SEQ ID NO: 6079001 - DNA, 25 bp, Homo sapien
aatgtagttaatactgctgaactct

SEQ ID NO: 6079002 - DNA, 25 bp, Homo sapien
gcgcctgccaccaggctcagcaaat

SEQ ID NO: 6079003 - DNA, 25 bp, Homo sapien
tggtcgcatcattaacatgaatgta

SEQ ID NO: 6079004 - DNA, 25 bp, Homo sapien
ttcacgaggtcacgatatcaagacg

SEQ ID NO: 6079005 - DNA, 25 bp, Homo sapien
tcgggaggctgagactacaggcgcc

SEQ ID NO: 6079006 - DNA, 25 bp, Homo sapien
aactctcacacctgtcatcccagca

SEQ ID NO: 6079007 - DNA, 25 bp, Homo sapien
cacacctgtcatcccagcactttgg

SEQ ID NO: 6079008 - DNA, 25 bp, Homo sapien
aacatgaatgtagttaatactgctg

SEQ ID NO: 6079009 - DNA, 25 bp, Homo sapien
atcctggccaacacggtgaaacccg

SEQ ID NO: 6079010 - DNA, 25 bp, Homo sapien
caaagtgccgggatgacaggtgtga

SEQ ID NO: 6079011 - DNA, 25 bp, Homo sapien
tgcatgtgcctgtagtcccagccac

SEQ ID NO: 6079012 - DNA, 25 bp, Homo sapien
gatctgcccaccttggcttcccaaa

SEQ ID NO: 6079013 - DNA, 25 bp, Homo sapien
gaatgttggtgatggtcgcatcatt

SEQ ID NO: 6079014 - DNA, 25 bp, Homo sapien
gaccctagagttgtcaagtttatac

SEQ ID NO: 6079015 - DNA, 25 bp, Homo sapien
aggaacggggacatgttgtttactg

SEQ ID NO: 6079016 - DNA, 25 bp, Homo sapien
cggtctgtactaaaaatgcaaaaca

SEQ ID NO: 6079017 - DNA, 25 bp, Homo sapien
cagagtgttctggaaatgaatgttg

SEQ ID NO: 6079018 - DNA, 25 bp, Homo sapien
ggctgagactacaggcgcctgccac

SEQ ID NO: 6079019 - DNA, 25 bp, Homo sapien
atgttgtttactggggacagagtgt

SEQ ID NO: 6079020 - DNA, 25 bp, Homo sapien
ggaggccaaggcgggcggttcacga

SEQ ID NO: 6079021 - DNA, 25 bp, Homo sapien
gggcggttcacgaggtcacgatatc

SEQ ID NO: 6079022 - DNA, 25 bp, Homo sapien
atgacaggtgtgagccactgggccc

SEQ ID NO: 6079023 - DNA, 25 bp, Homo sapien
tcacagggactttccggtggaggac

SEQ ID NO: 6079024 - DNA, 25 bp, Homo sapien
tagtctcctcgtgcctcacgtgctg

SEQ ID NO: 6079025 - DNA, 25 bp, Homo sapien
gatgactaccgctttgtctacgcgg

SEQ ID NO: 6079026 - DNA, 25 bp, Homo sapien
tgcctcacgtgctgtcggtggtgcc

SEQ ID NO: 6079027 - DNA, 25 bp, Homo sapien
ggaggacgttttcaccctgcctgtg

SEQ ID NO: 6079028 - DNA, 25 bp, Homo sapien
gagccgattggtctcagttgcccca

SEQ ID NO: 6079029 - DNA, 25 bp, Homo sapien
gaaccattgtagtcagactgccccg

SEQ ID NO: 6079030 - DNA, 25 bp, Homo sapien
tgtgtacttctcgtccgactggctg

SEQ ID NO: 6079031 - DNA, 25 bp, Homo sapien
tctggaagctccactggagccgatt

SEQ ID NO: 6079032 - DNA, 25 bp, Homo sapien
tgatcagtactttctaataagcaga

SEQ ID NO: 6079033 - DNA, 25 bp, Homo sapien
tcgtccgactggctgaatgagttct

SEQ ID NO: 6079034 - DNA, 25 bp, Homo sapien
gatgcactggatgtggatgactacc

SEQ ID NO: 6079035 - DNA, 25 bp, Homo sapien
actacaggtgcgcatcaccacaggc

SEQ ID NO: 6079036 - DNA, 25 bp, Homo sapien
tgtgctacaaaccttcccagggctg

SEQ ID NO: 6079037 - DNA, 25 bp, Homo sapien
caaagggatctttccaaaaatgaca

SEQ ID NO: 6079038 - DNA, 25 bp, Homo sapien
tgcgcccagtctacctggctggttt

SEQ ID NO: 6079039 - DNA, 25 bp, Homo sapien
ttaatctggactctgaagcagcccc

SEQ ID NO: 6079040 - DNA, 25 bp, Homo sapien
aaatgacaatatccctctgtgctac

SEQ ID NO: 6079041 - DNA, 25 bp, Homo sapien
ttgaagatacaagccaccacatccg

SEQ ID NO: 6079042 - DNA, 25 bp, Homo sapien
caaagtgctgggattgaagatacaa

SEQ ID NO: 6079043 - DNA, 25 bp, Homo sapien
tgaagcagccccttctgtagtcctg

SEQ ID NO: 6079044 - DNA, 25 bp, Homo sapien
cacaggcctggctaagttttgtatt

SEQ ID NO: 6079045 - DNA, 25 bp, Homo sapien
caggcctctccttccttaatctgga

SEQ ID NO: 6079046 - DNA, 25 bp, Homo sapien
ttctctacctaagcagccaaaggga

SEQ ID NO: 6079047 - DNA, 25 bp, Homo sapien
cagtctctgggcgtgagctcctttc

SEQ ID NO: 6079048 - DNA, 25 bp, Homo sapien
tttacattgtgctaaggaggacaaa

SEQ ID NO: 6079049 - DNA, 25 bp, Homo sapien
cctgactttgccagaccttcttggg

SEQ ID NO: 6079050 - DNA, 25 bp, Homo sapien
gagctctatgcagcgtgtgtccaca

SEQ ID NO: 6079051 - DNA, 25 bp, Homo sapien
ggtgaatctctatgtgctcccagtg

SEQ ID NO: 6079052 - DNA, 25 bp, Homo sapien
ggatgggctccccagcaagccattc

SEQ ID NO: 6079053 - DNA, 25 bp, Homo sapien
tgagacccctctgttttcaaggaga

SEQ ID NO: 6079054 - DNA, 25 bp, Homo sapien
gtctccctgagcctgactttgccag

SEQ ID NO: 6079055 - DNA, 25 bp, Homo sapien
tttggcctccgggagagcagcccag

SEQ ID NO: 6079056 - DNA, 25 bp, Homo sapien
ggtaggcagaatgtcttgagacccc

SEQ ID NO: 6079057 - DNA, 25 bp, Homo sapien
tgtgtccacaccgaggtctgcagca

SEQ ID NO: 6079058 - DNA, 25 bp, Homo sapien
ggccacagttgtatcatatagcatc

SEQ ID NO: 6079059 - DNA, 25 bp, Homo sapien
caaaatggaagcaggcaacccagag

SEQ ID NO: 6079060 - DNA, 25 bp, Homo sapien
tcagggccctttgtttaacctcatg

SEQ ID NO: 6079061 - DNA, 25 bp, Homo sapien
tggagggcgcactcaaacttcaggg

SEQ ID NO: 6079062 - DNA, 25 bp, Homo sapien
tatctgtcctgagctccgtaagttt

SEQ ID NO: 6079063 - DNA, 25 bp, Homo sapien
gcagccgctgtcctctaaggtttca

SEQ ID NO: 6079064 - DNA, 25 bp, Homo sapien
gacaggctaggcaaatctactggca

SEQ ID NO: 6079065 - DNA, 25 bp, Homo sapien
caacccagagagtcactttagcttc

SEQ ID NO: 6079066 - DNA, 25 bp, Homo sapien
taaggtttcacaaaatggaagcagg

SEQ ID NO: 6079067 - DNA, 25 bp, Homo sapien
cgtaagtttgtaagtggccaccctg

SEQ ID NO: 6079068 - DNA, 25 bp, Homo sapien
tggtattcagctaagtggacaggct

SEQ ID NO: 6079069 - DNA, 25 bp, Homo sapien
gaccaccaaagaagtgacaaaggga

SEQ ID NO: 6079070 - DNA, 25 bp, Homo sapien
gcagattccatctcattatgctgga

SEQ ID NO: 6079071 - DNA, 25 bp, Homo sapien
catgggcttcggtactggaaactcc

SEQ ID NO: 6079072 - DNA, 25 bp, Homo sapien
ttggccgacaagctgcatacttgag

SEQ ID NO: 6079073 - DNA, 25 bp, Homo sapien
gatgcgaaagaccatgagtgaccat

SEQ ID NO: 6079074 - DNA, 25 bp, Homo sapien
gctaaacactttcaccctggtgctg

SEQ ID NO: 6079075 - DNA, 25 bp, Homo sapien
ttccgcgaagtcgacgtccaggagg

SEQ ID NO: 6079076 - DNA, 25 bp, Homo sapien
atggccccggtgagccaagacactg

SEQ ID NO: 6079077 - DNA, 25 bp, Homo sapien
taagagccacaggatgcgaaagacc

SEQ ID NO: 6079078 - DNA, 25 bp, Homo sapien
ccctgcctggatagatgagtttaag

SEQ ID NO: 6079079 - DNA, 25 bp, Homo sapien
gaggctcagcccaaaggtatccact

SEQ ID NO: 6079080 - DNA, 25 bp, Homo sapien
cacagatgagcttgcaacctttcag

SEQ ID NO: 6079081 - DNA, 25 bp, Homo sapien
tagaatgagatgctgtgtccagcac

SEQ ID NO: 6079082 - DNA, 25 bp, Homo sapien
tctccttggtgaaggtaagagccac

SEQ ID NO: 6079083 - DNA, 25 bp, Homo sapien
tggaggatggcagcgactttaagaa

SEQ ID NO: 6079084 - DNA, 25 bp, Homo sapien
tatttcaccgggatgaacaggatct

SEQ ID NO: 6079085 - DNA, 25 bp, Homo sapien
gacccggcgccagtctttgtctacg

SEQ ID NO: 6079086 - DNA, 25 bp, Homo sapien
gatgaacaggatctctccaggagac

SEQ ID NO: 6079087 - DNA, 25 bp, Homo sapien
cagcgactttaagaaggatgtcccc

SEQ ID NO: 6079088 - DNA, 25 bp, Homo sapien
cagagcccgcacgtaatgccagtat

SEQ ID NO: 6079089 - DNA, 25 bp, Homo sapien
caggtcttctttactgtgcggcagg

SEQ ID NO: 6079090 - DNA, 25 bp, Homo sapien
tcctgccctcgtagaagagctcagt

SEQ ID NO: 6079091 - DNA, 25 bp, Homo sapien
cccgaggtccaacttcaggtcttct

SEQ ID NO: 6079092 - DNA, 25 bp, Homo sapien
tccaggtcgggattctccacgtcaa

SEQ ID NO: 6079093 - DNA, 25 bp, Homo sapien
tgccatgtgcccgtgttgagcttct

SEQ ID NO: 6079094 - DNA, 25 bp, Homo sapien
tcagtggctcgctgcaacaatgtca

SEQ ID NO: 6079095 - DNA, 25 bp, Homo sapien
acctggtctgcaggcggccgcccat

SEQ ID NO: 6079096 - DNA, 25 bp, Homo sapien
ctcagtggtcagaagggtcaagcgc

SEQ ID NO: 6079097 - DNA, 25 bp, Homo sapien
gtggcaatggaggaaccatggtcca

SEQ ID NO: 6079098 - DNA, 25 bp, Homo sapien
gtcttcagcgaagacaacagcaaag

SEQ ID NO: 6079099 - DNA, 25 bp, Homo sapien
tggtccagggttatcagtccggaaa

SEQ ID NO: 6079100 - DNA, 25 bp, Homo sapien
ataaatatttgaacaggtgtccgtg

SEQ ID NO: 6079101 - DNA, 25 bp, Homo sapien
gcaaaggtcgctccaggcctgagga

SEQ ID NO: 6079102 - DNA, 25 bp, Homo sapien
tcacattgagctataaatatttgaa

SEQ ID NO: 6079103 - DNA, 25 bp, Homo sapien
atagcatgaattgtaaagaacgaca

SEQ ID NO: 6079104 - DNA, 25 bp, Homo sapien
gggatgtcttcagcgaagacaacag

SEQ ID NO: 6079105 - DNA, 25 bp, Homo sapien
agataacaacccgatggatagcatg

SEQ ID NO: 6079106 - DNA, 25 bp, Homo sapien
tctgcaggcggccgcccatgggata

SEQ ID NO: 6079107 - DNA, 25 bp, Homo sapien
tgttgctcagtggtcagaagggtca

SEQ ID NO: 6079108 - DNA, 25 bp, Homo sapien
agcgaagacaacagcaaagccagct

SEQ ID NO: 6079109 - DNA, 25 bp, Homo sapien
acaggtgtccgtgtgttgctcagtg

SEQ ID NO: 6079110 - DNA, 25 bp, Homo sapien
tgattgtagctaccactacaccgat

SEQ ID NO: 6079111 - DNA, 25 bp, Homo sapien
cttctaattctttcacattgagcta

SEQ ID NO: 6079112 - DNA, 25 bp, Homo sapien
cccatagaacctcttctaattcttt

SEQ ID NO: 6079113 - DNA, 25 bp, Homo sapien
ttgtcaccggagacctggtctgcag

SEQ ID NO: 6079114 - DNA, 25 bp, Homo sapien
aagggtcaagcgcatcatagatagg

SEQ ID NO: 6079115 - DNA, 25 bp, Homo sapien
agtatatgagattttaaatgtccaa

SEQ ID NO: 6079116 - DNA, 25 bp, Homo sapien
agggttatcagtccggaaacgaatg

SEQ ID NO: 6079117 - DNA, 25 bp, Homo sapien
ctttcttacgttcatcccccataga

SEQ ID NO: 6079118 - DNA, 25 bp, Homo sapien
gtcgctccaggcctgaggaggggag

SEQ ID NO: 6079119 - DNA, 25 bp, Homo sapien
gttgactgaggcgacgttggggatg

SEQ ID NO: 6079120 - DNA, 25 bp, Homo sapien
ggcggccgcccatgggatatcatcg

SEQ ID NO: 6079121 - DNA, 25 bp, Homo sapien
acgttggggatgtcttcagcgaaga

SEQ ID NO: 6079122 - DNA, 25 bp, Homo sapien
tcaagcgcatcatagatagggcaaa

SEQ ID NO: 6079123 - DNA, 25 bp, Homo sapien
tgagctataaatatttgaacaggtg

SEQ ID NO: 6079124 - DNA, 25 bp, Homo sapien
tcatcccccatagaacctcttctaa

SEQ ID NO: 6079125 - DNA, 25 bp, Homo sapien
aggggagttgactgaggcgacgttg

SEQ ID NO: 6079126 - DNA, 25 bp, Homo sapien
tgagattttaaatgtccaaacaatg

SEQ ID NO: 6079127 - DNA, 25 bp, Homo sapien
gacaacagcaaagccagcttcgaga

SEQ ID NO: 6079128 - DNA, 25 bp, Homo sapien
atggaggaaccatggtccagggtta

SEQ ID NO: 6079129 - DNA, 25 bp, Homo sapien
ccaggcctgaggaggggagttgact

SEQ ID NO: 6079130 - DNA, 25 bp, Homo sapien
gcattccctttcttacgttcatccc

SEQ ID NO: 6079131 - DNA, 25 bp, Homo sapien
tacagcagataacaacccgatggat

SEQ ID NO: 6079132 - DNA, 25 bp, Homo sapien
acaacccgatggatagcatgaattg

SEQ ID NO: 6079133 - DNA, 25 bp, Homo sapien
atttgaacaggtgtccgtgtgttgc

SEQ ID NO: 6079134 - DNA, 25 bp, Homo sapien
gaaccatggtccagggttatcagtc

SEQ ID NO: 6079135 - DNA, 25 bp, Homo sapien
cgtaaatacgaatagtatatgagat

SEQ ID NO: 6079136 - DNA, 25 bp, Homo sapien
ctgaggaggggagttgactgaggcg

SEQ ID NO: 6079137 - DNA, 25 bp, Homo sapien
gaacctcttctaattctttcacatt

SEQ ID NO: 6079138 - DNA, 25 bp, Homo sapien
cgatggatagcatgaattgtaaaga

SEQ ID NO: 6079139 - DNA, 25 bp, Homo sapien
atgtccaaacaatgcattccctttc

SEQ ID NO: 6079140 - DNA, 25 bp, Homo sapien
atcagtccggaaacgaatggttacg

SEQ ID NO: 6079141 - DNA, 25 bp, Homo sapien
agcaaagccagcttcgagatgccag

SEQ ID NO: 6079142 - DNA, 25 bp, Homo sapien
gatttgattgtagctaccactacac

SEQ ID NO: 6079143 - DNA, 25 bp, Homo sapien
ttttaaatgtccaaacaatgcattc

SEQ ID NO: 6079144 - DNA, 25 bp, Homo sapien
ttacgttcatcccccatagaacctc

SEQ ID NO: 6079145 - DNA, 25 bp, Homo sapien
agatagggcaaaggtcgctccaggc

SEQ ID NO: 6079146 - DNA, 25 bp, Homo sapien
tacgaatagtatatgagattttaaa

SEQ ID NO: 6079147 - DNA, 25 bp, Homo sapien
ttcgagatgccagtcgatgtggcaa

SEQ ID NO: 6079148 - DNA, 25 bp, Homo sapien
tgaggcgacgttggggatgtcttca

SEQ ID NO: 6079149 - DNA, 25 bp, Homo sapien
attctttcacattgagctataaata

SEQ ID NO: 6079150 - DNA, 25 bp, Homo sapien
tagctaccactacaccgatacagca

SEQ ID NO: 6079151 - DNA, 25 bp, Homo sapien
gccagcttcgagatgccagtcgatg

SEQ ID NO: 6079152 - DNA, 25 bp, Homo sapien
atgccagtcgatgtggcaatggagg

SEQ ID NO: 6079153 - DNA, 25 bp, Homo sapien
ggtcagaagggtcaagcgcatcata

SEQ ID NO: 6079154 - DNA, 25 bp, Homo sapien
tgaattgtaaagaacgacaaaagtc

SEQ ID NO: 6079155 - DNA, 25 bp, Homo sapien
aaacaatgcattccctttcttacgt

SEQ ID NO: 6079156 - DNA, 25 bp, Homo sapien
aagtccgtaaatacgaatagtatat

SEQ ID NO: 6079157 - DNA, 25 bp, Homo sapien
gcatcatagatagggcaaaggtcgc

SEQ ID NO: 6079158 - DNA, 25 bp, Homo sapien
ttacgttgtcaccggagacctggtc

SEQ ID NO: 6079159 - DNA, 25 bp, Homo sapien
ccggagacctggtctgcaggcggcc

SEQ ID NO: 6079160 - DNA, 25 bp, Homo sapien
caccgatacagcagataacaacccg

SEQ ID NO: 6079161 - DNA, 25 bp, Homo sapien
cgcccatgggatatcatcgatcata

SEQ ID NO: 6079162 - DNA, 25 bp, Homo sapien
tccgtgtgttgctcagtggtcagaa

SEQ ID NO: 6079163 - DNA, 25 bp, Homo sapien
gtcgatgtggcaatggaggaaccat

SEQ ID NO: 6079164 - DNA, 25 bp, Homo sapien
ccactacaccgatacagcagataac

SEQ ID NO: 6079165 - DNA, 25 bp, Homo sapien
gaatggttacgttgtcaccggagac

SEQ ID NO: 6079166 - DNA, 25 bp, Homo sapien
aggcaggcctcagacattcacccta

SEQ ID NO: 6079167 - DNA, 25 bp, Homo sapien
tgcccaattgacttcctccttgagt

SEQ ID NO: 6079168 - DNA, 25 bp, Homo sapien
gaggaattgcatagcgtagaccgga

SEQ ID NO: 6079169 - DNA, 25 bp, Homo sapien
cgtagaccggatgaagaatcggaaa

SEQ ID NO: 6079170 - DNA, 25 bp, Homo sapien
gagtgcttgttcgatattcagtgct

SEQ ID NO: 6079171 - DNA, 25 bp, Homo sapien
gaagttaaaccaattgatcattatg

SEQ ID NO: 6079172 - DNA, 25 bp, Homo sapien
tagcagatgcccaattgacttcctc

SEQ ID NO: 6079173 - DNA, 25 bp, Homo sapien
caaggccaatttcgctcaaaatgga

SEQ ID NO: 6079174 - DNA, 25 bp, Homo sapien
ccaaaatataacctggtgaaagata

SEQ ID NO: 6079175 - DNA, 25 bp, Homo sapien
gagttcattctattagcagatgccc

SEQ ID NO: 6079176 - DNA, 25 bp, Homo sapien
ggaaatgagcagaaataagatctat

SEQ ID NO: 6079177 - DNA, 25 bp, Homo sapien
tttatcagcgaaaaatacacaaaac

SEQ ID NO: 6079178 - DNA, 25 bp, Homo sapien
tactgccggaaggtctggtagcagc

SEQ ID NO: 6079179 - DNA, 25 bp, Homo sapien
caggatggacgtgttgacagccagc

SEQ ID NO: 6079180 - DNA, 25 bp, Homo sapien
atggagcaggcggacagtgggttcc

SEQ ID NO: 6079181 - DNA, 25 bp, Homo sapien
acagtactgccggaaggtctggtag

SEQ ID NO: 6079182 - DNA, 25 bp, Homo sapien
gctcaggatggacgtgttgacagcc

SEQ ID NO: 6079183 - DNA, 25 bp, Homo sapien
ccctgaagaagcagcgagcgaggct

SEQ ID NO: 6079184 - DNA, 25 bp, Homo sapien
ccaggccgtagtcggtgaagagcac

SEQ ID NO: 6079185 - DNA, 25 bp, Homo sapien
caaagttggctgcagcgacaatgcc

SEQ ID NO: 6079186 - DNA, 25 bp, Homo sapien
tttaatggcaaagttggctgcagcg

SEQ ID NO: 6079187 - DNA, 25 bp, Homo sapien
tggctgcagcgacaatgccactcgg

SEQ ID NO: 6079188 - DNA, 25 bp, Homo sapien
gagttttaatggcaaagttggctgc

SEQ ID NO: 6079189 - DNA, 25 bp, Homo sapien
tgggttccgcacgtggcaggtgcac

SEQ ID NO: 6079190 - DNA, 25 bp, Homo sapien
ggcctatttacagttcacaggtttg

SEQ ID NO: 6079191 - DNA, 25 bp, Homo sapien
cctgcaatgggcagcctcacctgga

SEQ ID NO: 6079192 - DNA, 25 bp, Homo sapien
tcacgcattacagtagtagctccat

SEQ ID NO: 6079193 - DNA, 25 bp, Homo sapien
ctctcagacagcagcgcatccgtat

SEQ ID NO: 6079194 - DNA, 25 bp, Homo sapien
cccgggcatcagtgcatgcgatgac

SEQ ID NO: 6079195 - DNA, 25 bp, Homo sapien
cagacagcagcgcatccgtatggtt

SEQ ID NO: 6079196 - DNA, 25 bp, Homo sapien
gcgcatccgtatggttttgcccctc

SEQ ID NO: 6079197 - DNA, 25 bp, Homo sapien
caggctcagctagacattcaagtaa

SEQ ID NO: 6079198 - DNA, 25 bp, Homo sapien
cacaggtttgttagttcacgcatta

SEQ ID NO: 6079199 - DNA, 25 bp, Homo sapien
gacattcaagtaacaaaagcgctac

SEQ ID NO: 6079200 - DNA, 25 bp, Homo sapien
atgcgatgacgaagcccgcagaggc

SEQ ID NO: 6079201 - DNA, 25 bp, Homo sapien
atcagtgcatgcgatgacgaagccc

SEQ ID NO: 6079202 - DNA, 25 bp, Homo sapien
tataggatgatgagcaacaccgagg

SEQ ID NO: 6079203 - DNA, 25 bp, Homo sapien
gggccgtggtgaagcgcttcccata

SEQ ID NO: 6079204 - DNA, 25 bp, Homo sapien
tcctttctcgagcagcagaaatcct

SEQ ID NO: 6079205 - DNA, 25 bp, Homo sapien
ggagtttaaatagcctagccaggtg

SEQ ID NO: 6079206 - DNA, 25 bp, Homo sapien
ggcagcccggtagatccggccatat

SEQ ID NO: 6079207 - DNA, 25 bp, Homo sapien
aatgatgcccaggattttagtggct

SEQ ID NO: 6079208 - DNA, 25 bp, Homo sapien
gcaagcttgattttcacgtggttga

SEQ ID NO: 6079209 - DNA, 25 bp, Homo sapien
cagaaatcctcttgcgttccagggc

SEQ ID NO: 6079210 - DNA, 25 bp, Homo sapien
tctgaaaagcttgccgaaactcttc

SEQ ID NO: 6079211 - DNA, 25 bp, Homo sapien
tgttcaccagacagtccgacatctc

SEQ ID NO: 6079212 - DNA, 25 bp, Homo sapien
tcccatagagtgagggtggattcag

SEQ ID NO: 6079213 - DNA, 25 bp, Homo sapien
caccgagggaatgtagaaggcccca

SEQ ID NO: 6079214 - DNA, 25 bp, Homo sapien
gttaacaggatagaagtcaacacac

SEQ ID NO: 6079215 - DNA, 25 bp, Homo sapien
tccccagtgacctggtttcatctgc

SEQ ID NO: 6079216 - DNA, 25 bp, Homo sapien
tgctctcttagcaatatgctccctt

SEQ ID NO: 6079217 - DNA, 25 bp, Homo sapien
cacagggaaccttttgctcaccggg

SEQ ID NO: 6079218 - DNA, 25 bp, Homo sapien
ttcatcccagtactgcctatttggg

SEQ ID NO: 6079219 - DNA, 25 bp, Homo sapien
tacacaagataacagctcagaggaa

SEQ ID NO: 6079220 - DNA, 25 bp, Homo sapien
cacatatccatacacaagataacag

SEQ ID NO: 6079221 - DNA, 25 bp, Homo sapien
ggccccacagggaaccttttgctca

SEQ ID NO: 6079222 - DNA, 25 bp, Homo sapien
tttcattaacagatcttcatcccag

SEQ ID NO: 6079223 - DNA, 25 bp, Homo sapien
ttttatcatatgtgagcatcaacaa

SEQ ID NO: 6079224 - DNA, 25 bp, Homo sapien
tgaggtattccagcactttcattaa

SEQ ID NO: 6079225 - DNA, 25 bp, Homo sapien
gccacagccattagatatactatta

SEQ ID NO: 6079226 - DNA, 25 bp, Homo sapien
ttcaaggcttctttacaaggtgtcc

SEQ ID NO: 6079227 - DNA, 25 bp, Homo sapien
gttctttttgaacgccaaggctaga

SEQ ID NO: 6079228 - DNA, 25 bp, Homo sapien
cttggctttccagaggttcagtctc

SEQ ID NO: 6079229 - DNA, 25 bp, Homo sapien
taacgccaatggcaagctgcttcct

SEQ ID NO: 6079230 - DNA, 25 bp, Homo sapien
taatgttacagaagcctgccgaccg

SEQ ID NO: 6079231 - DNA, 25 bp, Homo sapien
catggcaggcttgactgatttacac

SEQ ID NO: 6079232 - DNA, 25 bp, Homo sapien
tccagggctctggtaacttcgttaa

SEQ ID NO: 6079233 - DNA, 25 bp, Homo sapien
gaacacattttaagccaatgacggg

SEQ ID NO: 6079234 - DNA, 25 bp, Homo sapien
gatgatggctcttacttcgtccaca

SEQ ID NO: 6079235 - DNA, 25 bp, Homo sapien
caggcagggacacttctgcttaggc

SEQ ID NO: 6079236 - DNA, 25 bp, Homo sapien
tgatttacacaccagaactaacagc

SEQ ID NO: 6079237 - DNA, 25 bp, Homo sapien
tcgtccacaaagtcagtggtgttct

SEQ ID NO: 6079238 - DNA, 25 bp, Homo sapien
attgaagtcactcctttattgggaa

SEQ ID NO: 6079239 - DNA, 25 bp, Homo sapien
tgattgaagtcactcctttattggg

SEQ ID NO: 6079240 - DNA, 25 bp, Homo sapien
aatgtgaaccaagtgattgctggga

SEQ ID NO: 6079241 - DNA, 25 bp, Homo sapien
atgattgaagtcactcctttattgg

SEQ ID NO: 6079242 - DNA, 25 bp, Homo sapien
gattgaagtcactcctttattggga

SEQ ID NO: 6079243 - DNA, 25 bp, Homo sapien
aagtcactcctttattgggaaatga

SEQ ID NO: 6079244 - DNA, 25 bp, Homo sapien
cccattgctgacatttcccacactc

SEQ ID NO: 6079245 - DNA, 25 bp, Homo sapien
gatgttggttaaataataaattaga

SEQ ID NO: 6079246 - DNA, 25 bp, Homo sapien
accatctcctttcaccctgctgctg

SEQ ID NO: 6079247 - DNA, 25 bp, Homo sapien
tactgacattcactttccagaaaat

SEQ ID NO: 6079248 - DNA, 25 bp, Homo sapien
ttctttcccattgctgacatttccc

SEQ ID NO: 6079249 - DNA, 25 bp, Homo sapien
caaaattttcctgaagcttggaaat

SEQ ID NO: 6079250 - DNA, 25 bp, Homo sapien
cagtttttggtccttgtctccagat

SEQ ID NO: 6079251 - DNA, 25 bp, Homo sapien
tctttctatacaagcacacccaatt

SEQ ID NO: 6079252 - DNA, 25 bp, Homo sapien
taggtaccataacaactttctgaaa

SEQ ID NO: 6079253 - DNA, 25 bp, Homo sapien
tcaccctgctgctgagggcaagtca

SEQ ID NO: 6079254 - DNA, 25 bp, Homo sapien
tcttggatgttctgtatctaataat

SEQ ID NO: 6079255 - DNA, 25 bp, Homo sapien
atgtgcaccatctcctttcaccctg

SEQ ID NO: 6079256 - DNA, 25 bp, Homo sapien
atttaacattttctttcccattgct

SEQ ID NO: 6079257 - DNA, 25 bp, Homo sapien
cagcatgtcctgatatatctattca

SEQ ID NO: 6079258 - DNA, 25 bp, Homo sapien
attaccaagtgtttgctaaataaca

SEQ ID NO: 6079259 - DNA, 25 bp, Homo sapien
ttcctgaagcttggaaatctggaat

SEQ ID NO: 6079260 - DNA, 25 bp, Homo sapien
acctatgatgttggttaaataataa

SEQ ID NO: 6079261 - DNA, 25 bp, Homo sapien
cttgtctccagatgtgcaccatctc

SEQ ID NO: 6079262 - DNA, 25 bp, Homo sapien
tccagatgtgcaccatctcctttca

SEQ ID NO: 6079263 - DNA, 25 bp, Homo sapien
atatatctattcagcattctgcatg

SEQ ID NO: 6079264 - DNA, 25 bp, Homo sapien
agtgatcaaaggagcaggtgaccca

SEQ ID NO: 6079265 - DNA, 25 bp, Homo sapien
atttcccacactcttggatgttctg

SEQ ID NO: 6079266 - DNA, 25 bp, Homo sapien
tttatggataagaagaaagatgcat

SEQ ID NO: 6079267 - DNA, 25 bp, Homo sapien
tttatttgtaatacagttcagcatg

SEQ ID NO: 6079268 - DNA, 25 bp, Homo sapien
ttggtccttgtctccagatgtgcac

SEQ ID NO: 6079269 - DNA, 25 bp, Homo sapien
ctggaatgaaaaatcatcaacaaga

SEQ ID NO: 6079270 - DNA, 25 bp, Homo sapien
ataataaattagaaatattcttcca

SEQ ID NO: 6079271 - DNA, 25 bp, Homo sapien
agcattctgcatgtatgtaattgaa

SEQ ID NO: 6079272 - DNA, 25 bp, Homo sapien
ctattcagcattctgcatgtatgta

SEQ ID NO: 6079273 - DNA, 25 bp, Homo sapien
cccaattataccatcttaaatcaaa

SEQ ID NO: 6079274 - DNA, 25 bp, Homo sapien
caatttattttagacaattaccaag

SEQ ID NO: 6079275 - DNA, 25 bp, Homo sapien
aaaaaaattgaacttgacctatgat

SEQ ID NO: 6079276 - DNA, 25 bp, Homo sapien
tgaaaaatcatcaacaagaaagcaa

SEQ ID NO: 6079277 - DNA, 25 bp, Homo sapien
atcatcaacaagaaagcaaattaat

SEQ ID NO: 6079278 - DNA, 25 bp, Homo sapien
attttagacaattaccaagtgtttg

SEQ ID NO: 6079279 - DNA, 25 bp, Homo sapien
ccacactcttggatgttctgtatct

SEQ ID NO: 6079280 - DNA, 25 bp, Homo sapien
ctaaaattcctctactgacattcac

SEQ ID NO: 6079281 - DNA, 25 bp, Homo sapien
taattctagttgcaaggtttgatga

SEQ ID NO: 6079282 - DNA, 25 bp, Homo sapien
atgttgctaaaattcctctactgac

SEQ ID NO: 6079283 - DNA, 25 bp, Homo sapien
taattgaagtggtacatctccttag

SEQ ID NO: 6079284 - DNA, 25 bp, Homo sapien
tcattttatttgtaatacagttcag

SEQ ID NO: 6079285 - DNA, 25 bp, Homo sapien
taataatgtctgtctttctatacaa

SEQ ID NO: 6079286 - DNA, 25 bp, Homo sapien
tagttgcaaggtttgatgagtgatc

SEQ ID NO: 6079287 - DNA, 25 bp, Homo sapien
tataccatcttaaatcaaaggccca

SEQ ID NO: 6079288 - DNA, 25 bp, Homo sapien
caagtgtttgctaaataacaaaatt

SEQ ID NO: 6079289 - DNA, 25 bp, Homo sapien
tgtaatacagttcagcatgtcctga

SEQ ID NO: 6079290 - DNA, 25 bp, Homo sapien
caaaggagcaggtgacccagttttt

SEQ ID NO: 6079291 - DNA, 25 bp, Homo sapien
tgtatctaataatgtctgtctttct

SEQ ID NO: 6079292 - DNA, 25 bp, Homo sapien
atcttaaatcaaaggcccaatttat

SEQ ID NO: 6079293 - DNA, 25 bp, Homo sapien
aaattgaacttgacctatgatgttg

SEQ ID NO: 6079294 - DNA, 25 bp, Homo sapien
ctgcatgtatgtaattgaagtggta

SEQ ID NO: 6079295 - DNA, 25 bp, Homo sapien
aacttgacctatgatgttggttaaa

SEQ ID NO: 6079296 - DNA, 25 bp, Homo sapien
agcacacccaattataccatcttaa

SEQ ID NO: 6079297 - DNA, 25 bp, Homo sapien
ttgatgagtgatcaaaggagcaggt

SEQ ID NO: 6079298 - DNA, 25 bp, Homo sapien
caaggtttgatgagtgatcaaagga

SEQ ID NO: 6079299 - DNA, 25 bp, Homo sapien
agcaggtgacccagtttttggtcct

SEQ ID NO: 6079300 - DNA, 25 bp, Homo sapien
aagaaagatgcataggtaccataac

SEQ ID NO: 6079301 - DNA, 25 bp, Homo sapien
tgctgctgagggcaagtcatgacta

SEQ ID NO: 6079302 - DNA, 25 bp, Homo sapien
taaattagaaatattcttccaaata

SEQ ID NO: 6079303 - DNA, 25 bp, Homo sapien
gctcagatggccatgttgctaaaat

SEQ ID NO: 6079304 - DNA, 25 bp, Homo sapien
tattcttccaaataattctagttgc

SEQ ID NO: 6079305 - DNA, 25 bp, Homo sapien
aataacaaaattttcctgaagcttg

SEQ ID NO: 6079306 - DNA, 25 bp, Homo sapien
gcaagtcatgactagttctcttcac

SEQ ID NO: 6079307 - DNA, 25 bp, Homo sapien
gtatgtaattgaagtggtacatctc

SEQ ID NO: 6079308 - DNA, 25 bp, Homo sapien
tccaaataattctagttgcaaggtt

SEQ ID NO: 6079309 - DNA, 25 bp, Homo sapien
aacaagaaagcaaattaatttatgg

SEQ ID NO: 6079310 - DNA, 25 bp, Homo sapien
gctgacatttcccacactcttggat

SEQ ID NO: 6079311 - DNA, 25 bp, Homo sapien
tgacccagtttttggtccttgtctc

SEQ ID NO: 6079312 - DNA, 25 bp, Homo sapien
aagcttggaaatctggaatgaaaaa

SEQ ID NO: 6079313 - DNA, 25 bp, Homo sapien
aagtggtacatctccttagtcagtg

SEQ ID NO: 6079314 - DNA, 25 bp, Homo sapien
ggaaatctggaatgaaaaatcatca

SEQ ID NO: 6079315 - DNA, 25 bp, Homo sapien
aattaatttatggataagaagaaag

SEQ ID NO: 6079316 - DNA, 25 bp, Homo sapien
ttcctctactgacattcactttcca

SEQ ID NO: 6079317 - DNA, 25 bp, Homo sapien
tatacaagcacacccaattatacca

SEQ ID NO: 6079318 - DNA, 25 bp, Homo sapien
tcaaaggcccaatttattttagaca

SEQ ID NO: 6079319 - DNA, 25 bp, Homo sapien
tcagtggctcagatggccatgttgc

SEQ ID NO: 6079320 - DNA, 25 bp, Homo sapien
tgtctgtctttctatacaagcacac

SEQ ID NO: 6079321 - DNA, 25 bp, Homo sapien
atggccatgttgctaaaattcctct

SEQ ID NO: 6079322 - DNA, 25 bp, Homo sapien
acagttcagcatgtcctgatatatc

SEQ ID NO: 6079323 - DNA, 25 bp, Homo sapien
tccttagtcagtggctcagatggcc

SEQ ID NO: 6079324 - DNA, 25 bp, Homo sapien
ctgagggcaagtcatgactagttct

SEQ ID NO: 6079325 - DNA, 25 bp, Homo sapien
gataagaagaaagatgcataggtac

SEQ ID NO: 6079326 - DNA, 25 bp, Homo sapien
gtcctgatatatctattcagcattc

SEQ ID NO: 6079327 - DNA, 25 bp, Homo sapien
aaagcaaattaatttatggataaga

SEQ ID NO: 6079328 - DNA, 25 bp, Homo sapien
ttgctaaataacaaaattttcctga

SEQ ID NO: 6079329 - DNA, 25 bp, Homo sapien
aacattttctttcccattgctgaca

SEQ ID NO: 6079330 - DNA, 25 bp, Homo sapien
tacatctccttagtcagtggctcag

SEQ ID NO: 6079331 - DNA, 25 bp, Homo sapien
tagaaatattcttccaaataattct

SEQ ID NO: 6079332 - DNA, 25 bp, Homo sapien
tcctttcaccctgctgctgagggca

SEQ ID NO: 6079333 - DNA, 25 bp, Homo sapien
tagacaattaccaagtgtttgctaa

SEQ ID NO: 6079334 - DNA, 25 bp, Homo sapien
atgttctgtatctaataatgtctgt

SEQ ID NO: 6079335 - DNA, 25 bp, Homo sapien
gatgcataggtaccataacaacttt

SEQ ID NO: 6079336 - DNA, 25 bp, Homo sapien
attcactttccagaaaatttaacat

SEQ ID NO: 6079337 - DNA, 25 bp, Homo sapien
gcgagccgttcatgtaggtctgcga

SEQ ID NO: 6079338 - DNA, 25 bp, Homo sapien
tgagcgtaccgggttttctccatgc

SEQ ID NO: 6079339 - DNA, 25 bp, Homo sapien
gttcatgtgcgcgtaactgtccatg

SEQ ID NO: 6079340 - DNA, 25 bp, Homo sapien
cgtaccgggttttctccatgctgtt

SEQ ID NO: 6079341 - DNA, 25 bp, Homo sapien
ttcatgtaggtctgcgagctggtca

SEQ ID NO: 6079342 - DNA, 25 bp, Homo sapien
gctccagccgttcatgtgcgcgtaa

SEQ ID NO: 6079343 - DNA, 25 bp, Homo sapien
cctgctgcgagtaggacatgctgta

SEQ ID NO: 6079344 - DNA, 25 bp, Homo sapien
gcgccggggagatacatgctgatca

SEQ ID NO: 6079345 - DNA, 25 bp, Homo sapien
tcggacttgaccaccgaacccatgg

SEQ ID NO: 6079346 - DNA, 25 bp, Homo sapien
ttgaccaccgaacccatggagccaa

SEQ ID NO: 6079347 - DNA, 25 bp, Homo sapien
tggagctggcctcggacttgaccac

SEQ ID NO: 6079348 - DNA, 25 bp, Homo sapien
ccgtgcgcattgaggcccgggtgct

SEQ ID NO: 6079349 - DNA, 25 bp, Homo sapien
tagactcggacactgcagaggtacc

SEQ ID NO: 6079350 - DNA, 25 bp, Homo sapien
tcgaggccactgtctacgcaacttc

SEQ ID NO: 6079351 - DNA, 25 bp, Homo sapien
taaactgtcaaactggcagaaccag

SEQ ID NO: 6079352 - DNA, 25 bp, Homo sapien
actggaaatagtggtagactcggac

SEQ ID NO: 6079353 - DNA, 25 bp, Homo sapien
taatgtctgtaggtgtacctcaccc

SEQ ID NO: 6079354 - DNA, 25 bp, Homo sapien
tctagtcctgttgacctggaaatgg

SEQ ID NO: 6079355 - DNA, 25 bp, Homo sapien
gaaaaccatcaacgctctagtcctg

SEQ ID NO: 6079356 - DNA, 25 bp, Homo sapien
catgggcactttcttccaacagggt

SEQ ID NO: 6079357 - DNA, 25 bp, Homo sapien
gaacgcctcagctattggtgcagaa

SEQ ID NO: 6079358 - DNA, 25 bp, Homo sapien
cgtgagggtagcgtccctggacaac

SEQ ID NO: 6079359 - DNA, 25 bp, Homo sapien
cactcggaaccagacacgtgagggt

SEQ ID NO: 6079360 - DNA, 25 bp, Homo sapien
gaaggtcttatagccaatgtcagct

SEQ ID NO: 6079361 - DNA, 25 bp, Homo sapien
ggattcatctcaagccagaaaccca

SEQ ID NO: 6079362 - DNA, 25 bp, Homo sapien
cccactggcccatgtactttaagca

SEQ ID NO: 6079363 - DNA, 25 bp, Homo sapien
tctagtgcacgaaaacaggtcatgt

SEQ ID NO: 6079364 - DNA, 25 bp, Homo sapien
catcacttgtacaggtcacttccag

SEQ ID NO: 6079365 - DNA, 25 bp, Homo sapien
cacttggctacaaataccacttgag

SEQ ID NO: 6079366 - DNA, 25 bp, Homo sapien
atgaaataacatgcgagggaacagc

SEQ ID NO: 6079367 - DNA, 25 bp, Homo sapien
tctagagctgaatccccagcagcag

SEQ ID NO: 6079368 - DNA, 25 bp, Homo sapien
tcttagaagggtccctcccagagcc

SEQ ID NO: 6079369 - DNA, 25 bp, Homo sapien
tactttaagcatacggctgttccac

SEQ ID NO: 6079370 - DNA, 25 bp, Homo sapien
tttcaaacgaggatactgtgacctc

SEQ ID NO: 6079371 - DNA, 25 bp, Homo sapien
aaagaaaatagctcccacttggcta

SEQ ID NO: 6079372 - DNA, 25 bp, Homo sapien
gatgattacccctgtgagagctgag

SEQ ID NO: 6079373 - DNA, 25 bp, Homo sapien
cccaccataggaaagcatgatgaga

SEQ ID NO: 6079374 - DNA, 25 bp, Homo sapien
tccacatcactaggaacctaaaggg

SEQ ID NO: 6079375 - DNA, 25 bp, Homo sapien
tccttggtggttatatgtgttgtcc

SEQ ID NO: 6079376 - DNA, 25 bp, Homo sapien
ggttggtatcagctggcccctcata

SEQ ID NO: 6079377 - DNA, 25 bp, Homo sapien
tatgtgttgtcctgacaacctcctg

SEQ ID NO: 6079378 - DNA, 25 bp, Homo sapien
ctaaaataaggaaggcacattccca

SEQ ID NO: 6079379 - DNA, 25 bp, Homo sapien
gatagatagatacaggccagttggt

SEQ ID NO: 6079380 - DNA, 25 bp, Homo sapien
gaaagtccgtttctgaaatgagaga

SEQ ID NO: 6079381 - DNA, 25 bp, Homo sapien
ctgagagggaaatgctaaggctcaa

SEQ ID NO: 6079382 - DNA, 25 bp, Homo sapien
aggatagatcctcacccaccagtgg

SEQ ID NO: 6079383 - DNA, 25 bp, Homo sapien
caaaggccaacacatccttggtggt

SEQ ID NO: 6079384 - DNA, 25 bp, Homo sapien
aatgctaaggctcaatgaaagacag

SEQ ID NO: 6079385 - DNA, 25 bp, Homo sapien
ccatctatgagtctgaacatgcggt

SEQ ID NO: 6079386 - DNA, 25 bp, Homo sapien
gtgatgttccccttcgtatgttcat

SEQ ID NO: 6079387 - DNA, 25 bp, Homo sapien
ttccccttcgtatgttcatgtgttc

SEQ ID NO: 6079388 - DNA, 25 bp, Homo sapien
gatgttccccttcgtatgttcatgt

SEQ ID NO: 6079389 - DNA, 25 bp, Homo sapien
tgttccccttcgtatgttcatgtgt

SEQ ID NO: 6079390 - DNA, 25 bp, Homo sapien
catgatttatagtccctacaaagga

SEQ ID NO: 6079391 - DNA, 25 bp, Homo sapien
tccccttcgtatgttcatgtgttct

SEQ ID NO: 6079392 - DNA, 25 bp, Homo sapien
ccccttcgtatgttcatgtgttctc

SEQ ID NO: 6079393 - DNA, 25 bp, Homo sapien
ttcccatctatgagtctgaacatgc

SEQ ID NO: 6079394 - DNA, 25 bp, Homo sapien
tcccatctatgagtctgaacatgcg

SEQ ID NO: 6079395 - DNA, 25 bp, Homo sapien
tcaattcccatctatgagtctgaac

SEQ ID NO: 6079396 - DNA, 25 bp, Homo sapien
tgatgttccccttcgtatgttcatg

SEQ ID NO: 6079397 - DNA, 25 bp, Homo sapien
cataccagccactgaggtcctaact

SEQ ID NO: 6079398 - DNA, 25 bp, Homo sapien
ttctgtggtggaacggtggatgtct

SEQ ID NO: 6079399 - DNA, 25 bp, Homo sapien
agcaaacgcacatggcaacgttggt

SEQ ID NO: 6079400 - DNA, 25 bp, Homo sapien
gacatcagctgagtaagtaacaacg

SEQ ID NO: 6079401 - DNA, 25 bp, Homo sapien
taagtaacaacgactgaggatgccg

SEQ ID NO: 6079402 - DNA, 25 bp, Homo sapien
ggaagcggcccacctgaaaggcatt

SEQ ID NO: 6079403 - DNA, 25 bp, Homo sapien
gggccgttctgcacatgtcgctcac

SEQ ID NO: 6079404 - DNA, 25 bp, Homo sapien
tgaaaggcatttagattgagaagaa

SEQ ID NO: 6079405 - DNA, 25 bp, Homo sapien
cactgaggtcctaactgcagccaag

SEQ ID NO: 6079406 - DNA, 25 bp, Homo sapien
ttggtccgctcagccactggttctg

SEQ ID NO: 6079407 - DNA, 25 bp, Homo sapien
ggtcacggtgaagggagggctgctg

SEQ ID NO: 6079408 - DNA, 25 bp, Homo sapien
gcacatggcaacgttggtccgctca

SEQ ID NO: 6079409 - DNA, 25 bp, Homo sapien
caaccactcgccaaaaatcttggca

SEQ ID NO: 6079410 - DNA, 25 bp, Homo sapien
aaccactcgccaaaaatcttggcag

SEQ ID NO: 6079411 - DNA, 25 bp, Homo sapien
caccatcgccactggcagagggtct

SEQ ID NO: 6079412 - DNA, 25 bp, Homo sapien
tcagagcaggcgaaattttggacac

SEQ ID NO: 6079413 - DNA, 25 bp, Homo sapien
tgtttttacagtcctctgcagcagg

SEQ ID NO: 6079414 - DNA, 25 bp, Homo sapien
caagagactcaacaagtaacagagg

SEQ ID NO: 6079415 - DNA, 25 bp, Homo sapien
caagatgagcgctgccaggttcaca

SEQ ID NO: 6079416 - DNA, 25 bp, Homo sapien
cagggtttgctaaagtggatcaaca

SEQ ID NO: 6079417 - DNA, 25 bp, Homo sapien
cagaggcactgctaaacaagccaag

SEQ ID NO: 6079418 - DNA, 25 bp, Homo sapien
tcacaatggcttacccatggaagaa

SEQ ID NO: 6079419 - DNA, 25 bp, Homo sapien
tggacacatgcggaacatcttatgg

SEQ ID NO: 6079420 - DNA, 25 bp, Homo sapien
tggctaaaatgcaggcaacaatacc

SEQ ID NO: 6079421 - DNA, 25 bp, Homo sapien
catcttatggtgtaaacagaggcac

SEQ ID NO: 6079422 - DNA, 25 bp, Homo sapien
caacattactgtggattgctgcagt

SEQ ID NO: 6079423 - DNA, 25 bp, Homo sapien
caaaggtttaagatcatccgaaggc

SEQ ID NO: 6079424 - DNA, 25 bp, Homo sapien
tgagactggcttttggatcaggttg

SEQ ID NO: 6079425 - DNA, 25 bp, Homo sapien
atccgaaggcccctgagttgccaaa

SEQ ID NO: 6079426 - DNA, 25 bp, Homo sapien
cagagacccctcacgaagctgcaag

SEQ ID NO: 6079427 - DNA, 25 bp, Homo sapien
ctgagggcacccgagagatactaac

SEQ ID NO: 6079428 - DNA, 25 bp, Homo sapien
agtgaaatgtgcacagtctgccctc

SEQ ID NO: 6079429 - DNA, 25 bp, Homo sapien
ccaaatgacactgatgtgttgtggc

SEQ ID NO: 6079430 - DNA, 25 bp, Homo sapien
gcaggaaaaggacctatagatctcc

SEQ ID NO: 6079431 - DNA, 25 bp, Homo sapien
gaactttattcattggaaactgggc

SEQ ID NO: 6079432 - DNA, 25 bp, Homo sapien
gcacgtggccccaaagtcaggtgca

SEQ ID NO: 6079433 - DNA, 25 bp, Homo sapien
gagggagcctcatcagacgatcaca

SEQ ID NO: 6079434 - DNA, 25 bp, Homo sapien
agaaatccggttatccctcctgaga

SEQ ID NO: 6079435 - DNA, 25 bp, Homo sapien
tgctgcatcgaactttaaacttcac

SEQ ID NO: 6079436 - DNA, 25 bp, Homo sapien
ctgctgcatcgaactttaaacttca

SEQ ID NO: 6079437 - DNA, 25 bp, Homo sapien
tagtcgttttcaaatacattgtcgc

SEQ ID NO: 6079438 - DNA, 25 bp, Homo sapien
tatgtagtccaaggtcatgtagcca

SEQ ID NO: 6079439 - DNA, 25 bp, Homo sapien
ccttcctccgataatgttctagtcg

SEQ ID NO: 6079440 - DNA, 25 bp, Homo sapien
aagtcaggccgcgttagaaccatgt

SEQ ID NO: 6079441 - DNA, 25 bp, Homo sapien
aggtcatgtagccagcaagaagtca

SEQ ID NO: 6079442 - DNA, 25 bp, Homo sapien
agaaccatgtccgaagggctccaaa

SEQ ID NO: 6079443 - DNA, 25 bp, Homo sapien
tcctcacaatccagtgaggcagtgg

SEQ ID NO: 6079444 - DNA, 25 bp, Homo sapien
tttaagaggcgtgattatgtagtcc

SEQ ID NO: 6079445 - DNA, 25 bp, Homo sapien
tagctgtcatcacctcccatttaag

SEQ ID NO: 6079446 - DNA, 25 bp, Homo sapien
tacattgtcgcatatgatcctcaca

SEQ ID NO: 6079447 - DNA, 25 bp, Homo sapien
tctacagcgactacttcagagtcca

SEQ ID NO: 6079448 - DNA, 25 bp, Homo sapien
tgttctacatccatagtctacagcg

SEQ ID NO: 6079449 - DNA, 25 bp, Homo sapien
ctgggctgatggataaacacactaa

SEQ ID NO: 6079450 - DNA, 25 bp, Homo sapien
gctctgacaaaaccactattagcag

SEQ ID NO: 6079451 - DNA, 25 bp, Homo sapien
aatttaacaccctggttgtttgcag

SEQ ID NO: 6079452 - DNA, 25 bp, Homo sapien
cactgtcagttgtgtagtcttttgg

SEQ ID NO: 6079453 - DNA, 25 bp, Homo sapien
ggtctggtaccacattaattcgctt

SEQ ID NO: 6079454 - DNA, 25 bp, Homo sapien
taattcgcttaattaacacagtggc

SEQ ID NO: 6079455 - DNA, 25 bp, Homo sapien
gacagcagattcacaagcaaacaac

SEQ ID NO: 6079456 - DNA, 25 bp, Homo sapien
tccccaggtcctcctaaggtatcta

SEQ ID NO: 6079457 - DNA, 25 bp, Homo sapien
ccaccagtttagatgggaagaccca

SEQ ID NO: 6079458 - DNA, 25 bp, Homo sapien
cactagtctcaaggcacgctcagaa

SEQ ID NO: 6079459 - DNA, 25 bp, Homo sapien
aatttttgaactggccactagtctc

SEQ ID NO: 6079460 - DNA, 25 bp, Homo sapien
tcaaggcacgctcagaaggctggtc

SEQ ID NO: 6079461 - DNA, 25 bp, Homo sapien
tgcagaccgggctctactgtgggca

SEQ ID NO: 6079462 - DNA, 25 bp, Homo sapien
ggcagtgtctctgacgatgactatc

SEQ ID NO: 6079463 - DNA, 25 bp, Homo sapien
ttgatccccacccaaatgaaccaaa

SEQ ID NO: 6079464 - DNA, 25 bp, Homo sapien
tcttcttctagcttgcccaatgtcc

SEQ ID NO: 6079465 - DNA, 25 bp, Homo sapien
gaaccacagcagacagtatcttgta

SEQ ID NO: 6079466 - DNA, 25 bp, Homo sapien
agaacttagttttggtggtggacag

SEQ ID NO: 6079467 - DNA, 25 bp, Homo sapien
tttgtgacacaaacatgacgctggg

SEQ ID NO: 6079468 - DNA, 25 bp, Homo sapien
tagagcatgcctgtgccgtctctgc

SEQ ID NO: 6079469 - DNA, 25 bp, Homo sapien
gtacactagaaatcaacataaccgg

SEQ ID NO: 6079470 - DNA, 25 bp, Homo sapien
ccaatgtccttagtgctgactggag

SEQ ID NO: 6079471 - DNA, 25 bp, Homo sapien
tgacgatgactatcaccatgtgttc

SEQ ID NO: 6079472 - DNA, 25 bp, Homo sapien
actggcaagctgatcacccctgcgg

SEQ ID NO: 6079473 - DNA, 25 bp, Homo sapien
ggggcatcccttagcaggcggccca

SEQ ID NO: 6079474 - DNA, 25 bp, Homo sapien
gcatcccttagcaggcggcccagtt

SEQ ID NO: 6079475 - DNA, 25 bp, Homo sapien
gagttagagaggagctctctgggac

SEQ ID NO: 6079476 - DNA, 25 bp, Homo sapien
tactgcctatgcctgaaggggcatc

SEQ ID NO: 6079477 - DNA, 25 bp, Homo sapien
tgcctatgcctgaaggggcatccct

SEQ ID NO: 6079478 - DNA, 25 bp, Homo sapien
ctcaagctcagatgctgacaggaaa

SEQ ID NO: 6079479 - DNA, 25 bp, Homo sapien
gctgacaggaaaatactgcctatgc

SEQ ID NO: 6079480 - DNA, 25 bp, Homo sapien
ggcatcccttagcaggcggcccagt

SEQ ID NO: 6079481 - DNA, 25 bp, Homo sapien
tcaagctcagatgctgacaggaaaa

SEQ ID NO: 6079482 - DNA, 25 bp, Homo sapien
cctcaagctcagatgctgacaggaa

SEQ ID NO: 6079483 - DNA, 25 bp, Homo sapien
aaggggcatcccttagcaggcggcc

SEQ ID NO: 6079484 - DNA, 25 bp, Homo sapien
gggcatcccttagcaggcggcccag

SEQ ID NO: 6079485 - DNA, 25 bp, Homo sapien
tgttgcggatccgagtcagtggctc

SEQ ID NO: 6079486 - DNA, 25 bp, Homo sapien
catgcgaagagccatatcacggagg

SEQ ID NO: 6079487 - DNA, 25 bp, Homo sapien
ccacggtggaggtattggcagccac

SEQ ID NO: 6079488 - DNA, 25 bp, Homo sapien
tgtagatctcagagcacgcgttctg

SEQ ID NO: 6079489 - DNA, 25 bp, Homo sapien
ggaacaggccttttcttacatggct

SEQ ID NO: 6079490 - DNA, 25 bp, Homo sapien
tatatggcaatagttacagaccgca

SEQ ID NO: 6079491 - DNA, 25 bp, Homo sapien
ttacatggctctggtccgaggtcca

SEQ ID NO: 6079492 - DNA, 25 bp, Homo sapien
cgaggtccagtactcagcatgcgaa

SEQ ID NO: 6079493 - DNA, 25 bp, Homo sapien
tcagtggctcccgtgtgtcggtctc

SEQ ID NO: 6079494 - DNA, 25 bp, Homo sapien
gctgggccttaaagtccgtcttcat

SEQ ID NO: 6079495 - DNA, 25 bp, Homo sapien
tgtgaccctgaagactcggatgtgg

SEQ ID NO: 6079496 - DNA, 25 bp, Homo sapien
tcaatgcagagtcctttgggcttcc

SEQ ID NO: 6079497 - DNA, 25 bp, Homo sapien
gacagcagattcacaagcaaacaac

SEQ ID NO: 6079498 - DNA, 25 bp, Homo sapien
aatttaacaccctggttgtttgcag

SEQ ID NO: 6079499 - DNA, 25 bp, Homo sapien
tccccaggtcctcctaaggtatcta

SEQ ID NO: 6079500 - DNA, 25 bp, Homo sapien
cactgtcagttgtgtagtcttttgg

SEQ ID NO: 6079501 - DNA, 25 bp, Homo sapien
cactagtctcaaggcacgctcagaa

SEQ ID NO: 6079502 - DNA, 25 bp, Homo sapien
taattcgcttaattaacacagtggc

SEQ ID NO: 6079503 - DNA, 25 bp, Homo sapien
ccaccagtttagatgggaagaccca

SEQ ID NO: 6079504 - DNA, 25 bp, Homo sapien
ctgggctgatggataaacacactaa

SEQ ID NO: 6079505 - DNA, 25 bp, Homo sapien
gctctgacaaaaccactattagcag

SEQ ID NO: 6079506 - DNA, 25 bp, Homo sapien
ggtctggtaccacattaattcgctt

SEQ ID NO: 6079507 - DNA, 25 bp, Homo sapien
aatttttgaactggccactagtctc

SEQ ID NO: 6079508 - DNA, 25 bp, Homo sapien
tcaaggcacgctcagaaggctggtc

SEQ ID NO: 6079509 - DNA, 25 bp, Homo sapien
agcaacacgcggaaaaagttggcgg

SEQ ID NO: 6079510 - DNA, 25 bp, Homo sapien
tccccaggcggaggaagtactcctc

SEQ ID NO: 6079511 - DNA, 25 bp, Homo sapien
tggcggtcgcctgttccggcgaagg

SEQ ID NO: 6079512 - DNA, 25 bp, Homo sapien
atgggaggctcctcggaccgccttt

SEQ ID NO: 6079513 - DNA, 25 bp, Homo sapien
tcttgttgaggttccccaggcggag

SEQ ID NO: 6079514 - DNA, 25 bp, Homo sapien
ttgctgtgctaactgctcggccctg

SEQ ID NO: 6079515 - DNA, 25 bp, Homo sapien
tgtgagcttgctgtgctaactgctc

SEQ ID NO: 6079516 - DNA, 25 bp, Homo sapien
gcggaggaagtactcctctcccatg

SEQ ID NO: 6079517 - DNA, 25 bp, Homo sapien
tgctgcagcaacacgcggaaaaagt

SEQ ID NO: 6079518 - DNA, 25 bp, Homo sapien
tggtggccgccgagggcattcctag

SEQ ID NO: 6079519 - DNA, 25 bp, Homo sapien
tcccatgcggagcaggaccggccga

SEQ ID NO: 6079520 - DNA, 25 bp, Homo sapien
gccgggctcttgttgaggttcccca

SEQ ID NO: 6079521 - DNA, 25 bp, Homo sapien
caggaaactgtagaaagcagatccc

SEQ ID NO: 6079522 - DNA, 25 bp, Homo sapien
gattagctttggtaggtggaacgca

SEQ ID NO: 6079523 - DNA, 25 bp, Homo sapien
taccctttcaatagtcccacggcga

SEQ ID NO: 6079524 - DNA, 25 bp, Homo sapien
cggcgacaacttaggcggcaagaat

SEQ ID NO: 6079525 - DNA, 25 bp, Homo sapien
gcaatctttacacatctggcaggaa

SEQ ID NO: 6079526 - DNA, 25 bp, Homo sapien
tgggatgtgggaacgaagacttcac

SEQ ID NO: 6079527 - DNA, 25 bp, Homo sapien
ctgggattacaagcgcctgccacaa

SEQ ID NO: 6079528 - DNA, 25 bp, Homo sapien
gaacgcaagtcctacaaaccttaga

SEQ ID NO: 6079529 - DNA, 25 bp, Homo sapien
gtgagccaccatgtccagccagtga

SEQ ID NO: 6079530 - DNA, 25 bp, Homo sapien
gaaatgacacctcagtttggagcct

SEQ ID NO: 6079531 - DNA, 25 bp, Homo sapien
gacttcacagtgtgtggtcccgtcc

SEQ ID NO: 6079532 - DNA, 25 bp, Homo sapien
ccagccagtgataagaggatttcag

SEQ ID NO: 6079533 - DNA, 25 bp, Homo sapien
gaattgggagcgagggggcagagac

SEQ ID NO: 6079534 - DNA, 25 bp, Homo sapien
aaaatagcaactgtcagcttaaggc

SEQ ID NO: 6079535 - DNA, 25 bp, Homo sapien
tagttatataaaaagtactcttggc

SEQ ID NO: 6079536 - DNA, 25 bp, Homo sapien
agtcacgactaggaattgggagcga

SEQ ID NO: 6079537 - DNA, 25 bp, Homo sapien
attccttgagcttttggatttagaa

SEQ ID NO: 6079538 - DNA, 25 bp, Homo sapien
agaggcaagttactagctaagcaaa

SEQ ID NO: 6079539 - DNA, 25 bp, Homo sapien
gatggtgggtaactccttcaaacca

SEQ ID NO: 6079540 - DNA, 25 bp, Homo sapien
aaactgttctgcaaaatagcaactg

SEQ ID NO: 6079541 - DNA, 25 bp, Homo sapien
aatgaagtcacgactaggaattggg

SEQ ID NO: 6079542 - DNA, 25 bp, Homo sapien
cctagggccagatcgtgctgccatc

SEQ ID NO: 6079543 - DNA, 25 bp, Homo sapien
aagcaaagaggaaaactgttctgca

SEQ ID NO: 6079544 - DNA, 25 bp, Homo sapien
gcacctctggttcatgctcttgtca

SEQ ID NO: 6079545 - DNA, 25 bp, Homo sapien
tcagatcagcccaggctcagaggca

SEQ ID NO: 6079546 - DNA, 25 bp, Homo sapien
tcacatgctgaatcattgtccttct

SEQ ID NO: 6079547 - DNA, 25 bp, Homo sapien
aagttactagctaagcaaagaggaa

SEQ ID NO: 6079548 - DNA, 25 bp, Homo sapien
gtcagcttaaggcattactaacatt

SEQ ID NO: 6079549 - DNA, 25 bp, Homo sapien
aggttggtcaggctctgttttagaa

SEQ ID NO: 6079550 - DNA, 25 bp, Homo sapien
caggggaggatggagatacatggaa

SEQ ID NO: 6079551 - DNA, 25 bp, Homo sapien
atgacattatcgtgctgggatggtg

SEQ ID NO: 6079552 - DNA, 25 bp, Homo sapien
ggacatctggatagcccaggacaat

SEQ ID NO: 6079553 - DNA, 25 bp, Homo sapien
tgagcttttggatttagaaattagt

SEQ ID NO: 6079554 - DNA, 25 bp, Homo sapien
tcattgtccttctgagagcaggctc

SEQ ID NO: 6079555 - DNA, 25 bp, Homo sapien
agggggcagagacccctgctgcaat

SEQ ID NO: 6079556 - DNA, 25 bp, Homo sapien
aggaagcaagatttactagggacat

SEQ ID NO: 6079557 - DNA, 25 bp, Homo sapien
caaaccaatccatgtcacagaacac

SEQ ID NO: 6079558 - DNA, 25 bp, Homo sapien
ttatcgtgctgggatggtgggtaac

SEQ ID NO: 6079559 - DNA, 25 bp, Homo sapien
tcgtgctgccatccaacttgggaga

SEQ ID NO: 6079560 - DNA, 25 bp, Homo sapien
acacctgtttctcagatcagcccag

SEQ ID NO: 6079561 - DNA, 25 bp, Homo sapien
gccagatcgtgctgccatccaactt

SEQ ID NO: 6079562 - DNA, 25 bp, Homo sapien
tcagtcctccctggctggagcaggg

SEQ ID NO: 6079563 - DNA, 25 bp, Homo sapien
tgtttctcagatcagcccaggctca

SEQ ID NO: 6079564 - DNA, 25 bp, Homo sapien
tgccccaggtgcacctctggttcat

SEQ ID NO: 6079565 - DNA, 25 bp, Homo sapien
ctagctaagcaaagaggaaaactgt

SEQ ID NO: 6079566 - DNA, 25 bp, Homo sapien
tactagggacatctggatagcccag

SEQ ID NO: 6079567 - DNA, 25 bp, Homo sapien
gcaactgtcagcttaaggcattact

SEQ ID NO: 6079568 - DNA, 25 bp, Homo sapien
ctggttcatgctcttgtcacacctg

SEQ ID NO: 6079569 - DNA, 25 bp, Homo sapien
tgggtctcggggcactccctcagtc

SEQ ID NO: 6079570 - DNA, 25 bp, Homo sapien
ggacaatgacttctgggaacaggaa

SEQ ID NO: 6079571 - DNA, 25 bp, Homo sapien
tgcagaaggaagcaagatttactag

SEQ ID NO: 6079572 - DNA, 25 bp, Homo sapien
ttctgcaaaatagcaactgtcagct

SEQ ID NO: 6079573 - DNA, 25 bp, Homo sapien
ttattagggaactgccccaggtgca

SEQ ID NO: 6079574 - DNA, 25 bp, Homo sapien
ctggatagcccaggacaatgacttc

SEQ ID NO: 6079575 - DNA, 25 bp, Homo sapien
gggaactgccccaggtgcacctctg

SEQ ID NO: 6079576 - DNA, 25 bp, Homo sapien
cggggcactccctcagtcctccctg

SEQ ID NO: 6079577 - DNA, 25 bp, Homo sapien
agaacactgtctattccttgagctt

SEQ ID NO: 6079578 - DNA, 25 bp, Homo sapien
caggtgcacctctggttcatgctct

SEQ ID NO: 6079579 - DNA, 25 bp, Homo sapien
gctgaatcattgtccttctgagagc

SEQ ID NO: 6079580 - DNA, 25 bp, Homo sapien
agtactcttggcccagaagccccaa

SEQ ID NO: 6079581 - DNA, 25 bp, Homo sapien
ggagcgagggggcagagacccctgc

SEQ ID NO: 6079582 - DNA, 25 bp, Homo sapien
tttagaaatgaagtcacgactagga

SEQ ID NO: 6079583 - DNA, 25 bp, Homo sapien
ctggagcaggggaggatggagatac

SEQ ID NO: 6079584 - DNA, 25 bp, Homo sapien
ccaacttgggagatgacattatcgt

SEQ ID NO: 6079585 - DNA, 25 bp, Homo sapien
agatacatggaaggttggtcaggct

SEQ ID NO: 6079586 - DNA, 25 bp, Homo sapien
caagatttactagggacatctggat

SEQ ID NO: 6079587 - DNA, 25 bp, Homo sapien
ctgggaacaggaagctccctagggc

SEQ ID NO: 6079588 - DNA, 25 bp, Homo sapien
tgctgggatggtgggtaactccttc

SEQ ID NO: 6079589 - DNA, 25 bp, Homo sapien
tccttctgagagcaggctcctacgg

SEQ ID NO: 6079590 - DNA, 25 bp, Homo sapien
actccctcagtcctccctggctgga

SEQ ID NO: 6079591 - DNA, 25 bp, Homo sapien
catggaaggttggtcaggctctgtt

SEQ ID NO: 6079592 - DNA, 25 bp, Homo sapien
cagcccaggctcagaggcaagttac

SEQ ID NO: 6079593 - DNA, 25 bp, Homo sapien
tccttcaaaccaatccatgtcacag

SEQ ID NO: 6079594 - DNA, 25 bp, Homo sapien
tgtgcgtgggtctcggggcactccc

SEQ ID NO: 6079595 - DNA, 25 bp, Homo sapien
catgctcttgtcacacctgtttctc

SEQ ID NO: 6079596 - DNA, 25 bp, Homo sapien
agaggaaaactgttctgcaaaatag

SEQ ID NO: 6079597 - DNA, 25 bp, Homo sapien
tgagagcaggctcctacggttcctt

SEQ ID NO: 6079598 - DNA, 25 bp, Homo sapien
cagagacccctgctgcaatcacatg

SEQ ID NO: 6079599 - DNA, 25 bp, Homo sapien
tgacttctgggaacaggaagctccc

SEQ ID NO: 6079600 - DNA, 25 bp, Homo sapien
gtcaggctctgttttagaaatgaag

SEQ ID NO: 6079601 - DNA, 25 bp, Homo sapien
ctgtctattccttgagcttttggat

SEQ ID NO: 6079602 - DNA, 25 bp, Homo sapien
ccagaagccccaacatgtgcgtggg

SEQ ID NO: 6079603 - DNA, 25 bp, Homo sapien
aatccatgtcacagaacactgtcta

SEQ ID NO: 6079604 - DNA, 25 bp, Homo sapien
cttggcccagaagccccaacatgtg

SEQ ID NO: 6079605 - DNA, 25 bp, Homo sapien
acaggaagctccctagggccagatc

SEQ ID NO: 6079606 - DNA, 25 bp, Homo sapien
ataaaaagtactcttggcccagaag

SEQ ID NO: 6079607 - DNA, 25 bp, Homo sapien
tgccatccaacttgggagatgacat

SEQ ID NO: 6079608 - DNA, 25 bp, Homo sapien
tgggagatgacattatcgtgctggg

SEQ ID NO: 6079609 - DNA, 25 bp, Homo sapien
tgtcacagaacactgtctattcctt

SEQ ID NO: 6079610 - DNA, 25 bp, Homo sapien
cccctgctgcaatcacatgctgaat

SEQ ID NO: 6079611 - DNA, 25 bp, Homo sapien
ctgcaatcacatgctgaatcattgt

SEQ ID NO: 6079612 - DNA, 25 bp, Homo sapien
ttaaggcattactaacattgcagaa

SEQ ID NO: 6079613 - DNA, 25 bp, Homo sapien
ggtaactccttcaaaccaatccatg

SEQ ID NO: 6079614 - DNA, 25 bp, Homo sapien
agcccaggacaatgacttctgggaa

SEQ ID NO: 6079615 - DNA, 25 bp, Homo sapien
gccccaacatgtgcgtgggtctcgg

SEQ ID NO: 6079616 - DNA, 25 bp, Homo sapien
aagctccctagggccagatcgtgct

SEQ ID NO: 6079617 - DNA, 25 bp, Homo sapien
cagttttattagggaactgccccag

SEQ ID NO: 6079618 - DNA, 25 bp, Homo sapien
cttgtcacacctgtttctcagatca

SEQ ID NO: 6079619 - DNA, 25 bp, Homo sapien
cattactaacattgcagaaggaagc

SEQ ID NO: 6079620 - DNA, 25 bp, Homo sapien
ctctgttttagaaatgaagtcacga

SEQ ID NO: 6079621 - DNA, 25 bp, Homo sapien
taacattgcagaaggaagcaagatt

SEQ ID NO: 6079622 - DNA, 25 bp, Homo sapien
aggctcagaggcaagttactagcta

SEQ ID NO: 6079623 - DNA, 25 bp, Homo sapien
ggatggagatacatggaaggttggt

SEQ ID NO: 6079624 - DNA, 25 bp, Homo sapien
tgtcaattttacaaaggcctaccca

SEQ ID NO: 6079625 - DNA, 25 bp, Homo sapien
gggcagtcttcagaacctcttgtaa

SEQ ID NO: 6079626 - DNA, 25 bp, Homo sapien
tgggttacgggtgaagctgaatctt

SEQ ID NO: 6079627 - DNA, 25 bp, Homo sapien
tctgtcaattttacaaaggcctacc

SEQ ID NO: 6079628 - DNA, 25 bp, Homo sapien
aagcctccgcctccgcgcgactcgg

SEQ ID NO: 6079629 - DNA, 25 bp, Homo sapien
gctgaatcttgaacgcacccaagcc

SEQ ID NO: 6079630 - DNA, 25 bp, Homo sapien
ttcctcggccatggcggtgggttac

SEQ ID NO: 6079631 - DNA, 25 bp, Homo sapien
tacaaaggcctacccattctcctag

SEQ ID NO: 6079632 - DNA, 25 bp, Homo sapien
gtgaagctgaatcttgaacgcaccc

SEQ ID NO: 6079633 - DNA, 25 bp, Homo sapien
caaaggcctacccattctcctagtt

SEQ ID NO: 6079634 - DNA, 25 bp, Homo sapien
tggcagcttcgcgaattccacgtgc

SEQ ID NO: 6079635 - DNA, 25 bp, Homo sapien
tacgggtgaagctgaatcttgaacg

SEQ ID NO: 6079636 - DNA, 25 bp, Homo sapien
gccggcgacaccaatgtccctggta

SEQ ID NO: 6079637 - DNA, 25 bp, Homo sapien
tcagtgtgacatcttttacgcaaaa

SEQ ID NO: 6079638 - DNA, 25 bp, Homo sapien
ttcagtatctcattcacagttcgac

SEQ ID NO: 6079639 - DNA, 25 bp, Homo sapien
tttttgcatcctggccccgataggc

SEQ ID NO: 6079640 - DNA, 25 bp, Homo sapien
accccactccagcagatcagtgtga

SEQ ID NO: 6079641 - DNA, 25 bp, Homo sapien
taagaaatggagacgaactccaggt

SEQ ID NO: 6079642 - DNA, 25 bp, Homo sapien
tgttcccgtcattctatttcccgag

SEQ ID NO: 6079643 - DNA, 25 bp, Homo sapien
tgtaagaatgccaccattatccctg

SEQ ID NO: 6079644 - DNA, 25 bp, Homo sapien
taaaactgaattcatgtgtccaccc

SEQ ID NO: 6079645 - DNA, 25 bp, Homo sapien
gatctttgaaaagcgtacgctgctg

SEQ ID NO: 6079646 - DNA, 25 bp, Homo sapien
gaattaacaagcagccagtggcgag

SEQ ID NO: 6079647 - DNA, 25 bp, Homo sapien
ctggccccgataggcaggaatacgg

SEQ ID NO: 6079648 - DNA, 25 bp, Homo sapien
agcaatcttgttggggacattgagg

SEQ ID NO: 6079649 - DNA, 25 bp, Homo sapien
tttgatcacttggtttacaactaaa

SEQ ID NO: 6079650 - DNA, 25 bp, Homo sapien
gggctttacaatatgtagtttgatc

SEQ ID NO: 6079651 - DNA, 25 bp, Homo sapien
ttctctaccaccacctaatcaccaa

SEQ ID NO: 6079652 - DNA, 25 bp, Homo sapien
ttaaaagaattgaatagcttggagg

SEQ ID NO: 6079653 - DNA, 25 bp, Homo sapien
cctaatcaccaatcaagtaacccat

SEQ ID NO: 6079654 - DNA, 25 bp, Homo sapien
caccacctaatcaccaatcaagtaa

SEQ ID NO: 6079655 - DNA, 25 bp, Homo sapien
aaaagaattgaatagcttggaggaa

SEQ ID NO: 6079656 - DNA, 25 bp, Homo sapien
tccatttagcctttttacttgcttc

SEQ ID NO: 6079657 - DNA, 25 bp, Homo sapien
tattaagcaatcttgttggggacat

SEQ ID NO: 6079658 - DNA, 25 bp, Homo sapien
aaaatgggctttacaatatgtagtt

SEQ ID NO: 6079659 - DNA, 25 bp, Homo sapien
acctaatcaccaatcaagtaaccca

SEQ ID NO: 6079660 - DNA, 25 bp, Homo sapien
ttctgaagagcatgtcctgcctgcc

SEQ ID NO: 6079661 - DNA, 25 bp, Homo sapien
tctgaagagcatgtcctgcctgcct

SEQ ID NO: 6079662 - DNA, 25 bp, Homo sapien
ctgaagagcatgtcctgcctgccta

SEQ ID NO: 6079663 - DNA, 25 bp, Homo sapien
tgaagagcatgtcctgcctgcctaa

SEQ ID NO: 6079664 - DNA, 25 bp, Homo sapien
acagatgggaaaggcagcgcggcct

SEQ ID NO: 6079665 - DNA, 25 bp, Homo sapien
atagacagatgggaaaggcagcgcg

SEQ ID NO: 6079666 - DNA, 25 bp, Homo sapien
aaaagcgaagcgaggcgcacgagta

SEQ ID NO: 6079667 - DNA, 25 bp, Homo sapien
tccctgccagccagatagatagaca

SEQ ID NO: 6079668 - DNA, 25 bp, Homo sapien
tgcaggacacttgggccagcttggt

SEQ ID NO: 6079669 - DNA, 25 bp, Homo sapien
gaggaaaagcgaagcgaggcgcacg

SEQ ID NO: 6079670 - DNA, 25 bp, Homo sapien
tgccagccagatagatagacagatg

SEQ ID NO: 6079671 - DNA, 25 bp, Homo sapien
gacatggttgcggaggaaaagcgaa

SEQ ID NO: 6079672 - DNA, 25 bp, Homo sapien
aggcagcgcggccttcgttgtcagt

SEQ ID NO: 6079673 - DNA, 25 bp, Homo sapien
gatgggaaaggcagcgcggccttcg

SEQ ID NO: 6079674 - DNA, 25 bp, Homo sapien
aaagcgaagcgaggcgcacgagtac

SEQ ID NO: 6079675 - DNA, 25 bp, Homo sapien
aggcgcacgagtacgagcgaagtct

SEQ ID NO: 6079676 - DNA, 25 bp, Homo sapien
cggcgacaacttaggcggcaagaat

SEQ ID NO: 6079677 - DNA, 25 bp, Homo sapien
gaaatgacacctcagtttggagcct

SEQ ID NO: 6079678 - DNA, 25 bp, Homo sapien
caggaaactgtagaaagcagatccc

SEQ ID NO: 6079679 - DNA, 25 bp, Homo sapien
tgggatgtgggaacgaagacttcac

SEQ ID NO: 6079680 - DNA, 25 bp, Homo sapien
gtgagccaccatgtccagccagtga

SEQ ID NO: 6079681 - DNA, 25 bp, Homo sapien
ccagccagtgataagaggatttcag

SEQ ID NO: 6079682 - DNA, 25 bp, Homo sapien
gattagctttggtaggtggaacgca

SEQ ID NO: 6079683 - DNA, 25 bp, Homo sapien
taccctttcaatagtcccacggcga

SEQ ID NO: 6079684 - DNA, 25 bp, Homo sapien
gcaatctttacacatctggcaggaa

SEQ ID NO: 6079685 - DNA, 25 bp, Homo sapien
gacttcacagtgtgtggtcccgtcc

SEQ ID NO: 6079686 - DNA, 25 bp, Homo sapien
ctgggattacaagcgcctgccacaa

SEQ ID NO: 6079687 - DNA, 25 bp, Homo sapien
gaacgcaagtcctacaaaccttaga

SEQ ID NO: 6079688 - DNA, 25 bp, Homo sapien
ataggaacttgtcccaggcggcgtg

SEQ ID NO: 6079689 - DNA, 25 bp, Homo sapien
gtcgtcgatgctcttcaccgcgtcg

SEQ ID NO: 6079690 - DNA, 25 bp, Homo sapien
ccttggagccgtgcgcgcgcaactg

SEQ ID NO: 6079691 - DNA, 25 bp, Homo sapien
gacacaatgatggtcctctcagtct

SEQ ID NO: 6079692 - DNA, 25 bp, Homo sapien
tccacgcgcaggatgtaggcgtgca

SEQ ID NO: 6079693 - DNA, 25 bp, Homo sapien
agtaggtcttggtctgcgggtggct

SEQ ID NO: 6079694 - DNA, 25 bp, Homo sapien
tacgaccgataggaacttgtcccag

SEQ ID NO: 6079695 - DNA, 25 bp, Homo sapien
gcgccgccgatgtcgtcgatgctct

SEQ ID NO: 6079696 - DNA, 25 bp, Homo sapien
ccgggtgcaggtcgaagtgcgggaa

SEQ ID NO: 6079697 - DNA, 25 bp, Homo sapien
aagttgaccgggtccacgcgcagga

SEQ ID NO: 6079698 - DNA, 25 bp, Homo sapien
ctctccagagtctcggtgccgatgg

SEQ ID NO: 6079699 - DNA, 25 bp, Homo sapien
ccagagtctcggtgccgatggtgtc

SEQ ID NO: 6079700 - DNA, 25 bp, Homo sapien
tcccgcaattgttcttgcatgtccc

SEQ ID NO: 6079701 - DNA, 25 bp, Homo sapien
atctataatgctcccacatggctgg

SEQ ID NO: 6079702 - DNA, 25 bp, Homo sapien
ggtcagaaagaagagcacggcaaag

SEQ ID NO: 6079703 - DNA, 25 bp, Homo sapien
ctggatggtccgacagcatttcaga

SEQ ID NO: 6079704 - DNA, 25 bp, Homo sapien
cccacatggctggatggtccgacag

SEQ ID NO: 6079705 - DNA, 25 bp, Homo sapien
cacatggctggatggtccgacagca

SEQ ID NO: 6079706 - DNA, 25 bp, Homo sapien
cgcaattgttcttgcatgtcccttt

SEQ ID NO: 6079707 - DNA, 25 bp, Homo sapien
tttcccgcaattgttcttgcatgtc

SEQ ID NO: 6079708 - DNA, 25 bp, Homo sapien
ttaatctataatgctcccacatggc

SEQ ID NO: 6079709 - DNA, 25 bp, Homo sapien
tggctggatggtccgacagcatttc

SEQ ID NO: 6079710 - DNA, 25 bp, Homo sapien
tcccacatggctggatggtccgaca

SEQ ID NO: 6079711 - DNA, 25 bp, Homo sapien
tctggcagagagcaataagttcttc

SEQ ID NO: 6079712 - DNA, 25 bp, Homo sapien
tcgaggccactgtctacgcaacttc

SEQ ID NO: 6079713 - DNA, 25 bp, Homo sapien
gaaaaccatcaacgctctagtcctg

SEQ ID NO: 6079714 - DNA, 25 bp, Homo sapien
tagactcggacactgcagaggtacc

SEQ ID NO: 6079715 - DNA, 25 bp, Homo sapien
taatgtctgtaggtgtacctcaccc

SEQ ID NO: 6079716 - DNA, 25 bp, Homo sapien
taaactgtcaaactggcagaaccag

SEQ ID NO: 6079717 - DNA, 25 bp, Homo sapien
catgggcactttcttccaacagggt

SEQ ID NO: 6079718 - DNA, 25 bp, Homo sapien
gaacgcctcagctattggtgcagaa

SEQ ID NO: 6079719 - DNA, 25 bp, Homo sapien
tctagtcctgttgacctggaaatgg

SEQ ID NO: 6079720 - DNA, 25 bp, Homo sapien
cgtgagggtagcgtccctggacaac

SEQ ID NO: 6079721 - DNA, 25 bp, Homo sapien
actggaaatagtggtagactcggac

SEQ ID NO: 6079722 - DNA, 25 bp, Homo sapien
cactcggaaccagacacgtgagggt

SEQ ID NO: 6079723 - DNA, 25 bp, Homo sapien
gaaggtcttatagccaatgtcagct

SEQ ID NO: 6079724 - DNA, 25 bp, Homo sapien
agcatatagcatgggacacatccaa

SEQ ID NO: 6079725 - DNA, 25 bp, Homo sapien
gtgtcaaagcagtccactaccccga

SEQ ID NO: 6079726 - DNA, 25 bp, Homo sapien
gcaccgtccagtgacaatgtacaga

SEQ ID NO: 6079727 - DNA, 25 bp, Homo sapien
cactgaggtggtcgtcttgcttgcc

SEQ ID NO: 6079728 - DNA, 25 bp, Homo sapien
tgcaaggtagcttggctagacagca

SEQ ID NO: 6079729 - DNA, 25 bp, Homo sapien
cacgtccccagtgctggtgtcaaag

SEQ ID NO: 6079730 - DNA, 25 bp, Homo sapien
tcctttagtgatcacggcggtgcca

SEQ ID NO: 6079731 - DNA, 25 bp, Homo sapien
ctgtgcacgcagaggatgttgtcct

SEQ ID NO: 6079732 - DNA, 25 bp, Homo sapien
gatataacctttcaccaagcaccgt

SEQ ID NO: 6079733 - DNA, 25 bp, Homo sapien
acactctgccggtggctgtgcacgc

SEQ ID NO: 6079734 - DNA, 25 bp, Homo sapien
tacagatgcctgtctcctttagtga

SEQ ID NO: 6079735 - DNA, 25 bp, Homo sapien
gaaggtgatacactggaccacgtcc

SEQ ID NO: 6079736 - DNA, 25 bp, Homo sapien
tctgcagacggttagggaagccact

SEQ ID NO: 6079737 - DNA, 25 bp, Homo sapien
ggcactgtctctttcaggcagcacg

SEQ ID NO: 6079738 - DNA, 25 bp, Homo sapien
gaagccactgagcatcgtgctgccc

SEQ ID NO: 6079739 - DNA, 25 bp, Homo sapien
gtgttcctcgtactcaaagcggtgg

SEQ ID NO: 6079740 - DNA, 25 bp, Homo sapien
tagcggatcgtatgctcactgagag

SEQ ID NO: 6079741 - DNA, 25 bp, Homo sapien
gaacatctccgagcagaggaaccgt

SEQ ID NO: 6079742 - DNA, 25 bp, Homo sapien
tgtgtgtaggagtgcgctcaccctg

SEQ ID NO: 6079743 - DNA, 25 bp, Homo sapien
tcattgggacacatgctgcttagct

SEQ ID NO: 6079744 - DNA, 25 bp, Homo sapien
cttctcctcaatgggatccagggcc

SEQ ID NO: 6079745 - DNA, 25 bp, Homo sapien
gatgttccccatgaggtcccgtttg

SEQ ID NO: 6079746 - DNA, 25 bp, Homo sapien
cacttgttaaggcaggacacggttt

SEQ ID NO: 6079747 - DNA, 25 bp, Homo sapien
taatgctacaggaataagcgccggc

SEQ ID NO: 6079748 - DNA, 25 bp, Homo sapien
cacctgtcagggatgaaactcttta

SEQ ID NO: 6079749 - DNA, 25 bp, Homo sapien
cactttgccgatagggagactgagg

SEQ ID NO: 6079750 - DNA, 25 bp, Homo sapien
aattcagcatcctaagcatctccag

SEQ ID NO: 6079751 - DNA, 25 bp, Homo sapien
ccagaggctgcatcagtgacttcca

SEQ ID NO: 6079752 - DNA, 25 bp, Homo sapien
tcctgacagtccgacttcagagaaa

SEQ ID NO: 6079753 - DNA, 25 bp, Homo sapien
ccagaagccgggtttatacactcaa

SEQ ID NO: 6079754 - DNA, 25 bp, Homo sapien
ggagcctgccaatccctgtttgaag

SEQ ID NO: 6079755 - DNA, 25 bp, Homo sapien
cccaccaggatcttgcattctcttg

SEQ ID NO: 6079756 - DNA, 25 bp, Homo sapien
taagctaccttagtcgttggttctc

SEQ ID NO: 6079757 - DNA, 25 bp, Homo sapien
tacactcaatatgcaagagctacag

SEQ ID NO: 6079758 - DNA, 25 bp, Homo sapien
cagagacagggaagcgatattttcc

SEQ ID NO: 6079759 - DNA, 25 bp, Homo sapien
tttgaagggccatgcagtgaaagaa

SEQ ID NO: 6079760 - DNA, 25 bp, Homo sapien
cagcaggtagagtatcccctccaga

SEQ ID NO: 6079761 - DNA, 25 bp, Homo sapien
tggcacaacatcagtgccagcagca

SEQ ID NO: 6079762 - DNA, 25 bp, Homo sapien
tgttgcttcctgcagcgcccaggac

SEQ ID NO: 6079763 - DNA, 25 bp, Homo sapien
gtggtgaagagtgcatggcacaaca

SEQ ID NO: 6079764 - DNA, 25 bp, Homo sapien
ctctgggcagttacctaagtcatgt

SEQ ID NO: 6079765 - DNA, 25 bp, Homo sapien
ggctgaccagggcactgcctgctgt

SEQ ID NO: 6079766 - DNA, 25 bp, Homo sapien
aggtgctccaccactggatccagct

SEQ ID NO: 6079767 - DNA, 25 bp, Homo sapien
aggaggcccacaaggctcagcagtg

SEQ ID NO: 6079768 - DNA, 25 bp, Homo sapien
tatctgtctccactcgcggctgctg

SEQ ID NO: 6079769 - DNA, 25 bp, Homo sapien
caaatcctgagtgtcgcctgggtga

SEQ ID NO: 6079770 - DNA, 25 bp, Homo sapien
tcgccagccccgatggtatctgtct

SEQ ID NO: 6079771 - DNA, 25 bp, Homo sapien
gttgccgccagttcgaggtgctcca

SEQ ID NO: 6079772 - DNA, 25 bp, Homo sapien
ctgaggatgatattggccgtgacga

SEQ ID NO: 6079773 - DNA, 25 bp, Homo sapien
gaggtgtgattccagtaatgagtct

SEQ ID NO: 6079774 - DNA, 25 bp, Homo sapien
aacttgggagcagccacgcgtcacc

SEQ ID NO: 6079775 - DNA, 25 bp, Homo sapien
gagtgaggacaggtgcagactgggt

SEQ ID NO: 6079776 - DNA, 25 bp, Homo sapien
ccatgaagacctgggagcaactaaa

SEQ ID NO: 6079777 - DNA, 25 bp, Homo sapien
tcccattgtgcagggagtagcccgc

SEQ ID NO: 6079778 - DNA, 25 bp, Homo sapien
gacctgggagcaactaaatctgggc

SEQ ID NO: 6079779 - DNA, 25 bp, Homo sapien
tatgcctcctgtcactagacctgcc

SEQ ID NO: 6079780 - DNA, 25 bp, Homo sapien
actaaatctgggctctgcgggcgag

SEQ ID NO: 6079781 - DNA, 25 bp, Homo sapien
cagtaatgagtcttagaacttggga

SEQ ID NO: 6079782 - DNA, 25 bp, Homo sapien
gcaactaaatctgggctctgcgggc

SEQ ID NO: 6079783 - DNA, 25 bp, Homo sapien
tattggccgtgacgaaaatgaagca

SEQ ID NO: 6079784 - DNA, 25 bp, Homo sapien
tccctcagaccctccatggttgaaa

SEQ ID NO: 6079785 - DNA, 25 bp, Homo sapien
caggcttggatctgacctgtgtgtc

SEQ ID NO: 6079786 - DNA, 25 bp, Homo sapien
agagtgtaaccttgtcctgggacat

SEQ ID NO: 6079787 - DNA, 25 bp, Homo sapien
ggactctgagccctctactgataga

SEQ ID NO: 6079788 - DNA, 25 bp, Homo sapien
tgcaaatatgcagcctagaaattgg

SEQ ID NO: 6079789 - DNA, 25 bp, Homo sapien
gagaaatgttctacgaatgtatgag

SEQ ID NO: 6079790 - DNA, 25 bp, Homo sapien
tagtgcatggtacttattcctaaga

SEQ ID NO: 6079791 - DNA, 25 bp, Homo sapien
gaactctaactacttttccctcaga

SEQ ID NO: 6079792 - DNA, 25 bp, Homo sapien
tagaccaactgctttagcaggcttg

SEQ ID NO: 6079793 - DNA, 25 bp, Homo sapien
gtgtcctcagctagtacaattgcca

SEQ ID NO: 6079794 - DNA, 25 bp, Homo sapien
caccacggtacttttgccctcttag

SEQ ID NO: 6079795 - DNA, 25 bp, Homo sapien
gatagaccagataacatatcgaggc

SEQ ID NO: 6079796 - DNA, 25 bp, Homo sapien
caaggctggcatgggaatgaacacc

SEQ ID NO: 6079797 - DNA, 25 bp, Homo sapien
ttctgcatccactacaaaagggctg

SEQ ID NO: 6079798 - DNA, 25 bp, Homo sapien
gctaagccttgtggaaaccagaccc

SEQ ID NO: 6079799 - DNA, 25 bp, Homo sapien
gggtctcaacgccagacgcttgtta

SEQ ID NO: 6079800 - DNA, 25 bp, Homo sapien
taaacacagtaaagcatggatccag

SEQ ID NO: 6079801 - DNA, 25 bp, Homo sapien
caccagcaggtagtggcccctgtaa

SEQ ID NO: 6079802 - DNA, 25 bp, Homo sapien
gaatgaacacctgctggtgacacct

SEQ ID NO: 6079803 - DNA, 25 bp, Homo sapien
cgagctcctgaatcccaagaatggt

SEQ ID NO: 6079804 - DNA, 25 bp, Homo sapien
ccaaatgtttagctgggagggctgt

SEQ ID NO: 6079805 - DNA, 25 bp, Homo sapien
gacgcttgttatggaggcaccagca

SEQ ID NO: 6079806 - DNA, 25 bp, Homo sapien
caagaatggttctggcaagtactgc

SEQ ID NO: 6079807 - DNA, 25 bp, Homo sapien
tgtgggcctggcaactacacagatc

SEQ ID NO: 6079808 - DNA, 25 bp, Homo sapien
aggccttcctgctccagcctctgct

SEQ ID NO: 6079809 - DNA, 25 bp, Homo sapien
gacggtccacccgagtctggaatcg

SEQ ID NO: 6079810 - DNA, 25 bp, Homo sapien
ccacccgagtctggaatcgtgggag

SEQ ID NO: 6079811 - DNA, 25 bp, Homo sapien
accgacctggatgggtctggggtgg

SEQ ID NO: 6079812 - DNA, 25 bp, Homo sapien
gctgcccaggccctgggctggtggg

SEQ ID NO: 6079813 - DNA, 25 bp, Homo sapien
tgtgcctgctcctgctcatcctcca

SEQ ID NO: 6079814 - DNA, 25 bp, Homo sapien
ctcagggcagccggccccagagctc

SEQ ID NO: 6079815 - DNA, 25 bp, Homo sapien
agttgctgtgcctgctcctgctcat

SEQ ID NO: 6079816 - DNA, 25 bp, Homo sapien
tttcactgaagaaggagataaaaca

SEQ ID NO: 6079817 - DNA, 25 bp, Homo sapien
gcagtgaggaagtggacacagggct

SEQ ID NO: 6079818 - DNA, 25 bp, Homo sapien
ctggatgggtctggggtggcagtga

SEQ ID NO: 6079819 - DNA, 25 bp, Homo sapien
gcctctaggccttcctgctccagcc

SEQ ID NO: 6079820 - DNA, 25 bp, Homo sapien
gaagaggctgcccaggccctgggct

SEQ ID NO: 6079821 - DNA, 25 bp, Homo sapien
tcctgggctccaaaagtgggggaca

SEQ ID NO: 6079822 - DNA, 25 bp, Homo sapien
gcataggcctgctcttccctctcca

SEQ ID NO: 6079823 - DNA, 25 bp, Homo sapien
gtaagcagccctctgagagcctcta

SEQ ID NO: 6079824 - DNA, 25 bp, Homo sapien
caccgcacccaccacagctcagggc

SEQ ID NO: 6079825 - DNA, 25 bp, Homo sapien
gacaacacctggggggactgggaca

SEQ ID NO: 6079826 - DNA, 25 bp, Homo sapien
ctcttccctctccacaaaggcctgg

SEQ ID NO: 6079827 - DNA, 25 bp, Homo sapien
tccagcctctgctgctttttccgga

SEQ ID NO: 6079828 - DNA, 25 bp, Homo sapien
cccagggctgcctggtgtccacgat

SEQ ID NO: 6079829 - DNA, 25 bp, Homo sapien
gggtggcagtgaggaagtggacaca

SEQ ID NO: 6079830 - DNA, 25 bp, Homo sapien
cctggatgagcagggtgaagggatg

SEQ ID NO: 6079831 - DNA, 25 bp, Homo sapien
tcacccgtaagcagccctctgagag

SEQ ID NO: 6079832 - DNA, 25 bp, Homo sapien
atccgaacagggtcctgggctccaa

SEQ ID NO: 6079833 - DNA, 25 bp, Homo sapien
tgggctggtggggtctgttcacccg

SEQ ID NO: 6079834 - DNA, 25 bp, Homo sapien
tgctttttccggagttgctgtgcct

SEQ ID NO: 6079835 - DNA, 25 bp, Homo sapien
tgcttaagcataggcctgctcttcc

SEQ ID NO: 6079836 - DNA, 25 bp, Homo sapien
aaaggcttgaataccgacctggatg

SEQ ID NO: 6079837 - DNA, 25 bp, Homo sapien
acccaccacagctcagggcagccgg

SEQ ID NO: 6079838 - DNA, 25 bp, Homo sapien
aggaagtggacacagggctttgtgg

SEQ ID NO: 6079839 - DNA, 25 bp, Homo sapien
aggagataaaacatttattaagtca

SEQ ID NO: 6079840 - DNA, 25 bp, Homo sapien
tcctgctccagcctctgctgctttt

SEQ ID NO: 6079841 - DNA, 25 bp, Homo sapien
agtcactccaaacctggatgagcag

SEQ ID NO: 6079842 - DNA, 25 bp, Homo sapien
gtctgttcacccgtaagcagccctc

SEQ ID NO: 6079843 - DNA, 25 bp, Homo sapien
acttcaaagatgaaaggcttgaata

SEQ ID NO: 6079844 - DNA, 25 bp, Homo sapien
tttttttcactgaagaaggagataa

SEQ ID NO: 6079845 - DNA, 25 bp, Homo sapien
tgaagaaggagataaaacatttatt

SEQ ID NO: 6079846 - DNA, 25 bp, Homo sapien
ctccaaaagtgggggacaacacctg

SEQ ID NO: 6079847 - DNA, 25 bp, Homo sapien
tggacacagggctttgtgggatcct

SEQ ID NO: 6079848 - DNA, 25 bp, Homo sapien
agagctcctgcatgcttaagcatag

SEQ ID NO: 6079849 - DNA, 25 bp, Homo sapien
ccccaccaccgcacccaccacagct

SEQ ID NO: 6079850 - DNA, 25 bp, Homo sapien
ctctgctgctttttccggagttgct

SEQ ID NO: 6079851 - DNA, 25 bp, Homo sapien
tgggaggatccgaacagggtcctgg

SEQ ID NO: 6079852 - DNA, 25 bp, Homo sapien
atcagccccagggctgcctggtgtc

SEQ ID NO: 6079853 - DNA, 25 bp, Homo sapien
tgctcctgctcatcctccatcagcc

SEQ ID NO: 6079854 - DNA, 25 bp, Homo sapien
cacgatagagtgagtgccgacggtc

SEQ ID NO: 6079855 - DNA, 25 bp, Homo sapien
ctgagagcctctaggccttcctgct

SEQ ID NO: 6079856 - DNA, 25 bp, Homo sapien
gcagccggccccagagctcctgcat

SEQ ID NO: 6079857 - DNA, 25 bp, Homo sapien
aggccctgggctggtggggtctgtt

SEQ ID NO: 6079858 - DNA, 25 bp, Homo sapien
ggtctggggtggcagtgaggaagtg

SEQ ID NO: 6079859 - DNA, 25 bp, Homo sapien
gaatcgtgggaggatccgaacaggg

SEQ ID NO: 6079860 - DNA, 25 bp, Homo sapien
tggtgtccacgatagagtgagtgcc

SEQ ID NO: 6079861 - DNA, 25 bp, Homo sapien
tgagcagggtgaagggatggctgtg

SEQ ID NO: 6079862 - DNA, 25 bp, Homo sapien
gcctggaagaggctgcccaggccct

SEQ ID NO: 6079863 - DNA, 25 bp, Homo sapien
gactcaaccccaccaccgcacccac

SEQ ID NO: 6079864 - DNA, 25 bp, Homo sapien
ttattaagtcactccaaacctggat

SEQ ID NO: 6079865 - DNA, 25 bp, Homo sapien
ggtggggtctgttcacccgtaagca

SEQ ID NO: 6079866 - DNA, 25 bp, Homo sapien
gctgcctggtgtccacgatagagtg

SEQ ID NO: 6079867 - DNA, 25 bp, Homo sapien
tgctcatcctccatcagccccaggg

SEQ ID NO: 6079868 - DNA, 25 bp, Homo sapien
ttgaataccgacctggatgggtctg

SEQ ID NO: 6079869 - DNA, 25 bp, Homo sapien
gcctgctcttccctctccacaaagg

SEQ ID NO: 6079870 - DNA, 25 bp, Homo sapien
acaaaggcctggaagaggctgccca

SEQ ID NO: 6079871 - DNA, 25 bp, Homo sapien
cctctccacaaaggcctggaagagg

SEQ ID NO: 6079872 - DNA, 25 bp, Homo sapien
agtctggaatcgtgggaggatccga

SEQ ID NO: 6079873 - DNA, 25 bp, Homo sapien
agggatggctgtgactcaaccccac

SEQ ID NO: 6079874 - DNA, 25 bp, Homo sapien
tccaaacctggatgagcagggtgaa

SEQ ID NO: 6079875 - DNA, 25 bp, Homo sapien
taaaacatttattaagtcactccaa

SEQ ID NO: 6079876 - DNA, 25 bp, Homo sapien
ggccccagagctcctgcatgcttaa

SEQ ID NO: 6079877 - DNA, 25 bp, Homo sapien
ttccggagttgctgtgcctgctcct

SEQ ID NO: 6079878 - DNA, 25 bp, Homo sapien
agccctctgagagcctctaggcctt

SEQ ID NO: 6079879 - DNA, 25 bp, Homo sapien
cctgcatgcttaagcataggcctgc

SEQ ID NO: 6079880 - DNA, 25 bp, Homo sapien
acagggtcctgggctccaaaagtgg

SEQ ID NO: 6079881 - DNA, 25 bp, Homo sapien
tcctccatcagccccagggctgcct

SEQ ID NO: 6079882 - DNA, 25 bp, Homo sapien
cacagctcagggcagccggccccag

SEQ ID NO: 6079883 - DNA, 25 bp, Homo sapien
agagtgagtgccgacggtccacccg

SEQ ID NO: 6079884 - DNA, 25 bp, Homo sapien
tgggacacccccacttcaaagatga

SEQ ID NO: 6079885 - DNA, 25 bp, Homo sapien
aagatgaaaggcttgaataccgacc

SEQ ID NO: 6079886 - DNA, 25 bp, Homo sapien
ggctgtgactcaaccccaccaccgc

SEQ ID NO: 6079887 - DNA, 25 bp, Homo sapien
acccccacttcaaagatgaaaggct

SEQ ID NO: 6079888 - DNA, 25 bp, Homo sapien
agtgccgacggtccacccgagtctg

SEQ ID NO: 6079889 - DNA, 25 bp, Homo sapien
gggtgaagggatggctgtgactcaa

SEQ ID NO: 6079890 - DNA, 25 bp, Homo sapien
ttcagtagcattaaaggcggaatca

SEQ ID NO: 6079891 - DNA, 25 bp, Homo sapien
cagtagcattaaaggcggaatcaat

SEQ ID NO: 6079892 - DNA, 25 bp, Homo sapien
agtagcattaaaggcggaatcaatc

SEQ ID NO: 6079893 - DNA, 25 bp, Homo sapien
tcagtagcattaaaggcggaatcaa

SEQ ID NO: 6079894 - DNA, 25 bp, Homo sapien
aggtcactttcgtccttcccgagag

SEQ ID NO: 6079895 - DNA, 25 bp, Homo sapien
aggcatgtcccagatggctgtacat

SEQ ID NO: 6079896 - DNA, 25 bp, Homo sapien
ggtgagcaattaggaccttcagtcc

SEQ ID NO: 6079897 - DNA, 25 bp, Homo sapien
tctgccagacatattcgaagtcctg

SEQ ID NO: 6079898 - DNA, 25 bp, Homo sapien
tcatgatgcgcagtttacagccagc

SEQ ID NO: 6079899 - DNA, 25 bp, Homo sapien
caagtcctctaagggccttgtccag

SEQ ID NO: 6079900 - DNA, 25 bp, Homo sapien
tccagtatgattggttggtgtcaaa

SEQ ID NO: 6079901 - DNA, 25 bp, Homo sapien
ccagggctgaaaggccttggattca

SEQ ID NO: 6079902 - DNA, 25 bp, Homo sapien
cagtcccatagttgactggagccca

SEQ ID NO: 6079903 - DNA, 25 bp, Homo sapien
cttgctccacaaaattctgccagac

SEQ ID NO: 6079904 - DNA, 25 bp, Homo sapien
gcattagagagagagtcacagccta

SEQ ID NO: 6079905 - DNA, 25 bp, Homo sapien
ggtgtcaaatgttgtccagctccaa

SEQ ID NO: 6079906 - DNA, 25 bp, Homo sapien
cgagatactgccttagccttggcct

SEQ ID NO: 6079907 - DNA, 25 bp, Homo sapien
caagtgtctgtggatgcggcccaca

SEQ ID NO: 6079908 - DNA, 25 bp, Homo sapien
tgtggtgcgagtcttcaagtgtctg

SEQ ID NO: 6079909 - DNA, 25 bp, Homo sapien
gcccagctctctgtgagcgagatac

SEQ ID NO: 6079910 - DNA, 25 bp, Homo sapien
agctctctgtgagcgagatactgcc

SEQ ID NO: 6079911 - DNA, 25 bp, Homo sapien
ttccatggcttgtggtgcgagtctt

SEQ ID NO: 6079912 - DNA, 25 bp, Homo sapien
catggcttgtggtgcgagtcttcaa

SEQ ID NO: 6079913 - DNA, 25 bp, Homo sapien
ggtagccttgataagagaatccaac

SEQ ID NO: 6079914 - DNA, 25 bp, Homo sapien
tacagtaattgtctatgcttttcca

SEQ ID NO: 6079915 - DNA, 25 bp, Homo sapien
tcttttatcatgtctacagtaattg

SEQ ID NO: 6079916 - DNA, 25 bp, Homo sapien
gcgagatactgccttagccttggcc

SEQ ID NO: 6079917 - DNA, 25 bp, Homo sapien
ccacatatccccattatttcttctg

SEQ ID NO: 6079918 - DNA, 25 bp, Homo sapien
cagtagcattaaaggcggaatcaat

SEQ ID NO: 6079919 - DNA, 25 bp, Homo sapien
ttcagtagcattaaaggcggaatca

SEQ ID NO: 6079920 - DNA, 25 bp, Homo sapien
tcagtagcattaaaggcggaatcaa

SEQ ID NO: 6079921 - DNA, 25 bp, Homo sapien
agtagcattaaaggcggaatcaatc

SEQ ID NO: 6079922 - DNA, 25 bp, Homo sapien
aagccagtggtgatgccgacgatca

SEQ ID NO: 6079923 - DNA, 25 bp, Homo sapien
gcatagctcttgcacgtctgcagga

SEQ ID NO: 6079924 - DNA, 25 bp, Homo sapien
agcggcgccacgactgcagggtctt

SEQ ID NO: 6079925 - DNA, 25 bp, Homo sapien
gctcatgggcgggaagtggccgggc

SEQ ID NO: 6079926 - DNA, 25 bp, Homo sapien
gccacgactgcagggtcttgcccga

SEQ ID NO: 6079927 - DNA, 25 bp, Homo sapien
gtagacgaacagaggcgccagcacg

SEQ ID NO: 6079928 - DNA, 25 bp, Homo sapien
tctgtggtagaagcggcgccacgac

SEQ ID NO: 6079929 - DNA, 25 bp, Homo sapien
cggccagcaagaaggacgtgcctat

SEQ ID NO: 6079930 - DNA, 25 bp, Homo sapien
gatgccgacgatcatggtcatcagg

SEQ ID NO: 6079931 - DNA, 25 bp, Homo sapien
ccagcaagaaggacgtgcctatgaa

SEQ ID NO: 6079932 - DNA, 25 bp, Homo sapien
tccagaagccagtggtgatgccgac

SEQ ID NO: 6079933 - DNA, 25 bp, Homo sapien
ggcagggcacggcatagctcttgca

SEQ ID NO: 6079934 - DNA, 25 bp, Homo sapien
tccccaatcacaagtattataagtg

SEQ ID NO: 6079935 - DNA, 25 bp, Homo sapien
atttcccctagccactcagggctca

SEQ ID NO: 6079936 - DNA, 25 bp, Homo sapien
ctccccaatcacaagtattataagt

SEQ ID NO: 6079937 - DNA, 25 bp, Homo sapien
cccaatcacaagtattataagtgga

SEQ ID NO: 6079938 - DNA, 25 bp, Homo sapien
aagctcatcaaccaaatggactcta

SEQ ID NO: 6079939 - DNA, 25 bp, Homo sapien
gctcatcaaccaaatggactctact

SEQ ID NO: 6079940 - DNA, 25 bp, Homo sapien
gctcccctgcctaattcattagcta

SEQ ID NO: 6079941 - DNA, 25 bp, Homo sapien
aaatagctcccctgcctaattcatt

SEQ ID NO: 6079942 - DNA, 25 bp, Homo sapien
aatagctcccctgcctaattcatta

SEQ ID NO: 6079943 - DNA, 25 bp, Homo sapien
cctgcctaattcattagctatatga

SEQ ID NO: 6079944 - DNA, 25 bp, Homo sapien
catcaaccaaatggactctacttcc

SEQ ID NO: 6079945 - DNA, 25 bp, Homo sapien
cccctagccactcagggctcaacag

SEQ ID NO: 6079946 - DNA, 25 bp, Homo sapien
tgacctggaccctggcacagttcag

SEQ ID NO: 6079947 - DNA, 25 bp, Homo sapien
gctacaccagcgtcttccagacggt

SEQ ID NO: 6079948 - DNA, 25 bp, Homo sapien
ccacagtacacgcagtacagaacct

SEQ ID NO: 6079949 - DNA, 25 bp, Homo sapien
gagcagcaagcagctgtgaaagagc

SEQ ID NO: 6079950 - DNA, 25 bp, Homo sapien
agatacgtcgcagtcagccagccac

SEQ ID NO: 6079951 - DNA, 25 bp, Homo sapien
gcaacctggctgacgtacagattct

SEQ ID NO: 6079952 - DNA, 25 bp, Homo sapien
agacgagcaccttcgtcacccagtt

SEQ ID NO: 6079953 - DNA, 25 bp, Homo sapien
aaagagcaagattttacccacagag

SEQ ID NO: 6079954 - DNA, 25 bp, Homo sapien
ccagcgtcttccagacggttgttag

SEQ ID NO: 6079955 - DNA, 25 bp, Homo sapien
gttagccagcagtgtagcagccaga

SEQ ID NO: 6079956 - DNA, 25 bp, Homo sapien
agaatggttagccagcagtgtagca

SEQ ID NO: 6079957 - DNA, 25 bp, Homo sapien
gttagacaggtccagttcacgcaga

SEQ ID NO: 6079958 - DNA, 25 bp, Homo sapien
accgcattcccagatccacagtgta

SEQ ID NO: 6079959 - DNA, 25 bp, Homo sapien
ttttccagagcctgcagacggtctt

SEQ ID NO: 6079960 - DNA, 25 bp, Homo sapien
gcagtacagaacctggctgacctgg

SEQ ID NO: 6079961 - DNA, 25 bp, Homo sapien
acggcacaggtcaccgcaaccttta

SEQ ID NO: 6079962 - DNA, 25 bp, Homo sapien
acgcagagaatggttagccagcagt

SEQ ID NO: 6079963 - DNA, 25 bp, Homo sapien
agtcagccagccacagtacacgcag

SEQ ID NO: 6079964 - DNA, 25 bp, Homo sapien
acccaggcagttgttagacaggtcc

SEQ ID NO: 6079965 - DNA, 25 bp, Homo sapien
cagccagagacagttctttcagaga

SEQ ID NO: 6079966 - DNA, 25 bp, Homo sapien
ggcaacctggttccagcagtgtttc

SEQ ID NO: 6079967 - DNA, 25 bp, Homo sapien
cggtcttccatttcttcagaccagt

SEQ ID NO: 6079968 - DNA, 25 bp, Homo sapien
gagacagttctttcagagattcttt

SEQ ID NO: 6079969 - DNA, 25 bp, Homo sapien
gtaccagctgttccagcaggcaacc

SEQ ID NO: 6079970 - DNA, 25 bp, Homo sapien
agaagagcaagaagagtcagatacg

SEQ ID NO: 6079971 - DNA, 25 bp, Homo sapien
tgtttcgcacagcagacgagcacct

SEQ ID NO: 6079972 - DNA, 25 bp, Homo sapien
ctggttccagcagtgtttcgcacag

SEQ ID NO: 6079973 - DNA, 25 bp, Homo sapien
tcttccagacggttgttagagatct

SEQ ID NO: 6079974 - DNA, 25 bp, Homo sapien
ttttacccacagagattccagctgg

SEQ ID NO: 6079975 - DNA, 25 bp, Homo sapien
agttcagctacaccagcgtcttcca

SEQ ID NO: 6079976 - DNA, 25 bp, Homo sapien
gtcgcagtcagccagccacagtaca

SEQ ID NO: 6079977 - DNA, 25 bp, Homo sapien
gaagagaaatgagagcagcaagcag

SEQ ID NO: 6079978 - DNA, 25 bp, Homo sapien
gcagttgttagacaggtccagttca

SEQ ID NO: 6079979 - DNA, 25 bp, Homo sapien
cagaacctggctgacctggaccctg

SEQ ID NO: 6079980 - DNA, 25 bp, Homo sapien
caggtccagttcacgcagagaatgg

SEQ ID NO: 6079981 - DNA, 25 bp, Homo sapien
tttagctgtgataccgcattcccag

SEQ ID NO: 6079982 - DNA, 25 bp, Homo sapien
agtacagaagagaaatgagagcagc

SEQ ID NO: 6079983 - DNA, 25 bp, Homo sapien
gatccacagtgtacgcagacgagaa

SEQ ID NO: 6079984 - DNA, 25 bp, Homo sapien
cgttaccagccagagacagttcttt

SEQ ID NO: 6079985 - DNA, 25 bp, Homo sapien
cagcagtgtagcagccagagaagag

SEQ ID NO: 6079986 - DNA, 25 bp, Homo sapien
cagttcacgcagagaatggttagcc

SEQ ID NO: 6079987 - DNA, 25 bp, Homo sapien
agcacgcagtacacggcacaggtca

SEQ ID NO: 6079988 - DNA, 25 bp, Homo sapien
caagcagctgtgaaagagcaagatt

SEQ ID NO: 6079989 - DNA, 25 bp, Homo sapien
cagcgtcacccaggcagttgttaga

SEQ ID NO: 6079990 - DNA, 25 bp, Homo sapien
ttgttagagatctgcagttccagca

SEQ ID NO: 6079991 - DNA, 25 bp, Homo sapien
tcttcagaccagtagatgtcgtaca

SEQ ID NO: 6079992 - DNA, 25 bp, Homo sapien
cacaggtcaccgcaacctttagctg

SEQ ID NO: 6079993 - DNA, 25 bp, Homo sapien
cagattctaccagctgcaggatacc

SEQ ID NO: 6079994 - DNA, 25 bp, Homo sapien
tagatgtcgtacagtaccagctgtt

SEQ ID NO: 6079995 - DNA, 25 bp, Homo sapien
gctgttccagcaggcaacctggctg

SEQ ID NO: 6079996 - DNA, 25 bp, Homo sapien
cagcaggcaacctggctgacgtaca

SEQ ID NO: 6079997 - DNA, 25 bp, Homo sapien
gtcaccgcaacctttagctgtgata

SEQ ID NO: 6079998 - DNA, 25 bp, Homo sapien
tggctgacgtacagattctaccagc

SEQ ID NO: 6079999 - DNA, 25 bp, Homo sapien
tgcagttccagcaggaaacggttct

SEQ ID NO: 6080000 - DNA, 25 bp, Homo sapien
tccatttcttcagaccagtagatgt

SEQ ID NO: 6080001 - DNA, 25 bp, Homo sapien
gcacagcagacgagcaccttcgtca

SEQ ID NO: 6080002 - DNA, 25 bp, Homo sapien
agcaccttcgtcacccagttcgtta

SEQ ID NO: 6080003 - DNA, 25 bp, Homo sapien
gtcacccagttcgttaccagccaga

SEQ ID NO: 6080004 - DNA, 25 bp, Homo sapien
ctaccagctgcaggataccagcgtc

SEQ ID NO: 6080005 - DNA, 25 bp, Homo sapien
agccagagaagagcaagaagagtca

SEQ ID NO: 6080006 - DNA, 25 bp, Homo sapien
gctgcaggataccagcgtcacccag

SEQ ID NO: 6080007 - DNA, 25 bp, Homo sapien
tccagcaggaaacggttctgagcca

SEQ ID NO: 6080008 - DNA, 25 bp, Homo sapien
tgtgataccgcattcccagatccac

SEQ ID NO: 6080009 - DNA, 25 bp, Homo sapien
agacggttgttagagatctgcagtt

SEQ ID NO: 6080010 - DNA, 25 bp, Homo sapien
aggaaacggttctgagccagtacag

SEQ ID NO: 6080011 - DNA, 25 bp, Homo sapien
tcagagattctttagcacgcagtac

SEQ ID NO: 6080012 - DNA, 25 bp, Homo sapien
tgagccagtacagaagagaaatgag

SEQ ID NO: 6080013 - DNA, 25 bp, Homo sapien
gtacacgcagtacagaacctggctg

SEQ ID NO: 6080014 - DNA, 25 bp, Homo sapien
ggataccagcgtcacccaggcagtt

SEQ ID NO: 6080015 - DNA, 25 bp, Homo sapien
agagcctgcagacggtcttccattt

SEQ ID NO: 6080016 - DNA, 25 bp, Homo sapien
gagattccagctggcaacctggttc

SEQ ID NO: 6080017 - DNA, 25 bp, Homo sapien
cggttctgagccagtacagaagaga

SEQ ID NO: 6080018 - DNA, 25 bp, Homo sapien
gcaagaagagtcagatacgtcgcag

SEQ ID NO: 6080019 - DNA, 25 bp, Homo sapien
gctgtgaaagagcaagattttaccc

SEQ ID NO: 6080020 - DNA, 25 bp, Homo sapien
ccacagagattccagctggcaacct

SEQ ID NO: 6080021 - DNA, 25 bp, Homo sapien
ttctttagcacgcagtacacggcac

SEQ ID NO: 6080022 - DNA, 25 bp, Homo sapien
ccagttcgttaccagccagagacag

SEQ ID NO: 6080023 - DNA, 25 bp, Homo sapien
ggaccctggcacagttcagctacac

SEQ ID NO: 6080024 - DNA, 25 bp, Homo sapien
cagtacacggcacaggtcaccgcaa

SEQ ID NO: 6080025 - DNA, 25 bp, Homo sapien
gcaacctttagctgtgataccgcat

SEQ ID NO: 6080026 - DNA, 25 bp, Homo sapien
aaatgagagcagcaagcagctgtga

SEQ ID NO: 6080027 - DNA, 25 bp, Homo sapien
ctggctgacctggaccctggcacag

SEQ ID NO: 6080028 - DNA, 25 bp, Homo sapien
gacgtacagattctaccagctgcag

SEQ ID NO: 6080029 - DNA, 25 bp, Homo sapien
cagtgtacgcagacgagaagatgga

SEQ ID NO: 6080030 - DNA, 25 bp, Homo sapien
caagattttacccacagagattcca

SEQ ID NO: 6080031 - DNA, 25 bp, Homo sapien
tgcagacggtcttccatttcttcag

SEQ ID NO: 6080032 - DNA, 25 bp, Homo sapien
gagatctgcagttccagcaggaaac

SEQ ID NO: 6080033 - DNA, 25 bp, Homo sapien
cgtacagtaccagctgttccagcag

SEQ ID NO: 6080034 - DNA, 25 bp, Homo sapien
tgtagcagccagagaagagcaagaa

SEQ ID NO: 6080035 - DNA, 25 bp, Homo sapien
ccagcagtgtttcgcacagcagacg

SEQ ID NO: 6080036 - DNA, 25 bp, Homo sapien
tggcacagttcagctacaccagcgt

SEQ ID NO: 6080037 - DNA, 25 bp, Homo sapien
gttctttcagagattctttagcacg

SEQ ID NO: 6080038 - DNA, 25 bp, Homo sapien
ccagctggcaacctggttccagcag

SEQ ID NO: 6080039 - DNA, 25 bp, Homo sapien
agagtcagatacgtcgcagtcagcc

SEQ ID NO: 6080040 - DNA, 25 bp, Homo sapien
gaccagtagatgtcgtacagtacca

SEQ ID NO: 6080041 - DNA, 25 bp, Homo sapien
ttcccagatccacagtgtacgcaga

SEQ ID NO: 6080042 - DNA, 25 bp, Homo sapien
agccagccacagtacacgcagtaca

SEQ ID NO: 6080043 - DNA, 25 bp, Homo sapien
tctccgtctccgcggaggtgctttt

SEQ ID NO: 6080044 - DNA, 25 bp, Homo sapien
gtctccgtctccgcggaggtgcttt

SEQ ID NO: 6080045 - DNA, 25 bp, Homo sapien
ctccgtctccgcggaggtgcttttc

SEQ ID NO: 6080046 - DNA, 25 bp, Homo sapien
tctccgtctccgcggaggtgctttt

SEQ ID NO: 6080047 - DNA, 25 bp, Homo sapien
ctccgtctccgcggaggtgcttttc

SEQ ID NO: 6080048 - DNA, 25 bp, Homo sapien
gtctccgtctccgcggaggtgcttt

SEQ ID NO: 6080049 - DNA, 25 bp, Homo sapien
caacggtgctcgattgcgatgtctc

SEQ ID NO: 6080050 - DNA, 25 bp, Homo sapien
gtacacctgcagactttgtgttctc

SEQ ID NO: 6080051 - DNA, 25 bp, Homo sapien
acacctgcagactttgtgttctcta

SEQ ID NO: 6080052 - DNA, 25 bp, Homo sapien
tacacctgcagactttgtgttctct

SEQ ID NO: 6080053 - DNA, 25 bp, Homo sapien
ttagttgtgcccaagttggcggctc

SEQ ID NO: 6080054 - DNA, 25 bp, Homo sapien
tggcggctctgccttcttggtggat

SEQ ID NO: 6080055 - DNA, 25 bp, Homo sapien
cttctttagttgtgcccaagttggc

SEQ ID NO: 6080056 - DNA, 25 bp, Homo sapien
gtgagtcaacggtgctcgattgcga

SEQ ID NO: 6080057 - DNA, 25 bp, Homo sapien
gatgtctccgtctccgcggaggtgc

SEQ ID NO: 6080058 - DNA, 25 bp, Homo sapien
gctcgattgcgatgtctccgtctcc

SEQ ID NO: 6080059 - DNA, 25 bp, Homo sapien
tgtgcccaagttggcggctctgcct

SEQ ID NO: 6080060 - DNA, 25 bp, Homo sapien
cacctgcagactttgtgttctctag

SEQ ID NO: 6080061 - DNA, 25 bp, Homo sapien
tctccgtctccgcggaggtgctttt

SEQ ID NO: 6080062 - DNA, 25 bp, Homo sapien
ctccgtctccgcggaggtgcttttc

SEQ ID NO: 6080063 - DNA, 25 bp, Homo sapien
gtctccgtctccgcggaggtgcttt

SEQ ID NO: 6080064 - DNA, 25 bp, Homo sapien
ctccgtctccgcggaggtgcttttc

SEQ ID NO: 6080065 - DNA, 25 bp, Homo sapien
tctccgtctccgcggaggtgctttt

SEQ ID NO: 6080066 - DNA, 25 bp, Homo sapien
gtctccgtctccgcggaggtgcttt

SEQ ID NO: 6080067 - DNA, 25 bp, Homo sapien
gtgagtcaacggtgcccgattgcga

SEQ ID NO: 6080068 - DNA, 25 bp, Homo sapien
gtgcccgattgcgatgtctccgtct

SEQ ID NO: 6080069 - DNA, 25 bp, Homo sapien
acacctgcagactttgtgttctcta

SEQ ID NO: 6080070 - DNA, 25 bp, Homo sapien
tacacctgcagactttgtgttctct

SEQ ID NO: 6080071 - DNA, 25 bp, Homo sapien
cacctgcagactttgtgttctctag

SEQ ID NO: 6080072 - DNA, 25 bp, Homo sapien
tcaacggtgcccgattgcgatgtct

SEQ ID NO: 6080073 - DNA, 25 bp, Homo sapien
catcttgtgagtcaacggtgcccga

SEQ ID NO: 6080074 - DNA, 25 bp, Homo sapien
gtacacctgcagactttgtgttctc

SEQ ID NO: 6080075 - DNA, 25 bp, Homo sapien
aacggtgcccgattgcgatgtctcc

SEQ ID NO: 6080076 - DNA, 25 bp, Homo sapien
tgcccgattgcgatgtctccgtctc

SEQ ID NO: 6080077 - DNA, 25 bp, Homo sapien
gttcatcttgtgagtcaacggtgcc

SEQ ID NO: 6080078 - DNA, 25 bp, Homo sapien
tgagtcaacggtgcccgattgcgat

SEQ ID NO: 6080079 - DNA, 25 bp, Homo sapien
tctccgtctccgcggaggtgctttt

SEQ ID NO: 6080080 - DNA, 25 bp, Homo sapien
ctccgtctccgcggaggtgcttttc

SEQ ID NO: 6080081 - DNA, 25 bp, Homo sapien
gtctccgtctccgcggaggtgcttt

SEQ ID NO: 6080082 - DNA, 25 bp, Homo sapien
caccattgatacaatcatcgaggct

SEQ ID NO: 6080083 - DNA, 25 bp, Homo sapien
tcatcgaggctgcaagcagcatact

SEQ ID NO: 6080084 - DNA, 25 bp, Homo sapien
tacaatcatcgaggctgcaagcagc

SEQ ID NO: 6080085 - DNA, 25 bp, Homo sapien
cattgatacaatcatcgaggctgca

SEQ ID NO: 6080086 - DNA, 25 bp, Homo sapien
tcgaggctgcaagcagcatactctc

SEQ ID NO: 6080087 - DNA, 25 bp, Homo sapien
ccattgatacaatcatcgaggctgc

SEQ ID NO: 6080088 - DNA, 25 bp, Homo sapien
gcagacaccattgatacaatcatcg

SEQ ID NO: 6080089 - DNA, 25 bp, Homo sapien
caatcatcgaggctgcaagcagcat

SEQ ID NO: 6080090 - DNA, 25 bp, Homo sapien
gaggctgcaagcagcatactctctg

SEQ ID NO: 6080091 - DNA, 25 bp, Homo sapien
gatacaatcatcgaggctgcaagca

SEQ ID NO: 6080092 - DNA, 25 bp, Homo sapien
attctcgatggttgctgtctcttca

SEQ ID NO: 6080093 - DNA, 25 bp, Homo sapien
ggtacacctgcagacaccattgata

SEQ ID NO: 6080094 - DNA, 25 bp, Homo sapien
tgtagaaacaccaggtcctcgacgc

SEQ ID NO: 6080095 - DNA, 25 bp, Homo sapien
gcattgactggcaagcttatagaga

SEQ ID NO: 6080096 - DNA, 25 bp, Homo sapien
cacaggtttccagagaatgatttcc

SEQ ID NO: 6080097 - DNA, 25 bp, Homo sapien
agaaatagcagcaacctttaaggaa

SEQ ID NO: 6080098 - DNA, 25 bp, Homo sapien
tatagtctcgatgtccaaggatggg

SEQ ID NO: 6080099 - DNA, 25 bp, Homo sapien
ggtcctcgacgcctgaattttatag

SEQ ID NO: 6080100 - DNA, 25 bp, Homo sapien
caatgaaacaccaagggctaagagc

SEQ ID NO: 6080101 - DNA, 25 bp, Homo sapien
gaactaagctcccaaatatgtaagc

SEQ ID NO: 6080102 - DNA, 25 bp, Homo sapien
tacaggagacacacattatcgccag

SEQ ID NO: 6080103 - DNA, 25 bp, Homo sapien
taagctgatgacatgcactccacag

SEQ ID NO: 6080104 - DNA, 25 bp, Homo sapien
tgccattcggagagcaaaaagtgtt

SEQ ID NO: 6080105 - DNA, 25 bp, Homo sapien
taaggacagcctttcgtagaagaat

SEQ ID NO: 6080106 - DNA, 25 bp, Homo sapien
tcaagaaacgcatacaggagagggt

SEQ ID NO: 6080107 - DNA, 25 bp, Homo sapien
tactacgcagatggaaacagcggca

SEQ ID NO: 6080108 - DNA, 25 bp, Homo sapien
aaaggctatacctctgctccctgaa

SEQ ID NO: 6080109 - DNA, 25 bp, Homo sapien
aatgcaatattgtagggcgcccaca

SEQ ID NO: 6080110 - DNA, 25 bp, Homo sapien
gaagggagttctgctaaatgcacac

SEQ ID NO: 6080111 - DNA, 25 bp, Homo sapien
ggcgcccacatcagaaggaagacta

SEQ ID NO: 6080112 - DNA, 25 bp, Homo sapien
tgttacccatgccaggacacttgta

SEQ ID NO: 6080113 - DNA, 25 bp, Homo sapien
tgaacacttttgtccagattgtagc

SEQ ID NO: 6080114 - DNA, 25 bp, Homo sapien
ggaggacaagaaccgaaatgttcat

SEQ ID NO: 6080115 - DNA, 25 bp, Homo sapien
ccaggacacttgtaatgatgccaca

SEQ ID NO: 6080116 - DNA, 25 bp, Homo sapien
agtggccagaatggctgttacccat

SEQ ID NO: 6080117 - DNA, 25 bp, Homo sapien
tcgatgtgccttgtgcagactgccc

SEQ ID NO: 6080118 - DNA, 25 bp, Homo sapien
tgtgacttgctttgagcgtatctgg

SEQ ID NO: 6080119 - DNA, 25 bp, Homo sapien
ggattctggagatggaaccttgtca

SEQ ID NO: 6080120 - DNA, 25 bp, Homo sapien
cctgagactctgagacagttggagg

SEQ ID NO: 6080121 - DNA, 25 bp, Homo sapien
gaagaccctctgagttgccagctgg

SEQ ID NO: 6080122 - DNA, 25 bp, Homo sapien
tcctgtacagaagggactgtgtccc

SEQ ID NO: 6080123 - DNA, 25 bp, Homo sapien
acatcaagacttgagacagggctat

SEQ ID NO: 6080124 - DNA, 25 bp, Homo sapien
aactgctctacgtcaggaaggatgg

SEQ ID NO: 6080125 - DNA, 25 bp, Homo sapien
gacagggctatgaaaccttgtggtg

SEQ ID NO: 6080126 - DNA, 25 bp, Homo sapien
tacattggtcataagctctccagaa

SEQ ID NO: 6080127 - DNA, 25 bp, Homo sapien
tgaactcttccgacatcacaagaaa

SEQ ID NO: 6080128 - DNA, 25 bp, Homo sapien
cagctggtgtttcctgagactctga

SEQ ID NO: 6080129 - DNA, 25 bp, Homo sapien
tctctttttctggtatggatgctgg

SEQ ID NO: 6080130 - DNA, 25 bp, Homo sapien
gaatgaccctctttctgaataatta

SEQ ID NO: 6080131 - DNA, 25 bp, Homo sapien
ctgtaggatgtattctatcatctga

SEQ ID NO: 6080132 - DNA, 25 bp, Homo sapien
tgaacagtaaacagatccgaagtat

SEQ ID NO: 6080133 - DNA, 25 bp, Homo sapien
ccagcactctgggaagtcgaggcag

SEQ ID NO: 6080134 - DNA, 25 bp, Homo sapien
tgatttagaaagcattttgactggg

SEQ ID NO: 6080135 - DNA, 25 bp, Homo sapien
ccaagaatttcttaactgaacagta

SEQ ID NO: 6080136 - DNA, 25 bp, Homo sapien
ttcaaaaggccaaatagaatgaccc

SEQ ID NO: 6080137 - DNA, 25 bp, Homo sapien
ccgaagtatataatctgtgaaaatg

SEQ ID NO: 6080138 - DNA, 25 bp, Homo sapien
ggaggtggaaaataaggacatgtaa

SEQ ID NO: 6080139 - DNA, 25 bp, Homo sapien
ggcaacagagagagattccatctca

SEQ ID NO: 6080140 - DNA, 25 bp, Homo sapien
actttaaagatctcgggagggtgtg

SEQ ID NO: 6080141 - DNA, 25 bp, Homo sapien
taaggacatgtaaatgatctgcagt

SEQ ID NO: 6080142 - DNA, 25 bp, Homo sapien
taatccacttaaaaatacaagagca

SEQ ID NO: 6080143 - DNA, 25 bp, Homo sapien
atgccactgtttccatgggcccgag

SEQ ID NO: 6080144 - DNA, 25 bp, Homo sapien
gcccgagttacttttccccagatga

SEQ ID NO: 6080145 - DNA, 25 bp, Homo sapien
tcatctcgggcgtaaacaccttcaa

SEQ ID NO: 6080146 - DNA, 25 bp, Homo sapien
ccagcaggcctccacaggagccaag

SEQ ID NO: 6080147 - DNA, 25 bp, Homo sapien
tccacatttatttattgatttttcg

SEQ ID NO: 6080148 - DNA, 25 bp, Homo sapien
ccgagttacttttccccagatgact

SEQ ID NO: 6080149 - DNA, 25 bp, Homo sapien
tccacttaaaaatacaagagcacaa

SEQ ID NO: 6080150 - DNA, 25 bp, Homo sapien
tttagaagtcccgttcccagcaggc

SEQ ID NO: 6080151 - DNA, 25 bp, Homo sapien
ttaatccacttaaaaatacaagagc

SEQ ID NO: 6080152 - DNA, 25 bp, Homo sapien
tggttccggagaccccgcttatagc

SEQ ID NO: 6080153 - DNA, 25 bp, Homo sapien
ttggtttgccgccaggagtgactgt

SEQ ID NO: 6080154 - DNA, 25 bp, Homo sapien
tgtatctacggagatcagctgcata

SEQ ID NO: 6080155 - DNA, 25 bp, Homo sapien
ccctgggtacactggctccagtggg

SEQ ID NO: 6080156 - DNA, 25 bp, Homo sapien
tggctgtagtaacagagccacgcag

SEQ ID NO: 6080157 - DNA, 25 bp, Homo sapien
tacggagatcagctgcatactgggc

SEQ ID NO: 6080158 - DNA, 25 bp, Homo sapien
gagtcgtaggagacagaaggtggca

SEQ ID NO: 6080159 - DNA, 25 bp, Homo sapien
tatctacggagatcagctgcatact

SEQ ID NO: 6080160 - DNA, 25 bp, Homo sapien
ggctgtagtaacagagccacgcagg

SEQ ID NO: 6080161 - DNA, 25 bp, Homo sapien
gatgtatctacggagatcagctgca

SEQ ID NO: 6080162 - DNA, 25 bp, Homo sapien
gctgtagtaacagagccacgcaggt

SEQ ID NO: 6080163 - DNA, 25 bp, Homo sapien
cagcagtggctgtagtaacagagcc

SEQ ID NO: 6080164 - DNA, 25 bp, Homo sapien
tctacggagatcagctgcatactgg

SEQ ID NO: 6080165 - DNA, 25 bp, Homo sapien
cagtggctgtagtaacagagccacg

SEQ ID NO: 6080166 - DNA, 25 bp, Homo sapien
cagcagtggctgtagtaacagagcc

SEQ ID NO: 6080167 - DNA, 25 bp, Homo sapien
ccctgggtacactggctccagtggg

SEQ ID NO: 6080168 - DNA, 25 bp, Homo sapien
tacggagatcagctgcatactgggc

SEQ ID NO: 6080169 - DNA, 25 bp, Homo sapien
gagtcgtaggagacagaaggtggca

SEQ ID NO: 6080170 - DNA, 25 bp, Homo sapien
tatctacggagatcagctgcatact

SEQ ID NO: 6080171 - DNA, 25 bp, Homo sapien
gatgtatctacggagatcagctgca

SEQ ID NO: 6080172 - DNA, 25 bp, Homo sapien
gctgtagtaacagagccacgcaggt

SEQ ID NO: 6080173 - DNA, 25 bp, Homo sapien
ggctgtagtaacagagccacgcagg

SEQ ID NO: 6080174 - DNA, 25 bp, Homo sapien
tggctgtagtaacagagccacgcag

SEQ ID NO: 6080175 - DNA, 25 bp, Homo sapien
tctacggagatcagctgcatactgg

SEQ ID NO: 6080176 - DNA, 25 bp, Homo sapien
cagtggctgtagtaacagagccacg

SEQ ID NO: 6080177 - DNA, 25 bp, Homo sapien
tgtatctacggagatcagctgcata

SEQ ID NO: 6080178 - DNA, 25 bp, Homo sapien
atcgtgagcaaagtaggttttccgc

SEQ ID NO: 6080179 - DNA, 25 bp, Homo sapien
tcgtgagcaaagtaggttttccgct

SEQ ID NO: 6080180 - DNA, 25 bp, Homo sapien
catcgtgagcaaagtaggttttccg

SEQ ID NO: 6080181 - DNA, 25 bp, Homo sapien
gcatcgtgagcaaagtaggttttcc

SEQ ID NO: 6080182 - DNA, 25 bp, Homo sapien
gtgagcaaagtaggttttccgctta

SEQ ID NO: 6080183 - DNA, 25 bp, Homo sapien
ggcatcgtgagcaaagtaggttttc

SEQ ID NO: 6080184 - DNA, 25 bp, Homo sapien
cgtgagcaaagtaggttttccgctt

SEQ ID NO: 6080185 - DNA, 25 bp, Homo sapien
tgagcaaagtaggttttccgcttat

SEQ ID NO: 6080186 - DNA, 25 bp, Homo sapien
tttttggagacgcagtcgctctgtc

SEQ ID NO: 6080187 - DNA, 25 bp, Homo sapien
agacgcagtcgctctgtcacccagg

SEQ ID NO: 6080188 - DNA, 25 bp, Homo sapien
ggcagtggcacgacctaggctcact

SEQ ID NO: 6080189 - DNA, 25 bp, Homo sapien
gagtttatcctctgacaaattattc

SEQ ID NO: 6080190 - DNA, 25 bp, Homo sapien
tgctgggatttcaggtaaaagccag

SEQ ID NO: 6080191 - DNA, 25 bp, Homo sapien
tctcaaactcccgatctcaggcgat

SEQ ID NO: 6080192 - DNA, 25 bp, Homo sapien
tcaggtaaaagccagcatacccggc

SEQ ID NO: 6080193 - DNA, 25 bp, Homo sapien
gcatacccggccagtactggttctt

SEQ ID NO: 6080194 - DNA, 25 bp, Homo sapien
cactattttaagtgaaaggtctagg

SEQ ID NO: 6080195 - DNA, 25 bp, Homo sapien
taaaaacatatacaaattcacacta

SEQ ID NO: 6080196 - DNA, 25 bp, Homo sapien
ctaggttgggagtttatcctctgac

SEQ ID NO: 6080197 - DNA, 25 bp, Homo sapien
gctgacatttacatggcagaatctt

SEQ ID NO: 6080198 - DNA, 25 bp, Homo sapien
ttacatgatcatttgtgataaacag

SEQ ID NO: 6080199 - DNA, 25 bp, Homo sapien
gaaaaatcgcaataagatgtatctc

SEQ ID NO: 6080200 - DNA, 25 bp, Homo sapien
ttttgtgaaaaatcgcaataagatg

SEQ ID NO: 6080201 - DNA, 25 bp, Homo sapien
cattgtgtacagatttccctattga

SEQ ID NO: 6080202 - DNA, 25 bp, Homo sapien
taagatgtatctctagatcgtgtgc

SEQ ID NO: 6080203 - DNA, 25 bp, Homo sapien
gaaaactgggtaacattgaatcaca

SEQ ID NO: 6080204 - DNA, 25 bp, Homo sapien
ctgggtaacattgaatcacaaacag

SEQ ID NO: 6080205 - DNA, 25 bp, Homo sapien
caataattaaacaccagctaagcct

SEQ ID NO: 6080206 - DNA, 25 bp, Homo sapien
gatcaatggcaaatcactggagata

SEQ ID NO: 6080207 - DNA, 25 bp, Homo sapien
attgatcaatggcaaatcactggag

SEQ ID NO: 6080208 - DNA, 25 bp, Homo sapien
tatctctagatcgtgtgcttgccag

SEQ ID NO: 6080209 - DNA, 25 bp, Homo sapien
taattaaacaccagctaagccttct

SEQ ID NO: 6080210 - DNA, 25 bp, Homo sapien
cagtcattattctactacctgctaa

SEQ ID NO: 6080211 - DNA, 25 bp, Homo sapien
tggccagggaagatccactgaatta

SEQ ID NO: 6080212 - DNA, 25 bp, Homo sapien
ggaagatccactgaattaggagtca

SEQ ID NO: 6080213 - DNA, 25 bp, Homo sapien
cctgctaatcttctatgagcttcgt

SEQ ID NO: 6080214 - DNA, 25 bp, Homo sapien
gatcattgataagaatctggcgtgg

SEQ ID NO: 6080215 - DNA, 25 bp, Homo sapien
taggagtcagcagtcattattctac

SEQ ID NO: 6080216 - DNA, 25 bp, Homo sapien
caatacaaaacggtggccagggaag

SEQ ID NO: 6080217 - DNA, 25 bp, Homo sapien
gtcatttaagcttggtacccgtcag

SEQ ID NO: 6080218 - DNA, 25 bp, Homo sapien
tgcagctcaatacaaaacggtggcc

SEQ ID NO: 6080219 - DNA, 25 bp, Homo sapien
ggaagcattgcagctcaatacaaaa

SEQ ID NO: 6080220 - DNA, 25 bp, Homo sapien
tcttctatgagcttcgtcaagtcat

SEQ ID NO: 6080221 - DNA, 25 bp, Homo sapien
aatctggcgtggagaacagtcaagg

SEQ ID NO: 6080222 - DNA, 25 bp, Homo sapien
gaatttttgttgtggatgctcagag

SEQ ID NO: 6080223 - DNA, 25 bp, Homo sapien
acatgggtcagaggttggcaaccac

SEQ ID NO: 6080224 - DNA, 25 bp, Homo sapien
gcaaagaagcaaaagtccatggagt

SEQ ID NO: 6080225 - DNA, 25 bp, Homo sapien
gcagcttgcattagatcaggcacag

SEQ ID NO: 6080226 - DNA, 25 bp, Homo sapien
tgctggacacaacgtgaagactttg

SEQ ID NO: 6080227 - DNA, 25 bp, Homo sapien
ttgggcacacagtctcctatgggct

SEQ ID NO: 6080228 - DNA, 25 bp, Homo sapien
gcctcagtggacgacagccgctgga

SEQ ID NO: 6080229 - DNA, 25 bp, Homo sapien
caagatggacgacacgtgctgaaca

SEQ ID NO: 6080230 - DNA, 25 bp, Homo sapien
agccgctggacacatacctctgtgg

SEQ ID NO: 6080231 - DNA, 25 bp, Homo sapien
caagcaactcgagggttggcatcca

SEQ ID NO: 6080232 - DNA, 25 bp, Homo sapien
tgtggtctacaggatactggaaggc

SEQ ID NO: 6080233 - DNA, 25 bp, Homo sapien
tttgaggacgataggccaagcaact

SEQ ID NO: 6080234 - DNA, 25 bp, Homo sapien
acataacacgctgagacaaagaggg

SEQ ID NO: 6080235 - DNA, 25 bp, Homo sapien
ttggatcagccctgaactgctgtag

SEQ ID NO: 6080236 - DNA, 25 bp, Homo sapien
tcccaagtctggtggagttctcagg

SEQ ID NO: 6080237 - DNA, 25 bp, Homo sapien
tctggtggagttctcagggataacc

SEQ ID NO: 6080238 - DNA, 25 bp, Homo sapien
aaataggtcattgcacataacacgc

SEQ ID NO: 6080239 - DNA, 25 bp, Homo sapien
ctgctgtagttggaatgggtttacc

SEQ ID NO: 6080240 - DNA, 25 bp, Homo sapien
cagtgagtacaaaccaattgcagga

SEQ ID NO: 6080241 - DNA, 25 bp, Homo sapien
tgggacctccagaccacatggtgtt

SEQ ID NO: 6080242 - DNA, 25 bp, Homo sapien
gaggcagtgcttggatcagccctga

SEQ ID NO: 6080243 - DNA, 25 bp, Homo sapien
gacacagagtgaggactcatgtcta

SEQ ID NO: 6080244 - DNA, 25 bp, Homo sapien
ccaagccttccctctcaagttgagt

SEQ ID NO: 6080245 - DNA, 25 bp, Homo sapien
tcatgtctaatgagcaccggccaaa

SEQ ID NO: 6080246 - DNA, 25 bp, Homo sapien
cacaactggcatttgatccacattc

SEQ ID NO: 6080247 - DNA, 25 bp, Homo sapien
actctttaatttgcggctggtcgac

SEQ ID NO: 6080248 - DNA, 25 bp, Homo sapien
acattcctcatttcgtcacaactgg

SEQ ID NO: 6080249 - DNA, 25 bp, Homo sapien
ccttgtgaggagatcggctcttgct

SEQ ID NO: 6080250 - DNA, 25 bp, Homo sapien
ctcttgactcccttgtgaggagatc

SEQ ID NO: 6080251 - DNA, 25 bp, Homo sapien
catgactctttaatttgcggctggt

SEQ ID NO: 6080252 - DNA, 25 bp, Homo sapien
tcctctctggctttgatctaacatc

SEQ ID NO: 6080253 - DNA, 25 bp, Homo sapien
gatctaacatcaggtctccttggca

SEQ ID NO: 6080254 - DNA, 25 bp, Homo sapien
catcgccccgtttcctacttttcag

SEQ ID NO: 6080255 - DNA, 25 bp, Homo sapien
catttcgtcacaactggcatttgat

SEQ ID NO: 6080256 - DNA, 25 bp, Homo sapien
ctgcttggtgctgtgtgaagcgcac

SEQ ID NO: 6080257 - DNA, 25 bp, Homo sapien
ccacattccataggctcctctctgg

SEQ ID NO: 6080258 - DNA, 25 bp, Homo sapien
gtgattttgtaggtgcgtgtgctgc

SEQ ID NO: 6080259 - DNA, 25 bp, Homo sapien
ggactcgttgtgctgccgggtgtac

SEQ ID NO: 6080260 - DNA, 25 bp, Homo sapien
tggactcgttgtgctgccgggtgta

SEQ ID NO: 6080261 - DNA, 25 bp, Homo sapien
actcgttgtgctgccgggtgtacct

SEQ ID NO: 6080262 - DNA, 25 bp, Homo sapien
gactcgttgtgctgccgggtgtacc

SEQ ID NO: 6080263 - DNA, 25 bp, Homo sapien
tgattttgtaggtgcgtgtgctgcc

SEQ ID NO: 6080264 - DNA, 25 bp, Homo sapien
tgccgggtgtacctcttgcacttgc

SEQ ID NO: 6080265 - DNA, 25 bp, Homo sapien
ctggactcgttgtgctgccgggtgt

SEQ ID NO: 6080266 - DNA, 25 bp, Homo sapien
gccgggtgtacctcttgcacttgca

SEQ ID NO: 6080267 - DNA, 25 bp, Homo sapien
gcgtcttgtcgttgacacaccgcca

SEQ ID NO: 6080268 - DNA, 25 bp, Homo sapien
ctgctgggcctgatcaaagcagaaa

SEQ ID NO: 6080269 - DNA, 25 bp, Homo sapien
gaatggagcgcggtttaaactgtaa

SEQ ID NO: 6080270 - DNA, 25 bp, Homo sapien
agcaatggcaggctcgagcgagtct

SEQ ID NO: 6080271 - DNA, 25 bp, Homo sapien
cacgctttcaaagttgtggctggac

SEQ ID NO: 6080272 - DNA, 25 bp, Homo sapien
aaagctagtcccagagaaggtccca

SEQ ID NO: 6080273 - DNA, 25 bp, Homo sapien
ggcttggcgggagacacgctttcaa

SEQ ID NO: 6080274 - DNA, 25 bp, Homo sapien
gattctctgggtgcgcgtcttgtcg

SEQ ID NO: 6080275 - DNA, 25 bp, Homo sapien
gcagatgctttctagtcagtccagc

SEQ ID NO: 6080276 - DNA, 25 bp, Homo sapien
gatgcctggctttcactgcaaacta

SEQ ID NO: 6080277 - DNA, 25 bp, Homo sapien
tcttgcacttgcacgctgtgaccac

SEQ ID NO: 6080278 - DNA, 25 bp, Homo sapien
gagcgagtcttccacgcaatcaaat

SEQ ID NO: 6080279 - DNA, 25 bp, Homo sapien
ctttcaactcttgtcaggccttcag

SEQ ID NO: 6080280 - DNA, 25 bp, Homo sapien
tatggtatattgaggaaggaaagtc

SEQ ID NO: 6080281 - DNA, 25 bp, Homo sapien
gaacaccctgcttgccaaacttgat

SEQ ID NO: 6080282 - DNA, 25 bp, Homo sapien
ttcagatgattgtagttccaactac

SEQ ID NO: 6080283 - DNA, 25 bp, Homo sapien
tacattaatagccaacaccaagttg

SEQ ID NO: 6080284 - DNA, 25 bp, Homo sapien
gattacaggctctagttatctcaaa

SEQ ID NO: 6080285 - DNA, 25 bp, Homo sapien
ggatatagcagtatcgaacaccctg

SEQ ID NO: 6080286 - DNA, 25 bp, Homo sapien
caactaccatcttgaccaaaaagat

SEQ ID NO: 6080287 - DNA, 25 bp, Homo sapien
tagacaaattcccaatcagcgagag

SEQ ID NO: 6080288 - DNA, 25 bp, Homo sapien
gccaaatccctaactgcagaataaa

SEQ ID NO: 6080289 - DNA, 25 bp, Homo sapien
tcagcgagagatcttaacacatatt

SEQ ID NO: 6080290 - DNA, 25 bp, Homo sapien
caaaatagtacagtctctgaaacaa

SEQ ID NO: 6080291 - DNA, 25 bp, Homo sapien
tctccgtctccgcggaggtgctttt

SEQ ID NO: 6080292 - DNA, 25 bp, Homo sapien
ctccgtctccgcggaggtgcttttc

SEQ ID NO: 6080293 - DNA, 25 bp, Homo sapien
gtctccgtctccgcggaggtgcttt

SEQ ID NO: 6080294 - DNA, 25 bp, Homo sapien
tctccgtctccgcggaggtgctttt

SEQ ID NO: 6080295 - DNA, 25 bp, Homo sapien
ctccgtctccgcggaggtgcttttc

SEQ ID NO: 6080296 - DNA, 25 bp, Homo sapien
gtctccgtctccgcggaggtgcttt

SEQ ID NO: 6080297 - DNA, 25 bp, Homo sapien
tctccgtctccgcggaggtgctttt

SEQ ID NO: 6080298 - DNA, 25 bp, Homo sapien
ctccgtctccgcggaggtgcttttc

SEQ ID NO: 6080299 - DNA, 25 bp, Homo sapien
gtctccgtctccgcggaggtgcttt

SEQ ID NO: 6080300 - DNA, 25 bp, Homo sapien
gtacacctgcagactttgtgttctc

SEQ ID NO: 6080301 - DNA, 25 bp, Homo sapien
ccaagttggtggctctgccttcttg

SEQ ID NO: 6080302 - DNA, 25 bp, Homo sapien
cacctgcagactttgtgttctctag

SEQ ID NO: 6080303 - DNA, 25 bp, Homo sapien
gtgcccaagttggtggctctgcctt

SEQ ID NO: 6080304 - DNA, 25 bp, Homo sapien
ttctttagttgtgcccaagttggtg

SEQ ID NO: 6080305 - DNA, 25 bp, Homo sapien
tagttgtgcccaagttggtggctct

SEQ ID NO: 6080306 - DNA, 25 bp, Homo sapien
acacctgcagactttgtgttctcta

SEQ ID NO: 6080307 - DNA, 25 bp, Homo sapien
agttggtggctctgccttcttggtg

SEQ ID NO: 6080308 - DNA, 25 bp, Homo sapien
gcccaagttggtggctctgccttct

SEQ ID NO: 6080309 - DNA, 25 bp, Homo sapien
tgtgcccaagttggtggctctgcct

SEQ ID NO: 6080310 - DNA, 25 bp, Homo sapien
tttagttgtgcccaagttggtggct

SEQ ID NO: 6080311 - DNA, 25 bp, Homo sapien
tacacctgcagactttgtgttctct

SEQ ID NO: 6080312 - DNA, 25 bp, Homo sapien
ctccgtctccgcggaggtgcttttc

SEQ ID NO: 6080313 - DNA, 25 bp, Homo sapien
tctccgtctccgcggaggtgctttt

SEQ ID NO: 6080314 - DNA, 25 bp, Homo sapien
gtctccgtctccgcggaggtgcttt

SEQ ID NO: 6080315 - DNA, 25 bp, Homo sapien
cacccgcagactttgtgttctctag

SEQ ID NO: 6080316 - DNA, 25 bp, Homo sapien
gggtacacccgcagactttgtgttc

SEQ ID NO: 6080317 - DNA, 25 bp, Homo sapien
tgttgggtacacccgcagactttgt

SEQ ID NO: 6080318 - DNA, 25 bp, Homo sapien
acacccgcagactttgtgttctcta

SEQ ID NO: 6080319 - DNA, 25 bp, Homo sapien
tacacccgcagactttgtgttctct

SEQ ID NO: 6080320 - DNA, 25 bp, Homo sapien
ctgttgggtacacccgcagactttg

SEQ ID NO: 6080321 - DNA, 25 bp, Homo sapien
gtacacccgcagactttgtgttctc

SEQ ID NO: 6080322 - DNA, 25 bp, Homo sapien
gctgttgggtacacccgcagacttt

SEQ ID NO: 6080323 - DNA, 25 bp, Homo sapien
tgggtacacccgcagactttgtgtt

SEQ ID NO: 6080324 - DNA, 25 bp, Homo sapien
ggtacacccgcagactttgtgttct

SEQ ID NO: 6080325 - DNA, 25 bp, Homo sapien
gttgggtacacccgcagactttgtg

SEQ ID NO: 6080326 - DNA, 25 bp, Homo sapien
ttgggtacacccgcagactttgtgt

SEQ ID NO: 6080327 - DNA, 25 bp, Homo sapien
gtctccgtctccgcggaggtgcttt

SEQ ID NO: 6080328 - DNA, 25 bp, Homo sapien
ctccgtctccgcggaggtgcttttc

SEQ ID NO: 6080329 - DNA, 25 bp, Homo sapien
tctccgtctccgcggaggtgctttt

SEQ ID NO: 6080330 - DNA, 25 bp, Homo sapien
cacctgcagactttgtgttctctag

SEQ ID NO: 6080331 - DNA, 25 bp, Homo sapien
cttctttagttgtgcccaagttggc

SEQ ID NO: 6080332 - DNA, 25 bp, Homo sapien
gtacacctgcagactttgtgttctc

SEQ ID NO: 6080333 - DNA, 25 bp, Homo sapien
caacggtgctcgattgcgatgtctc

SEQ ID NO: 6080334 - DNA, 25 bp, Homo sapien
gatgtctccgtctccgcggaggtgc

SEQ ID NO: 6080335 - DNA, 25 bp, Homo sapien
tggcggctctgccttcttggtggat

SEQ ID NO: 6080336 - DNA, 25 bp, Homo sapien
acacctgcagactttgtgttctcta

SEQ ID NO: 6080337 - DNA, 25 bp, Homo sapien
gtgagtcaacggtgctcgattgcga

SEQ ID NO: 6080338 - DNA, 25 bp, Homo sapien
tgtgcccaagttggcggctctgcct

SEQ ID NO: 6080339 - DNA, 25 bp, Homo sapien
gctcgattgcgatgtctccgtctcc

SEQ ID NO: 6080340 - DNA, 25 bp, Homo sapien
ttagttgtgcccaagttggcggctc

SEQ ID NO: 6080341 - DNA, 25 bp, Homo sapien
tacacctgcagactttgtgttctct

SEQ ID NO: 6080342 - DNA, 25 bp, Homo sapien
tctccgtctccgcggaggtgctttt

SEQ ID NO: 6080343 - DNA, 25 bp, Homo sapien
ctccgtctccgcggaggtgcttttc

SEQ ID NO: 6080344 - DNA, 25 bp, Homo sapien
gtctccgtctccgcggaggtgcttt

SEQ ID NO: 6080345 - DNA, 25 bp, Homo sapien
cacctgcagacttcttggtggatgg

SEQ ID NO: 6080346 - DNA, 25 bp, Homo sapien
tgagtcaacggtgctcgattgcggt

SEQ ID NO: 6080347 - DNA, 25 bp, Homo sapien
gtgtctccgtctccgcggaggtgct

SEQ ID NO: 6080348 - DNA, 25 bp, Homo sapien
gattgcggtgtctccgtctccgcgg

SEQ ID NO: 6080349 - DNA, 25 bp, Homo sapien
aacggtgctcgattgcggtgtctcc

SEQ ID NO: 6080350 - DNA, 25 bp, Homo sapien
aacttcatctgttctgatgtcacca

SEQ ID NO: 6080351 - DNA, 25 bp, Homo sapien
acacctgcagacttcttggtggatg

SEQ ID NO: 6080352 - DNA, 25 bp, Homo sapien
tcatctgttctgatgtcaccatttt

SEQ ID NO: 6080353 - DNA, 25 bp, Homo sapien
caacttcatctgttctgatgtcacc

SEQ ID NO: 6080354 - DNA, 25 bp, Homo sapien
gtacacctgcagacttcttggtgga

SEQ ID NO: 6080355 - DNA, 25 bp, Homo sapien
tacacctgcagacttcttggtggat

SEQ ID NO: 6080356 - DNA, 25 bp, Homo sapien
ctgttctgatgtcaccattttgttc

SEQ ID NO: 6080357 - DNA, 25 bp, Homo sapien
caccccacctcagctcccttctcgt

SEQ ID NO: 6080358 - DNA, 25 bp, Homo sapien
tcctggccctccctatccaacctca

SEQ ID NO: 6080359 - DNA, 25 bp, Homo sapien
ctgactctttcagctccttgttgag

SEQ ID NO: 6080360 - DNA, 25 bp, Homo sapien
ttgagctggattccactttgggcct

SEQ ID NO: 6080361 - DNA, 25 bp, Homo sapien
ggtgcatcatctctgtatgaacaca

SEQ ID NO: 6080362 - DNA, 25 bp, Homo sapien
tgctgtctgtttggtggtccagtat

SEQ ID NO: 6080363 - DNA, 25 bp, Homo sapien
tcttgaggattaggtgcatcatctc

SEQ ID NO: 6080364 - DNA, 25 bp, Homo sapien
actgtatgctgtctgtttggtggtc

SEQ ID NO: 6080365 - DNA, 25 bp, Homo sapien
cctatccaacctcagactgctccac

SEQ ID NO: 6080366 - DNA, 25 bp, Homo sapien
tgcttctgtccattggttgggtgca

SEQ ID NO: 6080367 - DNA, 25 bp, Homo sapien
gaacacagccctggaagtcctctac

SEQ ID NO: 6080368 - DNA, 25 bp, Homo sapien
tctttcggagggcagccaggataga

SEQ ID NO: 6080369 - DNA, 25 bp, Homo sapien
cctctactgtatgtgttttgggggc

SEQ ID NO: 6080370 - DNA, 25 bp, Homo sapien
gcagccaggatagacacttaatgtg

SEQ ID NO: 6080371 - DNA, 25 bp, Homo sapien
gacacttaatgtgtgccttccatag

SEQ ID NO: 6080372 - DNA, 25 bp, Homo sapien
gctgtccctcctacagaatcgccct

SEQ ID NO: 6080373 - DNA, 25 bp, Homo sapien
tgggcctgttgctggaccttctttt

SEQ ID NO: 6080374 - DNA, 25 bp, Homo sapien
ctttcagctccttgttgagtctttc

SEQ ID NO: 6080375 - DNA, 25 bp, Homo sapien
ttggttgggtgcaaatcactgcttc

SEQ ID NO: 6080376 - DNA, 25 bp, Homo sapien
gctccttgttgagtctttcggaggg

SEQ ID NO: 6080377 - DNA, 25 bp, Homo sapien
ccccttgagctggattccactttgg

SEQ ID NO: 6080378 - DNA, 25 bp, Homo sapien
tgtccattggttgggtgcaaatcac

SEQ ID NO: 6080379 - DNA, 25 bp, Homo sapien
aaatcactgcttctgactctttcag

SEQ ID NO: 6080380 - DNA, 25 bp, Homo sapien
ctgtatgaacacagccctggaagtc

SEQ ID NO: 6080381 - DNA, 25 bp, Homo sapien
cagggttccagattaattaagactg

SEQ ID NO: 6080382 - DNA, 25 bp, Homo sapien
gtattagtgtcagcccttgggaccc

SEQ ID NO: 6080383 - DNA, 25 bp, Homo sapien
ggattaggtgcatcatctctgtatg

SEQ ID NO: 6080384 - DNA, 25 bp, Homo sapien
ctgcttctgactctttcagctcctt

SEQ ID NO: 6080385 - DNA, 25 bp, Homo sapien
acaggggtcagctgcttctgtccat

SEQ ID NO: 6080386 - DNA, 25 bp, Homo sapien
catcccacatctctaccccacccca

SEQ ID NO: 6080387 - DNA, 25 bp, Homo sapien
ttctcctcagcttctttcagccttc

SEQ ID NO: 6080388 - DNA, 25 bp, Homo sapien
cttgggacccccccttgagctggat

SEQ ID NO: 6080389 - DNA, 25 bp, Homo sapien
ggtggtccagtatttgagagatctc

SEQ ID NO: 6080390 - DNA, 25 bp, Homo sapien
gcctcagtattagtgtcagcccttg

SEQ ID NO: 6080391 - DNA, 25 bp, Homo sapien
gctcccttctcgtccccaacgccta

SEQ ID NO: 6080392 - DNA, 25 bp, Homo sapien
gtgccttccatagcctcagtattag

SEQ ID NO: 6080393 - DNA, 25 bp, Homo sapien
tggaccttcttttcctcagattact

SEQ ID NO: 6080394 - DNA, 25 bp, Homo sapien
ggaagtcctctactgtatgtgtttt

SEQ ID NO: 6080395 - DNA, 25 bp, Homo sapien
tccagattaattaagactgctgtcc

SEQ ID NO: 6080396 - DNA, 25 bp, Homo sapien
taagactgctgtccctcctacagaa

SEQ ID NO: 6080397 - DNA, 25 bp, Homo sapien
gtcagctgcttctgtccattggttg

SEQ ID NO: 6080398 - DNA, 25 bp, Homo sapien
tatcatactgtatgctgtctgtttg

SEQ ID NO: 6080399 - DNA, 25 bp, Homo sapien
agccctggaagtcctctactgtatg

SEQ ID NO: 6080400 - DNA, 25 bp, Homo sapien
attaattaagactgctgtccctcct

SEQ ID NO: 6080401 - DNA, 25 bp, Homo sapien
acatctctaccccaccccacctcag

SEQ ID NO: 6080402 - DNA, 25 bp, Homo sapien
gctccacatcccacatctctacccc

SEQ ID NO: 6080403 - DNA, 25 bp, Homo sapien
tcgtccccaacgcctaccctcctga

SEQ ID NO: 6080404 - DNA, 25 bp, Homo sapien
tttgagagatctcagggttccagat

SEQ ID NO: 6080405 - DNA, 25 bp, Homo sapien
ggacccccccttgagctggattcca

SEQ ID NO: 6080406 - DNA, 25 bp, Homo sapien
tgttgctggaccttcttttcctcag

SEQ ID NO: 6080407 - DNA, 25 bp, Homo sapien
tgttgagtctttcggagggcagcca

SEQ ID NO: 6080408 - DNA, 25 bp, Homo sapien
cggagggcagccaggatagacactt

SEQ ID NO: 6080409 - DNA, 25 bp, Homo sapien
acagaatcgcccttctcctcagctt

SEQ ID NO: 6080410 - DNA, 25 bp, Homo sapien
taatgtgtgccttccatagcctcag

SEQ ID NO: 6080411 - DNA, 25 bp, Homo sapien
gggtgcaaatcactgcttctgactc

SEQ ID NO: 6080412 - DNA, 25 bp, Homo sapien
cctcctacagaatcgcccttctcct

SEQ ID NO: 6080413 - DNA, 25 bp, Homo sapien
accctcctgacttctaaactccctg

SEQ ID NO: 6080414 - DNA, 25 bp, Homo sapien
tcgcccttctcctcagcttctttca

SEQ ID NO: 6080415 - DNA, 25 bp, Homo sapien
gggcctccagtctcttgaggattag

SEQ ID NO: 6080416 - DNA, 25 bp, Homo sapien
ctgtatgtgttttgggggcatcata

SEQ ID NO: 6080417 - DNA, 25 bp, Homo sapien
ctaccccaccccacctcagctccct

SEQ ID NO: 6080418 - DNA, 25 bp, Homo sapien
cattttttacactccatattccatt

SEQ ID NO: 6080419 - DNA, 25 bp, Homo sapien
cagactgctccacatcccacatctc

SEQ ID NO: 6080420 - DNA, 25 bp, Homo sapien
ccaacgcctaccctcctgacttcta

SEQ ID NO: 6080421 - DNA, 25 bp, Homo sapien
tggattccactttgggcctgttgct

SEQ ID NO: 6080422 - DNA, 25 bp, Homo sapien
ccatattccatttcctggccctccc

SEQ ID NO: 6080423 - DNA, 25 bp, Homo sapien
tccatagcctcagtattagtgtcag

SEQ ID NO: 6080424 - DNA, 25 bp, Homo sapien
ccagtatttgagagatctcagggtt

SEQ ID NO: 6080425 - DNA, 25 bp, Homo sapien
tccctggggcctccagtctcttgag

SEQ ID NO: 6080426 - DNA, 25 bp, Homo sapien
gtgttttgggggcatcatatcatac

SEQ ID NO: 6080427 - DNA, 25 bp, Homo sapien
gccctccctatccaacctcagactg

SEQ ID NO: 6080428 - DNA, 25 bp, Homo sapien
tccatttcctggccctccctatcca

SEQ ID NO: 6080429 - DNA, 25 bp, Homo sapien
gcatcatatcatactgtatgctgtc

SEQ ID NO: 6080430 - DNA, 25 bp, Homo sapien
ctgacttctaaactccctggggcct

SEQ ID NO: 6080431 - DNA, 25 bp, Homo sapien
cctaattcaacaacaggggtcagct

SEQ ID NO: 6080432 - DNA, 25 bp, Homo sapien
tcaacaacaggggtcagctgcttct

SEQ ID NO: 6080433 - DNA, 25 bp, Homo sapien
ccagtctcttgaggattaggtgcat

SEQ ID NO: 6080434 - DNA, 25 bp, Homo sapien
tacactccatattccatttcctggc

SEQ ID NO: 6080435 - DNA, 25 bp, Homo sapien
tcatctctgtatgaacacagccctg

SEQ ID NO: 6080436 - DNA, 25 bp, Homo sapien
tctaaactccctggggcctccagtc

SEQ ID NO: 6080437 - DNA, 25 bp, Homo sapien
ctgtttggtggtccagtatttgaga

SEQ ID NO: 6080438 - DNA, 25 bp, Homo sapien
tcagcttctttcagccttccctaat

SEQ ID NO: 6080439 - DNA, 25 bp, Homo sapien
aggatagacacttaatgtgtgcctt

SEQ ID NO: 6080440 - DNA, 25 bp, Homo sapien
caacctcagactgctccacatccca

SEQ ID NO: 6080441 - DNA, 25 bp, Homo sapien
agccttccctaattcaacaacaggg

SEQ ID NO: 6080442 - DNA, 25 bp, Homo sapien
ttaattcattttttacactccatat

SEQ ID NO: 6080443 - DNA, 25 bp, Homo sapien
tctttcagccttccctaattcaaca

SEQ ID NO: 6080444 - DNA, 25 bp, Homo sapien
ttgggggcatcatatcatactgtat

SEQ ID NO: 6080445 - DNA, 25 bp, Homo sapien
acctcagctcccttctcgtccccaa

SEQ ID NO: 6080446 - DNA, 25 bp, Homo sapien
cgcctaccctcctgacttctaaact

SEQ ID NO: 6080447 - DNA, 25 bp, Homo sapien
ccactttgggcctgttgctggacct

SEQ ID NO: 6080448 - DNA, 25 bp, Homo sapien
agatctcagggttccagattaatta

SEQ ID NO: 6080449 - DNA, 25 bp, Homo sapien
aacacacggcggatgttctcagtgt

SEQ ID NO: 6080450 - DNA, 25 bp, Homo sapien
cgaatgaagtacttggcccgggtca

SEQ ID NO: 6080451 - DNA, 25 bp, Homo sapien
aatgagggtagcagtagtgacgccc

SEQ ID NO: 6080452 - DNA, 25 bp, Homo sapien
gaacacacggcggatgttctcagtg

SEQ ID NO: 6080453 - DNA, 25 bp, Homo sapien
tgtccacagcgcaggtgaaatgagg

SEQ ID NO: 6080454 - DNA, 25 bp, Homo sapien
tcagtgtccacagcgcaggtgaaat

SEQ ID NO: 6080455 - DNA, 25 bp, Homo sapien
gggtagcagtagtgacgcccatctc

SEQ ID NO: 6080456 - DNA, 25 bp, Homo sapien
gtagcagtagtgacgcccatctcca

SEQ ID NO: 6080457 - DNA, 25 bp, Homo sapien
gagggtagcagtagtgacgcccatc

SEQ ID NO: 6080458 - DNA, 25 bp, Homo sapien
ctcagtgtccacagcgcaggtgaaa

SEQ ID NO: 6080459 - DNA, 25 bp, Homo sapien
agtagtgacgcccatctccactggc

SEQ ID NO: 6080460 - DNA, 25 bp, Homo sapien
tggcccgggtcacgcgtgggtcctc

SEQ ID NO: 6080461 - DNA, 25 bp, Homo sapien
atcactttcgctcaggtcctccaga

SEQ ID NO: 6080462 - DNA, 25 bp, Homo sapien
tcctgactgtggttagaactgatac

SEQ ID NO: 6080463 - DNA, 25 bp, Homo sapien
tctttgagtaaagggaggaatctcc

SEQ ID NO: 6080464 - DNA, 25 bp, Homo sapien
tccttggccaggagttcatattctt

SEQ ID NO: 6080465 - DNA, 25 bp, Homo sapien
gagagcttatcaatgagtattcggt

SEQ ID NO: 6080466 - DNA, 25 bp, Homo sapien
gaggaatctccccattgctactggg

SEQ ID NO: 6080467 - DNA, 25 bp, Homo sapien
tgataccagtgtccgagtctgtgtc

SEQ ID NO: 6080468 - DNA, 25 bp, Homo sapien
cctactgttgtttcggagtcctgac

SEQ ID NO: 6080469 - DNA, 25 bp, Homo sapien
cattgctactgggaacctcagattc

SEQ ID NO: 6080470 - DNA, 25 bp, Homo sapien
tcaattccatcactttcgctcaggt

SEQ ID NO: 6080471 - DNA, 25 bp, Homo sapien
tttctggatgccactcaaatgagag

SEQ ID NO: 6080472 - DNA, 25 bp, Homo sapien
tattcggtaatatttcagtcgttct

SEQ ID NO: 6080473 - DNA, 25 bp, Homo sapien
cgccgtaggcgctgtagtcgccact

SEQ ID NO: 6080474 - DNA, 25 bp, Homo sapien
ccgcgtggcacagcggcttcaacgg

SEQ ID NO: 6080475 - DNA, 25 bp, Homo sapien
agccatacacgtgtggccagccggt

SEQ ID NO: 6080476 - DNA, 25 bp, Homo sapien
gctgcccatggtagtcaactggttg

SEQ ID NO: 6080477 - DNA, 25 bp, Homo sapien
gctgtagtcgccactcgccatggag

SEQ ID NO: 6080478 - DNA, 25 bp, Homo sapien
tgcttgaagcccgagggctgcgcca

SEQ ID NO: 6080479 - DNA, 25 bp, Homo sapien
cgcgatgatgttctcgatggcgaag

SEQ ID NO: 6080480 - DNA, 25 bp, Homo sapien
gcttcaacggcacgccgtaggcgct

SEQ ID NO: 6080481 - DNA, 25 bp, Homo sapien
tattcccgcgcgatgatgttctcga

SEQ ID NO: 6080482 - DNA, 25 bp, Homo sapien
gccacgccgcccaagttgtaggcgg

SEQ ID NO: 6080483 - DNA, 25 bp, Homo sapien
atcatgccggcggagccatacacgt

SEQ ID NO: 6080484 - DNA, 25 bp, Homo sapien
ccaggcatcttgtattcccgcgcga

SEQ ID NO: 6080485 - DNA, 25 bp, Homo sapien
tgttgctgaaatagtccaagtgaca

SEQ ID NO: 6080486 - DNA, 25 bp, Homo sapien
catgttcaggatggacgggaccacg

SEQ ID NO: 6080487 - DNA, 25 bp, Homo sapien
tacaaataaagtgctacggtggttc

SEQ ID NO: 6080488 - DNA, 25 bp, Homo sapien
cagtgtgcacagaggtaatctggga

SEQ ID NO: 6080489 - DNA, 25 bp, Homo sapien
aaggacgtggtttccgcatgggctt

SEQ ID NO: 6080490 - DNA, 25 bp, Homo sapien
caaggcagaatatggtaagtgccat

SEQ ID NO: 6080491 - DNA, 25 bp, Homo sapien
tgtgctatgcaccacgcctagtgct

SEQ ID NO: 6080492 - DNA, 25 bp, Homo sapien
gagacagtaaaacgcaggcaccctt

SEQ ID NO: 6080493 - DNA, 25 bp, Homo sapien
tgacaaagagtcgagattagtgcta

SEQ ID NO: 6080494 - DNA, 25 bp, Homo sapien
gcccttggcaagcttacagtctaag

SEQ ID NO: 6080495 - DNA, 25 bp, Homo sapien
ccttatccggtggtctgtaatgtca

SEQ ID NO: 6080496 - DNA, 25 bp, Homo sapien
gatcccagtggttggtacatcaggg

SEQ ID NO: 6080497 - DNA, 25 bp, Homo sapien
tattaatggtaatccccagggcaac

SEQ ID NO: 6080498 - DNA, 25 bp, Homo sapien
tgaacagatggttataaattcagat

SEQ ID NO: 6080499 - DNA, 25 bp, Homo sapien
ccccagggcaactaccaagagaata

SEQ ID NO: 6080500 - DNA, 25 bp, Homo sapien
ggaaaacaggaccactttagagcaa

SEQ ID NO: 6080501 - DNA, 25 bp, Homo sapien
tcagatattaatggtaatccccagg

SEQ ID NO: 6080502 - DNA, 25 bp, Homo sapien
gcaaagtggcagacaaatcttactt

SEQ ID NO: 6080503 - DNA, 25 bp, Homo sapien
caactagattgaaattaaaaggatg

SEQ ID NO: 6080504 - DNA, 25 bp, Homo sapien
tgtatacttgaaattaagctggtat

SEQ ID NO: 6080505 - DNA, 25 bp, Homo sapien
ggaccactttagagcaacatttttg

SEQ ID NO: 6080506 - DNA, 25 bp, Homo sapien
ccagggcaactaccaagagaataat

SEQ ID NO: 6080507 - DNA, 25 bp, Homo sapien
gatattaatggtaatccccagggca

SEQ ID NO: 6080508 - DNA, 25 bp, Homo sapien
tagcaaagtggcagacaaatcttac

SEQ ID NO: 6080509 - DNA, 25 bp, Homo sapien
gattctattcaggttgtcccgggcg

SEQ ID NO: 6080510 - DNA, 25 bp, Homo sapien
ttttctcaggcaagccgcacacaga

SEQ ID NO: 6080511 - DNA, 25 bp, Homo sapien
tgaatatttccgactcacctggctt

SEQ ID NO: 6080512 - DNA, 25 bp, Homo sapien
tcttgagttgcttcagctccacggg

SEQ ID NO: 6080513 - DNA, 25 bp, Homo sapien
tttcctgtggaggtagcccactgcc

SEQ ID NO: 6080514 - DNA, 25 bp, Homo sapien
aagatggtctttctcggtgtcgtcg

SEQ ID NO: 6080515 - DNA, 25 bp, Homo sapien
gttcaagcctaggttcacagcgcgg

SEQ ID NO: 6080516 - DNA, 25 bp, Homo sapien
cacagcgcggatgttcttgagttgc

SEQ ID NO: 6080517 - DNA, 25 bp, Homo sapien
gttcagtaggttgtcatggagccct

SEQ ID NO: 6080518 - DNA, 25 bp, Homo sapien
cctacctcgtggagctccttcaggg

SEQ ID NO: 6080519 - DNA, 25 bp, Homo sapien
ccaggagtccttggccatggaattg

SEQ ID NO: 6080520 - DNA, 25 bp, Homo sapien
tcccgggcgttttggcattttctca

SEQ ID NO: 6080521 - DNA, 25 bp, Homo sapien
gagtcctgataagcctgtcgcctga

SEQ ID NO: 6080522 - DNA, 25 bp, Homo sapien
ccttgggccctagtcagctgcgagg

SEQ ID NO: 6080523 - DNA, 25 bp, Homo sapien
cctgggtgatgacccattctcctgg

SEQ ID NO: 6080524 - DNA, 25 bp, Homo sapien
ctacagcagggtcttcagcagtgga

SEQ ID NO: 6080525 - DNA, 25 bp, Homo sapien
tgataagcctgtcgcctgactgcac

SEQ ID NO: 6080526 - DNA, 25 bp, Homo sapien
ccccagggattgaggcagggagtcc

SEQ ID NO: 6080527 - DNA, 25 bp, Homo sapien
cttcttgagtgtccgtccccttggg

SEQ ID NO: 6080528 - DNA, 25 bp, Homo sapien
tcagctctacagcagggtcttcagc

SEQ ID NO: 6080529 - DNA, 25 bp, Homo sapien
agagcctgggtgatgacccattctc

SEQ ID NO: 6080530 - DNA, 25 bp, Homo sapien
gcaccatgcccaggaatactccgca

SEQ ID NO: 6080531 - DNA, 25 bp, Homo sapien
tgccaggaggaatattcctgaagcc

SEQ ID NO: 6080532 - DNA, 25 bp, Homo sapien
gggctgcggccggtgctacttccct

SEQ ID NO: 6080533 - DNA, 25 bp, Homo sapien
caaccgagtacatgggtcacagggt

SEQ ID NO: 6080534 - DNA, 25 bp, Homo sapien
tggagggtgcaacaggacatggaac

SEQ ID NO: 6080535 - DNA, 25 bp, Homo sapien
catctgcaagacacacagcagcgag

SEQ ID NO: 6080536 - DNA, 25 bp, Homo sapien
tcctacaaccgagtacatgggtcac

SEQ ID NO: 6080537 - DNA, 25 bp, Homo sapien
cacacctgcacacaggatggtggtg

SEQ ID NO: 6080538 - DNA, 25 bp, Homo sapien
acacagcagcgagagtaggcaccct

SEQ ID NO: 6080539 - DNA, 25 bp, Homo sapien
accagacggagaacacccctgaata

SEQ ID NO: 6080540 - DNA, 25 bp, Homo sapien
acagcgggtaccagacggagaacac

SEQ ID NO: 6080541 - DNA, 25 bp, Homo sapien
ccctgaatatacatagctgtacatg

SEQ ID NO: 6080542 - DNA, 25 bp, Homo sapien
tagatgcccacagcgggtaccagac

SEQ ID NO: 6080543 - DNA, 25 bp, Homo sapien
aggacatggaacatgcccctccgtg

SEQ ID NO: 6080544 - DNA, 25 bp, Homo sapien
gtctgcagcatcacaggtcatgcag

SEQ ID NO: 6080545 - DNA, 25 bp, Homo sapien
gccagcagaacccagtaccaacccc

SEQ ID NO: 6080546 - DNA, 25 bp, Homo sapien
caccaggtcctgttgccttgtcgcc

SEQ ID NO: 6080547 - DNA, 25 bp, Homo sapien
tctgtggagggcagatactccacca

SEQ ID NO: 6080548 - DNA, 25 bp, Homo sapien
tccaagctccttgccgtctttcctc

SEQ ID NO: 6080549 - DNA, 25 bp, Homo sapien
actgggaggcgcctgagtgcgatcc

SEQ ID NO: 6080550 - DNA, 25 bp, Homo sapien
gaggcgcctgagtgcgatccagcct

SEQ ID NO: 6080551 - DNA, 25 bp, Homo sapien
tctcctcaggccggacctggctcct

SEQ ID NO: 6080552 - DNA, 25 bp, Homo sapien
aggcgcctgagtgcgatccagcctg

SEQ ID NO: 6080553 - DNA, 25 bp, Homo sapien
cacagccactccaaagccagcagaa

SEQ ID NO: 6080554 - DNA, 25 bp, Homo sapien
tgcccaccctacagctcttgctctg

SEQ ID NO: 6080555 - DNA, 25 bp, Homo sapien
ccaggtcctgttgccttgtcgccca

SEQ ID NO: 6080556 - DNA, 25 bp, Homo sapien
ctagagggaggacccgagccgaggg

SEQ ID NO: 6080557 - DNA, 25 bp, Homo sapien
gaagtagcagtgtatgtgatctgtc

SEQ ID NO: 6080558 - DNA, 25 bp, Homo sapien
caaacccattaaacagcgtctcaag

SEQ ID NO: 6080559 - DNA, 25 bp, Homo sapien
tcatccacattgcagtgatccctgc

SEQ ID NO: 6080560 - DNA, 25 bp, Homo sapien
ttcttggcaggttttagcatttctt

SEQ ID NO: 6080561 - DNA, 25 bp, Homo sapien
ctccagtgatggtgttggcagtatg

SEQ ID NO: 6080562 - DNA, 25 bp, Homo sapien
ttttagcatttcttggacgtcttca

SEQ ID NO: 6080563 - DNA, 25 bp, Homo sapien
ggtgttactcttggtagaagtagca

SEQ ID NO: 6080564 - DNA, 25 bp, Homo sapien
tcttggacgtcttcattaagtacat

SEQ ID NO: 6080565 - DNA, 25 bp, Homo sapien
tcacagcactagaattcttggcagg

SEQ ID NO: 6080566 - DNA, 25 bp, Homo sapien
ttaaacagcgtctcaagccaataaa

SEQ ID NO: 6080567 - DNA, 25 bp, Homo sapien
gaatgatgacaaagttggtattagc

SEQ ID NO: 6080568 - DNA, 25 bp, Homo sapien
tggtattagcaaaaaagctagtgct

SEQ ID NO: 6080569 - DNA, 25 bp, Homo sapien
cattggattgacactaatgtgtagg

SEQ ID NO: 6080570 - DNA, 25 bp, Homo sapien
tgtctacaaaattgcaggctgtcac

SEQ ID NO: 6080571 - DNA, 25 bp, Homo sapien
gctattcagagaagctgagctatcc

SEQ ID NO: 6080572 - DNA, 25 bp, Homo sapien
cctgctcccggttctactgtggtga

SEQ ID NO: 6080573 - DNA, 25 bp, Homo sapien
tgactctactgaggctcttctgtgc

SEQ ID NO: 6080574 - DNA, 25 bp, Homo sapien
gagaggccctcaagttaagacctga

SEQ ID NO: 6080575 - DNA, 25 bp, Homo sapien
gacagataagagacaaccattggat

SEQ ID NO: 6080576 - DNA, 25 bp, Homo sapien
tgctcatgggacaagctatcgcagg

SEQ ID NO: 6080577 - DNA, 25 bp, Homo sapien
caggatgttagtaccggagaggccc

SEQ ID NO: 6080578 - DNA, 25 bp, Homo sapien
cagacaggttagttgtcctatgcaa

SEQ ID NO: 6080579 - DNA, 25 bp, Homo sapien
gctgcagcaggacttgactctactg

SEQ ID NO: 6080580 - DNA, 25 bp, Homo sapien
acaaagttacacagacaggttagtt

SEQ ID NO: 6080581 - DNA, 25 bp, Homo sapien
ccttgtttttctggctggtcttgaa

SEQ ID NO: 6080582 - DNA, 25 bp, Homo sapien
ggctcaagcaatacttccacctcag

SEQ ID NO: 6080583 - DNA, 25 bp, Homo sapien
tatttttactagtcaccatgttggc

SEQ ID NO: 6080584 - DNA, 25 bp, Homo sapien
gccgcacctggctttgaagagcaat

SEQ ID NO: 6080585 - DNA, 25 bp, Homo sapien
gaagagcaattatatggtgtgtgaa

SEQ ID NO: 6080586 - DNA, 25 bp, Homo sapien
tgcaccatcacactcggctaatttt

SEQ ID NO: 6080587 - DNA, 25 bp, Homo sapien
catgagctgccgcacctggctttga

SEQ ID NO: 6080588 - DNA, 25 bp, Homo sapien
ggcttaagtgatcctcccttcttgg

SEQ ID NO: 6080589 - DNA, 25 bp, Homo sapien
gattctcctgctacagcttcctgag

SEQ ID NO: 6080590 - DNA, 25 bp, Homo sapien
tatttcttgcatagacgtggcttca

SEQ ID NO: 6080591 - DNA, 25 bp, Homo sapien
ggaccacaggtgtgcaccatcacac

SEQ ID NO: 6080592 - DNA, 25 bp, Homo sapien
tcatttctgagaaagggtctcactc

SEQ ID NO: 6080593 - DNA, 25 bp, Homo sapien
cagcccgaggtgttgatgctgccgc

SEQ ID NO: 6080594 - DNA, 25 bp, Homo sapien
cagggggcgaggcttgaggtgcttt

SEQ ID NO: 6080595 - DNA, 25 bp, Homo sapien
acttcagctatctcacccaccacct

SEQ ID NO: 6080596 - DNA, 25 bp, Homo sapien
gtaggagcaggcaagccagcgccta

SEQ ID NO: 6080597 - DNA, 25 bp, Homo sapien
gcgcggcgattcagcgagaacaccc

SEQ ID NO: 6080598 - DNA, 25 bp, Homo sapien
ccgctgcagccgcgccaactgccga

SEQ ID NO: 6080599 - DNA, 25 bp, Homo sapien
tgccgcgtggcaggcatcacctggc

SEQ ID NO: 6080600 - DNA, 25 bp, Homo sapien
agacgtacagcagcgtgttgttcag

SEQ ID NO: 6080601 - DNA, 25 bp, Homo sapien
ctacaaggggtcagggggcgaggct

SEQ ID NO: 6080602 - DNA, 25 bp, Homo sapien
tcggcgccttggcgcgctggatcaa

SEQ ID NO: 6080603 - DNA, 25 bp, Homo sapien
gtgctttggccgacagccagcccgg

SEQ ID NO: 6080604 - DNA, 25 bp, Homo sapien
cgcgtagcccacgtcggccggtgat

SEQ ID NO: 6080605 - DNA, 25 bp, Homo sapien
cagcacaacctgcaggtgctacgga

SEQ ID NO: 6080606 - DNA, 25 bp, Homo sapien
gtcaaaggcattgcgcggcgattca

SEQ ID NO: 6080607 - DNA, 25 bp, Homo sapien
ctgcgcccgttcgtcaaaggcattg

SEQ ID NO: 6080608 - DNA, 25 bp, Homo sapien
gccgacccgctgcagccgcgccaac

SEQ ID NO: 6080609 - DNA, 25 bp, Homo sapien
ttcgaccagcccgaggtgttgatgc

SEQ ID NO: 6080610 - DNA, 25 bp, Homo sapien
ggtaatacgccttgccctccggcga

SEQ ID NO: 6080611 - DNA, 25 bp, Homo sapien
ctacggagcaagttcgaccagcccg

SEQ ID NO: 6080612 - DNA, 25 bp, Homo sapien
gcgaggcttgaggtgctttggccga

SEQ ID NO: 6080613 - DNA, 25 bp, Homo sapien
ttccagctccgggtcggacaaatcc

SEQ ID NO: 6080614 - DNA, 25 bp, Homo sapien
gctccgggtcggacaaatcccgata

SEQ ID NO: 6080615 - DNA, 25 bp, Homo sapien
ccggcgactcggcaaacgtcgcgaa

SEQ ID NO: 6080616 - DNA, 25 bp, Homo sapien
accacctgacctgactcaccccact

SEQ ID NO: 6080617 - DNA, 25 bp, Homo sapien
actgccgaccgcctgggtcggcgcc

SEQ ID NO: 6080618 - DNA, 25 bp, Homo sapien
cctggaagccgacccgctgcagccg

SEQ ID NO: 6080619 - DNA, 25 bp, Homo sapien
gatctttgtcgatctgctgcatcaa

SEQ ID NO: 6080620 - DNA, 25 bp, Homo sapien
tgatgctgccgcgtggcaggcatca

SEQ ID NO: 6080621 - DNA, 25 bp, Homo sapien
actcaccccactgtaggagcaggca

SEQ ID NO: 6080622 - DNA, 25 bp, Homo sapien
acagcagcgtgttgttcagatcttt

SEQ ID NO: 6080623 - DNA, 25 bp, Homo sapien
agcaagttcgaccagcccgaggtgt

SEQ ID NO: 6080624 - DNA, 25 bp, Homo sapien
ccgttcgtcaaaggcattgcgcggc

SEQ ID NO: 6080625 - DNA, 25 bp, Homo sapien
acggtggactggcagcacaacctgc

SEQ ID NO: 6080626 - DNA, 25 bp, Homo sapien
cccgatagacgtacagcagcgtgtt

SEQ ID NO: 6080627 - DNA, 25 bp, Homo sapien
acctgctgcgcccgttcgtcaaagg

SEQ ID NO: 6080628 - DNA, 25 bp, Homo sapien
ccgcctggtaatacgccttgccctc

SEQ ID NO: 6080629 - DNA, 25 bp, Homo sapien
gttcaagccgttcctggaagccgac

SEQ ID NO: 6080630 - DNA, 25 bp, Homo sapien
gccttggcgcgctggatcaaacgca

SEQ ID NO: 6080631 - DNA, 25 bp, Homo sapien
cgattcagcgagaacacccacgatc

SEQ ID NO: 6080632 - DNA, 25 bp, Homo sapien
cagagattcgccagcaatacttcag

SEQ ID NO: 6080633 - DNA, 25 bp, Homo sapien
tggcaggcatcacctggccaatgag

SEQ ID NO: 6080634 - DNA, 25 bp, Homo sapien
gcgccaactgccgaccgcctgggtc

SEQ ID NO: 6080635 - DNA, 25 bp, Homo sapien
acgccttgccctccggcgactcggc

SEQ ID NO: 6080636 - DNA, 25 bp, Homo sapien
ttcgccagcaatacttcagctatct

SEQ ID NO: 6080637 - DNA, 25 bp, Homo sapien
acaaatcccgatagacgtacagcag

SEQ ID NO: 6080638 - DNA, 25 bp, Homo sapien
caagggccgcctggtaatacgcctt

SEQ ID NO: 6080639 - DNA, 25 bp, Homo sapien
ggtcggacaaatcccgatagacgta

SEQ ID NO: 6080640 - DNA, 25 bp, Homo sapien
ggccgacagccagcccggcacgaat

SEQ ID NO: 6080641 - DNA, 25 bp, Homo sapien
gcaggcaagccagcgcctacaaggg

SEQ ID NO: 6080642 - DNA, 25 bp, Homo sapien
cttgaggtgctttggccgacagcca

SEQ ID NO: 6080643 - DNA, 25 bp, Homo sapien
gaattcttccagctccgggtcggac

SEQ ID NO: 6080644 - DNA, 25 bp, Homo sapien
gcagccgcgccaactgccgaccgcc

SEQ ID NO: 6080645 - DNA, 25 bp, Homo sapien
cagggtgaggaagatatgacggtgg

SEQ ID NO: 6080646 - DNA, 25 bp, Homo sapien
gatatgacggtggactggcagcaca

SEQ ID NO: 6080647 - DNA, 25 bp, Homo sapien
tagcggcaagggccgcctggtaata

SEQ ID NO: 6080648 - DNA, 25 bp, Homo sapien
tcacccaccacctgacctgactcac

SEQ ID NO: 6080649 - DNA, 25 bp, Homo sapien
gactggcagcacaacctgcaggtgc

SEQ ID NO: 6080650 - DNA, 25 bp, Homo sapien
cccggcacgaatagcggcaagggcc

SEQ ID NO: 6080651 - DNA, 25 bp, Homo sapien
gaccgcctgggtcggcgccttggcg

SEQ ID NO: 6080652 - DNA, 25 bp, Homo sapien
tccggcgttcaagccgttcctggaa

SEQ ID NO: 6080653 - DNA, 25 bp, Homo sapien
tgacctgactcaccccactgtagga

SEQ ID NO: 6080654 - DNA, 25 bp, Homo sapien
agccagcccggcacgaatagcggca

SEQ ID NO: 6080655 - DNA, 25 bp, Homo sapien
ccgcaccgcgtagcccacgtcggcc

SEQ ID NO: 6080656 - DNA, 25 bp, Homo sapien
agcgagaacacccacgatccggcgt

SEQ ID NO: 6080657 - DNA, 25 bp, Homo sapien
aagccagcgcctacaaggggtcagg

SEQ ID NO: 6080658 - DNA, 25 bp, Homo sapien
gcattgcgcggcgattcagcgagaa

SEQ ID NO: 6080659 - DNA, 25 bp, Homo sapien
gccgttcctggaagccgacccgctg

SEQ ID NO: 6080660 - DNA, 25 bp, Homo sapien
aacctgcaggtgctacggagcaagt

SEQ ID NO: 6080661 - DNA, 25 bp, Homo sapien
atcgaagccgcaccgcgtagcccac

SEQ ID NO: 6080662 - DNA, 25 bp, Homo sapien
ctgggtcggcgccttggcgcgctgg

SEQ ID NO: 6080663 - DNA, 25 bp, Homo sapien
tggatcaaacgcatcgaagccgcac

SEQ ID NO: 6080664 - DNA, 25 bp, Homo sapien
agcccacgtcggccggtgattgtgc

SEQ ID NO: 6080665 - DNA, 25 bp, Homo sapien
cgactcggcaaacgtcgcgaattct

SEQ ID NO: 6080666 - DNA, 25 bp, Homo sapien
cccactgtaggagcaggcaagccag

SEQ ID NO: 6080667 - DNA, 25 bp, Homo sapien
gcgtgttgttcagatctttgtcgat

SEQ ID NO: 6080668 - DNA, 25 bp, Homo sapien
gcatcacctggccaatgagattcca

SEQ ID NO: 6080669 - DNA, 25 bp, Homo sapien
cgtcgcgaattcttccagctccggg

SEQ ID NO: 6080670 - DNA, 25 bp, Homo sapien
acctggccaatgagattccagagat

SEQ ID NO: 6080671 - DNA, 25 bp, Homo sapien
agattccagagattcgccagcaata

SEQ ID NO: 6080672 - DNA, 25 bp, Homo sapien
ccacgatccggcgttcaagccgttc

SEQ ID NO: 6080673 - DNA, 25 bp, Homo sapien
attgtgcagggtgaggaagatatga

SEQ ID NO: 6080674 - DNA, 25 bp, Homo sapien
cacgaatagcggcaagggccgcctg

SEQ ID NO: 6080675 - DNA, 25 bp, Homo sapien
agcaatacttcagctatctcaccca

SEQ ID NO: 6080676 - DNA, 25 bp, Homo sapien
ccaatgagattccagagattcgcca

SEQ ID NO: 6080677 - DNA, 25 bp, Homo sapien
gctatctcacccaccacctgacctg

SEQ ID NO: 6080678 - DNA, 25 bp, Homo sapien
aggtgttgatgctgccgcgtggcag

SEQ ID NO: 6080679 - DNA, 25 bp, Homo sapien
ccggtgattgtgcagggtgaggaag

SEQ ID NO: 6080680 - DNA, 25 bp, Homo sapien
tgccctccggcgactcggcaaacgt

SEQ ID NO: 6080681 - DNA, 25 bp, Homo sapien
aaacgcatcgaagccgcaccgcgta

SEQ ID NO: 6080682 - DNA, 25 bp, Homo sapien
gaggaagatatgacggtggactggc

SEQ ID NO: 6080683 - DNA, 25 bp, Homo sapien
gaacacccacgatccggcgttcaag

SEQ ID NO: 6080684 - DNA, 25 bp, Homo sapien
caggtgctacggagcaagttcgacc

SEQ ID NO: 6080685 - DNA, 25 bp, Homo sapien
tgttcagatctttgtcgatctgctg

SEQ ID NO: 6080686 - DNA, 25 bp, Homo sapien
cgtcggccggtgattgtgcagggtg

SEQ ID NO: 6080687 - DNA, 25 bp, Homo sapien
gcgcgctggatcaaacgcatcgaag

SEQ ID NO: 6080688 - DNA, 25 bp, Homo sapien
ggcaaacgtcgcgaattcttccagc

SEQ ID NO: 6080689 - DNA, 25 bp, Homo sapien
aatagtgatttatgagtgatgctca

SEQ ID NO: 6080690 - DNA, 25 bp, Homo sapien
tttgccttaagtcttcttgagggaa

SEQ ID NO: 6080691 - DNA, 25 bp, Homo sapien
tagtaatatttagtcagtaaaatgc

SEQ ID NO: 6080692 - DNA, 25 bp, Homo sapien
tcttgagggaatataaggaggttca

SEQ ID NO: 6080693 - DNA, 25 bp, Homo sapien
ccacacatagtaagttcaggtttgt

SEQ ID NO: 6080694 - DNA, 25 bp, Homo sapien
caagcacagagcatgactggcaggg

SEQ ID NO: 6080695 - DNA, 25 bp, Homo sapien
caaacaattcttaatgccatgagaa

SEQ ID NO: 6080696 - DNA, 25 bp, Homo sapien
tgcttgtgctgtattgttaggtgaa

SEQ ID NO: 6080697 - DNA, 25 bp, Homo sapien
aacaatgcttgtgtctaaatagtga

SEQ ID NO: 6080698 - DNA, 25 bp, Homo sapien
tgttaggtgaagtggcaagatatga

SEQ ID NO: 6080699 - DNA, 25 bp, Homo sapien
tattagaaacgtaaacaatgcttgt

SEQ ID NO: 6080700 - DNA, 25 bp, Homo sapien
cagggacacactcagagtagcaagc

SEQ ID NO: 6080701 - DNA, 25 bp, Homo sapien
tcatagacgggccatagcaagggaa

SEQ ID NO: 6080702 - DNA, 25 bp, Homo sapien
tatttccttagctcagcgcccagga

SEQ ID NO: 6080703 - DNA, 25 bp, Homo sapien
tcatgaccaggtagcccaggaggtc

SEQ ID NO: 6080704 - DNA, 25 bp, Homo sapien
tgaggaaagatgcagccaggtcaaa

SEQ ID NO: 6080705 - DNA, 25 bp, Homo sapien
caggtcaaagtggaggcaagcctca

SEQ ID NO: 6080706 - DNA, 25 bp, Homo sapien
caagcctcaggacagggaaagtcaa

SEQ ID NO: 6080707 - DNA, 25 bp, Homo sapien
taagagcaaacaccacgtgcctgat

SEQ ID NO: 6080708 - DNA, 25 bp, Homo sapien
aagagatctgccctctgggccacgg

SEQ ID NO: 6080709 - DNA, 25 bp, Homo sapien
cgtgcctgattatacaccgatggag

SEQ ID NO: 6080710 - DNA, 25 bp, Homo sapien
tgaactcctggactcaagagatctg

SEQ ID NO: 6080711 - DNA, 25 bp, Homo sapien
ggagctgaccattttgaccctgttc

SEQ ID NO: 6080712 - DNA, 25 bp, Homo sapien
taatcacctaagagcaaacaccacg

SEQ ID NO: 6080713 - DNA, 25 bp, Homo sapien
tatctagtttatgcagaagtgccct

SEQ ID NO: 6080714 - DNA, 25 bp, Homo sapien
ttcaattgtcaattcaattgtcccc

SEQ ID NO: 6080715 - DNA, 25 bp, Homo sapien
tgcagaagtgccctttggtactgtt

SEQ ID NO: 6080716 - DNA, 25 bp, Homo sapien
accttcatgtaattagaggaaaata

SEQ ID NO: 6080717 - DNA, 25 bp, Homo sapien
gagagtgtgatagtcccgattgaaa

SEQ ID NO: 6080718 - DNA, 25 bp, Homo sapien
aaaagtttagccagtaatagacatt

SEQ ID NO: 6080719 - DNA, 25 bp, Homo sapien
ggccctggcagttatctagtttatg

SEQ ID NO: 6080720 - DNA, 25 bp, Homo sapien
ctgacagtcccttgattgagaaagg

SEQ ID NO: 6080721 - DNA, 25 bp, Homo sapien
tttggtactgtttgataagcaacat

SEQ ID NO: 6080722 - DNA, 25 bp, Homo sapien
gggtgtaggccctggcagttatcta

SEQ ID NO: 6080723 - DNA, 25 bp, Homo sapien
ttctatcctatgtcttcaattgtca

SEQ ID NO: 6080724 - DNA, 25 bp, Homo sapien
aaatttagttggcaccttcatgtaa

SEQ ID NO: 6080725 - DNA, 25 bp, Homo sapien
tgccggtgtctcctgggcaggtgca

SEQ ID NO: 6080726 - DNA, 25 bp, Homo sapien
aggcgtctcctgggtggcctccgct

SEQ ID NO: 6080727 - DNA, 25 bp, Homo sapien
tgggcacagaccagggccccggcca

SEQ ID NO: 6080728 - DNA, 25 bp, Homo sapien
ttggtttcttcttgccttcaactca

SEQ ID NO: 6080729 - DNA, 25 bp, Homo sapien
tgagggtgacacagccacagaatcc

SEQ ID NO: 6080730 - DNA, 25 bp, Homo sapien
ggtctcggcaggggtctcagcaggg

SEQ ID NO: 6080731 - DNA, 25 bp, Homo sapien
ggtctcagcaggggtctcagtaggg

SEQ ID NO: 6080732 - DNA, 25 bp, Homo sapien
actgcttgtcgcctgggtcgctgcc

SEQ ID NO: 6080733 - DNA, 25 bp, Homo sapien
ttttaagccatccagaaaggagcca

SEQ ID NO: 6080734 - DNA, 25 bp, Homo sapien
cagtgacggctgtttttcccgtaag

SEQ ID NO: 6080735 - DNA, 25 bp, Homo sapien
ggtcgctgccggtgtctcctgggca

SEQ ID NO: 6080736 - DNA, 25 bp, Homo sapien
gggccccggccagggcagtcaggaa

SEQ ID NO: 6080737 - DNA, 25 bp, Homo sapien
gatttcgctggggtgatactgcttg

SEQ ID NO: 6080738 - DNA, 25 bp, Homo sapien
cgctggggtgatactgcttgtcgcc

SEQ ID NO: 6080739 - DNA, 25 bp, Homo sapien
tccacccgcagttggtttcttcttg

SEQ ID NO: 6080740 - DNA, 25 bp, Homo sapien
agcgatgagtttcatgctgcgggat

SEQ ID NO: 6080741 - DNA, 25 bp, Homo sapien
ggggtttcagcaggggtctcggcag

SEQ ID NO: 6080742 - DNA, 25 bp, Homo sapien
cggcaggggtctcggcaggggtctc

SEQ ID NO: 6080743 - DNA, 25 bp, Homo sapien
tgggtcgctgccgaagtggcctggg

SEQ ID NO: 6080744 - DNA, 25 bp, Homo sapien
ggagcaggggtttcagcaggggtct

SEQ ID NO: 6080745 - DNA, 25 bp, Homo sapien
cagaaaggagccagatttcgctggg

SEQ ID NO: 6080746 - DNA, 25 bp, Homo sapien
gaagtggcctgggtcgctgccggtg

SEQ ID NO: 6080747 - DNA, 25 bp, Homo sapien
aggcttggagtccagtgacggctgt

SEQ ID NO: 6080748 - DNA, 25 bp, Homo sapien
agaccagggccccggccagggcagt

SEQ ID NO: 6080749 - DNA, 25 bp, Homo sapien
gcagtcaggaagaggagagcgatga

SEQ ID NO: 6080750 - DNA, 25 bp, Homo sapien
tgtctcctgggcaggtgcaggcgtc

SEQ ID NO: 6080751 - DNA, 25 bp, Homo sapien
ctgggcaggtgcaggcgtctcctgg

SEQ ID NO: 6080752 - DNA, 25 bp, Homo sapien
agcaggggtctcagtaggggtttct

SEQ ID NO: 6080753 - DNA, 25 bp, Homo sapien
aggtgcaggcgtctcctgggtggcc

SEQ ID NO: 6080754 - DNA, 25 bp, Homo sapien
aggagagcgatgagtttcatgctgc

SEQ ID NO: 6080755 - DNA, 25 bp, Homo sapien
ctcacccgagcagaaccttgaactt

SEQ ID NO: 6080756 - DNA, 25 bp, Homo sapien
cgagcagaaccttgaacttattttt

SEQ ID NO: 6080757 - DNA, 25 bp, Homo sapien
cgctgccgaagtggcctgggtcgct

SEQ ID NO: 6080758 - DNA, 25 bp, Homo sapien
ttgaacttattttttaagccatcca

SEQ ID NO: 6080759 - DNA, 25 bp, Homo sapien
ggcaggggtctcagcaggggtctca

SEQ ID NO: 6080760 - DNA, 25 bp, Homo sapien
ctcctgggtggcctccgctggagca

SEQ ID NO: 6080761 - DNA, 25 bp, Homo sapien
ttgccttcaactcacccgagcagaa

SEQ ID NO: 6080762 - DNA, 25 bp, Homo sapien
gcgtcttgggcacagaccagggccc

SEQ ID NO: 6080763 - DNA, 25 bp, Homo sapien
aggaagaggagagcgatgagtttca

SEQ ID NO: 6080764 - DNA, 25 bp, Homo sapien
gccatgaggcttggagtccagtgac

SEQ ID NO: 6080765 - DNA, 25 bp, Homo sapien
tcttctaccggggcgtcttgggcac

SEQ ID NO: 6080766 - DNA, 25 bp, Homo sapien
tcagcaggggtctcggcaggggtct

SEQ ID NO: 6080767 - DNA, 25 bp, Homo sapien
ggtgatactgcttgtcgcctgggtc

SEQ ID NO: 6080768 - DNA, 25 bp, Homo sapien
gccatccagaaaggagccagatttc

SEQ ID NO: 6080769 - DNA, 25 bp, Homo sapien
catgctgcgggatgagggtgacaca

SEQ ID NO: 6080770 - DNA, 25 bp, Homo sapien
cttattttttaagccatccagaaag

SEQ ID NO: 6080771 - DNA, 25 bp, Homo sapien
ttgtcgcctgggtcgctgccgaagt

SEQ ID NO: 6080772 - DNA, 25 bp, Homo sapien
agccagatttcgctggggtgatact

SEQ ID NO: 6080773 - DNA, 25 bp, Homo sapien
ggggtctcggcaggggtctcggcag

SEQ ID NO: 6080774 - DNA, 25 bp, Homo sapien
cgtaaggaaattccacccgcagttg

SEQ ID NO: 6080775 - DNA, 25 bp, Homo sapien
ccgcagttggtttcttcttgccttc

SEQ ID NO: 6080776 - DNA, 25 bp, Homo sapien
tcttcttgccttcaactcacccgag

SEQ ID NO: 6080777 - DNA, 25 bp, Homo sapien
ttcaactcacccgagcagaaccttg

SEQ ID NO: 6080778 - DNA, 25 bp, Homo sapien
ctccgctggagcaggggtttcagca

SEQ ID NO: 6080779 - DNA, 25 bp, Homo sapien
accggggcgtcttgggcacagacca

SEQ ID NO: 6080780 - DNA, 25 bp, Homo sapien
gcgggatgagggtgacacagccaca

SEQ ID NO: 6080781 - DNA, 25 bp, Homo sapien
ggagtccagtgacggctgtttttcc

SEQ ID NO: 6080782 - DNA, 25 bp, Homo sapien
gagtttcatgctgcgggatgagggt

SEQ ID NO: 6080783 - DNA, 25 bp, Homo sapien
ggtggcctccgctggagcaggggtt

SEQ ID NO: 6080784 - DNA, 25 bp, Homo sapien
gcctgggtcgctgccggtgtctcct

SEQ ID NO: 6080785 - DNA, 25 bp, Homo sapien
ccaatgctttaaaggagatgttatc

SEQ ID NO: 6080786 - DNA, 25 bp, Homo sapien
tattagcagagttcccttgctagca

SEQ ID NO: 6080787 - DNA, 25 bp, Homo sapien
caagggctcgcttctgcaagtggaa

SEQ ID NO: 6080788 - DNA, 25 bp, Homo sapien
acaatgtccagttagattgtccttc

SEQ ID NO: 6080789 - DNA, 25 bp, Homo sapien
gaatctcagcagatctccttaaaga

SEQ ID NO: 6080790 - DNA, 25 bp, Homo sapien
taatttgaccttaaagactatgacc

SEQ ID NO: 6080791 - DNA, 25 bp, Homo sapien
cagtatgatccctggtatttggcaa

SEQ ID NO: 6080792 - DNA, 25 bp, Homo sapien
tcactgaacttgagtctcatactta

SEQ ID NO: 6080793 - DNA, 25 bp, Homo sapien
tgcaagtggaaatggctccctctag

SEQ ID NO: 6080794 - DNA, 25 bp, Homo sapien
gactagctgaaatcagactgattcc

SEQ ID NO: 6080795 - DNA, 25 bp, Homo sapien
gctagcagtttctatgacaaacaac

SEQ ID NO: 6080796 - DNA, 25 bp, Homo sapien
cacacagagttgcttcaaaagatgc

SEQ ID NO: 6080797 - DNA, 25 bp, Homo sapien
gagccagaccaaaactgatgagcag

SEQ ID NO: 6080798 - DNA, 25 bp, Homo sapien
tccattcatctgtttgtcgattttc

SEQ ID NO: 6080799 - DNA, 25 bp, Homo sapien
ctctttacccaacaagtgcgttaat

SEQ ID NO: 6080800 - DNA, 25 bp, Homo sapien
gcgttaattgttgtcgcgcagtatc

SEQ ID NO: 6080801 - DNA, 25 bp, Homo sapien
agagttatgcttaaatggctacctc

SEQ ID NO: 6080802 - DNA, 25 bp, Homo sapien
atgcttaaatggctacctctttacc

SEQ ID NO: 6080803 - DNA, 25 bp, Homo sapien
tgttcaggcatcaccacgacttctt

SEQ ID NO: 6080804 - DNA, 25 bp, Homo sapien
aactgatgagcagccaaattatagc

SEQ ID NO: 6080805 - DNA, 25 bp, Homo sapien
tgtttatcaactttaacgtaggcca

SEQ ID NO: 6080806 - DNA, 25 bp, Homo sapien
gtgaagtccattcatctgtttgtcg

SEQ ID NO: 6080807 - DNA, 25 bp, Homo sapien
tagataaaagctgtgaagtccattc

SEQ ID NO: 6080808 - DNA, 25 bp, Homo sapien
agtcagaatactccaacccatggaa

SEQ ID NO: 6080809 - DNA, 25 bp, Homo sapien
catggaagtgtcattcagcaacaaa

SEQ ID NO: 6080810 - DNA, 25 bp, Homo sapien
acttgctgttcaggcatcaccacga

SEQ ID NO: 6080811 - DNA, 25 bp, Homo sapien
caataccatgaatagataaaagctg

SEQ ID NO: 6080812 - DNA, 25 bp, Homo sapien
tacccaacaagtgcgttaattgttg

SEQ ID NO: 6080813 - DNA, 25 bp, Homo sapien
tatagcaaccgcagtcagaatactc

SEQ ID NO: 6080814 - DNA, 25 bp, Homo sapien
acaagtgcgttaattgttgtcgcgc

SEQ ID NO: 6080815 - DNA, 25 bp, Homo sapien
catctgtttgtcgattttcaggcag

SEQ ID NO: 6080816 - DNA, 25 bp, Homo sapien
ttaacgtaggccacttgctgttcag

SEQ ID NO: 6080817 - DNA, 25 bp, Homo sapien
actagggacgaaagatagcgcggct

SEQ ID NO: 6080818 - DNA, 25 bp, Homo sapien
taaaactagggacgaaagatagcgc

SEQ ID NO: 6080819 - DNA, 25 bp, Homo sapien
tttgtcgattttcaggcaggcttaa

SEQ ID NO: 6080820 - DNA, 25 bp, Homo sapien
tcattaatctgctgtttatcaactt

SEQ ID NO: 6080821 - DNA, 25 bp, Homo sapien
aaagctgtgaagtccattcatctgt

SEQ ID NO: 6080822 - DNA, 25 bp, Homo sapien
ttttactttataagagttatgctta

SEQ ID NO: 6080823 - DNA, 25 bp, Homo sapien
tcgacattttactttataagagtta

SEQ ID NO: 6080824 - DNA, 25 bp, Homo sapien
aatactccaacccatggaagtgtca

SEQ ID NO: 6080825 - DNA, 25 bp, Homo sapien
aaccgcagtcagaatactccaaccc

SEQ ID NO: 6080826 - DNA, 25 bp, Homo sapien
taaatggctacctctttacccaaca

SEQ ID NO: 6080827 - DNA, 25 bp, Homo sapien
atctgctgtttatcaactttaacgt

SEQ ID NO: 6080828 - DNA, 25 bp, Homo sapien
ccaaattatagcaaccgcagtcaga

SEQ ID NO: 6080829 - DNA, 25 bp, Homo sapien
tttataagagttatgcttaaatggc

SEQ ID NO: 6080830 - DNA, 25 bp, Homo sapien
gcggctgagccagaccaaaactgat

SEQ ID NO: 6080831 - DNA, 25 bp, Homo sapien
attgttgtcgcgcagtatcattaat

SEQ ID NO: 6080832 - DNA, 25 bp, Homo sapien
gagcagccaaattatagcaaccgca

SEQ ID NO: 6080833 - DNA, 25 bp, Homo sapien
ccgcgtcgacattttactttataag

SEQ ID NO: 6080834 - DNA, 25 bp, Homo sapien
ggctacctctttacccaacaagtgc

SEQ ID NO: 6080835 - DNA, 25 bp, Homo sapien
gcagtatcattaatctgctgtttat

SEQ ID NO: 6080836 - DNA, 25 bp, Homo sapien
tgtcgcgcagtatcattaatctgct

SEQ ID NO: 6080837 - DNA, 25 bp, Homo sapien
gaccaaaactgatgagcagccaaat

SEQ ID NO: 6080838 - DNA, 25 bp, Homo sapien
taggccacttgctgttcaggcatca

SEQ ID NO: 6080839 - DNA, 25 bp, Homo sapien
cttcttcaataccatgaatagataa

SEQ ID NO: 6080840 - DNA, 25 bp, Homo sapien
ccaacccatggaagtgtcattcagc

SEQ ID NO: 6080841 - DNA, 25 bp, Homo sapien
tcaactttaacgtaggccacttgct

SEQ ID NO: 6080842 - DNA, 25 bp, Homo sapien
gatagcgcggctgagccagaccaaa

SEQ ID NO: 6080843 - DNA, 25 bp, Homo sapien
acgaaagatagcgcggctgagccag

SEQ ID NO: 6080844 - DNA, 25 bp, Homo sapien
caggcaggcttaaaactagggacga

SEQ ID NO: 6080845 - DNA, 25 bp, Homo sapien
agtgtcattcagcaacaaaagtttt

SEQ ID NO: 6080846 - DNA, 25 bp, Homo sapien
catgaatagataaaagctgtgaagt

SEQ ID NO: 6080847 - DNA, 25 bp, Homo sapien
ccacgacttcttcaataccatgaat

SEQ ID NO: 6080848 - DNA, 25 bp, Homo sapien
ggcatcaccacgacttcttcaatac

SEQ ID NO: 6080849 - DNA, 25 bp, Homo sapien
gattttcaggcaggcttaaaactag

SEQ ID NO: 6080850 - DNA, 25 bp, Homo sapien
gattgaatgctgattactgactgag

SEQ ID NO: 6080851 - DNA, 25 bp, Homo sapien
gaactgggaagttgagttacttgcc

SEQ ID NO: 6080852 - DNA, 25 bp, Homo sapien
ggattacaggcgcaagttaccacac

SEQ ID NO: 6080853 - DNA, 25 bp, Homo sapien
tccccattttacagaagaggaactg

SEQ ID NO: 6080854 - DNA, 25 bp, Homo sapien
cagcctgagggctcttttgaaaaca

SEQ ID NO: 6080855 - DNA, 25 bp, Homo sapien
gaactgttcgttgcataactgtcaa

SEQ ID NO: 6080856 - DNA, 25 bp, Homo sapien
tacaaagctcttcatgaactgttcg

SEQ ID NO: 6080857 - DNA, 25 bp, Homo sapien
tctcactgtgctaaggataaagaca

SEQ ID NO: 6080858 - DNA, 25 bp, Homo sapien
ggtttccccaagttgcccatgctgg

SEQ ID NO: 6080859 - DNA, 25 bp, Homo sapien
catgctggtccggaactcctgggct

SEQ ID NO: 6080860 - DNA, 25 bp, Homo sapien
gatcatgtcacttccctgcataaaa

SEQ ID NO: 6080861 - DNA, 25 bp, Homo sapien
gagtgcatggcgcaatcacagctga

SEQ ID NO: 6080862 - DNA, 25 bp, Homo sapien
gaggtctaggattttcattcgtggg

SEQ ID NO: 6080863 - DNA, 25 bp, Homo sapien
agcaccagggcaacacatagtagca

SEQ ID NO: 6080864 - DNA, 25 bp, Homo sapien
catttcttactgtggctccattcac

SEQ ID NO: 6080865 - DNA, 25 bp, Homo sapien
agttctgactggaaagagagaggtc

SEQ ID NO: 6080866 - DNA, 25 bp, Homo sapien
ccagggcaacacatagtagcaggag

SEQ ID NO: 6080867 - DNA, 25 bp, Homo sapien
gaggaaacatctgtaaaggcagaca

SEQ ID NO: 6080868 - DNA, 25 bp, Homo sapien
gaaactccatgaaagtttagctatg

SEQ ID NO: 6080869 - DNA, 25 bp, Homo sapien
gagaaagaggaaacatctgtaaagg

SEQ ID NO: 6080870 - DNA, 25 bp, Homo sapien
gagagaggtctaggattttcattcg

SEQ ID NO: 6080871 - DNA, 25 bp, Homo sapien
tgttccaagatcaagacctctgccc

SEQ ID NO: 6080872 - DNA, 25 bp, Homo sapien
gaaggagaaatagcatactggttta

SEQ ID NO: 6080873 - DNA, 25 bp, Homo sapien
gaaatagcatactggtttatctaag

SEQ ID NO: 6080874 - DNA, 25 bp, Homo sapien
tgtgtgcccagagcatcagactcca

SEQ ID NO: 6080875 - DNA, 25 bp, Homo sapien
gcaggacttacagagccgggacttc

SEQ ID NO: 6080876 - DNA, 25 bp, Homo sapien
tctaagtatctgttctgctcctacg

SEQ ID NO: 6080877 - DNA, 25 bp, Homo sapien
cagccagcggagtcgagtgatgcaa

SEQ ID NO: 6080878 - DNA, 25 bp, Homo sapien
ggtgaccaacacgaagagctctttt

SEQ ID NO: 6080879 - DNA, 25 bp, Homo sapien
catcagggtgatgcgctttacacga

SEQ ID NO: 6080880 - DNA, 25 bp, Homo sapien
agtgccctgggcagtcctaacatcc

SEQ ID NO: 6080881 - DNA, 25 bp, Homo sapien
tcctgctgggcttattcacttgctc

SEQ ID NO: 6080882 - DNA, 25 bp, Homo sapien
tatacttcagactaactcttgcgcc

SEQ ID NO: 6080883 - DNA, 25 bp, Homo sapien
agatggaccctacacatccaggaca

SEQ ID NO: 6080884 - DNA, 25 bp, Homo sapien
tcagagtaggtgaaccagacggacg

SEQ ID NO: 6080885 - DNA, 25 bp, Homo sapien
cagccagccattatctcaggcgatt

SEQ ID NO: 6080886 - DNA, 25 bp, Homo sapien
gcctgcggctacaccgatacgctca

SEQ ID NO: 6080887 - DNA, 25 bp, Homo sapien
gaaaaaggactgagcacacccagag

SEQ ID NO: 6080888 - DNA, 25 bp, Homo sapien
caaggaattgggcacgcgggttaat

SEQ ID NO: 6080889 - DNA, 25 bp, Homo sapien
cctgagtgaggatgcagcagcatga

SEQ ID NO: 6080890 - DNA, 25 bp, Homo sapien
caaggcttgtcggtgcccaaggaat

SEQ ID NO: 6080891 - DNA, 25 bp, Homo sapien
cggaccgctgctgcctgatccgttt

SEQ ID NO: 6080892 - DNA, 25 bp, Homo sapien
catcatgtagcgaacaccgtccttg

SEQ ID NO: 6080893 - DNA, 25 bp, Homo sapien
ggtgcccaaggaattgggcacgcgg

SEQ ID NO: 6080894 - DNA, 25 bp, Homo sapien
agcgctgaaagtgccggacccaaag

SEQ ID NO: 6080895 - DNA, 25 bp, Homo sapien
attgcttcatcgaacacagcgcaaa

SEQ ID NO: 6080896 - DNA, 25 bp, Homo sapien
aaaatgtggaccgaggacagcgtgc

SEQ ID NO: 6080897 - DNA, 25 bp, Homo sapien
gtgcaggcggtgcaattctttccaa

SEQ ID NO: 6080898 - DNA, 25 bp, Homo sapien
gaaagtgccggacccaaaggtgcag

SEQ ID NO: 6080899 - DNA, 25 bp, Homo sapien
acagcgtgccccatcgcgaatgcgt

SEQ ID NO: 6080900 - DNA, 25 bp, Homo sapien
tactgctgccaaacccgcccaacgt

SEQ ID NO: 6080901 - DNA, 25 bp, Homo sapien
gtgaggatgcagcagcatgagcgaa

SEQ ID NO: 6080902 - DNA, 25 bp, Homo sapien
gcgtccattcaaccggaccgctgct

SEQ ID NO: 6080903 - DNA, 25 bp, Homo sapien
gaagttgaaaaaggactgagcacac

SEQ ID NO: 6080904 - DNA, 25 bp, Homo sapien
tgccaaacccgcccaacgtcatttc

SEQ ID NO: 6080905 - DNA, 25 bp, Homo sapien
cagagcaggcggcgcgtccattcaa

SEQ ID NO: 6080906 - DNA, 25 bp, Homo sapien
tcgtggaaatccattgcttcatcga

SEQ ID NO: 6080907 - DNA, 25 bp, Homo sapien
tgcgtggcctgcggctacaccgata

SEQ ID NO: 6080908 - DNA, 25 bp, Homo sapien
agggcctgtgatcaccaaaaagcaa

SEQ ID NO: 6080909 - DNA, 25 bp, Homo sapien
acgcgctggtgctgcaatccccggt

SEQ ID NO: 6080910 - DNA, 25 bp, Homo sapien
tgtgatcaccaaaaagcaatttatc

SEQ ID NO: 6080911 - DNA, 25 bp, Homo sapien
cagcatgagcgaagggcctgtgatc

SEQ ID NO: 6080912 - DNA, 25 bp, Homo sapien
gtagcgaacaccgtccttgaagcca

SEQ ID NO: 6080913 - DNA, 25 bp, Homo sapien
aaagcaatttatcgccggggccgtg

SEQ ID NO: 6080914 - DNA, 25 bp, Homo sapien
tcatttcgttcagcgcatcctcttt

SEQ ID NO: 6080915 - DNA, 25 bp, Homo sapien
aggcagtgcgtaatttgtcgatatc

SEQ ID NO: 6080916 - DNA, 25 bp, Homo sapien
gccggacccaaaggtgcaggcggtg

SEQ ID NO: 6080917 - DNA, 25 bp, Homo sapien
accgatacgctcaatgaccaaggct

SEQ ID NO: 6080918 - DNA, 25 bp, Homo sapien
cgtgcagcgagccggataagttgaa

SEQ ID NO: 6080919 - DNA, 25 bp, Homo sapien
gtccttgaagccattactgctgcca

SEQ ID NO: 6080920 - DNA, 25 bp, Homo sapien
tggccaaggcagtgcgtaatttgtc

SEQ ID NO: 6080921 - DNA, 25 bp, Homo sapien
atgcagcagcatgagcgaagggcct

SEQ ID NO: 6080922 - DNA, 25 bp, Homo sapien
gagcgaagggcctgtgatcaccaaa

SEQ ID NO: 6080923 - DNA, 25 bp, Homo sapien
gctgctgcctgatccgtttctactc

SEQ ID NO: 6080924 - DNA, 25 bp, Homo sapien
acccgcccaacgtcatttcgttcag

SEQ ID NO: 6080925 - DNA, 25 bp, Homo sapien
cacgcgggttaatacctcagcgctg

SEQ ID NO: 6080926 - DNA, 25 bp, Homo sapien
gcgcatcctctttgctccacccttg

SEQ ID NO: 6080927 - DNA, 25 bp, Homo sapien
cctctttgctccacccttgaatcac

SEQ ID NO: 6080928 - DNA, 25 bp, Homo sapien
ccggataagttgaaaatgtggaccg

SEQ ID NO: 6080929 - DNA, 25 bp, Homo sapien
tgctccacccttgaatcaccacccg

SEQ ID NO: 6080930 - DNA, 25 bp, Homo sapien
ggggccgtgtgccccgcgtgcagcg

SEQ ID NO: 6080931 - DNA, 25 bp, Homo sapien
tacctcagcgctgaaagtgccggac

SEQ ID NO: 6080932 - DNA, 25 bp, Homo sapien
caccaaaaagcaatttatcgccggg

SEQ ID NO: 6080933 - DNA, 25 bp, Homo sapien
aatgaccaaggcttgtcggtgccca

SEQ ID NO: 6080934 - DNA, 25 bp, Homo sapien
aacacagcgcaaacgcgctggtgct

SEQ ID NO: 6080935 - DNA, 25 bp, Homo sapien
ccttctgctcactgcctgtcgtgga

SEQ ID NO: 6080936 - DNA, 25 bp, Homo sapien
caattctttccaaatccgaagttga

SEQ ID NO: 6080937 - DNA, 25 bp, Homo sapien
ttgggcacgcgggttaatacctcag

SEQ ID NO: 6080938 - DNA, 25 bp, Homo sapien
cccaaaggtgcaggcggtgcaattc

SEQ ID NO: 6080939 - DNA, 25 bp, Homo sapien
tggtgctgcaatccccggtggccaa

SEQ ID NO: 6080940 - DNA, 25 bp, Homo sapien
cgaggacagcgtgccccatcgcgaa

SEQ ID NO: 6080941 - DNA, 25 bp, Homo sapien
accacccgatacatcgccgccatca

SEQ ID NO: 6080942 - DNA, 25 bp, Homo sapien
tcgcgaatgcgtggcctgcggctac

SEQ ID NO: 6080943 - DNA, 25 bp, Homo sapien
atttgtcgatatcggcgcgcatcat

SEQ ID NO: 6080944 - DNA, 25 bp, Homo sapien
cttgtcggtgcccaaggaattgggc

SEQ ID NO: 6080945 - DNA, 25 bp, Homo sapien
ccgtgtgccccgcgtgcagcgagcc

SEQ ID NO: 6080946 - DNA, 25 bp, Homo sapien
ggctacaccgatacgctcaatgacc

SEQ ID NO: 6080947 - DNA, 25 bp, Homo sapien
ggcgcgcatcatgtagcgaacaccg

SEQ ID NO: 6080948 - DNA, 25 bp, Homo sapien
acccttgaatcaccacccgatacat

SEQ ID NO: 6080949 - DNA, 25 bp, Homo sapien
agcggcctgagtgaggatgcagcag

SEQ ID NO: 6080950 - DNA, 25 bp, Homo sapien
ttcaaccggaccgctgctgcctgat

SEQ ID NO: 6080951 - DNA, 25 bp, Homo sapien
gatatcggcgcgcatcatgtagcga

SEQ ID NO: 6080952 - DNA, 25 bp, Homo sapien
aaatccattgcttcatcgaacacag

SEQ ID NO: 6080953 - DNA, 25 bp, Homo sapien
aacaccgtccttgaagccattactg

SEQ ID NO: 6080954 - DNA, 25 bp, Homo sapien
gtggaccgaggacagcgtgccccat

SEQ ID NO: 6080955 - DNA, 25 bp, Homo sapien
gaagccattactgctgccaaacccg

SEQ ID NO: 6080956 - DNA, 25 bp, Homo sapien
tgcgtaatttgtcgatatcggcgcg

SEQ ID NO: 6080957 - DNA, 25 bp, Homo sapien
tcatcgaacacagcgcaaacgcgct

SEQ ID NO: 6080958 - DNA, 25 bp, Homo sapien
ccccggtggccaaggcagtgcgtaa

SEQ ID NO: 6080959 - DNA, 25 bp, Homo sapien
gcggtgcaattctttccaaatccga

SEQ ID NO: 6080960 - DNA, 25 bp, Homo sapien
gcctgatccgtttctactccttctg

SEQ ID NO: 6080961 - DNA, 25 bp, Homo sapien
agcgagccggataagttgaaaatgt

SEQ ID NO: 6080962 - DNA, 25 bp, Homo sapien
ccaacgtcatttcgttcagcgcatc

SEQ ID NO: 6080963 - DNA, 25 bp, Homo sapien
ggttaatacctcagcgctgaaagtg

SEQ ID NO: 6080964 - DNA, 25 bp, Homo sapien
tgccccatcgcgaatgcgtggcctg

SEQ ID NO: 6080965 - DNA, 25 bp, Homo sapien
caaatccgaagttgaaaaaggactg

SEQ ID NO: 6080966 - DNA, 25 bp, Homo sapien
ggactgagcacacccagagcaggcg

SEQ ID NO: 6080967 - DNA, 25 bp, Homo sapien
gccccgcgtgcagcgagccggataa

SEQ ID NO: 6080968 - DNA, 25 bp, Homo sapien
tgcaatccccggtggccaaggcagt

SEQ ID NO: 6080969 - DNA, 25 bp, Homo sapien
acgctcaatgaccaaggcttgtcgg

SEQ ID NO: 6080970 - DNA, 25 bp, Homo sapien
gcgcaaacgcgctggtgctgcaatc

SEQ ID NO: 6080971 - DNA, 25 bp, Homo sapien
tgcctgtcgtggaaatccattgctt

SEQ ID NO: 6080972 - DNA, 25 bp, Homo sapien
agcacacccagagcaggcggcgcgt

SEQ ID NO: 6080973 - DNA, 25 bp, Homo sapien
gctcactgcctgtcgtggaaatcca

SEQ ID NO: 6080974 - DNA, 25 bp, Homo sapien
aggcggcgcgtccattcaaccggac

SEQ ID NO: 6080975 - DNA, 25 bp, Homo sapien
tctactccttctgctcactgcctgt

SEQ ID NO: 6080976 - DNA, 25 bp, Homo sapien
aagttgaaaatgtggaccgaggaca

SEQ ID NO: 6080977 - DNA, 25 bp, Homo sapien
tccgtttctactccttctgctcact

SEQ ID NO: 6080978 - DNA, 25 bp, Homo sapien
cgttcagcgcatcctctttgctcca

SEQ ID NO: 6080979 - DNA, 25 bp, Homo sapien
gaatcaccacccgatacatcgccgc

SEQ ID NO: 6080980 - DNA, 25 bp, Homo sapien
tgacattagaacctaacacactggt

SEQ ID NO: 6080981 - DNA, 25 bp, Homo sapien
tatgcattacctgacaccaaccttt

SEQ ID NO: 6080982 - DNA, 25 bp, Homo sapien
cgttacatgatttcaagggttgtcc

SEQ ID NO: 6080983 - DNA, 25 bp, Homo sapien
gaactgagagttctttgaaaaccat

SEQ ID NO: 6080984 - DNA, 25 bp, Homo sapien
gtacacatagagactgaaaacagga

SEQ ID NO: 6080985 - DNA, 25 bp, Homo sapien
tgaaaacatatcagctgtctacctt

SEQ ID NO: 6080986 - DNA, 25 bp, Homo sapien
tagggaagttgttgacatccaaatc

SEQ ID NO: 6080987 - DNA, 25 bp, Homo sapien
gacatccaaatcacagaaccaaggt

SEQ ID NO: 6080988 - DNA, 25 bp, Homo sapien
tgtgcttttatctgtcacgacagga

SEQ ID NO: 6080989 - DNA, 25 bp, Homo sapien
tattgaaatgaccaacgttacatga

SEQ ID NO: 6080990 - DNA, 25 bp, Homo sapien
tatctgtcacgacaggaaggtgtgg

SEQ ID NO: 6080991 - DNA, 25 bp, Homo sapien
caaattgggtcatgacattagaacc

SEQ ID NO: 6080992 - DNA, 25 bp, Homo sapien
cagctgggtctttagtgtcatacac

SEQ ID NO: 6080993 - DNA, 25 bp, Homo sapien
tagacgctgatacccctttatcttg

SEQ ID NO: 6080994 - DNA, 25 bp, Homo sapien
tagaccgtttccttgaacacctgac

SEQ ID NO: 6080995 - DNA, 25 bp, Homo sapien
tggccagggcgttctttagacactg

SEQ ID NO: 6080996 - DNA, 25 bp, Homo sapien
agcttgcgggtttgttggccactca

SEQ ID NO: 6080997 - DNA, 25 bp, Homo sapien
tggtaaatataccacacatcccaga

SEQ ID NO: 6080998 - DNA, 25 bp, Homo sapien
cactgccagaagtatgggtgagctt

SEQ ID NO: 6080999 - DNA, 25 bp, Homo sapien
taaaagcatcatagcaacagtctgg

SEQ ID NO: 6081000 - DNA, 25 bp, Homo sapien
aaaacccactcggtcacagctgggt

SEQ ID NO: 6081001 - DNA, 25 bp, Homo sapien
cacagagccttttccggagctggag

SEQ ID NO: 6081002 - DNA, 25 bp, Homo sapien
caacagtctggtgatattagacgct

SEQ ID NO: 6081003 - DNA, 25 bp, Homo sapien
gaacacctgactataggccacatga

SEQ ID NO: 6081004 - DNA, 25 bp, Homo sapien
gatggttttgccgatggtgctgctt

SEQ ID NO: 6081005 - DNA, 25 bp, Homo sapien
cactgggatggtgaaggttttctct

SEQ ID NO: 6081006 - DNA, 25 bp, Homo sapien
gggatcccactgtttatatcagtca

SEQ ID NO: 6081007 - DNA, 25 bp, Homo sapien
gattttggtagtcttcatgacctca

SEQ ID NO: 6081008 - DNA, 25 bp, Homo sapien
tctgtcgaccttgtgctctgtggtg

SEQ ID NO: 6081009 - DNA, 25 bp, Homo sapien
ttttgaaacagtagatttagcccag

SEQ ID NO: 6081010 - DNA, 25 bp, Homo sapien
tagtgatttaggtgctcatgctcga

SEQ ID NO: 6081011 - DNA, 25 bp, Homo sapien
cactgcagccatgagtgtgatggcc

SEQ ID NO: 6081012 - DNA, 25 bp, Homo sapien
ggctttccatgggtgtgtctcccgt

SEQ ID NO: 6081013 - DNA, 25 bp, Homo sapien
gtgtctcccgtaatctcatcatcca

SEQ ID NO: 6081014 - DNA, 25 bp, Homo sapien
tcatgctcgatagcaggcatgggca

SEQ ID NO: 6081015 - DNA, 25 bp, Homo sapien
cattcggatcaataacggttcatgc

SEQ ID NO: 6081016 - DNA, 25 bp, Homo sapien
taccaacacactaaagcaagaaggg

SEQ ID NO: 6081017 - DNA, 25 bp, Homo sapien
ttgctatatgcacagttccttgaga

SEQ ID NO: 6081018 - DNA, 25 bp, Homo sapien
caagaagggcaatggtaaccagggc

SEQ ID NO: 6081019 - DNA, 25 bp, Homo sapien
gcttcggttactactgctttcactg

SEQ ID NO: 6081020 - DNA, 25 bp, Homo sapien
tgatggcagccaaaggtaaattggg

SEQ ID NO: 6081021 - DNA, 25 bp, Homo sapien
ccttcgagatgggttcattgcttat

SEQ ID NO: 6081022 - DNA, 25 bp, Homo sapien
ttgagaagagcgatccattcctatg

SEQ ID NO: 6081023 - DNA, 25 bp, Homo sapien
cagtctcaatacaaacaggagtttc

SEQ ID NO: 6081024 - DNA, 25 bp, Homo sapien
tgggaaccatgcatactttataggg

SEQ ID NO: 6081025 - DNA, 25 bp, Homo sapien
tatagggtgaatcaggctccagggc

SEQ ID NO: 6081026 - DNA, 25 bp, Homo sapien
tctcttgctctcgattgagggtggt

SEQ ID NO: 6081027 - DNA, 25 bp, Homo sapien
tatggtgtgtattacaaactcctcc

SEQ ID NO: 6081028 - DNA, 25 bp, Homo sapien
gcagcctttgttgatgaccggacca

SEQ ID NO: 6081029 - DNA, 25 bp, Homo sapien
tcctggtggacagccttagaaggga

SEQ ID NO: 6081030 - DNA, 25 bp, Homo sapien
gagtaatacaatcaaacccacgggc

SEQ ID NO: 6081031 - DNA, 25 bp, Homo sapien
aagccagggccgcaagaggttgtcc

SEQ ID NO: 6081032 - DNA, 25 bp, Homo sapien
tgcgtcttagaaccagtggaacaga

SEQ ID NO: 6081033 - DNA, 25 bp, Homo sapien
gactctaaagtgctaccaatggaga

SEQ ID NO: 6081034 - DNA, 25 bp, Homo sapien
gagaagcatcctgattgagatgtga

SEQ ID NO: 6081035 - DNA, 25 bp, Homo sapien
tgttgatgaccggaccagtgcccgg

SEQ ID NO: 6081036 - DNA, 25 bp, Homo sapien
ggctgtaggtgacgcccctgtagct

SEQ ID NO: 6081037 - DNA, 25 bp, Homo sapien
ctctgttacacaggcggccggtgca

SEQ ID NO: 6081038 - DNA, 25 bp, Homo sapien
tgtagctgacgggttcctcaaggcc

SEQ ID NO: 6081039 - DNA, 25 bp, Homo sapien
gatgtgagaagctctgcgtcttaga

SEQ ID NO: 6081040 - DNA, 25 bp, Homo sapien
tcattggcaaactggtgtctgcccc

SEQ ID NO: 6081041 - DNA, 25 bp, Homo sapien
tggccacaggttaaattaaggtaga

SEQ ID NO: 6081042 - DNA, 25 bp, Homo sapien
aaatgcatcagaaaaatggcagcca

SEQ ID NO: 6081043 - DNA, 25 bp, Homo sapien
cagatgtgttgcttcattggcaaac

SEQ ID NO: 6081044 - DNA, 25 bp, Homo sapien
ggtctggagccagtctttagatcag

SEQ ID NO: 6081045 - DNA, 25 bp, Homo sapien
ttaaggtagaccaagtggactgcat

SEQ ID NO: 6081046 - DNA, 25 bp, Homo sapien
gaggaggttccgagaactcaaggaa

SEQ ID NO: 6081047 - DNA, 25 bp, Homo sapien
tggactgcataatcctggcagcccg

SEQ ID NO: 6081048 - DNA, 25 bp, Homo sapien
tggcaggtgtaggaaattttgagac

SEQ ID NO: 6081049 - DNA, 25 bp, Homo sapien
cacagtcacaacctcaaaggccttg

SEQ ID NO: 6081050 - DNA, 25 bp, Homo sapien
catttataaggtatgattgctcact

SEQ ID NO: 6081051 - DNA, 25 bp, Homo sapien
aaaatggcagccagatataccagcc

SEQ ID NO: 6081052 - DNA, 25 bp, Homo sapien
catttgcacactcaaactttcgaaa

SEQ ID NO: 6081053 - DNA, 25 bp, Homo sapien
gggcagagcagggaaagagggtgtc

SEQ ID NO: 6081054 - DNA, 25 bp, Homo sapien
ggagacctgtgactcccacttactg

SEQ ID NO: 6081055 - DNA, 25 bp, Homo sapien
agccccaggacctcagggcagcagt

SEQ ID NO: 6081056 - DNA, 25 bp, Homo sapien
tctgcaactagaaagacacactgtt

SEQ ID NO: 6081057 - DNA, 25 bp, Homo sapien
ttaagctgtttacatttgcacactc

SEQ ID NO: 6081058 - DNA, 25 bp, Homo sapien
tggacctcagagaagcagaaatggg

SEQ ID NO: 6081059 - DNA, 25 bp, Homo sapien
aggacctcagggcagcagtccccga

SEQ ID NO: 6081060 - DNA, 25 bp, Homo sapien
ggcagttaaacggggcagagcaggg

SEQ ID NO: 6081061 - DNA, 25 bp, Homo sapien
gcagcagtccccgaagaaggaggct

SEQ ID NO: 6081062 - DNA, 25 bp, Homo sapien
ccattagattcataacaagcagggc

SEQ ID NO: 6081063 - DNA, 25 bp, Homo sapien
aacagcctttcagcacgagactctt

SEQ ID NO: 6081064 - DNA, 25 bp, Homo sapien
gtgaatgaaccagtgctttaataat

SEQ ID NO: 6081065 - DNA, 25 bp, Homo sapien
ttactgggcagttaaacggggcaga

SEQ ID NO: 6081066 - DNA, 25 bp, Homo sapien
agcagggaaagagggtgtcagcacc

SEQ ID NO: 6081067 - DNA, 25 bp, Homo sapien
ttggtgcagacgtgggggttaagct

SEQ ID NO: 6081068 - DNA, 25 bp, Homo sapien
acgttgtgggaagtggttggtgcag

SEQ ID NO: 6081069 - DNA, 25 bp, Homo sapien
aagacacactgttcttcttcatagc

SEQ ID NO: 6081070 - DNA, 25 bp, Homo sapien
caaactttcgaaagatgactcctcc

SEQ ID NO: 6081071 - DNA, 25 bp, Homo sapien
gcagggcactctgcgttgctggaca

SEQ ID NO: 6081072 - DNA, 25 bp, Homo sapien
ctcccacttactgggcagttaaacg

SEQ ID NO: 6081073 - DNA, 25 bp, Homo sapien
tactgacgttggaacagcctttcag

SEQ ID NO: 6081074 - DNA, 25 bp, Homo sapien
gggtccagggcatcgctggtgttgc

SEQ ID NO: 6081075 - DNA, 25 bp, Homo sapien
gaactgacaggtggcgttactgacg

SEQ ID NO: 6081076 - DNA, 25 bp, Homo sapien
catttccagggcttcccacgacagg

SEQ ID NO: 6081077 - DNA, 25 bp, Homo sapien
cagctgtcggcattgcctggagacc

SEQ ID NO: 6081078 - DNA, 25 bp, Homo sapien
cagtccccgaagaaggaggctggca

SEQ ID NO: 6081079 - DNA, 25 bp, Homo sapien
gcacgagactcttagactcaatgtc

SEQ ID NO: 6081080 - DNA, 25 bp, Homo sapien
gaaccagtgctttaataatgaagaa

SEQ ID NO: 6081081 - DNA, 25 bp, Homo sapien
cactgttcttcttcatagcatttcc

SEQ ID NO: 6081082 - DNA, 25 bp, Homo sapien
ctgtgactcccacttactgggcagt

SEQ ID NO: 6081083 - DNA, 25 bp, Homo sapien
aaggaggctggcaagggccaagagg

SEQ ID NO: 6081084 - DNA, 25 bp, Homo sapien
ttcgaaagatgactcctccaagagt

SEQ ID NO: 6081085 - DNA, 25 bp, Homo sapien
gtggttggtgcagacgtgggggtta

SEQ ID NO: 6081086 - DNA, 25 bp, Homo sapien
agggaagctttggagcccacgttgt

SEQ ID NO: 6081087 - DNA, 25 bp, Homo sapien
ctcctccaagagtcttgttttcacc

SEQ ID NO: 6081088 - DNA, 25 bp, Homo sapien
gttcttcaggggagggtccagggca

SEQ ID NO: 6081089 - DNA, 25 bp, Homo sapien
gcagacgtgggggttaagctgttta

SEQ ID NO: 6081090 - DNA, 25 bp, Homo sapien
gagcccacgttgtgggaagtggttg

SEQ ID NO: 6081091 - DNA, 25 bp, Homo sapien
caggggagggtccagggcatcgctg

SEQ ID NO: 6081092 - DNA, 25 bp, Homo sapien
gattcataacaagcagggcactctg

SEQ ID NO: 6081093 - DNA, 25 bp, Homo sapien
tggcgttactgacgttggaacagcc

SEQ ID NO: 6081094 - DNA, 25 bp, Homo sapien
gctggcaagggccaagaggtagagg

SEQ ID NO: 6081095 - DNA, 25 bp, Homo sapien
gggtgctgggcaaagtgcagcccca

SEQ ID NO: 6081096 - DNA, 25 bp, Homo sapien
acaaggcagctgtcggcattgcctg

SEQ ID NO: 6081097 - DNA, 25 bp, Homo sapien
tagactcaatgtcattcttaagttc

SEQ ID NO: 6081098 - DNA, 25 bp, Homo sapien
cccgaagaaggaggctggcaagggc

SEQ ID NO: 6081099 - DNA, 25 bp, Homo sapien
taacaagcagggcactctgcgttgc

SEQ ID NO: 6081100 - DNA, 25 bp, Homo sapien
tgggcaaagtgcagccccaggacct

SEQ ID NO: 6081101 - DNA, 25 bp, Homo sapien
gaaagagggtgtcagcaccgcaggg

SEQ ID NO: 6081102 - DNA, 25 bp, Homo sapien
taataatgaagaacaaggcagctgt

SEQ ID NO: 6081103 - DNA, 25 bp, Homo sapien
cgttggaacagcctttcagcacgag

SEQ ID NO: 6081104 - DNA, 25 bp, Homo sapien
agatgactcctccaagagtcttgtt

SEQ ID NO: 6081105 - DNA, 25 bp, Homo sapien
agctttggagcccacgttgtgggaa

SEQ ID NO: 6081106 - DNA, 25 bp, Homo sapien
tcgctggtgttgctgcattcctttc

SEQ ID NO: 6081107 - DNA, 25 bp, Homo sapien
actagaaagacacactgttcttctt

SEQ ID NO: 6081108 - DNA, 25 bp, Homo sapien
gaagttccattagattcataacaag

SEQ ID NO: 6081109 - DNA, 25 bp, Homo sapien
tgggggttaagctgtttacatttgc

SEQ ID NO: 6081110 - DNA, 25 bp, Homo sapien
tcggcattgcctggagacctgtgac

SEQ ID NO: 6081111 - DNA, 25 bp, Homo sapien
tgtttacatttgcacactcaaactt

SEQ ID NO: 6081112 - DNA, 25 bp, Homo sapien
ctcagggcagcagtccccgaagaag

SEQ ID NO: 6081113 - DNA, 25 bp, Homo sapien
tgggaagtggttggtgcagacgtgg

SEQ ID NO: 6081114 - DNA, 25 bp, Homo sapien
ctttcagcacgagactcttagactc

SEQ ID NO: 6081115 - DNA, 25 bp, Homo sapien
gactcttagactcaatgtcattctt

SEQ ID NO: 6081116 - DNA, 25 bp, Homo sapien
gtgctttaataatgaagaacaaggc

SEQ ID NO: 6081117 - DNA, 25 bp, Homo sapien
gcgttgctggacacgttcttcaggg

SEQ ID NO: 6081118 - DNA, 25 bp, Homo sapien
ttcccacgacaggaagttccattag

SEQ ID NO: 6081119 - DNA, 25 bp, Homo sapien
gccaagaggtagagggaagctttgg

SEQ ID NO: 6081120 - DNA, 25 bp, Homo sapien
gtgctctggacctcagagaagcaga

SEQ ID NO: 6081121 - DNA, 25 bp, Homo sapien
cagggcttcccacgacaggaagttc

SEQ ID NO: 6081122 - DNA, 25 bp, Homo sapien
taaacggggcagagcagggaaagag

SEQ ID NO: 6081123 - DNA, 25 bp, Homo sapien
aggtagagggaagctttggagccca

SEQ ID NO: 6081124 - DNA, 25 bp, Homo sapien
tcatagcatttccagggcttcccac

SEQ ID NO: 6081125 - DNA, 25 bp, Homo sapien
gacacgttcttcaggggagggtcca

SEQ ID NO: 6081126 - DNA, 25 bp, Homo sapien
caatgtcattcttaagttctgcaac

SEQ ID NO: 6081127 - DNA, 25 bp, Homo sapien
acaggtggcgttactgacgttggaa

SEQ ID NO: 6081128 - DNA, 25 bp, Homo sapien
cagggggtgctctggacctcagaga

SEQ ID NO: 6081129 - DNA, 25 bp, Homo sapien
agggcatcgctggtgttgctgcatt

SEQ ID NO: 6081130 - DNA, 25 bp, Homo sapien
ttaagttctgcaactagaaagacac

SEQ ID NO: 6081131 - DNA, 25 bp, Homo sapien
tcattcttaagttctgcaactagaa

SEQ ID NO: 6081132 - DNA, 25 bp, Homo sapien
caagagtcttgttttcaccagacag

SEQ ID NO: 6081133 - DNA, 25 bp, Homo sapien
tttcaccagacaggaactgacaggt

SEQ ID NO: 6081134 - DNA, 25 bp, Homo sapien
gaaatggggtgctgggcaaagtgca

SEQ ID NO: 6081135 - DNA, 25 bp, Homo sapien
agacaggaactgacaggtggcgtta

SEQ ID NO: 6081136 - DNA, 25 bp, Homo sapien
ttgcctggagacctgtgactcccac

SEQ ID NO: 6081137 - DNA, 25 bp, Homo sapien
tcttcttcatagcatttccagggct

SEQ ID NO: 6081138 - DNA, 25 bp, Homo sapien
caagggccaagaggtagagggaagc

SEQ ID NO: 6081139 - DNA, 25 bp, Homo sapien
tcttgttttcaccagacaggaactg

SEQ ID NO: 6081140 - DNA, 25 bp, Homo sapien
cacactcaaactttcgaaagatgac

SEQ ID NO: 6081141 - DNA, 25 bp, Homo sapien
caccgcagggggtgctctggacctc

SEQ ID NO: 6081142 - DNA, 25 bp, Homo sapien
tgaagaacaaggcagctgtcggcat

SEQ ID NO: 6081143 - DNA, 25 bp, Homo sapien
cgacaggaagttccattagattcat

SEQ ID NO: 6081144 - DNA, 25 bp, Homo sapien
aagtgcagccccaggacctcagggc

SEQ ID NO: 6081145 - DNA, 25 bp, Homo sapien
cactctgcgttgctggacacgttct

SEQ ID NO: 6081146 - DNA, 25 bp, Homo sapien
gcgagaaaaagcaacgcgaaagctt

SEQ ID NO: 6081147 - DNA, 25 bp, Homo sapien
gaagcccagattgcaaaatcgtagg

SEQ ID NO: 6081148 - DNA, 25 bp, Homo sapien
ccgcagcatgggcacggcgaacttg

SEQ ID NO: 6081149 - DNA, 25 bp, Homo sapien
tgccggtccacctggagtagctgca

SEQ ID NO: 6081150 - DNA, 25 bp, Homo sapien
aagtcggcctcgtagagtttataca

SEQ ID NO: 6081151 - DNA, 25 bp, Homo sapien
agcttctccgtgtgcgggtccagca

SEQ ID NO: 6081152 - DNA, 25 bp, Homo sapien
cacgaagtcgtagtcgatctggcac

SEQ ID NO: 6081153 - DNA, 25 bp, Homo sapien
agttggcgaaggacaccttgaggcc

SEQ ID NO: 6081154 - DNA, 25 bp, Homo sapien
aaaaaactggagtgcgcgtgcgtca

SEQ ID NO: 6081155 - DNA, 25 bp, Homo sapien
gctggcggtcctgttccggtagctc

SEQ ID NO: 6081156 - DNA, 25 bp, Homo sapien
tagccgaagagaacaaagtcggcct

SEQ ID NO: 6081157 - DNA, 25 bp, Homo sapien
tcaggttccaggcacgcgagaaaaa

SEQ ID NO: 6081158 - DNA, 25 bp, Homo sapien
acctagtccgcagtgacagccgtag

SEQ ID NO: 6081159 - DNA, 25 bp, Homo sapien
tccgcagtgacagccgtagggccag

SEQ ID NO: 6081160 - DNA, 25 bp, Homo sapien
ttcccagtcacttgcttgaccatct

SEQ ID NO: 6081161 - DNA, 25 bp, Homo sapien
caggatcccgccctggattggaatc

SEQ ID NO: 6081162 - DNA, 25 bp, Homo sapien
tctgccacctagtccgcagtgacag

SEQ ID NO: 6081163 - DNA, 25 bp, Homo sapien
gatcccgccctggattggaatcaca

SEQ ID NO: 6081164 - DNA, 25 bp, Homo sapien
gagaggatgggcattttcccagtca

SEQ ID NO: 6081165 - DNA, 25 bp, Homo sapien
tgttcaggttcaggatcccgccctg

SEQ ID NO: 6081166 - DNA, 25 bp, Homo sapien
ctagtccgcagtgacagccgtaggg

SEQ ID NO: 6081167 - DNA, 25 bp, Homo sapien
tgggttggcctctgccacctagtcc

SEQ ID NO: 6081168 - DNA, 25 bp, Homo sapien
ccgtagggccagtaggagaggatgg

SEQ ID NO: 6081169 - DNA, 25 bp, Homo sapien
caggttcaggatcccgccctggatt

SEQ ID NO: 6081170 - DNA, 25 bp, Homo sapien
gttgtccttgtagatgccgcacccc

SEQ ID NO: 6081171 - DNA, 25 bp, Homo sapien
ttagtataagaatcataaacaacca

SEQ ID NO: 6081172 - DNA, 25 bp, Homo sapien
gaagagactttctgggcaccgacca

SEQ ID NO: 6081173 - DNA, 25 bp, Homo sapien
ccaatccctgatgggggcgtcagtg

SEQ ID NO: 6081174 - DNA, 25 bp, Homo sapien
aatgaacagggccttaatatctttg

SEQ ID NO: 6081175 - DNA, 25 bp, Homo sapien
aagagactttctgggcaccgaccag

SEQ ID NO: 6081176 - DNA, 25 bp, Homo sapien
gcgtcagtggcagaagagactttct

SEQ ID NO: 6081177 - DNA, 25 bp, Homo sapien
atttcttaatgaacagggccttaat

SEQ ID NO: 6081178 - DNA, 25 bp, Homo sapien
agactttctgggcaccgaccagtcc

SEQ ID NO: 6081179 - DNA, 25 bp, Homo sapien
tcttaatgaacagggccttaatatc

SEQ ID NO: 6081180 - DNA, 25 bp, Homo sapien
agcccacccactaccctcttctgtt

SEQ ID NO: 6081181 - DNA, 25 bp, Homo sapien
aaggcccaatccctgatgggggcgt

SEQ ID NO: 6081182 - DNA, 25 bp, Homo sapien
ggcgtcagtggcagaagagactttc

SEQ ID NO: 6081183 - DNA, 25 bp, Homo sapien
gccacaggagagatctcccatggcc

SEQ ID NO: 6081184 - DNA, 25 bp, Homo sapien
gggatcactacataaatgtgtcagg

SEQ ID NO: 6081185 - DNA, 25 bp, Homo sapien
aatcatgaagaagtcaacagtattc

SEQ ID NO: 6081186 - DNA, 25 bp, Homo sapien
ggttattcatattacatcacaactg

SEQ ID NO: 6081187 - DNA, 25 bp, Homo sapien
cataaaacttcgcaaaggatggtta

SEQ ID NO: 6081188 - DNA, 25 bp, Homo sapien
taacaatcacatttgtgggatcact

SEQ ID NO: 6081189 - DNA, 25 bp, Homo sapien
gaggtctgcgtgctcttattctttt

SEQ ID NO: 6081190 - DNA, 25 bp, Homo sapien
ggaagccatctagtataacaaaaat

SEQ ID NO: 6081191 - DNA, 25 bp, Homo sapien
ctggagaagaacaacctgggagact

SEQ ID NO: 6081192 - DNA, 25 bp, Homo sapien
taaagcctcataaaacttcgcaaag

SEQ ID NO: 6081193 - DNA, 25 bp, Homo sapien
taaaatattctcctagaggtctgcg

SEQ ID NO: 6081194 - DNA, 25 bp, Homo sapien
tgagggttgacattcccctaaagcc

SEQ ID NO: 6081195 - DNA, 25 bp, Homo sapien
gggaactctaactagtctggtggta

SEQ ID NO: 6081196 - DNA, 25 bp, Homo sapien
tgtggctccaaagggatctcgaccc

SEQ ID NO: 6081197 - DNA, 25 bp, Homo sapien
cattgacaaagtgcagaggtagcct

SEQ ID NO: 6081198 - DNA, 25 bp, Homo sapien
gaagaaacagcatgagcgaaggcac

SEQ ID NO: 6081199 - DNA, 25 bp, Homo sapien
tcaaggtacacctgcctgaggacca

SEQ ID NO: 6081200 - DNA, 25 bp, Homo sapien
gataagtgccacaagagaagcattg

SEQ ID NO: 6081201 - DNA, 25 bp, Homo sapien
tacagagatgcataagatacagtcc

SEQ ID NO: 6081202 - DNA, 25 bp, Homo sapien
catcttggagggtcaccagaggtga

SEQ ID NO: 6081203 - DNA, 25 bp, Homo sapien
gaaactgcatgtcttgcttggtgag

SEQ ID NO: 6081204 - DNA, 25 bp, Homo sapien
gatctcgacccaagagtagaggagc

SEQ ID NO: 6081205 - DNA, 25 bp, Homo sapien
gaaggcattccagtcggaagaaaca

SEQ ID NO: 6081206 - DNA, 25 bp, Homo sapien
ggcaccgtgctaggcgcagaaatac

SEQ ID NO: 6081207 - DNA, 25 bp, Homo sapien
tttcaaaggctattacaacaaagta

SEQ ID NO: 6081208 - DNA, 25 bp, Homo sapien
caaagtagtcttacataggctgaga

SEQ ID NO: 6081209 - DNA, 25 bp, Homo sapien
cactcacttgattagtgccaagaaa

SEQ ID NO: 6081210 - DNA, 25 bp, Homo sapien
gaactctgcattgattaggaactcc

SEQ ID NO: 6081211 - DNA, 25 bp, Homo sapien
tctgaagatagtagagagacagtac

SEQ ID NO: 6081212 - DNA, 25 bp, Homo sapien
tattttactagcgtaacaacacatc

SEQ ID NO: 6081213 - DNA, 25 bp, Homo sapien
taaaatgatggctgttgtttctaaa

SEQ ID NO: 6081214 - DNA, 25 bp, Homo sapien
taagaggcacagatccactaagcat

SEQ ID NO: 6081215 - DNA, 25 bp, Homo sapien
atttatgaatacagccaagaacaca

SEQ ID NO: 6081216 - DNA, 25 bp, Homo sapien
tactaagtgaaaaggtaacactcac

SEQ ID NO: 6081217 - DNA, 25 bp, Homo sapien
gcgtaacaacacatcctactaagtg

SEQ ID NO: 6081218 - DNA, 25 bp, Homo sapien
cctttcccaactaaagatggttgag

SEQ ID NO: 6081219 - DNA, 25 bp, Homo sapien
gtgcccggcccatttctcagtttta

SEQ ID NO: 6081220 - DNA, 25 bp, Homo sapien
aagaccctcttactgtccaaccaag

SEQ ID NO: 6081221 - DNA, 25 bp, Homo sapien
atagatacaatgaaagctctttggg

SEQ ID NO: 6081222 - DNA, 25 bp, Homo sapien
ttactgtccaaccaagcacaacaga

SEQ ID NO: 6081223 - DNA, 25 bp, Homo sapien
tgtccaaccaagcacaacagaactg

SEQ ID NO: 6081224 - DNA, 25 bp, Homo sapien
aatcaatagatacaatgaaagctct

SEQ ID NO: 6081225 - DNA, 25 bp, Homo sapien
ctctggttctttatggagtttgccg

SEQ ID NO: 6081226 - DNA, 25 bp, Homo sapien
caagaaggttgagaattgctgccct

SEQ ID NO: 6081227 - DNA, 25 bp, Homo sapien
tggactggccaagaccctcttactg

SEQ ID NO: 6081228 - DNA, 25 bp, Homo sapien
gagcaagaaggttgagaattgctgc

SEQ ID NO: 6081229 - DNA, 25 bp, Homo sapien
tggttctttatggagtttgccgccc

SEQ ID NO: 6081230 - DNA, 25 bp, Homo sapien
acctcgtgccactcccactggccag

SEQ ID NO: 6081231 - DNA, 25 bp, Homo sapien
catgtaggcactatacctggcaggc

SEQ ID NO: 6081232 - DNA, 25 bp, Homo sapien
tgtcaccctggttggaatacagtgg

SEQ ID NO: 6081233 - DNA, 25 bp, Homo sapien
ccatctggtgaactgagagatttca

SEQ ID NO: 6081234 - DNA, 25 bp, Homo sapien
ggctagtcttgaaatcctgactcca

SEQ ID NO: 6081235 - DNA, 25 bp, Homo sapien
caacctgggcctactgaatcaggac

SEQ ID NO: 6081236 - DNA, 25 bp, Homo sapien
tgctgggccctacaccatctggtga

SEQ ID NO: 6081237 - DNA, 25 bp, Homo sapien
aatacagtggcctgatctcggctca

SEQ ID NO: 6081238 - DNA, 25 bp, Homo sapien
gataattcacaagcacagtcaacgt

SEQ ID NO: 6081239 - DNA, 25 bp, Homo sapien
cagcatcagcatcacgtgggagttt

SEQ ID NO: 6081240 - DNA, 25 bp, Homo sapien
tttgttagagatgcccaacctgggc

SEQ ID NO: 6081241 - DNA, 25 bp, Homo sapien
cgtgtgaatttacaatgctgggccc

SEQ ID NO: 6081242 - DNA, 25 bp, Homo sapien
tatagttcataggaccagcatcagc

SEQ ID NO: 6081243 - DNA, 25 bp, Homo sapien
ggattcctctgagccaaagttcttg

SEQ ID NO: 6081244 - DNA, 25 bp, Homo sapien
aggaggaccataaccaccttcatgt

SEQ ID NO: 6081245 - DNA, 25 bp, Homo sapien
ttcttgtgacagttaatacgcagca

SEQ ID NO: 6081246 - DNA, 25 bp, Homo sapien
cttccatattactgatcaaagggga

SEQ ID NO: 6081247 - DNA, 25 bp, Homo sapien
accataaccaccttcatgttgaggc

SEQ ID NO: 6081248 - DNA, 25 bp, Homo sapien
agggcagcaagcaggaggaccataa

SEQ ID NO: 6081249 - DNA, 25 bp, Homo sapien
taatacgcagcacagtaaaggctgt

SEQ ID NO: 6081250 - DNA, 25 bp, Homo sapien
ccaaagttcttgtgacagttaatac

SEQ ID NO: 6081251 - DNA, 25 bp, Homo sapien
ctctgaagatctgctttgtattcct

SEQ ID NO: 6081252 - DNA, 25 bp, Homo sapien
atcgtatgcaccatgactcggaagt

SEQ ID NO: 6081253 - DNA, 25 bp, Homo sapien
agttgagatttctgccagtccacag

SEQ ID NO: 6081254 - DNA, 25 bp, Homo sapien
aggaaaagttgagatttctgccagt

SEQ ID NO: 6081255 - DNA, 25 bp, Homo sapien
gcaagcaggaggaccataaccacct

SEQ ID NO: 6081256 - DNA, 25 bp, Homo sapien
ttccacgacgctctccagaagaacg

SEQ ID NO: 6081257 - DNA, 25 bp, Homo sapien
ctatacttcaggtttcaacaacgtc

SEQ ID NO: 6081258 - DNA, 25 bp, Homo sapien
agggggagggcagcaagcaggagga

SEQ ID NO: 6081259 - DNA, 25 bp, Homo sapien
tattactgatcaaaggggaaagtca

SEQ ID NO: 6081260 - DNA, 25 bp, Homo sapien
cgatggatcgatggtcttttccacg

SEQ ID NO: 6081261 - DNA, 25 bp, Homo sapien
actcctctacagctgcttcggtttg

SEQ ID NO: 6081262 - DNA, 25 bp, Homo sapien
cagtaaaggctgtcatatatcgtat

SEQ ID NO: 6081263 - DNA, 25 bp, Homo sapien
ctacagctgcttcggtttgctcagt

SEQ ID NO: 6081264 - DNA, 25 bp, Homo sapien
accaccttcatgttgaggctgctgt

SEQ ID NO: 6081265 - DNA, 25 bp, Homo sapien
tccagaagaacgcaaccagaacctg

SEQ ID NO: 6081266 - DNA, 25 bp, Homo sapien
tgatcaaaggggaaagtcaaaagga

SEQ ID NO: 6081267 - DNA, 25 bp, Homo sapien
gtcgggttgtgagcatcgtctggat

SEQ ID NO: 6081268 - DNA, 25 bp, Homo sapien
tcgtctggattcctctgagccaaag

SEQ ID NO: 6081269 - DNA, 25 bp, Homo sapien
tattcctccacagaaaccgatggat

SEQ ID NO: 6081270 - DNA, 25 bp, Homo sapien
cggtttgctcagtgtcgatgaacct

SEQ ID NO: 6081271 - DNA, 25 bp, Homo sapien
gaacctgcatagcagtaaaggggga

SEQ ID NO: 6081272 - DNA, 25 bp, Homo sapien
gctttgtattcctccacagaaaccg

SEQ ID NO: 6081273 - DNA, 25 bp, Homo sapien
agatctgctttgtattcctccacag

SEQ ID NO: 6081274 - DNA, 25 bp, Homo sapien
caacgtcttccatattactgatcaa

SEQ ID NO: 6081275 - DNA, 25 bp, Homo sapien
cggaagttggccagagtctcattgc

SEQ ID NO: 6081276 - DNA, 25 bp, Homo sapien
acgctctccagaagaacgcaaccag

SEQ ID NO: 6081277 - DNA, 25 bp, Homo sapien
gctcagtgtcgatgaacctctgaag

SEQ ID NO: 6081278 - DNA, 25 bp, Homo sapien
gcagcacagtaaaggctgtcatata

SEQ ID NO: 6081279 - DNA, 25 bp, Homo sapien
caaccagaacctgcatagcagtaaa

SEQ ID NO: 6081280 - DNA, 25 bp, Homo sapien
tgacagttaatacgcagcacagtaa

SEQ ID NO: 6081281 - DNA, 25 bp, Homo sapien
ctctggctgaggaagcactccttga

SEQ ID NO: 6081282 - DNA, 25 bp, Homo sapien
tgtcgatgaacctctgaagatctgc

SEQ ID NO: 6081283 - DNA, 25 bp, Homo sapien
gcatagcagtaaagggggagggcag

SEQ ID NO: 6081284 - DNA, 25 bp, Homo sapien
agagtctcattgctctggctgagga

SEQ ID NO: 6081285 - DNA, 25 bp, Homo sapien
tcaaaaggaaaagttgagatttctg

SEQ ID NO: 6081286 - DNA, 25 bp, Homo sapien
tctgagccaaagttcttgtgacagt

SEQ ID NO: 6081287 - DNA, 25 bp, Homo sapien
tttcaacaacgtcttccatattact

SEQ ID NO: 6081288 - DNA, 25 bp, Homo sapien
aagcactccttgaactcctctacag

SEQ ID NO: 6081289 - DNA, 25 bp, Homo sapien
tccttgaactcctctacagctgctt

SEQ ID NO: 6081290 - DNA, 25 bp, Homo sapien
tccacagtcgggttgtgagcatcgt

SEQ ID NO: 6081291 - DNA, 25 bp, Homo sapien
cagtaaagggggagggcagcaagca

SEQ ID NO: 6081292 - DNA, 25 bp, Homo sapien
agaaaccgatggatcgatggtcttt

SEQ ID NO: 6081293 - DNA, 25 bp, Homo sapien
tcattgctctggctgaggaagcact

SEQ ID NO: 6081294 - DNA, 25 bp, Homo sapien
tcatatatcgtatgcaccatgactc

SEQ ID NO: 6081295 - DNA, 25 bp, Homo sapien
atcgatggtcttttccacgacgctc

SEQ ID NO: 6081296 - DNA, 25 bp, Homo sapien
tgccagtccacagtcgggttgtgag

SEQ ID NO: 6081297 - DNA, 25 bp, Homo sapien
aggctgtcatatatcgtatgcacca

SEQ ID NO: 6081298 - DNA, 25 bp, Homo sapien
gatttctgccagtccacagtcgggt

SEQ ID NO: 6081299 - DNA, 25 bp, Homo sapien
ctgcttcggtttgctcagtgtcgat

SEQ ID NO: 6081300 - DNA, 25 bp, Homo sapien
ggtcttttccacgacgctctccaga

SEQ ID NO: 6081301 - DNA, 25 bp, Homo sapien
atgactcggaagttggccagagtct

SEQ ID NO: 6081302 - DNA, 25 bp, Homo sapien
ttcaggtttcaacaacgtcttccat

SEQ ID NO: 6081303 - DNA, 25 bp, Homo sapien
attaactatacttcaggtttcaaca

SEQ ID NO: 6081304 - DNA, 25 bp, Homo sapien
ttgaggctgctgtgtttggcctcgt

SEQ ID NO: 6081305 - DNA, 25 bp, Homo sapien
agcatcgtctggattcctctgagcc

SEQ ID NO: 6081306 - DNA, 25 bp, Homo sapien
agaacgcaaccagaacctgcatagc

SEQ ID NO: 6081307 - DNA, 25 bp, Homo sapien
tccacagaaaccgatggatcgatgg

SEQ ID NO: 6081308 - DNA, 25 bp, Homo sapien
ctgaggaagcactccttgaactcct

SEQ ID NO: 6081309 - DNA, 25 bp, Homo sapien
tgcaccatgactcggaagttggcca

SEQ ID NO: 6081310 - DNA, 25 bp, Homo sapien
ttcatgttgaggctgctgtgtttgg

SEQ ID NO: 6081311 - DNA, 25 bp, Homo sapien
ttggccagagtctcattgctctggc

SEQ ID NO: 6081312 - DNA, 25 bp, Homo sapien
tatttcagcttcacgcactatggaa

SEQ ID NO: 6081313 - DNA, 25 bp, Homo sapien
aacactcacggagaggctggtgggc

SEQ ID NO: 6081314 - DNA, 25 bp, Homo sapien
ttcacgcactatggaatccctgctc

SEQ ID NO: 6081315 - DNA, 25 bp, Homo sapien
ctggaccaggcagcctaaggactgt

SEQ ID NO: 6081316 - DNA, 25 bp, Homo sapien
gtccaggtttcctgacagagccgca

SEQ ID NO: 6081317 - DNA, 25 bp, Homo sapien
ggcaccggggctatacttgcttcct

SEQ ID NO: 6081318 - DNA, 25 bp, Homo sapien
ggccatctcgccagggctaagtgga

SEQ ID NO: 6081319 - DNA, 25 bp, Homo sapien
gacacttgtcagcatggccaatggc

SEQ ID NO: 6081320 - DNA, 25 bp, Homo sapien
ggagggcgcctatttcagcttcacg

SEQ ID NO: 6081321 - DNA, 25 bp, Homo sapien
agcatggccaatggcctcctgccag

SEQ ID NO: 6081322 - DNA, 25 bp, Homo sapien
aggctacctccggataggaggtgca

SEQ ID NO: 6081323 - DNA, 25 bp, Homo sapien
tacctccggataggaggtgcaagca

SEQ ID NO: 6081324 - DNA, 25 bp, Homo sapien
acaaataaattctgaaaataaccat

SEQ ID NO: 6081325 - DNA, 25 bp, Homo sapien
cttagacaaattagtcattgagagc

SEQ ID NO: 6081326 - DNA, 25 bp, Homo sapien
ctcaaacctcttcctcaacaaataa

SEQ ID NO: 6081327 - DNA, 25 bp, Homo sapien
tgcccacactcagtggagtatggaa

SEQ ID NO: 6081328 - DNA, 25 bp, Homo sapien
tgagagcatctcctgattaaatgtt

SEQ ID NO: 6081329 - DNA, 25 bp, Homo sapien
agtctgtttgcaatctgtcatattt

SEQ ID NO: 6081330 - DNA, 25 bp, Homo sapien
ttaatccacaaacaaggagaactcc

SEQ ID NO: 6081331 - DNA, 25 bp, Homo sapien
cctagaagcagagccatcaacagag

SEQ ID NO: 6081332 - DNA, 25 bp, Homo sapien
gctttcctcaacctccttcctaaga

SEQ ID NO: 6081333 - DNA, 25 bp, Homo sapien
cacttagtcttatacttttggacag

SEQ ID NO: 6081334 - DNA, 25 bp, Homo sapien
tacttttggacagctcacttctgca

SEQ ID NO: 6081335 - DNA, 25 bp, Homo sapien
gagggaacaggcctccctcctggct

SEQ ID NO: 6081336 - DNA, 25 bp, Homo sapien
ggaatactttcgagcttcatgcaaa

SEQ ID NO: 6081337 - DNA, 25 bp, Homo sapien
gctggtgtcacctgaacaagaatgg

SEQ ID NO: 6081338 - DNA, 25 bp, Homo sapien
catattttaatccacaaacaaggag

SEQ ID NO: 6081339 - DNA, 25 bp, Homo sapien
gaatggtcgaacctaactcctcaaa

SEQ ID NO: 6081340 - DNA, 25 bp, Homo sapien
actcaggagggaacaggcctccctc

SEQ ID NO: 6081341 - DNA, 25 bp, Homo sapien
gccatcaacagagctggtgtcacct

SEQ ID NO: 6081342 - DNA, 25 bp, Homo sapien
aaaggcaacatgagctcatgaaatg

SEQ ID NO: 6081343 - DNA, 25 bp, Homo sapien
gaactccctaaattgaacttgtcta

SEQ ID NO: 6081344 - DNA, 25 bp, Homo sapien
gtgggaagacagtttatcacttagt

SEQ ID NO: 6081345 - DNA, 25 bp, Homo sapien
aagagtagtctgtttgcaatctgtc

SEQ ID NO: 6081346 - DNA, 25 bp, Homo sapien
caaggagaactccctaaattgaact

SEQ ID NO: 6081347 - DNA, 25 bp, Homo sapien
actcacgaatggtcgaacctaactc

SEQ ID NO: 6081348 - DNA, 25 bp, Homo sapien
gctgtgagctagtgcccacactcag

SEQ ID NO: 6081349 - DNA, 25 bp, Homo sapien
tcattaacaactcccacggtgggaa

SEQ ID NO: 6081350 - DNA, 25 bp, Homo sapien
gtggagtatggaacacagactcacg

SEQ ID NO: 6081351 - DNA, 25 bp, Homo sapien
aacagagctggtgtcacctgaacaa

SEQ ID NO: 6081352 - DNA, 25 bp, Homo sapien
ttctgcacaattgagatacatttga

SEQ ID NO: 6081353 - DNA, 25 bp, Homo sapien
gtggtcaaaggcaacatgagctcat

SEQ ID NO: 6081354 - DNA, 25 bp, Homo sapien
ggctctccttaagaaatggtggtca

SEQ ID NO: 6081355 - DNA, 25 bp, Homo sapien
agtcattgagagcatctcctgatta

SEQ ID NO: 6081356 - DNA, 25 bp, Homo sapien
acaattgagatacatttgaagagta

SEQ ID NO: 6081357 - DNA, 25 bp, Homo sapien
agacagtttatcacttagtcttata

SEQ ID NO: 6081358 - DNA, 25 bp, Homo sapien
ccttcctaagacttagacaaattag

SEQ ID NO: 6081359 - DNA, 25 bp, Homo sapien
agctagtgcccacactcagtggagt

SEQ ID NO: 6081360 - DNA, 25 bp, Homo sapien
acaactcccacggtgggaagacagt

SEQ ID NO: 6081361 - DNA, 25 bp, Homo sapien
ccaaagggaatactttcgagcttca

SEQ ID NO: 6081362 - DNA, 25 bp, Homo sapien
tgaaatgttcagtctcaccgcgagg

SEQ ID NO: 6081363 - DNA, 25 bp, Homo sapien
ctaaattgaacttgtctaaatccag

SEQ ID NO: 6081364 - DNA, 25 bp, Homo sapien
gagatacatttgaagagtagtctgt

SEQ ID NO: 6081365 - DNA, 25 bp, Homo sapien
tgaacttgtctaaatccagctttcc

SEQ ID NO: 6081366 - DNA, 25 bp, Homo sapien
tttatcacttagtcttatacttttg

SEQ ID NO: 6081367 - DNA, 25 bp, Homo sapien
atctgtcatattttaatccacaaac

SEQ ID NO: 6081368 - DNA, 25 bp, Homo sapien
tgaaaataaccatgtaattagaaga

SEQ ID NO: 6081369 - DNA, 25 bp, Homo sapien
agcagagccatcaacagagctggtg

SEQ ID NO: 6081370 - DNA, 25 bp, Homo sapien
agcttcatgcaaagtctaactcagg

SEQ ID NO: 6081371 - DNA, 25 bp, Homo sapien
caaattagtcattgagagcatctcc

SEQ ID NO: 6081372 - DNA, 25 bp, Homo sapien
aatccagctttcctcaacctccttc

SEQ ID NO: 6081373 - DNA, 25 bp, Homo sapien
catctcctgattaaatgttccctag

SEQ ID NO: 6081374 - DNA, 25 bp, Homo sapien
tcctcaacaaataaattctgaaaat

SEQ ID NO: 6081375 - DNA, 25 bp, Homo sapien
agtctaactcaggagggaacaggcc

SEQ ID NO: 6081376 - DNA, 25 bp, Homo sapien
agctcatgaaatgttcagtctcacc

SEQ ID NO: 6081377 - DNA, 25 bp, Homo sapien
gctcttatcctgacagcaatcagct

SEQ ID NO: 6081378 - DNA, 25 bp, Homo sapien
tgtaattagaagacattctgcccac

SEQ ID NO: 6081379 - DNA, 25 bp, Homo sapien
cgcgaggctgtgagctagtgcccac

SEQ ID NO: 6081380 - DNA, 25 bp, Homo sapien
cacaaacaaggagaactccctaaat

SEQ ID NO: 6081381 - DNA, 25 bp, Homo sapien
cagcaatcagctggctctccttaag

SEQ ID NO: 6081382 - DNA, 25 bp, Homo sapien
gctcacttctgcacaattgagatac

SEQ ID NO: 6081383 - DNA, 25 bp, Homo sapien
taaattctgaaaataaccatgtaat

SEQ ID NO: 6081384 - DNA, 25 bp, Homo sapien
acacagactcacgaatggtcgaacc

SEQ ID NO: 6081385 - DNA, 25 bp, Homo sapien
ccttaagaaatggtggtcaaaggca

SEQ ID NO: 6081386 - DNA, 25 bp, Homo sapien
tgtctaaatccagctttcctcaacc

SEQ ID NO: 6081387 - DNA, 25 bp, Homo sapien
gtcttatacttttggacagctcact

SEQ ID NO: 6081388 - DNA, 25 bp, Homo sapien
taactcctcaaacctcttcctcaac

SEQ ID NO: 6081389 - DNA, 25 bp, Homo sapien
gtctcaccgcgaggctgtgagctag

SEQ ID NO: 6081390 - DNA, 25 bp, Homo sapien
taaccatgtaattagaagacattct

SEQ ID NO: 6081391 - DNA, 25 bp, Homo sapien
gaaatggtggtcaaaggcaacatga

SEQ ID NO: 6081392 - DNA, 25 bp, Homo sapien
tatggaacacagactcacgaatggt

SEQ ID NO: 6081393 - DNA, 25 bp, Homo sapien
gtcacctgaacaagaatgggaggtt

SEQ ID NO: 6081394 - DNA, 25 bp, Homo sapien
acctcttcctcaacaaataaattct

SEQ ID NO: 6081395 - DNA, 25 bp, Homo sapien
catttgaagagtagtctgtttgcaa

SEQ ID NO: 6081396 - DNA, 25 bp, Homo sapien
cctccctcctggctgaagagatgct

SEQ ID NO: 6081397 - DNA, 25 bp, Homo sapien
aacatgagctcatgaaatgttcagt

SEQ ID NO: 6081398 - DNA, 25 bp, Homo sapien
atgcaaagtctaactcaggagggaa

SEQ ID NO: 6081399 - DNA, 25 bp, Homo sapien
taagacttagacaaattagtcattg

SEQ ID NO: 6081400 - DNA, 25 bp, Homo sapien
ctgattaaatgttccctagaagcag

SEQ ID NO: 6081401 - DNA, 25 bp, Homo sapien
tttgcaatctgtcatattttaatcc

SEQ ID NO: 6081402 - DNA, 25 bp, Homo sapien
agagatgctcttatcctgacagcaa

SEQ ID NO: 6081403 - DNA, 25 bp, Homo sapien
ctttcgagcttcatgcaaagtctaa

SEQ ID NO: 6081404 - DNA, 25 bp, Homo sapien
tcagctggctctccttaagaaatgg

SEQ ID NO: 6081405 - DNA, 25 bp, Homo sapien
ggctgaagagatgctcttatcctga

SEQ ID NO: 6081406 - DNA, 25 bp, Homo sapien
tggacagctcacttctgcacaattg

SEQ ID NO: 6081407 - DNA, 25 bp, Homo sapien
cccacggtgggaagacagtttatca

SEQ ID NO: 6081408 - DNA, 25 bp, Homo sapien
cctcctggctgaagagatgctctta

SEQ ID NO: 6081409 - DNA, 25 bp, Homo sapien
caacctccttcctaagacttagaca

SEQ ID NO: 6081410 - DNA, 25 bp, Homo sapien
tgaacaagaatgggaggttccaaag

SEQ ID NO: 6081411 - DNA, 25 bp, Homo sapien
cactcagtggagtatggaacacaga

SEQ ID NO: 6081412 - DNA, 25 bp, Homo sapien
tcctgacagcaatcagctggctctc

SEQ ID NO: 6081413 - DNA, 25 bp, Homo sapien
tagaagacattctgcccaccaatgg

SEQ ID NO: 6081414 - DNA, 25 bp, Homo sapien
tgttcagtctcaccgcgaggctgtg

SEQ ID NO: 6081415 - DNA, 25 bp, Homo sapien
agccatcaaaaaaacgacgtagcag

SEQ ID NO: 6081416 - DNA, 25 bp, Homo sapien
cccagtggataggaagggaacccag

SEQ ID NO: 6081417 - DNA, 25 bp, Homo sapien
ctagggctgagtgcatggtgatatt

SEQ ID NO: 6081418 - DNA, 25 bp, Homo sapien
tgagccatcaaaaaaacgacgtagc

SEQ ID NO: 6081419 - DNA, 25 bp, Homo sapien
gctgggacccccagtggataggaag

SEQ ID NO: 6081420 - DNA, 25 bp, Homo sapien
tagggctgagtgcatggtgatatta

SEQ ID NO: 6081421 - DNA, 25 bp, Homo sapien
gggctgagtgcatggtgatattatc

SEQ ID NO: 6081422 - DNA, 25 bp, Homo sapien
gctgagccatcaaaaaaacgacgta

SEQ ID NO: 6081423 - DNA, 25 bp, Homo sapien
tcaaaaaaacgacgtagcagcagta

SEQ ID NO: 6081424 - DNA, 25 bp, Homo sapien
aaaaaacgacgtagcagcagtaatg

SEQ ID NO: 6081425 - DNA, 25 bp, Homo sapien
gctagggctgagtgcatggtgatat

SEQ ID NO: 6081426 - DNA, 25 bp, Homo sapien
catcaaaaaaacgacgtagcagcag

SEQ ID NO: 6081427 - DNA, 25 bp, Homo sapien
gtgacctaccccactgacaagcaaa

SEQ ID NO: 6081428 - DNA, 25 bp, Homo sapien
aataaaaactaagactcagtgacct

SEQ ID NO: 6081429 - DNA, 25 bp, Homo sapien
cttgcatgactctgagtagatgcta

SEQ ID NO: 6081430 - DNA, 25 bp, Homo sapien
gcatgactctgagtagatgctacta

SEQ ID NO: 6081431 - DNA, 25 bp, Homo sapien
gacctaccccactgacaagcaaaat

SEQ ID NO: 6081432 - DNA, 25 bp, Homo sapien
cctaccccactgacaagcaaaatga

SEQ ID NO: 6081433 - DNA, 25 bp, Homo sapien
atgaaagatttccagcttgcatgac

SEQ ID NO: 6081434 - DNA, 25 bp, Homo sapien
gaaagatttccagcttgcatgactc

SEQ ID NO: 6081435 - DNA, 25 bp, Homo sapien
aagatttccagcttgcatgactctg

SEQ ID NO: 6081436 - DNA, 25 bp, Homo sapien
agtgacctaccccactgacaagcaa

SEQ ID NO: 6081437 - DNA, 25 bp, Homo sapien
gagtagatgctactaattaaaataa

SEQ ID NO: 6081438 - DNA, 25 bp, Homo sapien
tcatcaggaaatgagactctggacc

SEQ ID NO: 6081439 - DNA, 25 bp, Homo sapien
agaataggacgaggacgctgcacat

SEQ ID NO: 6081440 - DNA, 25 bp, Homo sapien
cataatatcactgacatttatttac

SEQ ID NO: 6081441 - DNA, 25 bp, Homo sapien
tgcatcctttctcgaccctcgtgga

SEQ ID NO: 6081442 - DNA, 25 bp, Homo sapien
tgtcttcttcgatttctgtgaaaca

SEQ ID NO: 6081443 - DNA, 25 bp, Homo sapien
cagaaatgttttaccaattcataat

SEQ ID NO: 6081444 - DNA, 25 bp, Homo sapien
gtgttagactaagcatgcagaatag

SEQ ID NO: 6081445 - DNA, 25 bp, Homo sapien
cgaagtaaacaacagtattgctact

SEQ ID NO: 6081446 - DNA, 25 bp, Homo sapien
aatcttccaaattcgcttttgttca

SEQ ID NO: 6081447 - DNA, 25 bp, Homo sapien
gcatgcagaataggacgaggacgct

SEQ ID NO: 6081448 - DNA, 25 bp, Homo sapien
ggtagcccggcttgtggcaccccga

SEQ ID NO: 6081449 - DNA, 25 bp, Homo sapien
tacagggtagcccggcttgtggcac

SEQ ID NO: 6081450 - DNA, 25 bp, Homo sapien
tcactgacatttatttacatactac

SEQ ID NO: 6081451 - DNA, 25 bp, Homo sapien
aatcgtcgaagtaaacaacagtatt

SEQ ID NO: 6081452 - DNA, 25 bp, Homo sapien
tacttcaacaatgtataacctaatc

SEQ ID NO: 6081453 - DNA, 25 bp, Homo sapien
gagaatgagggggtacagggtagcc

SEQ ID NO: 6081454 - DNA, 25 bp, Homo sapien
tgctactgtagatatccaccacaga

SEQ ID NO: 6081455 - DNA, 25 bp, Homo sapien
tgtggcaccccgatgcatcctttct

SEQ ID NO: 6081456 - DNA, 25 bp, Homo sapien
tcaacgtatgttcccaaaatcgtcg

SEQ ID NO: 6081457 - DNA, 25 bp, Homo sapien
tcgttagacttagcggcaccagctt

SEQ ID NO: 6081458 - DNA, 25 bp, Homo sapien
atggggaggtggagggcagcgagaa

SEQ ID NO: 6081459 - DNA, 25 bp, Homo sapien
cgttacgtgaatcagaagcacgcac

SEQ ID NO: 6081460 - DNA, 25 bp, Homo sapien
cctgatggtgttagactaagcatgc

SEQ ID NO: 6081461 - DNA, 25 bp, Homo sapien
ctttctcgaccctcgtggaaatctt

SEQ ID NO: 6081462 - DNA, 25 bp, Homo sapien
tttctgtgaaacactgaaaataaaa

SEQ ID NO: 6081463 - DNA, 25 bp, Homo sapien
gtgaatcagaagcacgcactagtga

SEQ ID NO: 6081464 - DNA, 25 bp, Homo sapien
tgcacatggggaggtggagggcagc

SEQ ID NO: 6081465 - DNA, 25 bp, Homo sapien
ccaattcataatatcactgacattt

SEQ ID NO: 6081466 - DNA, 25 bp, Homo sapien
tttagataacagaaatgttttacca

SEQ ID NO: 6081467 - DNA, 25 bp, Homo sapien
caacaatgtataacctaatcgacct

SEQ ID NO: 6081468 - DNA, 25 bp, Homo sapien
cagaaaagataaacgagcctgatgg

SEQ ID NO: 6081469 - DNA, 25 bp, Homo sapien
ttgttcacaatctcttcttcgttag

SEQ ID NO: 6081470 - DNA, 25 bp, Homo sapien
cagaagcacgcactagtgatttgct

SEQ ID NO: 6081471 - DNA, 25 bp, Homo sapien
ctagtgatttgctcctggtgagatc

SEQ ID NO: 6081472 - DNA, 25 bp, Homo sapien
tatccaccacagaagcgccatttct

SEQ ID NO: 6081473 - DNA, 25 bp, Homo sapien
tcttcttcgttagacttagcggcac

SEQ ID NO: 6081474 - DNA, 25 bp, Homo sapien
gacttagcggcaccagcttcaacgt

SEQ ID NO: 6081475 - DNA, 25 bp, Homo sapien
ggacgaggacgctgcacatggggag

SEQ ID NO: 6081476 - DNA, 25 bp, Homo sapien
gttttaccaattcataatatcactg

SEQ ID NO: 6081477 - DNA, 25 bp, Homo sapien
ccccgatgcatcctttctcgaccct

SEQ ID NO: 6081478 - DNA, 25 bp, Homo sapien
atttgctcctggtgagatcaatgac

SEQ ID NO: 6081479 - DNA, 25 bp, Homo sapien
aaacaacagtattgctactgtagat

SEQ ID NO: 6081480 - DNA, 25 bp, Homo sapien
cgaccctcgtggaaatcttccaaat

SEQ ID NO: 6081481 - DNA, 25 bp, Homo sapien
cacgcactagtgatttgctcctggt

SEQ ID NO: 6081482 - DNA, 25 bp, Homo sapien
acaatctcttcttcgttagacttag

SEQ ID NO: 6081483 - DNA, 25 bp, Homo sapien
cgtggaaatcttccaaattcgcttt

SEQ ID NO: 6081484 - DNA, 25 bp, Homo sapien
aacgagcctgatggtgttagactaa

SEQ ID NO: 6081485 - DNA, 25 bp, Homo sapien
tgtagatatccaccacagaagcgcc

SEQ ID NO: 6081486 - DNA, 25 bp, Homo sapien
gggcagcgagaatgagggggtacag

SEQ ID NO: 6081487 - DNA, 25 bp, Homo sapien
gactaagcatgcagaataggacgag

SEQ ID NO: 6081488 - DNA, 25 bp, Homo sapien
atactacgttacgtgaatcagaagc

SEQ ID NO: 6081489 - DNA, 25 bp, Homo sapien
ccaaaatcgtcgaagtaaacaacag

SEQ ID NO: 6081490 - DNA, 25 bp, Homo sapien
tcgcttttgttcacaatctcttctt

SEQ ID NO: 6081491 - DNA, 25 bp, Homo sapien
ccaaattcgcttttgttcacaatct

SEQ ID NO: 6081492 - DNA, 25 bp, Homo sapien
gcggcaccagcttcaacgtatgttc

SEQ ID NO: 6081493 - DNA, 25 bp, Homo sapien
aagcgccatttctgtcttcttcgat

SEQ ID NO: 6081494 - DNA, 25 bp, Homo sapien
aggtggagggcagcgagaatgaggg

SEQ ID NO: 6081495 - DNA, 25 bp, Homo sapien
tgtataacctaatcgacctagaaaa

SEQ ID NO: 6081496 - DNA, 25 bp, Homo sapien
aattctaactcgaaactatacttca

SEQ ID NO: 6081497 - DNA, 25 bp, Homo sapien
ggacgctgcacatggggaggtggag

SEQ ID NO: 6081498 - DNA, 25 bp, Homo sapien
aactcgaaactatacttcaacaatg

SEQ ID NO: 6081499 - DNA, 25 bp, Homo sapien
tgagatcaatgacagaaaagataaa

SEQ ID NO: 6081500 - DNA, 25 bp, Homo sapien
ccggcttgtggcaccccgatgcatc

SEQ ID NO: 6081501 - DNA, 25 bp, Homo sapien
tcctggtgagatcaatgacagaaaa

SEQ ID NO: 6081502 - DNA, 25 bp, Homo sapien
cttcgatttctgtgaaacactgaaa

SEQ ID NO: 6081503 - DNA, 25 bp, Homo sapien
ccacagaagcgccatttctgtcttc

SEQ ID NO: 6081504 - DNA, 25 bp, Homo sapien
aataaaatgaccaattctaactcga

SEQ ID NO: 6081505 - DNA, 25 bp, Homo sapien
gataacagaaatgttttaccaattc

SEQ ID NO: 6081506 - DNA, 25 bp, Homo sapien
acatttatttacatactacgttacg

SEQ ID NO: 6081507 - DNA, 25 bp, Homo sapien
agataaacgagcctgatggtgttag

SEQ ID NO: 6081508 - DNA, 25 bp, Homo sapien
catttctgtcttcttcgatttctgt

SEQ ID NO: 6081509 - DNA, 25 bp, Homo sapien
actgaaaataaaatgaccaattcta

SEQ ID NO: 6081510 - DNA, 25 bp, Homo sapien
atttacatactacgttacgtgaatc

SEQ ID NO: 6081511 - DNA, 25 bp, Homo sapien
caatgacagaaaagataaacgagcc

SEQ ID NO: 6081512 - DNA, 25 bp, Homo sapien
ccagcttcaacgtatgttcccaaaa

SEQ ID NO: 6081513 - DNA, 25 bp, Homo sapien
tgaaacactgaaaataaaatgacca

SEQ ID NO: 6081514 - DNA, 25 bp, Homo sapien
tatgttcccaaaatcgtcgaagtaa

SEQ ID NO: 6081515 - DNA, 25 bp, Homo sapien
aaactatacttcaacaatgtataac

SEQ ID NO: 6081516 - DNA, 25 bp, Homo sapien
cagtattgctactgtagatatccac

SEQ ID NO: 6081517 - DNA, 25 bp, Homo sapien
atgaccaattctaactcgaaactat

SEQ ID NO: 6081518 - DNA, 25 bp, Homo sapien
gaaccatgttgttcacatgggagag

SEQ ID NO: 6081519 - DNA, 25 bp, Homo sapien
ctgagccagcagtagtaaaggaaga

SEQ ID NO: 6081520 - DNA, 25 bp, Homo sapien
ccctgttaccagtgtcagtgaactg

SEQ ID NO: 6081521 - DNA, 25 bp, Homo sapien
cagaggcagcaaatataccagtagg

SEQ ID NO: 6081522 - DNA, 25 bp, Homo sapien
catgcttcaaagctctgggtcctga

SEQ ID NO: 6081523 - DNA, 25 bp, Homo sapien
ggacctgcatctggacatgcttcaa

SEQ ID NO: 6081524 - DNA, 25 bp, Homo sapien
tggagaggcaagaagtgcgccagca

SEQ ID NO: 6081525 - DNA, 25 bp, Homo sapien
cagcagtagtaaaggaagacacaga

SEQ ID NO: 6081526 - DNA, 25 bp, Homo sapien
tgggaagacttccatatataagagg

SEQ ID NO: 6081527 - DNA, 25 bp, Homo sapien
ggctccttagactctggtgcccgga

SEQ ID NO: 6081528 - DNA, 25 bp, Homo sapien
ttagactctggtgcccggacctgca

SEQ ID NO: 6081529 - DNA, 25 bp, Homo sapien
ggcaggagatacaccagccgaggca

SEQ ID NO: 6081530 - DNA, 25 bp, Homo sapien
gaacaagaactgcacagacgcacag

SEQ ID NO: 6081531 - DNA, 25 bp, Homo sapien
tagcacatgaagctgggcttccacc

SEQ ID NO: 6081532 - DNA, 25 bp, Homo sapien
tctatgcgcattaggttaagacctc

SEQ ID NO: 6081533 - DNA, 25 bp, Homo sapien
gttctcccaaggcatgtagaagttg

SEQ ID NO: 6081534 - DNA, 25 bp, Homo sapien
ttccacctagatcagctaaggacag

SEQ ID NO: 6081535 - DNA, 25 bp, Homo sapien
gctgcctggaataacggctggcact

SEQ ID NO: 6081536 - DNA, 25 bp, Homo sapien
gccaagatcacaggcgatccaagag

SEQ ID NO: 6081537 - DNA, 25 bp, Homo sapien
tccatctggcctcaacaacattggg

SEQ ID NO: 6081538 - DNA, 25 bp, Homo sapien
gaagctgggcttccacctagatcag

SEQ ID NO: 6081539 - DNA, 25 bp, Homo sapien
tggaataacggctggcacttgcaca

SEQ ID NO: 6081540 - DNA, 25 bp, Homo sapien
gcctcaacaacattgggctgcctgg

SEQ ID NO: 6081541 - DNA, 25 bp, Homo sapien
ggcgatccaagagtcctccagggaa

SEQ ID NO: 6081542 - DNA, 25 bp, Homo sapien
gaatgtttgaatggctggatagatg

SEQ ID NO: 6081543 - DNA, 25 bp, Homo sapien
ggaacaactgcaggtcagtactcag

SEQ ID NO: 6081544 - DNA, 25 bp, Homo sapien
tgcctctttcccttaagatggttaa

SEQ ID NO: 6081545 - DNA, 25 bp, Homo sapien
ttccagggtctcatcaagtgcccta

SEQ ID NO: 6081546 - DNA, 25 bp, Homo sapien
caagtgccctatgctggccagtcaa

SEQ ID NO: 6081547 - DNA, 25 bp, Homo sapien
caagtctagtggagaaaggttgcgc

SEQ ID NO: 6081548 - DNA, 25 bp, Homo sapien
ggttgtgctagatgcctctcccgtg

SEQ ID NO: 6081549 - DNA, 25 bp, Homo sapien
tagactgcattcttaccctgccttc

SEQ ID NO: 6081550 - DNA, 25 bp, Homo sapien
gcttgataaatgtcttcaggcgaat

SEQ ID NO: 6081551 - DNA, 25 bp, Homo sapien
gaaaggttgcgctctagactgcatt

SEQ ID NO: 6081552 - DNA, 25 bp, Homo sapien
tgacccattgcaggagcttgataaa

SEQ ID NO: 6081553 - DNA, 25 bp, Homo sapien
ggacaggattcacttaaattactta

SEQ ID NO: 6081554 - DNA, 25 bp, Homo sapien
ggactacattttggttatccactca

SEQ ID NO: 6081555 - DNA, 25 bp, Homo sapien
gcagctgctcttttacaaatcgtgg

SEQ ID NO: 6081556 - DNA, 25 bp, Homo sapien
gctgccaatgacaagcatgctcatt

SEQ ID NO: 6081557 - DNA, 25 bp, Homo sapien
gaaaatctcagagagctgccaatga

SEQ ID NO: 6081558 - DNA, 25 bp, Homo sapien
acaaatcgtggtaacataaacaatg

SEQ ID NO: 6081559 - DNA, 25 bp, Homo sapien
aacaagccagtaagaggcactgaaa

SEQ ID NO: 6081560 - DNA, 25 bp, Homo sapien
cactcatctatggttggacattggg

SEQ ID NO: 6081561 - DNA, 25 bp, Homo sapien
gagtttgattctctttggtacccta

SEQ ID NO: 6081562 - DNA, 25 bp, Homo sapien
ttcaagccactgaatgttgaggtgg

SEQ ID NO: 6081563 - DNA, 25 bp, Homo sapien
tcaccattaaccgtttccagaacat

SEQ ID NO: 6081564 - DNA, 25 bp, Homo sapien
tgctcattctcagcgcagctgctct

SEQ ID NO: 6081565 - DNA, 25 bp, Homo sapien
tgttgtagcacgtggcgggacttcc

SEQ ID NO: 6081566 - DNA, 25 bp, Homo sapien
tttttgccgtcttcttaacaagcca

SEQ ID NO: 6081567 - DNA, 25 bp, Homo sapien
tttgccgtcttcttaacaagccagt

SEQ ID NO: 6081568 - DNA, 25 bp, Homo sapien
ttttgccgtcttcttaacaagccag

SEQ ID NO: 6081569 - DNA, 25 bp, Homo sapien
atttcatggtgaaggcccagatctt

SEQ ID NO: 6081570 - DNA, 25 bp, Homo sapien
gcccaatttattggcgtggactgca

SEQ ID NO: 6081571 - DNA, 25 bp, Homo sapien
tcttgccctggcttaaaatgtctgg

SEQ ID NO: 6081572 - DNA, 25 bp, Homo sapien
taaggagtgtttctacggcaactgc

SEQ ID NO: 6081573 - DNA, 25 bp, Homo sapien
tcagaggaatgaattagtgtctacc

SEQ ID NO: 6081574 - DNA, 25 bp, Homo sapien
acattgtgctttgtttcgttccgaa

SEQ ID NO: 6081575 - DNA, 25 bp, Homo sapien
cagtcttgctgatggtcaacctttg

SEQ ID NO: 6081576 - DNA, 25 bp, Homo sapien
cgttccgaattatagcattgcacag

SEQ ID NO: 6081577 - DNA, 25 bp, Homo sapien
ttggaaatgaagatggctcataggc

SEQ ID NO: 6081578 - DNA, 25 bp, Homo sapien
cagccaagatgactgctaaggagtg

SEQ ID NO: 6081579 - DNA, 25 bp, Homo sapien
tccagaacatcagctactgaacagt

SEQ ID NO: 6081580 - DNA, 25 bp, Homo sapien
tacggcaactgcagaaaacatcttt

SEQ ID NO: 6081581 - DNA, 25 bp, Homo sapien
gtattggtggcttcggtaaacactg

SEQ ID NO: 6081582 - DNA, 25 bp, Homo sapien
gatgccatttcctgactatctagta

SEQ ID NO: 6081583 - DNA, 25 bp, Homo sapien
gaggtggctggtcgatgccatttcc

SEQ ID NO: 6081584 - DNA, 25 bp, Homo sapien
tcttcatctggatgcgatcttgaag

SEQ ID NO: 6081585 - DNA, 25 bp, Homo sapien
tgctccaaggtgacccgtggctgga

SEQ ID NO: 6081586 - DNA, 25 bp, Homo sapien
gactatctagtaccttgggttcttc

SEQ ID NO: 6081587 - DNA, 25 bp, Homo sapien
ctgtcatcgccacaccgaggctgtt

SEQ ID NO: 6081588 - DNA, 25 bp, Homo sapien
gtctcaatcctaatgctggatcctg

SEQ ID NO: 6081589 - DNA, 25 bp, Homo sapien
accgaggctgttcagcaccgcagga

SEQ ID NO: 6081590 - DNA, 25 bp, Homo sapien
attttcctagaggacctcacagtgg

SEQ ID NO: 6081591 - DNA, 25 bp, Homo sapien
tggtggcttcggtaaacactgaaag

SEQ ID NO: 6081592 - DNA, 25 bp, Homo sapien
tcacgcttccagaaagctgagatct

SEQ ID NO: 6081593 - DNA, 25 bp, Homo sapien
gacaactgggcactttggaatcaca

SEQ ID NO: 6081594 - DNA, 25 bp, Homo sapien
gatatcacagggtcacatcaaggac

SEQ ID NO: 6081595 - DNA, 25 bp, Homo sapien
tcttcacagacccacaagctattgg

SEQ ID NO: 6081596 - DNA, 25 bp, Homo sapien
gagaagcttcttcgccagacgggtg

SEQ ID NO: 6081597 - DNA, 25 bp, Homo sapien
tcatctcacaactcttagaccacag

SEQ ID NO: 6081598 - DNA, 25 bp, Homo sapien
gggtggcccagaacacgtgcttgta

SEQ ID NO: 6081599 - DNA, 25 bp, Homo sapien
cacaaagtttatggttgaagaccac

SEQ ID NO: 6081600 - DNA, 25 bp, Homo sapien
tggaagtccacgctccttcatcggg

SEQ ID NO: 6081601 - DNA, 25 bp, Homo sapien
tatcctgagacaggatatcacaggg

SEQ ID NO: 6081602 - DNA, 25 bp, Homo sapien
gactgctgcgtagatggaagtccac

SEQ ID NO: 6081603 - DNA, 25 bp, Homo sapien
tgtgagaaactcaaacaccgcagtc

SEQ ID NO: 6081604 - DNA, 25 bp, Homo sapien
tatttatggcacctgtgacaactgg

SEQ ID NO: 6081605 - DNA, 25 bp, Homo sapien
gatgtccctcttcataggttgggtg

SEQ ID NO: 6081606 - DNA, 25 bp, Homo sapien
actactcagatgtctcagattttgc

SEQ ID NO: 6081607 - DNA, 25 bp, Homo sapien
caatatttgaaggtgtgttggctga

SEQ ID NO: 6081608 - DNA, 25 bp, Homo sapien
gaaatatctcctcagttccaggctg

SEQ ID NO: 6081609 - DNA, 25 bp, Homo sapien
tatacccataaggatctcaagccac

SEQ ID NO: 6081610 - DNA, 25 bp, Homo sapien
gaaatgaattgctcatactactcag

SEQ ID NO: 6081611 - DNA, 25 bp, Homo sapien
ggtgccagcaatgaatatacccata

SEQ ID NO: 6081612 - DNA, 25 bp, Homo sapien
tctcgtagacattctacaggaaatg

SEQ ID NO: 6081613 - DNA, 25 bp, Homo sapien
caaacacttttgaatcatatcaggt

SEQ ID NO: 6081614 - DNA, 25 bp, Homo sapien
cagtaagttacagtccagggatagg

SEQ ID NO: 6081615 - DNA, 25 bp, Homo sapien
gaacgttcagtaagttacagtccag

SEQ ID NO: 6081616 - DNA, 25 bp, Homo sapien
tgactcttctcaggtgaacgttcag

SEQ ID NO: 6081617 - DNA, 25 bp, Homo sapien
gggcttcacgcagcacattttatta

SEQ ID NO: 6081618 - DNA, 25 bp, Homo sapien
ccttcttggagcatctgtaacggca

SEQ ID NO: 6081619 - DNA, 25 bp, Homo sapien
gtgggaatccactgggagcttcatc

SEQ ID NO: 6081620 - DNA, 25 bp, Homo sapien
gctaaggcagcccaaaatgaagctg

SEQ ID NO: 6081621 - DNA, 25 bp, Homo sapien
tccttcttggagcatctgtaacggc

SEQ ID NO: 6081622 - DNA, 25 bp, Homo sapien
tggagcatctgtaacggcatttgcc

SEQ ID NO: 6081623 - DNA, 25 bp, Homo sapien
tcttggagcatctgtaacggcattt

SEQ ID NO: 6081624 - DNA, 25 bp, Homo sapien
tttgccataaagattccagcatctt

SEQ ID NO: 6081625 - DNA, 25 bp, Homo sapien
tacttgggcttcacgcagcacattt

SEQ ID NO: 6081626 - DNA, 25 bp, Homo sapien
gtacttgggcttcacgcagcacatt

SEQ ID NO: 6081627 - DNA, 25 bp, Homo sapien
catctgtaacggcatttgccataaa

SEQ ID NO: 6081628 - DNA, 25 bp, Homo sapien
gagcatctgtaacggcatttgccat

SEQ ID NO: 6081629 - DNA, 25 bp, Homo sapien
taatcatttactttagcaggcaagc

SEQ ID NO: 6081630 - DNA, 25 bp, Homo sapien
gctgaccaactttctctgggagtga

SEQ ID NO: 6081631 - DNA, 25 bp, Homo sapien
gagtgaggtgatgcagttctgtccc

SEQ ID NO: 6081632 - DNA, 25 bp, Homo sapien
gaagttgttcctgcacatcactgtg

SEQ ID NO: 6081633 - DNA, 25 bp, Homo sapien
gacttcgagtggcagggtatcaaaa

SEQ ID NO: 6081634 - DNA, 25 bp, Homo sapien
caatgcctctttgacttcgagtggc

SEQ ID NO: 6081635 - DNA, 25 bp, Homo sapien
caagcccgcttttcttgagcatccg

SEQ ID NO: 6081636 - DNA, 25 bp, Homo sapien
taaacattcagtagcggcagcatcc

SEQ ID NO: 6081637 - DNA, 25 bp, Homo sapien
aaaaggtgatcttccacaacaagcc

SEQ ID NO: 6081638 - DNA, 25 bp, Homo sapien
tagcggcagcatccaagttacaaac

SEQ ID NO: 6081639 - DNA, 25 bp, Homo sapien
tgagcacttgcaatctaggaagttg

SEQ ID NO: 6081640 - DNA, 25 bp, Homo sapien
taataacttgtacgtgagcacttgc

SEQ ID NO: 6081641 - DNA, 25 bp, Homo sapien
tcctcctccttctgttcttccttca

SEQ ID NO: 6081642 - DNA, 25 bp, Homo sapien
tcaggctgaagcctgggcagggagg

SEQ ID NO: 6081643 - DNA, 25 bp, Homo sapien
cctcttccttcttccattcggcctc

SEQ ID NO: 6081644 - DNA, 25 bp, Homo sapien
cagcaggtcctggatgcggtttatg

SEQ ID NO: 6081645 - DNA, 25 bp, Homo sapien
gccgggcctgctcctcctgagcctt

SEQ ID NO: 6081646 - DNA, 25 bp, Homo sapien
tctggtcatattccatccctgcccc

SEQ ID NO: 6081647 - DNA, 25 bp, Homo sapien
ggaaagccagatcttccaaaagcac

SEQ ID NO: 6081648 - DNA, 25 bp, Homo sapien
tccttctgttcttccttcaggcgaa

SEQ ID NO: 6081649 - DNA, 25 bp, Homo sapien
aagctgtgagactgctcctcagtca

SEQ ID NO: 6081650 - DNA, 25 bp, Homo sapien
cctgctcctcctgagccttcctctc

SEQ ID NO: 6081651 - DNA, 25 bp, Homo sapien
catattccatccctgccccaagacg

SEQ ID NO: 6081652 - DNA, 25 bp, Homo sapien
cttaggcccatctggaaagccagat

SEQ ID NO: 6081653 - DNA, 25 bp, Homo sapien
ctgaagcctgggcagggaggtcctg

SEQ ID NO: 6081654 - DNA, 25 bp, Homo sapien
aggtcctggccccaggagatgaggg

SEQ ID NO: 6081655 - DNA, 25 bp, Homo sapien
tgctggcctgggcaagctctgtgat

SEQ ID NO: 6081656 - DNA, 25 bp, Homo sapien
acaccttcttcttctaccacgaagg

SEQ ID NO: 6081657 - DNA, 25 bp, Homo sapien
cctctcttcctcctccttctgttct

SEQ ID NO: 6081658 - DNA, 25 bp, Homo sapien
tccttcagtttcaggtactcctcgt

SEQ ID NO: 6081659 - DNA, 25 bp, Homo sapien
gtcctggatgcggtttatggcgtcc

SEQ ID NO: 6081660 - DNA, 25 bp, Homo sapien
cattagggaaggatgaagacacatg

SEQ ID NO: 6081661 - DNA, 25 bp, Homo sapien
tgttcttccttcaggcgaagccgtt

SEQ ID NO: 6081662 - DNA, 25 bp, Homo sapien
tccttcaggcgaagccgttcctctt

SEQ ID NO: 6081663 - DNA, 25 bp, Homo sapien
cctgccccaagacggcattagggaa

SEQ ID NO: 6081664 - DNA, 25 bp, Homo sapien
gcagggaggtcctggccccaggaga

SEQ ID NO: 6081665 - DNA, 25 bp, Homo sapien
cccatctggaaagccagatcttcca

SEQ ID NO: 6081666 - DNA, 25 bp, Homo sapien
atggtttcgctaacaccttcttctt

SEQ ID NO: 6081667 - DNA, 25 bp, Homo sapien
tcgctaacaccttcttcttctacca

SEQ ID NO: 6081668 - DNA, 25 bp, Homo sapien
aattctgtcaggaagctgtgagact

SEQ ID NO: 6081669 - DNA, 25 bp, Homo sapien
agtttcaggtactcctcgtgatccc

SEQ ID NO: 6081670 - DNA, 25 bp, Homo sapien
ggagttgctggcctgggcaagctct

SEQ ID NO: 6081671 - DNA, 25 bp, Homo sapien
acacatgtaggccacaggatacact

SEQ ID NO: 6081672 - DNA, 25 bp, Homo sapien
aggtactcctcgtgatcccgccggg

SEQ ID NO: 6081673 - DNA, 25 bp, Homo sapien
gttagagtcccctccgtcagcaggt

SEQ ID NO: 6081674 - DNA, 25 bp, Homo sapien
atcccgccgggcctgctcctcctga

SEQ ID NO: 6081675 - DNA, 25 bp, Homo sapien
ataaacttgccccggtcgtcaatca

SEQ ID NO: 6081676 - DNA, 25 bp, Homo sapien
ctgggcaagctctgtgatggacacc

SEQ ID NO: 6081677 - DNA, 25 bp, Homo sapien
agtcccctccgtcagcaggtcctgg

SEQ ID NO: 6081678 - DNA, 25 bp, Homo sapien
cggcctcacgttgggactctaggcg

SEQ ID NO: 6081679 - DNA, 25 bp, Homo sapien
tcaatcacacctgttagagtcccct

SEQ ID NO: 6081680 - DNA, 25 bp, Homo sapien
atgtagataaacttgccccggtcgt

SEQ ID NO: 6081681 - DNA, 25 bp, Homo sapien
gatgcggtttatggcgtcctgagtc

SEQ ID NO: 6081682 - DNA, 25 bp, Homo sapien
agccagttcctctggggttatgtag

SEQ ID NO: 6081683 - DNA, 25 bp, Homo sapien
cacggcagccagttcctctggggtt

SEQ ID NO: 6081684 - DNA, 25 bp, Homo sapien
gccccgctgtcggatgaaattggcc

SEQ ID NO: 6081685 - DNA, 25 bp, Homo sapien
taccacgaaggcctccttcagtttc

SEQ ID NO: 6081686 - DNA, 25 bp, Homo sapien
tttatggcgtcctgagtccttaggc

SEQ ID NO: 6081687 - DNA, 25 bp, Homo sapien
caggagatgagggagttgctggcct

SEQ ID NO: 6081688 - DNA, 25 bp, Homo sapien
tcttgatgtaattgatgaattctgt

SEQ ID NO: 6081689 - DNA, 25 bp, Homo sapien
ccatccctgccccaagacggcatta

SEQ ID NO: 6081690 - DNA, 25 bp, Homo sapien
gcgtcctgagtccttaggcccatct

SEQ ID NO: 6081691 - DNA, 25 bp, Homo sapien
ctcaaggaaggactggagtcaggct

SEQ ID NO: 6081692 - DNA, 25 bp, Homo sapien
gagccttcctctcttcctcctcctt

SEQ ID NO: 6081693 - DNA, 25 bp, Homo sapien
ccagatcttccaaaagcacaacctt

SEQ ID NO: 6081694 - DNA, 25 bp, Homo sapien
gatgaaattggccacggcagccagt

SEQ ID NO: 6081695 - DNA, 25 bp, Homo sapien
gtcaggaagctgtgagactgctcct

SEQ ID NO: 6081696 - DNA, 25 bp, Homo sapien
gatacactcaaggaaggactggagt

SEQ ID NO: 6081697 - DNA, 25 bp, Homo sapien
tggccccaggagatgagggagttgc

SEQ ID NO: 6081698 - DNA, 25 bp, Homo sapien
ttcctctggggttatgtagataaac

SEQ ID NO: 6081699 - DNA, 25 bp, Homo sapien
tcagtcatggtttcgctaacacctt

SEQ ID NO: 6081700 - DNA, 25 bp, Homo sapien
tggacttcttgatgtaattgatgaa

SEQ ID NO: 6081701 - DNA, 25 bp, Homo sapien
tccattcggcctcacgttgggactc

SEQ ID NO: 6081702 - DNA, 25 bp, Homo sapien
gccgttcctcttccttcttccattc

SEQ ID NO: 6081703 - DNA, 25 bp, Homo sapien
ttgatgaattctgtcaggaagctgt

SEQ ID NO: 6081704 - DNA, 25 bp, Homo sapien
aagctctgtgatggacacccggccc

SEQ ID NO: 6081705 - DNA, 25 bp, Homo sapien
caaccttggacttcttgatgtaatt

SEQ ID NO: 6081706 - DNA, 25 bp, Homo sapien
gatgagggagttgctggcctgggca

SEQ ID NO: 6081707 - DNA, 25 bp, Homo sapien
ctggagtcaggctgaagcctgggca

SEQ ID NO: 6081708 - DNA, 25 bp, Homo sapien
cctcctgagccttcctctcttcctc

SEQ ID NO: 6081709 - DNA, 25 bp, Homo sapien
ccttcttccattcggcctcacgttg

SEQ ID NO: 6081710 - DNA, 25 bp, Homo sapien
aaggactggagtcaggctgaagcct

SEQ ID NO: 6081711 - DNA, 25 bp, Homo sapien
tggggttatgtagataaacttgccc

SEQ ID NO: 6081712 - DNA, 25 bp, Homo sapien
caagacggcattagggaaggatgaa

SEQ ID NO: 6081713 - DNA, 25 bp, Homo sapien
aggcgaagccgttcctcttccttct

SEQ ID NO: 6081714 - DNA, 25 bp, Homo sapien
atgaagacacatgtaggccacagga

SEQ ID NO: 6081715 - DNA, 25 bp, Homo sapien
ctgtcggatgaaattggccacggca

SEQ ID NO: 6081716 - DNA, 25 bp, Homo sapien
atgtaattgatgaattctgtcagga

SEQ ID NO: 6081717 - DNA, 25 bp, Homo sapien
ccacaggatacactcaaggaaggac

SEQ ID NO: 6081718 - DNA, 25 bp, Homo sapien
attggccacggcagccagttcctct

SEQ ID NO: 6081719 - DNA, 25 bp, Homo sapien
tgtaggccacaggatacactcaagg

SEQ ID NO: 6081720 - DNA, 25 bp, Homo sapien
gaaggcctccttcagtttcaggtac

SEQ ID NO: 6081721 - DNA, 25 bp, Homo sapien
acacctgttagagtcccctccgtca

SEQ ID NO: 6081722 - DNA, 25 bp, Homo sapien
aaagcacaaccttggacttcttgat

SEQ ID NO: 6081723 - DNA, 25 bp, Homo sapien
ggaaggatgaagacacatgtaggcc

SEQ ID NO: 6081724 - DNA, 25 bp, Homo sapien
cggtcgtcaatcacacctgttagag

SEQ ID NO: 6081725 - DNA, 25 bp, Homo sapien
tgagactgctcctcagtcatggttt

SEQ ID NO: 6081726 - DNA, 25 bp, Homo sapien
gcctgggcagggaggtcctggcccc

SEQ ID NO: 6081727 - DNA, 25 bp, Homo sapien
ttgccccggtcgtcaatcacacctg

SEQ ID NO: 6081728 - DNA, 25 bp, Homo sapien
tgctcctcagtcatggtttcgctaa

SEQ ID NO: 6081729 - DNA, 25 bp, Homo sapien
acccggccccgctgtcggatgaaat

SEQ ID NO: 6081730 - DNA, 25 bp, Homo sapien
ttcttctaccacgaaggcctccttc

SEQ ID NO: 6081731 - DNA, 25 bp, Homo sapien
cttccaaaagcacaaccttggactt

SEQ ID NO: 6081732 - DNA, 25 bp, Homo sapien
ctccgtcagcaggtcctggatgcgg

SEQ ID NO: 6081733 - DNA, 25 bp, Homo sapien
tgagtccttaggcccatctggaaag

SEQ ID NO: 6081734 - DNA, 25 bp, Homo sapien
tgcttgcagcagatctccattctgc

SEQ ID NO: 6081735 - DNA, 25 bp, Homo sapien
ccctgctcagcaatcccaggttggg

SEQ ID NO: 6081736 - DNA, 25 bp, Homo sapien
cctctgtctcagttcagttgctctg

SEQ ID NO: 6081737 - DNA, 25 bp, Homo sapien
tctttaaaaatgtaccttagagcaa

SEQ ID NO: 6081738 - DNA, 25 bp, Homo sapien
cataacatttggctgcttgcagcag

SEQ ID NO: 6081739 - DNA, 25 bp, Homo sapien
agggggcgcaatcttggctcactgc

SEQ ID NO: 6081740 - DNA, 25 bp, Homo sapien
tgtcttcctatcctcctacccgtca

SEQ ID NO: 6081741 - DNA, 25 bp, Homo sapien
tgtaccttagagcaacatgcaaagc

SEQ ID NO: 6081742 - DNA, 25 bp, Homo sapien
tgcagggggcgcaatcttggctcac

SEQ ID NO: 6081743 - DNA, 25 bp, Homo sapien
catgcaaagcttccctgctcagcaa

SEQ ID NO: 6081744 - DNA, 25 bp, Homo sapien
caaccaccactgcaggcttctgatg

SEQ ID NO: 6081745 - DNA, 25 bp, Homo sapien
gatgctctgttttcctcctctgtct

SEQ ID NO: 6081746 - DNA, 25 bp, Homo sapien
ttaacatattggcttcgtgggatcc

SEQ ID NO: 6081747 - DNA, 25 bp, Homo sapien
atctgcagatggaaaccgatgccca

SEQ ID NO: 6081748 - DNA, 25 bp, Homo sapien
aagaggaagacatagcgctactgct

SEQ ID NO: 6081749 - DNA, 25 bp, Homo sapien
tgactttgccatccgggtagatctg

SEQ ID NO: 6081750 - DNA, 25 bp, Homo sapien
cagatggaaaccgatgcccactctg

SEQ ID NO: 6081751 - DNA, 25 bp, Homo sapien
aagacatagcgctactgctgctctg

SEQ ID NO: 6081752 - DNA, 25 bp, Homo sapien
cctctagggttcctatcagtggcag

SEQ ID NO: 6081753 - DNA, 25 bp, Homo sapien
tgccatccgggtagatctgcagatg

SEQ ID NO: 6081754 - DNA, 25 bp, Homo sapien
gatccattgactttgccatccgggt

SEQ ID NO: 6081755 - DNA, 25 bp, Homo sapien
gggcgagacgcttctccccgtgagc

SEQ ID NO: 6081756 - DNA, 25 bp, Homo sapien
gctgctggagcctctagggttccta

SEQ ID NO: 6081757 - DNA, 25 bp, Homo sapien
tattggcttcgtgggatccattgac

SEQ ID NO: 6081758 - DNA, 25 bp, Homo sapien
ggtgggtgtttctgccactccgcgt

SEQ ID NO: 6081759 - DNA, 25 bp, Homo sapien
aggaagcgctcacggacgctccgct

SEQ ID NO: 6081760 - DNA, 25 bp, Homo sapien
gtaggtgggtgtttctgccactccg

SEQ ID NO: 6081761 - DNA, 25 bp, Homo sapien
taggtgggtgtttctgccactccgc

SEQ ID NO: 6081762 - DNA, 25 bp, Homo sapien
gggcaggcagcgccaacaccaggca

SEQ ID NO: 6081763 - DNA, 25 bp, Homo sapien
gtgtttctgccactccgcgtacagc

SEQ ID NO: 6081764 - DNA, 25 bp, Homo sapien
ggtgtttctgccactccgcgtacag

SEQ ID NO: 6081765 - DNA, 25 bp, Homo sapien
gaggaagcgctcacggacgctccgc

SEQ ID NO: 6081766 - DNA, 25 bp, Homo sapien
accaggcacagcagcgacaggcctg

SEQ ID NO: 6081767 - DNA, 25 bp, Homo sapien
gtgggtgtttctgccactccgcgta

SEQ ID NO: 6081768 - DNA, 25 bp, Homo sapien
gggtgtttctgccactccgcgtaca

SEQ ID NO: 6081769 - DNA, 25 bp, Homo sapien
ctgtctctgcgtcccgccaggggta

SEQ ID NO: 6081770 - DNA, 25 bp, Homo sapien
acctgtgcaccggggctctgcttct

SEQ ID NO: 6081771 - DNA, 25 bp, Homo sapien
tggtggggctgggcggcggcgggca

SEQ ID NO: 6081772 - DNA, 25 bp, Homo sapien
agctccagctcccgctggctgcccc

SEQ ID NO: 6081773 - DNA, 25 bp, Homo sapien
ctcagtgcttcacgctctacctgta

SEQ ID NO: 6081774 - DNA, 25 bp, Homo sapien
tgcccagtcgccctcggcagccatg

SEQ ID NO: 6081775 - DNA, 25 bp, Homo sapien
tccttggggagcagaggcaggggag

SEQ ID NO: 6081776 - DNA, 25 bp, Homo sapien
gcaccggggctctgcttctttatcc

SEQ ID NO: 6081777 - DNA, 25 bp, Homo sapien
caggcgtgcccagtcgccctcggca

SEQ ID NO: 6081778 - DNA, 25 bp, Homo sapien
ggctgggcggcggcgggcagggcat

SEQ ID NO: 6081779 - DNA, 25 bp, Homo sapien
attagggccgcctcgcgccgctcca

SEQ ID NO: 6081780 - DNA, 25 bp, Homo sapien
cacttactcagtgcttcacgctcta

SEQ ID NO: 6081781 - DNA, 25 bp, Homo sapien
ccgctggctgccccgcatggccagc

SEQ ID NO: 6081782 - DNA, 25 bp, Homo sapien
aggtttacacatggagcggtcagtc

SEQ ID NO: 6081783 - DNA, 25 bp, Homo sapien
agaggcaggggagagggcggttccg

SEQ ID NO: 6081784 - DNA, 25 bp, Homo sapien
gccgcctcgcgccgctccagctcca

SEQ ID NO: 6081785 - DNA, 25 bp, Homo sapien
tgcttctttatccacttactcagtg

SEQ ID NO: 6081786 - DNA, 25 bp, Homo sapien
gagctcggagcagcgctcttcttca

SEQ ID NO: 6081787 - DNA, 25 bp, Homo sapien
tggtgaccatatcattgtcactgtt

SEQ ID NO: 6081788 - DNA, 25 bp, Homo sapien
atggttaggtttacacatggagcgg

SEQ ID NO: 6081789 - DNA, 25 bp, Homo sapien
gggctctgcttctttatccacttac

SEQ ID NO: 6081790 - DNA, 25 bp, Homo sapien
cgctctacctgtagctggtggcgct

SEQ ID NO: 6081791 - DNA, 25 bp, Homo sapien
gccagctcacccatctgctccaaca

SEQ ID NO: 6081792 - DNA, 25 bp, Homo sapien
tccacggattgtgcctcctgcttca

SEQ ID NO: 6081793 - DNA, 25 bp, Homo sapien
tccggtctgtgtacctaatccaggc

SEQ ID NO: 6081794 - DNA, 25 bp, Homo sapien
gtcagtcatgctacagcaggacctt

SEQ ID NO: 6081795 - DNA, 25 bp, Homo sapien
ctggcgcttgcgctccagctcgagt

SEQ ID NO: 6081796 - DNA, 25 bp, Homo sapien
agccatggtggggctgggcggcggc

SEQ ID NO: 6081797 - DNA, 25 bp, Homo sapien
tcgcgccgctccagctccagctccc

SEQ ID NO: 6081798 - DNA, 25 bp, Homo sapien
ggagcggtcagtcatgctacagcag

SEQ ID NO: 6081799 - DNA, 25 bp, Homo sapien
gagcagcgctcttcttcagctccgg

SEQ ID NO: 6081800 - DNA, 25 bp, Homo sapien
tggtggtcggcgagctcggagcagc

SEQ ID NO: 6081801 - DNA, 25 bp, Homo sapien
cgcatggccagctcacccatctgct

SEQ ID NO: 6081802 - DNA, 25 bp, Homo sapien
tcacccatctgctccaacaggcgtg

SEQ ID NO: 6081803 - DNA, 25 bp, Homo sapien
aggactacaaagaggtagctgtgag

SEQ ID NO: 6081804 - DNA, 25 bp, Homo sapien
tcggcgagctcggagcagcgctctt

SEQ ID NO: 6081805 - DNA, 25 bp, Homo sapien
taaaaatgcttcaggactacaaaga

SEQ ID NO: 6081806 - DNA, 25 bp, Homo sapien
tgcttcaggactacaaagaggtagc

SEQ ID NO: 6081807 - DNA, 25 bp, Homo sapien
ctccggcaggtgcacatcactcagg

SEQ ID NO: 6081808 - DNA, 25 bp, Homo sapien
ccatatcattgtcactgttgttgtc

SEQ ID NO: 6081809 - DNA, 25 bp, Homo sapien
aggtagctgtgaggactatccggtc

SEQ ID NO: 6081810 - DNA, 25 bp, Homo sapien
agagcctggcgcttgcgctccagct

SEQ ID NO: 6081811 - DNA, 25 bp, Homo sapien
tcctgctccacggattgtgcctcct

SEQ ID NO: 6081812 - DNA, 25 bp, Homo sapien
ctggcttaaaaatgcttcaggacta

SEQ ID NO: 6081813 - DNA, 25 bp, Homo sapien
ctccaacaggcgtgcccagtcgccc

SEQ ID NO: 6081814 - DNA, 25 bp, Homo sapien
tttatccacttactcagtgcttcac

SEQ ID NO: 6081815 - DNA, 25 bp, Homo sapien
aaccttctggcttaaaaatgcttca

SEQ ID NO: 6081816 - DNA, 25 bp, Homo sapien
tgttgtcatggatgtcagggtcctc

SEQ ID NO: 6081817 - DNA, 25 bp, Homo sapien
cactgttgttgtcatggatgtcagg

SEQ ID NO: 6081818 - DNA, 25 bp, Homo sapien
tagagaaccttctggcttaaaaatg

SEQ ID NO: 6081819 - DNA, 25 bp, Homo sapien
ctgtgaggactatccggtctgtgta

SEQ ID NO: 6081820 - DNA, 25 bp, Homo sapien
cgcttgcgctccagctcgagttccg

SEQ ID NO: 6081821 - DNA, 25 bp, Homo sapien
agctcccgctggctgccccgcatgg

SEQ ID NO: 6081822 - DNA, 25 bp, Homo sapien
acctaatccaggctactggactggg

SEQ ID NO: 6081823 - DNA, 25 bp, Homo sapien
acacatggagcggtcagtcatgcta

SEQ ID NO: 6081824 - DNA, 25 bp, Homo sapien
actggggggcgctgccgcgcctgca

SEQ ID NO: 6081825 - DNA, 25 bp, Homo sapien
ctggactggggggcgctgccgcgcc

SEQ ID NO: 6081826 - DNA, 25 bp, Homo sapien
cgctccagctccagctcccgctggc

SEQ ID NO: 6081827 - DNA, 25 bp, Homo sapien
acctgtagctggtggcgctcctgct

SEQ ID NO: 6081828 - DNA, 25 bp, Homo sapien
cattgtcactgttgttgtcatggat

SEQ ID NO: 6081829 - DNA, 25 bp, Homo sapien
gattgtgcctcctgcttcagagcct

SEQ ID NO: 6081830 - DNA, 25 bp, Homo sapien
tgcttcagagcctggcgcttgcgct

SEQ ID NO: 6081831 - DNA, 25 bp, Homo sapien
gcctgcattagggccgcctcgcgcc

SEQ ID NO: 6081832 - DNA, 25 bp, Homo sapien
gggagcagaggcaggggagagggcg

SEQ ID NO: 6081833 - DNA, 25 bp, Homo sapien
atctgctccaacaggcgtgcccagt

SEQ ID NO: 6081834 - DNA, 25 bp, Homo sapien
gcctcctgcttcagagcctggcgct

SEQ ID NO: 6081835 - DNA, 25 bp, Homo sapien
agtcgccctcggcagccatggtggg

SEQ ID NO: 6081836 - DNA, 25 bp, Homo sapien
gctgccccgcatggccagctcaccc

SEQ ID NO: 6081837 - DNA, 25 bp, Homo sapien
ggactatccggtctgtgtacctaat

SEQ ID NO: 6081838 - DNA, 25 bp, Homo sapien
agctggtggcgctcctgctccacgg

SEQ ID NO: 6081839 - DNA, 25 bp, Homo sapien
gcttcacgctctacctgtagctggt

SEQ ID NO: 6081840 - DNA, 25 bp, Homo sapien
acaaagaggtagctgtgaggactat

SEQ ID NO: 6081841 - DNA, 25 bp, Homo sapien
cagcctatggttaggtttacacatg

SEQ ID NO: 6081842 - DNA, 25 bp, Homo sapien
cttcagctccggcaggtgcacatca

SEQ ID NO: 6081843 - DNA, 25 bp, Homo sapien
gagagggcggttccgggacctgtgc

SEQ ID NO: 6081844 - DNA, 25 bp, Homo sapien
agctcgagttccgcctgcattaggg

SEQ ID NO: 6081845 - DNA, 25 bp, Homo sapien
caggtgcacatcactcaggtgctgg

SEQ ID NO: 6081846 - DNA, 25 bp, Homo sapien
ctgccgcgcctgcagcctatggtta

SEQ ID NO: 6081847 - DNA, 25 bp, Homo sapien
ctgtgtacctaatccaggctactgg

SEQ ID NO: 6081848 - DNA, 25 bp, Homo sapien
cgctccagctcgagttccgcctgca

SEQ ID NO: 6081849 - DNA, 25 bp, Homo sapien
catgctacagcaggaccttggtgac

SEQ ID NO: 6081850 - DNA, 25 bp, Homo sapien
tccgggacctgtgcaccggggctct

SEQ ID NO: 6081851 - DNA, 25 bp, Homo sapien
agggcatggtggtcggcgagctcgg

SEQ ID NO: 6081852 - DNA, 25 bp, Homo sapien
cgcctgcagcctatggttaggttta

SEQ ID NO: 6081853 - DNA, 25 bp, Homo sapien
gcggcggcgggcagggcatggtggt

SEQ ID NO: 6081854 - DNA, 25 bp, Homo sapien
gctcttcttcagctccggcaggtgc

SEQ ID NO: 6081855 - DNA, 25 bp, Homo sapien
ggaccttggtgaccatatcattgtc

SEQ ID NO: 6081856 - DNA, 25 bp, Homo sapien
tggcgctcctgctccacggattgtg

SEQ ID NO: 6081857 - DNA, 25 bp, Homo sapien
gggcgctgccgcgcctgcagcctat

SEQ ID NO: 6081858 - DNA, 25 bp, Homo sapien
acagcaggaccttggtgaccatatc

SEQ ID NO: 6081859 - DNA, 25 bp, Homo sapien
gcgggcagggcatggtggtcggcga

SEQ ID NO: 6081860 - DNA, 25 bp, Homo sapien
tcatggatgtcagggtcctccttgg

SEQ ID NO: 6081861 - DNA, 25 bp, Homo sapien
agttccgcctgcattagggccgcct

SEQ ID NO: 6081862 - DNA, 25 bp, Homo sapien
ctttagttttgcacatttcagctta

SEQ ID NO: 6081863 - DNA, 25 bp, Homo sapien
tttcgtagtagctggggctcgccaa

SEQ ID NO: 6081864 - DNA, 25 bp, Homo sapien
ccctcctctcagactcacatacttc

SEQ ID NO: 6081865 - DNA, 25 bp, Homo sapien
cttgagatgggctgacatttggcgg

SEQ ID NO: 6081866 - DNA, 25 bp, Homo sapien
tttcagctctgtactgaaatcttca

SEQ ID NO: 6081867 - DNA, 25 bp, Homo sapien
gcaggccaccaccaccgccaccgcg

SEQ ID NO: 6081868 - DNA, 25 bp, Homo sapien
gaatgggggtcagagatggaaaagt

SEQ ID NO: 6081869 - DNA, 25 bp, Homo sapien
cgcagagcctgctggagctggccca

SEQ ID NO: 6081870 - DNA, 25 bp, Homo sapien
ggaggcctggcgcaggccaccacca

SEQ ID NO: 6081871 - DNA, 25 bp, Homo sapien
cccgagttaattcctgcctgcactg

SEQ ID NO: 6081872 - DNA, 25 bp, Homo sapien
ccattagtttgcactacacagcgtg

SEQ ID NO: 6081873 - DNA, 25 bp, Homo sapien
gtattcataaagcttgtcttccagg

SEQ ID NO: 6081874 - DNA, 25 bp, Homo sapien
gggttggttagatttcagctctgta

SEQ ID NO: 6081875 - DNA, 25 bp, Homo sapien
tctcagactcacatacttccttcag

SEQ ID NO: 6081876 - DNA, 25 bp, Homo sapien
tcctcttgacatagctgtccccgag

SEQ ID NO: 6081877 - DNA, 25 bp, Homo sapien
ccaccgccaccgcgccctcgcggca

SEQ ID NO: 6081878 - DNA, 25 bp, Homo sapien
agtagctggggctcgccaagggcgc

SEQ ID NO: 6081879 - DNA, 25 bp, Homo sapien
cttcaggtatttctttagttttgca

SEQ ID NO: 6081880 - DNA, 25 bp, Homo sapien
ctggagctggcccaccctttcgtag

SEQ ID NO: 6081881 - DNA, 25 bp, Homo sapien
ccaccctttcgtagtagctggggct

SEQ ID NO: 6081882 - DNA, 25 bp, Homo sapien
cagagatggaaaagttctttggtgg

SEQ ID NO: 6081883 - DNA, 25 bp, Homo sapien
gggtcagagatggaaaagttctttg

SEQ ID NO: 6081884 - DNA, 25 bp, Homo sapien
cttgtcttccaggtccaatctcttc

SEQ ID NO: 6081885 - DNA, 25 bp, Homo sapien
attcaaacttctttaaatatccttg

SEQ ID NO: 6081886 - DNA, 25 bp, Homo sapien
acatttcagcttagctctgcactta

SEQ ID NO: 6081887 - DNA, 25 bp, Homo sapien
agctctgcacttatcagatttattg

SEQ ID NO: 6081888 - DNA, 25 bp, Homo sapien
cagcttagctctgcacttatcagat

SEQ ID NO: 6081889 - DNA, 25 bp, Homo sapien
gactcacatacttccttcaggtatt

SEQ ID NO: 6081890 - DNA, 25 bp, Homo sapien
caaatgcttgagatgggctgacatt

SEQ ID NO: 6081891 - DNA, 25 bp, Homo sapien
tggggctcgccaagggcgcagaggt

SEQ ID NO: 6081892 - DNA, 25 bp, Homo sapien
cctgagccctcctctcagactcaca

SEQ ID NO: 6081893 - DNA, 25 bp, Homo sapien
gctggcccaccctttcgtagtagct

SEQ ID NO: 6081894 - DNA, 25 bp, Homo sapien
ttcctgcctgcactgcatccttcag

SEQ ID NO: 6081895 - DNA, 25 bp, Homo sapien
gtgggctgtctgttgggtgtgaatg

SEQ ID NO: 6081896 - DNA, 25 bp, Homo sapien
taaatatccttggtttcgaacctga

SEQ ID NO: 6081897 - DNA, 25 bp, Homo sapien
agtgttcaacatacgtctggacaca

SEQ ID NO: 6081898 - DNA, 25 bp, Homo sapien
tgttgctggttgatacaatcctctt

SEQ ID NO: 6081899 - DNA, 25 bp, Homo sapien
gctgtccccgagttaattcctgcct

SEQ ID NO: 6081900 - DNA, 25 bp, Homo sapien
gtccaatctcttcttttcactgtcc

SEQ ID NO: 6081901 - DNA, 25 bp, Homo sapien
ttgggtgtgaatgggggtcagagat

SEQ ID NO: 6081902 - DNA, 25 bp, Homo sapien
atgggctgacatttggcggcccata

SEQ ID NO: 6081903 - DNA, 25 bp, Homo sapien
cggggtgtgtcaccattagtttgca

SEQ ID NO: 6081904 - DNA, 25 bp, Homo sapien
ggacacattcaaacttctttaaata

SEQ ID NO: 6081905 - DNA, 25 bp, Homo sapien
gtttttgaagcttctctgtatttgt

SEQ ID NO: 6081906 - DNA, 25 bp, Homo sapien
atcagatttattgtattcataaagc

SEQ ID NO: 6081907 - DNA, 25 bp, Homo sapien
tatttgtggtcaagtgttcaacata

SEQ ID NO: 6081908 - DNA, 25 bp, Homo sapien
tggttgatacaatcctcttgacata

SEQ ID NO: 6081909 - DNA, 25 bp, Homo sapien
aatcttcaaatgcttgagatgggct

SEQ ID NO: 6081910 - DNA, 25 bp, Homo sapien
tggtcaagtgttcaacatacgtctg

SEQ ID NO: 6081911 - DNA, 25 bp, Homo sapien
ttggcggcccataaagattgttgct

SEQ ID NO: 6081912 - DNA, 25 bp, Homo sapien
agcctgctggagctggcccaccctt

SEQ ID NO: 6081913 - DNA, 25 bp, Homo sapien
tgtctgttgggtgtgaatgggggtc

SEQ ID NO: 6081914 - DNA, 25 bp, Homo sapien
caacatacgtctggacacattcaaa

SEQ ID NO: 6081915 - DNA, 25 bp, Homo sapien
tactgaaatcttcaaatgcttgaga

SEQ ID NO: 6081916 - DNA, 25 bp, Homo sapien
tgacatttggcggcccataaagatt

SEQ ID NO: 6081917 - DNA, 25 bp, Homo sapien
tttattgtattcataaagcttgtct

SEQ ID NO: 6081918 - DNA, 25 bp, Homo sapien
aaagattgttgctggttgatacaat

SEQ ID NO: 6081919 - DNA, 25 bp, Homo sapien
ctcttcttttcactgtcccgcagag

SEQ ID NO: 6081920 - DNA, 25 bp, Homo sapien
tttcgaacctgagccctcctctcag

SEQ ID NO: 6081921 - DNA, 25 bp, Homo sapien
tcgccaagggcgcagaggtggcgga

SEQ ID NO: 6081922 - DNA, 25 bp, Homo sapien
ctgcatccttcagtttttgaagctt

SEQ ID NO: 6081923 - DNA, 25 bp, Homo sapien
gtgtcaccattagtttgcactacac

SEQ ID NO: 6081924 - DNA, 25 bp, Homo sapien
gtttgcactacacagcgtgtctgtc

SEQ ID NO: 6081925 - DNA, 25 bp, Homo sapien
ccttcagtttttgaagcttctctgt

SEQ ID NO: 6081926 - DNA, 25 bp, Homo sapien
gttaattcctgcctgcactgcatcc

SEQ ID NO: 6081927 - DNA, 25 bp, Homo sapien
gcagaggtggcggaggcctggcgca

SEQ ID NO: 6081928 - DNA, 25 bp, Homo sapien
agtgctgtgggctgtctgttgggtg

SEQ ID NO: 6081929 - DNA, 25 bp, Homo sapien
ttttgcacatttcagcttagctctg

SEQ ID NO: 6081930 - DNA, 25 bp, Homo sapien
tccttggtttcgaacctgagccctc

SEQ ID NO: 6081931 - DNA, 25 bp, Homo sapien
gcccataaagattgttgctggttga

SEQ ID NO: 6081932 - DNA, 25 bp, Homo sapien
gtatttctttagttttgcacatttc

SEQ ID NO: 6081933 - DNA, 25 bp, Homo sapien
ataaagcttgtcttccaggtccaat

SEQ ID NO: 6081934 - DNA, 25 bp, Homo sapien
actacacagcgtgtctgtcacacaa

SEQ ID NO: 6081935 - DNA, 25 bp, Homo sapien
tctctgtatttgtggtcaagtgttc

SEQ ID NO: 6081936 - DNA, 25 bp, Homo sapien
ttccaggtccaatctcttcttttca

SEQ ID NO: 6081937 - DNA, 25 bp, Homo sapien
atacttccttcaggtatttctttag

SEQ ID NO: 6081938 - DNA, 25 bp, Homo sapien
cacacaagtgctgtgggctgtctgt

SEQ ID NO: 6081939 - DNA, 25 bp, Homo sapien
ctgtcccgcagagcctgctggagct

SEQ ID NO: 6081940 - DNA, 25 bp, Homo sapien
ggtggcggaggcctggcgcaggcca

SEQ ID NO: 6081941 - DNA, 25 bp, Homo sapien
cctggcgcaggccaccaccaccgcc

SEQ ID NO: 6081942 - DNA, 25 bp, Homo sapien
gttagatttcagctctgtactgaaa

SEQ ID NO: 6081943 - DNA, 25 bp, Homo sapien
gaagcttctctgtatttgtggtcaa

SEQ ID NO: 6081944 - DNA, 25 bp, Homo sapien
cagcgtgtctgtcacacaagtgctg

SEQ ID NO: 6081945 - DNA, 25 bp, Homo sapien
gcacttatcagatttattgtattca

SEQ ID NO: 6081946 - DNA, 25 bp, Homo sapien
caccaccaccgccaccgcgccctcg

SEQ ID NO: 6081947 - DNA, 25 bp, Homo sapien
tttggtgggttggttagatttcagc

SEQ ID NO: 6081948 - DNA, 25 bp, Homo sapien
acgtctggacacattcaaacttctt

SEQ ID NO: 6081949 - DNA, 25 bp, Homo sapien
gtctgtcacacaagtgctgtgggct

SEQ ID NO: 6081950 - DNA, 25 bp, Homo sapien
atacaatcctcttgacatagctgtc

SEQ ID NO: 6081951 - DNA, 25 bp, Homo sapien
tgacatagctgtccccgagttaatt

SEQ ID NO: 6081952 - DNA, 25 bp, Homo sapien
aagggcgcagaggtggcggaggcct

SEQ ID NO: 6081953 - DNA, 25 bp, Homo sapien
gctctgtactgaaatcttcaaatgc

SEQ ID NO: 6081954 - DNA, 25 bp, Homo sapien
cctgcactgcatccttcagtttttg

SEQ ID NO: 6081955 - DNA, 25 bp, Homo sapien
ttttcactgtcccgcagagcctgct

SEQ ID NO: 6081956 - DNA, 25 bp, Homo sapien
tctgaacaaggaattggggtgaaag

SEQ ID NO: 6081957 - DNA, 25 bp, Homo sapien
agcaaattctgaacaaggaattggg

SEQ ID NO: 6081958 - DNA, 25 bp, Homo sapien
tagtggtaatctgcttctctttggc

SEQ ID NO: 6081959 - DNA, 25 bp, Homo sapien
gggtgaaagttctgttcaggtcacg

SEQ ID NO: 6081960 - DNA, 25 bp, Homo sapien
gctcgcagcaaattctgaacaagga

SEQ ID NO: 6081961 - DNA, 25 bp, Homo sapien
gtggtcctacctccgcaagatcaat

SEQ ID NO: 6081962 - DNA, 25 bp, Homo sapien
gacctgatacttgctaccaggcctg

SEQ ID NO: 6081963 - DNA, 25 bp, Homo sapien
ggcttactctccaaagtgtctgcct

SEQ ID NO: 6081964 - DNA, 25 bp, Homo sapien
ctgactgtggtcctacctccgcaag

SEQ ID NO: 6081965 - DNA, 25 bp, Homo sapien
aagttctgttcaggtcacgactgcc

SEQ ID NO: 6081966 - DNA, 25 bp, Homo sapien
agggccagaggctgtccttcccctg

SEQ ID NO: 6081967 - DNA, 25 bp, Homo sapien
tgaggtaatgtatcaaatctaccca

SEQ ID NO: 6081968 - DNA, 25 bp, Homo sapien
tctaagtaaaaactgtcaggcttac

SEQ ID NO: 6081969 - DNA, 25 bp, Homo sapien
ctgtagcttctgctgactgtggtcc

SEQ ID NO: 6081970 - DNA, 25 bp, Homo sapien
aatgtatcaaatctacccagggcca

SEQ ID NO: 6081971 - DNA, 25 bp, Homo sapien
cctcactaggcctcttggccatgat

SEQ ID NO: 6081972 - DNA, 25 bp, Homo sapien
catcaggggttctaagtaaaaactg

SEQ ID NO: 6081973 - DNA, 25 bp, Homo sapien
tctgcctgtctctggggagacctga

SEQ ID NO: 6081974 - DNA, 25 bp, Homo sapien
ctacccagggccagaggctgtcctt

SEQ ID NO: 6081975 - DNA, 25 bp, Homo sapien
aaagtgtctgcctgtctctggggag

SEQ ID NO: 6081976 - DNA, 25 bp, Homo sapien
gcttctctttggctggccggagtac

SEQ ID NO: 6081977 - DNA, 25 bp, Homo sapien
ttactttctttcgtaccataggctg

SEQ ID NO: 6081978 - DNA, 25 bp, Homo sapien
ggagaaagaaaccatcagcagcctg

SEQ ID NO: 6081979 - DNA, 25 bp, Homo sapien
gctcatcttccttagtggtaatctg

SEQ ID NO: 6081980 - DNA, 25 bp, Homo sapien
tcaaatctacccagggccagaggct

SEQ ID NO: 6081981 - DNA, 25 bp, Homo sapien
tgttcaggtcacgactgccatggcc

SEQ ID NO: 6081982 - DNA, 25 bp, Homo sapien
caccacttactttctttcgtaccat

SEQ ID NO: 6081983 - DNA, 25 bp, Homo sapien
gaggtcctgggcatctgtggggaag

SEQ ID NO: 6081984 - DNA, 25 bp, Homo sapien
ctgctggcatcaggggttctaagta

SEQ ID NO: 6081985 - DNA, 25 bp, Homo sapien
cagaggctgtccttcccctgtagct

SEQ ID NO: 6081986 - DNA, 25 bp, Homo sapien
gactgccatggccaccacttacttt

SEQ ID NO: 6081987 - DNA, 25 bp, Homo sapien
gaattggggtgaaagttctgttcag

SEQ ID NO: 6081988 - DNA, 25 bp, Homo sapien
catcagcagcctgcccctgaggtaa

SEQ ID NO: 6081989 - DNA, 25 bp, Homo sapien
ctgtcaggcttactctccaaagtgt

SEQ ID NO: 6081990 - DNA, 25 bp, Homo sapien
caaggaattggggtgaaagttctgt

SEQ ID NO: 6081991 - DNA, 25 bp, Homo sapien
cgcaagatcaatgctcgcagcaaat

SEQ ID NO: 6081992 - DNA, 25 bp, Homo sapien
ctccacgctcatcttccttagtggt

SEQ ID NO: 6081993 - DNA, 25 bp, Homo sapien
gagtactgctggcatcaggggttct

SEQ ID NO: 6081994 - DNA, 25 bp, Homo sapien
actaggcctcttggccatgatggtc

SEQ ID NO: 6081995 - DNA, 25 bp, Homo sapien
gatggtccttggccttccttctcca

SEQ ID NO: 6081996 - DNA, 25 bp, Homo sapien
cctcttggccatgatggtccttggc

SEQ ID NO: 6081997 - DNA, 25 bp, Homo sapien
ccttggccttccttctccacgctca

SEQ ID NO: 6081998 - DNA, 25 bp, Homo sapien
atacttgctaccaggcctggggcct

SEQ ID NO: 6081999 - DNA, 25 bp, Homo sapien
tgaggtgaggtcctgggcatctgtg

SEQ ID NO: 6082000 - DNA, 25 bp, Homo sapien
ggccatgatggtccttggccttcct

SEQ ID NO: 6082001 - DNA, 25 bp, Homo sapien
atcaatgctcgcagcaaattctgaa

SEQ ID NO: 6082002 - DNA, 25 bp, Homo sapien
ctggccggagtactgctggcatcag

SEQ ID NO: 6082003 - DNA, 25 bp, Homo sapien
tgtctctggggagacctgatacttg

SEQ ID NO: 6082004 - DNA, 25 bp, Homo sapien
gctgtccttcccctgtagcttctgc

SEQ ID NO: 6082005 - DNA, 25 bp, Homo sapien
gcagcctgcccctgaggtaatgtat

SEQ ID NO: 6082006 - DNA, 25 bp, Homo sapien
cttctgctgactgtggtcctacctc

SEQ ID NO: 6082007 - DNA, 25 bp, Homo sapien
catggccaccacttactttctttcg

SEQ ID NO: 6082008 - DNA, 25 bp, Homo sapien
cttccttagtggtaatctgcttctc

SEQ ID NO: 6082009 - DNA, 25 bp, Homo sapien
ctctccaaagtgtctgcctgtctct

SEQ ID NO: 6082010 - DNA, 25 bp, Homo sapien
ggcctggggcctgaggtgaggtcct

SEQ ID NO: 6082011 - DNA, 25 bp, Homo sapien
tggggagacctgatacttgctacca

SEQ ID NO: 6082012 - DNA, 25 bp, Homo sapien
gctaccaggcctggggcctgaggtg

SEQ ID NO: 6082013 - DNA, 25 bp, Homo sapien
tacctccgcaagatcaatgctcgca

SEQ ID NO: 6082014 - DNA, 25 bp, Homo sapien
taaaaactgtcaggcttactctcca

SEQ ID NO: 6082015 - DNA, 25 bp, Homo sapien
taatctgcttctctttggctggccg

SEQ ID NO: 6082016 - DNA, 25 bp, Homo sapien
aggctgggagccctcactaggcctc

SEQ ID NO: 6082017 - DNA, 25 bp, Homo sapien
gggcctgaggtgaggtcctgggcat

SEQ ID NO: 6082018 - DNA, 25 bp, Homo sapien
agaaaccatcagcagcctgcccctg

SEQ ID NO: 6082019 - DNA, 25 bp, Homo sapien
gtaccataggctgggagccctcact

SEQ ID NO: 6082020 - DNA, 25 bp, Homo sapien
tctttcgtaccataggctgggagcc

SEQ ID NO: 6082021 - DNA, 25 bp, Homo sapien
tgcccctgaggtaatgtatcaaatc

SEQ ID NO: 6082022 - DNA, 25 bp, Homo sapien
gggagccctcactaggcctcttggc

SEQ ID NO: 6082023 - DNA, 25 bp, Homo sapien
ggtcacgactgccatggccaccact

SEQ ID NO: 6082024 - DNA, 25 bp, Homo sapien
cttcccctgtagcttctgctgactg

SEQ ID NO: 6082025 - DNA, 25 bp, Homo sapien
tctttggctggccggagtactgctg

SEQ ID NO: 6082026 - DNA, 25 bp, Homo sapien
ccaggtgatttccaggttcagtttg

SEQ ID NO: 6082027 - DNA, 25 bp, Homo sapien
tggctgtacatggacatccttcgct

SEQ ID NO: 6082028 - DNA, 25 bp, Homo sapien
ggactggggctcatgtcctccccaa

SEQ ID NO: 6082029 - DNA, 25 bp, Homo sapien
aggctcctgtgggtaagctctgcgg

SEQ ID NO: 6082030 - DNA, 25 bp, Homo sapien
cgggctgcaaacagctctttggtct

SEQ ID NO: 6082031 - DNA, 25 bp, Homo sapien
gggctcatgtcctccccaaggaatt

SEQ ID NO: 6082032 - DNA, 25 bp, Homo sapien
aaggactggtctttgaaggtaggtg

SEQ ID NO: 6082033 - DNA, 25 bp, Homo sapien
gggataccaggtgatttccaggttc

SEQ ID NO: 6082034 - DNA, 25 bp, Homo sapien
taccaggatgtgagtcgccagtcct

SEQ ID NO: 6082035 - DNA, 25 bp, Homo sapien
cgggggtgatggtaatctctgaatg

SEQ ID NO: 6082036 - DNA, 25 bp, Homo sapien
gttctgtgaccttgattgaaatgaa

SEQ ID NO: 6082037 - DNA, 25 bp, Homo sapien
gctctccgtatccctcttgggtggg

SEQ ID NO: 6082038 - DNA, 25 bp, Homo sapien
tcgcaggtcacactgcctaccagga

SEQ ID NO: 6082039 - DNA, 25 bp, Homo sapien
ggtcacactgcctaccaggatgtga

SEQ ID NO: 6082040 - DNA, 25 bp, Homo sapien
aagacgctaagctgctgtcctcggt

SEQ ID NO: 6082041 - DNA, 25 bp, Homo sapien
agctctttggtctcgcaggtcacac

SEQ ID NO: 6082042 - DNA, 25 bp, Homo sapien
tgattgaaatgaacccaactatgag

SEQ ID NO: 6082043 - DNA, 25 bp, Homo sapien
tccactctcaaagatgtcatctgcc

SEQ ID NO: 6082044 - DNA, 25 bp, Homo sapien
gtcattgatgtcaacagccaccacc

SEQ ID NO: 6082045 - DNA, 25 bp, Homo sapien
atgtcctccccaaggaattcctgaa

SEQ ID NO: 6082046 - DNA, 25 bp, Homo sapien
ccagtcctttgagttctgtgacctt

SEQ ID NO: 6082047 - DNA, 25 bp, Homo sapien
ccgtatccctcttgggtgggactgg

SEQ ID NO: 6082048 - DNA, 25 bp, Homo sapien
gaaggtggctgagctggaggtgaag

SEQ ID NO: 6082049 - DNA, 25 bp, Homo sapien
gcagctgtcttgttcccagggcccg

SEQ ID NO: 6082050 - DNA, 25 bp, Homo sapien
tggggtcgggctgcaaacagctctt

SEQ ID NO: 6082051 - DNA, 25 bp, Homo sapien
gatggtaccaaggtcattgatgtca

SEQ ID NO: 6082052 - DNA, 25 bp, Homo sapien
gacagtgcccttttctcctctgcag

SEQ ID NO: 6082053 - DNA, 25 bp, Homo sapien
ttggtctcgcaggtcacactgccta

SEQ ID NO: 6082054 - DNA, 25 bp, Homo sapien
aggaattcctgaaagacgctaagct

SEQ ID NO: 6082055 - DNA, 25 bp, Homo sapien
atctgccagatttgaaaagaaggac

SEQ ID NO: 6082056 - DNA, 25 bp, Homo sapien
ggctgagctggaggtgaagacacag

SEQ ID NO: 6082057 - DNA, 25 bp, Homo sapien
gtcaaagggataccaggtgatttcc

SEQ ID NO: 6082058 - DNA, 25 bp, Homo sapien
tctgcagcctttccactctcaaaga

SEQ ID NO: 6082059 - DNA, 25 bp, Homo sapien
gacatccttcgctggagagcagctg

SEQ ID NO: 6082060 - DNA, 25 bp, Homo sapien
tcctgaaagacgctaagctgctgtc

SEQ ID NO: 6082061 - DNA, 25 bp, Homo sapien
accaaggtcattgatgtcaacagcc

SEQ ID NO: 6082062 - DNA, 25 bp, Homo sapien
tgaatggcctgagtgtaacctggag

SEQ ID NO: 6082063 - DNA, 25 bp, Homo sapien
cttcgctggagagcagctgtcttgt

SEQ ID NO: 6082064 - DNA, 25 bp, Homo sapien
gctgtcctcggtgccctcatttgtg

SEQ ID NO: 6082065 - DNA, 25 bp, Homo sapien
ctctgcgggggtgatggtaatctct

SEQ ID NO: 6082066 - DNA, 25 bp, Homo sapien
tggtctttgaaggtaggtgtttctg

SEQ ID NO: 6082067 - DNA, 25 bp, Homo sapien
tgaccttgattgaaatgaacccaac

SEQ ID NO: 6082068 - DNA, 25 bp, Homo sapien
accacctggggtcgggctgcaaaca

SEQ ID NO: 6082069 - DNA, 25 bp, Homo sapien
ctccacgtcaaagggataccaggtg

SEQ ID NO: 6082070 - DNA, 25 bp, Homo sapien
cgacgatggggttgtgtcctccacg

SEQ ID NO: 6082071 - DNA, 25 bp, Homo sapien
caggtcactgaagctgagggacagt

SEQ ID NO: 6082072 - DNA, 25 bp, Homo sapien
tcggtgccctcatttgtgaggacag

SEQ ID NO: 6082073 - DNA, 25 bp, Homo sapien
ttctggggtgccctggctgtacatg

SEQ ID NO: 6082074 - DNA, 25 bp, Homo sapien
gatttccaggttcagtttgatggta

SEQ ID NO: 6082075 - DNA, 25 bp, Homo sapien
ctttgagttctgtgaccttgattga

SEQ ID NO: 6082076 - DNA, 25 bp, Homo sapien
gtcttgttcccagggcccgacgatg

SEQ ID NO: 6082077 - DNA, 25 bp, Homo sapien
ctgtgggtaagctctgcgggggtga

SEQ ID NO: 6082078 - DNA, 25 bp, Homo sapien
cagtttgatggtaccaaggtcattg

SEQ ID NO: 6082079 - DNA, 25 bp, Homo sapien
tgaaaagaaggactggtctttgaag

SEQ ID NO: 6082080 - DNA, 25 bp, Homo sapien
gagggggaaggtggctgagctggag

SEQ ID NO: 6082081 - DNA, 25 bp, Homo sapien
gctggaggtgaagacacagtctcca

SEQ ID NO: 6082082 - DNA, 25 bp, Homo sapien
tttgtgaggacaggctcctgtgggt

SEQ ID NO: 6082083 - DNA, 25 bp, Homo sapien
actgcctaccaggatgtgagtcgcc

SEQ ID NO: 6082084 - DNA, 25 bp, Homo sapien
tggagagcagctgtcttgttcccag

SEQ ID NO: 6082085 - DNA, 25 bp, Homo sapien
gcccttttctcctctgcagcctttc

SEQ ID NO: 6082086 - DNA, 25 bp, Homo sapien
ctcaaagatgtcatctgccagattt

SEQ ID NO: 6082087 - DNA, 25 bp, Homo sapien
caggttcagtttgatggtaccaagg

SEQ ID NO: 6082088 - DNA, 25 bp, Homo sapien
gacacagtctccatcctgcaggtca

SEQ ID NO: 6082089 - DNA, 25 bp, Homo sapien
ggtgtttctggggtgccctggctgt

SEQ ID NO: 6082090 - DNA, 25 bp, Homo sapien
gtctccatcctgcaggtcactgaag

SEQ ID NO: 6082091 - DNA, 25 bp, Homo sapien
gtaagctctgcgggggtgatggtaa

SEQ ID NO: 6082092 - DNA, 25 bp, Homo sapien
taatctctgaatggcctgagtgtaa

SEQ ID NO: 6082093 - DNA, 25 bp, Homo sapien
tacatggacatccttcgctggagag

SEQ ID NO: 6082094 - DNA, 25 bp, Homo sapien
aggacaggctcctgtgggtaagctc

SEQ ID NO: 6082095 - DNA, 25 bp, Homo sapien
gatgtgagtcgccagtcctttgagt

SEQ ID NO: 6082096 - DNA, 25 bp, Homo sapien
aacagccaccacctggggtcgggct

SEQ ID NO: 6082097 - DNA, 25 bp, Homo sapien
cagatttgaaaagaaggactggtct

SEQ ID NO: 6082098 - DNA, 25 bp, Homo sapien
gtgccctggctgtacatggacatcc

SEQ ID NO: 6082099 - DNA, 25 bp, Homo sapien
ggtgaagacacagtctccatcctgc

SEQ ID NO: 6082100 - DNA, 25 bp, Homo sapien
agcctttccactctcaaagatgtca

SEQ ID NO: 6082101 - DNA, 25 bp, Homo sapien
atcctgcaggtcactgaagctgagg

SEQ ID NO: 6082102 - DNA, 25 bp, Homo sapien
ctgagggacagtgcccttttctcct

SEQ ID NO: 6082103 - DNA, 25 bp, Homo sapien
tgtgtcctccacgtcaaagggatac

SEQ ID NO: 6082104 - DNA, 25 bp, Homo sapien
ctgaagctgagggacagtgcccttt

SEQ ID NO: 6082105 - DNA, 25 bp, Homo sapien
taagctgctgtcctcggtgccctca

SEQ ID NO: 6082106 - DNA, 25 bp, Homo sapien
gagtcgccagtcctttgagttctgt

SEQ ID NO: 6082107 - DNA, 25 bp, Homo sapien
gcaaacagctctttggtctcgcagg

SEQ ID NO: 6082108 - DNA, 25 bp, Homo sapien
tgatggtaatctctgaatggcctga

SEQ ID NO: 6082109 - DNA, 25 bp, Homo sapien
tggggttgtgtcctccacgtcaaag

SEQ ID NO: 6082110 - DNA, 25 bp, Homo sapien
ttctcctctgcagcctttccactct

SEQ ID NO: 6082111 - DNA, 25 bp, Homo sapien
tccccaaggaattcctgaaagacgc

SEQ ID NO: 6082112 - DNA, 25 bp, Homo sapien
gatgtcaacagccaccacctggggt

SEQ ID NO: 6082113 - DNA, 25 bp, Homo sapien
ccctcatttgtgaggacaggctcct

SEQ ID NO: 6082114 - DNA, 25 bp, Homo sapien
gatgtcatctgccagatttgaaaag

SEQ ID NO: 6082115 - DNA, 25 bp, Homo sapien
aacctggagggggaaggtggctgag

SEQ ID NO: 6082116 - DNA, 25 bp, Homo sapien
ctcctcacgcttcctggctgctgca

SEQ ID NO: 6082117 - DNA, 25 bp, Homo sapien
ttcacactcacagctcaggctgtct

SEQ ID NO: 6082118 - DNA, 25 bp, Homo sapien
gcagttccgtctgcctctccaagag

SEQ ID NO: 6082119 - DNA, 25 bp, Homo sapien
ctgttctcgccaagccttgcttcat

SEQ ID NO: 6082120 - DNA, 25 bp, Homo sapien
gggagcgagaagttccccctgcaga

SEQ ID NO: 6082121 - DNA, 25 bp, Homo sapien
atgctactgaccctctctgctcaga

SEQ ID NO: 6082122 - DNA, 25 bp, Homo sapien
tcatccaattccactttcagatttt

SEQ ID NO: 6082123 - DNA, 25 bp, Homo sapien
agttccccctgcagatccagttctg

SEQ ID NO: 6082124 - DNA, 25 bp, Homo sapien
cagtcgctcgtcttcacactctttg

SEQ ID NO: 6082125 - DNA, 25 bp, Homo sapien
actcacagctcaggctgtctaacat

SEQ ID NO: 6082126 - DNA, 25 bp, Homo sapien
tgcttcatccaattccactttcaga

SEQ ID NO: 6082127 - DNA, 25 bp, Homo sapien
cctggctgctgcaaccggaggcctg

SEQ ID NO: 6082128 - DNA, 25 bp, Homo sapien
tctaacttgttcttcaggtcgctca

SEQ ID NO: 6082129 - DNA, 25 bp, Homo sapien
ttcaggtcgctcacttcctgccggt

SEQ ID NO: 6082130 - DNA, 25 bp, Homo sapien
ccaagagctgtaggccatagtgtgc

SEQ ID NO: 6082131 - DNA, 25 bp, Homo sapien
tcaagagccagcagctcggaagaca

SEQ ID NO: 6082132 - DNA, 25 bp, Homo sapien
gatgtctgttctcaacctactctct

SEQ ID NO: 6082133 - DNA, 25 bp, Homo sapien
tcagtttcaagagccagcagctcgg

SEQ ID NO: 6082134 - DNA, 25 bp, Homo sapien
tttctctgctgtgatcatcatttct

SEQ ID NO: 6082135 - DNA, 25 bp, Homo sapien
cacttctctttgaagggcatgcttc

SEQ ID NO: 6082136 - DNA, 25 bp, Homo sapien
ttgttcttcaggtcgctcacttcct

SEQ ID NO: 6082137 - DNA, 25 bp, Homo sapien
gctcttctgactgggagcgagaagt

SEQ ID NO: 6082138 - DNA, 25 bp, Homo sapien
ctgctgctgtttcagagcttcacac

SEQ ID NO: 6082139 - DNA, 25 bp, Homo sapien
tccagttggctctgcagttccgtct

SEQ ID NO: 6082140 - DNA, 25 bp, Homo sapien
gaagacatgctactgaccctctctg

SEQ ID NO: 6082141 - DNA, 25 bp, Homo sapien
gctcagacaggagcgggagctcttc

SEQ ID NO: 6082142 - DNA, 25 bp, Homo sapien
cctctagctgctccagctgcgcctt

SEQ ID NO: 6082143 - DNA, 25 bp, Homo sapien
acaggagcgggagctcttctgactg

SEQ ID NO: 6082144 - DNA, 25 bp, Homo sapien
gagctccacttctctttgaagggca

SEQ ID NO: 6082145 - DNA, 25 bp, Homo sapien
gttgtatttctctgctgtgatcatc

SEQ ID NO: 6082146 - DNA, 25 bp, Homo sapien
agctttcagtcgctcgtcttcacac

SEQ ID NO: 6082147 - DNA, 25 bp, Homo sapien
catttatccagttggctctgcagtt

SEQ ID NO: 6082148 - DNA, 25 bp, Homo sapien
tgctgtgatcatcatttcttcatga

SEQ ID NO: 6082149 - DNA, 25 bp, Homo sapien
gttctgcttcagctgttctcgccaa

SEQ ID NO: 6082150 - DNA, 25 bp, Homo sapien
ttcacactctttgagtttgttccga

SEQ ID NO: 6082151 - DNA, 25 bp, Homo sapien
aacatccgactcttgagctccactt

SEQ ID NO: 6082152 - DNA, 25 bp, Homo sapien
tgttctcaacctactctctcctcac

SEQ ID NO: 6082153 - DNA, 25 bp, Homo sapien
gatcatcatttcttcatgacattta

SEQ ID NO: 6082154 - DNA, 25 bp, Homo sapien
gctcctatgtagctgcacctctagc

SEQ ID NO: 6082155 - DNA, 25 bp, Homo sapien
aaccggaggcctgtccggagagcac

SEQ ID NO: 6082156 - DNA, 25 bp, Homo sapien
cggtgcggcagttcagtttcaagag

SEQ ID NO: 6082157 - DNA, 25 bp, Homo sapien
ctctctgctcagacaggagcgggag

SEQ ID NO: 6082158 - DNA, 25 bp, Homo sapien
catttcttcatgacatttatccagt

SEQ ID NO: 6082159 - DNA, 25 bp, Homo sapien
gcctctccaagagctgtaggccata

SEQ ID NO: 6082160 - DNA, 25 bp, Homo sapien
aagatttgtgatatctgcctccatg

SEQ ID NO: 6082161 - DNA, 25 bp, Homo sapien
acgcttcctggctgctgcaaccgga

SEQ ID NO: 6082162 - DNA, 25 bp, Homo sapien
gccagcagctcggaagacatgctac

SEQ ID NO: 6082163 - DNA, 25 bp, Homo sapien
tcacttcctgccggtggctcctatg

SEQ ID NO: 6082164 - DNA, 25 bp, Homo sapien
ctctttgagtttgttccgaagattt

SEQ ID NO: 6082165 - DNA, 25 bp, Homo sapien
atgcttctcttggttgtatttctct

SEQ ID NO: 6082166 - DNA, 25 bp, Homo sapien
ctgtaggccatagtgtgcagctttc

SEQ ID NO: 6082167 - DNA, 25 bp, Homo sapien
tgtgatatctgcctccatgatgtct

SEQ ID NO: 6082168 - DNA, 25 bp, Homo sapien
gcgggagctcttctgactgggagcg

SEQ ID NO: 6082169 - DNA, 25 bp, Homo sapien
gagtttgttccgaagatttgtgata

SEQ ID NO: 6082170 - DNA, 25 bp, Homo sapien
cttcagctgttctcgccaagccttg

SEQ ID NO: 6082171 - DNA, 25 bp, Homo sapien
ggtcgctcacttcctgccggtggct

SEQ ID NO: 6082172 - DNA, 25 bp, Homo sapien
ccggtggctcctatgtagctgcacc

SEQ ID NO: 6082173 - DNA, 25 bp, Homo sapien
aagccttgcttcatccaattccact

SEQ ID NO: 6082174 - DNA, 25 bp, Homo sapien
cgccttctgctgctgtttcagagct

SEQ ID NO: 6082175 - DNA, 25 bp, Homo sapien
gctgtctaacatccgactcttgagc

SEQ ID NO: 6082176 - DNA, 25 bp, Homo sapien
ctcgtcttcacactctttgagtttg

SEQ ID NO: 6082177 - DNA, 25 bp, Homo sapien
actttcagattttctaacttgttct

SEQ ID NO: 6082178 - DNA, 25 bp, Homo sapien
gatccagttctgcttcagctgttct

SEQ ID NO: 6082179 - DNA, 25 bp, Homo sapien
gagaagttccccctgcagatccagt

SEQ ID NO: 6082180 - DNA, 25 bp, Homo sapien
ccgtctgcctctccaagagctgtag

SEQ ID NO: 6082181 - DNA, 25 bp, Homo sapien
tggctctgcagttccgtctgcctct

SEQ ID NO: 6082182 - DNA, 25 bp, Homo sapien
ggcagttcagtttcaagagccagca

SEQ ID NO: 6082183 - DNA, 25 bp, Homo sapien
gttccgaagatttgtgatatctgcc

SEQ ID NO: 6082184 - DNA, 25 bp, Homo sapien
ctgtttcagagcttcacactcacag

SEQ ID NO: 6082185 - DNA, 25 bp, Homo sapien
ctcttggttgtatttctctgctgtg

SEQ ID NO: 6082186 - DNA, 25 bp, Homo sapien
ctgactgggagcgagaagttccccc

SEQ ID NO: 6082187 - DNA, 25 bp, Homo sapien
cagctgcgccttctgctgctgtttc

SEQ ID NO: 6082188 - DNA, 25 bp, Homo sapien
cctgcagatccagttctgcttcagc

SEQ ID NO: 6082189 - DNA, 25 bp, Homo sapien
gccatagtgtgcagctttcagtcgc

SEQ ID NO: 6082190 - DNA, 25 bp, Homo sapien
tgctgcaaccggaggcctgtccgga

SEQ ID NO: 6082191 - DNA, 25 bp, Homo sapien
ctccatgatgtctgttctcaaccta

SEQ ID NO: 6082192 - DNA, 25 bp, Homo sapien
tctttgaagggcatgcttctcttgg

SEQ ID NO: 6082193 - DNA, 25 bp, Homo sapien
gctgctccagctgcgccttctgctg

SEQ ID NO: 6082194 - DNA, 25 bp, Homo sapien
actcttgagctccacttctctttga

SEQ ID NO: 6082195 - DNA, 25 bp, Homo sapien
tcatgacatttatccagttggctct

SEQ ID NO: 6082196 - DNA, 25 bp, Homo sapien
cccttccggtgcggcagttcagttt

SEQ ID NO: 6082197 - DNA, 25 bp, Homo sapien
agattttctaacttgttcttcaggt

SEQ ID NO: 6082198 - DNA, 25 bp, Homo sapien
tactctctcctcacgcttcctggct

SEQ ID NO: 6082199 - DNA, 25 bp, Homo sapien
tgtagctgcacctctagctgctcca

SEQ ID NO: 6082200 - DNA, 25 bp, Homo sapien
cagagcttcacactcacagctcagg

SEQ ID NO: 6082201 - DNA, 25 bp, Homo sapien
gtgtgcagctttcagtcgctcgtct

SEQ ID NO: 6082202 - DNA, 25 bp, Homo sapien
tcgccaagccttgcttcatccaatt

SEQ ID NO: 6082203 - DNA, 25 bp, Homo sapien
tcctgccggtggctcctatgtagct

SEQ ID NO: 6082204 - DNA, 25 bp, Homo sapien
gctcaggctgtctaacatccgactc

SEQ ID NO: 6082205 - DNA, 25 bp, Homo sapien
ctgaccctctctgctcagacaggag

SEQ ID NO: 6082206 - DNA, 25 bp, Homo sapien
agctcggaagacatgctactgaccc

SEQ ID NO: 6082207 - DNA, 25 bp, Homo sapien
atctgcctccatgatgtctgttctc

SEQ ID NO: 6082208 - DNA, 25 bp, Homo sapien
tcaacctactctctcctcacgcttc

SEQ ID NO: 6082209 - DNA, 25 bp, Homo sapien
aagggcatgcttctcttggttgtat

SEQ ID NO: 6082210 - DNA, 25 bp, Homo sapien
tgcacctctagctgctccagctgcg

SEQ ID NO: 6082211 - DNA, 25 bp, Homo sapien
aattccactttcagattttctaact

SEQ ID NO: 6082212 - DNA, 25 bp, Homo sapien
aaagattctaggatactgcgagcaa

SEQ ID NO: 6082213 - DNA, 25 bp, Homo sapien
atccagctaggcatgggagggaaca

SEQ ID NO: 6082214 - DNA, 25 bp, Homo sapien
catgggagggaacaaggaaaacatg

SEQ ID NO: 6082215 - DNA, 25 bp, Homo sapien
gaaggaatgatctggtggttaagat

SEQ ID NO: 6082216 - DNA, 25 bp, Homo sapien
tttcactttgccaaacaccacatgc

SEQ ID NO: 6082217 - DNA, 25 bp, Homo sapien
attctaggatactgcgagcaaatgg

SEQ ID NO: 6082218 - DNA, 25 bp, Homo sapien
tccagctaggcatgggagggaacaa

SEQ ID NO: 6082219 - DNA, 25 bp, Homo sapien
cagaaggaatgatctggtggttaag

SEQ ID NO: 6082220 - DNA, 25 bp, Homo sapien
tcaaacttattcgagttgtccacag

SEQ ID NO: 6082221 - DNA, 25 bp, Homo sapien
tgcagcgagagcacaaagattctag

SEQ ID NO: 6082222 - DNA, 25 bp, Homo sapien
ctgcaatccagctaggcatgggagg

SEQ ID NO: 6082223 - DNA, 25 bp, Homo sapien
ttctaggatactgcgagcaaatggg

SEQ ID NO: 6082224 - DNA, 25 bp, Homo sapien
gtcacagccaaaacccgacaaagtg

SEQ ID NO: 6082225 - DNA, 25 bp, Homo sapien
catcagtgggtatgctccaaagagg

SEQ ID NO: 6082226 - DNA, 25 bp, Homo sapien
gatctcaagtcagtatcacctccct

SEQ ID NO: 6082227 - DNA, 25 bp, Homo sapien
ccaaagaggctcagtattgaggacg

SEQ ID NO: 6082228 - DNA, 25 bp, Homo sapien
aatttcacggagatctgggtcagcc

SEQ ID NO: 6082229 - DNA, 25 bp, Homo sapien
ccgacaaagtgaggcacaaactcgt

SEQ ID NO: 6082230 - DNA, 25 bp, Homo sapien
cacaaactcgtttgggacacagagg

SEQ ID NO: 6082231 - DNA, 25 bp, Homo sapien
ccagagagtccaagacgacgatggt

SEQ ID NO: 6082232 - DNA, 25 bp, Homo sapien
gctcagtattgaggacgactgtcct

SEQ ID NO: 6082233 - DNA, 25 bp, Homo sapien
caaaacacccataagatctcaagtc

SEQ ID NO: 6082234 - DNA, 25 bp, Homo sapien
ttcattatccacatgacattggctc

SEQ ID NO: 6082235 - DNA, 25 bp, Homo sapien
gactgtcctatccatccagagtgtg

SEQ ID NO: 6082236 - DNA, 25 bp, Homo sapien
ctgcctcccgaagcggaatctgcag

SEQ ID NO: 6082237 - DNA, 25 bp, Homo sapien
gtcctgcctcccgaagcggaatctg

SEQ ID NO: 6082238 - DNA, 25 bp, Homo sapien
ttcgtcctgcctcccgaagcggaat

SEQ ID NO: 6082239 - DNA, 25 bp, Homo sapien
caccgagaggaaccccacacggagt

SEQ ID NO: 6082240 - DNA, 25 bp, Homo sapien
agccaggttccctaacgggccgctg

SEQ ID NO: 6082241 - DNA, 25 bp, Homo sapien
ccatggcgtctgtgggctctcttct

SEQ ID NO: 6082242 - DNA, 25 bp, Homo sapien
gcatgctctctgcccgatgtctgca

SEQ ID NO: 6082243 - DNA, 25 bp, Homo sapien
cgaagcggaatctgcagccagcatg

SEQ ID NO: 6082244 - DNA, 25 bp, Homo sapien
gccacccatggcgtctgtgggctct

SEQ ID NO: 6082245 - DNA, 25 bp, Homo sapien
tgcagccccctggctatgacaagca

SEQ ID NO: 6082246 - DNA, 25 bp, Homo sapien
cacccatggcgtctgtgggctctct

SEQ ID NO: 6082247 - DNA, 25 bp, Homo sapien
tccgaggccacccatggcgtctgtg

SEQ ID NO: 6082248 - DNA, 25 bp, Homo sapien
tgatggagcatcgtatgttttgcca

SEQ ID NO: 6082249 - DNA, 25 bp, Homo sapien
gagactgcaaacagattgcattccc

SEQ ID NO: 6082250 - DNA, 25 bp, Homo sapien
gctgatggagcatcgtatgttttgc

SEQ ID NO: 6082251 - DNA, 25 bp, Homo sapien
taaggctgatggagcatcgtatgtt

SEQ ID NO: 6082252 - DNA, 25 bp, Homo sapien
ctgcaaacagattgcattcccatgg

SEQ ID NO: 6082253 - DNA, 25 bp, Homo sapien
ttaggtaaggctgatggagcatcgt

SEQ ID NO: 6082254 - DNA, 25 bp, Homo sapien
ggagactgcaaacagattgcattcc

SEQ ID NO: 6082255 - DNA, 25 bp, Homo sapien
taggtaaggctgatggagcatcgta

SEQ ID NO: 6082256 - DNA, 25 bp, Homo sapien
aagtctagaagattgaagggaaaga

SEQ ID NO: 6082257 - DNA, 25 bp, Homo sapien
ctgatggagcatcgtatgttttgcc

SEQ ID NO: 6082258 - DNA, 25 bp, Homo sapien
aaagtctagaagattgaagggaaag

SEQ ID NO: 6082259 - DNA, 25 bp, Homo sapien
tgcaaacagattgcattcccatggt

SEQ ID NO: 6082260 - DNA, 25 bp, Homo sapien
tcaaaactctcgaagcctagaggat

SEQ ID NO: 6082261 - DNA, 25 bp, Homo sapien
ggtcaaaactctcgaagcctagagg

SEQ ID NO: 6082262 - DNA, 25 bp, Homo sapien
ccacaaggatgcctggttcttcgtt

SEQ ID NO: 6082263 - DNA, 25 bp, Homo sapien
aaacatgatattgaaacttgagatc

SEQ ID NO: 6082264 - DNA, 25 bp, Homo sapien
ttgccaaaacatgatattgaaactt

SEQ ID NO: 6082265 - DNA, 25 bp, Homo sapien
ccaaaacatgatattgaaacttgag

SEQ ID NO: 6082266 - DNA, 25 bp, Homo sapien
caaaacatgatattgaaacttgaga

SEQ ID NO: 6082267 - DNA, 25 bp, Homo sapien
aggtcaaaactctcgaagcctagag

SEQ ID NO: 6082268 - DNA, 25 bp, Homo sapien
gtcaaaactctcgaagcctagagga

SEQ ID NO: 6082269 - DNA, 25 bp, Homo sapien
tgccaaaacatgatattgaaacttg

SEQ ID NO: 6082270 - DNA, 25 bp, Homo sapien
tttgccaaaacatgatattgaaact

SEQ ID NO: 6082271 - DNA, 25 bp, Homo sapien
gccaaaacatgatattgaaacttga

SEQ ID NO: 6082272 - DNA, 25 bp, Homo sapien
gggaggaaaagcgtccgtagcatct

SEQ ID NO: 6082273 - DNA, 25 bp, Homo sapien
cgcaggttcccactgagcgactctg

SEQ ID NO: 6082274 - DNA, 25 bp, Homo sapien
gaaaagcgtccgtagcatctgtgca

SEQ ID NO: 6082275 - DNA, 25 bp, Homo sapien
gcaggttcccactgagcgactctga

SEQ ID NO: 6082276 - DNA, 25 bp, Homo sapien
gaggaaaagcgtccgtagcatctgt

SEQ ID NO: 6082277 - DNA, 25 bp, Homo sapien
aaaagcgtccgtagcatctgtgcat

SEQ ID NO: 6082278 - DNA, 25 bp, Homo sapien
aggttcccactgagcgactctgaca

SEQ ID NO: 6082279 - DNA, 25 bp, Homo sapien
ctgcaggcggggttttaaggcccag

SEQ ID NO: 6082280 - DNA, 25 bp, Homo sapien
ctcctgccggctggcgcaggttccc

SEQ ID NO: 6082281 - DNA, 25 bp, Homo sapien
ggttcccactgagcgactctgacag

SEQ ID NO: 6082282 - DNA, 25 bp, Homo sapien
tcccactgagcgactctgacagtgc

SEQ ID NO: 6082283 - DNA, 25 bp, Homo sapien
ggaaaagcgtccgtagcatctgtgc

SEQ ID NO: 6082284 - DNA, 25 bp, Homo sapien
aactgtgttaaaagctgtcttcctc

SEQ ID NO: 6082285 - DNA, 25 bp, Homo sapien
caggattacagacattacagggcag

SEQ ID NO: 6082286 - DNA, 25 bp, Homo sapien
gagctggcaatagcagatctttgca

SEQ ID NO: 6082287 - DNA, 25 bp, Homo sapien
tacagggcaggatgagtaaacaagg

SEQ ID NO: 6082288 - DNA, 25 bp, Homo sapien
acaaggcaaatgaagcgagcacctt

SEQ ID NO: 6082289 - DNA, 25 bp, Homo sapien
taattcctgaactgcacactgagag

SEQ ID NO: 6082290 - DNA, 25 bp, Homo sapien
ctgacttgggttgagagctggcaat

SEQ ID NO: 6082291 - DNA, 25 bp, Homo sapien
taggatatgcaggttgacaattcac

SEQ ID NO: 6082292 - DNA, 25 bp, Homo sapien
taccccgacatttaaccagatgcag

SEQ ID NO: 6082293 - DNA, 25 bp, Homo sapien
tagtgaccccagtacagtgtatatg

SEQ ID NO: 6082294 - DNA, 25 bp, Homo sapien
gaggtcctaaccaattgctttcata

SEQ ID NO: 6082295 - DNA, 25 bp, Homo sapien
taatctgacacctcttgtgaaggca

SEQ ID NO: 6082296 - DNA, 25 bp, Homo sapien
ttctgttcccggtctggtcccagag

SEQ ID NO: 6082297 - DNA, 25 bp, Homo sapien
tttctgttcccggtctggtcccaga

SEQ ID NO: 6082298 - DNA, 25 bp, Homo sapien
tttagataatatgtcttttcagtct

SEQ ID NO: 6082299 - DNA, 25 bp, Homo sapien
agtctcctccgattccaccagtgtc

SEQ ID NO: 6082300 - DNA, 25 bp, Homo sapien
cagtctcctccgattccaccagtgt

SEQ ID NO: 6082301 - DNA, 25 bp, Homo sapien
tcttgggccgccagaaggctagtga

SEQ ID NO: 6082302 - DNA, 25 bp, Homo sapien
cattcacagtgaacacaagtgcgtt

SEQ ID NO: 6082303 - DNA, 25 bp, Homo sapien
ccagaaggctagtgatacgcggatc

SEQ ID NO: 6082304 - DNA, 25 bp, Homo sapien
ttttcgtagagatagggtgtcacca

SEQ ID NO: 6082305 - DNA, 25 bp, Homo sapien
cagagccttgctttggctttaggag

SEQ ID NO: 6082306 - DNA, 25 bp, Homo sapien
cctccggagtcgcaatgtcttgggc

SEQ ID NO: 6082307 - DNA, 25 bp, Homo sapien
gaacatgttccttctctccatcagg

SEQ ID NO: 6082308 - DNA, 25 bp, Homo sapien
taagatatttgcactgcctccggag

SEQ ID NO: 6082309 - DNA, 25 bp, Homo sapien
tagagcttcttctggtgcttgttgg

SEQ ID NO: 6082310 - DNA, 25 bp, Homo sapien
tcaaatgatctacccaccttggctt

SEQ ID NO: 6082311 - DNA, 25 bp, Homo sapien
tatttagaattagccaactggactc

SEQ ID NO: 6082312 - DNA, 25 bp, Homo sapien
acatcagtgtcatagagcttcttct

SEQ ID NO: 6082313 - DNA, 25 bp, Homo sapien
cgaggctggaggatcctttgagtcc

SEQ ID NO: 6082314 - DNA, 25 bp, Homo sapien
tctgaattatagaacagggcctggt

SEQ ID NO: 6082315 - DNA, 25 bp, Homo sapien
tagcacgtcagctcctctcagggat

SEQ ID NO: 6082316 - DNA, 25 bp, Homo sapien
aactacagggaagcaggaaagggca

SEQ ID NO: 6082317 - DNA, 25 bp, Homo sapien
taattaccaggctgggcaccatggc

SEQ ID NO: 6082318 - DNA, 25 bp, Homo sapien
gaacacatttggagctagacatcta

SEQ ID NO: 6082319 - DNA, 25 bp, Homo sapien
ttctggttcaagtgggagccctgca

SEQ ID NO: 6082320 - DNA, 25 bp, Homo sapien
cctgggcaacatagagagatcttgt

SEQ ID NO: 6082321 - DNA, 25 bp, Homo sapien
gaatgaatgtcttggccagcttccc

SEQ ID NO: 6082322 - DNA, 25 bp, Homo sapien
tagacatctaggacagggacttctg

SEQ ID NO: 6082323 - DNA, 25 bp, Homo sapien
gccagcctgactcagtccctaagag

SEQ ID NO: 6082324 - DNA, 25 bp, Homo sapien
catagtgggtggtcacgaagtatct

SEQ ID NO: 6082325 - DNA, 25 bp, Homo sapien
accatccaacctctcaatcttttcc

SEQ ID NO: 6082326 - DNA, 25 bp, Homo sapien
cacggcaaccatccaacctctcaat

SEQ ID NO: 6082327 - DNA, 25 bp, Homo sapien
gcaaccatccaacctctcaatcttt

SEQ ID NO: 6082328 - DNA, 25 bp, Homo sapien
acacggcaaccatccaacctctcaa

SEQ ID NO: 6082329 - DNA, 25 bp, Homo sapien
ggcaaccatccaacctctcaatctt

SEQ ID NO: 6082330 - DNA, 25 bp, Homo sapien
aagcggcactccacggcaggccttt

SEQ ID NO: 6082331 - DNA, 25 bp, Homo sapien
agggtgcggtgaagacgctcaacca

SEQ ID NO: 6082332 - DNA, 25 bp, Homo sapien
gggttggagcatcgcggcatcacca

SEQ ID NO: 6082333 - DNA, 25 bp, Homo sapien
ctttctacagcggagggactccctg

SEQ ID NO: 6082334 - DNA, 25 bp, Homo sapien
tccgacgccaagtgtccgctctggg

SEQ ID NO: 6082335 - DNA, 25 bp, Homo sapien
ggtgaagacgctcaaccaagagcca

SEQ ID NO: 6082336 - DNA, 25 bp, Homo sapien
aattccgacgccaagtgtccgctct

SEQ ID NO: 6082337 - DNA, 25 bp, Homo sapien
gaagacgctcaaccaagagccacag

SEQ ID NO: 6082338 - DNA, 25 bp, Homo sapien
gaagaggaggagccctttctacagc

SEQ ID NO: 6082339 - DNA, 25 bp, Homo sapien
ggtgcggtgaagacgctcaaccaag

SEQ ID NO: 6082340 - DNA, 25 bp, Homo sapien
gagcatcgcggcatcaccaggatga

SEQ ID NO: 6082341 - DNA, 25 bp, Homo sapien
ctgcaattccgacgccaagtgtccg

SEQ ID NO: 6082342 - DNA, 25 bp, Homo sapien
tgcctatggaacagacagaattgaa

SEQ ID NO: 6082343 - DNA, 25 bp, Homo sapien
gcaactgcctatctaacttatggac

SEQ ID NO: 6082344 - DNA, 25 bp, Homo sapien
gatgctaattcctagttaccagtga

SEQ ID NO: 6082345 - DNA, 25 bp, Homo sapien
tacaggatgattgatcagtgatgct

SEQ ID NO: 6082346 - DNA, 25 bp, Homo sapien
tagacttagcctgagatccactccc

SEQ ID NO: 6082347 - DNA, 25 bp, Homo sapien
cagtgactcccttcaacatgagggc

SEQ ID NO: 6082348 - DNA, 25 bp, Homo sapien
cagtggactccaggtagacttagcc

SEQ ID NO: 6082349 - DNA, 25 bp, Homo sapien
tgcttttgagaaagaccttgatcaa

SEQ ID NO: 6082350 - DNA, 25 bp, Homo sapien
gagtcactcgtattaaaaccctggc

SEQ ID NO: 6082351 - DNA, 25 bp, Homo sapien
tctcatgtacatatggttgataaca

SEQ ID NO: 6082352 - DNA, 25 bp, Homo sapien
tgagatgatagacagtgcctatgga

SEQ ID NO: 6082353 - DNA, 25 bp, Homo sapien
taacttatggactgacaccaccctt

SEQ ID NO: 6082354 - DNA, 25 bp, Homo sapien
gacaccacccttaccacgcttgtta

SEQ ID NO: 6082355 - DNA, 25 bp, Homo sapien
accacccttaccacgcttgttattg

SEQ ID NO: 6082356 - DNA, 25 bp, Homo sapien
cacccttaccacgcttgttattgtt

SEQ ID NO: 6082357 - DNA, 25 bp, Homo sapien
caccacccttaccacgcttgttatt

SEQ ID NO: 6082358 - DNA, 25 bp, Homo sapien
acaccacccttaccacgcttgttat

SEQ ID NO: 6082359 - DNA, 25 bp, Homo sapien
ccacccttaccacgcttgttattgt

SEQ ID NO: 6082360 - DNA, 25 bp, Homo sapien
aagtcacagtagaaggttgagcatg

SEQ ID NO: 6082361 - DNA, 25 bp, Homo sapien
ccatgttggaggctaatttgctgtt

SEQ ID NO: 6082362 - DNA, 25 bp, Homo sapien
gggacacaagtgacgccatgttgga

SEQ ID NO: 6082363 - DNA, 25 bp, Homo sapien
cctttgtgtgcactcaaagggctgc

SEQ ID NO: 6082364 - DNA, 25 bp, Homo sapien
ttagttgggtagaaccccagcttca

SEQ ID NO: 6082365 - DNA, 25 bp, Homo sapien
ctttctgctttactgatagcctttg

SEQ ID NO: 6082366 - DNA, 25 bp, Homo sapien
gttgagcatgtgactattaccaaga

SEQ ID NO: 6082367 - DNA, 25 bp, Homo sapien
caggtcaacaaccttaaccaagagt

SEQ ID NO: 6082368 - DNA, 25 bp, Homo sapien
tgtccagtgacatttttatgtgccc

SEQ ID NO: 6082369 - DNA, 25 bp, Homo sapien
gctgctgacacctgacttagttggg

SEQ ID NO: 6082370 - DNA, 25 bp, Homo sapien
ttctgattagccgttgtctcgggaa

SEQ ID NO: 6082371 - DNA, 25 bp, Homo sapien
ggaagggcccttctaatgctgctga

SEQ ID NO: 6082372 - DNA, 25 bp, Homo sapien
acagactctcgacggagtaaagctt

SEQ ID NO: 6082373 - DNA, 25 bp, Homo sapien
cagactctcgacggagtaaagcttc

SEQ ID NO: 6082374 - DNA, 25 bp, Homo sapien
agactctcgacggagtaaagcttcc

SEQ ID NO: 6082375 - DNA, 25 bp, Homo sapien
gatcggtgcagtgcttcacttccaa

SEQ ID NO: 6082376 - DNA, 25 bp, Homo sapien
gatatctgatcggtgcagtgcttca

SEQ ID NO: 6082377 - DNA, 25 bp, Homo sapien
aacttggaggtttaccgcagcgtca

SEQ ID NO: 6082378 - DNA, 25 bp, Homo sapien
agcgagaccatcaggagacacactg

SEQ ID NO: 6082379 - DNA, 25 bp, Homo sapien
taccgcagcgtcacttaagaataag

SEQ ID NO: 6082380 - DNA, 25 bp, Homo sapien
ttacaatttttagtgaagatcaggg

SEQ ID NO: 6082381 - DNA, 25 bp, Homo sapien
ctggaggtggattaagtttggcaac

SEQ ID NO: 6082382 - DNA, 25 bp, Homo sapien
cttctggaggtggattaagtttggc

SEQ ID NO: 6082383 - DNA, 25 bp, Homo sapien
ttggcaacttggaggtttaccgcag

SEQ ID NO: 6082384 - DNA, 25 bp, Homo sapien
cagggtgtcgttgaaagactttgga

SEQ ID NO: 6082385 - DNA, 25 bp, Homo sapien
caatgagagtcgtttcttaaaagat

SEQ ID NO: 6082386 - DNA, 25 bp, Homo sapien
cttaaaagatatctgatcggtgcag

SEQ ID NO: 6082387 - DNA, 25 bp, Homo sapien
tggcagggtaacttgggactcactc

SEQ ID NO: 6082388 - DNA, 25 bp, Homo sapien
gctgtgataaccctgccaaagacag

SEQ ID NO: 6082389 - DNA, 25 bp, Homo sapien
tgaaactctgaaagtcccggtccac

SEQ ID NO: 6082390 - DNA, 25 bp, Homo sapien
gctgcacttcaaggtcggacggtgt

SEQ ID NO: 6082391 - DNA, 25 bp, Homo sapien
catacagcaagaggatagagcgcag

SEQ ID NO: 6082392 - DNA, 25 bp, Homo sapien
catcgtgcgcaactctgatgtgtgg

SEQ ID NO: 6082393 - DNA, 25 bp, Homo sapien
tagagcgcagcatctgtttgcacat

SEQ ID NO: 6082394 - DNA, 25 bp, Homo sapien
tggtgctccctgctaatgattttgc

SEQ ID NO: 6082395 - DNA, 25 bp, Homo sapien
gtaggtgtcgtgtgccgcagccatt

SEQ ID NO: 6082396 - DNA, 25 bp, Homo sapien
gaggctccttcagtccaatgggcca

SEQ ID NO: 6082397 - DNA, 25 bp, Homo sapien
agtcctttgttgttcatcgtgcgca

SEQ ID NO: 6082398 - DNA, 25 bp, Homo sapien
ggcgttagcgccaaagtgcagctga

SEQ ID NO: 6082399 - DNA, 25 bp, Homo sapien
cgggcagcttcagagtccgcttgta

SEQ ID NO: 6082400 - DNA, 25 bp, Homo sapien
agtcggaggccacgtagcaatagtg

SEQ ID NO: 6082401 - DNA, 25 bp, Homo sapien
caatagtggtgcttaatgttctcca

SEQ ID NO: 6082402 - DNA, 25 bp, Homo sapien
tccagtgacaacttgcggagactct

SEQ ID NO: 6082403 - DNA, 25 bp, Homo sapien
tgaccgtgcgcccatcgggcagctt

SEQ ID NO: 6082404 - DNA, 25 bp, Homo sapien
ccccgatccatacggagaaattcct

SEQ ID NO: 6082405 - DNA, 25 bp, Homo sapien
tgctccttctggaagtcggaggcca

SEQ ID NO: 6082406 - DNA, 25 bp, Homo sapien
gagaagcacgttttgggccaagtcc

SEQ ID NO: 6082407 - DNA, 25 bp, Homo sapien
caccacgtgggtctcggctggcaga

SEQ ID NO: 6082408 - DNA, 25 bp, Homo sapien
tccagacgctccgtggcgtggagca

SEQ ID NO: 6082409 - DNA, 25 bp, Homo sapien
ggaagcgaccctcgaagccggtgaa

SEQ ID NO: 6082410 - DNA, 25 bp, Homo sapien
aagccggtgaagagcgaggacccac

SEQ ID NO: 6082411 - DNA, 25 bp, Homo sapien
cccaggcatcttgagcggctccttt

SEQ ID NO: 6082412 - DNA, 25 bp, Homo sapien
attgacgcggcccaccaaggagacc

SEQ ID NO: 6082413 - DNA, 25 bp, Homo sapien
tcctcacaggagagcgcctcgggga

SEQ ID NO: 6082414 - DNA, 25 bp, Homo sapien
agcaactccaggcattgacgcggcc

SEQ ID NO: 6082415 - DNA, 25 bp, Homo sapien
tccacatccttgcagaggtgcgcca

SEQ ID NO: 6082416 - DNA, 25 bp, Homo sapien
agaccccaggcatcttgagcggctc

SEQ ID NO: 6082417 - DNA, 25 bp, Homo sapien
tagccaaagacattgaagatgggtg

SEQ ID NO: 6082418 - DNA, 25 bp, Homo sapien
aggccgtccacatccttgcagaggt

SEQ ID NO: 6082419 - DNA, 25 bp, Homo sapien
cttgagcggctccttttcagccagg

SEQ ID NO: 6082420 - DNA, 25 bp, Homo sapien
cggatagatgggctgtccatggtac

SEQ ID NO: 6082421 - DNA, 25 bp, Homo sapien
ctagaggtagccaaagacattgaag

SEQ ID NO: 6082422 - DNA, 25 bp, Homo sapien
tcggggacctcgacactcctgcagg

SEQ ID NO: 6082423 - DNA, 25 bp, Homo sapien
tataggcaattataagtctcaacta

SEQ ID NO: 6082424 - DNA, 25 bp, Homo sapien
cattggagccatggcttcctgacag

SEQ ID NO: 6082425 - DNA, 25 bp, Homo sapien
tgtactttacattggagccatggct

SEQ ID NO: 6082426 - DNA, 25 bp, Homo sapien
tataatgtgatcctactgtccctga

SEQ ID NO: 6082427 - DNA, 25 bp, Homo sapien
gcttgaactatatctgcagtgggta

SEQ ID NO: 6082428 - DNA, 25 bp, Homo sapien
tactctggcttgaactatatctgca

SEQ ID NO: 6082429 - DNA, 25 bp, Homo sapien
tcctgacagacaatataggccagat

SEQ ID NO: 6082430 - DNA, 25 bp, Homo sapien
cagctgcagttgaagtatgtaagaa

SEQ ID NO: 6082431 - DNA, 25 bp, Homo sapien
gaaaaatcgaatccctatgacaaag

SEQ ID NO: 6082432 - DNA, 25 bp, Homo sapien
ttccatttcccatgaatctgtgacc

SEQ ID NO: 6082433 - DNA, 25 bp, Homo sapien
taaagtagaccatcagagcttggcc

SEQ ID NO: 6082434 - DNA, 25 bp, Homo sapien
gaatctgtgacctgccacagctggc

SEQ ID NO: 6082435 - DNA, 25 bp, Homo sapien
attggactcatccaagtacagcaga

SEQ ID NO: 6082436 - DNA, 25 bp, Homo sapien
ggactcatccaagtacagcagaaac

SEQ ID NO: 6082437 - DNA, 25 bp, Homo sapien
actcatccaagtacagcagaaactg

SEQ ID NO: 6082438 - DNA, 25 bp, Homo sapien
gactcatccaagtacagcagaaact

SEQ ID NO: 6082439 - DNA, 25 bp, Homo sapien
tggactcatccaagtacagcagaaa

SEQ ID NO: 6082440 - DNA, 25 bp, Homo sapien
cattctataagcactcctttcaaga

SEQ ID NO: 6082441 - DNA, 25 bp, Homo sapien
ttggactcatccaagtacagcagaa

SEQ ID NO: 6082442 - DNA, 25 bp, Homo sapien
gaaggttcagatgacctgaagaatg

SEQ ID NO: 6082443 - DNA, 25 bp, Homo sapien
agaaggttcagatgacctgaagaat

SEQ ID NO: 6082444 - DNA, 25 bp, Homo sapien
tctgaacaaatgatcatgatccctc

SEQ ID NO: 6082445 - DNA, 25 bp, Homo sapien
cacaatagccccaggaaattataga

SEQ ID NO: 6082446 - DNA, 25 bp, Homo sapien
tactgctaaatgactactctcaaag

SEQ ID NO: 6082447 - DNA, 25 bp, Homo sapien
gaaagctcttttctaccctacaata

SEQ ID NO: 6082448 - DNA, 25 bp, Homo sapien
gaatactcttcagttctactctaga

SEQ ID NO: 6082449 - DNA, 25 bp, Homo sapien
caatattagatgtatcaggactccc

SEQ ID NO: 6082450 - DNA, 25 bp, Homo sapien
caataagctcgacattaaagactga

SEQ ID NO: 6082451 - DNA, 25 bp, Homo sapien
ccctggacttatagaactgttttct

SEQ ID NO: 6082452 - DNA, 25 bp, Homo sapien
tggatcaatgagtaatcgttagctg

SEQ ID NO: 6082453 - DNA, 25 bp, Homo sapien
aacactgactcccaagaatactgct

SEQ ID NO: 6082454 - DNA, 25 bp, Homo sapien
tctgctgaaacacataacactgact

SEQ ID NO: 6082455 - DNA, 25 bp, Homo sapien
gtcaaacactgttacatgctaccaa

SEQ ID NO: 6082456 - DNA, 25 bp, Homo sapien
taatcgttagctgagtagaaagctc

SEQ ID NO: 6082457 - DNA, 25 bp, Homo sapien
ggccactaaggagatgaggagctct

SEQ ID NO: 6082458 - DNA, 25 bp, Homo sapien
aagagtgaggccactaaggagatga

SEQ ID NO: 6082459 - DNA, 25 bp, Homo sapien
tcacacgtagatgccaacccagagc

SEQ ID NO: 6082460 - DNA, 25 bp, Homo sapien
aggtgggacacttccagcaacagta

SEQ ID NO: 6082461 - DNA, 25 bp, Homo sapien
catgaagagtgaggccactaaggag

SEQ ID NO: 6082462 - DNA, 25 bp, Homo sapien
gatatcacgagtgtacttggtagag

SEQ ID NO: 6082463 - DNA, 25 bp, Homo sapien
tatcacgagtgtacttggtagaggt

SEQ ID NO: 6082464 - DNA, 25 bp, Homo sapien
ggccaaaagcaccacggtcagatgg

SEQ ID NO: 6082465 - DNA, 25 bp, Homo sapien
gccaaaagcaccacggtcagatggg

SEQ ID NO: 6082466 - DNA, 25 bp, Homo sapien
tctttatagatatcacgagtgtact

SEQ ID NO: 6082467 - DNA, 25 bp, Homo sapien
tatagatatcacgagtgtacttggt

SEQ ID NO: 6082468 - DNA, 25 bp, Homo sapien
ggtgggacacttccagcaacagtaa

SEQ ID NO: 6082469 - DNA, 25 bp, Homo sapien
agccaggttccctaacgggccgctg

SEQ ID NO: 6082470 - DNA, 25 bp, Homo sapien
ttcgtcctgcctcccgaagcggaat

SEQ ID NO: 6082471 - DNA, 25 bp, Homo sapien
caccgagaggaaccccacacggagt

SEQ ID NO: 6082472 - DNA, 25 bp, Homo sapien
ccatggcgtctgtgggctctcttct

SEQ ID NO: 6082473 - DNA, 25 bp, Homo sapien
cgaagcggaatctgcagccagcatg

SEQ ID NO: 6082474 - DNA, 25 bp, Homo sapien
gcatgctctctgcccgatgtctgca

SEQ ID NO: 6082475 - DNA, 25 bp, Homo sapien
cacccatggcgtctgtgggctctct

SEQ ID NO: 6082476 - DNA, 25 bp, Homo sapien
gccacccatggcgtctgtgggctct

SEQ ID NO: 6082477 - DNA, 25 bp, Homo sapien
tgcagccccctggctatgacaagca

SEQ ID NO: 6082478 - DNA, 25 bp, Homo sapien
gtcctgcctcccgaagcggaatctg

SEQ ID NO: 6082479 - DNA, 25 bp, Homo sapien
tccgaggccacccatggcgtctgtg

SEQ ID NO: 6082480 - DNA, 25 bp, Homo sapien
ctgcctcccgaagcggaatctgcag

SEQ ID NO: 6082481 - DNA, 25 bp, Homo sapien
agggccaagccgctggtcaccagca

SEQ ID NO: 6082482 - DNA, 25 bp, Homo sapien
gcgcagccagtagatcggcagtatc

SEQ ID NO: 6082483 - DNA, 25 bp, Homo sapien
tcggcagtatccagcagcagggcga

SEQ ID NO: 6082484 - DNA, 25 bp, Homo sapien
ccagaagcgcgtagcaggctaccat

SEQ ID NO: 6082485 - DNA, 25 bp, Homo sapien
cgtagagaacgggattgaggccaca

SEQ ID NO: 6082486 - DNA, 25 bp, Homo sapien
ccagcagtgcgacatccttgcgttt

SEQ ID NO: 6082487 - DNA, 25 bp, Homo sapien
aggctaccatgacgcccagcggcag

SEQ ID NO: 6082488 - DNA, 25 bp, Homo sapien
aagatgaggcgacagcgtcgttggc

SEQ ID NO: 6082489 - DNA, 25 bp, Homo sapien
agtagatcggcagtatccagcagca

SEQ ID NO: 6082490 - DNA, 25 bp, Homo sapien
ggtcaccagcagtgcgacatccttg

SEQ ID NO: 6082491 - DNA, 25 bp, Homo sapien
acacgatgacggagaccaagtgtgc

SEQ ID NO: 6082492 - DNA, 25 bp, Homo sapien
catccttgcgtttgctggcagggca

SEQ ID NO: 6082493 - DNA, 25 bp, Homo sapien
ctgagcactgtctttctcaggagga

SEQ ID NO: 6082494 - DNA, 25 bp, Homo sapien
tgcgggacccgccaatgcggcagaa

SEQ ID NO: 6082495 - DNA, 25 bp, Homo sapien
gagggtctgagatgtactgctgatc

SEQ ID NO: 6082496 - DNA, 25 bp, Homo sapien
cacagaagcaattcggatggcctgc

SEQ ID NO: 6082497 - DNA, 25 bp, Homo sapien
cgccaatgcggcagaagaggcattt

SEQ ID NO: 6082498 - DNA, 25 bp, Homo sapien
ctgacatggcagaagatgtcctttg

SEQ ID NO: 6082499 - DNA, 25 bp, Homo sapien
tttttactgacttctcgctccaaac

SEQ ID NO: 6082500 - DNA, 25 bp, Homo sapien
tgtgaagagtctgaggtctctgata

SEQ ID NO: 6082501 - DNA, 25 bp, Homo sapien
tgatattcgcaaagtcctcagtgag

SEQ ID NO: 6082502 - DNA, 25 bp, Homo sapien
acttggctgatataactggttgacg

SEQ ID NO: 6082503 - DNA, 25 bp, Homo sapien
tctgagcagtgctgtccggagcgct

SEQ ID NO: 6082504 - DNA, 25 bp, Homo sapien
gaggtctctgatattcgcaaagtcc

SEQ ID NO: 6082505 - DNA, 25 bp, Homo sapien
tcctgcccgtggtagacgtggcaca

SEQ ID NO: 6082506 - DNA, 25 bp, Homo sapien
catggcaggcgggtttcgcagcact

SEQ ID NO: 6082507 - DNA, 25 bp, Homo sapien
ttccaggtggccacgcgcaagtaga

SEQ ID NO: 6082508 - DNA, 25 bp, Homo sapien
cgcgcaagtagatgagcagctcctt

SEQ ID NO: 6082509 - DNA, 25 bp, Homo sapien
cacggcgcggcggaacaggatatac

SEQ ID NO: 6082510 - DNA, 25 bp, Homo sapien
tggccacgcgcaagtagatgagcag

SEQ ID NO: 6082511 - DNA, 25 bp, Homo sapien
cacgctgaccgtgttcagcaggaag

SEQ ID NO: 6082512 - DNA, 25 bp, Homo sapien
ggtattgcacggtgtagcgacccac

SEQ ID NO: 6082513 - DNA, 25 bp, Homo sapien
ggcggaacaggatatacacccaggg

SEQ ID NO: 6082514 - DNA, 25 bp, Homo sapien
gcaggcgggtttcgcagcactgtct

SEQ ID NO: 6082515 - DNA, 25 bp, Homo sapien
tggagaagagcagcccgaaggccac

SEQ ID NO: 6082516 - DNA, 25 bp, Homo sapien
agcaggaaggacagcccgaccgaga

SEQ ID NO: 6082517 - DNA, 25 bp, Homo sapien
tctctgggagaagggttcgaatccc

SEQ ID NO: 6082518 - DNA, 25 bp, Homo sapien
aaaggacacgaggttgcagtactgg

SEQ ID NO: 6082519 - DNA, 25 bp, Homo sapien
acagaatggggttgatggcagcact

SEQ ID NO: 6082520 - DNA, 25 bp, Homo sapien
cacgaggttgcagtactggctgatc

SEQ ID NO: 6082521 - DNA, 25 bp, Homo sapien
cttggacatgatgttgtacagaatg

SEQ ID NO: 6082522 - DNA, 25 bp, Homo sapien
cacccggtacttcttggacatgatg

SEQ ID NO: 6082523 - DNA, 25 bp, Homo sapien
tggaaaataaatatcgccctacgtg

SEQ ID NO: 6082524 - DNA, 25 bp, Homo sapien
ataaatatcgccctacgtggaaggg

SEQ ID NO: 6082525 - DNA, 25 bp, Homo sapien
gcagtactggctgatctgagcaatc

SEQ ID NO: 6082526 - DNA, 25 bp, Homo sapien
gctgatctgagcaatctccaaggag

SEQ ID NO: 6082527 - DNA, 25 bp, Homo sapien
tgccacccggtacttcttggacatg

SEQ ID NO: 6082528 - DNA, 25 bp, Homo sapien
aggacaaaggacacgaggttgcagt

SEQ ID NO: 6082529 - DNA, 25 bp, Homo sapien
gttggtggccctgcccgaagacatg

SEQ ID NO: 6082530 - DNA, 25 bp, Homo sapien
ccagtgcgtgtgcagaggctcatag

SEQ ID NO: 6082531 - DNA, 25 bp, Homo sapien
ggccgtcgggcctcatagtccagtg

SEQ ID NO: 6082532 - DNA, 25 bp, Homo sapien
cctggcacttgtggtagagaagagc

SEQ ID NO: 6082533 - DNA, 25 bp, Homo sapien
tcaagtttgcgctgtaccagctggc

SEQ ID NO: 6082534 - DNA, 25 bp, Homo sapien
gactaatgtccagtgcgtaggccag

SEQ ID NO: 6082535 - DNA, 25 bp, Homo sapien
tacttgttatagcaggagccaatgc

SEQ ID NO: 6082536 - DNA, 25 bp, Homo sapien
agccagcgtgcacagcaccaagaag

SEQ ID NO: 6082537 - DNA, 25 bp, Homo sapien
gaagatacgatgcaccacaggacta

SEQ ID NO: 6082538 - DNA, 25 bp, Homo sapien
tgctgctgcccaccgtgagcaggaa

SEQ ID NO: 6082539 - DNA, 25 bp, Homo sapien
aagatgtggaaaagttggtggccct

SEQ ID NO: 6082540 - DNA, 25 bp, Homo sapien
aaagccaggcgagaaaggcagccat

SEQ ID NO: 6082541 - DNA, 25 bp, Homo sapien
tgggacctcatgaaggagctgcccc

SEQ ID NO: 6082542 - DNA, 25 bp, Homo sapien
aatggcttgtactatctgcactgaa

SEQ ID NO: 6082543 - DNA, 25 bp, Homo sapien
cagaatttagtcacatcacgtagag

SEQ ID NO: 6082544 - DNA, 25 bp, Homo sapien
cagctcgattaacagctcattggtc

SEQ ID NO: 6082545 - DNA, 25 bp, Homo sapien
tatagagagcattgaggaggaagtc

SEQ ID NO: 6082546 - DNA, 25 bp, Homo sapien
gaagagccacgttaagttgcatagg

SEQ ID NO: 6082547 - DNA, 25 bp, Homo sapien
taagtgcttactatctggagccctg

SEQ ID NO: 6082548 - DNA, 25 bp, Homo sapien
aagttggtgccatccactgtttgcc

SEQ ID NO: 6082549 - DNA, 25 bp, Homo sapien
agtcctcacctgcttagaagagcca

SEQ ID NO: 6082550 - DNA, 25 bp, Homo sapien
ggaaccctgaagaaatggcttgtac

SEQ ID NO: 6082551 - DNA, 25 bp, Homo sapien
gagtcggcctgtgctagtcattcca

SEQ ID NO: 6082552 - DNA, 25 bp, Homo sapien
taataccatggagataacagctcga

SEQ ID NO: 6082553 - DNA, 25 bp, Homo sapien
tatttccggcccttgatcctgctcg

SEQ ID NO: 6082554 - DNA, 25 bp, Homo sapien
tttccggcccttgatcctgctcgga

SEQ ID NO: 6082555 - DNA, 25 bp, Homo sapien
atcctgctcggatgctggtggaggc

SEQ ID NO: 6082556 - DNA, 25 bp, Homo sapien
atttccggcccttgatcctgctcgg

SEQ ID NO: 6082557 - DNA, 25 bp, Homo sapien
cctgctcggatgctggtggaggccc

SEQ ID NO: 6082558 - DNA, 25 bp, Homo sapien
tccggcccttgatcctgctcggatg

SEQ ID NO: 6082559 - DNA, 25 bp, Homo sapien
ttccggcccttgatcctgctcggat

SEQ ID NO: 6082560 - DNA, 25 bp, Homo sapien
tcctgctcggatgctggtggaggcc

SEQ ID NO: 6082561 - DNA, 25 bp, Homo sapien
cagcctttatttccggcccttgatc

SEQ ID NO: 6082562 - DNA, 25 bp, Homo sapien
tttatttccggcccttgatcctgct

SEQ ID NO: 6082563 - DNA, 25 bp, Homo sapien
acagcctttatttccggcccttgat

SEQ ID NO: 6082564 - DNA, 25 bp, Homo sapien
ttatttccggcccttgatcctgctc

SEQ ID NO: 6082565 - DNA, 25 bp, Homo sapien
tcggttacagttacacaaagggtca

SEQ ID NO: 6082566 - DNA, 25 bp, Homo sapien
acagttacacaaagggtcacttcct

SEQ ID NO: 6082567 - DNA, 25 bp, Homo sapien
tacagttacacaaagggtcacttcc

SEQ ID NO: 6082568 - DNA, 25 bp, Homo sapien
ggaatcatttctgcggagctttcaa

SEQ ID NO: 6082569 - DNA, 25 bp, Homo sapien
cagttacacaaagggtcacttcctc

SEQ ID NO: 6082570 - DNA, 25 bp, Homo sapien
ttacagttacacaaagggtcacttc

SEQ ID NO: 6082571 - DNA, 25 bp, Homo sapien
gcagcaggagaaaatcgggactccg

SEQ ID NO: 6082572 - DNA, 25 bp, Homo sapien
gcgagaggcatgttctcgtgtgcgt

SEQ ID NO: 6082573 - DNA, 25 bp, Homo sapien
ttgcgagaggcatgttctcgtgtgc

SEQ ID NO: 6082574 - DNA, 25 bp, Homo sapien
tcttgactcagagtgcttttagtgc

SEQ ID NO: 6082575 - DNA, 25 bp, Homo sapien
tttgcgagaggcatgttctcgtgtg

SEQ ID NO: 6082576 - DNA, 25 bp, Homo sapien
tcctttgcgagaggcatgttctcgt

SEQ ID NO: 6082577 - DNA, 25 bp, Homo sapien
ggtttcccactcatcttgactcaga

SEQ ID NO: 6082578 - DNA, 25 bp, Homo sapien
gagaggcatgttctcgtgtgcgtag

SEQ ID NO: 6082579 - DNA, 25 bp, Homo sapien
tgcgagaggcatgttctcgtgtgcg

SEQ ID NO: 6082580 - DNA, 25 bp, Homo sapien
ttgactcagagtgcttttagtgctg

SEQ ID NO: 6082581 - DNA, 25 bp, Homo sapien
cgagaggcatgttctcgtgtgcgta

SEQ ID NO: 6082582 - DNA, 25 bp, Homo sapien
gagatggtttcccactcatcttgac

SEQ ID NO: 6082583 - DNA, 25 bp, Homo sapien
agaggcatgttctcgtgtgcgtagg

SEQ ID NO: 6082584 - DNA, 25 bp, Homo sapien
ttttcttagcaaaggtagtccatgg

SEQ ID NO: 6082585 - DNA, 25 bp, Homo sapien
tcttttgatgaaccagtgtgcagca

SEQ ID NO: 6082586 - DNA, 25 bp, Homo sapien
ttttttcagacgtcctgccatcttc

SEQ ID NO: 6082587 - DNA, 25 bp, Homo sapien
gcaaaggtagtccatggcaagtaat

SEQ ID NO: 6082588 - DNA, 25 bp, Homo sapien
tcttagcaaaggtagtccatggcaa

SEQ ID NO: 6082589 - DNA, 25 bp, Homo sapien
gagacttcctaagttctatgtatag

SEQ ID NO: 6082590 - DNA, 25 bp, Homo sapien
aaactcaaaaagtaacatgaagtgc

SEQ ID NO: 6082591 - DNA, 25 bp, Homo sapien
tgatgaaccagtgtgcagcaaacca

SEQ ID NO: 6082592 - DNA, 25 bp, Homo sapien
tagtccatggcaagtaatgaattcc

SEQ ID NO: 6082593 - DNA, 25 bp, Homo sapien
aaagtaacatgaagtgcaaacacct

SEQ ID NO: 6082594 - DNA, 25 bp, Homo sapien
ccagtaactaggtctgtaacagaag

SEQ ID NO: 6082595 - DNA, 25 bp, Homo sapien
ggcagatgagacttcctaagttcta

SEQ ID NO: 6082596 - DNA, 25 bp, Homo sapien
ccgggtggttttgcttcgctccctg

SEQ ID NO: 6082597 - DNA, 25 bp, Homo sapien
tctgttgtctcttgtgggccgggtg

SEQ ID NO: 6082598 - DNA, 25 bp, Homo sapien
cctcacagagtgtggcgatctgaat

SEQ ID NO: 6082599 - DNA, 25 bp, Homo sapien
ccctcttgggttatggaaatccaca

SEQ ID NO: 6082600 - DNA, 25 bp, Homo sapien
gaaatccacatcttagtgtaatgag

SEQ ID NO: 6082601 - DNA, 25 bp, Homo sapien
tggcgatctgaatactctgttgtct

SEQ ID NO: 6082602 - DNA, 25 bp, Homo sapien
tgggctctggatggtacagttaaac

SEQ ID NO: 6082603 - DNA, 25 bp, Homo sapien
atcagcattccactgcccagtcgga

SEQ ID NO: 6082604 - DNA, 25 bp, Homo sapien
aaaccctgggtacacccgtgatctg

SEQ ID NO: 6082605 - DNA, 25 bp, Homo sapien
aaatactaagccaaacacctgccca

SEQ ID NO: 6082606 - DNA, 25 bp, Homo sapien
ttttgcttcgctccctgttctactg

SEQ ID NO: 6082607 - DNA, 25 bp, Homo sapien
ttagtgtaatgagctgaaaaaccct

SEQ ID NO: 6082608 - DNA, 25 bp, Homo sapien
tactgagcacttcctcatgagccag

SEQ ID NO: 6082609 - DNA, 25 bp, Homo sapien
tgggagaatcccttgatcctgggag

SEQ ID NO: 6082610 - DNA, 25 bp, Homo sapien
aaacaaaaattagcccgccatggtg

SEQ ID NO: 6082611 - DNA, 25 bp, Homo sapien
taaaaccaagcatgagcatggtggc

SEQ ID NO: 6082612 - DNA, 25 bp, Homo sapien
cagtctttgtgctaggtatttccca

SEQ ID NO: 6082613 - DNA, 25 bp, Homo sapien
taggactgggttttatgtggcctcc

SEQ ID NO: 6082614 - DNA, 25 bp, Homo sapien
tgtgtgaatgtgtgaagctccttcc

SEQ ID NO: 6082615 - DNA, 25 bp, Homo sapien
tatttcccagaaaggatgaccaggt

SEQ ID NO: 6082616 - DNA, 25 bp, Homo sapien
cactccagcctggttgaaagagaga

SEQ ID NO: 6082617 - DNA, 25 bp, Homo sapien
gaaactgaagttcggagtaggactg

SEQ ID NO: 6082618 - DNA, 25 bp, Homo sapien
cactgtgtgtctcctatcctggtca

SEQ ID NO: 6082619 - DNA, 25 bp, Homo sapien
tatcattatgctactgcactccagc

SEQ ID NO: 6082620 - DNA, 25 bp, Homo sapien
actggaaccaaatgacttccaagaa

SEQ ID NO: 6082621 - DNA, 25 bp, Homo sapien
gtgcaatggaaatcccagccacaga

SEQ ID NO: 6082622 - DNA, 25 bp, Homo sapien
ttccaagaagctgggcaacatcccc

SEQ ID NO: 6082623 - DNA, 25 bp, Homo sapien
agtgcaatggaaatcccagccacag

SEQ ID NO: 6082624 - DNA, 25 bp, Homo sapien
gatatgagtgtagttcagacagcct

SEQ ID NO: 6082625 - DNA, 25 bp, Homo sapien
ttaccttgtgggtctgaaagcccca

SEQ ID NO: 6082626 - DNA, 25 bp, Homo sapien
cagacagccttttgccagtttcacc

SEQ ID NO: 6082627 - DNA, 25 bp, Homo sapien
gcaggtgagacttgaatgatatgag

SEQ ID NO: 6082628 - DNA, 25 bp, Homo sapien
gtagttcagacagccttttgccagt

SEQ ID NO: 6082629 - DNA, 25 bp, Homo sapien
gaaccaaatgacttccaagaagctg

SEQ ID NO: 6082630 - DNA, 25 bp, Homo sapien
gagtgtagttcagacagccttttgc

SEQ ID NO: 6082631 - DNA, 25 bp, Homo sapien
tattattaccttgtgggtctgaaag

SEQ ID NO: 6082632 - DNA, 25 bp, Homo sapien
cattggcagtttaagccagtggcta

SEQ ID NO: 6082633 - DNA, 25 bp, Homo sapien
catgcaggcaaaccattggcagttt

SEQ ID NO: 6082634 - DNA, 25 bp, Homo sapien
ggattgaacactgcgttgtcccagc

SEQ ID NO: 6082635 - DNA, 25 bp, Homo sapien
gccatggagcctacggggcagccta

SEQ ID NO: 6082636 - DNA, 25 bp, Homo sapien
atcgcacgttgagccacagactcag

SEQ ID NO: 6082637 - DNA, 25 bp, Homo sapien
taagccagtggctaagcagagaggt

SEQ ID NO: 6082638 - DNA, 25 bp, Homo sapien
gagaatggattgaacactgcgttgt

SEQ ID NO: 6082639 - DNA, 25 bp, Homo sapien
acactgcgttgtcccagcatgtgag

SEQ ID NO: 6082640 - DNA, 25 bp, Homo sapien
ctgtccgcttcccattcctgtggag

SEQ ID NO: 6082641 - DNA, 25 bp, Homo sapien
gggcaggcccttgcactgcacatcg

SEQ ID NO: 6082642 - DNA, 25 bp, Homo sapien
ttgcactgcacatcgcacgttgagc

SEQ ID NO: 6082643 - DNA, 25 bp, Homo sapien
ccgcttcccattcctgtggagacag

SEQ ID NO: 6082644 - DNA, 25 bp, Homo sapien
aggcctagagaacatatatcgggtg

SEQ ID NO: 6082645 - DNA, 25 bp, Homo sapien
ttttttaacacctattatgccatga

SEQ ID NO: 6082646 - DNA, 25 bp, Homo sapien
tccttcacacgtttcaggaagctat

SEQ ID NO: 6082647 - DNA, 25 bp, Homo sapien
ttttaacacctattatgccatgaat

SEQ ID NO: 6082648 - DNA, 25 bp, Homo sapien
tggcgctttagttgaacccaggtac

SEQ ID NO: 6082649 - DNA, 25 bp, Homo sapien
tatagattcgcatatatgtggccaa

SEQ ID NO: 6082650 - DNA, 25 bp, Homo sapien
gatcattttccttcacacgtttcag

SEQ ID NO: 6082651 - DNA, 25 bp, Homo sapien
tttttttaacacctattatgccatg

SEQ ID NO: 6082652 - DNA, 25 bp, Homo sapien
tttttaacacctattatgccatgaa

SEQ ID NO: 6082653 - DNA, 25 bp, Homo sapien
cttatagattcgcatatatgtggcc

SEQ ID NO: 6082654 - DNA, 25 bp, Homo sapien
ttccctttgtgttcgtcattttggc

SEQ ID NO: 6082655 - DNA, 25 bp, Homo sapien
tagagaacatatatcgggtgcctct

SEQ ID NO: 6082656 - DNA, 25 bp, Homo sapien
ggactccggatcacatccagggctg

SEQ ID NO: 6082657 - DNA, 25 bp, Homo sapien
gggactccggatcacatccagggct

SEQ ID NO: 6082658 - DNA, 25 bp, Homo sapien
agggactccggatcacatccagggc

SEQ ID NO: 6082659 - DNA, 25 bp, Homo sapien
aagggactccggatcacatccaggg

SEQ ID NO: 6082660 - DNA, 25 bp, Homo sapien
gcatgaaccggaatcatcagagcag

SEQ ID NO: 6082661 - DNA, 25 bp, Homo sapien
gcggggcggcaaaggagagacacac

SEQ ID NO: 6082662 - DNA, 25 bp, Homo sapien
cagcatgaaccggaatcatcagagc

SEQ ID NO: 6082663 - DNA, 25 bp, Homo sapien
tggctggcagcatgaaccggaatca

SEQ ID NO: 6082664 - DNA, 25 bp, Homo sapien
atgaaccggaatcatcagagcaggt

SEQ ID NO: 6082665 - DNA, 25 bp, Homo sapien
ctggcagcatgaaccggaatcatca

SEQ ID NO: 6082666 - DNA, 25 bp, Homo sapien
gctggcagcatgaaccggaatcatc

SEQ ID NO: 6082667 - DNA, 25 bp, Homo sapien
agcatgaaccggaatcatcagagca

SEQ ID NO: 6082668 - DNA, 25 bp, Homo sapien
ggctggcagcatgaaccggaatcat

SEQ ID NO: 6082669 - DNA, 25 bp, Homo sapien
tggcagcatgaaccggaatcatcag

SEQ ID NO: 6082670 - DNA, 25 bp, Homo sapien
tgaaccggaatcatcagagcaggtg

SEQ ID NO: 6082671 - DNA, 25 bp, Homo sapien
catgcggggcggcaaaggagagaca

SEQ ID NO: 6082672 - DNA, 25 bp, Homo sapien
cacacagcaggcaggccggcacaca

SEQ ID NO: 6082673 - DNA, 25 bp, Homo sapien
acacagcaggcaggccggcacacag

SEQ ID NO: 6082674 - DNA, 25 bp, Homo sapien
aggaggcagggacacaacaggaggg

SEQ ID NO: 6082675 - DNA, 25 bp, Homo sapien
acgggcttgcagcagttggacttgc

SEQ ID NO: 6082676 - DNA, 25 bp, Homo sapien
aggaaggacaggcaggaggccgggt

SEQ ID NO: 6082677 - DNA, 25 bp, Homo sapien
ttggacttgcagcacacaggcacac

SEQ ID NO: 6082678 - DNA, 25 bp, Homo sapien
gcagcagttggacttgcagcacaca

SEQ ID NO: 6082679 - DNA, 25 bp, Homo sapien
ggaagctccagagcagatggacacg

SEQ ID NO: 6082680 - DNA, 25 bp, Homo sapien
tgggctcacagctcactggggcaca

SEQ ID NO: 6082681 - DNA, 25 bp, Homo sapien
ctccagagcagatggacacgcagca

SEQ ID NO: 6082682 - DNA, 25 bp, Homo sapien
catgaaggtgtgcaggagtcggtgc

SEQ ID NO: 6082683 - DNA, 25 bp, Homo sapien
agatggacacgcagcacacgggctt

SEQ ID NO: 6082684 - DNA, 25 bp, Homo sapien
ggacgtgcccatcagcagctggact

SEQ ID NO: 6082685 - DNA, 25 bp, Homo sapien
gagggttcactgagcatgcttttca

SEQ ID NO: 6082686 - DNA, 25 bp, Homo sapien
tacaggtgtggcctcatctgcactg

SEQ ID NO: 6082687 - DNA, 25 bp, Homo sapien
ttcagagggttcactgagcatgctt

SEQ ID NO: 6082688 - DNA, 25 bp, Homo sapien
cagagggttcactgagcatgctttt

SEQ ID NO: 6082689 - DNA, 25 bp, Homo sapien
cccacggggatgtaacaggatgcct

SEQ ID NO: 6082690 - DNA, 25 bp, Homo sapien
gctggcttgaagctcacgggcacgc

SEQ ID NO: 6082691 - DNA, 25 bp, Homo sapien
gagtgtacaggtgtggcctcatctg

SEQ ID NO: 6082692 - DNA, 25 bp, Homo sapien
agggagccgcatacacgacgggcct

SEQ ID NO: 6082693 - DNA, 25 bp, Homo sapien
tcatccagggagtgtacaggtgtgg

SEQ ID NO: 6082694 - DNA, 25 bp, Homo sapien
gtgtacaggtgtggcctcatctgca

SEQ ID NO: 6082695 - DNA, 25 bp, Homo sapien
agccgcatacacgacgggcctgcag

SEQ ID NO: 6082696 - DNA, 25 bp, Homo sapien
acaggtgtggcctcatctgcactgg

SEQ ID NO: 6082697 - DNA, 25 bp, Homo sapien
gagacaggacagtcacgcagagctt

SEQ ID NO: 6082698 - DNA, 25 bp, Homo sapien
gacaggacagtcacgcagagcttca

SEQ ID NO: 6082699 - DNA, 25 bp, Homo sapien
tcagttccaggtcatacacgtactc

SEQ ID NO: 6082700 - DNA, 25 bp, Homo sapien
agacaggacagtcacgcagagcttc

SEQ ID NO: 6082701 - DNA, 25 bp, Homo sapien
acaggacagtcacgcagagcttcat

SEQ ID NO: 6082702 - DNA, 25 bp, Homo sapien
cagttccaggtcatacacgtactcc

SEQ ID NO: 6082703 - DNA, 25 bp, Homo sapien
cattacagccggagaagacaaaagt

SEQ ID NO: 6082704 - DNA, 25 bp, Homo sapien
taaagtgaacttcatagcagcttcc

SEQ ID NO: 6082705 - DNA, 25 bp, Homo sapien
cagccggagaagacaaaagtttcac

SEQ ID NO: 6082706 - DNA, 25 bp, Homo sapien
taaggttgccattacagccggagaa

SEQ ID NO: 6082707 - DNA, 25 bp, Homo sapien
tagaagaaatcccagcttggcagac

SEQ ID NO: 6082708 - DNA, 25 bp, Homo sapien
tccgcaattttattaacaccaccca

SEQ ID NO: 6082709 - DNA, 25 bp, Homo sapien
taacagggtattcaatgagcagaag

SEQ ID NO: 6082710 - DNA, 25 bp, Homo sapien
gttaaggttgccattacagccggag

SEQ ID NO: 6082711 - DNA, 25 bp, Homo sapien
gcagcagacaacttcatgagttcac

SEQ ID NO: 6082712 - DNA, 25 bp, Homo sapien
caggctacttcacgttctattttaa

SEQ ID NO: 6082713 - DNA, 25 bp, Homo sapien
gaggtctccacatatcttctccgca

SEQ ID NO: 6082714 - DNA, 25 bp, Homo sapien
ctattttaagcttgaagttgttaag

SEQ ID NO: 6082715 - DNA, 25 bp, Homo sapien
tatctccaaagacatcgtgctggcc

SEQ ID NO: 6082716 - DNA, 25 bp, Homo sapien
tcaaacatgtcctcggctggccagt

SEQ ID NO: 6082717 - DNA, 25 bp, Homo sapien
aatgtcactggtgacaataagggca

SEQ ID NO: 6082718 - DNA, 25 bp, Homo sapien
cttgggatcctccaatggtcgggag

SEQ ID NO: 6082719 - DNA, 25 bp, Homo sapien
ttggctggactgagatgcagaaccg

SEQ ID NO: 6082720 - DNA, 25 bp, Homo sapien
gtcactggtgacaataagggcaaca

SEQ ID NO: 6082721 - DNA, 25 bp, Homo sapien
gcagctttgctggcccgaaggactc

SEQ ID NO: 6082722 - DNA, 25 bp, Homo sapien
ccggaagaactcattatgcccaggg

SEQ ID NO: 6082723 - DNA, 25 bp, Homo sapien
gaagaactcattatgcccagggaac

SEQ ID NO: 6082724 - DNA, 25 bp, Homo sapien
ggtgggatggtcaaacatgtcctcg

SEQ ID NO: 6082725 - DNA, 25 bp, Homo sapien
gagcttgggatcctccaatggtcgg

SEQ ID NO: 6082726 - DNA, 25 bp, Homo sapien
tctccaaagacatcgtgctggccct

SEQ ID NO: 6082727 - DNA, 25 bp, Homo sapien
ggaatcaatcctgaagggaactcgc

SEQ ID NO: 6082728 - DNA, 25 bp, Homo sapien
ggctatacgctctgtaggccgccag

SEQ ID NO: 6082729 - DNA, 25 bp, Homo sapien
gcatcacctggtagcccacgtaggg

SEQ ID NO: 6082730 - DNA, 25 bp, Homo sapien
tggccagtgctcttggcgtcctctg

SEQ ID NO: 6082731 - DNA, 25 bp, Homo sapien
tgtggcctgggctatgtctgcaaag

SEQ ID NO: 6082732 - DNA, 25 bp, Homo sapien
ccagcaccaggctatacgctctgta

SEQ ID NO: 6082733 - DNA, 25 bp, Homo sapien
cccgcatgatgtggtagggcacata

SEQ ID NO: 6082734 - DNA, 25 bp, Homo sapien
atccacgttgagcacccgcatgatg

SEQ ID NO: 6082735 - DNA, 25 bp, Homo sapien
agtgctcttggcgtcctctgggttc

SEQ ID NO: 6082736 - DNA, 25 bp, Homo sapien
tgcggcctcttcaggtgggagaagc

SEQ ID NO: 6082737 - DNA, 25 bp, Homo sapien
agctggcgtagagggccacaccact

SEQ ID NO: 6082738 - DNA, 25 bp, Homo sapien
ctcgggcctggccacgctgcagttg

SEQ ID NO: 6082739 - DNA, 25 bp, Homo sapien
tatgtctgcaaagctcgggcagcgg

SEQ ID NO: 6082740 - DNA, 25 bp, Homo sapien
caggcttactatttaatatttggag

SEQ ID NO: 6082741 - DNA, 25 bp, Homo sapien
tacaaaagaatagctaggcatggtg

SEQ ID NO: 6082742 - DNA, 25 bp, Homo sapien
tctacatagggtctaagaaactcct

SEQ ID NO: 6082743 - DNA, 25 bp, Homo sapien
gggttccagaccagcctgagcaaca

SEQ ID NO: 6082744 - DNA, 25 bp, Homo sapien
tcttctatggtatgggccaattctg

SEQ ID NO: 6082745 - DNA, 25 bp, Homo sapien
gccaattctggtctatttgggatta

SEQ ID NO: 6082746 - DNA, 25 bp, Homo sapien
aaaagaaaaatcaagggccaggcat

SEQ ID NO: 6082747 - DNA, 25 bp, Homo sapien
tcaagggccaggcatggcggttcat

SEQ ID NO: 6082748 - DNA, 25 bp, Homo sapien
ggaggccgagttgggcacatcattt

SEQ ID NO: 6082749 - DNA, 25 bp, Homo sapien
tgagcaacacagcaaaaccctgtct

SEQ ID NO: 6082750 - DNA, 25 bp, Homo sapien
tacaagtgtttcagattccttcagg

SEQ ID NO: 6082751 - DNA, 25 bp, Homo sapien
ttgggcacatcatttgagcctaggg

SEQ ID NO: 6082752 - DNA, 25 bp, Homo sapien
gcatagctttcagtccaggcacgtt

SEQ ID NO: 6082753 - DNA, 25 bp, Homo sapien
taatgtactttgcacagtgttagca

SEQ ID NO: 6082754 - DNA, 25 bp, Homo sapien
agtgcagttgttcagtcccggctca

SEQ ID NO: 6082755 - DNA, 25 bp, Homo sapien
gaatcactaagggaactctttcaaa

SEQ ID NO: 6082756 - DNA, 25 bp, Homo sapien
gaccagtggttctctattctaactg

SEQ ID NO: 6082757 - DNA, 25 bp, Homo sapien
tccctctccctagtgaagctaatgt

SEQ ID NO: 6082758 - DNA, 25 bp, Homo sapien
agttcaaatgattctcctgccccag

SEQ ID NO: 6082759 - DNA, 25 bp, Homo sapien
actctttcaaaataccagggctggg

SEQ ID NO: 6082760 - DNA, 25 bp, Homo sapien
gggcagtattccagaccaattaaaa

SEQ ID NO: 6082761 - DNA, 25 bp, Homo sapien
tgtataaacacgtagcatagctttc

SEQ ID NO: 6082762 - DNA, 25 bp, Homo sapien
ccgcacctggctgatacaactatta

SEQ ID NO: 6082763 - DNA, 25 bp, Homo sapien
taaaatagaatgtcggcagcagagg

SEQ ID NO: 6082764 - DNA, 25 bp, Homo sapien
tctctgggagaagggttcgaatccc

SEQ ID NO: 6082765 - DNA, 25 bp, Homo sapien
aaaggacacgaggttgcagtactgg

SEQ ID NO: 6082766 - DNA, 25 bp, Homo sapien
gctgatctgagcaatctccaaggag

SEQ ID NO: 6082767 - DNA, 25 bp, Homo sapien
aggacaaaggacacgaggttgcagt

SEQ ID NO: 6082768 - DNA, 25 bp, Homo sapien
acagaatggggttgatggcagcact

SEQ ID NO: 6082769 - DNA, 25 bp, Homo sapien
tgccacccggtacttcttggacatg

SEQ ID NO: 6082770 - DNA, 25 bp, Homo sapien
tggaaaataaatatcgccctacgtg

SEQ ID NO: 6082771 - DNA, 25 bp, Homo sapien
gcagtactggctgatctgagcaatc

SEQ ID NO: 6082772 - DNA, 25 bp, Homo sapien
cacgaggttgcagtactggctgatc

SEQ ID NO: 6082773 - DNA, 25 bp, Homo sapien
cttggacatgatgttgtacagaatg

SEQ ID NO: 6082774 - DNA, 25 bp, Homo sapien
ataaatatcgccctacgtggaaggg

SEQ ID NO: 6082775 - DNA, 25 bp, Homo sapien
cacccggtacttcttggacatgatg

SEQ ID NO: 6082776 - DNA, 25 bp, Homo sapien
gaaatctgcactgataattgccacg

SEQ ID NO: 6082777 - DNA, 25 bp, Homo sapien
aaatggtccttgagactaatccagc

SEQ ID NO: 6082778 - DNA, 25 bp, Homo sapien
tgctcctatcattagaccagggctc

SEQ ID NO: 6082779 - DNA, 25 bp, Homo sapien
gagactaatccagcacattttctga

SEQ ID NO: 6082780 - DNA, 25 bp, Homo sapien
tgctagggaaccttaacaagaaatc

SEQ ID NO: 6082781 - DNA, 25 bp, Homo sapien
gaccagggctcctcaaccttagcat

SEQ ID NO: 6082782 - DNA, 25 bp, Homo sapien
ccccactcctctgaacagatttaaa

SEQ ID NO: 6082783 - DNA, 25 bp, Homo sapien
gcatatgatacgctggctctgtcca

SEQ ID NO: 6082784 - DNA, 25 bp, Homo sapien
gctctctgtgaaggcagtgaagaca

SEQ ID NO: 6082785 - DNA, 25 bp, Homo sapien
ggctgtcccacacaccgtagggtgt

SEQ ID NO: 6082786 - DNA, 25 bp, Homo sapien
ggctctgtccactctccgtgatggg

SEQ ID NO: 6082787 - DNA, 25 bp, Homo sapien
gaagacagatcttgaattgctccta

SEQ ID NO: 6082788 - DNA, 25 bp, Homo sapien
tatgcagccaaccaagatgcaaatg

SEQ ID NO: 6082789 - DNA, 25 bp, Homo sapien
cataaatgagggctgcacattgcct

SEQ ID NO: 6082790 - DNA, 25 bp, Homo sapien
gtaaatcatctttccaatccagagg

SEQ ID NO: 6082791 - DNA, 25 bp, Homo sapien
taaactggagtgatgttagcagacc

SEQ ID NO: 6082792 - DNA, 25 bp, Homo sapien
ctgacagagaagattcccgagagta

SEQ ID NO: 6082793 - DNA, 25 bp, Homo sapien
ggcccgcaatactgtaggaacaagc

SEQ ID NO: 6082794 - DNA, 25 bp, Homo sapien
ggaaagtcacccaaacacttctgct

SEQ ID NO: 6082795 - DNA, 25 bp, Homo sapien
ttcacttaagtgtctggcccgcaat

SEQ ID NO: 6082796 - DNA, 25 bp, Homo sapien
tgcctttagatgtacaggctgacag

SEQ ID NO: 6082797 - DNA, 25 bp, Homo sapien
tagcagacccagcttagagttcttc

SEQ ID NO: 6082798 - DNA, 25 bp, Homo sapien
gatcaataggaaagcatatgcagcc

SEQ ID NO: 6082799 - DNA, 25 bp, Homo sapien
gcctgttctgcttcgaagtattcaa

SEQ ID NO: 6082800 - DNA, 25 bp, Homo sapien
gggtagacagaaagattctgcagtg

SEQ ID NO: 6082801 - DNA, 25 bp, Homo sapien
gctatttggaaatatctgtctagag

SEQ ID NO: 6082802 - DNA, 25 bp, Homo sapien
ccccctgttcccgtgctggctccat

SEQ ID NO: 6082803 - DNA, 25 bp, Homo sapien
tttgtttgtcactggacttcaatgc

SEQ ID NO: 6082804 - DNA, 25 bp, Homo sapien
tagagcttgtgctctaggctgcccc

SEQ ID NO: 6082805 - DNA, 25 bp, Homo sapien
gacaatccagtctgcctgactccca

SEQ ID NO: 6082806 - DNA, 25 bp, Homo sapien
gggcttggacttggccattgaagac

SEQ ID NO: 6082807 - DNA, 25 bp, Homo sapien
tgcacaagctgctgcatgcacaccg

SEQ ID NO: 6082808 - DNA, 25 bp, Homo sapien
tctagagtctgcgtctctccctcac

SEQ ID NO: 6082809 - DNA, 25 bp, Homo sapien
tcccaaactcccctgctgacctccc

SEQ ID NO: 6082810 - DNA, 25 bp, Homo sapien
atgtttcccaggagctctgaaggac

SEQ ID NO: 6082811 - DNA, 25 bp, Homo sapien
gctctaggctgcccccctgttcccg

SEQ ID NO: 6082812 - DNA, 25 bp, Homo sapien
aggacagcctgtgtgatatgcaaaa

SEQ ID NO: 6082813 - DNA, 25 bp, Homo sapien
tggaaatatctgtctagagtctgcg

SEQ ID NO: 6082814 - DNA, 25 bp, Homo sapien
cgcatcatgtttcccaggagctctg

SEQ ID NO: 6082815 - DNA, 25 bp, Homo sapien
ggccattgaagaccctgagaggaca

SEQ ID NO: 6082816 - DNA, 25 bp, Homo sapien
gaaggacacagatagagcttgtgct

SEQ ID NO: 6082817 - DNA, 25 bp, Homo sapien
ataggctaacatccccagctttgcc

SEQ ID NO: 6082818 - DNA, 25 bp, Homo sapien
taggtgtaccttccaagtcagatga

SEQ ID NO: 6082819 - DNA, 25 bp, Homo sapien
gcctgtgtgatatgcaaaatgccat

SEQ ID NO: 6082820 - DNA, 25 bp, Homo sapien
cctcaccagatgtcggctccaggag

SEQ ID NO: 6082821 - DNA, 25 bp, Homo sapien
gaggacatcttgtccaccctctcca

SEQ ID NO: 6082822 - DNA, 25 bp, Homo sapien
tcggctccaggagggcagagtccct

SEQ ID NO: 6082823 - DNA, 25 bp, Homo sapien
ggctgcccccctgttcccgtgctgg

SEQ ID NO: 6082824 - DNA, 25 bp, Homo sapien
gcatgcacaccgcacgtgacaatcc

SEQ ID NO: 6082825 - DNA, 25 bp, Homo sapien
cacgtggggggagaagtggctccca

SEQ ID NO: 6082826 - DNA, 25 bp, Homo sapien
tctctccctcaccagatgtcggctc

SEQ ID NO: 6082827 - DNA, 25 bp, Homo sapien
ccaagtcagatgacagtcataggct

SEQ ID NO: 6082828 - DNA, 25 bp, Homo sapien
ttcccatgagggcgcatcatgtttc

SEQ ID NO: 6082829 - DNA, 25 bp, Homo sapien
gagaagtggctcccaaactcccctg

SEQ ID NO: 6082830 - DNA, 25 bp, Homo sapien
cccaggagctctgaaggacacagat

SEQ ID NO: 6082831 - DNA, 25 bp, Homo sapien
taccttccaagtcagatgacagtca

SEQ ID NO: 6082832 - DNA, 25 bp, Homo sapien
agtggctcccaaactcccctgctga

SEQ ID NO: 6082833 - DNA, 25 bp, Homo sapien
tccaccctctccaggctaggccctg

SEQ ID NO: 6082834 - DNA, 25 bp, Homo sapien
agttcacactccagtgccacgtggg

SEQ ID NO: 6082835 - DNA, 25 bp, Homo sapien
ctggaactcaggaaaggatacttac

SEQ ID NO: 6082836 - DNA, 25 bp, Homo sapien
atcttgtccaccctctccaggctag

SEQ ID NO: 6082837 - DNA, 25 bp, Homo sapien
tgtgttttgtttgtcactggacttc

SEQ ID NO: 6082838 - DNA, 25 bp, Homo sapien
gaagaccctgagaggacatcttgtc

SEQ ID NO: 6082839 - DNA, 25 bp, Homo sapien
tgagggcgcatcatgtttcccagga

SEQ ID NO: 6082840 - DNA, 25 bp, Homo sapien
cccgtgctggctccatgctggtgtc

SEQ ID NO: 6082841 - DNA, 25 bp, Homo sapien
actcccaggacagcctgtgtgatat

SEQ ID NO: 6082842 - DNA, 25 bp, Homo sapien
tgcaaaatgccattcccatgagggc

SEQ ID NO: 6082843 - DNA, 25 bp, Homo sapien
ctcaggaaaggatacttacgggtag

SEQ ID NO: 6082844 - DNA, 25 bp, Homo sapien
gccctgtctgtgctgcctgctattt

SEQ ID NO: 6082845 - DNA, 25 bp, Homo sapien
cacagatagagcttgtgctctaggc

SEQ ID NO: 6082846 - DNA, 25 bp, Homo sapien
tgtcactggacttcaatgcatcgta

SEQ ID NO: 6082847 - DNA, 25 bp, Homo sapien
agattctgcagtgggcttggacttg

SEQ ID NO: 6082848 - DNA, 25 bp, Homo sapien
tgagccagttcacactccagtgcca

SEQ ID NO: 6082849 - DNA, 25 bp, Homo sapien
tctgtgctgcctgctatttggaaat

SEQ ID NO: 6082850 - DNA, 25 bp, Homo sapien
cagatgtcggctccaggagggcaga

SEQ ID NO: 6082851 - DNA, 25 bp, Homo sapien
taacatccccagctttgcctggaac

SEQ ID NO: 6082852 - DNA, 25 bp, Homo sapien
ctttgcctggaactcaggaaaggat

SEQ ID NO: 6082853 - DNA, 25 bp, Homo sapien
acagaaagattctgcagtgggcttg

SEQ ID NO: 6082854 - DNA, 25 bp, Homo sapien
gtctgcgtctctccctcaccagatg

SEQ ID NO: 6082855 - DNA, 25 bp, Homo sapien
atgccattcccatgagggcgcatca

SEQ ID NO: 6082856 - DNA, 25 bp, Homo sapien
gctgctgcatgcacaccgcacgtga

SEQ ID NO: 6082857 - DNA, 25 bp, Homo sapien
gcccctaggtgtaccttccaagtca

SEQ ID NO: 6082858 - DNA, 25 bp, Homo sapien
tccacaggtccactgcagtgcacaa

SEQ ID NO: 6082859 - DNA, 25 bp, Homo sapien
ttgtgctctaggctgcccccctgtt

SEQ ID NO: 6082860 - DNA, 25 bp, Homo sapien
gtgcacctttagaaatggtccacag

SEQ ID NO: 6082861 - DNA, 25 bp, Homo sapien
ctttagaaatggtccacaggtccac

SEQ ID NO: 6082862 - DNA, 25 bp, Homo sapien
ctgcagtgcacaagctgctgcatgc

SEQ ID NO: 6082863 - DNA, 25 bp, Homo sapien
gcacgtgacaatccagtctgcctga

SEQ ID NO: 6082864 - DNA, 25 bp, Homo sapien
ctctccaggctaggccctgtctgtg

SEQ ID NO: 6082865 - DNA, 25 bp, Homo sapien
cctgagaggacatcttgtccaccct

SEQ ID NO: 6082866 - DNA, 25 bp, Homo sapien
aaatggtccacaggtccactgcagt

SEQ ID NO: 6082867 - DNA, 25 bp, Homo sapien
ggctaggccctgtctgtgctgcctg

SEQ ID NO: 6082868 - DNA, 25 bp, Homo sapien
acaccgcacgtgacaatccagtctg

SEQ ID NO: 6082869 - DNA, 25 bp, Homo sapien
ccaggagggcagagtccctgtgttt

SEQ ID NO: 6082870 - DNA, 25 bp, Homo sapien
ccagtctgcctgactcccaggacag

SEQ ID NO: 6082871 - DNA, 25 bp, Homo sapien
ctgcctgctatttggaaatatctgt

SEQ ID NO: 6082872 - DNA, 25 bp, Homo sapien
acagtcataggctaacatccccagc

SEQ ID NO: 6082873 - DNA, 25 bp, Homo sapien
gggcagagtccctgtgttttgtttg

SEQ ID NO: 6082874 - DNA, 25 bp, Homo sapien
agctctgaaggacacagatagagct

SEQ ID NO: 6082875 - DNA, 25 bp, Homo sapien
ggacttggccattgaagaccctgag

SEQ ID NO: 6082876 - DNA, 25 bp, Homo sapien
tgcctgactcccaggacagcctgtg

SEQ ID NO: 6082877 - DNA, 25 bp, Homo sapien
tgcagtgggcttggacttggccatt

SEQ ID NO: 6082878 - DNA, 25 bp, Homo sapien
gaaaggatacttacgggtagacaga

SEQ ID NO: 6082879 - DNA, 25 bp, Homo sapien
ctgctgacctccccccggcccctag

SEQ ID NO: 6082880 - DNA, 25 bp, Homo sapien
ggtccactgcagtgcacaagctgct

SEQ ID NO: 6082881 - DNA, 25 bp, Homo sapien
ccccagctttgcctggaactcagga

SEQ ID NO: 6082882 - DNA, 25 bp, Homo sapien
tggtgtccagaatgagccagttcac

SEQ ID NO: 6082883 - DNA, 25 bp, Homo sapien
gtgatatgcaaaatgccattcccat

SEQ ID NO: 6082884 - DNA, 25 bp, Homo sapien
agtccctgtgttttgtttgtcactg

SEQ ID NO: 6082885 - DNA, 25 bp, Homo sapien
ctggctccatgctggtgtccagaat

SEQ ID NO: 6082886 - DNA, 25 bp, Homo sapien
cagatgacagtcataggctaacatc

SEQ ID NO: 6082887 - DNA, 25 bp, Homo sapien
acttacgggtagacagaaagattct

SEQ ID NO: 6082888 - DNA, 25 bp, Homo sapien
ccatgctggtgtccagaatgagcca

SEQ ID NO: 6082889 - DNA, 25 bp, Homo sapien
tatctgtctagagtctgcgtctctc

SEQ ID NO: 6082890 - DNA, 25 bp, Homo sapien
ccagaatgagccagttcacactcca

SEQ ID NO: 6082891 - DNA, 25 bp, Homo sapien
gctggcagcatgaaccggaatcatc

SEQ ID NO: 6082892 - DNA, 25 bp, Homo sapien
tggctggcagcatgaaccggaatca

SEQ ID NO: 6082893 - DNA, 25 bp, Homo sapien
gcatgaaccggaatcatcagagcag

SEQ ID NO: 6082894 - DNA, 25 bp, Homo sapien
ctggcagcatgaaccggaatcatca

SEQ ID NO: 6082895 - DNA, 25 bp, Homo sapien
tgaaccggaatcatcagagcaggtg

SEQ ID NO: 6082896 - DNA, 25 bp, Homo sapien
agcatgaaccggaatcatcagagca

SEQ ID NO: 6082897 - DNA, 25 bp, Homo sapien
ggctggcagcatgaaccggaatcat

SEQ ID NO: 6082898 - DNA, 25 bp, Homo sapien
atgaaccggaatcatcagagcaggt

SEQ ID NO: 6082899 - DNA, 25 bp, Homo sapien
cagcatgaaccggaatcatcagagc

SEQ ID NO: 6082900 - DNA, 25 bp, Homo sapien
gcggggcggcaaaggagagacacac

SEQ ID NO: 6082901 - DNA, 25 bp, Homo sapien
tggcagcatgaaccggaatcatcag

SEQ ID NO: 6082902 - DNA, 25 bp, Homo sapien
catgcggggcggcaaaggagagaca

SEQ ID NO: 6082903 - DNA, 25 bp, Homo sapien
ggactccggatcacatccagggctg

SEQ ID NO: 6082904 - DNA, 25 bp, Homo sapien
gggactccggatcacatccagggct

SEQ ID NO: 6082905 - DNA, 25 bp, Homo sapien
aagggactccggatcacatccaggg

SEQ ID NO: 6082906 - DNA, 25 bp, Homo sapien
agggactccggatcacatccagggc

SEQ ID NO: 6082907 - DNA, 25 bp, Homo sapien
cacacagcaggcaggccggcacaca

SEQ ID NO: 6082908 - DNA, 25 bp, Homo sapien
gcagcagttggacttgcagcacaca

SEQ ID NO: 6082909 - DNA, 25 bp, Homo sapien
ggaagctccagagcagatggacacg

SEQ ID NO: 6082910 - DNA, 25 bp, Homo sapien
acacagcaggcaggccggcacacag

SEQ ID NO: 6082911 - DNA, 25 bp, Homo sapien
aggaggcagggacacaacaggaggg

SEQ ID NO: 6082912 - DNA, 25 bp, Homo sapien
acgggcttgcagcagttggacttgc

SEQ ID NO: 6082913 - DNA, 25 bp, Homo sapien
ggacgtgcccatcagcagctggact

SEQ ID NO: 6082914 - DNA, 25 bp, Homo sapien
ttggacttgcagcacacaggcacac

SEQ ID NO: 6082915 - DNA, 25 bp, Homo sapien
tgggctcacagctcactggggcaca

SEQ ID NO: 6082916 - DNA, 25 bp, Homo sapien
ctccagagcagatggacacgcagca

SEQ ID NO: 6082917 - DNA, 25 bp, Homo sapien
agatggacacgcagcacacgggctt

SEQ ID NO: 6082918 - DNA, 25 bp, Homo sapien
catgaaggtgtgcaggagtcggtgc

SEQ ID NO: 6082919 - DNA, 25 bp, Homo sapien
aggaaggacaggcaggaggccgggt

SEQ ID NO: 6082920 - DNA, 25 bp, Homo sapien
cttcctccgtagcatcgaggagctg

SEQ ID NO: 6082921 - DNA, 25 bp, Homo sapien
tgcccttcctccgtagcatcgagga

SEQ ID NO: 6082922 - DNA, 25 bp, Homo sapien
tgaagagggcccagcggaaagcttc

SEQ ID NO: 6082923 - DNA, 25 bp, Homo sapien
aaggctaagggacttcatggcgtat

SEQ ID NO: 6082924 - DNA, 25 bp, Homo sapien
gaggaggtcctcaagactgtaagcc

SEQ ID NO: 6082925 - DNA, 25 bp, Homo sapien
cacagaggtacgcactgacacatgc

SEQ ID NO: 6082926 - DNA, 25 bp, Homo sapien
ttcgatccgccgtgcttacgcggca

SEQ ID NO: 6082927 - DNA, 25 bp, Homo sapien
tatcttcagacaggtcgggataagg

SEQ ID NO: 6082928 - DNA, 25 bp, Homo sapien
ccaagcagtacgtggcctgtggcct

SEQ ID NO: 6082929 - DNA, 25 bp, Homo sapien
aggtgccaagcagtacgtggcctgt

SEQ ID NO: 6082930 - DNA, 25 bp, Homo sapien
taagggacttcatggcgtattccat

SEQ ID NO: 6082931 - DNA, 25 bp, Homo sapien
tgggtcaccacagaggtacgcactg

SEQ ID NO: 6082932 - DNA, 25 bp, Homo sapien
acaagactcccatcgcagggacatg

SEQ ID NO: 6082933 - DNA, 25 bp, Homo sapien
tgcaccgcctcccagactcttgcag

SEQ ID NO: 6082934 - DNA, 25 bp, Homo sapien
ccatcgcagggacatgcacagcagc

SEQ ID NO: 6082935 - DNA, 25 bp, Homo sapien
gactcccatcgcagggacatgcaca

SEQ ID NO: 6082936 - DNA, 25 bp, Homo sapien
agactcccatcgcagggacatgcac

SEQ ID NO: 6082937 - DNA, 25 bp, Homo sapien
tcccatcgcagggacatgcacagca

SEQ ID NO: 6082938 - DNA, 25 bp, Homo sapien
gggagacaagactcccatcgcaggg

SEQ ID NO: 6082939 - DNA, 25 bp, Homo sapien
caagactcccatcgcagggacatgc

SEQ ID NO: 6082940 - DNA, 25 bp, Homo sapien
ggagacaagactcccatcgcaggga

SEQ ID NO: 6082941 - DNA, 25 bp, Homo sapien
gacaagactcccatcgcagggacat

SEQ ID NO: 6082942 - DNA, 25 bp, Homo sapien
actcccatcgcagggacatgcacag

SEQ ID NO: 6082943 - DNA, 25 bp, Homo sapien
agacaagactcccatcgcagggaca

SEQ ID NO: 6082944 - DNA, 25 bp, Homo sapien
agtaaattgctggttgcaccggttg

SEQ ID NO: 6082945 - DNA, 25 bp, Homo sapien
taaattgctggttgcaccggttggg

SEQ ID NO: 6082946 - DNA, 25 bp, Homo sapien
tgtgagtatttacctgaaatgtcag

SEQ ID NO: 6082947 - DNA, 25 bp, Homo sapien
tgagtatttacctgaaatgtcagaa

SEQ ID NO: 6082948 - DNA, 25 bp, Homo sapien
aaagtaaattgctggttgcaccggt

SEQ ID NO: 6082949 - DNA, 25 bp, Homo sapien
attgctggttgcaccggttgggaca

SEQ ID NO: 6082950 - DNA, 25 bp, Homo sapien
aattgctggttgcaccggttgggac

SEQ ID NO: 6082951 - DNA, 25 bp, Homo sapien
gaaagtaaattgctggttgcaccgg

SEQ ID NO: 6082952 - DNA, 25 bp, Homo sapien
gttgtgagtatttacctgaaatgtc

SEQ ID NO: 6082953 - DNA, 25 bp, Homo sapien
gcagaaagtaaattgctggttgcac

SEQ ID NO: 6082954 - DNA, 25 bp, Homo sapien
cagaaagtaaattgctggttgcacc

SEQ ID NO: 6082955 - DNA, 25 bp, Homo sapien
gggcagaaagtaaattgctggttgc

SEQ ID NO: 6082956 - DNA, 25 bp, Homo sapien
aaggctggcccacttagagcgaaac

SEQ ID NO: 6082957 - DNA, 25 bp, Homo sapien
ccagactggactactgtggcggtta

SEQ ID NO: 6082958 - DNA, 25 bp, Homo sapien
tgccatgttgaagagtgagaggtcc

SEQ ID NO: 6082959 - DNA, 25 bp, Homo sapien
tggcccacttagagcgaaacttaac

SEQ ID NO: 6082960 - DNA, 25 bp, Homo sapien
agccgcttgcattccccagactgga

SEQ ID NO: 6082961 - DNA, 25 bp, Homo sapien
tagatttgaagacggggcccaggct

SEQ ID NO: 6082962 - DNA, 25 bp, Homo sapien
gaagagtgagaggtccaagtgattc

SEQ ID NO: 6082963 - DNA, 25 bp, Homo sapien
tggcggttaggttagatttgaagac

SEQ ID NO: 6082964 - DNA, 25 bp, Homo sapien
ctgggtatgaacgggtgcagccctc

SEQ ID NO: 6082965 - DNA, 25 bp, Homo sapien
gagcgaaacttaacttttgtctgga

SEQ ID NO: 6082966 - DNA, 25 bp, Homo sapien
cttaacttttgtctggatgggaaga

SEQ ID NO: 6082967 - DNA, 25 bp, Homo sapien
taagtctaccccgaggttgccatgt

SEQ ID NO: 6082968 - DNA, 25 bp, Homo sapien
aaatgttccatcgattttggcagcc

SEQ ID NO: 6082969 - DNA, 25 bp, Homo sapien
gctcagtagttgcagggagcggcat

SEQ ID NO: 6082970 - DNA, 25 bp, Homo sapien
agatcagtcacagtgggccgttccc

SEQ ID NO: 6082971 - DNA, 25 bp, Homo sapien
tgttccatcgattttggcagcccag

SEQ ID NO: 6082972 - DNA, 25 bp, Homo sapien
catccctgcgttccaaatgtttcag

SEQ ID NO: 6082973 - DNA, 25 bp, Homo sapien
ggcctgacgtccagcaacaggtgga

SEQ ID NO: 6082974 - DNA, 25 bp, Homo sapien
cacaacatcccgaactgttaaaggg

SEQ ID NO: 6082975 - DNA, 25 bp, Homo sapien
gcagatcagtcacagtgggccgttc

SEQ ID NO: 6082976 - DNA, 25 bp, Homo sapien
ctcttcccagattgcttcttttaag

SEQ ID NO: 6082977 - DNA, 25 bp, Homo sapien
tccagcaacaggtggaatgccccag

SEQ ID NO: 6082978 - DNA, 25 bp, Homo sapien
ggcatgaggcaaacgacaaatgtcc

SEQ ID NO: 6082979 - DNA, 25 bp, Homo sapien
aatgccccagaatccagcagtcgct

SEQ ID NO: 6082980 - DNA, 25 bp, Homo sapien
cagtcctgggcccgactcctgcagc

SEQ ID NO: 6082981 - DNA, 25 bp, Homo sapien
agtcctgggcccgactcctgcagct

SEQ ID NO: 6082982 - DNA, 25 bp, Homo sapien
ccagtcctgggcccgactcctgcag

SEQ ID NO: 6082983 - DNA, 25 bp, Homo sapien
accagtcctgggcccgactcctgca

SEQ ID NO: 6082984 - DNA, 25 bp, Homo sapien
tcgaccccccgaaatcgttctcgca

SEQ ID NO: 6082985 - DNA, 25 bp, Homo sapien
ccccccgaaatcgttctcgcacagt

SEQ ID NO: 6082986 - DNA, 25 bp, Homo sapien
gaccccccgaaatcgttctcgcaca

SEQ ID NO: 6082987 - DNA, 25 bp, Homo sapien
accccccgaaatcgttctcgcacag

SEQ ID NO: 6082988 - DNA, 25 bp, Homo sapien
tcgaccccccgaaatcgttctcgca

SEQ ID NO: 6082989 - DNA, 25 bp, Homo sapien
gggttatagttggtgctcccactgt

SEQ ID NO: 6082990 - DNA, 25 bp, Homo sapien
gtagtaactactgatggagccacca

SEQ ID NO: 6082991 - DNA, 25 bp, Homo sapien
ccagagacactgcaggtgagggaca

SEQ ID NO: 6082992 - DNA, 25 bp, Homo sapien
ccccgaaatcgttctcgcacagtaa

SEQ ID NO: 6082993 - DNA, 25 bp, Homo sapien
catgtagtagtagtaatttccccct

SEQ ID NO: 6082994 - DNA, 25 bp, Homo sapien
gttatagttggtgctcccactgtaa

SEQ ID NO: 6082995 - DNA, 25 bp, Homo sapien
aattgatatacccaatccactccag

SEQ ID NO: 6082996 - DNA, 25 bp, Homo sapien
tccatgtagtagtagtaatttcccc

SEQ ID NO: 6082997 - DNA, 25 bp, Homo sapien
cagacgtccatgtagtagtagtaat

SEQ ID NO: 6082998 - DNA, 25 bp, Homo sapien
ggtccactccaaaaatcgtaatcga

SEQ ID NO: 6082999 - DNA, 25 bp, Homo sapien
cccgaaatcgttctcgcacagtaat

SEQ ID NO: 6083000 - DNA, 25 bp, Homo sapien
agtcctgggcccgactcctgcagct

SEQ ID NO: 6083001 - DNA, 25 bp, Homo sapien
accagtcctgggcccgactcctgca

SEQ ID NO: 6083002 - DNA, 25 bp, Homo sapien
cagtcctgggcccgactcctgcagc

SEQ ID NO: 6083003 - DNA, 25 bp, Homo sapien
ccagtcctgggcccgactcctgcag

SEQ ID NO: 6083004 - DNA, 25 bp, Homo sapien
aactggttcgcggacgtgtccactg

SEQ ID NO: 6083005 - DNA, 25 bp, Homo sapien
gttcgcggacgtgtccactgacatg

SEQ ID NO: 6083006 - DNA, 25 bp, Homo sapien
ccaacgacgtctcgcacaataatag

SEQ ID NO: 6083007 - DNA, 25 bp, Homo sapien
agaactggttcgcggacgtgtccac

SEQ ID NO: 6083008 - DNA, 25 bp, Homo sapien
tcgcggacgtgtccactgacatggt

SEQ ID NO: 6083009 - DNA, 25 bp, Homo sapien
tagcccaacgacgtctcgcacaata

SEQ ID NO: 6083010 - DNA, 25 bp, Homo sapien
atagcccaacgacgtctcgcacaat

SEQ ID NO: 6083011 - DNA, 25 bp, Homo sapien
actggttcgcggacgtgtccactga

SEQ ID NO: 6083012 - DNA, 25 bp, Homo sapien
aacgacgtctcgcacaataatagac

SEQ ID NO: 6083013 - DNA, 25 bp, Homo sapien
tcttccccaccatagcccaacgacg

SEQ ID NO: 6083014 - DNA, 25 bp, Homo sapien
gcccaacgacgtctcgcacaataat

SEQ ID NO: 6083015 - DNA, 25 bp, Homo sapien
tggttcgcggacgtgtccactgaca

SEQ ID NO: 6083016 - DNA, 25 bp, Homo sapien
gagggacagggtctccgaaggcttc

SEQ ID NO: 6083017 - DNA, 25 bp, Homo sapien
agggacagggtctccgaaggcttca

SEQ ID NO: 6083018 - DNA, 25 bp, Homo sapien
tgagggacagggtctccgaaggctt

SEQ ID NO: 6083019 - DNA, 25 bp, Homo sapien
gtctccccgaaccatgataatacct

SEQ ID NO: 6083020 - DNA, 25 bp, Homo sapien
catgataatacctgcctctcgcaca

SEQ ID NO: 6083021 - DNA, 25 bp, Homo sapien
accatgataatacctgcctctcgca

SEQ ID NO: 6083022 - DNA, 25 bp, Homo sapien
atgataatacctgcctctcgcacag

SEQ ID NO: 6083023 - DNA, 25 bp, Homo sapien
ggttgtctccccgaaccatgataat

SEQ ID NO: 6083024 - DNA, 25 bp, Homo sapien
tgtctccccgaaccatgataatacc

SEQ ID NO: 6083025 - DNA, 25 bp, Homo sapien
gttgtctccccgaaccatgataata

SEQ ID NO: 6083026 - DNA, 25 bp, Homo sapien
ttgtctccccgaaccatgataatac

SEQ ID NO: 6083027 - DNA, 25 bp, Homo sapien
gaaccatgataatacctgcctctcg

SEQ ID NO: 6083028 - DNA, 25 bp, Homo sapien
ccgaaccatgataatacctgcctct

SEQ ID NO: 6083029 - DNA, 25 bp, Homo sapien
aagtggttgtctccccgaaccatga

SEQ ID NO: 6083030 - DNA, 25 bp, Homo sapien
tctccccgaaccatgataatacctg

SEQ ID NO: 6083031 - DNA, 25 bp, Homo sapien
acgggaactggcaatgcgatggtca

SEQ ID NO: 6083032 - DNA, 25 bp, Homo sapien
gggaaagcgctatggttcatacccc

SEQ ID NO: 6083033 - DNA, 25 bp, Homo sapien
tactcagagtcgagttactccttgc

SEQ ID NO: 6083034 - DNA, 25 bp, Homo sapien
caatgcgatggtcaagacaccggcg

SEQ ID NO: 6083035 - DNA, 25 bp, Homo sapien
tgcatatcgccgtaacccactgttg

SEQ ID NO: 6083036 - DNA, 25 bp, Homo sapien
tggcaacttcccacgtgcatgtact

SEQ ID NO: 6083037 - DNA, 25 bp, Homo sapien
ttttcggagctcctcggctgaagag

SEQ ID NO: 6083038 - DNA, 25 bp, Homo sapien
gacaccggcgatggcacagagagat

SEQ ID NO: 6083039 - DNA, 25 bp, Homo sapien
tagaccgcgctggagaaaaggatga

SEQ ID NO: 6083040 - DNA, 25 bp, Homo sapien
tatggtcactgggtgcatatcgccg

SEQ ID NO: 6083041 - DNA, 25 bp, Homo sapien
gtctgcctcggcaaagtagaccgcg

SEQ ID NO: 6083042 - DNA, 25 bp, Homo sapien
gcatgtactgggattgctcttcccc

SEQ ID NO: 6083043 - DNA, 25 bp, Homo sapien
tcatctcgggcgtaaacaccttcaa

SEQ ID NO: 6083044 - DNA, 25 bp, Homo sapien
ttggtttgccgccaggagtgactgt

SEQ ID NO: 6083045 - DNA, 25 bp, Homo sapien
tccacatttatttattgatttttcg

SEQ ID NO: 6083046 - DNA, 25 bp, Homo sapien
tccacttaaaaatacaagagcacaa

SEQ ID NO: 6083047 - DNA, 25 bp, Homo sapien
gcccgagttacttttccccagatga

SEQ ID NO: 6083048 - DNA, 25 bp, Homo sapien
taatccacttaaaaatacaagagca

SEQ ID NO: 6083049 - DNA, 25 bp, Homo sapien
ttaatccacttaaaaatacaagagc

SEQ ID NO: 6083050 - DNA, 25 bp, Homo sapien
ccgagttacttttccccagatgact

SEQ ID NO: 6083051 - DNA, 25 bp, Homo sapien
atgccactgtttccatgggcccgag

SEQ ID NO: 6083052 - DNA, 25 bp, Homo sapien
ccacttaaaaatacaagagcacaaa

SEQ ID NO: 6083053 - DNA, 25 bp, Homo sapien
tttagaagtcccgttcccagcaggc

SEQ ID NO: 6083054 - DNA, 25 bp, Homo sapien
tggttccggagaccccgcttatagc

SEQ ID NO: 6083055 - DNA, 25 bp, Homo sapien
caagacgcttgacttgaagggaaaa

SEQ ID NO: 6083056 - DNA, 25 bp, Homo sapien
tgggccagaaaagattccatgagtc

SEQ ID NO: 6083057 - DNA, 25 bp, Homo sapien
ggatagccacacgatcattcacatc

SEQ ID NO: 6083058 - DNA, 25 bp, Homo sapien
atagcataacctagaagttattctg

SEQ ID NO: 6083059 - DNA, 25 bp, Homo sapien
cagcatctggcgagacaataatgca

SEQ ID NO: 6083060 - DNA, 25 bp, Homo sapien
gtcaattactcgtattttggagcaa

SEQ ID NO: 6083061 - DNA, 25 bp, Homo sapien
gactaccactgcttcaaagcatgca

SEQ ID NO: 6083062 - DNA, 25 bp, Homo sapien
tgccatgtcatctacaaggatagcc

SEQ ID NO: 6083063 - DNA, 25 bp, Homo sapien
tctggcgagacaataatgcagttct

SEQ ID NO: 6083064 - DNA, 25 bp, Homo sapien
gattccccattatgagttctcctta

SEQ ID NO: 6083065 - DNA, 25 bp, Homo sapien
ttgtaacacaagtgtctgccatgtc

SEQ ID NO: 6083066 - DNA, 25 bp, Homo sapien
gatagcataaactctggttgctcca

SEQ ID NO: 6083067 - DNA, 25 bp, Homo sapien
cagctgcgaggcagattgtaacaca

SEQ ID NO: 6083068 - DNA, 25 bp, Homo sapien
ttacgaagcagacgatggatccggc

SEQ ID NO: 6083069 - DNA, 25 bp, Homo sapien
tgcaaacccgctctagaagagcgag

SEQ ID NO: 6083070 - DNA, 25 bp, Homo sapien
tgtgagatactctaacactgccgcc

SEQ ID NO: 6083071 - DNA, 25 bp, Homo sapien
tgcctgaatgttaggcaggactccg

SEQ ID NO: 6083072 - DNA, 25 bp, Homo sapien
gctttgggctttatggtggtgactc

SEQ ID NO: 6083073 - DNA, 25 bp, Homo sapien
tattgagttcctcatcattgcggat

SEQ ID NO: 6083074 - DNA, 25 bp, Homo sapien
gaagagcgagacttagacttggcgc

SEQ ID NO: 6083075 - DNA, 25 bp, Homo sapien
tgggcaatggtcacgccgcccaaaa

SEQ ID NO: 6083076 - DNA, 25 bp, Homo sapien
tgttatcgcgagacgcattgcctgc

SEQ ID NO: 6083077 - DNA, 25 bp, Homo sapien
tgcctgccagctcaaggatttctgc

SEQ ID NO: 6083078 - DNA, 25 bp, Homo sapien
cactgccgccaaatacactggtgcg

SEQ ID NO: 6083079 - DNA, 25 bp, Homo sapien
gctctgcatagtttcccttacgaag

SEQ ID NO: 6083080 - DNA, 25 bp, Homo sapien
gagggatcccctcctgatgccttct

SEQ ID NO: 6083081 - DNA, 25 bp, Homo sapien
gatcactgtggtttcaaccgctcag

SEQ ID NO: 6083082 - DNA, 25 bp, Homo sapien
gactgtccgtatgtattctagccca

SEQ ID NO: 6083083 - DNA, 25 bp, Homo sapien
caaagagcactcaaatcagtcatgg

SEQ ID NO: 6083084 - DNA, 25 bp, Homo sapien
agaaaactcacgtttatgtgggagc

SEQ ID NO: 6083085 - DNA, 25 bp, Homo sapien
cacctggagctagcacagatataga

SEQ ID NO: 6083086 - DNA, 25 bp, Homo sapien
cacccattgggtatttgctcttgtc

SEQ ID NO: 6083087 - DNA, 25 bp, Homo sapien
tgataaagctctgccacccattggg

SEQ ID NO: 6083088 - DNA, 25 bp, Homo sapien
caatattagtgttctaccaggcagt

SEQ ID NO: 6083089 - DNA, 25 bp, Homo sapien
caccttcggaaggttttgcgctgga

SEQ ID NO: 6083090 - DNA, 25 bp, Homo sapien
aaccgctcagctataccttttagaa

SEQ ID NO: 6083091 - DNA, 25 bp, Homo sapien
cagttcattaaccttggcaaaggga

SEQ ID NO: 6083092 - DNA, 25 bp, Homo sapien
aaatgacaagccctagctgagacag

SEQ ID NO: 6083093 - DNA, 25 bp, Homo sapien
ttgcagaagttgacccactgggtac

SEQ ID NO: 6083094 - DNA, 25 bp, Homo sapien
ggtagtcaaacttaatccactttca

SEQ ID NO: 6083095 - DNA, 25 bp, Homo sapien
gacccactgggtacaaatcaactta

SEQ ID NO: 6083096 - DNA, 25 bp, Homo sapien
gacaagccctagctgagacagtatc

SEQ ID NO: 6083097 - DNA, 25 bp, Homo sapien
tggctaacataagggtagtcaaact

SEQ ID NO: 6083098 - DNA, 25 bp, Homo sapien
aaaccttcatttttagcctccatct

SEQ ID NO: 6083099 - DNA, 25 bp, Homo sapien
attaattaaagagacactagcattc

SEQ ID NO: 6083100 - DNA, 25 bp, Homo sapien
tattcccaagttaattcagtttcaa

SEQ ID NO: 6083101 - DNA, 25 bp, Homo sapien
aaatcaacttagagaccaaactctt

SEQ ID NO: 6083102 - DNA, 25 bp, Homo sapien
gcctccatctatttccaattaatta

SEQ ID NO: 6083103 - DNA, 25 bp, Homo sapien
actaatacaccattacggaattttg

SEQ ID NO: 6083104 - DNA, 25 bp, Homo sapien
ctcttgtagacgtccagttttgtga

SEQ ID NO: 6083105 - DNA, 25 bp, Homo sapien
gggctcttgtagacgtccagttttg

SEQ ID NO: 6083106 - DNA, 25 bp, Homo sapien
gacatgaccaatttcacgtctttaa

SEQ ID NO: 6083107 - DNA, 25 bp, Homo sapien
aaaaactatgtaggcatccgaagca

SEQ ID NO: 6083108 - DNA, 25 bp, Homo sapien
tgacatgaccaatttcacgtcttta

SEQ ID NO: 6083109 - DNA, 25 bp, Homo sapien
acatgaccaatttcacgtctttaac

SEQ ID NO: 6083110 - DNA, 25 bp, Homo sapien
gtgacatgaccaatttcacgtcttt

SEQ ID NO: 6083111 - DNA, 25 bp, Homo sapien
ggctcttgtagacgtccagttttgt

SEQ ID NO: 6083112 - DNA, 25 bp, Homo sapien
catgaccaatttcacgtctttaact

SEQ ID NO: 6083113 - DNA, 25 bp, Homo sapien
agggctcttgtagacgtccagtttt

SEQ ID NO: 6083114 - DNA, 25 bp, Homo sapien
tgaccaatttcacgtctttaacttc

SEQ ID NO: 6083115 - DNA, 25 bp, Homo sapien
atgaccaatttcacgtctttaactt

SEQ ID NO: 6083116 - DNA, 25 bp, Homo sapien
gcgcacaaacacgtagggcacattc

SEQ ID NO: 6083117 - DNA, 25 bp, Homo sapien
gagcgcacaaacacgtagggcacat

SEQ ID NO: 6083118 - DNA, 25 bp, Homo sapien
tacatgactgctgaacgaggtccag

SEQ ID NO: 6083119 - DNA, 25 bp, Homo sapien
ctgctgaacgaggtccagtagcttc

SEQ ID NO: 6083120 - DNA, 25 bp, Homo sapien
ctttccgaagctgcttatagttaca

SEQ ID NO: 6083121 - DNA, 25 bp, Homo sapien
ttggagcgcacaaacacgtagggca

SEQ ID NO: 6083122 - DNA, 25 bp, Homo sapien
ggctcctttccgaagctgcttatag

SEQ ID NO: 6083123 - DNA, 25 bp, Homo sapien
gctgaacgaggtccagtagcttctt

SEQ ID NO: 6083124 - DNA, 25 bp, Homo sapien
catgactgctgaacgaggtccagta

SEQ ID NO: 6083125 - DNA, 25 bp, Homo sapien
tgactgctgaacgaggtccagtagc

SEQ ID NO: 6083126 - DNA, 25 bp, Homo sapien
gactgctgaacgaggtccagtagct

SEQ ID NO: 6083127 - DNA, 25 bp, Homo sapien
cttggagcgcacaaacacgtagggc

SEQ ID NO: 6083128 - DNA, 25 bp, Homo sapien
tcaacaagagaaatgtagagaaaca

SEQ ID NO: 6083129 - DNA, 25 bp, Homo sapien
gttggtaggcggcacgagaccatca

SEQ ID NO: 6083130 - DNA, 25 bp, Homo sapien
tctttctttctttagattcatcaaa

SEQ ID NO: 6083131 - DNA, 25 bp, Homo sapien
acgcaaaggcaaatggcaaaaggga

SEQ ID NO: 6083132 - DNA, 25 bp, Homo sapien
tcgcccatcatgtcaacaagagaaa

SEQ ID NO: 6083133 - DNA, 25 bp, Homo sapien
aagaatgccaacaaccattccaaga

SEQ ID NO: 6083134 - DNA, 25 bp, Homo sapien
tatctttaaggtgaagatttacaat

SEQ ID NO: 6083135 - DNA, 25 bp, Homo sapien
aagacgtacggcgtcgcatcggcca

SEQ ID NO: 6083136 - DNA, 25 bp, Homo sapien
gataacaagtgcaagctgagagaaa

SEQ ID NO: 6083137 - DNA, 25 bp, Homo sapien
ccggcaagggcaaagacgtacggcg

SEQ ID NO: 6083138 - DNA, 25 bp, Homo sapien
agaaacattccaccggcaagggcaa

SEQ ID NO: 6083139 - DNA, 25 bp, Homo sapien
atggcaaaagggagaaaatgcagga

SEQ ID NO: 6083140 - DNA, 25 bp, Homo sapien
atcagagttggtaggcggcacgaga

SEQ ID NO: 6083141 - DNA, 25 bp, Homo sapien
caagtgcaagctgagagaaagttgt

SEQ ID NO: 6083142 - DNA, 25 bp, Homo sapien
ccgcattctggagaacgagcatctt

SEQ ID NO: 6083143 - DNA, 25 bp, Homo sapien
tctggagaacgagcatctttgcggt

SEQ ID NO: 6083144 - DNA, 25 bp, Homo sapien
caccaccaccttaagaaaaaggcat

SEQ ID NO: 6083145 - DNA, 25 bp, Homo sapien
tagattcatcaaattaccaccacca

SEQ ID NO: 6083146 - DNA, 25 bp, Homo sapien
tataaaatgtgtgcgaaaattcggt

SEQ ID NO: 6083147 - DNA, 25 bp, Homo sapien
tccaagataacaagtgcaagctgag

SEQ ID NO: 6083148 - DNA, 25 bp, Homo sapien
tgtgtgcgaaaattcggtgtctcaa

SEQ ID NO: 6083149 - DNA, 25 bp, Homo sapien
taataaaaatatatctttaaggtga

SEQ ID NO: 6083150 - DNA, 25 bp, Homo sapien
aacaaatggtaaaatctaatcagtg

SEQ ID NO: 6083151 - DNA, 25 bp, Homo sapien
tcaaattaccaccaccaccttaaga

SEQ ID NO: 6083152 - DNA, 25 bp, Homo sapien
aaccattccaagataacaagtgcaa

SEQ ID NO: 6083153 - DNA, 25 bp, Homo sapien
cgaaaattcggtgtctcaaatcaac

SEQ ID NO: 6083154 - DNA, 25 bp, Homo sapien
ggcaaggaagaacataattccaatt

SEQ ID NO: 6083155 - DNA, 25 bp, Homo sapien
aaaaatcccgtcaaagtatgataat

SEQ ID NO: 6083156 - DNA, 25 bp, Homo sapien
tataatcagatctttctttctttag

SEQ ID NO: 6083157 - DNA, 25 bp, Homo sapien
gtctcaaatcaacctgtcacgcaaa

SEQ ID NO: 6083158 - DNA, 25 bp, Homo sapien
cataattccaattcctagtaaaatt

SEQ ID NO: 6083159 - DNA, 25 bp, Homo sapien
cgcccagcagcctccagattactcg

SEQ ID NO: 6083160 - DNA, 25 bp, Homo sapien
agggcaaagacgtacggcgtcgcat

SEQ ID NO: 6083161 - DNA, 25 bp, Homo sapien
attccaccggcaagggcaaagacgt

SEQ ID NO: 6083162 - DNA, 25 bp, Homo sapien
accttaagaaaaaggcatatcagag

SEQ ID NO: 6083163 - DNA, 25 bp, Homo sapien
cttttccgcccagcagcctccagat

SEQ ID NO: 6083164 - DNA, 25 bp, Homo sapien
tcagatctttctttctttagattca

SEQ ID NO: 6083165 - DNA, 25 bp, Homo sapien
aatcttatcactgtacttggcaagg

SEQ ID NO: 6083166 - DNA, 25 bp, Homo sapien
aaaatatatctttaaggtgaagatt

SEQ ID NO: 6083167 - DNA, 25 bp, Homo sapien
gtacggcgtcgcatcggccatgtcg

SEQ ID NO: 6083168 - DNA, 25 bp, Homo sapien
atcactgtacttggcaaggaagaac

SEQ ID NO: 6083169 - DNA, 25 bp, Homo sapien
atcatgtcaacaagagaaatgtaga

SEQ ID NO: 6083170 - DNA, 25 bp, Homo sapien
aatctaatcagtgcaaaaaacaaat

SEQ ID NO: 6083171 - DNA, 25 bp, Homo sapien
aaagtgaatcttatcactgtacttg

SEQ ID NO: 6083172 - DNA, 25 bp, Homo sapien
tagcctacggctttccgcattgaca

SEQ ID NO: 6083173 - DNA, 25 bp, Homo sapien
cgtcgcatcggccatgtcgccaaga

SEQ ID NO: 6083174 - DNA, 25 bp, Homo sapien
gaagatttacaatataaaatgtgtg

SEQ ID NO: 6083175 - DNA, 25 bp, Homo sapien
agaaaatgcaggatataaaaaaggt

SEQ ID NO: 6083176 - DNA, 25 bp, Homo sapien
tgcaggatataaaaaaggtaaacaa

SEQ ID NO: 6083177 - DNA, 25 bp, Homo sapien
gacagctcgcccatcatgtcaacaa

SEQ ID NO: 6083178 - DNA, 25 bp, Homo sapien
aggcatatcagagttggtaggcggc

SEQ ID NO: 6083179 - DNA, 25 bp, Homo sapien
atgtagagaaacattccaccggcaa

SEQ ID NO: 6083180 - DNA, 25 bp, Homo sapien
cccgtcaaagtatgataataaaaat

SEQ ID NO: 6083181 - DNA, 25 bp, Homo sapien
gaagaacataattccaattcctagt

SEQ ID NO: 6083182 - DNA, 25 bp, Homo sapien
aatcaacctgtcacgcaaaggcaaa

SEQ ID NO: 6083183 - DNA, 25 bp, Homo sapien
gccaagaagaatgccaacaaccatt

SEQ ID NO: 6083184 - DNA, 25 bp, Homo sapien
aggcaaatggcaaaagggagaaaat

SEQ ID NO: 6083185 - DNA, 25 bp, Homo sapien
aggcggcacgagaccatcaaagtga

SEQ ID NO: 6083186 - DNA, 25 bp, Homo sapien
ttcggtgtctcaaatcaacctgtca

SEQ ID NO: 6083187 - DNA, 25 bp, Homo sapien
taagccccttttccgcccagcagcc

SEQ ID NO: 6083188 - DNA, 25 bp, Homo sapien
gaacgagcatctttgcggtaaaacc

SEQ ID NO: 6083189 - DNA, 25 bp, Homo sapien
aacaaattgtatataatcagatctt

SEQ ID NO: 6083190 - DNA, 25 bp, Homo sapien
ttactcgacagctcgcccatcatgt

SEQ ID NO: 6083191 - DNA, 25 bp, Homo sapien
ccaattcctagtaaaattcccgcat

SEQ ID NO: 6083192 - DNA, 25 bp, Homo sapien
atcagtgcaaaaaacaaattgtata

SEQ ID NO: 6083193 - DNA, 25 bp, Homo sapien
agaaaaaggcatatcagagttggta

SEQ ID NO: 6083194 - DNA, 25 bp, Homo sapien
gtacttggcaaggaagaacataatt

SEQ ID NO: 6083195 - DNA, 25 bp, Homo sapien
cacgagaccatcaaagtgaatctta

SEQ ID NO: 6083196 - DNA, 25 bp, Homo sapien
cctgtcacgcaaaggcaaatggcaa

SEQ ID NO: 6083197 - DNA, 25 bp, Homo sapien
gccaacaaccattccaagataacaa

SEQ ID NO: 6083198 - DNA, 25 bp, Homo sapien
caagctgagagaaagttgtagccta

SEQ ID NO: 6083199 - DNA, 25 bp, Homo sapien
accatcaaagtgaatcttatcactg

SEQ ID NO: 6083200 - DNA, 25 bp, Homo sapien
aaagggagaaaatgcaggatataaa

SEQ ID NO: 6083201 - DNA, 25 bp, Homo sapien
ttacaatataaaatgtgtgcgaaaa

SEQ ID NO: 6083202 - DNA, 25 bp, Homo sapien
aaattcccgcattctggagaacgag

SEQ ID NO: 6083203 - DNA, 25 bp, Homo sapien
taaggtgaagatttacaatataaaa

SEQ ID NO: 6083204 - DNA, 25 bp, Homo sapien
tggtaaaatctaatcagtgcaaaaa

SEQ ID NO: 6083205 - DNA, 25 bp, Homo sapien
cctagtaaaattcccgcattctgga

SEQ ID NO: 6083206 - DNA, 25 bp, Homo sapien
tccagattactcgacagctcgccca

SEQ ID NO: 6083207 - DNA, 25 bp, Homo sapien
catcggccatgtcgccaagaagaat

SEQ ID NO: 6083208 - DNA, 25 bp, Homo sapien
aagttgtagcctacggctttccgca

SEQ ID NO: 6083209 - DNA, 25 bp, Homo sapien
agagaaatgtagagaaacattccac

SEQ ID NO: 6083210 - DNA, 25 bp, Homo sapien
gcatctttgcggtaaaacctaagcc

SEQ ID NO: 6083211 - DNA, 25 bp, Homo sapien
catgtcgccaagaagaatgccaaca

SEQ ID NO: 6083212 - DNA, 25 bp, Homo sapien
taggcaaaaatcccgtcaaagtatg

SEQ ID NO: 6083213 - DNA, 25 bp, Homo sapien
ttgtatataatcagatctttctttc

SEQ ID NO: 6083214 - DNA, 25 bp, Homo sapien
gagagaaagttgtagcctacggctt

SEQ ID NO: 6083215 - DNA, 25 bp, Homo sapien
gcaaaaaacaaattgtatataatca

SEQ ID NO: 6083216 - DNA, 25 bp, Homo sapien
gcagcctccagattactcgacagct

SEQ ID NO: 6083217 - DNA, 25 bp, Homo sapien
tttctttagattcatcaaattacca

SEQ ID NO: 6083218 - DNA, 25 bp, Homo sapien
tcattttggcgaattactggaagat

SEQ ID NO: 6083219 - DNA, 25 bp, Homo sapien
cgtcattttggcgaattactggaag

SEQ ID NO: 6083220 - DNA, 25 bp, Homo sapien
gttcgtcattttggcgaattactgg

SEQ ID NO: 6083221 - DNA, 25 bp, Homo sapien
tcgtcattttggcgaattactggaa

SEQ ID NO: 6083222 - DNA, 25 bp, Homo sapien
tttttttaacacctattatgccatg

SEQ ID NO: 6083223 - DNA, 25 bp, Homo sapien
tgtgttcgtcattttggcgaattac

SEQ ID NO: 6083224 - DNA, 25 bp, Homo sapien
tttttaacacctattatgccatgaa

SEQ ID NO: 6083225 - DNA, 25 bp, Homo sapien
gtgttcgtcattttggcgaattact

SEQ ID NO: 6083226 - DNA, 25 bp, Homo sapien
ttttaacacctattatgccatgaat

SEQ ID NO: 6083227 - DNA, 25 bp, Homo sapien
attttggcgaattactggaagatgg

SEQ ID NO: 6083228 - DNA, 25 bp, Homo sapien
tgttcgtcattttggcgaattactg

SEQ ID NO: 6083229 - DNA, 25 bp, Homo sapien
ttttttaacacctattatgccatga

SEQ ID NO: 6083230 - DNA, 25 bp, Homo sapien
tgtctgtggatctgaaagccttgtt

SEQ ID NO: 6083231 - DNA, 25 bp, Homo sapien
tgaaagccttgttcggtggcgactg

SEQ ID NO: 6083232 - DNA, 25 bp, Homo sapien
catggccgagttttgaagctccttg

SEQ ID NO: 6083233 - DNA, 25 bp, Homo sapien
tgaagctccttgtccaaactgtgga

SEQ ID NO: 6083234 - DNA, 25 bp, Homo sapien
gaagtggttccaaggagttgcctcc

SEQ ID NO: 6083235 - DNA, 25 bp, Homo sapien
gctgcctagcttccagaggcgggac

SEQ ID NO: 6083236 - DNA, 25 bp, Homo sapien
agaggcgggactcttgctgcattcc

SEQ ID NO: 6083237 - DNA, 25 bp, Homo sapien
tccaccacggtgatctctggccggg

SEQ ID NO: 6083238 - DNA, 25 bp, Homo sapien
cgggactcttgctgcattcccagaa

SEQ ID NO: 6083239 - DNA, 25 bp, Homo sapien
actggagggcaacaatgcctgggac

SEQ ID NO: 6083240 - DNA, 25 bp, Homo sapien
acggtgatctctggccgggtaagca

SEQ ID NO: 6083241 - DNA, 25 bp, Homo sapien
ttggccatggccgagttttgaagct

SEQ ID NO: 6083242 - DNA, 25 bp, Homo sapien
tgaagctccttgtccaaactgtgga

SEQ ID NO: 6083243 - DNA, 25 bp, Homo sapien
ttggccatggccgagttttgaagct

SEQ ID NO: 6083244 - DNA, 25 bp, Homo sapien
gaagtggttccaaggagttgcctcc

SEQ ID NO: 6083245 - DNA, 25 bp, Homo sapien
tgtctgtggatctgaaagccttgtt

SEQ ID NO: 6083246 - DNA, 25 bp, Homo sapien
gctgcctagcttccagaggcgggac

SEQ ID NO: 6083247 - DNA, 25 bp, Homo sapien
agaggcgggactcttgctgcattcc

SEQ ID NO: 6083248 - DNA, 25 bp, Homo sapien
tccaccacggtgatctctggccggg

SEQ ID NO: 6083249 - DNA, 25 bp, Homo sapien
cgggactcttgctgcattcccagaa

SEQ ID NO: 6083250 - DNA, 25 bp, Homo sapien
tgaaagccttgttcggtggcgactg

SEQ ID NO: 6083251 - DNA, 25 bp, Homo sapien
catggccgagttttgaagctccttg

SEQ ID NO: 6083252 - DNA, 25 bp, Homo sapien
acggtgatctctggccgggtaagca

SEQ ID NO: 6083253 - DNA, 25 bp, Homo sapien
actggagggcaacaatgcctgggac

SEQ ID NO: 6083254 - DNA, 25 bp, Homo sapien
gggtgaaggaagatgcctcagtctt

SEQ ID NO: 6083255 - DNA, 25 bp, Homo sapien
tgggtgaaggaagatgcctcagtct

SEQ ID NO: 6083256 - DNA, 25 bp, Homo sapien
cgacagaaatgggtgaaggaagatg

SEQ ID NO: 6083257 - DNA, 25 bp, Homo sapien
aaatgggtgaaggaagatgcctcag

SEQ ID NO: 6083258 - DNA, 25 bp, Homo sapien
aatgggtgaaggaagatgcctcagt

SEQ ID NO: 6083259 - DNA, 25 bp, Homo sapien
actgggcgacagaaatgggtgaagg

SEQ ID NO: 6083260 - DNA, 25 bp, Homo sapien
tgggcgacagaaatgggtgaaggaa

SEQ ID NO: 6083261 - DNA, 25 bp, Homo sapien
ggcgacagaaatgggtgaaggaaga

SEQ ID NO: 6083262 - DNA, 25 bp, Homo sapien
atgggtgaaggaagatgcctcagtc

SEQ ID NO: 6083263 - DNA, 25 bp, Homo sapien
caggcactgggcgacagaaatgggt

SEQ ID NO: 6083264 - DNA, 25 bp, Homo sapien
gcactgggcgacagaaatgggtgaa

SEQ ID NO: 6083265 - DNA, 25 bp, Homo sapien
ggcactgggcgacagaaatgggtga

SEQ ID NO: 6083266 - DNA, 25 bp, Homo sapien
gccaaaagcggctgcccaggtcgtt

SEQ ID NO: 6083267 - DNA, 25 bp, Homo sapien
cacagttaaacagtgcattacagga

SEQ ID NO: 6083268 - DNA, 25 bp, Homo sapien
cacggagcacgagcgcttactgaag

SEQ ID NO: 6083269 - DNA, 25 bp, Homo sapien
caggtcgttccacgcgtacagcacg

SEQ ID NO: 6083270 - DNA, 25 bp, Homo sapien
gttcattgaaaaccctcgctagagg

SEQ ID NO: 6083271 - DNA, 25 bp, Homo sapien
gaaagctaggtctctgtagcccaga

SEQ ID NO: 6083272 - DNA, 25 bp, Homo sapien
gccctcggagaactctagccctttg

SEQ ID NO: 6083273 - DNA, 25 bp, Homo sapien
ggcagaatgtctgcgaccacagcca

SEQ ID NO: 6083274 - DNA, 25 bp, Homo sapien
agcacttgcactcggaaatgatggg

SEQ ID NO: 6083275 - DNA, 25 bp, Homo sapien
caccgtgaggtgcacggacttggac

SEQ ID NO: 6083276 - DNA, 25 bp, Homo sapien
aaactgggaccgtatatacacacac

SEQ ID NO: 6083277 - DNA, 25 bp, Homo sapien
ggacttggacggcttgcacaccatg

SEQ ID NO: 6083278 - DNA, 25 bp, Homo sapien
aatactagtatcacccgcacagtaa

SEQ ID NO: 6083279 - DNA, 25 bp, Homo sapien
tgtgcgtagtttggtataccaagga

SEQ ID NO: 6083280 - DNA, 25 bp, Homo sapien
cataaatactagtatcacccgcaca

SEQ ID NO: 6083281 - DNA, 25 bp, Homo sapien
taaatactagtatcacccgcacagt

SEQ ID NO: 6083282 - DNA, 25 bp, Homo sapien
tctgtgcgtagtttggtataccaag

SEQ ID NO: 6083283 - DNA, 25 bp, Homo sapien
ataccaaggatagggatgatccttc

SEQ ID NO: 6083284 - DNA, 25 bp, Homo sapien
tggtataccaaggatagggatgatc

SEQ ID NO: 6083285 - DNA, 25 bp, Homo sapien
gtataccaaggatagggatgatcct

SEQ ID NO: 6083286 - DNA, 25 bp, Homo sapien
tttggtataccaaggatagggatga

SEQ ID NO: 6083287 - DNA, 25 bp, Homo sapien
tagtttggtataccaaggataggga

SEQ ID NO: 6083288 - DNA, 25 bp, Homo sapien
ccagtagtcaccataaatactagta

SEQ ID NO: 6083289 - DNA, 25 bp, Homo sapien
tcaccataaatactagtatcacccg

SEQ ID NO: 6083290 - DNA, 25 bp, Homo sapien
aaccccgcctctgggctgctccccg

SEQ ID NO: 6083291 - DNA, 25 bp, Homo sapien
cgcctctgggctgctccccggaccc

SEQ ID NO: 6083292 - DNA, 25 bp, Homo sapien
cgggtccagggccagctcgggtgcc

SEQ ID NO: 6083293 - DNA, 25 bp, Homo sapien
tgggctgctccccggacccgtccat

SEQ ID NO: 6083294 - DNA, 25 bp, Homo sapien
ccagggccagctcgggtgcctcccc

SEQ ID NO: 6083295 - DNA, 25 bp, Homo sapien
ccccattcgccctgctcgatcctgg

SEQ ID NO: 6083296 - DNA, 25 bp, Homo sapien
ttcgccctgctcgatcctggatgaa

SEQ ID NO: 6083297 - DNA, 25 bp, Homo sapien
gatcctggatgaaaccccgcctctg

SEQ ID NO: 6083298 - DNA, 25 bp, Homo sapien
ctgctcgatcctggatgaaaccccg

SEQ ID NO: 6083299 - DNA, 25 bp, Homo sapien
ctccccccccattcgccctgctcga

SEQ ID NO: 6083300 - DNA, 25 bp, Homo sapien
gtgcctccccccccattcgccctgc

SEQ ID NO: 6083301 - DNA, 25 bp, Homo sapien
ggatgaaaccccgcctctgggctgc

SEQ ID NO: 6083302 - DNA, 25 bp, Homo sapien
cagctcgggtgcctccccccccatt

SEQ ID NO: 6083303 - DNA, 25 bp, Homo sapien
ctggggtcgggagtgcgtatgcaaa

SEQ ID NO: 6083304 - DNA, 25 bp, Homo sapien
tcgggagtgcgtatgcaaatgacgt

SEQ ID NO: 6083305 - DNA, 25 bp, Homo sapien
ccagacgccgccgtcgggaggcaga

SEQ ID NO: 6083306 - DNA, 25 bp, Homo sapien
gggcgtggttggcagatctcccagg

SEQ ID NO: 6083307 - DNA, 25 bp, Homo sapien
gagacgcgggcggagggccgcaccc

SEQ ID NO: 6083308 - DNA, 25 bp, Homo sapien
ggtcgggagtgcgtatgcaaatgac

SEQ ID NO: 6083309 - DNA, 25 bp, Homo sapien
tgacgtgggcgtggttggcagatct

SEQ ID NO: 6083310 - DNA, 25 bp, Homo sapien
cgggggcaccgagacgcgggcggag

SEQ ID NO: 6083311 - DNA, 25 bp, Homo sapien
aatgacgtgggcgtggttggcagat

SEQ ID NO: 6083312 - DNA, 25 bp, Homo sapien
tgcaaatgacgtgggcgtggttggc

SEQ ID NO: 6083313 - DNA, 25 bp, Homo sapien
acgtgggcgtggttggcagatctcc

SEQ ID NO: 6083314 - DNA, 25 bp, Homo sapien
cgtatgcaaatgacgtgggcgtggt

SEQ ID NO: 6083315 - DNA, 25 bp, Homo sapien
tggtgatggtgatgtgttgagactg

SEQ ID NO: 6083316 - DNA, 25 bp, Homo sapien
taagggtgtgcgtggtgggagctac

SEQ ID NO: 6083317 - DNA, 25 bp, Homo sapien
attgctgttggctaagaggcggcca

SEQ ID NO: 6083318 - DNA, 25 bp, Homo sapien
ggcccagagtttccgtgatgctgct

SEQ ID NO: 6083319 - DNA, 25 bp, Homo sapien
tgctgttggctaagaggcggccata

SEQ ID NO: 6083320 - DNA, 25 bp, Homo sapien
cattgctgttggctaagaggcggcc

SEQ ID NO: 6083321 - DNA, 25 bp, Homo sapien
gggagacatggcgtaagggtgtgcg

SEQ ID NO: 6083322 - DNA, 25 bp, Homo sapien
gatggtgatgtgttgagactggtgg

SEQ ID NO: 6083323 - DNA, 25 bp, Homo sapien
gacatggcgtaagggtgtgcgtggt

SEQ ID NO: 6083324 - DNA, 25 bp, Homo sapien
gagggggcccagagtttccgtgatg

SEQ ID NO: 6083325 - DNA, 25 bp, Homo sapien
ttgctgttggctaagaggcggccat

SEQ ID NO: 6083326 - DNA, 25 bp, Homo sapien
gggcccagagtttccgtgatgctgc

SEQ ID NO: 6083327 - DNA, 25 bp, Homo sapien
gcagcttggacttaaccaggctgaa

SEQ ID NO: 6083328 - DNA, 25 bp, Homo sapien
tggacttaaccaggctgaacttgct

SEQ ID NO: 6083329 - DNA, 25 bp, Homo sapien
ttaaccaggctgaacttgctaagcc

SEQ ID NO: 6083330 - DNA, 25 bp, Homo sapien
gcttggacttaaccaggctgaactt

SEQ ID NO: 6083331 - DNA, 25 bp, Homo sapien
ggcagcttggacttaaccaggctga

SEQ ID NO: 6083332 - DNA, 25 bp, Homo sapien
gacttaaccaggctgaacttgctaa

SEQ ID NO: 6083333 - DNA, 25 bp, Homo sapien
cttaaccaggctgaacttgctaagc

SEQ ID NO: 6083334 - DNA, 25 bp, Homo sapien
cttggacttaaccaggctgaacttg

SEQ ID NO: 6083335 - DNA, 25 bp, Homo sapien
tggcagcttggacttaaccaggctg

SEQ ID NO: 6083336 - DNA, 25 bp, Homo sapien
cagcttggacttaaccaggctgaac

SEQ ID NO: 6083337 - DNA, 25 bp, Homo sapien
agcttggacttaaccaggctgaact

SEQ ID NO: 6083338 - DNA, 25 bp, Homo sapien
ttggacttaaccaggctgaacttgc

SEQ ID NO: 6083339 - DNA, 25 bp, Homo sapien
cactggcagtgacatgtggtctcgg

SEQ ID NO: 6083340 - DNA, 25 bp, Homo sapien
agccacaagtgcagccggtgacggc

SEQ ID NO: 6083341 - DNA, 25 bp, Homo sapien
gagccacaggcggagccacaagtgc

SEQ ID NO: 6083342 - DNA, 25 bp, Homo sapien
gggtcttgctagacaccaacagccc

SEQ ID NO: 6083343 - DNA, 25 bp, Homo sapien
cacagggtcttgctagacaccaaca

SEQ ID NO: 6083344 - DNA, 25 bp, Homo sapien
tagggagccggcgacctcctggatc

SEQ ID NO: 6083345 - DNA, 25 bp, Homo sapien
gccacaggcggagccacaagtgcag

SEQ ID NO: 6083346 - DNA, 25 bp, Homo sapien
agtccatgcccgcgcactggcagtg

SEQ ID NO: 6083347 - DNA, 25 bp, Homo sapien
ggtctcggcgcgcacatcccacgag

SEQ ID NO: 6083348 - DNA, 25 bp, Homo sapien
actggcagtgacatgtggtctcggc

SEQ ID NO: 6083349 - DNA, 25 bp, Homo sapien
cagggtcttgctagacaccaacagc

SEQ ID NO: 6083350 - DNA, 25 bp, Homo sapien
gggagccggcgacctcctggatcct

SEQ ID NO: 6083351 - DNA, 25 bp, Homo sapien
tggcaggaggagaaaggcacttcct

SEQ ID NO: 6083352 - DNA, 25 bp, Homo sapien
tacaagtagtggaataactccagcc

SEQ ID NO: 6083353 - DNA, 25 bp, Homo sapien
cacttccttaacttggtggcagcaa

SEQ ID NO: 6083354 - DNA, 25 bp, Homo sapien
gagtagctgggaacacagatgtgta

SEQ ID NO: 6083355 - DNA, 25 bp, Homo sapien
taactccagccacaagtatgcctgt

SEQ ID NO: 6083356 - DNA, 25 bp, Homo sapien
ggaagtagcaaaggcagaaactccg

SEQ ID NO: 6083357 - DNA, 25 bp, Homo sapien
ctagttccacgtggctggagcggcc

SEQ ID NO: 6083358 - DNA, 25 bp, Homo sapien
tatgttgatctcaaacgctgggctc

SEQ ID NO: 6083359 - DNA, 25 bp, Homo sapien
tttccacatgttgaggtaagccaca

SEQ ID NO: 6083360 - DNA, 25 bp, Homo sapien
gaaactccggataaaccaatcagat

SEQ ID NO: 6083361 - DNA, 25 bp, Homo sapien
cagggtttcaatctgtcacccaggc

SEQ ID NO: 6083362 - DNA, 25 bp, Homo sapien
gtgtaccaccacatgcagcaaattt

SEQ ID NO: 6083363 - DNA, 25 bp, Homo sapien
gaacaccgagattttattttgcagt

SEQ ID NO: 6083364 - DNA, 25 bp, Homo sapien
tgcctctgccttgacccgaaggtct

SEQ ID NO: 6083365 - DNA, 25 bp, Homo sapien
ggtcaggtcagccattcagtgcaga

SEQ ID NO: 6083366 - DNA, 25 bp, Homo sapien
gactcacaccagttagtttcctgcc

SEQ ID NO: 6083367 - DNA, 25 bp, Homo sapien
gaatggacatcaggtcaggtcagcc

SEQ ID NO: 6083368 - DNA, 25 bp, Homo sapien
ggcatttgactcacaccagttagtt

SEQ ID NO: 6083369 - DNA, 25 bp, Homo sapien
cagagtcctagagtgactgagattg

SEQ ID NO: 6083370 - DNA, 25 bp, Homo sapien
gaatagcaccattgtgtaggacaca

SEQ ID NO: 6083371 - DNA, 25 bp, Homo sapien
cagaggtgtttgacacagaatagca

SEQ ID NO: 6083372 - DNA, 25 bp, Homo sapien
tagagtgactgagattggaaagtac

SEQ ID NO: 6083373 - DNA, 25 bp, Homo sapien
agaaaagtccgaactgtgagagggt

SEQ ID NO: 6083374 - DNA, 25 bp, Homo sapien
gacccgaaggtcttacaggaagaca

SEQ ID NO: 6083375 - DNA, 25 bp, Homo sapien
aagtacttggattcaacaacagcac

SEQ ID NO: 6083376 - DNA, 25 bp, Homo sapien
caaaacattgtgctctgataaggcc

SEQ ID NO: 6083377 - DNA, 25 bp, Homo sapien
gactgcattactcaaccccaaggaa

SEQ ID NO: 6083378 - DNA, 25 bp, Homo sapien
tcaggcaggcgtaaggcttttcacc

SEQ ID NO: 6083379 - DNA, 25 bp, Homo sapien
tgagtgcttatacaggtggctggac

SEQ ID NO: 6083380 - DNA, 25 bp, Homo sapien
tttgcaggcatacttgcgagctccc

SEQ ID NO: 6083381 - DNA, 25 bp, Homo sapien
gcctcagcgttgtcttgtaaggaca

SEQ ID NO: 6083382 - DNA, 25 bp, Homo sapien
caaggaagcacctggtttcagggat

SEQ ID NO: 6083383 - DNA, 25 bp, Homo sapien
gcagatgccctggtcaactgtggag

SEQ ID NO: 6083384 - DNA, 25 bp, Homo sapien
gaacacggatgtgcttcttgcaatc

SEQ ID NO: 6083385 - DNA, 25 bp, Homo sapien
gtggctggactgactaaacctcttg

SEQ ID NO: 6083386 - DNA, 25 bp, Homo sapien
tcttgccacacttcaggcaggcgta

SEQ ID NO: 6083387 - DNA, 25 bp, Homo sapien
gccagcgcaggcaggtagtctttga

SEQ ID NO: 6083388 - DNA, 25 bp, Homo sapien
gaatggagtcctttacaaactgccg

SEQ ID NO: 6083389 - DNA, 25 bp, Homo sapien
tacaaactgccgacttggctcaaca

SEQ ID NO: 6083390 - DNA, 25 bp, Homo sapien
gcatcttttaaccagccgaatggag

SEQ ID NO: 6083391 - DNA, 25 bp, Homo sapien
tagtgcatcttttaaccagccgaat

SEQ ID NO: 6083392 - DNA, 25 bp, Homo sapien
gtttagtgcatcttttaaccagccg

SEQ ID NO: 6083393 - DNA, 25 bp, Homo sapien
aactgccgacttggctcaacaaact

SEQ ID NO: 6083394 - DNA, 25 bp, Homo sapien
caacaaactgcattacctgatccat

SEQ ID NO: 6083395 - DNA, 25 bp, Homo sapien
taaccagccgaatggagtcctttac

SEQ ID NO: 6083396 - DNA, 25 bp, Homo sapien
tttctatcaggtttagtgcatcttt

SEQ ID NO: 6083397 - DNA, 25 bp, Homo sapien
tcctttacaaactgccgacttggct

SEQ ID NO: 6083398 - DNA, 25 bp, Homo sapien
tatagcaaatcctattgctgttgcc

SEQ ID NO: 6083399 - DNA, 25 bp, Homo sapien
gaagccaatgaatcccattatagca

SEQ ID NO: 6083400 - DNA, 25 bp, Homo sapien
cctaaaataagacatcggtgaagct

SEQ ID NO: 6083401 - DNA, 25 bp, Homo sapien
cggtgaagcttttcgcatgagttga

SEQ ID NO: 6083402 - DNA, 25 bp, Homo sapien
gacatcggtgaagcttttcgcatga

SEQ ID NO: 6083403 - DNA, 25 bp, Homo sapien
gaagcttttcgcatgagttgactct

SEQ ID NO: 6083404 - DNA, 25 bp, Homo sapien
taagacatcggtgaagcttttcgca

SEQ ID NO: 6083405 - DNA, 25 bp, Homo sapien
tcggtgagtcgtactctttttgctg

SEQ ID NO: 6083406 - DNA, 25 bp, Homo sapien
aataagacatcggtgaagcttttcg

SEQ ID NO: 6083407 - DNA, 25 bp, Homo sapien
tgagccttcggtgagtcgtactctt

SEQ ID NO: 6083408 - DNA, 25 bp, Homo sapien
tgaagcttttcgcatgagttgactc

SEQ ID NO: 6083409 - DNA, 25 bp, Homo sapien
catcggtgaagcttttcgcatgagt

SEQ ID NO: 6083410 - DNA, 25 bp, Homo sapien
tcctaaaataagacatcggtgaagc

SEQ ID NO: 6083411 - DNA, 25 bp, Homo sapien
gcttttcgcatgagttgactcttcc

SEQ ID NO: 6083412 - DNA, 25 bp, Homo sapien
cagtcttggcagtcataagggccac

SEQ ID NO: 6083413 - DNA, 25 bp, Homo sapien
tctgagctcaaaggcctgacccttg

SEQ ID NO: 6083414 - DNA, 25 bp, Homo sapien
cagcagtcttggcagtcataagggc

SEQ ID NO: 6083415 - DNA, 25 bp, Homo sapien
tcttggcagtcataagggccaccca

SEQ ID NO: 6083416 - DNA, 25 bp, Homo sapien
ataagggccacccagacgtcacggc

SEQ ID NO: 6083417 - DNA, 25 bp, Homo sapien
tggcaggccggtctcccacacggag

SEQ ID NO: 6083418 - DNA, 25 bp, Homo sapien
agtcataagggccacccagacgtca

SEQ ID NO: 6083419 - DNA, 25 bp, Homo sapien
tggcagtcataagggccacccagac

SEQ ID NO: 6083420 - DNA, 25 bp, Homo sapien
attttctgagctcaaaggcctgacc

SEQ ID NO: 6083421 - DNA, 25 bp, Homo sapien
gggaccaccacgcacactccagtgg

SEQ ID NO: 6083422 - DNA, 25 bp, Homo sapien
gccacagcagtcttggcagtcataa

SEQ ID NO: 6083423 - DNA, 25 bp, Homo sapien
tgcgccctctcccaacaggagggat

SEQ ID NO: 6083424 - DNA, 25 bp, Homo sapien
ccagttattatagtgttgacagtaa

SEQ ID NO: 6083425 - DNA, 25 bp, Homo sapien
ctggaagctgcgtcatcactatttc

SEQ ID NO: 6083426 - DNA, 25 bp, Homo sapien
gaacgtccacggaggccagttatta

SEQ ID NO: 6083427 - DNA, 25 bp, Homo sapien
gtggctggaagctgcgtcatcacta

SEQ ID NO: 6083428 - DNA, 25 bp, Homo sapien
cattggccctggtggatgcaccgta

SEQ ID NO: 6083429 - DNA, 25 bp, Homo sapien
tggctggaagctgcgtcatcactat

SEQ ID NO: 6083430 - DNA, 25 bp, Homo sapien
cgtcagactgcaggccgctgatggt

SEQ ID NO: 6083431 - DNA, 25 bp, Homo sapien
tgcaaaatcgtcagactgcaggccg

SEQ ID NO: 6083432 - DNA, 25 bp, Homo sapien
ctggctgggataccattggccctgg

SEQ ID NO: 6083433 - DNA, 25 bp, Homo sapien
gacagggtggctggaagctgcgtca

SEQ ID NO: 6083434 - DNA, 25 bp, Homo sapien
gctggaagctgcgtcatcactattt

SEQ ID NO: 6083435 - DNA, 25 bp, Homo sapien
ggtggctggaagctgcgtcatcact

SEQ ID NO: 6083436 - DNA, 25 bp, Homo sapien
ccagggtggctgacgtgccagactt

SEQ ID NO: 6083437 - DNA, 25 bp, Homo sapien
ccctgagggtcgcttattattgtca

SEQ ID NO: 6083438 - DNA, 25 bp, Homo sapien
tgttccgcagtaataatcggcctcg

SEQ ID NO: 6083439 - DNA, 25 bp, Homo sapien
tcccatgttccgcagtaataatcgg

SEQ ID NO: 6083440 - DNA, 25 bp, Homo sapien
cccagggtggctgacgtgccagact

SEQ ID NO: 6083441 - DNA, 25 bp, Homo sapien
agggcggctgcgtcaacacagactg

SEQ ID NO: 6083442 - DNA, 25 bp, Homo sapien
ccatgttccgcagtaataatcggcc

SEQ ID NO: 6083443 - DNA, 25 bp, Homo sapien
tgctatcccatgttccgcagtaata

SEQ ID NO: 6083444 - DNA, 25 bp, Homo sapien
gagggtcgcttattattgtcataaa

SEQ ID NO: 6083445 - DNA, 25 bp, Homo sapien
aatcggcctcgtccccagtctggag

SEQ ID NO: 6083446 - DNA, 25 bp, Homo sapien
tccgcagtaataatcggcctcgtcc

SEQ ID NO: 6083447 - DNA, 25 bp, Homo sapien
gtaataatcggcctcgtccccagtc

SEQ ID NO: 6083448 - DNA, 25 bp, Homo sapien
tatagtcgtagtaatctcctctcgc

SEQ ID NO: 6083449 - DNA, 25 bp, Homo sapien
caatacacattaaaaacgaatcccg

SEQ ID NO: 6083450 - DNA, 25 bp, Homo sapien
cattaaaaacgaatcccgaggctgc

SEQ ID NO: 6083451 - DNA, 25 bp, Homo sapien
gacccaactcatccaatacacatta

SEQ ID NO: 6083452 - DNA, 25 bp, Homo sapien
tcaatgtaattaccactatagtcgt

SEQ ID NO: 6083453 - DNA, 25 bp, Homo sapien
gacttccatcttgatttatattggc

SEQ ID NO: 6083454 - DNA, 25 bp, Homo sapien
aatgtaattaccactatagtcgtag

SEQ ID NO: 6083455 - DNA, 25 bp, Homo sapien
cacattaaaaacgaatcccgaggct

SEQ ID NO: 6083456 - DNA, 25 bp, Homo sapien
ttaaaaacgaatcccgaggctgcac

SEQ ID NO: 6083457 - DNA, 25 bp, Homo sapien
taccactatagtcgtagtaatctcc

SEQ ID NO: 6083458 - DNA, 25 bp, Homo sapien
tcgtagtaatctcctctcgcacagt

SEQ ID NO: 6083459 - DNA, 25 bp, Homo sapien
aaagcatcaatgtaattaccactat

SEQ ID NO: 6083460 - DNA, 25 bp, Homo sapien
agtcagaagatcgtccctctctcgc

SEQ ID NO: 6083461 - DNA, 25 bp, Homo sapien
tactgtagtcagaagatcgtccctc

SEQ ID NO: 6083462 - DNA, 25 bp, Homo sapien
agaagatcgtccctctctcgcacag

SEQ ID NO: 6083463 - DNA, 25 bp, Homo sapien
gtagtcagaagatcgtccctctctc

SEQ ID NO: 6083464 - DNA, 25 bp, Homo sapien
gtcagaagatcgtccctctctcgca

SEQ ID NO: 6083465 - DNA, 25 bp, Homo sapien
actgtagtcagaagatcgtccctct

SEQ ID NO: 6083466 - DNA, 25 bp, Homo sapien
ctgtagtcagaagatcgtccctctc

SEQ ID NO: 6083467 - DNA, 25 bp, Homo sapien
tgtagtcagaagatcgtccctctct

SEQ ID NO: 6083468 - DNA, 25 bp, Homo sapien
tagtcagaagatcgtccctctctcg

SEQ ID NO: 6083469 - DNA, 25 bp, Homo sapien
ttactgtagtcagaagatcgtccct

SEQ ID NO: 6083470 - DNA, 25 bp, Homo sapien
tgaaagttctgtgcgtaacttgctc

SEQ ID NO: 6083471 - DNA, 25 bp, Homo sapien
tctgtgcgtaacttgctctaccaaa

SEQ ID NO: 6083472 - DNA, 25 bp, Homo sapien
gaaaggattaatccctcccatccac

SEQ ID NO: 6083473 - DNA, 25 bp, Homo sapien
aagttctgtgcgtaacttgctctac

SEQ ID NO: 6083474 - DNA, 25 bp, Homo sapien
ctgccctgaaagttctgtgcgtaac

SEQ ID NO: 6083475 - DNA, 25 bp, Homo sapien
caaagaaaggattaatccctcccat

SEQ ID NO: 6083476 - DNA, 25 bp, Homo sapien
tgtgcgtaacttgctctaccaaaga

SEQ ID NO: 6083477 - DNA, 25 bp, Homo sapien
tgccctgaaagttctgtgcgtaact

SEQ ID NO: 6083478 - DNA, 25 bp, Homo sapien
tgcgtaacttgctctaccaaagaaa

SEQ ID NO: 6083479 - DNA, 25 bp, Homo sapien
gttctgtgcgtaacttgctctacca

SEQ ID NO: 6083480 - DNA, 25 bp, Homo sapien
cctgaaagttctgtgcgtaacttgc

SEQ ID NO: 6083481 - DNA, 25 bp, Homo sapien
cgttgtgctcgtagattcgtccgcg

SEQ ID NO: 6083482 - DNA, 25 bp, Homo sapien
agtcagaagatcgtccctctctcgc

SEQ ID NO: 6083483 - DNA, 25 bp, Homo sapien
tactgtagtcagaagatcgtccctc

SEQ ID NO: 6083484 - DNA, 25 bp, Homo sapien
ttactgtagtcagaagatcgtccct

SEQ ID NO: 6083485 - DNA, 25 bp, Homo sapien
ctgtagtcagaagatcgtccctctc

SEQ ID NO: 6083486 - DNA, 25 bp, Homo sapien
agaagatcgtccctctctcgcacag

SEQ ID NO: 6083487 - DNA, 25 bp, Homo sapien
tgtagtcagaagatcgtccctctct

SEQ ID NO: 6083488 - DNA, 25 bp, Homo sapien
tagtcagaagatcgtccctctctcg

SEQ ID NO: 6083489 - DNA, 25 bp, Homo sapien
actgtagtcagaagatcgtccctct

SEQ ID NO: 6083490 - DNA, 25 bp, Homo sapien
gtcagaagatcgtccctctctcgca

SEQ ID NO: 6083491 - DNA, 25 bp, Homo sapien
gtagtcagaagatcgtccctctctc

SEQ ID NO: 6083492 - DNA, 25 bp, Homo sapien
ccaactgagagtatggctgctgaag

SEQ ID NO: 6083493 - DNA, 25 bp, Homo sapien
ggattcgtccgcagtaatcgtgagt

SEQ ID NO: 6083494 - DNA, 25 bp, Homo sapien
cctgtcgcacccaactgagagtatg

SEQ ID NO: 6083495 - DNA, 25 bp, Homo sapien
tcgcacccaactgagagtatggctg

SEQ ID NO: 6083496 - DNA, 25 bp, Homo sapien
cacccaactgagagtatggctgctg

SEQ ID NO: 6083497 - DNA, 25 bp, Homo sapien
ggttgtgctcgtggattcgtccgca

SEQ ID NO: 6083498 - DNA, 25 bp, Homo sapien
caactgagagtatggctgctgaagg

SEQ ID NO: 6083499 - DNA, 25 bp, Homo sapien
tgtcgcacccaactgagagtatggc

SEQ ID NO: 6083500 - DNA, 25 bp, Homo sapien
ctgtcgcacccaactgagagtatgg

SEQ ID NO: 6083501 - DNA, 25 bp, Homo sapien
cccaactgagagtatggctgctgaa

SEQ ID NO: 6083502 - DNA, 25 bp, Homo sapien
gcacccaactgagagtatggctgct

SEQ ID NO: 6083503 - DNA, 25 bp, Homo sapien
tggattcgtccgcagtaatcgtgag

SEQ ID NO: 6083504 - DNA, 25 bp, Homo sapien
cgtagacgaagagcatcacgagaag

SEQ ID NO: 6083505 - DNA, 25 bp, Homo sapien
agcaagcgcagctggcgcgtagcca

SEQ ID NO: 6083506 - DNA, 25 bp, Homo sapien
tgatgagacccaaggtgcacagggc

SEQ ID NO: 6083507 - DNA, 25 bp, Homo sapien
ggtgcccatgatgagacccaaggtg

SEQ ID NO: 6083508 - DNA, 25 bp, Homo sapien
aaacccgcgcgtagacgaagagcat

SEQ ID NO: 6083509 - DNA, 25 bp, Homo sapien
cgggttgaaggcagaattggcataa

SEQ ID NO: 6083510 - DNA, 25 bp, Homo sapien
gaaggcagaattggcataacctagc

SEQ ID NO: 6083511 - DNA, 25 bp, Homo sapien
ggaaggcgctgcgaaagtccgggct

SEQ ID NO: 6083512 - DNA, 25 bp, Homo sapien
actcctcgggcggaaagcggcccag

SEQ ID NO: 6083513 - DNA, 25 bp, Homo sapien
ccaaggtgcacagggcccggtgttc

SEQ ID NO: 6083514 - DNA, 25 bp, Homo sapien
gcataacctagccagttcagggcaa

SEQ ID NO: 6083515 - DNA, 25 bp, Homo sapien
agctggcgcgtagccaccacgaaaa

SEQ ID NO: 6083516 - DNA, 25 bp, Homo sapien
atgtctccgcgtctcaggcacttct

SEQ ID NO: 6083517 - DNA, 25 bp, Homo sapien
aaacctcagctgatgttatctgtgg

SEQ ID NO: 6083518 - DNA, 25 bp, Homo sapien
gaatagctccatttaacaccagcca

SEQ ID NO: 6083519 - DNA, 25 bp, Homo sapien
taaccacaaagtataaatactggct

SEQ ID NO: 6083520 - DNA, 25 bp, Homo sapien
aaccctgtggtgactgcggcacacc

SEQ ID NO: 6083521 - DNA, 25 bp, Homo sapien
cgcgtctcaggcacttctgtgaaat

SEQ ID NO: 6083522 - DNA, 25 bp, Homo sapien
tggctgttgccattctttcgtaggg

SEQ ID NO: 6083523 - DNA, 25 bp, Homo sapien
gagcgcgtcactgctattgaatagc

SEQ ID NO: 6083524 - DNA, 25 bp, Homo sapien
tgaggagagcgcgtcactgctattg

SEQ ID NO: 6083525 - DNA, 25 bp, Homo sapien
gccttggcccaagagtggcatttgt

SEQ ID NO: 6083526 - DNA, 25 bp, Homo sapien
tactggctctaagctttcatcactt

SEQ ID NO: 6083527 - DNA, 25 bp, Homo sapien
ggaccttgagctgcgtgtttgggag

SEQ ID NO: 6083528 - DNA, 25 bp, Homo sapien
atattgtcgcgcagtactttacggt

SEQ ID NO: 6083529 - DNA, 25 bp, Homo sapien
gatgccctggatattgtcgcgcagt

SEQ ID NO: 6083530 - DNA, 25 bp, Homo sapien
gatattgtcgcgcagtactttacgg

SEQ ID NO: 6083531 - DNA, 25 bp, Homo sapien
attgtcgcgcagtactttacggtgg

SEQ ID NO: 6083532 - DNA, 25 bp, Homo sapien
ggatattgtcgcgcagtactttacg

SEQ ID NO: 6083533 - DNA, 25 bp, Homo sapien
atgccctggatattgtcgcgcagta

SEQ ID NO: 6083534 - DNA, 25 bp, Homo sapien
cctggatattgtcgcgcagtacttt

SEQ ID NO: 6083535 - DNA, 25 bp, Homo sapien
tggatattgtcgcgcagtactttac

SEQ ID NO: 6083536 - DNA, 25 bp, Homo sapien
gccctggatattgtcgcgcagtact

SEQ ID NO: 6083537 - DNA, 25 bp, Homo sapien
tgccctggatattgtcgcgcagtac

SEQ ID NO: 6083538 - DNA, 25 bp, Homo sapien
ccctggatattgtcgcgcagtactt

SEQ ID NO: 6083539 - DNA, 25 bp, Homo sapien
tattgtcgcgcagtactttacggtg

SEQ ID NO: 6083540 - DNA, 25 bp, Homo sapien
ttcccatcggccaagtggtcgaacc

SEQ ID NO: 6083541 - DNA, 25 bp, Homo sapien
attcccatcggccaagtggtcgaac

SEQ ID NO: 6083542 - DNA, 25 bp, Homo sapien
cattcccatcggccaagtggtcgaa

SEQ ID NO: 6083543 - DNA, 25 bp, Homo sapien
gatccacagaaatgccgatggtccg

SEQ ID NO: 6083544 - DNA, 25 bp, Homo sapien
ccggcgcgcaccttcgtgtggtacc

SEQ ID NO: 6083545 - DNA, 25 bp, Homo sapien
atccacagaaatgccgatggtccgg

SEQ ID NO: 6083546 - DNA, 25 bp, Homo sapien
ggatccacagaaatgccgatggtcc

SEQ ID NO: 6083547 - DNA, 25 bp, Homo sapien
acagaaatgccgatggtccgggcca

SEQ ID NO: 6083548 - DNA, 25 bp, Homo sapien
aaatgccgatggtccgggccacctt

SEQ ID NO: 6083549 - DNA, 25 bp, Homo sapien
agaaatgccgatggtccgggccacc

SEQ ID NO: 6083550 - DNA, 25 bp, Homo sapien
cggatccacagaaatgccgatggtc

SEQ ID NO: 6083551 - DNA, 25 bp, Homo sapien
tcggatccacagaaatgccgatggt

SEQ ID NO: 6083552 - DNA, 25 bp, Homo sapien
cacagaaatgccgatggtccgggcc

SEQ ID NO: 6083553 - DNA, 25 bp, Homo sapien
cctcggatccacagaaatgccgatg

SEQ ID NO: 6083554 - DNA, 25 bp, Homo sapien
ctcggatccacagaaatgccgatgg

SEQ ID NO: 6083555 - DNA, 25 bp, Homo sapien
caggctgatggctgatctaggtaaa

SEQ ID NO: 6083556 - DNA, 25 bp, Homo sapien
ctgatggctgatctaggtaaaggtt

SEQ ID NO: 6083557 - DNA, 25 bp, Homo sapien
ggctgatggctgatctaggtaaagg

SEQ ID NO: 6083558 - DNA, 25 bp, Homo sapien
acaggctgatggctgatctaggtaa

SEQ ID NO: 6083559 - DNA, 25 bp, Homo sapien
tgatggctgatctaggtaaaggttt

SEQ ID NO: 6083560 - DNA, 25 bp, Homo sapien
gctgatggctgatctaggtaaaggt

SEQ ID NO: 6083561 - DNA, 25 bp, Homo sapien
aggctgatggctgatctaggtaaag

SEQ ID NO: 6083562 - DNA, 25 bp, Homo sapien
tttctaattgtctctcaatgcaact

SEQ ID NO: 6083563 - DNA, 25 bp, Homo sapien
tgcactctcgttccaaacaatcttc

SEQ ID NO: 6083564 - DNA, 25 bp, Homo sapien
gatgggaaagagtttgagtttctaa

SEQ ID NO: 6083565 - DNA, 25 bp, Homo sapien
ggattttcgctgcatttttaatcac

SEQ ID NO: 6083566 - DNA, 25 bp, Homo sapien
gaagttagcacagcagaccaactct

SEQ ID NO: 6083567 - DNA, 25 bp, Homo sapien
aatcttctgttaacacatgcacttg

SEQ ID NO: 6083568 - DNA, 25 bp, Homo sapien
cattctcaccttctatgatcacttg

SEQ ID NO: 6083569 - DNA, 25 bp, Homo sapien
gaccaactctattctcagaaatgaa

SEQ ID NO: 6083570 - DNA, 25 bp, Homo sapien
tagactatgtctagaaataccaata

SEQ ID NO: 6083571 - DNA, 25 bp, Homo sapien
cctttggaataagaaacatgaagtt

SEQ ID NO: 6083572 - DNA, 25 bp, Homo sapien
cacttgtattacacttctctttgct

SEQ ID NO: 6083573 - DNA, 25 bp, Homo sapien
tagaaaagaggcattaggtttccat

SEQ ID NO: 6083574 - DNA, 25 bp, Homo sapien
ggccacacgagctgtgccgtgcgtt

SEQ ID NO: 6083575 - DNA, 25 bp, Homo sapien
tctgctacctgggatagaagccggg

SEQ ID NO: 6083576 - DNA, 25 bp, Homo sapien
agtcctccacgggcaaagggttgcg

SEQ ID NO: 6083577 - DNA, 25 bp, Homo sapien
ttgaaacaggcctggacggtgacct

SEQ ID NO: 6083578 - DNA, 25 bp, Homo sapien
cttggaggcgctagttgaaacaggc

SEQ ID NO: 6083579 - DNA, 25 bp, Homo sapien
taagcaaggcttggaggcgctagtt

SEQ ID NO: 6083580 - DNA, 25 bp, Homo sapien
tcaccttgcgcactgtggctgaggc

SEQ ID NO: 6083581 - DNA, 25 bp, Homo sapien
ccaactaagttaatagagatgctcc

SEQ ID NO: 6083582 - DNA, 25 bp, Homo sapien
tgtgccgtgcgtttcaaagccatgt

SEQ ID NO: 6083583 - DNA, 25 bp, Homo sapien
gactgcaggtgaccggagctaccaa

SEQ ID NO: 6083584 - DNA, 25 bp, Homo sapien
aggtgaccggagctaccaactaagt

SEQ ID NO: 6083585 - DNA, 25 bp, Homo sapien
aggcagccggtctccctctgtgcgt

SEQ ID NO: 6083586 - DNA, 25 bp, Homo sapien
aaatggtctgactccttgatgacgc

SEQ ID NO: 6083587 - DNA, 25 bp, Homo sapien
aacagaattacaaccactgccagca

SEQ ID NO: 6083588 - DNA, 25 bp, Homo sapien
caccaaagtccattaggtaaatagg

SEQ ID NO: 6083589 - DNA, 25 bp, Homo sapien
caccgggttgatggcactgttgaga

SEQ ID NO: 6083590 - DNA, 25 bp, Homo sapien
tcctgtagggcatccataaaagggc

SEQ ID NO: 6083591 - DNA, 25 bp, Homo sapien
tagggccacactgtagttagcaggt

SEQ ID NO: 6083592 - DNA, 25 bp, Homo sapien
gacatgagattgtaaatcaccgggt

SEQ ID NO: 6083593 - DNA, 25 bp, Homo sapien
tgatgacgctgtaatttagggccac

SEQ ID NO: 6083594 - DNA, 25 bp, Homo sapien
tgagttgacaaccactagagtcctg

SEQ ID NO: 6083595 - DNA, 25 bp, Homo sapien
tatgaatccatagaggacggtagcc

SEQ ID NO: 6083596 - DNA, 25 bp, Homo sapien
tcattggcacaacataaaagacacc

SEQ ID NO: 6083597 - DNA, 25 bp, Homo sapien
gaaggctgcacggaatttctgggac

SEQ ID NO: 6083598 - DNA, 25 bp, Homo sapien
gatgcccacttgaaacctgccatgt

SEQ ID NO: 6083599 - DNA, 25 bp, Homo sapien
gcaaaaccctgatgcccacttgaaa

SEQ ID NO: 6083600 - DNA, 25 bp, Homo sapien
cagaatctgaggctaccaacacgcc

SEQ ID NO: 6083601 - DNA, 25 bp, Homo sapien
gcccacttgaaacctgccatgtctg

SEQ ID NO: 6083602 - DNA, 25 bp, Homo sapien
gggcaaaaccctgatgcccacttga

SEQ ID NO: 6083603 - DNA, 25 bp, Homo sapien
ccacttgaaacctgccatgtctgag

SEQ ID NO: 6083604 - DNA, 25 bp, Homo sapien
ctgggcaaaaccctgatgcccactt

SEQ ID NO: 6083605 - DNA, 25 bp, Homo sapien
gaggctaccaacacgcctctgggaa

SEQ ID NO: 6083606 - DNA, 25 bp, Homo sapien
gaatctgaggctaccaacacgcctc

SEQ ID NO: 6083607 - DNA, 25 bp, Homo sapien
tgaggctaccaacacgcctctggga

SEQ ID NO: 6083608 - DNA, 25 bp, Homo sapien
aaccctgatgcccacttgaaacctg

SEQ ID NO: 6083609 - DNA, 25 bp, Homo sapien
tgatgcccacttgaaacctgccatg

SEQ ID NO: 6083610 - DNA, 25 bp, Homo sapien
gattcaccactatcagatgctgttc

SEQ ID NO: 6083611 - DNA, 25 bp, Homo sapien
ccactatcagatgctgttccagacc

SEQ ID NO: 6083612 - DNA, 25 bp, Homo sapien
agggctcttgtagacgtccagtttt

SEQ ID NO: 6083613 - DNA, 25 bp, Homo sapien
caccactatcagatgctgttccaga

SEQ ID NO: 6083614 - DNA, 25 bp, Homo sapien
aaaaactatgtaggcatccgaagca

SEQ ID NO: 6083615 - DNA, 25 bp, Homo sapien
ctgattcaccactatcagatgctgt

SEQ ID NO: 6083616 - DNA, 25 bp, Homo sapien
ctcttgtagacgtccagttttgtga

SEQ ID NO: 6083617 - DNA, 25 bp, Homo sapien
tgaccaatttcacgtctttaacttc

SEQ ID NO: 6083618 - DNA, 25 bp, Homo sapien
gacatgaccaatttcacgtctttaa

SEQ ID NO: 6083619 - DNA, 25 bp, Homo sapien
gtgacatgaccaatttcacgtcttt

SEQ ID NO: 6083620 - DNA, 25 bp, Homo sapien
tcaccactatcagatgctgttccag

SEQ ID NO: 6083621 - DNA, 25 bp, Homo sapien
tactgattcaccactatcagatgct

SEQ ID NO: 6083622 - DNA, 25 bp, Homo sapien
caaaagatgttatggcagggaatag

SEQ ID NO: 6083623 - DNA, 25 bp, Homo sapien
gcaaaagatgttatggcagggaata

SEQ ID NO: 6083624 - DNA, 25 bp, Homo sapien
aaaagatgttatggcagggaataga

SEQ ID NO: 6083625 - DNA, 25 bp, Homo sapien
tccccgcggccttcgcttttagctc

SEQ ID NO: 6083626 - DNA, 25 bp, Homo sapien
ggcatgagcctgtgttctcccctct

SEQ ID NO: 6083627 - DNA, 25 bp, Homo sapien
tgatgctgatgctgtctgaaagcca

SEQ ID NO: 6083628 - DNA, 25 bp, Homo sapien
cgctgtattgcccagcctgatcttg

SEQ ID NO: 6083629 - DNA, 25 bp, Homo sapien
caataatgtgtattcaacaaggcct

SEQ ID NO: 6083630 - DNA, 25 bp, Homo sapien
tgctgatgctgtctgaaagccactg

SEQ ID NO: 6083631 - DNA, 25 bp, Homo sapien
ggtatgcactaccatgcctatttgt

SEQ ID NO: 6083632 - DNA, 25 bp, Homo sapien
tgctgtctgaaagccactgctctcc

SEQ ID NO: 6083633 - DNA, 25 bp, Homo sapien
tgtgtattcaacaaggccttcaggt

SEQ ID NO: 6083634 - DNA, 25 bp, Homo sapien
cactaccatgcctatttgttttttg

SEQ ID NO: 6083635 - DNA, 25 bp, Homo sapien
tctcccctctcttccaataatgtgt

SEQ ID NO: 6083636 - DNA, 25 bp, Homo sapien
ttcaacaaggccttcaggtgatgct

SEQ ID NO: 6083637 - DNA, 25 bp, Homo sapien
gcagctcagaccacaggtatgcact

SEQ ID NO: 6083638 - DNA, 25 bp, Homo sapien
catgctgttccatctaccagtagga

SEQ ID NO: 6083639 - DNA, 25 bp, Homo sapien
catcatccataatcttggacagacc

SEQ ID NO: 6083640 - DNA, 25 bp, Homo sapien
gctgttccatctaccagtaggatgt

SEQ ID NO: 6083641 - DNA, 25 bp, Homo sapien
tttcaccacatgctgttccatctac

SEQ ID NO: 6083642 - DNA, 25 bp, Homo sapien
gctatcatcatccataatcttggac

SEQ ID NO: 6083643 - DNA, 25 bp, Homo sapien
ccatctacaccatagctatcatcat

SEQ ID NO: 6083644 - DNA, 25 bp, Homo sapien
tataatagggggtttgatctcattg

SEQ ID NO: 6083645 - DNA, 25 bp, Homo sapien
gttccatctaccagtaggatgtttc

SEQ ID NO: 6083646 - DNA, 25 bp, Homo sapien
cacatgctgttccatctaccagtag

SEQ ID NO: 6083647 - DNA, 25 bp, Homo sapien
actacaaaacactcaggaggtaaat

SEQ ID NO: 6083648 - DNA, 25 bp, Homo sapien
tacaaaacactcaggaggtaaatac

SEQ ID NO: 6083649 - DNA, 25 bp, Homo sapien
attccatctacaccatagctatcat

SEQ ID NO: 6083650 - DNA, 25 bp, Homo sapien
ctttcaatgtagatttaagaatggt

SEQ ID NO: 6083651 - DNA, 25 bp, Homo sapien
tcgtaatctaattatgtctgagaca

SEQ ID NO: 6083652 - DNA, 25 bp, Homo sapien
ttcctattacagtattgcgttttgc

SEQ ID NO: 6083653 - DNA, 25 bp, Homo sapien
gtaatctaattatgtctgagacaga

SEQ ID NO: 6083654 - DNA, 25 bp, Homo sapien
cctattacagtattgcgttttgcca

SEQ ID NO: 6083655 - DNA, 25 bp, Homo sapien
gtttcgtaatctaattatgtctgag

SEQ ID NO: 6083656 - DNA, 25 bp, Homo sapien
tgtcttgtttcgtaatctaattatg

SEQ ID NO: 6083657 - DNA, 25 bp, Homo sapien
tattacagtattgcgttttgccatt

SEQ ID NO: 6083658 - DNA, 25 bp, Homo sapien
aaatattctagtcctttcaatgtag

SEQ ID NO: 6083659 - DNA, 25 bp, Homo sapien
tcaatgtagatttaagaatggttgc

SEQ ID NO: 6083660 - DNA, 25 bp, Homo sapien
atttccagcttttatatctctgtgt

SEQ ID NO: 6083661 - DNA, 25 bp, Homo sapien
caatgtagatttaagaatggttgca

SEQ ID NO: 6083662 - DNA, 25 bp, Homo sapien
cagcgccacaatactccatatacag

SEQ ID NO: 6083663 - DNA, 25 bp, Homo sapien
ccagcgccacaatactccatataca

SEQ ID NO: 6083664 - DNA, 25 bp, Homo sapien
gagaccgataaaagcgactctgaat

SEQ ID NO: 6083665 - DNA, 25 bp, Homo sapien
aagcgactctgaatatactggtata

SEQ ID NO: 6083666 - DNA, 25 bp, Homo sapien
cacctctggagaccgataaaagcga

SEQ ID NO: 6083667 - DNA, 25 bp, Homo sapien
actatcttgattgcactgcgtttgg

SEQ ID NO: 6083668 - DNA, 25 bp, Homo sapien
agtagcacctctggagaccgataaa

SEQ ID NO: 6083669 - DNA, 25 bp, Homo sapien
tctggagaccgataaaagcgactct

SEQ ID NO: 6083670 - DNA, 25 bp, Homo sapien
taaaagcgactctgaatatactggt

SEQ ID NO: 6083671 - DNA, 25 bp, Homo sapien
tggagaccgataaaagcgactctga

SEQ ID NO: 6083672 - DNA, 25 bp, Homo sapien
gataaaagcgactctgaatatactg

SEQ ID NO: 6083673 - DNA, 25 bp, Homo sapien
tagcacctctggagaccgataaaag

SEQ ID NO: 6083674 - DNA, 25 bp, Homo sapien
cctctggagaccgataaaagcgact

SEQ ID NO: 6083675 - DNA, 25 bp, Homo sapien
ctatcttgattgcactgcgtttggg

SEQ ID NO: 6083676 - DNA, 25 bp, Homo sapien
acagaggctgttttccggcttcagg

SEQ ID NO: 6083677 - DNA, 25 bp, Homo sapien
ttggggtgctgacagaggctgtttt

SEQ ID NO: 6083678 - DNA, 25 bp, Homo sapien
gctgttttccggcttcaggtcactg

SEQ ID NO: 6083679 - DNA, 25 bp, Homo sapien
tcacagatcttcacgggggagacct

SEQ ID NO: 6083680 - DNA, 25 bp, Homo sapien
atcttcacgggggagacctggttgg

SEQ ID NO: 6083681 - DNA, 25 bp, Homo sapien
acctggttggggtgctgacagaggc

SEQ ID NO: 6083682 - DNA, 25 bp, Homo sapien
tgctgacagaggctgttttccggct

SEQ ID NO: 6083683 - DNA, 25 bp, Homo sapien
gggagacctggttggggtgctgaca

SEQ ID NO: 6083684 - DNA, 25 bp, Homo sapien
gccagatcccctccttcacaatatt

SEQ ID NO: 6083685 - DNA, 25 bp, Homo sapien
cgatgcaatacggtatgaccaccat

SEQ ID NO: 6083686 - DNA, 25 bp, Homo sapien
gtttcagatcccgatgcaatacggt

SEQ ID NO: 6083687 - DNA, 25 bp, Homo sapien
tcagatcccgatgcaatacggtatg

SEQ ID NO: 6083688 - DNA, 25 bp, Homo sapien
tttcagatcccgatgcaatacggta

SEQ ID NO: 6083689 - DNA, 25 bp, Homo sapien
aattacactagccagatcccctcct

SEQ ID NO: 6083690 - DNA, 25 bp, Homo sapien
atacggtatgaccaccatcacttcg

SEQ ID NO: 6083691 - DNA, 25 bp, Homo sapien
gcaatacggtatgaccaccatcact

SEQ ID NO: 6083692 - DNA, 25 bp, Homo sapien
gatcccgatgcaatacggtatgacc

SEQ ID NO: 6083693 - DNA, 25 bp, Homo sapien
tgcaatacggtatgaccaccatcac

SEQ ID NO: 6083694 - DNA, 25 bp, Homo sapien
gatgcaatacggtatgaccaccatc

SEQ ID NO: 6083695 - DNA, 25 bp, Homo sapien
cagatcccgatgcaatacggtatga

SEQ ID NO: 6083696 - DNA, 25 bp, Homo sapien
ctggaagagttctggggcagcataa

SEQ ID NO: 6083697 - DNA, 25 bp, Homo sapien
gggcagcataagggggactgccaca

SEQ ID NO: 6083698 - DNA, 25 bp, Homo sapien
gaaggtgtccagcttgttcccaaag

SEQ ID NO: 6083699 - DNA, 25 bp, Homo sapien
ttcattgctgaagccgaaatccccg

SEQ ID NO: 6083700 - DNA, 25 bp, Homo sapien
ggtgaattcattgctgaagccgaaa

SEQ ID NO: 6083701 - DNA, 25 bp, Homo sapien
gtccagcttgttcccaaaggtgaat

SEQ ID NO: 6083702 - DNA, 25 bp, Homo sapien
ttgctgaagccgaaatccccgattt

SEQ ID NO: 6083703 - DNA, 25 bp, Homo sapien
gggactgccacagaaggtgtccagc

SEQ ID NO: 6083704 - DNA, 25 bp, Homo sapien
cccaaaggtgaattcattgctgaag

SEQ ID NO: 6083705 - DNA, 25 bp, Homo sapien
tttgccctggaagagttctggggca

SEQ ID NO: 6083706 - DNA, 25 bp, Homo sapien
cataagggggactgccacagaaggt

SEQ ID NO: 6083707 - DNA, 25 bp, Homo sapien
gttctggggcagcataagggggact

SEQ ID NO: 6083708 - DNA, 25 bp, Homo sapien
gccacagaaggtgtccagcttgttc

SEQ ID NO: 6083709 - DNA, 25 bp, Homo sapien
cttgttcccaaaggtgaattcattg

SEQ ID NO: 6083710 - DNA, 25 bp, Homo sapien
atattttttgccctggaagagttct

SEQ ID NO: 6083711 - DNA, 25 bp, Homo sapien
caatcgaggtgtgatcttcctgcca

SEQ ID NO: 6083712 - DNA, 25 bp, Homo sapien
aaatctgaaatttttaccgcatctg

SEQ ID NO: 6083713 - DNA, 25 bp, Homo sapien
tggaccagtctactagcaatcgagg

SEQ ID NO: 6083714 - DNA, 25 bp, Homo sapien
cttgcaattcctgtggaccagtcta

SEQ ID NO: 6083715 - DNA, 25 bp, Homo sapien
cactgagttccttagatgtaccaaa

SEQ ID NO: 6083716 - DNA, 25 bp, Homo sapien
tccatgcgaccgtgccagcaaatga

SEQ ID NO: 6083717 - DNA, 25 bp, Homo sapien
ggttcattccgtatcacctctggcg

SEQ ID NO: 6083718 - DNA, 25 bp, Homo sapien
acctcgtagagttgtccatgggcac

SEQ ID NO: 6083719 - DNA, 25 bp, Homo sapien
taccgcatctgtgtgggtcactaaa

SEQ ID NO: 6083720 - DNA, 25 bp, Homo sapien
tatggaggtgcaaataattcattcc

SEQ ID NO: 6083721 - DNA, 25 bp, Homo sapien
ctgccagctcgtaagacctcgtaga

SEQ ID NO: 6083722 - DNA, 25 bp, Homo sapien
tgatttgagatcacgatgaataatt

SEQ ID NO: 6083723 - DNA, 25 bp, Homo sapien
gggcacaatactccatgtataggta

SEQ ID NO: 6083724 - DNA, 25 bp, Homo sapien
catgggcacaatactccatgtatag

SEQ ID NO: 6083725 - DNA, 25 bp, Homo sapien
atgggcacaatactccatgtatagg

SEQ ID NO: 6083726 - DNA, 25 bp, Homo sapien
tgggcacaatactccatgtataggt

SEQ ID NO: 6083727 - DNA, 25 bp, Homo sapien
acctttgctccggagaacttcaggg

SEQ ID NO: 6083728 - DNA, 25 bp, Homo sapien
ttcaccaatgatgcgtgcaaatcca

SEQ ID NO: 6083729 - DNA, 25 bp, Homo sapien
ctaccacagatctcctgaatgactt

SEQ ID NO: 6083730 - DNA, 25 bp, Homo sapien
ccaatgatgcgtgcaaatccaaagt

SEQ ID NO: 6083731 - DNA, 25 bp, Homo sapien
gggctaagtatgctggagttcctac

SEQ ID NO: 6083732 - DNA, 25 bp, Homo sapien
gttcctaccacagatctcctgaatg

SEQ ID NO: 6083733 - DNA, 25 bp, Homo sapien
gacttttcaccaatgatgcgtgcaa

SEQ ID NO: 6083734 - DNA, 25 bp, Homo sapien
taacctttgctccggagaacttcag

SEQ ID NO: 6083735 - DNA, 25 bp, Homo sapien
cttcaggggctaagtatgctggagt

SEQ ID NO: 6083736 - DNA, 25 bp, Homo sapien
gagttcctaccacagatctcctgaa

SEQ ID NO: 6083737 - DNA, 25 bp, Homo sapien
gctaagtatgctggagttcctacca

SEQ ID NO: 6083738 - DNA, 25 bp, Homo sapien
caccaatgatgcgtgcaaatccaaa

SEQ ID NO: 6083739 - DNA, 25 bp, Homo sapien
aaatggtgttcctatcactgtattc

SEQ ID NO: 6083740 - DNA, 25 bp, Homo sapien
caagtcccttaagagttgattgtaa

SEQ ID NO: 6083741 - DNA, 25 bp, Homo sapien
tgtaagttgacctgctaccccaaaa

SEQ ID NO: 6083742 - DNA, 25 bp, Homo sapien
atttcctgccttgatatctcggtgt

SEQ ID NO: 6083743 - DNA, 25 bp, Homo sapien
cctgccttgatatctcggtgtattt

SEQ ID NO: 6083744 - DNA, 25 bp, Homo sapien
ttgattgtaatattgtagctatttc

SEQ ID NO: 6083745 - DNA, 25 bp, Homo sapien
gttcctatcactgtattccgcttgg

SEQ ID NO: 6083746 - DNA, 25 bp, Homo sapien
attcaagtcccttaagagttgattg

SEQ ID NO: 6083747 - DNA, 25 bp, Homo sapien
gttgacctgctaccccaaaatctgc

SEQ ID NO: 6083748 - DNA, 25 bp, Homo sapien
cactgtattccgcttggccatggta

SEQ ID NO: 6083749 - DNA, 25 bp, Homo sapien
tggtgttcctatcactgtattccgc

SEQ ID NO: 6083750 - DNA, 25 bp, Homo sapien
tatcactgtattccgcttggccatg

SEQ ID NO: 6083751 - DNA, 25 bp, Homo sapien
acagatttcaggtgacaagtagtat

SEQ ID NO: 6083752 - DNA, 25 bp, Homo sapien
gttttcacagatttcaggtgacaag

SEQ ID NO: 6083753 - DNA, 25 bp, Homo sapien
tctagcaattccaaaatcaccaatc

SEQ ID NO: 6083754 - DNA, 25 bp, Homo sapien
gcaagttcgagccagctctaccagt

SEQ ID NO: 6083755 - DNA, 25 bp, Homo sapien
ccctatgcaagttcgagccagctct

SEQ ID NO: 6083756 - DNA, 25 bp, Homo sapien
ccagctctaccagtctattaagaac

SEQ ID NO: 6083757 - DNA, 25 bp, Homo sapien
tggggtccctatgcaagttcgagcc

SEQ ID NO: 6083758 - DNA, 25 bp, Homo sapien
tctattaagaactctagcaattcca

SEQ ID NO: 6083759 - DNA, 25 bp, Homo sapien
aggtttgttttcacagatttcaggt

SEQ ID NO: 6083760 - DNA, 25 bp, Homo sapien
tcgagccagctctaccagtctatta

SEQ ID NO: 6083761 - DNA, 25 bp, Homo sapien
taccagtctattaagaactctagca

SEQ ID NO: 6083762 - DNA, 25 bp, Homo sapien
tgacaagtagtatggggtccctatg

SEQ ID NO: 6083763 - DNA, 25 bp, Homo sapien
ttcaggtgacaagtagtatggggtc

SEQ ID NO: 6083764 - DNA, 25 bp, Homo sapien
aagaactctagcaattccaaaatca

SEQ ID NO: 6083765 - DNA, 25 bp, Homo sapien
gtagtatggggtccctatgcaagtt

SEQ ID NO: 6083766 - DNA, 25 bp, Homo sapien
ggagccctgtaccacctagtggcca

SEQ ID NO: 6083767 - DNA, 25 bp, Homo sapien
cctgtaccacctagtggccacgtag

SEQ ID NO: 6083768 - DNA, 25 bp, Homo sapien
cctagtggccacgtagcctgtcatt

SEQ ID NO: 6083769 - DNA, 25 bp, Homo sapien
tgtaccacctagtggccacgtagcc

SEQ ID NO: 6083770 - DNA, 25 bp, Homo sapien
tctgtgtgccgagccagtccaaaat

SEQ ID NO: 6083771 - DNA, 25 bp, Homo sapien
gccgagccagtccaaaatccagaat

SEQ ID NO: 6083772 - DNA, 25 bp, Homo sapien
tgtgccgagccagtccaaaatccag

SEQ ID NO: 6083773 - DNA, 25 bp, Homo sapien
catcatctgtgtgccgagccagtcc

SEQ ID NO: 6083774 - DNA, 25 bp, Homo sapien
tagtggccacgtagcctgtcatttc

SEQ ID NO: 6083775 - DNA, 25 bp, Homo sapien
catctgtgtgccgagccagtccaaa

SEQ ID NO: 6083776 - DNA, 25 bp, Homo sapien
cacctagtggccacgtagcctgtca

SEQ ID NO: 6083777 - DNA, 25 bp, Homo sapien
ggccacgtagcctgtcatttcatca

SEQ ID NO: 6083778 - DNA, 25 bp, Homo sapien
ctaggttactaggcttcaggtctcg

SEQ ID NO: 6083779 - DNA, 25 bp, Homo sapien
acagctaggttactaggcttcaggt

SEQ ID NO: 6083780 - DNA, 25 bp, Homo sapien
agctaggttactaggcttcaggtct

SEQ ID NO: 6083781 - DNA, 25 bp, Homo sapien
cagctaggttactaggcttcaggtc

SEQ ID NO: 6083782 - DNA, 25 bp, Homo sapien
gctaggttactaggcttcaggtctc

SEQ ID NO: 6083783 - DNA, 25 bp, Homo sapien
ttcacagctaggttactaggcttca

SEQ ID NO: 6083784 - DNA, 25 bp, Homo sapien
taggttactaggcttcaggtctcgg

SEQ ID NO: 6083785 - DNA, 25 bp, Homo sapien
tcacagctaggttactaggcttcag

SEQ ID NO: 6083786 - DNA, 25 bp, Homo sapien
cacagctaggttactaggcttcagg

SEQ ID NO: 6083787 - DNA, 25 bp, Homo sapien
gcaatttctggtgaaatgtagttag

SEQ ID NO: 6083788 - DNA, 25 bp, Homo sapien
ttttcatgtggcattttcagttgag

SEQ ID NO: 6083789 - DNA, 25 bp, Homo sapien
gttgccagcccgaaatcagcgatct

SEQ ID NO: 6083790 - DNA, 25 bp, Homo sapien
ggagttccacataatgtatagtgct

SEQ ID NO: 6083791 - DNA, 25 bp, Homo sapien
agttgagttgccagcccgaaatcag

SEQ ID NO: 6083792 - DNA, 25 bp, Homo sapien
tgcacttcgagtggcaatttctggt

SEQ ID NO: 6083793 - DNA, 25 bp, Homo sapien
tctggtgaaatgtagttaggagttc

SEQ ID NO: 6083794 - DNA, 25 bp, Homo sapien
attttcagttgagttgccagcccga

SEQ ID NO: 6083795 - DNA, 25 bp, Homo sapien
gaaatgtagttaggagttccacata

SEQ ID NO: 6083796 - DNA, 25 bp, Homo sapien
aatgtatagtgcttttcatgtggca

SEQ ID NO: 6083797 - DNA, 25 bp, Homo sapien
cgagtggcaatttctggtgaaatgt

SEQ ID NO: 6083798 - DNA, 25 bp, Homo sapien
tgtggcattttcagttgagttgcca

SEQ ID NO: 6083799 - DNA, 25 bp, Homo sapien
tagttaggagttccacataatgtat

SEQ ID NO: 6083800 - DNA, 25 bp, Homo sapien
ccacataatgtatagtgcttttcat

SEQ ID NO: 6083801 - DNA, 25 bp, Homo sapien
tagtgcttttcatgtggcattttca

SEQ ID NO: 6083802 - DNA, 25 bp, Homo sapien
cttttacctataatgatttcaggag

SEQ ID NO: 6083803 - DNA, 25 bp, Homo sapien
gcacgataaaatctactgacaagat

SEQ ID NO: 6083804 - DNA, 25 bp, Homo sapien
tccgcaacatgtgaagccgacccaa

SEQ ID NO: 6083805 - DNA, 25 bp, Homo sapien
acatgtgaagccgacccaaagtctc

SEQ ID NO: 6083806 - DNA, 25 bp, Homo sapien
atgatttcaggagcacgataaaatc

SEQ ID NO: 6083807 - DNA, 25 bp, Homo sapien
taaaatctactgacaagataaggtg

SEQ ID NO: 6083808 - DNA, 25 bp, Homo sapien
atagcttttacctataatgatttca

SEQ ID NO: 6083809 - DNA, 25 bp, Homo sapien
acaagataaggtgttatgtcattat

SEQ ID NO: 6083810 - DNA, 25 bp, Homo sapien
cctataatgatttcaggagcacgat

SEQ ID NO: 6083811 - DNA, 25 bp, Homo sapien
tcattatccgcaacatgtgaagccg

SEQ ID NO: 6083812 - DNA, 25 bp, Homo sapien
tgaagccgacccaaagtctcccagt

SEQ ID NO: 6083813 - DNA, 25 bp, Homo sapien
gttatgtcattatccgcaacatgtg

SEQ ID NO: 6083814 - DNA, 25 bp, Homo sapien
tcaggagcacgataaaatctactga

SEQ ID NO: 6083815 - DNA, 25 bp, Homo sapien
taaggtgttatgtcattatccgcaa

SEQ ID NO: 6083816 - DNA, 25 bp, Homo sapien
ctactgacaagataaggtgttatgt

SEQ ID NO: 6083817 - DNA, 25 bp, Homo sapien
cctggagaggccgaaatccgctatc

SEQ ID NO: 6083818 - DNA, 25 bp, Homo sapien
gtctgctgagtagatgttcctggag

SEQ ID NO: 6083819 - DNA, 25 bp, Homo sapien
ataaaaaatggactctggtggcatc

SEQ ID NO: 6083820 - DNA, 25 bp, Homo sapien
tgagtagatgttcctggagaggccg

SEQ ID NO: 6083821 - DNA, 25 bp, Homo sapien
aatggactctggtggcatccaacgg

SEQ ID NO: 6083822 - DNA, 25 bp, Homo sapien
tggcatccaacggatagggatagcg

SEQ ID NO: 6083823 - DNA, 25 bp, Homo sapien
ctctggtggcatccaacggataggg

SEQ ID NO: 6083824 - DNA, 25 bp, Homo sapien
gatagggatagcgccgttttcatta

SEQ ID NO: 6083825 - DNA, 25 bp, Homo sapien
agctttgtagtagtctgctgagtag

SEQ ID NO: 6083826 - DNA, 25 bp, Homo sapien
gatgttcctggagaggccgaaatcc

SEQ ID NO: 6083827 - DNA, 25 bp, Homo sapien
ccaacggatagggatagcgccgttt

SEQ ID NO: 6083828 - DNA, 25 bp, Homo sapien
gatagcgccgttttcattagctttg

SEQ ID NO: 6083829 - DNA, 25 bp, Homo sapien
gccgttttcattagctttgtagtag

SEQ ID NO: 6083830 - DNA, 25 bp, Homo sapien
gtagtagtctgctgagtagatgttc

SEQ ID NO: 6083831 - DNA, 25 bp, Homo sapien
cggttataaaaaatggactctggtg

SEQ ID NO: 6083832 - DNA, 25 bp, Homo sapien
ttcattagctttgtagtagtctgct

SEQ ID NO: 6083833 - DNA, 25 bp, Homo sapien
agagtttcccaaagttctccctgct

SEQ ID NO: 6083834 - DNA, 25 bp, Homo sapien
tatactgccccccgccccctcaatc

SEQ ID NO: 6083835 - DNA, 25 bp, Homo sapien
tcccaaagttctccctgctgtatac

SEQ ID NO: 6083836 - DNA, 25 bp, Homo sapien
aggagccagagaaatcctgttaaaa

SEQ ID NO: 6083837 - DNA, 25 bp, Homo sapien
caacacaggagccagagaaatcctg

SEQ ID NO: 6083838 - DNA, 25 bp, Homo sapien
ctcaatcaacacaggagccagagaa

SEQ ID NO: 6083839 - DNA, 25 bp, Homo sapien
ctgttaaaaccaaagtccgcgatct

SEQ ID NO: 6083840 - DNA, 25 bp, Homo sapien
gccccccgccccctcaatcaacaca

SEQ ID NO: 6083841 - DNA, 25 bp, Homo sapien
agttctccctgctgtatactgcccc

SEQ ID NO: 6083842 - DNA, 25 bp, Homo sapien
ctgctgtatactgccccccgccccc

SEQ ID NO: 6083843 - DNA, 25 bp, Homo sapien
caataatttcaagagtttcccaaag

SEQ ID NO: 6083844 - DNA, 25 bp, Homo sapien
cgccccctcaatcaacacaggagcc

SEQ ID NO: 6083845 - DNA, 25 bp, Homo sapien
cagagaaatcctgttaaaaccaaag

SEQ ID NO: 6083846 - DNA, 25 bp, Homo sapien
cacgaagggtgtattctcatgcaca

SEQ ID NO: 6083847 - DNA, 25 bp, Homo sapien
ccacagtttctgcacacaatgaggc

SEQ ID NO: 6083848 - DNA, 25 bp, Homo sapien
cgaagggtgtattctcatgcacaac

SEQ ID NO: 6083849 - DNA, 25 bp, Homo sapien
tctataggtctagcctttggaccaa

SEQ ID NO: 6083850 - DNA, 25 bp, Homo sapien
ccaccacagtttctgcacacaatga

SEQ ID NO: 6083851 - DNA, 25 bp, Homo sapien
caccacagtttctgcacacaatgag

SEQ ID NO: 6083852 - DNA, 25 bp, Homo sapien
gggtaccacgaagggtgtattctca

SEQ ID NO: 6083853 - DNA, 25 bp, Homo sapien
ccacgaagggtgtattctcatgcac

SEQ ID NO: 6083854 - DNA, 25 bp, Homo sapien
taccacgaagggtgtattctcatgc

SEQ ID NO: 6083855 - DNA, 25 bp, Homo sapien
aacatgaatgggaagctacagaagt

SEQ ID NO: 6083856 - DNA, 25 bp, Homo sapien
caactctataggtctagcctttgga

SEQ ID NO: 6083857 - DNA, 25 bp, Homo sapien
acatgaatgggaagctacagaagta

SEQ ID NO: 6083858 - DNA, 25 bp, Homo sapien
taggtatggttgcattctcgtcttc

SEQ ID NO: 6083859 - DNA, 25 bp, Homo sapien
gataatgaggtaaccgaaggcaatt

SEQ ID NO: 6083860 - DNA, 25 bp, Homo sapien
tctgcagtagataatgaggtaaccg

SEQ ID NO: 6083861 - DNA, 25 bp, Homo sapien
gaggtaaccgaaggcaattgtgctt

SEQ ID NO: 6083862 - DNA, 25 bp, Homo sapien
ttttctgcagtagataatgaggtaa

SEQ ID NO: 6083863 - DNA, 25 bp, Homo sapien
gaagcttatatactctttctcagag

SEQ ID NO: 6083864 - DNA, 25 bp, Homo sapien
cagtagataatgaggtaaccgaagg

SEQ ID NO: 6083865 - DNA, 25 bp, Homo sapien
aatttattaaggtacagggctgagg

SEQ ID NO: 6083866 - DNA, 25 bp, Homo sapien
atggttgcattctcgtcttcttttc

SEQ ID NO: 6083867 - DNA, 25 bp, Homo sapien
aaaagtccatctaggtatggttgca

SEQ ID NO: 6083868 - DNA, 25 bp, Homo sapien
aatgaggtaaccgaaggcaattgtg

SEQ ID NO: 6083869 - DNA, 25 bp, Homo sapien
ccatctaggtatggttgcattctcg

SEQ ID NO: 6083870 - DNA, 25 bp, Homo sapien
tggtcacaataatcttgaagggctt

SEQ ID NO: 6083871 - DNA, 25 bp, Homo sapien
gaagcgggtgacagtcaccaccatg

SEQ ID NO: 6083872 - DNA, 25 bp, Homo sapien
cacacgatggtgaggtagcaagctg

SEQ ID NO: 6083873 - DNA, 25 bp, Homo sapien
gctgtgtcccggaagacgagagatg

SEQ ID NO: 6083874 - DNA, 25 bp, Homo sapien
tagagcattgaccaggcgagagaag

SEQ ID NO: 6083875 - DNA, 25 bp, Homo sapien
gagtggcctgtatcttcacttagag

SEQ ID NO: 6083876 - DNA, 25 bp, Homo sapien
gaagcaggatattttcccatgcagg

SEQ ID NO: 6083877 - DNA, 25 bp, Homo sapien
tcttcacttagagcattgaccaggc

SEQ ID NO: 6083878 - DNA, 25 bp, Homo sapien
caggcggttgcgctgcagtttgcac

SEQ ID NO: 6083879 - DNA, 25 bp, Homo sapien
ccccacagggtccatttgggagtga

SEQ ID NO: 6083880 - DNA, 25 bp, Homo sapien
gcagctgttggcaatggcaagggca

SEQ ID NO: 6083881 - DNA, 25 bp, Homo sapien
gctgcagtttgcacacgatggtgag

SEQ ID NO: 6083882 - DNA, 25 bp, Homo sapien
tttccagtggtctaaggtgctttcc

SEQ ID NO: 6083883 - DNA, 25 bp, Homo sapien
tgaactcaggcttcgttttgttttg

SEQ ID NO: 6083884 - DNA, 25 bp, Homo sapien
tccagtggtctaaggtgctttcctg

SEQ ID NO: 6083885 - DNA, 25 bp, Homo sapien
gaactcaggcttcgttttgttttgc

SEQ ID NO: 6083886 - DNA, 25 bp, Homo sapien
gaatttccagtggtctaaggtgctt

SEQ ID NO: 6083887 - DNA, 25 bp, Homo sapien
ggaatttccagtggtctaaggtgct

SEQ ID NO: 6083888 - DNA, 25 bp, Homo sapien
aatttccagtggtctaaggtgcttt

SEQ ID NO: 6083889 - DNA, 25 bp, Homo sapien
agcagggagctttgctgttcaggat

SEQ ID NO: 6083890 - DNA, 25 bp, Homo sapien
tccaccaagtgctcgtccaactcgg

SEQ ID NO: 6083891 - DNA, 25 bp, Homo sapien
atttccagtggtctaaggtgctttc

SEQ ID NO: 6083892 - DNA, 25 bp, Homo sapien
ttccagtggtctaaggtgctttcct

SEQ ID NO: 6083893 - DNA, 25 bp, Homo sapien
ccagtggtctaaggtgctttcctga

SEQ ID NO: 6083894 - DNA, 25 bp, Homo sapien
tcacgtcagaactgaagtttcaaga

SEQ ID NO: 6083895 - DNA, 25 bp, Homo sapien
attgttttcacaatctttagcatct

SEQ ID NO: 6083896 - DNA, 25 bp, Homo sapien
gacagatatgatgatgccaaaaata

SEQ ID NO: 6083897 - DNA, 25 bp, Homo sapien
cagcattctaatgagtattgatgat

SEQ ID NO: 6083898 - DNA, 25 bp, Homo sapien
gattttttgcaatgaatagaaaagt

SEQ ID NO: 6083899 - DNA, 25 bp, Homo sapien
aagtccccatttcatttctctgtcc

SEQ ID NO: 6083900 - DNA, 25 bp, Homo sapien
tccgggccctctaataataattgta

SEQ ID NO: 6083901 - DNA, 25 bp, Homo sapien
atcattgcattgattaaaatgatca

SEQ ID NO: 6083902 - DNA, 25 bp, Homo sapien
tatgtctaatgagacttaaaattca

SEQ ID NO: 6083903 - DNA, 25 bp, Homo sapien
cttatgggaacatcattagattttt

SEQ ID NO: 6083904 - DNA, 25 bp, Homo sapien
tcattctacaatcactttcaaaaat

SEQ ID NO: 6083905 - DNA, 25 bp, Homo sapien
tttgcttgtactagtcctttctttc

SEQ ID NO: 6083906 - DNA, 25 bp, Homo sapien
aaatatcacttttattaatttgcct

SEQ ID NO: 6083907 - DNA, 25 bp, Homo sapien
tattccctttcttcaacattctaag

SEQ ID NO: 6083908 - DNA, 25 bp, Homo sapien
acatgtgttatcttatgggaacatc

SEQ ID NO: 6083909 - DNA, 25 bp, Homo sapien
ttcacaatctttagcatctatgtct

SEQ ID NO: 6083910 - DNA, 25 bp, Homo sapien
tctgaatgtaagaaagatacagcat

SEQ ID NO: 6083911 - DNA, 25 bp, Homo sapien
catttctctgtcccctggtttgaaa

SEQ ID NO: 6083912 - DNA, 25 bp, Homo sapien
cactttcaaaaatatcacttttatt

SEQ ID NO: 6083913 - DNA, 25 bp, Homo sapien
gacttaaaattcacctttcacgtca

SEQ ID NO: 6083914 - DNA, 25 bp, Homo sapien
aaaattcacctttcacgtcagaact

SEQ ID NO: 6083915 - DNA, 25 bp, Homo sapien
tgtgatacatgtactttctccctag

SEQ ID NO: 6083916 - DNA, 25 bp, Homo sapien
tttgcaatgaatagaaaagtaaagg

SEQ ID NO: 6083917 - DNA, 25 bp, Homo sapien
taaatacatgtgttatcttatggga

SEQ ID NO: 6083918 - DNA, 25 bp, Homo sapien
tgaagtttcaagatgtatatgtttt

SEQ ID NO: 6083919 - DNA, 25 bp, Homo sapien
aggaaattgttttcacaatctttag

SEQ ID NO: 6083920 - DNA, 25 bp, Homo sapien
acatgtactttctccctagaaattt

SEQ ID NO: 6083921 - DNA, 25 bp, Homo sapien
gattaaaatgatcattggacagata

SEQ ID NO: 6083922 - DNA, 25 bp, Homo sapien
ttcaagatgtatatgttttgttcaa

SEQ ID NO: 6083923 - DNA, 25 bp, Homo sapien
ttattaatttgcctaactactgatg

SEQ ID NO: 6083924 - DNA, 25 bp, Homo sapien
tgcgtcatttttattccctttcttc

SEQ ID NO: 6083925 - DNA, 25 bp, Homo sapien
cacctttcacgtcagaactgaagtt

SEQ ID NO: 6083926 - DNA, 25 bp, Homo sapien
atgtatatgttttgttcaaagccct

SEQ ID NO: 6083927 - DNA, 25 bp, Homo sapien
gttatcttatgggaacatcattaga

SEQ ID NO: 6083928 - DNA, 25 bp, Homo sapien
gagtattgatgatccgggccctcta

SEQ ID NO: 6083929 - DNA, 25 bp, Homo sapien
atgttttgttcaaagccctgcccat

SEQ ID NO: 6083930 - DNA, 25 bp, Homo sapien
ttgccacacttgtctgaatgtaaga

SEQ ID NO: 6083931 - DNA, 25 bp, Homo sapien
ggaacatcattagattttttgcaat

SEQ ID NO: 6083932 - DNA, 25 bp, Homo sapien
tcacttttattaatttgcctaacta

SEQ ID NO: 6083933 - DNA, 25 bp, Homo sapien
gaaaattcattctacaatcactttc

SEQ ID NO: 6083934 - DNA, 25 bp, Homo sapien
tcattggacagatatgatgatgcca

SEQ ID NO: 6083935 - DNA, 25 bp, Homo sapien
tcattagattttttgcaatgaatag

SEQ ID NO: 6083936 - DNA, 25 bp, Homo sapien
cacttgtctgaatgtaagaaagata

SEQ ID NO: 6083937 - DNA, 25 bp, Homo sapien
ctggtttgaaactgttctttgacac

SEQ ID NO: 6083938 - DNA, 25 bp, Homo sapien
taatgagacttaaaattcacctttc

SEQ ID NO: 6083939 - DNA, 25 bp, Homo sapien
tgacccttcgctggcacactaaatt

SEQ ID NO: 6083940 - DNA, 25 bp, Homo sapien
agaaattttgcttgtactagtcctt

SEQ ID NO: 6083941 - DNA, 25 bp, Homo sapien
ttcgctggcacactaaattgtgata

SEQ ID NO: 6083942 - DNA, 25 bp, Homo sapien
ggcacactaaattgtgatacatgta

SEQ ID NO: 6083943 - DNA, 25 bp, Homo sapien
ctgtcccctggtttgaaactgttct

SEQ ID NO: 6083944 - DNA, 25 bp, Homo sapien
ctccctagaaattttgcttgtacta

SEQ ID NO: 6083945 - DNA, 25 bp, Homo sapien
cctttcttcaacattctaagaaaat

SEQ ID NO: 6083946 - DNA, 25 bp, Homo sapien
tacaatcactttcaaaaatatcact

SEQ ID NO: 6083947 - DNA, 25 bp, Homo sapien
tgttctttgacactgacccttcgct

SEQ ID NO: 6083948 - DNA, 25 bp, Homo sapien
tgtactagtcctttctttcgcatca

SEQ ID NO: 6083949 - DNA, 25 bp, Homo sapien
tttattactcttttaaatacatgtg

SEQ ID NO: 6083950 - DNA, 25 bp, Homo sapien
actttctccctagaaattttgcttg

SEQ ID NO: 6083951 - DNA, 25 bp, Homo sapien
tcaacattctaagaaaattcattct

SEQ ID NO: 6083952 - DNA, 25 bp, Homo sapien
atgaatagaaaagtaaaggaaattg

SEQ ID NO: 6083953 - DNA, 25 bp, Homo sapien
aattacacagtaattttattactct

SEQ ID NO: 6083954 - DNA, 25 bp, Homo sapien
tgagttaaagtccccatttcatttc

SEQ ID NO: 6083955 - DNA, 25 bp, Homo sapien
tctaatgagtattgatgatccgggc

SEQ ID NO: 6083956 - DNA, 25 bp, Homo sapien
atcagcatcattgcattgattaaaa

SEQ ID NO: 6083957 - DNA, 25 bp, Homo sapien
aagatacagcattctaatgagtatt

SEQ ID NO: 6083958 - DNA, 25 bp, Homo sapien
tgaaactgttctttgacactgaccc

SEQ ID NO: 6083959 - DNA, 25 bp, Homo sapien
cagaactgaagtttcaagatgtata

SEQ ID NO: 6083960 - DNA, 25 bp, Homo sapien
tctttcgcatcattgccacacttgt

SEQ ID NO: 6083961 - DNA, 25 bp, Homo sapien
ccctctaataataattgtatcagca

SEQ ID NO: 6083962 - DNA, 25 bp, Homo sapien
cctaactactgatggtaagagtata

SEQ ID NO: 6083963 - DNA, 25 bp, Homo sapien
tactgatggtaagagtatacaatta

SEQ ID NO: 6083964 - DNA, 25 bp, Homo sapien
gtaagaaagatacagcattctaatg

SEQ ID NO: 6083965 - DNA, 25 bp, Homo sapien
actcttttaaatacatgtgttatct

SEQ ID NO: 6083966 - DNA, 25 bp, Homo sapien
tgatgatccgggccctctaataata

SEQ ID NO: 6083967 - DNA, 25 bp, Homo sapien
aataataattgtatcagcatcattg

SEQ ID NO: 6083968 - DNA, 25 bp, Homo sapien
agtcctttctttcgcatcattgcca

SEQ ID NO: 6083969 - DNA, 25 bp, Homo sapien
agcatctatgtctaatgagacttaa

SEQ ID NO: 6083970 - DNA, 25 bp, Homo sapien
ttgacactgacccttcgctggcaca

SEQ ID NO: 6083971 - DNA, 25 bp, Homo sapien
tggtaagagtatacaattacacagt

SEQ ID NO: 6083972 - DNA, 25 bp, Homo sapien
aaatgatcattggacagatatgatg

SEQ ID NO: 6083973 - DNA, 25 bp, Homo sapien
gagtatacaattacacagtaatttt

SEQ ID NO: 6083974 - DNA, 25 bp, Homo sapien
catttttattccctttcttcaacat

SEQ ID NO: 6083975 - DNA, 25 bp, Homo sapien
gcatcattgccacacttgtctgaat

SEQ ID NO: 6083976 - DNA, 25 bp, Homo sapien
aatttgcctaactactgatggtaag

SEQ ID NO: 6083977 - DNA, 25 bp, Homo sapien
aattgtatcagcatcattgcattga

SEQ ID NO: 6083978 - DNA, 25 bp, Homo sapien
ttctaagaaaattcattctacaatc

SEQ ID NO: 6083979 - DNA, 25 bp, Homo sapien
ctaaattgtgatacatgtactttct

SEQ ID NO: 6083980 - DNA, 25 bp, Homo sapien
atctttagcatctatgtctaatgag

SEQ ID NO: 6083981 - DNA, 25 bp, Homo sapien
ccatttcatttctctgtcccctggt

SEQ ID NO: 6083982 - DNA, 25 bp, Homo sapien
accgggttggccacgctgttgaaga

SEQ ID NO: 6083983 - DNA, 25 bp, Homo sapien
gatcgccagcggcaccaggaaggcc

SEQ ID NO: 6083984 - DNA, 25 bp, Homo sapien
accaggcgcacgaagcggcctggcc

SEQ ID NO: 6083985 - DNA, 25 bp, Homo sapien
gcgccgcagcttgcgcagcatgtcg

SEQ ID NO: 6083986 - DNA, 25 bp, Homo sapien
ggccgcggtgctgcaaccgcaggct

SEQ ID NO: 6083987 - DNA, 25 bp, Homo sapien
tcacggccgcgtggctcgaggcgat

SEQ ID NO: 6083988 - DNA, 25 bp, Homo sapien
caggctggtgacgaagggcagcccg

SEQ ID NO: 6083989 - DNA, 25 bp, Homo sapien
cgagttgcacgtggcatcgcggtca

SEQ ID NO: 6083990 - DNA, 25 bp, Homo sapien
ggctgaacacgtggtagggccccca

SEQ ID NO: 6083991 - DNA, 25 bp, Homo sapien
agcgagcgccgcagcttgcgcagca

SEQ ID NO: 6083992 - DNA, 25 bp, Homo sapien
ttgcacgtggcatcgcggtcaggcc

SEQ ID NO: 6083993 - DNA, 25 bp, Homo sapien
tcgaggcgatgatcgccagcggcac

SEQ ID NO: 6083994 - DNA, 25 bp, Homo sapien
ctcaggctccaaacaatcttgaagg

SEQ ID NO: 6083995 - DNA, 25 bp, Homo sapien
tgaagctctcacaggagacggccgt

SEQ ID NO: 6083996 - DNA, 25 bp, Homo sapien
tgggcaggtagcatgtgatgaacac

SEQ ID NO: 6083997 - DNA, 25 bp, Homo sapien
tgatgcaactcctgcgaccgaggtt

SEQ ID NO: 6083998 - DNA, 25 bp, Homo sapien
tccagctggaacatgatgtcatgcc

SEQ ID NO: 6083999 - DNA, 25 bp, Homo sapien
gacggccgtctcttgcacgcagaga

SEQ ID NO: 6084000 - DNA, 25 bp, Homo sapien
gctgcttgggtttcagactgcagat

SEQ ID NO: 6084001 - DNA, 25 bp, Homo sapien
gccattggccgactccatgatgaag

SEQ ID NO: 6084002 - DNA, 25 bp, Homo sapien
gaaatagagtctagcagacacgctg

SEQ ID NO: 6084003 - DNA, 25 bp, Homo sapien
tcgaaattggcatctcttccggcct

SEQ ID NO: 6084004 - DNA, 25 bp, Homo sapien
ctgagggttatgtgcagggccccat

SEQ ID NO: 6084005 - DNA, 25 bp, Homo sapien
gagggcaccgtccagaggaaataga

SEQ ID NO: 6084006 - DNA, 25 bp, Homo sapien
ctgaaccctcctcgccgtgggcgcc

SEQ ID NO: 6084007 - DNA, 25 bp, Homo sapien
gttttcgtggtccacacagagtaag

SEQ ID NO: 6084008 - DNA, 25 bp, Homo sapien
ctcatcttcatagccggtcggaagt

SEQ ID NO: 6084009 - DNA, 25 bp, Homo sapien
agggccttccacatccgagctgaac

SEQ ID NO: 6084010 - DNA, 25 bp, Homo sapien
cgcgacttgaggaacacgttgagca

SEQ ID NO: 6084011 - DNA, 25 bp, Homo sapien
cggccagcggccgagagacccgaga

SEQ ID NO: 6084012 - DNA, 25 bp, Homo sapien
gaagatcagagtaatggtcgccatc

SEQ ID NO: 6084013 - DNA, 25 bp, Homo sapien
tcacatgagggttgtggaagagggt

SEQ ID NO: 6084014 - DNA, 25 bp, Homo sapien
gggaagggcttggtcctgatgcgca

SEQ ID NO: 6084015 - DNA, 25 bp, Homo sapien
tgagggttgtggaagagggtatggt

SEQ ID NO: 6084016 - DNA, 25 bp, Homo sapien
ggtcctgatgcgcaggtgagggtag

SEQ ID NO: 6084017 - DNA, 25 bp, Homo sapien
caacgaacgggggtctctcgtgctc

SEQ ID NO: 6084018 - DNA, 25 bp, Homo sapien
cctcctcgccgtgggcgccactcga

SEQ ID NO: 6084019 - DNA, 25 bp, Homo sapien
actcgacattggccgcctcaacccg

SEQ ID NO: 6084020 - DNA, 25 bp, Homo sapien
ttcatagccggtcggaagtgggttc

SEQ ID NO: 6084021 - DNA, 25 bp, Homo sapien
gaacgggggtctctcgtgctcttcg

SEQ ID NO: 6084022 - DNA, 25 bp, Homo sapien
ctgaggaaaggagacacgagcttag

SEQ ID NO: 6084023 - DNA, 25 bp, Homo sapien
atccgagctgaaccctcctcgccgt

SEQ ID NO: 6084024 - DNA, 25 bp, Homo sapien
gatgcgcaggtgagggtaggcaacg

SEQ ID NO: 6084025 - DNA, 25 bp, Homo sapien
cccgggcagcgccacgaagtaggtg

SEQ ID NO: 6084026 - DNA, 25 bp, Homo sapien
tcgtgccgcgacttgaggaacacgt

SEQ ID NO: 6084027 - DNA, 25 bp, Homo sapien
gggatggaagatcagagtaatggtc

SEQ ID NO: 6084028 - DNA, 25 bp, Homo sapien
cccaggggaagggcttggtcctgat

SEQ ID NO: 6084029 - DNA, 25 bp, Homo sapien
gcatccaaagggttttcgtggtcca

SEQ ID NO: 6084030 - DNA, 25 bp, Homo sapien
cagagtaatggtcgccatctgagga

SEQ ID NO: 6084031 - DNA, 25 bp, Homo sapien
tgggttcacatgagggttgtggaag

SEQ ID NO: 6084032 - DNA, 25 bp, Homo sapien
agacgctgacagcaccgccgctcgt

SEQ ID NO: 6084033 - DNA, 25 bp, Homo sapien
ttccacatccgagctgaaccctcct

SEQ ID NO: 6084034 - DNA, 25 bp, Homo sapien
cgccatctgaggaaaggagacacga

SEQ ID NO: 6084035 - DNA, 25 bp, Homo sapien
gaggccaggttctctttactcatct

SEQ ID NO: 6084036 - DNA, 25 bp, Homo sapien
cagtgctgtggtccctttgttgcct

SEQ ID NO: 6084037 - DNA, 25 bp, Homo sapien
cagcggccgagagacccgagacgct

SEQ ID NO: 6084038 - DNA, 25 bp, Homo sapien
ttacaagcagaagggatggaagatc

SEQ ID NO: 6084039 - DNA, 25 bp, Homo sapien
agagtaagggtccaaaaccagtgct

SEQ ID NO: 6084040 - DNA, 25 bp, Homo sapien
ctcctcttacaagcagaagggatgg

SEQ ID NO: 6084041 - DNA, 25 bp, Homo sapien
agggtccaaaaccagtgctgtggtc

SEQ ID NO: 6084042 - DNA, 25 bp, Homo sapien
cacgaagtaggtgagggccttccac

SEQ ID NO: 6084043 - DNA, 25 bp, Homo sapien
gccgtgggcgccactcgacattggc

SEQ ID NO: 6084044 - DNA, 25 bp, Homo sapien
cagcgccacgaagtaggtgagggcc

SEQ ID NO: 6084045 - DNA, 25 bp, Homo sapien
aacacgttgagcatgctcactccca

SEQ ID NO: 6084046 - DNA, 25 bp, Homo sapien
caaaaccagtgctgtggtccctttg

SEQ ID NO: 6084047 - DNA, 25 bp, Homo sapien
tcccaccccgggcagcgccacgaag

SEQ ID NO: 6084048 - DNA, 25 bp, Homo sapien
agcttagcatccaaagggttttcgt

SEQ ID NO: 6084049 - DNA, 25 bp, Homo sapien
cggaagtgggttcacatgagggttg

SEQ ID NO: 6084050 - DNA, 25 bp, Homo sapien
gacacgagcttagcatccaaagggt

SEQ ID NO: 6084051 - DNA, 25 bp, Homo sapien
gggcttggtcctgatgcgcaggtga

SEQ ID NO: 6084052 - DNA, 25 bp, Homo sapien
tgctcactcccaccccgggcagcgc

SEQ ID NO: 6084053 - DNA, 25 bp, Homo sapien
cagaagggatggaagatcagagtaa

SEQ ID NO: 6084054 - DNA, 25 bp, Homo sapien
taggtgagggccttccacatccgag

SEQ ID NO: 6084055 - DNA, 25 bp, Homo sapien
tctcgtgctcttcgtgccgcgactt

SEQ ID NO: 6084056 - DNA, 25 bp, Homo sapien
caaagggttttcgtggtccacacag

SEQ ID NO: 6084057 - DNA, 25 bp, Homo sapien
tgtggtccctttgttgcctggggga

SEQ ID NO: 6084058 - DNA, 25 bp, Homo sapien
gccggtcggaagtgggttcacatga

SEQ ID NO: 6084059 - DNA, 25 bp, Homo sapien
ttgaggaacacgttgagcatgctca

SEQ ID NO: 6084060 - DNA, 25 bp, Homo sapien
gtggtccacacagagtaagggtcca

SEQ ID NO: 6084061 - DNA, 25 bp, Homo sapien
aggttctctttactcatcttcatag

SEQ ID NO: 6084062 - DNA, 25 bp, Homo sapien
tgcctgggggaggccaggttctctt

SEQ ID NO: 6084063 - DNA, 25 bp, Homo sapien
tgagcatgctcactcccaccccggg

SEQ ID NO: 6084064 - DNA, 25 bp, Homo sapien
tctttactcatcttcatagccggtc

SEQ ID NO: 6084065 - DNA, 25 bp, Homo sapien
caggtgagggtaggcaacgaacggg

SEQ ID NO: 6084066 - DNA, 25 bp, Homo sapien
tggaagagggtatggttaccgtctc

SEQ ID NO: 6084067 - DNA, 25 bp, Homo sapien
cacacagagtaagggtccaaaacca

SEQ ID NO: 6084068 - DNA, 25 bp, Homo sapien
cattggccgcctcaacccggggagg

SEQ ID NO: 6084069 - DNA, 25 bp, Homo sapien
aaaggagacacgagcttagcatcca

SEQ ID NO: 6084070 - DNA, 25 bp, Homo sapien
ggcgccactcgacattggccgcctc

SEQ ID NO: 6084071 - DNA, 25 bp, Homo sapien
tgctcttcgtgccgcgacttgagga

SEQ ID NO: 6084072 - DNA, 25 bp, Homo sapien
gacccgagacgctgacagcaccgcc

SEQ ID NO: 6084073 - DNA, 25 bp, Homo sapien
cgagagacccgagacgctgacagca

SEQ ID NO: 6084074 - DNA, 25 bp, Homo sapien
gggtctctcgtgctcttcgtgccgc

SEQ ID NO: 6084075 - DNA, 25 bp, Homo sapien
cctttgttgcctgggggaggccagg

SEQ ID NO: 6084076 - DNA, 25 bp, Homo sapien
aatggtcgccatctgaggaaaggag

SEQ ID NO: 6084077 - DNA, 25 bp, Homo sapien
aggttgaagtgtgcattgccacctc

SEQ ID NO: 6084078 - DNA, 25 bp, Homo sapien
agtgtgcattgccacctcagtggta

SEQ ID NO: 6084079 - DNA, 25 bp, Homo sapien
gttgaagtgtgcattgccacctcag

SEQ ID NO: 6084080 - DNA, 25 bp, Homo sapien
ggttgaagtgtgcattgccacctca

SEQ ID NO: 6084081 - DNA, 25 bp, Homo sapien
gtggtacttaatgctgatatgctca

SEQ ID NO: 6084082 - DNA, 25 bp, Homo sapien
gtgtgcattgccacctcagtggtac

SEQ ID NO: 6084083 - DNA, 25 bp, Homo sapien
ctcagtggtacttaatgctgatatg

SEQ ID NO: 6084084 - DNA, 25 bp, Homo sapien
tggacaagttgtcccatttctccat

SEQ ID NO: 6084085 - DNA, 25 bp, Homo sapien
gacaagttgtcccatttctccattt

SEQ ID NO: 6084086 - DNA, 25 bp, Homo sapien
ggacaagttgtcccatttctccatt

SEQ ID NO: 6084087 - DNA, 25 bp, Homo sapien
tgccacaccagaggtactccatgct

SEQ ID NO: 6084088 - DNA, 25 bp, Homo sapien
cagaggtactccatgctgatatgct

SEQ ID NO: 6084089 - DNA, 25 bp, Homo sapien
gcattgccacaccagaggtactcca

SEQ ID NO: 6084090 - DNA, 25 bp, Homo sapien
ccacaccagaggtactccatgctga

SEQ ID NO: 6084091 - DNA, 25 bp, Homo sapien
cattgccacaccagaggtactccat

SEQ ID NO: 6084092 - DNA, 25 bp, Homo sapien
ttgccacaccagaggtactccatgc

SEQ ID NO: 6084093 - DNA, 25 bp, Homo sapien
caccagaggtactccatgctgatat

SEQ ID NO: 6084094 - DNA, 25 bp, Homo sapien
gaggtactccatgctgatatgctca

SEQ ID NO: 6084095 - DNA, 25 bp, Homo sapien
cacaccagaggtactccatgctgat

SEQ ID NO: 6084096 - DNA, 25 bp, Homo sapien
ccagaggtactccatgctgatatgc

SEQ ID NO: 6084097 - DNA, 25 bp, Homo sapien
attgccacaccagaggtactccatg

SEQ ID NO: 6084098 - DNA, 25 bp, Homo sapien
gccacaccagaggtactccatgctg

SEQ ID NO: 6084099 - DNA, 25 bp, Homo sapien
gaccgtcttttgtacgttgagctcg

SEQ ID NO: 6084100 - DNA, 25 bp, Homo sapien
caagaagagctcgtgtacgtcgcgg

SEQ ID NO: 6084101 - DNA, 25 bp, Homo sapien
cgcggtggcggctctcgatctcgtt

SEQ ID NO: 6084102 - DNA, 25 bp, Homo sapien
atgtcctcgatctggtcgcccgaga

SEQ ID NO: 6084103 - DNA, 25 bp, Homo sapien
tgagctcgatgacgttcagggtgtc

SEQ ID NO: 6084104 - DNA, 25 bp, Homo sapien
gatgcggatcttgcagttgtcgcgc

SEQ ID NO: 6084105 - DNA, 25 bp, Homo sapien
ttggtgtcgcgcttgatgctgctga

SEQ ID NO: 6084106 - DNA, 25 bp, Homo sapien
agttgtcgcgctgcttcatctcggc

SEQ ID NO: 6084107 - DNA, 25 bp, Homo sapien
ttaccctgctcgaacatgtcctcga

SEQ ID NO: 6084108 - DNA, 25 bp, Homo sapien
ttcacgtcggccagcaagttctcgg

SEQ ID NO: 6084109 - DNA, 25 bp, Homo sapien
gcgcgttgtactgcgcccgcgaaat

SEQ ID NO: 6084110 - DNA, 25 bp, Homo sapien
gcaagttctcggaaaacacgtccca

SEQ ID NO: 6084111 - DNA, 25 bp, Homo sapien
tgaacatgtccaggtccaagtcgct

SEQ ID NO: 6084112 - DNA, 25 bp, Homo sapien
catgagttcactacggataatggac

SEQ ID NO: 6084113 - DNA, 25 bp, Homo sapien
tggactcactcaagcccatgttgct

SEQ ID NO: 6084114 - DNA, 25 bp, Homo sapien
cccatgacgggcaggtttgcactag

SEQ ID NO: 6084115 - DNA, 25 bp, Homo sapien
tccgagagggtttgcatagactggc

SEQ ID NO: 6084116 - DNA, 25 bp, Homo sapien
catagactggctgacaggagactgc

SEQ ID NO: 6084117 - DNA, 25 bp, Homo sapien
tgacagaattcgacaaggcacggct

SEQ ID NO: 6084118 - DNA, 25 bp, Homo sapien
aaaggacatcatcggatcattgcga

SEQ ID NO: 6084119 - DNA, 25 bp, Homo sapien
cattgcgaagcatcacgttccggcg

SEQ ID NO: 6084120 - DNA, 25 bp, Homo sapien
agcggtgctggcctgagacatcaag

SEQ ID NO: 6084121 - DNA, 25 bp, Homo sapien
tgagatgaggcctgcttagcaccag

SEQ ID NO: 6084122 - DNA, 25 bp, Homo sapien
ttccggcgggaattctgggcagaca

SEQ ID NO: 6084123 - DNA, 25 bp, Homo sapien
tgcaacaatgtcaggatcaaaatcc

SEQ ID NO: 6084124 - DNA, 25 bp, Homo sapien
tcaggatcaaaatccagtcgaggtc

SEQ ID NO: 6084125 - DNA, 25 bp, Homo sapien
catcaagagctgcaacaatgtcagg

SEQ ID NO: 6084126 - DNA, 25 bp, Homo sapien
gagctgctttatttaacaatccaac

SEQ ID NO: 6084127 - DNA, 25 bp, Homo sapien
tcaaaatcatcatcaagagctgcaa

SEQ ID NO: 6084128 - DNA, 25 bp, Homo sapien
gagctgcaacaatgtcaggatcaaa

SEQ ID NO: 6084129 - DNA, 25 bp, Homo sapien
tcatcaagagctgcaacaatgtcag

SEQ ID NO: 6084130 - DNA, 25 bp, Homo sapien
aatgtcaggatcaaaatccagtcga

SEQ ID NO: 6084131 - DNA, 25 bp, Homo sapien
tgtcaggatcaaaatccagtcgagg

SEQ ID NO: 6084132 - DNA, 25 bp, Homo sapien
aaatcatcatcaagagctgcaacaa

SEQ ID NO: 6084133 - DNA, 25 bp, Homo sapien
caagagctgcaacaatgtcaggatc

SEQ ID NO: 6084134 - DNA, 25 bp, Homo sapien
tcatcatcaagagctgcaacaatgt

SEQ ID NO: 6084135 - DNA, 25 bp, Homo sapien
caagcactggaattaagttgccttc

SEQ ID NO: 6084136 - DNA, 25 bp, Homo sapien
gcagctcttgatgatgattttgact

SEQ ID NO: 6084137 - DNA, 25 bp, Homo sapien
tttagcagcagatgagagtgcaccc

SEQ ID NO: 6084138 - DNA, 25 bp, Homo sapien
gaaacgctagtaattccaagcactg

SEQ ID NO: 6084139 - DNA, 25 bp, Homo sapien
tctttgatgacgactatgactacct

SEQ ID NO: 6084140 - DNA, 25 bp, Homo sapien
gattgttaaataaagcagcaccagc

SEQ ID NO: 6084141 - DNA, 25 bp, Homo sapien
gatgagagtgcaccccagagggttc

SEQ ID NO: 6084142 - DNA, 25 bp, Homo sapien
gagggttctattgcccgcacaaaaa

SEQ ID NO: 6084143 - DNA, 25 bp, Homo sapien
ttccctcaagtaccttcagtgcaca

SEQ ID NO: 6084144 - DNA, 25 bp, Homo sapien
gacaatgaagaaaggcgagcagaac

SEQ ID NO: 6084145 - DNA, 25 bp, Homo sapien
actatgactacctgcagcacctgaa

SEQ ID NO: 6084146 - DNA, 25 bp, Homo sapien
gcttcaggacctcgactggattttg

SEQ ID NO: 6084147 - DNA, 25 bp, Homo sapien
tcctaggcacagaattgactataag

SEQ ID NO: 6084148 - DNA, 25 bp, Homo sapien
tatttacacaaagcaccgatcaaca

SEQ ID NO: 6084149 - DNA, 25 bp, Homo sapien
tgaactgtccttcttaaggcccctc

SEQ ID NO: 6084150 - DNA, 25 bp, Homo sapien
ggaaagtcttgaagtgaaagcaatt

SEQ ID NO: 6084151 - DNA, 25 bp, Homo sapien
gcacaaagcagtaaagatccttccc

SEQ ID NO: 6084152 - DNA, 25 bp, Homo sapien
tgttccctggcaaaatcctaggcac

SEQ ID NO: 6084153 - DNA, 25 bp, Homo sapien
tctgcagagacaatgcaacaagaat

SEQ ID NO: 6084154 - DNA, 25 bp, Homo sapien
gtagtgcttttcctagtcagtgaac

SEQ ID NO: 6084155 - DNA, 25 bp, Homo sapien
ggaaaggccctaatgtcaaatggaa

SEQ ID NO: 6084156 - DNA, 25 bp, Homo sapien
gatccttcccaatgcactaatgctg

SEQ ID NO: 6084157 - DNA, 25 bp, Homo sapien
taacaccttctagagttttagtgaa

SEQ ID NO: 6084158 - DNA, 25 bp, Homo sapien
taaactcttggctagacattaactt

SEQ ID NO: 6084159 - DNA, 25 bp, Homo sapien
tttcttgccaacagcgaatggtggt

SEQ ID NO: 6084160 - DNA, 25 bp, Homo sapien
tatttcctgagcatgctgactaaac

SEQ ID NO: 6084161 - DNA, 25 bp, Homo sapien
tagcgtccgcgccttgatcgaaggc

SEQ ID NO: 6084162 - DNA, 25 bp, Homo sapien
catgacgcccacgatgatggtgagg

SEQ ID NO: 6084163 - DNA, 25 bp, Homo sapien
cgaatggtggtccatgaagagtacc

SEQ ID NO: 6084164 - DNA, 25 bp, Homo sapien
catgaagagtaccttgagcatcatc

SEQ ID NO: 6084165 - DNA, 25 bp, Homo sapien
cccctcgttgatgtggtcgtagata

SEQ ID NO: 6084166 - DNA, 25 bp, Homo sapien
cgaaggcgcgctcgaagaacatgac

SEQ ID NO: 6084167 - DNA, 25 bp, Homo sapien
tggtcgtagatagcgtccgcgcctt

SEQ ID NO: 6084168 - DNA, 25 bp, Homo sapien
tgatgtggtcgtagatagcgtccgc

SEQ ID NO: 6084169 - DNA, 25 bp, Homo sapien
ttcgaagtcaacgtcgcggccgcca

SEQ ID NO: 6084170 - DNA, 25 bp, Homo sapien
cgaagaacatgacgcccacgatgat

SEQ ID NO: 6084171 - DNA, 25 bp, Homo sapien
gaatagctccatttaacaccagcca

SEQ ID NO: 6084172 - DNA, 25 bp, Homo sapien
atgtctccgcgtctcaggcacttct

SEQ ID NO: 6084173 - DNA, 25 bp, Homo sapien
aaccctgtggtgactgcggcacacc

SEQ ID NO: 6084174 - DNA, 25 bp, Homo sapien
tgaggagagcgcgtcactgctattg

SEQ ID NO: 6084175 - DNA, 25 bp, Homo sapien
tactggctctaagctttcatcactt

SEQ ID NO: 6084176 - DNA, 25 bp, Homo sapien
gagcgcgtcactgctattgaatagc

SEQ ID NO: 6084177 - DNA, 25 bp, Homo sapien
taaccacaaagtataaatactggct

SEQ ID NO: 6084178 - DNA, 25 bp, Homo sapien
cgcgtctcaggcacttctgtgaaat

SEQ ID NO: 6084179 - DNA, 25 bp, Homo sapien
gccttggcccaagagtggcatttgt

SEQ ID NO: 6084180 - DNA, 25 bp, Homo sapien
tggctgttgccattctttcgtaggg

SEQ ID NO: 6084181 - DNA, 25 bp, Homo sapien
aaacctcagctgatgttatctgtgg

SEQ ID NO: 6084182 - DNA, 25 bp, Homo sapien
ggaccttgagctgcgtgtttgggag

SEQ ID NO: 6084183 - DNA, 25 bp, Homo sapien
tttccagtggtctaaggtgctttcc

SEQ ID NO: 6084184 - DNA, 25 bp, Homo sapien
tccaccaagtgctcgtccaactcgg

SEQ ID NO: 6084185 - DNA, 25 bp, Homo sapien
tgaactcaggcttcgttttgttttg

SEQ ID NO: 6084186 - DNA, 25 bp, Homo sapien
tccagtggtctaaggtgctttcctg

SEQ ID NO: 6084187 - DNA, 25 bp, Homo sapien
gaactcaggcttcgttttgttttgc

SEQ ID NO: 6084188 - DNA, 25 bp, Homo sapien
agcagggagctttgctgttcaggat

SEQ ID NO: 6084189 - DNA, 25 bp, Homo sapien
gaatttccagtggtctaaggtgctt

SEQ ID NO: 6084190 - DNA, 25 bp, Homo sapien
ttccagtggtctaaggtgctttcct

SEQ ID NO: 6084191 - DNA, 25 bp, Homo sapien
ggaatttccagtggtctaaggtgct

SEQ ID NO: 6084192 - DNA, 25 bp, Homo sapien
aatttccagtggtctaaggtgcttt

SEQ ID NO: 6084193 - DNA, 25 bp, Homo sapien
ccagtggtctaaggtgctttcctga

SEQ ID NO: 6084194 - DNA, 25 bp, Homo sapien
atttccagtggtctaaggtgctttc

SEQ ID NO: 6084195 - DNA, 25 bp, Homo sapien
cagccaggtgtagcttgggcttttg

SEQ ID NO: 6084196 - DNA, 25 bp, Homo sapien
ttttggagccaacgagctgctgctg

SEQ ID NO: 6084197 - DNA, 25 bp, Homo sapien
gtgtcctgggcaacggaaggaaaca

SEQ ID NO: 6084198 - DNA, 25 bp, Homo sapien
atctggtcatcaggccaaggtcgaa

SEQ ID NO: 6084199 - DNA, 25 bp, Homo sapien
gttttggagccaacgagctgctgct

SEQ ID NO: 6084200 - DNA, 25 bp, Homo sapien
tttggagccaacgagctgctgctgt

SEQ ID NO: 6084201 - DNA, 25 bp, Homo sapien
tggttttggagccaacgagctgctg

SEQ ID NO: 6084202 - DNA, 25 bp, Homo sapien
tgcagccaggtgtagcttgggcttt

SEQ ID NO: 6084203 - DNA, 25 bp, Homo sapien
tcatcaggccaaggtcgaaagggcg

SEQ ID NO: 6084204 - DNA, 25 bp, Homo sapien
tggtcatcaggccaaggtcgaaagg

SEQ ID NO: 6084205 - DNA, 25 bp, Homo sapien
tatttccaactcgagggtggggatg

SEQ ID NO: 6084206 - DNA, 25 bp, Homo sapien
tggagccaacgagctgctgctgttt

SEQ ID NO: 6084207 - DNA, 25 bp, Homo sapien
gttgccctggcatgatctcagctca

SEQ ID NO: 6084208 - DNA, 25 bp, Homo sapien
caaaaatagagatgggggtctcacc

SEQ ID NO: 6084209 - DNA, 25 bp, Homo sapien
gaaaccatgggctgaagtgatcctt

SEQ ID NO: 6084210 - DNA, 25 bp, Homo sapien
gctggtgggaatattttaacttgca

SEQ ID NO: 6084211 - DNA, 25 bp, Homo sapien
ccatgggctgaagtgatccttttgc

SEQ ID NO: 6084212 - DNA, 25 bp, Homo sapien
tcagctcactgcaagactctgtctc

SEQ ID NO: 6084213 - DNA, 25 bp, Homo sapien
tattattttcaaaaatagagatggg

SEQ ID NO: 6084214 - DNA, 25 bp, Homo sapien
ggtcttgaaaccatgggctgaagtg

SEQ ID NO: 6084215 - DNA, 25 bp, Homo sapien
caccacacccagctggtgggaatat

SEQ ID NO: 6084216 - DNA, 25 bp, Homo sapien
caggctggtcttgaaaccatgggct

SEQ ID NO: 6084217 - DNA, 25 bp, Homo sapien
tgaagtgatccttttgcctcggcct

SEQ ID NO: 6084218 - DNA, 25 bp, Homo sapien
cacccagctggtgggaatattttaa

SEQ ID NO: 6084219 - DNA, 25 bp, Homo sapien
ccaagccttccctctcaagttgagt

SEQ ID NO: 6084220 - DNA, 25 bp, Homo sapien
acataacacgctgagacaaagaggg

SEQ ID NO: 6084221 - DNA, 25 bp, Homo sapien
tctggtggagttctcagggataacc

SEQ ID NO: 6084222 - DNA, 25 bp, Homo sapien
gaggcagtgcttggatcagccctga

SEQ ID NO: 6084223 - DNA, 25 bp, Homo sapien
aaataggtcattgcacataacacgc

SEQ ID NO: 6084224 - DNA, 25 bp, Homo sapien
tgggacctccagaccacatggtgtt

SEQ ID NO: 6084225 - DNA, 25 bp, Homo sapien
ctgctgtagttggaatgggtttacc

SEQ ID NO: 6084226 - DNA, 25 bp, Homo sapien
cagtgagtacaaaccaattgcagga

SEQ ID NO: 6084227 - DNA, 25 bp, Homo sapien
tcatgtctaatgagcaccggccaaa

SEQ ID NO: 6084228 - DNA, 25 bp, Homo sapien
gacacagagtgaggactcatgtcta

SEQ ID NO: 6084229 - DNA, 25 bp, Homo sapien
tcccaagtctggtggagttctcagg

SEQ ID NO: 6084230 - DNA, 25 bp, Homo sapien
ttggatcagccctgaactgctgtag

SEQ ID NO: 6084231 - DNA, 25 bp, Homo sapien
cctagtcactagtttggagcaggtc

SEQ ID NO: 6084232 - DNA, 25 bp, Homo sapien
agcagacaacagatgcatagttggg

SEQ ID NO: 6084233 - DNA, 25 bp, Homo sapien
ggacgtcgccccgttagcatgctgc

SEQ ID NO: 6084234 - DNA, 25 bp, Homo sapien
ttctcccagttggattaggacgtcg

SEQ ID NO: 6084235 - DNA, 25 bp, Homo sapien
cactagtttggagcaggtctagaag

SEQ ID NO: 6084236 - DNA, 25 bp, Homo sapien
gcaggtgctctagaagagattagaa

SEQ ID NO: 6084237 - DNA, 25 bp, Homo sapien
ccgcagacagtgagttaggggatca

SEQ ID NO: 6084238 - DNA, 25 bp, Homo sapien
ggatagcaggtgctctagaagagat

SEQ ID NO: 6084239 - DNA, 25 bp, Homo sapien
caggatagaggttgcaggctgaggg

SEQ ID NO: 6084240 - DNA, 25 bp, Homo sapien
aattctatcctagtcactagtttgg

SEQ ID NO: 6084241 - DNA, 25 bp, Homo sapien
tggatccccacatttcagtctcaga

SEQ ID NO: 6084242 - DNA, 25 bp, Homo sapien
tcccagttggattaggacgtcgccc

SEQ ID NO: 6084243 - DNA, 25 bp, Homo sapien
agaacaatcatttgcagtctcactg

SEQ ID NO: 6084244 - DNA, 25 bp, Homo sapien
tattaataatatacgttatgagaac

SEQ ID NO: 6084245 - DNA, 25 bp, Homo sapien
cagaaatagcacagtccaccgaata

SEQ ID NO: 6084246 - DNA, 25 bp, Homo sapien
ccgaatacactgcatggtgtttata

SEQ ID NO: 6084247 - DNA, 25 bp, Homo sapien
aacagaaatagcacagtccaccgaa

SEQ ID NO: 6084248 - DNA, 25 bp, Homo sapien
gaaatagcacagtccaccgaataca

SEQ ID NO: 6084249 - DNA, 25 bp, Homo sapien
tccaccgaatacactgcatggtgtt

SEQ ID NO: 6084250 - DNA, 25 bp, Homo sapien
ataatatacgttatgagaacaatca

SEQ ID NO: 6084251 - DNA, 25 bp, Homo sapien
cagtccaccgaatacactgcatggt

SEQ ID NO: 6084252 - DNA, 25 bp, Homo sapien
tgagaacaatcatttgcagtctcac

SEQ ID NO: 6084253 - DNA, 25 bp, Homo sapien
tagcacagtccaccgaatacactgc

SEQ ID NO: 6084254 - DNA, 25 bp, Homo sapien
cactgcatggtgtttataactgtat

SEQ ID NO: 6084255 - DNA, 25 bp, Homo sapien
gatcaaactgcataggatgaagccg

SEQ ID NO: 6084256 - DNA, 25 bp, Homo sapien
caattactcgttccaggtgcttttg

SEQ ID NO: 6084257 - DNA, 25 bp, Homo sapien
gatgaagccgttcgatgccctgact

SEQ ID NO: 6084258 - DNA, 25 bp, Homo sapien
aatcatttcaattactcgttccagg

SEQ ID NO: 6084259 - DNA, 25 bp, Homo sapien
tttataagatgatgcacgtgtacaa

SEQ ID NO: 6084260 - DNA, 25 bp, Homo sapien
gtttcaagccgttgacgtttctgga

SEQ ID NO: 6084261 - DNA, 25 bp, Homo sapien
ctgatctctcctatgacctgaattt

SEQ ID NO: 6084262 - DNA, 25 bp, Homo sapien
tccaaagggcggatgataagatcat

SEQ ID NO: 6084263 - DNA, 25 bp, Homo sapien
cagtacaattgttgctatcatcagc

SEQ ID NO: 6084264 - DNA, 25 bp, Homo sapien
tctcgttttatactcccagggctcc

SEQ ID NO: 6084265 - DNA, 25 bp, Homo sapien
ggcttgggagctaagccttcttgaa

SEQ ID NO: 6084266 - DNA, 25 bp, Homo sapien
tctcagctgtttcaagccgttgacg

SEQ ID NO: 6084267 - DNA, 25 bp, Homo sapien
tacggagatcagctgcatactgggc

SEQ ID NO: 6084268 - DNA, 25 bp, Homo sapien
cagcagtggctgtagtaacagagcc

SEQ ID NO: 6084269 - DNA, 25 bp, Homo sapien
gatgtatctacggagatcagctgca

SEQ ID NO: 6084270 - DNA, 25 bp, Homo sapien
tctacggagatcagctgcatactgg

SEQ ID NO: 6084271 - DNA, 25 bp, Homo sapien
gagtcgtaggagacagaaggtggca

SEQ ID NO: 6084272 - DNA, 25 bp, Homo sapien
tatctacggagatcagctgcatact

SEQ ID NO: 6084273 - DNA, 25 bp, Homo sapien
tggctgtagtaacagagccacgcag

SEQ ID NO: 6084274 - DNA, 25 bp, Homo sapien
ggctgtagtaacagagccacgcagg

SEQ ID NO: 6084275 - DNA, 25 bp, Homo sapien
ccctgggtacactggctccagtggg

SEQ ID NO: 6084276 - DNA, 25 bp, Homo sapien
gctgtagtaacagagccacgcaggt

SEQ ID NO: 6084277 - DNA, 25 bp, Homo sapien
tgtatctacggagatcagctgcata

SEQ ID NO: 6084278 - DNA, 25 bp, Homo sapien
cagtggctgtagtaacagagccacg

SEQ ID NO: 6084279 - DNA, 25 bp, Homo sapien
ccagtgcgtgtgcagaggctcatag

SEQ ID NO: 6084280 - DNA, 25 bp, Homo sapien
aaagccaggcgagaaaggcagccat

SEQ ID NO: 6084281 - DNA, 25 bp, Homo sapien
cctggcacttgtggtagagaagagc

SEQ ID NO: 6084282 - DNA, 25 bp, Homo sapien
tcaagtttgcgctgtaccagctggc

SEQ ID NO: 6084283 - DNA, 25 bp, Homo sapien
gactaatgtccagtgcgtaggccag

SEQ ID NO: 6084284 - DNA, 25 bp, Homo sapien
agccagcgtgcacagcaccaagaag

SEQ ID NO: 6084285 - DNA, 25 bp, Homo sapien
tgctgctgcccaccgtgagcaggaa

SEQ ID NO: 6084286 - DNA, 25 bp, Homo sapien
tacttgttatagcaggagccaatgc

SEQ ID NO: 6084287 - DNA, 25 bp, Homo sapien
gaagatacgatgcaccacaggacta

SEQ ID NO: 6084288 - DNA, 25 bp, Homo sapien
gttggtggccctgcccgaagacatg

SEQ ID NO: 6084289 - DNA, 25 bp, Homo sapien
aagatgtggaaaagttggtggccct

SEQ ID NO: 6084290 - DNA, 25 bp, Homo sapien
ggccgtcgggcctcatagtccagtg

SEQ ID NO: 6084291 - DNA, 25 bp, Homo sapien
atgaccaatttcacgtctttaactt

SEQ ID NO: 6084292 - DNA, 25 bp, Homo sapien
aaaaactatgtaggcatccgaagca

SEQ ID NO: 6084293 - DNA, 25 bp, Homo sapien
tgacatgaccaatttcacgtcttta

SEQ ID NO: 6084294 - DNA, 25 bp, Homo sapien
agggctcttgtagacgtccagtttt

SEQ ID NO: 6084295 - DNA, 25 bp, Homo sapien
acatgaccaatttcacgtctttaac

SEQ ID NO: 6084296 - DNA, 25 bp, Homo sapien
ggctcttgtagacgtccagttttgt

SEQ ID NO: 6084297 - DNA, 25 bp, Homo sapien
gggctcttgtagacgtccagttttg

SEQ ID NO: 6084298 - DNA, 25 bp, Homo sapien
tgaccaatttcacgtctttaacttc

SEQ ID NO: 6084299 - DNA, 25 bp, Homo sapien
catgaccaatttcacgtctttaact

SEQ ID NO: 6084300 - DNA, 25 bp, Homo sapien
gacatgaccaatttcacgtctttaa

SEQ ID NO: 6084301 - DNA, 25 bp, Homo sapien
gtgacatgaccaatttcacgtcttt

SEQ ID NO: 6084302 - DNA, 25 bp, Homo sapien
ctcttgtagacgtccagttttgtga

SEQ ID NO: 6084303 - DNA, 25 bp, Homo sapien
tagcacctttagatgacacctccgg

SEQ ID NO: 6084304 - DNA, 25 bp, Homo sapien
tatacgctcaaagatatcagtgacg

SEQ ID NO: 6084305 - DNA, 25 bp, Homo sapien
tctctggaagaaatggtggagcgct

SEQ ID NO: 6084306 - DNA, 25 bp, Homo sapien
tgcctcgctcgctatacgctcaaag

SEQ ID NO: 6084307 - DNA, 25 bp, Homo sapien
agacacagcatgtttagccagctct

SEQ ID NO: 6084308 - DNA, 25 bp, Homo sapien
taactctccttacgggtcctcttgc

SEQ ID NO: 6084309 - DNA, 25 bp, Homo sapien
atgtttagccagctctcccggcagt

SEQ ID NO: 6084310 - DNA, 25 bp, Homo sapien
cagtagcaagcgcactgctgtctga

SEQ ID NO: 6084311 - DNA, 25 bp, Homo sapien
ccttcttggaaatggtagcaccttt

SEQ ID NO: 6084312 - DNA, 25 bp, Homo sapien
cgcttgctgtagtgagccaaacgtg

SEQ ID NO: 6084313 - DNA, 25 bp, Homo sapien
cataatgctcatagctttcgaagag

SEQ ID NO: 6084314 - DNA, 25 bp, Homo sapien
tacgggtcctcttgcgctttttgcc

SEQ ID NO: 6084315 - DNA, 25 bp, Homo sapien
tagcacctttagatgacacctccgg

SEQ ID NO: 6084316 - DNA, 25 bp, Homo sapien
tatacgctcaaagatatcagtgacg

SEQ ID NO: 6084317 - DNA, 25 bp, Homo sapien
tctctggaagaaatggtggagcgct

SEQ ID NO: 6084318 - DNA, 25 bp, Homo sapien
tgcctcgctcgctatacgctcaaag

SEQ ID NO: 6084319 - DNA, 25 bp, Homo sapien
taactctccttacgggtcctcttgc

SEQ ID NO: 6084320 - DNA, 25 bp, Homo sapien
agacacagcatgtttagccagctct

SEQ ID NO: 6084321 - DNA, 25 bp, Homo sapien
atgtttagccagctctcccggcagt

SEQ ID NO: 6084322 - DNA, 25 bp, Homo sapien
cagtagcaagcgcactgctgtctga

SEQ ID NO: 6084323 - DNA, 25 bp, Homo sapien
cataatgctcatagctttcgaagag

SEQ ID NO: 6084324 - DNA, 25 bp, Homo sapien
ccttcttggaaatggtagcaccttt

SEQ ID NO: 6084325 - DNA, 25 bp, Homo sapien
cgcttgctgtagtgagccaaacgtg

SEQ ID NO: 6084326 - DNA, 25 bp, Homo sapien
tacgggtcctcttgcgctttttgcc

SEQ ID NO: 6084327 - DNA, 25 bp, Homo sapien
tggagccttttttagggactggagc

SEQ ID NO: 6084328 - DNA, 25 bp, Homo sapien
caattccccgggtagcagtaggcgc

SEQ ID NO: 6084329 - DNA, 25 bp, Homo sapien
ggagccttttttagggactggagca

SEQ ID NO: 6084330 - DNA, 25 bp, Homo sapien
ccttttttagggactggagcagatt

SEQ ID NO: 6084331 - DNA, 25 bp, Homo sapien
gccttttttagggactggagcagat

SEQ ID NO: 6084332 - DNA, 25 bp, Homo sapien
ttggccaattccccgggtagcagta

SEQ ID NO: 6084333 - DNA, 25 bp, Homo sapien
gtaatgcgccaggcgtgacgcttct

SEQ ID NO: 6084334 - DNA, 25 bp, Homo sapien
ccaattccccgggtagcagtaggcg

SEQ ID NO: 6084335 - DNA, 25 bp, Homo sapien
aattccccgggtagcagtaggcgca

SEQ ID NO: 6084336 - DNA, 25 bp, Homo sapien
gagccttttttagggactggagcag

SEQ ID NO: 6084337 - DNA, 25 bp, Homo sapien
taatgcgccaggcgtgacgcttctc

SEQ ID NO: 6084338 - DNA, 25 bp, Homo sapien
tttttagggactggagcagatttga

SEQ ID NO: 6084339 - DNA, 25 bp, Homo sapien
cttagtggccaactgtttgcgtggc

SEQ ID NO: 6084340 - DNA, 25 bp, Homo sapien
gccttgccaccagtagacttccgag

SEQ ID NO: 6084341 - DNA, 25 bp, Homo sapien
ggtagtttacgaataagcagttcag

SEQ ID NO: 6084342 - DNA, 25 bp, Homo sapien
gtcctgcgcaatctcgcgcaccagg

SEQ ID NO: 6084343 - DNA, 25 bp, Homo sapien
caggttagtgtcctcaaatagccct

SEQ ID NO: 6084344 - DNA, 25 bp, Homo sapien
caccaggcgctggaaaggtagttta

SEQ ID NO: 6084345 - DNA, 25 bp, Homo sapien
accagtagacttccgagcagtttgc

SEQ ID NO: 6084346 - DNA, 25 bp, Homo sapien
tggcgccttgccaccagtagacttc

SEQ ID NO: 6084347 - DNA, 25 bp, Homo sapien
caggcgctggaaaggtagtttacga

SEQ ID NO: 6084348 - DNA, 25 bp, Homo sapien
gccaccagtagacttccgagcagtt

SEQ ID NO: 6084349 - DNA, 25 bp, Homo sapien
caactgtttgcgtggcgccttgcca

SEQ ID NO: 6084350 - DNA, 25 bp, Homo sapien
tagtggccaactgtttgcgtggcgc

SEQ ID NO: 6084351 - DNA, 25 bp, Homo sapien
gtataggtgacagcgtcacggatca

SEQ ID NO: 6084352 - DNA, 25 bp, Homo sapien
gccctggatgttgtcacgcaacacc

SEQ ID NO: 6084353 - DNA, 25 bp, Homo sapien
tcctcgtagatcagaccagagatcc

SEQ ID NO: 6084354 - DNA, 25 bp, Homo sapien
atcagaccagagatccgcttcacac

SEQ ID NO: 6084355 - DNA, 25 bp, Homo sapien
ccaaaaacaccttgagcaccccgcg

SEQ ID NO: 6084356 - DNA, 25 bp, Homo sapien
ctcgtagatcagaccagagatccgc

SEQ ID NO: 6084357 - DNA, 25 bp, Homo sapien
taaccgccaaagccataaagggtgc

SEQ ID NO: 6084358 - DNA, 25 bp, Homo sapien
ctccgtataggtgacagcgtcacgg

SEQ ID NO: 6084359 - DNA, 25 bp, Homo sapien
ataggtgacagcgtcacggatcacg

SEQ ID NO: 6084360 - DNA, 25 bp, Homo sapien
tccgtataggtgacagcgtcacgga

SEQ ID NO: 6084361 - DNA, 25 bp, Homo sapien
gatcagaccagagatccgcttcaca

SEQ ID NO: 6084362 - DNA, 25 bp, Homo sapien
cgtataggtgacagcgtcacggatc

SEQ ID NO: 6084363 - DNA, 25 bp, Homo sapien
ataccctggatgttgtcgcgcagca

SEQ ID NO: 6084364 - DNA, 25 bp, Homo sapien
accctggatgttgtcgcgcagcacc

SEQ ID NO: 6084365 - DNA, 25 bp, Homo sapien
taccctggatgttgtcgcgcagcac

SEQ ID NO: 6084366 - DNA, 25 bp, Homo sapien
cttcaacactccgcgggtctcctca

SEQ ID NO: 6084367 - DNA, 25 bp, Homo sapien
gataccctggatgttgtcgcgcagc

SEQ ID NO: 6084368 - DNA, 25 bp, Homo sapien
ccaggcccttacctcctttgccgcg

SEQ ID NO: 6084369 - DNA, 25 bp, Homo sapien
cattttcacagatcacctcaggctg

SEQ ID NO: 6084370 - DNA, 25 bp, Homo sapien
tcacagatcacctcaggctgcttag

SEQ ID NO: 6084371 - DNA, 25 bp, Homo sapien
gaccacgagctctgtaggtccggcg

SEQ ID NO: 6084372 - DNA, 25 bp, Homo sapien
tttcacagatcacctcaggctgctt

SEQ ID NO: 6084373 - DNA, 25 bp, Homo sapien
cgaccacgagctctgtaggtccggc

SEQ ID NO: 6084374 - DNA, 25 bp, Homo sapien
gcgaaccattttcacagatcacctc

SEQ ID NO: 6084375 - DNA, 25 bp, Homo sapien
accattttcacagatcacctcaggc

SEQ ID NO: 6084376 - DNA, 25 bp, Homo sapien
cacagatcacctcaggctgcttagg

SEQ ID NO: 6084377 - DNA, 25 bp, Homo sapien
cgaaccattttcacagatcacctca

SEQ ID NO: 6084378 - DNA, 25 bp, Homo sapien
ttttcacagatcacctcaggctgct

SEQ ID NO: 6084379 - DNA, 25 bp, Homo sapien
ttcacagatcacctcaggctgctta

SEQ ID NO: 6084380 - DNA, 25 bp, Homo sapien
ccattttcacagatcacctcaggct

SEQ ID NO: 6084381 - DNA, 25 bp, Homo sapien
cgcttgctgtagtgagccaaacgtg

SEQ ID NO: 6084382 - DNA, 25 bp, Homo sapien
atgtttagccagctctcccggcagt

SEQ ID NO: 6084383 - DNA, 25 bp, Homo sapien
tctctggaagaaatggtggagcgct

SEQ ID NO: 6084384 - DNA, 25 bp, Homo sapien
tgcctcgctcgctatacgctcaaag

SEQ ID NO: 6084385 - DNA, 25 bp, Homo sapien
agacacagcatgtttagccagctct

SEQ ID NO: 6084386 - DNA, 25 bp, Homo sapien
cagtagcaagcgcactgctgtctga

SEQ ID NO: 6084387 - DNA, 25 bp, Homo sapien
ccttcttggaaatggtagcaccttt

SEQ ID NO: 6084388 - DNA, 25 bp, Homo sapien
tatacgctcaaagatatcagtgacg

SEQ ID NO: 6084389 - DNA, 25 bp, Homo sapien
cataatgctcatagctttcgaagag

SEQ ID NO: 6084390 - DNA, 25 bp, Homo sapien
taactctccttacgggtcctcttgc

SEQ ID NO: 6084391 - DNA, 25 bp, Homo sapien
tacgggtcctcttgcgctttttgcc

SEQ ID NO: 6084392 - DNA, 25 bp, Homo sapien
tagcacctttagatgacacctccgg

SEQ ID NO: 6084393 - DNA, 25 bp, Homo sapien
gatcagaccagagatccgcttcaca

SEQ ID NO: 6084394 - DNA, 25 bp, Homo sapien
tccgtataggtgacagcgtcacgga

SEQ ID NO: 6084395 - DNA, 25 bp, Homo sapien
cgtataggtgacagcgtcacggatc

SEQ ID NO: 6084396 - DNA, 25 bp, Homo sapien
gccctggatgttgtcacgcaacacc

SEQ ID NO: 6084397 - DNA, 25 bp, Homo sapien
tcctcgtagatcagaccagagatcc

SEQ ID NO: 6084398 - DNA, 25 bp, Homo sapien
ccaaaaacaccttgagcaccccgcg

SEQ ID NO: 6084399 - DNA, 25 bp, Homo sapien
taaccgccaaagccataaagggtgc

SEQ ID NO: 6084400 - DNA, 25 bp, Homo sapien
gtataggtgacagcgtcacggatca

SEQ ID NO: 6084401 - DNA, 25 bp, Homo sapien
ataggtgacagcgtcacggatcacg

SEQ ID NO: 6084402 - DNA, 25 bp, Homo sapien
ctcgtagatcagaccagagatccgc

SEQ ID NO: 6084403 - DNA, 25 bp, Homo sapien
ctccgtataggtgacagcgtcacgg

SEQ ID NO: 6084404 - DNA, 25 bp, Homo sapien
atcagaccagagatccgcttcacac

SEQ ID NO: 6084405 - DNA, 25 bp, Homo sapien
agacacagcatgtttagccagctct

SEQ ID NO: 6084406 - DNA, 25 bp, Homo sapien
tatacgctcaaagatatcagtgacg

SEQ ID NO: 6084407 - DNA, 25 bp, Homo sapien
taactctccttacgggtcctcttgc

SEQ ID NO: 6084408 - DNA, 25 bp, Homo sapien
atgtttagccagctctcccggcagt

SEQ ID NO: 6084409 - DNA, 25 bp, Homo sapien
tgcctcgctcgctatacgctcaaag

SEQ ID NO: 6084410 - DNA, 25 bp, Homo sapien
tagcacctttagatgacacctccgg

SEQ ID NO: 6084411 - DNA, 25 bp, Homo sapien
cataatgctcatagctttcgaagag

SEQ ID NO: 6084412 - DNA, 25 bp, Homo sapien
cagtagcaagcgcactgctgtctga

SEQ ID NO: 6084413 - DNA, 25 bp, Homo sapien
ccttcttggaaatggtagcaccttt

SEQ ID NO: 6084414 - DNA, 25 bp, Homo sapien
tctctggaagaaatggtggagcgct

SEQ ID NO: 6084415 - DNA, 25 bp, Homo sapien
tacgggtcctcttgcgctttttgcc

SEQ ID NO: 6084416 - DNA, 25 bp, Homo sapien
cgcttgctgtagtgagccaaacgtg

SEQ ID NO: 6084417 - DNA, 25 bp, Homo sapien
tatacgctcaaagatatcagtgacg

SEQ ID NO: 6084418 - DNA, 25 bp, Homo sapien
tctctggaagaaatggtggagcgct

SEQ ID NO: 6084419 - DNA, 25 bp, Homo sapien
tacgggtcctcttgcgctttttgcc

SEQ ID NO: 6084420 - DNA, 25 bp, Homo sapien
tagcacctttagatgacacctccgg

SEQ ID NO: 6084421 - DNA, 25 bp, Homo sapien
cagtagcaagcgcactgctgtctga

SEQ ID NO: 6084422 - DNA, 25 bp, Homo sapien
agacacagcatgtttagccagctct

SEQ ID NO: 6084423 - DNA, 25 bp, Homo sapien
ccttcttggaaatggtagcaccttt

SEQ ID NO: 6084424 - DNA, 25 bp, Homo sapien
cgcttgctgtagtgagccaaacgtg

SEQ ID NO: 6084425 - DNA, 25 bp, Homo sapien
cataatgctcatagctttcgaagag

SEQ ID NO: 6084426 - DNA, 25 bp, Homo sapien
taactctccttacgggtcctcttgc

SEQ ID NO: 6084427 - DNA, 25 bp, Homo sapien
tgcctcgctcgctatacgctcaaag

SEQ ID NO: 6084428 - DNA, 25 bp, Homo sapien
atgtttagccagctctcccggcagt

SEQ ID NO: 6084429 - DNA, 25 bp, Homo sapien
accagtagacttccgagcagtttgc

SEQ ID NO: 6084430 - DNA, 25 bp, Homo sapien
gccttgccaccagtagacttccgag

SEQ ID NO: 6084431 - DNA, 25 bp, Homo sapien
cttagtggccaactgtttgcgtggc

SEQ ID NO: 6084432 - DNA, 25 bp, Homo sapien
tagtggccaactgtttgcgtggcgc

SEQ ID NO: 6084433 - DNA, 25 bp, Homo sapien
gccaccagtagacttccgagcagtt

SEQ ID NO: 6084434 - DNA, 25 bp, Homo sapien
caggttagtgtcctcaaatagccct

SEQ ID NO: 6084435 - DNA, 25 bp, Homo sapien
gtcctgcgcaatctcgcgcaccagg

SEQ ID NO: 6084436 - DNA, 25 bp, Homo sapien
caggcgctggaaaggtagtttacga

SEQ ID NO: 6084437 - DNA, 25 bp, Homo sapien
ggtagtttacgaataagcagttcag

SEQ ID NO: 6084438 - DNA, 25 bp, Homo sapien
caactgtttgcgtggcgccttgcca

SEQ ID NO: 6084439 - DNA, 25 bp, Homo sapien
tggcgccttgccaccagtagacttc

SEQ ID NO: 6084440 - DNA, 25 bp, Homo sapien
caccaggcgctggaaaggtagttta

SEQ ID NO: 6084441 - DNA, 25 bp, Homo sapien
cttagtggccaactgtttgcgtggc

SEQ ID NO: 6084442 - DNA, 25 bp, Homo sapien
accagtagacttccgagcagtttgc

SEQ ID NO: 6084443 - DNA, 25 bp, Homo sapien
tagtggccaactgtttgcgtggcgc

SEQ ID NO: 6084444 - DNA, 25 bp, Homo sapien
gtcctgcgcaatctcgcgcaccagg

SEQ ID NO: 6084445 - DNA, 25 bp, Homo sapien
ggtagtttacgaataagcagttcag

SEQ ID NO: 6084446 - DNA, 25 bp, Homo sapien
gccaccagtagacttccgagcagtt

SEQ ID NO: 6084447 - DNA, 25 bp, Homo sapien
caccaggcgctggaaaggtagttta

SEQ ID NO: 6084448 - DNA, 25 bp, Homo sapien
caggttagtgtcctcaaatagccct

SEQ ID NO: 6084449 - DNA, 25 bp, Homo sapien
caggcgctggaaaggtagtttacga

SEQ ID NO: 6084450 - DNA, 25 bp, Homo sapien
caactgtttgcgtggcgccttgcca

SEQ ID NO: 6084451 - DNA, 25 bp, Homo sapien
tggcgccttgccaccagtagacttc

SEQ ID NO: 6084452 - DNA, 25 bp, Homo sapien
gccttgccaccagtagacttccgag

SEQ ID NO: 6084453 - DNA, 25 bp, Homo sapien
ataaatttcctcccatatacaaaat

SEQ ID NO: 6084454 - DNA, 25 bp, Homo sapien
gttgctacaataggaagttaacaat

SEQ ID NO: 6084455 - DNA, 25 bp, Homo sapien
atgaaaacagttcacctaacaccca

SEQ ID NO: 6084456 - DNA, 25 bp, Homo sapien
gtccctgttgctacaataggaagtt

SEQ ID NO: 6084457 - DNA, 25 bp, Homo sapien
tgaaaacagttcacctaacacccat

SEQ ID NO: 6084458 - DNA, 25 bp, Homo sapien
tatttgtccctgttgctacaatagg

SEQ ID NO: 6084459 - DNA, 25 bp, Homo sapien
atatatttgtccctgttgctacaat

SEQ ID NO: 6084460 - DNA, 25 bp, Homo sapien
ccctgttgctacaataggaagttaa

SEQ ID NO: 6084461 - DNA, 25 bp, Homo sapien
tgtccctgttgctacaataggaagt

SEQ ID NO: 6084462 - DNA, 25 bp, Homo sapien
tttgtccctgttgctacaataggaa

SEQ ID NO: 6084463 - DNA, 25 bp, Homo sapien
cctgttgctacaataggaagttaac

SEQ ID NO: 6084464 - DNA, 25 bp, Homo sapien
gaaaacagttcacctaacacccatg

SEQ ID NO: 6084465 - DNA, 25 bp, Homo sapien
cacagatcacctcaggctgcttagg

SEQ ID NO: 6084466 - DNA, 25 bp, Homo sapien
ccattttcacagatcacctcaggct

SEQ ID NO: 6084467 - DNA, 25 bp, Homo sapien
acagatcacctcaggctgcttaggg

SEQ ID NO: 6084468 - DNA, 25 bp, Homo sapien
tcacagatcacctcaggctgcttag

SEQ ID NO: 6084469 - DNA, 25 bp, Homo sapien
ttcacagatcacctcaggctgctta

SEQ ID NO: 6084470 - DNA, 25 bp, Homo sapien
cattttcacagatcacctcaggctg

SEQ ID NO: 6084471 - DNA, 25 bp, Homo sapien
accattttcacagatcacctcaggc

SEQ ID NO: 6084472 - DNA, 25 bp, Homo sapien
tttcacagatcacctcaggctgctt

SEQ ID NO: 6084473 - DNA, 25 bp, Homo sapien
ttttcacagatcacctcaggctgct

SEQ ID NO: 6084474 - DNA, 25 bp, Homo sapien
gcgaaccattttcacagatcacctc

SEQ ID NO: 6084475 - DNA, 25 bp, Homo sapien
gaaccattttcacagatcacctcag

SEQ ID NO: 6084476 - DNA, 25 bp, Homo sapien
cgaaccattttcacagatcacctca

SEQ ID NO: 6084477 - DNA, 25 bp, Homo sapien
ccagggctgaaaggccttggattca

SEQ ID NO: 6084478 - DNA, 25 bp, Homo sapien
gcattagagagagagtcacagccta

SEQ ID NO: 6084479 - DNA, 25 bp, Homo sapien
tccagtatgattggttggtgtcaaa

SEQ ID NO: 6084480 - DNA, 25 bp, Homo sapien
caagtcctctaagggccttgtccag

SEQ ID NO: 6084481 - DNA, 25 bp, Homo sapien
tctgccagacatattcgaagtcctg

SEQ ID NO: 6084482 - DNA, 25 bp, Homo sapien
aggtcactttcgtccttcccgagag

SEQ ID NO: 6084483 - DNA, 25 bp, Homo sapien
cttgctccacaaaattctgccagac

SEQ ID NO: 6084484 - DNA, 25 bp, Homo sapien
tcatgatgcgcagtttacagccagc

SEQ ID NO: 6084485 - DNA, 25 bp, Homo sapien
ggtgtcaaatgttgtccagctccaa

SEQ ID NO: 6084486 - DNA, 25 bp, Homo sapien
cagtcccatagttgactggagccca

SEQ ID NO: 6084487 - DNA, 25 bp, Homo sapien
aggcatgtcccagatggctgtacat

SEQ ID NO: 6084488 - DNA, 25 bp, Homo sapien
ggtgagcaattaggaccttcagtcc

SEQ ID NO: 6084489 - DNA, 25 bp, Homo sapien
gttaatgatacagtcacaggtcatg

SEQ ID NO: 6084490 - DNA, 25 bp, Homo sapien
tatttagatgtacaccggctcagtg

SEQ ID NO: 6084491 - DNA, 25 bp, Homo sapien
gatttatttagatgtacaccggctc

SEQ ID NO: 6084492 - DNA, 25 bp, Homo sapien
gaaaaacagagtctacaaatcttac

SEQ ID NO: 6084493 - DNA, 25 bp, Homo sapien
gatttgtatctgaaaagctgaccat

SEQ ID NO: 6084494 - DNA, 25 bp, Homo sapien
taaatacaaccattggcaaacagtc

SEQ ID NO: 6084495 - DNA, 25 bp, Homo sapien
aactttgctccggaggaggctgtct

SEQ ID NO: 6084496 - DNA, 25 bp, Homo sapien
ggctcagtggatttgtatctgaaaa

SEQ ID NO: 6084497 - DNA, 25 bp, Homo sapien
tgtggtttttataggcaaacttaca

SEQ ID NO: 6084498 - DNA, 25 bp, Homo sapien
tcttttcaactttgctccggaggag

SEQ ID NO: 6084499 - DNA, 25 bp, Homo sapien
ttcctttggcctcgacttttcagtg

SEQ ID NO: 6084500 - DNA, 25 bp, Homo sapien
ttggcaaacagtcatatttaatggt

SEQ ID NO: 6084501 - DNA, 25 bp, Homo sapien
tgtccctcctctggaaaaccttgga

SEQ ID NO: 6084502 - DNA, 25 bp, Homo sapien
atgctctccacgtggaaaaggattt

SEQ ID NO: 6084503 - DNA, 25 bp, Homo sapien
ccttaccgcagctccggggggtgca

SEQ ID NO: 6084504 - DNA, 25 bp, Homo sapien
acctcggggcttgctctcgcagtgg

SEQ ID NO: 6084505 - DNA, 25 bp, Homo sapien
ggacgggggacccaagccatcacag

SEQ ID NO: 6084506 - DNA, 25 bp, Homo sapien
tgcagcgtggctgggcccgcatatg

SEQ ID NO: 6084507 - DNA, 25 bp, Homo sapien
tgtccgcagggtcgcccttaccgca

SEQ ID NO: 6084508 - DNA, 25 bp, Homo sapien
agggcctgtccgcagggtcgccctt

SEQ ID NO: 6084509 - DNA, 25 bp, Homo sapien
aacgaggcgtggatgctctccacgt

SEQ ID NO: 6084510 - DNA, 25 bp, Homo sapien
cctggcttcactccctggtcagccg

SEQ ID NO: 6084511 - DNA, 25 bp, Homo sapien
cggcgtctcctccagtcccagggag

SEQ ID NO: 6084512 - DNA, 25 bp, Homo sapien
gggacccaagccatcacagcaggag

SEQ ID NO: 6084513 - DNA, 25 bp, Homo sapien
ccccagatagggtgcagcgtggctg

SEQ ID NO: 6084514 - DNA, 25 bp, Homo sapien
ctcggtggatgccccggccacccga

SEQ ID NO: 6084515 - DNA, 25 bp, Homo sapien
tggaaggtgttctcggtggatgccc

SEQ ID NO: 6084516 - DNA, 25 bp, Homo sapien
ctcctctggaaaaccttggagaaga

SEQ ID NO: 6084517 - DNA, 25 bp, Homo sapien
tcagccgggagcacgggacggggga

SEQ ID NO: 6084518 - DNA, 25 bp, Homo sapien
atatgagctccccgcagaggggctg

SEQ ID NO: 6084519 - DNA, 25 bp, Homo sapien
gtctggtttcacgtccacgtgtccc

SEQ ID NO: 6084520 - DNA, 25 bp, Homo sapien
cgcagtgggccctcgggctcacact

SEQ ID NO: 6084521 - DNA, 25 bp, Homo sapien
atagggtgcagcgtggctgggcccg

SEQ ID NO: 6084522 - DNA, 25 bp, Homo sapien
agggagccccagatagggtgcagcg

SEQ ID NO: 6084523 - DNA, 25 bp, Homo sapien
cccgtagggccaagctcgagtgcta

SEQ ID NO: 6084524 - DNA, 25 bp, Homo sapien
tggctgggcccgcatatgagctccc

SEQ ID NO: 6084525 - DNA, 25 bp, Homo sapien
gggctgagggcctggaagggggcca

SEQ ID NO: 6084526 - DNA, 25 bp, Homo sapien
tctgcccctccgaccgacggcgtct

SEQ ID NO: 6084527 - DNA, 25 bp, Homo sapien
ttcactccctggtcagccgggagca

SEQ ID NO: 6084528 - DNA, 25 bp, Homo sapien
aggcagtggaaggtgttctcggtgg

SEQ ID NO: 6084529 - DNA, 25 bp, Homo sapien
gtccacgtgtccctcctctggaaaa

SEQ ID NO: 6084530 - DNA, 25 bp, Homo sapien
tggaaaaccttggagaagagggcac

SEQ ID NO: 6084531 - DNA, 25 bp, Homo sapien
cagctccggggggtgcagggcgcca

SEQ ID NO: 6084532 - DNA, 25 bp, Homo sapien
gagaggagcctgagacacacctcgg

SEQ ID NO: 6084533 - DNA, 25 bp, Homo sapien
ccttttgtctggtttcacgtccacg

SEQ ID NO: 6084534 - DNA, 25 bp, Homo sapien
tttcacgtccacgtgtccctcctct

SEQ ID NO: 6084535 - DNA, 25 bp, Homo sapien
cgcctctctgcagccttttgtctgg

SEQ ID NO: 6084536 - DNA, 25 bp, Homo sapien
tggaagggggccacgcctctctgca

SEQ ID NO: 6084537 - DNA, 25 bp, Homo sapien
agcctgagacacacctcggggcttg

SEQ ID NO: 6084538 - DNA, 25 bp, Homo sapien
ttgctcccagctggggccccacgac

SEQ ID NO: 6084539 - DNA, 25 bp, Homo sapien
cccggccacccgaccagccagccca

SEQ ID NO: 6084540 - DNA, 25 bp, Homo sapien
tctgctgttgctcccagctggggcc

SEQ ID NO: 6084541 - DNA, 25 bp, Homo sapien
agctcgagtgctaggcagtggaagg

SEQ ID NO: 6084542 - DNA, 25 bp, Homo sapien
tgagggcctggaagggggccacgcc

SEQ ID NO: 6084543 - DNA, 25 bp, Homo sapien
cctccgaccgacggcgtctcctcca

SEQ ID NO: 6084544 - DNA, 25 bp, Homo sapien
gaccgacggcgtctcctccagtccc

SEQ ID NO: 6084545 - DNA, 25 bp, Homo sapien
gcagaggggctgagggcctggaagg

SEQ ID NO: 6084546 - DNA, 25 bp, Homo sapien
gtgttctcggtggatgccccggcca

SEQ ID NO: 6084547 - DNA, 25 bp, Homo sapien
tccacgtggaaaaggatttctctac

SEQ ID NO: 6084548 - DNA, 25 bp, Homo sapien
agacacacctcggggcttgctctcg

SEQ ID NO: 6084549 - DNA, 25 bp, Homo sapien
gagaagagggcacctggcttcactc

SEQ ID NO: 6084550 - DNA, 25 bp, Homo sapien
ctctaccccgtagggccaagctcga

SEQ ID NO: 6084551 - DNA, 25 bp, Homo sapien
gggccaagctcgagtgctaggcagt

SEQ ID NO: 6084552 - DNA, 25 bp, Homo sapien
accagccagcccagggcctgtccgc

SEQ ID NO: 6084553 - DNA, 25 bp, Homo sapien
agtgctaggcagtggaaggtgttct

SEQ ID NO: 6084554 - DNA, 25 bp, Homo sapien
gggccctcgggctcacactctgctg

SEQ ID NO: 6084555 - DNA, 25 bp, Homo sapien
accttggagaagagggcacctggct

SEQ ID NO: 6084556 - DNA, 25 bp, Homo sapien
tcgggctcacactctgctgttgctc

SEQ ID NO: 6084557 - DNA, 25 bp, Homo sapien
gcccgcatatgagctccccgcagag

SEQ ID NO: 6084558 - DNA, 25 bp, Homo sapien
ccctggtcagccgggagcacgggac

SEQ ID NO: 6084559 - DNA, 25 bp, Homo sapien
ggcttgctctcgcagtgggccctcg

SEQ ID NO: 6084560 - DNA, 25 bp, Homo sapien
ctgcagccttttgtctggtttcacg

SEQ ID NO: 6084561 - DNA, 25 bp, Homo sapien
ccatcacagcaggagaggagcctga

SEQ ID NO: 6084562 - DNA, 25 bp, Homo sapien
cagaatctgcccctccgaccgacgg

SEQ ID NO: 6084563 - DNA, 25 bp, Homo sapien
cagcaggagaggagcctgagacaca

SEQ ID NO: 6084564 - DNA, 25 bp, Homo sapien
gtgcagggcgccacagaatctgccc

SEQ ID NO: 6084565 - DNA, 25 bp, Homo sapien
gggccacgcctctctgcagcctttt

SEQ ID NO: 6084566 - DNA, 25 bp, Homo sapien
cagcccagggcctgtccgcagggtc

SEQ ID NO: 6084567 - DNA, 25 bp, Homo sapien
agggtcgcccttaccgcagctccgg

SEQ ID NO: 6084568 - DNA, 25 bp, Homo sapien
cagtcccagggagccccagataggg

SEQ ID NO: 6084569 - DNA, 25 bp, Homo sapien
cccaagccatcacagcaggagagga

SEQ ID NO: 6084570 - DNA, 25 bp, Homo sapien
gcgccacagaatctgcccctccgac

SEQ ID NO: 6084571 - DNA, 25 bp, Homo sapien
ggatgccccggccacccgaccagcc

SEQ ID NO: 6084572 - DNA, 25 bp, Homo sapien
tgctctcgcagtgggccctcgggct

SEQ ID NO: 6084573 - DNA, 25 bp, Homo sapien
tcacactctgctgttgctcccagct

SEQ ID NO: 6084574 - DNA, 25 bp, Homo sapien
ctcctccagtcccagggagccccag

SEQ ID NO: 6084575 - DNA, 25 bp, Homo sapien
agggcacctggcttcactccctggt

SEQ ID NO: 6084576 - DNA, 25 bp, Homo sapien
ccggggggtgcagggcgccacagaa

SEQ ID NO: 6084577 - DNA, 25 bp, Homo sapien
cacccgaccagccagcccagggcct

SEQ ID NO: 6084578 - DNA, 25 bp, Homo sapien
gctccccgcagaggggctgagggcc

SEQ ID NO: 6084579 - DNA, 25 bp, Homo sapien
gcgtggatgctctccacgtggaaaa

SEQ ID NO: 6084580 - DNA, 25 bp, Homo sapien
ctttaataacgaggcgtggatgctc

SEQ ID NO: 6084581 - DNA, 25 bp, Homo sapien
cagaaatagcacagtccaccgaata

SEQ ID NO: 6084582 - DNA, 25 bp, Homo sapien
aacagaaatagcacagtccaccgaa

SEQ ID NO: 6084583 - DNA, 25 bp, Homo sapien
tattaataatatacgttatgagaac

SEQ ID NO: 6084584 - DNA, 25 bp, Homo sapien
tccaccgaatacactgcatggtgtt

SEQ ID NO: 6084585 - DNA, 25 bp, Homo sapien
gaaatagcacagtccaccgaataca

SEQ ID NO: 6084586 - DNA, 25 bp, Homo sapien
cagtccaccgaatacactgcatggt

SEQ ID NO: 6084587 - DNA, 25 bp, Homo sapien
ataatatacgttatgagaacaatca

SEQ ID NO: 6084588 - DNA, 25 bp, Homo sapien
cactgcatggtgtttataactgtat

SEQ ID NO: 6084589 - DNA, 25 bp, Homo sapien
tgagaacaatcatttgcagtctcac

SEQ ID NO: 6084590 - DNA, 25 bp, Homo sapien
tagcacagtccaccgaatacactgc

SEQ ID NO: 6084591 - DNA, 25 bp, Homo sapien
agaacaatcatttgcagtctcactg

SEQ ID NO: 6084592 - DNA, 25 bp, Homo sapien
ccgaatacactgcatggtgtttata

SEQ ID NO: 6084593 - DNA, 25 bp, Homo sapien
tagttgagaaggtcgaagtggccca

SEQ ID NO: 6084594 - DNA, 25 bp, Homo sapien
attggcaaaccggagaaacgctggg

SEQ ID NO: 6084595 - DNA, 25 bp, Homo sapien
cgggcaagcacttctgtacgcggaa

SEQ ID NO: 6084596 - DNA, 25 bp, Homo sapien
tacgagtcgcggtgttggttcacca

SEQ ID NO: 6084597 - DNA, 25 bp, Homo sapien
tccgcaatggcgaagtagttgagaa

SEQ ID NO: 6084598 - DNA, 25 bp, Homo sapien
ccccgcactgcggtggtaaggcaga

SEQ ID NO: 6084599 - DNA, 25 bp, Homo sapien
tccatcaagttgaagcggactcgcg

SEQ ID NO: 6084600 - DNA, 25 bp, Homo sapien
ttctcctcgggcttgtcggctggcg

SEQ ID NO: 6084601 - DNA, 25 bp, Homo sapien
tcaattagccaaaaacgagacgcca

SEQ ID NO: 6084602 - DNA, 25 bp, Homo sapien
ttctgtacgcggaaagcacgaggcg

SEQ ID NO: 6084603 - DNA, 25 bp, Homo sapien
tgccgatgtacttggactgcaggtg

SEQ ID NO: 6084604 - DNA, 25 bp, Homo sapien
ccatgtaggagcagtacgagtcgcg

SEQ ID NO: 6084605 - DNA, 25 bp, Homo sapien
tagtctttttgtggcgctttggtgg

SEQ ID NO: 6084606 - DNA, 25 bp, Homo sapien
tgttgcgtagaaatcaccatagtaa

SEQ ID NO: 6084607 - DNA, 25 bp, Homo sapien
cacgcaggaacaagccaaggagtgc

SEQ ID NO: 6084608 - DNA, 25 bp, Homo sapien
tctgtctgcaactctggctgaaggt

SEQ ID NO: 6084609 - DNA, 25 bp, Homo sapien
gtcttggttttgtacacctgctgga

SEQ ID NO: 6084610 - DNA, 25 bp, Homo sapien
agagtggtgggagttcatagtcttt

SEQ ID NO: 6084611 - DNA, 25 bp, Homo sapien
ctcctttgggtgaaacacgcaggaa

SEQ ID NO: 6084612 - DNA, 25 bp, Homo sapien
ctgccacgatggctctgtctgcaac

SEQ ID NO: 6084613 - DNA, 25 bp, Homo sapien
tggactagtgttgggactctggctc

SEQ ID NO: 6084614 - DNA, 25 bp, Homo sapien
gagttcatagtctttttgtggcgct

SEQ ID NO: 6084615 - DNA, 25 bp, Homo sapien
gctccgcgtcttggttttgtacacc

SEQ ID NO: 6084616 - DNA, 25 bp, Homo sapien
gaaatcaccatagtaacatgttcct

SEQ ID NO: 6084617 - DNA, 25 bp, Homo sapien
gaatttttgttgtggatgctcagag

SEQ ID NO: 6084618 - DNA, 25 bp, Homo sapien
tttgaggacgataggccaagcaact

SEQ ID NO: 6084619 - DNA, 25 bp, Homo sapien
acatgggtcagaggttggcaaccac

SEQ ID NO: 6084620 - DNA, 25 bp, Homo sapien
tgctggacacaacgtgaagactttg

SEQ ID NO: 6084621 - DNA, 25 bp, Homo sapien
caagatggacgacacgtgctgaaca

SEQ ID NO: 6084622 - DNA, 25 bp, Homo sapien
gcctcagtggacgacagccgctgga

SEQ ID NO: 6084623 - DNA, 25 bp, Homo sapien
gcagcttgcattagatcaggcacag

SEQ ID NO: 6084624 - DNA, 25 bp, Homo sapien
ttgggcacacagtctcctatgggct

SEQ ID NO: 6084625 - DNA, 25 bp, Homo sapien
agccgctggacacatacctctgtgg

SEQ ID NO: 6084626 - DNA, 25 bp, Homo sapien
caagcaactcgagggttggcatcca

SEQ ID NO: 6084627 - DNA, 25 bp, Homo sapien
tgtggtctacaggatactggaaggc

SEQ ID NO: 6084628 - DNA, 25 bp, Homo sapien
gcaaagaagcaaaagtccatggagt

SEQ ID NO: 6084629 - DNA, 25 bp, Homo sapien
taacaggctacttggttctcatgtg

SEQ ID NO: 6084630 - DNA, 25 bp, Homo sapien
tgaggcccatcacagtattacaaaa

SEQ ID NO: 6084631 - DNA, 25 bp, Homo sapien
ggcacagtccttatctacagcagca

SEQ ID NO: 6084632 - DNA, 25 bp, Homo sapien
gcacaccaggatctgaaaatctttt

SEQ ID NO: 6084633 - DNA, 25 bp, Homo sapien
tgctgccaagtctgacgaaaggaaa

SEQ ID NO: 6084634 - DNA, 25 bp, Homo sapien
caggtccaaggctgttcaatggaga

SEQ ID NO: 6084635 - DNA, 25 bp, Homo sapien
cagttccgcagaaaacaggtagtac

SEQ ID NO: 6084636 - DNA, 25 bp, Homo sapien
ttctgtggcaacgtgaacaggtcca

SEQ ID NO: 6084637 - DNA, 25 bp, Homo sapien
cattgggcaaacatcctgtacagga

SEQ ID NO: 6084638 - DNA, 25 bp, Homo sapien
taacttatcaagacatgaggcccat

SEQ ID NO: 6084639 - DNA, 25 bp, Homo sapien
tctttgtgatccgtcagttccgcag

SEQ ID NO: 6084640 - DNA, 25 bp, Homo sapien
gcagcacataacctgcacacattgg

SEQ ID NO: 6084641 - DNA, 25 bp, Homo sapien
tccaccgataaccgggagggagatg

SEQ ID NO: 6084642 - DNA, 25 bp, Homo sapien
cacggtggcggtgcgggtgaactgg

SEQ ID NO: 6084643 - DNA, 25 bp, Homo sapien
gggaggtcgaaggtgccatcttctt

SEQ ID NO: 6084644 - DNA, 25 bp, Homo sapien
gactccggggtcagtccactgttgg

SEQ ID NO: 6084645 - DNA, 25 bp, Homo sapien
gagatgtcgccaaacatgtcactgc

SEQ ID NO: 6084646 - DNA, 25 bp, Homo sapien
gatggaaggccccaggtccacgtgc

SEQ ID NO: 6084647 - DNA, 25 bp, Homo sapien
gatcatgtccgaggacagcaggtcc

SEQ ID NO: 6084648 - DNA, 25 bp, Homo sapien
ccagcggtgggctgatcatgtccga

SEQ ID NO: 6084649 - DNA, 25 bp, Homo sapien
gccgccactgccaatatgaatggtg

SEQ ID NO: 6084650 - DNA, 25 bp, Homo sapien
cgaaggtgccatcttcttcaggccc

SEQ ID NO: 6084651 - DNA, 25 bp, Homo sapien
agcaggtcccgaagcttctccttct

SEQ ID NO: 6084652 - DNA, 25 bp, Homo sapien
gagctggcattggacaggaagggct

SEQ ID NO: 6084653 - DNA, 25 bp, Homo sapien
gggtgggatggtcaaacatgtcctc

SEQ ID NO: 6084654 - DNA, 25 bp, Homo sapien
tggcatttttgagcaccggggaggg

SEQ ID NO: 6084655 - DNA, 25 bp, Homo sapien
gagcttgggatcctccaatggtcgg

SEQ ID NO: 6084656 - DNA, 25 bp, Homo sapien
tgggatggtcaaacatgtcctcggc

SEQ ID NO: 6084657 - DNA, 25 bp, Homo sapien
tcaaacatgtcctcggctggccagt

SEQ ID NO: 6084658 - DNA, 25 bp, Homo sapien
aatgtcactggtgacaataagggca

SEQ ID NO: 6084659 - DNA, 25 bp, Homo sapien
gcagctttgctggcccgaaggactc

SEQ ID NO: 6084660 - DNA, 25 bp, Homo sapien
cttgggatcctccaatggtcgggag

SEQ ID NO: 6084661 - DNA, 25 bp, Homo sapien
gtcactggtgacaataagggcaaca

SEQ ID NO: 6084662 - DNA, 25 bp, Homo sapien
cggggagggcgtttctgtgaacaca

SEQ ID NO: 6084663 - DNA, 25 bp, Homo sapien
ttggctggactgagatgcagaaccg

SEQ ID NO: 6084664 - DNA, 25 bp, Homo sapien
tgtcactggtgacaataagggcaac

SEQ ID NO: 6084665 - DNA, 25 bp, Homo sapien
tggtaaaccctagaatgcgttgtgt

SEQ ID NO: 6084666 - DNA, 25 bp, Homo sapien
tagctagatagaatgaggtgagcca

SEQ ID NO: 6084667 - DNA, 25 bp, Homo sapien
ccctagaatgcgttgtgtacccttt

SEQ ID NO: 6084668 - DNA, 25 bp, Homo sapien
aggtgcgaatcaccatgcctgctaa

SEQ ID NO: 6084669 - DNA, 25 bp, Homo sapien
tttttgccctgcttacctgtttgtg

SEQ ID NO: 6084670 - DNA, 25 bp, Homo sapien
tttaggtagcgcttgtgctgagatg

SEQ ID NO: 6084671 - DNA, 25 bp, Homo sapien
caggctgtagctagatagaatgagg

SEQ ID NO: 6084672 - DNA, 25 bp, Homo sapien
taccctttttaggtagcgcttgtgc

SEQ ID NO: 6084673 - DNA, 25 bp, Homo sapien
ttgcaggctgtagctagatagaatg

SEQ ID NO: 6084674 - DNA, 25 bp, Homo sapien
cctggcttctcttggggaaaacaat

SEQ ID NO: 6084675 - DNA, 25 bp, Homo sapien
gatagaatgaggtgagccaggtaat

SEQ ID NO: 6084676 - DNA, 25 bp, Homo sapien
taaaccctagaatgcgttgtgtacc

SEQ ID NO: 6084677 - DNA, 25 bp, Homo sapien
ggctggggacccccacagcaggcaa

SEQ ID NO: 6084678 - DNA, 25 bp, Homo sapien
tgcagcagctgttgaggttgcccaa

SEQ ID NO: 6084679 - DNA, 25 bp, Homo sapien
catctggacactgaagaagggagcc

SEQ ID NO: 6084680 - DNA, 25 bp, Homo sapien
ttgtcccacacggaccacatctgga

SEQ ID NO: 6084681 - DNA, 25 bp, Homo sapien
gcagcccccgagtggtggcagctaa

SEQ ID NO: 6084682 - DNA, 25 bp, Homo sapien
ggtaacaggtggctgttgaagccca

SEQ ID NO: 6084683 - DNA, 25 bp, Homo sapien
ccccagcgagtctttcctaaaagat

SEQ ID NO: 6084684 - DNA, 25 bp, Homo sapien
ttcaggcctgggcctcccactgagg

SEQ ID NO: 6084685 - DNA, 25 bp, Homo sapien
ggctgaggctgaggctgagggtggc

SEQ ID NO: 6084686 - DNA, 25 bp, Homo sapien
ccttccccatctgccagctccaagt

SEQ ID NO: 6084687 - DNA, 25 bp, Homo sapien
aagaagggagcccagcaagcgatgt

SEQ ID NO: 6084688 - DNA, 25 bp, Homo sapien
cctcccacccgccaggcctgtgtct

SEQ ID NO: 6084689 - DNA, 25 bp, Homo sapien
tgctgctgacccgagatggcagccc

SEQ ID NO: 6084690 - DNA, 25 bp, Homo sapien
gcaggggccgcggtaacaggtggct

SEQ ID NO: 6084691 - DNA, 25 bp, Homo sapien
gcctgggcctcccactgagggttag

SEQ ID NO: 6084692 - DNA, 25 bp, Homo sapien
tccaagtcccttggtgactcttcag

SEQ ID NO: 6084693 - DNA, 25 bp, Homo sapien
ccagcacgatgacaaaggtcatctt

SEQ ID NO: 6084694 - DNA, 25 bp, Homo sapien
agaggctgccgtcggagagccgccg

SEQ ID NO: 6084695 - DNA, 25 bp, Homo sapien
cactgagggttaggctgaggctgag

SEQ ID NO: 6084696 - DNA, 25 bp, Homo sapien
gggttaggctgaggctgaggctgag

SEQ ID NO: 6084697 - DNA, 25 bp, Homo sapien
ccgggcagctggagcgggtcagcag

SEQ ID NO: 6084698 - DNA, 25 bp, Homo sapien
ggtgactcttcaggcctgggcctcc

SEQ ID NO: 6084699 - DNA, 25 bp, Homo sapien
ggtgacgcaggggccgcggtaacag

SEQ ID NO: 6084700 - DNA, 25 bp, Homo sapien
tggtgaaagccacattggtggaatc

SEQ ID NO: 6084701 - DNA, 25 bp, Homo sapien
gggacccccacagcaggcaaggtga

SEQ ID NO: 6084702 - DNA, 25 bp, Homo sapien
gtgagggcctgtcccaagtcctcca

SEQ ID NO: 6084703 - DNA, 25 bp, Homo sapien
ggcaaggtgacgcaggggccgcggt

SEQ ID NO: 6084704 - DNA, 25 bp, Homo sapien
ggaccacatctggacactgaagaag

SEQ ID NO: 6084705 - DNA, 25 bp, Homo sapien
aaagcatagagatggtgaaagccac

SEQ ID NO: 6084706 - DNA, 25 bp, Homo sapien
taaaagatgatggtctcagcggtgc

SEQ ID NO: 6084707 - DNA, 25 bp, Homo sapien
tcagcagcgtggtgtggcggctcga

SEQ ID NO: 6084708 - DNA, 25 bp, Homo sapien
tgaggttgcccaaaagcatagagat

SEQ ID NO: 6084709 - DNA, 25 bp, Homo sapien
cccgtgagatggtgttgatgctgct

SEQ ID NO: 6084710 - DNA, 25 bp, Homo sapien
gcgtggtgtggcggctcgagaggct

SEQ ID NO: 6084711 - DNA, 25 bp, Homo sapien
ggctgaggctgagggtggccgggca

SEQ ID NO: 6084712 - DNA, 25 bp, Homo sapien
gcgagtctttcctaaaagatgatgg

SEQ ID NO: 6084713 - DNA, 25 bp, Homo sapien
tgccgtcggagagccgccggcgcat

SEQ ID NO: 6084714 - DNA, 25 bp, Homo sapien
cagaccccagcgagtctttcctaaa

SEQ ID NO: 6084715 - DNA, 25 bp, Homo sapien
atgatggtctcagcggtgccttccc

SEQ ID NO: 6084716 - DNA, 25 bp, Homo sapien
tcggagagccgccggcgcatcctgg

SEQ ID NO: 6084717 - DNA, 25 bp, Homo sapien
ttcggatcttggcccgtgagatggt

SEQ ID NO: 6084718 - DNA, 25 bp, Homo sapien
gggttgcagcagctgttgaggttgc

SEQ ID NO: 6084719 - DNA, 25 bp, Homo sapien
gcattcttgtcccacacggaccaca

SEQ ID NO: 6084720 - DNA, 25 bp, Homo sapien
cccgagatggcagcccccgagtggt

SEQ ID NO: 6084721 - DNA, 25 bp, Homo sapien
agtggtggcagctaaggtggaaggt

SEQ ID NO: 6084722 - DNA, 25 bp, Homo sapien
ggcagctaaggtggaaggtgagggc

SEQ ID NO: 6084723 - DNA, 25 bp, Homo sapien
ggagcccagcaagcgatgtaggcca

SEQ ID NO: 6084724 - DNA, 25 bp, Homo sapien
gggtggccgggcagctggagcgggt

SEQ ID NO: 6084725 - DNA, 25 bp, Homo sapien
caggtggctgttgaagcccatgtag

SEQ ID NO: 6084726 - DNA, 25 bp, Homo sapien
agctgttgaggttgcccaaaagcat

SEQ ID NO: 6084727 - DNA, 25 bp, Homo sapien
tccagccccctcctcccacccgcca

SEQ ID NO: 6084728 - DNA, 25 bp, Homo sapien
cccctcctcccacccgccaggcctg

SEQ ID NO: 6084729 - DNA, 25 bp, Homo sapien
cacacggaccacatctggacactga

SEQ ID NO: 6084730 - DNA, 25 bp, Homo sapien
tgttgatgctgctgacccgagatgg

SEQ ID NO: 6084731 - DNA, 25 bp, Homo sapien
ggctcgagaggctgccgtcggagag

SEQ ID NO: 6084732 - DNA, 25 bp, Homo sapien
ctttcctaaaagatgatggtctcag

SEQ ID NO: 6084733 - DNA, 25 bp, Homo sapien
agcgatgtaggccagcacgatgaca

SEQ ID NO: 6084734 - DNA, 25 bp, Homo sapien
agatggtgttgatgctgctgacccg

SEQ ID NO: 6084735 - DNA, 25 bp, Homo sapien
cggtgccttccccatctgccagctc

SEQ ID NO: 6084736 - DNA, 25 bp, Homo sapien
tcatcttcactgttcggatcttggc

SEQ ID NO: 6084737 - DNA, 25 bp, Homo sapien
cattggtggaatcttcatcaggggc

SEQ ID NO: 6084738 - DNA, 25 bp, Homo sapien
gaagcccatgtagatccaggggttg

SEQ ID NO: 6084739 - DNA, 25 bp, Homo sapien
cgatgacaaaggtcatcttcactgt

SEQ ID NO: 6084740 - DNA, 25 bp, Homo sapien
ccatctgccagctccaagtcccttg

SEQ ID NO: 6084741 - DNA, 25 bp, Homo sapien
tcaggggcattcttgtcccacacgg

SEQ ID NO: 6084742 - DNA, 25 bp, Homo sapien
gctgttgaagcccatgtagatccag

SEQ ID NO: 6084743 - DNA, 25 bp, Homo sapien
tgcccaaaagcatagagatggtgaa

SEQ ID NO: 6084744 - DNA, 25 bp, Homo sapien
ggctgagggtggccgggcagctgga

SEQ ID NO: 6084745 - DNA, 25 bp, Homo sapien
agcgggtcagcagcgtggtgtggcg

SEQ ID NO: 6084746 - DNA, 25 bp, Homo sapien
tcctgggctggggacccccacagca

SEQ ID NO: 6084747 - DNA, 25 bp, Homo sapien
tagagatggtgaaagccacattggt

SEQ ID NO: 6084748 - DNA, 25 bp, Homo sapien
gccagctccaagtcccttggtgact

SEQ ID NO: 6084749 - DNA, 25 bp, Homo sapien
tgtggcggctcgagaggctgccgtc

SEQ ID NO: 6084750 - DNA, 25 bp, Homo sapien
cccccgagtggtggcagctaaggtg

SEQ ID NO: 6084751 - DNA, 25 bp, Homo sapien
aagccacattggtggaatcttcatc

SEQ ID NO: 6084752 - DNA, 25 bp, Homo sapien
catgtagatccaggggttgcagcag

SEQ ID NO: 6084753 - DNA, 25 bp, Homo sapien
cccacagcaggcaaggtgacgcagg

SEQ ID NO: 6084754 - DNA, 25 bp, Homo sapien
agccgccggcgcatcctgggctggg

SEQ ID NO: 6084755 - DNA, 25 bp, Homo sapien
gaaggtgagggcctgtcccaagtcc

SEQ ID NO: 6084756 - DNA, 25 bp, Homo sapien
ccagcaagcgatgtaggccagcacg

SEQ ID NO: 6084757 - DNA, 25 bp, Homo sapien
gacactgaagaagggagcccagcaa

SEQ ID NO: 6084758 - DNA, 25 bp, Homo sapien
tcttggcccgtgagatggtgttgat

SEQ ID NO: 6084759 - DNA, 25 bp, Homo sapien
caaaggtcatcttcactgttcggat

SEQ ID NO: 6084760 - DNA, 25 bp, Homo sapien
gcctcccactgagggttaggctgag

SEQ ID NO: 6084761 - DNA, 25 bp, Homo sapien
tctcagcggtgccttccccatctgc

SEQ ID NO: 6084762 - DNA, 25 bp, Homo sapien
taaggtggaaggtgagggcctgtcc

SEQ ID NO: 6084763 - DNA, 25 bp, Homo sapien
ggccgcggtaacaggtggctgttga

SEQ ID NO: 6084764 - DNA, 25 bp, Homo sapien
agctggagcgggtcagcagcgtggt

SEQ ID NO: 6084765 - DNA, 25 bp, Homo sapien
atccaggggttgcagcagctgttga

SEQ ID NO: 6084766 - DNA, 25 bp, Homo sapien
tcccttggtgactcttcaggcctgg

SEQ ID NO: 6084767 - DNA, 25 bp, Homo sapien
tcactgttcggatcttggcccgtga

SEQ ID NO: 6084768 - DNA, 25 bp, Homo sapien
cttcatcaggggcattcttgtccca

SEQ ID NO: 6084769 - DNA, 25 bp, Homo sapien
tggaatcttcatcaggggcattctt

SEQ ID NO: 6084770 - DNA, 25 bp, Homo sapien
tgtaggccagcacgatgacaaaggt

SEQ ID NO: 6084771 - DNA, 25 bp, Homo sapien
tgatccccataagctgaatggccgt

SEQ ID NO: 6084772 - DNA, 25 bp, Homo sapien
ggtaaacccaaggatccaagatctg

SEQ ID NO: 6084773 - DNA, 25 bp, Homo sapien
ttagataatgagataggctgccctt

SEQ ID NO: 6084774 - DNA, 25 bp, Homo sapien
cacatattcagctacgaatggcaga

SEQ ID NO: 6084775 - DNA, 25 bp, Homo sapien
tcagtgaagccaggcgaacagctat

SEQ ID NO: 6084776 - DNA, 25 bp, Homo sapien
tggcaaaactttcgaagaaggatct

SEQ ID NO: 6084777 - DNA, 25 bp, Homo sapien
gtttcactacttttggcacataggg

SEQ ID NO: 6084778 - DNA, 25 bp, Homo sapien
tcttgcagtgctcaactgatgtctg

SEQ ID NO: 6084779 - DNA, 25 bp, Homo sapien
tgtccatcattagagcagctggaga

SEQ ID NO: 6084780 - DNA, 25 bp, Homo sapien
gcttctccgtgtgtgtcttgcagtg

SEQ ID NO: 6084781 - DNA, 25 bp, Homo sapien
gaatggcagactcaacaaaaacact

SEQ ID NO: 6084782 - DNA, 25 bp, Homo sapien
caatgcataaacagtggcatgccag

SEQ ID NO: 6084783 - DNA, 25 bp, Homo sapien
cgccgagtttcgcacggtgccgtat

SEQ ID NO: 6084784 - DNA, 25 bp, Homo sapien
tcttcatagggttccgagccaggtc

SEQ ID NO: 6084785 - DNA, 25 bp, Homo sapien
tacgtgtcgcggaaggtctcgctgc

SEQ ID NO: 6084786 - DNA, 25 bp, Homo sapien
gttggagaagtcctcgcacaccgtg

SEQ ID NO: 6084787 - DNA, 25 bp, Homo sapien
tggtcagctgcgtcacgtccaggtt

SEQ ID NO: 6084788 - DNA, 25 bp, Homo sapien
tccgaggcggcgatcttgtagccca

SEQ ID NO: 6084789 - DNA, 25 bp, Homo sapien
gccccgcgtgttgttctggatccag

SEQ ID NO: 6084790 - DNA, 25 bp, Homo sapien
ggtgccgtatttgtgcttgcccagg

SEQ ID NO: 6084791 - DNA, 25 bp, Homo sapien
ttgaggtttaatcgcgggtcttcca

SEQ ID NO: 6084792 - DNA, 25 bp, Homo sapien
gtctcgctgcgcgaagccagaatgc

SEQ ID NO: 6084793 - DNA, 25 bp, Homo sapien
tcgtagcgcaccaacatgtacttgc

SEQ ID NO: 6084794 - DNA, 25 bp, Homo sapien
taggagaggcggaagcgccacttct

SEQ ID NO: 6084795 - DNA, 25 bp, Homo sapien
tccagctggaacatgatgtcatgcc

SEQ ID NO: 6084796 - DNA, 25 bp, Homo sapien
gatcccattgcccatcagactggct

SEQ ID NO: 6084797 - DNA, 25 bp, Homo sapien
tgaagctctcacaggagacggccgt

SEQ ID NO: 6084798 - DNA, 25 bp, Homo sapien
gagggcaccgtccagaggaaataga

SEQ ID NO: 6084799 - DNA, 25 bp, Homo sapien
gccattggccgactccatgatgaag

SEQ ID NO: 6084800 - DNA, 25 bp, Homo sapien
ctgagggttatgtgcagggccccat

SEQ ID NO: 6084801 - DNA, 25 bp, Homo sapien
ctcaggctccaaacaatcttgaagg

SEQ ID NO: 6084802 - DNA, 25 bp, Homo sapien
tgatgcaactcctgcgaccgaggtt

SEQ ID NO: 6084803 - DNA, 25 bp, Homo sapien
tgggcaggtagcatgtgatgaacac

SEQ ID NO: 6084804 - DNA, 25 bp, Homo sapien
gacggccgtctcttgcacgcagaga

SEQ ID NO: 6084805 - DNA, 25 bp, Homo sapien
tcgaaattggcatctcttccggcct

SEQ ID NO: 6084806 - DNA, 25 bp, Homo sapien
gaaatagagtctagcagacacgctg

SEQ ID NO: 6084807 - DNA, 25 bp, Homo sapien
tcgaaattggcatctcttccggcct

SEQ ID NO: 6084808 - DNA, 25 bp, Homo sapien
gacggccgtctcttgcacgcagaga

SEQ ID NO: 6084809 - DNA, 25 bp, Homo sapien
ctgagggttatgtgcagggccccat

SEQ ID NO: 6084810 - DNA, 25 bp, Homo sapien
ctcaggctccaaacaatcttgaagg

SEQ ID NO: 6084811 - DNA, 25 bp, Homo sapien
tgatgcaactcctgcgaccgaggtt

SEQ ID NO: 6084812 - DNA, 25 bp, Homo sapien
gccattggccgactccatgatgaag

SEQ ID NO: 6084813 - DNA, 25 bp, Homo sapien
tccagctggaacatgatgtcatgcc

SEQ ID NO: 6084814 - DNA, 25 bp, Homo sapien
gatcccattgcccatcagactggct

SEQ ID NO: 6084815 - DNA, 25 bp, Homo sapien
tgggcaggtagcatgtgatgaacac

SEQ ID NO: 6084816 - DNA, 25 bp, Homo sapien
gagggcaccgtccagaggaaataga

SEQ ID NO: 6084817 - DNA, 25 bp, Homo sapien
gaaatagagtctagcagacacgctg

SEQ ID NO: 6084818 - DNA, 25 bp, Homo sapien
tgaagctctcacaggagacggccgt

SEQ ID NO: 6084819 - DNA, 25 bp, Homo sapien
ctgagggttatgtgcagggccccat

SEQ ID NO: 6084820 - DNA, 25 bp, Homo sapien
tgaagctctcacaggagacggccgt

SEQ ID NO: 6084821 - DNA, 25 bp, Homo sapien
tccagctggaacatgatgtcatgcc

SEQ ID NO: 6084822 - DNA, 25 bp, Homo sapien
tgggcaggtagcatgtgatgaacac

SEQ ID NO: 6084823 - DNA, 25 bp, Homo sapien
ctcaggctccaaacaatcttgaagg

SEQ ID NO: 6084824 - DNA, 25 bp, Homo sapien
gaaatagagtctagcagacacgctg

SEQ ID NO: 6084825 - DNA, 25 bp, Homo sapien
gccattggccgactccatgatgaag

SEQ ID NO: 6084826 - DNA, 25 bp, Homo sapien
gacggccgtctcttgcacgcagaga

SEQ ID NO: 6084827 - DNA, 25 bp, Homo sapien
gatcccattgcccatcagactggct

SEQ ID NO: 6084828 - DNA, 25 bp, Homo sapien
tgatgcaactcctgcgaccgaggtt

SEQ ID NO: 6084829 - DNA, 25 bp, Homo sapien
gagggcaccgtccagaggaaataga

SEQ ID NO: 6084830 - DNA, 25 bp, Homo sapien
tcgaaattggcatctcttccggcct

SEQ ID NO: 6084831 - DNA, 25 bp, Homo sapien
ttctcttgcgagtgatggtggcagc

SEQ ID NO: 6084832 - DNA, 25 bp, Homo sapien
actgcctgtcaacttctacaacctg

SEQ ID NO: 6084833 - DNA, 25 bp, Homo sapien
gcactgcttggcccctacatcatta

SEQ ID NO: 6084834 - DNA, 25 bp, Homo sapien
tgcctgtcaacttctacaacctggt

SEQ ID NO: 6084835 - DNA, 25 bp, Homo sapien
gtggcagctgtttcagggggcacag

SEQ ID NO: 6084836 - DNA, 25 bp, Homo sapien
tctcttgcgagtgatggtggcagct

SEQ ID NO: 6084837 - DNA, 25 bp, Homo sapien
catggcactgcctgtcaacttctac

SEQ ID NO: 6084838 - DNA, 25 bp, Homo sapien
atcattacccccctattttggctgt

SEQ ID NO: 6084839 - DNA, 25 bp, Homo sapien
tggcactgcctgtcaacttctacaa

SEQ ID NO: 6084840 - DNA, 25 bp, Homo sapien
ccatggcactgcctgtcaacttcta

SEQ ID NO: 6084841 - DNA, 25 bp, Homo sapien
gtctggcatcaacccctcccaaaga

SEQ ID NO: 6084842 - DNA, 25 bp, Homo sapien
gattctcttgcgagtgatggtggca

SEQ ID NO: 6084843 - DNA, 25 bp, Homo sapien
gggtcttggtgccaattctgatgca

SEQ ID NO: 6084844 - DNA, 25 bp, Homo sapien
agttttcagtcacaggatccctggg

SEQ ID NO: 6084845 - DNA, 25 bp, Homo sapien
ctacctccacggtggtattagttgg

SEQ ID NO: 6084846 - DNA, 25 bp, Homo sapien
tggcattgcaaagtgcatagcaggc

SEQ ID NO: 6084847 - DNA, 25 bp, Homo sapien
gatgaaagccaacagaatagccaag

SEQ ID NO: 6084848 - DNA, 25 bp, Homo sapien
tcttgcgggctacaatattctgctt

SEQ ID NO: 6084849 - DNA, 25 bp, Homo sapien
tcttcacaatcttgcgggctacaat

SEQ ID NO: 6084850 - DNA, 25 bp, Homo sapien
ctctcatattagaggcaacagcact

SEQ ID NO: 6084851 - DNA, 25 bp, Homo sapien
gatgcaaggtgcacaaaaggtgtta

SEQ ID NO: 6084852 - DNA, 25 bp, Homo sapien
gagttctcatctttggaatggccca

SEQ ID NO: 6084853 - DNA, 25 bp, Homo sapien
gatgcatgtttgcttagagttctca

SEQ ID NO: 6084854 - DNA, 25 bp, Homo sapien
cactgactgaggtggagtcattgga

SEQ ID NO: 6084855 - DNA, 25 bp, Homo sapien
tgactctagctggatgggaagcttg

SEQ ID NO: 6084856 - DNA, 25 bp, Homo sapien
tcttacccactgaggagttgacgtc

SEQ ID NO: 6084857 - DNA, 25 bp, Homo sapien
aaaaatgaccgactgtctctgctgg

SEQ ID NO: 6084858 - DNA, 25 bp, Homo sapien
tgatgaaggcaagcaagatcgcact

SEQ ID NO: 6084859 - DNA, 25 bp, Homo sapien
aaggttttgggtatgcagctgtcac

SEQ ID NO: 6084860 - DNA, 25 bp, Homo sapien
tagctgtgtccacggctgactctag

SEQ ID NO: 6084861 - DNA, 25 bp, Homo sapien
caagatcgcactgagggtctgggcc

SEQ ID NO: 6084862 - DNA, 25 bp, Homo sapien
ggtagagtggccgtgctcttaccca

SEQ ID NO: 6084863 - DNA, 25 bp, Homo sapien
tgcaggttgtccgatgagggtaact

SEQ ID NO: 6084864 - DNA, 25 bp, Homo sapien
agggacatccttttccgcttagtga

SEQ ID NO: 6084865 - DNA, 25 bp, Homo sapien
gccagtagcccagattccaaaaggt

SEQ ID NO: 6084866 - DNA, 25 bp, Homo sapien
gcttccttgaaggacagaggtagag

SEQ ID NO: 6084867 - DNA, 25 bp, Homo sapien
ttgcgagcgatgctggcgaacttgc

SEQ ID NO: 6084868 - DNA, 25 bp, Homo sapien
tcattgcctgtctgcttcgtcacaa

SEQ ID NO: 6084869 - DNA, 25 bp, Homo sapien
agcagagccagtagccaatggacca

SEQ ID NO: 6084870 - DNA, 25 bp, Homo sapien
gcaggcacaatctcaatggctgtca

SEQ ID NO: 6084871 - DNA, 25 bp, Homo sapien
cagcaggtgccggaaggtcttttta

SEQ ID NO: 6084872 - DNA, 25 bp, Homo sapien
ccatgacgttgtagggcgtccaggt

SEQ ID NO: 6084873 - DNA, 25 bp, Homo sapien
caatggaccacaccgtgtcagggat

SEQ ID NO: 6084874 - DNA, 25 bp, Homo sapien
tggaagtgtccttatcagccacggg

SEQ ID NO: 6084875 - DNA, 25 bp, Homo sapien
cagaatggcaaagatcgttcgtgtc

SEQ ID NO: 6084876 - DNA, 25 bp, Homo sapien
gaacttgcgggccacgttggccgca

SEQ ID NO: 6084877 - DNA, 25 bp, Homo sapien
tctggcagaaggtgttcaccaggac

SEQ ID NO: 6084878 - DNA, 25 bp, Homo sapien
taaaggtggcgttgcacagagcata

SEQ ID NO: 6084879 - DNA, 25 bp, Homo sapien
agccccacagccaggctgataaact

SEQ ID NO: 6084880 - DNA, 25 bp, Homo sapien
gaaaacacattcacgtgtgagtttc

SEQ ID NO: 6084881 - DNA, 25 bp, Homo sapien
cttcccctcgatttggcccaggcgc

SEQ ID NO: 6084882 - DNA, 25 bp, Homo sapien
tcccgtgcaccgtgccgttggggaa

SEQ ID NO: 6084883 - DNA, 25 bp, Homo sapien
ttggggaagatctccaggtggaagc

SEQ ID NO: 6084884 - DNA, 25 bp, Homo sapien
gtcctgtatccctcccggggtgagc

SEQ ID NO: 6084885 - DNA, 25 bp, Homo sapien
ggatgctgatcagccccacagccag

SEQ ID NO: 6084886 - DNA, 25 bp, Homo sapien
tgtcgtttagtcctgtatccctccc

SEQ ID NO: 6084887 - DNA, 25 bp, Homo sapien
aagtgagtgaatttctggtgtcgtt

SEQ ID NO: 6084888 - DNA, 25 bp, Homo sapien
gtggaagccggtgcggcagtagagc

SEQ ID NO: 6084889 - DNA, 25 bp, Homo sapien
aggctgataaactccaggattccga

SEQ ID NO: 6084890 - DNA, 25 bp, Homo sapien
acagccaggctgataaactccagga

SEQ ID NO: 6084891 - DNA, 25 bp, Homo sapien
cgaagacgccccccacctctgccat

SEQ ID NO: 6084892 - DNA, 25 bp, Homo sapien
tactgtctctctgagtccgaatgtt

SEQ ID NO: 6084893 - DNA, 25 bp, Homo sapien
agggccacgtaatactgtctctctg

SEQ ID NO: 6084894 - DNA, 25 bp, Homo sapien
atccctcccggggtgagccatcttt

SEQ ID NO: 6084895 - DNA, 25 bp, Homo sapien
gttctcctcgctcattcattcctag

SEQ ID NO: 6084896 - DNA, 25 bp, Homo sapien
cattcattcctaggtacaggccaga

SEQ ID NO: 6084897 - DNA, 25 bp, Homo sapien
gtaaaaagtgagtgaatttctggtg

SEQ ID NO: 6084898 - DNA, 25 bp, Homo sapien
gcggcagtagagctggcggcgccgc

SEQ ID NO: 6084899 - DNA, 25 bp, Homo sapien
cccaggcgctcgttcaggaaacctg

SEQ ID NO: 6084900 - DNA, 25 bp, Homo sapien
cccggggtgagccatctttgttcag

SEQ ID NO: 6084901 - DNA, 25 bp, Homo sapien
tgatcagccccacagccaggctgat

SEQ ID NO: 6084902 - DNA, 25 bp, Homo sapien
ttcctaggtacaggccagagtccac

SEQ ID NO: 6084903 - DNA, 25 bp, Homo sapien
ccgtgtagatcccagtccaaggagg

SEQ ID NO: 6084904 - DNA, 25 bp, Homo sapien
ttcccggaaaacacattcacgtgtg

SEQ ID NO: 6084905 - DNA, 25 bp, Homo sapien
caacttagaaggatctacaggcctg

SEQ ID NO: 6084906 - DNA, 25 bp, Homo sapien
agtccactccccggatgctgatcag

SEQ ID NO: 6084907 - DNA, 25 bp, Homo sapien
ggtacaggccagagtccactccccg

SEQ ID NO: 6084908 - DNA, 25 bp, Homo sapien
ctggcggcgccgcaggatccccttc

SEQ ID NO: 6084909 - DNA, 25 bp, Homo sapien
ctccaggtggaagccggtgcggcag

SEQ ID NO: 6084910 - DNA, 25 bp, Homo sapien
acgtaatactgtctctctgagtccg

SEQ ID NO: 6084911 - DNA, 25 bp, Homo sapien
gggagtcagctaagggcacgttccc

SEQ ID NO: 6084912 - DNA, 25 bp, Homo sapien
atctacaggcctgggtaaaaagtga

SEQ ID NO: 6084913 - DNA, 25 bp, Homo sapien
tccaggattccgaagcggctgtggt

SEQ ID NO: 6084914 - DNA, 25 bp, Homo sapien
ggctgtggtcgtggcgggtcccgtg

SEQ ID NO: 6084915 - DNA, 25 bp, Homo sapien
cgctcgttcaggaaacctggggagt

SEQ ID NO: 6084916 - DNA, 25 bp, Homo sapien
ggcgccgcaggatccccttcaggtg

SEQ ID NO: 6084917 - DNA, 25 bp, Homo sapien
ggccagagtccactccccggatgct

SEQ ID NO: 6084918 - DNA, 25 bp, Homo sapien
gtctgtgggtgagccacgctgcagc

SEQ ID NO: 6084919 - DNA, 25 bp, Homo sapien
cgaagcggctgtggtcgtggcgggt

SEQ ID NO: 6084920 - DNA, 25 bp, Homo sapien
gagaagccgtgtagatcccagtcca

SEQ ID NO: 6084921 - DNA, 25 bp, Homo sapien
ctcgctcattcattcctaggtacag

SEQ ID NO: 6084922 - DNA, 25 bp, Homo sapien
tagatcccagtccaaggaggcgaag

SEQ ID NO: 6084923 - DNA, 25 bp, Homo sapien
ctctctgagtccgaatgtttgtaca

SEQ ID NO: 6084924 - DNA, 25 bp, Homo sapien
ctgcagcttcccctcgatttggccc

SEQ ID NO: 6084925 - DNA, 25 bp, Homo sapien
gcaggatccccttcaggtgggcgaa

SEQ ID NO: 6084926 - DNA, 25 bp, Homo sapien
gccggtgcggcagtagagctggcgg

SEQ ID NO: 6084927 - DNA, 25 bp, Homo sapien
tccccttcaggtgggcgaagtctgt

SEQ ID NO: 6084928 - DNA, 25 bp, Homo sapien
ttctggtgtcgtttagtcctgtatc

SEQ ID NO: 6084929 - DNA, 25 bp, Homo sapien
ttcgacccatagagttctcctcgct

SEQ ID NO: 6084930 - DNA, 25 bp, Homo sapien
ttcaggaaacctggggagtcagcta

SEQ ID NO: 6084931 - DNA, 25 bp, Homo sapien
ccccagagacgaggagaagccgtgt

SEQ ID NO: 6084932 - DNA, 25 bp, Homo sapien
aaggttgaggcataggtgttgtacc

SEQ ID NO: 6084933 - DNA, 25 bp, Homo sapien
taggtgttgtaccagttttcttcaa

SEQ ID NO: 6084934 - DNA, 25 bp, Homo sapien
ggcgaagtctgtgggtgagccacgc

SEQ ID NO: 6084935 - DNA, 25 bp, Homo sapien
ataaactccaggattccgaagcggc

SEQ ID NO: 6084936 - DNA, 25 bp, Homo sapien
acattcacgtgtgagtttcttcgac

SEQ ID NO: 6084937 - DNA, 25 bp, Homo sapien
catagagttctcctcgctcattcat

SEQ ID NO: 6084938 - DNA, 25 bp, Homo sapien
ttgtacaaggttgaggcataggtgt

SEQ ID NO: 6084939 - DNA, 25 bp, Homo sapien
atttggcccaggcgctcgttcagga

SEQ ID NO: 6084940 - DNA, 25 bp, Homo sapien
taagggcacgttccccagagacgag

SEQ ID NO: 6084941 - DNA, 25 bp, Homo sapien
tgcaccgtgccgttggggaagatct

SEQ ID NO: 6084942 - DNA, 25 bp, Homo sapien
gcgggtcccgtgcaccgtgccgttg

SEQ ID NO: 6084943 - DNA, 25 bp, Homo sapien
ggagggcaacttagaaggatctaca

SEQ ID NO: 6084944 - DNA, 25 bp, Homo sapien
gtgaatttctggtgtcgtttagtcc

SEQ ID NO: 6084945 - DNA, 25 bp, Homo sapien
ggtgagccatctttgttcagggcca

SEQ ID NO: 6084946 - DNA, 25 bp, Homo sapien
gaggcataggtgttgtaccagtttt

SEQ ID NO: 6084947 - DNA, 25 bp, Homo sapien
ttgttcagggccacgtaatactgtc

SEQ ID NO: 6084948 - DNA, 25 bp, Homo sapien
ccagtccaaggaggcgaagacgccc

SEQ ID NO: 6084949 - DNA, 25 bp, Homo sapien
gagtttcttcgacccatagagttct

SEQ ID NO: 6084950 - DNA, 25 bp, Homo sapien
gccacgctgcagcttcccctcgatt

SEQ ID NO: 6084951 - DNA, 25 bp, Homo sapien
tgtaccagttttcttcaaactgttc

SEQ ID NO: 6084952 - DNA, 25 bp, Homo sapien
gagtccgaatgtttgtacaaggttg

SEQ ID NO: 6084953 - DNA, 25 bp, Homo sapien
cacgttccccagagacgaggagaag

SEQ ID NO: 6084954 - DNA, 25 bp, Homo sapien
caggtgggcgaagtctgtgggtgag

SEQ ID NO: 6084955 - DNA, 25 bp, Homo sapien
attccgaagcggctgtggtcgtggc

SEQ ID NO: 6084956 - DNA, 25 bp, Homo sapien
gtagagctggcggcgccgcaggatc

SEQ ID NO: 6084957 - DNA, 25 bp, Homo sapien
gaatgtttgtacaaggttgaggcat

SEQ ID NO: 6084958 - DNA, 25 bp, Homo sapien
actgttcccggaaaacacattcacg

SEQ ID NO: 6084959 - DNA, 25 bp, Homo sapien
gtgccgttggggaagatctccaggt

SEQ ID NO: 6084960 - DNA, 25 bp, Homo sapien
aagatctccaggtggaagccggtgc

SEQ ID NO: 6084961 - DNA, 25 bp, Homo sapien
acgtgtgagtttcttcgacccatag

SEQ ID NO: 6084962 - DNA, 25 bp, Homo sapien
ctcgatttggcccaggcgctcgttc

SEQ ID NO: 6084963 - DNA, 25 bp, Homo sapien
ccatctttgttcagggccacgtaat

SEQ ID NO: 6084964 - DNA, 25 bp, Homo sapien
gggtgagccacgctgcagcttcccc

SEQ ID NO: 6084965 - DNA, 25 bp, Homo sapien
aggcctgggtaaaaagtgagtgaat

SEQ ID NO: 6084966 - DNA, 25 bp, Homo sapien
ctccccggatgctgatcagccccac

SEQ ID NO: 6084967 - DNA, 25 bp, Homo sapien
gtcagctaagggcacgttccccaga

SEQ ID NO: 6084968 - DNA, 25 bp, Homo sapien
agaaggatctacaggcctgggtaaa

SEQ ID NO: 6084969 - DNA, 25 bp, Homo sapien
agacgaggagaagccgtgtagatcc

SEQ ID NO: 6084970 - DNA, 25 bp, Homo sapien
aacctggggagtcagctaagggcac

SEQ ID NO: 6084971 - DNA, 25 bp, Homo sapien
gtcgtggcgggtcccgtgcaccgtg

SEQ ID NO: 6084972 - DNA, 25 bp, Homo sapien
gcaagtgctctttggagttgcccac

SEQ ID NO: 6084973 - DNA, 25 bp, Homo sapien
ttttgaccgtcttgcggatgcggaa

SEQ ID NO: 6084974 - DNA, 25 bp, Homo sapien
ccttgttgaagtatgcgtaaatgac

SEQ ID NO: 6084975 - DNA, 25 bp, Homo sapien
ccaattgattatggcgcccaacagg

SEQ ID NO: 6084976 - DNA, 25 bp, Homo sapien
catggcgggtgtccgctccggtctt

SEQ ID NO: 6084977 - DNA, 25 bp, Homo sapien
tgcggaagcgcgcagctcggaatat

SEQ ID NO: 6084978 - DNA, 25 bp, Homo sapien
gcagctcggaatatgcgcccataga

SEQ ID NO: 6084979 - DNA, 25 bp, Homo sapien
gggcagaacaagagccacgatgaag

SEQ ID NO: 6084980 - DNA, 25 bp, Homo sapien
ttaagcagagagttggagtagccca

SEQ ID NO: 6084981 - DNA, 25 bp, Homo sapien
gagtagcccagccaattgattatgg

SEQ ID NO: 6084982 - DNA, 25 bp, Homo sapien
gagttgcccactcggtgcacctcga

SEQ ID NO: 6084983 - DNA, 25 bp, Homo sapien
catcttgcgcttcgcctcggcgttg

SEQ ID NO: 6084984 - DNA, 25 bp, Homo sapien
ggactagtgcctgcacaggtaaaca

SEQ ID NO: 6084985 - DNA, 25 bp, Homo sapien
ggtaaacacgatgcttctttacact

SEQ ID NO: 6084986 - DNA, 25 bp, Homo sapien
ggtggttatagaagtgagtctttga

SEQ ID NO: 6084987 - DNA, 25 bp, Homo sapien
gaacatatattgttacattaagcaa

SEQ ID NO: 6084988 - DNA, 25 bp, Homo sapien
tgcacaggtaaacacgatgcttctt

SEQ ID NO: 6084989 - DNA, 25 bp, Homo sapien
attttgattcaacttgtggtggtta

SEQ ID NO: 6084990 - DNA, 25 bp, Homo sapien
tgcctgcacaggtaaacacgatgct

SEQ ID NO: 6084991 - DNA, 25 bp, Homo sapien
tgattcaacttgtggtggttataga

SEQ ID NO: 6084992 - DNA, 25 bp, Homo sapien
tattaatcaatgaggatcatttcca

SEQ ID NO: 6084993 - DNA, 25 bp, Homo sapien
ggaaaagttcaatgtagaatttgtc

SEQ ID NO: 6084994 - DNA, 25 bp, Homo sapien
agttgctggaaaagttcaatgtaga

SEQ ID NO: 6084995 - DNA, 25 bp, Homo sapien
cttgtggtggttatagaagtgagtc

SEQ ID NO: 6084996 - DNA, 25 bp, Homo sapien
agactgctcatgagttttcccctgg

SEQ ID NO: 6084997 - DNA, 25 bp, Homo sapien
caatagtctcattccagccagtgct

SEQ ID NO: 6084998 - DNA, 25 bp, Homo sapien
gacattagccaggaggttctcaaca

SEQ ID NO: 6084999 - DNA, 25 bp, Homo sapien
catctcatagatggtcaatgcggcg

SEQ ID NO: 6085000 - DNA, 25 bp, Homo sapien
gaatcctcccataatatcttttcag

SEQ ID NO: 6085001 - DNA, 25 bp, Homo sapien
taggatttccactctgactatggtc

SEQ ID NO: 6085002 - DNA, 25 bp, Homo sapien
aatgcttgaagcaattgtccagtcc

SEQ ID NO: 6085003 - DNA, 25 bp, Homo sapien
tcggaggtaacctgtaagtctgtta

SEQ ID NO: 6085004 - DNA, 25 bp, Homo sapien
tgatgatagacattagccaggaggt

SEQ ID NO: 6085005 - DNA, 25 bp, Homo sapien
tcaatgcggcgtcctccttctggaa

SEQ ID NO: 6085006 - DNA, 25 bp, Homo sapien
tcagggatgtcaaagttcatcctgt

SEQ ID NO: 6085007 - DNA, 25 bp, Homo sapien
gactgtcttcagatggtttatctga

SEQ ID NO: 6085008 - DNA, 25 bp, Homo sapien
gaaacaatgggccagacatctgttc

SEQ ID NO: 6085009 - DNA, 25 bp, Homo sapien
tgctggcacacagacaagcaggatc

SEQ ID NO: 6085010 - DNA, 25 bp, Homo sapien
gaactcctgagctcaaagacctcgg

SEQ ID NO: 6085011 - DNA, 25 bp, Homo sapien
gacccaggccctgagttaggaggct

SEQ ID NO: 6085012 - DNA, 25 bp, Homo sapien
taaagggctgtctgcctgagactga

SEQ ID NO: 6085013 - DNA, 25 bp, Homo sapien
caggaacagactggaaacaatgggc

SEQ ID NO: 6085014 - DNA, 25 bp, Homo sapien
acctcggccccacaaagagctggga

SEQ ID NO: 6085015 - DNA, 25 bp, Homo sapien
gagagacggtctgtgacaatgccac

SEQ ID NO: 6085016 - DNA, 25 bp, Homo sapien
gatcctttcaaagcccaaattgggc

SEQ ID NO: 6085017 - DNA, 25 bp, Homo sapien
tattttttcaggtaacagcacccag

SEQ ID NO: 6085018 - DNA, 25 bp, Homo sapien
gaccacaggtgtgtgccaccatgcg

SEQ ID NO: 6085019 - DNA, 25 bp, Homo sapien
cagcacccaggattgatgcagactc

SEQ ID NO: 6085020 - DNA, 25 bp, Homo sapien
gaacagcgacgtgaaggtgatcact

SEQ ID NO: 6085021 - DNA, 25 bp, Homo sapien
ggatcgagccagcaggaacatgtgc

SEQ ID NO: 6085022 - DNA, 25 bp, Homo sapien
tggtttcaaaactgccacgtggctt

SEQ ID NO: 6085023 - DNA, 25 bp, Homo sapien
ggcacatgatgggagaagatcacca

SEQ ID NO: 6085024 - DNA, 25 bp, Homo sapien
gatgaagaccccgagcaggatggtc

SEQ ID NO: 6085025 - DNA, 25 bp, Homo sapien
tcaacatgccgttcacctggaagag

SEQ ID NO: 6085026 - DNA, 25 bp, Homo sapien
atcttcctggtgtgggatcgagcca

SEQ ID NO: 6085027 - DNA, 25 bp, Homo sapien
gtgtgatggcccctttcatgttggc

SEQ ID NO: 6085028 - DNA, 25 bp, Homo sapien
tgtagcggtccgcagcaatcacaga

SEQ ID NO: 6085029 - DNA, 25 bp, Homo sapien
cgtgcagaacgtccagatgaccgta

SEQ ID NO: 6085030 - DNA, 25 bp, Homo sapien
gatcaccatggtgatgccagtcccc

SEQ ID NO: 6085031 - DNA, 25 bp, Homo sapien
gatgaagaccagcatcagcgggaac

SEQ ID NO: 6085032 - DNA, 25 bp, Homo sapien
tggaaacatcaatagcttcagattc

SEQ ID NO: 6085033 - DNA, 25 bp, Homo sapien
tacagatcgattccagtggtaccag

SEQ ID NO: 6085034 - DNA, 25 bp, Homo sapien
gctactgtactaattgactactata

SEQ ID NO: 6085035 - DNA, 25 bp, Homo sapien
aaattgtatgtgatagtcaagcagc

SEQ ID NO: 6085036 - DNA, 25 bp, Homo sapien
ttacagtacagatcgattccagtgg

SEQ ID NO: 6085037 - DNA, 25 bp, Homo sapien
tctcaaacagcacttattctggact

SEQ ID NO: 6085038 - DNA, 25 bp, Homo sapien
tatgtatatacaagcttgtgcaagt

SEQ ID NO: 6085039 - DNA, 25 bp, Homo sapien
cattaacaacctgattagatttagg

SEQ ID NO: 6085040 - DNA, 25 bp, Homo sapien
atcatggaatgcaaaggagtaaaag

SEQ ID NO: 6085041 - DNA, 25 bp, Homo sapien
cagtgcaaattgtatgtgatagtca

SEQ ID NO: 6085042 - DNA, 25 bp, Homo sapien
tgtgcattacaccataatatacagg

SEQ ID NO: 6085043 - DNA, 25 bp, Homo sapien
cagcatcacatctcaaacagcactt

SEQ ID NO: 6085044 - DNA, 25 bp, Homo sapien
cagcagtggctgtagtaacagagcc

SEQ ID NO: 6085045 - DNA, 25 bp, Homo sapien
gagtcgtaggagacagaaggtggca

SEQ ID NO: 6085046 - DNA, 25 bp, Homo sapien
tatctacggagatcagctgcatact

SEQ ID NO: 6085047 - DNA, 25 bp, Homo sapien
tggctgtagtaacagagccacgcag

SEQ ID NO: 6085048 - DNA, 25 bp, Homo sapien
gatgtatctacggagatcagctgca

SEQ ID NO: 6085049 - DNA, 25 bp, Homo sapien
tgtatctacggagatcagctgcata

SEQ ID NO: 6085050 - DNA, 25 bp, Homo sapien
gctgtagtaacagagccacgcaggt

SEQ ID NO: 6085051 - DNA, 25 bp, Homo sapien
ggctgtagtaacagagccacgcagg

SEQ ID NO: 6085052 - DNA, 25 bp, Homo sapien
ccctgggtacactggctccagtggg

SEQ ID NO: 6085053 - DNA, 25 bp, Homo sapien
tctacggagatcagctgcatactgg

SEQ ID NO: 6085054 - DNA, 25 bp, Homo sapien
cagtggctgtagtaacagagccacg

SEQ ID NO: 6085055 - DNA, 25 bp, Homo sapien
tacggagatcagctgcatactgggc

SEQ ID NO: 6085056 - DNA, 25 bp, Homo sapien
aacttccgcttcaaactggattgga

SEQ ID NO: 6085057 - DNA, 25 bp, Homo sapien
aaggcctgggccttcatattaagct

SEQ ID NO: 6085058 - DNA, 25 bp, Homo sapien
tctgggcttgctcaattagctgcag

SEQ ID NO: 6085059 - DNA, 25 bp, Homo sapien
gcaatgtccctcattgcctgcaact

SEQ ID NO: 6085060 - DNA, 25 bp, Homo sapien
ttaatccttgatttggtgccttggg

SEQ ID NO: 6085061 - DNA, 25 bp, Homo sapien
ctaagtggctttgagtagccgttag

SEQ ID NO: 6085062 - DNA, 25 bp, Homo sapien
gagtagccgttagtttctgggcttg

SEQ ID NO: 6085063 - DNA, 25 bp, Homo sapien
ttcaaaaataaaccgctttgctgcc

SEQ ID NO: 6085064 - DNA, 25 bp, Homo sapien
tatttaggcactgattatgacttcc

SEQ ID NO: 6085065 - DNA, 25 bp, Homo sapien
tgtctggctcgctcagttgtttctc

SEQ ID NO: 6085066 - DNA, 25 bp, Homo sapien
cgctttgctgccaacttcaaggcct

SEQ ID NO: 6085067 - DNA, 25 bp, Homo sapien
gattaaggactccagataccactgt

SEQ ID NO: 6085068 - DNA, 25 bp, Homo sapien
gacagacttcttgggctgataggaa

SEQ ID NO: 6085069 - DNA, 25 bp, Homo sapien
tctcccctcggatgcggcgcgcaag

SEQ ID NO: 6085070 - DNA, 25 bp, Homo sapien
tttgctttgttcgtgccatggctaa

SEQ ID NO: 6085071 - DNA, 25 bp, Homo sapien
tgccctctcccctcggatgcggcgc

SEQ ID NO: 6085072 - DNA, 25 bp, Homo sapien
ggacagacttcttgggctgatagga

SEQ ID NO: 6085073 - DNA, 25 bp, Homo sapien
gctgtttgctttgttcgtgccatgg

SEQ ID NO: 6085074 - DNA, 25 bp, Homo sapien
agtcctgtgcgatctcccgtaccaa

SEQ ID NO: 6085075 - DNA, 25 bp, Homo sapien
aggtagcttccggattagcagctcg

SEQ ID NO: 6085076 - DNA, 25 bp, Homo sapien
gtcctgtgcgatctcccgtaccaag

SEQ ID NO: 6085077 - DNA, 25 bp, Homo sapien
agacttcttgggctgataggaatat

SEQ ID NO: 6085078 - DNA, 25 bp, Homo sapien
tgtttgctttgttcgtgccatggct

SEQ ID NO: 6085079 - DNA, 25 bp, Homo sapien
gcgagctgtttgctttgttcgtgcc

SEQ ID NO: 6085080 - DNA, 25 bp, Homo sapien
caggatcttcaaggaggccgctgca

SEQ ID NO: 6085081 - DNA, 25 bp, Homo sapien
cacttttgagcagtcgaagtcaggc

SEQ ID NO: 6085082 - DNA, 25 bp, Homo sapien
agttcctcgcgatccggcgggcagt

SEQ ID NO: 6085083 - DNA, 25 bp, Homo sapien
gtcgaagtcaggcttgcccagcttg

SEQ ID NO: 6085084 - DNA, 25 bp, Homo sapien
ataaatgtatgaactgggccatgtc

SEQ ID NO: 6085085 - DNA, 25 bp, Homo sapien
tgagcagtcgaagtcaggcttgccc

SEQ ID NO: 6085086 - DNA, 25 bp, Homo sapien
cggttcacttcattgtgcaggtggc

SEQ ID NO: 6085087 - DNA, 25 bp, Homo sapien
aaataaatgtatgaactgggccatg

SEQ ID NO: 6085088 - DNA, 25 bp, Homo sapien
aagcatgcccgggtgcgggtgtctg

SEQ ID NO: 6085089 - DNA, 25 bp, Homo sapien
gcgccagcgctcatccacttttgag

SEQ ID NO: 6085090 - DNA, 25 bp, Homo sapien
ccagcttgcggttcacttcattgtg

SEQ ID NO: 6085091 - DNA, 25 bp, Homo sapien
tcatccacttttgagcagtcgaagt

SEQ ID NO: 6085092 - DNA, 25 bp, Homo sapien
acagcccagctgtggcggcccagtt

SEQ ID NO: 6085093 - DNA, 25 bp, Homo sapien
gccgaagaatcccagtaccatgagg

SEQ ID NO: 6085094 - DNA, 25 bp, Homo sapien
ggcctggacataggccttgtccttc

SEQ ID NO: 6085095 - DNA, 25 bp, Homo sapien
taccatgaggacgtagagggcctcc

SEQ ID NO: 6085096 - DNA, 25 bp, Homo sapien
cagcttggtcagaaagggcgtcacc

SEQ ID NO: 6085097 - DNA, 25 bp, Homo sapien
tcagaaagggcgtcaccgctgtggt

SEQ ID NO: 6085098 - DNA, 25 bp, Homo sapien
tgggttgttctatggccagatggtt

SEQ ID NO: 6085099 - DNA, 25 bp, Homo sapien
ccgctgtggtgttagacaggatcat

SEQ ID NO: 6085100 - DNA, 25 bp, Homo sapien
ggtgaagaagccgaagaatcccagt

SEQ ID NO: 6085101 - DNA, 25 bp, Homo sapien
gaatgggtcgttcgagtgctccagc

SEQ ID NO: 6085102 - DNA, 25 bp, Homo sapien
tcttgccaggcatcggactcgatgt

SEQ ID NO: 6085103 - DNA, 25 bp, Homo sapien
ctcgatgtagacgttgaatgggtcg

SEQ ID NO: 6085104 - DNA, 25 bp, Homo sapien
cggatgtagctcagcatgatgccca

SEQ ID NO: 6085105 - DNA, 25 bp, Homo sapien
ctgatactctgaaactcgtttctca

SEQ ID NO: 6085106 - DNA, 25 bp, Homo sapien
acgctgatactctgaaactcgtttc

SEQ ID NO: 6085107 - DNA, 25 bp, Homo sapien
aaaacgctgatactctgaaactcgt

SEQ ID NO: 6085108 - DNA, 25 bp, Homo sapien
aaacgctgatactctgaaactcgtt

SEQ ID NO: 6085109 - DNA, 25 bp, Homo sapien
tgccataactgcaaaacgctgatac

SEQ ID NO: 6085110 - DNA, 25 bp, Homo sapien
ctgccataactgcaaaacgctgata

SEQ ID NO: 6085111 - DNA, 25 bp, Homo sapien
tctgccataactgcaaaacgctgat

SEQ ID NO: 6085112 - DNA, 25 bp, Homo sapien
aacgctgatactctgaaactcgttt

SEQ ID NO: 6085113 - DNA, 25 bp, Homo sapien
caaaacgctgatactctgaaactcg

SEQ ID NO: 6085114 - DNA, 25 bp, Homo sapien
tgatactctgaaactcgtttctcaa

SEQ ID NO: 6085115 - DNA, 25 bp, Homo sapien
tcaggatattgcacattcttggcaa

SEQ ID NO: 6085116 - DNA, 25 bp, Homo sapien
taggcattctctccattgagttctt

SEQ ID NO: 6085117 - DNA, 25 bp, Homo sapien
gagttcttcgggcttcaccaactgt

SEQ ID NO: 6085118 - DNA, 25 bp, Homo sapien
ttcgggcttcaccaactgttccaaa

SEQ ID NO: 6085119 - DNA, 25 bp, Homo sapien
cattgagttcttcgggcttcaccaa

SEQ ID NO: 6085120 - DNA, 25 bp, Homo sapien
tctccattgagttcttcgggcttca

SEQ ID NO: 6085121 - DNA, 25 bp, Homo sapien
tgagacatgtatggctgcatgtcaa

SEQ ID NO: 6085122 - DNA, 25 bp, Homo sapien
gatgtccaggtaagggtcaaaagtg

SEQ ID NO: 6085123 - DNA, 25 bp, Homo sapien
cactcttctggatgtaaaagaggac

SEQ ID NO: 6085124 - DNA, 25 bp, Homo sapien
ggcgatgtccaggtaagggtcaaaa

SEQ ID NO: 6085125 - DNA, 25 bp, Homo sapien
catgtcaaggcactcaggatattgc

SEQ ID NO: 6085126 - DNA, 25 bp, Homo sapien
gtggagacacttgatttgagatctc

SEQ ID NO: 6085127 - DNA, 25 bp, Homo sapien
tttagtattcttatacccaaatcac

SEQ ID NO: 6085128 - DNA, 25 bp, Homo sapien
gatcacaaagaggtactatgaaact

SEQ ID NO: 6085129 - DNA, 25 bp, Homo sapien
catggctgtatgcatatgacaaaac

SEQ ID NO: 6085130 - DNA, 25 bp, Homo sapien
cacaccctgtactctggttttagta

SEQ ID NO: 6085131 - DNA, 25 bp, Homo sapien
cacaaagaggtactatgaaactttg

SEQ ID NO: 6085132 - DNA, 25 bp, Homo sapien
agcagatcagtggtctggtgatggt

SEQ ID NO: 6085133 - DNA, 25 bp, Homo sapien
ggttttccatattaaccatacacat

SEQ ID NO: 6085134 - DNA, 25 bp, Homo sapien
gatttcatggctgtatgcatatgac

SEQ ID NO: 6085135 - DNA, 25 bp, Homo sapien
gattcacaccctgtactctggtttt

SEQ ID NO: 6085136 - DNA, 25 bp, Homo sapien
ttgtagcaaactgatcataaagaaa

SEQ ID NO: 6085137 - DNA, 25 bp, Homo sapien
gcaaggaggattaagtaagaaggga

SEQ ID NO: 6085138 - DNA, 25 bp, Homo sapien
actattaatgtccatcatcaaaaga

SEQ ID NO: 6085139 - DNA, 25 bp, Homo sapien
cagctgttactggtgaattcatagc

SEQ ID NO: 6085140 - DNA, 25 bp, Homo sapien
gtgaattcatagcttcgcacccagg

SEQ ID NO: 6085141 - DNA, 25 bp, Homo sapien
tactggtgaattcatagcttcgcac

SEQ ID NO: 6085142 - DNA, 25 bp, Homo sapien
ccattttttccttggatgggtacag

SEQ ID NO: 6085143 - DNA, 25 bp, Homo sapien
catagcttcgcacccaggtccaggg

SEQ ID NO: 6085144 - DNA, 25 bp, Homo sapien
cattttttccttggatgggtacaga

SEQ ID NO: 6085145 - DNA, 25 bp, Homo sapien
ggtgaattcatagcttcgcacccag

SEQ ID NO: 6085146 - DNA, 25 bp, Homo sapien
gcagctgttactggtgaattcatag

SEQ ID NO: 6085147 - DNA, 25 bp, Homo sapien
gcagttccaaggtggagactcagga

SEQ ID NO: 6085148 - DNA, 25 bp, Homo sapien
gcttgtggctgtattggaagcagca

SEQ ID NO: 6085149 - DNA, 25 bp, Homo sapien
gttactggtgaattcatagcttcgc

SEQ ID NO: 6085150 - DNA, 25 bp, Homo sapien
gaattcatagcttcgcacccaggtc

SEQ ID NO: 6085151 - DNA, 25 bp, Homo sapien
gtggcactgggagagtcatccccac

SEQ ID NO: 6085152 - DNA, 25 bp, Homo sapien
gggcaagagctggaggtgcacatgg

SEQ ID NO: 6085153 - DNA, 25 bp, Homo sapien
ggaggtgagatttctccagggaaca

SEQ ID NO: 6085154 - DNA, 25 bp, Homo sapien
gcctaagcccgggacgctcagacaa

SEQ ID NO: 6085155 - DNA, 25 bp, Homo sapien
tggcatgcagcttccggcaggctgg

SEQ ID NO: 6085156 - DNA, 25 bp, Homo sapien
agctggtggtagtgggcagcagggc

SEQ ID NO: 6085157 - DNA, 25 bp, Homo sapien
aggaggtgagatttctccagggaac

SEQ ID NO: 6085158 - DNA, 25 bp, Homo sapien
aggtgcacatggagctggtggtagt

SEQ ID NO: 6085159 - DNA, 25 bp, Homo sapien
ccgggacgctcagacaagtcagagg

SEQ ID NO: 6085160 - DNA, 25 bp, Homo sapien
ggcactgggagagtcatccccacct

SEQ ID NO: 6085161 - DNA, 25 bp, Homo sapien
gacgctcagacaagtcagagggcaa

SEQ ID NO: 6085162 - DNA, 25 bp, Homo sapien
ctaagcccgggacgctcagacaagt

SEQ ID NO: 6085163 - DNA, 25 bp, Homo sapien
agcagagcggtcaggcaacccgtca

SEQ ID NO: 6085164 - DNA, 25 bp, Homo sapien
tagcaccgccagaatttcacacgtg

SEQ ID NO: 6085165 - DNA, 25 bp, Homo sapien
ccataatacaaaatcaccacagtca

SEQ ID NO: 6085166 - DNA, 25 bp, Homo sapien
gctttaggtacatagagagggcagc

SEQ ID NO: 6085167 - DNA, 25 bp, Homo sapien
tgtaagagatgcaaactaagagcat

SEQ ID NO: 6085168 - DNA, 25 bp, Homo sapien
gatggagtatctcagcgggttacaa

SEQ ID NO: 6085169 - DNA, 25 bp, Homo sapien
tgcacagacgcacctgttcatgatg

SEQ ID NO: 6085170 - DNA, 25 bp, Homo sapien
cgtaaagcaacgagatgattttgtc

SEQ ID NO: 6085171 - DNA, 25 bp, Homo sapien
cacgtgaagtgatcgatgagattcc

SEQ ID NO: 6085172 - DNA, 25 bp, Homo sapien
ggtaagcactccgtaaagcaacgag

SEQ ID NO: 6085173 - DNA, 25 bp, Homo sapien
aagctaactttagcaccgccagaat

SEQ ID NO: 6085174 - DNA, 25 bp, Homo sapien
caggagaccgtagccatccgtgcac

SEQ ID NO: 6085175 - DNA, 25 bp, Homo sapien
atccatttgtatgtgggaaaactcc

SEQ ID NO: 6085176 - DNA, 25 bp, Homo sapien
cccttatggccaattgtttaatcaa

SEQ ID NO: 6085177 - DNA, 25 bp, Homo sapien
gctaaggtatagcaactggttgcct

SEQ ID NO: 6085178 - DNA, 25 bp, Homo sapien
catgactatgtaatgggatctccac

SEQ ID NO: 6085179 - DNA, 25 bp, Homo sapien
ccatagagaattggagaatccattt

SEQ ID NO: 6085180 - DNA, 25 bp, Homo sapien
ttggtgaacacatccgcttactggg

SEQ ID NO: 6085181 - DNA, 25 bp, Homo sapien
accagccttgtgattagagggtcag

SEQ ID NO: 6085182 - DNA, 25 bp, Homo sapien
caaattagcaaggagttagcatcag

SEQ ID NO: 6085183 - DNA, 25 bp, Homo sapien
tcatgctcaggaccctttaaaacct

SEQ ID NO: 6085184 - DNA, 25 bp, Homo sapien
ttgcctgaggaaccagccttgtgat

SEQ ID NO: 6085185 - DNA, 25 bp, Homo sapien
tgcatggtccatagacagctaaggt

SEQ ID NO: 6085186 - DNA, 25 bp, Homo sapien
cctaaacaacaaggctcagagtgct

SEQ ID NO: 6085187 - DNA, 25 bp, Homo sapien
tgagacggggcctctccaatgttgt

SEQ ID NO: 6085188 - DNA, 25 bp, Homo sapien
gggcctctccaatgttgtccaggcc

SEQ ID NO: 6085189 - DNA, 25 bp, Homo sapien
tccaatgttgtccaggccggtctcg

SEQ ID NO: 6085190 - DNA, 25 bp, Homo sapien
tctccaatgttgtccaggccggtct

SEQ ID NO: 6085191 - DNA, 25 bp, Homo sapien
gcctctccaatgttgtccaggccgg

SEQ ID NO: 6085192 - DNA, 25 bp, Homo sapien
cgcttgggcaatccgcccaccccaa

SEQ ID NO: 6085193 - DNA, 25 bp, Homo sapien
tctcgaactcctgcgcttgggcaat

SEQ ID NO: 6085194 - DNA, 25 bp, Homo sapien
gacggggcctctccaatgttgtcca

SEQ ID NO: 6085195 - DNA, 25 bp, Homo sapien
tttttgttgagacggggcctctcca

SEQ ID NO: 6085196 - DNA, 25 bp, Homo sapien
gaactcctgcgcttgggcaatccgc

SEQ ID NO: 6085197 - DNA, 25 bp, Homo sapien
cgaactcctgcgcttgggcaatccg

SEQ ID NO: 6085198 - DNA, 25 bp, Homo sapien
gcccaccccaacctccaaagtgctg

SEQ ID NO: 6085199 - DNA, 25 bp, Homo sapien
gccgaagaatcccagtaccatgagg

SEQ ID NO: 6085200 - DNA, 25 bp, Homo sapien
taccatgaggacgtagagggcctcc

SEQ ID NO: 6085201 - DNA, 25 bp, Homo sapien
ggcctggacataggccttgtccttc

SEQ ID NO: 6085202 - DNA, 25 bp, Homo sapien
cggatgtagctcagcatgatgccca

SEQ ID NO: 6085203 - DNA, 25 bp, Homo sapien
cagcttggtcagaaagggcgtcacc

SEQ ID NO: 6085204 - DNA, 25 bp, Homo sapien
tgggttgttctatggccagatggtt

SEQ ID NO: 6085205 - DNA, 25 bp, Homo sapien
gaatgggtcgttcgagtgctccagc

SEQ ID NO: 6085206 - DNA, 25 bp, Homo sapien
tcagaaagggcgtcaccgctgtggt

SEQ ID NO: 6085207 - DNA, 25 bp, Homo sapien
ggtgaagaagccgaagaatcccagt

SEQ ID NO: 6085208 - DNA, 25 bp, Homo sapien
ccgctgtggtgttagacaggatcat

SEQ ID NO: 6085209 - DNA, 25 bp, Homo sapien
tcttgccaggcatcggactcgatgt

SEQ ID NO: 6085210 - DNA, 25 bp, Homo sapien
ctcgatgtagacgttgaatgggtcg

SEQ ID NO: 6085211 - DNA, 25 bp, Homo sapien
gaaggatttgcaaacctcgggtagc

SEQ ID NO: 6085212 - DNA, 25 bp, Homo sapien
caaacctcgggtagcatcatgagag

SEQ ID NO: 6085213 - DNA, 25 bp, Homo sapien
tagcatcatgagagctctaagccca

SEQ ID NO: 6085214 - DNA, 25 bp, Homo sapien
taagcccatcggtgcccctggaaaa

SEQ ID NO: 6085215 - DNA, 25 bp, Homo sapien
aaaccaaagaggctaaacagcagaa

SEQ ID NO: 6085216 - DNA, 25 bp, Homo sapien
cagcagaactagatgcagccggaga

SEQ ID NO: 6085217 - DNA, 25 bp, Homo sapien
cctcgggtagcatcatgagagctct

SEQ ID NO: 6085218 - DNA, 25 bp, Homo sapien
tggcttcttccaggtaggttaagac

SEQ ID NO: 6085219 - DNA, 25 bp, Homo sapien
gatttgcaaacctcgggtagcatca

SEQ ID NO: 6085220 - DNA, 25 bp, Homo sapien
aaacagcagaactagatgcagccgg

SEQ ID NO: 6085221 - DNA, 25 bp, Homo sapien
taggttaagacatgaaggatttgca

SEQ ID NO: 6085222 - DNA, 25 bp, Homo sapien
ccaggtaggttaagacatgaaggat

SEQ ID NO: 6085223 - DNA, 25 bp, Homo sapien
ttcacctggccagttgatggtgcag

SEQ ID NO: 6085224 - DNA, 25 bp, Homo sapien
ccttgatgataatgaacaggtagca

SEQ ID NO: 6085225 - DNA, 25 bp, Homo sapien
gttgtcagacaagaaggcatatagg

SEQ ID NO: 6085226 - DNA, 25 bp, Homo sapien
ttgaatatgtagaagggaagccagc

SEQ ID NO: 6085227 - DNA, 25 bp, Homo sapien
gccaccacgatggacaccattcggg

SEQ ID NO: 6085228 - DNA, 25 bp, Homo sapien
gcatataggatagggttggcacagc

SEQ ID NO: 6085229 - DNA, 25 bp, Homo sapien
cgtggtctcattcagccgggatttg

SEQ ID NO: 6085230 - DNA, 25 bp, Homo sapien
caaagtcaaacatgcctttaagggc

SEQ ID NO: 6085231 - DNA, 25 bp, Homo sapien
tgtaccaagccccagattcacctgg

SEQ ID NO: 6085232 - DNA, 25 bp, Homo sapien
accattcgggtgaccttcttctcag

SEQ ID NO: 6085233 - DNA, 25 bp, Homo sapien
tggttgctccggagcccagcatata

SEQ ID NO: 6085234 - DNA, 25 bp, Homo sapien
ttagaggagcccactcggattccag

SEQ ID NO: 6085235 - DNA, 25 bp, Homo sapien
ccaggttgacgatgttgacggtgaa

SEQ ID NO: 6085236 - DNA, 25 bp, Homo sapien
tggcgtcagcgtccttggcaccaga

SEQ ID NO: 6085237 - DNA, 25 bp, Homo sapien
aagctctggcggaagttgtcagaga

SEQ ID NO: 6085238 - DNA, 25 bp, Homo sapien
gccagctggcgttgcaggtaccgcc

SEQ ID NO: 6085239 - DNA, 25 bp, Homo sapien
agaagggcagccaacatcccgcaaa

SEQ ID NO: 6085240 - DNA, 25 bp, Homo sapien
tgcacgtccgcgaacaccaggagcg

SEQ ID NO: 6085241 - DNA, 25 bp, Homo sapien
tgccggatcctgtctggacgcggct

SEQ ID NO: 6085242 - DNA, 25 bp, Homo sapien
cagcgccacggccaggttgacgatg

SEQ ID NO: 6085243 - DNA, 25 bp, Homo sapien
cgaacaccaggagcggcagcgacat

SEQ ID NO: 6085244 - DNA, 25 bp, Homo sapien
atcctgtctggacgcggctccgtgg

SEQ ID NO: 6085245 - DNA, 25 bp, Homo sapien
agcccttgcggaggcacagaacctt

SEQ ID NO: 6085246 - DNA, 25 bp, Homo sapien
gctgttggcgtaggagaggatgacc

SEQ ID NO: 6085247 - DNA, 25 bp, Homo sapien
gcttcctgttccacgctggacgttt

SEQ ID NO: 6085248 - DNA, 25 bp, Homo sapien
tggacgcttcctgttccacgctgga

SEQ ID NO: 6085249 - DNA, 25 bp, Homo sapien
gacgtttcttgttccactctggatg

SEQ ID NO: 6085250 - DNA, 25 bp, Homo sapien
gctggacgtttcttgttccactctg

SEQ ID NO: 6085251 - DNA, 25 bp, Homo sapien
tcctgttccatgctggacatttcct

SEQ ID NO: 6085252 - DNA, 25 bp, Homo sapien
gctggacgcttcctgttccacgctg

SEQ ID NO: 6085253 - DNA, 25 bp, Homo sapien
gatgcttcccgttccatgctggacg

SEQ ID NO: 6085254 - DNA, 25 bp, Homo sapien
gttccatgctggacatttcctgttc

SEQ ID NO: 6085255 - DNA, 25 bp, Homo sapien
gcttcctgttccatgctggacattt

SEQ ID NO: 6085256 - DNA, 25 bp, Homo sapien
cctgttccatgctggacatttcctg

SEQ ID NO: 6085257 - DNA, 25 bp, Homo sapien
tcccgttccatgctggacgcttcct

SEQ ID NO: 6085258 - DNA, 25 bp, Homo sapien
tggacgtttcttgttccactctgga

SEQ ID NO: 6085259 - DNA, 25 bp, Homo sapien
ccagaggcaccgtagagcgaggcac

SEQ ID NO: 6085260 - DNA, 25 bp, Homo sapien
aactcgagagtgtagatctaaatgc

SEQ ID NO: 6085261 - DNA, 25 bp, Homo sapien
tgtcaggtggtacatgctgtagccc

SEQ ID NO: 6085262 - DNA, 25 bp, Homo sapien
ggcctctagctctgttcaactgtca

SEQ ID NO: 6085263 - DNA, 25 bp, Homo sapien
gatttctctgcgcttttcttgcctg

SEQ ID NO: 6085264 - DNA, 25 bp, Homo sapien
acatgggccgtgtagagtcccacgg

SEQ ID NO: 6085265 - DNA, 25 bp, Homo sapien
ttccccatctttaactcgagagtgt

SEQ ID NO: 6085266 - DNA, 25 bp, Homo sapien
tcatttccaaaatcgtcagacaccg

SEQ ID NO: 6085267 - DNA, 25 bp, Homo sapien
tgctgtagcccacatgggccgtgta

SEQ ID NO: 6085268 - DNA, 25 bp, Homo sapien
ggaaaagctatgcaggagacatggc

SEQ ID NO: 6085269 - DNA, 25 bp, Homo sapien
cttcggagagtgaactcagggagca

SEQ ID NO: 6085270 - DNA, 25 bp, Homo sapien
tttggcagggatcagacttcggaga

SEQ ID NO: 6085271 - DNA, 25 bp, Homo sapien
tgaacacgatgaagatgtggatgat

SEQ ID NO: 6085272 - DNA, 25 bp, Homo sapien
ggcacgctgcccttctcgtaatgct

SEQ ID NO: 6085273 - DNA, 25 bp, Homo sapien
tgtgcatcattaatggcctggtgga

SEQ ID NO: 6085274 - DNA, 25 bp, Homo sapien
gcagagggtgacctgatgtgcatca

SEQ ID NO: 6085275 - DNA, 25 bp, Homo sapien
gctgcaccggctgcatgagcaaggt

SEQ ID NO: 6085276 - DNA, 25 bp, Homo sapien
gcagcgagtgacgttgcctgagcca

SEQ ID NO: 6085277 - DNA, 25 bp, Homo sapien
acacagttggtgctaaggaggcaga

SEQ ID NO: 6085278 - DNA, 25 bp, Homo sapien
catgagcaaggtacggatgatgacc

SEQ ID NO: 6085279 - DNA, 25 bp, Homo sapien
tcagtgaccgtatccgtggtggccc

SEQ ID NO: 6085280 - DNA, 25 bp, Homo sapien
aatggccacccagatgaccaaggac

SEQ ID NO: 6085281 - DNA, 25 bp, Homo sapien
tcgtaatgctcaaagcagcgagtga

SEQ ID NO: 6085282 - DNA, 25 bp, Homo sapien
agatgatgaacaccgccaagaccgt

SEQ ID NO: 6085283 - DNA, 25 bp, Homo sapien
tgtgatgaccacaaaaggcagggca

SEQ ID NO: 6085284 - DNA, 25 bp, Homo sapien
tggcatagcccaagctgatggccgc

SEQ ID NO: 6085285 - DNA, 25 bp, Homo sapien
ccacagagggcttccggaacttcgt

SEQ ID NO: 6085286 - DNA, 25 bp, Homo sapien
tgaggacgtcatgcgctgcaggatc

SEQ ID NO: 6085287 - DNA, 25 bp, Homo sapien
cagctgtagcacatagtagggtgcc

SEQ ID NO: 6085288 - DNA, 25 bp, Homo sapien
ttcaccgacaggaccaagcgtttgc

SEQ ID NO: 6085289 - DNA, 25 bp, Homo sapien
cacagagcacgatgtacacaaaggg

SEQ ID NO: 6085290 - DNA, 25 bp, Homo sapien
gatgagtctggcatacagccacaca

SEQ ID NO: 6085291 - DNA, 25 bp, Homo sapien
cgtctgagcgttgctgacagcgcga

SEQ ID NO: 6085292 - DNA, 25 bp, Homo sapien
tacagggtgaaccagtagaggtcag

SEQ ID NO: 6085293 - DNA, 25 bp, Homo sapien
cgtttgcggaacgtctcacagagca

SEQ ID NO: 6085294 - DNA, 25 bp, Homo sapien
cacgtatgcggctgtgatgaccaca

SEQ ID NO: 6085295 - DNA, 25 bp, Homo sapien
caatcctaagagttgtttggaagtc

SEQ ID NO: 6085296 - DNA, 25 bp, Homo sapien
cttggtggaactgcaaagactgtac

SEQ ID NO: 6085297 - DNA, 25 bp, Homo sapien
tccagtgtgtcttcctgactgtgca

SEQ ID NO: 6085298 - DNA, 25 bp, Homo sapien
gataaatagcaatgctctgggactg

SEQ ID NO: 6085299 - DNA, 25 bp, Homo sapien
tttgcagggatgatatgacacatta

SEQ ID NO: 6085300 - DNA, 25 bp, Homo sapien
gcacggtacgtcaatcctaagagtt

SEQ ID NO: 6085301 - DNA, 25 bp, Homo sapien
tttatctcagatgcacggtacgtca

SEQ ID NO: 6085302 - DNA, 25 bp, Homo sapien
taatccttggatgagcaagcagagt

SEQ ID NO: 6085303 - DNA, 25 bp, Homo sapien
tctatttaactgcagccactctgca

SEQ ID NO: 6085304 - DNA, 25 bp, Homo sapien
gaagcaggtgagattatatttggca

SEQ ID NO: 6085305 - DNA, 25 bp, Homo sapien
ccttggaggcaccatttaatgtttg

SEQ ID NO: 6085306 - DNA, 25 bp, Homo sapien
gcaagcagagttgtcttccaaacac

SEQ ID NO: 6085307 - DNA, 25 bp, Homo sapien
gttctcataggacggcggactggca

SEQ ID NO: 6085308 - DNA, 25 bp, Homo sapien
caggttcaggttcactgtgcgcccg

SEQ ID NO: 6085309 - DNA, 25 bp, Homo sapien
tacggaggcggtcatactcctcctg

SEQ ID NO: 6085310 - DNA, 25 bp, Homo sapien
cgctctgcgcgctgtaattgtcgaa

SEQ ID NO: 6085311 - DNA, 25 bp, Homo sapien
tggagaaacagatgacgaaaacgtt

SEQ ID NO: 6085312 - DNA, 25 bp, Homo sapien
gtagcgcacagcgtggatctgcttg

SEQ ID NO: 6085313 - DNA, 25 bp, Homo sapien
ggctgagcattcgaggtagcgcaca

SEQ ID NO: 6085314 - DNA, 25 bp, Homo sapien
acacctctggatgccacttgtgccg

SEQ ID NO: 6085315 - DNA, 25 bp, Homo sapien
gcgctgtaattgtcgaacacggtgg

SEQ ID NO: 6085316 - DNA, 25 bp, Homo sapien
acttgtgccgcacgttctcatagga

SEQ ID NO: 6085317 - DNA, 25 bp, Homo sapien
tgacgaaaacgttggtctgagggta

SEQ ID NO: 6085318 - DNA, 25 bp, Homo sapien
gacaccatcctgttgcagggctgag

SEQ ID NO: 6085319 - DNA, 25 bp, Homo sapien
ctcaggctccaaacaatcttgaagg

SEQ ID NO: 6085320 - DNA, 25 bp, Homo sapien
tgggcaggtagcatgtgatgaacac

SEQ ID NO: 6085321 - DNA, 25 bp, Homo sapien
tgatgcaactcctgcgaccgaggtt

SEQ ID NO: 6085322 - DNA, 25 bp, Homo sapien
gccattggccgactccatgatgaag

SEQ ID NO: 6085323 - DNA, 25 bp, Homo sapien
gagggcaccgtccagaggaaataga

SEQ ID NO: 6085324 - DNA, 25 bp, Homo sapien
gacggccgtctcttgcacgcagaga

SEQ ID NO: 6085325 - DNA, 25 bp, Homo sapien
ctgagggttatgtgcagggccccat

SEQ ID NO: 6085326 - DNA, 25 bp, Homo sapien
tccagctggaacatgatgtcatgcc

SEQ ID NO: 6085327 - DNA, 25 bp, Homo sapien
gatcccattgcccatcagactggct

SEQ ID NO: 6085328 - DNA, 25 bp, Homo sapien
tcgaaattggcatctcttccggcct

SEQ ID NO: 6085329 - DNA, 25 bp, Homo sapien
tgaagctctcacaggagacggccgt

SEQ ID NO: 6085330 - DNA, 25 bp, Homo sapien
gaaatagagtctagcagacacgctg

SEQ ID NO: 6085331 - DNA, 25 bp, Homo sapien
aagcccacgaacacccgatagaggt

SEQ ID NO: 6085332 - DNA, 25 bp, Homo sapien
cttctcctggcgctcggtggacacg

SEQ ID NO: 6085333 - DNA, 25 bp, Homo sapien
cagaccagcacgatggcgatgaggc

SEQ ID NO: 6085334 - DNA, 25 bp, Homo sapien
atgccccggtacgacagcagcatga

SEQ ID NO: 6085335 - DNA, 25 bp, Homo sapien
tgtggtatgcagaaaagacgcgctc

SEQ ID NO: 6085336 - DNA, 25 bp, Homo sapien
tgatagggcgcaaagcagaccagca

SEQ ID NO: 6085337 - DNA, 25 bp, Homo sapien
tctccagggtgagcgaggcattggc

SEQ ID NO: 6085338 - DNA, 25 bp, Homo sapien
aagagcacgtgatagggcgcaaagc

SEQ ID NO: 6085339 - DNA, 25 bp, Homo sapien
ccgatagaggttcatccaggccacc

SEQ ID NO: 6085340 - DNA, 25 bp, Homo sapien
aagacgcgctcctcgaagccgcagt

SEQ ID NO: 6085341 - DNA, 25 bp, Homo sapien
gcgccctcgttgaccaggcagtaga

SEQ ID NO: 6085342 - DNA, 25 bp, Homo sapien
tgtgctgttcctcttggaggtgagt

SEQ ID NO: 6085343 - DNA, 25 bp, Homo sapien
aagagcacgtgatagggcgcaaagc

SEQ ID NO: 6085344 - DNA, 25 bp, Homo sapien
ccgatagaggttcatccaggccacc

SEQ ID NO: 6085345 - DNA, 25 bp, Homo sapien
tgatagggcgcaaagcagaccagca

SEQ ID NO: 6085346 - DNA, 25 bp, Homo sapien
tctccagggtgagcgaggcattggc

SEQ ID NO: 6085347 - DNA, 25 bp, Homo sapien
atgccccggtacgacagcagcatga

SEQ ID NO: 6085348 - DNA, 25 bp, Homo sapien
aagcccacgaacacccgatagaggt

SEQ ID NO: 6085349 - DNA, 25 bp, Homo sapien
tgtggtatgcagaaaagacgcgctc

SEQ ID NO: 6085350 - DNA, 25 bp, Homo sapien
cagaccagcacgatggcgatgaggc

SEQ ID NO: 6085351 - DNA, 25 bp, Homo sapien
gcgccctcgttgaccaggcagtaga

SEQ ID NO: 6085352 - DNA, 25 bp, Homo sapien
cttctcctggcgctcggtggacacg

SEQ ID NO: 6085353 - DNA, 25 bp, Homo sapien
aagacgcgctcctcgaagccgcagt

SEQ ID NO: 6085354 - DNA, 25 bp, Homo sapien
tgtgctgttcctcttggaggtgagt

SEQ ID NO: 6085355 - DNA, 25 bp, Homo sapien
gcagcttgtactgcgaagcccggca

SEQ ID NO: 6085356 - DNA, 25 bp, Homo sapien
cggaataccggttgagcttcttgag

SEQ ID NO: 6085357 - DNA, 25 bp, Homo sapien
tgtggaagctgtggccggagatgag

SEQ ID NO: 6085358 - DNA, 25 bp, Homo sapien
gaagcccgaggacatctggtcatgg

SEQ ID NO: 6085359 - DNA, 25 bp, Homo sapien
gaggtgggaggacttgcgcagcttg

SEQ ID NO: 6085360 - DNA, 25 bp, Homo sapien
tgccgtgaccggagtcctgggagaa

SEQ ID NO: 6085361 - DNA, 25 bp, Homo sapien
tggaagcccgaggacatctggtcat

SEQ ID NO: 6085362 - DNA, 25 bp, Homo sapien
tcagcagcccgtcggaataccggtt

SEQ ID NO: 6085363 - DNA, 25 bp, Homo sapien
tgcgaagcccggcagtgcttgctgt

SEQ ID NO: 6085364 - DNA, 25 bp, Homo sapien
ttgcgcagcttgtactgcgaagccc

SEQ ID NO: 6085365 - DNA, 25 bp, Homo sapien
gcagcccgtcggaataccggttgag

SEQ ID NO: 6085366 - DNA, 25 bp, Homo sapien
agatgaggctactgacgctgcccat

SEQ ID NO: 6085367 - DNA, 25 bp, Homo sapien
gaaagagggccaggatgtctccatg

SEQ ID NO: 6085368 - DNA, 25 bp, Homo sapien
tcacagcccgaatagcttctgggtg

SEQ ID NO: 6085369 - DNA, 25 bp, Homo sapien
gcagggcaccgagtttgaaggcaaa

SEQ ID NO: 6085370 - DNA, 25 bp, Homo sapien
ggaacagatactcctgcccactgga

SEQ ID NO: 6085371 - DNA, 25 bp, Homo sapien
ggtccaccaactctaagtcaaagtg

SEQ ID NO: 6085372 - DNA, 25 bp, Homo sapien
ctccaccacgctgtctagaactggg

SEQ ID NO: 6085373 - DNA, 25 bp, Homo sapien
cattagggttgaggaagcgatcgta

SEQ ID NO: 6085374 - DNA, 25 bp, Homo sapien
gtcaaagtgtgtgaccataagcagg

SEQ ID NO: 6085375 - DNA, 25 bp, Homo sapien
gcccgaaccccagggcatggtgtag

SEQ ID NO: 6085376 - DNA, 25 bp, Homo sapien
ccagggcagatggaaacgcccgaac

SEQ ID NO: 6085377 - DNA, 25 bp, Homo sapien
tgtagtggtggatcttcttgcctgt

SEQ ID NO: 6085378 - DNA, 25 bp, Homo sapien
tcgtacttgaagacggtgggctcag

SEQ ID NO: 6085379 - DNA, 25 bp, Homo sapien
gcccgaaccccagggcatggtgtag

SEQ ID NO: 6085380 - DNA, 25 bp, Homo sapien
gcagggcaccgagtttgaaggcaaa

SEQ ID NO: 6085381 - DNA, 25 bp, Homo sapien
tcacagcccgaatagcttctgggtg

SEQ ID NO: 6085382 - DNA, 25 bp, Homo sapien
ggtccaccaactctaagtcaaagtg

SEQ ID NO: 6085383 - DNA, 25 bp, Homo sapien
gtcaaagtgtgtgaccataagcagg

SEQ ID NO: 6085384 - DNA, 25 bp, Homo sapien
ccagggcagatggaaacgcccgaac

SEQ ID NO: 6085385 - DNA, 25 bp, Homo sapien
ctccaccacgctgtctagaactggg

SEQ ID NO: 6085386 - DNA, 25 bp, Homo sapien
cattagggttgaggaagcgatcgta

SEQ ID NO: 6085387 - DNA, 25 bp, Homo sapien
ggaacagatactcctgcccactgga

SEQ ID NO: 6085388 - DNA, 25 bp, Homo sapien
gaaagagggccaggatgtctccatg

SEQ ID NO: 6085389 - DNA, 25 bp, Homo sapien
tcgtacttgaagacggtgggctcag

SEQ ID NO: 6085390 - DNA, 25 bp, Homo sapien
tgtagtggtggatcttcttgcctgt

SEQ ID NO: 6085391 - DNA, 25 bp, Homo sapien
gcccgaaccccagggcatggtgtag

SEQ ID NO: 6085392 - DNA, 25 bp, Homo sapien
ggtccaccaactctaagtcaaagtg

SEQ ID NO: 6085393 - DNA, 25 bp, Homo sapien
ccagggcagatggaaacgcccgaac

SEQ ID NO: 6085394 - DNA, 25 bp, Homo sapien
tcgtacttgaagacggtgggctcag

SEQ ID NO: 6085395 - DNA, 25 bp, Homo sapien
gcagggcaccgagtttgaaggcaaa

SEQ ID NO: 6085396 - DNA, 25 bp, Homo sapien
tcacagcccgaatagcttctgggtg

SEQ ID NO: 6085397 - DNA, 25 bp, Homo sapien
gtcaaagtgtgtgaccataagcagg

SEQ ID NO: 6085398 - DNA, 25 bp, Homo sapien
ggaacagatactcctgcccactgga

SEQ ID NO: 6085399 - DNA, 25 bp, Homo sapien
tgtagtggtggatcttcttgcctgt

SEQ ID NO: 6085400 - DNA, 25 bp, Homo sapien
cattagggttgaggaagcgatcgta

SEQ ID NO: 6085401 - DNA, 25 bp, Homo sapien
gaaagagggccaggatgtctccatg

SEQ ID NO: 6085402 - DNA, 25 bp, Homo sapien
ctccaccacgctgtctagaactggg

SEQ ID NO: 6085403 - DNA, 25 bp, Homo sapien
taggcatcatgtccaggcaagcatc

SEQ ID NO: 6085404 - DNA, 25 bp, Homo sapien
gcagacttgaggtagcagagccaca

SEQ ID NO: 6085405 - DNA, 25 bp, Homo sapien
gaggatttctattgaaccctggagg

SEQ ID NO: 6085406 - DNA, 25 bp, Homo sapien
aaagttgtgctgatagtaaaagtgc

SEQ ID NO: 6085407 - DNA, 25 bp, Homo sapien
tgcttactgaatgttgccacaaggc

SEQ ID NO: 6085408 - DNA, 25 bp, Homo sapien
catagacagcactaggacgtatccg

SEQ ID NO: 6085409 - DNA, 25 bp, Homo sapien
gatcagcggattcaatgcagacttg

SEQ ID NO: 6085410 - DNA, 25 bp, Homo sapien
acgtatccgtcgctttgtgtgacca

SEQ ID NO: 6085411 - DNA, 25 bp, Homo sapien
tgaccagggagctgcggcaaaaact

SEQ ID NO: 6085412 - DNA, 25 bp, Homo sapien
taatcctccagtagtagatcagcgg

SEQ ID NO: 6085413 - DNA, 25 bp, Homo sapien
gtgaaggcacgtgttttaaagccca

SEQ ID NO: 6085414 - DNA, 25 bp, Homo sapien
ccctggaggtaatatttgtaatcac

SEQ ID NO: 6085415 - DNA, 25 bp, Homo sapien
taggcatcatgtccaggcaagcatc

SEQ ID NO: 6085416 - DNA, 25 bp, Homo sapien
gatcagcggattcaatgcagacttg

SEQ ID NO: 6085417 - DNA, 25 bp, Homo sapien
tgaccagggagctgcggcaaaaact

SEQ ID NO: 6085418 - DNA, 25 bp, Homo sapien
gaggatttctattgaaccctggagg

SEQ ID NO: 6085419 - DNA, 25 bp, Homo sapien
tgcttactgaatgttgccacaaggc

SEQ ID NO: 6085420 - DNA, 25 bp, Homo sapien
catagacagcactaggacgtatccg

SEQ ID NO: 6085421 - DNA, 25 bp, Homo sapien
ccctggaggtaatatttgtaatcac

SEQ ID NO: 6085422 - DNA, 25 bp, Homo sapien
aaagttgtgctgatagtaaaagtgc

SEQ ID NO: 6085423 - DNA, 25 bp, Homo sapien
gtgaaggcacgtgttttaaagccca

SEQ ID NO: 6085424 - DNA, 25 bp, Homo sapien
acgtatccgtcgctttgtgtgacca

SEQ ID NO: 6085425 - DNA, 25 bp, Homo sapien
taatcctccagtagtagatcagcgg

SEQ ID NO: 6085426 - DNA, 25 bp, Homo sapien
gcagacttgaggtagcagagccaca

SEQ ID NO: 6085427 - DNA, 25 bp, Homo sapien
ttgctgtccacactttcgtcctggc

SEQ ID NO: 6085428 - DNA, 25 bp, Homo sapien
aaggcccacgatgaggggttcagcc

SEQ ID NO: 6085429 - DNA, 25 bp, Homo sapien
tgcagccggcggtagatggcggagg

SEQ ID NO: 6085430 - DNA, 25 bp, Homo sapien
cggcggagttgagccctcccaaaat

SEQ ID NO: 6085431 - DNA, 25 bp, Homo sapien
gctgaaccgtagaccaccaggcagg

SEQ ID NO: 6085432 - DNA, 25 bp, Homo sapien
ggaggagccgccgtagtccaccaca

SEQ ID NO: 6085433 - DNA, 25 bp, Homo sapien
gaaaccggatggcagtcaccgcatt

SEQ ID NO: 6085434 - DNA, 25 bp, Homo sapien
caccacaatggctgtgcccagcggc

SEQ ID NO: 6085435 - DNA, 25 bp, Homo sapien
agtgaccggcggagttgagccctcc

SEQ ID NO: 6085436 - DNA, 25 bp, Homo sapien
gtcaccgcattctcggtgctggagg

SEQ ID NO: 6085437 - DNA, 25 bp, Homo sapien
caggaagagcatgggattgaggcag

SEQ ID NO: 6085438 - DNA, 25 bp, Homo sapien
ggagggcacggtgagcagcaaggcc

SEQ ID NO: 6085439 - DNA, 25 bp, Homo sapien
gctcgttgctgtagacgccagcgaa

SEQ ID NO: 6085440 - DNA, 25 bp, Homo sapien
gccttggctccagagcggagccgca

SEQ ID NO: 6085441 - DNA, 25 bp, Homo sapien
aggctggtgatgacgtaggacatac

SEQ ID NO: 6085442 - DNA, 25 bp, Homo sapien
tgacgtaggacatactgatgaccag

SEQ ID NO: 6085443 - DNA, 25 bp, Homo sapien
tagacgccagcgaaagagaagaagg

SEQ ID NO: 6085444 - DNA, 25 bp, Homo sapien
cgctcatcacggctaggaagtagat

SEQ ID NO: 6085445 - DNA, 25 bp, Homo sapien
ggtccacgctcatcacggctaggaa

SEQ ID NO: 6085446 - DNA, 25 bp, Homo sapien
ttgggacctgcagctcgttgctgta

SEQ ID NO: 6085447 - DNA, 25 bp, Homo sapien
aggcacacggccagcacgacgagga

SEQ ID NO: 6085448 - DNA, 25 bp, Homo sapien
ggcagaaccaggaccgtgacgccca

SEQ ID NO: 6085449 - DNA, 25 bp, Homo sapien
gtgtagacacggctggccttgaacc

SEQ ID NO: 6085450 - DNA, 25 bp, Homo sapien
ccggaagttgtcatctagaaaggcg

SEQ ID NO: 6085451 - DNA, 25 bp, Homo sapien
gccttggctccagagcggagccgca

SEQ ID NO: 6085452 - DNA, 25 bp, Homo sapien
tagacgccagcgaaagagaagaagg

SEQ ID NO: 6085453 - DNA, 25 bp, Homo sapien
aggcacacggccagcacgacgagga

SEQ ID NO: 6085454 - DNA, 25 bp, Homo sapien
gtgtagacacggctggccttgaacc

SEQ ID NO: 6085455 - DNA, 25 bp, Homo sapien
cgctcatcacggctaggaagtagat

SEQ ID NO: 6085456 - DNA, 25 bp, Homo sapien
ggcagaaccaggaccgtgacgccca

SEQ ID NO: 6085457 - DNA, 25 bp, Homo sapien
gctcgttgctgtagacgccagcgaa

SEQ ID NO: 6085458 - DNA, 25 bp, Homo sapien
ggtccacgctcatcacggctaggaa

SEQ ID NO: 6085459 - DNA, 25 bp, Homo sapien
aggctggtgatgacgtaggacatac

SEQ ID NO: 6085460 - DNA, 25 bp, Homo sapien
tgacgtaggacatactgatgaccag

SEQ ID NO: 6085461 - DNA, 25 bp, Homo sapien
ttgggacctgcagctcgttgctgta

SEQ ID NO: 6085462 - DNA, 25 bp, Homo sapien
ccggaagttgtcatctagaaaggcg

SEQ ID NO: 6085463 - DNA, 25 bp, Homo sapien
tggagccttttttagggactggagc

SEQ ID NO: 6085464 - DNA, 25 bp, Homo sapien
taatgcgccaggcgtgacgcttctc

SEQ ID NO: 6085465 - DNA, 25 bp, Homo sapien
ccaattccccgggtagcagtaggcg

SEQ ID NO: 6085466 - DNA, 25 bp, Homo sapien
caattccccgggtagcagtaggcgc

SEQ ID NO: 6085467 - DNA, 25 bp, Homo sapien
ccttttttagggactggagcagatt

SEQ ID NO: 6085468 - DNA, 25 bp, Homo sapien
aattccccgggtagcagtaggcgca

SEQ ID NO: 6085469 - DNA, 25 bp, Homo sapien
gagccttttttagggactggagcag

SEQ ID NO: 6085470 - DNA, 25 bp, Homo sapien
gtaatgcgccaggcgtgacgcttct

SEQ ID NO: 6085471 - DNA, 25 bp, Homo sapien
ggagccttttttagggactggagca

SEQ ID NO: 6085472 - DNA, 25 bp, Homo sapien
ttggccaattccccgggtagcagta

SEQ ID NO: 6085473 - DNA, 25 bp, Homo sapien
gccttttttagggactggagcagat

SEQ ID NO: 6085474 - DNA, 25 bp, Homo sapien
tttttagggactggagcagatttga

SEQ ID NO: 6085475 - DNA, 25 bp, Homo sapien
caattccccgggtagcagtaggcgc

SEQ ID NO: 6085476 - DNA, 25 bp, Homo sapien
ccaattccccgggtagcagtaggcg

SEQ ID NO: 6085477 - DNA, 25 bp, Homo sapien
taatgcgccaggcgtgacgcttctc

SEQ ID NO: 6085478 - DNA, 25 bp, Homo sapien
ccttttttagggactggagcagatt

SEQ ID NO: 6085479 - DNA, 25 bp, Homo sapien
ggagccttttttagggactggagca

SEQ ID NO: 6085480 - DNA, 25 bp, Homo sapien
ttggccaattccccgggtagcagta

SEQ ID NO: 6085481 - DNA, 25 bp, Homo sapien
gagccttttttagggactggagcag

SEQ ID NO: 6085482 - DNA, 25 bp, Homo sapien
gtaatgcgccaggcgtgacgcttct

SEQ ID NO: 6085483 - DNA, 25 bp, Homo sapien
gccttttttagggactggagcagat

SEQ ID NO: 6085484 - DNA, 25 bp, Homo sapien
tttttagggactggagcagatttga

SEQ ID NO: 6085485 - DNA, 25 bp, Homo sapien
aattccccgggtagcagtaggcgca

SEQ ID NO: 6085486 - DNA, 25 bp, Homo sapien
tggagccttttttagggactggagc

SEQ ID NO: 6085487 - DNA, 25 bp, Homo sapien
caccaggcgctggaaaggtagttta

SEQ ID NO: 6085488 - DNA, 25 bp, Homo sapien
tagtggccaactgtttgcgtggcgc

SEQ ID NO: 6085489 - DNA, 25 bp, Homo sapien
ggtagtttacgaataagcagttcag

SEQ ID NO: 6085490 - DNA, 25 bp, Homo sapien
caggttagtgtcctcaaatagccct

SEQ ID NO: 6085491 - DNA, 25 bp, Homo sapien
caactgtttgcgtggcgccttgcca

SEQ ID NO: 6085492 - DNA, 25 bp, Homo sapien
gccttgccaccagtagacttccgag

SEQ ID NO: 6085493 - DNA, 25 bp, Homo sapien
cttagtggccaactgtttgcgtggc

SEQ ID NO: 6085494 - DNA, 25 bp, Homo sapien
gtcctgcgcaatctcgcgcaccagg

SEQ ID NO: 6085495 - DNA, 25 bp, Homo sapien
gccaccagtagacttccgagcagtt

SEQ ID NO: 6085496 - DNA, 25 bp, Homo sapien
caggcgctggaaaggtagtttacga

SEQ ID NO: 6085497 - DNA, 25 bp, Homo sapien
tggcgccttgccaccagtagacttc

SEQ ID NO: 6085498 - DNA, 25 bp, Homo sapien
accagtagacttccgagcagtttgc

SEQ ID NO: 6085499 - DNA, 25 bp, Homo sapien
ggctttgccgccagtggacttacga

SEQ ID NO: 6085500 - DNA, 25 bp, Homo sapien
gcggcggatttcacggagggcgaca

SEQ ID NO: 6085501 - DNA, 25 bp, Homo sapien
gatagcggcggatttcacggagggc

SEQ ID NO: 6085502 - DNA, 25 bp, Homo sapien
tggtagcttgcgaatcagtagctca

SEQ ID NO: 6085503 - DNA, 25 bp, Homo sapien
aatcagtagctcagtcgatttctga

SEQ ID NO: 6085504 - DNA, 25 bp, Homo sapien
atttctgatagcggcggatttcacg

SEQ ID NO: 6085505 - DNA, 25 bp, Homo sapien
ctcgcttggcgtggatagcacacag

SEQ ID NO: 6085506 - DNA, 25 bp, Homo sapien
gaatggtagcttgcgaatcagtagc

SEQ ID NO: 6085507 - DNA, 25 bp, Homo sapien
ccaccggtggctggcgcgcttttgc

SEQ ID NO: 6085508 - DNA, 25 bp, Homo sapien
cactcgcttggcgtggatagcacac

SEQ ID NO: 6085509 - DNA, 25 bp, Homo sapien
ctggaatggtagcttgcgaatcagt

SEQ ID NO: 6085510 - DNA, 25 bp, Homo sapien
gggctttgccgccagtggacttacg

SEQ ID NO: 6085511 - DNA, 25 bp, Homo sapien
accctggatgttgtcgcgcagcacc

SEQ ID NO: 6085512 - DNA, 25 bp, Homo sapien
gataccctggatgttgtcgcgcagc

SEQ ID NO: 6085513 - DNA, 25 bp, Homo sapien
cttcaacactccgcgggtctcctca

SEQ ID NO: 6085514 - DNA, 25 bp, Homo sapien
ccaggcccttacctcctttgccgcg

SEQ ID NO: 6085515 - DNA, 25 bp, Homo sapien
taccctggatgttgtcgcgcagcac

SEQ ID NO: 6085516 - DNA, 25 bp, Homo sapien
ataccctggatgttgtcgcgcagca

SEQ ID NO: 6085517 - DNA, 25 bp, Homo sapien
gataccctggatgttgtcgcgcagc

SEQ ID NO: 6085518 - DNA, 25 bp, Homo sapien
accctggatgttgtcgcgcagcacc

SEQ ID NO: 6085519 - DNA, 25 bp, Homo sapien
ccaggcccttacctcctttgccgcg

SEQ ID NO: 6085520 - DNA, 25 bp, Homo sapien
cttcaacactccgcgggtctcctca

SEQ ID NO: 6085521 - DNA, 25 bp, Homo sapien
taccctggatgttgtcgcgcagcac

SEQ ID NO: 6085522 - DNA, 25 bp, Homo sapien
ataccctggatgttgtcgcgcagca

SEQ ID NO: 6085523 - DNA, 25 bp, Homo sapien
gagccttttttagggactggagcag

SEQ ID NO: 6085524 - DNA, 25 bp, Homo sapien
ccttttttagggactggagcagatt

SEQ ID NO: 6085525 - DNA, 25 bp, Homo sapien
ccaattccccgggtagcagtaggcg

SEQ ID NO: 6085526 - DNA, 25 bp, Homo sapien
ttggccaattccccgggtagcagta

SEQ ID NO: 6085527 - DNA, 25 bp, Homo sapien
aattccccgggtagcagtaggcgca

SEQ ID NO: 6085528 - DNA, 25 bp, Homo sapien
gtaatgcgccaggcgtgacgcttct

SEQ ID NO: 6085529 - DNA, 25 bp, Homo sapien
ggagccttttttagggactggagca

SEQ ID NO: 6085530 - DNA, 25 bp, Homo sapien
taatgcgccaggcgtgacgcttctc

SEQ ID NO: 6085531 - DNA, 25 bp, Homo sapien
tggagccttttttagggactggagc

SEQ ID NO: 6085532 - DNA, 25 bp, Homo sapien
caattccccgggtagcagtaggcgc

SEQ ID NO: 6085533 - DNA, 25 bp, Homo sapien
gccttttttagggactggagcagat

SEQ ID NO: 6085534 - DNA, 25 bp, Homo sapien
tttttagggactggagcagatttga

SEQ ID NO: 6085535 - DNA, 25 bp, Homo sapien
tttgctttgttcgtgccatggctaa

SEQ ID NO: 6085536 - DNA, 25 bp, Homo sapien
tctcccctcggatgcggcgcgcaag

SEQ ID NO: 6085537 - DNA, 25 bp, Homo sapien
gacagacttcttgggctgataggaa

SEQ ID NO: 6085538 - DNA, 25 bp, Homo sapien
agtcctgtgcgatctcccgtaccaa

SEQ ID NO: 6085539 - DNA, 25 bp, Homo sapien
tgccctctcccctcggatgcggcgc

SEQ ID NO: 6085540 - DNA, 25 bp, Homo sapien
aggtagcttccggattagcagctcg

SEQ ID NO: 6085541 - DNA, 25 bp, Homo sapien
agacttcttgggctgataggaatat

SEQ ID NO: 6085542 - DNA, 25 bp, Homo sapien
ggacagacttcttgggctgatagga

SEQ ID NO: 6085543 - DNA, 25 bp, Homo sapien
gctgtttgctttgttcgtgccatgg

SEQ ID NO: 6085544 - DNA, 25 bp, Homo sapien
tgtttgctttgttcgtgccatggct

SEQ ID NO: 6085545 - DNA, 25 bp, Homo sapien
gcgagctgtttgctttgttcgtgcc

SEQ ID NO: 6085546 - DNA, 25 bp, Homo sapien
gtcctgtgcgatctcccgtaccaag

SEQ ID NO: 6085547 - DNA, 25 bp, Homo sapien
caccacaatggctgtgcccagcggc

SEQ ID NO: 6085548 - DNA, 25 bp, Homo sapien
ttgctgtccacactttcgtcctggc

SEQ ID NO: 6085549 - DNA, 25 bp, Homo sapien
ggagggcacggtgagcagcaaggcc

SEQ ID NO: 6085550 - DNA, 25 bp, Homo sapien
aaggcccacgatgaggggttcagcc

SEQ ID NO: 6085551 - DNA, 25 bp, Homo sapien
tgcagccggcggtagatggcggagg

SEQ ID NO: 6085552 - DNA, 25 bp, Homo sapien
gctgaaccgtagaccaccaggcagg

SEQ ID NO: 6085553 - DNA, 25 bp, Homo sapien
cggcggagttgagccctcccaaaat

SEQ ID NO: 6085554 - DNA, 25 bp, Homo sapien
ggaggagccgccgtagtccaccaca

SEQ ID NO: 6085555 - DNA, 25 bp, Homo sapien
gaaaccggatggcagtcaccgcatt

SEQ ID NO: 6085556 - DNA, 25 bp, Homo sapien
agtgaccggcggagttgagccctcc

SEQ ID NO: 6085557 - DNA, 25 bp, Homo sapien
gtcaccgcattctcggtgctggagg

SEQ ID NO: 6085558 - DNA, 25 bp, Homo sapien
caggaagagcatgggattgaggcag

SEQ ID NO: 6085559 - DNA, 25 bp, Homo sapien
gcagacttgaggtagcagagccaca

SEQ ID NO: 6085560 - DNA, 25 bp, Homo sapien
gaggatttctattgaaccctggagg

SEQ ID NO: 6085561 - DNA, 25 bp, Homo sapien
ccctggaggtaatatttgtaatcac

SEQ ID NO: 6085562 - DNA, 25 bp, Homo sapien
tgaccagggagctgcggcaaaaact

SEQ ID NO: 6085563 - DNA, 25 bp, Homo sapien
tgcttactgaatgttgccacaaggc

SEQ ID NO: 6085564 - DNA, 25 bp, Homo sapien
gtgaaggcacgtgttttaaagccca

SEQ ID NO: 6085565 - DNA, 25 bp, Homo sapien
acgtatccgtcgctttgtgtgacca

SEQ ID NO: 6085566 - DNA, 25 bp, Homo sapien
catagacagcactaggacgtatccg

SEQ ID NO: 6085567 - DNA, 25 bp, Homo sapien
aaagttgtgctgatagtaaaagtgc

SEQ ID NO: 6085568 - DNA, 25 bp, Homo sapien
gatcagcggattcaatgcagacttg

SEQ ID NO: 6085569 - DNA, 25 bp, Homo sapien
taatcctccagtagtagatcagcgg

SEQ ID NO: 6085570 - DNA, 25 bp, Homo sapien
taggcatcatgtccaggcaagcatc

SEQ ID NO: 6085571 - DNA, 25 bp, Homo sapien
ggagggcacggtgagcagcaaggcc

SEQ ID NO: 6085572 - DNA, 25 bp, Homo sapien
aaggcccacgatgaggggttcagcc

SEQ ID NO: 6085573 - DNA, 25 bp, Homo sapien
tgcagccggcggtagatggcggagg

SEQ ID NO: 6085574 - DNA, 25 bp, Homo sapien
ggaggagccgccgtagtccaccaca

SEQ ID NO: 6085575 - DNA, 25 bp, Homo sapien
cggcggagttgagccctcccaaaat

SEQ ID NO: 6085576 - DNA, 25 bp, Homo sapien
ttgctgtccacactttcgtcctggc

SEQ ID NO: 6085577 - DNA, 25 bp, Homo sapien
gctgaaccgtagaccaccaggcagg

SEQ ID NO: 6085578 - DNA, 25 bp, Homo sapien
caggaagagcatgggattgaggcag

SEQ ID NO: 6085579 - DNA, 25 bp, Homo sapien
gaaaccggatggcagtcaccgcatt

SEQ ID NO: 6085580 - DNA, 25 bp, Homo sapien
agtgaccggcggagttgagccctcc

SEQ ID NO: 6085581 - DNA, 25 bp, Homo sapien
gtcaccgcattctcggtgctggagg

SEQ ID NO: 6085582 - DNA, 25 bp, Homo sapien
caccacaatggctgtgcccagcggc

SEQ ID NO: 6085583 - DNA, 25 bp, Homo sapien
aattccccgggtagcagtaggcgca

SEQ ID NO: 6085584 - DNA, 25 bp, Homo sapien
caattccccgggtagcagtaggcgc

SEQ ID NO: 6085585 - DNA, 25 bp, Homo sapien
ccaattccccgggtagcagtaggcg

SEQ ID NO: 6085586 - DNA, 25 bp, Homo sapien
ccttttttagggactggagcagatt

SEQ ID NO: 6085587 - DNA, 25 bp, Homo sapien
tggagccttttttagggactggagc

SEQ ID NO: 6085588 - DNA, 25 bp, Homo sapien
taatgcgccaggcgtgacgcttctc

SEQ ID NO: 6085589 - DNA, 25 bp, Homo sapien
ttggccaattccccgggtagcagta

SEQ ID NO: 6085590 - DNA, 25 bp, Homo sapien
gtaatgcgccaggcgtgacgcttct

SEQ ID NO: 6085591 - DNA, 25 bp, Homo sapien
ggagccttttttagggactggagca

SEQ ID NO: 6085592 - DNA, 25 bp, Homo sapien
gccttttttagggactggagcagat

SEQ ID NO: 6085593 - DNA, 25 bp, Homo sapien
gagccttttttagggactggagcag

SEQ ID NO: 6085594 - DNA, 25 bp, Homo sapien
tttttagggactggagcagatttga

SEQ ID NO: 6085595 - DNA, 25 bp, Homo sapien
gccaccagtagacttccgagcagtt

SEQ ID NO: 6085596 - DNA, 25 bp, Homo sapien
tagtggccaactgtttgcgtggcgc

SEQ ID NO: 6085597 - DNA, 25 bp, Homo sapien
caactgtttgcgtggcgccttgcca

SEQ ID NO: 6085598 - DNA, 25 bp, Homo sapien
accagtagacttccgagcagtttgc

SEQ ID NO: 6085599 - DNA, 25 bp, Homo sapien
caggcgctggaaaggtagtttacga

SEQ ID NO: 6085600 - DNA, 25 bp, Homo sapien
cttagtggccaactgtttgcgtggc

SEQ ID NO: 6085601 - DNA, 25 bp, Homo sapien
gccttgccaccagtagacttccgag

SEQ ID NO: 6085602 - DNA, 25 bp, Homo sapien
ggtagtttacgaataagcagttcag

SEQ ID NO: 6085603 - DNA, 25 bp, Homo sapien
tggcgccttgccaccagtagacttc

SEQ ID NO: 6085604 - DNA, 25 bp, Homo sapien
caggttagtgtcctcaaatagccct

SEQ ID NO: 6085605 - DNA, 25 bp, Homo sapien
caccaggcgctggaaaggtagttta

SEQ ID NO: 6085606 - DNA, 25 bp, Homo sapien
gtcctgcgcaatctcgcgcaccagg

SEQ ID NO: 6085607 - DNA, 25 bp, Homo sapien
gccctggatgttgtcacgcaacacc

SEQ ID NO: 6085608 - DNA, 25 bp, Homo sapien
cgtataggtgacagcgtcacggatc

SEQ ID NO: 6085609 - DNA, 25 bp, Homo sapien
gtataggtgacagcgtcacggatca

SEQ ID NO: 6085610 - DNA, 25 bp, Homo sapien
gatcagaccagagatccgcttcaca

SEQ ID NO: 6085611 - DNA, 25 bp, Homo sapien
ataggtgacagcgtcacggatcacg

SEQ ID NO: 6085612 - DNA, 25 bp, Homo sapien
ccaaaaacaccttgagcaccccgcg

SEQ ID NO: 6085613 - DNA, 25 bp, Homo sapien
atcagaccagagatccgcttcacac

SEQ ID NO: 6085614 - DNA, 25 bp, Homo sapien
taaccgccaaagccataaagggtgc

SEQ ID NO: 6085615 - DNA, 25 bp, Homo sapien
ctccgtataggtgacagcgtcacgg

SEQ ID NO: 6085616 - DNA, 25 bp, Homo sapien
tccgtataggtgacagcgtcacgga

SEQ ID NO: 6085617 - DNA, 25 bp, Homo sapien
tcctcgtagatcagaccagagatcc

SEQ ID NO: 6085618 - DNA, 25 bp, Homo sapien
ctcgtagatcagaccagagatccgc

SEQ ID NO: 6085619 - DNA, 25 bp, Homo sapien
tcacagcccgaatagcttctgggtg

SEQ ID NO: 6085620 - DNA, 25 bp, Homo sapien
ccagggcagatggaaacgcccgaac

SEQ ID NO: 6085621 - DNA, 25 bp, Homo sapien
ctccaccacgctgtctagaactggg

SEQ ID NO: 6085622 - DNA, 25 bp, Homo sapien
gcccgaaccccagggcatggtgtag

SEQ ID NO: 6085623 - DNA, 25 bp, Homo sapien
ggaacagatactcctgcccactgga

SEQ ID NO: 6085624 - DNA, 25 bp, Homo sapien
tgtagtggtggatcttcttgcctgt

SEQ ID NO: 6085625 - DNA, 25 bp, Homo sapien
cattagggttgaggaagcgatcgta

SEQ ID NO: 6085626 - DNA, 25 bp, Homo sapien
gaaagagggccaggatgtctccatg

SEQ ID NO: 6085627 - DNA, 25 bp, Homo sapien
ggtccaccaactctaagtcaaagtg

SEQ ID NO: 6085628 - DNA, 25 bp, Homo sapien
tcgtacttgaagacggtgggctcag

SEQ ID NO: 6085629 - DNA, 25 bp, Homo sapien
gcagggcaccgagtttgaaggcaaa

SEQ ID NO: 6085630 - DNA, 25 bp, Homo sapien
gtcaaagtgtgtgaccataagcagg

SEQ ID NO: 6085631 - DNA, 25 bp, Homo sapien
acgtatccgtcgctttgtgtgacca

SEQ ID NO: 6085632 - DNA, 25 bp, Homo sapien
tgaccagggagctgcggcaaaaact

SEQ ID NO: 6085633 - DNA, 25 bp, Homo sapien
gaggatttctattgaaccctggagg

SEQ ID NO: 6085634 - DNA, 25 bp, Homo sapien
gtgaaggcacgtgttttaaagccca

SEQ ID NO: 6085635 - DNA, 25 bp, Homo sapien
catagacagcactaggacgtatccg

SEQ ID NO: 6085636 - DNA, 25 bp, Homo sapien
tgcttactgaatgttgccacaaggc

SEQ ID NO: 6085637 - DNA, 25 bp, Homo sapien
ccctggaggtaatatttgtaatcac

SEQ ID NO: 6085638 - DNA, 25 bp, Homo sapien
gcagacttgaggtagcagagccaca

SEQ ID NO: 6085639 - DNA, 25 bp, Homo sapien
aaagttgtgctgatagtaaaagtgc

SEQ ID NO: 6085640 - DNA, 25 bp, Homo sapien
taatcctccagtagtagatcagcgg

SEQ ID NO: 6085641 - DNA, 25 bp, Homo sapien
gatcagcggattcaatgcagacttg

SEQ ID NO: 6085642 - DNA, 25 bp, Homo sapien
taggcatcatgtccaggcaagcatc

SEQ ID NO: 6085643 - DNA, 25 bp, Homo sapien
caccacaatggctgtgcccagcggc

SEQ ID NO: 6085644 - DNA, 25 bp, Homo sapien
ggaggagccgccgtagtccaccaca

SEQ ID NO: 6085645 - DNA, 25 bp, Homo sapien
ggagggcacggtgagcagcaaggcc

SEQ ID NO: 6085646 - DNA, 25 bp, Homo sapien
agtgaccggcggagttgagccctcc

SEQ ID NO: 6085647 - DNA, 25 bp, Homo sapien
tgcagccggcggtagatggcggagg

SEQ ID NO: 6085648 - DNA, 25 bp, Homo sapien
gaaaccggatggcagtcaccgcatt

SEQ ID NO: 6085649 - DNA, 25 bp, Homo sapien
gtcaccgcattctcggtgctggagg

SEQ ID NO: 6085650 - DNA, 25 bp, Homo sapien
cggcggagttgagccctcccaaaat

SEQ ID NO: 6085651 - DNA, 25 bp, Homo sapien
gctgaaccgtagaccaccaggcagg

SEQ ID NO: 6085652 - DNA, 25 bp, Homo sapien
caggaagagcatgggattgaggcag

SEQ ID NO: 6085653 - DNA, 25 bp, Homo sapien
aaggcccacgatgaggggttcagcc

SEQ ID NO: 6085654 - DNA, 25 bp, Homo sapien
ttgctgtccacactttcgtcctggc

SEQ ID NO: 6085655 - DNA, 25 bp, Homo sapien
gccttggctccagagcggagccgca

SEQ ID NO: 6085656 - DNA, 25 bp, Homo sapien
aggcacacggccagcacgacgagga

SEQ ID NO: 6085657 - DNA, 25 bp, Homo sapien
aggctggtgatgacgtaggacatac

SEQ ID NO: 6085658 - DNA, 25 bp, Homo sapien
ggtccacgctcatcacggctaggaa

SEQ ID NO: 6085659 - DNA, 25 bp, Homo sapien
gctcgttgctgtagacgccagcgaa

SEQ ID NO: 6085660 - DNA, 25 bp, Homo sapien
gtgtagacacggctggccttgaacc

SEQ ID NO: 6085661 - DNA, 25 bp, Homo sapien
cgctcatcacggctaggaagtagat

SEQ ID NO: 6085662 - DNA, 25 bp, Homo sapien
tgacgtaggacatactgatgaccag

SEQ ID NO: 6085663 - DNA, 25 bp, Homo sapien
ttgggacctgcagctcgttgctgta

SEQ ID NO: 6085664 - DNA, 25 bp, Homo sapien
tagacgccagcgaaagagaagaagg

SEQ ID NO: 6085665 - DNA, 25 bp, Homo sapien
ccggaagttgtcatctagaaaggcg

SEQ ID NO: 6085666 - DNA, 25 bp, Homo sapien
ggcagaaccaggaccgtgacgccca

SEQ ID NO: 6085667 - DNA, 25 bp, Homo sapien
tgcttactgaatgttgccacaaggc

SEQ ID NO: 6085668 - DNA, 25 bp, Homo sapien
gatcagcggattcaatgcagacttg

SEQ ID NO: 6085669 - DNA, 25 bp, Homo sapien
catagacagcactaggacgtatccg

SEQ ID NO: 6085670 - DNA, 25 bp, Homo sapien
gcagacttgaggtagcagagccaca

SEQ ID NO: 6085671 - DNA, 25 bp, Homo sapien
acgtatccgtcgctttgtgtgacca

SEQ ID NO: 6085672 - DNA, 25 bp, Homo sapien
aaagttgtgctgatagtaaaagtgc

SEQ ID NO: 6085673 - DNA, 25 bp, Homo sapien
gaggatttctattgaaccctggagg

SEQ ID NO: 6085674 - DNA, 25 bp, Homo sapien
ccctggaggtaatatttgtaatcac

SEQ ID NO: 6085675 - DNA, 25 bp, Homo sapien
taatcctccagtagtagatcagcgg

SEQ ID NO: 6085676 - DNA, 25 bp, Homo sapien
gtgaaggcacgtgttttaaagccca

SEQ ID NO: 6085677 - DNA, 25 bp, Homo sapien
tgaccagggagctgcggcaaaaact

SEQ ID NO: 6085678 - DNA, 25 bp, Homo sapien
taggcatcatgtccaggcaagcatc

SEQ ID NO: 6085679 - DNA, 25 bp, Homo sapien
gccgaagaatcccagtaccatgagg

SEQ ID NO: 6085680 - DNA, 25 bp, Homo sapien
ggcctggacataggccttgtccttc

SEQ ID NO: 6085681 - DNA, 25 bp, Homo sapien
tgggttgttctatggccagatggtt

SEQ ID NO: 6085682 - DNA, 25 bp, Homo sapien
cggatgtagctcagcatgatgccca

SEQ ID NO: 6085683 - DNA, 25 bp, Homo sapien
ggtgaagaagccgaagaatcccagt

SEQ ID NO: 6085684 - DNA, 25 bp, Homo sapien
tcttgccaggcatcggactcgatgt

SEQ ID NO: 6085685 - DNA, 25 bp, Homo sapien
tcagaaagggcgtcaccgctgtggt

SEQ ID NO: 6085686 - DNA, 25 bp, Homo sapien
taccatgaggacgtagagggcctcc

SEQ ID NO: 6085687 - DNA, 25 bp, Homo sapien
ctcgatgtagacgttgaatgggtcg

SEQ ID NO: 6085688 - DNA, 25 bp, Homo sapien
ccgctgtggtgttagacaggatcat

SEQ ID NO: 6085689 - DNA, 25 bp, Homo sapien
cagcttggtcagaaagggcgtcacc

SEQ ID NO: 6085690 - DNA, 25 bp, Homo sapien
gaatgggtcgttcgagtgctccagc

SEQ ID NO: 6085691 - DNA, 25 bp, Homo sapien
catccgttgggtttattaggtgaat

SEQ ID NO: 6085692 - DNA, 25 bp, Homo sapien
ggtcttgtggacatgttctaagtaa

SEQ ID NO: 6085693 - DNA, 25 bp, Homo sapien
tatccactcccaagtttgcagttct

SEQ ID NO: 6085694 - DNA, 25 bp, Homo sapien
aatttgtcacgtatttccaatggca

SEQ ID NO: 6085695 - DNA, 25 bp, Homo sapien
ggaaacagtgtctcatccgttgggt

SEQ ID NO: 6085696 - DNA, 25 bp, Homo sapien
taaggaaggtatgctagcagtggca

SEQ ID NO: 6085697 - DNA, 25 bp, Homo sapien
cacaggtcagagtgggatccttttc

SEQ ID NO: 6085698 - DNA, 25 bp, Homo sapien
gcagcatactctgtagcaacagcat

SEQ ID NO: 6085699 - DNA, 25 bp, Homo sapien
ttttcactaaggaaggtatgctagc

SEQ ID NO: 6085700 - DNA, 25 bp, Homo sapien
ccttggtaagggctctttagcaaag

SEQ ID NO: 6085701 - DNA, 25 bp, Homo sapien
tcctgatcccttggtaagggctctt

SEQ ID NO: 6085702 - DNA, 25 bp, Homo sapien
tttccaatggcaaccaatgatcagg

SEQ ID NO: 6085703 - DNA, 25 bp, Homo sapien
cgtcttccacctcatggttatcatt

SEQ ID NO: 6085704 - DNA, 25 bp, Homo sapien
aacagccgctgtatcctaaggaacc

SEQ ID NO: 6085705 - DNA, 25 bp, Homo sapien
ctcgtcttccacctcatggttatca

SEQ ID NO: 6085706 - DNA, 25 bp, Homo sapien
ctcccagatgatctcgtcttccacc

SEQ ID NO: 6085707 - DNA, 25 bp, Homo sapien
gaacagccgctgtatcctaaggaac

SEQ ID NO: 6085708 - DNA, 25 bp, Homo sapien
tcccagatgatctcgtcttccacct

SEQ ID NO: 6085709 - DNA, 25 bp, Homo sapien
tcgtcttccacctcatggttatcat

SEQ ID NO: 6085710 - DNA, 25 bp, Homo sapien
ggaacagccgctgtatcctaaggaa

SEQ ID NO: 6085711 - DNA, 25 bp, Homo sapien
tcctcccagatgatctcgtcttcca

SEQ ID NO: 6085712 - DNA, 25 bp, Homo sapien
gtcttccacctcatggttatcattc

SEQ ID NO: 6085713 - DNA, 25 bp, Homo sapien
cctcccagatgatctcgtcttccac

SEQ ID NO: 6085714 - DNA, 25 bp, Homo sapien
gggaacagccgctgtatcctaagga

SEQ ID NO: 6085715 - DNA, 25 bp, Homo sapien
cagctctgatcttcacactgtgttt

SEQ ID NO: 6085716 - DNA, 25 bp, Homo sapien
ggagctccaattcaagatgcggacg

SEQ ID NO: 6085717 - DNA, 25 bp, Homo sapien
gctccaattcaagatgcggacgtct

SEQ ID NO: 6085718 - DNA, 25 bp, Homo sapien
tccaattcaagatgcggacgtctgc

SEQ ID NO: 6085719 - DNA, 25 bp, Homo sapien
caagatgcggacgtctgcagctctg

SEQ ID NO: 6085720 - DNA, 25 bp, Homo sapien
tgatcttcacactgtgttttgctct

SEQ ID NO: 6085721 - DNA, 25 bp, Homo sapien
gctctgatcttcacactgtgttttg

SEQ ID NO: 6085722 - DNA, 25 bp, Homo sapien
aggagctccaattcaagatgcggac

SEQ ID NO: 6085723 - DNA, 25 bp, Homo sapien
ttcaatggcttcactccaggagctc

SEQ ID NO: 6085724 - DNA, 25 bp, Homo sapien
ttcaagatgcggacgtctgcagctc

SEQ ID NO: 6085725 - DNA, 25 bp, Homo sapien
attcaagatgcggacgtctgcagct

SEQ ID NO: 6085726 - DNA, 25 bp, Homo sapien
ccaattcaagatgcggacgtctgca

SEQ ID NO: 6085727 - DNA, 25 bp, Homo sapien
ccagcttcaacaaggatagcatctc

SEQ ID NO: 6085728 - DNA, 25 bp, Homo sapien
caacaaggatagcatctcacagaag

SEQ ID NO: 6085729 - DNA, 25 bp, Homo sapien
gcagagtgcatttgcagcacagtcc

SEQ ID NO: 6085730 - DNA, 25 bp, Homo sapien
gatcaagccatcgattatcccaaag

SEQ ID NO: 6085731 - DNA, 25 bp, Homo sapien
tcctcaagccacagtaggggaaatt

SEQ ID NO: 6085732 - DNA, 25 bp, Homo sapien
aatgtgagcataggaggccacgatg

SEQ ID NO: 6085733 - DNA, 25 bp, Homo sapien
tagaatgtgagcataggaggccacg

SEQ ID NO: 6085734 - DNA, 25 bp, Homo sapien
caagccatcgattatcccaaaggcc

SEQ ID NO: 6085735 - DNA, 25 bp, Homo sapien
tctggatcaagccatcgattatccc

SEQ ID NO: 6085736 - DNA, 25 bp, Homo sapien
agaagaaatggttcaccttcctcaa

SEQ ID NO: 6085737 - DNA, 25 bp, Homo sapien
aagaaatggttcaccttcctcaagc

SEQ ID NO: 6085738 - DNA, 25 bp, Homo sapien
gcttcaacaaggatagcatctcaca

SEQ ID NO: 6085739 - DNA, 25 bp, Homo sapien
gagtacggtgcctcccaagacaaaa

SEQ ID NO: 6085740 - DNA, 25 bp, Homo sapien
cacaaacaacgcagaggtgggaact

SEQ ID NO: 6085741 - DNA, 25 bp, Homo sapien
gaacgtgtgagtcagggcaacgata

SEQ ID NO: 6085742 - DNA, 25 bp, Homo sapien
ggacaaccgagccatgaggaacgtg

SEQ ID NO: 6085743 - DNA, 25 bp, Homo sapien
gaccctcaggatagctggcacaatg

SEQ ID NO: 6085744 - DNA, 25 bp, Homo sapien
gaagagggtcccatagaacacacaa

SEQ ID NO: 6085745 - DNA, 25 bp, Homo sapien
gaagctgtctagatcaccaaacatc

SEQ ID NO: 6085746 - DNA, 25 bp, Homo sapien
acaatgcaagcattagggcacagac

SEQ ID NO: 6085747 - DNA, 25 bp, Homo sapien
tctcgttgatgtgggtgtcagaaca

SEQ ID NO: 6085748 - DNA, 25 bp, Homo sapien
ggcctcatgactgtggagtagcaga

SEQ ID NO: 6085749 - DNA, 25 bp, Homo sapien
gaaaaagtgagcaatttccccagtc

SEQ ID NO: 6085750 - DNA, 25 bp, Homo sapien
caacgatattggtgaggacccagca

SEQ ID NO: 6085751 - DNA, 25 bp, Homo sapien
tacttgatcttgtttcacgaagcgg

SEQ ID NO: 6085752 - DNA, 25 bp, Homo sapien
tattactgatattgtccaaggaagc

SEQ ID NO: 6085753 - DNA, 25 bp, Homo sapien
agtggtacagaggaaggaaacttga

SEQ ID NO: 6085754 - DNA, 25 bp, Homo sapien
gaacaagggtggtctaaatatccta

SEQ ID NO: 6085755 - DNA, 25 bp, Homo sapien
ggtggtgaacttttgctgtcaattc

SEQ ID NO: 6085756 - DNA, 25 bp, Homo sapien
gaaaatctttgaacgtctcgaggca

SEQ ID NO: 6085757 - DNA, 25 bp, Homo sapien
tgaacgtctcgaggcagatggttcc

SEQ ID NO: 6085758 - DNA, 25 bp, Homo sapien
gaaaagtcaatcaatgggcagtaaa

SEQ ID NO: 6085759 - DNA, 25 bp, Homo sapien
aattctcctcacagtatcttgcaga

SEQ ID NO: 6085760 - DNA, 25 bp, Homo sapien
cacacaaacactgacacactctggt

SEQ ID NO: 6085761 - DNA, 25 bp, Homo sapien
cttgagggtaaattcatcagtgaca

SEQ ID NO: 6085762 - DNA, 25 bp, Homo sapien
cagtaaataagagtaggtggtgaac

SEQ ID NO: 6085763 - DNA, 25 bp, Homo sapien
tctgaccatgaacatatgacagctg

SEQ ID NO: 6085764 - DNA, 25 bp, Homo sapien
tccttgaacgcctgcacctgtggct

SEQ ID NO: 6085765 - DNA, 25 bp, Homo sapien
tggtggaacaagacagctgagaatg

SEQ ID NO: 6085766 - DNA, 25 bp, Homo sapien
gagaatgtatgacatctgaccatga

SEQ ID NO: 6085767 - DNA, 25 bp, Homo sapien
cctggtaaatactggtggaacaaga

SEQ ID NO: 6085768 - DNA, 25 bp, Homo sapien
tggcattgccgccagtcctggtgct

SEQ ID NO: 6085769 - DNA, 25 bp, Homo sapien
catatgacagctgtttgtgccagtc

SEQ ID NO: 6085770 - DNA, 25 bp, Homo sapien
ctcccacaccagcatttaggatttc

SEQ ID NO: 6085771 - DNA, 25 bp, Homo sapien
tgggcaccggcttgttcttgcctcc

SEQ ID NO: 6085772 - DNA, 25 bp, Homo sapien
cctctataatcttgctgggtgctgg

SEQ ID NO: 6085773 - DNA, 25 bp, Homo sapien
catggctctcaactccagatccaaa

SEQ ID NO: 6085774 - DNA, 25 bp, Homo sapien
tgctgttcactcatgcaatccttga

SEQ ID NO: 6085775 - DNA, 25 bp, Homo sapien
cagattaacatcttcaggctgaagg

SEQ ID NO: 6085776 - DNA, 25 bp, Homo sapien
gaaggcccttaatgctgtcttcaga

SEQ ID NO: 6085777 - DNA, 25 bp, Homo sapien
tgaatgacctaaggatgccactggg

SEQ ID NO: 6085778 - DNA, 25 bp, Homo sapien
gagaaggctcacaattacagtaatg

SEQ ID NO: 6085779 - DNA, 25 bp, Homo sapien
tctgcaggttaccaacagattaaca

SEQ ID NO: 6085780 - DNA, 25 bp, Homo sapien
aaaacaatcctgtggccacatacat

SEQ ID NO: 6085781 - DNA, 25 bp, Homo sapien
atgaacttccagtaccgacctccat

SEQ ID NO: 6085782 - DNA, 25 bp, Homo sapien
taacttgccgagtctcttctagcat

SEQ ID NO: 6085783 - DNA, 25 bp, Homo sapien
caaaaggtggtggttcgaatctgtt

SEQ ID NO: 6085784 - DNA, 25 bp, Homo sapien
gtcttcagatttcccgttgggaatg

SEQ ID NO: 6085785 - DNA, 25 bp, Homo sapien
tacagtaatgagtcccgtgacccaa

SEQ ID NO: 6085786 - DNA, 25 bp, Homo sapien
tgcccattggagtaagcgtcaactg

SEQ ID NO: 6085787 - DNA, 25 bp, Homo sapien
gtctcatagtaatctaccacaaagt

SEQ ID NO: 6085788 - DNA, 25 bp, Homo sapien
ctaccacaaagttgcgaggaagctt

SEQ ID NO: 6085789 - DNA, 25 bp, Homo sapien
tctaccacaaagttgcgaggaagct

SEQ ID NO: 6085790 - DNA, 25 bp, Homo sapien
taccacaaagttgcgaggaagcttc

SEQ ID NO: 6085791 - DNA, 25 bp, Homo sapien
accacaaagttgcgaggaagcttcc

SEQ ID NO: 6085792 - DNA, 25 bp, Homo sapien
acaaagttgcgaggaagcttcctcg

SEQ ID NO: 6085793 - DNA, 25 bp, Homo sapien
cacaaagttgcgaggaagcttcctc

SEQ ID NO: 6085794 - DNA, 25 bp, Homo sapien
ggtctcatagtaatctaccacaaag

SEQ ID NO: 6085795 - DNA, 25 bp, Homo sapien
ccacaaagttgcgaggaagcttcct

SEQ ID NO: 6085796 - DNA, 25 bp, Homo sapien
atctaccacaaagttgcgaggaagc

SEQ ID NO: 6085797 - DNA, 25 bp, Homo sapien
catgggagggaacaaggaaaacatg

SEQ ID NO: 6085798 - DNA, 25 bp, Homo sapien
aaagattctaggatactgcgagcaa

SEQ ID NO: 6085799 - DNA, 25 bp, Homo sapien
gaaggaatgatctggtggttaagat

SEQ ID NO: 6085800 - DNA, 25 bp, Homo sapien
ttctaggatactgcgagcaaatggg

SEQ ID NO: 6085801 - DNA, 25 bp, Homo sapien
cagaaggaatgatctggtggttaag

SEQ ID NO: 6085802 - DNA, 25 bp, Homo sapien
tgcagcgagagcacaaagattctag

SEQ ID NO: 6085803 - DNA, 25 bp, Homo sapien
tccagctaggcatgggagggaacaa

SEQ ID NO: 6085804 - DNA, 25 bp, Homo sapien
tttcactttgccaaacaccacatgc

SEQ ID NO: 6085805 - DNA, 25 bp, Homo sapien
tcaaacttattcgagttgtccacag

SEQ ID NO: 6085806 - DNA, 25 bp, Homo sapien
attctaggatactgcgagcaaatgg

SEQ ID NO: 6085807 - DNA, 25 bp, Homo sapien
atccagctaggcatgggagggaaca

SEQ ID NO: 6085808 - DNA, 25 bp, Homo sapien
ctgcaatccagctaggcatgggagg

SEQ ID NO: 6085809 - DNA, 25 bp, Homo sapien
tggactcatccaagtacagcagaaa

SEQ ID NO: 6085810 - DNA, 25 bp, Homo sapien
gactcatccaagtacagcagaaact

SEQ ID NO: 6085811 - DNA, 25 bp, Homo sapien
cattctataagcactcctttcaaga

SEQ ID NO: 6085812 - DNA, 25 bp, Homo sapien
tctgaacaaatgatcatgatccctc

SEQ ID NO: 6085813 - DNA, 25 bp, Homo sapien
attggactcatccaagtacagcaga

SEQ ID NO: 6085814 - DNA, 25 bp, Homo sapien
actcatccaagtacagcagaaactg

SEQ ID NO: 6085815 - DNA, 25 bp, Homo sapien
ggactcatccaagtacagcagaaac

SEQ ID NO: 6085816 - DNA, 25 bp, Homo sapien
ttggactcatccaagtacagcagaa

SEQ ID NO: 6085817 - DNA, 25 bp, Homo sapien
agaaggttcagatgacctgaagaat

SEQ ID NO: 6085818 - DNA, 25 bp, Homo sapien
gaaggttcagatgacctgaagaatg

SEQ ID NO: 6085819 - DNA, 25 bp, Homo sapien
aggcaaaggcgccaccggcgtgtcc

SEQ ID NO: 6085820 - DNA, 25 bp, Homo sapien
tcctccaggcggcgcgtgtgagtca

SEQ ID NO: 6085821 - DNA, 25 bp, Homo sapien
tgtgagtcaatggaaatgaccgtgg

SEQ ID NO: 6085822 - DNA, 25 bp, Homo sapien
gccacctaggacatcgcggaagcct

SEQ ID NO: 6085823 - DNA, 25 bp, Homo sapien
tcccaggagcttctacaacagctgg

SEQ ID NO: 6085824 - DNA, 25 bp, Homo sapien
gcgcgtgtgagtcaatggaaatgac

SEQ ID NO: 6085825 - DNA, 25 bp, Homo sapien
agcagccacctaggacatcgcggaa

SEQ ID NO: 6085826 - DNA, 25 bp, Homo sapien
ggaaatgaccgtggcgggcggagca

SEQ ID NO: 6085827 - DNA, 25 bp, Homo sapien
tgagtcaatggaaatgaccgtggcg

SEQ ID NO: 6085828 - DNA, 25 bp, Homo sapien
caggcggcgcgtgtgagtcaatgga

SEQ ID NO: 6085829 - DNA, 25 bp, Homo sapien
cccaggagcttctacaacagctggc

SEQ ID NO: 6085830 - DNA, 25 bp, Homo sapien
cgcgtgtgagtcaatggaaatgacc

SEQ ID NO: 6085831 - DNA, 25 bp, Homo sapien
cactgcgggtcctgattggctgtgc

SEQ ID NO: 6085832 - DNA, 25 bp, Homo sapien
taggcgtgcctgtttgaaggccccg

SEQ ID NO: 6085833 - DNA, 25 bp, Homo sapien
gcgtctactccgagtcctgcaagct

SEQ ID NO: 6085834 - DNA, 25 bp, Homo sapien
tgaaaaacttgagcgtctactccga

SEQ ID NO: 6085835 - DNA, 25 bp, Homo sapien
taggctgtttggaaagggtagcaca

SEQ ID NO: 6085836 - DNA, 25 bp, Homo sapien
gtttccggctcctgctcagaagctg

SEQ ID NO: 6085837 - DNA, 25 bp, Homo sapien
gttcgtttcaggaggcgatcccgcg

SEQ ID NO: 6085838 - DNA, 25 bp, Homo sapien
tctgcccgtagcaggtgaacctggt

SEQ ID NO: 6085839 - DNA, 25 bp, Homo sapien
cagtttctcgttcgtttcaggaggc

SEQ ID NO: 6085840 - DNA, 25 bp, Homo sapien
cacctgtggattcgtcagtttctcg

SEQ ID NO: 6085841 - DNA, 25 bp, Homo sapien
gtgtgtgtgtgcgtcctcctctctc

SEQ ID NO: 6085842 - DNA, 25 bp, Homo sapien
gctgtccaccttgattctgcccgta

SEQ ID NO: 6085843 - DNA, 25 bp, Homo sapien
cgacccttagcccagcggacatttt

SEQ ID NO: 6085844 - DNA, 25 bp, Homo sapien
ttgcgaagataaccaaagtccagtg

SEQ ID NO: 6085845 - DNA, 25 bp, Homo sapien
tagcccagcggacatttttgaattg

SEQ ID NO: 6085846 - DNA, 25 bp, Homo sapien
agcacaggtaggtctcacgccgacc

SEQ ID NO: 6085847 - DNA, 25 bp, Homo sapien
gaaaaggatgtagcactgtcacgcc

SEQ ID NO: 6085848 - DNA, 25 bp, Homo sapien
aaacttcctccggttcatcaagagg

SEQ ID NO: 6085849 - DNA, 25 bp, Homo sapien
cagtgaaaaggatgtagcactgtca

SEQ ID NO: 6085850 - DNA, 25 bp, Homo sapien
taaagaaacttcctccggttcatca

SEQ ID NO: 6085851 - DNA, 25 bp, Homo sapien
gcctcttcactacgtagcacaggta

SEQ ID NO: 6085852 - DNA, 25 bp, Homo sapien
cttattgcgaagataaccaaagtcc

SEQ ID NO: 6085853 - DNA, 25 bp, Homo sapien
aggtaggtctcacgccgacccttag

SEQ ID NO: 6085854 - DNA, 25 bp, Homo sapien
gatgtagcactgtcacgcctcttca

SEQ ID NO: 6085855 - DNA, 25 bp, Homo sapien
gatcccaggatcagcaagaaaggaa

SEQ ID NO: 6085856 - DNA, 25 bp, Homo sapien
gacggcatcctgaagatagtggaga

SEQ ID NO: 6085857 - DNA, 25 bp, Homo sapien
gataagccgcttcagtgcagccttc

SEQ ID NO: 6085858 - DNA, 25 bp, Homo sapien
cacaggatatgtggcccatgatgac

SEQ ID NO: 6085859 - DNA, 25 bp, Homo sapien
gatgtttcccctcagctgacggcat

SEQ ID NO: 6085860 - DNA, 25 bp, Homo sapien
cagaccagtgcaataacaggagggc

SEQ ID NO: 6085861 - DNA, 25 bp, Homo sapien
cagttcaaacacagaggtgtcagca

SEQ ID NO: 6085862 - DNA, 25 bp, Homo sapien
cggaaatacgtgaggatggcagtgc

SEQ ID NO: 6085863 - DNA, 25 bp, Homo sapien
agtgcagccttcacttctttattcc

SEQ ID NO: 6085864 - DNA, 25 bp, Homo sapien
ggagaatgcctgatgtttcccctca

SEQ ID NO: 6085865 - DNA, 25 bp, Homo sapien
gagaggatgcggacataggatccca

SEQ ID NO: 6085866 - DNA, 25 bp, Homo sapien
tcagcacagaccagtgcaataacag

SEQ ID NO: 6085867 - DNA, 25 bp, Homo sapien
gaagagcaattccacgtggcagccg

SEQ ID NO: 6085868 - DNA, 25 bp, Homo sapien
tcatgatggctatttgcaccccggc

SEQ ID NO: 6085869 - DNA, 25 bp, Homo sapien
gggttccctcgcagaaagtcggcca

SEQ ID NO: 6085870 - DNA, 25 bp, Homo sapien
acatgtcgggcacagtcgtagcagg

SEQ ID NO: 6085871 - DNA, 25 bp, Homo sapien
cccagtccgagatgtagcggaggaa

SEQ ID NO: 6085872 - DNA, 25 bp, Homo sapien
tagcagcggccagggtctaggtccc

SEQ ID NO: 6085873 - DNA, 25 bp, Homo sapien
gggctcagccttgcggtcctcacag

SEQ ID NO: 6085874 - DNA, 25 bp, Homo sapien
cagaaagtcggccacatgtcgggca

SEQ ID NO: 6085875 - DNA, 25 bp, Homo sapien
gccttgcggtcctcacagaagtaga

SEQ ID NO: 6085876 - DNA, 25 bp, Homo sapien
tgtagcggaggaagagcaattccac

SEQ ID NO: 6085877 - DNA, 25 bp, Homo sapien
cagggtctaggtcccagtccgagat

SEQ ID NO: 6085878 - DNA, 25 bp, Homo sapien
tcctcacagaagtagaggcgcgcgg

SEQ ID NO: 6085879 - DNA, 25 bp, Homo sapien
caaatcttagttggtgagggaggta

SEQ ID NO: 6085880 - DNA, 25 bp, Homo sapien
ccatttttgtggtgaagttatacgc

SEQ ID NO: 6085881 - DNA, 25 bp, Homo sapien
cgcgcccggccaatatttccatttt

SEQ ID NO: 6085882 - DNA, 25 bp, Homo sapien
aaatttatgcccctctggtggtgca

SEQ ID NO: 6085883 - DNA, 25 bp, Homo sapien
tggtggtgcaatgcagagatttccc

SEQ ID NO: 6085884 - DNA, 25 bp, Homo sapien
cgcctcccgggttcagttgattctc

SEQ ID NO: 6085885 - DNA, 25 bp, Homo sapien
cagagatttccctcatatttccggg

SEQ ID NO: 6085886 - DNA, 25 bp, Homo sapien
caccccaagtagctaggattacagg

SEQ ID NO: 6085887 - DNA, 25 bp, Homo sapien
tatacgcaacatgaccaaatcttag

SEQ ID NO: 6085888 - DNA, 25 bp, Homo sapien
tcgaatttcgtttcccaccctgtga

SEQ ID NO: 6085889 - DNA, 25 bp, Homo sapien
gagtgcagtagtatgatcccggccc

SEQ ID NO: 6085890 - DNA, 25 bp, Homo sapien
ttccacgctggagtgcaaaggcacg

SEQ ID NO: 6085891 - DNA, 25 bp, Homo sapien
ccaacactgaattgtgggagctaga

SEQ ID NO: 6085892 - DNA, 25 bp, Homo sapien
caggtcaaggaagatacacccatgg

SEQ ID NO: 6085893 - DNA, 25 bp, Homo sapien
gatttactcttcagccatctggtag

SEQ ID NO: 6085894 - DNA, 25 bp, Homo sapien
caaaggcgtgattagggactccagt

SEQ ID NO: 6085895 - DNA, 25 bp, Homo sapien
cccatggtagcctaggaaattggca

SEQ ID NO: 6085896 - DNA, 25 bp, Homo sapien
cactggaccccggaaatctgtctgt

SEQ ID NO: 6085897 - DNA, 25 bp, Homo sapien
aatctgtctgtagcgtgtgaaccac

SEQ ID NO: 6085898 - DNA, 25 bp, Homo sapien
ggtagaaaggatttactcttcagcc

SEQ ID NO: 6085899 - DNA, 25 bp, Homo sapien
gctgaatgataagaccccaggatgg

SEQ ID NO: 6085900 - DNA, 25 bp, Homo sapien
tcgggcacctcaagccctgaatggg

SEQ ID NO: 6085901 - DNA, 25 bp, Homo sapien
catgatattgcacagaggacccaac

SEQ ID NO: 6085902 - DNA, 25 bp, Homo sapien
tgtatgcctagctttcacaaggtag

SEQ ID NO: 6085903 - DNA, 25 bp, Homo sapien
gggactacaggcatacaccagcatg

SEQ ID NO: 6085904 - DNA, 25 bp, Homo sapien
ggagctttaagatcacaggtgcaat

SEQ ID NO: 6085905 - DNA, 25 bp, Homo sapien
ggcatgtgttgagatgaaacttcca

SEQ ID NO: 6085906 - DNA, 25 bp, Homo sapien
caaagtgctaggattgcaggcgcaa

SEQ ID NO: 6085907 - DNA, 25 bp, Homo sapien
ttttatgtagcgacagagtttcacc

SEQ ID NO: 6085908 - DNA, 25 bp, Homo sapien
ttgactgttacttctgggcaggagc

SEQ ID NO: 6085909 - DNA, 25 bp, Homo sapien
tcctggcacatggtaggattcagct

SEQ ID NO: 6085910 - DNA, 25 bp, Homo sapien
tcagtcaagctcaagaagtcctccc

SEQ ID NO: 6085911 - DNA, 25 bp, Homo sapien
catagtccctttccctgccttggtg

SEQ ID NO: 6085912 - DNA, 25 bp, Homo sapien
tgaaacttccatcatcctgggccct

SEQ ID NO: 6085913 - DNA, 25 bp, Homo sapien
gacaggtgtcagtagtcatcagaac

SEQ ID NO: 6085914 - DNA, 25 bp, Homo sapien
gccctttcatggttaggtgtgccca

SEQ ID NO: 6085915 - DNA, 25 bp, Homo sapien
gaattatcaaatgcttgctccccat

SEQ ID NO: 6085916 - DNA, 25 bp, Homo sapien
tcttcaagcagtgtacggtggtgtt

SEQ ID NO: 6085917 - DNA, 25 bp, Homo sapien
ccaaagtcaaggtgacaaaagaact

SEQ ID NO: 6085918 - DNA, 25 bp, Homo sapien
tgctccccatggaagcctcttaagg

SEQ ID NO: 6085919 - DNA, 25 bp, Homo sapien
tatgggaagagactgacgtagcaca

SEQ ID NO: 6085920 - DNA, 25 bp, Homo sapien
gtgtcatttgcatacaagactgcca

SEQ ID NO: 6085921 - DNA, 25 bp, Homo sapien
taaagacaatttcgagctgtagtca

SEQ ID NO: 6085922 - DNA, 25 bp, Homo sapien
aacttgatatttcccacgaggtttg

SEQ ID NO: 6085923 - DNA, 25 bp, Homo sapien
cacgaggtttggtaacagtgtccca

SEQ ID NO: 6085924 - DNA, 25 bp, Homo sapien
caaatgttcactctagggcccaaaa

SEQ ID NO: 6085925 - DNA, 25 bp, Homo sapien
gagaaaacaatgctctgcagtgtca

SEQ ID NO: 6085926 - DNA, 25 bp, Homo sapien
tagaagaggaactcttcaagcagtg

SEQ ID NO: 6085927 - DNA, 25 bp, Homo sapien
ttacgtacgtatacatgtgctatgt

SEQ ID NO: 6085928 - DNA, 25 bp, Homo sapien
gttacgtacgtatacatgtgctatg

SEQ ID NO: 6085929 - DNA, 25 bp, Homo sapien
tgttacgtacgtatacatgtgctat

SEQ ID NO: 6085930 - DNA, 25 bp, Homo sapien
cgtacgtatacatgtgctatgttgg

SEQ ID NO: 6085931 - DNA, 25 bp, Homo sapien
acgtacgtatacatgtgctatgttg

SEQ ID NO: 6085932 - DNA, 25 bp, Homo sapien
ttgttacgtacgtatacatgtgcta

SEQ ID NO: 6085933 - DNA, 25 bp, Homo sapien
tacgtacgtatacatgtgctatgtt

SEQ ID NO: 6085934 - DNA, 25 bp, Homo sapien
ggtctgtccgctgctgacctcctgg

SEQ ID NO: 6085935 - DNA, 25 bp, Homo sapien
taaaacacaaacctcacccagtatc

SEQ ID NO: 6085936 - DNA, 25 bp, Homo sapien
tagtcttgctcagctgcaacctctc

SEQ ID NO: 6085937 - DNA, 25 bp, Homo sapien
tcctggcctgcctgataaagttcaa

SEQ ID NO: 6085938 - DNA, 25 bp, Homo sapien
cagcatccacggttcttggtaaaac

SEQ ID NO: 6085939 - DNA, 25 bp, Homo sapien
gctttctgtctgtctatctccactg

SEQ ID NO: 6085940 - DNA, 25 bp, Homo sapien
tcagcccaatgaccagcttctagtc

SEQ ID NO: 6085941 - DNA, 25 bp, Homo sapien
gcacccagccgattctgctttctgt

SEQ ID NO: 6085942 - DNA, 25 bp, Homo sapien
gaaccagctcctgggtctctgagcc

SEQ ID NO: 6085943 - DNA, 25 bp, Homo sapien
aattccatggcttgacttataaggc

SEQ ID NO: 6085944 - DNA, 25 bp, Homo sapien
tcatcttgagccaaacgaaccagct

SEQ ID NO: 6085945 - DNA, 25 bp, Homo sapien
tataaggccctccttggtctgtccg

SEQ ID NO: 6085946 - DNA, 25 bp, Homo sapien
ctcgctccagggatagaggccacat

SEQ ID NO: 6085947 - DNA, 25 bp, Homo sapien
gaagggggataatggctcctcccac

SEQ ID NO: 6085948 - DNA, 25 bp, Homo sapien
gaggctggcgctgttgtagccggga

SEQ ID NO: 6085949 - DNA, 25 bp, Homo sapien
cctggctcgctccagggatagaggc

SEQ ID NO: 6085950 - DNA, 25 bp, Homo sapien
aggaagccggcgtctggccactcag

SEQ ID NO: 6085951 - DNA, 25 bp, Homo sapien
aagccggcgtctggccactcagtgg

SEQ ID NO: 6085952 - DNA, 25 bp, Homo sapien
ttcaatctggccctgtgtccgactg

SEQ ID NO: 6085953 - DNA, 25 bp, Homo sapien
ccgtggacggacagcgcggcccggg

SEQ ID NO: 6085954 - DNA, 25 bp, Homo sapien
tgcaggtttcaatctggccctgtgt

SEQ ID NO: 6085955 - DNA, 25 bp, Homo sapien
gctccagggatagaggccacattgt

SEQ ID NO: 6085956 - DNA, 25 bp, Homo sapien
ggcgctgttgtagccgggagcccag

SEQ ID NO: 6085957 - DNA, 25 bp, Homo sapien
aggtttcaatctggccctgtgtccg

SEQ ID NO: 6085958 - DNA, 25 bp, Homo sapien
cacgaaacattcttctgatgccggc

SEQ ID NO: 6085959 - DNA, 25 bp, Homo sapien
gaacacgaaacattcttctgatgcc

SEQ ID NO: 6085960 - DNA, 25 bp, Homo sapien
atttcgaacacgaaacattcttctg

SEQ ID NO: 6085961 - DNA, 25 bp, Homo sapien
cgaacacgaaacattcttctgatgc

SEQ ID NO: 6085962 - DNA, 25 bp, Homo sapien
acacgaaacattcttctgatgccgg

SEQ ID NO: 6085963 - DNA, 25 bp, Homo sapien
aacacgaaacattcttctgatgccg

SEQ ID NO: 6085964 - DNA, 25 bp, Homo sapien
tacctgccttgttttcacagcggtg

SEQ ID NO: 6085965 - DNA, 25 bp, Homo sapien
tgtacctgccttgttttcacagcgg

SEQ ID NO: 6085966 - DNA, 25 bp, Homo sapien
ctcaaacaatttcgaacacgaaaca

SEQ ID NO: 6085967 - DNA, 25 bp, Homo sapien
acctgccttgttttcacagcggtga

SEQ ID NO: 6085968 - DNA, 25 bp, Homo sapien
gctgtacctgccttgttttcacagc

SEQ ID NO: 6085969 - DNA, 25 bp, Homo sapien
acgaaacattcttctgatgccggca

SEQ ID NO: 6085970 - DNA, 25 bp, Homo sapien
gattctgctgccacagcctcaggag

SEQ ID NO: 6085971 - DNA, 25 bp, Homo sapien
gaatcctaggctcttagcgctgaaa

SEQ ID NO: 6085972 - DNA, 25 bp, Homo sapien
tacagatttcagctatatggtgtgc

SEQ ID NO: 6085973 - DNA, 25 bp, Homo sapien
ccaataaatactgggtacacgtcac

SEQ ID NO: 6085974 - DNA, 25 bp, Homo sapien
caatcgccctcattttcttgctagg

SEQ ID NO: 6085975 - DNA, 25 bp, Homo sapien
gtgagccaccgtgcctggtcaatcg

SEQ ID NO: 6085976 - DNA, 25 bp, Homo sapien
cagaattttctttccgtggtgggat

SEQ ID NO: 6085977 - DNA, 25 bp, Homo sapien
gcttaagcagaaaaacacagaatcc

SEQ ID NO: 6085978 - DNA, 25 bp, Homo sapien
gactctgattcccaggcttaagcag

SEQ ID NO: 6085979 - DNA, 25 bp, Homo sapien
tcaggagtagctggaattacaggca

SEQ ID NO: 6085980 - DNA, 25 bp, Homo sapien
taggcgcggcttttgtaggactctg

SEQ ID NO: 6085981 - DNA, 25 bp, Homo sapien
gaaagtcagagaggacttgccctac

SEQ ID NO: 6085982 - DNA, 25 bp, Homo sapien
tcgatgacgtgctggagaatctcca

SEQ ID NO: 6085983 - DNA, 25 bp, Homo sapien
tcagggcgctgatctcgccgttgag

SEQ ID NO: 6085984 - DNA, 25 bp, Homo sapien
gaaggtccctgatgtagtcgatgac

SEQ ID NO: 6085985 - DNA, 25 bp, Homo sapien
ctagtggtcggatctggatctcacc

SEQ ID NO: 6085986 - DNA, 25 bp, Homo sapien
tcggattccgagttcagctccaact

SEQ ID NO: 6085987 - DNA, 25 bp, Homo sapien
cggatctggatctcacctcggccgt

SEQ ID NO: 6085988 - DNA, 25 bp, Homo sapien
gcagcgcgagatggccacgctctgc

SEQ ID NO: 6085989 - DNA, 25 bp, Homo sapien
ctggatctcacctcggccgtcaggg

SEQ ID NO: 6085990 - DNA, 25 bp, Homo sapien
cagctccaactgaaggtccctgatg

SEQ ID NO: 6085991 - DNA, 25 bp, Homo sapien
gttccaacttcggattccgagttca

SEQ ID NO: 6085992 - DNA, 25 bp, Homo sapien
cagccgttcatgtcgtagagcagca

SEQ ID NO: 6085993 - DNA, 25 bp, Homo sapien
gaggcgtgagtaacagccgttcatg

SEQ ID NO: 6085994 - DNA, 25 bp, Homo sapien
attccagtgggtcccggtagccatg

SEQ ID NO: 6085995 - DNA, 25 bp, Homo sapien
gcttgaggtgaggtcaattgccata

SEQ ID NO: 6085996 - DNA, 25 bp, Homo sapien
tgatagacctgagaataagctgagc

SEQ ID NO: 6085997 - DNA, 25 bp, Homo sapien
tgaaaactcataacggtcctggctt

SEQ ID NO: 6085998 - DNA, 25 bp, Homo sapien
cccttaggagccttggtagtatcca

SEQ ID NO: 6085999 - DNA, 25 bp, Homo sapien
gcagctattgctgggagaggcctct

SEQ ID NO: 6086000 - DNA, 25 bp, Homo sapien
tccattgaagaccttgtagatgtcc

SEQ ID NO: 6086001 - DNA, 25 bp, Homo sapien
tccttggtaggactggtggtcatca

SEQ ID NO: 6086002 - DNA, 25 bp, Homo sapien
tcagcagtttccctgctaatgggtc

SEQ ID NO: 6086003 - DNA, 25 bp, Homo sapien
gatgtccttcagagagcccttagga

SEQ ID NO: 6086004 - DNA, 25 bp, Homo sapien
catgctgtccattgggtgtgcttga

SEQ ID NO: 6086005 - DNA, 25 bp, Homo sapien
tctaggaaaaggactcggcagtgct

SEQ ID NO: 6086006 - DNA, 25 bp, Homo sapien
ttttctcttctcaataaccctatct

SEQ ID NO: 6086007 - DNA, 25 bp, Homo sapien
ttcccccttgcttacaggtgctgtc

SEQ ID NO: 6086008 - DNA, 25 bp, Homo sapien
tccctgaacagcttcgaggcgggtg

SEQ ID NO: 6086009 - DNA, 25 bp, Homo sapien
ttttctgctccctggactgcctagc

SEQ ID NO: 6086010 - DNA, 25 bp, Homo sapien
tcagacgtcagggattggtgcagcc

SEQ ID NO: 6086011 - DNA, 25 bp, Homo sapien
gcctagccctgagtgccacggatga

SEQ ID NO: 6086012 - DNA, 25 bp, Homo sapien
ctggactgcctagccctgagtgcca

SEQ ID NO: 6086013 - DNA, 25 bp, Homo sapien
agtgcttgccggctgtggtgaccct

SEQ ID NO: 6086014 - DNA, 25 bp, Homo sapien
agtgccacggatgaccagcgttctg

SEQ ID NO: 6086015 - DNA, 25 bp, Homo sapien
cccacgtcaggggtgattgtcttga

SEQ ID NO: 6086016 - DNA, 25 bp, Homo sapien
gcacaggaggtacgcgcctggctct

SEQ ID NO: 6086017 - DNA, 25 bp, Homo sapien
ggatgaccagcgttctgttttctct

SEQ ID NO: 6086018 - DNA, 25 bp, Homo sapien
gaaagactgggtagtacacgatgag

SEQ ID NO: 6086019 - DNA, 25 bp, Homo sapien
gaccttgttgatctttagcttcagc

SEQ ID NO: 6086020 - DNA, 25 bp, Homo sapien
aaatgggtgcgatatattggctatc

SEQ ID NO: 6086021 - DNA, 25 bp, Homo sapien
actgactttgaaaaggtgataccac

SEQ ID NO: 6086022 - DNA, 25 bp, Homo sapien
gcttggtgtgtctaactagggagaa

SEQ ID NO: 6086023 - DNA, 25 bp, Homo sapien
tgaggaatcagagcgctagaggtca

SEQ ID NO: 6086024 - DNA, 25 bp, Homo sapien
ggagcagaaagatgatcactgcctt

SEQ ID NO: 6086025 - DNA, 25 bp, Homo sapien
cgctagaggtcataacaagaaagac

SEQ ID NO: 6086026 - DNA, 25 bp, Homo sapien
cactgcctttatggccctcatgtgg

SEQ ID NO: 6086027 - DNA, 25 bp, Homo sapien
gaccccagaagaatcgcaagcatga

SEQ ID NO: 6086028 - DNA, 25 bp, Homo sapien
cctgtagcatgcagtcgaatctgct

SEQ ID NO: 6086029 - DNA, 25 bp, Homo sapien
aagagataagaaaggaccccagaag

SEQ ID NO: 6086030 - DNA, 25 bp, Homo sapien
gttcacagattctcataccgtcaca

SEQ ID NO: 6086031 - DNA, 25 bp, Homo sapien
taaaagaagatgtacccagtgcaac

SEQ ID NO: 6086032 - DNA, 25 bp, Homo sapien
cacactgctgagtctgttcagacac

SEQ ID NO: 6086033 - DNA, 25 bp, Homo sapien
ctcaaagtcataggcatcacagata

SEQ ID NO: 6086034 - DNA, 25 bp, Homo sapien
taatgagccggtaggtatgatctcc

SEQ ID NO: 6086035 - DNA, 25 bp, Homo sapien
tcatcgtaagtgaaccagatctgtt

SEQ ID NO: 6086036 - DNA, 25 bp, Homo sapien
tcctggatacctaacacccgcatat

SEQ ID NO: 6086037 - DNA, 25 bp, Homo sapien
caagatggctgacaacactaatgag

SEQ ID NO: 6086038 - DNA, 25 bp, Homo sapien
tggaaagctttgaggcagtgcctgc

SEQ ID NO: 6086039 - DNA, 25 bp, Homo sapien
gactttagagtcttcccaagatggc

SEQ ID NO: 6086040 - DNA, 25 bp, Homo sapien
ccttgctattaagctgggcattctc

SEQ ID NO: 6086041 - DNA, 25 bp, Homo sapien
ggaattcctgttagacttctgtaga

SEQ ID NO: 6086042 - DNA, 25 bp, Homo sapien
ggtgacccgtttggcatggatgaca

SEQ ID NO: 6086043 - DNA, 25 bp, Homo sapien
gcaggtgcgctcttgcgagccacct

SEQ ID NO: 6086044 - DNA, 25 bp, Homo sapien
agcgatctcgcgcatcagccgctgg

SEQ ID NO: 6086045 - DNA, 25 bp, Homo sapien
tccccgcggatacggcgtgccagct

SEQ ID NO: 6086046 - DNA, 25 bp, Homo sapien
gcggcgccttgccacccgttgactt

SEQ ID NO: 6086047 - DNA, 25 bp, Homo sapien
cgccgccagtggcaggtgcgctctt

SEQ ID NO: 6086048 - DNA, 25 bp, Homo sapien
aaagtcctgagcgatctcgcgcatc

SEQ ID NO: 6086049 - DNA, 25 bp, Homo sapien
tcttcacgccgccagtggcaggtgc

SEQ ID NO: 6086050 - DNA, 25 bp, Homo sapien
ttgccacccgttgacttgcgcgcag

SEQ ID NO: 6086051 - DNA, 25 bp, Homo sapien
atggtgacccgtttggcatggatga

SEQ ID NO: 6086052 - DNA, 25 bp, Homo sapien
agtcctgagcgatctcgcgcatcag

SEQ ID NO: 6086053 - DNA, 25 bp, Homo sapien
aggtgcgctcttgcgagccaccttg

SEQ ID NO: 6086054 - DNA, 25 bp, Homo sapien
ccacgtgggcaagcccgaaaccagg

SEQ ID NO: 6086055 - DNA, 25 bp, Homo sapien
gtggaagcgcacagggaccgcggaa

SEQ ID NO: 6086056 - DNA, 25 bp, Homo sapien
gccacgtgggcaagcccgaaaccag

SEQ ID NO: 6086057 - DNA, 25 bp, Homo sapien
ggtgaaggtggaagcgcacagggac

SEQ ID NO: 6086058 - DNA, 25 bp, Homo sapien
aaggtggaagcgcacagggaccgcg

SEQ ID NO: 6086059 - DNA, 25 bp, Homo sapien
gatccttttgggccgtggctgaaga

SEQ ID NO: 6086060 - DNA, 25 bp, Homo sapien
aagcgcacagggaccgcggaaccgc

SEQ ID NO: 6086061 - DNA, 25 bp, Homo sapien
gtgaaggtggaagcgcacagggacc

SEQ ID NO: 6086062 - DNA, 25 bp, Homo sapien
agccacgtgggcaagcccgaaacca

SEQ ID NO: 6086063 - DNA, 25 bp, Homo sapien
gggtgaaggtggaagcgcacaggga

SEQ ID NO: 6086064 - DNA, 25 bp, Homo sapien
atccttttgggccgtggctgaagaa

SEQ ID NO: 6086065 - DNA, 25 bp, Homo sapien
tggaagcgcacagggaccgcggaac

SEQ ID NO: 6086066 - DNA, 25 bp, Homo sapien
gaagactcgaatataggagacaatg

SEQ ID NO: 6086067 - DNA, 25 bp, Homo sapien
tacagtgatcactgcgtcttttagg

SEQ ID NO: 6086068 - DNA, 25 bp, Homo sapien
gggtcactgccgtgtacattacagt

SEQ ID NO: 6086069 - DNA, 25 bp, Homo sapien
tataattggtcaaagggcggaaata

SEQ ID NO: 6086070 - DNA, 25 bp, Homo sapien
taccataatacaaagagacaaccgt

SEQ ID NO: 6086071 - DNA, 25 bp, Homo sapien
aagggcggaaatacgtgcccatgac

SEQ ID NO: 6086072 - DNA, 25 bp, Homo sapien
agagacaaccgtgaggtgggaacca

SEQ ID NO: 6086073 - DNA, 25 bp, Homo sapien
gaaggccttgagcacgcccttggtg

SEQ ID NO: 6086074 - DNA, 25 bp, Homo sapien
tctgtgttacccaaggctatcatga

SEQ ID NO: 6086075 - DNA, 25 bp, Homo sapien
gatcactgcgtcttttaggctataa

SEQ ID NO: 6086076 - DNA, 25 bp, Homo sapien
caaaatatagctgtctgtgttaccc

SEQ ID NO: 6086077 - DNA, 25 bp, Homo sapien
aagactgtggagaagactcgaatat

SEQ ID NO: 6086078 - DNA, 25 bp, Homo sapien
gtgttgcgcaattccaggctccgga

SEQ ID NO: 6086079 - DNA, 25 bp, Homo sapien
tgaggagcatcatggcgaagaacat

SEQ ID NO: 6086080 - DNA, 25 bp, Homo sapien
tgacgtacctgtcgacggcgatggc

SEQ ID NO: 6086081 - DNA, 25 bp, Homo sapien
cacatgatgaggaccaggtaggtgt

SEQ ID NO: 6086082 - DNA, 25 bp, Homo sapien
gagaatctccctaaaggtgttgcgc

SEQ ID NO: 6086083 - DNA, 25 bp, Homo sapien
gagggccttcctcacggtcatgatg

SEQ ID NO: 6086084 - DNA, 25 bp, Homo sapien
accattttgctctccgagtagacga

SEQ ID NO: 6086085 - DNA, 25 bp, Homo sapien
cagtgctgctatgcgcttgacgtgc

SEQ ID NO: 6086086 - DNA, 25 bp, Homo sapien
gccacgatcaaggtgagggccttcc

SEQ ID NO: 6086087 - DNA, 25 bp, Homo sapien
gatcatggagtcgaagatgttgtcc

SEQ ID NO: 6086088 - DNA, 25 bp, Homo sapien
tggtgatgaggcacacaatgaccat

SEQ ID NO: 6086089 - DNA, 25 bp, Homo sapien
caggctccggaaagcgtagatgagt

SEQ ID NO: 6086090 - DNA, 25 bp, Homo sapien
attgcatgctcagtacagcccgggc

SEQ ID NO: 6086091 - DNA, 25 bp, Homo sapien
gatccactaggcgatgtccacaaag

SEQ ID NO: 6086092 - DNA, 25 bp, Homo sapien
caaaaatggagctcatgaccatgag

SEQ ID NO: 6086093 - DNA, 25 bp, Homo sapien
tcagctcatttgcatgggtgtcaac

SEQ ID NO: 6086094 - DNA, 25 bp, Homo sapien
gatgggctccacatgtcctaaacac

SEQ ID NO: 6086095 - DNA, 25 bp, Homo sapien
ccaacaagtggcagaaacgagggtg

SEQ ID NO: 6086096 - DNA, 25 bp, Homo sapien
taggacacactctgcgattcccagt

SEQ ID NO: 6086097 - DNA, 25 bp, Homo sapien
tgtcaacacatgataaacgcagaag

SEQ ID NO: 6086098 - DNA, 25 bp, Homo sapien
gactcggtgtgacaacagtataaaa

SEQ ID NO: 6086099 - DNA, 25 bp, Homo sapien
tataaaagagggcaatgaacttgcc

SEQ ID NO: 6086100 - DNA, 25 bp, Homo sapien
gaagcccagtggttgattgcatgct

SEQ ID NO: 6086101 - DNA, 25 bp, Homo sapien
gagatacaaccataagatgggctcc

SEQ ID NO: 6086102 - DNA, 25 bp, Homo sapien
cctgtgcccatcttaatgacaggca

SEQ ID NO: 6086103 - DNA, 25 bp, Homo sapien
gaggaggatgtaggcgacttccttc

SEQ ID NO: 6086104 - DNA, 25 bp, Homo sapien
tgcccatcttaatgacaggcacccg

SEQ ID NO: 6086105 - DNA, 25 bp, Homo sapien
ttccttgatacaccagcagcagagg

SEQ ID NO: 6086106 - DNA, 25 bp, Homo sapien
cagcagttccttgatacaccagcag

SEQ ID NO: 6086107 - DNA, 25 bp, Homo sapien
aggatgtaggcgacttccttcaggg

SEQ ID NO: 6086108 - DNA, 25 bp, Homo sapien
atccagcagttccttgatacaccag

SEQ ID NO: 6086109 - DNA, 25 bp, Homo sapien
tccagcagttccttgatacaccagc

SEQ ID NO: 6086110 - DNA, 25 bp, Homo sapien
gttccttgatacaccagcagcagag

SEQ ID NO: 6086111 - DNA, 25 bp, Homo sapien
gcagttccttgatacaccagcagca

SEQ ID NO: 6086112 - DNA, 25 bp, Homo sapien
cagttccttgatacaccagcagcag

SEQ ID NO: 6086113 - DNA, 25 bp, Homo sapien
cagaggaggatgtaggcgacttcct

SEQ ID NO: 6086114 - DNA, 25 bp, Homo sapien
ggcttctcgcgttgagggtcaccac

SEQ ID NO: 6086115 - DNA, 25 bp, Homo sapien
ttgaggtaggcacccaggtcggccc

SEQ ID NO: 6086116 - DNA, 25 bp, Homo sapien
ttggccagcagtaccggctctgacc

SEQ ID NO: 6086117 - DNA, 25 bp, Homo sapien
gaaatcaagcccgtcattggtgctc

SEQ ID NO: 6086118 - DNA, 25 bp, Homo sapien
gccggtgcccatgctctggaggtct

SEQ ID NO: 6086119 - DNA, 25 bp, Homo sapien
cttcgtacagacacccaaacaaggg

SEQ ID NO: 6086120 - DNA, 25 bp, Homo sapien
gacaatctcctcgtaatcattggct

SEQ ID NO: 6086121 - DNA, 25 bp, Homo sapien
catgagaaagacaatctcctcgtaa

SEQ ID NO: 6086122 - DNA, 25 bp, Homo sapien
ggaagctgatgacgctcccctggca

SEQ ID NO: 6086123 - DNA, 25 bp, Homo sapien
ctctggaggtctgagtaggcacagc

SEQ ID NO: 6086124 - DNA, 25 bp, Homo sapien
taatcattggcttcgtacagacacc

SEQ ID NO: 6086125 - DNA, 25 bp, Homo sapien
cacgtgcgcccatggtcatggctga

SEQ ID NO: 6086126 - DNA, 25 bp, Homo sapien
gcctgtcgtctagccacaagaaata

SEQ ID NO: 6086127 - DNA, 25 bp, Homo sapien
cagatacggtgaacttggtaggata

SEQ ID NO: 6086128 - DNA, 25 bp, Homo sapien
gaatcaatgctatatggtaaccatg

SEQ ID NO: 6086129 - DNA, 25 bp, Homo sapien
tattgctttcctaaaccatgggtaa

SEQ ID NO: 6086130 - DNA, 25 bp, Homo sapien
taactctctgaggatgattctgtct

SEQ ID NO: 6086131 - DNA, 25 bp, Homo sapien
ggttataaagcccataaaggcatca

SEQ ID NO: 6086132 - DNA, 25 bp, Homo sapien
tcagataattcctccagcccatcgt

SEQ ID NO: 6086133 - DNA, 25 bp, Homo sapien
gatttacaacggtctgacaacctcc

SEQ ID NO: 6086134 - DNA, 25 bp, Homo sapien
ccatcgtcatagacacctgtgtaga

SEQ ID NO: 6086135 - DNA, 25 bp, Homo sapien
gatagaaaatctgtcaacacccagt

SEQ ID NO: 6086136 - DNA, 25 bp, Homo sapien
tgtgtagaacacagcaccgctgtac

SEQ ID NO: 6086137 - DNA, 25 bp, Homo sapien
gagttataataagcacaccaacagc

SEQ ID NO: 6086138 - DNA, 25 bp, Homo sapien
cagctctccctaggcatttgtcttc

SEQ ID NO: 6086139 - DNA, 25 bp, Homo sapien
ggcttatgctacatccatccaagat

SEQ ID NO: 6086140 - DNA, 25 bp, Homo sapien
tctgtgacatgggtggcataagtca

SEQ ID NO: 6086141 - DNA, 25 bp, Homo sapien
taagtcagctgttggcttatgctac

SEQ ID NO: 6086142 - DNA, 25 bp, Homo sapien
tgggatcaacaagcctaaaatgttc

SEQ ID NO: 6086143 - DNA, 25 bp, Homo sapien
ccaacaaaagcatagataacagggt

SEQ ID NO: 6086144 - DNA, 25 bp, Homo sapien
aaatgtagtctacgctggaggaacg

SEQ ID NO: 6086145 - DNA, 25 bp, Homo sapien
cataaagatggtgaatgggatcaac

SEQ ID NO: 6086146 - DNA, 25 bp, Homo sapien
cctaggtagttgaagatttggctgc

SEQ ID NO: 6086147 - DNA, 25 bp, Homo sapien
gaggccacttggtaaaacactagca

SEQ ID NO: 6086148 - DNA, 25 bp, Homo sapien
gagcaccaacctgatggccttggtc

SEQ ID NO: 6086149 - DNA, 25 bp, Homo sapien
aagaaccacgttgaatgggacccag

SEQ ID NO: 6086150 - DNA, 25 bp, Homo sapien
gggcagcagcaagggttgcgtgcgt

SEQ ID NO: 6086151 - DNA, 25 bp, Homo sapien
gaggcctaaaatgagcgcactttgc

SEQ ID NO: 6086152 - DNA, 25 bp, Homo sapien
gaacaagtgcttttgagggccgccg

SEQ ID NO: 6086153 - DNA, 25 bp, Homo sapien
taaaatgagcgcactttgcaatgcc

SEQ ID NO: 6086154 - DNA, 25 bp, Homo sapien
gctccggccgggtagtgctaccatt

SEQ ID NO: 6086155 - DNA, 25 bp, Homo sapien
gttgcgtgcgttggcgcggctcgga

SEQ ID NO: 6086156 - DNA, 25 bp, Homo sapien
agcgcactttgcaatgcccacttcg

SEQ ID NO: 6086157 - DNA, 25 bp, Homo sapien
gaaggaacaagtgcttttgagggcc

SEQ ID NO: 6086158 - DNA, 25 bp, Homo sapien
gagaggaggcctaaaatgagcgcac

SEQ ID NO: 6086159 - DNA, 25 bp, Homo sapien
aagcagaaggaacaagtgcttttga

SEQ ID NO: 6086160 - DNA, 25 bp, Homo sapien
cagagaggaggcctaaaatgagcgc

SEQ ID NO: 6086161 - DNA, 25 bp, Homo sapien
agtgctaccattctagtattctttg

SEQ ID NO: 6086162 - DNA, 25 bp, Homo sapien
tggctgagccatagaagaggaacac

SEQ ID NO: 6086163 - DNA, 25 bp, Homo sapien
gttcttggccggaagcagataccca

SEQ ID NO: 6086164 - DNA, 25 bp, Homo sapien
cacgatgatgcttagtgggactgca

SEQ ID NO: 6086165 - DNA, 25 bp, Homo sapien
tgactggatcacagagttgcccaag

SEQ ID NO: 6086166 - DNA, 25 bp, Homo sapien
tgaggcagtaggagatcacgatgat

SEQ ID NO: 6086167 - DNA, 25 bp, Homo sapien
cagtttgatcatggcaggcacctcg

SEQ ID NO: 6086168 - DNA, 25 bp, Homo sapien
gtgtgaccaacgagtagaacaggga

SEQ ID NO: 6086169 - DNA, 25 bp, Homo sapien
tgggagaggcacgtattgaacgcct

SEQ ID NO: 6086170 - DNA, 25 bp, Homo sapien
gaaggtgcagacaccattgagcaca

SEQ ID NO: 6086171 - DNA, 25 bp, Homo sapien
tcacttccatgttccgcagcgtgta

SEQ ID NO: 6086172 - DNA, 25 bp, Homo sapien
cagatacccatagctggctgagcca

SEQ ID NO: 6086173 - DNA, 25 bp, Homo sapien
gattcaccatgggtgtgaccaacga

SEQ ID NO: 6086174 - DNA, 25 bp, Homo sapien
tgtagcggtccgcagcaatcacaga

SEQ ID NO: 6086175 - DNA, 25 bp, Homo sapien
ggatcgagccagcaggaacatgtgc

SEQ ID NO: 6086176 - DNA, 25 bp, Homo sapien
gaacagcgacgtgaaggtgatcact

SEQ ID NO: 6086177 - DNA, 25 bp, Homo sapien
gatgaagaccccgagcaggatggtc

SEQ ID NO: 6086178 - DNA, 25 bp, Homo sapien
atcttcctggtgtgggatcgagcca

SEQ ID NO: 6086179 - DNA, 25 bp, Homo sapien
tggtttcaaaactgccacgtggctt

SEQ ID NO: 6086180 - DNA, 25 bp, Homo sapien
gatgaagaccagcatcagcgggaac

SEQ ID NO: 6086181 - DNA, 25 bp, Homo sapien
cgtgcagaacgtccagatgaccgta

SEQ ID NO: 6086182 - DNA, 25 bp, Homo sapien
tcaacatgccgttcacctggaagag

SEQ ID NO: 6086183 - DNA, 25 bp, Homo sapien
gtgtgatggcccctttcatgttggc

SEQ ID NO: 6086184 - DNA, 25 bp, Homo sapien
ggcacatgatgggagaagatcacca

SEQ ID NO: 6086185 - DNA, 25 bp, Homo sapien
gatcaccatggtgatgccagtcccc

SEQ ID NO: 6086186 - DNA, 25 bp, Homo sapien
tgcaaacagattgcattcccatggt

SEQ ID NO: 6086187 - DNA, 25 bp, Homo sapien
taggtaaggctgatggagcatcgta

SEQ ID NO: 6086188 - DNA, 25 bp, Homo sapien
taaggctgatggagcatcgtatgtt

SEQ ID NO: 6086189 - DNA, 25 bp, Homo sapien
gctgatggagcatcgtatgttttgc

SEQ ID NO: 6086190 - DNA, 25 bp, Homo sapien
ctgatggagcatcgtatgttttgcc

SEQ ID NO: 6086191 - DNA, 25 bp, Homo sapien
aaagtctagaagattgaagggaaag

SEQ ID NO: 6086192 - DNA, 25 bp, Homo sapien
ctgcaaacagattgcattcccatgg

SEQ ID NO: 6086193 - DNA, 25 bp, Homo sapien
ttaggtaaggctgatggagcatcgt

SEQ ID NO: 6086194 - DNA, 25 bp, Homo sapien
aagtctagaagattgaagggaaaga

SEQ ID NO: 6086195 - DNA, 25 bp, Homo sapien
ggagactgcaaacagattgcattcc

SEQ ID NO: 6086196 - DNA, 25 bp, Homo sapien
gagactgcaaacagattgcattccc

SEQ ID NO: 6086197 - DNA, 25 bp, Homo sapien
tgatggagcatcgtatgttttgcca

SEQ ID NO: 6086198 - DNA, 25 bp, Homo sapien
tgtcccaagggtcggtgccgttctc

SEQ ID NO: 6086199 - DNA, 25 bp, Homo sapien
gcccagatgacgaagatgaccagct

SEQ ID NO: 6086200 - DNA, 25 bp, Homo sapien
gtgcagctctcactgacgaattgga

SEQ ID NO: 6086201 - DNA, 25 bp, Homo sapien
cgccgaagttccagggccggtactg

SEQ ID NO: 6086202 - DNA, 25 bp, Homo sapien
tttgcagaggaggtcgccgaagttc

SEQ ID NO: 6086203 - DNA, 25 bp, Homo sapien
gaagtagcgctcgacgctcagcgct

SEQ ID NO: 6086204 - DNA, 25 bp, Homo sapien
actgccagaggcgaacgaggtccag

SEQ ID NO: 6086205 - DNA, 25 bp, Homo sapien
ttccagggccggtactgccagaggc

SEQ ID NO: 6086206 - DNA, 25 bp, Homo sapien
aagcagatggcgaagtagcgctcga

SEQ ID NO: 6086207 - DNA, 25 bp, Homo sapien
cactgacgaattggaagagtttgca

SEQ ID NO: 6086208 - DNA, 25 bp, Homo sapien
tgagcagatcggagaaggccatgct

SEQ ID NO: 6086209 - DNA, 25 bp, Homo sapien
tagaggaccgtgagacagaagacag

SEQ ID NO: 6086210 - DNA, 25 bp, Homo sapien
catggagtgccgatgggtacgactt

SEQ ID NO: 6086211 - DNA, 25 bp, Homo sapien
ctgatcccgcgactggcgtaccagg

SEQ ID NO: 6086212 - DNA, 25 bp, Homo sapien
agtgccgatgggtacgacttgcagc

SEQ ID NO: 6086213 - DNA, 25 bp, Homo sapien
cgatgggtacgacttgcagctcccc

SEQ ID NO: 6086214 - DNA, 25 bp, Homo sapien
acaggcctgatcccgcgactggcgt

SEQ ID NO: 6086215 - DNA, 25 bp, Homo sapien
gggtacgacttgcagctccccgcag

SEQ ID NO: 6086216 - DNA, 25 bp, Homo sapien
actggcgtaccaggcaggattgatg

SEQ ID NO: 6086217 - DNA, 25 bp, Homo sapien
tgccgatgggtacgacttgcagctc

SEQ ID NO: 6086218 - DNA, 25 bp, Homo sapien
ccatggagtgccgatgggtacgact

SEQ ID NO: 6086219 - DNA, 25 bp, Homo sapien
cgcgactggcgtaccaggcaggatt

SEQ ID NO: 6086220 - DNA, 25 bp, Homo sapien
ttgccctcctccgaccgaagcggcc

SEQ ID NO: 6086221 - DNA, 25 bp, Homo sapien
atctccatggagtgccgatgggtac

SEQ ID NO: 6086222 - DNA, 25 bp, Homo sapien
gaaatacatgcccatcgttgtacca

SEQ ID NO: 6086223 - DNA, 25 bp, Homo sapien
aatagactcttggtagatggaactt

SEQ ID NO: 6086224 - DNA, 25 bp, Homo sapien
ttggggctgtaactggtcagagggc

SEQ ID NO: 6086225 - DNA, 25 bp, Homo sapien
ctcttggtagatggaacttggaaga

SEQ ID NO: 6086226 - DNA, 25 bp, Homo sapien
aagactgtggaaaagacctgaacat

SEQ ID NO: 6086227 - DNA, 25 bp, Homo sapien
tgaatagactcttggtagatggaac

SEQ ID NO: 6086228 - DNA, 25 bp, Homo sapien
tagactcttggtagatggaacttgg

SEQ ID NO: 6086229 - DNA, 25 bp, Homo sapien
atagactcttggtagatggaacttg

SEQ ID NO: 6086230 - DNA, 25 bp, Homo sapien
ttgaatagactcttggtagatggaa

SEQ ID NO: 6086231 - DNA, 25 bp, Homo sapien
agcaaaggcataatgtcacagtaga

SEQ ID NO: 6086232 - DNA, 25 bp, Homo sapien
gaatagactcttggtagatggaact

SEQ ID NO: 6086233 - DNA, 25 bp, Homo sapien
tcttggtagatggaacttggaagac

SEQ ID NO: 6086234 - DNA, 25 bp, Homo sapien
gagaaaatggacatagctcatggta

SEQ ID NO: 6086235 - DNA, 25 bp, Homo sapien
gatacctgattctacaatggccagt

SEQ ID NO: 6086236 - DNA, 25 bp, Homo sapien
tcttgatggaggcaaaatgtgtgca

SEQ ID NO: 6086237 - DNA, 25 bp, Homo sapien
cagtcctatgttcatcactcgggaa

SEQ ID NO: 6086238 - DNA, 25 bp, Homo sapien
cagtagagtgaaagaattatgggca

SEQ ID NO: 6086239 - DNA, 25 bp, Homo sapien
tactaggacacagctaatatgggag

SEQ ID NO: 6086240 - DNA, 25 bp, Homo sapien
tacctcagtggtgtgcggatggcaa

SEQ ID NO: 6086241 - DNA, 25 bp, Homo sapien
tgattaaacgtgatatcagcacagg

SEQ ID NO: 6086242 - DNA, 25 bp, Homo sapien
cagcacaggcgagttttatgacatc

SEQ ID NO: 6086243 - DNA, 25 bp, Homo sapien
caagtgttgagagatttagcttcct

SEQ ID NO: 6086244 - DNA, 25 bp, Homo sapien
taggccaaaacaagcaagatacctg

SEQ ID NO: 6086245 - DNA, 25 bp, Homo sapien
gggcacgggaaccacaatatgggta

SEQ ID NO: 6086246 - DNA, 25 bp, Homo sapien
gccttggcgtggctgtccagccgca

SEQ ID NO: 6086247 - DNA, 25 bp, Homo sapien
ctcgggctgcggaaagactagcacg

SEQ ID NO: 6086248 - DNA, 25 bp, Homo sapien
aaggtcacccgcttcttggcgcgct

SEQ ID NO: 6086249 - DNA, 25 bp, Homo sapien
gcagcacgacgagtgtgacgatccc

SEQ ID NO: 6086250 - DNA, 25 bp, Homo sapien
agaggaggcacaccgccaggattgc

SEQ ID NO: 6086251 - DNA, 25 bp, Homo sapien
gaagtaggagatagcgatgaccagc

SEQ ID NO: 6086252 - DNA, 25 bp, Homo sapien
gcggaaagactagcacgcactggcg

SEQ ID NO: 6086253 - DNA, 25 bp, Homo sapien
tgctcgtcgtctagccgggcgaaga

SEQ ID NO: 6086254 - DNA, 25 bp, Homo sapien
cgtggctgtccagccgcatggcatg

SEQ ID NO: 6086255 - DNA, 25 bp, Homo sapien
gagatagcgatgaccagcggcgtct

SEQ ID NO: 6086256 - DNA, 25 bp, Homo sapien
atggcgaagcccagcacgagcgtgt

SEQ ID NO: 6086257 - DNA, 25 bp, Homo sapien
tgagcgccaccacggtgctcaggtg

SEQ ID NO: 6086258 - DNA, 25 bp, Homo sapien
gaccggtcgcccttgagattggcgc

SEQ ID NO: 6086259 - DNA, 25 bp, Homo sapien
gcttggcttcggagggccggaggga

SEQ ID NO: 6086260 - DNA, 25 bp, Homo sapien
ggagcagtcgcgaccggtcgccctt

SEQ ID NO: 6086261 - DNA, 25 bp, Homo sapien
tgtcgcccttcttctgaccgccgcc

SEQ ID NO: 6086262 - DNA, 25 bp, Homo sapien
tgttggctcctttgtatttgcgcgc

SEQ ID NO: 6086263 - DNA, 25 bp, Homo sapien
tcggtccagcttgaggccgaagcag

SEQ ID NO: 6086264 - DNA, 25 bp, Homo sapien
ccttcttgttggctcctttgtattt

SEQ ID NO: 6086265 - DNA, 25 bp, Homo sapien
agtcgcgaccggtcgcccttgagat

SEQ ID NO: 6086266 - DNA, 25 bp, Homo sapien
acgctgcccgcgacttggtgtccac

SEQ ID NO: 6086267 - DNA, 25 bp, Homo sapien
acttggtgtccacgcgcaggtcccg

SEQ ID NO: 6086268 - DNA, 25 bp, Homo sapien
cgcgacttggtgtccacgcgcaggt

SEQ ID NO: 6086269 - DNA, 25 bp, Homo sapien
gctcctttgtatttgcgcgcgttgg

SEQ ID NO: 6086270 - DNA, 25 bp, Homo sapien
aatttgccttcatttgactgactgt

SEQ ID NO: 6086271 - DNA, 25 bp, Homo sapien
atttgccttcatttgactgactgtt

SEQ ID NO: 6086272 - DNA, 25 bp, Homo sapien
aaatttagatgtatgaggtttggac

SEQ ID NO: 6086273 - DNA, 25 bp, Homo sapien
tctaggcccactgaggctctgttac

SEQ ID NO: 6086274 - DNA, 25 bp, Homo sapien
cgtggcgctttaccgccggtggatt

SEQ ID NO: 6086275 - DNA, 25 bp, Homo sapien
ttccgagctgtctgtttagtacgag

SEQ ID NO: 6086276 - DNA, 25 bp, Homo sapien
cagcttccgaatcagcaactcggtc

SEQ ID NO: 6086277 - DNA, 25 bp, Homo sapien
ggtggatttccgagctgtctgttta

SEQ ID NO: 6086278 - DNA, 25 bp, Homo sapien
aagcgaagatcggtcttgaagtctt

SEQ ID NO: 6086279 - DNA, 25 bp, Homo sapien
gcttccgaatcagcaactcggtcga

SEQ ID NO: 6086280 - DNA, 25 bp, Homo sapien
ttacgctctttctccgcgaatgcgg

SEQ ID NO: 6086281 - DNA, 25 bp, Homo sapien
ttaccgccggtggatttccgagctg

SEQ ID NO: 6086282 - DNA, 25 bp, Homo sapien
cttagcatggatggcgcaaaggttt

SEQ ID NO: 6086283 - DNA, 25 bp, Homo sapien
atggatggcgcaaaggtttgtgtcc

SEQ ID NO: 6086284 - DNA, 25 bp, Homo sapien
gagctgtctgtttagtacgagccat

SEQ ID NO: 6086285 - DNA, 25 bp, Homo sapien
agatcggtcttgaagtcttgggcga

SEQ ID NO: 6086286 - DNA, 25 bp, Homo sapien
cacacacaatatggattctgaggac

SEQ ID NO: 6086287 - DNA, 25 bp, Homo sapien
tgactccggagtgcataaatcagag

SEQ ID NO: 6086288 - DNA, 25 bp, Homo sapien
gatagtaaagtacctgtccactgca

SEQ ID NO: 6086289 - DNA, 25 bp, Homo sapien
tgatgatcccaacccgcttaactgt

SEQ ID NO: 6086290 - DNA, 25 bp, Homo sapien
caggatggtcaaggtaatcgctccc

SEQ ID NO: 6086291 - DNA, 25 bp, Homo sapien
gatgatgacagcactactatctgag

SEQ ID NO: 6086292 - DNA, 25 bp, Homo sapien
caaatggatgcaagcaaggagctac

SEQ ID NO: 6086293 - DNA, 25 bp, Homo sapien
gcagacaacaaagacgccaatcagg

SEQ ID NO: 6086294 - DNA, 25 bp, Homo sapien
cataatgttatggtactggagagca

SEQ ID NO: 6086295 - DNA, 25 bp, Homo sapien
tgaaaccgtgcaagctgcccagata

SEQ ID NO: 6086296 - DNA, 25 bp, Homo sapien
tcatattggcaccttggcggatggc

SEQ ID NO: 6086297 - DNA, 25 bp, Homo sapien
caaggagctacagatcaccgagtca

SEQ ID NO: 6086298 - DNA, 25 bp, Homo sapien
atcacatttaggagatacttaagtc

SEQ ID NO: 6086299 - DNA, 25 bp, Homo sapien
ttccaagcacaaactaaaaatgacc

SEQ ID NO: 6086300 - DNA, 25 bp, Homo sapien
tccaagcacaaactaaaaatgacct

SEQ ID NO: 6086301 - DNA, 25 bp, Homo sapien
catttaggagatacttaagtcatat

SEQ ID NO: 6086302 - DNA, 25 bp, Homo sapien
tatcacatttaggagatacttaagt

SEQ ID NO: 6086303 - DNA, 25 bp, Homo sapien
aagcacaaactaaaaatgacctgtg

SEQ ID NO: 6086304 - DNA, 25 bp, Homo sapien
cacatttaggagatacttaagtcat

SEQ ID NO: 6086305 - DNA, 25 bp, Homo sapien
tcacatttaggagatacttaagtca

SEQ ID NO: 6086306 - DNA, 25 bp, Homo sapien
ccaagcacaaactaaaaatgacctg

SEQ ID NO: 6086307 - DNA, 25 bp, Homo sapien
agcacaaactaaaaatgacctgtgt

SEQ ID NO: 6086308 - DNA, 25 bp, Homo sapien
tttaggagatacttaagtcatattc

SEQ ID NO: 6086309 - DNA, 25 bp, Homo sapien
caagcacaaactaaaaatgacctgt

SEQ ID NO: 6086310 - DNA, 25 bp, Homo sapien
tcgaaagtcgagaagtgcagagcgt

SEQ ID NO: 6086311 - DNA, 25 bp, Homo sapien
taacattgcgcagctggtcgaaggc

SEQ ID NO: 6086312 - DNA, 25 bp, Homo sapien
caaggcgttgatgtagatttgggcc

SEQ ID NO: 6086313 - DNA, 25 bp, Homo sapien
gaaggagacaaattcttttgcgcca

SEQ ID NO: 6086314 - DNA, 25 bp, Homo sapien
ggctgagaagcgagtccggcaactc

SEQ ID NO: 6086315 - DNA, 25 bp, Homo sapien
gaacgacgggataacattgcgcagc

SEQ ID NO: 6086316 - DNA, 25 bp, Homo sapien
ttcttgtcgttgttgaacgacggga

SEQ ID NO: 6086317 - DNA, 25 bp, Homo sapien
tggtcgaaggcgtggttcagcccat

SEQ ID NO: 6086318 - DNA, 25 bp, Homo sapien
tgtagcagctcggacaaggcgttga

SEQ ID NO: 6086319 - DNA, 25 bp, Homo sapien
tttgcgccatcatcgctgtcagggc

SEQ ID NO: 6086320 - DNA, 25 bp, Homo sapien
tggcgttggctgctagccgtctctg

SEQ ID NO: 6086321 - DNA, 25 bp, Homo sapien
tcagggcgctgtcctcgaaagtcga

SEQ ID NO: 6086322 - DNA, 25 bp, Homo sapien
ttttgaccgtcttgcggatgcggaa

SEQ ID NO: 6086323 - DNA, 25 bp, Homo sapien
catcttgcgcttcgcctcggcgttg

SEQ ID NO: 6086324 - DNA, 25 bp, Homo sapien
ccaattgattatggcgcccaacagg

SEQ ID NO: 6086325 - DNA, 25 bp, Homo sapien
tgcggaagcgcgcagctcggaatat

SEQ ID NO: 6086326 - DNA, 25 bp, Homo sapien
gcaagtgctctttggagttgcccac

SEQ ID NO: 6086327 - DNA, 25 bp, Homo sapien
ttaagcagagagttggagtagccca

SEQ ID NO: 6086328 - DNA, 25 bp, Homo sapien
gagttgcccactcggtgcacctcga

SEQ ID NO: 6086329 - DNA, 25 bp, Homo sapien
gagtagcccagccaattgattatgg

SEQ ID NO: 6086330 - DNA, 25 bp, Homo sapien
gcagctcggaatatgcgcccataga

SEQ ID NO: 6086331 - DNA, 25 bp, Homo sapien
ccttgttgaagtatgcgtaaatgac

SEQ ID NO: 6086332 - DNA, 25 bp, Homo sapien
catggcgggtgtccgctccggtctt

SEQ ID NO: 6086333 - DNA, 25 bp, Homo sapien
gggcagaacaagagccacgatgaag

SEQ ID NO: 6086334 - DNA, 25 bp, Homo sapien
catgtaattagggatagtgtaaaga

SEQ ID NO: 6086335 - DNA, 25 bp, Homo sapien
cacttttatacatgttgagatccca

SEQ ID NO: 6086336 - DNA, 25 bp, Homo sapien
tatggccatgcctataaaatacaag

SEQ ID NO: 6086337 - DNA, 25 bp, Homo sapien
gaaaatgactcccagatttagcaaa

SEQ ID NO: 6086338 - DNA, 25 bp, Homo sapien
tcttcaggaaatagaagatgctgag

SEQ ID NO: 6086339 - DNA, 25 bp, Homo sapien
taagaatcttcgcaatgtatgcaaa

SEQ ID NO: 6086340 - DNA, 25 bp, Homo sapien
gaggcttgctttagcttgctgtttc

SEQ ID NO: 6086341 - DNA, 25 bp, Homo sapien
gcttctgtgttggagtctctcaatc

SEQ ID NO: 6086342 - DNA, 25 bp, Homo sapien
tctgctcttcaaccagagaaatatg

SEQ ID NO: 6086343 - DNA, 25 bp, Homo sapien
gcagtaccctcaaagaggcttgctt

SEQ ID NO: 6086344 - DNA, 25 bp, Homo sapien
gaatactatcatgaagggaagaacc

SEQ ID NO: 6086345 - DNA, 25 bp, Homo sapien
agcacttcaattgctgcagtaccct

SEQ ID NO: 6086346 - DNA, 25 bp, Homo sapien
gaaaatgaacacagtgctggttaat

SEQ ID NO: 6086347 - DNA, 25 bp, Homo sapien
catttatatggatgtttatcagtgc

SEQ ID NO: 6086348 - DNA, 25 bp, Homo sapien
ctggaaaatcgtgtaaagttacttg

SEQ ID NO: 6086349 - DNA, 25 bp, Homo sapien
gctggttaatacaataagactggaa

SEQ ID NO: 6086350 - DNA, 25 bp, Homo sapien
tcttcttgcgatgtttccacatgga

SEQ ID NO: 6086351 - DNA, 25 bp, Homo sapien
cattgatactggcatttatatggat

SEQ ID NO: 6086352 - DNA, 25 bp, Homo sapien
gaatcagaactgcaagtcttgtttc

SEQ ID NO: 6086353 - DNA, 25 bp, Homo sapien
aaaatggcatagagtaggaagaaag

SEQ ID NO: 6086354 - DNA, 25 bp, Homo sapien
agttagaaaaattggctatcttgag

SEQ ID NO: 6086355 - DNA, 25 bp, Homo sapien
ggtgctggcgtctccggatattttg

SEQ ID NO: 6086356 - DNA, 25 bp, Homo sapien
gaggtccaaactgatatgaaaaaag

SEQ ID NO: 6086357 - DNA, 25 bp, Homo sapien
gcgtctccggatattttgacagtgt

SEQ ID NO: 6086358 - DNA, 25 bp, Homo sapien
ttggaacaaagactcatctacctcc

SEQ ID NO: 6086359 - DNA, 25 bp, Homo sapien
ggaacaaagactcatctacctccac

SEQ ID NO: 6086360 - DNA, 25 bp, Homo sapien
attatgatctgtttcaaatagttgt

SEQ ID NO: 6086361 - DNA, 25 bp, Homo sapien
gaacaaagactcatctacctccacg

SEQ ID NO: 6086362 - DNA, 25 bp, Homo sapien
gactcatctacctccacgttgtttc

SEQ ID NO: 6086363 - DNA, 25 bp, Homo sapien
acaaagactcatctacctccacgtt

SEQ ID NO: 6086364 - DNA, 25 bp, Homo sapien
aaagactcatctacctccacgttgt

SEQ ID NO: 6086365 - DNA, 25 bp, Homo sapien
aagactcatctacctccacgttgtt

SEQ ID NO: 6086366 - DNA, 25 bp, Homo sapien
tggaacaaagactcatctacctcca

SEQ ID NO: 6086367 - DNA, 25 bp, Homo sapien
agactcatctacctccacgttgttt

SEQ ID NO: 6086368 - DNA, 25 bp, Homo sapien
tcatctacctccacgttgtttccag

SEQ ID NO: 6086369 - DNA, 25 bp, Homo sapien
caaagactcatctacctccacgttg

SEQ ID NO: 6086370 - DNA, 25 bp, Homo sapien
gagctgcatgactgtgaaccaatga

SEQ ID NO: 6086371 - DNA, 25 bp, Homo sapien
tgtgaaccaatgaggcttctcttgg

SEQ ID NO: 6086372 - DNA, 25 bp, Homo sapien
taagaggttatgctaaactgagaag

SEQ ID NO: 6086373 - DNA, 25 bp, Homo sapien
attaaaagctcctctcctttaagag

SEQ ID NO: 6086374 - DNA, 25 bp, Homo sapien
tacacatttgaaaacacacatgtag

SEQ ID NO: 6086375 - DNA, 25 bp, Homo sapien
gcatctgagaatacaagggtggaca

SEQ ID NO: 6086376 - DNA, 25 bp, Homo sapien
cagttaagatctattcagtctgtga

SEQ ID NO: 6086377 - DNA, 25 bp, Homo sapien
tgtagtcccgcctatattgcatggc

SEQ ID NO: 6086378 - DNA, 25 bp, Homo sapien
tccagtgaccaacacgctgaatttg

SEQ ID NO: 6086379 - DNA, 25 bp, Homo sapien
tcaagggttggacagaaagagtaaa

SEQ ID NO: 6086380 - DNA, 25 bp, Homo sapien
ggattcatcaaacccctgccatcag

SEQ ID NO: 6086381 - DNA, 25 bp, Homo sapien
gcctatattgcatggcctccagaaa

SEQ ID NO: 6086382 - DNA, 25 bp, Homo sapien
aagcacttcccgcagcggcgacagt

SEQ ID NO: 6086383 - DNA, 25 bp, Homo sapien
gcacttcccgcagcggcgacagtgg

SEQ ID NO: 6086384 - DNA, 25 bp, Homo sapien
gcagaagcacttcccgcagcggcga

SEQ ID NO: 6086385 - DNA, 25 bp, Homo sapien
gcacggggtccacaaagcacatgcg

SEQ ID NO: 6086386 - DNA, 25 bp, Homo sapien
cggggatccgcctcacctgggaaat

SEQ ID NO: 6086387 - DNA, 25 bp, Homo sapien
tgtcgcagaagcacttcccgcagcg

SEQ ID NO: 6086388 - DNA, 25 bp, Homo sapien
cagatgcgggaggattggcagtgag

SEQ ID NO: 6086389 - DNA, 25 bp, Homo sapien
acctgtcgcagaagcacttcccgca

SEQ ID NO: 6086390 - DNA, 25 bp, Homo sapien
acgcctaaacgcgaggcccctgtgc

SEQ ID NO: 6086391 - DNA, 25 bp, Homo sapien
acaaagcacatgcgccgcagcggca

SEQ ID NO: 6086392 - DNA, 25 bp, Homo sapien
tgctgggcagatgcgggaggattgg

SEQ ID NO: 6086393 - DNA, 25 bp, Homo sapien
cgcactccgcgcactgccgcacggg

SEQ ID NO: 6086394 - DNA, 25 bp, Homo sapien
gatgggtcggtacttgttcaggtcc

SEQ ID NO: 6086395 - DNA, 25 bp, Homo sapien
tcggtggtcacgtcgctgtcggatc

SEQ ID NO: 6086396 - DNA, 25 bp, Homo sapien
ccacgtgcagggaaagggccgttca

SEQ ID NO: 6086397 - DNA, 25 bp, Homo sapien
ggaaggactcgacccagattcggtg

SEQ ID NO: 6086398 - DNA, 25 bp, Homo sapien
tttccagactgtcgctgcacacgga

SEQ ID NO: 6086399 - DNA, 25 bp, Homo sapien
tcgtctgagcgggagaactttttaa

SEQ ID NO: 6086400 - DNA, 25 bp, Homo sapien
acacagcggacagcggaactgcttt

SEQ ID NO: 6086401 - DNA, 25 bp, Homo sapien
tgtatgcactctgtaatgggctttg

SEQ ID NO: 6086402 - DNA, 25 bp, Homo sapien
ttcggaggcgtgtttccccttcgca

SEQ ID NO: 6086403 - DNA, 25 bp, Homo sapien
ttttcgatcgcttgatcatgctggg

SEQ ID NO: 6086404 - DNA, 25 bp, Homo sapien
caacaagctcttggcgatggtgacc

SEQ ID NO: 6086405 - DNA, 25 bp, Homo sapien
aagcgttggccagcgcctttttcga

SEQ ID NO: 6086406 - DNA, 25 bp, Homo sapien
gaactgagactcattggtctagttt

SEQ ID NO: 6086407 - DNA, 25 bp, Homo sapien
ctgagactcattggtctagtttgat

SEQ ID NO: 6086408 - DNA, 25 bp, Homo sapien
tgagactcattggtctagtttgatt

SEQ ID NO: 6086409 - DNA, 25 bp, Homo sapien
tgtggcctaagggatagctccctct

SEQ ID NO: 6086410 - DNA, 25 bp, Homo sapien
aactgagactcattggtctagtttg

SEQ ID NO: 6086411 - DNA, 25 bp, Homo sapien
actgagactcattggtctagtttga

SEQ ID NO: 6086412 - DNA, 25 bp, Homo sapien
gtggcctaagggatagctccctctg

SEQ ID NO: 6086413 - DNA, 25 bp, Homo sapien
cactgtggcctaagggatagctccc

SEQ ID NO: 6086414 - DNA, 25 bp, Homo sapien
gactcattggtctagtttgattatg

SEQ ID NO: 6086415 - DNA, 25 bp, Homo sapien
actgtggcctaagggatagctccct

SEQ ID NO: 6086416 - DNA, 25 bp, Homo sapien
tggcctaagggatagctccctctga

SEQ ID NO: 6086417 - DNA, 25 bp, Homo sapien
gagactcattggtctagtttgatta

SEQ ID NO: 6086418 - DNA, 25 bp, Homo sapien
tctgattctactatacttagggaag

SEQ ID NO: 6086419 - DNA, 25 bp, Homo sapien
gcactgagcggagtctagtccttag

SEQ ID NO: 6086420 - DNA, 25 bp, Homo sapien
tttcaatgattagagcgattttctc

SEQ ID NO: 6086421 - DNA, 25 bp, Homo sapien
agctgctcctgttctaattgccatt

SEQ ID NO: 6086422 - DNA, 25 bp, Homo sapien
ggcagccactgtgctagtatccaat

SEQ ID NO: 6086423 - DNA, 25 bp, Homo sapien
gctttactcagcacagggcgctttt

SEQ ID NO: 6086424 - DNA, 25 bp, Homo sapien
tatcagcatacggatggaggcagcc

SEQ ID NO: 6086425 - DNA, 25 bp, Homo sapien
gacggaggtatctaggtaatcggaa

SEQ ID NO: 6086426 - DNA, 25 bp, Homo sapien
gctacacgtgggtcttccgtgccat

SEQ ID NO: 6086427 - DNA, 25 bp, Homo sapien
catttgcaggccctctgcatagact

SEQ ID NO: 6086428 - DNA, 25 bp, Homo sapien
catgtgagtaaatgtaggtttcccc

SEQ ID NO: 6086429 - DNA, 25 bp, Homo sapien
gaagactggctgctttactcagcac

SEQ ID NO: 6086430 - DNA, 25 bp, Homo sapien
gtctgagaacagaggttaagacctc

SEQ ID NO: 6086431 - DNA, 25 bp, Homo sapien
ccaagccgttgagaagccttttcca

SEQ ID NO: 6086432 - DNA, 25 bp, Homo sapien
ggttaagacctctccctaggtctga

SEQ ID NO: 6086433 - DNA, 25 bp, Homo sapien
aaggcggagacaggccggcttccaa

SEQ ID NO: 6086434 - DNA, 25 bp, Homo sapien
ctgaggtcaggccaagccgttgaga

SEQ ID NO: 6086435 - DNA, 25 bp, Homo sapien
gcactactgtctgcgtgggagtcgc

SEQ ID NO: 6086436 - DNA, 25 bp, Homo sapien
aacacagcgcgtctttccggaagca

SEQ ID NO: 6086437 - DNA, 25 bp, Homo sapien
tgcaggccgcactactgtctgcgtg

SEQ ID NO: 6086438 - DNA, 25 bp, Homo sapien
gcctacccttaagagcgtctgaggg

SEQ ID NO: 6086439 - DNA, 25 bp, Homo sapien
gggcggagcgaaccattagcctcgt

SEQ ID NO: 6086440 - DNA, 25 bp, Homo sapien
tccagagtcctgaaacgcagccgga

SEQ ID NO: 6086441 - DNA, 25 bp, Homo sapien
gtctgagggcgaaggccaagtccct

SEQ ID NO: 6086442 - DNA, 25 bp, Homo sapien
gagggctttctatcagtcatcagtg

SEQ ID NO: 6086443 - DNA, 25 bp, Homo sapien
agcaggcaggaagctaatcagcgag

SEQ ID NO: 6086444 - DNA, 25 bp, Homo sapien
gcgcctccaaattaaggactctctt

SEQ ID NO: 6086445 - DNA, 25 bp, Homo sapien
gttatagcacttcgtccagcactga

SEQ ID NO: 6086446 - DNA, 25 bp, Homo sapien
caggacttcatgtagtgagtgggta

SEQ ID NO: 6086447 - DNA, 25 bp, Homo sapien
caggacctctagctgttctgtaatg

SEQ ID NO: 6086448 - DNA, 25 bp, Homo sapien
tgttgctggtggaaatcgtttttgc

SEQ ID NO: 6086449 - DNA, 25 bp, Homo sapien
gactgaacaattagctgacccattt

SEQ ID NO: 6086450 - DNA, 25 bp, Homo sapien
cttctgcagactgaacaattagctg

SEQ ID NO: 6086451 - DNA, 25 bp, Homo sapien
ggtgctaggttggtaaagatttctc

SEQ ID NO: 6086452 - DNA, 25 bp, Homo sapien
gctaatcagcgaggagaaaatcgga

SEQ ID NO: 6086453 - DNA, 25 bp, Homo sapien
tctccatcagccgaaacttctgaaa

SEQ ID NO: 6086454 - DNA, 25 bp, Homo sapien
atgcacgctggtattctgcaatagc

SEQ ID NO: 6086455 - DNA, 25 bp, Homo sapien
cccatgcaagggaaacaaccacttc

SEQ ID NO: 6086456 - DNA, 25 bp, Homo sapien
gccaagctttcgtcccatgcaaggg

SEQ ID NO: 6086457 - DNA, 25 bp, Homo sapien
agatcctctagctaggcagggtgac

SEQ ID NO: 6086458 - DNA, 25 bp, Homo sapien
ggttccatagcgacgttctcctgca

SEQ ID NO: 6086459 - DNA, 25 bp, Homo sapien
cagcaaggatggcgagggtcctcat

SEQ ID NO: 6086460 - DNA, 25 bp, Homo sapien
ggatgtccgctgcaatctgctccgg

SEQ ID NO: 6086461 - DNA, 25 bp, Homo sapien
agatgcaggttccatagcgacgttc

SEQ ID NO: 6086462 - DNA, 25 bp, Homo sapien
cacttctgggatgtccgctgcaatc

SEQ ID NO: 6086463 - DNA, 25 bp, Homo sapien
tcagctcttgcctggagtggctcag

SEQ ID NO: 6086464 - DNA, 25 bp, Homo sapien
cgttctcctgcaatgcacgctggta

SEQ ID NO: 6086465 - DNA, 25 bp, Homo sapien
tttggagccaagctttcgtcccatg

SEQ ID NO: 6086466 - DNA, 25 bp, Homo sapien
cagctgttactggtgaattcatagc

SEQ ID NO: 6086467 - DNA, 25 bp, Homo sapien
cattttttccttggatgggtacaga

SEQ ID NO: 6086468 - DNA, 25 bp, Homo sapien
gcagttccaaggtggagactcagga

SEQ ID NO: 6086469 - DNA, 25 bp, Homo sapien
catagcttcgcacccaggtccaggg

SEQ ID NO: 6086470 - DNA, 25 bp, Homo sapien
tactggtgaattcatagcttcgcac

SEQ ID NO: 6086471 - DNA, 25 bp, Homo sapien
gtgaattcatagcttcgcacccagg

SEQ ID NO: 6086472 - DNA, 25 bp, Homo sapien
ggtgaattcatagcttcgcacccag

SEQ ID NO: 6086473 - DNA, 25 bp, Homo sapien
gttactggtgaattcatagcttcgc

SEQ ID NO: 6086474 - DNA, 25 bp, Homo sapien
ccattttttccttggatgggtacag

SEQ ID NO: 6086475 - DNA, 25 bp, Homo sapien
gaattcatagcttcgcacccaggtc

SEQ ID NO: 6086476 - DNA, 25 bp, Homo sapien
gcttgtggctgtattggaagcagca

SEQ ID NO: 6086477 - DNA, 25 bp, Homo sapien
gcagctgttactggtgaattcatag

SEQ ID NO: 6086478 - DNA, 25 bp, Homo sapien
tggaagacatccttacccgaggtgt

SEQ ID NO: 6086479 - DNA, 25 bp, Homo sapien
caggcggcacagcacgttgctaagg

SEQ ID NO: 6086480 - DNA, 25 bp, Homo sapien
ccattgagctgtgccagttggctcc

SEQ ID NO: 6086481 - DNA, 25 bp, Homo sapien
gggccacatagcttgtccaggttgt

SEQ ID NO: 6086482 - DNA, 25 bp, Homo sapien
tgccaaggtacacgactatgcggta

SEQ ID NO: 6086483 - DNA, 25 bp, Homo sapien
gcctgggccaacacggcgatgatct

SEQ ID NO: 6086484 - DNA, 25 bp, Homo sapien
cacgtggtacttgctgcacaggcgg

SEQ ID NO: 6086485 - DNA, 25 bp, Homo sapien
tgctaaggaggcctcgcaggatgtc

SEQ ID NO: 6086486 - DNA, 25 bp, Homo sapien
agttggctcctgatctggttcatga

SEQ ID NO: 6086487 - DNA, 25 bp, Homo sapien
tgaggatcttctggtcccgggtgat

SEQ ID NO: 6086488 - DNA, 25 bp, Homo sapien
gatgatctgcttatacttccccagg

SEQ ID NO: 6086489 - DNA, 25 bp, Homo sapien
gaataaagagggcattggcactgcc

SEQ ID NO: 6086490 - DNA, 25 bp, Homo sapien
gggcggagcgaaccattagcctcgt

SEQ ID NO: 6086491 - DNA, 25 bp, Homo sapien
gcactactgtctgcgtgggagtcgc

SEQ ID NO: 6086492 - DNA, 25 bp, Homo sapien
aaggcggagacaggccggcttccaa

SEQ ID NO: 6086493 - DNA, 25 bp, Homo sapien
ctgaggtcaggccaagccgttgaga

SEQ ID NO: 6086494 - DNA, 25 bp, Homo sapien
aacacagcgcgtctttccggaagca

SEQ ID NO: 6086495 - DNA, 25 bp, Homo sapien
ggttaagacctctccctaggtctga

SEQ ID NO: 6086496 - DNA, 25 bp, Homo sapien
ccaagccgttgagaagccttttcca

SEQ ID NO: 6086497 - DNA, 25 bp, Homo sapien
tgcaggccgcactactgtctgcgtg

SEQ ID NO: 6086498 - DNA, 25 bp, Homo sapien
tccagagtcctgaaacgcagccgga

SEQ ID NO: 6086499 - DNA, 25 bp, Homo sapien
gtctgagaacagaggttaagacctc

SEQ ID NO: 6086500 - DNA, 25 bp, Homo sapien
gtctgagggcgaaggccaagtccct

SEQ ID NO: 6086501 - DNA, 25 bp, Homo sapien
gcctacccttaagagcgtctgaggg

SEQ ID NO: 6086502 - DNA, 25 bp, Homo sapien
ccggcatcggtggtggcgcctgtgg

SEQ ID NO: 6086503 - DNA, 25 bp, Homo sapien
gccgccctcggagctagggccacag

SEQ ID NO: 6086504 - DNA, 25 bp, Homo sapien
aagcagccgccctcggagctagggc

SEQ ID NO: 6086505 - DNA, 25 bp, Homo sapien
gccggcatcggtggtggcgcctgtg

SEQ ID NO: 6086506 - DNA, 25 bp, Homo sapien
agccgccctcggagctagggccaca

SEQ ID NO: 6086507 - DNA, 25 bp, Homo sapien
cgccggcatcggtggtggcgcctgt

SEQ ID NO: 6086508 - DNA, 25 bp, Homo sapien
caggtcccacgcacaaatgtagtcg

SEQ ID NO: 6086509 - DNA, 25 bp, Homo sapien
gcgtcagtttggtcaccgtctgctc

SEQ ID NO: 6086510 - DNA, 25 bp, Homo sapien
ccacgcacaaatgtagtcgtcgttg

SEQ ID NO: 6086511 - DNA, 25 bp, Homo sapien
cgcacaaatgtagtcgtcgttgtta

SEQ ID NO: 6086512 - DNA, 25 bp, Homo sapien
tcccacgcacaaatgtagtcgtcgt

SEQ ID NO: 6086513 - DNA, 25 bp, Homo sapien
ccaggtcccacgcacaaatgtagtc

SEQ ID NO: 6086514 - DNA, 25 bp, Homo sapien
ggtcccacgcacaaatgtagtcgtc

SEQ ID NO: 6086515 - DNA, 25 bp, Homo sapien
ctccaggtcccacgcacaaatgtag

SEQ ID NO: 6086516 - DNA, 25 bp, Homo sapien
caaatgtagtcgtcgttgttaaaat

SEQ ID NO: 6086517 - DNA, 25 bp, Homo sapien
ggaagtctggtgcccggaggatcat

SEQ ID NO: 6086518 - DNA, 25 bp, Homo sapien
cccgcgtcagtttggtcaccgtctg

SEQ ID NO: 6086519 - DNA, 25 bp, Homo sapien
cgcttccagctgctcgtgtgtgaag

SEQ ID NO: 6086520 - DNA, 25 bp, Homo sapien
caagctgtgggtctcagggagatca

SEQ ID NO: 6086521 - DNA, 25 bp, Homo sapien
acaggaggaaggagagattctgctc

SEQ ID NO: 6086522 - DNA, 25 bp, Homo sapien
atcaaggtcctcctgttatccaagc

SEQ ID NO: 6086523 - DNA, 25 bp, Homo sapien
cctgttatccaagctgtgggtctca

SEQ ID NO: 6086524 - DNA, 25 bp, Homo sapien
tatccaagctgtgggtctcagggag

SEQ ID NO: 6086525 - DNA, 25 bp, Homo sapien
gcagcagatgaatcttttgtggtaa

SEQ ID NO: 6086526 - DNA, 25 bp, Homo sapien
ggtcctcctgttatccaagctgtgg

SEQ ID NO: 6086527 - DNA, 25 bp, Homo sapien
gcgaggccatcatagatattgcaga

SEQ ID NO: 6086528 - DNA, 25 bp, Homo sapien
aaagcaaagggcgaggccatcatag

SEQ ID NO: 6086529 - DNA, 25 bp, Homo sapien
gcagatgcttctgggcttgctgaga

SEQ ID NO: 6086530 - DNA, 25 bp, Homo sapien
tgtctgtccatcagacaggaggaag

SEQ ID NO: 6086531 - DNA, 25 bp, Homo sapien
tcttcacagccaagatggagtccgc

SEQ ID NO: 6086532 - DNA, 25 bp, Homo sapien
catgtgagtaaatgtaggtttcccc

SEQ ID NO: 6086533 - DNA, 25 bp, Homo sapien
gaagactggctgctttactcagcac

SEQ ID NO: 6086534 - DNA, 25 bp, Homo sapien
tttcaatgattagagcgattttctc

SEQ ID NO: 6086535 - DNA, 25 bp, Homo sapien
gctttactcagcacagggcgctttt

SEQ ID NO: 6086536 - DNA, 25 bp, Homo sapien
ggcagccactgtgctagtatccaat

SEQ ID NO: 6086537 - DNA, 25 bp, Homo sapien
gcactgagcggagtctagtccttag

SEQ ID NO: 6086538 - DNA, 25 bp, Homo sapien
tctgattctactatacttagggaag

SEQ ID NO: 6086539 - DNA, 25 bp, Homo sapien
catttgcaggccctctgcatagact

SEQ ID NO: 6086540 - DNA, 25 bp, Homo sapien
gctacacgtgggtcttccgtgccat

SEQ ID NO: 6086541 - DNA, 25 bp, Homo sapien
tgattcgtctactggtctttttggg

SEQ ID NO: 6086542 - DNA, 25 bp, Homo sapien
tatcagcatacggatggaggcagcc

SEQ ID NO: 6086543 - DNA, 25 bp, Homo sapien
gacggaggtatctaggtaatcggaa

SEQ ID NO: 6086544 - DNA, 25 bp, Homo sapien
ttgtctctgacttatcagatggtta

SEQ ID NO: 6086545 - DNA, 25 bp, Homo sapien
gtaaactaacattcttaacattcca

SEQ ID NO: 6086546 - DNA, 25 bp, Homo sapien
gaccaaaagactgagatattttctg

SEQ ID NO: 6086547 - DNA, 25 bp, Homo sapien
cttatcagatggttaaagtctgcct

SEQ ID NO: 6086548 - DNA, 25 bp, Homo sapien
taaagtctgccttatttgagtaagc

SEQ ID NO: 6086549 - DNA, 25 bp, Homo sapien
gttggttcacacagatactatcata

SEQ ID NO: 6086550 - DNA, 25 bp, Homo sapien
gcactgactgtcaaccttgcttaga

SEQ ID NO: 6086551 - DNA, 25 bp, Homo sapien
tactatcataatgcaggaaaaggat

SEQ ID NO: 6086552 - DNA, 25 bp, Homo sapien
gaaaaggatttgtgttagaattcaa

SEQ ID NO: 6086553 - DNA, 25 bp, Homo sapien
tttggacagggttattctttatctc

SEQ ID NO: 6086554 - DNA, 25 bp, Homo sapien
gactgtcaaccttgcttagaagagg

SEQ ID NO: 6086555 - DNA, 25 bp, Homo sapien
aattagttctaaacaaagatattca

SEQ ID NO: 6086556 - DNA, 25 bp, Homo sapien
tctgattctactatacttagggaag

SEQ ID NO: 6086557 - DNA, 25 bp, Homo sapien
ggcagccactgtgctagtatccaat

SEQ ID NO: 6086558 - DNA, 25 bp, Homo sapien
tttcaatgattagagcgattttctc

SEQ ID NO: 6086559 - DNA, 25 bp, Homo sapien
catgtgagtaaatgtaggtttcccc

SEQ ID NO: 6086560 - DNA, 25 bp, Homo sapien
gctttactcagcacagggcgctttt

SEQ ID NO: 6086561 - DNA, 25 bp, Homo sapien
agctgctcctgttctaattgccatt

SEQ ID NO: 6086562 - DNA, 25 bp, Homo sapien
gcactgagcggagtctagtccttag

SEQ ID NO: 6086563 - DNA, 25 bp, Homo sapien
gctacacgtgggtcttccgtgccat

SEQ ID NO: 6086564 - DNA, 25 bp, Homo sapien
catttgcaggccctctgcatagact

SEQ ID NO: 6086565 - DNA, 25 bp, Homo sapien
gacggaggtatctaggtaatcggaa

SEQ ID NO: 6086566 - DNA, 25 bp, Homo sapien
gaagactggctgctttactcagcac

SEQ ID NO: 6086567 - DNA, 25 bp, Homo sapien
tatcagcatacggatggaggcagcc

SEQ ID NO: 6086568 - DNA, 25 bp, Homo sapien
gcactactgtctgcgtgggagtcgc

SEQ ID NO: 6086569 - DNA, 25 bp, Homo sapien
gtctgagggcgaaggccaagtccct

SEQ ID NO: 6086570 - DNA, 25 bp, Homo sapien
gggcggagcgaaccattagcctcgt

SEQ ID NO: 6086571 - DNA, 25 bp, Homo sapien
aaggcggagacaggccggcttccaa

SEQ ID NO: 6086572 - DNA, 25 bp, Homo sapien
gtctgagaacagaggttaagacctc

SEQ ID NO: 6086573 - DNA, 25 bp, Homo sapien
ctgaggtcaggccaagccgttgaga

SEQ ID NO: 6086574 - DNA, 25 bp, Homo sapien
ggttaagacctctccctaggtctga

SEQ ID NO: 6086575 - DNA, 25 bp, Homo sapien
tccagagtcctgaaacgcagccgga

SEQ ID NO: 6086576 - DNA, 25 bp, Homo sapien
tgcaggccgcactactgtctgcgtg

SEQ ID NO: 6086577 - DNA, 25 bp, Homo sapien
gcctacccttaagagcgtctgaggg

SEQ ID NO: 6086578 - DNA, 25 bp, Homo sapien
ccaagccgttgagaagccttttcca

SEQ ID NO: 6086579 - DNA, 25 bp, Homo sapien
aacacagcgcgtctttccggaagca

SEQ ID NO: 6086580 - DNA, 25 bp, Homo sapien
ctgaggtcaggccaagccgttgaga

SEQ ID NO: 6086581 - DNA, 25 bp, Homo sapien
aaggcggagacaggccggcttccaa

SEQ ID NO: 6086582 - DNA, 25 bp, Homo sapien
ccaagccgttgagaagccttttcca

SEQ ID NO: 6086583 - DNA, 25 bp, Homo sapien
tgcaggccgcactactgtctgcgtg

SEQ ID NO: 6086584 - DNA, 25 bp, Homo sapien
gtctgagaacagaggttaagacctc

SEQ ID NO: 6086585 - DNA, 25 bp, Homo sapien
ggttaagacctctccctaggtctga

SEQ ID NO: 6086586 - DNA, 25 bp, Homo sapien
gcactactgtctgcgtgggagtcgc

SEQ ID NO: 6086587 - DNA, 25 bp, Homo sapien
tccagagtcctgaaacgcagccgga

SEQ ID NO: 6086588 - DNA, 25 bp, Homo sapien
gcctacccttaagagcgtctgaggg

SEQ ID NO: 6086589 - DNA, 25 bp, Homo sapien
gggcggagcgaaccattagcctcgt

SEQ ID NO: 6086590 - DNA, 25 bp, Homo sapien
aacacagcgcgtctttccggaagca

SEQ ID NO: 6086591 - DNA, 25 bp, Homo sapien
gtctgagggcgaaggccaagtccct

SEQ ID NO: 6086592 - DNA, 25 bp, Homo sapien
tgggaagacattgctctaggaacag

SEQ ID NO: 6086593 - DNA, 25 bp, Homo sapien
gggaagacattgctctaggaacagg

SEQ ID NO: 6086594 - DNA, 25 bp, Homo sapien
gaagacattgctctaggaacaggtg

SEQ ID NO: 6086595 - DNA, 25 bp, Homo sapien
gggtgcacatgtctcttgacattta

SEQ ID NO: 6086596 - DNA, 25 bp, Homo sapien
aagacattgctctaggaacaggtga

SEQ ID NO: 6086597 - DNA, 25 bp, Homo sapien
aatgatggtgcctttcggtgggcat

SEQ ID NO: 6086598 - DNA, 25 bp, Homo sapien
gggctggaatgatggtgcctttcgg

SEQ ID NO: 6086599 - DNA, 25 bp, Homo sapien
ttgggtgcacatgtctcttgacatt

SEQ ID NO: 6086600 - DNA, 25 bp, Homo sapien
ggaagacattgctctaggaacaggt

SEQ ID NO: 6086601 - DNA, 25 bp, Homo sapien
ggtgcacatgtctcttgacatttaa

SEQ ID NO: 6086602 - DNA, 25 bp, Homo sapien
ggtggctgacaaggctgcttcactt

SEQ ID NO: 6086603 - DNA, 25 bp, Homo sapien
gctggaatgatggtgcctttcggtg

SEQ ID NO: 6086604 - DNA, 25 bp, Homo sapien
aatgatggtgcctttcggtgggcat

SEQ ID NO: 6086605 - DNA, 25 bp, Homo sapien
gggaagacattgctctaggaacagg

SEQ ID NO: 6086606 - DNA, 25 bp, Homo sapien
gggtgcacatgtctcttgacattta

SEQ ID NO: 6086607 - DNA, 25 bp, Homo sapien
tgggaagacattgctctaggaacag

SEQ ID NO: 6086608 - DNA, 25 bp, Homo sapien
ttgggtgcacatgtctcttgacatt

SEQ ID NO: 6086609 - DNA, 25 bp, Homo sapien
gctggaatgatggtgcctttcggtg

SEQ ID NO: 6086610 - DNA, 25 bp, Homo sapien
gaagacattgctctaggaacaggtg

SEQ ID NO: 6086611 - DNA, 25 bp, Homo sapien
ggaagacattgctctaggaacaggt

SEQ ID NO: 6086612 - DNA, 25 bp, Homo sapien
ggtgcacatgtctcttgacatttaa

SEQ ID NO: 6086613 - DNA, 25 bp, Homo sapien
gggctggaatgatggtgcctttcgg

SEQ ID NO: 6086614 - DNA, 25 bp, Homo sapien
ggtggctgacaaggctgcttcactt

SEQ ID NO: 6086615 - DNA, 25 bp, Homo sapien
aagacattgctctaggaacaggtga

SEQ ID NO: 6086616 - DNA, 25 bp, Homo sapien
gctgatttccagaggatggaagaag

SEQ ID NO: 6086617 - DNA, 25 bp, Homo sapien
agctgatttccagaggatggaagaa

SEQ ID NO: 6086618 - DNA, 25 bp, Homo sapien
cagctgatttccagaggatggaaga

SEQ ID NO: 6086619 - DNA, 25 bp, Homo sapien
acagctgatttccagaggatggaag

SEQ ID NO: 6086620 - DNA, 25 bp, Homo sapien
gggtcactacgcttgtccactttgc

SEQ ID NO: 6086621 - DNA, 25 bp, Homo sapien
ccactttgcgggagcgggtgtatcc

SEQ ID NO: 6086622 - DNA, 25 bp, Homo sapien
cctggccggcagagcaaattgctgt

SEQ ID NO: 6086623 - DNA, 25 bp, Homo sapien
tcataccaggtctccgttccattgg

SEQ ID NO: 6086624 - DNA, 25 bp, Homo sapien
ggcatttagagccttcagcacggca

SEQ ID NO: 6086625 - DNA, 25 bp, Homo sapien
tcttcagtctggttgtctggcccca

SEQ ID NO: 6086626 - DNA, 25 bp, Homo sapien
tgtaggagttgtcatcacggccagg

SEQ ID NO: 6086627 - DNA, 25 bp, Homo sapien
gtctccgttccattggtagtctcca

SEQ ID NO: 6086628 - DNA, 25 bp, Homo sapien
ggcatgcaggctctcataccaggtc

SEQ ID NO: 6086629 - DNA, 25 bp, Homo sapien
gacacacggttcttgatatacacat

SEQ ID NO: 6086630 - DNA, 25 bp, Homo sapien
ggcccgcctctcttcagtctggttg

SEQ ID NO: 6086631 - DNA, 25 bp, Homo sapien
tagagccttcagcacggcatgcagg

SEQ ID NO: 6086632 - DNA, 25 bp, Homo sapien
tgagacatgtatggctgcatgtcaa

SEQ ID NO: 6086633 - DNA, 25 bp, Homo sapien
gtggagacacttgatttgagatctc

SEQ ID NO: 6086634 - DNA, 25 bp, Homo sapien
tctccattgagttcttcgggcttca

SEQ ID NO: 6086635 - DNA, 25 bp, Homo sapien
tcaggatattgcacattcttggcaa

SEQ ID NO: 6086636 - DNA, 25 bp, Homo sapien
cactcttctggatgtaaaagaggac

SEQ ID NO: 6086637 - DNA, 25 bp, Homo sapien
gagttcttcgggcttcaccaactgt

SEQ ID NO: 6086638 - DNA, 25 bp, Homo sapien
ggcgatgtccaggtaagggtcaaaa

SEQ ID NO: 6086639 - DNA, 25 bp, Homo sapien
cattgagttcttcgggcttcaccaa

SEQ ID NO: 6086640 - DNA, 25 bp, Homo sapien
taggcattctctccattgagttctt

SEQ ID NO: 6086641 - DNA, 25 bp, Homo sapien
catgtcaaggcactcaggatattgc

SEQ ID NO: 6086642 - DNA, 25 bp, Homo sapien
ttcgggcttcaccaactgttccaaa

SEQ ID NO: 6086643 - DNA, 25 bp, Homo sapien
gatgtccaggtaagggtcaaaagtg

SEQ ID NO: 6086644 - DNA, 25 bp, Homo sapien
gcatactggtttatctaagttttac

SEQ ID NO: 6086645 - DNA, 25 bp, Homo sapien
agcaccagggcaacacatagtagca

SEQ ID NO: 6086646 - DNA, 25 bp, Homo sapien
gaaggagaaatagcatactggttta

SEQ ID NO: 6086647 - DNA, 25 bp, Homo sapien
gaggtctaggattttcattcgtggg

SEQ ID NO: 6086648 - DNA, 25 bp, Homo sapien
catttcttactgtggctccattcac

SEQ ID NO: 6086649 - DNA, 25 bp, Homo sapien
agttctgactggaaagagagaggtc

SEQ ID NO: 6086650 - DNA, 25 bp, Homo sapien
gaggaaacatctgtaaaggcagaca

SEQ ID NO: 6086651 - DNA, 25 bp, Homo sapien
gaaactccatgaaagtttagctatg

SEQ ID NO: 6086652 - DNA, 25 bp, Homo sapien
tccagattgacttctaaatgaggac

SEQ ID NO: 6086653 - DNA, 25 bp, Homo sapien
gagaaagaggaaacatctgtaaagg

SEQ ID NO: 6086654 - DNA, 25 bp, Homo sapien
tgttccaagatcaagacctctgccc

SEQ ID NO: 6086655 - DNA, 25 bp, Homo sapien
ccagggcaacacatagtagcaggag

SEQ ID NO: 6086656 - DNA, 25 bp, Homo sapien
gctcatttggtagtgaagtgctgca

SEQ ID NO: 6086657 - DNA, 25 bp, Homo sapien
tcaacctcaaaacatggtgcaggct

SEQ ID NO: 6086658 - DNA, 25 bp, Homo sapien
ttgaatcaatacatccagaaaagtg

SEQ ID NO: 6086659 - DNA, 25 bp, Homo sapien
caatatctgcaattctacagtcacg

SEQ ID NO: 6086660 - DNA, 25 bp, Homo sapien
tggatgagcttacattatctgaggg

SEQ ID NO: 6086661 - DNA, 25 bp, Homo sapien
ttactttatggacaggtttcgaaca

SEQ ID NO: 6086662 - DNA, 25 bp, Homo sapien
gaggattcaggcaattgttaaaata

SEQ ID NO: 6086663 - DNA, 25 bp, Homo sapien
aggcttcttggtggatgagcttaca

SEQ ID NO: 6086664 - DNA, 25 bp, Homo sapien
gctttagaaaagtcggttcagtcca

SEQ ID NO: 6086665 - DNA, 25 bp, Homo sapien
ggcatggccgtgtccacaatatctg

SEQ ID NO: 6086666 - DNA, 25 bp, Homo sapien
ggcggtaggaaagcgtgctcatttt

SEQ ID NO: 6086667 - DNA, 25 bp, Homo sapien
aagtcggttcagtccacataatgca

SEQ ID NO: 6086668 - DNA, 25 bp, Homo sapien
ggccccaggcggtgcatctggttca

SEQ ID NO: 6086669 - DNA, 25 bp, Homo sapien
ctgagttgggcttcttcggcttgcg

SEQ ID NO: 6086670 - DNA, 25 bp, Homo sapien
cacaagttagggacgtgttgaggcc

SEQ ID NO: 6086671 - DNA, 25 bp, Homo sapien
gacagcacttgcgattggctgagtt

SEQ ID NO: 6086672 - DNA, 25 bp, Homo sapien
ccacgcacaacggtgagcttgacgc

SEQ ID NO: 6086673 - DNA, 25 bp, Homo sapien
tgctgagccgcactcgacagcactt

SEQ ID NO: 6086674 - DNA, 25 bp, Homo sapien
cgccctccacaaggacaatctggtg

SEQ ID NO: 6086675 - DNA, 25 bp, Homo sapien
tgagcttgacgcctggcaggtcctg

SEQ ID NO: 6086676 - DNA, 25 bp, Homo sapien
agcagacggcctcgcggccagtgct

SEQ ID NO: 6086677 - DNA, 25 bp, Homo sapien
cttcttcggcttgcgggtaaacgtg

SEQ ID NO: 6086678 - DNA, 25 bp, Homo sapien
cttgcgggtaaacgtgcacaggacc

SEQ ID NO: 6086679 - DNA, 25 bp, Homo sapien
tcagggtagccatggagcaggtagc

SEQ ID NO: 6086680 - DNA, 25 bp, Homo sapien
aagttctctgggtaacataacatgc

SEQ ID NO: 6086681 - DNA, 25 bp, Homo sapien
ccgagtagtagatctgcttgtgggc

SEQ ID NO: 6086682 - DNA, 25 bp, Homo sapien
cgaagtacttgtccgagtagtagat

SEQ ID NO: 6086683 - DNA, 25 bp, Homo sapien
atcagatgagttttaggtacttgtt

SEQ ID NO: 6086684 - DNA, 25 bp, Homo sapien
gttcgtcgaagtacttgtccgagta

SEQ ID NO: 6086685 - DNA, 25 bp, Homo sapien
gatgagttttaggtacttgtttgga

SEQ ID NO: 6086686 - DNA, 25 bp, Homo sapien
aaagttctctgggtaacataacatg

SEQ ID NO: 6086687 - DNA, 25 bp, Homo sapien
tacttgtccgagtagtagatctgct

SEQ ID NO: 6086688 - DNA, 25 bp, Homo sapien
gactctgttggacaccaagtctcct

SEQ ID NO: 6086689 - DNA, 25 bp, Homo sapien
cgtcgaagtacttgtccgagtagta

SEQ ID NO: 6086690 - DNA, 25 bp, Homo sapien
tgtccgagtagtagatctgcttgtg

SEQ ID NO: 6086691 - DNA, 25 bp, Homo sapien
ggtactcgtagtgttcgtcgaagta

SEQ ID NO: 6086692 - DNA, 25 bp, Homo sapien
ctgtatttgttaactggagggatgt

SEQ ID NO: 6086693 - DNA, 25 bp, Homo sapien
cgaggttcaagcgtaaataagtata

SEQ ID NO: 6086694 - DNA, 25 bp, Homo sapien
ctttgtttgtaatatactgctctct

SEQ ID NO: 6086695 - DNA, 25 bp, Homo sapien
tcaattgttcgaggttcaagcgtaa

SEQ ID NO: 6086696 - DNA, 25 bp, Homo sapien
cttcctcagtgagagttttaaactc

SEQ ID NO: 6086697 - DNA, 25 bp, Homo sapien
gagttttaaactcgaccagatctgt

SEQ ID NO: 6086698 - DNA, 25 bp, Homo sapien
gatttggtccaggtaccagattcct

SEQ ID NO: 6086699 - DNA, 25 bp, Homo sapien
ttctataggtgaggatgaagcccac

SEQ ID NO: 6086700 - DNA, 25 bp, Homo sapien
aaatgaagatgttggagacgtctgc

SEQ ID NO: 6086701 - DNA, 25 bp, Homo sapien
tgctctctcctgatttggtccaggt

SEQ ID NO: 6086702 - DNA, 25 bp, Homo sapien
taaactcgaccagatctgtattgtc

SEQ ID NO: 6086703 - DNA, 25 bp, Homo sapien
taccctcctaacattgtggtctgaa

SEQ ID NO: 6086704 - DNA, 25 bp, Homo sapien
caccacctgcgactgcacgttgtgg

SEQ ID NO: 6086705 - DNA, 25 bp, Homo sapien
gctggttaatctgccggtctgatgg

SEQ ID NO: 6086706 - DNA, 25 bp, Homo sapien
ccctggaaggtaggatatccagcag

SEQ ID NO: 6086707 - DNA, 25 bp, Homo sapien
gcaggagcattgttttccggaggcc

SEQ ID NO: 6086708 - DNA, 25 bp, Homo sapien
tgccgccaacggatgaaggcctcca

SEQ ID NO: 6086709 - DNA, 25 bp, Homo sapien
gaatatggttttccgtcaagattcc

SEQ ID NO: 6086710 - DNA, 25 bp, Homo sapien
tgagcggagtacttgtttgtctctg

SEQ ID NO: 6086711 - DNA, 25 bp, Homo sapien
tagatatccgtctgggacagtccca

SEQ ID NO: 6086712 - DNA, 25 bp, Homo sapien
tctgggccagctggttaatctgccg

SEQ ID NO: 6086713 - DNA, 25 bp, Homo sapien
ctccaggcgaagtgagcggagtact

SEQ ID NO: 6086714 - DNA, 25 bp, Homo sapien
aagcgctgccgccaacggatgaagg

SEQ ID NO: 6086715 - DNA, 25 bp, Homo sapien
acagcggtagatatccgtctgggac

SEQ ID NO: 6086716 - DNA, 25 bp, Homo sapien
cagaatagtcaactatgaacttttg

SEQ ID NO: 6086717 - DNA, 25 bp, Homo sapien
tggtttcagaatagtcaactatgaa

SEQ ID NO: 6086718 - DNA, 25 bp, Homo sapien
ggccatggtgcagacgaggacaagg

SEQ ID NO: 6086719 - DNA, 25 bp, Homo sapien
tgtggaatctgccaggaggtataga

SEQ ID NO: 6086720 - DNA, 25 bp, Homo sapien
tcagaatagtcaactatgaactttt

SEQ ID NO: 6086721 - DNA, 25 bp, Homo sapien
tttcagaatagtcaactatgaactt

SEQ ID NO: 6086722 - DNA, 25 bp, Homo sapien
ggtttcagaatagtcaactatgaac

SEQ ID NO: 6086723 - DNA, 25 bp, Homo sapien
ttcagaatagtcaactatgaacttt

SEQ ID NO: 6086724 - DNA, 25 bp, Homo sapien
gtggaatctgccaggaggtatagac

SEQ ID NO: 6086725 - DNA, 25 bp, Homo sapien
gtttcagaatagtcaactatgaact

SEQ ID NO: 6086726 - DNA, 25 bp, Homo sapien
tggaatctgccaggaggtatagacg

SEQ ID NO: 6086727 - DNA, 25 bp, Homo sapien
ttgtgcacaggagcagagggccatg

SEQ ID NO: 6086728 - DNA, 25 bp, Homo sapien
gaaccacctaaaatcttgtaatcag

SEQ ID NO: 6086729 - DNA, 25 bp, Homo sapien
gactgaaccacctaaaatcttgtaa

SEQ ID NO: 6086730 - DNA, 25 bp, Homo sapien
aacaccaggtgaaggactgaaccac

SEQ ID NO: 6086731 - DNA, 25 bp, Homo sapien
caacaccaggtgaaggactgaacca

SEQ ID NO: 6086732 - DNA, 25 bp, Homo sapien
cacctaaaatcttgtaatcagctgc

SEQ ID NO: 6086733 - DNA, 25 bp, Homo sapien
aaggactgaaccacctaaaatcttg

SEQ ID NO: 6086734 - DNA, 25 bp, Homo sapien
caggtgaaggactgaaccacctaaa

SEQ ID NO: 6086735 - DNA, 25 bp, Homo sapien
ggactgaaccacctaaaatcttgta

SEQ ID NO: 6086736 - DNA, 25 bp, Homo sapien
gtgaaggactgaaccacctaaaatc

SEQ ID NO: 6086737 - DNA, 25 bp, Homo sapien
caccaggtgaaggactgaaccacct

SEQ ID NO: 6086738 - DNA, 25 bp, Homo sapien
ccaggtgaaggactgaaccacctaa

SEQ ID NO: 6086739 - DNA, 25 bp, Homo sapien
tgaaggactgaaccacctaaaatct

SEQ ID NO: 6086740 - DNA, 25 bp, Homo sapien
tggctccagaaaattcacccacctt

SEQ ID NO: 6086741 - DNA, 25 bp, Homo sapien
gaaaagcagtcttgctctcgatctg

SEQ ID NO: 6086742 - DNA, 25 bp, Homo sapien
tcagagagggaatgaaagaaaggct

SEQ ID NO: 6086743 - DNA, 25 bp, Homo sapien
ggctgagaagtcaactactacaagt

SEQ ID NO: 6086744 - DNA, 25 bp, Homo sapien
cctgaaaagcagtcttgctctcgat

SEQ ID NO: 6086745 - DNA, 25 bp, Homo sapien
agtttatcacctgcagcgtccaagg

SEQ ID NO: 6086746 - DNA, 25 bp, Homo sapien
tacaagtttatcacctgcagcgtcc

SEQ ID NO: 6086747 - DNA, 25 bp, Homo sapien
tactacaagtttatcacctgcagcg

SEQ ID NO: 6086748 - DNA, 25 bp, Homo sapien
gcgtccaaggcttcctgaaaagcag

SEQ ID NO: 6086749 - DNA, 25 bp, Homo sapien
tctacttcaaggaatatcacgttgg

SEQ ID NO: 6086750 - DNA, 25 bp, Homo sapien
ggaatatcacgttggaatacttttc

SEQ ID NO: 6086751 - DNA, 25 bp, Homo sapien
tcttgctctcgatctgcttcaccat

SEQ ID NO: 6086752 - DNA, 25 bp, Homo sapien
ttgatcaaaccaccgtggacacctt

SEQ ID NO: 6086753 - DNA, 25 bp, Homo sapien
cagtgagtcccggatcaccgaacat

SEQ ID NO: 6086754 - DNA, 25 bp, Homo sapien
tcttgttgatcaaaccaccgtggac

SEQ ID NO: 6086755 - DNA, 25 bp, Homo sapien
agtcccggatcaccgaacatttctg

SEQ ID NO: 6086756 - DNA, 25 bp, Homo sapien
cttgttgatcaaaccaccgtggaca

SEQ ID NO: 6086757 - DNA, 25 bp, Homo sapien
gtgagtcccggatcaccgaacattt

SEQ ID NO: 6086758 - DNA, 25 bp, Homo sapien
tgttgatcaaaccaccgtggacacc

SEQ ID NO: 6086759 - DNA, 25 bp, Homo sapien
caaaccaccgtggacaccttctttg

SEQ ID NO: 6086760 - DNA, 25 bp, Homo sapien
tgcagcagtgagtcccggatcaccg

SEQ ID NO: 6086761 - DNA, 25 bp, Homo sapien
gatcaaaccaccgtggacaccttct

SEQ ID NO: 6086762 - DNA, 25 bp, Homo sapien
acatttcttgttgatcaaaccaccg

SEQ ID NO: 6086763 - DNA, 25 bp, Homo sapien
tttcttgttgatcaaaccaccgtgg

SEQ ID NO: 6086764 - DNA, 25 bp, Homo sapien
ccaggtagaagtagatgaagtgttt

SEQ ID NO: 6086765 - DNA, 25 bp, Homo sapien
caggtagaagtagatgaagtgtttg

SEQ ID NO: 6086766 - DNA, 25 bp, Homo sapien
agccgccgggccgagcctgtcaagc

SEQ ID NO: 6086767 - DNA, 25 bp, Homo sapien
tccggcggcaacgaatggatcttgg

SEQ ID NO: 6086768 - DNA, 25 bp, Homo sapien
cgaatggatcttggcgcgcggcact

SEQ ID NO: 6086769 - DNA, 25 bp, Homo sapien
cggcaacgaatggatcttggcgcgc

SEQ ID NO: 6086770 - DNA, 25 bp, Homo sapien
ttcccctccggcggcaacgaatgga

SEQ ID NO: 6086771 - DNA, 25 bp, Homo sapien
cctccggcggcaacgaatggatctt

SEQ ID NO: 6086772 - DNA, 25 bp, Homo sapien
aggaaggtcacgaagcaggaggtaa

SEQ ID NO: 6086773 - DNA, 25 bp, Homo sapien
gaaggtcacgaagcaggaggtaagc

SEQ ID NO: 6086774 - DNA, 25 bp, Homo sapien
ctccggcggcaacgaatggatcttg

SEQ ID NO: 6086775 - DNA, 25 bp, Homo sapien
ccctccggcggcaacgaatggatct

SEQ ID NO: 6086776 - DNA, 25 bp, Homo sapien
caacgaatggatcttggcgcgcggc

SEQ ID NO: 6086777 - DNA, 25 bp, Homo sapien
aacgaatggatcttggcgcgcggca

SEQ ID NO: 6086778 - DNA, 25 bp, Homo sapien
cagttcagagttgcaaggcacaagg

SEQ ID NO: 6086779 - DNA, 25 bp, Homo sapien
gcaggcttgcgaagagttctcagca

SEQ ID NO: 6086780 - DNA, 25 bp, Homo sapien
cacaaggtgattgggtacatgatct

SEQ ID NO: 6086781 - DNA, 25 bp, Homo sapien
tgggcattgatgtagaaggacttct

SEQ ID NO: 6086782 - DNA, 25 bp, Homo sapien
tagtaatagcttgggagcgcaccag

SEQ ID NO: 6086783 - DNA, 25 bp, Homo sapien
ttgagacagagtagcaggcttgcga

SEQ ID NO: 6086784 - DNA, 25 bp, Homo sapien
aagactgccatatgtactgtgatca

SEQ ID NO: 6086785 - DNA, 25 bp, Homo sapien
tacaaagcataccacaaagactgcc

SEQ ID NO: 6086786 - DNA, 25 bp, Homo sapien
caccagggcatacaagaagaggaca

SEQ ID NO: 6086787 - DNA, 25 bp, Homo sapien
gacttctgaaaggattcaagggtga

SEQ ID NO: 6086788 - DNA, 25 bp, Homo sapien
tcagtcttaaacagggactccattc

SEQ ID NO: 6086789 - DNA, 25 bp, Homo sapien
taagtcttccagacacgtttggaga

SEQ ID NO: 6086790 - DNA, 25 bp, Homo sapien
tttctgtagccaggtaactcttaga

SEQ ID NO: 6086791 - DNA, 25 bp, Homo sapien
tgtagccaggtaactcttagatctt

SEQ ID NO: 6086792 - DNA, 25 bp, Homo sapien
agtaggtcttaagtgtcatctggca

SEQ ID NO: 6086793 - DNA, 25 bp, Homo sapien
caagtaggtcttaagtgtcatctgg

SEQ ID NO: 6086794 - DNA, 25 bp, Homo sapien
tcacaagtaggtcttaagtgtcatc

SEQ ID NO: 6086795 - DNA, 25 bp, Homo sapien
tcttctttctgtagccaggtaactc

SEQ ID NO: 6086796 - DNA, 25 bp, Homo sapien
gtaggtcttaagtgtcatctggcat

SEQ ID NO: 6086797 - DNA, 25 bp, Homo sapien
taggtcttaagtgtcatctggcatc

SEQ ID NO: 6086798 - DNA, 25 bp, Homo sapien
ggtcttaagtgtcatctggcatctt

SEQ ID NO: 6086799 - DNA, 25 bp, Homo sapien
aatatcacaagtaggtcttaagtgt

SEQ ID NO: 6086800 - DNA, 25 bp, Homo sapien
ccgaaccctgcggatatatttttca

SEQ ID NO: 6086801 - DNA, 25 bp, Homo sapien
ctttctgtagccaggtaactcttag

SEQ ID NO: 6086802 - DNA, 25 bp, Homo sapien
gtaaagcaccggaaggctctgctca

SEQ ID NO: 6086803 - DNA, 25 bp, Homo sapien
tatttgtggcgtcgagtaaagcacc

SEQ ID NO: 6086804 - DNA, 25 bp, Homo sapien
ggaagagttctagctcgcgacagcc

SEQ ID NO: 6086805 - DNA, 25 bp, Homo sapien
gccacaacccaaatggaggccaaga

SEQ ID NO: 6086806 - DNA, 25 bp, Homo sapien
cagggctgtgatccttaagagaagg

SEQ ID NO: 6086807 - DNA, 25 bp, Homo sapien
tgtgagggaccagacttaagttctc

SEQ ID NO: 6086808 - DNA, 25 bp, Homo sapien
gggtggccttctcgagtcttcccga

SEQ ID NO: 6086809 - DNA, 25 bp, Homo sapien
tgctcaggagcgtgaacgacaccgc

SEQ ID NO: 6086810 - DNA, 25 bp, Homo sapien
atggtttccaggcaccggacgacag

SEQ ID NO: 6086811 - DNA, 25 bp, Homo sapien
gggaagcagcgagccagagtatcca

SEQ ID NO: 6086812 - DNA, 25 bp, Homo sapien
gcaggtctgtgcagcgaggaaacat

SEQ ID NO: 6086813 - DNA, 25 bp, Homo sapien
tcgagtcttcccgagcaggtctgtg

SEQ ID NO: 6086814 - DNA, 25 bp, Homo sapien
ctagacggtgacgccgtgcgcgcca

SEQ ID NO: 6086815 - DNA, 25 bp, Homo sapien
gaataagctgatgtgttagaataga

SEQ ID NO: 6086816 - DNA, 25 bp, Homo sapien
ggatgcagaaggatatatggtgtct

SEQ ID NO: 6086817 - DNA, 25 bp, Homo sapien
cagtgaggtctaagaagtagttcag

SEQ ID NO: 6086818 - DNA, 25 bp, Homo sapien
gctcctatcccatgcaaaaagctgt

SEQ ID NO: 6086819 - DNA, 25 bp, Homo sapien
tactagtcttcaactaaaaagtcac

SEQ ID NO: 6086820 - DNA, 25 bp, Homo sapien
cttttattggccaaaggatgcagaa

SEQ ID NO: 6086821 - DNA, 25 bp, Homo sapien
tgatgtgttagaatagacatgctcc

SEQ ID NO: 6086822 - DNA, 25 bp, Homo sapien
tcaaaaatgagcagcttgcaaatct

SEQ ID NO: 6086823 - DNA, 25 bp, Homo sapien
gaatagacatgctcctatcccatgc

SEQ ID NO: 6086824 - DNA, 25 bp, Homo sapien
caaaggatgcagaaggatatatggt

SEQ ID NO: 6086825 - DNA, 25 bp, Homo sapien
cacagtggaagaacatatataaggt

SEQ ID NO: 6086826 - DNA, 25 bp, Homo sapien
gcaacttttattggccaaaggatgc

SEQ ID NO: 6086827 - DNA, 25 bp, Homo sapien
tctaattgacgtagaaaaagctgta

SEQ ID NO: 6086828 - DNA, 25 bp, Homo sapien
ggagataagtactcacctgtgaaac

SEQ ID NO: 6086829 - DNA, 25 bp, Homo sapien
cagctgtggagcgaggatctaatca

SEQ ID NO: 6086830 - DNA, 25 bp, Homo sapien
tgaaacctcaccataatttatgccg

SEQ ID NO: 6086831 - DNA, 25 bp, Homo sapien
cacaatagattgctaggacttactc

SEQ ID NO: 6086832 - DNA, 25 bp, Homo sapien
gacaatcactgttccactctctgct

SEQ ID NO: 6086833 - DNA, 25 bp, Homo sapien
tgttctccaagatcactggatgacg

SEQ ID NO: 6086834 - DNA, 25 bp, Homo sapien
ttaatgaggcctctaaaaccaagcc

SEQ ID NO: 6086835 - DNA, 25 bp, Homo sapien
ttcatcatgcaagcagcaccaggca

SEQ ID NO: 6086836 - DNA, 25 bp, Homo sapien
ctggatgacgtgtgttaatgaggcc

SEQ ID NO: 6086837 - DNA, 25 bp, Homo sapien
gctaatgatatgtccacgctacaca

SEQ ID NO: 6086838 - DNA, 25 bp, Homo sapien
ttgtataattgaaactttgcacccc

SEQ ID NO: 6086839 - DNA, 25 bp, Homo sapien
aagacttgaatttaatttgtcacgt

SEQ ID NO: 6086840 - DNA, 25 bp, Homo sapien
tactctgtagcaacagcattcatta

SEQ ID NO: 6086841 - DNA, 25 bp, Homo sapien
ctgtttagtttgtggtcttgtggac

SEQ ID NO: 6086842 - DNA, 25 bp, Homo sapien
ggaaacagtgtctcatccgttgggt

SEQ ID NO: 6086843 - DNA, 25 bp, Homo sapien
gcagcatactctgtagcaacagcat

SEQ ID NO: 6086844 - DNA, 25 bp, Homo sapien
ggtcttgtggacatgttctaagtaa

SEQ ID NO: 6086845 - DNA, 25 bp, Homo sapien
atatatttgttagcatggtagtttc

SEQ ID NO: 6086846 - DNA, 25 bp, Homo sapien
aatttgtcacgtatttccaatggca

SEQ ID NO: 6086847 - DNA, 25 bp, Homo sapien
tatccactcccaagtttgcagttct

SEQ ID NO: 6086848 - DNA, 25 bp, Homo sapien
catccgttgggtttattaggtgaat

SEQ ID NO: 6086849 - DNA, 25 bp, Homo sapien
tttccaatggcaaccaatgatcagg

SEQ ID NO: 6086850 - DNA, 25 bp, Homo sapien
actgtattaagacatttacttggaa

SEQ ID NO: 6086851 - DNA, 25 bp, Homo sapien
gctgaggaactcctcgtacatcttg

SEQ ID NO: 6086852 - DNA, 25 bp, Homo sapien
ggagaccttgctgaggaactcctcg

SEQ ID NO: 6086853 - DNA, 25 bp, Homo sapien
tgatgtaaaagtcgtccccaggctc

SEQ ID NO: 6086854 - DNA, 25 bp, Homo sapien
gatgatgtaaaagtcgtccccaggc

SEQ ID NO: 6086855 - DNA, 25 bp, Homo sapien
ggaactcctcgtacatcttgcgttt

SEQ ID NO: 6086856 - DNA, 25 bp, Homo sapien
gccacggtcagacgctcccacttct

SEQ ID NO: 6086857 - DNA, 25 bp, Homo sapien
tcttcaaactggacgggctccagcg

SEQ ID NO: 6086858 - DNA, 25 bp, Homo sapien
atgtaaaagtcgtccccaggctctc

SEQ ID NO: 6086859 - DNA, 25 bp, Homo sapien
gaccttgctgaggaactcctcgtac

SEQ ID NO: 6086860 - DNA, 25 bp, Homo sapien
ctccgtgatgatgtaaaagtcgtcc

SEQ ID NO: 6086861 - DNA, 25 bp, Homo sapien
gaggaactcctcgtacatcttgcgt

SEQ ID NO: 6086862 - DNA, 25 bp, Homo sapien
cgtgatgatgtaaaagtcgtcccca

SEQ ID NO: 6086863 - DNA, 25 bp, Homo sapien
ccagattccttactgagcatccttt

SEQ ID NO: 6086864 - DNA, 25 bp, Homo sapien
agattccttactgagcatcctttga

SEQ ID NO: 6086865 - DNA, 25 bp, Homo sapien
gggctacccaacatgccactttttc

SEQ ID NO: 6086866 - DNA, 25 bp, Homo sapien
cagattccttactgagcatcctttg

SEQ ID NO: 6086867 - DNA, 25 bp, Homo sapien
cgggctacccaacatgccacttttt

SEQ ID NO: 6086868 - DNA, 25 bp, Homo sapien
ccggcaaatttttctccgtgatgat

SEQ ID NO: 6086869 - DNA, 25 bp, Homo sapien
gctacccaacatgccactttttcat

SEQ ID NO: 6086870 - DNA, 25 bp, Homo sapien
tccagattccttactgagcatcctt

SEQ ID NO: 6086871 - DNA, 25 bp, Homo sapien
cgtacacccgggctacccaacatgc

SEQ ID NO: 6086872 - DNA, 25 bp, Homo sapien
ggctacccaacatgccactttttca

SEQ ID NO: 6086873 - DNA, 25 bp, Homo sapien
ggcaaatttttctccgtgatgatgt

SEQ ID NO: 6086874 - DNA, 25 bp, Homo sapien
cggcaaatttttctccgtgatgatg

SEQ ID NO: 6086875 - DNA, 25 bp, Homo sapien
ttgatgattagctgtgacccttttg

SEQ ID NO: 6086876 - DNA, 25 bp, Homo sapien
aatactcatcacactagcatgcgcg

SEQ ID NO: 6086877 - DNA, 25 bp, Homo sapien
tgaatatatgtttttttccgttgtg

SEQ ID NO: 6086878 - DNA, 25 bp, Homo sapien
ttgtggtaactgtgcgttcacgact

SEQ ID NO: 6086879 - DNA, 25 bp, Homo sapien
ccattttggctttcccttatctttg

SEQ ID NO: 6086880 - DNA, 25 bp, Homo sapien
cctgtacggccagcgcgatgaatat

SEQ ID NO: 6086881 - DNA, 25 bp, Homo sapien
gcttcgcatcggcaaacgtattagc

SEQ ID NO: 6086882 - DNA, 25 bp, Homo sapien
tttgaataaacgtaacgcatctgca

SEQ ID NO: 6086883 - DNA, 25 bp, Homo sapien
cggctttcaccaaaacaaaatcatc

SEQ ID NO: 6086884 - DNA, 25 bp, Homo sapien
ttacccattcgtcctgtacggccag

SEQ ID NO: 6086885 - DNA, 25 bp, Homo sapien
aaatcacgaatatcatggtcattac

SEQ ID NO: 6086886 - DNA, 25 bp, Homo sapien
gatatgtggcttactcggccgactt

SEQ ID NO: 6086887 - DNA, 25 bp, Homo sapien
gttgcgcgtgcagccttgaccgcag

SEQ ID NO: 6086888 - DNA, 25 bp, Homo sapien
cttggcccgacgcttggtgtcctgc

SEQ ID NO: 6086889 - DNA, 25 bp, Homo sapien
aaccggtactgtcttcgcctgagtt

SEQ ID NO: 6086890 - DNA, 25 bp, Homo sapien
aaacaaaatcatcccctaattcgcg

SEQ ID NO: 6086891 - DNA, 25 bp, Homo sapien
cggccagcgcgatgaatatatgttt

SEQ ID NO: 6086892 - DNA, 25 bp, Homo sapien
taaacgtaacgcatctgcacgctgc

SEQ ID NO: 6086893 - DNA, 25 bp, Homo sapien
tattagcggctttcaccaaaacaaa

SEQ ID NO: 6086894 - DNA, 25 bp, Homo sapien
cgaatatcatggtcattacccaagt

SEQ ID NO: 6086895 - DNA, 25 bp, Homo sapien
gcttggtgtcctgcctgatcagttg

SEQ ID NO: 6086896 - DNA, 25 bp, Homo sapien
cccgacgcttggtgtcctgcctgat

SEQ ID NO: 6086897 - DNA, 25 bp, Homo sapien
tcgcttgtcattgctgccaatactc

SEQ ID NO: 6086898 - DNA, 25 bp, Homo sapien
ttcaacaaccggtactgtcttcgcc

SEQ ID NO: 6086899 - DNA, 25 bp, Homo sapien
cgtcactggtttggccgcttggccc

SEQ ID NO: 6086900 - DNA, 25 bp, Homo sapien
tggtttggccgcttggcccgacgct

SEQ ID NO: 6086901 - DNA, 25 bp, Homo sapien
tcaccaaaagcagcgatacttcgcc

SEQ ID NO: 6086902 - DNA, 25 bp, Homo sapien
gcgatacttcgccttttttgaataa

SEQ ID NO: 6086903 - DNA, 25 bp, Homo sapien
tgtcctgcctgatcagttggcgcag

SEQ ID NO: 6086904 - DNA, 25 bp, Homo sapien
gcaaacgtattagcggctttcacca

SEQ ID NO: 6086905 - DNA, 25 bp, Homo sapien
tttccgttgtggtaactgtgcgttc

SEQ ID NO: 6086906 - DNA, 25 bp, Homo sapien
cacgactaatggtagatcttcaata

SEQ ID NO: 6086907 - DNA, 25 bp, Homo sapien
gcatcggcaaacgtattagcggctt

SEQ ID NO: 6086908 - DNA, 25 bp, Homo sapien
ttgtcggacgttgcgtcactggttt

SEQ ID NO: 6086909 - DNA, 25 bp, Homo sapien
tggcttactcggccgactttttagc

SEQ ID NO: 6086910 - DNA, 25 bp, Homo sapien
atctgcacgctgcacttgtcgcttg

SEQ ID NO: 6086911 - DNA, 25 bp, Homo sapien
taatggtagatcttcaatatccaag

SEQ ID NO: 6086912 - DNA, 25 bp, Homo sapien
ccttttgatatgtggcttactcggc

SEQ ID NO: 6086913 - DNA, 25 bp, Homo sapien
cacgtgcggcgacatctgtcaccaa

SEQ ID NO: 6086914 - DNA, 25 bp, Homo sapien
gtcattgctgccaatactcatcaca

SEQ ID NO: 6086915 - DNA, 25 bp, Homo sapien
gcctgatcagttggcgcagttgcgc

SEQ ID NO: 6086916 - DNA, 25 bp, Homo sapien
tggctttcccttatctttggatgcc

SEQ ID NO: 6086917 - DNA, 25 bp, Homo sapien
aaagcagcgatacttcgcctttttt

SEQ ID NO: 6086918 - DNA, 25 bp, Homo sapien
cggtacttttttgcggtgtcgcctg

SEQ ID NO: 6086919 - DNA, 25 bp, Homo sapien
tgcgttcacgactaatggtagatct

SEQ ID NO: 6086920 - DNA, 25 bp, Homo sapien
attcgtcctgtacggccagcgcgat

SEQ ID NO: 6086921 - DNA, 25 bp, Homo sapien
acgttgcgtcactggtttggccgct

SEQ ID NO: 6086922 - DNA, 25 bp, Homo sapien
ttttttgcggtgtcgcctgcttcgc

SEQ ID NO: 6086923 - DNA, 25 bp, Homo sapien
gcgcgatgaatatatgtttttttcc

SEQ ID NO: 6086924 - DNA, 25 bp, Homo sapien
tccaagccacgtgcggcgacatctg

SEQ ID NO: 6086925 - DNA, 25 bp, Homo sapien
taactgtgcgttcacgactaatggt

SEQ ID NO: 6086926 - DNA, 25 bp, Homo sapien
tcgcctgcttcgcatcggcaaacgt

SEQ ID NO: 6086927 - DNA, 25 bp, Homo sapien
tgtgacccttttgatatgtggctta

SEQ ID NO: 6086928 - DNA, 25 bp, Homo sapien
aatcatcccctaattcgcgtttcaa

SEQ ID NO: 6086929 - DNA, 25 bp, Homo sapien
gattagctgtgacccttttgatatg

SEQ ID NO: 6086930 - DNA, 25 bp, Homo sapien
gtgcagccttgaccgcagcggtact

SEQ ID NO: 6086931 - DNA, 25 bp, Homo sapien
tcaccaaaacaaaatcatcccctaa

SEQ ID NO: 6086932 - DNA, 25 bp, Homo sapien
tcattacccaagtttaacacgcggc

SEQ ID NO: 6086933 - DNA, 25 bp, Homo sapien
gcggtgtcgcctgcttcgcatcggc

SEQ ID NO: 6086934 - DNA, 25 bp, Homo sapien
acgctgcacttgtcgcttgtcattg

SEQ ID NO: 6086935 - DNA, 25 bp, Homo sapien
cacgcggcctggtttacccattcgt

SEQ ID NO: 6086936 - DNA, 25 bp, Homo sapien
taacgcatctgcacgctgcacttgt

SEQ ID NO: 6086937 - DNA, 25 bp, Homo sapien
cacttgtcgcttgtcattgctgcca

SEQ ID NO: 6086938 - DNA, 25 bp, Homo sapien
ttcaatatccaagccacgtgcggcg

SEQ ID NO: 6086939 - DNA, 25 bp, Homo sapien
ccgcagcggtacttttttgcggtgt

SEQ ID NO: 6086940 - DNA, 25 bp, Homo sapien
cccctaattcgcgtttcaaatcacg

SEQ ID NO: 6086941 - DNA, 25 bp, Homo sapien
cagttggcgcagttgcgcgtgcagc

SEQ ID NO: 6086942 - DNA, 25 bp, Homo sapien
aattcgcgtttcaaatcacgaatat

SEQ ID NO: 6086943 - DNA, 25 bp, Homo sapien
cgtttcaaatcacgaatatcatggt

SEQ ID NO: 6086944 - DNA, 25 bp, Homo sapien
gcctggtttacccattcgtcctgta

SEQ ID NO: 6086945 - DNA, 25 bp, Homo sapien
tagatcttcaatatccaagccacgt

SEQ ID NO: 6086946 - DNA, 25 bp, Homo sapien
tcccttatctttggatgcctttaag

SEQ ID NO: 6086947 - DNA, 25 bp, Homo sapien
atctttggatgcctttaagcgtttt

SEQ ID NO: 6086948 - DNA, 25 bp, Homo sapien
gcgcagttgcgcgtgcagccttgac

SEQ ID NO: 6086949 - DNA, 25 bp, Homo sapien
tagcccattttggctttcccttatc

SEQ ID NO: 6086950 - DNA, 25 bp, Homo sapien
catctgtcaccaaaagcagcgatac

SEQ ID NO: 6086951 - DNA, 25 bp, Homo sapien
tcatggtcattacccaagtttaaca

SEQ ID NO: 6086952 - DNA, 25 bp, Homo sapien
gccgcttggcccgacgcttggtgtc

SEQ ID NO: 6086953 - DNA, 25 bp, Homo sapien
cggcgacatctgtcaccaaaagcag

SEQ ID NO: 6086954 - DNA, 25 bp, Homo sapien
gctgccaatactcatcacactagca

SEQ ID NO: 6086955 - DNA, 25 bp, Homo sapien
ccttgaccgcagcggtacttttttg

SEQ ID NO: 6086956 - DNA, 25 bp, Homo sapien
tcttcgcctgagttgtcggacgttg

SEQ ID NO: 6086957 - DNA, 25 bp, Homo sapien
tactgtcttcgcctgagttgtcgga

SEQ ID NO: 6086958 - DNA, 25 bp, Homo sapien
cctgagttgtcggacgttgcgtcac

SEQ ID NO: 6086959 - DNA, 25 bp, Homo sapien
tctctgtgatgaggttgtgccgctc

SEQ ID NO: 6086960 - DNA, 25 bp, Homo sapien
gagatggaagctggcttaacgttag

SEQ ID NO: 6086961 - DNA, 25 bp, Homo sapien
tactattctgcaccgacttctctca

SEQ ID NO: 6086962 - DNA, 25 bp, Homo sapien
gaggaaccgaccataacgtgtgcta

SEQ ID NO: 6086963 - DNA, 25 bp, Homo sapien
ctcgctattgtagatgggctcaggg

SEQ ID NO: 6086964 - DNA, 25 bp, Homo sapien
cgtgtgctactcaagatcgtgtgga

SEQ ID NO: 6086965 - DNA, 25 bp, Homo sapien
gaactctcgggtgttaagccgcttc

SEQ ID NO: 6086966 - DNA, 25 bp, Homo sapien
gcaggtggcttgaaatccggattga

SEQ ID NO: 6086967 - DNA, 25 bp, Homo sapien
gaaatccggattgagtgcaaccatc

SEQ ID NO: 6086968 - DNA, 25 bp, Homo sapien
gttaagccgcttcccctcgctattg

SEQ ID NO: 6086969 - DNA, 25 bp, Homo sapien
aatacaacactcttcggaggaaccg

SEQ ID NO: 6086970 - DNA, 25 bp, Homo sapien
ctttttgcgggtgcggaactctcgg

SEQ ID NO: 6086971 - DNA, 25 bp, Homo sapien
tctgaggcagatggataaagggcat

SEQ ID NO: 6086972 - DNA, 25 bp, Homo sapien
gataggctctaccacagaaacggtc

SEQ ID NO: 6086973 - DNA, 25 bp, Homo sapien
gataaagggcattgagacgtcagag

SEQ ID NO: 6086974 - DNA, 25 bp, Homo sapien
tgaaatttcaaacgtgtagcatctg

SEQ ID NO: 6086975 - DNA, 25 bp, Homo sapien
cacagcaggcgcagaatgaggaaca

SEQ ID NO: 6086976 - DNA, 25 bp, Homo sapien
tgccgatttcggtaaacacgctgag

SEQ ID NO: 6086977 - DNA, 25 bp, Homo sapien
tattggccagttctgtccgataggc

SEQ ID NO: 6086978 - DNA, 25 bp, Homo sapien
tgtaatccaactgattgaggaggca

SEQ ID NO: 6086979 - DNA, 25 bp, Homo sapien
cagtcacaggctgcaagtagccatg

SEQ ID NO: 6086980 - DNA, 25 bp, Homo sapien
gacgtcagagccaaaaggtgcagct

SEQ ID NO: 6086981 - DNA, 25 bp, Homo sapien
taaacacgctgaggtaaaattccac

SEQ ID NO: 6086982 - DNA, 25 bp, Homo sapien
gaggcagttaagacctgctgagatg

SEQ ID NO: 6086983 - DNA, 25 bp, Homo sapien
atgtccaaaaagttgtccagggtca

SEQ ID NO: 6086984 - DNA, 25 bp, Homo sapien
agcatagtaagccttgaggtcgcgg

SEQ ID NO: 6086985 - DNA, 25 bp, Homo sapien
aggtcgcggggagccatttcactca

SEQ ID NO: 6086986 - DNA, 25 bp, Homo sapien
acctgggcaatcctctggcggaagg

SEQ ID NO: 6086987 - DNA, 25 bp, Homo sapien
atttcactcatcacggaaaacatgt

SEQ ID NO: 6086988 - DNA, 25 bp, Homo sapien
tacctgggcaatcctctggcggaag

SEQ ID NO: 6086989 - DNA, 25 bp, Homo sapien
gagccatttcactcatcacggaaaa

SEQ ID NO: 6086990 - DNA, 25 bp, Homo sapien
gggagccatttcactcatcacggaa

SEQ ID NO: 6086991 - DNA, 25 bp, Homo sapien
taaaagcatagtaagccttgaggtc

SEQ ID NO: 6086992 - DNA, 25 bp, Homo sapien
aaagcatagtaagccttgaggtcgc

SEQ ID NO: 6086993 - DNA, 25 bp, Homo sapien
tgtccaaaaagttgtccagggtcat

SEQ ID NO: 6086994 - DNA, 25 bp, Homo sapien
ttaaaagcatagtaagccttgaggt

SEQ ID NO: 6086995 - DNA, 25 bp, Homo sapien
tgactggatcacagagttgcccaag

SEQ ID NO: 6086996 - DNA, 25 bp, Homo sapien
tgggagaggcacgtattgaacgcct

SEQ ID NO: 6086997 - DNA, 25 bp, Homo sapien
tggctgagccatagaagaggaacac

SEQ ID NO: 6086998 - DNA, 25 bp, Homo sapien
tgaggcagtaggagatcacgatgat

SEQ ID NO: 6086999 - DNA, 25 bp, Homo sapien
gtgtgaccaacgagtagaacaggga

SEQ ID NO: 6087000 - DNA, 25 bp, Homo sapien
cacgatgatgcttagtgggactgca

SEQ ID NO: 6087001 - DNA, 25 bp, Homo sapien
gttcttggccggaagcagataccca

SEQ ID NO: 6087002 - DNA, 25 bp, Homo sapien
tcacttccatgttccgcagcgtgta

SEQ ID NO: 6087003 - DNA, 25 bp, Homo sapien
gattcaccatgggtgtgaccaacga

SEQ ID NO: 6087004 - DNA, 25 bp, Homo sapien
cagtttgatcatggcaggcacctcg

SEQ ID NO: 6087005 - DNA, 25 bp, Homo sapien
gaaggtgcagacaccattgagcaca

SEQ ID NO: 6087006 - DNA, 25 bp, Homo sapien
cagatacccatagctggctgagcca

SEQ ID NO: 6087007 - DNA, 25 bp, Homo sapien
gatctggtccttgcggctcttctgg

SEQ ID NO: 6087008 - DNA, 25 bp, Homo sapien
taggcgttgaaaacgcccttggcga

SEQ ID NO: 6087009 - DNA, 25 bp, Homo sapien
gagcaccagccgctggatctggtcc

SEQ ID NO: 6087010 - DNA, 25 bp, Homo sapien
aggatgccctggtaggacgccagca

SEQ ID NO: 6087011 - DNA, 25 bp, Homo sapien
caccaggaagcggtagtagttgatg

SEQ ID NO: 6087012 - DNA, 25 bp, Homo sapien
aggaagcccaccaggaagcggtagt

SEQ ID NO: 6087013 - DNA, 25 bp, Homo sapien
gaaaacgcccttggcgaagtcgcag

SEQ ID NO: 6087014 - DNA, 25 bp, Homo sapien
gcagcaacacgtggtagggcaggaa

SEQ ID NO: 6087015 - DNA, 25 bp, Homo sapien
tctcgctgacgaagcagtagagcac

SEQ ID NO: 6087016 - DNA, 25 bp, Homo sapien
tagtgctcaaagcacacgcggtgct

SEQ ID NO: 6087017 - DNA, 25 bp, Homo sapien
gcggtgctggttctcgtcctcgatg

SEQ ID NO: 6087018 - DNA, 25 bp, Homo sapien
gaagtcgcagctggcctcccagacg

SEQ ID NO: 6087019 - DNA, 25 bp, Homo sapien
tttgcgccatcatcgctgtcagggc

SEQ ID NO: 6087020 - DNA, 25 bp, Homo sapien
tgtagcagctcggacaaggcgttga

SEQ ID NO: 6087021 - DNA, 25 bp, Homo sapien
gaaggagacaaattcttttgcgcca

SEQ ID NO: 6087022 - DNA, 25 bp, Homo sapien
ttcttgtcgttgttgaacgacggga

SEQ ID NO: 6087023 - DNA, 25 bp, Homo sapien
tcgaaagtcgagaagtgcagagcgt

SEQ ID NO: 6087024 - DNA, 25 bp, Homo sapien
caaggcgttgatgtagatttgggcc

SEQ ID NO: 6087025 - DNA, 25 bp, Homo sapien
tggtcgaaggcgtggttcagcccat

SEQ ID NO: 6087026 - DNA, 25 bp, Homo sapien
ggctgagaagcgagtccggcaactc

SEQ ID NO: 6087027 - DNA, 25 bp, Homo sapien
tcagggcgctgtcctcgaaagtcga

SEQ ID NO: 6087028 - DNA, 25 bp, Homo sapien
taacattgcgcagctggtcgaaggc

SEQ ID NO: 6087029 - DNA, 25 bp, Homo sapien
tggcgttggctgctagccgtctctg

SEQ ID NO: 6087030 - DNA, 25 bp, Homo sapien
gaacgacgggataacattgcgcagc

SEQ ID NO: 6087031 - DNA, 25 bp, Homo sapien
ttgccctcctccgaccgaagcggcc

SEQ ID NO: 6087032 - DNA, 25 bp, Homo sapien
tgccgatgggtacgacttgcagctc

SEQ ID NO: 6087033 - DNA, 25 bp, Homo sapien
ctgatcccgcgactggcgtaccagg

SEQ ID NO: 6087034 - DNA, 25 bp, Homo sapien
agtgccgatgggtacgacttgcagc

SEQ ID NO: 6087035 - DNA, 25 bp, Homo sapien
atctccatggagtgccgatgggtac

SEQ ID NO: 6087036 - DNA, 25 bp, Homo sapien
cgatgggtacgacttgcagctcccc

SEQ ID NO: 6087037 - DNA, 25 bp, Homo sapien
actggcgtaccaggcaggattgatg

SEQ ID NO: 6087038 - DNA, 25 bp, Homo sapien
gggtacgacttgcagctccccgcag

SEQ ID NO: 6087039 - DNA, 25 bp, Homo sapien
ccatggagtgccgatgggtacgact

SEQ ID NO: 6087040 - DNA, 25 bp, Homo sapien
acaggcctgatcccgcgactggcgt

SEQ ID NO: 6087041 - DNA, 25 bp, Homo sapien
cgcgactggcgtaccaggcaggatt

SEQ ID NO: 6087042 - DNA, 25 bp, Homo sapien
catggagtgccgatgggtacgactt

SEQ ID NO: 6087043 - DNA, 25 bp, Homo sapien
cttggcatcttcgttgacattgtac

SEQ ID NO: 6087044 - DNA, 25 bp, Homo sapien
gctgccttggcatcttcgttgacat

SEQ ID NO: 6087045 - DNA, 25 bp, Homo sapien
gggtccccaccagtagtgtttgcag

SEQ ID NO: 6087046 - DNA, 25 bp, Homo sapien
tcttcgttgacattgtacttgccca

SEQ ID NO: 6087047 - DNA, 25 bp, Homo sapien
tcgttgacattgtacttgcccaagg

SEQ ID NO: 6087048 - DNA, 25 bp, Homo sapien
cgttgacattgtacttgcccaaggt

SEQ ID NO: 6087049 - DNA, 25 bp, Homo sapien
ttgctgccttggcatcttcgttgac

SEQ ID NO: 6087050 - DNA, 25 bp, Homo sapien
agatgcagaacagggtgagggccac

SEQ ID NO: 6087051 - DNA, 25 bp, Homo sapien
ggcatcttcgttgacattgtacttg

SEQ ID NO: 6087052 - DNA, 25 bp, Homo sapien
tgccttggcatcttcgttgacattg

SEQ ID NO: 6087053 - DNA, 25 bp, Homo sapien
ttaggcaccgtcctgactgcccagc

SEQ ID NO: 6087054 - DNA, 25 bp, Homo sapien
gaccagctccgccttgtgcattggc

SEQ ID NO: 6087055 - DNA, 25 bp, Homo sapien
gatcagaccagagatccgcttcaca

SEQ ID NO: 6087056 - DNA, 25 bp, Homo sapien
ataggtgacagcgtcacggatcacg

SEQ ID NO: 6087057 - DNA, 25 bp, Homo sapien
ccaaaaacaccttgagcaccccgcg

SEQ ID NO: 6087058 - DNA, 25 bp, Homo sapien
ctccgtataggtgacagcgtcacgg

SEQ ID NO: 6087059 - DNA, 25 bp, Homo sapien
cgtataggtgacagcgtcacggatc

SEQ ID NO: 6087060 - DNA, 25 bp, Homo sapien
gtataggtgacagcgtcacggatca

SEQ ID NO: 6087061 - DNA, 25 bp, Homo sapien
tcctcgtagatcagaccagagatcc

SEQ ID NO: 6087062 - DNA, 25 bp, Homo sapien
atcagaccagagatccgcttcacac

SEQ ID NO: 6087063 - DNA, 25 bp, Homo sapien
taaccgccaaagccataaagggtgc

SEQ ID NO: 6087064 - DNA, 25 bp, Homo sapien
gccctggatgttgtcacgcaacacc

SEQ ID NO: 6087065 - DNA, 25 bp, Homo sapien
ctcgtagatcagaccagagatccgc

SEQ ID NO: 6087066 - DNA, 25 bp, Homo sapien
tccgtataggtgacagcgtcacgga

SEQ ID NO: 6087067 - DNA, 25 bp, Homo sapien
gtcccgacatgacgaagaaacgata

SEQ ID NO: 6087068 - DNA, 25 bp, Homo sapien
cgtcccgacatgacgaagaaacgat

SEQ ID NO: 6087069 - DNA, 25 bp, Homo sapien
ccgacatgacgaagaaacgataaat

SEQ ID NO: 6087070 - DNA, 25 bp, Homo sapien
ttgccgcgtcccgacatgacgaaga

SEQ ID NO: 6087071 - DNA, 25 bp, Homo sapien
cccgacatgacgaagaaacgataaa

SEQ ID NO: 6087072 - DNA, 25 bp, Homo sapien
tcccgacatgacgaagaaacgataa

SEQ ID NO: 6087073 - DNA, 25 bp, Homo sapien
gcgtcccgacatgacgaagaaacga

SEQ ID NO: 6087074 - DNA, 25 bp, Homo sapien
cgcgtcccgacatgacgaagaaacg

SEQ ID NO: 6087075 - DNA, 25 bp, Homo sapien
ccgcgtcccgacatgacgaagaaac

SEQ ID NO: 6087076 - DNA, 25 bp, Homo sapien
tgccgcgtcccgacatgacgaagaa

SEQ ID NO: 6087077 - DNA, 25 bp, Homo sapien
gccgcgtcccgacatgacgaagaaa

SEQ ID NO: 6087078 - DNA, 25 bp, Homo sapien
gagaccggcacgagaagagcgggtc

SEQ ID NO: 6087079 - DNA, 25 bp, Homo sapien
tcttggccactttcataacgtagtt

SEQ ID NO: 6087080 - DNA, 25 bp, Homo sapien
acgactgtgagcagaacttttaggg

SEQ ID NO: 6087081 - DNA, 25 bp, Homo sapien
tcatgttgcagctggtgatcaggga

SEQ ID NO: 6087082 - DNA, 25 bp, Homo sapien
gatgatgtctatggctcggcagaac

SEQ ID NO: 6087083 - DNA, 25 bp, Homo sapien
cttgacaatgttataaggcagttga

SEQ ID NO: 6087084 - DNA, 25 bp, Homo sapien
ttcattgatgttcctaggtagcggg

SEQ ID NO: 6087085 - DNA, 25 bp, Homo sapien
tggcgatgtccatgcgtttgctcat

SEQ ID NO: 6087086 - DNA, 25 bp, Homo sapien
gggaaaatgggaatgcacctagcat

SEQ ID NO: 6087087 - DNA, 25 bp, Homo sapien
tactggttggctctgtaggaccctc

SEQ ID NO: 6087088 - DNA, 25 bp, Homo sapien
aatgaaaactataacgactgtgagc

SEQ ID NO: 6087089 - DNA, 25 bp, Homo sapien
aaagggtactacaaatccaatgcag

SEQ ID NO: 6087090 - DNA, 25 bp, Homo sapien
cataacgtagtttttgaaagatgct

SEQ ID NO: 6087091 - DNA, 25 bp, Homo sapien
tcttaaggcaggtaacaggatcgcc

SEQ ID NO: 6087092 - DNA, 25 bp, Homo sapien
ggatcgcctataccaccaaaaacac

SEQ ID NO: 6087093 - DNA, 25 bp, Homo sapien
ccacaggtgccaatttgtttatacc

SEQ ID NO: 6087094 - DNA, 25 bp, Homo sapien
gggcaaaagactggatgacatatgg

SEQ ID NO: 6087095 - DNA, 25 bp, Homo sapien
catatggctccactcttaaggcagg

SEQ ID NO: 6087096 - DNA, 25 bp, Homo sapien
ttataccttctagggcaaaagactg

SEQ ID NO: 6087097 - DNA, 25 bp, Homo sapien
gggagaccacaggtgccaatttgtt

SEQ ID NO: 6087098 - DNA, 25 bp, Homo sapien
ccttctagggcaaaagactggatga

SEQ ID NO: 6087099 - DNA, 25 bp, Homo sapien
gatgacatatggctccactcttaag

SEQ ID NO: 6087100 - DNA, 25 bp, Homo sapien
gcaggtaacaggatcgcctatacca

SEQ ID NO: 6087101 - DNA, 25 bp, Homo sapien
gctccactcttaaggcaggtaacag

SEQ ID NO: 6087102 - DNA, 25 bp, Homo sapien
aatatgaagaggaacgagaagagga

SEQ ID NO: 6087103 - DNA, 25 bp, Homo sapien
ggacccacagcaactggatccacag

SEQ ID NO: 6087104 - DNA, 25 bp, Homo sapien
cgcatataggtgtgggctggcagca

SEQ ID NO: 6087105 - DNA, 25 bp, Homo sapien
ggcccgtcagctcgcaggtcggtaa

SEQ ID NO: 6087106 - DNA, 25 bp, Homo sapien
tcacagcagttttgctcctgggtgc

SEQ ID NO: 6087107 - DNA, 25 bp, Homo sapien
gtcagctcgcaggtcggtaacgcag

SEQ ID NO: 6087108 - DNA, 25 bp, Homo sapien
ggtccgggcccgtcagctcgcaggt

SEQ ID NO: 6087109 - DNA, 25 bp, Homo sapien
tttgtgtcgcatataggtgtgggct

SEQ ID NO: 6087110 - DNA, 25 bp, Homo sapien
ctcgcaggtcggtaacgcagccgga

SEQ ID NO: 6087111 - DNA, 25 bp, Homo sapien
acagcaagacgatccgcagcagctg

SEQ ID NO: 6087112 - DNA, 25 bp, Homo sapien
cattttgtgtcgcatataggtgtgg

SEQ ID NO: 6087113 - DNA, 25 bp, Homo sapien
ccgtcagctcgcaggtcggtaacgc

SEQ ID NO: 6087114 - DNA, 25 bp, Homo sapien
gatccacagcaagacgatccgcagc

SEQ ID NO: 6087115 - DNA, 25 bp, Homo sapien
tgcggtactaccacaggataagagc

SEQ ID NO: 6087116 - DNA, 25 bp, Homo sapien
gaacatggatcagataatactcact

SEQ ID NO: 6087117 - DNA, 25 bp, Homo sapien
caggtaccacagagtcccaagaaca

SEQ ID NO: 6087118 - DNA, 25 bp, Homo sapien
tagagcttaaactcattgatcagag

SEQ ID NO: 6087119 - DNA, 25 bp, Homo sapien
atctgccgtgtgtgcctccccaggg

SEQ ID NO: 6087120 - DNA, 25 bp, Homo sapien
ggataagagcagtgcacccaacagc

SEQ ID NO: 6087121 - DNA, 25 bp, Homo sapien
tgttcagtcacattcctggtggcct

SEQ ID NO: 6087122 - DNA, 25 bp, Homo sapien
gatgaccagactcacaccggagcat

SEQ ID NO: 6087123 - DNA, 25 bp, Homo sapien
caccggagcatcactacaaatgtct

SEQ ID NO: 6087124 - DNA, 25 bp, Homo sapien
cattgatcagagatgcggtactacc

SEQ ID NO: 6087125 - DNA, 25 bp, Homo sapien
ccagggacacaattaagggaggcag

SEQ ID NO: 6087126 - DNA, 25 bp, Homo sapien
tcttgtgggcctcagtggttggatc

SEQ ID NO: 6087127 - DNA, 25 bp, Homo sapien
gcagcctcgagaggcacagcaatcc

SEQ ID NO: 6087128 - DNA, 25 bp, Homo sapien
agcctcgagaggcacagcaatccat

SEQ ID NO: 6087129 - DNA, 25 bp, Homo sapien
ctgcagcctcgagaggcacagcaat

SEQ ID NO: 6087130 - DNA, 25 bp, Homo sapien
gcaggcccggtggggacactgcagc

SEQ ID NO: 6087131 - DNA, 25 bp, Homo sapien
cagcctcgagaggcacagcaatcca

SEQ ID NO: 6087132 - DNA, 25 bp, Homo sapien
tgcagcctcgagaggcacagcaatc

SEQ ID NO: 6087133 - DNA, 25 bp, Homo sapien
accaaactgtgtgtgggcaggtgct

SEQ ID NO: 6087134 - DNA, 25 bp, Homo sapien
cattagcagcctcttgggaggcagg

SEQ ID NO: 6087135 - DNA, 25 bp, Homo sapien
gacactgcagcctcgagaggcacag

SEQ ID NO: 6087136 - DNA, 25 bp, Homo sapien
catggctattggagtctgtggtatt

SEQ ID NO: 6087137 - DNA, 25 bp, Homo sapien
ggcagactccacagcgacaggattt

SEQ ID NO: 6087138 - DNA, 25 bp, Homo sapien
cacagcgacaggatttgtcggagga

SEQ ID NO: 6087139 - DNA, 25 bp, Homo sapien
gaggcacagcaatccatggctattg

SEQ ID NO: 6087140 - DNA, 25 bp, Homo sapien
ggtgggctccagtaaccaaactgtg

SEQ ID NO: 6087141 - DNA, 25 bp, Homo sapien
gactttttcaatctcaggcactgag

SEQ ID NO: 6087142 - DNA, 25 bp, Homo sapien
acagttgtcacagcaggtgggctcc

SEQ ID NO: 6087143 - DNA, 25 bp, Homo sapien
gcaaagtagccatccattagcagcc

SEQ ID NO: 6087144 - DNA, 25 bp, Homo sapien
tctccaggcctggagttggctggca

SEQ ID NO: 6087145 - DNA, 25 bp, Homo sapien
ccagggctgaaaggccttggattca

SEQ ID NO: 6087146 - DNA, 25 bp, Homo sapien
ggttttgataatgcggtcagcacac

SEQ ID NO: 6087147 - DNA, 25 bp, Homo sapien
tcatgatgcgcagtttacagccagc

SEQ ID NO: 6087148 - DNA, 25 bp, Homo sapien
cttggtcttgctaagggttttgata

SEQ ID NO: 6087149 - DNA, 25 bp, Homo sapien
agagtcgacccaccagaatgagcag

SEQ ID NO: 6087150 - DNA, 25 bp, Homo sapien
acatgaagagtcgacccaccagaat

SEQ ID NO: 6087151 - DNA, 25 bp, Homo sapien
aatgagcagacgcaggttcttggtc

SEQ ID NO: 6087152 - DNA, 25 bp, Homo sapien
gcattagagagagagtcacagccta

SEQ ID NO: 6087153 - DNA, 25 bp, Homo sapien
tctgccagacatattcgaagtcctg

SEQ ID NO: 6087154 - DNA, 25 bp, Homo sapien
ggtgtcaaatgttgtccagctccaa

SEQ ID NO: 6087155 - DNA, 25 bp, Homo sapien
aggtcactttcgtccttcccgagag

SEQ ID NO: 6087156 - DNA, 25 bp, Homo sapien
ggtgagcaattaggaccttcagtcc

SEQ ID NO: 6087157 - DNA, 25 bp, Homo sapien
cactcgcttggcgtggatagcacac

SEQ ID NO: 6087158 - DNA, 25 bp, Homo sapien
tggtagcttgcgaatcagtagctca

SEQ ID NO: 6087159 - DNA, 25 bp, Homo sapien
ggctttgccgccagtggacttacga

SEQ ID NO: 6087160 - DNA, 25 bp, Homo sapien
atttctgatagcggcggatttcacg

SEQ ID NO: 6087161 - DNA, 25 bp, Homo sapien
gaatggtagcttgcgaatcagtagc

SEQ ID NO: 6087162 - DNA, 25 bp, Homo sapien
ccaccggtggctggcgcgcttttgc

SEQ ID NO: 6087163 - DNA, 25 bp, Homo sapien
gggctttgccgccagtggacttacg

SEQ ID NO: 6087164 - DNA, 25 bp, Homo sapien
gatagcggcggatttcacggagggc

SEQ ID NO: 6087165 - DNA, 25 bp, Homo sapien
ctcgcttggcgtggatagcacacag

SEQ ID NO: 6087166 - DNA, 25 bp, Homo sapien
aatcagtagctcagtcgatttctga

SEQ ID NO: 6087167 - DNA, 25 bp, Homo sapien
gcggcggatttcacggagggcgaca

SEQ ID NO: 6087168 - DNA, 25 bp, Homo sapien
ctggaatggtagcttgcgaatcagt

SEQ ID NO: 6087169 - DNA, 25 bp, Homo sapien
ccttcgatgatgagaggctgggccc

SEQ ID NO: 6087170 - DNA, 25 bp, Homo sapien
ggcggccgaagtccatccatccata

SEQ ID NO: 6087171 - DNA, 25 bp, Homo sapien
tggctaggctctgaagcttggttct

SEQ ID NO: 6087172 - DNA, 25 bp, Homo sapien
gtggctaggctctgaagcttggttc

SEQ ID NO: 6087173 - DNA, 25 bp, Homo sapien
agcactgcggcggccgaagtccatc

SEQ ID NO: 6087174 - DNA, 25 bp, Homo sapien
cccctgtacctaagggtgcatctgg

SEQ ID NO: 6087175 - DNA, 25 bp, Homo sapien
cggccgaagtccatccatccatagg

SEQ ID NO: 6087176 - DNA, 25 bp, Homo sapien
tggcccctgtacctaagggtgcatc

SEQ ID NO: 6087177 - DNA, 25 bp, Homo sapien
cccagctgccttcgatgatgagagg

SEQ ID NO: 6087178 - DNA, 25 bp, Homo sapien
agtgcaaagatcagcacatacacac

SEQ ID NO: 6087179 - DNA, 25 bp, Homo sapien
ctgttggcccctgtacctaagggtg

SEQ ID NO: 6087180 - DNA, 25 bp, Homo sapien
agggtagctccaggtccctgttggc

SEQ ID NO: 6087181 - DNA, 25 bp, Homo sapien
gagactgcaaacagattgcattccc

SEQ ID NO: 6087182 - DNA, 25 bp, Homo sapien
taggtaaggctgatggagcatcgta

SEQ ID NO: 6087183 - DNA, 25 bp, Homo sapien
tgcaaacagattgcattcccatggt

SEQ ID NO: 6087184 - DNA, 25 bp, Homo sapien
taaggctgatggagcatcgtatgtt

SEQ ID NO: 6087185 - DNA, 25 bp, Homo sapien
gctgatggagcatcgtatgttttgc

SEQ ID NO: 6087186 - DNA, 25 bp, Homo sapien
ttaggtaaggctgatggagcatcgt

SEQ ID NO: 6087187 - DNA, 25 bp, Homo sapien
ctgcaaacagattgcattcccatgg

SEQ ID NO: 6087188 - DNA, 25 bp, Homo sapien
ggagactgcaaacagattgcattcc

SEQ ID NO: 6087189 - DNA, 25 bp, Homo sapien
ctgatggagcatcgtatgttttgcc

SEQ ID NO: 6087190 - DNA, 25 bp, Homo sapien
aagtctagaagattgaagggaaaga

SEQ ID NO: 6087191 - DNA, 25 bp, Homo sapien
tgatggagcatcgtatgttttgcca

SEQ ID NO: 6087192 - DNA, 25 bp, Homo sapien
aaagtctagaagattgaagggaaag

SEQ ID NO: 6087193 - DNA, 25 bp, Homo sapien
gacattagccaggaggttctcaaca

SEQ ID NO: 6087194 - DNA, 25 bp, Homo sapien
catctcatagatggtcaatgcggcg

SEQ ID NO: 6087195 - DNA, 25 bp, Homo sapien
caatagtctcattccagccagtgct

SEQ ID NO: 6087196 - DNA, 25 bp, Homo sapien
tcggaggtaacctgtaagtctgtta

SEQ ID NO: 6087197 - DNA, 25 bp, Homo sapien
taggatttccactctgactatggtc

SEQ ID NO: 6087198 - DNA, 25 bp, Homo sapien
caagcaagttgtagctcatggaaag

SEQ ID NO: 6087199 - DNA, 25 bp, Homo sapien
tcagggatgtcaaagttcatcctgt

SEQ ID NO: 6087200 - DNA, 25 bp, Homo sapien
tcccattcaattgccacaggagctt

SEQ ID NO: 6087201 - DNA, 25 bp, Homo sapien
agactgctcatgagttttcccctgg

SEQ ID NO: 6087202 - DNA, 25 bp, Homo sapien
aagagctgtagtggagaagcacaac

SEQ ID NO: 6087203 - DNA, 25 bp, Homo sapien
tcaatgcggcgtcctccttctggaa

SEQ ID NO: 6087204 - DNA, 25 bp, Homo sapien
gcttctttgtaggaatccaagcaag

SEQ ID NO: 6087205 - DNA, 25 bp, Homo sapien
atgttgaagaggaggttcatgatgt

SEQ ID NO: 6087206 - DNA, 25 bp, Homo sapien
cgcctgggcacgcaggttcttggcc

SEQ ID NO: 6087207 - DNA, 25 bp, Homo sapien
ctgcgcaggtagtggaagctcctct

SEQ ID NO: 6087208 - DNA, 25 bp, Homo sapien
ggacagggtgaacttggtgcggtgg

SEQ ID NO: 6087209 - DNA, 25 bp, Homo sapien
tcagcctcagacagggcggtgttga

SEQ ID NO: 6087210 - DNA, 25 bp, Homo sapien
tctcagcctcagacagggcggtgtt

SEQ ID NO: 6087211 - DNA, 25 bp, Homo sapien
cagcaggaagtggaccggcatcagc

SEQ ID NO: 6087212 - DNA, 25 bp, Homo sapien
ctctcccgaagaggcgtctctgctg

SEQ ID NO: 6087213 - DNA, 25 bp, Homo sapien
gcgcaggtagtggaagctcctcttg

SEQ ID NO: 6087214 - DNA, 25 bp, Homo sapien
gacgtcgagggacagggtgaacttg

SEQ ID NO: 6087215 - DNA, 25 bp, Homo sapien
acgcaggttcttggccttggcgatg

SEQ ID NO: 6087216 - DNA, 25 bp, Homo sapien
gcaggaagtggaccggcatcagcat

SEQ ID NO: 6087217 - DNA, 25 bp, Homo sapien
gcccagatgacgaagatgaccagct

SEQ ID NO: 6087218 - DNA, 25 bp, Homo sapien
tgagcagatcggagaaggccatgct

SEQ ID NO: 6087219 - DNA, 25 bp, Homo sapien
tgtcccaagggtcggtgccgttctc

SEQ ID NO: 6087220 - DNA, 25 bp, Homo sapien
ttccagggccggtactgccagaggc

SEQ ID NO: 6087221 - DNA, 25 bp, Homo sapien
tttgcagaggaggtcgccgaagttc

SEQ ID NO: 6087222 - DNA, 25 bp, Homo sapien
cactgacgaattggaagagtttgca

SEQ ID NO: 6087223 - DNA, 25 bp, Homo sapien
aagcagatggcgaagtagcgctcga

SEQ ID NO: 6087224 - DNA, 25 bp, Homo sapien
actgccagaggcgaacgaggtccag

SEQ ID NO: 6087225 - DNA, 25 bp, Homo sapien
cgccgaagttccagggccggtactg

SEQ ID NO: 6087226 - DNA, 25 bp, Homo sapien
gaagtagcgctcgacgctcagcgct

SEQ ID NO: 6087227 - DNA, 25 bp, Homo sapien
tagaggaccgtgagacagaagacag

SEQ ID NO: 6087228 - DNA, 25 bp, Homo sapien
gtgcagctctcactgacgaattgga

SEQ ID NO: 6087229 - DNA, 25 bp, Homo sapien
ccggcggcgccatagatgacttggt

SEQ ID NO: 6087230 - DNA, 25 bp, Homo sapien
taaatgtcggctttaggcgtcacgc

SEQ ID NO: 6087231 - DNA, 25 bp, Homo sapien
aacttaactgtcctccagtgcggca

SEQ ID NO: 6087232 - DNA, 25 bp, Homo sapien
tcagagcaaccgaagtcactaattt

SEQ ID NO: 6087233 - DNA, 25 bp, Homo sapien
tcactgatcaagatgttcgcgggct

SEQ ID NO: 6087234 - DNA, 25 bp, Homo sapien
gaatacggcgcctgcttggtagtca

SEQ ID NO: 6087235 - DNA, 25 bp, Homo sapien
gacttggtgtaaagtgacgttgcca

SEQ ID NO: 6087236 - DNA, 25 bp, Homo sapien
caccgcgtacagtatgtgctgccgc

SEQ ID NO: 6087237 - DNA, 25 bp, Homo sapien
caacatctagtgagtacttgagaca

SEQ ID NO: 6087238 - DNA, 25 bp, Homo sapien
tatgtgcctcctagagggtaagagg

SEQ ID NO: 6087239 - DNA, 25 bp, Homo sapien
gcacaatgctttgcgagtggaggaa

SEQ ID NO: 6087240 - DNA, 25 bp, Homo sapien
gcaggccgttcacaacatctagtga

SEQ ID NO: 6087241 - DNA, 25 bp, Homo sapien
tccaaactccacagctaacttgtat

SEQ ID NO: 6087242 - DNA, 25 bp, Homo sapien
ggaaaaatgatatcagtgacacaat

SEQ ID NO: 6087243 - DNA, 25 bp, Homo sapien
tgcttggtatgtctccataaagatc

SEQ ID NO: 6087244 - DNA, 25 bp, Homo sapien
tagttttaatggctctcacatgaac

SEQ ID NO: 6087245 - DNA, 25 bp, Homo sapien
caactcagtactattgctgctataa

SEQ ID NO: 6087246 - DNA, 25 bp, Homo sapien
tggcaattgcatgaaacctataatc

SEQ ID NO: 6087247 - DNA, 25 bp, Homo sapien
atgagaggaactggctatcttcaga

SEQ ID NO: 6087248 - DNA, 25 bp, Homo sapien
tgggacaattgcaaacaggttaaag

SEQ ID NO: 6087249 - DNA, 25 bp, Homo sapien
ctactgccggtagcatagagtttta

SEQ ID NO: 6087250 - DNA, 25 bp, Homo sapien
gctgctataaggctgaccaacaagg

SEQ ID NO: 6087251 - DNA, 25 bp, Homo sapien
ggaaatggcaaagcatcccagcagg

SEQ ID NO: 6087252 - DNA, 25 bp, Homo sapien
ttgtcataagatagctaaaggtcat

SEQ ID NO: 6087253 - DNA, 25 bp, Homo sapien
aatgaaagggttggcgctactgttg

SEQ ID NO: 6087254 - DNA, 25 bp, Homo sapien
tacaattgtctttctggcgccgagg

SEQ ID NO: 6087255 - DNA, 25 bp, Homo sapien
tttgaaagccctggtcagaacaact

SEQ ID NO: 6087256 - DNA, 25 bp, Homo sapien
ggcgccgaggttgcatttcatcttt

SEQ ID NO: 6087257 - DNA, 25 bp, Homo sapien
tagacgacagtctcaactgtgaccg

SEQ ID NO: 6087258 - DNA, 25 bp, Homo sapien
tgtggtgtaggttcccaaaggtcga

SEQ ID NO: 6087259 - DNA, 25 bp, Homo sapien
agaccaatgccgactggtacttggg

SEQ ID NO: 6087260 - DNA, 25 bp, Homo sapien
catgacatactccatggtggtcacc

SEQ ID NO: 6087261 - DNA, 25 bp, Homo sapien
taaaggagtctcatgggcatagcga

SEQ ID NO: 6087262 - DNA, 25 bp, Homo sapien
caaaggtcgaccaatactcatagta

SEQ ID NO: 6087263 - DNA, 25 bp, Homo sapien
ctactgttgattgtggagaagagca

SEQ ID NO: 6087264 - DNA, 25 bp, Homo sapien
gaagcccacgtgttcttccggatct

SEQ ID NO: 6087265 - DNA, 25 bp, Homo sapien
gccacgatcaaggtgagggccttcc

SEQ ID NO: 6087266 - DNA, 25 bp, Homo sapien
gagaatctccctaaaggtgttgcgc

SEQ ID NO: 6087267 - DNA, 25 bp, Homo sapien
tgacgtacctgtcgacggcgatggc

SEQ ID NO: 6087268 - DNA, 25 bp, Homo sapien
gagggccttcctcacggtcatgatg

SEQ ID NO: 6087269 - DNA, 25 bp, Homo sapien
tgaggagcatcatggcgaagaacat

SEQ ID NO: 6087270 - DNA, 25 bp, Homo sapien
accattttgctctccgagtagacga

SEQ ID NO: 6087271 - DNA, 25 bp, Homo sapien
cagtgctgctatgcgcttgacgtgc

SEQ ID NO: 6087272 - DNA, 25 bp, Homo sapien
tggtgatgaggcacacaatgaccat

SEQ ID NO: 6087273 - DNA, 25 bp, Homo sapien
cacatgatgaggaccaggtaggtgt

SEQ ID NO: 6087274 - DNA, 25 bp, Homo sapien
gatcatggagtcgaagatgttgtcc

SEQ ID NO: 6087275 - DNA, 25 bp, Homo sapien
gtgttgcgcaattccaggctccgga

SEQ ID NO: 6087276 - DNA, 25 bp, Homo sapien
caggctccggaaagcgtagatgagt

SEQ ID NO: 6087277 - DNA, 25 bp, Homo sapien
catcaaatggacagggcctagttca

SEQ ID NO: 6087278 - DNA, 25 bp, Homo sapien
gatttaatacaatccactgggaaca

SEQ ID NO: 6087279 - DNA, 25 bp, Homo sapien
ttgaagtagagtactcgagagtcca

SEQ ID NO: 6087280 - DNA, 25 bp, Homo sapien
ggaacacgacaagccacaggcaaat

SEQ ID NO: 6087281 - DNA, 25 bp, Homo sapien
gtattcgtaggccacaaacagtgcc

SEQ ID NO: 6087282 - DNA, 25 bp, Homo sapien
gacgcaaaaaacgatcggctcagtt

SEQ ID NO: 6087283 - DNA, 25 bp, Homo sapien
cgacagaccaaattgtattatggct

SEQ ID NO: 6087284 - DNA, 25 bp, Homo sapien
gagggtaccaataaatcctgcctgt

SEQ ID NO: 6087285 - DNA, 25 bp, Homo sapien
tctccctgacgcaaaaaacgatcgg

SEQ ID NO: 6087286 - DNA, 25 bp, Homo sapien
taaggatacccttcacgacagacca

SEQ ID NO: 6087287 - DNA, 25 bp, Homo sapien
tagccggcacttcacaagctcagtg

SEQ ID NO: 6087288 - DNA, 25 bp, Homo sapien
gagagccagtgcagcaaatgcagag

SEQ ID NO: 6087289 - DNA, 25 bp, Homo sapien
tcttccttgaccttcggagagtggc

SEQ ID NO: 6087290 - DNA, 25 bp, Homo sapien
tagaggatcacgatggtcaccagga

SEQ ID NO: 6087291 - DNA, 25 bp, Homo sapien
tgtggttggccaccttacggctgct

SEQ ID NO: 6087292 - DNA, 25 bp, Homo sapien
accagcaggcgatgaacacgctcac

SEQ ID NO: 6087293 - DNA, 25 bp, Homo sapien
gagttgagcacagccaacacgatga

SEQ ID NO: 6087294 - DNA, 25 bp, Homo sapien
tgccatggaccgctccgagttgttg

SEQ ID NO: 6087295 - DNA, 25 bp, Homo sapien
tcggagagtggctgctattgttgct

SEQ ID NO: 6087296 - DNA, 25 bp, Homo sapien
ttgctggccagcgtgtagatgaccg

SEQ ID NO: 6087297 - DNA, 25 bp, Homo sapien
cagttccagcccagaatgggcaggg

SEQ ID NO: 6087298 - DNA, 25 bp, Homo sapien
tttacttctgcttgggtcgagcgca

SEQ ID NO: 6087299 - DNA, 25 bp, Homo sapien
cttacggctgctggacttcaccagg

SEQ ID NO: 6087300 - DNA, 25 bp, Homo sapien
cctgcaggccacatcaatgaggaag

SEQ ID NO: 6087301 - DNA, 25 bp, Homo sapien
ccttcgatgatgagaggctgggccc

SEQ ID NO: 6087302 - DNA, 25 bp, Homo sapien
ggcggccgaagtccatccatccata

SEQ ID NO: 6087303 - DNA, 25 bp, Homo sapien
gtggctaggctctgaagcttggttc

SEQ ID NO: 6087304 - DNA, 25 bp, Homo sapien
agggtagctccaggtccctgttggc

SEQ ID NO: 6087305 - DNA, 25 bp, Homo sapien
cccctgtacctaagggtgcatctgg

SEQ ID NO: 6087306 - DNA, 25 bp, Homo sapien
ctgttggcccctgtacctaagggtg

SEQ ID NO: 6087307 - DNA, 25 bp, Homo sapien
cggccgaagtccatccatccatagg

SEQ ID NO: 6087308 - DNA, 25 bp, Homo sapien
tggcccctgtacctaagggtgcatc

SEQ ID NO: 6087309 - DNA, 25 bp, Homo sapien
cccagctgccttcgatgatgagagg

SEQ ID NO: 6087310 - DNA, 25 bp, Homo sapien
agcactgcggcggccgaagtccatc

SEQ ID NO: 6087311 - DNA, 25 bp, Homo sapien
tggctaggctctgaagcttggttct

SEQ ID NO: 6087312 - DNA, 25 bp, Homo sapien
agtgcaaagatcagcacatacacac

SEQ ID NO: 6087313 - DNA, 25 bp, Homo sapien
ccagggctgaaaggccttggattca

SEQ ID NO: 6087314 - DNA, 25 bp, Homo sapien
aggtcactttcgtccttcccgagag

SEQ ID NO: 6087315 - DNA, 25 bp, Homo sapien
ggttttgataatgcggtcagcacac

SEQ ID NO: 6087316 - DNA, 25 bp, Homo sapien
agagtcgacccaccagaatgagcag

SEQ ID NO: 6087317 - DNA, 25 bp, Homo sapien
ggtgagcaattaggaccttcagtcc

SEQ ID NO: 6087318 - DNA, 25 bp, Homo sapien
tctgccagacatattcgaagtcctg

SEQ ID NO: 6087319 - DNA, 25 bp, Homo sapien
ggtgtcaaatgttgtccagctccaa

SEQ ID NO: 6087320 - DNA, 25 bp, Homo sapien
acatgaagagtcgacccaccagaat

SEQ ID NO: 6087321 - DNA, 25 bp, Homo sapien
aatgagcagacgcaggttcttggtc

SEQ ID NO: 6087322 - DNA, 25 bp, Homo sapien
gcattagagagagagtcacagccta

SEQ ID NO: 6087323 - DNA, 25 bp, Homo sapien
tcatgatgcgcagtttacagccagc

SEQ ID NO: 6087324 - DNA, 25 bp, Homo sapien
cttggtcttgctaagggttttgata

SEQ ID NO: 6087325 - DNA, 25 bp, Homo sapien
aattgcaatgatcatgaagagcccc

SEQ ID NO: 6087326 - DNA, 25 bp, Homo sapien
tagactgtgtcttcaggcttgggaa

SEQ ID NO: 6087327 - DNA, 25 bp, Homo sapien
tgtccttgtacatagttattccagc

SEQ ID NO: 6087328 - DNA, 25 bp, Homo sapien
agtatctcccattttcacatagtgc

SEQ ID NO: 6087329 - DNA, 25 bp, Homo sapien
tcccattttcacatagtgcctcagg

SEQ ID NO: 6087330 - DNA, 25 bp, Homo sapien
ttcctgcaatgtccttgtacatagt

SEQ ID NO: 6087331 - DNA, 25 bp, Homo sapien
tgtacatagttattccagcacttct

SEQ ID NO: 6087332 - DNA, 25 bp, Homo sapien
cattttcacatagtgcctcaggcac

SEQ ID NO: 6087333 - DNA, 25 bp, Homo sapien
agtcagtgcaagtgttgctggcttt

SEQ ID NO: 6087334 - DNA, 25 bp, Homo sapien
agttattccagcacttcttaagttg

SEQ ID NO: 6087335 - DNA, 25 bp, Homo sapien
tgtgtcttcaggcttgggaaatttt

SEQ ID NO: 6087336 - DNA, 25 bp, Homo sapien
agaattgcaatgatcatgaagagcc

SEQ ID NO: 6087337 - DNA, 25 bp, Homo sapien
gtgctccgtgtaggtaactgcatcg

SEQ ID NO: 6087338 - DNA, 25 bp, Homo sapien
gccctgaatgttgtcgcgcagaact

SEQ ID NO: 6087339 - DNA, 25 bp, Homo sapien
tccgcgtgtctcctcgtatataagg

SEQ ID NO: 6087340 - DNA, 25 bp, Homo sapien
taaggcctgagatgcgcttaacgcc

SEQ ID NO: 6087341 - DNA, 25 bp, Homo sapien
aacactttaagaactccgcgtgtct

SEQ ID NO: 6087342 - DNA, 25 bp, Homo sapien
tgagatgcgcttaacgcctccacgc

SEQ ID NO: 6087343 - DNA, 25 bp, Homo sapien
aatgttgtcgcgcagaactttgcgg

SEQ ID NO: 6087344 - DNA, 25 bp, Homo sapien
tgtctcctcgtatataaggcctgag

SEQ ID NO: 6087345 - DNA, 25 bp, Homo sapien
gctccgtgtaggtaactgcatcgcg

SEQ ID NO: 6087346 - DNA, 25 bp, Homo sapien
tccacgccgtgccaggcgtcggatg

SEQ ID NO: 6087347 - DNA, 25 bp, Homo sapien
atcgcggattacattctccaaaaac

SEQ ID NO: 6087348 - DNA, 25 bp, Homo sapien
agaactccgcgtgtctcctcgtata

SEQ ID NO: 6087349 - DNA, 25 bp, Homo sapien
caggcgctggaaaggtagtttacga

SEQ ID NO: 6087350 - DNA, 25 bp, Homo sapien
accagtagacttccgagcagtttgc

SEQ ID NO: 6087351 - DNA, 25 bp, Homo sapien
gccttgccaccagtagacttccgag

SEQ ID NO: 6087352 - DNA, 25 bp, Homo sapien
caggttagtgtcctcaaatagccct

SEQ ID NO: 6087353 - DNA, 25 bp, Homo sapien
ggtagtttacgaataagcagttcag

SEQ ID NO: 6087354 - DNA, 25 bp, Homo sapien
gtcctgcgcaatctcgcgcaccagg

SEQ ID NO: 6087355 - DNA, 25 bp, Homo sapien
caccaggcgctggaaaggtagttta

SEQ ID NO: 6087356 - DNA, 25 bp, Homo sapien
gccaccagtagacttccgagcagtt

SEQ ID NO: 6087357 - DNA, 25 bp, Homo sapien
tagtggccaactgtttgcgtggcgc

SEQ ID NO: 6087358 - DNA, 25 bp, Homo sapien
tggcgccttgccaccagtagacttc

SEQ ID NO: 6087359 - DNA, 25 bp, Homo sapien
caactgtttgcgtggcgccttgcca

SEQ ID NO: 6087360 - DNA, 25 bp, Homo sapien
cttagtggccaactgtttgcgtggc

SEQ ID NO: 6087361 - DNA, 25 bp, Homo sapien
cagatgccacttacagcaaacatga

SEQ ID NO: 6087362 - DNA, 25 bp, Homo sapien
tcatacaaccctgggacactaaagc

SEQ ID NO: 6087363 - DNA, 25 bp, Homo sapien
gggtagcggttacactcatacaacc

SEQ ID NO: 6087364 - DNA, 25 bp, Homo sapien
gttggccgggacacataacattcca

SEQ ID NO: 6087365 - DNA, 25 bp, Homo sapien
ggcaggtccttgttacgaatctcat

SEQ ID NO: 6087366 - DNA, 25 bp, Homo sapien
tccttaacctctaaacaatctggct

SEQ ID NO: 6087367 - DNA, 25 bp, Homo sapien
tgtctccttactggtgttctctgtg

SEQ ID NO: 6087368 - DNA, 25 bp, Homo sapien
gattttgatgcagtgcgtagacctg

SEQ ID NO: 6087369 - DNA, 25 bp, Homo sapien
ccacttggataatgtagaagcggga

SEQ ID NO: 6087370 - DNA, 25 bp, Homo sapien
tagaagcgggagatgccttcctgcc

SEQ ID NO: 6087371 - DNA, 25 bp, Homo sapien
ccaggaacccaatttccagggcatt

SEQ ID NO: 6087372 - DNA, 25 bp, Homo sapien
ggcatttcggaacaccacttggata

SEQ ID NO: 6087373 - DNA, 25 bp, Homo sapien
tcgaaagtcgagaagtgcagagcgt

SEQ ID NO: 6087374 - DNA, 25 bp, Homo sapien
tggtcgaaggcgtggttcagcccat

SEQ ID NO: 6087375 - DNA, 25 bp, Homo sapien
tttgcgccatcatcgctgtcagggc

SEQ ID NO: 6087376 - DNA, 25 bp, Homo sapien
gaacgacgggataacattgcgcagc

SEQ ID NO: 6087377 - DNA, 25 bp, Homo sapien
gaaggagacaaattcttttgcgcca

SEQ ID NO: 6087378 - DNA, 25 bp, Homo sapien
ttcttgtcgttgttgaacgacggga

SEQ ID NO: 6087379 - DNA, 25 bp, Homo sapien
caaggcgttgatgtagatttgggcc

SEQ ID NO: 6087380 - DNA, 25 bp, Homo sapien
tcagggcgctgtcctcgaaagtcga

SEQ ID NO: 6087381 - DNA, 25 bp, Homo sapien
tgtagcagctcggacaaggcgttga

SEQ ID NO: 6087382 - DNA, 25 bp, Homo sapien
tggcgttggctgctagccgtctctg

SEQ ID NO: 6087383 - DNA, 25 bp, Homo sapien
ggctgagaagcgagtccggcaactc

SEQ ID NO: 6087384 - DNA, 25 bp, Homo sapien
taacattgcgcagctggtcgaaggc

SEQ ID NO: 6087385 - DNA, 25 bp, Homo sapien
aggttagactataaatacggtgtca

SEQ ID NO: 6087386 - DNA, 25 bp, Homo sapien
attgcagcctacatcagtgaccctc

SEQ ID NO: 6087387 - DNA, 25 bp, Homo sapien
aatagctgtagtcagattttcataa

SEQ ID NO: 6087388 - DNA, 25 bp, Homo sapien
tatcagcatctattacactcttttt

SEQ ID NO: 6087389 - DNA, 25 bp, Homo sapien
cagtgaccctcaaggagctatcttc

SEQ ID NO: 6087390 - DNA, 25 bp, Homo sapien
gcagcctacatcagtgaccctcaag

SEQ ID NO: 6087391 - DNA, 25 bp, Homo sapien
ttgtgaacccccattgcagcctaca

SEQ ID NO: 6087392 - DNA, 25 bp, Homo sapien
ctacatcagtgaccctcaaggagct

SEQ ID NO: 6087393 - DNA, 25 bp, Homo sapien
ctataaatacggtgtcagggccttg

SEQ ID NO: 6087394 - DNA, 25 bp, Homo sapien
actccttaaatagctgtagtcagat

SEQ ID NO: 6087395 - DNA, 25 bp, Homo sapien
aatacggtgtcagggccttgtgaac

SEQ ID NO: 6087396 - DNA, 25 bp, Homo sapien
tagactataaatacggtgtcagggc

SEQ ID NO: 6087397 - DNA, 25 bp, Homo sapien
acattgctggccgtgtgcttcacca

SEQ ID NO: 6087398 - DNA, 25 bp, Homo sapien
ccagttcggtctttcaaatcgggat

SEQ ID NO: 6087399 - DNA, 25 bp, Homo sapien
caaactagtaagttgctctaggtcc

SEQ ID NO: 6087400 - DNA, 25 bp, Homo sapien
tcccatagagcctggccaaatcaca

SEQ ID NO: 6087401 - DNA, 25 bp, Homo sapien
tggccaaatcacaggcggtgtcccc

SEQ ID NO: 6087402 - DNA, 25 bp, Homo sapien
tatcctcgatgttaacatcagcttg

SEQ ID NO: 6087403 - DNA, 25 bp, Homo sapien
tgaatgacagcgaaaccagttcggt

SEQ ID NO: 6087404 - DNA, 25 bp, Homo sapien
gcctgcatcaggctaacaacctcat

SEQ ID NO: 6087405 - DNA, 25 bp, Homo sapien
aatctcgggatttccaagtttcata

SEQ ID NO: 6087406 - DNA, 25 bp, Homo sapien
tcgggattagcacctctaagtagca

SEQ ID NO: 6087407 - DNA, 25 bp, Homo sapien
gcagtctcctggcaatctcgggatt

SEQ ID NO: 6087408 - DNA, 25 bp, Homo sapien
tggccgcatcatgaatgacagcgaa

SEQ ID NO: 6087409 - DNA, 25 bp, Homo sapien
caatagtgaagttgagaaacagctc

SEQ ID NO: 6087410 - DNA, 25 bp, Homo sapien
tgagaaacagctcccgggtgtttat

SEQ ID NO: 6087411 - DNA, 25 bp, Homo sapien
tcaagacaatagtgaagttgagaaa

SEQ ID NO: 6087412 - DNA, 25 bp, Homo sapien
tgaagttgagaaacagctcccgggt

SEQ ID NO: 6087413 - DNA, 25 bp, Homo sapien
ccgtaatcaagacaatagtgaagtt

SEQ ID NO: 6087414 - DNA, 25 bp, Homo sapien
acagctcccgggtgtttatccccat

SEQ ID NO: 6087415 - DNA, 25 bp, Homo sapien
gaataaccgtaatcaagacaatagt

SEQ ID NO: 6087416 - DNA, 25 bp, Homo sapien
aagagtacggctcccacagcactaa

SEQ ID NO: 6087417 - DNA, 25 bp, Homo sapien
gaagactagggcactcttcaggtca

SEQ ID NO: 6087418 - DNA, 25 bp, Homo sapien
gcatgaagactgacatggcatagat

SEQ ID NO: 6087419 - DNA, 25 bp, Homo sapien
ccatgttcaaggatagtgtgctgga

SEQ ID NO: 6087420 - DNA, 25 bp, Homo sapien
gactagggcactcttcaggtcagcc

SEQ ID NO: 6087421 - DNA, 25 bp, Homo sapien
acatacccaatcagtgaagaagcca

SEQ ID NO: 6087422 - DNA, 25 bp, Homo sapien
aagtaatgaagactagggcactctt

SEQ ID NO: 6087423 - DNA, 25 bp, Homo sapien
tagggcactcttcaggtcagcccac

SEQ ID NO: 6087424 - DNA, 25 bp, Homo sapien
cagaagggcaaagagtacggctccc

SEQ ID NO: 6087425 - DNA, 25 bp, Homo sapien
aacatacccaatcagtgaagaagcc

SEQ ID NO: 6087426 - DNA, 25 bp, Homo sapien
taatgaagactagggcactcttcag

SEQ ID NO: 6087427 - DNA, 25 bp, Homo sapien
gaagggcaaagagtacggctcccac

SEQ ID NO: 6087428 - DNA, 25 bp, Homo sapien
acagcttcagggttatagactgcag

SEQ ID NO: 6087429 - DNA, 25 bp, Homo sapien
tttgggtatggcatgggcaagccac

SEQ ID NO: 6087430 - DNA, 25 bp, Homo sapien
gcacaacaggagtcaagtccacatc

SEQ ID NO: 6087431 - DNA, 25 bp, Homo sapien
tatggcatgggcaagccaccgatga

SEQ ID NO: 6087432 - DNA, 25 bp, Homo sapien
agccaccgatgagtgctgtcccatg

SEQ ID NO: 6087433 - DNA, 25 bp, Homo sapien
catgggcaagccaccgatgagtgct

SEQ ID NO: 6087434 - DNA, 25 bp, Homo sapien
cggcacaacaggagtcaagtccaca

SEQ ID NO: 6087435 - DNA, 25 bp, Homo sapien
caccgatgagtgctgtcccatggat

SEQ ID NO: 6087436 - DNA, 25 bp, Homo sapien
atgttcactgctgacggcacaacag

SEQ ID NO: 6087437 - DNA, 25 bp, Homo sapien
tcatgttcactgctgacggcacaac

SEQ ID NO: 6087438 - DNA, 25 bp, Homo sapien
tgacggcacaacaggagtcaagtcc

SEQ ID NO: 6087439 - DNA, 25 bp, Homo sapien
gcttcagggttatagactgcagggt

SEQ ID NO: 6087440 - DNA, 25 bp, Homo sapien
aatctcgttagtgtggttggtggct

SEQ ID NO: 6087441 - DNA, 25 bp, Homo sapien
tatcgacaaattccagaagcccttg

SEQ ID NO: 6087442 - DNA, 25 bp, Homo sapien
gcagttccccactctgttgcaaaga

SEQ ID NO: 6087443 - DNA, 25 bp, Homo sapien
tgttgcaaagagactagatcactgc

SEQ ID NO: 6087444 - DNA, 25 bp, Homo sapien
ggttggtggctgtgatatcgacaaa

SEQ ID NO: 6087445 - DNA, 25 bp, Homo sapien
tcttgggccctcctgcagtacgggc

SEQ ID NO: 6087446 - DNA, 25 bp, Homo sapien
tttgcagttcacaaactcttgagcc

SEQ ID NO: 6087447 - DNA, 25 bp, Homo sapien
ttaccaataaagactcgaggcaccg

SEQ ID NO: 6087448 - DNA, 25 bp, Homo sapien
cgaggcaccgttcttgctcccgtga

SEQ ID NO: 6087449 - DNA, 25 bp, Homo sapien
aagactcgaggcaccgttcttgctc

SEQ ID NO: 6087450 - DNA, 25 bp, Homo sapien
tgctcccgtgagctgttgcaaataa

SEQ ID NO: 6087451 - DNA, 25 bp, Homo sapien
ccagaagcccttgtttgatgggcaa

SEQ ID NO: 6087452 - DNA, 25 bp, Homo sapien
ttggcccaggcagtgcatataaagc

SEQ ID NO: 6087453 - DNA, 25 bp, Homo sapien
gatccagcctgcagtcttctagacc

SEQ ID NO: 6087454 - DNA, 25 bp, Homo sapien
gcagccagccttcgaaggtctgaat

SEQ ID NO: 6087455 - DNA, 25 bp, Homo sapien
caccatctggtagtttgtactgtcg

SEQ ID NO: 6087456 - DNA, 25 bp, Homo sapien
gaggaactggaccacgtccagcagg

SEQ ID NO: 6087457 - DNA, 25 bp, Homo sapien
tctagacctcgagcttcaaactctt

SEQ ID NO: 6087458 - DNA, 25 bp, Homo sapien
tcctcaggtccacgatggttggccc

SEQ ID NO: 6087459 - DNA, 25 bp, Homo sapien
tcgggtgaagcttcttgagataaaa

SEQ ID NO: 6087460 - DNA, 25 bp, Homo sapien
ggttccgtgttgtgcttttatcagc

SEQ ID NO: 6087461 - DNA, 25 bp, Homo sapien
aaactcttcctggtaacgcactgga

SEQ ID NO: 6087462 - DNA, 25 bp, Homo sapien
gagataaaaccgtgctcatccattc

SEQ ID NO: 6087463 - DNA, 25 bp, Homo sapien
catataaagcatgatccagcctgca

SEQ ID NO: 6087464 - DNA, 25 bp, Homo sapien
tctgtctctggtgcatccatgtcaa

SEQ ID NO: 6087465 - DNA, 25 bp, Homo sapien
acgttctgtctctggtgcatccatg

SEQ ID NO: 6087466 - DNA, 25 bp, Homo sapien
ttctgtctctggtgcatccatgtca

SEQ ID NO: 6087467 - DNA, 25 bp, Homo sapien
ctgtctctggtgcatccatgtcaat

SEQ ID NO: 6087468 - DNA, 25 bp, Homo sapien
aatggccaccgctgcacgttctgtc

SEQ ID NO: 6087469 - DNA, 25 bp, Homo sapien
gttctgtctctggtgcatccatgtc

SEQ ID NO: 6087470 - DNA, 25 bp, Homo sapien
atggccaccgctgcacgttctgtct

SEQ ID NO: 6087471 - DNA, 25 bp, Homo sapien
tgtctctggtgcatccatgtcaatg

SEQ ID NO: 6087472 - DNA, 25 bp, Homo sapien
cgttctgtctctggtgcatccatgt

SEQ ID NO: 6087473 - DNA, 25 bp, Homo sapien
gaatggccaccgctgcacgttctgt

SEQ ID NO: 6087474 - DNA, 25 bp, Homo sapien
cacgttctgtctctggtgcatccat

SEQ ID NO: 6087475 - DNA, 25 bp, Homo sapien
cgtgtatccatatacaaggtctcat

SEQ ID NO: 6087476 - DNA, 25 bp, Homo sapien
ccctgtaaagcgctggagaacggca

SEQ ID NO: 6087477 - DNA, 25 bp, Homo sapien
tctacaagccggcagggcggtttta

SEQ ID NO: 6087478 - DNA, 25 bp, Homo sapien
tgcattgtgactcaattcctgaagg

SEQ ID NO: 6087479 - DNA, 25 bp, Homo sapien
ggcttaagtgcgataacccctgtaa

SEQ ID NO: 6087480 - DNA, 25 bp, Homo sapien
gcaaaagctctacaagccggcaggg

SEQ ID NO: 6087481 - DNA, 25 bp, Homo sapien
taagtgcgataacccctgtaaagcg

SEQ ID NO: 6087482 - DNA, 25 bp, Homo sapien
gataacccctgtaaagcgctggaga

SEQ ID NO: 6087483 - DNA, 25 bp, Homo sapien
gcggttttaaatgcacgtgtatcca

SEQ ID NO: 6087484 - DNA, 25 bp, Homo sapien
tccgaggcttaagtgcgataacccc

SEQ ID NO: 6087485 - DNA, 25 bp, Homo sapien
aagcgctggagaacggcaaaagctc

SEQ ID NO: 6087486 - DNA, 25 bp, Homo sapien
cagggcggttttaaatgcacgtgta

SEQ ID NO: 6087487 - DNA, 25 bp, Homo sapien
cttggcgggaatcttcctttggctg

SEQ ID NO: 6087488 - DNA, 25 bp, Homo sapien
gatggtgtcttgtccagatgctgca

SEQ ID NO: 6087489 - DNA, 25 bp, Homo sapien
taagcttggttcctgcttccggtag

SEQ ID NO: 6087490 - DNA, 25 bp, Homo sapien
gcgggaatcttcctttggctgtact

SEQ ID NO: 6087491 - DNA, 25 bp, Homo sapien
tggttcctgcttccggtagctgcgg

SEQ ID NO: 6087492 - DNA, 25 bp, Homo sapien
gaaccaggataaggaggctcagagc

SEQ ID NO: 6087493 - DNA, 25 bp, Homo sapien
tagctctgcctgagagcgcttgcgg

SEQ ID NO: 6087494 - DNA, 25 bp, Homo sapien
ccggtagctgcggacaaccttggcg

SEQ ID NO: 6087495 - DNA, 25 bp, Homo sapien
gtctgcacatagctctgcctgagag

SEQ ID NO: 6087496 - DNA, 25 bp, Homo sapien
tggagcagcctaagcttggttcctg

SEQ ID NO: 6087497 - DNA, 25 bp, Homo sapien
tgcttccggtagctgcggacaacct

SEQ ID NO: 6087498 - DNA, 25 bp, Homo sapien
ggatggagcagcctaagcttggttc

SEQ ID NO: 6087499 - DNA, 25 bp, Homo sapien
gtagcgcacagcgtggatctgcttg

SEQ ID NO: 6087500 - DNA, 25 bp, Homo sapien
tacggaggcggtcatactcctcctg

SEQ ID NO: 6087501 - DNA, 25 bp, Homo sapien
gttctcataggacggcggactggca

SEQ ID NO: 6087502 - DNA, 25 bp, Homo sapien
tggagaaacagatgacgaaaacgtt

SEQ ID NO: 6087503 - DNA, 25 bp, Homo sapien
gcgctgtaattgtcgaacacggtgg

SEQ ID NO: 6087504 - DNA, 25 bp, Homo sapien
cgctctgcgcgctgtaattgtcgaa

SEQ ID NO: 6087505 - DNA, 25 bp, Homo sapien
ggctgagcattcgaggtagcgcaca

SEQ ID NO: 6087506 - DNA, 25 bp, Homo sapien
acttgtgccgcacgttctcatagga

SEQ ID NO: 6087507 - DNA, 25 bp, Homo sapien
gacaccatcctgttgcagggctgag

SEQ ID NO: 6087508 - DNA, 25 bp, Homo sapien
acacctctggatgccacttgtgccg

SEQ ID NO: 6087509 - DNA, 25 bp, Homo sapien
caggttcaggttcactgtgcgcccg

SEQ ID NO: 6087510 - DNA, 25 bp, Homo sapien
tgacgaaaacgttggtctgagggta

SEQ ID NO: 6087511 - DNA, 25 bp, Homo sapien
cacctgctggtggtgatcacatagc

SEQ ID NO: 6087512 - DNA, 25 bp, Homo sapien
ggacacctgctggtggtgatcacat

SEQ ID NO: 6087513 - DNA, 25 bp, Homo sapien
cctgctggtggtgatcacatagctc

SEQ ID NO: 6087514 - DNA, 25 bp, Homo sapien
agcctctgcaaggagatcttcttac

SEQ ID NO: 6087515 - DNA, 25 bp, Homo sapien
cctctgcaaggagatcttcttactg

SEQ ID NO: 6087516 - DNA, 25 bp, Homo sapien
gctggtggtgatcacatagctcttc

SEQ ID NO: 6087517 - DNA, 25 bp, Homo sapien
caagtagatgggacgttgagtgcat

SEQ ID NO: 6087518 - DNA, 25 bp, Homo sapien
tgctggtggtgatcacatagctctt

SEQ ID NO: 6087519 - DNA, 25 bp, Homo sapien
tctgcaaggagatcttcttactgct

SEQ ID NO: 6087520 - DNA, 25 bp, Homo sapien
agcagcaagtagatgggacgttgag

SEQ ID NO: 6087521 - DNA, 25 bp, Homo sapien
acagaagcactgcagagactttcat

SEQ ID NO: 6087522 - DNA, 25 bp, Homo sapien
gacacctgctggtggtgatcacata

SEQ ID NO: 6087523 - DNA, 25 bp, Homo sapien
tggaagtccacctcgttgtccctgt

SEQ ID NO: 6087524 - DNA, 25 bp, Homo sapien
ctctttgcccgagtacttgtggaag

SEQ ID NO: 6087525 - DNA, 25 bp, Homo sapien
gttgagcttgaacttgtcaccctct

SEQ ID NO: 6087526 - DNA, 25 bp, Homo sapien
caggaagacacagtactcttggaag

SEQ ID NO: 6087527 - DNA, 25 bp, Homo sapien
gagcttgaacttgtcaccctctttg

SEQ ID NO: 6087528 - DNA, 25 bp, Homo sapien
acaggaagacacagtactcttggaa

SEQ ID NO: 6087529 - DNA, 25 bp, Homo sapien
gaagacacagtactcttggaagtcc

SEQ ID NO: 6087530 - DNA, 25 bp, Homo sapien
gaagtccacctcgttgtccctgttg

SEQ ID NO: 6087531 - DNA, 25 bp, Homo sapien
gttgctgtccaagttgctcatcagc

SEQ ID NO: 6087532 - DNA, 25 bp, Homo sapien
tacttgtggaaggtggacaccatca

SEQ ID NO: 6087533 - DNA, 25 bp, Homo sapien
agacacagtactcttggaagtccac

SEQ ID NO: 6087534 - DNA, 25 bp, Homo sapien
cttggaagtccacctcgttgtccct

SEQ ID NO: 6087535 - DNA, 25 bp, Homo sapien
atcttgttacccagaatcacaaaag

SEQ ID NO: 6087536 - DNA, 25 bp, Homo sapien
ttcggaatcgctcctgacctgccgt

SEQ ID NO: 6087537 - DNA, 25 bp, Homo sapien
caaaataaggatagtcgccgttgtc

SEQ ID NO: 6087538 - DNA, 25 bp, Homo sapien
tcttcgaaccgcttcctcaaaggct

SEQ ID NO: 6087539 - DNA, 25 bp, Homo sapien
tatcctcggtagcaagaactcttcg

SEQ ID NO: 6087540 - DNA, 25 bp, Homo sapien
ttgtgaatcatcgacactaaaagta

SEQ ID NO: 6087541 - DNA, 25 bp, Homo sapien
cgttcgcttatgtcaatcttgttac

SEQ ID NO: 6087542 - DNA, 25 bp, Homo sapien
cccaaatctgcatggtaacaaaatg

SEQ ID NO: 6087543 - DNA, 25 bp, Homo sapien
ggctctttcacatctgcataatata

SEQ ID NO: 6087544 - DNA, 25 bp, Homo sapien
ctgtagacacctgccgttcgcttat

SEQ ID NO: 6087545 - DNA, 25 bp, Homo sapien
ctgttcataagtgaactcttcccaa

SEQ ID NO: 6087546 - DNA, 25 bp, Homo sapien
aaatgatctgacctatcctcggtag

SEQ ID NO: 6087547 - DNA, 25 bp, Homo sapien
gaccagcgcaaaaataagacaggca

SEQ ID NO: 6087548 - DNA, 25 bp, Homo sapien
aaagcgtggatagcgtaaatgacca

SEQ ID NO: 6087549 - DNA, 25 bp, Homo sapien
gcacgaggaggccagcgttgcggca

SEQ ID NO: 6087550 - DNA, 25 bp, Homo sapien
cggcaggaaggagcacgaggaggcc

SEQ ID NO: 6087551 - DNA, 25 bp, Homo sapien
taagtggggtaaatcggtgagcaga

SEQ ID NO: 6087552 - DNA, 25 bp, Homo sapien
tcctccagcgatcaccagtatgctt

SEQ ID NO: 6087553 - DNA, 25 bp, Homo sapien
atgcttcctggtaacagaaagaggg

SEQ ID NO: 6087554 - DNA, 25 bp, Homo sapien
gaaggagcacgaggaggccagcgtt

SEQ ID NO: 6087555 - DNA, 25 bp, Homo sapien
agaatatagaggctataaccgaaca

SEQ ID NO: 6087556 - DNA, 25 bp, Homo sapien
gagcagatcgaataaaccgaaagcg

SEQ ID NO: 6087557 - DNA, 25 bp, Homo sapien
aactattcctccagcgatcaccagt

SEQ ID NO: 6087558 - DNA, 25 bp, Homo sapien
cgaacaatccgctctggcgaatgag

SEQ ID NO: 6087559 - DNA, 25 bp, Homo sapien
aacagaaagagggtggcaatgatga

SEQ ID NO: 6087560 - DNA, 25 bp, Homo sapien
ggatagcgtaaatgaccagcgcaaa

SEQ ID NO: 6087561 - DNA, 25 bp, Homo sapien
tctggcgaatgagtgtctgtaagtg

SEQ ID NO: 6087562 - DNA, 25 bp, Homo sapien
cctggtaacagaaagagggtggcaa

SEQ ID NO: 6087563 - DNA, 25 bp, Homo sapien
tagtgtccctaagagcggggcaaaa

SEQ ID NO: 6087564 - DNA, 25 bp, Homo sapien
ggcaaaaactattcctccagcgatc

SEQ ID NO: 6087565 - DNA, 25 bp, Homo sapien
taaaccgaaagcgtggatagcgtaa

SEQ ID NO: 6087566 - DNA, 25 bp, Homo sapien
ccagcgttgcggcaattaatgagag

SEQ ID NO: 6087567 - DNA, 25 bp, Homo sapien
cgtaaatgaccagcgcaaaaataag

SEQ ID NO: 6087568 - DNA, 25 bp, Homo sapien
gggtaaatcggtgagcagatcgaat

SEQ ID NO: 6087569 - DNA, 25 bp, Homo sapien
gagcggggcaaaaactattcctcca

SEQ ID NO: 6087570 - DNA, 25 bp, Homo sapien
aagagggtggcaatgatgaataaca

SEQ ID NO: 6087571 - DNA, 25 bp, Homo sapien
tagaggctataaccgaacaatccgc

SEQ ID NO: 6087572 - DNA, 25 bp, Homo sapien
cgcaaaaataagacaggcaaacaga

SEQ ID NO: 6087573 - DNA, 25 bp, Homo sapien
tataaccgaacaatccgctctggcg

SEQ ID NO: 6087574 - DNA, 25 bp, Homo sapien
aataacagaatatagaggctataac

SEQ ID NO: 6087575 - DNA, 25 bp, Homo sapien
aataagacaggcaaacagaaagtta

SEQ ID NO: 6087576 - DNA, 25 bp, Homo sapien
caccagtatgcttcctggtaacaga

SEQ ID NO: 6087577 - DNA, 25 bp, Homo sapien
atgagagtagtgtccctaagagcgg

SEQ ID NO: 6087578 - DNA, 25 bp, Homo sapien
atcggtgagcagatcgaataaaccg

SEQ ID NO: 6087579 - DNA, 25 bp, Homo sapien
atgatgaataacagaatatagaggc

SEQ ID NO: 6087580 - DNA, 25 bp, Homo sapien
gtggcaatgatgaataacagaatat

SEQ ID NO: 6087581 - DNA, 25 bp, Homo sapien
acaggcaaacagaaagttacgctca

SEQ ID NO: 6087582 - DNA, 25 bp, Homo sapien
atccgctctggcgaatgagtgtctg

SEQ ID NO: 6087583 - DNA, 25 bp, Homo sapien
atcgaataaaccgaaagcgtggata

SEQ ID NO: 6087584 - DNA, 25 bp, Homo sapien
tgtctgtaagtggggtaaatcggtg

SEQ ID NO: 6087585 - DNA, 25 bp, Homo sapien
caattaatgagagtagtgtccctaa

SEQ ID NO: 6087586 - DNA, 25 bp, Homo sapien
aaacagaaagttacgctcagcgttc

SEQ ID NO: 6087587 - DNA, 25 bp, Homo sapien
aggaggccagcgttgcggcaattaa

SEQ ID NO: 6087588 - DNA, 25 bp, Homo sapien
ttgcggcaattaatgagagtagtgt

SEQ ID NO: 6087589 - DNA, 25 bp, Homo sapien
agcgatcaccagtatgcttcctggt

SEQ ID NO: 6087590 - DNA, 25 bp, Homo sapien
aatgagtgtctgtaagtggggtaaa

SEQ ID NO: 6087591 - DNA, 25 bp, Homo sapien
cagggtgtgcacgtcgccctcggct

SEQ ID NO: 6087592 - DNA, 25 bp, Homo sapien
aatcataatcaaagccattgtgggc

SEQ ID NO: 6087593 - DNA, 25 bp, Homo sapien
tacatgggctcgatgtgggcccacc

SEQ ID NO: 6087594 - DNA, 25 bp, Homo sapien
gctcaggccggtgatctcgctggcc

SEQ ID NO: 6087595 - DNA, 25 bp, Homo sapien
tctccagggaggagcggtggacagc

SEQ ID NO: 6087596 - DNA, 25 bp, Homo sapien
tgccgaggctgtaaccctggcggcc

SEQ ID NO: 6087597 - DNA, 25 bp, Homo sapien
tgcgcttggctctgcccggaagtag

SEQ ID NO: 6087598 - DNA, 25 bp, Homo sapien
gcaatactagggcaccagactcgtc

SEQ ID NO: 6087599 - DNA, 25 bp, Homo sapien
caccagactcgtcgtgctccgggtt

SEQ ID NO: 6087600 - DNA, 25 bp, Homo sapien
aagaggctgccgaggctgtaaccct

SEQ ID NO: 6087601 - DNA, 25 bp, Homo sapien
gatctcgctggccttggcagtgaag

SEQ ID NO: 6087602 - DNA, 25 bp, Homo sapien
caagtacatgggctcgatgtgggcc

SEQ ID NO: 6087603 - DNA, 25 bp, Homo sapien
aatcataatcaaagccattgtgggc

SEQ ID NO: 6087604 - DNA, 25 bp, Homo sapien
gctcaggccggtgatctcgctggcc

SEQ ID NO: 6087605 - DNA, 25 bp, Homo sapien
tctccagggaggagcggtggacagc

SEQ ID NO: 6087606 - DNA, 25 bp, Homo sapien
tgccgaggctgtaaccctggcggcc

SEQ ID NO: 6087607 - DNA, 25 bp, Homo sapien
tgcgcttggctctgcccggaagtag

SEQ ID NO: 6087608 - DNA, 25 bp, Homo sapien
tacatgggctcgatgtgggcccacc

SEQ ID NO: 6087609 - DNA, 25 bp, Homo sapien
aagaggctgccgaggctgtaaccct

SEQ ID NO: 6087610 - DNA, 25 bp, Homo sapien
cagggtgtgcacgtcgccctcggct

SEQ ID NO: 6087611 - DNA, 25 bp, Homo sapien
caccagactcgtcgtgctccgggtt

SEQ ID NO: 6087612 - DNA, 25 bp, Homo sapien
gatctcgctggccttggcagtgaag

SEQ ID NO: 6087613 - DNA, 25 bp, Homo sapien
caagtacatgggctcgatgtgggcc

SEQ ID NO: 6087614 - DNA, 25 bp, Homo sapien
gcaatactagggcaccagactcgtc

SEQ ID NO: 6087615 - DNA, 25 bp, Homo sapien
ggagaaactggtagatgtcttcaac

SEQ ID NO: 6087616 - DNA, 25 bp, Homo sapien
tttctaagtctctcacattaatgac

SEQ ID NO: 6087617 - DNA, 25 bp, Homo sapien
ttcatttaggcacatttaatagtcc

SEQ ID NO: 6087618 - DNA, 25 bp, Homo sapien
caagaagaaaagtgtcatactcagc

SEQ ID NO: 6087619 - DNA, 25 bp, Homo sapien
taaaattctatcattcaagcatcaa

SEQ ID NO: 6087620 - DNA, 25 bp, Homo sapien
tatgtagctgacatgcatgcaagaa

SEQ ID NO: 6087621 - DNA, 25 bp, Homo sapien
tcttagtgcaaacatcaaagttgct

SEQ ID NO: 6087622 - DNA, 25 bp, Homo sapien
gtgtcatactcagcattttcaccaa

SEQ ID NO: 6087623 - DNA, 25 bp, Homo sapien
gctggtcactccaaaagactgctaa

SEQ ID NO: 6087624 - DNA, 25 bp, Homo sapien
gaatcctctttcaacctctcttgca

SEQ ID NO: 6087625 - DNA, 25 bp, Homo sapien
gactaaagcctgtttacagtactaa

SEQ ID NO: 6087626 - DNA, 25 bp, Homo sapien
gactgctaaactcataatagaatac

SEQ ID NO: 6087627 - DNA, 25 bp, Homo sapien
tgtccaccgagaagcacatgagaat

SEQ ID NO: 6087628 - DNA, 25 bp, Homo sapien
gtccacctcaatgtcggccacatag

SEQ ID NO: 6087629 - DNA, 25 bp, Homo sapien
acatgagaatgacgtcggtgtccgg

SEQ ID NO: 6087630 - DNA, 25 bp, Homo sapien
cagctctgtgcggacatgctcgtcg

SEQ ID NO: 6087631 - DNA, 25 bp, Homo sapien
tcgtaggcttggatgcgcacggcca

SEQ ID NO: 6087632 - DNA, 25 bp, Homo sapien
gccacatagttctcgaagacggtgg

SEQ ID NO: 6087633 - DNA, 25 bp, Homo sapien
tcttggcagagcactcgaggtagtc

SEQ ID NO: 6087634 - DNA, 25 bp, Homo sapien
tcgcgcacgccttccttggtcttgg

SEQ ID NO: 6087635 - DNA, 25 bp, Homo sapien
catgctcgtcgctgcgcaggtcttt

SEQ ID NO: 6087636 - DNA, 25 bp, Homo sapien
acgggttcctgcttcatgcgggcca

SEQ ID NO: 6087637 - DNA, 25 bp, Homo sapien
gggaactcgtccttactgaacacga

SEQ ID NO: 6087638 - DNA, 25 bp, Homo sapien
ctgggagccgtagcgcttctgcagc

SEQ ID NO: 6087639 - DNA, 25 bp, Homo sapien
caaaatggaagcaggcaacccagag

SEQ ID NO: 6087640 - DNA, 25 bp, Homo sapien
tggtattcagctaagtggacaggct

SEQ ID NO: 6087641 - DNA, 25 bp, Homo sapien
tcagggccctttgtttaacctcatg

SEQ ID NO: 6087642 - DNA, 25 bp, Homo sapien
caacccagagagtcactttagcttc

SEQ ID NO: 6087643 - DNA, 25 bp, Homo sapien
gcagccgctgtcctctaaggtttca

SEQ ID NO: 6087644 - DNA, 25 bp, Homo sapien
gacaggctaggcaaatctactggca

SEQ ID NO: 6087645 - DNA, 25 bp, Homo sapien
tggagggcgcactcaaacttcaggg

SEQ ID NO: 6087646 - DNA, 25 bp, Homo sapien
tatctgtcctgagctccgtaagttt

SEQ ID NO: 6087647 - DNA, 25 bp, Homo sapien
gaccaccaaagaagtgacaaaggga

SEQ ID NO: 6087648 - DNA, 25 bp, Homo sapien
taaggtttcacaaaatggaagcagg

SEQ ID NO: 6087649 - DNA, 25 bp, Homo sapien
cgtaagtttgtaagtggccaccctg

SEQ ID NO: 6087650 - DNA, 25 bp, Homo sapien
gcagattccatctcattatgctgga

SEQ ID NO: 6087651 - DNA, 25 bp, Homo sapien
tttgcagaggaggtcgccgaagttc

SEQ ID NO: 6087652 - DNA, 25 bp, Homo sapien
gcccagatgacgaagatgaccagct

SEQ ID NO: 6087653 - DNA, 25 bp, Homo sapien
gaagtagcgctcgacgctcagcgct

SEQ ID NO: 6087654 - DNA, 25 bp, Homo sapien
tgtcccaagggtcggtgccgttctc

SEQ ID NO: 6087655 - DNA, 25 bp, Homo sapien
cgccgaagttccagggccggtactg

SEQ ID NO: 6087656 - DNA, 25 bp, Homo sapien
actgccagaggcgaacgaggtccag

SEQ ID NO: 6087657 - DNA, 25 bp, Homo sapien
ttccagggccggtactgccagaggc

SEQ ID NO: 6087658 - DNA, 25 bp, Homo sapien
aagcagatggcgaagtagcgctcga

SEQ ID NO: 6087659 - DNA, 25 bp, Homo sapien
cactgacgaattggaagagtttgca

SEQ ID NO: 6087660 - DNA, 25 bp, Homo sapien
tgagcagatcggagaaggccatgct

SEQ ID NO: 6087661 - DNA, 25 bp, Homo sapien
tagaggaccgtgagacagaagacag

SEQ ID NO: 6087662 - DNA, 25 bp, Homo sapien
gtgcagctctcactgacgaattgga

SEQ ID NO: 6087663 - DNA, 25 bp, Homo sapien
tgcggcttgagctccacgtgatagg

SEQ ID NO: 6087664 - DNA, 25 bp, Homo sapien
ggcagccagcagacggcgaacacca

SEQ ID NO: 6087665 - DNA, 25 bp, Homo sapien
ctgtcgtgcagccaggcgtagatga

SEQ ID NO: 6087666 - DNA, 25 bp, Homo sapien
cacccggacgtaagacaggaggatg

SEQ ID NO: 6087667 - DNA, 25 bp, Homo sapien
ggcaccacgcggttgcggagcttca

SEQ ID NO: 6087668 - DNA, 25 bp, Homo sapien
ttgtagcaggccgaactcatggcga

SEQ ID NO: 6087669 - DNA, 25 bp, Homo sapien
gggccaagcgaccaacagtttgcgc

SEQ ID NO: 6087670 - DNA, 25 bp, Homo sapien
agatgcgccgcctcagcgggtgcac

SEQ ID NO: 6087671 - DNA, 25 bp, Homo sapien
gaccaacagtttgcgcagctcctcg

SEQ ID NO: 6087672 - DNA, 25 bp, Homo sapien
ctccacgtgataggtgtgcacggcg

SEQ ID NO: 6087673 - DNA, 25 bp, Homo sapien
gttgcggagcttcactgacacccgg

SEQ ID NO: 6087674 - DNA, 25 bp, Homo sapien
aactcatggcgagccagtggcagag

SEQ ID NO: 6087675 - DNA, 25 bp, Homo sapien
ctggggtcgggagtgcgtatgcaaa

SEQ ID NO: 6087676 - DNA, 25 bp, Homo sapien
gggcgtggttggcagatctcccagg

SEQ ID NO: 6087677 - DNA, 25 bp, Homo sapien
tcgggagtgcgtatgcaaatgacgt

SEQ ID NO: 6087678 - DNA, 25 bp, Homo sapien
cgtatgcaaatgacgtgggcgtggt

SEQ ID NO: 6087679 - DNA, 25 bp, Homo sapien
gagacgcgggcggagggccgcaccc

SEQ ID NO: 6087680 - DNA, 25 bp, Homo sapien
tgacgtgggcgtggttggcagatct

SEQ ID NO: 6087681 - DNA, 25 bp, Homo sapien
aatgacgtgggcgtggttggcagat

SEQ ID NO: 6087682 - DNA, 25 bp, Homo sapien
ggtcgggagtgcgtatgcaaatgac

SEQ ID NO: 6087683 - DNA, 25 bp, Homo sapien
ccagacgccgccgtcgggaggcaga

SEQ ID NO: 6087684 - DNA, 25 bp, Homo sapien
tgcaaatgacgtgggcgtggttggc

SEQ ID NO: 6087685 - DNA, 25 bp, Homo sapien
cgggggcaccgagacgcgggcggag

SEQ ID NO: 6087686 - DNA, 25 bp, Homo sapien
acgtgggcgtggttggcagatctcc

SEQ ID NO: 6087687 - DNA, 25 bp, Homo sapien
ctcaacacacagaatgcagggatta

SEQ ID NO: 6087688 - DNA, 25 bp, Homo sapien
cagatgggttgatataagccagggc

SEQ ID NO: 6087689 - DNA, 25 bp, Homo sapien
cagaatgcagggattatcataggtt

SEQ ID NO: 6087690 - DNA, 25 bp, Homo sapien
ggttgaccgttccattgtaccagct

SEQ ID NO: 6087691 - DNA, 25 bp, Homo sapien
tataaaattggtgccgcagatgggt

SEQ ID NO: 6087692 - DNA, 25 bp, Homo sapien
ttaataattccacgtggtggccacc

SEQ ID NO: 6087693 - DNA, 25 bp, Homo sapien
tgccgcagatgggttgatataagcc

SEQ ID NO: 6087694 - DNA, 25 bp, Homo sapien
ccagggcaggggttgaccgttccat

SEQ ID NO: 6087695 - DNA, 25 bp, Homo sapien
caagataaaggacaaaagtgagaat

SEQ ID NO: 6087696 - DNA, 25 bp, Homo sapien
gaagataacaccaaatgtatcaaga

SEQ ID NO: 6087697 - DNA, 25 bp, Homo sapien
ggttataaaattggtgccgcagatg

SEQ ID NO: 6087698 - DNA, 25 bp, Homo sapien
gtttactttctcatatggacatttc

SEQ ID NO: 6087699 - DNA, 25 bp, Homo sapien
tggtcctcccttgcagagaagcgag

SEQ ID NO: 6087700 - DNA, 25 bp, Homo sapien
ggtcctcccttgcagagaagcgagt

SEQ ID NO: 6087701 - DNA, 25 bp, Homo sapien
gaagtagcagtgtatgtgatctgtc

SEQ ID NO: 6087702 - DNA, 25 bp, Homo sapien
tcatccacattgcagtgatccctgc

SEQ ID NO: 6087703 - DNA, 25 bp, Homo sapien
ttcttggcaggttttagcatttctt

SEQ ID NO: 6087704 - DNA, 25 bp, Homo sapien
tggtattagcaaaaaagctagtgct

SEQ ID NO: 6087705 - DNA, 25 bp, Homo sapien
ttttagcatttcttggacgtcttca

SEQ ID NO: 6087706 - DNA, 25 bp, Homo sapien
tcttggacgtcttcattaagtacat

SEQ ID NO: 6087707 - DNA, 25 bp, Homo sapien
tactcttggtagaagtagcagtgta

SEQ ID NO: 6087708 - DNA, 25 bp, Homo sapien
ctccagtgatggtgttggcagtatg

SEQ ID NO: 6087709 - DNA, 25 bp, Homo sapien
gaatgatgacaaagttggtattagc

SEQ ID NO: 6087710 - DNA, 25 bp, Homo sapien
caaacccattaaacagcgtctcaag

SEQ ID NO: 6087711 - DNA, 25 bp, Homo sapien
tcacagcactagaattcttggcagg

SEQ ID NO: 6087712 - DNA, 25 bp, Homo sapien
ctttggtgttactcttggtagaagt

SEQ ID NO: 6087713 - DNA, 25 bp, Homo sapien
tcattttggcgaattactggaagat

SEQ ID NO: 6087714 - DNA, 25 bp, Homo sapien
gttcgtcattttggcgaattactgg

SEQ ID NO: 6087715 - DNA, 25 bp, Homo sapien
cgtcattttggcgaattactggaag

SEQ ID NO: 6087716 - DNA, 25 bp, Homo sapien
tgttcgtcattttggcgaattactg

SEQ ID NO: 6087717 - DNA, 25 bp, Homo sapien
tcgtcattttggcgaattactggaa

SEQ ID NO: 6087718 - DNA, 25 bp, Homo sapien
tggcgaattactggaagatggcggt

SEQ ID NO: 6087719 - DNA, 25 bp, Homo sapien
ttttggcgaattactggaagatggc

SEQ ID NO: 6087720 - DNA, 25 bp, Homo sapien
tttggcgaattactggaagatggcg

SEQ ID NO: 6087721 - DNA, 25 bp, Homo sapien
gtgttcgtcattttggcgaattact

SEQ ID NO: 6087722 - DNA, 25 bp, Homo sapien
ttggcgaattactggaagatggcgg

SEQ ID NO: 6087723 - DNA, 25 bp, Homo sapien
attttggcgaattactggaagatgg

SEQ ID NO: 6087724 - DNA, 25 bp, Homo sapien
ttttaacacctattatgccatgaat

SEQ ID NO: 6087725 - DNA, 25 bp, Homo sapien
gcaggcaatagaagctaagtcagat

SEQ ID NO: 6087726 - DNA, 25 bp, Homo sapien
gaaactggacatctacctttgccca

SEQ ID NO: 6087727 - DNA, 25 bp, Homo sapien
gagcggtggtatgtgattgcctaaa

SEQ ID NO: 6087728 - DNA, 25 bp, Homo sapien
cctttgcccaaaagtgtacctctga

SEQ ID NO: 6087729 - DNA, 25 bp, Homo sapien
caaaagtgtacctctgagagcctac

SEQ ID NO: 6087730 - DNA, 25 bp, Homo sapien
gtttattcttatgtctcttcccttc

SEQ ID NO: 6087731 - DNA, 25 bp, Homo sapien
tatgtgattgcctaaaagttggaaa

SEQ ID NO: 6087732 - DNA, 25 bp, Homo sapien
gctcagaatcactggcaggcaatag

SEQ ID NO: 6087733 - DNA, 25 bp, Homo sapien
caagcaagcaggcattaagctcaga

SEQ ID NO: 6087734 - DNA, 25 bp, Homo sapien
tcacttatggagtaatataaggctg

SEQ ID NO: 6087735 - DNA, 25 bp, Homo sapien
ttaaaaaatagagagcggtggtatg

SEQ ID NO: 6087736 - DNA, 25 bp, Homo sapien
tgagagcctacttgtaactcaagtg

SEQ ID NO: 6087737 - DNA, 25 bp, Homo sapien
cgttgccggctcgaagacttgggtt

SEQ ID NO: 6087738 - DNA, 25 bp, Homo sapien
gctcgaagacttgggtttatatccc

SEQ ID NO: 6087739 - DNA, 25 bp, Homo sapien
tggtgtcccaggcagcagaggagtg

SEQ ID NO: 6087740 - DNA, 25 bp, Homo sapien
catttcctggggtaaagcgaagtct

SEQ ID NO: 6087741 - DNA, 25 bp, Homo sapien
gattaatgaagagaaggatctcatg

SEQ ID NO: 6087742 - DNA, 25 bp, Homo sapien
agcacgtggttctgagacaggtcac

SEQ ID NO: 6087743 - DNA, 25 bp, Homo sapien
cagcaccagggccatgagtagagag

SEQ ID NO: 6087744 - DNA, 25 bp, Homo sapien
ggagggtggtgtcccaggcagcaga

SEQ ID NO: 6087745 - DNA, 25 bp, Homo sapien
gccctggaagtacctcttcagagcc

SEQ ID NO: 6087746 - DNA, 25 bp, Homo sapien
tggggcccgtccttcccagggcaga

SEQ ID NO: 6087747 - DNA, 25 bp, Homo sapien
tcccagggcagagtcttcctctccc

SEQ ID NO: 6087748 - DNA, 25 bp, Homo sapien
gcccgtccttcccagggcagagtct

SEQ ID NO: 6087749 - DNA, 25 bp, Homo sapien
ctcctgggccgtagctgaccagcac

SEQ ID NO: 6087750 - DNA, 25 bp, Homo sapien
cctcttcagagccagggtggggccc

SEQ ID NO: 6087751 - DNA, 25 bp, Homo sapien
gtcgctgtatcccttctctttcagg

SEQ ID NO: 6087752 - DNA, 25 bp, Homo sapien
gtaaagcgaagtcttttctgtcctg

SEQ ID NO: 6087753 - DNA, 25 bp, Homo sapien
tgagacaggtcacaacccagggatc

SEQ ID NO: 6087754 - DNA, 25 bp, Homo sapien
tctcatgatttccagtctgacggtt

SEQ ID NO: 6087755 - DNA, 25 bp, Homo sapien
gaggagtgctctgtgtggaagaggt

SEQ ID NO: 6087756 - DNA, 25 bp, Homo sapien
atctcatggagcacagagatggcct

SEQ ID NO: 6087757 - DNA, 25 bp, Homo sapien
catgagtagagagagcacgaaggcc

SEQ ID NO: 6087758 - DNA, 25 bp, Homo sapien
cagacaaaagtgaggggagagtctc

SEQ ID NO: 6087759 - DNA, 25 bp, Homo sapien
gtagacatggatgccctggaagtac

SEQ ID NO: 6087760 - DNA, 25 bp, Homo sapien
tggttctgagacaggtcacaaccca

SEQ ID NO: 6087761 - DNA, 25 bp, Homo sapien
taacctttcttgcaagctgattaat

SEQ ID NO: 6087762 - DNA, 25 bp, Homo sapien
ctggggtaaagcgaagtcttttctg

SEQ ID NO: 6087763 - DNA, 25 bp, Homo sapien
tgtcctgcagacaaaagtgagggga

SEQ ID NO: 6087764 - DNA, 25 bp, Homo sapien
tggagcacagagatggcctgggcct

SEQ ID NO: 6087765 - DNA, 25 bp, Homo sapien
tttcgtccaggagcctgaggttctt

SEQ ID NO: 6087766 - DNA, 25 bp, Homo sapien
gcagcagaggagtgctctgtgtgga

SEQ ID NO: 6087767 - DNA, 25 bp, Homo sapien
tccaggttgtccagctgctgatgga

SEQ ID NO: 6087768 - DNA, 25 bp, Homo sapien
cgaagtcttttctgtcctgcagaca

SEQ ID NO: 6087769 - DNA, 25 bp, Homo sapien
ctctcccatcacctgccccaggcag

SEQ ID NO: 6087770 - DNA, 25 bp, Homo sapien
gctccaggagggtggtgtcccaggc

SEQ ID NO: 6087771 - DNA, 25 bp, Homo sapien
gtcttcctctcccatcacctgcccc

SEQ ID NO: 6087772 - DNA, 25 bp, Homo sapien
caagctgattaatgaagagaaggat

SEQ ID NO: 6087773 - DNA, 25 bp, Homo sapien
tggccgccctccaccatttcctggg

SEQ ID NO: 6087774 - DNA, 25 bp, Homo sapien
tgatggagtccagtgcggcatggct

SEQ ID NO: 6087775 - DNA, 25 bp, Homo sapien
atggatgccctggaagtacctcttc

SEQ ID NO: 6087776 - DNA, 25 bp, Homo sapien
ccagggccatgagtagagagagcac

SEQ ID NO: 6087777 - DNA, 25 bp, Homo sapien
tcccaggcagcagaggagtgctctg

SEQ ID NO: 6087778 - DNA, 25 bp, Homo sapien
ccaggagcctgaggttcttcctgcc

SEQ ID NO: 6087779 - DNA, 25 bp, Homo sapien
ttgaagctctgctggagcatctcat

SEQ ID NO: 6087780 - DNA, 25 bp, Homo sapien
gaaggatctcatgatttccagtctg

SEQ ID NO: 6087781 - DNA, 25 bp, Homo sapien
gatttccagtctgacggtttcccag

SEQ ID NO: 6087782 - DNA, 25 bp, Homo sapien
agtgcggcatggctccaggagggtg

SEQ ID NO: 6087783 - DNA, 25 bp, Homo sapien
cttctctttcaggtagacatggatg

SEQ ID NO: 6087784 - DNA, 25 bp, Homo sapien
cagagccagggtggggcccgtcctt

SEQ ID NO: 6087785 - DNA, 25 bp, Homo sapien
gaggggagagtctcctcatttcgtc

SEQ ID NO: 6087786 - DNA, 25 bp, Homo sapien
tgacggtttcccaggcgcagtcgct

SEQ ID NO: 6087787 - DNA, 25 bp, Homo sapien
aagaggttgaagctctgctggagca

SEQ ID NO: 6087788 - DNA, 25 bp, Homo sapien
tttcaggtagacatggatgccctgg

SEQ ID NO: 6087789 - DNA, 25 bp, Homo sapien
gctgaccagcaccagggccatgagt

SEQ ID NO: 6087790 - DNA, 25 bp, Homo sapien
ggttcttcctgccaaccagcacgtg

SEQ ID NO: 6087791 - DNA, 25 bp, Homo sapien
ccaaccagcacgtggttctgagaca

SEQ ID NO: 6087792 - DNA, 25 bp, Homo sapien
gtccttcccagggcagagtcttcct

SEQ ID NO: 6087793 - DNA, 25 bp, Homo sapien
gcctcctggagctggccgccctcca

SEQ ID NO: 6087794 - DNA, 25 bp, Homo sapien
agagtctcctcatttcgtccaggag

SEQ ID NO: 6087795 - DNA, 25 bp, Homo sapien
ggccgtagctgaccagcaccagggc

SEQ ID NO: 6087796 - DNA, 25 bp, Homo sapien
cagtctgacggtttcccaggcgcag

SEQ ID NO: 6087797 - DNA, 25 bp, Homo sapien
ctctgctggagcatctcatggagca

SEQ ID NO: 6087798 - DNA, 25 bp, Homo sapien
gtatcccttctctttcaggtagaca

SEQ ID NO: 6087799 - DNA, 25 bp, Homo sapien
tgctctgtgtggaagaggttgaagc

SEQ ID NO: 6087800 - DNA, 25 bp, Homo sapien
ctccaccatttcctggggtaaagcg

SEQ ID NO: 6087801 - DNA, 25 bp, Homo sapien
ctgccccaggcaggcatccaggttg

SEQ ID NO: 6087802 - DNA, 25 bp, Homo sapien
tggagctggccgccctccaccattt

SEQ ID NO: 6087803 - DNA, 25 bp, Homo sapien
caacccagggatcctcctgggccgt

SEQ ID NO: 6087804 - DNA, 25 bp, Homo sapien
cccaggcaggcatccaggttgtcca

SEQ ID NO: 6087805 - DNA, 25 bp, Homo sapien
ggcatggctccaggagggtggtgtc

SEQ ID NO: 6087806 - DNA, 25 bp, Homo sapien
tggagcatctcatggagcacagaga

SEQ ID NO: 6087807 - DNA, 25 bp, Homo sapien
ttcctgccaaccagcacgtggttct

SEQ ID NO: 6087808 - DNA, 25 bp, Homo sapien
ggcctgggcctcctggagctggccg

SEQ ID NO: 6087809 - DNA, 25 bp, Homo sapien
tttcccaggcgcagtcgctgtatcc

SEQ ID NO: 6087810 - DNA, 25 bp, Homo sapien
gaagtacctcttcagagccagggtg

SEQ ID NO: 6087811 - DNA, 25 bp, Homo sapien
ttgtccagctgctgatggagtccag

SEQ ID NO: 6087812 - DNA, 25 bp, Homo sapien
catcacctgccccaggcaggcatcc

SEQ ID NO: 6087813 - DNA, 25 bp, Homo sapien
caggcatccaggttgtccagctgct

SEQ ID NO: 6087814 - DNA, 25 bp, Homo sapien
aggtcacaacccagggatcctcctg

SEQ ID NO: 6087815 - DNA, 25 bp, Homo sapien
ggcagagtcttcctctcccatcacc

SEQ ID NO: 6087816 - DNA, 25 bp, Homo sapien
agggatcctcctgggccgtagctga

SEQ ID NO: 6087817 - DNA, 25 bp, Homo sapien
gcctgaggttcttcctgccaaccag

SEQ ID NO: 6087818 - DNA, 25 bp, Homo sapien
tgaagagaaggatctcatgatttcc

SEQ ID NO: 6087819 - DNA, 25 bp, Homo sapien
ggcgcagtcgctgtatcccttctct

SEQ ID NO: 6087820 - DNA, 25 bp, Homo sapien
gtgtggaagaggttgaagctctgct

SEQ ID NO: 6087821 - DNA, 25 bp, Homo sapien
acagagatggcctgggcctcctgga

SEQ ID NO: 6087822 - DNA, 25 bp, Homo sapien
cttttctgtcctgcagacaaaagtg

SEQ ID NO: 6087823 - DNA, 25 bp, Homo sapien
tcctcatttcgtccaggagcctgag

SEQ ID NO: 6087824 - DNA, 25 bp, Homo sapien
agctgctgatggagtccagtgcggc

SEQ ID NO: 6087825 - DNA, 25 bp, Homo sapien
aaaagtgaggggagagtctcctcat

SEQ ID NO: 6087826 - DNA, 25 bp, Homo sapien
ttcttgcaagctgattaatgaagag

SEQ ID NO: 6087827 - DNA, 25 bp, Homo sapien
agtccagtgcggcatggctccagga

SEQ ID NO: 6087828 - DNA, 25 bp, Homo sapien
ccctgaatgtcaatagaccctgaga

SEQ ID NO: 6087829 - DNA, 25 bp, Homo sapien
ttggccgggctggtctcgatcgcct

SEQ ID NO: 6087830 - DNA, 25 bp, Homo sapien
cacgtccctgtatagagtcctctga

SEQ ID NO: 6087831 - DNA, 25 bp, Homo sapien
ataattaggtatggtggttggcacc

SEQ ID NO: 6087832 - DNA, 25 bp, Homo sapien
caatagaccctgagaaaaagccatc

SEQ ID NO: 6087833 - DNA, 25 bp, Homo sapien
acagcaagaccccagggagaccagg

SEQ ID NO: 6087834 - DNA, 25 bp, Homo sapien
aatttcaacaacacagcaagacccc

SEQ ID NO: 6087835 - DNA, 25 bp, Homo sapien
cttgggagactgaggaggatctctt

SEQ ID NO: 6087836 - DNA, 25 bp, Homo sapien
gattcccaggttcatgtgatcctcc

SEQ ID NO: 6087837 - DNA, 25 bp, Homo sapien
aagcccggccacacatatgcaaaaa

SEQ ID NO: 6087838 - DNA, 25 bp, Homo sapien
tgagctcaggagatcaagatgaatt

SEQ ID NO: 6087839 - DNA, 25 bp, Homo sapien
actctgtcaccaggcagatgtgcag

SEQ ID NO: 6087840 - DNA, 25 bp, Homo sapien
aaaggatccagaatactcaacaaag

SEQ ID NO: 6087841 - DNA, 25 bp, Homo sapien
gacccacggaatgtaactgagagaa

SEQ ID NO: 6087842 - DNA, 25 bp, Homo sapien
ccaagtacctgggatcacaagcatg

SEQ ID NO: 6087843 - DNA, 25 bp, Homo sapien
tattgctaaaatggccataccacca

SEQ ID NO: 6087844 - DNA, 25 bp, Homo sapien
tcacaagcatgtgccaacacatctg

SEQ ID NO: 6087845 - DNA, 25 bp, Homo sapien
taaggagaggcatatagacccacgg

SEQ ID NO: 6087846 - DNA, 25 bp, Homo sapien
tacagtactagcataaggagaggca

SEQ ID NO: 6087847 - DNA, 25 bp, Homo sapien
tacaggtgtaatgcaatagctatca

SEQ ID NO: 6087848 - DNA, 25 bp, Homo sapien
ggttcaatctcagctcactacaaca

SEQ ID NO: 6087849 - DNA, 25 bp, Homo sapien
taccaccaaattgatctacaggtgt

SEQ ID NO: 6087850 - DNA, 25 bp, Homo sapien
gccaccatgcctgggtaagaattaa

SEQ ID NO: 6087851 - DNA, 25 bp, Homo sapien
agactgagtcttgctatcacccagg

SEQ ID NO: 6087852 - DNA, 25 bp, Homo sapien
tcgtcttccacctcatggttatcat

SEQ ID NO: 6087853 - DNA, 25 bp, Homo sapien
cgtcttccacctcatggttatcatt

SEQ ID NO: 6087854 - DNA, 25 bp, Homo sapien
ctcgtcttccacctcatggttatca

SEQ ID NO: 6087855 - DNA, 25 bp, Homo sapien
tcccagatgatctcgtcttccacct

SEQ ID NO: 6087856 - DNA, 25 bp, Homo sapien
aacagccgctgtatcctaaggaacc

SEQ ID NO: 6087857 - DNA, 25 bp, Homo sapien
ggaacagccgctgtatcctaaggaa

SEQ ID NO: 6087858 - DNA, 25 bp, Homo sapien
gaacagccgctgtatcctaaggaac

SEQ ID NO: 6087859 - DNA, 25 bp, Homo sapien
gtcttccacctcatggttatcattc

SEQ ID NO: 6087860 - DNA, 25 bp, Homo sapien
ctcccagatgatctcgtcttccacc

SEQ ID NO: 6087861 - DNA, 25 bp, Homo sapien
tcctcccagatgatctcgtcttcca

SEQ ID NO: 6087862 - DNA, 25 bp, Homo sapien
cctcccagatgatctcgtcttccac

SEQ ID NO: 6087863 - DNA, 25 bp, Homo sapien
gggaacagccgctgtatcctaagga

SEQ ID NO: 6087864 - DNA, 25 bp, Homo sapien
tgctgggaccacagacgtgggccat

SEQ ID NO: 6087865 - DNA, 25 bp, Homo sapien
ggcgtgagccactacgctcagctaa

SEQ ID NO: 6087866 - DNA, 25 bp, Homo sapien
tgcaggctgcataagctattatcca

SEQ ID NO: 6087867 - DNA, 25 bp, Homo sapien
attcacatgtccaacgcccagctgg

SEQ ID NO: 6087868 - DNA, 25 bp, Homo sapien
ttttaaaggtaagagtgcaggctgc

SEQ ID NO: 6087869 - DNA, 25 bp, Homo sapien
gacctcggtagatctgcctgtctcg

SEQ ID NO: 6087870 - DNA, 25 bp, Homo sapien
cagactcataagtagctgggaccac

SEQ ID NO: 6087871 - DNA, 25 bp, Homo sapien
catgtcgttacataccaggcgggca

SEQ ID NO: 6087872 - DNA, 25 bp, Homo sapien
tacctaggcgagagggagactgaac

SEQ ID NO: 6087873 - DNA, 25 bp, Homo sapien
tcagagcctcagagaaaccacacag

SEQ ID NO: 6087874 - DNA, 25 bp, Homo sapien
gtcccggagcatgcctcagactcat

SEQ ID NO: 6087875 - DNA, 25 bp, Homo sapien
tttcccggctttgacctgcatggtg

SEQ ID NO: 6087876 - DNA, 25 bp, Homo sapien
tctgtcaattttacaaaggcctacc

SEQ ID NO: 6087877 - DNA, 25 bp, Homo sapien
ttcctcggccatggcggtgggttac

SEQ ID NO: 6087878 - DNA, 25 bp, Homo sapien
tgtcaattttacaaaggcctaccca

SEQ ID NO: 6087879 - DNA, 25 bp, Homo sapien
tgggttacgggtgaagctgaatctt

SEQ ID NO: 6087880 - DNA, 25 bp, Homo sapien
gggcagtcttcagaacctcttgtaa

SEQ ID NO: 6087881 - DNA, 25 bp, Homo sapien
tacgggtgaagctgaatcttgaacg

SEQ ID NO: 6087882 - DNA, 25 bp, Homo sapien
tacaaaggcctacccattctcctag

SEQ ID NO: 6087883 - DNA, 25 bp, Homo sapien
gctgaatcttgaacgcacccaagcc

SEQ ID NO: 6087884 - DNA, 25 bp, Homo sapien
tttttgtgagccaaagatttatttc

SEQ ID NO: 6087885 - DNA, 25 bp, Homo sapien
ttgtgagccaaagatttatttcttc

SEQ ID NO: 6087886 - DNA, 25 bp, Homo sapien
caaaggcctacccattctcctagtt

SEQ ID NO: 6087887 - DNA, 25 bp, Homo sapien
gtgaagctgaatcttgaacgcaccc

SEQ ID NO: 6087888 - DNA, 25 bp, Homo sapien
tcacatcgatcaggacggtgctgtc

SEQ ID NO: 6087889 - DNA, 25 bp, Homo sapien
tgacagcctccacgtacctggtcta

SEQ ID NO: 6087890 - DNA, 25 bp, Homo sapien
tgtcctgctgcctgtctagcttcag

SEQ ID NO: 6087891 - DNA, 25 bp, Homo sapien
gattatccagaaaagtctcccgcca

SEQ ID NO: 6087892 - DNA, 25 bp, Homo sapien
agagttttcaggtgaccctgagggc

SEQ ID NO: 6087893 - DNA, 25 bp, Homo sapien
ccacacggaggagctcacggtggct

SEQ ID NO: 6087894 - DNA, 25 bp, Homo sapien
gcccagccgcacgaagattatccag

SEQ ID NO: 6087895 - DNA, 25 bp, Homo sapien
aagctttaatgttggagacgggaca

SEQ ID NO: 6087896 - DNA, 25 bp, Homo sapien
gagggatcaatgtttacctccgcct

SEQ ID NO: 6087897 - DNA, 25 bp, Homo sapien
ctcatgcggcaaggtcatgggtcac

SEQ ID NO: 6087898 - DNA, 25 bp, Homo sapien
cgtgggctgtgctcccgtaagagcc

SEQ ID NO: 6087899 - DNA, 25 bp, Homo sapien
agtctcccgccaggtcctgtgcatg

SEQ ID NO: 6087900 - DNA, 25 bp, Homo sapien
atatcgcctcctttagcggtcattg

SEQ ID NO: 6087901 - DNA, 25 bp, Homo sapien
tatcgcctcctttagcggtcattgc

SEQ ID NO: 6087902 - DNA, 25 bp, Homo sapien
gatatcgcctcctttagcggtcatt

SEQ ID NO: 6087903 - DNA, 25 bp, Homo sapien
tcgcctcctttagcggtcattgcct

SEQ ID NO: 6087904 - DNA, 25 bp, Homo sapien
agatatcgcctcctttagcggtcat

SEQ ID NO: 6087905 - DNA, 25 bp, Homo sapien
atcgcctcctttagcggtcattgcc

SEQ ID NO: 6087906 - DNA, 25 bp, Homo sapien
tcggtatcgtccatcagggtagagc

SEQ ID NO: 6087907 - DNA, 25 bp, Homo sapien
taagggcagccaggcgtgctgcttc

SEQ ID NO: 6087908 - DNA, 25 bp, Homo sapien
tacactaagcgccagaaactggagt

SEQ ID NO: 6087909 - DNA, 25 bp, Homo sapien
ggcgtgctgcttctcgtccaaatac

SEQ ID NO: 6087910 - DNA, 25 bp, Homo sapien
tgaggatcggtatcgtccatcaggg

SEQ ID NO: 6087911 - DNA, 25 bp, Homo sapien
ataggcctccccaggacgacgtctt

SEQ ID NO: 6087912 - DNA, 25 bp, Homo sapien
ctggagtctgaggatcggtatcgtc

SEQ ID NO: 6087913 - DNA, 25 bp, Homo sapien
gacgcaagagcacccgtaactgtaa

SEQ ID NO: 6087914 - DNA, 25 bp, Homo sapien
caggcggtccgggtggtcggtgact

SEQ ID NO: 6087915 - DNA, 25 bp, Homo sapien
gagcacccgtaactgtaacctatcc

SEQ ID NO: 6087916 - DNA, 25 bp, Homo sapien
tccaaatacacgaacttctcccagg

SEQ ID NO: 6087917 - DNA, 25 bp, Homo sapien
gatgtggtacactaagcgccagaaa

SEQ ID NO: 6087918 - DNA, 25 bp, Homo sapien
ccggatatggaagccatctttgcca

SEQ ID NO: 6087919 - DNA, 25 bp, Homo sapien
gctcactccgagtcttttccagatc

SEQ ID NO: 6087920 - DNA, 25 bp, Homo sapien
agccacgaatgcaaccacatcggga

SEQ ID NO: 6087921 - DNA, 25 bp, Homo sapien
cttcgatcggaggtgttccttctct

SEQ ID NO: 6087922 - DNA, 25 bp, Homo sapien
aatgcaaccacatcgggagcctcct

SEQ ID NO: 6087923 - DNA, 25 bp, Homo sapien
gatcttgatctcactcgtgcactca

SEQ ID NO: 6087924 - DNA, 25 bp, Homo sapien
ccacgaatgcaaccacatcgggagc

SEQ ID NO: 6087925 - DNA, 25 bp, Homo sapien
acgaatgcaaccacatcgggagcct

SEQ ID NO: 6087926 - DNA, 25 bp, Homo sapien
gttcctcttgctgagattcaccggg

SEQ ID NO: 6087927 - DNA, 25 bp, Homo sapien
cgaatgcaaccacatcgggagcctc

SEQ ID NO: 6087928 - DNA, 25 bp, Homo sapien
acgctcactccgagtcttttccaga

SEQ ID NO: 6087929 - DNA, 25 bp, Homo sapien
agagccatctccacgctcactccga

SEQ ID NO: 6087930 - DNA, 25 bp, Homo sapien
gccacgaatgcaaccacatcgggag

SEQ ID NO: 6087931 - DNA, 25 bp, Homo sapien
gctggtagagcaagtcataggtctc

SEQ ID NO: 6087932 - DNA, 25 bp, Homo sapien
gcattgcccttgatccaacccttgg

SEQ ID NO: 6087933 - DNA, 25 bp, Homo sapien
taggtctcgtctttgacgtcacaga

SEQ ID NO: 6087934 - DNA, 25 bp, Homo sapien
taggaagcccactcgaagcttctgg

SEQ ID NO: 6087935 - DNA, 25 bp, Homo sapien
agctgcttagcaggagggctcaccc

SEQ ID NO: 6087936 - DNA, 25 bp, Homo sapien
gaagtggagtcgttggcccctcgac

SEQ ID NO: 6087937 - DNA, 25 bp, Homo sapien
taaccagagaagtgaattctgcccc

SEQ ID NO: 6087938 - DNA, 25 bp, Homo sapien
gaagcttctgggttcctttcacata

SEQ ID NO: 6087939 - DNA, 25 bp, Homo sapien
tgagaggagtgattctgacagccac

SEQ ID NO: 6087940 - DNA, 25 bp, Homo sapien
caacccttgggcacatgggtgcgtt

SEQ ID NO: 6087941 - DNA, 25 bp, Homo sapien
caaattgcctggtcggtcattgtca

SEQ ID NO: 6087942 - DNA, 25 bp, Homo sapien
tgacagccacgttgaaatcctgtgg

SEQ ID NO: 6087943 - DNA, 25 bp, Homo sapien
aaattatgaggacagatggaatcac

SEQ ID NO: 6087944 - DNA, 25 bp, Homo sapien
taggcattgcttcggtaacatttca

SEQ ID NO: 6087945 - DNA, 25 bp, Homo sapien
tcatccctctccgaaaattggcatt

SEQ ID NO: 6087946 - DNA, 25 bp, Homo sapien
ggaggaaatagttacaatgactgtc

SEQ ID NO: 6087947 - DNA, 25 bp, Homo sapien
catagctgagctacatgaaaaggca

SEQ ID NO: 6087948 - DNA, 25 bp, Homo sapien
gagtctttggtaatagttttggcca

SEQ ID NO: 6087949 - DNA, 25 bp, Homo sapien
tgatagctgtgaaaacaagggaact

SEQ ID NO: 6087950 - DNA, 25 bp, Homo sapien
cagatggaatcacaaagcccaccaa

SEQ ID NO: 6087951 - DNA, 25 bp, Homo sapien
ggtaacatttcatagaggacatgca

SEQ ID NO: 6087952 - DNA, 25 bp, Homo sapien
tctgtcaaatgagtcatagatcgag

SEQ ID NO: 6087953 - DNA, 25 bp, Homo sapien
ggatgacagtgtaggcagtgccttc

SEQ ID NO: 6087954 - DNA, 25 bp, Homo sapien
tacagagtaggtttagaggctgaag

SEQ ID NO: 6087955 - DNA, 25 bp, Homo sapien
aggcgttgcgaatcacatcctcggg

SEQ ID NO: 6087956 - DNA, 25 bp, Homo sapien
tcccggtacatctcgtccacttcct

SEQ ID NO: 6087957 - DNA, 25 bp, Homo sapien
tctgggactggtcaaacattgcgaa

SEQ ID NO: 6087958 - DNA, 25 bp, Homo sapien
tcctcggggtccgtgccgttcagct

SEQ ID NO: 6087959 - DNA, 25 bp, Homo sapien
gatgtggcccgctgtggccgcttct

SEQ ID NO: 6087960 - DNA, 25 bp, Homo sapien
tcaaacattgcgaagacattggatg

SEQ ID NO: 6087961 - DNA, 25 bp, Homo sapien
cgaggccagcatgtcgtgcaggtcc

SEQ ID NO: 6087962 - DNA, 25 bp, Homo sapien
tgaggcttcctcgtcgaagcaggca

SEQ ID NO: 6087963 - DNA, 25 bp, Homo sapien
caggcaaaggcgttgcgaatcacat

SEQ ID NO: 6087964 - DNA, 25 bp, Homo sapien
tcctcgtcgaagcaggcaaaggcgt

SEQ ID NO: 6087965 - DNA, 25 bp, Homo sapien
ccagcatgtcgtgcaggtcctcctt

SEQ ID NO: 6087966 - DNA, 25 bp, Homo sapien
ccgctgtggccgcttcttggtggtc

SEQ ID NO: 6087967 - DNA, 25 bp, Homo sapien
ataggaacttgtcccaggcggcgtg

SEQ ID NO: 6087968 - DNA, 25 bp, Homo sapien
aagttgaccgggtccacgcgcagga

SEQ ID NO: 6087969 - DNA, 25 bp, Homo sapien
gtcgtcgatgctcttcaccgcgtcg

SEQ ID NO: 6087970 - DNA, 25 bp, Homo sapien
ccttggagccgtgcgcgcgcaactg

SEQ ID NO: 6087971 - DNA, 25 bp, Homo sapien
tacgaccgataggaacttgtcccag

SEQ ID NO: 6087972 - DNA, 25 bp, Homo sapien
gcgccgccgatgtcgtcgatgctct

SEQ ID NO: 6087973 - DNA, 25 bp, Homo sapien
tccacgcgcaggatgtaggcgtgca

SEQ ID NO: 6087974 - DNA, 25 bp, Homo sapien
agtaggtcttggtctgcgggtggct

SEQ ID NO: 6087975 - DNA, 25 bp, Homo sapien
ccgggtgcaggtcgaagtgcgggaa

SEQ ID NO: 6087976 - DNA, 25 bp, Homo sapien
ccagagtctcggtgccgatggtgtc

SEQ ID NO: 6087977 - DNA, 25 bp, Homo sapien
ctctccagagtctcggtgccgatgg

SEQ ID NO: 6087978 - DNA, 25 bp, Homo sapien
gacacaatgatggtcctctcagtct

SEQ ID NO: 6087979 - DNA, 25 bp, Homo sapien
ttcagaaccacattgcaagaagtgc

SEQ ID NO: 6087980 - DNA, 25 bp, Homo sapien
cttagaacggtttcgagcaggtggt

SEQ ID NO: 6087981 - DNA, 25 bp, Homo sapien
cttgaggtggtcactaatggcagac

SEQ ID NO: 6087982 - DNA, 25 bp, Homo sapien
tcacaaagtcctggataacactgac

SEQ ID NO: 6087983 - DNA, 25 bp, Homo sapien
gaagatatgccctccgtagctggtc

SEQ ID NO: 6087984 - DNA, 25 bp, Homo sapien
catggcgagataggaaagcacggac

SEQ ID NO: 6087985 - DNA, 25 bp, Homo sapien
catacaaagcagtcttagaacggtt

SEQ ID NO: 6087986 - DNA, 25 bp, Homo sapien
tactgttgcactgaagagatgcagt

SEQ ID NO: 6087987 - DNA, 25 bp, Homo sapien
gactttctctgtttgcgcagtactg

SEQ ID NO: 6087988 - DNA, 25 bp, Homo sapien
ggcagacttgcgaacatgattcaga

SEQ ID NO: 6087989 - DNA, 25 bp, Homo sapien
caggtggtgctgttactacaaatcg

SEQ ID NO: 6087990 - DNA, 25 bp, Homo sapien
gctggtctgacttaggtatggagcc

SEQ ID NO: 6087991 - DNA, 25 bp, Homo sapien
tcatttttcaattgcggtccaaaga

SEQ ID NO: 6087992 - DNA, 25 bp, Homo sapien
ttttcaattgcggtccaaagagagg

SEQ ID NO: 6087993 - DNA, 25 bp, Homo sapien
agaggcacagtgaggccgtgatacg

SEQ ID NO: 6087994 - DNA, 25 bp, Homo sapien
gaacacgctcatcacaatgagaggc

SEQ ID NO: 6087995 - DNA, 25 bp, Homo sapien
gcacagtgaggccgtgatacgccat

SEQ ID NO: 6087996 - DNA, 25 bp, Homo sapien
cccagaacacgctcatcacaatgag

SEQ ID NO: 6087997 - DNA, 25 bp, Homo sapien
cagaacacgctcatcacaatgagag

SEQ ID NO: 6087998 - DNA, 25 bp, Homo sapien
gcaaactgaacaggtcaccaacatg

SEQ ID NO: 6087999 - DNA, 25 bp, Homo sapien
catttttcaattgcggtccaaagag

SEQ ID NO: 6088000 - DNA, 25 bp, Homo sapien
tttcaattgcggtccaaagagaggg

SEQ ID NO: 6088001 - DNA, 25 bp, Homo sapien
agcaaactgaacaggtcaccaacat

SEQ ID NO: 6088002 - DNA, 25 bp, Homo sapien
cacgctcatcacaatgagaggcaca

SEQ ID NO: 6088003 - DNA, 25 bp, Homo sapien
gggagcagtctgtccactgttcaca

SEQ ID NO: 6088004 - DNA, 25 bp, Homo sapien
ccaaggctagttgaggccagtatga

SEQ ID NO: 6088005 - DNA, 25 bp, Homo sapien
gagccacggcttggtattttctccg

SEQ ID NO: 6088006 - DNA, 25 bp, Homo sapien
accgcagagccgttgacttaagacc

SEQ ID NO: 6088007 - DNA, 25 bp, Homo sapien
agtcagatgggctcctacagcaccc

SEQ ID NO: 6088008 - DNA, 25 bp, Homo sapien
gacttaagaccaatcaaaacatcat

SEQ ID NO: 6088009 - DNA, 25 bp, Homo sapien
cacaggaacccttgatagcagacca

SEQ ID NO: 6088010 - DNA, 25 bp, Homo sapien
tattagtgtccacataactccagaa

SEQ ID NO: 6088011 - DNA, 25 bp, Homo sapien
tgatagcagaccatccaagtaacgc

SEQ ID NO: 6088012 - DNA, 25 bp, Homo sapien
gtattttctccgaaccgcagagccg

SEQ ID NO: 6088013 - DNA, 25 bp, Homo sapien
cagatggatcacaggaacccttgat

SEQ ID NO: 6088014 - DNA, 25 bp, Homo sapien
taacgctccccaattaaatgtcaag

SEQ ID NO: 6088015 - DNA, 25 bp, Homo sapien
catcattggtgccactcagagttgg

SEQ ID NO: 6088016 - DNA, 25 bp, Homo sapien
ggctgagggccagtagcagggccat

SEQ ID NO: 6088017 - DNA, 25 bp, Homo sapien
tggaagttcctcacgatgtacccag

SEQ ID NO: 6088018 - DNA, 25 bp, Homo sapien
cacgatgtacccagggatgggtttc

SEQ ID NO: 6088019 - DNA, 25 bp, Homo sapien
ggatgatgcgttctacccagggctg

SEQ ID NO: 6088020 - DNA, 25 bp, Homo sapien
agtctctggatgatgcgttctaccc

SEQ ID NO: 6088021 - DNA, 25 bp, Homo sapien
tcctcacgatgtacccagggatggg

SEQ ID NO: 6088022 - DNA, 25 bp, Homo sapien
gttcctcacgatgtacccagggatg

SEQ ID NO: 6088023 - DNA, 25 bp, Homo sapien
gaagttcctcacgatgtacccaggg

SEQ ID NO: 6088024 - DNA, 25 bp, Homo sapien
ttcagcatcattggtgccactcaga

SEQ ID NO: 6088025 - DNA, 25 bp, Homo sapien
tagtggaagttcctcacgatgtacc

SEQ ID NO: 6088026 - DNA, 25 bp, Homo sapien
tggatgatgcgttctacccagggct

SEQ ID NO: 6088027 - DNA, 25 bp, Homo sapien
gctttggaggttgaacgtccttctg

SEQ ID NO: 6088028 - DNA, 25 bp, Homo sapien
gctgctttggaggttgaacgtcctt

SEQ ID NO: 6088029 - DNA, 25 bp, Homo sapien
ctttggaggttgaacgtccttctgg

SEQ ID NO: 6088030 - DNA, 25 bp, Homo sapien
tgctttggaggttgaacgtccttct

SEQ ID NO: 6088031 - DNA, 25 bp, Homo sapien
ctgctttggaggttgaacgtccttc

SEQ ID NO: 6088032 - DNA, 25 bp, Homo sapien
tgatgtgcgtgtctcggaagtagta

SEQ ID NO: 6088033 - DNA, 25 bp, Homo sapien
ggacctcaaagtcacagcgcagctt

SEQ ID NO: 6088034 - DNA, 25 bp, Homo sapien
ggagttctgccagggaaccacaagg

SEQ ID NO: 6088035 - DNA, 25 bp, Homo sapien
ccagcgggaggttcgaacgcgccat

SEQ ID NO: 6088036 - DNA, 25 bp, Homo sapien
ggagttctccgaccatgcgctcctg

SEQ ID NO: 6088037 - DNA, 25 bp, Homo sapien
tcaggaagtacttgatgccggccac

SEQ ID NO: 6088038 - DNA, 25 bp, Homo sapien
cccatgttgtagctggccacggccg

SEQ ID NO: 6088039 - DNA, 25 bp, Homo sapien
gaggtcgacgtggtctccagtgacc

SEQ ID NO: 6088040 - DNA, 25 bp, Homo sapien
tgaccctggtcttgcggcagtctgt

SEQ ID NO: 6088041 - DNA, 25 bp, Homo sapien
tcgggcgacaggtcccggagttctc

SEQ ID NO: 6088042 - DNA, 25 bp, Homo sapien
tccccatctccatcgtcaggaagta

SEQ ID NO: 6088043 - DNA, 25 bp, Homo sapien
tggctctgcgccttgatgatgtgcg

SEQ ID NO: 6088044 - DNA, 25 bp, Homo sapien
tgtaccataaccaggaggctgatgg

SEQ ID NO: 6088045 - DNA, 25 bp, Homo sapien
tggctggtgtcgttttgtcctgaga

SEQ ID NO: 6088046 - DNA, 25 bp, Homo sapien
ctgtaccataaccaggaggctgatg

SEQ ID NO: 6088047 - DNA, 25 bp, Homo sapien
ttggaagggctcgttctgcccaaga

SEQ ID NO: 6088048 - DNA, 25 bp, Homo sapien
aacggtaacccgatcccttgcatgg

SEQ ID NO: 6088049 - DNA, 25 bp, Homo sapien
cggcgatctcgcctatcatggtggc

SEQ ID NO: 6088050 - DNA, 25 bp, Homo sapien
cgatcccttgcatggcttttctggg

SEQ ID NO: 6088051 - DNA, 25 bp, Homo sapien
gtgagttcacttgggagaagcctga

SEQ ID NO: 6088052 - DNA, 25 bp, Homo sapien
acgttggtgctgttttgagtgctac

SEQ ID NO: 6088053 - DNA, 25 bp, Homo sapien
tcgttctgcccaagagaagttcctc

SEQ ID NO: 6088054 - DNA, 25 bp, Homo sapien
tgcagctgtcgctcgctcgtgagcc

SEQ ID NO: 6088055 - DNA, 25 bp, Homo sapien
agctgattcggctgtctaccatttg

SEQ ID NO: 6088056 - DNA, 25 bp, Homo sapien
gcctgtccaatcagaggatccattt

SEQ ID NO: 6088057 - DNA, 25 bp, Homo sapien
ttgatgcgaatacaacggtaacccg

SEQ ID NO: 6088058 - DNA, 25 bp, Homo sapien
tgactgctcagtccaatccgctgtg

SEQ ID NO: 6088059 - DNA, 25 bp, Homo sapien
taactgattagagaagtcatcctct

SEQ ID NO: 6088060 - DNA, 25 bp, Homo sapien
caattatcctcccagacatgtgcat

SEQ ID NO: 6088061 - DNA, 25 bp, Homo sapien
ctgattagagaagtcatcctctaca

SEQ ID NO: 6088062 - DNA, 25 bp, Homo sapien
atcccaattatcctcccagacatgt

SEQ ID NO: 6088063 - DNA, 25 bp, Homo sapien
actgattagagaagtcatcctctac

SEQ ID NO: 6088064 - DNA, 25 bp, Homo sapien
aactgattagagaagtcatcctcta

SEQ ID NO: 6088065 - DNA, 25 bp, Homo sapien
tcccaattatcctcccagacatgtg

SEQ ID NO: 6088066 - DNA, 25 bp, Homo sapien
taagtctaccggctgctttttctct

SEQ ID NO: 6088067 - DNA, 25 bp, Homo sapien
gtcatcatcccaattatcctcccag

SEQ ID NO: 6088068 - DNA, 25 bp, Homo sapien
tgtcatcatcccaattatcctccca

SEQ ID NO: 6088069 - DNA, 25 bp, Homo sapien
gtaactgattagagaagtcatcctc

SEQ ID NO: 6088070 - DNA, 25 bp, Homo sapien
agtcatcctctacattgtcatcatc

SEQ ID NO: 6088071 - DNA, 25 bp, Homo sapien
tggtgttgaagcagaaacctgtccc

SEQ ID NO: 6088072 - DNA, 25 bp, Homo sapien
cataatgcaaaagagtcagtttttc

SEQ ID NO: 6088073 - DNA, 25 bp, Homo sapien
acctgtcccagcttcgctcaccatt

SEQ ID NO: 6088074 - DNA, 25 bp, Homo sapien
tggatcataatgcaaaagagtcagt

SEQ ID NO: 6088075 - DNA, 25 bp, Homo sapien
ggtgttgaagcagaaacctgtccca

SEQ ID NO: 6088076 - DNA, 25 bp, Homo sapien
ttggtgttgaagcagaaacctgtcc

SEQ ID NO: 6088077 - DNA, 25 bp, Homo sapien
ctggatcataatgcaaaagagtcag

SEQ ID NO: 6088078 - DNA, 25 bp, Homo sapien
actggatcataatgcaaaagagtca

SEQ ID NO: 6088079 - DNA, 25 bp, Homo sapien
ggatcataatgcaaaagagtcagtt

SEQ ID NO: 6088080 - DNA, 25 bp, Homo sapien
ataatgcaaaagagtcagtttttcc

SEQ ID NO: 6088081 - DNA, 25 bp, Homo sapien
tcataatgcaaaagagtcagttttt

SEQ ID NO: 6088082 - DNA, 25 bp, Homo sapien
gatcataatgcaaaagagtcagttt

SEQ ID NO: 6088083 - DNA, 25 bp, Homo sapien
aacgatcaactccagagatgcgcct

SEQ ID NO: 6088084 - DNA, 25 bp, Homo sapien
agtccggggagaatctcgaaccaca

SEQ ID NO: 6088085 - DNA, 25 bp, Homo sapien
tggaatcaacaagcacacgcccatg

SEQ ID NO: 6088086 - DNA, 25 bp, Homo sapien
gatgtacgcagtagccagtcctgga

SEQ ID NO: 6088087 - DNA, 25 bp, Homo sapien
acacgcccatgacggagagtccggg

SEQ ID NO: 6088088 - DNA, 25 bp, Homo sapien
gaacctgtggatgtacgcagtagcc

SEQ ID NO: 6088089 - DNA, 25 bp, Homo sapien
tgtggatgtacgcagtagccagtcc

SEQ ID NO: 6088090 - DNA, 25 bp, Homo sapien
gatcaactccagagatgcgcctatc

SEQ ID NO: 6088091 - DNA, 25 bp, Homo sapien
cagactccagtgatacccaaaatga

SEQ ID NO: 6088092 - DNA, 25 bp, Homo sapien
gatgcgcctatctctttccatcaga

SEQ ID NO: 6088093 - DNA, 25 bp, Homo sapien
ccccgttagtgaacctgtggatgta

SEQ ID NO: 6088094 - DNA, 25 bp, Homo sapien
tagtgaacctgtggatgtacgcagt

SEQ ID NO: 6088095 - DNA, 25 bp, Homo sapien
ccttcactggtactggggccggaca

SEQ ID NO: 6088096 - DNA, 25 bp, Homo sapien
gtccttcactggtactggggccgga

SEQ ID NO: 6088097 - DNA, 25 bp, Homo sapien
actggggccggacactcaccaactg

SEQ ID NO: 6088098 - DNA, 25 bp, Homo sapien
tgcttgtaggaaaaggagtagctaa

SEQ ID NO: 6088099 - DNA, 25 bp, Homo sapien
gtactggggccggacactcaccaac

SEQ ID NO: 6088100 - DNA, 25 bp, Homo sapien
tactggggccggacactcaccaact

SEQ ID NO: 6088101 - DNA, 25 bp, Homo sapien
ccggacactcaccaactgacgccat

SEQ ID NO: 6088102 - DNA, 25 bp, Homo sapien
gagtagctaaagagcacgtagcatg

SEQ ID NO: 6088103 - DNA, 25 bp, Homo sapien
cttcactggtactggggccggacac

SEQ ID NO: 6088104 - DNA, 25 bp, Homo sapien
gggccggacactcaccaactgacgc

SEQ ID NO: 6088105 - DNA, 25 bp, Homo sapien
ttcactggtactggggccggacact

SEQ ID NO: 6088106 - DNA, 25 bp, Homo sapien
gaaaatgccactaggactgaagtcc

SEQ ID NO: 6088107 - DNA, 25 bp, Homo sapien
atctctgcgatgtactggttgatga

SEQ ID NO: 6088108 - DNA, 25 bp, Homo sapien
catctctgcgatgtactggttgatg

SEQ ID NO: 6088109 - DNA, 25 bp, Homo sapien
ccatctctgcgatgtactggttgat

SEQ ID NO: 6088110 - DNA, 25 bp, Homo sapien
tctctgcgatgtactggttgatgag

SEQ ID NO: 6088111 - DNA, 25 bp, Homo sapien
caccatctctgcgatgtactggttg

SEQ ID NO: 6088112 - DNA, 25 bp, Homo sapien
accatctctgcgatgtactggttga

SEQ ID NO: 6088113 - DNA, 25 bp, Homo sapien
cggaaagtgtcttcgatctcattga

SEQ ID NO: 6088114 - DNA, 25 bp, Homo sapien
gcttattgaggacccgagagacagc

SEQ ID NO: 6088115 - DNA, 25 bp, Homo sapien
ctccaagcttattgaggacccgaga

SEQ ID NO: 6088116 - DNA, 25 bp, Homo sapien
gcagaccttcttgttgggcaggtca

SEQ ID NO: 6088117 - DNA, 25 bp, Homo sapien
cctgttttcttcagggttgcaagca

SEQ ID NO: 6088118 - DNA, 25 bp, Homo sapien
tcttcagggttgcaagcagagtgtc

SEQ ID NO: 6088119 - DNA, 25 bp, Homo sapien
gttttcttcagggttgcaagcagag

SEQ ID NO: 6088120 - DNA, 25 bp, Homo sapien
atgcagaccttcttgttgggcaggt

SEQ ID NO: 6088121 - DNA, 25 bp, Homo sapien
tcagggttgcaagcagagtgtccat

SEQ ID NO: 6088122 - DNA, 25 bp, Homo sapien
gaccttcttgttgggcaggtcaatg

SEQ ID NO: 6088123 - DNA, 25 bp, Homo sapien
gggttgcaagcagagtgtccatgct

SEQ ID NO: 6088124 - DNA, 25 bp, Homo sapien
tattgaggacccgagagacagcttc

SEQ ID NO: 6088125 - DNA, 25 bp, Homo sapien
ccaagcttattgaggacccgagaga

SEQ ID NO: 6088126 - DNA, 25 bp, Homo sapien
ctctttctctgcccgagtataaccg

SEQ ID NO: 6088127 - DNA, 25 bp, Homo sapien
ttctctgcccgagtataaccgattc

SEQ ID NO: 6088128 - DNA, 25 bp, Homo sapien
tctttctctgcccgagtataaccga

SEQ ID NO: 6088129 - DNA, 25 bp, Homo sapien
ctttctctgcccgagtataaccgat

SEQ ID NO: 6088130 - DNA, 25 bp, Homo sapien
tctctgcccgagtataaccgattcc

SEQ ID NO: 6088131 - DNA, 25 bp, Homo sapien
tttctctgcccgagtataaccgatt

SEQ ID NO: 6088132 - DNA, 25 bp, Homo sapien
tgaagtgggtcgctcactgagagac

SEQ ID NO: 6088133 - DNA, 25 bp, Homo sapien
cgtcgtagaatgagctgcacatcac

SEQ ID NO: 6088134 - DNA, 25 bp, Homo sapien
gagacggcccagttcgtcgtagaat

SEQ ID NO: 6088135 - DNA, 25 bp, Homo sapien
tataagggtgtaccttccagttcga

SEQ ID NO: 6088136 - DNA, 25 bp, Homo sapien
tatgataggattttcatgaggtgct

SEQ ID NO: 6088137 - DNA, 25 bp, Homo sapien
ggaattcgagccacactgtctgaag

SEQ ID NO: 6088138 - DNA, 25 bp, Homo sapien
tctccatttctctataagggtgtac

SEQ ID NO: 6088139 - DNA, 25 bp, Homo sapien
agtgactccacaaacaatcctctga

SEQ ID NO: 6088140 - DNA, 25 bp, Homo sapien
taaggctatgacaacctcctggcaa

SEQ ID NO: 6088141 - DNA, 25 bp, Homo sapien
gaggtgctaagtgtctttcagtatc

SEQ ID NO: 6088142 - DNA, 25 bp, Homo sapien
tgcttgagctaaggctatgacaacc

SEQ ID NO: 6088143 - DNA, 25 bp, Homo sapien
cctggcaagttgtgacttcagtgac

SEQ ID NO: 6088144 - DNA, 25 bp, Homo sapien
acgatcgacagaaccaccaccagga

SEQ ID NO: 6088145 - DNA, 25 bp, Homo sapien
cactggagacgtctggggtcccctg

SEQ ID NO: 6088146 - DNA, 25 bp, Homo sapien
gacgatcgacagaaccaccaccagg

SEQ ID NO: 6088147 - DNA, 25 bp, Homo sapien
ttccaagacgatcgacagaaccacc

SEQ ID NO: 6088148 - DNA, 25 bp, Homo sapien
cgacagaaccaccaccaggaccggg

SEQ ID NO: 6088149 - DNA, 25 bp, Homo sapien
acagaaccaccaccaggaccgggag

SEQ ID NO: 6088150 - DNA, 25 bp, Homo sapien
agacgatcgacagaaccaccaccag

SEQ ID NO: 6088151 - DNA, 25 bp, Homo sapien
aggcactggagacgtctggggtccc

SEQ ID NO: 6088152 - DNA, 25 bp, Homo sapien
gacagaaccaccaccaggaccggga

SEQ ID NO: 6088153 - DNA, 25 bp, Homo sapien
aagacgatcgacagaaccaccacca

SEQ ID NO: 6088154 - DNA, 25 bp, Homo sapien
ccaggaccgggagcgacaggaagag

SEQ ID NO: 6088155 - DNA, 25 bp, Homo sapien
cttccaagacgatcgacagaaccac

SEQ ID NO: 6088156 - DNA, 25 bp, Homo sapien
tcttcaacgtaatctcttacttctt

SEQ ID NO: 6088157 - DNA, 25 bp, Homo sapien
gatgccctttaccagtggatcctcg

SEQ ID NO: 6088158 - DNA, 25 bp, Homo sapien
ggtcctcaatattgattactggcat

SEQ ID NO: 6088159 - DNA, 25 bp, Homo sapien
tctttcttgagctggtcaacttcca

SEQ ID NO: 6088160 - DNA, 25 bp, Homo sapien
taccagtggatcctcgccagatcgt

SEQ ID NO: 6088161 - DNA, 25 bp, Homo sapien
tggatcctcgccagatcgttcttca

SEQ ID NO: 6088162 - DNA, 25 bp, Homo sapien
ctgggatgccctttaccagtggatc

SEQ ID NO: 6088163 - DNA, 25 bp, Homo sapien
cctttaccagtggatcctcgccaga

SEQ ID NO: 6088164 - DNA, 25 bp, Homo sapien
cttctttcttgagctggtcaacttc

SEQ ID NO: 6088165 - DNA, 25 bp, Homo sapien
tcgccagatcgttcttcaacgtaat

SEQ ID NO: 6088166 - DNA, 25 bp, Homo sapien
tctgtcaggtcctcaatattgatta

SEQ ID NO: 6088167 - DNA, 25 bp, Homo sapien
tcttgagctggtcaacttccatctt

SEQ ID NO: 6088168 - DNA, 25 bp, Homo sapien
ttatagatccgtgcaatctctggca

SEQ ID NO: 6088169 - DNA, 25 bp, Homo sapien
gttttatagatccgtgcaatctctg

SEQ ID NO: 6088170 - DNA, 25 bp, Homo sapien
ttttatagatccgtgcaatctctgg

SEQ ID NO: 6088171 - DNA, 25 bp, Homo sapien
tgttttatagatccgtgcaatctct

SEQ ID NO: 6088172 - DNA, 25 bp, Homo sapien
atccgtgcaatctctggcactaggg

SEQ ID NO: 6088173 - DNA, 25 bp, Homo sapien
tttatagatccgtgcaatctctggc

SEQ ID NO: 6088174 - DNA, 25 bp, Homo sapien
atagatccgtgcaatctctggcact

SEQ ID NO: 6088175 - DNA, 25 bp, Homo sapien
tatagatccgtgcaatctctggcac

SEQ ID NO: 6088176 - DNA, 25 bp, Homo sapien
gctgcccgcgctggaaaggaacgcc

SEQ ID NO: 6088177 - DNA, 25 bp, Homo sapien
ctccccgcacagcaggtttacatgg

SEQ ID NO: 6088178 - DNA, 25 bp, Homo sapien
tcgtctgacgcgatgatgagcacct

SEQ ID NO: 6088179 - DNA, 25 bp, Homo sapien
tctgacgcgatgatgagcacctcga

SEQ ID NO: 6088180 - DNA, 25 bp, Homo sapien
gcgaattctcagcaccgtgccaggg

SEQ ID NO: 6088181 - DNA, 25 bp, Homo sapien
cttgctgttgaagaccacctccgac

SEQ ID NO: 6088182 - DNA, 25 bp, Homo sapien
gcattgggaggaaccaagccgcgaa

SEQ ID NO: 6088183 - DNA, 25 bp, Homo sapien
tgttgaagaccacctccgacgtgtc

SEQ ID NO: 6088184 - DNA, 25 bp, Homo sapien
agcaccgtgccagggcggatgccct

SEQ ID NO: 6088185 - DNA, 25 bp, Homo sapien
tgggaggaaccaagccgcgaattct

SEQ ID NO: 6088186 - DNA, 25 bp, Homo sapien
cttgaagccgtcgtctgacgcgatg

SEQ ID NO: 6088187 - DNA, 25 bp, Homo sapien
cccgcacagcaggtttacatggaac

SEQ ID NO: 6088188 - DNA, 25 bp, Homo sapien
gaagttccattttatgatgtccatg

SEQ ID NO: 6088189 - DNA, 25 bp, Homo sapien
catgtatctccaagcttcattgcgg

SEQ ID NO: 6088190 - DNA, 25 bp, Homo sapien
catcagaaaaggaaacactctttgc

SEQ ID NO: 6088191 - DNA, 25 bp, Homo sapien
tgcagccagcttcttctggatagtt

SEQ ID NO: 6088192 - DNA, 25 bp, Homo sapien
gaatcctttaaagaatacatcagaa

SEQ ID NO: 6088193 - DNA, 25 bp, Homo sapien
tatgatgtccatgctcatgtccatg

SEQ ID NO: 6088194 - DNA, 25 bp, Homo sapien
ccaagcttcattgcggccccatgga

SEQ ID NO: 6088195 - DNA, 25 bp, Homo sapien
ctttgcaaagccacccatgtatctc

SEQ ID NO: 6088196 - DNA, 25 bp, Homo sapien
cattgtctataatctggaagttcca

SEQ ID NO: 6088197 - DNA, 25 bp, Homo sapien
tgctcatgtccatgttcatgggcca

SEQ ID NO: 6088198 - DNA, 25 bp, Homo sapien
tgtcccttctatcttccattgtcta

SEQ ID NO: 6088199 - DNA, 25 bp, Homo sapien
gatcccttagcccttttgcagccag

SEQ ID NO: 6088200 - DNA, 25 bp, Homo sapien
ctcgctgcccttggccaagtcactc

SEQ ID NO: 6088201 - DNA, 25 bp, Homo sapien
tcattagatgaaatattcctctttc

SEQ ID NO: 6088202 - DNA, 25 bp, Homo sapien
ctccatctggacgatggcactgggc

SEQ ID NO: 6088203 - DNA, 25 bp, Homo sapien
actgggctcaccttctgtaggttca

SEQ ID NO: 6088204 - DNA, 25 bp, Homo sapien
ctctttctcgctgcccttggccaag

SEQ ID NO: 6088205 - DNA, 25 bp, Homo sapien
gcccttggccaagtcactctccatc

SEQ ID NO: 6088206 - DNA, 25 bp, Homo sapien
gatgaaatattcctctttctcgctg

SEQ ID NO: 6088207 - DNA, 25 bp, Homo sapien
ctggacgatggcactgggctcacct

SEQ ID NO: 6088208 - DNA, 25 bp, Homo sapien
atattcctctttctcgctgcccttg

SEQ ID NO: 6088209 - DNA, 25 bp, Homo sapien
tccttggggcctgggagtcattaga

SEQ ID NO: 6088210 - DNA, 25 bp, Homo sapien
gatggcactgggctcaccttctgta

SEQ ID NO: 6088211 - DNA, 25 bp, Homo sapien
gtcactctccatctggacgatggca

SEQ ID NO: 6088212 - DNA, 25 bp, Homo sapien
ggccaagtcactctccatctggacg

SEQ ID NO: 6088213 - DNA, 25 bp, Homo sapien
tgggagtcattagatgaaatattcc

SEQ ID NO: 6088214 - DNA, 25 bp, Homo sapien
gggcctgggagtcattagatgaaat

SEQ ID NO: 6088215 - DNA, 25 bp, Homo sapien
gggataaagccccagcgaatggcaa

SEQ ID NO: 6088216 - DNA, 25 bp, Homo sapien
aaagccccagcgaatggcaaactgg

SEQ ID NO: 6088217 - DNA, 25 bp, Homo sapien
cagcgaatggcaaactggctcccct

SEQ ID NO: 6088218 - DNA, 25 bp, Homo sapien
ggataaagccccagcgaatggcaaa

SEQ ID NO: 6088219 - DNA, 25 bp, Homo sapien
agagggataaagccccagcgaatgg

SEQ ID NO: 6088220 - DNA, 25 bp, Homo sapien
taaagccccagcgaatggcaaactg

SEQ ID NO: 6088221 - DNA, 25 bp, Homo sapien
agccccagcgaatggcaaactggct

SEQ ID NO: 6088222 - DNA, 25 bp, Homo sapien
gagggataaagccccagcgaatggc

SEQ ID NO: 6088223 - DNA, 25 bp, Homo sapien
gataaagccccagcgaatggcaaac

SEQ ID NO: 6088224 - DNA, 25 bp, Homo sapien
gccccagcgaatggcaaactggctc

SEQ ID NO: 6088225 - DNA, 25 bp, Homo sapien
agcgaatggcaaactggctcccctt

SEQ ID NO: 6088226 - DNA, 25 bp, Homo sapien
aagccccagcgaatggcaaactggc

SEQ ID NO: 6088227 - DNA, 25 bp, Homo sapien
gaatggagtcctttacaaactgccg

SEQ ID NO: 6088228 - DNA, 25 bp, Homo sapien
gtttagtgcatcttttaaccagccg

SEQ ID NO: 6088229 - DNA, 25 bp, Homo sapien
tacaaactgccgacttggctcaaca

SEQ ID NO: 6088230 - DNA, 25 bp, Homo sapien
gcatcttttaaccagccgaatggag

SEQ ID NO: 6088231 - DNA, 25 bp, Homo sapien
aactgccgacttggctcaacaaact

SEQ ID NO: 6088232 - DNA, 25 bp, Homo sapien
tttctatcaggtttagtgcatcttt

SEQ ID NO: 6088233 - DNA, 25 bp, Homo sapien
tagtgcatcttttaaccagccgaat

SEQ ID NO: 6088234 - DNA, 25 bp, Homo sapien
taaccagccgaatggagtcctttac

SEQ ID NO: 6088235 - DNA, 25 bp, Homo sapien
tatagcaaatcctattgctgttgcc

SEQ ID NO: 6088236 - DNA, 25 bp, Homo sapien
tcctttacaaactgccgacttggct

SEQ ID NO: 6088237 - DNA, 25 bp, Homo sapien
gaagccaatgaatcccattatagca

SEQ ID NO: 6088238 - DNA, 25 bp, Homo sapien
caacaaactgcattacctgatccat

SEQ ID NO: 6088239 - DNA, 25 bp, Homo sapien
acagcgcacagtgcagtaccgggca

SEQ ID NO: 6088240 - DNA, 25 bp, Homo sapien
ttcggaagcgaagtttaaaatgatc

SEQ ID NO: 6088241 - DNA, 25 bp, Homo sapien
ctccagctgccggttgatgcgacgc

SEQ ID NO: 6088242 - DNA, 25 bp, Homo sapien
cagctgccggttgatgcgacgctgc

SEQ ID NO: 6088243 - DNA, 25 bp, Homo sapien
gtcaggtagttagggccctcggcca

SEQ ID NO: 6088244 - DNA, 25 bp, Homo sapien
acgctgccgggcagcccggtccagc

SEQ ID NO: 6088245 - DNA, 25 bp, Homo sapien
gcagtaccgggcaccgcagctgaca

SEQ ID NO: 6088246 - DNA, 25 bp, Homo sapien
cacaggccgtcaggtagttagggcc

SEQ ID NO: 6088247 - DNA, 25 bp, Homo sapien
gcatcgtcatcaaactgaggcagtc

SEQ ID NO: 6088248 - DNA, 25 bp, Homo sapien
aaactgaggcagtctcttgccgagc

SEQ ID NO: 6088249 - DNA, 25 bp, Homo sapien
tgtccgcatcgtcatcaaactgagg

SEQ ID NO: 6088250 - DNA, 25 bp, Homo sapien
cccgcacaggccgtcaggtagttag

SEQ ID NO: 6088251 - DNA, 25 bp, Homo sapien
gataaggacaatcatcttcacgttc

SEQ ID NO: 6088252 - DNA, 25 bp, Homo sapien
cgagccaccttctgcgatgtcgtct

SEQ ID NO: 6088253 - DNA, 25 bp, Homo sapien
gccaccttctgcgatgtcgtcttga

SEQ ID NO: 6088254 - DNA, 25 bp, Homo sapien
tgtcttgttgcggagatgttccaag

SEQ ID NO: 6088255 - DNA, 25 bp, Homo sapien
gcgatgtcgtcttgaagtgctcaga

SEQ ID NO: 6088256 - DNA, 25 bp, Homo sapien
caccttctgcgatgtcgtcttgaag

SEQ ID NO: 6088257 - DNA, 25 bp, Homo sapien
cttctgcgatgtcgtcttgaagtgc

SEQ ID NO: 6088258 - DNA, 25 bp, Homo sapien
tcttgttgcggagatgttccaagtt

SEQ ID NO: 6088259 - DNA, 25 bp, Homo sapien
gagccaccttctgcgatgtcgtctt

SEQ ID NO: 6088260 - DNA, 25 bp, Homo sapien
cctctgtcttgttgcggagatgttc

SEQ ID NO: 6088261 - DNA, 25 bp, Homo sapien
ccacctcactttgcaggttccgcac

SEQ ID NO: 6088262 - DNA, 25 bp, Homo sapien
tctgcgatgtcgtcttgaagtgctc

SEQ ID NO: 6088263 - DNA, 25 bp, Homo sapien
tcccttgcggcacgtggcaatgaga

SEQ ID NO: 6088264 - DNA, 25 bp, Homo sapien
agcggtccagtgtggctttgaagac

SEQ ID NO: 6088265 - DNA, 25 bp, Homo sapien
ttgacggcaccacggatatggcccg

SEQ ID NO: 6088266 - DNA, 25 bp, Homo sapien
catcatacaccaccacgtgcgtgtg

SEQ ID NO: 6088267 - DNA, 25 bp, Homo sapien
ccattgagcactgatacggtgcggt

SEQ ID NO: 6088268 - DNA, 25 bp, Homo sapien
cctcttagattcaaggttctccagc

SEQ ID NO: 6088269 - DNA, 25 bp, Homo sapien
gaatccaccagctggaacctcttag

SEQ ID NO: 6088270 - DNA, 25 bp, Homo sapien
catgaaaggcatgttgacggcacca

SEQ ID NO: 6088271 - DNA, 25 bp, Homo sapien
cagcacctgctcgtaggtcttgagc

SEQ ID NO: 6088272 - DNA, 25 bp, Homo sapien
caatgagaggctgcgagagatccac

SEQ ID NO: 6088273 - DNA, 25 bp, Homo sapien
gcggtggccaaacacacggaacatc

SEQ ID NO: 6088274 - DNA, 25 bp, Homo sapien
tcgtacacggccacatcaggcttgc

SEQ ID NO: 6088275 - DNA, 25 bp, Homo sapien
cacagcgtcctgaagctgcgtgagc

SEQ ID NO: 6088276 - DNA, 25 bp, Homo sapien
cattgctgcaatactccaatggcat

SEQ ID NO: 6088277 - DNA, 25 bp, Homo sapien
agcaagtgcgctttgtatcttctcc

SEQ ID NO: 6088278 - DNA, 25 bp, Homo sapien
tgcaatcagtgctgcaaaaagctgg

SEQ ID NO: 6088279 - DNA, 25 bp, Homo sapien
tctccagaagcatgtctcctcgata

SEQ ID NO: 6088280 - DNA, 25 bp, Homo sapien
tcgtgcaatcagtgctgcaaaaagc

SEQ ID NO: 6088281 - DNA, 25 bp, Homo sapien
gcgtcctgaagctgcgtgagccgat

SEQ ID NO: 6088282 - DNA, 25 bp, Homo sapien
ctcctcgataaacaacatcctccag

SEQ ID NO: 6088283 - DNA, 25 bp, Homo sapien
tgctgttcgtgcaatcagtgctgca

SEQ ID NO: 6088284 - DNA, 25 bp, Homo sapien
accacattgctgcaatactccaatg

SEQ ID NO: 6088285 - DNA, 25 bp, Homo sapien
tccagaagcatgtctcctcgataaa

SEQ ID NO: 6088286 - DNA, 25 bp, Homo sapien
attcacagcgtcctgaagctgcgtg

SEQ ID NO: 6088287 - DNA, 25 bp, Homo sapien
tgaccagcaggagatccaccaaggc

SEQ ID NO: 6088288 - DNA, 25 bp, Homo sapien
ggttgtcccgccatacgcagtagtt

SEQ ID NO: 6088289 - DNA, 25 bp, Homo sapien
cacctggtaccaggccacggtagtg

SEQ ID NO: 6088290 - DNA, 25 bp, Homo sapien
cgccatacgcagtagttgagtgtgg

SEQ ID NO: 6088291 - DNA, 25 bp, Homo sapien
agccatggttgtcccgccatacgca

SEQ ID NO: 6088292 - DNA, 25 bp, Homo sapien
tcccgccatacgcagtagttgagtg

SEQ ID NO: 6088293 - DNA, 25 bp, Homo sapien
ctggtaccaggccacggtagtggct

SEQ ID NO: 6088294 - DNA, 25 bp, Homo sapien
tgtcccgccatacgcagtagttgag

SEQ ID NO: 6088295 - DNA, 25 bp, Homo sapien
tggttgtcccgccatacgcagtagt

SEQ ID NO: 6088296 - DNA, 25 bp, Homo sapien
cactgaccagcaggagatccaccaa

SEQ ID NO: 6088297 - DNA, 25 bp, Homo sapien
ggctcacctggtaccaggccacggt

SEQ ID NO: 6088298 - DNA, 25 bp, Homo sapien
agcccatttgtcgggcaccaaagaa

SEQ ID NO: 6088299 - DNA, 25 bp, Homo sapien
gatgaagccgttcgatgccctgact

SEQ ID NO: 6088300 - DNA, 25 bp, Homo sapien
gatcaaactgcataggatgaagccg

SEQ ID NO: 6088301 - DNA, 25 bp, Homo sapien
ggcttgggagctaagccttcttgaa

SEQ ID NO: 6088302 - DNA, 25 bp, Homo sapien
tccaaagggcggatgataagatcat

SEQ ID NO: 6088303 - DNA, 25 bp, Homo sapien
caattactcgttccaggtgcttttg

SEQ ID NO: 6088304 - DNA, 25 bp, Homo sapien
cagtacaattgttgctatcatcagc

SEQ ID NO: 6088305 - DNA, 25 bp, Homo sapien
ctgatctctcctatgacctgaattt

SEQ ID NO: 6088306 - DNA, 25 bp, Homo sapien
aatcatttcaattactcgttccagg

SEQ ID NO: 6088307 - DNA, 25 bp, Homo sapien
gtttcaagccgttgacgtttctgga

SEQ ID NO: 6088308 - DNA, 25 bp, Homo sapien
tctcgttttatactcccagggctcc

SEQ ID NO: 6088309 - DNA, 25 bp, Homo sapien
tttataagatgatgcacgtgtacaa

SEQ ID NO: 6088310 - DNA, 25 bp, Homo sapien
tctcagctgtttcaagccgttgacg

SEQ ID NO: 6088311 - DNA, 25 bp, Homo sapien
agagctttccggaaaatgtcctcag

SEQ ID NO: 6088312 - DNA, 25 bp, Homo sapien
tcatagtactcagcagcttgcctct

SEQ ID NO: 6088313 - DNA, 25 bp, Homo sapien
tgccctgtagcaaagtcccatctgg

SEQ ID NO: 6088314 - DNA, 25 bp, Homo sapien
agcattgctatactggcctccttca

SEQ ID NO: 6088315 - DNA, 25 bp, Homo sapien
caaaccctagggcacttaaactctg

SEQ ID NO: 6088316 - DNA, 25 bp, Homo sapien
tgttctccagacgaagagctttccg

SEQ ID NO: 6088317 - DNA, 25 bp, Homo sapien
catagagtctcgttccatggctgct

SEQ ID NO: 6088318 - DNA, 25 bp, Homo sapien
gcttctaaataatgatggatggcag

SEQ ID NO: 6088319 - DNA, 25 bp, Homo sapien
tggtagacaatttcttcagagcact

SEQ ID NO: 6088320 - DNA, 25 bp, Homo sapien
aaagcggccatagtggtaatggatc

SEQ ID NO: 6088321 - DNA, 25 bp, Homo sapien
tacggtgaaattcctgaaagcggcc

SEQ ID NO: 6088322 - DNA, 25 bp, Homo sapien
gatttggatcatttgtgccctgtag

SEQ ID NO: 6088323 - DNA, 25 bp, Homo sapien
aaaatctgcatatgtagtttccaca

SEQ ID NO: 6088324 - DNA, 25 bp, Homo sapien
gaaaccaggatatcatgtattgcat

SEQ ID NO: 6088325 - DNA, 25 bp, Homo sapien
gatatcaagacctgctaatttcaag

SEQ ID NO: 6088326 - DNA, 25 bp, Homo sapien
ccactttgttctgtagaacttcgtt

SEQ ID NO: 6088327 - DNA, 25 bp, Homo sapien
ctgtagaacttcgttgtgcatcttc

SEQ ID NO: 6088328 - DNA, 25 bp, Homo sapien
gaggaaaccaggatatcatgtattg

SEQ ID NO: 6088329 - DNA, 25 bp, Homo sapien
caaggctaattcattgctgttgcca

SEQ ID NO: 6088330 - DNA, 25 bp, Homo sapien
aatttcaaggctaattcattgctgt

SEQ ID NO: 6088331 - DNA, 25 bp, Homo sapien
tgttctgtagaacttcgttgtgcat

SEQ ID NO: 6088332 - DNA, 25 bp, Homo sapien
tatcaagacctgctaatttcaaggc

SEQ ID NO: 6088333 - DNA, 25 bp, Homo sapien
tagaacttcgttgtgcatcttcttc

SEQ ID NO: 6088334 - DNA, 25 bp, Homo sapien
gctaattcattgctgttgccacttg

SEQ ID NO: 6088335 - DNA, 25 bp, Homo sapien
aagggtgagcacgtcgccctcgcgc

SEQ ID NO: 6088336 - DNA, 25 bp, Homo sapien
aaagggtgagcacgtcgccctcgcg

SEQ ID NO: 6088337 - DNA, 25 bp, Homo sapien
ggcaggacgcctccctgggcgatcg

SEQ ID NO: 6088338 - DNA, 25 bp, Homo sapien
ttgccgccagtcttgccgcggcccg

SEQ ID NO: 6088339 - DNA, 25 bp, Homo sapien
ggcgccaacgcgctcggcgtagtgg

SEQ ID NO: 6088340 - DNA, 25 bp, Homo sapien
agccggtgtacacggcccactggga

SEQ ID NO: 6088341 - DNA, 25 bp, Homo sapien
tgggaactggaggccggcgcgcgac

SEQ ID NO: 6088342 - DNA, 25 bp, Homo sapien
ttcggccccacggtggcgctggtct

SEQ ID NO: 6088343 - DNA, 25 bp, Homo sapien
aacgcgctcggcgtagtggcccttc

SEQ ID NO: 6088344 - DNA, 25 bp, Homo sapien
gggcgatcgtcacgccgcccagcag

SEQ ID NO: 6088345 - DNA, 25 bp, Homo sapien
cccacggtggcgctggtcttcttgg

SEQ ID NO: 6088346 - DNA, 25 bp, Homo sapien
agcagccggtgtacacggcccactg

SEQ ID NO: 6088347 - DNA, 25 bp, Homo sapien
gctcggcgtagtggcccttccgcag

SEQ ID NO: 6088348 - DNA, 25 bp, Homo sapien
aggacgcctccctgggcgatcgtca

SEQ ID NO: 6088349 - DNA, 25 bp, Homo sapien
tggcccattccctacgcgagggatt

SEQ ID NO: 6088350 - DNA, 25 bp, Homo sapien
ggattgaaccgcacgaccacagtca

SEQ ID NO: 6088351 - DNA, 25 bp, Homo sapien
tgccacaagtgcactgtgatgctgg

SEQ ID NO: 6088352 - DNA, 25 bp, Homo sapien
actgccatctgccacaagtgcactg

SEQ ID NO: 6088353 - DNA, 25 bp, Homo sapien
tagacgcacagaagcttcggaggcc

SEQ ID NO: 6088354 - DNA, 25 bp, Homo sapien
ggcctctggatccacagacggccag

SEQ ID NO: 6088355 - DNA, 25 bp, Homo sapien
ggccatggtctgctatttcccagaa

SEQ ID NO: 6088356 - DNA, 25 bp, Homo sapien
gggcacccctagacgcacagaagct

SEQ ID NO: 6088357 - DNA, 25 bp, Homo sapien
agtagctcccgggtatgcactgcca

SEQ ID NO: 6088358 - DNA, 25 bp, Homo sapien
cagaaactggaatccgctgctcggt

SEQ ID NO: 6088359 - DNA, 25 bp, Homo sapien
tcctcatcttcgtagatgccaggcc

SEQ ID NO: 6088360 - DNA, 25 bp, Homo sapien
ccctacgcgagggattgaaccgcac

SEQ ID NO: 6088361 - DNA, 25 bp, Homo sapien
tatagaagtgcacctggtcatgggt

SEQ ID NO: 6088362 - DNA, 25 bp, Homo sapien
aggccctccatgaggcggcggccaa

SEQ ID NO: 6088363 - DNA, 25 bp, Homo sapien
gctggttcagcacccgtgacaggcg

SEQ ID NO: 6088364 - DNA, 25 bp, Homo sapien
ttcagcacccgtgacaggcgggcat

SEQ ID NO: 6088365 - DNA, 25 bp, Homo sapien
gagatggtcaggcactcaggtaggg

SEQ ID NO: 6088366 - DNA, 25 bp, Homo sapien
actgtctccactaagaggctctggg

SEQ ID NO: 6088367 - DNA, 25 bp, Homo sapien
tagcccaggtgggtatagaagtgca

SEQ ID NO: 6088368 - DNA, 25 bp, Homo sapien
accacaacgggtgctgcttcaagtg

SEQ ID NO: 6088369 - DNA, 25 bp, Homo sapien
accactgtctccactaagaggctct

SEQ ID NO: 6088370 - DNA, 25 bp, Homo sapien
tgggtatagaagtgcacctggtcat

SEQ ID NO: 6088371 - DNA, 25 bp, Homo sapien
tggtggcaatggaggtcccttggga

SEQ ID NO: 6088372 - DNA, 25 bp, Homo sapien
gggaaggcattaagcagggtggcag

SEQ ID NO: 6088373 - DNA, 25 bp, Homo sapien
tttccttaagaaatctgaacctcca

SEQ ID NO: 6088374 - DNA, 25 bp, Homo sapien
ttccttaagaaatctgaacctccag

SEQ ID NO: 6088375 - DNA, 25 bp, Homo sapien
tttctgatgttatagaagaacaagt

SEQ ID NO: 6088376 - DNA, 25 bp, Homo sapien
tgacagaaggacatatgagttttcc

SEQ ID NO: 6088377 - DNA, 25 bp, Homo sapien
tgcagactcaggtagtagtccctgc

SEQ ID NO: 6088378 - DNA, 25 bp, Homo sapien
gaaaggggcttgcacagatgttacc

SEQ ID NO: 6088379 - DNA, 25 bp, Homo sapien
agatgttaccagtgtatgtctcaga

SEQ ID NO: 6088380 - DNA, 25 bp, Homo sapien
gttaccagtgtatgtctcagagtga

SEQ ID NO: 6088381 - DNA, 25 bp, Homo sapien
aacaaaaagattgagctttgtgtac

SEQ ID NO: 6088382 - DNA, 25 bp, Homo sapien
tttttgcacaatgaatatcaatcat

SEQ ID NO: 6088383 - DNA, 25 bp, Homo sapien
tagaagaacaagtatagtacactct

SEQ ID NO: 6088384 - DNA, 25 bp, Homo sapien
caagtatagtacactcttgaatgta

SEQ ID NO: 6088385 - DNA, 25 bp, Homo sapien
gagctttgtgtaccatccacggaca

SEQ ID NO: 6088386 - DNA, 25 bp, Homo sapien
tcaggtagtagtccctgcgtgtgct

SEQ ID NO: 6088387 - DNA, 25 bp, Homo sapien
cagcagcaggtaataggaggccatc

SEQ ID NO: 6088388 - DNA, 25 bp, Homo sapien
caaggtgagcacctcaagtaaaagc

SEQ ID NO: 6088389 - DNA, 25 bp, Homo sapien
gcaagatgccattcatgatggcttc

SEQ ID NO: 6088390 - DNA, 25 bp, Homo sapien
tccaggcggagtacgtaggtctgca

SEQ ID NO: 6088391 - DNA, 25 bp, Homo sapien
aggtcaaggccacgctaatactgag

SEQ ID NO: 6088392 - DNA, 25 bp, Homo sapien
tgatggcttccaggcggagtacgta

SEQ ID NO: 6088393 - DNA, 25 bp, Homo sapien
gaaggtcaaggccacgctaatactg

SEQ ID NO: 6088394 - DNA, 25 bp, Homo sapien
agagcaagatgccattcatgatggc

SEQ ID NO: 6088395 - DNA, 25 bp, Homo sapien
tctttcgctggcagaggtttccctt

SEQ ID NO: 6088396 - DNA, 25 bp, Homo sapien
gcttccaggcggagtacgtaggtct

SEQ ID NO: 6088397 - DNA, 25 bp, Homo sapien
ggaggccatcatggcagatgggaag

SEQ ID NO: 6088398 - DNA, 25 bp, Homo sapien
ggtgagcacctcaagtaaaagctct

SEQ ID NO: 6088399 - DNA, 25 bp, Homo sapien
gaaagggcgccactggcacttgatt

SEQ ID NO: 6088400 - DNA, 25 bp, Homo sapien
caatcagcaatagtgtggtcaagtt

SEQ ID NO: 6088401 - DNA, 25 bp, Homo sapien
caaagtgcagcaatgtgttccagaa

SEQ ID NO: 6088402 - DNA, 25 bp, Homo sapien
aaattctctatggaaagggcgccac

SEQ ID NO: 6088403 - DNA, 25 bp, Homo sapien
tagcataagaagagtacaagtaatc

SEQ ID NO: 6088404 - DNA, 25 bp, Homo sapien
gtgaaaaccatacaatcagcaatag

SEQ ID NO: 6088405 - DNA, 25 bp, Homo sapien
caaatcctaaaaggtgaagttcaag

SEQ ID NO: 6088406 - DNA, 25 bp, Homo sapien
ccagcccagagcatattagcataag

SEQ ID NO: 6088407 - DNA, 25 bp, Homo sapien
aatcctgatggcttgaggatttcat

SEQ ID NO: 6088408 - DNA, 25 bp, Homo sapien
gtaatcaagcattctacacggtgtc

SEQ ID NO: 6088409 - DNA, 25 bp, Homo sapien
tccagaacagctcaaatcctaaaag

SEQ ID NO: 6088410 - DNA, 25 bp, Homo sapien
tggcccagttgtcaagccacttaaa

SEQ ID NO: 6088411 - DNA, 25 bp, Homo sapien
ggcccgcctctcttcagtctggttg

SEQ ID NO: 6088412 - DNA, 25 bp, Homo sapien
gggtcactacgcttgtccactttgc

SEQ ID NO: 6088413 - DNA, 25 bp, Homo sapien
cctggccggcagagcaaattgctgt

SEQ ID NO: 6088414 - DNA, 25 bp, Homo sapien
tgtaggagttgtcatcacggccagg

SEQ ID NO: 6088415 - DNA, 25 bp, Homo sapien
gtctccgttccattggtagtctcca

SEQ ID NO: 6088416 - DNA, 25 bp, Homo sapien
tacgcttgtccactttgcgggagcg

SEQ ID NO: 6088417 - DNA, 25 bp, Homo sapien
ggcatttagagccttcagcacggca

SEQ ID NO: 6088418 - DNA, 25 bp, Homo sapien
tcttcagtctggttgtctggcccca

SEQ ID NO: 6088419 - DNA, 25 bp, Homo sapien
cactttgcgggagcgggtgtatccc

SEQ ID NO: 6088420 - DNA, 25 bp, Homo sapien
ggcatgcaggctctcataccaggtc

SEQ ID NO: 6088421 - DNA, 25 bp, Homo sapien
tagagccttcagcacggcatgcagg

SEQ ID NO: 6088422 - DNA, 25 bp, Homo sapien
tcataccaggtctccgttccattgg

SEQ ID NO: 6088423 - DNA, 25 bp, Homo sapien
gttgttggagcgctgggacctctgg

SEQ ID NO: 6088424 - DNA, 25 bp, Homo sapien
cctttggcggaaacggcgctctgtt

SEQ ID NO: 6088425 - DNA, 25 bp, Homo sapien
gaaacggcgctctgttgagaggaca

SEQ ID NO: 6088426 - DNA, 25 bp, Homo sapien
aagcctttggcggaaacggcgctct

SEQ ID NO: 6088427 - DNA, 25 bp, Homo sapien
agccgcagcagcctgagtcgccgca

SEQ ID NO: 6088428 - DNA, 25 bp, Homo sapien
gcagcagcctgagtcgccgcagcag

SEQ ID NO: 6088429 - DNA, 25 bp, Homo sapien
gcctttggcggaaacggcgctctgt

SEQ ID NO: 6088430 - DNA, 25 bp, Homo sapien
tgttggagcgctgggacctctggct

SEQ ID NO: 6088431 - DNA, 25 bp, Homo sapien
agcctttggcggaaacggcgctctg

SEQ ID NO: 6088432 - DNA, 25 bp, Homo sapien
ctttggcggaaacggcgctctgttg

SEQ ID NO: 6088433 - DNA, 25 bp, Homo sapien
agcagcaaccactactccgctgtcg

SEQ ID NO: 6088434 - DNA, 25 bp, Homo sapien
aaacggcgctctgttgagaggacat

SEQ ID NO: 6088435 - DNA, 25 bp, Homo sapien
aaggacttgtaggactgctgtgctc

SEQ ID NO: 6088436 - DNA, 25 bp, Homo sapien
ttttttcgtggatctgcaccaagga

SEQ ID NO: 6088437 - DNA, 25 bp, Homo sapien
tccaaactgcactcgtgctttcccc

SEQ ID NO: 6088438 - DNA, 25 bp, Homo sapien
cagtgtggcactgatctgcatgatc

SEQ ID NO: 6088439 - DNA, 25 bp, Homo sapien
gatcactgactctatggagtaggca

SEQ ID NO: 6088440 - DNA, 25 bp, Homo sapien
ccagtgtggcactgatctgcatgat

SEQ ID NO: 6088441 - DNA, 25 bp, Homo sapien
cgtttttttcgtggatctgcaccaa

SEQ ID NO: 6088442 - DNA, 25 bp, Homo sapien
gcatgatcactgactctatggagta

SEQ ID NO: 6088443 - DNA, 25 bp, Homo sapien
tgcactcgtgctttccccttcacca

SEQ ID NO: 6088444 - DNA, 25 bp, Homo sapien
tgtgctcttgtcagactgtattgag

SEQ ID NO: 6088445 - DNA, 25 bp, Homo sapien
gatctgcatgatcactgactctatg

SEQ ID NO: 6088446 - DNA, 25 bp, Homo sapien
ggcactgatctgcatgatcactgac

SEQ ID NO: 6088447 - DNA, 25 bp, Homo sapien
tgggcaccatcaccgtctggtccat

SEQ ID NO: 6088448 - DNA, 25 bp, Homo sapien
acatgtcccgagagggcgcgaaaaa

SEQ ID NO: 6088449 - DNA, 25 bp, Homo sapien
catggcgttaaagagcgagtgcttc

SEQ ID NO: 6088450 - DNA, 25 bp, Homo sapien
cactcgatgtcgttgcggatggact

SEQ ID NO: 6088451 - DNA, 25 bp, Homo sapien
cgccaacatcgttgtctaacccggg

SEQ ID NO: 6088452 - DNA, 25 bp, Homo sapien
tggacttgagaagcacgtagtggct

SEQ ID NO: 6088453 - DNA, 25 bp, Homo sapien
cacgtagtggctgtacatgtcccga

SEQ ID NO: 6088454 - DNA, 25 bp, Homo sapien
aaagctgccattggcgcttcccgag

SEQ ID NO: 6088455 - DNA, 25 bp, Homo sapien
ggttgtaggtgtcgcagatttgcat

SEQ ID NO: 6088456 - DNA, 25 bp, Homo sapien
gatgttggctttgcgcgtgagtttc

SEQ ID NO: 6088457 - DNA, 25 bp, Homo sapien
cgtgagtttcgagagcacagtgtgc

SEQ ID NO: 6088458 - DNA, 25 bp, Homo sapien
ggtccatgttgttcacggcgccaat

SEQ ID NO: 6088459 - DNA, 25 bp, Homo sapien
agtgccacagtccacacatctcatg

SEQ ID NO: 6088460 - DNA, 25 bp, Homo sapien
ccacggcgttgcacagctcaatgtg

SEQ ID NO: 6088461 - DNA, 25 bp, Homo sapien
gttgcacagctcaatgtgcccggct

SEQ ID NO: 6088462 - DNA, 25 bp, Homo sapien
gctggagcatcttcttcggaacctg

SEQ ID NO: 6088463 - DNA, 25 bp, Homo sapien
aggatgcctccgtgtgtgacccagg

SEQ ID NO: 6088464 - DNA, 25 bp, Homo sapien
aaggacgcagcccacggcgttgcac

SEQ ID NO: 6088465 - DNA, 25 bp, Homo sapien
caggaccaaaggacgcagcccacgg

SEQ ID NO: 6088466 - DNA, 25 bp, Homo sapien
tggcaagtctcctacaaaacacggg

SEQ ID NO: 6088467 - DNA, 25 bp, Homo sapien
gtgcccggctctggcaagtctccta

SEQ ID NO: 6088468 - DNA, 25 bp, Homo sapien
cccagaaaagggtaggatgcctccg

SEQ ID NO: 6088469 - DNA, 25 bp, Homo sapien
cggctctggcaagtctcctacaaaa

SEQ ID NO: 6088470 - DNA, 25 bp, Homo sapien
gtctcctacaaaacacgggagccca

SEQ ID NO: 6088471 - DNA, 25 bp, Homo sapien
tgttgcagcacacttcttaggagat

SEQ ID NO: 6088472 - DNA, 25 bp, Homo sapien
ggctctcggcccgaacgcttggtcg

SEQ ID NO: 6088473 - DNA, 25 bp, Homo sapien
tcctaatgcaatcaaacgctgttgc

SEQ ID NO: 6088474 - DNA, 25 bp, Homo sapien
ggaagagcggtaggccaccctgctc

SEQ ID NO: 6088475 - DNA, 25 bp, Homo sapien
ttcttaggagatcgggttcaacggc

SEQ ID NO: 6088476 - DNA, 25 bp, Homo sapien
attgggtaaggtgagaatctggctt

SEQ ID NO: 6088477 - DNA, 25 bp, Homo sapien
tcctagatgaatcgcttcaggcctg

SEQ ID NO: 6088478 - DNA, 25 bp, Homo sapien
accgcctgccgaggtcctagatgaa

SEQ ID NO: 6088479 - DNA, 25 bp, Homo sapien
aggaagccgtctccggagaccatcg

SEQ ID NO: 6088480 - DNA, 25 bp, Homo sapien
tgctcctctgatcaccggaggacag

SEQ ID NO: 6088481 - DNA, 25 bp, Homo sapien
ggcctggaaacgaggaagccgtctc

SEQ ID NO: 6088482 - DNA, 25 bp, Homo sapien
ctctgatcaccggaggacagggaca

SEQ ID NO: 6088483 - DNA, 25 bp, Homo sapien
taagacacccgggtagatgaagggc

SEQ ID NO: 6088484 - DNA, 25 bp, Homo sapien
ccagggcgatgatgaaggtgagcac

SEQ ID NO: 6088485 - DNA, 25 bp, Homo sapien
caggtgttgtcctgcacgcacagca

SEQ ID NO: 6088486 - DNA, 25 bp, Homo sapien
gaggacagagcgatacctctgtgca

SEQ ID NO: 6088487 - DNA, 25 bp, Homo sapien
gccgggctgccacgtggtttgcact

SEQ ID NO: 6088488 - DNA, 25 bp, Homo sapien
ggtttgcacttacttcatcctgtcc

SEQ ID NO: 6088489 - DNA, 25 bp, Homo sapien
tggaccaggtgttgtcctgcacgca

SEQ ID NO: 6088490 - DNA, 25 bp, Homo sapien
atgaagggcccgatgaggataatga

SEQ ID NO: 6088491 - DNA, 25 bp, Homo sapien
agcaggagtaggtgcgcggccaggc

SEQ ID NO: 6088492 - DNA, 25 bp, Homo sapien
gcacgcacagcaggagcttcaggca

SEQ ID NO: 6088493 - DNA, 25 bp, Homo sapien
gcacccatcgtaagacacccgggta

SEQ ID NO: 6088494 - DNA, 25 bp, Homo sapien
gagcgatacctctgtgcatggctgg

SEQ ID NO: 6088495 - DNA, 25 bp, Homo sapien
tcagcttgggcagtaggaagctcat

SEQ ID NO: 6088496 - DNA, 25 bp, Homo sapien
tctaccaggtatatagcagccattt

SEQ ID NO: 6088497 - DNA, 25 bp, Homo sapien
gctgcccattgaagaaaaagacagt

SEQ ID NO: 6088498 - DNA, 25 bp, Homo sapien
agtagatggaatataactgatgtca

SEQ ID NO: 6088499 - DNA, 25 bp, Homo sapien
cactttcatatgctgcccattgaag

SEQ ID NO: 6088500 - DNA, 25 bp, Homo sapien
tttttgctagtcagcttgggcagta

SEQ ID NO: 6088501 - DNA, 25 bp, Homo sapien
cagcagtactttttatcgcctggtc

SEQ ID NO: 6088502 - DNA, 25 bp, Homo sapien
gcagtttggtccacatctaccaggt

SEQ ID NO: 6088503 - DNA, 25 bp, Homo sapien
tgtcaaaatactgtgtataaactgc

SEQ ID NO: 6088504 - DNA, 25 bp, Homo sapien
gaatattcttgggatcaataggact

SEQ ID NO: 6088505 - DNA, 25 bp, Homo sapien
cattgctcctcgatagattacttca

SEQ ID NO: 6088506 - DNA, 25 bp, Homo sapien
taggactttggacaataagcttccc

SEQ ID NO: 6088507 - DNA, 25 bp, Homo sapien
ccagactatccagcagtggttgtaa

SEQ ID NO: 6088508 - DNA, 25 bp, Homo sapien
tctgccccagacacactaagctgct

SEQ ID NO: 6088509 - DNA, 25 bp, Homo sapien
caaagatagaaggtggtcggtctgc

SEQ ID NO: 6088510 - DNA, 25 bp, Homo sapien
tagtggcattgaagaggatgactcc

SEQ ID NO: 6088511 - DNA, 25 bp, Homo sapien
tctgacaaattcattgcgctcctgc

SEQ ID NO: 6088512 - DNA, 25 bp, Homo sapien
cagctgtctgacaaattcattgcgc

SEQ ID NO: 6088513 - DNA, 25 bp, Homo sapien
aagggttagtattgtgtggtactga

SEQ ID NO: 6088514 - DNA, 25 bp, Homo sapien
tgctccagactatccagcagtggtt

SEQ ID NO: 6088515 - DNA, 25 bp, Homo sapien
ggtgatgtaagacatcagaggaggg

SEQ ID NO: 6088516 - DNA, 25 bp, Homo sapien
gatagtggcattgaagaggatgact

SEQ ID NO: 6088517 - DNA, 25 bp, Homo sapien
actgaactccagctgtctgacaaat

SEQ ID NO: 6088518 - DNA, 25 bp, Homo sapien
agatagaaggtggtcggtctgcccc

SEQ ID NO: 6088519 - DNA, 25 bp, Homo sapien
tagcgtggatctcgaacccagcgag

SEQ ID NO: 6088520 - DNA, 25 bp, Homo sapien
gctgctggattttaaacctggtctc

SEQ ID NO: 6088521 - DNA, 25 bp, Homo sapien
tgcaaggatcctctctatagcgtgg

SEQ ID NO: 6088522 - DNA, 25 bp, Homo sapien
tgctgaggctccaaaagctgctgga

SEQ ID NO: 6088523 - DNA, 25 bp, Homo sapien
catttaagggccactaaactcttgg

SEQ ID NO: 6088524 - DNA, 25 bp, Homo sapien
ccagcttacagccagggaatccttt

SEQ ID NO: 6088525 - DNA, 25 bp, Homo sapien
ggtggcagcacatccaataccctgg

SEQ ID NO: 6088526 - DNA, 25 bp, Homo sapien
tccaggaagtcatgcgacacctgct

SEQ ID NO: 6088527 - DNA, 25 bp, Homo sapien
gaacccagtgattgtcatgaagccc

SEQ ID NO: 6088528 - DNA, 25 bp, Homo sapien
aatcctttctgagaccggtggcagc

SEQ ID NO: 6088529 - DNA, 25 bp, Homo sapien
tatggattgcccgattaaagctgtg

SEQ ID NO: 6088530 - DNA, 25 bp, Homo sapien
ggatgcctcaagcactggtaatgta

SEQ ID NO: 6088531 - DNA, 25 bp, Homo sapien
tccaatcctaaacaagccccaatgt

SEQ ID NO: 6088532 - DNA, 25 bp, Homo sapien
gcccctaatgtagtgatggtgtttt

SEQ ID NO: 6088533 - DNA, 25 bp, Homo sapien
cactaaaggagtggatggatgcgtg

SEQ ID NO: 6088534 - DNA, 25 bp, Homo sapien
cagggctagagctgcccgcttccct

SEQ ID NO: 6088535 - DNA, 25 bp, Homo sapien
acaagccccaatgtgaccacaatct

SEQ ID NO: 6088536 - DNA, 25 bp, Homo sapien
aagttagggcctcttttgatgcctg

SEQ ID NO: 6088537 - DNA, 25 bp, Homo sapien
taaagttagggcctcttttgatgcc

SEQ ID NO: 6088538 - DNA, 25 bp, Homo sapien
tccaaccactgcaagcaaggtctgg

SEQ ID NO: 6088539 - DNA, 25 bp, Homo sapien
gtgggcctcgggcaaagtcgcccta

SEQ ID NO: 6088540 - DNA, 25 bp, Homo sapien
aattgcccctaatgtagtgatggtg

SEQ ID NO: 6088541 - DNA, 25 bp, Homo sapien
ctcgggcaaagtcgccctaaagtgg

SEQ ID NO: 6088542 - DNA, 25 bp, Homo sapien
gggaggattacatcaacagagtgag

SEQ ID NO: 6088543 - DNA, 25 bp, Homo sapien
cagtggtggtcgtggatgcagcggg

SEQ ID NO: 6088544 - DNA, 25 bp, Homo sapien
tctcctccattactcggtcttccag

SEQ ID NO: 6088545 - DNA, 25 bp, Homo sapien
ttccgacaagtctgccaggtctgca

SEQ ID NO: 6088546 - DNA, 25 bp, Homo sapien
tgtccaattcttccgacaagtctgc

SEQ ID NO: 6088547 - DNA, 25 bp, Homo sapien
gtagttgtccaattcttccgacaag

SEQ ID NO: 6088548 - DNA, 25 bp, Homo sapien
gaggagcgccgcatcttctggtagt

SEQ ID NO: 6088549 - DNA, 25 bp, Homo sapien
tcttccgacaagtctgccaggtctg

SEQ ID NO: 6088550 - DNA, 25 bp, Homo sapien
aattcttccgacaagtctgccaggt

SEQ ID NO: 6088551 - DNA, 25 bp, Homo sapien
ctggtagttgtccaattcttccgac

SEQ ID NO: 6088552 - DNA, 25 bp, Homo sapien
tcgccccctgacataaatttcacag

SEQ ID NO: 6088553 - DNA, 25 bp, Homo sapien
tggaggagcgccgcatcttctggta

SEQ ID NO: 6088554 - DNA, 25 bp, Homo sapien
caattcttccgacaagtctgccagg

SEQ ID NO: 6088555 - DNA, 25 bp, Homo sapien
cccatagtttaagagtgttgtccaa

SEQ ID NO: 6088556 - DNA, 25 bp, Homo sapien
tctacagaggccatcatagctacct

SEQ ID NO: 6088557 - DNA, 25 bp, Homo sapien
aaagatcccgagattataaggttgg

SEQ ID NO: 6088558 - DNA, 25 bp, Homo sapien
accaggttatcctcggaaccagaca

SEQ ID NO: 6088559 - DNA, 25 bp, Homo sapien
gctgctgagatcacaacatctgtat

SEQ ID NO: 6088560 - DNA, 25 bp, Homo sapien
tggatggcggattgaagttacaaca

SEQ ID NO: 6088561 - DNA, 25 bp, Homo sapien
taatgctgctgatgcgatgaggttt

SEQ ID NO: 6088562 - DNA, 25 bp, Homo sapien
tgggtcagaatgagcagacaaagtc

SEQ ID NO: 6088563 - DNA, 25 bp, Homo sapien
ttctgtaggatgacaagctgctgag

SEQ ID NO: 6088564 - DNA, 25 bp, Homo sapien
tcaaggacccactacaattaaaatg

SEQ ID NO: 6088565 - DNA, 25 bp, Homo sapien
gacaggagggttatcgtcatcaacg

SEQ ID NO: 6088566 - DNA, 25 bp, Homo sapien
tagctacctgacactatcaaggacc

SEQ ID NO: 6088567 - DNA, 25 bp, Homo sapien
ttgtaagcattctgtgaggagtcca

SEQ ID NO: 6088568 - DNA, 25 bp, Homo sapien
tccactcggaaataagcctctgaca

SEQ ID NO: 6088569 - DNA, 25 bp, Homo sapien
taattctgaacgaggttggaagctg

SEQ ID NO: 6088570 - DNA, 25 bp, Homo sapien
gtctagcctggctaccagggctgaa

SEQ ID NO: 6088571 - DNA, 25 bp, Homo sapien
ggctgaagtgtcttcgttgtaagca

SEQ ID NO: 6088572 - DNA, 25 bp, Homo sapien
gcagcttctcgtgggacatcaggat

SEQ ID NO: 6088573 - DNA, 25 bp, Homo sapien
ctgtgggaccgcgttgtcagtctcg

SEQ ID NO: 6088574 - DNA, 25 bp, Homo sapien
gatgcggcgaaaacgtccgataaaa

SEQ ID NO: 6088575 - DNA, 25 bp, Homo sapien
tccgctccaggaagaaagcgccaag

SEQ ID NO: 6088576 - DNA, 25 bp, Homo sapien
gacatcaggatgtcgtccaaagaaa

SEQ ID NO: 6088577 - DNA, 25 bp, Homo sapien
tgaggagtccatgatgcggcgaaaa

SEQ ID NO: 6088578 - DNA, 25 bp, Homo sapien
aggcatggcggtctccgtgcgcacc

SEQ ID NO: 6088579 - DNA, 25 bp, Homo sapien
tggagcctcttcaccgtgtccccga

SEQ ID NO: 6088580 - DNA, 25 bp, Homo sapien
ggaagcaccaagccctggcgtgcac

SEQ ID NO: 6088581 - DNA, 25 bp, Homo sapien
tgatgggcaggtcccgctggagcct

SEQ ID NO: 6088582 - DNA, 25 bp, Homo sapien
gccgaagccttcgtgtcatcactgt

SEQ ID NO: 6088583 - DNA, 25 bp, Homo sapien
atgaagtccaccacgggtctctggg

SEQ ID NO: 6088584 - DNA, 25 bp, Homo sapien
cactcaaacgccgaagccttcgtgt

SEQ ID NO: 6088585 - DNA, 25 bp, Homo sapien
gctttgcccccaacgctcttagcaa

SEQ ID NO: 6088586 - DNA, 25 bp, Homo sapien
atccttctctgaacgcaaaaccctg

SEQ ID NO: 6088587 - DNA, 25 bp, Homo sapien
atcactgtcacacgggccactcagc

SEQ ID NO: 6088588 - DNA, 25 bp, Homo sapien
aaacgccgaagccttcgtgtcatca

SEQ ID NO: 6088589 - DNA, 25 bp, Homo sapien
acctgcacccactcaaacgccgaag

SEQ ID NO: 6088590 - DNA, 25 bp, Homo sapien
catgaagtccaccacgggtctctgg

SEQ ID NO: 6088591 - DNA, 25 bp, Homo sapien
cgatgcacacgccagaaacaaagta

SEQ ID NO: 6088592 - DNA, 25 bp, Homo sapien
cacgccagaaacaaagtacagagct

SEQ ID NO: 6088593 - DNA, 25 bp, Homo sapien
tctccgcacggagagatcggacacg

SEQ ID NO: 6088594 - DNA, 25 bp, Homo sapien
gaataggccgctaggatgttgctga

SEQ ID NO: 6088595 - DNA, 25 bp, Homo sapien
cagctcctccgcagaggtgaacaca

SEQ ID NO: 6088596 - DNA, 25 bp, Homo sapien
tgttcaaagtcctctcgaagcggcg

SEQ ID NO: 6088597 - DNA, 25 bp, Homo sapien
tgtgtggcaagagatccttatcacc

SEQ ID NO: 6088598 - DNA, 25 bp, Homo sapien
gacaaaggaataggccgctaggatg

SEQ ID NO: 6088599 - DNA, 25 bp, Homo sapien
ctcgaagcggcggtgtctccgcacg

SEQ ID NO: 6088600 - DNA, 25 bp, Homo sapien
aagtcctctcgaagcggcggtgtct

SEQ ID NO: 6088601 - DNA, 25 bp, Homo sapien
gatcggacacggtgtcctcactgcc

SEQ ID NO: 6088602 - DNA, 25 bp, Homo sapien
ggccgctaggatgttgctgagcaaa

SEQ ID NO: 6088603 - DNA, 25 bp, Homo sapien
ctttttgaaagcttagatcgaggac

SEQ ID NO: 6088604 - DNA, 25 bp, Homo sapien
ggccccttaatgatttggtgtgcaa

SEQ ID NO: 6088605 - DNA, 25 bp, Homo sapien
tagatcgaggacaaccctggtttgc

SEQ ID NO: 6088606 - DNA, 25 bp, Homo sapien
caaccctggtttgcaattaaatggt

SEQ ID NO: 6088607 - DNA, 25 bp, Homo sapien
caaagcagtctttatggccccttaa

SEQ ID NO: 6088608 - DNA, 25 bp, Homo sapien
cagtttatcttcttactcaaaatgg

SEQ ID NO: 6088609 - DNA, 25 bp, Homo sapien
gaaagcttagatcgaggacaaccct

SEQ ID NO: 6088610 - DNA, 25 bp, Homo sapien
tcaatgtttacaaactgctcctctt

SEQ ID NO: 6088611 - DNA, 25 bp, Homo sapien
gcaaatgttgtcatcattcaaatca

SEQ ID NO: 6088612 - DNA, 25 bp, Homo sapien
cctgcacttccatctatccattttg

SEQ ID NO: 6088613 - DNA, 25 bp, Homo sapien
tgcaagagatcagactttggtaccc

SEQ ID NO: 6088614 - DNA, 25 bp, Homo sapien
gatttggtgtgcaagagatcagact

SEQ ID NO: 6088615 - DNA, 25 bp, Homo sapien
ccttcataatgatccgggacaggag

SEQ ID NO: 6088616 - DNA, 25 bp, Homo sapien
atcataaagaagacggcgtggcagc

SEQ ID NO: 6088617 - DNA, 25 bp, Homo sapien
gacggcgtggcagcccaggatgttg

SEQ ID NO: 6088618 - DNA, 25 bp, Homo sapien
tctccttcataatgatccgggacag

SEQ ID NO: 6088619 - DNA, 25 bp, Homo sapien
ggatcataaagaagacggcgtggca

SEQ ID NO: 6088620 - DNA, 25 bp, Homo sapien
agggcgctgacgagtccccacatgt

SEQ ID NO: 6088621 - DNA, 25 bp, Homo sapien
tcataaagaagacggcgtggcagcc

SEQ ID NO: 6088622 - DNA, 25 bp, Homo sapien
cttctccttcataatgatccgggac

SEQ ID NO: 6088623 - DNA, 25 bp, Homo sapien
gagggcgctgacgagtccccacatg

SEQ ID NO: 6088624 - DNA, 25 bp, Homo sapien
gatcataaagaagacggcgtggcag

SEQ ID NO: 6088625 - DNA, 25 bp, Homo sapien
ctccttcataatgatccgggacagg

SEQ ID NO: 6088626 - DNA, 25 bp, Homo sapien
tccttcataatgatccgggacagga

SEQ ID NO: 6088627 - DNA, 25 bp, Homo sapien
aaaccgaggtccctccttatgattg

SEQ ID NO: 6088628 - DNA, 25 bp, Homo sapien
gaagagggactgtaggactttgtcc

SEQ ID NO: 6088629 - DNA, 25 bp, Homo sapien
gactgtgctttaaggccctgaacat

SEQ ID NO: 6088630 - DNA, 25 bp, Homo sapien
tttaaggccctgaacatcctgctga

SEQ ID NO: 6088631 - DNA, 25 bp, Homo sapien
gctcagaagcaagcgtttcagaaag

SEQ ID NO: 6088632 - DNA, 25 bp, Homo sapien
tctcggctggacaaggtggttgggt

SEQ ID NO: 6088633 - DNA, 25 bp, Homo sapien
catgaccatattgcaggcgctcggg

SEQ ID NO: 6088634 - DNA, 25 bp, Homo sapien
gactgtaggactttgtccctcatct

SEQ ID NO: 6088635 - DNA, 25 bp, Homo sapien
caggctttttgaaagtgtcatgacc

SEQ ID NO: 6088636 - DNA, 25 bp, Homo sapien
taccatgacaaccggagagcaggtg

SEQ ID NO: 6088637 - DNA, 25 bp, Homo sapien
agtcatgcctgggtacaagtcccaa

SEQ ID NO: 6088638 - DNA, 25 bp, Homo sapien
gctcggagccagtcatgcctgggta

SEQ ID NO: 6088639 - DNA, 25 bp, Homo sapien
taatagctgctaggcactctccctc

SEQ ID NO: 6088640 - DNA, 25 bp, Homo sapien
tctaataaagcctcatgcagtggag

SEQ ID NO: 6088641 - DNA, 25 bp, Homo sapien
tatctattgacggtgaaaaggtttg

SEQ ID NO: 6088642 - DNA, 25 bp, Homo sapien
catcaagtgtaaatgtcgttctagg

SEQ ID NO: 6088643 - DNA, 25 bp, Homo sapien
tgctgaagtttctcaactagagcct

SEQ ID NO: 6088644 - DNA, 25 bp, Homo sapien
caaactttgagtaatgggctgtaga

SEQ ID NO: 6088645 - DNA, 25 bp, Homo sapien
tatgaacccagcaaatagagctgac

SEQ ID NO: 6088646 - DNA, 25 bp, Homo sapien
gaggtaatgcattgtatgaacccag

SEQ ID NO: 6088647 - DNA, 25 bp, Homo sapien
gagcaccagtcagctacaaaatcct

SEQ ID NO: 6088648 - DNA, 25 bp, Homo sapien
cacagggcaagttttgtcttgcacc

SEQ ID NO: 6088649 - DNA, 25 bp, Homo sapien
tgtggatccaaaatataccctgaag

SEQ ID NO: 6088650 - DNA, 25 bp, Homo sapien
ttaaagcctgcatgatagcaggtgc

SEQ ID NO: 6088651 - DNA, 25 bp, Homo sapien
gagtatgtgagtatgtgtgccagac

SEQ ID NO: 6088652 - DNA, 25 bp, Homo sapien
tctggtggcaatggacaggtgactt

SEQ ID NO: 6088653 - DNA, 25 bp, Homo sapien
tacaagccggatgagagttcagggc

SEQ ID NO: 6088654 - DNA, 25 bp, Homo sapien
cctagagacacatgatccattcaca

SEQ ID NO: 6088655 - DNA, 25 bp, Homo sapien
agcttaatctggtggcaatggacag

SEQ ID NO: 6088656 - DNA, 25 bp, Homo sapien
gaaaatgataacaagggtccagact

SEQ ID NO: 6088657 - DNA, 25 bp, Homo sapien
aggtacaagccggatgagagttcag

SEQ ID NO: 6088658 - DNA, 25 bp, Homo sapien
cacatgatccattcacaaagccagg

SEQ ID NO: 6088659 - DNA, 25 bp, Homo sapien
tttctcagagagaggtgatctggct

SEQ ID NO: 6088660 - DNA, 25 bp, Homo sapien
taagccgggtggaaagatgatgtca

SEQ ID NO: 6088661 - DNA, 25 bp, Homo sapien
agggtccagactcagtgatgcagca

SEQ ID NO: 6088662 - DNA, 25 bp, Homo sapien
gcagagggcagagccggaaacagac

SEQ ID NO: 6088663 - DNA, 25 bp, Homo sapien
cagtaacaaacttgccagtgcttta

SEQ ID NO: 6088664 - DNA, 25 bp, Homo sapien
tcccagaacagacgccaaggtcatg

SEQ ID NO: 6088665 - DNA, 25 bp, Homo sapien
tggaccacgtgtacagacttcaggc

SEQ ID NO: 6088666 - DNA, 25 bp, Homo sapien
ggcaggaatgccttccgggaagaat

SEQ ID NO: 6088667 - DNA, 25 bp, Homo sapien
ttacactactctggcttaaaaggac

SEQ ID NO: 6088668 - DNA, 25 bp, Homo sapien
cagaggaaaccagcgatccatcgtg

SEQ ID NO: 6088669 - DNA, 25 bp, Homo sapien
cagacatccgagacgcagtttacac

SEQ ID NO: 6088670 - DNA, 25 bp, Homo sapien
ggtcatgctcccagccggattgtcg

SEQ ID NO: 6088671 - DNA, 25 bp, Homo sapien
attgtcgtagcctcgccgccgtgat

SEQ ID NO: 6088672 - DNA, 25 bp, Homo sapien
gatccatcgtggcttcgaggcaaaa

SEQ ID NO: 6088673 - DNA, 25 bp, Homo sapien
ggctgtgttaagcacttcgcgtcga

SEQ ID NO: 6088674 - DNA, 25 bp, Homo sapien
cgggaagaatcctctggtcgccgga

SEQ ID NO: 6088675 - DNA, 25 bp, Homo sapien
tggcggccctgatccgaaaggaaac

SEQ ID NO: 6088676 - DNA, 25 bp, Homo sapien
tacgatcttcttgacaaagctccca

SEQ ID NO: 6088677 - DNA, 25 bp, Homo sapien
tacgcccatagttagctctgtccag

SEQ ID NO: 6088678 - DNA, 25 bp, Homo sapien
caagccatggccacggattacgatc

SEQ ID NO: 6088679 - DNA, 25 bp, Homo sapien
cagagatcagaagcttgaagggcct

SEQ ID NO: 6088680 - DNA, 25 bp, Homo sapien
tcaagcgtttcggtaggagggtctc

SEQ ID NO: 6088681 - DNA, 25 bp, Homo sapien
tcttgttgcggctgagaggtgtcct

SEQ ID NO: 6088682 - DNA, 25 bp, Homo sapien
catctgactggttgatccatgagac

SEQ ID NO: 6088683 - DNA, 25 bp, Homo sapien
caattgtattgactggtggcgtctc

SEQ ID NO: 6088684 - DNA, 25 bp, Homo sapien
taactgaatcaaggttctcccgaag

SEQ ID NO: 6088685 - DNA, 25 bp, Homo sapien
gagtatgctctagaatttggctggc

SEQ ID NO: 6088686 - DNA, 25 bp, Homo sapien
gacacatggactccaagcatttctc

SEQ ID NO: 6088687 - DNA, 25 bp, Homo sapien
ccatagagggccgtgagcagacctg

SEQ ID NO: 6088688 - DNA, 25 bp, Homo sapien
cattgcggtgcagcacagccacctt

SEQ ID NO: 6088689 - DNA, 25 bp, Homo sapien
gccaaaggagccattgcggtgcagc

SEQ ID NO: 6088690 - DNA, 25 bp, Homo sapien
cttgatggccactttgatcaggtcc

SEQ ID NO: 6088691 - DNA, 25 bp, Homo sapien
agcttctggcgaaagcgggtagcca

SEQ ID NO: 6088692 - DNA, 25 bp, Homo sapien
taagtgccgtcatggcaccctgccg

SEQ ID NO: 6088693 - DNA, 25 bp, Homo sapien
accaaagctaagtgccgtcatggca

SEQ ID NO: 6088694 - DNA, 25 bp, Homo sapien
gagtccgtcacagatcttgccaagg

SEQ ID NO: 6088695 - DNA, 25 bp, Homo sapien
cttggacacacggtagagctcatct

SEQ ID NO: 6088696 - DNA, 25 bp, Homo sapien
tgatcaaacacgtggcggatgcggc

SEQ ID NO: 6088697 - DNA, 25 bp, Homo sapien
gatcaggtccttgatcacgcgctgg

SEQ ID NO: 6088698 - DNA, 25 bp, Homo sapien
agagaagtgatcaaacacgtggcgg

SEQ ID NO: 6088699 - DNA, 25 bp, Homo sapien
cggccctgtggagaccctcatgagg

SEQ ID NO: 6088700 - DNA, 25 bp, Homo sapien
tacattgtgaagacggttacctgaa

SEQ ID NO: 6088701 - DNA, 25 bp, Homo sapien
tggtgaacagtcctacaagcagcct

SEQ ID NO: 6088702 - DNA, 25 bp, Homo sapien
agaccctcatgaggcctgaggctaa

SEQ ID NO: 6088703 - DNA, 25 bp, Homo sapien
gcttcgctgtgttgaggtttggttc

SEQ ID NO: 6088704 - DNA, 25 bp, Homo sapien
gtccagggctaaacgggtgcactct

SEQ ID NO: 6088705 - DNA, 25 bp, Homo sapien
tgtaacctgagctccggccctgtgg

SEQ ID NO: 6088706 - DNA, 25 bp, Homo sapien
ggctaagaatgaaacagatctttgc

SEQ ID NO: 6088707 - DNA, 25 bp, Homo sapien
taaacgggtgcactctcttgctgct

SEQ ID NO: 6088708 - DNA, 25 bp, Homo sapien
gcttcttccccagattacttacata

SEQ ID NO: 6088709 - DNA, 25 bp, Homo sapien
gggaactcccaactctagccaagtc

SEQ ID NO: 6088710 - DNA, 25 bp, Homo sapien
gattacttacatacgtgcatgccat

SEQ ID NO: 6088711 - DNA, 25 bp, Homo sapien
gacggccaacttttaatcgtacaca

SEQ ID NO: 6088712 - DNA, 25 bp, Homo sapien
tgcgttttgccaacaagcgcatgcc

SEQ ID NO: 6088713 - DNA, 25 bp, Homo sapien
ttttgccaacaagcgcatgccctgt

SEQ ID NO: 6088714 - DNA, 25 bp, Homo sapien
agattcttttcctgcgtcttcaggt

SEQ ID NO: 6088715 - DNA, 25 bp, Homo sapien
caacttttaatcgtacacacatggg

SEQ ID NO: 6088716 - DNA, 25 bp, Homo sapien
cctgtgaccatagtctggggcctgg

SEQ ID NO: 6088717 - DNA, 25 bp, Homo sapien
tgccaacaagcgcatgccctgtttt

SEQ ID NO: 6088718 - DNA, 25 bp, Homo sapien
ggccaacttttaatcgtacacacat

SEQ ID NO: 6088719 - DNA, 25 bp, Homo sapien
cgttttgccaacaagcgcatgccct

SEQ ID NO: 6088720 - DNA, 25 bp, Homo sapien
gccggccctgcgttttgccaacaag

SEQ ID NO: 6088721 - DNA, 25 bp, Homo sapien
cctgcgtcttcaggtctgaaggatt

SEQ ID NO: 6088722 - DNA, 25 bp, Homo sapien
ttttcctgcgtcttcaggtctgaag

SEQ ID NO: 6088723 - DNA, 25 bp, Homo sapien
tgtgcacgtcgggagaaaccacagc

SEQ ID NO: 6088724 - DNA, 25 bp, Homo sapien
gtgaatacgcttccgtcctttcaaa

SEQ ID NO: 6088725 - DNA, 25 bp, Homo sapien
caaattctggaactgtcgcaggcgg

SEQ ID NO: 6088726 - DNA, 25 bp, Homo sapien
tacgagatcgatgtgcacgtcggga

SEQ ID NO: 6088727 - DNA, 25 bp, Homo sapien
tcccgtttaatatcagatgccacac

SEQ ID NO: 6088728 - DNA, 25 bp, Homo sapien
gccaggagtactggcgcacagtgaa

SEQ ID NO: 6088729 - DNA, 25 bp, Homo sapien
tactggcgcacagtgaatacgcttc

SEQ ID NO: 6088730 - DNA, 25 bp, Homo sapien
tcagtgttaacgaaatggattctcc

SEQ ID NO: 6088731 - DNA, 25 bp, Homo sapien
gaagaaccattcccgcttccgaagc

SEQ ID NO: 6088732 - DNA, 25 bp, Homo sapien
acagacaggtccaaacgcaaacgtg

SEQ ID NO: 6088733 - DNA, 25 bp, Homo sapien
gtcgcaggcggaaaccacacaaggg

SEQ ID NO: 6088734 - DNA, 25 bp, Homo sapien
cagatgccacacatacgagatcgat

SEQ ID NO: 6088735 - DNA, 25 bp, Homo sapien
gacatcagatggtattcgagcactt

SEQ ID NO: 6088736 - DNA, 25 bp, Homo sapien
tcccagagatttatcagaggaggat

SEQ ID NO: 6088737 - DNA, 25 bp, Homo sapien
cagggtgcaaacctttggtggtgac

SEQ ID NO: 6088738 - DNA, 25 bp, Homo sapien
tactctttttgatcagggtgcaaac

SEQ ID NO: 6088739 - DNA, 25 bp, Homo sapien
cactttgatcataacagacttcaag

SEQ ID NO: 6088740 - DNA, 25 bp, Homo sapien
tcttgtggaaaagatccatccactt

SEQ ID NO: 6088741 - DNA, 25 bp, Homo sapien
ggataaagctcacctaatgcaaagg

SEQ ID NO: 6088742 - DNA, 25 bp, Homo sapien
gaaggcctccaagacaggccataag

SEQ ID NO: 6088743 - DNA, 25 bp, Homo sapien
ttcgagcactttgcgcagcatgaga

SEQ ID NO: 6088744 - DNA, 25 bp, Homo sapien
gtaagtaattcctcacatagctgtg

SEQ ID NO: 6088745 - DNA, 25 bp, Homo sapien
gagagaggcagctgataagacatat

SEQ ID NO: 6088746 - DNA, 25 bp, Homo sapien
gacttcaagtcagcgccaactaggt

SEQ ID NO: 6088747 - DNA, 25 bp, Homo sapien
gacggatcagtctttgggtccacca

SEQ ID NO: 6088748 - DNA, 25 bp, Homo sapien
caccgggccgaagaggttcctgcag

SEQ ID NO: 6088749 - DNA, 25 bp, Homo sapien
cagagttagccggagccccaattaa

SEQ ID NO: 6088750 - DNA, 25 bp, Homo sapien
ttccttattcctgcgcattgctccg

SEQ ID NO: 6088751 - DNA, 25 bp, Homo sapien
tcgaaattccacttgcgctggctcg

SEQ ID NO: 6088752 - DNA, 25 bp, Homo sapien
ccgtctggctgtccgacggatcagt

SEQ ID NO: 6088753 - DNA, 25 bp, Homo sapien
ctgctccacagaaccggcatttggg

SEQ ID NO: 6088754 - DNA, 25 bp, Homo sapien
ccgttagacactcgcacgtttgaca

SEQ ID NO: 6088755 - DNA, 25 bp, Homo sapien
gggtccaccaaatgcgtgtcctcag

SEQ ID NO: 6088756 - DNA, 25 bp, Homo sapien
cgtcggttgcaggtcgcttccttat

SEQ ID NO: 6088757 - DNA, 25 bp, Homo sapien
ccaaatgcgtgtcctcagagttagc

SEQ ID NO: 6088758 - DNA, 25 bp, Homo sapien
tccaggctagggctcccgttagaca

SEQ ID NO: 6088759 - DNA, 25 bp, Homo sapien
gaaatgcctggaacttgccctcact

SEQ ID NO: 6088760 - DNA, 25 bp, Homo sapien
tccagcaggttatccacagtcctca

SEQ ID NO: 6088761 - DNA, 25 bp, Homo sapien
aactctcgggacacgaagccgtggc

SEQ ID NO: 6088762 - DNA, 25 bp, Homo sapien
gtgtccaaatgtcggccaccccgag

SEQ ID NO: 6088763 - DNA, 25 bp, Homo sapien
tcactgagcctaagctcggaggccc

SEQ ID NO: 6088764 - DNA, 25 bp, Homo sapien
cgggcagacacctccagcaggttat

SEQ ID NO: 6088765 - DNA, 25 bp, Homo sapien
cccgaggtgcttccaggtttaagat

SEQ ID NO: 6088766 - DNA, 25 bp, Homo sapien
tggcaaattcgtactcggcggtggc

SEQ ID NO: 6088767 - DNA, 25 bp, Homo sapien
gcccgaggccggacatagtagccat

SEQ ID NO: 6088768 - DNA, 25 bp, Homo sapien
catcagcaggcaggacataggtgcg

SEQ ID NO: 6088769 - DNA, 25 bp, Homo sapien
acccaggcggctcgggttggcaaat

SEQ ID NO: 6088770 - DNA, 25 bp, Homo sapien
tgccatcatgggagagagcagctcg

SEQ ID NO: 6088771 - DNA, 25 bp, Homo sapien
gctgagtgaggtttgccttgaaaca

SEQ ID NO: 6088772 - DNA, 25 bp, Homo sapien
tgcttgccggccaaggagtggcact

SEQ ID NO: 6088773 - DNA, 25 bp, Homo sapien
gataagttgcagcaaaatcccgttc

SEQ ID NO: 6088774 - DNA, 25 bp, Homo sapien
gatctgcaccacgtacctatctcgg

SEQ ID NO: 6088775 - DNA, 25 bp, Homo sapien
ttaaaggccggcgtgatctgcacca

SEQ ID NO: 6088776 - DNA, 25 bp, Homo sapien
gattctcagtttcacttcgctggtg

SEQ ID NO: 6088777 - DNA, 25 bp, Homo sapien
tggcccggcagttcaaggtgacgat

SEQ ID NO: 6088778 - DNA, 25 bp, Homo sapien
cagatcccggtgcatttaaaggccg

SEQ ID NO: 6088779 - DNA, 25 bp, Homo sapien
gatggagaggcacttctttctgcag

SEQ ID NO: 6088780 - DNA, 25 bp, Homo sapien
gggatgcttttcacactcgtaggaa

SEQ ID NO: 6088781 - DNA, 25 bp, Homo sapien
gagattgaaaccttccgccttgacc

SEQ ID NO: 6088782 - DNA, 25 bp, Homo sapien
gtaattgttcaagggctggcccggc

SEQ ID NO: 6088783 - DNA, 25 bp, Homo sapien
tgggcctatggcgaacacttgcaga

SEQ ID NO: 6088784 - DNA, 25 bp, Homo sapien
tggcgatgggccctggctgcgtcag

SEQ ID NO: 6088785 - DNA, 25 bp, Homo sapien
taaacaaacgcaacgcagctctctc

SEQ ID NO: 6088786 - DNA, 25 bp, Homo sapien
gatgaactccttgcgtggtctgtaa

SEQ ID NO: 6088787 - DNA, 25 bp, Homo sapien
agcactgtgggcctatggcgaacac

SEQ ID NO: 6088788 - DNA, 25 bp, Homo sapien
tactgatcattttgggatgaactcc

SEQ ID NO: 6088789 - DNA, 25 bp, Homo sapien
ggtctgtaaacaaacgcaacgcagc

SEQ ID NO: 6088790 - DNA, 25 bp, Homo sapien
tccttgcgtggtctgtaaacaaacg

SEQ ID NO: 6088791 - DNA, 25 bp, Homo sapien
tatggcgaacacttgcagattactg

SEQ ID NO: 6088792 - DNA, 25 bp, Homo sapien
gcgaacacttgcagattactgatca

SEQ ID NO: 6088793 - DNA, 25 bp, Homo sapien
tgggatgaactccttgcgtggtctg

SEQ ID NO: 6088794 - DNA, 25 bp, Homo sapien
aaaaggggcttctggatcaagacaa

SEQ ID NO: 6088795 - DNA, 25 bp, Homo sapien
aaggtggaagcgcacagggaccgcg

SEQ ID NO: 6088796 - DNA, 25 bp, Homo sapien
gatccttttgggccgtggctgaaga

SEQ ID NO: 6088797 - DNA, 25 bp, Homo sapien
gtggaagcgcacagggaccgcggaa

SEQ ID NO: 6088798 - DNA, 25 bp, Homo sapien
aagcgcacagggaccgcggaaccgc

SEQ ID NO: 6088799 - DNA, 25 bp, Homo sapien
gtgaaggtggaagcgcacagggacc

SEQ ID NO: 6088800 - DNA, 25 bp, Homo sapien
gggtgaaggtggaagcgcacaggga

SEQ ID NO: 6088801 - DNA, 25 bp, Homo sapien
tggaagcgcacagggaccgcggaac

SEQ ID NO: 6088802 - DNA, 25 bp, Homo sapien
aggtggaagcgcacagggaccgcgg

SEQ ID NO: 6088803 - DNA, 25 bp, Homo sapien
ggtgaaggtggaagcgcacagggac

SEQ ID NO: 6088804 - DNA, 25 bp, Homo sapien
ccgccgtgtggactgttcgggctca

SEQ ID NO: 6088805 - DNA, 25 bp, Homo sapien
cgccgtgtggactgttcgggctcac

SEQ ID NO: 6088806 - DNA, 25 bp, Homo sapien
atccttttgggccgtggctgaagaa

SEQ ID NO: 6088807 - DNA, 25 bp, Homo sapien
tcacatcgatcaggacggtgctgtc

SEQ ID NO: 6088808 - DNA, 25 bp, Homo sapien
agtctcccgccaggtcctgtgcatg

SEQ ID NO: 6088809 - DNA, 25 bp, Homo sapien
ctcatgcggcaaggtcatgggtcac

SEQ ID NO: 6088810 - DNA, 25 bp, Homo sapien
aagctttaatgttggagacgggaca

SEQ ID NO: 6088811 - DNA, 25 bp, Homo sapien
agagttttcaggtgaccctgagggc

SEQ ID NO: 6088812 - DNA, 25 bp, Homo sapien
tgtcctgctgcctgtctagcttcag

SEQ ID NO: 6088813 - DNA, 25 bp, Homo sapien
gattatccagaaaagtctcccgcca

SEQ ID NO: 6088814 - DNA, 25 bp, Homo sapien
cgtgggctgtgctcccgtaagagcc

SEQ ID NO: 6088815 - DNA, 25 bp, Homo sapien
gcccagccgcacgaagattatccag

SEQ ID NO: 6088816 - DNA, 25 bp, Homo sapien
gagggatcaatgtttacctccgcct

SEQ ID NO: 6088817 - DNA, 25 bp, Homo sapien
ccacacggaggagctcacggtggct

SEQ ID NO: 6088818 - DNA, 25 bp, Homo sapien
tgacagcctccacgtacctggtcta

SEQ ID NO: 6088819 - DNA, 25 bp, Homo sapien
ccaacaggcgagtgtcagagcatga

SEQ ID NO: 6088820 - DNA, 25 bp, Homo sapien
tactgtagccgatgaagaccagtgt

SEQ ID NO: 6088821 - DNA, 25 bp, Homo sapien
gtaccatggctaggaaaggagctgc

SEQ ID NO: 6088822 - DNA, 25 bp, Homo sapien
ggtcaaggccatcagaaagtcccag

SEQ ID NO: 6088823 - DNA, 25 bp, Homo sapien
gatcaagggccatgtctgtcaggat

SEQ ID NO: 6088824 - DNA, 25 bp, Homo sapien
tcatcagagtgccatagcgcagtgg

SEQ ID NO: 6088825 - DNA, 25 bp, Homo sapien
taatcaagatgagctcgggagagga

SEQ ID NO: 6088826 - DNA, 25 bp, Homo sapien
agaccagtgtgaggtgagacccgca

SEQ ID NO: 6088827 - DNA, 25 bp, Homo sapien
ggttgatgacgtcgccatggcagta

SEQ ID NO: 6088828 - DNA, 25 bp, Homo sapien
caactgcaggagaggttcattgtca

SEQ ID NO: 6088829 - DNA, 25 bp, Homo sapien
tgccaggcctgacatacagaaagat

SEQ ID NO: 6088830 - DNA, 25 bp, Homo sapien
gatccgcagcacagtggtcactatg

SEQ ID NO: 6088831 - DNA, 25 bp, Homo sapien
gagctcgtcatattgcataagaagg

SEQ ID NO: 6088832 - DNA, 25 bp, Homo sapien
catgatttcatggttacagtactct

SEQ ID NO: 6088833 - DNA, 25 bp, Homo sapien
ccaggttcaataaggacacgtcttt

SEQ ID NO: 6088834 - DNA, 25 bp, Homo sapien
tgatttagtggcattccaggttcaa

SEQ ID NO: 6088835 - DNA, 25 bp, Homo sapien
tacactccttctacaagacctttgc

SEQ ID NO: 6088836 - DNA, 25 bp, Homo sapien
gtaacagattttttggagctcgtca

SEQ ID NO: 6088837 - DNA, 25 bp, Homo sapien
gtagcccttcctataaagtgattcg

SEQ ID NO: 6088838 - DNA, 25 bp, Homo sapien
tgccacccaacggtgtttgtagtaa

SEQ ID NO: 6088839 - DNA, 25 bp, Homo sapien
attcttacatggcacaaatctgttg

SEQ ID NO: 6088840 - DNA, 25 bp, Homo sapien
aaagtgattcgtatttacacgctgg

SEQ ID NO: 6088841 - DNA, 25 bp, Homo sapien
caagtgataaggacgtagcccttcc

SEQ ID NO: 6088842 - DNA, 25 bp, Homo sapien
gaagtaatgttctgccacccaacgg

SEQ ID NO: 6088843 - DNA, 25 bp, Homo sapien
aatcctttcctataagccagtggcc

SEQ ID NO: 6088844 - DNA, 25 bp, Homo sapien
gttcttccagggagcatgaatagga

SEQ ID NO: 6088845 - DNA, 25 bp, Homo sapien
cagtgtcttaatgtcctggcgtgcc

SEQ ID NO: 6088846 - DNA, 25 bp, Homo sapien
agaagggcacactgaacacaataag

SEQ ID NO: 6088847 - DNA, 25 bp, Homo sapien
cagtaatagtagtgtagcctttcca

SEQ ID NO: 6088848 - DNA, 25 bp, Homo sapien
tctcctggtcaactggtagagcagc

SEQ ID NO: 6088849 - DNA, 25 bp, Homo sapien
cataatgccagttgtgaaacgtctg

SEQ ID NO: 6088850 - DNA, 25 bp, Homo sapien
tcccaaagatcataatgaaaggcct

SEQ ID NO: 6088851 - DNA, 25 bp, Homo sapien
gcatgaataggaatgaaccacacct

SEQ ID NO: 6088852 - DNA, 25 bp, Homo sapien
aaccacacctaatgaagtaggccct

SEQ ID NO: 6088853 - DNA, 25 bp, Homo sapien
gaagtaggccctatcattttattga

SEQ ID NO: 6088854 - DNA, 25 bp, Homo sapien
tctcaaacatcagacggaaaccagt

SEQ ID NO: 6088855 - DNA, 25 bp, Homo sapien
tcttaaaaggtgtgatgatggaaca

SEQ ID NO: 6088856 - DNA, 25 bp, Homo sapien
caaaactgaatagaatagcttattt

SEQ ID NO: 6088857 - DNA, 25 bp, Homo sapien
gcatttgcaattattccattctcaa

SEQ ID NO: 6088858 - DNA, 25 bp, Homo sapien
gactgacacctaatggaaactatta

SEQ ID NO: 6088859 - DNA, 25 bp, Homo sapien
tagatttcatcactagcatttgcaa

SEQ ID NO: 6088860 - DNA, 25 bp, Homo sapien
tctcctcaacaaatgccagagtgtt

SEQ ID NO: 6088861 - DNA, 25 bp, Homo sapien
tccagagaccacctaggaactagag

SEQ ID NO: 6088862 - DNA, 25 bp, Homo sapien
cagttaactatgagtagaggtttcc

SEQ ID NO: 6088863 - DNA, 25 bp, Homo sapien
caaatgccagagtgttacatcttct

SEQ ID NO: 6088864 - DNA, 25 bp, Homo sapien
cagttcagactgacacctaatggaa

SEQ ID NO: 6088865 - DNA, 25 bp, Homo sapien
gaaccagttcagactgacacctaat

SEQ ID NO: 6088866 - DNA, 25 bp, Homo sapien
tactttcagttaactatgagtagag

SEQ ID NO: 6088867 - DNA, 25 bp, Homo sapien
tacccattaaaactgacgatgcatg

SEQ ID NO: 6088868 - DNA, 25 bp, Homo sapien
gagactcaggagatatggtaactaa

SEQ ID NO: 6088869 - DNA, 25 bp, Homo sapien
tttttacaatgagccatagttatgg

SEQ ID NO: 6088870 - DNA, 25 bp, Homo sapien
ccatgggctgtggatttgccaagct

SEQ ID NO: 6088871 - DNA, 25 bp, Homo sapien
gggagatagcaatcagcctaaactg

SEQ ID NO: 6088872 - DNA, 25 bp, Homo sapien
gaaagtaaggctaatataatcccca

SEQ ID NO: 6088873 - DNA, 25 bp, Homo sapien
ctgggtgaagggcaaatgagaactc

SEQ ID NO: 6088874 - DNA, 25 bp, Homo sapien
catgtattgaatcctgggacagaag

SEQ ID NO: 6088875 - DNA, 25 bp, Homo sapien
agaacacccaggacttataccgacg

SEQ ID NO: 6088876 - DNA, 25 bp, Homo sapien
tataccgacgctccagtctgatgga

SEQ ID NO: 6088877 - DNA, 25 bp, Homo sapien
aagcttgtccataatacctgcctag

SEQ ID NO: 6088878 - DNA, 25 bp, Homo sapien
aaaactgacgatgcatggaagacga

SEQ ID NO: 6088879 - DNA, 25 bp, Homo sapien
caatgacttcgttaggatgccatgg

SEQ ID NO: 6088880 - DNA, 25 bp, Homo sapien
tgggcaccatcatacacagagagaa

SEQ ID NO: 6088881 - DNA, 25 bp, Homo sapien
tactgcaaggtaggtctgagtccct

SEQ ID NO: 6088882 - DNA, 25 bp, Homo sapien
ctaatggcctcagggtttgggccct

SEQ ID NO: 6088883 - DNA, 25 bp, Homo sapien
gggaaacgtgggcaccatcatacac

SEQ ID NO: 6088884 - DNA, 25 bp, Homo sapien
ggtctgagtccctaacctctgcact

SEQ ID NO: 6088885 - DNA, 25 bp, Homo sapien
ggtcccaacagagataatcaaggta

SEQ ID NO: 6088886 - DNA, 25 bp, Homo sapien
gtaaaatcaggcctaatggcctcag

SEQ ID NO: 6088887 - DNA, 25 bp, Homo sapien
caagggacctctgtggccaacagaa

SEQ ID NO: 6088888 - DNA, 25 bp, Homo sapien
tatgtctggtgtccttaaaacaagg

SEQ ID NO: 6088889 - DNA, 25 bp, Homo sapien
tatttggaaagaaggtcccaacaga

SEQ ID NO: 6088890 - DNA, 25 bp, Homo sapien
ctctgtggccaacagaaactgggag

SEQ ID NO: 6088891 - DNA, 25 bp, Homo sapien
aagggctaggtctggaaagattcca

SEQ ID NO: 6088892 - DNA, 25 bp, Homo sapien
gcagctcctagctacagtttcagca

SEQ ID NO: 6088893 - DNA, 25 bp, Homo sapien
cctaagaatatctagggccccacat

SEQ ID NO: 6088894 - DNA, 25 bp, Homo sapien
caaagaccaggtatccatatttcat

SEQ ID NO: 6088895 - DNA, 25 bp, Homo sapien
ccctcccagcttgtggacgcattta

SEQ ID NO: 6088896 - DNA, 25 bp, Homo sapien
actcaggagttatcgaatcaaaggg

SEQ ID NO: 6088897 - DNA, 25 bp, Homo sapien
ggccccacattaagtaacctcatta

SEQ ID NO: 6088898 - DNA, 25 bp, Homo sapien
agtttcagcagctacacctcacagc

SEQ ID NO: 6088899 - DNA, 25 bp, Homo sapien
gacgcatttactggaagctcctcaa

SEQ ID NO: 6088900 - DNA, 25 bp, Homo sapien
ccagagatcagtgggtagagctaaa

SEQ ID NO: 6088901 - DNA, 25 bp, Homo sapien
caatctgcctgcaagaaggcagcaa

SEQ ID NO: 6088902 - DNA, 25 bp, Homo sapien
gggaactagccccatcctaagaata

SEQ ID NO: 6088903 - DNA, 25 bp, Homo sapien
gatgcccacaagcaatctatgagaa

SEQ ID NO: 6088904 - DNA, 25 bp, Homo sapien
ttttcttatatgagtgaggctgaac

SEQ ID NO: 6088905 - DNA, 25 bp, Homo sapien
aaccaaattgttctagatgcccaca

SEQ ID NO: 6088906 - DNA, 25 bp, Homo sapien
gcatgtggattttagtgattcaacc

SEQ ID NO: 6088907 - DNA, 25 bp, Homo sapien
aattttccacattctcatagcgtat

SEQ ID NO: 6088908 - DNA, 25 bp, Homo sapien
aagtagaattgcagggccaaatggc

SEQ ID NO: 6088909 - DNA, 25 bp, Homo sapien
tgtcatttcactcatatgcaggttt

SEQ ID NO: 6088910 - DNA, 25 bp, Homo sapien
aaagcagtgtctcagtgtaatttca

SEQ ID NO: 6088911 - DNA, 25 bp, Homo sapien
ttctttgtgattaccaacaatgcag

SEQ ID NO: 6088912 - DNA, 25 bp, Homo sapien
catagcgtatattcacactttgagt

SEQ ID NO: 6088913 - DNA, 25 bp, Homo sapien
caacaatgcagccaggagtaacact

SEQ ID NO: 6088914 - DNA, 25 bp, Homo sapien
gtaacactccacgtatgtcatttca

SEQ ID NO: 6088915 - DNA, 25 bp, Homo sapien
tgattgccacttatgctttcttgcc

SEQ ID NO: 6088916 - DNA, 25 bp, Homo sapien
ttatgattgccacttatgctttctt

SEQ ID NO: 6088917 - DNA, 25 bp, Homo sapien
tatgattgccacttatgctttcttg

SEQ ID NO: 6088918 - DNA, 25 bp, Homo sapien
atgattgccacttatgctttcttgc

SEQ ID NO: 6088919 - DNA, 25 bp, Homo sapien
tttatgattgccacttatgctttct

SEQ ID NO: 6088920 - DNA, 25 bp, Homo sapien
gagatgccggactcgaactcgtccg

SEQ ID NO: 6088921 - DNA, 25 bp, Homo sapien
ctgccatctagtttgacgcggattc

SEQ ID NO: 6088922 - DNA, 25 bp, Homo sapien
aattcgcgtactagccggacttgga

SEQ ID NO: 6088923 - DNA, 25 bp, Homo sapien
tctgagcgataaagacgacatgctt

SEQ ID NO: 6088924 - DNA, 25 bp, Homo sapien
tagtttgacgcggattctcttgccc

SEQ ID NO: 6088925 - DNA, 25 bp, Homo sapien
gtcagagtacggctcctgggacgct

SEQ ID NO: 6088926 - DNA, 25 bp, Homo sapien
tcgtccggcttctcgccattgggct

SEQ ID NO: 6088927 - DNA, 25 bp, Homo sapien
ccatctagtttgacgcggattctct

SEQ ID NO: 6088928 - DNA, 25 bp, Homo sapien
ttcaatttccttagctgccgtaata

SEQ ID NO: 6088929 - DNA, 25 bp, Homo sapien
gcgataaagacgacatgcttcccac

SEQ ID NO: 6088930 - DNA, 25 bp, Homo sapien
gagccggctgccatctagtttgacg

SEQ ID NO: 6088931 - DNA, 25 bp, Homo sapien
gtgcacagctgtcagagtacggctc

SEQ ID NO: 6088932 - DNA, 25 bp, Homo sapien
gaaaatagttgcaggaggaatgaaa

SEQ ID NO: 6088933 - DNA, 25 bp, Homo sapien
cacaattccattgtctataccttcc

SEQ ID NO: 6088934 - DNA, 25 bp, Homo sapien
tatcacaggtttctgtacatgcatt

SEQ ID NO: 6088935 - DNA, 25 bp, Homo sapien
acatgcattggaggtttgctatgcg

SEQ ID NO: 6088936 - DNA, 25 bp, Homo sapien
tcctacaagggtataaatatcacag

SEQ ID NO: 6088937 - DNA, 25 bp, Homo sapien
gagaaacatagagattaagctactc

SEQ ID NO: 6088938 - DNA, 25 bp, Homo sapien
tctgtacatgcattggaggtttgct

SEQ ID NO: 6088939 - DNA, 25 bp, Homo sapien
gaaacatagagattaagctactcac

SEQ ID NO: 6088940 - DNA, 25 bp, Homo sapien
aaatatcacaggtttctgtacatgc

SEQ ID NO: 6088941 - DNA, 25 bp, Homo sapien
gattaagctactcacaattccattg

SEQ ID NO: 6088942 - DNA, 25 bp, Homo sapien
tagagattaagctactcacaattcc

SEQ ID NO: 6088943 - DNA, 25 bp, Homo sapien
tggagagaaacatagagattaagct

SEQ ID NO: 6088944 - DNA, 25 bp, Homo sapien
actaccagaaatatactatcttcaa

SEQ ID NO: 6088945 - DNA, 25 bp, Homo sapien
cattcataccttacaatttaaattc

SEQ ID NO: 6088946 - DNA, 25 bp, Homo sapien
gacaaatcacattcataccttacaa

SEQ ID NO: 6088947 - DNA, 25 bp, Homo sapien
gcctattacatcattagattttcat

SEQ ID NO: 6088948 - DNA, 25 bp, Homo sapien
tgataataacttcaactagtaaata

SEQ ID NO: 6088949 - DNA, 25 bp, Homo sapien
gaatcccaggcttatcatattataa

SEQ ID NO: 6088950 - DNA, 25 bp, Homo sapien
aatatactatcttcaactctcggct

SEQ ID NO: 6088951 - DNA, 25 bp, Homo sapien
tgtaccttaatattgtcactttata

SEQ ID NO: 6088952 - DNA, 25 bp, Homo sapien
agtagaatcccaggcttatcatatt

SEQ ID NO: 6088953 - DNA, 25 bp, Homo sapien
tgaaatgagtttaagaactaaatta

SEQ ID NO: 6088954 - DNA, 25 bp, Homo sapien
tatcttcaactctcggcttttttcc

SEQ ID NO: 6088955 - DNA, 25 bp, Homo sapien
gaaatatactatcttcaactctcgg

SEQ ID NO: 6088956 - DNA, 25 bp, Homo sapien
tcgaaagtcgagaagtgcagagcgt

SEQ ID NO: 6088957 - DNA, 25 bp, Homo sapien
tgtagcagctcggacaaggcgttga

SEQ ID NO: 6088958 - DNA, 25 bp, Homo sapien
taacattgcgcagctggtcgaaggc

SEQ ID NO: 6088959 - DNA, 25 bp, Homo sapien
tcagggcgctgtcctcgaaagtcga

SEQ ID NO: 6088960 - DNA, 25 bp, Homo sapien
ttcttgtcgttgttgaacgacggga

SEQ ID NO: 6088961 - DNA, 25 bp, Homo sapien
gaacgacgggataacattgcgcagc

SEQ ID NO: 6088962 - DNA, 25 bp, Homo sapien
tggcgttggctgctagccgtctctg

SEQ ID NO: 6088963 - DNA, 25 bp, Homo sapien
tttgcgccatcatcgctgtcagggc

SEQ ID NO: 6088964 - DNA, 25 bp, Homo sapien
tggtcgaaggcgtggttcagcccat

SEQ ID NO: 6088965 - DNA, 25 bp, Homo sapien
caaggcgttgatgtagatttgggcc

SEQ ID NO: 6088966 - DNA, 25 bp, Homo sapien
gaaggagacaaattcttttgcgcca

SEQ ID NO: 6088967 - DNA, 25 bp, Homo sapien
ggctgagaagcgagtccggcaactc

SEQ ID NO: 6088968 - DNA, 25 bp, Homo sapien
tacagtgagaggtagcggtcaacag

SEQ ID NO: 6088969 - DNA, 25 bp, Homo sapien
gaatagagggtgaaaggcatccagc

SEQ ID NO: 6088970 - DNA, 25 bp, Homo sapien
taatccgctatcaaggaatagaggg

SEQ ID NO: 6088971 - DNA, 25 bp, Homo sapien
tcacatagtgcgacgtggccaggaa

SEQ ID NO: 6088972 - DNA, 25 bp, Homo sapien
tctccgaatggtacgtcagagcgta

SEQ ID NO: 6088973 - DNA, 25 bp, Homo sapien
cagatctggatgtagagctgaagca

SEQ ID NO: 6088974 - DNA, 25 bp, Homo sapien
taaacgtgaccgtcctctccgaatg

SEQ ID NO: 6088975 - DNA, 25 bp, Homo sapien
cgttgttcttggtgagcggtctgac

SEQ ID NO: 6088976 - DNA, 25 bp, Homo sapien
catgacgagcatgacataggtaaac

SEQ ID NO: 6088977 - DNA, 25 bp, Homo sapien
aagcagcaaacgtccccaggatgat

SEQ ID NO: 6088978 - DNA, 25 bp, Homo sapien
ctttccgggtggtcacatagtgcga

SEQ ID NO: 6088979 - DNA, 25 bp, Homo sapien
acgctgcaggtggactcgtctcgga

SEQ ID NO: 6088980 - DNA, 25 bp, Homo sapien
gacagtcagcgcaaagacacggcag

SEQ ID NO: 6088981 - DNA, 25 bp, Homo sapien
acgtggtagaccacgaggctcgtgt

SEQ ID NO: 6088982 - DNA, 25 bp, Homo sapien
tgcacacatgatgcggccggtaaac

SEQ ID NO: 6088983 - DNA, 25 bp, Homo sapien
tgtgatgacggcctgagcccttgga

SEQ ID NO: 6088984 - DNA, 25 bp, Homo sapien
gcagacgagaaagatgatgagcacc

SEQ ID NO: 6088985 - DNA, 25 bp, Homo sapien
ggccggtaaacacgctgatgaccag

SEQ ID NO: 6088986 - DNA, 25 bp, Homo sapien
agggtcacggccacgtggtagacca

SEQ ID NO: 6088987 - DNA, 25 bp, Homo sapien
atgatgagcaccgtgagcaggagct

SEQ ID NO: 6088988 - DNA, 25 bp, Homo sapien
cactggtgacgaagcagtagacgat

SEQ ID NO: 6088989 - DNA, 25 bp, Homo sapien
agcaggaactccaggacagtcagcg

SEQ ID NO: 6088990 - DNA, 25 bp, Homo sapien
cctggaagccactggtgacgaagca

SEQ ID NO: 6088991 - DNA, 25 bp, Homo sapien
ggccgcgacagtgcacacatgatgc

SEQ ID NO: 6088992 - DNA, 25 bp, Homo sapien
tatagttgttccataagccatgact

SEQ ID NO: 6088993 - DNA, 25 bp, Homo sapien
gcctattcgaatattaagagcctga

SEQ ID NO: 6088994 - DNA, 25 bp, Homo sapien
gcctcatgttgtgtggttagagaaa

SEQ ID NO: 6088995 - DNA, 25 bp, Homo sapien
tttaaaacagaaattggtgtccagc

SEQ ID NO: 6088996 - DNA, 25 bp, Homo sapien
tatccaagagttgtgtattacagca

SEQ ID NO: 6088997 - DNA, 25 bp, Homo sapien
tagtgaatgcatataatagagggtg

SEQ ID NO: 6088998 - DNA, 25 bp, Homo sapien
tctcgtcgttcacggtgtcgtttca

SEQ ID NO: 6088999 - DNA, 25 bp, Homo sapien
tcgccggagggcaattattacagaa

SEQ ID NO: 6089000 - DNA, 25 bp, Homo sapien
tgtctgtagcctcatgttgtgtggt

SEQ ID NO: 6089001 - DNA, 25 bp, Homo sapien
cagaaattggtgtccagcagagaag

SEQ ID NO: 6089002 - DNA, 25 bp, Homo sapien
gtgtcgtttcacagctcgccggagg

SEQ ID NO: 6089003 - DNA, 25 bp, Homo sapien
gggatcagcttctactatagaaaca

SEQ ID NO: 6089004 - DNA, 25 bp, Homo sapien
cagcaggttgaccttaagccgaggg

SEQ ID NO: 6089005 - DNA, 25 bp, Homo sapien
ggagagtgcttcctgccagatgatg

SEQ ID NO: 6089006 - DNA, 25 bp, Homo sapien
tgagggcgaccatcaggagccagac

SEQ ID NO: 6089007 - DNA, 25 bp, Homo sapien
cctgccctttgcctcggagggtgtg

SEQ ID NO: 6089008 - DNA, 25 bp, Homo sapien
tgcagaacacgatgaggccaaaggg

SEQ ID NO: 6089009 - DNA, 25 bp, Homo sapien
gtctgccctggagtagaaactgtgg

SEQ ID NO: 6089010 - DNA, 25 bp, Homo sapien
atcaggagccagacgaggcccgaga

SEQ ID NO: 6089011 - DNA, 25 bp, Homo sapien
cgtgacatccgaggtatgagccact

SEQ ID NO: 6089012 - DNA, 25 bp, Homo sapien
tgcttcctgccagatgatgctgaag

SEQ ID NO: 6089013 - DNA, 25 bp, Homo sapien
caaaggggaggacaaactgaaggca

SEQ ID NO: 6089014 - DNA, 25 bp, Homo sapien
gatgcctgcattgcagaacacgatg

SEQ ID NO: 6089015 - DNA, 25 bp, Homo sapien
ccctggagtagaaactgtggcacct

SEQ ID NO: 6089016 - DNA, 25 bp, Homo sapien
tcaccagcggattaagcaccacact

SEQ ID NO: 6089017 - DNA, 25 bp, Homo sapien
ccaagtaaccggtcaccagcggatt

SEQ ID NO: 6089018 - DNA, 25 bp, Homo sapien
ccacgtagcagaaggctgtgatggc

SEQ ID NO: 6089019 - DNA, 25 bp, Homo sapien
ttgtagggtcctacgcagagcagca

SEQ ID NO: 6089020 - DNA, 25 bp, Homo sapien
cacggcctccggaaggcttggtagc

SEQ ID NO: 6089021 - DNA, 25 bp, Homo sapien
gaatagcacggcctccggaaggctt

SEQ ID NO: 6089022 - DNA, 25 bp, Homo sapien
ccggaggcagcccacgtagcagaag

SEQ ID NO: 6089023 - DNA, 25 bp, Homo sapien
gtgatgagccccagcttccgccagg

SEQ ID NO: 6089024 - DNA, 25 bp, Homo sapien
ccaggcagaccggagagccgttgac

SEQ ID NO: 6089025 - DNA, 25 bp, Homo sapien
tccgccaggagcctcctagattggg

SEQ ID NO: 6089026 - DNA, 25 bp, Homo sapien
ccgttgaccggtgtgttgatgccca

SEQ ID NO: 6089027 - DNA, 25 bp, Homo sapien
ggctgctcccaggtagcggcctgca

SEQ ID NO: 6089028 - DNA, 25 bp, Homo sapien
tagcaggtcccattggtgccctggc

SEQ ID NO: 6089029 - DNA, 25 bp, Homo sapien
gaattctatgacgtagaccacgctg

SEQ ID NO: 6089030 - DNA, 25 bp, Homo sapien
atcagcgggaccacaaagaggacca

SEQ ID NO: 6089031 - DNA, 25 bp, Homo sapien
ttctttcagctggtcggtccgctct

SEQ ID NO: 6089032 - DNA, 25 bp, Homo sapien
gctgtagcagtagctggtgatgatc

SEQ ID NO: 6089033 - DNA, 25 bp, Homo sapien
tagggcccaaagcagacaaggaagt

SEQ ID NO: 6089034 - DNA, 25 bp, Homo sapien
catgaaagtcggcttggaacccgga

SEQ ID NO: 6089035 - DNA, 25 bp, Homo sapien
cgacatgggacacgttgtagggccc

SEQ ID NO: 6089036 - DNA, 25 bp, Homo sapien
tgctgagaagcgtcacgtagatcct

SEQ ID NO: 6089037 - DNA, 25 bp, Homo sapien
ccctgtgagtgttcactggtctttc

SEQ ID NO: 6089038 - DNA, 25 bp, Homo sapien
tttcaccgcagatatagcccacgac

SEQ ID NO: 6089039 - DNA, 25 bp, Homo sapien
tcctcagcagctcatgaaagtcggc

SEQ ID NO: 6089040 - DNA, 25 bp, Homo sapien
tgaacaccacggctattgaccgcca

SEQ ID NO: 6089041 - DNA, 25 bp, Homo sapien
cctgctcagtcgtgttcaagtattg

SEQ ID NO: 6089042 - DNA, 25 bp, Homo sapien
aatgccctgcgcaccactgaagaag

SEQ ID NO: 6089043 - DNA, 25 bp, Homo sapien
gactggcgttgagtgaactgaacac

SEQ ID NO: 6089044 - DNA, 25 bp, Homo sapien
caaaacgccagtagcagaagatggt

SEQ ID NO: 6089045 - DNA, 25 bp, Homo sapien
cacgtccaactggttatcggtgaag

SEQ ID NO: 6089046 - DNA, 25 bp, Homo sapien
tattgaacgatgatcacgatggtgc

SEQ ID NO: 6089047 - DNA, 25 bp, Homo sapien
gacacgttgtaaggtccgaagcaca

SEQ ID NO: 6089048 - DNA, 25 bp, Homo sapien
tatcggtgaagttctcgtagcaggt

SEQ ID NO: 6089049 - DNA, 25 bp, Homo sapien
caggaaattgagcagcgtcaccaca

SEQ ID NO: 6089050 - DNA, 25 bp, Homo sapien
ggctgggagagcatgatccacacaa

SEQ ID NO: 6089051 - DNA, 25 bp, Homo sapien
ctgcaatcactccatacagaggccg

SEQ ID NO: 6089052 - DNA, 25 bp, Homo sapien
gccttggcgtggctgtccagccgca

SEQ ID NO: 6089053 - DNA, 25 bp, Homo sapien
atggcgaagcccagcacgagcgtgt

SEQ ID NO: 6089054 - DNA, 25 bp, Homo sapien
aaggtcacccgcttcttggcgcgct

SEQ ID NO: 6089055 - DNA, 25 bp, Homo sapien
cgtggctgtccagccgcatggcatg

SEQ ID NO: 6089056 - DNA, 25 bp, Homo sapien
agaggaggcacaccgccaggattgc

SEQ ID NO: 6089057 - DNA, 25 bp, Homo sapien
gcagcacgacgagtgtgacgatccc

SEQ ID NO: 6089058 - DNA, 25 bp, Homo sapien
gcggaaagactagcacgcactggcg

SEQ ID NO: 6089059 - DNA, 25 bp, Homo sapien
gaagtaggagatagcgatgaccagc

SEQ ID NO: 6089060 - DNA, 25 bp, Homo sapien
ctcgggctgcggaaagactagcacg

SEQ ID NO: 6089061 - DNA, 25 bp, Homo sapien
tgagcgccaccacggtgctcaggtg

SEQ ID NO: 6089062 - DNA, 25 bp, Homo sapien
tgctcgtcgtctagccgggcgaaga

SEQ ID NO: 6089063 - DNA, 25 bp, Homo sapien
gagatagcgatgaccagcggcgtct

SEQ ID NO: 6089064 - DNA, 25 bp, Homo sapien
ccggcggcgccatagatgacttggt

SEQ ID NO: 6089065 - DNA, 25 bp, Homo sapien
aacttaactgtcctccagtgcggca

SEQ ID NO: 6089066 - DNA, 25 bp, Homo sapien
tcagagcaaccgaagtcactaattt

SEQ ID NO: 6089067 - DNA, 25 bp, Homo sapien
caacatctagtgagtacttgagaca

SEQ ID NO: 6089068 - DNA, 25 bp, Homo sapien
gacttggtgtaaagtgacgttgcca

SEQ ID NO: 6089069 - DNA, 25 bp, Homo sapien
tatgtgcctcctagagggtaagagg

SEQ ID NO: 6089070 - DNA, 25 bp, Homo sapien
gaatacggcgcctgcttggtagtca

SEQ ID NO: 6089071 - DNA, 25 bp, Homo sapien
tcactgatcaagatgttcgcgggct

SEQ ID NO: 6089072 - DNA, 25 bp, Homo sapien
gcacaatgctttgcgagtggaggaa

SEQ ID NO: 6089073 - DNA, 25 bp, Homo sapien
taaatgtcggctttaggcgtcacgc

SEQ ID NO: 6089074 - DNA, 25 bp, Homo sapien
caccgcgtacagtatgtgctgccgc

SEQ ID NO: 6089075 - DNA, 25 bp, Homo sapien
gcaggccgttcacaacatctagtga

SEQ ID NO: 6089076 - DNA, 25 bp, Homo sapien
ggcttctcgcgttgagggtcaccac

SEQ ID NO: 6089077 - DNA, 25 bp, Homo sapien
ggaagctgatgacgctcccctggca

SEQ ID NO: 6089078 - DNA, 25 bp, Homo sapien
gaaatcaagcccgtcattggtgctc

SEQ ID NO: 6089079 - DNA, 25 bp, Homo sapien
gacaatctcctcgtaatcattggct

SEQ ID NO: 6089080 - DNA, 25 bp, Homo sapien
cttcgtacagacacccaaacaaggg

SEQ ID NO: 6089081 - DNA, 25 bp, Homo sapien
catgagaaagacaatctcctcgtaa

SEQ ID NO: 6089082 - DNA, 25 bp, Homo sapien
ttgaggtaggcacccaggtcggccc

SEQ ID NO: 6089083 - DNA, 25 bp, Homo sapien
ttggccagcagtaccggctctgacc

SEQ ID NO: 6089084 - DNA, 25 bp, Homo sapien
ctctggaggtctgagtaggcacagc

SEQ ID NO: 6089085 - DNA, 25 bp, Homo sapien
cacgtgcgcccatggtcatggctga

SEQ ID NO: 6089086 - DNA, 25 bp, Homo sapien
gccggtgcccatgctctggaggtct

SEQ ID NO: 6089087 - DNA, 25 bp, Homo sapien
taatcattggcttcgtacagacacc

SEQ ID NO: 6089088 - DNA, 25 bp, Homo sapien
cagcttggcaaaggcgctgttgaca

SEQ ID NO: 6089089 - DNA, 25 bp, Homo sapien
ggcgaagcgtttcatttttgctcag

SEQ ID NO: 6089090 - DNA, 25 bp, Homo sapien
tcattgccaggcgaagcgtttcatt

SEQ ID NO: 6089091 - DNA, 25 bp, Homo sapien
tcagctttttgtctggagggtgagt

SEQ ID NO: 6089092 - DNA, 25 bp, Homo sapien
cactcccgtttgttgcaggctttgc

SEQ ID NO: 6089093 - DNA, 25 bp, Homo sapien
gccaggcgaagcgtttcatttttgc

SEQ ID NO: 6089094 - DNA, 25 bp, Homo sapien
ccactcccgtttgttgcaggctttg

SEQ ID NO: 6089095 - DNA, 25 bp, Homo sapien
gttgatatacctcattgccaggcga

SEQ ID NO: 6089096 - DNA, 25 bp, Homo sapien
aaaggcgctgttgacattctgctgc

SEQ ID NO: 6089097 - DNA, 25 bp, Homo sapien
gatatacctcattgccaggcgaagc

SEQ ID NO: 6089098 - DNA, 25 bp, Homo sapien
tggcaaaggcgctgttgacattctg

SEQ ID NO: 6089099 - DNA, 25 bp, Homo sapien
tacctcattgccaggcgaagcgttt

SEQ ID NO: 6089100 - DNA, 25 bp, Homo sapien
cgtccgacgagtaggcggaacgcgg

SEQ ID NO: 6089101 - DNA, 25 bp, Homo sapien
ttgcgcacggcgtcgtgctcggcca

SEQ ID NO: 6089102 - DNA, 25 bp, Homo sapien
ggatgtactccacggctgagcgcag

SEQ ID NO: 6089103 - DNA, 25 bp, Homo sapien
agaagtcgagtagctcgcgctccgc

SEQ ID NO: 6089104 - DNA, 25 bp, Homo sapien
gtagctcgcgctccgcaggactcag

SEQ ID NO: 6089105 - DNA, 25 bp, Homo sapien
acctgggcagtgtgccgccgtccat

SEQ ID NO: 6089106 - DNA, 25 bp, Homo sapien
gaagcccaagttcaccagcttcacg

SEQ ID NO: 6089107 - DNA, 25 bp, Homo sapien
gctgcagcgcaacagttccggggac

SEQ ID NO: 6089108 - DNA, 25 bp, Homo sapien
gcctccggtctctgcggtggccggt

SEQ ID NO: 6089109 - DNA, 25 bp, Homo sapien
cgcgcggatgtactccacggctgag

SEQ ID NO: 6089110 - DNA, 25 bp, Homo sapien
attgcgccgcgctacggccgctgcg

SEQ ID NO: 6089111 - DNA, 25 bp, Homo sapien
cgcagcgcctggaagcccaagttca

SEQ ID NO: 6089112 - DNA, 25 bp, Homo sapien
cctgggcgttttgaatgttgtgaga

SEQ ID NO: 6089113 - DNA, 25 bp, Homo sapien
catggtgtttgggtatgcaggtcac

SEQ ID NO: 6089114 - DNA, 25 bp, Homo sapien
gctcagtctttaaagcctcatggtg

SEQ ID NO: 6089115 - DNA, 25 bp, Homo sapien
ctcctgttggcccagccagagactg

SEQ ID NO: 6089116 - DNA, 25 bp, Homo sapien
tgtttccagtggtgcaattcccact

SEQ ID NO: 6089117 - DNA, 25 bp, Homo sapien
gttgggcttatgttgcaagtgcaga

SEQ ID NO: 6089118 - DNA, 25 bp, Homo sapien
tctcggtggaggtagatcccctcac

SEQ ID NO: 6089119 - DNA, 25 bp, Homo sapien
tgtacattccactttctccctgagc

SEQ ID NO: 6089120 - DNA, 25 bp, Homo sapien
caggtcactctcacgtctcggtgga

SEQ ID NO: 6089121 - DNA, 25 bp, Homo sapien
caagtgcagagcaacctgcagaggc

SEQ ID NO: 6089122 - DNA, 25 bp, Homo sapien
tgccattttccttgctcattgagat

SEQ ID NO: 6089123 - DNA, 25 bp, Homo sapien
catagtctattccatcgagggtcac

SEQ ID NO: 6089124 - DNA, 25 bp, Homo sapien
ccgccagcctggagtctgtcaaagt

SEQ ID NO: 6089125 - DNA, 25 bp, Homo sapien
cataaaacgactaaaacgctactga

SEQ ID NO: 6089126 - DNA, 25 bp, Homo sapien
cgactaaaacgctactgagtctgca

SEQ ID NO: 6089127 - DNA, 25 bp, Homo sapien
gactcccgtctgtagggccgctgct

SEQ ID NO: 6089128 - DNA, 25 bp, Homo sapien
tctgactcccgtctgtagggccgct

SEQ ID NO: 6089129 - DNA, 25 bp, Homo sapien
tggatgctgcatgtcggccaaggtt

SEQ ID NO: 6089130 - DNA, 25 bp, Homo sapien
tctgaggccgttgcaaagaaacata

SEQ ID NO: 6089131 - DNA, 25 bp, Homo sapien
acttctgaggccgttgcaaagaaac

SEQ ID NO: 6089132 - DNA, 25 bp, Homo sapien
gtctgtcaaagtcatgcctggcctg

SEQ ID NO: 6089133 - DNA, 25 bp, Homo sapien
gccagcctggagtctgtcaaagtca

SEQ ID NO: 6089134 - DNA, 25 bp, Homo sapien
tggagtctgtcaaagtcatgcctgg

SEQ ID NO: 6089135 - DNA, 25 bp, Homo sapien
gcctggagtctgtcaaagtcatgcc

SEQ ID NO: 6089136 - DNA, 25 bp, Homo sapien
agcccccacaggaaagtgactgtag

SEQ ID NO: 6089137 - DNA, 25 bp, Homo sapien
tcctggaccgtcatgacaatatacg

SEQ ID NO: 6089138 - DNA, 25 bp, Homo sapien
tgtacacgggccagttggtgccaaa

SEQ ID NO: 6089139 - DNA, 25 bp, Homo sapien
ccggcttggtcatgtacacgggcca

SEQ ID NO: 6089140 - DNA, 25 bp, Homo sapien
accatccggcttggtcatgtacacg

SEQ ID NO: 6089141 - DNA, 25 bp, Homo sapien
tgcaggcaggacgcttctgggccat

SEQ ID NO: 6089142 - DNA, 25 bp, Homo sapien
tccaggtggctgttacaggcagtgg

SEQ ID NO: 6089143 - DNA, 25 bp, Homo sapien
gacaatatacgtaccatccggcttg

SEQ ID NO: 6089144 - DNA, 25 bp, Homo sapien
gcagctcctggaccgtcatgacaat

SEQ ID NO: 6089145 - DNA, 25 bp, Homo sapien
tcatgacaatatacgtaccatccgg

SEQ ID NO: 6089146 - DNA, 25 bp, Homo sapien
tggtcatgtacacgggccagttggt

SEQ ID NO: 6089147 - DNA, 25 bp, Homo sapien
ctgtaggggcagtaggctgacttct

SEQ ID NO: 6089148 - DNA, 25 bp, Homo sapien
gacacgattgcggctcctctcctag

SEQ ID NO: 6089149 - DNA, 25 bp, Homo sapien
acacgattgcggctcctctcctaga

SEQ ID NO: 6089150 - DNA, 25 bp, Homo sapien
agacacgattgcggctcctctccta

SEQ ID NO: 6089151 - DNA, 25 bp, Homo sapien
taacttctgcactagcaataaacca

SEQ ID NO: 6089152 - DNA, 25 bp, Homo sapien
tactcctacccagcagaaaaatcac

SEQ ID NO: 6089153 - DNA, 25 bp, Homo sapien
gaaaaatcacttattgggcactgaa

SEQ ID NO: 6089154 - DNA, 25 bp, Homo sapien
gggcccctctgtatgcagcttcacg

SEQ ID NO: 6089155 - DNA, 25 bp, Homo sapien
gctggaatagaaatgaatcttcccc

SEQ ID NO: 6089156 - DNA, 25 bp, Homo sapien
tctagtagatcaaaccaagcctcct

SEQ ID NO: 6089157 - DNA, 25 bp, Homo sapien
taagaggcaccaaatctagtagatc

SEQ ID NO: 6089158 - DNA, 25 bp, Homo sapien
agctgtattgcttccctttaagagg

SEQ ID NO: 6089159 - DNA, 25 bp, Homo sapien
gcagcttcacgtatctgagatcaca

SEQ ID NO: 6089160 - DNA, 25 bp, Homo sapien
tgaatttaactctggccattgccaa

SEQ ID NO: 6089161 - DNA, 25 bp, Homo sapien
cgtttaggagtggatgggcccctct

SEQ ID NO: 6089162 - DNA, 25 bp, Homo sapien
taatatggtaaatgaggtactcctt

SEQ ID NO: 6089163 - DNA, 25 bp, Homo sapien
cgttgccggctcgaagacttgggtt

SEQ ID NO: 6089164 - DNA, 25 bp, Homo sapien
gctcgaagacttgggtttatatccc

SEQ ID NO: 6089165 - DNA, 25 bp, Homo sapien
caacctacctgaatggaatccttac

SEQ ID NO: 6089166 - DNA, 25 bp, Homo sapien
tgtgaagaagttgctgaactactcc

SEQ ID NO: 6089167 - DNA, 25 bp, Homo sapien
gctgaactactccataaccttttat

SEQ ID NO: 6089168 - DNA, 25 bp, Homo sapien
atctggtcagctaattcactgagag

SEQ ID NO: 6089169 - DNA, 25 bp, Homo sapien
gaagttgctgaactactccataacc

SEQ ID NO: 6089170 - DNA, 25 bp, Homo sapien
tagttcctttagacaacctacctga

SEQ ID NO: 6089171 - DNA, 25 bp, Homo sapien
aagggacagccctgaagctgtacac

SEQ ID NO: 6089172 - DNA, 25 bp, Homo sapien
gatttcctaaaatctggtcagctaa

SEQ ID NO: 6089173 - DNA, 25 bp, Homo sapien
taaaatctggtcagctaattcactg

SEQ ID NO: 6089174 - DNA, 25 bp, Homo sapien
aagctgtacacataagagactccaa

SEQ ID NO: 6089175 - DNA, 25 bp, Homo sapien
agagactccaatgggccctaagtcc

SEQ ID NO: 6089176 - DNA, 25 bp, Homo sapien
cttaccccctaagctatgaagtgag

SEQ ID NO: 6089177 - DNA, 25 bp, Homo sapien
ggagaaatgaataatgccccggcgg

SEQ ID NO: 6089178 - DNA, 25 bp, Homo sapien
gagaaatgaataatgccccggcggt

SEQ ID NO: 6089179 - DNA, 25 bp, Homo sapien
agaaatgaataatgccccggcggtc

SEQ ID NO: 6089180 - DNA, 25 bp, Homo sapien
tggagaaatgaataatgccccggcg

SEQ ID NO: 6089181 - DNA, 25 bp, Homo sapien
gaaatgaataatgccccggcggtct

SEQ ID NO: 6089182 - DNA, 25 bp, Homo sapien
gtcacagtctgggatgccatccagc

SEQ ID NO: 6089183 - DNA, 25 bp, Homo sapien
tagtcttgaaatgcaatgtagatcc

SEQ ID NO: 6089184 - DNA, 25 bp, Homo sapien
tgatctctgccaacattatgaagct

SEQ ID NO: 6089185 - DNA, 25 bp, Homo sapien
tgtagatccgaagcatgcacgtttg

SEQ ID NO: 6089186 - DNA, 25 bp, Homo sapien
gcactgggctaatgtcacagtctgg

SEQ ID NO: 6089187 - DNA, 25 bp, Homo sapien
caagaagggcctgcttagtacataa

SEQ ID NO: 6089188 - DNA, 25 bp, Homo sapien
tgcatttgcgaatctgcactgggct

SEQ ID NO: 6089189 - DNA, 25 bp, Homo sapien
tcttcctcactataaggtgtctcct

SEQ ID NO: 6089190 - DNA, 25 bp, Homo sapien
gagggaatacgtaaaatcagctgca

SEQ ID NO: 6089191 - DNA, 25 bp, Homo sapien
cagtcgtttcgattccttttccaca

SEQ ID NO: 6089192 - DNA, 25 bp, Homo sapien
gcatgcacgtttgtggcgtgaagcc

SEQ ID NO: 6089193 - DNA, 25 bp, Homo sapien
agaataacctgttcaacggcctgca

SEQ ID NO: 6089194 - DNA, 25 bp, Homo sapien
cacattccaatcaggcagagcagca

SEQ ID NO: 6089195 - DNA, 25 bp, Homo sapien
tacaatggttgccagaaaggagaag

SEQ ID NO: 6089196 - DNA, 25 bp, Homo sapien
cacccatggcgatcagcatgctgag

SEQ ID NO: 6089197 - DNA, 25 bp, Homo sapien
cagtttgatgttgggcaccgaggac

SEQ ID NO: 6089198 - DNA, 25 bp, Homo sapien
tataagggaagtcataaacaggccc

SEQ ID NO: 6089199 - DNA, 25 bp, Homo sapien
taccaagtagtgtcgtacatcaggc

SEQ ID NO: 6089200 - DNA, 25 bp, Homo sapien
ggctcaaacttcttgttcagatgga

SEQ ID NO: 6089201 - DNA, 25 bp, Homo sapien
tccagctggtcaactgatgagtacc

SEQ ID NO: 6089202 - DNA, 25 bp, Homo sapien
cctgaaggcagtgttgcacattcca

SEQ ID NO: 6089203 - DNA, 25 bp, Homo sapien
tagggctgtgagtaagtatgcatac

SEQ ID NO: 6089204 - DNA, 25 bp, Homo sapien
cctgcactattgaccagacacttgg

SEQ ID NO: 6089205 - DNA, 25 bp, Homo sapien
gccaccaggtggcaacctgcactat

SEQ ID NO: 6089206 - DNA, 25 bp, Homo sapien
ggtaacctgtggctggtcgactatt

SEQ ID NO: 6089207 - DNA, 25 bp, Homo sapien
gcctaagaaggcatacactgcatta

SEQ ID NO: 6089208 - DNA, 25 bp, Homo sapien
aacctgtggctggtcgactattttc

SEQ ID NO: 6089209 - DNA, 25 bp, Homo sapien
tccacttccgattctcttcattggc

SEQ ID NO: 6089210 - DNA, 25 bp, Homo sapien
gtcaagcctaagaaggcatacactg

SEQ ID NO: 6089211 - DNA, 25 bp, Homo sapien
ctgtcaagcctaagaaggcatacac

SEQ ID NO: 6089212 - DNA, 25 bp, Homo sapien
catccacttccgattctcttcattg

SEQ ID NO: 6089213 - DNA, 25 bp, Homo sapien
ccgcgatactggctttcattgaaaa

SEQ ID NO: 6089214 - DNA, 25 bp, Homo sapien
agatgcaatatatacacggatcacc

SEQ ID NO: 6089215 - DNA, 25 bp, Homo sapien
gatgcaatatatacacggatcacca

SEQ ID NO: 6089216 - DNA, 25 bp, Homo sapien
caagcctaagaaggcatacactgca

SEQ ID NO: 6089217 - DNA, 25 bp, Homo sapien
tcttcattggctgcaatatcttttt

SEQ ID NO: 6089218 - DNA, 25 bp, Homo sapien
cttggatttggtccatagtttgtgg

SEQ ID NO: 6089219 - DNA, 25 bp, Homo sapien
tcattgatgatgcttgggctagtac

SEQ ID NO: 6089220 - DNA, 25 bp, Homo sapien
actgataacaaggtcattaaactgg

SEQ ID NO: 6089221 - DNA, 25 bp, Homo sapien
tccatagtttgtgggagatctcgag

SEQ ID NO: 6089222 - DNA, 25 bp, Homo sapien
ggagatctcgagctggaataaacca

SEQ ID NO: 6089223 - DNA, 25 bp, Homo sapien
ccagcatttcttggaaacagcgttc

SEQ ID NO: 6089224 - DNA, 25 bp, Homo sapien
gatgcttgggctagtactgctgcga

SEQ ID NO: 6089225 - DNA, 25 bp, Homo sapien
catttcttggaaacagcgttcaata

SEQ ID NO: 6089226 - DNA, 25 bp, Homo sapien
gggctagtactgctgcgacttggat

SEQ ID NO: 6089227 - DNA, 25 bp, Homo sapien
gataacaaggtcattaaactggtct

SEQ ID NO: 6089228 - DNA, 25 bp, Homo sapien
taatcacatcttcattgatgatgct

SEQ ID NO: 6089229 - DNA, 25 bp, Homo sapien
ttaaactggtcttggatttggtcca

SEQ ID NO: 6089230 - DNA, 25 bp, Homo sapien
ggcggtcatatccaggcacagggca

SEQ ID NO: 6089231 - DNA, 25 bp, Homo sapien
tctctctcgaaacttgttaagaaat

SEQ ID NO: 6089232 - DNA, 25 bp, Homo sapien
tggcgtcccagtcaagataatatct

SEQ ID NO: 6089233 - DNA, 25 bp, Homo sapien
actccctttggcgtcccagtcaaga

SEQ ID NO: 6089234 - DNA, 25 bp, Homo sapien
taatagccgttgcttgctcttgtct

SEQ ID NO: 6089235 - DNA, 25 bp, Homo sapien
cactttaaatgtcatactgaccagc

SEQ ID NO: 6089236 - DNA, 25 bp, Homo sapien
tacgcgggcatgaggatgggcgagc

SEQ ID NO: 6089237 - DNA, 25 bp, Homo sapien
gcatagccgcccacgtagtccatgg

SEQ ID NO: 6089238 - DNA, 25 bp, Homo sapien
gattgtgacatttaatagccgttgc

SEQ ID NO: 6089239 - DNA, 25 bp, Homo sapien
cgtgaagctcttcgccagagtccag

SEQ ID NO: 6089240 - DNA, 25 bp, Homo sapien
ggcaggacgccgtgaagctcttcgc

SEQ ID NO: 6089241 - DNA, 25 bp, Homo sapien
acgtcccgggcggtcatatccaggc

SEQ ID NO: 6089242 - DNA, 25 bp, Homo sapien
ctttcaaccttgagcatggagctga

SEQ ID NO: 6089243 - DNA, 25 bp, Homo sapien
aatgagcaaaagagtcttccagaga

SEQ ID NO: 6089244 - DNA, 25 bp, Homo sapien
gatctgatcgatcgggtactgtctg

SEQ ID NO: 6089245 - DNA, 25 bp, Homo sapien
ggcttgttaactgaccatctactga

SEQ ID NO: 6089246 - DNA, 25 bp, Homo sapien
tgtgcaacaactgcagatacatcct

SEQ ID NO: 6089247 - DNA, 25 bp, Homo sapien
tgtgctgatacactgtccgctccgt

SEQ ID NO: 6089248 - DNA, 25 bp, Homo sapien
tgtgggcagaaatttacaggtaacc

SEQ ID NO: 6089249 - DNA, 25 bp, Homo sapien
agtttcttcaatggaggtgtctggt

SEQ ID NO: 6089250 - DNA, 25 bp, Homo sapien
taaacttcagttactgtgcactgtc

SEQ ID NO: 6089251 - DNA, 25 bp, Homo sapien
tcttccagagaagtgcttgcatcag

SEQ ID NO: 6089252 - DNA, 25 bp, Homo sapien
caaaagtctctgttgggtcaaggag

SEQ ID NO: 6089253 - DNA, 25 bp, Homo sapien
gcactgtccatcaggccttctagat

SEQ ID NO: 6089254 - DNA, 25 bp, Homo sapien
tcctgcttcactggtattttcgcca

SEQ ID NO: 6089255 - DNA, 25 bp, Homo sapien
aattggctcaacaacctatctaaag

SEQ ID NO: 6089256 - DNA, 25 bp, Homo sapien
cacaagtggaaaggaactgtctaag

SEQ ID NO: 6089257 - DNA, 25 bp, Homo sapien
tcagagtactggaatgttgtcacaa

SEQ ID NO: 6089258 - DNA, 25 bp, Homo sapien
gccactgtgtgccacaacttttcaa

SEQ ID NO: 6089259 - DNA, 25 bp, Homo sapien
catcaggaatgtctacacaagtgga

SEQ ID NO: 6089260 - DNA, 25 bp, Homo sapien
tcatctgcagtaacaaagtcctgga

SEQ ID NO: 6089261 - DNA, 25 bp, Homo sapien
tccaaaaatggcatcaggaatgtct

SEQ ID NO: 6089262 - DNA, 25 bp, Homo sapien
catgtcctggatgatgtctgtgtcc

SEQ ID NO: 6089263 - DNA, 25 bp, Homo sapien
cttgatatggcttctgtgatggtga

SEQ ID NO: 6089264 - DNA, 25 bp, Homo sapien
gaagtttcctggctatttcagagta

SEQ ID NO: 6089265 - DNA, 25 bp, Homo sapien
gaatcaataagggtttgtgtcactc

SEQ ID NO: 6089266 - DNA, 25 bp, Homo sapien
tacaattgggaatgcttcggaacat

SEQ ID NO: 6089267 - DNA, 25 bp, Homo sapien
tttatcattgacaccgtggcggacc

SEQ ID NO: 6089268 - DNA, 25 bp, Homo sapien
aactcggccgcctgtggcttttgca

SEQ ID NO: 6089269 - DNA, 25 bp, Homo sapien
tcgatgacacggacagaaatacctt

SEQ ID NO: 6089270 - DNA, 25 bp, Homo sapien
gttttcccacgttgaggcactcctg

SEQ ID NO: 6089271 - DNA, 25 bp, Homo sapien
cattcccttggtattggcggctaga

SEQ ID NO: 6089272 - DNA, 25 bp, Homo sapien
taaatagcatgctctgtcgagatgg

SEQ ID NO: 6089273 - DNA, 25 bp, Homo sapien
ggcatcacttggatagaaaacagta

SEQ ID NO: 6089274 - DNA, 25 bp, Homo sapien
agcagcttctaaggcttcatggaga

SEQ ID NO: 6089275 - DNA, 25 bp, Homo sapien
gacactgccagttgatgaacaagga

SEQ ID NO: 6089276 - DNA, 25 bp, Homo sapien
gttacggctgctataatgtgtctgg

SEQ ID NO: 6089277 - DNA, 25 bp, Homo sapien
tctggttggctggttcgaatgaagc

SEQ ID NO: 6089278 - DNA, 25 bp, Homo sapien
tggggaatcctttcggggaagatca

SEQ ID NO: 6089279 - DNA, 25 bp, Homo sapien
gactgggggatcttgcttctttcgg

SEQ ID NO: 6089280 - DNA, 25 bp, Homo sapien
ttgtcttcgtttcgaatgctctttc

SEQ ID NO: 6089281 - DNA, 25 bp, Homo sapien
cgtccagagtggggacgttcactgt

SEQ ID NO: 6089282 - DNA, 25 bp, Homo sapien
attttgtcttcgtttcgaatgctct

SEQ ID NO: 6089283 - DNA, 25 bp, Homo sapien
aagacgatatcagctggaatgttgt

SEQ ID NO: 6089284 - DNA, 25 bp, Homo sapien
cttcaagggagactcgaaggtcgtg

SEQ ID NO: 6089285 - DNA, 25 bp, Homo sapien
actgggggatcttgcttctttcggg

SEQ ID NO: 6089286 - DNA, 25 bp, Homo sapien
tcggggtttagccgcttgtgggaga

SEQ ID NO: 6089287 - DNA, 25 bp, Homo sapien
gagactcgaaggtcgtgggtgactg

SEQ ID NO: 6089288 - DNA, 25 bp, Homo sapien
gactcgaaggtcgtgggtgactggg

SEQ ID NO: 6089289 - DNA, 25 bp, Homo sapien
tcttcaagggagactcgaaggtcgt

SEQ ID NO: 6089290 - DNA, 25 bp, Homo sapien
cctcacactggatgcgcaggttctt

SEQ ID NO: 6089291 - DNA, 25 bp, Homo sapien
tgcagcttgcgcactgcgttcacca

SEQ ID NO: 6089292 - DNA, 25 bp, Homo sapien
tggtcccagactgggtcttgacgct

SEQ ID NO: 6089293 - DNA, 25 bp, Homo sapien
ccccggagtagatgtaataggctct

SEQ ID NO: 6089294 - DNA, 25 bp, Homo sapien
ccagcttgagcacgcagtcgaagcg

SEQ ID NO: 6089295 - DNA, 25 bp, Homo sapien
gagctgaaggtcttgaggcgcaggc

SEQ ID NO: 6089296 - DNA, 25 bp, Homo sapien
gtagaagccgctctcctgcagcttg

SEQ ID NO: 6089297 - DNA, 25 bp, Homo sapien
ggtcactgcgctccagtagaagccg

SEQ ID NO: 6089298 - DNA, 25 bp, Homo sapien
gatgcgcaggttcttggtcccagac

SEQ ID NO: 6089299 - DNA, 25 bp, Homo sapien
gacggtcttccgacagagatgctga

SEQ ID NO: 6089300 - DNA, 25 bp, Homo sapien
ccggcagctgggtgactttctcata

SEQ ID NO: 6089301 - DNA, 25 bp, Homo sapien
tccaggtggccgttgacggtcttcc

SEQ ID NO: 6089302 - DNA, 25 bp, Homo sapien
tagacgtcgggaactatgccataag

SEQ ID NO: 6089303 - DNA, 25 bp, Homo sapien
tacgcgatacacagcgtggctgagc

SEQ ID NO: 6089304 - DNA, 25 bp, Homo sapien
tcccaaagagctggcgctcgtagtc

SEQ ID NO: 6089305 - DNA, 25 bp, Homo sapien
gaagcctacgttgggcctgatgaca

SEQ ID NO: 6089306 - DNA, 25 bp, Homo sapien
tagcattaacaatgcaggtgatgcc

SEQ ID NO: 6089307 - DNA, 25 bp, Homo sapien
ctgatgacaggtcgccgggctttca

SEQ ID NO: 6089308 - DNA, 25 bp, Homo sapien
tggaatttcatcaggtacgcgatac

SEQ ID NO: 6089309 - DNA, 25 bp, Homo sapien
tgcagcacagtgcaccaaggtggcc

SEQ ID NO: 6089310 - DNA, 25 bp, Homo sapien
cagcaggcacacgttgtggaatttc

SEQ ID NO: 6089311 - DNA, 25 bp, Homo sapien
tggatcttgtcagccacggtgtcaa

SEQ ID NO: 6089312 - DNA, 25 bp, Homo sapien
tagtctatcagttgcctccagaagc

SEQ ID NO: 6089313 - DNA, 25 bp, Homo sapien
gggccagttgaaattagggatctca

SEQ ID NO: 6089314 - DNA, 25 bp, Homo sapien
cgtagttgcctttgcgcagcaagcg

SEQ ID NO: 6089315 - DNA, 25 bp, Homo sapien
gcatgggttctgacggacatcccca

SEQ ID NO: 6089316 - DNA, 25 bp, Homo sapien
gatgcagcccgccattagcgcatca

SEQ ID NO: 6089317 - DNA, 25 bp, Homo sapien
cacaagggtacaagacagtgacagg

SEQ ID NO: 6089318 - DNA, 25 bp, Homo sapien
gcaggccttgctgccgcatgggttc

SEQ ID NO: 6089319 - DNA, 25 bp, Homo sapien
tgacaggtccacatggtcttcctct

SEQ ID NO: 6089320 - DNA, 25 bp, Homo sapien
tctcggtgacaaagtcgaagttcca

SEQ ID NO: 6089321 - DNA, 25 bp, Homo sapien
aagtcgaagttccatcgctcacggg

SEQ ID NO: 6089322 - DNA, 25 bp, Homo sapien
ttagcgcatcacagtcgcggctcag

SEQ ID NO: 6089323 - DNA, 25 bp, Homo sapien
tgccgccgttttcgaccctgagagt

SEQ ID NO: 6089324 - DNA, 25 bp, Homo sapien
tcgctgtccactgggccgaagaggc

SEQ ID NO: 6089325 - DNA, 25 bp, Homo sapien
accctccagtggtgtctcggtgaca

SEQ ID NO: 6089326 - DNA, 25 bp, Homo sapien
ctgctcccctgagcgaggcacaagg

SEQ ID NO: 6089327 - DNA, 25 bp, Homo sapien
atgatgcagccgctgccaatcccgg

SEQ ID NO: 6089328 - DNA, 25 bp, Homo sapien
gctagagacgcctccgtagctctgg

SEQ ID NO: 6089329 - DNA, 25 bp, Homo sapien
ggcagatcgggacgcccttgccact

SEQ ID NO: 6089330 - DNA, 25 bp, Homo sapien
tgacctgctgcgaggagacgtagcc

SEQ ID NO: 6089331 - DNA, 25 bp, Homo sapien
agacgcctccgtagctctggcactg

SEQ ID NO: 6089332 - DNA, 25 bp, Homo sapien
gcgcacgaggtctgagtgacctgct

SEQ ID NO: 6089333 - DNA, 25 bp, Homo sapien
gtagctctggcactggaccgcctgg

SEQ ID NO: 6089334 - DNA, 25 bp, Homo sapien
gagccgccgccagagtagccgcaga

SEQ ID NO: 6089335 - DNA, 25 bp, Homo sapien
cactgatgatgcagccgctgccaat

SEQ ID NO: 6089336 - DNA, 25 bp, Homo sapien
tctggtggcagatcgggacgccctt

SEQ ID NO: 6089337 - DNA, 25 bp, Homo sapien
agaggaaccacctccgcagacggag

SEQ ID NO: 6089338 - DNA, 25 bp, Homo sapien
gccgctggagaagcagccgcttccg

SEQ ID NO: 6089339 - DNA, 25 bp, Homo sapien
gttgccgacgatcttgccacaagtg

SEQ ID NO: 6089340 - DNA, 25 bp, Homo sapien
gccgacgatcttgccacaagtgaag

SEQ ID NO: 6089341 - DNA, 25 bp, Homo sapien
tgaagcagcgtacagggatgatcat

SEQ ID NO: 6089342 - DNA, 25 bp, Homo sapien
gtaagcctcccacttgttgccgacg

SEQ ID NO: 6089343 - DNA, 25 bp, Homo sapien
cagcagtagcgcttcaggcccaggg

SEQ ID NO: 6089344 - DNA, 25 bp, Homo sapien
acaagtgaagcagcgtacagggatg

SEQ ID NO: 6089345 - DNA, 25 bp, Homo sapien
agtgaagcagcgtacagggatgatc

SEQ ID NO: 6089346 - DNA, 25 bp, Homo sapien
aggtaagcctcccacttgttgccga

SEQ ID NO: 6089347 - DNA, 25 bp, Homo sapien
ttgttgccgacgatcttgccacaag

SEQ ID NO: 6089348 - DNA, 25 bp, Homo sapien
gcggcagcagtagcgcttcaggccc

SEQ ID NO: 6089349 - DNA, 25 bp, Homo sapien
gacgatcttgccacaagtgaagcag

SEQ ID NO: 6089350 - DNA, 25 bp, Homo sapien
agccccaggtaagcctcccacttgt

SEQ ID NO: 6089351 - DNA, 25 bp, Homo sapien
tccaggctacgcaggaagtcatcct

SEQ ID NO: 6089352 - DNA, 25 bp, Homo sapien
atgaccgtctcgatgtacagctgtg

SEQ ID NO: 6089353 - DNA, 25 bp, Homo sapien
catcctggctgaagggctggatctg

SEQ ID NO: 6089354 - DNA, 25 bp, Homo sapien
tccagggcgtgatgctcttctgcag

SEQ ID NO: 6089355 - DNA, 25 bp, Homo sapien
gagtcttccagggcgtgatgctctt

SEQ ID NO: 6089356 - DNA, 25 bp, Homo sapien
agtttcaggaccaggtccacgacct

SEQ ID NO: 6089357 - DNA, 25 bp, Homo sapien
tccaggtgcagggcctccagcttca

SEQ ID NO: 6089358 - DNA, 25 bp, Homo sapien
tgagacaatggtggtgcaggaaggg

SEQ ID NO: 6089359 - DNA, 25 bp, Homo sapien
aagggctggatctgggggggagtct

SEQ ID NO: 6089360 - DNA, 25 bp, Homo sapien
agcctgcagtctgggcggggggcca

SEQ ID NO: 6089361 - DNA, 25 bp, Homo sapien
gcctccagcttcagggccatctcct

SEQ ID NO: 6089362 - DNA, 25 bp, Homo sapien
agctggggcccagcatgctccaggc

SEQ ID NO: 6089363 - DNA, 25 bp, Homo sapien
aaggggagcctgcagtctgggcggg

SEQ ID NO: 6089364 - DNA, 25 bp, Homo sapien
agggccatctccttgtgccgctgcc

SEQ ID NO: 6089365 - DNA, 25 bp, Homo sapien
ctacgcaggaagtcatcctggctga

SEQ ID NO: 6089366 - DNA, 25 bp, Homo sapien
aggaccaggtccacgacctccacct

SEQ ID NO: 6089367 - DNA, 25 bp, Homo sapien
tgagcccgcaccagcttctcacgaa

SEQ ID NO: 6089368 - DNA, 25 bp, Homo sapien
caggtctcgatgttcgcctcacaga

SEQ ID NO: 6089369 - DNA, 25 bp, Homo sapien
ggtaccagccatcaaaatgggggga

SEQ ID NO: 6089370 - DNA, 25 bp, Homo sapien
cctgtagagacccagccagtcgccc

SEQ ID NO: 6089371 - DNA, 25 bp, Homo sapien
aggatgcaggtgagctggggcccag

SEQ ID NO: 6089372 - DNA, 25 bp, Homo sapien
tactgctgagacaatggtggtgcag

SEQ ID NO: 6089373 - DNA, 25 bp, Homo sapien
tcggacttgtctttcatccaggtct

SEQ ID NO: 6089374 - DNA, 25 bp, Homo sapien
atctccttgtgccgctgccggtacc

SEQ ID NO: 6089375 - DNA, 25 bp, Homo sapien
aggtccacgacctccacctcggact

SEQ ID NO: 6089376 - DNA, 25 bp, Homo sapien
acgacctccacctcggacttgtctt

SEQ ID NO: 6089377 - DNA, 25 bp, Homo sapien
ttcatccaggtctcgatgttcgcct

SEQ ID NO: 6089378 - DNA, 25 bp, Homo sapien
ttgaaaaaccgcctgtagagaccca

SEQ ID NO: 6089379 - DNA, 25 bp, Homo sapien
ggacttgaaaaaccgcctgtagaga

SEQ ID NO: 6089380 - DNA, 25 bp, Homo sapien
gcctttactgctgagacaatggtgg

SEQ ID NO: 6089381 - DNA, 25 bp, Homo sapien
gaggctcaggcagacctagggccct

SEQ ID NO: 6089382 - DNA, 25 bp, Homo sapien
caagacagcctgcaggtctttgggc

SEQ ID NO: 6089383 - DNA, 25 bp, Homo sapien
cgcaccagcttctcacgaagtttca

SEQ ID NO: 6089384 - DNA, 25 bp, Homo sapien
gtgtgcttggcccagtgccgccacc

SEQ ID NO: 6089385 - DNA, 25 bp, Homo sapien
gagccgatgaccgtctcgatgtaca

SEQ ID NO: 6089386 - DNA, 25 bp, Homo sapien
gtagcctccttcacagggagctggt

SEQ ID NO: 6089387 - DNA, 25 bp, Homo sapien
cctgggaccgtggcccttggctttg

SEQ ID NO: 6089388 - DNA, 25 bp, Homo sapien
gagacccagccagtcgcccttgagg

SEQ ID NO: 6089389 - DNA, 25 bp, Homo sapien
gtctcgatgtacagctgtgcccgct

SEQ ID NO: 6089390 - DNA, 25 bp, Homo sapien
agcttcagggccatctccttgtgcc

SEQ ID NO: 6089391 - DNA, 25 bp, Homo sapien
cccttgaggatgcaggtgagctggg

SEQ ID NO: 6089392 - DNA, 25 bp, Homo sapien
gctgccggtaccagccatcaaaatg

SEQ ID NO: 6089393 - DNA, 25 bp, Homo sapien
agcttctcacgaagtttcaggacca

SEQ ID NO: 6089394 - DNA, 25 bp, Homo sapien
cagtcgcccttgaggatgcaggtga

SEQ ID NO: 6089395 - DNA, 25 bp, Homo sapien
aggaaggggagtgtgtgcttggccc

SEQ ID NO: 6089396 - DNA, 25 bp, Homo sapien
tgcaggaaggggagcctgcagtctg

SEQ ID NO: 6089397 - DNA, 25 bp, Homo sapien
caggcagacctagggccctgggacc

SEQ ID NO: 6089398 - DNA, 25 bp, Homo sapien
tcacagatagcctccaggtgcaggg

SEQ ID NO: 6089399 - DNA, 25 bp, Homo sapien
cagccagtcgcccttgaggatgcag

SEQ ID NO: 6089400 - DNA, 25 bp, Homo sapien
agcctgcaggtctttgggcagggag

SEQ ID NO: 6089401 - DNA, 25 bp, Homo sapien
cagtctgggcggggggccaaggaag

SEQ ID NO: 6089402 - DNA, 25 bp, Homo sapien
cttggctttgttctagggagggcac

SEQ ID NO: 6089403 - DNA, 25 bp, Homo sapien
atagcctccaggtgcagggcctcca

SEQ ID NO: 6089404 - DNA, 25 bp, Homo sapien
tgggggggagtcttccagggcgtga

SEQ ID NO: 6089405 - DNA, 25 bp, Homo sapien
tgcagggcctccagcttcagggcca

SEQ ID NO: 6089406 - DNA, 25 bp, Homo sapien
tggccctgagcccgcaccagcttct

SEQ ID NO: 6089407 - DNA, 25 bp, Homo sapien
tttgttctagggagggcacaagaca

SEQ ID NO: 6089408 - DNA, 25 bp, Homo sapien
ttgtctttcatccaggtctcgatgt

SEQ ID NO: 6089409 - DNA, 25 bp, Homo sapien
gtgccgccaccactggggagtggga

SEQ ID NO: 6089410 - DNA, 25 bp, Homo sapien
tccacctcggacttgtctttcatcc

SEQ ID NO: 6089411 - DNA, 25 bp, Homo sapien
tgcagcgtagcctccttcacaggga

SEQ ID NO: 6089412 - DNA, 25 bp, Homo sapien
agctgtgcccgctgcagcgtagcct

SEQ ID NO: 6089413 - DNA, 25 bp, Homo sapien
gtggcccttggctttgttctaggga

SEQ ID NO: 6089414 - DNA, 25 bp, Homo sapien
tcgatgttcgcctcacagatagcct

SEQ ID NO: 6089415 - DNA, 25 bp, Homo sapien
tcacgaagtttcaggaccaggtcca

SEQ ID NO: 6089416 - DNA, 25 bp, Homo sapien
gcagggagccgatgaccgtctcgat

SEQ ID NO: 6089417 - DNA, 25 bp, Homo sapien
gcccgctgcagcgtagcctccttca

SEQ ID NO: 6089418 - DNA, 25 bp, Homo sapien
tggatctgggggggagtcttccagg

SEQ ID NO: 6089419 - DNA, 25 bp, Homo sapien
gggagtgtgtgcttggcccagtgcc

SEQ ID NO: 6089420 - DNA, 25 bp, Homo sapien
gctgaagggctggatctggggggga

SEQ ID NO: 6089421 - DNA, 25 bp, Homo sapien
ggcccagcatgctccaggctacgca

SEQ ID NO: 6089422 - DNA, 25 bp, Homo sapien
agctggtggccctgagcccgcacca

SEQ ID NO: 6089423 - DNA, 25 bp, Homo sapien
ctttgggcagggagccgatgaccgt

SEQ ID NO: 6089424 - DNA, 25 bp, Homo sapien
caggtctttgggcagggagccgatg

SEQ ID NO: 6089425 - DNA, 25 bp, Homo sapien
gcatgctccaggctacgcaggaagt

SEQ ID NO: 6089426 - DNA, 25 bp, Homo sapien
ccaccactggggagtgggaggctca

SEQ ID NO: 6089427 - DNA, 25 bp, Homo sapien
aaaccgcctgtagagacccagccag

SEQ ID NO: 6089428 - DNA, 25 bp, Homo sapien
ttcgcctcacagatagcctccaggt

SEQ ID NO: 6089429 - DNA, 25 bp, Homo sapien
tccttcacagggagctggtggccct

SEQ ID NO: 6089430 - DNA, 25 bp, Homo sapien
gaccgtggcccttggctttgttcta

SEQ ID NO: 6089431 - DNA, 25 bp, Homo sapien
ttgtgccgctgccggtaccagccat

SEQ ID NO: 6089432 - DNA, 25 bp, Homo sapien
ttggcccagtgccgccaccactggg

SEQ ID NO: 6089433 - DNA, 25 bp, Homo sapien
ctagggagggcacaagacagcctgc

SEQ ID NO: 6089434 - DNA, 25 bp, Homo sapien
atgtacagctgtgcccgctgcagcg

SEQ ID NO: 6089435 - DNA, 25 bp, Homo sapien
agccatcaaaatggggggacttgaa

SEQ ID NO: 6089436 - DNA, 25 bp, Homo sapien
agggcacaagacagcctgcaggtct

SEQ ID NO: 6089437 - DNA, 25 bp, Homo sapien
tggtggtgcaggaaggggagcctgc

SEQ ID NO: 6089438 - DNA, 25 bp, Homo sapien
caggtgagctggggcccagcatgct

SEQ ID NO: 6089439 - DNA, 25 bp, Homo sapien
aggaagtcatcctggctgaagggct

SEQ ID NO: 6089440 - DNA, 25 bp, Homo sapien
acagggagctggtggccctgagccc

SEQ ID NO: 6089441 - DNA, 25 bp, Homo sapien
gggccaaggaaggggagtgtgtgct

SEQ ID NO: 6089442 - DNA, 25 bp, Homo sapien
gacaaggtaacagaagctcatggcc

SEQ ID NO: 6089443 - DNA, 25 bp, Homo sapien
ggatgtgccgacaggaagaccactg

SEQ ID NO: 6089444 - DNA, 25 bp, Homo sapien
gatgagagagcatcgcatcgcttgc

SEQ ID NO: 6089445 - DNA, 25 bp, Homo sapien
cactgtggctagtatccagatgccc

SEQ ID NO: 6089446 - DNA, 25 bp, Homo sapien
gatggccttgttgcgctcaaagttg

SEQ ID NO: 6089447 - DNA, 25 bp, Homo sapien
acactcatggaggagcgccggatgt

SEQ ID NO: 6089448 - DNA, 25 bp, Homo sapien
cgatgaaggcgtacaagaaagggtt

SEQ ID NO: 6089449 - DNA, 25 bp, Homo sapien
gctcctctggaggtcactgtacagg

SEQ ID NO: 6089450 - DNA, 25 bp, Homo sapien
gaagactatgaagaccacgaccaca

SEQ ID NO: 6089451 - DNA, 25 bp, Homo sapien
gaccacagcgatgatcaccttgatg

SEQ ID NO: 6089452 - DNA, 25 bp, Homo sapien
tgaagagatcgttgcggaacttgac

SEQ ID NO: 6089453 - DNA, 25 bp, Homo sapien
gagttgcttactgagctcacaggtg

SEQ ID NO: 6089454 - DNA, 25 bp, Homo sapien
gaggaacacgtagcaaaggctttgc

SEQ ID NO: 6089455 - DNA, 25 bp, Homo sapien
ggagccgaccaccatgaataagcaa

SEQ ID NO: 6089456 - DNA, 25 bp, Homo sapien
ccaccataatgtgggaggaacacgt

SEQ ID NO: 6089457 - DNA, 25 bp, Homo sapien
gtaccgtagagggttgcacacagcc

SEQ ID NO: 6089458 - DNA, 25 bp, Homo sapien
caaaccctgcggttcatgaggagag

SEQ ID NO: 6089459 - DNA, 25 bp, Homo sapien
catagagtgacgtgtctgtgcaaga

SEQ ID NO: 6089460 - DNA, 25 bp, Homo sapien
aggctgccccgtagaaaacgctcac

SEQ ID NO: 6089461 - DNA, 25 bp, Homo sapien
tagtgacaggagtcagcatgaaccc

SEQ ID NO: 6089462 - DNA, 25 bp, Homo sapien
gaaaaagtgattgatctctcgggat

SEQ ID NO: 6089463 - DNA, 25 bp, Homo sapien
gagtcagcatgaacccatccaagga

SEQ ID NO: 6089464 - DNA, 25 bp, Homo sapien
acgttggtgtagaaggctgccccgt

SEQ ID NO: 6089465 - DNA, 25 bp, Homo sapien
gagatgacagatagagggataagca

SEQ ID NO: 6089466 - DNA, 25 bp, Homo sapien
gaagggcagtcttaggatgagaacc

SEQ ID NO: 6089467 - DNA, 25 bp, Homo sapien
cacacgtccaggaagtgacggccag

SEQ ID NO: 6089468 - DNA, 25 bp, Homo sapien
ggagacattcgctgtgtccaaaact

SEQ ID NO: 6089469 - DNA, 25 bp, Homo sapien
agggagccacacgtccaggaagtga

SEQ ID NO: 6089470 - DNA, 25 bp, Homo sapien
ggatgagaaccacatgggccagagc

SEQ ID NO: 6089471 - DNA, 25 bp, Homo sapien
caccagcaggagacattcgctgtgt

SEQ ID NO: 6089472 - DNA, 25 bp, Homo sapien
caggtcatgatgacggagtatcgga

SEQ ID NO: 6089473 - DNA, 25 bp, Homo sapien
cccagagaagggcagtcttaggatg

SEQ ID NO: 6089474 - DNA, 25 bp, Homo sapien
gtaacgatcgtaggacatcagcacc

SEQ ID NO: 6089475 - DNA, 25 bp, Homo sapien
caggatgtgcgagtaggagacaagc

SEQ ID NO: 6089476 - DNA, 25 bp, Homo sapien
atgatgatggcactgccaaagaaga

SEQ ID NO: 6089477 - DNA, 25 bp, Homo sapien
atggccacgtaacgatcgtaggaca

SEQ ID NO: 6089478 - DNA, 25 bp, Homo sapien
tcaagctgacgtaaaataaatgtct

SEQ ID NO: 6089479 - DNA, 25 bp, Homo sapien
ttttacagctagtccaaatttctct

SEQ ID NO: 6089480 - DNA, 25 bp, Homo sapien
gctgctattgtgtcattgtatataa

SEQ ID NO: 6089481 - DNA, 25 bp, Homo sapien
tgtatataaacatgatttgctgaaa

SEQ ID NO: 6089482 - DNA, 25 bp, Homo sapien
tcaatctctgaaagttgtgctttag

SEQ ID NO: 6089483 - DNA, 25 bp, Homo sapien
caccaacaacacagtactctgcaag

SEQ ID NO: 6089484 - DNA, 25 bp, Homo sapien
cagcaacttcaagctgacgtaaaat

SEQ ID NO: 6089485 - DNA, 25 bp, Homo sapien
tttgctgaaaatggcggaacattgc

SEQ ID NO: 6089486 - DNA, 25 bp, Homo sapien
tggcggaacattgcagcatgctgag

SEQ ID NO: 6089487 - DNA, 25 bp, Homo sapien
gagatatctgaatgaaaagatccct

SEQ ID NO: 6089488 - DNA, 25 bp, Homo sapien
gttcctctactaaaagagatatctg

SEQ ID NO: 6089489 - DNA, 25 bp, Homo sapien
ttattttgagctacagcatggacag

SEQ ID NO: 6089490 - DNA, 25 bp, Homo sapien
gggagcatcccaaagcatactcgaa

SEQ ID NO: 6089491 - DNA, 25 bp, Homo sapien
caaagcatactcgaaggctccagcc

SEQ ID NO: 6089492 - DNA, 25 bp, Homo sapien
taagtcatttcgaaccacaagaatc

SEQ ID NO: 6089493 - DNA, 25 bp, Homo sapien
tcttcatcaggagctttgaccacca

SEQ ID NO: 6089494 - DNA, 25 bp, Homo sapien
catgggccaataatgcaatcagggt

SEQ ID NO: 6089495 - DNA, 25 bp, Homo sapien
tgttgttagaatctgacaggcttca

SEQ ID NO: 6089496 - DNA, 25 bp, Homo sapien
agcctggtgcaatctgagtacgtcc

SEQ ID NO: 6089497 - DNA, 25 bp, Homo sapien
caataatgcaatcagggtttcttca

SEQ ID NO: 6089498 - DNA, 25 bp, Homo sapien
tcatctcaagaacatttaagttggg

SEQ ID NO: 6089499 - DNA, 25 bp, Homo sapien
taggacagtttgagagcctggtgca

SEQ ID NO: 6089500 - DNA, 25 bp, Homo sapien
actttgtcaattaggtctgctggtc

SEQ ID NO: 6089501 - DNA, 25 bp, Homo sapien
gagtacgtccagcatcttgaattaa

SEQ ID NO: 6089502 - DNA, 25 bp, Homo sapien
gttctggtgtctggtccgctcccgg

SEQ ID NO: 6089503 - DNA, 25 bp, Homo sapien
gcagggcagagggtctaggatgcca

SEQ ID NO: 6089504 - DNA, 25 bp, Homo sapien
taaaagcctgcagctcgaggagaca

SEQ ID NO: 6089505 - DNA, 25 bp, Homo sapien
gagacagggtgtcacaattaccagg

SEQ ID NO: 6089506 - DNA, 25 bp, Homo sapien
aaactagccgccctagctccaatgt

SEQ ID NO: 6089507 - DNA, 25 bp, Homo sapien
ggtatcaaacttcgaacatgacaag

SEQ ID NO: 6089508 - DNA, 25 bp, Homo sapien
gacagggagcggaaccgtcttcaac

SEQ ID NO: 6089509 - DNA, 25 bp, Homo sapien
tcccggctgttggtcgcagggcaga

SEQ ID NO: 6089510 - DNA, 25 bp, Homo sapien
tgacaaccctgccgcggaggcagtg

SEQ ID NO: 6089511 - DNA, 25 bp, Homo sapien
tctccgcagggcgaaactgctgggc

SEQ ID NO: 6089512 - DNA, 25 bp, Homo sapien
caattaccaggtgaaactagccgcc

SEQ ID NO: 6089513 - DNA, 25 bp, Homo sapien
catgacaagcataaaagcctgcagc

SEQ ID NO: 6089514 - DNA, 25 bp, Homo sapien
tgctcaatgtacagcctcagcttgt

SEQ ID NO: 6089515 - DNA, 25 bp, Homo sapien
cggacatccgcgaaacagaagcagg

SEQ ID NO: 6089516 - DNA, 25 bp, Homo sapien
ggtctccccgagaaagctgtagatg

SEQ ID NO: 6089517 - DNA, 25 bp, Homo sapien
cagaagcggttcagggccggcaaat

SEQ ID NO: 6089518 - DNA, 25 bp, Homo sapien
aaagactgcttgcagggagcggccc

SEQ ID NO: 6089519 - DNA, 25 bp, Homo sapien
tgatgaagacgttctccggcagcca

SEQ ID NO: 6089520 - DNA, 25 bp, Homo sapien
ggtgcacgctgatgaagacgttctc

SEQ ID NO: 6089521 - DNA, 25 bp, Homo sapien
gttttctgctcaatgtacagcctca

SEQ ID NO: 6089522 - DNA, 25 bp, Homo sapien
cagaagcaggcctcgtcggtgtgct

SEQ ID NO: 6089523 - DNA, 25 bp, Homo sapien
agccagcagacgaagaagaccagca

SEQ ID NO: 6089524 - DNA, 25 bp, Homo sapien
cgtggtgcttggtgcggaacaggct

SEQ ID NO: 6089525 - DNA, 25 bp, Homo sapien
cgaagggcacgatgaagcccagcgt

SEQ ID NO: 6089526 - DNA, 25 bp, Homo sapien
gcactcaagctgaatccatagatgt

SEQ ID NO: 6089527 - DNA, 25 bp, Homo sapien
aattagcccagttttgctcacttgc

SEQ ID NO: 6089528 - DNA, 25 bp, Homo sapien
gatgtgggcagggatctcttttgca

SEQ ID NO: 6089529 - DNA, 25 bp, Homo sapien
gcctgccccattcgattttgttctg

SEQ ID NO: 6089530 - DNA, 25 bp, Homo sapien
gccccattcgattttgttctgcact

SEQ ID NO: 6089531 - DNA, 25 bp, Homo sapien
cgcatggtaagggtcgctctttccc

SEQ ID NO: 6089532 - DNA, 25 bp, Homo sapien
tggtcgcatggtaagggtcgctctt

SEQ ID NO: 6089533 - DNA, 25 bp, Homo sapien
tctgcactgtaattagcccagtttt

SEQ ID NO: 6089534 - DNA, 25 bp, Homo sapien
agcatatttttgagacccacagtct

SEQ ID NO: 6089535 - DNA, 25 bp, Homo sapien
aatgatattcaaggccagggacacc

SEQ ID NO: 6089536 - DNA, 25 bp, Homo sapien
gagttagagatggtgcttcccgcct

SEQ ID NO: 6089537 - DNA, 25 bp, Homo sapien
aacagcactcaagctgaatccatag

SEQ ID NO: 6089538 - DNA, 25 bp, Homo sapien
tggggaatcctttcggggaagatca

SEQ ID NO: 6089539 - DNA, 25 bp, Homo sapien
aagacgatatcagctggaatgttgt

SEQ ID NO: 6089540 - DNA, 25 bp, Homo sapien
attttgtcttcgtttcgaatgctct

SEQ ID NO: 6089541 - DNA, 25 bp, Homo sapien
ttgtcttcgtttcgaatgctctttc

SEQ ID NO: 6089542 - DNA, 25 bp, Homo sapien
tcttcaagggagactcgaaggtcgt

SEQ ID NO: 6089543 - DNA, 25 bp, Homo sapien
cgtccagagtggggacgttcactgt

SEQ ID NO: 6089544 - DNA, 25 bp, Homo sapien
actgggggatcttgcttctttcggg

SEQ ID NO: 6089545 - DNA, 25 bp, Homo sapien
tcggggtttagccgcttgtgggaga

SEQ ID NO: 6089546 - DNA, 25 bp, Homo sapien
cttcaagggagactcgaaggtcgtg

SEQ ID NO: 6089547 - DNA, 25 bp, Homo sapien
gagactcgaaggtcgtgggtgactg

SEQ ID NO: 6089548 - DNA, 25 bp, Homo sapien
gactcgaaggtcgtgggtgactggg

SEQ ID NO: 6089549 - DNA, 25 bp, Homo sapien
gactgggggatcttgcttctttcgg

SEQ ID NO: 6089550 - DNA, 25 bp, Homo sapien
tccaggtggccgttgacggtcttcc

SEQ ID NO: 6089551 - DNA, 25 bp, Homo sapien
ccagcttgagcacgcagtcgaagcg

SEQ ID NO: 6089552 - DNA, 25 bp, Homo sapien
gagctgaaggtcttgaggcgcaggc

SEQ ID NO: 6089553 - DNA, 25 bp, Homo sapien
tgcagcttgcgcactgcgttcacca

SEQ ID NO: 6089554 - DNA, 25 bp, Homo sapien
tggtcccagactgggtcttgacgct

SEQ ID NO: 6089555 - DNA, 25 bp, Homo sapien
ccggcagctgggtgactttctcata

SEQ ID NO: 6089556 - DNA, 25 bp, Homo sapien
gtagaagccgctctcctgcagcttg

SEQ ID NO: 6089557 - DNA, 25 bp, Homo sapien
gacggtcttccgacagagatgctga

SEQ ID NO: 6089558 - DNA, 25 bp, Homo sapien
cctcacactggatgcgcaggttctt

SEQ ID NO: 6089559 - DNA, 25 bp, Homo sapien
gatgcgcaggttcttggtcccagac

SEQ ID NO: 6089560 - DNA, 25 bp, Homo sapien
ggtcactgcgctccagtagaagccg

SEQ ID NO: 6089561 - DNA, 25 bp, Homo sapien
ccccggagtagatgtaataggctct

SEQ ID NO: 6089562 - DNA, 25 bp, Homo sapien
gcgcacaaacacgtagggcacattc

SEQ ID NO: 6089563 - DNA, 25 bp, Homo sapien
tacatgactgctgaacgaggtccag

SEQ ID NO: 6089564 - DNA, 25 bp, Homo sapien
cttggagcgcacaaacacgtagggc

SEQ ID NO: 6089565 - DNA, 25 bp, Homo sapien
gctgaacgaggtccagtagcttctt

SEQ ID NO: 6089566 - DNA, 25 bp, Homo sapien
ctttccgaagctgcttatagttaca

SEQ ID NO: 6089567 - DNA, 25 bp, Homo sapien
gactgctgaacgaggtccagtagct

SEQ ID NO: 6089568 - DNA, 25 bp, Homo sapien
ggctcctttccgaagctgcttatag

SEQ ID NO: 6089569 - DNA, 25 bp, Homo sapien
tgactgctgaacgaggtccagtagc

SEQ ID NO: 6089570 - DNA, 25 bp, Homo sapien
catgactgctgaacgaggtccagta

SEQ ID NO: 6089571 - DNA, 25 bp, Homo sapien
gagcgcacaaacacgtagggcacat

SEQ ID NO: 6089572 - DNA, 25 bp, Homo sapien
ttggagcgcacaaacacgtagggca

SEQ ID NO: 6089573 - DNA, 25 bp, Homo sapien
ctgctgaacgaggtccagtagcttc

SEQ ID NO: 6089574 - DNA, 25 bp, Homo sapien
ggtctccccgagaaagctgtagatg

SEQ ID NO: 6089575 - DNA, 25 bp, Homo sapien
cgaagggcacgatgaagcccagcgt

SEQ ID NO: 6089576 - DNA, 25 bp, Homo sapien
cagaagcaggcctcgtcggtgtgct

SEQ ID NO: 6089577 - DNA, 25 bp, Homo sapien
cggacatccgcgaaacagaagcagg

SEQ ID NO: 6089578 - DNA, 25 bp, Homo sapien
cagaagcggttcagggccggcaaat

SEQ ID NO: 6089579 - DNA, 25 bp, Homo sapien
tgatgaagacgttctccggcagcca

SEQ ID NO: 6089580 - DNA, 25 bp, Homo sapien
gttttctgctcaatgtacagcctca

SEQ ID NO: 6089581 - DNA, 25 bp, Homo sapien
tgctcaatgtacagcctcagcttgt

SEQ ID NO: 6089582 - DNA, 25 bp, Homo sapien
ggtgcacgctgatgaagacgttctc

SEQ ID NO: 6089583 - DNA, 25 bp, Homo sapien
agccagcagacgaagaagaccagca

SEQ ID NO: 6089584 - DNA, 25 bp, Homo sapien
tgaccagcacccggacaatgaggga

SEQ ID NO: 6089585 - DNA, 25 bp, Homo sapien
aaagactgcttgcagggagcggccc

SEQ ID NO: 6089586 - DNA, 25 bp, Homo sapien
gccgaagaatcccagtaccatgagg

SEQ ID NO: 6089587 - DNA, 25 bp, Homo sapien
taccatgaggacgtagagggcctcc

SEQ ID NO: 6089588 - DNA, 25 bp, Homo sapien
tcagaaagggcgtcaccgctgtggt

SEQ ID NO: 6089589 - DNA, 25 bp, Homo sapien
gaatgggtcgttcgagtgctccagc

SEQ ID NO: 6089590 - DNA, 25 bp, Homo sapien
ggtgaagaagccgaagaatcccagt

SEQ ID NO: 6089591 - DNA, 25 bp, Homo sapien
tcttgccaggcatcggactcgatgt

SEQ ID NO: 6089592 - DNA, 25 bp, Homo sapien
ggcctggacataggccttgtccttc

SEQ ID NO: 6089593 - DNA, 25 bp, Homo sapien
ctcgatgtagacgttgaatgggtcg

SEQ ID NO: 6089594 - DNA, 25 bp, Homo sapien
cggatgtagctcagcatgatgccca

SEQ ID NO: 6089595 - DNA, 25 bp, Homo sapien
ccgctgtggtgttagacaggatcat

SEQ ID NO: 6089596 - DNA, 25 bp, Homo sapien
tgggttgttctatggccagatggtt

SEQ ID NO: 6089597 - DNA, 25 bp, Homo sapien
cagcttggtcagaaagggcgtcacc

SEQ ID NO: 6089598 - DNA, 25 bp, Homo sapien
cagaccacgaacaccaggaggttgg

SEQ ID NO: 6089599 - DNA, 25 bp, Homo sapien
ttggcccagaccatgcgggcagcct

SEQ ID NO: 6089600 - DNA, 25 bp, Homo sapien
aacgccatggagttgaaattgtgcc

SEQ ID NO: 6089601 - DNA, 25 bp, Homo sapien
agcccactgcgaggcgcactgtcag

SEQ ID NO: 6089602 - DNA, 25 bp, Homo sapien
aaattgtgccgggtgctcctgaagc

SEQ ID NO: 6089603 - DNA, 25 bp, Homo sapien
tgtagtagtagcagatggcgtccag

SEQ ID NO: 6089604 - DNA, 25 bp, Homo sapien
ccgtgaccaggctgatgctcatgta

SEQ ID NO: 6089605 - DNA, 25 bp, Homo sapien
cgacggatcgtctccaggagggcac

SEQ ID NO: 6089606 - DNA, 25 bp, Homo sapien
tgtacagggcgcgacggatcgtctc

SEQ ID NO: 6089607 - DNA, 25 bp, Homo sapien
agggcacaggcgttccagcccactg

SEQ ID NO: 6089608 - DNA, 25 bp, Homo sapien
cttgctggttatgtacagggcgcga

SEQ ID NO: 6089609 - DNA, 25 bp, Homo sapien
gaactccttggccatgtagtagtag

SEQ ID NO: 6089610 - DNA, 25 bp, Homo sapien
actgatctttaccatatggtgcagg

SEQ ID NO: 6089611 - DNA, 25 bp, Homo sapien
tcaggggcacagtcgccctcttttg

SEQ ID NO: 6089612 - DNA, 25 bp, Homo sapien
gggcacagtcgccctcttttgcgat

SEQ ID NO: 6089613 - DNA, 25 bp, Homo sapien
tccatcagctcgatgccaaagacca

SEQ ID NO: 6089614 - DNA, 25 bp, Homo sapien
ctgatctttaccatatggtgcagga

SEQ ID NO: 6089615 - DNA, 25 bp, Homo sapien
ccatcagctcgatgccaaagaccag

SEQ ID NO: 6089616 - DNA, 25 bp, Homo sapien
ctcaggggcacagtcgccctctttt

SEQ ID NO: 6089617 - DNA, 25 bp, Homo sapien
gtggccgatggggtccacttccatc

SEQ ID NO: 6089618 - DNA, 25 bp, Homo sapien
ccacttccatcagctcgatgccaaa

SEQ ID NO: 6089619 - DNA, 25 bp, Homo sapien
ggcacagtcgccctcttttgcgatt

SEQ ID NO: 6089620 - DNA, 25 bp, Homo sapien
gcacagtcgccctcttttgcgatta

SEQ ID NO: 6089621 - DNA, 25 bp, Homo sapien
catcagctcgatgccaaagaccagc

SEQ ID NO: 6089622 - DNA, 25 bp, Homo sapien
ttcgatgacacgctgaaagctcggg

SEQ ID NO: 6089623 - DNA, 25 bp, Homo sapien
tccatggcagcctcataactggagg

SEQ ID NO: 6089624 - DNA, 25 bp, Homo sapien
gatcagggctgaaaagttccatggc

SEQ ID NO: 6089625 - DNA, 25 bp, Homo sapien
gatgacacgctgaaagctcgggcag

SEQ ID NO: 6089626 - DNA, 25 bp, Homo sapien
atgagcttaatgatgctttctctgg

SEQ ID NO: 6089627 - DNA, 25 bp, Homo sapien
ttccatggcagcctcataactggag

SEQ ID NO: 6089628 - DNA, 25 bp, Homo sapien
gtgtgtccatgaggagggtttcgat

SEQ ID NO: 6089629 - DNA, 25 bp, Homo sapien
agcctcataactggagggtgtgtcc

SEQ ID NO: 6089630 - DNA, 25 bp, Homo sapien
tggcagcctcataactggagggtgt

SEQ ID NO: 6089631 - DNA, 25 bp, Homo sapien
cttgatcagggctgaaaagttccat

SEQ ID NO: 6089632 - DNA, 25 bp, Homo sapien
gacacgctgaaagctcgggcagatc

SEQ ID NO: 6089633 - DNA, 25 bp, Homo sapien
gagcttaatgatgctttctctgggc

SEQ ID NO: 6089634 - DNA, 25 bp, Homo sapien
aacggtaacccgatcccttgcatgg

SEQ ID NO: 6089635 - DNA, 25 bp, Homo sapien
acgttggtgctgttttgagtgctac

SEQ ID NO: 6089636 - DNA, 25 bp, Homo sapien
gctcgctcgtgagccccttggtgcg

SEQ ID NO: 6089637 - DNA, 25 bp, Homo sapien
gcctgtccaatcagaggatccattt

SEQ ID NO: 6089638 - DNA, 25 bp, Homo sapien
cgatcccttgcatggcttttctggg

SEQ ID NO: 6089639 - DNA, 25 bp, Homo sapien
tgactgctcagtccaatccgctgtg

SEQ ID NO: 6089640 - DNA, 25 bp, Homo sapien
gtgagttcacttgggagaagcctga

SEQ ID NO: 6089641 - DNA, 25 bp, Homo sapien
cggcgatctcgcctatcatggtggc

SEQ ID NO: 6089642 - DNA, 25 bp, Homo sapien
tgcagctgtcgctcgctcgtgagcc

SEQ ID NO: 6089643 - DNA, 25 bp, Homo sapien
agctgattcggctgtctaccatttg

SEQ ID NO: 6089644 - DNA, 25 bp, Homo sapien
tcgttctgcccaagagaagttcctc

SEQ ID NO: 6089645 - DNA, 25 bp, Homo sapien
ttgatgcgaatacaacggtaacccg

SEQ ID NO: 6089646 - DNA, 25 bp, Homo sapien
gctccgagtcctgaccaaggagtag

SEQ ID NO: 6089647 - DNA, 25 bp, Homo sapien
tgcccagcaggcgatgaagacgctc

SEQ ID NO: 6089648 - DNA, 25 bp, Homo sapien
gaattgtccgatttgctgcggctga

SEQ ID NO: 6089649 - DNA, 25 bp, Homo sapien
gaagacgctcaggacgataattacg

SEQ ID NO: 6089650 - DNA, 25 bp, Homo sapien
gataattacggtcttgagcagcgcc

SEQ ID NO: 6089651 - DNA, 25 bp, Homo sapien
ccaggaagtactccgctctgaagag

SEQ ID NO: 6089652 - DNA, 25 bp, Homo sapien
gttccagcccatgataggcaggcca

SEQ ID NO: 6089653 - DNA, 25 bp, Homo sapien
aatgttcttgcggaacgtcaggcgg

SEQ ID NO: 6089654 - DNA, 25 bp, Homo sapien
gacatgatccggatgaaggcccgac

SEQ ID NO: 6089655 - DNA, 25 bp, Homo sapien
gctgaattccatgccggcgatgatg

SEQ ID NO: 6089656 - DNA, 25 bp, Homo sapien
tcagagctgcggctggccttggaaa

SEQ ID NO: 6089657 - DNA, 25 bp, Homo sapien
gatgggtcgcttgaatttgccagca

SEQ ID NO: 6089658 - DNA, 25 bp, Homo sapien
gggccagttgaaattagggatctca

SEQ ID NO: 6089659 - DNA, 25 bp, Homo sapien
tcccaaagagctggcgctcgtagtc

SEQ ID NO: 6089660 - DNA, 25 bp, Homo sapien
tggatcttgtcagccacggtgtcaa

SEQ ID NO: 6089661 - DNA, 25 bp, Homo sapien
tggaatttcatcaggtacgcgatac

SEQ ID NO: 6089662 - DNA, 25 bp, Homo sapien
tagcattaacaatgcaggtgatgcc

SEQ ID NO: 6089663 - DNA, 25 bp, Homo sapien
ctgatgacaggtcgccgggctttca

SEQ ID NO: 6089664 - DNA, 25 bp, Homo sapien
tacgcgatacacagcgtggctgagc

SEQ ID NO: 6089665 - DNA, 25 bp, Homo sapien
cagcaggcacacgttgtggaatttc

SEQ ID NO: 6089666 - DNA, 25 bp, Homo sapien
tagtctatcagttgcctccagaagc

SEQ ID NO: 6089667 - DNA, 25 bp, Homo sapien
gaagcctacgttgggcctgatgaca

SEQ ID NO: 6089668 - DNA, 25 bp, Homo sapien
tgcagcacagtgcaccaaggtggcc

SEQ ID NO: 6089669 - DNA, 25 bp, Homo sapien
tagacgtcgggaactatgccataag

SEQ ID NO: 6089670 - DNA, 25 bp, Homo sapien
tcttgaggaagctctggtttggaca

SEQ ID NO: 6089671 - DNA, 25 bp, Homo sapien
gggcttctctttaagcctctcatga

SEQ ID NO: 6089672 - DNA, 25 bp, Homo sapien
tcggcaaagcgcttcaggaaacctc

SEQ ID NO: 6089673 - DNA, 25 bp, Homo sapien
tgggcgacctactcttctcatgaag

SEQ ID NO: 6089674 - DNA, 25 bp, Homo sapien
tttcgccttcttcgtcggagggcag

SEQ ID NO: 6089675 - DNA, 25 bp, Homo sapien
tattttctctgagggtgctggtgcc

SEQ ID NO: 6089676 - DNA, 25 bp, Homo sapien
gaagcctccataccttttcatgaag

SEQ ID NO: 6089677 - DNA, 25 bp, Homo sapien
caaatggctttcttccggtttgcta

SEQ ID NO: 6089678 - DNA, 25 bp, Homo sapien
tcggttgtcccctgtttccagaagc

SEQ ID NO: 6089679 - DNA, 25 bp, Homo sapien
gtggtggctacgctctcggttgtcc

SEQ ID NO: 6089680 - DNA, 25 bp, Homo sapien
cataccgtttctggtagtccatcca

SEQ ID NO: 6089681 - DNA, 25 bp, Homo sapien
gaagctcttttagcaggtctgagga

SEQ ID NO: 6089682 - DNA, 25 bp, Homo sapien
tattttctctgagggtgctggtgcc

SEQ ID NO: 6089683 - DNA, 25 bp, Homo sapien
tcggcaaagcgcttcaggaaacctc

SEQ ID NO: 6089684 - DNA, 25 bp, Homo sapien
tgggcgacctactcttctcatgaag

SEQ ID NO: 6089685 - DNA, 25 bp, Homo sapien
tttcgccttcttcgtcggagggcag

SEQ ID NO: 6089686 - DNA, 25 bp, Homo sapien
tcttgaggaagctctggtttggaca

SEQ ID NO: 6089687 - DNA, 25 bp, Homo sapien
gtggtggctacgctctcggttgtcc

SEQ ID NO: 6089688 - DNA, 25 bp, Homo sapien
gaagcctccataccttttcatgaag

SEQ ID NO: 6089689 - DNA, 25 bp, Homo sapien
caaatggctttcttccggtttgcta

SEQ ID NO: 6089690 - DNA, 25 bp, Homo sapien
cataccgtttctggtagtccatcca

SEQ ID NO: 6089691 - DNA, 25 bp, Homo sapien
gggcttctctttaagcctctcatga

SEQ ID NO: 6089692 - DNA, 25 bp, Homo sapien
tcggttgtcccctgtttccagaagc

SEQ ID NO: 6089693 - DNA, 25 bp, Homo sapien
gaagctcttttagcaggtctgagga

SEQ ID NO: 6089694 - DNA, 25 bp, Homo sapien
gatctccgtgaccttggcgtacatg

SEQ ID NO: 6089695 - DNA, 25 bp, Homo sapien
atgacctcctgccagatctccgtga

SEQ ID NO: 6089696 - DNA, 25 bp, Homo sapien
gctgccggaagaggacgacgccggt

SEQ ID NO: 6089697 - DNA, 25 bp, Homo sapien
gcgtacatgtctcggatccactccg

SEQ ID NO: 6089698 - DNA, 25 bp, Homo sapien
tcgcggaccgcgaagttgccgaagt

SEQ ID NO: 6089699 - DNA, 25 bp, Homo sapien
ctgttcggctcggtcgggaagccct

SEQ ID NO: 6089700 - DNA, 25 bp, Homo sapien
ccccgaactggtgcacgtggatggc

SEQ ID NO: 6089701 - DNA, 25 bp, Homo sapien
ccctccagggcgaagaaggcgtcga

SEQ ID NO: 6089702 - DNA, 25 bp, Homo sapien
cctggctcaggtccccgaactggtg

SEQ ID NO: 6089703 - DNA, 25 bp, Homo sapien
gcttcttgcgctctgagtgctcccg

SEQ ID NO: 6089704 - DNA, 25 bp, Homo sapien
tggatggcgcggctggagctgttcg

SEQ ID NO: 6089705 - DNA, 25 bp, Homo sapien
tgaccttggcgtacatgtctcggat

SEQ ID NO: 6089706 - DNA, 25 bp, Homo sapien
gctgacactgtcacacaccgagaat

SEQ ID NO: 6089707 - DNA, 25 bp, Homo sapien
ttgggtcccggcacttggtctcaaa

SEQ ID NO: 6089708 - DNA, 25 bp, Homo sapien
tgtctgtggcggtggtcttatcccc

SEQ ID NO: 6089709 - DNA, 25 bp, Homo sapien
gagaattcgcccctgtggaagatgg

SEQ ID NO: 6089710 - DNA, 25 bp, Homo sapien
cagcgccttgacaaaggtgtgagtc

SEQ ID NO: 6089711 - DNA, 25 bp, Homo sapien
cacccgctgtcaacgggatttgggt

SEQ ID NO: 6089712 - DNA, 25 bp, Homo sapien
tgagtcgtggtacaatatgagttcc

SEQ ID NO: 6089713 - DNA, 25 bp, Homo sapien
cacagtaatgttgcgggtctgcccc

SEQ ID NO: 6089714 - DNA, 25 bp, Homo sapien
tatctatccggataaaccgccaggc

SEQ ID NO: 6089715 - DNA, 25 bp, Homo sapien
gaagtccagatcctgagtgtctgca

SEQ ID NO: 6089716 - DNA, 25 bp, Homo sapien
gatgggatgatgaccgcttgctcct

SEQ ID NO: 6089717 - DNA, 25 bp, Homo sapien
cacctccttgcccttgatgtctgtg

SEQ ID NO: 6089718 - DNA, 25 bp, Homo sapien
gccttgccaccagtagacttccgag

SEQ ID NO: 6089719 - DNA, 25 bp, Homo sapien
caggttagtgtcctcaaatagccct

SEQ ID NO: 6089720 - DNA, 25 bp, Homo sapien
tggcgccttgccaccagtagacttc

SEQ ID NO: 6089721 - DNA, 25 bp, Homo sapien
cttagtggccaactgtttgcgtggc

SEQ ID NO: 6089722 - DNA, 25 bp, Homo sapien
ggtagtttacgaataagcagttcag

SEQ ID NO: 6089723 - DNA, 25 bp, Homo sapien
caccaggcgctggaaaggtagttta

SEQ ID NO: 6089724 - DNA, 25 bp, Homo sapien
caactgtttgcgtggcgccttgcca

SEQ ID NO: 6089725 - DNA, 25 bp, Homo sapien
gtcctgcgcaatctcgcgcaccagg

SEQ ID NO: 6089726 - DNA, 25 bp, Homo sapien
gccaccagtagacttccgagcagtt

SEQ ID NO: 6089727 - DNA, 25 bp, Homo sapien
accagtagacttccgagcagtttgc

SEQ ID NO: 6089728 - DNA, 25 bp, Homo sapien
caggcgctggaaaggtagtttacga

SEQ ID NO: 6089729 - DNA, 25 bp, Homo sapien
tagtggccaactgtttgcgtggcgc

SEQ ID NO: 6089730 - DNA, 25 bp, Homo sapien
cgtagttgcctttgcgcagcaagcg

SEQ ID NO: 6089731 - DNA, 25 bp, Homo sapien
cggagcggattttgccggttcaggc

SEQ ID NO: 6089732 - DNA, 25 bp, Homo sapien
gccggagcggattttgccggttcag

SEQ ID NO: 6089733 - DNA, 25 bp, Homo sapien
ggccggagcggattttgccggttca

SEQ ID NO: 6089734 - DNA, 25 bp, Homo sapien
ccggagcggattttgccggttcagg

SEQ ID NO: 6089735 - DNA, 25 bp, Homo sapien
ggagcggattttgccggttcaggca

SEQ ID NO: 6089736 - DNA, 25 bp, Homo sapien
tggatctcgcgggatgtgatggtgg

SEQ ID NO: 6089737 - DNA, 25 bp, Homo sapien
ggatctcgcgggatgtgatggtgga

SEQ ID NO: 6089738 - DNA, 25 bp, Homo sapien
ccgtctggatctcgcgggatgtgat

SEQ ID NO: 6089739 - DNA, 25 bp, Homo sapien
ggccgtctggatctcgcgggatgtg

SEQ ID NO: 6089740 - DNA, 25 bp, Homo sapien
gccgtctggatctcgcgggatgtga

SEQ ID NO: 6089741 - DNA, 25 bp, Homo sapien
gagcggattttgccggttcaggcat

SEQ ID NO: 6089742 - DNA, 25 bp, Homo sapien
ctgaccgccaatactgacatcaaag

SEQ ID NO: 6089743 - DNA, 25 bp, Homo sapien
caggacttgaatttgccaccgccat

SEQ ID NO: 6089744 - DNA, 25 bp, Homo sapien
gccatttgtacttggaccactgttc

SEQ ID NO: 6089745 - DNA, 25 bp, Homo sapien
accgccaatactgacatcaaagaac

SEQ ID NO: 6089746 - DNA, 25 bp, Homo sapien
atctgcaaatggcccccggtaaata

SEQ ID NO: 6089747 - DNA, 25 bp, Homo sapien
tgaccgccaatactgacatcaaaga

SEQ ID NO: 6089748 - DNA, 25 bp, Homo sapien
catttgtacttggaccactgttcgc

SEQ ID NO: 6089749 - DNA, 25 bp, Homo sapien
ccatttgtacttggaccactgttcg

SEQ ID NO: 6089750 - DNA, 25 bp, Homo sapien
tgcaaatggcccccggtaaatactg

SEQ ID NO: 6089751 - DNA, 25 bp, Homo sapien
ctgcaaatggcccccggtaaatact

SEQ ID NO: 6089752 - DNA, 25 bp, Homo sapien
gaccgccaatactgacatcaaagaa

SEQ ID NO: 6089753 - DNA, 25 bp, Homo sapien
tctgcaaatggcccccggtaaatac

SEQ ID NO: 6089754 - DNA, 25 bp, Homo sapien
gacgactcgctggtgcagtttcgct

SEQ ID NO: 6089755 - DNA, 25 bp, Homo sapien
tgcagcgggtttcaaagaagtactg

SEQ ID NO: 6089756 - DNA, 25 bp, Homo sapien
tcagcgttatcagccttgcagcggg

SEQ ID NO: 6089757 - DNA, 25 bp, Homo sapien
accccgacgactcgctggtgcagtt

SEQ ID NO: 6089758 - DNA, 25 bp, Homo sapien
accttcctcagcgttatcagccttg

SEQ ID NO: 6089759 - DNA, 25 bp, Homo sapien
gacgcaggcagtgtcaattcgaatc

SEQ ID NO: 6089760 - DNA, 25 bp, Homo sapien
tgcactcagatacccagtgcctcct

SEQ ID NO: 6089761 - DNA, 25 bp, Homo sapien
tcctcagcgttatcagccttgcagc

SEQ ID NO: 6089762 - DNA, 25 bp, Homo sapien
tatcagccttgcagcgggtttcaaa

SEQ ID NO: 6089763 - DNA, 25 bp, Homo sapien
tgtcaattcgaatccatcgccagcc

SEQ ID NO: 6089764 - DNA, 25 bp, Homo sapien
cgcaggcagtgtcaattcgaatcca

SEQ ID NO: 6089765 - DNA, 25 bp, Homo sapien
ggttgggactcaattggcacactgg

SEQ ID NO: 6089766 - DNA, 25 bp, Homo sapien
cattgccgtctgcagatgtcttctg

SEQ ID NO: 6089767 - DNA, 25 bp, Homo sapien
tcgtactgggtctcgctgcaattct

SEQ ID NO: 6089768 - DNA, 25 bp, Homo sapien
ggtacgcacggaccatctcaatctt

SEQ ID NO: 6089769 - DNA, 25 bp, Homo sapien
tggccaagtggcacgcttgctctgg

SEQ ID NO: 6089770 - DNA, 25 bp, Homo sapien
ggcgtgcccccacaacgttcttgta

SEQ ID NO: 6089771 - DNA, 25 bp, Homo sapien
cggtcttggccaagtggcacgcttg

SEQ ID NO: 6089772 - DNA, 25 bp, Homo sapien
cctcgttgagggtgtcaagctcggc

SEQ ID NO: 6089773 - DNA, 25 bp, Homo sapien
tagaagacggagtagttaagagcca

SEQ ID NO: 6089774 - DNA, 25 bp, Homo sapien
cagacagaaggtttcgttcctcatt

SEQ ID NO: 6089775 - DNA, 25 bp, Homo sapien
cttttctctccggtggccacttcag

SEQ ID NO: 6089776 - DNA, 25 bp, Homo sapien
tccggtggccacttcagccaggtag

SEQ ID NO: 6089777 - DNA, 25 bp, Homo sapien
ttgtcgcggaggagctgcatgatga

SEQ ID NO: 6089778 - DNA, 25 bp, Homo sapien
taatcctccatgagatacaagggcg

SEQ ID NO: 6089779 - DNA, 25 bp, Homo sapien
caccgccagcccacgagtttattgt

SEQ ID NO: 6089780 - DNA, 25 bp, Homo sapien
tctgaagtcagtgctcggacgtagg

SEQ ID NO: 6089781 - DNA, 25 bp, Homo sapien
gacccgcggtgagttgtagcgtctc

SEQ ID NO: 6089782 - DNA, 25 bp, Homo sapien
tgttgtcgcagcagttcggtgtcca

SEQ ID NO: 6089783 - DNA, 25 bp, Homo sapien
cacaggacgtgtctatccgtatcca

SEQ ID NO: 6089784 - DNA, 25 bp, Homo sapien
aatattgtttgacgggagagttgcc

SEQ ID NO: 6089785 - DNA, 25 bp, Homo sapien
tgcaaccgtttttgaccggcctggc

SEQ ID NO: 6089786 - DNA, 25 bp, Homo sapien
tggtgtccccgaatgtcgatggccg

SEQ ID NO: 6089787 - DNA, 25 bp, Homo sapien
gtgatgttctgttcgccaccacggg

SEQ ID NO: 6089788 - DNA, 25 bp, Homo sapien
gatgacttgtcggtcacccacagac

SEQ ID NO: 6089789 - DNA, 25 bp, Homo sapien
gtgactcttatgctccgcgtaccgt

SEQ ID NO: 6089790 - DNA, 25 bp, Homo sapien
ccatttgtacttggaccactgttcg

SEQ ID NO: 6089791 - DNA, 25 bp, Homo sapien
tgaccgccaatactgacatcaaaga

SEQ ID NO: 6089792 - DNA, 25 bp, Homo sapien
atctgcaaatggcccccggtaaata

SEQ ID NO: 6089793 - DNA, 25 bp, Homo sapien
catttgtacttggaccactgttcgc

SEQ ID NO: 6089794 - DNA, 25 bp, Homo sapien
tctgcaaatggcccccggtaaatac

SEQ ID NO: 6089795 - DNA, 25 bp, Homo sapien
tgcaaatggcccccggtaaatactg

SEQ ID NO: 6089796 - DNA, 25 bp, Homo sapien
accgccaatactgacatcaaagaac

SEQ ID NO: 6089797 - DNA, 25 bp, Homo sapien
ctgcaaatggcccccggtaaatact

SEQ ID NO: 6089798 - DNA, 25 bp, Homo sapien
gaccgccaatactgacatcaaagaa

SEQ ID NO: 6089799 - DNA, 25 bp, Homo sapien
ctgaccgccaatactgacatcaaag

SEQ ID NO: 6089800 - DNA, 25 bp, Homo sapien
caggacttgaatttgccaccgccat

SEQ ID NO: 6089801 - DNA, 25 bp, Homo sapien
gccatttgtacttggaccactgttc

SEQ ID NO: 6089802 - DNA, 25 bp, Homo sapien
caggagggccaccagtaaagcaaag

SEQ ID NO: 6089803 - DNA, 25 bp, Homo sapien
gatactcaccgtctctatggcatta

SEQ ID NO: 6089804 - DNA, 25 bp, Homo sapien
gagagacgtcagtgtcatagtccaa

SEQ ID NO: 6089805 - DNA, 25 bp, Homo sapien
taagagggttgaaaatgccttccga

SEQ ID NO: 6089806 - DNA, 25 bp, Homo sapien
catgatggctggaaaacatcgcggc

SEQ ID NO: 6089807 - DNA, 25 bp, Homo sapien
gttcaaggatgaattagcccaccca

SEQ ID NO: 6089808 - DNA, 25 bp, Homo sapien
taaaccagattgcactccttggaga

SEQ ID NO: 6089809 - DNA, 25 bp, Homo sapien
catgatcaccgacagagtcttcagg

SEQ ID NO: 6089810 - DNA, 25 bp, Homo sapien
tatggcattattcgtcgcagggcaa

SEQ ID NO: 6089811 - DNA, 25 bp, Homo sapien
caaagtctgtagcatcctaagaggg

SEQ ID NO: 6089812 - DNA, 25 bp, Homo sapien
cacagcatgtgggatcaggtaaacc

SEQ ID NO: 6089813 - DNA, 25 bp, Homo sapien
gaactttccggttgagaacattcga

SEQ ID NO: 6089814 - DNA, 25 bp, Homo sapien
gacagcttctccaagggtctggcga

SEQ ID NO: 6089815 - DNA, 25 bp, Homo sapien
tccggtggccacttcagccaggtag

SEQ ID NO: 6089816 - DNA, 25 bp, Homo sapien
cattgccgtctgcagatgtcttctg

SEQ ID NO: 6089817 - DNA, 25 bp, Homo sapien
cttttctctccggtggccacttcag

SEQ ID NO: 6089818 - DNA, 25 bp, Homo sapien
ttgtcgcggaggagctgcatgatga

SEQ ID NO: 6089819 - DNA, 25 bp, Homo sapien
ggtacgcacggaccatctcaatctt

SEQ ID NO: 6089820 - DNA, 25 bp, Homo sapien
ggcgtgcccccacaacgttcttgta

SEQ ID NO: 6089821 - DNA, 25 bp, Homo sapien
tcgtactgggtctcgctgcaattct

SEQ ID NO: 6089822 - DNA, 25 bp, Homo sapien
tggccaagtggcacgcttgctctgg

SEQ ID NO: 6089823 - DNA, 25 bp, Homo sapien
gacagaaggtttcgttcctcattcg

SEQ ID NO: 6089824 - DNA, 25 bp, Homo sapien
cggtcttggccaagtggcacgcttg

SEQ ID NO: 6089825 - DNA, 25 bp, Homo sapien
tagaagacggagtagttaagagcca

SEQ ID NO: 6089826 - DNA, 25 bp, Homo sapien
cctcgttgagggtgtcaagctcggc

SEQ ID NO: 6089827 - DNA, 25 bp, Homo sapien
cattctcctgtgttattcattatga

SEQ ID NO: 6089828 - DNA, 25 bp, Homo sapien
tctccttataggtatccacatccgg

SEQ ID NO: 6089829 - DNA, 25 bp, Homo sapien
tctggcagtgtctacggacacaaca

SEQ ID NO: 6089830 - DNA, 25 bp, Homo sapien
tatgaactccgcaacaaaatatgaa

SEQ ID NO: 6089831 - DNA, 25 bp, Homo sapien
gggcaatttgctgtcgtagaagttt

SEQ ID NO: 6089832 - DNA, 25 bp, Homo sapien
tccaggttgtggtatctgtaggacg

SEQ ID NO: 6089833 - DNA, 25 bp, Homo sapien
gacgttttgcttggacctgatccag

SEQ ID NO: 6089834 - DNA, 25 bp, Homo sapien
actgcagatagtcctgagccagcct

SEQ ID NO: 6089835 - DNA, 25 bp, Homo sapien
tcttgatgagaataccttcaaatgc

SEQ ID NO: 6089836 - DNA, 25 bp, Homo sapien
tgtagcactctggacgttttgcttg

SEQ ID NO: 6089837 - DNA, 25 bp, Homo sapien
gcaaatatggttacaattcttcccc

SEQ ID NO: 6089838 - DNA, 25 bp, Homo sapien
tccaagcatgacttcagattctttt

SEQ ID NO: 6089839 - DNA, 25 bp, Homo sapien
aatgccgccagagcggccggatctt

SEQ ID NO: 6089840 - DNA, 25 bp, Homo sapien
agcctcatcgatgcggtcgcggtcg

SEQ ID NO: 6089841 - DNA, 25 bp, Homo sapien
cgagcctcatcgatgcggtcgcggt

SEQ ID NO: 6089842 - DNA, 25 bp, Homo sapien
cgcggtcggcgcagtccactacgaa

SEQ ID NO: 6089843 - DNA, 25 bp, Homo sapien
tggcgagcctcatcgatgcggtcgc

SEQ ID NO: 6089844 - DNA, 25 bp, Homo sapien
tagtaatgccgccagagcggccgga

SEQ ID NO: 6089845 - DNA, 25 bp, Homo sapien
ctggcgagcctcatcgatgcggtcg

SEQ ID NO: 6089846 - DNA, 25 bp, Homo sapien
tcgcggtcggcgcagtccactacga

SEQ ID NO: 6089847 - DNA, 25 bp, Homo sapien
taatgccgccagagcggccggatct

SEQ ID NO: 6089848 - DNA, 25 bp, Homo sapien
cagtgtagtaatgccgccagagcgg

SEQ ID NO: 6089849 - DNA, 25 bp, Homo sapien
gagcctcatcgatgcggtcgcggtc

SEQ ID NO: 6089850 - DNA, 25 bp, Homo sapien
agtaatgccgccagagcggccggat

SEQ ID NO: 6089851 - DNA, 25 bp, Homo sapien
caggtggaggccatggcaagcaagt

SEQ ID NO: 6089852 - DNA, 25 bp, Homo sapien
taggtgcccttgtgaaacacgcgcc

SEQ ID NO: 6089853 - DNA, 25 bp, Homo sapien
tggcctcatggtgccagtcttccag

SEQ ID NO: 6089854 - DNA, 25 bp, Homo sapien
tgacctgcttcatgtgcccagctcg

SEQ ID NO: 6089855 - DNA, 25 bp, Homo sapien
tacagaccaccttatccgccaggaa

SEQ ID NO: 6089856 - DNA, 25 bp, Homo sapien
caagcaagtggcacactaagaagat

SEQ ID NO: 6089857 - DNA, 25 bp, Homo sapien
gaccctttggagacttccgtatgta

SEQ ID NO: 6089858 - DNA, 25 bp, Homo sapien
gctcgcaagctgtaggtgcccttgt

SEQ ID NO: 6089859 - DNA, 25 bp, Homo sapien
catgtgcccagctcgcaagctgtag

SEQ ID NO: 6089860 - DNA, 25 bp, Homo sapien
gacttccgtatgtactgtggacagg

SEQ ID NO: 6089861 - DNA, 25 bp, Homo sapien
cggtagatgcgtgcataacagacca

SEQ ID NO: 6089862 - DNA, 25 bp, Homo sapien
tctgctggcaagtcagcaccagggc

SEQ ID NO: 6089863 - DNA, 25 bp, Homo sapien
cattctcctgtgttattcattatga

SEQ ID NO: 6089864 - DNA, 25 bp, Homo sapien
tgtagcactctggacgttttgcttg

SEQ ID NO: 6089865 - DNA, 25 bp, Homo sapien
actgcagatagtcctgagccagcct

SEQ ID NO: 6089866 - DNA, 25 bp, Homo sapien
gggcaatttgctgtcgtagaagttt

SEQ ID NO: 6089867 - DNA, 25 bp, Homo sapien
tctggcagtgtctacggacacaaca

SEQ ID NO: 6089868 - DNA, 25 bp, Homo sapien
tatgaactccgcaacaaaatatgaa

SEQ ID NO: 6089869 - DNA, 25 bp, Homo sapien
tctccttataggtatccacatccgg

SEQ ID NO: 6089870 - DNA, 25 bp, Homo sapien
tccaagcatgacttcagattctttt

SEQ ID NO: 6089871 - DNA, 25 bp, Homo sapien
gcaaatatggttacaattcttcccc

SEQ ID NO: 6089872 - DNA, 25 bp, Homo sapien
tccaggttgtggtatctgtaggacg

SEQ ID NO: 6089873 - DNA, 25 bp, Homo sapien
tcttgatgagaataccttcaaatgc

SEQ ID NO: 6089874 - DNA, 25 bp, Homo sapien
gacgttttgcttggacctgatccag

SEQ ID NO: 6089875 - DNA, 25 bp, Homo sapien
aatgccgccagagcggccggatctt

SEQ ID NO: 6089876 - DNA, 25 bp, Homo sapien
agcctcatcgatgcggtcgcggtcg

SEQ ID NO: 6089877 - DNA, 25 bp, Homo sapien
cgagcctcatcgatgcggtcgcggt

SEQ ID NO: 6089878 - DNA, 25 bp, Homo sapien
gagcctcatcgatgcggtcgcggtc

SEQ ID NO: 6089879 - DNA, 25 bp, Homo sapien
tggcgagcctcatcgatgcggtcgc

SEQ ID NO: 6089880 - DNA, 25 bp, Homo sapien
tcgcggtcggcgcagtccactacga

SEQ ID NO: 6089881 - DNA, 25 bp, Homo sapien
taatgccgccagagcggccggatct

SEQ ID NO: 6089882 - DNA, 25 bp, Homo sapien
ctggcgagcctcatcgatgcggtcg

SEQ ID NO: 6089883 - DNA, 25 bp, Homo sapien
cagtgtagtaatgccgccagagcgg

SEQ ID NO: 6089884 - DNA, 25 bp, Homo sapien
tagtaatgccgccagagcggccgga

SEQ ID NO: 6089885 - DNA, 25 bp, Homo sapien
cgcggtcggcgcagtccactacgaa

SEQ ID NO: 6089886 - DNA, 25 bp, Homo sapien
agtaatgccgccagagcggccggat

SEQ ID NO: 6089887 - DNA, 25 bp, Homo sapien
aactatataagatgcttgccaggga

SEQ ID NO: 6089888 - DNA, 25 bp, Homo sapien
ggtcaatgactgctataacttcgca

SEQ ID NO: 6089889 - DNA, 25 bp, Homo sapien
tcctaagtattcaatggttctgacg

SEQ ID NO: 6089890 - DNA, 25 bp, Homo sapien
ttaacgcagctgttggtgaatccca

SEQ ID NO: 6089891 - DNA, 25 bp, Homo sapien
attaatgacacccatccaggccaga

SEQ ID NO: 6089892 - DNA, 25 bp, Homo sapien
tctgacgtctcgaaaataaaatgtt

SEQ ID NO: 6089893 - DNA, 25 bp, Homo sapien
tcattaaggcaatcccagctgacca

SEQ ID NO: 6089894 - DNA, 25 bp, Homo sapien
gaaccctaaacacactgcggagctt

SEQ ID NO: 6089895 - DNA, 25 bp, Homo sapien
gcttttccggcaagacatactctct

SEQ ID NO: 6089896 - DNA, 25 bp, Homo sapien
taacttcgcagctattaatgacacc

SEQ ID NO: 6089897 - DNA, 25 bp, Homo sapien
aaacaggccatacaccaaacaaggg

SEQ ID NO: 6089898 - DNA, 25 bp, Homo sapien
tcaggacttggtcacgggttatcct

SEQ ID NO: 6089899 - DNA, 25 bp, Homo sapien
aactggagtccggcccgcgaagagc

SEQ ID NO: 6089900 - DNA, 25 bp, Homo sapien
ttagccttagctcgggcctttccgc

SEQ ID NO: 6089901 - DNA, 25 bp, Homo sapien
gagcaagcggtgtacgcggcccaca

SEQ ID NO: 6089902 - DNA, 25 bp, Homo sapien
acccagcaacttgtttagctcctcg

SEQ ID NO: 6089903 - DNA, 25 bp, Homo sapien
agcaagcggtgtacgcggcccacag

SEQ ID NO: 6089904 - DNA, 25 bp, Homo sapien
cagggaactggagtccggcccgcga

SEQ ID NO: 6089905 - DNA, 25 bp, Homo sapien
cgcgaagagcgggtcttagccttag

SEQ ID NO: 6089906 - DNA, 25 bp, Homo sapien
cgaagagcgggtcttagccttagct

SEQ ID NO: 6089907 - DNA, 25 bp, Homo sapien
agagcgggtcttagccttagctcgg

SEQ ID NO: 6089908 - DNA, 25 bp, Homo sapien
tcttagccttagctcgggcctttcc

SEQ ID NO: 6089909 - DNA, 25 bp, Homo sapien
tgagcaattgtgactttacccagca

SEQ ID NO: 6089910 - DNA, 25 bp, Homo sapien
cgggtcttagccttagctcgggcct

SEQ ID NO: 6089911 - DNA, 25 bp, Homo sapien
cactcgcttggcgtggatagcacac

SEQ ID NO: 6089912 - DNA, 25 bp, Homo sapien
ctggaatggtagcttgcgaatcagt

SEQ ID NO: 6089913 - DNA, 25 bp, Homo sapien
ctcgcttggcgtggatagcacacag

SEQ ID NO: 6089914 - DNA, 25 bp, Homo sapien
gatagcggcggatttcacggagggc

SEQ ID NO: 6089915 - DNA, 25 bp, Homo sapien
tggtagcttgcgaatcagtagctca

SEQ ID NO: 6089916 - DNA, 25 bp, Homo sapien
ggctttgccgccagtggacttacga

SEQ ID NO: 6089917 - DNA, 25 bp, Homo sapien
gggctttgccgccagtggacttacg

SEQ ID NO: 6089918 - DNA, 25 bp, Homo sapien
gaatggtagcttgcgaatcagtagc

SEQ ID NO: 6089919 - DNA, 25 bp, Homo sapien
gcggcggatttcacggagggcgaca

SEQ ID NO: 6089920 - DNA, 25 bp, Homo sapien
aatcagtagctcagtcgatttctga

SEQ ID NO: 6089921 - DNA, 25 bp, Homo sapien
ccaccggtggctggcgcgcttttgc

SEQ ID NO: 6089922 - DNA, 25 bp, Homo sapien
atttctgatagcggcggatttcacg

SEQ ID NO: 6089923 - DNA, 25 bp, Homo sapien
cgggtcttagccttagctcgggcct

SEQ ID NO: 6089924 - DNA, 25 bp, Homo sapien
gagcaagcggtgtacgcggcccaca

SEQ ID NO: 6089925 - DNA, 25 bp, Homo sapien
agagcgggtcttagccttagctcgg

SEQ ID NO: 6089926 - DNA, 25 bp, Homo sapien
cgaagagcgggtcttagccttagct

SEQ ID NO: 6089927 - DNA, 25 bp, Homo sapien
ttagccttagctcgggcctttccgc

SEQ ID NO: 6089928 - DNA, 25 bp, Homo sapien
agcaagcggtgtacgcggcccacag

SEQ ID NO: 6089929 - DNA, 25 bp, Homo sapien
cagggaactggagtccggcccgcga

SEQ ID NO: 6089930 - DNA, 25 bp, Homo sapien
cgcgaagagcgggtcttagccttag

SEQ ID NO: 6089931 - DNA, 25 bp, Homo sapien
aactggagtccggcccgcgaagagc

SEQ ID NO: 6089932 - DNA, 25 bp, Homo sapien
tcttagccttagctcgggcctttcc

SEQ ID NO: 6089933 - DNA, 25 bp, Homo sapien
acccagcaacttgtttagctcctcg

SEQ ID NO: 6089934 - DNA, 25 bp, Homo sapien
tgagcaattgtgactttacccagca

SEQ ID NO: 6089935 - DNA, 25 bp, Homo sapien
ctggaatggtagcttgcgaatcagt

SEQ ID NO: 6089936 - DNA, 25 bp, Homo sapien
gatagcggcggatttcacggagggc

SEQ ID NO: 6089937 - DNA, 25 bp, Homo sapien
ctcgcttggcgtggatagcacacag

SEQ ID NO: 6089938 - DNA, 25 bp, Homo sapien
tggtagcttgcgaatcagtagctca

SEQ ID NO: 6089939 - DNA, 25 bp, Homo sapien
ggctttgccgccagtggacttacga

SEQ ID NO: 6089940 - DNA, 25 bp, Homo sapien
gcggcggatttcacggagggcgaca

SEQ ID NO: 6089941 - DNA, 25 bp, Homo sapien
ccaccggtggctggcgcgcttttgc

SEQ ID NO: 6089942 - DNA, 25 bp, Homo sapien
aatcagtagctcagtcgatttctga

SEQ ID NO: 6089943 - DNA, 25 bp, Homo sapien
atttctgatagcggcggatttcacg

SEQ ID NO: 6089944 - DNA, 25 bp, Homo sapien
gggctttgccgccagtggacttacg

SEQ ID NO: 6089945 - DNA, 25 bp, Homo sapien
gaatggtagcttgcgaatcagtagc

SEQ ID NO: 6089946 - DNA, 25 bp, Homo sapien
cactcgcttggcgtggatagcacac

SEQ ID NO: 6089947 - DNA, 25 bp, Homo sapien
tcttcacgccgccagtggcaggtgc

SEQ ID NO: 6089948 - DNA, 25 bp, Homo sapien
aggtgcgctcttgcgagccaccttg

SEQ ID NO: 6089949 - DNA, 25 bp, Homo sapien
agcgatctcgcgcatcagccgctgg

SEQ ID NO: 6089950 - DNA, 25 bp, Homo sapien
ttcacgccgccagtggcaggtgcgc

SEQ ID NO: 6089951 - DNA, 25 bp, Homo sapien
gcggcgccttgccacccgttgactt

SEQ ID NO: 6089952 - DNA, 25 bp, Homo sapien
ggtgacccgtttggcatggatgaca

SEQ ID NO: 6089953 - DNA, 25 bp, Homo sapien
aaagtcctgagcgatctcgcgcatc

SEQ ID NO: 6089954 - DNA, 25 bp, Homo sapien
atggtgacccgtttggcatggatga

SEQ ID NO: 6089955 - DNA, 25 bp, Homo sapien
gcaggtgcgctcttgcgagccacct

SEQ ID NO: 6089956 - DNA, 25 bp, Homo sapien
cgccgccagtggcaggtgcgctctt

SEQ ID NO: 6089957 - DNA, 25 bp, Homo sapien
ttgccacccgttgacttgcgcgcag

SEQ ID NO: 6089958 - DNA, 25 bp, Homo sapien
agtcctgagcgatctcgcgcatcag

SEQ ID NO: 6089959 - DNA, 25 bp, Homo sapien
tggtcacgcgtttggcatgaatagc

SEQ ID NO: 6089960 - DNA, 25 bp, Homo sapien
tgtttgcgcggtgctttaccgcctg

SEQ ID NO: 6089961 - DNA, 25 bp, Homo sapien
ggccagctgtttgcgcggtgcttta

SEQ ID NO: 6089962 - DNA, 25 bp, Homo sapien
tgcgcggtgctttaccgcctgtgga

SEQ ID NO: 6089963 - DNA, 25 bp, Homo sapien
tggtgtcctcgaaaagccccaccaa

SEQ ID NO: 6089964 - DNA, 25 bp, Homo sapien
tttaccgcctgtggatttacgagcc

SEQ ID NO: 6089965 - DNA, 25 bp, Homo sapien
gcctgtggatttacgagccgtctgc

SEQ ID NO: 6089966 - DNA, 25 bp, Homo sapien
tacgagccgtctgcttagtacgcgc

SEQ ID NO: 6089967 - DNA, 25 bp, Homo sapien
gatttacgagccgtctgcttagtac

SEQ ID NO: 6089968 - DNA, 25 bp, Homo sapien
gtgctttaccgcctgtggatttacg

SEQ ID NO: 6089969 - DNA, 25 bp, Homo sapien
tcacgcgtttggcatgaatagcgca

SEQ ID NO: 6089970 - DNA, 25 bp, Homo sapien
taccgcctgtggatttacgagccgt

SEQ ID NO: 6089971 - DNA, 25 bp, Homo sapien
ccatcagctcgatgccaaagaccag

SEQ ID NO: 6089972 - DNA, 25 bp, Homo sapien
ggcacagtcgccctcttttgcgatt

SEQ ID NO: 6089973 - DNA, 25 bp, Homo sapien
tcaggggcacagtcgccctcttttg

SEQ ID NO: 6089974 - DNA, 25 bp, Homo sapien
actgatctttaccatatggtgcagg

SEQ ID NO: 6089975 - DNA, 25 bp, Homo sapien
gggcacagtcgccctcttttgcgat

SEQ ID NO: 6089976 - DNA, 25 bp, Homo sapien
catcagctcgatgccaaagaccagc

SEQ ID NO: 6089977 - DNA, 25 bp, Homo sapien
gcacagtcgccctcttttgcgatta

SEQ ID NO: 6089978 - DNA, 25 bp, Homo sapien
ctcaggggcacagtcgccctctttt

SEQ ID NO: 6089979 - DNA, 25 bp, Homo sapien
ctgatctttaccatatggtgcagga

SEQ ID NO: 6089980 - DNA, 25 bp, Homo sapien
ccacttccatcagctcgatgccaaa

SEQ ID NO: 6089981 - DNA, 25 bp, Homo sapien
tccatcagctcgatgccaaagacca

SEQ ID NO: 6089982 - DNA, 25 bp, Homo sapien
gtggccgatggggtccacttccatc

SEQ ID NO: 6089983 - DNA, 25 bp, Homo sapien
gggcaccgtagttagcctcctggca

SEQ ID NO: 6089984 - DNA, 25 bp, Homo sapien
cagaccaccagtgccgtcaccagca

SEQ ID NO: 6089985 - DNA, 25 bp, Homo sapien
gggcagctcctgaagtagcggccat

SEQ ID NO: 6089986 - DNA, 25 bp, Homo sapien
ccctgcctgagatggggcagctcct

SEQ ID NO: 6089987 - DNA, 25 bp, Homo sapien
gaggagggcaccgtagttagcctcc

SEQ ID NO: 6089988 - DNA, 25 bp, Homo sapien
agctcctgaagtagcggccatgcac

SEQ ID NO: 6089989 - DNA, 25 bp, Homo sapien
agtcacaccacagcgtctccccgac

SEQ ID NO: 6089990 - DNA, 25 bp, Homo sapien
gcaccgtagttagcctcctggcagg

SEQ ID NO: 6089991 - DNA, 25 bp, Homo sapien
accgtagttagcctcctggcaggca

SEQ ID NO: 6089992 - DNA, 25 bp, Homo sapien
agagctcccggaggagggcaccgta

SEQ ID NO: 6089993 - DNA, 25 bp, Homo sapien
gcagtggtcatgaagaggtgatggg

SEQ ID NO: 6089994 - DNA, 25 bp, Homo sapien
gagggcaccgtagttagcctcctgg

SEQ ID NO: 6089995 - DNA, 25 bp, Homo sapien
gggcaccgtagttagcctcctggca

SEQ ID NO: 6089996 - DNA, 25 bp, Homo sapien
gggcagctcctgaagtagcggccat

SEQ ID NO: 6089997 - DNA, 25 bp, Homo sapien
agctcctgaagtagcggccatgcac

SEQ ID NO: 6089998 - DNA, 25 bp, Homo sapien
gcagctcctgaagtagcggccatgc

SEQ ID NO: 6089999 - DNA, 25 bp, Homo sapien
gaggagggcaccgtagttagcctcc

SEQ ID NO: 6090000 - DNA, 25 bp, Homo sapien
agtcacaccacagcgtctccccgac

SEQ ID NO: 6090001 - DNA, 25 bp, Homo sapien
gagggcaccgtagttagcctcctgg

SEQ ID NO: 6090002 - DNA, 25 bp, Homo sapien
gcaccgtagttagcctcctggcagg

SEQ ID NO: 6090003 - DNA, 25 bp, Homo sapien
accgtagttagcctcctggcaggca

SEQ ID NO: 6090004 - DNA, 25 bp, Homo sapien
agagctcccggaggagggcaccgta

SEQ ID NO: 6090005 - DNA, 25 bp, Homo sapien
ccctgcctgagatggggcagctcct

SEQ ID NO: 6090006 - DNA, 25 bp, Homo sapien
gcagtggtcatgaagaggtgatggg

SEQ ID NO: 6090007 - DNA, 25 bp, Homo sapien
gggcactatgcttttcgagttcgaa

SEQ ID NO: 6090008 - DNA, 25 bp, Homo sapien
tgatgccagtgctccgatttgagag

SEQ ID NO: 6090009 - DNA, 25 bp, Homo sapien
gctttgatccggagcttgtgtggca

SEQ ID NO: 6090010 - DNA, 25 bp, Homo sapien
tctactttgatctgcatggctttgg

SEQ ID NO: 6090011 - DNA, 25 bp, Homo sapien
catcatcagtttccgacgttctcgg

SEQ ID NO: 6090012 - DNA, 25 bp, Homo sapien
tgttgctcgtcttctccatcagatg

SEQ ID NO: 6090013 - DNA, 25 bp, Homo sapien
ttaaccacagttgcatgcacatgct

SEQ ID NO: 6090014 - DNA, 25 bp, Homo sapien
tgaatgttagtcacttgcactgaga

SEQ ID NO: 6090015 - DNA, 25 bp, Homo sapien
tcttgagtgagacaacctctgcaga

SEQ ID NO: 6090016 - DNA, 25 bp, Homo sapien
gataagtttgctatcccctgcttca

SEQ ID NO: 6090017 - DNA, 25 bp, Homo sapien
ttcaaatacaagttctctgggtcag

SEQ ID NO: 6090018 - DNA, 25 bp, Homo sapien
tggcaaggcagaggaattcacttct

SEQ ID NO: 6090019 - DNA, 25 bp, Homo sapien
ccggatatggaagccatctttgcca

SEQ ID NO: 6090020 - DNA, 25 bp, Homo sapien
caggttcaggttcactgtgcgcccg

SEQ ID NO: 6090021 - DNA, 25 bp, Homo sapien
gtagcgcacagcgtggatctgcttg

SEQ ID NO: 6090022 - DNA, 25 bp, Homo sapien
cgctctgcgcgctgtaattgtcgaa

SEQ ID NO: 6090023 - DNA, 25 bp, Homo sapien
gcgctgtaattgtcgaacacggtgg

SEQ ID NO: 6090024 - DNA, 25 bp, Homo sapien
tgacgaaaacgttggtctgagggta

SEQ ID NO: 6090025 - DNA, 25 bp, Homo sapien
gttctcataggacggcggactggca

SEQ ID NO: 6090026 - DNA, 25 bp, Homo sapien
tacggaggcggtcatactcctcctg

SEQ ID NO: 6090027 - DNA, 25 bp, Homo sapien
ggctgagcattcgaggtagcgcaca

SEQ ID NO: 6090028 - DNA, 25 bp, Homo sapien
acttgtgccgcacgttctcatagga

SEQ ID NO: 6090029 - DNA, 25 bp, Homo sapien
gacaccatcctgttgcagggctgag

SEQ ID NO: 6090030 - DNA, 25 bp, Homo sapien
acacctctggatgccacttgtgccg

SEQ ID NO: 6090031 - DNA, 25 bp, Homo sapien
tggagaaacagatgacgaaaacgtt

SEQ ID NO: 6090032 - DNA, 25 bp, Homo sapien
tggtgttgaagcagaaacctgtccc

SEQ ID NO: 6090033 - DNA, 25 bp, Homo sapien
tcataatgcaaaagagtcagttttt

SEQ ID NO: 6090034 - DNA, 25 bp, Homo sapien
gatcataatgcaaaagagtcagttt

SEQ ID NO: 6090035 - DNA, 25 bp, Homo sapien
ggtgttgaagcagaaacctgtccca

SEQ ID NO: 6090036 - DNA, 25 bp, Homo sapien
ttggtgttgaagcagaaacctgtcc

SEQ ID NO: 6090037 - DNA, 25 bp, Homo sapien
ctggatcataatgcaaaagagtcag

SEQ ID NO: 6090038 - DNA, 25 bp, Homo sapien
acctgtcccagcttcgctcaccatt

SEQ ID NO: 6090039 - DNA, 25 bp, Homo sapien
ggatcataatgcaaaagagtcagtt

SEQ ID NO: 6090040 - DNA, 25 bp, Homo sapien
cataatgcaaaagagtcagtttttc

SEQ ID NO: 6090041 - DNA, 25 bp, Homo sapien
ataatgcaaaagagtcagtttttcc

SEQ ID NO: 6090042 - DNA, 25 bp, Homo sapien
tggatcataatgcaaaagagtcagt

SEQ ID NO: 6090043 - DNA, 25 bp, Homo sapien
actggatcataatgcaaaagagtca

SEQ ID NO: 6090044 - DNA, 25 bp, Homo sapien
aagttctctgggtaacataacatgc

SEQ ID NO: 6090045 - DNA, 25 bp, Homo sapien
ccgagtagtagatctgcttgtgggc

SEQ ID NO: 6090046 - DNA, 25 bp, Homo sapien
aaagttctctgggtaacataacatg

SEQ ID NO: 6090047 - DNA, 25 bp, Homo sapien
cgaagtacttgtccgagtagtagat

SEQ ID NO: 6090048 - DNA, 25 bp, Homo sapien
gatgagttttaggtacttgtttgga

SEQ ID NO: 6090049 - DNA, 25 bp, Homo sapien
atcagatgagttttaggtacttgtt

SEQ ID NO: 6090050 - DNA, 25 bp, Homo sapien
gttcgtcgaagtacttgtccgagta

SEQ ID NO: 6090051 - DNA, 25 bp, Homo sapien
gactctgttggacaccaagtctcct

SEQ ID NO: 6090052 - DNA, 25 bp, Homo sapien
tacttgtccgagtagtagatctgct

SEQ ID NO: 6090053 - DNA, 25 bp, Homo sapien
tgtccgagtagtagatctgcttgtg

SEQ ID NO: 6090054 - DNA, 25 bp, Homo sapien
cgtcgaagtacttgtccgagtagta

SEQ ID NO: 6090055 - DNA, 25 bp, Homo sapien
ggtactcgtagtgttcgtcgaagta

SEQ ID NO: 6090056 - DNA, 25 bp, Homo sapien
tttgctttatctcccttagcatccc

SEQ ID NO: 6090057 - DNA, 25 bp, Homo sapien
gtccttcacctttgctttatctccc

SEQ ID NO: 6090058 - DNA, 25 bp, Homo sapien
tcacctttgctttatctcccttagc

SEQ ID NO: 6090059 - DNA, 25 bp, Homo sapien
cacctttgctttatctcccttagca

SEQ ID NO: 6090060 - DNA, 25 bp, Homo sapien
ctttgctttatctcccttagcatcc

SEQ ID NO: 6090061 - DNA, 25 bp, Homo sapien
ttcacctttgctttatctcccttag

SEQ ID NO: 6090062 - DNA, 25 bp, Homo sapien
tagcagacaacctcgcggatcttct

SEQ ID NO: 6090063 - DNA, 25 bp, Homo sapien
cttcacctttgctttatctccctta

SEQ ID NO: 6090064 - DNA, 25 bp, Homo sapien
tccttcacctttgctttatctccct

SEQ ID NO: 6090065 - DNA, 25 bp, Homo sapien
ccttcacctttgctttatctccctt

SEQ ID NO: 6090066 - DNA, 25 bp, Homo sapien
ttcgtccttcacctttgctttatct

SEQ ID NO: 6090067 - DNA, 25 bp, Homo sapien
ttagcagacaacctcgcggatcttc

SEQ ID NO: 6090068 - DNA, 25 bp, Homo sapien
tccagtgtttccatgactttgtcca

SEQ ID NO: 6090069 - DNA, 25 bp, Homo sapien
tggaaaacgtcgatgagggccacca

SEQ ID NO: 6090070 - DNA, 25 bp, Homo sapien
gggaaagctcattgttgatgagctc

SEQ ID NO: 6090071 - DNA, 25 bp, Homo sapien
attgtccagtgtttccatgactttg

SEQ ID NO: 6090072 - DNA, 25 bp, Homo sapien
ccagaatattggtggaaaacgtcga

SEQ ID NO: 6090073 - DNA, 25 bp, Homo sapien
gtggaaaacgtcgatgagggccacc

SEQ ID NO: 6090074 - DNA, 25 bp, Homo sapien
ggaagtcacattcgccgtctccatc

SEQ ID NO: 6090075 - DNA, 25 bp, Homo sapien
gaaaacgtcgatgagggccaccatg

SEQ ID NO: 6090076 - DNA, 25 bp, Homo sapien
gtttccatgactttgtccacaacct

SEQ ID NO: 6090077 - DNA, 25 bp, Homo sapien
ccttccagaatattggtggaaaacg

SEQ ID NO: 6090078 - DNA, 25 bp, Homo sapien
gaatattggtggaaaacgtcgatga

SEQ ID NO: 6090079 - DNA, 25 bp, Homo sapien
ttcctggaagtcacattcgccgtct

SEQ ID NO: 6090080 - DNA, 25 bp, Homo sapien
aactgtaagaatcatggtggctcta

SEQ ID NO: 6090081 - DNA, 25 bp, Homo sapien
caccaactgtaagaatcatggtggc

SEQ ID NO: 6090082 - DNA, 25 bp, Homo sapien
actgtaagaatcatggtggctctat

SEQ ID NO: 6090083 - DNA, 25 bp, Homo sapien
caactgtaagaatcatggtggctct

SEQ ID NO: 6090084 - DNA, 25 bp, Homo sapien
cccaccctttagatacagtggaatt

SEQ ID NO: 6090085 - DNA, 25 bp, Homo sapien
ccaactgtaagaatcatggtggctc

SEQ ID NO: 6090086 - DNA, 25 bp, Homo sapien
accaactgtaagaatcatggtggct

SEQ ID NO: 6090087 - DNA, 25 bp, Homo sapien
gtggggctgtggtccataatagaca

SEQ ID NO: 6090088 - DNA, 25 bp, Homo sapien
cccccagggccgcgatggcaatgag

SEQ ID NO: 6090089 - DNA, 25 bp, Homo sapien
ccagggccgcgatggcaatgaggat

SEQ ID NO: 6090090 - DNA, 25 bp, Homo sapien
ctttctctccacgcacggtcccttg

SEQ ID NO: 6090091 - DNA, 25 bp, Homo sapien
tctccacgcacggtcccttggccga

SEQ ID NO: 6090092 - DNA, 25 bp, Homo sapien
tggggctgtggtccataatagacat

SEQ ID NO: 6090093 - DNA, 25 bp, Homo sapien
tttctctccacgcacggtcccttgg

SEQ ID NO: 6090094 - DNA, 25 bp, Homo sapien
tctctccacgcacggtcccttggcc

SEQ ID NO: 6090095 - DNA, 25 bp, Homo sapien
ttctctccacgcacggtcccttggc

SEQ ID NO: 6090096 - DNA, 25 bp, Homo sapien
cccagggccgcgatggcaatgagga

SEQ ID NO: 6090097 - DNA, 25 bp, Homo sapien
ccccagggccgcgatggcaatgagg

SEQ ID NO: 6090098 - DNA, 25 bp, Homo sapien
gcccccagggccgcgatggcaatga

SEQ ID NO: 6090099 - DNA, 25 bp, Homo sapien
ccaggtagaagtagatgaagtgttt

SEQ ID NO: 6090100 - DNA, 25 bp, Homo sapien
caggtagaagtagatgaagtgtttg

SEQ ID NO: 6090101 - DNA, 25 bp, Homo sapien
gcagggccagaagcactgtggtcaa

SEQ ID NO: 6090102 - DNA, 25 bp, Homo sapien
ttcagctcctccggcgaggcgtctt

SEQ ID NO: 6090103 - DNA, 25 bp, Homo sapien
cagggccagaagcactgtggtcaag

SEQ ID NO: 6090104 - DNA, 25 bp, Homo sapien
cagggaggcgtagtagcggttcagc

SEQ ID NO: 6090105 - DNA, 25 bp, Homo sapien
tagtggcgcagggaggcgtagtagc

SEQ ID NO: 6090106 - DNA, 25 bp, Homo sapien
ggttgaggtagtggcgcagggaggc

SEQ ID NO: 6090107 - DNA, 25 bp, Homo sapien
gcactgtggtcaaggcgggccacgg

SEQ ID NO: 6090108 - DNA, 25 bp, Homo sapien
caggttgaggtagtggcgcagggag

SEQ ID NO: 6090109 - DNA, 25 bp, Homo sapien
gcgggccacggcctgcgcacgaaca

SEQ ID NO: 6090110 - DNA, 25 bp, Homo sapien
agctcctccggcgaggcgtcttcgc

SEQ ID NO: 6090111 - DNA, 25 bp, Homo sapien
ggtagtggcgcagggaggcgtagta

SEQ ID NO: 6090112 - DNA, 25 bp, Homo sapien
cgcagggaggcgtagtagcggttca

SEQ ID NO: 6090113 - DNA, 25 bp, Homo sapien
tcatttttcaattgcggtccaaaga

SEQ ID NO: 6090114 - DNA, 25 bp, Homo sapien
ttttcaattgcggtccaaagagagg

SEQ ID NO: 6090115 - DNA, 25 bp, Homo sapien
cacgctcatcacaatgagaggcaca

SEQ ID NO: 6090116 - DNA, 25 bp, Homo sapien
agcaaactgaacaggtcaccaacat

SEQ ID NO: 6090117 - DNA, 25 bp, Homo sapien
gaacacgctcatcacaatgagaggc

SEQ ID NO: 6090118 - DNA, 25 bp, Homo sapien
gcacagtgaggccgtgatacgccat

SEQ ID NO: 6090119 - DNA, 25 bp, Homo sapien
catttttcaattgcggtccaaagag

SEQ ID NO: 6090120 - DNA, 25 bp, Homo sapien
cagaacacgctcatcacaatgagag

SEQ ID NO: 6090121 - DNA, 25 bp, Homo sapien
cccagaacacgctcatcacaatgag

SEQ ID NO: 6090122 - DNA, 25 bp, Homo sapien
agaggcacagtgaggccgtgatacg

SEQ ID NO: 6090123 - DNA, 25 bp, Homo sapien
gcaaactgaacaggtcaccaacatg

SEQ ID NO: 6090124 - DNA, 25 bp, Homo sapien
tttcaattgcggtccaaagagaggg

SEQ ID NO: 6090125 - DNA, 25 bp, Homo sapien
tgggttggtggtcacgtagaagcca

SEQ ID NO: 6090126 - DNA, 25 bp, Homo sapien
tgtgctctgctggtcagccaccttc

SEQ ID NO: 6090127 - DNA, 25 bp, Homo sapien
gggttggtggtcacgtagaagccag

SEQ ID NO: 6090128 - DNA, 25 bp, Homo sapien
ttggtggtcacgtagaagccagcca

SEQ ID NO: 6090129 - DNA, 25 bp, Homo sapien
gttggtggtcacgtagaagccagcc

SEQ ID NO: 6090130 - DNA, 25 bp, Homo sapien
gtgggttggtggtcacgtagaagcc

SEQ ID NO: 6090131 - DNA, 25 bp, Homo sapien
ggttggtggtcacgtagaagccagc

SEQ ID NO: 6090132 - DNA, 25 bp, Homo sapien
tatcgcctcctttagcggtcattgc

SEQ ID NO: 6090133 - DNA, 25 bp, Homo sapien
atatcgcctcctttagcggtcattg

SEQ ID NO: 6090134 - DNA, 25 bp, Homo sapien
gatatcgcctcctttagcggtcatt

SEQ ID NO: 6090135 - DNA, 25 bp, Homo sapien
tcgcctcctttagcggtcattgcct

SEQ ID NO: 6090136 - DNA, 25 bp, Homo sapien
agatatcgcctcctttagcggtcat

SEQ ID NO: 6090137 - DNA, 25 bp, Homo sapien
atcgcctcctttagcggtcattgcc

SEQ ID NO: 6090138 - DNA, 25 bp, Homo sapien
tctccacgcacggtcccttggccga

SEQ ID NO: 6090139 - DNA, 25 bp, Homo sapien
tctctccacgcacggtcccttggcc

SEQ ID NO: 6090140 - DNA, 25 bp, Homo sapien
ccagggccgcgatggcaatgaggat

SEQ ID NO: 6090141 - DNA, 25 bp, Homo sapien
cccagggccgcgatggcaatgagga

SEQ ID NO: 6090142 - DNA, 25 bp, Homo sapien
cccccagggccgcgatggcaatgag

SEQ ID NO: 6090143 - DNA, 25 bp, Homo sapien
ctttctctccacgcacggtcccttg

SEQ ID NO: 6090144 - DNA, 25 bp, Homo sapien
tttctctccacgcacggtcccttgg

SEQ ID NO: 6090145 - DNA, 25 bp, Homo sapien
gcccccagggccgcgatggcaatga

SEQ ID NO: 6090146 - DNA, 25 bp, Homo sapien
tggggctgtggtccataatagacat

SEQ ID NO: 6090147 - DNA, 25 bp, Homo sapien
ttctctccacgcacggtcccttggc

SEQ ID NO: 6090148 - DNA, 25 bp, Homo sapien
ccccagggccgcgatggcaatgagg

SEQ ID NO: 6090149 - DNA, 25 bp, Homo sapien
gtggggctgtggtccataatagaca

SEQ ID NO: 6090150 - DNA, 25 bp, Homo sapien
gcttcttgcccaggacttcaccaat

SEQ ID NO: 6090151 - DNA, 25 bp, Homo sapien
ggaagaggtcttcatctttctttag

SEQ ID NO: 6090152 - DNA, 25 bp, Homo sapien
tctttcagccattcccggaagaggt

SEQ ID NO: 6090153 - DNA, 25 bp, Homo sapien
agcagtcccgggactgcttggcgtt

SEQ ID NO: 6090154 - DNA, 25 bp, Homo sapien
tctcggtgcttttgggaggttgtca

SEQ ID NO: 6090155 - DNA, 25 bp, Homo sapien
caagtgtctttcagccattcccgga

SEQ ID NO: 6090156 - DNA, 25 bp, Homo sapien
ggactgcttggcgttggcgccacaa

SEQ ID NO: 6090157 - DNA, 25 bp, Homo sapien
tgggctctgccacgaagtctcggtg

SEQ ID NO: 6090158 - DNA, 25 bp, Homo sapien
gcgttggcgccacaagtgtctttca

SEQ ID NO: 6090159 - DNA, 25 bp, Homo sapien
tttctttagcaccagaaactggcca

SEQ ID NO: 6090160 - DNA, 25 bp, Homo sapien
gttggcgccacaagtgtctttcagc

SEQ ID NO: 6090161 - DNA, 25 bp, Homo sapien
tggcgttggcgccacaagtgtcttt

SEQ ID NO: 6090162 - DNA, 25 bp, Homo sapien
gctggggggcgctggttgctggtgg

SEQ ID NO: 6090163 - DNA, 25 bp, Homo sapien
ggtcaccagtttcctctcgtgcccg

SEQ ID NO: 6090164 - DNA, 25 bp, Homo sapien
gcttctctcttggtgcgacctttcc

SEQ ID NO: 6090165 - DNA, 25 bp, Homo sapien
gctggggcggttggtgttggcagca

SEQ ID NO: 6090166 - DNA, 25 bp, Homo sapien
taggaatgggccaggctatagaggt

SEQ ID NO: 6090167 - DNA, 25 bp, Homo sapien
aatgggccaggctatagaggtcaga

SEQ ID NO: 6090168 - DNA, 25 bp, Homo sapien
tctcttggtgcgacctttccggcct

SEQ ID NO: 6090169 - DNA, 25 bp, Homo sapien
gtttcctctcgtgcccgccagggct

SEQ ID NO: 6090170 - DNA, 25 bp, Homo sapien
ttctctcttggtgcgacctttccgg

SEQ ID NO: 6090171 - DNA, 25 bp, Homo sapien
tatagaggtcagattcatccaggct

SEQ ID NO: 6090172 - DNA, 25 bp, Homo sapien
cttctctcttggtgcgacctttccg

SEQ ID NO: 6090173 - DNA, 25 bp, Homo sapien
cgaggtaggaatgggccaggctata

SEQ ID NO: 6090174 - DNA, 25 bp, Homo sapien
tctgaccctcaaagagaaacctgag

SEQ ID NO: 6090175 - DNA, 25 bp, Homo sapien
aaacctgagtgaattcattggaaca

SEQ ID NO: 6090176 - DNA, 25 bp, Homo sapien
tgagtgaattcattggaacaccctg

SEQ ID NO: 6090177 - DNA, 25 bp, Homo sapien
gctatcctgtccaatgactttgagt

SEQ ID NO: 6090178 - DNA, 25 bp, Homo sapien
aacctgagtgaattcattggaacac

SEQ ID NO: 6090179 - DNA, 25 bp, Homo sapien
gaacaccctgtctttgacagtatga

SEQ ID NO: 6090180 - DNA, 25 bp, Homo sapien
ctcaaagagaaacctgagtgaattc

SEQ ID NO: 6090181 - DNA, 25 bp, Homo sapien
gtgaatctcactgctatcctgtcca

SEQ ID NO: 6090182 - DNA, 25 bp, Homo sapien
gttgaaggttttgcctcctggtcag

SEQ ID NO: 6090183 - DNA, 25 bp, Homo sapien
ccattcccagttcttttggagtatg

SEQ ID NO: 6090184 - DNA, 25 bp, Homo sapien
gagtttaatatattcaccttccttc

SEQ ID NO: 6090185 - DNA, 25 bp, Homo sapien
acctgagtgaattcattggaacacc

SEQ ID NO: 6090186 - DNA, 25 bp, Homo sapien
tctttgaactcgttgacgctgaggc

SEQ ID NO: 6090187 - DNA, 25 bp, Homo sapien
aaccagctctttgaactcgttgacg

SEQ ID NO: 6090188 - DNA, 25 bp, Homo sapien
ggtaaccagctctttgaactcgttg

SEQ ID NO: 6090189 - DNA, 25 bp, Homo sapien
tttgaactcgttgacgctgaggcta

SEQ ID NO: 6090190 - DNA, 25 bp, Homo sapien
actcgttgacgctgaggctatcctt

SEQ ID NO: 6090191 - DNA, 25 bp, Homo sapien
ccagctctttgaactcgttgacgct

SEQ ID NO: 6090192 - DNA, 25 bp, Homo sapien
ggcaactgctgggtaaccagctctt

SEQ ID NO: 6090193 - DNA, 25 bp, Homo sapien
tgaactcgttgacgctgaggctatc

SEQ ID NO: 6090194 - DNA, 25 bp, Homo sapien
tggtgaccacggtctcaatggactc

SEQ ID NO: 6090195 - DNA, 25 bp, Homo sapien
aactcgttgacgctgaggctatcct

SEQ ID NO: 6090196 - DNA, 25 bp, Homo sapien
gctctttgaactcgttgacgctgag

SEQ ID NO: 6090197 - DNA, 25 bp, Homo sapien
agctctttgaactcgttgacgctga

SEQ ID NO: 6090198 - DNA, 25 bp, Homo sapien
gcggactttaccgtgacagcggaag

SEQ ID NO: 6090199 - DNA, 25 bp, Homo sapien
tcatgcaggaaccacagtgccagat

SEQ ID NO: 6090200 - DNA, 25 bp, Homo sapien
cgtgacagcggaagtggtattgtac

SEQ ID NO: 6090201 - DNA, 25 bp, Homo sapien
cgactttcttggtacgtttggccat

SEQ ID NO: 6090202 - DNA, 25 bp, Homo sapien
acagaaagagcaagtgtacttggcg

SEQ ID NO: 6090203 - DNA, 25 bp, Homo sapien
agtggtattgtacgtccaggcaccg

SEQ ID NO: 6090204 - DNA, 25 bp, Homo sapien
cgacgatcccgactttcttggtacg

SEQ ID NO: 6090205 - DNA, 25 bp, Homo sapien
cagcggaagtggtattgtacgtcca

SEQ ID NO: 6090206 - DNA, 25 bp, Homo sapien
gtattgtacgtccaggcaccgccag

SEQ ID NO: 6090207 - DNA, 25 bp, Homo sapien
ccacagctcgtctcttcatcttggt

SEQ ID NO: 6090208 - DNA, 25 bp, Homo sapien
ggcgtgctggctgatttcaattttc

SEQ ID NO: 6090209 - DNA, 25 bp, Homo sapien
cgccagccactgtcttcatgcagga

SEQ ID NO: 6090210 - DNA, 25 bp, Homo sapien
ttcactggtactggggccggacact

SEQ ID NO: 6090211 - DNA, 25 bp, Homo sapien
actggggccggacactcaccaactg

SEQ ID NO: 6090212 - DNA, 25 bp, Homo sapien
ccggacactcaccaactgacgccat

SEQ ID NO: 6090213 - DNA, 25 bp, Homo sapien
ccttcactggtactggggccggaca

SEQ ID NO: 6090214 - DNA, 25 bp, Homo sapien
gaaaatgccactaggactgaagtcc

SEQ ID NO: 6090215 - DNA, 25 bp, Homo sapien
gtactggggccggacactcaccaac

SEQ ID NO: 6090216 - DNA, 25 bp, Homo sapien
tactggggccggacactcaccaact

SEQ ID NO: 6090217 - DNA, 25 bp, Homo sapien
gagtagctaaagagcacgtagcatg

SEQ ID NO: 6090218 - DNA, 25 bp, Homo sapien
tgcttgtaggaaaaggagtagctaa

SEQ ID NO: 6090219 - DNA, 25 bp, Homo sapien
cttcactggtactggggccggacac

SEQ ID NO: 6090220 - DNA, 25 bp, Homo sapien
gtccttcactggtactggggccgga

SEQ ID NO: 6090221 - DNA, 25 bp, Homo sapien
gggccggacactcaccaactgacgc

SEQ ID NO: 6090222 - DNA, 25 bp, Homo sapien
gctatcctgtccaatgactttgagt

SEQ ID NO: 6090223 - DNA, 25 bp, Homo sapien
aacctgagtgaattcattggaacac

SEQ ID NO: 6090224 - DNA, 25 bp, Homo sapien
gttgaaggttttgcctcctggtcag

SEQ ID NO: 6090225 - DNA, 25 bp, Homo sapien
tgagtgaattcattggaacaccctg

SEQ ID NO: 6090226 - DNA, 25 bp, Homo sapien
ccattcccagttcttttggagtatg

SEQ ID NO: 6090227 - DNA, 25 bp, Homo sapien
aaacctgagtgaattcattggaaca

SEQ ID NO: 6090228 - DNA, 25 bp, Homo sapien
acctgagtgaattcattggaacacc

SEQ ID NO: 6090229 - DNA, 25 bp, Homo sapien
ctcaaagagaaacctgagtgaattc

SEQ ID NO: 6090230 - DNA, 25 bp, Homo sapien
gaacaccctgtctttgacagtatga

SEQ ID NO: 6090231 - DNA, 25 bp, Homo sapien
gtgaatctcactgctatcctgtcca

SEQ ID NO: 6090232 - DNA, 25 bp, Homo sapien
tctgaccctcaaagagaaacctgag

SEQ ID NO: 6090233 - DNA, 25 bp, Homo sapien
gagtttaatatattcaccttccttc

SEQ ID NO: 6090234 - DNA, 25 bp, Homo sapien
cctggcgtccctgcgatggagatca

SEQ ID NO: 6090235 - DNA, 25 bp, Homo sapien
cgtgctccactaggaccttcagggt

SEQ ID NO: 6090236 - DNA, 25 bp, Homo sapien
tggcggtgctgccaaacatcatgac

SEQ ID NO: 6090237 - DNA, 25 bp, Homo sapien
gagatcagattcagctgccagaaag

SEQ ID NO: 6090238 - DNA, 25 bp, Homo sapien
cacagcagtgtgaccctcttgaact

SEQ ID NO: 6090239 - DNA, 25 bp, Homo sapien
tgccatcaggcacgttgacatcagc

SEQ ID NO: 6090240 - DNA, 25 bp, Homo sapien
cgtcatggactggactggtaccgga

SEQ ID NO: 6090241 - DNA, 25 bp, Homo sapien
gtccctgcgatggagatcagattca

SEQ ID NO: 6090242 - DNA, 25 bp, Homo sapien
tccagtgcgggctgcgtcatggact

SEQ ID NO: 6090243 - DNA, 25 bp, Homo sapien
ggcgatggcggtgctgccaaacatc

SEQ ID NO: 6090244 - DNA, 25 bp, Homo sapien
tccaggaatccagtgcgggctgcgt

SEQ ID NO: 6090245 - DNA, 25 bp, Homo sapien
tggattggaagtgccccggtgccat

SEQ ID NO: 6090246 - DNA, 25 bp, Homo sapien
tgtgaaacatgtcgatcatgcctat

SEQ ID NO: 6090247 - DNA, 25 bp, Homo sapien
gatcatgcctattatggacctctca

SEQ ID NO: 6090248 - DNA, 25 bp, Homo sapien
tgtcgatcatgcctattatggacct

SEQ ID NO: 6090249 - DNA, 25 bp, Homo sapien
tcgatcatgcctattatggacctct

SEQ ID NO: 6090250 - DNA, 25 bp, Homo sapien
aagttctccttcatcatcgtcagca

SEQ ID NO: 6090251 - DNA, 25 bp, Homo sapien
ggacctctcagcttgagtgttgctc

SEQ ID NO: 6090252 - DNA, 25 bp, Homo sapien
ggaagttctccttcatcatcgtcag

SEQ ID NO: 6090253 - DNA, 25 bp, Homo sapien
aacatgtcgatcatgcctattatgg

SEQ ID NO: 6090254 - DNA, 25 bp, Homo sapien
catgtcgatcatgcctattatggac

SEQ ID NO: 6090255 - DNA, 25 bp, Homo sapien
tcatgcctattatggacctctcagc

SEQ ID NO: 6090256 - DNA, 25 bp, Homo sapien
gtatttgtgaaacatgtcgatcatg

SEQ ID NO: 6090257 - DNA, 25 bp, Homo sapien
tttgtgaaacatgtcgatcatgcct

SEQ ID NO: 6090258 - DNA, 25 bp, Homo sapien
tgttgcaaagagactagatcactgc

SEQ ID NO: 6090259 - DNA, 25 bp, Homo sapien
tatcgacaaattccagaagcccttg

SEQ ID NO: 6090260 - DNA, 25 bp, Homo sapien
ccagaagcccttgtttgatgggcaa

SEQ ID NO: 6090261 - DNA, 25 bp, Homo sapien
tcttgggccctcctgcagtacgggc

SEQ ID NO: 6090262 - DNA, 25 bp, Homo sapien
aagactcgaggcaccgttcttgctc

SEQ ID NO: 6090263 - DNA, 25 bp, Homo sapien
gcagttccccactctgttgcaaaga

SEQ ID NO: 6090264 - DNA, 25 bp, Homo sapien
tgctcccgtgagctgttgcaaataa

SEQ ID NO: 6090265 - DNA, 25 bp, Homo sapien
tttgcagttcacaaactcttgagcc

SEQ ID NO: 6090266 - DNA, 25 bp, Homo sapien
ggttggtggctgtgatatcgacaaa

SEQ ID NO: 6090267 - DNA, 25 bp, Homo sapien
aatctcgttagtgtggttggtggct

SEQ ID NO: 6090268 - DNA, 25 bp, Homo sapien
ttaccaataaagactcgaggcaccg

SEQ ID NO: 6090269 - DNA, 25 bp, Homo sapien
cgaggcaccgttcttgctcccgtga

SEQ ID NO: 6090270 - DNA, 25 bp, Homo sapien
gcaaaaccttgcgatgacgcttagc

SEQ ID NO: 6090271 - DNA, 25 bp, Homo sapien
tatcgcgcaaaaccttgcgatgacg

SEQ ID NO: 6090272 - DNA, 25 bp, Homo sapien
ttccacctttaccacggccagacat

SEQ ID NO: 6090273 - DNA, 25 bp, Homo sapien
gccctggatgttatcgcgcaaaacc

SEQ ID NO: 6090274 - DNA, 25 bp, Homo sapien
gatgttatcgcgcaaaaccttgcga

SEQ ID NO: 6090275 - DNA, 25 bp, Homo sapien
caaggcgccggatagctggcttagt

SEQ ID NO: 6090276 - DNA, 25 bp, Homo sapien
atagataaggccagaaattcgcttg

SEQ ID NO: 6090277 - DNA, 25 bp, Homo sapien
tgtgtaagtgacagcgtcacgaatc

SEQ ID NO: 6090278 - DNA, 25 bp, Homo sapien
aaggccagaaattcgcttgacaccg

SEQ ID NO: 6090279 - DNA, 25 bp, Homo sapien
ccggatagctggcttagtgatgccc

SEQ ID NO: 6090280 - DNA, 25 bp, Homo sapien
gatagctggcttagtgatgccctgg

SEQ ID NO: 6090281 - DNA, 25 bp, Homo sapien
tctgtgtaagtgacagcgtcacgaa

SEQ ID NO: 6090282 - DNA, 25 bp, Homo sapien
gtctgcaagcactggcagcgcagtt

SEQ ID NO: 6090283 - DNA, 25 bp, Homo sapien
atgacttcggtttgggcgcagtggg

SEQ ID NO: 6090284 - DNA, 25 bp, Homo sapien
tctgcaagcactggcagcgcagttc

SEQ ID NO: 6090285 - DNA, 25 bp, Homo sapien
gcgcagtggggtccgggggacttca

SEQ ID NO: 6090286 - DNA, 25 bp, Homo sapien
ctgcaagcactggcagcgcagttca

SEQ ID NO: 6090287 - DNA, 25 bp, Homo sapien
ccggggattgctgggggcggcggag

SEQ ID NO: 6090288 - DNA, 25 bp, Homo sapien
tgcaagcactggcagcgcagttcag

SEQ ID NO: 6090289 - DNA, 25 bp, Homo sapien
caagcactggcagcgcagttcagtg

SEQ ID NO: 6090290 - DNA, 25 bp, Homo sapien
gcaggagccggggattgctgggggc

SEQ ID NO: 6090291 - DNA, 25 bp, Homo sapien
gcaagcactggcagcgcagttcagt

SEQ ID NO: 6090292 - DNA, 25 bp, Homo sapien
caggagccggggattgctgggggcg

SEQ ID NO: 6090293 - DNA, 25 bp, Homo sapien
gaggccagagatccgcttaacgccg

SEQ ID NO: 6090294 - DNA, 25 bp, Homo sapien
gtctctcaagaccttgcggtggcgc

SEQ ID NO: 6090295 - DNA, 25 bp, Homo sapien
gtgtaggtgactgcgtcccgaatca

SEQ ID NO: 6090296 - DNA, 25 bp, Homo sapien
ctagacgccgaatggcaggcttggt

SEQ ID NO: 6090297 - DNA, 25 bp, Homo sapien
taaatgaggccagagatccgcttaa

SEQ ID NO: 6090298 - DNA, 25 bp, Homo sapien
acgccgagctagacgccgaatggca

SEQ ID NO: 6090299 - DNA, 25 bp, Homo sapien
tgttgtctctcaagaccttgcggtg

SEQ ID NO: 6090300 - DNA, 25 bp, Homo sapien
gccacgccgagctagacgccgaatg

SEQ ID NO: 6090301 - DNA, 25 bp, Homo sapien
gagctagacgccgaatggcaggctt

SEQ ID NO: 6090302 - DNA, 25 bp, Homo sapien
tgctcggtgtaggtgactgcgtccc

SEQ ID NO: 6090303 - DNA, 25 bp, Homo sapien
tgaatgttgtctctcaagaccttgc

SEQ ID NO: 6090304 - DNA, 25 bp, Homo sapien
tgactgcgtcccgaatcacattctc

SEQ ID NO: 6090305 - DNA, 25 bp, Homo sapien
ttcttattggcggctgtgtaagagt

SEQ ID NO: 6090306 - DNA, 25 bp, Homo sapien
ttccttcttcttaatgccgacaaag

SEQ ID NO: 6090307 - DNA, 25 bp, Homo sapien
acacttcataataaaaatcttcttg

SEQ ID NO: 6090308 - DNA, 25 bp, Homo sapien
cggtgtggcactgggaacacttcat

SEQ ID NO: 6090309 - DNA, 25 bp, Homo sapien
tattggcggctgtgtaagagtatcc

SEQ ID NO: 6090310 - DNA, 25 bp, Homo sapien
tttcaacggtgtggcactgggaaca

SEQ ID NO: 6090311 - DNA, 25 bp, Homo sapien
ttattggcggctgtgtaagagtatc

SEQ ID NO: 6090312 - DNA, 25 bp, Homo sapien
ctgtcttccgcccaaagagaccatg

SEQ ID NO: 6090313 - DNA, 25 bp, Homo sapien
cttattggcggctgtgtaagagtat

SEQ ID NO: 6090314 - DNA, 25 bp, Homo sapien
tcttattggcggctgtgtaagagta

SEQ ID NO: 6090315 - DNA, 25 bp, Homo sapien
tcttccgcccaaagagaccatggag

SEQ ID NO: 6090316 - DNA, 25 bp, Homo sapien
acttcataataaaaatcttcttgcc

SEQ ID NO: 6090317 - DNA, 25 bp, Homo sapien
cattttcgaataccatccagccact

SEQ ID NO: 6090318 - DNA, 25 bp, Homo sapien
gaataccatccagccacttgcctga

SEQ ID NO: 6090319 - DNA, 25 bp, Homo sapien
ttttcgaataccatccagccacttg

SEQ ID NO: 6090320 - DNA, 25 bp, Homo sapien
gtaataccattttcgaataccatcc

SEQ ID NO: 6090321 - DNA, 25 bp, Homo sapien
tttcgaataccatccagccacttgc

SEQ ID NO: 6090322 - DNA, 25 bp, Homo sapien
ttgtaataccattttcgaataccat

SEQ ID NO: 6090323 - DNA, 25 bp, Homo sapien
attttcgaataccatccagccactt

SEQ ID NO: 6090324 - DNA, 25 bp, Homo sapien
cctgtcattataaaggttctcagga

SEQ ID NO: 6090325 - DNA, 25 bp, Homo sapien
tgtaataccattttcgaataccatc

SEQ ID NO: 6090326 - DNA, 25 bp, Homo sapien
catcctgtcattataaaggttctca

SEQ ID NO: 6090327 - DNA, 25 bp, Homo sapien
tcctgtcattataaaggttctcagg

SEQ ID NO: 6090328 - DNA, 25 bp, Homo sapien
acatcctgtcattataaaggttctc

SEQ ID NO: 6090329 - DNA, 25 bp, Homo sapien
agggcttgcttctggagagcctgtc

SEQ ID NO: 6090330 - DNA, 25 bp, Homo sapien
gtcccgcagacgtctggcggccgtg

SEQ ID NO: 6090331 - DNA, 25 bp, Homo sapien
ctcctggtcccgcagacgtctggcg

SEQ ID NO: 6090332 - DNA, 25 bp, Homo sapien
agcaccacgccgaagagggccagca

SEQ ID NO: 6090333 - DNA, 25 bp, Homo sapien
acgccgaagagggccagcacgctgc

SEQ ID NO: 6090334 - DNA, 25 bp, Homo sapien
gcttgcttctggagagcctgtcgct

SEQ ID NO: 6090335 - DNA, 25 bp, Homo sapien
cccgcagacgtctggcggccgtgaa

SEQ ID NO: 6090336 - DNA, 25 bp, Homo sapien
ctccatcaggccgagcaccacgccg

SEQ ID NO: 6090337 - DNA, 25 bp, Homo sapien
ccatcaggccgagcaccacgccgaa

SEQ ID NO: 6090338 - DNA, 25 bp, Homo sapien
agtctccatcaggccgagcaccacg

SEQ ID NO: 6090339 - DNA, 25 bp, Homo sapien
tcctggtcccgcagacgtctggcgg

SEQ ID NO: 6090340 - DNA, 25 bp, Homo sapien
ggcttgcttctggagagcctgtcgc

SEQ ID NO: 6090341 - DNA, 25 bp, Homo sapien
ccctggatgttatctcgcaggacct

SEQ ID NO: 6090342 - DNA, 25 bp, Homo sapien
cacagcatcacgaatcacgttttcc

SEQ ID NO: 6090343 - DNA, 25 bp, Homo sapien
ctccgtgtaagtcacagcatcacga

SEQ ID NO: 6090344 - DNA, 25 bp, Homo sapien
tatctcgcaggaccttacggtgacg

SEQ ID NO: 6090345 - DNA, 25 bp, Homo sapien
cgtgtaagtcacagcatcacgaatc

SEQ ID NO: 6090346 - DNA, 25 bp, Homo sapien
tggatgttatctcgcaggaccttac

SEQ ID NO: 6090347 - DNA, 25 bp, Homo sapien
cttacggtgacgcttagcgcctcct

SEQ ID NO: 6090348 - DNA, 25 bp, Homo sapien
tgttatctcgcaggaccttacggtg

SEQ ID NO: 6090349 - DNA, 25 bp, Homo sapien
ctggatgttatctcgcaggacctta

SEQ ID NO: 6090350 - DNA, 25 bp, Homo sapien
gcatcacgaatcacgttttccagaa

SEQ ID NO: 6090351 - DNA, 25 bp, Homo sapien
gatgttatctcgcaggaccttacgg

SEQ ID NO: 6090352 - DNA, 25 bp, Homo sapien
agtcacagcatcacgaatcacgttt

SEQ ID NO: 6090353 - DNA, 25 bp, Homo sapien
cgaatgcaaccacatcgggagcctc

SEQ ID NO: 6090354 - DNA, 25 bp, Homo sapien
gccacgaatgcaaccacatcgggag

SEQ ID NO: 6090355 - DNA, 25 bp, Homo sapien
gatcttgatctcactcgtgcactca

SEQ ID NO: 6090356 - DNA, 25 bp, Homo sapien
agagccatctccacgctcactccga

SEQ ID NO: 6090357 - DNA, 25 bp, Homo sapien
acgctcactccgagtcttttccaga

SEQ ID NO: 6090358 - DNA, 25 bp, Homo sapien
aatgcaaccacatcgggagcctcct

SEQ ID NO: 6090359 - DNA, 25 bp, Homo sapien
agccacgaatgcaaccacatcggga

SEQ ID NO: 6090360 - DNA, 25 bp, Homo sapien
gctcactccgagtcttttccagatc

SEQ ID NO: 6090361 - DNA, 25 bp, Homo sapien
cttcgatcggaggtgttccttctct

SEQ ID NO: 6090362 - DNA, 25 bp, Homo sapien
ccacgaatgcaaccacatcgggagc

SEQ ID NO: 6090363 - DNA, 25 bp, Homo sapien
gttcctcttgctgagattcaccggg

SEQ ID NO: 6090364 - DNA, 25 bp, Homo sapien
acgaatgcaaccacatcgggagcct

SEQ ID NO: 6090365 - DNA, 25 bp, Homo sapien
ttccacctttaccacggccagacat

SEQ ID NO: 6090366 - DNA, 25 bp, Homo sapien
gatagctggcttagtgatgccctgg

SEQ ID NO: 6090367 - DNA, 25 bp, Homo sapien
gccctggatgttatcgcgcaaaacc

SEQ ID NO: 6090368 - DNA, 25 bp, Homo sapien
gatgttatcgcgcaaaaccttgcga

SEQ ID NO: 6090369 - DNA, 25 bp, Homo sapien
caaggcgccggatagctggcttagt

SEQ ID NO: 6090370 - DNA, 25 bp, Homo sapien
aaggccagaaattcgcttgacaccg

SEQ ID NO: 6090371 - DNA, 25 bp, Homo sapien
gcaaaaccttgcgatgacgcttagc

SEQ ID NO: 6090372 - DNA, 25 bp, Homo sapien
atagataaggccagaaattcgcttg

SEQ ID NO: 6090373 - DNA, 25 bp, Homo sapien
ccggatagctggcttagtgatgccc

SEQ ID NO: 6090374 - DNA, 25 bp, Homo sapien
tatcgcgcaaaaccttgcgatgacg

SEQ ID NO: 6090375 - DNA, 25 bp, Homo sapien
tgtgtaagtgacagcgtcacgaatc

SEQ ID NO: 6090376 - DNA, 25 bp, Homo sapien
tctgtgtaagtgacagcgtcacgaa

SEQ ID NO: 6090377 - DNA, 25 bp, Homo sapien
ctccgtgtaagtcacagcatcacga

SEQ ID NO: 6090378 - DNA, 25 bp, Homo sapien
tatctcgcaggaccttacggtgacg

SEQ ID NO: 6090379 - DNA, 25 bp, Homo sapien
tggatgttatctcgcaggaccttac

SEQ ID NO: 6090380 - DNA, 25 bp, Homo sapien
cttacggtgacgcttagcgcctcct

SEQ ID NO: 6090381 - DNA, 25 bp, Homo sapien
tgttatctcgcaggaccttacggtg

SEQ ID NO: 6090382 - DNA, 25 bp, Homo sapien
cacagcatcacgaatcacgttttcc

SEQ ID NO: 6090383 - DNA, 25 bp, Homo sapien
cgtgtaagtcacagcatcacgaatc

SEQ ID NO: 6090384 - DNA, 25 bp, Homo sapien
gcatcacgaatcacgttttccagaa

SEQ ID NO: 6090385 - DNA, 25 bp, Homo sapien
ctggatgttatctcgcaggacctta

SEQ ID NO: 6090386 - DNA, 25 bp, Homo sapien
gatgttatctcgcaggaccttacgg

SEQ ID NO: 6090387 - DNA, 25 bp, Homo sapien
agtcacagcatcacgaatcacgttt

SEQ ID NO: 6090388 - DNA, 25 bp, Homo sapien
ccctggatgttatctcgcaggacct

SEQ ID NO: 6090389 - DNA, 25 bp, Homo sapien
agtctccatcaggccgagcaccacg

SEQ ID NO: 6090390 - DNA, 25 bp, Homo sapien
gtcccgcagacgtctggcggccgtg

SEQ ID NO: 6090391 - DNA, 25 bp, Homo sapien
ctcctggtcccgcagacgtctggcg

SEQ ID NO: 6090392 - DNA, 25 bp, Homo sapien
agcaccacgccgaagagggccagca

SEQ ID NO: 6090393 - DNA, 25 bp, Homo sapien
acgccgaagagggccagcacgctgc

SEQ ID NO: 6090394 - DNA, 25 bp, Homo sapien
agggcttgcttctggagagcctgtc

SEQ ID NO: 6090395 - DNA, 25 bp, Homo sapien
cccgcagacgtctggcggccgtgaa

SEQ ID NO: 6090396 - DNA, 25 bp, Homo sapien
gcttgcttctggagagcctgtcgct

SEQ ID NO: 6090397 - DNA, 25 bp, Homo sapien
ctccatcaggccgagcaccacgccg

SEQ ID NO: 6090398 - DNA, 25 bp, Homo sapien
ccatcaggccgagcaccacgccgaa

SEQ ID NO: 6090399 - DNA, 25 bp, Homo sapien
ggcttgcttctggagagcctgtcgc

SEQ ID NO: 6090400 - DNA, 25 bp, Homo sapien
tcctggtcccgcagacgtctggcgg

SEQ ID NO: 6090401 - DNA, 25 bp, Homo sapien
taaaccattcaggatggtggtccag

SEQ ID NO: 6090402 - DNA, 25 bp, Homo sapien
gcttgaagatggcatcacggccttc

SEQ ID NO: 6090403 - DNA, 25 bp, Homo sapien
cattcaggatggtggtccagtttct

SEQ ID NO: 6090404 - DNA, 25 bp, Homo sapien
cactcatgggtgctcagcgtgatgt

SEQ ID NO: 6090405 - DNA, 25 bp, Homo sapien
gcacactcatgggtgctcagcgtga

SEQ ID NO: 6090406 - DNA, 25 bp, Homo sapien
ggccactcttgtcatgaacccaaag

SEQ ID NO: 6090407 - DNA, 25 bp, Homo sapien
aaggccggcacactcatgggtgctc

SEQ ID NO: 6090408 - DNA, 25 bp, Homo sapien
tgttgtacacgttaaaccattcagg

SEQ ID NO: 6090409 - DNA, 25 bp, Homo sapien
tctcctcagcgctcagcctgtgtgc

SEQ ID NO: 6090410 - DNA, 25 bp, Homo sapien
ttgaagatggcatcacggccttcca

SEQ ID NO: 6090411 - DNA, 25 bp, Homo sapien
gtacacgttaaaccattcaggatgg

SEQ ID NO: 6090412 - DNA, 25 bp, Homo sapien
ctggccaggtttatgtcccgttctg

SEQ ID NO: 6090413 - DNA, 25 bp, Homo sapien
cattttcgaataccatccagccact

SEQ ID NO: 6090414 - DNA, 25 bp, Homo sapien
tttcgaataccatccagccacttgc

SEQ ID NO: 6090415 - DNA, 25 bp, Homo sapien
tcctgtcattataaaggttctcagg

SEQ ID NO: 6090416 - DNA, 25 bp, Homo sapien
gtaataccattttcgaataccatcc

SEQ ID NO: 6090417 - DNA, 25 bp, Homo sapien
cctgtcattataaaggttctcagga

SEQ ID NO: 6090418 - DNA, 25 bp, Homo sapien
ttgtaataccattttcgaataccat

SEQ ID NO: 6090419 - DNA, 25 bp, Homo sapien
ttttcgaataccatccagccacttg

SEQ ID NO: 6090420 - DNA, 25 bp, Homo sapien
gaataccatccagccacttgcctga

SEQ ID NO: 6090421 - DNA, 25 bp, Homo sapien
acatcctgtcattataaaggttctc

SEQ ID NO: 6090422 - DNA, 25 bp, Homo sapien
attttcgaataccatccagccactt

SEQ ID NO: 6090423 - DNA, 25 bp, Homo sapien
tgtaataccattttcgaataccatc

SEQ ID NO: 6090424 - DNA, 25 bp, Homo sapien
catcctgtcattataaaggttctca

SEQ ID NO: 6090425 - DNA, 25 bp, Homo sapien
catcttttaatagccagcattctct

SEQ ID NO: 6090426 - DNA, 25 bp, Homo sapien
ttcttgtactgtgtcactttatggg

SEQ ID NO: 6090427 - DNA, 25 bp, Homo sapien
acgccgctttccctgggcgtacaga

SEQ ID NO: 6090428 - DNA, 25 bp, Homo sapien
gtcataacgccgctttccctgggcg

SEQ ID NO: 6090429 - DNA, 25 bp, Homo sapien
tcaacgcactcaagccttagcacaa

SEQ ID NO: 6090430 - DNA, 25 bp, Homo sapien
gcccttcttgtactgtgtcacttta

SEQ ID NO: 6090431 - DNA, 25 bp, Homo sapien
cgccgctttccctgggcgtacagag

SEQ ID NO: 6090432 - DNA, 25 bp, Homo sapien
agatctgcagttgggctcaacgcac

SEQ ID NO: 6090433 - DNA, 25 bp, Homo sapien
tcataacgccgctttccctgggcgt

SEQ ID NO: 6090434 - DNA, 25 bp, Homo sapien
tgggctcaacgcactcaagccttag

SEQ ID NO: 6090435 - DNA, 25 bp, Homo sapien
gaaaatcggcttagtttgcccacca

SEQ ID NO: 6090436 - DNA, 25 bp, Homo sapien
taacgccgctttccctgggcgtaca

SEQ ID NO: 6090437 - DNA, 25 bp, Homo sapien
aggcctcgtttcaggtagacgggca

SEQ ID NO: 6090438 - DNA, 25 bp, Homo sapien
catgctcctgccaacttctgcgtga

SEQ ID NO: 6090439 - DNA, 25 bp, Homo sapien
gcgccatggtggtccggtaaagcat

SEQ ID NO: 6090440 - DNA, 25 bp, Homo sapien
cgtttcaggtagacgggcacaccat

SEQ ID NO: 6090441 - DNA, 25 bp, Homo sapien
ctgcgggctataggcctccgaagcc

SEQ ID NO: 6090442 - DNA, 25 bp, Homo sapien
taatcatacactgtggaatcggagg

SEQ ID NO: 6090443 - DNA, 25 bp, Homo sapien
tggtggtccggtaaagcatttggtc

SEQ ID NO: 6090444 - DNA, 25 bp, Homo sapien
gtccggtaaagcatttggtcaggca

SEQ ID NO: 6090445 - DNA, 25 bp, Homo sapien
gccaacttctgcgtgaagccactaa

SEQ ID NO: 6090446 - DNA, 25 bp, Homo sapien
cttctgcgtgaagccactaaacttg

SEQ ID NO: 6090447 - DNA, 25 bp, Homo sapien
cctcgtttcaggtagacgggcacac

SEQ ID NO: 6090448 - DNA, 25 bp, Homo sapien
gtcagcgccatggtggtccggtaaa

SEQ ID NO: 6090449 - DNA, 25 bp, Homo sapien
tgctggcaccgctccaactctattc

SEQ ID NO: 6090450 - DNA, 25 bp, Homo sapien
gttacgcataatttccgtcacctcg

SEQ ID NO: 6090451 - DNA, 25 bp, Homo sapien
ccaggttctgtgtagtcttgttgaa

SEQ ID NO: 6090452 - DNA, 25 bp, Homo sapien
cgcagatccggtaacggatgttctc

SEQ ID NO: 6090453 - DNA, 25 bp, Homo sapien
tgctgcagttcggccagcttcacac

SEQ ID NO: 6090454 - DNA, 25 bp, Homo sapien
taatttccgtcacctcgttcgcctg

SEQ ID NO: 6090455 - DNA, 25 bp, Homo sapien
tccgtggggcactactgctgtcact

SEQ ID NO: 6090456 - DNA, 25 bp, Homo sapien
gatccggtaacggatgttctcccag

SEQ ID NO: 6090457 - DNA, 25 bp, Homo sapien
caggaccttgccgaagttgttacgc

SEQ ID NO: 6090458 - DNA, 25 bp, Homo sapien
gaagttgttacgcataatttccgtc

SEQ ID NO: 6090459 - DNA, 25 bp, Homo sapien
gaccttgccgaagttgttacgcata

SEQ ID NO: 6090460 - DNA, 25 bp, Homo sapien
ctgagggagaaagacgaccagcagc

SEQ ID NO: 6090461 - DNA, 25 bp, Homo sapien
cccggtcacttatcctgtggctggg

SEQ ID NO: 6090462 - DNA, 25 bp, Homo sapien
gtgcgctcgggactcgccatccgtt

SEQ ID NO: 6090463 - DNA, 25 bp, Homo sapien
gggcctgctggatgtatcttgccag

SEQ ID NO: 6090464 - DNA, 25 bp, Homo sapien
tgcgataccctcagctgcctacggg

SEQ ID NO: 6090465 - DNA, 25 bp, Homo sapien
atccatccagcccatgtagtcccgg

SEQ ID NO: 6090466 - DNA, 25 bp, Homo sapien
tgtagtcccggtcacttatcctgtg

SEQ ID NO: 6090467 - DNA, 25 bp, Homo sapien
gcaggttcttaacgatggacattcg

SEQ ID NO: 6090468 - DNA, 25 bp, Homo sapien
agggcgcccaggtgcgctcgggact

SEQ ID NO: 6090469 - DNA, 25 bp, Homo sapien
gttctgcaggttcttaacgatggac

SEQ ID NO: 6090470 - DNA, 25 bp, Homo sapien
tgctggatgtatcttgccagcaggg

SEQ ID NO: 6090471 - DNA, 25 bp, Homo sapien
gggactcgccatccgttctctgcga

SEQ ID NO: 6090472 - DNA, 25 bp, Homo sapien
tcttaacgatggacattcgtccaga

SEQ ID NO: 6090473 - DNA, 25 bp, Homo sapien
tccacctggctcactgaaaacgaaa

SEQ ID NO: 6090474 - DNA, 25 bp, Homo sapien
ggaccttggccgtcaggtactcaat

SEQ ID NO: 6090475 - DNA, 25 bp, Homo sapien
ggtactcaataaccgcagcgaggta

SEQ ID NO: 6090476 - DNA, 25 bp, Homo sapien
gtcgtgttgaaaagggtgctcagta

SEQ ID NO: 6090477 - DNA, 25 bp, Homo sapien
cgtagtggccctcccgtagactgcg

SEQ ID NO: 6090478 - DNA, 25 bp, Homo sapien
ccgtgcgactcaggcgctgagcgta

SEQ ID NO: 6090479 - DNA, 25 bp, Homo sapien
cgaaagctccgctcggacggtgcga

SEQ ID NO: 6090480 - DNA, 25 bp, Homo sapien
tcactgaaaacgaaagctccgctcg

SEQ ID NO: 6090481 - DNA, 25 bp, Homo sapien
gaaaagggtgctcagtagcctgtcg

SEQ ID NO: 6090482 - DNA, 25 bp, Homo sapien
gatgttccgctctccgctgttctgg

SEQ ID NO: 6090483 - DNA, 25 bp, Homo sapien
ctcaggcgctgagcgtagtggccct

SEQ ID NO: 6090484 - DNA, 25 bp, Homo sapien
agtagcctgtcgttgtgaaccacca

SEQ ID NO: 6090485 - DNA, 25 bp, Homo sapien
tggctcttgcgctttgactttatct

SEQ ID NO: 6090486 - DNA, 25 bp, Homo sapien
cctttaacgggatcttgtccattga

SEQ ID NO: 6090487 - DNA, 25 bp, Homo sapien
tgtccattgaatggaacacggcctt

SEQ ID NO: 6090488 - DNA, 25 bp, Homo sapien
gcagtcagtatctttcaagcagcgg

SEQ ID NO: 6090489 - DNA, 25 bp, Homo sapien
caacatggcgcaccggatcaagata

SEQ ID NO: 6090490 - DNA, 25 bp, Homo sapien
gacagtgtcttgacctttaacagga

SEQ ID NO: 6090491 - DNA, 25 bp, Homo sapien
tctagaaccagcgtcccagcgatga

SEQ ID NO: 6090492 - DNA, 25 bp, Homo sapien
gactggacctttgactggctcttgc

SEQ ID NO: 6090493 - DNA, 25 bp, Homo sapien
agccaggcttagtggagactggacc

SEQ ID NO: 6090494 - DNA, 25 bp, Homo sapien
agcgtcccagcgatgaggaacacca

SEQ ID NO: 6090495 - DNA, 25 bp, Homo sapien
tcacagcacttcttgattcctgggc

SEQ ID NO: 6090496 - DNA, 25 bp, Homo sapien
gaacacggcctttgacagtgtcttg

SEQ ID NO: 6090497 - DNA, 25 bp, Homo sapien
cttagatttcaccttaggttcaaca

SEQ ID NO: 6090498 - DNA, 25 bp, Homo sapien
ttagatttcaccttaggttcaacat

SEQ ID NO: 6090499 - DNA, 25 bp, Homo sapien
tcaccttaggttcaacatccacaag

SEQ ID NO: 6090500 - DNA, 25 bp, Homo sapien
tactcagcgtttccagctgtacagg

SEQ ID NO: 6090501 - DNA, 25 bp, Homo sapien
cacctgtgattgttccatggacctg

SEQ ID NO: 6090502 - DNA, 25 bp, Homo sapien
catggacctgtgttccgttcttcaa

SEQ ID NO: 6090503 - DNA, 25 bp, Homo sapien
gacatccacacctgtgattgttcca

SEQ ID NO: 6090504 - DNA, 25 bp, Homo sapien
tgtacaggttctctgttcttcaggg

SEQ ID NO: 6090505 - DNA, 25 bp, Homo sapien
ccgttcttcaattcaatggttacag

SEQ ID NO: 6090506 - DNA, 25 bp, Homo sapien
tcatgctgacatccacacctgtgat

SEQ ID NO: 6090507 - DNA, 25 bp, Homo sapien
gcaacagcttcccttttcttagatt

SEQ ID NO: 6090508 - DNA, 25 bp, Homo sapien
agtgtatccagaggtaaactgtctg

SEQ ID NO: 6090509 - DNA, 25 bp, Homo sapien
tcaatggttacagtttcatgactca

SEQ ID NO: 6090510 - DNA, 25 bp, Homo sapien
aactgtctggtagaataaaataccg

SEQ ID NO: 6090511 - DNA, 25 bp, Homo sapien
gggagaattgcgacgatccaacaga

SEQ ID NO: 6090512 - DNA, 25 bp, Homo sapien
ccatgggagaattgcgacgatccaa

SEQ ID NO: 6090513 - DNA, 25 bp, Homo sapien
catgggagaattgcgacgatccaac

SEQ ID NO: 6090514 - DNA, 25 bp, Homo sapien
ggagaattgcgacgatccaacagaa

SEQ ID NO: 6090515 - DNA, 25 bp, Homo sapien
agccatgggagaattgcgacgatcc

SEQ ID NO: 6090516 - DNA, 25 bp, Homo sapien
gccatgggagaattgcgacgatcca

SEQ ID NO: 6090517 - DNA, 25 bp, Homo sapien
gccgatgtaattggcttctctcatg

SEQ ID NO: 6090518 - DNA, 25 bp, Homo sapien
tttgtctgagccgatgtaattggct

SEQ ID NO: 6090519 - DNA, 25 bp, Homo sapien
tgagccgatgtaattggcttctctc

SEQ ID NO: 6090520 - DNA, 25 bp, Homo sapien
ccccttttggcagcatcatagttcc

SEQ ID NO: 6090521 - DNA, 25 bp, Homo sapien
gaagtatttgtctgagccgatgtaa

SEQ ID NO: 6090522 - DNA, 25 bp, Homo sapien
catcaaaagcctcgccaaggaacga

SEQ ID NO: 6090523 - DNA, 25 bp, Homo sapien
ggaacgaaaagaagcttcggctgct

SEQ ID NO: 6090524 - DNA, 25 bp, Homo sapien
aggaacgaaaagaagcttcggctgc

SEQ ID NO: 6090525 - DNA, 25 bp, Homo sapien
tctgagccgatgtaattggcttctc

SEQ ID NO: 6090526 - DNA, 25 bp, Homo sapien
gagccgatgtaattggcttctctca

SEQ ID NO: 6090527 - DNA, 25 bp, Homo sapien
cgatgtaattggcttctctcatgtc

SEQ ID NO: 6090528 - DNA, 25 bp, Homo sapien
tgtctgagccgatgtaattggcttc

SEQ ID NO: 6090529 - DNA, 25 bp, Homo sapien
tgaaacgtttctgggacgatgaaaa

SEQ ID NO: 6090530 - DNA, 25 bp, Homo sapien
ttctgggacgatgaaaagggtctgt

SEQ ID NO: 6090531 - DNA, 25 bp, Homo sapien
aaagggtctgtgacttggtaggcat

SEQ ID NO: 6090532 - DNA, 25 bp, Homo sapien
cgtgatgaaacgtttctgggacgat

SEQ ID NO: 6090533 - DNA, 25 bp, Homo sapien
acgatgaaaagggtctgtgacttgg

SEQ ID NO: 6090534 - DNA, 25 bp, Homo sapien
tgatgaaacgtttctgggacgatga

SEQ ID NO: 6090535 - DNA, 25 bp, Homo sapien
gatgaaaagggtctgtgacttggta

SEQ ID NO: 6090536 - DNA, 25 bp, Homo sapien
gatgaaacgtttctgggacgatgaa

SEQ ID NO: 6090537 - DNA, 25 bp, Homo sapien
aaaagggtctgtgacttggtaggca

SEQ ID NO: 6090538 - DNA, 25 bp, Homo sapien
tttctgggacgatgaaaagggtctg

SEQ ID NO: 6090539 - DNA, 25 bp, Homo sapien
ggacgatgaaaagggtctgtgactt

SEQ ID NO: 6090540 - DNA, 25 bp, Homo sapien
cgatgaaaagggtctgtgacttggt

SEQ ID NO: 6090541 - DNA, 25 bp, Homo sapien
caaaggtcgaccaatactcatagta

SEQ ID NO: 6090542 - DNA, 25 bp, Homo sapien
tgacaggcacctctccacactaatg

SEQ ID NO: 6090543 - DNA, 25 bp, Homo sapien
cactaatggccgtcagcagatagag

SEQ ID NO: 6090544 - DNA, 25 bp, Homo sapien
acaattgtctttctggcgccgaggt

SEQ ID NO: 6090545 - DNA, 25 bp, Homo sapien
tttgaaagccctggtcagaacaact

SEQ ID NO: 6090546 - DNA, 25 bp, Homo sapien
agaccaatgccgactggtacttggg

SEQ ID NO: 6090547 - DNA, 25 bp, Homo sapien
tgtggtgtaggttcccaaaggtcga

SEQ ID NO: 6090548 - DNA, 25 bp, Homo sapien
catgacatactccatggtggtcacc

SEQ ID NO: 6090549 - DNA, 25 bp, Homo sapien
taaaggagtctcatgggcatagcga

SEQ ID NO: 6090550 - DNA, 25 bp, Homo sapien
ccgtcagcagatagaggcccgtgtt

SEQ ID NO: 6090551 - DNA, 25 bp, Homo sapien
aatgaaagggttggcgctactgttg

SEQ ID NO: 6090552 - DNA, 25 bp, Homo sapien
gaagcccacgtgttcttccggatct

SEQ ID NO: 6090553 - DNA, 25 bp, Homo sapien
gataattacggtcttgagcagcgcc

SEQ ID NO: 6090554 - DNA, 25 bp, Homo sapien
tgcccagcaggcgatgaagacgctc

SEQ ID NO: 6090555 - DNA, 25 bp, Homo sapien
gaattgtccgatttgctgcggctga

SEQ ID NO: 6090556 - DNA, 25 bp, Homo sapien
gaagacgctcaggacgataattacg

SEQ ID NO: 6090557 - DNA, 25 bp, Homo sapien
tcagagctgcggctggccttggaaa

SEQ ID NO: 6090558 - DNA, 25 bp, Homo sapien
gttccagcccatgataggcaggcca

SEQ ID NO: 6090559 - DNA, 25 bp, Homo sapien
ccaggaagtactccgctctgaagag

SEQ ID NO: 6090560 - DNA, 25 bp, Homo sapien
aatgttcttgcggaacgtcaggcgg

SEQ ID NO: 6090561 - DNA, 25 bp, Homo sapien
gacatgatccggatgaaggcccgac

SEQ ID NO: 6090562 - DNA, 25 bp, Homo sapien
gctccgagtcctgaccaaggagtag

SEQ ID NO: 6090563 - DNA, 25 bp, Homo sapien
gatgggtcgcttgaatttgccagca

SEQ ID NO: 6090564 - DNA, 25 bp, Homo sapien
gctgaattccatgccggcgatgatg

SEQ ID NO: 6090565 - DNA, 25 bp, Homo sapien
gtccacctcaatgtcggccacatag

SEQ ID NO: 6090566 - DNA, 25 bp, Homo sapien
acgggttcctgcttcatgcgggcca

SEQ ID NO: 6090567 - DNA, 25 bp, Homo sapien
tcgtaggcttggatgcgcacggcca

SEQ ID NO: 6090568 - DNA, 25 bp, Homo sapien
ctgggagccgtagcgcttctgcagc

SEQ ID NO: 6090569 - DNA, 25 bp, Homo sapien
cagctctgtgcggacatgctcgtcg

SEQ ID NO: 6090570 - DNA, 25 bp, Homo sapien
acatgagaatgacgtcggtgtccgg

SEQ ID NO: 6090571 - DNA, 25 bp, Homo sapien
tcttggcagagcactcgaggtagtc

SEQ ID NO: 6090572 - DNA, 25 bp, Homo sapien
catgctcgtcgctgcgcaggtcttt

SEQ ID NO: 6090573 - DNA, 25 bp, Homo sapien
gccacatagttctcgaagacggtgg

SEQ ID NO: 6090574 - DNA, 25 bp, Homo sapien
tcgcgcacgccttccttggtcttgg

SEQ ID NO: 6090575 - DNA, 25 bp, Homo sapien
tgtccaccgagaagcacatgagaat

SEQ ID NO: 6090576 - DNA, 25 bp, Homo sapien
gggaactcgtccttactgaacacga

SEQ ID NO: 6090577 - DNA, 25 bp, Homo sapien
tcaggcagaggttttgtcccctctg

SEQ ID NO: 6090578 - DNA, 25 bp, Homo sapien
acaacacgcctctgttgttccagct

SEQ ID NO: 6090579 - DNA, 25 bp, Homo sapien
gggtcctattcacctctgggctgtc

SEQ ID NO: 6090580 - DNA, 25 bp, Homo sapien
tgtgaccctggtccccggtgaggta

SEQ ID NO: 6090581 - DNA, 25 bp, Homo sapien
cagaggttttgtcccctctgaggct

SEQ ID NO: 6090582 - DNA, 25 bp, Homo sapien
tgcttccctcgccagcgctatcaat

SEQ ID NO: 6090583 - DNA, 25 bp, Homo sapien
ggcagaggttttgtcccctctgagg

SEQ ID NO: 6090584 - DNA, 25 bp, Homo sapien
cccggtgaggtaacaccaccactga

SEQ ID NO: 6090585 - DNA, 25 bp, Homo sapien
caacacgcctctgttgttccagctt

SEQ ID NO: 6090586 - DNA, 25 bp, Homo sapien
ggtgaggtaacaccaccactgagct

SEQ ID NO: 6090587 - DNA, 25 bp, Homo sapien
agcctgggggtcctattcacctctg

SEQ ID NO: 6090588 - DNA, 25 bp, Homo sapien
cccacctggggtgggatctcaggca

SEQ ID NO: 6090589 - DNA, 25 bp, Homo sapien
gctcctgtcgcccgaagacagggca

SEQ ID NO: 6090590 - DNA, 25 bp, Homo sapien
agcatccgcagccatcagccatgtc

SEQ ID NO: 6090591 - DNA, 25 bp, Homo sapien
tcctgtcgcccgaagacagggcaga

SEQ ID NO: 6090592 - DNA, 25 bp, Homo sapien
gcagagatcacagggtcagcttgaa

SEQ ID NO: 6090593 - DNA, 25 bp, Homo sapien
ctcctgtcgcccgaagacagggcag

SEQ ID NO: 6090594 - DNA, 25 bp, Homo sapien
tggctcctgtcgcccgaagacaggg

SEQ ID NO: 6090595 - DNA, 25 bp, Homo sapien
cctgtcgcccgaagacagggcagag

SEQ ID NO: 6090596 - DNA, 25 bp, Homo sapien
agccagcagcgactgccctgccgca

SEQ ID NO: 6090597 - DNA, 25 bp, Homo sapien
gggcagagatcacagggtcagcttg

SEQ ID NO: 6090598 - DNA, 25 bp, Homo sapien
catcagccatgtccctgattttctg

SEQ ID NO: 6090599 - DNA, 25 bp, Homo sapien
tccagcatccgcagccatcagccat

SEQ ID NO: 6090600 - DNA, 25 bp, Homo sapien
ggcagagatcacagggtcagcttga

SEQ ID NO: 6090601 - DNA, 25 bp, Homo sapien
ctgcaatccagctaggcatgggagg

SEQ ID NO: 6090602 - DNA, 25 bp, Homo sapien
aaagattctaggatactgcgagcaa

SEQ ID NO: 6090603 - DNA, 25 bp, Homo sapien
catgggagggaacaaggaaaacatg

SEQ ID NO: 6090604 - DNA, 25 bp, Homo sapien
gaaggaatgatctggtggttaagat

SEQ ID NO: 6090605 - DNA, 25 bp, Homo sapien
attctaggatactgcgagcaaatgg

SEQ ID NO: 6090606 - DNA, 25 bp, Homo sapien
tcaaacttattcgagttgtccacag

SEQ ID NO: 6090607 - DNA, 25 bp, Homo sapien
tttcactttgccaaacaccacatgc

SEQ ID NO: 6090608 - DNA, 25 bp, Homo sapien
tgcagcgagagcacaaagattctag

SEQ ID NO: 6090609 - DNA, 25 bp, Homo sapien
ttctaggatactgcgagcaaatggg

SEQ ID NO: 6090610 - DNA, 25 bp, Homo sapien
atccagctaggcatgggagggaaca

SEQ ID NO: 6090611 - DNA, 25 bp, Homo sapien
tccagctaggcatgggagggaacaa

SEQ ID NO: 6090612 - DNA, 25 bp, Homo sapien
cagaaggaatgatctggtggttaag

SEQ ID NO: 6090613 - DNA, 25 bp, Homo sapien
ttctgcagtgatgacgcgtccgcac

SEQ ID NO: 6090614 - DNA, 25 bp, Homo sapien
ttgactgagtacttcccaccatagg

SEQ ID NO: 6090615 - DNA, 25 bp, Homo sapien
cataggcagtgggatacgcatgctg

SEQ ID NO: 6090616 - DNA, 25 bp, Homo sapien
gatacgcatgctggttgtaattgta

SEQ ID NO: 6090617 - DNA, 25 bp, Homo sapien
cagtgggatacgcatgctggttgta

SEQ ID NO: 6090618 - DNA, 25 bp, Homo sapien
cacgtttctgcagtgatgacgcgtc

SEQ ID NO: 6090619 - DNA, 25 bp, Homo sapien
ggtcttgactgagtacttcccacca

SEQ ID NO: 6090620 - DNA, 25 bp, Homo sapien
cccaccataggcagtgggatacgca

SEQ ID NO: 6090621 - DNA, 25 bp, Homo sapien
gactgagtacttcccaccataggca

SEQ ID NO: 6090622 - DNA, 25 bp, Homo sapien
caccataggcagtgggatacgcatg

SEQ ID NO: 6090623 - DNA, 25 bp, Homo sapien
tgagtacttcccaccataggcagtg

SEQ ID NO: 6090624 - DNA, 25 bp, Homo sapien
gtttctgcagtgatgacgcgtccgc

SEQ ID NO: 6090625 - DNA, 25 bp, Homo sapien
gttctgatcggctctgcctgcacgt

SEQ ID NO: 6090626 - DNA, 25 bp, Homo sapien
gtagttctgatcggctctgcctgca

SEQ ID NO: 6090627 - DNA, 25 bp, Homo sapien
ttctgatcggctctgcctgcacgtt

SEQ ID NO: 6090628 - DNA, 25 bp, Homo sapien
ttgtagttctgatcggctctgcctg

SEQ ID NO: 6090629 - DNA, 25 bp, Homo sapien
tagttctgatcggctctgcctgcac

SEQ ID NO: 6090630 - DNA, 25 bp, Homo sapien
agttctgatcggctctgcctgcacg

SEQ ID NO: 6090631 - DNA, 25 bp, Homo sapien
tgtagttctgatcggctctgcctgc

SEQ ID NO: 6090632 - DNA, 25 bp, Homo sapien
catcagctcgatgccaaagaccagc

SEQ ID NO: 6090633 - DNA, 25 bp, Homo sapien
gcacagtcgccctcttttgcgatta

SEQ ID NO: 6090634 - DNA, 25 bp, Homo sapien
ggcacagtcgccctcttttgcgatt

SEQ ID NO: 6090635 - DNA, 25 bp, Homo sapien
gggcacagtcgccctcttttgcgat

SEQ ID NO: 6090636 - DNA, 25 bp, Homo sapien
ctcaggggcacagtcgccctctttt

SEQ ID NO: 6090637 - DNA, 25 bp, Homo sapien
ctgatctttaccatatggtgcagga

SEQ ID NO: 6090638 - DNA, 25 bp, Homo sapien
ccacttccatcagctcgatgccaaa

SEQ ID NO: 6090639 - DNA, 25 bp, Homo sapien
tcaggggcacagtcgccctcttttg

SEQ ID NO: 6090640 - DNA, 25 bp, Homo sapien
gtggccgatggggtccacttccatc

SEQ ID NO: 6090641 - DNA, 25 bp, Homo sapien
ccatcagctcgatgccaaagaccag

SEQ ID NO: 6090642 - DNA, 25 bp, Homo sapien
tccatcagctcgatgccaaagacca

SEQ ID NO: 6090643 - DNA, 25 bp, Homo sapien
actgatctttaccatatggtgcagg

SEQ ID NO: 6090644 - DNA, 25 bp, Homo sapien
gaagactagaaagcctcccctctac

SEQ ID NO: 6090645 - DNA, 25 bp, Homo sapien
tgtgcgcatatgacagcatggtggc

SEQ ID NO: 6090646 - DNA, 25 bp, Homo sapien
gacagccagggtgatgtgcgcatat

SEQ ID NO: 6090647 - DNA, 25 bp, Homo sapien
tatagaagacggtgaccacggtgag

SEQ ID NO: 6090648 - DNA, 25 bp, Homo sapien
gcttgttggagctccgggaatcaat

SEQ ID NO: 6090649 - DNA, 25 bp, Homo sapien
cagaacgtgacgctggagataaaac

SEQ ID NO: 6090650 - DNA, 25 bp, Homo sapien
tcaagacgttggagccacagaacgt

SEQ ID NO: 6090651 - DNA, 25 bp, Homo sapien
agaagtggttcaagacgttggagcc

SEQ ID NO: 6090652 - DNA, 25 bp, Homo sapien
caaaacagagatgagcttgttggag

SEQ ID NO: 6090653 - DNA, 25 bp, Homo sapien
cgcagctcgtcaagccgaaggcttt

SEQ ID NO: 6090654 - DNA, 25 bp, Homo sapien
taaaacagaccttgatcatggagat

SEQ ID NO: 6090655 - DNA, 25 bp, Homo sapien
caaggctgtatagaagacggtgacc

SEQ ID NO: 6090656 - DNA, 25 bp, Homo sapien
cctcagtatgaaggtggtgtctacc

SEQ ID NO: 6090657 - DNA, 25 bp, Homo sapien
ccaggtcatgatgttagggtaacgc

SEQ ID NO: 6090658 - DNA, 25 bp, Homo sapien
tgaccacagttactatgatacggcc

SEQ ID NO: 6090659 - DNA, 25 bp, Homo sapien
tactgcctcggtagggtagcctcag

SEQ ID NO: 6090660 - DNA, 25 bp, Homo sapien
aatgagcaatgctgttactgcctcg

SEQ ID NO: 6090661 - DNA, 25 bp, Homo sapien
ttgagactccccacagttgacttca

SEQ ID NO: 6090662 - DNA, 25 bp, Homo sapien
agaagggcgcactgggtacacccaa

SEQ ID NO: 6090663 - DNA, 25 bp, Homo sapien
catgtaagtgataattgctgatcca

SEQ ID NO: 6090664 - DNA, 25 bp, Homo sapien
tctctgatgcatgggtgtctgtgga

SEQ ID NO: 6090665 - DNA, 25 bp, Homo sapien
tacggccataggataccagaatcag

SEQ ID NO: 6090666 - DNA, 25 bp, Homo sapien
taggacatcactgcaagaagggcgc

SEQ ID NO: 6090667 - DNA, 25 bp, Homo sapien
gaaaaacaggtatgaggagaatcac

SEQ ID NO: 6090668 - DNA, 25 bp, Homo sapien
acttgagaagagctggtacttcgca

SEQ ID NO: 6090669 - DNA, 25 bp, Homo sapien
tggtacttcgcaaataaaatggtcc

SEQ ID NO: 6090670 - DNA, 25 bp, Homo sapien
gattagggaactagccaaaccactg

SEQ ID NO: 6090671 - DNA, 25 bp, Homo sapien
gacagcaatgtaccgatccaaggcc

SEQ ID NO: 6090672 - DNA, 25 bp, Homo sapien
caggtacacgtagattatggtgcca

SEQ ID NO: 6090673 - DNA, 25 bp, Homo sapien
ggtccagcctatggttgccacagag

SEQ ID NO: 6090674 - DNA, 25 bp, Homo sapien
caagaggatacattcagtggagccc

SEQ ID NO: 6090675 - DNA, 25 bp, Homo sapien
gatagatgccagctgttggcaaagc

SEQ ID NO: 6090676 - DNA, 25 bp, Homo sapien
gatccaaggccatgtcagccaagag

SEQ ID NO: 6090677 - DNA, 25 bp, Homo sapien
tggtggaatgacaacaaacagaaca

SEQ ID NO: 6090678 - DNA, 25 bp, Homo sapien
tcaccatggtgtagaagagggagat

SEQ ID NO: 6090679 - DNA, 25 bp, Homo sapien
gccttgcctctactgatttgatcct

SEQ ID NO: 6090680 - DNA, 25 bp, Homo sapien
gatagctttactacagacatgtggt

SEQ ID NO: 6090681 - DNA, 25 bp, Homo sapien
gatgatgatggcagatatatgggca

SEQ ID NO: 6090682 - DNA, 25 bp, Homo sapien
acatgtggtcgcagtacgtatggga

SEQ ID NO: 6090683 - DNA, 25 bp, Homo sapien
ggtgagtgtggtagcataacgcaaa

SEQ ID NO: 6090684 - DNA, 25 bp, Homo sapien
gatcgctgccttgaggatcaaagtg

SEQ ID NO: 6090685 - DNA, 25 bp, Homo sapien
gagcaaccattagaccatagattac

SEQ ID NO: 6090686 - DNA, 25 bp, Homo sapien
tgaagaatgctggaacataggtgat

SEQ ID NO: 6090687 - DNA, 25 bp, Homo sapien
caatacacccctcaggaaggtggca

SEQ ID NO: 6090688 - DNA, 25 bp, Homo sapien
ggcaaacgcttaaccaagaatggga

SEQ ID NO: 6090689 - DNA, 25 bp, Homo sapien
taacgcaaagggtagcaaatggcta

SEQ ID NO: 6090690 - DNA, 25 bp, Homo sapien
aaggtggcaagctcagccttggcaa

SEQ ID NO: 6090691 - DNA, 25 bp, Homo sapien
ggaaaggaatcatcagcaatacacc

SEQ ID NO: 6090692 - DNA, 25 bp, Homo sapien
aaagatgaccatctcgttggctgag

SEQ ID NO: 6090693 - DNA, 25 bp, Homo sapien
aagatgaccatctcgttggctgagg

SEQ ID NO: 6090694 - DNA, 25 bp, Homo sapien
tgaccatctcgttggctgaggtgtc

SEQ ID NO: 6090695 - DNA, 25 bp, Homo sapien
agatgaccatctcgttggctgaggt

SEQ ID NO: 6090696 - DNA, 25 bp, Homo sapien
caaagatgaccatctcgttggctga

SEQ ID NO: 6090697 - DNA, 25 bp, Homo sapien
acaaagatgaccatctcgttggctg

SEQ ID NO: 6090698 - DNA, 25 bp, Homo sapien
gaccatctcgttggctgaggtgtct

SEQ ID NO: 6090699 - DNA, 25 bp, Homo sapien
atgaccatctcgttggctgaggtgt

SEQ ID NO: 6090700 - DNA, 25 bp, Homo sapien
gatgaccatctcgttggctgaggtg

SEQ ID NO: 6090701 - DNA, 25 bp, Homo sapien
tagcaccatcaacgtgtgcagcaga

SEQ ID NO: 6090702 - DNA, 25 bp, Homo sapien
aacaggcgagcttgagaatatgagc

SEQ ID NO: 6090703 - DNA, 25 bp, Homo sapien
ttcatgacagaggagacaattcgtg

SEQ ID NO: 6090704 - DNA, 25 bp, Homo sapien
cataggccatcatgaccagaattcc

SEQ ID NO: 6090705 - DNA, 25 bp, Homo sapien
aatgtgacccgcagatggaaaaagc

SEQ ID NO: 6090706 - DNA, 25 bp, Homo sapien
caggacactaacgatgaaggacagc

SEQ ID NO: 6090707 - DNA, 25 bp, Homo sapien
caacacctaacaggctggtcaccaa

SEQ ID NO: 6090708 - DNA, 25 bp, Homo sapien
ccagctgatggaattttcatgacag

SEQ ID NO: 6090709 - DNA, 25 bp, Homo sapien
tgggtagccccagaactaaggtaca

SEQ ID NO: 6090710 - DNA, 25 bp, Homo sapien
gaccacggtatacatcactgatgct

SEQ ID NO: 6090711 - DNA, 25 bp, Homo sapien
ttccaggtctatgcagaaggtcagc

SEQ ID NO: 6090712 - DNA, 25 bp, Homo sapien
gaaacaacgattaaatgtgacccgc

SEQ ID NO: 6090713 - DNA, 25 bp, Homo sapien
gacgggattctcaaaatggtcctga

SEQ ID NO: 6090714 - DNA, 25 bp, Homo sapien
ggcacacagcacaagtagagtgcag

SEQ ID NO: 6090715 - DNA, 25 bp, Homo sapien
cagatgtattgagaatagctattcc

SEQ ID NO: 6090716 - DNA, 25 bp, Homo sapien
cagcaaagtaaccaaagcaaagtaa

SEQ ID NO: 6090717 - DNA, 25 bp, Homo sapien
tctttgactggcagacgggattctc

SEQ ID NO: 6090718 - DNA, 25 bp, Homo sapien
aaccaattacttctaggagccatgt

SEQ ID NO: 6090719 - DNA, 25 bp, Homo sapien
caatgacgttggaagcacagtaatc

SEQ ID NO: 6090720 - DNA, 25 bp, Homo sapien
gagtttcctgttcatgatggatgtg

SEQ ID NO: 6090721 - DNA, 25 bp, Homo sapien
cacatgcaaagtgatcaatgacgtt

SEQ ID NO: 6090722 - DNA, 25 bp, Homo sapien
gcagatggattagcatacatgaata

SEQ ID NO: 6090723 - DNA, 25 bp, Homo sapien
tggtcctgataatgtacatgtaaga

SEQ ID NO: 6090724 - DNA, 25 bp, Homo sapien
taggagccatgtatctgaacaagat

SEQ ID NO: 6090725 - DNA, 25 bp, Homo sapien
aggttgttctattaacatctgggag

SEQ ID NO: 6090726 - DNA, 25 bp, Homo sapien
ggttgttctattaacatctgggaga

SEQ ID NO: 6090727 - DNA, 25 bp, Homo sapien
tgttctattaacatctgggagaaga

SEQ ID NO: 6090728 - DNA, 25 bp, Homo sapien
ttgttctattaacatctgggagaag

SEQ ID NO: 6090729 - DNA, 25 bp, Homo sapien
gttgttctattaacatctgggagaa

SEQ ID NO: 6090730 - DNA, 25 bp, Homo sapien
aaatggctcagggttgtattaagga

SEQ ID NO: 6090731 - DNA, 25 bp, Homo sapien
atggctcagggttgtattaaggaaa

SEQ ID NO: 6090732 - DNA, 25 bp, Homo sapien
aatggctcagggttgtattaaggaa

SEQ ID NO: 6090733 - DNA, 25 bp, Homo sapien
agagctgtccccacatcagacacag

SEQ ID NO: 6090734 - DNA, 25 bp, Homo sapien
atggctcagggttgtattaaggaaa

SEQ ID NO: 6090735 - DNA, 25 bp, Homo sapien
tatgaaaagaaatgcagcaaatggc

SEQ ID NO: 6090736 - DNA, 25 bp, Homo sapien
ttaacatctgggagaagagctgtcc

SEQ ID NO: 6090737 - DNA, 25 bp, Homo sapien
gaaatgcagcaaatggctcagggtt

SEQ ID NO: 6090738 - DNA, 25 bp, Homo sapien
acagcagctgcacgcccctttgcag

SEQ ID NO: 6090739 - DNA, 25 bp, Homo sapien
aatggctcagggttgtattaaggaa

SEQ ID NO: 6090740 - DNA, 25 bp, Homo sapien
ggtccatttcaagccgcggtaaggc

SEQ ID NO: 6090741 - DNA, 25 bp, Homo sapien
ggagaagagctgtccccacatcaga

SEQ ID NO: 6090742 - DNA, 25 bp, Homo sapien
aaatggctcagggttgtattaagga

SEQ ID NO: 6090743 - DNA, 25 bp, Homo sapien
ggttgttctattaacatctgggaga

SEQ ID NO: 6090744 - DNA, 25 bp, Homo sapien
aaaccaggttgtgcaggttgttcta

SEQ ID NO: 6090745 - DNA, 25 bp, Homo sapien
gcatccaaaatagaaggagactctg

SEQ ID NO: 6090746 - DNA, 25 bp, Homo sapien
acagaagaactgatggaccatgttg

SEQ ID NO: 6090747 - DNA, 25 bp, Homo sapien
ggaaagaaataacacaaccagcaag

SEQ ID NO: 6090748 - DNA, 25 bp, Homo sapien
tcttgactgtagagaagacgtggac

SEQ ID NO: 6090749 - DNA, 25 bp, Homo sapien
cgtggacataggtaatgatgatgac

SEQ ID NO: 6090750 - DNA, 25 bp, Homo sapien
cacagtaggataaggagaaggtgcc

SEQ ID NO: 6090751 - DNA, 25 bp, Homo sapien
ccaagacacagtggctctttggaca

SEQ ID NO: 6090752 - DNA, 25 bp, Homo sapien
ggaccatgttggacccacagtagga

SEQ ID NO: 6090753 - DNA, 25 bp, Homo sapien
tgaagctggcttcagataagcaatg

SEQ ID NO: 6090754 - DNA, 25 bp, Homo sapien
tatagcagtatagcggtcaaaggac

SEQ ID NO: 6090755 - DNA, 25 bp, Homo sapien
caaaggacatcaccgtgaggaggag

SEQ ID NO: 6090756 - DNA, 25 bp, Homo sapien
tgtggaaggcaaatagagtaggctt

SEQ ID NO: 6090757 - DNA, 25 bp, Homo sapien
gatatcactccagcatgctcatctg

SEQ ID NO: 6090758 - DNA, 25 bp, Homo sapien
tgggctagaacagatatcactccag

SEQ ID NO: 6090759 - DNA, 25 bp, Homo sapien
gcacaggactccaacaatggaggga

SEQ ID NO: 6090760 - DNA, 25 bp, Homo sapien
ggctagaacagatatcactccagca

SEQ ID NO: 6090761 - DNA, 25 bp, Homo sapien
gtgcacaggactccaacaatggagg

SEQ ID NO: 6090762 - DNA, 25 bp, Homo sapien
gggctagaacagatatcactccagc

SEQ ID NO: 6090763 - DNA, 25 bp, Homo sapien
caggactccaacaatggagggattc

SEQ ID NO: 6090764 - DNA, 25 bp, Homo sapien
gaacagatatcactccagcatgctc

SEQ ID NO: 6090765 - DNA, 25 bp, Homo sapien
ctagaacagatatcactccagcatg

SEQ ID NO: 6090766 - DNA, 25 bp, Homo sapien
acagatatcactccagcatgctcat

SEQ ID NO: 6090767 - DNA, 25 bp, Homo sapien
cacaggactccaacaatggagggat

SEQ ID NO: 6090768 - DNA, 25 bp, Homo sapien
tagaacagatatcactccagcatgc

SEQ ID NO: 6090769 - DNA, 25 bp, Homo sapien
cagggactccggatccgagtgcgcc

SEQ ID NO: 6090770 - DNA, 25 bp, Homo sapien
cagcaatttgcggagctcggcgaag

SEQ ID NO: 6090771 - DNA, 25 bp, Homo sapien
ggcgcttctcctcgcggctcagctg

SEQ ID NO: 6090772 - DNA, 25 bp, Homo sapien
cttggtgtccgtgccgcccagggac

SEQ ID NO: 6090773 - DNA, 25 bp, Homo sapien
cgcccagggactccggatccgagtg

SEQ ID NO: 6090774 - DNA, 25 bp, Homo sapien
gacacgctgccgagcaccttggtgt

SEQ ID NO: 6090775 - DNA, 25 bp, Homo sapien
ttccacgcggatgcgctcgcgggtg

SEQ ID NO: 6090776 - DNA, 25 bp, Homo sapien
caatttgcggagctcggcgaaggcc

SEQ ID NO: 6090777 - DNA, 25 bp, Homo sapien
gaatctgctgcttggtccggactca

SEQ ID NO: 6090778 - DNA, 25 bp, Homo sapien
ctgggatggtccgaatctgctgctt

SEQ ID NO: 6090779 - DNA, 25 bp, Homo sapien
cgccgagctgggatggtccgaatct

SEQ ID NO: 6090780 - DNA, 25 bp, Homo sapien
gatggtccgaatctgctgcttggtc

SEQ ID NO: 6090781 - DNA, 25 bp, Homo sapien
tgtgaccctgaagactcggatgtgg

SEQ ID NO: 6090782 - DNA, 25 bp, Homo sapien
tatatggcaatagttacagaccgca

SEQ ID NO: 6090783 - DNA, 25 bp, Homo sapien
tgtagatctcagagcacgcgttctg

SEQ ID NO: 6090784 - DNA, 25 bp, Homo sapien
ccacggtggaggtattggcagccac

SEQ ID NO: 6090785 - DNA, 25 bp, Homo sapien
cgaggtccagtactcagcatgcgaa

SEQ ID NO: 6090786 - DNA, 25 bp, Homo sapien
ggaacaggccttttcttacatggct

SEQ ID NO: 6090787 - DNA, 25 bp, Homo sapien
ttacatggctctggtccgaggtcca

SEQ ID NO: 6090788 - DNA, 25 bp, Homo sapien
tgttgcggatccgagtcagtggctc

SEQ ID NO: 6090789 - DNA, 25 bp, Homo sapien
tcaatgcagagtcctttgggcttcc

SEQ ID NO: 6090790 - DNA, 25 bp, Homo sapien
gctgggccttaaagtccgtcttcat

SEQ ID NO: 6090791 - DNA, 25 bp, Homo sapien
catgcgaagagccatatcacggagg

SEQ ID NO: 6090792 - DNA, 25 bp, Homo sapien
tcagtggctcccgtgtgtcggtctc

SEQ ID NO: 6090793 - DNA, 25 bp, Homo sapien
ggagccatttggacgttcacagatc

SEQ ID NO: 6090794 - DNA, 25 bp, Homo sapien
atttggacgttcacagatctccttg

SEQ ID NO: 6090795 - DNA, 25 bp, Homo sapien
agccatttggacgttcacagatctc

SEQ ID NO: 6090796 - DNA, 25 bp, Homo sapien
gccatttggacgttcacagatctcc

SEQ ID NO: 6090797 - DNA, 25 bp, Homo sapien
gacaggagccatttggacgttcaca

SEQ ID NO: 6090798 - DNA, 25 bp, Homo sapien
tttggacgttcacagatctccttga

SEQ ID NO: 6090799 - DNA, 25 bp, Homo sapien
caggagccatttggacgttcacaga

SEQ ID NO: 6090800 - DNA, 25 bp, Homo sapien
catttggacgttcacagatctcctt

SEQ ID NO: 6090801 - DNA, 25 bp, Homo sapien
tggacgttcacagatctccttgaat

SEQ ID NO: 6090802 - DNA, 25 bp, Homo sapien
cgacaggagccatttggacgttcac

SEQ ID NO: 6090803 - DNA, 25 bp, Homo sapien
gagccatttggacgttcacagatct

SEQ ID NO: 6090804 - DNA, 25 bp, Homo sapien
acaggagccatttggacgttcacag

SEQ ID NO: 6090805 - DNA, 25 bp, Homo sapien
ctgcacatttcaacacggatatatt

SEQ ID NO: 6090806 - DNA, 25 bp, Homo sapien
taagactgccctactgttctacagt

SEQ ID NO: 6090807 - DNA, 25 bp, Homo sapien
tattactaagactcttaagactgcc

SEQ ID NO: 6090808 - DNA, 25 bp, Homo sapien
ggtaaaaataacctagaactgcaca

SEQ ID NO: 6090809 - DNA, 25 bp, Homo sapien
ttctacagtagtaaaagcatggtct

SEQ ID NO: 6090810 - DNA, 25 bp, Homo sapien
ttcaacacggatatatttcaagagc

SEQ ID NO: 6090811 - DNA, 25 bp, Homo sapien
ccagcgcattttgtatacttgatat

SEQ ID NO: 6090812 - DNA, 25 bp, Homo sapien
gggacataaggattttagatgcact

SEQ ID NO: 6090813 - DNA, 25 bp, Homo sapien
cacttgaataagtggtgtggtcacc

SEQ ID NO: 6090814 - DNA, 25 bp, Homo sapien
ggtgtggtcaccagcgcattttgta

SEQ ID NO: 6090815 - DNA, 25 bp, Homo sapien
aaagggagggctgtgctactgagaa

SEQ ID NO: 6090816 - DNA, 25 bp, Homo sapien
tcatgacgattaaaatagattaggg

SEQ ID NO: 6090817 - DNA, 25 bp, Homo sapien
ccagcaacagcattgtcttccggag

SEQ ID NO: 6090818 - DNA, 25 bp, Homo sapien
tgggacagtcccagagacaggacca

SEQ ID NO: 6090819 - DNA, 25 bp, Homo sapien
aagctttggggcccctggaaggcag

SEQ ID NO: 6090820 - DNA, 25 bp, Homo sapien
ctggagggaatcgaggaaggtgtca

SEQ ID NO: 6090821 - DNA, 25 bp, Homo sapien
cgccagcggacaaaggcctccacca

SEQ ID NO: 6090822 - DNA, 25 bp, Homo sapien
cccagctccagacgcagggagcgga

SEQ ID NO: 6090823 - DNA, 25 bp, Homo sapien
ttgtcttccggaggcctgtggtttg

SEQ ID NO: 6090824 - DNA, 25 bp, Homo sapien
cgcagggagcggagtacctgcttgt

SEQ ID NO: 6090825 - DNA, 25 bp, Homo sapien
acgctggcgccagcggacaaaggcc

SEQ ID NO: 6090826 - DNA, 25 bp, Homo sapien
tgacttcctctctcgccttctccag

SEQ ID NO: 6090827 - DNA, 25 bp, Homo sapien
tagatgtcggtctgggacagtccca

SEQ ID NO: 6090828 - DNA, 25 bp, Homo sapien
tgtgaggggattccggccatccagt

SEQ ID NO: 6090829 - DNA, 25 bp, Homo sapien
agagacaggaccacgggctcccact

SEQ ID NO: 6090830 - DNA, 25 bp, Homo sapien
tgatttcttgaatgtggttttctgt

SEQ ID NO: 6090831 - DNA, 25 bp, Homo sapien
gcagcggtagatgtcggtctgggac

SEQ ID NO: 6090832 - DNA, 25 bp, Homo sapien
cggctgtgacttcctctctcgcctt

SEQ ID NO: 6090833 - DNA, 25 bp, Homo sapien
cgaggaaggtgtcaaaagctttggg

SEQ ID NO: 6090834 - DNA, 25 bp, Homo sapien
ggaatcgaggaaggtgtcaaaagct

SEQ ID NO: 6090835 - DNA, 25 bp, Homo sapien
tccaccacctgcgaatgcacgttgt

SEQ ID NO: 6090836 - DNA, 25 bp, Homo sapien
cagtccttccaccagtacctcggca

SEQ ID NO: 6090837 - DNA, 25 bp, Homo sapien
tcgccttctccagcttctctcttac

SEQ ID NO: 6090838 - DNA, 25 bp, Homo sapien
catccagtcacctgtaggcagctcg

SEQ ID NO: 6090839 - DNA, 25 bp, Homo sapien
gaaattcctggagggaatcgaggaa

SEQ ID NO: 6090840 - DNA, 25 bp, Homo sapien
gtctgatggcgagctgctgaggatg

SEQ ID NO: 6090841 - DNA, 25 bp, Homo sapien
tggtttgagctttgatttcttgaat

SEQ ID NO: 6090842 - DNA, 25 bp, Homo sapien
gcctccactgcctggaggcccttgt

SEQ ID NO: 6090843 - DNA, 25 bp, Homo sapien
caggaccacgggctcccactccggg

SEQ ID NO: 6090844 - DNA, 25 bp, Homo sapien
tgtggttttctgtcaaaattccttc

SEQ ID NO: 6090845 - DNA, 25 bp, Homo sapien
gaaggtggcctgcttcccaaaacgc

SEQ ID NO: 6090846 - DNA, 25 bp, Homo sapien
acctgcgaatgcacgttgtggggat

SEQ ID NO: 6090847 - DNA, 25 bp, Homo sapien
gtcacctgtaggcagctcggctgtg

SEQ ID NO: 6090848 - DNA, 25 bp, Homo sapien
gctgctgaggatgtgtgaggggatt

SEQ ID NO: 6090849 - DNA, 25 bp, Homo sapien
gcagctcggctgtgacttcctctct

SEQ ID NO: 6090850 - DNA, 25 bp, Homo sapien
gaggatgtgtgaggggattccggcc

SEQ ID NO: 6090851 - DNA, 25 bp, Homo sapien
ttccaccagtacctcggcacccagc

SEQ ID NO: 6090852 - DNA, 25 bp, Homo sapien
cgggcctagcttctgagccagctgg

SEQ ID NO: 6090853 - DNA, 25 bp, Homo sapien
aaggcaggatgtccagcaacagcat

SEQ ID NO: 6090854 - DNA, 25 bp, Homo sapien
tggcctgcttcccaaaacgctggcg

SEQ ID NO: 6090855 - DNA, 25 bp, Homo sapien
ggtactgaagaaccagtccttccac

SEQ ID NO: 6090856 - DNA, 25 bp, Homo sapien
gttgtggggatggttggccttgcag

SEQ ID NO: 6090857 - DNA, 25 bp, Homo sapien
tccagacgcagggagcggagtacct

SEQ ID NO: 6090858 - DNA, 25 bp, Homo sapien
tggttggccttgcagcggtagatgt

SEQ ID NO: 6090859 - DNA, 25 bp, Homo sapien
gagcggagtacctgcttgtctctgg

SEQ ID NO: 6090860 - DNA, 25 bp, Homo sapien
gggattccggccatccagtcacctg

SEQ ID NO: 6090861 - DNA, 25 bp, Homo sapien
tagcttctgagccagctggttaatc

SEQ ID NO: 6090862 - DNA, 25 bp, Homo sapien
tctgctggtctgatggcgagctgct

SEQ ID NO: 6090863 - DNA, 25 bp, Homo sapien
tcggtctgggacagtcccagagaca

SEQ ID NO: 6090864 - DNA, 25 bp, Homo sapien
cccttgtgtaagcttaggaaggtgg

SEQ ID NO: 6090865 - DNA, 25 bp, Homo sapien
ggttaatctgctggtctgatggcga

SEQ ID NO: 6090866 - DNA, 25 bp, Homo sapien
agtcccagagacaggaccacgggct

SEQ ID NO: 6090867 - DNA, 25 bp, Homo sapien
acagcattgtcttccggaggcctgt

SEQ ID NO: 6090868 - DNA, 25 bp, Homo sapien
gcttaggaaggtggcctgcttccca

SEQ ID NO: 6090869 - DNA, 25 bp, Homo sapien
ctgtaggcagctcggctgtgacttc

SEQ ID NO: 6090870 - DNA, 25 bp, Homo sapien
agtacctgcttgtctctggcttcca

SEQ ID NO: 6090871 - DNA, 25 bp, Homo sapien
tggggcccctggaaggcaggatgtc

SEQ ID NO: 6090872 - DNA, 25 bp, Homo sapien
actgcctggaggcccttgtgtaagc

SEQ ID NO: 6090873 - DNA, 25 bp, Homo sapien
ggatgtccagcaacagcattgtctt

SEQ ID NO: 6090874 - DNA, 25 bp, Homo sapien
aatgcacgttgtggggatggttggc

SEQ ID NO: 6090875 - DNA, 25 bp, Homo sapien
ccactccgggcctagcttctgagcc

SEQ ID NO: 6090876 - DNA, 25 bp, Homo sapien
tctccagcttctctcttacccaggg

SEQ ID NO: 6090877 - DNA, 25 bp, Homo sapien
ccagctggttaatctgctggtctga

SEQ ID NO: 6090878 - DNA, 25 bp, Homo sapien
tggaggcccttgtgtaagcttagga

SEQ ID NO: 6090879 - DNA, 25 bp, Homo sapien
ctcttacccagggaaattcctggag

SEQ ID NO: 6090880 - DNA, 25 bp, Homo sapien
ttccggccatccagtcacctgtagg

SEQ ID NO: 6090881 - DNA, 25 bp, Homo sapien
ctgtcaaaattccttcctggtaaag

SEQ ID NO: 6090882 - DNA, 25 bp, Homo sapien
tgtcaaaagctttggggcccctgga

SEQ ID NO: 6090883 - DNA, 25 bp, Homo sapien
tctgagccagctggttaatctgctg

SEQ ID NO: 6090884 - DNA, 25 bp, Homo sapien
cttgaatgtggttttctgtcaaaat

SEQ ID NO: 6090885 - DNA, 25 bp, Homo sapien
gcttctctcttacccagggaaattc

SEQ ID NO: 6090886 - DNA, 25 bp, Homo sapien
tgtaagcttaggaaggtggcctgct

SEQ ID NO: 6090887 - DNA, 25 bp, Homo sapien
ccagggaaattcctggagggaatcg

SEQ ID NO: 6090888 - DNA, 25 bp, Homo sapien
aaggcctccaccacctgcgaatgca

SEQ ID NO: 6090889 - DNA, 25 bp, Homo sapien
ttcccaaaacgctggcgccagcgga

SEQ ID NO: 6090890 - DNA, 25 bp, Homo sapien
cctctctcgccttctccagcttctc

SEQ ID NO: 6090891 - DNA, 25 bp, Homo sapien
tggtaaaggtactgaagaaccagtc

SEQ ID NO: 6090892 - DNA, 25 bp, Homo sapien
agtacctcggcacccagctccagac

SEQ ID NO: 6090893 - DNA, 25 bp, Homo sapien
atcagcctccactgcctggaggccc

SEQ ID NO: 6090894 - DNA, 25 bp, Homo sapien
ccctggaaggcaggatgtccagcaa

SEQ ID NO: 6090895 - DNA, 25 bp, Homo sapien
gccttgcagcggtagatgtcggtct

SEQ ID NO: 6090896 - DNA, 25 bp, Homo sapien
ggcctgtggtttgagctttgatttc

SEQ ID NO: 6090897 - DNA, 25 bp, Homo sapien
gggatggttggccttgcagcggtag

SEQ ID NO: 6090898 - DNA, 25 bp, Homo sapien
tccttcctggtaaaggtactgaaga

SEQ ID NO: 6090899 - DNA, 25 bp, Homo sapien
gaagaaccagtccttccaccagtac

SEQ ID NO: 6090900 - DNA, 25 bp, Homo sapien
cgggctcccactccgggcctagctt

SEQ ID NO: 6090901 - DNA, 25 bp, Homo sapien
tggcgagctgctgaggatgtgtgag

SEQ ID NO: 6090902 - DNA, 25 bp, Homo sapien
tcggcacccagctccagacgcaggg

SEQ ID NO: 6090903 - DNA, 25 bp, Homo sapien
cggacaaaggcctccaccacctgcg

SEQ ID NO: 6090904 - DNA, 25 bp, Homo sapien
tccggaggcctgtggtttgagcttt

SEQ ID NO: 6090905 - DNA, 25 bp, Homo sapien
gagagacgtcagtgtcatagtccaa

SEQ ID NO: 6090906 - DNA, 25 bp, Homo sapien
gatactcaccgtctctatggcatta

SEQ ID NO: 6090907 - DNA, 25 bp, Homo sapien
caaagtctgtagcatcctaagaggg

SEQ ID NO: 6090908 - DNA, 25 bp, Homo sapien
catcgcggccccattgttattgata

SEQ ID NO: 6090909 - DNA, 25 bp, Homo sapien
taagagggttgaaaatgccttccga

SEQ ID NO: 6090910 - DNA, 25 bp, Homo sapien
tatggcattattcgtcgcagggcaa

SEQ ID NO: 6090911 - DNA, 25 bp, Homo sapien
catgatcaccgacagagtcttcagg

SEQ ID NO: 6090912 - DNA, 25 bp, Homo sapien
taaaccagattgcactccttggaga

SEQ ID NO: 6090913 - DNA, 25 bp, Homo sapien
gacagcttctccaagggtctggcga

SEQ ID NO: 6090914 - DNA, 25 bp, Homo sapien
gttcaaggatgaattagcccaccca

SEQ ID NO: 6090915 - DNA, 25 bp, Homo sapien
cacagcatgtgggatcaggtaaacc

SEQ ID NO: 6090916 - DNA, 25 bp, Homo sapien
catgatggctggaaaacatcgcggc

SEQ ID NO: 6090917 - DNA, 25 bp, Homo sapien
catgatggctggaaaacatcgcggc

SEQ ID NO: 6090918 - DNA, 25 bp, Homo sapien
caaagtctgtagcatcctaagaggg

SEQ ID NO: 6090919 - DNA, 25 bp, Homo sapien
gatactcaccgtctctatggcatta

SEQ ID NO: 6090920 - DNA, 25 bp, Homo sapien
gagagacgtcagtgtcatagtccaa

SEQ ID NO: 6090921 - DNA, 25 bp, Homo sapien
taagagggttgaaaatgccttccga

SEQ ID NO: 6090922 - DNA, 25 bp, Homo sapien
gttcaaggatgaattagcccaccca

SEQ ID NO: 6090923 - DNA, 25 bp, Homo sapien
taaaccagattgcactccttggaga

SEQ ID NO: 6090924 - DNA, 25 bp, Homo sapien
catgatcaccgacagagtcttcagg

SEQ ID NO: 6090925 - DNA, 25 bp, Homo sapien
catcgcggccccattgttattgata

SEQ ID NO: 6090926 - DNA, 25 bp, Homo sapien
cacagcatgtgggatcaggtaaacc

SEQ ID NO: 6090927 - DNA, 25 bp, Homo sapien
tatggcattattcgtcgcagggcaa

SEQ ID NO: 6090928 - DNA, 25 bp, Homo sapien
gacagcttctccaagggtctggcga

SEQ ID NO: 6090929 - DNA, 25 bp, Homo sapien
ccccacagactgtggtggacaaaca

SEQ ID NO: 6090930 - DNA, 25 bp, Homo sapien
tgcaataaataagggttatgtttct

SEQ ID NO: 6090931 - DNA, 25 bp, Homo sapien
gagggcaatgtatgtaagccagaag

SEQ ID NO: 6090932 - DNA, 25 bp, Homo sapien
gaagggagatctttgaacaacagtg

SEQ ID NO: 6090933 - DNA, 25 bp, Homo sapien
caatgtatgtaagccagaagaatgc

SEQ ID NO: 6090934 - DNA, 25 bp, Homo sapien
tgtatgtaagccagaagaatgcaat

SEQ ID NO: 6090935 - DNA, 25 bp, Homo sapien
agaattcagtcccaggaagggtctc

SEQ ID NO: 6090936 - DNA, 25 bp, Homo sapien
aaatgtccattgattagtgagggca

SEQ ID NO: 6090937 - DNA, 25 bp, Homo sapien
aattcagtcccaggaagggtctctc

SEQ ID NO: 6090938 - DNA, 25 bp, Homo sapien
ttagtgagggcaatgtatgtaagcc

SEQ ID NO: 6090939 - DNA, 25 bp, Homo sapien
gacaaacactgggtgtaacacttta

SEQ ID NO: 6090940 - DNA, 25 bp, Homo sapien
gggagatctttgaacaacagtgctt

SEQ ID NO: 6090941 - DNA, 25 bp, Homo sapien
tccagcctggcggtacctgtttagg

SEQ ID NO: 6090942 - DNA, 25 bp, Homo sapien
aaggcggcgagcccaccagtttgta

SEQ ID NO: 6090943 - DNA, 25 bp, Homo sapien
gcctctttccaaggcggcgagccca

SEQ ID NO: 6090944 - DNA, 25 bp, Homo sapien
cctcttgaactagaaagctgttctg

SEQ ID NO: 6090945 - DNA, 25 bp, Homo sapien
catcacctcttgaactagaaagctg

SEQ ID NO: 6090946 - DNA, 25 bp, Homo sapien
agcacagccatgtctatcagctcct

SEQ ID NO: 6090947 - DNA, 25 bp, Homo sapien
tgtttaggagcctgtcccggctgtt

SEQ ID NO: 6090948 - DNA, 25 bp, Homo sapien
gcctggcggtacctgtttaggagcc

SEQ ID NO: 6090949 - DNA, 25 bp, Homo sapien
tgttctgagaattccctggcccact

SEQ ID NO: 6090950 - DNA, 25 bp, Homo sapien
tgtcccggctgtttctcattctctc

SEQ ID NO: 6090951 - DNA, 25 bp, Homo sapien
caccagtttgtacagggagcggcgc

SEQ ID NO: 6090952 - DNA, 25 bp, Homo sapien
agcggcgcggagacctcaacgactc

SEQ ID NO: 6090953 - DNA, 25 bp, Homo sapien
caggatgacagtataagagatcaga

SEQ ID NO: 6090954 - DNA, 25 bp, Homo sapien
cagtagaagttatctaggatattgg

SEQ ID NO: 6090955 - DNA, 25 bp, Homo sapien
cagatgataactagcagcccactgt

SEQ ID NO: 6090956 - DNA, 25 bp, Homo sapien
gaatgaagatcatggacaccacgat

SEQ ID NO: 6090957 - DNA, 25 bp, Homo sapien
cacagaagggcagtggaagtatcag

SEQ ID NO: 6090958 - DNA, 25 bp, Homo sapien
ctgttggagatcatgaggaactcca

SEQ ID NO: 6090959 - DNA, 25 bp, Homo sapien
caattgagtgttcatgatggtgaca

SEQ ID NO: 6090960 - DNA, 25 bp, Homo sapien
gaggaggaaccagatgataactagc

SEQ ID NO: 6090961 - DNA, 25 bp, Homo sapien
ccacacacaattgagtgttcatgat

SEQ ID NO: 6090962 - DNA, 25 bp, Homo sapien
ttgcctttcccgagtgggacctcag

SEQ ID NO: 6090963 - DNA, 25 bp, Homo sapien
actccaggagggaggtatcagtgca

SEQ ID NO: 6090964 - DNA, 25 bp, Homo sapien
tcagagccagttggacaatggagtg

SEQ ID NO: 6090965 - DNA, 25 bp, Homo sapien
gcaggcttgcgaagagttctcagca

SEQ ID NO: 6090966 - DNA, 25 bp, Homo sapien
ttgagacagagtagcaggcttgcga

SEQ ID NO: 6090967 - DNA, 25 bp, Homo sapien
tagtaatagcttgggagcgcaccag

SEQ ID NO: 6090968 - DNA, 25 bp, Homo sapien
cacaaggtgattgggtacatgatct

SEQ ID NO: 6090969 - DNA, 25 bp, Homo sapien
taagtcttccagacacgtttggaga

SEQ ID NO: 6090970 - DNA, 25 bp, Homo sapien
aagactgccatatgtactgtgatca

SEQ ID NO: 6090971 - DNA, 25 bp, Homo sapien
cagttcagagttgcaaggcacaagg

SEQ ID NO: 6090972 - DNA, 25 bp, Homo sapien
tacaaagcataccacaaagactgcc

SEQ ID NO: 6090973 - DNA, 25 bp, Homo sapien
tgggcattgatgtagaaggacttct

SEQ ID NO: 6090974 - DNA, 25 bp, Homo sapien
caccagggcatacaagaagaggaca

SEQ ID NO: 6090975 - DNA, 25 bp, Homo sapien
tcagtcttaaacagggactccattc

SEQ ID NO: 6090976 - DNA, 25 bp, Homo sapien
gacttctgaaaggattcaagggtga

SEQ ID NO: 6090977 - DNA, 25 bp, Homo sapien
cgcagtgtgcccatggagttctcca

SEQ ID NO: 6090978 - DNA, 25 bp, Homo sapien
acaagcggtgacgttgtggccctca

SEQ ID NO: 6090979 - DNA, 25 bp, Homo sapien
cacgatcacgtacaccagtgggttg

SEQ ID NO: 6090980 - DNA, 25 bp, Homo sapien
gcagcacctgcatgatctgcatcgt

SEQ ID NO: 6090981 - DNA, 25 bp, Homo sapien
atgccgaggcgatgcagcgtatcca

SEQ ID NO: 6090982 - DNA, 25 bp, Homo sapien
agacttctttcggaagcgcttgccc

SEQ ID NO: 6090983 - DNA, 25 bp, Homo sapien
agcacaaccaggactagcaccgtgg

SEQ ID NO: 6090984 - DNA, 25 bp, Homo sapien
gctgtactccttcatggtccggaac

SEQ ID NO: 6090985 - DNA, 25 bp, Homo sapien
gaatctggcgttccacggagatgga

SEQ ID NO: 6090986 - DNA, 25 bp, Homo sapien
catgaaggaggcgatctgtgtgatt

SEQ ID NO: 6090987 - DNA, 25 bp, Homo sapien
tacatcgatgatgcgctcgtcctgg

SEQ ID NO: 6090988 - DNA, 25 bp, Homo sapien
tgcatctcgttgttccgcagcacct

SEQ ID NO: 6090989 - DNA, 25 bp, Homo sapien
taatagtcgggaggtgttggcttct

SEQ ID NO: 6090990 - DNA, 25 bp, Homo sapien
gaatgatgtgatcgaccatgtaggg

SEQ ID NO: 6090991 - DNA, 25 bp, Homo sapien
ggccaccttctatgatccattgcat

SEQ ID NO: 6090992 - DNA, 25 bp, Homo sapien
gataccgctggttgactttgacact

SEQ ID NO: 6090993 - DNA, 25 bp, Homo sapien
tctgtttgtgtaaactgagggctca

SEQ ID NO: 6090994 - DNA, 25 bp, Homo sapien
ggagaattcatatcaggtggcacct

SEQ ID NO: 6090995 - DNA, 25 bp, Homo sapien
ccgagttaggagtaactacatcctg

SEQ ID NO: 6090996 - DNA, 25 bp, Homo sapien
gctggcacttggctacgaaccgagt

SEQ ID NO: 6090997 - DNA, 25 bp, Homo sapien
tatccagatgatggatcgtaggtcg

SEQ ID NO: 6090998 - DNA, 25 bp, Homo sapien
gtgacagtcgtttccatgcaggcca

SEQ ID NO: 6090999 - DNA, 25 bp, Homo sapien
tacatcctgaggaggatatggcatt

SEQ ID NO: 6091000 - DNA, 25 bp, Homo sapien
taggtcgtggttagagctggcactt

SEQ ID NO: 6091001 - DNA, 25 bp, Homo sapien
tgctcagtgccaactcgctcttagg

SEQ ID NO: 6091002 - DNA, 25 bp, Homo sapien
gggcaggtcacttcgtcttccgagg

SEQ ID NO: 6091003 - DNA, 25 bp, Homo sapien
cggctccagcgcgtacaagctgtgg

SEQ ID NO: 6091004 - DNA, 25 bp, Homo sapien
tgcgctcgcggtcgttggccttctt

SEQ ID NO: 6091005 - DNA, 25 bp, Homo sapien
gctatgcgcagcgtttgagtcagcg

SEQ ID NO: 6091006 - DNA, 25 bp, Homo sapien
tacaagctgtggtccgctatgcgca

SEQ ID NO: 6091007 - DNA, 25 bp, Homo sapien
tcttggtgagcttcgcgtcgtctgg

SEQ ID NO: 6091008 - DNA, 25 bp, Homo sapien
aactcgctcttaggccggctgcgtc

SEQ ID NO: 6091009 - DNA, 25 bp, Homo sapien
gcgtttgagtcagcgcccagatgta

SEQ ID NO: 6091010 - DNA, 25 bp, Homo sapien
gtgcattcgattgcgctcgcggtcg

SEQ ID NO: 6091011 - DNA, 25 bp, Homo sapien
tgcttgctcagtgccaactcgctct

SEQ ID NO: 6091012 - DNA, 25 bp, Homo sapien
caggacaccgcgcagggcgtccagt

SEQ ID NO: 6091013 - DNA, 25 bp, Homo sapien
gcagcacgtaggctgacagcaaggg

SEQ ID NO: 6091014 - DNA, 25 bp, Homo sapien
aggttcttctgcagtacacaggtgc

SEQ ID NO: 6091015 - DNA, 25 bp, Homo sapien
gcaggttcttctgcagtacacaggt

SEQ ID NO: 6091016 - DNA, 25 bp, Homo sapien
ttcttctgcagtacacaggtgcaca

SEQ ID NO: 6091017 - DNA, 25 bp, Homo sapien
tgcagcacgtaggctgacagcaagg

SEQ ID NO: 6091018 - DNA, 25 bp, Homo sapien
caggttcttctgcagtacacaggtg

SEQ ID NO: 6091019 - DNA, 25 bp, Homo sapien
gttcttctgcagtacacaggtgcac

SEQ ID NO: 6091020 - DNA, 25 bp, Homo sapien
tagcaggttcttctgcagtacacag

SEQ ID NO: 6091021 - DNA, 25 bp, Homo sapien
ggttcttctgcagtacacaggtgca

SEQ ID NO: 6091022 - DNA, 25 bp, Homo sapien
agcaggttcttctgcagtacacagg

SEQ ID NO: 6091023 - DNA, 25 bp, Homo sapien
gtcgggcacatgtccccatagccta

SEQ ID NO: 6091024 - DNA, 25 bp, Homo sapien
gccagggacatgttctgttgggcac

SEQ ID NO: 6091025 - DNA, 25 bp, Homo sapien
gaagccatcaggaatgctagagaaa

SEQ ID NO: 6091026 - DNA, 25 bp, Homo sapien
cacctcagcaaagtagactgcactg

SEQ ID NO: 6091027 - DNA, 25 bp, Homo sapien
gtggaacagccaccattggtcttat

SEQ ID NO: 6091028 - DNA, 25 bp, Homo sapien
gcacatgtccccatagcctacagtt

SEQ ID NO: 6091029 - DNA, 25 bp, Homo sapien
atttcctagacttctctgtggaaca

SEQ ID NO: 6091030 - DNA, 25 bp, Homo sapien
ggtcgggcacatgtccccatagcct

SEQ ID NO: 6091031 - DNA, 25 bp, Homo sapien
atccacctcagcaaagtagactgca

SEQ ID NO: 6091032 - DNA, 25 bp, Homo sapien
cagggacatgttctgttgggcactc

SEQ ID NO: 6091033 - DNA, 25 bp, Homo sapien
ctgttgggcactcggctctgtctcc

SEQ ID NO: 6091034 - DNA, 25 bp, Homo sapien
ggcacatgtccccatagcctacagt

SEQ ID NO: 6091035 - DNA, 25 bp, Homo sapien
catacatggacgtatcaatgtcagc

SEQ ID NO: 6091036 - DNA, 25 bp, Homo sapien
gaggtgcaaaacgtgtcatcgtcgt

SEQ ID NO: 6091037 - DNA, 25 bp, Homo sapien
ggaggtccctttcacactgtcagtc

SEQ ID NO: 6091038 - DNA, 25 bp, Homo sapien
ttcacactgtcagtcgcagccgtgg

SEQ ID NO: 6091039 - DNA, 25 bp, Homo sapien
aaattcccaggcagagagtccatca

SEQ ID NO: 6091040 - DNA, 25 bp, Homo sapien
agtccatcagttttgagtcatctgc

SEQ ID NO: 6091041 - DNA, 25 bp, Homo sapien
ggacccaacaagcacctccatgatg

SEQ ID NO: 6091042 - DNA, 25 bp, Homo sapien
tcctcgatctcgtccaaggcagagg

SEQ ID NO: 6091043 - DNA, 25 bp, Homo sapien
tcatctgcgcggctctcttgaggac

SEQ ID NO: 6091044 - DNA, 25 bp, Homo sapien
gaccgtcgagtttctgggtgccagc

SEQ ID NO: 6091045 - DNA, 25 bp, Homo sapien
ctgtaaggagccagagttttgagga

SEQ ID NO: 6091046 - DNA, 25 bp, Homo sapien
tttgaggaggtcgtcggcagacaca

SEQ ID NO: 6091047 - DNA, 25 bp, Homo sapien
gacagtgccatagatgctcttctcc

SEQ ID NO: 6091048 - DNA, 25 bp, Homo sapien
ctgtcaatgtcaacggcaagctgga

SEQ ID NO: 6091049 - DNA, 25 bp, Homo sapien
gaaaatgatataatgcccagaggca

SEQ ID NO: 6091050 - DNA, 25 bp, Homo sapien
tgatctcaatcagcgaatactcccg

SEQ ID NO: 6091051 - DNA, 25 bp, Homo sapien
ccttcgctgatggtagtggtcattt

SEQ ID NO: 6091052 - DNA, 25 bp, Homo sapien
gagtgaatggcatccaaccgctgct

SEQ ID NO: 6091053 - DNA, 25 bp, Homo sapien
tcagcgaatactcccggaagatggc

SEQ ID NO: 6091054 - DNA, 25 bp, Homo sapien
gaaggccgagaggaaagcctttctg

SEQ ID NO: 6091055 - DNA, 25 bp, Homo sapien
caaatgcgagtgtaggaaaatgata

SEQ ID NO: 6091056 - DNA, 25 bp, Homo sapien
gaagatgagtttgtactccttcagg

SEQ ID NO: 6091057 - DNA, 25 bp, Homo sapien
gacatggttcttcaatttactccaa

SEQ ID NO: 6091058 - DNA, 25 bp, Homo sapien
gaatgtcacggacacctcagagtga

SEQ ID NO: 6091059 - DNA, 25 bp, Homo sapien
caagtggtgtttgcgcagcatccag

SEQ ID NO: 6091060 - DNA, 25 bp, Homo sapien
tagggagcacccttggaaacatcac

SEQ ID NO: 6091061 - DNA, 25 bp, Homo sapien
gctttgtgtctcaaatgctcatcca

SEQ ID NO: 6091062 - DNA, 25 bp, Homo sapien
ttgtgcccactccatcaacttttgg

SEQ ID NO: 6091063 - DNA, 25 bp, Homo sapien
actgaccacgaagtaggcactgcca

SEQ ID NO: 6091064 - DNA, 25 bp, Homo sapien
catggactccatcgcagggcgggta

SEQ ID NO: 6091065 - DNA, 25 bp, Homo sapien
tcatcagggctgtatgtgtcttgtg

SEQ ID NO: 6091066 - DNA, 25 bp, Homo sapien
gctttccattaacgacctcataccg

SEQ ID NO: 6091067 - DNA, 25 bp, Homo sapien
ttggaaacatcaccctcaaagtact

SEQ ID NO: 6091068 - DNA, 25 bp, Homo sapien
agtgagcccgggacttcaggaatcc

SEQ ID NO: 6091069 - DNA, 25 bp, Homo sapien
ggatggcatcctctccgtttccagg

SEQ ID NO: 6091070 - DNA, 25 bp, Homo sapien
cagacagatcatacttatggctggc

SEQ ID NO: 6091071 - DNA, 25 bp, Homo sapien
caggagggccaccagtaaagcaaag

SEQ ID NO: 6091072 - DNA, 25 bp, Homo sapien
tagcaggttcttctgcagtacacag

SEQ ID NO: 6091073 - DNA, 25 bp, Homo sapien
gcagcacgtaggctgacagcaaggg

SEQ ID NO: 6091074 - DNA, 25 bp, Homo sapien
agcaggttcttctgcagtacacagg

SEQ ID NO: 6091075 - DNA, 25 bp, Homo sapien
ttcttctgcagtacacaggtgcaca

SEQ ID NO: 6091076 - DNA, 25 bp, Homo sapien
tgcagcacgtaggctgacagcaagg

SEQ ID NO: 6091077 - DNA, 25 bp, Homo sapien
gttcttctgcagtacacaggtgcac

SEQ ID NO: 6091078 - DNA, 25 bp, Homo sapien
caggttcttctgcagtacacaggtg

SEQ ID NO: 6091079 - DNA, 25 bp, Homo sapien
gcaggttcttctgcagtacacaggt

SEQ ID NO: 6091080 - DNA, 25 bp, Homo sapien
aggttcttctgcagtacacaggtgc

SEQ ID NO: 6091081 - DNA, 25 bp, Homo sapien
ggttcttctgcagtacacaggtgca

SEQ ID NO: 6091082 - DNA, 25 bp, Homo sapien
catacatggacgtatcaatgtcagc

SEQ ID NO: 6091083 - DNA, 25 bp, Homo sapien
gaggtgcaaaacgtgtcatcgtcgt

SEQ ID NO: 6091084 - DNA, 25 bp, Homo sapien
ctgtaaggagccagagttttgagga

SEQ ID NO: 6091085 - DNA, 25 bp, Homo sapien
ttcacactgtcagtcgcagccgtgg

SEQ ID NO: 6091086 - DNA, 25 bp, Homo sapien
ggacccaacaagcacctccatgatg

SEQ ID NO: 6091087 - DNA, 25 bp, Homo sapien
tcctcgatctcgtccaaggcagagg

SEQ ID NO: 6091088 - DNA, 25 bp, Homo sapien
tcatctgcgcggctctcttgaggac

SEQ ID NO: 6091089 - DNA, 25 bp, Homo sapien
ggaggtccctttcacactgtcagtc

SEQ ID NO: 6091090 - DNA, 25 bp, Homo sapien
agtccatcagttttgagtcatctgc

SEQ ID NO: 6091091 - DNA, 25 bp, Homo sapien
tttgaggaggtcgtcggcagacaca

SEQ ID NO: 6091092 - DNA, 25 bp, Homo sapien
gaccgtcgagtttctgggtgccagc

SEQ ID NO: 6091093 - DNA, 25 bp, Homo sapien
aaattcccaggcagagagtccatca

SEQ ID NO: 6091094 - DNA, 25 bp, Homo sapien
tgtgcccatattgacatagtgctgg

SEQ ID NO: 6091095 - DNA, 25 bp, Homo sapien
tccctgttgcagagccacataatca

SEQ ID NO: 6091096 - DNA, 25 bp, Homo sapien
cctgtgacagggaaatagcagccac

SEQ ID NO: 6091097 - DNA, 25 bp, Homo sapien
tgtcacagtgcctcaggacacgtgg

SEQ ID NO: 6091098 - DNA, 25 bp, Homo sapien
tagcagccacagatgtttaactaag

SEQ ID NO: 6091099 - DNA, 25 bp, Homo sapien
aaggccaagagtcaggacacctgtc

SEQ ID NO: 6091100 - DNA, 25 bp, Homo sapien
gacaggacatgtcaaggccaagagt

SEQ ID NO: 6091101 - DNA, 25 bp, Homo sapien
gacactgggcagaccaaagcaatgg

SEQ ID NO: 6091102 - DNA, 25 bp, Homo sapien
ttggctggcttgagtcatgtgccca

SEQ ID NO: 6091103 - DNA, 25 bp, Homo sapien
tctgagtagttctgacttgccagcc

SEQ ID NO: 6091104 - DNA, 25 bp, Homo sapien
tttaactaagcaagtactaccaggc

SEQ ID NO: 6091105 - DNA, 25 bp, Homo sapien
tatcaaaagatagggagacagacac

SEQ ID NO: 6091106 - DNA, 25 bp, Homo sapien
gctatgcgcagcgtttgagtcagcg

SEQ ID NO: 6091107 - DNA, 25 bp, Homo sapien
tacaagctgtggtccgctatgcgca

SEQ ID NO: 6091108 - DNA, 25 bp, Homo sapien
tgcgctcgcggtcgttggccttctt

SEQ ID NO: 6091109 - DNA, 25 bp, Homo sapien
caggacaccgcgcagggcgtccagt

SEQ ID NO: 6091110 - DNA, 25 bp, Homo sapien
tcttggtgagcttcgcgtcgtctgg

SEQ ID NO: 6091111 - DNA, 25 bp, Homo sapien
gggcaggtcacttcgtcttccgagg

SEQ ID NO: 6091112 - DNA, 25 bp, Homo sapien
tgcttgctcagtgccaactcgctct

SEQ ID NO: 6091113 - DNA, 25 bp, Homo sapien
tgctcagtgccaactcgctcttagg

SEQ ID NO: 6091114 - DNA, 25 bp, Homo sapien
aactcgctcttaggccggctgcgtc

SEQ ID NO: 6091115 - DNA, 25 bp, Homo sapien
cggctccagcgcgtacaagctgtgg

SEQ ID NO: 6091116 - DNA, 25 bp, Homo sapien
gcgtttgagtcagcgcccagatgta

SEQ ID NO: 6091117 - DNA, 25 bp, Homo sapien
gtgcattcgattgcgctcgcggtcg

SEQ ID NO: 6091118 - DNA, 25 bp, Homo sapien
caatcaagaaacctcctgtactccc

SEQ ID NO: 6091119 - DNA, 25 bp, Homo sapien
ccagcacattgagggagtgaatttc

SEQ ID NO: 6091120 - DNA, 25 bp, Homo sapien
gactcgtctaagagagccaactttg

SEQ ID NO: 6091121 - DNA, 25 bp, Homo sapien
tgtcccctcaattcatctctgtcgt

SEQ ID NO: 6091122 - DNA, 25 bp, Homo sapien
tgaatttcagtgaggtggaagcggt

SEQ ID NO: 6091123 - DNA, 25 bp, Homo sapien
gacatttgtcccctcaattcatctc

SEQ ID NO: 6091124 - DNA, 25 bp, Homo sapien
ttggcatttggagccccccaatcaa

SEQ ID NO: 6091125 - DNA, 25 bp, Homo sapien
gcagcggctgaaatagggttgtagg

SEQ ID NO: 6091126 - DNA, 25 bp, Homo sapien
aatccatgactcgtctaagagagcc

SEQ ID NO: 6091127 - DNA, 25 bp, Homo sapien
cagtacaaatccatgactcgtctaa

SEQ ID NO: 6091128 - DNA, 25 bp, Homo sapien
tccccctgtagttgggcatctcata

SEQ ID NO: 6091129 - DNA, 25 bp, Homo sapien
aattcatctctgtcgtagatcttca

SEQ ID NO: 6091130 - DNA, 25 bp, Homo sapien
caatcaagaaacctcctgtactccc

SEQ ID NO: 6091131 - DNA, 25 bp, Homo sapien
tgtcccctcaattcatctctgtcgt

SEQ ID NO: 6091132 - DNA, 25 bp, Homo sapien
ttggcatttggagccccccaatcaa

SEQ ID NO: 6091133 - DNA, 25 bp, Homo sapien
gcagcggctgaaatagggttgtagg

SEQ ID NO: 6091134 - DNA, 25 bp, Homo sapien
gactcgtctaagagagccaactttg

SEQ ID NO: 6091135 - DNA, 25 bp, Homo sapien
tgaatttcagtgaggtggaagcggt

SEQ ID NO: 6091136 - DNA, 25 bp, Homo sapien
gacatttgtcccctcaattcatctc

SEQ ID NO: 6091137 - DNA, 25 bp, Homo sapien
cagtacaaatccatgactcgtctaa

SEQ ID NO: 6091138 - DNA, 25 bp, Homo sapien
ccagcacattgagggagtgaatttc

SEQ ID NO: 6091139 - DNA, 25 bp, Homo sapien
aatccatgactcgtctaagagagcc

SEQ ID NO: 6091140 - DNA, 25 bp, Homo sapien
tccccctgtagttgggcatctcata

SEQ ID NO: 6091141 - DNA, 25 bp, Homo sapien
aattcatctctgtcgtagatcttca

SEQ ID NO: 6091142 - DNA, 25 bp, Homo sapien
ttcggaggcgtgtttccccttcgca

SEQ ID NO: 6091143 - DNA, 25 bp, Homo sapien
tttccagactgtcgctgcacacgga

SEQ ID NO: 6091144 - DNA, 25 bp, Homo sapien
gatgggtcggtacttgttcaggtcc

SEQ ID NO: 6091145 - DNA, 25 bp, Homo sapien
tcggtggtcacgtcgctgtcggatc

SEQ ID NO: 6091146 - DNA, 25 bp, Homo sapien
caacaagctcttggcgatggtgacc

SEQ ID NO: 6091147 - DNA, 25 bp, Homo sapien
ccacgtgcagggaaagggccgttca

SEQ ID NO: 6091148 - DNA, 25 bp, Homo sapien
acacagcggacagcggaactgcttt

SEQ ID NO: 6091149 - DNA, 25 bp, Homo sapien
tgtatgcactctgtaatgggctttg

SEQ ID NO: 6091150 - DNA, 25 bp, Homo sapien
gaccagtgtgcagtaatccttccag

SEQ ID NO: 6091151 - DNA, 25 bp, Homo sapien
ggaaggactcgacccagattcggtg

SEQ ID NO: 6091152 - DNA, 25 bp, Homo sapien
aagcgttggccagcgcctttttcga

SEQ ID NO: 6091153 - DNA, 25 bp, Homo sapien
tcgtctgagcgggagaactttttaa

SEQ ID NO: 6091154 - DNA, 25 bp, Homo sapien
gaggtgccatccctctcgctttgga

SEQ ID NO: 6091155 - DNA, 25 bp, Homo sapien
cctctcgctttggatggcagccagt

SEQ ID NO: 6091156 - DNA, 25 bp, Homo sapien
ttaaaggcccggaccactgagctgg

SEQ ID NO: 6091157 - DNA, 25 bp, Homo sapien
ggagaagtgctgttgcattcaaacc

SEQ ID NO: 6091158 - DNA, 25 bp, Homo sapien
agccagtttgcccaacagccggtgt

SEQ ID NO: 6091159 - DNA, 25 bp, Homo sapien
ttttcgaatagctcaggagaagtgc

SEQ ID NO: 6091160 - DNA, 25 bp, Homo sapien
caacagccggtgtcggtaatgggcc

SEQ ID NO: 6091161 - DNA, 25 bp, Homo sapien
cagggcgtccagcacggtgatgcct

SEQ ID NO: 6091162 - DNA, 25 bp, Homo sapien
cgggagccagcccttcttgaatgaa

SEQ ID NO: 6091163 - DNA, 25 bp, Homo sapien
cctcacagtcgtagaatttttcgaa

SEQ ID NO: 6091164 - DNA, 25 bp, Homo sapien
catctcagaggttttgtgcgaggac

SEQ ID NO: 6091165 - DNA, 25 bp, Homo sapien
caaagcgggaaaactcctccaggct

SEQ ID NO: 6091166 - DNA, 25 bp, Homo sapien
cagacagatcatacttatggctggc

SEQ ID NO: 6091167 - DNA, 25 bp, Homo sapien
tagggagcacccttggaaacatcac

SEQ ID NO: 6091168 - DNA, 25 bp, Homo sapien
ttgtgcccactccatcaacttttgg

SEQ ID NO: 6091169 - DNA, 25 bp, Homo sapien
actgaccacgaagtaggcactgcca

SEQ ID NO: 6091170 - DNA, 25 bp, Homo sapien
catggactccatcgcagggcgggta

SEQ ID NO: 6091171 - DNA, 25 bp, Homo sapien
gctttccattaacgacctcataccg

SEQ ID NO: 6091172 - DNA, 25 bp, Homo sapien
agtgagcccgggacttcaggaatcc

SEQ ID NO: 6091173 - DNA, 25 bp, Homo sapien
tcatcagggctgtatgtgtcttgtg

SEQ ID NO: 6091174 - DNA, 25 bp, Homo sapien
caagtggtgtttgcgcagcatccag

SEQ ID NO: 6091175 - DNA, 25 bp, Homo sapien
ggatggcatcctctccgtttccagg

SEQ ID NO: 6091176 - DNA, 25 bp, Homo sapien
ttggaaacatcaccctcaaagtact

SEQ ID NO: 6091177 - DNA, 25 bp, Homo sapien
gctttgtgtctcaaatgctcatcca

SEQ ID NO: 6091178 - DNA, 25 bp, Homo sapien
gcgactgcgcgctgtaggcagaaaa

SEQ ID NO: 6091179 - DNA, 25 bp, Homo sapien
ccagctcgtaggtctgcgccttgga

SEQ ID NO: 6091180 - DNA, 25 bp, Homo sapien
tgggcgttgtactgcatgtgctgca

SEQ ID NO: 6091181 - DNA, 25 bp, Homo sapien
tactgaaggccctcggtgctggcca

SEQ ID NO: 6091182 - DNA, 25 bp, Homo sapien
gccgagctgtactgggcgttgtact

SEQ ID NO: 6091183 - DNA, 25 bp, Homo sapien
tggagaaaagcactcgccgctttcg

SEQ ID NO: 6091184 - DNA, 25 bp, Homo sapien
cccgggcgcgcttcatcttgtagcg

SEQ ID NO: 6091185 - DNA, 25 bp, Homo sapien
ctccttgtcattgtccggtgactcg

SEQ ID NO: 6091186 - DNA, 25 bp, Homo sapien
tttgccgtccctgaccaagacgggc

SEQ ID NO: 6091187 - DNA, 25 bp, Homo sapien
attgtccggtgactcgtcggccgag

SEQ ID NO: 6091188 - DNA, 25 bp, Homo sapien
cgtgacatggtttgccgtccctgac

SEQ ID NO: 6091189 - DNA, 25 bp, Homo sapien
tcctgggctttgagcgcgtgacatg

SEQ ID NO: 6091190 - DNA, 25 bp, Homo sapien
agcaagcgcagctggcgcgtagcca

SEQ ID NO: 6091191 - DNA, 25 bp, Homo sapien
ggtgcccatgatgagacccaaggtg

SEQ ID NO: 6091192 - DNA, 25 bp, Homo sapien
ccaaggtgcacagggcccggtgttc

SEQ ID NO: 6091193 - DNA, 25 bp, Homo sapien
gcataacctagccagttcagggcaa

SEQ ID NO: 6091194 - DNA, 25 bp, Homo sapien
agctggcgcgtagccaccacgaaaa

SEQ ID NO: 6091195 - DNA, 25 bp, Homo sapien
tgatgagacccaaggtgcacagggc

SEQ ID NO: 6091196 - DNA, 25 bp, Homo sapien
aaacccgcgcgtagacgaagagcat

SEQ ID NO: 6091197 - DNA, 25 bp, Homo sapien
cgggttgaaggcagaattggcataa

SEQ ID NO: 6091198 - DNA, 25 bp, Homo sapien
gaaggcagaattggcataacctagc

SEQ ID NO: 6091199 - DNA, 25 bp, Homo sapien
cgtagacgaagagcatcacgagaag

SEQ ID NO: 6091200 - DNA, 25 bp, Homo sapien
ggaaggcgctgcgaaagtccgggct

SEQ ID NO: 6091201 - DNA, 25 bp, Homo sapien
actcctcgggcggaaagcggcccag

SEQ ID NO: 6091202 - DNA, 25 bp, Homo sapien
tctgggcggacacgagcttgaagta

SEQ ID NO: 6091203 - DNA, 25 bp, Homo sapien
cagggtgcccggctgcttccagaag

SEQ ID NO: 6091204 - DNA, 25 bp, Homo sapien
tcatactgtctgaagttgggcatgg

SEQ ID NO: 6091205 - DNA, 25 bp, Homo sapien
cttccagaagaagccgtagagcgac

SEQ ID NO: 6091206 - DNA, 25 bp, Homo sapien
ggtactcctgctgcgtgccgtcgaa

SEQ ID NO: 6091207 - DNA, 25 bp, Homo sapien
ccagcgaccactgcaccaggatgtg

SEQ ID NO: 6091208 - DNA, 25 bp, Homo sapien
caggtcccgcttgtcctcgtagtca

SEQ ID NO: 6091209 - DNA, 25 bp, Homo sapien
tcaggccgcggatgtagttcaggtc

SEQ ID NO: 6091210 - DNA, 25 bp, Homo sapien
gcttgaagtagatgccctcgggcgt

SEQ ID NO: 6091211 - DNA, 25 bp, Homo sapien
ccggtcgtagttcttcagcaggtac

SEQ ID NO: 6091212 - DNA, 25 bp, Homo sapien
tacttgggcgcatacatgtgctcgc

SEQ ID NO: 6091213 - DNA, 25 bp, Homo sapien
cccagcgtgggaagtcgccattctg

SEQ ID NO: 6091214 - DNA, 25 bp, Homo sapien
ttcggaggcgtgtttccccttcgca

SEQ ID NO: 6091215 - DNA, 25 bp, Homo sapien
tcggtggtcacgtcgctgtcggatc

SEQ ID NO: 6091216 - DNA, 25 bp, Homo sapien
gatgggtcggtacttgttcaggtcc

SEQ ID NO: 6091217 - DNA, 25 bp, Homo sapien
ccacgtgcagggaaagggccgttca

SEQ ID NO: 6091218 - DNA, 25 bp, Homo sapien
acacagcggacagcggaactgcttt

SEQ ID NO: 6091219 - DNA, 25 bp, Homo sapien
tgtatgcactctgtaatgggctttg

SEQ ID NO: 6091220 - DNA, 25 bp, Homo sapien
tttccagactgtcgctgcacacgga

SEQ ID NO: 6091221 - DNA, 25 bp, Homo sapien
gaccagtgtgcagtaatccttccag

SEQ ID NO: 6091222 - DNA, 25 bp, Homo sapien
ggaaggactcgacccagattcggtg

SEQ ID NO: 6091223 - DNA, 25 bp, Homo sapien
tcgtctgagcgggagaactttttaa

SEQ ID NO: 6091224 - DNA, 25 bp, Homo sapien
aagcgttggccagcgcctttttcga

SEQ ID NO: 6091225 - DNA, 25 bp, Homo sapien
caacaagctcttggcgatggtgacc

SEQ ID NO: 6091226 - DNA, 25 bp, Homo sapien
gggaggcttacaggccactacgtaa

SEQ ID NO: 6091227 - DNA, 25 bp, Homo sapien
taaaggactctgtccaagtgtacag

SEQ ID NO: 6091228 - DNA, 25 bp, Homo sapien
ggcactgactgggatctctgccacc

SEQ ID NO: 6091229 - DNA, 25 bp, Homo sapien
gctgcatgtgctgaattttaaacca

SEQ ID NO: 6091230 - DNA, 25 bp, Homo sapien
ttgttctgtcgcttctctttgtacc

SEQ ID NO: 6091231 - DNA, 25 bp, Homo sapien
gagcttacacatggtcagggacacg

SEQ ID NO: 6091232 - DNA, 25 bp, Homo sapien
gcttgttaatgtttttcatggctga

SEQ ID NO: 6091233 - DNA, 25 bp, Homo sapien
tgtgctgaattttaaaccactgtga

SEQ ID NO: 6091234 - DNA, 25 bp, Homo sapien
gactctgtccaagtgtacaggaacc

SEQ ID NO: 6091235 - DNA, 25 bp, Homo sapien
gtttttatcgccattcttgcaggct

SEQ ID NO: 6091236 - DNA, 25 bp, Homo sapien
ggccactacgtaagacttgttctgt

SEQ ID NO: 6091237 - DNA, 25 bp, Homo sapien
ggcagtttttatcgccattcttgca

SEQ ID NO: 6091238 - DNA, 25 bp, Homo sapien
tgatctcaatcagcgaatactcccg

SEQ ID NO: 6091239 - DNA, 25 bp, Homo sapien
tcagcgaatactcccggaagatggc

SEQ ID NO: 6091240 - DNA, 25 bp, Homo sapien
gacatggttcttcaatttactccaa

SEQ ID NO: 6091241 - DNA, 25 bp, Homo sapien
gaaaatgatataatgcccagaggca

SEQ ID NO: 6091242 - DNA, 25 bp, Homo sapien
ctgtcaatgtcaacggcaagctgga

SEQ ID NO: 6091243 - DNA, 25 bp, Homo sapien
ccttcgctgatggtagtggtcattt

SEQ ID NO: 6091244 - DNA, 25 bp, Homo sapien
gaaggccgagaggaaagcctttctg

SEQ ID NO: 6091245 - DNA, 25 bp, Homo sapien
gacagtgccatagatgctcttctcc

SEQ ID NO: 6091246 - DNA, 25 bp, Homo sapien
gaagatgagtttgtactccttcagg

SEQ ID NO: 6091247 - DNA, 25 bp, Homo sapien
caaatgcgagtgtaggaaaatgata

SEQ ID NO: 6091248 - DNA, 25 bp, Homo sapien
gagtgaatggcatccaaccgctgct

SEQ ID NO: 6091249 - DNA, 25 bp, Homo sapien
gaatgtcacggacacctcagagtga

SEQ ID NO: 6091250 - DNA, 25 bp, Homo sapien
tctgggcggacacgagcttgaagta

SEQ ID NO: 6091251 - DNA, 25 bp, Homo sapien
cagggtgcccggctgcttccagaag

SEQ ID NO: 6091252 - DNA, 25 bp, Homo sapien
tcatactgtctgaagttgggcatgg

SEQ ID NO: 6091253 - DNA, 25 bp, Homo sapien
tcaggccgcggatgtagttcaggtc

SEQ ID NO: 6091254 - DNA, 25 bp, Homo sapien
caggtcccgcttgtcctcgtagtca

SEQ ID NO: 6091255 - DNA, 25 bp, Homo sapien
gcttgaagtagatgccctcgggcgt

SEQ ID NO: 6091256 - DNA, 25 bp, Homo sapien
ccagcgaccactgcaccaggatgtg

SEQ ID NO: 6091257 - DNA, 25 bp, Homo sapien
tacttgggcgcatacatgtgctcgc

SEQ ID NO: 6091258 - DNA, 25 bp, Homo sapien
cttccagaagaagccgtagagcgac

SEQ ID NO: 6091259 - DNA, 25 bp, Homo sapien
cccagcgtgggaagtcgccattctg

SEQ ID NO: 6091260 - DNA, 25 bp, Homo sapien
ggtactcctgctgcgtgccgtcgaa

SEQ ID NO: 6091261 - DNA, 25 bp, Homo sapien
ccggtcgtagttcttcagcaggtac

SEQ ID NO: 6091262 - DNA, 25 bp, Homo sapien
tcctcgccgttgatgatgatgtgca

SEQ ID NO: 6091263 - DNA, 25 bp, Homo sapien
cagctcatagagctggtccaagaga

SEQ ID NO: 6091264 - DNA, 25 bp, Homo sapien
tcggaggcagcacgttcagctcata

SEQ ID NO: 6091265 - DNA, 25 bp, Homo sapien
aatgcgaaactgctcaatgcgcaga

SEQ ID NO: 6091266 - DNA, 25 bp, Homo sapien
tccttaagttctttgggcaggtgga

SEQ ID NO: 6091267 - DNA, 25 bp, Homo sapien
tggagcccatcaatggccagccggt

SEQ ID NO: 6091268 - DNA, 25 bp, Homo sapien
tcctttgtatcactaggcggcacag

SEQ ID NO: 6091269 - DNA, 25 bp, Homo sapien
caatgcgcagatatggttccacgag

SEQ ID NO: 6091270 - DNA, 25 bp, Homo sapien
atactcgagctggacaaggcgcacg

SEQ ID NO: 6091271 - DNA, 25 bp, Homo sapien
caggttgaccagatcgggcagagaa

SEQ ID NO: 6091272 - DNA, 25 bp, Homo sapien
aaggcgcacgctctttgtggaagca

SEQ ID NO: 6091273 - DNA, 25 bp, Homo sapien
gatgatgtgcatgtcggccgtgcca

SEQ ID NO: 6091274 - DNA, 25 bp, Homo sapien
tactgaaggccctcggtgctggcca

SEQ ID NO: 6091275 - DNA, 25 bp, Homo sapien
gccgagctgtactgggcgttgtact

SEQ ID NO: 6091276 - DNA, 25 bp, Homo sapien
tcctgggctttgagcgcgtgacatg

SEQ ID NO: 6091277 - DNA, 25 bp, Homo sapien
attgtccggtgactcgtcggccgag

SEQ ID NO: 6091278 - DNA, 25 bp, Homo sapien
ccagctcgtaggtctgcgccttgga

SEQ ID NO: 6091279 - DNA, 25 bp, Homo sapien
tgggcgttgtactgcatgtgctgca

SEQ ID NO: 6091280 - DNA, 25 bp, Homo sapien
tttgccgtccctgaccaagacgggc

SEQ ID NO: 6091281 - DNA, 25 bp, Homo sapien
cgtgacatggtttgccgtccctgac

SEQ ID NO: 6091282 - DNA, 25 bp, Homo sapien
ctccttgtcattgtccggtgactcg

SEQ ID NO: 6091283 - DNA, 25 bp, Homo sapien
tggagaaaagcactcgccgctttcg

SEQ ID NO: 6091284 - DNA, 25 bp, Homo sapien
gcgactgcgcgctgtaggcagaaaa

SEQ ID NO: 6091285 - DNA, 25 bp, Homo sapien
cccgggcgcgcttcatcttgtagcg

SEQ ID NO: 6091286 - DNA, 25 bp, Homo sapien
cataaagatggtgaatgggatcaac

SEQ ID NO: 6091287 - DNA, 25 bp, Homo sapien
ggcttatgctacatccatccaagat

SEQ ID NO: 6091288 - DNA, 25 bp, Homo sapien
taagtcagctgttggcttatgctac

SEQ ID NO: 6091289 - DNA, 25 bp, Homo sapien
tgggatcaacaagcctaaaatgttc

SEQ ID NO: 6091290 - DNA, 25 bp, Homo sapien
tcttcagaggccacttggtaaaaca

SEQ ID NO: 6091291 - DNA, 25 bp, Homo sapien
tctgtgacatgggtggcataagtca

SEQ ID NO: 6091292 - DNA, 25 bp, Homo sapien
gagcaccaacctgatggccttggtc

SEQ ID NO: 6091293 - DNA, 25 bp, Homo sapien
ccaacaaaagcatagataacagggt

SEQ ID NO: 6091294 - DNA, 25 bp, Homo sapien
cctaggtagttgaagatttggctgc

SEQ ID NO: 6091295 - DNA, 25 bp, Homo sapien
tggtaaaacactagcaatgggatgg

SEQ ID NO: 6091296 - DNA, 25 bp, Homo sapien
aaatgtagtctacgctggaggaacg

SEQ ID NO: 6091297 - DNA, 25 bp, Homo sapien
aagaaccacgttgaatgggacccag

SEQ ID NO: 6091298 - DNA, 25 bp, Homo sapien
caggagggccaccagtaaagcaaag

SEQ ID NO: 6091299 - DNA, 25 bp, Homo sapien
tgcggaccccggtacctgagtagaa

SEQ ID NO: 6091300 - DNA, 25 bp, Homo sapien
taacttcgcaggtactcgtctgagg

SEQ ID NO: 6091301 - DNA, 25 bp, Homo sapien
catgctgtagatgaaataacttcgc

SEQ ID NO: 6091302 - DNA, 25 bp, Homo sapien
taatccgtaacagcccagaatcagc

SEQ ID NO: 6091303 - DNA, 25 bp, Homo sapien
tctcccgccaagaaatagagaatgg

SEQ ID NO: 6091304 - DNA, 25 bp, Homo sapien
gccacggtcgtgcacatgctgtaga

SEQ ID NO: 6091305 - DNA, 25 bp, Homo sapien
tgtcacctgatacgtggcataaacc

SEQ ID NO: 6091306 - DNA, 25 bp, Homo sapien
actcgtctgaggtggtgtcgtaaca

SEQ ID NO: 6091307 - DNA, 25 bp, Homo sapien
ggacacagaacatggccacggtcgt

SEQ ID NO: 6091308 - DNA, 25 bp, Homo sapien
ttccttgtggctcgggagagtctcc

SEQ ID NO: 6091309 - DNA, 25 bp, Homo sapien
tctgaaaatcaagccgggccctcaa

SEQ ID NO: 6091310 - DNA, 25 bp, Homo sapien
ggtaaatcgattttctcctcagagg

SEQ ID NO: 6091311 - DNA, 25 bp, Homo sapien
gcacagtggccgtccattggcacgg

SEQ ID NO: 6091312 - DNA, 25 bp, Homo sapien
ctgccgctcctggaagttgctgacc

SEQ ID NO: 6091313 - DNA, 25 bp, Homo sapien
gatggcacagaaacgttcccgccag

SEQ ID NO: 6091314 - DNA, 25 bp, Homo sapien
caaagaagcgttggtatcggctctc

SEQ ID NO: 6091315 - DNA, 25 bp, Homo sapien
aaggtcctcatagacttggctgcgg

SEQ ID NO: 6091316 - DNA, 25 bp, Homo sapien
tcatccacatgcacgaaggcgtcag

SEQ ID NO: 6091317 - DNA, 25 bp, Homo sapien
caaagacatccacccgcagatgagg

SEQ ID NO: 6091318 - DNA, 25 bp, Homo sapien
tctccgtaatgtagtcgcggtgctg

SEQ ID NO: 6091319 - DNA, 25 bp, Homo sapien
ctccaggcggccatagggcacaaag

SEQ ID NO: 6091320 - DNA, 25 bp, Homo sapien
agccggcacgaaggcctcataggtg

SEQ ID NO: 6091321 - DNA, 25 bp, Homo sapien
cattcatgccagtgaggaaagccgc

SEQ ID NO: 6091322 - DNA, 25 bp, Homo sapien
agtgcgttgcgccagaatttctccg

SEQ ID NO: 6091323 - DNA, 25 bp, Homo sapien
tctgagtagttctgacttgccagcc

SEQ ID NO: 6091324 - DNA, 25 bp, Homo sapien
cctgtgacagggaaatagcagccac

SEQ ID NO: 6091325 - DNA, 25 bp, Homo sapien
tccctgttgcagagccacataatca

SEQ ID NO: 6091326 - DNA, 25 bp, Homo sapien
ttggctggcttgagtcatgtgccca

SEQ ID NO: 6091327 - DNA, 25 bp, Homo sapien
tgtcacagtgcctcaggacacgtgg

SEQ ID NO: 6091328 - DNA, 25 bp, Homo sapien
gacactgggcagaccaaagcaatgg

SEQ ID NO: 6091329 - DNA, 25 bp, Homo sapien
tttaactaagcaagtactaccaggc

SEQ ID NO: 6091330 - DNA, 25 bp, Homo sapien
tagcagccacagatgtttaactaag

SEQ ID NO: 6091331 - DNA, 25 bp, Homo sapien
tatcaaaagatagggagacagacac

SEQ ID NO: 6091332 - DNA, 25 bp, Homo sapien
gacaggacatgtcaaggccaagagt

SEQ ID NO: 6091333 - DNA, 25 bp, Homo sapien
tgtgcccatattgacatagtgctgg

SEQ ID NO: 6091334 - DNA, 25 bp, Homo sapien
aaggccaagagtcaggacacctgtc

SEQ ID NO: 6091335 - DNA, 25 bp, Homo sapien
cgcagtgtgcccatggagttctcca

SEQ ID NO: 6091336 - DNA, 25 bp, Homo sapien
cacgatcacgtacaccagtgggttg

SEQ ID NO: 6091337 - DNA, 25 bp, Homo sapien
tgcatctcgttgttccgcagcacct

SEQ ID NO: 6091338 - DNA, 25 bp, Homo sapien
agacttctttcggaagcgcttgccc

SEQ ID NO: 6091339 - DNA, 25 bp, Homo sapien
atgccgaggcgatgcagcgtatcca

SEQ ID NO: 6091340 - DNA, 25 bp, Homo sapien
tacatcgatgatgcgctcgtcctgg

SEQ ID NO: 6091341 - DNA, 25 bp, Homo sapien
agcacaaccaggactagcaccgtgg

SEQ ID NO: 6091342 - DNA, 25 bp, Homo sapien
gctgtactccttcatggtccggaac

SEQ ID NO: 6091343 - DNA, 25 bp, Homo sapien
gaatctggcgttccacggagatgga

SEQ ID NO: 6091344 - DNA, 25 bp, Homo sapien
gcagcacctgcatgatctgcatcgt

SEQ ID NO: 6091345 - DNA, 25 bp, Homo sapien
acaagcggtgacgttgtggccctca

SEQ ID NO: 6091346 - DNA, 25 bp, Homo sapien
catgaaggaggcgatctgtgtgatt

SEQ ID NO: 6091347 - DNA, 25 bp, Homo sapien
tctcccgccaagaaatagagaatgg

SEQ ID NO: 6091348 - DNA, 25 bp, Homo sapien
taatccgtaacagcccagaatcagc

SEQ ID NO: 6091349 - DNA, 25 bp, Homo sapien
ttccttgtggctcgggagagtctcc

SEQ ID NO: 6091350 - DNA, 25 bp, Homo sapien
taacttcgcaggtactcgtctgagg

SEQ ID NO: 6091351 - DNA, 25 bp, Homo sapien
ggtaaatcgattttctcctcagagg

SEQ ID NO: 6091352 - DNA, 25 bp, Homo sapien
ggacacagaacatggccacggtcgt

SEQ ID NO: 6091353 - DNA, 25 bp, Homo sapien
actcgtctgaggtggtgtcgtaaca

SEQ ID NO: 6091354 - DNA, 25 bp, Homo sapien
tgcggaccccggtacctgagtagaa

SEQ ID NO: 6091355 - DNA, 25 bp, Homo sapien
tgtcacctgatacgtggcataaacc

SEQ ID NO: 6091356 - DNA, 25 bp, Homo sapien
tctgaaaatcaagccgggccctcaa

SEQ ID NO: 6091357 - DNA, 25 bp, Homo sapien
gccacggtcgtgcacatgctgtaga

SEQ ID NO: 6091358 - DNA, 25 bp, Homo sapien
catgctgtagatgaaataacttcgc

SEQ ID NO: 6091359 - DNA, 25 bp, Homo sapien
tccaaagaatatggtgacagccatg

SEQ ID NO: 6091360 - DNA, 25 bp, Homo sapien
catgaagaggattgttccaaagaat

SEQ ID NO: 6091361 - DNA, 25 bp, Homo sapien
gggatttagcacagggattattact

SEQ ID NO: 6091362 - DNA, 25 bp, Homo sapien
caagacggcaatgaagatacacagg

SEQ ID NO: 6091363 - DNA, 25 bp, Homo sapien
taagaaggaggtagctattagcaaa

SEQ ID NO: 6091364 - DNA, 25 bp, Homo sapien
gaggacaatcataacacagctgatg

SEQ ID NO: 6091365 - DNA, 25 bp, Homo sapien
cagacacgagaactgggtagagcag

SEQ ID NO: 6091366 - DNA, 25 bp, Homo sapien
catatgccatcatggccaacaggaa

SEQ ID NO: 6091367 - DNA, 25 bp, Homo sapien
ttgtgcctgccctctaacgaaggca

SEQ ID NO: 6091368 - DNA, 25 bp, Homo sapien
taacgaaggcatcttcaagacggca

SEQ ID NO: 6091369 - DNA, 25 bp, Homo sapien
tgccattgaagtgggtatcagagca

SEQ ID NO: 6091370 - DNA, 25 bp, Homo sapien
cattgagtagctagatgtagggcgc

SEQ ID NO: 6091371 - DNA, 25 bp, Homo sapien
gtaagcctctagttgccattcaagt

SEQ ID NO: 6091372 - DNA, 25 bp, Homo sapien
ccctagcgcagtgatgttgtaatac

SEQ ID NO: 6091373 - DNA, 25 bp, Homo sapien
aggaaggagattcagcccaactggc

SEQ ID NO: 6091374 - DNA, 25 bp, Homo sapien
ggtgttctgtgtgcagctgtacaat

SEQ ID NO: 6091375 - DNA, 25 bp, Homo sapien
agaacagcaccatgaagcaccctag

SEQ ID NO: 6091376 - DNA, 25 bp, Homo sapien
gccgcgcaccgagaggtacagagtt

SEQ ID NO: 6091377 - DNA, 25 bp, Homo sapien
aacgaggttggaacggtcttcacag

SEQ ID NO: 6091378 - DNA, 25 bp, Homo sapien
gaaatctcatgacgaaactgacagt

SEQ ID NO: 6091379 - DNA, 25 bp, Homo sapien
aacccataccataaagtcagctgcc

SEQ ID NO: 6091380 - DNA, 25 bp, Homo sapien
gagttacatacctgaagttcaaaaa

SEQ ID NO: 6091381 - DNA, 25 bp, Homo sapien
tgacagtcatatccagaaaagaaga

SEQ ID NO: 6091382 - DNA, 25 bp, Homo sapien
gaaagagttcgaaatgagagcaaga

SEQ ID NO: 6091383 - DNA, 25 bp, Homo sapien
gcctatgaataaaagcagacccgtt

SEQ ID NO: 6091384 - DNA, 25 bp, Homo sapien
ttataaagatccctgcggctgccgt

SEQ ID NO: 6091385 - DNA, 25 bp, Homo sapien
aatgttcagaaaccaaatcttgttc

SEQ ID NO: 6091386 - DNA, 25 bp, Homo sapien
cattggactcttttaagcagtgtct

SEQ ID NO: 6091387 - DNA, 25 bp, Homo sapien
acagatttaagatgtctcggagaca

SEQ ID NO: 6091388 - DNA, 25 bp, Homo sapien
attttgcttaagcaactgagagttc

SEQ ID NO: 6091389 - DNA, 25 bp, Homo sapien
gcagacccgttttagactggatgca

SEQ ID NO: 6091390 - DNA, 25 bp, Homo sapien
catactgcattggactcttttaagc

SEQ ID NO: 6091391 - DNA, 25 bp, Homo sapien
taaggactaagacccaatgttcaga

SEQ ID NO: 6091392 - DNA, 25 bp, Homo sapien
agatgtctcggagacagctgatgga

SEQ ID NO: 6091393 - DNA, 25 bp, Homo sapien
catggcagatctgttaagcacaaaa

SEQ ID NO: 6091394 - DNA, 25 bp, Homo sapien
ctgcggctgccgtcagtgattgtag

SEQ ID NO: 6091395 - DNA, 25 bp, Homo sapien
tctgggcaaaccgactggtgatggc

SEQ ID NO: 6091396 - DNA, 25 bp, Homo sapien
tgtgcagtaaactgcgccttctgct

SEQ ID NO: 6091397 - DNA, 25 bp, Homo sapien
tatcccaacataactccatgaagtg

SEQ ID NO: 6091398 - DNA, 25 bp, Homo sapien
cagctggagagacaattttcagtgc

SEQ ID NO: 6091399 - DNA, 25 bp, Homo sapien
ctgtgcagtaaactgcgccttctgc

SEQ ID NO: 6091400 - DNA, 25 bp, Homo sapien
gtgcagtaaactgcgccttctgctg

SEQ ID NO: 6091401 - DNA, 25 bp, Homo sapien
aatctgggcaaaccgactggtgatg

SEQ ID NO: 6091402 - DNA, 25 bp, Homo sapien
caaaccgactggtgatggcaagagt

SEQ ID NO: 6091403 - DNA, 25 bp, Homo sapien
aaaccgactggtgatggcaagagtg

SEQ ID NO: 6091404 - DNA, 25 bp, Homo sapien
tttatcccaacataactccatgaag

SEQ ID NO: 6091405 - DNA, 25 bp, Homo sapien
ggcaaaccgactggtgatggcaaga

SEQ ID NO: 6091406 - DNA, 25 bp, Homo sapien
acatttatcccaacataactccatg

SEQ ID NO: 6091407 - DNA, 25 bp, Homo sapien
gtcatctcgcttctgcggccgagac

SEQ ID NO: 6091408 - DNA, 25 bp, Homo sapien
ttgcgacgctttccaaacgatgacg

SEQ ID NO: 6091409 - DNA, 25 bp, Homo sapien
cacagcggcggcacaacgtgtgcgt

SEQ ID NO: 6091410 - DNA, 25 bp, Homo sapien
ttcgtcatctcgcttctgcggccga

SEQ ID NO: 6091411 - DNA, 25 bp, Homo sapien
cttagagccacagcggcggcacaac

SEQ ID NO: 6091412 - DNA, 25 bp, Homo sapien
cgtcatctcgcttctgcggccgaga

SEQ ID NO: 6091413 - DNA, 25 bp, Homo sapien
cggcggcacaacgtgtgcgtcttat

SEQ ID NO: 6091414 - DNA, 25 bp, Homo sapien
tcgtcatctcgcttctgcggccgag

SEQ ID NO: 6091415 - DNA, 25 bp, Homo sapien
tcattcgaccagttccggtggtatt

SEQ ID NO: 6091416 - DNA, 25 bp, Homo sapien
atctcgcttctgcggccgagaccag

SEQ ID NO: 6091417 - DNA, 25 bp, Homo sapien
gcatgactaatcgttgacattctta

SEQ ID NO: 6091418 - DNA, 25 bp, Homo sapien
ttcccttcgtcatctcgcttctgcg

SEQ ID NO: 6091419 - DNA, 25 bp, Homo sapien
gctgccattgcattgtttccgtttg

SEQ ID NO: 6091420 - DNA, 25 bp, Homo sapien
tcctctggcgtgacctggatgccaa

SEQ ID NO: 6091421 - DNA, 25 bp, Homo sapien
gcttttttcatctcgattggtgaag

SEQ ID NO: 6091422 - DNA, 25 bp, Homo sapien
ttctggagctcccaacgggccgtgg

SEQ ID NO: 6091423 - DNA, 25 bp, Homo sapien
tccgtttgtgctcgataaaaataag

SEQ ID NO: 6091424 - DNA, 25 bp, Homo sapien
gaattcccgtttgcttaagtgctgg

SEQ ID NO: 6091425 - DNA, 25 bp, Homo sapien
ggcaaattcctctagatgacgttga

SEQ ID NO: 6091426 - DNA, 25 bp, Homo sapien
tggatgccaacctccacgggattgg

SEQ ID NO: 6091427 - DNA, 25 bp, Homo sapien
cacaggtgaggaggtcatgatcccc

SEQ ID NO: 6091428 - DNA, 25 bp, Homo sapien
caacgggccgtggtctggttcatca

SEQ ID NO: 6091429 - DNA, 25 bp, Homo sapien
gataaacaatcgtcatcctctggcg

SEQ ID NO: 6091430 - DNA, 25 bp, Homo sapien
ttttctaagcagaggctgccattgc

SEQ ID NO: 6091431 - DNA, 25 bp, Homo sapien
tgtgctgaggttcggcagctcctgc

SEQ ID NO: 6091432 - DNA, 25 bp, Homo sapien
ccgggattcccgagtcacgttgttg

SEQ ID NO: 6091433 - DNA, 25 bp, Homo sapien
cgagtaggcgttggctatgtagcct

SEQ ID NO: 6091434 - DNA, 25 bp, Homo sapien
tggctatgtagcctccggtcaccag

SEQ ID NO: 6091435 - DNA, 25 bp, Homo sapien
cgagtcacgttgttgggcatcgaga

SEQ ID NO: 6091436 - DNA, 25 bp, Homo sapien
tgtagcactccacggtgagcacgtc

SEQ ID NO: 6091437 - DNA, 25 bp, Homo sapien
tgtcgctcagcgtgaccgcgcagtg

SEQ ID NO: 6091438 - DNA, 25 bp, Homo sapien
ggcgtcttcggctgccactgattgg

SEQ ID NO: 6091439 - DNA, 25 bp, Homo sapien
attggtggagggcacgtagcactcc

SEQ ID NO: 6091440 - DNA, 25 bp, Homo sapien
tcgtaggcgcacacagagcgcgagt

SEQ ID NO: 6091441 - DNA, 25 bp, Homo sapien
ggcagctcctgccacgagtcgctgg

SEQ ID NO: 6091442 - DNA, 25 bp, Homo sapien
ccgacagtggcctcgggtagctcgt

SEQ ID NO: 6091443 - DNA, 25 bp, Homo sapien
tatagccctgtgagtcagccagacg

SEQ ID NO: 6091444 - DNA, 25 bp, Homo sapien
agccctgtgccctggatgcttggcg

SEQ ID NO: 6091445 - DNA, 25 bp, Homo sapien
aatctgtgagcaaccagccctgtgc

SEQ ID NO: 6091446 - DNA, 25 bp, Homo sapien
aacgcggccctgataaacttgagtg

SEQ ID NO: 6091447 - DNA, 25 bp, Homo sapien
gggcaagcctccaactcaccagttg

SEQ ID NO: 6091448 - DNA, 25 bp, Homo sapien
aaggaattctcctgtctcggcctcc

SEQ ID NO: 6091449 - DNA, 25 bp, Homo sapien
tctggctctctgtctgctgctatag

SEQ ID NO: 6091450 - DNA, 25 bp, Homo sapien
cagtagaatgtttagaacgcggccc

SEQ ID NO: 6091451 - DNA, 25 bp, Homo sapien
gaggtgctacctcgctcaatctgtg

SEQ ID NO: 6091452 - DNA, 25 bp, Homo sapien
cgtgcccagcctcacctaatggttt

SEQ ID NO: 6091453 - DNA, 25 bp, Homo sapien
aaagacagtgttatgtgggcaagcc

SEQ ID NO: 6091454 - DNA, 25 bp, Homo sapien
caccagttgcagtagagcatctggc

SEQ ID NO: 6091455 - DNA, 25 bp, Homo sapien
ccgttagacactcgcacgtttgaca

SEQ ID NO: 6091456 - DNA, 25 bp, Homo sapien
ttccttattcctgcgcattgctccg

SEQ ID NO: 6091457 - DNA, 25 bp, Homo sapien
tccaggctagggctcccgttagaca

SEQ ID NO: 6091458 - DNA, 25 bp, Homo sapien
ctgctccacagaaccggcatttggg

SEQ ID NO: 6091459 - DNA, 25 bp, Homo sapien
ccgtctggctgtccgacggatcagt

SEQ ID NO: 6091460 - DNA, 25 bp, Homo sapien
gggtccaccaaatgcgtgtcctcag

SEQ ID NO: 6091461 - DNA, 25 bp, Homo sapien
cagagttagccggagccccaattaa

SEQ ID NO: 6091462 - DNA, 25 bp, Homo sapien
cgtcggttgcaggtcgcttccttat

SEQ ID NO: 6091463 - DNA, 25 bp, Homo sapien
gacggatcagtctttgggtccacca

SEQ ID NO: 6091464 - DNA, 25 bp, Homo sapien
caccgggccgaagaggttcctgcag

SEQ ID NO: 6091465 - DNA, 25 bp, Homo sapien
tcgaaattccacttgcgctggctcg

SEQ ID NO: 6091466 - DNA, 25 bp, Homo sapien
ccaaatgcgtgtcctcagagttagc

SEQ ID NO: 6091467 - DNA, 25 bp, Homo sapien
cacacacaatatggattctgaggac

SEQ ID NO: 6091468 - DNA, 25 bp, Homo sapien
tgaaaccgtgcaagctgcccagata

SEQ ID NO: 6091469 - DNA, 25 bp, Homo sapien
gatgatgacagcactactatctgag

SEQ ID NO: 6091470 - DNA, 25 bp, Homo sapien
gcagacaacaaagacgccaatcagg

SEQ ID NO: 6091471 - DNA, 25 bp, Homo sapien
tgatgatcccaacccgcttaactgt

SEQ ID NO: 6091472 - DNA, 25 bp, Homo sapien
caggatggtcaaggtaatcgctccc

SEQ ID NO: 6091473 - DNA, 25 bp, Homo sapien
caaatggatgcaagcaaggagctac

SEQ ID NO: 6091474 - DNA, 25 bp, Homo sapien
tgactccggagtgcataaatcagag

SEQ ID NO: 6091475 - DNA, 25 bp, Homo sapien
cataatgttatggtactggagagca

SEQ ID NO: 6091476 - DNA, 25 bp, Homo sapien
gatagtaaagtacctgtccactgca

SEQ ID NO: 6091477 - DNA, 25 bp, Homo sapien
caaggagctacagatcaccgagtca

SEQ ID NO: 6091478 - DNA, 25 bp, Homo sapien
tcatattggcaccttggcggatggc

SEQ ID NO: 6091479 - DNA, 25 bp, Homo sapien
ggaaggtgtcacaggaggatatttc

SEQ ID NO: 6091480 - DNA, 25 bp, Homo sapien
ggggaaggtgtcacaggaggatatt

SEQ ID NO: 6091481 - DNA, 25 bp, Homo sapien
gggaaggtgtcacaggaggatattt

SEQ ID NO: 6091482 - DNA, 25 bp, Homo sapien
gtagctactatgctgaaccttcagg

SEQ ID NO: 6091483 - DNA, 25 bp, Homo sapien
ccactcaggacttgatggtcactgc

SEQ ID NO: 6091484 - DNA, 25 bp, Homo sapien
gatggtcactgcttgtccagatgac

SEQ ID NO: 6091485 - DNA, 25 bp, Homo sapien
cacagtaattcgcttgtagtcggca

SEQ ID NO: 6091486 - DNA, 25 bp, Homo sapien
tagtcggcaccaccatagctgatca

SEQ ID NO: 6091487 - DNA, 25 bp, Homo sapien
aacagccgggccctctgtctgtagc

SEQ ID NO: 6091488 - DNA, 25 bp, Homo sapien
tgatctgaagtgcagcatttcccag

SEQ ID NO: 6091489 - DNA, 25 bp, Homo sapien
tgggatgaccaattcagctgtatgg

SEQ ID NO: 6091490 - DNA, 25 bp, Homo sapien
gtcttcctctccatgcacaaattga

SEQ ID NO: 6091491 - DNA, 25 bp, Homo sapien
tagctgatcatgcagcggtacaccc

SEQ ID NO: 6091492 - DNA, 25 bp, Homo sapien
tgagtttgtatcttggatgccacat

SEQ ID NO: 6091493 - DNA, 25 bp, Homo sapien
cccaatagacaattagtgcagccag

SEQ ID NO: 6091494 - DNA, 25 bp, Homo sapien
aggatctaatctccactcaggactt

SEQ ID NO: 6091495 - DNA, 25 bp, Homo sapien
ggatctaatctccactcaggacttg

SEQ ID NO: 6091496 - DNA, 25 bp, Homo sapien
gatctaatctccactcaggacttga

SEQ ID NO: 6091497 - DNA, 25 bp, Homo sapien
gaaacagctcaatgatatcaggcca

SEQ ID NO: 6091498 - DNA, 25 bp, Homo sapien
tgtactgtagtgcagaggcttacat

SEQ ID NO: 6091499 - DNA, 25 bp, Homo sapien
gagcctccggttcataattgtactg

SEQ ID NO: 6091500 - DNA, 25 bp, Homo sapien
aagaagctatccacctcattgggac

SEQ ID NO: 6091501 - DNA, 25 bp, Homo sapien
gaatggcaggtccactgtaaaagcc

SEQ ID NO: 6091502 - DNA, 25 bp, Homo sapien
gaccactgtgatgtgggcagttaat

SEQ ID NO: 6091503 - DNA, 25 bp, Homo sapien
gccaagtggctcacagaatgaagaa

SEQ ID NO: 6091504 - DNA, 25 bp, Homo sapien
catcggacaccgatcaaaatgatgg

SEQ ID NO: 6091505 - DNA, 25 bp, Homo sapien
gaaataaatgcaaggcccgaagaaa

SEQ ID NO: 6091506 - DNA, 25 bp, Homo sapien
caggccactgttcgttagggtcata

SEQ ID NO: 6091507 - DNA, 25 bp, Homo sapien
gaaagagccttagatgacccactgg

SEQ ID NO: 6091508 - DNA, 25 bp, Homo sapien
tcaacaagggagtacaaacagtgta

SEQ ID NO: 6091509 - DNA, 25 bp, Homo sapien
tcacaccataaataacagagttggc

SEQ ID NO: 6091510 - DNA, 25 bp, Homo sapien
agcccacaagcagactgtacaaagt

SEQ ID NO: 6091511 - DNA, 25 bp, Homo sapien
ggcgggcgcggaggccaggacttgc

SEQ ID NO: 6091512 - DNA, 25 bp, Homo sapien
aggaatcagggcctggggtccctgg

SEQ ID NO: 6091513 - DNA, 25 bp, Homo sapien
ggccgagggcacctccagggggtca

SEQ ID NO: 6091514 - DNA, 25 bp, Homo sapien
ctggaccacagccaccccctcccct

SEQ ID NO: 6091515 - DNA, 25 bp, Homo sapien
aaatatgatctccagacatctcact

SEQ ID NO: 6091516 - DNA, 25 bp, Homo sapien
ttcacacaaacacaggtactgaata

SEQ ID NO: 6091517 - DNA, 25 bp, Homo sapien
tgcctccccactgtcccctggggct

SEQ ID NO: 6091518 - DNA, 25 bp, Homo sapien
ttctgacaggcggggccaggacaga

SEQ ID NO: 6091519 - DNA, 25 bp, Homo sapien
cggcgggtacggctcgcgtgggcgg

SEQ ID NO: 6091520 - DNA, 25 bp, Homo sapien
cccctggggcttgggagaggcagac

SEQ ID NO: 6091521 - DNA, 25 bp, Homo sapien
ccggtgggccgagggcacctccagg

SEQ ID NO: 6091522 - DNA, 25 bp, Homo sapien
atgcctgcacacaccgcattcacac

SEQ ID NO: 6091523 - DNA, 25 bp, Homo sapien
accgcattcacacaaacacaggtac

SEQ ID NO: 6091524 - DNA, 25 bp, Homo sapien
ccagctttcagagcccacaagcaga

SEQ ID NO: 6091525 - DNA, 25 bp, Homo sapien
gacgccaggcacaggaatcagggcc

SEQ ID NO: 6091526 - DNA, 25 bp, Homo sapien
ataaaaaaatatgatctccagacat

SEQ ID NO: 6091527 - DNA, 25 bp, Homo sapien
cacagccaccccctcccctgcctcc

SEQ ID NO: 6091528 - DNA, 25 bp, Homo sapien
gagggcacctccagggggtcacacc

SEQ ID NO: 6091529 - DNA, 25 bp, Homo sapien
cataaataacagagttggcggcggg

SEQ ID NO: 6091530 - DNA, 25 bp, Homo sapien
tgtcagggtcacccactccccttaa

SEQ ID NO: 6091531 - DNA, 25 bp, Homo sapien
tgtgcaggacgtgcccagacgcaca

SEQ ID NO: 6091532 - DNA, 25 bp, Homo sapien
tatgtacaaaaacattttaattgaa

SEQ ID NO: 6091533 - DNA, 25 bp, Homo sapien
cattttaattgaaatacctgtataa

SEQ ID NO: 6091534 - DNA, 25 bp, Homo sapien
ctggaagtgtcagggtcacccactc

SEQ ID NO: 6091535 - DNA, 25 bp, Homo sapien
gccaggacttgcattgtgtgtgcag

SEQ ID NO: 6091536 - DNA, 25 bp, Homo sapien
gatctccagacatctcacttttgaa

SEQ ID NO: 6091537 - DNA, 25 bp, Homo sapien
cactccccttaagttagccactata

SEQ ID NO: 6091538 - DNA, 25 bp, Homo sapien
gcacacaccgcattcacacaaacac

SEQ ID NO: 6091539 - DNA, 25 bp, Homo sapien
aaaccctgggcacagtgcctggaag

SEQ ID NO: 6091540 - DNA, 25 bp, Homo sapien
caccccctcccctgcctccccactg

SEQ ID NO: 6091541 - DNA, 25 bp, Homo sapien
taacagagttggcggcgggtacggc

SEQ ID NO: 6091542 - DNA, 25 bp, Homo sapien
cagtgcctggaagtgtcagggtcac

SEQ ID NO: 6091543 - DNA, 25 bp, Homo sapien
acctgtataaaaaaatatgatctcc

SEQ ID NO: 6091544 - DNA, 25 bp, Homo sapien
caggcggggccaggacagacgccag

SEQ ID NO: 6091545 - DNA, 25 bp, Homo sapien
caataaatagccccggtgggccgag

SEQ ID NO: 6091546 - DNA, 25 bp, Homo sapien
aggcacaggaatcagggcctggggt

SEQ ID NO: 6091547 - DNA, 25 bp, Homo sapien
agggggtcacaccataaataacaga

SEQ ID NO: 6091548 - DNA, 25 bp, Homo sapien
acctccagggggtcacaccataaat

SEQ ID NO: 6091549 - DNA, 25 bp, Homo sapien
acttgcattgtgtgtgcaggacgtg

SEQ ID NO: 6091550 - DNA, 25 bp, Homo sapien
tgggcgggcgggcgcggaggccagg

SEQ ID NO: 6091551 - DNA, 25 bp, Homo sapien
gggcttgggagaggcagactgctca

SEQ ID NO: 6091552 - DNA, 25 bp, Homo sapien
ccactgtcccctggggcttgggaga

SEQ ID NO: 6091553 - DNA, 25 bp, Homo sapien
cagacatctcacttttgaactgaaa

SEQ ID NO: 6091554 - DNA, 25 bp, Homo sapien
aattaaacgctcaggctctggcccc

SEQ ID NO: 6091555 - DNA, 25 bp, Homo sapien
tctgcgatgcctgcacacaccgcat

SEQ ID NO: 6091556 - DNA, 25 bp, Homo sapien
tttcagagcccacaagcagactgta

SEQ ID NO: 6091557 - DNA, 25 bp, Homo sapien
gaactgaaagaacccccatctgcga

SEQ ID NO: 6091558 - DNA, 25 bp, Homo sapien
ctcgcgtgggcgggcgggcgcggag

SEQ ID NO: 6091559 - DNA, 25 bp, Homo sapien
ttcatcttctgacaggcggggccag

SEQ ID NO: 6091560 - DNA, 25 bp, Homo sapien
ccagacgcacaccgcaggactgagg

SEQ ID NO: 6091561 - DNA, 25 bp, Homo sapien
caagcagactgtacaaagtcaataa

SEQ ID NO: 6091562 - DNA, 25 bp, Homo sapien
tctcacttttgaactgaaagaaccc

SEQ ID NO: 6091563 - DNA, 25 bp, Homo sapien
gactgtacaaagtcaataatttaaa

SEQ ID NO: 6091564 - DNA, 25 bp, Homo sapien
tggggtccctggaccacagccaccc

SEQ ID NO: 6091565 - DNA, 25 bp, Homo sapien
tgggcacagtgcctggaagtgtcag

SEQ ID NO: 6091566 - DNA, 25 bp, Homo sapien
ccccttaagttagccactatacatg

SEQ ID NO: 6091567 - DNA, 25 bp, Homo sapien
tacatgttcatcttctgacaggcgg

SEQ ID NO: 6091568 - DNA, 25 bp, Homo sapien
attgtgtgtgcaggacgtgcccaga

SEQ ID NO: 6091569 - DNA, 25 bp, Homo sapien
aggacagacgccaggcacaggaatc

SEQ ID NO: 6091570 - DNA, 25 bp, Homo sapien
ccactatacatgttcatcttctgac

SEQ ID NO: 6091571 - DNA, 25 bp, Homo sapien
cagaggaaataacctcaacaaataa

SEQ ID NO: 6091572 - DNA, 25 bp, Homo sapien
cccaccccagctttcagagcccaca

SEQ ID NO: 6091573 - DNA, 25 bp, Homo sapien
tgaaatacctgtataaaaaaatatg

SEQ ID NO: 6091574 - DNA, 25 bp, Homo sapien
aggtactgaataaattaaacgctca

SEQ ID NO: 6091575 - DNA, 25 bp, Homo sapien
acgctcaggctctggccccacccca

SEQ ID NO: 6091576 - DNA, 25 bp, Homo sapien
ctggccccaccccagctttcagagc

SEQ ID NO: 6091577 - DNA, 25 bp, Homo sapien
gcggaggccaggacttgcattgtgt

SEQ ID NO: 6091578 - DNA, 25 bp, Homo sapien
caaacacaggtactgaataaattaa

SEQ ID NO: 6091579 - DNA, 25 bp, Homo sapien
tcacccactccccttaagttagcca

SEQ ID NO: 6091580 - DNA, 25 bp, Homo sapien
gacgtgcccagacgcacaccgcagg

SEQ ID NO: 6091581 - DNA, 25 bp, Homo sapien
agttagccactatacatgttcatct

SEQ ID NO: 6091582 - DNA, 25 bp, Homo sapien
actgctcagaggaaataacctcaac

SEQ ID NO: 6091583 - DNA, 25 bp, Homo sapien
gggccaggacagacgccaggcacag

SEQ ID NO: 6091584 - DNA, 25 bp, Homo sapien
ctcccctgcctccccactgtcccct

SEQ ID NO: 6091585 - DNA, 25 bp, Homo sapien
cagggcctggggtccctggaccaca

SEQ ID NO: 6091586 - DNA, 25 bp, Homo sapien
gtacggctcgcgtgggcgggcgggc

SEQ ID NO: 6091587 - DNA, 25 bp, Homo sapien
aacccaaaccctgggcacagtgcct

SEQ ID NO: 6091588 - DNA, 25 bp, Homo sapien
tgggagaggcagactgctcagagga

SEQ ID NO: 6091589 - DNA, 25 bp, Homo sapien
tgaataaattaaacgctcaggctct

SEQ ID NO: 6091590 - DNA, 25 bp, Homo sapien
aaagaacccccatctgcgatgcctg

SEQ ID NO: 6091591 - DNA, 25 bp, Homo sapien
aggctctggccccaccccagctttc

SEQ ID NO: 6091592 - DNA, 25 bp, Homo sapien
agttggcggcgggtacggctcgcgt

SEQ ID NO: 6091593 - DNA, 25 bp, Homo sapien
aggcagactgctcagaggaaataac

SEQ ID NO: 6091594 - DNA, 25 bp, Homo sapien
ccccatctgcgatgcctgcacacac

SEQ ID NO: 6091595 - DNA, 25 bp, Homo sapien
gcgtctctctgcagagtatgctctg

SEQ ID NO: 6091596 - DNA, 25 bp, Homo sapien
gactaagagacctatcatgtgtata

SEQ ID NO: 6091597 - DNA, 25 bp, Homo sapien
gagaatgaagatctctatgcctcca

SEQ ID NO: 6091598 - DNA, 25 bp, Homo sapien
aatgtcaccaaagcaattaagcctg

SEQ ID NO: 6091599 - DNA, 25 bp, Homo sapien
attacatgagaactacaagtggcaa

SEQ ID NO: 6091600 - DNA, 25 bp, Homo sapien
tgtgaccggtctaatgtaaatgaac

SEQ ID NO: 6091601 - DNA, 25 bp, Homo sapien
cacactttcctcatggcgttcttca

SEQ ID NO: 6091602 - DNA, 25 bp, Homo sapien
tgcctgctcataataatggtgtagt
